United States Patent Application Publication US 2003/0104410 A1 - sequence listing, part 3

SEQ ID NO: 79128 - DNA, 25 bp, Homo sapien
tctccttaacggatctctccttggt

SEQ ID NO: 79129 - DNA, 25 bp, Homo sapien
gtcctttaagtttctcacttgtaag

SEQ ID NO: 79130 - DNA, 25 bp, Homo sapien
gtcctttaagttactcacttgtaag

SEQ ID NO: 79131 - DNA, 25 bp, Homo sapien
aagagttttaggtccactactgtta

SEQ ID NO: 79132 - DNA, 25 bp, Homo sapien
aagagttttaggaccactactgtta

SEQ ID NO: 79133 - DNA, 25 bp, Homo sapien
aaggacttttacaaaacttggttct

SEQ ID NO: 79134 - DNA, 25 bp, Homo sapien
aaggacttttactaaacttggttct

SEQ ID NO: 79135 - DNA, 25 bp, Homo sapien
gaaaatgttgtgaagattctcaatt

SEQ ID NO: 79136 - DNA, 25 bp, Homo sapien
gaaaatgttgtgtagattctcaatt

SEQ ID NO: 79137 - DNA, 25 bp, Homo sapien
acgtgtttgagaagtttctgcgctt

SEQ ID NO: 79138 - DNA, 25 bp, Homo sapien
acgtgtttgagatgtttctgcgctt

SEQ ID NO: 79139 - DNA, 25 bp, Homo sapien
tcctttggtaaagtgttctgtcata

SEQ ID NO: 79140 - DNA, 25 bp, Homo sapien
tcctttggtaaactgttctgtcata

SEQ ID NO: 79141 - DNA, 25 bp, Homo sapien
tctggttgtacctggtctgacgaat

SEQ ID NO: 79142 - DNA, 25 bp, Homo sapien
tctggttgtaccaggtctgacgaat

SEQ ID NO: 79143 - DNA, 25 bp, Homo sapien
gacagtactctactctagacgaact

SEQ ID NO: 79144 - DNA, 25 bp, Homo sapien
gacagtactctagtctagacgaact

SEQ ID NO: 79145 - DNA, 25 bp, Homo sapien
gagaagtcgatcgacacggtgaaag

SEQ ID NO: 79146 - DNA, 25 bp, Homo sapien
gagaagtcgatccacacggtgaaag

SEQ ID NO: 79147 - DNA, 25 bp, Homo sapien
tcatttcgaggacgacgtggagaca

SEQ ID NO: 79148 - DNA, 25 bp, Homo sapien
tcatttcgaggaggacgtggagaca

SEQ ID NO: 79149 - DNA, 25 bp, Homo sapien
agtactcttttcacgggtgcgaggg

SEQ ID NO: 79150 - DNA, 25 bp, Homo sapien
agtactcttttctcgggtgcgaggg

SEQ ID NO: 79151 - DNA, 25 bp, Homo sapien
agctctttgtcgaccgaggctggag

SEQ ID NO: 79152 - DNA, 25 bp, Homo sapien
agctctttgtcgtccgaggctggag

SEQ ID NO: 79153 - DNA, 25 bp, Homo sapien
cgggctctgtcgtgccgtaggttca

SEQ ID NO: 79154 - DNA, 25 bp, Homo sapien
cgggctctgtcgagccgtaggttca

SEQ ID NO: 79155 - DNA, 25 bp, Homo sapien
cgcggagtcttcgagaagatccgaa

SEQ ID NO: 79156 - DNA, 25 bp, Homo sapien
cgcggagtcttccagaagatccgaa

SEQ ID NO: 79157 - DNA, 25 bp, Homo sapien
ctttcgttcgatgataaacgcgaac

SEQ ID NO: 79158 - DNA, 25 bp, Homo sapien
ctttcgttcgatcataaacgcgaac

SEQ ID NO: 79159 - DNA, 25 bp, Homo sapien
gcttccgtctgtatctcgttacaga

SEQ ID NO: 79160 - DNA, 25 bp, Homo sapien
gcttccgtctgtttctcgttacaga

SEQ ID NO: 79161 - DNA, 25 bp, Homo sapien
gggaaattgattgtgttcccgtcga

SEQ ID NO: 79162 - DNA, 25 bp, Homo sapien
gggaaattgattctgttcccgtcga

SEQ ID NO: 79163 - DNA, 25 bp, Homo sapien
aaataatactttttgtgacgtcacg

SEQ ID NO: 79164 - DNA, 25 bp, Homo sapien
aaataatactttatgtgacgtcacg

SEQ ID NO: 79165 - DNA, 25 bp, Homo sapien
aaacggtccgtttttcgacgacgtc

SEQ ID NO: 79166 - DNA, 25 bp, Homo sapien
aaacggtccgttattcgacgacgtc

SEQ ID NO: 79167 - DNA, 25 bp, Homo sapien
gacgataaaacgtggaagcctgatc

SEQ ID NO: 79168 - DNA, 25 bp, Homo sapien
gacgataaaacgaggaagcctgatc

SEQ ID NO: 79169 - DNA, 25 bp, Homo sapien
taaacaggtgaaactacataagtac

SEQ ID NO: 79170 - DNA, 25 bp, Homo sapien
taaacaggtgaatctacataagtac

SEQ ID NO: 79171 - DNA, 25 bp, Homo sapien
aagtaaaggcgctcactcttagtag

SEQ ID NO: 79172 - DNA, 25 bp, Homo sapien
aagtaaaggcgcacactcttagtag

SEQ ID NO: 79173 - DNA, 25 bp, Homo sapien
aacttctgagtctgagtcacctttg

SEQ ID NO: 79174 - DNA, 25 bp, Homo sapien
aacttctgagtcagagtcacctttg

SEQ ID NO: 79175 - DNA, 25 bp, Homo sapien
ccaattatatcacaggctcaaagag

SEQ ID NO: 79176 - DNA, 25 bp, Homo sapien
ccaattatatcagaggctcaaagag

SEQ ID NO: 79177 - DNA, 25 bp, Homo sapien
ggatatagtcctaaaagacaaccaa

SEQ ID NO: 79178 - DNA, 25 bp, Homo sapien
ggatatagtccttaaagacaaccaa

SEQ ID NO: 79179 - DNA, 25 bp, Homo sapien
gatggcgtcacactaatagtcacaa

SEQ ID NO: 79180 - DNA, 25 bp, Homo sapien
gatggcgtcacagtaatagtcacaa

SEQ ID NO: 79181 - DNA, 25 bp, Homo sapien
gttgcatatgacgtgtataaccaat

SEQ ID NO: 79182 - DNA, 25 bp, Homo sapien
gttgcatatgacctgtataaccaat

SEQ ID NO: 79183 - DNA, 25 bp, Homo sapien
tactcgaggaaactgaagaccagat

SEQ ID NO: 79184 - DNA, 25 bp, Homo sapien
tactcgaggaaagtgaagaccagat

SEQ ID NO: 79185 - DNA, 25 bp, Homo sapien
ttttcccctaaggtggtgttccgag

SEQ ID NO: 79186 - DNA, 25 bp, Homo sapien
ttttcccctaagctggtgttccgag

SEQ ID NO: 79187 - DNA, 25 bp, Homo sapien
agatccttgtaaaccgtttgttcat

SEQ ID NO: 79188 - DNA, 25 bp, Homo sapien
agatccttgtaatccgtttgttcat

SEQ ID NO: 79189 - DNA, 25 bp, Homo sapien
caactctttggtttcgcataggtcc

SEQ ID NO: 79190 - DNA, 25 bp, Homo sapien
caactctttggtatcgcataggtcc

SEQ ID NO: 79191 - DNA, 25 bp, Homo sapien
cccttgagagtctcgtttgttagtg

SEQ ID NO: 79192 - DNA, 25 bp, Homo sapien
cccttgagagtcacgtttgttagtg

SEQ ID NO: 79193 - DNA, 25 bp, Homo sapien
cacttcaactacacggtcgccatga

SEQ ID NO: 79194 - DNA, 25 bp, Homo sapien
cacttcaactactcggtcgccatga

SEQ ID NO: 79195 - DNA, 25 bp, Homo sapien
cgcaccagtatataagtcgcactgc

SEQ ID NO: 79196 - DNA, 25 bp, Homo sapien
cgcaccagtataaaagtcgcactgc

SEQ ID NO: 79197 - DNA, 25 bp, Homo sapien
cttttgcagtgcgacttatatactg

SEQ ID NO: 79198 - DNA, 25 bp, Homo sapien
cttttgcagtgccacttatatactg

SEQ ID NO: 79199 - DNA, 25 bp, Homo sapien
ttcggtgttcaccacgtttacaaat

SEQ ID NO: 79200 - DNA, 25 bp, Homo sapien
ttcggtgttcacgacgtttacaaat

SEQ ID NO: 79201 - DNA, 25 bp, Homo sapien
ccttcttgatcgtttagtctagaat

SEQ ID NO: 79202 - DNA, 25 bp, Homo sapien
ccttcttgatcgattagtctagaat

SEQ ID NO: 79203 - DNA, 25 bp, Homo sapien
caaattcttttcatctaacactgac

SEQ ID NO: 79204 - DNA, 25 bp, Homo sapien
caaattcttttcttctaacactgac

SEQ ID NO: 79205 - DNA, 25 bp, Homo sapien
tttcacgtgtcttgtcactcccacg

SEQ ID NO: 79206 - DNA, 25 bp, Homo sapien
tttcacgtgtctagtcactcccacg

SEQ ID NO: 79207 - DNA, 25 bp, Homo sapien
ctactgttacttgacggtccgacgt

SEQ ID NO: 79208 - DNA, 25 bp, Homo sapien
ctactgttacttcacggtccgacgt

SEQ ID NO: 79209 - DNA, 25 bp, Homo sapien
gttactgttacttcgtgactatacg

SEQ ID NO: 79210 - DNA, 25 bp, Homo sapien
gttactgttactacgtgactatacg

SEQ ID NO: 79211 - DNA, 25 bp, Homo sapien
ggtgtactacctgtaacgttagtaa

SEQ ID NO: 79212 - DNA, 25 bp, Homo sapien
ggtgtactacctctaacgttagtaa

SEQ ID NO: 79213 - DNA, 25 bp, Homo sapien
cgttgtctagtgatttattctagct

SEQ ID NO: 79214 - DNA, 25 bp, Homo sapien
cgttgtctagtgttttattctagct

SEQ ID NO: 79215 - DNA, 25 bp, Homo sapien
gtctctgttcttgaatctccgtaga

SEQ ID NO: 79216 - DNA, 25 bp, Homo sapien
gtctctgttcttcaatctccgtaga

SEQ ID NO: 79217 - DNA, 25 bp, Homo sapien
agaagttctatgacctacggagagt

SEQ ID NO: 79218 - DNA, 25 bp, Homo sapien
agaagttctatgtcctacggagagt

SEQ ID NO: 79219 - DNA, 25 bp, Homo sapien
gagaaagacacgtcggaccacagaa

SEQ ID NO: 79220 - DNA, 25 bp, Homo sapien
gagaaagacacgacggaccacagaa

SEQ ID NO: 79221 - DNA, 25 bp, Homo sapien
ggaaaaagagacttactctacgaaa

SEQ ID NO: 79222 - DNA, 25 bp, Homo sapien
ggaaaaagagacatactctacgaaa

SEQ ID NO: 79223 - DNA, 25 bp, Homo sapien
acggggacccacttttctacaaagt

SEQ ID NO: 79224 - DNA, 25 bp, Homo sapien
acggggacccacatttctacaaagt

SEQ ID NO: 79225 - DNA, 25 bp, Homo sapien
cttacgagaggcacctttagaagag

SEQ ID NO: 79226 - DNA, 25 bp, Homo sapien
cttacgagaggctcctttagaagag

SEQ ID NO: 79227 - DNA, 25 bp, Homo sapien
ttgagtagagcttacttcatgaacc

SEQ ID NO: 79228 - DNA, 25 bp, Homo sapien
ttgagtagagctaacttcatgaacc

SEQ ID NO: 79229 - DNA, 25 bp, Homo sapien
aggaagacgtcgaccgtgaacgccc

SEQ ID NO: 79230 - DNA, 25 bp, Homo sapien
aggaagacgtcgtccgtgaacgccc

SEQ ID NO: 79231 - DNA, 25 bp, Homo sapien
ggtacgggacgtctccgggacaccc

SEQ ID NO: 79232 - DNA, 25 bp, Homo sapien
ggtacgggacgtgtccgggacaccc

SEQ ID NO: 79233 - DNA, 25 bp, Homo sapien
gtgacgagacggtccgttgaccaca

SEQ ID NO: 79234 - DNA, 25 bp, Homo sapien
gtgacgagacggaccgttgaccaca

SEQ ID NO: 79235 - DNA, 25 bp, Homo sapien
atctgtgccggaatgaggactgtga

SEQ ID NO: 79236 - DNA, 25 bp, Homo sapien
atctgtgccggattgaggactgtga

SEQ ID NO: 79237 - DNA, 25 bp, Homo sapien
cgctattccgggacgtaggtcccga

SEQ ID NO: 79238 - DNA, 25 bp, Homo sapien
cgctattccgggtcgtaggtcccga

SEQ ID NO: 79239 - DNA, 25 bp, Homo sapien
acgcattcacgacatcggggtcgaa

SEQ ID NO: 79240 - DNA, 25 bp, Homo sapien
acgcattcacgagatcggggtcgaa

SEQ ID NO: 79241 - DNA, 25 bp, Homo sapien
gctcgtcccgactgtcgtggtccga

SEQ ID NO: 79242 - DNA, 25 bp, Homo sapien
gctcgtcccgacagtcgtggtccga

SEQ ID NO: 79243 - DNA, 25 bp, Homo sapien
agagaacccgacttccgacgaacac

SEQ ID NO: 79244 - DNA, 25 bp, Homo sapien
agagaacccgacatccgacgaacac

SEQ ID NO: 79245 - DNA, 25 bp, Homo sapien
ggaggtgccacctagtgagtcaccg

SEQ ID NO: 79246 - DNA, 25 bp, Homo sapien
ggaggtgccaccaagtgagtcaccg

SEQ ID NO: 79247 - DNA, 25 bp, Homo sapien
agtcctgaactcctaggaaggacac

SEQ ID NO: 79248 - DNA, 25 bp, Homo sapien
agtcctgaactcgtaggaaggacac

SEQ ID NO: 79249 - DNA, 25 bp, Homo sapien
gtcctgcgatacgtgtgcggtgaat

SEQ ID NO: 79250 - DNA, 25 bp, Homo sapien
gtcctgcgatacctgtgcggtgaat

SEQ ID NO: 79251 - DNA, 25 bp, Homo sapien
tacttacgaaggtgcggtagacgtt

SEQ ID NO: 79252 - DNA, 25 bp, Homo sapien
tacttacgaaggagcggtagacgtt

SEQ ID NO: 79253 - DNA, 25 bp, Homo sapien
cgaccgaccgagtcaccggagacgg

SEQ ID NO: 79254 - DNA, 25 bp, Homo sapien
cgaccgaccgagacaccggagacgg

SEQ ID NO: 79255 - DNA, 25 bp, Homo sapien
accctacgactcaaccaagacgtgt

SEQ ID NO: 79256 - DNA, 25 bp, Homo sapien
accctacgactctaccaagacgtgt

SEQ ID NO: 79257 - DNA, 25 bp, Homo sapien
tctgtgactcacttggtgtgagttt

SEQ ID NO: 79258 - DNA, 25 bp, Homo sapien
tctgtgactcacatggtgtgagttt

SEQ ID NO: 79259 - DNA, 25 bp, Homo sapien
ctttgtattagattctggcgttact

SEQ ID NO: 79260 - DNA, 25 bp, Homo sapien
ctttgtattagaatctggcgttact

SEQ ID NO: 79261 - DNA, 25 bp, Homo sapien
ttagagttcaacattggtcgtatcg

SEQ ID NO: 79262 - DNA, 25 bp, Homo sapien
ttagagttcaactttggtcgtatcg

SEQ ID NO: 79263 - DNA, 25 bp, Homo sapien
tgttgtgtacgtccattcattgact

SEQ ID NO: 79264 - DNA, 25 bp, Homo sapien
tgttgtgtacgtgcattcattgact

SEQ ID NO: 79265 - DNA, 25 bp, Homo sapien
gggtcaccgaggttccttaaggtta

SEQ ID NO: 79266 - DNA, 25 bp, Homo sapien
gggtcaccgaggatccttaaggtta

SEQ ID NO: 79267 - DNA, 25 bp, Homo sapien
gtcccggagcgacctgaacggctcg

SEQ ID NO: 79268 - DNA, 25 bp, Homo sapien
gtcccggagcgagctgaacggctcg

SEQ ID NO: 79269 - DNA, 25 bp, Homo sapien
agacagggcggtcgagacgtaacct

SEQ ID NO: 79270 - DNA, 25 bp, Homo sapien
agacagggcggtggagacgtaacct

SEQ ID NO: 79271 - DNA, 25 bp, Homo sapien
gagaacagggaaggacggaacacta

SEQ ID NO: 79272 - DNA, 25 bp, Homo sapien
gagaacagggaacgacggaacacta

SEQ ID NO: 79273 - DNA, 25 bp, Homo sapien
acacggtttactgctagtgacagta

SEQ ID NO: 79274 - DNA, 25 bp, Homo sapien
acacggtttactcctagtgacagta

SEQ ID NO: 79275 - DNA, 25 bp, Homo sapien
cgcacaggtccagcaggacggcgac

SEQ ID NO: 79276 - DNA, 25 bp, Homo sapien
cgcacaggtccaccaggacggcgac

SEQ ID NO: 79277 - DNA, 25 bp, Homo sapien
aggagtcacactaacgtcggagttc

SEQ ID NO: 79278 - DNA, 25 bp, Homo sapien
aggagtcacacttacgtcggagttc

SEQ ID NO: 79279 - DNA, 25 bp, Homo sapien
atgaactacgactatacgagtgtta

SEQ ID NO: 79280 - DNA, 25 bp, Homo sapien
atgaactacgacaatacgagtgtta

SEQ ID NO: 79281 - DNA, 25 bp, Homo sapien
tcaggacacaactacaccgtcttcg

SEQ ID NO: 79282 - DNA, 25 bp, Homo sapien
tcaggacacaacaacaccgtcttcg

SEQ ID NO: 79283 - DNA, 25 bp, Homo sapien
tagtaaaggaatgagaaccagtctt

SEQ ID NO: 79284 - DNA, 25 bp, Homo sapien
tagtaaaggaatcagaaccagtctt

SEQ ID NO: 79285 - DNA, 25 bp, Homo sapien
ttgaatgttatttgcgtcttgactc

SEQ ID NO: 79286 - DNA, 25 bp, Homo sapien
ttgaatgttattagcgtcttgactc

SEQ ID NO: 79287 - DNA, 25 bp, Homo sapien
aaccgtcttatttggttttgactgt

SEQ ID NO: 79288 - DNA, 25 bp, Homo sapien
aaccgtcttattaggttttgactgt

SEQ ID NO: 79289 - DNA, 25 bp, Homo sapien
gacgtatcaaatatgttatccgaca

SEQ ID NO: 79290 - DNA, 25 bp, Homo sapien
gacgtatcaaatttgttatccgaca

SEQ ID NO: 79291 - DNA, 25 bp, Homo sapien
ggatatatagatttatttactttat

SEQ ID NO: 79292 - DNA, 25 bp, Homo sapien
ggatatatagatatatttactttat

SEQ ID NO: 79293 - DNA, 25 bp, Homo sapien
gatgaatatcatgtcgattcatgta

SEQ ID NO: 79294 - DNA, 25 bp, Homo sapien
gatgaatatcatctcgattcatgta

SEQ ID NO: 79295 - DNA, 25 bp, Homo sapien
tagtaggtttctctcaattatgtac

SEQ ID NO: 79296 - DNA, 25 bp, Homo sapien
tagtaggtttctgtcaattatgtac

SEQ ID NO: 79297 - DNA, 25 bp, Homo sapien
aagggtatatcgtctctaccttggt

SEQ ID NO: 79298 - DNA, 25 bp, Homo sapien
aagggtatatcgactctaccttggt

SEQ ID NO: 79299 - DNA, 25 bp, Homo sapien
aagcttcttaccactaacgtcgaag

SEQ ID NO: 79300 - DNA, 25 bp, Homo sapien
aagcttcttacctctaacgtcgaag

SEQ ID NO: 79301 - DNA, 25 bp, Homo sapien
cacacgtagtaagagtaacaccgaa

SEQ ID NO: 79302 - DNA, 25 bp, Homo sapien
cacacgtagtaacagtaacaccgaa

SEQ ID NO: 79303 - DNA, 25 bp, Homo sapien
ggagcaccctcacaggtaccagaga

SEQ ID NO: 79304 - DNA, 25 bp, Homo sapien
ggagcaccctcagaggtaccagaga

SEQ ID NO: 79305 - DNA, 25 bp, Homo sapien
tgcgccacgtctggtggaccagtaa

SEQ ID NO: 79306 - DNA, 25 bp, Homo sapien
tgcgccacgtctcgtggaccagtaa

SEQ ID NO: 79307 - DNA, 25 bp, Homo sapien
acctcgtcgagtctatgacgataat

SEQ ID NO: 79308 - DNA, 25 bp, Homo sapien
acctcgtcgagtgtatgacgataat

SEQ ID NO: 79309 - DNA, 25 bp, Homo sapien
acgtctctcgacgacaagacgagaa

SEQ ID NO: 79310 - DNA, 25 bp, Homo sapien
acgtctctcgaccacaagacgagaa

SEQ ID NO: 79311 - DNA, 25 bp, Homo sapien
gagtatattcgacaacatctgtaat

SEQ ID NO: 79312 - DNA, 25 bp, Homo sapien
gagtatattcgagaacatctgtaat

SEQ ID NO: 79313 - DNA, 25 bp, Homo sapien
tgtaacaagtaggatcttaacacaa

SEQ ID NO: 79314 - DNA, 25 bp, Homo sapien
tgtaacaagtagcatcttaacacaa

SEQ ID NO: 79315 - DNA, 25 bp, Homo sapien
aaggacgaccggtacggacgaagac

SEQ ID NO: 79316 - DNA, 25 bp, Homo sapien
aaggacgaccggaacggacgaagac

SEQ ID NO: 79317 - DNA, 25 bp, Homo sapien
accagtagagtagagtaccatatga

SEQ ID NO: 79318 - DNA, 25 bp, Homo sapien
accagtagagtacagtaccatatga

SEQ ID NO: 79319 - DNA, 25 bp, Homo sapien
aaaaaagtagaagaccctgagtatc

SEQ ID NO: 79320 - DNA, 25 bp, Homo sapien
aaaaaagtagaacaccctgagtatc

SEQ ID NO: 79321 - DNA, 25 bp, Homo sapien
aggagaaacctaaaactttcgaaag

SEQ ID NO: 79322 - DNA, 25 bp, Homo sapien
aggagaaacctataactttcgaaag

SEQ ID NO: 79323 - DNA, 25 bp, Homo sapien
tccgtgaaccaagagattctacttc

SEQ ID NO: 79324 - DNA, 25 bp, Homo sapien
tccgtgaaccaacagattctacttc

SEQ ID NO: 79325 - DNA, 25 bp, Homo sapien
agaaccggtaatatagtcgttctct

SEQ ID NO: 79326 - DNA, 25 bp, Homo sapien
agaaccggtaatttagtcgttctct

SEQ ID NO: 79327 - DNA, 25 bp, Homo sapien
caggtatacggtgattcgtccatgg

SEQ ID NO: 79328 - DNA, 25 bp, Homo sapien
caggtatacggtcattcgtccatgg

SEQ ID NO: 79329 - DNA, 25 bp, Homo sapien
aagagtaaacctattcctctaagtg

SEQ ID NO: 79330 - DNA, 25 bp, Homo sapien
aagagtaaaccttttcctctaagtg

SEQ ID NO: 79331 - DNA, 25 bp, Homo sapien
caatgtttaagtttgtcatttcacg

SEQ ID NO: 79332 - DNA, 25 bp, Homo sapien
caatgtttaagtatgtcatttcacg

SEQ ID NO: 79333 - DNA, 25 bp, Homo sapien
cggtttagcgtctcgtcactttccg

SEQ ID NO: 79334 - DNA, 25 bp, Homo sapien
cggtttagcgtcacgtcactttccg

SEQ ID NO: 79335 - DNA, 25 bp, Homo sapien
gaatcgtcgtccagtcctcggtgcg

SEQ ID NO: 79336 - DNA, 25 bp, Homo sapien
gaatcgtcgtcctgtcctcggtgcg

SEQ ID NO: 79337 - DNA, 25 bp, Homo sapien
tgtcttgtgatatgtcttacttcga

SEQ ID NO: 79338 - DNA, 25 bp, Homo sapien
tgtcttgtgataagtcttacttcga

SEQ ID NO: 79339 - DNA, 25 bp, Homo sapien
tatgtagtggtaaagcatcttctac

SEQ ID NO: 79340 - DNA, 25 bp, Homo sapien
tatgtagtggtatagcatcttctac

SEQ ID NO: 79341 - DNA, 25 bp, Homo sapien
gacatacgttctactgaataaaacg

SEQ ID NO: 79342 - DNA, 25 bp, Homo sapien
gacatacgttcttctgaataaaacg

SEQ ID NO: 79343 - DNA, 25 bp, Homo sapien
actttgtacgtacagatctaaacga

SEQ ID NO: 79344 - DNA, 25 bp, Homo sapien
actttgtacgtagagatctaaacga

SEQ ID NO: 79345 - DNA, 25 bp, Homo sapien
atcctttctctgttgtgtgattaca

SEQ ID NO: 79346 - DNA, 25 bp, Homo sapien
atcctttctctgatgtgtgattaca

SEQ ID NO: 79347 - DNA, 25 bp, Homo sapien
gtctcggctcttgcagggcctctac

SEQ ID NO: 79348 - DNA, 25 bp, Homo sapien
gtctcggctcttccagggcctctac

SEQ ID NO: 79349 - DNA, 25 bp, Homo sapien
cactcaaccgctcaaggcctagaag

SEQ ID NO: 79350 - DNA, 25 bp, Homo sapien
cactcaaccgctgaaggcctagaag

SEQ ID NO: 79351 - DNA, 25 bp, Homo sapien
cactaggatgcgtccaacgctagaa

SEQ ID NO: 79352 - DNA, 25 bp, Homo sapien
cactaggatgcgaccaacgctagaa

SEQ ID NO: 79353 - DNA, 25 bp, Homo sapien
caagagcgggtcgagacagcgcata

SEQ ID NO: 79354 - DNA, 25 bp, Homo sapien
caagagcgggtccagacagcgcata

SEQ ID NO: 79355 - DNA, 25 bp, Homo sapien
ccgaagaattttcagatggacatat

SEQ ID NO: 79356 - DNA, 25 bp, Homo sapien
ccgaagaattttgagatggacatat

SEQ ID NO: 79357 - DNA, 25 bp, Homo sapien
ggggcatacttgtcctaagaagtat

SEQ ID NO: 79358 - DNA, 25 bp, Homo sapien
ggggcatacttgacctaagaagtat

SEQ ID NO: 79359 - DNA, 25 bp, Homo sapien
caactactgtaacgaacgatcgtag

SEQ ID NO: 79360 - DNA, 25 bp, Homo sapien
caactactgtaaggaacgatcgtag

SEQ ID NO: 79361 - DNA, 25 bp, Homo sapien
tcaccctacgtttactgaaggccta

SEQ ID NO: 79362 - DNA, 25 bp, Homo sapien
tcaccctacgttaactgaaggccta

SEQ ID NO: 79363 - DNA, 25 bp, Homo sapien
aaatgatcaacgtttagacggtaca

SEQ ID NO: 79364 - DNA, 25 bp, Homo sapien
aaatgatcaacgattagacggtaca

SEQ ID NO: 79365 - DNA, 25 bp, Homo sapien
atatcggtactaaagtttatccact

SEQ ID NO: 79366 - DNA, 25 bp, Homo sapien
atatcggtactatagtttatccact

SEQ ID NO: 79367 - DNA, 25 bp, Homo sapien
gtcgtcgtctgagtctatttaagac

SEQ ID NO: 79368 - DNA, 25 bp, Homo sapien
gtcgtcgtctgactctatttaagac

SEQ ID NO: 79369 - DNA, 25 bp, Homo sapien
gaaggagtgcaacttaaaatactcg

SEQ ID NO: 79370 - DNA, 25 bp, Homo sapien
gaaggagtgcaagttaaaatactcg

SEQ ID NO: 79371 - DNA, 25 bp, Homo sapien
ccggagtgtccatatcgacaataca

SEQ ID NO: 79372 - DNA, 25 bp, Homo sapien
ccggagtgtccaaatcgacaataca

SEQ ID NO: 79373 - DNA, 25 bp, Homo sapien
ctgttcaaagtgttaacacgactac

SEQ ID NO: 79374 - DNA, 25 bp, Homo sapien
ctgttcaaagtgataacacgactac

SEQ ID NO: 79375 - DNA, 25 bp, Homo sapien
cccctgtctttagaagtaaccccgt

SEQ ID NO: 79376 - DNA, 25 bp, Homo sapien
cccctgtctttacaagtaaccccgt

SEQ ID NO: 79377 - DNA, 25 bp, Homo sapien
gtctttttgaacaaaactgtcgtgt

SEQ ID NO: 79378 - DNA, 25 bp, Homo sapien
gtctttttgaactaaactgtcgtgt

SEQ ID NO: 79379 - DNA, 25 bp, Homo sapien
cggaatatataggtcctttcttcct

SEQ ID NO: 79380 - DNA, 25 bp, Homo sapien
cggaatatatagctcctttcttcct

SEQ ID NO: 79381 - DNA, 25 bp, Homo sapien
caggtaggagaaactgtttgcccct

SEQ ID NO: 79382 - DNA, 25 bp, Homo sapien
caggtaggagaatctgtttgcccct

SEQ ID NO: 79383 - DNA, 25 bp, Homo sapien
ggtcttgtaagttactcctgaatcc

SEQ ID NO: 79384 - DNA, 25 bp, Homo sapien
ggtcttgtaagtaactcctgaatcc

SEQ ID NO: 79385 - DNA, 25 bp, Homo sapien
gttattgaatctttcgacgaaacta

SEQ ID NO: 79386 - DNA, 25 bp, Homo sapien
gttattgaatctatcgacgaaacta

SEQ ID NO: 79387 - DNA, 25 bp, Homo sapien
gtgtgggtgtcactacgtaaacact

SEQ ID NO: 79388 - DNA, 25 bp, Homo sapien
gtgtgggtgtcagtacgtaaacact

SEQ ID NO: 79389 - DNA, 25 bp, Homo sapien
aatggaaaggagctctcagaaacag

SEQ ID NO: 79390 - DNA, 25 bp, Homo sapien
aatggaaaggaggtctcagaaacag

SEQ ID NO: 79391 - DNA, 25 bp, Homo sapien
aatccaacaagagttccagacgcag

SEQ ID NO: 79392 - DNA, 25 bp, Homo sapien
aatccaacaagacttccagacgcag

SEQ ID NO: 79393 - DNA, 25 bp, Homo sapien
acagacgggaccacgacatagacgg

SEQ ID NO: 79394 - DNA, 25 bp, Homo sapien
acagacgggacctcgacatagacgg

SEQ ID NO: 79395 - DNA, 25 bp, Homo sapien
aaacgagaaccgtcgagacgagtgg

SEQ ID NO: 79396 - DNA, 25 bp, Homo sapien
aaacgagaaccgacgagacgagtgg

SEQ ID NO: 79397 - DNA, 25 bp, Homo sapien
gtccggagacacgacggacagtgtc

SEQ ID NO: 79398 - DNA, 25 bp, Homo sapien
gtccggagacaccacggacagtgtc

SEQ ID NO: 79399 - DNA, 25 bp, Homo sapien
gtgtgtcggttctcaacgaaagact

SEQ ID NO: 79400 - DNA, 25 bp, Homo sapien
gtgtgtcggttcacaacgaaagact

SEQ ID NO: 79401 - DNA, 25 bp, Homo sapien
ttctcttgactcttaaaaacatatt

SEQ ID NO: 79402 - DNA, 25 bp, Homo sapien
ttctcttgactcataaaaacatatt

SEQ ID NO: 79403 - DNA, 25 bp, Homo sapien
tgatcgtctacaagaaagacctatg

SEQ ID NO: 79404 - DNA, 25 bp, Homo sapien
tgatcgtctacatgaaagacctatg

SEQ ID NO: 79405 - DNA, 25 bp, Homo sapien
tctggaccttatcgaagagaccttc

SEQ ID NO: 79406 - DNA, 25 bp, Homo sapien
tctggaccttatggaagagaccttc

SEQ ID NO: 79407 - DNA, 25 bp, Homo sapien
aaacgacagtactcgcaaagagtgc

SEQ ID NO: 79408 - DNA, 25 bp, Homo sapien
aaacgacagtacacgcaaagagtgc

SEQ ID NO: 79409 - DNA, 25 bp, Homo sapien
tcgtacttacaacctttagacgtgg

SEQ ID NO: 79410 - DNA, 25 bp, Homo sapien
tcgtacttacaagctttagacgtgg

SEQ ID NO: 79411 - DNA, 25 bp, Homo sapien
ggaccctcagtcttctatacgtata

SEQ ID NO: 79412 - DNA, 25 bp, Homo sapien
ggaccctcagtcatctatacgtata

SEQ ID NO: 79413 - DNA, 25 bp, Homo sapien
gacacacacacgtatgtacgtgtga

SEQ ID NO: 79414 - DNA, 25 bp, Homo sapien
gacacacacacgaatgtacgtgtga

SEQ ID NO: 79415 - DNA, 25 bp, Homo sapien
gtgagacgaacacgaattcacggac

SEQ ID NO: 79416 - DNA, 25 bp, Homo sapien
gtgagacgaacaggaattcacggac

SEQ ID NO: 79417 - DNA, 25 bp, Homo sapien
gggtagccatctctagtaacagtag

SEQ ID NO: 79418 - DNA, 25 bp, Homo sapien
gggtagccatctgtagtaacagtag

SEQ ID NO: 79419 - DNA, 25 bp, Homo sapien
aaggatcccgtatacatgtttagtg

SEQ ID NO: 79420 - DNA, 25 bp, Homo sapien
aaggatcccgtaaacatgtttagtg

SEQ ID NO: 79421 - DNA, 25 bp, Homo sapien
tatccctccgaccatctagtagtgt

SEQ ID NO: 79422 - DNA, 25 bp, Homo sapien
tatccctccgacgatctagtagtgt

SEQ ID NO: 79423 - DNA, 25 bp, Homo sapien
ggtttgtctattactgaccatatat

SEQ ID NO: 79424 - DNA, 25 bp, Homo sapien
ggtttgtctatttctgaccatatat

SEQ ID NO: 79425 - DNA, 25 bp, Homo sapien
ggtcgacacaacgtcgaaatttaag

SEQ ID NO: 79426 - DNA, 25 bp, Homo sapien
ggtcgacacaacctcgaaatttaag

SEQ ID NO: 79427 - DNA, 25 bp, Homo sapien
gtcaccgtagtctctggaatatgtc

SEQ ID NO: 79428 - DNA, 25 bp, Homo sapien
gtcaccgtagtcactggaatatgtc

SEQ ID NO: 79429 - DNA, 25 bp, Homo sapien
ggtatagacagtttcctttccctcc

SEQ ID NO: 79430 - DNA, 25 bp, Homo sapien
ggtatagacagtatcctttccctcc

SEQ ID NO: 79431 - DNA, 25 bp, Homo sapien
gagtttactatgtcctatttgaccc

SEQ ID NO: 79432 - DNA, 25 bp, Homo sapien
gagtttactatgacctatttgaccc

SEQ ID NO: 79433 - DNA, 25 bp, Homo sapien
attgtagagtaccacaggtagattc

SEQ ID NO: 79434 - DNA, 25 bp, Homo sapien
attgtagagtacgacaggtagattc

SEQ ID NO: 79435 - DNA, 25 bp, Homo sapien
aaaaggtgaaacgataaacagtctc

SEQ ID NO: 79436 - DNA, 25 bp, Homo sapien
aaaaggtgaaaccataaacagtctc

SEQ ID NO: 79437 - DNA, 25 bp, Homo sapien
gtaaaggtaaaacgtttacaatctc

SEQ ID NO: 79438 - DNA, 25 bp, Homo sapien
gtaaaggtaaaaggtttacaatctc

SEQ ID NO: 79439 - DNA, 25 bp, Homo sapien
aacggaaaaggtttacttacttacg

SEQ ID NO: 79440 - DNA, 25 bp, Homo sapien
aacggaaaaggtatacttacttacg

SEQ ID NO: 79441 - DNA, 25 bp, Homo sapien
cccagccgacggtgtccgagtgtag

SEQ ID NO: 79442 - DNA, 25 bp, Homo sapien
cccagccgacggagtccgagtgtag

SEQ ID NO: 79443 - DNA, 25 bp, Homo sapien
cgttcccgggtcttactcgtccgag

SEQ ID NO: 79444 - DNA, 25 bp, Homo sapien
cgttcccgggtcatactcgtccgag

SEQ ID NO: 79445 - DNA, 25 bp, Homo sapien
aaaggggctgaaataagtcaccgtg

SEQ ID NO: 79446 - DNA, 25 bp, Homo sapien
aaaggggctgaattaagtcaccgtg

SEQ ID NO: 79447 - DNA, 25 bp, Homo sapien
gggtccataatcacttttaaacgta

SEQ ID NO: 79448 - DNA, 25 bp, Homo sapien
gggtccataatctcttttaaacgta

SEQ ID NO: 79449 - DNA, 25 bp, Homo sapien
tcatcatggtgtatgaactacgact

SEQ ID NO: 79450 - DNA, 25 bp, Homo sapien
tcatcatggtgtttgaactacgact

SEQ ID NO: 79451 - DNA, 25 bp, Homo sapien
ttgtcgatttgtggtttaggaccac

SEQ ID NO: 79452 - DNA, 25 bp, Homo sapien
ttgtcgatttgtcgtttaggaccac

SEQ ID NO: 79453 - DNA, 25 bp, Homo sapien
tctactgtgtcgtcggttggatctt

SEQ ID NO: 79454 - DNA, 25 bp, Homo sapien
tctactgtgtcgacggttggatctt

SEQ ID NO: 79455 - DNA, 25 bp, Homo sapien
ttcagtgcgaacgtgaccggtaggt

SEQ ID NO: 79456 - DNA, 25 bp, Homo sapien
ttcagtgcgaacctgaccggtaggt

SEQ ID NO: 79457 - DNA, 25 bp, Homo sapien
tttccgtaggactctctcaagatct

SEQ ID NO: 79458 - DNA, 25 bp, Homo sapien
tttccgtaggacactctcaagatct

SEQ ID NO: 79459 - DNA, 25 bp, Homo sapien
tatgtccatgtaagtctgtccaaat

SEQ ID NO: 79460 - DNA, 25 bp, Homo sapien
tatgtccatgtatgtctgtccaaat

SEQ ID NO: 79461 - DNA, 25 bp, Homo sapien
gttgtgactatgttaaaactcaaca

SEQ ID NO: 79462 - DNA, 25 bp, Homo sapien
gttgtgactatgataaaactcaaca

SEQ ID NO: 79463 - DNA, 25 bp, Homo sapien
gttcgcttcacaaaacttcactgag

SEQ ID NO: 79464 - DNA, 25 bp, Homo sapien
gttcgcttcacataacttcactgag

SEQ ID NO: 79465 - DNA, 25 bp, Homo sapien
tgtaagttgtcatcaatcttaccgg

SEQ ID NO: 79466 - DNA, 25 bp, Homo sapien
tgtaagttgtcaacaatcttaccgg

SEQ ID NO: 79467 - DNA, 25 bp, Homo sapien
gttgtgctccagaaatacttagcgg

SEQ ID NO: 79468 - DNA, 25 bp, Homo sapien
gttgtgctccagtaatacttagcgg

SEQ ID NO: 79469 - DNA, 25 bp, Homo sapien
agacgtattagtttccccatcgtgt

SEQ ID NO: 79470 - DNA, 25 bp, Homo sapien
agacgtattagtatccccatcgtgt

SEQ ID NO: 79471 - DNA, 25 bp, Homo sapien
gtaccgtcatcttccggaccatcgg

SEQ ID NO: 79472 - DNA, 25 bp, Homo sapien
gtaccgtcatctaccggaccatcgg

SEQ ID NO: 79473 - DNA, 25 bp, Homo sapien
ttcaccaataagtcagtcatcgacg

SEQ ID NO: 79474 - DNA, 25 bp, Homo sapien
ttcaccaataagacagtcatcgacg

SEQ ID NO: 79475 - DNA, 25 bp, Homo sapien
gtaacatctctctgtcacccctgag

SEQ ID NO: 79476 - DNA, 25 bp, Homo sapien
gtaacatctctcagtcacccctgag

SEQ ID NO: 79477 - DNA, 25 bp, Homo sapien
gtggcatcccattaactaacgaacg

SEQ ID NO: 79478 - DNA, 25 bp, Homo sapien
gtggcatcccataaactaacgaacg

SEQ ID NO: 79479 - DNA, 25 bp, Homo sapien
ccagagacccccataagtttcgaac

SEQ ID NO: 79480 - DNA, 25 bp, Homo sapien
ccagagacccccttaagtttcgaac

SEQ ID NO: 79481 - DNA, 25 bp, Homo sapien
gagtgatactcatcttattttgcac

SEQ ID NO: 79482 - DNA, 25 bp, Homo sapien
gagtgatactcaacttattttgcac

SEQ ID NO: 79483 - DNA, 25 bp, Homo sapien
ttactcagagacgttatctacacag

SEQ ID NO: 79484 - DNA, 25 bp, Homo sapien
ttactcagagaccttatctacacag

SEQ ID NO: 79485 - DNA, 25 bp, Homo sapien
ttgtactctgtgatcccaccgaaca

SEQ ID NO: 79486 - DNA, 25 bp, Homo sapien
ttgtactctgtgttcccaccgaaca

SEQ ID NO: 79487 - DNA, 25 bp, Homo sapien
ttaatgttgtactctactgaacgat

SEQ ID NO: 79488 - DNA, 25 bp, Homo sapien
ttaatgttgtacactactgaacgat

SEQ ID NO: 79489 - DNA, 25 bp, Homo sapien
agacggtaccgcaactacgcgaaca

SEQ ID NO: 79490 - DNA, 25 bp, Homo sapien
agacggtaccgctactacgcgaaca

SEQ ID NO: 79491 - DNA, 25 bp, Homo sapien
actactggtgctcctacggatagtg

SEQ ID NO: 79492 - DNA, 25 bp, Homo sapien
actactggtgctgctacggatagtg

SEQ ID NO: 79493 - DNA, 25 bp, Homo sapien
tcgacgatactgtcactggtcgagg

SEQ ID NO: 79494 - DNA, 25 bp, Homo sapien
tcgacgatactgacactggtcgagg

SEQ ID NO: 79495 - DNA, 25 bp, Homo sapien
gtgtcacatgtagtgacttcggtgg

SEQ ID NO: 79496 - DNA, 25 bp, Homo sapien
gtgtcacatgtactgacttcggtgg

SEQ ID NO: 79497 - DNA, 25 bp, Homo sapien
aggcccgggaacacacgtacaagtg

SEQ ID NO: 79498 - DNA, 25 bp, Homo sapien
aggcccgggaactcacgtacaagtg

SEQ ID NO: 79499 - DNA, 25 bp, Homo sapien
gcggcggtacatcaactaccggagg

SEQ ID NO: 79500 - DNA, 25 bp, Homo sapien
gcggcggtacatgaactaccggagg

SEQ ID NO: 79501 - DNA, 25 bp, Homo sapien
gcacctcttgagtttcaaccccggg

SEQ ID NO: 79502 - DNA, 25 bp, Homo sapien
gcacctcttgagattcaaccccggg

SEQ ID NO: 79503 - DNA, 25 bp, Homo sapien
cccgtttgaagtctgtaccttgtaa

SEQ ID NO: 79504 - DNA, 25 bp, Homo sapien
cccgtttgaagtgtgtaccttgtaa

SEQ ID NO: 79505 - DNA, 25 bp, Homo sapien
ggtaaaacgtcttacgattctgtaa

SEQ ID NO: 79506 - DNA, 25 bp, Homo sapien
ggtaaaacgtctaacgattctgtaa

SEQ ID NO: 79507 - DNA, 25 bp, Homo sapien
ctaattatcacttcattacggtagg

SEQ ID NO: 79508 - DNA, 25 bp, Homo sapien
ctaattatcactacattacggtagg

SEQ ID NO: 79509 - DNA, 25 bp, Homo sapien
atctagagtcgaacggtgagtcgga

SEQ ID NO: 79510 - DNA, 25 bp, Homo sapien
atctagagtcgatcggtgagtcgga

SEQ ID NO: 79511 - DNA, 25 bp, Homo sapien
acgactccattatccgtgtgtgggt

SEQ ID NO: 79512 - DNA, 25 bp, Homo sapien
acgactccattaaccgtgtgtgggt

SEQ ID NO: 79513 - DNA, 25 bp, Homo sapien
accatcacgattacggttgtcccgt

SEQ ID NO: 79514 - DNA, 25 bp, Homo sapien
accatcacgatttcggttgtcccgt

SEQ ID NO: 79515 - DNA, 25 bp, Homo sapien
ccgtggaaacttcgacgaccgtgcc

SEQ ID NO: 79516 - DNA, 25 bp, Homo sapien
ccgtggaaacttggacgaccgtgcc

SEQ ID NO: 79517 - DNA, 25 bp, Homo sapien
gtccaagaacctgagagttcttccc

SEQ ID NO: 79518 - DNA, 25 bp, Homo sapien
gtccaagaacctcagagttcttccc

SEQ ID NO: 79519 - DNA, 25 bp, Homo sapien
cccagaatccgtgaggtttctagac

SEQ ID NO: 79520 - DNA, 25 bp, Homo sapien
cccagaatccgtcaggtttctagac

SEQ ID NO: 79521 - DNA, 25 bp, Homo sapien
aaacggttatatccattttagtgac

SEQ ID NO: 79522 - DNA, 25 bp, Homo sapien
aaacggttatatgcattttagtgac

SEQ ID NO: 79523 - DNA, 25 bp, Homo sapien
tagtatctattccacgatctttggg

SEQ ID NO: 79524 - DNA, 25 bp, Homo sapien
tagtatctattcgacgatctttggg

SEQ ID NO: 79525 - DNA, 25 bp, Homo sapien
aagttcatcgtcatgaatttctatg

SEQ ID NO: 79526 - DNA, 25 bp, Homo sapien
aagttcatcgtcttgaatttctatg

SEQ ID NO: 79527 - DNA, 25 bp, Homo sapien
ttcgtagtccttcgatgtaatgtcg

SEQ ID NO: 79528 - DNA, 25 bp, Homo sapien
ttcgtagtccttggatgtaatgtcg

SEQ ID NO: 79529 - DNA, 25 bp, Homo sapien
aatcgtgtgactagttctcggggtt

SEQ ID NO: 79530 - DNA, 25 bp, Homo sapien
aatcgtgtgacttgttctcggggtt

SEQ ID NO: 79531 - DNA, 25 bp, Homo sapien
aggtgtgtgactcttcacaggctct

SEQ ID NO: 79532 - DNA, 25 bp, Homo sapien
aggtgtgtgactgttcacaggctct

SEQ ID NO: 79533 - DNA, 25 bp, Homo sapien
ttggtaaatgactttcttacttgcc

SEQ ID NO: 79534 - DNA, 25 bp, Homo sapien
ttggtaaatgacattcttacttgcc

SEQ ID NO: 79535 - DNA, 25 bp, Homo sapien
ctgatacaggtcatttgtattgaca

SEQ ID NO: 79536 - DNA, 25 bp, Homo sapien
ctgatacaggtcttttgtattgaca

SEQ ID NO: 79537 - DNA, 25 bp, Homo sapien
tttaaagtgggttcagtcttgtacc

SEQ ID NO: 79538 - DNA, 25 bp, Homo sapien
tttaaagtgggtacagtcttgtacc

SEQ ID NO: 79539 - DNA, 25 bp, Homo sapien
atgtgtccaatggtcacagcttgaa

SEQ ID NO: 79540 - DNA, 25 bp, Homo sapien
atgtgtccaatgctcacagcttgaa

SEQ ID NO: 79541 - DNA, 25 bp, Homo sapien
cataggggaatgtccgtcctgtccc

SEQ ID NO: 79542 - DNA, 25 bp, Homo sapien
cataggggaatgaccgtcctgtccc

SEQ ID NO: 79543 - DNA, 25 bp, Homo sapien
gtgtgaggaacgaccacggtagccc

SEQ ID NO: 79544 - DNA, 25 bp, Homo sapien
gtgtgaggaacgtccacggtagccc

SEQ ID NO: 79545 - DNA, 25 bp, Homo sapien
agtggttggagataccattgacttc

SEQ ID NO: 79546 - DNA, 25 bp, Homo sapien
agtggttggagaaaccattgacttc

SEQ ID NO: 79547 - DNA, 25 bp, Homo sapien
gttttcttgtaaagcaatcgacttc

SEQ ID NO: 79548 - DNA, 25 bp, Homo sapien
gttttcttgtaatgcaatcgacttc

SEQ ID NO: 79549 - DNA, 25 bp, Homo sapien
agtttagttgaagttcatgtcttcc

SEQ ID NO: 79550 - DNA, 25 bp, Homo sapien
agtttagttgaacttcatgtcttcc

SEQ ID NO: 79551 - DNA, 25 bp, Homo sapien
ttggggtcgtggttcgttacctccc

SEQ ID NO: 79552 - DNA, 25 bp, Homo sapien
ttggggtcgtggatcgttacctccc

SEQ ID NO: 79553 - DNA, 25 bp, Homo sapien
tttgacggtctggtagaacaatcca

SEQ ID NO: 79554 - DNA, 25 bp, Homo sapien
tttgacggtctgctagaacaatcca

SEQ ID NO: 79555 - DNA, 25 bp, Homo sapien
gagacgtaccgctaagtcccggact

SEQ ID NO: 79556 - DNA, 25 bp, Homo sapien
gagacgtaccgcaaagtcccggact

SEQ ID NO: 79557 - DNA, 25 bp, Homo sapien
gtaactcgtcgcactactggacagc

SEQ ID NO: 79558 - DNA, 25 bp, Homo sapien
gtaactcgtcgctctactggacagc

SEQ ID NO: 79559 - DNA, 25 bp, Homo sapien
gagggtgacgtgcttcaggagcacc

SEQ ID NO: 79560 - DNA, 25 bp, Homo sapien
gagggtgacgtggttcaggagcacc

SEQ ID NO: 79561 - DNA, 25 bp, Homo sapien
atcgtgtcagggattccgtcttctt

SEQ ID NO: 79562 - DNA, 25 bp, Homo sapien
atcgtgtcagggtttccgtcttctt

SEQ ID NO: 79563 - DNA, 25 bp, Homo sapien
tgagggactgggatagacaacccga

SEQ ID NO: 79564 - DNA, 25 bp, Homo sapien
tgagggactgggttagacaacccga

SEQ ID NO: 79565 - DNA, 25 bp, Homo sapien
gatccataagtgagtacagaccaga

SEQ ID NO: 79566 - DNA, 25 bp, Homo sapien
gatccataagtgtgtacagaccaga

SEQ ID NO: 79567 - DNA, 25 bp, Homo sapien
cggtagaccaaatccccggaatgtg

SEQ ID NO: 79568 - DNA, 25 bp, Homo sapien
cggtagaccaaaaccccggaatgtg

SEQ ID NO: 79569 - DNA, 25 bp, Homo sapien
ggacccataacttcccaaccgtgag

SEQ ID NO: 79570 - DNA, 25 bp, Homo sapien
ggacccataactacccaaccgtgag

SEQ ID NO: 79571 - DNA, 25 bp, Homo sapien
gagcctaagtcgacccgagggtccg

SEQ ID NO: 79572 - DNA, 25 bp, Homo sapien
gagcctaagtcgtcccgagggtccg

SEQ ID NO: 79573 - DNA, 25 bp, Homo sapien
agacatgagaccaggcggtagaccc

SEQ ID NO: 79574 - DNA, 25 bp, Homo sapien
agacatgagacctggcggtagaccc

SEQ ID NO: 79575 - DNA, 25 bp, Homo sapien
gaatctttcccgtagacttcagaag

SEQ ID NO: 79576 - DNA, 25 bp, Homo sapien
gaatctttcccgaagacttcagaag

SEQ ID NO: 79577 - DNA, 25 bp, Homo sapien
gcttgtgtttccaaaacttcaagag

SEQ ID NO: 79578 - DNA, 25 bp, Homo sapien
gcttgtgtttcctaaacttcaagag

SEQ ID NO: 79579 - DNA, 25 bp, Homo sapien
cagtttttaggtgtacttcaactat

SEQ ID NO: 79580 - DNA, 25 bp, Homo sapien
cagtttttaggtctacttcaactat

SEQ ID NO: 79581 - DNA, 25 bp, Homo sapien
agtatctaaagttccgtggtaactt

SEQ ID NO: 79582 - DNA, 25 bp, Homo sapien
agtatctaaagtaccgtggtaactt

SEQ ID NO: 79583 - DNA, 25 bp, Homo sapien
agtagttacaaatcgcgtactcttc

SEQ ID NO: 79584 - DNA, 25 bp, Homo sapien
agtagttacaaaacgcgtactcttc

SEQ ID NO: 79585 - DNA, 25 bp, Homo sapien
catgtatgacgaggaacaactcttt

SEQ ID NO: 79586 - DNA, 25 bp, Homo sapien
catgtatgacgacgaacaactcttt

SEQ ID NO: 79587 - DNA, 25 bp, Homo sapien
tctagacgttagaggcactacaaga

SEQ ID NO: 79588 - DNA, 25 bp, Homo sapien
tctagacgttagtggcactacaaga

SEQ ID NO: 79589 - DNA, 25 bp, Homo sapien
acgtttcggtgttctacgatacaga

SEQ ID NO: 79590 - DNA, 25 bp, Homo sapien
acgtttcggtgtactacgatacaga

SEQ ID NO: 79591 - DNA, 25 bp, Homo sapien
tagaaaattggttggaagagtctta

SEQ ID NO: 79592 - DNA, 25 bp, Homo sapien
tagaaaattggtaggaagagtctta

SEQ ID NO: 79593 - DNA, 25 bp, Homo sapien
tcccggtatcgtgacttgaggaata

SEQ ID NO: 79594 - DNA, 25 bp, Homo sapien
tcccggtatcgtcacttgaggaata

SEQ ID NO: 79595 - DNA, 25 bp, Homo sapien
agcacgggtgacttattgttgaaac

SEQ ID NO: 79596 - DNA, 25 bp, Homo sapien
agcacgggtgacatattgttgaaac

SEQ ID NO: 79597 - DNA, 25 bp, Homo sapien
ccctcctggtctctgtggtgcttct

SEQ ID NO: 79598 - DNA, 25 bp, Homo sapien
ccctcctggtctgtgtggtgcttct

SEQ ID NO: 79599 - DNA, 25 bp, Homo sapien
cactccgaggatgttaggctgtctt

SEQ ID NO: 79600 - DNA, 25 bp, Homo sapien
cactccgaggatcttaggctgtctt

SEQ ID NO: 79601 - DNA, 25 bp, Homo sapien
tgaaagtacaatctctagatctttg

SEQ ID NO: 79602 - DNA, 25 bp, Homo sapien
tgaaagtacaatgtctagatctttg

SEQ ID NO: 79603 - DNA, 25 bp, Homo sapien
tgctcaaatagtccttcattgtggt

SEQ ID NO: 79604 - DNA, 25 bp, Homo sapien
tgctcaaatagtgcttcattgtggt

SEQ ID NO: 79605 - DNA, 25 bp, Homo sapien
tgtccatcagaaatctccgaagttt

SEQ ID NO: 79606 - DNA, 25 bp, Homo sapien
tgtccatcagaattctccgaagttt

SEQ ID NO: 79607 - DNA, 25 bp, Homo sapien
ctcagagacaggatcctccaggctc

SEQ ID NO: 79608 - DNA, 25 bp, Homo sapien
ctcagagacaggttcctccaggctc

SEQ ID NO: 79609 - DNA, 25 bp, Homo sapien
gaactagagtctctcctagtgtacc

SEQ ID NO: 79610 - DNA, 25 bp, Homo sapien
gaactagagtctgtcctagtgtacc

SEQ ID NO: 79611 - DNA, 25 bp, Homo sapien
taaaatagaggtttctctaatcacg

SEQ ID NO: 79612 - DNA, 25 bp, Homo sapien
taaaatagaggtatctctaatcacg

SEQ ID NO: 79613 - DNA, 25 bp, Homo sapien
tttgaaaaggagaaatctacctctg

SEQ ID NO: 79614 - DNA, 25 bp, Homo sapien
tttgaaaaggagtaatctacctctg

SEQ ID NO: 79615 - DNA, 25 bp, Homo sapien
gtaaagaaaccgaatgtcctctctg

SEQ ID NO: 79616 - DNA, 25 bp, Homo sapien
gtaaagaaaccgtatgtcctctctg

SEQ ID NO: 79617 - DNA, 25 bp, Homo sapien
acaaactgatcattaggaccactgt

SEQ ID NO: 79618 - DNA, 25 bp, Homo sapien
acaaactgatcaataggaccactgt

SEQ ID NO: 79619 - DNA, 25 bp, Homo sapien
ttacatacacaggaaatcccgagtg

SEQ ID NO: 79620 - DNA, 25 bp, Homo sapien
ttacatacacagcaaatcccgagtg

SEQ ID NO: 79621 - DNA, 25 bp, Homo sapien
ggaagcacccacttagtcttgagta

SEQ ID NO: 79622 - DNA, 25 bp, Homo sapien
ggaagcacccacatagtcttgagta

SEQ ID NO: 79623 - DNA, 25 bp, Homo sapien
gaggcactacatatagtctttacac

SEQ ID NO: 79624 - DNA, 25 bp, Homo sapien
gaggcactacatttagtctttacac

SEQ ID NO: 79625 - DNA, 25 bp, Homo sapien
tggatcggtacttttatatgttcac

SEQ ID NO: 79626 - DNA, 25 bp, Homo sapien
tggatcggtactattatatgttcac

SEQ ID NO: 79627 - DNA, 25 bp, Homo sapien
tatggggtgacaagtcactttgaca

SEQ ID NO: 79628 - DNA, 25 bp, Homo sapien
tatggggtgacatgtcactttgaca

SEQ ID NO: 79629 - DNA, 25 bp, Homo sapien
tctttaggtaaatgtcacacagggc

SEQ ID NO: 79630 - DNA, 25 bp, Homo sapien
tctttaggtaaaagtcacacagggc

SEQ ID NO: 79631 - DNA, 25 bp, Homo sapien
gttcggggttcattagcaggtagtc

SEQ ID NO: 79632 - DNA, 25 bp, Homo sapien
gttcggggttcaatagcaggtagtc

SEQ ID NO: 79633 - DNA, 25 bp, Homo sapien
actggagtatgaggaccagtgctac

SEQ ID NO: 79634 - DNA, 25 bp, Homo sapien
actggagtatgacgaccagtgctac

SEQ ID NO: 79635 - DNA, 25 bp, Homo sapien
tgagtttacatgttaaacacggttc

SEQ ID NO: 79636 - DNA, 25 bp, Homo sapien
tgagtttacatgataaacacggttc

SEQ ID NO: 79637 - DNA, 25 bp, Homo sapien
tggaccttcataacttacaacataa

SEQ ID NO: 79638 - DNA, 25 bp, Homo sapien
tggaccttcatatcttacaacataa

SEQ ID NO: 79639 - DNA, 25 bp, Homo sapien
gatatacttcgcaggacacaacccc

SEQ ID NO: 79640 - DNA, 25 bp, Homo sapien
gatatacttcgctggacacaacccc

SEQ ID NO: 79641 - DNA, 25 bp, Homo sapien
gctcaacatcggtgacggagggtcc

SEQ ID NO: 79642 - DNA, 25 bp, Homo sapien
gctcaacatcggagacggagggtcc

SEQ ID NO: 79643 - DNA, 25 bp, Homo sapien
tcccaacttctgtcagggctcggtc

SEQ ID NO: 79644 - DNA, 25 bp, Homo sapien
tcccaacttctgacagggctcggtc

SEQ ID NO: 79645 - DNA, 25 bp, Homo sapien
ggtctctacggtcaccgggtccgaa

SEQ ID NO: 79646 - DNA, 25 bp, Homo sapien
ggtctctacggtgaccgggtccgaa

SEQ ID NO: 79647 - DNA, 25 bp, Homo sapien
ggtcgtcgtctctcctcgggttgga

SEQ ID NO: 79648 - DNA, 25 bp, Homo sapien
ggtcgtcgtctcacctcgggttgga

SEQ ID NO: 79649 - DNA, 25 bp, Homo sapien
actgacctacactcggtcgggatac

SEQ ID NO: 79650 - DNA, 25 bp, Homo sapien
actgacctacacacggtcgggatac

SEQ ID NO: 79651 - DNA, 25 bp, Homo sapien
acggtccgacacgtctgagtgaata

SEQ ID NO: 79652 - DNA, 25 bp, Homo sapien
acggtccgacacctctgagtgaata

SEQ ID NO: 79653 - DNA, 25 bp, Homo sapien
aggactcgccgtactgattgtagta

SEQ ID NO: 79654 - DNA, 25 bp, Homo sapien
aggactcgccgttctgattgtagta

SEQ ID NO: 79655 - DNA, 25 bp, Homo sapien
ataggaggacagaccgactattgta

SEQ ID NO: 79656 - DNA, 25 bp, Homo sapien
ataggaggacagtccgactattgta

SEQ ID NO: 79657 - DNA, 25 bp, Homo sapien
cgagttagaaggagttcccttgtgg

SEQ ID NO: 79658 - DNA, 25 bp, Homo sapien
cgagttagaaggtgttcccttgtgg

SEQ ID NO: 79659 - DNA, 25 bp, Homo sapien
acacaactatgctggtccatccggg

SEQ ID NO: 79660 - DNA, 25 bp, Homo sapien
acacaactatgcaggtccatccggg

SEQ ID NO: 79661 - DNA, 25 bp, Homo sapien
tcgaagtgtgtgtttcctctggact

SEQ ID NO: 79662 - DNA, 25 bp, Homo sapien
tcgaagtgtgtgattcctctggact

SEQ ID NO: 79663 - DNA, 25 bp, Homo sapien
acaaacaggtgatccttccttgtga

SEQ ID NO: 79664 - DNA, 25 bp, Homo sapien
acaaacaggtgaaccttccttgtga

SEQ ID NO: 79665 - DNA, 25 bp, Homo sapien
agggacggtcagagcttttccgtga

SEQ ID NO: 79666 - DNA, 25 bp, Homo sapien
agggacggtcagtgcttttccgtga

SEQ ID NO: 79667 - DNA, 25 bp, Homo sapien
gggcgccactcgtgctatgcccgga

SEQ ID NO: 79668 - DNA, 25 bp, Homo sapien
gggcgccactcgagctatgcccgga

SEQ ID NO: 79669 - DNA, 25 bp, Homo sapien
ccttactttgtcttcgtagcccgta

SEQ ID NO: 79670 - DNA, 25 bp, Homo sapien
ccttactttgtcatcgtagcccgta

SEQ ID NO: 79671 - DNA, 25 bp, Homo sapien
tagactctcacctagtcgccgtaca

SEQ ID NO: 79672 - DNA, 25 bp, Homo sapien
tagactctcaccaagtcgccgtaca

SEQ ID NO: 79673 - DNA, 25 bp, Homo sapien
tacctctgacccagtagacctacag

SEQ ID NO: 79674 - DNA, 25 bp, Homo sapien
tacctctgaccctgtagacctacag

SEQ ID NO: 79675 - DNA, 25 bp, Homo sapien
caatctgtccccagatacgaacgat

SEQ ID NO: 79676 - DNA, 25 bp, Homo sapien
caatctgtcccctgatacgaacgat

SEQ ID NO: 79677 - DNA, 25 bp, Homo sapien
gggtgaagttttaccttccgtccac

SEQ ID NO: 79678 - DNA, 25 bp, Homo sapien
gggtgaagtttttccttccgtccac

SEQ ID NO: 79679 - DNA, 25 bp, Homo sapien
ctagaagatgatctactctcccaca

SEQ ID NO: 79680 - DNA, 25 bp, Homo sapien
ctagaagatgatgtactctcccaca

SEQ ID NO: 79681 - DNA, 25 bp, Homo sapien
tagtccctgcggaccgttcctaggt

SEQ ID NO: 79682 - DNA, 25 bp, Homo sapien
tagtccctgcggtccgttcctaggt

SEQ ID NO: 79683 - DNA, 25 bp, Homo sapien
agatccggtcaggagccgtccctgg

SEQ ID NO: 79684 - DNA, 25 bp, Homo sapien
agatccggtcagcagccgtccctgg

SEQ ID NO: 79685 - DNA, 25 bp, Homo sapien
aaccgggccggtcctgacctgtcgt

SEQ ID NO: 79686 - DNA, 25 bp, Homo sapien
aaccgggccggtgctgacctgtcgt

SEQ ID NO: 79687 - DNA, 25 bp, Homo sapien
ccggtacgccttcaggagcggtccc

SEQ ID NO: 79688 - DNA, 25 bp, Homo sapien
ccggtacgccttgaggagcggtccc

SEQ ID NO: 79689 - DNA, 25 bp, Homo sapien
cggtccctatcaggtatgtcacacc

SEQ ID NO: 79690 - DNA, 25 bp, Homo sapien
cggtccctatcacgtatgtcacacc

SEQ ID NO: 79691 - DNA, 25 bp, Homo sapien
cactactcgcatttcgatcccggac

SEQ ID NO: 79692 - DNA, 25 bp, Homo sapien
cactactcgcatatcgatcccggac

SEQ ID NO: 79693 - DNA, 25 bp, Homo sapien
ggaacttggaccacgcgaccggccg

SEQ ID NO: 79694 - DNA, 25 bp, Homo sapien
ggaacttggacctcgcgaccggccg

SEQ ID NO: 79695 - DNA, 25 bp, Homo sapien
agtttgtcgtgtgtctggcagacgc

SEQ ID NO: 79696 - DNA, 25 bp, Homo sapien
agtttgtcgtgtctctggcagacgc

SEQ ID NO: 79697 - DNA, 25 bp, Homo sapien
tttagattagcgatgtttccagaac

SEQ ID NO: 79698 - DNA, 25 bp, Homo sapien
tttagattagcgttgtttccagaac

SEQ ID NO: 79699 - DNA, 25 bp, Homo sapien
ttaataatgatatcgatcaatacac

SEQ ID NO: 79700 - DNA, 25 bp, Homo sapien
ttaataatgataacgatcaatacac

SEQ ID NO: 79701 - DNA, 25 bp, Homo sapien
gtactgtgacgaaaactggaatctt

SEQ ID NO: 79702 - DNA, 25 bp, Homo sapien
gtactgtgacgataactggaatctt

SEQ ID NO: 79703 - DNA, 25 bp, Homo sapien
tctcgtcaccgaacccgaggagcag

SEQ ID NO: 79704 - DNA, 25 bp, Homo sapien
tctcgtcaccgatcccgaggagcag

SEQ ID NO: 79705 - DNA, 25 bp, Homo sapien
aagacgttgaagagcccttcgaaac

SEQ ID NO: 79706 - DNA, 25 bp, Homo sapien
aagacgttgaagtgcccttcgaaac

SEQ ID NO: 79707 - DNA, 25 bp, Homo sapien
gacgttgatgtgtcaccaccaatac

SEQ ID NO: 79708 - DNA, 25 bp, Homo sapien
gacgttgatgtgacaccaccaatac

SEQ ID NO: 79709 - DNA, 25 bp, Homo sapien
aacttcttcagttcgaccgtcatga

SEQ ID NO: 79710 - DNA, 25 bp, Homo sapien
aacttcttcagtacgaccgtcatga

SEQ ID NO: 79711 - DNA, 25 bp, Homo sapien
tagtcgcgtacgagcgttactagta

SEQ ID NO: 79712 - DNA, 25 bp, Homo sapien
tagtcgcgtacgtgcgttactagta

SEQ ID NO: 79713 - DNA, 25 bp, Homo sapien
gaaacagtccgactcgtcgtatcaa

SEQ ID NO: 79714 - DNA, 25 bp, Homo sapien
gaaacagtccgagtcgtcgtatcaa

SEQ ID NO: 79715 - DNA, 25 bp, Homo sapien
acactagagaataaccgggatctca

SEQ ID NO: 79716 - DNA, 25 bp, Homo sapien
acactagagaattaccgggatctca

SEQ ID NO: 79717 - DNA, 25 bp, Homo sapien
gccctaacttcttcggtgggccgtc

SEQ ID NO: 79718 - DNA, 25 bp, Homo sapien
gccctaacttctacggtgggccgtc

SEQ ID NO: 79719 - DNA, 25 bp, Homo sapien
gccagtactttgtcggtgcgttcgc

SEQ ID NO: 79720 - DNA, 25 bp, Homo sapien
gccagtactttgacggtgcgttcgc

SEQ ID NO: 79721 - DNA, 25 bp, Homo sapien
cgtccacagtgtcgagagtcggtcc

SEQ ID NO: 79722 - DNA, 25 bp, Homo sapien
cgtccacagtgtggagagtcggtcc

SEQ ID NO: 79723 - DNA, 25 bp, Homo sapien
cttacaccagtttggtactgggtat

SEQ ID NO: 79724 - DNA, 25 bp, Homo sapien
cttacaccagttaggtactgggtat

SEQ ID NO: 79725 - DNA, 25 bp, Homo sapien
tccgatcgtaggaaatacctatgtt

SEQ ID NO: 79726 - DNA, 25 bp, Homo sapien
tccgatcgtaggtaatacctatgtt

SEQ ID NO: 79727 - DNA, 25 bp, Homo sapien
atcaccgtcggtgtactcgcatgat

SEQ ID NO: 79728 - DNA, 25 bp, Homo sapien
atcaccgtcggtctactcgcatgat

SEQ ID NO: 79729 - DNA, 25 bp, Homo sapien
tcccactgtcggacgttccatcggt

SEQ ID NO: 79730 - DNA, 25 bp, Homo sapien
tcccactgtcggtcgttccatcggt

SEQ ID NO: 79731 - DNA, 25 bp, Homo sapien
acctcttgtggtgtcactacttagg

SEQ ID NO: 79732 - DNA, 25 bp, Homo sapien
acctcttgtggtctcactacttagg

SEQ ID NO: 79733 - DNA, 25 bp, Homo sapien
ctgaaattttggtcaccgtatttgt

SEQ ID NO: 79734 - DNA, 25 bp, Homo sapien
ctgaaattttggacaccgtatttgt

SEQ ID NO: 79735 - DNA, 25 bp, Homo sapien
aaagatcttgtcaaacccggtgttt

SEQ ID NO: 79736 - DNA, 25 bp, Homo sapien
aaagatcttgtctaacccggtgttt

SEQ ID NO: 79737 - DNA, 25 bp, Homo sapien
ggaacattttcgtgacttttacatt

SEQ ID NO: 79738 - DNA, 25 bp, Homo sapien
ggaacattttcgagacttttacatt

SEQ ID NO: 79739 - DNA, 25 bp, Homo sapien
ccaggtaatcggagtttctgtcctt

SEQ ID NO: 79740 - DNA, 25 bp, Homo sapien
ccaggtaatcggtgtttctgtcctt

SEQ ID NO: 79741 - DNA, 25 bp, Homo sapien
tcctttcggaaaagttcatgcactt

SEQ ID NO: 79742 - DNA, 25 bp, Homo sapien
tcctttcggaaatgttcatgcactt

SEQ ID NO: 79743 - DNA, 25 bp, Homo sapien
cgttcggttgtccatttgtacgaat

SEQ ID NO: 79744 - DNA, 25 bp, Homo sapien
cgttcggttgtcgatttgtacgaat

SEQ ID NO: 79745 - DNA, 25 bp, Homo sapien
ttgatatctctaagactgtcgaact

SEQ ID NO: 79746 - DNA, 25 bp, Homo sapien
ttgatatctctatgactgtcgaact

SEQ ID NO: 79747 - DNA, 25 bp, Homo sapien
gaagtgatcggtgagatgcacacgt

SEQ ID NO: 79748 - DNA, 25 bp, Homo sapien
gaagtgatcggtcagatgcacacgt

SEQ ID NO: 79749 - DNA, 25 bp, Homo sapien
tcgacgatgagtcacggtcgacaag

SEQ ID NO: 79750 - DNA, 25 bp, Homo sapien
tcgacgatgagtgacggtcgacaag

SEQ ID NO: 79751 - DNA, 25 bp, Homo sapien
gtcttattccgaactggtgtcgggg

SEQ ID NO: 79752 - DNA, 25 bp, Homo sapien
gtcttattccgatctggtgtcgggg

SEQ ID NO: 79753 - DNA, 25 bp, Homo sapien
agtcttttcggactctgtgtatggg

SEQ ID NO: 79754 - DNA, 25 bp, Homo sapien
agtcttttcggagtctgtgtatggg

SEQ ID NO: 79755 - DNA, 25 bp, Homo sapien
aggtgctttgctgtgtcgagttcga

SEQ ID NO: 79756 - DNA, 25 bp, Homo sapien
aggtgctttgctctgtcgagttcga

SEQ ID NO: 79757 - DNA, 25 bp, Homo sapien
aggtggtcttcgacgggtacccaga

SEQ ID NO: 79758 - DNA, 25 bp, Homo sapien
aggtggtcttcgtcgggtacccaga

SEQ ID NO: 79759 - DNA, 25 bp, Homo sapien
tgtttcgttagagataaccacaact

SEQ ID NO: 79760 - DNA, 25 bp, Homo sapien
tgtttcgttagacataaccacaact

SEQ ID NO: 79761 - DNA, 25 bp, Homo sapien
ggcttccagagtatcacgtctcaga

SEQ ID NO: 79762 - DNA, 25 bp, Homo sapien
ggcttccagagtttcacgtctcaga

SEQ ID NO: 79763 - DNA, 25 bp, Homo sapien
tacccttgacatgttccgtctccga

SEQ ID NO: 79764 - DNA, 25 bp, Homo sapien
tacccttgacatcttccgtctccga

SEQ ID NO: 79765 - DNA, 25 bp, Homo sapien
gacatatatactttgtttgtcgcac

SEQ ID NO: 79766 - DNA, 25 bp, Homo sapien
gacatatatactatgtttgtcgcac

SEQ ID NO: 79767 - DNA, 25 bp, Homo sapien
atagatccgtcttcctctacgcgac

SEQ ID NO: 79768 - DNA, 25 bp, Homo sapien
atagatccgtctacctctacgcgac

SEQ ID NO: 79769 - DNA, 25 bp, Homo sapien
agacagaagaagtggcccctgctct

SEQ ID NO: 79770 - DNA, 25 bp, Homo sapien
agacagaagaagaggcccctgctct

SEQ ID NO: 79771 - DNA, 25 bp, Homo sapien
aaaaagacagggaatactcaatgtc

SEQ ID NO: 79772 - DNA, 25 bp, Homo sapien
aaaaagacagggtatactcaatgtc

SEQ ID NO: 79773 - DNA, 25 bp, Homo sapien
aataaagctcggtactcctatatag

SEQ ID NO: 79774 - DNA, 25 bp, Homo sapien
aataaagctcggaactcctatatag

SEQ ID NO: 79775 - DNA, 25 bp, Homo sapien
aacgtgttacgagtgatccatttag

SEQ ID NO: 79776 - DNA, 25 bp, Homo sapien
aacgtgttacgactgatccatttag

SEQ ID NO: 79777 - DNA, 25 bp, Homo sapien
gagatgttatcacttgccacatgag

SEQ ID NO: 79778 - DNA, 25 bp, Homo sapien
gagatgttatcagttgccacatgag

SEQ ID NO: 79779 - DNA, 25 bp, Homo sapien
cagaatattgctagaagaacccaga

SEQ ID NO: 79780 - DNA, 25 bp, Homo sapien
cagaatattgcttgaagaacccaga

SEQ ID NO: 79781 - DNA, 25 bp, Homo sapien
gatgggtcggtaggacaatcacata

SEQ ID NO: 79782 - DNA, 25 bp, Homo sapien
gatgggtcggtacgacaatcacata

SEQ ID NO: 79783 - DNA, 25 bp, Homo sapien
gttgcagtatgaaggtaagtccctg

SEQ ID NO: 79784 - DNA, 25 bp, Homo sapien
gttgcagtatgatggtaagtccctg

SEQ ID NO: 79785 - DNA, 25 bp, Homo sapien
ctaccggtgaaaaggtaaaccatac

SEQ ID NO: 79786 - DNA, 25 bp, Homo sapien
ctaccggtgaaatggtaaaccatac

SEQ ID NO: 79787 - DNA, 25 bp, Homo sapien
tttcccgacaacgagtatgttctgg

SEQ ID NO: 79788 - DNA, 25 bp, Homo sapien
tttcccgacaaccagtatgttctgg

SEQ ID NO: 79789 - DNA, 25 bp, Homo sapien
agagtcaatgaaacggtctatttca

SEQ ID NO: 79790 - DNA, 25 bp, Homo sapien
agagtcaatgaatcggtctatttca

SEQ ID NO: 79791 - DNA, 25 bp, Homo sapien
actcgattcgagtccgacaaggtcc

SEQ ID NO: 79792 - DNA, 25 bp, Homo sapien
actcgattcgagaccgacaaggtcc

SEQ ID NO: 79793 - DNA, 25 bp, Homo sapien
ccttgagagtctcgtttgttagtgt

SEQ ID NO: 79794 - DNA, 25 bp, Homo sapien
ccttgagagtctggtttgttagtgt

SEQ ID NO: 79795 - DNA, 25 bp, Homo sapien
tattcgaccactaccgtgccttgac

SEQ ID NO: 79796 - DNA, 25 bp, Homo sapien
tattcgaccacttccgtgccttgac

SEQ ID NO: 79797 - DNA, 25 bp, Homo sapien
cactcgcaccagtatataagtcgca

SEQ ID NO: 79798 - DNA, 25 bp, Homo sapien
cactcgcaccagaatataagtcgca

SEQ ID NO: 79799 - DNA, 25 bp, Homo sapien
tttgcagtgcgacttatatactggt

SEQ ID NO: 79800 - DNA, 25 bp, Homo sapien
tttgcagtgcgagttatatactggt

SEQ ID NO: 79801 - DNA, 25 bp, Homo sapien
attcagtttaaccagtttcgaagag

SEQ ID NO: 79802 - DNA, 25 bp, Homo sapien
attcagtttaacgagtttcgaagag

SEQ ID NO: 79803 - DNA, 25 bp, Homo sapien
ctagtgttagatcatctgacgaaat

SEQ ID NO: 79804 - DNA, 25 bp, Homo sapien
ctagtgttagatgatctgacgaaat

SEQ ID NO: 79805 - DNA, 25 bp, Homo sapien
tcaaattcttttcatctaacactga

SEQ ID NO: 79806 - DNA, 25 bp, Homo sapien
tcaaattcttttgatctaacactga

SEQ ID NO: 79807 - DNA, 25 bp, Homo sapien
cttctctggtcttgtcctctgcacg

SEQ ID NO: 79808 - DNA, 25 bp, Homo sapien
cttctctggtctagtcctctgcacg

SEQ ID NO: 79809 - DNA, 25 bp, Homo sapien
gattgtgcatgtgacttcgcgacgt

SEQ ID NO: 79810 - DNA, 25 bp, Homo sapien
gattgtgcatgtcacttcgcgacgt

SEQ ID NO: 79811 - DNA, 25 bp, Homo sapien
agtagtcgattatacttacgtaacg

SEQ ID NO: 79812 - DNA, 25 bp, Homo sapien
agtagtcgattaaacttacgtaacg

SEQ ID NO: 79813 - DNA, 25 bp, Homo sapien
cgggtcacctgaacagtgtacgtaa

SEQ ID NO: 79814 - DNA, 25 bp, Homo sapien
cgggtcacctgatcagtgtacgtaa

SEQ ID NO: 79815 - DNA, 25 bp, Homo sapien
acgttgtctagtgatttattctagc

SEQ ID NO: 79816 - DNA, 25 bp, Homo sapien
acgttgtctagtcatttattctagc

SEQ ID NO: 79817 - DNA, 25 bp, Homo sapien
gtcctcttcgtcgtcattctctaga

SEQ ID NO: 79818 - DNA, 25 bp, Homo sapien
gtcctcttcgtcctcattctctaga

SEQ ID NO: 79819 - DNA, 25 bp, Homo sapien
gacccgttcttcaccgtctaagacg

SEQ ID NO: 79820 - DNA, 25 bp, Homo sapien
gacccgttcttctccgtctaagacg

SEQ ID NO: 79821 - DNA, 25 bp, Homo sapien
tagaacacgctgtccgacctctgaa

SEQ ID NO: 79822 - DNA, 25 bp, Homo sapien
tagaacacgctgaccgacctctgaa

SEQ ID NO: 79823 - DNA, 25 bp, Homo sapien
gaaaaagagacttactctacgaaat

SEQ ID NO: 79824 - DNA, 25 bp, Homo sapien
gaaaaagagactaactctacgaaat

SEQ ID NO: 79825 - DNA, 25 bp, Homo sapien
aggggaccgtccttcccgacaaagt

SEQ ID NO: 79826 - DNA, 25 bp, Homo sapien
aggggaccgtccatcccgacaaagt

SEQ ID NO: 79827 - DNA, 25 bp, Homo sapien
cccggtaggtccagtcttgagagaa

SEQ ID NO: 79828 - DNA, 25 bp, Homo sapien
cccggtaggtcctgtcttgagagaa

SEQ ID NO: 79829 - DNA, 25 bp, Homo sapien
cgtagacggcgtccttcatgaaccg

SEQ ID NO: 79830 - DNA, 25 bp, Homo sapien
cgtagacggcgtgcttcatgaaccg

SEQ ID NO: 79831 - DNA, 25 bp, Homo sapien
cgaagacgtcgaacgggaggacctc

SEQ ID NO: 79832 - DNA, 25 bp, Homo sapien
cgaagacgtcgatcgggaggacctc

SEQ ID NO: 79833 - DNA, 25 bp, Homo sapien
agggtcgagggtctccacggcaccc

SEQ ID NO: 79834 - DNA, 25 bp, Homo sapien
agggtcgagggtgtccacggcaccc

SEQ ID NO: 79835 - DNA, 25 bp, Homo sapien
ggtagtcgagggtctattgacccac

SEQ ID NO: 79836 - DNA, 25 bp, Homo sapien
ggtagtcgagggactattgacccac

SEQ ID NO: 79837 - DNA, 25 bp, Homo sapien
ttaggactcgggacggtgacttgac

SEQ ID NO: 79838 - DNA, 25 bp, Homo sapien
ttaggactcgggtcggtgacttgac

SEQ ID NO: 79839 - DNA, 25 bp, Homo sapien
tgtctgcccgggacgcgtgactcca

SEQ ID NO: 79840 - DNA, 25 bp, Homo sapien
tgtctgcccgggtcgcgtgactcca

SEQ ID NO: 79841 - DNA, 25 bp, Homo sapien
gacgcaatccggactgggactcgga

SEQ ID NO: 79842 - DNA, 25 bp, Homo sapien
gacgcaatccggtctgggactcgga

SEQ ID NO: 79843 - DNA, 25 bp, Homo sapien
gtctctcccgtctgtcgtcaggaga

SEQ ID NO: 79844 - DNA, 25 bp, Homo sapien
gtctctcccgtcagtcgtcaggaga

SEQ ID NO: 79845 - DNA, 25 bp, Homo sapien
gaggaccccgtctgtcgcagcaacg

SEQ ID NO: 79846 - DNA, 25 bp, Homo sapien
gaggaccccgtcagtcgcagcaacg

SEQ ID NO: 79847 - DNA, 25 bp, Homo sapien
gaggaggacccaccttgtcagtccc

SEQ ID NO: 79848 - DNA, 25 bp, Homo sapien
gaggaggacccagcttgtcagtccc

SEQ ID NO: 79849 - DNA, 25 bp, Homo sapien
gagttcggaacacactgtcaggacc

SEQ ID NO: 79850 - DNA, 25 bp, Homo sapien
gagttcggaacagactgtcaggacc

SEQ ID NO: 79851 - DNA, 25 bp, Homo sapien
gttcaggatactggtctcagtgaga

SEQ ID NO: 79852 - DNA, 25 bp, Homo sapien
gttcaggatactcgtctcagtgaga

SEQ ID NO: 79853 - DNA, 25 bp, Homo sapien
ggactaagaattctcggtagacgta

SEQ ID NO: 79854 - DNA, 25 bp, Homo sapien
ggactaagaattgtcggtagacgta

SEQ ID NO: 79855 - DNA, 25 bp, Homo sapien
ccgactagaaggatacccggaggtg

SEQ ID NO: 79856 - DNA, 25 bp, Homo sapien
ccgactagaaggttacccggaggtg

SEQ ID NO: 79857 - DNA, 25 bp, Homo sapien
aacttacactctaaccgagaggtag

SEQ ID NO: 79858 - DNA, 25 bp, Homo sapien
aacttacactcttaccgagaggtag

SEQ ID NO: 79859 - DNA, 25 bp, Homo sapien
cgttatgacaacttggtgtcagttt

SEQ ID NO: 79860 - DNA, 25 bp, Homo sapien
cgttatgacaacatggtgtcagttt

SEQ ID NO: 79861 - DNA, 25 bp, Homo sapien
gtttacgataaatgtctggacgttc

SEQ ID NO: 79862 - DNA, 25 bp, Homo sapien
gtttacgataaaagtctggacgttc

SEQ ID NO: 79863 - DNA, 25 bp, Homo sapien
gtcagtgttcattattcggtgatcg

SEQ ID NO: 79864 - DNA, 25 bp, Homo sapien
gtcagtgttcataattcggtgatcg

SEQ ID NO: 79865 - DNA, 25 bp, Homo sapien
tgtatgtgttcaatatcatcgtcat

SEQ ID NO: 79866 - DNA, 25 bp, Homo sapien
tgtatgtgttcattatcatcgtcat

SEQ ID NO: 79867 - DNA, 25 bp, Homo sapien
tcaccggtgttcaataacgtgtctc

SEQ ID NO: 79868 - DNA, 25 bp, Homo sapien
tcaccggtgttctataacgtgtctc

SEQ ID NO: 79869 - DNA, 25 bp, Homo sapien
tcctggagtagtcgagaacggtctg

SEQ ID NO: 79870 - DNA, 25 bp, Homo sapien
tcctggagtagtggagaacggtctg

SEQ ID NO: 79871 - DNA, 25 bp, Homo sapien
ccagggacgaccagagacgagactt

SEQ ID NO: 79872 - DNA, 25 bp, Homo sapien
ccagggacgacctgagacgagactt

SEQ ID NO: 79873 - DNA, 25 bp, Homo sapien
gagaccaggtcgacgcagtggaaca

SEQ ID NO: 79874 - DNA, 25 bp, Homo sapien
gagaccaggtcgtcgcagtggaaca

SEQ ID NO: 79875 - DNA, 25 bp, Homo sapien
aaacaggtttacgtgtgtagacacc

SEQ ID NO: 79876 - DNA, 25 bp, Homo sapien
aaacaggtttacctgtgtagacacc

SEQ ID NO: 79877 - DNA, 25 bp, Homo sapien
cgcacagcccgagctagttcggcgg

SEQ ID NO: 79878 - DNA, 25 bp, Homo sapien
cgcacagcccgacctagttcggcgg

SEQ ID NO: 79879 - DNA, 25 bp, Homo sapien
aggagtcacactaacgtcggagttc

SEQ ID NO: 79880 - DNA, 25 bp, Homo sapien
aggagtcacacttacgtcggagttc

SEQ ID NO: 79881 - DNA, 25 bp, Homo sapien
ggaaatctaccgttataccgtttac

SEQ ID NO: 79882 - DNA, 25 bp, Homo sapien
ggaaatctaccgatataccgtttac

SEQ ID NO: 79883 - DNA, 25 bp, Homo sapien
ggtgacagcactgcaacccgtcttc

SEQ ID NO: 79884 - DNA, 25 bp, Homo sapien
ggtgacagcactccaacccgtcttc

SEQ ID NO: 79885 - DNA, 25 bp, Homo sapien
agagagaggaatgagaacctgtcac

SEQ ID NO: 79886 - DNA, 25 bp, Homo sapien
agagagaggaatcagaacctgtcac

SEQ ID NO: 79887 - DNA, 25 bp, Homo sapien
agaagtttaccttggtcttcgagtc

SEQ ID NO: 79888 - DNA, 25 bp, Homo sapien
agaagtttacctaggtcttcgagtc

SEQ ID NO: 79889 - DNA, 25 bp, Homo sapien
aaaatcctctctttgatttgagtgt

SEQ ID NO: 79890 - DNA, 25 bp, Homo sapien
aaaatcctctctatgatttgagtgt

SEQ ID NO: 79891 - DNA, 25 bp, Homo sapien
gacttcgaaccaatgttttgtacta

SEQ ID NO: 79892 - DNA, 25 bp, Homo sapien
gacttcgaaccattgttttgtacta

SEQ ID NO: 79893 - DNA, 25 bp, Homo sapien
gattctacggtcttattcttgttac

SEQ ID NO: 79894 - DNA, 25 bp, Homo sapien
gattctacggtcatattcttgttac

SEQ ID NO: 79895 - DNA, 25 bp, Homo sapien
gtgtattatcatctgtgtctcatta

SEQ ID NO: 79896 - DNA, 25 bp, Homo sapien
gtgtattatcatgtgtgtctcatta

SEQ ID NO: 79897 - DNA, 25 bp, Homo sapien
tgtatgttgtctctttaccatgtag

SEQ ID NO: 79898 - DNA, 25 bp, Homo sapien
tgtatgttgtctgtttaccatgtag

SEQ ID NO: 79899 - DNA, 25 bp, Homo sapien
atgatatactcttttcacgttgacg

SEQ ID NO: 79900 - DNA, 25 bp, Homo sapien
atgatatactctattcacgttgacg

SEQ ID NO: 79901 - DNA, 25 bp, Homo sapien
ccatcctttcacactgacgtgtgag

SEQ ID NO: 79902 - DNA, 25 bp, Homo sapien
ccatcctttcactctgacgtgtgag

SEQ ID NO: 79903 - DNA, 25 bp, Homo sapien
accgtacgtttcgttacaccggagt

SEQ ID NO: 79904 - DNA, 25 bp, Homo sapien
accgtacgtttccttacaccggagt

SEQ ID NO: 79905 - DNA, 25 bp, Homo sapien
gacacctctcagtggtccaggtacg

SEQ ID NO: 79906 - DNA, 25 bp, Homo sapien
gacacctctcagaggtccaggtacg

SEQ ID NO: 79907 - DNA, 25 bp, Homo sapien
taaccccgtcttgagaactcagaga

SEQ ID NO: 79908 - DNA, 25 bp, Homo sapien
taaccccgtcttcagaactcagaga

SEQ ID NO: 79909 - DNA, 25 bp, Homo sapien
ctccccgtcggtgtgagacgataga

SEQ ID NO: 79910 - DNA, 25 bp, Homo sapien
ctccccgtcggtctgagacgataga

SEQ ID NO: 79911 - DNA, 25 bp, Homo sapien
acctgtcgacacgtgagacgaacac

SEQ ID NO: 79912 - DNA, 25 bp, Homo sapien
acctgtcgacacctgagacgaacac

SEQ ID NO: 79913 - DNA, 25 bp, Homo sapien
cggtatttcgtacaacgtggttaat

SEQ ID NO: 79914 - DNA, 25 bp, Homo sapien
cggtatttcgtagaacgtggttaat

SEQ ID NO: 79915 - DNA, 25 bp, Homo sapien
gtaactaataactcttcagacaacg

SEQ ID NO: 79916 - DNA, 25 bp, Homo sapien
gtaactaataacacttcagacaacg

SEQ ID NO: 79917 - DNA, 25 bp, Homo sapien
ggaacgtgatacgaatacaacaaga

SEQ ID NO: 79918 - DNA, 25 bp, Homo sapien
ggaacgtgataccaatacaacaaga

SEQ ID NO: 79919 - DNA, 25 bp, Homo sapien
actcacgaggaggagtacggattga

SEQ ID NO: 79920 - DNA, 25 bp, Homo sapien
actcacgaggagcagtacggattga

SEQ ID NO: 79921 - DNA, 25 bp, Homo sapien
aacaggtagagagacgcctagagga

SEQ ID NO: 79922 - DNA, 25 bp, Homo sapien
aacaggtagagacacgcctagagga

SEQ ID NO: 79923 - DNA, 25 bp, Homo sapien
agaagacctacgaaatctctgaagc

SEQ ID NO: 79924 - DNA, 25 bp, Homo sapien
agaagacctacgtaatctctgaagc

SEQ ID NO: 79925 - DNA, 25 bp, Homo sapien
cccggaaccacagagactctgaggc

SEQ ID NO: 79926 - DNA, 25 bp, Homo sapien
cccggaaccacacagactctgaggc

SEQ ID NO: 79927 - DNA, 25 bp, Homo sapien
gacccggtacctttgtcgtcgtctc

SEQ ID NO: 79928 - DNA, 25 bp, Homo sapien
gacccggtacctatgtcgtcgtctc

SEQ ID NO: 79929 - DNA, 25 bp, Homo sapien
agactagtaggtcttttctatcgtt

SEQ ID NO: 79930 - DNA, 25 bp, Homo sapien
agactagtaggtgttttctatcgtt

SEQ ID NO: 79931 - DNA, 25 bp, Homo sapien
agagtaaacctattcctctaagtgt

SEQ ID NO: 79932 - DNA, 25 bp, Homo sapien
agagtaaacctaatcctctaagtgt

SEQ ID NO: 79933 - DNA, 25 bp, Homo sapien
caatgtgtaaatgactccatttccg

SEQ ID NO: 79934 - DNA, 25 bp, Homo sapien
caatgtgtaaatcactccatttccg

SEQ ID NO: 79935 - DNA, 25 bp, Homo sapien
gtcagtatttcctcgtcaccttccg

SEQ ID NO: 79936 - DNA, 25 bp, Homo sapien
gtcagtatttccacgtcaccttccg

SEQ ID NO: 79937 - DNA, 25 bp, Homo sapien
cgacatcgtcggtgtctccagtgcg

SEQ ID NO: 79938 - DNA, 25 bp, Homo sapien
cgacatcgtcggagtctccagtgcg

SEQ ID NO: 79939 - DNA, 25 bp, Homo sapien
cgtttcgtaggtggtcttctccgag

SEQ ID NO: 79940 - DNA, 25 bp, Homo sapien
cgtttcgtaggtcgtcttctccgag

SEQ ID NO: 79941 - DNA, 25 bp, Homo sapien
gttttggagttagcagctgtcgtac

SEQ ID NO: 79942 - DNA, 25 bp, Homo sapien
gttttggagttaccagctgtcgtac

SEQ ID NO: 79943 - DNA, 25 bp, Homo sapien
acatgttatctctgcagtacaaacg

SEQ ID NO: 79944 - DNA, 25 bp, Homo sapien
acatgttatctcagcagtacaaacg

SEQ ID NO: 79945 - DNA, 25 bp, Homo sapien
gacttgtaagtactaattacaacag

SEQ ID NO: 79946 - DNA, 25 bp, Homo sapien
gacttgtaagtagtaattacaacag

SEQ ID NO: 79947 - DNA, 25 bp, Homo sapien
cagtttctctagaggtgatctctag

SEQ ID NO: 79948 - DNA, 25 bp, Homo sapien
cagtttctctagtggtgatctctag

SEQ ID NO: 79949 - DNA, 25 bp, Homo sapien
tgtctcggctcttgcagggcctcta

SEQ ID NO: 79950 - DNA, 25 bp, Homo sapien
tgtctcggctctagcagggcctcta

SEQ ID NO: 79951 - DNA, 25 bp, Homo sapien
ctccaaccgactccaggttcataag

SEQ ID NO: 79952 - DNA, 25 bp, Homo sapien
ctccaaccgactgcaggttcataag

SEQ ID NO: 79953 - DNA, 25 bp, Homo sapien
cctaccaccggttcattagctagaa

SEQ ID NO: 79954 - DNA, 25 bp, Homo sapien
cctaccaccggtacattagctagaa

SEQ ID NO: 79955 - DNA, 25 bp, Homo sapien
cctaggcgggtaaggaatcgtacaa

SEQ ID NO: 79956 - DNA, 25 bp, Homo sapien
cctaggcgggtatggaatcgtacaa

SEQ ID NO: 79957 - DNA, 25 bp, Homo sapien
cgaagaatacttctaagggtcatat

SEQ ID NO: 79958 - DNA, 25 bp, Homo sapien
cgaagaatacttgtaagggtcatat

SEQ ID NO: 79959 - DNA, 25 bp, Homo sapien
aaggacatacttgtcccggtcagat

SEQ ID NO: 79960 - DNA, 25 bp, Homo sapien
aaggacatacttctcccggtcagat

SEQ ID NO: 79961 - DNA, 25 bp, Homo sapien
gtcagacttgtctgggtgttcgagt

SEQ ID NO: 79962 - DNA, 25 bp, Homo sapien
gtcagacttgtcagggtgttcgagt

SEQ ID NO: 79963 - DNA, 25 bp, Homo sapien
caccctacgtttactgaaggcctag

SEQ ID NO: 79964 - DNA, 25 bp, Homo sapien
caccctacgttttctgaaggcctag

SEQ ID NO: 79965 - DNA, 25 bp, Homo sapien
aaatcattaagtctacgacgttcag

SEQ ID NO: 79966 - DNA, 25 bp, Homo sapien
aaatcattaagtgtacgacgttcag

SEQ ID NO: 79967 - DNA, 25 bp, Homo sapien
aaataacgaatatagttcacgtcca

SEQ ID NO: 79968 - DNA, 25 bp, Homo sapien
aaataacgaataaagttcacgtcca

SEQ ID NO: 79969 - DNA, 25 bp, Homo sapien
aagtggtctaaaggatctcttagac

SEQ ID NO: 79970 - DNA, 25 bp, Homo sapien
aagtggtctaaacgatctcttagac

SEQ ID NO: 79971 - DNA, 25 bp, Homo sapien
agaaggtcaacatctaaccttatcg

SEQ ID NO: 79972 - DNA, 25 bp, Homo sapien
agaaggtcaacaactaaccttatcg

SEQ ID NO: 79973 - DNA, 25 bp, Homo sapien
atcaggtcacacaagtcaaatacag

SEQ ID NO: 79974 - DNA, 25 bp, Homo sapien
atcaggtcacactagtcaaatacag

SEQ ID NO: 79975 - DNA, 25 bp, Homo sapien
ggttctacatctctaacgacacacg

SEQ ID NO: 79976 - DNA, 25 bp, Homo sapien
ggttctacatctgtaacgacacacg

SEQ ID NO: 79977 - DNA, 25 bp, Homo sapien
ccccggttacttctaggagaacccg

SEQ ID NO: 79978 - DNA, 25 bp, Homo sapien
ccccggttacttgtaggagaacccg

SEQ ID NO: 79979 - DNA, 25 bp, Homo sapien
gtttgattgaacataaacgactcgg

SEQ ID NO: 79980 - DNA, 25 bp, Homo sapien
gtttgattgaacttaaacgactcgg

SEQ ID NO: 79981 - DNA, 25 bp, Homo sapien
aggtatataaagtcactgttcttcc

SEQ ID NO: 79982 - DNA, 25 bp, Homo sapien
aggtatataaagacactgttcttcc

SEQ ID NO: 79983 - DNA, 25 bp, Homo sapien
cagggaggaagttgttgtatcctcc

SEQ ID NO: 79984 - DNA, 25 bp, Homo sapien
cagggaggaagtagttgtatcctcc

SEQ ID NO: 79985 - DNA, 25 bp, Homo sapien
ggtcttgtcgagtttcataatatcc

SEQ ID NO: 79986 - DNA, 25 bp, Homo sapien
ggtcttgtcgagattcataatatcc

SEQ ID NO: 79987 - DNA, 25 bp, Homo sapien
gtttctgaaatttgtcgacaactat

SEQ ID NO: 79988 - DNA, 25 bp, Homo sapien
gtttctgaaattagtcgacaactat

SEQ ID NO: 79989 - DNA, 25 bp, Homo sapien
acgtgggtgtcgaagtgtaacactt

SEQ ID NO: 79990 - DNA, 25 bp, Homo sapien
acgtgggtgtcgtagtgtaacactt

SEQ ID NO: 79991 - DNA, 25 bp, Homo sapien
tggaagagggcgagtcgacactacc

SEQ ID NO: 79992 - DNA, 25 bp, Homo sapien
tggaagagggcgtgtcgacactacc

SEQ ID NO: 79993 - DNA, 25 bp, Homo sapien
agaacggtagtaggttctcaaccag

SEQ ID NO: 79994 - DNA, 25 bp, Homo sapien
agaacggtagtacgttctcaaccag

SEQ ID NO: 79995 - DNA, 25 bp, Homo sapien
acagaagtgacctgcaccagtacgg

SEQ ID NO: 79996 - DNA, 25 bp, Homo sapien
acagaagtgaccagcaccagtacgg

SEQ ID NO: 79997 - DNA, 25 bp, Homo sapien
acaccggaaccgtcggtcagacgtg

SEQ ID NO: 79998 - DNA, 25 bp, Homo sapien
acaccggaaccgacggtcagacgtg

SEQ ID NO: 79999 - DNA, 25 bp, Homo sapien
acgtctcggaacgtcaggaccggtc

SEQ ID NO: 80000 - DNA, 25 bp, Homo sapien
acgtctcggaacctcaggaccggtc

SEQ ID NO: 80001 - DNA, 25 bp, Homo sapien
gtcttcgtgttcgtacaagacagga

SEQ ID NO: 80002 - DNA, 25 bp, Homo sapien
gtcttcgtgttcctacaagacagga

SEQ ID NO: 80003 - DNA, 25 bp, Homo sapien
gtccttgttgtacctaaagacaaat

SEQ ID NO: 80004 - DNA, 25 bp, Homo sapien
gtccttgttgtagctaaagacaaat

SEQ ID NO: 80005 - DNA, 25 bp, Homo sapien
tcgtatgtataacacagacaccatg

SEQ ID NO: 80006 - DNA, 25 bp, Homo sapien
tcgtatgtataagacagacaccatg

SEQ ID NO: 80007 - DNA, 25 bp, Homo sapien
cttgtacttatttgcagaaacttgt

SEQ ID NO: 80008 - DNA, 25 bp, Homo sapien
cttgtacttattagcagaaacttgt

SEQ ID NO: 80009 - DNA, 25 bp, Homo sapien
aaacgacagtactcgcaaagagtgc

SEQ ID NO: 80010 - DNA, 25 bp, Homo sapien
aaacgacagtacacgcaaagagtgc

SEQ ID NO: 80011 - DNA, 25 bp, Homo sapien
gaaaaagacacagcttctagagtgg

SEQ ID NO: 80012 - DNA, 25 bp, Homo sapien
gaaaaagacacaccttctagagtgg

SEQ ID NO: 80013 - DNA, 25 bp, Homo sapien
gactaacctcaatgtcttagtatag

SEQ ID NO: 80014 - DNA, 25 bp, Homo sapien
gactaacctcaaagtcttagtatag

SEQ ID NO: 80015 - DNA, 25 bp, Homo sapien
cgaacacagcacaatcacggtagag

SEQ ID NO: 80016 - DNA, 25 bp, Homo sapien
cgaacacagcactatcacggtagag

SEQ ID NO: 80017 - DNA, 25 bp, Homo sapien
tgggagaccacgttcaattctggac

SEQ ID NO: 80018 - DNA, 25 bp, Homo sapien
tgggagaccacgatcaattctggac

SEQ ID NO: 80019 - DNA, 25 bp, Homo sapien
gggacccatactctccacgtacgta

SEQ ID NO: 80020 - DNA, 25 bp, Homo sapien
gggacccatactgtccacgtacgta

SEQ ID NO: 80021 - DNA, 25 bp, Homo sapien
gtcggtccctatgatggttctagtg

SEQ ID NO: 80022 - DNA, 25 bp, Homo sapien
gtcggtccctatcatggttctagtg

SEQ ID NO: 80023 - DNA, 25 bp, Homo sapien
ctttccctctgattacgttacagtg

SEQ ID NO: 80024 - DNA, 25 bp, Homo sapien
ctttccctctgaatacgttacagtg

SEQ ID NO: 80025 - DNA, 25 bp, Homo sapien
gggtttctcttctgacttaacataa

SEQ ID NO: 80026 - DNA, 25 bp, Homo sapien
gggtttctcttcagacttaacataa

SEQ ID NO: 80027 - DNA, 25 bp, Homo sapien
agtggtcgaacaacttcaatttaaa

SEQ ID NO: 80028 - DNA, 25 bp, Homo sapien
agtggtcgaacatcttcaatttaaa

SEQ ID NO: 80029 - DNA, 25 bp, Homo sapien
gtggtcaacagtcttgcaaatgtac

SEQ ID NO: 80030 - DNA, 25 bp, Homo sapien
gtggtcaacagtgttgcaaatgtac

SEQ ID NO: 80031 - DNA, 25 bp, Homo sapien
tacgtgatatagttttttcaactgc

SEQ ID NO: 80032 - DNA, 25 bp, Homo sapien
tacgtgatatagatttttcaactgc

SEQ ID NO: 80033 - DNA, 25 bp, Homo sapien
agttaagtacagtattttctgatcc

SEQ ID NO: 80034 - DNA, 25 bp, Homo sapien
agttaagtacagaattttctgatcc

SEQ ID NO: 80035 - DNA, 25 bp, Homo sapien
cactatagatcgtcatcgtgatctc

SEQ ID NO: 80036 - DNA, 25 bp, Homo sapien
cactatagatcgacatcgtgatctc

SEQ ID NO: 80037 - DNA, 25 bp, Homo sapien
aaaaggtaggaacaagtgcagcgtc

SEQ ID NO: 80038 - DNA, 25 bp, Homo sapien
aaaaggtaggaagaagtgcagcgtc

SEQ ID NO: 80039 - DNA, 25 bp, Homo sapien
gggaaagggaaacgtaaaacaccac

SEQ ID NO: 80040 - DNA, 25 bp, Homo sapien
gggaaagggaaaggtaaaacaccac

SEQ ID NO: 80041 - DNA, 25 bp, Homo sapien
aacagaaaaggtgagacgtccttcg

SEQ ID NO: 80042 - DNA, 25 bp, Homo sapien
aacagaaaaggtcagacgtccttcg

SEQ ID NO: 80043 - DNA, 25 bp, Homo sapien
cgcaaaccgaagtagtccacgtggt

SEQ ID NO: 80044 - DNA, 25 bp, Homo sapien
cgcaaaccgaagaagtccacgtggt

SEQ ID NO: 80045 - DNA, 25 bp, Homo sapien
cactcccgaggtgtacttctgtcgt

SEQ ID NO: 80046 - DNA, 25 bp, Homo sapien
cactcccgaggtctacttctgtcgt

SEQ ID NO: 80047 - DNA, 25 bp, Homo sapien
gataggtgaagtacacttactcgtg

SEQ ID NO: 80048 - DNA, 25 bp, Homo sapien
gataggtgaagttcacttactcgtg

SEQ ID NO: 80049 - DNA, 25 bp, Homo sapien
tggaccaaatgaactttcacaccga

SEQ ID NO: 80050 - DNA, 25 bp, Homo sapien
tggaccaaatgatctttcacaccga

SEQ ID NO: 80051 - DNA, 25 bp, Homo sapien
gaccagtcatgtctattgaactgac

SEQ ID NO: 80052 - DNA, 25 bp, Homo sapien
gaccagtcatgtgtattgaactgac

SEQ ID NO: 80053 - DNA, 25 bp, Homo sapien
tggaagtgtttcgtttgtgtaccac

SEQ ID NO: 80054 - DNA, 25 bp, Homo sapien
tggaagtgtttcctttgtgtaccac

SEQ ID NO: 80055 - DNA, 25 bp, Homo sapien
ttcgacgaggtctcggttgtgcctt

SEQ ID NO: 80056 - DNA, 25 bp, Homo sapien
ttcgacgaggtcacggttgtgcctt

SEQ ID NO: 80057 - DNA, 25 bp, Homo sapien
tttctcagggaaggttccggagtgt

SEQ ID NO: 80058 - DNA, 25 bp, Homo sapien
tttctcagggaacgttccggagtgt

SEQ ID NO: 80059 - DNA, 25 bp, Homo sapien
tagttcagggactccgtctaagagc

SEQ ID NO: 80060 - DNA, 25 bp, Homo sapien
tagttcagggacaccgtctaagagc

SEQ ID NO: 80061 - DNA, 25 bp, Homo sapien
atatgtccatgtaagtctgtccaaa

SEQ ID NO: 80062 - DNA, 25 bp, Homo sapien
atatgtccatgttagtctgtccaaa

SEQ ID NO: 80063 - DNA, 25 bp, Homo sapien
tcgtcgacatagaggagaccaacag

SEQ ID NO: 80064 - DNA, 25 bp, Homo sapien
tcgtcgacatagtggagaccaacag

SEQ ID NO: 80065 - DNA, 25 bp, Homo sapien
gtctccacctaatgaactgtcaaga

SEQ ID NO: 80066 - DNA, 25 bp, Homo sapien
gtctccacctaaagaactgtcaaga

SEQ ID NO: 80067 - DNA, 25 bp, Homo sapien
ccagtgtcgtcagaactttatcggt

SEQ ID NO: 80068 - DNA, 25 bp, Homo sapien
ccagtgtcgtcacaactttatcggt

SEQ ID NO: 80069 - DNA, 25 bp, Homo sapien
cttggtctccaacatctactaccgg

SEQ ID NO: 80070 - DNA, 25 bp, Homo sapien
cttggtctccaagatctactaccgg

SEQ ID NO: 80071 - DNA, 25 bp, Homo sapien
aggtagttacaacgagctcaggtgt

SEQ ID NO: 80072 - DNA, 25 bp, Homo sapien
aggtagttacaaggagctcaggtgt

SEQ ID NO: 80073 - DNA, 25 bp, Homo sapien
ctccgtcgatacaaaaactcatggt

SEQ ID NO: 80074 - DNA, 25 bp, Homo sapien
ctccgtcgatactaaaactcatggt

SEQ ID NO: 80075 - DNA, 25 bp, Homo sapien
acccagacttagaacatctatcgat

SEQ ID NO: 80076 - DNA, 25 bp, Homo sapien
acccagacttagtacatctatcgat

SEQ ID NO: 80077 - DNA, 25 bp, Homo sapien
gactaactctctgtcacaacttgag

SEQ ID NO: 80078 - DNA, 25 bp, Homo sapien
gactaactctctctcacaacttgag

SEQ ID NO: 80079 - DNA, 25 bp, Homo sapien
gtgacacatttactcaaaacgtaag

SEQ ID NO: 80080 - DNA, 25 bp, Homo sapien
gtgacacatttagtcaaaacgtaag

SEQ ID NO: 80081 - DNA, 25 bp, Homo sapien
caagaacctctcgaaagattctaac

SEQ ID NO: 80082 - DNA, 25 bp, Homo sapien
caagaacctctccaaagattctaac

SEQ ID NO: 80083 - DNA, 25 bp, Homo sapien
gaatatcatcgtttttctgtcgacg

SEQ ID NO: 80084 - DNA, 25 bp, Homo sapien
gaatatcatcgtatttctgtcgacg

SEQ ID NO: 80085 - DNA, 25 bp, Homo sapien
ctagtaccagacacttattacacgg

SEQ ID NO: 80086 - DNA, 25 bp, Homo sapien
ctagtaccagactcttattacacgg

SEQ ID NO: 80087 - DNA, 25 bp, Homo sapien
tgtatccggtaccatcacctacaca

SEQ ID NO: 80088 - DNA, 25 bp, Homo sapien
tgtatccggtacgatcacctacaca

SEQ ID NO: 80089 - DNA, 25 bp, Homo sapien
tcaagtgtttacaacactcgaacga

SEQ ID NO: 80090 - DNA, 25 bp, Homo sapien
tcaagtgtttactacactcgaacga

SEQ ID NO: 80091 - DNA, 25 bp, Homo sapien
agagacggccgaactacccgatcga

SEQ ID NO: 80092 - DNA, 25 bp, Homo sapien
agagacggccgatctacccgatcga

SEQ ID NO: 80093 - DNA, 25 bp, Homo sapien
actacgggtgctactcgcagtactc

SEQ ID NO: 80094 - DNA, 25 bp, Homo sapien
actacgggtgcttctcgcagtactc

SEQ ID NO: 80095 - DNA, 25 bp, Homo sapien
cgacgagtacagtcctcggaagagt

SEQ ID NO: 80096 - DNA, 25 bp, Homo sapien
cgacgagtacagacctcggaagagt

SEQ ID NO: 80097 - DNA, 25 bp, Homo sapien
agcacgaagtccagtactgggtggt

SEQ ID NO: 80098 - DNA, 25 bp, Homo sapien
agcacgaagtcctgtactgggtggt

SEQ ID NO: 80099 - DNA, 25 bp, Homo sapien
aggcccggacgacttttcgagtgtg

SEQ ID NO: 80100 - DNA, 25 bp, Homo sapien
aggcccggacgagttttcgagtgtg

SEQ ID NO: 80101 - DNA, 25 bp, Homo sapien
agcccggtacgacaagaccagaggt

SEQ ID NO: 80102 - DNA, 25 bp, Homo sapien
agcccggtacgagaagaccagaggt

SEQ ID NO: 80103 - DNA, 25 bp, Homo sapien
tcgagcttgggtacaagacccgggt

SEQ ID NO: 80104 - DNA, 25 bp, Homo sapien
tcgagcttgggttcaagacccgggt

SEQ ID NO: 80105 - DNA, 25 bp, Homo sapien
cctagattgatgtgagacacttgaa

SEQ ID NO: 80106 - DNA, 25 bp, Homo sapien
cctagattgatgagagacacttgaa

SEQ ID NO: 80107 - DNA, 25 bp, Homo sapien
ggaatacaccgtagacgaccttgaa

SEQ ID NO: 80108 - DNA, 25 bp, Homo sapien
ggaatacaccgttgacgaccttgaa

SEQ ID NO: 80109 - DNA, 25 bp, Homo sapien
gtaaatagtcctccattctagaggt

SEQ ID NO: 80110 - DNA, 25 bp, Homo sapien
gtaaatagtcctgcattctagaggt

SEQ ID NO: 80111 - DNA, 25 bp, Homo sapien
atacacgtgacaacggtcatagggt

SEQ ID NO: 80112 - DNA, 25 bp, Homo sapien
atacacgtgacatcggtcatagggt

SEQ ID NO: 80113 - DNA, 25 bp, Homo sapien
aggacactagtttccgtcggtggct

SEQ ID NO: 80114 - DNA, 25 bp, Homo sapien
aggacactagttaccgtcggtggct

SEQ ID NO: 80115 - DNA, 25 bp, Homo sapien
ccatccgtcgttacggttgtcggtc

SEQ ID NO: 80116 - DNA, 25 bp, Homo sapien
ccatccgtcgtttcggttgtcggtc

SEQ ID NO: 80117 - DNA, 25 bp, Homo sapien
ccagcctctgtccgagtaccggtcc

SEQ ID NO: 80118 - DNA, 25 bp, Homo sapien
ccagcctctgtcggagtaccggtcc

SEQ ID NO: 80119 - DNA, 25 bp, Homo sapien
gtaccaaacactaggaggtctttcc

SEQ ID NO: 80120 - DNA, 25 bp, Homo sapien
gtaccaaacacttggaggtctttcc

SEQ ID NO: 80121 - DNA, 25 bp, Homo sapien
accaaaccttctgaggttcttcgta

SEQ ID NO: 80122 - DNA, 25 bp, Homo sapien
accaaaccttctcaggttcttcgta

SEQ ID NO: 80123 - DNA, 25 bp, Homo sapien
agaagtttacttcacaggttttcga

SEQ ID NO: 80124 - DNA, 25 bp, Homo sapien
agaagtttacttgacaggttttcga

SEQ ID NO: 80125 - DNA, 25 bp, Homo sapien
tggagattactccacagttttggtg

SEQ ID NO: 80126 - DNA, 25 bp, Homo sapien
tggagattactcgacagttttggtg

SEQ ID NO: 80127 - DNA, 25 bp, Homo sapien
gagaattccttcagtgaattttgtg

SEQ ID NO: 80128 - DNA, 25 bp, Homo sapien
gagaattccttctgtgaattttgtg

SEQ ID NO: 80129 - DNA, 25 bp, Homo sapien
ctgctgtgcttggatgtacttgtgt

SEQ ID NO: 80130 - DNA, 25 bp, Homo sapien
ctgctgtgcttgcatgtacttgtgt

SEQ ID NO: 80131 - DNA, 25 bp, Homo sapien
aatcgtggacgtcttttccgtgtct

SEQ ID NO: 80132 - DNA, 25 bp, Homo sapien
aatcgtggacgtgttttccgtgtct

SEQ ID NO: 80133 - DNA, 25 bp, Homo sapien
atcgtgttgactggttccaggttct

SEQ ID NO: 80134 - DNA, 25 bp, Homo sapien
atcgtgttgactcgttccaggttct

SEQ ID NO: 80135 - DNA, 25 bp, Homo sapien
taatatgagtattctaacagtgacc

SEQ ID NO: 80136 - DNA, 25 bp, Homo sapien
taatatgagtatactaacagtgacc

SEQ ID NO: 80137 - DNA, 25 bp, Homo sapien
caatttaacggtatttgtacatgca

SEQ ID NO: 80138 - DNA, 25 bp, Homo sapien
caatttaacggtttttgtacatgca

SEQ ID NO: 80139 - DNA, 25 bp, Homo sapien
ataaagtggtgactgacgtatgacc

SEQ ID NO: 80140 - DNA, 25 bp, Homo sapien
ataaagtggtgagtgacgtatgacc

SEQ ID NO: 80141 - DNA, 25 bp, Homo sapien
gatgtccagtggtcaagcgttggac

SEQ ID NO: 80142 - DNA, 25 bp, Homo sapien
gatgtccagtggacaagcgttggac

SEQ ID NO: 80143 - DNA, 25 bp, Homo sapien
agaagggataagtccgaggttgtcc

SEQ ID NO: 80144 - DNA, 25 bp, Homo sapien
agaagggataagaccgaggttgtcc

SEQ ID NO: 80145 - DNA, 25 bp, Homo sapien
aaccggaggaagacccggtctcgcc

SEQ ID NO: 80146 - DNA, 25 bp, Homo sapien
aaccggaggaagtcccggtctcgcc

SEQ ID NO: 80147 - DNA, 25 bp, Homo sapien
aagagtcaagaattcccgttgaccc

SEQ ID NO: 80148 - DNA, 25 bp, Homo sapien
aagagtcaagaaatcccgttgaccc

SEQ ID NO: 80149 - DNA, 25 bp, Homo sapien
agtttggtaaagcaatcgtcgtatc

SEQ ID NO: 80150 - DNA, 25 bp, Homo sapien
agtttggtaaaggaatcgtcgtatc

SEQ ID NO: 80151 - DNA, 25 bp, Homo sapien
gtatcgttgatacgttcattttctc

SEQ ID NO: 80152 - DNA, 25 bp, Homo sapien
gtatcgttgataggttcattttctc

SEQ ID NO: 80153 - DNA, 25 bp, Homo sapien
tttcgtcggtgtgtctcatcccacc

SEQ ID NO: 80154 - DNA, 25 bp, Homo sapien
tttcgtcggtgtctctcatcccacc

SEQ ID NO: 80155 - DNA, 25 bp, Homo sapien
gtttccggtgtcgtaaacaactcaa

SEQ ID NO: 80156 - DNA, 25 bp, Homo sapien
gtttccggtgtcctaaacaactcaa

SEQ ID NO: 80157 - DNA, 25 bp, Homo sapien
ggggacgtaccgacttgtcccggat

SEQ ID NO: 80158 - DNA, 25 bp, Homo sapien
ggggacgtaccgtcttgtcccggat

SEQ ID NO: 80159 - DNA, 25 bp, Homo sapien
tgtaactgtcgactctcggtgccgc

SEQ ID NO: 80160 - DNA, 25 bp, Homo sapien
tgtaactgtcgagtctcggtgccgc

SEQ ID NO: 80161 - DNA, 25 bp, Homo sapien
agagcgggacgtacttccgggtccc

SEQ ID NO: 80162 - DNA, 25 bp, Homo sapien
agagcgggacgttcttccgggtccc

SEQ ID NO: 80163 - DNA, 25 bp, Homo sapien
agtcggcgggggttcgggtctcgtg

SEQ ID NO: 80164 - DNA, 25 bp, Homo sapien
agtcggcgggggatcgggtctcgtg

SEQ ID NO: 80165 - DNA, 25 bp, Homo sapien
agccgcgcgcggaagacgaactcca

SEQ ID NO: 80166 - DNA, 25 bp, Homo sapien
agccgcgcgcggtagacgaactcca

SEQ ID NO: 80167 - DNA, 25 bp, Homo sapien
gtccaagactgaactacaactccga

SEQ ID NO: 80168 - DNA, 25 bp, Homo sapien
gtccaagactgatctacaactccga

SEQ ID NO: 80169 - DNA, 25 bp, Homo sapien
gtagtccaaaacatccggatgactt

SEQ ID NO: 80170 - DNA, 25 bp, Homo sapien
gtagtccaaaacttccggatgactt

SEQ ID NO: 80171 - DNA, 25 bp, Homo sapien
gggacccataacttcccaaccgtga

SEQ ID NO: 80172 - DNA, 25 bp, Homo sapien
gggacccataacatcccaaccgtga

SEQ ID NO: 80173 - DNA, 25 bp, Homo sapien
agaaccctgacgacccgaaggaccg

SEQ ID NO: 80174 - DNA, 25 bp, Homo sapien
agaaccctgacgtcccgaaggaccg

SEQ ID NO: 80175 - DNA, 25 bp, Homo sapien
gacgacctgaacaccagtgagaccc

SEQ ID NO: 80176 - DNA, 25 bp, Homo sapien
gacgacctgaactccagtgagaccc

SEQ ID NO: 80177 - DNA, 25 bp, Homo sapien
ggaatctttcccgtagacttcagaa

SEQ ID NO: 80178 - DNA, 25 bp, Homo sapien
ggaatctttcccctagacttcagaa

SEQ ID NO: 80179 - DNA, 25 bp, Homo sapien
gattttattcccaaatagtcagatg

SEQ ID NO: 80180 - DNA, 25 bp, Homo sapien
gattttattccctaatagtcagatg

SEQ ID NO: 80181 - DNA, 25 bp, Homo sapien
gttattttcacgagacgtattcaaa

SEQ ID NO: 80182 - DNA, 25 bp, Homo sapien
gttattttcacgtgacgtattcaaa

SEQ ID NO: 80183 - DNA, 25 bp, Homo sapien
aacttataaagtacctggtacatag

SEQ ID NO: 80184 - DNA, 25 bp, Homo sapien
aacttataaagttcctggtacatag

SEQ ID NO: 80185 - DNA, 25 bp, Homo sapien
agagagtaaagatccggtacacatc

SEQ ID NO: 80186 - DNA, 25 bp, Homo sapien
agagagtaaagaaccggtacacatc

SEQ ID NO: 80187 - DNA, 25 bp, Homo sapien
tcatgttaaaggtcacactactgta

SEQ ID NO: 80188 - DNA, 25 bp, Homo sapien
tcatgttaaaggacacactactgta

SEQ ID NO: 80189 - DNA, 25 bp, Homo sapien
aatctcaacgaaagggacaccaaga

SEQ ID NO: 80190 - DNA, 25 bp, Homo sapien
aatctcaacgaatgggacaccaaga

SEQ ID NO: 80191 - DNA, 25 bp, Homo sapien
taacttatccggactcgaacagagt

SEQ ID NO: 80192 - DNA, 25 bp, Homo sapien
taacttatccggtctcgaacagagt

SEQ ID NO: 80193 - DNA, 25 bp, Homo sapien
aacaaattggtaggcgaacatcaag

SEQ ID NO: 80194 - DNA, 25 bp, Homo sapien
aacaaattggtacgcgaacatcaag

SEQ ID NO: 80195 - DNA, 25 bp, Homo sapien
accacttgtatgtctggaggatata

SEQ ID NO: 80196 - DNA, 25 bp, Homo sapien
accacttgtatgactggaggatata

SEQ ID NO: 80197 - DNA, 25 bp, Homo sapien
acccggctgacgtctggttgacaca

SEQ ID NO: 80198 - DNA, 25 bp, Homo sapien
acccggctgacgactggttgacaca

SEQ ID NO: 80199 - DNA, 25 bp, Homo sapien
cctccgttgtgtctctcgggtcctt

SEQ ID NO: 80200 - DNA, 25 bp, Homo sapien
cctccgttgtgtgtctcgggtcctt

SEQ ID NO: 80201 - DNA, 25 bp, Homo sapien
cgctctccggtttctttgggtcctt

SEQ ID NO: 80202 - DNA, 25 bp, Homo sapien
cgctctccggttactttgggtcctt

SEQ ID NO: 80203 - DNA, 25 bp, Homo sapien
ccgaaggtaaatcttggtactttgt

SEQ ID NO: 80204 - DNA, 25 bp, Homo sapien
ccgaaggtaaatgttggtactttgt

SEQ ID NO: 80205 - DNA, 25 bp, Homo sapien
ctgttcaagaatcatgtcattttgt

SEQ ID NO: 80206 - DNA, 25 bp, Homo sapien
ctgttcaagaatgatgtcattttgt

SEQ ID NO: 80207 - DNA, 25 bp, Homo sapien
tagtctcgccaaaatgtcaagattt

SEQ ID NO: 80208 - DNA, 25 bp, Homo sapien
tagtctcgccaatatgtcaagattt

SEQ ID NO: 80209 - DNA, 25 bp, Homo sapien
gttacgataaggattccacaggatt

SEQ ID NO: 80210 - DNA, 25 bp, Homo sapien
gttacgataaggtttccacaggatt

SEQ ID NO: 80211 - DNA, 25 bp, Homo sapien
gggagaacggtcttccgcaggtatc

SEQ ID NO: 80212 - DNA, 25 bp, Homo sapien
gggagaacggtcatccgcaggtatc

SEQ ID NO: 80213 - DNA, 25 bp, Homo sapien
taagtaaacgaccttttcaagttac

SEQ ID NO: 80214 - DNA, 25 bp, Homo sapien
taagtaaacgacgttttcaagttac

SEQ ID NO: 80215 - DNA, 25 bp, Homo sapien
ttggagaaaggaaagatcgtacccc

SEQ ID NO: 80216 - DNA, 25 bp, Homo sapien
ttggagaaaggatagatcgtacccc

SEQ ID NO: 80217 - DNA, 25 bp, Homo sapien
tgtataagaagaattaagtccccta

SEQ ID NO: 80218 - DNA, 25 bp, Homo sapien
tgtataagaagatttaagtccccta

SEQ ID NO: 80219 - DNA, 25 bp, Homo sapien
tacaaagtggtcttatacgtgccca

SEQ ID NO: 80220 - DNA, 25 bp, Homo sapien
tacaaagtggtcatatacgtgccca

SEQ ID NO: 80221 - DNA, 25 bp, Homo sapien
tcgtaaaccagtgaactccaccggg

SEQ ID NO: 80222 - DNA, 25 bp, Homo sapien
tcgtaaaccagtcaactccaccggg

SEQ ID NO: 80223 - DNA, 25 bp, Homo sapien
gtgaccccgtcaatgtcttgtgtag

SEQ ID NO: 80224 - DNA, 25 bp, Homo sapien
gtgaccccgtcattgtcttgtgtag

SEQ ID NO: 80225 - DNA, 25 bp, Homo sapien
gagcaactcattaacgtctatctga

SEQ ID NO: 80226 - DNA, 25 bp, Homo sapien
gagcaactcatttacgtctatctga

SEQ ID NO: 80227 - DNA, 25 bp, Homo sapien
aaccgtgtactgtttatggttcgag

SEQ ID NO: 80228 - DNA, 25 bp, Homo sapien
aaccgtgtactgattatggttcgag

SEQ ID NO: 80229 - DNA, 25 bp, Homo sapien
ttcgggacgtgttattcctttgtaa

SEQ ID NO: 80230 - DNA, 25 bp, Homo sapien
ttcgggacgtgtaattcctttgtaa

SEQ ID NO: 80231 - DNA, 25 bp, Homo sapien
tttaggatagaatgtcttcaggtcc

SEQ ID NO: 80232 - DNA, 25 bp, Homo sapien
tttaggatagaaagtcttcaggtcc

SEQ ID NO: 80233 - DNA, 25 bp, Homo sapien
gagacggtctcattgcagtcgtgtc

SEQ ID NO: 80234 - DNA, 25 bp, Homo sapien
gagacggtctcaatgcagtcgtgtc

SEQ ID NO: 80235 - DNA, 25 bp, Homo sapien
gacggggatgaatcgtcagagtctc

SEQ ID NO: 80236 - DNA, 25 bp, Homo sapien
gacggggatgaaacgtcagagtctc

SEQ ID NO: 80237 - DNA, 25 bp, Homo sapien
tgggtgaaggatgtacagacgtctc

SEQ ID NO: 80238 - DNA, 25 bp, Homo sapien
tgggtgaaggatctacagacgtctc

SEQ ID NO: 80239 - DNA, 25 bp, Homo sapien
gagattcaatctacagaagtctacg

SEQ ID NO: 80240 - DNA, 25 bp, Homo sapien
gagattcaatcttcagaagtctacg

SEQ ID NO: 80241 - DNA, 25 bp, Homo sapien
aagagacttcgtaggacaaacgccc

SEQ ID NO: 80242 - DNA, 25 bp, Homo sapien
aagagacttcgttggacaaacgccc

SEQ ID NO: 80243 - DNA, 25 bp, Homo sapien
ctcaacctgcggacggagcgcggct

SEQ ID NO: 80244 - DNA, 25 bp, Homo sapien
ctcaacctgcggtcggagcgcggct

SEQ ID NO: 80245 - DNA, 25 bp, Homo sapien
tcccaacttctgtcagggctcggtc

SEQ ID NO: 80246 - DNA, 25 bp, Homo sapien
tcccaacttctgacagggctcggtc

SEQ ID NO: 80247 - DNA, 25 bp, Homo sapien
ttgtctctgtgtcaccggctcagga

SEQ ID NO: 80248 - DNA, 25 bp, Homo sapien
ttgtctctgtgtgaccggctcagga

SEQ ID NO: 80249 - DNA, 25 bp, Homo sapien
gactctctcagtgaccgggaaggta

SEQ ID NO: 80250 - DNA, 25 bp, Homo sapien
gactctctcagtcaccgggaaggta

SEQ ID NO: 80251 - DNA, 25 bp, Homo sapien
accacactactgtcggtcatcatac

SEQ ID NO: 80252 - DNA, 25 bp, Homo sapien
accacactactgacggtcatcatac

SEQ ID NO: 80253 - DNA, 25 bp, Homo sapien
cggaccgactacgtcttataaaagt

SEQ ID NO: 80254 - DNA, 25 bp, Homo sapien
cggaccgactacctcttataaaagt

SEQ ID NO: 80255 - DNA, 25 bp, Homo sapien
ggggctgactcggactaatttagag

SEQ ID NO: 80256 - DNA, 25 bp, Homo sapien
ggggctgactcgcactaatttagag

SEQ ID NO: 80257 - DNA, 25 bp, Homo sapien
atggctacacagactacactcatga

SEQ ID NO: 80258 - DNA, 25 bp, Homo sapien
atggctacacagtctacactcatga

SEQ ID NO: 80259 - DNA, 25 bp, Homo sapien
gagttagaactaaattccctttccg

SEQ ID NO: 80260 - DNA, 25 bp, Homo sapien
gagttagaactatattccctttccg

SEQ ID NO: 80261 - DNA, 25 bp, Homo sapien
acaagacaatgtctggtcccccggg

SEQ ID NO: 80262 - DNA, 25 bp, Homo sapien
acaagacaatgtgtggtcccccggg

SEQ ID NO: 80263 - DNA, 25 bp, Homo sapien
atacatagtctttgttccttgtcga

SEQ ID NO: 80264 - DNA, 25 bp, Homo sapien
atacatagtcttagttccttgtcga

SEQ ID NO: 80265 - DNA, 25 bp, Homo sapien
cagataaggtcatccgattttgtga

SEQ ID NO: 80266 - DNA, 25 bp, Homo sapien
cagataaggtcaaccgattttgtga

SEQ ID NO: 80267 - DNA, 25 bp, Homo sapien
gactggacggcagatctttttggac

SEQ ID NO: 80268 - DNA, 25 bp, Homo sapien
gactggacggcacatctttttggac

SEQ ID NO: 80269 - DNA, 25 bp, Homo sapien
gagggcaccctgtgtcgtcccgtga

SEQ ID NO: 80270 - DNA, 25 bp, Homo sapien
gagggcaccctgagtcgtcccgtga

SEQ ID NO: 80271 - DNA, 25 bp, Homo sapien
ttctctctgtacatcgtccgcgtca

SEQ ID NO: 80272 - DNA, 25 bp, Homo sapien
ttctctctgtacttcgtccgcgtca

SEQ ID NO: 80273 - DNA, 25 bp, Homo sapien
gttctctgactctcgtcctcgacag

SEQ ID NO: 80274 - DNA, 25 bp, Homo sapien
gttctctgactcacgtcctcgacag

SEQ ID NO: 80275 - DNA, 25 bp, Homo sapien
aactcctaagccagtaaccgtcacg

SEQ ID NO: 80276 - DNA, 25 bp, Homo sapien
aactcctaagcctgtaaccgtcacg

SEQ ID NO: 80277 - DNA, 25 bp, Homo sapien
caatcagtaaccgtggacgttgact

SEQ ID NO: 80278 - DNA, 25 bp, Homo sapien
caatcagtaaccctggacgttgact

SEQ ID NO: 80279 - DNA, 25 bp, Homo sapien
gtcgggaatgtaatttttcctccac

SEQ ID NO: 80280 - DNA, 25 bp, Homo sapien
gtcgggaatgtattttttcctccac

SEQ ID NO: 80281 - DNA, 25 bp, Homo sapien
ggaagtttagtgtcctccgtcacta

SEQ ID NO: 80282 - DNA, 25 bp, Homo sapien
ggaagtttagtgacctccgtcacta

SEQ ID NO: 80283 - DNA, 25 bp, Homo sapien
cctgtcccttggacggcccgagtgt

SEQ ID NO: 80284 - DNA, 25 bp, Homo sapien
cctgtcccttggtcggcccgagtgt

SEQ ID NO: 80285 - DNA, 25 bp, Homo sapien
gtacgccttcaggagcggtcccggg

SEQ ID NO: 80286 - DNA, 25 bp, Homo sapien
gtacgccttcagcagcggtcccggg

SEQ ID NO: 80287 - DNA, 25 bp, Homo sapien
aaccgggaccggtactgatgttcgt

SEQ ID NO: 80288 - DNA, 25 bp, Homo sapien
aaccgggaccggaactgatgttcgt

SEQ ID NO: 80289 - DNA, 25 bp, Homo sapien
ctgcccgtcgttaggagtcggtccc

SEQ ID NO: 80290 - DNA, 25 bp, Homo sapien
ctgcccgtcgtttggagtcggtccc

SEQ ID NO: 80291 - DNA, 25 bp, Homo sapien
gacgtcccttcaggtccgtcaacat

SEQ ID NO: 80292 - DNA, 25 bp, Homo sapien
gacgtcccttcacgtccgtcaacat

SEQ ID NO: 80293 - DNA, 25 bp, Homo sapien
actacactcatgacacctccgacga

SEQ ID NO: 80294 - DNA, 25 bp, Homo sapien
actacactcatgtcacctccgacga

SEQ ID NO: 80295 - DNA, 25 bp, Homo sapien
acttagtcgaccaaggaccggtcac

SEQ ID NO: 80296 - DNA, 25 bp, Homo sapien
acttagtcgacctaggaccggtcac

SEQ ID NO: 80297 - DNA, 25 bp, Homo sapien
gtctttcgtgtcctgtgacgagggc

SEQ ID NO: 80298 - DNA, 25 bp, Homo sapien
gtctttcgtgtcgtgtgacgagggc

SEQ ID NO: 80299 - DNA, 25 bp, Homo sapien
actttatacttgaggttccaagaac

SEQ ID NO: 80300 - DNA, 25 bp, Homo sapien
actttatacttgtggttccaagaac

SEQ ID NO: 80301 - DNA, 25 bp, Homo sapien
ttacaacaggagttcgtgcaatcac

SEQ ID NO: 80302 - DNA, 25 bp, Homo sapien
ttacaacaggagatcgtgcaatcac

SEQ ID NO: 80303 - DNA, 25 bp, Homo sapien
gtacttcggggatctgaactatatt

SEQ ID NO: 80304 - DNA, 25 bp, Homo sapien
gtacttcggggaactgaactatatt

SEQ ID NO: 80305 - DNA, 25 bp, Homo sapien
gtctcgtcaccgaacccgaggagca

SEQ ID NO: 80306 - DNA, 25 bp, Homo sapien
gtctcgtcaccgtacccgaggagca

SEQ ID NO: 80307 - DNA, 25 bp, Homo sapien
acgttgtatacgagaccaatggata

SEQ ID NO: 80308 - DNA, 25 bp, Homo sapien
acgttgtatacgtgaccaatggata

SEQ ID NO: 80309 - DNA, 25 bp, Homo sapien
aaggtgagtatgtcaccatctaaac

SEQ ID NO: 80310 - DNA, 25 bp, Homo sapien
aaggtgagtatgacaccatctaaac

SEQ ID NO: 80311 - DNA, 25 bp, Homo sapien
aacttcttcagttcgaccgtcatga

SEQ ID NO: 80312 - DNA, 25 bp, Homo sapien
aacttcttcagtacgaccgtcatga

SEQ ID NO: 80313 - DNA, 25 bp, Homo sapien
atctacgtcggtagtcgttatagta

SEQ ID NO: 80314 - DNA, 25 bp, Homo sapien
atctacgtcggttgtcgttatagta

SEQ ID NO: 80315 - DNA, 25 bp, Homo sapien
cgaaaacgtacagttgtcgtctcaa

SEQ ID NO: 80316 - DNA, 25 bp, Homo sapien
cgaaaacgtacacttgtcgtctcaa

SEQ ID NO: 80317 - DNA, 25 bp, Homo sapien
acactaagaagtctcgggtcctcag

SEQ ID NO: 80318 - DNA, 25 bp, Homo sapien
acactaagaagtgtcgggtcctcag

SEQ ID NO: 80319 - DNA, 25 bp, Homo sapien
cgctcactcttagtagtggtgccgc

SEQ ID NO: 80320 - DNA, 25 bp, Homo sapien
cgctcactcttactagtggtgccgc

SEQ ID NO: 80321 - DNA, 25 bp, Homo sapien
ggccttctttagtgggtcgtcccgt

SEQ ID NO: 80322 - DNA, 25 bp, Homo sapien
ggccttctttagagggtcgtcccgt

SEQ ID NO: 80323 - DNA, 25 bp, Homo sapien
gtaccgaagagtgtacggtcggtcc

SEQ ID NO: 80324 - DNA, 25 bp, Homo sapien
gtaccgaagagtctacggtcggtcc

SEQ ID NO: 80325 - DNA, 25 bp, Homo sapien
ctgtcccaggtatgacatcggacac

SEQ ID NO: 80326 - DNA, 25 bp, Homo sapien
ctgtcccaggtaagacatcggacac

SEQ ID NO: 80327 - DNA, 25 bp, Homo sapien
tactcatggtgtaaaactctacaga

SEQ ID NO: 80328 - DNA, 25 bp, Homo sapien
tactcatggtgttaaactctacaga

SEQ ID NO: 80329 - DNA, 25 bp, Homo sapien
aatcaccgtgttttacatgactgta

SEQ ID NO: 80330 - DNA, 25 bp, Homo sapien
aatcaccgtgttatacatgactgta

SEQ ID NO: 80331 - DNA, 25 bp, Homo sapien
tcactgtcggccactacactactgt

SEQ ID NO: 80332 - DNA, 25 bp, Homo sapien
tcactgtcggcctctacactactgt

SEQ ID NO: 80333 - DNA, 25 bp, Homo sapien
tttcattttggtcgtcctacttagg

SEQ ID NO: 80334 - DNA, 25 bp, Homo sapien
tttcattttggtggtcctacttagg

SEQ ID NO: 80335 - DNA, 25 bp, Homo sapien
gatcaaagttttgttcccatgttgt

SEQ ID NO: 80336 - DNA, 25 bp, Homo sapien
gatcaaagttttcttcccatgttgt

SEQ ID NO: 80337 - DNA, 25 bp, Homo sapien
actacgtctttcataacccattctt

SEQ ID NO: 80338 - DNA, 25 bp, Homo sapien
actacgtctttcttaacccattctt

SEQ ID NO: 80339 - DNA, 25 bp, Homo sapien
gaaatacctttttgacttttatatt

SEQ ID NO: 80340 - DNA, 25 bp, Homo sapien
gaaataccttttagacttttatatt

SEQ ID NO: 80341 - DNA, 25 bp, Homo sapien
ctaggattacggtgttttgtccgat

SEQ ID NO: 80342 - DNA, 25 bp, Homo sapien
ctaggattacggagttttgtccgat

SEQ ID NO: 80343 - DNA, 25 bp, Homo sapien
ctctgtcgtaaaaggttttgtcttt

SEQ ID NO: 80344 - DNA, 25 bp, Homo sapien
ctctgtcgtaaatggttttgtcttt

SEQ ID NO: 80345 - DNA, 25 bp, Homo sapien
ctgtcagttgtgaatctctgttaat

SEQ ID NO: 80346 - DNA, 25 bp, Homo sapien
ctgtcagttgtgtatctctgttaat

SEQ ID NO: 80347 - DNA, 25 bp, Homo sapien
agactactcataacgactatcgaat

SEQ ID NO: 80348 - DNA, 25 bp, Homo sapien
agactactcatatcgactatcgaat

SEQ ID NO: 80349 - DNA, 25 bp, Homo sapien
agtaagtcgagtcatatgcgtaacg

SEQ ID NO: 80350 - DNA, 25 bp, Homo sapien
agtaagtcgagtgatatgcgtaacg

SEQ ID NO: 80351 - DNA, 25 bp, Homo sapien
ttatagatgtataaagtcgcacacg

SEQ ID NO: 80352 - DNA, 25 bp, Homo sapien
ttatagatgtattaagtcgcacacg

SEQ ID NO: 80353 - DNA, 25 bp, Homo sapien
gtcttttctcgctcgggtcgacagg

SEQ ID NO: 80354 - DNA, 25 bp, Homo sapien
gtcttttctcgcacgggtcgacagg

SEQ ID NO: 80355 - DNA, 25 bp, Homo sapien
tcttcttacggaccttgtgtaattg

SEQ ID NO: 80356 - DNA, 25 bp, Homo sapien
tcttcttacggagcttgtgtaattg

SEQ ID NO: 80357 - DNA, 25 bp, Homo sapien
tatcttatcgacctatgtgattaga

SEQ ID NO: 80358 - DNA, 25 bp, Homo sapien
tatcttatcgacgtatgtgattaga

SEQ ID NO: 80359 - DNA, 25 bp, Homo sapien
aattctgtcttgagggtcattacga

SEQ ID NO: 80360 - DNA, 25 bp, Homo sapien
aattctgtcttgtgggtcattacga

SEQ ID NO: 80361 - DNA, 25 bp, Homo sapien
tgtttcgtgtaagagttaccgcctc

SEQ ID NO: 80362 - DNA, 25 bp, Homo sapien
tgtttcgtgtaacagttaccgcctc

SEQ ID NO: 80363 - DNA, 25 bp, Homo sapien
ggtttcgaagacagtccgtccagcg

SEQ ID NO: 80364 - DNA, 25 bp, Homo sapien
ggtttcgaagactgtccgtccagcg

SEQ ID NO: 80365 - DNA, 25 bp, Homo sapien
cgttgaatagagtttacgtcccgac

SEQ ID NO: 80366 - DNA, 25 bp, Homo sapien
cgttgaatagagattacgtcccgac

SEQ ID NO: 80367 - DNA, 25 bp, Homo sapien
cacgaatatcttgagttactccgcc

SEQ ID NO: 80368 - DNA, 25 bp, Homo sapien
cacgaatatcttcagttactccgcc

SEQ ID NO: 80369 - DNA, 25 bp, Homo sapien
aaaaaatccgtcgtcagtccgactc

SEQ ID NO: 80370 - DNA, 25 bp, Homo sapien
aaaaaatccgtcctcagtccgactc

SEQ ID NO: 80371 - DNA, 25 bp, Homo sapien
agacagaagaagtggcccctgctct

SEQ ID NO: 80372 - DNA, 25 bp, Homo sapien
agacagaagaagaggcccctgctct

SEQ ID NO: 80373 - DNA, 25 bp, Homo sapien
aaaaagacgatggtgtaatccttgc

SEQ ID NO: 80374 - DNA, 25 bp, Homo sapien
aaaaagacgatgctgtaatccttgc

SEQ ID NO: 80375 - DNA, 25 bp, Homo sapien
agaaaagtgtcaaactacctcgtta

SEQ ID NO: 80376 - DNA, 25 bp, Homo sapien
agaaaagtgtcatactacctcgtta

SEQ ID NO: 80377 - DNA, 25 bp, Homo sapien
aagtgttagaagagtcactctttac

SEQ ID NO: 80378 - DNA, 25 bp, Homo sapien
aagtgttagaagtgtcactctttac

SEQ ID NO: 80379 - DNA, 25 bp, Homo sapien
gagatttctgaaccttcctctctga

SEQ ID NO: 80380 - DNA, 25 bp, Homo sapien
gagatttctgaagcttcctctctga

SEQ ID NO: 80381 - DNA, 25 bp, Homo sapien
agaacgtatttcacaaacaacccga

SEQ ID NO: 80382 - DNA, 25 bp, Homo sapien
agaacgtatttctcaaacaacccga

SEQ ID NO: 80383 - DNA, 25 bp, Homo sapien
ggtagtgaggcttggaacagtccaa

SEQ ID NO: 80384 - DNA, 25 bp, Homo sapien
ggtagtgaggctaggaacagtccaa

SEQ ID NO: 80385 - DNA, 25 bp, Homo sapien
attggactttagggtaagtccgata

SEQ ID NO: 80386 - DNA, 25 bp, Homo sapien
attggactttagcgtaagtccgata

SEQ ID NO: 80387 - DNA, 25 bp, Homo sapien
ccaccggtcttaagggaatatcatc

SEQ ID NO: 80388 - DNA, 25 bp, Homo sapien
ccaccggtcttatgggaatatcatc

SEQ ID NO: 80389 - DNA, 25 bp, Homo sapien
tccctcgtaaacgatgtgttttcgt

SEQ ID NO: 80390 - DNA, 25 bp, Homo sapien
tccctcgtaaaccatgtgttttcgt

SEQ ID NO: 80391 - DNA, 25 bp, Homo sapien
agagttatctagaatctgtttttcc

SEQ ID NO: 80392 - DNA, 25 bp, Homo sapien
agagttatctagtatctgtttttcc

SEQ ID NO: 80393 - DNA, 25 bp, Homo sapien
actgattatagatccatatgtgtcc

SEQ ID NO: 80394 - DNA, 25 bp, Homo sapien
actgattatagaaccatatgtgtcc

SEQ ID NO: 80395 - DNA, 25 bp, Homo sapien
cttatgatgtctatattgtgtacta

SEQ ID NO: 80396 - DNA, 25 bp, Homo sapien
cttatgatgtctttattgtgtacta

SEQ ID NO: 80397 - DNA, 25 bp, Homo sapien
agggtgtgccacaagaaccggtagt

SEQ ID NO: 80398 - DNA, 25 bp, Homo sapien
agggtgtgccactagaaccggtagt

SEQ ID NO: 80399 - DNA, 25 bp, Homo sapien
gggacgtcctcctagaacacagtgt

SEQ ID NO: 80400 - DNA, 25 bp, Homo sapien
gggacgtcctccaagaacacagtgt

SEQ ID NO: 80401 - DNA, 25 bp, Homo sapien
ctggagcgactccaggaacgacagg

SEQ ID NO: 80402 - DNA, 25 bp, Homo sapien
ctggagcgactcgaggaacgacagg

SEQ ID NO: 80403 - DNA, 25 bp, Homo sapien
tgtgagtcgacagtcggcacgaaga

SEQ ID NO: 80404 - DNA, 25 bp, Homo sapien
tgtgagtcgacactcggcacgaaga

SEQ ID NO: 80405 - DNA, 25 bp, Homo sapien
attatacccttacgtgacactggac

SEQ ID NO: 80406 - DNA, 25 bp, Homo sapien
attatacccttaggtgacactggac

SEQ ID NO: 80407 - DNA, 25 bp, Homo sapien
gcccactcgcaccagtatataagtc

SEQ ID NO: 80408 - DNA, 25 bp, Homo sapien
gcccactcgcacgagtatataagtc

SEQ ID NO: 80409 - DNA, 25 bp, Homo sapien
gcagtgcgacttatatactggtgcg

SEQ ID NO: 80410 - DNA, 25 bp, Homo sapien
gcagtgcgacttttatactggtgcg

SEQ ID NO: 80411 - DNA, 25 bp, Homo sapien
ttacggtcttgacactttgtaagag

SEQ ID NO: 80412 - DNA, 25 bp, Homo sapien
ttacggtcttgagactttgtaagag

SEQ ID NO: 80413 - DNA, 25 bp, Homo sapien
cagttatagatatctcgtgcaaagt

SEQ ID NO: 80414 - DNA, 25 bp, Homo sapien
cagttatagataactcgtgcaaagt

SEQ ID NO: 80415 - DNA, 25 bp, Homo sapien
aaaaacttatttcatctatgataat

SEQ ID NO: 80416 - DNA, 25 bp, Homo sapien
aaaaacttatttgatctatgataat

SEQ ID NO: 80417 - DNA, 25 bp, Homo sapien
atattaggtctctgtcttaaacacg

SEQ ID NO: 80418 - DNA, 25 bp, Homo sapien
atattaggtctcagtcttaaacacg

SEQ ID NO: 80419 - DNA, 25 bp, Homo sapien
tggttgtgtgtcttgtctttccgag

SEQ ID NO: 80420 - DNA, 25 bp, Homo sapien
tggttgtgtgtcatgtctttccgag

SEQ ID NO: 80421 - DNA, 25 bp, Homo sapien
aagtagtcgattatacttacgtaac

SEQ ID NO: 80422 - DNA, 25 bp, Homo sapien
aagtagtcgattttacttacgtaac

SEQ ID NO: 80423 - DNA, 25 bp, Homo sapien
cggatctactcttttcttacgtaag

SEQ ID NO: 80424 - DNA, 25 bp, Homo sapien
cggatctactctattcttacgtaag

SEQ ID NO: 80425 - DNA, 25 bp, Homo sapien
cgtatgtcgtgtgaatttctatatc

SEQ ID NO: 80426 - DNA, 25 bp, Homo sapien
cgtatgtcgtgtcaatttctatatc

SEQ ID NO: 80427 - DNA, 25 bp, Homo sapien
ggtcttacttgtgtaatatctcaat

SEQ ID NO: 80428 - DNA, 25 bp, Homo sapien
ggtcttacttgtctaatatctcaat

SEQ ID NO: 80429 - DNA, 25 bp, Homo sapien
gtagtcctgtctacaattcaagact

SEQ ID NO: 80430 - DNA, 25 bp, Homo sapien
gtagtcctgtcttcaattcaagact

SEQ ID NO: 80431 - DNA, 25 bp, Homo sapien
gacacacgtcagtccgaccactgga

SEQ ID NO: 80432 - DNA, 25 bp, Homo sapien
gacacacgtcagaccgaccactgga

SEQ ID NO: 80433 - DNA, 25 bp, Homo sapien
cgaccaaagaaccatcgacgacgga

SEQ ID NO: 80434 - DNA, 25 bp, Homo sapien
cgaccaaagaacgatcgacgacgga

SEQ ID NO: 80435 - DNA, 25 bp, Homo sapien
aggaaggagcgctcccgacagaagt

SEQ ID NO: 80436 - DNA, 25 bp, Homo sapien
aggaaggagcgcacccgacagaagt

SEQ ID NO: 80437 - DNA, 25 bp, Homo sapien
cgtcgtggtccagcttcgacgacaa

SEQ ID NO: 80438 - DNA, 25 bp, Homo sapien
cgtcgtggtccaccttcgacgacaa

SEQ ID NO: 80439 - DNA, 25 bp, Homo sapien
cgtgggtcgtcctaccgtaactaca

SEQ ID NO: 80440 - DNA, 25 bp, Homo sapien
cgtgggtcgtccaaccgtaactaca

SEQ ID NO: 80441 - DNA, 25 bp, Homo sapien
acgaaggtcgaccaggacacacctc

SEQ ID NO: 80442 - DNA, 25 bp, Homo sapien
acgaaggtcgacgaggacacacctc

SEQ ID NO: 80443 - DNA, 25 bp, Homo sapien
gacgggtcgagtgacacggaacctc

SEQ ID NO: 80444 - DNA, 25 bp, Homo sapien
gacgggtcgagtcacacggaacctc

SEQ ID NO: 80445 - DNA, 25 bp, Homo sapien
gagtgtgaagggacatgacgcctac

SEQ ID NO: 80446 - DNA, 25 bp, Homo sapien
gagtgtgaagggtcatgacgcctac

SEQ ID NO: 80447 - DNA, 25 bp, Homo sapien
aagaggacagggacctgacgctgtc

SEQ ID NO: 80448 - DNA, 25 bp, Homo sapien
aagaggacagggtcctgacgctgtc

SEQ ID NO: 80449 - DNA, 25 bp, Homo sapien
tctgacccggggtcgtagactccgg

SEQ ID NO: 80450 - DNA, 25 bp, Homo sapien
tctgacccggggacgtagactccgg

SEQ ID NO: 80451 - DNA, 25 bp, Homo sapien
caccaagtccggtcttggacaccgg

SEQ ID NO: 80452 - DNA, 25 bp, Homo sapien
caccaagtccggacttggacaccgg

SEQ ID NO: 80453 - DNA, 25 bp, Homo sapien
cgttctccgtcctgtgtccgttaga

SEQ ID NO: 80454 - DNA, 25 bp, Homo sapien
cgttctccgtccagtgtccgttaga

SEQ ID NO: 80455 - DNA, 25 bp, Homo sapien
gaggacccgatcttggagcgacgac

SEQ ID NO: 80456 - DNA, 25 bp, Homo sapien
gaggacccgatcatggagcgacgac

SEQ ID NO: 80457 - DNA, 25 bp, Homo sapien
gagaggacccagaagtgtcggtcaa

SEQ ID NO: 80458 - DNA, 25 bp, Homo sapien
gagaggacccagtagtgtcggtcaa

SEQ ID NO: 80459 - DNA, 25 bp, Homo sapien
gagagtggtccacactttgtgcgac

SEQ ID NO: 80460 - DNA, 25 bp, Homo sapien
gagagtggtccagactttgtgcgac

SEQ ID NO: 80461 - DNA, 25 bp, Homo sapien
ttcacggtaccaggtttagtgtaga

SEQ ID NO: 80462 - DNA, 25 bp, Homo sapien
ttcacggtaccacgtttagtgtaga

SEQ ID NO: 80463 - DNA, 25 bp, Homo sapien
gtttacaacaaacctcagtgacgta

SEQ ID NO: 80464 - DNA, 25 bp, Homo sapien
gtttacaacaaagctcagtgacgta

SEQ ID NO: 80465 - DNA, 25 bp, Homo sapien
gtcgagtagaaccatacgcccgggg

SEQ ID NO: 80466 - DNA, 25 bp, Homo sapien
gtcgagtagaacgatacgcccgggg

SEQ ID NO: 80467 - DNA, 25 bp, Homo sapien
aatactaaacctaacacaggacgtg

SEQ ID NO: 80468 - DNA, 25 bp, Homo sapien
aatactaaaccttacacaggacgtg

SEQ ID NO: 80469 - DNA, 25 bp, Homo sapien
tctttacaaaatggtgtcagttcgt

SEQ ID NO: 80470 - DNA, 25 bp, Homo sapien
tctttacaaaatcgtgtcagttcgt

SEQ ID NO: 80471 - DNA, 25 bp, Homo sapien
ggttttacataaagtgtcttccttc

SEQ ID NO: 80472 - DNA, 25 bp, Homo sapien
ggttttacataatgtgtcttccttc

SEQ ID NO: 80473 - DNA, 25 bp, Homo sapien
ttcctcatcgatttctcgtgcatcg

SEQ ID NO: 80474 - DNA, 25 bp, Homo sapien
ttcctcatcgatatctcgtgcatcg

SEQ ID NO: 80475 - DNA, 25 bp, Homo sapien
tgttgtgtatacttttccgtcacct

SEQ ID NO: 80476 - DNA, 25 bp, Homo sapien
tgttgtgtatacatttccgtcacct

SEQ ID NO: 80477 - DNA, 25 bp, Homo sapien
tgaccggtttacacaatcgtcgtct

SEQ ID NO: 80478 - DNA, 25 bp, Homo sapien
tgaccggtttactcaatcgtcgtct

SEQ ID NO: 80479 - DNA, 25 bp, Homo sapien
acgtcccgggttcgacaagtgtatg

SEQ ID NO: 80480 - DNA, 25 bp, Homo sapien
acgtcccgggttggacaagtgtatg

SEQ ID NO: 80481 - DNA, 25 bp, Homo sapien
ccacgtcggtctgtaggacgatatt

SEQ ID NO: 80482 - DNA, 25 bp, Homo sapien
ccacgtcggtctctaggacgatatt

SEQ ID NO: 80483 - DNA, 25 bp, Homo sapien
cgaacctgtgtttccgacgtggaaa

SEQ ID NO: 80484 - DNA, 25 bp, Homo sapien
cgaacctgtgttaccgacgtggaaa

SEQ ID NO: 80485 - DNA, 25 bp, Homo sapien
aaatgtgtttacctgtaaacgacct

SEQ ID NO: 80486 - DNA, 25 bp, Homo sapien
aaatgtgtttacgtgtaaacgacct

SEQ ID NO: 80487 - DNA, 25 bp, Homo sapien
atagcgtccgccagtctgtgtcggt

SEQ ID NO: 80488 - DNA, 25 bp, Homo sapien
atagcgtccgcctgtctgtgtcggt

SEQ ID NO: 80489 - DNA, 25 bp, Homo sapien
ttaagatgaccttagtcggagtctg

SEQ ID NO: 80490 - DNA, 25 bp, Homo sapien
ttaagatgacctaagtcggagtctg

SEQ ID NO: 80491 - DNA, 25 bp, Homo sapien
aggttagatcaggtaatccgttcta

SEQ ID NO: 80492 - DNA, 25 bp, Homo sapien
aggttagatcagctaatccgttcta

SEQ ID NO: 80493 - DNA, 25 bp, Homo sapien
gtgtcggacctacaacccgtcctgt

SEQ ID NO: 80494 - DNA, 25 bp, Homo sapien
gtgtcggacctagaacccgtcctgt

SEQ ID NO: 80495 - DNA, 25 bp, Homo sapien
tgtagaggaacaggaagaccttaca

SEQ ID NO: 80496 - DNA, 25 bp, Homo sapien
tgtagaggaacacgaagaccttaca

SEQ ID NO: 80497 - DNA, 25 bp, Homo sapien
tagaatttcatgtcgcttacgagtc

SEQ ID NO: 80498 - DNA, 25 bp, Homo sapien
tagaatttcatgacgcttacgagtc

SEQ ID NO: 80499 - DNA, 25 bp, Homo sapien
aaaatgtcttttcttatcgagtacg

SEQ ID NO: 80500 - DNA, 25 bp, Homo sapien
aaaatgtcttttgttatcgagtacg

SEQ ID NO: 80501 - DNA, 25 bp, Homo sapien
gacctgaactcattgtttcagtatt

SEQ ID NO: 80502 - DNA, 25 bp, Homo sapien
gacctgaactcaatgtttcagtatt

SEQ ID NO: 80503 - DNA, 25 bp, Homo sapien
cctcgttacgtgatatagttttttc

SEQ ID NO: 80504 - DNA, 25 bp, Homo sapien
cctcgttacgtgttatagttttttc

SEQ ID NO: 80505 - DNA, 25 bp, Homo sapien
ttattactctatatgtttcattagt

SEQ ID NO: 80506 - DNA, 25 bp, Homo sapien
ttattactctatttgtttcattagt

SEQ ID NO: 80507 - DNA, 25 bp, Homo sapien
atgatcgtttcttcgttttcaggta

SEQ ID NO: 80508 - DNA, 25 bp, Homo sapien
atgatcgtttctacgttttcaggta

SEQ ID NO: 80509 - DNA, 25 bp, Homo sapien
aaaaggtatccttttcgcgtatgta

SEQ ID NO: 80510 - DNA, 25 bp, Homo sapien
aaaaggtatcctattcgcgtatgta

SEQ ID NO: 80511 - DNA, 25 bp, Homo sapien
acatcgactatctcctctgctggag

SEQ ID NO: 80512 - DNA, 25 bp, Homo sapien
acatcgactatcacctctgctggag

SEQ ID NO: 80513 - DNA, 25 bp, Homo sapien
gactcagttacaccttagaccggag

SEQ ID NO: 80514 - DNA, 25 bp, Homo sapien
gactcagttacagcttagaccggag

SEQ ID NO: 80515 - DNA, 25 bp, Homo sapien
ggacacctctcagtggtccaggtac

SEQ ID NO: 80516 - DNA, 25 bp, Homo sapien
ggacacctctcactggtccaggtac

SEQ ID NO: 80517 - DNA, 25 bp, Homo sapien
gtgaccccgtctaggcctcagtcga

SEQ ID NO: 80518 - DNA, 25 bp, Homo sapien
gtgaccccgtcttggcctcagtcga

SEQ ID NO: 80519 - DNA, 25 bp, Homo sapien
aggcccctcggtctgtcgtcatcga

SEQ ID NO: 80520 - DNA, 25 bp, Homo sapien
aggcccctcggtgtgtcgtcatcga

SEQ ID NO: 80521 - DNA, 25 bp, Homo sapien
cacctcgtcgctgtgtgaagtgacg

SEQ ID NO: 80522 - DNA, 25 bp, Homo sapien
cacctcgtcgctctgtgaagtgacg

SEQ ID NO: 80523 - DNA, 25 bp, Homo sapien
gtattatactccttgtggtgtagac

SEQ ID NO: 80524 - DNA, 25 bp, Homo sapien
gtattatactccatgtggtgtagac

SEQ ID NO: 80525 - DNA, 25 bp, Homo sapien
aactaatagacatctgaagtcatcg

SEQ ID NO: 80526 - DNA, 25 bp, Homo sapien
aactaatagacaactgaagtcatcg

SEQ ID NO: 80527 - DNA, 25 bp, Homo sapien
aggaacgtgaactccacgaaacaag

SEQ ID NO: 80528 - DNA, 25 bp, Homo sapien
aggaacgtgaacaccacgaaacaag

SEQ ID NO: 80529 - DNA, 25 bp, Homo sapien
cagtcggagcagaagacggacctga

SEQ ID NO: 80530 - DNA, 25 bp, Homo sapien
cagtcggagcagtagacggacctga

SEQ ID NO: 80531 - DNA, 25 bp, Homo sapien
cacgcgtggtaagaccctagaccga

SEQ ID NO: 80532 - DNA, 25 bp, Homo sapien
cacgcgtggtaacaccctagaccga

SEQ ID NO: 80533 - DNA, 25 bp, Homo sapien
cgagacctagagcatcctgtaggtc

SEQ ID NO: 80534 - DNA, 25 bp, Homo sapien
cgagacctagaggatcctgtaggtc

SEQ ID NO: 80535 - DNA, 25 bp, Homo sapien
ccggaaccacagagactctgaggct

SEQ ID NO: 80536 - DNA, 25 bp, Homo sapien
ccggaaccacagtgactctgaggct

SEQ ID NO: 80537 - DNA, 25 bp, Homo sapien
ctgcccagtcttcttcgtagtgtct

SEQ ID NO: 80538 - DNA, 25 bp, Homo sapien
ctgcccagtcttgttcgtagtgtct

SEQ ID NO: 80539 - DNA, 25 bp, Homo sapien
ctcctcgacggtcttttcggtcgtc

SEQ ID NO: 80540 - DNA, 25 bp, Homo sapien
ctcctcgacggtgttttcggtcgtc

SEQ ID NO: 80541 - DNA, 25 bp, Homo sapien
gtgatacgtgtattctctacaagtt

SEQ ID NO: 80542 - DNA, 25 bp, Homo sapien
gtgatacgtgtaatctctacaagtt

SEQ ID NO: 80543 - DNA, 25 bp, Homo sapien
aatctgtcaagtacctcatttcgtg

SEQ ID NO: 80544 - DNA, 25 bp, Homo sapien
aatctgtcaagttcctcatttcgtg

SEQ ID NO: 80545 - DNA, 25 bp, Homo sapien
ttagttgattcatcgtcccatctcg

SEQ ID NO: 80546 - DNA, 25 bp, Homo sapien
ttagttgattcaacgtcccatctcg

SEQ ID NO: 80547 - DNA, 25 bp, Homo sapien
ttatatgtccgcattccagtcgtcg

SEQ ID NO: 80548 - DNA, 25 bp, Homo sapien
ttatatgtccgctttccagtcgtcg

SEQ ID NO: 80549 - DNA, 25 bp, Homo sapien
acttacgtatctgtctctctccgag

SEQ ID NO: 80550 - DNA, 25 bp, Homo sapien
acttacgtatctctctctctccgag

SEQ ID NO: 80551 - DNA, 25 bp, Homo sapien
gtttgtgtcttactacgtattcgac

SEQ ID NO: 80552 - DNA, 25 bp, Homo sapien
gtttgtgtcttagtacgtattcgac

SEQ ID NO: 80553 - DNA, 25 bp, Homo sapien
tagttagtctgagacgtacattacg

SEQ ID NO: 80554 - DNA, 25 bp, Homo sapien
tagttagtctgacacgtacattacg

SEQ ID NO: 80555 - DNA, 25 bp, Homo sapien
gattagaagtacgatacttaccata

SEQ ID NO: 80556 - DNA, 25 bp, Homo sapien
gattagaagtaccatacttaccata

SEQ ID NO: 80557 - DNA, 25 bp, Homo sapien
cgatttctatcgacggtgaatactg

SEQ ID NO: 80558 - DNA, 25 bp, Homo sapien
cgatttctatcgtcggtgaatactg

SEQ ID NO: 80559 - DNA, 25 bp, Homo sapien
tttcgggactcttgcctgtgcccag

SEQ ID NO: 80560 - DNA, 25 bp, Homo sapien
tttcgggactctagcctgtgcccag

SEQ ID NO: 80561 - DNA, 25 bp, Homo sapien
ttacccgaaccgaagcaattttaag

SEQ ID NO: 80562 - DNA, 25 bp, Homo sapien
ttacccgaaccgtagcaattttaag

SEQ ID NO: 80563 - DNA, 25 bp, Homo sapien
ctaccaccggttcattagctagaag

SEQ ID NO: 80564 - DNA, 25 bp, Homo sapien
ctaccaccggttgattagctagaag

SEQ ID NO: 80565 - DNA, 25 bp, Homo sapien
gttagggaggtacaaactctacaag

SEQ ID NO: 80566 - DNA, 25 bp, Homo sapien
gttagggaggtagaaactctacaag

SEQ ID NO: 80567 - DNA, 25 bp, Homo sapien
tcgtaagaaattctacagacccaag

SEQ ID NO: 80568 - DNA, 25 bp, Homo sapien
tcgtaagaaattgtacagacccaag

SEQ ID NO: 80569 - DNA, 25 bp, Homo sapien
aaggaaacttatgacagaccacaat

SEQ ID NO: 80570 - DNA, 25 bp, Homo sapien
aaggaaacttatcacagaccacaat

SEQ ID NO: 80571 - DNA, 25 bp, Homo sapien
gaatgacctctctgggtgttacgat

SEQ ID NO: 80572 - DNA, 25 bp, Homo sapien
gaatgacctctcagggtgttacgat

SEQ ID NO: 80573 - DNA, 25 bp, Homo sapien
ccccttttcctgttagagttacagt

SEQ ID NO: 80574 - DNA, 25 bp, Homo sapien
ccccttttcctgatagagttacagt

SEQ ID NO: 80575 - DNA, 25 bp, Homo sapien
acagttttatgtgtacgacttacac

SEQ ID NO: 80576 - DNA, 25 bp, Homo sapien
acagttttatgtctacgacttacac

SEQ ID NO: 80577 - DNA, 25 bp, Homo sapien
acagtacatactgtattcacttaca

SEQ ID NO: 80578 - DNA, 25 bp, Homo sapien
acagtacatactctattcacttaca

SEQ ID NO: 80579 - DNA, 25 bp, Homo sapien
aaaggtctctaatacatcacgttga

SEQ ID NO: 80580 - DNA, 25 bp, Homo sapien
aaaggtctctaaaacatcacgttga

SEQ ID NO: 80581 - DNA, 25 bp, Homo sapien
agaagtccaacaaatatctgtatcg

SEQ ID NO: 80582 - DNA, 25 bp, Homo sapien
agaagtccaacatatatctgtatcg

SEQ ID NO: 80583 - DNA, 25 bp, Homo sapien
cagacgtctcacgagtacaaaaagt

SEQ ID NO: 80584 - DNA, 25 bp, Homo sapien
cagacgtctcaccagtacaaaaagt

SEQ ID NO: 80585 - DNA, 25 bp, Homo sapien
gtgtcatatctaggtaagtaccact

SEQ ID NO: 80586 - DNA, 25 bp, Homo sapien
gtgtcatatctacgtaagtaccact

SEQ ID NO: 80587 - DNA, 25 bp, Homo sapien
tggtgtacactacagtagaaaccct

SEQ ID NO: 80588 - DNA, 25 bp, Homo sapien
tggtgtacactagagtagaaaccct

SEQ ID NO: 80589 - DNA, 25 bp, Homo sapien
agtctatggttccattaaagacccg

SEQ ID NO: 80590 - DNA, 25 bp, Homo sapien
agtctatggttcgattaaagacccg

SEQ ID NO: 80591 - DNA, 25 bp, Homo sapien
aggttatcgatgtttatgtctttcc

SEQ ID NO: 80592 - DNA, 25 bp, Homo sapien
aggttatcgatgattatgtctttcc

SEQ ID NO: 80593 - DNA, 25 bp, Homo sapien
agggaggacaggtttcttcagtctc

SEQ ID NO: 80594 - DNA, 25 bp, Homo sapien
agggaggacaggattcttcagtctc

SEQ ID NO: 80595 - DNA, 25 bp, Homo sapien
gtcttgtcgagtttcataatatcct

SEQ ID NO: 80596 - DNA, 25 bp, Homo sapien
gtcttgtcgagtatcataatatcct

SEQ ID NO: 80597 - DNA, 25 bp, Homo sapien
tttctggaatgtcagacgacgaaat

SEQ ID NO: 80598 - DNA, 25 bp, Homo sapien
tttctggaatgtgagacgacgaaat

SEQ ID NO: 80599 - DNA, 25 bp, Homo sapien
aactggaagtcaacgtcgaacaggt

SEQ ID NO: 80600 - DNA, 25 bp, Homo sapien
aactggaagtcatcgtcgaacaggt

SEQ ID NO: 80601 - DNA, 25 bp, Homo sapien
gtgacaaagggcaacggtaactacc

SEQ ID NO: 80602 - DNA, 25 bp, Homo sapien
gtgacaaagggctacggtaactacc

SEQ ID NO: 80603 - DNA, 25 bp, Homo sapien
cagtgtagaactacgtcaactacag

SEQ ID NO: 80604 - DNA, 25 bp, Homo sapien
cagtgtagaacttcgtcaactacag

SEQ ID NO: 80605 - DNA, 25 bp, Homo sapien
aagacgtggcgctcgaccacgtagg

SEQ ID NO: 80606 - DNA, 25 bp, Homo sapien
aagacgtggcgcacgaccacgtagg

SEQ ID NO: 80607 - DNA, 25 bp, Homo sapien
accggtcgaccttaggcacgacgcg

SEQ ID NO: 80608 - DNA, 25 bp, Homo sapien
accggtcgacctaaggcacgacgcg

SEQ ID NO: 80609 - DNA, 25 bp, Homo sapien
tgtctcggatcgtcacggacccgtc

SEQ ID NO: 80610 - DNA, 25 bp, Homo sapien
tgtctcggatcgacacggacccgtc

SEQ ID NO: 80611 - DNA, 25 bp, Homo sapien
agtttgtgtatcgacacacccggta

SEQ ID NO: 80612 - DNA, 25 bp, Homo sapien
agtttgtgtatccacacacccggta

SEQ ID NO: 80613 - DNA, 25 bp, Homo sapien
gtcattattgtcgtaactaacaaga

SEQ ID NO: 80614 - DNA, 25 bp, Homo sapien
gtcattattgtcctaactaacaaga

SEQ ID NO: 80615 - DNA, 25 bp, Homo sapien
ctcgagtttagacacacaacacctg

SEQ ID NO: 80616 - DNA, 25 bp, Homo sapien
ctcgagtttagagacacaacacctg

SEQ ID NO: 80617 - DNA, 25 bp, Homo sapien
cctactgttttgtccagacatttgt

SEQ ID NO: 80618 - DNA, 25 bp, Homo sapien
cctactgttttgaccagacatttgt

SEQ ID NO: 80619 - DNA, 25 bp, Homo sapien
aaacgacagtactcgcaaagagtgc

SEQ ID NO: 80620 - DNA, 25 bp, Homo sapien
aaacgacagtacacgcaaagagtgc

SEQ ID NO: 80621 - DNA, 25 bp, Homo sapien
atacagaagacatcccgtgtagggg

SEQ ID NO: 80622 - DNA, 25 bp, Homo sapien
atacagaagacaacccgtgtagggg

SEQ ID NO: 80623 - DNA, 25 bp, Homo sapien
tcgaaaccacaaagtctctagtctg

SEQ ID NO: 80624 - DNA, 25 bp, Homo sapien
tcgaaaccacaatgtctctagtctg

SEQ ID NO: 80625 - DNA, 25 bp, Homo sapien
ccagaacaggacaacgtccgtgtga

SEQ ID NO: 80626 - DNA, 25 bp, Homo sapien
ccagaacaggactacgtccgtgtga

SEQ ID NO: 80627 - DNA, 25 bp, Homo sapien
ccggacgaaccgacatcctgtggac

SEQ ID NO: 80628 - DNA, 25 bp, Homo sapien
ccggacgaaccgtcatcctgtggac

SEQ ID NO: 80629 - DNA, 25 bp, Homo sapien
gagattctatctcctcttgtacgta

SEQ ID NO: 80630 - DNA, 25 bp, Homo sapien
gagattctatctgctcttgtacgta

SEQ ID NO: 80631 - DNA, 25 bp, Homo sapien
cgagtacttcttatctttacgtgtg

SEQ ID NO: 80632 - DNA, 25 bp, Homo sapien
cgagtacttcttttctttacgtgtg

SEQ ID NO: 80633 - DNA, 25 bp, Homo sapien
tctactgacttgtctacttccgtag

SEQ ID NO: 80634 - DNA, 25 bp, Homo sapien
tctactgacttgactacttccgtag

SEQ ID NO: 80635 - DNA, 25 bp, Homo sapien
gtctctacttcttctcataaagtaa

SEQ ID NO: 80636 - DNA, 25 bp, Homo sapien
gtctctacttctactcataaagtaa

SEQ ID NO: 80637 - DNA, 25 bp, Homo sapien
atgtggcacatcacaatgttaagat

SEQ ID NO: 80638 - DNA, 25 bp, Homo sapien
atgtggcacatctcaatgttaagat

SEQ ID NO: 80639 - DNA, 25 bp, Homo sapien
gggcaaatacctacatagacaagtc

SEQ ID NO: 80640 - DNA, 25 bp, Homo sapien
gggcaaataccttcatagacaagtc

SEQ ID NO: 80641 - DNA, 25 bp, Homo sapien
gcttctaagtatttttcaacagtcg

SEQ ID NO: 80642 - DNA, 25 bp, Homo sapien
gcttctaagtatatttcaacagtcg

SEQ ID NO: 80643 - DNA, 25 bp, Homo sapien
atgtttagtccgtcttttctgaatc

SEQ ID NO: 80644 - DNA, 25 bp, Homo sapien
atgtttagtccgacttttctgaatc

SEQ ID NO: 80645 - DNA, 25 bp, Homo sapien
actactgtagggtcttcggatactc

SEQ ID NO: 80646 - DNA, 25 bp, Homo sapien
actactgtagggacttcggatactc

SEQ ID NO: 80647 - DNA, 25 bp, Homo sapien
aaacagttagtgtatgaatccattc

SEQ ID NO: 80648 - DNA, 25 bp, Homo sapien
aaacagttagtgaatgaatccattc

SEQ ID NO: 80649 - DNA, 25 bp, Homo sapien
ctgaaagggaaagtaatccgagccg

SEQ ID NO: 80650 - DNA, 25 bp, Homo sapien
ctgaaagggaaactaatccgagccg

SEQ ID NO: 80651 - DNA, 25 bp, Homo sapien
aactagagaagactggacgttgttc

SEQ ID NO: 80652 - DNA, 25 bp, Homo sapien
aactagagaagagtggacgttgttc

SEQ ID NO: 80653 - DNA, 25 bp, Homo sapien
acgcaaaccgaagtagtccacgtgg

SEQ ID NO: 80654 - DNA, 25 bp, Homo sapien
acgcaaaccgaactagtccacgtgg

SEQ ID NO: 80655 - DNA, 25 bp, Homo sapien
ccgccacagaggagtacctcgtggt

SEQ ID NO: 80656 - DNA, 25 bp, Homo sapien
ccgccacagaggtgtacctcgtggt

SEQ ID NO: 80657 - DNA, 25 bp, Homo sapien
acatgtgtcgaaataacttgtcgtg

SEQ ID NO: 80658 - DNA, 25 bp, Homo sapien
acatgtgtcgaattaacttgtcgtg

SEQ ID NO: 80659 - DNA, 25 bp, Homo sapien
ctggaccttttgagttatcctccag

SEQ ID NO: 80660 - DNA, 25 bp, Homo sapien
ctggaccttttgtgttatcctccag

SEQ ID NO: 80661 - DNA, 25 bp, Homo sapien
accagtcatgtctattgaactgact

SEQ ID NO: 80662 - DNA, 25 bp, Homo sapien
accagtcatgtcaattgaactgact

SEQ ID NO: 80663 - DNA, 25 bp, Homo sapien
tggatgtcgttttatagttttaccc

SEQ ID NO: 80664 - DNA, 25 bp, Homo sapien
tggatgtcgtttaatagttttaccc

SEQ ID NO: 80665 - DNA, 25 bp, Homo sapien
gtgagtctcggtaccggttggcctt

SEQ ID NO: 80666 - DNA, 25 bp, Homo sapien
gtgagtctcggttccggttggcctt

SEQ ID NO: 80667 - DNA, 25 bp, Homo sapien
ctttctcagggaaggttccggagtg

SEQ ID NO: 80668 - DNA, 25 bp, Homo sapien
ctttctcagggatggttccggagtg

SEQ ID NO: 80669 - DNA, 25 bp, Homo sapien
aagttgagggatcgactctgaggac

SEQ ID NO: 80670 - DNA, 25 bp, Homo sapien
aagttgagggatggactctgaggac

SEQ ID NO: 80671 - DNA, 25 bp, Homo sapien
acatgtcatagtgcttctagccaaa

SEQ ID NO: 80672 - DNA, 25 bp, Homo sapien
acatgtcatagtccttctagccaaa

SEQ ID NO: 80673 - DNA, 25 bp, Homo sapien
actgtgtacgaaaaggaaccaacta

SEQ ID NO: 80674 - DNA, 25 bp, Homo sapien
actgtgtacgaataggaaccaacta

SEQ ID NO: 80675 - DNA, 25 bp, Homo sapien
cgtctccgaccactcaatgtgaaga

SEQ ID NO: 80676 - DNA, 25 bp, Homo sapien
cgtctccgaccagtcaatgtgaaga

SEQ ID NO: 80677 - DNA, 25 bp, Homo sapien
ccccagaccgaacaactattagagg

SEQ ID NO: 80678 - DNA, 25 bp, Homo sapien
ccccagaccgaagaactattagagg

SEQ ID NO: 80679 - DNA, 25 bp, Homo sapien
cttggtctccaacatctactaccgg

SEQ ID NO: 80680 - DNA, 25 bp, Homo sapien
cttggtctccaagatctactaccgg

SEQ ID NO: 80681 - DNA, 25 bp, Homo sapien
taggtcttcgacagggcctaacgtt

SEQ ID NO: 80682 - DNA, 25 bp, Homo sapien
taggtcttcgactgggcctaacgtt

SEQ ID NO: 80683 - DNA, 25 bp, Homo sapien
ttatcgtcggtaaacaaatcatcgg

SEQ ID NO: 80684 - DNA, 25 bp, Homo sapien
ttatcgtcggtatacaaatcatcgg

SEQ ID NO: 80685 - DNA, 25 bp, Homo sapien
acatcggaagagacatacatcgtat

SEQ ID NO: 80686 - DNA, 25 bp, Homo sapien
acatcggaagagtcatacatcgtat

SEQ ID NO: 80687 - DNA, 25 bp, Homo sapien
aaacgtcttaagatactaacttcgg

SEQ ID NO: 80688 - DNA, 25 bp, Homo sapien
aaacgtcttaagttactaacttcgg

SEQ ID NO: 80689 - DNA, 25 bp, Homo sapien
tggtgacacatttttcaatccgaag

SEQ ID NO: 80690 - DNA, 25 bp, Homo sapien
tggtgacacattattcaatccgaag

SEQ ID NO: 80691 - DNA, 25 bp, Homo sapien
aagacccctcaaaagatcctatagt

SEQ ID NO: 80692 - DNA, 25 bp, Homo sapien
aagacccctcaatagatcctatagt

SEQ ID NO: 80693 - DNA, 25 bp, Homo sapien
aaaaatcatcgatttataccgtggt

SEQ ID NO: 80694 - DNA, 25 bp, Homo sapien
aaaaatcatcgaattataccgtggt

SEQ ID NO: 80695 - DNA, 25 bp, Homo sapien
gatacatacgtcaacttattccgtg

SEQ ID NO: 80696 - DNA, 25 bp, Homo sapien
gatacatacgtctacttattccgtg

SEQ ID NO: 80697 - DNA, 25 bp, Homo sapien
tgtagtccggtaagagtcattctaa

SEQ ID NO: 80698 - DNA, 25 bp, Homo sapien
tgtagtccggtatgagtcattctaa

SEQ ID NO: 80699 - DNA, 25 bp, Homo sapien
gtgaagggtataagacacctataca

SEQ ID NO: 80700 - DNA, 25 bp, Homo sapien
gtgaagggtatatgacacctataca

SEQ ID NO: 80701 - DNA, 25 bp, Homo sapien
aagacgggtcgaggaccgacttcga

SEQ ID NO: 80702 - DNA, 25 bp, Homo sapien
aagacgggtcgacgaccgacttcga

SEQ ID NO: 80703 - DNA, 25 bp, Homo sapien
cgagtggtcgctaccgacgagacct

SEQ ID NO: 80704 - DNA, 25 bp, Homo sapien
cgagtggtcgcttccgacgagacct

SEQ ID NO: 80705 - DNA, 25 bp, Homo sapien
gctcgagttacctcctcgtcaaggt

SEQ ID NO: 80706 - DNA, 25 bp, Homo sapien
gctcgagttaccacctcgtcaaggt

SEQ ID NO: 80707 - DNA, 25 bp, Homo sapien
gtgtctattgccatactgtgtgggt

SEQ ID NO: 80708 - DNA, 25 bp, Homo sapien
gtgtctattgccttactgtgtgggt

SEQ ID NO: 80709 - DNA, 25 bp, Homo sapien
gtgttcctgacaccttttcgaagtt

SEQ ID NO: 80710 - DNA, 25 bp, Homo sapien
gtgttcctgacagcttttcgaagtt

SEQ ID NO: 80711 - DNA, 25 bp, Homo sapien
gtgtcctagtaacatatccacagat

SEQ ID NO: 80712 - DNA, 25 bp, Homo sapien
gtgtcctagtaagatatccacagat

SEQ ID NO: 80713 - DNA, 25 bp, Homo sapien
tgaggttcaggtcgaagccgcagat

SEQ ID NO: 80714 - DNA, 25 bp, Homo sapien
tgaggttcaggtggaagccgcagat

SEQ ID NO: 80715 - DNA, 25 bp, Homo sapien
aatgtcgacgtgtgaaacgttgaac

SEQ ID NO: 80716 - DNA, 25 bp, Homo sapien
aatgtcgacgtgagaaacgttgaac

SEQ ID NO: 80717 - DNA, 25 bp, Homo sapien
ggtaagtcagtgagccacgtgtgaa

SEQ ID NO: 80718 - DNA, 25 bp, Homo sapien
ggtaagtcagtgtgccacgtgtgaa

SEQ ID NO: 80719 - DNA, 25 bp, Homo sapien
gtagatagtcgtgctccatttggtg

SEQ ID NO: 80720 - DNA, 25 bp, Homo sapien
gtagatagtcgtcctccatttggtg

SEQ ID NO: 80721 - DNA, 25 bp, Homo sapien
tgacaactcgtggaaggtctatggg

SEQ ID NO: 80722 - DNA, 25 bp, Homo sapien
tgacaactcgtgcaaggtctatggg

SEQ ID NO: 80723 - DNA, 25 bp, Homo sapien
tcaggaagtgactccgtacatcggc

SEQ ID NO: 80724 - DNA, 25 bp, Homo sapien
tcaggaagtgacaccgtacatcggc

SEQ ID NO: 80725 - DNA, 25 bp, Homo sapien
tccagtcccgtccgaggttccggtc

SEQ ID NO: 80726 - DNA, 25 bp, Homo sapien
tccagtcccgtcggaggttccggtc

SEQ ID NO: 80727 - DNA, 25 bp, Homo sapien
tccggccacggtgaggtcctgtcac

SEQ ID NO: 80728 - DNA, 25 bp, Homo sapien
tccggccacggtcaggtcctgtcac

SEQ ID NO: 80729 - DNA, 25 bp, Homo sapien
gtcctacaaactaggtggtgtttca

SEQ ID NO: 80730 - DNA, 25 bp, Homo sapien
gtcctacaaacttggtggtgtttca

SEQ ID NO: 80731 - DNA, 25 bp, Homo sapien
cactaaatttacgacgtgtatttga

SEQ ID NO: 80732 - DNA, 25 bp, Homo sapien
cactaaatttaccacgtgtatttga

SEQ ID NO: 80733 - DNA, 25 bp, Homo sapien
acagaaggatttcctagcgttttga

SEQ ID NO: 80734 - DNA, 25 bp, Homo sapien
acagaaggatttgctagcgttttga

SEQ ID NO: 80735 - DNA, 25 bp, Homo sapien
cgtgagatatccactgtctttttgt

SEQ ID NO: 80736 - DNA, 25 bp, Homo sapien
cgtgagatatcctctgtctttttgt

SEQ ID NO: 80737 - DNA, 25 bp, Homo sapien
agaaactctgtccagaattttgtgt

SEQ ID NO: 80738 - DNA, 25 bp, Homo sapien
agaaactctgtcgagaattttgtgt

SEQ ID NO: 80739 - DNA, 25 bp, Homo sapien
gctgctgtgcttggatgtacttgtg

SEQ ID NO: 80740 - DNA, 25 bp, Homo sapien
gctgctgtgcttcgatgtacttgtg

SEQ ID NO: 80741 - DNA, 25 bp, Homo sapien
gaaccggtgattcttgtaccgtgct

SEQ ID NO: 80742 - DNA, 25 bp, Homo sapien
gaaccggtgattgttgtaccgtgct

SEQ ID NO: 80743 - DNA, 25 bp, Homo sapien
atactgtgtcatgtgtcctccgttt

SEQ ID NO: 80744 - DNA, 25 bp, Homo sapien
atactgtgtcatctgtcctccgttt

SEQ ID NO: 80745 - DNA, 25 bp, Homo sapien
ttttgagtagtttacacttagtacc

SEQ ID NO: 80746 - DNA, 25 bp, Homo sapien
ttttgagtagttaacacttagtacc

SEQ ID NO: 80747 - DNA, 25 bp, Homo sapien
aagttttactgtttgtaacaatgcc

SEQ ID NO: 80748 - DNA, 25 bp, Homo sapien
aagttttactgtatgtaacaatgcc

SEQ ID NO: 80749 - DNA, 25 bp, Homo sapien
ttaatagtacggattccgagatgcc

SEQ ID NO: 80750 - DNA, 25 bp, Homo sapien
ttaatagtacggtttccgagatgcc

SEQ ID NO: 80751 - DNA, 25 bp, Homo sapien
agtctcagtggctctggactcggac

SEQ ID NO: 80752 - DNA, 25 bp, Homo sapien
agtctcagtggcactggactcggac

SEQ ID NO: 80753 - DNA, 25 bp, Homo sapien
gaagtcggaaagtcgcattccgtcc

SEQ ID NO: 80754 - DNA, 25 bp, Homo sapien
gaagtcggaaagacgcattccgtcc

SEQ ID NO: 80755 - DNA, 25 bp, Homo sapien
tccagggaagaggtccaggtccgcc

SEQ ID NO: 80756 - DNA, 25 bp, Homo sapien
tccagggaagagctccaggtccgcc

SEQ ID NO: 80757 - DNA, 25 bp, Homo sapien
ccagtggaacgagtccagttgacca

SEQ ID NO: 80758 - DNA, 25 bp, Homo sapien
ccagtggaacgactccagttgacca

SEQ ID NO: 80759 - DNA, 25 bp, Homo sapien
catttgaacctacagactgtcgaac

SEQ ID NO: 80760 - DNA, 25 bp, Homo sapien
catttgaacctagagactgtcgaac

SEQ ID NO: 80761 - DNA, 25 bp, Homo sapien
aatcgtatgagtcttgatttctctt

SEQ ID NO: 80762 - DNA, 25 bp, Homo sapien
aatcgtatgagtgttgatttctctt

SEQ ID NO: 80763 - DNA, 25 bp, Homo sapien
attcgtaggtgtgtccttcttctta

SEQ ID NO: 80764 - DNA, 25 bp, Homo sapien
attcgtaggtgtctccttcttctta

SEQ ID NO: 80765 - DNA, 25 bp, Homo sapien
ttatcggggtcctttaatatctaca

SEQ ID NO: 80766 - DNA, 25 bp, Homo sapien
ttatcggggtccattaatatctaca

SEQ ID NO: 80767 - DNA, 25 bp, Homo sapien
gggaggactcccagttgacctcaga

SEQ ID NO: 80768 - DNA, 25 bp, Homo sapien
gggaggactccctgttgacctcaga

SEQ ID NO: 80769 - DNA, 25 bp, Homo sapien
ggtacactgtccttcgtgcgccgga

SEQ ID NO: 80770 - DNA, 25 bp, Homo sapien
ggtacactgtccatcgtgcgccgga

SEQ ID NO: 80771 - DNA, 25 bp, Homo sapien
ggtcggtgtcgtactttgtggcacc

SEQ ID NO: 80772 - DNA, 25 bp, Homo sapien
ggtcggtgtcgttctttgtggcacc

SEQ ID NO: 80773 - DNA, 25 bp, Homo sapien
gacgggtcgtgtctcttgggtctcc

SEQ ID NO: 80774 - DNA, 25 bp, Homo sapien
gacgggtcgtgtgtcttgggtctcc

SEQ ID NO: 80775 - DNA, 25 bp, Homo sapien
ggggtcgtcgaccgggacaggtcca

SEQ ID NO: 80776 - DNA, 25 bp, Homo sapien
ggggtcgtcgacggggacaggtcca

SEQ ID NO: 80777 - DNA, 25 bp, Homo sapien
gtttacgtgacgtcctcaactccga

SEQ ID NO: 80778 - DNA, 25 bp, Homo sapien
gtttacgtgacgacctcaactccga

SEQ ID NO: 80779 - DNA, 25 bp, Homo sapien
ggtccaagacacatcagaacaactt

SEQ ID NO: 80780 - DNA, 25 bp, Homo sapien
ggtccaagacacttcagaacaactt

SEQ ID NO: 80781 - DNA, 25 bp, Homo sapien
acccagtagacactcgtcaaccgaa

SEQ ID NO: 80782 - DNA, 25 bp, Homo sapien
acccagtagacagtcgtcaaccgaa

SEQ ID NO: 80783 - DNA, 25 bp, Homo sapien
gacccatgtacgaccccgagacgaa

SEQ ID NO: 80784 - DNA, 25 bp, Homo sapien
gacccatgtacgtccccgagacgaa

SEQ ID NO: 80785 - DNA, 25 bp, Homo sapien
ggaaaccggaacaccactgagagcc

SEQ ID NO: 80786 - DNA, 25 bp, Homo sapien
ggaaaccggaactccactgagagcc

SEQ ID NO: 80787 - DNA, 25 bp, Homo sapien
gaagtcttgaactccgacttcggcc

SEQ ID NO: 80788 - DNA, 25 bp, Homo sapien
gaagtcttgaacaccgacttcggcc

SEQ ID NO: 80789 - DNA, 25 bp, Homo sapien
atttttgacgaccatgattcaatag

SEQ ID NO: 80790 - DNA, 25 bp, Homo sapien
atttttgacgacgatgattcaatag

SEQ ID NO: 80791 - DNA, 25 bp, Homo sapien
gtgtcttcgaacacacgtttcaata

SEQ ID NO: 80792 - DNA, 25 bp, Homo sapien
gtgtcttcgaactcacgtttcaata

SEQ ID NO: 80793 - DNA, 25 bp, Homo sapien
ctacctaaaagtaccggctacaagt

SEQ ID NO: 80794 - DNA, 25 bp, Homo sapien
ctacctaaaagttccggctacaagt

SEQ ID NO: 80795 - DNA, 25 bp, Homo sapien
acagaaaaagttcgtgtcactagtc

SEQ ID NO: 80796 - DNA, 25 bp, Homo sapien
acagaaaaagttggtgtcactagtc

SEQ ID NO: 80797 - DNA, 25 bp, Homo sapien
cactttaaggtgtcgcgttactgtc

SEQ ID NO: 80798 - DNA, 25 bp, Homo sapien
cactttaaggtgacgcgttactgtc

SEQ ID NO: 80799 - DNA, 25 bp, Homo sapien
ctaaagtaatgtggactaccaaagt

SEQ ID NO: 80800 - DNA, 25 bp, Homo sapien
ctaaagtaatgtcgactaccaaagt

SEQ ID NO: 80801 - DNA, 25 bp, Homo sapien
cgtgtatccgagactcgtctaaagt

SEQ ID NO: 80802 - DNA, 25 bp, Homo sapien
cgtgtatccgagtctcgtctaaagt

SEQ ID NO: 80803 - DNA, 25 bp, Homo sapien
aactcgagtttgcaggcaaataaag

SEQ ID NO: 80804 - DNA, 25 bp, Homo sapien
aactcgagtttggaggcaaataaag

SEQ ID NO: 80805 - DNA, 25 bp, Homo sapien
ttacacattttgtgtccgaaaatag

SEQ ID NO: 80806 - DNA, 25 bp, Homo sapien
ttacacattttgagtccgaaaatag

SEQ ID NO: 80807 - DNA, 25 bp, Homo sapien
acccgtgctgcaagtggtccctaca

SEQ ID NO: 80808 - DNA, 25 bp, Homo sapien
acccgtgctgcatgtggtccctaca

SEQ ID NO: 80809 - DNA, 25 bp, Homo sapien
aacccggttgtgtctcccggtccta

SEQ ID NO: 80810 - DNA, 25 bp, Homo sapien
aacccggttgtgactcccggtccta

SEQ ID NO: 80811 - DNA, 25 bp, Homo sapien
gtcctcgggtctgtttcgggtccgg

SEQ ID NO: 80812 - DNA, 25 bp, Homo sapien
gtcctcgggtctctttcgggtccgg

SEQ ID NO: 80813 - DNA, 25 bp, Homo sapien
tcggggaccttccttggagtgttgt

SEQ ID NO: 80814 - DNA, 25 bp, Homo sapien
tcggggaccttcgttggagtgttgt

SEQ ID NO: 80815 - DNA, 25 bp, Homo sapien
gtcgtgtggaatcatttacatttgt

SEQ ID NO: 80816 - DNA, 25 bp, Homo sapien
gtcgtgtggaatgatttacatttgt

SEQ ID NO: 80817 - DNA, 25 bp, Homo sapien
ttgtcgttccaaaagtttaattctg

SEQ ID NO: 80818 - DNA, 25 bp, Homo sapien
ttgtcgttccaatagtttaattctg

SEQ ID NO: 80819 - DNA, 25 bp, Homo sapien
tttcttaaagattctccaagtgttt

SEQ ID NO: 80820 - DNA, 25 bp, Homo sapien
tttcttaaagatactccaagtgttt

SEQ ID NO: 80821 - DNA, 25 bp, Homo sapien
gtaagtacactcctcctacaggatc

SEQ ID NO: 80822 - DNA, 25 bp, Homo sapien
gtaagtacactcgtcctacaggatc

SEQ ID NO: 80823 - DNA, 25 bp, Homo sapien
aagtaaaaccaggttcaagtactac

SEQ ID NO: 80824 - DNA, 25 bp, Homo sapien
aagtaaaaccagcttcaagtactac

SEQ ID NO: 80825 - DNA, 25 bp, Homo sapien
gaagtagaagtgagagattaccacc

SEQ ID NO: 80826 - DNA, 25 bp, Homo sapien
gaagtagaagtgtgagattaccacc

SEQ ID NO: 80827 - DNA, 25 bp, Homo sapien
gtataagaagaattaagtcccctat

SEQ ID NO: 80828 - DNA, 25 bp, Homo sapien
gtataagaagaaataagtcccctat

SEQ ID NO: 80829 - DNA, 25 bp, Homo sapien
ttaactagtggtaatattagcccga

SEQ ID NO: 80830 - DNA, 25 bp, Homo sapien
ttaactagtggttatattagcccga

SEQ ID NO: 80831 - DNA, 25 bp, Homo sapien
gttcgagaagcactaacccccgcgg

SEQ ID NO: 80832 - DNA, 25 bp, Homo sapien
gttcgagaagcagtaacccccgcgg

SEQ ID NO: 80833 - DNA, 25 bp, Homo sapien
ggaaccaccgaaacgatctgtgtat

SEQ ID NO: 80834 - DNA, 25 bp, Homo sapien
ggaaccaccgaatcgatctgtgtat

SEQ ID NO: 80835 - DNA, 25 bp, Homo sapien
ggtcacactcgataaactacttgat

SEQ ID NO: 80836 - DNA, 25 bp, Homo sapien
ggtcacactcgaaaaactacttgat

SEQ ID NO: 80837 - DNA, 25 bp, Homo sapien
aacctgtacgttggtatgagttcac

SEQ ID NO: 80838 - DNA, 25 bp, Homo sapien
aacctgtacgttcgtatgagttcac

SEQ ID NO: 80839 - DNA, 25 bp, Homo sapien
cgttaagaaccttttcagtttgtaa

SEQ ID NO: 80840 - DNA, 25 bp, Homo sapien
cgttaagaacctattcagtttgtaa

SEQ ID NO: 80841 - DNA, 25 bp, Homo sapien
ttggataaatgttacgtacagttcc

SEQ ID NO: 80842 - DNA, 25 bp, Homo sapien
ttggataaatgtaacgtacagttcc

SEQ ID NO: 80843 - DNA, 25 bp, Homo sapien
ggcgaggactccttgtcaggtcgtc

SEQ ID NO: 80844 - DNA, 25 bp, Homo sapien
ggcgaggactccatgtcaggtcgtc

SEQ ID NO: 80845 - DNA, 25 bp, Homo sapien
agggggatggtatctcaacgacgtc

SEQ ID NO: 80846 - DNA, 25 bp, Homo sapien
agggggatggtaactcaacgacgtc

SEQ ID NO: 80847 - DNA, 25 bp, Homo sapien
tgggtggacgagaatcccgacgtcc

SEQ ID NO: 80848 - DNA, 25 bp, Homo sapien
tgggtggacgagtatcccgacgtcc

SEQ ID NO: 80849 - DNA, 25 bp, Homo sapien
agagtgtgtatacttccgggtctag

SEQ ID NO: 80850 - DNA, 25 bp, Homo sapien
agagtgtgtatagttccgggtctag

SEQ ID NO: 80851 - DNA, 25 bp, Homo sapien
aagacgcttcgttggatcggggtcc

SEQ ID NO: 80852 - DNA, 25 bp, Homo sapien
aagacgcttcgtaggatcggggtcc

SEQ ID NO: 80853 - DNA, 25 bp, Homo sapien
gagcctagaacgaccgagccgacgc

SEQ ID NO: 80854 - DNA, 25 bp, Homo sapien
gagcctagaacgtccgagccgacgc

SEQ ID NO: 80855 - DNA, 25 bp, Homo sapien
ccgcagcctctgatgcgggtccggc

SEQ ID NO: 80856 - DNA, 25 bp, Homo sapien
ccgcagcctctgttgcgggtccggc

SEQ ID NO: 80857 - DNA, 25 bp, Homo sapien
cggtgcacaggttctcggctccgga

SEQ ID NO: 80858 - DNA, 25 bp, Homo sapien
cggtgcacaggtactcggctccgga

SEQ ID NO: 80859 - DNA, 25 bp, Homo sapien
ggactccgacaggaccgggcctgac

SEQ ID NO: 80860 - DNA, 25 bp, Homo sapien
ggactccgacagcaccgggcctgac

SEQ ID NO: 80861 - DNA, 25 bp, Homo sapien
accgtaactacacgaggtcccagtc

SEQ ID NO: 80862 - DNA, 25 bp, Homo sapien
accgtaactacaggaggtcccagtc

SEQ ID NO: 80863 - DNA, 25 bp, Homo sapien
gaccgactagcgactaaacatacgt

SEQ ID NO: 80864 - DNA, 25 bp, Homo sapien
gaccgactagcgtctaaacatacgt

SEQ ID NO: 80865 - DNA, 25 bp, Homo sapien
gggagaccactggactgaatctaac

SEQ ID NO: 80866 - DNA, 25 bp, Homo sapien
gggagaccactgcactgaatctaac

SEQ ID NO: 80867 - DNA, 25 bp, Homo sapien
ggtctacactagctacagatttgat

SEQ ID NO: 80868 - DNA, 25 bp, Homo sapien
ggtctacactaggtacagatttgat

SEQ ID NO: 80869 - DNA, 25 bp, Homo sapien
gatcggatctcaagttccctttcat

SEQ ID NO: 80870 - DNA, 25 bp, Homo sapien
gatcggatctcatgttccctttcat

SEQ ID NO: 80871 - DNA, 25 bp, Homo sapien
aatacatattcagtatccctggtgg

SEQ ID NO: 80872 - DNA, 25 bp, Homo sapien
aatacatattcactatccctggtgg

SEQ ID NO: 80873 - DNA, 25 bp, Homo sapien
cataaggtcttttaaccttcgtcag

SEQ ID NO: 80874 - DNA, 25 bp, Homo sapien
cataaggtctttaaaccttcgtcag

SEQ ID NO: 80875 - DNA, 25 bp, Homo sapien
cacgaaagtctctcttatctttggg

SEQ ID NO: 80876 - DNA, 25 bp, Homo sapien
cacgaaagtctcacttatctttggg

SEQ ID NO: 80877 - DNA, 25 bp, Homo sapien
gagtagaaggtctccttttttggta

SEQ ID NO: 80878 - DNA, 25 bp, Homo sapien
gagtagaaggtcaccttttttggta

SEQ ID NO: 80879 - DNA, 25 bp, Homo sapien
gggaggcccctgatgtctcttctga

SEQ ID NO: 80880 - DNA, 25 bp, Homo sapien
gggaggcccctgttgtctcttctga

SEQ ID NO: 80881 - DNA, 25 bp, Homo sapien
ccttctccgtgaatctcactcgtca

SEQ ID NO: 80882 - DNA, 25 bp, Homo sapien
ccttctccgtgattctcactcgtca

SEQ ID NO: 80883 - DNA, 25 bp, Homo sapien
gatttctcactttcgtctctacaag

SEQ ID NO: 80884 - DNA, 25 bp, Homo sapien
gatttctcacttacgtctctacaag

SEQ ID NO: 80885 - DNA, 25 bp, Homo sapien
ctactctaacgtcgagtacttccag

SEQ ID NO: 80886 - DNA, 25 bp, Homo sapien
ctactctaacgtggagtacttccag

SEQ ID NO: 80887 - DNA, 25 bp, Homo sapien
caccctgtaactctagggtctaacg

SEQ ID NO: 80888 - DNA, 25 bp, Homo sapien
caccctgtaactgtagggtctaacg

SEQ ID NO: 80889 - DNA, 25 bp, Homo sapien
gacgaattcattttagtcttccacg

SEQ ID NO: 80890 - DNA, 25 bp, Homo sapien
gacgaattcattatagtcttccacg

SEQ ID NO: 80891 - DNA, 25 bp, Homo sapien
gaaattcatcattgtctcgtcatag

SEQ ID NO: 80892 - DNA, 25 bp, Homo sapien
gaaattcatcatagtctcgtcatag

SEQ ID NO: 80893 - DNA, 25 bp, Homo sapien
caggtccttctacttccgacccatg

SEQ ID NO: 80894 - DNA, 25 bp, Homo sapien
caggtccttctagttccgacccatg

SEQ ID NO: 80895 - DNA, 25 bp, Homo sapien
ggcgtccatcagtatcagcccgaag

SEQ ID NO: 80896 - DNA, 25 bp, Homo sapien
ggcgtccatcagaatcagcccgaag

SEQ ID NO: 80897 - DNA, 25 bp, Homo sapien
aaaccgttgccgaaaccgatgaacg

SEQ ID NO: 80898 - DNA, 25 bp, Homo sapien
aaaccgttgccgtaaccgatgaacg

SEQ ID NO: 80899 - DNA, 25 bp, Homo sapien
gactcctgttttaccgtgtactcct

SEQ ID NO: 80900 - DNA, 25 bp, Homo sapien
gactcctgtttttccgtgtactcct

SEQ ID NO: 80901 - DNA, 25 bp, Homo sapien
gggacccacttcttcactcggaaca

SEQ ID NO: 80902 - DNA, 25 bp, Homo sapien
gggacccacttcatcactcggaaca

SEQ ID NO: 80903 - DNA, 25 bp, Homo sapien
tcacgaccctgtacacttcagacga

SEQ ID NO: 80904 - DNA, 25 bp, Homo sapien
tcacgaccctgttcacttcagacga

SEQ ID NO: 80905 - DNA, 25 bp, Homo sapien
acactacgcccgacggaccgagtaa

SEQ ID NO: 80906 - DNA, 25 bp, Homo sapien
acactacgcccgtcggaccgagtaa

SEQ ID NO: 80907 - DNA, 25 bp, Homo sapien
gcctgtcggacgtcgtgcacgagaa

SEQ ID NO: 80908 - DNA, 25 bp, Homo sapien
gcctgtcggacgacgtgcacgagaa

SEQ ID NO: 80909 - DNA, 25 bp, Homo sapien
acttatgtcatgagggtccaagaga

SEQ ID NO: 80910 - DNA, 25 bp, Homo sapien
acttatgtcatgtgggtccaagaga

SEQ ID NO: 80911 - DNA, 25 bp, Homo sapien
actttgaacaggaattcgcacatca

SEQ ID NO: 80912 - DNA, 25 bp, Homo sapien
actttgaacaggtattcgcacatca

SEQ ID NO: 80913 - DNA, 25 bp, Homo sapien
gactgtaggggttctcgtcaatgtt

SEQ ID NO: 80914 - DNA, 25 bp, Homo sapien
gactgtaggggtactcgtcaatgtt

SEQ ID NO: 80915 - DNA, 25 bp, Homo sapien
agtctgtgaccgaccggggaccagt

SEQ ID NO: 80916 - DNA, 25 bp, Homo sapien
agtctgtgaccgtccggggaccagt

SEQ ID NO: 80917 - DNA, 25 bp, Homo sapien
ttacgtgtgatcacccgggtggaat

SEQ ID NO: 80918 - DNA, 25 bp, Homo sapien
ttacgtgtgatctcccgggtggaat

SEQ ID NO: 80919 - DNA, 25 bp, Homo sapien
atgggagtatgtaccgaatcaaact

SEQ ID NO: 80920 - DNA, 25 bp, Homo sapien
atgggagtatgttccgaatcaaact

SEQ ID NO: 80921 - DNA, 25 bp, Homo sapien
ccactctggtactgatcgtcatgat

SEQ ID NO: 80922 - DNA, 25 bp, Homo sapien
ccactctggtacagatcgtcatgat

SEQ ID NO: 80923 - DNA, 25 bp, Homo sapien
ctacgtcggtagtcgttatagtagt

SEQ ID NO: 80924 - DNA, 25 bp, Homo sapien
ctacgtcggtagacgttatagtagt

SEQ ID NO: 80925 - DNA, 25 bp, Homo sapien
gaaaatacatgtttcgtgtctacat

SEQ ID NO: 80926 - DNA, 25 bp, Homo sapien
gaaaatacatgtatcgtgtctacat

SEQ ID NO: 80927 - DNA, 25 bp, Homo sapien
aactaaggactactgtttacctaag

SEQ ID NO: 80928 - DNA, 25 bp, Homo sapien
aactaaggactagtgtttacctaag

SEQ ID NO: 80929 - DNA, 25 bp, Homo sapien
cgtctcctctctgtctttatctcgg

SEQ ID NO: 80930 - DNA, 25 bp, Homo sapien
cgtctcctctctctctttatctcgg

SEQ ID NO: 80931 - DNA, 25 bp, Homo sapien
ctcgtctttctgacgggtgtcgcgg

SEQ ID NO: 80932 - DNA, 25 bp, Homo sapien
ctcgtctttctgtcgggtgtcgcgg

SEQ ID NO: 80933 - DNA, 25 bp, Homo sapien
cgaccttcacgtgtaggtgtgtccg

SEQ ID NO: 80934 - DNA, 25 bp, Homo sapien
cgaccttcacgtctaggtgtgtccg

SEQ ID NO: 80935 - DNA, 25 bp, Homo sapien
tgtcccaagtgtcattcgtgtacct

SEQ ID NO: 80936 - DNA, 25 bp, Homo sapien
tgtcccaagtgtgattcgtgtacct

SEQ ID NO: 80937 - DNA, 25 bp, Homo sapien
tgcaaggtgttgatactactaagct

SEQ ID NO: 80938 - DNA, 25 bp, Homo sapien
tgcaaggtgttgttactactaagct

SEQ ID NO: 80939 - DNA, 25 bp, Homo sapien
aatcacccgtctttgtatgtatgtt

SEQ ID NO: 80940 - DNA, 25 bp, Homo sapien
aatcacccgtctatgtatgtatgtt

SEQ ID NO: 80941 - DNA, 25 bp, Homo sapien
tcacccgtgagtttatagactactt

SEQ ID NO: 80942 - DNA, 25 bp, Homo sapien
tcacccgtgagtatatagactactt

SEQ ID NO: 80943 - DNA, 25 bp, Homo sapien
tttcatgattggagtaacattactc

SEQ ID NO: 80944 - DNA, 25 bp, Homo sapien
tttcatgattggtgtaacattactc

SEQ ID NO: 80945 - DNA, 25 bp, Homo sapien
acaaactcgtttgcttctccattta

SEQ ID NO: 80946 - DNA, 25 bp, Homo sapien
acaaactcgtttccttctccattta

SEQ ID NO: 80947 - DNA, 25 bp, Homo sapien
gaaactcttatctaaccggtatttg

SEQ ID NO: 80948 - DNA, 25 bp, Homo sapien
gaaactcttatcaaaccggtatttg

SEQ ID NO: 80949 - DNA, 25 bp, Homo sapien
aacacttctttaatgactttttatt

SEQ ID NO: 80950 - DNA, 25 bp, Homo sapien
aacacttctttattgactttttatt

SEQ ID NO: 80951 - DNA, 25 bp, Homo sapien
aatgcattcggttcgtttggtccat

SEQ ID NO: 80952 - DNA, 25 bp, Homo sapien
aatgcattcggtacgtttggtccat

SEQ ID NO: 80953 - DNA, 25 bp, Homo sapien
ggtatgtgaaaacgttttgttactt

SEQ ID NO: 80954 - DNA, 25 bp, Homo sapien
ggtatgtgaaaaggttttgttactt

SEQ ID NO: 80955 - DNA, 25 bp, Homo sapien
tctgtcagttgtgaatctctgttaa

SEQ ID NO: 80956 - DNA, 25 bp, Homo sapien
tctgtcagttgtcaatctctgttaa

SEQ ID NO: 80957 - DNA, 25 bp, Homo sapien
tctgaatattcgatataccatcgaa

SEQ ID NO: 80958 - DNA, 25 bp, Homo sapien
tctgaatattcgttataccatcgaa

SEQ ID NO: 80959 - DNA, 25 bp, Homo sapien
actagagacggtcataatactacac

SEQ ID NO: 80960 - DNA, 25 bp, Homo sapien
actagagacggtgataatactacac

SEQ ID NO: 80961 - DNA, 25 bp, Homo sapien
tatacaggtactaatagtccatacg

SEQ ID NO: 80962 - DNA, 25 bp, Homo sapien
tatacaggtacttatagtccatacg

SEQ ID NO: 80963 - DNA, 25 bp, Homo sapien
ttcttactgctacgaggcgacggcg

SEQ ID NO: 80964 - DNA, 25 bp, Homo sapien
ttcttactgctaggaggcgacggcg

SEQ ID NO: 80965 - DNA, 25 bp, Homo sapien
ctctcgttgtgagttggtcacttcg

SEQ ID NO: 80966 - DNA, 25 bp, Homo sapien
ctctcgttgtgacttggtcacttcg

SEQ ID NO: 80967 - DNA, 25 bp, Homo sapien
agtcctttcgaccattgacagtggt

SEQ ID NO: 80968 - DNA, 25 bp, Homo sapien
agtcctttcgacgattgacagtggt

SEQ ID NO: 80969 - DNA, 25 bp, Homo sapien
aaatcctgtgtgtggagcatgtcgg

SEQ ID NO: 80970 - DNA, 25 bp, Homo sapien
aaatcctgtgtgaggagcatgtcgg

SEQ ID NO: 80971 - DNA, 25 bp, Homo sapien
gtttcgtgtaagagttaccgcctct

SEQ ID NO: 80972 - DNA, 25 bp, Homo sapien
gtttcgtgtaagtgttaccgcctct

SEQ ID NO: 80973 - DNA, 25 bp, Homo sapien
ggtttgtagagaggtgactgacacc

SEQ ID NO: 80974 - DNA, 25 bp, Homo sapien
ggtttgtagagacgtgactgacacc

SEQ ID NO: 80975 - DNA, 25 bp, Homo sapien
tctgaatacgagacacgttaccgac

SEQ ID NO: 80976 - DNA, 25 bp, Homo sapien
tctgaatacgagtcacgttaccgac

SEQ ID NO: 80977 - DNA, 25 bp, Homo sapien
cagagccatgtagagttactccgcc

SEQ ID NO: 80978 - DNA, 25 bp, Homo sapien
cagagccatgtacagttactccgcc

SEQ ID NO: 80979 - DNA, 25 bp, Homo sapien
aaaataatctgtgccggtccgtctc

SEQ ID NO: 80980 - DNA, 25 bp, Homo sapien
aaaataatctgtcccggtccgtctc

SEQ ID NO: 80981 - DNA, 25 bp, Homo sapien
gacataaaaatgactccgtcccgtc

SEQ ID NO: 80982 - DNA, 25 bp, Homo sapien
gacataaaaatgtctccgtcccgtc

SEQ ID NO: 80983 - DNA, 25 bp, Homo sapien
aaaagaagaagtttactcgcttacc

SEQ ID NO: 80984 - DNA, 25 bp, Homo sapien
aaaagaagaagtatactcgcttacc

SEQ ID NO: 80985 - DNA, 25 bp, Homo sapien
ggaaaatagtctgaatactccatca

SEQ ID NO: 80986 - DNA, 25 bp, Homo sapien
ggaaaatagtctcaatactccatca

SEQ ID NO: 80987 - DNA, 25 bp, Homo sapien
aaagtataatgtatctctcgttcag

SEQ ID NO: 80988 - DNA, 25 bp, Homo sapien
aaagtataatgtttctctcgttcag

SEQ ID NO: 80989 - DNA, 25 bp, Homo sapien
gactgtttcgaatctttccttgact

SEQ ID NO: 80990 - DNA, 25 bp, Homo sapien
gactgtttcgaaactttccttgact

SEQ ID NO: 80991 - DNA, 25 bp, Homo sapien
ggagactctttcactttaaccccga

SEQ ID NO: 80992 - DNA, 25 bp, Homo sapien
ggagactctttctctttaaccccga

SEQ ID NO: 80993 - DNA, 25 bp, Homo sapien
cgtatcagtagcagggaaagccaca

SEQ ID NO: 80994 - DNA, 25 bp, Homo sapien
cgtatcagtagctgggaaagccaca

SEQ ID NO: 80995 - DNA, 25 bp, Homo sapien
gttattcggtcttttggaatccata

SEQ ID NO: 80996 - DNA, 25 bp, Homo sapien
gttattcggtctattggaatccata

SEQ ID NO: 80997 - DNA, 25 bp, Homo sapien
ttcacggtggttatgggaaaccttc

SEQ ID NO: 80998 - DNA, 25 bp, Homo sapien
ttcacggtggttttgggaaaccttc

SEQ ID NO: 80999 - DNA, 25 bp, Homo sapien
atccagttaatatgatttctcttct

SEQ ID NO: 81000 - DNA, 25 bp, Homo sapien
atccagttaataagatttctcttct

SEQ ID NO: 81001 - DNA, 25 bp, Homo sapien
aatgtcatctcgaaatgtttttatc

SEQ ID NO: 81002 - DNA, 25 bp, Homo sapien
aatgtcatctcgtaatgtttttatc

SEQ ID NO: 81003 - DNA, 25 bp, Homo sapien
gatcatttataacgttatcggtccg

SEQ ID NO: 81004 - DNA, 25 bp, Homo sapien
gatcatttataaggttatcggtccg

SEQ ID NO: 81005 - DNA, 25 bp, Homo sapien
ctacttaaattcagtttggtgtcta

SEQ ID NO: 81006 - DNA, 25 bp, Homo sapien
ctacttaaattctgtttggtgtcta

SEQ ID NO: 81007 - DNA, 25 bp, Homo sapien
ctgaggtcccgcaagaaccgactgt

SEQ ID NO: 81008 - DNA, 25 bp, Homo sapien
ctgaggtcccgctagaaccgactgt

SEQ ID NO: 81009 - DNA, 25 bp, Homo sapien
gtgagtgtcccctgacaacacagta

SEQ ID NO: 81010 - DNA, 25 bp, Homo sapien
gtgagtgtccccagacaacacagta

SEQ ID NO: 81011 - DNA, 25 bp, Homo sapien
ctgtgggacgtcaaggaacgacctg

SEQ ID NO: 81012 - DNA, 25 bp, Homo sapien
ctgtgggacgtctaggaacgacctg

SEQ ID NO: 81013 - DNA, 25 bp, Homo sapien
gatggaggacacacgaacagaagta

SEQ ID NO: 81014 - DNA, 25 bp, Homo sapien
gatggaggacactcgaacagaagta

SEQ ID NO: 81015 - DNA, 25 bp, Homo sapien
tattaatccatatcgaacagtggtc

SEQ ID NO: 81016 - DNA, 25 bp, Homo sapien
tattaatccataacgaacagtggtc

SEQ ID NO: 81017 - DNA, 25 bp, Homo sapien
acgcccactcgcaccagtatataag

SEQ ID NO: 81018 - DNA, 25 bp, Homo sapien
acgcccactcgctccagtatataag

SEQ ID NO: 81019 - DNA, 25 bp, Homo sapien
tgcgacttatatactggtgcgagtg

SEQ ID NO: 81020 - DNA, 25 bp, Homo sapien
tgcgacttatattctggtgcgagtg

SEQ ID NO: 81021 - DNA, 25 bp, Homo sapien
tgtagggttgacctctttgaacgtg

SEQ ID NO: 81022 - DNA, 25 bp, Homo sapien
tgtagggttgacgtctttgaacgtg

SEQ ID NO: 81023 - DNA, 25 bp, Homo sapien
ggacactttagagtctcggacaaag

SEQ ID NO: 81024 - DNA, 25 bp, Homo sapien
ggacactttagactctcggacaaag

SEQ ID NO: 81025 - DNA, 25 bp, Homo sapien
aaattattttatgacgtgtatatat

SEQ ID NO: 81026 - DNA, 25 bp, Homo sapien
aaattattttatcacgtgtatatat

SEQ ID NO: 81027 - DNA, 25 bp, Homo sapien
aattagtgttgttccggtactacac

SEQ ID NO: 81028 - DNA, 25 bp, Homo sapien
aattagtgttgtaccggtactacac

SEQ ID NO: 81029 - DNA, 25 bp, Homo sapien
taggttgtatgttgtctctttacca

SEQ ID NO: 81030 - DNA, 25 bp, Homo sapien
taggttgtatgtagtctctttacca

SEQ ID NO: 81031 - DNA, 25 bp, Homo sapien
acagtcgtgatttctatatacaacg

SEQ ID NO: 81032 - DNA, 25 bp, Homo sapien
acagtcgtgattactatatacaacg

SEQ ID NO: 81033 - DNA, 25 bp, Homo sapien
gagacgtttctcattttacgtacag

SEQ ID NO: 81034 - DNA, 25 bp, Homo sapien
gagacgtttctctttttacgtacag

SEQ ID NO: 81035 - DNA, 25 bp, Homo sapien
cgtacggttgtgtttgtgtctattc

SEQ ID NO: 81036 - DNA, 25 bp, Homo sapien
cgtacggttgtgattgtgtctattc

SEQ ID NO: 81037 - DNA, 25 bp, Homo sapien
gtcgtctctttcgaagagtctcgaa

SEQ ID NO: 81038 - DNA, 25 bp, Homo sapien
gtcgtctctttccaagagtctcgaa

SEQ ID NO: 81039 - DNA, 25 bp, Homo sapien
acgtctctctctacaaagtgacaga

SEQ ID NO: 81040 - DNA, 25 bp, Homo sapien
acgtctctctcttcaaagtgacaga

SEQ ID NO: 81041 - DNA, 25 bp, Homo sapien
tatctacgtccgtccgaccagggac

SEQ ID NO: 81042 - DNA, 25 bp, Homo sapien
tatctacgtccgaccgaccagggac

SEQ ID NO: 81043 - DNA, 25 bp, Homo sapien
tcgaccagaaggacgaccggaggac

SEQ ID NO: 81044 - DNA, 25 bp, Homo sapien
tcgaccagaaggtcgaccggaggac

SEQ ID NO: 81045 - DNA, 25 bp, Homo sapien
ggttgagaagtctcccgagacgaag

SEQ ID NO: 81046 - DNA, 25 bp, Homo sapien
ggttgagaagtcacccgagacgaag

SEQ ID NO: 81047 - DNA, 25 bp, Homo sapien
agtgggtacctactactgacgacaa

SEQ ID NO: 81048 - DNA, 25 bp, Homo sapien
agtgggtacctagtactgacgacaa

SEQ ID NO: 81049 - DNA, 25 bp, Homo sapien
tcgtgcatccgctactagtacaaca

SEQ ID NO: 81050 - DNA, 25 bp, Homo sapien
tcgtgcatccgcaactagtacaaca

SEQ ID NO: 81051 - DNA, 25 bp, Homo sapien
cggggtcacatacgtagacacgttc

SEQ ID NO: 81052 - DNA, 25 bp, Homo sapien
cggggtcacataggtagacacgttc

SEQ ID NO: 81053 - DNA, 25 bp, Homo sapien
cacggacgtcgaggaccggaatatc

SEQ ID NO: 81054 - DNA, 25 bp, Homo sapien
cacggacgtcgacgaccggaatatc

SEQ ID NO: 81055 - DNA, 25 bp, Homo sapien
ggagtggaatggacatgatactacc

SEQ ID NO: 81056 - DNA, 25 bp, Homo sapien
ggagtggaatggtcatgatactacc

SEQ ID NO: 81057 - DNA, 25 bp, Homo sapien
taagggacgaggaaacctgctcttc

SEQ ID NO: 81058 - DNA, 25 bp, Homo sapien
taagggacgaggtaacctgctcttc

SEQ ID NO: 81059 - DNA, 25 bp, Homo sapien
tctgacccggggatagagaccctag

SEQ ID NO: 81060 - DNA, 25 bp, Homo sapien
tctgacccggggttagagaccctag

SEQ ID NO: 81061 - DNA, 25 bp, Homo sapien
tcaccgacccggagttggacactgg

SEQ ID NO: 81062 - DNA, 25 bp, Homo sapien
tcaccgacccggtgttggacactgg

SEQ ID NO: 81063 - DNA, 25 bp, Homo sapien
ctccgtcttccgtggtggagttaga

SEQ ID NO: 81064 - DNA, 25 bp, Homo sapien
ctccgtcttccgaggtggagttaga

SEQ ID NO: 81065 - DNA, 25 bp, Homo sapien
tgtaggtgtccgacgatggagaaca

SEQ ID NO: 81066 - DNA, 25 bp, Homo sapien
tgtaggtgtccgtcgatggagaaca

SEQ ID NO: 81067 - DNA, 25 bp, Homo sapien
agaaggacccggagtagtcataaag

SEQ ID NO: 81068 - DNA, 25 bp, Homo sapien
agaaggacccggtgtagtcataaag

SEQ ID NO: 81069 - DNA, 25 bp, Homo sapien
tgagagtggtccacactttgtgcga

SEQ ID NO: 81070 - DNA, 25 bp, Homo sapien
tgagagtggtcctcactttgtgcga

SEQ ID NO: 81071 - DNA, 25 bp, Homo sapien
ctgacgtgtatccacttctgtgtga

SEQ ID NO: 81072 - DNA, 25 bp, Homo sapien
ctgacgtgtatcgacttctgtgtga

SEQ ID NO: 81073 - DNA, 25 bp, Homo sapien
ttttcaaatagactcgtagtgacta

SEQ ID NO: 81074 - DNA, 25 bp, Homo sapien
ttttcaaatagagtcgtagtgacta

SEQ ID NO: 81075 - DNA, 25 bp, Homo sapien
cgtcctagaactcaaccagcgggag

SEQ ID NO: 81076 - DNA, 25 bp, Homo sapien
cgtcctagaactgaaccagcgggag

SEQ ID NO: 81077 - DNA, 25 bp, Homo sapien
cctactaaaccaccacgtcggtagg

SEQ ID NO: 81078 - DNA, 25 bp, Homo sapien
cctactaaaccagcacgtcggtagg

SEQ ID NO: 81079 - DNA, 25 bp, Homo sapien
ccttcaacacatgtagactgttcgt

SEQ ID NO: 81080 - DNA, 25 bp, Homo sapien
ccttcaacacatctagactgttcgt

SEQ ID NO: 81081 - DNA, 25 bp, Homo sapien
cccttgtaaacaagtgtttaccttg

SEQ ID NO: 81082 - DNA, 25 bp, Homo sapien
cccttgtaaacatgtgtttaccttg

SEQ ID NO: 81083 - DNA, 25 bp, Homo sapien
tcctcatcgatttctcgtgcatcgt

SEQ ID NO: 81084 - DNA, 25 bp, Homo sapien
tcctcatcgattactcgtgcatcgt

SEQ ID NO: 81085 - DNA, 25 bp, Homo sapien
tggtgttgactgtttctgcacacgt

SEQ ID NO: 81086 - DNA, 25 bp, Homo sapien
tggtgttgactgattctgcacacgt

SEQ ID NO: 81087 - DNA, 25 bp, Homo sapien
tgttcgtgggtcactattctacgtc

SEQ ID NO: 81088 - DNA, 25 bp, Homo sapien
tgttcgtgggtctctattctacgtc

SEQ ID NO: 81089 - DNA, 25 bp, Homo sapien
gatgtctgggttgtacacatcgttg

SEQ ID NO: 81090 - DNA, 25 bp, Homo sapien
gatgtctgggttctacacatcgttg

SEQ ID NO: 81091 - DNA, 25 bp, Homo sapien
ctcggtgtgtctcctactaattatt

SEQ ID NO: 81092 - DNA, 25 bp, Homo sapien
ctcggtgtgtctgctactaattatt

SEQ ID NO: 81093 - DNA, 25 bp, Homo sapien
tcgacaccttgctccactcggttaa

SEQ ID NO: 81094 - DNA, 25 bp, Homo sapien
tcgacaccttgcaccactcggttaa

SEQ ID NO: 81095 - DNA, 25 bp, Homo sapien
aacgatgtgtatactttaaacagtc

SEQ ID NO: 81096 - DNA, 25 bp, Homo sapien
aacgatgtgtattctttaaacagtc

SEQ ID NO: 81097 - DNA, 25 bp, Homo sapien
catgtgtccctcaagttagtagtgt

SEQ ID NO: 81098 - DNA, 25 bp, Homo sapien
catgtgtccctctagttagtagtgt

SEQ ID NO: 81099 - DNA, 25 bp, Homo sapien
cttaaagtcccctgtgtaagtctag

SEQ ID NO: 81100 - DNA, 25 bp, Homo sapien
cttaaagtccccagtgtaagtctag

SEQ ID NO: 81101 - DNA, 25 bp, Homo sapien
gtttagactctatagataccgttca

SEQ ID NO: 81102 - DNA, 25 bp, Homo sapien
gtttagactctaaagataccgttca

SEQ ID NO: 81103 - DNA, 25 bp, Homo sapien
catgtcggacctacaacccgtcttg

SEQ ID NO: 81104 - DNA, 25 bp, Homo sapien
catgtcggaccttcaacccgtcttg

SEQ ID NO: 81105 - DNA, 25 bp, Homo sapien
ttagtggaacagcaacgacctcttg

SEQ ID NO: 81106 - DNA, 25 bp, Homo sapien
ttagtggaacaggaacgacctcttg

SEQ ID NO: 81107 - DNA, 25 bp, Homo sapien
agaaatctcaggtctcggtacagtc

SEQ ID NO: 81108 - DNA, 25 bp, Homo sapien
agaaatctcaggactcggtacagtc

SEQ ID NO: 81109 - DNA, 25 bp, Homo sapien
aaatttttacacctacgatgagtac

SEQ ID NO: 81110 - DNA, 25 bp, Homo sapien
aaatttttacacgtacgatgagtac

SEQ ID NO: 81111 - DNA, 25 bp, Homo sapien
acatttatcgaatttgtcagtatgt

SEQ ID NO: 81112 - DNA, 25 bp, Homo sapien
acatttatcgaaattgtcagtatgt

SEQ ID NO: 81113 - DNA, 25 bp, Homo sapien
cccgtgtataccatattgttagttt

SEQ ID NO: 81114 - DNA, 25 bp, Homo sapien
cccgtgtataccttattgttagttt

SEQ ID NO: 81115 - DNA, 25 bp, Homo sapien
gtctactaactttatgtcacgttgt

SEQ ID NO: 81116 - DNA, 25 bp, Homo sapien
gtctactaacttaatgtcacgttgt

SEQ ID NO: 81117 - DNA, 25 bp, Homo sapien
tgaactacatccttatattcaggag

SEQ ID NO: 81118 - DNA, 25 bp, Homo sapien
tgaactacatccatatattcaggag

SEQ ID NO: 81119 - DNA, 25 bp, Homo sapien
acaaatgttccttttatgtacgtga

SEQ ID NO: 81120 - DNA, 25 bp, Homo sapien
acaaatgttcctattatgtacgtga

SEQ ID NO: 81121 - DNA, 25 bp, Homo sapien
ccatcacatccacttcgtcgtgaga

SEQ ID NO: 81122 - DNA, 25 bp, Homo sapien
ccatcacatccagttcgtcgtgaga

SEQ ID NO: 81123 - DNA, 25 bp, Homo sapien
gacctagtcgcactctctcacgaga

SEQ ID NO: 81124 - DNA, 25 bp, Homo sapien
gacctagtcgcagtctctcacgaga

SEQ ID NO: 81125 - DNA, 25 bp, Homo sapien
gaaactcttacgagggtacctagga

SEQ ID NO: 81126 - DNA, 25 bp, Homo sapien
gaaactcttacgtgggtacctagga

SEQ ID NO: 81127 - DNA, 25 bp, Homo sapien
gtagactccccgaggacctcttcga

SEQ ID NO: 81128 - DNA, 25 bp, Homo sapien
gtagactccccgtggacctcttcga

SEQ ID NO: 81129 - DNA, 25 bp, Homo sapien
gtgtctccaccgtcgaatccttcga

SEQ ID NO: 81130 - DNA, 25 bp, Homo sapien
gtgtctccaccgacgaatccttcga

SEQ ID NO: 81131 - DNA, 25 bp, Homo sapien
gtcacactcgtcatcgggtgcatga

SEQ ID NO: 81132 - DNA, 25 bp, Homo sapien
gtcacactcgtcttcgggtgcatga

SEQ ID NO: 81133 - DNA, 25 bp, Homo sapien
gtagttgtacccttcgtgggacgac

SEQ ID NO: 81134 - DNA, 25 bp, Homo sapien
gtagttgtacccatcgtgggacgac

SEQ ID NO: 81135 - DNA, 25 bp, Homo sapien
cggataagtaaagtgacagtcaact

SEQ ID NO: 81136 - DNA, 25 bp, Homo sapien
cggataagtaaactgacagtcaact

SEQ ID NO: 81137 - DNA, 25 bp, Homo sapien
gagaaagtgacctcacagaaacaat

SEQ ID NO: 81138 - DNA, 25 bp, Homo sapien
gagaaagtgaccacacagaaacaat

SEQ ID NO: 81139 - DNA, 25 bp, Homo sapien
tctaggtgagcaataagagcctgct

SEQ ID NO: 81140 - DNA, 25 bp, Homo sapien
tctaggtgagcattaagagcctgct

SEQ ID NO: 81141 - DNA, 25 bp, Homo sapien
ccggtcgagtcagacaccggaggta

SEQ ID NO: 81142 - DNA, 25 bp, Homo sapien
ccggtcgagtcacacaccggaggta

SEQ ID NO: 81143 - DNA, 25 bp, Homo sapien
cagacgactaagacgtctctgtggc

SEQ ID NO: 81144 - DNA, 25 bp, Homo sapien
cagacgactaagtcgtctctgtggc

SEQ ID NO: 81145 - DNA, 25 bp, Homo sapien
ctcggaacccagagcgtccgggtcg

SEQ ID NO: 81146 - DNA, 25 bp, Homo sapien
ctcggaacccagtgcgtccgggtcg

SEQ ID NO: 81147 - DNA, 25 bp, Homo sapien
cctgcccacatttgtgcgtctgtgt

SEQ ID NO: 81148 - DNA, 25 bp, Homo sapien
cctgcccacattagtgcgtctgtgt

SEQ ID NO: 81149 - DNA, 25 bp, Homo sapien
accctcgtcggtgttcttggtgtcg

SEQ ID NO: 81150 - DNA, 25 bp, Homo sapien
accctcgtcggtcttcttggtgtcg

SEQ ID NO: 81151 - DNA, 25 bp, Homo sapien
gttagtacactttagtctatgtcgt

SEQ ID NO: 81152 - DNA, 25 bp, Homo sapien
gttagtacacttaagtctatgtcgt

SEQ ID NO: 81153 - DNA, 25 bp, Homo sapien
tttttcaagttcctcttaagtcgtg

SEQ ID NO: 81154 - DNA, 25 bp, Homo sapien
tttttcaagttcgtcttaagtcgtg

SEQ ID NO: 81155 - DNA, 25 bp, Homo sapien
tttgtccggagttccgtcccatctc

SEQ ID NO: 81156 - DNA, 25 bp, Homo sapien
tttgtccggagtaccgtcccatctc

SEQ ID NO: 81157 - DNA, 25 bp, Homo sapien
ttgtatgctccgtcttccgagtctc

SEQ ID NO: 81158 - DNA, 25 bp, Homo sapien
ttgtatgctccgacttccgagtctc

SEQ ID NO: 81159 - DNA, 25 bp, Homo sapien
tactccgtctctgtttctcgctcgt

SEQ ID NO: 81160 - DNA, 25 bp, Homo sapien
tactccgtctctctttctcgctcgt

SEQ ID NO: 81161 - DNA, 25 bp, Homo sapien
tcatctgtgtctcattacgtattgc

SEQ ID NO: 81162 - DNA, 25 bp, Homo sapien
tcatctgtgtctgattacgtattgc

SEQ ID NO: 81163 - DNA, 25 bp, Homo sapien
gtgtatgtctgttgacgtctaatac

SEQ ID NO: 81164 - DNA, 25 bp, Homo sapien
gtgtatgtctgtagacgtctaatac

SEQ ID NO: 81165 - DNA, 25 bp, Homo sapien
gggtagatgtcgatatctgtaccaa

SEQ ID NO: 81166 - DNA, 25 bp, Homo sapien
gggtagatgtcgttatctgtaccaa

SEQ ID NO: 81167 - DNA, 25 bp, Homo sapien
aaatttactgtggtcgcggaaactg

SEQ ID NO: 81168 - DNA, 25 bp, Homo sapien
aaatttactgtgctcgcggaaactg

SEQ ID NO: 81169 - DNA, 25 bp, Homo sapien
acttgttctcttaccggtgaaccag

SEQ ID NO: 81170 - DNA, 25 bp, Homo sapien
acttgttctctttccggtgaaccag

SEQ ID NO: 81171 - DNA, 25 bp, Homo sapien
ctactccttccgtgcagattttctg

SEQ ID NO: 81172 - DNA, 25 bp, Homo sapien
ctactccttccgagcagattttctg

SEQ ID NO: 81173 - DNA, 25 bp, Homo sapien
cccacctgtatcagtttctgtgacg

SEQ ID NO: 81174 - DNA, 25 bp, Homo sapien
cccacctgtatctgtttctgtgacg

SEQ ID NO: 81175 - DNA, 25 bp, Homo sapien
ggttagggaggtacaaactctacaa

SEQ ID NO: 81176 - DNA, 25 bp, Homo sapien
ggttagggaggttcaaactctacaa

SEQ ID NO: 81177 - DNA, 25 bp, Homo sapien
tttagagaaggactgagacccaagt

SEQ ID NO: 81178 - DNA, 25 bp, Homo sapien
tttagagaaggagtgagacccaagt

SEQ ID NO: 81179 - DNA, 25 bp, Homo sapien
acagaaaatgatacacgaccctaag

SEQ ID NO: 81180 - DNA, 25 bp, Homo sapien
acagaaaatgattcacgaccctaag

SEQ ID NO: 81181 - DNA, 25 bp, Homo sapien
gacaaaggactccaatgttacgagt

SEQ ID NO: 81182 - DNA, 25 bp, Homo sapien
gacaaaggactcgaatgttacgagt

SEQ ID NO: 81183 - DNA, 25 bp, Homo sapien
tcccttttcctgttagagttacagt

SEQ ID NO: 81184 - DNA, 25 bp, Homo sapien
tcccttttcctgatagagttacagt

SEQ ID NO: 81185 - DNA, 25 bp, Homo sapien
cagttttatgtgtacgacttacact

SEQ ID NO: 81186 - DNA, 25 bp, Homo sapien
cagttttatgtgaacgacttacact

SEQ ID NO: 81187 - DNA, 25 bp, Homo sapien
acagttgtacattttgtcttacgat

SEQ ID NO: 81188 - DNA, 25 bp, Homo sapien
acagttgtacatattgtcttacgat

SEQ ID NO: 81189 - DNA, 25 bp, Homo sapien
ggtactgtacaaacatcgactatta

SEQ ID NO: 81190 - DNA, 25 bp, Homo sapien
ggtactgtacaatcatcgactatta

SEQ ID NO: 81191 - DNA, 25 bp, Homo sapien
gaagtaccgaaatcataccttatgt

SEQ ID NO: 81192 - DNA, 25 bp, Homo sapien
gaagtaccgaaaacataccttatgt

SEQ ID NO: 81193 - DNA, 25 bp, Homo sapien
cgactctacacctgtaacgaataag

SEQ ID NO: 81194 - DNA, 25 bp, Homo sapien
cgactctacaccagtaacgaataag

SEQ ID NO: 81195 - DNA, 25 bp, Homo sapien
gtacgtaaacctaagacagacacac

SEQ ID NO: 81196 - DNA, 25 bp, Homo sapien
gtacgtaaaccttagacagacacac

SEQ ID NO: 81197 - DNA, 25 bp, Homo sapien
gttgtcgacatacaaacgatacacc

SEQ ID NO: 81198 - DNA, 25 bp, Homo sapien
gttgtcgacatagaaacgatacacc

SEQ ID NO: 81199 - DNA, 25 bp, Homo sapien
tctatgacgtctcttcaaagacccg

SEQ ID NO: 81200 - DNA, 25 bp, Homo sapien
tctatgacgtctgttcaaagacccg

SEQ ID NO: 81201 - DNA, 25 bp, Homo sapien
agtgtttgtctggtgatcttttcac

SEQ ID NO: 81202 - DNA, 25 bp, Homo sapien
agtgtttgtctgctgatcttttcac

SEQ ID NO: 81203 - DNA, 25 bp, Homo sapien
gggatgtctatcgtctcttcatcct

SEQ ID NO: 81204 - DNA, 25 bp, Homo sapien
gggatgtctatcctctcttcatcct

SEQ ID NO: 81205 - DNA, 25 bp, Homo sapien
gtgtattgtcttactcttaaatccg

SEQ ID NO: 81206 - DNA, 25 bp, Homo sapien
gtgtattgtctttctcttaaatccg

SEQ ID NO: 81207 - DNA, 25 bp, Homo sapien
tttactgtttatcgtaagcaacacg

SEQ ID NO: 81208 - DNA, 25 bp, Homo sapien
tttactgtttatggtaagcaacacg

SEQ ID NO: 81209 - DNA, 25 bp, Homo sapien
aagtgtgtatggacgacgacaccgg

SEQ ID NO: 81210 - DNA, 25 bp, Homo sapien
aagtgtgtatggtcgacgacaccgg

SEQ ID NO: 81211 - DNA, 25 bp, Homo sapien
cgagacaggtccaacgagaactacc

SEQ ID NO: 81212 - DNA, 25 bp, Homo sapien
cgagacaggtcctacgagaactacc

SEQ ID NO: 81213 - DNA, 25 bp, Homo sapien
agtcgagtaactcgtcgcactactg

SEQ ID NO: 81214 - DNA, 25 bp, Homo sapien
agtcgagtaactggtcgcactactg

SEQ ID NO: 81215 - DNA, 25 bp, Homo sapien
aacgaggaggtctcgtaccgtctgg

SEQ ID NO: 81216 - DNA, 25 bp, Homo sapien
aacgaggaggtcacgtaccgtctgg

SEQ ID NO: 81217 - DNA, 25 bp, Homo sapien
acggcgcgaaccaggcacgtacgag

SEQ ID NO: 81218 - DNA, 25 bp, Homo sapien
acggcgcgaacctggcacgtacgag

SEQ ID NO: 81219 - DNA, 25 bp, Homo sapien
gttaggaacggctggacacgtactc

SEQ ID NO: 81220 - DNA, 25 bp, Homo sapien
gttaggaacggcaggacacgtactc

SEQ ID NO: 81221 - DNA, 25 bp, Homo sapien
atttgagttacttccgtcgccggtc

SEQ ID NO: 81222 - DNA, 25 bp, Homo sapien
atttgagttactaccgtcgccggtc

SEQ ID NO: 81223 - DNA, 25 bp, Homo sapien
gccttgtcgttctacactccaagac

SEQ ID NO: 81224 - DNA, 25 bp, Homo sapien
gccttgtcgttcaacactccaagac

SEQ ID NO: 81225 - DNA, 25 bp, Homo sapien
ccagtttagacacgaaagaccgtcg

SEQ ID NO: 81226 - DNA, 25 bp, Homo sapien
ccagtttagacaggaaagaccgtcg

SEQ ID NO: 81227 - DNA, 25 bp, Homo sapien
cctcgttttgaaatgacagtctccg

SEQ ID NO: 81228 - DNA, 25 bp, Homo sapien
cctcgttttgaattgacagtctccg

SEQ ID NO: 81229 - DNA, 25 bp, Homo sapien
aagagactgtagagctgacaggcgc

SEQ ID NO: 81230 - DNA, 25 bp, Homo sapien
aagagactgtagtgctgacaggcgc

SEQ ID NO: 81231 - DNA, 25 bp, Homo sapien
aacagacataatgcttcgggtgtag

SEQ ID NO: 81232 - DNA, 25 bp, Homo sapien
aacagacataatccttcgggtgtag

SEQ ID NO: 81233 - DNA, 25 bp, Homo sapien
atcgaaataactcattccgtagggt

SEQ ID NO: 81234 - DNA, 25 bp, Homo sapien
atcgaaataactgattccgtagggt

SEQ ID NO: 81235 - DNA, 25 bp, Homo sapien
ccgtacgtaaagtgttactcctggg

SEQ ID NO: 81236 - DNA, 25 bp, Homo sapien
ccgtacgtaaagagttactcctggg

SEQ ID NO: 81237 - DNA, 25 bp, Homo sapien
ccacgtagaaccacatgtctgtgcc

SEQ ID NO: 81238 - DNA, 25 bp, Homo sapien
ccacgtagaacctcatgtctgtgcc

SEQ ID NO: 81239 - DNA, 25 bp, Homo sapien
agtaatccagtcttatcttgtagta

SEQ ID NO: 81240 - DNA, 25 bp, Homo sapien
agtaatccagtcatatcttgtagta

SEQ ID NO: 81241 - DNA, 25 bp, Homo sapien
cactactgtcttactcgtttcagtg

SEQ ID NO: 81242 - DNA, 25 bp, Homo sapien
cactactgtctttctcgtttcagtg

SEQ ID NO: 81243 - DNA, 25 bp, Homo sapien
attcttacgacttgtcctttccgtg

SEQ ID NO: 81244 - DNA, 25 bp, Homo sapien
attcttacgactagtcctttccgtg

SEQ ID NO: 81245 - DNA, 25 bp, Homo sapien
gtctcactcctcttcaactagagga

SEQ ID NO: 81246 - DNA, 25 bp, Homo sapien
gtctcactcctcatcaactagagga

SEQ ID NO: 81247 - DNA, 25 bp, Homo sapien
gtgtcaatccacatatactaaagag

SEQ ID NO: 81248 - DNA, 25 bp, Homo sapien
gtgtcaatccacttatactaaagag

SEQ ID NO: 81249 - DNA, 25 bp, Homo sapien
ggaaatcctcctcagtacgacagtc

SEQ ID NO: 81250 - DNA, 25 bp, Homo sapien
ggaaatcctcctgagtacgacagtc

SEQ ID NO: 81251 - DNA, 25 bp, Homo sapien
tgccttaagacctttttagactagc

SEQ ID NO: 81252 - DNA, 25 bp, Homo sapien
tgccttaagaccattttagactagc

SEQ ID NO: 81253 - DNA, 25 bp, Homo sapien
atttttaaggctttctgtgacgttc

SEQ ID NO: 81254 - DNA, 25 bp, Homo sapien
atttttaaggctatctgtgacgttc

SEQ ID NO: 81255 - DNA, 25 bp, Homo sapien
aacctgtaggtccatctgcagtatc

SEQ ID NO: 81256 - DNA, 25 bp, Homo sapien
aacctgtaggtcgatctgcagtatc

SEQ ID NO: 81257 - DNA, 25 bp, Homo sapien
acatcagtgtagagaatcggattct

SEQ ID NO: 81258 - DNA, 25 bp, Homo sapien
acatcagtgtagtgaatcggattct

SEQ ID NO: 81259 - DNA, 25 bp, Homo sapien
ttaattcgggattgtaatcgggtcc

SEQ ID NO: 81260 - DNA, 25 bp, Homo sapien
ttaattcgggatagtaatcgggtcc

SEQ ID NO: 81261 - DNA, 25 bp, Homo sapien
aatagtcagaatctggtgaggtctc

SEQ ID NO: 81262 - DNA, 25 bp, Homo sapien
aatagtcagaatgtggtgaggtctc

SEQ ID NO: 81263 - DNA, 25 bp, Homo sapien
acactacaaccacaggtccctgtcg

SEQ ID NO: 81264 - DNA, 25 bp, Homo sapien
acactacaaccagaggtccctgtcg

SEQ ID NO: 81265 - DNA, 25 bp, Homo sapien
cacccgtacgggaagtacgccgggt

SEQ ID NO: 81266 - DNA, 25 bp, Homo sapien
cacccgtacgggtagtacgccgggt

SEQ ID NO: 81267 - DNA, 25 bp, Homo sapien
acatcggtcggagaaagtgtcgtcg

SEQ ID NO: 81268 - DNA, 25 bp, Homo sapien
acatcggtcggacaaagtgtcgtcg

SEQ ID NO: 81269 - DNA, 25 bp, Homo sapien
gaacctctttagagcgaccctgtca

SEQ ID NO: 81270 - DNA, 25 bp, Homo sapien
gaacctctttagtgcgaccctgtca

SEQ ID NO: 81271 - DNA, 25 bp, Homo sapien
accttgtatgtgtagttgatatcct

SEQ ID NO: 81272 - DNA, 25 bp, Homo sapien
accttgtatgtgaagttgatatcct

SEQ ID NO: 81273 - DNA, 25 bp, Homo sapien
tgtgttgttagtcgatgtttgtccc

SEQ ID NO: 81274 - DNA, 25 bp, Homo sapien
tgtgttgttagtggatgtttgtccc

SEQ ID NO: 81275 - DNA, 25 bp, Homo sapien
gggtctcgatcagagtctggtcctt

SEQ ID NO: 81276 - DNA, 25 bp, Homo sapien
gggtctcgatcacagtctggtcctt

SEQ ID NO: 81277 - DNA, 25 bp, Homo sapien
cctgtttccgggaccgttccgtttt

SEQ ID NO: 81278 - DNA, 25 bp, Homo sapien
cctgtttccgggtccgttccgtttt

SEQ ID NO: 81279 - DNA, 25 bp, Homo sapien
gagtcgaaggatcgtatctgaggtc

SEQ ID NO: 81280 - DNA, 25 bp, Homo sapien
gagtcgaaggatggtatctgaggtc

SEQ ID NO: 81281 - DNA, 25 bp, Homo sapien
aaagttcagtgaacttcattcagaa

SEQ ID NO: 81282 - DNA, 25 bp, Homo sapien
aaagttcagtgatcttcattcagaa

SEQ ID NO: 81283 - DNA, 25 bp, Homo sapien
caactgttgtgaaaggatccgtaaa

SEQ ID NO: 81284 - DNA, 25 bp, Homo sapien
caactgttgtgataggatccgtaaa

SEQ ID NO: 81285 - DNA, 25 bp, Homo sapien
cgaccggtccgaggtcaatggaaag

SEQ ID NO: 81286 - DNA, 25 bp, Homo sapien
cgaccggtccgacgtcaatggaaag

SEQ ID NO: 81287 - DNA, 25 bp, Homo sapien
cccatctcgacacctaagtaaaagg

SEQ ID NO: 81288 - DNA, 25 bp, Homo sapien
cccatctcgacagctaagtaaaagg

SEQ ID NO: 81289 - DNA, 25 bp, Homo sapien
tcgagtctccaaacagaaactactg

SEQ ID NO: 81290 - DNA, 25 bp, Homo sapien
tcgagtctccaatcagaaactactg

SEQ ID NO: 81291 - DNA, 25 bp, Homo sapien
acggtcactcgaagggcaagtcgag

SEQ ID NO: 81292 - DNA, 25 bp, Homo sapien
acggtcactcgatgggcaagtcgag

SEQ ID NO: 81293 - DNA, 25 bp, Homo sapien
ttaggtcgagacaagggatcttcgg

SEQ ID NO: 81294 - DNA, 25 bp, Homo sapien
ttaggtcgagactagggatcttcgg

SEQ ID NO: 81295 - DNA, 25 bp, Homo sapien
aacgggacagagaaggtcatcgagt

SEQ ID NO: 81296 - DNA, 25 bp, Homo sapien
aacgggacagagtaggtcatcgagt

SEQ ID NO: 81297 - DNA, 25 bp, Homo sapien
aaccagtctaagtcgtagattgtgt

SEQ ID NO: 81298 - DNA, 25 bp, Homo sapien
aaccagtctaagacgtagattgtgt

SEQ ID NO: 81299 - DNA, 25 bp, Homo sapien
gtttgaccattcttgttaatccatg

SEQ ID NO: 81300 - DNA, 25 bp, Homo sapien
gtttgaccattcatgttaatccatg

SEQ ID NO: 81301 - DNA, 25 bp, Homo sapien
gaaaccccctaaggtgtatcctatt

SEQ ID NO: 81302 - DNA, 25 bp, Homo sapien
gaaaccccctaacgtgtatcctatt

SEQ ID NO: 81303 - DNA, 25 bp, Homo sapien
agagaacaccctactttatacatgg

SEQ ID NO: 81304 - DNA, 25 bp, Homo sapien
agagaacacccttctttatacatgg

SEQ ID NO: 81305 - DNA, 25 bp, Homo sapien
gacgacatcgtccttattctccgtt

SEQ ID NO: 81306 - DNA, 25 bp, Homo sapien
gacgacatcgtcgttattctccgtt

SEQ ID NO: 81307 - DNA, 25 bp, Homo sapien
gtagtcctctactgtgttatgtcaa

SEQ ID NO: 81308 - DNA, 25 bp, Homo sapien
gtagtcctctacagtgttatgtcaa

SEQ ID NO: 81309 - DNA, 25 bp, Homo sapien
ttgtaggccgtattgacacccacag

SEQ ID NO: 81310 - DNA, 25 bp, Homo sapien
ttgtaggccgtaatgacacccacag

SEQ ID NO: 81311 - DNA, 25 bp, Homo sapien
taagagccgtcaaacacactactgg

SEQ ID NO: 81312 - DNA, 25 bp, Homo sapien
taagagccgtcatacacactactgg

SEQ ID NO: 81313 - DNA, 25 bp, Homo sapien
tcgagtggtcgctaccgacgagacc

SEQ ID NO: 81314 - DNA, 25 bp, Homo sapien
tcgagtggtcgcaaccgacgagacc

SEQ ID NO: 81315 - DNA, 25 bp, Homo sapien
ctaccgtgtccgaacctctgaaggt

SEQ ID NO: 81316 - DNA, 25 bp, Homo sapien
ctaccgtgtccgtacctctgaaggt

SEQ ID NO: 81317 - DNA, 25 bp, Homo sapien
tggtcttcccacatctcgtagtggg

SEQ ID NO: 81318 - DNA, 25 bp, Homo sapien
tggtcttcccacttctcgtagtggg

SEQ ID NO: 81319 - DNA, 25 bp, Homo sapien
tgtcgtcctccactgtctgtgaaat

SEQ ID NO: 81320 - DNA, 25 bp, Homo sapien
tgtcgtcctccagtgtctgtgaaat

SEQ ID NO: 81321 - DNA, 25 bp, Homo sapien
aggtccaggaggtactacacaagat

SEQ ID NO: 81322 - DNA, 25 bp, Homo sapien
aggtccaggaggaactacacaagat

SEQ ID NO: 81323 - DNA, 25 bp, Homo sapien
ggggtccaggtggacacgtcccaat

SEQ ID NO: 81324 - DNA, 25 bp, Homo sapien
ggggtccaggtgcacacgtcccaat

SEQ ID NO: 81325 - DNA, 25 bp, Homo sapien
taaagttcgaggtcaaacctcggac

SEQ ID NO: 81326 - DNA, 25 bp, Homo sapien
taaagttcgaggacaaacctcggac

SEQ ID NO: 81327 - DNA, 25 bp, Homo sapien
gcaggtcgacggaacccagtgtgca

SEQ ID NO: 81328 - DNA, 25 bp, Homo sapien
gcaggtcgacggtacccagtgtgca

SEQ ID NO: 81329 - DNA, 25 bp, Homo sapien
cgtagatatctacttcaggttgatg

SEQ ID NO: 81330 - DNA, 25 bp, Homo sapien
cgtagatatctagttcaggttgatg

SEQ ID NO: 81331 - DNA, 25 bp, Homo sapien
ctgaagtccgtgtctgatgttggtg

SEQ ID NO: 81332 - DNA, 25 bp, Homo sapien
ctgaagtccgtgactgatgttggtg

SEQ ID NO: 81333 - DNA, 25 bp, Homo sapien
tctatagtgggctcctcgactcggg

SEQ ID NO: 81334 - DNA, 25 bp, Homo sapien
tctatagtgggcacctcgactcggg

SEQ ID NO: 81335 - DNA, 25 bp, Homo sapien
tccttcgaagtcacggtgaccggtc

SEQ ID NO: 81336 - DNA, 25 bp, Homo sapien
tccttcgaagtctcggtgaccggtc

SEQ ID NO: 81337 - DNA, 25 bp, Homo sapien
cgctgtccacggtacggtccggatc

SEQ ID NO: 81338 - DNA, 25 bp, Homo sapien
cgctgtccacggaacggtccggatc

SEQ ID NO: 81339 - DNA, 25 bp, Homo sapien
atctacagtaccaggggagttttca

SEQ ID NO: 81340 - DNA, 25 bp, Homo sapien
atctacagtacctggggagttttca

SEQ ID NO: 81341 - DNA, 25 bp, Homo sapien
tgctaaatttacacgtgttctgaac

SEQ ID NO: 81342 - DNA, 25 bp, Homo sapien
tgctaaatttactcgtgttctgaac

SEQ ID NO: 81343 - DNA, 25 bp, Homo sapien
agaagaagtttaccttggtcttcga

SEQ ID NO: 81344 - DNA, 25 bp, Homo sapien
agaagaagtttagcttggtcttcga

SEQ ID NO: 81345 - DNA, 25 bp, Homo sapien
ctgagaagtatcacttcatcgttga

SEQ ID NO: 81346 - DNA, 25 bp, Homo sapien
ctgagaagtatctcttcatcgttga

SEQ ID NO: 81347 - DNA, 25 bp, Homo sapien
ggagacaccttctataagttttcgg

SEQ ID NO: 81348 - DNA, 25 bp, Homo sapien
ggagacaccttcaataagttttcgg

SEQ ID NO: 81349 - DNA, 25 bp, Homo sapien
gggcctagtgcaagaggtccttgtg

SEQ ID NO: 81350 - DNA, 25 bp, Homo sapien
gggcctagtgcatgaggtccttgtg

SEQ ID NO: 81351 - DNA, 25 bp, Homo sapien
acaccatgagttggttcgtcctgtt

SEQ ID NO: 81352 - DNA, 25 bp, Homo sapien
acaccatgagttcgttcgtcctgtt

SEQ ID NO: 81353 - DNA, 25 bp, Homo sapien
cgactgtgtctttccgttgtccttt

SEQ ID NO: 81354 - DNA, 25 bp, Homo sapien
cgactgtgtcttaccgttgtccttt

SEQ ID NO: 81355 - DNA, 25 bp, Homo sapien
ctttgtagattatcgcgtgtagacc

SEQ ID NO: 81356 - DNA, 25 bp, Homo sapien
ctttgtagattaacgcgtgtagacc

SEQ ID NO: 81357 - DNA, 25 bp, Homo sapien
atttctgtcattaacgatgtgactt

SEQ ID NO: 81358 - DNA, 25 bp, Homo sapien
atttctgtcatttacgatgtgactt

SEQ ID NO: 81359 - DNA, 25 bp, Homo sapien
gttaataaggtatgtcactgatgcc

SEQ ID NO: 81360 - DNA, 25 bp, Homo sapien
gttaataaggtaagtcactgatgcc

SEQ ID NO: 81361 - DNA, 25 bp, Homo sapien
catctagaagcatctggactgtgac

SEQ ID NO: 81362 - DNA, 25 bp, Homo sapien
catctagaagcaactggactgtgac

SEQ ID NO: 81363 - DNA, 25 bp, Homo sapien
aactaggtaaagtgaggttactgcc

SEQ ID NO: 81364 - DNA, 25 bp, Homo sapien
aactaggtaaagagaggttactgcc

SEQ ID NO: 81365 - DNA, 25 bp, Homo sapien
accagggaacaaacaaggaccgacc

SEQ ID NO: 81366 - DNA, 25 bp, Homo sapien
accagggaacaatcaaggaccgacc

SEQ ID NO: 81367 - DNA, 25 bp, Homo sapien
aaggacgaacacgtccatggacctg

SEQ ID NO: 81368 - DNA, 25 bp, Homo sapien
aaggacgaacacctccatggacctg

SEQ ID NO: 81369 - DNA, 25 bp, Homo sapien
ctaaatgaacatcgtgacgtgtcaa

SEQ ID NO: 81370 - DNA, 25 bp, Homo sapien
ctaaatgaacatggtgacgtgtcaa

SEQ ID NO: 81371 - DNA, 25 bp, Homo sapien
ataacttagagtcttgttcttcttg

SEQ ID NO: 81372 - DNA, 25 bp, Homo sapien
ataacttagagtgttgttcttcttg

SEQ ID NO: 81373 - DNA, 25 bp, Homo sapien
acattacatggtcgtccgttttttg

SEQ ID NO: 81374 - DNA, 25 bp, Homo sapien
acattacatggtggtccgttttttg

SEQ ID NO: 81375 - DNA, 25 bp, Homo sapien
atttcatgggtctttattatccgta

SEQ ID NO: 81376 - DNA, 25 bp, Homo sapien
atttcatgggtcattattatccgta

SEQ ID NO: 81377 - DNA, 25 bp, Homo sapien
ggtgacggcggcacatgacccacga

SEQ ID NO: 81378 - DNA, 25 bp, Homo sapien
ggtgacggcggctcatgacccacga

SEQ ID NO: 81379 - DNA, 25 bp, Homo sapien
ggcgtaccaccctttgacctcggag

SEQ ID NO: 81380 - DNA, 25 bp, Homo sapien
ggcgtaccacccattgacctcggag

SEQ ID NO: 81381 - DNA, 25 bp, Homo sapien
gtcggtctcttcgttcgtccgtcca

SEQ ID NO: 81382 - DNA, 25 bp, Homo sapien
gtcggtctcttccttcgtccgtcca

SEQ ID NO: 81383 - DNA, 25 bp, Homo sapien
gggagagtcggtctcttctgggtcc

SEQ ID NO: 81384 - DNA, 25 bp, Homo sapien
gggagagtcggtgtcttctgggtcc

SEQ ID NO: 81385 - DNA, 25 bp, Homo sapien
aggtcggcggtgtcatgtacgacac

SEQ ID NO: 81386 - DNA, 25 bp, Homo sapien
aggtcggcggtgacatgtacgacac

SEQ ID NO: 81387 - DNA, 25 bp, Homo sapien
agcttcgtgacctggtccatcgcga

SEQ ID NO: 81388 - DNA, 25 bp, Homo sapien
agcttcgtgaccaggtccatcgcga

SEQ ID NO: 81389 - DNA, 25 bp, Homo sapien
gtagtccccgacacctaaacaacga

SEQ ID NO: 81390 - DNA, 25 bp, Homo sapien
gtagtccccgactcctaaacaacga

SEQ ID NO: 81391 - DNA, 25 bp, Homo sapien
tagccggtcacgtcggtaaaccgaa

SEQ ID NO: 81392 - DNA, 25 bp, Homo sapien
tagccggtcacgacggtaaaccgaa

SEQ ID NO: 81393 - DNA, 25 bp, Homo sapien
gacccgagtgcgaggtccgaccaca

SEQ ID NO: 81394 - DNA, 25 bp, Homo sapien
gacccgagtgcgtggtccgaccaca

SEQ ID NO: 81395 - DNA, 25 bp, Homo sapien
aaacacgggtcgaaccccgaagccg

SEQ ID NO: 81396 - DNA, 25 bp, Homo sapien
aaacacgggtcgtaccccgaagccg

SEQ ID NO: 81397 - DNA, 25 bp, Homo sapien
gaagtacttgggtctcctacaggcc

SEQ ID NO: 81398 - DNA, 25 bp, Homo sapien
gaagtacttgggactcctacaggcc

SEQ ID NO: 81399 - DNA, 25 bp, Homo sapien
aagtcttgagagcatgactgaccaa

SEQ ID NO: 81400 - DNA, 25 bp, Homo sapien
aagtcttgagaggatgactgaccaa

SEQ ID NO: 81401 - DNA, 25 bp, Homo sapien
gtcgttcgatcgactcctcaacata

SEQ ID NO: 81402 - DNA, 25 bp, Homo sapien
gtcgttcgatcgtctcctcaacata

SEQ ID NO: 81403 - DNA, 25 bp, Homo sapien
ctttgaagacgtgaccgtgacacaa

SEQ ID NO: 81404 - DNA, 25 bp, Homo sapien
ctttgaagacgtcaccgtgacacaa

SEQ ID NO: 81405 - DNA, 25 bp, Homo sapien
acttaaaaatgtcgtgtaacgtaca

SEQ ID NO: 81406 - DNA, 25 bp, Homo sapien
acttaaaaatgtggtgtaacgtaca

SEQ ID NO: 81407 - DNA, 25 bp, Homo sapien
acctgaagattgtatcgtatactcc

SEQ ID NO: 81408 - DNA, 25 bp, Homo sapien
acctgaagattgaatcgtatactcc

SEQ ID NO: 81409 - DNA, 25 bp, Homo sapien
taaagaactgtcgactacctgaagt

SEQ ID NO: 81410 - DNA, 25 bp, Homo sapien
taaagaactgtccactacctgaagt

SEQ ID NO: 81411 - DNA, 25 bp, Homo sapien
acgtgtatccgagactcgtctaaag

SEQ ID NO: 81412 - DNA, 25 bp, Homo sapien
acgtgtatccgacactcgtctaaag

SEQ ID NO: 81413 - DNA, 25 bp, Homo sapien
ctcgagttgttcacgtcaaacaaag

SEQ ID NO: 81414 - DNA, 25 bp, Homo sapien
ctcgagttgttctcgtcaaacaaag

SEQ ID NO: 81415 - DNA, 25 bp, Homo sapien
ccatagtttcgagtcggtaaacaag

SEQ ID NO: 81416 - DNA, 25 bp, Homo sapien
ccatagtttcgactcggtaaacaag

SEQ ID NO: 81417 - DNA, 25 bp, Homo sapien
aacccggactgaaacgtgagcccaa

SEQ ID NO: 81418 - DNA, 25 bp, Homo sapien
aacccggactgatacgtgagcccaa

SEQ ID NO: 81419 - DNA, 25 bp, Homo sapien
accgaggttgcgtcccgcagtcctg

SEQ ID NO: 81420 - DNA, 25 bp, Homo sapien
accgaggttgcgacccgcagtcctg

SEQ ID NO: 81421 - DNA, 25 bp, Homo sapien
tcctcaggttggatcctggtccggt

SEQ ID NO: 81422 - DNA, 25 bp, Homo sapien
tcctcaggttggttcctggtccggt

SEQ ID NO: 81423 - DNA, 25 bp, Homo sapien
tcgacgggacccacttcgggttggt

SEQ ID NO: 81424 - DNA, 25 bp, Homo sapien
tcgacgggaccctcttcgggttggt

SEQ ID NO: 81425 - DNA, 25 bp, Homo sapien
tgtggtgtcacactttccctgtggt

SEQ ID NO: 81426 - DNA, 25 bp, Homo sapien
tgtggtgtcacagtttccctgtggt

SEQ ID NO: 81427 - DNA, 25 bp, Homo sapien
tgtcgaccacaaaagtttcatgtta

SEQ ID NO: 81428 - DNA, 25 bp, Homo sapien
tgtcgaccacaatagtttcatgtta

SEQ ID NO: 81429 - DNA, 25 bp, Homo sapien
ttcgtgttaaatttcaaagtccgtt

SEQ ID NO: 81430 - DNA, 25 bp, Homo sapien
ttcgtgttaaatatcaaagtccgtt

SEQ ID NO: 81431 - DNA, 25 bp, Homo sapien
ttaacgacatcgtcataagtgatat

SEQ ID NO: 81432 - DNA, 25 bp, Homo sapien
ttaacgacatcgacataagtgatat

SEQ ID NO: 81433 - DNA, 25 bp, Homo sapien
aatgtacaaacctggtttaggttac

SEQ ID NO: 81434 - DNA, 25 bp, Homo sapien
aatgtacaaaccaggtttaggttac

SEQ ID NO: 81435 - DNA, 25 bp, Homo sapien
agtaaagtaggatacttacggtacc

SEQ ID NO: 81436 - DNA, 25 bp, Homo sapien
agtaaagtaggaaacttacggtacc

SEQ ID NO: 81437 - DNA, 25 bp, Homo sapien
ctataggaagggtatagttccctat

SEQ ID NO: 81438 - DNA, 25 bp, Homo sapien
ctataggaagggaatagttccctat

SEQ ID NO: 81439 - DNA, 25 bp, Homo sapien
tttaatagtgagacttaagtcccta

SEQ ID NO: 81440 - DNA, 25 bp, Homo sapien
tttaatagtgagtcttaagtcccta

SEQ ID NO: 81441 - DNA, 25 bp, Homo sapien
ttcgtgacaccagttccgcccggtg

SEQ ID NO: 81442 - DNA, 25 bp, Homo sapien
ttcgtgacaccacttccgcccggtg

SEQ ID NO: 81443 - DNA, 25 bp, Homo sapien
gtgacactccagtttgatcctcgta

SEQ ID NO: 81444 - DNA, 25 bp, Homo sapien
gtgacactccagattgatcctcgta

SEQ ID NO: 81445 - DNA, 25 bp, Homo sapien
gggtaacccaatttagtacgttgac

SEQ ID NO: 81446 - DNA, 25 bp, Homo sapien
gggtaacccaatatagtacgttgac

SEQ ID NO: 81447 - DNA, 25 bp, Homo sapien
gggccctcgtcagactgagttacac

SEQ ID NO: 81448 - DNA, 25 bp, Homo sapien
gggccctcgtcacactgagttacac

SEQ ID NO: 81449 - DNA, 25 bp, Homo sapien
gctggacaccggattcagtctttca

SEQ ID NO: 81450 - DNA, 25 bp, Homo sapien
gctggacaccggtttcagtctttca

SEQ ID NO: 81451 - DNA, 25 bp, Homo sapien
tctggaaggatgtttctacttacac

SEQ ID NO: 81452 - DNA, 25 bp, Homo sapien
tctggaaggatgattctacttacac

SEQ ID NO: 81453 - DNA, 25 bp, Homo sapien
ggtagagagaacgtttcacgagtcc

SEQ ID NO: 81454 - DNA, 25 bp, Homo sapien
ggtagagagaacctttcacgagtcc

SEQ ID NO: 81455 - DNA, 25 bp, Homo sapien
gatgaagtgagtttcagagacgtcg

SEQ ID NO: 81456 - DNA, 25 bp, Homo sapien
gatgaagtgagtatcagagacgtcg

SEQ ID NO: 81457 - DNA, 25 bp, Homo sapien
ggtggacgagaatcccgacgtccgt

SEQ ID NO: 81458 - DNA, 25 bp, Homo sapien
ggtggacgagaaacccgacgtccgt

SEQ ID NO: 81459 - DNA, 25 bp, Homo sapien
cagggtcgtagactccccggtgcgt

SEQ ID NO: 81460 - DNA, 25 bp, Homo sapien
cagggtcgtagagtccccggtgcgt

SEQ ID NO: 81461 - DNA, 25 bp, Homo sapien
aagaactggtcacgacccggtgtcc

SEQ ID NO: 81462 - DNA, 25 bp, Homo sapien
aagaactggtcaggacccggtgtcc

SEQ ID NO: 81463 - DNA, 25 bp, Homo sapien
ggctcgataacgaccggccgacgtc

SEQ ID NO: 81464 - DNA, 25 bp, Homo sapien
ggctcgataacgtccggccgacgtc

SEQ ID NO: 81465 - DNA, 25 bp, Homo sapien
ccggggtctcttcgtttggtccggc

SEQ ID NO: 81466 - DNA, 25 bp, Homo sapien
ccggggtctcttggtttggtccggc

SEQ ID NO: 81467 - DNA, 25 bp, Homo sapien
ctggtgccagagatctggctcttgc

SEQ ID NO: 81468 - DNA, 25 bp, Homo sapien
ctggtgccagagttctggctcttgc

SEQ ID NO: 81469 - DNA, 25 bp, Homo sapien
gtcatcgcgaagtccgggtcccgta

SEQ ID NO: 81470 - DNA, 25 bp, Homo sapien
gtcatcgcgaagaccgggtcccgta

SEQ ID NO: 81471 - DNA, 25 bp, Homo sapien
tatcgaactcgaagcggtccccggt

SEQ ID NO: 81472 - DNA, 25 bp, Homo sapien
tatcgaactcgatgcggtccccggt

SEQ ID NO: 81473 - DNA, 25 bp, Homo sapien
tcgtaccagaccacgtcaacagtct

SEQ ID NO: 81474 - DNA, 25 bp, Homo sapien
tcgtaccagacctcgtcaacagtct

SEQ ID NO: 81475 - DNA, 25 bp, Homo sapien
aagtagaccaaatctgaattatacg

SEQ ID NO: 81476 - DNA, 25 bp, Homo sapien
aagtagaccaaaactgaattatacg

SEQ ID NO: 81477 - DNA, 25 bp, Homo sapien
aggtctacactagctacagatttga

SEQ ID NO: 81478 - DNA, 25 bp, Homo sapien
aggtctacactacctacagatttga

SEQ ID NO: 81479 - DNA, 25 bp, Homo sapien
gatgaatgtcagaatcatactttca

SEQ ID NO: 81480 - DNA, 25 bp, Homo sapien
gatgaatgtcagtatcatactttca

SEQ ID NO: 81481 - DNA, 25 bp, Homo sapien
ggtgataggtcagatccgctggttc

SEQ ID NO: 81482 - DNA, 25 bp, Homo sapien
ggtgataggtcacatccgctggttc

SEQ ID NO: 81483 - DNA, 25 bp, Homo sapien
ggtagagttcttttactccttctcc

SEQ ID NO: 81484 - DNA, 25 bp, Homo sapien
ggtagagttcttatactccttctcc

SEQ ID NO: 81485 - DNA, 25 bp, Homo sapien
aaatacgagtctttgtttctttgcc

SEQ ID NO: 81486 - DNA, 25 bp, Homo sapien
aaatacgagtctatgtttctttgcc

SEQ ID NO: 81487 - DNA, 25 bp, Homo sapien
gaaaggagccccttctctttaggta

SEQ ID NO: 81488 - DNA, 25 bp, Homo sapien
gaaaggagccccatctctttaggta

SEQ ID NO: 81489 - DNA, 25 bp, Homo sapien
gaggatcccctcatgtctgtttata

SEQ ID NO: 81490 - DNA, 25 bp, Homo sapien
gaggatcccctcttgtctgtttata

SEQ ID NO: 81491 - DNA, 25 bp, Homo sapien
gcatcttccaaatctcggtcgtcta

SEQ ID NO: 81492 - DNA, 25 bp, Homo sapien
gcatcttccaaaactcggtcgtcta

SEQ ID NO: 81493 - DNA, 25 bp, Homo sapien
atcttaccactggtatcgtcctaag

SEQ ID NO: 81494 - DNA, 25 bp, Homo sapien
atcttaccactgctatcgtcctaag

SEQ ID NO: 81495 - DNA, 25 bp, Homo sapien
acactaaaagtacgagacttcaagt

SEQ ID NO: 81496 - DNA, 25 bp, Homo sapien
acactaaaagtaggagacttcaagt

SEQ ID NO: 81497 - DNA, 25 bp, Homo sapien
tcacctctgtcaatgacggtgctaa

SEQ ID NO: 81498 - DNA, 25 bp, Homo sapien
tcacctctgtcattgacggtgctaa

SEQ ID NO: 81499 - DNA, 25 bp, Homo sapien
cgacattctgctcctagtctgtcca

SEQ ID NO: 81500 - DNA, 25 bp, Homo sapien
cgacattctgctgctagtctgtcca

SEQ ID NO: 81501 - DNA, 25 bp, Homo sapien
ggaattcagtacatctctctgacaa

SEQ ID NO: 81502 - DNA, 25 bp, Homo sapien
ggaattcagtacttctctctgacaa

SEQ ID NO: 81503 - DNA, 25 bp, Homo sapien
gagtccttcaggtcctccgacgatg

SEQ ID NO: 81504 - DNA, 25 bp, Homo sapien
gagtccttcaggacctccgacgatg

SEQ ID NO: 81505 - DNA, 25 bp, Homo sapien
cgggaccatctacatcagccacatg

SEQ ID NO: 81506 - DNA, 25 bp, Homo sapien
cgggaccatctagatcagccacatg

SEQ ID NO: 81507 - DNA, 25 bp, Homo sapien
gaagaaacctttctaaagcctaaag

SEQ ID NO: 81508 - DNA, 25 bp, Homo sapien
gaagaaacctttgtaaagcctaaag

SEQ ID NO: 81509 - DNA, 25 bp, Homo sapien
gaccctgtcctctgactggtgtcac

SEQ ID NO: 81510 - DNA, 25 bp, Homo sapien
gaccctgtcctcagactggtgtcac

SEQ ID NO: 81511 - DNA, 25 bp, Homo sapien
ggggaccgtcacacccttcggagca

SEQ ID NO: 81512 - DNA, 25 bp, Homo sapien
ggggaccgtcactcccttcggagca

SEQ ID NO: 81513 - DNA, 25 bp, Homo sapien
gacctacacccgaaccttctagaga

SEQ ID NO: 81514 - DNA, 25 bp, Homo sapien
gacctacacccgtaccttctagaga

SEQ ID NO: 81515 - DNA, 25 bp, Homo sapien
gacactagcccgaggtcgatgaagt

SEQ ID NO: 81516 - DNA, 25 bp, Homo sapien
gacactagcccgtggtcgatgaagt

SEQ ID NO: 81517 - DNA, 25 bp, Homo sapien
gcatgacgctcgtctcgtcaccgaa

SEQ ID NO: 81518 - DNA, 25 bp, Homo sapien
gcatgacgctcgactcgtcaccgaa

SEQ ID NO: 81519 - DNA, 25 bp, Homo sapien
cttactgaacagtagggtccaggaa

SEQ ID NO: 81520 - DNA, 25 bp, Homo sapien
cttactgaacagaagggtccaggaa

SEQ ID NO: 81521 - DNA, 25 bp, Homo sapien
gatgaaagtgaagtctcacagtaca

SEQ ID NO: 81522 - DNA, 25 bp, Homo sapien
gatgaaagtgaactctcacagtaca

SEQ ID NO: 81523 - DNA, 25 bp, Homo sapien
tagtcgtggggttcctcaactgtag

SEQ ID NO: 81524 - DNA, 25 bp, Homo sapien
tagtcgtggggtacctcaactgtag

SEQ ID NO: 81525 - DNA, 25 bp, Homo sapien
agatgtgtcacgtccagggactggt

SEQ ID NO: 81526 - DNA, 25 bp, Homo sapien
agatgtgtcacgaccagggactggt

SEQ ID NO: 81527 - DNA, 25 bp, Homo sapien
cgactagtgtttacccgtgggaaat

SEQ ID NO: 81528 - DNA, 25 bp, Homo sapien
cgactagtgttttcccgtgggaaat

SEQ ID NO: 81529 - DNA, 25 bp, Homo sapien
aatgggagtatgtaccgaatcaaac

SEQ ID NO: 81530 - DNA, 25 bp, Homo sapien
aatgggagtatgaaccgaatcaaac

SEQ ID NO: 81531 - DNA, 25 bp, Homo sapien
gttccgactctgactcgacctgaaa

SEQ ID NO: 81532 - DNA, 25 bp, Homo sapien
gttccgactctgtctcgacctgaaa

SEQ ID NO: 81533 - DNA, 25 bp, Homo sapien
cttcgttgtcgtcctcttacgtagt

SEQ ID NO: 81534 - DNA, 25 bp, Homo sapien
cttcgttgtcgtgctcttacgtagt

SEQ ID NO: 81535 - DNA, 25 bp, Homo sapien
gattatcgtatttgtcgtacttcat

SEQ ID NO: 81536 - DNA, 25 bp, Homo sapien
gattatcgtattagtcgtacttcat

SEQ ID NO: 81537 - DNA, 25 bp, Homo sapien
gaacaaggtctactcctgtccacag

SEQ ID NO: 81538 - DNA, 25 bp, Homo sapien
gaacaaggtctagtcctgtccacag

SEQ ID NO: 81539 - DNA, 25 bp, Homo sapien
gagtctacttttgtctttaacacag

SEQ ID NO: 81540 - DNA, 25 bp, Homo sapien
gagtctacttttctctttaacacag

SEQ ID NO: 81541 - DNA, 25 bp, Homo sapien
gggtcgtcttttccaggaagtccgg

SEQ ID NO: 81542 - DNA, 25 bp, Homo sapien
gggtcgtcttttgcaggaagtccgg

SEQ ID NO: 81543 - DNA, 25 bp, Homo sapien
cgacgacttcctgtaggtctcttcg

SEQ ID NO: 81544 - DNA, 25 bp, Homo sapien
cgacgacttcctctaggtctcttcg

SEQ ID NO: 81545 - DNA, 25 bp, Homo sapien
agaccctgctgtcactgtcgttacc

SEQ ID NO: 81546 - DNA, 25 bp, Homo sapien
agaccctgctgtgactgtcgttacc

SEQ ID NO: 81547 - DNA, 25 bp, Homo sapien
atgcaaggtgttgatactactaagc

SEQ ID NO: 81548 - DNA, 25 bp, Homo sapien
atgcaaggtgttcatactactaagc

SEQ ID NO: 81549 - DNA, 25 bp, Homo sapien
aatcaccggtcgaaaatctactgtc

SEQ ID NO: 81550 - DNA, 25 bp, Homo sapien
aatcaccggtcgtaaatctactgtc

SEQ ID NO: 81551 - DNA, 25 bp, Homo sapien
tcaccagtgacttataacgacgata

SEQ ID NO: 81552 - DNA, 25 bp, Homo sapien
tcaccagtgactaataacgacgata

SEQ ID NO: 81553 - DNA, 25 bp, Homo sapien
gtgattgagttgttacatcgacgtc

SEQ ID NO: 81554 - DNA, 25 bp, Homo sapien
gtgattgagttgatacatcgacgtc

SEQ ID NO: 81555 - DNA, 25 bp, Homo sapien
aacacctgttatggttgtccatcaa

SEQ ID NO: 81556 - DNA, 25 bp, Homo sapien
aacacctgttatcgttgtccatcaa

SEQ ID NO: 81557 - DNA, 25 bp, Homo sapien
aaactcttagttttagccacttatc

SEQ ID NO: 81558 - DNA, 25 bp, Homo sapien
aaactcttagttatagccacttatc

SEQ ID NO: 81559 - DNA, 25 bp, Homo sapien
agaccctctttttcatggtttagtt

SEQ ID NO: 81560 - DNA, 25 bp, Homo sapien
agaccctcttttacatggtttagtt

SEQ ID NO: 81561 - DNA, 25 bp, Homo sapien
aaacaattctgtcctttgtgtaaat

SEQ ID NO: 81562 - DNA, 25 bp, Homo sapien
aaacaattctgtgctttgtgtaaat

SEQ ID NO: 81563 - DNA, 25 bp, Homo sapien
atgtgaatactccttactggttatt

SEQ ID NO: 81564 - DNA, 25 bp, Homo sapien
atgtgaatactcgttactggttatt

SEQ ID NO: 81565 - DNA, 25 bp, Homo sapien
tgtccgttatcaggtactcttaaac

SEQ ID NO: 81566 - DNA, 25 bp, Homo sapien
tgtccgttatcacgtactcttaaac

SEQ ID NO: 81567 - DNA, 25 bp, Homo sapien
ttgtgaatattcaatctctcaaact

SEQ ID NO: 81568 - DNA, 25 bp, Homo sapien
ttgtgaatattctatctctcaaact

SEQ ID NO: 81569 - DNA, 25 bp, Homo sapien
atctacgcacggatatcaatacacg

SEQ ID NO: 81570 - DNA, 25 bp, Homo sapien
atctacgcacggttatcaatacacg

SEQ ID NO: 81571 - DNA, 25 bp, Homo sapien
tgtacacgcaccagtatctcatacg

SEQ ID NO: 81572 - DNA, 25 bp, Homo sapien
tgtacacgcacctgtatctcatacg

SEQ ID NO: 81573 - DNA, 25 bp, Homo sapien
cttcttactgctacgaggcgacggc

SEQ ID NO: 81574 - DNA, 25 bp, Homo sapien
cttcttactgcttcgaggcgacggc

SEQ ID NO: 81575 - DNA, 25 bp, Homo sapien
atcgttactagagttgtgcacctgt

SEQ ID NO: 81576 - DNA, 25 bp, Homo sapien
atcgttactagacttgtgcacctgt

SEQ ID NO: 81577 - DNA, 25 bp, Homo sapien
gatctgtaccgactgtggaagtggt

SEQ ID NO: 81578 - DNA, 25 bp, Homo sapien
gatctgtaccgagtgtggaagtggt

SEQ ID NO: 81579 - DNA, 25 bp, Homo sapien
tccttggagtaggagcgatctccgt

SEQ ID NO: 81580 - DNA, 25 bp, Homo sapien
tccttggagtagcagcgatctccgt

SEQ ID NO: 81581 - DNA, 25 bp, Homo sapien
ttcgtgtaagagttaccgcctctct

SEQ ID NO: 81582 - DNA, 25 bp, Homo sapien
ttcgtgtaagagataccgcctctct

SEQ ID NO: 81583 - DNA, 25 bp, Homo sapien
acttctgtgagaggtggtgactgtc

SEQ ID NO: 81584 - DNA, 25 bp, Homo sapien
acttctgtgagacgtggtgactgtc

SEQ ID NO: 81585 - DNA, 25 bp, Homo sapien
atctgaatacgagacacgttaccga

SEQ ID NO: 81586 - DNA, 25 bp, Homo sapien
atctgaatacgacacacgttaccga

SEQ ID NO: 81587 - DNA, 25 bp, Homo sapien
gactgctgattagagtcacgttccc

SEQ ID NO: 81588 - DNA, 25 bp, Homo sapien
gactgctgattacagtcacgttccc

SEQ ID NO: 81589 - DNA, 25 bp, Homo sapien
aacgaaatgatttcccagtccgatc

SEQ ID NO: 81590 - DNA, 25 bp, Homo sapien
aacgaaatgattacccagtccgatc

SEQ ID NO: 81591 - DNA, 25 bp, Homo sapien
gtccaaaaagatctgccgtccagtc

SEQ ID NO: 81592 - DNA, 25 bp, Homo sapien
gtccaaaaagatgtgccgtccagtc

SEQ ID NO: 81593 - DNA, 25 bp, Homo sapien
aaagaaaggtacactcctctacgct

SEQ ID NO: 81594 - DNA, 25 bp, Homo sapien
aaagaaaggtactctcctctacgct

SEQ ID NO: 81595 - DNA, 25 bp, Homo sapien
ggatcaaccgtcgaaactctcttca

SEQ ID NO: 81596 - DNA, 25 bp, Homo sapien
ggatcaaccgtccaaactctcttca

SEQ ID NO: 81597 - DNA, 25 bp, Homo sapien
atcattacaggaactcctactatca

SEQ ID NO: 81598 - DNA, 25 bp, Homo sapien
atcattacaggatctcctactatca

SEQ ID NO: 81599 - DNA, 25 bp, Homo sapien
gacgtttgtacatatcttccttgat

SEQ ID NO: 81600 - DNA, 25 bp, Homo sapien
gacgtttgtacaaatcttccttgat

SEQ ID NO: 81601 - DNA, 25 bp, Homo sapien
ggttgtttaaacagtgtaacccgga

SEQ ID NO: 81602 - DNA, 25 bp, Homo sapien
ggttgtttaaactgtgtaacccgga

SEQ ID NO: 81603 - DNA, 25 bp, Homo sapien
cgatcttactctctgaaagacccga

SEQ ID NO: 81604 - DNA, 25 bp, Homo sapien
cgatcttactctgtgaaagacccga

SEQ ID NO: 81605 - DNA, 25 bp, Homo sapien
gtcaaacttcattgtggaagtccaa

SEQ ID NO: 81606 - DNA, 25 bp, Homo sapien
gtcaaacttcatagtggaagtccaa

SEQ ID NO: 81607 - DNA, 25 bp, Homo sapien
ttcagggtgtttagggaaggacctg

SEQ ID NO: 81608 - DNA, 25 bp, Homo sapien
ttcagggtgttttgggaaggacctg

SEQ ID NO: 81609 - DNA, 25 bp, Homo sapien
ccggttaataaggttgtcattacgt

SEQ ID NO: 81610 - DNA, 25 bp, Homo sapien
ccggttaataagcttgtcattacgt

SEQ ID NO: 81611 - DNA, 25 bp, Homo sapien
gacatcacgacactgttgttttact

SEQ ID NO: 81612 - DNA, 25 bp, Homo sapien
gacatcacgacagtgttgttttact

SEQ ID NO: 81613 - DNA, 25 bp, Homo sapien
gcatcattcgaaatgtttcttgact

SEQ ID NO: 81614 - DNA, 25 bp, Homo sapien
gcatcattcgaattgtttcttgact

SEQ ID NO: 81615 - DNA, 25 bp, Homo sapien
cctataaactgacgtgtatggttca

SEQ ID NO: 81616 - DNA, 25 bp, Homo sapien
cctataaactgaggtgtatggttca

SEQ ID NO: 81617 - DNA, 25 bp, Homo sapien
gacgtcgtcccgccacaagtcgctg

SEQ ID NO: 81618 - DNA, 25 bp, Homo sapien
gacgtcgtcccggcacaagtcgctg

SEQ ID NO: 81619 - DNA, 25 bp, Homo sapien
gtggtcgtcgcccttcagacaagtc

SEQ ID NO: 81620 - DNA, 25 bp, Homo sapien
gtggtcgtcgccgttcagacaagtc

SEQ ID NO: 81621 - DNA, 25 bp, Homo sapien
tgttcgtcggtcgtggagacatatc

SEQ ID NO: 81622 - DNA, 25 bp, Homo sapien
tgttcgtcggtcctggagacatatc

SEQ ID NO: 81623 - DNA, 25 bp, Homo sapien
atgagagggactccaagagaacgac

SEQ ID NO: 81624 - DNA, 25 bp, Homo sapien
atgagagggactgcaagagaacgac

SEQ ID NO: 81625 - DNA, 25 bp, Homo sapien
attaatgggaacaacagagcgtact

SEQ ID NO: 81626 - DNA, 25 bp, Homo sapien
attaatgggaactacagagcgtact

SEQ ID NO: 81627 - DNA, 25 bp, Homo sapien
tcgtcgccgcgcccttagtacgccc

SEQ ID NO: 81628 - DNA, 25 bp, Homo sapien
tcgtcgccgcgcgcttagtacgccc

SEQ ID NO: 81629 - DNA, 25 bp, Homo sapien
gacttatatactggtgcgagtgggc

SEQ ID NO: 81630 - DNA, 25 bp, Homo sapien
gacttatatactcgtgcgagtgggc

SEQ ID NO: 81631 - DNA, 25 bp, Homo sapien
ttgtcgggtaaacttttgttactcg

SEQ ID NO: 81632 - DNA, 25 bp, Homo sapien
ttgtcgggtaaagttttgttactcg

SEQ ID NO: 81633 - DNA, 25 bp, Homo sapien
tgtgcctttagagtctaggagccta

SEQ ID NO: 81634 - DNA, 25 bp, Homo sapien
tgtgcctttagactctaggagccta

SEQ ID NO: 81635 - DNA, 25 bp, Homo sapien
cgtaaatttctttctcgagagttta

SEQ ID NO: 81636 - DNA, 25 bp, Homo sapien
cgtaaatttcttactcgagagttta

SEQ ID NO: 81637 - DNA, 25 bp, Homo sapien
agttagtctgtgatggagtacactc

SEQ ID NO: 81638 - DNA, 25 bp, Homo sapien
agttagtctgtgttggagtacactc

SEQ ID NO: 81639 - DNA, 25 bp, Homo sapien
acgtttttagttttcgtgttacaca

SEQ ID NO: 81640 - DNA, 25 bp, Homo sapien
acgtttttagttatcgtgttacaca

SEQ ID NO: 81641 - DNA, 25 bp, Homo sapien
acagacgtacatagtcgattaccag

SEQ ID NO: 81642 - DNA, 25 bp, Homo sapien
acagacgtacattgtcgattaccag

SEQ ID NO: 81643 - DNA, 25 bp, Homo sapien
cagagacatatttctattacgacgg

SEQ ID NO: 81644 - DNA, 25 bp, Homo sapien
cagagacatattactattacgacgg

SEQ ID NO: 81645 - DNA, 25 bp, Homo sapien
tgtacggttatatttgtagttttgt

SEQ ID NO: 81646 - DNA, 25 bp, Homo sapien
tgtacggttataattgtagttttgt

SEQ ID NO: 81647 - DNA, 25 bp, Homo sapien
gttcctcttcccagacgtctgaagt

SEQ ID NO: 81648 - DNA, 25 bp, Homo sapien
gttcctcttccctgacgtctgaagt

SEQ ID NO: 81649 - DNA, 25 bp, Homo sapien
aaacgttcccttcaagagttacgaa

SEQ ID NO: 81650 - DNA, 25 bp, Homo sapien
aaacgttcccttgaagagttacgaa

SEQ ID NO: 81651 - DNA, 25 bp, Homo sapien
ttacgctgtccgtcggaccatcggc

SEQ ID NO: 81652 - DNA, 25 bp, Homo sapien
ttacgctgtccgacggaccatcggc

SEQ ID NO: 81653 - DNA, 25 bp, Homo sapien
tcaccgaaaggttgacacagggtac

SEQ ID NO: 81654 - DNA, 25 bp, Homo sapien
tcaccgaaaggtagacacagggtac

SEQ ID NO: 81655 - DNA, 25 bp, Homo sapien
tgtccgcaagtctcccgtagaggag

SEQ ID NO: 81656 - DNA, 25 bp, Homo sapien
tgtccgcaagtcacccgtagaggag

SEQ ID NO: 81657 - DNA, 25 bp, Homo sapien
gtgggtacctactactgacgacaat

SEQ ID NO: 81658 - DNA, 25 bp, Homo sapien
gtgggtacctacaactgacgacaat

SEQ ID NO: 81659 - DNA, 25 bp, Homo sapien
cgtaggaccacaaacagtaccgaca

SEQ ID NO: 81660 - DNA, 25 bp, Homo sapien
cgtaggaccacatacagtaccgaca

SEQ ID NO: 81661 - DNA, 25 bp, Homo sapien
gagggcacaaggttacgacgcgtac

SEQ ID NO: 81662 - DNA, 25 bp, Homo sapien
gagggcacaaggatacgacgcgtac

SEQ ID NO: 81663 - DNA, 25 bp, Homo sapien
cagtgcgtcgagagcagcaacgtcg

SEQ ID NO: 81664 - DNA, 25 bp, Homo sapien
cagtgcgtcgagtgcagcaacgtcg

SEQ ID NO: 81665 - DNA, 25 bp, Homo sapien
gattgagatcggtctctggtctacc

SEQ ID NO: 81666 - DNA, 25 bp, Homo sapien
gattgagatcggactctggtctacc

SEQ ID NO: 81667 - DNA, 25 bp, Homo sapien
agagggtgagaaggaaccttttctc

SEQ ID NO: 81668 - DNA, 25 bp, Homo sapien
agagggtgagaacgaaccttttctc

SEQ ID NO: 81669 - DNA, 25 bp, Homo sapien
tggactcacgggtatgagacccgtt

SEQ ID NO: 81670 - DNA, 25 bp, Homo sapien
tggactcacgggaatgagacccgtt

SEQ ID NO: 81671 - DNA, 25 bp, Homo sapien
tcccgtccggagacatggcactcgg

SEQ ID NO: 81672 - DNA, 25 bp, Homo sapien
tcccgtccggagtcatggcactcgg

SEQ ID NO: 81673 - DNA, 25 bp, Homo sapien
ttccgtctccggtcagtggtcctga

SEQ ID NO: 81674 - DNA, 25 bp, Homo sapien
ttccgtctccggacagtggtcctga

SEQ ID NO: 81675 - DNA, 25 bp, Homo sapien
ttcgtctctcgattcgatggaatca

SEQ ID NO: 81676 - DNA, 25 bp, Homo sapien
ttcgtctctcgaatcgatggaatca

SEQ ID NO: 81677 - DNA, 25 bp, Homo sapien
gtcactcagagtagtgtcgattata

SEQ ID NO: 81678 - DNA, 25 bp, Homo sapien
gtcactcagagttgtgtcgattata

SEQ ID NO: 81679 - DNA, 25 bp, Homo sapien
agagtggtccacactttgtgcgacg

SEQ ID NO: 81680 - DNA, 25 bp, Homo sapien
agagtggtccactctttgtgcgacg

SEQ ID NO: 81681 - DNA, 25 bp, Homo sapien
tgtgtgctcaacagtacgtgtgtga

SEQ ID NO: 81682 - DNA, 25 bp, Homo sapien
tgtgtgctcaactgtacgtgtgtga

SEQ ID NO: 81683 - DNA, 25 bp, Homo sapien
ttcgtgaaaagatgtcgacgtgaac

SEQ ID NO: 81684 - DNA, 25 bp, Homo sapien
ttcgtgaaaagaagtcgacgtgaac

SEQ ID NO: 81685 - DNA, 25 bp, Homo sapien
ctcctgtaagtacccccggcggacg

SEQ ID NO: 81686 - DNA, 25 bp, Homo sapien
ctcctgtaagtagccccggcggacg

SEQ ID NO: 81687 - DNA, 25 bp, Homo sapien
cctactaaaccaccacgtcggtagg

SEQ ID NO: 81688 - DNA, 25 bp, Homo sapien
cctactaaaccagcacgtcggtagg

SEQ ID NO: 81689 - DNA, 25 bp, Homo sapien
tcgttcgaaattgtacactcgttgt

SEQ ID NO: 81690 - DNA, 25 bp, Homo sapien
tcgttcgaaattctacactcgttgt

SEQ ID NO: 81691 - DNA, 25 bp, Homo sapien
cacttgaaatatggtgatactcttg

SEQ ID NO: 81692 - DNA, 25 bp, Homo sapien
cacttgaaatatcgtgatactcttg

SEQ ID NO: 81693 - DNA, 25 bp, Homo sapien
gtcttcaacaattgtcgtagctctg

SEQ ID NO: 81694 - DNA, 25 bp, Homo sapien
gtcttcaacaatagtcgtagctctg

SEQ ID NO: 81695 - DNA, 25 bp, Homo sapien
gttcgaagatgtgtactgtccacgt

SEQ ID NO: 81696 - DNA, 25 bp, Homo sapien
gttcgaagatgtctactgtccacgt

SEQ ID NO: 81697 - DNA, 25 bp, Homo sapien
aggtgaaggtgtactctgtctcgac

SEQ ID NO: 81698 - DNA, 25 bp, Homo sapien
aggtgaaggtgttctctgtctcgac

SEQ ID NO: 81699 - DNA, 25 bp, Homo sapien
gtgttgaggtctgatccatacgttg

SEQ ID NO: 81700 - DNA, 25 bp, Homo sapien
gtgttgaggtctcatccatacgttg

SEQ ID NO: 81701 - DNA, 25 bp, Homo sapien
cccgtgggtcgtcaccgacatcatt

SEQ ID NO: 81702 - DNA, 25 bp, Homo sapien
cccgtgggtcgtgaccgacatcatt

SEQ ID NO: 81703 - DNA, 25 bp, Homo sapien
ggacccgtggagtcgaaccggtcaa

SEQ ID NO: 81704 - DNA, 25 bp, Homo sapien
ggacccgtggagacgaaccggtcaa

SEQ ID NO: 81705 - DNA, 25 bp, Homo sapien
aagtgtgtgacttctttgaacagtc

SEQ ID NO: 81706 - DNA, 25 bp, Homo sapien
aagtgtgtgactactttgaacagtc

SEQ ID NO: 81707 - DNA, 25 bp, Homo sapien
cagtgtgacccgagagacaagtcgt

SEQ ID NO: 81708 - DNA, 25 bp, Homo sapien
cagtgtgacccgtgagacaagtcgt

SEQ ID NO: 81709 - DNA, 25 bp, Homo sapien
tctcggggcccgtcgtagtaagttg

SEQ ID NO: 81710 - DNA, 25 bp, Homo sapien
tctcggggcccgacgtagtaagttg

SEQ ID NO: 81711 - DNA, 25 bp, Homo sapien
tcttgactctgacactaactgtctg

SEQ ID NO: 81712 - DNA, 25 bp, Homo sapien
tcttgactctgagactaactgtctg

SEQ ID NO: 81713 - DNA, 25 bp, Homo sapien
gtcgtggacgcaaggaccacgcttg

SEQ ID NO: 81714 - DNA, 25 bp, Homo sapien
gtcgtggacgcatggaccacgcttg

SEQ ID NO: 81715 - DNA, 25 bp, Homo sapien
tcttcgtgaaataaaccctcgttag

SEQ ID NO: 81716 - DNA, 25 bp, Homo sapien
tcttcgtgaaattaaccctcgttag

SEQ ID NO: 81717 - DNA, 25 bp, Homo sapien
gagaatttcaggtctggtctacgtt

SEQ ID NO: 81718 - DNA, 25 bp, Homo sapien
gagaatttcaggactggtctacgtt

SEQ ID NO: 81719 - DNA, 25 bp, Homo sapien
aatttttacacctacgatgagtact

SEQ ID NO: 81720 - DNA, 25 bp, Homo sapien
aatttttacaccaacgatgagtact

SEQ ID NO: 81721 - DNA, 25 bp, Homo sapien
caatgttatccatcgtttggtatgt

SEQ ID NO: 81722 - DNA, 25 bp, Homo sapien
caatgttatccaacgtttggtatgt

SEQ ID NO: 81723 - DNA, 25 bp, Homo sapien
tcatgtgttccaacttaggacgttt

SEQ ID NO: 81724 - DNA, 25 bp, Homo sapien
tcatgtgttccatcttaggacgttt

SEQ ID NO: 81725 - DNA, 25 bp, Homo sapien
tgtctactaactttatgtcacgttg

SEQ ID NO: 81726 - DNA, 25 bp, Homo sapien
tgtctactaactatatgtcacgttg

SEQ ID NO: 81727 - DNA, 25 bp, Homo sapien
tgacagtcatcctatatttgtagta

SEQ ID NO: 81728 - DNA, 25 bp, Homo sapien
tgacagtcatccaatatttgtagta

SEQ ID NO: 81729 - DNA, 25 bp, Homo sapien
caaagtgagtcaaattacttcgtaa

SEQ ID NO: 81730 - DNA, 25 bp, Homo sapien
caaagtgagtcatattacttcgtaa

SEQ ID NO: 81731 - DNA, 25 bp, Homo sapien
cacaaagatcaattgtcgttaggta

SEQ ID NO: 81732 - DNA, 25 bp, Homo sapien
cacaaagatcaaatgtcgttaggta

SEQ ID NO: 81733 - DNA, 25 bp, Homo sapien
agacgacagtcctccttctagagta

SEQ ID NO: 81734 - DNA, 25 bp, Homo sapien
agacgacagtccaccttctagagta

SEQ ID NO: 81735 - DNA, 25 bp, Homo sapien
aacctgacccgacgactctagacga

SEQ ID NO: 81736 - DNA, 25 bp, Homo sapien
aacctgacccgaggactctagacga

SEQ ID NO: 81737 - DNA, 25 bp, Homo sapien
agggtcccactacgaacctcttcga

SEQ ID NO: 81738 - DNA, 25 bp, Homo sapien
agggtcccactaggaacctcttcga

SEQ ID NO: 81739 - DNA, 25 bp, Homo sapien
tgttacacactttgtattccttcga

SEQ ID NO: 81740 - DNA, 25 bp, Homo sapien
tgttacacacttagtattccttcga

SEQ ID NO: 81741 - DNA, 25 bp, Homo sapien
gtcgaacgtcacacgggtgaatcga

SEQ ID NO: 81742 - DNA, 25 bp, Homo sapien
gtcgaacgtcactcgggtgaatcga

SEQ ID NO: 81743 - DNA, 25 bp, Homo sapien
cagtctgacctcttctagatccgac

SEQ ID NO: 81744 - DNA, 25 bp, Homo sapien
cagtctgacctcatctagatccgac

SEQ ID NO: 81745 - DNA, 25 bp, Homo sapien
ggcgaaataacagtgatatctacac

SEQ ID NO: 81746 - DNA, 25 bp, Homo sapien
ggcgaaataacactgatatctacac

SEQ ID NO: 81747 - DNA, 25 bp, Homo sapien
gaaaagtgtagttcaaccgaatcaa

SEQ ID NO: 81748 - DNA, 25 bp, Homo sapien
gaaaagtgtagtacaaccgaatcaa

SEQ ID NO: 81749 - DNA, 25 bp, Homo sapien
gtctaggtgagcaataagagcctgc

SEQ ID NO: 81750 - DNA, 25 bp, Homo sapien
gtctaggtgagctataagagcctgc

SEQ ID NO: 81751 - DNA, 25 bp, Homo sapien
atccggtacgcctaaacccgatgta

SEQ ID NO: 81752 - DNA, 25 bp, Homo sapien
atccggtacgccaaaacccgatgta

SEQ ID NO: 81753 - DNA, 25 bp, Homo sapien
cggtcgtataagaactcgcggggta

SEQ ID NO: 81754 - DNA, 25 bp, Homo sapien
cggtcgtataagtactcgcggggta

SEQ ID NO: 81755 - DNA, 25 bp, Homo sapien
ccggtacttcagtggtcacgtggtg

SEQ ID NO: 81756 - DNA, 25 bp, Homo sapien
ccggtacttcagaggtcacgtggtg

SEQ ID NO: 81757 - DNA, 25 bp, Homo sapien
tgcccctaagcctgtgcgtctgtgt

SEQ ID NO: 81758 - DNA, 25 bp, Homo sapien
tgcccctaagccagtgcgtctgtgt

SEQ ID NO: 81759 - DNA, 25 bp, Homo sapien
gaccctcgtcggtgttcttggtgtc

SEQ ID NO: 81760 - DNA, 25 bp, Homo sapien
gaccctcgtcggagttcttggtgtc

SEQ ID NO: 81761 - DNA, 25 bp, Homo sapien
taaagtcgtcggtattcttaatatc

SEQ ID NO: 81762 - DNA, 25 bp, Homo sapien
taaagtcgtcggaattcttaatatc

SEQ ID NO: 81763 - DNA, 25 bp, Homo sapien
ttttttagtgtccactctaagttcg

SEQ ID NO: 81764 - DNA, 25 bp, Homo sapien
ttttttagtgtcgactctaagttcg

SEQ ID NO: 81765 - DNA, 25 bp, Homo sapien
tctctgtggggttctcgacccattt

SEQ ID NO: 81766 - DNA, 25 bp, Homo sapien
tctctgtggggtactcgacccattt

SEQ ID NO: 81767 - DNA, 25 bp, Homo sapien
ttgaagtcgtcctcctcacgagtcc

SEQ ID NO: 81768 - DNA, 25 bp, Homo sapien
ttgaagtcgtccacctcacgagtcc

SEQ ID NO: 81769 - DNA, 25 bp, Homo sapien
cttagctctctcgtttacgtcgctc

SEQ ID NO: 81770 - DNA, 25 bp, Homo sapien
cttagctctctcctttacgtcgctc

SEQ ID NO: 81771 - DNA, 25 bp, Homo sapien
ttcattgtcgttgtatctattacgc

SEQ ID NO: 81772 - DNA, 25 bp, Homo sapien
ttcattgtcgttctatctattacgc

SEQ ID NO: 81773 - DNA, 25 bp, Homo sapien
tgtcgatgtctgtgacgtcactacc

SEQ ID NO: 81774 - DNA, 25 bp, Homo sapien
tgtcgatgtctgagacgtcactacc

SEQ ID NO: 81775 - DNA, 25 bp, Homo sapien
tgacgagagtctaattgtaccgaag

SEQ ID NO: 81776 - DNA, 25 bp, Homo sapien
tgacgagagtcttattgtaccgaag

SEQ ID NO: 81777 - DNA, 25 bp, Homo sapien
agatttacgagttttctcgaaacat

SEQ ID NO: 81778 - DNA, 25 bp, Homo sapien
agatttacgagtattctcgaaacat

SEQ ID NO: 81779 - DNA, 25 bp, Homo sapien
gttggtttacttggtcggtgaacca

SEQ ID NO: 81780 - DNA, 25 bp, Homo sapien
gttggtttacttcgtcggtgaacca

SEQ ID NO: 81781 - DNA, 25 bp, Homo sapien
gacgtccttcatttgtgattttcta

SEQ ID NO: 81782 - DNA, 25 bp, Homo sapien
gacgtccttcatatgtgattttcta

SEQ ID NO: 81783 - DNA, 25 bp, Homo sapien
tccctattgatcagttttgtgtcgt

SEQ ID NO: 81784 - DNA, 25 bp, Homo sapien
tccctattgatctgttttgtgtcgt

SEQ ID NO: 81785 - DNA, 25 bp, Homo sapien
ttgcgagacagtacaaactcttatt

SEQ ID NO: 81786 - DNA, 25 bp, Homo sapien
ttgcgagacagttcaaactcttatt

SEQ ID NO: 81787 - DNA, 25 bp, Homo sapien
atttagagaaggactgagacccaag

SEQ ID NO: 81788 - DNA, 25 bp, Homo sapien
atttagagaaggtctgagacccaag

SEQ ID NO: 81789 - DNA, 25 bp, Homo sapien
ttaaatatgattagtccgactacag

SEQ ID NO: 81790 - DNA, 25 bp, Homo sapien
ttaaatatgatttgtccgactacag

SEQ ID NO: 81791 - DNA, 25 bp, Homo sapien
gacaagggatacctaaagtgacagt

SEQ ID NO: 81792 - DNA, 25 bp, Homo sapien
gacaagggatacgtaaagtgacagt

SEQ ID NO: 81793 - DNA, 25 bp, Homo sapien
cccatgttaccatcacgattacggt

SEQ ID NO: 81794 - DNA, 25 bp, Homo sapien
cccatgttaccaacacgattacggt

SEQ ID NO: 81795 - DNA, 25 bp, Homo sapien
tacagttttatgtgtacgacttaca

SEQ ID NO: 81796 - DNA, 25 bp, Homo sapien
tacagttttatgagtacgacttaca

SEQ ID NO: 81797 - DNA, 25 bp, Homo sapien
aaagtgttacataaaactcttcgat

SEQ ID NO: 81798 - DNA, 25 bp, Homo sapien
aaagtgttacattaaactcttcgat

SEQ ID NO: 81799 - DNA, 25 bp, Homo sapien
gagtcatcaataagcgactacttac

SEQ ID NO: 81800 - DNA, 25 bp, Homo sapien
gagtcatcaatatgcgactacttac

SEQ ID NO: 81801 - DNA, 25 bp, Homo sapien
tggaagtaaaagtcactcctcttcg

SEQ ID NO: 81802 - DNA, 25 bp, Homo sapien
tggaagtaaaagacactcctcttcg

SEQ ID NO: 81803 - DNA, 25 bp, Homo sapien
gtactactaccgagtaccctataag

SEQ ID NO: 81804 - DNA, 25 bp, Homo sapien
gtactactaccgtgtaccctataag

SEQ ID NO: 81805 - DNA, 25 bp, Homo sapien
gtatactacgacttcaactgacaag

SEQ ID NO: 81806 - DNA, 25 bp, Homo sapien
gtatactacgacatcaactgacaag

SEQ ID NO: 81807 - DNA, 25 bp, Homo sapien
tgtctacctattcaacagacgacag

SEQ ID NO: 81808 - DNA, 25 bp, Homo sapien
tgtctacctattgaacagacgacag

SEQ ID NO: 81809 - DNA, 25 bp, Homo sapien
tcacgtttctatgacaagactcgcg

SEQ ID NO: 81810 - DNA, 25 bp, Homo sapien
tcacgtttctatcacaagactcgcg

SEQ ID NO: 81811 - DNA, 25 bp, Homo sapien
atttgcttgacttgtctttacgtcc

SEQ ID NO: 81812 - DNA, 25 bp, Homo sapien
atttgcttgactagtctttacgtcc

SEQ ID NO: 81813 - DNA, 25 bp, Homo sapien
aggcaagctagagtctcttcactca

SEQ ID NO: 81814 - DNA, 25 bp, Homo sapien
aggcaagctagactctcttcactca

SEQ ID NO: 81815 - DNA, 25 bp, Homo sapien
gtcgattgtcaaactcttcgaaccc

SEQ ID NO: 81816 - DNA, 25 bp, Homo sapien
gtcgattgtcaatctcttcgaaccc

SEQ ID NO: 81817 - DNA, 25 bp, Homo sapien
tctttgtattgtcgtgaaaacgact

SEQ ID NO: 81818 - DNA, 25 bp, Homo sapien
tctttgtattgtggtgaaaacgact

SEQ ID NO: 81819 - DNA, 25 bp, Homo sapien
atcgtgtatcggtagacgagccggt

SEQ ID NO: 81820 - DNA, 25 bp, Homo sapien
atcgtgtatcggaagacgagccggt

SEQ ID NO: 81821 - DNA, 25 bp, Homo sapien
aacaggtcgagaacgacggactggt

SEQ ID NO: 81822 - DNA, 25 bp, Homo sapien
aacaggtcgagatcgacggactggt

SEQ ID NO: 81823 - DNA, 25 bp, Homo sapien
atcgtggaacgtcgtcaactacgtc

SEQ ID NO: 81824 - DNA, 25 bp, Homo sapien
atcgtggaacgtggtcaactacgtc

SEQ ID NO: 81825 - DNA, 25 bp, Homo sapien
aacccgaggtcgtctacgtgctgtg

SEQ ID NO: 81826 - DNA, 25 bp, Homo sapien
aacccgaggtcgactacgtgctgtg

SEQ ID NO: 81827 - DNA, 25 bp, Homo sapien
cgacggacgacgtcacaggtcccgg

SEQ ID NO: 81828 - DNA, 25 bp, Homo sapien
cgacggacgacgacacaggtcccgg

SEQ ID NO: 81829 - DNA, 25 bp, Homo sapien
atgtgaggaccgaataggccgtccg

SEQ ID NO: 81830 - DNA, 25 bp, Homo sapien
atgtgaggaccgtataggccgtccg

SEQ ID NO: 81831 - DNA, 25 bp, Homo sapien
attgtcggttactaagtgctctgtt

SEQ ID NO: 81832 - DNA, 25 bp, Homo sapien
attgtcggttacaaagtgctctgtt

SEQ ID NO: 81833 - DNA, 25 bp, Homo sapien
gacagttgtttctcggtccaccgac

SEQ ID NO: 81834 - DNA, 25 bp, Homo sapien
gacagttgtttcacggtccaccgac

SEQ ID NO: 81835 - DNA, 25 bp, Homo sapien
cctatagttgacttgaaccaccgac

SEQ ID NO: 81836 - DNA, 25 bp, Homo sapien
cctatagttgacatgaaccaccgac

SEQ ID NO: 81837 - DNA, 25 bp, Homo sapien
acctcgttttgaaatgacagtctcc

SEQ ID NO: 81838 - DNA, 25 bp, Homo sapien
acctcgttttgatatgacagtctcc

SEQ ID NO: 81839 - DNA, 25 bp, Homo sapien
aacgaggttagtagccgaagtccgc

SEQ ID NO: 81840 - DNA, 25 bp, Homo sapien
aacgaggttagttgccgaagtccgc

SEQ ID NO: 81841 - DNA, 25 bp, Homo sapien
caacgagaataatctcttaagtttg

SEQ ID NO: 81842 - DNA, 25 bp, Homo sapien
caacgagaataaactcttaagtttg

SEQ ID NO: 81843 - DNA, 25 bp, Homo sapien
atcggaataagtcaatccgacttat

SEQ ID NO: 81844 - DNA, 25 bp, Homo sapien
atcggaataagtgaatccgacttat

SEQ ID NO: 81845 - DNA, 25 bp, Homo sapien
cgttaaaggtgtacgtaccagagta

SEQ ID NO: 81846 - DNA, 25 bp, Homo sapien
cgttaaaggtgttcgtaccagagta

SEQ ID NO: 81847 - DNA, 25 bp, Homo sapien
accgaacacccgatatgtcttgatc

SEQ ID NO: 81848 - DNA, 25 bp, Homo sapien
accgaacacccgttatgtcttgatc

SEQ ID NO: 81849 - DNA, 25 bp, Homo sapien
gttagaatccagtttaccttcgtta

SEQ ID NO: 81850 - DNA, 25 bp, Homo sapien
gttagaatccagattaccttcgtta

SEQ ID NO: 81851 - DNA, 25 bp, Homo sapien
catagtcgttatccgtcttcgtata

SEQ ID NO: 81852 - DNA, 25 bp, Homo sapien
catagtcgttatgcgtcttcgtata

SEQ ID NO: 81853 - DNA, 25 bp, Homo sapien
catacgatatatcgtttacgtgtgt

SEQ ID NO: 81854 - DNA, 25 bp, Homo sapien
catacgatatatggtttacgtgtgt

SEQ ID NO: 81855 - DNA, 25 bp, Homo sapien
gtctcaacactcctgaactaacaga

SEQ ID NO: 81856 - DNA, 25 bp, Homo sapien
gtctcaacactcgtgaactaacaga

SEQ ID NO: 81857 - DNA, 25 bp, Homo sapien
gttgaatctctgattatacactaga

SEQ ID NO: 81858 - DNA, 25 bp, Homo sapien
gttgaatctctgtttatacactaga

SEQ ID NO: 81859 - DNA, 25 bp, Homo sapien
gtgaacatcctcgtgtagtccctct

SEQ ID NO: 81860 - DNA, 25 bp, Homo sapien
gtgaacatcctcctgtagtccctct

SEQ ID NO: 81861 - DNA, 25 bp, Homo sapien
gccttaagacctttttagactagct

SEQ ID NO: 81862 - DNA, 25 bp, Homo sapien
gccttaagacctatttagactagct

SEQ ID NO: 81863 - DNA, 25 bp, Homo sapien
tatgagcttatcaggacgtgtacgt

SEQ ID NO: 81864 - DNA, 25 bp, Homo sapien
tatgagcttatctggacgtgtacgt

SEQ ID NO: 81865 - DNA, 25 bp, Homo sapien
caatctggagtctagttggagttct

SEQ ID NO: 81866 - DNA, 25 bp, Homo sapien
caatctggagtcaagttggagttct

SEQ ID NO: 81867 - DNA, 25 bp, Homo sapien
acttcatgtatgtagatcggacttt

SEQ ID NO: 81868 - DNA, 25 bp, Homo sapien
acttcatgtatgaagatcggacttt

SEQ ID NO: 81869 - DNA, 25 bp, Homo sapien
taacctggacggtgaatcggagtcc

SEQ ID NO: 81870 - DNA, 25 bp, Homo sapien
taacctggacggagaatcggagtcc

SEQ ID NO: 81871 - DNA, 25 bp, Homo sapien
cataatggaagtctgttgaagtcac

SEQ ID NO: 81872 - DNA, 25 bp, Homo sapien
cataatggaagtgtgttgaagtcac

SEQ ID NO: 81873 - DNA, 25 bp, Homo sapien
agactaaaacgatagttagcacttc

SEQ ID NO: 81874 - DNA, 25 bp, Homo sapien
agactaaaacgaaagttagcacttc

SEQ ID NO: 81875 - DNA, 25 bp, Homo sapien
aaccctagcgacagtcgacgccggg

SEQ ID NO: 81876 - DNA, 25 bp, Homo sapien
aaccctagcgactgtcgacgccggg

SEQ ID NO: 81877 - DNA, 25 bp, Homo sapien
aagcacgtccacgacacgacggcgg

SEQ ID NO: 81878 - DNA, 25 bp, Homo sapien
aagcacgtccaccacacgacggcgg

SEQ ID NO: 81879 - DNA, 25 bp, Homo sapien
atacacgtttgtaggaccctgtctc

SEQ ID NO: 81880 - DNA, 25 bp, Homo sapien
atacacgtttgttggaccctgtctc

SEQ ID NO: 81881 - DNA, 25 bp, Homo sapien
atccttttcgtgttctgacagtcct

SEQ ID NO: 81882 - DNA, 25 bp, Homo sapien
atccttttcgtgatctgacagtcct

SEQ ID NO: 81883 - DNA, 25 bp, Homo sapien
cctattctttgtgatgtcttgtccc

SEQ ID NO: 81884 - DNA, 25 bp, Homo sapien
cctattctttgtcatgtcttgtccc

SEQ ID NO: 81885 - DNA, 25 bp, Homo sapien
cgaggtccggccaagactggtcctt

SEQ ID NO: 81886 - DNA, 25 bp, Homo sapien
cgaggtccggcctagactggtcctt

SEQ ID NO: 81887 - DNA, 25 bp, Homo sapien
ctgggtcctgaggttcttccgtttt

SEQ ID NO: 81888 - DNA, 25 bp, Homo sapien
ctgggtcctgagcttcttccgtttt

SEQ ID NO: 81889 - DNA, 25 bp, Homo sapien
gtatcgccggttcgtgtctcggttc

SEQ ID NO: 81890 - DNA, 25 bp, Homo sapien
gtatcgccggttggtgtctcggttc

SEQ ID NO: 81891 - DNA, 25 bp, Homo sapien
aaaattccgtcgtccctttcagaag

SEQ ID NO: 81892 - DNA, 25 bp, Homo sapien
aaaattccgtcgaccctttcagaag

SEQ ID NO: 81893 - DNA, 25 bp, Homo sapien
aatgtatgtagaaaccctctgtaaa

SEQ ID NO: 81894 - DNA, 25 bp, Homo sapien
aatgtatgtagataccctctgtaaa

SEQ ID NO: 81895 - DNA, 25 bp, Homo sapien
gcccaccggggacacacatgtgaaa

SEQ ID NO: 81896 - DNA, 25 bp, Homo sapien
gcccaccggggagacacatgtgaaa

SEQ ID NO: 81897 - DNA, 25 bp, Homo sapien
caccgtagggacaccagtgagcagg

SEQ ID NO: 81898 - DNA, 25 bp, Homo sapien
caccgtagggactccagtgagcagg

SEQ ID NO: 81899 - DNA, 25 bp, Homo sapien
ctcgagtggcacctcaaaccgtcgg

SEQ ID NO: 81900 - DNA, 25 bp, Homo sapien
ctcgagtggcacgtcaaaccgtcgg

SEQ ID NO: 81901 - DNA, 25 bp, Homo sapien
cggtatctcgaacgggaacgacgag

SEQ ID NO: 81902 - DNA, 25 bp, Homo sapien
cggtatctcgaaggggaacgacgag

SEQ ID NO: 81903 - DNA, 25 bp, Homo sapien
ttacggtcatacgtggtcaaatcgg

SEQ ID NO: 81904 - DNA, 25 bp, Homo sapien
ttacggtcatacctggtcaaatcgg

SEQ ID NO: 81905 - DNA, 25 bp, Homo sapien
acagtaagacatgaggggatcgcgt

SEQ ID NO: 81906 - DNA, 25 bp, Homo sapien
acagtaagacatcaggggatcgcgt

SEQ ID NO: 81907 - DNA, 25 bp, Homo sapien
aaaccagtctaagtcgtagattgtg

SEQ ID NO: 81908 - DNA, 25 bp, Homo sapien
aaaccagtctaactcgtagattgtg

SEQ ID NO: 81909 - DNA, 25 bp, Homo sapien
tcttgaccaaccttttgcccagtgt

SEQ ID NO: 81910 - DNA, 25 bp, Homo sapien
tcttgaccaaccatttgcccagtgt

SEQ ID NO: 81911 - DNA, 25 bp, Homo sapien
cgaaaccaaccttcagtgatccatg

SEQ ID NO: 81912 - DNA, 25 bp, Homo sapien
cgaaaccaacctacagtgatccatg

SEQ ID NO: 81913 - DNA, 25 bp, Homo sapien
agaggaactcctacagcatccagtg

SEQ ID NO: 81914 - DNA, 25 bp, Homo sapien
agaggaactccttcagcatccagtg

SEQ ID NO: 81915 - DNA, 25 bp, Homo sapien
gtacgacttgtcctttgtctcactc

SEQ ID NO: 81916 - DNA, 25 bp, Homo sapien
gtacgacttgtcgtttgtctcactc

SEQ ID NO: 81917 - DNA, 25 bp, Homo sapien
tgtacgtccgtttggtaaccgtcaa

SEQ ID NO: 81918 - DNA, 25 bp, Homo sapien
tgtacgtccgttaggtaaccgtcaa

SEQ ID NO: 81919 - DNA, 25 bp, Homo sapien
gtcggcctagacgaacacgtccgag

SEQ ID NO: 81920 - DNA, 25 bp, Homo sapien
gtcggcctagaccaacacgtccgag

SEQ ID NO: 81921 - DNA, 25 bp, Homo sapien
tacaggcacgtcaaaaactctcacg

SEQ ID NO: 81922 - DNA, 25 bp, Homo sapien
tacaggcacgtctaaaactctcacg

SEQ ID NO: 81923 - DNA, 25 bp, Homo sapien
tccgtgcgtcgtgtaccgactaaac

SEQ ID NO: 81924 - DNA, 25 bp, Homo sapien
tccgtgcgtcgtctaccgactaaac

SEQ ID NO: 81925 - DNA, 25 bp, Homo sapien
ctacctgtgtacacccgtggaacgt

SEQ ID NO: 81926 - DNA, 25 bp, Homo sapien
ctacctgtgtactcccgtggaacgt

SEQ ID NO: 81927 - DNA, 25 bp, Homo sapien
gtctcttcagacttactacgatggg

SEQ ID NO: 81928 - DNA, 25 bp, Homo sapien
gtctcttcagacatactacgatggg

SEQ ID NO: 81929 - DNA, 25 bp, Homo sapien
ctagtctccccaatctctaggaggg

SEQ ID NO: 81930 - DNA, 25 bp, Homo sapien
ctagtctccccattctctaggaggg

SEQ ID NO: 81931 - DNA, 25 bp, Homo sapien
gaggtccagggttccgtaaatagtt

SEQ ID NO: 81932 - DNA, 25 bp, Homo sapien
gaggtccagggtaccgtaaatagtt

SEQ ID NO: 81933 - DNA, 25 bp, Homo sapien
gagtccgaggtctcactccaagtat

SEQ ID NO: 81934 - DNA, 25 bp, Homo sapien
gagtccgaggtcacactccaagtat

SEQ ID NO: 81935 - DNA, 25 bp, Homo sapien
aaggtctagaggtcattccaggtac

SEQ ID NO: 81936 - DNA, 25 bp, Homo sapien
aaggtctagaggacattccaggtac

SEQ ID NO: 81937 - DNA, 25 bp, Homo sapien
gagagcgtccggtcaccacgctgga

SEQ ID NO: 81938 - DNA, 25 bp, Homo sapien
gagagcgtccggacaccacgctgga

SEQ ID NO: 81939 - DNA, 25 bp, Homo sapien
agagtaccaagtgacactgttgagg

SEQ ID NO: 81940 - DNA, 25 bp, Homo sapien
agagtaccaagtcacactgttgagg

SEQ ID NO: 81941 - DNA, 25 bp, Homo sapien
taaggtccgagatcatctgtcgggg

SEQ ID NO: 81942 - DNA, 25 bp, Homo sapien
taaggtccgagaacatctgtcgggg

SEQ ID NO: 81943 - DNA, 25 bp, Homo sapien
tacatagtgaggaaccccctagtgg

SEQ ID NO: 81944 - DNA, 25 bp, Homo sapien
tacatagtgaggtaccccctagtgg

SEQ ID NO: 81945 - DNA, 25 bp, Homo sapien
ccgttgacagtcacggagaccggtt

SEQ ID NO: 81946 - DNA, 25 bp, Homo sapien
ccgttgacagtctcggagaccggtt

SEQ ID NO: 81947 - DNA, 25 bp, Homo sapien
cgtctgtcgcagcaacggcctctta

SEQ ID NO: 81948 - DNA, 25 bp, Homo sapien
cgtctgtcgcaggaacggcctctta

SEQ ID NO: 81949 - DNA, 25 bp, Homo sapien
accgtaccgtccaaggggaccttca

SEQ ID NO: 81950 - DNA, 25 bp, Homo sapien
accgtaccgtcctaggggaccttca

SEQ ID NO: 81951 - DNA, 25 bp, Homo sapien
cagtcatattaggaggttctgtaac

SEQ ID NO: 81952 - DNA, 25 bp, Homo sapien
cagtcatattagcaggttctgtaac

SEQ ID NO: 81953 - DNA, 25 bp, Homo sapien
gaagaagtttaccttggtcttcgag

SEQ ID NO: 81954 - DNA, 25 bp, Homo sapien
gaagaagtttacgttggtcttcgag

SEQ ID NO: 81955 - DNA, 25 bp, Homo sapien
agacggagttcaagtctttgttcga

SEQ ID NO: 81956 - DNA, 25 bp, Homo sapien
agacggagttcatgtctttgttcga

SEQ ID NO: 81957 - DNA, 25 bp, Homo sapien
agtgaaccattccttctgtttatgg

SEQ ID NO: 81958 - DNA, 25 bp, Homo sapien
agtgaaccattcgttctgtttatgg

SEQ ID NO: 81959 - DNA, 25 bp, Homo sapien
ggcctgtagtcacgttgtcattgtg

SEQ ID NO: 81960 - DNA, 25 bp, Homo sapien
ggcctgtagtcaggttgtcattgtg

SEQ ID NO: 81961 - DNA, 25 bp, Homo sapien
aactcatagagtcgttgactcctgg

SEQ ID NO: 81962 - DNA, 25 bp, Homo sapien
aactcatagagtggttgactcctgg

SEQ ID NO: 81963 - DNA, 25 bp, Homo sapien
aacttagtcatgtgtgtgccttagt

SEQ ID NO: 81964 - DNA, 25 bp, Homo sapien
aacttagtcatgagtgtgccttagt

SEQ ID NO: 81965 - DNA, 25 bp, Homo sapien
aattgatgattatccgtcgtgactc

SEQ ID NO: 81966 - DNA, 25 bp, Homo sapien
aattgatgattaaccgtcgtgactc

SEQ ID NO: 81967 - DNA, 25 bp, Homo sapien
acttgttacgagtgacgatggactt

SEQ ID NO: 81968 - DNA, 25 bp, Homo sapien
acttgttacgagagacgatggactt

SEQ ID NO: 81969 - DNA, 25 bp, Homo sapien
ctcaatatatgtcgtcactgggcct

SEQ ID NO: 81970 - DNA, 25 bp, Homo sapien
ctcaatatatgtggtcactgggcct

SEQ ID NO: 81971 - DNA, 25 bp, Homo sapien
tctttaaacgaatctacggatggct

SEQ ID NO: 81972 - DNA, 25 bp, Homo sapien
tctttaaacgaaactacggatggct

SEQ ID NO: 81973 - DNA, 25 bp, Homo sapien
acaggtgaacgcactaggactcgcc

SEQ ID NO: 81974 - DNA, 25 bp, Homo sapien
acaggtgaacgctctaggactcgcc

SEQ ID NO: 81975 - DNA, 25 bp, Homo sapien
ccctggtaccaaaaatgaccgacct

SEQ ID NO: 81976 - DNA, 25 bp, Homo sapien
ccctggtaccaataatgaccgacct

SEQ ID NO: 81977 - DNA, 25 bp, Homo sapien
ggagaagacgactctatgcgacctg

SEQ ID NO: 81978 - DNA, 25 bp, Homo sapien
ggagaagacgacactatgcgacctg

SEQ ID NO: 81979 - DNA, 25 bp, Homo sapien
aaggaagacgctcgtcacggactaa

SEQ ID NO: 81980 - DNA, 25 bp, Homo sapien
aaggaagacgctggtcacggactaa

SEQ ID NO: 81981 - DNA, 25 bp, Homo sapien
gtaaaagtgaatcttttctctcttg

SEQ ID NO: 81982 - DNA, 25 bp, Homo sapien
gtaaaagtgaatgttttctctcttg

SEQ ID NO: 81983 - DNA, 25 bp, Homo sapien
acagtgtaaattcttcttgttcttg

SEQ ID NO: 81984 - DNA, 25 bp, Homo sapien
acagtgtaaattgttcttgttcttg

SEQ ID NO: 81985 - DNA, 25 bp, Homo sapien
atgtaattgtccttctttgtccgat

SEQ ID NO: 81986 - DNA, 25 bp, Homo sapien
atgtaattgtccatctttgtccgat

SEQ ID NO: 81987 - DNA, 25 bp, Homo sapien
ggtaagggtgttacattacccacac

SEQ ID NO: 81988 - DNA, 25 bp, Homo sapien
ggtaagggtgtttcattacccacac

SEQ ID NO: 81989 - DNA, 25 bp, Homo sapien
ggcgcggtcacttttatcccagacg

SEQ ID NO: 81990 - DNA, 25 bp, Homo sapien
ggcgcggtcactattatcccagacg

SEQ ID NO: 81991 - DNA, 25 bp, Homo sapien
gtgtgggtttcctcgtccgtcacac

SEQ ID NO: 81992 - DNA, 25 bp, Homo sapien
gtgtgggtttccacgtccgtcacac

SEQ ID NO: 81993 - DNA, 25 bp, Homo sapien
tcgtagtggggtactttctgggtcc

SEQ ID NO: 81994 - DNA, 25 bp, Homo sapien
tcgtagtggggttctttctgggtcc

SEQ ID NO: 81995 - DNA, 25 bp, Homo sapien
attaggtggtcgtttcctgtgagcc

SEQ ID NO: 81996 - DNA, 25 bp, Homo sapien
attaggtggtcgattcctgtgagcc

SEQ ID NO: 81997 - DNA, 25 bp, Homo sapien
agcttcgtgacctggtccatcgcga

SEQ ID NO: 81998 - DNA, 25 bp, Homo sapien
agcttcgtgaccaggtccatcgcga

SEQ ID NO: 81999 - DNA, 25 bp, Homo sapien
tgtagtcccggcacatcaacaagag

SEQ ID NO: 82000 - DNA, 25 bp, Homo sapien
tgtagtcccggctcatcaacaagag

SEQ ID NO: 82001 - DNA, 25 bp, Homo sapien
gagtctcggacctcaaagagcagag

SEQ ID NO: 82002 - DNA, 25 bp, Homo sapien
gagtctcggaccacaaagagcagag

SEQ ID NO: 82003 - DNA, 25 bp, Homo sapien
gcttcgagccgtaggcactaccaga

SEQ ID NO: 82004 - DNA, 25 bp, Homo sapien
gcttcgagccgttggcactaccaga

SEQ ID NO: 82005 - DNA, 25 bp, Homo sapien
gaaaccgaggtgtcagaccaagaac

SEQ ID NO: 82006 - DNA, 25 bp, Homo sapien
gaaaccgaggtgacagaccaagaac

SEQ ID NO: 82007 - DNA, 25 bp, Homo sapien
gaagacatgggaacgcaaaggccgt

SEQ ID NO: 82008 - DNA, 25 bp, Homo sapien
gaagacatgggatcgcaaaggccgt

SEQ ID NO: 82009 - DNA, 25 bp, Homo sapien
aagacgttgatgtgtcaccaccaat

SEQ ID NO: 82010 - DNA, 25 bp, Homo sapien
aagacgttgatgagtcaccaccaat

SEQ ID NO: 82011 - DNA, 25 bp, Homo sapien
caacgtgggatcactcctcgaccaa

SEQ ID NO: 82012 - DNA, 25 bp, Homo sapien
caacgtgggatctctcctcgaccaa

SEQ ID NO: 82013 - DNA, 25 bp, Homo sapien
cgtatttctgacctaccgtgaccaa

SEQ ID NO: 82014 - DNA, 25 bp, Homo sapien
cgtatttctgacgtaccgtgaccaa

SEQ ID NO: 82015 - DNA, 25 bp, Homo sapien
aattaggtacaattggtgtacacca

SEQ ID NO: 82016 - DNA, 25 bp, Homo sapien
aattaggtacaaatggtgtacacca

SEQ ID NO: 82017 - DNA, 25 bp, Homo sapien
aaatatgtagatcgtgatctaaccc

SEQ ID NO: 82018 - DNA, 25 bp, Homo sapien
aaatatgtagatggtgatctaaccc

SEQ ID NO: 82019 - DNA, 25 bp, Homo sapien
aatgtaactgatatacttgtacacg

SEQ ID NO: 82020 - DNA, 25 bp, Homo sapien
aatgtaactgatttacttgtacacg

SEQ ID NO: 82021 - DNA, 25 bp, Homo sapien
tacgtgtatccgagactcgtctaaa

SEQ ID NO: 82022 - DNA, 25 bp, Homo sapien
tacgtgtatccgtgactcgtctaaa

SEQ ID NO: 82023 - DNA, 25 bp, Homo sapien
gagtatgtaccgaatcaaactaaga

SEQ ID NO: 82024 - DNA, 25 bp, Homo sapien
gagtatgtaccgtatcaaactaaga

SEQ ID NO: 82025 - DNA, 25 bp, Homo sapien
catatagttcggtacataacagaac

SEQ ID NO: 82026 - DNA, 25 bp, Homo sapien
catatagttcggaacataacagaac

SEQ ID NO: 82027 - DNA, 25 bp, Homo sapien
tcattacgtgaaacgagagacccaa

SEQ ID NO: 82028 - DNA, 25 bp, Homo sapien
tcattacgtgaatcgagagacccaa

SEQ ID NO: 82029 - DNA, 25 bp, Homo sapien
gagacgtatgactcctgacagtcca

SEQ ID NO: 82030 - DNA, 25 bp, Homo sapien
gagacgtatgacacctgacagtcca

SEQ ID NO: 82031 - DNA, 25 bp, Homo sapien
tccacaggttcgtccctattcctgt

SEQ ID NO: 82032 - DNA, 25 bp, Homo sapien
tccacaggttcgaccctattcctgt

SEQ ID NO: 82033 - DNA, 25 bp, Homo sapien
tcacacggctgcaccctgggtctgt

SEQ ID NO: 82034 - DNA, 25 bp, Homo sapien
tcacacggctgctccctgggtctgt

SEQ ID NO: 82035 - DNA, 25 bp, Homo sapien
tctggggtctcaccttcctttttgt

SEQ ID NO: 82036 - DNA, 25 bp, Homo sapien
tctggggtctcagcttcctttttgt

SEQ ID NO: 82037 - DNA, 25 bp, Homo sapien
tgggccgataacttctttatgtgta

SEQ ID NO: 82038 - DNA, 25 bp, Homo sapien
tgggccgataacatctttatgtgta

SEQ ID NO: 82039 - DNA, 25 bp, Homo sapien
cgtgttagacttcattcaagtggta

SEQ ID NO: 82040 - DNA, 25 bp, Homo sapien
cgtgttagacttgattcaagtggta

SEQ ID NO: 82041 - DNA, 25 bp, Homo sapien
ttagagacccggttacgtaatggtt

SEQ ID NO: 82042 - DNA, 25 bp, Homo sapien
ttagagacccggatacgtaatggtt

SEQ ID NO: 82043 - DNA, 25 bp, Homo sapien
attcgaccaccaatacttagtggtc

SEQ ID NO: 82044 - DNA, 25 bp, Homo sapien
attcgaccaccattacttagtggtc

SEQ ID NO: 82045 - DNA, 25 bp, Homo sapien
aataattgtgactcttaggtacgtc

SEQ ID NO: 82046 - DNA, 25 bp, Homo sapien
aataattgtgacacttaggtacgtc

SEQ ID NO: 82047 - DNA, 25 bp, Homo sapien
tagaggaaggtacaagttaccgacc

SEQ ID NO: 82048 - DNA, 25 bp, Homo sapien
tagaggaaggtagaagttaccgacc

SEQ ID NO: 82049 - DNA, 25 bp, Homo sapien
ttaaagttagtggtaatagtccgaa

SEQ ID NO: 82050 - DNA, 25 bp, Homo sapien
ttaaagttagtgctaatagtccgaa

SEQ ID NO: 82051 - DNA, 25 bp, Homo sapien
tttgactatcagtatccaatcgagg

SEQ ID NO: 82052 - DNA, 25 bp, Homo sapien
tttgactatcagaatccaatcgagg

SEQ ID NO: 82053 - DNA, 25 bp, Homo sapien
ttgaacgtctactattaattctagg

SEQ ID NO: 82054 - DNA, 25 bp, Homo sapien
ttgaacgtctacaattaattctagg

SEQ ID NO: 82055 - DNA, 25 bp, Homo sapien
gaaccataacacttgtacgtctgct

SEQ ID NO: 82056 - DNA, 25 bp, Homo sapien
gaaccataacacatgtacgtctgct

SEQ ID NO: 82057 - DNA, 25 bp, Homo sapien
gagccccacaacatgtagtctcgat

SEQ ID NO: 82058 - DNA, 25 bp, Homo sapien
gagccccacaacttgtagtctcgat

SEQ ID NO: 82059 - DNA, 25 bp, Homo sapien
ccggaccctcggacagtttctcgag

SEQ ID NO: 82060 - DNA, 25 bp, Homo sapien
ccggaccctcggtcagtttctcgag

SEQ ID NO: 82061 - DNA, 25 bp, Homo sapien
ctcgggagacgtgttcttctctcca

SEQ ID NO: 82062 - DNA, 25 bp, Homo sapien
ctcgggagacgtcttcttctctcca

SEQ ID NO: 82063 - DNA, 25 bp, Homo sapien
cggtaagagaaatttcagacgtacc

SEQ ID NO: 82064 - DNA, 25 bp, Homo sapien
cggtaagagaaaattcagacgtacc

SEQ ID NO: 82065 - DNA, 25 bp, Homo sapien
tagaaaattaggttctagacacgtc

SEQ ID NO: 82066 - DNA, 25 bp, Homo sapien
tagaaaattaggatctagacacgtc

SEQ ID NO: 82067 - DNA, 25 bp, Homo sapien
ggaggaatagtaacccgtctctcgt

SEQ ID NO: 82068 - DNA, 25 bp, Homo sapien
ggaggaatagtatcccgtctctcgt

SEQ ID NO: 82069 - DNA, 25 bp, Homo sapien
caggggtagtcttccgtccggtccg

SEQ ID NO: 82070 - DNA, 25 bp, Homo sapien
caggggtagtctaccgtccggtccg

SEQ ID NO: 82071 - DNA, 25 bp, Homo sapien
aagaccgtatcaggacccggagtcc

SEQ ID NO: 82072 - DNA, 25 bp, Homo sapien
aagaccgtatcacgacccggagtcc

SEQ ID NO: 82073 - DNA, 25 bp, Homo sapien
gcgccgacaacgaacctgaagactc

SEQ ID NO: 82074 - DNA, 25 bp, Homo sapien
gcgccgacaacgtacctgaagactc

SEQ ID NO: 82075 - DNA, 25 bp, Homo sapien
ggtggttcgctcctttcagtcctcc

SEQ ID NO: 82076 - DNA, 25 bp, Homo sapien
ggtggttcgctcgtttcagtcctcc

SEQ ID NO: 82077 - DNA, 25 bp, Homo sapien
tggtgtttgtagtctgcagtctggc

SEQ ID NO: 82078 - DNA, 25 bp, Homo sapien
tggtgtttgtagactgcagtctggc

SEQ ID NO: 82079 - DNA, 25 bp, Homo sapien
gtctccgttaagtccgacggcccga

SEQ ID NO: 82080 - DNA, 25 bp, Homo sapien
gtctccgttaagaccgacggcccga

SEQ ID NO: 82081 - DNA, 25 bp, Homo sapien
gttctcaagacgacggagccgccgg

SEQ ID NO: 82082 - DNA, 25 bp, Homo sapien
gttctcaagacgtcggagccgccgg

SEQ ID NO: 82083 - DNA, 25 bp, Homo sapien
tccgaccacgacttgtgccacaggt

SEQ ID NO: 82084 - DNA, 25 bp, Homo sapien
tccgaccacgacatgtgccacaggt

SEQ ID NO: 82085 - DNA, 25 bp, Homo sapien
gtagagaccaacattgatcactaat

SEQ ID NO: 82086 - DNA, 25 bp, Homo sapien
gtagagaccaactttgatcactaat

SEQ ID NO: 82087 - DNA, 25 bp, Homo sapien
gagtctacactcctggattactgtt

SEQ ID NO: 82088 - DNA, 25 bp, Homo sapien
gagtctacactcgtggattactgtt

SEQ ID NO: 82089 - DNA, 25 bp, Homo sapien
ataaagtgtgagagtaagatttcat

SEQ ID NO: 82090 - DNA, 25 bp, Homo sapien
ataaagtgtgagtgtaagatttcat

SEQ ID NO: 82091 - DNA, 25 bp, Homo sapien
gttcaggtacgagtattggtggtcc

SEQ ID NO: 82092 - DNA, 25 bp, Homo sapien
gttcaggtacgactattggtggtcc

SEQ ID NO: 82093 - DNA, 25 bp, Homo sapien
tgtcgagttctttatgtgattgctc

SEQ ID NO: 82094 - DNA, 25 bp, Homo sapien
tgtcgagttcttaatgtgattgctc

SEQ ID NO: 82095 - DNA, 25 bp, Homo sapien
atcagtctcgatattctgttgtatc

SEQ ID NO: 82096 - DNA, 25 bp, Homo sapien
atcagtctcgattttctgttgtatc

SEQ ID NO: 82097 - DNA, 25 bp, Homo sapien
aaaggagccccttctctttaggtac

SEQ ID NO: 82098 - DNA, 25 bp, Homo sapien
aaaggagcccctactctttaggtac

SEQ ID NO: 82099 - DNA, 25 bp, Homo sapien
gaaattccctgtgtctgttacgtga

SEQ ID NO: 82100 - DNA, 25 bp, Homo sapien
gaaattccctgtctctgttacgtga

SEQ ID NO: 82101 - DNA, 25 bp, Homo sapien
acgtcattccctgaatcaggactta

SEQ ID NO: 82102 - DNA, 25 bp, Homo sapien
acgtcattccctcaatcaggactta

SEQ ID NO: 82103 - DNA, 25 bp, Homo sapien
tcctatttcccgactatgtcctgag

SEQ ID NO: 82104 - DNA, 25 bp, Homo sapien
tcctatttcccgtctatgtcctgag

SEQ ID NO: 82105 - DNA, 25 bp, Homo sapien
caccataaacgtagaccgttcaagt

SEQ ID NO: 82106 - DNA, 25 bp, Homo sapien
caccataaacgttgaccgttcaagt

SEQ ID NO: 82107 - DNA, 25 bp, Homo sapien
cacttgtgcagtagacggtgtgcag

SEQ ID NO: 82108 - DNA, 25 bp, Homo sapien
cacttgtgcagttgacggtgtgcag

SEQ ID NO: 82109 - DNA, 25 bp, Homo sapien
gaccttctccgtgacagtgttcgca

SEQ ID NO: 82110 - DNA, 25 bp, Homo sapien
gaccttctccgtcacagtgttcgca

SEQ ID NO: 82111 - DNA, 25 bp, Homo sapien
gtaagttccgacatcctcttaccga

SEQ ID NO: 82112 - DNA, 25 bp, Homo sapien
gtaagttccgacttcctcttaccga

SEQ ID NO: 82113 - DNA, 25 bp, Homo sapien
tggttcacgagttccgttgacgctg

SEQ ID NO: 82114 - DNA, 25 bp, Homo sapien
tggttcacgagtaccgttgacgctg

SEQ ID NO: 82115 - DNA, 25 bp, Homo sapien
ggcgaaatcaagactcccgacactg

SEQ ID NO: 82116 - DNA, 25 bp, Homo sapien
ggcgaaatcaagtctcccgacactg

SEQ ID NO: 82117 - DNA, 25 bp, Homo sapien
gatgaaacctttctaggagtccaaa

SEQ ID NO: 82118 - DNA, 25 bp, Homo sapien
gatgaaacctttgtaggagtccaaa

SEQ ID NO: 82119 - DNA, 25 bp, Homo sapien
aaacccgtcgtcgttcgaccgggaa

SEQ ID NO: 82120 - DNA, 25 bp, Homo sapien
aaacccgtcgtccttcgaccgggaa

SEQ ID NO: 82121 - DNA, 25 bp, Homo sapien
atgagaccggtcaccccgtcgggaa

SEQ ID NO: 82122 - DNA, 25 bp, Homo sapien
atgagaccggtctccccgtcgggaa

SEQ ID NO: 82123 - DNA, 25 bp, Homo sapien
cgaccacacctggtgctgtcagaag

SEQ ID NO: 82124 - DNA, 25 bp, Homo sapien
cgaccacacctgctgctgtcagaag

SEQ ID NO: 82125 - DNA, 25 bp, Homo sapien
accgtaccccgaagtaggactgaca

SEQ ID NO: 82126 - DNA, 25 bp, Homo sapien
accgtaccccgatgtaggactgaca

SEQ ID NO: 82127 - DNA, 25 bp, Homo sapien
ttgacgccgttatgtcgacgacgaa

SEQ ID NO: 82128 - DNA, 25 bp, Homo sapien
ttgacgccgttaagtcgacgacgaa

SEQ ID NO: 82129 - DNA, 25 bp, Homo sapien
ttgttgtaccagtgggtgcagaaac

SEQ ID NO: 82130 - DNA, 25 bp, Homo sapien
ttgttgtaccagagggtgcagaaac

SEQ ID NO: 82131 - DNA, 25 bp, Homo sapien
ttgaacgaggaagtaccggagacag

SEQ ID NO: 82132 - DNA, 25 bp, Homo sapien
ttgaacgaggaactaccggagacag

SEQ ID NO: 82133 - DNA, 25 bp, Homo sapien
cttagtgacaggtgcccggacagag

SEQ ID NO: 82134 - DNA, 25 bp, Homo sapien
cttagtgacaggagcccggacagag

SEQ ID NO: 82135 - DNA, 25 bp, Homo sapien
ctgtcgttcgagaccccggactagg

SEQ ID NO: 82136 - DNA, 25 bp, Homo sapien
ctgtcgttcgagtccccggactagg

SEQ ID NO: 82137 - DNA, 25 bp, Homo sapien
gccgagtgtttccacctgggaaggt

SEQ ID NO: 82138 - DNA, 25 bp, Homo sapien
gccgagtgtttcgacctgggaaggt

SEQ ID NO: 82139 - DNA, 25 bp, Homo sapien
actgaggagttttccagagaagaac

SEQ ID NO: 82140 - DNA, 25 bp, Homo sapien
actgaggagtttaccagagaagaac

SEQ ID NO: 82141 - DNA, 25 bp, Homo sapien
gtcccgactctgacaccctagaagg

SEQ ID NO: 82142 - DNA, 25 bp, Homo sapien
gtcccgactctgtcaccctagaagg

SEQ ID NO: 82143 - DNA, 25 bp, Homo sapien
cccctttcttcgatcgtgatagagt

SEQ ID NO: 82144 - DNA, 25 bp, Homo sapien
cccctttcttcgttcgtgatagagt

SEQ ID NO: 82145 - DNA, 25 bp, Homo sapien
catttcgtcgtcgttcgtcctctat

SEQ ID NO: 82146 - DNA, 25 bp, Homo sapien
catttcgtcgtccttcgtcctctat

SEQ ID NO: 82147 - DNA, 25 bp, Homo sapien
cgtgaggtcgtactcctcgtcctta

SEQ ID NO: 82148 - DNA, 25 bp, Homo sapien
cgtgaggtcgtagtcctcgtcctta

SEQ ID NO: 82149 - DNA, 25 bp, Homo sapien
tcctgtacatttgtctttaacgaag

SEQ ID NO: 82150 - DNA, 25 bp, Homo sapien
tcctgtacatttctctttaacgaag

SEQ ID NO: 82151 - DNA, 25 bp, Homo sapien
agtcggtgtttctccgaaaatccgg

SEQ ID NO: 82152 - DNA, 25 bp, Homo sapien
agtcggtgtttcaccgaaaatccgg

SEQ ID NO: 82153 - DNA, 25 bp, Homo sapien
cgaatccactcgtaagtcctctacg

SEQ ID NO: 82154 - DNA, 25 bp, Homo sapien
cgaatccactcgaaagtcctctacg

SEQ ID NO: 82155 - DNA, 25 bp, Homo sapien
gaccctgtctgtgacgaggttacac

SEQ ID NO: 82156 - DNA, 25 bp, Homo sapien
gaccctgtctgtcacgaggttacac

SEQ ID NO: 82157 - DNA, 25 bp, Homo sapien
gacaagggtgtcagtacagagtcgc

SEQ ID NO: 82158 - DNA, 25 bp, Homo sapien
gacaagggtgtctgtacagagtcgc

SEQ ID NO: 82159 - DNA, 25 bp, Homo sapien
acgtaaccggggtagtatacatgtt

SEQ ID NO: 82160 - DNA, 25 bp, Homo sapien
acgtaaccggggaagtatacatgtt

SEQ ID NO: 82161 - DNA, 25 bp, Homo sapien
cgtcaccttgcgacacacgacgttt

SEQ ID NO: 82162 - DNA, 25 bp, Homo sapien
cgtcaccttgcgtcacacgacgttt

SEQ ID NO: 82163 - DNA, 25 bp, Homo sapien
cgtgattacagtgtcacagtctgtt

SEQ ID NO: 82164 - DNA, 25 bp, Homo sapien
cgtgattacagtctcacagtctgtt

SEQ ID NO: 82165 - DNA, 25 bp, Homo sapien
gtcccctgtcttgtttccatagttt

SEQ ID NO: 82166 - DNA, 25 bp, Homo sapien
gtcccctgtcttctttccatagttt

SEQ ID NO: 82167 - DNA, 25 bp, Homo sapien
atgtactgtctttgtccgacgtttc

SEQ ID NO: 82168 - DNA, 25 bp, Homo sapien
atgtactgtcttagtccgacgtttc

SEQ ID NO: 82169 - DNA, 25 bp, Homo sapien
gaccaacatgtctcgatccggtttt

SEQ ID NO: 82170 - DNA, 25 bp, Homo sapien
gaccaacatgtcacgatccggtttt

SEQ ID NO: 82171 - DNA, 25 bp, Homo sapien
aaaaacttcctcgtagtctggtaaa

SEQ ID NO: 82172 - DNA, 25 bp, Homo sapien
aaaaacttcctcctagtctggtaaa

SEQ ID NO: 82173 - DNA, 25 bp, Homo sapien
caaagggacttccttgtgtttatat

SEQ ID NO: 82174 - DNA, 25 bp, Homo sapien
caaagggacttcgttgtgtttatat

SEQ ID NO: 82175 - DNA, 25 bp, Homo sapien
acggtcgtatcaggtcgtttaagac

SEQ ID NO: 82176 - DNA, 25 bp, Homo sapien
acggtcgtatcacgtcgtttaagac

SEQ ID NO: 82177 - DNA, 25 bp, Homo sapien
ttgaagacttctcgtctttgacact

SEQ ID NO: 82178 - DNA, 25 bp, Homo sapien
ttgaagacttctggtctttgacact

SEQ ID NO: 82179 - DNA, 25 bp, Homo sapien
atactcgtcgacgatcgtcatatcc

SEQ ID NO: 82180 - DNA, 25 bp, Homo sapien
atactcgtcgaccatcgtcatatcc

SEQ ID NO: 82181 - DNA, 25 bp, Homo sapien
ttacgacgtccacgacacgtcctct

SEQ ID NO: 82182 - DNA, 25 bp, Homo sapien
ttacgacgtccaggacacgtcctct

SEQ ID NO: 82183 - DNA, 25 bp, Homo sapien
gttttatagttcaggagacgacttc

SEQ ID NO: 82184 - DNA, 25 bp, Homo sapien
gttttatagttctggagacgacttc

SEQ ID NO: 82185 - DNA, 25 bp, Homo sapien
ctatagtaatatatgtgtgcacctg

SEQ ID NO: 82186 - DNA, 25 bp, Homo sapien
ctatagtaatatttgtgtgcacctg

SEQ ID NO: 82187 - DNA, 25 bp, Homo sapien
cgtgactcgtacctgggtcacgggt

SEQ ID NO: 82188 - DNA, 25 bp, Homo sapien
cgtgactcgtacgtgggtcacgggt

SEQ ID NO: 82189 - DNA, 25 bp, Homo sapien
ccttggtctagtaggcgctcgacgt

SEQ ID NO: 82190 - DNA, 25 bp, Homo sapien
ccttggtctagttggcgctcgacgt

SEQ ID NO: 82191 - DNA, 25 bp, Homo sapien
attctacggtagtaccctctctcgt

SEQ ID NO: 82192 - DNA, 25 bp, Homo sapien
attctacggtagaaccctctctcgt

SEQ ID NO: 82193 - DNA, 25 bp, Homo sapien
ccctttcggagagacggtcgacttc

SEQ ID NO: 82194 - DNA, 25 bp, Homo sapien
ccctttcggagacacggtcgacttc

SEQ ID NO: 82195 - DNA, 25 bp, Homo sapien
gtttaggtacgataggtgtactcac

SEQ ID NO: 82196 - DNA, 25 bp, Homo sapien
gtttaggtacgaaaggtgtactcac

SEQ ID NO: 82197 - DNA, 25 bp, Homo sapien
gactttagaacgaaagtccgttccc

SEQ ID NO: 82198 - DNA, 25 bp, Homo sapien
gactttagaacgtaagtccgttccc

SEQ ID NO: 82199 - DNA, 25 bp, Homo sapien
cagaagttgatttttcagtgtcacc

SEQ ID NO: 82200 - DNA, 25 bp, Homo sapien
cagaagttgattattcagtgtcacc

SEQ ID NO: 82201 - DNA, 25 bp, Homo sapien
cacaataaagatttgggtctcatct

SEQ ID NO: 82202 - DNA, 25 bp, Homo sapien
cacaataaagatatgggtctcatct

SEQ ID NO: 82203 - DNA, 25 bp, Homo sapien
caaaaaggaacaacttactgtacct

SEQ ID NO: 82204 - DNA, 25 bp, Homo sapien
caaaaaggaacatcttactgtacct

SEQ ID NO: 82205 - DNA, 25 bp, Homo sapien
ccaacgacggaaatcctcgtgtcac

SEQ ID NO: 82206 - DNA, 25 bp, Homo sapien
ccaacgacggaattcctcgtgtcac

SEQ ID NO: 82207 - DNA, 25 bp, Homo sapien
tcaatgacaagaagtccgtcgttca

SEQ ID NO: 82208 - DNA, 25 bp, Homo sapien
tcaatgacaagatgtccgtcgttca

SEQ ID NO: 82209 - DNA, 25 bp, Homo sapien
cgtttagaaataactcacggttgat

SEQ ID NO: 82210 - DNA, 25 bp, Homo sapien
cgtttagaaatatctcacggttgat

SEQ ID NO: 82211 - DNA, 25 bp, Homo sapien
tctttaacatcactagacctctgat

SEQ ID NO: 82212 - DNA, 25 bp, Homo sapien
tctttaacatcagtagacctctgat

SEQ ID NO: 82213 - DNA, 25 bp, Homo sapien
tcctctgatctccaggaagatccga

SEQ ID NO: 82214 - DNA, 25 bp, Homo sapien
tcctctgatctcgaggaagatccga

SEQ ID NO: 82215 - DNA, 25 bp, Homo sapien
tcactctgtgatcgtggaagtttaa

SEQ ID NO: 82216 - DNA, 25 bp, Homo sapien
tcactctgtgatggtggaagtttaa

SEQ ID NO: 82217 - DNA, 25 bp, Homo sapien
ttgaaggtgttctctggaaggaccc

SEQ ID NO: 82218 - DNA, 25 bp, Homo sapien
ttgaaggtgttcactggaaggaccc

SEQ ID NO: 82219 - DNA, 25 bp, Homo sapien
tctccggttaataaggttgtcatta

SEQ ID NO: 82220 - DNA, 25 bp, Homo sapien
tctccggttaattaggttgtcatta

SEQ ID NO: 82221 - DNA, 25 bp, Homo sapien
acggtcatatacgtgttgtcattcg

SEQ ID NO: 82222 - DNA, 25 bp, Homo sapien
acggtcatatacctgttgtcattcg

SEQ ID NO: 82223 - DNA, 25 bp, Homo sapien
aaaagttcatacctttatcttgagt

SEQ ID NO: 82224 - DNA, 25 bp, Homo sapien
aaaagttcatacgtttatcttgagt

SEQ ID NO: 82225 - DNA, 25 bp, Homo sapien
tacgacaatagacgtgttgacttca

SEQ ID NO: 82226 - DNA, 25 bp, Homo sapien
tacgacaatagaggtgttgacttca

SEQ ID NO: 82227 - DNA, 25 bp, Homo sapien
acgtcgtcccgaaccagagacggtt

SEQ ID NO: 82228 - DNA, 25 bp, Homo sapien
acgtcgtcccgatccagagacggtt

SEQ ID NO: 82229 - DNA, 25 bp, Homo sapien
ctgggtcccggtacacgagtaggta

SEQ ID NO: 82230 - DNA, 25 bp, Homo sapien
ctgggtcccggttcacgagtaggta

SEQ ID NO: 82231 - DNA, 25 bp, Homo sapien
gtcgtcgtccgtgagggtagaattc

SEQ ID NO: 82232 - DNA, 25 bp, Homo sapien
gtcgtcgtccgtcagggtagaattc

SEQ ID NO: 82233 - DNA, 25 bp, Homo sapien
ttgtgagtggatcacacaggaagtc

SEQ ID NO: 82234 - DNA, 25 bp, Homo sapien
ttgtgagtggatgacacaggaagtc

SEQ ID NO: 82235 - DNA, 25 bp, Homo sapien
attaagtggaagagacgacggcgac

SEQ ID NO: 82236 - DNA, 25 bp, Homo sapien
attaagtggaagtgacgacggcgac

SEQ ID NO: 82237 - DNA, 25 bp, Homo sapien
agggtcgtcgccgcgcccttagtac

SEQ ID NO: 82238 - DNA, 25 bp, Homo sapien
agggtcgtcgccccgcccttagtac

SEQ ID NO: 82239 - DNA, 25 bp, Homo sapien
cttatatactggtgcgagtgggcgt

SEQ ID NO: 82240 - DNA, 25 bp, Homo sapien
cttatatactggagcgagtgggcgt

SEQ ID NO: 82241 - DNA, 25 bp, Homo sapien
tttacgggatgttcgtttctttccg

SEQ ID NO: 82242 - DNA, 25 bp, Homo sapien
tttacgggatgtacgtttctttccg

SEQ ID NO: 82243 - DNA, 25 bp, Homo sapien
tggtcctttcgtttctgtggtacca

SEQ ID NO: 82244 - DNA, 25 bp, Homo sapien
tggtcctttcgtatctgtggtacca

SEQ ID NO: 82245 - DNA, 25 bp, Homo sapien
cggaactcttctcttgtggtgttac

SEQ ID NO: 82246 - DNA, 25 bp, Homo sapien
cggaactcttctgttgtggtgttac

SEQ ID NO: 82247 - DNA, 25 bp, Homo sapien
agtactctctggttgccgtcactac

SEQ ID NO: 82248 - DNA, 25 bp, Homo sapien
agtactctctggatgccgtcactac

SEQ ID NO: 82249 - DNA, 25 bp, Homo sapien
gagttgttcttcgatctcttacacc

SEQ ID NO: 82250 - DNA, 25 bp, Homo sapien
gagttgttcttccatctcttacacc

SEQ ID NO: 82251 - DNA, 25 bp, Homo sapien
tttcagacgatacatcgattccagt

SEQ ID NO: 82252 - DNA, 25 bp, Homo sapien
tttcagacgatagatcgattccagt

SEQ ID NO: 82253 - DNA, 25 bp, Homo sapien
cagagacgatactattttacacgag

SEQ ID NO: 82254 - DNA, 25 bp, Homo sapien
cagagacgatacaattttacacgag

SEQ ID NO: 82255 - DNA, 25 bp, Homo sapien
aggacggtcataacttgttcttaag

SEQ ID NO: 82256 - DNA, 25 bp, Homo sapien
aggacggtcatatcttgttcttaag

SEQ ID NO: 82257 - DNA, 25 bp, Homo sapien
ggtagatctttcctagacgtcggaa

SEQ ID NO: 82258 - DNA, 25 bp, Homo sapien
ggtagatctttcgtagacgtcggaa

SEQ ID NO: 82259 - DNA, 25 bp, Homo sapien
attgtgtcccgtctagagagatgaa

SEQ ID NO: 82260 - DNA, 25 bp, Homo sapien
attgtgtcccgtgtagagagatgaa

SEQ ID NO: 82261 - DNA, 25 bp, Homo sapien
gtaacgggccggtagacctatcggc

SEQ ID NO: 82262 - DNA, 25 bp, Homo sapien
gtaacgggccggaagacctatcggc

SEQ ID NO: 82263 - DNA, 25 bp, Homo sapien
ccggaacaggtcgagacagagcgtc

SEQ ID NO: 82264 - DNA, 25 bp, Homo sapien
ccggaacaggtccagacagagcgtc

SEQ ID NO: 82265 - DNA, 25 bp, Homo sapien
gtgtccgcaagtctcccgtagagga

SEQ ID NO: 82266 - DNA, 25 bp, Homo sapien
gtgtccgcaagtgtcccgtagagga

SEQ ID NO: 82267 - DNA, 25 bp, Homo sapien
gacggagtctactctcgagactgac

SEQ ID NO: 82268 - DNA, 25 bp, Homo sapien
gacggagtctacactcgagactgac

SEQ ID NO: 82269 - DNA, 25 bp, Homo sapien
tggtgccacgacaactcgaccgaga

SEQ ID NO: 82270 - DNA, 25 bp, Homo sapien
tggtgccacgactactcgaccgaga

SEQ ID NO: 82271 - DNA, 25 bp, Homo sapien
gagtggacacacgtgtaacttgtac

SEQ ID NO: 82272 - DNA, 25 bp, Homo sapien
gagtggacacacctgtaacttgtac

SEQ ID NO: 82273 - DNA, 25 bp, Homo sapien
cagtgtcgacataaccagctaacga

SEQ ID NO: 82274 - DNA, 25 bp, Homo sapien
cagtgtcgacattaccagctaacga

SEQ ID NO: 82275 - DNA, 25 bp, Homo sapien
gtctgagatgagtctaaggttactc

SEQ ID NO: 82276 - DNA, 25 bp, Homo sapien
gtctgagatgagactaaggttactc

SEQ ID NO: 82277 - DNA, 25 bp, Homo sapien
agaggtgataagaaacgacttttcc

SEQ ID NO: 82278 - DNA, 25 bp, Homo sapien
agaggtgataagtaacgacttttcc

SEQ ID NO: 82279 - DNA, 25 bp, Homo sapien
gtgactaccaggtatagacccctct

SEQ ID NO: 82280 - DNA, 25 bp, Homo sapien
gtgactaccaggaatagacccctct

SEQ ID NO: 82281 - DNA, 25 bp, Homo sapien
gcccgtctggaggaatgaacgccct

SEQ ID NO: 82282 - DNA, 25 bp, Homo sapien
gcccgtctggagcaatgaacgccct

SEQ ID NO: 82283 - DNA, 25 bp, Homo sapien
tccagtctcgggtcagagggccgac

SEQ ID NO: 82284 - DNA, 25 bp, Homo sapien
tccagtctcgggacagagggccgac

SEQ ID NO: 82285 - DNA, 25 bp, Homo sapien
cctcgtcttgtgttcggggaatcat

SEQ ID NO: 82286 - DNA, 25 bp, Homo sapien
cctcgtcttgtgatcggggaatcat

SEQ ID NO: 82287 - DNA, 25 bp, Homo sapien
cgtccttacgatagtgtaggtttct

SEQ ID NO: 82288 - DNA, 25 bp, Homo sapien
cgtccttacgattgtgtaggtttct

SEQ ID NO: 82289 - DNA, 25 bp, Homo sapien
tgtggtgtcactacttaggtgtctc

SEQ ID NO: 82290 - DNA, 25 bp, Homo sapien
tgtggtgtcacttcttaggtgtctc

SEQ ID NO: 82291 - DNA, 25 bp, Homo sapien
atgtgttgccacctgtgtcgtgtgg

SEQ ID NO: 82292 - DNA, 25 bp, Homo sapien
atgtgttgccacgtgtgtcgtgtgg

SEQ ID NO: 82293 - DNA, 25 bp, Homo sapien
ttcttacacaatgtcgacgtgtatg

SEQ ID NO: 82294 - DNA, 25 bp, Homo sapien
ttcttacacaatctcgacgtgtatg

SEQ ID NO: 82295 - DNA, 25 bp, Homo sapien
tctttaagtaaacctccggagacgt

SEQ ID NO: 82296 - DNA, 25 bp, Homo sapien
tctttaagtaaagctccggagacgt

SEQ ID NO: 82297 - DNA, 25 bp, Homo sapien
ctactaaaccaccacgtcggtaggt

SEQ ID NO: 82298 - DNA, 25 bp, Homo sapien
ctactaaaccacgacgtcggtaggt

SEQ ID NO: 82299 - DNA, 25 bp, Homo sapien
tcgttgcaattagtcacttacgtct

SEQ ID NO: 82300 - DNA, 25 bp, Homo sapien
tcgttgcaattactcacttacgtct

SEQ ID NO: 82301 - DNA, 25 bp, Homo sapien
actgttaggaatacgacatatcttg

SEQ ID NO: 82302 - DNA, 25 bp, Homo sapien
actgttaggaattcgacatatcttg

SEQ ID NO: 82303 - DNA, 25 bp, Homo sapien
tgtttcagacaatcttcgtccttgt

SEQ ID NO: 82304 - DNA, 25 bp, Homo sapien
tgtttcagacaaacttcgtccttgt

SEQ ID NO: 82305 - DNA, 25 bp, Homo sapien
gtgtctagagaaatttagtcctcgt

SEQ ID NO: 82306 - DNA, 25 bp, Homo sapien
gtgtctagagaattttagtcctcgt

SEQ ID NO: 82307 - DNA, 25 bp, Homo sapien
aagtctaagggttatcgtattcact

SEQ ID NO: 82308 - DNA, 25 bp, Homo sapien
aagtctaagggtaatcgtattcact

SEQ ID NO: 82309 - DNA, 25 bp, Homo sapien
gtgtcaggcctaactcgagtgtgtg

SEQ ID NO: 82310 - DNA, 25 bp, Homo sapien
gtgtcaggcctatctcgagtgtgtg

SEQ ID NO: 82311 - DNA, 25 bp, Homo sapien
tccccgggtcgtcaccaagtcatgt

SEQ ID NO: 82312 - DNA, 25 bp, Homo sapien
tccccgggtcgtgaccaagtcatgt

SEQ ID NO: 82313 - DNA, 25 bp, Homo sapien
cgaacccactggtagacccggtcaa

SEQ ID NO: 82314 - DNA, 25 bp, Homo sapien
cgaacccactggaagacccggtcaa

SEQ ID NO: 82315 - DNA, 25 bp, Homo sapien
caaagtttgacttcttgtcgaattc

SEQ ID NO: 82316 - DNA, 25 bp, Homo sapien
caaagtttgactacttgtcgaattc

SEQ ID NO: 82317 - DNA, 25 bp, Homo sapien
catgtgacccgtggacactaccggt

SEQ ID NO: 82318 - DNA, 25 bp, Homo sapien
catgtgacccgtcgacactaccggt

SEQ ID NO: 82319 - DNA, 25 bp, Homo sapien
tcgagtggccggtagtgaacttcgt

SEQ ID NO: 82320 - DNA, 25 bp, Homo sapien
tcgagtggccggaagtgaacttcgt

SEQ ID NO: 82321 - DNA, 25 bp, Homo sapien
tctatgcttcggaactgtactggtg

SEQ ID NO: 82322 - DNA, 25 bp, Homo sapien
tctatgcttcggtactgtactggtg

SEQ ID NO: 82323 - DNA, 25 bp, Homo sapien
gtctggagtcacatgtatcatttcg

SEQ ID NO: 82324 - DNA, 25 bp, Homo sapien
gtctggagtcacttgtatcatttcg

SEQ ID NO: 82325 - DNA, 25 bp, Homo sapien
gttcgagtaaactaaacactgttac

SEQ ID NO: 82326 - DNA, 25 bp, Homo sapien
gttcgagtaaacaaaacactgttac

SEQ ID NO: 82327 - DNA, 25 bp, Homo sapien
aggacaaaacggtacctgttacgtt

SEQ ID NO: 82328 - DNA, 25 bp, Homo sapien
aggacaaaacggaacctgttacgtt

SEQ ID NO: 82329 - DNA, 25 bp, Homo sapien
tgtttttacctcgagtactggtact

SEQ ID NO: 82330 - DNA, 25 bp, Homo sapien
tgtttttacctccagtactggtact

SEQ ID NO: 82331 - DNA, 25 bp, Homo sapien
caagtgtttaccttgcgattgttat

SEQ ID NO: 82332 - DNA, 25 bp, Homo sapien
caagtgtttaccatgcgattgttat

SEQ ID NO: 82333 - DNA, 25 bp, Homo sapien
acattcttaccaaccgtacgggtta

SEQ ID NO: 82334 - DNA, 25 bp, Homo sapien
acattcttaccatccgtacgggtta

SEQ ID NO: 82335 - DNA, 25 bp, Homo sapien
gtactatatacttcactaaagtgtg

SEQ ID NO: 82336 - DNA, 25 bp, Homo sapien
gtactatatactacactaaagtgtg

SEQ ID NO: 82337 - DNA, 25 bp, Homo sapien
acgagtcatgtctgactaaatgtta

SEQ ID NO: 82338 - DNA, 25 bp, Homo sapien
acgagtcatgtcagactaaatgtta

SEQ ID NO: 82339 - DNA, 25 bp, Homo sapien
aaagtcggtctcaaacgacaagtaa

SEQ ID NO: 82340 - DNA, 25 bp, Homo sapien
aaagtcggtctctaacgacaagtaa

SEQ ID NO: 82341 - DNA, 25 bp, Homo sapien
aaacgtagtctcatatcgttaagga

SEQ ID NO: 82342 - DNA, 25 bp, Homo sapien
aaacgtagtctcttatcgttaagga

SEQ ID NO: 82343 - DNA, 25 bp, Homo sapien
gaactgtcactattcggtacagaga

SEQ ID NO: 82344 - DNA, 25 bp, Homo sapien
gaactgtcactaatcggtacagaga

SEQ ID NO: 82345 - DNA, 25 bp, Homo sapien
tacctgacccgaaacgctgtacgac

SEQ ID NO: 82346 - DNA, 25 bp, Homo sapien
tacctgacccgatacgctgtacgac

SEQ ID NO: 82347 - DNA, 25 bp, Homo sapien
ggggtctccgacagggacccttgac

SEQ ID NO: 82348 - DNA, 25 bp, Homo sapien
ggggtctccgactgggacccttgac

SEQ ID NO: 82349 - DNA, 25 bp, Homo sapien
atcgagttcctttgtattccttgag

SEQ ID NO: 82350 - DNA, 25 bp, Homo sapien
atcgagttccttagtattccttgag

SEQ ID NO: 82351 - DNA, 25 bp, Homo sapien
tcgaggactcaaacgggggactcga

SEQ ID NO: 82352 - DNA, 25 bp, Homo sapien
tcgaggactcaatcgggggactcga

SEQ ID NO: 82353 - DNA, 25 bp, Homo sapien
acagtccagttcacgtgtactccga

SEQ ID NO: 82354 - DNA, 25 bp, Homo sapien
acagtccagttctcgtgtactccga

SEQ ID NO: 82355 - DNA, 25 bp, Homo sapien
gagactcataatttgatatcaccgt

SEQ ID NO: 82356 - DNA, 25 bp, Homo sapien
gagactcataatatgatatcaccgt

SEQ ID NO: 82357 - DNA, 25 bp, Homo sapien
atacatgaataggtaccgatatcaa

SEQ ID NO: 82358 - DNA, 25 bp, Homo sapien
atacatgaatagctaccgatatcaa

SEQ ID NO: 82359 - DNA, 25 bp, Homo sapien
actagggagtacaaaaagtcctagg

SEQ ID NO: 82360 - DNA, 25 bp, Homo sapien
actagggagtactaaaagtcctagg

SEQ ID NO: 82361 - DNA, 25 bp, Homo sapien
gaccggacgacctaatacttgttga

SEQ ID NO: 82362 - DNA, 25 bp, Homo sapien
gaccggacgaccaaatacttgttga

SEQ ID NO: 82363 - DNA, 25 bp, Homo sapien
tgcggcgttgagaacccgctaggta

SEQ ID NO: 82364 - DNA, 25 bp, Homo sapien
tgcggcgttgagtacccgctaggta

SEQ ID NO: 82365 - DNA, 25 bp, Homo sapien
ccggtaccgaagacggtcctgagtg

SEQ ID NO: 82366 - DNA, 25 bp, Homo sapien
ccggtaccgaagtcggtcctgagtg

SEQ ID NO: 82367 - DNA, 25 bp, Homo sapien
actctccgtaagtcgtggtgcttgt

SEQ ID NO: 82368 - DNA, 25 bp, Homo sapien
actctccgtaagacgtggtgcttgt

SEQ ID NO: 82369 - DNA, 25 bp, Homo sapien
actacttccggttgttattggtctt

SEQ ID NO: 82370 - DNA, 25 bp, Homo sapien
actacttccggtagttattggtctt

SEQ ID NO: 82371 - DNA, 25 bp, Homo sapien
agaatactccggtttttgggtactc

SEQ ID NO: 82372 - DNA, 25 bp, Homo sapien
agaatactccggattttgggtactc

SEQ ID NO: 82373 - DNA, 25 bp, Homo sapien
gtcattttgttctacacagagtatc

SEQ ID NO: 82374 - DNA, 25 bp, Homo sapien
gtcattttgttcaacacagagtatc

SEQ ID NO: 82375 - DNA, 25 bp, Homo sapien
ctgtaggggtaaacgacacacattc

SEQ ID NO: 82376 - DNA, 25 bp, Homo sapien
ctgtaggggtaatcgacacacattc

SEQ ID NO: 82377 - DNA, 25 bp, Homo sapien
tggcgtcgcgtctaaccacggtccg

SEQ ID NO: 82378 - DNA, 25 bp, Homo sapien
tggcgtcgcgtcaaaccacggtccg

SEQ ID NO: 82379 - DNA, 25 bp, Homo sapien
tcttaggtctctagatcagtcgacc

SEQ ID NO: 82380 - DNA, 25 bp, Homo sapien
tcttaggtctcttgatcagtcgacc

SEQ ID NO: 82381 - DNA, 25 bp, Homo sapien
tctaatttcggttagattatcgacc

SEQ ID NO: 82382 - DNA, 25 bp, Homo sapien
tctaatttcggtaagattatcgacc

SEQ ID NO: 82383 - DNA, 25 bp, Homo sapien
taatgtcatgttggagtactttacc

SEQ ID NO: 82384 - DNA, 25 bp, Homo sapien
taatgtcatgttcgagtactttacc

SEQ ID NO: 82385 - DNA, 25 bp, Homo sapien
tgtaagagtcgtctcgtgttcatag

SEQ ID NO: 82386 - DNA, 25 bp, Homo sapien
tgtaagagtcgtgtcgtgttcatag

SEQ ID NO: 82387 - DNA, 25 bp, Homo sapien
aattactaactctttcgtgaggaat

SEQ ID NO: 82388 - DNA, 25 bp, Homo sapien
aattactaactcattcgtgaggaat

SEQ ID NO: 82389 - DNA, 25 bp, Homo sapien
cttggtaatcttgtctggagtcaca

SEQ ID NO: 82390 - DNA, 25 bp, Homo sapien
cttggtaatcttctctggagtcaca

SEQ ID NO: 82391 - DNA, 25 bp, Homo sapien
gggtcgctcccttttatcttttcta

SEQ ID NO: 82392 - DNA, 25 bp, Homo sapien
gggtcgctccctattatcttttcta

SEQ ID NO: 82393 - DNA, 25 bp, Homo sapien
gtgtcaccacttttgatactttttg

SEQ ID NO: 82394 - DNA, 25 bp, Homo sapien
gtgtcaccacttatgatactttttg

SEQ ID NO: 82395 - DNA, 25 bp, Homo sapien
ggttccagaattgaatgtctgtctt

SEQ ID NO: 82396 - DNA, 25 bp, Homo sapien
ggttccagaattcaatgtctgtctt

SEQ ID NO: 82397 - DNA, 25 bp, Homo sapien
aatttagagaaggactgagacccaa

SEQ ID NO: 82398 - DNA, 25 bp, Homo sapien
aatttagagaagcactgagacccaa

SEQ ID NO: 82399 - DNA, 25 bp, Homo sapien
taaatatgattagtccgactacagt

SEQ ID NO: 82400 - DNA, 25 bp, Homo sapien
taaatatgattactccgactacagt

SEQ ID NO: 82401 - DNA, 25 bp, Homo sapien
gacaagggtaaagacagacgacagt

SEQ ID NO: 82402 - DNA, 25 bp, Homo sapien
gacaagggtaaacacagacgacagt

SEQ ID NO: 82403 - DNA, 25 bp, Homo sapien
cccactggtacaacccgaagtcgtt

SEQ ID NO: 82404 - DNA, 25 bp, Homo sapien
cccactggtacatcccgaagtcgtt

SEQ ID NO: 82405 - DNA, 25 bp, Homo sapien
tccgttcagaagtgtcgacatacta

SEQ ID NO: 82406 - DNA, 25 bp, Homo sapien
tccgttcagaagagtcgacatacta

SEQ ID NO: 82407 - DNA, 25 bp, Homo sapien
gtgtatcagtatcaactcgtatcat

SEQ ID NO: 82408 - DNA, 25 bp, Homo sapien
gtgtatcagtatgaactcgtatcat

SEQ ID NO: 82409 - DNA, 25 bp, Homo sapien
agtatactgaatatcgtctattcgt

SEQ ID NO: 82410 - DNA, 25 bp, Homo sapien
agtatactgaatttcgtctattcgt

SEQ ID NO: 82411 - DNA, 25 bp, Homo sapien
gtcggaatatataggtcctttcttc

SEQ ID NO: 82412 - DNA, 25 bp, Homo sapien
gtcggaatatattggtcctttcttc

SEQ ID NO: 82413 - DNA, 25 bp, Homo sapien
gttaagtacatcgtttaccttttag

SEQ ID NO: 82414 - DNA, 25 bp, Homo sapien
gttaagtacatcctttaccttttag

SEQ ID NO: 82415 - DNA, 25 bp, Homo sapien
cacgtactacccttcaagtgactga

SEQ ID NO: 82416 - DNA, 25 bp, Homo sapien
cacgtactacccatcaagtgactga

SEQ ID NO: 82417 - DNA, 25 bp, Homo sapien
gtctacctattcaacagacgacagt

SEQ ID NO: 82418 - DNA, 25 bp, Homo sapien
gtctacctattctacagacgacagt

SEQ ID NO: 82419 - DNA, 25 bp, Homo sapien
ttcggtgttctacgatacagaccgg

SEQ ID NO: 82420 - DNA, 25 bp, Homo sapien
ttcggtgttctaggatacagaccgg

SEQ ID NO: 82421 - DNA, 25 bp, Homo sapien
tttccgtttctacgtcttcaccgtg

SEQ ID NO: 82422 - DNA, 25 bp, Homo sapien
tttccgtttctaggtcttcaccgtg

SEQ ID NO: 82423 - DNA, 25 bp, Homo sapien
aagggaatcggagtctcttcctgag

SEQ ID NO: 82424 - DNA, 25 bp, Homo sapien
aagggaatcggactctcttcctgag

SEQ ID NO: 82425 - DNA, 25 bp, Homo sapien
gtgagttgtcttatcttcaaaacgt

SEQ ID NO: 82426 - DNA, 25 bp, Homo sapien
gtgagttgtcttttcttcaaaacgt

SEQ ID NO: 82427 - DNA, 25 bp, Homo sapien
gatttgtggtctctgtaaaactact

SEQ ID NO: 82428 - DNA, 25 bp, Homo sapien
gatttgtggtctgtgtaaaactact

SEQ ID NO: 82429 - DNA, 25 bp, Homo sapien
cttcggtatgtcttaacgagccgct

SEQ ID NO: 82430 - DNA, 25 bp, Homo sapien
cttcggtatgtcataacgagccgct

SEQ ID NO: 82431 - DNA, 25 bp, Homo sapien
aacgggtactagtagtacagcaggt

SEQ ID NO: 82432 - DNA, 25 bp, Homo sapien
aacgggtactagaagtacagcaggt

SEQ ID NO: 82433 - DNA, 25 bp, Homo sapien
gactcgggagacaggacaccatcgt

SEQ ID NO: 82434 - DNA, 25 bp, Homo sapien
gactcgggagactggacaccatcgt

SEQ ID NO: 82435 - DNA, 25 bp, Homo sapien
actccgacggactctacggagttcg

SEQ ID NO: 82436 - DNA, 25 bp, Homo sapien
actccgacggacactacggagttcg

SEQ ID NO: 82437 - DNA, 25 bp, Homo sapien
gaggtcacggcgaccgtcctcgtcg

SEQ ID NO: 82438 - DNA, 25 bp, Homo sapien
gaggtcacggcgtccgtcctcgtcg

SEQ ID NO: 82439 - DNA, 25 bp, Homo sapien
aaggagaacgcgactcggaccaccg

SEQ ID NO: 82440 - DNA, 25 bp, Homo sapien
aaggagaacgcgtctcggaccaccg

SEQ ID NO: 82441 - DNA, 25 bp, Homo sapien
atatagacgggtttaaggtccggtc

SEQ ID NO: 82442 - DNA, 25 bp, Homo sapien
atatagacgggtataaggtccggtc

SEQ ID NO: 82443 - DNA, 25 bp, Homo sapien
gacagttagccctactgtcccagtc

SEQ ID NO: 82444 - DNA, 25 bp, Homo sapien
gacagttagcccaactgtcccagtc

SEQ ID NO: 82445 - DNA, 25 bp, Homo sapien
gtccttgcccgtagtaaccaacgac

SEQ ID NO: 82446 - DNA, 25 bp, Homo sapien
gtccttgcccgttgtaaccaacgac

SEQ ID NO: 82447 - DNA, 25 bp, Homo sapien
gactcgtttatgtcatgactcttcc

SEQ ID NO: 82448 - DNA, 25 bp, Homo sapien
gactcgtttatgacatgactcttcc

SEQ ID NO: 82449 - DNA, 25 bp, Homo sapien
gacagatttgtctcgtcgatgtccc

SEQ ID NO: 82450 - DNA, 25 bp, Homo sapien
gacagatttgtcacgtcgatgtccc

SEQ ID NO: 82451 - DNA, 25 bp, Homo sapien
cgtacaggaatttccttagatatta

SEQ ID NO: 82452 - DNA, 25 bp, Homo sapien
cgtacaggaattaccttagatatta

SEQ ID NO: 82453 - DNA, 25 bp, Homo sapien
cttgtgatataaataatccagttat

SEQ ID NO: 82454 - DNA, 25 bp, Homo sapien
cttgtgatataattaatccagttat

SEQ ID NO: 82455 - DNA, 25 bp, Homo sapien
gttataaggtagactacaaacgtac

SEQ ID NO: 82456 - DNA, 25 bp, Homo sapien
gttataaggtagtctacaaacgtac

SEQ ID NO: 82457 - DNA, 25 bp, Homo sapien
accaatacgcggaatcctactgatg

SEQ ID NO: 82458 - DNA, 25 bp, Homo sapien
accaatacgcggtatcctactgatg

SEQ ID NO: 82459 - DNA, 25 bp, Homo sapien
agtagcatccagtactacctctgaa

SEQ ID NO: 82460 - DNA, 25 bp, Homo sapien
agtagcatccagaactacctctgaa

SEQ ID NO: 82461 - DNA, 25 bp, Homo sapien
atacagttctcactctctctgtatt

SEQ ID NO: 82462 - DNA, 25 bp, Homo sapien
atacagttctcagtctctctgtatt

SEQ ID NO: 82463 - DNA, 25 bp, Homo sapien
cactagactattgtctgacgtcgtt

SEQ ID NO: 82464 - DNA, 25 bp, Homo sapien
cactagactattctctgacgtcgtt

SEQ ID NO: 82465 - DNA, 25 bp, Homo sapien
ggtatcaaccttacacataacagag

SEQ ID NO: 82466 - DNA, 25 bp, Homo sapien
ggtatcaacctttcacataacagag

SEQ ID NO: 82467 - DNA, 25 bp, Homo sapien
gttgacagctctcgtagaacagaag

SEQ ID NO: 82468 - DNA, 25 bp, Homo sapien
gttgacagctctggtagaacagaag

SEQ ID NO: 82469 - DNA, 25 bp, Homo sapien
cgtgaacatcctcgtgtagtccctc

SEQ ID NO: 82470 - DNA, 25 bp, Homo sapien
cgtgaacatcctggtgtagtccctc

SEQ ID NO: 82471 - DNA, 25 bp, Homo sapien
gctttcagaccttttacacacgtga

SEQ ID NO: 82472 - DNA, 25 bp, Homo sapien
gctttcagacctattacacacgtga

SEQ ID NO: 82473 - DNA, 25 bp, Homo sapien
cttaaaactgctacagacgtgacgt

SEQ ID NO: 82474 - DNA, 25 bp, Homo sapien
cttaaaactgcttcagacgtgacgt

SEQ ID NO: 82475 - DNA, 25 bp, Homo sapien
acaatctggagtctagttggagttc

SEQ ID NO: 82476 - DNA, 25 bp, Homo sapien
acaatctggagtgtagttggagttc

SEQ ID NO: 82477 - DNA, 25 bp, Homo sapien
tctacttcatttggtgtctggatta

SEQ ID NO: 82478 - DNA, 25 bp, Homo sapien
tctacttcatttcgtgtctggatta

SEQ ID NO: 82479 - DNA, 25 bp, Homo sapien
taacttggtctgagtattgggtccg

SEQ ID NO: 82480 - DNA, 25 bp, Homo sapien
taacttggtctgtgtattgggtccg

SEQ ID NO: 82481 - DNA, 25 bp, Homo sapien
caaaaggaagggtcgtcgaggtcac

SEQ ID NO: 82482 - DNA, 25 bp, Homo sapien
caaaaggaagggacgtcgaggtcac

SEQ ID NO: 82483 - DNA, 25 bp, Homo sapien
gactaaaacgatagttagcacttct

SEQ ID NO: 82484 - DNA, 25 bp, Homo sapien
gactaaaacgattgttagcacttct

SEQ ID NO: 82485 - DNA, 25 bp, Homo sapien
caacacctaacactcacgcaggtgt

SEQ ID NO: 82486 - DNA, 25 bp, Homo sapien
caacacctaacagtcacgcaggtgt

SEQ ID NO: 82487 - DNA, 25 bp, Homo sapien
agtcccttacacagtccgacgaggg

SEQ ID NO: 82488 - DNA, 25 bp, Homo sapien
agtcccttacactgtccgacgaggg

SEQ ID NO: 82489 - DNA, 25 bp, Homo sapien
aatgacgtccttaggtccactgtgg

SEQ ID NO: 82490 - DNA, 25 bp, Homo sapien
aatgacgtcctttggtccactgtgg

SEQ ID NO: 82491 - DNA, 25 bp, Homo sapien
tatcctcttctcaggtccgggtcgc

SEQ ID NO: 82492 - DNA, 25 bp, Homo sapien
tatcctcttctctggtccgggtcgc

SEQ ID NO: 82493 - DNA, 25 bp, Homo sapien
ttatgtctttcctggtcaggccgtc

SEQ ID NO: 82494 - DNA, 25 bp, Homo sapien
ttatgtctttccaggtcaggccgtc

SEQ ID NO: 82495 - DNA, 25 bp, Homo sapien
gtttccggaccagacacggtccgtc

SEQ ID NO: 82496 - DNA, 25 bp, Homo sapien
gtttccggaccacacacggtccgtc

SEQ ID NO: 82497 - DNA, 25 bp, Homo sapien
tgagagccggaggagcttccgattt

SEQ ID NO: 82498 - DNA, 25 bp, Homo sapien
tgagagccggagcagcttccgattt

SEQ ID NO: 82499 - DNA, 25 bp, Homo sapien
gttcgttgagttcgttccgtcgttt

SEQ ID NO: 82500 - DNA, 25 bp, Homo sapien
gttcgttgagttggttccgtcgttt

SEQ ID NO: 82501 - DNA, 25 bp, Homo sapien
acaggattccggtccctattcaggg

SEQ ID NO: 82502 - DNA, 25 bp, Homo sapien
acaggattccggaccctattcaggg

SEQ ID NO: 82503 - DNA, 25 bp, Homo sapien
aggtctctgagaaatcactttacaa

SEQ ID NO: 82504 - DNA, 25 bp, Homo sapien
aggtctctgagatatcactttacaa

SEQ ID NO: 82505 - DNA, 25 bp, Homo sapien
actacacctggaacaacatgtgcaa

SEQ ID NO: 82506 - DNA, 25 bp, Homo sapien
actacacctggatcaacatgtgcaa

SEQ ID NO: 82507 - DNA, 25 bp, Homo sapien
cccagggctcaccatgtagcagtat

SEQ ID NO: 82508 - DNA, 25 bp, Homo sapien
cccagggctcacgatgtagcagtat

SEQ ID NO: 82509 - DNA, 25 bp, Homo sapien
cggagggacgacctgaacaccagtg

SEQ ID NO: 82510 - DNA, 25 bp, Homo sapien
cggagggacgacgtgaacaccagtg

SEQ ID NO: 82511 - DNA, 25 bp, Homo sapien
ggtaccgacagtcagtcagacagag

SEQ ID NO: 82512 - DNA, 25 bp, Homo sapien
ggtaccgacagtgagtcagacagag

SEQ ID NO: 82513 - DNA, 25 bp, Homo sapien
tatatgtcaaccaggtcgaggatgg

SEQ ID NO: 82514 - DNA, 25 bp, Homo sapien
tatatgtcaacctggtcgaggatgg

SEQ ID NO: 82515 - DNA, 25 bp, Homo sapien
aaataaacctgatcggtgactacgg

SEQ ID NO: 82516 - DNA, 25 bp, Homo sapien
aaataaacctgaacggtgactacgg

SEQ ID NO: 82517 - DNA, 25 bp, Homo sapien
aaacacatactgtaccgtgattaag

SEQ ID NO: 82518 - DNA, 25 bp, Homo sapien
aaacacatactgaaccgtgattaag

SEQ ID NO: 82519 - DNA, 25 bp, Homo sapien
tgacaaaccgatgtcgaactcaagt

SEQ ID NO: 82520 - DNA, 25 bp, Homo sapien
tgacaaaccgatctcgaactcaagt

SEQ ID NO: 82521 - DNA, 25 bp, Homo sapien
acagacaaaccttgactgttccctg

SEQ ID NO: 82522 - DNA, 25 bp, Homo sapien
acagacaaacctagactgttccctg

SEQ ID NO: 82523 - DNA, 25 bp, Homo sapien
agtcaagactctcaaccatccagtg

SEQ ID NO: 82524 - DNA, 25 bp, Homo sapien
agtcaagactctgaaccatccagtg

SEQ ID NO: 82525 - DNA, 25 bp, Homo sapien
tcgacacttcctctttcgtcacgtg

SEQ ID NO: 82526 - DNA, 25 bp, Homo sapien
tcgacacttcctgtttcgtcacgtg

SEQ ID NO: 82527 - DNA, 25 bp, Homo sapien
tgtacctcttcgacgtaactccgaa

SEQ ID NO: 82528 - DNA, 25 bp, Homo sapien
tgtacctcttcgtcgtaactccgaa

SEQ ID NO: 82529 - DNA, 25 bp, Homo sapien
cgggtcactgaccaacacgccgagt

SEQ ID NO: 82530 - DNA, 25 bp, Homo sapien
cgggtcactgacgaacacgccgagt

SEQ ID NO: 82531 - DNA, 25 bp, Homo sapien
gactaggaccccagaagactctgag

SEQ ID NO: 82532 - DNA, 25 bp, Homo sapien
gactaggacccctgaagactctgag

SEQ ID NO: 82533 - DNA, 25 bp, Homo sapien
tccctgtctctcgaacgacaagacg

SEQ ID NO: 82534 - DNA, 25 bp, Homo sapien
tccctgtctctccaacgacaagacg

SEQ ID NO: 82535 - DNA, 25 bp, Homo sapien
cctacctgtgtacacccgtggaacg

SEQ ID NO: 82536 - DNA, 25 bp, Homo sapien
cctacctgtgtagacccgtggaacg

SEQ ID NO: 82537 - DNA, 25 bp, Homo sapien
acctccttcgaagtcacggtgaccg

SEQ ID NO: 82538 - DNA, 25 bp, Homo sapien
acctccttcgaactcacggtgaccg

SEQ ID NO: 82539 - DNA, 25 bp, Homo sapien
cacgtctccccaacttaaagacggg

SEQ ID NO: 82540 - DNA, 25 bp, Homo sapien
cacgtctccccatcttaaagacggg

SEQ ID NO: 82541 - DNA, 25 bp, Homo sapien
agctcgtcagggtcgacgaaaagta

SEQ ID NO: 82542 - DNA, 25 bp, Homo sapien
agctcgtcagggacgacgaaaagta

SEQ ID NO: 82543 - DNA, 25 bp, Homo sapien
tccgtagagtattcactccgaagtc

SEQ ID NO: 82544 - DNA, 25 bp, Homo sapien
tccgtagagtatacactccgaagtc

SEQ ID NO: 82545 - DNA, 25 bp, Homo sapien
aaggaagaggttgacctccgacaga

SEQ ID NO: 82546 - DNA, 25 bp, Homo sapien
aaggaagaggttcacctccgacaga

SEQ ID NO: 82547 - DNA, 25 bp, Homo sapien
ggaggtaaacggtcacttaccaaga

SEQ ID NO: 82548 - DNA, 25 bp, Homo sapien
ggaggtaaacggacacttaccaaga

SEQ ID NO: 82549 - DNA, 25 bp, Homo sapien
ggacgagacacaaaacctagaaagg

SEQ ID NO: 82550 - DNA, 25 bp, Homo sapien
ggacgagacacataacctagaaagg

SEQ ID NO: 82551 - DNA, 25 bp, Homo sapien
agtcaggtccaagacctagggaggt

SEQ ID NO: 82552 - DNA, 25 bp, Homo sapien
agtcaggtccaacacctagggaggt

SEQ ID NO: 82553 - DNA, 25 bp, Homo sapien
tctacttgaccgaaccccgcgggag

SEQ ID NO: 82554 - DNA, 25 bp, Homo sapien
tctacttgaccgtaccccgcgggag

SEQ ID NO: 82555 - DNA, 25 bp, Homo sapien
tcatggacagttgacgggaccggac

SEQ ID NO: 82556 - DNA, 25 bp, Homo sapien
tcatggacagttcacgggaccggac

SEQ ID NO: 82557 - DNA, 25 bp, Homo sapien
gtctgtcgcagcaacggcctcttag

SEQ ID NO: 82558 - DNA, 25 bp, Homo sapien
gtctgtcgcagctacggcctcttag

SEQ ID NO: 82559 - DNA, 25 bp, Homo sapien
agtactcttcaatgggtcactctca

SEQ ID NO: 82560 - DNA, 25 bp, Homo sapien
agtactcttcaaagggtcactctca

SEQ ID NO: 82561 - DNA, 25 bp, Homo sapien
cccatcctttaggaggtcctagaat

SEQ ID NO: 82562 - DNA, 25 bp, Homo sapien
cccatcctttagcaggtcctagaat

SEQ ID NO: 82563 - DNA, 25 bp, Homo sapien
gaaggacgtttcctgtgccgtccag

SEQ ID NO: 82564 - DNA, 25 bp, Homo sapien
gaaggacgtttcgtgtgccgtccag

SEQ ID NO: 82565 - DNA, 25 bp, Homo sapien
gaggaggtcgacgtcttcagttcga

SEQ ID NO: 82566 - DNA, 25 bp, Homo sapien
gaggaggtcgacctcttcagttcga

SEQ ID NO: 82567 - DNA, 25 bp, Homo sapien
gaggcatcagtttcttcttttgtgg

SEQ ID NO: 82568 - DNA, 25 bp, Homo sapien
gaggcatcagttacttcttttgtgg

SEQ ID NO: 82569 - DNA, 25 bp, Homo sapien
cggcgtctttccctcttcgtttgtg

SEQ ID NO: 82570 - DNA, 25 bp, Homo sapien
cggcgtctttccgtcttcgtttgtg

SEQ ID NO: 82571 - DNA, 25 bp, Homo sapien
accatgccggtctgactacctaggt

SEQ ID NO: 82572 - DNA, 25 bp, Homo sapien
accatgccggtcagactacctaggt

SEQ ID NO: 82573 - DNA, 25 bp, Homo sapien
aacccgtcatcgtgtcggacctaca

SEQ ID NO: 82574 - DNA, 25 bp, Homo sapien
aacccgtcatcgagtcggacctaca

SEQ ID NO: 82575 - DNA, 25 bp, Homo sapien
agtcttgattatagtccttgtaccg

SEQ ID NO: 82576 - DNA, 25 bp, Homo sapien
agtcttgattattgtccttgtaccg

SEQ ID NO: 82577 - DNA, 25 bp, Homo sapien
ggatggtctaagtgacatgtgacct

SEQ ID NO: 82578 - DNA, 25 bp, Homo sapien
ggatggtctaagagacatgtgacct

SEQ ID NO: 82579 - DNA, 25 bp, Homo sapien
cctcaatatatgtcgtcactgggcc

SEQ ID NO: 82580 - DNA, 25 bp, Homo sapien
cctcaatatatgacgtcactgggcc

SEQ ID NO: 82581 - DNA, 25 bp, Homo sapien
tcaatgtaacgaagtctgaatgcct

SEQ ID NO: 82582 - DNA, 25 bp, Homo sapien
tcaatgtaacgatgtctgaatgcct

SEQ ID NO: 82583 - DNA, 25 bp, Homo sapien
aaggtagaccggaccgagactgacc

SEQ ID NO: 82584 - DNA, 25 bp, Homo sapien
aaggtagaccggtccgagactgacc

SEQ ID NO: 82585 - DNA, 25 bp, Homo sapien
tcctggtgccggtgaggaccgtcct

SEQ ID NO: 82586 - DNA, 25 bp, Homo sapien
tcctggtgccggagaggaccgtcct

SEQ ID NO: 82587 - DNA, 25 bp, Homo sapien
ggtcgaagagacacgtagttccctg

SEQ ID NO: 82588 - DNA, 25 bp, Homo sapien
ggtcgaagagactcgtagttccctg

SEQ ID NO: 82589 - DNA, 25 bp, Homo sapien
agggaaacgagtcgtggacgacacc

SEQ ID NO: 82590 - DNA, 25 bp, Homo sapien
agggaaacgagtggtggacgacacc

SEQ ID NO: 82591 - DNA, 25 bp, Homo sapien
gaagattagagacagttttccctcc

SEQ ID NO: 82592 - DNA, 25 bp, Homo sapien
gaagattagagagagttttccctcc

SEQ ID NO: 82593 - DNA, 25 bp, Homo sapien
aattaaattaagtcttattctctat

SEQ ID NO: 82594 - DNA, 25 bp, Homo sapien
aattaaattaagacttattctctat

SEQ ID NO: 82595 - DNA, 25 bp, Homo sapien
tatgtaattgtccttctttgtccga

SEQ ID NO: 82596 - DNA, 25 bp, Homo sapien
tatgtaattgtcgttctttgtccga

SEQ ID NO: 82597 - DNA, 25 bp, Homo sapien
ggataaggtcgagtcctgtccccac

SEQ ID NO: 82598 - DNA, 25 bp, Homo sapien
ggataaggtcgactcctgtccccac

SEQ ID NO: 82599 - DNA, 25 bp, Homo sapien
ggaaggtccgtatttatacctccga

SEQ ID NO: 82600 - DNA, 25 bp, Homo sapien
ggaaggtccgtaattatacctccga

SEQ ID NO: 82601 - DNA, 25 bp, Homo sapien
ctgttgggttgttttataccgtcaa

SEQ ID NO: 82602 - DNA, 25 bp, Homo sapien
ctgttgggttgtattataccgtcaa

SEQ ID NO: 82603 - DNA, 25 bp, Homo sapien
tcggtcgtggagacatatccgggcc

SEQ ID NO: 82604 - DNA, 25 bp, Homo sapien
tcggtcgtggagtcatatccgggcc

SEQ ID NO: 82605 - DNA, 25 bp, Homo sapien
tacgtggtgtagttttcttggtcct

SEQ ID NO: 82606 - DNA, 25 bp, Homo sapien
tacgtggtgtagatttcttggtcct

SEQ ID NO: 82607 - DNA, 25 bp, Homo sapien
tatctgtgtgaatttctcgtatgca

SEQ ID NO: 82608 - DNA, 25 bp, Homo sapien
tatctgtgtgaaattctcgtatgca

SEQ ID NO: 82609 - DNA, 25 bp, Homo sapien
tgtcgtcgggacacatcacaaaagt

SEQ ID NO: 82610 - DNA, 25 bp, Homo sapien
tgtcgtcgggactcatcacaaaagt

SEQ ID NO: 82611 - DNA, 25 bp, Homo sapien
agtgtccggacctctaaaattacag

SEQ ID NO: 82612 - DNA, 25 bp, Homo sapien
agtgtccggaccactaaaattacag

SEQ ID NO: 82613 - DNA, 25 bp, Homo sapien
ccgtgtctgccgacggacacccaga

SEQ ID NO: 82614 - DNA, 25 bp, Homo sapien
ccgtgtctgccgtcggacacccaga

SEQ ID NO: 82615 - DNA, 25 bp, Homo sapien
cagtcgtacaggtcggaccccagac

SEQ ID NO: 82616 - DNA, 25 bp, Homo sapien
cagtcgtacaggacggaccccagac

SEQ ID NO: 82617 - DNA, 25 bp, Homo sapien
aaacactgggaagaaaccgtcgagt

SEQ ID NO: 82618 - DNA, 25 bp, Homo sapien
aaacactgggaacaaaccgtcgagt

SEQ ID NO: 82619 - DNA, 25 bp, Homo sapien
gatacgcttgtgtgcaaaccgagat

SEQ ID NO: 82620 - DNA, 25 bp, Homo sapien
gatacgcttgtgagcaaaccgagat

SEQ ID NO: 82621 - DNA, 25 bp, Homo sapien
tcgtctcgggtgaccctcaccagta

SEQ ID NO: 82622 - DNA, 25 bp, Homo sapien
tcgtctcgggtgtccctcaccagta

SEQ ID NO: 82623 - DNA, 25 bp, Homo sapien
tatgtgacgtgatactcttacacaa

SEQ ID NO: 82624 - DNA, 25 bp, Homo sapien
tatgtgacgtgaaactcttacacaa

SEQ ID NO: 82625 - DNA, 25 bp, Homo sapien
ttactgaaaagtggttactacgcac

SEQ ID NO: 82626 - DNA, 25 bp, Homo sapien
ttactgaaaagtcgttactacgcac

SEQ ID NO: 82627 - DNA, 25 bp, Homo sapien
tcaatactggatcgttgttatacca

SEQ ID NO: 82628 - DNA, 25 bp, Homo sapien
tcaatactggatggttgttatacca

SEQ ID NO: 82629 - DNA, 25 bp, Homo sapien
cactgacatgatatgttacactacg

SEQ ID NO: 82630 - DNA, 25 bp, Homo sapien
cactgacatgatttgttacactacg

SEQ ID NO: 82631 - DNA, 25 bp, Homo sapien
ttacgtaatctgtgaagtctacaat

SEQ ID NO: 82632 - DNA, 25 bp, Homo sapien
ttacgtaatctgagaagtctacaat

SEQ ID NO: 82633 - DNA, 25 bp, Homo sapien
tatcttaccgtgtacgaagtcaaag

SEQ ID NO: 82634 - DNA, 25 bp, Homo sapien
tatcttaccgtgaacgaagtcaaag

SEQ ID NO: 82635 - DNA, 25 bp, Homo sapien
agctcattagttagaacattcagaa

SEQ ID NO: 82636 - DNA, 25 bp, Homo sapien
agctcattagtttgaacattcagaa

SEQ ID NO: 82637 - DNA, 25 bp, Homo sapien
gttcagttgtttagataaccctata

SEQ ID NO: 82638 - DNA, 25 bp, Homo sapien
gttcagttgttttgataaccctata

SEQ ID NO: 82639 - DNA, 25 bp, Homo sapien
gatactgacttagctgacttaccta

SEQ ID NO: 82640 - DNA, 25 bp, Homo sapien
gatactgacttacctgacttaccta

SEQ ID NO: 82641 - DNA, 25 bp, Homo sapien
tttcttgttacgtcctcattcctag

SEQ ID NO: 82642 - DNA, 25 bp, Homo sapien
tttcttgttacgacctcattcctag

SEQ ID NO: 82643 - DNA, 25 bp, Homo sapien
tgtccggtttacaccttggtaggtg

SEQ ID NO: 82644 - DNA, 25 bp, Homo sapien
tgtccggtttactccttggtaggtg

SEQ ID NO: 82645 - DNA, 25 bp, Homo sapien
ttatgggctaccattcttttaatgt

SEQ ID NO: 82646 - DNA, 25 bp, Homo sapien
ttatgggctacctttcttttaatgt

SEQ ID NO: 82647 - DNA, 25 bp, Homo sapien
atgggccgataacttctttatgtgt

SEQ ID NO: 82648 - DNA, 25 bp, Homo sapien
atgggccgataagttctttatgtgt

SEQ ID NO: 82649 - DNA, 25 bp, Homo sapien
gtgtgttgcactccttcaatgtgta

SEQ ID NO: 82650 - DNA, 25 bp, Homo sapien
gtgtgttgcactgcttcaatgtgta

SEQ ID NO: 82651 - DNA, 25 bp, Homo sapien
tggaaaccgtcgttcgaatgagtgt

SEQ ID NO: 82652 - DNA, 25 bp, Homo sapien
tggaaaccgtcgatcgaatgagtgt

SEQ ID NO: 82653 - DNA, 25 bp, Homo sapien
attcaacaacagatctcaggagact

SEQ ID NO: 82654 - DNA, 25 bp, Homo sapien
attcaacaacagttctcaggagact

SEQ ID NO: 82655 - DNA, 25 bp, Homo sapien
aaatcttttgagtcatagtgtcgtc

SEQ ID NO: 82656 - DNA, 25 bp, Homo sapien
aaatcttttgagacatagtgtcgtc

SEQ ID NO: 82657 - DNA, 25 bp, Homo sapien
ttgaggaagtcagaagactaccgcc

SEQ ID NO: 82658 - DNA, 25 bp, Homo sapien
ttgaggaagtcacaagactaccgcc

SEQ ID NO: 82659 - DNA, 25 bp, Homo sapien
ctcaaggttgtggaaagtaccgaac

SEQ ID NO: 82660 - DNA, 25 bp, Homo sapien
ctcaaggttgtgcaaagtaccgaac

SEQ ID NO: 82661 - DNA, 25 bp, Homo sapien
tttaattacaggttcaaatcgtccg

SEQ ID NO: 82662 - DNA, 25 bp, Homo sapien
tttaattacaggatcaaatcgtccg

SEQ ID NO: 82663 - DNA, 25 bp, Homo sapien
ttagaactacacgagtctaattaaa

SEQ ID NO: 82664 - DNA, 25 bp, Homo sapien
ttagaactacaccagtctaattaaa

SEQ ID NO: 82665 - DNA, 25 bp, Homo sapien
gtgaaccaaaataacgtgtcttcgt

SEQ ID NO: 82666 - DNA, 25 bp, Homo sapien
gtgaaccaaaattacgtgtcttcgt

SEQ ID NO: 82667 - DNA, 25 bp, Homo sapien
gaacgacccaaacctcggtcacggt

SEQ ID NO: 82668 - DNA, 25 bp, Homo sapien
gaacgacccaaagctcggtcacggt

SEQ ID NO: 82669 - DNA, 25 bp, Homo sapien
gtgacgacccggaaatatgtctctt

SEQ ID NO: 82670 - DNA, 25 bp, Homo sapien
gtgacgacccggtaatatgtctctt

SEQ ID NO: 82671 - DNA, 25 bp, Homo sapien
ctgtagggctccttctctacttcca

SEQ ID NO: 82672 - DNA, 25 bp, Homo sapien
ctgtagggctccatctctacttcca

SEQ ID NO: 82673 - DNA, 25 bp, Homo sapien
gatctcattccagtctaaggtctgg

SEQ ID NO: 82674 - DNA, 25 bp, Homo sapien
gatctcattccactctaaggtctgg

SEQ ID NO: 82675 - DNA, 25 bp, Homo sapien
ggaaacaagaggttcatacactact

SEQ ID NO: 82676 - DNA, 25 bp, Homo sapien
ggaaacaagaggatcatacactact

SEQ ID NO: 82677 - DNA, 25 bp, Homo sapien
agacacggaaaaatctgtactctct

SEQ ID NO: 82678 - DNA, 25 bp, Homo sapien
agacacggaaaattctgtactctct

SEQ ID NO: 82679 - DNA, 25 bp, Homo sapien
ccaggggtagtcttccgtccggtcc

SEQ ID NO: 82680 - DNA, 25 bp, Homo sapien
ccaggggtagtcatccgtccggtcc

SEQ ID NO: 82681 - DNA, 25 bp, Homo sapien
agccttactactgacacgggagtcc

SEQ ID NO: 82682 - DNA, 25 bp, Homo sapien
agccttactactcacacgggagtcc

SEQ ID NO: 82683 - DNA, 25 bp, Homo sapien
gcgaccgacccgacggtgaggtacc

SEQ ID NO: 82684 - DNA, 25 bp, Homo sapien
gcgaccgacccgtcggtgaggtacc

SEQ ID NO: 82685 - DNA, 25 bp, Homo sapien
tcgggcgcagcgttgtcggtcctcc

SEQ ID NO: 82686 - DNA, 25 bp, Homo sapien
tcgggcgcagcgatgtcggtcctcc

SEQ ID NO: 82687 - DNA, 25 bp, Homo sapien
gtgcttcgagaatcgcagtcctcgg

SEQ ID NO: 82688 - DNA, 25 bp, Homo sapien
gtgcttcgagaaacgcagtcctcgg

SEQ ID NO: 82689 - DNA, 25 bp, Homo sapien
tctccagaagaaggtacagtcccga

SEQ ID NO: 82690 - DNA, 25 bp, Homo sapien
tctccagaagaacgtacagtcccga

SEQ ID NO: 82691 - DNA, 25 bp, Homo sapien
ttactacacagagaggaagcccgac

SEQ ID NO: 82692 - DNA, 25 bp, Homo sapien
ttactacacagacaggaagcccgac

SEQ ID NO: 82693 - DNA, 25 bp, Homo sapien
gtctcgacactgtatgttcccagtt

SEQ ID NO: 82694 - DNA, 25 bp, Homo sapien
gtctcgacactgaatgttcccagtt

SEQ ID NO: 82695 - DNA, 25 bp, Homo sapien
gtgaaccaacgtattcgtcatacat

SEQ ID NO: 82696 - DNA, 25 bp, Homo sapien
gtgaaccaacgttttcgtcatacat

SEQ ID NO: 82697 - DNA, 25 bp, Homo sapien
gattacagtccttgtatataacgtt

SEQ ID NO: 82698 - DNA, 25 bp, Homo sapien
gattacagtcctagtatataacgtt

SEQ ID NO: 82699 - DNA, 25 bp, Homo sapien
aatgagttcggtagtaagattattt

SEQ ID NO: 82700 - DNA, 25 bp, Homo sapien
aatgagttcggttgtaagattattt

SEQ ID NO: 82701 - DNA, 25 bp, Homo sapien
gtttacagttctgtttggtggtctc

SEQ ID NO: 82702 - DNA, 25 bp, Homo sapien
gtttacagttctctttggtggtctc

SEQ ID NO: 82703 - DNA, 25 bp, Homo sapien
ttcgagtctcttcaatggtatggta

SEQ ID NO: 82704 - DNA, 25 bp, Homo sapien
ttcgagtctcttgaatggtatggta

SEQ ID NO: 82705 - DNA, 25 bp, Homo sapien
tcggtctctgtcatttcgtgggtct

SEQ ID NO: 82706 - DNA, 25 bp, Homo sapien
tcggtctctgtcttttcgtgggtct

SEQ ID NO: 82707 - DNA, 25 bp, Homo sapien
aaagggacccgcatgtctcttagga

SEQ ID NO: 82708 - DNA, 25 bp, Homo sapien
aaagggacccgcttgtctcttagga

SEQ ID NO: 82709 - DNA, 25 bp, Homo sapien
aaagatctcccgttttgtgtaagga

SEQ ID NO: 82710 - DNA, 25 bp, Homo sapien
aaagatctcccgatttgtgtaagga

SEQ ID NO: 82711 - DNA, 25 bp, Homo sapien
aacgattccttctattcgagacttg

SEQ ID NO: 82712 - DNA, 25 bp, Homo sapien
aacgattccttcaattcgagacttg

SEQ ID NO: 82713 - DNA, 25 bp, Homo sapien
acacttttctcgacttacgtcctgg

SEQ ID NO: 82714 - DNA, 25 bp, Homo sapien
acacttttctcgtcttacgtcctgg

SEQ ID NO: 82715 - DNA, 25 bp, Homo sapien
accctatccacttgaagtccagtag

SEQ ID NO: 82716 - DNA, 25 bp, Homo sapien
accctatccactagaagtccagtag

SEQ ID NO: 82717 - DNA, 25 bp, Homo sapien
accttgcgaagtggacgaggtccag

SEQ ID NO: 82718 - DNA, 25 bp, Homo sapien
accttgcgaagtcgacgaggtccag

SEQ ID NO: 82719 - DNA, 25 bp, Homo sapien
agtccatctccgacgagagttcacc

SEQ ID NO: 82720 - DNA, 25 bp, Homo sapien
agtccatctccgtcgagagttcacc

SEQ ID NO: 82721 - DNA, 25 bp, Homo sapien
gtaaaaccgacgatcacactgcaac

SEQ ID NO: 82722 - DNA, 25 bp, Homo sapien
gtaaaaccgacgttcacactgcaac

SEQ ID NO: 82723 - DNA, 25 bp, Homo sapien
tgggtgtgagtatccgttgacactg

SEQ ID NO: 82724 - DNA, 25 bp, Homo sapien
tgggtgtgagtaaccgttgacactg

SEQ ID NO: 82725 - DNA, 25 bp, Homo sapien
ctgagtattaaaagtccacacactg

SEQ ID NO: 82726 - DNA, 25 bp, Homo sapien
ctgagtattaaatgtccacacactg

SEQ ID NO: 82727 - DNA, 25 bp, Homo sapien
gaatatcgttctattgagtccgaaa

SEQ ID NO: 82728 - DNA, 25 bp, Homo sapien
gaatatcgttcttttgagtccgaaa

SEQ ID NO: 82729 - DNA, 25 bp, Homo sapien
agagacccgtctgtcggaagtggaa

SEQ ID NO: 82730 - DNA, 25 bp, Homo sapien
agagacccgtctctcggaagtggaa

SEQ ID NO: 82731 - DNA, 25 bp, Homo sapien
attgactcggtcacttgccgtggaa

SEQ ID NO: 82732 - DNA, 25 bp, Homo sapien
attgactcggtctcttgccgtggaa

SEQ ID NO: 82733 - DNA, 25 bp, Homo sapien
accacctttgtacctcgtcgtgaag

SEQ ID NO: 82734 - DNA, 25 bp, Homo sapien
accacctttgtagctcgtcgtgaag

SEQ ID NO: 82735 - DNA, 25 bp, Homo sapien
acctaccgtccatgaagacttcagt

SEQ ID NO: 82736 - DNA, 25 bp, Homo sapien
acctaccgtccaagaagacttcagt

SEQ ID NO: 82737 - DNA, 25 bp, Homo sapien
ctgcgtcacgtttgtgaacgagact

SEQ ID NO: 82738 - DNA, 25 bp, Homo sapien
ctgcgtcacgttagtgaacgagact

SEQ ID NO: 82739 - DNA, 25 bp, Homo sapien
tttcgaccgacgtggggaccagatc

SEQ ID NO: 82740 - DNA, 25 bp, Homo sapien
tttcgaccgacgaggggaccagatc

SEQ ID NO: 82741 - DNA, 25 bp, Homo sapien
cttgaagggaaggtcagtcacgacc

SEQ ID NO: 82742 - DNA, 25 bp, Homo sapien
cttgaagggaagctcagtcacgacc

SEQ ID NO: 82743 - DNA, 25 bp, Homo sapien
ttgaaggaggtgctcacgtcgcaga

SEQ ID NO: 82744 - DNA, 25 bp, Homo sapien
ttgaaggaggtggtcacgtcgcaga

SEQ ID NO: 82745 - DNA, 25 bp, Homo sapien
ccttagtgacaggtgcccggacaga

SEQ ID NO: 82746 - DNA, 25 bp, Homo sapien
ccttagtgacagctgcccggacaga

SEQ ID NO: 82747 - DNA, 25 bp, Homo sapien
tgccgagtgtttccacctgggaagg

SEQ ID NO: 82748 - DNA, 25 bp, Homo sapien
tgccgagtgtttgcacctgggaagg

SEQ ID NO: 82749 - DNA, 25 bp, Homo sapien
ctgggtacctcttccagtgacaaac

SEQ ID NO: 82750 - DNA, 25 bp, Homo sapien
ctgggtacctctaccagtgacaaac

SEQ ID NO: 82751 - DNA, 25 bp, Homo sapien
aggtcccacttcactctccaagaag

SEQ ID NO: 82752 - DNA, 25 bp, Homo sapien
aggtcccacttctctctccaagaag

SEQ ID NO: 82753 - DNA, 25 bp, Homo sapien
ctctccttctcgttcgttctgagga

SEQ ID NO: 82754 - DNA, 25 bp, Homo sapien
ctctccttctcgatcgttctgagga

SEQ ID NO: 82755 - DNA, 25 bp, Homo sapien
gacaccttcttaggttcgtccttat

SEQ ID NO: 82756 - DNA, 25 bp, Homo sapien
gacaccttcttacgttcgtccttat

SEQ ID NO: 82757 - DNA, 25 bp, Homo sapien
gttaggacgtgtagtcctcgcctta

SEQ ID NO: 82758 - DNA, 25 bp, Homo sapien
gttaggacgtgttgtcctcgcctta

SEQ ID NO: 82759 - DNA, 25 bp, Homo sapien
cccttacccgttgtcttgaccgatg

SEQ ID NO: 82760 - DNA, 25 bp, Homo sapien
cccttacccgttctcttgaccgatg

SEQ ID NO: 82761 - DNA, 25 bp, Homo sapien
acggtgtatgacaccgaaaatcatg

SEQ ID NO: 82762 - DNA, 25 bp, Homo sapien
acggtgtatgactccgaaaatcatg

SEQ ID NO: 82763 - DNA, 25 bp, Homo sapien
tgtaatcccacgaaacgttactctt

SEQ ID NO: 82764 - DNA, 25 bp, Homo sapien
tgtaatcccacgtaacgttactctt

SEQ ID NO: 82765 - DNA, 25 bp, Homo sapien
gagagcggccgtgacgagttatcat

SEQ ID NO: 82766 - DNA, 25 bp, Homo sapien
gagagcggccgtcacgagttatcat

SEQ ID NO: 82767 - DNA, 25 bp, Homo sapien
gacaggggatcgattagacgtcgag

SEQ ID NO: 82768 - DNA, 25 bp, Homo sapien
gacaggggatcgtttagacgtcgag

SEQ ID NO: 82769 - DNA, 25 bp, Homo sapien
aacgaactcgggacatattatcggt

SEQ ID NO: 82770 - DNA, 25 bp, Homo sapien
aacgaactcgggtcatattatcggt

SEQ ID NO: 82771 - DNA, 25 bp, Homo sapien
agtacacccaggttacacccgtctt

SEQ ID NO: 82772 - DNA, 25 bp, Homo sapien
agtacacccaggatacacccgtctt

SEQ ID NO: 82773 - DNA, 25 bp, Homo sapien
tgtcactcacagttctcccctgtgt

SEQ ID NO: 82774 - DNA, 25 bp, Homo sapien
tgtcactcacagatctcccctgtgt

SEQ ID NO: 82775 - DNA, 25 bp, Homo sapien
ttccatgtctctgtttccctcggtt

SEQ ID NO: 82776 - DNA, 25 bp, Homo sapien
ttccatgtctctctttccctcggtt

SEQ ID NO: 82777 - DNA, 25 bp, Homo sapien
tacgtagttctttcgccacttcgtc

SEQ ID NO: 82778 - DNA, 25 bp, Homo sapien
tacgtagttcttacgccacttcgtc

SEQ ID NO: 82779 - DNA, 25 bp, Homo sapien
gcggaactcttgtcgatccgatttt

SEQ ID NO: 82780 - DNA, 25 bp, Homo sapien
gcggaactcttgacgatccgatttt

SEQ ID NO: 82781 - DNA, 25 bp, Homo sapien
agaaacttccccagacgggactgta

SEQ ID NO: 82782 - DNA, 25 bp, Homo sapien
agaaacttcccctgacgggactgta

SEQ ID NO: 82783 - DNA, 25 bp, Homo sapien
tcaaagggacttccttgtgtttata

SEQ ID NO: 82784 - DNA, 25 bp, Homo sapien
tcaaagggacttgcttgtgtttata

SEQ ID NO: 82785 - DNA, 25 bp, Homo sapien
aacgagttatcctgtcgtgtatgga

SEQ ID NO: 82786 - DNA, 25 bp, Homo sapien
aacgagttatccagtcgtgtatgga

SEQ ID NO: 82787 - DNA, 25 bp, Homo sapien
tggaagtctctcctatttatcgaac

SEQ ID NO: 82788 - DNA, 25 bp, Homo sapien
tggaagtctctcgtatttatcgaac

SEQ ID NO: 82789 - DNA, 25 bp, Homo sapien
ctacgtcgttacgtttcgtaatacc

SEQ ID NO: 82790 - DNA, 25 bp, Homo sapien
ctacgtcgttacctttcgtaatacc

SEQ ID NO: 82791 - DNA, 25 bp, Homo sapien
tccttgacgtcctgcacagacctgt

SEQ ID NO: 82792 - DNA, 25 bp, Homo sapien
tccttgacgtccagcacagacctgt

SEQ ID NO: 82793 - DNA, 25 bp, Homo sapien
tgtttttcgtccaggagtagtccta

SEQ ID NO: 82794 - DNA, 25 bp, Homo sapien
tgtttttcgtcctggagtagtccta

SEQ ID NO: 82795 - DNA, 25 bp, Homo sapien
tctatgacatattttgtgtcacctg

SEQ ID NO: 82796 - DNA, 25 bp, Homo sapien
tctatgacatatattgtgtcacctg

SEQ ID NO: 82797 - DNA, 25 bp, Homo sapien
cctactactctcctgggtctgacgg

SEQ ID NO: 82798 - DNA, 25 bp, Homo sapien
cctactactctcgtgggtctgacgg

SEQ ID NO: 82799 - DNA, 25 bp, Homo sapien
aggccttggtctagtaggcgctcga

SEQ ID NO: 82800 - DNA, 25 bp, Homo sapien
aggccttggtcttgtaggcgctcga

SEQ ID NO: 82801 - DNA, 25 bp, Homo sapien
gacttctcgcagaccgcgtcctacg

SEQ ID NO: 82802 - DNA, 25 bp, Homo sapien
gacttctcgcagtccgcgtcctacg

SEQ ID NO: 82803 - DNA, 25 bp, Homo sapien
cttttcggacgatacggtcattagt

SEQ ID NO: 82804 - DNA, 25 bp, Homo sapien
cttttcggacgaaacggtcattagt

SEQ ID NO: 82805 - DNA, 25 bp, Homo sapien
ctgtttgtgcgatgtatgtaatcac

SEQ ID NO: 82806 - DNA, 25 bp, Homo sapien
ctgtttgtgcgaagtatgtaatcac

SEQ ID NO: 82807 - DNA, 25 bp, Homo sapien
actttagaacgaaagtccgttcccg

SEQ ID NO: 82808 - DNA, 25 bp, Homo sapien
actttagaacgatagtccgttcccg

SEQ ID NO: 82809 - DNA, 25 bp, Homo sapien
agtgttaattcgttgtcacttcccg

SEQ ID NO: 82810 - DNA, 25 bp, Homo sapien
agtgttaattcgatgtcacttcccg

SEQ ID NO: 82811 - DNA, 25 bp, Homo sapien
tcaacaataaatgactgggtctttt

SEQ ID NO: 82812 - DNA, 25 bp, Homo sapien
tcaacaataaatcactgggtctttt

SEQ ID NO: 82813 - DNA, 25 bp, Homo sapien
aagacaggaccaactgtctacgcct

SEQ ID NO: 82814 - DNA, 25 bp, Homo sapien
aagacaggaccatctgtctacgcct

SEQ ID NO: 82815 - DNA, 25 bp, Homo sapien
aactacgcgcacatcctgtcgtcgc

SEQ ID NO: 82816 - DNA, 25 bp, Homo sapien
aactacgcgcacttcctgtcgtcgc

SEQ ID NO: 82817 - DNA, 25 bp, Homo sapien
agattcgtaagaagtctcgtctgca

SEQ ID NO: 82818 - DNA, 25 bp, Homo sapien
agattcgtaagatgtctcgtctgca

SEQ ID NO: 82819 - DNA, 25 bp, Homo sapien
actttgtaaaataaccgttgtgact

SEQ ID NO: 82820 - DNA, 25 bp, Homo sapien
actttgtaaaattaccgttgtgact

SEQ ID NO: 82821 - DNA, 25 bp, Homo sapien
tatttaaaccaggtacctctgtgat

SEQ ID NO: 82822 - DNA, 25 bp, Homo sapien
tatttaaaccagctacctctgtgat

SEQ ID NO: 82823 - DNA, 25 bp, Homo sapien
agtctagaaaccaggtaaatctgta

SEQ ID NO: 82824 - DNA, 25 bp, Homo sapien
agtctagaaacctggtaaatctgta

SEQ ID NO: 82825 - DNA, 25 bp, Homo sapien
gtccaagaacgtctggaagtttaga

SEQ ID NO: 82826 - DNA, 25 bp, Homo sapien
gtccaagaacgtgtggaagtttaga

SEQ ID NO: 82827 - DNA, 25 bp, Homo sapien
ggaagaacgttttccggaaggaccc

SEQ ID NO: 82828 - DNA, 25 bp, Homo sapien
ggaagaacgtttaccggaaggaccc

SEQ ID NO: 82829 - DNA, 25 bp, Homo sapien
tatcgggttcatcggttagtattta

SEQ ID NO: 82830 - DNA, 25 bp, Homo sapien
tatcgggttcatgggttagtattta

SEQ ID NO: 82831 - DNA, 25 bp, Homo sapien
atgagtgtctttggtgtgtggtttc

SEQ ID NO: 82832 - DNA, 25 bp, Homo sapien
atgagtgtctttcgtgtgtggtttc

SEQ ID NO: 82833 - DNA, 25 bp, Homo sapien
aaatgtcgtcaactttatgactgta

SEQ ID NO: 82834 - DNA, 25 bp, Homo sapien
aaatgtcgtcaagtttatgactgta

SEQ ID NO: 82835 - DNA, 25 bp, Homo sapien
aataggaatagacgtacctggttca

SEQ ID NO: 82836 - DNA, 25 bp, Homo sapien
aataggaatagaggtacctggttca

SEQ ID NO: 82837 - DNA, 25 bp, Homo sapien
acgagtggacgagcagcgacgccac

SEQ ID NO: 82838 - DNA, 25 bp, Homo sapien
acgagtggacgaccagcgacgccac

SEQ ID NO: 82839 - DNA, 25 bp, Homo sapien
gagagggtcgtcgccgcgcccttag

SEQ ID NO: 82840 - DNA, 25 bp, Homo sapien
gagagggtcgtccccgcgcccttag

SEQ ID NO: 82841 - DNA, 25 bp, Homo sapien
gggcgtactaagggcgcggcgacga

SEQ ID NO: 82842 - DNA, 25 bp, Homo sapien
gggcgtactaagcgcgcggcgacga

SEQ ID NO: 82843 - DNA, 25 bp, Homo sapien
tgagggacggtattattctttctcg

SEQ ID NO: 82844 - DNA, 25 bp, Homo sapien
tgagggacggtaatattctttctcg

SEQ ID NO: 82845 - DNA, 25 bp, Homo sapien
agtctttgtagtttctttataccag

SEQ ID NO: 82846 - DNA, 25 bp, Homo sapien
agtctttgtagtatctttataccag

SEQ ID NO: 82847 - DNA, 25 bp, Homo sapien
caactgtcttcttgtttaggtttac

SEQ ID NO: 82848 - DNA, 25 bp, Homo sapien
caactgtcttctagtttaggtttac

SEQ ID NO: 82849 - DNA, 25 bp, Homo sapien
atgtctttacggttgtcggtcatac

SEQ ID NO: 82850 - DNA, 25 bp, Homo sapien
atgtctttacggatgtcggtcatac

SEQ ID NO: 82851 - DNA, 25 bp, Homo sapien
gagttttacttcggttttataagac

SEQ ID NO: 82852 - DNA, 25 bp, Homo sapien
gagttttacttccgttttataagac

SEQ ID NO: 82853 - DNA, 25 bp, Homo sapien
gttttagacatacatgtcatatcag

SEQ ID NO: 82854 - DNA, 25 bp, Homo sapien
gttttagacatagatgtcatatcag

SEQ ID NO: 82855 - DNA, 25 bp, Homo sapien
tacaaacgacactttgtttacagag

SEQ ID NO: 82856 - DNA, 25 bp, Homo sapien
tacaaacgacacattgtttacagag

SEQ ID NO: 82857 - DNA, 25 bp, Homo sapien
catgagggacgtattgttctctaat

SEQ ID NO: 82858 - DNA, 25 bp, Homo sapien
catgagggacgttttgttctctaat

SEQ ID NO: 82859 - DNA, 25 bp, Homo sapien
tgagttgatctcctgtgtcgtcgaa

SEQ ID NO: 82860 - DNA, 25 bp, Homo sapien
tgagttgatctcgtgtgtcgtcgaa

SEQ ID NO: 82861 - DNA, 25 bp, Homo sapien
atttgtcagtctctgaggttgatac

SEQ ID NO: 82862 - DNA, 25 bp, Homo sapien
atttgtcagtctgtgaggttgatac

SEQ ID NO: 82863 - DNA, 25 bp, Homo sapien
taacgggccggtagacctatcggcg

SEQ ID NO: 82864 - DNA, 25 bp, Homo sapien
taacgggccggttgacctatcggcg

SEQ ID NO: 82865 - DNA, 25 bp, Homo sapien
cggaacaggtcgagacagagcgtct

SEQ ID NO: 82866 - DNA, 25 bp, Homo sapien
cggaacaggtcgtgacagagcgtct

SEQ ID NO: 82867 - DNA, 25 bp, Homo sapien
tgtccgaactcgagtctccggagga

SEQ ID NO: 82868 - DNA, 25 bp, Homo sapien
tgtccgaactcgtgtctccggagga

SEQ ID NO: 82869 - DNA, 25 bp, Homo sapien
ggaaggactactctcgagactagag

SEQ ID NO: 82870 - DNA, 25 bp, Homo sapien
ggaaggactactgtcgagactagag

SEQ ID NO: 82871 - DNA, 25 bp, Homo sapien
tggttactcaccactctacacggag

SEQ ID NO: 82872 - DNA, 25 bp, Homo sapien
tggttactcacctctctacacggag

SEQ ID NO: 82873 - DNA, 25 bp, Homo sapien
gacgtgttcatcatcgacacttgac

SEQ ID NO: 82874 - DNA, 25 bp, Homo sapien
gacgtgttcatcttcgacacttgac

SEQ ID NO: 82875 - DNA, 25 bp, Homo sapien
aaacggtgaataaccgacactggac

SEQ ID NO: 82876 - DNA, 25 bp, Homo sapien
aaacggtgaatatccgacactggac

SEQ ID NO: 82877 - DNA, 25 bp, Homo sapien
gttacagatgtatttacgaggttcc

SEQ ID NO: 82878 - DNA, 25 bp, Homo sapien
gttacagatgtaattacgaggttcc

SEQ ID NO: 82879 - DNA, 25 bp, Homo sapien
gaggtcgactttaaagtcatttccg

SEQ ID NO: 82880 - DNA, 25 bp, Homo sapien
gaggtcgacttttaagtcatttccg

SEQ ID NO: 82881 - DNA, 25 bp, Homo sapien
agggcacacaggtatagaacctcac

SEQ ID NO: 82882 - DNA, 25 bp, Homo sapien
agggcacacaggaatagaacctcac

SEQ ID NO: 82883 - DNA, 25 bp, Homo sapien
cccgtgaccgaggaagtgaaccggc

SEQ ID NO: 82884 - DNA, 25 bp, Homo sapien
cccgtgaccgagcaagtgaaccggc

SEQ ID NO: 82885 - DNA, 25 bp, Homo sapien
cctctcgtcgggtcaagtgtcccgg

SEQ ID NO: 82886 - DNA, 25 bp, Homo sapien
cctctcgtcgggacaagtgtcccgg

SEQ ID NO: 82887 - DNA, 25 bp, Homo sapien
cgtctctctgggttaggcggattca

SEQ ID NO: 82888 - DNA, 25 bp, Homo sapien
cgtctctctgggataggcggattca

SEQ ID NO: 82889 - DNA, 25 bp, Homo sapien
cctcttgagataacgaggtgttctt

SEQ ID NO: 82890 - DNA, 25 bp, Homo sapien
cctcttgagatatcgaggtgttctt

SEQ ID NO: 82891 - DNA, 25 bp, Homo sapien
cgtgtggttgatctgtaagttctac

SEQ ID NO: 82892 - DNA, 25 bp, Homo sapien
cgtgtggttgatgtgtaagttctac

SEQ ID NO: 82893 - DNA, 25 bp, Homo sapien
ctagtttgcctgctgtgtgtgtaag

SEQ ID NO: 82894 - DNA, 25 bp, Homo sapien
ctagtttgcctggtgtgtgtgtaag

SEQ ID NO: 82895 - DNA, 25 bp, Homo sapien
ttttagacacacactctagtgttcg

SEQ ID NO: 82896 - DNA, 25 bp, Homo sapien
ttttagacacactctctagtgttcg

SEQ ID NO: 82897 - DNA, 25 bp, Homo sapien
tttataagtcaccttactccgtgag

SEQ ID NO: 82898 - DNA, 25 bp, Homo sapien
tttataagtcacgttactccgtgag

SEQ ID NO: 82899 - DNA, 25 bp, Homo sapien
ctactaaaccaccacgtcggtaggt

SEQ ID NO: 82900 - DNA, 25 bp, Homo sapien
ctactaaaccacgacgtcggtaggt

SEQ ID NO: 82901 - DNA, 25 bp, Homo sapien
tcggtgacaatttcgatacgttctt

SEQ ID NO: 82902 - DNA, 25 bp, Homo sapien
tcggtgacaattacgatacgttctt

SEQ ID NO: 82903 - DNA, 25 bp, Homo sapien
actttgtcgaatagacttatattcg

SEQ ID NO: 82904 - DNA, 25 bp, Homo sapien
actttgtcgaattgacttatattcg

SEQ ID NO: 82905 - DNA, 25 bp, Homo sapien
gtttgacctacatcttcgtatttgt

SEQ ID NO: 82906 - DNA, 25 bp, Homo sapien
gtttgacctacaacttcgtatttgt

SEQ ID NO: 82907 - DNA, 25 bp, Homo sapien
gtgtccaaatctttagtgtcgtcgt

SEQ ID NO: 82908 - DNA, 25 bp, Homo sapien
gtgtccaaatctatagtgtcgtcgt

SEQ ID NO: 82909 - DNA, 25 bp, Homo sapien
agacagagggtcttgagtatctact

SEQ ID NO: 82910 - DNA, 25 bp, Homo sapien
agacagagggtcatgagtatctact

SEQ ID NO: 82911 - DNA, 25 bp, Homo sapien
ggaacggtacctcctgagtgtacta

SEQ ID NO: 82912 - DNA, 25 bp, Homo sapien
ggaacggtacctgctgagtgtacta

SEQ ID NO: 82913 - DNA, 25 bp, Homo sapien
ggtctcggtgtccaccaagtcctgt

SEQ ID NO: 82914 - DNA, 25 bp, Homo sapien
ggtctcggtgtcgaccaagtcctgt

SEQ ID NO: 82915 - DNA, 25 bp, Homo sapien
cagtccaacgggtgtacccttcaga

SEQ ID NO: 82916 - DNA, 25 bp, Homo sapien
cagtccaacgggagtacccttcaga

SEQ ID NO: 82917 - DNA, 25 bp, Homo sapien
caaagtttgtaagtcttcggtttac

SEQ ID NO: 82918 - DNA, 25 bp, Homo sapien
caaagtttgtaactcttcggtttac

SEQ ID NO: 82919 - DNA, 25 bp, Homo sapien
taagtgacccgtggacgacacccgt

SEQ ID NO: 82920 - DNA, 25 bp, Homo sapien
taagtgacccgtcgacgacacccgt

SEQ ID NO: 82921 - DNA, 25 bp, Homo sapien
tcccgtggccggagaaactctacgt

SEQ ID NO: 82922 - DNA, 25 bp, Homo sapien
tcccgtggccggtgaaactctacgt

SEQ ID NO: 82923 - DNA, 25 bp, Homo sapien
ccatgagctgagaactgacaccgtg

SEQ ID NO: 82924 - DNA, 25 bp, Homo sapien
ccatgagctgagtactgacaccgtg

SEQ ID NO: 82925 - DNA, 25 bp, Homo sapien
tctaggagacactggatcgttttcg

SEQ ID NO: 82926 - DNA, 25 bp, Homo sapien
tctaggagacacaggatcgttttcg

SEQ ID NO: 82927 - DNA, 25 bp, Homo sapien
gatacagtaaactagaacacgtttc

SEQ ID NO: 82928 - DNA, 25 bp, Homo sapien
gatacagtaaacaagaacacgtttc

SEQ ID NO: 82929 - DNA, 25 bp, Homo sapien
agactggagttcttcagtcaatccg

SEQ ID NO: 82930 - DNA, 25 bp, Homo sapien
agactggagttcatcagtcaatccg

SEQ ID NO: 82931 - DNA, 25 bp, Homo sapien
ttgactgttatcgtccattgtgtac

SEQ ID NO: 82932 - DNA, 25 bp, Homo sapien
ttgactgttatcctccattgtgtac

SEQ ID NO: 82933 - DNA, 25 bp, Homo sapien
agtctttacgtcaccctgtgttact

SEQ ID NO: 82934 - DNA, 25 bp, Homo sapien
agtctttacgtctccctgtgttact

SEQ ID NO: 82935 - DNA, 25 bp, Homo sapien
cagttctttacctccgtagggtctg

SEQ ID NO: 82936 - DNA, 25 bp, Homo sapien
cagttctttaccaccgtagggtctg

SEQ ID NO: 82937 - DNA, 25 bp, Homo sapien
taagtgttttaccttacctaaaggg

SEQ ID NO: 82938 - DNA, 25 bp, Homo sapien
taagtgttttacgttacctaaaggg

SEQ ID NO: 82939 - DNA, 25 bp, Homo sapien
acgagtcatctctgattacgattga

SEQ ID NO: 82940 - DNA, 25 bp, Homo sapien
acgagtcatctcagattacgattga

SEQ ID NO: 82941 - DNA, 25 bp, Homo sapien
aaagtcggtactagagactcatgaa

SEQ ID NO: 82942 - DNA, 25 bp, Homo sapien
aaagtcggtacttgagactcatgaa

SEQ ID NO: 82943 - DNA, 25 bp, Homo sapien
aatacagtctcaagtgtcaacagta

SEQ ID NO: 82944 - DNA, 25 bp, Homo sapien
aatacagtctcatgtgtcaacagta

SEQ ID NO: 82945 - DNA, 25 bp, Homo sapien
agggacctctactttggtacaagta

SEQ ID NO: 82946 - DNA, 25 bp, Homo sapien
agggacctctacattggtacaagta

SEQ ID NO: 82947 - DNA, 25 bp, Homo sapien
ctacctgacccgaaacgctgtacga

SEQ ID NO: 82948 - DNA, 25 bp, Homo sapien
ctacctgacccgtaacgctgtacga

SEQ ID NO: 82949 - DNA, 25 bp, Homo sapien
ggtgtacttgaagaaccgcgtctga

SEQ ID NO: 82950 - DNA, 25 bp, Homo sapien
ggtgtacttgaacaaccgcgtctga

SEQ ID NO: 82951 - DNA, 25 bp, Homo sapien
tagtctttcttacgtaatctttgag

SEQ ID NO: 82952 - DNA, 25 bp, Homo sapien
tagtctttcttaggtaatctttgag

SEQ ID NO: 82953 - DNA, 25 bp, Homo sapien
tttgtgactaaatcggagggactca

SEQ ID NO: 82954 - DNA, 25 bp, Homo sapien
tttgtgactaaaacggagggactca

SEQ ID NO: 82955 - DNA, 25 bp, Homo sapien
acagtccagttcacgtagcgaccct

SEQ ID NO: 82956 - DNA, 25 bp, Homo sapien
acagtccagttctcgtagcgaccct

SEQ ID NO: 82957 - DNA, 25 bp, Homo sapien
ggagtcaccatgacgactatcgacc

SEQ ID NO: 82958 - DNA, 25 bp, Homo sapien
ggagtcaccatgtcgactatcgacc

SEQ ID NO: 82959 - DNA, 25 bp, Homo sapien
tacagggatacgaccgacactcaag

SEQ ID NO: 82960 - DNA, 25 bp, Homo sapien
tacagggatacgtccgacactcaag

SEQ ID NO: 82961 - DNA, 25 bp, Homo sapien
aaaagttagacataacagcctagag

SEQ ID NO: 82962 - DNA, 25 bp, Homo sapien
aaaagttagacaaaacagcctagag

SEQ ID NO: 82963 - DNA, 25 bp, Homo sapien
gagacgggacaccaacacctcttga

SEQ ID NO: 82964 - DNA, 25 bp, Homo sapien
gagacgggacacgaacacctcttga

SEQ ID NO: 82965 - DNA, 25 bp, Homo sapien
agcgggtcctagaccgtctcgagga

SEQ ID NO: 82966 - DNA, 25 bp, Homo sapien
agcgggtcctagtccgtctcgagga

SEQ ID NO: 82967 - DNA, 25 bp, Homo sapien
ccgataccaacgtaggtctcgaagg

SEQ ID NO: 82968 - DNA, 25 bp, Homo sapien
ccgataccaacgaaggtctcgaagg

SEQ ID NO: 82969 - DNA, 25 bp, Homo sapien
acggtccaacgttgtgggcagtagt

SEQ ID NO: 82970 - DNA, 25 bp, Homo sapien
acggtccaacgtagtgggcagtagt

SEQ ID NO: 82971 - DNA, 25 bp, Homo sapien
tacgttccgtatcgttttcctcgtt

SEQ ID NO: 82972 - DNA, 25 bp, Homo sapien
tacgttccgtatggttttcctcgtt

SEQ ID NO: 82973 - DNA, 25 bp, Homo sapien
aattccgtgttgtgtagtcatactt

SEQ ID NO: 82974 - DNA, 25 bp, Homo sapien
aattccgtgttgagtagtcatactt

SEQ ID NO: 82975 - DNA, 25 bp, Homo sapien
cgtgatttggttttatcgaatacct

SEQ ID NO: 82976 - DNA, 25 bp, Homo sapien
cgtgatttggttatatcgaatacct

SEQ ID NO: 82977 - DNA, 25 bp, Homo sapien
tcgtgattgggtacgacccagtatc

SEQ ID NO: 82978 - DNA, 25 bp, Homo sapien
tcgtgattgggttcgacccagtatc

SEQ ID NO: 82979 - DNA, 25 bp, Homo sapien
tgtccgtcggtgtagaccaggcacg

SEQ ID NO: 82980 - DNA, 25 bp, Homo sapien
tgtccgtcggtgaagaccaggcacg

SEQ ID NO: 82981 - DNA, 25 bp, Homo sapien
tctcaccgcttaagatcacggctct

SEQ ID NO: 82982 - DNA, 25 bp, Homo sapien
tctcaccgcttatgatcacggctct

SEQ ID NO: 82983 - DNA, 25 bp, Homo sapien
taattctgtcgttgttcactagacc

SEQ ID NO: 82984 - DNA, 25 bp, Homo sapien
taattctgtcgtagttcactagacc

SEQ ID NO: 82985 - DNA, 25 bp, Homo sapien
caatgtctttttgagacgttgtccg

SEQ ID NO: 82986 - DNA, 25 bp, Homo sapien
caatgtctttttcagacgttgtccg

SEQ ID NO: 82987 - DNA, 25 bp, Homo sapien
ctgtaaagtgtgttgcgtctcgatg

SEQ ID NO: 82988 - DNA, 25 bp, Homo sapien
ctgtaaagtgtgatgcgtctcgatg

SEQ ID NO: 82989 - DNA, 25 bp, Homo sapien
atttataacgttatcggtccggagt

SEQ ID NO: 82990 - DNA, 25 bp, Homo sapien
atttataacgttttcggtccggagt

SEQ ID NO: 82991 - DNA, 25 bp, Homo sapien
ctatgttaatttctatggtgtccac

SEQ ID NO: 82992 - DNA, 25 bp, Homo sapien
ctatgttaatttgtatggtgtccac

SEQ ID NO: 82993 - DNA, 25 bp, Homo sapien
gagtgaaacctcttgttctttacca

SEQ ID NO: 82994 - DNA, 25 bp, Homo sapien
gagtgaaacctcatgttctttacca

SEQ ID NO: 82995 - DNA, 25 bp, Homo sapien
ggtctcgaacttctatgtcttttta

SEQ ID NO: 82996 - DNA, 25 bp, Homo sapien
ggtctcgaacttgtatgtcttttta

SEQ ID NO: 82997 - DNA, 25 bp, Homo sapien
cggatcctaaacgacaatgtttctt

SEQ ID NO: 82998 - DNA, 25 bp, Homo sapien
cggatcctaaaccacaatgtttctt

SEQ ID NO: 82999 - DNA, 25 bp, Homo sapien
gaggttaagaagaacgttgacccaa

SEQ ID NO: 83000 - DNA, 25 bp, Homo sapien
gaggttaagaagtacgttgacccaa

SEQ ID NO: 83001 - DNA, 25 bp, Homo sapien
tatatgatgtaggtaccgacactgt

SEQ ID NO: 83002 - DNA, 25 bp, Homo sapien
tatatgatgtagctaccgacactgt

SEQ ID NO: 83003 - DNA, 25 bp, Homo sapien
caagttgtaaaggttgacgtacacg

SEQ ID NO: 83004 - DNA, 25 bp, Homo sapien
caagttgtaaagcttgacgtacacg

SEQ ID NO: 83005 - DNA, 25 bp, Homo sapien
atcccgttgtaaaccgtcaagagtt

SEQ ID NO: 83006 - DNA, 25 bp, Homo sapien
atcccgttgtaatccgtcaagagtt

SEQ ID NO: 83007 - DNA, 25 bp, Homo sapien
atctgtgtcagatgcagtcacatca

SEQ ID NO: 83008 - DNA, 25 bp, Homo sapien
atctgtgtcagaagcagtcacatca

SEQ ID NO: 83009 - DNA, 25 bp, Homo sapien
cgtatacaagtatgacaccgttcat

SEQ ID NO: 83010 - DNA, 25 bp, Homo sapien
cgtatacaagtaagacaccgttcat

SEQ ID NO: 83011 - DNA, 25 bp, Homo sapien
gtatctagtaataatccgtacgggt

SEQ ID NO: 83012 - DNA, 25 bp, Homo sapien
gtatctagtaattatccgtacgggt

SEQ ID NO: 83013 - DNA, 25 bp, Homo sapien
gtccgtttattaaggtccttattta

SEQ ID NO: 83014 - DNA, 25 bp, Homo sapien
gtccgtttattatggtccttattta

SEQ ID NO: 83015 - DNA, 25 bp, Homo sapien
gagtatagtcttctttaccttgtta

SEQ ID NO: 83016 - DNA, 25 bp, Homo sapien
gagtatagtcttgtttaccttgtta

SEQ ID NO: 83017 - DNA, 25 bp, Homo sapien
cgtactacccttcaagtgactgact

SEQ ID NO: 83018 - DNA, 25 bp, Homo sapien
cgtactacccttgaagtgactgact

SEQ ID NO: 83019 - DNA, 25 bp, Homo sapien
tgtcacccgtccttaggacgacact

SEQ ID NO: 83020 - DNA, 25 bp, Homo sapien
tgtcacccgtccataggacgacact

SEQ ID NO: 83021 - DNA, 25 bp, Homo sapien
cttgggttctacagagaagaccggt

SEQ ID NO: 83022 - DNA, 25 bp, Homo sapien
cttgggttctactgagaagaccggt

SEQ ID NO: 83023 - DNA, 25 bp, Homo sapien
cttccgactttaagaactcacacgg

SEQ ID NO: 83024 - DNA, 25 bp, Homo sapien
cttccgactttatgaactcacacgg

SEQ ID NO: 83025 - DNA, 25 bp, Homo sapien
gaagggaatcggagtctcttcctga

SEQ ID NO: 83026 - DNA, 25 bp, Homo sapien
gaagggaatcggtgtctcttcctga

SEQ ID NO: 83027 - DNA, 25 bp, Homo sapien
gggagttctctttaccttctaaagg

SEQ ID NO: 83028 - DNA, 25 bp, Homo sapien
gggagttctcttaaccttctaaagg

SEQ ID NO: 83029 - DNA, 25 bp, Homo sapien
ggaattctggttcctctctaaaagt

SEQ ID NO: 83030 - DNA, 25 bp, Homo sapien
ggaattctggttgctctctaaaagt

SEQ ID NO: 83031 - DNA, 25 bp, Homo sapien
cttcgttatgtttatacgggtcgtt

SEQ ID NO: 83032 - DNA, 25 bp, Homo sapien
cttcgttatgttaatacgggtcgtt

SEQ ID NO: 83033 - DNA, 25 bp, Homo sapien
agcgtggtctgtcatagtgcacgtt

SEQ ID NO: 83034 - DNA, 25 bp, Homo sapien
agcgtggtctgtgatagtgcacgtt

SEQ ID NO: 83035 - DNA, 25 bp, Homo sapien
aacgcggagaacaggaaccactact

SEQ ID NO: 83036 - DNA, 25 bp, Homo sapien
aacgcggagaactggaaccactact

SEQ ID NO: 83037 - DNA, 25 bp, Homo sapien
acccgagcgacttacgtcaacttct

SEQ ID NO: 83038 - DNA, 25 bp, Homo sapien
acccgagcgactaacgtcaacttct

SEQ ID NO: 83039 - DNA, 25 bp, Homo sapien
ggagtaccagggaccctctcgtcgt

SEQ ID NO: 83040 - DNA, 25 bp, Homo sapien
ggagtaccagggtccctctcgtcgt

SEQ ID NO: 83041 - DNA, 25 bp, Homo sapien
gcgagacagcgggtccgacctcacg

SEQ ID NO: 83042 - DNA, 25 bp, Homo sapien
gcgagacagcggctccgacctcacg

SEQ ID NO: 83043 - DNA, 25 bp, Homo sapien
acgacgggtccgaggtccgtctacg

SEQ ID NO: 83044 - DNA, 25 bp, Homo sapien
acgacgggtccgtggtccgtctacg

SEQ ID NO: 83045 - DNA, 25 bp, Homo sapien
acaggatcccggtgcgaccgacgtc

SEQ ID NO: 83046 - DNA, 25 bp, Homo sapien
acaggatcccggagcgaccgacgtc

SEQ ID NO: 83047 - DNA, 25 bp, Homo sapien
ggtccttgcccgtagtaaccaacga

SEQ ID NO: 83048 - DNA, 25 bp, Homo sapien
ggtccttgcccgaagtaaccaacga

SEQ ID NO: 83049 - DNA, 25 bp, Homo sapien
agatctttagtctcgagtgaccccc

SEQ ID NO: 83050 - DNA, 25 bp, Homo sapien
agatctttagtcacgagtgaccccc

SEQ ID NO: 83051 - DNA, 25 bp, Homo sapien
gacgttatttcctactgactgccct

SEQ ID NO: 83052 - DNA, 25 bp, Homo sapien
gacgttatttccaactgactgccct

SEQ ID NO: 83053 - DNA, 25 bp, Homo sapien
gacagtcaattcgacttcgacttta

SEQ ID NO: 83054 - DNA, 25 bp, Homo sapien
gacagtcaattccacttcgacttta

SEQ ID NO: 83055 - DNA, 25 bp, Homo sapien
caccgtgaatgaccatatcatgtta

SEQ ID NO: 83056 - DNA, 25 bp, Homo sapien
caccgtgaatgagcatatcatgtta

SEQ ID NO: 83057 - DNA, 25 bp, Homo sapien
gttgaacagtgagtacgaagtctac

SEQ ID NO: 83058 - DNA, 25 bp, Homo sapien
gttgaacagtgactacgaagtctac

SEQ ID NO: 83059 - DNA, 25 bp, Homo sapien
ccaaacgacgagaaacagtcttata

SEQ ID NO: 83060 - DNA, 25 bp, Homo sapien
ccaaacgacgagtaacagtcttata

SEQ ID NO: 83061 - DNA, 25 bp, Homo sapien
agaccgaaagaggaacatctgtaac

SEQ ID NO: 83062 - DNA, 25 bp, Homo sapien
agaccgaaagagcaacatctgtaac

SEQ ID NO: 83063 - DNA, 25 bp, Homo sapien
agtcacgttcaaactcctatgtatg

SEQ ID NO: 83064 - DNA, 25 bp, Homo sapien
agtcacgttcaatctcctatgtatg

SEQ ID NO: 83065 - DNA, 25 bp, Homo sapien
ccactacacgacattcttggcgtat

SEQ ID NO: 83066 - DNA, 25 bp, Homo sapien
ccactacacgactttcttggcgtat

SEQ ID NO: 83067 - DNA, 25 bp, Homo sapien
ggtctcaatcctataaaactcgagt

SEQ ID NO: 83068 - DNA, 25 bp, Homo sapien
ggtctcaatcctttaaaactcgagt

SEQ ID NO: 83069 - DNA, 25 bp, Homo sapien
gttcaggttcgttcgtaaacaccag

SEQ ID NO: 83070 - DNA, 25 bp, Homo sapien
gttcaggttcgtacgtaaacaccag

SEQ ID NO: 83071 - DNA, 25 bp, Homo sapien
ccgttcaggtcgtggtgtatccctc

SEQ ID NO: 83072 - DNA, 25 bp, Homo sapien
ccgttcaggtcgaggtgtatccctc

SEQ ID NO: 83073 - DNA, 25 bp, Homo sapien
gtctatgggccctttacgacatcga

SEQ ID NO: 83074 - DNA, 25 bp, Homo sapien
gtctatgggcccattacgacatcga

SEQ ID NO: 83075 - DNA, 25 bp, Homo sapien
ttaagatacgtggttacgtaaccga

SEQ ID NO: 83076 - DNA, 25 bp, Homo sapien
ttaagatacgtgcttacgtaaccga

SEQ ID NO: 83077 - DNA, 25 bp, Homo sapien
aaatgtccgagtcgtttcaagtcac

SEQ ID NO: 83078 - DNA, 25 bp, Homo sapien
aaatgtccgagtggtttcaagtcac

SEQ ID NO: 83079 - DNA, 25 bp, Homo sapien
atatcgatctgtgttctacgggttt

SEQ ID NO: 83080 - DNA, 25 bp, Homo sapien
atatcgatctgtcttctacgggttt

SEQ ID NO: 83081 - DNA, 25 bp, Homo sapien
acatgtgtattaggttttcgggtcc

SEQ ID NO: 83082 - DNA, 25 bp, Homo sapien
acatgtgtattacgttttcgggtcc

SEQ ID NO: 83083 - DNA, 25 bp, Homo sapien
ttcaaaagtgaactttcggaagtcc

SEQ ID NO: 83084 - DNA, 25 bp, Homo sapien
ttcaaaagtgaagtttcggaagtcc

SEQ ID NO: 83085 - DNA, 25 bp, Homo sapien
gacgaaacacattcttagaagttac

SEQ ID NO: 83086 - DNA, 25 bp, Homo sapien
gacgaaacacatacttagaagttac

SEQ ID NO: 83087 - DNA, 25 bp, Homo sapien
gccgaacaacacgaaccaccaggtg

SEQ ID NO: 83088 - DNA, 25 bp, Homo sapien
gccgaacaacaccaaccaccaggtg

SEQ ID NO: 83089 - DNA, 25 bp, Homo sapien
aacaacgtacgtatacccgcgaggg

SEQ ID NO: 83090 - DNA, 25 bp, Homo sapien
aacaacgtacgtttacccgcgaggg

SEQ ID NO: 83091 - DNA, 25 bp, Homo sapien
ataactctcctttgtaccagtgtgg

SEQ ID NO: 83092 - DNA, 25 bp, Homo sapien
ataactctccttagtaccagtgtgg

SEQ ID NO: 83093 - DNA, 25 bp, Homo sapien
gtcactgttttagtcgacgggtcgg

SEQ ID NO: 83094 - DNA, 25 bp, Homo sapien
gtcactgttttactcgacgggtcgg

SEQ ID NO: 83095 - DNA, 25 bp, Homo sapien
ttgcttgtgctactacaggactccg

SEQ ID NO: 83096 - DNA, 25 bp, Homo sapien
ttgcttgtgctagtacaggactccg

SEQ ID NO: 83097 - DNA, 25 bp, Homo sapien
ttccggaccagacacggtccgtcgt

SEQ ID NO: 83098 - DNA, 25 bp, Homo sapien
ttccggaccagagacggtccgtcgt

SEQ ID NO: 83099 - DNA, 25 bp, Homo sapien
tggagccggagggtttcacgaccct

SEQ ID NO: 83100 - DNA, 25 bp, Homo sapien
tggagccggaggctttcacgaccct

SEQ ID NO: 83101 - DNA, 25 bp, Homo sapien
ggtggcttgagtttcttccggtgtt

SEQ ID NO: 83102 - DNA, 25 bp, Homo sapien
ggtggcttgagtatcttccggtgtt

SEQ ID NO: 83103 - DNA, 25 bp, Homo sapien
caggagtgcctctccttttcgccgg

SEQ ID NO: 83104 - DNA, 25 bp, Homo sapien
caggagtgcctcaccttttcgccgg

SEQ ID NO: 83105 - DNA, 25 bp, Homo sapien
aggtacctggccttcctttacaggt

SEQ ID NO: 83106 - DNA, 25 bp, Homo sapien
aggtacctggccatcctttacaggt

SEQ ID NO: 83107 - DNA, 25 bp, Homo sapien
cgaacctgagcctacagctctcaga

SEQ ID NO: 83108 - DNA, 25 bp, Homo sapien
cgaacctgagccaacagctctcaga

SEQ ID NO: 83109 - DNA, 25 bp, Homo sapien
gcccatggccgagaggtcctagagt

SEQ ID NO: 83110 - DNA, 25 bp, Homo sapien
gcccatggccgacaggtcctagagt

SEQ ID NO: 83111 - DNA, 25 bp, Homo sapien
ccgggtggaccctatatccgtagag

SEQ ID NO: 83112 - DNA, 25 bp, Homo sapien
ccgggtggacccaatatccgtagag

SEQ ID NO: 83113 - DNA, 25 bp, Homo sapien
cgggagtcaacaccagtctgaggag

SEQ ID NO: 83114 - DNA, 25 bp, Homo sapien
cgggagtcaacagcagtctgaggag

SEQ ID NO: 83115 - DNA, 25 bp, Homo sapien
tcatacgtcgaacaggttggactgg

SEQ ID NO: 83116 - DNA, 25 bp, Homo sapien
tcatacgtcgaagaggttggactgg

SEQ ID NO: 83117 - DNA, 25 bp, Homo sapien
agaacgacaaccaatggagactcgg

SEQ ID NO: 83118 - DNA, 25 bp, Homo sapien
agaacgacaacctatggagactcgg

SEQ ID NO: 83119 - DNA, 25 bp, Homo sapien
taatcgacattttaccggatgtcga

SEQ ID NO: 83120 - DNA, 25 bp, Homo sapien
taatcgacatttaaccggatgtcga

SEQ ID NO: 83121 - DNA, 25 bp, Homo sapien
tgacagcattattaccgcattcagt

SEQ ID NO: 83122 - DNA, 25 bp, Homo sapien
tgacagcattataaccgcattcagt

SEQ ID NO: 83123 - DNA, 25 bp, Homo sapien
cagacaaaccttgactgttccctgt

SEQ ID NO: 83124 - DNA, 25 bp, Homo sapien
cagacaaaccttcactgttccctgt

SEQ ID NO: 83125 - DNA, 25 bp, Homo sapien
cgtgacacccctataggtctccgtg

SEQ ID NO: 83126 - DNA, 25 bp, Homo sapien
cgtgacacccctttaggtctccgtg

SEQ ID NO: 83127 - DNA, 25 bp, Homo sapien
gcggccttgtcgttctacactccaa

SEQ ID NO: 83128 - DNA, 25 bp, Homo sapien
gcggccttgtcgatctacactccaa

SEQ ID NO: 83129 - DNA, 25 bp, Homo sapien
ggcagactctgacgacgaccgccat

SEQ ID NO: 83130 - DNA, 25 bp, Homo sapien
ggcagactctgaggacgaccgccat

SEQ ID NO: 83131 - DNA, 25 bp, Homo sapien
cgacagaaccccagaagctcgagac

SEQ ID NO: 83132 - DNA, 25 bp, Homo sapien
cgacagaacccctgaagctcgagac

SEQ ID NO: 83133 - DNA, 25 bp, Homo sapien
gtcccgtgcccagcacgactagaga

SEQ ID NO: 83134 - DNA, 25 bp, Homo sapien
gtcccgtgcccaccacgactagaga

SEQ ID NO: 83135 - DNA, 25 bp, Homo sapien
cgtcctagcgtagacccgtcggaac

SEQ ID NO: 83136 - DNA, 25 bp, Homo sapien
cgtcctagcgtacacccgtcggaac

SEQ ID NO: 83137 - DNA, 25 bp, Homo sapien
cctcccttgtaagtaccggtgacga

SEQ ID NO: 83138 - DNA, 25 bp, Homo sapien
cctcccttgtaactaccggtgacga

SEQ ID NO: 83139 - DNA, 25 bp, Homo sapien
cagtctcacctcacgccgaagaggg

SEQ ID NO: 83140 - DNA, 25 bp, Homo sapien
cagtctcacctctcgccgaagaggg

SEQ ID NO: 83141 - DNA, 25 bp, Homo sapien
cacgctcgcctgagtccgaacaaag

SEQ ID NO: 83142 - DNA, 25 bp, Homo sapien
cacgctcgcctgtgtccgaacaaag

SEQ ID NO: 83143 - DNA, 25 bp, Homo sapien
tccgtagacgtctacactaataagg

SEQ ID NO: 83144 - DNA, 25 bp, Homo sapien
tccgtagacgtcaacactaataagg

SEQ ID NO: 83145 - DNA, 25 bp, Homo sapien
aaggaacgagtcgaaccttagaaga

SEQ ID NO: 83146 - DNA, 25 bp, Homo sapien
aaggaacgagtccaaccttagaaga

SEQ ID NO: 83147 - DNA, 25 bp, Homo sapien
gaggtaacgatcatccataccataa

SEQ ID NO: 83148 - DNA, 25 bp, Homo sapien
gaggtaacgatcttccataccataa

SEQ ID NO: 83149 - DNA, 25 bp, Homo sapien
gactcatcacaaaacctagaaagag

SEQ ID NO: 83150 - DNA, 25 bp, Homo sapien
gactcatcacaatacctagaaagag

SEQ ID NO: 83151 - DNA, 25 bp, Homo sapien
cgcgaagtccaacatcgtggaaggt

SEQ ID NO: 83152 - DNA, 25 bp, Homo sapien
cgcgaagtccaagatcgtggaaggt

SEQ ID NO: 83153 - DNA, 25 bp, Homo sapien
tcattgacggacacgtcgcggagga

SEQ ID NO: 83154 - DNA, 25 bp, Homo sapien
tcattgacggactcgtcgcggagga

SEQ ID NO: 83155 - DNA, 25 bp, Homo sapien
tcactggtacaggtcaggccgaggc

SEQ ID NO: 83156 - DNA, 25 bp, Homo sapien
tcactggtacagctcaggccgaggc

SEQ ID NO: 83157 - DNA, 25 bp, Homo sapien
gcttcgactgctacggcacgtggac

SEQ ID NO: 83158 - DNA, 25 bp, Homo sapien
gcttcgactgcttcggcacgtggac

SEQ ID NO: 83159 - DNA, 25 bp, Homo sapien
accgactttccatgtgggactctta

SEQ ID NO: 83160 - DNA, 25 bp, Homo sapien
accgactttccaagtgggactctta

SEQ ID NO: 83161 - DNA, 25 bp, Homo sapien
accccataccctagaaggcgcagaa

SEQ ID NO: 83162 - DNA, 25 bp, Homo sapien
accccatacccttgaaggcgcagaa

SEQ ID NO: 83163 - DNA, 25 bp, Homo sapien
agaaggacggttggtcgtgcaccaa

SEQ ID NO: 83164 - DNA, 25 bp, Homo sapien
agaaggacggttcgtcgtgcaccaa

SEQ ID NO: 83165 - DNA, 25 bp, Homo sapien
aggaggtcgacgtcttcagttcgac

SEQ ID NO: 83166 - DNA, 25 bp, Homo sapien
aggaggtcgacgacttcagttcgac

SEQ ID NO: 83167 - DNA, 25 bp, Homo sapien
gcggtcccagtttgccttgtgttgg

SEQ ID NO: 83168 - DNA, 25 bp, Homo sapien
gcggtcccagttagccttgtgttgg

SEQ ID NO: 83169 - DNA, 25 bp, Homo sapien
ggtgggtttccactcttcgtgtttc

SEQ ID NO: 83170 - DNA, 25 bp, Homo sapien
ggtgggtttccagtcttcgtgtttc

SEQ ID NO: 83171 - DNA, 25 bp, Homo sapien
tcggtccaggtctgcgtcctaccgt

SEQ ID NO: 83172 - DNA, 25 bp, Homo sapien
tcggtccaggtcagcgtcctaccgt

SEQ ID NO: 83173 - DNA, 25 bp, Homo sapien
gaaccgacatcctgtggaccgacac

SEQ ID NO: 83174 - DNA, 25 bp, Homo sapien
gaaccgacatccagtggaccgacac

SEQ ID NO: 83175 - DNA, 25 bp, Homo sapien
tagtcttgattatagtccttgtacc

SEQ ID NO: 83176 - DNA, 25 bp, Homo sapien
tagtcttgattaaagtccttgtacc

SEQ ID NO: 83177 - DNA, 25 bp, Homo sapien
atatggctaagcaactacttgactc

SEQ ID NO: 83178 - DNA, 25 bp, Homo sapien
atatggctaagctactacttgactc

SEQ ID NO: 83179 - DNA, 25 bp, Homo sapien
acccaaagtttggtaactcgggtcc

SEQ ID NO: 83180 - DNA, 25 bp, Homo sapien
acccaaagtttgctaactcgggtcc

SEQ ID NO: 83181 - DNA, 25 bp, Homo sapien
caatgttacgagttaccatatgacc

SEQ ID NO: 83182 - DNA, 25 bp, Homo sapien
caatgttacgagataccatatgacc

SEQ ID NO: 83183 - DNA, 25 bp, Homo sapien
cgagggtctcagtccatctcgacct

SEQ ID NO: 83184 - DNA, 25 bp, Homo sapien
cgagggtctcagaccatctcgacct

SEQ ID NO: 83185 - DNA, 25 bp, Homo sapien
tccatgtgcccgacgaggaccggac

SEQ ID NO: 83186 - DNA, 25 bp, Homo sapien
tccatgtgcccgtcgaggaccggac

SEQ ID NO: 83187 - DNA, 25 bp, Homo sapien
cggtcggaagcatcggttctccgtc

SEQ ID NO: 83188 - DNA, 25 bp, Homo sapien
cggtcggaagcaacggttctccgtc

SEQ ID NO: 83189 - DNA, 25 bp, Homo sapien
agtggaaacgctgacttgtctcctc

SEQ ID NO: 83190 - DNA, 25 bp, Homo sapien
agtggaaacgctcacttgtctcctc

SEQ ID NO: 83191 - DNA, 25 bp, Homo sapien
gtaaggtgaaaacctgtttccccgg

SEQ ID NO: 83192 - DNA, 25 bp, Homo sapien
gtaaggtgaaaagctgtttccccgg

SEQ ID NO: 83193 - DNA, 25 bp, Homo sapien
gaattaaattaagtcttattctcta

SEQ ID NO: 83194 - DNA, 25 bp, Homo sapien
gaattaaattaactcttattctcta

SEQ ID NO: 83195 - DNA, 25 bp, Homo sapien
gtgaacttgtacctttctttcacag

SEQ ID NO: 83196 - DNA, 25 bp, Homo sapien
gtgaacttgtacgtttctttcacag

SEQ ID NO: 83197 - DNA, 25 bp, Homo sapien
gtggaacggtcaccttctttcctcc

SEQ ID NO: 83198 - DNA, 25 bp, Homo sapien
gtggaacggtcagcttctttcctcc

SEQ ID NO: 83199 - DNA, 25 bp, Homo sapien
ggaagagtaatctttctctctaccc

SEQ ID NO: 83200 - DNA, 25 bp, Homo sapien
ggaagagtaatcattctctctaccc

SEQ ID NO: 83201 - DNA, 25 bp, Homo sapien
tgttgagtagttgttttccacatac

SEQ ID NO: 83202 - DNA, 25 bp, Homo sapien
tgttgagtagttcttttccacatac

SEQ ID NO: 83203 - DNA, 25 bp, Homo sapien
cggtgtgcgtgtctgttccaggctc

SEQ ID NO: 83204 - DNA, 25 bp, Homo sapien
cggtgtgcgtgtgtgttccaggctc

SEQ ID NO: 83205 - DNA, 25 bp, Homo sapien
tgattggtgtatatatctctgatcc

SEQ ID NO: 83206 - DNA, 25 bp, Homo sapien
tgattggtgtatttatctctgatcc

SEQ ID NO: 83207 - DNA, 25 bp, Homo sapien
agtcagtgtgactttgtttactgca

SEQ ID NO: 83208 - DNA, 25 bp, Homo sapien
agtcagtgtgacattgtttactgca

SEQ ID NO: 83209 - DNA, 25 bp, Homo sapien
gagttgtcggacacagtcaaaagat

SEQ ID NO: 83210 - DNA, 25 bp, Homo sapien
gagttgtcggactcagtcaaaagat

SEQ ID NO: 83211 - DNA, 25 bp, Homo sapien
aggagtaaggcctctaaaaactaca

SEQ ID NO: 83212 - DNA, 25 bp, Homo sapien
aggagtaaggccactaaaaactaca

SEQ ID NO: 83213 - DNA, 25 bp, Homo sapien
ggtcctgtccggatgaccccacgat

SEQ ID NO: 83214 - DNA, 25 bp, Homo sapien
ggtcctgtccggttgaccccacgat

SEQ ID NO: 83215 - DNA, 25 bp, Homo sapien
gtcagactccggtcggaccccgagg

SEQ ID NO: 83216 - DNA, 25 bp, Homo sapien
gtcagactccggacggaccccgagg

SEQ ID NO: 83217 - DNA, 25 bp, Homo sapien
acgctactgggaagcgaatccgggt

SEQ ID NO: 83218 - DNA, 25 bp, Homo sapien
acgctactgggatgcgaatccgggt

SEQ ID NO: 83219 - DNA, 25 bp, Homo sapien
gagagtccttctatgtcaataccaa

SEQ ID NO: 83220 - DNA, 25 bp, Homo sapien
gagagtccttctttgtcaataccaa

SEQ ID NO: 83221 - DNA, 25 bp, Homo sapien
tgcgtctggtgtacccagtaacata

SEQ ID NO: 83222 - DNA, 25 bp, Homo sapien
tgcgtctggtgttcccagtaacata

SEQ ID NO: 83223 - DNA, 25 bp, Homo sapien
gtactgtgacgtcaatttaaccaac

SEQ ID NO: 83224 - DNA, 25 bp, Homo sapien
gtactgtgacgtgaatttaaccaac

SEQ ID NO: 83225 - DNA, 25 bp, Homo sapien
actgaaaagtggttactacgcacgt

SEQ ID NO: 83226 - DNA, 25 bp, Homo sapien
actgaaaagtggatactacgcacgt

SEQ ID NO: 83227 - DNA, 25 bp, Homo sapien
cagaactgagagagttttatcgtca

SEQ ID NO: 83228 - DNA, 25 bp, Homo sapien
cagaactgagagtgttttatcgtca

SEQ ID NO: 83229 - DNA, 25 bp, Homo sapien
agactgacatgtctttagttactag

SEQ ID NO: 83230 - DNA, 25 bp, Homo sapien
agactgacatgtgtttagttactag

SEQ ID NO: 83231 - DNA, 25 bp, Homo sapien
tcgtcgaaacttgttagtactaaat

SEQ ID NO: 83232 - DNA, 25 bp, Homo sapien
tcgtcgaaacttcttagtactaaat

SEQ ID NO: 83233 - DNA, 25 bp, Homo sapien
cgtcgtagccgtttccagtctaaag

SEQ ID NO: 83234 - DNA, 25 bp, Homo sapien
cgtcgtagccgtatccagtctaaag

SEQ ID NO: 83235 - DNA, 25 bp, Homo sapien
gagccatgtattccaagtttcaaag

SEQ ID NO: 83236 - DNA, 25 bp, Homo sapien
gagccatgtattgcaagtttcaaag

SEQ ID NO: 83237 - DNA, 25 bp, Homo sapien
ccgtcattttgtcgaaacccactag

SEQ ID NO: 83238 - DNA, 25 bp, Homo sapien
ccgtcattttgtggaaacccactag

SEQ ID NO: 83239 - DNA, 25 bp, Homo sapien
gtatgttatctaacacgattcctag

SEQ ID NO: 83240 - DNA, 25 bp, Homo sapien
gtatgttatctatcacgattcctag

SEQ ID NO: 83241 - DNA, 25 bp, Homo sapien
gtttttgtggagttcccattcctat

SEQ ID NO: 83242 - DNA, 25 bp, Homo sapien
gtttttgtggagatcccattcctat

SEQ ID NO: 83243 - DNA, 25 bp, Homo sapien
tgttaccggtttaaacctttctggg

SEQ ID NO: 83244 - DNA, 25 bp, Homo sapien
tgttaccggttttaacctttctggg

SEQ ID NO: 83245 - DNA, 25 bp, Homo sapien
ttctcgggactaattttttttatgt

SEQ ID NO: 83246 - DNA, 25 bp, Homo sapien
ttctcgggactatttttttttatgt

SEQ ID NO: 83247 - DNA, 25 bp, Homo sapien
tctcgggactaattttttttatgtt

SEQ ID NO: 83248 - DNA, 25 bp, Homo sapien
tctcgggactaaatttttttatgtt

SEQ ID NO: 83249 - DNA, 25 bp, Homo sapien
cttgatgactacgattcaatatgtt

SEQ ID NO: 83250 - DNA, 25 bp, Homo sapien
cttgatgactaccattcaatatgtt

SEQ ID NO: 83251 - DNA, 25 bp, Homo sapien
ggaacactacgttgtcacattcgtt

SEQ ID NO: 83252 - DNA, 25 bp, Homo sapien
ggaacactacgtagtcacattcgtt

SEQ ID NO: 83253 - DNA, 25 bp, Homo sapien
agttcgatcatatgttccagtttct

SEQ ID NO: 83254 - DNA, 25 bp, Homo sapien
agttcgatcataagttccagtttct

SEQ ID NO: 83255 - DNA, 25 bp, Homo sapien
tttcttgctaagtacttagttcgtc

SEQ ID NO: 83256 - DNA, 25 bp, Homo sapien
tttcttgctaagaacttagttcgtc

SEQ ID NO: 83257 - DNA, 25 bp, Homo sapien
tatagaggaggtcaaaaataccatc

SEQ ID NO: 83258 - DNA, 25 bp, Homo sapien
tatagaggaggtgaaaaataccatc

SEQ ID NO: 83259 - DNA, 25 bp, Homo sapien
gctcaaggttgtggaaagtaccgaa

SEQ ID NO: 83260 - DNA, 25 bp, Homo sapien
gctcaaggttgtcgaaagtaccgaa

SEQ ID NO: 83261 - DNA, 25 bp, Homo sapien
tcaataaaggagacacatcgacacg

SEQ ID NO: 83262 - DNA, 25 bp, Homo sapien
tcaataaaggagtcacatcgacacg

SEQ ID NO: 83263 - DNA, 25 bp, Homo sapien
gatttaaactcagtgtccatgtaaa

SEQ ID NO: 83264 - DNA, 25 bp, Homo sapien
gatttaaactcactgtccatgtaaa

SEQ ID NO: 83265 - DNA, 25 bp, Homo sapien
gatgtaaccaattttagttacctgt

SEQ ID NO: 83266 - DNA, 25 bp, Homo sapien
gatgtaaccaatattagttacctgt

SEQ ID NO: 83267 - DNA, 25 bp, Homo sapien
ttaactccacaaggtagttcacgtt

SEQ ID NO: 83268 - DNA, 25 bp, Homo sapien
ttaactccacaacgtagttcacgtt

SEQ ID NO: 83269 - DNA, 25 bp, Homo sapien
ggtgacgataccagaaatatttcct

SEQ ID NO: 83270 - DNA, 25 bp, Homo sapien
ggtgacgatacctgaaatatttcct

SEQ ID NO: 83271 - DNA, 25 bp, Homo sapien
ctgtgagcccaactatactctccct

SEQ ID NO: 83272 - DNA, 25 bp, Homo sapien
ctgtgagcccaagtatactctccct

SEQ ID NO: 83273 - DNA, 25 bp, Homo sapien
tgtgaaaacaagagtactgacgctt

SEQ ID NO: 83274 - DNA, 25 bp, Homo sapien
tgtgaaaacaagtgtactgacgctt

SEQ ID NO: 83275 - DNA, 25 bp, Homo sapien
ttgggaataagatatacagacactc

SEQ ID NO: 83276 - DNA, 25 bp, Homo sapien
ttgggaataagaaatacagacactc

SEQ ID NO: 83277 - DNA, 25 bp, Homo sapien
ttgtcgaagaaataatcagacttct

SEQ ID NO: 83278 - DNA, 25 bp, Homo sapien
ttgtcgaagaaaaaatcagacttct

SEQ ID NO: 83279 - DNA, 25 bp, Homo sapien
cgttgagggagtatcctccgaggtc

SEQ ID NO: 83280 - DNA, 25 bp, Homo sapien
cgttgagggagtttcctccgaggtc

SEQ ID NO: 83281 - DNA, 25 bp, Homo sapien
tggctgtcgactctaccggtgtctc

SEQ ID NO: 83282 - DNA, 25 bp, Homo sapien
tggctgtcgactgtaccggtgtctc

SEQ ID NO: 83283 - DNA, 25 bp, Homo sapien
ttcacctaggcgacgagtcgggtcc

SEQ ID NO: 83284 - DNA, 25 bp, Homo sapien
ttcacctaggcgtcgagtcgggtcc

SEQ ID NO: 83285 - DNA, 25 bp, Homo sapien
tcggggagacggtagtggtccttct

SEQ ID NO: 83286 - DNA, 25 bp, Homo sapien
tcggggagacggaagtggtccttct

SEQ ID NO: 83287 - DNA, 25 bp, Homo sapien
ggtagcccctgcttgcttacggtcc

SEQ ID NO: 83288 - DNA, 25 bp, Homo sapien
ggtagcccctgcatgcttacggtcc

SEQ ID NO: 83289 - DNA, 25 bp, Homo sapien
ctccaaacgaaggacgttctactca

SEQ ID NO: 83290 - DNA, 25 bp, Homo sapien
ctccaaacgaagcacgttctactca

SEQ ID NO: 83291 - DNA, 25 bp, Homo sapien
tgtacctaagatagggaacccgact

SEQ ID NO: 83292 - DNA, 25 bp, Homo sapien
tgtacctaagattgggaacccgact

SEQ ID NO: 83293 - DNA, 25 bp, Homo sapien
cgttcgaacggttatgggacccgtt

SEQ ID NO: 83294 - DNA, 25 bp, Homo sapien
cgttcgaacggtaatgggacccgtt

SEQ ID NO: 83295 - DNA, 25 bp, Homo sapien
gtgtaaaacgacaatgtgacatcct

SEQ ID NO: 83296 - DNA, 25 bp, Homo sapien
gtgtaaaacgactatgtgacatcct

SEQ ID NO: 83297 - DNA, 25 bp, Homo sapien
ggattacgacgtcctttgtaaaggt

SEQ ID NO: 83298 - DNA, 25 bp, Homo sapien
ggattacgacgtgctttgtaaaggt

SEQ ID NO: 83299 - DNA, 25 bp, Homo sapien
attggttcacgacgtaaattacttt

SEQ ID NO: 83300 - DNA, 25 bp, Homo sapien
attggttcacgaggtaaattacttt

SEQ ID NO: 83301 - DNA, 25 bp, Homo sapien
cttatggttactgttcaggtggttc

SEQ ID NO: 83302 - DNA, 25 bp, Homo sapien
cttatggttactcttcaggtggttc

SEQ ID NO: 83303 - DNA, 25 bp, Homo sapien
cggtcacttcagtaggtacagttat

SEQ ID NO: 83304 - DNA, 25 bp, Homo sapien
cggtcacttcagaaggtacagttat

SEQ ID NO: 83305 - DNA, 25 bp, Homo sapien
tctgtcttgtcatttgtggactacg

SEQ ID NO: 83306 - DNA, 25 bp, Homo sapien
tctgtcttgtcaattgtggactacg

SEQ ID NO: 83307 - DNA, 25 bp, Homo sapien
aaagggagtcccaggttctggaact

SEQ ID NO: 83308 - DNA, 25 bp, Homo sapien
aaagggagtccctggttctggaact

SEQ ID NO: 83309 - DNA, 25 bp, Homo sapien
aaagttgtccctttctgtgttaggg

SEQ ID NO: 83310 - DNA, 25 bp, Homo sapien
aaagttgtccctatctgtgttaggg

SEQ ID NO: 83311 - DNA, 25 bp, Homo sapien
aagattacctctgtatattaactgg

SEQ ID NO: 83312 - DNA, 25 bp, Homo sapien
aagattacctctctatattaactgg

SEQ ID NO: 83313 - DNA, 25 bp, Homo sapien
gtcactttcctctttaataccgtgg

SEQ ID NO: 83314 - DNA, 25 bp, Homo sapien
gtcactttcctcattaataccgtgg

SEQ ID NO: 83315 - DNA, 25 bp, Homo sapien
cctagctcctcttgaagtccgtcgg

SEQ ID NO: 83316 - DNA, 25 bp, Homo sapien
cctagctcctctagaagtccgtcgg

SEQ ID NO: 83317 - DNA, 25 bp, Homo sapien
cttgacgatgtcgacgagttcgaca

SEQ ID NO: 83318 - DNA, 25 bp, Homo sapien
cttgacgatgtccacgagttcgaca

SEQ ID NO: 83319 - DNA, 25 bp, Homo sapien
accctgtctgtgacgaggttacacc

SEQ ID NO: 83320 - DNA, 25 bp, Homo sapien
accctgtctgtgtcgaggttacacc

SEQ ID NO: 83321 - DNA, 25 bp, Homo sapien
acaaacgtcacgtccactgacgata

SEQ ID NO: 83322 - DNA, 25 bp, Homo sapien
acaaacgtcacgaccactgacgata

SEQ ID NO: 83323 - DNA, 25 bp, Homo sapien
ctcgggtgtccgacccgtgcagtag

SEQ ID NO: 83324 - DNA, 25 bp, Homo sapien
ctcgggtgtccgtcccgtgcagtag

SEQ ID NO: 83325 - DNA, 25 bp, Homo sapien
tctgtgttgagaagtcccactatag

SEQ ID NO: 83326 - DNA, 25 bp, Homo sapien
tctgtgttgagatgtcccactatag

SEQ ID NO: 83327 - DNA, 25 bp, Homo sapien
gagacttacttcgattgatcccaag

SEQ ID NO: 83328 - DNA, 25 bp, Homo sapien
gagacttacttccattgatcccaag

SEQ ID NO: 83329 - DNA, 25 bp, Homo sapien
taggaccctcggtggacagtggaca

SEQ ID NO: 83330 - DNA, 25 bp, Homo sapien
taggaccctcggaggacagtggaca

SEQ ID NO: 83331 - DNA, 25 bp, Homo sapien
ggacgtcggtccacggtaagtggaa

SEQ ID NO: 83332 - DNA, 25 bp, Homo sapien
ggacgtcggtcctcggtaagtggaa

SEQ ID NO: 83333 - DNA, 25 bp, Homo sapien
acacgacctctactcgacagtggaa

SEQ ID NO: 83334 - DNA, 25 bp, Homo sapien
acacgacctctagtcgacagtggaa

SEQ ID NO: 83335 - DNA, 25 bp, Homo sapien
accgacagcgacagtgacagcggca

SEQ ID NO: 83336 - DNA, 25 bp, Homo sapien
accgacagcgactgtgacagcggca

SEQ ID NO: 83337 - DNA, 25 bp, Homo sapien
ctccgtcgacggtgtgaacggtcgt

SEQ ID NO: 83338 - DNA, 25 bp, Homo sapien
ctccgtcgacggagtgaacggtcgt

SEQ ID NO: 83339 - DNA, 25 bp, Homo sapien
ccctcaaacgtctggggtcaagatc

SEQ ID NO: 83340 - DNA, 25 bp, Homo sapien
ccctcaaacgtcaggggtcaagatc

SEQ ID NO: 83341 - DNA, 25 bp, Homo sapien
ctaaaaggaaaggtcgagtcgcacc

SEQ ID NO: 83342 - DNA, 25 bp, Homo sapien
ctaaaaggaaagctcgagtcgcacc

SEQ ID NO: 83343 - DNA, 25 bp, Homo sapien
aacgaaggggtgtacgacgccacga

SEQ ID NO: 83344 - DNA, 25 bp, Homo sapien
aacgaaggggtgaacgacgccacga

SEQ ID NO: 83345 - DNA, 25 bp, Homo sapien
cctagagccggtcgtcgcggaagac

SEQ ID NO: 83346 - DNA, 25 bp, Homo sapien
cctagagccggtggtcgcggaagac

SEQ ID NO: 83347 - DNA, 25 bp, Homo sapien
caggtctattgtgacctcgggaaag

SEQ ID NO: 83348 - DNA, 25 bp, Homo sapien
caggtctattgtcacctcgggaaag

SEQ ID NO: 83349 - DNA, 25 bp, Homo sapien
ccaggtgaccttaaccttgagaaga

SEQ ID NO: 83350 - DNA, 25 bp, Homo sapien
ccaggtgacctttaccttgagaaga

SEQ ID NO: 83351 - DNA, 25 bp, Homo sapien
atctagacttcaaccttcgaagaag

SEQ ID NO: 83352 - DNA, 25 bp, Homo sapien
atctagacttcatccttcgaagaag

SEQ ID NO: 83353 - DNA, 25 bp, Homo sapien
ctctactctctatttgtctgtagga

SEQ ID NO: 83354 - DNA, 25 bp, Homo sapien
ctctactctctaattgtctgtagga

SEQ ID NO: 83355 - DNA, 25 bp, Homo sapien
agaccgtttcttgttacgtcctcat

SEQ ID NO: 83356 - DNA, 25 bp, Homo sapien
agaccgtttcttcttacgtcctcat

SEQ ID NO: 83357 - DNA, 25 bp, Homo sapien
agtcagaactttgttacgtcctaac

SEQ ID NO: 83358 - DNA, 25 bp, Homo sapien
agtcagaactttcttacgtcctaac

SEQ ID NO: 83359 - DNA, 25 bp, Homo sapien
cacgttaatctttctctcttccggg

SEQ ID NO: 83360 - DNA, 25 bp, Homo sapien
cacgttaatcttactctcttccggg

SEQ ID NO: 83361 - DNA, 25 bp, Homo sapien
ggttattacataaccttaaacgatg

SEQ ID NO: 83362 - DNA, 25 bp, Homo sapien
ggttattacatatccttaaacgatg

SEQ ID NO: 83363 - DNA, 25 bp, Homo sapien
gtgtaatccttgaaacgttgactat

SEQ ID NO: 83364 - DNA, 25 bp, Homo sapien
gtgtaatccttgtaacgttgactat

SEQ ID NO: 83365 - DNA, 25 bp, Homo sapien
tgggatcgcccgaaagtattacgtt

SEQ ID NO: 83366 - DNA, 25 bp, Homo sapien
tgggatcgcccgtaagtattacgtt

SEQ ID NO: 83367 - DNA, 25 bp, Homo sapien
gacaaggtcgggtttagacgtcgta

SEQ ID NO: 83368 - DNA, 25 bp, Homo sapien
gacaaggtcgggattagacgtcgta

SEQ ID NO: 83369 - DNA, 25 bp, Homo sapien
cggagacccgggtcattgagtcgat

SEQ ID NO: 83370 - DNA, 25 bp, Homo sapien
cggagacccgggacattgagtcgat

SEQ ID NO: 83371 - DNA, 25 bp, Homo sapien
cgagtccaccgacgaattccgactt

SEQ ID NO: 83372 - DNA, 25 bp, Homo sapien
cgagtccaccgaggaattccgactt

SEQ ID NO: 83373 - DNA, 25 bp, Homo sapien
gtctactcagagtctctccctagtt

SEQ ID NO: 83374 - DNA, 25 bp, Homo sapien
gtctactcagagactctccctagtt

SEQ ID NO: 83375 - DNA, 25 bp, Homo sapien
tgggagtttctaatttctcctggtt

SEQ ID NO: 83376 - DNA, 25 bp, Homo sapien
tgggagtttctattttctcctggtt

SEQ ID NO: 83377 - DNA, 25 bp, Homo sapien
gtacgtcgttttgttcccgtcgtct

SEQ ID NO: 83378 - DNA, 25 bp, Homo sapien
gtacgtcgttttcttcccgtcgtct

SEQ ID NO: 83379 - DNA, 25 bp, Homo sapien
gtgggactcttgtccttgttccgtt

SEQ ID NO: 83380 - DNA, 25 bp, Homo sapien
gtgggactcttgaccttgttccgtt

SEQ ID NO: 83381 - DNA, 25 bp, Homo sapien
ggaatatccggcagtcgggatagtt

SEQ ID NO: 83382 - DNA, 25 bp, Homo sapien
ggaatatccggctgtcgggatagtt

SEQ ID NO: 83383 - DNA, 25 bp, Homo sapien
caagagtggattcactttgtttgac

SEQ ID NO: 83384 - DNA, 25 bp, Homo sapien
caagagtggattgactttgtttgac

SEQ ID NO: 83385 - DNA, 25 bp, Homo sapien
ccggtatataccttgtgtatagtta

SEQ ID NO: 83386 - DNA, 25 bp, Homo sapien
ccggtatataccatgtgtatagtta

SEQ ID NO: 83387 - DNA, 25 bp, Homo sapien
gaagtaccgtcctagtgtaagatat

SEQ ID NO: 83388 - DNA, 25 bp, Homo sapien
gaagtaccgtccaagtgtaagatat

SEQ ID NO: 83389 - DNA, 25 bp, Homo sapien
acctccgtacacatacgttaatatt

SEQ ID NO: 83390 - DNA, 25 bp, Homo sapien
acctccgtacacttacgttaatatt

SEQ ID NO: 83391 - DNA, 25 bp, Homo sapien
ccctgtacgtcctgcactacatgtt

SEQ ID NO: 83392 - DNA, 25 bp, Homo sapien
ccctgtacgtccagcactacatgtt

SEQ ID NO: 83393 - DNA, 25 bp, Homo sapien
tttcgttttcccaggtaagttgtat

SEQ ID NO: 83394 - DNA, 25 bp, Homo sapien
tttcgttttccctggtaagttgtat

SEQ ID NO: 83395 - DNA, 25 bp, Homo sapien
tctgttaagttcctgttgaacctat

SEQ ID NO: 83396 - DNA, 25 bp, Homo sapien
tctgttaagttcgtgttgaacctat

SEQ ID NO: 83397 - DNA, 25 bp, Homo sapien
cgtgatagtctcagtgcggctccag

SEQ ID NO: 83398 - DNA, 25 bp, Homo sapien
cgtgatagtctctgtgcggctccag

SEQ ID NO: 83399 - DNA, 25 bp, Homo sapien
acgccctggtctagtaggcgcactt

SEQ ID NO: 83400 - DNA, 25 bp, Homo sapien
acgccctggtcttgtaggcgcactt

SEQ ID NO: 83401 - DNA, 25 bp, Homo sapien
aagttcgtccaggaccgtcgtcctc

SEQ ID NO: 83402 - DNA, 25 bp, Homo sapien
aagttcgtccagcaccgtcgtcctc

SEQ ID NO: 83403 - DNA, 25 bp, Homo sapien
tcatcttcgccaggaccgtctttat

SEQ ID NO: 83404 - DNA, 25 bp, Homo sapien
tcatcttcgccacgaccgtctttat

SEQ ID NO: 83405 - DNA, 25 bp, Homo sapien
ctttaagtatcgtgttgtaacttac

SEQ ID NO: 83406 - DNA, 25 bp, Homo sapien
ctttaagtatcgagttgtaacttac

SEQ ID NO: 83407 - DNA, 25 bp, Homo sapien
gtttataacgtaagttctgataccc

SEQ ID NO: 83408 - DNA, 25 bp, Homo sapien
gtttataacgtatgttctgataccc

SEQ ID NO: 83409 - DNA, 25 bp, Homo sapien
gtattaagatgttatctctatccag

SEQ ID NO: 83410 - DNA, 25 bp, Homo sapien
gtattaagatgtaatctctatccag

SEQ ID NO: 83411 - DNA, 25 bp, Homo sapien
caataaaacgatctggatctagttt

SEQ ID NO: 83412 - DNA, 25 bp, Homo sapien
caataaaacgatgtggatctagttt

SEQ ID NO: 83413 - DNA, 25 bp, Homo sapien
aagagacacggataacattactctt

SEQ ID NO: 83414 - DNA, 25 bp, Homo sapien
aagagacacggaaaacattactctt

SEQ ID NO: 83415 - DNA, 25 bp, Homo sapien
gacactaggacaacctttacgactt

SEQ ID NO: 83416 - DNA, 25 bp, Homo sapien
gacactaggacatcctttacgactt

SEQ ID NO: 83417 - DNA, 25 bp, Homo sapien
gagctacgtcgaaagttctcacgca

SEQ ID NO: 83418 - DNA, 25 bp, Homo sapien
gagctacgtcgatagttctcacgca

SEQ ID NO: 83419 - DNA, 25 bp, Homo sapien
attactaaacaagaccttagtcgac

SEQ ID NO: 83420 - DNA, 25 bp, Homo sapien
attactaaacaacaccttagtcgac

SEQ ID NO: 83421 - DNA, 25 bp, Homo sapien
ttgtataaacgtaattcctcttgat

SEQ ID NO: 83422 - DNA, 25 bp, Homo sapien
ttgtataaacgttattcctcttgat

SEQ ID NO: 83423 - DNA, 25 bp, Homo sapien
gagtcataaacgagtttacatcttt

SEQ ID NO: 83424 - DNA, 25 bp, Homo sapien
gagtcataaacgtgtttacatcttt

SEQ ID NO: 83425 - DNA, 25 bp, Homo sapien
tcaaacgatcgtcgtaagtattaga

SEQ ID NO: 83426 - DNA, 25 bp, Homo sapien
tcaaacgatcgtggtaagtattaga

SEQ ID NO: 83427 - DNA, 25 bp, Homo sapien
agtaaggcttacgtgaagtgactcc

SEQ ID NO: 83428 - DNA, 25 bp, Homo sapien
agtaaggcttacctgaagtgactcc

SEQ ID NO: 83429 - DNA, 25 bp, Homo sapien
acgtagcttcatcgtgataaggtca

SEQ ID NO: 83430 - DNA, 25 bp, Homo sapien
acgtagcttcatggtgataaggtca

SEQ ID NO: 83431 - DNA, 25 bp, Homo sapien
catgtaggtctcgaggtttggattc

SEQ ID NO: 83432 - DNA, 25 bp, Homo sapien
catgtaggtctccaggtttggattc

SEQ ID NO: 83433 - DNA, 25 bp, Homo sapien
cagatgtctcaagtgttggacgttg

SEQ ID NO: 83434 - DNA, 25 bp, Homo sapien
cagatgtctcaactgttggacgttg

SEQ ID NO: 83435 - DNA, 25 bp, Homo sapien
ataagttcataactcttacgggtca

SEQ ID NO: 83436 - DNA, 25 bp, Homo sapien
ataagttcataagtcttacgggtca

SEQ ID NO: 83437 - DNA, 25 bp, Homo sapien
caacgagtggacgaaacggtccact

SEQ ID NO: 83438 - DNA, 25 bp, Homo sapien
caacgagtggaccaaacggtccact

SEQ ID NO: 83439 - DNA, 25 bp, Homo sapien
cccctagagagggtcgtcgccgcgc

SEQ ID NO: 83440 - DNA, 25 bp, Homo sapien
cccctagagaggctcgtcgccgcgc

SEQ ID NO: 83441 - DNA, 25 bp, Homo sapien
gtactaagggcgcggcgacgaccct

SEQ ID NO: 83442 - DNA, 25 bp, Homo sapien
gtactaagggcggggcgacgaccct

SEQ ID NO: 83443 - DNA, 25 bp, Homo sapien
caagtgtaggtattcttctttctct

SEQ ID NO: 83444 - DNA, 25 bp, Homo sapien
caagtgtaggtaatcttctttctct

SEQ ID NO: 83445 - DNA, 25 bp, Homo sapien
cgtttgtgagtcatcttttcaacgt

SEQ ID NO: 83446 - DNA, 25 bp, Homo sapien
cgtttgtgagtcttcttttcaacgt

SEQ ID NO: 83447 - DNA, 25 bp, Homo sapien
cactctgttatttagattggtcatc

SEQ ID NO: 83448 - DNA, 25 bp, Homo sapien
cactctgttattaagattggtcatc

SEQ ID NO: 83449 - DNA, 25 bp, Homo sapien
cgagttctgttggattcgttcactc

SEQ ID NO: 83450 - DNA, 25 bp, Homo sapien
cgagttctgttgcattcgttcactc

SEQ ID NO: 83451 - DNA, 25 bp, Homo sapien
gagagttctcatcttctttacgagc

SEQ ID NO: 83452 - DNA, 25 bp, Homo sapien
gagagttctcatgttctttacgagc

SEQ ID NO: 83453 - DNA, 25 bp, Homo sapien
ttgttttgacatcgtttcctataga

SEQ ID NO: 83454 - DNA, 25 bp, Homo sapien
ttgttttgacatggtttcctataga

SEQ ID NO: 83455 - DNA, 25 bp, Homo sapien
aaaacaacgtgttgtcataacgagt

SEQ ID NO: 83456 - DNA, 25 bp, Homo sapien
aaaacaacgtgtagtcataacgagt

SEQ ID NO: 83457 - DNA, 25 bp, Homo sapien
caaaaggacttctggtgttcagagt

SEQ ID NO: 83458 - DNA, 25 bp, Homo sapien
caaaaggacttcaggtgttcagagt

SEQ ID NO: 83459 - DNA, 25 bp, Homo sapien
catgtattcgagttcactgtttgaa

SEQ ID NO: 83460 - DNA, 25 bp, Homo sapien
catgtattcgagatcactgtttgaa

SEQ ID NO: 83461 - DNA, 25 bp, Homo sapien
attgtctgtcgtacttagtttgaat

SEQ ID NO: 83462 - DNA, 25 bp, Homo sapien
attgtctgtcgttcttagtttgaat

SEQ ID NO: 83463 - DNA, 25 bp, Homo sapien
cgtgcagcggtcgacctactcgcgg

SEQ ID NO: 83464 - DNA, 25 bp, Homo sapien
cgtgcagcggtccacctactcgcgg

SEQ ID NO: 83465 - DNA, 25 bp, Homo sapien
tcgataaggtcgagaactaggtact

SEQ ID NO: 83466 - DNA, 25 bp, Homo sapien
tcgataaggtcgtgaactaggtact

SEQ ID NO: 83467 - DNA, 25 bp, Homo sapien
tagttgaactcgttggtcaaagcga

SEQ ID NO: 83468 - DNA, 25 bp, Homo sapien
tagttgaactcgatggtcaaagcga

SEQ ID NO: 83469 - DNA, 25 bp, Homo sapien
agacgactactccagagacgacgag

SEQ ID NO: 83470 - DNA, 25 bp, Homo sapien
agacgactactcgagagacgacgag

SEQ ID NO: 83471 - DNA, 25 bp, Homo sapien
tcggttacgtgacatctcaacagag

SEQ ID NO: 83472 - DNA, 25 bp, Homo sapien
tcggttacgtgagatctcaacagag

SEQ ID NO: 83473 - DNA, 25 bp, Homo sapien
gagttatgactaccttcattagacg

SEQ ID NO: 83474 - DNA, 25 bp, Homo sapien
gagttatgactagcttcattagacg

SEQ ID NO: 83475 - DNA, 25 bp, Homo sapien
acgtagttgacacctgatacttgac

SEQ ID NO: 83476 - DNA, 25 bp, Homo sapien
acgtagttgacagctgatacttgac

SEQ ID NO: 83477 - DNA, 25 bp, Homo sapien
taacagttgacaaacgaagttcgtt

SEQ ID NO: 83478 - DNA, 25 bp, Homo sapien
taacagttgacatacgaagttcgtt

SEQ ID NO: 83479 - DNA, 25 bp, Homo sapien
cggagtcctcttaactgtcaatttg

SEQ ID NO: 83480 - DNA, 25 bp, Homo sapien
cggagtcctctttactgtcaatttg

SEQ ID NO: 83481 - DNA, 25 bp, Homo sapien
ggaaccagtgactgtacagacccac

SEQ ID NO: 83482 - DNA, 25 bp, Homo sapien
ggaaccagtgacagtacagacccac

SEQ ID NO: 83483 - DNA, 25 bp, Homo sapien
gaacctagaccagaagacgaacccc

SEQ ID NO: 83484 - DNA, 25 bp, Homo sapien
gaacctagaccacaagacgaacccc

SEQ ID NO: 83485 - DNA, 25 bp, Homo sapien
ggctctacccggtgaagaacccgag

SEQ ID NO: 83486 - DNA, 25 bp, Homo sapien
ggctctacccggagaagaacccgag

SEQ ID NO: 83487 - DNA, 25 bp, Homo sapien
ccgtcttttggtagttacggtttca

SEQ ID NO: 83488 - DNA, 25 bp, Homo sapien
ccgtcttttggttgttacggtttca

SEQ ID NO: 83489 - DNA, 25 bp, Homo sapien
cctctgtgtgaacagtgtgtatgta

SEQ ID NO: 83490 - DNA, 25 bp, Homo sapien
cctctgtgtgaagagtgtgtatgta

SEQ ID NO: 83491 - DNA, 25 bp, Homo sapien
cagtcgtgtggactcgataagttta

SEQ ID NO: 83492 - DNA, 25 bp, Homo sapien
cagtcgtgtggagtcgataagttta

SEQ ID NO: 83493 - DNA, 25 bp, Homo sapien
acagtctctgcgaagtcatttaata

SEQ ID NO: 83494 - DNA, 25 bp, Homo sapien
acagtctctgcgtagtcatttaata

SEQ ID NO: 83495 - DNA, 25 bp, Homo sapien
tttgtgaccactgatatgtatatac

SEQ ID NO: 83496 - DNA, 25 bp, Homo sapien
tttgtgaccactcatatgtatatac

SEQ ID NO: 83497 - DNA, 25 bp, Homo sapien
tctttacgactccattatccgtgtg

SEQ ID NO: 83498 - DNA, 25 bp, Homo sapien
tctttacgactcgattatccgtgtg

SEQ ID NO: 83499 - DNA, 25 bp, Homo sapien
catactaacaacatagtcgtcgtgg

SEQ ID NO: 83500 - DNA, 25 bp, Homo sapien
catactaacaacttagtcgtcgtgg

SEQ ID NO: 83501 - DNA, 25 bp, Homo sapien
gagtgacatattaacgtaacttctc

SEQ ID NO: 83502 - DNA, 25 bp, Homo sapien
gagtgacatatttacgtaacttctc

SEQ ID NO: 83503 - DNA, 25 bp, Homo sapien
tattgtcgacatcagactaattgtc

SEQ ID NO: 83504 - DNA, 25 bp, Homo sapien
tattgtcgacatgagactaattgtc

SEQ ID NO: 83505 - DNA, 25 bp, Homo sapien
gtttcgaccgtatagatcgaatgtt

SEQ ID NO: 83506 - DNA, 25 bp, Homo sapien
gtttcgaccgtaaagatcgaatgtt

SEQ ID NO: 83507 - DNA, 25 bp, Homo sapien
gtgtcaaatatttgtatactcgtac

SEQ ID NO: 83508 - DNA, 25 bp, Homo sapien
gtgtcaaatattagtatactcgtac

SEQ ID NO: 83509 - DNA, 25 bp, Homo sapien
agtcagaactgttgagtatcgtctc

SEQ ID NO: 83510 - DNA, 25 bp, Homo sapien
agtcagaactgtagagtatcgtctc

SEQ ID NO: 83511 - DNA, 25 bp, Homo sapien
agaacgtagattacggtatagactc

SEQ ID NO: 83512 - DNA, 25 bp, Homo sapien
agaacgtagatttcggtatagactc

SEQ ID NO: 83513 - DNA, 25 bp, Homo sapien
gcgtctgtgtcttccctagtaccct

SEQ ID NO: 83514 - DNA, 25 bp, Homo sapien
gcgtctgtgtctaccctagtaccct

SEQ ID NO: 83515 - DNA, 25 bp, Homo sapien
gtcggaccgggtgagtcccttaaga

SEQ ID NO: 83516 - DNA, 25 bp, Homo sapien
gtcggaccgggtcagtcccttaaga

SEQ ID NO: 83517 - DNA, 25 bp, Homo sapien
tagtcctgtaacgtctctcttgtga

SEQ ID NO: 83518 - DNA, 25 bp, Homo sapien
tagtcctgtaacctctctcttgtga

SEQ ID NO: 83519 - DNA, 25 bp, Homo sapien
tactgtgacccgtcgacacatcgac

SEQ ID NO: 83520 - DNA, 25 bp, Homo sapien
tactgtgacccgacgacacatcgac

SEQ ID NO: 83521 - DNA, 25 bp, Homo sapien
gaccgtggccggtgaatagtcgtac

SEQ ID NO: 83522 - DNA, 25 bp, Homo sapien
gaccgtggccggagaatagtcgtac

SEQ ID NO: 83523 - DNA, 25 bp, Homo sapien
catgagctgagaactgacaccgtgt

SEQ ID NO: 83524 - DNA, 25 bp, Homo sapien
catgagctgagatctgacaccgtgt

SEQ ID NO: 83525 - DNA, 25 bp, Homo sapien
tcaggagtcacaggtctgtgtggtt

SEQ ID NO: 83526 - DNA, 25 bp, Homo sapien
tcaggagtcacacgtctgtgtggtt

SEQ ID NO: 83527 - DNA, 25 bp, Homo sapien
gagaagtagaaccaaaacggtgtct

SEQ ID NO: 83528 - DNA, 25 bp, Homo sapien
gagaagtagaacgaaaacggtgtct

SEQ ID NO: 83529 - DNA, 25 bp, Homo sapien
aagaaaacagaacctcttagtacgt

SEQ ID NO: 83530 - DNA, 25 bp, Homo sapien
aagaaaacagaagctcttagtacgt

SEQ ID NO: 83531 - DNA, 25 bp, Homo sapien
tgactgttatcgtccattgtgtacg

SEQ ID NO: 83532 - DNA, 25 bp, Homo sapien
tgactgttatcgaccattgtgtacg

SEQ ID NO: 83533 - DNA, 25 bp, Homo sapien
gtctctctactgttcccagtgtgta

SEQ ID NO: 83534 - DNA, 25 bp, Homo sapien
gtctctctactgatcccagtgtgta

SEQ ID NO: 83535 - DNA, 25 bp, Homo sapien
tcgtcttcgtccttctcagggtgtg

SEQ ID NO: 83536 - DNA, 25 bp, Homo sapien
tcgtcttcgtccatctcagggtgtg

SEQ ID NO: 83537 - DNA, 25 bp, Homo sapien
aatgtgtctccctaccaaagcgtag

SEQ ID NO: 83538 - DNA, 25 bp, Homo sapien
aatgtgtctcccaaccaaagcgtag

SEQ ID NO: 83539 - DNA, 25 bp, Homo sapien
acgtgtctctccagacaagattcgg

SEQ ID NO: 83540 - DNA, 25 bp, Homo sapien
acgtgtctctcctgacaagattcgg

SEQ ID NO: 83541 - DNA, 25 bp, Homo sapien
cacggacctactcaagagtcatgaa

SEQ ID NO: 83542 - DNA, 25 bp, Homo sapien
cacggacctactgaagagtcatgaa

SEQ ID NO: 83543 - DNA, 25 bp, Homo sapien
agaacggtactcatcgttcaataag

SEQ ID NO: 83544 - DNA, 25 bp, Homo sapien
agaacggtactcttcgttcaataag

SEQ ID NO: 83545 - DNA, 25 bp, Homo sapien
acggtgcctctcgtcgggtcaagtg

SEQ ID NO: 83546 - DNA, 25 bp, Homo sapien
acggtgcctctcctcgggtcaagtg

SEQ ID NO: 83547 - DNA, 25 bp, Homo sapien
ctccttcctccgtcgtcgtcgtcga

SEQ ID NO: 83548 - DNA, 25 bp, Homo sapien
ctccttcctccgacgtcgtcgtcga

SEQ ID NO: 83549 - DNA, 25 bp, Homo sapien
tcgtgtgtgaacgaccccgactcga

SEQ ID NO: 83550 - DNA, 25 bp, Homo sapien
tcgtgtgtgaaccaccccgactcga

SEQ ID NO: 83551 - DNA, 25 bp, Homo sapien
gtacgttctttaaaactctcatgcg

SEQ ID NO: 83552 - DNA, 25 bp, Homo sapien
gtacgttctttataactctcatgcg

SEQ ID NO: 83553 - DNA, 25 bp, Homo sapien
ttgtgacaatatggacttctaccag

SEQ ID NO: 83554 - DNA, 25 bp, Homo sapien
ttgtgacaatatcgacttctaccag

SEQ ID NO: 83555 - DNA, 25 bp, Homo sapien
tctgtctcttgcactgtcaccgact

SEQ ID NO: 83556 - DNA, 25 bp, Homo sapien
tctgtctcttgctctgtcaccgact

SEQ ID NO: 83557 - DNA, 25 bp, Homo sapien
gaaggagtcccagaaacgttcgtcc

SEQ ID NO: 83558 - DNA, 25 bp, Homo sapien
gaaggagtcccacaaacgttcgtcc

SEQ ID NO: 83559 - DNA, 25 bp, Homo sapien
acaggtcgatcgactgacatcggta

SEQ ID NO: 83560 - DNA, 25 bp, Homo sapien
acaggtcgatcgtctgacatcggta

SEQ ID NO: 83561 - DNA, 25 bp, Homo sapien
caaaggtaactatatgagacactaa

SEQ ID NO: 83562 - DNA, 25 bp, Homo sapien
caaaggtaactaaatgagacactaa

SEQ ID NO: 83563 - DNA, 25 bp, Homo sapien
gaagggaatcgaaatcgactctgac

SEQ ID NO: 83564 - DNA, 25 bp, Homo sapien
gaagggaatcgatatcgactctgac

SEQ ID NO: 83565 - DNA, 25 bp, Homo sapien
cgggtccacgtactcgttcacggac

SEQ ID NO: 83566 - DNA, 25 bp, Homo sapien
cgggtccacgtagtcgttcacggac

SEQ ID NO: 83567 - DNA, 25 bp, Homo sapien
ccgtattcgccatgcgtgtcgaagg

SEQ ID NO: 83568 - DNA, 25 bp, Homo sapien
ccgtattcgccaagcgtgtcgaagg

SEQ ID NO: 83569 - DNA, 25 bp, Homo sapien
acgtgacacctgaggggcagtacgt

SEQ ID NO: 83570 - DNA, 25 bp, Homo sapien
acgtgacacctgtggggcagtacgt

SEQ ID NO: 83571 - DNA, 25 bp, Homo sapien
cgttccggtttttcgtacctgtagt

SEQ ID NO: 83572 - DNA, 25 bp, Homo sapien
cgttccggttttacgtacctgtagt

SEQ ID NO: 83573 - DNA, 25 bp, Homo sapien
ttcacgagtttatgttacgaacgtt

SEQ ID NO: 83574 - DNA, 25 bp, Homo sapien
ttcacgagtttaagttacgaacgtt

SEQ ID NO: 83575 - DNA, 25 bp, Homo sapien
acgtgatttggttttatcgaatacc

SEQ ID NO: 83576 - DNA, 25 bp, Homo sapien
acgtgatttggtattatcgaatacc

SEQ ID NO: 83577 - DNA, 25 bp, Homo sapien
gacgattggttaacactaccagacc

SEQ ID NO: 83578 - DNA, 25 bp, Homo sapien
gacgattggttatcactaccagacc

SEQ ID NO: 83579 - DNA, 25 bp, Homo sapien
gagtcctgagcgaagtaccaggtcc

SEQ ID NO: 83580 - DNA, 25 bp, Homo sapien
gagtcctgagcgtagtaccaggtcc

SEQ ID NO: 83581 - DNA, 25 bp, Homo sapien
gtcactgactatacgatctggctac

SEQ ID NO: 83582 - DNA, 25 bp, Homo sapien
gtcactgactattcgatctggctac

SEQ ID NO: 83583 - DNA, 25 bp, Homo sapien
ttatttctagattgttgctagacac

SEQ ID NO: 83584 - DNA, 25 bp, Homo sapien
ttatttctagatagttgctagacac

SEQ ID NO: 83585 - DNA, 25 bp, Homo sapien
tacaagtgtttgtatcaggttgtcc

SEQ ID NO: 83586 - DNA, 25 bp, Homo sapien
tacaagtgtttgaatcaggttgtcc

SEQ ID NO: 83587 - DNA, 25 bp, Homo sapien
ctgaaagtatgtaccgtcacgtctc

SEQ ID NO: 83588 - DNA, 25 bp, Homo sapien
ctgaaagtatgttccgtcacgtctc

SEQ ID NO: 83589 - DNA, 25 bp, Homo sapien
ctgttaaactctcgtggtccgtgac

SEQ ID NO: 83590 - DNA, 25 bp, Homo sapien
ctgttaaactctggtggtccgtgac

SEQ ID NO: 83591 - DNA, 25 bp, Homo sapien
aattgaacttagttttggtcgtcca

SEQ ID NO: 83592 - DNA, 25 bp, Homo sapien
aattgaacttagatttggtcgtcca

SEQ ID NO: 83593 - DNA, 25 bp, Homo sapien
taagtgaaattgaacttcatgtcca

SEQ ID NO: 83594 - DNA, 25 bp, Homo sapien
taagtgaaattgtacttcatgtcca

SEQ ID NO: 83595 - DNA, 25 bp, Homo sapien
gttctaaacttacttgttttctgag

SEQ ID NO: 83596 - DNA, 25 bp, Homo sapien
gttctaaacttagttgttttctgag

SEQ ID NO: 83597 - DNA, 25 bp, Homo sapien
gatcctcagactgagattttctctg

SEQ ID NO: 83598 - DNA, 25 bp, Homo sapien
gatcctcagactcagattttctctg

SEQ ID NO: 83599 - DNA, 25 bp, Homo sapien
ggacctccgaagacgttgcctacca

SEQ ID NO: 83600 - DNA, 25 bp, Homo sapien
ggacctccgaagtcgttgcctacca

SEQ ID NO: 83601 - DNA, 25 bp, Homo sapien
aaccactatcataaggtccgacctg

SEQ ID NO: 83602 - DNA, 25 bp, Homo sapien
aaccactatcattaggtccgacctg

SEQ ID NO: 83603 - DNA, 25 bp, Homo sapien
atctcacgtttaaaggttcgactta

SEQ ID NO: 83604 - DNA, 25 bp, Homo sapien
atctcacgtttataggttcgactta

SEQ ID NO: 83605 - DNA, 25 bp, Homo sapien
atcccgttctatactgttgtaaggt

SEQ ID NO: 83606 - DNA, 25 bp, Homo sapien
atcccgttctattctgttgtaaggt

SEQ ID NO: 83607 - DNA, 25 bp, Homo sapien
tacatgtcaatggtagtcaagtaca

SEQ ID NO: 83608 - DNA, 25 bp, Homo sapien
tacatgtcaatgctagtcaagtaca

SEQ ID NO: 83609 - DNA, 25 bp, Homo sapien
cattacaatacggtatcagtctaat

SEQ ID NO: 83610 - DNA, 25 bp, Homo sapien
cattacaatacgctatcagtctaat

SEQ ID NO: 83611 - DNA, 25 bp, Homo sapien
agagtcagaagaatccgtcgtcgtg

SEQ ID NO: 83612 - DNA, 25 bp, Homo sapien
agagtcagaagattccgtcgtcgtg

SEQ ID NO: 83613 - DNA, 25 bp, Homo sapien
gtcttttattaagtcgttatattta

SEQ ID NO: 83614 - DNA, 25 bp, Homo sapien
gtcttttattaactcgttatattta

SEQ ID NO: 83615 - DNA, 25 bp, Homo sapien
cgggtttatgttacttccttgtgta

SEQ ID NO: 83616 - DNA, 25 bp, Homo sapien
cgggtttatgtttcttccttgtgta

SEQ ID NO: 83617 - DNA, 25 bp, Homo sapien
ctctagtccctttaatagagtcgat

SEQ ID NO: 83618 - DNA, 25 bp, Homo sapien
ctctagtcccttaaatagagtcgat

SEQ ID NO: 83619 - DNA, 25 bp, Homo sapien
tgtcgacgccgtctactggagtcct

SEQ ID NO: 83620 - DNA, 25 bp, Homo sapien
tgtcgacgccgtgtactggagtcct

SEQ ID NO: 83621 - DNA, 25 bp, Homo sapien
actctgggattcgagaggaccgacg

SEQ ID NO: 83622 - DNA, 25 bp, Homo sapien
actctgggattccagaggaccgacg

SEQ ID NO: 83623 - DNA, 25 bp, Homo sapien
atgtccgacatacacaatacacagg

SEQ ID NO: 83624 - DNA, 25 bp, Homo sapien
atgtccgacatagacaatacacagg

SEQ ID NO: 83625 - DNA, 25 bp, Homo sapien
gttgtaatacagagacatctccgga

SEQ ID NO: 83626 - DNA, 25 bp, Homo sapien
gttgtaatacagtgacatctccgga

SEQ ID NO: 83627 - DNA, 25 bp, Homo sapien
gttagttctcattcccttaagagat

SEQ ID NO: 83628 - DNA, 25 bp, Homo sapien
gttagttctcatacccttaagagat

SEQ ID NO: 83629 - DNA, 25 bp, Homo sapien
cgaccttctcggaaccttcaaagat

SEQ ID NO: 83630 - DNA, 25 bp, Homo sapien
cgaccttctcggtaccttcaaagat

SEQ ID NO: 83631 - DNA, 25 bp, Homo sapien
cgatcttctttgtttgtcagaactt

SEQ ID NO: 83632 - DNA, 25 bp, Homo sapien
cgatcttctttgattgtcagaactt

SEQ ID NO: 83633 - DNA, 25 bp, Homo sapien
cagttgtgggtcgtagtcgacactt

SEQ ID NO: 83634 - DNA, 25 bp, Homo sapien
cagttgtgggtcctagtcgacactt

SEQ ID NO: 83635 - DNA, 25 bp, Homo sapien
cacgacggagatgacctatccacct

SEQ ID NO: 83636 - DNA, 25 bp, Homo sapien
cacgacggagatcacctatccacct

SEQ ID NO: 83637 - DNA, 25 bp, Homo sapien
tacaccgagtcctagtcaccatcgt

SEQ ID NO: 83638 - DNA, 25 bp, Homo sapien
tacaccgagtccaagtcaccatcgt

SEQ ID NO: 83639 - DNA, 25 bp, Homo sapien
aggtatccagggtcgtccgtcctct

SEQ ID NO: 83640 - DNA, 25 bp, Homo sapien
aggtatccagggacgtccgtcctct

SEQ ID NO: 83641 - DNA, 25 bp, Homo sapien
agcgagacagcgggtccgacctcac

SEQ ID NO: 83642 - DNA, 25 bp, Homo sapien
agcgagacagcgcgtccgacctcac

SEQ ID NO: 83643 - DNA, 25 bp, Homo sapien
acgtagagtccgacgtcacctctac

SEQ ID NO: 83644 - DNA, 25 bp, Homo sapien
acgtagagtccgtcgtcacctctac

SEQ ID NO: 83645 - DNA, 25 bp, Homo sapien
aggactgtcgtccatgcgactcatc

SEQ ID NO: 83646 - DNA, 25 bp, Homo sapien
aggactgtcgtcgatgcgactcatc

SEQ ID NO: 83647 - DNA, 25 bp, Homo sapien
gtcgggtccctcgagtagtcccaga

SEQ ID NO: 83648 - DNA, 25 bp, Homo sapien
gtcgggtccctccagtagtcccaga

SEQ ID NO: 83649 - DNA, 25 bp, Homo sapien
agatttgtctcgtcgatgtccctgc

SEQ ID NO: 83650 - DNA, 25 bp, Homo sapien
agatttgtctcgacgatgtccctgc

SEQ ID NO: 83651 - DNA, 25 bp, Homo sapien
agagtgatttcatcctgaccacctc

SEQ ID NO: 83652 - DNA, 25 bp, Homo sapien
agagtgatttcaacctgaccacctc

SEQ ID NO: 83653 - DNA, 25 bp, Homo sapien
agggataattaacttcgactttact

SEQ ID NO: 83654 - DNA, 25 bp, Homo sapien
agggataattaagttcgactttact

SEQ ID NO: 83655 - DNA, 25 bp, Homo sapien
agtccggaaagaacattcacttctt

SEQ ID NO: 83656 - DNA, 25 bp, Homo sapien
agtccggaaagatcattcacttctt

SEQ ID NO: 83657 - DNA, 25 bp, Homo sapien
gttcaccgagcaggtacgatatcac

SEQ ID NO: 83658 - DNA, 25 bp, Homo sapien
gttcaccgagcacgtacgatatcac

SEQ ID NO: 83659 - DNA, 25 bp, Homo sapien
cttagacgacggacggtagacttaa

SEQ ID NO: 83660 - DNA, 25 bp, Homo sapien
cttagacgacggtcggtagacttaa

SEQ ID NO: 83661 - DNA, 25 bp, Homo sapien
ggcgtgaaagaggactttctagaac

SEQ ID NO: 83662 - DNA, 25 bp, Homo sapien
ggcgtgaaagagcactttctagaac

SEQ ID NO: 83663 - DNA, 25 bp, Homo sapien
gcgtcacttaacacccatagatacg

SEQ ID NO: 83664 - DNA, 25 bp, Homo sapien
gcgtcacttaactcccatagatacg

SEQ ID NO: 83665 - DNA, 25 bp, Homo sapien
ggtgatacacgaattctcagtagga

SEQ ID NO: 83666 - DNA, 25 bp, Homo sapien
ggtgatacacgatttctcagtagga

SEQ ID NO: 83667 - DNA, 25 bp, Homo sapien
ctcatagtcactctacaagaccggt

SEQ ID NO: 83668 - DNA, 25 bp, Homo sapien
ctcatagtcactgtacaagaccggt

SEQ ID NO: 83669 - DNA, 25 bp, Homo sapien
ttcaagcacgtagtgagacgacaag

SEQ ID NO: 83670 - DNA, 25 bp, Homo sapien
ttcaagcacgtactgagacgacaag

SEQ ID NO: 83671 - DNA, 25 bp, Homo sapien
cttcgagacgtgtgtaggaaccctg

SEQ ID NO: 83672 - DNA, 25 bp, Homo sapien
cttcgagacgtgagtaggaaccctg

SEQ ID NO: 83673 - DNA, 25 bp, Homo sapien
atcatgggaccattcacgacctcta

SEQ ID NO: 83674 - DNA, 25 bp, Homo sapien
atcatgggaccaatcacgacctcta

SEQ ID NO: 83675 - DNA, 25 bp, Homo sapien
atttcgatacgttcttcgagaccga

SEQ ID NO: 83676 - DNA, 25 bp, Homo sapien
atttcgatacgtacttcgagaccga

SEQ ID NO: 83677 - DNA, 25 bp, Homo sapien
aaagtctctcggtcggttgaagcac

SEQ ID NO: 83678 - DNA, 25 bp, Homo sapien
aaagtctctcggacggttgaagcac

SEQ ID NO: 83679 - DNA, 25 bp, Homo sapien
aggtcggttctcgttctacgggttt

SEQ ID NO: 83680 - DNA, 25 bp, Homo sapien
aggtcggttctccttctacgggttt

SEQ ID NO: 83681 - DNA, 25 bp, Homo sapien
aaagtttattagattttgggtctct

SEQ ID NO: 83682 - DNA, 25 bp, Homo sapien
aaagtttattagtttttgggtctct

SEQ ID NO: 83683 - DNA, 25 bp, Homo sapien
aaataacggttgtcttgtgaagtcc

SEQ ID NO: 83684 - DNA, 25 bp, Homo sapien
aaataacggttgacttgtgaagtcc

SEQ ID NO: 83685 - DNA, 25 bp, Homo sapien
agtaaagtacaatatctgaagtcac

SEQ ID NO: 83686 - DNA, 25 bp, Homo sapien
agtaaagtacaaaatctgaagtcac

SEQ ID NO: 83687 - DNA, 25 bp, Homo sapien
tctccaacaacagaagctccacggg

SEQ ID NO: 83688 - DNA, 25 bp, Homo sapien
tctccaacaacacaagctccacggg

SEQ ID NO: 83689 - DNA, 25 bp, Homo sapien
ctgacagaacgcaaaccgcacgagg

SEQ ID NO: 83690 - DNA, 25 bp, Homo sapien
ctgacagaacgctaaccgcacgagg

SEQ ID NO: 83691 - DNA, 25 bp, Homo sapien
aataacactaccaccgtccaggtgg

SEQ ID NO: 83692 - DNA, 25 bp, Homo sapien
aataacactacctccgtccaggtgg

SEQ ID NO: 83693 - DNA, 25 bp, Homo sapien
tatcacgttctttcctcacggggtg

SEQ ID NO: 83694 - DNA, 25 bp, Homo sapien
tatcacgttcttacctcacggggtg

SEQ ID NO: 83695 - DNA, 25 bp, Homo sapien
tatcggtacttgacctaagggtcct

SEQ ID NO: 83696 - DNA, 25 bp, Homo sapien
tatcggtacttgtcctaagggtcct

SEQ ID NO: 83697 - DNA, 25 bp, Homo sapien
gttctcggactcagaccaggtccgg

SEQ ID NO: 83698 - DNA, 25 bp, Homo sapien
gttctcggactctgaccaggtccgg

SEQ ID NO: 83699 - DNA, 25 bp, Homo sapien
gtggagccggagggtttcacgaccc

SEQ ID NO: 83700 - DNA, 25 bp, Homo sapien
gtggagccggagcgtttcacgaccc

SEQ ID NO: 83701 - DNA, 25 bp, Homo sapien
tgagctccgatctcttcacgcggct

SEQ ID NO: 83702 - DNA, 25 bp, Homo sapien
tgagctccgatcacttcacgcggct

SEQ ID NO: 83703 - DNA, 25 bp, Homo sapien
aaggggcccatcgtcatccgcgtgc

SEQ ID NO: 83704 - DNA, 25 bp, Homo sapien
aaggggcccatcctcatccgcgtgc

SEQ ID NO: 83705 - DNA, 25 bp, Homo sapien
ggtccggagaccttccttcgtcttt

SEQ ID NO: 83706 - DNA, 25 bp, Homo sapien
ggtccggagaccatccttcgtcttt

SEQ ID NO: 83707 - DNA, 25 bp, Homo sapien
ggttcggtgccatccgagtctctga

SEQ ID NO: 83708 - DNA, 25 bp, Homo sapien
ggttcggtgccaaccgagtctctga

SEQ ID NO: 83709 - DNA, 25 bp, Homo sapien
gacctctacgggacaaattcctgag

SEQ ID NO: 83710 - DNA, 25 bp, Homo sapien
gacctctacgggtcaaattcctgag

SEQ ID NO: 83711 - DNA, 25 bp, Homo sapien
cctgtgggccatcctactccgtgag

SEQ ID NO: 83712 - DNA, 25 bp, Homo sapien
cctgtgggccatgctactccgtgag

SEQ ID NO: 83713 - DNA, 25 bp, Homo sapien
cgggacgtaaacctccgtctcatta

SEQ ID NO: 83714 - DNA, 25 bp, Homo sapien
cgggacgtaaacgtccgtctcatta

SEQ ID NO: 83715 - DNA, 25 bp, Homo sapien
tcaacgtaagtacagatttcatgta

SEQ ID NO: 83716 - DNA, 25 bp, Homo sapien
tcaacgtaagtagagatttcatgta

SEQ ID NO: 83717 - DNA, 25 bp, Homo sapien
agcacgtacacacgaatgtggtttg

SEQ ID NO: 83718 - DNA, 25 bp, Homo sapien
agcacgtacacaggaatgtggtttg

SEQ ID NO: 83719 - DNA, 25 bp, Homo sapien
gtagtcgaccataaaacggattcta

SEQ ID NO: 83720 - DNA, 25 bp, Homo sapien
gtagtcgaccattaaacggattcta

SEQ ID NO: 83721 - DNA, 25 bp, Homo sapien
tgacagaccttttacccaacgtccg

SEQ ID NO: 83722 - DNA, 25 bp, Homo sapien
tgacagacctttaacccaacgtccg

SEQ ID NO: 83723 - DNA, 25 bp, Homo sapien
gagtacaaacctttaagttccttgt

SEQ ID NO: 83724 - DNA, 25 bp, Homo sapien
gagtacaaacctataagttccttgt

SEQ ID NO: 83725 - DNA, 25 bp, Homo sapien
ggacgagaaccctcatagtccttct

SEQ ID NO: 83726 - DNA, 25 bp, Homo sapien
ggacgagaacccacatagtccttct

SEQ ID NO: 83727 - DNA, 25 bp, Homo sapien
gacgagaaccctatacactcccgtc

SEQ ID NO: 83728 - DNA, 25 bp, Homo sapien
gacgagaaccctttacactcccgtc

SEQ ID NO: 83729 - DNA, 25 bp, Homo sapien
tcgggttctagcttctacacccaag

SEQ ID NO: 83730 - DNA, 25 bp, Homo sapien
tcgggttctagcatctacacccaag

SEQ ID NO: 83731 - DNA, 25 bp, Homo sapien
gaggaactctgacctcgaccgcaga

SEQ ID NO: 83732 - DNA, 25 bp, Homo sapien
gaggaactctgagctcgaccgcaga

SEQ ID NO: 83733 - DNA, 25 bp, Homo sapien
cgagggacccacgttacgctcggac

SEQ ID NO: 83734 - DNA, 25 bp, Homo sapien
cgagggacccaccttacgctcggac

SEQ ID NO: 83735 - DNA, 25 bp, Homo sapien
ggtccggtgacctcctcgactaggc

SEQ ID NO: 83736 - DNA, 25 bp, Homo sapien
ggtccggtgaccacctcgactaggc

SEQ ID NO: 83737 - DNA, 25 bp, Homo sapien
cctcataacgaggacccggacggac

SEQ ID NO: 83738 - DNA, 25 bp, Homo sapien
cctcataacgagcacccggacggac

SEQ ID NO: 83739 - DNA, 25 bp, Homo sapien
cctcctttgtaacactcgctagagc

SEQ ID NO: 83740 - DNA, 25 bp, Homo sapien
cctcctttgtaagactcgctagagc

SEQ ID NO: 83741 - DNA, 25 bp, Homo sapien
ggtccgacctctcgaccagagaggg

SEQ ID NO: 83742 - DNA, 25 bp, Homo sapien
ggtccgacctctggaccagagaggg

SEQ ID NO: 83743 - DNA, 25 bp, Homo sapien
tcagtccgcctgttcccaaagtcag

SEQ ID NO: 83744 - DNA, 25 bp, Homo sapien
tcagtccgcctgatcccaaagtcag

SEQ ID NO: 83745 - DNA, 25 bp, Homo sapien
ccgttccactggttcactaataagg

SEQ ID NO: 83746 - DNA, 25 bp, Homo sapien
ccgttccactggatcactaataagg

SEQ ID NO: 83747 - DNA, 25 bp, Homo sapien
gaagacataccgtacctgtcgaaga

SEQ ID NO: 83748 - DNA, 25 bp, Homo sapien
gaagacataccgaacctgtcgaaga

SEQ ID NO: 83749 - DNA, 25 bp, Homo sapien
aggaacgtataaaccagtcacaaac

SEQ ID NO: 83750 - DNA, 25 bp, Homo sapien
aggaacgtataatccagtcacaaac

SEQ ID NO: 83751 - DNA, 25 bp, Homo sapien
acgtaatcaaaaactttacatatag

SEQ ID NO: 83752 - DNA, 25 bp, Homo sapien
acgtaatcaaaatctttacatatag

SEQ ID NO: 83753 - DNA, 25 bp, Homo sapien
gggtaatcccaccttctggtatagg

SEQ ID NO: 83754 - DNA, 25 bp, Homo sapien
gggtaatcccacgttctggtatagg

SEQ ID NO: 83755 - DNA, 25 bp, Homo sapien
gttctttgccgcaccgcgtcgagga

SEQ ID NO: 83756 - DNA, 25 bp, Homo sapien
gttctttgccgctccgcgtcgagga

SEQ ID NO: 83757 - DNA, 25 bp, Homo sapien
tcactctcgctagtcgaggccgggc

SEQ ID NO: 83758 - DNA, 25 bp, Homo sapien
tcactctcgctactcgaggccgggc

SEQ ID NO: 83759 - DNA, 25 bp, Homo sapien
tctctcgcacgcacgggcgtgtgct

SEQ ID NO: 83760 - DNA, 25 bp, Homo sapien
tctctcgcacgctcgggcgtgtgct

SEQ ID NO: 83761 - DNA, 25 bp, Homo sapien
cgcgattgtccactcgggtcctcag

SEQ ID NO: 83762 - DNA, 25 bp, Homo sapien
cgcgattgtccagtcgggtcctcag

SEQ ID NO: 83763 - DNA, 25 bp, Homo sapien
caccttctacccagggggtccgaga

SEQ ID NO: 83764 - DNA, 25 bp, Homo sapien
caccttctaccctgggggtccgaga

SEQ ID NO: 83765 - DNA, 25 bp, Homo sapien
ccagaagcagggtgtctgcgccgaa

SEQ ID NO: 83766 - DNA, 25 bp, Homo sapien
ccagaagcagggagtctgcgccgaa

SEQ ID NO: 83767 - DNA, 25 bp, Homo sapien
ggaggtcgacgtcttcagttcgacg

SEQ ID NO: 83768 - DNA, 25 bp, Homo sapien
ggaggtcgacgtgttcagttcgacg

SEQ ID NO: 83769 - DNA, 25 bp, Homo sapien
aagtccggagttcgttttggtttcg

SEQ ID NO: 83770 - DNA, 25 bp, Homo sapien
aagtccggagttggttttggtttcg

SEQ ID NO: 83771 - DNA, 25 bp, Homo sapien
cggtgtttttgactttcgtggttcg

SEQ ID NO: 83772 - DNA, 25 bp, Homo sapien
cggtgtttttgagtttcgtggttcg

SEQ ID NO: 83773 - DNA, 25 bp, Homo sapien
tacgtcggtccagtttcacctccgt

SEQ ID NO: 83774 - DNA, 25 bp, Homo sapien
tacgtcggtccactttcacctccgt

SEQ ID NO: 83775 - DNA, 25 bp, Homo sapien
gaactggacagctttgacacgaccg

SEQ ID NO: 83776 - DNA, 25 bp, Homo sapien
gaactggacagcattgacacgaccg

SEQ ID NO: 83777 - DNA, 25 bp, Homo sapien
gtcgttagattatatctcttgtgtc

SEQ ID NO: 83778 - DNA, 25 bp, Homo sapien
gtcgttagattaaatctcttgtgtc

SEQ ID NO: 83779 - DNA, 25 bp, Homo sapien
catagggacttagtaactcttttcg

SEQ ID NO: 83780 - DNA, 25 bp, Homo sapien
catagggacttactaactcttttcg

SEQ ID NO: 83781 - DNA, 25 bp, Homo sapien
agaccaaggtttccaagttcggtcc

SEQ ID NO: 83782 - DNA, 25 bp, Homo sapien
agaccaaggtttgcaagttcggtcc

SEQ ID NO: 83783 - DNA, 25 bp, Homo sapien
ctcaaggtccggtaccatgtcgaac

SEQ ID NO: 83784 - DNA, 25 bp, Homo sapien
ctcaaggtccggaaccatgtcgaac

SEQ ID NO: 83785 - DNA, 25 bp, Homo sapien
agcggggccacgaacctttctacct

SEQ ID NO: 83786 - DNA, 25 bp, Homo sapien
agcggggccacgtacctttctacct

SEQ ID NO: 83787 - DNA, 25 bp, Homo sapien
ctaagtgcaacgacacggaccggtc

SEQ ID NO: 83788 - DNA, 25 bp, Homo sapien
ctaagtgcaacgtcacggaccggtc

SEQ ID NO: 83789 - DNA, 25 bp, Homo sapien
acggggagttcgtccgttacccgtc

SEQ ID NO: 83790 - DNA, 25 bp, Homo sapien
acggggagttcgaccgttacccgtc

SEQ ID NO: 83791 - DNA, 25 bp, Homo sapien
actgggtaccgcagacctgatcctc

SEQ ID NO: 83792 - DNA, 25 bp, Homo sapien
actgggtaccgctgacctgatcctc

SEQ ID NO: 83793 - DNA, 25 bp, Homo sapien
tacagggcaagactttccggccgtg

SEQ ID NO: 83794 - DNA, 25 bp, Homo sapien
tacagggcaagagtttccggccgtg

SEQ ID NO: 83795 - DNA, 25 bp, Homo sapien
gaattaaagtgatgggttcttctcc

SEQ ID NO: 83796 - DNA, 25 bp, Homo sapien
gaattaaagtgaagggttcttctcc

SEQ ID NO: 83797 - DNA, 25 bp, Homo sapien
atgaaatgtacctttctttatcgag

SEQ ID NO: 83798 - DNA, 25 bp, Homo sapien
atgaaatgtaccattctttatcgag

SEQ ID NO: 83799 - DNA, 25 bp, Homo sapien
agtggaacggtcaccttctttcctc

SEQ ID NO: 83800 - DNA, 25 bp, Homo sapien
agtggaacggtctccttctttcctc

SEQ ID NO: 83801 - DNA, 25 bp, Homo sapien
gtggaagaggatgttacttctcctt

SEQ ID NO: 83802 - DNA, 25 bp, Homo sapien
gtggaagaggatcttacttctcctt

SEQ ID NO: 83803 - DNA, 25 bp, Homo sapien
tgtggaagttatctttgtcgacagc

SEQ ID NO: 83804 - DNA, 25 bp, Homo sapien
tgtggaagttatgtttgtcgacagc

SEQ ID NO: 83805 - DNA, 25 bp, Homo sapien
tcttggggtttgttccgtagtggtc

SEQ ID NO: 83806 - DNA, 25 bp, Homo sapien
tcttggggtttgatccgtagtggtc

SEQ ID NO: 83807 - DNA, 25 bp, Homo sapien
atggttggtttttgtcctacgattc

SEQ ID NO: 83808 - DNA, 25 bp, Homo sapien
atggttggttttagtcctacgattc

SEQ ID NO: 83809 - DNA, 25 bp, Homo sapien
agtctaggtcttttgtctcattctg

SEQ ID NO: 83810 - DNA, 25 bp, Homo sapien
agtctaggtcttatgtctcattctg

SEQ ID NO: 83811 - DNA, 25 bp, Homo sapien
tattgggaccactgtcacacatgtt

SEQ ID NO: 83812 - DNA, 25 bp, Homo sapien
tattgggaccacagtcacacatgtt

SEQ ID NO: 83813 - DNA, 25 bp, Homo sapien
gatgggccctacagaaagacgacag

SEQ ID NO: 83814 - DNA, 25 bp, Homo sapien
gatgggccctactgaaagacgacag

SEQ ID NO: 83815 - DNA, 25 bp, Homo sapien
agtcgctctccgaggaccggcgcga

SEQ ID NO: 83816 - DNA, 25 bp, Homo sapien
agtcgctctccgtggaccggcgcga

SEQ ID NO: 83817 - DNA, 25 bp, Homo sapien
acgagaccgggtcaggaccccgaga

SEQ ID NO: 83818 - DNA, 25 bp, Homo sapien
acgagaccgggtgaggaccccgaga

SEQ ID NO: 83819 - DNA, 25 bp, Homo sapien
cgtaactgggactcgacaccgcgga

SEQ ID NO: 83820 - DNA, 25 bp, Homo sapien
cgtaactgggacacgacaccgcgga

SEQ ID NO: 83821 - DNA, 25 bp, Homo sapien
agtaacgtagctctgtcaacccaca

SEQ ID NO: 83822 - DNA, 25 bp, Homo sapien
agtaacgtagctgtgtcaacccaca

SEQ ID NO: 83823 - DNA, 25 bp, Homo sapien
gactcgtaggtacgacccataccca

SEQ ID NO: 83824 - DNA, 25 bp, Homo sapien
gactcgtaggtaggacccataccca

SEQ ID NO: 83825 - DNA, 25 bp, Homo sapien
gtacttgagtcctgtccataccaat

SEQ ID NO: 83826 - DNA, 25 bp, Homo sapien
gtacttgagtccagtccataccaat

SEQ ID NO: 83827 - DNA, 25 bp, Homo sapien
tttaaaagtcagttgacgacgacgt

SEQ ID NO: 83828 - DNA, 25 bp, Homo sapien
tttaaaagtcagatgacgacgacgt

SEQ ID NO: 83829 - DNA, 25 bp, Homo sapien
ggacttgtagaagtcattagtcgaa

SEQ ID NO: 83830 - DNA, 25 bp, Homo sapien
ggacttgtagaactcattagtcgaa

SEQ ID NO: 83831 - DNA, 25 bp, Homo sapien
agtctgacatctctgttaatactag

SEQ ID NO: 83832 - DNA, 25 bp, Homo sapien
agtctgacatctgtgttaatactag

SEQ ID NO: 83833 - DNA, 25 bp, Homo sapien
agtcgttaattcttctgtactaaag

SEQ ID NO: 83834 - DNA, 25 bp, Homo sapien
agtcgttaattcatctgtactaaag

SEQ ID NO: 83835 - DNA, 25 bp, Homo sapien
cagtcggtcacttttctaggtaaag

SEQ ID NO: 83836 - DNA, 25 bp, Homo sapien
cagtcggtcactattctaggtaaag

SEQ ID NO: 83837 - DNA, 25 bp, Homo sapien
agatcatgtttcgtattcttcaaag

SEQ ID NO: 83838 - DNA, 25 bp, Homo sapien
agatcatgtttcctattcttcaaag

SEQ ID NO: 83839 - DNA, 25 bp, Homo sapien
catccttttcgtcgttagtaccaaa

SEQ ID NO: 83840 - DNA, 25 bp, Homo sapien
catccttttcgtggttagtaccaaa

SEQ ID NO: 83841 - DNA, 25 bp, Homo sapien
cgtggttctcacacgactctcgaca

SEQ ID NO: 83842 - DNA, 25 bp, Homo sapien
cgtggttctcactcgactctcgaca

SEQ ID NO: 83843 - DNA, 25 bp, Homo sapien
attttattggactcccagtgtcctt

SEQ ID NO: 83844 - DNA, 25 bp, Homo sapien
attttattggacacccagtgtcctt

SEQ ID NO: 83845 - DNA, 25 bp, Homo sapien
ttgtcactgtatgaaaccctttttg

SEQ ID NO: 83846 - DNA, 25 bp, Homo sapien
ttgtcactgtatcaaaccctttttg

SEQ ID NO: 83847 - DNA, 25 bp, Homo sapien
ggttccctgactatttcctttttcg

SEQ ID NO: 83848 - DNA, 25 bp, Homo sapien
ggttccctgactttttcctttttcg

SEQ ID NO: 83849 - DNA, 25 bp, Homo sapien
gtccgaggacaattttctccatttt

SEQ ID NO: 83850 - DNA, 25 bp, Homo sapien
gtccgaggacaaatttctccatttt

SEQ ID NO: 83851 - DNA, 25 bp, Homo sapien
ctactgaggaatttatcacattgta

SEQ ID NO: 83852 - DNA, 25 bp, Homo sapien
ctactgaggaatatatcacattgta

SEQ ID NO: 83853 - DNA, 25 bp, Homo sapien
taagagggatactatcacacttctg

SEQ ID NO: 83854 - DNA, 25 bp, Homo sapien
taagagggatacaatcacacttctg

SEQ ID NO: 83855 - DNA, 25 bp, Homo sapien
acgataatgatacgttcactgtttc

SEQ ID NO: 83856 - DNA, 25 bp, Homo sapien
acgataatgataggttcactgtttc

SEQ ID NO: 83857 - DNA, 25 bp, Homo sapien
actttatccaagttcttagttcgag

SEQ ID NO: 83858 - DNA, 25 bp, Homo sapien
actttatccaagatcttagttcgag

SEQ ID NO: 83859 - DNA, 25 bp, Homo sapien
ggaagatgagttcaaagatttcctc

SEQ ID NO: 83860 - DNA, 25 bp, Homo sapien
ggaagatgagttgaaagatttcctc

SEQ ID NO: 83861 - DNA, 25 bp, Homo sapien
cactgagttgaggaaagaccgacat

SEQ ID NO: 83862 - DNA, 25 bp, Homo sapien
cactgagttgagcaaagaccgacat

SEQ ID NO: 83863 - DNA, 25 bp, Homo sapien
aaactaagagggatactatcacact

SEQ ID NO: 83864 - DNA, 25 bp, Homo sapien
aaactaagagggttactatcacact

SEQ ID NO: 83865 - DNA, 25 bp, Homo sapien
atgataaaccatgtctctaataaat

SEQ ID NO: 83866 - DNA, 25 bp, Homo sapien
atgataaaccatctctctaataaat

SEQ ID NO: 83867 - DNA, 25 bp, Homo sapien
atgagtactcacttttaagttaatt

SEQ ID NO: 83868 - DNA, 25 bp, Homo sapien
atgagtactcacatttaagttaatt

SEQ ID NO: 83869 - DNA, 25 bp, Homo sapien
tagatacaacaaggagtactacctt

SEQ ID NO: 83870 - DNA, 25 bp, Homo sapien
tagatacaacaacgagtactacctt

SEQ ID NO: 83871 - DNA, 25 bp, Homo sapien
tgggaacatacaagaaaacttttac

SEQ ID NO: 83872 - DNA, 25 bp, Homo sapien
tgggaacatacatgaaaacttttac

SEQ ID NO: 83873 - DNA, 25 bp, Homo sapien
tttgtggctcctgaaactactcccc

SEQ ID NO: 83874 - DNA, 25 bp, Homo sapien
tttgtggctcctcaaactactcccc

SEQ ID NO: 83875 - DNA, 25 bp, Homo sapien
gtgacaaataagtttactgtccgtc

SEQ ID NO: 83876 - DNA, 25 bp, Homo sapien
gtgacaaataagattactgtccgtc

SEQ ID NO: 83877 - DNA, 25 bp, Homo sapien
tatgtgcaaatttatgtacagcctc

SEQ ID NO: 83878 - DNA, 25 bp, Homo sapien
tatgtgcaaattaatgtacagcctc

SEQ ID NO: 83879 - DNA, 25 bp, Homo sapien
tgtctgtggaaataaatctaatcac

SEQ ID NO: 83880 - DNA, 25 bp, Homo sapien
tgtctgtggaaaaaaatctaatcac

SEQ ID NO: 83881 - DNA, 25 bp, Homo sapien
ctactggtggagttttcccagcgtc

SEQ ID NO: 83882 - DNA, 25 bp, Homo sapien
ctactggtggagatttcccagcgtc

SEQ ID NO: 83883 - DNA, 25 bp, Homo sapien
tgtgggtcgcgtctcctgtcgtctc

SEQ ID NO: 83884 - DNA, 25 bp, Homo sapien
tgtgggtcgcgtgtcctgtcgtctc

SEQ ID NO: 83885 - DNA, 25 bp, Homo sapien
ttctaacttgcgactgaggacgtcc

SEQ ID NO: 83886 - DNA, 25 bp, Homo sapien
ttctaacttgcgtctgaggacgtcc

SEQ ID NO: 83887 - DNA, 25 bp, Homo sapien
tgacgaagatggtgtgtgtcgcttc

SEQ ID NO: 83888 - DNA, 25 bp, Homo sapien
tgacgaagatggagtgtgtcgcttc

SEQ ID NO: 83889 - DNA, 25 bp, Homo sapien
aagacgaagagtaacgttgacatct

SEQ ID NO: 83890 - DNA, 25 bp, Homo sapien
aagacgaagagttacgttgacatct

SEQ ID NO: 83891 - DNA, 25 bp, Homo sapien
tcgtcccggaagatgacttcctcac

SEQ ID NO: 83892 - DNA, 25 bp, Homo sapien
tcgtcccggaagttgacttcctcac

SEQ ID NO: 83893 - DNA, 25 bp, Homo sapien
tcgacgcaggaaggaaagacccgac

SEQ ID NO: 83894 - DNA, 25 bp, Homo sapien
tcgacgcaggaacgaaagacccgac

SEQ ID NO: 83895 - DNA, 25 bp, Homo sapien
gtgtcgaccctagtcgggacccgac

SEQ ID NO: 83896 - DNA, 25 bp, Homo sapien
gtgtcgaccctactcgggacccgac

SEQ ID NO: 83897 - DNA, 25 bp, Homo sapien
gtcacgaaacaattgtgacacacac

SEQ ID NO: 83898 - DNA, 25 bp, Homo sapien
gtcacgaaacaaatgtgacacacac

SEQ ID NO: 83899 - DNA, 25 bp, Homo sapien
gggaatgagtcgaacttgaacagcg

SEQ ID NO: 83900 - DNA, 25 bp, Homo sapien
gggaatgagtcgtacttgaacagcg

SEQ ID NO: 83901 - DNA, 25 bp, Homo sapien
ttgtctatgagacgtatttctcctt

SEQ ID NO: 83902 - DNA, 25 bp, Homo sapien
ttgtctatgagaggtatttctcctt

SEQ ID NO: 83903 - DNA, 25 bp, Homo sapien
cactttggttctgtgataaggtttc

SEQ ID NO: 83904 - DNA, 25 bp, Homo sapien
cactttggttctctgataaggtttc

SEQ ID NO: 83905 - DNA, 25 bp, Homo sapien
ggtcctgctagaggtgtcgtttact

SEQ ID NO: 83906 - DNA, 25 bp, Homo sapien
ggtcctgctagacgtgtcgtttact

SEQ ID NO: 83907 - DNA, 25 bp, Homo sapien
tgacgttgtcgttttgggacgtcgt

SEQ ID NO: 83908 - DNA, 25 bp, Homo sapien
tgacgttgtcgtattgggacgtcgt

SEQ ID NO: 83909 - DNA, 25 bp, Homo sapien
gcgagtctcacaggtccgggagact

SEQ ID NO: 83910 - DNA, 25 bp, Homo sapien
gcgagtctcacacgtccgggagact

SEQ ID NO: 83911 - DNA, 25 bp, Homo sapien
gcgtgatttcccaatctggttgggt

SEQ ID NO: 83912 - DNA, 25 bp, Homo sapien
gcgtgatttccctatctggttgggt

SEQ ID NO: 83913 - DNA, 25 bp, Homo sapien
gaaaattaccccttgttgaacgggt

SEQ ID NO: 83914 - DNA, 25 bp, Homo sapien
gaaaattaccccatgttgaacgggt

SEQ ID NO: 83915 - DNA, 25 bp, Homo sapien
agccgtttccactataaacactagg

SEQ ID NO: 83916 - DNA, 25 bp, Homo sapien
agccgtttccacaataaacactagg

SEQ ID NO: 83917 - DNA, 25 bp, Homo sapien
ctcttctcttctcagaagacctcgg

SEQ ID NO: 83918 - DNA, 25 bp, Homo sapien
ctcttctcttctgagaagacctcgg

SEQ ID NO: 83919 - DNA, 25 bp, Homo sapien
ccttccgatcgaggtacagttcaag

SEQ ID NO: 83920 - DNA, 25 bp, Homo sapien
ccttccgatcgacgtacagttcaag

SEQ ID NO: 83921 - DNA, 25 bp, Homo sapien
ccgttgctgtagacggttgtacaca

SEQ ID NO: 83922 - DNA, 25 bp, Homo sapien
ccgttgctgtagtcggttgtacaca

SEQ ID NO: 83923 - DNA, 25 bp, Homo sapien
gaccggacggtgtccatgtactata

SEQ ID NO: 83924 - DNA, 25 bp, Homo sapien
gaccggacggtgaccatgtactata

SEQ ID NO: 83925 - DNA, 25 bp, Homo sapien
tcggtgtcgccgacctgtcgatcta

SEQ ID NO: 83926 - DNA, 25 bp, Homo sapien
tcggtgtcgccgtcctgtcgatcta

SEQ ID NO: 83927 - DNA, 25 bp, Homo sapien
tcttcgtccacgacgtcttcaactg

SEQ ID NO: 83928 - DNA, 25 bp, Homo sapien
tcttcgtccacgtcgtcttcaactg

SEQ ID NO: 83929 - DNA, 25 bp, Homo sapien
tggacttcttccaacagttccaagg

SEQ ID NO: 83930 - DNA, 25 bp, Homo sapien
tggacttcttcctacagttccaagg

SEQ ID NO: 83931 - DNA, 25 bp, Homo sapien
tggactgctggttcggcacgggaac

SEQ ID NO: 83932 - DNA, 25 bp, Homo sapien
tggactgctggtacggcacgggaac

SEQ ID NO: 83933 - DNA, 25 bp, Homo sapien
gacgggaccgacaggtcagggagac

SEQ ID NO: 83934 - DNA, 25 bp, Homo sapien
gacgggaccgactggtcagggagac

SEQ ID NO: 83935 - DNA, 25 bp, Homo sapien
aagacgtactcttggaagcgtgaga

SEQ ID NO: 83936 - DNA, 25 bp, Homo sapien
aagacgtactctaggaagcgtgaga

SEQ ID NO: 83937 - DNA, 25 bp, Homo sapien
caccgcagtcgcaggaaccgtggtc

SEQ ID NO: 83938 - DNA, 25 bp, Homo sapien
caccgcagtcgctggaaccgtggtc

SEQ ID NO: 83939 - DNA, 25 bp, Homo sapien
ctcacgtgcgggtagagacggtact

SEQ ID NO: 83940 - DNA, 25 bp, Homo sapien
ctcacgtgcgggaagagacggtact

SEQ ID NO: 83941 - DNA, 25 bp, Homo sapien
tcgaaagtccgtggaggacgagaac

SEQ ID NO: 83942 - DNA, 25 bp, Homo sapien
tcgaaagtccgtcgaggacgagaac

SEQ ID NO: 83943 - DNA, 25 bp, Homo sapien
gacaaagaagacgtacgaggcactc

SEQ ID NO: 83944 - DNA, 25 bp, Homo sapien
gacaaagaagacctacgaggcactc

SEQ ID NO: 83945 - DNA, 25 bp, Homo sapien
aaactaagagggactgacggtcaca

SEQ ID NO: 83946 - DNA, 25 bp, Homo sapien
aaactaagagggtctgacggtcaca

SEQ ID NO: 83947 - DNA, 25 bp, Homo sapien
accctggaccggacgtgggtcagac

SEQ ID NO: 83948 - DNA, 25 bp, Homo sapien
accctggaccggtcgtgggtcagac

SEQ ID NO: 83949 - DNA, 25 bp, Homo sapien
cggtctcttaccagaccgtgggaaa

SEQ ID NO: 83950 - DNA, 25 bp, Homo sapien
cggtctcttacctgaccgtgggaaa

SEQ ID NO: 83951 - DNA, 25 bp, Homo sapien
cacgaggaccttgcctgtaggaaga

SEQ ID NO: 83952 - DNA, 25 bp, Homo sapien
cacgaggaccttccctgtaggaaga

SEQ ID NO: 83953 - DNA, 25 bp, Homo sapien
aaaaaaacttactccttcgagagaa

SEQ ID NO: 83954 - DNA, 25 bp, Homo sapien
aaaaaaacttacaccttcgagagaa

SEQ ID NO: 83955 - DNA, 25 bp, Homo sapien
tctatactctacttgtcttagagga

SEQ ID NO: 83956 - DNA, 25 bp, Homo sapien
tctatactctacatgtcttagagga

SEQ ID NO: 83957 - DNA, 25 bp, Homo sapien
gacacttactctgtgcagtcctcat

SEQ ID NO: 83958 - DNA, 25 bp, Homo sapien
gacacttactctctgcagtcctcat

SEQ ID NO: 83959 - DNA, 25 bp, Homo sapien
caactaccacttatttgtccgtaac

SEQ ID NO: 83960 - DNA, 25 bp, Homo sapien
caactaccacttttttgtccgtaac

SEQ ID NO: 83961 - DNA, 25 bp, Homo sapien
agtctcatctttctcgttctcaggt

SEQ ID NO: 83962 - DNA, 25 bp, Homo sapien
agtctcatctttgtcgttctcaggt

SEQ ID NO: 83963 - DNA, 25 bp, Homo sapien
ggttacttaagttccgtctaaatgg

SEQ ID NO: 83964 - DNA, 25 bp, Homo sapien
ggttacttaagtaccgtctaaatgg

SEQ ID NO: 83965 - DNA, 25 bp, Homo sapien
tgtgtaatccttgaaacgttgacta

SEQ ID NO: 83966 - DNA, 25 bp, Homo sapien
tgtgtaatccttcaaacgttgacta

SEQ ID NO: 83967 - DNA, 25 bp, Homo sapien
ctggggtcactacaaaggtaactct

SEQ ID NO: 83968 - DNA, 25 bp, Homo sapien
ctggggtcactagaaaggtaactct

SEQ ID NO: 83969 - DNA, 25 bp, Homo sapien
cggtaaaggtggaactataggtcta

SEQ ID NO: 83970 - DNA, 25 bp, Homo sapien
cggtaaaggtggtactataggtcta

SEQ ID NO: 83971 - DNA, 25 bp, Homo sapien
tcacggacccggtcaatcgtggtca

SEQ ID NO: 83972 - DNA, 25 bp, Homo sapien
tcacggacccggacaatcgtggtca

SEQ ID NO: 83973 - DNA, 25 bp, Homo sapien
cccagtctccggcggatctcggcct

SEQ ID NO: 83974 - DNA, 25 bp, Homo sapien
cccagtctccgggggatctcggcct

SEQ ID NO: 83975 - DNA, 25 bp, Homo sapien
gtctgtccggtggactccgcgtgtc

SEQ ID NO: 83976 - DNA, 25 bp, Homo sapien
gtctgtccggtgcactccgcgtgtc

SEQ ID NO: 83977 - DNA, 25 bp, Homo sapien
ggagtattccggagactccgggtct

SEQ ID NO: 83978 - DNA, 25 bp, Homo sapien
ggagtattccggtgactccgggtct

SEQ ID NO: 83979 - DNA, 25 bp, Homo sapien
tgtatttctgtagtcttcccgtcgt

SEQ ID NO: 83980 - DNA, 25 bp, Homo sapien
tgtatttctgtactcttcccgtcgt

SEQ ID NO: 83981 - DNA, 25 bp, Homo sapien
tgacctatctgtgtctgtttcgtct

SEQ ID NO: 83982 - DNA, 25 bp, Homo sapien
tgacctatctgtctctgtttcgtct

SEQ ID NO: 83983 - DNA, 25 bp, Homo sapien
tggaatccgtgtctcgtgatagatt

SEQ ID NO: 83984 - DNA, 25 bp, Homo sapien
tggaatccgtgtgtcgtgatagatt

SEQ ID NO: 83985 - DNA, 25 bp, Homo sapien
cgagtaggtctttcttaggtttgac

SEQ ID NO: 83986 - DNA, 25 bp, Homo sapien
cgagtaggtcttacttaggtttgac

SEQ ID NO: 83987 - DNA, 25 bp, Homo sapien
ctccggggtttaacatgtgttatga

SEQ ID NO: 83988 - DNA, 25 bp, Homo sapien
ctccggggtttatcatgtgttatga

SEQ ID NO: 83989 - DNA, 25 bp, Homo sapien
cgaaggtatccctgtagtatagaat

SEQ ID NO: 83990 - DNA, 25 bp, Homo sapien
cgaaggtatcccagtagtatagaat

SEQ ID NO: 83991 - DNA, 25 bp, Homo sapien
cacacaccgagatgtcgttaatatt

SEQ ID NO: 83992 - DNA, 25 bp, Homo sapien
cacacaccgagaagtcgttaatatt

SEQ ID NO: 83993 - DNA, 25 bp, Homo sapien
ccctcgtcggagtttctactacttt

SEQ ID NO: 83994 - DNA, 25 bp, Homo sapien
ccctcgtcggagattctactacttt

SEQ ID NO: 83995 - DNA, 25 bp, Homo sapien
tcttctgatttcgaggtcatctgtt

SEQ ID NO: 83996 - DNA, 25 bp, Homo sapien
tcttctgatttccaggtcatctgtt

SEQ ID NO: 83997 - DNA, 25 bp, Homo sapien
acttttaatgtcctctgtgaatcat

SEQ ID NO: 83998 - DNA, 25 bp, Homo sapien
acttttaatgtcgtctgtgaatcat

SEQ ID NO: 83999 - DNA, 25 bp, Homo sapien
ctgttaatactcgtgttgacatcag

SEQ ID NO: 84000 - DNA, 25 bp, Homo sapien
ctgttaatactcctgttgacatcag

SEQ ID NO: 84001 - DNA, 25 bp, Homo sapien
acgcacctagttcacagttgccctt

SEQ ID NO: 84002 - DNA, 25 bp, Homo sapien
acgcacctagttgacagttgccctt

SEQ ID NO: 84003 - DNA, 25 bp, Homo sapien
cagtgtcttgacggtaccgccctat

SEQ ID NO: 84004 - DNA, 25 bp, Homo sapien
cagtgtcttgaccgtaccgccctat

SEQ ID NO: 84005 - DNA, 25 bp, Homo sapien
gtccactgtccgtggaccgtccctt

SEQ ID NO: 84006 - DNA, 25 bp, Homo sapien
gtccactgtccgaggaccgtccctt

SEQ ID NO: 84007 - DNA, 25 bp, Homo sapien
ctgccttatttgtgttgtaactacc

SEQ ID NO: 84008 - DNA, 25 bp, Homo sapien
ctgccttatttgagttgtaactacc

SEQ ID NO: 84009 - DNA, 25 bp, Homo sapien
tggttattaagactttgaaccgtac

SEQ ID NO: 84010 - DNA, 25 bp, Homo sapien
tggttattaagagtttgaaccgtac

SEQ ID NO: 84011 - DNA, 25 bp, Homo sapien
ggatcttaatgatctccagtcctac

SEQ ID NO: 84012 - DNA, 25 bp, Homo sapien
ggatcttaatgaactccagtcctac

SEQ ID NO: 84013 - DNA, 25 bp, Homo sapien
ccgttaaacatgaacggattacttt

SEQ ID NO: 84014 - DNA, 25 bp, Homo sapien
ccgttaaacatgtacggattacttt

SEQ ID NO: 84015 - DNA, 25 bp, Homo sapien
aaagtacaagactagacaatcttgt

SEQ ID NO: 84016 - DNA, 25 bp, Homo sapien
aaagtacaagacaagacaatcttgt

SEQ ID NO: 84017 - DNA, 25 bp, Homo sapien
aactactataaaaccttctacttct

SEQ ID NO: 84018 - DNA, 25 bp, Homo sapien
aactactataaatccttctacttct

SEQ ID NO: 84019 - DNA, 25 bp, Homo sapien
acaactacggtaaagttatcactga

SEQ ID NO: 84020 - DNA, 25 bp, Homo sapien
acaactacggtatagttatcactga

SEQ ID NO: 84021 - DNA, 25 bp, Homo sapien
atctacacaccattgaccaatcgag

SEQ ID NO: 84022 - DNA, 25 bp, Homo sapien
atctacacaccaatgaccaatcgag

SEQ ID NO: 84023 - DNA, 25 bp, Homo sapien
ttgttaactcgtagtgacctttgat

SEQ ID NO: 84024 - DNA, 25 bp, Homo sapien
ttgttaactcgttgtgacctttgat

SEQ ID NO: 84025 - DNA, 25 bp, Homo sapien
gttcgaaacctaagtgtaactttta

SEQ ID NO: 84026 - DNA, 25 bp, Homo sapien
gttcgaaacctatgtgtaactttta

SEQ ID NO: 84027 - DNA, 25 bp, Homo sapien
ggttcgaaactccttgtaattctaa

SEQ ID NO: 84028 - DNA, 25 bp, Homo sapien
ggttcgaaactcgttgtaattctaa

SEQ ID NO: 84029 - DNA, 25 bp, Homo sapien
ttaaagactgtatgtgaattacaca

SEQ ID NO: 84030 - DNA, 25 bp, Homo sapien
ttaaagactgtaagtgaattacaca

SEQ ID NO: 84031 - DNA, 25 bp, Homo sapien
agtaacttacatcagaaaaacctac

SEQ ID NO: 84032 - DNA, 25 bp, Homo sapien
agtaacttacatgagaaaaacctac

SEQ ID NO: 84033 - DNA, 25 bp, Homo sapien
ttgtaggtctccagaacaaggattc

SEQ ID NO: 84034 - DNA, 25 bp, Homo sapien
ttgtaggtctcctgaacaaggattc

SEQ ID NO: 84035 - DNA, 25 bp, Homo sapien
gtgtgtcacaacgttctagaacttg

SEQ ID NO: 84036 - DNA, 25 bp, Homo sapien
gtgtgtcacaaccttctagaacttg

SEQ ID NO: 84037 - DNA, 25 bp, Homo sapien
taagttcataactcttacgggtcat

SEQ ID NO: 84038 - DNA, 25 bp, Homo sapien
taagttcataacacttacgggtcat

SEQ ID NO: 84039 - DNA, 25 bp, Homo sapien
atacgagtggtatgaggagagccct

SEQ ID NO: 84040 - DNA, 25 bp, Homo sapien
atacgagtggtaagaggagagccct

SEQ ID NO: 84041 - DNA, 25 bp, Homo sapien
cggtcccctagagagggtcgtcgcc

SEQ ID NO: 84042 - DNA, 25 bp, Homo sapien
cggtcccctagacagggtcgtcgcc

SEQ ID NO: 84043 - DNA, 25 bp, Homo sapien
ctaagggcgcggcgacgaccctctc

SEQ ID NO: 84044 - DNA, 25 bp, Homo sapien
ctaagggcgcggggacgaccctctc

SEQ ID NO: 84045 - DNA, 25 bp, Homo sapien
ccaagttgtgtagtcacgttttcct

SEQ ID NO: 84046 - DNA, 25 bp, Homo sapien
ccaagttgtgtactcacgttttcct

SEQ ID NO: 84047 - DNA, 25 bp, Homo sapien
ctctttggtgtccacgtttctaagt

SEQ ID NO: 84048 - DNA, 25 bp, Homo sapien
ctctttggtgtcgacgtttctaagt

SEQ ID NO: 84049 - DNA, 25 bp, Homo sapien
cgacttttggtgtttatggtacaac

SEQ ID NO: 84050 - DNA, 25 bp, Homo sapien
cgacttttggtgattatggtacaac

SEQ ID NO: 84051 - DNA, 25 bp, Homo sapien
agttctgttgactttgttgacgtct

SEQ ID NO: 84052 - DNA, 25 bp, Homo sapien
agttctgttgacattgttgacgtct

SEQ ID NO: 84053 - DNA, 25 bp, Homo sapien
agaagttcctaatcgatttatgagc

SEQ ID NO: 84054 - DNA, 25 bp, Homo sapien
agaagttcctaaacgatttatgagc

SEQ ID NO: 84055 - DNA, 25 bp, Homo sapien
gtattttgcctactttcatatagtg

SEQ ID NO: 84056 - DNA, 25 bp, Homo sapien
gtattttgcctagtttcatatagtg

SEQ ID NO: 84057 - DNA, 25 bp, Homo sapien
aactcgtacgtgttgtctaaagcgt

SEQ ID NO: 84058 - DNA, 25 bp, Homo sapien
aactcgtacgtgatgtctaaagcgt

SEQ ID NO: 84059 - DNA, 25 bp, Homo sapien
cgaaagaggacttcttggtatcaat

SEQ ID NO: 84060 - DNA, 25 bp, Homo sapien
cgaaagaggactacttggtatcaat

SEQ ID NO: 84061 - DNA, 25 bp, Homo sapien
acatgtttagagacatgtttcgaac

SEQ ID NO: 84062 - DNA, 25 bp, Homo sapien
acatgtttagagtcatgtttcgaac

SEQ ID NO: 84063 - DNA, 25 bp, Homo sapien
attagtacttcgttcatttcagaga

SEQ ID NO: 84064 - DNA, 25 bp, Homo sapien
attagtacttcgatcatttcagaga

SEQ ID NO: 84065 - DNA, 25 bp, Homo sapien
gcaccggtcagtccacgtcgacgag

SEQ ID NO: 84066 - DNA, 25 bp, Homo sapien
gcaccggtcagtgcacgtcgacgag

SEQ ID NO: 84067 - DNA, 25 bp, Homo sapien
gtgactaaggtcgaaacgacggtac

SEQ ID NO: 84068 - DNA, 25 bp, Homo sapien
gtgactaaggtccaaacgacggtac

SEQ ID NO: 84069 - DNA, 25 bp, Homo sapien
gtggtgacaccgatggtcaagaaga

SEQ ID NO: 84070 - DNA, 25 bp, Homo sapien
gtggtgacaccgttggtcaagaaga

SEQ ID NO: 84071 - DNA, 25 bp, Homo sapien
acgtcgtcacgtgctcgagacacga

SEQ ID NO: 84072 - DNA, 25 bp, Homo sapien
acgtcgtcacgtcctcgagacacga

SEQ ID NO: 84073 - DNA, 25 bp, Homo sapien
atcggttacgtgacatctcaacaga

SEQ ID NO: 84074 - DNA, 25 bp, Homo sapien
atcggttacgtgtcatctcaacaga

SEQ ID NO: 84075 - DNA, 25 bp, Homo sapien
atcagttcgtagtccttcgatgtaa

SEQ ID NO: 84076 - DNA, 25 bp, Homo sapien
atcagttcgtagaccttcgatgtaa

SEQ ID NO: 84077 - DNA, 25 bp, Homo sapien
taggatatctgatcctgaacttgta

SEQ ID NO: 84078 - DNA, 25 bp, Homo sapien
taggatatctgaacctgaacttgta

SEQ ID NO: 84079 - DNA, 25 bp, Homo sapien
caaaattgacgagtacttattcgtt

SEQ ID NO: 84080 - DNA, 25 bp, Homo sapien
caaaattgacgactacttattcgtt

SEQ ID NO: 84081 - DNA, 25 bp, Homo sapien
gactagagcttgaacttctaatttc

SEQ ID NO: 84082 - DNA, 25 bp, Homo sapien
gactagagcttgtacttctaatttc

SEQ ID NO: 84083 - DNA, 25 bp, Homo sapien
ctgaacttgtcatgtcacacctccg

SEQ ID NO: 84084 - DNA, 25 bp, Homo sapien
ctgaacttgtcaagtcacacctccg

SEQ ID NO: 84085 - DNA, 25 bp, Homo sapien
cactgagagtcagaagaacccctcg

SEQ ID NO: 84086 - DNA, 25 bp, Homo sapien
cactgagagtcacaagaacccctcg

SEQ ID NO: 84087 - DNA, 25 bp, Homo sapien
gctcttacgaccaaagaagacccca

SEQ ID NO: 84088 - DNA, 25 bp, Homo sapien
gctcttacgacctaagaagacccca

SEQ ID NO: 84089 - DNA, 25 bp, Homo sapien
cgtcttttggtagttacggtttcag

SEQ ID NO: 84090 - DNA, 25 bp, Homo sapien
cgtcttttggtacttacggtttcag

SEQ ID NO: 84091 - DNA, 25 bp, Homo sapien
ccgttttgtaaatcacgtgttataa

SEQ ID NO: 84092 - DNA, 25 bp, Homo sapien
ccgttttgtaaaacacgtgttataa

SEQ ID NO: 84093 - DNA, 25 bp, Homo sapien
ctactgtggagacgtcgaaaattag

SEQ ID NO: 84094 - DNA, 25 bp, Homo sapien
ctactgtggagaggtcgaaaattag

SEQ ID NO: 84095 - DNA, 25 bp, Homo sapien
ttaacatctctgtaatcaataaata

SEQ ID NO: 84096 - DNA, 25 bp, Homo sapien
ttaacatctctgaaatcaataaata

SEQ ID NO: 84097 - DNA, 25 bp, Homo sapien
tttctcgaccacgatatcggtatat

SEQ ID NO: 84098 - DNA, 25 bp, Homo sapien
tttctcgaccaccatatcggtatat

SEQ ID NO: 84099 - DNA, 25 bp, Homo sapien
tttgtcgaccagacatgtgtgtagt

SEQ ID NO: 84100 - DNA, 25 bp, Homo sapien
tttgtcgaccagtcatgtgtgtagt

SEQ ID NO: 84101 - DNA, 25 bp, Homo sapien
ttctttctaacatttgtctacgtgg

SEQ ID NO: 84102 - DNA, 25 bp, Homo sapien
ttctttctaacaattgtctacgtgg

SEQ ID NO: 84103 - DNA, 25 bp, Homo sapien
tattgggaatatatacgacactgcc

SEQ ID NO: 84104 - DNA, 25 bp, Homo sapien
tattgggaatatttacgacactgcc

SEQ ID NO: 84105 - DNA, 25 bp, Homo sapien
tttgttcgacacataaagacttgtc

SEQ ID NO: 84106 - DNA, 25 bp, Homo sapien
tttgttcgacacttaaagacttgtc

SEQ ID NO: 84107 - DNA, 25 bp, Homo sapien
agttttcgaccctaagtataatgtc

SEQ ID NO: 84108 - DNA, 25 bp, Homo sapien
agttttcgacccaaagtataatgtc

SEQ ID NO: 84109 - DNA, 25 bp, Homo sapien
aattgtcaaaaatgtcatactcgcg

SEQ ID NO: 84110 - DNA, 25 bp, Homo sapien
aattgtcaaaaaagtcatactcgcg

SEQ ID NO: 84111 - DNA, 25 bp, Homo sapien
ttgtcaaagtgtgaacgtacggtcc

SEQ ID NO: 84112 - DNA, 25 bp, Homo sapien
ttgtcaaagtgtcaacgtacggtcc

SEQ ID NO: 84113 - DNA, 25 bp, Homo sapien
cggaccacagttacgcgtgtagacc

SEQ ID NO: 84114 - DNA, 25 bp, Homo sapien
cggaccacagtttcgcgtgtagacc

SEQ ID NO: 84115 - DNA, 25 bp, Homo sapien
gtcgtctgtctctacccagtacctt

SEQ ID NO: 84116 - DNA, 25 bp, Homo sapien
gtcgtctgtctcaacccagtacctt

SEQ ID NO: 84117 - DNA, 25 bp, Homo sapien
cgacggaggtttagtcccttaatat

SEQ ID NO: 84118 - DNA, 25 bp, Homo sapien
cgacggaggttttgtcccttaatat

SEQ ID NO: 84119 - DNA, 25 bp, Homo sapien
atttagtcactttaggtccctttga

SEQ ID NO: 84120 - DNA, 25 bp, Homo sapien
atttagtcacttaaggtccctttga

SEQ ID NO: 84121 - DNA, 25 bp, Homo sapien
tgtctcttacacgtgccacatcacg

SEQ ID NO: 84122 - DNA, 25 bp, Homo sapien
tgtctcttacacctgccacatcacg

SEQ ID NO: 84123 - DNA, 25 bp, Homo sapien
accgtggctccgtgagtataccgac

SEQ ID NO: 84124 - DNA, 25 bp, Homo sapien
accgtggctccgagagtataccgac

SEQ ID NO: 84125 - DNA, 25 bp, Homo sapien
gaatgggtcgtgacggtacaccgtc

SEQ ID NO: 84126 - DNA, 25 bp, Homo sapien
gaatgggtcgtgtcggtacaccgtc

SEQ ID NO: 84127 - DNA, 25 bp, Homo sapien
gactaggatcaaggtctgaatctct

SEQ ID NO: 84128 - DNA, 25 bp, Homo sapien
gactaggatcaacgtctgaatctct

SEQ ID NO: 84129 - DNA, 25 bp, Homo sapien
gactcagtagaacaacgaacattcg

SEQ ID NO: 84130 - DNA, 25 bp, Homo sapien
gactcagtagaagaacgaacattcg

SEQ ID NO: 84131 - DNA, 25 bp, Homo sapien
gtacacgtaaagaagaaacctttct

SEQ ID NO: 84132 - DNA, 25 bp, Homo sapien
gtacacgtaaagtagaaacctttct

SEQ ID NO: 84133 - DNA, 25 bp, Homo sapien
tcactgattttaacatgtgtctagt

SEQ ID NO: 84134 - DNA, 25 bp, Homo sapien
tcactgattttatcatgtgtctagt

SEQ ID NO: 84135 - DNA, 25 bp, Homo sapien
tctctctactgttcccagtgtgtac

SEQ ID NO: 84136 - DNA, 25 bp, Homo sapien
tctctctactgtacccagtgtgtac

SEQ ID NO: 84137 - DNA, 25 bp, Homo sapien
gtcgtcttccgcttgtccgggtgtt

SEQ ID NO: 84138 - DNA, 25 bp, Homo sapien
gtcgtcttccgcatgtccgggtgtt

SEQ ID NO: 84139 - DNA, 25 bp, Homo sapien
attgtgttcccaaccgatgagacgg

SEQ ID NO: 84140 - DNA, 25 bp, Homo sapien
attgtgttcccatccgatgagacgg

SEQ ID NO: 84141 - DNA, 25 bp, Homo sapien
ttgtttcgtcacgtcaagaatcggt

SEQ ID NO: 84142 - DNA, 25 bp, Homo sapien
ttgtttcgtcacctcaagaatcggt

SEQ ID NO: 84143 - DNA, 25 bp, Homo sapien
aaggacctaccgtaatcaggtatat

SEQ ID NO: 84144 - DNA, 25 bp, Homo sapien
aaggacctaccgaaatcaggtatat

SEQ ID NO: 84145 - DNA, 25 bp, Homo sapien
agagaaagtctcaacatctaagtta

SEQ ID NO: 84146 - DNA, 25 bp, Homo sapien
agagaaagtctctacatctaagtta

SEQ ID NO: 84147 - DNA, 25 bp, Homo sapien
cggtgcctctcgtcgggtcaagtgt

SEQ ID NO: 84148 - DNA, 25 bp, Homo sapien
cggtgcctctcgacgggtcaagtgt

SEQ ID NO: 84149 - DNA, 25 bp, Homo sapien
tccttcctccgtcgtcgtcgtcgag

SEQ ID NO: 84150 - DNA, 25 bp, Homo sapien
tccttcctccgtggtcgtcgtcgag

SEQ ID NO: 84151 - DNA, 25 bp, Homo sapien
ctcgggtgcacagctccgtcgttca

SEQ ID NO: 84152 - DNA, 25 bp, Homo sapien
ctcgggtgcacacctccgtcgttca

SEQ ID NO: 84153 - DNA, 25 bp, Homo sapien
ggtgtgtctttttataccgtcatgg

SEQ ID NO: 84154 - DNA, 25 bp, Homo sapien
ggtgtgtcttttaataccgtcatgg

SEQ ID NO: 84155 - DNA, 25 bp, Homo sapien
tgtgacaatatggacttctaccagt

SEQ ID NO: 84156 - DNA, 25 bp, Homo sapien
tgtgacaatatgcacttctaccagt

SEQ ID NO: 84157 - DNA, 25 bp, Homo sapien
tattcgctttgtaactgaaccgact

SEQ ID NO: 84158 - DNA, 25 bp, Homo sapien
tattcgctttgttactgaaccgact

SEQ ID NO: 84159 - DNA, 25 bp, Homo sapien
caaacgtccgcacaaatgtacgtcc

SEQ ID NO: 84160 - DNA, 25 bp, Homo sapien
caaacgtccgcagaaatgtacgtcc

SEQ ID NO: 84161 - DNA, 25 bp, Homo sapien
acacatcgctcgaaagacaccggac

SEQ ID NO: 84162 - DNA, 25 bp, Homo sapien
acacatcgctcgtaagacaccggac

SEQ ID NO: 84163 - DNA, 25 bp, Homo sapien
caacatgtgcttgaggaaccgtaac

SEQ ID NO: 84164 - DNA, 25 bp, Homo sapien
caacatgtgcttcaggaaccgtaac

SEQ ID NO: 84165 - DNA, 25 bp, Homo sapien
cgcggagactgacagtagaccgtga

SEQ ID NO: 84166 - DNA, 25 bp, Homo sapien
cgcggagactgagagtagaccgtga

SEQ ID NO: 84167 - DNA, 25 bp, Homo sapien
gggcgtagtagactcgatccggact

SEQ ID NO: 84168 - DNA, 25 bp, Homo sapien
gggcgtagtagagtcgatccggact

SEQ ID NO: 84169 - DNA, 25 bp, Homo sapien
cctatgtccagatgtgtgctaaagt

SEQ ID NO: 84170 - DNA, 25 bp, Homo sapien
cctatgtccagaagtgtgctaaagt

SEQ ID NO: 84171 - DNA, 25 bp, Homo sapien
gcgactacgcccaggtgccagtagt

SEQ ID NO: 84172 - DNA, 25 bp, Homo sapien
gcgactacgccctggtgccagtagt

SEQ ID NO: 84173 - DNA, 25 bp, Homo sapien
acttccttcctttgtacgttagtgt

SEQ ID NO: 84174 - DNA, 25 bp, Homo sapien
acttccttccttagtacgttagtgt

SEQ ID NO: 84175 - DNA, 25 bp, Homo sapien
tatacacggtattacaatacgaatt

SEQ ID NO: 84176 - DNA, 25 bp, Homo sapien
tatacacggtataacaatacgaatt

SEQ ID NO: 84177 - DNA, 25 bp, Homo sapien
tatgttttggtcaataacgaatccg

SEQ ID NO: 84178 - DNA, 25 bp, Homo sapien
tatgttttggtctataacgaatccg

SEQ ID NO: 84179 - DNA, 25 bp, Homo sapien
gagtagattggttaaacctaagacc

SEQ ID NO: 84180 - DNA, 25 bp, Homo sapien
gagtagattggtaaaacctaagacc

SEQ ID NO: 84181 - DNA, 25 bp, Homo sapien
agtttgagtagcatccagtactacc

SEQ ID NO: 84182 - DNA, 25 bp, Homo sapien
agtttgagtagcttccagtactacc

SEQ ID NO: 84183 - DNA, 25 bp, Homo sapien
agtcttgacgtagattctccgacac

SEQ ID NO: 84184 - DNA, 25 bp, Homo sapien
agtcttgacgtacattctccgacac

SEQ ID NO: 84185 - DNA, 25 bp, Homo sapien
cttatttcggtgagtgtgactgacc

SEQ ID NO: 84186 - DNA, 25 bp, Homo sapien
cttatttcggtgtgtgtgactgacc

SEQ ID NO: 84187 - DNA, 25 bp, Homo sapien
cctatgtttgattatggtgtgtctc

SEQ ID NO: 84188 - DNA, 25 bp, Homo sapien
cctatgtttgataatggtgtgtctc

SEQ ID NO: 84189 - DNA, 25 bp, Homo sapien
ctgacaagtctaaacctccgtctcg

SEQ ID NO: 84190 - DNA, 25 bp, Homo sapien
ctgacaagtctatacctccgtctcg

SEQ ID NO: 84191 - DNA, 25 bp, Homo sapien
gtgaaacgtctgacccacgtcgtat

SEQ ID NO: 84192 - DNA, 25 bp, Homo sapien
gtgaaacgtctgtcccacgtcgtat

SEQ ID NO: 84193 - DNA, 25 bp, Homo sapien
gtttgaacttaagatgagtctccga

SEQ ID NO: 84194 - DNA, 25 bp, Homo sapien
gtttgaacttaacatgagtctccga

SEQ ID NO: 84195 - DNA, 25 bp, Homo sapien
gtgaaacttcccagtatagttacca

SEQ ID NO: 84196 - DNA, 25 bp, Homo sapien
gtgaaacttccctgtatagttacca

SEQ ID NO: 84197 - DNA, 25 bp, Homo sapien
tgtgtaaacttacttcatgtgccta

SEQ ID NO: 84198 - DNA, 25 bp, Homo sapien
tgtgtaaacttagttcatgtgccta

SEQ ID NO: 84199 - DNA, 25 bp, Homo sapien
gaaatcgactatgaatttgtctctg

SEQ ID NO: 84200 - DNA, 25 bp, Homo sapien
gaaatcgactatcaatttgtctctg

SEQ ID NO: 84201 - DNA, 25 bp, Homo sapien
gaactaccaagaacagttccgaccc

SEQ ID NO: 84202 - DNA, 25 bp, Homo sapien
gaactaccaagatcagttccgaccc

SEQ ID NO: 84203 - DNA, 25 bp, Homo sapien
aaccctagtcgcaaggtcagcctac

SEQ ID NO: 84204 - DNA, 25 bp, Homo sapien
aaccctagtcgctaggtcagcctac

SEQ ID NO: 84205 - DNA, 25 bp, Homo sapien
cataccaggtttaaggtcttattac

SEQ ID NO: 84206 - DNA, 25 bp, Homo sapien
cataccaggttttaggtcttattac

SEQ ID NO: 84207 - DNA, 25 bp, Homo sapien
ccgtctcaggtgtttctgttgaagg

SEQ ID NO: 84208 - DNA, 25 bp, Homo sapien
ccgtctcaggtgattctgttgaagg

SEQ ID NO: 84209 - DNA, 25 bp, Homo sapien
gacatgtcaatgagtacagtaacat

SEQ ID NO: 84210 - DNA, 25 bp, Homo sapien
gacatgtcaatgtgtacagtaacat

SEQ ID NO: 84211 - DNA, 25 bp, Homo sapien
atcatgtcaatacttcagtgtaagt

SEQ ID NO: 84212 - DNA, 25 bp, Homo sapien
atcatgtcaatagttcagtgtaagt

SEQ ID NO: 84213 - DNA, 25 bp, Homo sapien
aggtccaacgacgccgtgtcgacgt

SEQ ID NO: 84214 - DNA, 25 bp, Homo sapien
aggtccaacgaccccgtgtcgacgt

SEQ ID NO: 84215 - DNA, 25 bp, Homo sapien
tcttttattaagtcgttatatttat

SEQ ID NO: 84216 - DNA, 25 bp, Homo sapien
tcttttattaagacgttatatttat

SEQ ID NO: 84217 - DNA, 25 bp, Homo sapien
actttttactttaacttttgtttat

SEQ ID NO: 84218 - DNA, 25 bp, Homo sapien
actttttacttttacttttgtttat

SEQ ID NO: 84219 - DNA, 25 bp, Homo sapien
agttcacgtccaattttaggtctat

SEQ ID NO: 84220 - DNA, 25 bp, Homo sapien
agttcacgtccatttttaggtctat

SEQ ID NO: 84221 - DNA, 25 bp, Homo sapien
agatgcgaccatcttctagagccgt

SEQ ID NO: 84222 - DNA, 25 bp, Homo sapien
agatgcgaccatgttctagagccgt

SEQ ID NO: 84223 - DNA, 25 bp, Homo sapien
acttgggactttggtgtacctcacg

SEQ ID NO: 84224 - DNA, 25 bp, Homo sapien
acttgggactttcgtgtacctcacg

SEQ ID NO: 84225 - DNA, 25 bp, Homo sapien
tgttacgaacgtttacaaaccagag

SEQ ID NO: 84226 - DNA, 25 bp, Homo sapien
tgttacgaacgtatacaaaccagag

SEQ ID NO: 84227 - DNA, 25 bp, Homo sapien
ttgtagaaactcgacaatccgtagg

SEQ ID NO: 84228 - DNA, 25 bp, Homo sapien
ttgtagaaactccacaatccgtagg

SEQ ID NO: 84229 - DNA, 25 bp, Homo sapien
tgttagttctcattcccttaagaga

SEQ ID NO: 84230 - DNA, 25 bp, Homo sapien
tgttagttctcaatcccttaagaga

SEQ ID NO: 84231 - DNA, 25 bp, Homo sapien
tgattttacgagtccctgtaataga

SEQ ID NO: 84232 - DNA, 25 bp, Homo sapien
tgattttacgagaccctgtaataga

SEQ ID NO: 84233 - DNA, 25 bp, Homo sapien
acgattttaagtctcccagagagtt

SEQ ID NO: 84234 - DNA, 25 bp, Homo sapien
acgattttaagtgtcccagagagtt

SEQ ID NO: 84235 - DNA, 25 bp, Homo sapien
cccttcttcgtggtcccgtgaagtt

SEQ ID NO: 84236 - DNA, 25 bp, Homo sapien
cccttcttcgtgctcccgtgaagtt

SEQ ID NO: 84237 - DNA, 25 bp, Homo sapien
cggcaagagggttccttgacacgct

SEQ ID NO: 84238 - DNA, 25 bp, Homo sapien
cggcaagagggtaccttgacacgct

SEQ ID NO: 84239 - DNA, 25 bp, Homo sapien
aacagcagctactactacagcatcg

SEQ ID NO: 84240 - DNA, 25 bp, Homo sapien
aacagcagctacaactacagcatcg

SEQ ID NO: 84241 - DNA, 25 bp, Homo sapien
agtaatcacgggacgtcgacgtccc

SEQ ID NO: 84242 - DNA, 25 bp, Homo sapien
agtaatcacgggtcgtcgacgtccc

SEQ ID NO: 84243 - DNA, 25 bp, Homo sapien
gagcgagacagcgggtccgacctca

SEQ ID NO: 84244 - DNA, 25 bp, Homo sapien
gagcgagacagccggtccgacctca

SEQ ID NO: 84245 - DNA, 25 bp, Homo sapien
gggtacagagccatcgtgacccact

SEQ ID NO: 84246 - DNA, 25 bp, Homo sapien
gggtacagagccttcgtgacccact

SEQ ID NO: 84247 - DNA, 25 bp, Homo sapien
gtactgactcttcgtcgactcacct

SEQ ID NO: 84248 - DNA, 25 bp, Homo sapien
gtactgactcttggtcgactcacct

SEQ ID NO: 84249 - DNA, 25 bp, Homo sapien
aggtccctcatgttccgtcagacgt

SEQ ID NO: 84250 - DNA, 25 bp, Homo sapien
aggtccctcatgatccgtcagacgt

SEQ ID NO: 84251 - DNA, 25 bp, Homo sapien
gacatgtcctctctattcccgtgac

SEQ ID NO: 84252 - DNA, 25 bp, Homo sapien
gacatgtcctctgtattcccgtgac

SEQ ID NO: 84253 - DNA, 25 bp, Homo sapien
aaggaggtttacttcttgacccacc

SEQ ID NO: 84254 - DNA, 25 bp, Homo sapien
aaggaggtttacatcttgacccacc

SEQ ID NO: 84255 - DNA, 25 bp, Homo sapien
agagggtatttacgtattccatatc

SEQ ID NO: 84256 - DNA, 25 bp, Homo sapien
agagggtatttaggtattccatatc

SEQ ID NO: 84257 - DNA, 25 bp, Homo sapien
agtcccgagaaagatgtcctgtctc

SEQ ID NO: 84258 - DNA, 25 bp, Homo sapien
agtcccgagaaacatgtcctgtctc

SEQ ID NO: 84259 - DNA, 25 bp, Homo sapien
ctctgaccggcagtcacgtgtcgac

SEQ ID NO: 84260 - DNA, 25 bp, Homo sapien
ctctgaccggcactcacgtgtcgac

SEQ ID NO: 84261 - DNA, 25 bp, Homo sapien
acctaggacgagacggtaggttcag

SEQ ID NO: 84262 - DNA, 25 bp, Homo sapien
acctaggacgagtcggtaggttcag

SEQ ID NO: 84263 - DNA, 25 bp, Homo sapien
ggcggaagagtagactaaaccgaac

SEQ ID NO: 84264 - DNA, 25 bp, Homo sapien
ggcggaagagtacactaaaccgaac

SEQ ID NO: 84265 - DNA, 25 bp, Homo sapien
gtcactataacaaccataagtagcg

SEQ ID NO: 84266 - DNA, 25 bp, Homo sapien
gtcactataacatccataagtagcg

SEQ ID NO: 84267 - DNA, 25 bp, Homo sapien
cgtgacttcaagttcactatagtga

SEQ ID NO: 84268 - DNA, 25 bp, Homo sapien
cgtgacttcaagatcactatagtga

SEQ ID NO: 84269 - DNA, 25 bp, Homo sapien
cttatgtcgactgtcagagagtcct

SEQ ID NO: 84270 - DNA, 25 bp, Homo sapien
cttatgtcgactctcagagagtcct

SEQ ID NO: 84271 - DNA, 25 bp, Homo sapien
ttttaagcacgttttatagacttcg

SEQ ID NO: 84272 - DNA, 25 bp, Homo sapien
ttttaagcacgtattatagacttcg

SEQ ID NO: 84273 - DNA, 25 bp, Homo sapien
tttagtagtaccttaggaacctccg

SEQ ID NO: 84274 - DNA, 25 bp, Homo sapien
tttagtagtaccataggaacctccg

SEQ ID NO: 84275 - DNA, 25 bp, Homo sapien
tgatgaggactcttttacacctcta

SEQ ID NO: 84276 - DNA, 25 bp, Homo sapien
tgatgaggactcatttacacctcta

SEQ ID NO: 84277 - DNA, 25 bp, Homo sapien
attatcgatcgtgtctacaactgtt

SEQ ID NO: 84278 - DNA, 25 bp, Homo sapien
attatcgatcgtctctacaactgtt

SEQ ID NO: 84279 - DNA, 25 bp, Homo sapien
aaatttgagctggtctagacataac

SEQ ID NO: 84280 - DNA, 25 bp, Homo sapien
aaatttgagctgctctagacataac

SEQ ID NO: 84281 - DNA, 25 bp, Homo sapien
gagtggtttctgctgtaggatctct

SEQ ID NO: 84282 - DNA, 25 bp, Homo sapien
gagtggtttctggtgtaggatctct

SEQ ID NO: 84283 - DNA, 25 bp, Homo sapien
atgagttttattgtctcgaggtctc

SEQ ID NO: 84284 - DNA, 25 bp, Homo sapien
atgagttttattctctcgaggtctc

SEQ ID NO: 84285 - DNA, 25 bp, Homo sapien
aaataaagttagtatgtctcaggcc

SEQ ID NO: 84286 - DNA, 25 bp, Homo sapien
aaataaagttagaatgtctcaggcc

SEQ ID NO: 84287 - DNA, 25 bp, Homo sapien
taaacgtgaaaaacgtgaacgtcct

SEQ ID NO: 84288 - DNA, 25 bp, Homo sapien
taaacgtgaaaatcgtgaacgtcct

SEQ ID NO: 84289 - DNA, 25 bp, Homo sapien
ccctaaaaacaggagaccctacggg

SEQ ID NO: 84290 - DNA, 25 bp, Homo sapien
ccctaaaaacagcagaccctacggg

SEQ ID NO: 84291 - DNA, 25 bp, Homo sapien
ctgaacgtagaccaaactccctagg

SEQ ID NO: 84292 - DNA, 25 bp, Homo sapien
ctgaacgtagacgaaactccctagg

SEQ ID NO: 84293 - DNA, 25 bp, Homo sapien
actagaagtaccaccgtgcgcctgg

SEQ ID NO: 84294 - DNA, 25 bp, Homo sapien
actagaagtacctccgtgcgcctgg

SEQ ID NO: 84295 - DNA, 25 bp, Homo sapien
aaaccgtgtccttccgccgtgaggg

SEQ ID NO: 84296 - DNA, 25 bp, Homo sapien
aaaccgtgtcctaccgccgtgaggg

SEQ ID NO: 84297 - DNA, 25 bp, Homo sapien
taccgtcgtttgtccaggggtcacg

SEQ ID NO: 84298 - DNA, 25 bp, Homo sapien
taccgtcgtttgaccaggggtcacg

SEQ ID NO: 84299 - DNA, 25 bp, Homo sapien
gactctcaaccatccagtgtccgtg

SEQ ID NO: 84300 - DNA, 25 bp, Homo sapien
gactctcaaccaaccagtgtccgtg

SEQ ID NO: 84301 - DNA, 25 bp, Homo sapien
gtggacgactcgaggcatccatccc

SEQ ID NO: 84302 - DNA, 25 bp, Homo sapien
gtggacgactcgtggcatccatccc

SEQ ID NO: 84303 - DNA, 25 bp, Homo sapien
ggagccggtatctctatcacgggag

SEQ ID NO: 84304 - DNA, 25 bp, Homo sapien
ggagccggtatcactatcacgggag

SEQ ID NO: 84305 - DNA, 25 bp, Homo sapien
gaggcgcccatcatctactccgccc

SEQ ID NO: 84306 - DNA, 25 bp, Homo sapien
gaggcgcccatcttctactccgccc

SEQ ID NO: 84307 - DNA, 25 bp, Homo sapien
taggtccggccctcctgtgtccgtt

SEQ ID NO: 84308 - DNA, 25 bp, Homo sapien
taggtccggcccacctgtgtccgtt

SEQ ID NO: 84309 - DNA, 25 bp, Homo sapien
gggttttacctctaccgtagtttga

SEQ ID NO: 84310 - DNA, 25 bp, Homo sapien
gggttttacctcaaccgtagtttga

SEQ ID NO: 84311 - DNA, 25 bp, Homo sapien
tacactcctgtcacaaatttcgtgg

SEQ ID NO: 84312 - DNA, 25 bp, Homo sapien
tacactcctgtctcaaatttcgtgg

SEQ ID NO: 84313 - DNA, 25 bp, Homo sapien
accttgacgcgcaatgactccctgg

SEQ ID NO: 84314 - DNA, 25 bp, Homo sapien
accttgacgcgctatgactccctgg

SEQ ID NO: 84315 - DNA, 25 bp, Homo sapien
ccgaggtgagaattccgtccattgt

SEQ ID NO: 84316 - DNA, 25 bp, Homo sapien
ccgaggtgagaaatccgtccattgt

SEQ ID NO: 84317 - DNA, 25 bp, Homo sapien
tcaactaagtagcaagttcacgaaa

SEQ ID NO: 84318 - DNA, 25 bp, Homo sapien
tcaactaagtaggaagttcacgaaa

SEQ ID NO: 84319 - DNA, 25 bp, Homo sapien
atgacatacaaggtaattgcttctt

SEQ ID NO: 84320 - DNA, 25 bp, Homo sapien
atgacatacaagctaattgcttctt

SEQ ID NO: 84321 - DNA, 25 bp, Homo sapien
ttgtaacgccaggaaatgattactc

SEQ ID NO: 84322 - DNA, 25 bp, Homo sapien
ttgtaacgccagcaaatgattactc

SEQ ID NO: 84323 - DNA, 25 bp, Homo sapien
atgaagacacttagaaacaacgcac

SEQ ID NO: 84324 - DNA, 25 bp, Homo sapien
atgaagacactttgaaacaacgcac

SEQ ID NO: 84325 - DNA, 25 bp, Homo sapien
gtgaacaccttgtagtgtaccgttt

SEQ ID NO: 84326 - DNA, 25 bp, Homo sapien
gtgaacaccttgaagtgtaccgttt

SEQ ID NO: 84327 - DNA, 25 bp, Homo sapien
cggaagacactcaaatgtacgattt

SEQ ID NO: 84328 - DNA, 25 bp, Homo sapien
cggaagacactctaatgtacgattt

SEQ ID NO: 84329 - DNA, 25 bp, Homo sapien
ttgaggtaacccacacacgtgcctc

SEQ ID NO: 84330 - DNA, 25 bp, Homo sapien
ttgaggtaaccctcacacgtgcctc

SEQ ID NO: 84331 - DNA, 25 bp, Homo sapien
tcgggtccagactttacgttccacc

SEQ ID NO: 84332 - DNA, 25 bp, Homo sapien
tcgggtccagacattacgttccacc

SEQ ID NO: 84333 - DNA, 25 bp, Homo sapien
taggcactgtgacctcgtcacccga

SEQ ID NO: 84334 - DNA, 25 bp, Homo sapien
taggcactgtgagctcgtcacccga

SEQ ID NO: 84335 - DNA, 25 bp, Homo sapien
gacgggaccctcgtctaccgggact

SEQ ID NO: 84336 - DNA, 25 bp, Homo sapien
gacgggaccctcctctaccgggact

SEQ ID NO: 84337 - DNA, 25 bp, Homo sapien
tccggtgacacttctctctcaagac

SEQ ID NO: 84338 - DNA, 25 bp, Homo sapien
tccggtgacactactctctcaagac

SEQ ID NO: 84339 - DNA, 25 bp, Homo sapien
cccagtgactagactccgtaagaac

SEQ ID NO: 84340 - DNA, 25 bp, Homo sapien
cccagtgactagtctccgtaagaac

SEQ ID NO: 84341 - DNA, 25 bp, Homo sapien
ctcctggagtaggaactcgaagagc

SEQ ID NO: 84342 - DNA, 25 bp, Homo sapien
ctcctggagtagcaactcgaagagc

SEQ ID NO: 84343 - DNA, 25 bp, Homo sapien
agactccaccgcaggaaccgaaagg

SEQ ID NO: 84344 - DNA, 25 bp, Homo sapien
agactccaccgctggaaccgaaagg

SEQ ID NO: 84345 - DNA, 25 bp, Homo sapien
gagtcgctcctgtgccacgaagtgg

SEQ ID NO: 84346 - DNA, 25 bp, Homo sapien
gagtcgctcctgagccacgaagtgg

SEQ ID NO: 84347 - DNA, 25 bp, Homo sapien
ccgtcttctcagcttcaaatagagg

SEQ ID NO: 84348 - DNA, 25 bp, Homo sapien
ccgtcttctcaggttcaaatagagg

SEQ ID NO: 84349 - DNA, 25 bp, Homo sapien
agaggtactactgttccttcagaga

SEQ ID NO: 84350 - DNA, 25 bp, Homo sapien
agaggtactactcttccttcagaga

SEQ ID NO: 84351 - DNA, 25 bp, Homo sapien
agggtacgaaacatcgagcctaaca

SEQ ID NO: 84352 - DNA, 25 bp, Homo sapien
agggtacgaaacttcgagcctaaca

SEQ ID NO: 84353 - DNA, 25 bp, Homo sapien
gtaagtcaaatagttactctcatag

SEQ ID NO: 84354 - DNA, 25 bp, Homo sapien
gtaagtcaaatacttactctcatag

SEQ ID NO: 84355 - DNA, 25 bp, Homo sapien
gatatacacacacgtttctgttatg

SEQ ID NO: 84356 - DNA, 25 bp, Homo sapien
gatatacacacaggtttctgttatg

SEQ ID NO: 84357 - DNA, 25 bp, Homo sapien
gttcaatacccgaatcctcgtgaaa

SEQ ID NO: 84358 - DNA, 25 bp, Homo sapien
gttcaatacccgtatcctcgtgaaa

SEQ ID NO: 84359 - DNA, 25 bp, Homo sapien
tactgtctccacttgagcccggagc

SEQ ID NO: 84360 - DNA, 25 bp, Homo sapien
tactgtctccacatgagcccggagc

SEQ ID NO: 84361 - DNA, 25 bp, Homo sapien
ctagtcccacggacgaggcaggtct

SEQ ID NO: 84362 - DNA, 25 bp, Homo sapien
ctagtcccacggtcgaggcaggtct

SEQ ID NO: 84363 - DNA, 25 bp, Homo sapien
gggtaactgccactgggtcccgtgt

SEQ ID NO: 84364 - DNA, 25 bp, Homo sapien
gggtaactgccagtgggtcccgtgt

SEQ ID NO: 84365 - DNA, 25 bp, Homo sapien
gacgagactcccagggggaccgaca

SEQ ID NO: 84366 - DNA, 25 bp, Homo sapien
gacgagactccctgggggaccgaca

SEQ ID NO: 84367 - DNA, 25 bp, Homo sapien
ccagaaatacggagattggtccaag

SEQ ID NO: 84368 - DNA, 25 bp, Homo sapien
ccagaaatacggtgattggtccaag

SEQ ID NO: 84369 - DNA, 25 bp, Homo sapien
agaagaggtcgtctgtgacgttctg

SEQ ID NO: 84370 - DNA, 25 bp, Homo sapien
agaagaggtcgtgtgtgacgttctg

SEQ ID NO: 84371 - DNA, 25 bp, Homo sapien
gaaatccaggggagtttggttctcg

SEQ ID NO: 84372 - DNA, 25 bp, Homo sapien
gaaatccaggggtgtttggttctcg

SEQ ID NO: 84373 - DNA, 25 bp, Homo sapien
cgatgtctttggacgtttctttctg

SEQ ID NO: 84374 - DNA, 25 bp, Homo sapien
cgatgtctttggtcgtttctttctg

SEQ ID NO: 84375 - DNA, 25 bp, Homo sapien
tccgtgacggtagtttcgacactcc

SEQ ID NO: 84376 - DNA, 25 bp, Homo sapien
tccgtgacggtactttcgacactcc

SEQ ID NO: 84377 - DNA, 25 bp, Homo sapien
acgtcggaacgttttgacacgaacg

SEQ ID NO: 84378 - DNA, 25 bp, Homo sapien
acgtcggaacgtattgacacgaacg

SEQ ID NO: 84379 - DNA, 25 bp, Homo sapien
gtctaacgaagatatctttgtgtct

SEQ ID NO: 84380 - DNA, 25 bp, Homo sapien
gtctaacgaagaaatctttgtgtct

SEQ ID NO: 84381 - DNA, 25 bp, Homo sapien
tagtgagacttaagtccctattctc

SEQ ID NO: 84382 - DNA, 25 bp, Homo sapien
tagtgagacttatgtccctattctc

SEQ ID NO: 84383 - DNA, 25 bp, Homo sapien
ttctaaggtcttccttcccggtctc

SEQ ID NO: 84384 - DNA, 25 bp, Homo sapien
ttctaaggtcttgcttcccggtctc

SEQ ID NO: 84385 - DNA, 25 bp, Homo sapien
cgtaagtgttggtccctcgtgaacg

SEQ ID NO: 84386 - DNA, 25 bp, Homo sapien
cgtaagtgttggaccctcgtgaacg

SEQ ID NO: 84387 - DNA, 25 bp, Homo sapien
gaagaggcccgaaccgacttcaccg

SEQ ID NO: 84388 - DNA, 25 bp, Homo sapien
gaagaggcccgatccgacttcaccg

SEQ ID NO: 84389 - DNA, 25 bp, Homo sapien
acagtcgcaccgaactcgcctggtg

SEQ ID NO: 84390 - DNA, 25 bp, Homo sapien
acagtcgcaccgtactcgcctggtg

SEQ ID NO: 84391 - DNA, 25 bp, Homo sapien
agaaggagttcgtaccgtccttatc

SEQ ID NO: 84392 - DNA, 25 bp, Homo sapien
agaaggagttcgaaccgtccttatc

SEQ ID NO: 84393 - DNA, 25 bp, Homo sapien
agatagggtccctgacctgacctcc

SEQ ID NO: 84394 - DNA, 25 bp, Homo sapien
agatagggtcccagacctgacctcc

SEQ ID NO: 84395 - DNA, 25 bp, Homo sapien
taggggaacggacagatccggaccc

SEQ ID NO: 84396 - DNA, 25 bp, Homo sapien
taggggaacggagagatccggaccc

SEQ ID NO: 84397 - DNA, 25 bp, Homo sapien
aggaagacaaggtgggatctgtccc

SEQ ID NO: 84398 - DNA, 25 bp, Homo sapien
aggaagacaaggagggatctgtccc

SEQ ID NO: 84399 - DNA, 25 bp, Homo sapien
aaactaatcgtcctttttcgttcgg

SEQ ID NO: 84400 - DNA, 25 bp, Homo sapien
aaactaatcgtcgtttttcgttcgg

SEQ ID NO: 84401 - DNA, 25 bp, Homo sapien
ttgggaggtacgactttatttcctc

SEQ ID NO: 84402 - DNA, 25 bp, Homo sapien
ttgggaggtacgtctttatttcctc

SEQ ID NO: 84403 - DNA, 25 bp, Homo sapien
tgggagtactgatttgatgttcctc

SEQ ID NO: 84404 - DNA, 25 bp, Homo sapien
tgggagtactgaattgatgttcctc

SEQ ID NO: 84405 - DNA, 25 bp, Homo sapien
aagggaatttacttttgtcaactct

SEQ ID NO: 84406 - DNA, 25 bp, Homo sapien
aagggaatttacatttgtcaactct

SEQ ID NO: 84407 - DNA, 25 bp, Homo sapien
ttgcaattatcgttctcgtgagttc

SEQ ID NO: 84408 - DNA, 25 bp, Homo sapien
ttgcaattatcgatctcgtgagttc

SEQ ID NO: 84409 - DNA, 25 bp, Homo sapien
agtaagtatttgaacctacgacttc

SEQ ID NO: 84410 - DNA, 25 bp, Homo sapien
agtaagtatttgtacctacgacttc

SEQ ID NO: 84411 - DNA, 25 bp, Homo sapien
cgtcaggtctatttgttcatatatt

SEQ ID NO: 84412 - DNA, 25 bp, Homo sapien
cgtcaggtctatatgttcatatatt

SEQ ID NO: 84413 - DNA, 25 bp, Homo sapien
tggggacgtgactgtctccattact

SEQ ID NO: 84414 - DNA, 25 bp, Homo sapien
tggggacgtgacagtctccattact

SEQ ID NO: 84415 - DNA, 25 bp, Homo sapien
ttatagggccctaaactaagatgta

SEQ ID NO: 84416 - DNA, 25 bp, Homo sapien
ttatagggcccttaactaagatgta

SEQ ID NO: 84417 - DNA, 25 bp, Homo sapien
agtccttccgggacgacggaccgag

SEQ ID NO: 84418 - DNA, 25 bp, Homo sapien
agtccttccgggtcgacggaccgag

SEQ ID NO: 84419 - DNA, 25 bp, Homo sapien
aaggcccctggtcacgacccgagag

SEQ ID NO: 84420 - DNA, 25 bp, Homo sapien
aaggcccctggtgacgacccgagag

SEQ ID NO: 84421 - DNA, 25 bp, Homo sapien
acggaccgaacctcagactcgcgga

SEQ ID NO: 84422 - DNA, 25 bp, Homo sapien
acggaccgaaccacagactcgcgga

SEQ ID NO: 84423 - DNA, 25 bp, Homo sapien
tgaacgacatccagacgaactccca

SEQ ID NO: 84424 - DNA, 25 bp, Homo sapien
tgaacgacatcctgacgaactccca

SEQ ID NO: 84425 - DNA, 25 bp, Homo sapien
gcacgtcgagtagaaccatacgccc

SEQ ID NO: 84426 - DNA, 25 bp, Homo sapien
gcacgtcgagtacaaccatacgccc

SEQ ID NO: 84427 - DNA, 25 bp, Homo sapien
tgccgtgagttctttcatccgactt

SEQ ID NO: 84428 - DNA, 25 bp, Homo sapien
tgccgtgagttcattcatccgactt

SEQ ID NO: 84429 - DNA, 25 bp, Homo sapien
ttaccacagtcactgacgtagtact

SEQ ID NO: 84430 - DNA, 25 bp, Homo sapien
ttaccacagtcagtgacgtagtact

SEQ ID NO: 84431 - DNA, 25 bp, Homo sapien
ggacctataaacgtcagtcatgaag

SEQ ID NO: 84432 - DNA, 25 bp, Homo sapien
ggacctataaacctcagtcatgaag

SEQ ID NO: 84433 - DNA, 25 bp, Homo sapien
aacgactgaaaccattcgaatatag

SEQ ID NO: 84434 - DNA, 25 bp, Homo sapien
aacgactgaaacgattcgaatatag

SEQ ID NO: 84435 - DNA, 25 bp, Homo sapien
gagtgtaaattcatctgtaaactac

SEQ ID NO: 84436 - DNA, 25 bp, Homo sapien
gagtgtaaattcttctgtaaactac

SEQ ID NO: 84437 - DNA, 25 bp, Homo sapien
tccgtgacaacttctttagagtgaa

SEQ ID NO: 84438 - DNA, 25 bp, Homo sapien
tccgtgacaactactttagagtgaa

SEQ ID NO: 84439 - DNA, 25 bp, Homo sapien
gagtcatgcttctactttccgacca

SEQ ID NO: 84440 - DNA, 25 bp, Homo sapien
gagtcatgcttcaactttccgacca

SEQ ID NO: 84441 - DNA, 25 bp, Homo sapien
atcatccgtgttaagtttccaacag

SEQ ID NO: 84442 - DNA, 25 bp, Homo sapien
atcatccgtgtttagtttccaacag

SEQ ID NO: 84443 - DNA, 25 bp, Homo sapien
gtggttctcacacgactctcgacat

SEQ ID NO: 84444 - DNA, 25 bp, Homo sapien
gtggttctcacaggactctcgacat

SEQ ID NO: 84445 - DNA, 25 bp, Homo sapien
ttattattggagtcctgagtccttt

SEQ ID NO: 84446 - DNA, 25 bp, Homo sapien
ttattattggagacctgagtccttt

SEQ ID NO: 84447 - DNA, 25 bp, Homo sapien
ttttatgttgaaagtcgactttttg

SEQ ID NO: 84448 - DNA, 25 bp, Homo sapien
ttttatgttgaatgtcgactttttg

SEQ ID NO: 84449 - DNA, 25 bp, Homo sapien
gtttttgtaggaattccttttaccg

SEQ ID NO: 84450 - DNA, 25 bp, Homo sapien
gtttttgtaggatttccttttaccg

SEQ ID NO: 84451 - DNA, 25 bp, Homo sapien
gttcgtgggaaagtttccctatttc

SEQ ID NO: 84452 - DNA, 25 bp, Homo sapien
gttcgtgggaaactttccctatttc

SEQ ID NO: 84453 - DNA, 25 bp, Homo sapien
gcactgcggatttttcacactggtc

SEQ ID NO: 84454 - DNA, 25 bp, Homo sapien
gcactgcggattattcacactggtc

SEQ ID NO: 84455 - DNA, 25 bp, Homo sapien
ttaaacggattatatccactacttc

SEQ ID NO: 84456 - DNA, 25 bp, Homo sapien
ttaaacggattaaatccactacttc

SEQ ID NO: 84457 - DNA, 25 bp, Homo sapien
agatcctttaagttcacttctgtct

SEQ ID NO: 84458 - DNA, 25 bp, Homo sapien
agatcctttaagatcacttctgtct

SEQ ID NO: 84459 - DNA, 25 bp, Homo sapien
aattccggtaagttcaagttcgtgt

SEQ ID NO: 84460 - DNA, 25 bp, Homo sapien
aattccggtaagatcaagttcgtgt

SEQ ID NO: 84461 - DNA, 25 bp, Homo sapien
aagatgtttgaagactttctctact

SEQ ID NO: 84462 - DNA, 25 bp, Homo sapien
aagatgtttgaacactttctctact

SEQ ID NO: 84463 - DNA, 25 bp, Homo sapien
tcactcggttaacgaccaaccacat

SEQ ID NO: 84464 - DNA, 25 bp, Homo sapien
tcactcggttaaggaccaaccacat

SEQ ID NO: 84465 - DNA, 25 bp, Homo sapien
atggtagaggggaatacgacctact

SEQ ID NO: 84466 - DNA, 25 bp, Homo sapien
atggtagaggggtatacgacctact

SEQ ID NO: 84467 - DNA, 25 bp, Homo sapien
gcgtaagacaatggtgctaacaata

SEQ ID NO: 84468 - DNA, 25 bp, Homo sapien
gcgtaagacaatcgtgctaacaata

SEQ ID NO: 84469 - DNA, 25 bp, Homo sapien
ctcgagtaccgaattcaggttaata

SEQ ID NO: 84470 - DNA, 25 bp, Homo sapien
ctcgagtaccgatttcaggttaata

SEQ ID NO: 84471 - DNA, 25 bp, Homo sapien
tactgactgaacaaaggttacactt

SEQ ID NO: 84472 - DNA, 25 bp, Homo sapien
tactgactgaactaaggttacactt

SEQ ID NO: 84473 - DNA, 25 bp, Homo sapien
cgggaccctcgaaataaacttacaa

SEQ ID NO: 84474 - DNA, 25 bp, Homo sapien
cgggaccctcgatataaacttacaa

SEQ ID NO: 84475 - DNA, 25 bp, Homo sapien
tcttggatacttgtaagacatcccc

SEQ ID NO: 84476 - DNA, 25 bp, Homo sapien
tcttggatacttctaagacatcccc

SEQ ID NO: 84477 - DNA, 25 bp, Homo sapien
ggctacaaaagaactactgcgaccg

SEQ ID NO: 84478 - DNA, 25 bp, Homo sapien
ggctacaaaagatctactgcgaccg

SEQ ID NO: 84479 - DNA, 25 bp, Homo sapien
tagggtcaattttatcagagtcctc

SEQ ID NO: 84480 - DNA, 25 bp, Homo sapien
tagggtcaatttaatcagagtcctc

SEQ ID NO: 84481 - DNA, 25 bp, Homo sapien
tgtatgtgcgaagaaacacaaaccc

SEQ ID NO: 84482 - DNA, 25 bp, Homo sapien
tgtatgtgcgaacaaacacaaaccc

SEQ ID NO: 84483 - DNA, 25 bp, Homo sapien
tactgtcggaaaaagtccaacggtc

SEQ ID NO: 84484 - DNA, 25 bp, Homo sapien
tactgtcggaaatagtccaacggtc

SEQ ID NO: 84485 - DNA, 25 bp, Homo sapien
tgaggagaccgaagaccatcgcgtc

SEQ ID NO: 84486 - DNA, 25 bp, Homo sapien
tgaggagaccgatgaccatcgcgtc

SEQ ID NO: 84487 - DNA, 25 bp, Homo sapien
tcaatgaggaacgagagacgtctct

SEQ ID NO: 84488 - DNA, 25 bp, Homo sapien
tcaatgaggaaccagagacgtctct

SEQ ID NO: 84489 - DNA, 25 bp, Homo sapien
cgtggaattcggtgtcgaggacttc

SEQ ID NO: 84490 - DNA, 25 bp, Homo sapien
cgtggaattcggagtcgaggacttc

SEQ ID NO: 84491 - DNA, 25 bp, Homo sapien
ccgtgggctcctacgcgtgctttcg

SEQ ID NO: 84492 - DNA, 25 bp, Homo sapien
ccgtgggctccttcgcgtgctttcg

SEQ ID NO: 84493 - DNA, 25 bp, Homo sapien
tgtcgactgagacgttgacttccca

SEQ ID NO: 84494 - DNA, 25 bp, Homo sapien
tgtcgactgagaggttgacttccca

SEQ ID NO: 84495 - DNA, 25 bp, Homo sapien
gaccaggagggatagtaccgacgac

SEQ ID NO: 84496 - DNA, 25 bp, Homo sapien
gaccaggagggaaagtaccgacgac

SEQ ID NO: 84497 - DNA, 25 bp, Homo sapien
gtgtcgaccctagtcgggtcccgac

SEQ ID NO: 84498 - DNA, 25 bp, Homo sapien
gtgtcgaccctactcgggtcccgac

SEQ ID NO: 84499 - DNA, 25 bp, Homo sapien
ttcgaagaccactgtgtgtcgaccc

SEQ ID NO: 84500 - DNA, 25 bp, Homo sapien
ttcgaagaccacagtgtgtcgaccc

SEQ ID NO: 84501 - DNA, 25 bp, Homo sapien
gggtgaataggaccatctgaaagtc

SEQ ID NO: 84502 - DNA, 25 bp, Homo sapien
gggtgaataggagcatctgaaagtc

SEQ ID NO: 84503 - DNA, 25 bp, Homo sapien
gtagtgactgaacactttctcactt

SEQ ID NO: 84504 - DNA, 25 bp, Homo sapien
gtagtgactgaagactttctcactt

SEQ ID NO: 84505 - DNA, 25 bp, Homo sapien
actttgggttcaagacttaagattc

SEQ ID NO: 84506 - DNA, 25 bp, Homo sapien
actttgggttcatgacttaagattc

SEQ ID NO: 84507 - DNA, 25 bp, Homo sapien
cggtcgtcgtcgaagaggtgtttta

SEQ ID NO: 84508 - DNA, 25 bp, Homo sapien
cggtcgtcgtcgtagaggtgtttta

SEQ ID NO: 84509 - DNA, 25 bp, Homo sapien
tcgtactgttcgtggtggtgcgtct

SEQ ID NO: 84510 - DNA, 25 bp, Homo sapien
tcgtactgttcgaggtggtgcgtct

SEQ ID NO: 84511 - DNA, 25 bp, Homo sapien
cgtcgtagtgtcgaactcggggaat

SEQ ID NO: 84512 - DNA, 25 bp, Homo sapien
cgtcgtagtgtccaactcggggaat

SEQ ID NO: 84513 - DNA, 25 bp, Homo sapien
gtgaggtccttcacccgtgttgggt

SEQ ID NO: 84514 - DNA, 25 bp, Homo sapien
gtgaggtccttctcccgtgttgggt

SEQ ID NO: 84515 - DNA, 25 bp, Homo sapien
ttcaagttcccttccatgatacggg

SEQ ID NO: 84516 - DNA, 25 bp, Homo sapien
ttcaagttccctaccatgatacggg

SEQ ID NO: 84517 - DNA, 25 bp, Homo sapien
atccagttcacctaccaagacatgg

SEQ ID NO: 84518 - DNA, 25 bp, Homo sapien
atccagttcaccaaccaagacatgg

SEQ ID NO: 84519 - DNA, 25 bp, Homo sapien
gctttaccttctcgaggtacactgg

SEQ ID NO: 84520 - DNA, 25 bp, Homo sapien
gctttaccttctggaggtacactgg

SEQ ID NO: 84521 - DNA, 25 bp, Homo sapien
cgtcttccatctggtcacgtccaat

SEQ ID NO: 84522 - DNA, 25 bp, Homo sapien
cgtcttccatctcgtcacgtccaat

SEQ ID NO: 84523 - DNA, 25 bp, Homo sapien
ccgaggtcatcgacgagtgtgtcaa

SEQ ID NO: 84524 - DNA, 25 bp, Homo sapien
ccgaggtcatcgtcgagtgtgtcaa

SEQ ID NO: 84525 - DNA, 25 bp, Homo sapien
ccgagagacgggtgtataggtcata

SEQ ID NO: 84526 - DNA, 25 bp, Homo sapien
ccgagagacgggagtataggtcata

SEQ ID NO: 84527 - DNA, 25 bp, Homo sapien
ccgagtgccgtgacccgacgactta

SEQ ID NO: 84528 - DNA, 25 bp, Homo sapien
ccgagtgccgtgtcccgacgactta

SEQ ID NO: 84529 - DNA, 25 bp, Homo sapien
cgtgtgccgtcgccaccgtgacatg

SEQ ID NO: 84530 - DNA, 25 bp, Homo sapien
cgtgtgccgtcggcaccgtgacatg

SEQ ID NO: 84531 - DNA, 25 bp, Homo sapien
gactttgtcacgaaatgctccaggt

SEQ ID NO: 84532 - DNA, 25 bp, Homo sapien
gactttgtcacgtaatgctccaggt

SEQ ID NO: 84533 - DNA, 25 bp, Homo sapien
tgtcattatgtgtcggcacaggagc

SEQ ID NO: 84534 - DNA, 25 bp, Homo sapien
tgtcattatgtgacggcacaggagc

SEQ ID NO: 84535 - DNA, 25 bp, Homo sapien
agaggtaaccgcaggtccaggaact

SEQ ID NO: 84536 - DNA, 25 bp, Homo sapien
agaggtaaccgctggtccaggaact

SEQ ID NO: 84537 - DNA, 25 bp, Homo sapien
acgaagtactcttgtgaatggcagt

SEQ ID NO: 84538 - DNA, 25 bp, Homo sapien
acgaagtactctagtgaatggcagt

SEQ ID NO: 84539 - DNA, 25 bp, Homo sapien
tacctacgcaccaggaaccgtggct

SEQ ID NO: 84540 - DNA, 25 bp, Homo sapien
tacctacgcacctggaaccgtggct

SEQ ID NO: 84541 - DNA, 25 bp, Homo sapien
acacctggggactacgtacgagact

SEQ ID NO: 84542 - DNA, 25 bp, Homo sapien
acacctggggacaacgtacgagact

SEQ ID NO: 84543 - DNA, 25 bp, Homo sapien
tcagaagtcggtgtgtaacgagaag

SEQ ID NO: 84544 - DNA, 25 bp, Homo sapien
tcagaagtcggtctgtaacgagaag

SEQ ID NO: 84545 - DNA, 25 bp, Homo sapien
gtcagaagcggtactgtaggaactt

SEQ ID NO: 84546 - DNA, 25 bp, Homo sapien
gtcagaagcggttctgtaggaactt

SEQ ID NO: 84547 - DNA, 25 bp, Homo sapien
acgaagaagaggactaacggtcgaa

SEQ ID NO: 84548 - DNA, 25 bp, Homo sapien
acgaagaagaggtctaacggtcgaa

SEQ ID NO: 84549 - DNA, 25 bp, Homo sapien
aacctgaaccggtacagacgtggaa

SEQ ID NO: 84550 - DNA, 25 bp, Homo sapien
aacctgaaccggaacagacgtggaa

SEQ ID NO: 84551 - DNA, 25 bp, Homo sapien
cggtctcttaccagaccgtgggaaa

SEQ ID NO: 84552 - DNA, 25 bp, Homo sapien
cggtctcttacctgaccgtgggaaa

SEQ ID NO: 84553 - DNA, 25 bp, Homo sapien
acgaggaccttgcctgtaggaagag

SEQ ID NO: 84554 - DNA, 25 bp, Homo sapien
acgaggaccttggctgtaggaagag

SEQ ID NO: 84555 - DNA, 25 bp, Homo sapien
aaataaactgtagaacttccgaaag

SEQ ID NO: 84556 - DNA, 25 bp, Homo sapien
aaataaactgtacaacttccgaaag

SEQ ID NO: 84557 - DNA, 25 bp, Homo sapien
ctcgttactactcgtcttagaagta

SEQ ID NO: 84558 - DNA, 25 bp, Homo sapien
ctcgttactactggtcttagaagta

SEQ ID NO: 84559 - DNA, 25 bp, Homo sapien
aaaactgtatctgtgcagtactgga

SEQ ID NO: 84560 - DNA, 25 bp, Homo sapien
aaaactgtatctctgcagtactgga

SEQ ID NO: 84561 - DNA, 25 bp, Homo sapien
accaaaaactttgttgtccgtagag

SEQ ID NO: 84562 - DNA, 25 bp, Homo sapien
accaaaaactttcttgtccgtagag

SEQ ID NO: 84563 - DNA, 25 bp, Homo sapien
agtctcatctttctcgttctcaggt

SEQ ID NO: 84564 - DNA, 25 bp, Homo sapien
agtctcatctttgtcgttctcaggt

SEQ ID NO: 84565 - DNA, 25 bp, Homo sapien
attattcacgttcctcttacacggg

SEQ ID NO: 84566 - DNA, 25 bp, Homo sapien
attattcacgttgctcttacacggg

SEQ ID NO: 84567 - DNA, 25 bp, Homo sapien
ttataaccgatgtacacgtatggta

SEQ ID NO: 84568 - DNA, 25 bp, Homo sapien
ttataaccgatgaacacgtatggta

SEQ ID NO: 84569 - DNA, 25 bp, Homo sapien
catgaggtaacacaatggtaactat

SEQ ID NO: 84570 - DNA, 25 bp, Homo sapien
catgaggtaacagaatggtaactat

SEQ ID NO: 84571 - DNA, 25 bp, Homo sapien
accgagaagagcaggaatgggtctc

SEQ ID NO: 84572 - DNA, 25 bp, Homo sapien
accgagaagagctggaatgggtctc

SEQ ID NO: 84573 - DNA, 25 bp, Homo sapien
cccggtccggggtacactgtggtcc

SEQ ID NO: 84574 - DNA, 25 bp, Homo sapien
cccggtccggggaacactgtggtcc

SEQ ID NO: 84575 - DNA, 25 bp, Homo sapien
ctccagtcggggtgaactccgaacc

SEQ ID NO: 84576 - DNA, 25 bp, Homo sapien
ctccagtcggggagaactccgaacc

SEQ ID NO: 84577 - DNA, 25 bp, Homo sapien
ctcaagttgtccagggatccgggtc

SEQ ID NO: 84578 - DNA, 25 bp, Homo sapien
ctcaagttgtcctgggatccgggtc

SEQ ID NO: 84579 - DNA, 25 bp, Homo sapien
attgatttccggagatctgagagtc

SEQ ID NO: 84580 - DNA, 25 bp, Homo sapien
attgatttccggtgatctgagagtc

SEQ ID NO: 84581 - DNA, 25 bp, Homo sapien
gtaatctttctgtgtcttcaccgtg

SEQ ID NO: 84582 - DNA, 25 bp, Homo sapien
gtaatctttctgagtcttcaccgtg

SEQ ID NO: 84583 - DNA, 25 bp, Homo sapien
caaacttgtctgtgctgttctcgct

SEQ ID NO: 84584 - DNA, 25 bp, Homo sapien
caaacttgtctgagctgttctcgct

SEQ ID NO: 84585 - DNA, 25 bp, Homo sapien
cgaactcacagtgtctgttagactt

SEQ ID NO: 84586 - DNA, 25 bp, Homo sapien
cgaactcacagtctctgttagactt

SEQ ID NO: 84587 - DNA, 25 bp, Homo sapien
cagagatcctctcatggtcttcgac

SEQ ID NO: 84588 - DNA, 25 bp, Homo sapien
cagagatcctctgatggtcttcgac

SEQ ID NO: 84589 - DNA, 25 bp, Homo sapien
cagggatttaacaagtcttagtcga

SEQ ID NO: 84590 - DNA, 25 bp, Homo sapien
cagggatttaactagtcttagtcga

SEQ ID NO: 84591 - DNA, 25 bp, Homo sapien
caagtcgaggttccaggtttagaat

SEQ ID NO: 84592 - DNA, 25 bp, Homo sapien
caagtcgaggttgcaggtttagaat

SEQ ID NO: 84593 - DNA, 25 bp, Homo sapien
aagcagaccagtgagtctttatatt

SEQ ID NO: 84594 - DNA, 25 bp, Homo sapien
aagcagaccagtcagtctttatatt

SEQ ID NO: 84595 - DNA, 25 bp, Homo sapien
cctgcgtcggaggtctacttacatg

SEQ ID NO: 84596 - DNA, 25 bp, Homo sapien
cctgcgtcggagctctacttacatg

SEQ ID NO: 84597 - DNA, 25 bp, Homo sapien
cttttgatgttcgatcgtttacatg

SEQ ID NO: 84598 - DNA, 25 bp, Homo sapien
cttttgatgttccatcgtttacatg

SEQ ID NO: 84599 - DNA, 25 bp, Homo sapien
catttgtaattcgtatgtctcaatt

SEQ ID NO: 84600 - DNA, 25 bp, Homo sapien
catttgtaattcctatgtctcaatt

SEQ ID NO: 84601 - DNA, 25 bp, Homo sapien
tgtctaaatcctttcgtcgatgtag

SEQ ID NO: 84602 - DNA, 25 bp, Homo sapien
tgtctaaatcctatcgtcgatgtag

SEQ ID NO: 84603 - DNA, 25 bp, Homo sapien
gtctactcaactcagatatgccttg

SEQ ID NO: 84604 - DNA, 25 bp, Homo sapien
gtctactcaactgagatatgccttg

SEQ ID NO: 84605 - DNA, 25 bp, Homo sapien
gaccagtttgagatccgcgcctagt

SEQ ID NO: 84606 - DNA, 25 bp, Homo sapien
gaccagtttgagttccgcgcctagt

SEQ ID NO: 84607 - DNA, 25 bp, Homo sapien
gtggatcgtccgtggatcgccctgt

SEQ ID NO: 84608 - DNA, 25 bp, Homo sapien
gtggatcgtccgaggatcgccctgt

SEQ ID NO: 84609 - DNA, 25 bp, Homo sapien
cgctttttctgttgttcgagacttc

SEQ ID NO: 84610 - DNA, 25 bp, Homo sapien
cgctttttctgtagttcgagacttc

SEQ ID NO: 84611 - DNA, 25 bp, Homo sapien
ggtttctgtagagagttgaacctct

SEQ ID NO: 84612 - DNA, 25 bp, Homo sapien
ggtttctgtagacagttgaacctct

SEQ ID NO: 84613 - DNA, 25 bp, Homo sapien
tcctgaaagaatgacacgactgagt

SEQ ID NO: 84614 - DNA, 25 bp, Homo sapien
tcctgaaagaatcacacgactgagt

SEQ ID NO: 84615 - DNA, 25 bp, Homo sapien
ctttcgtaatagacgacattagttt

SEQ ID NO: 84616 - DNA, 25 bp, Homo sapien
ctttcgtaatagtcgacattagttt

SEQ ID NO: 84617 - DNA, 25 bp, Homo sapien
tacttaagagactacacattagttg

SEQ ID NO: 84618 - DNA, 25 bp, Homo sapien
tacttaagagacaacacattagttg

SEQ ID NO: 84619 - DNA, 25 bp, Homo sapien
aaactgaacgagaaccgtttcttct

SEQ ID NO: 84620 - DNA, 25 bp, Homo sapien
aaactgaacgagtaccgtttcttct

SEQ ID NO: 84621 - DNA, 25 bp, Homo sapien
caaactacggtaggtgtctttatga

SEQ ID NO: 84622 - DNA, 25 bp, Homo sapien
caaactacggtacgtgtctttatga

SEQ ID NO: 84623 - DNA, 25 bp, Homo sapien
ataacaccagtatgtaccaaagagt

SEQ ID NO: 84624 - DNA, 25 bp, Homo sapien
ataacaccagtaagtaccaaagagt

SEQ ID NO: 84625 - DNA, 25 bp, Homo sapien
tagttgagtcgtacggtaccattga

SEQ ID NO: 84626 - DNA, 25 bp, Homo sapien
tagttgagtcgttcggtaccattga

SEQ ID NO: 84627 - DNA, 25 bp, Homo sapien
ttcgaaacgttcaggtaacaggtta

SEQ ID NO: 84628 - DNA, 25 bp, Homo sapien
ttcgaaacgttctggtaacaggtta

SEQ ID NO: 84629 - DNA, 25 bp, Homo sapien
ttgaaactcttctgcactgtcgtta

SEQ ID NO: 84630 - DNA, 25 bp, Homo sapien
ttgaaactcttcagcactgtcgtta

SEQ ID NO: 84631 - DNA, 25 bp, Homo sapien
attttcaaacttctgagagtgtcca

SEQ ID NO: 84632 - DNA, 25 bp, Homo sapien
attttcaaacttgtgagagtgtcca

SEQ ID NO: 84633 - DNA, 25 bp, Homo sapien
cgtacatgactccagaaagataccc

SEQ ID NO: 84634 - DNA, 25 bp, Homo sapien
cgtacatgactcgagaaagataccc

SEQ ID NO: 84635 - DNA, 25 bp, Homo sapien
ttgtagactcttgaaacaatggttc

SEQ ID NO: 84636 - DNA, 25 bp, Homo sapien
ttgtagactcttcaaacaatggttc

SEQ ID NO: 84637 - DNA, 25 bp, Homo sapien
tatgtttcaaacgattgacacgttt

SEQ ID NO: 84638 - DNA, 25 bp, Homo sapien
tatgtttcaaaccattgacacgttt

SEQ ID NO: 84639 - DNA, 25 bp, Homo sapien
taagttcataactcttacgggtcat

SEQ ID NO: 84640 - DNA, 25 bp, Homo sapien
taagttcataacacttacgggtcat

SEQ ID NO: 84641 - DNA, 25 bp, Homo sapien
atcgagagagtatgatcgaaactcc

SEQ ID NO: 84642 - DNA, 25 bp, Homo sapien
atcgagagagtaagatcgaaactcc

SEQ ID NO: 84643 - DNA, 25 bp, Homo sapien
gttcggtcccctagagagggtcgtc

SEQ ID NO: 84644 - DNA, 25 bp, Homo sapien
gttcggtccccttgagagggtcgtc

SEQ ID NO: 84645 - DNA, 25 bp, Homo sapien
gcgcggcgacgaccctctctagggg

SEQ ID NO: 84646 - DNA, 25 bp, Homo sapien
gcgcggcgacgagcctctctagggg

SEQ ID NO: 84647 - DNA, 25 bp, Homo sapien
ccaggtgtctctgtcagttgttcac

SEQ ID NO: 84648 - DNA, 25 bp, Homo sapien
ccaggtgtctctctcagttgttcac

SEQ ID NO: 84649 - DNA, 25 bp, Homo sapien
cttgtgtatcgtcaccagtttttat

SEQ ID NO: 84650 - DNA, 25 bp, Homo sapien
cttgtgtatcgtgaccagtttttat

SEQ ID NO: 84651 - DNA, 25 bp, Homo sapien
ctctgtcttgtgttgatgttctaca

SEQ ID NO: 84652 - DNA, 25 bp, Homo sapien
ctctgtcttgtgatgatgttctaca

SEQ ID NO: 84653 - DNA, 25 bp, Homo sapien
ttactacttgactgtgtttgtagtc

SEQ ID NO: 84654 - DNA, 25 bp, Homo sapien
ttactacttgacagtgtttgtagtc

SEQ ID NO: 84655 - DNA, 25 bp, Homo sapien
gaattccttagaccttctatcggac

SEQ ID NO: 84656 - DNA, 25 bp, Homo sapien
gaattccttagagcttctatcggac

SEQ ID NO: 84657 - DNA, 25 bp, Homo sapien
tttatgtatcttctctgtcataagg

SEQ ID NO: 84658 - DNA, 25 bp, Homo sapien
tttatgtatcttgtctgtcataagg

SEQ ID NO: 84659 - DNA, 25 bp, Homo sapien
ttctcgaaccgttttagtcaaaggt

SEQ ID NO: 84660 - DNA, 25 bp, Homo sapien
ttctcgaaccgtattagtcaaaggt

SEQ ID NO: 84661 - DNA, 25 bp, Homo sapien
ttactagaaactgttggaccgaagt

SEQ ID NO: 84662 - DNA, 25 bp, Homo sapien
ttactagaaactcttggaccgaagt

SEQ ID NO: 84663 - DNA, 25 bp, Homo sapien
acatagtccaaaacaaggtaccgaa

SEQ ID NO: 84664 - DNA, 25 bp, Homo sapien
acatagtccaaatcaaggtaccgaa

SEQ ID NO: 84665 - DNA, 25 bp, Homo sapien
tcattagtacatttcatggcgagaa

SEQ ID NO: 84666 - DNA, 25 bp, Homo sapien
tcattagtacatatcatggcgagaa

SEQ ID NO: 84667 - DNA, 25 bp, Homo sapien
tagacccggtcaaggtaccgacggt

SEQ ID NO: 84668 - DNA, 25 bp, Homo sapien
tagacccggtcatggtaccgacggt

SEQ ID NO: 84669 - DNA, 25 bp, Homo sapien
ctgtgctaaggctcaactcgagact

SEQ ID NO: 84670 - DNA, 25 bp, Homo sapien
ctgtgctaaggcacaactcgagact

SEQ ID NO: 84671 - DNA, 25 bp, Homo sapien
gtgacacggatggtccacgacggac

SEQ ID NO: 84672 - DNA, 25 bp, Homo sapien
gtgacacggatgctccacgacggac

SEQ ID NO: 84673 - DNA, 25 bp, Homo sapien
taactcgtaactcctcaccgacgag

SEQ ID NO: 84674 - DNA, 25 bp, Homo sapien
taactcgtaactgctcaccgacgag

SEQ ID NO: 84675 - DNA, 25 bp, Homo sapien
cgtttacgtgtaaataccgaactaa

SEQ ID NO: 84676 - DNA, 25 bp, Homo sapien
cgtttacgtgtatataccgaactaa

SEQ ID NO: 84677 - DNA, 25 bp, Homo sapien
ctcgaaacgtaatccccgatgtata

SEQ ID NO: 84678 - DNA, 25 bp, Homo sapien
ctcgaaacgtaaaccccgatgtata

SEQ ID NO: 84679 - DNA, 25 bp, Homo sapien
cgcgaactaagaaactgacacttaa

SEQ ID NO: 84680 - DNA, 25 bp, Homo sapien
cgcgaactaagatactgacacttaa

SEQ ID NO: 84681 - DNA, 25 bp, Homo sapien
cattaatggacgattcagtattctt

SEQ ID NO: 84682 - DNA, 25 bp, Homo sapien
cattaatggacgtttcagtattctt

SEQ ID NO: 84683 - DNA, 25 bp, Homo sapien
agaaagactgggactctatatgttc

SEQ ID NO: 84684 - DNA, 25 bp, Homo sapien
agaaagactgggtctctatatgttc

SEQ ID NO: 84685 - DNA, 25 bp, Homo sapien
cagagacttcggtcgtcttctctcc

SEQ ID NO: 84686 - DNA, 25 bp, Homo sapien
cagagacttcggacgtcttctctcc

SEQ ID NO: 84687 - DNA, 25 bp, Homo sapien
cagagtagtcacaaagcccttccgt

SEQ ID NO: 84688 - DNA, 25 bp, Homo sapien
cagagtagtcactaagcccttccgt

SEQ ID NO: 84689 - DNA, 25 bp, Homo sapien
cctgacgtaccaaaaggaaccgtcc

SEQ ID NO: 84690 - DNA, 25 bp, Homo sapien
cctgacgtaccataaggaaccgtcc

SEQ ID NO: 84691 - DNA, 25 bp, Homo sapien
cgtctgtttggtgttctggatcacg

SEQ ID NO: 84692 - DNA, 25 bp, Homo sapien
cgtctgtttggtcttctggatcacg

SEQ ID NO: 84693 - DNA, 25 bp, Homo sapien
ccatttgtatgatgtcttgtataac

SEQ ID NO: 84694 - DNA, 25 bp, Homo sapien
ccatttgtatgaagtcttgtataac

SEQ ID NO: 84695 - DNA, 25 bp, Homo sapien
atgtggaaggtgttacatacgtcac

SEQ ID NO: 84696 - DNA, 25 bp, Homo sapien
atgtggaaggtgatacatacgtcac

SEQ ID NO: 84697 - DNA, 25 bp, Homo sapien
acgatcgtctgaagatcctttatca

SEQ ID NO: 84698 - DNA, 25 bp, Homo sapien
acgatcgtctgatgatcctttatca

SEQ ID NO: 84699 - DNA, 25 bp, Homo sapien
ccgattctcgattccggtatggtta

SEQ ID NO: 84700 - DNA, 25 bp, Homo sapien
ccgattctcgataccggtatggtta

SEQ ID NO: 84701 - DNA, 25 bp, Homo sapien
tcattgacaccacctgtatgtgttt

SEQ ID NO: 84702 - DNA, 25 bp, Homo sapien
tcattgacaccagctgtatgtgttt

SEQ ID NO: 84703 - DNA, 25 bp, Homo sapien
ttaatccactcatttgtcgtagttg

SEQ ID NO: 84704 - DNA, 25 bp, Homo sapien
ttaatccactcaattgtcgtagttg

SEQ ID NO: 84705 - DNA, 25 bp, Homo sapien
tttggtgcaggtaccgacactgaca

SEQ ID NO: 84706 - DNA, 25 bp, Homo sapien
tttggtgcaggttccgacactgaca

SEQ ID NO: 84707 - DNA, 25 bp, Homo sapien
tttggtgtccagatttagactgtgc

SEQ ID NO: 84708 - DNA, 25 bp, Homo sapien
tttggtgtccagttttagactgtgc

SEQ ID NO: 84709 - DNA, 25 bp, Homo sapien
gtatttctcccatttgtatgatgtc

SEQ ID NO: 84710 - DNA, 25 bp, Homo sapien
gtatttctcccaattgtatgatgtc

SEQ ID NO: 84711 - DNA, 25 bp, Homo sapien
ggattttcaagatcaagtctttgtc

SEQ ID NO: 84712 - DNA, 25 bp, Homo sapien
ggattttcaagaacaagtctttgtc

SEQ ID NO: 84713 - DNA, 25 bp, Homo sapien
cttgcaaagtgaaatcggtcgtact

SEQ ID NO: 84714 - DNA, 25 bp, Homo sapien
cttgcaaagtgatatcggtcgtact

SEQ ID NO: 84715 - DNA, 25 bp, Homo sapien
gggacacagagtctctacgggactc

SEQ ID NO: 84716 - DNA, 25 bp, Homo sapien
gggacacagagtgtctacgggactc

SEQ ID NO: 84717 - DNA, 25 bp, Homo sapien
tggtgacttcggtctccagtaccct

SEQ ID NO: 84718 - DNA, 25 bp, Homo sapien
tggtgacttcggactccagtaccct

SEQ ID NO: 84719 - DNA, 25 bp, Homo sapien
ccggagtagtttcgtccaataacat

SEQ ID NO: 84720 - DNA, 25 bp, Homo sapien
ccggagtagtttggtccaataacat

SEQ ID NO: 84721 - DNA, 25 bp, Homo sapien
tggagaagttatggtccctataaca

SEQ ID NO: 84722 - DNA, 25 bp, Homo sapien
tggagaagttatcgtccctataaca

SEQ ID NO: 84723 - DNA, 25 bp, Homo sapien
cttgtctctttcgtcgtccagaaag

SEQ ID NO: 84724 - DNA, 25 bp, Homo sapien
cttgtctctttcctcgtccagaaag

SEQ ID NO: 84725 - DNA, 25 bp, Homo sapien
ccccagcgtccgtcggtagtacaag

SEQ ID NO: 84726 - DNA, 25 bp, Homo sapien
ccccagcgtccgacggtagtacaag

SEQ ID NO: 84727 - DNA, 25 bp, Homo sapien
gcacaagagcggacgttagtacatc

SEQ ID NO: 84728 - DNA, 25 bp, Homo sapien
gcacaagagcggtcgttagtacatc

SEQ ID NO: 84729 - DNA, 25 bp, Homo sapien
gtcagaagtcaagtctctaccactc

SEQ ID NO: 84730 - DNA, 25 bp, Homo sapien
gtcagaagtcaactctctaccactc

SEQ ID NO: 84731 - DNA, 25 bp, Homo sapien
tgaacagtagtacaaacaacaactg

SEQ ID NO: 84732 - DNA, 25 bp, Homo sapien
tgaacagtagtagaaacaacaactg

SEQ ID NO: 84733 - DNA, 25 bp, Homo sapien
agtgaaggtaacatagaaacctttc

SEQ ID NO: 84734 - DNA, 25 bp, Homo sapien
agtgaaggtaacttagaaacctttc

SEQ ID NO: 84735 - DNA, 25 bp, Homo sapien
ccctagatctttaagatgtgttact

SEQ ID NO: 84736 - DNA, 25 bp, Homo sapien
ccctagatcttttagatgtgttact

SEQ ID NO: 84737 - DNA, 25 bp, Homo sapien
cctactacctcttctaccagtggtg

SEQ ID NO: 84738 - DNA, 25 bp, Homo sapien
cctactacctctactaccagtggtg

SEQ ID NO: 84739 - DNA, 25 bp, Homo sapien
ttcgtctccgtcaagtccggggtct

SEQ ID NO: 84740 - DNA, 25 bp, Homo sapien
ttcgtctccgtctagtccggggtct

SEQ ID NO: 84741 - DNA, 25 bp, Homo sapien
ctatggtatccctactcatcgtggg

SEQ ID NO: 84742 - DNA, 25 bp, Homo sapien
ctatggtatcccaactcatcgtggg

SEQ ID NO: 84743 - DNA, 25 bp, Homo sapien
tgttttactccgatctggattcggt

SEQ ID NO: 84744 - DNA, 25 bp, Homo sapien
tgttttactccgttctggattcggt

SEQ ID NO: 84745 - DNA, 25 bp, Homo sapien
agggacactacctcagcacagaact

SEQ ID NO: 84746 - DNA, 25 bp, Homo sapien
agggacactaccacagcacagaact

SEQ ID NO: 84747 - DNA, 25 bp, Homo sapien
aagaaactactcaacatgactgttg

SEQ ID NO: 84748 - DNA, 25 bp, Homo sapien
aagaaactactctacatgactgttg

SEQ ID NO: 84749 - DNA, 25 bp, Homo sapien
tcggagatctctttagggtcttgtg

SEQ ID NO: 84750 - DNA, 25 bp, Homo sapien
tcggagatctctatagggtcttgtg

SEQ ID NO: 84751 - DNA, 25 bp, Homo sapien
tcctccttcctccgtcgtcgtcgtc

SEQ ID NO: 84752 - DNA, 25 bp, Homo sapien
tcctccttcctcggtcgtcgtcgtc

SEQ ID NO: 84753 - DNA, 25 bp, Homo sapien
cgtccggtggctcctggtcgctcta

SEQ ID NO: 84754 - DNA, 25 bp, Homo sapien
cgtccggtggctgctggtcgctcta

SEQ ID NO: 84755 - DNA, 25 bp, Homo sapien
gggttcttgtattatccgtcaggtt

SEQ ID NO: 84756 - DNA, 25 bp, Homo sapien
gggttcttgtataatccgtcaggtt

SEQ ID NO: 84757 - DNA, 25 bp, Homo sapien
cgtgacagagtatgaactttctcat

SEQ ID NO: 84758 - DNA, 25 bp, Homo sapien
cgtgacagagtaagaactttctcat

SEQ ID NO: 84759 - DNA, 25 bp, Homo sapien
ttcggtgagtgtgactgacccgagt

SEQ ID NO: 84760 - DNA, 25 bp, Homo sapien
ttcggtgagtgtcactgacccgagt

SEQ ID NO: 84761 - DNA, 25 bp, Homo sapien
caaacgacatcagcagacaatgacc

SEQ ID NO: 84762 - DNA, 25 bp, Homo sapien
caaacgacatcaccagacaatgacc

SEQ ID NO: 84763 - DNA, 25 bp, Homo sapien
aagaccacatccaaacgaaccggtc

SEQ ID NO: 84764 - DNA, 25 bp, Homo sapien
aagaccacatcctaacgaaccggtc

SEQ ID NO: 84765 - DNA, 25 bp, Homo sapien
caaactgtgtctctggaaccactac

SEQ ID NO: 84766 - DNA, 25 bp, Homo sapien
caaactgtgtctgtggaaccactac

SEQ ID NO: 84767 - DNA, 25 bp, Homo sapien
atcggggtatgatcggagactctga

SEQ ID NO: 84768 - DNA, 25 bp, Homo sapien
atcggggtatgaacggagactctga

SEQ ID NO: 84769 - DNA, 25 bp, Homo sapien
gggcacgtcgtactcgtcctccgat

SEQ ID NO: 84770 - DNA, 25 bp, Homo sapien
gggcacgtcgtagtcgtcctccgat

SEQ ID NO: 84771 - DNA, 25 bp, Homo sapien
tcctatgtccagatgtgtgctaaag

SEQ ID NO: 84772 - DNA, 25 bp, Homo sapien
tcctatgtccagttgtgtgctaaag

SEQ ID NO: 84773 - DNA, 25 bp, Homo sapien
ctcgtactccacaggtgtctacaac

SEQ ID NO: 84774 - DNA, 25 bp, Homo sapien
ctcgtactccactggtgtctacaac

SEQ ID NO: 84775 - DNA, 25 bp, Homo sapien
ttctctccctgtaatacgtcgagat

SEQ ID NO: 84776 - DNA, 25 bp, Homo sapien
ttctctccctgttatacgtcgagat

SEQ ID NO: 84777 - DNA, 25 bp, Homo sapien
ttctccgccgtaaactacgacagtt

SEQ ID NO: 84778 - DNA, 25 bp, Homo sapien
ttctccgccgtatactacgacagtt

SEQ ID NO: 84779 - DNA, 25 bp, Homo sapien
ctgtttgttctcacttacaatcgcg

SEQ ID NO: 84780 - DNA, 25 bp, Homo sapien
ctgtttgttctctcttacaatcgcg

SEQ ID NO: 84781 - DNA, 25 bp, Homo sapien
cagtatttggtctactttagatacc

SEQ ID NO: 84782 - DNA, 25 bp, Homo sapien
cagtatttggtcaactttagatacc

SEQ ID NO: 84783 - DNA, 25 bp, Homo sapien
ggtttgtaggtcatgcagtctcacg

SEQ ID NO: 84784 - DNA, 25 bp, Homo sapien
ggtttgtaggtcttgcagtctcacg

SEQ ID NO: 84785 - DNA, 25 bp, Homo sapien
tgtttgtaagtccttcgtcgtgacc

SEQ ID NO: 84786 - DNA, 25 bp, Homo sapien
tgtttgtaagtcgttcgtcgtgacc

SEQ ID NO: 84787 - DNA, 25 bp, Homo sapien
tttgtttgtctgagtgtagatccct

SEQ ID NO: 84788 - DNA, 25 bp, Homo sapien
tttgtttgtctgtgtgtagatccct

SEQ ID NO: 84789 - DNA, 25 bp, Homo sapien
ccttttctgtactagtggttcactt

SEQ ID NO: 84790 - DNA, 25 bp, Homo sapien
ccttttctgtacaagtggttcactt

SEQ ID NO: 84791 - DNA, 25 bp, Homo sapien
ttctacagtataagacctaccactg

SEQ ID NO: 84792 - DNA, 25 bp, Homo sapien
ttctacagtatatgacctaccactg

SEQ ID NO: 84793 - DNA, 25 bp, Homo sapien
tcacgaacggtgacactctacttat

SEQ ID NO: 84794 - DNA, 25 bp, Homo sapien
tcacgaacggtgtcactctacttat

SEQ ID NO: 84795 - DNA, 25 bp, Homo sapien
ttccaacgtttagatgagctcttac

SEQ ID NO: 84796 - DNA, 25 bp, Homo sapien
ttccaacgtttacatgagctcttac

SEQ ID NO: 84797 - DNA, 25 bp, Homo sapien
tttaagtctcccagagagttctctc

SEQ ID NO: 84798 - DNA, 25 bp, Homo sapien
tttaagtctccctgagagttctctc

SEQ ID NO: 84799 - DNA, 25 bp, Homo sapien
atttataagtgtctccaggctcctc

SEQ ID NO: 84800 - DNA, 25 bp, Homo sapien
atttataagtgtgtccaggctcctc

SEQ ID NO: 84801 - DNA, 25 bp, Homo sapien
agtactacactagacctgggtcctg

SEQ ID NO: 84802 - DNA, 25 bp, Homo sapien
agtactacactacacctgggtcctg

SEQ ID NO: 84803 - DNA, 25 bp, Homo sapien
aactaccatgtactgttccacgccg

SEQ ID NO: 84804 - DNA, 25 bp, Homo sapien
aactaccatgtagtgttccacgccg

SEQ ID NO: 84805 - DNA, 25 bp, Homo sapien
taccagtcgtcatgcacagcctacg

SEQ ID NO: 84806 - DNA, 25 bp, Homo sapien
taccagtcgtcaagcacagcctacg

SEQ ID NO: 84807 - DNA, 25 bp, Homo sapien
aaggtcgtattacgtctataatacg

SEQ ID NO: 84808 - DNA, 25 bp, Homo sapien
aaggtcgtattaggtctataatacg

SEQ ID NO: 84809 - DNA, 25 bp, Homo sapien
cgtcaaggtgagttcacttgtaatg

SEQ ID NO: 84810 - DNA, 25 bp, Homo sapien
cgtcaaggtgagatcacttgtaatg

SEQ ID NO: 84811 - DNA, 25 bp, Homo sapien
ggctaaggaatgtagtctagtaacc

SEQ ID NO: 84812 - DNA, 25 bp, Homo sapien
ggctaaggaatgaagtctagtaacc

SEQ ID NO: 84813 - DNA, 25 bp, Homo sapien
gtcatgtcctatcatgtcattaagt

SEQ ID NO: 84814 - DNA, 25 bp, Homo sapien
gtcatgtcctatgatgtcattaagt

SEQ ID NO: 84815 - DNA, 25 bp, Homo sapien
cagccctgacgagacggtgtcgacg

SEQ ID NO: 84816 - DNA, 25 bp, Homo sapien
cagccctgacgacacggtgtcgacg

SEQ ID NO: 84817 - DNA, 25 bp, Homo sapien
cgtaagttagagaacgttatattta

SEQ ID NO: 84818 - DNA, 25 bp, Homo sapien
cgtaagttagagtacgttatattta

SEQ ID NO: 84819 - DNA, 25 bp, Homo sapien
tgtttatattatcatttaagtcttt

SEQ ID NO: 84820 - DNA, 25 bp, Homo sapien
tgtttatattatgatttaagtcttt

SEQ ID NO: 84821 - DNA, 25 bp, Homo sapien
cgagttcatgcatttttacgagttt

SEQ ID NO: 84822 - DNA, 25 bp, Homo sapien
cgagttcatgcaattttacgagttt

SEQ ID NO: 84823 - DNA, 25 bp, Homo sapien
ccaatggaccctcgttctagagtta

SEQ ID NO: 84824 - DNA, 25 bp, Homo sapien
ccaatggaccctggttctagagtta

SEQ ID NO: 84825 - DNA, 25 bp, Homo sapien
tatgggtcgtttgtagacatacacg

SEQ ID NO: 84826 - DNA, 25 bp, Homo sapien
tatgggtcgtttctagacatacacg

SEQ ID NO: 84827 - DNA, 25 bp, Homo sapien
taggacgagtcttcggaaaccagag

SEQ ID NO: 84828 - DNA, 25 bp, Homo sapien
taggacgagtctacggaaaccagag

SEQ ID NO: 84829 - DNA, 25 bp, Homo sapien
aatgtaaagtatgaacaaaccacgg

SEQ ID NO: 84830 - DNA, 25 bp, Homo sapien
aatgtaaagtatcaacaaaccacgg

SEQ ID NO: 84831 - DNA, 25 bp, Homo sapien
gttgtttgacgtaccctataaaggt

SEQ ID NO: 84832 - DNA, 25 bp, Homo sapien
gttgtttgacgttccctataaaggt

SEQ ID NO: 84833 - DNA, 25 bp, Homo sapien
gatgtattacgagacctttaaagac

SEQ ID NO: 84834 - DNA, 25 bp, Homo sapien
gatgtattacgacacctttaaagac

SEQ ID NO: 84835 - DNA, 25 bp, Homo sapien
gacatgtttaatgacacttcaaatt

SEQ ID NO: 84836 - DNA, 25 bp, Homo sapien
gacatgtttaatcacacttcaaatt

SEQ ID NO: 84837 - DNA, 25 bp, Homo sapien
ccctcgtcaatgactccgtcgaatt

SEQ ID NO: 84838 - DNA, 25 bp, Homo sapien
ccctcgtcaatgtctccgtcgaatt

SEQ ID NO: 84839 - DNA, 25 bp, Homo sapien
aacctaaagggtttctatagaacct

SEQ ID NO: 84840 - DNA, 25 bp, Homo sapien
aacctaaagggtatctatagaacct

SEQ ID NO: 84841 - DNA, 25 bp, Homo sapien
tacacaaggtcctctcgagctactc

SEQ ID NO: 84842 - DNA, 25 bp, Homo sapien
tacacaaggtccactcgagctactc

SEQ ID NO: 84843 - DNA, 25 bp, Homo sapien
taaccaaggtcaactcacgtctccg

SEQ ID NO: 84844 - DNA, 25 bp, Homo sapien
taaccaaggtcatctcacgtctccg

SEQ ID NO: 84845 - DNA, 25 bp, Homo sapien
gtggacgacgtagtggtccgaccca

SEQ ID NO: 84846 - DNA, 25 bp, Homo sapien
gtggacgacgtactggtccgaccca

SEQ ID NO: 84847 - DNA, 25 bp, Homo sapien
gacacgtagacgagtcggctccgac

SEQ ID NO: 84848 - DNA, 25 bp, Homo sapien
gacacgtagacgtgtcggctccgac

SEQ ID NO: 84849 - DNA, 25 bp, Homo sapien
tgaacgtccttggtcgcgtccacgt

SEQ ID NO: 84850 - DNA, 25 bp, Homo sapien
tgaacgtccttgctcgcgtccacgt

SEQ ID NO: 84851 - DNA, 25 bp, Homo sapien
actaggccctcatggtccgggacgt

SEQ ID NO: 84852 - DNA, 25 bp, Homo sapien
actaggccctcaaggtccgggacgt

SEQ ID NO: 84853 - DNA, 25 bp, Homo sapien
gacttgttcctagattaccctgact

SEQ ID NO: 84854 - DNA, 25 bp, Homo sapien
gacttgttcctacattaccctgact

SEQ ID NO: 84855 - DNA, 25 bp, Homo sapien
caggttttcgtttctatgaccctcc

SEQ ID NO: 84856 - DNA, 25 bp, Homo sapien
caggttttcgttactatgaccctcc

SEQ ID NO: 84857 - DNA, 25 bp, Homo sapien
aagggtagtggtcgtctcccaactc

SEQ ID NO: 84858 - DNA, 25 bp, Homo sapien
aagggtagtggtggtctcccaactc

SEQ ID NO: 84859 - DNA, 25 bp, Homo sapien
acccggactaaagtgtgtcctgtcc

SEQ ID NO: 84860 - DNA, 25 bp, Homo sapien
acccggactaaactgtgtcctgtcc

SEQ ID NO: 84861 - DNA, 25 bp, Homo sapien
cggagaagagaagtaacgtcgtcac

SEQ ID NO: 84862 - DNA, 25 bp, Homo sapien
cggagaagagaactaacgtcgtcac

SEQ ID NO: 84863 - DNA, 25 bp, Homo sapien
tacctaggacgagacggtaggttca

SEQ ID NO: 84864 - DNA, 25 bp, Homo sapien
tacctaggacgacacggtaggttca

SEQ ID NO: 84865 - DNA, 25 bp, Homo sapien
acggttagagagactataacttaca

SEQ ID NO: 84866 - DNA, 25 bp, Homo sapien
acggttagagagtctataacttaca

SEQ ID NO: 84867 - DNA, 25 bp, Homo sapien
agtcctctagaaacctataacgaag

SEQ ID NO: 84868 - DNA, 25 bp, Homo sapien
agtcctctagaatcctataacgaag

SEQ ID NO: 84869 - DNA, 25 bp, Homo sapien
cgtaggtctcaacgacatatagaag

SEQ ID NO: 84870 - DNA, 25 bp, Homo sapien
cgtaggtctcaaggacatatagaag

SEQ ID NO: 84871 - DNA, 25 bp, Homo sapien
ggttgctacgacaggtcagaagccg

SEQ ID NO: 84872 - DNA, 25 bp, Homo sapien
ggttgctacgactggtcagaagccg

SEQ ID NO: 84873 - DNA, 25 bp, Homo sapien
tttatttccgtagtctaagattcgt

SEQ ID NO: 84874 - DNA, 25 bp, Homo sapien
tttatttccgtactctaagattcgt

SEQ ID NO: 84875 - DNA, 25 bp, Homo sapien
aattttcttaacttatcgaacctcc

SEQ ID NO: 84876 - DNA, 25 bp, Homo sapien
aattttcttaacatatcgaacctcc

SEQ ID NO: 84877 - DNA, 25 bp, Homo sapien
gatgaggactcttttacacctctag

SEQ ID NO: 84878 - DNA, 25 bp, Homo sapien
gatgaggactctattacacctctag

SEQ ID NO: 84879 - DNA, 25 bp, Homo sapien
tatgtcgtaagtgtcgtcaactgtt

SEQ ID NO: 84880 - DNA, 25 bp, Homo sapien
tatgtcgtaagtctcgtcaactgtt

SEQ ID NO: 84881 - DNA, 25 bp, Homo sapien
aaattattgaggtttctacaattct

SEQ ID NO: 84882 - DNA, 25 bp, Homo sapien
aaattattgaggattctacaattct

SEQ ID NO: 84883 - DNA, 25 bp, Homo sapien
gtactggtattcatttagaactctc

SEQ ID NO: 84884 - DNA, 25 bp, Homo sapien
gtactggtattcttttagaactctc

SEQ ID NO: 84885 - DNA, 25 bp, Homo sapien
aagagttgttttgacctcaggtgtc

SEQ ID NO: 84886 - DNA, 25 bp, Homo sapien
aagagttgttttcacctcaggtgtc

SEQ ID NO: 84887 - DNA, 25 bp, Homo sapien
tagaactaaggttttttcctagggc

SEQ ID NO: 84888 - DNA, 25 bp, Homo sapien
tagaactaaggtattttcctagggc

SEQ ID NO: 84889 - DNA, 25 bp, Homo sapien
gaataaagtgtatcgaatcaaaccc

SEQ ID NO: 84890 - DNA, 25 bp, Homo sapien
gaataaagtgtaacgaatcaaaccc

SEQ ID NO: 84891 - DNA, 25 bp, Homo sapien
accataaggaacagaggacccaggg

SEQ ID NO: 84892 - DNA, 25 bp, Homo sapien
accataaggaactgaggacccaggg

SEQ ID NO: 84893 - DNA, 25 bp, Homo sapien
gactgtaacgcacagaaccccggtg

SEQ ID NO: 84894 - DNA, 25 bp, Homo sapien
gactgtaacgcagagaaccccggtg

SEQ ID NO: 84895 - DNA, 25 bp, Homo sapien
actcaagtgactacctgcccgtctg

SEQ ID NO: 84896 - DNA, 25 bp, Homo sapien
actcaagtgacttcctgcccgtctg

SEQ ID NO: 84897 - DNA, 25 bp, Homo sapien
gacaccttctcttccctgacgaggg

SEQ ID NO: 84898 - DNA, 25 bp, Homo sapien
gacaccttctctaccctgacgaggg

SEQ ID NO: 84899 - DNA, 25 bp, Homo sapien
ttctcacttcttacccggagtgcag

SEQ ID NO: 84900 - DNA, 25 bp, Homo sapien
ttctcacttctttcccggagtgcag

SEQ ID NO: 84901 - DNA, 25 bp, Homo sapien
aaccgtcatctatctccgggtccgg

SEQ ID NO: 84902 - DNA, 25 bp, Homo sapien
aaccgtcatctaactccgggtccgg

SEQ ID NO: 84903 - DNA, 25 bp, Homo sapien
gggatctcgatccaactgcatctcc

SEQ ID NO: 84904 - DNA, 25 bp, Homo sapien
gggatctcgatcgaactgcatctcc

SEQ ID NO: 84905 - DNA, 25 bp, Homo sapien
cgggtccgggcgaacttcagtgacc

SEQ ID NO: 84906 - DNA, 25 bp, Homo sapien
cgggtccgggcgtacttcagtgacc

SEQ ID NO: 84907 - DNA, 25 bp, Homo sapien
gagcggccaagtggttcttcggacc

SEQ ID NO: 84908 - DNA, 25 bp, Homo sapien
gagcggccaagtcgttcttcggacc

SEQ ID NO: 84909 - DNA, 25 bp, Homo sapien
cggtaaggcccttcgtcttgtcctt

SEQ ID NO: 84910 - DNA, 25 bp, Homo sapien
cggtaaggccctacgtcttgtcctt

SEQ ID NO: 84911 - DNA, 25 bp, Homo sapien
ggttttacctctaccgtagtttgat

SEQ ID NO: 84912 - DNA, 25 bp, Homo sapien
ggttttacctcttccgtagtttgat

SEQ ID NO: 84913 - DNA, 25 bp, Homo sapien
acactcctgtcacaaatttcgtggt

SEQ ID NO: 84914 - DNA, 25 bp, Homo sapien
acactcctgtcagaaatttcgtggt

SEQ ID NO: 84915 - DNA, 25 bp, Homo sapien
acctccggactctatgatttcgtgg

SEQ ID NO: 84916 - DNA, 25 bp, Homo sapien
acctccggactcaatgatttcgtgg

SEQ ID NO: 84917 - DNA, 25 bp, Homo sapien
ccggtgtgaacagaacgttcatggt

SEQ ID NO: 84918 - DNA, 25 bp, Homo sapien
ccggtgtgaacacaacgttcatggt

SEQ ID NO: 84919 - DNA, 25 bp, Homo sapien
gtcccggagaaaaggtcacgaacga

SEQ ID NO: 84920 - DNA, 25 bp, Homo sapien
gtcccggagaaatggtcacgaacga

SEQ ID NO: 84921 - DNA, 25 bp, Homo sapien
gggtgacacaaaaaggtttcatctt

SEQ ID NO: 84922 - DNA, 25 bp, Homo sapien
gggtgacacaaataggtttcatctt

SEQ ID NO: 84923 - DNA, 25 bp, Homo sapien
ttgaacaccaccaatatcttcactc

SEQ ID NO: 84924 - DNA, 25 bp, Homo sapien
ttgaacaccacctatatcttcactc

SEQ ID NO: 84925 - DNA, 25 bp, Homo sapien
tctgaagaccttattaaccggacac

SEQ ID NO: 84926 - DNA, 25 bp, Homo sapien
tctgaagacctttttaaccggacac

SEQ ID NO: 84927 - DNA, 25 bp, Homo sapien
gtgagtaccctttacagatacctta

SEQ ID NO: 84928 - DNA, 25 bp, Homo sapien
gtgagtacccttaacagatacctta

SEQ ID NO: 84929 - DNA, 25 bp, Homo sapien
gggataacactcaaattactgacta

SEQ ID NO: 84930 - DNA, 25 bp, Homo sapien
gggataacactctaattactgacta

SEQ ID NO: 84931 - DNA, 25 bp, Homo sapien
gtgggaaccgacaccgacggctctc

SEQ ID NO: 84932 - DNA, 25 bp, Homo sapien
gtgggaaccgactccgacggctctc

SEQ ID NO: 84933 - DNA, 25 bp, Homo sapien
tgggttcagacttctcttcactcgg

SEQ ID NO: 84934 - DNA, 25 bp, Homo sapien
tgggttcagactactcttcactcgg

SEQ ID NO: 84935 - DNA, 25 bp, Homo sapien
ttggctcagtcgtaccgtcccgaca

SEQ ID NO: 84936 - DNA, 25 bp, Homo sapien
ttggctcagtcgaaccgtcccgaca

SEQ ID NO: 84937 - DNA, 25 bp, Homo sapien
ttcggagccctcagatccggacgct

SEQ ID NO: 84938 - DNA, 25 bp, Homo sapien
ttcggagccctctgatccggacgct

SEQ ID NO: 84939 - DNA, 25 bp, Homo sapien
tacctgcccgtctgtatctcagaga

SEQ ID NO: 84940 - DNA, 25 bp, Homo sapien
tacctgcccgtcagtatctcagaga

SEQ ID NO: 84941 - DNA, 25 bp, Homo sapien
ctcctaagaccgagtcctcagagtc

SEQ ID NO: 84942 - DNA, 25 bp, Homo sapien
ctcctaagaccgtgtcctcagagtc

SEQ ID NO: 84943 - DNA, 25 bp, Homo sapien
actcctggactcgtgtcttctgagc

SEQ ID NO: 84944 - DNA, 25 bp, Homo sapien
actcctggactcctgtcttctgagc

SEQ ID NO: 84945 - DNA, 25 bp, Homo sapien
ccactccgactacagacacaaagtg

SEQ ID NO: 84946 - DNA, 25 bp, Homo sapien
ccactccgactagagacacaaagtg

SEQ ID NO: 84947 - DNA, 25 bp, Homo sapien
acgtccttcgcgtgccagtaaaggt

SEQ ID NO: 84948 - DNA, 25 bp, Homo sapien
acgtccttcgcgagccagtaaaggt

SEQ ID NO: 84949 - DNA, 25 bp, Homo sapien
tcgagactttcactgtcacaaaagg

SEQ ID NO: 84950 - DNA, 25 bp, Homo sapien
tcgagactttcagtgtcacaaaagg

SEQ ID NO: 84951 - DNA, 25 bp, Homo sapien
caggtgtcgtctgtttttacaggtg

SEQ ID NO: 84952 - DNA, 25 bp, Homo sapien
caggtgtcgtctctttttacaggtg

SEQ ID NO: 84953 - DNA, 25 bp, Homo sapien
aggggtctaactatagcacaagtat

SEQ ID NO: 84954 - DNA, 25 bp, Homo sapien
aggggtctaactttagcacaagtat

SEQ ID NO: 84955 - DNA, 25 bp, Homo sapien
gtggtctaaactgtgttctctatcg

SEQ ID NO: 84956 - DNA, 25 bp, Homo sapien
gtggtctaaactctgttctctatcg

SEQ ID NO: 84957 - DNA, 25 bp, Homo sapien
ctagtacactaaccttcttgtgttg

SEQ ID NO: 84958 - DNA, 25 bp, Homo sapien
ctagtacactaagcttcttgtgttg

SEQ ID NO: 84959 - DNA, 25 bp, Homo sapien
gtatcatatatcaatttcttgtaaa

SEQ ID NO: 84960 - DNA, 25 bp, Homo sapien
gtatcatatatctatttcttgtaaa

SEQ ID NO: 84961 - DNA, 25 bp, Homo sapien
agttctggtccttttgctccggagg

SEQ ID NO: 84962 - DNA, 25 bp, Homo sapien
agttctggtcctattgctccggagg

SEQ ID NO: 84963 - DNA, 25 bp, Homo sapien
ttatcaccacagacagtccgagggt

SEQ ID NO: 84964 - DNA, 25 bp, Homo sapien
ttatcaccacagtcagtccgagggt

SEQ ID NO: 84965 - DNA, 25 bp, Homo sapien
acggtcctgccactcttgtccaggt

SEQ ID NO: 84966 - DNA, 25 bp, Homo sapien
acggtcctgccagtcttgtccaggt

SEQ ID NO: 84967 - DNA, 25 bp, Homo sapien
cgcagctgcctgtcgtgtgtccaac

SEQ ID NO: 84968 - DNA, 25 bp, Homo sapien
cgcagctgcctgacgtgtgtccaac

SEQ ID NO: 84969 - DNA, 25 bp, Homo sapien
cagacaaacaggacgttggtccaag

SEQ ID NO: 84970 - DNA, 25 bp, Homo sapien
cagacaaacaggtcgttggtccaag

SEQ ID NO: 84971 - DNA, 25 bp, Homo sapien
tcaaaatgtgtcctagtgacgttta

SEQ ID NO: 84972 - DNA, 25 bp, Homo sapien
tcaaaatgtgtcgtagtgacgttta

SEQ ID NO: 84973 - DNA, 25 bp, Homo sapien
catctaaagaggtctgatgatttcg

SEQ ID NO: 84974 - DNA, 25 bp, Homo sapien
catctaaagaggactgatgatttcg

SEQ ID NO: 84975 - DNA, 25 bp, Homo sapien
gattactccgggagtctgtttttcg

SEQ ID NO: 84976 - DNA, 25 bp, Homo sapien
gattactccgggtgtctgtttttcg

SEQ ID NO: 84977 - DNA, 25 bp, Homo sapien
acctcgtcggtatacttcgataccc

SEQ ID NO: 84978 - DNA, 25 bp, Homo sapien
acctcgtcggtaaacttcgataccc

SEQ ID NO: 84979 - DNA, 25 bp, Homo sapien
acgcgtcgggactcttgacgcacgc

SEQ ID NO: 84980 - DNA, 25 bp, Homo sapien
acgcgtcgggacacttgacgcacgc

SEQ ID NO: 84981 - DNA, 25 bp, Homo sapien
tcaccgacacactagtttgtatgtc

SEQ ID NO: 84982 - DNA, 25 bp, Homo sapien
tcaccgacacacaagtttgtatgtc

SEQ ID NO: 84983 - DNA, 25 bp, Homo sapien
ttcgtgaaataaaccctcgttagtc

SEQ ID NO: 84984 - DNA, 25 bp, Homo sapien
ttcgtgaaataatccctcgttagtc

SEQ ID NO: 84985 - DNA, 25 bp, Homo sapien
gttcagacttctcttcactcggttc

SEQ ID NO: 84986 - DNA, 25 bp, Homo sapien
gttcagacttctgttcactcggttc

SEQ ID NO: 84987 - DNA, 25 bp, Homo sapien
tgagtacttgtgtccccggtagtcg

SEQ ID NO: 84988 - DNA, 25 bp, Homo sapien
tgagtacttgtgaccccggtagtcg

SEQ ID NO: 84989 - DNA, 25 bp, Homo sapien
taaaaggctccgtaccgctgctccg

SEQ ID NO: 84990 - DNA, 25 bp, Homo sapien
taaaaggctccgaaccgctgctccg

SEQ ID NO: 84991 - DNA, 25 bp, Homo sapien
ggaaccggcccgaacctctctgggt

SEQ ID NO: 84992 - DNA, 25 bp, Homo sapien
ggaaccggcccgtacctctctgggt

SEQ ID NO: 84993 - DNA, 25 bp, Homo sapien
caaagtgatgtgtactccctcttct

SEQ ID NO: 84994 - DNA, 25 bp, Homo sapien
caaagtgatgtgaactccctcttct

SEQ ID NO: 84995 - DNA, 25 bp, Homo sapien
gcaaatggttccagctcaacctctc

SEQ ID NO: 84996 - DNA, 25 bp, Homo sapien
gcaaatggttcctgctcaacctctc

SEQ ID NO: 84997 - DNA, 25 bp, Homo sapien
gaggtacctgctcagttcctgaccc

SEQ ID NO: 84998 - DNA, 25 bp, Homo sapien
gaggtacctgctgagttcctgaccc

SEQ ID NO: 84999 - DNA, 25 bp, Homo sapien
cggaggtcatggtggaatatgtccc

SEQ ID NO: 85000 - DNA, 25 bp, Homo sapien
cggaggtcatggaggaatatgtccc

SEQ ID NO: 85001 - DNA, 25 bp, Homo sapien
aaataacactactggttttcgttgg

SEQ ID NO: 85002 - DNA, 25 bp, Homo sapien
aaataacactacaggttttcgttgg

SEQ ID NO: 85003 - DNA, 25 bp, Homo sapien
tttaggagtgatactttgtttccgc

SEQ ID NO: 85004 - DNA, 25 bp, Homo sapien
tttaggagtgattctttgtttccgc

SEQ ID NO: 85005 - DNA, 25 bp, Homo sapien
agggtggacttttatgtgtacactc

SEQ ID NO: 85006 - DNA, 25 bp, Homo sapien
agggtggactttaatgtgtacactc

SEQ ID NO: 85007 - DNA, 25 bp, Homo sapien
ctagggattcttttaatgtcaatac

SEQ ID NO: 85008 - DNA, 25 bp, Homo sapien
ctagggattcttataatgtcaatac

SEQ ID NO: 85009 - DNA, 25 bp, Homo sapien
gattgtcaatttcattgtcagtcac

SEQ ID NO: 85010 - DNA, 25 bp, Homo sapien
gattgtcaatttgattgtcagtcac

SEQ ID NO: 85011 - DNA, 25 bp, Homo sapien
agtaagtatttgaacctacgacttc

SEQ ID NO: 85012 - DNA, 25 bp, Homo sapien
agtaagtatttgtacctacgacttc

SEQ ID NO: 85013 - DNA, 25 bp, Homo sapien
gtgagagcgtatttttacacatgtc

SEQ ID NO: 85014 - DNA, 25 bp, Homo sapien
gtgagagcgtatatttacacatgtc

SEQ ID NO: 85015 - DNA, 25 bp, Homo sapien
taagtagaacgtcatgttccacttc

SEQ ID NO: 85016 - DNA, 25 bp, Homo sapien
taagtagaacgtgatgttccacttc

SEQ ID NO: 85017 - DNA, 25 bp, Homo sapien
cttaggggacgtattttgatcgtac

SEQ ID NO: 85018 - DNA, 25 bp, Homo sapien
cttaggggacgttttttgatcgtac

SEQ ID NO: 85019 - DNA, 25 bp, Homo sapien
aactccggatggtttcgaggaccga

SEQ ID NO: 85020 - DNA, 25 bp, Homo sapien
aactccggatggattcgaggaccga

SEQ ID NO: 85021 - DNA, 25 bp, Homo sapien
aaaggcccctggtcacgacccgaga

SEQ ID NO: 85022 - DNA, 25 bp, Homo sapien
aaaggcccctggacacgacccgaga

SEQ ID NO: 85023 - DNA, 25 bp, Homo sapien
cggctcacgcccggcacgacccgga

SEQ ID NO: 85024 - DNA, 25 bp, Homo sapien
cggctcacgccccgcacgacccgga

SEQ ID NO: 85025 - DNA, 25 bp, Homo sapien
ggatcgtcaccaagaccgacccaga

SEQ ID NO: 85026 - DNA, 25 bp, Homo sapien
ggatcgtcaccatgaccgacccaga

SEQ ID NO: 85027 - DNA, 25 bp, Homo sapien
aaggtcgtcacagaacccacacaac

SEQ ID NO: 85028 - DNA, 25 bp, Homo sapien
aaggtcgtcacacaacccacacaac

SEQ ID NO: 85029 - DNA, 25 bp, Homo sapien
agtgcctgtttcaccaaccgagact

SEQ ID NO: 85030 - DNA, 25 bp, Homo sapien
agtgcctgtttctccaaccgagact

SEQ ID NO: 85031 - DNA, 25 bp, Homo sapien
ggtttgaccatcaacggcgagtact

SEQ ID NO: 85032 - DNA, 25 bp, Homo sapien
ggtttgaccatctacggcgagtact

SEQ ID NO: 85033 - DNA, 25 bp, Homo sapien
gtgacccaaacgtcggtcgatgtaa

SEQ ID NO: 85034 - DNA, 25 bp, Homo sapien
gtgacccaaacgacggtcgatgtaa

SEQ ID NO: 85035 - DNA, 25 bp, Homo sapien
ttgacccgaaacacgttacgattgg

SEQ ID NO: 85036 - DNA, 25 bp, Homo sapien
ttgacccgaaactcgttacgattgg

SEQ ID NO: 85037 - DNA, 25 bp, Homo sapien
gtcgtgtaatatcctgtttaataac

SEQ ID NO: 85038 - DNA, 25 bp, Homo sapien
gtcgtgtaatatgctgtttaataac

SEQ ID NO: 85039 - DNA, 25 bp, Homo sapien
tcacgtcgaaatcctattgtggtaa

SEQ ID NO: 85040 - DNA, 25 bp, Homo sapien
tcacgtcgaaatgctattgtggtaa

SEQ ID NO: 85041 - DNA, 25 bp, Homo sapien
gtcatgacctaatccgtttgataca

SEQ ID NO: 85042 - DNA, 25 bp, Homo sapien
gtcatgacctaaaccgtttgataca

SEQ ID NO: 85043 - DNA, 25 bp, Homo sapien
ttactcgccgttaacttccgcaaag

SEQ ID NO: 85044 - DNA, 25 bp, Homo sapien
ttactcgccgtttacttccgcaaag

SEQ ID NO: 85045 - DNA, 25 bp, Homo sapien
gtagtgttcttcttcacctcgtaat

SEQ ID NO: 85046 - DNA, 25 bp, Homo sapien
gtagtgttcttcatcacctcgtaat

SEQ ID NO: 85047 - DNA, 25 bp, Homo sapien
gtctctattttgtcacggagccttt

SEQ ID NO: 85048 - DNA, 25 bp, Homo sapien
gtctctattttgacacggagccttt

SEQ ID NO: 85049 - DNA, 25 bp, Homo sapien
taccttgttgagtttacgatttttt

SEQ ID NO: 85050 - DNA, 25 bp, Homo sapien
taccttgttgagattacgatttttt

SEQ ID NO: 85051 - DNA, 25 bp, Homo sapien
atcttgtgatgaattacctttgatc

SEQ ID NO: 85052 - DNA, 25 bp, Homo sapien
atcttgtgatgatttacctttgatc

SEQ ID NO: 85053 - DNA, 25 bp, Homo sapien
gtcggaagtagcattctctcttttc

SEQ ID NO: 85054 - DNA, 25 bp, Homo sapien
gtcggaagtagctttctctcttttc

SEQ ID NO: 85055 - DNA, 25 bp, Homo sapien
gacaggggtcgtgttccactcggtc

SEQ ID NO: 85056 - DNA, 25 bp, Homo sapien
gacaggggtcgtcttccactcggtc

SEQ ID NO: 85057 - DNA, 25 bp, Homo sapien
tgaaacggggtgtcccgtaactgtc

SEQ ID NO: 85058 - DNA, 25 bp, Homo sapien
tgaaacggggtgacccgtaactgtc

SEQ ID NO: 85059 - DNA, 25 bp, Homo sapien
gttagatccttgtaaaccgtttgtt

SEQ ID NO: 85060 - DNA, 25 bp, Homo sapien
gttagatccttgaaaaccgtttgtt

SEQ ID NO: 85061 - DNA, 25 bp, Homo sapien
tccctgtagacgtaccgtattcgtt

SEQ ID NO: 85062 - DNA, 25 bp, Homo sapien
tccctgtagacgaaccgtattcgtt

SEQ ID NO: 85063 - DNA, 25 bp, Homo sapien
aagatttctgaaccactgctcgctg

SEQ ID NO: 85064 - DNA, 25 bp, Homo sapien
aagatttctgaagcactgctcgctg

SEQ ID NO: 85065 - DNA, 25 bp, Homo sapien
gtcactttataagtccaaccgacat

SEQ ID NO: 85066 - DNA, 25 bp, Homo sapien
gtcactttataactccaaccgacat

SEQ ID NO: 85067 - DNA, 25 bp, Homo sapien
tccactggaagtcgtgcatgaccta

SEQ ID NO: 85068 - DNA, 25 bp, Homo sapien
tccactggaagtggtgcatgaccta

SEQ ID NO: 85069 - DNA, 25 bp, Homo sapien
gaacgacaacgtgtgctaccacaac

SEQ ID NO: 85070 - DNA, 25 bp, Homo sapien
gaacgacaacgtctgctaccacaac

SEQ ID NO: 85071 - DNA, 25 bp, Homo sapien
cgtagtaccagctccggatacagta

SEQ ID NO: 85072 - DNA, 25 bp, Homo sapien
cgtagtaccagcaccggatacagta

SEQ ID NO: 85073 - DNA, 25 bp, Homo sapien
caattacgtcgatataaggttcctt

SEQ ID NO: 85074 - DNA, 25 bp, Homo sapien
caattacgtcgaaataaggttcctt

SEQ ID NO: 85075 - DNA, 25 bp, Homo sapien
agaccactcgagagacaacttaaag

SEQ ID NO: 85076 - DNA, 25 bp, Homo sapien
agaccactcgagtgacaacttaaag

SEQ ID NO: 85077 - DNA, 25 bp, Homo sapien
cttgaactcttgaagaaagtcatcc

SEQ ID NO: 85078 - DNA, 25 bp, Homo sapien
cttgaactcttgtagaaagtcatcc

SEQ ID NO: 85079 - DNA, 25 bp, Homo sapien
agggactcataagatacttcagacc

SEQ ID NO: 85080 - DNA, 25 bp, Homo sapien
agggactcataacatacttcagacc

SEQ ID NO: 85081 - DNA, 25 bp, Homo sapien
tagggtcaattttatcagagtcctc

SEQ ID NO: 85082 - DNA, 25 bp, Homo sapien
tagggtcaatttaatcagagtcctc

SEQ ID NO: 85083 - DNA, 25 bp, Homo sapien
gttgagacgaattaagaacaatcca

SEQ ID NO: 85084 - DNA, 25 bp, Homo sapien
gttgagacgaataaagaacaatcca

SEQ ID NO: 85085 - DNA, 25 bp, Homo sapien
ctactgtggaagaggaccatcggta

SEQ ID NO: 85086 - DNA, 25 bp, Homo sapien
ctactgtggaagtggaccatcggta

SEQ ID NO: 85087 - DNA, 25 bp, Homo sapien
gacgtagaggtgaagccatcggtct

SEQ ID NO: 85088 - DNA, 25 bp, Homo sapien
gacgtagaggtgtagccatcggtct

SEQ ID NO: 85089 - DNA, 25 bp, Homo sapien
gagcggaggagaccatagtacgctc

SEQ ID NO: 85090 - DNA, 25 bp, Homo sapien
gagcggaggagagcatagtacgctc

SEQ ID NO: 85091 - DNA, 25 bp, Homo sapien
tggaattcggtgtcgaggacttcgt

SEQ ID NO: 85092 - DNA, 25 bp, Homo sapien
tggaattcggtgacgaggacttcgt

SEQ ID NO: 85093 - DNA, 25 bp, Homo sapien
accgtgggctcctacgcgtgctttc

SEQ ID NO: 85094 - DNA, 25 bp, Homo sapien
accgtgggctccaacgcgtgctttc

SEQ ID NO: 85095 - DNA, 25 bp, Homo sapien
tcgtgtctcgatgttagcttcctca

SEQ ID NO: 85096 - DNA, 25 bp, Homo sapien
tcgtgtctcgatcttagcttcctca

SEQ ID NO: 85097 - DNA, 25 bp, Homo sapien
gaccaggagggatagtaccgacgac

SEQ ID NO: 85098 - DNA, 25 bp, Homo sapien
gaccaggagggaaagtaccgacgac

SEQ ID NO: 85099 - DNA, 25 bp, Homo sapien
cgaccaccacgagtaggggcacgac

SEQ ID NO: 85100 - DNA, 25 bp, Homo sapien
cgaccaccacgactaggggcacgac

SEQ ID NO: 85101 - DNA, 25 bp, Homo sapien
cattcgaaacccttcgtggacgcgg

SEQ ID NO: 85102 - DNA, 25 bp, Homo sapien
cattcgaaacccatcgtggacgcgg

SEQ ID NO: 85103 - DNA, 25 bp, Homo sapien
ctgaaagtcgtcctatcggaaagtc

SEQ ID NO: 85104 - DNA, 25 bp, Homo sapien
ctgaaagtcgtcgtatcggaaagtc

SEQ ID NO: 85105 - DNA, 25 bp, Homo sapien
cgatcgaggaaccactctttgagtt

SEQ ID NO: 85106 - DNA, 25 bp, Homo sapien
cgatcgaggaacgactctttgagtt

SEQ ID NO: 85107 - DNA, 25 bp, Homo sapien
acttttggttcaaattggagtctct

SEQ ID NO: 85108 - DNA, 25 bp, Homo sapien
acttttggttcatattggagtctct

SEQ ID NO: 85109 - DNA, 25 bp, Homo sapien
gtgtggtcgcgactacgggttattt

SEQ ID NO: 85110 - DNA, 25 bp, Homo sapien
gtgtggtcgcgagtacgggttattt

SEQ ID NO: 85111 - DNA, 25 bp, Homo sapien
cttcgagtgtgatagggtttcgtct

SEQ ID NO: 85112 - DNA, 25 bp, Homo sapien
cttcgagtgtgaaagggtttcgtct

SEQ ID NO: 85113 - DNA, 25 bp, Homo sapien
actcgtagtgacgacaccggggctg

SEQ ID NO: 85114 - DNA, 25 bp, Homo sapien
actcgtagtgaccacaccggggctg

SEQ ID NO: 85115 - DNA, 25 bp, Homo sapien
gtaggtgtcttcgaaccgtttggtg

SEQ ID NO: 85116 - DNA, 25 bp, Homo sapien
gtaggtgtcttccaaccgtttggtg

SEQ ID NO: 85117 - DNA, 25 bp, Homo sapien
aagtttccgtcaccactctatgagg

SEQ ID NO: 85118 - DNA, 25 bp, Homo sapien
aagtttccgtcagcactctatgagg

SEQ ID NO: 85119 - DNA, 25 bp, Homo sapien
tcactgtgtcccaaacaagacatga

SEQ ID NO: 85120 - DNA, 25 bp, Homo sapien
tcactgtgtccctaacaagacatga

SEQ ID NO: 85121 - DNA, 25 bp, Homo sapien
gtttaccttcgtaaaccgacactga

SEQ ID NO: 85122 - DNA, 25 bp, Homo sapien
gtttaccttcgttaaccgacactga

SEQ ID NO: 85123 - DNA, 25 bp, Homo sapien
gtgttcctatcgtgtcactgactaa

SEQ ID NO: 85124 - DNA, 25 bp, Homo sapien
gtgttcctatcgagtcactgactaa

SEQ ID NO: 85125 - DNA, 25 bp, Homo sapien
cagagtgtatcgacgtcgggcgtaa

SEQ ID NO: 85126 - DNA, 25 bp, Homo sapien
cagagtgtatcgtcgtcgggcgtaa

SEQ ID NO: 85127 - DNA, 25 bp, Homo sapien
agtagtacatcgtgtactgatcaca

SEQ ID NO: 85128 - DNA, 25 bp, Homo sapien
agtagtacatcgagtactgatcaca

SEQ ID NO: 85129 - DNA, 25 bp, Homo sapien
gcagtgtccgtgagccgcacgttcg

SEQ ID NO: 85130 - DNA, 25 bp, Homo sapien
gcagtgtccgtgtgccgcacgttcg

SEQ ID NO: 85131 - DNA, 25 bp, Homo sapien
tcgagtcccgtgtcacaggtacctg

SEQ ID NO: 85132 - DNA, 25 bp, Homo sapien
tcgagtcccgtgacacaggtacctg

SEQ ID NO: 85133 - DNA, 25 bp, Homo sapien
actttacgtcactaatttcctgtgt

SEQ ID NO: 85134 - DNA, 25 bp, Homo sapien
actttacgtcacaaatttcctgtgt

SEQ ID NO: 85135 - DNA, 25 bp, Homo sapien
tatttctattacgacggccagggtc

SEQ ID NO: 85136 - DNA, 25 bp, Homo sapien
tatttctattaccacggccagggtc

SEQ ID NO: 85137 - DNA, 25 bp, Homo sapien
gaggttccgtccttactcaggaact

SEQ ID NO: 85138 - DNA, 25 bp, Homo sapien
gaggttccgtccatactcaggaact

SEQ ID NO: 85139 - DNA, 25 bp, Homo sapien
agtttccgtctcagacatcggagat

SEQ ID NO: 85140 - DNA, 25 bp, Homo sapien
agtttccgtctctgacatcggagat

SEQ ID NO: 85141 - DNA, 25 bp, Homo sapien
gtctaccactcttgctaccgttgct

SEQ ID NO: 85142 - DNA, 25 bp, Homo sapien
gtctaccactctagctaccgttgct

SEQ ID NO: 85143 - DNA, 25 bp, Homo sapien
cacctaggccgaacgacgacagact

SEQ ID NO: 85144 - DNA, 25 bp, Homo sapien
cacctaggccgatcgacgacagact

SEQ ID NO: 85145 - DNA, 25 bp, Homo sapien
ccgcgacgtcttgtagacacgaaag

SEQ ID NO: 85146 - DNA, 25 bp, Homo sapien
ccgcgacgtcttctagacacgaaag

SEQ ID NO: 85147 - DNA, 25 bp, Homo sapien
tccggtgtcgtgacaacgagaactt

SEQ ID NO: 85148 - DNA, 25 bp, Homo sapien
tccggtgtcgtgtcaacgagaactt

SEQ ID NO: 85149 - DNA, 25 bp, Homo sapien
cctaagaggatgtacgaaggtcaat

SEQ ID NO: 85150 - DNA, 25 bp, Homo sapien
cctaagaggatgaacgaaggtcaat

SEQ ID NO: 85151 - DNA, 25 bp, Homo sapien
acacagaaccggtacaggtcggttc

SEQ ID NO: 85152 - DNA, 25 bp, Homo sapien
acacagaaccggaacaggtcggttc

SEQ ID NO: 85153 - DNA, 25 bp, Homo sapien
cgtgtctgttccaggctcgggaagc

SEQ ID NO: 85154 - DNA, 25 bp, Homo sapien
cgtgtctgttcctggctcgggaagc

SEQ ID NO: 85155 - DNA, 25 bp, Homo sapien
tgggtcctgtgggtcgaggagaact

SEQ ID NO: 85156 - DNA, 25 bp, Homo sapien
tgggtcctgtggctcgaggagaact

SEQ ID NO: 85157 - DNA, 25 bp, Homo sapien
gagacactcgtagaatccggaatgt

SEQ ID NO: 85158 - DNA, 25 bp, Homo sapien
gagacactcgtacaatccggaatgt

SEQ ID NO: 85159 - DNA, 25 bp, Homo sapien
ctagtcgtatacagggtatcgaata

SEQ ID NO: 85160 - DNA, 25 bp, Homo sapien
ctagtcgtatactgggtatcgaata

SEQ ID NO: 85161 - DNA, 25 bp, Homo sapien
gactcgtatccaagcgatcgtagaa

SEQ ID NO: 85162 - DNA, 25 bp, Homo sapien
gactcgtatccatgcgatcgtagaa

SEQ ID NO: 85163 - DNA, 25 bp, Homo sapien
gaccaagacaattttgatgtaccaa

SEQ ID NO: 85164 - DNA, 25 bp, Homo sapien
gaccaagacaatattgatgtaccaa

SEQ ID NO: 85165 - DNA, 25 bp, Homo sapien
ttagagtcatctcctttttctcagg

SEQ ID NO: 85166 - DNA, 25 bp, Homo sapien
ttagagtcatctgctttttctcagg

SEQ ID NO: 85167 - DNA, 25 bp, Homo sapien
ttagagtcatctcctttttctcagg

SEQ ID NO: 85168 - DNA, 25 bp, Homo sapien
ttagagtcatctgctttttctcagg

SEQ ID NO: 85169 - DNA, 25 bp, Homo sapien
atgttaataccgttttattaccgga

SEQ ID NO: 85170 - DNA, 25 bp, Homo sapien
atgttaataccgatttattaccgga

SEQ ID NO: 85171 - DNA, 25 bp, Homo sapien
tcatgaggtaacacaatggtaacta

SEQ ID NO: 85172 - DNA, 25 bp, Homo sapien
tcatgaggtaactcaatggtaacta

SEQ ID NO: 85173 - DNA, 25 bp, Homo sapien
ccgacgggtgcacgaagtggtccta

SEQ ID NO: 85174 - DNA, 25 bp, Homo sapien
ccgacgggtgcaggaagtggtccta

SEQ ID NO: 85175 - DNA, 25 bp, Homo sapien
cagcacgcggagtcacgtgggtgac

SEQ ID NO: 85176 - DNA, 25 bp, Homo sapien
cagcacgcggagacacgtgggtgac

SEQ ID NO: 85177 - DNA, 25 bp, Homo sapien
gtccgagcgggggcacctcgggcat

SEQ ID NO: 85178 - DNA, 25 bp, Homo sapien
gtccgagcggggccacctcgggcat

SEQ ID NO: 85179 - DNA, 25 bp, Homo sapien
tcgtaagggtcctgggttcccggtc

SEQ ID NO: 85180 - DNA, 25 bp, Homo sapien
tcgtaagggtccagggttcccggtc

SEQ ID NO: 85181 - DNA, 25 bp, Homo sapien
ttcaggttccggaaattaagcgtct

SEQ ID NO: 85182 - DNA, 25 bp, Homo sapien
ttcaggttccggtaattaagcgtct

SEQ ID NO: 85183 - DNA, 25 bp, Homo sapien
gtcatgtttgtgtctatgacaactg

SEQ ID NO: 85184 - DNA, 25 bp, Homo sapien
gtcatgtttgtgactatgacaactg

SEQ ID NO: 85185 - DNA, 25 bp, Homo sapien
ccaaacttgtctgtgctgttctcgc

SEQ ID NO: 85186 - DNA, 25 bp, Homo sapien
ccaaacttgtctctgctgttctcgc

SEQ ID NO: 85187 - DNA, 25 bp, Homo sapien
actactcacggtccttttgtcgtat

SEQ ID NO: 85188 - DNA, 25 bp, Homo sapien
actactcacggtgcttttgtcgtat

SEQ ID NO: 85189 - DNA, 25 bp, Homo sapien
ttcaacatccttcgtgtccttcgac

SEQ ID NO: 85190 - DNA, 25 bp, Homo sapien
ttcaacatccttggtgtccttcgac

SEQ ID NO: 85191 - DNA, 25 bp, Homo sapien
tctaggagatcctaccgagcctgga

SEQ ID NO: 85192 - DNA, 25 bp, Homo sapien
tctaggagatccaaccgagcctgga

SEQ ID NO: 85193 - DNA, 25 bp, Homo sapien
tgaacggagcttccagtttctagaa

SEQ ID NO: 85194 - DNA, 25 bp, Homo sapien
tgaacggagcttgcagtttctagaa

SEQ ID NO: 85195 - DNA, 25 bp, Homo sapien
aaagcagaccagtgagtctttatat

SEQ ID NO: 85196 - DNA, 25 bp, Homo sapien
aaagcagaccagagagtctttatat

SEQ ID NO: 85197 - DNA, 25 bp, Homo sapien
tacccgactggaggagtacttcatt

SEQ ID NO: 85198 - DNA, 25 bp, Homo sapien
tacccgactggacgagtacttcatt

SEQ ID NO: 85199 - DNA, 25 bp, Homo sapien
ttttgaagttactgatctcttcatg

SEQ ID NO: 85200 - DNA, 25 bp, Homo sapien
ttttgaagttacagatctcttcatg

SEQ ID NO: 85201 - DNA, 25 bp, Homo sapien
ccttaggtaatttgtttcgctcatt

SEQ ID NO: 85202 - DNA, 25 bp, Homo sapien
ccttaggtaattagtttcgctcatt

SEQ ID NO: 85203 - DNA, 25 bp, Homo sapien
tatgtactaaatcgtttcacattac

SEQ ID NO: 85204 - DNA, 25 bp, Homo sapien
tatgtactaaatggtttcacattac

SEQ ID NO: 85205 - DNA, 25 bp, Homo sapien
cgtgtcctaaacttgacttcccttg

SEQ ID NO: 85206 - DNA, 25 bp, Homo sapien
cgtgtcctaaacatgacttcccttg

SEQ ID NO: 85207 - DNA, 25 bp, Homo sapien
cggcccgtagatgagacttccccag

SEQ ID NO: 85208 - DNA, 25 bp, Homo sapien
cggcccgtagatcagacttccccag

SEQ ID NO: 85209 - DNA, 25 bp, Homo sapien
gtgcggtcaccgtcgagaagccctg

SEQ ID NO: 85210 - DNA, 25 bp, Homo sapien
gtgcggtcaccgacgagaagccctg

SEQ ID NO: 85211 - DNA, 25 bp, Homo sapien
ccggtgttttctgtgttgagaagtc

SEQ ID NO: 85212 - DNA, 25 bp, Homo sapien
ccggtgttttctctgttgagaagtc

SEQ ID NO: 85213 - DNA, 25 bp, Homo sapien
gattttgtagacgtttacaacactt

SEQ ID NO: 85214 - DNA, 25 bp, Homo sapien
gattttgtagacctttacaacactt

SEQ ID NO: 85215 - DNA, 25 bp, Homo sapien
gttatttagaagctccactagccta

SEQ ID NO: 85216 - DNA, 25 bp, Homo sapien
gttatttagaaggtccactagccta

SEQ ID NO: 85217 - DNA, 25 bp, Homo sapien
cttatcgtaaacacctatagtgctc

SEQ ID NO: 85218 - DNA, 25 bp, Homo sapien
cttatcgtaaactcctatagtgctc

SEQ ID NO: 85219 - DNA, 25 bp, Homo sapien
tccttgaacgacacacattaggtcg

SEQ ID NO: 85220 - DNA, 25 bp, Homo sapien
tccttgaacgactcacattaggtcg

SEQ ID NO: 85221 - DNA, 25 bp, Homo sapien
agactgaacggaacactacttggtc

SEQ ID NO: 85222 - DNA, 25 bp, Homo sapien
agactgaacggatcactacttggtc

SEQ ID NO: 85223 - DNA, 25 bp, Homo sapien
cagacagtaggacgttacttttcta

SEQ ID NO: 85224 - DNA, 25 bp, Homo sapien
cagacagtaggaggttacttttcta

SEQ ID NO: 85225 - DNA, 25 bp, Homo sapien
taagaaccagactgtactcattaga

SEQ ID NO: 85226 - DNA, 25 bp, Homo sapien
taagaaccagacagtactcattaga

SEQ ID NO: 85227 - DNA, 25 bp, Homo sapien
cacattcgaggtacggtacccctga

SEQ ID NO: 85228 - DNA, 25 bp, Homo sapien
cacattcgaggttcggtacccctga

SEQ ID NO: 85229 - DNA, 25 bp, Homo sapien
gtctaactacgtctggtacaattta

SEQ ID NO: 85230 - DNA, 25 bp, Homo sapien
gtctaactacgtgtggtacaattta

SEQ ID NO: 85231 - DNA, 25 bp, Homo sapien
cttggacacgttttgacagttatta

SEQ ID NO: 85232 - DNA, 25 bp, Homo sapien
cttggacacgttatgacagttatta

SEQ ID NO: 85233 - DNA, 25 bp, Homo sapien
attttccacattgtcaagagtccac

SEQ ID NO: 85234 - DNA, 25 bp, Homo sapien
attttccacattctcaagagtccac

SEQ ID NO: 85235 - DNA, 25 bp, Homo sapien
ttctcacacgatctaaaaatactcc

SEQ ID NO: 85236 - DNA, 25 bp, Homo sapien
ttctcacacgatgtaaaaatactcc

SEQ ID NO: 85237 - DNA, 25 bp, Homo sapien
attgtacgaccatgaaaaatcattg

SEQ ID NO: 85238 - DNA, 25 bp, Homo sapien
attgtacgaccaagaaaaatcattg

SEQ ID NO: 85239 - DNA, 25 bp, Homo sapien
actatgttccaaaatgtatgcaatt

SEQ ID NO: 85240 - DNA, 25 bp, Homo sapien
actatgttccaatatgtatgcaatt

SEQ ID NO: 85241 - DNA, 25 bp, Homo sapien
ataacgtcaaatttagtcgggtctt

SEQ ID NO: 85242 - DNA, 25 bp, Homo sapien
ataacgtcaaatatagtcgggtctt

SEQ ID NO: 85243 - DNA, 25 bp, Homo sapien
atcgaccgagtctgaacagtgaccc

SEQ ID NO: 85244 - DNA, 25 bp, Homo sapien
atcgaccgagtcagaacagtgaccc

SEQ ID NO: 85245 - DNA, 25 bp, Homo sapien
acgttcggtcccctagagagggtcg

SEQ ID NO: 85246 - DNA, 25 bp, Homo sapien
acgttcggtcccgtagagagggtcg

SEQ ID NO: 85247 - DNA, 25 bp, Homo sapien
ggcgacgaccctctctaggggaccg

SEQ ID NO: 85248 - DNA, 25 bp, Homo sapien
ggcgacgaccctgtctaggggaccg

SEQ ID NO: 85249 - DNA, 25 bp, Homo sapien
acaggtgacttggtcagtaacttcc

SEQ ID NO: 85250 - DNA, 25 bp, Homo sapien
acaggtgacttgctcagtaacttcc

SEQ ID NO: 85251 - DNA, 25 bp, Homo sapien
ctcggtgtacttgaacactattttt

SEQ ID NO: 85252 - DNA, 25 bp, Homo sapien
ctcggtgtacttcaacactattttt

SEQ ID NO: 85253 - DNA, 25 bp, Homo sapien
tctccgtctttgaacgaggttctcc

SEQ ID NO: 85254 - DNA, 25 bp, Homo sapien
tctccgtctttgtacgaggttctcc

SEQ ID NO: 85255 - DNA, 25 bp, Homo sapien
ttggacactgtgtagtgttttactc

SEQ ID NO: 85256 - DNA, 25 bp, Homo sapien
ttggacactgtgaagtgttttactc

SEQ ID NO: 85257 - DNA, 25 bp, Homo sapien
gaattaacgttgtcttacttccgac

SEQ ID NO: 85258 - DNA, 25 bp, Homo sapien
gaattaacgttgacttacttccgac

SEQ ID NO: 85259 - DNA, 25 bp, Homo sapien
ttatgatacttattcagtcctccgg

SEQ ID NO: 85260 - DNA, 25 bp, Homo sapien
ttatgatacttaatcagtcctccgg

SEQ ID NO: 85261 - DNA, 25 bp, Homo sapien
ttctgaaattgttatcatacacgtg

SEQ ID NO: 85262 - DNA, 25 bp, Homo sapien
ttctgaaattgtaatcatacacgtg

SEQ ID NO: 85263 - DNA, 25 bp, Homo sapien
acttctgaaagagtcagtgaccgaa

SEQ ID NO: 85264 - DNA, 25 bp, Homo sapien
acttctgaaagactcagtgaccgaa

SEQ ID NO: 85265 - DNA, 25 bp, Homo sapien
atatgtccaaaaaccgaggacacaa

SEQ ID NO: 85266 - DNA, 25 bp, Homo sapien
atatgtccaaaatccgaggacacaa

SEQ ID NO: 85267 - DNA, 25 bp, Homo sapien
acattaacgatgtcctgtcggagaa

SEQ ID NO: 85268 - DNA, 25 bp, Homo sapien
acattaacgatgacctgtcggagaa

SEQ ID NO: 85269 - DNA, 25 bp, Homo sapien
tgtgacccggcctgcgacacgaggt

SEQ ID NO: 85270 - DNA, 25 bp, Homo sapien
tgtgacccggccagcgacacgaggt

SEQ ID NO: 85271 - DNA, 25 bp, Homo sapien
ccgtgtgcagggagcacacacgaac

SEQ ID NO: 85272 - DNA, 25 bp, Homo sapien
ccgtgtgcagggtgcacacacgaac

SEQ ID NO: 85273 - DNA, 25 bp, Homo sapien
gcgacacggattggtcacggacgac

SEQ ID NO: 85274 - DNA, 25 bp, Homo sapien
gcgacacggattcgtcacggacgac

SEQ ID NO: 85275 - DNA, 25 bp, Homo sapien
ggtaactcgtaactcctcaccgacg

SEQ ID NO: 85276 - DNA, 25 bp, Homo sapien
ggtaactcgtaagtcctcaccgacg

SEQ ID NO: 85277 - DNA, 25 bp, Homo sapien
gtcttagtgtaacctaccactgtaa

SEQ ID NO: 85278 - DNA, 25 bp, Homo sapien
gtcttagtgtaagctaccactgtaa

SEQ ID NO: 85279 - DNA, 25 bp, Homo sapien
ggtctaatagtactcccgatgtata

SEQ ID NO: 85280 - DNA, 25 bp, Homo sapien
ggtctaatagtagtcccgatgtata

SEQ ID NO: 85281 - DNA, 25 bp, Homo sapien
gagctacgtaagacgatgacattaa

SEQ ID NO: 85282 - DNA, 25 bp, Homo sapien
gagctacgtaagtcgatgacattaa

SEQ ID NO: 85283 - DNA, 25 bp, Homo sapien
catgtgactggaatactcatatttt

SEQ ID NO: 85284 - DNA, 25 bp, Homo sapien
catgtgactggattactcatatttt

SEQ ID NO: 85285 - DNA, 25 bp, Homo sapien
ggaagtgacttaaaaccatatttct

SEQ ID NO: 85286 - DNA, 25 bp, Homo sapien
ggaagtgacttataaccatatttct

SEQ ID NO: 85287 - DNA, 25 bp, Homo sapien
caggcgtagtggacgcgtatccttc

SEQ ID NO: 85288 - DNA, 25 bp, Homo sapien
caggcgtagtggtcgcgtatccttc

SEQ ID NO: 85289 - DNA, 25 bp, Homo sapien
caggtcgtacacaaagggaccttgt

SEQ ID NO: 85290 - DNA, 25 bp, Homo sapien
caggtcgtacactaagggaccttgt

SEQ ID NO: 85291 - DNA, 25 bp, Homo sapien
accctaggccataaaggacaccttg

SEQ ID NO: 85292 - DNA, 25 bp, Homo sapien
accctaggccattaaggacaccttg

SEQ ID NO: 85293 - DNA, 25 bp, Homo sapien
aagtttttcggtccttggaactccg

SEQ ID NO: 85294 - DNA, 25 bp, Homo sapien
aagtttttcggtgcttggaactccg

SEQ ID NO: 85295 - DNA, 25 bp, Homo sapien
atcattggatgattctttgtacacg

SEQ ID NO: 85296 - DNA, 25 bp, Homo sapien
atcattggatgaatctttgtacacg

SEQ ID NO: 85297 - DNA, 25 bp, Homo sapien
ccatggttaagagttacagtgtcac

SEQ ID NO: 85298 - DNA, 25 bp, Homo sapien
ccatggttaagacttacagtgtcac

SEQ ID NO: 85299 - DNA, 25 bp, Homo sapien
atcgctcgtttaagacctttcatca

SEQ ID NO: 85300 - DNA, 25 bp, Homo sapien
atcgctcgtttatgacctttcatca

SEQ ID NO: 85301 - DNA, 25 bp, Homo sapien
cgggtctacgtagacctttcggtta

SEQ ID NO: 85302 - DNA, 25 bp, Homo sapien
cgggtctacgtacacctttcggtta

SEQ ID NO: 85303 - DNA, 25 bp, Homo sapien
aacgttgtcccatcttatgtgttat

SEQ ID NO: 85304 - DNA, 25 bp, Homo sapien
aacgttgtcccaacttatgtgttat

SEQ ID NO: 85305 - DNA, 25 bp, Homo sapien
taatccactcatttgtcgtagttgt

SEQ ID NO: 85306 - DNA, 25 bp, Homo sapien
taatccactcatatgtcgtagttgt

SEQ ID NO: 85307 - DNA, 25 bp, Homo sapien
ttgagtgcagggacgcactacgtca

SEQ ID NO: 85308 - DNA, 25 bp, Homo sapien
ttgagtgcagggtcgcactacgtca

SEQ ID NO: 85309 - DNA, 25 bp, Homo sapien
tttggttcccggtttcagtgtacct

SEQ ID NO: 85310 - DNA, 25 bp, Homo sapien
tttggttcccggattcagtgtacct

SEQ ID NO: 85311 - DNA, 25 bp, Homo sapien
atttgattaccaaattactggtgtc

SEQ ID NO: 85312 - DNA, 25 bp, Homo sapien
atttgattaccatattactggtgtc

SEQ ID NO: 85313 - DNA, 25 bp, Homo sapien
gtttttgaagaaatactcgcttgtc

SEQ ID NO: 85314 - DNA, 25 bp, Homo sapien
gtttttgaagaattactcgcttgtc

SEQ ID NO: 85315 - DNA, 25 bp, Homo sapien
ttgtgaacagggtctctgtgtacgt

SEQ ID NO: 85316 - DNA, 25 bp, Homo sapien
ttgtgaacagggactctgtgtacgt

SEQ ID NO: 85317 - DNA, 25 bp, Homo sapien
ggtgacctaggtctctgggtctcgt

SEQ ID NO: 85318 - DNA, 25 bp, Homo sapien
ggtgacctaggtgtctgggtctcgt

SEQ ID NO: 85319 - DNA, 25 bp, Homo sapien
ttggtgtttcggtccggacgaccct

SEQ ID NO: 85320 - DNA, 25 bp, Homo sapien
ttggtgtttcggaccggacgaccct

SEQ ID NO: 85321 - DNA, 25 bp, Homo sapien
cggtgtatttgaaccgacctacctt

SEQ ID NO: 85322 - DNA, 25 bp, Homo sapien
cggtgtatttgatccgacctacctt

SEQ ID NO: 85323 - DNA, 25 bp, Homo sapien
aagtagtagtgtagtcccttacaca

SEQ ID NO: 85324 - DNA, 25 bp, Homo sapien
aagtagtagtgttgtcccttacaca

SEQ ID NO: 85325 - DNA, 25 bp, Homo sapien
taaagatctttcgtcgtcccgaata

SEQ ID NO: 85326 - DNA, 25 bp, Homo sapien
taaagatctttcctcgtcccgaata

SEQ ID NO: 85327 - DNA, 25 bp, Homo sapien
cagtcatcgtccacggtcgacacag

SEQ ID NO: 85328 - DNA, 25 bp, Homo sapien
cagtcatcgtcctcggtcgacacag

SEQ ID NO: 85329 - DNA, 25 bp, Homo sapien
cagactaaggggacgtcagtacatg

SEQ ID NO: 85330 - DNA, 25 bp, Homo sapien
cagactaaggggtcgtcagtacatg

SEQ ID NO: 85331 - DNA, 25 bp, Homo sapien
gaagtaagacaaggtcttacctagg

SEQ ID NO: 85332 - DNA, 25 bp, Homo sapien
gaagtaagacaacgtcttacctagg

SEQ ID NO: 85333 - DNA, 25 bp, Homo sapien
tgaacgagagtacaacgaaaccagg

SEQ ID NO: 85334 - DNA, 25 bp, Homo sapien
tgaacgagagtagaacgaaaccagg

SEQ ID NO: 85335 - DNA, 25 bp, Homo sapien
ggaaggtaacgtaaaacgacaattc

SEQ ID NO: 85336 - DNA, 25 bp, Homo sapien
ggaaggtaacgttaaacgacaattc

SEQ ID NO: 85337 - DNA, 25 bp, Homo sapien
gacaagaacttaagacgaggacttc

SEQ ID NO: 85338 - DNA, 25 bp, Homo sapien
gacaagaacttatgacgaggacttc

SEQ ID NO: 85339 - DNA, 25 bp, Homo sapien
gaaactacactttccccgtcgtgtc

SEQ ID NO: 85340 - DNA, 25 bp, Homo sapien
gaaactacacttaccccgtcgtgtc

SEQ ID NO: 85341 - DNA, 25 bp, Homo sapien
tactacacgtcgaacccgcgtttct

SEQ ID NO: 85342 - DNA, 25 bp, Homo sapien
tactacacgtcgtacccgcgtttct

SEQ ID NO: 85343 - DNA, 25 bp, Homo sapien
ccggtactcccatctcctagggtgt

SEQ ID NO: 85344 - DNA, 25 bp, Homo sapien
ccggtactcccaactcctagggtgt

SEQ ID NO: 85345 - DNA, 25 bp, Homo sapien
tttttacccctctgagatgtgtacg

SEQ ID NO: 85346 - DNA, 25 bp, Homo sapien
tttttacccctcagagatgtgtacg

SEQ ID NO: 85347 - DNA, 25 bp, Homo sapien
acgggttcactctcaggaaggtagt

SEQ ID NO: 85348 - DNA, 25 bp, Homo sapien
acgggttcactcacaggaaggtagt

SEQ ID NO: 85349 - DNA, 25 bp, Homo sapien
acaggacacttcacaggacagaggt

SEQ ID NO: 85350 - DNA, 25 bp, Homo sapien
acaggacacttctcaggacagaggt

SEQ ID NO: 85351 - DNA, 25 bp, Homo sapien
gagacgtccttaagggtctcggtgt

SEQ ID NO: 85352 - DNA, 25 bp, Homo sapien
gagacgtccttatgggtctcggtgt

SEQ ID NO: 85353 - DNA, 25 bp, Homo sapien
tcgacgtccttcacggtgtctactt

SEQ ID NO: 85354 - DNA, 25 bp, Homo sapien
tcgacgtccttctcggtgtctactt

SEQ ID NO: 85355 - DNA, 25 bp, Homo sapien
gtccggggtactccaggtcgactga

SEQ ID NO: 85356 - DNA, 25 bp, Homo sapien
gtccggggtactgcaggtcgactga

SEQ ID NO: 85357 - DNA, 25 bp, Homo sapien
agggtcctttgtttcgtcgcaggtc

SEQ ID NO: 85358 - DNA, 25 bp, Homo sapien
agggtcctttgtatcgtcgcaggtc

SEQ ID NO: 85359 - DNA, 25 bp, Homo sapien
ccgacaagactgaactgttctctct

SEQ ID NO: 85360 - DNA, 25 bp, Homo sapien
ccgacaagactgtactgttctctct

SEQ ID NO: 85361 - DNA, 25 bp, Homo sapien
ctcggtagatgtgacgtcgatccct

SEQ ID NO: 85362 - DNA, 25 bp, Homo sapien
ctcggtagatgtcacgtcgatccct

SEQ ID NO: 85363 - DNA, 25 bp, Homo sapien
cttcagagtcgtcgacacactcgtc

SEQ ID NO: 85364 - DNA, 25 bp, Homo sapien
cttcagagtcgtggacacactcgtc

SEQ ID NO: 85365 - DNA, 25 bp, Homo sapien
agtctccacggagaagtacacgtcc

SEQ ID NO: 85366 - DNA, 25 bp, Homo sapien
agtctccacggacaagtacacgtcc

SEQ ID NO: 85367 - DNA, 25 bp, Homo sapien
tcctaagggcaggaacaggtgccct

SEQ ID NO: 85368 - DNA, 25 bp, Homo sapien
tcctaagggcagcaacaggtgccct

SEQ ID NO: 85369 - DNA, 25 bp, Homo sapien
tattagggaggaaactacaggtccc

SEQ ID NO: 85370 - DNA, 25 bp, Homo sapien
tattagggaggatactacaggtccc

SEQ ID NO: 85371 - DNA, 25 bp, Homo sapien
ttcccaggagagaaaccgggtcaga

SEQ ID NO: 85372 - DNA, 25 bp, Homo sapien
ttcccaggagagtaaccgggtcaga

SEQ ID NO: 85373 - DNA, 25 bp, Homo sapien
cccaggagcataagtacgcaagtaa

SEQ ID NO: 85374 - DNA, 25 bp, Homo sapien
cccaggagcatatgtacgcaagtaa

SEQ ID NO: 85375 - DNA, 25 bp, Homo sapien
tccccgaggaggaccgtaccaggga

SEQ ID NO: 85376 - DNA, 25 bp, Homo sapien
tccccgaggaggtccgtaccaggga

SEQ ID NO: 85377 - DNA, 25 bp, Homo sapien
tttacgacgaatctggtcaaccgaa

SEQ ID NO: 85378 - DNA, 25 bp, Homo sapien
tttacgacgaatgtggtcaaccgaa

SEQ ID NO: 85379 - DNA, 25 bp, Homo sapien
tatacgaatacagagacaacagcat

SEQ ID NO: 85380 - DNA, 25 bp, Homo sapien
tatacgaatacacagacaacagcat

SEQ ID NO: 85381 - DNA, 25 bp, Homo sapien
aacgacatcccgaacaacgcgtcat

SEQ ID NO: 85382 - DNA, 25 bp, Homo sapien
aacgacatcccgtacaacgcgtcat

SEQ ID NO: 85383 - DNA, 25 bp, Homo sapien
taaacttagtattggagaacccact

SEQ ID NO: 85384 - DNA, 25 bp, Homo sapien
taaacttagtataggagaacccact

SEQ ID NO: 85385 - DNA, 25 bp, Homo sapien
atgggagtcgtgtcgtgacctccga

SEQ ID NO: 85386 - DNA, 25 bp, Homo sapien
atgggagtcgtgacgtgacctccga

SEQ ID NO: 85387 - DNA, 25 bp, Homo sapien
ggtcgagcatcgacgcgtcctccga

SEQ ID NO: 85388 - DNA, 25 bp, Homo sapien
ggtcgagcatcgtcgcgtcctccga

SEQ ID NO: 85389 - DNA, 25 bp, Homo sapien
gtccttgcactggtgtgtcgctccc

SEQ ID NO: 85390 - DNA, 25 bp, Homo sapien
gtccttgcactgctgtgtcgctccc

SEQ ID NO: 85391 - DNA, 25 bp, Homo sapien
ctcgaaccgtctggtgacgtaaacg

SEQ ID NO: 85392 - DNA, 25 bp, Homo sapien
ctcgaaccgtctcgtgacgtaaacg

SEQ ID NO: 85393 - DNA, 25 bp, Homo sapien
gtccgtactccctgtcttcgaagac

SEQ ID NO: 85394 - DNA, 25 bp, Homo sapien
gtccgtactcccagtcttcgaagac

SEQ ID NO: 85395 - DNA, 25 bp, Homo sapien
ttacgttgcctaagtatacaagtat

SEQ ID NO: 85396 - DNA, 25 bp, Homo sapien
ttacgttgcctatgtatacaagtat

SEQ ID NO: 85397 - DNA, 25 bp, Homo sapien
ttttacttcgtcttccgtacaatca

SEQ ID NO: 85398 - DNA, 25 bp, Homo sapien
ttttacttcgtcatccgtacaatca

SEQ ID NO: 85399 - DNA, 25 bp, Homo sapien
tgtatctttcgctcgtgataaacac

SEQ ID NO: 85400 - DNA, 25 bp, Homo sapien
tgtatctttcgcacgtgataaacac

SEQ ID NO: 85401 - DNA, 25 bp, Homo sapien
agatcttaaggtactgaattcgact

SEQ ID NO: 85402 - DNA, 25 bp, Homo sapien
agatcttaaggttctgaattcgact

SEQ ID NO: 85403 - DNA, 25 bp, Homo sapien
tctgtgtaagtcctgtgtacgtttt

SEQ ID NO: 85404 - DNA, 25 bp, Homo sapien
tctgtgtaagtcgtgtgtacgtttt

SEQ ID NO: 85405 - DNA, 25 bp, Homo sapien
ttcgttgtgctgactgtcggtcttc

SEQ ID NO: 85406 - DNA, 25 bp, Homo sapien
ttcgttgtgctgtctgtcggtcttc

SEQ ID NO: 85407 - DNA, 25 bp, Homo sapien
cctttctctctttggtgtccacgtt

SEQ ID NO: 85408 - DNA, 25 bp, Homo sapien
cctttctctcttaggtgtccacgtt

SEQ ID NO: 85409 - DNA, 25 bp, Homo sapien
tactttcgtatttatgccgtccatg

SEQ ID NO: 85410 - DNA, 25 bp, Homo sapien
tactttcgtattaatgccgtccatg

SEQ ID NO: 85411 - DNA, 25 bp, Homo sapien
tctcagactaggacactctcggtct

SEQ ID NO: 85412 - DNA, 25 bp, Homo sapien
tctcagactaggtcactctcggtct

SEQ ID NO: 85413 - DNA, 25 bp, Homo sapien
ctaactacttagaatcatctctgtc

SEQ ID NO: 85414 - DNA, 25 bp, Homo sapien
ctaactacttagtatcatctctgtc

SEQ ID NO: 85415 - DNA, 25 bp, Homo sapien
taacactcacgcaggtgtgactgtc

SEQ ID NO: 85416 - DNA, 25 bp, Homo sapien
taacactcacgctggtgtgactgtc

SEQ ID NO: 85417 - DNA, 25 bp, Homo sapien
attttgactgttcctagaggttttc

SEQ ID NO: 85418 - DNA, 25 bp, Homo sapien
attttgactgttgctagaggttttc

SEQ ID NO: 85419 - DNA, 25 bp, Homo sapien
ccaagaacctaggacctggatcctg

SEQ ID NO: 85420 - DNA, 25 bp, Homo sapien
ccaagaacctagcacctggatcctg

SEQ ID NO: 85421 - DNA, 25 bp, Homo sapien
aactaccatgtactgttccacgccg

SEQ ID NO: 85422 - DNA, 25 bp, Homo sapien
aactaccatgtagtgttccacgccg

SEQ ID NO: 85423 - DNA, 25 bp, Homo sapien
ctatcatgtcactgtccagtttacg

SEQ ID NO: 85424 - DNA, 25 bp, Homo sapien
ctatcatgtcacagtccagtttacg

SEQ ID NO: 85425 - DNA, 25 bp, Homo sapien
taagatctacgttgtgtcgttttac

SEQ ID NO: 85426 - DNA, 25 bp, Homo sapien
taagatctacgtagtgtcgttttac

SEQ ID NO: 85427 - DNA, 25 bp, Homo sapien
gcaaagaggacgttatctgtgaatc

SEQ ID NO: 85428 - DNA, 25 bp, Homo sapien
gcaaagaggacgatatctgtgaatc

SEQ ID NO: 85429 - DNA, 25 bp, Homo sapien
cagataaggaatttacttacgaaca

SEQ ID NO: 85430 - DNA, 25 bp, Homo sapien
cagataaggaatatacttacgaaca

SEQ ID NO: 85431 - DNA, 25 bp, Homo sapien
catactatgtcctggattcaaaagt

SEQ ID NO: 85432 - DNA, 25 bp, Homo sapien
catactatgtccaggattcaaaagt

SEQ ID NO: 85433 - DNA, 25 bp, Homo sapien
cccaggtccgtggatccgggacgct

SEQ ID NO: 85434 - DNA, 25 bp, Homo sapien
cccaggtccgtgcatccgggacgct

SEQ ID NO: 85435 - DNA, 25 bp, Homo sapien
gcctaagtcgtgaccttacttttac

SEQ ID NO: 85436 - DNA, 25 bp, Homo sapien
gcctaagtcgtgtccttacttttac

SEQ ID NO: 85437 - DNA, 25 bp, Homo sapien
tcgtatttatttcccttgtgtcttc

SEQ ID NO: 85438 - DNA, 25 bp, Homo sapien
tcgtatttatttgccttgtgtcttc

SEQ ID NO: 85439 - DNA, 25 bp, Homo sapien
cggttgtactaatgattttcggttc

SEQ ID NO: 85440 - DNA, 25 bp, Homo sapien
cggttgtactaaagattttcggttc

SEQ ID NO: 85441 - DNA, 25 bp, Homo sapien
ccatatcgaacagtggtcttgagga

SEQ ID NO: 85442 - DNA, 25 bp, Homo sapien
ccatatcgaacactggtcttgagga

SEQ ID NO: 85443 - DNA, 25 bp, Homo sapien
ttaggccgtgttcgagacagacacg

SEQ ID NO: 85444 - DNA, 25 bp, Homo sapien
ttaggccgtgttggagacagacacg

SEQ ID NO: 85445 - DNA, 25 bp, Homo sapien
ttaggacgagtcttcggaaaccaga

SEQ ID NO: 85446 - DNA, 25 bp, Homo sapien
ttaggacgagtcatcggaaaccaga

SEQ ID NO: 85447 - DNA, 25 bp, Homo sapien
tatgtaaatgtatgcaaacacaccg

SEQ ID NO: 85448 - DNA, 25 bp, Homo sapien
tatgtaaatgtaagcaaacacaccg

SEQ ID NO: 85449 - DNA, 25 bp, Homo sapien
ctcagtattaagaccctacaaagtg

SEQ ID NO: 85450 - DNA, 25 bp, Homo sapien
ctcagtattaagtccctacaaagtg

SEQ ID NO: 85451 - DNA, 25 bp, Homo sapien
agttgtcttggtgacctttaaagac

SEQ ID NO: 85452 - DNA, 25 bp, Homo sapien
agttgtcttggtcacctttaaagac

SEQ ID NO: 85453 - DNA, 25 bp, Homo sapien
agactaagttatgtccactttgaaa

SEQ ID NO: 85454 - DNA, 25 bp, Homo sapien
agactaagttatctccactttgaaa

SEQ ID NO: 85455 - DNA, 25 bp, Homo sapien
gattcttaaatgactccgtcaagat

SEQ ID NO: 85456 - DNA, 25 bp, Homo sapien
gattcttaaatgtctccgtcaagat

SEQ ID NO: 85457 - DNA, 25 bp, Homo sapien
gattcaaagaggatctcttacaccc

SEQ ID NO: 85458 - DNA, 25 bp, Homo sapien
gattcaaagaggttctcttacaccc

SEQ ID NO: 85459 - DNA, 25 bp, Homo sapien
aaagtcgtcggtttcgacctactac

SEQ ID NO: 85460 - DNA, 25 bp, Homo sapien
aaagtcgtcggtatcgacctactac

SEQ ID NO: 85461 - DNA, 25 bp, Homo sapien
accactagtgtctactcggtcttcg

SEQ ID NO: 85462 - DNA, 25 bp, Homo sapien
accactagtgtcaactcggtcttcg

SEQ ID NO: 85463 - DNA, 25 bp, Homo sapien
gacactacgtctaggtctcgcccta

SEQ ID NO: 85464 - DNA, 25 bp, Homo sapien
gacactacgtcttggtctcgcccta

SEQ ID NO: 85465 - DNA, 25 bp, Homo sapien
aacacgagacacagacggactccac

SEQ ID NO: 85466 - DNA, 25 bp, Homo sapien
aacacgagacactgacggactccac

SEQ ID NO: 85467 - DNA, 25 bp, Homo sapien
tgaacgtccttggtcgcgtccacgt

SEQ ID NO: 85468 - DNA, 25 bp, Homo sapien
tgaacgtccttgctcgcgtccacgt

SEQ ID NO: 85469 - DNA, 25 bp, Homo sapien
tcttggaccgtttggaccgggacgt

SEQ ID NO: 85470 - DNA, 25 bp, Homo sapien
tcttggaccgttaggaccgggacgt

SEQ ID NO: 85471 - DNA, 25 bp, Homo sapien
gtcttgtagcctgtatgaacaagac

SEQ ID NO: 85472 - DNA, 25 bp, Homo sapien
gtcttgtagcctctatgaacaagac

SEQ ID NO: 85473 - DNA, 25 bp, Homo sapien
cggtttgtttgttatgacctatgac

SEQ ID NO: 85474 - DNA, 25 bp, Homo sapien
cggtttgtttgtaatgacctatgac

SEQ ID NO: 85475 - DNA, 25 bp, Homo sapien
acgggttgtgtttctccccagacct

SEQ ID NO: 85476 - DNA, 25 bp, Homo sapien
acgggttgtgttactccccagacct

SEQ ID NO: 85477 - DNA, 25 bp, Homo sapien
accccttctaaggtgtgtccttcct

SEQ ID NO: 85478 - DNA, 25 bp, Homo sapien
accccttctaagctgtgtccttcct

SEQ ID NO: 85479 - DNA, 25 bp, Homo sapien
accccgaaaagattgttcgtgtcag

SEQ ID NO: 85480 - DNA, 25 bp, Homo sapien
accccgaaaagaatgttcgtgtcag

SEQ ID NO: 85481 - DNA, 25 bp, Homo sapien
acacccgaaacacaggtagcgttca

SEQ ID NO: 85482 - DNA, 25 bp, Homo sapien
acacccgaaacagaggtagcgttca

SEQ ID NO: 85483 - DNA, 25 bp, Homo sapien
cggttagagagactataacttacat

SEQ ID NO: 85484 - DNA, 25 bp, Homo sapien
cggttagagagagtataacttacat

SEQ ID NO: 85485 - DNA, 25 bp, Homo sapien
gtttctagactaactcaaacgagac

SEQ ID NO: 85486 - DNA, 25 bp, Homo sapien
gtttctagactatctcaaacgagac

SEQ ID NO: 85487 - DNA, 25 bp, Homo sapien
gtagtgtccgtaagcgaaaaaacgt

SEQ ID NO: 85488 - DNA, 25 bp, Homo sapien
gtagtgtccgtatgcgaaaaaacgt

SEQ ID NO: 85489 - DNA, 25 bp, Homo sapien
tggggtatgctcttttcaaagtccg

SEQ ID NO: 85490 - DNA, 25 bp, Homo sapien
tggggtatgctcatttcaaagtccg

SEQ ID NO: 85491 - DNA, 25 bp, Homo sapien
cgatgttatttcaagaccaagattg

SEQ ID NO: 85492 - DNA, 25 bp, Homo sapien
cgatgttatttctagaccaagattg

SEQ ID NO: 85493 - DNA, 25 bp, Homo sapien
gatgtttttaaggactctagagccc

SEQ ID NO: 85494 - DNA, 25 bp, Homo sapien
gatgtttttaagcactctagagccc

SEQ ID NO: 85495 - DNA, 25 bp, Homo sapien
gtggttgggacattcttaagtcctg

SEQ ID NO: 85496 - DNA, 25 bp, Homo sapien
gtggttgggacaatcttaagtcctg

SEQ ID NO: 85497 - DNA, 25 bp, Homo sapien
ataggaatatcgttacatctacgtt

SEQ ID NO: 85498 - DNA, 25 bp, Homo sapien
ataggaatatcgatacatctacgtt

SEQ ID NO: 85499 - DNA, 25 bp, Homo sapien
tattaagtgaactttactccattct

SEQ ID NO: 85500 - DNA, 25 bp, Homo sapien
tattaagtgaacattactccattct

SEQ ID NO: 85501 - DNA, 25 bp, Homo sapien
agttcggtgtacaagtttaaactcc

SEQ ID NO: 85502 - DNA, 25 bp, Homo sapien
agttcggtgtactagtttaaactcc

SEQ ID NO: 85503 - DNA, 25 bp, Homo sapien
agtagttttttacttacacgtgttc

SEQ ID NO: 85504 - DNA, 25 bp, Homo sapien
agtagttttttagttacacgtgttc

SEQ ID NO: 85505 - DNA, 25 bp, Homo sapien
ttcctaagttttatgtcaaggtcct

SEQ ID NO: 85506 - DNA, 25 bp, Homo sapien
ttcctaagttttttgtcaaggtcct

SEQ ID NO: 85507 - DNA, 25 bp, Homo sapien
gtgataaagttcgaggtcaaacctc

SEQ ID NO: 85508 - DNA, 25 bp, Homo sapien
gtgataaagttccaggtcaaacctc

SEQ ID NO: 85509 - DNA, 25 bp, Homo sapien
tgacagaaggaacaggaccacaggg

SEQ ID NO: 85510 - DNA, 25 bp, Homo sapien
tgacagaaggaagaggaccacaggg

SEQ ID NO: 85511 - DNA, 25 bp, Homo sapien
gacgaaccgacacgaaaccggcggg

SEQ ID NO: 85512 - DNA, 25 bp, Homo sapien
gacgaaccgacaggaaaccggcggg

SEQ ID NO: 85513 - DNA, 25 bp, Homo sapien
gaccacttccgtatcagccggtctg

SEQ ID NO: 85514 - DNA, 25 bp, Homo sapien
gaccacttccgtttcagccggtctg

SEQ ID NO: 85515 - DNA, 25 bp, Homo sapien
acgaccttacactcctcagacgggg

SEQ ID NO: 85516 - DNA, 25 bp, Homo sapien
acgaccttacacacctcagacgggg

SEQ ID NO: 85517 - DNA, 25 bp, Homo sapien
tactcactcttaggtcccggaaggg

SEQ ID NO: 85518 - DNA, 25 bp, Homo sapien
tactcactcttacgtcccggaaggg

SEQ ID NO: 85519 - DNA, 25 bp, Homo sapien
gaaccgctctactctccgatgcggg

SEQ ID NO: 85520 - DNA, 25 bp, Homo sapien
gaaccgctctacactccgatgcggg

SEQ ID NO: 85521 - DNA, 25 bp, Homo sapien
gagcttctatagcaactgcttcctc

SEQ ID NO: 85522 - DNA, 25 bp, Homo sapien
gagcttctataggaactgcttcctc

SEQ ID NO: 85523 - DNA, 25 bp, Homo sapien
cgggttcccgtgaaagtccgtgacc

SEQ ID NO: 85524 - DNA, 25 bp, Homo sapien
cgggttcccgtgtaagtccgtgacc

SEQ ID NO: 85525 - DNA, 25 bp, Homo sapien
gtgcccagtgcttcgtctcggactc

SEQ ID NO: 85526 - DNA, 25 bp, Homo sapien
gtgcccagtgctacgtctcggactc

SEQ ID NO: 85527 - DNA, 25 bp, Homo sapien
gaaacggcctctttctccgtcactt

SEQ ID NO: 85528 - DNA, 25 bp, Homo sapien
gaaacggcctctatctccgtcactt

SEQ ID NO: 85529 - DNA, 25 bp, Homo sapien
ggtctttccactaccggttctatgt

SEQ ID NO: 85530 - DNA, 25 bp, Homo sapien
ggtctttccacttccggttctatgt

SEQ ID NO: 85531 - DNA, 25 bp, Homo sapien
aactttctcagctagtctttctggt

SEQ ID NO: 85532 - DNA, 25 bp, Homo sapien
aactttctcagcaagtctttctggt

SEQ ID NO: 85533 - DNA, 25 bp, Homo sapien
tctccgcagctagtatttcgtgtgt

SEQ ID NO: 85534 - DNA, 25 bp, Homo sapien
tctccgcagctactatttcgtgtgt

SEQ ID NO: 85535 - DNA, 25 bp, Homo sapien
cgtgtgttgaactcctattaatggt

SEQ ID NO: 85536 - DNA, 25 bp, Homo sapien
cgtgtgttgaacacctattaatggt

SEQ ID NO: 85537 - DNA, 25 bp, Homo sapien
tgtgcggaaagaaggtcgacatcgc

SEQ ID NO: 85538 - DNA, 25 bp, Homo sapien
tgtgcggaaagatggtcgacatcgc

SEQ ID NO: 85539 - DNA, 25 bp, Homo sapien
gggacacccaaagtgtctcacctct

SEQ ID NO: 85540 - DNA, 25 bp, Homo sapien
gggacacccaaactgtctcacctct

SEQ ID NO: 85541 - DNA, 25 bp, Homo sapien
tagtaccaccgagatatgtcctccc

SEQ ID NO: 85542 - DNA, 25 bp, Homo sapien
tagtaccaccgacatatgtcctccc

SEQ ID NO: 85543 - DNA, 25 bp, Homo sapien
ggtgagaaccttcttaacctgtaac

SEQ ID NO: 85544 - DNA, 25 bp, Homo sapien
ggtgagaaccttgttaacctgtaac

SEQ ID NO: 85545 - DNA, 25 bp, Homo sapien
atgtgacagcttttacaaaccttag

SEQ ID NO: 85546 - DNA, 25 bp, Homo sapien
atgtgacagcttatacaaaccttag

SEQ ID NO: 85547 - DNA, 25 bp, Homo sapien
aggggacaactcataaaactcgctt

SEQ ID NO: 85548 - DNA, 25 bp, Homo sapien
aggggacaactcttaaaactcgctt

SEQ ID NO: 85549 - DNA, 25 bp, Homo sapien
gcgcggaaccgcaccgagagtgtca

SEQ ID NO: 85550 - DNA, 25 bp, Homo sapien
gcgcggaaccgctccgagagtgtca

SEQ ID NO: 85551 - DNA, 25 bp, Homo sapien
atctggaaaactttcttacactcgg

SEQ ID NO: 85552 - DNA, 25 bp, Homo sapien
atctggaaaactatcttacactcgg

SEQ ID NO: 85553 - DNA, 25 bp, Homo sapien
gtctggagaaggtccgtcccactgt

SEQ ID NO: 85554 - DNA, 25 bp, Homo sapien
gtctggagaaggaccgtcccactgt

SEQ ID NO: 85555 - DNA, 25 bp, Homo sapien
ctggagccggctgtacctcacgtct

SEQ ID NO: 85556 - DNA, 25 bp, Homo sapien
ctggagccggctctacctcacgtct

SEQ ID NO: 85557 - DNA, 25 bp, Homo sapien
tcacttcccgtcttagctcaggact

SEQ ID NO: 85558 - DNA, 25 bp, Homo sapien
tcacttcccgtcatagctcaggact

SEQ ID NO: 85559 - DNA, 25 bp, Homo sapien
tccttatgacgaagtcctagaggtc

SEQ ID NO: 85560 - DNA, 25 bp, Homo sapien
tccttatgacgatgtcctagaggtc

SEQ ID NO: 85561 - DNA, 25 bp, Homo sapien
accctgaactacagtcttttaggtc

SEQ ID NO: 85562 - DNA, 25 bp, Homo sapien
accctgaactactgtcttttaggtc

SEQ ID NO: 85563 - DNA, 25 bp, Homo sapien
cactccgactacagacacaaagtga

SEQ ID NO: 85564 - DNA, 25 bp, Homo sapien
cactccgactactgacacaaagtga

SEQ ID NO: 85565 - DNA, 25 bp, Homo sapien
acgtcctctctcatgtccaattgtg

SEQ ID NO: 85566 - DNA, 25 bp, Homo sapien
acgtcctctctcttgtccaattgtg

SEQ ID NO: 85567 - DNA, 25 bp, Homo sapien
cgagacttccactcgttcgaaattg

SEQ ID NO: 85568 - DNA, 25 bp, Homo sapien
cgagacttccacacgttcgaaattg

SEQ ID NO: 85569 - DNA, 25 bp, Homo sapien
ccaagtcctccggtctttaaaggtg

SEQ ID NO: 85570 - DNA, 25 bp, Homo sapien
ccaagtcctccgctctttaaaggtg

SEQ ID NO: 85571 - DNA, 25 bp, Homo sapien
tgacgcgactctttttgtcaaagta

SEQ ID NO: 85572 - DNA, 25 bp, Homo sapien
tgacgcgactctatttgtcaaagta

SEQ ID NO: 85573 - DNA, 25 bp, Homo sapien
atgagtctattttgtgtctaccatc

SEQ ID NO: 85574 - DNA, 25 bp, Homo sapien
atgagtctatttagtgtctaccatc

SEQ ID NO: 85575 - DNA, 25 bp, Homo sapien
ctagtagtatatgttctctacttta

SEQ ID NO: 85576 - DNA, 25 bp, Homo sapien
ctagtagtatatcttctctacttta

SEQ ID NO: 85577 - DNA, 25 bp, Homo sapien
attcaagtgtcaactttcttggtaa

SEQ ID NO: 85578 - DNA, 25 bp, Homo sapien
attcaagtgtcatctttcttggtaa

SEQ ID NO: 85579 - DNA, 25 bp, Homo sapien
gtctgtgtccatttgctccggtggt

SEQ ID NO: 85580 - DNA, 25 bp, Homo sapien
gtctgtgtccatatgctccggtggt

SEQ ID NO: 85581 - DNA, 25 bp, Homo sapien
tcataccaccaacacgtccgggagt

SEQ ID NO: 85582 - DNA, 25 bp, Homo sapien
tcataccaccaagacgtccgggagt

SEQ ID NO: 85583 - DNA, 25 bp, Homo sapien
cctcctgtctcaatctacttcaagg

SEQ ID NO: 85584 - DNA, 25 bp, Homo sapien
cctcctgtctcattctacttcaagg

SEQ ID NO: 85585 - DNA, 25 bp, Homo sapien
gcgcagctgcctgtcgtgtgtccaa

SEQ ID NO: 85586 - DNA, 25 bp, Homo sapien
gcgcagctgcctctcgtgtgtccaa

SEQ ID NO: 85587 - DNA, 25 bp, Homo sapien
tccaccctagagactgtggtccaag

SEQ ID NO: 85588 - DNA, 25 bp, Homo sapien
tccaccctagagtctgtggtccaag

SEQ ID NO: 85589 - DNA, 25 bp, Homo sapien
tcagagctaagtaccgtaggtttta

SEQ ID NO: 85590 - DNA, 25 bp, Homo sapien
tcagagctaagttccgtaggtttta

SEQ ID NO: 85591 - DNA, 25 bp, Homo sapien
catgtaaagatgttgcaggtattta

SEQ ID NO: 85592 - DNA, 25 bp, Homo sapien
catgtaaagatgatgcaggtattta

SEQ ID NO: 85593 - DNA, 25 bp, Homo sapien
gattcctcgaggttattggttttct

SEQ ID NO: 85594 - DNA, 25 bp, Homo sapien
gattcctcgaggatattggttttct

SEQ ID NO: 85595 - DNA, 25 bp, Homo sapien
atcctccggttcttgcagtactcct

SEQ ID NO: 85596 - DNA, 25 bp, Homo sapien
atcctccggttcatgcagtactcct

SEQ ID NO: 85597 - DNA, 25 bp, Homo sapien
accgtcgaggacgtcgttgtgaacc

SEQ ID NO: 85598 - DNA, 25 bp, Homo sapien
accgtcgaggacctcgttgtgaacc

SEQ ID NO: 85599 - DNA, 25 bp, Homo sapien
gaaccgacctactagtttgtgtcgg

SEQ ID NO: 85600 - DNA, 25 bp, Homo sapien
gaaccgacctacaagtttgtgtcgg

SEQ ID NO: 85601 - DNA, 25 bp, Homo sapien
attcggtcaaacacaactgttagtc

SEQ ID NO: 85602 - DNA, 25 bp, Homo sapien
attcggtcaaactcaactgttagtc

SEQ ID NO: 85603 - DNA, 25 bp, Homo sapien
tgtaagtcttaaggttcatctgttc

SEQ ID NO: 85604 - DNA, 25 bp, Homo sapien
tgtaagtcttaacgttcatctgttc

SEQ ID NO: 85605 - DNA, 25 bp, Homo sapien
gtgaatcttctttcaccctgtatcg

SEQ ID NO: 85606 - DNA, 25 bp, Homo sapien
gtgaatcttcttacaccctgtatcg

SEQ ID NO: 85607 - DNA, 25 bp, Homo sapien
acagatgatctgttacctctttccg

SEQ ID NO: 85608 - DNA, 25 bp, Homo sapien
acagatgatctgatacctctttccg

SEQ ID NO: 85609 - DNA, 25 bp, Homo sapien
ggtactccagccagaacccgttggg

SEQ ID NO: 85610 - DNA, 25 bp, Homo sapien
ggtactccagcctgaacccgttggg

SEQ ID NO: 85611 - DNA, 25 bp, Homo sapien
caaaagactcggtccgtcttcgttt

SEQ ID NO: 85612 - DNA, 25 bp, Homo sapien
caaaagactcggaccgtcttcgttt

SEQ ID NO: 85613 - DNA, 25 bp, Homo sapien
aatgggtcgagtccactaatctctg

SEQ ID NO: 85614 - DNA, 25 bp, Homo sapien
aatgggtcgagtgcactaatctctg

SEQ ID NO: 85615 - DNA, 25 bp, Homo sapien
agtaggtaagggtgttacattaccc

SEQ ID NO: 85616 - DNA, 25 bp, Homo sapien
agtaggtaagggagttacattaccc

SEQ ID NO: 85617 - DNA, 25 bp, Homo sapien
cacggtcgagggtgaaacatgtccc

SEQ ID NO: 85618 - DNA, 25 bp, Homo sapien
cacggtcgagggagaaacatgtccc

SEQ ID NO: 85619 - DNA, 25 bp, Homo sapien
acataaacaccatattctcgttgta

SEQ ID NO: 85620 - DNA, 25 bp, Homo sapien
acataaacaccaaattctcgttgta

SEQ ID NO: 85621 - DNA, 25 bp, Homo sapien
gttaagagctccattttattccgta

SEQ ID NO: 85622 - DNA, 25 bp, Homo sapien
gttaagagctcctttttattccgta

SEQ ID NO: 85623 - DNA, 25 bp, Homo sapien
caggggtgacttaaaccgtgtcctt

SEQ ID NO: 85624 - DNA, 25 bp, Homo sapien
caggggtgactttaaccgtgtcctt

SEQ ID NO: 85625 - DNA, 25 bp, Homo sapien
cagaggattccttctaaagttaaag

SEQ ID NO: 85626 - DNA, 25 bp, Homo sapien
cagaggattcctactaaagttaaag

SEQ ID NO: 85627 - DNA, 25 bp, Homo sapien
tcgtcgatatttcacttgcatgact

SEQ ID NO: 85628 - DNA, 25 bp, Homo sapien
tcgtcgatatttgacttgcatgact

SEQ ID NO: 85629 - DNA, 25 bp, Homo sapien
gtatcgatttagatactccgtttct

SEQ ID NO: 85630 - DNA, 25 bp, Homo sapien
gtatcgatttagttactccgtttct

SEQ ID NO: 85631 - DNA, 25 bp, Homo sapien
tgtcgaggctagtctttcatgtgtc

SEQ ID NO: 85632 - DNA, 25 bp, Homo sapien
tgtcgaggctagactttcatgtgtc

SEQ ID NO: 85633 - DNA, 25 bp, Homo sapien
gatcgtaaagtaactgtatccattc

SEQ ID NO: 85634 - DNA, 25 bp, Homo sapien
gatcgtaaagtatctgtatccattc

SEQ ID NO: 85635 - DNA, 25 bp, Homo sapien
tcttaggtgccgtcttttcggtctc

SEQ ID NO: 85636 - DNA, 25 bp, Homo sapien
tcttaggtgccgacttttcggtctc

SEQ ID NO: 85637 - DNA, 25 bp, Homo sapien
tccgagttagagattgaggacctac

SEQ ID NO: 85638 - DNA, 25 bp, Homo sapien
tccgagttagagtttgaggacctac

SEQ ID NO: 85639 - DNA, 25 bp, Homo sapien
aaggttcccactaggtcaacccaac

SEQ ID NO: 85640 - DNA, 25 bp, Homo sapien
aaggttcccacttggtcaacccaac

SEQ ID NO: 85641 - DNA, 25 bp, Homo sapien
gtgttccgcccggtaccgaccctgg

SEQ ID NO: 85642 - DNA, 25 bp, Homo sapien
gtgttccgcccgctaccgaccctgg

SEQ ID NO: 85643 - DNA, 25 bp, Homo sapien
gaggatcccctgcaccgagtccggg

SEQ ID NO: 85644 - DNA, 25 bp, Homo sapien
gaggatcccctggaccgagtccggg

SEQ ID NO: 85645 - DNA, 25 bp, Homo sapien
gggaaggtgtcacaaacccctcaac

SEQ ID NO: 85646 - DNA, 25 bp, Homo sapien
gggaaggtgtcagaaacccctcaac

SEQ ID NO: 85647 - DNA, 25 bp, Homo sapien
aggacttgatttaccgtaacaaact

SEQ ID NO: 85648 - DNA, 25 bp, Homo sapien
aggacttgattttccgtaacaaact

SEQ ID NO: 85649 - DNA, 25 bp, Homo sapien
ggtttgtcgttatcagtacgggaac

SEQ ID NO: 85650 - DNA, 25 bp, Homo sapien
ggtttgtcgttaacagtacgggaac

SEQ ID NO: 85651 - DNA, 25 bp, Homo sapien
tgacactcagaaaccggtcataaac

SEQ ID NO: 85652 - DNA, 25 bp, Homo sapien
tgacactcagaatccggtcataaac

SEQ ID NO: 85653 - DNA, 25 bp, Homo sapien
tgcaccgacaatccatcgtagaagg

SEQ ID NO: 85654 - DNA, 25 bp, Homo sapien
tgcaccgacaatgcatcgtagaagg

SEQ ID NO: 85655 - DNA, 25 bp, Homo sapien
gacatagatatcgtgtcttagcaac

SEQ ID NO: 85656 - DNA, 25 bp, Homo sapien
gacatagatatcctgtcttagcaac

SEQ ID NO: 85657 - DNA, 25 bp, Homo sapien
tcgtccaatagtccttttacgagaa

SEQ ID NO: 85658 - DNA, 25 bp, Homo sapien
tcgtccaatagtgcttttacgagaa

SEQ ID NO: 85659 - DNA, 25 bp, Homo sapien
tcatgacctaatccgtttgatacag

SEQ ID NO: 85660 - DNA, 25 bp, Homo sapien
tcatgacctaatgcgtttgatacag

SEQ ID NO: 85661 - DNA, 25 bp, Homo sapien
ggttagtcccgtcctttcttcaaag

SEQ ID NO: 85662 - DNA, 25 bp, Homo sapien
ggttagtcccgtgctttcttcaaag

SEQ ID NO: 85663 - DNA, 25 bp, Homo sapien
gtgactgtttattctacctcgaact

SEQ ID NO: 85664 - DNA, 25 bp, Homo sapien
gtgactgtttatactacctcgaact

SEQ ID NO: 85665 - DNA, 25 bp, Homo sapien
gtcctatttttctacgcgtgccctt

SEQ ID NO: 85666 - DNA, 25 bp, Homo sapien
gtcctatttttcaacgcgtgccctt

SEQ ID NO: 85667 - DNA, 25 bp, Homo sapien
cttccttgttggtgagagttttctc

SEQ ID NO: 85668 - DNA, 25 bp, Homo sapien
cttccttgttggagagagttttctc

SEQ ID NO: 85669 - DNA, 25 bp, Homo sapien
tttatgactgtaattaatttatctc

SEQ ID NO: 85670 - DNA, 25 bp, Homo sapien
tttatgactgtatttaatttatctc

SEQ ID NO: 85671 - DNA, 25 bp, Homo sapien
tcggtaataggttgtctgtcatttc

SEQ ID NO: 85672 - DNA, 25 bp, Homo sapien
tcggtaataggtagtctgtcatttc

SEQ ID NO: 85673 - DNA, 25 bp, Homo sapien
aactgggtgtgagatccactgtatc

SEQ ID NO: 85674 - DNA, 25 bp, Homo sapien
aactgggtgtgacatccactgtatc

SEQ ID NO: 85675 - DNA, 25 bp, Homo sapien
gtaaacggggttgtcggtagacttc

SEQ ID NO: 85676 - DNA, 25 bp, Homo sapien
gtaaacggggttctcggtagacttc

SEQ ID NO: 85677 - DNA, 25 bp, Homo sapien
tgttaaacgccgtgaacaccttttt

SEQ ID NO: 85678 - DNA, 25 bp, Homo sapien
tgttaaacgccgagaacaccttttt

SEQ ID NO: 85679 - DNA, 25 bp, Homo sapien
tgtttctccggtgaaaaccttttat

SEQ ID NO: 85680 - DNA, 25 bp, Homo sapien
tgtttctccggtcaaaaccttttat

SEQ ID NO: 85681 - DNA, 25 bp, Homo sapien
gatagattttcaacgaatgctcatt

SEQ ID NO: 85682 - DNA, 25 bp, Homo sapien
gatagattttcatcgaatgctcatt

SEQ ID NO: 85683 - DNA, 25 bp, Homo sapien
agtgatttaagacatcgagaccaat

SEQ ID NO: 85684 - DNA, 25 bp, Homo sapien
agtgatttaagagatcgagaccaat

SEQ ID NO: 85685 - DNA, 25 bp, Homo sapien
gtgatggaagaaggctatcgacaga

SEQ ID NO: 85686 - DNA, 25 bp, Homo sapien
gtgatggaagaacgctatcgacaga

SEQ ID NO: 85687 - DNA, 25 bp, Homo sapien
gatacataacgactccgtatccata

SEQ ID NO: 85688 - DNA, 25 bp, Homo sapien
gatacataacgagtccgtatccata

SEQ ID NO: 85689 - DNA, 25 bp, Homo sapien
gtgtccgacgtccaccgtaaccaga

SEQ ID NO: 85690 - DNA, 25 bp, Homo sapien
gtgtccgacgtcgaccgtaaccaga

SEQ ID NO: 85691 - DNA, 25 bp, Homo sapien
agattccgatgatgagtgtccagtt

SEQ ID NO: 85692 - DNA, 25 bp, Homo sapien
agattccgatgaagagtgtccagtt

SEQ ID NO: 85693 - DNA, 25 bp, Homo sapien
ggaccactcggacaaactcaagact

SEQ ID NO: 85694 - DNA, 25 bp, Homo sapien
ggaccactcggagaaactcaagact

SEQ ID NO: 85695 - DNA, 25 bp, Homo sapien
cgaactccggaatacatacatcgac

SEQ ID NO: 85696 - DNA, 25 bp, Homo sapien
cgaactccggaaaacatacatcgac

SEQ ID NO: 85697 - DNA, 25 bp, Homo sapien
ggaggatccgaagacacttaaagtc

SEQ ID NO: 85698 - DNA, 25 bp, Homo sapien
ggaggatccgaacacacttaaagtc

SEQ ID NO: 85699 - DNA, 25 bp, Homo sapien
ggtctctaggtttacaccagtcctc

SEQ ID NO: 85700 - DNA, 25 bp, Homo sapien
ggtctctaggttaacaccagtcctc

SEQ ID NO: 85701 - DNA, 25 bp, Homo sapien
tggtatcgtcagtaaaacatatcca

SEQ ID NO: 85702 - DNA, 25 bp, Homo sapien
tggtatcgtcagaaaaacatatcca

SEQ ID NO: 85703 - DNA, 25 bp, Homo sapien
cgtgtatgtcaaatgaacaatctta

SEQ ID NO: 85704 - DNA, 25 bp, Homo sapien
cgtgtatgtcaattgaacaatctta

SEQ ID NO: 85705 - DNA, 25 bp, Homo sapien
cgtcgagagtgaaacacgagttgtc

SEQ ID NO: 85706 - DNA, 25 bp, Homo sapien
cgtcgagagtgatacacgagttgtc

SEQ ID NO: 85707 - DNA, 25 bp, Homo sapien
taaggagagagacacaatagtctcg

SEQ ID NO: 85708 - DNA, 25 bp, Homo sapien
taaggagagagagacaatagtctcg

SEQ ID NO: 85709 - DNA, 25 bp, Homo sapien
cttgataaggggtacgaaacttact

SEQ ID NO: 85710 - DNA, 25 bp, Homo sapien
cttgataaggggaacgaaacttact

SEQ ID NO: 85711 - DNA, 25 bp, Homo sapien
ctctggtgcccgaggtgacgattct

SEQ ID NO: 85712 - DNA, 25 bp, Homo sapien
ctctggtgcccgtggtgacgattct

SEQ ID NO: 85713 - DNA, 25 bp, Homo sapien
tgtgtctgattcatggttcgtctcc

SEQ ID NO: 85714 - DNA, 25 bp, Homo sapien
tgtgtctgattcttggttcgtctcc

SEQ ID NO: 85715 - DNA, 25 bp, Homo sapien
ggagcagtgtgccaggtgtccgaac

SEQ ID NO: 85716 - DNA, 25 bp, Homo sapien
ggagcagtgtgcgaggtgtccgaac

SEQ ID NO: 85717 - DNA, 25 bp, Homo sapien
caggacgccccagaggtggaccgac

SEQ ID NO: 85718 - DNA, 25 bp, Homo sapien
caggacgccccacaggtggaccgac

SEQ ID NO: 85719 - DNA, 25 bp, Homo sapien
attcgaaacccttcgtggacgcggt

SEQ ID NO: 85720 - DNA, 25 bp, Homo sapien
attcgaaaccctacgtggacgcggt

SEQ ID NO: 85721 - DNA, 25 bp, Homo sapien
ttaacgatgtcctgtcggagaaggt

SEQ ID NO: 85722 - DNA, 25 bp, Homo sapien
ttaacgatgtccagtcggagaaggt

SEQ ID NO: 85723 - DNA, 25 bp, Homo sapien
caccgatgagtttaccattttgatt

SEQ ID NO: 85724 - DNA, 25 bp, Homo sapien
caccgatgagttaaccattttgatt

SEQ ID NO: 85725 - DNA, 25 bp, Homo sapien
actttgggttcaacaatgaaactct

SEQ ID NO: 85726 - DNA, 25 bp, Homo sapien
actttgggttcatcaatgaaactct

SEQ ID NO: 85727 - DNA, 25 bp, Homo sapien
tgtgtcgtcgtacacggttgagatt

SEQ ID NO: 85728 - DNA, 25 bp, Homo sapien
tgtgtcgtcgtagacggttgagatt

SEQ ID NO: 85729 - DNA, 25 bp, Homo sapien
aatactgttgtatgagggttcttct

SEQ ID NO: 85730 - DNA, 25 bp, Homo sapien
aatactgttgtaagagggttcttct

SEQ ID NO: 85731 - DNA, 25 bp, Homo sapien
gaatctacttctgagcgggtgcctg

SEQ ID NO: 85732 - DNA, 25 bp, Homo sapien
gaatctacttctcagcgggtgcctg

SEQ ID NO: 85733 - DNA, 25 bp, Homo sapien
aggtgtcctctcaaccggtccggtc

SEQ ID NO: 85734 - DNA, 25 bp, Homo sapien
aggtgtcctctctaccggtccggtc

SEQ ID NO: 85735 - DNA, 25 bp, Homo sapien
gtgtctcctcgatctctgtctgaag

SEQ ID NO: 85736 - DNA, 25 bp, Homo sapien
gtgtctcctcgaactctgtctgaag

SEQ ID NO: 85737 - DNA, 25 bp, Homo sapien
acttgtcctcttaaatgctctgacg

SEQ ID NO: 85738 - DNA, 25 bp, Homo sapien
acttgtcctctttaatgctctgacg

SEQ ID NO: 85739 - DNA, 25 bp, Homo sapien
ctttcctctcgtaaagtaacactta

SEQ ID NO: 85740 - DNA, 25 bp, Homo sapien
ctttcctctcgttaagtaacactta

SEQ ID NO: 85741 - DNA, 25 bp, Homo sapien
cttcctcttcggtttaccgacgtga

SEQ ID NO: 85742 - DNA, 25 bp, Homo sapien
cttcctcttcggattaccgacgtga

SEQ ID NO: 85743 - DNA, 25 bp, Homo sapien
attacatgttgtacgtcttccgtaa

SEQ ID NO: 85744 - DNA, 25 bp, Homo sapien
attacatgttgttcgtcttccgtaa

SEQ ID NO: 85745 - DNA, 25 bp, Homo sapien
ctagtgtaagtgtcggtagatcaca

SEQ ID NO: 85746 - DNA, 25 bp, Homo sapien
ctagtgtaagtgacggtagatcaca

SEQ ID NO: 85747 - DNA, 25 bp, Homo sapien
tagtgtccgtgtcgtcgcgcctcgg

SEQ ID NO: 85748 - DNA, 25 bp, Homo sapien
tagtgtccgtgtggtcgcgcctcgg

SEQ ID NO: 85749 - DNA, 25 bp, Homo sapien
tgacgtccacgtgtctccgaacctg

SEQ ID NO: 85750 - DNA, 25 bp, Homo sapien
tgacgtccacgtctctccgaacctg

SEQ ID NO: 85751 - DNA, 25 bp, Homo sapien
tctgctacgacctcatcttcctgtg

SEQ ID NO: 85752 - DNA, 25 bp, Homo sapien
tctgctacgaccacatcttcctgtg

SEQ ID NO: 85753 - DNA, 25 bp, Homo sapien
ctttcgtctataaagggcctgggtc

SEQ ID NO: 85754 - DNA, 25 bp, Homo sapien
ctttcgtctatatagggcctgggtc

SEQ ID NO: 85755 - DNA, 25 bp, Homo sapien
tagtgttacggtcgttaccggggtc

SEQ ID NO: 85756 - DNA, 25 bp, Homo sapien
tagtgttacggtggttaccggggtc

SEQ ID NO: 85757 - DNA, 25 bp, Homo sapien
agtgttcgatttcatactcggagat

SEQ ID NO: 85758 - DNA, 25 bp, Homo sapien
agtgttcgatttgatactcggagat

SEQ ID NO: 85759 - DNA, 25 bp, Homo sapien
ggttcccgttaaactaccgttacct

SEQ ID NO: 85760 - DNA, 25 bp, Homo sapien
ggttcccgttaatctaccgttacct

SEQ ID NO: 85761 - DNA, 25 bp, Homo sapien
gtcctctatagacactaccgaacct

SEQ ID NO: 85762 - DNA, 25 bp, Homo sapien
gtcctctatagagactaccgaacct

SEQ ID NO: 85763 - DNA, 25 bp, Homo sapien
tccgatatgtaggagaccgaccact

SEQ ID NO: 85764 - DNA, 25 bp, Homo sapien
tccgatatgtagcagaccgaccact

SEQ ID NO: 85765 - DNA, 25 bp, Homo sapien
gccagacgctagacaaagacactgt

SEQ ID NO: 85766 - DNA, 25 bp, Homo sapien
gccagacgctagtcaaagacactgt

SEQ ID NO: 85767 - DNA, 25 bp, Homo sapien
ccttaggtgaggatacaaggaccat

SEQ ID NO: 85768 - DNA, 25 bp, Homo sapien
ccttaggtgaggttacaaggaccat

SEQ ID NO: 85769 - DNA, 25 bp, Homo sapien
cgactacgggggtacaagcagtacc

SEQ ID NO: 85770 - DNA, 25 bp, Homo sapien
cgactacgggggaacaagcagtacc

SEQ ID NO: 85771 - DNA, 25 bp, Homo sapien
agttctgtcccaggactgggtgagc

SEQ ID NO: 85772 - DNA, 25 bp, Homo sapien
agttctgtcccacgactgggtgagc

SEQ ID NO: 85773 - DNA, 25 bp, Homo sapien
ttctttgtccttcgatgtgggaact

SEQ ID NO: 85774 - DNA, 25 bp, Homo sapien
ttctttgtccttggatgtgggaact

SEQ ID NO: 85775 - DNA, 25 bp, Homo sapien
ttatgaatccttgaatccgtcggaa

SEQ ID NO: 85776 - DNA, 25 bp, Homo sapien
ttatgaatccttcaatccgtcggaa

SEQ ID NO: 85777 - DNA, 25 bp, Homo sapien
tcgtagtctcggtgccggaggacaa

SEQ ID NO: 85778 - DNA, 25 bp, Homo sapien
tcgtagtctcggagccggaggacaa

SEQ ID NO: 85779 - DNA, 25 bp, Homo sapien
gatcgtcctcacgtacatcgtagga

SEQ ID NO: 85780 - DNA, 25 bp, Homo sapien
gatcgtcctcacctacatcgtagga

SEQ ID NO: 85781 - DNA, 25 bp, Homo sapien
ggaaaaactagacttcagattcaaa

SEQ ID NO: 85782 - DNA, 25 bp, Homo sapien
ggaaaaactagagttcagattcaaa

SEQ ID NO: 85783 - DNA, 25 bp, Homo sapien
ttagagtcatctcctttttctcagg

SEQ ID NO: 85784 - DNA, 25 bp, Homo sapien
ttagagtcatctgctttttctcagg

SEQ ID NO: 85785 - DNA, 25 bp, Homo sapien
ttagagtcatctcctttttctcagg

SEQ ID NO: 85786 - DNA, 25 bp, Homo sapien
ttagagtcatctgctttttctcagg

SEQ ID NO: 85787 - DNA, 25 bp, Homo sapien
tttgtaatacgtgactttttatgaa

SEQ ID NO: 85788 - DNA, 25 bp, Homo sapien
tttgtaatacgtcactttttatgaa

SEQ ID NO: 85789 - DNA, 25 bp, Homo sapien
catcgaggtgacatcaagtattcca

SEQ ID NO: 85790 - DNA, 25 bp, Homo sapien
catcgaggtgacttcaagtattcca

SEQ ID NO: 85791 - DNA, 25 bp, Homo sapien
ggaggtacgcgacgaaggttaccta

SEQ ID NO: 85792 - DNA, 25 bp, Homo sapien
ggaggtacgcgaggaaggttaccta

SEQ ID NO: 85793 - DNA, 25 bp, Homo sapien
ggaaacgaggagtacagggtcttac

SEQ ID NO: 85794 - DNA, 25 bp, Homo sapien
ggaaacgaggagaacagggtcttac

SEQ ID NO: 85795 - DNA, 25 bp, Homo sapien
tcgtagggtagagaacatgggtcac

SEQ ID NO: 85796 - DNA, 25 bp, Homo sapien
tcgtagggtagacaacatgggtcac

SEQ ID NO: 85797 - DNA, 25 bp, Homo sapien
gcttagggtcacaccggttccggtc

SEQ ID NO: 85798 - DNA, 25 bp, Homo sapien
gcttagggtcactccggttccggtc

SEQ ID NO: 85799 - DNA, 25 bp, Homo sapien
tccaggatccggacggtgtccggtc

SEQ ID NO: 85800 - DNA, 25 bp, Homo sapien
tccaggatccggtcggtgtccggtc

SEQ ID NO: 85801 - DNA, 25 bp, Homo sapien
gtcattatccgtcctcttgtccctc

SEQ ID NO: 85802 - DNA, 25 bp, Homo sapien
gtcattatccgtgctcttgtccctc

SEQ ID NO: 85803 - DNA, 25 bp, Homo sapien
tgagacgtttctgctcgggtcccgc

SEQ ID NO: 85804 - DNA, 25 bp, Homo sapien
tgagacgtttctcctcgggtcccgc

SEQ ID NO: 85805 - DNA, 25 bp, Homo sapien
gtactctgaggtgcttgttgtcgta

SEQ ID NO: 85806 - DNA, 25 bp, Homo sapien
gtactctgaggtccttgttgtcgta

SEQ ID NO: 85807 - DNA, 25 bp, Homo sapien
aacgttcatctcttgtcacttcact

SEQ ID NO: 85808 - DNA, 25 bp, Homo sapien
aacgttcatctcatgtcacttcact

SEQ ID NO: 85809 - DNA, 25 bp, Homo sapien
tcgggaagtcctaccggccgtgcga

SEQ ID NO: 85810 - DNA, 25 bp, Homo sapien
tcgggaagtccttccggccgtgcga

SEQ ID NO: 85811 - DNA, 25 bp, Homo sapien
gtcggagggtttgtagtttctgacc

SEQ ID NO: 85812 - DNA, 25 bp, Homo sapien
gtcggagggtttctagtttctgacc

SEQ ID NO: 85813 - DNA, 25 bp, Homo sapien
agggacagcctttgagttgtgacat

SEQ ID NO: 85814 - DNA, 25 bp, Homo sapien
agggacagccttagagttgtgacat

SEQ ID NO: 85815 - DNA, 25 bp, Homo sapien
ccacccgagtagagactgtcactgt

SEQ ID NO: 85816 - DNA, 25 bp, Homo sapien
ccacccgagtagtgactgtcactgt

SEQ ID NO: 85817 - DNA, 25 bp, Homo sapien
ttactgaatcactgacctgtccatg

SEQ ID NO: 85818 - DNA, 25 bp, Homo sapien
ttactgaatcacagacctgtccatg

SEQ ID NO: 85819 - DNA, 25 bp, Homo sapien
cttaggtagattctcatgtcttatg

SEQ ID NO: 85820 - DNA, 25 bp, Homo sapien
cttaggtagattgtcatgtcttatg

SEQ ID NO: 85821 - DNA, 25 bp, Homo sapien
tctctctagatttctcatcacattc

SEQ ID NO: 85822 - DNA, 25 bp, Homo sapien
tctctctagattactcatcacattc

SEQ ID NO: 85823 - DNA, 25 bp, Homo sapien
cgtgtcgcaccgtggacttccctta

SEQ ID NO: 85824 - DNA, 25 bp, Homo sapien
cgtgtcgcaccgaggacttccctta

SEQ ID NO: 85825 - DNA, 25 bp, Homo sapien
ggtcgtcactcagtagcttcccaag

SEQ ID NO: 85826 - DNA, 25 bp, Homo sapien
ggtcgtcactcactagcttcccaag

SEQ ID NO: 85827 - DNA, 25 bp, Homo sapien
ggtcctccgaccggaaaccgcactg

SEQ ID NO: 85828 - DNA, 25 bp, Homo sapien
ggtcctccgacccgaaaccgcactg

SEQ ID NO: 85829 - DNA, 25 bp, Homo sapien
ccggtgttttctctttatcgtggtg

SEQ ID NO: 85830 - DNA, 25 bp, Homo sapien
ccggtgttttctgtttatcgtggtg

SEQ ID NO: 85831 - DNA, 25 bp, Homo sapien
acatttctgtagacgtttaatcatg

SEQ ID NO: 85832 - DNA, 25 bp, Homo sapien
acatttctgtagtcgtttaatcatg

SEQ ID NO: 85833 - DNA, 25 bp, Homo sapien
ccttatttgtaattcggtactgcca

SEQ ID NO: 85834 - DNA, 25 bp, Homo sapien
ccttatttgtaaatcggtactgcca

SEQ ID NO: 85835 - DNA, 25 bp, Homo sapien
tctatgtataacaccgagatgactt

SEQ ID NO: 85836 - DNA, 25 bp, Homo sapien
tctatgtataactccgagatgactt

SEQ ID NO: 85837 - DNA, 25 bp, Homo sapien
ttcgatgacaccaccaaagagtacg

SEQ ID NO: 85838 - DNA, 25 bp, Homo sapien
ttcgatgacacctccaaagagtacg

SEQ ID NO: 85839 - DNA, 25 bp, Homo sapien
attagtctgagatataccattggtc

SEQ ID NO: 85840 - DNA, 25 bp, Homo sapien
attagtctgagaaataccattggtc

SEQ ID NO: 85841 - DNA, 25 bp, Homo sapien
cagacagagagactagtcacctttt

SEQ ID NO: 85842 - DNA, 25 bp, Homo sapien
cagacagagagagtagtcacctttt

SEQ ID NO: 85843 - DNA, 25 bp, Homo sapien
gaagagacggagtcactcattgagt

SEQ ID NO: 85844 - DNA, 25 bp, Homo sapien
gaagagacggagacactcattgagt

SEQ ID NO: 85845 - DNA, 25 bp, Homo sapien
cacatagaggggtacgtcccctgtt

SEQ ID NO: 85846 - DNA, 25 bp, Homo sapien
cacatagaggggaacgtcccctgtt

SEQ ID NO: 85847 - DNA, 25 bp, Homo sapien
gctagtacattcagtcgacaatttt

SEQ ID NO: 85848 - DNA, 25 bp, Homo sapien
gctagtacattctgtcgacaatttt

SEQ ID NO: 85849 - DNA, 25 bp, Homo sapien
gactcgaaccttttgtacagtttta

SEQ ID NO: 85850 - DNA, 25 bp, Homo sapien
gactcgaaccttatgtacagtttta

SEQ ID NO: 85851 - DNA, 25 bp, Homo sapien
cttttgcaattcgtgaagagttcat

SEQ ID NO: 85852 - DNA, 25 bp, Homo sapien
cttttgcaattcctgaagagttcat

SEQ ID NO: 85853 - DNA, 25 bp, Homo sapien
ttctcagtcggtcgttgaaagatcc

SEQ ID NO: 85854 - DNA, 25 bp, Homo sapien
ttctcagtcggtggttgaaagatcc

SEQ ID NO: 85855 - DNA, 25 bp, Homo sapien
tgttgtgcgcaccaatcaatcattg

SEQ ID NO: 85856 - DNA, 25 bp, Homo sapien
tgttgtgcgcacgaatcaatcattg

SEQ ID NO: 85857 - DNA, 25 bp, Homo sapien
tctatttaacaaaatgtcaacatta

SEQ ID NO: 85858 - DNA, 25 bp, Homo sapien
tctatttaacaatatgtcaacatta

SEQ ID NO: 85859 - DNA, 25 bp, Homo sapien
ttgtaaacaaatttgcgagtcgttc

SEQ ID NO: 85860 - DNA, 25 bp, Homo sapien
ttgtaaacaaatatgcgagtcgttc

SEQ ID NO: 85861 - DNA, 25 bp, Homo sapien
atcgacgtcggtggaacagcgtccc

SEQ ID NO: 85862 - DNA, 25 bp, Homo sapien
atcgacgtcggtcgaacagcgtccc

SEQ ID NO: 85863 - DNA, 25 bp, Homo sapien
aaagacgttcggtcccctagagagg

SEQ ID NO: 85864 - DNA, 25 bp, Homo sapien
aaagacgttcggacccctagagagg

SEQ ID NO: 85865 - DNA, 25 bp, Homo sapien
gacgaccctctctaggggaccgaac

SEQ ID NO: 85866 - DNA, 25 bp, Homo sapien
gacgaccctctcaaggggaccgaac

SEQ ID NO: 85867 - DNA, 25 bp, Homo sapien
aggtgacttggtcagtaacttccgt

SEQ ID NO: 85868 - DNA, 25 bp, Homo sapien
aggtgacttggtgagtaacttccgt

SEQ ID NO: 85869 - DNA, 25 bp, Homo sapien
ctggtgtacgttaatcaatcttgtt

SEQ ID NO: 85870 - DNA, 25 bp, Homo sapien
ctggtgtacgtttatcaatcttgtt

SEQ ID NO: 85871 - DNA, 25 bp, Homo sapien
ctgtgtcttctttcaagttctagtc

SEQ ID NO: 85872 - DNA, 25 bp, Homo sapien
ctgtgtcttcttacaagttctagtc

SEQ ID NO: 85873 - DNA, 25 bp, Homo sapien
agtggcagtctgtggtttcgtcgtc

SEQ ID NO: 85874 - DNA, 25 bp, Homo sapien
agtggcagtctgaggtttcgtcgtc

SEQ ID NO: 85875 - DNA, 25 bp, Homo sapien
gaggtttatgtctccgtcttccgac

SEQ ID NO: 85876 - DNA, 25 bp, Homo sapien
gaggtttatgtcaccgtcttccgac

SEQ ID NO: 85877 - DNA, 25 bp, Homo sapien
ttgtgtatacttttccgtcacctgg

SEQ ID NO: 85878 - DNA, 25 bp, Homo sapien
ttgtgtatacttatccgtcacctgg

SEQ ID NO: 85879 - DNA, 25 bp, Homo sapien
ttcagtacaatcattaccagtaagg

SEQ ID NO: 85880 - DNA, 25 bp, Homo sapien
ttcagtacaatctttaccagtaagg

SEQ ID NO: 85881 - DNA, 25 bp, Homo sapien
tacttcggaaagttttaggacctaa

SEQ ID NO: 85882 - DNA, 25 bp, Homo sapien
tacttcggaaagatttaggacctaa

SEQ ID NO: 85883 - DNA, 25 bp, Homo sapien
actaagggaaaagtcaggacacata

SEQ ID NO: 85884 - DNA, 25 bp, Homo sapien
actaagggaaaactcaggacacata

SEQ ID NO: 85885 - DNA, 25 bp, Homo sapien
acaattgacagagtcactatggaaa

SEQ ID NO: 85886 - DNA, 25 bp, Homo sapien
acaattgacagactcactatggaaa

SEQ ID NO: 85887 - DNA, 25 bp, Homo sapien
tctgacctaccctcctacgagaggt

SEQ ID NO: 85888 - DNA, 25 bp, Homo sapien
tctgacctacccacctacgagaggt

SEQ ID NO: 85889 - DNA, 25 bp, Homo sapien
cttgactggagaacacacacacaca

SEQ ID NO: 85890 - DNA, 25 bp, Homo sapien
cttgactggagatcacacacacaca

SEQ ID NO: 85891 - DNA, 25 bp, Homo sapien
gtggtcggacatctacaccacgact

SEQ ID NO: 85892 - DNA, 25 bp, Homo sapien
gtggtcggacatgtacaccacgact

SEQ ID NO: 85893 - DNA, 25 bp, Homo sapien
ggacgtcgacagctcgctacatcga

SEQ ID NO: 85894 - DNA, 25 bp, Homo sapien
ggacgtcgacaggtcgctacatcga

SEQ ID NO: 85895 - DNA, 25 bp, Homo sapien
tagtcttctgaactacgtccagtaa

SEQ ID NO: 85896 - DNA, 25 bp, Homo sapien
tagtcttctgaagtacgtccagtaa

SEQ ID NO: 85897 - DNA, 25 bp, Homo sapien
gtgtcttactgactgtcatcagtaa

SEQ ID NO: 85898 - DNA, 25 bp, Homo sapien
gtgtcttactgagtgtcatcagtaa

SEQ ID NO: 85899 - DNA, 25 bp, Homo sapien
agacgtactctgacggtaggtttaa

SEQ ID NO: 85900 - DNA, 25 bp, Homo sapien
agacgtactctgtcggtaggtttaa

SEQ ID NO: 85901 - DNA, 25 bp, Homo sapien
ttgtacgggacgaactcttatttat

SEQ ID NO: 85902 - DNA, 25 bp, Homo sapien
ttgtacgggacgtactcttatttat

SEQ ID NO: 85903 - DNA, 25 bp, Homo sapien
cggaagtgacttaaaaccatatttc

SEQ ID NO: 85904 - DNA, 25 bp, Homo sapien
cggaagtgactttaaaccatatttc

SEQ ID NO: 85905 - DNA, 25 bp, Homo sapien
gcgtaggtacgaacgtcgacccttc

SEQ ID NO: 85906 - DNA, 25 bp, Homo sapien
gcgtaggtacgatcgtcgacccttc

SEQ ID NO: 85907 - DNA, 25 bp, Homo sapien
cagaggacgacgaccgaggccttgt

SEQ ID NO: 85908 - DNA, 25 bp, Homo sapien
cagaggacgacgtccgaggccttgt

SEQ ID NO: 85909 - DNA, 25 bp, Homo sapien
acgagccattcaggtacaccgtgtg

SEQ ID NO: 85910 - DNA, 25 bp, Homo sapien
acgagccattcacgtacaccgtgtg

SEQ ID NO: 85911 - DNA, 25 bp, Homo sapien
ttcattcgagccattcacactagtg

SEQ ID NO: 85912 - DNA, 25 bp, Homo sapien
ttcattcgagcctttcacactagtg

SEQ ID NO: 85913 - DNA, 25 bp, Homo sapien
aatcattggatgattctttgtacac

SEQ ID NO: 85914 - DNA, 25 bp, Homo sapien
aatcattggatgtttctttgtacac

SEQ ID NO: 85915 - DNA, 25 bp, Homo sapien
actggtatactgttttacgagttcc

SEQ ID NO: 85916 - DNA, 25 bp, Homo sapien
actggtatactgatttacgagttcc

SEQ ID NO: 85917 - DNA, 25 bp, Homo sapien
gtccgttatactggtttatacatca

SEQ ID NO: 85918 - DNA, 25 bp, Homo sapien
gtccgttatactcgtttatacatca

SEQ ID NO: 85919 - DNA, 25 bp, Homo sapien
gggacgtcttatgaccttttgttac

SEQ ID NO: 85920 - DNA, 25 bp, Homo sapien
gggacgtcttatcaccttttgttac

SEQ ID NO: 85921 - DNA, 25 bp, Homo sapien
aaacgttgtcccatcttatgtgtta

SEQ ID NO: 85922 - DNA, 25 bp, Homo sapien
aaacgttgtcccttcttatgtgtta

SEQ ID NO: 85923 - DNA, 25 bp, Homo sapien
gaacaatccaactttatgtgtttgt

SEQ ID NO: 85924 - DNA, 25 bp, Homo sapien
gaacaatccaacattatgtgtttgt

SEQ ID NO: 85925 - DNA, 25 bp, Homo sapien
ttgagtgcggttctcccgtcgtcga

SEQ ID NO: 85926 - DNA, 25 bp, Homo sapien
ttgagtgcggttgtcccgtcgtcga

SEQ ID NO: 85927 - DNA, 25 bp, Homo sapien
tttttgtgcccgtctttcgtgacgc

SEQ ID NO: 85928 - DNA, 25 bp, Homo sapien
tttttgtgcccgactttcgtgacgc

SEQ ID NO: 85929 - DNA, 25 bp, Homo sapien
tttgttatccgagatctacagggtc

SEQ ID NO: 85930 - DNA, 25 bp, Homo sapien
tttgttatccgacatctacagggtc

SEQ ID NO: 85931 - DNA, 25 bp, Homo sapien
tatgtttgaaaataccgtgttcgtc

SEQ ID NO: 85932 - DNA, 25 bp, Homo sapien
tatgtttgaaaaaaccgtgttcgtc

SEQ ID NO: 85933 - DNA, 25 bp, Homo sapien
tccttgaacaggagctcgttgacgt

SEQ ID NO: 85934 - DNA, 25 bp, Homo sapien
tccttgaacaggtgctcgttgacgt

SEQ ID NO: 85935 - DNA, 25 bp, Homo sapien
gggtaccacgagtctgttggtctcg

SEQ ID NO: 85936 - DNA, 25 bp, Homo sapien
gggtaccacgagactgttggtctcg

SEQ ID NO: 85937 - DNA, 25 bp, Homo sapien
tcgggggttcggtcccgacgaccct

SEQ ID NO: 85938 - DNA, 25 bp, Homo sapien
tcgggggttcggacccgacgaccct

SEQ ID NO: 85939 - DNA, 25 bp, Homo sapien
aaggggtttggaaccggtcagctct

SEQ ID NO: 85940 - DNA, 25 bp, Homo sapien
aaggggtttggatccggtcagctct

SEQ ID NO: 85941 - DNA, 25 bp, Homo sapien
aagtgtatgtgtcacaccttcctac

SEQ ID NO: 85942 - DNA, 25 bp, Homo sapien
aagtgtatgtgtgacaccttcctac

SEQ ID NO: 85943 - DNA, 25 bp, Homo sapien
gaaaaagattttgtcgtccctcaag

SEQ ID NO: 85944 - DNA, 25 bp, Homo sapien
gaaaaagattttctcgtccctcaag

SEQ ID NO: 85945 - DNA, 25 bp, Homo sapien
agtacatagtcctaccgtctcacga

SEQ ID NO: 85946 - DNA, 25 bp, Homo sapien
agtacatagtccaaccgtctcacga

SEQ ID NO: 85947 - DNA, 25 bp, Homo sapien
ccaatagaggggactacttacgaag

SEQ ID NO: 85948 - DNA, 25 bp, Homo sapien
ccaatagaggggtctacttacgaag

SEQ ID NO: 85949 - DNA, 25 bp, Homo sapien
cgtaagtaaggaggttctcttcaag

SEQ ID NO: 85950 - DNA, 25 bp, Homo sapien
cgtaagtaaggacgttctcttcaag

SEQ ID NO: 85951 - DNA, 25 bp, Homo sapien
tgtaagacggttcaagacaatcaag

SEQ ID NO: 85952 - DNA, 25 bp, Homo sapien
tgtaagacggttgaagacaatcaag

SEQ ID NO: 85953 - DNA, 25 bp, Homo sapien
ggtaaggagtcgaaagagcaacctg

SEQ ID NO: 85954 - DNA, 25 bp, Homo sapien
ggtaaggagtcgtaagagcaacctg

SEQ ID NO: 85955 - DNA, 25 bp, Homo sapien
agtaagacgcttaaacgaggacccg

SEQ ID NO: 85956 - DNA, 25 bp, Homo sapien
agtaagacgctttaacgaggacccg

SEQ ID NO: 85957 - DNA, 25 bp, Homo sapien
taaaactccgtttaacacggtattc

SEQ ID NO: 85958 - DNA, 25 bp, Homo sapien
taaaactccgttaaacacggtattc

SEQ ID NO: 85959 - DNA, 25 bp, Homo sapien
cttacactcgttgacgcggtctgtc

SEQ ID NO: 85960 - DNA, 25 bp, Homo sapien
cttacactcgttcacgcggtctgtc

SEQ ID NO: 85961 - DNA, 25 bp, Homo sapien
cccgcttcctcgtcgacggtgggtt

SEQ ID NO: 85962 - DNA, 25 bp, Homo sapien
cccgcttcctcgacgacggtgggtt

SEQ ID NO: 85963 - DNA, 25 bp, Homo sapien
ttgtttatacccactaggtgtgtga

SEQ ID NO: 85964 - DNA, 25 bp, Homo sapien
ttgtttataccctctaggtgtgtga

SEQ ID NO: 85965 - DNA, 25 bp, Homo sapien
aggagtatcctcagctacgggtgga

SEQ ID NO: 85966 - DNA, 25 bp, Homo sapien
aggagtatcctctgctacgggtgga

SEQ ID NO: 85967 - DNA, 25 bp, Homo sapien
accggaatctctgacaggacagaac

SEQ ID NO: 85968 - DNA, 25 bp, Homo sapien
accggaatctctcacaggacagaac

SEQ ID NO: 85969 - DNA, 25 bp, Homo sapien
ccggagtcctcgagtggtctggtct

SEQ ID NO: 85970 - DNA, 25 bp, Homo sapien
ccggagtcctcgtgtggtctggtct

SEQ ID NO: 85971 - DNA, 25 bp, Homo sapien
tgacgtcctaacagtggtgtcgttt

SEQ ID NO: 85972 - DNA, 25 bp, Homo sapien
tgacgtcctaactgtggtgtcgttt

SEQ ID NO: 85973 - DNA, 25 bp, Homo sapien
ggtccggaggtaaccaagtcgaccc

SEQ ID NO: 85974 - DNA, 25 bp, Homo sapien
ggtccggaggtatccaagtcgaccc

SEQ ID NO: 85975 - DNA, 25 bp, Homo sapien
ggagtttatttcacgtgtcaggtac

SEQ ID NO: 85976 - DNA, 25 bp, Homo sapien
ggagtttatttctcgtgtcaggtac

SEQ ID NO: 85977 - DNA, 25 bp, Homo sapien
actcaaaactgaagtgtgtcttact

SEQ ID NO: 85978 - DNA, 25 bp, Homo sapien
actcaaaactgatgtgtgtcttact

SEQ ID NO: 85979 - DNA, 25 bp, Homo sapien
cactgagatagtgacgtctgttcat

SEQ ID NO: 85980 - DNA, 25 bp, Homo sapien
cactgagatagtcacgtctgttcat

SEQ ID NO: 85981 - DNA, 25 bp, Homo sapien
ctcggagtacgtagtgcctcgtact

SEQ ID NO: 85982 - DNA, 25 bp, Homo sapien
ctcggagtacgttgtgcctcgtact

SEQ ID NO: 85983 - DNA, 25 bp, Homo sapien
cgccgtcaggacgaatagacgtcct

SEQ ID NO: 85984 - DNA, 25 bp, Homo sapien
cgccgtcaggaccaatagacgtcct

SEQ ID NO: 85985 - DNA, 25 bp, Homo sapien
gtcctaagggcaggaacaggtgccc

SEQ ID NO: 85986 - DNA, 25 bp, Homo sapien
gtcctaagggcacgaacaggtgccc

SEQ ID NO: 85987 - DNA, 25 bp, Homo sapien
tgtatacgggtggaaaacaggtcca

SEQ ID NO: 85988 - DNA, 25 bp, Homo sapien
tgtatacgggtgcaaaacaggtcca

SEQ ID NO: 85989 - DNA, 25 bp, Homo sapien
tttggggtagagaaatcggtgtccc

SEQ ID NO: 85990 - DNA, 25 bp, Homo sapien
tttggggtagagtaatcggtgtccc

SEQ ID NO: 85991 - DNA, 25 bp, Homo sapien
ccaggagcgttacgtcgtaggagaa

SEQ ID NO: 85992 - DNA, 25 bp, Homo sapien
ccaggagcgttaggtcgtaggagaa

SEQ ID NO: 85993 - DNA, 25 bp, Homo sapien
ccaggaggtcgtacgacaacgggac

SEQ ID NO: 85994 - DNA, 25 bp, Homo sapien
ccaggaggtcgttcgacaacgggac

SEQ ID NO: 85995 - DNA, 25 bp, Homo sapien
agatcgacgaagtgtttaaaccgaa

SEQ ID NO: 85996 - DNA, 25 bp, Homo sapien
agatcgacgaagagtttaaaccgaa

SEQ ID NO: 85997 - DNA, 25 bp, Homo sapien
tctacgacagtcgacggaaacctca

SEQ ID NO: 85998 - DNA, 25 bp, Homo sapien
tctacgacagtccacggaaacctca

SEQ ID NO: 85999 - DNA, 25 bp, Homo sapien
ctagaagtgccgaaagacactcagt

SEQ ID NO: 86000 - DNA, 25 bp, Homo sapien
ctagaagtgccgtaagacactcagt

SEQ ID NO: 86001 - DNA, 25 bp, Homo sapien
aatgttagagactggaaacacctct

SEQ ID NO: 86002 - DNA, 25 bp, Homo sapien
aatgttagagacaggaaacacctct

SEQ ID NO: 86003 - DNA, 25 bp, Homo sapien
ttgcggtagggaggtacaacccgtt

SEQ ID NO: 86004 - DNA, 25 bp, Homo sapien
ttgcggtagggacgtacaacccgtt

SEQ ID NO: 86005 - DNA, 25 bp, Homo sapien
cgagaacgtacgacgcgtccgctca

SEQ ID NO: 86006 - DNA, 25 bp, Homo sapien
cgagaacgtacgtcgcgtccgctca

SEQ ID NO: 86007 - DNA, 25 bp, Homo sapien
cttggctacagtgagtgtccgtccc

SEQ ID NO: 86008 - DNA, 25 bp, Homo sapien
cttggctacagtcagtgtccgtccc

SEQ ID NO: 86009 - DNA, 25 bp, Homo sapien
tgacacggcgacagttacgtacaac

SEQ ID NO: 86010 - DNA, 25 bp, Homo sapien
tgacacggcgactgttacgtacaac

SEQ ID NO: 86011 - DNA, 25 bp, Homo sapien
cgacggtcccgtcatcttcgaagtc

SEQ ID NO: 86012 - DNA, 25 bp, Homo sapien
cgacggtcccgtgatcttcgaagtc

SEQ ID NO: 86013 - DNA, 25 bp, Homo sapien
tcgtcgtttcactttcgacaagtct

SEQ ID NO: 86014 - DNA, 25 bp, Homo sapien
tcgtcgtttcacattcgacaagtct

SEQ ID NO: 86015 - DNA, 25 bp, Homo sapien
attcatgtcactgacgtcgtaatca

SEQ ID NO: 86016 - DNA, 25 bp, Homo sapien
attcatgtcactcacgtcgtaatca

SEQ ID NO: 86017 - DNA, 25 bp, Homo sapien
agattcttacggtgtcgtaaaaccg

SEQ ID NO: 86018 - DNA, 25 bp, Homo sapien
agattcttacggagtcgtaaaaccg

SEQ ID NO: 86019 - DNA, 25 bp, Homo sapien
cagaacttgaggactggagtccact

SEQ ID NO: 86020 - DNA, 25 bp, Homo sapien
cagaacttgaggtctggagtccact

SEQ ID NO: 86021 - DNA, 25 bp, Homo sapien
cacggtgaggtcctgtcactcgttt

SEQ ID NO: 86022 - DNA, 25 bp, Homo sapien
cacggtgaggtcgtgtcactcgttt

SEQ ID NO: 86023 - DNA, 25 bp, Homo sapien
tttcgacttgtcgattgtcctcttc

SEQ ID NO: 86024 - DNA, 25 bp, Homo sapien
tttcgacttgtccattgtcctcttc

SEQ ID NO: 86025 - DNA, 25 bp, Homo sapien
ctttatgtgtcgagtggttcccgtg

SEQ ID NO: 86026 - DNA, 25 bp, Homo sapien
ctttatgtgtcgtgtggttcccgtg

SEQ ID NO: 86027 - DNA, 25 bp, Homo sapien
ttctttcgtgtcttttcctccacgg

SEQ ID NO: 86028 - DNA, 25 bp, Homo sapien
ttctttcgtgtcatttcctccacgg

SEQ ID NO: 86029 - DNA, 25 bp, Homo sapien
tttctcgtgacacttaatctcggtc

SEQ ID NO: 86030 - DNA, 25 bp, Homo sapien
tttctcgtgacagttaatctcggtc

SEQ ID NO: 86031 - DNA, 25 bp, Homo sapien
attaagttatgtttcaactcgtgtc

SEQ ID NO: 86032 - DNA, 25 bp, Homo sapien
attaagttatgtatcaactcgtgtc

SEQ ID NO: 86033 - DNA, 25 bp, Homo sapien
agactctagtcttctgaactacgtc

SEQ ID NO: 86034 - DNA, 25 bp, Homo sapien
agactctagtctactgaactacgtc

SEQ ID NO: 86035 - DNA, 25 bp, Homo sapien
ttttgactgtctactatggtttcag

SEQ ID NO: 86036 - DNA, 25 bp, Homo sapien
ttttgactgtcttctatggtttcag

SEQ ID NO: 86037 - DNA, 25 bp, Homo sapien
gacacgaacctttcctggtttctcg

SEQ ID NO: 86038 - DNA, 25 bp, Homo sapien
gacacgaaccttacctggtttctcg

SEQ ID NO: 86039 - DNA, 25 bp, Homo sapien
taacacaatgtatgtgtcgtgcccc

SEQ ID NO: 86040 - DNA, 25 bp, Homo sapien
taacacaatgtaagtgtcgtgcccc

SEQ ID NO: 86041 - DNA, 25 bp, Homo sapien
taccatcgtctatctccggtgttcg

SEQ ID NO: 86042 - DNA, 25 bp, Homo sapien
taccatcgtctaactccggtgttcg

SEQ ID NO: 86043 - DNA, 25 bp, Homo sapien
ttacagatgtctcatgacgttttct

SEQ ID NO: 86044 - DNA, 25 bp, Homo sapien
ttacagatgtctgatgacgttttct

SEQ ID NO: 86045 - DNA, 25 bp, Homo sapien
agcaaagagggttattgtatacacc

SEQ ID NO: 86046 - DNA, 25 bp, Homo sapien
agcaaagagggtaattgtatacacc

SEQ ID NO: 86047 - DNA, 25 bp, Homo sapien
ccaaagagaggtcatacttgagaga

SEQ ID NO: 86048 - DNA, 25 bp, Homo sapien
ccaaagagaggtgatacttgagaga

SEQ ID NO: 86049 - DNA, 25 bp, Homo sapien
ccgaatttcggttgatacttaaaat

SEQ ID NO: 86050 - DNA, 25 bp, Homo sapien
ccgaatttcggtagatacttaaaat

SEQ ID NO: 86051 - DNA, 25 bp, Homo sapien
acccaggtccgtggatccgggacgc

SEQ ID NO: 86052 - DNA, 25 bp, Homo sapien
acccaggtccgtcgatccgggacgc

SEQ ID NO: 86053 - DNA, 25 bp, Homo sapien
cccagagcgacgacgagctcttttc

SEQ ID NO: 86054 - DNA, 25 bp, Homo sapien
cccagagcgacgtcgagctcttttc

SEQ ID NO: 86055 - DNA, 25 bp, Homo sapien
aagtatttattgtccttgtgacttc

SEQ ID NO: 86056 - DNA, 25 bp, Homo sapien
aagtatttattgaccttgtgacttc

SEQ ID NO: 86057 - DNA, 25 bp, Homo sapien
cgtgttttagggactgtgtggtctc

SEQ ID NO: 86058 - DNA, 25 bp, Homo sapien
cgtgttttagggtctgtgtggtctc

SEQ ID NO: 86059 - DNA, 25 bp, Homo sapien
caatcaaatcgttcgttctgagcat

SEQ ID NO: 86060 - DNA, 25 bp, Homo sapien
caatcaaatcgtacgttctgagcat

SEQ ID NO: 86061 - DNA, 25 bp, Homo sapien
ctggaccctgttctcgacgagacag

SEQ ID NO: 86062 - DNA, 25 bp, Homo sapien
ctggaccctgttgtcgacgagacag

SEQ ID NO: 86063 - DNA, 25 bp, Homo sapien
tttgtacgcgtctgtggggcacaag

SEQ ID NO: 86064 - DNA, 25 bp, Homo sapien
tttgtacgcgtcagtggggcacaag

SEQ ID NO: 86065 - DNA, 25 bp, Homo sapien
atgtaaatgtatgcaaacacaccgt

SEQ ID NO: 86066 - DNA, 25 bp, Homo sapien
atgtaaatgtatccaaacacaccgt

SEQ ID NO: 86067 - DNA, 25 bp, Homo sapien
taagtaaatgtcctccaataagtgt

SEQ ID NO: 86068 - DNA, 25 bp, Homo sapien
taagtaaatgtcgtccaataagtgt

SEQ ID NO: 86069 - DNA, 25 bp, Homo sapien
tgtcttccgtcacctctctaaagcg

SEQ ID NO: 86070 - DNA, 25 bp, Homo sapien
tgtcttccgtcagctctctaaagcg

SEQ ID NO: 86071 - DNA, 25 bp, Homo sapien
gacgaaagttttgctcctttgcagc

SEQ ID NO: 86072 - DNA, 25 bp, Homo sapien
gacgaaagttttcctcctttgcagc

SEQ ID NO: 86073 - DNA, 25 bp, Homo sapien
ggattcttaaatgactccgtcaaga

SEQ ID NO: 86074 - DNA, 25 bp, Homo sapien
ggattcttaaatcactccgtcaaga

SEQ ID NO: 86075 - DNA, 25 bp, Homo sapien
gagtggaaaattaactcttacaccc

SEQ ID NO: 86076 - DNA, 25 bp, Homo sapien
gagtggaaaatttactcttacaccc

SEQ ID NO: 86077 - DNA, 25 bp, Homo sapien
gagaaaagtctaggtcttcccctac

SEQ ID NO: 86078 - DNA, 25 bp, Homo sapien
gagaaaagtctacgtcttcccctac

SEQ ID NO: 86079 - DNA, 25 bp, Homo sapien
ccactagtgtctactcggtcttcgt

SEQ ID NO: 86080 - DNA, 25 bp, Homo sapien
ccactagtgtcttctcggtcttcgt

SEQ ID NO: 86081 - DNA, 25 bp, Homo sapien
acgtacgtgtgtgtctcgccggtcg

SEQ ID NO: 86082 - DNA, 25 bp, Homo sapien
acgtacgtgtgtctctcgccggtcg

SEQ ID NO: 86083 - DNA, 25 bp, Homo sapien
agacacgacgccagagacgagtccc

SEQ ID NO: 86084 - DNA, 25 bp, Homo sapien
agacacgacgcctgagacgagtccc

SEQ ID NO: 86085 - DNA, 25 bp, Homo sapien
agtccgtgcttggagagtcgtccgt

SEQ ID NO: 86086 - DNA, 25 bp, Homo sapien
agtccgtgcttgcagagtcgtccgt

SEQ ID NO: 86087 - DNA, 25 bp, Homo sapien
tttaggactgtttgtaaccgtatga

SEQ ID NO: 86088 - DNA, 25 bp, Homo sapien
tttaggactgttagtaaccgtatga

SEQ ID NO: 86089 - DNA, 25 bp, Homo sapien
gtttcagctctataatacacaagcg

SEQ ID NO: 86090 - DNA, 25 bp, Homo sapien
gtttcagctctaaaatacacaagcg

SEQ ID NO: 86091 - DNA, 25 bp, Homo sapien
cttttgtctcttcaacaccttcgac

SEQ ID NO: 86092 - DNA, 25 bp, Homo sapien
cttttgtctcttgaacaccttcgac

SEQ ID NO: 86093 - DNA, 25 bp, Homo sapien
gtctggttgttttaccctcctaaac

SEQ ID NO: 86094 - DNA, 25 bp, Homo sapien
gtctggttgtttaaccctcctaaac

SEQ ID NO: 86095 - DNA, 25 bp, Homo sapien
ccaccgactcttaaggggtccttcc

SEQ ID NO: 86096 - DNA, 25 bp, Homo sapien
ccaccgactctttaggggtccttcc

SEQ ID NO: 86097 - DNA, 25 bp, Homo sapien
accctaacaagatgtttcgtgctag

SEQ ID NO: 86098 - DNA, 25 bp, Homo sapien
accctaacaagaagtttcgtgctag

SEQ ID NO: 86099 - DNA, 25 bp, Homo sapien
ccaataaactagaagtcgtagtcta

SEQ ID NO: 86100 - DNA, 25 bp, Homo sapien
ccaataaactagtagtcgtagtcta

SEQ ID NO: 86101 - DNA, 25 bp, Homo sapien
accggataagagaagaaccgttaca

SEQ ID NO: 86102 - DNA, 25 bp, Homo sapien
accggataagagtagaaccgttaca

SEQ ID NO: 86103 - DNA, 25 bp, Homo sapien
aacgatttaacgatcgtcaaacgga

SEQ ID NO: 86104 - DNA, 25 bp, Homo sapien
aacgatttaacgttcgtcaaacgga

SEQ ID NO: 86105 - DNA, 25 bp, Homo sapien
tagtctactacatccgaaaagaagt

SEQ ID NO: 86106 - DNA, 25 bp, Homo sapien
tagtctactacaaccgaaaagaagt

SEQ ID NO: 86107 - DNA, 25 bp, Homo sapien
gttactgtctaaactgtcaaattag

SEQ ID NO: 86108 - DNA, 25 bp, Homo sapien
gttactgtctaatctgtcaaattag

SEQ ID NO: 86109 - DNA, 25 bp, Homo sapien
acttcctgttaaacgccagaattag

SEQ ID NO: 86110 - DNA, 25 bp, Homo sapien
acttcctgttaatcgccagaattag

SEQ ID NO: 86111 - DNA, 25 bp, Homo sapien
cattattgttaagttcacgacccga

SEQ ID NO: 86112 - DNA, 25 bp, Homo sapien
cattattgttaacttcacgacccga

SEQ ID NO: 86113 - DNA, 25 bp, Homo sapien
agagtttggggatccttacactccc

SEQ ID NO: 86114 - DNA, 25 bp, Homo sapien
agagtttggggaaccttacactccc

SEQ ID NO: 86115 - DNA, 25 bp, Homo sapien
taaaagatattcgtacgatctcgtt

SEQ ID NO: 86116 - DNA, 25 bp, Homo sapien
taaaagatattcctacgatctcgtt

SEQ ID NO: 86117 - DNA, 25 bp, Homo sapien
gaatggaaggattattacccattct

SEQ ID NO: 86118 - DNA, 25 bp, Homo sapien
gaatggaaggataattacccattct

SEQ ID NO: 86119 - DNA, 25 bp, Homo sapien
cgtcgcggttcaagtcttctaatcc

SEQ ID NO: 86120 - DNA, 25 bp, Homo sapien
cgtcgcggttcatgtcttctaatcc

SEQ ID NO: 86121 - DNA, 25 bp, Homo sapien
ggttttactaagcttactagacttc

SEQ ID NO: 86122 - DNA, 25 bp, Homo sapien
ggttttactaaggttactagacttc

SEQ ID NO: 86123 - DNA, 25 bp, Homo sapien
accatatagtttcatttaaggtcct

SEQ ID NO: 86124 - DNA, 25 bp, Homo sapien
accatatagtttgatttaaggtcct

SEQ ID NO: 86125 - DNA, 25 bp, Homo sapien
tgataaagttcgaggtcaaacctcg

SEQ ID NO: 86126 - DNA, 25 bp, Homo sapien
tgataaagttcgtggtcaaacctcg

SEQ ID NO: 86127 - DNA, 25 bp, Homo sapien
gtcaaaggagtacaggaaccagtgg

SEQ ID NO: 86128 - DNA, 25 bp, Homo sapien
gtcaaaggagtagaggaaccagtgg

SEQ ID NO: 86129 - DNA, 25 bp, Homo sapien
gatccgaaccgacgacaccggtggt

SEQ ID NO: 86130 - DNA, 25 bp, Homo sapien
gatccgaaccgaggacaccggtggt

SEQ ID NO: 86131 - DNA, 25 bp, Homo sapien
ccctccggtggtgacaccgtgtctt

SEQ ID NO: 86132 - DNA, 25 bp, Homo sapien
ccctccggtggtcacaccgtgtctt

SEQ ID NO: 86133 - DNA, 25 bp, Homo sapien
cggctcacgactgtctccgggtctg

SEQ ID NO: 86134 - DNA, 25 bp, Homo sapien
cggctcacgactctctccgggtctg

SEQ ID NO: 86135 - DNA, 25 bp, Homo sapien
aacgttcttgacgaccccgaaggtg

SEQ ID NO: 86136 - DNA, 25 bp, Homo sapien
aacgttcttgaccaccccgaaggtg

SEQ ID NO: 86137 - DNA, 25 bp, Homo sapien
cgaatcgccgaaacccgaaacggcg

SEQ ID NO: 86138 - DNA, 25 bp, Homo sapien
cgaatcgccgaatcccgaaacggcg

SEQ ID NO: 86139 - DNA, 25 bp, Homo sapien
gagtttctacagcaactgcttcctc

SEQ ID NO: 86140 - DNA, 25 bp, Homo sapien
gagtttctacaggaactgcttcctc

SEQ ID NO: 86141 - DNA, 25 bp, Homo sapien
ggttctctacctagaagtcctcacc

SEQ ID NO: 86142 - DNA, 25 bp, Homo sapien
ggttctctaccttgaagtcctcacc

SEQ ID NO: 86143 - DNA, 25 bp, Homo sapien
ggctcctgtgtctgtcgtccagatc

SEQ ID NO: 86144 - DNA, 25 bp, Homo sapien
ggctcctgtgtcagtcgtccagatc

SEQ ID NO: 86145 - DNA, 25 bp, Homo sapien
gaagctagtcttcaagtctcccatt

SEQ ID NO: 86146 - DNA, 25 bp, Homo sapien
gaagctagtcttgaagtctcccatt

SEQ ID NO: 86147 - DNA, 25 bp, Homo sapien
ggaactgttcccaccgtctctaatt

SEQ ID NO: 86148 - DNA, 25 bp, Homo sapien
ggaactgttccctccgtctctaatt

SEQ ID NO: 86149 - DNA, 25 bp, Homo sapien
aactagttccagtcccgtttctgtt

SEQ ID NO: 86150 - DNA, 25 bp, Homo sapien
aactagttccagacccgtttctgtt

SEQ ID NO: 86151 - DNA, 25 bp, Homo sapien
tactctgactagatatcattttgtg

SEQ ID NO: 86152 - DNA, 25 bp, Homo sapien
tactctgactagttatcattttgtg

SEQ ID NO: 86153 - DNA, 25 bp, Homo sapien
gttactgactactcctatctaaagg

SEQ ID NO: 86154 - DNA, 25 bp, Homo sapien
gttactgactacacctatctaaagg

SEQ ID NO: 86155 - DNA, 25 bp, Homo sapien
cggtgtggtaaaaaggtcacttcgg

SEQ ID NO: 86156 - DNA, 25 bp, Homo sapien
cggtgtggtaaataggtcacttcgg

SEQ ID NO: 86157 - DNA, 25 bp, Homo sapien
cgggaactccaacaggtccactcgg

SEQ ID NO: 86158 - DNA, 25 bp, Homo sapien
cgggaactccaagaggtccactcgg

SEQ ID NO: 86159 - DNA, 25 bp, Homo sapien
ggggaccccgaaaggtcgtcctcca

SEQ ID NO: 86160 - DNA, 25 bp, Homo sapien
ggggaccccgaatggtcgtcctcca

SEQ ID NO: 86161 - DNA, 25 bp, Homo sapien
cgggaccaccttaactttcctgaat

SEQ ID NO: 86162 - DNA, 25 bp, Homo sapien
cgggaccacctttactttcctgaat

SEQ ID NO: 86163 - DNA, 25 bp, Homo sapien
gtgcagcttgttcaacacagagtag

SEQ ID NO: 86164 - DNA, 25 bp, Homo sapien
gtgcagcttgttgaacacagagtag

SEQ ID NO: 86165 - DNA, 25 bp, Homo sapien
gagggagatttttactaaccgtctg

SEQ ID NO: 86166 - DNA, 25 bp, Homo sapien
gagggagattttaactaaccgtctg

SEQ ID NO: 86167 - DNA, 25 bp, Homo sapien
gcgcgggacatcaccgatatctctc

SEQ ID NO: 86168 - DNA, 25 bp, Homo sapien
gcgcgggacatctccgatatctctc

SEQ ID NO: 86169 - DNA, 25 bp, Homo sapien
ttgcacaatacgtctctatctctgg

SEQ ID NO: 86170 - DNA, 25 bp, Homo sapien
ttgcacaatacgactctatctctgg

SEQ ID NO: 86171 - DNA, 25 bp, Homo sapien
gctaggaagaagactcgttccctgt

SEQ ID NO: 86172 - DNA, 25 bp, Homo sapien
gctaggaagaagtctcgttccctgt

SEQ ID NO: 86173 - DNA, 25 bp, Homo sapien
cgtgaagaccggtccgacccacgtt

SEQ ID NO: 86174 - DNA, 25 bp, Homo sapien
cgtgaagaccggaccgacccacgtt

SEQ ID NO: 86175 - DNA, 25 bp, Homo sapien
agacttaccggttcaactccggtat

SEQ ID NO: 86176 - DNA, 25 bp, Homo sapien
agacttaccggtacaactccggtat

SEQ ID NO: 86177 - DNA, 25 bp, Homo sapien
tttcctttgcaagacgtacgggtat

SEQ ID NO: 86178 - DNA, 25 bp, Homo sapien
tttcctttgcaacacgtacgggtat

SEQ ID NO: 86179 - DNA, 25 bp, Homo sapien
ttccctgtgtcctgtccttcgggtc

SEQ ID NO: 86180 - DNA, 25 bp, Homo sapien
ttccctgtgtccagtccttcgggtc

SEQ ID NO: 86181 - DNA, 25 bp, Homo sapien
cacgttggacagtacacacagtgac

SEQ ID NO: 86182 - DNA, 25 bp, Homo sapien
cacgttggacagaacacacagtgac

SEQ ID NO: 86183 - DNA, 25 bp, Homo sapien
ctcacgttctgaatcacaagatatg

SEQ ID NO: 86184 - DNA, 25 bp, Homo sapien
ctcacgttctgattcacaagatatg

SEQ ID NO: 86185 - DNA, 25 bp, Homo sapien
cggtctgtgaactcgttaaagtttg

SEQ ID NO: 86186 - DNA, 25 bp, Homo sapien
cggtctgtgaacacgttaaagtttg

SEQ ID NO: 86187 - DNA, 25 bp, Homo sapien
ccaggccgcgacgacctcaaagttg

SEQ ID NO: 86188 - DNA, 25 bp, Homo sapien
ccaggccgcgaccacctcaaagttg

SEQ ID NO: 86189 - DNA, 25 bp, Homo sapien
ttgtacggccgtttctttgaaatat

SEQ ID NO: 86190 - DNA, 25 bp, Homo sapien
ttgtacggccgtatctttgaaatat

SEQ ID NO: 86191 - DNA, 25 bp, Homo sapien
taggttcttatttagtgtaccactg

SEQ ID NO: 86192 - DNA, 25 bp, Homo sapien
taggttcttattaagtgtaccactg

SEQ ID NO: 86193 - DNA, 25 bp, Homo sapien
caggtagtaatcgtggttacttcta

SEQ ID NO: 86194 - DNA, 25 bp, Homo sapien
caggtagtaatcctggttacttcta

SEQ ID NO: 86195 - DNA, 25 bp, Homo sapien
tcgtcaagtggtatctgtttttaca

SEQ ID NO: 86196 - DNA, 25 bp, Homo sapien
tcgtcaagtggtttctgtttttaca

SEQ ID NO: 86197 - DNA, 25 bp, Homo sapien
gcgcttgtccatctggtccggcgtg

SEQ ID NO: 86198 - DNA, 25 bp, Homo sapien
gcgcttgtccatgtggtccggcgtg

SEQ ID NO: 86199 - DNA, 25 bp, Homo sapien
cgaactcaataacacgttcggacgg

SEQ ID NO: 86200 - DNA, 25 bp, Homo sapien
cgaactcaataagacgttcggacgg

SEQ ID NO: 86201 - DNA, 25 bp, Homo sapien
tcctccttcttgatctacttgatgg

SEQ ID NO: 86202 - DNA, 25 bp, Homo sapien
tcctccttcttgttctacttgatgg

SEQ ID NO: 86203 - DNA, 25 bp, Homo sapien
gacccgctgccagtcttcgcccacg

SEQ ID NO: 86204 - DNA, 25 bp, Homo sapien
gacccgctgccactcttcgcccacg

SEQ ID NO: 86205 - DNA, 25 bp, Homo sapien
ccacgtctctggtacttttccacgg

SEQ ID NO: 86206 - DNA, 25 bp, Homo sapien
ccacgtctctggaacttttccacgg

SEQ ID NO: 86207 - DNA, 25 bp, Homo sapien
cagagacacgagacgactaatttta

SEQ ID NO: 86208 - DNA, 25 bp, Homo sapien
cagagacacgagtcgactaatttta

SEQ ID NO: 86209 - DNA, 25 bp, Homo sapien
tctagggacgtcttcacagatttta

SEQ ID NO: 86210 - DNA, 25 bp, Homo sapien
tctagggacgtcatcacagatttta

SEQ ID NO: 86211 - DNA, 25 bp, Homo sapien
attcgggacgtgttattcctttgta

SEQ ID NO: 86212 - DNA, 25 bp, Homo sapien
attcgggacgtgatattcctttgta

SEQ ID NO: 86213 - DNA, 25 bp, Homo sapien
tcagtcgcggtttctcatagtcctt

SEQ ID NO: 86214 - DNA, 25 bp, Homo sapien
tcagtcgcggttactcatagtcctt

SEQ ID NO: 86215 - DNA, 25 bp, Homo sapien
ttaccgtaaggacctcctgtgccct

SEQ ID NO: 86216 - DNA, 25 bp, Homo sapien
ttaccgtaaggagctcctgtgccct

SEQ ID NO: 86217 - DNA, 25 bp, Homo sapien
aagccaccgtcctgtttagtccggt

SEQ ID NO: 86218 - DNA, 25 bp, Homo sapien
aagccaccgtccagtttagtccggt

SEQ ID NO: 86219 - DNA, 25 bp, Homo sapien
agcggtcaccgactcaatgctcgtc

SEQ ID NO: 86220 - DNA, 25 bp, Homo sapien
agcggtcaccgagtcaatgctcgtc

SEQ ID NO: 86221 - DNA, 25 bp, Homo sapien
gtaacgtctctgtgttgattcttac

SEQ ID NO: 86222 - DNA, 25 bp, Homo sapien
gtaacgtctctgagttgattcttac

SEQ ID NO: 86223 - DNA, 25 bp, Homo sapien
gaggtaatttctagtaaccgttttc

SEQ ID NO: 86224 - DNA, 25 bp, Homo sapien
gaggtaatttcttgtaaccgttttc

SEQ ID NO: 86225 - DNA, 25 bp, Homo sapien
taggaattttgttactacgttttcc

SEQ ID NO: 86226 - DNA, 25 bp, Homo sapien
taggaattttgtaactacgttttcc

SEQ ID NO: 86227 - DNA, 25 bp, Homo sapien
atcttagctctgaactccttcgccg

SEQ ID NO: 86228 - DNA, 25 bp, Homo sapien
atcttagctctgtactccttcgccg

SEQ ID NO: 86229 - DNA, 25 bp, Homo sapien
gtagagagtcggttcctcttcggtg

SEQ ID NO: 86230 - DNA, 25 bp, Homo sapien
gtagagagtcggatcctcttcggtg

SEQ ID NO: 86231 - DNA, 25 bp, Homo sapien
gactggaccgagtccgtaataccgg

SEQ ID NO: 86232 - DNA, 25 bp, Homo sapien
gactggaccgagaccgtaataccgg

SEQ ID NO: 86233 - DNA, 25 bp, Homo sapien
agagtgaagggaacacagatacccg

SEQ ID NO: 86234 - DNA, 25 bp, Homo sapien
agagtgaagggatcacagatacccg

SEQ ID NO: 86235 - DNA, 25 bp, Homo sapien
cgcggagagaggtggaacaatcttc

SEQ ID NO: 86236 - DNA, 25 bp, Homo sapien
cgcggagagaggaggaacaatcttc

SEQ ID NO: 86237 - DNA, 25 bp, Homo sapien
acactagaaacctaagactctttgg

SEQ ID NO: 86238 - DNA, 25 bp, Homo sapien
acactagaaaccaaagactctttgg

SEQ ID NO: 86239 - DNA, 25 bp, Homo sapien
gttaggacccctataccttttcgta

SEQ ID NO: 86240 - DNA, 25 bp, Homo sapien
gttaggacccctttaccttttcgta

SEQ ID NO: 86241 - DNA, 25 bp, Homo sapien
cagggggtttaaaacgtactcctgt

SEQ ID NO: 86242 - DNA, 25 bp, Homo sapien
cagggggtttaatacgtactcctgt

SEQ ID NO: 86243 - DNA, 25 bp, Homo sapien
tgggagttctctttaccttctaaag

SEQ ID NO: 86244 - DNA, 25 bp, Homo sapien
tgggagttctctataccttctaaag

SEQ ID NO: 86245 - DNA, 25 bp, Homo sapien
cgtagttctgttacatgtcatagtt

SEQ ID NO: 86246 - DNA, 25 bp, Homo sapien
cgtagttctgtttcatgtcatagtt

SEQ ID NO: 86247 - DNA, 25 bp, Homo sapien
gtgtcatgtcataatctcgtcttat

SEQ ID NO: 86248 - DNA, 25 bp, Homo sapien
gtgtcatgtcattatctcgtcttat

SEQ ID NO: 86249 - DNA, 25 bp, Homo sapien
gacgacactgggtttctactgtgtc

SEQ ID NO: 86250 - DNA, 25 bp, Homo sapien
gacgacactgggattctactgtgtc

SEQ ID NO: 86251 - DNA, 25 bp, Homo sapien
gagtctaagatatattcgtactttc

SEQ ID NO: 86252 - DNA, 25 bp, Homo sapien
gagtctaagataaattcgtactttc

SEQ ID NO: 86253 - DNA, 25 bp, Homo sapien
ctggagtgttataacttttcggttc

SEQ ID NO: 86254 - DNA, 25 bp, Homo sapien
ctggagtgttattacttttcggttc

SEQ ID NO: 86255 - DNA, 25 bp, Homo sapien
cgtccacgtctagttctgggacctc

SEQ ID NO: 86256 - DNA, 25 bp, Homo sapien
cgtccacgtctacttctgggacctc

SEQ ID NO: 86257 - DNA, 25 bp, Homo sapien
ggtcccgaattagtctaaggcactc

SEQ ID NO: 86258 - DNA, 25 bp, Homo sapien
ggtcccgaattactctaaggcactc

SEQ ID NO: 86259 - DNA, 25 bp, Homo sapien
gcggtcagaccaggtccaccctgtg

SEQ ID NO: 86260 - DNA, 25 bp, Homo sapien
gcggtcagaccacgtccaccctgtg

SEQ ID NO: 86261 - DNA, 25 bp, Homo sapien
gggtctgaccgtctctgactccggg

SEQ ID NO: 86262 - DNA, 25 bp, Homo sapien
gggtctgaccgtgtctgactccggg

SEQ ID NO: 86263 - DNA, 25 bp, Homo sapien
ggagggttttgattcacctccgaga

SEQ ID NO: 86264 - DNA, 25 bp, Homo sapien
ggagggttttgaatcacctccgaga

SEQ ID NO: 86265 - DNA, 25 bp, Homo sapien
aggacgatgtttatgtctaaacaac

SEQ ID NO: 86266 - DNA, 25 bp, Homo sapien
aggacgatgtttttgtctaaacaac

SEQ ID NO: 86267 - DNA, 25 bp, Homo sapien
gaggtcttctcgtaagacggcgaac

SEQ ID NO: 86268 - DNA, 25 bp, Homo sapien
gaggtcttctcgaaagacggcgaac

SEQ ID NO: 86269 - DNA, 25 bp, Homo sapien
tgagaccgggaagtgtcagtacaac

SEQ ID NO: 86270 - DNA, 25 bp, Homo sapien
tgagaccgggaactgtcagtacaac

SEQ ID NO: 86271 - DNA, 25 bp, Homo sapien
gcaccgacaatccatcgtagaaggt

SEQ ID NO: 86272 - DNA, 25 bp, Homo sapien
gcaccgacaatcgatcgtagaaggt

SEQ ID NO: 86273 - DNA, 25 bp, Homo sapien
tggacatacgttaccctttagaaag

SEQ ID NO: 86274 - DNA, 25 bp, Homo sapien
tggacatacgtttccctttagaaag

SEQ ID NO: 86275 - DNA, 25 bp, Homo sapien
gtgtcaaattacctccttcgtagaa

SEQ ID NO: 86276 - DNA, 25 bp, Homo sapien
gtgtcaaattacgtccttcgtagaa

SEQ ID NO: 86277 - DNA, 25 bp, Homo sapien
gtcacgtcaccatagtctttgaaca

SEQ ID NO: 86278 - DNA, 25 bp, Homo sapien
gtcacgtcaccaaagtctttgaaca

SEQ ID NO: 86279 - DNA, 25 bp, Homo sapien
ggttacccgctaagtttcttcagaa

SEQ ID NO: 86280 - DNA, 25 bp, Homo sapien
ggttacccgctatgtttcttcagaa

SEQ ID NO: 86281 - DNA, 25 bp, Homo sapien
tgtgacgtcttgttgacccacgaca

SEQ ID NO: 86282 - DNA, 25 bp, Homo sapien
tgtgacgtcttgatgacccacgaca

SEQ ID NO: 86283 - DNA, 25 bp, Homo sapien
cctattttgtcttcggggacacgtt

SEQ ID NO: 86284 - DNA, 25 bp, Homo sapien
cctattttgtctacggggacacgtt

SEQ ID NO: 86285 - DNA, 25 bp, Homo sapien
ttccttttggactgggtcctccgtc

SEQ ID NO: 86286 - DNA, 25 bp, Homo sapien
ttccttttggacagggtcctccgtc

SEQ ID NO: 86287 - DNA, 25 bp, Homo sapien
ttttgtctacgtaccaatgtttgtc

SEQ ID NO: 86288 - DNA, 25 bp, Homo sapien
ttttgtctacgttccaatgtttgtc

SEQ ID NO: 86289 - DNA, 25 bp, Homo sapien
aggtgatgtcgtgtctgtcggtttc

SEQ ID NO: 86290 - DNA, 25 bp, Homo sapien
aggtgatgtcgtctctgtcggtttc

SEQ ID NO: 86291 - DNA, 25 bp, Homo sapien
gacatggggtcgttcatccagttta

SEQ ID NO: 86292 - DNA, 25 bp, Homo sapien
gacatggggtcgatcatccagttta

SEQ ID NO: 86293 - DNA, 25 bp, Homo sapien
aagaggcgtatcaggcgtagcttcg

SEQ ID NO: 86294 - DNA, 25 bp, Homo sapien
aagaggcgtatctggcgtagcttcg

SEQ ID NO: 86295 - DNA, 25 bp, Homo sapien
acttacaaggggaagaccctatttt

SEQ ID NO: 86296 - DNA, 25 bp, Homo sapien
acttacaaggggtagaccctatttt

SEQ ID NO: 86297 - DNA, 25 bp, Homo sapien
cgtttccggggatactactttttgt

SEQ ID NO: 86298 - DNA, 25 bp, Homo sapien
cgtttccggggaaactactttttgt

SEQ ID NO: 86299 - DNA, 25 bp, Homo sapien
cgatagcctagttcaaaatttcctg

SEQ ID NO: 86300 - DNA, 25 bp, Homo sapien
cgatagcctagtacaaaatttcctg

SEQ ID NO: 86301 - DNA, 25 bp, Homo sapien
tgatctagtaaacaatctccgaagt

SEQ ID NO: 86302 - DNA, 25 bp, Homo sapien
tgatctagtaaagaatctccgaagt

SEQ ID NO: 86303 - DNA, 25 bp, Homo sapien
gtgattaggaaaggatctgcgacgc

SEQ ID NO: 86304 - DNA, 25 bp, Homo sapien
gtgattaggaaacgatctgcgacgc

SEQ ID NO: 86305 - DNA, 25 bp, Homo sapien
gacgtaattcgactctgttcatata

SEQ ID NO: 86306 - DNA, 25 bp, Homo sapien
gacgtaattcgagtctgttcatata

SEQ ID NO: 86307 - DNA, 25 bp, Homo sapien
cacgtttccgtcgaccgttaccaga

SEQ ID NO: 86308 - DNA, 25 bp, Homo sapien
cacgtttccgtccaccgttaccaga

SEQ ID NO: 86309 - DNA, 25 bp, Homo sapien
gaagattccactccaattgtcaggt

SEQ ID NO: 86310 - DNA, 25 bp, Homo sapien
gaagattccactgcaattgtcaggt

SEQ ID NO: 86311 - DNA, 25 bp, Homo sapien
gagaccatcggactaacattaatag

SEQ ID NO: 86312 - DNA, 25 bp, Homo sapien
gagaccatcggagtaacattaatag

SEQ ID NO: 86313 - DNA, 25 bp, Homo sapien
cgatactttgagtatacgatcatta

SEQ ID NO: 86314 - DNA, 25 bp, Homo sapien
cgatactttgagaatacgatcatta

SEQ ID NO: 86315 - DNA, 25 bp, Homo sapien
gaggatccgaagacacttaaagtct

SEQ ID NO: 86316 - DNA, 25 bp, Homo sapien
gaggatccgaagtcacttaaagtct

SEQ ID NO: 86317 - DNA, 25 bp, Homo sapien
ggctcctcggtgtcgactcagtttc

SEQ ID NO: 86318 - DNA, 25 bp, Homo sapien
ggctcctcggtgacgactcagtttc

SEQ ID NO: 86319 - DNA, 25 bp, Homo sapien
tggtatcgtgattacaaaattccac

SEQ ID NO: 86320 - DNA, 25 bp, Homo sapien
tggtatcgtgataacaaaattccac

SEQ ID NO: 86321 - DNA, 25 bp, Homo sapien
gtcgatgtcaaagaacgaatctaca

SEQ ID NO: 86322 - DNA, 25 bp, Homo sapien
gtcgatgtcaaacaacgaatctaca

SEQ ID NO: 86323 - DNA, 25 bp, Homo sapien
tctcacaggtacgacacgagtctaa

SEQ ID NO: 86324 - DNA, 25 bp, Homo sapien
tctcacaggtaccacacgagtctaa

SEQ ID NO: 86325 - DNA, 25 bp, Homo sapien
cgacggagggaccaccaacgtctcg

SEQ ID NO: 86326 - DNA, 25 bp, Homo sapien
cgacggagggacgaccaacgtctcg

SEQ ID NO: 86327 - DNA, 25 bp, Homo sapien
ctgaaagtggaggtcaaacgtaagt

SEQ ID NO: 86328 - DNA, 25 bp, Homo sapien
ctgaaagtggagctcaaacgtaagt

SEQ ID NO: 86329 - DNA, 25 bp, Homo sapien
ctctcaagggcgaccaacagttact

SEQ ID NO: 86330 - DNA, 25 bp, Homo sapien
ctctcaagggcgtccaacagttact

SEQ ID NO: 86331 - DNA, 25 bp, Homo sapien
tgttaaggttacgtcggatcctcct

SEQ ID NO: 86332 - DNA, 25 bp, Homo sapien
tgttaaggttacctcggatcctcct

SEQ ID NO: 86333 - DNA, 25 bp, Homo sapien
gtactgagttccagggtatccgaac

SEQ ID NO: 86334 - DNA, 25 bp, Homo sapien
gtactgagttcctgggtatccgaac

SEQ ID NO: 86335 - DNA, 25 bp, Homo sapien
aggactcgagccatgaggttcacca

SEQ ID NO: 86336 - DNA, 25 bp, Homo sapien
aggactcgagccttgaggttcacca

SEQ ID NO: 86337 - DNA, 25 bp, Homo sapien
aatgtgacacacacgggttgacggg

SEQ ID NO: 86338 - DNA, 25 bp, Homo sapien
aatgtgacacactcgggttgacggg

SEQ ID NO: 86339 - DNA, 25 bp, Homo sapien
tcgtagaccccctgtgaagaccggt

SEQ ID NO: 86340 - DNA, 25 bp, Homo sapien
tcgtagacccccagtgaagaccggt

SEQ ID NO: 86341 - DNA, 25 bp, Homo sapien
tgtcacgtttaccatgttgtaatgt

SEQ ID NO: 86342 - DNA, 25 bp, Homo sapien
tgtcacgtttacgatgttgtaatgt

SEQ ID NO: 86343 - DNA, 25 bp, Homo sapien
acttggttctcagatataagaactt

SEQ ID NO: 86344 - DNA, 25 bp, Homo sapien
acttggttctcacatataagaactt

SEQ ID NO: 86345 - DNA, 25 bp, Homo sapien
tttttgtcgtacacgtttggactgt

SEQ ID NO: 86346 - DNA, 25 bp, Homo sapien
tttttgtcgtactcgtttggactgt

SEQ ID NO: 86347 - DNA, 25 bp, Homo sapien
tatattgtacattagggtattctct

SEQ ID NO: 86348 - DNA, 25 bp, Homo sapien
tatattgtacataagggtattctct

SEQ ID NO: 86349 - DNA, 25 bp, Homo sapien
gattcgttcttaccgggttcgaccg

SEQ ID NO: 86350 - DNA, 25 bp, Homo sapien
gattcgttcttagcgggttcgaccg

SEQ ID NO: 86351 - DNA, 25 bp, Homo sapien
aagatcgtcctctgcggggtccgcc

SEQ ID NO: 86352 - DNA, 25 bp, Homo sapien
aagatcgtcctcagcggggtccgcc

SEQ ID NO: 86353 - DNA, 25 bp, Homo sapien
gtgtcttcacggtcgtgtcttcacg

SEQ ID NO: 86354 - DNA, 25 bp, Homo sapien
gtgtcttcacggacgtgtcttcacg

SEQ ID NO: 86355 - DNA, 25 bp, Homo sapien
cgatgtgtccctaaaactggtcttc

SEQ ID NO: 86356 - DNA, 25 bp, Homo sapien
cgatgtgtcccttaaactggtcttc

SEQ ID NO: 86357 - DNA, 25 bp, Homo sapien
gtttccttctcaacgagactcttct

SEQ ID NO: 86358 - DNA, 25 bp, Homo sapien
gtttccttctcatcgagactcttct

SEQ ID NO: 86359 - DNA, 25 bp, Homo sapien
gtctccttccgagtaacgacgacga

SEQ ID NO: 86360 - DNA, 25 bp, Homo sapien
gtctccttccgactaacgacgacga

SEQ ID NO: 86361 - DNA, 25 bp, Homo sapien
gatatacatgttcgttcttcagtta

SEQ ID NO: 86362 - DNA, 25 bp, Homo sapien
gatatacatgttggttcttcagtta

SEQ ID NO: 86363 - DNA, 25 bp, Homo sapien
gtctatgatgtggacggtgttctca

SEQ ID NO: 86364 - DNA, 25 bp, Homo sapien
gtctatgatgtgcacggtgttctca

SEQ ID NO: 86365 - DNA, 25 bp, Homo sapien
cttaggtccggtgtcgagtacctca

SEQ ID NO: 86366 - DNA, 25 bp, Homo sapien
cttaggtccggtctcgagtacctca

SEQ ID NO: 86367 - DNA, 25 bp, Homo sapien
ggactccagtgtagtcagacacctg

SEQ ID NO: 86368 - DNA, 25 bp, Homo sapien
ggactccagtgttgtcagacacctg

SEQ ID NO: 86369 - DNA, 25 bp, Homo sapien
cgtgctcacacgtcttctgtcaggg

SEQ ID NO: 86370 - DNA, 25 bp, Homo sapien
cgtgctcacacgacttctgtcaggg

SEQ ID NO: 86371 - DNA, 25 bp, Homo sapien
ctgtcgtctatataccttttgggtc

SEQ ID NO: 86372 - DNA, 25 bp, Homo sapien
ctgtcgtctataaaccttttgggtc

SEQ ID NO: 86373 - DNA, 25 bp, Homo sapien
agttgttattgtcttctacagggtc

SEQ ID NO: 86374 - DNA, 25 bp, Homo sapien
agttgttattgtgttctacagggtc

SEQ ID NO: 86375 - DNA, 25 bp, Homo sapien
gtttcggttctctgtctgagacgat

SEQ ID NO: 86376 - DNA, 25 bp, Homo sapien
gtttcggttctcagtctgagacgat

SEQ ID NO: 86377 - DNA, 25 bp, Homo sapien
aaatgttccggttgaaaagttacct

SEQ ID NO: 86378 - DNA, 25 bp, Homo sapien
aaatgttccggtagaaaagttacct

SEQ ID NO: 86379 - DNA, 25 bp, Homo sapien
gagtcttcaagacacaccgagactc

SEQ ID NO: 86380 - DNA, 25 bp, Homo sapien
gagtcttcaagagacaccgagactc

SEQ ID NO: 86381 - DNA, 25 bp, Homo sapien
tccgagaggtaggacccgaccgagt

SEQ ID NO: 86382 - DNA, 25 bp, Homo sapien
tccgagaggtagcacccgaccgagt

SEQ ID NO: 86383 - DNA, 25 bp, Homo sapien
gtcacaacgcagaccaagtcacggt

SEQ ID NO: 86384 - DNA, 25 bp, Homo sapien
gtcacaacgcagtccaagtcacggt

SEQ ID NO: 86385 - DNA, 25 bp, Homo sapien
gttaggtcgggttaaagagccgact

SEQ ID NO: 86386 - DNA, 25 bp, Homo sapien
gttaggtcgggtaaaagagccgact

SEQ ID NO: 86387 - DNA, 25 bp, Homo sapien
gatcggagggcatggacagtacact

SEQ ID NO: 86388 - DNA, 25 bp, Homo sapien
gatcggagggcaaggacagtacact

SEQ ID NO: 86389 - DNA, 25 bp, Homo sapien
ttcctcgtcccacatggataggtct

SEQ ID NO: 86390 - DNA, 25 bp, Homo sapien
ttcctcgtcccagatggataggtct

SEQ ID NO: 86391 - DNA, 25 bp, Homo sapien
tttcagtcctctcgatgagtcaatt

SEQ ID NO: 86392 - DNA, 25 bp, Homo sapien
tttcagtcctctggatgagtcaatt

SEQ ID NO: 86393 - DNA, 25 bp, Homo sapien
taatcctgtgtgttccgtcgtagaa

SEQ ID NO: 86394 - DNA, 25 bp, Homo sapien
taatcctgtgtgatccgtcgtagaa

SEQ ID NO: 86395 - DNA, 25 bp, Homo sapien
agtcgtcctcttcctctcgtataga

SEQ ID NO: 86396 - DNA, 25 bp, Homo sapien
agtcgtcctcttgctctcgtataga

SEQ ID NO: 86397 - DNA, 25 bp, Homo sapien
gagtcggcgtctttacttctgtaga

SEQ ID NO: 86398 - DNA, 25 bp, Homo sapien
gagtcggcgtctatacttctgtaga

SEQ ID NO: 86399 - DNA, 25 bp, Homo sapien
aaaaaatacgtgtgtaaattctgaa

SEQ ID NO: 86400 - DNA, 25 bp, Homo sapien
aaaaaatacgtgagtaaattctgaa

SEQ ID NO: 86401 - DNA, 25 bp, Homo sapien
ttagagtcatctcctttttctcagg

SEQ ID NO: 86402 - DNA, 25 bp, Homo sapien
ttagagtcatctgctttttctcagg

SEQ ID NO: 86403 - DNA, 25 bp, Homo sapien
gtctatcagactctttttcacagcg

SEQ ID NO: 86404 - DNA, 25 bp, Homo sapien
gtctatcagactgtttttcacagcg

SEQ ID NO: 86405 - DNA, 25 bp, Homo sapien
tgtgtgcatatcctttatataaaag

SEQ ID NO: 86406 - DNA, 25 bp, Homo sapien
tgtgtgcatatcgtttatataaaag

SEQ ID NO: 86407 - DNA, 25 bp, Homo sapien
acatcgaatgaggtcaataatcaat

SEQ ID NO: 86408 - DNA, 25 bp, Homo sapien
acatcgaatgagctcaataatcaat

SEQ ID NO: 86409 - DNA, 25 bp, Homo sapien
aatggaagaggacgaacagtctcca

SEQ ID NO: 86410 - DNA, 25 bp, Homo sapien
aatggaagaggaggaacagtctcca

SEQ ID NO: 86411 - DNA, 25 bp, Homo sapien
ggatatcgggagtaggagtgtcttc

SEQ ID NO: 86412 - DNA, 25 bp, Homo sapien
ggatatcgggagaaggagtgtcttc

SEQ ID NO: 86413 - DNA, 25 bp, Homo sapien
tcagtcgtgtgtggaaaaggttcct

SEQ ID NO: 86414 - DNA, 25 bp, Homo sapien
tcagtcgtgtgtcgaaaaggttcct

SEQ ID NO: 86415 - DNA, 25 bp, Homo sapien
cttagtcgttgaccccggttccttc

SEQ ID NO: 86416 - DNA, 25 bp, Homo sapien
cttagtcgttgagcccggttccttc

SEQ ID NO: 86417 - DNA, 25 bp, Homo sapien
cggaggatcccgaacgggccgatac

SEQ ID NO: 86418 - DNA, 25 bp, Homo sapien
cggaggatcccgtacgggccgatac

SEQ ID NO: 86419 - DNA, 25 bp, Homo sapien
gtcattagtcctgacctcttccctg

SEQ ID NO: 86420 - DNA, 25 bp, Homo sapien
gtcattagtcctcacctcttccctg

SEQ ID NO: 86421 - DNA, 25 bp, Homo sapien
gtatgtgtttctgctgggacccgcg

SEQ ID NO: 86422 - DNA, 25 bp, Homo sapien
gtatgtgtttctcctgggacccgcg

SEQ ID NO: 86423 - DNA, 25 bp, Homo sapien
tctctcgtgactcttcgttgtcgtc

SEQ ID NO: 86424 - DNA, 25 bp, Homo sapien
tctctcgtgactgttcgttgtcgtc

SEQ ID NO: 86425 - DNA, 25 bp, Homo sapien
tacgactccctcatgtcatctctac

SEQ ID NO: 86426 - DNA, 25 bp, Homo sapien
tacgactccctcttgtcatctctac

SEQ ID NO: 86427 - DNA, 25 bp, Homo sapien
gtgggaggtctccaccggggtcgga

SEQ ID NO: 86428 - DNA, 25 bp, Homo sapien
gtgggaggtctcgaccggggtcgga

SEQ ID NO: 86429 - DNA, 25 bp, Homo sapien
gtccgcgggttatgctggtttaggc

SEQ ID NO: 86430 - DNA, 25 bp, Homo sapien
gtccgcgggttaagctggtttaggc

SEQ ID NO: 86431 - DNA, 25 bp, Homo sapien
tcggtgtgagccacgtgagtttgaa

SEQ ID NO: 86432 - DNA, 25 bp, Homo sapien
tcggtgtgagcctcgtgagtttgaa

SEQ ID NO: 86433 - DNA, 25 bp, Homo sapien
tggtccacccgatcccgttgtcata

SEQ ID NO: 86434 - DNA, 25 bp, Homo sapien
tggtccacccgaacccgttgtcata

SEQ ID NO: 86435 - DNA, 25 bp, Homo sapien
ttcacgatccgaaccgtgtccatgt

SEQ ID NO: 86436 - DNA, 25 bp, Homo sapien
ttcacgatccgatccgtgtccatgt

SEQ ID NO: 86437 - DNA, 25 bp, Homo sapien
ctaggtatataccactcatgttttg

SEQ ID NO: 86438 - DNA, 25 bp, Homo sapien
ctaggtatatacgactcatgttttg

SEQ ID NO: 86439 - DNA, 25 bp, Homo sapien
ccttcgtaatctttctctcactttt

SEQ ID NO: 86440 - DNA, 25 bp, Homo sapien
ccttcgtaatctatctctcactttt

SEQ ID NO: 86441 - DNA, 25 bp, Homo sapien
tgtgtcccttggtttcacgtttagt

SEQ ID NO: 86442 - DNA, 25 bp, Homo sapien
tgtgtcccttggattcacgtttagt

SEQ ID NO: 86443 - DNA, 25 bp, Homo sapien
tgtgacgtcccaagagattcttcaa

SEQ ID NO: 86444 - DNA, 25 bp, Homo sapien
tgtgacgtcccatgagattcttcaa

SEQ ID NO: 86445 - DNA, 25 bp, Homo sapien
tgagaccccgacgagatccacaaag

SEQ ID NO: 86446 - DNA, 25 bp, Homo sapien
tgagaccccgaccagatccacaaag

SEQ ID NO: 86447 - DNA, 25 bp, Homo sapien
ccggagcttgaccctttatctggtg

SEQ ID NO: 86448 - DNA, 25 bp, Homo sapien
ccggagcttgacgctttatctggtg

SEQ ID NO: 86449 - DNA, 25 bp, Homo sapien
cagatctcagatcgtttatatcatg

SEQ ID NO: 86450 - DNA, 25 bp, Homo sapien
cagatctcagatggtttatatcatg

SEQ ID NO: 86451 - DNA, 25 bp, Homo sapien
tccttctttgatgtcttacgtgcca

SEQ ID NO: 86452 - DNA, 25 bp, Homo sapien
tccttctttgatctcttacgtgcca

SEQ ID NO: 86453 - DNA, 25 bp, Homo sapien
gacttgtataagaccaggtacgaca

SEQ ID NO: 86454 - DNA, 25 bp, Homo sapien
gacttgtataagtccaggtacgaca

SEQ ID NO: 86455 - DNA, 25 bp, Homo sapien
gacgacttccggtccaaagagacgt

SEQ ID NO: 86456 - DNA, 25 bp, Homo sapien
gacgacttccggaccaaagagacgt

SEQ ID NO: 86457 - DNA, 25 bp, Homo sapien
ctgctgacagagtttcattggacgt

SEQ ID NO: 86458 - DNA, 25 bp, Homo sapien
ctgctgacagagattcattggacgt

SEQ ID NO: 86459 - DNA, 25 bp, Homo sapien
ctagactgtggaggtgtccttggtc

SEQ ID NO: 86460 - DNA, 25 bp, Homo sapien
ctagactgtggacgtgtccttggtc

SEQ ID NO: 86461 - DNA, 25 bp, Homo sapien
aggaactgggagtcgactccatggt

SEQ ID NO: 86462 - DNA, 25 bp, Homo sapien
aggaactgggagacgactccatggt

SEQ ID NO: 86463 - DNA, 25 bp, Homo sapien
catcattaggggtgtcactccttgt

SEQ ID NO: 86464 - DNA, 25 bp, Homo sapien
catcattaggggagtcactccttgt

SEQ ID NO: 86465 - DNA, 25 bp, Homo sapien
gtctatacattttagtcaacatatt

SEQ ID NO: 86466 - DNA, 25 bp, Homo sapien
gtctatacatttaagtcaacatatt

SEQ ID NO: 86467 - DNA, 25 bp, Homo sapien
ggtcaaccattcaacagtatgtata

SEQ ID NO: 86468 - DNA, 25 bp, Homo sapien
ggtcaaccattctacagtatgtata

SEQ ID NO: 86469 - DNA, 25 bp, Homo sapien
tgtcacgtttcctacagagttcgta

SEQ ID NO: 86470 - DNA, 25 bp, Homo sapien
tgtcacgtttccaacagagttcgta

SEQ ID NO: 86471 - DNA, 25 bp, Homo sapien
cagacggtccgaagaagagaccgac

SEQ ID NO: 86472 - DNA, 25 bp, Homo sapien
cagacggtccgatgaagagaccgac

SEQ ID NO: 86473 - DNA, 25 bp, Homo sapien
tgtttgcgactccatttaaactttg

SEQ ID NO: 86474 - DNA, 25 bp, Homo sapien
tgtttgcgactcgatttaaactttg

SEQ ID NO: 86475 - DNA, 25 bp, Homo sapien
tgttttaaccgactttaaacgtttg

SEQ ID NO: 86476 - DNA, 25 bp, Homo sapien
tgttttaaccgagtttaaacgtttg

SEQ ID NO: 86477 - DNA, 25 bp, Homo sapien
tttgtacctcaattttggactcttg

SEQ ID NO: 86478 - DNA, 25 bp, Homo sapien
tttgtacctcaaatttggactcttg

SEQ ID NO: 86479 - DNA, 25 bp, Homo sapien
ctcgacgtgagaggagaactgtccc

SEQ ID NO: 86480 - DNA, 25 bp, Homo sapien
ctcgacgtgagacgagaactgtccc

SEQ ID NO: 86481 - DNA, 25 bp, Homo sapien
ctaaaagacgttcggtcccctagag

SEQ ID NO: 86482 - DNA, 25 bp, Homo sapien
ctaaaagacgttgggtcccctagag

SEQ ID NO: 86483 - DNA, 25 bp, Homo sapien
cgaccctctctaggggaccgaacgt

SEQ ID NO: 86484 - DNA, 25 bp, Homo sapien
cgaccctctctacgggaccgaacgt

SEQ ID NO: 86485 - DNA, 25 bp, Homo sapien
tgagtacttcgtcgagaacatccgt

SEQ ID NO: 86486 - DNA, 25 bp, Homo sapien
tgagtacttcgtggagaacatccgt

SEQ ID NO: 86487 - DNA, 25 bp, Homo sapien
tatgttacttctacgacaactcttt

SEQ ID NO: 86488 - DNA, 25 bp, Homo sapien
tatgttacttcttcgacaactcttt

SEQ ID NO: 86489 - DNA, 25 bp, Homo sapien
cggtgtcagttttcaagagtctgtt

SEQ ID NO: 86490 - DNA, 25 bp, Homo sapien
cggtgtcagtttacaagagtctgtt

SEQ ID NO: 86491 - DNA, 25 bp, Homo sapien
gtggtcagaccttaatttgtcgtct

SEQ ID NO: 86492 - DNA, 25 bp, Homo sapien
gtggtcagacctaaatttgtcgtct

SEQ ID NO: 86493 - DNA, 25 bp, Homo sapien
cagggtatttcttccgtctttgtac

SEQ ID NO: 86494 - DNA, 25 bp, Homo sapien
cagggtatttctaccgtctttgtac

SEQ ID NO: 86495 - DNA, 25 bp, Homo sapien
tgtgtatacttttccgtcacctggt

SEQ ID NO: 86496 - DNA, 25 bp, Homo sapien
tgtgtatactttaccgtcacctggt

SEQ ID NO: 86497 - DNA, 25 bp, Homo sapien
ttaagtcagattaccgtcacgaagg

SEQ ID NO: 86498 - DNA, 25 bp, Homo sapien
ttaagtcagatttccgtcacgaagg

SEQ ID NO: 86499 - DNA, 25 bp, Homo sapien
tctttaacagagtttgtaggaccca

SEQ ID NO: 86500 - DNA, 25 bp, Homo sapien
tctttaacagagattgtaggaccca

SEQ ID NO: 86501 - DNA, 25 bp, Homo sapien
ctaagggaaaagtcaggacacatag

SEQ ID NO: 86502 - DNA, 25 bp, Homo sapien
ctaagggaaaagacaggacacatag

SEQ ID NO: 86503 - DNA, 25 bp, Homo sapien
acccgtcaagacgtcacatgtgaaa

SEQ ID NO: 86504 - DNA, 25 bp, Homo sapien
acccgtcaagacctcacatgtgaaa

SEQ ID NO: 86505 - DNA, 25 bp, Homo sapien
gtggtcctacccaacctcgataggt

SEQ ID NO: 86506 - DNA, 25 bp, Homo sapien
gtggtcctaccctacctcgataggt

SEQ ID NO: 86507 - DNA, 25 bp, Homo sapien
cccttgactggagaacacacacaca

SEQ ID NO: 86508 - DNA, 25 bp, Homo sapien
cccttgactggacaacacacacaca

SEQ ID NO: 86509 - DNA, 25 bp, Homo sapien
agggggacactccacgcgcacgagt

SEQ ID NO: 86510 - DNA, 25 bp, Homo sapien
agggggacactcgacgcgcacgagt

SEQ ID NO: 86511 - DNA, 25 bp, Homo sapien
gagggactccagtgcgacctacgac

SEQ ID NO: 86512 - DNA, 25 bp, Homo sapien
gagggactccagagcgacctacgac

SEQ ID NO: 86513 - DNA, 25 bp, Homo sapien
cggttctcgaggagtctcacgtaca

SEQ ID NO: 86514 - DNA, 25 bp, Homo sapien
cggttctcgaggtgtctcacgtaca

SEQ ID NO: 86515 - DNA, 25 bp, Homo sapien
cgggtcgttacaatgtgtcatcaaa

SEQ ID NO: 86516 - DNA, 25 bp, Homo sapien
cgggtcgttacattgtgtcatcaaa

SEQ ID NO: 86517 - DNA, 25 bp, Homo sapien
acgagtatccgtgtagacgttttaa

SEQ ID NO: 86518 - DNA, 25 bp, Homo sapien
acgagtatccgtctagacgttttaa

SEQ ID NO: 86519 - DNA, 25 bp, Homo sapien
atagtcgggtagactcttatacttt

SEQ ID NO: 86520 - DNA, 25 bp, Homo sapien
atagtcgggtagtctcttatacttt

SEQ ID NO: 86521 - DNA, 25 bp, Homo sapien
cggggtgtatctgagaaccattttt

SEQ ID NO: 86522 - DNA, 25 bp, Homo sapien
cggggtgtatctcagaaccattttt

SEQ ID NO: 86523 - DNA, 25 bp, Homo sapien
ccggcaagagtaacgtcatctcttt

SEQ ID NO: 86524 - DNA, 25 bp, Homo sapien
ccggcaagagtatcgtcatctcttt

SEQ ID NO: 86525 - DNA, 25 bp, Homo sapien
taccaggcagagaaagagatccttt

SEQ ID NO: 86526 - DNA, 25 bp, Homo sapien
taccaggcagagtaagagatccttt

SEQ ID NO: 86527 - DNA, 25 bp, Homo sapien
agagacggaggtaagtgtcctcttt

SEQ ID NO: 86528 - DNA, 25 bp, Homo sapien
agagacggaggttagtgtcctcttt

SEQ ID NO: 86529 - DNA, 25 bp, Homo sapien
cgtaaatcggccagttcaagtaggt

SEQ ID NO: 86530 - DNA, 25 bp, Homo sapien
cgtaaatcggcctgttcaagtaggt

SEQ ID NO: 86531 - DNA, 25 bp, Homo sapien
tcgatattctatccttcttaagtcc

SEQ ID NO: 86532 - DNA, 25 bp, Homo sapien
tcgatattctatgcttcttaagtcc

SEQ ID NO: 86533 - DNA, 25 bp, Homo sapien
actgtttctcgtctctagagttccg

SEQ ID NO: 86534 - DNA, 25 bp, Homo sapien
actgtttctcgtgtctagagttccg

SEQ ID NO: 86535 - DNA, 25 bp, Homo sapien
gacacataactcgtgttagaatcat

SEQ ID NO: 86536 - DNA, 25 bp, Homo sapien
gacacataactcctgttagaatcat

SEQ ID NO: 86537 - DNA, 25 bp, Homo sapien
ggagcagttaataccgttcttgttc

SEQ ID NO: 86538 - DNA, 25 bp, Homo sapien
ggagcagttaattccgttcttgttc

SEQ ID NO: 86539 - DNA, 25 bp, Homo sapien
acagactctgcgtcccttttgttat

SEQ ID NO: 86540 - DNA, 25 bp, Homo sapien
acagactctgcgacccttttgttat

SEQ ID NO: 86541 - DNA, 25 bp, Homo sapien
gtgaaaatcctctacttttgtgttt

SEQ ID NO: 86542 - DNA, 25 bp, Homo sapien
gtgaaaatcctcaacttttgtgttt

SEQ ID NO: 86543 - DNA, 25 bp, Homo sapien
aagtgtcggtctcgtccactcgtcc

SEQ ID NO: 86544 - DNA, 25 bp, Homo sapien
aagtgtcggtctggtccactcgtcc

SEQ ID NO: 86545 - DNA, 25 bp, Homo sapien
ttttgtcacccgtccttaggacgac

SEQ ID NO: 86546 - DNA, 25 bp, Homo sapien
ttttgtcacccgaccttaggacgac

SEQ ID NO: 86547 - DNA, 25 bp, Homo sapien
attcttataccctagtctcagggtg

SEQ ID NO: 86548 - DNA, 25 bp, Homo sapien
attcttatacccaagtctcagggtg

SEQ ID NO: 86549 - DNA, 25 bp, Homo sapien
actttggaactatataccggtcctc

SEQ ID NO: 86550 - DNA, 25 bp, Homo sapien
actttggaactaaataccggtcctc

SEQ ID NO: 86551 - DNA, 25 bp, Homo sapien
cattttgaaattacctcgtggtcgt

SEQ ID NO: 86552 - DNA, 25 bp, Homo sapien
cattttgaaatttcctcgtggtcgt

SEQ ID NO: 86553 - DNA, 25 bp, Homo sapien
ggtgtaccagactttgttctgtgtt

SEQ ID NO: 86554 - DNA, 25 bp, Homo sapien
ggtgtaccagacattgttctgtgtt

SEQ ID NO: 86555 - DNA, 25 bp, Homo sapien
ggtgggtctcgactctggaccctct

SEQ ID NO: 86556 - DNA, 25 bp, Homo sapien
ggtgggtctcgagtctggaccctct

SEQ ID NO: 86557 - DNA, 25 bp, Homo sapien
gcgtggtttgagaggtgcaactact

SEQ ID NO: 86558 - DNA, 25 bp, Homo sapien
gcgtggtttgagtggtgcaactact

SEQ ID NO: 86559 - DNA, 25 bp, Homo sapien
gaagtcttcggttcctcgtaccctc

SEQ ID NO: 86560 - DNA, 25 bp, Homo sapien
gaagtcttcggtacctcgtaccctc

SEQ ID NO: 86561 - DNA, 25 bp, Homo sapien
taagatttgtgtacccgtcagagag

SEQ ID NO: 86562 - DNA, 25 bp, Homo sapien
taagatttgtgttcccgtcagagag

SEQ ID NO: 86563 - DNA, 25 bp, Homo sapien
tcatagtcgttatccgtcttcgtat

SEQ ID NO: 86564 - DNA, 25 bp, Homo sapien
tcatagtcgttaaccgtcttcgtat

SEQ ID NO: 86565 - DNA, 25 bp, Homo sapien
cccaaagagtggtcatacgttaaag

SEQ ID NO: 86566 - DNA, 25 bp, Homo sapien
cccaaagagtggacatacgttaaag

SEQ ID NO: 86567 - DNA, 25 bp, Homo sapien
cgacgaaaaggactctctctgtaaa

SEQ ID NO: 86568 - DNA, 25 bp, Homo sapien
cgacgaaaaggagtctctctgtaaa

SEQ ID NO: 86569 - DNA, 25 bp, Homo sapien
ctgtaaaagttggtacaacatacaa

SEQ ID NO: 86570 - DNA, 25 bp, Homo sapien
ctgtaaaagttgctacaacatacaa

SEQ ID NO: 86571 - DNA, 25 bp, Homo sapien
ggaaaggtaggttaccctaacactg

SEQ ID NO: 86572 - DNA, 25 bp, Homo sapien
ggaaaggtaggtaaccctaacactg

SEQ ID NO: 86573 - DNA, 25 bp, Homo sapien
aaaagagactgtactacaaacgacc

SEQ ID NO: 86574 - DNA, 25 bp, Homo sapien
aaaagagactgttctacaaacgacc

SEQ ID NO: 86575 - DNA, 25 bp, Homo sapien
caaagaccactgttcaagagattct

SEQ ID NO: 86576 - DNA, 25 bp, Homo sapien
caaagaccactgatcaagagattct

SEQ ID NO: 86577 - DNA, 25 bp, Homo sapien
agccagtcgagtgaggtgactagtc

SEQ ID NO: 86578 - DNA, 25 bp, Homo sapien
agccagtcgagtcaggtgactagtc

SEQ ID NO: 86579 - DNA, 25 bp, Homo sapien
ccatcctccgtatcgggtgctgtct

SEQ ID NO: 86580 - DNA, 25 bp, Homo sapien
ccatcctccgtaacgggtgctgtct

SEQ ID NO: 86581 - DNA, 25 bp, Homo sapien
tttgatatcacgtactggtggtgtc

SEQ ID NO: 86582 - DNA, 25 bp, Homo sapien
tttgatatcacgaactggtggtgtc

SEQ ID NO: 86583 - DNA, 25 bp, Homo sapien
acagggatctctcaacagggagtga

SEQ ID NO: 86584 - DNA, 25 bp, Homo sapien
acagggatctctgaacagggagtga

SEQ ID NO: 86585 - DNA, 25 bp, Homo sapien
acggagggtcctgaagtgactagaa

SEQ ID NO: 86586 - DNA, 25 bp, Homo sapien
acggagggtcctcaagtgactagaa

SEQ ID NO: 86587 - DNA, 25 bp, Homo sapien
caggagtactcctttggtactaggc

SEQ ID NO: 86588 - DNA, 25 bp, Homo sapien
caggagtactccattggtactaggc

SEQ ID NO: 86589 - DNA, 25 bp, Homo sapien
tgactcgtcctaatggtaccgttgt

SEQ ID NO: 86590 - DNA, 25 bp, Homo sapien
tgactcgtcctattggtaccgttgt

SEQ ID NO: 86591 - DNA, 25 bp, Homo sapien
gagttcgagggtacctggacacccg

SEQ ID NO: 86592 - DNA, 25 bp, Homo sapien
gagttcgagggttcctggacacccg

SEQ ID NO: 86593 - DNA, 25 bp, Homo sapien
gaatcgtatattacatcggtcatta

SEQ ID NO: 86594 - DNA, 25 bp, Homo sapien
gaatcgtatatttcatcggtcatta

SEQ ID NO: 86595 - DNA, 25 bp, Homo sapien
accaaagatataacgttcgtgttct

SEQ ID NO: 86596 - DNA, 25 bp, Homo sapien
accaaagatatatcgttcgtgttct

SEQ ID NO: 86597 - DNA, 25 bp, Homo sapien
taccgagtacttacgtcttgtcagt

SEQ ID NO: 86598 - DNA, 25 bp, Homo sapien
taccgagtactttcgtcttgtcagt

SEQ ID NO: 86599 - DNA, 25 bp, Homo sapien
tctcggagtacgtagtgcctcgtac

SEQ ID NO: 86600 - DNA, 25 bp, Homo sapien
tctcggagtacgaagtgcctcgtac

SEQ ID NO: 86601 - DNA, 25 bp, Homo sapien
tcctccagagaccagtatagactcc

SEQ ID NO: 86602 - DNA, 25 bp, Homo sapien
tcctccagagacgagtatagactcc

SEQ ID NO: 86603 - DNA, 25 bp, Homo sapien
tccccggtgacagaagaggtgccac

SEQ ID NO: 86604 - DNA, 25 bp, Homo sapien
tccccggtgacacaagaggtgccac

SEQ ID NO: 86605 - DNA, 25 bp, Homo sapien
tatgggtgacaatcactgtgtctca

SEQ ID NO: 86606 - DNA, 25 bp, Homo sapien
tatgggtgacaaacactgtgtctca

SEQ ID NO: 86607 - DNA, 25 bp, Homo sapien
tttggtgttgagaacatctgcccct

SEQ ID NO: 86608 - DNA, 25 bp, Homo sapien
tttggtgttgagtacatctgcccct

SEQ ID NO: 86609 - DNA, 25 bp, Homo sapien
gcagtgagattcctgtagaggacga

SEQ ID NO: 86610 - DNA, 25 bp, Homo sapien
gcagtgagattcgtgtagaggacga

SEQ ID NO: 86611 - DNA, 25 bp, Homo sapien
ccggagtagtcgttgtcggacggga

SEQ ID NO: 86612 - DNA, 25 bp, Homo sapien
ccggagtagtcgatgtcggacggga

SEQ ID NO: 86613 - DNA, 25 bp, Homo sapien
cgacgttatctgattatgactcgaa

SEQ ID NO: 86614 - DNA, 25 bp, Homo sapien
cgacgttatctgtttatgactcgaa

SEQ ID NO: 86615 - DNA, 25 bp, Homo sapien
ggcatactcgtcacggaaacctaca

SEQ ID NO: 86616 - DNA, 25 bp, Homo sapien
ggcatactcgtctcggaaacctaca

SEQ ID NO: 86617 - DNA, 25 bp, Homo sapien
tcataagtgttaagaagacacctat

SEQ ID NO: 86618 - DNA, 25 bp, Homo sapien
tcataagtgttatgaagacacctat

SEQ ID NO: 86619 - DNA, 25 bp, Homo sapien
actatttaagtatgttaaaccttct

SEQ ID NO: 86620 - DNA, 25 bp, Homo sapien
actatttaagtaagttaaaccttct

SEQ ID NO: 86621 - DNA, 25 bp, Homo sapien
attggtaaggtatcgcacacacctt

SEQ ID NO: 86622 - DNA, 25 bp, Homo sapien
attggtaaggtaacgcacacacctt

SEQ ID NO: 86623 - DNA, 25 bp, Homo sapien
cgtagaagtggtcgtcgacctcgta

SEQ ID NO: 86624 - DNA, 25 bp, Homo sapien
cgtagaagtggtggtcgacctcgta

SEQ ID NO: 86625 - DNA, 25 bp, Homo sapien
ctgtggaggtaggagagtcaccctc

SEQ ID NO: 86626 - DNA, 25 bp, Homo sapien
ctgtggaggtagcagagtcaccctc

SEQ ID NO: 86627 - DNA, 25 bp, Homo sapien
tgaggtgacgagatacactaagtac

SEQ ID NO: 86628 - DNA, 25 bp, Homo sapien
tgaggtgacgagttacactaagtac

SEQ ID NO: 86629 - DNA, 25 bp, Homo sapien
cacttcgtccgcatctgtcgaagcg

SEQ ID NO: 86630 - DNA, 25 bp, Homo sapien
cacttcgtccgcttctgtcgaagcg

SEQ ID NO: 86631 - DNA, 25 bp, Homo sapien
tcgtgttccgagttgtcgtccactc

SEQ ID NO: 86632 - DNA, 25 bp, Homo sapien
tcgtgttccgagatgtcgtccactc

SEQ ID NO: 86633 - DNA, 25 bp, Homo sapien
tccacgtcgtcagtcgtcgtttcac

SEQ ID NO: 86634 - DNA, 25 bp, Homo sapien
tccacgtcgtcactcgtcgtttcac

SEQ ID NO: 86635 - DNA, 25 bp, Homo sapien
agctactccgtccattacggaaacc

SEQ ID NO: 86636 - DNA, 25 bp, Homo sapien
agctactccgtcgattacggaaacc

SEQ ID NO: 86637 - DNA, 25 bp, Homo sapien
tacgcattcaggatagtggatctca

SEQ ID NO: 86638 - DNA, 25 bp, Homo sapien
tacgcattcaggttagtggatctca

SEQ ID NO: 86639 - DNA, 25 bp, Homo sapien
ccctgtgtaggtggtcggaccttag

SEQ ID NO: 86640 - DNA, 25 bp, Homo sapien
ccctgtgtaggtcgtcggaccttag

SEQ ID NO: 86641 - DNA, 25 bp, Homo sapien
ttcgtcgttatagttgtcctcctta

SEQ ID NO: 86642 - DNA, 25 bp, Homo sapien
ttcgtcgttatacttgtcctcctta

SEQ ID NO: 86643 - DNA, 25 bp, Homo sapien
ctgactcttccgagtgcttcccgta

SEQ ID NO: 86644 - DNA, 25 bp, Homo sapien
ctgactcttccgtgtgcttcccgta

SEQ ID NO: 86645 - DNA, 25 bp, Homo sapien
attttcgtgtgctttgtttccacag

SEQ ID NO: 86646 - DNA, 25 bp, Homo sapien
attttcgtgtgcattgtttccacag

SEQ ID NO: 86647 - DNA, 25 bp, Homo sapien
tcttccgtgacattgttgtccactt

SEQ ID NO: 86648 - DNA, 25 bp, Homo sapien
tcttccgtgacaatgttgtccactt

SEQ ID NO: 86649 - DNA, 25 bp, Homo sapien
ttgaacgttaatttgtgactcgttc

SEQ ID NO: 86650 - DNA, 25 bp, Homo sapien
ttgaacgttaatatgtgactcgttc

SEQ ID NO: 86651 - DNA, 25 bp, Homo sapien
aggaggtcagtctctagtaccgttc

SEQ ID NO: 86652 - DNA, 25 bp, Homo sapien
aggaggtcagtcactagtaccgttc

SEQ ID NO: 86653 - DNA, 25 bp, Homo sapien
ttatgtcttactacttggtccttag

SEQ ID NO: 86654 - DNA, 25 bp, Homo sapien
ttatgtcttacttcttggtccttag

SEQ ID NO: 86655 - DNA, 25 bp, Homo sapien
acgcactcttctcctgtcgttttcg

SEQ ID NO: 86656 - DNA, 25 bp, Homo sapien
acgcactcttctgctgtcgttttcg

SEQ ID NO: 86657 - DNA, 25 bp, Homo sapien
gaaccgtacacgtttgttcttcccc

SEQ ID NO: 86658 - DNA, 25 bp, Homo sapien
gaaccgtacacgattgttcttcccc

SEQ ID NO: 86659 - DNA, 25 bp, Homo sapien
gtaccatcttcgttccgtatgtccg

SEQ ID NO: 86660 - DNA, 25 bp, Homo sapien
gtaccatcttcgatccgtatgtccg

SEQ ID NO: 86661 - DNA, 25 bp, Homo sapien
ttactgatctcttatagacgtttgg

SEQ ID NO: 86662 - DNA, 25 bp, Homo sapien
ttactgatctctaatagacgtttgg

SEQ ID NO: 86663 - DNA, 25 bp, Homo sapien
ttgttgaagaggttatatatttccc

SEQ ID NO: 86664 - DNA, 25 bp, Homo sapien
ttgttgaagaggatatatatttccc

SEQ ID NO: 86665 - DNA, 25 bp, Homo sapien
ctcaaaagaggtcatacttaataga

SEQ ID NO: 86666 - DNA, 25 bp, Homo sapien
ctcaaaagaggtgatacttaataga

SEQ ID NO: 86667 - DNA, 25 bp, Homo sapien
ccaaggtaaggttgttacctaatga

SEQ ID NO: 86668 - DNA, 25 bp, Homo sapien
ccaaggtaaggtagttacctaatga

SEQ ID NO: 86669 - DNA, 25 bp, Homo sapien
atcccgggccgtggaccctggtaca

SEQ ID NO: 86670 - DNA, 25 bp, Homo sapien
atcccgggccgtcgaccctggtaca

SEQ ID NO: 86671 - DNA, 25 bp, Homo sapien
cccagggtactccatctctggtaac

SEQ ID NO: 86672 - DNA, 25 bp, Homo sapien
cccagggtactcgatctctggtaac

SEQ ID NO: 86673 - DNA, 25 bp, Homo sapien
agttccgagtgttcccttggagttc

SEQ ID NO: 86674 - DNA, 25 bp, Homo sapien
agttccgagtgtacccttggagttc

SEQ ID NO: 86675 - DNA, 25 bp, Homo sapien
gttctaagggccttcgtggtcgtcg

SEQ ID NO: 86676 - DNA, 25 bp, Homo sapien
gttctaagggccatcgtggtcgtcg

SEQ ID NO: 86677 - DNA, 25 bp, Homo sapien
aaactctaaatcctcgtttggacag

SEQ ID NO: 86678 - DNA, 25 bp, Homo sapien
aaactctaaatcgtcgtttggacag

SEQ ID NO: 86679 - DNA, 25 bp, Homo sapien
ttcgatacatttctagtaacgacag

SEQ ID NO: 86680 - DNA, 25 bp, Homo sapien
ttcgatacatttgtagtaacgacag

SEQ ID NO: 86681 - DNA, 25 bp, Homo sapien
cctcttacacccttggggtctcaag

SEQ ID NO: 86682 - DNA, 25 bp, Homo sapien
cctcttacacccatggggtctcaag

SEQ ID NO: 86683 - DNA, 25 bp, Homo sapien
tatacagactgaagaaaactccagt

SEQ ID NO: 86684 - DNA, 25 bp, Homo sapien
tatacagactgatgaaaactccagt

SEQ ID NO: 86685 - DNA, 25 bp, Homo sapien
ttaagtaaatgtcctccaataagtg

SEQ ID NO: 86686 - DNA, 25 bp, Homo sapien
ttaagtaaatgtgctccaataagtg

SEQ ID NO: 86687 - DNA, 25 bp, Homo sapien
taaaccttccgtgacccaaaacgcg

SEQ ID NO: 86688 - DNA, 25 bp, Homo sapien
taaaccttccgtcacccaaaacgcg

SEQ ID NO: 86689 - DNA, 25 bp, Homo sapien
gaaccgtcttccacctgttaggaga

SEQ ID NO: 86690 - DNA, 25 bp, Homo sapien
gaaccgtcttcctcctgttaggaga

SEQ ID NO: 86691 - DNA, 25 bp, Homo sapien
ggtcactcttaattgactttcagaa

SEQ ID NO: 86692 - DNA, 25 bp, Homo sapien
ggtcactcttaaatgactttcagaa

SEQ ID NO: 86693 - DNA, 25 bp, Homo sapien
gtggaaatatctactcgtcacatcc

SEQ ID NO: 86694 - DNA, 25 bp, Homo sapien
gtggaaatatcttctcgtcacatcc

SEQ ID NO: 86695 - DNA, 25 bp, Homo sapien
tagaggaacgaggtttcttccaccc

SEQ ID NO: 86696 - DNA, 25 bp, Homo sapien
tagaggaacgagctttcttccaccc

SEQ ID NO: 86697 - DNA, 25 bp, Homo sapien
ccgtctagtgtttctaccgctcgcg

SEQ ID NO: 86698 - DNA, 25 bp, Homo sapien
ccgtctagtgttactaccgctcgcg

SEQ ID NO: 86699 - DNA, 25 bp, Homo sapien
tacgtctcgtctgtctacgtcccgg

SEQ ID NO: 86700 - DNA, 25 bp, Homo sapien
tacgtctcgtctctctacgtcccgg

SEQ ID NO: 86701 - DNA, 25 bp, Homo sapien
agacactctctccggacgaccgctt

SEQ ID NO: 86702 - DNA, 25 bp, Homo sapien
agacactctctcgggacgaccgctt

SEQ ID NO: 86703 - DNA, 25 bp, Homo sapien
tcaccacggctcagggaggtctcgt

SEQ ID NO: 86704 - DNA, 25 bp, Homo sapien
tcaccacggctctgggaggtctcgt

SEQ ID NO: 86705 - DNA, 25 bp, Homo sapien
tctaggtacttcttcgtgaagatgg

SEQ ID NO: 86706 - DNA, 25 bp, Homo sapien
tctaggtacttcatcgtgaagatgg

SEQ ID NO: 86707 - DNA, 25 bp, Homo sapien
atttaagacttagaacgacacaagg

SEQ ID NO: 86708 - DNA, 25 bp, Homo sapien
atttaagacttacaacgacacaagg

SEQ ID NO: 86709 - DNA, 25 bp, Homo sapien
cgtttgtagtttcaacgaccagtga

SEQ ID NO: 86710 - DNA, 25 bp, Homo sapien
cgtttgtagtttgaacgaccagtga

SEQ ID NO: 86711 - DNA, 25 bp, Homo sapien
tcggttgttctatgcttacttaaat

SEQ ID NO: 86712 - DNA, 25 bp, Homo sapien
tcggttgttctaagcttacttaaat

SEQ ID NO: 86713 - DNA, 25 bp, Homo sapien
cgcgacgtcgttaagggggattcct

SEQ ID NO: 86714 - DNA, 25 bp, Homo sapien
cgcgacgtcgtttagggggattcct

SEQ ID NO: 86715 - DNA, 25 bp, Homo sapien
cccgtgcaagaggatgtacgtttgt

SEQ ID NO: 86716 - DNA, 25 bp, Homo sapien
cccgtgcaagagcatgtacgtttgt

SEQ ID NO: 86717 - DNA, 25 bp, Homo sapien
ccggccaacgataatcgtatctact

SEQ ID NO: 86718 - DNA, 25 bp, Homo sapien
ccggccaacgattatcgtatctact

SEQ ID NO: 86719 - DNA, 25 bp, Homo sapien
accaaaaagagatgactcgttatat

SEQ ID NO: 86720 - DNA, 25 bp, Homo sapien
accaaaaagagaagactcgttatat

SEQ ID NO: 86721 - DNA, 25 bp, Homo sapien
atacgatttaggacacgaaccgtga

SEQ ID NO: 86722 - DNA, 25 bp, Homo sapien
atacgatttaggtcacgaaccgtga

SEQ ID NO: 86723 - DNA, 25 bp, Homo sapien
atgtcgttactctccgaaaggaagt

SEQ ID NO: 86724 - DNA, 25 bp, Homo sapien
atgtcgttactcaccgaaaggaagt

SEQ ID NO: 86725 - DNA, 25 bp, Homo sapien
gtgacttctcgaaccgcacagggtg

SEQ ID NO: 86726 - DNA, 25 bp, Homo sapien
gtgacttctcgatccgcacagggtg

SEQ ID NO: 86727 - DNA, 25 bp, Homo sapien
cttgacacttaaacccaggacgtta

SEQ ID NO: 86728 - DNA, 25 bp, Homo sapien
cttgacacttaatcccaggacgtta

SEQ ID NO: 86729 - DNA, 25 bp, Homo sapien
cctttgtcttaagcttaaggtccag

SEQ ID NO: 86730 - DNA, 25 bp, Homo sapien
cctttgtcttaaccttaaggtccag

SEQ ID NO: 86731 - DNA, 25 bp, Homo sapien
aatctgtcggggttcctgcactccc

SEQ ID NO: 86732 - DNA, 25 bp, Homo sapien
aatctgtcggggatcctgcactccc

SEQ ID NO: 86733 - DNA, 25 bp, Homo sapien
ctcacaaggtattccgtgacttcct

SEQ ID NO: 86734 - DNA, 25 bp, Homo sapien
ctcacaaggtataccgtgacttcct

SEQ ID NO: 86735 - DNA, 25 bp, Homo sapien
gaatggaaaagttttctcctcttat

SEQ ID NO: 86736 - DNA, 25 bp, Homo sapien
gaatggaaaagtattctcctcttat

SEQ ID NO: 86737 - DNA, 25 bp, Homo sapien
gtgacgatatacgagtttcaacatc

SEQ ID NO: 86738 - DNA, 25 bp, Homo sapien
gtgacgatataccagtttcaacatc

SEQ ID NO: 86739 - DNA, 25 bp, Homo sapien
atggagtttaccaggttaagctatc

SEQ ID NO: 86740 - DNA, 25 bp, Homo sapien
atggagtttacctggttaagctatc

SEQ ID NO: 86741 - DNA, 25 bp, Homo sapien
tcagagtatgatctttaaggtacct

SEQ ID NO: 86742 - DNA, 25 bp, Homo sapien
tcagagtatgatgtttaaggtacct

SEQ ID NO: 86743 - DNA, 25 bp, Homo sapien
tttacatcgttgacggtcaaacatc

SEQ ID NO: 86744 - DNA, 25 bp, Homo sapien
tttacatcgttgtcggtcaaacatc

SEQ ID NO: 86745 - DNA, 25 bp, Homo sapien
tcatagaggttttggaaccatagtc

SEQ ID NO: 86746 - DNA, 25 bp, Homo sapien
tcatagaggtttaggaaccatagtc

SEQ ID NO: 86747 - DNA, 25 bp, Homo sapien
gtagtagacgatcgaaacaccatgg

SEQ ID NO: 86748 - DNA, 25 bp, Homo sapien
gtagtagacgatggaaacaccatgg

SEQ ID NO: 86749 - DNA, 25 bp, Homo sapien
cgctacgacgggagacaccggttct

SEQ ID NO: 86750 - DNA, 25 bp, Homo sapien
cgctacgacgggtgacaccggttct

SEQ ID NO: 86751 - DNA, 25 bp, Homo sapien
gcgaccacgtcagtcgccaggtcag

SEQ ID NO: 86752 - DNA, 25 bp, Homo sapien
gcgaccacgtcactcgccaggtcag

SEQ ID NO: 86753 - DNA, 25 bp, Homo sapien
ttcggtccttacgaccccacggtgg

SEQ ID NO: 86754 - DNA, 25 bp, Homo sapien
ttcggtccttaccaccccacggtgg

SEQ ID NO: 86755 - DNA, 25 bp, Homo sapien
tcgtcggtcccaccatccggaaggg

SEQ ID NO: 86756 - DNA, 25 bp, Homo sapien
tcgtcggtcccagcatccggaaggg

SEQ ID NO: 86757 - DNA, 25 bp, Homo sapien
gtacggcctcggcaacagctgctgc

SEQ ID NO: 86758 - DNA, 25 bp, Homo sapien
gtacggcctcgggaacagctgctgc

SEQ ID NO: 86759 - DNA, 25 bp, Homo sapien
aggtttctcctttgagtctgtctcc

SEQ ID NO: 86760 - DNA, 25 bp, Homo sapien
aggtttctccttagagtctgtctcc

SEQ ID NO: 86761 - DNA, 25 bp, Homo sapien
cttgtcctgtgtgtcgtcctacgcc

SEQ ID NO: 86762 - DNA, 25 bp, Homo sapien
cttgtcctgtgtctcgtcctacgcc

SEQ ID NO: 86763 - DNA, 25 bp, Homo sapien
gacagtctatcatcgttcccgatct

SEQ ID NO: 86764 - DNA, 25 bp, Homo sapien
gacagtctatcaacgttcccgatct

SEQ ID NO: 86765 - DNA, 25 bp, Homo sapien
aagtgttcacggacggtctctgata

SEQ ID NO: 86766 - DNA, 25 bp, Homo sapien
aagtgttcacggtcggtctctgata

SEQ ID NO: 86767 - DNA, 25 bp, Homo sapien
aagtgtaccgaggtccgtgttttta

SEQ ID NO: 86768 - DNA, 25 bp, Homo sapien
aagtgtaccgagctccgtgttttta

SEQ ID NO: 86769 - DNA, 25 bp, Homo sapien
aaactgttacggttcctagtttttg

SEQ ID NO: 86770 - DNA, 25 bp, Homo sapien
aaactgttacggatcctagtttttg

SEQ ID NO: 86771 - DNA, 25 bp, Homo sapien
ctttatgatacgtccttttagttag

SEQ ID NO: 86772 - DNA, 25 bp, Homo sapien
ctttatgatacgaccttttagttag

SEQ ID NO: 86773 - DNA, 25 bp, Homo sapien
ccgtgctggaaacaggtcctatcgg

SEQ ID NO: 86774 - DNA, 25 bp, Homo sapien
ccgtgctggaaagaggtcctatcgg

SEQ ID NO: 86775 - DNA, 25 bp, Homo sapien
ctggacccggaagaccgtccatctg

SEQ ID NO: 86776 - DNA, 25 bp, Homo sapien
ctggacccggaacaccgtccatctg

SEQ ID NO: 86777 - DNA, 25 bp, Homo sapien
ggagacccagaagtggtcgctccta

SEQ ID NO: 86778 - DNA, 25 bp, Homo sapien
ggagacccagaactggtcgctccta

SEQ ID NO: 86779 - DNA, 25 bp, Homo sapien
gacgataccagaaatatttcctgaa

SEQ ID NO: 86780 - DNA, 25 bp, Homo sapien
gacgataccagatatatttcctgaa

SEQ ID NO: 86781 - DNA, 25 bp, Homo sapien
tgtcctgatatgttcatacatgata

SEQ ID NO: 86782 - DNA, 25 bp, Homo sapien
tgtcctgatatgatcatacatgata

SEQ ID NO: 86783 - DNA, 25 bp, Homo sapien
agggagatttttactaaccgtctgt

SEQ ID NO: 86784 - DNA, 25 bp, Homo sapien
agggagattttttctaaccgtctgt

SEQ ID NO: 86785 - DNA, 25 bp, Homo sapien
gtcggggttatcaccgtgtattcac

SEQ ID NO: 86786 - DNA, 25 bp, Homo sapien
gtcggggttatctccgtgtattcac

SEQ ID NO: 86787 - DNA, 25 bp, Homo sapien
atttgcagaatcgtcctacacctgg

SEQ ID NO: 86788 - DNA, 25 bp, Homo sapien
atttgcagaatcctcctacacctgg

SEQ ID NO: 86789 - DNA, 25 bp, Homo sapien
agagatagatactcctatcactgtg

SEQ ID NO: 86790 - DNA, 25 bp, Homo sapien
agagatagatacacctatcactgtg

SEQ ID NO: 86791 - DNA, 25 bp, Homo sapien
gactatcactagtcctacccagtgt

SEQ ID NO: 86792 - DNA, 25 bp, Homo sapien
gactatcactagacctacccagtgt

SEQ ID NO: 86793 - DNA, 25 bp, Homo sapien
agacataccgtcgacaccccagtat

SEQ ID NO: 86794 - DNA, 25 bp, Homo sapien
agacataccgtccacaccccagtat

SEQ ID NO: 86795 - DNA, 25 bp, Homo sapien
tcctttcgttaagacaccgagacgt

SEQ ID NO: 86796 - DNA, 25 bp, Homo sapien
tcctttcgttaacacaccgagacgt

SEQ ID NO: 86797 - DNA, 25 bp, Homo sapien
tttctctcttcgtgtctccctggtc

SEQ ID NO: 86798 - DNA, 25 bp, Homo sapien
tttctctcttcgagtctccctggtc

SEQ ID NO: 86799 - DNA, 25 bp, Homo sapien
cccgtggcgcagtagacacggtcga

SEQ ID NO: 86800 - DNA, 25 bp, Homo sapien
cccgtggcgcagaagacacggtcga

SEQ ID NO: 86801 - DNA, 25 bp, Homo sapien
gccagtgtctgaactacaaaaactt

SEQ ID NO: 86802 - DNA, 25 bp, Homo sapien
gccagtgtctgatctacaaaaactt

SEQ ID NO: 86803 - DNA, 25 bp, Homo sapien
gtacctggaccgtcttatacaattg

SEQ ID NO: 86804 - DNA, 25 bp, Homo sapien
gtacctggaccgacttatacaattg

SEQ ID NO: 86805 - DNA, 25 bp, Homo sapien
ctaccgtggcaccaccaaaagttac

SEQ ID NO: 86806 - DNA, 25 bp, Homo sapien
ctaccgtggcacgaccaaaagttac

SEQ ID NO: 86807 - DNA, 25 bp, Homo sapien
atctcggccgtcaggtcttcaatta

SEQ ID NO: 86808 - DNA, 25 bp, Homo sapien
atctcggccgtctggtcttcaatta

SEQ ID NO: 86809 - DNA, 25 bp, Homo sapien
ctacggtatctctttcgttccattg

SEQ ID NO: 86810 - DNA, 25 bp, Homo sapien
ctacggtatctcattcgttccattg

SEQ ID NO: 86811 - DNA, 25 bp, Homo sapien
cagtgtactaaatctttctcggtta

SEQ ID NO: 86812 - DNA, 25 bp, Homo sapien
cagtgtactaaaactttctcggtta

SEQ ID NO: 86813 - DNA, 25 bp, Homo sapien
cgacacgatggtatgtgttctttaa

SEQ ID NO: 86814 - DNA, 25 bp, Homo sapien
cgacacgatggtttgtgttctttaa

SEQ ID NO: 86815 - DNA, 25 bp, Homo sapien
tcctctgtctttggtggtcccgccg

SEQ ID NO: 86816 - DNA, 25 bp, Homo sapien
tcctctgtctttcgtggtcccgccg

SEQ ID NO: 86817 - DNA, 25 bp, Homo sapien
cgaagtcaacgtgtgagtccccgtg

SEQ ID NO: 86818 - DNA, 25 bp, Homo sapien
cgaagtcaacgtctgagtccccgtg

SEQ ID NO: 86819 - DNA, 25 bp, Homo sapien
tcctcctgacttcttttcatgtcgt

SEQ ID NO: 86820 - DNA, 25 bp, Homo sapien
tcctcctgacttgttttcatgtcgt

SEQ ID NO: 86821 - DNA, 25 bp, Homo sapien
accaccttcctggtttcgtcttcag

SEQ ID NO: 86822 - DNA, 25 bp, Homo sapien
accaccttcctgctttcgtcttcag

SEQ ID NO: 86823 - DNA, 25 bp, Homo sapien
ccctctcttgggttgtgtactccag

SEQ ID NO: 86824 - DNA, 25 bp, Homo sapien
ccctctcttgggatgtgtactccag

SEQ ID NO: 86825 - DNA, 25 bp, Homo sapien
ggcacagacaagtgactggtttcag

SEQ ID NO: 86826 - DNA, 25 bp, Homo sapien
ggcacagacaagagactggtttcag

SEQ ID NO: 86827 - DNA, 25 bp, Homo sapien
tctatgcacacagacagtattttgt

SEQ ID NO: 86828 - DNA, 25 bp, Homo sapien
tctatgcacacacacagtattttgt

SEQ ID NO: 86829 - DNA, 25 bp, Homo sapien
cattagcggacaaagttcttttgag

SEQ ID NO: 86830 - DNA, 25 bp, Homo sapien
cattagcggacatagttcttttgag

SEQ ID NO: 86831 - DNA, 25 bp, Homo sapien
taggtcgggttggtctacttcatgt

SEQ ID NO: 86832 - DNA, 25 bp, Homo sapien
taggtcgggttgctctacttcatgt

SEQ ID NO: 86833 - DNA, 25 bp, Homo sapien
ttgtaaggtctcttctagtgttcct

SEQ ID NO: 86834 - DNA, 25 bp, Homo sapien
ttgtaaggtctcatctagtgttcct

SEQ ID NO: 86835 - DNA, 25 bp, Homo sapien
agccagagtcgctgttggtgcacgt

SEQ ID NO: 86836 - DNA, 25 bp, Homo sapien
agccagagtcgcagttggtgcacgt

SEQ ID NO: 86837 - DNA, 25 bp, Homo sapien
agcatcaggccctttgtctacgact

SEQ ID NO: 86838 - DNA, 25 bp, Homo sapien
agcatcaggcccattgtctacgact

SEQ ID NO: 86839 - DNA, 25 bp, Homo sapien
gagtatctaccctgtctgcttttac

SEQ ID NO: 86840 - DNA, 25 bp, Homo sapien
gagtatctacccagtctgcttttac

SEQ ID NO: 86841 - DNA, 25 bp, Homo sapien
gggtattttgtaactacccttttac

SEQ ID NO: 86842 - DNA, 25 bp, Homo sapien
gggtattttgtatctacccttttac

SEQ ID NO: 86843 - DNA, 25 bp, Homo sapien
atggaggtttttaccgtttctctct

SEQ ID NO: 86844 - DNA, 25 bp, Homo sapien
atggaggttttttccgtttctctct

SEQ ID NO: 86845 - DNA, 25 bp, Homo sapien
gatgttgtcttcgaccctgtctcct

SEQ ID NO: 86846 - DNA, 25 bp, Homo sapien
gatgttgtcttccaccctgtctcct

SEQ ID NO: 86847 - DNA, 25 bp, Homo sapien
tgtaaggtcgggtctcttaccgtcg

SEQ ID NO: 86848 - DNA, 25 bp, Homo sapien
tgtaaggtcgggactcttaccgtcg

SEQ ID NO: 86849 - DNA, 25 bp, Homo sapien
cgtgaatcgaggaccggtaccgtcg

SEQ ID NO: 86850 - DNA, 25 bp, Homo sapien
cgtgaatcgaggtccggtaccgtcg

SEQ ID NO: 86851 - DNA, 25 bp, Homo sapien
gtgtgaagggcgacgacgatacacc

SEQ ID NO: 86852 - DNA, 25 bp, Homo sapien
gtgtgaagggcgtcgacgatacacc

SEQ ID NO: 86853 - DNA, 25 bp, Homo sapien
aggggtagaacgtgaaaacgatccc

SEQ ID NO: 86854 - DNA, 25 bp, Homo sapien
aggggtagaacgagaaaacgatccc

SEQ ID NO: 86855 - DNA, 25 bp, Homo sapien
tcgatgacaacctaagccgcttagc

SEQ ID NO: 86856 - DNA, 25 bp, Homo sapien
tcgatgacaaccaaagccgcttagc

SEQ ID NO: 86857 - DNA, 25 bp, Homo sapien
tgagtgaacctcaataccttgttca

SEQ ID NO: 86858 - DNA, 25 bp, Homo sapien
tgagtgaacctctataccttgttca

SEQ ID NO: 86859 - DNA, 25 bp, Homo sapien
gagaggaggtcgaaattagaccctt

SEQ ID NO: 86860 - DNA, 25 bp, Homo sapien
gagaggaggtcgtaattagaccctt

SEQ ID NO: 86861 - DNA, 25 bp, Homo sapien
ggaagagttctctcctatcgacaag

SEQ ID NO: 86862 - DNA, 25 bp, Homo sapien
ggaagagttctcacctatcgacaag

SEQ ID NO: 86863 - DNA, 25 bp, Homo sapien
cagtaggttgttacgtcgtgtcaaa

SEQ ID NO: 86864 - DNA, 25 bp, Homo sapien
cagtaggttgtttcgtcgtgtcaaa

SEQ ID NO: 86865 - DNA, 25 bp, Homo sapien
tggtcattccgtgacttacgtttat

SEQ ID NO: 86866 - DNA, 25 bp, Homo sapien
tggtcattccgtcacttacgtttat

SEQ ID NO: 86867 - DNA, 25 bp, Homo sapien
tgaccgactgtggagtttctgtatc

SEQ ID NO: 86868 - DNA, 25 bp, Homo sapien
tgaccgactgtgcagtttctgtatc

SEQ ID NO: 86869 - DNA, 25 bp, Homo sapien
ggtgtcaaataattcttactgttct

SEQ ID NO: 86870 - DNA, 25 bp, Homo sapien
ggtgtcaaataaatcttactgttct

SEQ ID NO: 86871 - DNA, 25 bp, Homo sapien
aatcgggttttaatttaccggtgtc

SEQ ID NO: 86872 - DNA, 25 bp, Homo sapien
aatcgggttttattttaccggtgtc

SEQ ID NO: 86873 - DNA, 25 bp, Homo sapien
gtcgtccttatttacttcggccgtc

SEQ ID NO: 86874 - DNA, 25 bp, Homo sapien
gtcgtccttattaacttcggccgtc

SEQ ID NO: 86875 - DNA, 25 bp, Homo sapien
ggccttctattcactaaggactatc

SEQ ID NO: 86876 - DNA, 25 bp, Homo sapien
ggccttctattctctaaggactatc

SEQ ID NO: 86877 - DNA, 25 bp, Homo sapien
gtcataccagccaacgcgactagta

SEQ ID NO: 86878 - DNA, 25 bp, Homo sapien
gtcataccagcctacgcgactagta

SEQ ID NO: 86879 - DNA, 25 bp, Homo sapien
cgaactgaccgtctgtgactccgga

SEQ ID NO: 86880 - DNA, 25 bp, Homo sapien
cgaactgaccgtgtgtgactccgga

SEQ ID NO: 86881 - DNA, 25 bp, Homo sapien
gggggtttctcttcgtgccaccgaa

SEQ ID NO: 86882 - DNA, 25 bp, Homo sapien
gggggtttctctacgtgccaccgaa

SEQ ID NO: 86883 - DNA, 25 bp, Homo sapien
cgagggttgttcactgtccaatcac

SEQ ID NO: 86884 - DNA, 25 bp, Homo sapien
cgagggttgttctctgtccaatcac

SEQ ID NO: 86885 - DNA, 25 bp, Homo sapien
ggggtttccgactaaacggacgtaa

SEQ ID NO: 86886 - DNA, 25 bp, Homo sapien
ggggtttccgacaaaacggacgtaa

SEQ ID NO: 86887 - DNA, 25 bp, Homo sapien
tgtgtgccggtggaagtgcaacaac

SEQ ID NO: 86888 - DNA, 25 bp, Homo sapien
tgtgtgccggtgcaagtgcaacaac

SEQ ID NO: 86889 - DNA, 25 bp, Homo sapien
ccgacgacgaccatagtctaagagg

SEQ ID NO: 86890 - DNA, 25 bp, Homo sapien
ccgacgacgaccttagtctaagagg

SEQ ID NO: 86891 - DNA, 25 bp, Homo sapien
gaaactctagacttctttagtaaag

SEQ ID NO: 86892 - DNA, 25 bp, Homo sapien
gaaactctagacatctttagtaaag

SEQ ID NO: 86893 - DNA, 25 bp, Homo sapien
gtaacaattacatgttctcgtaaag

SEQ ID NO: 86894 - DNA, 25 bp, Homo sapien
gtaacaattacaagttctcgtaaag

SEQ ID NO: 86895 - DNA, 25 bp, Homo sapien
ggtcagtcagaatagtcttttatca

SEQ ID NO: 86896 - DNA, 25 bp, Homo sapien
ggtcagtcagaaaagtcttttatca

SEQ ID NO: 86897 - DNA, 25 bp, Homo sapien
ggtgttaccctcagttacttttaaa

SEQ ID NO: 86898 - DNA, 25 bp, Homo sapien
ggtgttaccctctgttacttttaaa

SEQ ID NO: 86899 - DNA, 25 bp, Homo sapien
gtgttgtgatcttgtttccttacaa

SEQ ID NO: 86900 - DNA, 25 bp, Homo sapien
gtgttgtgatctagtttccttacaa

SEQ ID NO: 86901 - DNA, 25 bp, Homo sapien
aacctttttgcttcggtcggacctg

SEQ ID NO: 86902 - DNA, 25 bp, Homo sapien
aacctttttgctacggtcggacctg

SEQ ID NO: 86903 - DNA, 25 bp, Homo sapien
gtgccctttcggagggtcgctccgc

SEQ ID NO: 86904 - DNA, 25 bp, Homo sapien
gtgccctttcggtgggtcgctccgc

SEQ ID NO: 86905 - DNA, 25 bp, Homo sapien
gtcttgtgtcggtcaatgcgttgtc

SEQ ID NO: 86906 - DNA, 25 bp, Homo sapien
gtcttgtgtcggacaatgcgttgtc

SEQ ID NO: 86907 - DNA, 25 bp, Homo sapien
acgttgagtcctgtcactcgggttc

SEQ ID NO: 86908 - DNA, 25 bp, Homo sapien
acgttgagtcctctcactcgggttc

SEQ ID NO: 86909 - DNA, 25 bp, Homo sapien
aactatggccgtacacaccgaatta

SEQ ID NO: 86910 - DNA, 25 bp, Homo sapien
aactatggccgttcacaccgaatta

SEQ ID NO: 86911 - DNA, 25 bp, Homo sapien
gaagaggcgtatcaggcgtagcttc

SEQ ID NO: 86912 - DNA, 25 bp, Homo sapien
gaagaggcgtatgaggcgtagcttc

SEQ ID NO: 86913 - DNA, 25 bp, Homo sapien
aacgaagacgggatgtaaccttttt

SEQ ID NO: 86914 - DNA, 25 bp, Homo sapien
aacgaagacgggttgtaaccttttt

SEQ ID NO: 86915 - DNA, 25 bp, Homo sapien
gttggaccggggaacatactttttg

SEQ ID NO: 86916 - DNA, 25 bp, Homo sapien
gttggaccggggtacatactttttg

SEQ ID NO: 86917 - DNA, 25 bp, Homo sapien
tcatccccgttcgtaaacgtttttg

SEQ ID NO: 86918 - DNA, 25 bp, Homo sapien
tcatccccgttcctaaacgtttttg

SEQ ID NO: 86919 - DNA, 25 bp, Homo sapien
tgaccagtaaataatcgtcaccatg

SEQ ID NO: 86920 - DNA, 25 bp, Homo sapien
tgaccagtaaattatcgtcaccatg

SEQ ID NO: 86921 - DNA, 25 bp, Homo sapien
tggatgaagaaagtagtccgtcagc

SEQ ID NO: 86922 - DNA, 25 bp, Homo sapien
tggatgaagaaactagtccgtcagc

SEQ ID NO: 86923 - DNA, 25 bp, Homo sapien
agagtacattaacgatgttcactta

SEQ ID NO: 86924 - DNA, 25 bp, Homo sapien
agagtacattaaggatgttcactta

SEQ ID NO: 86925 - DNA, 25 bp, Homo sapien
acgtttccgtcgaccgttaccagac

SEQ ID NO: 86926 - DNA, 25 bp, Homo sapien
acgtttccgtcgtccgttaccagac

SEQ ID NO: 86927 - DNA, 25 bp, Homo sapien
aagattccacctctttagtccgact

SEQ ID NO: 86928 - DNA, 25 bp, Homo sapien
aagattccacctgtttagtccgact

SEQ ID NO: 86929 - DNA, 25 bp, Homo sapien
gagattccgtcactaacgattagaa

SEQ ID NO: 86930 - DNA, 25 bp, Homo sapien
gagattccgtcagtaacgattagaa

SEQ ID NO: 86931 - DNA, 25 bp, Homo sapien
tagaaccctgaggtatcgaccataa

SEQ ID NO: 86932 - DNA, 25 bp, Homo sapien
tagaaccctgagctatcgaccataa

SEQ ID NO: 86933 - DNA, 25 bp, Homo sapien
tagaggtccaagagacgtcaaagag

SEQ ID NO: 86934 - DNA, 25 bp, Homo sapien
tagaggtccaagtgacgtcaaagag

SEQ ID NO: 86935 - DNA, 25 bp, Homo sapien
gactgctaagtgtcgactaaattac

SEQ ID NO: 86936 - DNA, 25 bp, Homo sapien
gactgctaagtgacgactaaattac

SEQ ID NO: 86937 - DNA, 25 bp, Homo sapien
ttggtatcgtgattacaaaattcca

SEQ ID NO: 86938 - DNA, 25 bp, Homo sapien
ttggtatcgtgaatacaaaattcca

SEQ ID NO: 86939 - DNA, 25 bp, Homo sapien
tttcgattcgtagaaaacaattcga

SEQ ID NO: 86940 - DNA, 25 bp, Homo sapien
tttcgattcgtacaaaacaattcga

SEQ ID NO: 86941 - DNA, 25 bp, Homo sapien
ggatcgtgtacaaaccaaatctaac

SEQ ID NO: 86942 - DNA, 25 bp, Homo sapien
ggatcgtgtacataccaaatctaac

SEQ ID NO: 86943 - DNA, 25 bp, Homo sapien
gcaggtaggtgacacacatatatag

SEQ ID NO: 86944 - DNA, 25 bp, Homo sapien
gcaggtaggtgagacacatatatag

SEQ ID NO: 86945 - DNA, 25 bp, Homo sapien
gaactagttgaggtcgaccagtagg

SEQ ID NO: 86946 - DNA, 25 bp, Homo sapien
gaactagttgagctcgaccagtagg

SEQ ID NO: 86947 - DNA, 25 bp, Homo sapien
ccttaaggtgttaccctcagttact

SEQ ID NO: 86948 - DNA, 25 bp, Homo sapien
ccttaaggtgtttccctcagttact

SEQ ID NO: 86949 - DNA, 25 bp, Homo sapien
gtctataggctcgtcaatctcccgt

SEQ ID NO: 86950 - DNA, 25 bp, Homo sapien
gtctataggctcctcaatctcccgt

SEQ ID NO: 86951 - DNA, 25 bp, Homo sapien
cagtactagggttccgggttccacc

SEQ ID NO: 86952 - DNA, 25 bp, Homo sapien
cagtactagggtaccgggttccacc

SEQ ID NO: 86953 - DNA, 25 bp, Homo sapien
ctgaatagggcgatgggttcgcaca

SEQ ID NO: 86954 - DNA, 25 bp, Homo sapien
ctgaatagggcgttgggttcgcaca

SEQ ID NO: 86955 - DNA, 25 bp, Homo sapien
aattgactacctacgggtgaacgga

SEQ ID NO: 86956 - DNA, 25 bp, Homo sapien
aattgactaccttcgggtgaacgga

SEQ ID NO: 86957 - DNA, 25 bp, Homo sapien
tggacgtccgccgggtcgaacaggt

SEQ ID NO: 86958 - DNA, 25 bp, Homo sapien
tggacgtccgcccggtcgaacaggt

SEQ ID NO: 86959 - DNA, 25 bp, Homo sapien
gtcacgttgtaccagttcgcgtttg

SEQ ID NO: 86960 - DNA, 25 bp, Homo sapien
gtcacgttgtacgagttcgcgtttg

SEQ ID NO: 86961 - DNA, 25 bp, Homo sapien
tgcgtgtccgatgaatttatactgt

SEQ ID NO: 86962 - DNA, 25 bp, Homo sapien
tgcgtgtccgatcaatttatactgt

SEQ ID NO: 86963 - DNA, 25 bp, Homo sapien
cgtttatttgacacttttcgacgtt

SEQ ID NO: 86964 - DNA, 25 bp, Homo sapien
cgtttatttgactcttttcgacgtt

SEQ ID NO: 86965 - DNA, 25 bp, Homo sapien
tcatcttatacatacgtgtgttttt

SEQ ID NO: 86966 - DNA, 25 bp, Homo sapien
tcatcttatacaaacgtgtgttttt

SEQ ID NO: 86967 - DNA, 25 bp, Homo sapien
aggattcgagcgaaccgggttcctg

SEQ ID NO: 86968 - DNA, 25 bp, Homo sapien
aggattcgagcgtaccgggttcctg

SEQ ID NO: 86969 - DNA, 25 bp, Homo sapien
aaagtgtcgcactccggtgtccccg

SEQ ID NO: 86970 - DNA, 25 bp, Homo sapien
aaagtgtcgcacaccggtgtccccg

SEQ ID NO: 86971 - DNA, 25 bp, Homo sapien
ggtgtgtccatgtgtgtctctcgtg

SEQ ID NO: 86972 - DNA, 25 bp, Homo sapien
ggtgtgtccatgagtgtctctcgtg

SEQ ID NO: 86973 - DNA, 25 bp, Homo sapien
ccggtttctccttaagatgatttac

SEQ ID NO: 86974 - DNA, 25 bp, Homo sapien
ccggtttctcctaaagatgatttac

SEQ ID NO: 86975 - DNA, 25 bp, Homo sapien
tgtctaccatctgagtgagactttt

SEQ ID NO: 86976 - DNA, 25 bp, Homo sapien
tgtctaccatctcagtgagactttt

SEQ ID NO: 86977 - DNA, 25 bp, Homo sapien
gctcctactctcgtcgaacgcctag

SEQ ID NO: 86978 - DNA, 25 bp, Homo sapien
gctcctactctcctcgaacgcctag

SEQ ID NO: 86979 - DNA, 25 bp, Homo sapien
tcaatacattgtccttgttctttag

SEQ ID NO: 86980 - DNA, 25 bp, Homo sapien
tcaatacattgtgcttgttctttag

SEQ ID NO: 86981 - DNA, 25 bp, Homo sapien
ctatactcttggtctgagttctcag

SEQ ID NO: 86982 - DNA, 25 bp, Homo sapien
ctatactcttggactgagttctcag

SEQ ID NO: 86983 - DNA, 25 bp, Homo sapien
ttccgtctcgggaacgacttctcac

SEQ ID NO: 86984 - DNA, 25 bp, Homo sapien
ttccgtctcgggtacgacttctcac

SEQ ID NO: 86985 - DNA, 25 bp, Homo sapien
atcttgaactccaccattgagtagt

SEQ ID NO: 86986 - DNA, 25 bp, Homo sapien
atcttgaactcctccattgagtagt

SEQ ID NO: 86987 - DNA, 25 bp, Homo sapien
gctgatccaggacctcttcagtcgg

SEQ ID NO: 86988 - DNA, 25 bp, Homo sapien
gctgatccaggagctcttcagtcgg

SEQ ID NO: 86989 - DNA, 25 bp, Homo sapien
atcgtgtcaaatgtcttggagtgtc

SEQ ID NO: 86990 - DNA, 25 bp, Homo sapien
atcgtgtcaaatctcttggagtgtc

SEQ ID NO: 86991 - DNA, 25 bp, Homo sapien
actcagttttgttcgttcccgggtc

SEQ ID NO: 86992 - DNA, 25 bp, Homo sapien
actcagttttgtacgttcccgggtc

SEQ ID NO: 86993 - DNA, 25 bp, Homo sapien
gtatttgttcgtaagaccgtagaca

SEQ ID NO: 86994 - DNA, 25 bp, Homo sapien
gtatttgttcgttagaccgtagaca

SEQ ID NO: 86995 - DNA, 25 bp, Homo sapien
aaacagttcctttggtaaagtgttc

SEQ ID NO: 86996 - DNA, 25 bp, Homo sapien
aaacagttccttaggtaaagtgttc

SEQ ID NO: 86997 - DNA, 25 bp, Homo sapien
gacttccgacaacaaccggtcgtct

SEQ ID NO: 86998 - DNA, 25 bp, Homo sapien
gacttccgacaagaaccggtcgtct

SEQ ID NO: 86999 - DNA, 25 bp, Homo sapien
ttttcgacagaagaaccgagtcgac

SEQ ID NO: 87000 - DNA, 25 bp, Homo sapien
ttttcgacagaacaaccgagtcgac

SEQ ID NO: 87001 - DNA, 25 bp, Homo sapien
aggcccaccgagaccatagcgacgg

SEQ ID NO: 87002 - DNA, 25 bp, Homo sapien
aggcccaccgagtccatagcgacgg

SEQ ID NO: 87003 - DNA, 25 bp, Homo sapien
gtctgatcgtggtgacactgcgcac

SEQ ID NO: 87004 - DNA, 25 bp, Homo sapien
gtctgatcgtggagacactgcgcac

SEQ ID NO: 87005 - DNA, 25 bp, Homo sapien
atacgaagggtagagcgagagtcac

SEQ ID NO: 87006 - DNA, 25 bp, Homo sapien
atacgaagggtacagcgagagtcac

SEQ ID NO: 87007 - DNA, 25 bp, Homo sapien
tccgtggcgacacatggaactgtct

SEQ ID NO: 87008 - DNA, 25 bp, Homo sapien
tccgtggcgacagatggaactgtct

SEQ ID NO: 87009 - DNA, 25 bp, Homo sapien
ttaccatacccagagtggtcccgtt

SEQ ID NO: 87010 - DNA, 25 bp, Homo sapien
ttaccatacccacagtggtcccgtt

SEQ ID NO: 87011 - DNA, 25 bp, Homo sapien
ccaaatcccgttcatcggtcagatt

SEQ ID NO: 87012 - DNA, 25 bp, Homo sapien
ccaaatcccgttgatcggtcagatt

SEQ ID NO: 87013 - DNA, 25 bp, Homo sapien
aagtctcactctgacgccttgtaat

SEQ ID NO: 87014 - DNA, 25 bp, Homo sapien
aagtctcactctcacgccttgtaat

SEQ ID NO: 87015 - DNA, 25 bp, Homo sapien
agtccgtgtctccactgctagtagc

SEQ ID NO: 87016 - DNA, 25 bp, Homo sapien
agtccgtgtctcgactgctagtagc

SEQ ID NO: 87017 - DNA, 25 bp, Homo sapien
tacaaagaaggactaaactcctgaa

SEQ ID NO: 87018 - DNA, 25 bp, Homo sapien
tacaaagaaggagtaaactcctgaa

SEQ ID NO: 87019 - DNA, 25 bp, Homo sapien
ttagagtcatctcctttttctcagg

SEQ ID NO: 87020 - DNA, 25 bp, Homo sapien
ttagagtcatctgctttttctcagg

SEQ ID NO: 87021 - DNA, 25 bp, Homo sapien
ttcggtcagtgacttttgttcgagc

SEQ ID NO: 87022 - DNA, 25 bp, Homo sapien
ttcggtcagtgagttttgttcgagc

SEQ ID NO: 87023 - DNA, 25 bp, Homo sapien
tttgttcgattcatttcttaggaac

SEQ ID NO: 87024 - DNA, 25 bp, Homo sapien
tttgttcgattcttttcttaggaac

SEQ ID NO: 87025 - DNA, 25 bp, Homo sapien
tacataaatgtctcacttattcaat

SEQ ID NO: 87026 - DNA, 25 bp, Homo sapien
tacataaatgtcacacttattcaat

SEQ ID NO: 87027 - DNA, 25 bp, Homo sapien
aactactgaaagaggaaatcccgta

SEQ ID NO: 87028 - DNA, 25 bp, Homo sapien
aactactgaaagtggaaatcccgta

SEQ ID NO: 87029 - DNA, 25 bp, Homo sapien
aactatgggtgaaggactcgtttac

SEQ ID NO: 87030 - DNA, 25 bp, Homo sapien
aactatgggtgatggactcgtttac

SEQ ID NO: 87031 - DNA, 25 bp, Homo sapien
cctatcgtgttggaaaaccgttgtt

SEQ ID NO: 87032 - DNA, 25 bp, Homo sapien
cctatcgtgttgcaaaaccgttgtt

SEQ ID NO: 87033 - DNA, 25 bp, Homo sapien
tttcgtatcgagaccggaacctctc

SEQ ID NO: 87034 - DNA, 25 bp, Homo sapien
tttcgtatcgagtccggaacctctc

SEQ ID NO: 87035 - DNA, 25 bp, Homo sapien
cgggatcaggaccacggacctatac

SEQ ID NO: 87036 - DNA, 25 bp, Homo sapien
cgggatcaggacgacggacctatac

SEQ ID NO: 87037 - DNA, 25 bp, Homo sapien
gtcagaatcgactccagtgacccta

SEQ ID NO: 87038 - DNA, 25 bp, Homo sapien
gtcagaatcgacaccagtgacccta

SEQ ID NO: 87039 - DNA, 25 bp, Homo sapien
gaggtgttcgtcgtccaggacccct

SEQ ID NO: 87040 - DNA, 25 bp, Homo sapien
gaggtgttcgtcctccaggacccct

SEQ ID NO: 87041 - DNA, 25 bp, Homo sapien
tgttacgtgtctggtccgatgtctc

SEQ ID NO: 87042 - DNA, 25 bp, Homo sapien
tgttacgtgtctcgtccgatgtctc

SEQ ID NO: 87043 - DNA, 25 bp, Homo sapien
gacccctcgtctccgagtcgttact

SEQ ID NO: 87044 - DNA, 25 bp, Homo sapien
gacccctcgtctgcgagtcgttact

SEQ ID NO: 87045 - DNA, 25 bp, Homo sapien
ctgaaagccccttcgggagtcggac

SEQ ID NO: 87046 - DNA, 25 bp, Homo sapien
ctgaaagcccctacgggagtcggac

SEQ ID NO: 87047 - DNA, 25 bp, Homo sapien
gtagagcggggctcgcggttgtggc

SEQ ID NO: 87048 - DNA, 25 bp, Homo sapien
gtagagcggggcacgcggttgtggc

SEQ ID NO: 87049 - DNA, 25 bp, Homo sapien
ttcggcggtgccacgggtcctgttt

SEQ ID NO: 87050 - DNA, 25 bp, Homo sapien
ttcggcggtgcctcgggtcctgttt

SEQ ID NO: 87051 - DNA, 25 bp, Homo sapien
atgctgcgccggtcgccgtttcaat

SEQ ID NO: 87052 - DNA, 25 bp, Homo sapien
atgctgcgccggacgccgtttcaat

SEQ ID NO: 87053 - DNA, 25 bp, Homo sapien
gatctcacttctacccgttccaggt

SEQ ID NO: 87054 - DNA, 25 bp, Homo sapien
gatctcacttcttcccgttccaggt

SEQ ID NO: 87055 - DNA, 25 bp, Homo sapien
ttagtaggtttacactcctttcttg

SEQ ID NO: 87056 - DNA, 25 bp, Homo sapien
ttagtaggtttagactcctttcttg

SEQ ID NO: 87057 - DNA, 25 bp, Homo sapien
tccttgtaaatgtctcgtgatattt

SEQ ID NO: 87058 - DNA, 25 bp, Homo sapien
tccttgtaaatgactcgtgatattt

SEQ ID NO: 87059 - DNA, 25 bp, Homo sapien
ctattcaatgagtttcacgatgtat

SEQ ID NO: 87060 - DNA, 25 bp, Homo sapien
ctattcaatgagattcacgatgtat

SEQ ID NO: 87061 - DNA, 25 bp, Homo sapien
gtaacgttaccagagactttgaaac

SEQ ID NO: 87062 - DNA, 25 bp, Homo sapien
gtaacgttaccacagactttgaaac

SEQ ID NO: 87063 - DNA, 25 bp, Homo sapien
aagacgccccgacatatttcagaag

SEQ ID NO: 87064 - DNA, 25 bp, Homo sapien
aagacgccccgagatatttcagaag

SEQ ID NO: 87065 - DNA, 25 bp, Homo sapien
cggaacaggactcctctttctggag

SEQ ID NO: 87066 - DNA, 25 bp, Homo sapien
cggaacaggactgctctttctggag

SEQ ID NO: 87067 - DNA, 25 bp, Homo sapien
caagtttagactctcttacatgaag

SEQ ID NO: 87068 - DNA, 25 bp, Homo sapien
caagtttagactgtcttacatgaag

SEQ ID NO: 87069 - DNA, 25 bp, Homo sapien
cctattgttgcagtctatcgtgaaa

SEQ ID NO: 87070 - DNA, 25 bp, Homo sapien
cctattgttgcactctatcgtgaaa

SEQ ID NO: 87071 - DNA, 25 bp, Homo sapien
tctactttaaagatccgtgtcgaaa

SEQ ID NO: 87072 - DNA, 25 bp, Homo sapien
tctactttaaagttccgtgtcgaaa

SEQ ID NO: 87073 - DNA, 25 bp, Homo sapien
tctattacgaggttccggtaaaagt

SEQ ID NO: 87074 - DNA, 25 bp, Homo sapien
tctattacgaggatccggtaaaagt

SEQ ID NO: 87075 - DNA, 25 bp, Homo sapien
ccgctgtaacggtttcacctgaact

SEQ ID NO: 87076 - DNA, 25 bp, Homo sapien
ccgctgtaacggattcacctgaact

SEQ ID NO: 87077 - DNA, 25 bp, Homo sapien
gtgagtcgtgggattccgatggtac

SEQ ID NO: 87078 - DNA, 25 bp, Homo sapien
gtgagtcgtgggtttccgatggtac

SEQ ID NO: 87079 - DNA, 25 bp, Homo sapien
aaggaactgggagtcgactccatgg

SEQ ID NO: 87080 - DNA, 25 bp, Homo sapien
aaggaactgggactcgactccatgg

SEQ ID NO: 87081 - DNA, 25 bp, Homo sapien
ttagtatatgggtgaccacactggt

SEQ ID NO: 87082 - DNA, 25 bp, Homo sapien
ttagtatatgggagaccacactggt

SEQ ID NO: 87083 - DNA, 25 bp, Homo sapien
gtttactctatggagtcacaatgtt

SEQ ID NO: 87084 - DNA, 25 bp, Homo sapien
gtttactctatgcagtcacaatgtt

SEQ ID NO: 87085 - DNA, 25 bp, Homo sapien
gggtcataccattcatccatttagt

SEQ ID NO: 87086 - DNA, 25 bp, Homo sapien
gggtcataccatacatccatttagt

SEQ ID NO: 87087 - DNA, 25 bp, Homo sapien
tctacactacttccttcagagggta

SEQ ID NO: 87088 - DNA, 25 bp, Homo sapien
tctacactacttgcttcagagggta

SEQ ID NO: 87089 - DNA, 25 bp, Homo sapien
actgaagtctcgttgaagaaccgtc

SEQ ID NO: 87090 - DNA, 25 bp, Homo sapien
actgaagtctcgatgaagaaccgtc

SEQ ID NO: 87091 - DNA, 25 bp, Homo sapien
tttcagtgacattgtttaaatttgt

SEQ ID NO: 87092 - DNA, 25 bp, Homo sapien
tttcagtgacatagtttaaatttgt

SEQ ID NO: 87093 - DNA, 25 bp, Homo sapien
tgttttaacacctttttaattaagt

SEQ ID NO: 87094 - DNA, 25 bp, Homo sapien
tgttttaacaccattttaattaagt

SEQ ID NO: 87095 - DNA, 25 bp, Homo sapien
gttccaaccaattctgagactttag

SEQ ID NO: 87096 - DNA, 25 bp, Homo sapien
gttccaaccaatactgagactttag

SEQ ID NO: 87097 - DNA, 25 bp, Homo sapien
gccgacggtagatcaaactgcgcct

SEQ ID NO: 87098 - DNA, 25 bp, Homo sapien
gccgacggtagaacaaactgcgcct

SEQ ID NO: 87099 - DNA, 25 bp, Homo sapien
gacctaaaagacgttcggtccccta

SEQ ID NO: 87100 - DNA, 25 bp, Homo sapien
gacctaaaagaccttcggtccccta

SEQ ID NO: 87101 - DNA, 25 bp, Homo sapien
cctctctaggggaccgaacgtcttt

SEQ ID NO: 87102 - DNA, 25 bp, Homo sapien
cctctctaggggtccgaacgtcttt

SEQ ID NO: 87103 - DNA, 25 bp, Homo sapien
ggttctcttcgtcgtgacacctcct

SEQ ID NO: 87104 - DNA, 25 bp, Homo sapien
ggttctcttcgtggtgacacctcct

SEQ ID NO: 87105 - DNA, 25 bp, Homo sapien
gtgtccctctacagagacaccttct

SEQ ID NO: 87106 - DNA, 25 bp, Homo sapien
gtgtccctctactgagacaccttct

SEQ ID NO: 87107 - DNA, 25 bp, Homo sapien
gcctgttcttcttccaagacctgtt

SEQ ID NO: 87108 - DNA, 25 bp, Homo sapien
gcctgttcttctaccaagacctgtt

SEQ ID NO: 87109 - DNA, 25 bp, Homo sapien
ccgggtcagtccagaatgttgtcat

SEQ ID NO: 87110 - DNA, 25 bp, Homo sapien
ccgggtcagtcctgaatgttgtcat

SEQ ID NO: 87111 - DNA, 25 bp, Homo sapien
cgtgggtagactctatcattttgta

SEQ ID NO: 87112 - DNA, 25 bp, Homo sapien
cgtgggtagactgtatcattttgta

SEQ ID NO: 87113 - DNA, 25 bp, Homo sapien
tttgagacgttgtccgtcaccttac

SEQ ID NO: 87114 - DNA, 25 bp, Homo sapien
tttgagacgttgaccgtcaccttac

SEQ ID NO: 87115 - DNA, 25 bp, Homo sapien
cttaagggacttacctgacggaacg

SEQ ID NO: 87116 - DNA, 25 bp, Homo sapien
cttaagggactttcctgacggaacg

SEQ ID NO: 87117 - DNA, 25 bp, Homo sapien
tctcttatcaaactcgaggaccgca

SEQ ID NO: 87118 - DNA, 25 bp, Homo sapien
tctcttatcaaagtcgaggaccgca

SEQ ID NO: 87119 - DNA, 25 bp, Homo sapien
ccagaaataaagtcacggtcacaat

SEQ ID NO: 87120 - DNA, 25 bp, Homo sapien
ccagaaataaagacacggtcacaat

SEQ ID NO: 87121 - DNA, 25 bp, Homo sapien
tactggtacaaagttcatgtgatca

SEQ ID NO: 87122 - DNA, 25 bp, Homo sapien
tactggtacaaacttcatgtgatca

SEQ ID NO: 87123 - DNA, 25 bp, Homo sapien
tagagccaccggaactcgtgaaggt

SEQ ID NO: 87124 - DNA, 25 bp, Homo sapien
tagagccaccggtactcgtgaaggt

SEQ ID NO: 87125 - DNA, 25 bp, Homo sapien
ccctgtaccggagaagacgacaaca

SEQ ID NO: 87126 - DNA, 25 bp, Homo sapien
ccctgtaccggacaagacgacaaca

SEQ ID NO: 87127 - DNA, 25 bp, Homo sapien
cagccgtgaccccgacgacgcgaag

SEQ ID NO: 87128 - DNA, 25 bp, Homo sapien
cagccgtgacccggacgacgcgaag

SEQ ID NO: 87129 - DNA, 25 bp, Homo sapien
tcgggctcccgctgcgcgagtacat

SEQ ID NO: 87130 - DNA, 25 bp, Homo sapien
tcgggctcccgcagcgcgagtacat

SEQ ID NO: 87131 - DNA, 25 bp, Homo sapien
tggtttcgacctagtatccgtacac

SEQ ID NO: 87132 - DNA, 25 bp, Homo sapien
tggtttcgaccttgtatccgtacac

SEQ ID NO: 87133 - DNA, 25 bp, Homo sapien
cggggtctaacactataatcaatat

SEQ ID NO: 87134 - DNA, 25 bp, Homo sapien
cggggtctaacagtataatcaatat

SEQ ID NO: 87135 - DNA, 25 bp, Homo sapien
gaaggtctatcttgtaacttcaaat

SEQ ID NO: 87136 - DNA, 25 bp, Homo sapien
gaaggtctatctagtaacttcaaat

SEQ ID NO: 87137 - DNA, 25 bp, Homo sapien
gatgtctcgttgtttctctaaatat

SEQ ID NO: 87138 - DNA, 25 bp, Homo sapien
gatgtctcgttgattctctaaatat

SEQ ID NO: 87139 - DNA, 25 bp, Homo sapien
cggtggttacattgcttcattcttt

SEQ ID NO: 87140 - DNA, 25 bp, Homo sapien
cggtggttacatagcttcattcttt

SEQ ID NO: 87141 - DNA, 25 bp, Homo sapien
ttgtgacaacagttagtccttcttt

SEQ ID NO: 87142 - DNA, 25 bp, Homo sapien
ttgtgacaacagatagtccttcttt

SEQ ID NO: 87143 - DNA, 25 bp, Homo sapien
ttcatgacaagactgacatgtcttt

SEQ ID NO: 87144 - DNA, 25 bp, Homo sapien
ttcatgacaagagtgacatgtcttt

SEQ ID NO: 87145 - DNA, 25 bp, Homo sapien
atagacaagtaacgtgtcatacttt

SEQ ID NO: 87146 - DNA, 25 bp, Homo sapien
atagacaagtaaggtgtcatacttt

SEQ ID NO: 87147 - DNA, 25 bp, Homo sapien
ataaacacgttagagtctcaagttt

SEQ ID NO: 87148 - DNA, 25 bp, Homo sapien
ataaacacgttacagtctcaagttt

SEQ ID NO: 87149 - DNA, 25 bp, Homo sapien
cgatattctatccttcttaagtcct

SEQ ID NO: 87150 - DNA, 25 bp, Homo sapien
cgatattctatcgttcttaagtcct

SEQ ID NO: 87151 - DNA, 25 bp, Homo sapien
tgtttacgttacctcgtagggtccg

SEQ ID NO: 87152 - DNA, 25 bp, Homo sapien
tgtttacgttacgtcgtagggtccg

SEQ ID NO: 87153 - DNA, 25 bp, Homo sapien
gaagaacactcagtctacgaggtca

SEQ ID NO: 87154 - DNA, 25 bp, Homo sapien
gaagaacactcactctacgaggtca

SEQ ID NO: 87155 - DNA, 25 bp, Homo sapien
agaccgacaagtaccttccgtgtcc

SEQ ID NO: 87156 - DNA, 25 bp, Homo sapien
agaccgacaagttccttccgtgtcc

SEQ ID NO: 87157 - DNA, 25 bp, Homo sapien
aaggtctccggtcctctcttctttt

SEQ ID NO: 87158 - DNA, 25 bp, Homo sapien
aaggtctccggtgctctcttctttt

SEQ ID NO: 87159 - DNA, 25 bp, Homo sapien
caagagactcccaatttttgtgtgt

SEQ ID NO: 87160 - DNA, 25 bp, Homo sapien
caagagactccctatttttgtgtgt

SEQ ID NO: 87161 - DNA, 25 bp, Homo sapien
gtgtcgacgtcttcgcacagactcc

SEQ ID NO: 87162 - DNA, 25 bp, Homo sapien
gtgtcgacgtctacgcacagactcc

SEQ ID NO: 87163 - DNA, 25 bp, Homo sapien
tttctgtctccctctctctggtagc

SEQ ID NO: 87164 - DNA, 25 bp, Homo sapien
tttctgtctcccactctctggtagc

SEQ ID NO: 87165 - DNA, 25 bp, Homo sapien
ttatgttttccctatgtctgaggtg

SEQ ID NO: 87166 - DNA, 25 bp, Homo sapien
ttatgttttcccaatgtctgaggtg

SEQ ID NO: 87167 - DNA, 25 bp, Homo sapien
acttttgaacctttcgtcagtttcg

SEQ ID NO: 87168 - DNA, 25 bp, Homo sapien
acttttgaacctatcgtcagtttcg

SEQ ID NO: 87169 - DNA, 25 bp, Homo sapien
atttgtcgaacatttcctgaagagt

SEQ ID NO: 87170 - DNA, 25 bp, Homo sapien
atttgtcgaacaattcctgaagagt

SEQ ID NO: 87171 - DNA, 25 bp, Homo sapien
tgatgtcgcaaattacgtctgggtt

SEQ ID NO: 87172 - DNA, 25 bp, Homo sapien
tgatgtcgcaaaatacgtctgggtt

SEQ ID NO: 87173 - DNA, 25 bp, Homo sapien
tgtgggtcgaataaccggacccact

SEQ ID NO: 87174 - DNA, 25 bp, Homo sapien
tgtgggtcgaattaccggacccact

SEQ ID NO: 87175 - DNA, 25 bp, Homo sapien
tgggttttatctggtatcaactact

SEQ ID NO: 87176 - DNA, 25 bp, Homo sapien
tgggttttatctcgtatcaactact

SEQ ID NO: 87177 - DNA, 25 bp, Homo sapien
aaggtttcgagttccgactccgacc

SEQ ID NO: 87178 - DNA, 25 bp, Homo sapien
aaggtttcgagtaccgactccgacc

SEQ ID NO: 87179 - DNA, 25 bp, Homo sapien
taagagtttcagaaccatccgtaag

SEQ ID NO: 87180 - DNA, 25 bp, Homo sapien
taagagtttcagtaccatccgtaag

SEQ ID NO: 87181 - DNA, 25 bp, Homo sapien
taattcatggtttccgtccgtatat

SEQ ID NO: 87182 - DNA, 25 bp, Homo sapien
taattcatggttaccgtccgtatat

SEQ ID NO: 87183 - DNA, 25 bp, Homo sapien
tcagaaagagggtctatgtccatat

SEQ ID NO: 87184 - DNA, 25 bp, Homo sapien
tcagaaagagggactatgtccatat

SEQ ID NO: 87185 - DNA, 25 bp, Homo sapien
tcacaaaaggagaacctgtaacaac

SEQ ID NO: 87186 - DNA, 25 bp, Homo sapien
tcacaaaaggagtacctgtaacaac

SEQ ID NO: 87187 - DNA, 25 bp, Homo sapien
tgtaagaagttagcacctaaactta

SEQ ID NO: 87188 - DNA, 25 bp, Homo sapien
tgtaagaagttaccacctaaactta

SEQ ID NO: 87189 - DNA, 25 bp, Homo sapien
caagaggtagacttacccaagactg

SEQ ID NO: 87190 - DNA, 25 bp, Homo sapien
caagaggtagacatacccaagactg

SEQ ID NO: 87191 - DNA, 25 bp, Homo sapien
aacgaggtagagactaataacaccg

SEQ ID NO: 87192 - DNA, 25 bp, Homo sapien
aacgaggtagagtctaataacaccg

SEQ ID NO: 87193 - DNA, 25 bp, Homo sapien
tcaaaaccagtggtacaacaaaact

SEQ ID NO: 87194 - DNA, 25 bp, Homo sapien
tcaaaaccagtgctacaacaaaact

SEQ ID NO: 87195 - DNA, 25 bp, Homo sapien
gaaaagtccagttatcaggtgaatc

SEQ ID NO: 87196 - DNA, 25 bp, Homo sapien
gaaaagtccagtaatcaggtgaatc

SEQ ID NO: 87197 - DNA, 25 bp, Homo sapien
gtcctcgacgtatccggtgtctctc

SEQ ID NO: 87198 - DNA, 25 bp, Homo sapien
gtcctcgacgtaaccggtgtctctc

SEQ ID NO: 87199 - DNA, 25 bp, Homo sapien
ttttgttacgagactcggtggtccg

SEQ ID NO: 87200 - DNA, 25 bp, Homo sapien
ttttgttacgagtctcggtggtccg

SEQ ID NO: 87201 - DNA, 25 bp, Homo sapien
aagggtattaccttccgaggtgtgg

SEQ ID NO: 87202 - DNA, 25 bp, Homo sapien
aagggtattaccatccgaggtgtgg

SEQ ID NO: 87203 - DNA, 25 bp, Homo sapien
cggagggtcctgaagtgactagaac

SEQ ID NO: 87204 - DNA, 25 bp, Homo sapien
cggagggtcctgtagtgactagaac

SEQ ID NO: 87205 - DNA, 25 bp, Homo sapien
tctggagagccgtttgagacgagcc

SEQ ID NO: 87206 - DNA, 25 bp, Homo sapien
tctggagagccgattgagacgagcc

SEQ ID NO: 87207 - DNA, 25 bp, Homo sapien
ttctcccactgtcgtacacgtctgt

SEQ ID NO: 87208 - DNA, 25 bp, Homo sapien
ttctcccactgtggtacacgtctgt

SEQ ID NO: 87209 - DNA, 25 bp, Homo sapien
agttcgtaaggtacctggtgacctt

SEQ ID NO: 87210 - DNA, 25 bp, Homo sapien
agttcgtaaggttcctggtgacctt

SEQ ID NO: 87211 - DNA, 25 bp, Homo sapien
atctcttcggttttcggtctactta

SEQ ID NO: 87212 - DNA, 25 bp, Homo sapien
atctcttcggttatcggtctactta

SEQ ID NO: 87213 - DNA, 25 bp, Homo sapien
acacaaagtatcatcgcgtgtggtt

SEQ ID NO: 87214 - DNA, 25 bp, Homo sapien
acacaaagtatcttcgcgtgtggtt

SEQ ID NO: 87215 - DNA, 25 bp, Homo sapien
tacacgagtccttacgtcttgacag

SEQ ID NO: 87216 - DNA, 25 bp, Homo sapien
tacacgagtcctaacgtcttgacag

SEQ ID NO: 87217 - DNA, 25 bp, Homo sapien
tacgtctgtgtctgtgtgcctcgta

SEQ ID NO: 87218 - DNA, 25 bp, Homo sapien
tacgtctgtgtcagtgtgcctcgta

SEQ ID NO: 87219 - DNA, 25 bp, Homo sapien
tcctccgacggcttgtaggctcgcg

SEQ ID NO: 87220 - DNA, 25 bp, Homo sapien
tcctccgacggcatgtaggctcgcg

SEQ ID NO: 87221 - DNA, 25 bp, Homo sapien
tccccggtgacagaagaggtgccac

SEQ ID NO: 87222 - DNA, 25 bp, Homo sapien
tccccggtgacacaagaggtgccac

SEQ ID NO: 87223 - DNA, 25 bp, Homo sapien
ccgtgggagactcaagaggtgcaca

SEQ ID NO: 87224 - DNA, 25 bp, Homo sapien
ccgtgggagactgaagaggtgcaca

SEQ ID NO: 87225 - DNA, 25 bp, Homo sapien
ttgtgacttgagaaattggtcccgt

SEQ ID NO: 87226 - DNA, 25 bp, Homo sapien
ttgtgacttgagtaattggtcccgt

SEQ ID NO: 87227 - DNA, 25 bp, Homo sapien
gaggtgagattcctttgtcgagtac

SEQ ID NO: 87228 - DNA, 25 bp, Homo sapien
gaggtgagattcgtttgtcgagtac

SEQ ID NO: 87229 - DNA, 25 bp, Homo sapien
tctgtacgtagtttggtggtcggac

SEQ ID NO: 87230 - DNA, 25 bp, Homo sapien
tctgtacgtagtatggtggtcggac

SEQ ID NO: 87231 - DNA, 25 bp, Homo sapien
aactgtatcgtaacttatttcgaga

SEQ ID NO: 87232 - DNA, 25 bp, Homo sapien
aactgtatcgtatcttatttcgaga

SEQ ID NO: 87233 - DNA, 25 bp, Homo sapien
gagattactgttactgaaacactaa

SEQ ID NO: 87234 - DNA, 25 bp, Homo sapien
gagattactgtttctgaaacactaa

SEQ ID NO: 87235 - DNA, 25 bp, Homo sapien
gaataagttttgaacgtacaccgtg

SEQ ID NO: 87236 - DNA, 25 bp, Homo sapien
gaataagttttgtacgtacaccgtg

SEQ ID NO: 87237 - DNA, 25 bp, Homo sapien
cagaataagttggttataccttcgt

SEQ ID NO: 87238 - DNA, 25 bp, Homo sapien
cagaataagttgcttataccttcgt

SEQ ID NO: 87239 - DNA, 25 bp, Homo sapien
ataattcgaaagtgccgaaccttct

SEQ ID NO: 87240 - DNA, 25 bp, Homo sapien
ataattcgaaagagccgaaccttct

SEQ ID NO: 87241 - DNA, 25 bp, Homo sapien
accctagaaggacgacgcacctctt

SEQ ID NO: 87242 - DNA, 25 bp, Homo sapien
accctagaaggaggacgcacctctt

SEQ ID NO: 87243 - DNA, 25 bp, Homo sapien
acctagggaggtacggaggaccctc

SEQ ID NO: 87244 - DNA, 25 bp, Homo sapien
acctagggaggttcggaggaccctc

SEQ ID NO: 87245 - DNA, 25 bp, Homo sapien
ttgaggtaccagaacgtacaacgac

SEQ ID NO: 87246 - DNA, 25 bp, Homo sapien
ttgaggtaccagtacgtacaacgac

SEQ ID NO: 87247 - DNA, 25 bp, Homo sapien
agcatcgcgcccatcacgtcgaagg

SEQ ID NO: 87248 - DNA, 25 bp, Homo sapien
agcatcgcgcccttcacgtcgaagg

SEQ ID NO: 87249 - DNA, 25 bp, Homo sapien
cttcccgtagtatcgacgtccactt

SEQ ID NO: 87250 - DNA, 25 bp, Homo sapien
cttcccgtagtaacgacgtccactt

SEQ ID NO: 87251 - DNA, 25 bp, Homo sapien
tccacgctacttacgtgtcttactg

SEQ ID NO: 87252 - DNA, 25 bp, Homo sapien
tccacgctactttcgtgtcttactg

SEQ ID NO: 87253 - DNA, 25 bp, Homo sapien
acggtactcctccattcggtcattc

SEQ ID NO: 87254 - DNA, 25 bp, Homo sapien
acggtactcctcgattcggtcattc

SEQ ID NO: 87255 - DNA, 25 bp, Homo sapien
tacggatccgggtgtgctcgtccac

SEQ ID NO: 87256 - DNA, 25 bp, Homo sapien
tacggatccgggagtgctcgtccac

SEQ ID NO: 87257 - DNA, 25 bp, Homo sapien
ccctcggtggacagtggacactaca

SEQ ID NO: 87258 - DNA, 25 bp, Homo sapien
ccctcggtggactgtggacactaca

SEQ ID NO: 87259 - DNA, 25 bp, Homo sapien
tctcgtgtatagtcctggtacctta

SEQ ID NO: 87260 - DNA, 25 bp, Homo sapien
tctcgtgtatagacctggtacctta

SEQ ID NO: 87261 - DNA, 25 bp, Homo sapien
gtgtctctttacactccggtcctca

SEQ ID NO: 87262 - DNA, 25 bp, Homo sapien
gtgtctctttactctccggtcctca

SEQ ID NO: 87263 - DNA, 25 bp, Homo sapien
tgtttctgtcgtaatttctcccgaa

SEQ ID NO: 87264 - DNA, 25 bp, Homo sapien
tgtttctgtcgttatttctcccgaa

SEQ ID NO: 87265 - DNA, 25 bp, Homo sapien
tctgtccgtcggtctttgaccgacc

SEQ ID NO: 87266 - DNA, 25 bp, Homo sapien
tctgtccgtcggactttgaccgacc

SEQ ID NO: 87267 - DNA, 25 bp, Homo sapien
tgtgaacgttaaagtgtatgccatc

SEQ ID NO: 87268 - DNA, 25 bp, Homo sapien
tgtgaacgttaatgtgtatgccatc

SEQ ID NO: 87269 - DNA, 25 bp, Homo sapien
tggtaggctagtggtataacctatc

SEQ ID NO: 87270 - DNA, 25 bp, Homo sapien
tggtaggctagtcgtataacctatc

SEQ ID NO: 87271 - DNA, 25 bp, Homo sapien
ctttgtcctctttctcgagtccttg

SEQ ID NO: 87272 - DNA, 25 bp, Homo sapien
ctttgtcctcttactcgagtccttg

SEQ ID NO: 87273 - DNA, 25 bp, Homo sapien
gtctctcttctgacgtcgtttctgt

SEQ ID NO: 87274 - DNA, 25 bp, Homo sapien
gtctctcttctgtcgtcgtttctgt

SEQ ID NO: 87275 - DNA, 25 bp, Homo sapien
acccctgtctgttactgttctccgt

SEQ ID NO: 87276 - DNA, 25 bp, Homo sapien
acccctgtctgtaactgttctccgt

SEQ ID NO: 87277 - DNA, 25 bp, Homo sapien
ccacccttcttgaacagttgtaccg

SEQ ID NO: 87278 - DNA, 25 bp, Homo sapien
ccacccttcttgtacagttgtaccg

SEQ ID NO: 87279 - DNA, 25 bp, Homo sapien
aacgtctttctgtacgtagtttggt

SEQ ID NO: 87280 - DNA, 25 bp, Homo sapien
aacgtctttctgaacgtagtttggt

SEQ ID NO: 87281 - DNA, 25 bp, Homo sapien
tctagaggaggagtaacgtttccct

SEQ ID NO: 87282 - DNA, 25 bp, Homo sapien
tctagaggaggactaacgtttccct

SEQ ID NO: 87283 - DNA, 25 bp, Homo sapien
ctgaaaagaggcactagtactagaa

SEQ ID NO: 87284 - DNA, 25 bp, Homo sapien
ctgaaaagaggctctagtactagaa

SEQ ID NO: 87285 - DNA, 25 bp, Homo sapien
ccacgaggaaggtcatcgctaagga

SEQ ID NO: 87286 - DNA, 25 bp, Homo sapien
ccacgaggaaggacatcgctaagga

SEQ ID NO: 87287 - DNA, 25 bp, Homo sapien
cgaggagtccggaacacctaggtaa

SEQ ID NO: 87288 - DNA, 25 bp, Homo sapien
cgaggagtccggtacacctaggtaa

SEQ ID NO: 87289 - DNA, 25 bp, Homo sapien
tcactgggtctgtccctatagtaac

SEQ ID NO: 87290 - DNA, 25 bp, Homo sapien
tcactgggtctgaccctatagtaac

SEQ ID NO: 87291 - DNA, 25 bp, Homo sapien
gttccgagtgtcgaccccaggcgtc

SEQ ID NO: 87292 - DNA, 25 bp, Homo sapien
gttccgagtgtccaccccaggcgtc

SEQ ID NO: 87293 - DNA, 25 bp, Homo sapien
tagtccactgtgctccatgggtgtc

SEQ ID NO: 87294 - DNA, 25 bp, Homo sapien
tagtccactgtggtccatgggtgtc

SEQ ID NO: 87295 - DNA, 25 bp, Homo sapien
aaactctaaatcctcgtttggacag

SEQ ID NO: 87296 - DNA, 25 bp, Homo sapien
aaactctaaatcgtcgtttggacag

SEQ ID NO: 87297 - DNA, 25 bp, Homo sapien
gtcatacctctttctagtaagactg

SEQ ID NO: 87298 - DNA, 25 bp, Homo sapien
gtcatacctcttactagtaagactg

SEQ ID NO: 87299 - DNA, 25 bp, Homo sapien
cccgttcaaccatggggacacagtg

SEQ ID NO: 87300 - DNA, 25 bp, Homo sapien
cccgttcaaccaaggggacacagtg

SEQ ID NO: 87301 - DNA, 25 bp, Homo sapien
agtgacaactgaagagtaatccctt

SEQ ID NO: 87302 - DNA, 25 bp, Homo sapien
agtgacaactgatgagtaatccctt

SEQ ID NO: 87303 - DNA, 25 bp, Homo sapien
caagataatgtaccatcagttaatg

SEQ ID NO: 87304 - DNA, 25 bp, Homo sapien
caagataatgtagcatcagttaatg

SEQ ID NO: 87305 - DNA, 25 bp, Homo sapien
gtaaactttcataaaccagaaacgg

SEQ ID NO: 87306 - DNA, 25 bp, Homo sapien
gtaaactttcattaaccagaaacgg

SEQ ID NO: 87307 - DNA, 25 bp, Homo sapien
cgaccctttacccccttgtaagagg

SEQ ID NO: 87308 - DNA, 25 bp, Homo sapien
cgaccctttaccgccttgtaagagg

SEQ ID NO: 87309 - DNA, 25 bp, Homo sapien
tgcacttaaagactactttcaatag

SEQ ID NO: 87310 - DNA, 25 bp, Homo sapien
tgcacttaaagagtactttcaatag

SEQ ID NO: 87311 - DNA, 25 bp, Homo sapien
ggtcaagcatcttctcgtccatccg

SEQ ID NO: 87312 - DNA, 25 bp, Homo sapien
ggtcaagcatctactcgtccatccg

SEQ ID NO: 87313 - DNA, 25 bp, Homo sapien
gggagagcgagtttatgtccctacc

SEQ ID NO: 87314 - DNA, 25 bp, Homo sapien
gggagagcgagtatatgtccctacc

SEQ ID NO: 87315 - DNA, 25 bp, Homo sapien
gccgttgtcgtttcgtcctccgtct

SEQ ID NO: 87316 - DNA, 25 bp, Homo sapien
gccgttgtcgttacgtcctccgtct

SEQ ID NO: 87317 - DNA, 25 bp, Homo sapien
ccgttgtgtcttagtacgtcccgtg

SEQ ID NO: 87318 - DNA, 25 bp, Homo sapien
ccgttgtgtctttgtacgtcccgtg

SEQ ID NO: 87319 - DNA, 25 bp, Homo sapien
actccgtctctcaggactccggtgt

SEQ ID NO: 87320 - DNA, 25 bp, Homo sapien
actccgtctctctggactccggtgt

SEQ ID NO: 87321 - DNA, 25 bp, Homo sapien
gacctcggactcaggcgacgtgcct

SEQ ID NO: 87322 - DNA, 25 bp, Homo sapien
gacctcggactctggcgacgtgcct

SEQ ID NO: 87323 - DNA, 25 bp, Homo sapien
taacggtcggtctttgcagtgtgac

SEQ ID NO: 87324 - DNA, 25 bp, Homo sapien
taacggtcggtcattgcagtgtgac

SEQ ID NO: 87325 - DNA, 25 bp, Homo sapien
tactaggacctatatcgaccaggag

SEQ ID NO: 87326 - DNA, 25 bp, Homo sapien
tactaggacctaaatcgaccaggag

SEQ ID NO: 87327 - DNA, 25 bp, Homo sapien
tacttgacacttaaacccaggacgt

SEQ ID NO: 87328 - DNA, 25 bp, Homo sapien
tacttgacactttaacccaggacgt

SEQ ID NO: 87329 - DNA, 25 bp, Homo sapien
gcgtctttttcatgattctaaaagt

SEQ ID NO: 87330 - DNA, 25 bp, Homo sapien
gcgtctttttcaagattctaaaagt

SEQ ID NO: 87331 - DNA, 25 bp, Homo sapien
ccctagtcttgaagggtcgatcccg

SEQ ID NO: 87332 - DNA, 25 bp, Homo sapien
ccctagtcttgatgggtcgatcccg

SEQ ID NO: 87333 - DNA, 25 bp, Homo sapien
cccgcgcaagggatagcgtcctagt

SEQ ID NO: 87334 - DNA, 25 bp, Homo sapien
cccgcgcaagggttagcgtcctagt

SEQ ID NO: 87335 - DNA, 25 bp, Homo sapien
tcccggccaacgataatcgtatcta

SEQ ID NO: 87336 - DNA, 25 bp, Homo sapien
tcccggccaacgttaatcgtatcta

SEQ ID NO: 87337 - DNA, 25 bp, Homo sapien
ccaaccagagagtgacgtcggtctg

SEQ ID NO: 87338 - DNA, 25 bp, Homo sapien
ccaaccagagagagacgtcggtctg

SEQ ID NO: 87339 - DNA, 25 bp, Homo sapien
atccttcaggacgacggtccgtgtg

SEQ ID NO: 87340 - DNA, 25 bp, Homo sapien
atccttcaggaccacggtccgtgtg

SEQ ID NO: 87341 - DNA, 25 bp, Homo sapien
atcgtcttcagttccgaagacagaa

SEQ ID NO: 87342 - DNA, 25 bp, Homo sapien
atcgtcttcagtaccgaagacagaa

SEQ ID NO: 87343 - DNA, 25 bp, Homo sapien
tcacttctacgtctcctacaggatg

SEQ ID NO: 87344 - DNA, 25 bp, Homo sapien
tcacttctacgtgtcctacaggatg

SEQ ID NO: 87345 - DNA, 25 bp, Homo sapien
cgttgctactgcaaccaagggtata

SEQ ID NO: 87346 - DNA, 25 bp, Homo sapien
cgttgctactgctaccaagggtata

SEQ ID NO: 87347 - DNA, 25 bp, Homo sapien
ctttgtcttaagcttaaggtccagt

SEQ ID NO: 87348 - DNA, 25 bp, Homo sapien
ctttgtcttaaggttaaggtccagt

SEQ ID NO: 87349 - DNA, 25 bp, Homo sapien
aatctgtgttgagaccaacctccct

SEQ ID NO: 87350 - DNA, 25 bp, Homo sapien
aatctgtgttgacaccaacctccct

SEQ ID NO: 87351 - DNA, 25 bp, Homo sapien
gcttacgaagagttacaccccttca

SEQ ID NO: 87352 - DNA, 25 bp, Homo sapien
gcttacgaagagatacaccccttca

SEQ ID NO: 87353 - DNA, 25 bp, Homo sapien
ttgttgaagtgttctatccctctta

SEQ ID NO: 87354 - DNA, 25 bp, Homo sapien
ttgttgaagtgtactatccctctta

SEQ ID NO: 87355 - DNA, 25 bp, Homo sapien
gtcatgaatataggattccatcatc

SEQ ID NO: 87356 - DNA, 25 bp, Homo sapien
gtcatgaatatacgattccatcatc

SEQ ID NO: 87357 - DNA, 25 bp, Homo sapien
acttggtttcggtgttactatcatc

SEQ ID NO: 87358 - DNA, 25 bp, Homo sapien
acttggtttcggagttactatcatc

SEQ ID NO: 87359 - DNA, 25 bp, Homo sapien
tctagtgtttgtcctttaaggaccg

SEQ ID NO: 87360 - DNA, 25 bp, Homo sapien
tctagtgtttgtgctttaaggaccg

SEQ ID NO: 87361 - DNA, 25 bp, Homo sapien
ttagggtctgtatagtacaaacatc

SEQ ID NO: 87362 - DNA, 25 bp, Homo sapien
ttagggtctgtaaagtacaaacatc

SEQ ID NO: 87363 - DNA, 25 bp, Homo sapien
cttaaggtttaagagaactactatc

SEQ ID NO: 87364 - DNA, 25 bp, Homo sapien
cttaaggtttaacagaactactatc

SEQ ID NO: 87365 - DNA, 25 bp, Homo sapien
taacgagaggagaaactaccactgg

SEQ ID NO: 87366 - DNA, 25 bp, Homo sapien
taacgagaggagtaactaccactgg

SEQ ID NO: 87367 - DNA, 25 bp, Homo sapien
acacggatagggagacaccggtatt

SEQ ID NO: 87368 - DNA, 25 bp, Homo sapien
acacggatagggtgacaccggtatt

SEQ ID NO: 87369 - DNA, 25 bp, Homo sapien
acggcgacagcaggtcgctcaggaa

SEQ ID NO: 87370 - DNA, 25 bp, Homo sapien
acggcgacagcacgtcgctcaggaa

SEQ ID NO: 87371 - DNA, 25 bp, Homo sapien
tctgtccttcgtaccccgagaggag

SEQ ID NO: 87372 - DNA, 25 bp, Homo sapien
tctgtccttcgttccccgagaggag

SEQ ID NO: 87373 - DNA, 25 bp, Homo sapien
tccggtcccctcaccggtacggggt

SEQ ID NO: 87374 - DNA, 25 bp, Homo sapien
tccggtcccctctccggtacggggt

SEQ ID NO: 87375 - DNA, 25 bp, Homo sapien
tatcggcctttgtcagtctcggtgg

SEQ ID NO: 87376 - DNA, 25 bp, Homo sapien
tatcggcctttgacagtctcggtgg

SEQ ID NO: 87377 - DNA, 25 bp, Homo sapien
aggtcttctcgtgtaaggtcttttc

SEQ ID NO: 87378 - DNA, 25 bp, Homo sapien
aggtcttctcgtctaaggtcttttc

SEQ ID NO: 87379 - DNA, 25 bp, Homo sapien
ctgttctttcgtgatttctacgtcc

SEQ ID NO: 87380 - DNA, 25 bp, Homo sapien
ctgttctttcgtcatttctacgtcc

SEQ ID NO: 87381 - DNA, 25 bp, Homo sapien
cgacagtctatcatcgttcccgatc

SEQ ID NO: 87382 - DNA, 25 bp, Homo sapien
cgacagtctatcttcgttcccgatc

SEQ ID NO: 87383 - DNA, 25 bp, Homo sapien
aaggttctgtcttcggtacactgaa

SEQ ID NO: 87384 - DNA, 25 bp, Homo sapien
aaggttctgtctacggtacactgaa

SEQ ID NO: 87385 - DNA, 25 bp, Homo sapien
ttccaggttcggtccgagttcttta

SEQ ID NO: 87386 - DNA, 25 bp, Homo sapien
ttccaggttcggaccgagttcttta

SEQ ID NO: 87387 - DNA, 25 bp, Homo sapien
aaaattcacggtaccaggtttagtg

SEQ ID NO: 87388 - DNA, 25 bp, Homo sapien
aaaattcacggttccaggtttagtg

SEQ ID NO: 87389 - DNA, 25 bp, Homo sapien
ttgtatgagtactcacttttaagtt

SEQ ID NO: 87390 - DNA, 25 bp, Homo sapien
ttgtatgagtacacacttttaagtt

SEQ ID NO: 87391 - DNA, 25 bp, Homo sapien
gctttggaacgacagactcctgtgg

SEQ ID NO: 87392 - DNA, 25 bp, Homo sapien
gctttggaacgagagactcctgtgg

SEQ ID NO: 87393 - DNA, 25 bp, Homo sapien
ggagcccgtcaagaccttcatcgtg

SEQ ID NO: 87394 - DNA, 25 bp, Homo sapien
ggagcccgtcaacaccttcatcgtg

SEQ ID NO: 87395 - DNA, 25 bp, Homo sapien
aacccgtcgagaaaggtgctaccga

SEQ ID NO: 87396 - DNA, 25 bp, Homo sapien
aacccgtcgagataggtgctaccga

SEQ ID NO: 87397 - DNA, 25 bp, Homo sapien
gacaacaaggtaactttggctgaga

SEQ ID NO: 87398 - DNA, 25 bp, Homo sapien
gacaacaaggtatctttggctgaga

SEQ ID NO: 87399 - DNA, 25 bp, Homo sapien
agtccagacttttcagtgatgacga

SEQ ID NO: 87400 - DNA, 25 bp, Homo sapien
agtccagactttacagtgatgacga

SEQ ID NO: 87401 - DNA, 25 bp, Homo sapien
cgtaacttttgtagtgaccgagtgt

SEQ ID NO: 87402 - DNA, 25 bp, Homo sapien
cgtaacttttgttgtgaccgagtgt

SEQ ID NO: 87403 - DNA, 25 bp, Homo sapien
gtcagggtatattttcttattctac

SEQ ID NO: 87404 - DNA, 25 bp, Homo sapien
gtcagggtatatattcttattctac

SEQ ID NO: 87405 - DNA, 25 bp, Homo sapien
gttggggagatctcactcctctgtg

SEQ ID NO: 87406 - DNA, 25 bp, Homo sapien
gttggggagatcacactcctctgtg

SEQ ID NO: 87407 - DNA, 25 bp, Homo sapien
gggtggataccaacatcactcgtag

SEQ ID NO: 87408 - DNA, 25 bp, Homo sapien
gggtggataccatcatcactcgtag

SEQ ID NO: 87409 - DNA, 25 bp, Homo sapien
agacttcagtagaagttatcccgtt

SEQ ID NO: 87410 - DNA, 25 bp, Homo sapien
agacttcagtagtagttatcccgtt

SEQ ID NO: 87411 - DNA, 25 bp, Homo sapien
aagacataccgtcgacaccccagta

SEQ ID NO: 87412 - DNA, 25 bp, Homo sapien
aagacataccgtggacaccccagta

SEQ ID NO: 87413 - DNA, 25 bp, Homo sapien
cgcgatatgtgtaaagacaccgaac

SEQ ID NO: 87414 - DNA, 25 bp, Homo sapien
cgcgatatgtgttaagacaccgaac

SEQ ID NO: 87415 - DNA, 25 bp, Homo sapien
ttgtcccttacgtgacccccggtat

SEQ ID NO: 87416 - DNA, 25 bp, Homo sapien
ttgtcccttacgagacccccggtat

SEQ ID NO: 87417 - DNA, 25 bp, Homo sapien
ccgcctgtgtcgtgacggcaggaga

SEQ ID NO: 87418 - DNA, 25 bp, Homo sapien
ccgcctgtgtcgagacggcaggaga

SEQ ID NO: 87419 - DNA, 25 bp, Homo sapien
atcccgttccgtaacacaaagaatg

SEQ ID NO: 87420 - DNA, 25 bp, Homo sapien
atcccgttccgttacacaaagaatg

SEQ ID NO: 87421 - DNA, 25 bp, Homo sapien
tcctgttccgttctctacagttctg

SEQ ID NO: 87422 - DNA, 25 bp, Homo sapien
tcctgttccgttgtctacagttctg

SEQ ID NO: 87423 - DNA, 25 bp, Homo sapien
tccgtggcacacatctaaatgtcta

SEQ ID NO: 87424 - DNA, 25 bp, Homo sapien
tccgtggcacacttctaaatgtcta

SEQ ID NO: 87425 - DNA, 25 bp, Homo sapien
atctcggccgtcaggtcttcaatta

SEQ ID NO: 87426 - DNA, 25 bp, Homo sapien
atctcggccgtctggtcttcaatta

SEQ ID NO: 87427 - DNA, 25 bp, Homo sapien
ctaggatgtcttacttaaatacgtg

SEQ ID NO: 87428 - DNA, 25 bp, Homo sapien
ctaggatgtctttcttaaatacgtg

SEQ ID NO: 87429 - DNA, 25 bp, Homo sapien
cagttatcgtatcctctttaagtta

SEQ ID NO: 87430 - DNA, 25 bp, Homo sapien
cagttatcgtatgctctttaagtta

SEQ ID NO: 87431 - DNA, 25 bp, Homo sapien
caggtacggtatgtcttctagataa

SEQ ID NO: 87432 - DNA, 25 bp, Homo sapien
caggtacggtatctcttctagataa

SEQ ID NO: 87433 - DNA, 25 bp, Homo sapien
ccagtgtctgttgtgttcatgtcct

SEQ ID NO: 87434 - DNA, 25 bp, Homo sapien
ccagtgtctgttctgttcatgtcct

SEQ ID NO: 87435 - DNA, 25 bp, Homo sapien
aggtcatacgtaatgatcaaccgtt

SEQ ID NO: 87436 - DNA, 25 bp, Homo sapien
aggtcatacgtattgatcaaccgtt

SEQ ID NO: 87437 - DNA, 25 bp, Homo sapien
tctgtcctgcttggtggttcaggtt

SEQ ID NO: 87438 - DNA, 25 bp, Homo sapien
tctgtcctgcttcgtggttcaggtt

SEQ ID NO: 87439 - DNA, 25 bp, Homo sapien
acatacctccttgtaatgtcttagg

SEQ ID NO: 87440 - DNA, 25 bp, Homo sapien
acatacctccttctaatgtcttagg

SEQ ID NO: 87441 - DNA, 25 bp, Homo sapien
aaccaccctttacaatgtcgtctgg

SEQ ID NO: 87442 - DNA, 25 bp, Homo sapien
aaccaccctttagaatgtcgtctgg

SEQ ID NO: 87443 - DNA, 25 bp, Homo sapien
gcagagacatcctgacttttccagt

SEQ ID NO: 87444 - DNA, 25 bp, Homo sapien
gcagagacatccagacttttccagt

SEQ ID NO: 87445 - DNA, 25 bp, Homo sapien
tcatgcaccgacaggagaattctgt

SEQ ID NO: 87446 - DNA, 25 bp, Homo sapien
tcatgcaccgactggagaattctgt

SEQ ID NO: 87447 - DNA, 25 bp, Homo sapien
tttacaaggaccaatgtcttttcag

SEQ ID NO: 87448 - DNA, 25 bp, Homo sapien
tttacaaggacctatgtcttttcag

SEQ ID NO: 87449 - DNA, 25 bp, Homo sapien
caggtcacgtttgtctcctgagtgt

SEQ ID NO: 87450 - DNA, 25 bp, Homo sapien
caggtcacgtttctctcctgagtgt

SEQ ID NO: 87451 - DNA, 25 bp, Homo sapien
atggtcatgtgtctctgtctgacct

SEQ ID NO: 87452 - DNA, 25 bp, Homo sapien
atggtcatgtgtgtctgtctgacct

SEQ ID NO: 87453 - DNA, 25 bp, Homo sapien
tctccatagtcgttgttgtggaagt

SEQ ID NO: 87454 - DNA, 25 bp, Homo sapien
tctccatagtcgatgttgtggaagt

SEQ ID NO: 87455 - DNA, 25 bp, Homo sapien
aacgtatcagggacttttcgtaagt

SEQ ID NO: 87456 - DNA, 25 bp, Homo sapien
aacgtatcagggtcttttcgtaagt

SEQ ID NO: 87457 - DNA, 25 bp, Homo sapien
gtagctacgttcttctggttgttat

SEQ ID NO: 87458 - DNA, 25 bp, Homo sapien
gtagctacgttcatctggttgttat

SEQ ID NO: 87459 - DNA, 25 bp, Homo sapien
tgggtattttgtaactaccctttta

SEQ ID NO: 87460 - DNA, 25 bp, Homo sapien
tgggtattttgttactaccctttta

SEQ ID NO: 87461 - DNA, 25 bp, Homo sapien
tatggaggtttttaccgtttctctc

SEQ ID NO: 87462 - DNA, 25 bp, Homo sapien
tatggaggttttaaccgtttctctc

SEQ ID NO: 87463 - DNA, 25 bp, Homo sapien
aatgttttgtcgtcgacctttctct

SEQ ID NO: 87464 - DNA, 25 bp, Homo sapien
aatgttttgtcgacgacctttctct

SEQ ID NO: 87465 - DNA, 25 bp, Homo sapien
ctgaagtgtgggaactcctatgtct

SEQ ID NO: 87466 - DNA, 25 bp, Homo sapien
ctgaagtgtgggtactcctatgtct

SEQ ID NO: 87467 - DNA, 25 bp, Homo sapien
cctcggcttgggacgtcggtccgtt

SEQ ID NO: 87468 - DNA, 25 bp, Homo sapien
cctcggcttgggtcgtcggtccgtt

SEQ ID NO: 87469 - DNA, 25 bp, Homo sapien
tggtgcgggcggacgtcggtccacg

SEQ ID NO: 87470 - DNA, 25 bp, Homo sapien
tggtgcgggcggtcgtcggtccacg

SEQ ID NO: 87471 - DNA, 25 bp, Homo sapien
ggggagaccgactggaaacgccacc

SEQ ID NO: 87472 - DNA, 25 bp, Homo sapien
ggggagaccgacaggaaacgccacc

SEQ ID NO: 87473 - DNA, 25 bp, Homo sapien
gaggctacccgagagccgaccgagc

SEQ ID NO: 87474 - DNA, 25 bp, Homo sapien
gaggctacccgacagccgaccgagc

SEQ ID NO: 87475 - DNA, 25 bp, Homo sapien
tcatgaacctacaaacctctcttcc

SEQ ID NO: 87476 - DNA, 25 bp, Homo sapien
tcatgaacctactaacctctcttcc

SEQ ID NO: 87477 - DNA, 25 bp, Homo sapien
agtgtgcggtcgaaactacagccca

SEQ ID NO: 87478 - DNA, 25 bp, Homo sapien
agtgtgcggtcgtaactacagccca

SEQ ID NO: 87479 - DNA, 25 bp, Homo sapien
gtgtaggtttctcaccatgacctag

SEQ ID NO: 87480 - DNA, 25 bp, Homo sapien
gtgtaggtttctgaccatgacctag

SEQ ID NO: 87481 - DNA, 25 bp, Homo sapien
ggagaaggttttacgacttccacta

SEQ ID NO: 87482 - DNA, 25 bp, Homo sapien
ggagaaggtttttcgacttccacta

SEQ ID NO: 87483 - DNA, 25 bp, Homo sapien
acggtcagttttcacatacctatag

SEQ ID NO: 87484 - DNA, 25 bp, Homo sapien
acggtcagttttgacatacctatag

SEQ ID NO: 87485 - DNA, 25 bp, Homo sapien
gcctatcgtgtcgtgttctagtatg

SEQ ID NO: 87486 - DNA, 25 bp, Homo sapien
gcctatcgtgtcctgttctagtatg

SEQ ID NO: 87487 - DNA, 25 bp, Homo sapien
aggtgtaccaagtcctttctgtctg

SEQ ID NO: 87488 - DNA, 25 bp, Homo sapien
aggtgtaccaagacctttctgtctg

SEQ ID NO: 87489 - DNA, 25 bp, Homo sapien
gatgggttagagtatttccgtcttc

SEQ ID NO: 87490 - DNA, 25 bp, Homo sapien
gatgggttagagaatttccgtcttc

SEQ ID NO: 87491 - DNA, 25 bp, Homo sapien
gtcggtttactctactcctgcactc

SEQ ID NO: 87492 - DNA, 25 bp, Homo sapien
gtcggtttactcaactcctgcactc

SEQ ID NO: 87493 - DNA, 25 bp, Homo sapien
gtgctttagttcactgaccactacc

SEQ ID NO: 87494 - DNA, 25 bp, Homo sapien
gtgctttagttctctgaccactacc

SEQ ID NO: 87495 - DNA, 25 bp, Homo sapien
tcgagtagacccaagacgcgacata

SEQ ID NO: 87496 - DNA, 25 bp, Homo sapien
tcgagtagaccctagacgcgacata

SEQ ID NO: 87497 - DNA, 25 bp, Homo sapien
tacagacgacgtctcggaccgaaga

SEQ ID NO: 87498 - DNA, 25 bp, Homo sapien
tacagacgacgtgtcggaccgaaga

SEQ ID NO: 87499 - DNA, 25 bp, Homo sapien
agggtcttctctactgcctccgatg

SEQ ID NO: 87500 - DNA, 25 bp, Homo sapien
agggtcttctcttctgcctccgatg

SEQ ID NO: 87501 - DNA, 25 bp, Homo sapien
gagggtctattcgattccagccgtc

SEQ ID NO: 87502 - DNA, 25 bp, Homo sapien
gagggtctattccattccagccgtc

SEQ ID NO: 87503 - DNA, 25 bp, Homo sapien
ggggtcttcaactaaccagtgagag

SEQ ID NO: 87504 - DNA, 25 bp, Homo sapien
ggggtcttcaacaaaccagtgagag

SEQ ID NO: 87505 - DNA, 25 bp, Homo sapien
gggctcgtcagtcaatgcaacgaag

SEQ ID NO: 87506 - DNA, 25 bp, Homo sapien
gggctcgtcagtgaatgcaacgaag

SEQ ID NO: 87507 - DNA, 25 bp, Homo sapien
cgtagagacgcatgcagacgagtat

SEQ ID NO: 87508 - DNA, 25 bp, Homo sapien
cgtagagacgcaagcagacgagtat

SEQ ID NO: 87509 - DNA, 25 bp, Homo sapien
acatactctagatcattcagcagag

SEQ ID NO: 87510 - DNA, 25 bp, Homo sapien
acatactctagaacattcagcagag

SEQ ID NO: 87511 - DNA, 25 bp, Homo sapien
tttgaactaatgaatcttccgaaag

SEQ ID NO: 87512 - DNA, 25 bp, Homo sapien
tttgaactaatgtatcttccgaaag

SEQ ID NO: 87513 - DNA, 25 bp, Homo sapien
tcggtgatctaaaaagtccttttta

SEQ ID NO: 87514 - DNA, 25 bp, Homo sapien
tcggtgatctaataagtccttttta

SEQ ID NO: 87515 - DNA, 25 bp, Homo sapien
gagatataccattggtctttctaaa

SEQ ID NO: 87516 - DNA, 25 bp, Homo sapien
gagatataccataggtctttctaaa

SEQ ID NO: 87517 - DNA, 25 bp, Homo sapien
atgttgtggaccaggttccttacaa

SEQ ID NO: 87518 - DNA, 25 bp, Homo sapien
atgttgtggacctggttccttacaa

SEQ ID NO: 87519 - DNA, 25 bp, Homo sapien
atcctgtgaaaggttttcggaacag

SEQ ID NO: 87520 - DNA, 25 bp, Homo sapien
atcctgtgaaagcttttcggaacag

SEQ ID NO: 87521 - DNA, 25 bp, Homo sapien
ggccccgtgccgcgggcgctcacgc

SEQ ID NO: 87522 - DNA, 25 bp, Homo sapien
ggccccgtgccgggggcgctcacgc

SEQ ID NO: 87523 - DNA, 25 bp, Homo sapien
tccgttgcgcgcaactgcgtgtcgc

SEQ ID NO: 87524 - DNA, 25 bp, Homo sapien
tccgttgcgcgctactgcgtgtcgc

SEQ ID NO: 87525 - DNA, 25 bp, Homo sapien
agtccggtcctaggacacaggggtc

SEQ ID NO: 87526 - DNA, 25 bp, Homo sapien
agtccggtcctacgacacaggggtc

SEQ ID NO: 87527 - DNA, 25 bp, Homo sapien
aacttcatccgtaacacaagggttc

SEQ ID NO: 87528 - DNA, 25 bp, Homo sapien
aacttcatccgttacacaagggttc

SEQ ID NO: 87529 - DNA, 25 bp, Homo sapien
caaggtgtcgtttcgcgacgggttc

SEQ ID NO: 87530 - DNA, 25 bp, Homo sapien
caaggtgtcgttacgcgacgggttc

SEQ ID NO: 87531 - DNA, 25 bp, Homo sapien
agacaagaggtttgtcaccttgtaa

SEQ ID NO: 87532 - DNA, 25 bp, Homo sapien
agacaagaggttagtcaccttgtaa

SEQ ID NO: 87533 - DNA, 25 bp, Homo sapien
ggtgggtaccggtgaaccattttta

SEQ ID NO: 87534 - DNA, 25 bp, Homo sapien
ggtgggtaccggagaaccattttta

SEQ ID NO: 87535 - DNA, 25 bp, Homo sapien
tccccgtgtcatgaagtatactttg

SEQ ID NO: 87536 - DNA, 25 bp, Homo sapien
tccccgtgtcatcaagtatactttg

SEQ ID NO: 87537 - DNA, 25 bp, Homo sapien
ttgccactagaatgtaggtcccatg

SEQ ID NO: 87538 - DNA, 25 bp, Homo sapien
ttgccactagaaagtaggtcccatg

SEQ ID NO: 87539 - DNA, 25 bp, Homo sapien
tggaagaagaaagacgctcgtcaag

SEQ ID NO: 87540 - DNA, 25 bp, Homo sapien
tggaagaagaaacacgctcgtcaag

SEQ ID NO: 87541 - DNA, 25 bp, Homo sapien
gagtacattaacgatgttcacttac

SEQ ID NO: 87542 - DNA, 25 bp, Homo sapien
gagtacattaaccatgttcacttac

SEQ ID NO: 87543 - DNA, 25 bp, Homo sapien
cgtttctacggcagtcgatcatgac

SEQ ID NO: 87544 - DNA, 25 bp, Homo sapien
cgtttctacggctgtcgatcatgac

SEQ ID NO: 87545 - DNA, 25 bp, Homo sapien
attttcacttgtgtatacgtccgac

SEQ ID NO: 87546 - DNA, 25 bp, Homo sapien
attttcacttgtctatacgtccgac

SEQ ID NO: 87547 - DNA, 25 bp, Homo sapien
acgattccctaatctaatatacaac

SEQ ID NO: 87548 - DNA, 25 bp, Homo sapien
acgattccctaaactaatatacaac

SEQ ID NO: 87549 - DNA, 25 bp, Homo sapien
tgagaaccccggagtcgtccataac

SEQ ID NO: 87550 - DNA, 25 bp, Homo sapien
tgagaaccccggtgtcgtccataac

SEQ ID NO: 87551 - DNA, 25 bp, Homo sapien
tacgaattcaagttatcgtcaaagg

SEQ ID NO: 87552 - DNA, 25 bp, Homo sapien
tacgaattcaagatatcgtcaaagg

SEQ ID NO: 87553 - DNA, 25 bp, Homo sapien
gacttctgcgtgtatcgtaaataat

SEQ ID NO: 87554 - DNA, 25 bp, Homo sapien
gacttctgcgtgaatcgtaaataat

SEQ ID NO: 87555 - DNA, 25 bp, Homo sapien
tgttgacttctgtcataaattagca

SEQ ID NO: 87556 - DNA, 25 bp, Homo sapien
tgttgacttctgacataaattagca

SEQ ID NO: 87557 - DNA, 25 bp, Homo sapien
cttgtgaattagtaaaaccgattca

SEQ ID NO: 87558 - DNA, 25 bp, Homo sapien
cttgtgaattagaaaaaccgattca

SEQ ID NO: 87559 - DNA, 25 bp, Homo sapien
gagtaggtacaaagacaaatatata

SEQ ID NO: 87560 - DNA, 25 bp, Homo sapien
gagtaggtacaatgacaaatatata

SEQ ID NO: 87561 - DNA, 25 bp, Homo sapien
agaaggtaaggacaacggtacaacg

SEQ ID NO: 87562 - DNA, 25 bp, Homo sapien
agaaggtaaggagaacggtacaacg

SEQ ID NO: 87563 - DNA, 25 bp, Homo sapien
gagcaaaggagcggaccacgtagtg

SEQ ID NO: 87564 - DNA, 25 bp, Homo sapien
gagcaaaggagccgaccacgtagtg

SEQ ID NO: 87565 - DNA, 25 bp, Homo sapien
cataaggagtagaccgactccgtaa

SEQ ID NO: 87566 - DNA, 25 bp, Homo sapien
cataaggagtagtccgactccgtaa

SEQ ID NO: 87567 - DNA, 25 bp, Homo sapien
tctagggacgtcgtcggctcccagt

SEQ ID NO: 87568 - DNA, 25 bp, Homo sapien
tctagggacgtcctcggctcccagt

SEQ ID NO: 87569 - DNA, 25 bp, Homo sapien
cgactccgggtttcgggtctccaca

SEQ ID NO: 87570 - DNA, 25 bp, Homo sapien
cgactccgggttacgggtctccaca

SEQ ID NO: 87571 - DNA, 25 bp, Homo sapien
ctgattgtgctgtttggttccacat

SEQ ID NO: 87572 - DNA, 25 bp, Homo sapien
ctgattgtgctgattggttccacat

SEQ ID NO: 87573 - DNA, 25 bp, Homo sapien
attgaatgttagggttcacgagact

SEQ ID NO: 87574 - DNA, 25 bp, Homo sapien
attgaatgttagcgttcacgagact

SEQ ID NO: 87575 - DNA, 25 bp, Homo sapien
taggacttgtctgctgtctagaagg

SEQ ID NO: 87576 - DNA, 25 bp, Homo sapien
taggacttgtctcctgtctagaagg

SEQ ID NO: 87577 - DNA, 25 bp, Homo sapien
cacggattgtctcctgtctcggtgg

SEQ ID NO: 87578 - DNA, 25 bp, Homo sapien
cacggattgtctgctgtctcggtgg

SEQ ID NO: 87579 - DNA, 25 bp, Homo sapien
cgtattctcaaccttgttcgcgtct

SEQ ID NO: 87580 - DNA, 25 bp, Homo sapien
cgtattctcaacgttgttcgcgtct

SEQ ID NO: 87581 - DNA, 25 bp, Homo sapien
actcttatctaaccggtatttgtgt

SEQ ID NO: 87582 - DNA, 25 bp, Homo sapien
actcttatctaagcggtatttgtgt

SEQ ID NO: 87583 - DNA, 25 bp, Homo sapien
agtgaaccaccgaaccggatccctg

SEQ ID NO: 87584 - DNA, 25 bp, Homo sapien
agtgaaccaccgtaccggatccctg

SEQ ID NO: 87585 - DNA, 25 bp, Homo sapien
tcagaatccccgtgggtatcacccg

SEQ ID NO: 87586 - DNA, 25 bp, Homo sapien
tcagaatccccgagggtatcacccg

SEQ ID NO: 87587 - DNA, 25 bp, Homo sapien
tgtcgtttcaagttatgtcctcgtg

SEQ ID NO: 87588 - DNA, 25 bp, Homo sapien
tgtcgtttcaagatatgtcctcgtg

SEQ ID NO: 87589 - DNA, 25 bp, Homo sapien
gggttctcctgatatgtacctcacg

SEQ ID NO: 87590 - DNA, 25 bp, Homo sapien
gggttctcctgaaatgtacctcacg

SEQ ID NO: 87591 - DNA, 25 bp, Homo sapien
tgtactctcttcgttaagacttctg

SEQ ID NO: 87592 - DNA, 25 bp, Homo sapien
tgtactctcttccttaagacttctg

SEQ ID NO: 87593 - DNA, 25 bp, Homo sapien
acgtccgtatcagtcgagaacctag

SEQ ID NO: 87594 - DNA, 25 bp, Homo sapien
acgtccgtatcactcgagaacctag

SEQ ID NO: 87595 - DNA, 25 bp, Homo sapien
ataacaattacggttgtatcttaag

SEQ ID NO: 87596 - DNA, 25 bp, Homo sapien
ataacaattacgcttgtatcttaag

SEQ ID NO: 87597 - DNA, 25 bp, Homo sapien
catatcaataggtctgttacttcag

SEQ ID NO: 87598 - DNA, 25 bp, Homo sapien
catatcaataggactgttacttcag

SEQ ID NO: 87599 - DNA, 25 bp, Homo sapien
cttcctctaggaaacgctctccgta

SEQ ID NO: 87600 - DNA, 25 bp, Homo sapien
cttcctctaggatacgctctccgta

SEQ ID NO: 87601 - DNA, 25 bp, Homo sapien
ccgaggtcggagaccttgagaactc

SEQ ID NO: 87602 - DNA, 25 bp, Homo sapien
ccgaggtcggagtccttgagaactc

SEQ ID NO: 87603 - DNA, 25 bp, Homo sapien
atgatcacagaattctcctgtcggt

SEQ ID NO: 87604 - DNA, 25 bp, Homo sapien
atgatcacagaaatctcctgtcggt

SEQ ID NO: 87605 - DNA, 25 bp, Homo sapien
aattcgtccaatagtttcgaatgtc

SEQ ID NO: 87606 - DNA, 25 bp, Homo sapien
aattcgtccaattgtttcgaatgtc

SEQ ID NO: 87607 - DNA, 25 bp, Homo sapien
acttcttttatgtttctccggtgac

SEQ ID NO: 87608 - DNA, 25 bp, Homo sapien
acttcttttatgattctccggtgac

SEQ ID NO: 87609 - DNA, 25 bp, Homo sapien
gtagtgtcttttcgtccgtcgacga

SEQ ID NO: 87610 - DNA, 25 bp, Homo sapien
gtagtgtcttttggtccgtcgacga

SEQ ID NO: 87611 - DNA, 25 bp, Homo sapien
gggaagttcctttctgtgattgttc

SEQ ID NO: 87612 - DNA, 25 bp, Homo sapien
gggaagttccttactgtgattgttc

SEQ ID NO: 87613 - DNA, 25 bp, Homo sapien
tagtgtccaccacaactcgtcgtcc

SEQ ID NO: 87614 - DNA, 25 bp, Homo sapien
tagtgtccaccagaactcgtcgtcc

SEQ ID NO: 87615 - DNA, 25 bp, Homo sapien
gtattccaaaagtaccgacgacact

SEQ ID NO: 87616 - DNA, 25 bp, Homo sapien
gtattccaaaagaaccgacgacact

SEQ ID NO: 87617 - DNA, 25 bp, Homo sapien
gcgttcacctagaaccatacggaga

SEQ ID NO: 87618 - DNA, 25 bp, Homo sapien
gcgttcacctagtaccatacggaga

SEQ ID NO: 87619 - DNA, 25 bp, Homo sapien
gtctgtccgtactgggagctggaca

SEQ ID NO: 87620 - DNA, 25 bp, Homo sapien
gtctgtccgtacagggagctggaca

SEQ ID NO: 87621 - DNA, 25 bp, Homo sapien
cagtaaacaagaggagccgagacac

SEQ ID NO: 87622 - DNA, 25 bp, Homo sapien
cagtaaacaagacgagccgagacac

SEQ ID NO: 87623 - DNA, 25 bp, Homo sapien
tccgtgagcaaaaggaataccgtac

SEQ ID NO: 87624 - DNA, 25 bp, Homo sapien
tccgtgagcaaatggaataccgtac

SEQ ID NO: 87625 - DNA, 25 bp, Homo sapien
actgataccaatatgagtctccgtt

SEQ ID NO: 87626 - DNA, 25 bp, Homo sapien
actgataccaatttgagtctccgtt

SEQ ID NO: 87627 - DNA, 25 bp, Homo sapien
cgataaacccgttccaggtcacctt

SEQ ID NO: 87628 - DNA, 25 bp, Homo sapien
cgataaacccgtaccaggtcacctt

SEQ ID NO: 87629 - DNA, 25 bp, Homo sapien
aacacgtcccgctcggacttgtaca

SEQ ID NO: 87630 - DNA, 25 bp, Homo sapien
aacacgtcccgcacggacttgtaca

SEQ ID NO: 87631 - DNA, 25 bp, Homo sapien
agtaccgtctctcgagacctgtgag

SEQ ID NO: 87632 - DNA, 25 bp, Homo sapien
agtaccgtctctggagacctgtgag

SEQ ID NO: 87633 - DNA, 25 bp, Homo sapien
aaagacgaggtccaagaacctgaga

SEQ ID NO: 87634 - DNA, 25 bp, Homo sapien
aaagacgaggtcgaagaacctgaga

SEQ ID NO: 87635 - DNA, 25 bp, Homo sapien
caataagttccgttctttactcagg

SEQ ID NO: 87636 - DNA, 25 bp, Homo sapien
caataagttccgatctttactcagg

SEQ ID NO: 87637 - DNA, 25 bp, Homo sapien
tccgcgtcagaatggtttgtccggc

SEQ ID NO: 87638 - DNA, 25 bp, Homo sapien
tccgcgtcagaaaggtttgtccggc

SEQ ID NO: 87639 - DNA, 25 bp, Homo sapien
tgttcgattcatttcttaggaacgt

SEQ ID NO: 87640 - DNA, 25 bp, Homo sapien
tgttcgattcatatcttaggaacgt

SEQ ID NO: 87641 - DNA, 25 bp, Homo sapien
gtttggacttcatcatttaagaact

SEQ ID NO: 87642 - DNA, 25 bp, Homo sapien
gtttggacttcaacatttaagaact

SEQ ID NO: 87643 - DNA, 25 bp, Homo sapien
cgtacttgaaagagaaacttcacaa

SEQ ID NO: 87644 - DNA, 25 bp, Homo sapien
cgtacttgaaagtgaaacttcacaa

SEQ ID NO: 87645 - DNA, 25 bp, Homo sapien
acgtatgacggttatggacttatga

SEQ ID NO: 87646 - DNA, 25 bp, Homo sapien
acgtatgacggtaatggacttatga

SEQ ID NO: 87647 - DNA, 25 bp, Homo sapien
aatcgttggaaagaccgtatacgat

SEQ ID NO: 87648 - DNA, 25 bp, Homo sapien
aatcgttggaaacaccgtatacgat

SEQ ID NO: 87649 - DNA, 25 bp, Homo sapien
ttcttgttcgagcaccggaacccgc

SEQ ID NO: 87650 - DNA, 25 bp, Homo sapien
ttcttgttcgaggaccggaacccgc

SEQ ID NO: 87651 - DNA, 25 bp, Homo sapien
agcgcggtgcaggaccgcaaccatc

SEQ ID NO: 87652 - DNA, 25 bp, Homo sapien
agcgcggtgcagcaccgcaaccatc

SEQ ID NO: 87653 - DNA, 25 bp, Homo sapien
tgtccgacatcaggaccatgaccca

SEQ ID NO: 87654 - DNA, 25 bp, Homo sapien
tgtccgacatcacgaccatgaccca

SEQ ID NO: 87655 - DNA, 25 bp, Homo sapien
agacctgtacccgtccagtcacccc

SEQ ID NO: 87656 - DNA, 25 bp, Homo sapien
agacctgtacccctccagtcacccc

SEQ ID NO: 87657 - DNA, 25 bp, Homo sapien
tttgtgtttctggtcgcgagtgtcc

SEQ ID NO: 87658 - DNA, 25 bp, Homo sapien
tttgtgtttctgctcgcgagtgtcc

SEQ ID NO: 87659 - DNA, 25 bp, Homo sapien
cgtcctctcctccgtgtgtcgtcgt

SEQ ID NO: 87660 - DNA, 25 bp, Homo sapien
cgtcctctcctcggtgtgtcgtcgt

SEQ ID NO: 87661 - DNA, 25 bp, Homo sapien
tcaagagccccttctgcggtgccgt

SEQ ID NO: 87662 - DNA, 25 bp, Homo sapien
tcaagagcccctactgcggtgccgt

SEQ ID NO: 87663 - DNA, 25 bp, Homo sapien
tagagcggggctcgcggttgtggcg

SEQ ID NO: 87664 - DNA, 25 bp, Homo sapien
tagagcggggctggcggttgtggcg

SEQ ID NO: 87665 - DNA, 25 bp, Homo sapien
ttctgggtggtaatgggtccttgtc

SEQ ID NO: 87666 - DNA, 25 bp, Homo sapien
ttctgggtggtattgggtccttgtc

SEQ ID NO: 87667 - DNA, 25 bp, Homo sapien
tatgctccggggaccggttctcttt

SEQ ID NO: 87668 - DNA, 25 bp, Homo sapien
tatgctccggggtccggttctcttt

SEQ ID NO: 87669 - DNA, 25 bp, Homo sapien
tacgttcacgggacccgttccctgt

SEQ ID NO: 87670 - DNA, 25 bp, Homo sapien
tacgttcacgggtcccgttccctgt

SEQ ID NO: 87671 - DNA, 25 bp, Homo sapien
tacggagttaaacctccgtttcttt

SEQ ID NO: 87672 - DNA, 25 bp, Homo sapien
tacggagttaaagctccgtttcttt

SEQ ID NO: 87673 - DNA, 25 bp, Homo sapien
aatgtcacatgatccgtgttatctt

SEQ ID NO: 87674 - DNA, 25 bp, Homo sapien
aatgtcacatgaaccgtgttatctt

SEQ ID NO: 87675 - DNA, 25 bp, Homo sapien
atagttcaatacatacctcatattt

SEQ ID NO: 87676 - DNA, 25 bp, Homo sapien
atagttcaatacttacctcatattt

SEQ ID NO: 87677 - DNA, 25 bp, Homo sapien
gtcaggtcaatgttactttagattc

SEQ ID NO: 87678 - DNA, 25 bp, Homo sapien
gtcaggtcaatgatactttagattc

SEQ ID NO: 87679 - DNA, 25 bp, Homo sapien
gaaacctccaaccattgttaagata

SEQ ID NO: 87680 - DNA, 25 bp, Homo sapien
gaaacctccaacgattgttaagata

SEQ ID NO: 87681 - DNA, 25 bp, Homo sapien
gacatcgggactcctgttccgtgga

SEQ ID NO: 87682 - DNA, 25 bp, Homo sapien
gacatcgggactgctgttccgtgga

SEQ ID NO: 87683 - DNA, 25 bp, Homo sapien
ccagtcaagactctttactgtgggt

SEQ ID NO: 87684 - DNA, 25 bp, Homo sapien
ccagtcaagactgtttactgtgggt

SEQ ID NO: 87685 - DNA, 25 bp, Homo sapien
ccaattataggcgtttactgaacga

SEQ ID NO: 87686 - DNA, 25 bp, Homo sapien
ccaattataggcctttactgaacga

SEQ ID NO: 87687 - DNA, 25 bp, Homo sapien
ccctcttctgggatttgtcgacaga

SEQ ID NO: 87688 - DNA, 25 bp, Homo sapien
ccctcttctgggttttgtcgacaga

SEQ ID NO: 87689 - DNA, 25 bp, Homo sapien
cccttttagacgtgtctgtggaaat

SEQ ID NO: 87690 - DNA, 25 bp, Homo sapien
cccttttagacgagtctgtggaaat

SEQ ID NO: 87691 - DNA, 25 bp, Homo sapien
cggactgtaccgtcttctacaggaa

SEQ ID NO: 87692 - DNA, 25 bp, Homo sapien
cggactgtaccgacttctacaggaa

SEQ ID NO: 87693 - DNA, 25 bp, Homo sapien
ggtagtcgtccgacttcgacccaga

SEQ ID NO: 87694 - DNA, 25 bp, Homo sapien
ggtagtcgtccgtcttcgacccaga

SEQ ID NO: 87695 - DNA, 25 bp, Homo sapien
ggatctgagtgagtcgaaccatagg

SEQ ID NO: 87696 - DNA, 25 bp, Homo sapien
ggatctgagtgactcgaaccatagg

SEQ ID NO: 87697 - DNA, 25 bp, Homo sapien
tactactgtggacagacaccacttt

SEQ ID NO: 87698 - DNA, 25 bp, Homo sapien
tactactgtggagagacaccacttt

SEQ ID NO: 87699 - DNA, 25 bp, Homo sapien
gtatttacctgagagtctacatttt

SEQ ID NO: 87700 - DNA, 25 bp, Homo sapien
gtatttacctgacagtctacatttt

SEQ ID NO: 87701 - DNA, 25 bp, Homo sapien
gagggtcataccattcatccattta

SEQ ID NO: 87702 - DNA, 25 bp, Homo sapien
gagggtcatacctttcatccattta

SEQ ID NO: 87703 - DNA, 25 bp, Homo sapien
gtcacagtacttcttcaactggtct

SEQ ID NO: 87704 - DNA, 25 bp, Homo sapien
gtcacagtacttgttcaactggtct

SEQ ID NO: 87705 - DNA, 25 bp, Homo sapien
ctgaagtctcgttgaagaaccgtcg

SEQ ID NO: 87706 - DNA, 25 bp, Homo sapien
ctgaagtctcgtagaagaaccgtcg

SEQ ID NO: 87707 - DNA, 25 bp, Homo sapien
tttcgtgaattcttcaaaggtcgtg

SEQ ID NO: 87708 - DNA, 25 bp, Homo sapien
tttcgtgaattcatcaaaggtcgtg

SEQ ID NO: 87709 - DNA, 25 bp, Homo sapien
cttttgaaccgtatgtgacatttgt

SEQ ID NO: 87710 - DNA, 25 bp, Homo sapien
cttttgaaccgtttgtgacatttgt

SEQ ID NO: 87711 - DNA, 25 bp, Homo sapien
ctccaaacttattcggtagactttg

SEQ ID NO: 87712 - DNA, 25 bp, Homo sapien
ctccaaacttatacggtagactttg

SEQ ID NO: 87713 - DNA, 25 bp, Homo sapien
cgcgctagcgagtcaatgtgcctct

SEQ ID NO: 87714 - DNA, 25 bp, Homo sapien
cgcgctagcgagacaatgtgcctct

SEQ ID NO: 87715 - DNA, 25 bp, Homo sapien
cgtagctggccattacgtccgttta

SEQ ID NO: 87716 - DNA, 25 bp, Homo sapien
cgtagctggccaatacgtccgttta

SEQ ID NO: 87717 - DNA, 25 bp, Homo sapien
ctctaggggaccgaacgtcttttag

SEQ ID NO: 87718 - DNA, 25 bp, Homo sapien
ctctaggggacccaacgtcttttag

SEQ ID NO: 87719 - DNA, 25 bp, Homo sapien
ggtctccttgtcctgactccgtctt

SEQ ID NO: 87720 - DNA, 25 bp, Homo sapien
ggtctccttgtcgtgactccgtctt

SEQ ID NO: 87721 - DNA, 25 bp, Homo sapien
gtgtcccgtctacgacgaccctggt

SEQ ID NO: 87722 - DNA, 25 bp, Homo sapien
gtgtcccgtctaggacgaccctggt

SEQ ID NO: 87723 - DNA, 25 bp, Homo sapien
ggggttcttcgttgtcaacccgttt

SEQ ID NO: 87724 - DNA, 25 bp, Homo sapien
ggggttcttcgtagtcaacccgttt

SEQ ID NO: 87725 - DNA, 25 bp, Homo sapien
gggagtttatccagacacatttcct

SEQ ID NO: 87726 - DNA, 25 bp, Homo sapien
gggagtttatcctgacacatttcct

SEQ ID NO: 87727 - DNA, 25 bp, Homo sapien
gttggtagacgtcttcggttttcta

SEQ ID NO: 87728 - DNA, 25 bp, Homo sapien
gttggtagacgtgttcggttttcta

SEQ ID NO: 87729 - DNA, 25 bp, Homo sapien
gttaggagagttgcaggtcctttac

SEQ ID NO: 87730 - DNA, 25 bp, Homo sapien
gttaggagagttccaggtcctttac

SEQ ID NO: 87731 - DNA, 25 bp, Homo sapien
tatagggtcactaccggcgtagaag

SEQ ID NO: 87732 - DNA, 25 bp, Homo sapien
tatagggtcacttccggcgtagaag

SEQ ID NO: 87733 - DNA, 25 bp, Homo sapien
ctcttatcaaactcgaggaccgcac

SEQ ID NO: 87734 - DNA, 25 bp, Homo sapien
ctcttatcaaacacgaggaccgcac

SEQ ID NO: 87735 - DNA, 25 bp, Homo sapien
accagaaataaagtcacggtcacaa

SEQ ID NO: 87736 - DNA, 25 bp, Homo sapien
accagaaataaactcacggtcacaa

SEQ ID NO: 87737 - DNA, 25 bp, Homo sapien
aggtgtcaaaagttcatgtacaaca

SEQ ID NO: 87738 - DNA, 25 bp, Homo sapien
aggtgtcaaaagatcatgtacaaca

SEQ ID NO: 87739 - DNA, 25 bp, Homo sapien
caagagtcccagtaactcgtgaaga

SEQ ID NO: 87740 - DNA, 25 bp, Homo sapien
caagagtcccagaaactcgtgaaga

SEQ ID NO: 87741 - DNA, 25 bp, Homo sapien
cagcggtcccggaagacgagcaaca

SEQ ID NO: 87742 - DNA, 25 bp, Homo sapien
cagcggtcccggtagacgagcaaca

SEQ ID NO: 87743 - DNA, 25 bp, Homo sapien
ccagccgcgaccccgacgacgcgaa

SEQ ID NO: 87744 - DNA, 25 bp, Homo sapien
ccagccgcgaccgcgacgacgcgaa

SEQ ID NO: 87745 - DNA, 25 bp, Homo sapien
cggcggacgaccagccgcgagtcat

SEQ ID NO: 87746 - DNA, 25 bp, Homo sapien
cggcggacgacctgccgcgagtcat

SEQ ID NO: 87747 - DNA, 25 bp, Homo sapien
ggtggtgactactgtttcgagacac

SEQ ID NO: 87748 - DNA, 25 bp, Homo sapien
ggtggtgactacagtttcgagacac

SEQ ID NO: 87749 - DNA, 25 bp, Homo sapien
gcggggtctaacactataatcaata

SEQ ID NO: 87750 - DNA, 25 bp, Homo sapien
gcggggtctaactctataatcaata

SEQ ID NO: 87751 - DNA, 25 bp, Homo sapien
cagaagtacttctatgatgtcaaat

SEQ ID NO: 87752 - DNA, 25 bp, Homo sapien
cagaagtacttcaatgatgtcaaat

SEQ ID NO: 87753 - DNA, 25 bp, Homo sapien
cgactattcgtcagttttgtaaatt

SEQ ID NO: 87754 - DNA, 25 bp, Homo sapien
cgactattcgtctgttttgtaaatt

SEQ ID NO: 87755 - DNA, 25 bp, Homo sapien
ggtggtttttgcatctacaccttat

SEQ ID NO: 87756 - DNA, 25 bp, Homo sapien
ggtggtttttgcttctacaccttat

SEQ ID NO: 87757 - DNA, 25 bp, Homo sapien
gtgtgtgacgccactgtccttcttt

SEQ ID NO: 87758 - DNA, 25 bp, Homo sapien
gtgtgtgacgcctctgtccttcttt

SEQ ID NO: 87759 - DNA, 25 bp, Homo sapien
ttatgtgaaccactgacacttttgt

SEQ ID NO: 87760 - DNA, 25 bp, Homo sapien
ttatgtgaaccagtgacacttttgt

SEQ ID NO: 87761 - DNA, 25 bp, Homo sapien
taagactcgataaggtgtcatttct

SEQ ID NO: 87762 - DNA, 25 bp, Homo sapien
taagactcgatatggtgtcatttct

SEQ ID NO: 87763 - DNA, 25 bp, Homo sapien
cctaaacccgtagagtagtttgttt

SEQ ID NO: 87764 - DNA, 25 bp, Homo sapien
cctaaacccgtacagtagtttgttt

SEQ ID NO: 87765 - DNA, 25 bp, Homo sapien
atatcgtcattcaggttatagacct

SEQ ID NO: 87766 - DNA, 25 bp, Homo sapien
atatcgtcattctggttatagacct

SEQ ID NO: 87767 - DNA, 25 bp, Homo sapien
tattttagttcttcgtaaggtcgac

SEQ ID NO: 87768 - DNA, 25 bp, Homo sapien
tattttagttctacgtaaggtcgac

SEQ ID NO: 87769 - DNA, 25 bp, Homo sapien
cgatttaactcatcgataaggtcga

SEQ ID NO: 87770 - DNA, 25 bp, Homo sapien
cgatttaactcaacgataaggtcga

SEQ ID NO: 87771 - DNA, 25 bp, Homo sapien
cgactgaaataagtgtcagttcgtc

SEQ ID NO: 87772 - DNA, 25 bp, Homo sapien
cgactgaaataactgtcagttcgtc

SEQ ID NO: 87773 - DNA, 25 bp, Homo sapien
gagtccagttaatctttacgttctt

SEQ ID NO: 87774 - DNA, 25 bp, Homo sapien
gagtccagttaaactttacgttctt

SEQ ID NO: 87775 - DNA, 25 bp, Homo sapien
gacaaggaccccaaattttgagact

SEQ ID NO: 87776 - DNA, 25 bp, Homo sapien
gacaaggacccctaattttgagact

SEQ ID NO: 87777 - DNA, 25 bp, Homo sapien
gttcgacttctacctcacgtactgc

SEQ ID NO: 87778 - DNA, 25 bp, Homo sapien
gttcgacttctagctcacgtactgc

SEQ ID NO: 87779 - DNA, 25 bp, Homo sapien
gtattgtacccctcttcaggacgcg

SEQ ID NO: 87780 - DNA, 25 bp, Homo sapien
gtattgtaccccacttcaggacgcg

SEQ ID NO: 87781 - DNA, 25 bp, Homo sapien
atctgttttcccactgtccggagac

SEQ ID NO: 87782 - DNA, 25 bp, Homo sapien
atctgttttccctctgtccggagac

SEQ ID NO: 87783 - DNA, 25 bp, Homo sapien
actttgtgcgacgttctcgggtttc

SEQ ID NO: 87784 - DNA, 25 bp, Homo sapien
actttgtgcgaccttctcgggtttc

SEQ ID NO: 87785 - DNA, 25 bp, Homo sapien
atcttgtaccaatatccgtgaatgt

SEQ ID NO: 87786 - DNA, 25 bp, Homo sapien
atcttgtaccaaaatccgtgaatgt

SEQ ID NO: 87787 - DNA, 25 bp, Homo sapien
cgatgtcgtcaaaagttcttatgtt

SEQ ID NO: 87788 - DNA, 25 bp, Homo sapien
cgatgtcgtcaatagttcttatgtt

SEQ ID NO: 87789 - DNA, 25 bp, Homo sapien
gtgaggtcaactatggtaaccgtat

SEQ ID NO: 87790 - DNA, 25 bp, Homo sapien
gtgaggtcaactttggtaaccgtat

SEQ ID NO: 87791 - DNA, 25 bp, Homo sapien
ttgggttttatctggtatcaactac

SEQ ID NO: 87792 - DNA, 25 bp, Homo sapien
ttgggttttatcaggtatcaactac

SEQ ID NO: 87793 - DNA, 25 bp, Homo sapien
gggtattcggtggacgtctccgaca

SEQ ID NO: 87794 - DNA, 25 bp, Homo sapien
gggtattcggtgcacgtctccgaca

SEQ ID NO: 87795 - DNA, 25 bp, Homo sapien
aagagtataaagtccttccgtaggt

SEQ ID NO: 87796 - DNA, 25 bp, Homo sapien
aagagtataaagaccttccgtaggt

SEQ ID NO: 87797 - DNA, 25 bp, Homo sapien
taagttcgggagaccctccgtctgt

SEQ ID NO: 87798 - DNA, 25 bp, Homo sapien
taagttcgggagtccctccgtctgt

SEQ ID NO: 87799 - DNA, 25 bp, Homo sapien
tagcagacagggtctcactcctctt

SEQ ID NO: 87800 - DNA, 25 bp, Homo sapien
tagcagacagggactcactcctctt

SEQ ID NO: 87801 - DNA, 25 bp, Homo sapien
tcaaaaagagtgataccagaagttc

SEQ ID NO: 87802 - DNA, 25 bp, Homo sapien
tcaaaaagagtgttaccagaagttc

SEQ ID NO: 87803 - DNA, 25 bp, Homo sapien
attaatagttgtgacctcaacgtta

SEQ ID NO: 87804 - DNA, 25 bp, Homo sapien
attaatagttgtcacctcaacgtta

SEQ ID NO: 87805 - DNA, 25 bp, Homo sapien
cagcgacagttattaccacaagtta

SEQ ID NO: 87806 - DNA, 25 bp, Homo sapien
cagcgacagttaataccacaagtta

SEQ ID NO: 87807 - DNA, 25 bp, Homo sapien
caggaggaagacgtaactaatatcg

SEQ ID NO: 87808 - DNA, 25 bp, Homo sapien
caggaggaagacctaactaatatcg

SEQ ID NO: 87809 - DNA, 25 bp, Homo sapien
atcaaaaccagtggtacaacaaaac

SEQ ID NO: 87810 - DNA, 25 bp, Homo sapien
atcaaaaccagtcgtacaacaaaac

SEQ ID NO: 87811 - DNA, 25 bp, Homo sapien
atagacgtgagttctacaaggaatc

SEQ ID NO: 87812 - DNA, 25 bp, Homo sapien
atagacgtgagtactacaaggaatc

SEQ ID NO: 87813 - DNA, 25 bp, Homo sapien
cagtcctagacttcgggtctacatc

SEQ ID NO: 87814 - DNA, 25 bp, Homo sapien
cagtcctagactacgggtctacatc

SEQ ID NO: 87815 - DNA, 25 bp, Homo sapien
cctgtgttcgagaccggacctctcg

SEQ ID NO: 87816 - DNA, 25 bp, Homo sapien
cctgtgttcgagtccggacctctcg

SEQ ID NO: 87817 - DNA, 25 bp, Homo sapien
aggttggttccgaccgagatgtccg

SEQ ID NO: 87818 - DNA, 25 bp, Homo sapien
aggttggttccgtccgagatgtccg

SEQ ID NO: 87819 - DNA, 25 bp, Homo sapien
cgagagtggtcctggagtcaagaac

SEQ ID NO: 87820 - DNA, 25 bp, Homo sapien
cgagagtggtccaggagtcaagaac

SEQ ID NO: 87821 - DNA, 25 bp, Homo sapien
tgtgcgagagccaaagagacgaccc

SEQ ID NO: 87822 - DNA, 25 bp, Homo sapien
tgtgcgagagcctaagagacgaccc

SEQ ID NO: 87823 - DNA, 25 bp, Homo sapien
gtctagcccggacgtactactcacg

SEQ ID NO: 87824 - DNA, 25 bp, Homo sapien
gtctagcccggaggtactactcacg

SEQ ID NO: 87825 - DNA, 25 bp, Homo sapien
cacgttcttaggacccggttacctt

SEQ ID NO: 87826 - DNA, 25 bp, Homo sapien
cacgttcttaggtcccggttacctt

SEQ ID NO: 87827 - DNA, 25 bp, Homo sapien
gtctctaacggtaaatcggatcttt

SEQ ID NO: 87828 - DNA, 25 bp, Homo sapien
gtctctaacggttaatcggatcttt

SEQ ID NO: 87829 - DNA, 25 bp, Homo sapien
ctaagaatagttatcgacttcggtt

SEQ ID NO: 87830 - DNA, 25 bp, Homo sapien
ctaagaatagttttcgacttcggtt

SEQ ID NO: 87831 - DNA, 25 bp, Homo sapien
cgacgtatctattacgtctatcaag

SEQ ID NO: 87832 - DNA, 25 bp, Homo sapien
cgacgtatctataacgtctatcaag

SEQ ID NO: 87833 - DNA, 25 bp, Homo sapien
atacgttagtcacgtgtctctcgac

SEQ ID NO: 87834 - DNA, 25 bp, Homo sapien
atacgttagtcaggtgtctctcgac

SEQ ID NO: 87835 - DNA, 25 bp, Homo sapien
ccggacgcgtgcttgtggtatcgct

SEQ ID NO: 87836 - DNA, 25 bp, Homo sapien
ccggacgcgtgcatgtggtatcgct

SEQ ID NO: 87837 - DNA, 25 bp, Homo sapien
gtgcaggtacatgaagaggtgccct

SEQ ID NO: 87838 - DNA, 25 bp, Homo sapien
gtgcaggtacatcaagaggtgccct

SEQ ID NO: 87839 - DNA, 25 bp, Homo sapien
gcgtcgaggagacacaagggcacct

SEQ ID NO: 87840 - DNA, 25 bp, Homo sapien
gcgtcgaggagagacaagggcacct

SEQ ID NO: 87841 - DNA, 25 bp, Homo sapien
aattcacaagagacatgtggtcacc

SEQ ID NO: 87842 - DNA, 25 bp, Homo sapien
aattcacaagagtcatgtggtcacc

SEQ ID NO: 87843 - DNA, 25 bp, Homo sapien
cgctgagagtgtcgtgtctgtcgcc

SEQ ID NO: 87844 - DNA, 25 bp, Homo sapien
cgctgagagtgtggtgtctgtcgcc

SEQ ID NO: 87845 - DNA, 25 bp, Homo sapien
ttcactacgagtttgtgtaatccgc

SEQ ID NO: 87846 - DNA, 25 bp, Homo sapien
ttcactacgagtatgtgtaatccgc

SEQ ID NO: 87847 - DNA, 25 bp, Homo sapien
tatactgtattaggtgtctttccgg

SEQ ID NO: 87848 - DNA, 25 bp, Homo sapien
tatactgtattacgtgtctttccgg

SEQ ID NO: 87849 - DNA, 25 bp, Homo sapien
gtagttttagttactgaaacccgtt

SEQ ID NO: 87850 - DNA, 25 bp, Homo sapien
gtagttttagtttctgaaacccgtt

SEQ ID NO: 87851 - DNA, 25 bp, Homo sapien
gagaataagtttatagtaccacctc

SEQ ID NO: 87852 - DNA, 25 bp, Homo sapien
gagaataagtttttagtaccacctc

SEQ ID NO: 87853 - DNA, 25 bp, Homo sapien
cgtaaataagtttatagttgctctc

SEQ ID NO: 87854 - DNA, 25 bp, Homo sapien
cgtaaataagttaatagttgctctc

SEQ ID NO: 87855 - DNA, 25 bp, Homo sapien
ctaattgtaaagtgtccttgtttct

SEQ ID NO: 87856 - DNA, 25 bp, Homo sapien
ctaattgtaaagagtccttgtttct

SEQ ID NO: 87857 - DNA, 25 bp, Homo sapien
atctgagaaggatcgagtcctcttt

SEQ ID NO: 87858 - DNA, 25 bp, Homo sapien
atctgagaaggaacgagtcctcttt

SEQ ID NO: 87859 - DNA, 25 bp, Homo sapien
ccgtaggaaggtatagagttcccta

SEQ ID NO: 87860 - DNA, 25 bp, Homo sapien
ccgtaggaaggtttagagttcccta

SEQ ID NO: 87861 - DNA, 25 bp, Homo sapien
aggcgtccacgaagtactacactag

SEQ ID NO: 87862 - DNA, 25 bp, Homo sapien
aggcgtccacgatgtactacactag

SEQ ID NO: 87863 - DNA, 25 bp, Homo sapien
gtcctgcgtcccagtacctcggagg

SEQ ID NO: 87864 - DNA, 25 bp, Homo sapien
gtcctgcgtccctgtacctcggagg

SEQ ID NO: 87865 - DNA, 25 bp, Homo sapien
ctcttccagagttcgcgtccgagtc

SEQ ID NO: 87866 - DNA, 25 bp, Homo sapien
ctcttccagagtacgcgtccgagtc

SEQ ID NO: 87867 - DNA, 25 bp, Homo sapien
tcttaacagtatacggtcctacgtc

SEQ ID NO: 87868 - DNA, 25 bp, Homo sapien
tcttaacagtattcggtcctacgtc

SEQ ID NO: 87869 - DNA, 25 bp, Homo sapien
atatcgtctctaccttggtcctgtc

SEQ ID NO: 87870 - DNA, 25 bp, Homo sapien
atatcgtctctagcttggtcctgtc

SEQ ID NO: 87871 - DNA, 25 bp, Homo sapien
aggatccggagtgagtgactcccgc

SEQ ID NO: 87872 - DNA, 25 bp, Homo sapien
aggatccggagtcagtgactcccgc

SEQ ID NO: 87873 - DNA, 25 bp, Homo sapien
ctcccgtcgggaccagtgaacaaca

SEQ ID NO: 87874 - DNA, 25 bp, Homo sapien
ctcccgtcgggagcagtgaacaaca

SEQ ID NO: 87875 - DNA, 25 bp, Homo sapien
ggtccgtctcagtcatgagacacaa

SEQ ID NO: 87876 - DNA, 25 bp, Homo sapien
ggtccgtctcagacatgagacacaa

SEQ ID NO: 87877 - DNA, 25 bp, Homo sapien
gtgtccgttgtacttccggtccctc

SEQ ID NO: 87878 - DNA, 25 bp, Homo sapien
gtgtccgttgtagttccggtccctc

SEQ ID NO: 87879 - DNA, 25 bp, Homo sapien
gttcgtgtgtattttctccctactc

SEQ ID NO: 87880 - DNA, 25 bp, Homo sapien
gttcgtgtgtatattctccctactc

SEQ ID NO: 87881 - DNA, 25 bp, Homo sapien
gtgtctgtcgtgtcttccccgcgac

SEQ ID NO: 87882 - DNA, 25 bp, Homo sapien
gtgtctgtcgtgacttccccgcgac

SEQ ID NO: 87883 - DNA, 25 bp, Homo sapien
gtagtatacgtgtcactttcccacc

SEQ ID NO: 87884 - DNA, 25 bp, Homo sapien
gtagtatacgtgacactttcccacc

SEQ ID NO: 87885 - DNA, 25 bp, Homo sapien
tctggtaggcctggttgctacagtc

SEQ ID NO: 87886 - DNA, 25 bp, Homo sapien
tctggtaggcctcgttgctacagtc

SEQ ID NO: 87887 - DNA, 25 bp, Homo sapien
tctttaagtcttaccgagtccgatg

SEQ ID NO: 87888 - DNA, 25 bp, Homo sapien
tctttaagtctttccgagtccgatg

SEQ ID NO: 87889 - DNA, 25 bp, Homo sapien
ggtctctcttctgacgtcgtttctg

SEQ ID NO: 87890 - DNA, 25 bp, Homo sapien
ggtctctcttctcacgtcgtttctg

SEQ ID NO: 87891 - DNA, 25 bp, Homo sapien
ctccctttcgtcaagtgtcgtccgt

SEQ ID NO: 87892 - DNA, 25 bp, Homo sapien
ctccctttcgtctagtgtcgtccgt

SEQ ID NO: 87893 - DNA, 25 bp, Homo sapien
gaccctatcttcaataagtcgtccg

SEQ ID NO: 87894 - DNA, 25 bp, Homo sapien
gaccctatcttctataagtcgtccg

SEQ ID NO: 87895 - DNA, 25 bp, Homo sapien
aaacgtctttctgtacgtagtttgg

SEQ ID NO: 87896 - DNA, 25 bp, Homo sapien
aaacgtctttctctacgtagtttgg

SEQ ID NO: 87897 - DNA, 25 bp, Homo sapien
acgtaagggtgacgacactttttct

SEQ ID NO: 87898 - DNA, 25 bp, Homo sapien
acgtaagggtgaggacactttttct

SEQ ID NO: 87899 - DNA, 25 bp, Homo sapien
cggaaagaggaggacctgtagtttc

SEQ ID NO: 87900 - DNA, 25 bp, Homo sapien
cggaaagaggagcacctgtagtttc

SEQ ID NO: 87901 - DNA, 25 bp, Homo sapien
ccaaaaagggtcaagctagtaggta

SEQ ID NO: 87902 - DNA, 25 bp, Homo sapien
ccaaaaagggtctagctagtaggta

SEQ ID NO: 87903 - DNA, 25 bp, Homo sapien
acgacggagccgagcagtcatgtaa

SEQ ID NO: 87904 - DNA, 25 bp, Homo sapien
acgacggagccgtgcagtcatgtaa

SEQ ID NO: 87905 - DNA, 25 bp, Homo sapien
ttcttgggtccgtcctacatgagac

SEQ ID NO: 87906 - DNA, 25 bp, Homo sapien
ttcttgggtccgacctacatgagac

SEQ ID NO: 87907 - DNA, 25 bp, Homo sapien
tttgtccggttataacccaggagtc

SEQ ID NO: 87908 - DNA, 25 bp, Homo sapien
tttgtccggttaaaacccaggagtc

SEQ ID NO: 87909 - DNA, 25 bp, Homo sapien
tagtccactgtgctccatgggtgtc

SEQ ID NO: 87910 - DNA, 25 bp, Homo sapien
tagtccactgtggtccatgggtgtc

SEQ ID NO: 87911 - DNA, 25 bp, Homo sapien
taatcatagagtctcggttgatcag

SEQ ID NO: 87912 - DNA, 25 bp, Homo sapien
taatcatagagtgtcggttgatcag

SEQ ID NO: 87913 - DNA, 25 bp, Homo sapien
ggttctaccgtcagccttgagactg

SEQ ID NO: 87914 - DNA, 25 bp, Homo sapien
ggttctaccgtctgccttgagactg

SEQ ID NO: 87915 - DNA, 25 bp, Homo sapien
cccggtatcccgtgcatgaacatgt

SEQ ID NO: 87916 - DNA, 25 bp, Homo sapien
cccggtatcccgagcatgaacatgt

SEQ ID NO: 87917 - DNA, 25 bp, Homo sapien
actgtgcacgtgaagaaataacctt

SEQ ID NO: 87918 - DNA, 25 bp, Homo sapien
actgtgcacgtgtagaaataacctt

SEQ ID NO: 87919 - DNA, 25 bp, Homo sapien
gctcagtgtcaaaagttacacgtgt

SEQ ID NO: 87920 - DNA, 25 bp, Homo sapien
gctcagtgtcaatagttacacgtgt

SEQ ID NO: 87921 - DNA, 25 bp, Homo sapien
gaaatgttcagtaatctcagaaacc

SEQ ID NO: 87922 - DNA, 25 bp, Homo sapien
gaaatgttcagttatctcagaaacc

SEQ ID NO: 87923 - DNA, 25 bp, Homo sapien
tgaaactttctcgactttgataagg

SEQ ID NO: 87924 - DNA, 25 bp, Homo sapien
tgaaactttctccactttgataagg

SEQ ID NO: 87925 - DNA, 25 bp, Homo sapien
tgaccttaatacactatatgcaagg

SEQ ID NO: 87926 - DNA, 25 bp, Homo sapien
tgaccttaatactctatatgcaagg

SEQ ID NO: 87927 - DNA, 25 bp, Homo sapien
ggtcaaccattcatcgtccacggct

SEQ ID NO: 87928 - DNA, 25 bp, Homo sapien
ggtcaaccattcttcgtccacggct

SEQ ID NO: 87929 - DNA, 25 bp, Homo sapien
gcggaaacagatttatctcctacct

SEQ ID NO: 87930 - DNA, 25 bp, Homo sapien
gcggaaacagatatatctcctacct

SEQ ID NO: 87931 - DNA, 25 bp, Homo sapien
atgaacttgtgtatcgtcaccagtt

SEQ ID NO: 87932 - DNA, 25 bp, Homo sapien
atgaacttgtgtttcgtcaccagtt

SEQ ID NO: 87933 - DNA, 25 bp, Homo sapien
aacctattggttagtatccacgtcg

SEQ ID NO: 87934 - DNA, 25 bp, Homo sapien
aacctattggtttgtatccacgtcg

SEQ ID NO: 87935 - DNA, 25 bp, Homo sapien
aactttatcgttaagactccgtgtg

SEQ ID NO: 87936 - DNA, 25 bp, Homo sapien
aactttatcgtttagactccgtgtg

SEQ ID NO: 87937 - DNA, 25 bp, Homo sapien
acacgtcggataagggactcggtgt

SEQ ID NO: 87938 - DNA, 25 bp, Homo sapien
acacgtcggatatgggactcggtgt

SEQ ID NO: 87939 - DNA, 25 bp, Homo sapien
taacacacggtcttgaggagtgtca

SEQ ID NO: 87940 - DNA, 25 bp, Homo sapien
taacacacggtcatgaggagtgtca

SEQ ID NO: 87941 - DNA, 25 bp, Homo sapien
tacatccgctacgtgcgacgcagga

SEQ ID NO: 87942 - DNA, 25 bp, Homo sapien
tacatccgctacctgcgacgcagga

SEQ ID NO: 87943 - DNA, 25 bp, Homo sapien
atacttgacacttaaacccaggacg

SEQ ID NO: 87944 - DNA, 25 bp, Homo sapien
atacttgacactaaaacccaggacg

SEQ ID NO: 87945 - DNA, 25 bp, Homo sapien
cgcctcttttcatgaacctacaaac

SEQ ID NO: 87946 - DNA, 25 bp, Homo sapien
cgcctcttttcaagaacctacaaac

SEQ ID NO: 87947 - DNA, 25 bp, Homo sapien
ctctctatcttgagggacgcccgtc

SEQ ID NO: 87948 - DNA, 25 bp, Homo sapien
ctctctatcttgtgggacgcccgtc

SEQ ID NO: 87949 - DNA, 25 bp, Homo sapien
ctcgtcccacatggataggtctctt

SEQ ID NO: 87950 - DNA, 25 bp, Homo sapien
ctcgtcccacatcgataggtctctt

SEQ ID NO: 87951 - DNA, 25 bp, Homo sapien
ttcagggcctaaactaatcgttgtt

SEQ ID NO: 87952 - DNA, 25 bp, Homo sapien
ttcagggcctaatctaatcgttgtt

SEQ ID NO: 87953 - DNA, 25 bp, Homo sapien
ctaccccgaagtcagactgtgtcgg

SEQ ID NO: 87954 - DNA, 25 bp, Homo sapien
ctaccccgaagtgagactgtgtcgg

SEQ ID NO: 87955 - DNA, 25 bp, Homo sapien
ctccctcaggacttcgcggagtcgg

SEQ ID NO: 87956 - DNA, 25 bp, Homo sapien
ctccctcaggacatcgcggagtcgg

SEQ ID NO: 87957 - DNA, 25 bp, Homo sapien
agtcctagcagtcaccagaggagaa

SEQ ID NO: 87958 - DNA, 25 bp, Homo sapien
agtcctagcagtgaccagaggagaa

SEQ ID NO: 87959 - DNA, 25 bp, Homo sapien
tcacgttctacgtcccaagagttag

SEQ ID NO: 87960 - DNA, 25 bp, Homo sapien
tcacgttctacgacccaagagttag

SEQ ID NO: 87961 - DNA, 25 bp, Homo sapien
cgtgcctatgacgacacaacgggaa

SEQ ID NO: 87962 - DNA, 25 bp, Homo sapien
cgtgcctatgaccacacaacgggaa

SEQ ID NO: 87963 - DNA, 25 bp, Homo sapien
ctgtttctcgtaaccttataaggca

SEQ ID NO: 87964 - DNA, 25 bp, Homo sapien
ctgtttctcgtatccttataaggca

SEQ ID NO: 87965 - DNA, 25 bp, Homo sapien
tattgttctcgagagttaactcccc

SEQ ID NO: 87966 - DNA, 25 bp, Homo sapien
tattgttctcgacagttaactcccc

SEQ ID NO: 87967 - DNA, 25 bp, Homo sapien
atctgtcgatggactacccctaaca

SEQ ID NO: 87968 - DNA, 25 bp, Homo sapien
atctgtcgatggtctacccctaaca

SEQ ID NO: 87969 - DNA, 25 bp, Homo sapien
ttctgtgaagactcgtagccccaca

SEQ ID NO: 87970 - DNA, 25 bp, Homo sapien
ttctgtgaagacacgtagccccaca

SEQ ID NO: 87971 - DNA, 25 bp, Homo sapien
gacgttgaatatggattcctttatc

SEQ ID NO: 87972 - DNA, 25 bp, Homo sapien
gacgttgaatatcgattcctttatc

SEQ ID NO: 87973 - DNA, 25 bp, Homo sapien
acgttgattttgtgacatgttactc

SEQ ID NO: 87974 - DNA, 25 bp, Homo sapien
acgttgattttgagacatgttactc

SEQ ID NO: 87975 - DNA, 25 bp, Homo sapien
gtgttagtttttgcttcaatcactc

SEQ ID NO: 87976 - DNA, 25 bp, Homo sapien
gtgttagtttttccttcaatcactc

SEQ ID NO: 87977 - DNA, 25 bp, Homo sapien
tctgtgttttgtctgtaaaacacta

SEQ ID NO: 87978 - DNA, 25 bp, Homo sapien
tctgtgttttgtgtgtaaaacacta

SEQ ID NO: 87979 - DNA, 25 bp, Homo sapien
gttatggttctattcaataacttcg

SEQ ID NO: 87980 - DNA, 25 bp, Homo sapien
gttatggttctaatcaataacttcg

SEQ ID NO: 87981 - DNA, 25 bp, Homo sapien
taacggggacgactagaccatcgtg

SEQ ID NO: 87982 - DNA, 25 bp, Homo sapien
taacggggacgagtagaccatcgtg

SEQ ID NO: 87983 - DNA, 25 bp, Homo sapien
acaggtgaggtgtaaccggtagtct

SEQ ID NO: 87984 - DNA, 25 bp, Homo sapien
acaggtgaggtgaaaccggtagtct

SEQ ID NO: 87985 - DNA, 25 bp, Homo sapien
cggcgacagcaggtcgctcaggaac

SEQ ID NO: 87986 - DNA, 25 bp, Homo sapien
cggcgacagcagctcgctcaggaac

SEQ ID NO: 87987 - DNA, 25 bp, Homo sapien
cgtcgtcttcctactcccggaggac

SEQ ID NO: 87988 - DNA, 25 bp, Homo sapien
cgtcgtcttccttctcccggaggac

SEQ ID NO: 87989 - DNA, 25 bp, Homo sapien
cccgtgttgccttgtccggtgaggc

SEQ ID NO: 87990 - DNA, 25 bp, Homo sapien
cccgtgttgcctagtccggtgaggc

SEQ ID NO: 87991 - DNA, 25 bp, Homo sapien
ccggctcttctttcggtaccggggt

SEQ ID NO: 87992 - DNA, 25 bp, Homo sapien
ccggctcttcttacggtaccggggt

SEQ ID NO: 87993 - DNA, 25 bp, Homo sapien
ggtcttctcgtgtaaggtcttttcg

SEQ ID NO: 87994 - DNA, 25 bp, Homo sapien
ggtcttctcgtgaaaggtcttttcg

SEQ ID NO: 87995 - DNA, 25 bp, Homo sapien
cgttgtctgtgaagagtttattctc

SEQ ID NO: 87996 - DNA, 25 bp, Homo sapien
cgttgtctgtgatgagtttattctc

SEQ ID NO: 87997 - DNA, 25 bp, Homo sapien
gactagtgtgtcatctttacctcta

SEQ ID NO: 87998 - DNA, 25 bp, Homo sapien
gactagtgtgtcttctttacctcta

SEQ ID NO: 87999 - DNA, 25 bp, Homo sapien
tggattctgacttactgacacggaa

SEQ ID NO: 88000 - DNA, 25 bp, Homo sapien
tggattctgactaactgacacggaa

SEQ ID NO: 88001 - DNA, 25 bp, Homo sapien
cgtaggttcgtgtcctgtgtcttga

SEQ ID NO: 88002 - DNA, 25 bp, Homo sapien
cgtaggttcgtgacctgtgtcttga

SEQ ID NO: 88003 - DNA, 25 bp, Homo sapien
cagggtaacggtaccaggtgttaga

SEQ ID NO: 88004 - DNA, 25 bp, Homo sapien
cagggtaacggttccaggtgttaga

SEQ ID NO: 88005 - DNA, 25 bp, Homo sapien
gatcttgactcgtcactcttttaga

SEQ ID NO: 88006 - DNA, 25 bp, Homo sapien
gatcttgactcgacactcttttaga

SEQ ID NO: 88007 - DNA, 25 bp, Homo sapien
gagttttcgaaacatacaccttaga

SEQ ID NO: 88008 - DNA, 25 bp, Homo sapien
gagttttcgaaagatacaccttaga

SEQ ID NO: 88009 - DNA, 25 bp, Homo sapien
ggtaccctccaaaatcttttcgtag

SEQ ID NO: 88010 - DNA, 25 bp, Homo sapien
ggtaccctccaatatcttttcgtag

SEQ ID NO: 88011 - DNA, 25 bp, Homo sapien
actctcgtcgaaattgtgtgtccgg

SEQ ID NO: 88012 - DNA, 25 bp, Homo sapien
actctcgtcgaatttgtgtgtccgg

SEQ ID NO: 88013 - DNA, 25 bp, Homo sapien
ctatacttaagaactttcagctgga

SEQ ID NO: 88014 - DNA, 25 bp, Homo sapien
ctatacttaagatctttcagctgga

SEQ ID NO: 88015 - DNA, 25 bp, Homo sapien
ttccaactctcttctcagtgtcgga

SEQ ID NO: 88016 - DNA, 25 bp, Homo sapien
ttccaactctctactcagtgtcgga

SEQ ID NO: 88017 - DNA, 25 bp, Homo sapien
tccaacctctggaggacgtcggtgt

SEQ ID NO: 88018 - DNA, 25 bp, Homo sapien
tccaacctctggtggacgtcggtgt

SEQ ID NO: 88019 - DNA, 25 bp, Homo sapien
gtcacggattcttttgtcctgtcac

SEQ ID NO: 88020 - DNA, 25 bp, Homo sapien
gtcacggattctattgtcctgtcac

SEQ ID NO: 88021 - DNA, 25 bp, Homo sapien
tgtcggggaccctacagtcccttcg

SEQ ID NO: 88022 - DNA, 25 bp, Homo sapien
tgtcggggacccaacagtcccttcg

SEQ ID NO: 88023 - DNA, 25 bp, Homo sapien
tgggtcggatctgagacaacctgtg

SEQ ID NO: 88024 - DNA, 25 bp, Homo sapien
tgggtcggatctcagacaacctgtg

SEQ ID NO: 88025 - DNA, 25 bp, Homo sapien
ccgtttcagacgaatctaacccgtt

SEQ ID NO: 88026 - DNA, 25 bp, Homo sapien
ccgtttcagacgtatctaacccgtt

SEQ ID NO: 88027 - DNA, 25 bp, Homo sapien
gtaagtcacgtgtactgacccacta

SEQ ID NO: 88028 - DNA, 25 bp, Homo sapien
gtaagtcacgtgaactgacccacta

SEQ ID NO: 88029 - DNA, 25 bp, Homo sapien
gtcatctgtaggtagacatcgacga

SEQ ID NO: 88030 - DNA, 25 bp, Homo sapien
gtcatctgtaggaagacatcgacga

SEQ ID NO: 88031 - DNA, 25 bp, Homo sapien
tgtccctgtacgtgagccctaccgg

SEQ ID NO: 88032 - DNA, 25 bp, Homo sapien
tgtccctgtacgagagccctaccgg

SEQ ID NO: 88033 - DNA, 25 bp, Homo sapien
tcgcgcgtcatctcgaggcagagga

SEQ ID NO: 88034 - DNA, 25 bp, Homo sapien
tcgcgcgtcatcacgaggcagagga

SEQ ID NO: 88035 - DNA, 25 bp, Homo sapien
actcatcttccgacactgaagaaag

SEQ ID NO: 88036 - DNA, 25 bp, Homo sapien
actcatcttccgtcactgaagaaag

SEQ ID NO: 88037 - DNA, 25 bp, Homo sapien
cctcctcttccgtcatgtaaggtaa

SEQ ID NO: 88038 - DNA, 25 bp, Homo sapien
cctcctcttccgacatgtaaggtaa

SEQ ID NO: 88039 - DNA, 25 bp, Homo sapien
cgttcaggcctgatctagaatgtta

SEQ ID NO: 88040 - DNA, 25 bp, Homo sapien
cgttcaggcctgttctagaatgtta

SEQ ID NO: 88041 - DNA, 25 bp, Homo sapien
ctccggccactgtcacgaaacgtta

SEQ ID NO: 88042 - DNA, 25 bp, Homo sapien
ctccggccactgacacgaaacgtta

SEQ ID NO: 88043 - DNA, 25 bp, Homo sapien
ggtcaggattttgaccagacatatg

SEQ ID NO: 88044 - DNA, 25 bp, Homo sapien
ggtcaggattttcaccagacatatg

SEQ ID NO: 88045 - DNA, 25 bp, Homo sapien
aggattatagccatcgtatattacg

SEQ ID NO: 88046 - DNA, 25 bp, Homo sapien
aggattatagccttcgtatattacg

SEQ ID NO: 88047 - DNA, 25 bp, Homo sapien
accaggagatactgcattctgaaac

SEQ ID NO: 88048 - DNA, 25 bp, Homo sapien
accaggagatacagcattctgaaac

SEQ ID NO: 88049 - DNA, 25 bp, Homo sapien
cccgacctgtctgtgttcgatgtcc

SEQ ID NO: 88050 - DNA, 25 bp, Homo sapien
cccgacctgtctctgttcgatgtcc

SEQ ID NO: 88051 - DNA, 25 bp, Homo sapien
tacatcgtgtactgatcacaccgtt

SEQ ID NO: 88052 - DNA, 25 bp, Homo sapien
tacatcgtgtacagatcacaccgtt

SEQ ID NO: 88053 - DNA, 25 bp, Homo sapien
ccaacctgtctgacggcttcaggtt

SEQ ID NO: 88054 - DNA, 25 bp, Homo sapien
ccaacctgtctgtcggcttcaggtt

SEQ ID NO: 88055 - DNA, 25 bp, Homo sapien
atacctctcttatggactgttatga

SEQ ID NO: 88056 - DNA, 25 bp, Homo sapien
atacctctcttaaggactgttatga

SEQ ID NO: 88057 - DNA, 25 bp, Homo sapien
cacgtcccttcacaactgtgacttg

SEQ ID NO: 88058 - DNA, 25 bp, Homo sapien
cacgtcccttcagaactgtgacttg

SEQ ID NO: 88059 - DNA, 25 bp, Homo sapien
cgggcatcaagaactcgtcacgcag

SEQ ID NO: 88060 - DNA, 25 bp, Homo sapien
cgggcatcaagatctcgtcacgcag

SEQ ID NO: 88061 - DNA, 25 bp, Homo sapien
tccgtgacccgaagggtgtcctctt

SEQ ID NO: 88062 - DNA, 25 bp, Homo sapien
tccgtgacccgatgggtgtcctctt

SEQ ID NO: 88063 - DNA, 25 bp, Homo sapien
gttcaaggtccgaatttgtttccgt

SEQ ID NO: 88064 - DNA, 25 bp, Homo sapien
gttcaaggtccgtatttgtttccgt

SEQ ID NO: 88065 - DNA, 25 bp, Homo sapien
cacggatctttatgtcttcttatgt

SEQ ID NO: 88066 - DNA, 25 bp, Homo sapien
cacggatctttaagtcttcttatgt

SEQ ID NO: 88067 - DNA, 25 bp, Homo sapien
tggtccgtcgttgtctgtcatatgt

SEQ ID NO: 88068 - DNA, 25 bp, Homo sapien
tggtccgtcgttctctgtcatatgt

SEQ ID NO: 88069 - DNA, 25 bp, Homo sapien
ctccgcgtcgtctgcttgtggaagt

SEQ ID NO: 88070 - DNA, 25 bp, Homo sapien
ctccgcgtcgtcagcttgtggaagt

SEQ ID NO: 88071 - DNA, 25 bp, Homo sapien
acttcagcgggtccttgtcgtacag

SEQ ID NO: 88072 - DNA, 25 bp, Homo sapien
acttcagcgggtgcttgtcgtacag

SEQ ID NO: 88073 - DNA, 25 bp, Homo sapien
tgtctactacgtcattgtttgtcta

SEQ ID NO: 88074 - DNA, 25 bp, Homo sapien
tgtctactacgtgattgtttgtcta

SEQ ID NO: 88075 - DNA, 25 bp, Homo sapien
ctgggttgttttacatccttagttc

SEQ ID NO: 88076 - DNA, 25 bp, Homo sapien
ctgggttgtttttcatccttagttc

SEQ ID NO: 88077 - DNA, 25 bp, Homo sapien
tggacggtcttattctgttatcttc

SEQ ID NO: 88078 - DNA, 25 bp, Homo sapien
tggacggtcttaatctgttatcttc

SEQ ID NO: 88079 - DNA, 25 bp, Homo sapien
aatgtgtttatgtcgactggtcttc

SEQ ID NO: 88080 - DNA, 25 bp, Homo sapien
aatgtgtttatgacgactggtcttc

SEQ ID NO: 88081 - DNA, 25 bp, Homo sapien
aagatatttaggaactcgtgtctgc

SEQ ID NO: 88082 - DNA, 25 bp, Homo sapien
aagatatttaggtactcgtgtctgc

SEQ ID NO: 88083 - DNA, 25 bp, Homo sapien
accggcttggtgtgcgtctcctact

SEQ ID NO: 88084 - DNA, 25 bp, Homo sapien
accggcttggtgagcgtctcctact

SEQ ID NO: 88085 - DNA, 25 bp, Homo sapien
ccggttcaggggtcgtcgttcctac

SEQ ID NO: 88086 - DNA, 25 bp, Homo sapien
ccggttcaggggacgtcgttcctac

SEQ ID NO: 88087 - DNA, 25 bp, Homo sapien
cgggtgatccgaagggaacctctcc

SEQ ID NO: 88088 - DNA, 25 bp, Homo sapien
cgggtgatccgatgggaacctctcc

SEQ ID NO: 88089 - DNA, 25 bp, Homo sapien
aggctacccgagagccgaccgagta

SEQ ID NO: 88090 - DNA, 25 bp, Homo sapien
aggctacccgagtgccgaccgagta

SEQ ID NO: 88091 - DNA, 25 bp, Homo sapien
ctcatgaacctcagtggttcctcca

SEQ ID NO: 88092 - DNA, 25 bp, Homo sapien
ctcatgaacctctgtggttcctcca

SEQ ID NO: 88093 - DNA, 25 bp, Homo sapien
ggtagccgtcggacaacgtcgcgca

SEQ ID NO: 88094 - DNA, 25 bp, Homo sapien
ggtagccgtcggtcaacgtcgcgca

SEQ ID NO: 88095 - DNA, 25 bp, Homo sapien
ctccccaacaggtagtcccggagga

SEQ ID NO: 88096 - DNA, 25 bp, Homo sapien
ctccccaacaggaagtcccggagga

SEQ ID NO: 88097 - DNA, 25 bp, Homo sapien
tcagggcgtttgacactttcgacag

SEQ ID NO: 88098 - DNA, 25 bp, Homo sapien
tcagggcgtttgtcactttcgacag

SEQ ID NO: 88099 - DNA, 25 bp, Homo sapien
acgtgcagtttagaccccgactagt

SEQ ID NO: 88100 - DNA, 25 bp, Homo sapien
acgtgcagtttacaccccgactagt

SEQ ID NO: 88101 - DNA, 25 bp, Homo sapien
tcctaacgttacacggtctgtaagt

SEQ ID NO: 88102 - DNA, 25 bp, Homo sapien
tcctaacgttactcggtctgtaagt

SEQ ID NO: 88103 - DNA, 25 bp, Homo sapien
acgggacaaaggactcgtttgttgt

SEQ ID NO: 88104 - DNA, 25 bp, Homo sapien
acgggacaaaggtctcgtttgttgt

SEQ ID NO: 88105 - DNA, 25 bp, Homo sapien
gatggcttcaccttattctctcttg

SEQ ID NO: 88106 - DNA, 25 bp, Homo sapien
gatggcttcaccatattctctcttg

SEQ ID NO: 88107 - DNA, 25 bp, Homo sapien
agggtctcctcgtaactctttactc

SEQ ID NO: 88108 - DNA, 25 bp, Homo sapien
agggtctcctcgaaactctttactc

SEQ ID NO: 88109 - DNA, 25 bp, Homo sapien
ggcttggtctccaacatctactacc

SEQ ID NO: 88110 - DNA, 25 bp, Homo sapien
ggcttggtctcctacatctactacc

SEQ ID NO: 88111 - DNA, 25 bp, Homo sapien
ttctggtacacctaggtcgacttag

SEQ ID NO: 88112 - DNA, 25 bp, Homo sapien
ttctggtacaccaaggtcgacttag

SEQ ID NO: 88113 - DNA, 25 bp, Homo sapien
gttactgtgtctctaggcgtcagga

SEQ ID NO: 88114 - DNA, 25 bp, Homo sapien
gttactgtgtctgtaggcgtcagga

SEQ ID NO: 88115 - DNA, 25 bp, Homo sapien
ctgggcttctctgtcggactccagg

SEQ ID NO: 88116 - DNA, 25 bp, Homo sapien
ctgggcttctctctcggactccagg

SEQ ID NO: 88117 - DNA, 25 bp, Homo sapien
ggcgtcagtctcgttcccgaccagg

SEQ ID NO: 88118 - DNA, 25 bp, Homo sapien
ggcgtcagtctccttcccgaccagg

SEQ ID NO: 88119 - DNA, 25 bp, Homo sapien
gggttattagcgataaccacggagg

SEQ ID NO: 88120 - DNA, 25 bp, Homo sapien
gggttattagcgttaaccacggagg

SEQ ID NO: 88121 - DNA, 25 bp, Homo sapien
gggatgactgtcttaatcacagatg

SEQ ID NO: 88122 - DNA, 25 bp, Homo sapien
gggatgactgtcataatcacagatg

SEQ ID NO: 88123 - DNA, 25 bp, Homo sapien
cgtagtagaagttactcacaatagt

SEQ ID NO: 88124 - DNA, 25 bp, Homo sapien
cgtagtagaagtaactcacaatagt

SEQ ID NO: 88125 - DNA, 25 bp, Homo sapien
actactaccagagatacaacgcaag

SEQ ID NO: 88126 - DNA, 25 bp, Homo sapien
actactaccagacatacaacgcaag

SEQ ID NO: 88127 - DNA, 25 bp, Homo sapien
cttttactattgagttctgacaaag

SEQ ID NO: 88128 - DNA, 25 bp, Homo sapien
cttttactattgtgttctgacaaag

SEQ ID NO: 88129 - DNA, 25 bp, Homo sapien
atgctgctcaaatagtccttcattg

SEQ ID NO: 88130 - DNA, 25 bp, Homo sapien
atgctgctcaaaaagtccttcattg

SEQ ID NO: 88131 - DNA, 25 bp, Homo sapien
tggaatcctataaagtttcacaaag

SEQ ID NO: 88132 - DNA, 25 bp, Homo sapien
tggaatcctatatagtttcacaaag

SEQ ID NO: 88133 - DNA, 25 bp, Homo sapien
tggtatgtcataaaggttcccataa

SEQ ID NO: 88134 - DNA, 25 bp, Homo sapien
tggtatgtcatataggttcccataa

SEQ ID NO: 88135 - DNA, 25 bp, Homo sapien
atgttttaaacgaattccgaaacag

SEQ ID NO: 88136 - DNA, 25 bp, Homo sapien
atgttttaaacgtattccgaaacag

SEQ ID NO: 88137 - DNA, 25 bp, Homo sapien
cgccccgtgccctgggcggaccgac

SEQ ID NO: 88138 - DNA, 25 bp, Homo sapien
cgccccgtgcccagggcggaccgac

SEQ ID NO: 88139 - DNA, 25 bp, Homo sapien
tctcttgacccgtatcggtctcgac

SEQ ID NO: 88140 - DNA, 25 bp, Homo sapien
tctcttgacccgaatcggtctcgac

SEQ ID NO: 88141 - DNA, 25 bp, Homo sapien
tatctacagtcgtggaaacggcggc

SEQ ID NO: 88142 - DNA, 25 bp, Homo sapien
tatctacagtcgaggaaacggcggc

SEQ ID NO: 88143 - DNA, 25 bp, Homo sapien
gaacttcatccgtaacacaagggtt

SEQ ID NO: 88144 - DNA, 25 bp, Homo sapien
gaacttcatccgaaacacaagggtt

SEQ ID NO: 88145 - DNA, 25 bp, Homo sapien
gacaaggagtcaaccacacgggttt

SEQ ID NO: 88146 - DNA, 25 bp, Homo sapien
gacaaggagtcatccacacgggttt

SEQ ID NO: 88147 - DNA, 25 bp, Homo sapien
cgaacaagggtttccacttaagtaa

SEQ ID NO: 88148 - DNA, 25 bp, Homo sapien
cgaacaagggttaccacttaagtaa

SEQ ID NO: 88149 - DNA, 25 bp, Homo sapien
aggcacggtgtgtatcactttttat

SEQ ID NO: 88150 - DNA, 25 bp, Homo sapien
aggcacggtgtgaatcactttttat

SEQ ID NO: 88151 - DNA, 25 bp, Homo sapien
aacaccgtgtcgacgtaattgtttt

SEQ ID NO: 88152 - DNA, 25 bp, Homo sapien
aacaccgtgtcgtcgtaattgtttt

SEQ ID NO: 88153 - DNA, 25 bp, Homo sapien
gttgccacgtgtatctaattcccta

SEQ ID NO: 88154 - DNA, 25 bp, Homo sapien
gttgccacgtgtttctaattcccta

SEQ ID NO: 88155 - DNA, 25 bp, Homo sapien
ttgaagacaaaagaccctcgacgta

SEQ ID NO: 88156 - DNA, 25 bp, Homo sapien
ttgaagacaaaacaccctcgacgta

SEQ ID NO: 88157 - DNA, 25 bp, Homo sapien
actagattaaaaaggtctatcgtac

SEQ ID NO: 88158 - DNA, 25 bp, Homo sapien
actagattaaaatggtctatcgtac

SEQ ID NO: 88159 - DNA, 25 bp, Homo sapien
acgatttacgagtagtaatcatacc

SEQ ID NO: 88160 - DNA, 25 bp, Homo sapien
acgatttacgagaagtaatcatacc

SEQ ID NO: 88161 - DNA, 25 bp, Homo sapien
catttagtcacgagtttatctatga

SEQ ID NO: 88162 - DNA, 25 bp, Homo sapien
catttagtcacgtgtttatctatga

SEQ ID NO: 88163 - DNA, 25 bp, Homo sapien
agattgacatatgtcatatacgaac

SEQ ID NO: 88164 - DNA, 25 bp, Homo sapien
agattgacatatctcatatacgaac

SEQ ID NO: 88165 - DNA, 25 bp, Homo sapien
ggagacatcccgtacttcgttcaaa

SEQ ID NO: 88166 - DNA, 25 bp, Homo sapien
ggagacatcccgaacttcgttcaaa

SEQ ID NO: 88167 - DNA, 25 bp, Homo sapien
tatcggttcaagctatcgtcaaagg

SEQ ID NO: 88168 - DNA, 25 bp, Homo sapien
tatcggttcaaggtatcgtcaaagg

SEQ ID NO: 88169 - DNA, 25 bp, Homo sapien
cgttcgtcctactatcgtaagagaa

SEQ ID NO: 88170 - DNA, 25 bp, Homo sapien
cgttcgtcctacaatcgtaagagaa

SEQ ID NO: 88171 - DNA, 25 bp, Homo sapien
tgcccttctgttcaagtacatgaaa

SEQ ID NO: 88172 - DNA, 25 bp, Homo sapien
tgcccttctgttgaagtacatgaaa

SEQ ID NO: 88173 - DNA, 25 bp, Homo sapien
tgtgaagtgtagtcacaaaacttca

SEQ ID NO: 88174 - DNA, 25 bp, Homo sapien
tgtgaagtgtagacacaaaacttca

SEQ ID NO: 88175 - DNA, 25 bp, Homo sapien
gaaggtaacacactataatactaga

SEQ ID NO: 88176 - DNA, 25 bp, Homo sapien
gaaggtaacacagtataatactaga

SEQ ID NO: 88177 - DNA, 25 bp, Homo sapien
ggtaggtaaccacgaaggacgacga

SEQ ID NO: 88178 - DNA, 25 bp, Homo sapien
ggtaggtaaccaggaaggacgacga

SEQ ID NO: 88179 - DNA, 25 bp, Homo sapien
gagccaaggacggtcagagagtgtg

SEQ ID NO: 88180 - DNA, 25 bp, Homo sapien
gagccaaggacgctcagagagtgtg

SEQ ID NO: 88181 - DNA, 25 bp, Homo sapien
catacagaagtaaaggacacctaca

SEQ ID NO: 88182 - DNA, 25 bp, Homo sapien
catacagaagtataggacacctaca

SEQ ID NO: 88183 - DNA, 25 bp, Homo sapien
atagagtacggtaatggaccccgag

SEQ ID NO: 88184 - DNA, 25 bp, Homo sapien
atagagtacggttatggaccccgag

SEQ ID NO: 88185 - DNA, 25 bp, Homo sapien
gactctagggtttggtttccctact

SEQ ID NO: 88186 - DNA, 25 bp, Homo sapien
gactctagggttaggtttccctact

SEQ ID NO: 88187 - DNA, 25 bp, Homo sapien
gacttcgtgtcatttgcgttctccc

SEQ ID NO: 88188 - DNA, 25 bp, Homo sapien
gacttcgtgtcaattgcgttctccc

SEQ ID NO: 88189 - DNA, 25 bp, Homo sapien
tcttaggacgtgaagggttcagagc

SEQ ID NO: 88190 - DNA, 25 bp, Homo sapien
tcttaggacgtgtagggttcagagc

SEQ ID NO: 88191 - DNA, 25 bp, Homo sapien
tgggtgtcctacgtgtctagataga

SEQ ID NO: 88192 - DNA, 25 bp, Homo sapien
tgggtgtcctacctgtctagataga

SEQ ID NO: 88193 - DNA, 25 bp, Homo sapien
ctggtaggtgctccttccgacgttg

SEQ ID NO: 88194 - DNA, 25 bp, Homo sapien
ctggtaggtgctgcttccgacgttg

SEQ ID NO: 88195 - DNA, 25 bp, Homo sapien
cgtgtagtaaactgtcatctttatt

SEQ ID NO: 88196 - DNA, 25 bp, Homo sapien
cgtgtagtaaacagtcatctttatt

SEQ ID NO: 88197 - DNA, 25 bp, Homo sapien
cgtattgacaacctgtacggtttct

SEQ ID NO: 88198 - DNA, 25 bp, Homo sapien
cgtattgacaacgtgtacggtttct

SEQ ID NO: 88199 - DNA, 25 bp, Homo sapien
acactttttatacggtacgatcttg

SEQ ID NO: 88200 - DNA, 25 bp, Homo sapien
acactttttatagggtacgatcttg

SEQ ID NO: 88201 - DNA, 25 bp, Homo sapien
tccatctccataggtagagtccctg

SEQ ID NO: 88202 - DNA, 25 bp, Homo sapien
tccatctccatacgtagagtccctg

SEQ ID NO: 88203 - DNA, 25 bp, Homo sapien
tatgaaatcccgttgggatcaaccg

SEQ ID NO: 88204 - DNA, 25 bp, Homo sapien
tatgaaatcccgatgggatcaaccg

SEQ ID NO: 88205 - DNA, 25 bp, Homo sapien
aggtgctgtcaaggttgtacctcgg

SEQ ID NO: 88206 - DNA, 25 bp, Homo sapien
aggtgctgtcaacgttgtacctcgg

SEQ ID NO: 88207 - DNA, 25 bp, Homo sapien
ggggttcctccagtggtacctctgt

SEQ ID NO: 88208 - DNA, 25 bp, Homo sapien
ggggttcctccactggtacctctgt

SEQ ID NO: 88209 - DNA, 25 bp, Homo sapien
gtgtccgacttcctctgaccttctg

SEQ ID NO: 88210 - DNA, 25 bp, Homo sapien
gtgtccgacttcgtctgaccttctg

SEQ ID NO: 88211 - DNA, 25 bp, Homo sapien
actcgacgttcacgtacaaacttac

SEQ ID NO: 88212 - DNA, 25 bp, Homo sapien
actcgacgttcaggtacaaacttac

SEQ ID NO: 88213 - DNA, 25 bp, Homo sapien
taacgagactatgttttactcaagt

SEQ ID NO: 88214 - DNA, 25 bp, Homo sapien
taacgagactatcttttactcaagt

SEQ ID NO: 88215 - DNA, 25 bp, Homo sapien
gttccatagaccttttacttcgacg

SEQ ID NO: 88216 - DNA, 25 bp, Homo sapien
gttccatagaccatttacttcgacg

SEQ ID NO: 88217 - DNA, 25 bp, Homo sapien
cttcgctcagatcatcctctgagtc

SEQ ID NO: 88218 - DNA, 25 bp, Homo sapien
cttcgctcagatgatcctctgagtc

SEQ ID NO: 88219 - DNA, 25 bp, Homo sapien
aggacccagtgtaaacaccgactcc

SEQ ID NO: 88220 - DNA, 25 bp, Homo sapien
aggacccagtgttaacaccgactcc

SEQ ID NO: 88221 - DNA, 25 bp, Homo sapien
aggaaacagacttcctcgctgtcct

SEQ ID NO: 88222 - DNA, 25 bp, Homo sapien
aggaaacagactacctcgctgtcct

SEQ ID NO: 88223 - DNA, 25 bp, Homo sapien
ttacgcacaactgtttcgattgtcg

SEQ ID NO: 88224 - DNA, 25 bp, Homo sapien
ttacgcacaactctttcgattgtcg

SEQ ID NO: 88225 - DNA, 25 bp, Homo sapien
tactccttttaagtttccggtgtac

SEQ ID NO: 88226 - DNA, 25 bp, Homo sapien
tactccttttaactttccggtgtac

SEQ ID NO: 88227 - DNA, 25 bp, Homo sapien
ctaatctactttgtccgtgtgtacg

SEQ ID NO: 88228 - DNA, 25 bp, Homo sapien
ctaatctactttctccgtgtgtacg

SEQ ID NO: 88229 - DNA, 25 bp, Homo sapien
ggggagtttatttcttcctctcttc

SEQ ID NO: 88230 - DNA, 25 bp, Homo sapien
ggggagtttattacttcctctcttc

SEQ ID NO: 88231 - DNA, 25 bp, Homo sapien
ggtgtccatcctacatcgacgtctc

SEQ ID NO: 88232 - DNA, 25 bp, Homo sapien
ggtgtccatccttcatcgacgtctc

SEQ ID NO: 88233 - DNA, 25 bp, Homo sapien
tttcgattccgacagaaaccgaccc

SEQ ID NO: 88234 - DNA, 25 bp, Homo sapien
tttcgattccgagagaaaccgaccc

SEQ ID NO: 88235 - DNA, 25 bp, Homo sapien
tccgattcaatagaccttacgggac

SEQ ID NO: 88236 - DNA, 25 bp, Homo sapien
tccgattcaatacaccttacgggac

SEQ ID NO: 88237 - DNA, 25 bp, Homo sapien
agtcttccgactgtaccctggcgac

SEQ ID NO: 88238 - DNA, 25 bp, Homo sapien
agtcttccgactctaccctggcgac

SEQ ID NO: 88239 - DNA, 25 bp, Homo sapien
cgtagttcgaaccatggctcgagcc

SEQ ID NO: 88240 - DNA, 25 bp, Homo sapien
cgtagttcgaacgatggctcgagcc

SEQ ID NO: 88241 - DNA, 25 bp, Homo sapien
tccttagcaccagtgtctaaccgac

SEQ ID NO: 88242 - DNA, 25 bp, Homo sapien
tccttagcaccactgtctaaccgac

SEQ ID NO: 88243 - DNA, 25 bp, Homo sapien
cgtcctctctaaattggtctccgct

SEQ ID NO: 88244 - DNA, 25 bp, Homo sapien
cgtcctctctaatttggtctccgct

SEQ ID NO: 88245 - DNA, 25 bp, Homo sapien
acttagaaccggtcccgagtccctt

SEQ ID NO: 88246 - DNA, 25 bp, Homo sapien
acttagaaccggacccgagtccctt

SEQ ID NO: 88247 - DNA, 25 bp, Homo sapien
acgacgtccgggctcgcgagcttca

SEQ ID NO: 88248 - DNA, 25 bp, Homo sapien
acgacgtccggggtcgcgagcttca

SEQ ID NO: 88249 - DNA, 25 bp, Homo sapien
aatcgaggtctacgagagacttgag

SEQ ID NO: 88250 - DNA, 25 bp, Homo sapien
aatcgaggtctaggagagacttgag

SEQ ID NO: 88251 - DNA, 25 bp, Homo sapien
aagactggttcagataccgtagaca

SEQ ID NO: 88252 - DNA, 25 bp, Homo sapien
aagactggttcacataccgtagaca

SEQ ID NO: 88253 - DNA, 25 bp, Homo sapien
gaatagttctcgagttcactcgagg

SEQ ID NO: 88254 - DNA, 25 bp, Homo sapien
gaatagttctcgtgttcactcgagg

SEQ ID NO: 88255 - DNA, 25 bp, Homo sapien
ccgcgtcagaatggtttgtccggcg

SEQ ID NO: 88256 - DNA, 25 bp, Homo sapien
ccgcgtcagaatcgtttgtccggcg

SEQ ID NO: 88257 - DNA, 25 bp, Homo sapien
cgttgtattcctttctgtagtgggt

SEQ ID NO: 88258 - DNA, 25 bp, Homo sapien
cgttgtattcctatctgtagtgggt

SEQ ID NO: 88259 - DNA, 25 bp, Homo sapien
ggtttggacttcatcatttaagaac

SEQ ID NO: 88260 - DNA, 25 bp, Homo sapien
ggtttggacttcttcatttaagaac

SEQ ID NO: 88261 - DNA, 25 bp, Homo sapien
gtatgtataaagacgaaacttccaa

SEQ ID NO: 88262 - DNA, 25 bp, Homo sapien
gtatgtataaagtcgaaacttccaa

SEQ ID NO: 88263 - DNA, 25 bp, Homo sapien
gtaaataaagtgttagggaccttga

SEQ ID NO: 88264 - DNA, 25 bp, Homo sapien
gtaaataaagtgatagggaccttga

SEQ ID NO: 88265 - DNA, 25 bp, Homo sapien
ttaaccatggtaaaggaccggtcat

SEQ ID NO: 88266 - DNA, 25 bp, Homo sapien
ttaaccatggtataggaccggtcat

SEQ ID NO: 88267 - DNA, 25 bp, Homo sapien
atttgtttcgggtaggacaccagtc

SEQ ID NO: 88268 - DNA, 25 bp, Homo sapien
atttgtttcgggaaggacaccagtc

SEQ ID NO: 88269 - DNA, 25 bp, Homo sapien
ctcgtcgttcggagggacactcagc

SEQ ID NO: 88270 - DNA, 25 bp, Homo sapien
ctcgtcgttcggtgggacactcagc

SEQ ID NO: 88271 - DNA, 25 bp, Homo sapien
gtccctatcaggtatgtcacaccga

SEQ ID NO: 88272 - DNA, 25 bp, Homo sapien
gtccctatcaggaatgtcacaccga

SEQ ID NO: 88273 - DNA, 25 bp, Homo sapien
gaactagaccctgaaagtcccgtcc

SEQ ID NO: 88274 - DNA, 25 bp, Homo sapien
gaactagaccctcaaagtcccgtcc

SEQ ID NO: 88275 - DNA, 25 bp, Homo sapien
ttaagctctctggtcgctcggtccg

SEQ ID NO: 88276 - DNA, 25 bp, Homo sapien
ttaagctctctgctcgctcggtccg

SEQ ID NO: 88277 - DNA, 25 bp, Homo sapien
accgtacctccgtcgcggtagtctc

SEQ ID NO: 88278 - DNA, 25 bp, Homo sapien
accgtacctccgacgcggtagtctc

SEQ ID NO: 88279 - DNA, 25 bp, Homo sapien
ttcaagagccccttctgcggtgccg

SEQ ID NO: 88280 - DNA, 25 bp, Homo sapien
ttcaagagccccatctgcggtgccg

SEQ ID NO: 88281 - DNA, 25 bp, Homo sapien
tgaccggcggcggccggaggtgcgg

SEQ ID NO: 88282 - DNA, 25 bp, Homo sapien
tgaccggcggcgcccggaggtgcgg

SEQ ID NO: 88283 - DNA, 25 bp, Homo sapien
actccgggtggacttcggccttgtg

SEQ ID NO: 88284 - DNA, 25 bp, Homo sapien
actccgggtggagttcggccttgtg

SEQ ID NO: 88285 - DNA, 25 bp, Homo sapien
tcgagcccggggtcacggtcctttc

SEQ ID NO: 88286 - DNA, 25 bp, Homo sapien
tcgagcccggggacacggtcctttc

SEQ ID NO: 88287 - DNA, 25 bp, Homo sapien
catacctgggagaccacgttcaatt

SEQ ID NO: 88288 - DNA, 25 bp, Homo sapien
catacctgggagtccacgttcaatt

SEQ ID NO: 88289 - DNA, 25 bp, Homo sapien
accgtagtatacacgccctttattt

SEQ ID NO: 88290 - DNA, 25 bp, Homo sapien
accgtagtatactcgccctttattt

SEQ ID NO: 88291 - DNA, 25 bp, Homo sapien
gagatgacacttgaacctgttttat

SEQ ID NO: 88292 - DNA, 25 bp, Homo sapien
gagatgacacttcaacctgttttat

SEQ ID NO: 88293 - DNA, 25 bp, Homo sapien
tgagtttcaaataacctgacttgtt

SEQ ID NO: 88294 - DNA, 25 bp, Homo sapien
tgagtttcaaattacctgacttgtt

SEQ ID NO: 88295 - DNA, 25 bp, Homo sapien
cgttgatcaaagtacgtctttgttc

SEQ ID NO: 88296 - DNA, 25 bp, Homo sapien
cgttgatcaaagaacgtctttgttc

SEQ ID NO: 88297 - DNA, 25 bp, Homo sapien
aaacctccaaccattgttaagatac

SEQ ID NO: 88298 - DNA, 25 bp, Homo sapien
aaacctccaacctttgttaagatac

SEQ ID NO: 88299 - DNA, 25 bp, Homo sapien
acacgtggagatttgtgtcctgagg

SEQ ID NO: 88300 - DNA, 25 bp, Homo sapien
acacgtggagatatgtgtcctgagg

SEQ ID NO: 88301 - DNA, 25 bp, Homo sapien
aacatcaagagtcttcgttgtggat

SEQ ID NO: 88302 - DNA, 25 bp, Homo sapien
aacatcaagagtgttcgttgtggat

SEQ ID NO: 88303 - DNA, 25 bp, Homo sapien
tcaagtttaggtccatcatgaacga

SEQ ID NO: 88304 - DNA, 25 bp, Homo sapien
tcaagtttaggtgcatcatgaacga

SEQ ID NO: 88305 - DNA, 25 bp, Homo sapien
ttccactgttggtttttgtcgagaa

SEQ ID NO: 88306 - DNA, 25 bp, Homo sapien
ttccactgttggattttgtcgagaa

SEQ ID NO: 88307 - DNA, 25 bp, Homo sapien
ctccgttttgactcgtggtatcaaa

SEQ ID NO: 88308 - DNA, 25 bp, Homo sapien
ctccgttttgacacgtggtatcaaa

SEQ ID NO: 88309 - DNA, 25 bp, Homo sapien
ttgctacttccgtcgtttattgaac

SEQ ID NO: 88310 - DNA, 25 bp, Homo sapien
ttgctacttccgacgtttattgaac

SEQ ID NO: 88311 - DNA, 25 bp, Homo sapien
gagttccggactgacaccacgagta

SEQ ID NO: 88312 - DNA, 25 bp, Homo sapien
gagttccggactcacaccacgagta

SEQ ID NO: 88313 - DNA, 25 bp, Homo sapien
gtgttgtttcgactgaaccgaagag

SEQ ID NO: 88314 - DNA, 25 bp, Homo sapien
gtgttgtttcgagtgaaccgaagag

SEQ ID NO: 88315 - DNA, 25 bp, Homo sapien
tttattacggacgtgaaccactgtt

SEQ ID NO: 88316 - DNA, 25 bp, Homo sapien
tttattacggacctgaaccactgtt

SEQ ID NO: 88317 - DNA, 25 bp, Homo sapien
tttagtctgaccagatacaatcgtt

SEQ ID NO: 88318 - DNA, 25 bp, Homo sapien
tttagtctgacctgatacaatcgtt

SEQ ID NO: 88319 - DNA, 25 bp, Homo sapien
gggcgtctatcgtattcaaaatttg

SEQ ID NO: 88320 - DNA, 25 bp, Homo sapien
gggcgtctatcgaattcaaaatttg

SEQ ID NO: 88321 - DNA, 25 bp, Homo sapien
tttacagtctctcgttcaatctgtg

SEQ ID NO: 88322 - DNA, 25 bp, Homo sapien
tttacagtctctggttcaatctgtg

SEQ ID NO: 88323 - DNA, 25 bp, Homo sapien
tgaagtctcgttgaagaaccgtcgt

SEQ ID NO: 88324 - DNA, 25 bp, Homo sapien
tgaagtctcgttcaagaaccgtcgt

SEQ ID NO: 88325 - DNA, 25 bp, Homo sapien
tcctgacacgttcctcaaacctgtg

SEQ ID NO: 88326 - DNA, 25 bp, Homo sapien
tcctgacacgttgctcaaacctgtg

SEQ ID NO: 88327 - DNA, 25 bp, Homo sapien
acttttgaaccgtatgtgacatttg

SEQ ID NO: 88328 - DNA, 25 bp, Homo sapien
acttttgaaccgaatgtgacatttg

SEQ ID NO: 88329 - DNA, 25 bp, Homo sapien
ttcaatactgtacttgtaatgtctg

SEQ ID NO: 88330 - DNA, 25 bp, Homo sapien
ttcaatactgtagttgtaatgtctg

SEQ ID NO: 88331 - DNA, 25 bp, Homo sapien
tccgctacgagagacaatggacctc

SEQ ID NO: 88332 - DNA, 25 bp, Homo sapien
tccgctacgagacacaatggacctc

SEQ ID NO: 88333 - DNA, 25 bp, Homo sapien
agtagtgagcaacgtagctggccat

SEQ ID NO: 88334 - DNA, 25 bp, Homo sapien
agtagtgagcaaggtagctggccat

SEQ ID NO: 88335 - DNA, 25 bp, Homo sapien
taggggaccgaacgtcttttaggtc

SEQ ID NO: 88336 - DNA, 25 bp, Homo sapien
taggggaccgaaggtcttttaggtc

SEQ ID NO: 88337 - DNA, 25 bp, Homo sapien
ggacccttgtcgacgactctctgtt

SEQ ID NO: 88338 - DNA, 25 bp, Homo sapien
ggacccttgtcgtcgactctctgtt

SEQ ID NO: 88339 - DNA, 25 bp, Homo sapien
gaggtcccgcgtcaggtatcctggt

SEQ ID NO: 88340 - DNA, 25 bp, Homo sapien
gaggtcccgcgtgaggtatcctggt

SEQ ID NO: 88341 - DNA, 25 bp, Homo sapien
ggagtctccgtctttgacccgtatt

SEQ ID NO: 88342 - DNA, 25 bp, Homo sapien
ggagtctccgtcattgacccgtatt

SEQ ID NO: 88343 - DNA, 25 bp, Homo sapien
tggggttttcacagtccctttccgt

SEQ ID NO: 88344 - DNA, 25 bp, Homo sapien
tggggttttcactgtccctttccgt

SEQ ID NO: 88345 - DNA, 25 bp, Homo sapien
gtgtgagtaactacttcttttgaca

SEQ ID NO: 88346 - DNA, 25 bp, Homo sapien
gtgtgagtaacttcttcttttgaca

SEQ ID NO: 88347 - DNA, 25 bp, Homo sapien
taggagacgttaggagtcttctttc

SEQ ID NO: 88348 - DNA, 25 bp, Homo sapien
taggagacgttacgagtcttctttc

SEQ ID NO: 88349 - DNA, 25 bp, Homo sapien
taagtggtacacaccgtgtcaaact

SEQ ID NO: 88350 - DNA, 25 bp, Homo sapien
taagtggtacactccgtgtcaaact

SEQ ID NO: 88351 - DNA, 25 bp, Homo sapien
ccaactacaaagtacgggaccgacc

SEQ ID NO: 88352 - DNA, 25 bp, Homo sapien
ccaactacaaagaacgggaccgacc

SEQ ID NO: 88353 - DNA, 25 bp, Homo sapien
tcacaaaaagacgtaaggtaccacc

SEQ ID NO: 88354 - DNA, 25 bp, Homo sapien
tcacaaaaagacctaaggtaccacc

SEQ ID NO: 88355 - DNA, 25 bp, Homo sapien
aggttaccaaagtttatgtctaacc

SEQ ID NO: 88356 - DNA, 25 bp, Homo sapien
aggttaccaaagattatgtctaacc

SEQ ID NO: 88357 - DNA, 25 bp, Homo sapien
acagaactccagtaacttgtaatag

SEQ ID NO: 88358 - DNA, 25 bp, Homo sapien
acagaactccagaaacttgtaatag

SEQ ID NO: 88359 - DNA, 25 bp, Homo sapien
tcgagtacccggaaccagagacaca

SEQ ID NO: 88360 - DNA, 25 bp, Homo sapien
tcgagtacccggtaccagagacaca

SEQ ID NO: 88361 - DNA, 25 bp, Homo sapien
ccgagtctcgcgaacagaacaggaa

SEQ ID NO: 88362 - DNA, 25 bp, Homo sapien
ccgagtctcgcgtacagaacaggaa

SEQ ID NO: 88363 - DNA, 25 bp, Homo sapien
agtgtgacgaacagaaccggtgagt

SEQ ID NO: 88364 - DNA, 25 bp, Homo sapien
agtgtgacgaactgaaccggtgagt

SEQ ID NO: 88365 - DNA, 25 bp, Homo sapien
agaggaggactaagttcgtcgaaac

SEQ ID NO: 88366 - DNA, 25 bp, Homo sapien
agaggaggactatgttcgtcgaaac

SEQ ID NO: 88367 - DNA, 25 bp, Homo sapien
caagtgtctaaaactactgatgaaa

SEQ ID NO: 88368 - DNA, 25 bp, Homo sapien
caagtgtctaaatctactgatgaaa

SEQ ID NO: 88369 - DNA, 25 bp, Homo sapien
ccaagatcttcaaagagtccgaaat

SEQ ID NO: 88370 - DNA, 25 bp, Homo sapien
ccaagatcttcatagagtccgaaat

SEQ ID NO: 88371 - DNA, 25 bp, Homo sapien
aacttcgtctcgtgtgtgttaaatt

SEQ ID NO: 88372 - DNA, 25 bp, Homo sapien
aacttcgtctcgagtgtgttaaatt

SEQ ID NO: 88373 - DNA, 25 bp, Homo sapien
cggtattatgtgtatgtcaccttat

SEQ ID NO: 88374 - DNA, 25 bp, Homo sapien
cggtattatgtgaatgtcaccttat

SEQ ID NO: 88375 - DNA, 25 bp, Homo sapien
ttcgagtctacgactgtccttttat

SEQ ID NO: 88376 - DNA, 25 bp, Homo sapien
ttcgagtctacgtctgtccttttat

SEQ ID NO: 88377 - DNA, 25 bp, Homo sapien
atgtgacaccgattgtaacttttcg

SEQ ID NO: 88378 - DNA, 25 bp, Homo sapien
atgtgacaccgaatgtaacttttcg

SEQ ID NO: 88379 - DNA, 25 bp, Homo sapien
tcgtaatacgattagtgttcttttc

SEQ ID NO: 88380 - DNA, 25 bp, Homo sapien
tcgtaatacgataagtgttcttttc

SEQ ID NO: 88381 - DNA, 25 bp, Homo sapien
cctacacccggtgtgtgctcttctt

SEQ ID NO: 88382 - DNA, 25 bp, Homo sapien
cctacacccggtctgtgctcttctt

SEQ ID NO: 88383 - DNA, 25 bp, Homo sapien
acctcccgtgtctgtgttgttacct

SEQ ID NO: 88384 - DNA, 25 bp, Homo sapien
acctcccgtgtcagtgttgttacct

SEQ ID NO: 88385 - DNA, 25 bp, Homo sapien
atatttctgtcgtctaagagtgact

SEQ ID NO: 88386 - DNA, 25 bp, Homo sapien
atatttctgtcgactaagagtgact

SEQ ID NO: 88387 - DNA, 25 bp, Homo sapien
cgattgtacactcctaattaggtca

SEQ ID NO: 88388 - DNA, 25 bp, Homo sapien
cgattgtacactgctaattaggtca

SEQ ID NO: 88389 - DNA, 25 bp, Homo sapien
cgtatctcaaaatgttcagtgtcta

SEQ ID NO: 88390 - DNA, 25 bp, Homo sapien
cgtatctcaaaaagttcagtgtcta

SEQ ID NO: 88391 - DNA, 25 bp, Homo sapien
agtccacggaaggtttcgctactct

SEQ ID NO: 88392 - DNA, 25 bp, Homo sapien
agtccacggaagctttcgctactct

SEQ ID NO: 88393 - DNA, 25 bp, Homo sapien
gacaaggaaccaaacatttgtataa

SEQ ID NO: 88394 - DNA, 25 bp, Homo sapien
gacaaggaaccatacatttgtataa

SEQ ID NO: 88395 - DNA, 25 bp, Homo sapien
aatcgtattacttaccacgtatgcg

SEQ ID NO: 88396 - DNA, 25 bp, Homo sapien
aatcgtattactaaccacgtatgcg

SEQ ID NO: 88397 - DNA, 25 bp, Homo sapien
ggtggacgtccctctaccagagagg

SEQ ID NO: 88398 - DNA, 25 bp, Homo sapien
ggtggacgtcccactaccagagagg

SEQ ID NO: 88399 - DNA, 25 bp, Homo sapien
ctttaggtcccgactcttcggagta

SEQ ID NO: 88400 - DNA, 25 bp, Homo sapien
ctttaggtcccgtctcttcggagta

SEQ ID NO: 88401 - DNA, 25 bp, Homo sapien
gatttcgtgtctttttcggggtgtc

SEQ ID NO: 88402 - DNA, 25 bp, Homo sapien
gatttcgtgtctatttcggggtgtc

SEQ ID NO: 88403 - DNA, 25 bp, Homo sapien
atacttgaccaatttctggataggt

SEQ ID NO: 88404 - DNA, 25 bp, Homo sapien
atacttgaccaaattctggataggt

SEQ ID NO: 88405 - DNA, 25 bp, Homo sapien
cgtagtgaccaatgattctgacttt

SEQ ID NO: 88406 - DNA, 25 bp, Homo sapien
cgtagtgaccaaagattctgacttt

SEQ ID NO: 88407 - DNA, 25 bp, Homo sapien
gtggctcaaacattcgtatactcat

SEQ ID NO: 88408 - DNA, 25 bp, Homo sapien
gtggctcaaacaatcgtatactcat

SEQ ID NO: 88409 - DNA, 25 bp, Homo sapien
tttcgtgttttacagggtcaactat

SEQ ID NO: 88410 - DNA, 25 bp, Homo sapien
tttcgtgttttagagggtcaactat

SEQ ID NO: 88411 - DNA, 25 bp, Homo sapien
cgtgtcttggtggtcgacccgaact

SEQ ID NO: 88412 - DNA, 25 bp, Homo sapien
cgtgtcttggtgctcgacccgaact

SEQ ID NO: 88413 - DNA, 25 bp, Homo sapien
tgtagatttaaggtccgatccaggt

SEQ ID NO: 88414 - DNA, 25 bp, Homo sapien
tgtagatttaagctccgatccaggt

SEQ ID NO: 88415 - DNA, 25 bp, Homo sapien
tcggtgtcggggacccgtccttact

SEQ ID NO: 88416 - DNA, 25 bp, Homo sapien
tcggtgtcggggtcccgtccttact

SEQ ID NO: 88417 - DNA, 25 bp, Homo sapien
gctgtaccggtgtcctcgccgtctt

SEQ ID NO: 88418 - DNA, 25 bp, Homo sapien
gctgtaccggtgacctcgccgtctt

SEQ ID NO: 88419 - DNA, 25 bp, Homo sapien
aaacagagtcgtaccggacagtacc

SEQ ID NO: 88420 - DNA, 25 bp, Homo sapien
aaacagagtcgttccggacagtacc

SEQ ID NO: 88421 - DNA, 25 bp, Homo sapien
tgatagagtatttccacatacgttt

SEQ ID NO: 88422 - DNA, 25 bp, Homo sapien
tgatagagtattaccacatacgttt

SEQ ID NO: 88423 - DNA, 25 bp, Homo sapien
ggagaagtataaacgccagacttag

SEQ ID NO: 88424 - DNA, 25 bp, Homo sapien
ggagaagtataatcgccagacttag

SEQ ID NO: 88425 - DNA, 25 bp, Homo sapien
acaggaggaagacgtaactaatatc

SEQ ID NO: 88426 - DNA, 25 bp, Homo sapien
acaggaggaagaggtaactaatatc

SEQ ID NO: 88427 - DNA, 25 bp, Homo sapien
acaagaaccggtagaagcacaaacg

SEQ ID NO: 88428 - DNA, 25 bp, Homo sapien
acaagaaccggttgaagcacaaacg

SEQ ID NO: 88429 - DNA, 25 bp, Homo sapien
atagacgtgagttctacaaggaatc

SEQ ID NO: 88430 - DNA, 25 bp, Homo sapien
atagacgtgagtactacaaggaatc

SEQ ID NO: 88431 - DNA, 25 bp, Homo sapien
agtactcgtatttagggtctctagc

SEQ ID NO: 88432 - DNA, 25 bp, Homo sapien
agtactcgtattaagggtctctagc

SEQ ID NO: 88433 - DNA, 25 bp, Homo sapien
tcctgtgttcgagaccggacctctc

SEQ ID NO: 88434 - DNA, 25 bp, Homo sapien
tcctgtgttcgacaccggacctctc

SEQ ID NO: 88435 - DNA, 25 bp, Homo sapien
tggggcttcgacaccgagactgtcc

SEQ ID NO: 88436 - DNA, 25 bp, Homo sapien
tggggcttcgactccgagactgtcc

SEQ ID NO: 88437 - DNA, 25 bp, Homo sapien
tgagggtcactagagacgatgtcac

SEQ ID NO: 88438 - DNA, 25 bp, Homo sapien
tgagggtcactacagacgatgtcac

SEQ ID NO: 88439 - DNA, 25 bp, Homo sapien
gggtacgacacagagagacgacacc

SEQ ID NO: 88440 - DNA, 25 bp, Homo sapien
gggtacgacacacagagacgacacc

SEQ ID NO: 88441 - DNA, 25 bp, Homo sapien
gtctacgcgcgcgaggacaacgacg

SEQ ID NO: 88442 - DNA, 25 bp, Homo sapien
gtctacgcgcgccaggacaacgacg

SEQ ID NO: 88443 - DNA, 25 bp, Homo sapien
tgtcgctagtgtacccggttcacga

SEQ ID NO: 88444 - DNA, 25 bp, Homo sapien
tgtcgctagtgttcccggttcacga

SEQ ID NO: 88445 - DNA, 25 bp, Homo sapien
atgtctcaaggtattctgatactaa

SEQ ID NO: 88446 - DNA, 25 bp, Homo sapien
atgtctcaaggttttctgatactaa

SEQ ID NO: 88447 - DNA, 25 bp, Homo sapien
acttcaaaagttttctacttcggag

SEQ ID NO: 88448 - DNA, 25 bp, Homo sapien
acttcaaaagttatctacttcggag

SEQ ID NO: 88449 - DNA, 25 bp, Homo sapien
ccctcgtgtctttacgtcactcaag

SEQ ID NO: 88450 - DNA, 25 bp, Homo sapien
ccctcgtgtcttaacgtcactcaag

SEQ ID NO: 88451 - DNA, 25 bp, Homo sapien
cactacggtgacagtgtgctcagac

SEQ ID NO: 88452 - DNA, 25 bp, Homo sapien
cactacggtgactgtgtgctcagac

SEQ ID NO: 88453 - DNA, 25 bp, Homo sapien
cgcggcgcgcgcttttcgtctagcg

SEQ ID NO: 88454 - DNA, 25 bp, Homo sapien
cgcggcgcgcgcatttcgtctagcg

SEQ ID NO: 88455 - DNA, 25 bp, Homo sapien
ttccgtgacccgaagggtgtcctct

SEQ ID NO: 88456 - DNA, 25 bp, Homo sapien
ttccgtgacccgtagggtgtcctct

SEQ ID NO: 88457 - DNA, 25 bp, Homo sapien
cgtcgggaactgagagtgtgtcctt

SEQ ID NO: 88458 - DNA, 25 bp, Homo sapien
cgtcgggaactgtgagtgtgtcctt

SEQ ID NO: 88459 - DNA, 25 bp, Homo sapien
atttcaaaggacaagtgtgtctctc

SEQ ID NO: 88460 - DNA, 25 bp, Homo sapien
atttcaaaggactagtgtgtctctc

SEQ ID NO: 88461 - DNA, 25 bp, Homo sapien
tctcgtgggcgtcgtgtctcggtcc

SEQ ID NO: 88462 - DNA, 25 bp, Homo sapien
tctcgtgggcgtggtgtctcggtcc

SEQ ID NO: 88463 - DNA, 25 bp, Homo sapien
attcctcgagtagttgttatacacc

SEQ ID NO: 88464 - DNA, 25 bp, Homo sapien
attcctcgagtacttgttatacacc

SEQ ID NO: 88465 - DNA, 25 bp, Homo sapien
aaatatacttcttgcgtggtttccc

SEQ ID NO: 88466 - DNA, 25 bp, Homo sapien
aaatatacttctagcgtggtttccc

SEQ ID NO: 88467 - DNA, 25 bp, Homo sapien
aaagtttgtattaactgaaaccgcc

SEQ ID NO: 88468 - DNA, 25 bp, Homo sapien
aaagtttgtatttactgaaaccgcc

SEQ ID NO: 88469 - DNA, 25 bp, Homo sapien
gtaaatgatgttaaagtacccgatc

SEQ ID NO: 88470 - DNA, 25 bp, Homo sapien
gtaaatgatgtttaagtacccgatc

SEQ ID NO: 88471 - DNA, 25 bp, Homo sapien
gtaatatacttttagatctggtctc

SEQ ID NO: 88472 - DNA, 25 bp, Homo sapien
gtaatatactttaagatctggtctc

SEQ ID NO: 88473 - DNA, 25 bp, Homo sapien
aaatttacgaagtgaggttgtttct

SEQ ID NO: 88474 - DNA, 25 bp, Homo sapien
aaatttacgaagagaggttgtttct

SEQ ID NO: 88475 - DNA, 25 bp, Homo sapien
gatgttagagtagaaggtctccttt

SEQ ID NO: 88476 - DNA, 25 bp, Homo sapien
gatgttagagtacaaggtctccttt

SEQ ID NO: 88477 - DNA, 25 bp, Homo sapien
acgtatcaaggttaagattcctctc

SEQ ID NO: 88478 - DNA, 25 bp, Homo sapien
acgtatcaaggtaaagattcctctc

SEQ ID NO: 88479 - DNA, 25 bp, Homo sapien
acaccagaggtacagtattaccaag

SEQ ID NO: 88480 - DNA, 25 bp, Homo sapien
acaccagaggtagagtattaccaag

SEQ ID NO: 88481 - DNA, 25 bp, Homo sapien
tcctgacacccgtacgtctcggagg

SEQ ID NO: 88482 - DNA, 25 bp, Homo sapien
tcctgacacccgaacgtctcggagg

SEQ ID NO: 88483 - DNA, 25 bp, Homo sapien
ctctgtcactgatacgccagacgtt

SEQ ID NO: 88484 - DNA, 25 bp, Homo sapien
ctctgtcactgaaacgccagacgtt

SEQ ID NO: 88485 - DNA, 25 bp, Homo sapien
acttaacagtatgagttctgagtct

SEQ ID NO: 88486 - DNA, 25 bp, Homo sapien
acttaacagtatcagttctgagtct

SEQ ID NO: 88487 - DNA, 25 bp, Homo sapien
aagtgtcaacacacgatctctgtct

SEQ ID NO: 88488 - DNA, 25 bp, Homo sapien
aagtgtcaacactcgatctctgtct

SEQ ID NO: 88489 - DNA, 25 bp, Homo sapien
atggatgcagaggacgtgccccgct

SEQ ID NO: 88490 - DNA, 25 bp, Homo sapien
atggatgcagagcacgtgccccgct

SEQ ID NO: 88491 - DNA, 25 bp, Homo sapien
ccacgtgtcggacatgactcctaca

SEQ ID NO: 88492 - DNA, 25 bp, Homo sapien
ccacgtgtcggagatgactcctaca

SEQ ID NO: 88493 - DNA, 25 bp, Homo sapien
aggccgtctccgacctggcactaga

SEQ ID NO: 88494 - DNA, 25 bp, Homo sapien
aggccgtctccgtcctggcactaga

SEQ ID NO: 88495 - DNA, 25 bp, Homo sapien
tcagtctgaagtaccggtcacatct

SEQ ID NO: 88496 - DNA, 25 bp, Homo sapien
tcagtctgaagttccggtcacatct

SEQ ID NO: 88497 - DNA, 25 bp, Homo sapien
gtaacgtcgtgagtgtctccccagc

SEQ ID NO: 88498 - DNA, 25 bp, Homo sapien
gtaacgtcgtgactgtctccccagc

SEQ ID NO: 88499 - DNA, 25 bp, Homo sapien
tcgtgtttcgtgctttcctccggac

SEQ ID NO: 88500 - DNA, 25 bp, Homo sapien
tcgtgtttcgtggtttcctccggac

SEQ ID NO: 88501 - DNA, 25 bp, Homo sapien
cggtagacgtggtcactttccccct

SEQ ID NO: 88502 - DNA, 25 bp, Homo sapien
cggtagacgtggacactttccccct

SEQ ID NO: 88503 - DNA, 25 bp, Homo sapien
gctagagggcatggttcgcgacttt

SEQ ID NO: 88504 - DNA, 25 bp, Homo sapien
gctagagggcatcgttcgcgacttt

SEQ ID NO: 88505 - DNA, 25 bp, Homo sapien
tctcttcgagactttccggccatgt

SEQ ID NO: 88506 - DNA, 25 bp, Homo sapien
tctcttcgagacattccggccatgt

SEQ ID NO: 88507 - DNA, 25 bp, Homo sapien
ggtacgtaccattggcgacttactg

SEQ ID NO: 88508 - DNA, 25 bp, Homo sapien
ggtacgtaccataggcgacttactg

SEQ ID NO: 88509 - DNA, 25 bp, Homo sapien
gcctctttcgtatacgtacgttctt

SEQ ID NO: 88510 - DNA, 25 bp, Homo sapien
gcctctttcgtaaacgtacgttctt

SEQ ID NO: 88511 - DNA, 25 bp, Homo sapien
ctctgtcttacgattaacgttccgt

SEQ ID NO: 88512 - DNA, 25 bp, Homo sapien
ctctgtcttacgtttaacgttccgt

SEQ ID NO: 88513 - DNA, 25 bp, Homo sapien
actctgtcttactttgtgtataggt

SEQ ID NO: 88514 - DNA, 25 bp, Homo sapien
actctgtcttacattgtgtataggt

SEQ ID NO: 88515 - DNA, 25 bp, Homo sapien
gggaaccggtgtcgactttgtgttt

SEQ ID NO: 88516 - DNA, 25 bp, Homo sapien
gggaaccggtgtggactttgtgttt

SEQ ID NO: 88517 - DNA, 25 bp, Homo sapien
ggtaactgagggacctgtggtatct

SEQ ID NO: 88518 - DNA, 25 bp, Homo sapien
ggtaactgagggtcctgtggtatct

SEQ ID NO: 88519 - DNA, 25 bp, Homo sapien
caaaagtaggtgcaagcgagggact

SEQ ID NO: 88520 - DNA, 25 bp, Homo sapien
caaaagtaggtggaagcgagggact

SEQ ID NO: 88521 - DNA, 25 bp, Homo sapien
tacaggagtcagaaggagtccggaa

SEQ ID NO: 88522 - DNA, 25 bp, Homo sapien
tacaggagtcagtaggagtccggaa

SEQ ID NO: 88523 - DNA, 25 bp, Homo sapien
tgttcgggctcatcctccggagact

SEQ ID NO: 88524 - DNA, 25 bp, Homo sapien
tgttcgggctcaacctccggagact

SEQ ID NO: 88525 - DNA, 25 bp, Homo sapien
tgtctgtgaattaccgcaggacgta

SEQ ID NO: 88526 - DNA, 25 bp, Homo sapien
tgtctgtgaatttccgcaggacgta

SEQ ID NO: 88527 - DNA, 25 bp, Homo sapien
attcccagggtcgtagtcgggtgac

SEQ ID NO: 88528 - DNA, 25 bp, Homo sapien
attcccagggtcctagtcgggtgac

SEQ ID NO: 88529 - DNA, 25 bp, Homo sapien
ctgttccgtggttccgtgttgacca

SEQ ID NO: 88530 - DNA, 25 bp, Homo sapien
ctgttccgtggtaccgtgttgacca

SEQ ID NO: 88531 - DNA, 25 bp, Homo sapien
ggtcactcctaacctacttgatccg

SEQ ID NO: 88532 - DNA, 25 bp, Homo sapien
ggtcactcctaagctacttgatccg

SEQ ID NO: 88533 - DNA, 25 bp, Homo sapien
tccgtgttcccgtaacaccgaattg

SEQ ID NO: 88534 - DNA, 25 bp, Homo sapien
tccgtgttcccgaaacaccgaattg

SEQ ID NO: 88535 - DNA, 25 bp, Homo sapien
actttcgactgtcagaaaaacctcg

SEQ ID NO: 88536 - DNA, 25 bp, Homo sapien
actttcgactgtgagaaaaacctcg

SEQ ID NO: 88537 - DNA, 25 bp, Homo sapien
ctcgagaggaaggatgtaacgtcgt

SEQ ID NO: 88538 - DNA, 25 bp, Homo sapien
ctcgagaggaagcatgtaacgtcgt

SEQ ID NO: 88539 - DNA, 25 bp, Homo sapien
gaaatggtactagattcacataacc

SEQ ID NO: 88540 - DNA, 25 bp, Homo sapien
gaaatggtactacattcacataacc

SEQ ID NO: 88541 - DNA, 25 bp, Homo sapien
aaacttatttcatctatgataatag

SEQ ID NO: 88542 - DNA, 25 bp, Homo sapien
aaacttatttcaactatgataatag

SEQ ID NO: 88543 - DNA, 25 bp, Homo sapien
acgacttaataccaacttgccagtg

SEQ ID NO: 88544 - DNA, 25 bp, Homo sapien
acgacttaatacgaacttgccagtg

SEQ ID NO: 88545 - DNA, 25 bp, Homo sapien
ggtcagaccctacatgtcccgagac

SEQ ID NO: 88546 - DNA, 25 bp, Homo sapien
ggtcagaccctagatgtcccgagac

SEQ ID NO: 88547 - DNA, 25 bp, Homo sapien
gggagagtccacgtttccctaccgt

SEQ ID NO: 88548 - DNA, 25 bp, Homo sapien
gggagagtccacctttccctaccgt

SEQ ID NO: 88549 - DNA, 25 bp, Homo sapien
gtctgaattggttttcacacacgat

SEQ ID NO: 88550 - DNA, 25 bp, Homo sapien
gtctgaattggtattcacacacgat

SEQ ID NO: 88551 - DNA, 25 bp, Homo sapien
tatcaattggtttacataccgacag

SEQ ID NO: 88552 - DNA, 25 bp, Homo sapien
tatcaattggttaacataccgacag

SEQ ID NO: 88553 - DNA, 25 bp, Homo sapien
agttttatgttcagacaccgacgtg

SEQ ID NO: 88554 - DNA, 25 bp, Homo sapien
agttttatgttctgacaccgacgtg

SEQ ID NO: 88555 - DNA, 25 bp, Homo sapien
accacctcggagtcgggaccggtag

SEQ ID NO: 88556 - DNA, 25 bp, Homo sapien
accacctcggagacgggaccggtag

SEQ ID NO: 88557 - DNA, 25 bp, Homo sapien
aacacacggtcttgaggagtgtcac

SEQ ID NO: 88558 - DNA, 25 bp, Homo sapien
aacacacggtctagaggagtgtcac

SEQ ID NO: 88559 - DNA, 25 bp, Homo sapien
ccaagtccggtcttggacaccggac

SEQ ID NO: 88560 - DNA, 25 bp, Homo sapien
ccaagtccggtcatggacaccggac

SEQ ID NO: 88561 - DNA, 25 bp, Homo sapien
ctttcggactcaaaccctcggacgt

SEQ ID NO: 88562 - DNA, 25 bp, Homo sapien
ctttcggactcataccctcggacgt

SEQ ID NO: 88563 - DNA, 25 bp, Homo sapien
ctactgtgttcgaaaacctcgaata

SEQ ID NO: 88564 - DNA, 25 bp, Homo sapien
ctactgtgttcgtaaacctcgaata

SEQ ID NO: 88565 - DNA, 25 bp, Homo sapien
ctccttttggtcaagactccgactt

SEQ ID NO: 88566 - DNA, 25 bp, Homo sapien
ctccttttggtctagactccgactt

SEQ ID NO: 88567 - DNA, 25 bp, Homo sapien
ccgtcttcaatagtcgtaggacctt

SEQ ID NO: 88568 - DNA, 25 bp, Homo sapien
ccgtcttcaatactcgtaggacctt

SEQ ID NO: 88569 - DNA, 25 bp, Homo sapien
ttcttaggctcaagataatgtcttt

SEQ ID NO: 88570 - DNA, 25 bp, Homo sapien
ttcttaggctcatgataatgtcttt

SEQ ID NO: 88571 - DNA, 25 bp, Homo sapien
ctttcaccccaaagacgatgtgtta

SEQ ID NO: 88572 - DNA, 25 bp, Homo sapien
ctttcaccccaatgacgatgtgtta

SEQ ID NO: 88573 - DNA, 25 bp, Homo sapien
gtccctccgacgtcacgagtggtgc

SEQ ID NO: 88574 - DNA, 25 bp, Homo sapien
gtccctccgacgacacgagtggtgc

SEQ ID NO: 88575 - DNA, 25 bp, Homo sapien
ggtccaccagtcactgagcggacac

SEQ ID NO: 88576 - DNA, 25 bp, Homo sapien
ggtccaccagtctctgagcggacac

SEQ ID NO: 88577 - DNA, 25 bp, Homo sapien
tcgacatcgacgtttcctaaggtaa

SEQ ID NO: 88578 - DNA, 25 bp, Homo sapien
tcgacatcgacgattcctaaggtaa

SEQ ID NO: 88579 - DNA, 25 bp, Homo sapien
ctgtcctggtacctcccgacgggaa

SEQ ID NO: 88580 - DNA, 25 bp, Homo sapien
ctgtcctggtacgtcccgacgggaa

SEQ ID NO: 88581 - DNA, 25 bp, Homo sapien
gctgattactataccttacaaggaa

SEQ ID NO: 88582 - DNA, 25 bp, Homo sapien
gctgattactattccttacaaggaa

SEQ ID NO: 88583 - DNA, 25 bp, Homo sapien
aatgattctgatattagatccacag

SEQ ID NO: 88584 - DNA, 25 bp, Homo sapien
aatgattctgattttagatccacag

SEQ ID NO: 88585 - DNA, 25 bp, Homo sapien
atcttctactggagcccctagaccg

SEQ ID NO: 88586 - DNA, 25 bp, Homo sapien
atcttctactggtgcccctagaccg

SEQ ID NO: 88587 - DNA, 25 bp, Homo sapien
ttctgtaggaggtcggtcctccaca

SEQ ID NO: 88588 - DNA, 25 bp, Homo sapien
ttctgtaggaggacggtcctccaca

SEQ ID NO: 88589 - DNA, 25 bp, Homo sapien
cagttcgttttggatctcctttata

SEQ ID NO: 88590 - DNA, 25 bp, Homo sapien
cagttcgttttgcatctcctttata

SEQ ID NO: 88591 - DNA, 25 bp, Homo sapien
caattcattttgtcacatgttgtag

SEQ ID NO: 88592 - DNA, 25 bp, Homo sapien
caattcattttgacacatgttgtag

SEQ ID NO: 88593 - DNA, 25 bp, Homo sapien
agttttctcttggagttcaattctc

SEQ ID NO: 88594 - DNA, 25 bp, Homo sapien
agttttctcttgcagttcaattctc

SEQ ID NO: 88595 - DNA, 25 bp, Homo sapien
ttgttttgtccgttgtaaaacacta

SEQ ID NO: 88596 - DNA, 25 bp, Homo sapien
ttgttttgtccgatgtaaaacacta

SEQ ID NO: 88597 - DNA, 25 bp, Homo sapien
ttatttctgtcatgtcaaaactcta

SEQ ID NO: 88598 - DNA, 25 bp, Homo sapien
ttatttctgtcaagtcaaaactcta

SEQ ID NO: 88599 - DNA, 25 bp, Homo sapien
tatattcaagactttagaccatgtg

SEQ ID NO: 88600 - DNA, 25 bp, Homo sapien
tatattcaagacattagaccatgtg

SEQ ID NO: 88601 - DNA, 25 bp, Homo sapien
ttctagctggataataaccggatct

SEQ ID NO: 88602 - DNA, 25 bp, Homo sapien
ttctagctggattataaccggatct

SEQ ID NO: 88603 - DNA, 25 bp, Homo sapien
ggcgtcggcgagttaccacaggaac

SEQ ID NO: 88604 - DNA, 25 bp, Homo sapien
ggcgtcggcgagataccacaggaac

SEQ ID NO: 88605 - DNA, 25 bp, Homo sapien
gtcgtcttcctactcccggaggacg

SEQ ID NO: 88606 - DNA, 25 bp, Homo sapien
gtcgtcttcctagtcccggaggacg

SEQ ID NO: 88607 - DNA, 25 bp, Homo sapien
gaccgtcttcctcagtccgggatgc

SEQ ID NO: 88608 - DNA, 25 bp, Homo sapien
gaccgtcttcctgagtccgggatgc

SEQ ID NO: 88609 - DNA, 25 bp, Homo sapien
cccggctcttctttcggtaccgggg

SEQ ID NO: 88610 - DNA, 25 bp, Homo sapien
cccggctcttctatcggtaccgggg

SEQ ID NO: 88611 - DNA, 25 bp, Homo sapien
tacgttctcttttagagtcttatgg

SEQ ID NO: 88612 - DNA, 25 bp, Homo sapien
tacgttctctttaagagtcttatgg

SEQ ID NO: 88613 - DNA, 25 bp, Homo sapien
gttgacttagatgaggtcgttcttc

SEQ ID NO: 88614 - DNA, 25 bp, Homo sapien
gttgacttagatcaggtcgttcttc

SEQ ID NO: 88615 - DNA, 25 bp, Homo sapien
ttacagtggtcagtattatcgttac

SEQ ID NO: 88616 - DNA, 25 bp, Homo sapien
ttacagtggtcactattatcgttac

SEQ ID NO: 88617 - DNA, 25 bp, Homo sapien
tgttatctctgcagtacaaacgaaa

SEQ ID NO: 88618 - DNA, 25 bp, Homo sapien
tgttatctctgctgtacaaacgaaa

SEQ ID NO: 88619 - DNA, 25 bp, Homo sapien
tcgatctgtctgcagctgtgtttga

SEQ ID NO: 88620 - DNA, 25 bp, Homo sapien
tcgatctgtctggagctgtgtttga

SEQ ID NO: 88621 - DNA, 25 bp, Homo sapien
agggtagacggtccacaggtttcga

SEQ ID NO: 88622 - DNA, 25 bp, Homo sapien
agggtagacggtgcacaggtttcga

SEQ ID NO: 88623 - DNA, 25 bp, Homo sapien
ggtcctcgacggtcccgtctttgac

SEQ ID NO: 88624 - DNA, 25 bp, Homo sapien
ggtcctcgacggacccgtctttgac

SEQ ID NO: 88625 - DNA, 25 bp, Homo sapien
gagttttcacatttacccgtttaga

SEQ ID NO: 88626 - DNA, 25 bp, Homo sapien
gagttttcacatatacccgtttaga

SEQ ID NO: 88627 - DNA, 25 bp, Homo sapien
ggccctcacacaaatcctgtgtgtg

SEQ ID NO: 88628 - DNA, 25 bp, Homo sapien
ggccctcacacatatcctgtgtgtg

SEQ ID NO: 88629 - DNA, 25 bp, Homo sapien
cttacgtctcgagtttgtgtgtttg

SEQ ID NO: 88630 - DNA, 25 bp, Homo sapien
cttacgtctcgactttgtgtgtttg

SEQ ID NO: 88631 - DNA, 25 bp, Homo sapien
ctcgtttaagacctttcatcaggag

SEQ ID NO: 88632 - DNA, 25 bp, Homo sapien
ctcgtttaagacgtttcatcaggag

SEQ ID NO: 88633 - DNA, 25 bp, Homo sapien
tcttctaggcttttcactccggagt

SEQ ID NO: 88634 - DNA, 25 bp, Homo sapien
tcttctaggcttatcactccggagt

SEQ ID NO: 88635 - DNA, 25 bp, Homo sapien
cattaccctgttacgatctcggtgt

SEQ ID NO: 88636 - DNA, 25 bp, Homo sapien
cattaccctgtttcgatctcggtgt

SEQ ID NO: 88637 - DNA, 25 bp, Homo sapien
tacccgacttcttggtgacctggac

SEQ ID NO: 88638 - DNA, 25 bp, Homo sapien
tacccgacttctaggtgacctggac

SEQ ID NO: 88639 - DNA, 25 bp, Homo sapien
tgtcccggagacgatggctccttcg

SEQ ID NO: 88640 - DNA, 25 bp, Homo sapien
tgtcccggagaccatggctccttcg

SEQ ID NO: 88641 - DNA, 25 bp, Homo sapien
tcgggtgcccgtggtcgaaccttcg

SEQ ID NO: 88642 - DNA, 25 bp, Homo sapien
tcgggtgcccgtcgtcgaaccttcg

SEQ ID NO: 88643 - DNA, 25 bp, Homo sapien
tgtttacagacgtatacaaccggtg

SEQ ID NO: 88644 - DNA, 25 bp, Homo sapien
tgtttacagacgaatacaaccggtg

SEQ ID NO: 88645 - DNA, 25 bp, Homo sapien
taagtcacgtgtactgacccactat

SEQ ID NO: 88646 - DNA, 25 bp, Homo sapien
taagtcacgtgttctgacccactat

SEQ ID NO: 88647 - DNA, 25 bp, Homo sapien
gtacagtttggagactatcactagt

SEQ ID NO: 88648 - DNA, 25 bp, Homo sapien
gtacagtttggacactatcactagt

SEQ ID NO: 88649 - DNA, 25 bp, Homo sapien
aggcgcacttcgtggccctctacat

SEQ ID NO: 88650 - DNA, 25 bp, Homo sapien
aggcgcacttcgaggccctctacat

SEQ ID NO: 88651 - DNA, 25 bp, Homo sapien
cactgcctcatctacggcaagagga

SEQ ID NO: 88652 - DNA, 25 bp, Homo sapien
cactgcctcatcaacggcaagagga

SEQ ID NO: 88653 - DNA, 25 bp, Homo sapien
ccgtccttaccgaacctgaaagaag

SEQ ID NO: 88654 - DNA, 25 bp, Homo sapien
ccgtccttaccgtacctgaaagaag

SEQ ID NO: 88655 - DNA, 25 bp, Homo sapien
cctccttccgcgttggtaagaacag

SEQ ID NO: 88656 - DNA, 25 bp, Homo sapien
cctccttccgcgatggtaagaacag

SEQ ID NO: 88657 - DNA, 25 bp, Homo sapien
acgttcaggaccagaccaaataaat

SEQ ID NO: 88658 - DNA, 25 bp, Homo sapien
acgttcaggacctgaccaaataaat

SEQ ID NO: 88659 - DNA, 25 bp, Homo sapien
cgtctctgcccctcgaagagacata

SEQ ID NO: 88660 - DNA, 25 bp, Homo sapien
cgtctctgccccacgaagagacata

SEQ ID NO: 88661 - DNA, 25 bp, Homo sapien
tggtcaggggtttcgacaaaaatag

SEQ ID NO: 88662 - DNA, 25 bp, Homo sapien
tggtcaggggttacgacaaaaatag

SEQ ID NO: 88663 - DNA, 25 bp, Homo sapien
tgaagtttagaccaacataactacg

SEQ ID NO: 88664 - DNA, 25 bp, Homo sapien
tgaagtttagacgaacataactacg

SEQ ID NO: 88665 - DNA, 25 bp, Homo sapien
accagagacttcagcatttgagaag

SEQ ID NO: 88666 - DNA, 25 bp, Homo sapien
accagagacttctgcatttgagaag

SEQ ID NO: 88667 - DNA, 25 bp, Homo sapien
aaaccgagatttgtttacgggtacc

SEQ ID NO: 88668 - DNA, 25 bp, Homo sapien
aaaccgagatttctttacgggtacc

SEQ ID NO: 88669 - DNA, 25 bp, Homo sapien
tacgatcgtccttacaacgaccgtt

SEQ ID NO: 88670 - DNA, 25 bp, Homo sapien
tacgatcgtcctaacaacgaccgtt

SEQ ID NO: 88671 - DNA, 25 bp, Homo sapien
cgtcgtcgtgtccacctgtccggtt

SEQ ID NO: 88672 - DNA, 25 bp, Homo sapien
cgtcgtcgtgtcgacctgtccggtt

SEQ ID NO: 88673 - DNA, 25 bp, Homo sapien
tgtctacttatgcacgtgtgtgtga

SEQ ID NO: 88674 - DNA, 25 bp, Homo sapien
tgtctacttatggacgtgtgtgtga

SEQ ID NO: 88675 - DNA, 25 bp, Homo sapien
acgtcctttctacagacgcggagga

SEQ ID NO: 88676 - DNA, 25 bp, Homo sapien
acgtcctttctagagacgcggagga

SEQ ID NO: 88677 - DNA, 25 bp, Homo sapien
gaactacgacagagtcgtcgagcag

SEQ ID NO: 88678 - DNA, 25 bp, Homo sapien
gaactacgacagtgtcgtcgagcag

SEQ ID NO: 88679 - DNA, 25 bp, Homo sapien
gccggacccgaaagggtcgactacc

SEQ ID NO: 88680 - DNA, 25 bp, Homo sapien
gccggacccgaatgggtcgactacc

SEQ ID NO: 88681 - DNA, 25 bp, Homo sapien
gttccaggttcatcttatgttccct

SEQ ID NO: 88682 - DNA, 25 bp, Homo sapien
gttccaggttcaacttatgttccct

SEQ ID NO: 88683 - DNA, 25 bp, Homo sapien
ctggagatcttattcttcttacggt

SEQ ID NO: 88684 - DNA, 25 bp, Homo sapien
ctggagatcttaatcttcttacggt

SEQ ID NO: 88685 - DNA, 25 bp, Homo sapien
cctagcccgtctaggcttcataggt

SEQ ID NO: 88686 - DNA, 25 bp, Homo sapien
cctagcccgtcttggcttcataggt

SEQ ID NO: 88687 - DNA, 25 bp, Homo sapien
cacaccacctcttgattgtggaact

SEQ ID NO: 88688 - DNA, 25 bp, Homo sapien
cacaccacctctagattgtggaact

SEQ ID NO: 88689 - DNA, 25 bp, Homo sapien
acttctagtcgctacgtttgagtaa

SEQ ID NO: 88690 - DNA, 25 bp, Homo sapien
acttctagtcgcaacgtttgagtaa

SEQ ID NO: 88691 - DNA, 25 bp, Homo sapien
tagtgttacgaccaatgtttgtatg

SEQ ID NO: 88692 - DNA, 25 bp, Homo sapien
tagtgttacgacgaatgtttgtatg

SEQ ID NO: 88693 - DNA, 25 bp, Homo sapien
tgggttgttttacatccttagttcg

SEQ ID NO: 88694 - DNA, 25 bp, Homo sapien
tgggttgttttagatccttagttcg

SEQ ID NO: 88695 - DNA, 25 bp, Homo sapien
tggtctgtttaaacttacatagttc

SEQ ID NO: 88696 - DNA, 25 bp, Homo sapien
tggtctgtttaatcttacatagttc

SEQ ID NO: 88697 - DNA, 25 bp, Homo sapien
cgttagtctttgtgtatggtcttcg

SEQ ID NO: 88698 - DNA, 25 bp, Homo sapien
cgttagtctttgagtatggtcttcg

SEQ ID NO: 88699 - DNA, 25 bp, Homo sapien
ctatgacatattcgatatcggtccc

SEQ ID NO: 88700 - DNA, 25 bp, Homo sapien
ctatgacatattggatatcggtccc

SEQ ID NO: 88701 - DNA, 25 bp, Homo sapien
cgccggcatggtcttcgtgtcctac

SEQ ID NO: 88702 - DNA, 25 bp, Homo sapien
cgccggcatggtgttcgtgtcctac

SEQ ID NO: 88703 - DNA, 25 bp, Homo sapien
cgccgttcaggtcgtggtgtatccc

SEQ ID NO: 88704 - DNA, 25 bp, Homo sapien
cgccgttcaggtggtggtgtatccc

SEQ ID NO: 88705 - DNA, 25 bp, Homo sapien
cacagtgacccgaggtggagctccc

SEQ ID NO: 88706 - DNA, 25 bp, Homo sapien
cacagtgacccgtggtggagctccc

SEQ ID NO: 88707 - DNA, 25 bp, Homo sapien
acaggaactcgctggggcgtccgca

SEQ ID NO: 88708 - DNA, 25 bp, Homo sapien
acaggaactcgcaggggcgtccgca

SEQ ID NO: 88709 - DNA, 25 bp, Homo sapien
gtagtaaccgtcagggtcggccgca

SEQ ID NO: 88710 - DNA, 25 bp, Homo sapien
gtagtaaccgtctgggtcggccgca

SEQ ID NO: 88711 - DNA, 25 bp, Homo sapien
ggagactctggtgtgtgtcgtcgca

SEQ ID NO: 88712 - DNA, 25 bp, Homo sapien
ggagactctggtctgtgtcgtcgca

SEQ ID NO: 88713 - DNA, 25 bp, Homo sapien
caggaccgttgtctccggtaccgag

SEQ ID NO: 88714 - DNA, 25 bp, Homo sapien
caggaccgttgtgtccggtaccgag

SEQ ID NO: 88715 - DNA, 25 bp, Homo sapien
ctagggattctgacattgtagacga

SEQ ID NO: 88716 - DNA, 25 bp, Homo sapien
ctagggattctgtcattgtagacga

SEQ ID NO: 88717 - DNA, 25 bp, Homo sapien
taccgtgacattctgaaccggacag

SEQ ID NO: 88718 - DNA, 25 bp, Homo sapien
taccgtgacattgtgaaccggacag

SEQ ID NO: 88719 - DNA, 25 bp, Homo sapien
tgatccaacttcacgaccagacgag

SEQ ID NO: 88720 - DNA, 25 bp, Homo sapien
tgatccaacttctcgaccagacgag

SEQ ID NO: 88721 - DNA, 25 bp, Homo sapien
taggaaaaacggactgaactgcggt

SEQ ID NO: 88722 - DNA, 25 bp, Homo sapien
taggaaaaacggtctgaactgcggt

SEQ ID NO: 88723 - DNA, 25 bp, Homo sapien
gagggcttccccagtagacctcttg

SEQ ID NO: 88724 - DNA, 25 bp, Homo sapien
gagggcttcccctgtagacctcttg

SEQ ID NO: 88725 - DNA, 25 bp, Homo sapien
agaggtctcttcatcactctttccg

SEQ ID NO: 88726 - DNA, 25 bp, Homo sapien
agaggtctcttcttcactctttccg

SEQ ID NO: 88727 - DNA, 25 bp, Homo sapien
ggattgtttgtctactattactaca

SEQ ID NO: 88728 - DNA, 25 bp, Homo sapien
ggattgtttgtcaactattactaca

SEQ ID NO: 88729 - DNA, 25 bp, Homo sapien
agttgtgtctacctaaggtcataag

SEQ ID NO: 88730 - DNA, 25 bp, Homo sapien
agttgtgtctacgtaaggtcataag

SEQ ID NO: 88731 - DNA, 25 bp, Homo sapien
gttgtgtctacctaaggtcataagt

SEQ ID NO: 88732 - DNA, 25 bp, Homo sapien
gttgtgtctaccaaaggtcataagt

SEQ ID NO: 88733 - DNA, 25 bp, Homo sapien
cgtgcctctactttcgtgacccagg

SEQ ID NO: 88734 - DNA, 25 bp, Homo sapien
cgtgcctctactatcgtgacccagg

SEQ ID NO: 88735 - DNA, 25 bp, Homo sapien
gatgggtccctctgttcccagcagg

SEQ ID NO: 88736 - DNA, 25 bp, Homo sapien
gatgggtccctcagttcccagcagg

SEQ ID NO: 88737 - DNA, 25 bp, Homo sapien
atagggttgtcagttcccacggaag

SEQ ID NO: 88738 - DNA, 25 bp, Homo sapien
atagggttgtcacttcccacggaag

SEQ ID NO: 88739 - DNA, 25 bp, Homo sapien
ccgggttaactatctttatcaaatg

SEQ ID NO: 88740 - DNA, 25 bp, Homo sapien
ccgggttaactaactttatcaaatg

SEQ ID NO: 88741 - DNA, 25 bp, Homo sapien
cagtgagtagacatgtatcaacatt

SEQ ID NO: 88742 - DNA, 25 bp, Homo sapien
cagtgagtagacttgtatcaacatt

SEQ ID NO: 88743 - DNA, 25 bp, Homo sapien
ccatgttagacttagtactaagcaa

SEQ ID NO: 88744 - DNA, 25 bp, Homo sapien
ccatgttagactaagtactaagcaa

SEQ ID NO: 88745 - DNA, 25 bp, Homo sapien
actatgtgaagtaacacgacaaagt

SEQ ID NO: 88746 - DNA, 25 bp, Homo sapien
actatgtgaagttacacgacaaagt

SEQ ID NO: 88747 - DNA, 25 bp, Homo sapien
tgctgctcaaatagtccttcattgt

SEQ ID NO: 88748 - DNA, 25 bp, Homo sapien
tgctgctcaaattgtccttcattgt

SEQ ID NO: 88749 - DNA, 25 bp, Homo sapien
tggtttccactacagtttaacaatg

SEQ ID NO: 88750 - DNA, 25 bp, Homo sapien
tggtttccactagagtttaacaatg

SEQ ID NO: 88751 - DNA, 25 bp, Homo sapien
gagtattcgataagagattccccca

SEQ ID NO: 88752 - DNA, 25 bp, Homo sapien
gagtattcgatatgagattccccca

SEQ ID NO: 88753 - DNA, 25 bp, Homo sapien
gtaatatctgaagaattccacaaag

SEQ ID NO: 88754 - DNA, 25 bp, Homo sapien
gtaatatctgaacaattccacaaag

SEQ ID NO: 88755 - DNA, 25 bp, Homo sapien
ggctctctcgggacagggccaccga

SEQ ID NO: 88756 - DNA, 25 bp, Homo sapien
ggctctctcgggtcagggccaccga

SEQ ID NO: 88757 - DNA, 25 bp, Homo sapien
ctcttgagcacgaagccgtactgac

SEQ ID NO: 88758 - DNA, 25 bp, Homo sapien
ctcttgagcacgtagccgtactgac

SEQ ID NO: 88759 - DNA, 25 bp, Homo sapien
tttcctgacaggtagacgagactga

SEQ ID NO: 88760 - DNA, 25 bp, Homo sapien
tttcctgacaggaagacgagactga

SEQ ID NO: 88761 - DNA, 25 bp, Homo sapien
aggaggttcccctaaataagaggtt

SEQ ID NO: 88762 - DNA, 25 bp, Homo sapien
aggaggttccccaaaataagaggtt

SEQ ID NO: 88763 - DNA, 25 bp, Homo sapien
ggaaccggtccagtcacgaggtgtt

SEQ ID NO: 88764 - DNA, 25 bp, Homo sapien
ggaaccggtccactcacgaggtgtt

SEQ ID NO: 88765 - DNA, 25 bp, Homo sapien
aacaagggtttccacttaagtaacg

SEQ ID NO: 88766 - DNA, 25 bp, Homo sapien
aacaagggtttcgacttaagtaacg

SEQ ID NO: 88767 - DNA, 25 bp, Homo sapien
gagcagcgggtgtatccttaggaag

SEQ ID NO: 88768 - DNA, 25 bp, Homo sapien
gagcagcgggtgaatccttaggaag

SEQ ID NO: 88769 - DNA, 25 bp, Homo sapien
ctaaaccttcgaagaccttggtatt

SEQ ID NO: 88770 - DNA, 25 bp, Homo sapien
ctaaaccttcgatgaccttggtatt

SEQ ID NO: 88771 - DNA, 25 bp, Homo sapien
gatgcccgtgttactcattggactt

SEQ ID NO: 88772 - DNA, 25 bp, Homo sapien
gatgcccgtgtttctcattggactt

SEQ ID NO: 88773 - DNA, 25 bp, Homo sapien
gtgacagtcaatgtcaacctgacga

SEQ ID NO: 88774 - DNA, 25 bp, Homo sapien
gtgacagtcaatctcaacctgacga

SEQ ID NO: 88775 - DNA, 25 bp, Homo sapien
gacacgactcttataagatcatcga

SEQ ID NO: 88776 - DNA, 25 bp, Homo sapien
gacacgactcttttaagatcatcga

SEQ ID NO: 88777 - DNA, 25 bp, Homo sapien
acgatctcggtgttaaatcttcact

SEQ ID NO: 88778 - DNA, 25 bp, Homo sapien
acgatctcggtgataaatcttcact

SEQ ID NO: 88779 - DNA, 25 bp, Homo sapien
aaggtgatcacgaatttactcttga

SEQ ID NO: 88780 - DNA, 25 bp, Homo sapien
aaggtgatcacgtatttactcttga

SEQ ID NO: 88781 - DNA, 25 bp, Homo sapien
gagtgacacacttagttcattaata

SEQ ID NO: 88782 - DNA, 25 bp, Homo sapien
gagtgacacactaagttcattaata

SEQ ID NO: 88783 - DNA, 25 bp, Homo sapien
cagggacacctcgatttcttcacaa

SEQ ID NO: 88784 - DNA, 25 bp, Homo sapien
cagggacacctccatttcttcacaa

SEQ ID NO: 88785 - DNA, 25 bp, Homo sapien
agaacgcggccaggttcttaaagtg

SEQ ID NO: 88786 - DNA, 25 bp, Homo sapien
agaacgcggccacgttcttaaagtg

SEQ ID NO: 88787 - DNA, 25 bp, Homo sapien
cgtcgtgtcaaattcgttaagtata

SEQ ID NO: 88788 - DNA, 25 bp, Homo sapien
cgtcgtgtcaaaatcgttaagtata

SEQ ID NO: 88789 - DNA, 25 bp, Homo sapien
acactgtccgttcaagacaagagaa

SEQ ID NO: 88790 - DNA, 25 bp, Homo sapien
acactgtccgttgaagacaagagaa

SEQ ID NO: 88791 - DNA, 25 bp, Homo sapien
tttgacaggacgtcaaaacacgaaa

SEQ ID NO: 88792 - DNA, 25 bp, Homo sapien
tttgacaggacgacaaaacacgaaa

SEQ ID NO: 88793 - DNA, 25 bp, Homo sapien
ttgaaggtacactattctaacttaa

SEQ ID NO: 88794 - DNA, 25 bp, Homo sapien
ttgaaggtacacaattctaacttaa

SEQ ID NO: 88795 - DNA, 25 bp, Homo sapien
tggagtgtcccctcagacggacgag

SEQ ID NO: 88796 - DNA, 25 bp, Homo sapien
tggagtgtccccacagacggacgag

SEQ ID NO: 88797 - DNA, 25 bp, Homo sapien
gtcctacaccaggtcgagaggtatg

SEQ ID NO: 88798 - DNA, 25 bp, Homo sapien
gtcctacaccagctcgagaggtatg

SEQ ID NO: 88799 - DNA, 25 bp, Homo sapien
ctactgaacgacaatgacgacgaaa

SEQ ID NO: 88800 - DNA, 25 bp, Homo sapien
ctactgaacgactatgacgacgaaa

SEQ ID NO: 88801 - DNA, 25 bp, Homo sapien
atatgtaacgtatacgtgacccgga

SEQ ID NO: 88802 - DNA, 25 bp, Homo sapien
atatgtaacgtaaacgtgacccgga

SEQ ID NO: 88803 - DNA, 25 bp, Homo sapien
gctctgtggtctctttctcacttac

SEQ ID NO: 88804 - DNA, 25 bp, Homo sapien
gctctgtggtctgtttctcacttac

SEQ ID NO: 88805 - DNA, 25 bp, Homo sapien
gacttcgtgctcctgtttgcacctc

SEQ ID NO: 88806 - DNA, 25 bp, Homo sapien
gacttcgtgctcgtgtttgcacctc

SEQ ID NO: 88807 - DNA, 25 bp, Homo sapien
cttggactccagtgtagtcagacac

SEQ ID NO: 88808 - DNA, 25 bp, Homo sapien
cttggactccagagtagtcagacac

SEQ ID NO: 88809 - DNA, 25 bp, Homo sapien
tcgaggggtcccagtgtctagaagc

SEQ ID NO: 88810 - DNA, 25 bp, Homo sapien
tcgaggggtccctgtgtctagaagc

SEQ ID NO: 88811 - DNA, 25 bp, Homo sapien
cctggtggtgctaggtactccggtg

SEQ ID NO: 88812 - DNA, 25 bp, Homo sapien
cctggtggtgcttggtactccggtg

SEQ ID NO: 88813 - DNA, 25 bp, Homo sapien
cggatgcacttcttctctcgtgtgt

SEQ ID NO: 88814 - DNA, 25 bp, Homo sapien
cggatgcacttcatctctcgtgtgt

SEQ ID NO: 88815 - DNA, 25 bp, Homo sapien
tcgtagttcaaacttagagtacttt

SEQ ID NO: 88816 - DNA, 25 bp, Homo sapien
tcgtagttcaaagttagagtacttt

SEQ ID NO: 88817 - DNA, 25 bp, Homo sapien
catgcttatacatggtcggtacttt

SEQ ID NO: 88818 - DNA, 25 bp, Homo sapien
catgcttatacaaggtcggtacttt

SEQ ID NO: 88819 - DNA, 25 bp, Homo sapien
actcctttcctaaggtgagttcata

SEQ ID NO: 88820 - DNA, 25 bp, Homo sapien
actcctttcctatggtgagttcata

SEQ ID NO: 88821 - DNA, 25 bp, Homo sapien
atgaaatcccgttgggatcaaccgt

SEQ ID NO: 88822 - DNA, 25 bp, Homo sapien
atgaaatcccgtagggatcaaccgt

SEQ ID NO: 88823 - DNA, 25 bp, Homo sapien
gtgaccttcgaaggtaagacccggt

SEQ ID NO: 88824 - DNA, 25 bp, Homo sapien
gtgaccttcgaacgtaagacccggt

SEQ ID NO: 88825 - DNA, 25 bp, Homo sapien
gtgcccgtcgcagtacatcaccggt

SEQ ID NO: 88826 - DNA, 25 bp, Homo sapien
gtgcccgtcgcactacatcaccggt

SEQ ID NO: 88827 - DNA, 25 bp, Homo sapien
gttggtcccttccttagacccctgt

SEQ ID NO: 88828 - DNA, 25 bp, Homo sapien
gttggtcccttcgttagacccctgt

SEQ ID NO: 88829 - DNA, 25 bp, Homo sapien
gttgtcccgtatcaggtaaaacctc

SEQ ID NO: 88830 - DNA, 25 bp, Homo sapien
gttgtcccgtatgaggtaaaacctc

SEQ ID NO: 88831 - DNA, 25 bp, Homo sapien
tctcagactatcgattgactaccga

SEQ ID NO: 88832 - DNA, 25 bp, Homo sapien
tctcagactatccattgactaccga

SEQ ID NO: 88833 - DNA, 25 bp, Homo sapien
tcggagtagatctttgactatgtac

SEQ ID NO: 88834 - DNA, 25 bp, Homo sapien
tcggagtagatcattgactatgtac

SEQ ID NO: 88835 - DNA, 25 bp, Homo sapien
gttcctctgatgtcgatctgtagtc

SEQ ID NO: 88836 - DNA, 25 bp, Homo sapien
gttcctctgatgacgatctgtagtc

SEQ ID NO: 88837 - DNA, 25 bp, Homo sapien
aggacccttctatagacctacgtcc

SEQ ID NO: 88838 - DNA, 25 bp, Homo sapien
aggacccttctaaagacctacgtcc

SEQ ID NO: 88839 - DNA, 25 bp, Homo sapien
aaggaagaaacttctctaccttcag

SEQ ID NO: 88840 - DNA, 25 bp, Homo sapien
aaggaagaaactactctaccttcag

SEQ ID NO: 88841 - DNA, 25 bp, Homo sapien
aatcgacgaaaactattccttgtcg

SEQ ID NO: 88842 - DNA, 25 bp, Homo sapien
aatcgacgaaaagtattccttgtcg

SEQ ID NO: 88843 - DNA, 25 bp, Homo sapien
atccctatataagaggtcctttacg

SEQ ID NO: 88844 - DNA, 25 bp, Homo sapien
atccctatataacaggtcctttacg

SEQ ID NO: 88845 - DNA, 25 bp, Homo sapien
actaattactgtacttcacgtgttg

SEQ ID NO: 88846 - DNA, 25 bp, Homo sapien
actaattactgttcttcacgtgttg

SEQ ID NO: 88847 - DNA, 25 bp, Homo sapien
agctagattttttttttctctctct

SEQ ID NO: 88848 - DNA, 25 bp, Homo sapien
agctagatttttattttctctctct

SEQ ID NO: 88849 - DNA, 25 bp, Homo sapien
gtgtccatcctacatcgacgtctct

SEQ ID NO: 88850 - DNA, 25 bp, Homo sapien
gtgtccatcctagatcgacgtctct

SEQ ID NO: 88851 - DNA, 25 bp, Homo sapien
ttcgagtatttacaaagatcgacca

SEQ ID NO: 88852 - DNA, 25 bp, Homo sapien
ttcgagtatttagaaagatcgacca

SEQ ID NO: 88853 - DNA, 25 bp, Homo sapien
ctccgattcaatagaccttacggga

SEQ ID NO: 88854 - DNA, 25 bp, Homo sapien
ctccgattcaattgaccttacggga

SEQ ID NO: 88855 - DNA, 25 bp, Homo sapien
taaattttgactgtcacctgagcga

SEQ ID NO: 88856 - DNA, 25 bp, Homo sapien
taaattttgactctcacctgagcga

SEQ ID NO: 88857 - DNA, 25 bp, Homo sapien
gtagttcgaaccatggctcgagcct

SEQ ID NO: 88858 - DNA, 25 bp, Homo sapien
gtagttcgaaccttggctcgagcct

SEQ ID NO: 88859 - DNA, 25 bp, Homo sapien
ccttagcaccagtgtctaaccgacg

SEQ ID NO: 88860 - DNA, 25 bp, Homo sapien
ccttagcaccagagtctaaccgacg

SEQ ID NO: 88861 - DNA, 25 bp, Homo sapien
tgtccctcacaacaggtgccgacgt

SEQ ID NO: 88862 - DNA, 25 bp, Homo sapien
tgtccctcacaagaggtgccgacgt

SEQ ID NO: 88863 - DNA, 25 bp, Homo sapien
agttaacaccggtcctagaccccct

SEQ ID NO: 88864 - DNA, 25 bp, Homo sapien
agttaacaccggacctagaccccct

SEQ ID NO: 88865 - DNA, 25 bp, Homo sapien
cgccagagtccgagccagagcttca

SEQ ID NO: 88866 - DNA, 25 bp, Homo sapien
cgccagagtccgtgccagagcttca

SEQ ID NO: 88867 - DNA, 25 bp, Homo sapien
acgagtcggtggtacagtgacttca

SEQ ID NO: 88868 - DNA, 25 bp, Homo sapien
acgagtcggtggaacagtgacttca

SEQ ID NO: 88869 - DNA, 25 bp, Homo sapien
aaactggttgtagaacataacgact

SEQ ID NO: 88870 - DNA, 25 bp, Homo sapien
aaactggttgtacaacataacgact

SEQ ID NO: 88871 - DNA, 25 bp, Homo sapien
aaagaatgtttcacttaactcgagc

SEQ ID NO: 88872 - DNA, 25 bp, Homo sapien
aaagaatgtttctcttaactcgagc

SEQ ID NO: 88873 - DNA, 25 bp, Homo sapien
gcgagacggatacctttgtcgcggc

SEQ ID NO: 88874 - DNA, 25 bp, Homo sapien
gcgagacggatagctttgtcgcggc

SEQ ID NO: 88875 - DNA, 25 bp, Homo sapien
acgtttacgtatttttctggggtct

SEQ ID NO: 88876 - DNA, 25 bp, Homo sapien
acgtttacgtatatttctggggtct

SEQ ID NO: 88877 - DNA, 25 bp, Homo sapien
ggcttgtgattcacaattatggtac

SEQ ID NO: 88878 - DNA, 25 bp, Homo sapien
ggcttgtgattctcaattatggtac

SEQ ID NO: 88879 - DNA, 25 bp, Homo sapien
ggtatcttgaagaggtaactcccaa

SEQ ID NO: 88880 - DNA, 25 bp, Homo sapien
ggtatcttgaagtggtaactcccaa

SEQ ID NO: 88881 - DNA, 25 bp, Homo sapien
aaaattaaggtcaggaaccttagac

SEQ ID NO: 88882 - DNA, 25 bp, Homo sapien
aaaattaaggtctggaaccttagac

SEQ ID NO: 88883 - DNA, 25 bp, Homo sapien
aaatagtagtatttggaccggtcac

SEQ ID NO: 88884 - DNA, 25 bp, Homo sapien
aaatagtagtatatggaccggtcac

SEQ ID NO: 88885 - DNA, 25 bp, Homo sapien
ggtttattcaggaggaccggtactc

SEQ ID NO: 88886 - DNA, 25 bp, Homo sapien
ggtttattcaggtggaccggtactc

SEQ ID NO: 88887 - DNA, 25 bp, Homo sapien
gattttgcgtcgacgggacaccacc

SEQ ID NO: 88888 - DNA, 25 bp, Homo sapien
gattttgcgtcgtcgggacaccacc

SEQ ID NO: 88889 - DNA, 25 bp, Homo sapien
ttcctagtgacgtgatgtcaacagg

SEQ ID NO: 88890 - DNA, 25 bp, Homo sapien
ttcctagtgacgagatgtcaacagg

SEQ ID NO: 88891 - DNA, 25 bp, Homo sapien
aactagaccctgaaagtcccgtccg

SEQ ID NO: 88892 - DNA, 25 bp, Homo sapien
aactagaccctgtaagtcccgtccg

SEQ ID NO: 88893 - DNA, 25 bp, Homo sapien
ttaaacttcgcgatcgtccggtcgg

SEQ ID NO: 88894 - DNA, 25 bp, Homo sapien
ttaaacttcgcgttcgtccggtcgg

SEQ ID NO: 88895 - DNA, 25 bp, Homo sapien
acaccgtcgacgtgtgggtcgtcgt

SEQ ID NO: 88896 - DNA, 25 bp, Homo sapien
acaccgtcgacgagtgggtcgtcgt

SEQ ID NO: 88897 - DNA, 25 bp, Homo sapien
caaagcgcccaggaaggtgtcgtcg

SEQ ID NO: 88898 - DNA, 25 bp, Homo sapien
caaagcgcccagcaaggtgtcgtcg

SEQ ID NO: 88899 - DNA, 25 bp, Homo sapien
ccccggacggactacccagggcgtg

SEQ ID NO: 88900 - DNA, 25 bp, Homo sapien
ccccggacggacaacccagggcgtg

SEQ ID NO: 88901 - DNA, 25 bp, Homo sapien
cctcgggtgtcgtcgttcccctggg

SEQ ID NO: 88902 - DNA, 25 bp, Homo sapien
cctcgggtgtcgacgttcccctggg

SEQ ID NO: 88903 - DNA, 25 bp, Homo sapien
gtcacccgggggtcccgtcggttta

SEQ ID NO: 88904 - DNA, 25 bp, Homo sapien
gtcacccgggggacccgtcggttta

SEQ ID NO: 88905 - DNA, 25 bp, Homo sapien
cacctcggccggaccaggtcaagta

SEQ ID NO: 88906 - DNA, 25 bp, Homo sapien
cacctcggccggtccaggtcaagta

SEQ ID NO: 88907 - DNA, 25 bp, Homo sapien
tctccgtctacgaccccggtaaatt

SEQ ID NO: 88908 - DNA, 25 bp, Homo sapien
tctccgtctacgtccccggtaaatt

SEQ ID NO: 88909 - DNA, 25 bp, Homo sapien
ggtatgaacgttaccctgagttata

SEQ ID NO: 88910 - DNA, 25 bp, Homo sapien
ggtatgaacgtttccctgagttata

SEQ ID NO: 88911 - DNA, 25 bp, Homo sapien
tggagttaaaatacctcgtattctt

SEQ ID NO: 88912 - DNA, 25 bp, Homo sapien
tggagttaaaattcctcgtattctt

SEQ ID NO: 88913 - DNA, 25 bp, Homo sapien
tcttcatacaaatgctactttgttc

SEQ ID NO: 88914 - DNA, 25 bp, Homo sapien
tcttcatacaaaagctactttgttc

SEQ ID NO: 88915 - DNA, 25 bp, Homo sapien
ttacccttcaacacgtattttgata

SEQ ID NO: 88916 - DNA, 25 bp, Homo sapien
ttacccttcaactcgtattttgata

SEQ ID NO: 88917 - DNA, 25 bp, Homo sapien
cactggaaccttacgtcctagacgg

SEQ ID NO: 88918 - DNA, 25 bp, Homo sapien
cactggaacctttcgtcctagacgg

SEQ ID NO: 88919 - DNA, 25 bp, Homo sapien
gaacatgaggagctctttttgcggt

SEQ ID NO: 88920 - DNA, 25 bp, Homo sapien
gaacatgaggaggtctttttgcggt

SEQ ID NO: 88921 - DNA, 25 bp, Homo sapien
actgttgtaggggttcttgagcgta

SEQ ID NO: 88922 - DNA, 25 bp, Homo sapien
actgttgtagggcttcttgagcgta

SEQ ID NO: 88923 - DNA, 25 bp, Homo sapien
tccactgttggtttttgtcgagaac

SEQ ID NO: 88924 - DNA, 25 bp, Homo sapien
tccactgttggtatttgtcgagaac

SEQ ID NO: 88925 - DNA, 25 bp, Homo sapien
tccgttttgtaggagtttaccagga

SEQ ID NO: 88926 - DNA, 25 bp, Homo sapien
tccgttttgtagcagtttaccagga

SEQ ID NO: 88927 - DNA, 25 bp, Homo sapien
aggtctctcacgacgtttttagaag

SEQ ID NO: 88928 - DNA, 25 bp, Homo sapien
aggtctctcacgtcgtttttagaag

SEQ ID NO: 88929 - DNA, 25 bp, Homo sapien
gttcagctacgttcatcgacggtat

SEQ ID NO: 88930 - DNA, 25 bp, Homo sapien
gttcagctacgtacatcgacggtat

SEQ ID NO: 88931 - DNA, 25 bp, Homo sapien
tgtttttacgcttcgaactggagtg

SEQ ID NO: 88932 - DNA, 25 bp, Homo sapien
tgtttttacgctacgaactggagtg

SEQ ID NO: 88933 - DNA, 25 bp, Homo sapien
ttatttacggagttaaacctccgtt

SEQ ID NO: 88934 - DNA, 25 bp, Homo sapien
ttatttacggagataaacctccgtt

SEQ ID NO: 88935 - DNA, 25 bp, Homo sapien
taccagtcgtgacagaacaaccgtt

SEQ ID NO: 88936 - DNA, 25 bp, Homo sapien
taccagtcgtgagagaacaaccgtt

SEQ ID NO: 88937 - DNA, 25 bp, Homo sapien
gtcatgtctattgaactgacttgtg

SEQ ID NO: 88938 - DNA, 25 bp, Homo sapien
gtcatgtctattcaactgacttgtg

SEQ ID NO: 88939 - DNA, 25 bp, Homo sapien
cgtatatagtctttttacaacttgg

SEQ ID NO: 88940 - DNA, 25 bp, Homo sapien
cgtatatagtctatttacaacttgg

SEQ ID NO: 88941 - DNA, 25 bp, Homo sapien
ttgaagtgcgtttcgagaccgtggt

SEQ ID NO: 88942 - DNA, 25 bp, Homo sapien
ttgaagtgcgttacgagaccgtggt

SEQ ID NO: 88943 - DNA, 25 bp, Homo sapien
ttcttgcacgtgctccacttcctgg

SEQ ID NO: 88944 - DNA, 25 bp, Homo sapien
ttcttgcacgtggtccacttcctgg

SEQ ID NO: 88945 - DNA, 25 bp, Homo sapien
tttctagaaccgtctgttccagtgg

SEQ ID NO: 88946 - DNA, 25 bp, Homo sapien
tttctagaaccgactgttccagtgg

SEQ ID NO: 88947 - DNA, 25 bp, Homo sapien
tctccaaagtaccttgtaatactgg

SEQ ID NO: 88948 - DNA, 25 bp, Homo sapien
tctccaaagtacgttgtaatactgg

SEQ ID NO: 88949 - DNA, 25 bp, Homo sapien
gttcgttcgaactcaatgaacctct

SEQ ID NO: 88950 - DNA, 25 bp, Homo sapien
gttcgttcgaacacaatgaacctct

SEQ ID NO: 88951 - DNA, 25 bp, Homo sapien
gtccaagaacgcttggagtagtgag

SEQ ID NO: 88952 - DNA, 25 bp, Homo sapien
gtccaagaacgcatggagtagtgag

SEQ ID NO: 88953 - DNA, 25 bp, Homo sapien
taaacggacgtaatggccagctacg

SEQ ID NO: 88954 - DNA, 25 bp, Homo sapien
taaacggacgtattggccagctacg

SEQ ID NO: 88955 - DNA, 25 bp, Homo sapien
gttgtccctttcgacgacctctgtc

SEQ ID NO: 88956 - DNA, 25 bp, Homo sapien
gttgtccctttccacgacctctgtc

SEQ ID NO: 88957 - DNA, 25 bp, Homo sapien
cgacgtgtcctctcagagtccctgg

SEQ ID NO: 88958 - DNA, 25 bp, Homo sapien
cgacgtgtcctcacagagtccctgg

SEQ ID NO: 88959 - DNA, 25 bp, Homo sapien
gtaagtcctctcactaaaccgttgt

SEQ ID NO: 88960 - DNA, 25 bp, Homo sapien
gtaagtcctctctctaaaccgttgt

SEQ ID NO: 88961 - DNA, 25 bp, Homo sapien
tgggaggtcccaagtaccctttcct

SEQ ID NO: 88962 - DNA, 25 bp, Homo sapien
tgggaggtcccatgtaccctttcct

SEQ ID NO: 88963 - DNA, 25 bp, Homo sapien
gggggtatacaattcttactttaac

SEQ ID NO: 88964 - DNA, 25 bp, Homo sapien
gggggtatacaaatcttactttaac

SEQ ID NO: 88965 - DNA, 25 bp, Homo sapien
aggacgacgttaaactcttcctcct

SEQ ID NO: 88966 - DNA, 25 bp, Homo sapien
aggacgacgttatactcttcctcct

SEQ ID NO: 88967 - DNA, 25 bp, Homo sapien
caaggtggtaagaccgttcctaacg

SEQ ID NO: 88968 - DNA, 25 bp, Homo sapien
caaggtggtaagtccgttcctaacg

SEQ ID NO: 88969 - DNA, 25 bp, Homo sapien
caagtctagaagtactcggacccga

SEQ ID NO: 88970 - DNA, 25 bp, Homo sapien
caagtctagaagaactcggacccga

SEQ ID NO: 88971 - DNA, 25 bp, Homo sapien
ccagaaagaccgaaaggacctactc

SEQ ID NO: 88972 - DNA, 25 bp, Homo sapien
ccagaaagaccgtaaggacctactc

SEQ ID NO: 88973 - DNA, 25 bp, Homo sapien
agtttaccaaaaagtggacacactc

SEQ ID NO: 88974 - DNA, 25 bp, Homo sapien
agtttaccaaaatgtggacacactc

SEQ ID NO: 88975 - DNA, 25 bp, Homo sapien
gtcaaacccgagtctatctaaatag

SEQ ID NO: 88976 - DNA, 25 bp, Homo sapien
gtcaaacccgagactatctaaatag

SEQ ID NO: 88977 - DNA, 25 bp, Homo sapien
gacgagaccctgaccaggaccgtag

SEQ ID NO: 88978 - DNA, 25 bp, Homo sapien
gacgagaccctgtccaggaccgtag

SEQ ID NO: 88979 - DNA, 25 bp, Homo sapien
tccgagtctcctttccgacagagaa

SEQ ID NO: 88980 - DNA, 25 bp, Homo sapien
tccgagtctcctatccgacagagaa

SEQ ID NO: 88981 - DNA, 25 bp, Homo sapien
agtagtgtcgaatcacaagggacgt

SEQ ID NO: 88982 - DNA, 25 bp, Homo sapien
agtagtgtcgaaacacaagggacgt

SEQ ID NO: 88983 - DNA, 25 bp, Homo sapien
gtagagtgactaaggtcgaaacgac

SEQ ID NO: 88984 - DNA, 25 bp, Homo sapien
gtagagtgactatggtcgaaacgac

SEQ ID NO: 88985 - DNA, 25 bp, Homo sapien
caagtgtcagagacttctgtgtaaa

SEQ ID NO: 88986 - DNA, 25 bp, Homo sapien
caagtgtcagagtcttctgtgtaaa

SEQ ID NO: 88987 - DNA, 25 bp, Homo sapien
aacgacgtttgattaggtccgaaga

SEQ ID NO: 88988 - DNA, 25 bp, Homo sapien
aacgacgtttgaataggtccgaaga

SEQ ID NO: 88989 - DNA, 25 bp, Homo sapien
gacttttagaatcgttacgacatat

SEQ ID NO: 88990 - DNA, 25 bp, Homo sapien
gacttttagaatggttacgacatat

SEQ ID NO: 88991 - DNA, 25 bp, Homo sapien
gtatgtgtgtgatttacaccgtcta

SEQ ID NO: 88992 - DNA, 25 bp, Homo sapien
gtatgtgtgtgaattacaccgtcta

SEQ ID NO: 88993 - DNA, 25 bp, Homo sapien
tgtggttacggtggtccgctgttat

SEQ ID NO: 88994 - DNA, 25 bp, Homo sapien
tgtggttacggtcgtccgctgttat

SEQ ID NO: 88995 - DNA, 25 bp, Homo sapien
cgggacactcggttgtcctctttgt

SEQ ID NO: 88996 - DNA, 25 bp, Homo sapien
cgggacactcggatgtcctctttgt

SEQ ID NO: 88997 - DNA, 25 bp, Homo sapien
cttagatacggttgttgtctgtttc

SEQ ID NO: 88998 - DNA, 25 bp, Homo sapien
cttagatacggtagttgtctgtttc

SEQ ID NO: 88999 - DNA, 25 bp, Homo sapien
caccaaacggtggttgtctctctta

SEQ ID NO: 89000 - DNA, 25 bp, Homo sapien
caccaaacggtgcttgtctctctta

SEQ ID NO: 89001 - DNA, 25 bp, Homo sapien
agagacctcccgtcttgttcttcct

SEQ ID NO: 89002 - DNA, 25 bp, Homo sapien
agagacctcccgacttgttcttcct

SEQ ID NO: 89003 - DNA, 25 bp, Homo sapien
acggatttttgcttgtaaagtctct

SEQ ID NO: 89004 - DNA, 25 bp, Homo sapien
acggatttttgcatgtaaagtctct

SEQ ID NO: 89005 - DNA, 25 bp, Homo sapien
tctctagactgctgattagagtcac

SEQ ID NO: 89006 - DNA, 25 bp, Homo sapien
tctctagactgcagattagagtcac

SEQ ID NO: 89007 - DNA, 25 bp, Homo sapien
ctctctcagacataggtgtcggtca

SEQ ID NO: 89008 - DNA, 25 bp, Homo sapien
ctctctcagacaaaggtgtcggtca

SEQ ID NO: 89009 - DNA, 25 bp, Homo sapien
tacgttcgaccaaatgttcgatctc

SEQ ID NO: 89010 - DNA, 25 bp, Homo sapien
tacgttcgaccatatgttcgatctc

SEQ ID NO: 89011 - DNA, 25 bp, Homo sapien
gacaaggaaccaaacatttgtataa

SEQ ID NO: 89012 - DNA, 25 bp, Homo sapien
gacaaggaaccatacatttgtataa

SEQ ID NO: 89013 - DNA, 25 bp, Homo sapien
gaatcgtattacttaccacgtatgc

SEQ ID NO: 89014 - DNA, 25 bp, Homo sapien
gaatcgtattacataccacgtatgc

SEQ ID NO: 89015 - DNA, 25 bp, Homo sapien
gggtgcgtcctccaaccactagagc

SEQ ID NO: 89016 - DNA, 25 bp, Homo sapien
gggtgcgtcctcgaaccactagagc

SEQ ID NO: 89017 - DNA, 25 bp, Homo sapien
tttaggtcccgactcttcggagtac

SEQ ID NO: 89018 - DNA, 25 bp, Homo sapien
tttaggtcccgagtcttcggagtac

SEQ ID NO: 89019 - DNA, 25 bp, Homo sapien
attattgtactgtacttcggggatc

SEQ ID NO: 89020 - DNA, 25 bp, Homo sapien
attattgtactgaacttcggggatc

SEQ ID NO: 89021 - DNA, 25 bp, Homo sapien
tatatatctcaaatcttggacaggt

SEQ ID NO: 89022 - DNA, 25 bp, Homo sapien
tatatatctcaattcttggacaggt

SEQ ID NO: 89023 - DNA, 25 bp, Homo sapien
gtagtcaccaaccacttgtgaactt

SEQ ID NO: 89024 - DNA, 25 bp, Homo sapien
gtagtcaccaacgacttgtgaactt

SEQ ID NO: 89025 - DNA, 25 bp, Homo sapien
ggaggcgtcagagactttagactcc

SEQ ID NO: 89026 - DNA, 25 bp, Homo sapien
ggaggcgtcagacactttagactcc

SEQ ID NO: 89027 - DNA, 25 bp, Homo sapien
ttgtagttgtgacactacttcaaca

SEQ ID NO: 89028 - DNA, 25 bp, Homo sapien
ttgtagttgtgagactacttcaaca

SEQ ID NO: 89029 - DNA, 25 bp, Homo sapien
cggtctctgaggacgacgaacgcct

SEQ ID NO: 89030 - DNA, 25 bp, Homo sapien
cggtctctgaggtcgacgaacgcct

SEQ ID NO: 89031 - DNA, 25 bp, Homo sapien
ggaagtctaaggtcgacgaccatgt

SEQ ID NO: 89032 - DNA, 25 bp, Homo sapien
ggaagtctaaggacgacgaccatgt

SEQ ID NO: 89033 - DNA, 25 bp, Homo sapien
cgtcgaggtcggaggccctcgcatc

SEQ ID NO: 89034 - DNA, 25 bp, Homo sapien
cgtcgaggtcggtggccctcgcatc

SEQ ID NO: 89035 - DNA, 25 bp, Homo sapien
ctgttgtcatggtcctcccgtccgt

SEQ ID NO: 89036 - DNA, 25 bp, Homo sapien
ctgttgtcatggacctcccgtccgt

SEQ ID NO: 89037 - DNA, 25 bp, Homo sapien
ctaaacacgaggaccggacctcgtt

SEQ ID NO: 89038 - DNA, 25 bp, Homo sapien
ctaaacacgaggtccggacctcgtt

SEQ ID NO: 89039 - DNA, 25 bp, Homo sapien
aataaaagatgtttcacactcgttg

SEQ ID NO: 89040 - DNA, 25 bp, Homo sapien
aataaaagatgtatcacactcgttg

SEQ ID NO: 89041 - DNA, 25 bp, Homo sapien
tggagaagtataaacgccagactta

SEQ ID NO: 89042 - DNA, 25 bp, Homo sapien
tggagaagtatatacgccagactta

SEQ ID NO: 89043 - DNA, 25 bp, Homo sapien
acgagggtcaagttcgtattaaatc

SEQ ID NO: 89044 - DNA, 25 bp, Homo sapien
acgagggtcaagatcgtattaaatc

SEQ ID NO: 89045 - DNA, 25 bp, Homo sapien
cactagaaccggtgacaccagaatc

SEQ ID NO: 89046 - DNA, 25 bp, Homo sapien
cactagaaccggagacaccagaatc

SEQ ID NO: 89047 - DNA, 25 bp, Homo sapien
accgtgacgggtttacacaggaaac

SEQ ID NO: 89048 - DNA, 25 bp, Homo sapien
accgtgacgggtatacacaggaaac

SEQ ID NO: 89049 - DNA, 25 bp, Homo sapien
agacgagtagtttaacctcgcagac

SEQ ID NO: 89050 - DNA, 25 bp, Homo sapien
agacgagtagttaaacctcgcagac

SEQ ID NO: 89051 - DNA, 25 bp, Homo sapien
ctagtagagttacaccgtccctctc

SEQ ID NO: 89052 - DNA, 25 bp, Homo sapien
ctagtagagttagaccgtccctctc

SEQ ID NO: 89053 - DNA, 25 bp, Homo sapien
cggtctagtcacgacggagatgacc

SEQ ID NO: 89054 - DNA, 25 bp, Homo sapien
cggtctagtcaccacggagatgacc

SEQ ID NO: 89055 - DNA, 25 bp, Homo sapien
atgagggtcactagagacgatgtca

SEQ ID NO: 89056 - DNA, 25 bp, Homo sapien
atgagggtcacttgagacgatgtca

SEQ ID NO: 89057 - DNA, 25 bp, Homo sapien
ggtacgacacagagagacgacaccg

SEQ ID NO: 89058 - DNA, 25 bp, Homo sapien
ggtacgacacagtgagacgacaccg

SEQ ID NO: 89059 - DNA, 25 bp, Homo sapien
tcgtacgccgtcgagaacagcgacg

SEQ ID NO: 89060 - DNA, 25 bp, Homo sapien
tcgtacgccgtccagaacagcgacg

SEQ ID NO: 89061 - DNA, 25 bp, Homo sapien
ctttcagttgtaccagagatccgac

SEQ ID NO: 89062 - DNA, 25 bp, Homo sapien
ctttcagttgtagcagagatccgac

SEQ ID NO: 89063 - DNA, 25 bp, Homo sapien
atttcgaaggttttacggatagacc

SEQ ID NO: 89064 - DNA, 25 bp, Homo sapien
atttcgaaggttatacggatagacc

SEQ ID NO: 89065 - DNA, 25 bp, Homo sapien
acttgaacaattctcacgtatagga

SEQ ID NO: 89066 - DNA, 25 bp, Homo sapien
acttgaacaattgtcacgtatagga

SEQ ID NO: 89067 - DNA, 25 bp, Homo sapien
ttccctagtgttagatcatctgacg

SEQ ID NO: 89068 - DNA, 25 bp, Homo sapien
ttccctagtgtttgatcatctgacg

SEQ ID NO: 89069 - DNA, 25 bp, Homo sapien
aggacaggtgacagtatcgctcaga

SEQ ID NO: 89070 - DNA, 25 bp, Homo sapien
aggacaggtgactgtatcgctcaga

SEQ ID NO: 89071 - DNA, 25 bp, Homo sapien
gacgtcggtcgcttggtcgtgtagg

SEQ ID NO: 89072 - DNA, 25 bp, Homo sapien
gacgtcggtcgcatggtcgtgtagg

SEQ ID NO: 89073 - DNA, 25 bp, Homo sapien
tccgtcgacctcagtagggtttccg

SEQ ID NO: 89074 - DNA, 25 bp, Homo sapien
tccgtcgacctctgtagggtttccg

SEQ ID NO: 89075 - DNA, 25 bp, Homo sapien
gtcggccccggtgagagtagtcctc

SEQ ID NO: 89076 - DNA, 25 bp, Homo sapien
gtcggccccggtcagagtagtcctc

SEQ ID NO: 89077 - DNA, 25 bp, Homo sapien
ttagcgaaaggaaacgaggtcgctc

SEQ ID NO: 89078 - DNA, 25 bp, Homo sapien
ttagcgaaaggatacgaggtcgctc

SEQ ID NO: 89079 - DNA, 25 bp, Homo sapien
tcccggacgggtcttcgtggtctcg

SEQ ID NO: 89080 - DNA, 25 bp, Homo sapien
tcccggacgggtgttcgtggtctcg

SEQ ID NO: 89081 - DNA, 25 bp, Homo sapien
tttcccgtacgagtgtgtgtggtcc

SEQ ID NO: 89082 - DNA, 25 bp, Homo sapien
tttcccgtacgactgtgtgtggtcc

SEQ ID NO: 89083 - DNA, 25 bp, Homo sapien
tattacttttagtggtgtcgagctc

SEQ ID NO: 89084 - DNA, 25 bp, Homo sapien
tattacttttagaggtgtcgagctc

SEQ ID NO: 89085 - DNA, 25 bp, Homo sapien
aaagtctttttacaaaacgtgcact

SEQ ID NO: 89086 - DNA, 25 bp, Homo sapien
aaagtctttttagaaaacgtgcact

SEQ ID NO: 89087 - DNA, 25 bp, Homo sapien
ctgaaatgagttagaaaccagacat

SEQ ID NO: 89088 - DNA, 25 bp, Homo sapien
ctgaaatgagtttgaaaccagacat

SEQ ID NO: 89089 - DNA, 25 bp, Homo sapien
aaagaagtcttttagatctcgttcc

SEQ ID NO: 89090 - DNA, 25 bp, Homo sapien
aaagaagtctttaagatctcgttcc

SEQ ID NO: 89091 - DNA, 25 bp, Homo sapien
aattaagacatatggagacctttct

SEQ ID NO: 89092 - DNA, 25 bp, Homo sapien
aattaagacataaggagacctttct

SEQ ID NO: 89093 - DNA, 25 bp, Homo sapien
atgttagagtagaaggtctcctttt

SEQ ID NO: 89094 - DNA, 25 bp, Homo sapien
atgttagagtagtaggtctcctttt

SEQ ID NO: 89095 - DNA, 25 bp, Homo sapien
gctacgttcaaataggtttaccttt

SEQ ID NO: 89096 - DNA, 25 bp, Homo sapien
gctacgttcaaaaaggtttaccttt

SEQ ID NO: 89097 - DNA, 25 bp, Homo sapien
gacaccagaggtacagtattaccaa

SEQ ID NO: 89098 - DNA, 25 bp, Homo sapien
gacaccagaggttcagtattaccaa

SEQ ID NO: 89099 - DNA, 25 bp, Homo sapien
tgacctgaaccctactctcgagaag

SEQ ID NO: 89100 - DNA, 25 bp, Homo sapien
tgacctgaacccaactctcgagaag

SEQ ID NO: 89101 - DNA, 25 bp, Homo sapien
ccctcgtccaacagacaccagactt

SEQ ID NO: 89102 - DNA, 25 bp, Homo sapien
ccctcgtccaactgacaccagactt

SEQ ID NO: 89103 - DNA, 25 bp, Homo sapien
ttcgacgagactgaatggacgtcgt

SEQ ID NO: 89104 - DNA, 25 bp, Homo sapien
ttcgacgagactcaatggacgtcgt

SEQ ID NO: 89105 - DNA, 25 bp, Homo sapien
ctgtcgagaacgaaactcgtttcgt

SEQ ID NO: 89106 - DNA, 25 bp, Homo sapien
ctgtcgagaacgtaactcgtttcgt

SEQ ID NO: 89107 - DNA, 25 bp, Homo sapien
agggaagtccgacactgacccctct

SEQ ID NO: 89108 - DNA, 25 bp, Homo sapien
agggaagtccgagactgacccctct

SEQ ID NO: 89109 - DNA, 25 bp, Homo sapien
ccgaggtccgacgagtgacccgata

SEQ ID NO: 89110 - DNA, 25 bp, Homo sapien
ccgaggtccgaccagtgacccgata

SEQ ID NO: 89111 - DNA, 25 bp, Homo sapien
gccgtgtccgcaagtctcccgtaga

SEQ ID NO: 89112 - DNA, 25 bp, Homo sapien
gccgtgtccgcatgtctcccgtaga

SEQ ID NO: 89113 - DNA, 25 bp, Homo sapien
tcgagtgcgaacaactcccacagct

SEQ ID NO: 89114 - DNA, 25 bp, Homo sapien
tcgagtgcgaactactcccacagct

SEQ ID NO: 89115 - DNA, 25 bp, Homo sapien
agtccgtcgcgagtttcatccacct

SEQ ID NO: 89116 - DNA, 25 bp, Homo sapien
agtccgtcgcgactttcatccacct

SEQ ID NO: 89117 - DNA, 25 bp, Homo sapien
aatgttgttcgacctttcctccaga

SEQ ID NO: 89118 - DNA, 25 bp, Homo sapien
aatgttgttcgagctttcctccaga

SEQ ID NO: 89119 - DNA, 25 bp, Homo sapien
gtgtacagtctgtcctcttcggccc

SEQ ID NO: 89120 - DNA, 25 bp, Homo sapien
gtgtacagtctgacctcttcggccc

SEQ ID NO: 89121 - DNA, 25 bp, Homo sapien
gctaagtgtgaaatgttccactctc

SEQ ID NO: 89122 - DNA, 25 bp, Homo sapien
gctaagtgtgaattgttccactctc

SEQ ID NO: 89123 - DNA, 25 bp, Homo sapien
ggtctgtggaattccgaccgctatg

SEQ ID NO: 89124 - DNA, 25 bp, Homo sapien
ggtctgtggaataccgaccgctatg

SEQ ID NO: 89125 - DNA, 25 bp, Homo sapien
gggtgtcgacaatcggaccttgtcg

SEQ ID NO: 89126 - DNA, 25 bp, Homo sapien
gggtgtcgacaaacggaccttgtcg

SEQ ID NO: 89127 - DNA, 25 bp, Homo sapien
ggttctttctaccaccgtagtcgtg

SEQ ID NO: 89128 - DNA, 25 bp, Homo sapien
ggttctttctacgaccgtagtcgtg

SEQ ID NO: 89129 - DNA, 25 bp, Homo sapien
gtttttcgtactaaaacgtctcagt

SEQ ID NO: 89130 - DNA, 25 bp, Homo sapien
gtttttcgtacttaaacgtctcagt

SEQ ID NO: 89131 - DNA, 25 bp, Homo sapien
tctctgttctaattcgtactctggt

SEQ ID NO: 89132 - DNA, 25 bp, Homo sapien
tctctgttctaaatcgtactctggt

SEQ ID NO: 89133 - DNA, 25 bp, Homo sapien
gcgacaatggttcgatttcgtttgt

SEQ ID NO: 89134 - DNA, 25 bp, Homo sapien
gcgacaatggttggatttcgtttgt

SEQ ID NO: 89135 - DNA, 25 bp, Homo sapien
gagtaaaggttgacatgtctgactc

SEQ ID NO: 89136 - DNA, 25 bp, Homo sapien
gagtaaaggttgtcatgtctgactc

SEQ ID NO: 89137 - DNA, 25 bp, Homo sapien
cgaaatagtcggcccgagtcggggc

SEQ ID NO: 89138 - DNA, 25 bp, Homo sapien
cgaaatagtcgggccgagtcggggc

SEQ ID NO: 89139 - DNA, 25 bp, Homo sapien
actgacgatcagagcgaaccggaag

SEQ ID NO: 89140 - DNA, 25 bp, Homo sapien
actgacgatcagtgcgaaccggaag

SEQ ID NO: 89141 - DNA, 25 bp, Homo sapien
ctgctctggagcttcctccggaact

SEQ ID NO: 89142 - DNA, 25 bp, Homo sapien
ctgctctggagcatcctccggaact

SEQ ID NO: 89143 - DNA, 25 bp, Homo sapien
tgtttagtaatcatctcgcaaagag

SEQ ID NO: 89144 - DNA, 25 bp, Homo sapien
tgtttagtaatcttctcgcaaagag

SEQ ID NO: 89145 - DNA, 25 bp, Homo sapien
cttcgtaggttcgagtcaggtagac

SEQ ID NO: 89146 - DNA, 25 bp, Homo sapien
cttcgtaggttccagtcaggtagac

SEQ ID NO: 89147 - DNA, 25 bp, Homo sapien
gacttcgtgtcttccacgtcagcca

SEQ ID NO: 89148 - DNA, 25 bp, Homo sapien
gacttcgtgtctaccacgtcagcca

SEQ ID NO: 89149 - DNA, 25 bp, Homo sapien
gatcctcgtctactccgggttccgt

SEQ ID NO: 89150 - DNA, 25 bp, Homo sapien
gatcctcgtctagtccgggttccgt

SEQ ID NO: 89151 - DNA, 25 bp, Homo sapien
gtgtgcctcggtgacacggaaatgt

SEQ ID NO: 89152 - DNA, 25 bp, Homo sapien
gtgtgcctcggtcacacggaaatgt

SEQ ID NO: 89153 - DNA, 25 bp, Homo sapien
aaaagtttcctgtgataaaatccgt

SEQ ID NO: 89154 - DNA, 25 bp, Homo sapien
aaaagtttcctgagataaaatccgt

SEQ ID NO: 89155 - DNA, 25 bp, Homo sapien
tctacgtatggatggatataccagt

SEQ ID NO: 89156 - DNA, 25 bp, Homo sapien
tctacgtatggaaggatataccagt

SEQ ID NO: 89157 - DNA, 25 bp, Homo sapien
agaagatcctaaggattgacatcaa

SEQ ID NO: 89158 - DNA, 25 bp, Homo sapien
agaagatcctaacgattgacatcaa

SEQ ID NO: 89159 - DNA, 25 bp, Homo sapien
aatgattatcattacggtaactaag

SEQ ID NO: 89160 - DNA, 25 bp, Homo sapien
aatgattatcataacggtaactaag

SEQ ID NO: 89161 - DNA, 25 bp, Homo sapien
aacgaactaatacagtctttccagg

SEQ ID NO: 89162 - DNA, 25 bp, Homo sapien
aacgaactaatagagtctttccagg

SEQ ID NO: 89163 - DNA, 25 bp, Homo sapien
gtagagaccctcgatctcctcgagg

SEQ ID NO: 89164 - DNA, 25 bp, Homo sapien
gtagagaccctccatctcctcgagg

SEQ ID NO: 89165 - DNA, 25 bp, Homo sapien
aggaggacccacgttcccacgatgt

SEQ ID NO: 89166 - DNA, 25 bp, Homo sapien
aggaggacccaccttcccacgatgt

SEQ ID NO: 89167 - DNA, 25 bp, Homo sapien
gtgtctgtaattctttctcgaccca

SEQ ID NO: 89168 - DNA, 25 bp, Homo sapien
gtgtctgtaattgtttctcgaccca

SEQ ID NO: 89169 - DNA, 25 bp, Homo sapien
gtttgtaagatcctttattacccag

SEQ ID NO: 89170 - DNA, 25 bp, Homo sapien
gtttgtaagatcgtttattacccag

SEQ ID NO: 89171 - DNA, 25 bp, Homo sapien
aagtttgtatttacggtaccacggt

SEQ ID NO: 89172 - DNA, 25 bp, Homo sapien
aagtttgtattttcggtaccacggt

SEQ ID NO: 89173 - DNA, 25 bp, Homo sapien
caccctcgtgtgtggtgtccggagt

SEQ ID NO: 89174 - DNA, 25 bp, Homo sapien
caccctcgtgtgaggtgtccggagt

SEQ ID NO: 89175 - DNA, 25 bp, Homo sapien
ccaaccactgtcacggagggtcgac

SEQ ID NO: 89176 - DNA, 25 bp, Homo sapien
ccaaccactgtctcggagggtcgac

SEQ ID NO: 89177 - DNA, 25 bp, Homo sapien
tgcaagtcaggttccggcaggtgac

SEQ ID NO: 89178 - DNA, 25 bp, Homo sapien
tgcaagtcaggtaccggcaggtgac

SEQ ID NO: 89179 - DNA, 25 bp, Homo sapien
ggcttaccggccaaaccactacgga

SEQ ID NO: 89180 - DNA, 25 bp, Homo sapien
ggcttaccggcctaaccactacgga

SEQ ID NO: 89181 - DNA, 25 bp, Homo sapien
atactagtgctgaaaatctcatgta

SEQ ID NO: 89182 - DNA, 25 bp, Homo sapien
atactagtgctgtaaatctcatgta

SEQ ID NO: 89183 - DNA, 25 bp, Homo sapien
acttatgtcttggttaaatccgttt

SEQ ID NO: 89184 - DNA, 25 bp, Homo sapien
acttatgtcttgcttaaatccgttt

SEQ ID NO: 89185 - DNA, 25 bp, Homo sapien
aggtctacaattgacgagtgaccta

SEQ ID NO: 89186 - DNA, 25 bp, Homo sapien
aggtctacaattcacgagtgaccta

SEQ ID NO: 89187 - DNA, 25 bp, Homo sapien
ttcataggtcagaaagaactgcctt

SEQ ID NO: 89188 - DNA, 25 bp, Homo sapien
ttcataggtcagtaagaactgcctt

SEQ ID NO: 89189 - DNA, 25 bp, Homo sapien
gttccaccataaaacgcagtgttta

SEQ ID NO: 89190 - DNA, 25 bp, Homo sapien
gttccaccataatacgcagtgttta

SEQ ID NO: 89191 - DNA, 25 bp, Homo sapien
gtccctacgaaggacacggtattga

SEQ ID NO: 89192 - DNA, 25 bp, Homo sapien
gtccctacgaagcacacggtattga

SEQ ID NO: 89193 - DNA, 25 bp, Homo sapien
agtccaccaggaacttgtcgcgaga

SEQ ID NO: 89194 - DNA, 25 bp, Homo sapien
agtccaccaggatcttgtcgcgaga

SEQ ID NO: 89195 - DNA, 25 bp, Homo sapien
acgaactcactaagtacctaaggaa

SEQ ID NO: 89196 - DNA, 25 bp, Homo sapien
acgaactcactatgtacctaaggaa

SEQ ID NO: 89197 - DNA, 25 bp, Homo sapien
cgtgaaccggacagtgccacggaaa

SEQ ID NO: 89198 - DNA, 25 bp, Homo sapien
cgtgaaccggactgtgccacggaaa

SEQ ID NO: 89199 - DNA, 25 bp, Homo sapien
gttgattcaccttcaactaagtgaa

SEQ ID NO: 89200 - DNA, 25 bp, Homo sapien
gttgattcacctacaactaagtgaa

SEQ ID NO: 89201 - DNA, 25 bp, Homo sapien
gtgattcactacaattaataccagg

SEQ ID NO: 89202 - DNA, 25 bp, Homo sapien
gtgattcactactattaataccagg

SEQ ID NO: 89203 - DNA, 25 bp, Homo sapien
ttgtctacgtggtaaccccagatgt

SEQ ID NO: 89204 - DNA, 25 bp, Homo sapien
ttgtctacgtggaaaccccagatgt

SEQ ID NO: 89205 - DNA, 25 bp, Homo sapien
ttttcgtaaaggtcggtcccctcat

SEQ ID NO: 89206 - DNA, 25 bp, Homo sapien
ttttcgtaaaggacggtcccctcat

SEQ ID NO: 89207 - DNA, 25 bp, Homo sapien
gttcgtaaagtgagtgtctcctcaa

SEQ ID NO: 89208 - DNA, 25 bp, Homo sapien
gttcgtaaagtgtgtgtctcctcaa

SEQ ID NO: 89209 - DNA, 25 bp, Homo sapien
ttcaagttcgtgtctctatgtttag

SEQ ID NO: 89210 - DNA, 25 bp, Homo sapien
ttcaagttcgtgactctatgtttag

SEQ ID NO: 89211 - DNA, 25 bp, Homo sapien
cttcttttcgggttctagcttctac

SEQ ID NO: 89212 - DNA, 25 bp, Homo sapien
cttcttttcgggatctagcttctac

SEQ ID NO: 89213 - DNA, 25 bp, Homo sapien
gttgttgtttctttgaataccacta

SEQ ID NO: 89214 - DNA, 25 bp, Homo sapien
gttgttgtttctatgaataccacta

SEQ ID NO: 89215 - DNA, 25 bp, Homo sapien
tgttattttcttttacaaagaccat

SEQ ID NO: 89216 - DNA, 25 bp, Homo sapien
tgttattttcttatacaaagaccat

SEQ ID NO: 89217 - DNA, 25 bp, Homo sapien
gttaattctaaaattaacacaagat

SEQ ID NO: 89218 - DNA, 25 bp, Homo sapien
gttaattctaaatttaacacaagat

SEQ ID NO: 89219 - DNA, 25 bp, Homo sapien
ttttgttggacttacaactcaagtc

SEQ ID NO: 89220 - DNA, 25 bp, Homo sapien
ttttgttggactaacaactcaagtc

SEQ ID NO: 89221 - DNA, 25 bp, Homo sapien
gttcagcgagaaccactacggtgac

SEQ ID NO: 89222 - DNA, 25 bp, Homo sapien
gttcagcgagaagcactacggtgac

SEQ ID NO: 89223 - DNA, 25 bp, Homo sapien
ggtttgactaactcactgtaggacg

SEQ ID NO: 89224 - DNA, 25 bp, Homo sapien
ggtttgactaacacactgtaggacg

SEQ ID NO: 89225 - DNA, 25 bp, Homo sapien
ggggttgtccgtcagcaccggaaac

SEQ ID NO: 89226 - DNA, 25 bp, Homo sapien
ggggttgtccgtgagcaccggaaac

SEQ ID NO: 89227 - DNA, 25 bp, Homo sapien
cctaggatttcttgcggacctaggg

SEQ ID NO: 89228 - DNA, 25 bp, Homo sapien
cctaggatttctagcggacctaggg

SEQ ID NO: 89229 - DNA, 25 bp, Homo sapien
ccttgactttcttggagttctaggg

SEQ ID NO: 89230 - DNA, 25 bp, Homo sapien
ccttgactttctaggagttctaggg

SEQ ID NO: 89231 - DNA, 25 bp, Homo sapien
tagacattagataggtcttactatc

SEQ ID NO: 89232 - DNA, 25 bp, Homo sapien
tagacattagattggtcttactatc

SEQ ID NO: 89233 - DNA, 25 bp, Homo sapien
tgtaagtcgggtttagtcatctatc

SEQ ID NO: 89234 - DNA, 25 bp, Homo sapien
tgtaagtcgggtatagtcatctatc

SEQ ID NO: 89235 - DNA, 25 bp, Homo sapien
tgtatttctgacagactataaatga

SEQ ID NO: 89236 - DNA, 25 bp, Homo sapien
tgtatttctgactgactataaatga

SEQ ID NO: 89237 - DNA, 25 bp, Homo sapien
tcgactcgttctagggttgtttgac

SEQ ID NO: 89238 - DNA, 25 bp, Homo sapien
tcgactcgttcttgggttgtttgac

SEQ ID NO: 89239 - DNA, 25 bp, Homo sapien
caggggacttcaggtggtcttcgta

SEQ ID NO: 89240 - DNA, 25 bp, Homo sapien
caggggacttcacgtggtcttcgta

SEQ ID NO: 89241 - DNA, 25 bp, Homo sapien
gaggtccgagcgtcgcctgtcttga

SEQ ID NO: 89242 - DNA, 25 bp, Homo sapien
gaggtccgagcgacgcctgtcttga

SEQ ID NO: 89243 - DNA, 25 bp, Homo sapien
tttttcacgattgtctcgtttagac

SEQ ID NO: 89244 - DNA, 25 bp, Homo sapien
tttttcacgattctctcgtttagac

SEQ ID NO: 89245 - DNA, 25 bp, Homo sapien
ggcgtcccaacctcttctgtggtcg

SEQ ID NO: 89246 - DNA, 25 bp, Homo sapien
ggcgtcccaaccacttctgtggtcg

SEQ ID NO: 89247 - DNA, 25 bp, Homo sapien
ctcccacgacttctgagtgttgtcg

SEQ ID NO: 89248 - DNA, 25 bp, Homo sapien
ctcccacgacttgtgagtgttgtcg

SEQ ID NO: 89249 - DNA, 25 bp, Homo sapien
tcgtttaagacctttcatcaggagt

SEQ ID NO: 89250 - DNA, 25 bp, Homo sapien
tcgtttaagaccattcatcaggagt

SEQ ID NO: 89251 - DNA, 25 bp, Homo sapien
tgtcttctaggcttttcactccgga

SEQ ID NO: 89252 - DNA, 25 bp, Homo sapien
tgtcttctaggcatttcactccgga

SEQ ID NO: 89253 - DNA, 25 bp, Homo sapien
cggttgccacttacacactcgcggt

SEQ ID NO: 89254 - DNA, 25 bp, Homo sapien
cggttgccactttcacactcgcggt

SEQ ID NO: 89255 - DNA, 25 bp, Homo sapien
tgggtacttcttcctcacctgagct

SEQ ID NO: 89256 - DNA, 25 bp, Homo sapien
tgggtacttcttgctcacctgagct

SEQ ID NO: 89257 - DNA, 25 bp, Homo sapien
ttccggtggccgtttgtcccgttgt

SEQ ID NO: 89258 - DNA, 25 bp, Homo sapien
ttccggtggccgattgtcccgttgt

SEQ ID NO: 89259 - DNA, 25 bp, Homo sapien
ccagttgcccgatctgagatcttcg

SEQ ID NO: 89260 - DNA, 25 bp, Homo sapien
ccagttgcccgaactgagatcttcg

SEQ ID NO: 89261 - DNA, 25 bp, Homo sapien
atttcacactacatagagacctgtg

SEQ ID NO: 89262 - DNA, 25 bp, Homo sapien
atttcacactacttagagacctgtg

SEQ ID NO: 89263 - DNA, 25 bp, Homo sapien
tatgtcgactgtcagagagtcctaa

SEQ ID NO: 89264 - DNA, 25 bp, Homo sapien
tatgtcgactgtgagagagtcctaa

SEQ ID NO: 89265 - DNA, 25 bp, Homo sapien
gtcatagttgaaaatatacacacgt

SEQ ID NO: 89266 - DNA, 25 bp, Homo sapien
gtcatagttgaatatatacacacgt

SEQ ID NO: 89267 - DNA, 25 bp, Homo sapien
ggtaactatcttgacctcctacaca

SEQ ID NO: 89268 - DNA, 25 bp, Homo sapien
ggtaactatcttcacctcctacaca

SEQ ID NO: 89269 - DNA, 25 bp, Homo sapien
tacgccacatcaactagacaaagga

SEQ ID NO: 89270 - DNA, 25 bp, Homo sapien
tacgccacatcatctagacaaagga

SEQ ID NO: 89271 - DNA, 25 bp, Homo sapien
cgtcctcgtccgtaccgaaacaaag

SEQ ID NO: 89272 - DNA, 25 bp, Homo sapien
cgtcctcgtccgaaccgaaacaaag

SEQ ID NO: 89273 - DNA, 25 bp, Homo sapien
cttccttccgctacgagagacaatg

SEQ ID NO: 89274 - DNA, 25 bp, Homo sapien
cttccttccgcttcgagagacaatg

SEQ ID NO: 89275 - DNA, 25 bp, Homo sapien
ggttctaggaccaactcaaacacca

SEQ ID NO: 89276 - DNA, 25 bp, Homo sapien
ggttctaggacctactcaaacacca

SEQ ID NO: 89277 - DNA, 25 bp, Homo sapien
gctttgtctccctcggaacacatgt

SEQ ID NO: 89278 - DNA, 25 bp, Homo sapien
gctttgtctcccacggaacacatgt

SEQ ID NO: 89279 - DNA, 25 bp, Homo sapien
ggcagggacatcgacgagacaaatc

SEQ ID NO: 89280 - DNA, 25 bp, Homo sapien
ggcagggacatccacgagacaaatc

SEQ ID NO: 89281 - DNA, 25 bp, Homo sapien
agaggtgtatgctacaaacactacg

SEQ ID NO: 89282 - DNA, 25 bp, Homo sapien
agaggtgtatgcaacaaacactacg

SEQ ID NO: 89283 - DNA, 25 bp, Homo sapien
tacacaggggtaagcatcatgaata

SEQ ID NO: 89284 - DNA, 25 bp, Homo sapien
tacacaggggtatgcatcatgaata

SEQ ID NO: 89285 - DNA, 25 bp, Homo sapien
aaaacagtctttctttagggatact

SEQ ID NO: 89286 - DNA, 25 bp, Homo sapien
aaaacagtctttgtttagggatact

SEQ ID NO: 89287 - DNA, 25 bp, Homo sapien
tcgctcgcgtcgtacaggaggtcgt

SEQ ID NO: 89288 - DNA, 25 bp, Homo sapien
tcgctcgcgtcgaacaggaggtcgt

SEQ ID NO: 89289 - DNA, 25 bp, Homo sapien
tcctgtctcgctgaatgtggcgtct

SEQ ID NO: 89290 - DNA, 25 bp, Homo sapien
tcctgtctcgctcaatgtggcgtct

SEQ ID NO: 89291 - DNA, 25 bp, Homo sapien
tctctctctcctccagtggttgact

SEQ ID NO: 89292 - DNA, 25 bp, Homo sapien
tctctctctcctgcagtggttgact

SEQ ID NO: 89293 - DNA, 25 bp, Homo sapien
caccctttccgctgacgaggacgga

SEQ ID NO: 89294 - DNA, 25 bp, Homo sapien
caccctttccgcagacgaggacgga

SEQ ID NO: 89295 - DNA, 25 bp, Homo sapien
gtacatgaagagtacgtcgagcgag

SEQ ID NO: 89296 - DNA, 25 bp, Homo sapien
gtacatgaagagaacgtcgagcgag

SEQ ID NO: 89297 - DNA, 25 bp, Homo sapien
cctaggcccgaaagagtgacatcac

SEQ ID NO: 89298 - DNA, 25 bp, Homo sapien
cctaggcccgaatgagtgacatcac

SEQ ID NO: 89299 - DNA, 25 bp, Homo sapien
ggttccaggttcatcttatgttccc

SEQ ID NO: 89300 - DNA, 25 bp, Homo sapien
ggttccaggttcttcttatgttccc

SEQ ID NO: 89301 - DNA, 25 bp, Homo sapien
ttcagaagatataacttcttttcgg

SEQ ID NO: 89302 - DNA, 25 bp, Homo sapien
ttcagaagatattacttcttttcgg

SEQ ID NO: 89303 - DNA, 25 bp, Homo sapien
gagaccgcttacaggcgtatcatgg

SEQ ID NO: 89304 - DNA, 25 bp, Homo sapien
gagaccgcttactggcgtatcatgg

SEQ ID NO: 89305 - DNA, 25 bp, Homo sapien
aacccaccgttgtattcatagacgt

SEQ ID NO: 89306 - DNA, 25 bp, Homo sapien
aacccaccgttgaattcatagacgt

SEQ ID NO: 89307 - DNA, 25 bp, Homo sapien
tcctacgtcgttacgtttcgtaata

SEQ ID NO: 89308 - DNA, 25 bp, Homo sapien
tcctacgtcgtttcgtttcgtaata

SEQ ID NO: 89309 - DNA, 25 bp, Homo sapien
atgcaccctaactttacgtgtatgt

SEQ ID NO: 89310 - DNA, 25 bp, Homo sapien
atgcaccctaacattacgtgtatgt

SEQ ID NO: 89311 - DNA, 25 bp, Homo sapien
ttgttttaccgaacgttgtagtctt

SEQ ID NO: 89312 - DNA, 25 bp, Homo sapien
ttgttttaccgatcgttgtagtctt

SEQ ID NO: 89313 - DNA, 25 bp, Homo sapien
gtgaagtgtttatccttaatatcct

SEQ ID NO: 89314 - DNA, 25 bp, Homo sapien
gtgaagtgtttaaccttaatatcct

SEQ ID NO: 89315 - DNA, 25 bp, Homo sapien
ggttactcgtttgtcttggtctcct

SEQ ID NO: 89316 - DNA, 25 bp, Homo sapien
ggttactcgtttctcttggtctcct

SEQ ID NO: 89317 - DNA, 25 bp, Homo sapien
gttctacatcttcgaatgtatcccg

SEQ ID NO: 89318 - DNA, 25 bp, Homo sapien
gttctacatcttggaatgtatcccg

SEQ ID NO: 89319 - DNA, 25 bp, Homo sapien
tcgccggcatggtcttcgtgtccta

SEQ ID NO: 89320 - DNA, 25 bp, Homo sapien
tcgccggcatggacttcgtgtccta

SEQ ID NO: 89321 - DNA, 25 bp, Homo sapien
gccgttcaggtcgtggtgtatccct

SEQ ID NO: 89322 - DNA, 25 bp, Homo sapien
gccgttcaggtcctggtgtatccct

SEQ ID NO: 89323 - DNA, 25 bp, Homo sapien
acacgcggcacgtggtgatgacccc

SEQ ID NO: 89324 - DNA, 25 bp, Homo sapien
acacgcggcacgaggtgatgacccc

SEQ ID NO: 89325 - DNA, 25 bp, Homo sapien
aagagaacgacgactggggtcccat

SEQ ID NO: 89326 - DNA, 25 bp, Homo sapien
aagagaacgacgtctggggtcccat

SEQ ID NO: 89327 - DNA, 25 bp, Homo sapien
tgaaagacgtcgcggacgcgctgca

SEQ ID NO: 89328 - DNA, 25 bp, Homo sapien
tgaaagacgtcggggacgcgctgca

SEQ ID NO: 89329 - DNA, 25 bp, Homo sapien
gggagactaccgtggtggtcgacca

SEQ ID NO: 89330 - DNA, 25 bp, Homo sapien
gggagactaccgaggtggtcgacca

SEQ ID NO: 89331 - DNA, 25 bp, Homo sapien
cagagactttagactcctgaccgac

SEQ ID NO: 89332 - DNA, 25 bp, Homo sapien
cagagactttagtctcctgaccgac

SEQ ID NO: 89333 - DNA, 25 bp, Homo sapien
gtgatgattcttacaactgacgaga

SEQ ID NO: 89334 - DNA, 25 bp, Homo sapien
gtgatgattctttcaactgacgaga

SEQ ID NO: 89335 - DNA, 25 bp, Homo sapien
gtctgtgctattcgtcacaccagaa

SEQ ID NO: 89336 - DNA, 25 bp, Homo sapien
gtctgtgctattggtcacaccagaa

SEQ ID NO: 89337 - DNA, 25 bp, Homo sapien
ggtttccttctttccgaccagagag

SEQ ID NO: 89338 - DNA, 25 bp, Homo sapien
ggtttccttcttaccgaccagagag

SEQ ID NO: 89339 - DNA, 25 bp, Homo sapien
ggtaactaacggttctcgaccaggg

SEQ ID NO: 89340 - DNA, 25 bp, Homo sapien
ggtaactaacggatctcgaccaggg

SEQ ID NO: 89341 - DNA, 25 bp, Homo sapien
gttggttctaccactataaccattg

SEQ ID NO: 89342 - DNA, 25 bp, Homo sapien
gttggttctacctctataaccattg

SEQ ID NO: 89343 - DNA, 25 bp, Homo sapien
agaagccttttcagtctgtatctcg

SEQ ID NO: 89344 - DNA, 25 bp, Homo sapien
agaagccttttctgtctgtatctcg

SEQ ID NO: 89345 - DNA, 25 bp, Homo sapien
gtcgatccatttttcgtatgtataa

SEQ ID NO: 89346 - DNA, 25 bp, Homo sapien
gtcgatccatttatcgtatgtataa

SEQ ID NO: 89347 - DNA, 25 bp, Homo sapien
tcagtctgaggtttaagtctcataa

SEQ ID NO: 89348 - DNA, 25 bp, Homo sapien
tcagtctgaggtataagtctcataa

SEQ ID NO: 89349 - DNA, 25 bp, Homo sapien
ttatagtttacctctaggtcaatag

SEQ ID NO: 89350 - DNA, 25 bp, Homo sapien
ttatagtttaccactaggtcaatag

SEQ ID NO: 89351 - DNA, 25 bp, Homo sapien
cctgttccttctctctggaccaggt

SEQ ID NO: 89352 - DNA, 25 bp, Homo sapien
cctgttccttctgtctggaccaggt

SEQ ID NO: 89353 - DNA, 25 bp, Homo sapien
attcgttcccacttttcctgacagg

SEQ ID NO: 89354 - DNA, 25 bp, Homo sapien
attcgttcccacatttcctgacagg

SEQ ID NO: 89355 - DNA, 25 bp, Homo sapien
actgggtcagttgtttcctcgaaag

SEQ ID NO: 89356 - DNA, 25 bp, Homo sapien
actgggtcagttctttcctcgaaag

SEQ ID NO: 89357 - DNA, 25 bp, Homo sapien
cttaggtctatgttcttttccaaag

SEQ ID NO: 89358 - DNA, 25 bp, Homo sapien
cttaggtctatgatcttttccaaag

SEQ ID NO: 89359 - DNA, 25 bp, Homo sapien
taagtgtttggatctttatcaaatt

SEQ ID NO: 89360 - DNA, 25 bp, Homo sapien
taagtgtttggaactttatcaaatt

SEQ ID NO: 89361 - DNA, 25 bp, Homo sapien
gcaatgtgtaactattcacgaatct

SEQ ID NO: 89362 - DNA, 25 bp, Homo sapien
gcaatgtgtaacaattcacgaatct

SEQ ID NO: 89363 - DNA, 25 bp, Homo sapien
cagtatgtcgaaaaccactatatat

SEQ ID NO: 89364 - DNA, 25 bp, Homo sapien
cagtatgtcgaataccactatatat

SEQ ID NO: 89365 - DNA, 25 bp, Homo sapien
gtgtactacaagacagccctaattt

SEQ ID NO: 89366 - DNA, 25 bp, Homo sapien
gtgtactacaagtcagccctaattt

SEQ ID NO: 89367 - DNA, 25 bp, Homo sapien
gagatctcaacacacgcgcaaaatt

SEQ ID NO: 89368 - DNA, 25 bp, Homo sapien
gagatctcaacagacgcgcaaaatt

SEQ ID NO: 89369 - DNA, 25 bp, Homo sapien
cgagtgttcgaaaagaggccattaa

SEQ ID NO: 89370 - DNA, 25 bp, Homo sapien
cgagtgttcgaatagaggccattaa

SEQ ID NO: 89371 - DNA, 25 bp, Homo sapien
ataaagtggtaagaaatccaccaat

SEQ ID NO: 89372 - DNA, 25 bp, Homo sapien
ataaagtggtaacaaatccaccaat

SEQ ID NO: 89373 - DNA, 25 bp, Homo sapien
aacccgttcggacaaggttccccga

SEQ ID NO: 89374 - DNA, 25 bp, Homo sapien
aacccgttcggagaaggttccccga

SEQ ID NO: 89375 - DNA, 25 bp, Homo sapien
tgttagagacagtagccgactaggt

SEQ ID NO: 89376 - DNA, 25 bp, Homo sapien
tgttagagacagaagccgactaggt

SEQ ID NO: 89377 - DNA, 25 bp, Homo sapien
gtttcgttgaagaaagaccactaga

SEQ ID NO: 89378 - DNA, 25 bp, Homo sapien
gtttcgttgaagtaagaccactaga

SEQ ID NO: 89379 - DNA, 25 bp, Homo sapien
ggttagtccccaataaaagacggta

SEQ ID NO: 89380 - DNA, 25 bp, Homo sapien
ggttagtccccattaaaagacggta

SEQ ID NO: 89381 - DNA, 25 bp, Homo sapien
ggaaccggtccagtcacgaggtgtt

SEQ ID NO: 89382 - DNA, 25 bp, Homo sapien
ggaaccggtccactcacgaggtgtt

SEQ ID NO: 89383 - DNA, 25 bp, Homo sapien
caggagattctccacagtaagtccg

SEQ ID NO: 89384 - DNA, 25 bp, Homo sapien
caggagattctcgacagtaagtccg

SEQ ID NO: 89385 - DNA, 25 bp, Homo sapien
aaacaggtgatccttccttgtgaag

SEQ ID NO: 89386 - DNA, 25 bp, Homo sapien
aaacaggtgatcgttccttgtgaag

SEQ ID NO: 89387 - DNA, 25 bp, Homo sapien
ctaagccttcgtgatcctgggatct

SEQ ID NO: 89388 - DNA, 25 bp, Homo sapien
ctaagccttcgtcatcctgggatct

SEQ ID NO: 89389 - DNA, 25 bp, Homo sapien
tgacacatgttgtcacttgagatgt

SEQ ID NO: 89390 - DNA, 25 bp, Homo sapien
tgacacatgttgacacttgagatgt

SEQ ID NO: 89391 - DNA, 25 bp, Homo sapien
gtagaagtcattagtcgaacttaaa

SEQ ID NO: 89392 - DNA, 25 bp, Homo sapien
gtagaagtcatttgtcgaacttaaa

SEQ ID NO: 89393 - DNA, 25 bp, Homo sapien
caaacgatactttgtcaatgatgat

SEQ ID NO: 89394 - DNA, 25 bp, Homo sapien
caaacgatacttagtcaatgatgat

SEQ ID NO: 89395 - DNA, 25 bp, Homo sapien
agaactacgttgtaacatctcgtcc

SEQ ID NO: 89396 - DNA, 25 bp, Homo sapien
agaactacgttgaaacatctcgtcc

SEQ ID NO: 89397 - DNA, 25 bp, Homo sapien
aaggtgaccatgttttacgtattca

SEQ ID NO: 89398 - DNA, 25 bp, Homo sapien
aaggtgaccatgatttacgtattca

SEQ ID NO: 89399 - DNA, 25 bp, Homo sapien
caatgtgaacacgagttcattatta

SEQ ID NO: 89400 - DNA, 25 bp, Homo sapien
caatgtgaacaccagttcattatta

SEQ ID NO: 89401 - DNA, 25 bp, Homo sapien
tacagggaaaccgaattcttaataa

SEQ ID NO: 89402 - DNA, 25 bp, Homo sapien
tacagggaaacccaattcttaataa

SEQ ID NO: 89403 - DNA, 25 bp, Homo sapien
agagacctatccacttttagatagg

SEQ ID NO: 89404 - DNA, 25 bp, Homo sapien
agagacctatcctcttttagatagg

SEQ ID NO: 89405 - DNA, 25 bp, Homo sapien
gtcgtgtcaaattcgttaagtatac

SEQ ID NO: 89406 - DNA, 25 bp, Homo sapien
gtcgtgtcaaatacgttaagtatac

SEQ ID NO: 89407 - DNA, 25 bp, Homo sapien
aactgtccgtctcattataaagtga

SEQ ID NO: 89408 - DNA, 25 bp, Homo sapien
aactgtccgtctgattataaagtga

SEQ ID NO: 89409 - DNA, 25 bp, Homo sapien
ttaaactaggggtcacaaacgagaa

SEQ ID NO: 89410 - DNA, 25 bp, Homo sapien
ttaaactaggggacacaaacgagaa

SEQ ID NO: 89411 - DNA, 25 bp, Homo sapien
taaaaggtccaacattactgtagat

SEQ ID NO: 89412 - DNA, 25 bp, Homo sapien
taaaaggtccaagattactgtagat

SEQ ID NO: 89413 - DNA, 25 bp, Homo sapien
tggagagtcccaagacgaacgagga

SEQ ID NO: 89414 - DNA, 25 bp, Homo sapien
tggagagtcccatgacgaacgagga

SEQ ID NO: 89415 - DNA, 25 bp, Homo sapien
tatcgtacaccaactcgaacggttt

SEQ ID NO: 89416 - DNA, 25 bp, Homo sapien
tatcgtacaccatctcgaacggttt

SEQ ID NO: 89417 - DNA, 25 bp, Homo sapien
gtactgacaccaactaacgtcgaaa

SEQ ID NO: 89418 - DNA, 25 bp, Homo sapien
gtactgacaccatctaacgtcgaaa

SEQ ID NO: 89419 - DNA, 25 bp, Homo sapien
acatagagacgagagtagacctgga

SEQ ID NO: 89420 - DNA, 25 bp, Homo sapien
acatagagacgacagtagacctgga

SEQ ID NO: 89421 - DNA, 25 bp, Homo sapien
tctactgtgtctcgttcccgtctta

SEQ ID NO: 89422 - DNA, 25 bp, Homo sapien
tctactgtgtctggttcccgtctta

SEQ ID NO: 89423 - DNA, 25 bp, Homo sapien
cgacttcgggtccttttccgatgtt

SEQ ID NO: 89424 - DNA, 25 bp, Homo sapien
cgacttcgggtcgttttccgatgtt

SEQ ID NO: 89425 - DNA, 25 bp, Homo sapien
cctctgtgaccttggagtccagata

SEQ ID NO: 89426 - DNA, 25 bp, Homo sapien
cctctgtgacctaggagtccagata

SEQ ID NO: 89427 - DNA, 25 bp, Homo sapien
agattacacaacgtccaaattgctg

SEQ ID NO: 89428 - DNA, 25 bp, Homo sapien
agattacacaacctccaaattgctg

SEQ ID NO: 89429 - DNA, 25 bp, Homo sapien
cctgggcacgacatggcttcgcgtg

SEQ ID NO: 89430 - DNA, 25 bp, Homo sapien
cctgggcacgacttggcttcgcgtg

SEQ ID NO: 89431 - DNA, 25 bp, Homo sapien
tcggtatgctcttcggtgtccgtgg

SEQ ID NO: 89432 - DNA, 25 bp, Homo sapien
tcggtatgctctacggtgtccgtgg

SEQ ID NO: 89433 - DNA, 25 bp, Homo sapien
tcgtgttacaaaccttagccggact

SEQ ID NO: 89434 - DNA, 25 bp, Homo sapien
tcgtgttacaaagcttagccggact

SEQ ID NO: 89435 - DNA, 25 bp, Homo sapien
cttttacttacacggtccactgtat

SEQ ID NO: 89436 - DNA, 25 bp, Homo sapien
cttttacttacagggtccactgtat

SEQ ID NO: 89437 - DNA, 25 bp, Homo sapien
cccttcgacctaagggttgacagtc

SEQ ID NO: 89438 - DNA, 25 bp, Homo sapien
cccttcgacctatgggttgacagtc

SEQ ID NO: 89439 - DNA, 25 bp, Homo sapien
tagttaaatcccttggggtcaatat

SEQ ID NO: 89440 - DNA, 25 bp, Homo sapien
tagttaaatcccatggggtcaatat

SEQ ID NO: 89441 - DNA, 25 bp, Homo sapien
tggcacgttcgaaggtgaaccacgg

SEQ ID NO: 89442 - DNA, 25 bp, Homo sapien
tggcacgttcgatggtgaaccacgg

SEQ ID NO: 89443 - DNA, 25 bp, Homo sapien
gttcattagaaggacataccacggt

SEQ ID NO: 89444 - DNA, 25 bp, Homo sapien
gttcattagaagcacataccacggt

SEQ ID NO: 89445 - DNA, 25 bp, Homo sapien
ttggtccctgtcttccgaaactctt

SEQ ID NO: 89446 - DNA, 25 bp, Homo sapien
ttggtccctgtcatccgaaactctt

SEQ ID NO: 89447 - DNA, 25 bp, Homo sapien
gcggtccccgtacaacgaaaacttc

SEQ ID NO: 89448 - DNA, 25 bp, Homo sapien
gcggtccccgtagaacgaaaacttc

SEQ ID NO: 89449 - DNA, 25 bp, Homo sapien
ggtaccagaattaacttgacataca

SEQ ID NO: 89450 - DNA, 25 bp, Homo sapien
ggtaccagaatttacttgacataca

SEQ ID NO: 89451 - DNA, 25 bp, Homo sapien
ttatgaagaatcgatgacatcgtac

SEQ ID NO: 89452 - DNA, 25 bp, Homo sapien
ttatgaagaatccatgacatcgtac

SEQ ID NO: 89453 - DNA, 25 bp, Homo sapien
ctgtcctcgtagatgccaactcttc

SEQ ID NO: 89454 - DNA, 25 bp, Homo sapien
ctgtcctcgtagttgccaactcttc

SEQ ID NO: 89455 - DNA, 25 bp, Homo sapien
atgtacccattaacagacctatctg

SEQ ID NO: 89456 - DNA, 25 bp, Homo sapien
atgtacccattatcagacctatctg

SEQ ID NO: 89457 - DNA, 25 bp, Homo sapien
agagagaggaaattacgctcctttg

SEQ ID NO: 89458 - DNA, 25 bp, Homo sapien
agagagaggaaaatacgctcctttg

SEQ ID NO: 89459 - DNA, 25 bp, Homo sapien
gaactgaaaaaatgactcctctgcg

SEQ ID NO: 89460 - DNA, 25 bp, Homo sapien
gaactgaaaaaaagactcctctgcg

SEQ ID NO: 89461 - DNA, 25 bp, Homo sapien
acatcccaaagagaggtcacactta

SEQ ID NO: 89462 - DNA, 25 bp, Homo sapien
acatcccaaagacaggtcacactta

SEQ ID NO: 89463 - DNA, 25 bp, Homo sapien
ccttacaacttaaggtcacgttctg

SEQ ID NO: 89464 - DNA, 25 bp, Homo sapien
ccttacaacttatggtcacgttctg

SEQ ID NO: 89465 - DNA, 25 bp, Homo sapien
ttgacccttttgtgttttcttctct

SEQ ID NO: 89466 - DNA, 25 bp, Homo sapien
ttgacccttttgagttttcttctct

SEQ ID NO: 89467 - DNA, 25 bp, Homo sapien
ggtccatcacataatctcgtctcgt

SEQ ID NO: 89468 - DNA, 25 bp, Homo sapien
ggtccatcacattatctcgtctcgt

SEQ ID NO: 89469 - DNA, 25 bp, Homo sapien
gagtccggtattatcaaaaactcca

SEQ ID NO: 89470 - DNA, 25 bp, Homo sapien
gagtccggtattttcaaaaactcca

SEQ ID NO: 89471 - DNA, 25 bp, Homo sapien
cgatatcattacagaggacaccgga

SEQ ID NO: 89472 - DNA, 25 bp, Homo sapien
cgatatcattactgaggacaccgga

SEQ ID NO: 89473 - DNA, 25 bp, Homo sapien
aaacgatttgttgtccataacgaga

SEQ ID NO: 89474 - DNA, 25 bp, Homo sapien
aaacgatttgttctccataacgaga

SEQ ID NO: 89475 - DNA, 25 bp, Homo sapien
gtagtttaattctggccacgacgat

SEQ ID NO: 89476 - DNA, 25 bp, Homo sapien
gtagtttaattcaggccacgacgat

SEQ ID NO: 89477 - DNA, 25 bp, Homo sapien
tactttcctctgtagtcttaccagt

SEQ ID NO: 89478 - DNA, 25 bp, Homo sapien
tactttcctctgaagtcttaccagt

SEQ ID NO: 89479 - DNA, 25 bp, Homo sapien
tactacctccactaagtggacaagt

SEQ ID NO: 89480 - DNA, 25 bp, Homo sapien
tactacctccacaaagtggacaagt

SEQ ID NO: 89481 - DNA, 25 bp, Homo sapien
agaacaactcggaacatgaacccct

SEQ ID NO: 89482 - DNA, 25 bp, Homo sapien
agaacaactcggtacatgaacccct

SEQ ID NO: 89483 - DNA, 25 bp, Homo sapien
cgacacaagccgagcaagagcctgg

SEQ ID NO: 89484 - DNA, 25 bp, Homo sapien
cgacacaagccgtgcaagagcctgg

SEQ ID NO: 89485 - DNA, 25 bp, Homo sapien
tcaagacggttgacaggacgtataa

SEQ ID NO: 89486 - DNA, 25 bp, Homo sapien
tcaagacggttgtcaggacgtataa

SEQ ID NO: 89487 - DNA, 25 bp, Homo sapien
acaagtggtggtctaactacttaga

SEQ ID NO: 89488 - DNA, 25 bp, Homo sapien
acaagtggtggtgtaactacttaga

SEQ ID NO: 89489 - DNA, 25 bp, Homo sapien
aaacagggtcggagttgactgagac

SEQ ID NO: 89490 - DNA, 25 bp, Homo sapien
aaacagggtcggtgttgactgagac

SEQ ID NO: 89491 - DNA, 25 bp, Homo sapien
gacaaggacgtcctgttgttgtagc

SEQ ID NO: 89492 - DNA, 25 bp, Homo sapien
gacaaggacgtcgtgttgttgtagc

SEQ ID NO: 89493 - DNA, 25 bp, Homo sapien
acggatagtaacttttctgtgattc

SEQ ID NO: 89494 - DNA, 25 bp, Homo sapien
acggatagtaacatttctgtgattc

SEQ ID NO: 89495 - DNA, 25 bp, Homo sapien
acattgattacagtcatgtattgtc

SEQ ID NO: 89496 - DNA, 25 bp, Homo sapien
acattgattacactcatgtattgtc

SEQ ID NO: 89497 - DNA, 25 bp, Homo sapien
gaacttagaaaacgtattacccaga

SEQ ID NO: 89498 - DNA, 25 bp, Homo sapien
gaacttagaaaaggtattacccaga

SEQ ID NO: 89499 - DNA, 25 bp, Homo sapien
cgaaatttagagaggaaccttacat

SEQ ID NO: 89500 - DNA, 25 bp, Homo sapien
cgaaatttagagtggaaccttacat

SEQ ID NO: 89501 - DNA, 25 bp, Homo sapien
ataatatacttgttggacctgtctt

SEQ ID NO: 89502 - DNA, 25 bp, Homo sapien
ataatatacttgatggacctgtctt

SEQ ID NO: 89503 - DNA, 25 bp, Homo sapien
gtgtaagttcagagggaccgtgcac

SEQ ID NO: 89504 - DNA, 25 bp, Homo sapien
gtgtaagttcagtgggaccgtgcac

SEQ ID NO: 89505 - DNA, 25 bp, Homo sapien
gatctcttggtgttcgggccggcac

SEQ ID NO: 89506 - DNA, 25 bp, Homo sapien
gatctcttggtgatcgggccggcac

SEQ ID NO: 89507 - DNA, 25 bp, Homo sapien
ccttctctcgggtgatgtcggcggc

SEQ ID NO: 89508 - DNA, 25 bp, Homo sapien
ccttctctcgggagatgtcggcggc

SEQ ID NO: 89509 - DNA, 25 bp, Homo sapien
ctgactcagtgtaaatccactaccg

SEQ ID NO: 89510 - DNA, 25 bp, Homo sapien
ctgactcagtgttaatccactaccg

SEQ ID NO: 89511 - DNA, 25 bp, Homo sapien
ttaaacttggattactcggtacgtt

SEQ ID NO: 89512 - DNA, 25 bp, Homo sapien
ttaaacttggataactcggtacgtt

SEQ ID NO: 89513 - DNA, 25 bp, Homo sapien
cctcacacgtggtgtaacggtcgtt

SEQ ID NO: 89514 - DNA, 25 bp, Homo sapien
cctcacacgtggagtaacggtcgtt

SEQ ID NO: 89515 - DNA, 25 bp, Homo sapien
ccaacgccccaggtaaaggtcgtcg

SEQ ID NO: 89516 - DNA, 25 bp, Homo sapien
ccaacgccccagctaaaggtcgtcg

SEQ ID NO: 89517 - DNA, 25 bp, Homo sapien
gaaacccgagacaccccaaggggtg

SEQ ID NO: 89518 - DNA, 25 bp, Homo sapien
gaaacccgagactccccaaggggtg

SEQ ID NO: 89519 - DNA, 25 bp, Homo sapien
cctcgggtcttatactcaccggggg

SEQ ID NO: 89520 - DNA, 25 bp, Homo sapien
cctcgggtcttaaactcaccggggg

SEQ ID NO: 89521 - DNA, 25 bp, Homo sapien
cccggagcggaaacacgtcggtttt

SEQ ID NO: 89522 - DNA, 25 bp, Homo sapien
cccggagcggaatcacgtcggtttt

SEQ ID NO: 89523 - DNA, 25 bp, Homo sapien
acctgggaccgtaccgagggatata

SEQ ID NO: 89524 - DNA, 25 bp, Homo sapien
acctgggaccgttccgagggatata

SEQ ID NO: 89525 - DNA, 25 bp, Homo sapien
gtctccgtgacgacccgggtaatgg

SEQ ID NO: 89526 - DNA, 25 bp, Homo sapien
gtctccgtgacgtcccgggtaatgg

SEQ ID NO: 89527 - DNA, 25 bp, Homo sapien
gagtctgaataaacccgtgaatgtg

SEQ ID NO: 89528 - DNA, 25 bp, Homo sapien
gagtctgaataatcccgtgaatgtg

SEQ ID NO: 89529 - DNA, 25 bp, Homo sapien
tggagttgaaattcgctcaatgtac

SEQ ID NO: 89530 - DNA, 25 bp, Homo sapien
tggagttgaaatacgctcaatgtac

SEQ ID NO: 89531 - DNA, 25 bp, Homo sapien
ctttggtaacaatagagactttttc

SEQ ID NO: 89532 - DNA, 25 bp, Homo sapien
ctttggtaacaaaagagactttttc

SEQ ID NO: 89533 - DNA, 25 bp, Homo sapien
tcttcctaacaacacatgtttgtaa

SEQ ID NO: 89534 - DNA, 25 bp, Homo sapien
tcttcctaacaagacatgtttgtaa

SEQ ID NO: 89535 - DNA, 25 bp, Homo sapien
ccaagacaccttattactagaccgt

SEQ ID NO: 89536 - DNA, 25 bp, Homo sapien
ccaagacacctttttactagaccgt

SEQ ID NO: 89537 - DNA, 25 bp, Homo sapien
gacacatggaaacttttctgacact

SEQ ID NO: 89538 - DNA, 25 bp, Homo sapien
gacacatggaaagttttctgacact

SEQ ID NO: 89539 - DNA, 25 bp, Homo sapien
ccttcgtctggtgttttaagacgta

SEQ ID NO: 89540 - DNA, 25 bp, Homo sapien
ccttcgtctggtcttttaagacgta

SEQ ID NO: 89541 - DNA, 25 bp, Homo sapien
cgactgtagggttttgtgtcggatc

SEQ ID NO: 89542 - DNA, 25 bp, Homo sapien
cgactgtagggtattgtgtcggatc

SEQ ID NO: 89543 - DNA, 25 bp, Homo sapien
cgttttgtagtcctcttgcgtggct

SEQ ID NO: 89544 - DNA, 25 bp, Homo sapien
cgttttgtagtcgtcttgcgtggct

SEQ ID NO: 89545 - DNA, 25 bp, Homo sapien
gtggtctctccgtctcgtttgtgaa

SEQ ID NO: 89546 - DNA, 25 bp, Homo sapien
gtggtctctccgactcgtttgtgaa

SEQ ID NO: 89547 - DNA, 25 bp, Homo sapien
agttggtctcaggagtttatcgcaa

SEQ ID NO: 89548 - DNA, 25 bp, Homo sapien
agttggtctcagcagtttatcgcaa

SEQ ID NO: 89549 - DNA, 25 bp, Homo sapien
atttgtctgagctcacataggatgt

SEQ ID NO: 89550 - DNA, 25 bp, Homo sapien
atttgtctgagcacacataggatgt

SEQ ID NO: 89551 - DNA, 25 bp, Homo sapien
accttttcgggaaacaactcagtgt

SEQ ID NO: 89552 - DNA, 25 bp, Homo sapien
accttttcgggatacaactcagtgt

SEQ ID NO: 89553 - DNA, 25 bp, Homo sapien
agacctatcgtgttggaaaaccgtt

SEQ ID NO: 89554 - DNA, 25 bp, Homo sapien
agacctatcgtgatggaaaaccgtt

SEQ ID NO: 89555 - DNA, 25 bp, Homo sapien
ctcttcgtcgttgaagtgactcggg

SEQ ID NO: 89556 - DNA, 25 bp, Homo sapien
ctcttcgtcgttcaagtgactcggg

SEQ ID NO: 89557 - DNA, 25 bp, Homo sapien
tgtagtagtctcttttacattctgc

SEQ ID NO: 89558 - DNA, 25 bp, Homo sapien
tgtagtagtctcatttacattctgc

SEQ ID NO: 89559 - DNA, 25 bp, Homo sapien
cttagatagtggttctcggccggtg

SEQ ID NO: 89560 - DNA, 25 bp, Homo sapien
cttagatagtggatctcggccggtg

SEQ ID NO: 89561 - DNA, 25 bp, Homo sapien
gaattgacatagacctcggtcctgg

SEQ ID NO: 89562 - DNA, 25 bp, Homo sapien
gaattgacatagtcctcggtcctgg

SEQ ID NO: 89563 - DNA, 25 bp, Homo sapien
cttcttaaaccgtcctagaccaggg

SEQ ID NO: 89564 - DNA, 25 bp, Homo sapien
cttcttaaaccgacctagaccaggg

SEQ ID NO: 89565 - DNA, 25 bp, Homo sapien
tctccttaggtcctatgaccggtgg

SEQ ID NO: 89566 - DNA, 25 bp, Homo sapien
tctccttaggtcgtatgaccggtgg

SEQ ID NO: 89567 - DNA, 25 bp, Homo sapien
gttgcgtcggaatcgaaggagcctt

SEQ ID NO: 89568 - DNA, 25 bp, Homo sapien
gttgcgtcggaaacgaaggagcctt

SEQ ID NO: 89569 - DNA, 25 bp, Homo sapien
gacttgtacaggtagtccaagaacg

SEQ ID NO: 89570 - DNA, 25 bp, Homo sapien
gacttgtacaggaagtccaagaacg

SEQ ID NO: 89571 - DNA, 25 bp, Homo sapien
atggccagctacgttgctcactact

SEQ ID NO: 89572 - DNA, 25 bp, Homo sapien
atggccagctaccttgctcactact

SEQ ID NO: 89573 - DNA, 25 bp, Homo sapien
tgttgtcgacctttcaagaacttgc

SEQ ID NO: 89574 - DNA, 25 bp, Homo sapien
tgttgtcgacctatcaagaacttgc

SEQ ID NO: 89575 - DNA, 25 bp, Homo sapien
gtcgatgtcctgtccggttctctgg

SEQ ID NO: 89576 - DNA, 25 bp, Homo sapien
gtcgatgtcctgaccggttctctgg

SEQ ID NO: 89577 - DNA, 25 bp, Homo sapien
ggtcctcctgcgtcgtgaaccgttg

SEQ ID NO: 89578 - DNA, 25 bp, Homo sapien
ggtcctcctgcgacgtgaaccgttg

SEQ ID NO: 89579 - DNA, 25 bp, Homo sapien
ggtaggtccgggtcgcctccttcgt

SEQ ID NO: 89580 - DNA, 25 bp, Homo sapien
ggtaggtccgggacgcctccttcgt

SEQ ID NO: 89581 - DNA, 25 bp, Homo sapien
gagagattacaagtttcttactaac

SEQ ID NO: 89582 - DNA, 25 bp, Homo sapien
gagagattacaactttcttactaac

SEQ ID NO: 89583 - DNA, 25 bp, Homo sapien
agagcacaaccgttgtctccgtcct

SEQ ID NO: 89584 - DNA, 25 bp, Homo sapien
agagcacaaccgatgtctccgtcct

SEQ ID NO: 89585 - DNA, 25 bp, Homo sapien
ccagggcgaagtaccgtatccgcag

SEQ ID NO: 89586 - DNA, 25 bp, Homo sapien
ccagggcgaagttccgtatccgcag

SEQ ID NO: 89587 - DNA, 25 bp, Homo sapien
acagagcacaaggacgtggcccgag

SEQ ID NO: 89588 - DNA, 25 bp, Homo sapien
acagagcacaagcacgtggcccgag

SEQ ID NO: 89589 - DNA, 25 bp, Homo sapien
ccagaaagaccgaaaggacctactc

SEQ ID NO: 89590 - DNA, 25 bp, Homo sapien
ccagaaagaccgtaaggacctactc

SEQ ID NO: 89591 - DNA, 25 bp, Homo sapien
tttaacatatcgtatgagacgcacc

SEQ ID NO: 89592 - DNA, 25 bp, Homo sapien
tttaacatatcgaatgagacgcacc

SEQ ID NO: 89593 - DNA, 25 bp, Homo sapien
aatcaaacaaagacttacgtaaata

SEQ ID NO: 89594 - DNA, 25 bp, Homo sapien
aatcaaacaaagtcttacgtaaata

SEQ ID NO: 89595 - DNA, 25 bp, Homo sapien
gtaagaccctagaccgacggagaga

SEQ ID NO: 89596 - DNA, 25 bp, Homo sapien
gtaagaccctagtccgacggagaga

SEQ ID NO: 89597 - DNA, 25 bp, Homo sapien
ctgaagtcccgtttccacaagagta

SEQ ID NO: 89598 - DNA, 25 bp, Homo sapien
ctgaagtcccgtatccacaagagta

SEQ ID NO: 89599 - DNA, 25 bp, Homo sapien
tgagtctgcgaatcctacacaaagt

SEQ ID NO: 89600 - DNA, 25 bp, Homo sapien
tgagtctgcgaaacctacacaaagt

SEQ ID NO: 89601 - DNA, 25 bp, Homo sapien
gacagtgactacaacgtcaacaggt

SEQ ID NO: 89602 - DNA, 25 bp, Homo sapien
gacagtgactactacgtcaacaggt

SEQ ID NO: 89603 - DNA, 25 bp, Homo sapien
caacgtgtcatgacccgttaagaat

SEQ ID NO: 89604 - DNA, 25 bp, Homo sapien
caacgtgtcatgtcccgttaagaat

SEQ ID NO: 89605 - DNA, 25 bp, Homo sapien
acgacgtttgattaggtccgaagat

SEQ ID NO: 89606 - DNA, 25 bp, Homo sapien
acgacgtttgataaggtccgaagat

SEQ ID NO: 89607 - DNA, 25 bp, Homo sapien
agacttttagaatcgttacgacata

SEQ ID NO: 89608 - DNA, 25 bp, Homo sapien
agacttttagaaacgttacgacata

SEQ ID NO: 89609 - DNA, 25 bp, Homo sapien
tatttgtagactagtcgacatctac

SEQ ID NO: 89610 - DNA, 25 bp, Homo sapien
tatttgtagacttgtcgacatctac

SEQ ID NO: 89611 - DNA, 25 bp, Homo sapien
tgtggttagagtctccacatactct

SEQ ID NO: 89612 - DNA, 25 bp, Homo sapien
tgtggttagagtgtccacatactct

SEQ ID NO: 89613 - DNA, 25 bp, Homo sapien
gtcaggaatggaggtcctttatcgt

SEQ ID NO: 89614 - DNA, 25 bp, Homo sapien
gtcaggaatggacgtcctttatcgt

SEQ ID NO: 89615 - DNA, 25 bp, Homo sapien
cttagactactgtattcctattgtg

SEQ ID NO: 89616 - DNA, 25 bp, Homo sapien
cttagactactgaattcctattgtg

SEQ ID NO: 89617 - DNA, 25 bp, Homo sapien
catcgaaacggaggttattcgttta

SEQ ID NO: 89618 - DNA, 25 bp, Homo sapien
catcgaaacggacgttattcgttta

SEQ ID NO: 89619 - DNA, 25 bp, Homo sapien
cggtcctcccgttgttgttcctcat

SEQ ID NO: 89620 - DNA, 25 bp, Homo sapien
cggtcctcccgtagttgttcctcat

SEQ ID NO: 89621 - DNA, 25 bp, Homo sapien
aacggatttttgcttgtaaagtctc

SEQ ID NO: 89622 - DNA, 25 bp, Homo sapien
aacggatttttggttgtaaagtctc

SEQ ID NO: 89623 - DNA, 25 bp, Homo sapien
atgtgtgtacggtgatgacgagtcc

SEQ ID NO: 89624 - DNA, 25 bp, Homo sapien
atgtgtgtacggagatgacgagtcc

SEQ ID NO: 89625 - DNA, 25 bp, Homo sapien
cttcgtggactatagatgtcgatta

SEQ ID NO: 89626 - DNA, 25 bp, Homo sapien
cttcgtggactaaagatgtcgatta

SEQ ID NO: 89627 - DNA, 25 bp, Homo sapien
tacgttcgaccctctcttcgatgtc

SEQ ID NO: 89628 - DNA, 25 bp, Homo sapien
tacgttcgacccactcttcgatgtc

SEQ ID NO: 89629 - DNA, 25 bp, Homo sapien
caaggaaccacacatttgtataagt

SEQ ID NO: 89630 - DNA, 25 bp, Homo sapien
caaggaaccacagatttgtataagt

SEQ ID NO: 89631 - DNA, 25 bp, Homo sapien
gacatgtagtctttcttacgtaatc

SEQ ID NO: 89632 - DNA, 25 bp, Homo sapien
gacatgtagtctatcttacgtaatc

SEQ ID NO: 89633 - DNA, 25 bp, Homo sapien
ggggagtacattcacgaaactaagc

SEQ ID NO: 89634 - DNA, 25 bp, Homo sapien
ggggagtacattgacgaaactaagc

SEQ ID NO: 89635 - DNA, 25 bp, Homo sapien
tgtagatcccgtgatcatcggagta

SEQ ID NO: 89636 - DNA, 25 bp, Homo sapien
tgtagatcccgtcatcatcggagta

SEQ ID NO: 89637 - DNA, 25 bp, Homo sapien
ttattgtactgtacttcggggatct

SEQ ID NO: 89638 - DNA, 25 bp, Homo sapien
ttattgtactgttcttcggggatct

SEQ ID NO: 89639 - DNA, 25 bp, Homo sapien
ttctattctcaatctctggagccgg

SEQ ID NO: 89640 - DNA, 25 bp, Homo sapien
ttctattctcaaactctggagccgg

SEQ ID NO: 89641 - DNA, 25 bp, Homo sapien
cgatcgaaacaccatggtgacaggt

SEQ ID NO: 89642 - DNA, 25 bp, Homo sapien
cgatcgaaacacgatggtgacaggt

SEQ ID NO: 89643 - DNA, 25 bp, Homo sapien
ggacgggtcgaagacttagaaccag

SEQ ID NO: 89644 - DNA, 25 bp, Homo sapien
ggacgggtcgaacacttagaaccag

SEQ ID NO: 89645 - DNA, 25 bp, Homo sapien
tatgaggtgagaaaccttcactcag

SEQ ID NO: 89646 - DNA, 25 bp, Homo sapien
tatgaggtgagataccttcactcag

SEQ ID NO: 89647 - DNA, 25 bp, Homo sapien
aggtctggtaggacgacaacacgac

SEQ ID NO: 89648 - DNA, 25 bp, Homo sapien
aggtctggtaggtcgacaacacgac

SEQ ID NO: 89649 - DNA, 25 bp, Homo sapien
ggaagtctaaggtcgacgaccatgt

SEQ ID NO: 89650 - DNA, 25 bp, Homo sapien
ggaagtctaaggacgacgaccatgt

SEQ ID NO: 89651 - DNA, 25 bp, Homo sapien
ccgaggtgtcgtagcgccggctcaa

SEQ ID NO: 89652 - DNA, 25 bp, Homo sapien
ccgaggtgtcgttgcgccggctcaa

SEQ ID NO: 89653 - DNA, 25 bp, Homo sapien
cctatgtttaggtccgtcccgacac

SEQ ID NO: 89654 - DNA, 25 bp, Homo sapien
cctatgtttaggaccgtcccgacac

SEQ ID NO: 89655 - DNA, 25 bp, Homo sapien
ctaagacggaggtaccggacctgag

SEQ ID NO: 89656 - DNA, 25 bp, Homo sapien
ctaagacggaggaaccggacctgag

SEQ ID NO: 89657 - DNA, 25 bp, Homo sapien
caagaaggtgtattccgactagttg

SEQ ID NO: 89658 - DNA, 25 bp, Homo sapien
caagaaggtgtaatccgactagttg

SEQ ID NO: 89659 - DNA, 25 bp, Homo sapien
gacgagggtctaaacctcagtcttg

SEQ ID NO: 89660 - DNA, 25 bp, Homo sapien
gacgagggtctatacctcagtcttg

SEQ ID NO: 89661 - DNA, 25 bp, Homo sapien
cgacgggtagccttctttatagatc

SEQ ID NO: 89662 - DNA, 25 bp, Homo sapien
cgacgggtagccatctttatagatc

SEQ ID NO: 89663 - DNA, 25 bp, Homo sapien
cacgtaaccgcctagcacgaagatc

SEQ ID NO: 89664 - DNA, 25 bp, Homo sapien
cacgtaaccgccaagcacgaagatc

SEQ ID NO: 89665 - DNA, 25 bp, Homo sapien
aacgtgagtgtttcaacaagagatc

SEQ ID NO: 89666 - DNA, 25 bp, Homo sapien
aacgtgagtgttacaacaagagatc

SEQ ID NO: 89667 - DNA, 25 bp, Homo sapien
gtgacggtagtttcgacactccgaa

SEQ ID NO: 89668 - DNA, 25 bp, Homo sapien
gtgacggtagttacgacactccgaa

SEQ ID NO: 89669 - DNA, 25 bp, Homo sapien
gtagacggtgataccgaccctgtat

SEQ ID NO: 89670 - DNA, 25 bp, Homo sapien
gtagacggtgattccgaccctgtat

SEQ ID NO: 89671 - DNA, 25 bp, Homo sapien
cgttcgagttacgtccgatcttatc

SEQ ID NO: 89672 - DNA, 25 bp, Homo sapien
cgttcgagttacctccgatcttatc

SEQ ID NO: 89673 - DNA, 25 bp, Homo sapien
ggggagtaacacagagaccgtgtca

SEQ ID NO: 89674 - DNA, 25 bp, Homo sapien
ggggagtaacactgagaccgtgtca

SEQ ID NO: 89675 - DNA, 25 bp, Homo sapien
aggtagaccgagaaagacacgtcgg

SEQ ID NO: 89676 - DNA, 25 bp, Homo sapien
aggtagaccgagtaagacacgtcgg

SEQ ID NO: 89677 - DNA, 25 bp, Homo sapien
ggtcgtagaccaggaaaacgacact

SEQ ID NO: 89678 - DNA, 25 bp, Homo sapien
ggtcgtagaccacgaaaacgacact

SEQ ID NO: 89679 - DNA, 25 bp, Homo sapien
cttgtggtacttccatagaaccgtc

SEQ ID NO: 89680 - DNA, 25 bp, Homo sapien
cttgtggtacttgcatagaaccgtc

SEQ ID NO: 89681 - DNA, 25 bp, Homo sapien
cttctaggcgttgagaggaacgacc

SEQ ID NO: 89682 - DNA, 25 bp, Homo sapien
cttctaggcgttcagaggaacgacc

SEQ ID NO: 89683 - DNA, 25 bp, Homo sapien
gaacagactgttgacacgataggta

SEQ ID NO: 89684 - DNA, 25 bp, Homo sapien
gaacagactgttcacacgataggta

SEQ ID NO: 89685 - DNA, 25 bp, Homo sapien
gatccatgtcttcatcatactgtag

SEQ ID NO: 89686 - DNA, 25 bp, Homo sapien
gatccatgtcttgatcatactgtag

SEQ ID NO: 89687 - DNA, 25 bp, Homo sapien
ggtgcagtgtgaagtactacctcaa

SEQ ID NO: 89688 - DNA, 25 bp, Homo sapien
ggtgcagtgtgatgtactacctcaa

SEQ ID NO: 89689 - DNA, 25 bp, Homo sapien
cgactcggtgttacttcgtcacgag

SEQ ID NO: 89690 - DNA, 25 bp, Homo sapien
cgactcggtgtttcttcgtcacgag

SEQ ID NO: 89691 - DNA, 25 bp, Homo sapien
tatcgtcgtcctagttggcttcagt

SEQ ID NO: 89692 - DNA, 25 bp, Homo sapien
tatcgtcgtccttgttggcttcagt

SEQ ID NO: 89693 - DNA, 25 bp, Homo sapien
gtcggtacccaggacgagaggtcca

SEQ ID NO: 89694 - DNA, 25 bp, Homo sapien
gtcggtacccagcacgagaggtcca

SEQ ID NO: 89695 - DNA, 25 bp, Homo sapien
caccgaaaggaaagagctcgtcgtc

SEQ ID NO: 89696 - DNA, 25 bp, Homo sapien
caccgaaaggaatgagctcgtcgtc

SEQ ID NO: 89697 - DNA, 25 bp, Homo sapien
ctcccggacgggtcttcgtggtctc

SEQ ID NO: 89698 - DNA, 25 bp, Homo sapien
ctcccggacgggacttcgtggtctc

SEQ ID NO: 89699 - DNA, 25 bp, Homo sapien
tttcctgtctaggtgtggtcggacc

SEQ ID NO: 89700 - DNA, 25 bp, Homo sapien
tttcctgtctagctgtggtcggacc

SEQ ID NO: 89701 - DNA, 25 bp, Homo sapien
ctattctaattgtgttgtcggttac

SEQ ID NO: 89702 - DNA, 25 bp, Homo sapien
ctattctaattgagttgtcggttac

SEQ ID NO: 89703 - DNA, 25 bp, Homo sapien
atgacttttatacaggaactgtcat

SEQ ID NO: 89704 - DNA, 25 bp, Homo sapien
atgacttttatagaggaactgtcat

SEQ ID NO: 89705 - DNA, 25 bp, Homo sapien
acatagtgttgcagaagaacaacat

SEQ ID NO: 89706 - DNA, 25 bp, Homo sapien
acatagtgttgctgaagaacaacat

SEQ ID NO: 89707 - DNA, 25 bp, Homo sapien
caaagagagtttttaatcttatcga

SEQ ID NO: 89708 - DNA, 25 bp, Homo sapien
caaagagagtttataatcttatcga

SEQ ID NO: 89709 - DNA, 25 bp, Homo sapien
catgagagggtactgagacctatta

SEQ ID NO: 89710 - DNA, 25 bp, Homo sapien
catgagagggtagtgagacctatta

SEQ ID NO: 89711 - DNA, 25 bp, Homo sapien
atgttacgatataaggtagccctaa

SEQ ID NO: 89712 - DNA, 25 bp, Homo sapien
atgttacgatattaggtagccctaa

SEQ ID NO: 89713 - DNA, 25 bp, Homo sapien
ctagttataaattggtagttccttt

SEQ ID NO: 89714 - DNA, 25 bp, Homo sapien
ctagttataaataggtagttccttt

SEQ ID NO: 89715 - DNA, 25 bp, Homo sapien
cgacccaaggtcgaggtctccgtaa

SEQ ID NO: 89716 - DNA, 25 bp, Homo sapien
cgacccaaggtccaggtctccgtaa

SEQ ID NO: 89717 - DNA, 25 bp, Homo sapien
atgccaagaccagtagtccgagaag

SEQ ID NO: 89718 - DNA, 25 bp, Homo sapien
atgccaagaccactagtccgagaag

SEQ ID NO: 89719 - DNA, 25 bp, Homo sapien
cgtcctgtaccgaaagaaccggaca

SEQ ID NO: 89720 - DNA, 25 bp, Homo sapien
cgtcctgtaccgtaagaaccggaca

SEQ ID NO: 89721 - DNA, 25 bp, Homo sapien
tgtcacgtcactaatctgagacgtc

SEQ ID NO: 89722 - DNA, 25 bp, Homo sapien
tgtcacgtcacttatctgagacgtc

SEQ ID NO: 89723 - DNA, 25 bp, Homo sapien
cgttctagaacttgactgatctact

SEQ ID NO: 89724 - DNA, 25 bp, Homo sapien
cgttctagaactagactgatctact

SEQ ID NO: 89725 - DNA, 25 bp, Homo sapien
ggggacatccgacaagacccgagtt

SEQ ID NO: 89726 - DNA, 25 bp, Homo sapien
ggggacatccgagaagacccgagtt

SEQ ID NO: 89727 - DNA, 25 bp, Homo sapien
agtgtccgagagaagacccgttact

SEQ ID NO: 89728 - DNA, 25 bp, Homo sapien
agtgtccgagagtagacccgttact

SEQ ID NO: 89729 - DNA, 25 bp, Homo sapien
ccgtagtccgacgtgtccgccgagg

SEQ ID NO: 89730 - DNA, 25 bp, Homo sapien
ccgtagtccgacctgtccgccgagg

SEQ ID NO: 89731 - DNA, 25 bp, Homo sapien
tagtaagtggaactactcccctagc

SEQ ID NO: 89732 - DNA, 25 bp, Homo sapien
tagtaagtggaagtactcccctagc

SEQ ID NO: 89733 - DNA, 25 bp, Homo sapien
aagtccgtcgcgagtttcatccacc

SEQ ID NO: 89734 - DNA, 25 bp, Homo sapien
aagtccgtcgcgtgtttcatccacc

SEQ ID NO: 89735 - DNA, 25 bp, Homo sapien
aggtgtttcgacgtcttctcccgaa

SEQ ID NO: 89736 - DNA, 25 bp, Homo sapien
aggtgtttcgacctcttctcccgaa

SEQ ID NO: 89737 - DNA, 25 bp, Homo sapien
gtcgacatactgtcgctctggggca

SEQ ID NO: 89738 - DNA, 25 bp, Homo sapien
gtcgacatactgacgctctggggca

SEQ ID NO: 89739 - DNA, 25 bp, Homo sapien
gcaattgacaccagtgtgagacctg

SEQ ID NO: 89740 - DNA, 25 bp, Homo sapien
gcaattgacacctgtgtgagacctg

SEQ ID NO: 89741 - DNA, 25 bp, Homo sapien
ctggtttgtgaagtccaggacctgt

SEQ ID NO: 89742 - DNA, 25 bp, Homo sapien
ctggtttgtgaactccaggacctgt

SEQ ID NO: 89743 - DNA, 25 bp, Homo sapien
agggtgtcgacaatcggaccttgtc

SEQ ID NO: 89744 - DNA, 25 bp, Homo sapien
agggtgtcgacattcggaccttgtc

SEQ ID NO: 89745 - DNA, 25 bp, Homo sapien
gttctttctaccaccgtagtcgtgt

SEQ ID NO: 89746 - DNA, 25 bp, Homo sapien
gttctttctacctccgtagtcgtgt

SEQ ID NO: 89747 - DNA, 25 bp, Homo sapien
gttgtttactctgagaacgttctgt

SEQ ID NO: 89748 - DNA, 25 bp, Homo sapien
gttgtttactctcagaacgttctgt

SEQ ID NO: 89749 - DNA, 25 bp, Homo sapien
cccttttactagttaagactccggt

SEQ ID NO: 89750 - DNA, 25 bp, Homo sapien
cccttttactagataagactccggt

SEQ ID NO: 89751 - DNA, 25 bp, Homo sapien
cgtataacctttcgatttcgtcttg

SEQ ID NO: 89752 - DNA, 25 bp, Homo sapien
cgtataacctttggatttcgtcttg

SEQ ID NO: 89753 - DNA, 25 bp, Homo sapien
agagtaacccttagttttctgtatc

SEQ ID NO: 89754 - DNA, 25 bp, Homo sapien
agagtaaccctttgttttctgtatc

SEQ ID NO: 89755 - DNA, 25 bp, Homo sapien
gaaatatcggtcgtgtctggtaggc

SEQ ID NO: 89756 - DNA, 25 bp, Homo sapien
gaaatatcggtcctgtctggtaggc

SEQ ID NO: 89757 - DNA, 25 bp, Homo sapien
cttagagtcggtacggaatcggaag

SEQ ID NO: 89758 - DNA, 25 bp, Homo sapien
cttagagtcggttcggaatcggaag

SEQ ID NO: 89759 - DNA, 25 bp, Homo sapien
ttccggggacttgctctacggaagt

SEQ ID NO: 89760 - DNA, 25 bp, Homo sapien
ttccggggacttcctctacggaagt

SEQ ID NO: 89761 - DNA, 25 bp, Homo sapien
gttttgtaagtcacttctacaacga

SEQ ID NO: 89762 - DNA, 25 bp, Homo sapien
gttttgtaagtctcttctacaacga

SEQ ID NO: 89763 - DNA, 25 bp, Homo sapien
cttcgtagatgtgttcagagttacg

SEQ ID NO: 89764 - DNA, 25 bp, Homo sapien
cttcgtagatgtcttcagagttacg

SEQ ID NO: 89765 - DNA, 25 bp, Homo sapien
gactgtctgtcttcccgaacctcta

SEQ ID NO: 89766 - DNA, 25 bp, Homo sapien
gactgtctgtctacccgaacctcta

SEQ ID NO: 89767 - DNA, 25 bp, Homo sapien
gatctccgtctccaccggaactggt

SEQ ID NO: 89768 - DNA, 25 bp, Homo sapien
gatctccgtctcgaccggaactggt

SEQ ID NO: 89769 - DNA, 25 bp, Homo sapien
gtgtcggcgtgagtaccggaatatt

SEQ ID NO: 89770 - DNA, 25 bp, Homo sapien
gtgtcggcgtgactaccggaatatt

SEQ ID NO: 89771 - DNA, 25 bp, Homo sapien
agtgttcctgtatcacgaataattt

SEQ ID NO: 89772 - DNA, 25 bp, Homo sapien
agtgttcctgtaacacgaataattt

SEQ ID NO: 89773 - DNA, 25 bp, Homo sapien
tgttcgactgaaactgattatcagt

SEQ ID NO: 89774 - DNA, 25 bp, Homo sapien
tgttcgactgaatctgattatcagt

SEQ ID NO: 89775 - DNA, 25 bp, Homo sapien
gaaatgtcgaagcatttaactctaa

SEQ ID NO: 89776 - DNA, 25 bp, Homo sapien
gaaatgtcgaaggatttaactctaa

SEQ ID NO: 89777 - DNA, 25 bp, Homo sapien
gaaaattagtcgatgacaacctaag

SEQ ID NO: 89778 - DNA, 25 bp, Homo sapien
gaaaattagtcgttgacaacctaag

SEQ ID NO: 89779 - DNA, 25 bp, Homo sapien
acagaaagtatgtttctactccaag

SEQ ID NO: 89780 - DNA, 25 bp, Homo sapien
acagaaagtatgattctactccaag

SEQ ID NO: 89781 - DNA, 25 bp, Homo sapien
tagagccgtactgttactcctccgg

SEQ ID NO: 89782 - DNA, 25 bp, Homo sapien
tagagccgtactcttactcctccgg

SEQ ID NO: 89783 - DNA, 25 bp, Homo sapien
ggggtacctcttttactccagaggt

SEQ ID NO: 89784 - DNA, 25 bp, Homo sapien
ggggtacctcttatactccagaggt

SEQ ID NO: 89785 - DNA, 25 bp, Homo sapien
ggtggtgatttcctttccgtacccc

SEQ ID NO: 89786 - DNA, 25 bp, Homo sapien
ggtggtgatttcgtttccgtacccc

SEQ ID NO: 89787 - DNA, 25 bp, Homo sapien
gtttcgttagttcgttctttacccc

SEQ ID NO: 89788 - DNA, 25 bp, Homo sapien
gtttcgttagttggttctttacccc

SEQ ID NO: 89789 - DNA, 25 bp, Homo sapien
tagttgttgttcacgtcgacccgcg

SEQ ID NO: 89790 - DNA, 25 bp, Homo sapien
tagttgttgttctcgtcgacccgcg

SEQ ID NO: 89791 - DNA, 25 bp, Homo sapien
cactttcgtcgtctgtctgtgcggg

SEQ ID NO: 89792 - DNA, 25 bp, Homo sapien
cactttcgtcgtgtgtctgtgcggg

SEQ ID NO: 89793 - DNA, 25 bp, Homo sapien
ccaacttctgtcagggctcggtcgc

SEQ ID NO: 89794 - DNA, 25 bp, Homo sapien
ccaacttctgtctgggctcggtcgc

SEQ ID NO: 89795 - DNA, 25 bp, Homo sapien
gcaaggatgtgaccagtctggtgac

SEQ ID NO: 89796 - DNA, 25 bp, Homo sapien
gcaaggatgtgagcagtctggtgac

SEQ ID NO: 89797 - DNA, 25 bp, Homo sapien
gacttaggagttcgaagcatcggac

SEQ ID NO: 89798 - DNA, 25 bp, Homo sapien
gacttaggagttggaagcatcggac

SEQ ID NO: 89799 - DNA, 25 bp, Homo sapien
actagggtgtaaaagacttactgac

SEQ ID NO: 89800 - DNA, 25 bp, Homo sapien
actagggtgtaatagacttactgac

SEQ ID NO: 89801 - DNA, 25 bp, Homo sapien
cactaatgtttgttatgaatccttg

SEQ ID NO: 89802 - DNA, 25 bp, Homo sapien
cactaatgtttgatatgaatccttg

SEQ ID NO: 89803 - DNA, 25 bp, Homo sapien
ggtcacagactatcagattacatat

SEQ ID NO: 89804 - DNA, 25 bp, Homo sapien
ggtcacagactaacagattacatat

SEQ ID NO: 89805 - DNA, 25 bp, Homo sapien
gtttcatagggaaaaggatctcctt

SEQ ID NO: 89806 - DNA, 25 bp, Homo sapien
gtttcatagggataaggatctcctt

SEQ ID NO: 89807 - DNA, 25 bp, Homo sapien
gtgttacaccagtaaagcctttcta

SEQ ID NO: 89808 - DNA, 25 bp, Homo sapien
gtgttacaccagaaaagcctttcta

SEQ ID NO: 89809 - DNA, 25 bp, Homo sapien
gtttccctcgagaataccctttcga

SEQ ID NO: 89810 - DNA, 25 bp, Homo sapien
gtttccctcgagtataccctttcga

SEQ ID NO: 89811 - DNA, 25 bp, Homo sapien
agtcccgcagttatctgtacgttaa

SEQ ID NO: 89812 - DNA, 25 bp, Homo sapien
agtcccgcagttttctgtacgttaa

SEQ ID NO: 89813 - DNA, 25 bp, Homo sapien
gagacacgccttaacttcacgtcaa

SEQ ID NO: 89814 - DNA, 25 bp, Homo sapien
gagacacgcctttacttcacgtcaa

SEQ ID NO: 89815 - DNA, 25 bp, Homo sapien
ggtagaaccggagttcgaacggaaa

SEQ ID NO: 89816 - DNA, 25 bp, Homo sapien
ggtagaaccggacttcgaacggaaa

SEQ ID NO: 89817 - DNA, 25 bp, Homo sapien
tgtggaagtcacaccacataaggaa

SEQ ID NO: 89818 - DNA, 25 bp, Homo sapien
tgtggaagtcactccacataaggaa

SEQ ID NO: 89819 - DNA, 25 bp, Homo sapien
tgtaattcaccaatgtaattcagag

SEQ ID NO: 89820 - DNA, 25 bp, Homo sapien
tgtaattcaccattgtaattcagag

SEQ ID NO: 89821 - DNA, 25 bp, Homo sapien
tttcgctcgtgataaacaccagatt

SEQ ID NO: 89822 - DNA, 25 bp, Homo sapien
tttcgctcgtgaaaaacaccagatt

SEQ ID NO: 89823 - DNA, 25 bp, Homo sapien
tgtctcagtgcaacggtcccctcta

SEQ ID NO: 89824 - DNA, 25 bp, Homo sapien
tgtctcagtgcatcggtcccctcta

SEQ ID NO: 89825 - DNA, 25 bp, Homo sapien
agtaacgtcgtgagtgtctccccag

SEQ ID NO: 89826 - DNA, 25 bp, Homo sapien
agtaacgtcgtgtgtgtctccccag

SEQ ID NO: 89827 - DNA, 25 bp, Homo sapien
atctaacgttgtcgtttcttcacag

SEQ ID NO: 89828 - DNA, 25 bp, Homo sapien
atctaacgttgtggtttcttcacag

SEQ ID NO: 89829 - DNA, 25 bp, Homo sapien
ctttttatggcgttcaattacgtac

SEQ ID NO: 89830 - DNA, 25 bp, Homo sapien
ctttttatggcgatcaattacgtac

SEQ ID NO: 89831 - DNA, 25 bp, Homo sapien
tgttttggttgtttgacctccacta

SEQ ID NO: 89832 - DNA, 25 bp, Homo sapien
tgttttggttgtatgacctccacta

SEQ ID NO: 89833 - DNA, 25 bp, Homo sapien
tgtttgtttcattcaaaacgacgaa

SEQ ID NO: 89834 - DNA, 25 bp, Homo sapien
tgtttgtttcatacaaaacgacgaa

SEQ ID NO: 89835 - DNA, 25 bp, Homo sapien
gttgagtttcacaaaagacaacata

SEQ ID NO: 89836 - DNA, 25 bp, Homo sapien
gttgagtttcactaaagacaacata

SEQ ID NO: 89837 - DNA, 25 bp, Homo sapien
ttttgtgttacgaaaacataaaata

SEQ ID NO: 89838 - DNA, 25 bp, Homo sapien
ttttgtgttacgtaaacataaaata

SEQ ID NO: 89839 - DNA, 25 bp, Homo sapien
cgttcagcgagaaccactacggtga

SEQ ID NO: 89840 - DNA, 25 bp, Homo sapien
cgttcagcgagatccactacggtga

SEQ ID NO: 89841 - DNA, 25 bp, Homo sapien
agtcgttccgctacccatagtggac

SEQ ID NO: 89842 - DNA, 25 bp, Homo sapien
agtcgttccgcttcccatagtggac

SEQ ID NO: 89843 - DNA, 25 bp, Homo sapien
ggacggtttacctgcccagagggac

SEQ ID NO: 89844 - DNA, 25 bp, Homo sapien
ggacggtttaccagcccagagggac

SEQ ID NO: 89845 - DNA, 25 bp, Homo sapien
ggggagttctcttcccgacttggac

SEQ ID NO: 89846 - DNA, 25 bp, Homo sapien
ggggagttctctacccgacttggac

SEQ ID NO: 89847 - DNA, 25 bp, Homo sapien
ctgtgaccttccttgtagtttcggg

SEQ ID NO: 89848 - DNA, 25 bp, Homo sapien
ctgtgaccttccatgtagtttcggg

SEQ ID NO: 89849 - DNA, 25 bp, Homo sapien
tacttactttgtatggtttacagtc

SEQ ID NO: 89850 - DNA, 25 bp, Homo sapien
tacttactttgtttggtttacagtc

SEQ ID NO: 89851 - DNA, 25 bp, Homo sapien
gaagacgagtggttagtacatcatc

SEQ ID NO: 89852 - DNA, 25 bp, Homo sapien
gaagacgagtggatagtacatcatc

SEQ ID NO: 89853 - DNA, 25 bp, Homo sapien
aagtaactgttgtagtacaactgac

SEQ ID NO: 89854 - DNA, 25 bp, Homo sapien
aagtaactgttgaagtacaactgac

SEQ ID NO: 89855 - DNA, 25 bp, Homo sapien
cattgactttgtatggttttctgac

SEQ ID NO: 89856 - DNA, 25 bp, Homo sapien
cattgactttgtttggttttctgac

SEQ ID NO: 89857 - DNA, 25 bp, Homo sapien
agggggtttacctgagttctagtac

SEQ ID NO: 89858 - DNA, 25 bp, Homo sapien
agggggtttaccagagttctagtac

SEQ ID NO: 89859 - DNA, 25 bp, Homo sapien
gacggtgccggtacgcctagttcaa

SEQ ID NO: 89860 - DNA, 25 bp, Homo sapien
gacggtgccggttcgcctagttcaa

SEQ ID NO: 89861 - DNA, 25 bp, Homo sapien
ctgtcttgccggatccttctttgac

SEQ ID NO: 89862 - DNA, 25 bp, Homo sapien
ctgtcttgccggttccttctttgac

SEQ ID NO: 89863 - DNA, 25 bp, Homo sapien
ggtcttccgaatctacttcttgttt

SEQ ID NO: 89864 - DNA, 25 bp, Homo sapien
ggtcttccgaatgtacttcttgttt

SEQ ID NO: 89865 - DNA, 25 bp, Homo sapien
attactccacagttttggtgtttgt

SEQ ID NO: 89866 - DNA, 25 bp, Homo sapien
attactccacagatttggtgtttgt

SEQ ID NO: 89867 - DNA, 25 bp, Homo sapien
gctcgtttaagacctttcatcagga

SEQ ID NO: 89868 - DNA, 25 bp, Homo sapien
gctcgtttaagagctttcatcagga

SEQ ID NO: 89869 - DNA, 25 bp, Homo sapien
ttcttcttgtacctattaactggga

SEQ ID NO: 89870 - DNA, 25 bp, Homo sapien
ttcttcttgtacgtattaactggga

SEQ ID NO: 89871 - DNA, 25 bp, Homo sapien
gtcggttgcccttatccgacccgag

SEQ ID NO: 89872 - DNA, 25 bp, Homo sapien
gtcggttgccctaatccgacccgag

SEQ ID NO: 89873 - DNA, 25 bp, Homo sapien
tggttctctcttctactactccggg

SEQ ID NO: 89874 - DNA, 25 bp, Homo sapien
tggttctctcttgtactactccggg

SEQ ID NO: 89875 - DNA, 25 bp, Homo sapien
ctctgggtggccactgtcccggtgt

SEQ ID NO: 89876 - DNA, 25 bp, Homo sapien
ctctgggtggcctctgtcccggtgt

SEQ ID NO: 89877 - DNA, 25 bp, Homo sapien
ctctgttgtccctcttgagtccgtg

SEQ ID NO: 89878 - DNA, 25 bp, Homo sapien
ctctgttgtcccacttgagtccgtg

SEQ ID NO: 89879 - DNA, 25 bp, Homo sapien
tcgttttccctactactgtatctgg

SEQ ID NO: 89880 - DNA, 25 bp, Homo sapien
tcgttttccctagtactgtatctgg

SEQ ID NO: 89881 - DNA, 25 bp, Homo sapien
cttatgtctttctgtgatacctaag

SEQ ID NO: 89882 - DNA, 25 bp, Homo sapien
cttatgtctttcagtgatacctaag

SEQ ID NO: 89883 - DNA, 25 bp, Homo sapien
gtcttatatggatatacacacacgt

SEQ ID NO: 89884 - DNA, 25 bp, Homo sapien
gtcttatatggaaatacacacacgt

SEQ ID NO: 89885 - DNA, 25 bp, Homo sapien
agaactatcgtagtccgtccacaca

SEQ ID NO: 89886 - DNA, 25 bp, Homo sapien
agaactatcgtactccgtccacaca

SEQ ID NO: 89887 - DNA, 25 bp, Homo sapien
aaacgcgaaaccactaccaaagtga

SEQ ID NO: 89888 - DNA, 25 bp, Homo sapien
aaacgcgaaacctctaccaaagtga

SEQ ID NO: 89889 - DNA, 25 bp, Homo sapien
acgtcgctttcatccataaacgtga

SEQ ID NO: 89890 - DNA, 25 bp, Homo sapien
acgtcgctttcaaccataaacgtga

SEQ ID NO: 89891 - DNA, 25 bp, Homo sapien
cttaccgtttcgtccagtgaccctg

SEQ ID NO: 89892 - DNA, 25 bp, Homo sapien
cttaccgtttcgaccagtgaccctg

SEQ ID NO: 89893 - DNA, 25 bp, Homo sapien
cgctttcgggtcaccgtataaccca

SEQ ID NO: 89894 - DNA, 25 bp, Homo sapien
cgctttcgggtctccgtataaccca

SEQ ID NO: 89895 - DNA, 25 bp, Homo sapien
ggttctttccctgtagatacacttt

SEQ ID NO: 89896 - DNA, 25 bp, Homo sapien
ggttctttccctctagatacacttt

SEQ ID NO: 89897 - DNA, 25 bp, Homo sapien
cacagtcgcatcgacagacagaatc

SEQ ID NO: 89898 - DNA, 25 bp, Homo sapien
cacagtcgcatccacagacagaatc

SEQ ID NO: 89899 - DNA, 25 bp, Homo sapien
agagtgtgaccgaatgacagaatcg

SEQ ID NO: 89900 - DNA, 25 bp, Homo sapien
agagtgtgaccgtatgacagaatcg

SEQ ID NO: 89901 - DNA, 25 bp, Homo sapien
tccgggcgtgtacgaatcaaacaag

SEQ ID NO: 89902 - DNA, 25 bp, Homo sapien
tccgggcgtgtaggaatcaaacaag

SEQ ID NO: 89903 - DNA, 25 bp, Homo sapien
gatctaagctttggtttgggacact

SEQ ID NO: 89904 - DNA, 25 bp, Homo sapien
gatctaagctttcgtttgggacact

SEQ ID NO: 89905 - DNA, 25 bp, Homo sapien
tcgctcgccgctgagagtgtcgtgt

SEQ ID NO: 89906 - DNA, 25 bp, Homo sapien
tcgctcgccgctcagagtgtcgtgt

SEQ ID NO: 89907 - DNA, 25 bp, Homo sapien
gctcgccgctgagagtgtcgtgtct

SEQ ID NO: 89908 - DNA, 25 bp, Homo sapien
gctcgccgctgacagtgtcgtgtct

SEQ ID NO: 89909 - DNA, 25 bp, Homo sapien
tcggtcccctacctagagtgttgat

SEQ ID NO: 89910 - DNA, 25 bp, Homo sapien
tcggtcccctacgtagagtgttgat

SEQ ID NO: 89911 - DNA, 25 bp, Homo sapien
actgctgcccactgacgacggtgga

SEQ ID NO: 89912 - DNA, 25 bp, Homo sapien
actgctgcccacagacgacggtgga

SEQ ID NO: 89913 - DNA, 25 bp, Homo sapien
ccagtgacacggtacgaggtacgag

SEQ ID NO: 89914 - DNA, 25 bp, Homo sapien
ccagtgacacggaacgaggtacgag

SEQ ID NO: 89915 - DNA, 25 bp, Homo sapien
tcctcggggtcaaagaagacatcga

SEQ ID NO: 89916 - DNA, 25 bp, Homo sapien
tcctcggggtcatagaagacatcga

SEQ ID NO: 89917 - DNA, 25 bp, Homo sapien
ggtcccaggggaatatatgtccctc

SEQ ID NO: 89918 - DNA, 25 bp, Homo sapien
ggtcccaggggattatatgtccctc

SEQ ID NO: 89919 - DNA, 25 bp, Homo sapien
ttgacgaagatagttaccttttcgg

SEQ ID NO: 89920 - DNA, 25 bp, Homo sapien
ttgacgaagatacttaccttttcgg

SEQ ID NO: 89921 - DNA, 25 bp, Homo sapien
agagacaccgttaggctactcttgc

SEQ ID NO: 89922 - DNA, 25 bp, Homo sapien
agagacaccgtttggctactcttgc

SEQ ID NO: 89923 - DNA, 25 bp, Homo sapien
aggtaccactttggacttgtaagat

SEQ ID NO: 89924 - DNA, 25 bp, Homo sapien
aggtaccactttcgacttgtaagat

SEQ ID NO: 89925 - DNA, 25 bp, Homo sapien
cgcacgtcgttgcagtgtgtgagta

SEQ ID NO: 89926 - DNA, 25 bp, Homo sapien
cgcacgtcgttggagtgtgtgagta

SEQ ID NO: 89927 - DNA, 25 bp, Homo sapien
taactacgcacctcatttcgtgttg

SEQ ID NO: 89928 - DNA, 25 bp, Homo sapien
taactacgcaccacatttcgtgttg

SEQ ID NO: 89929 - DNA, 25 bp, Homo sapien
catctcgtattcacatgttgtgttt

SEQ ID NO: 89930 - DNA, 25 bp, Homo sapien
catctcgtattctcatgttgtgttt

SEQ ID NO: 89931 - DNA, 25 bp, Homo sapien
gacgaagtctctagccttattttct

SEQ ID NO: 89932 - DNA, 25 bp, Homo sapien
gacgaagtctcttgccttattttct

SEQ ID NO: 89933 - DNA, 25 bp, Homo sapien
gttatctgttccttgggtctctact

SEQ ID NO: 89934 - DNA, 25 bp, Homo sapien
gttatctgttccatgggtctctact

SEQ ID NO: 89935 - DNA, 25 bp, Homo sapien
gtctcattgccgtaagtatctcact

SEQ ID NO: 89936 - DNA, 25 bp, Homo sapien
gtctcattgccgaaagtatctcact

SEQ ID NO: 89937 - DNA, 25 bp, Homo sapien
tcacgggcttgctactgtgttcctg

SEQ ID NO: 89938 - DNA, 25 bp, Homo sapien
tcacgggcttgcaactgtgttcctg

SEQ ID NO: 89939 - DNA, 25 bp, Homo sapien
gactctgcaggcaagtgtttcccgt

SEQ ID NO: 89940 - DNA, 25 bp, Homo sapien
gactctgcaggctagtgtttcccgt

SEQ ID NO: 89941 - DNA, 25 bp, Homo sapien
actcggcagggaagatgttcggtct

SEQ ID NO: 89942 - DNA, 25 bp, Homo sapien
actcggcagggatgatgttcggtct

SEQ ID NO: 89943 - DNA, 25 bp, Homo sapien
aagtaggcgacgaccaggtttctca

SEQ ID NO: 89944 - DNA, 25 bp, Homo sapien
aagtaggcgacgtccaggtttctca

SEQ ID NO: 89945 - DNA, 25 bp, Homo sapien
aaagacgtctgcagcgcggtagcac

SEQ ID NO: 89946 - DNA, 25 bp, Homo sapien
aaagacgtctgctgcgcggtagcac

SEQ ID NO: 89947 - DNA, 25 bp, Homo sapien
cgagggatactgtgttcgggaccac

SEQ ID NO: 89948 - DNA, 25 bp, Homo sapien
cgagggatactgagttcgggaccac

SEQ ID NO: 89949 - DNA, 25 bp, Homo sapien
cccggagtatgaggacccggaccgc

SEQ ID NO: 89950 - DNA, 25 bp, Homo sapien
cccggagtatgacgacccggaccgc

SEQ ID NO: 89951 - DNA, 25 bp, Homo sapien
cgatagatatatttcactctgagga

SEQ ID NO: 89952 - DNA, 25 bp, Homo sapien
cgatagatatatatcactctgagga

SEQ ID NO: 89953 - DNA, 25 bp, Homo sapien
ttagtgacttctgtaccaccaagac

SEQ ID NO: 89954 - DNA, 25 bp, Homo sapien
ttagtgacttctctaccaccaagac

SEQ ID NO: 89955 - DNA, 25 bp, Homo sapien
tttcttctactttccgagttagaga

SEQ ID NO: 89956 - DNA, 25 bp, Homo sapien
tttcttctacttaccgagttagaga

SEQ ID NO: 89957 - DNA, 25 bp, Homo sapien
gtgtcttaaccgttcaatcagaggt

SEQ ID NO: 89958 - DNA, 25 bp, Homo sapien
gtgtcttaaccgatcaatcagaggt

SEQ ID NO: 89959 - DNA, 25 bp, Homo sapien
agtgtttaacgtaaataaccatctg

SEQ ID NO: 89960 - DNA, 25 bp, Homo sapien
agtgtttaacgttaataaccatctg

SEQ ID NO: 89961 - DNA, 25 bp, Homo sapien
aaggattacattgtagtaccttcgg

SEQ ID NO: 89962 - DNA, 25 bp, Homo sapien
aaggattacattctagtaccttcgg

SEQ ID NO: 89963 - DNA, 25 bp, Homo sapien
atacttctcactttttgtatgtttg

SEQ ID NO: 89964 - DNA, 25 bp, Homo sapien
atacttctcactatttgtatgtttg

SEQ ID NO: 89965 - DNA, 25 bp, Homo sapien
tgctctgagtgttttatccatcacg

SEQ ID NO: 89966 - DNA, 25 bp, Homo sapien
tgctctgagtgtattatccatcacg

SEQ ID NO: 89967 - DNA, 25 bp, Homo sapien
tgacacttattctcagtgcataacg

SEQ ID NO: 89968 - DNA, 25 bp, Homo sapien
tgacacttattcacagtgcataacg

SEQ ID NO: 89969 - DNA, 25 bp, Homo sapien
cgtagttttttcctttgcaagacgt

SEQ ID NO: 89970 - DNA, 25 bp, Homo sapien
cgtagttttttcgtttgcaagacgt

SEQ ID NO: 89971 - DNA, 25 bp, Homo sapien
cttgtgtgacccttttcaaacagag

SEQ ID NO: 89972 - DNA, 25 bp, Homo sapien
cttgtgtgacccatttcaaacagag

SEQ ID NO: 89973 - DNA, 25 bp, Homo sapien
atcgtgttcagaaatttcactgaaa

SEQ ID NO: 89974 - DNA, 25 bp, Homo sapien
atcgtgttcagatatttcactgaaa

SEQ ID NO: 89975 - DNA, 25 bp, Homo sapien
ctgctatcatcgactttttcagaag

SEQ ID NO: 89976 - DNA, 25 bp, Homo sapien
ctgctatcatcgtctttttcagaag

SEQ ID NO: 89977 - DNA, 25 bp, Homo sapien
caagtttctcactcttattaaaatt

SEQ ID NO: 89978 - DNA, 25 bp, Homo sapien
caagtttctcacacttattaaaatt

SEQ ID NO: 89979 - DNA, 25 bp, Homo sapien
agctaatgggagtatgtaccgaatc

SEQ ID NO: 89980 - DNA, 25 bp, Homo sapien
agctaatgggagaatgtaccgaatc

SEQ ID NO: 89981 - DNA, 25 bp, Homo sapien
cagtatgagaacatagcacactatt

SEQ ID NO: 89982 - DNA, 25 bp, Homo sapien
cagtatgagaacttagcacactatt

SEQ ID NO: 89983 - DNA, 25 bp, Homo sapien
gtgtctcagtgataacgccaatctt

SEQ ID NO: 89984 - DNA, 25 bp, Homo sapien
gtgtctcagtgaaaacgccaatctt

SEQ ID NO: 89985 - DNA, 25 bp, Homo sapien
gtatcgcttaaaaccgcgaaaatct

SEQ ID NO: 89986 - DNA, 25 bp, Homo sapien
gtatcgcttaaatccgcgaaaatct

SEQ ID NO: 89987 - DNA, 25 bp, Homo sapien
agtgtcgtgttaaaggccacaattc

SEQ ID NO: 89988 - DNA, 25 bp, Homo sapien
agtgtcgtgttataggccacaattc

SEQ ID NO: 89989 - DNA, 25 bp, Homo sapien
taggtggaagttaaaccctacaaat

SEQ ID NO: 89990 - DNA, 25 bp, Homo sapien
taggtggaagtttaaccctacaaat

SEQ ID NO: 89991 - DNA, 25 bp, Homo sapien
cgaccgtggcagcaagagcctccaa

SEQ ID NO: 89992 - DNA, 25 bp, Homo sapien
cgaccgtggcaggaagagcctccaa

SEQ ID NO: 89993 - DNA, 25 bp, Homo sapien
tacaagagacaggagtccgtctagg

SEQ ID NO: 89994 - DNA, 25 bp, Homo sapien
tacaagagacagcagtccgtctagg

SEQ ID NO: 89995 - DNA, 25 bp, Homo sapien
ggtagatcaagaaagacctctagag

SEQ ID NO: 89996 - DNA, 25 bp, Homo sapien
ggtagatcaagatagacctctagag

SEQ ID NO: 89997 - DNA, 25 bp, Homo sapien
aggtcccccaattaaacgacagtag

SEQ ID NO: 89998 - DNA, 25 bp, Homo sapien
aggtcccccaataaaacgacagtag

SEQ ID NO: 89999 - DNA, 25 bp, Homo sapien
gggctccgctctgatctcaagggtt

SEQ ID NO: 90000 - DNA, 25 bp, Homo sapien
gggctccgctctcatctcaagggtt

SEQ ID NO: 90001 - DNA, 25 bp, Homo sapien
caggaattcagtccagtgatagacg

SEQ ID NO: 90002 - DNA, 25 bp, Homo sapien
caggaattcagtgcagtgatagacg

SEQ ID NO: 90003 - DNA, 25 bp, Homo sapien
aggtagactccatgtcttggacacg

SEQ ID NO: 90004 - DNA, 25 bp, Homo sapien
aggtagactccaagtcttggacacg

SEQ ID NO: 90005 - DNA, 25 bp, Homo sapien
aaggacgtcatcaaccttggactac

SEQ ID NO: 90006 - DNA, 25 bp, Homo sapien
aaggacgtcatctaccttggactac

SEQ ID NO: 90007 - DNA, 25 bp, Homo sapien
agaaagtttagacacttgtacgatc

SEQ ID NO: 90008 - DNA, 25 bp, Homo sapien
agaaagtttagagacttgtacgatc

SEQ ID NO: 90009 - DNA, 25 bp, Homo sapien
gtaaaacgattcagggactcgtgaa

SEQ ID NO: 90010 - DNA, 25 bp, Homo sapien
gtaaaacgattctgggactcgtgaa

SEQ ID NO: 90011 - DNA, 25 bp, Homo sapien
gagacaatcttatgtccatgatcat

SEQ ID NO: 90012 - DNA, 25 bp, Homo sapien
gagacaatcttaagtccatgatcat

SEQ ID NO: 90013 - DNA, 25 bp, Homo sapien
aaagactcgtgagaccatggtacct

SEQ ID NO: 90014 - DNA, 25 bp, Homo sapien
aaagactcgtgacaccatggtacct

SEQ ID NO: 90015 - DNA, 25 bp, Homo sapien
gaatgtatcatgacctatagttcac

SEQ ID NO: 90016 - DNA, 25 bp, Homo sapien
gaatgtatcatgtcctatagttcac

SEQ ID NO: 90017 - DNA, 25 bp, Homo sapien
attgatacaccacgtaatgtatgta

SEQ ID NO: 90018 - DNA, 25 bp, Homo sapien
attgatacaccaggtaatgtatgta

SEQ ID NO: 90019 - DNA, 25 bp, Homo sapien
gaggtaactccagtttctatagtaa

SEQ ID NO: 90020 - DNA, 25 bp, Homo sapien
gaggtaactccactttctatagtaa

SEQ ID NO: 90021 - DNA, 25 bp, Homo sapien
taggaccatcgcaacttattttaga

SEQ ID NO: 90022 - DNA, 25 bp, Homo sapien
taggaccatcgctacttattttaga

SEQ ID NO: 90023 - DNA, 25 bp, Homo sapien
ggatgtgtgtaaatgtcttaatata

SEQ ID NO: 90024 - DNA, 25 bp, Homo sapien
ggatgtgtgtaattgtcttaatata

SEQ ID NO: 90025 - DNA, 25 bp, Homo sapien
acgacttcttctatgtttacagtga

SEQ ID NO: 90026 - DNA, 25 bp, Homo sapien
acgacttcttctttgtttacagtga

SEQ ID NO: 90027 - DNA, 25 bp, Homo sapien
tcaactcggggtttcggaacataga

SEQ ID NO: 90028 - DNA, 25 bp, Homo sapien
tcaactcggggtatcggaacataga

SEQ ID NO: 90029 - DNA, 25 bp, Homo sapien
aaaggtgtcgacaacatccagtgat

SEQ ID NO: 90030 - DNA, 25 bp, Homo sapien
aaaggtgtcgactacatccagtgat

SEQ ID NO: 90031 - DNA, 25 bp, Homo sapien
ggagagtcttcaagacacaccgaga

SEQ ID NO: 90032 - DNA, 25 bp, Homo sapien
ggagagtcttcatgacacaccgaga

SEQ ID NO: 90033 - DNA, 25 bp, Homo sapien
aggaccgtcatccaccgaaccgatt

SEQ ID NO: 90034 - DNA, 25 bp, Homo sapien
aggaccgtcatcgaccgaaccgatt

SEQ ID NO: 90035 - DNA, 25 bp, Homo sapien
gacgtgcacccgagagacgagaagt

SEQ ID NO: 90036 - DNA, 25 bp, Homo sapien
gacgtgcacccgtgagacgagaagt

SEQ ID NO: 90037 - DNA, 25 bp, Homo sapien
aggtggacgaccagtgacaagagta

SEQ ID NO: 90038 - DNA, 25 bp, Homo sapien
aggtggacgacctgtgacaagagta

SEQ ID NO: 90039 - DNA, 25 bp, Homo sapien
accggtcgacgactgtccaccgtga

SEQ ID NO: 90040 - DNA, 25 bp, Homo sapien
accggtcgacgagtgtccaccgtga

SEQ ID NO: 90041 - DNA, 25 bp, Homo sapien
ctcggtgcatctcctaccactgtat

SEQ ID NO: 90042 - DNA, 25 bp, Homo sapien
ctcggtgcatctgctaccactgtat

SEQ ID NO: 90043 - DNA, 25 bp, Homo sapien
ctctgtgaccttggagtccagatat

SEQ ID NO: 90044 - DNA, 25 bp, Homo sapien
ctctgtgaccttcgagtccagatat

SEQ ID NO: 90045 - DNA, 25 bp, Homo sapien
tctggtgcgtgtagtgatcacaaag

SEQ ID NO: 90046 - DNA, 25 bp, Homo sapien
tctggtgcgtgttgtgatcacaaag

SEQ ID NO: 90047 - DNA, 25 bp, Homo sapien
cctagggtccgtatgtgtctcccgg

SEQ ID NO: 90048 - DNA, 25 bp, Homo sapien
cctagggtccgtttgtgtctcccgg

SEQ ID NO: 90049 - DNA, 25 bp, Homo sapien
ctggttctgtctcgtcggtcacggg

SEQ ID NO: 90050 - DNA, 25 bp, Homo sapien
ctggttctgtctggtcggtcacggg

SEQ ID NO: 90051 - DNA, 25 bp, Homo sapien
ccatcaccaaaatggtcgtacgaaa

SEQ ID NO: 90052 - DNA, 25 bp, Homo sapien
ccatcaccaaaaaggtcgtacgaaa

SEQ ID NO: 90053 - DNA, 25 bp, Homo sapien
cgtgtctttaagcaccgtccctgat

SEQ ID NO: 90054 - DNA, 25 bp, Homo sapien
cgtgtctttaaggaccgtccctgat

SEQ ID NO: 90055 - DNA, 25 bp, Homo sapien
tctttgacacaggaggttgacggtt

SEQ ID NO: 90056 - DNA, 25 bp, Homo sapien
tctttgacacagcaggttgacggtt

SEQ ID NO: 90057 - DNA, 25 bp, Homo sapien
acttaaggtcccttttggtggatat

SEQ ID NO: 90058 - DNA, 25 bp, Homo sapien
acttaaggtcccatttggtggatat

SEQ ID NO: 90059 - DNA, 25 bp, Homo sapien
agagccggtcgactctgagaaccgg

SEQ ID NO: 90060 - DNA, 25 bp, Homo sapien
agagccggtcgagtctgagaaccgg

SEQ ID NO: 90061 - DNA, 25 bp, Homo sapien
tataagtgtgaatccattcacgtgt

SEQ ID NO: 90062 - DNA, 25 bp, Homo sapien
tataagtgtgaaaccattcacgtgt

SEQ ID NO: 90063 - DNA, 25 bp, Homo sapien
gtggtaccctggattcgataacctt

SEQ ID NO: 90064 - DNA, 25 bp, Homo sapien
gtggtaccctggtttcgataacctt

SEQ ID NO: 90065 - DNA, 25 bp, Homo sapien
gttcaccctcggaagagacaacttt

SEQ ID NO: 90066 - DNA, 25 bp, Homo sapien
gttcaccctcggtagagacaacttt

SEQ ID NO: 90067 - DNA, 25 bp, Homo sapien
ggtatacaaatttctgtaccatcag

SEQ ID NO: 90068 - DNA, 25 bp, Homo sapien
ggtatacaaattactgtaccatcag

SEQ ID NO: 90069 - DNA, 25 bp, Homo sapien
ggttagtgaaagtcaaggcatcgtc

SEQ ID NO: 90070 - DNA, 25 bp, Homo sapien
ggttagtgaaagacaaggcatcgtc

SEQ ID NO: 90071 - DNA, 25 bp, Homo sapien
cggtagtcccgaatgccatcgtttc

SEQ ID NO: 90072 - DNA, 25 bp, Homo sapien
cggtagtcccgattgccatcgtttc

SEQ ID NO: 90073 - DNA, 25 bp, Homo sapien
gattatacccattgatcgacctttg

SEQ ID NO: 90074 - DNA, 25 bp, Homo sapien
gattatacccatagatcgacctttg

SEQ ID NO: 90075 - DNA, 25 bp, Homo sapien
gaaaagacacaaaatgtcactattg

SEQ ID NO: 90076 - DNA, 25 bp, Homo sapien
gaaaagacacaatatgtcactattg

SEQ ID NO: 90077 - DNA, 25 bp, Homo sapien
cgaatgactagaaaaagatccccgg

SEQ ID NO: 90078 - DNA, 25 bp, Homo sapien
cgaatgactagataaagatccccgg

SEQ ID NO: 90079 - DNA, 25 bp, Homo sapien
atcccgaatcgaaagagtcaccttt

SEQ ID NO: 90080 - DNA, 25 bp, Homo sapien
atcccgaatcgatagagtcaccttt

SEQ ID NO: 90081 - DNA, 25 bp, Homo sapien
cctctaaaagtaaggtctcgagttt

SEQ ID NO: 90082 - DNA, 25 bp, Homo sapien
cctctaaaagtatggtctcgagttt

SEQ ID NO: 90083 - DNA, 25 bp, Homo sapien
ggacccttctgtctatgttccttcc

SEQ ID NO: 90084 - DNA, 25 bp, Homo sapien
ggacccttctgtgtatgttccttcc

SEQ ID NO: 90085 - DNA, 25 bp, Homo sapien
gtaccgactcaagcttctacgtctc

SEQ ID NO: 90086 - DNA, 25 bp, Homo sapien
gtaccgactcaaccttctacgtctc

SEQ ID NO: 90087 - DNA, 25 bp, Homo sapien
gtattgtttctttcaaatatacccc

SEQ ID NO: 90088 - DNA, 25 bp, Homo sapien
gtattgtttcttacaaatatacccc

SEQ ID NO: 90089 - DNA, 25 bp, Homo sapien
aactcgagttacagaaaacgcgtca

SEQ ID NO: 90090 - DNA, 25 bp, Homo sapien
aactcgagttactgaaaacgcgtca

SEQ ID NO: 90091 - DNA, 25 bp, Homo sapien
aaggactcttgtttgttcatccgga

SEQ ID NO: 90092 - DNA, 25 bp, Homo sapien
aaggactcttgtatgttcatccgga

SEQ ID NO: 90093 - DNA, 25 bp, Homo sapien
ttggtaatgtaaatctggacccgaa

SEQ ID NO: 90094 - DNA, 25 bp, Homo sapien
ttggtaatgtaattctggacccgaa

SEQ ID NO: 90095 - DNA, 25 bp, Homo sapien
gtacgtttcctcctaggaccaacat

SEQ ID NO: 90096 - DNA, 25 bp, Homo sapien
gtacgtttcctcgtaggaccaacat

SEQ ID NO: 90097 - DNA, 25 bp, Homo sapien
gtcacacccgacgaggtcaccaagt

SEQ ID NO: 90098 - DNA, 25 bp, Homo sapien
gtcacacccgaccaggtcaccaagt

SEQ ID NO: 90099 - DNA, 25 bp, Homo sapien
tcagaaaccgcgacatgaactcctc

SEQ ID NO: 90100 - DNA, 25 bp, Homo sapien
tcagaaaccgcgtcatgaactcctc

SEQ ID NO: 90101 - DNA, 25 bp, Homo sapien
cgacagagaccgaggatggctcaag

SEQ ID NO: 90102 - DNA, 25 bp, Homo sapien
cgacagagaccgtggatggctcaag

SEQ ID NO: 90103 - DNA, 25 bp, Homo sapien
cacaagtaggatggaccggctgaag

SEQ ID NO: 90104 - DNA, 25 bp, Homo sapien
cacaagtaggatcgaccggctgaag

SEQ ID NO: 90105 - DNA, 25 bp, Homo sapien
ccaagggtcggtcacaatcctagag

SEQ ID NO: 90106 - DNA, 25 bp, Homo sapien
ccaagggtcggtgacaatcctagag

SEQ ID NO: 90107 - DNA, 25 bp, Homo sapien
cagagggtaggaacgttttgacgac

SEQ ID NO: 90108 - DNA, 25 bp, Homo sapien
cagagggtaggatcgttttgacgac

SEQ ID NO: 90109 - DNA, 25 bp, Homo sapien
ggacgggacgcaagtttattacgct

SEQ ID NO: 90110 - DNA, 25 bp, Homo sapien
ggacgggacgcatgtttattacgct

SEQ ID NO: 90111 - DNA, 25 bp, Homo sapien
acggtaagagatgtcgtctggtttc

SEQ ID NO: 90112 - DNA, 25 bp, Homo sapien
acggtaagagatctcgtctggtttc

SEQ ID NO: 90113 - DNA, 25 bp, Homo sapien
atgttgatacaagtctatgtttctc

SEQ ID NO: 90114 - DNA, 25 bp, Homo sapien
atgttgatacaactctatgtttctc

SEQ ID NO: 90115 - DNA, 25 bp, Homo sapien
gatattgataagatttatccaccga

SEQ ID NO: 90116 - DNA, 25 bp, Homo sapien
gatattgataagttttatccaccga

SEQ ID NO: 90117 - DNA, 25 bp, Homo sapien
aattttaagggtcactaccgaacat

SEQ ID NO: 90118 - DNA, 25 bp, Homo sapien
aattttaagggtgactaccgaacat

SEQ ID NO: 90119 - DNA, 25 bp, Homo sapien
taacgtgtattgtgcgactctgttt

SEQ ID NO: 90120 - DNA, 25 bp, Homo sapien
taacgtgtattgagcgactctgttt

SEQ ID NO: 90121 - DNA, 25 bp, Homo sapien
taagttcgagggacgacctgtccgt

SEQ ID NO: 90122 - DNA, 25 bp, Homo sapien
taagttcgagggtcgacctgtccgt

SEQ ID NO: 90123 - DNA, 25 bp, Homo sapien
tctactggtctgttcgggccgcgga

SEQ ID NO: 90124 - DNA, 25 bp, Homo sapien
tctactggtctgatcgggccgcgga

SEQ ID NO: 90125 - DNA, 25 bp, Homo sapien
ttctctcgggtgatgtcggcggcgt

SEQ ID NO: 90126 - DNA, 25 bp, Homo sapien
ttctctcgggtgttgtcggcggcgt

SEQ ID NO: 90127 - DNA, 25 bp, Homo sapien
cctcgaggtgtatctcggagtgtcg

SEQ ID NO: 90128 - DNA, 25 bp, Homo sapien
cctcgaggtgtaactcggagtgtcg

SEQ ID NO: 90129 - DNA, 25 bp, Homo sapien
taccacagttgatacggtcgtagtg

SEQ ID NO: 90130 - DNA, 25 bp, Homo sapien
taccacagttgaaacggtcgtagtg

SEQ ID NO: 90131 - DNA, 25 bp, Homo sapien
ttccacagtagacagaccggtgtcg

SEQ ID NO: 90132 - DNA, 25 bp, Homo sapien
ttccacagtagagagaccggtgtcg

SEQ ID NO: 90133 - DNA, 25 bp, Homo sapien
cccgtcctccaggaagacggttcgt

SEQ ID NO: 90134 - DNA, 25 bp, Homo sapien
cccgtcctccagcaagacggttcgt

SEQ ID NO: 90135 - DNA, 25 bp, Homo sapien
tctcggccagctaccccaaggggtg

SEQ ID NO: 90136 - DNA, 25 bp, Homo sapien
tctcggccagcttccccaaggggtg

SEQ ID NO: 90137 - DNA, 25 bp, Homo sapien
ccccggatctttactcacagagggg

SEQ ID NO: 90138 - DNA, 25 bp, Homo sapien
ccccggatcttttctcacagagggg

SEQ ID NO: 90139 - DNA, 25 bp, Homo sapien
accccggaactgaatcagtgatttt

SEQ ID NO: 90140 - DNA, 25 bp, Homo sapien
accccggaactgtatcagtgatttt

SEQ ID NO: 90141 - DNA, 25 bp, Homo sapien
acctggggaccgaccgaggagtttt

SEQ ID NO: 90142 - DNA, 25 bp, Homo sapien
acctggggaccgtccgaggagtttt

SEQ ID NO: 90143 - DNA, 25 bp, Homo sapien
gttcacggacggtctctgatattgg

SEQ ID NO: 90144 - DNA, 25 bp, Homo sapien
gttcacggacggactctgatattgg

SEQ ID NO: 90145 - DNA, 25 bp, Homo sapien
gtctgacatgacaccggtacatgtg

SEQ ID NO: 90146 - DNA, 25 bp, Homo sapien
gtctgacatgactccggtacatgtg

SEQ ID NO: 90147 - DNA, 25 bp, Homo sapien
tgttaaaacataccttacgatctac

SEQ ID NO: 90148 - DNA, 25 bp, Homo sapien
tgttaaaacatagcttacgatctac

SEQ ID NO: 90149 - DNA, 25 bp, Homo sapien
atttgagaacaacatcctatctttc

SEQ ID NO: 90150 - DNA, 25 bp, Homo sapien
atttgagaacaagatcctatctttc

SEQ ID NO: 90151 - DNA, 25 bp, Homo sapien
attctgcaagaagacatttcagttt

SEQ ID NO: 90152 - DNA, 25 bp, Homo sapien
attctgcaagaacacatttcagttt

SEQ ID NO: 90153 - DNA, 25 bp, Homo sapien
actccaacgaaccttttttgagtgt

SEQ ID NO: 90154 - DNA, 25 bp, Homo sapien
actccaacgaacgttttttgagtgt

SEQ ID NO: 90155 - DNA, 25 bp, Homo sapien
agtcaaaggaaatgtcttttgacgc

SEQ ID NO: 90156 - DNA, 25 bp, Homo sapien
agtcaaaggaaaagtcttttgacgc

SEQ ID NO: 90157 - DNA, 25 bp, Homo sapien
cttatacgttggggttttatacagg

SEQ ID NO: 90158 - DNA, 25 bp, Homo sapien
cttatacgttggcgttttatacagg

SEQ ID NO: 90159 - DNA, 25 bp, Homo sapien
cagattataggtgttgtgtacaacc

SEQ ID NO: 90160 - DNA, 25 bp, Homo sapien
cagattataggtcttgtgtacaacc

SEQ ID NO: 90161 - DNA, 25 bp, Homo sapien
ggtttctgatcctttgactagacac

SEQ ID NO: 90162 - DNA, 25 bp, Homo sapien
ggtttctgatccattgactagacac

SEQ ID NO: 90163 - DNA, 25 bp, Homo sapien
tgtggttaacccttacgttgttgaa

SEQ ID NO: 90164 - DNA, 25 bp, Homo sapien
tgtggttaacccatacgttgttgaa

SEQ ID NO: 90165 - DNA, 25 bp, Homo sapien
agtatggtaccctttagttatcaaa

SEQ ID NO: 90166 - DNA, 25 bp, Homo sapien
agtatggtacccattagttatcaaa

SEQ ID NO: 90167 - DNA, 25 bp, Homo sapien
tttgtcaggtccggtcatacaatgt

SEQ ID NO: 90168 - DNA, 25 bp, Homo sapien
tttgtcaggtcccgtcatacaatgt

SEQ ID NO: 90169 - DNA, 25 bp, Homo sapien
ttttatgggtttgataccgacgtgt

SEQ ID NO: 90170 - DNA, 25 bp, Homo sapien
ttttatgggtttcataccgacgtgt

SEQ ID NO: 90171 - DNA, 25 bp, Homo sapien
aggcatcgggtggaccatacactgt

SEQ ID NO: 90172 - DNA, 25 bp, Homo sapien
aggcatcgggtgcaccatacactgt

SEQ ID NO: 90173 - DNA, 25 bp, Homo sapien
ttgtcggtatcgaactgactcctgt

SEQ ID NO: 90174 - DNA, 25 bp, Homo sapien
ttgtcggtatcgtactgactcctgt

SEQ ID NO: 90175 - DNA, 25 bp, Homo sapien
ttagtcgacgtatttatgtctcttg

SEQ ID NO: 90176 - DNA, 25 bp, Homo sapien
ttagtcgacgtaattatgtctcttg

SEQ ID NO: 90177 - DNA, 25 bp, Homo sapien
cttcatgtagtggtcttagccggtc

SEQ ID NO: 90178 - DNA, 25 bp, Homo sapien
cttcatgtagtgctcttagccggtc

SEQ ID NO: 90179 - DNA, 25 bp, Homo sapien
atctcactagagacctacagcctta

SEQ ID NO: 90180 - DNA, 25 bp, Homo sapien
atctcactagagtcctacagcctta

SEQ ID NO: 90181 - DNA, 25 bp, Homo sapien
gtccgtaagtcctcctagaacaggg

SEQ ID NO: 90182 - DNA, 25 bp, Homo sapien
gtccgtaagtccacctagaacaggg

SEQ ID NO: 90183 - DNA, 25 bp, Homo sapien
tttcgcttagtgactctgtccgggg

SEQ ID NO: 90184 - DNA, 25 bp, Homo sapien
tttcgcttagtgtctctgtccgggg

SEQ ID NO: 90185 - DNA, 25 bp, Homo sapien
gttcgagacgggtcaaggagtccct

SEQ ID NO: 90186 - DNA, 25 bp, Homo sapien
gttcgagacgggacaaggagtccct

SEQ ID NO: 90187 - DNA, 25 bp, Homo sapien
tgcggaccgctagggacttgtacag

SEQ ID NO: 90188 - DNA, 25 bp, Homo sapien
tgcggaccgctacggacttgtacag

SEQ ID NO: 90189 - DNA, 25 bp, Homo sapien
ctcactactccaagcgttcttggac

SEQ ID NO: 90190 - DNA, 25 bp, Homo sapien
ctcactactccatgcgttcttggac

SEQ ID NO: 90191 - DNA, 25 bp, Homo sapien
atttgacgaactgatcaaaattcga

SEQ ID NO: 90192 - DNA, 25 bp, Homo sapien
atttgacgaactcatcaaaattcga

SEQ ID NO: 90193 - DNA, 25 bp, Homo sapien
tcggtccctcgttccggtttaccgg

SEQ ID NO: 90194 - DNA, 25 bp, Homo sapien
tcggtccctcgtaccggtttaccgg

SEQ ID NO: 90195 - DNA, 25 bp, Homo sapien
cgtcccctagtgtactgacccgttg

SEQ ID NO: 90196 - DNA, 25 bp, Homo sapien
cgtcccctagtgaactgacccgttg

SEQ ID NO: 90197 - DNA, 25 bp, Homo sapien
ggtggtccgtggacgacacccctgt

SEQ ID NO: 90198 - DNA, 25 bp, Homo sapien
ggtggtccgtggtcgacacccctgt

SEQ ID NO: 90199 - DNA, 25 bp, Homo sapien
aggagattcgaaggtagatctttcc

SEQ ID NO: 90200 - DNA, 25 bp, Homo sapien
aggagattcgaacgtagatctttcc

SEQ ID NO: 90201 - DNA, 25 bp, Homo sapien
aggcgtcataccaggtctcctacct

SEQ ID NO: 90202 - DNA, 25 bp, Homo sapien
aggcgtcatacctggtctcctacct

SEQ ID NO: 90203 - DNA, 25 bp, Homo sapien
caagagtcaacttccgtcttctcag

SEQ ID NO: 90204 - DNA, 25 bp, Homo sapien
caagagtcaactaccgtcttctcag

SEQ ID NO: 90205 - DNA, 25 bp, Homo sapien
aagagcggacacacgtgcgcctaca

SEQ ID NO: 90206 - DNA, 25 bp, Homo sapien
aagagcggacactcgtgcgcctaca

SEQ ID NO: 90207 - DNA, 25 bp, Homo sapien
ccaggaagaccgaaaggacctactc

SEQ ID NO: 90208 - DNA, 25 bp, Homo sapien
ccaggaagaccgtaaggacctactc

SEQ ID NO: 90209 - DNA, 25 bp, Homo sapien
ataaaagtagtctaaggtacgaccc

SEQ ID NO: 90210 - DNA, 25 bp, Homo sapien
ataaaagtagtcaaaggtacgaccc

SEQ ID NO: 90211 - DNA, 25 bp, Homo sapien
gtctaaaatgagacggacgacgaaa

SEQ ID NO: 90212 - DNA, 25 bp, Homo sapien
gtctaaaatgagtcggacgacgaaa

SEQ ID NO: 90213 - DNA, 25 bp, Homo sapien
gtagaaccggagttcgaacggaaag

SEQ ID NO: 90214 - DNA, 25 bp, Homo sapien
gtagaaccggagatcgaacggaaag

SEQ ID NO: 90215 - DNA, 25 bp, Homo sapien
aagacgagaccctatcaacaagaga

SEQ ID NO: 90216 - DNA, 25 bp, Homo sapien
aagacgagacccaatcaacaagaga

SEQ ID NO: 90217 - DNA, 25 bp, Homo sapien
gcgagaccgtcttagtccaccaaag

SEQ ID NO: 90218 - DNA, 25 bp, Homo sapien
gcgagaccgtctaagtccaccaaag

SEQ ID NO: 90219 - DNA, 25 bp, Homo sapien
cgcgacagtgaaccactaccacaag

SEQ ID NO: 90220 - DNA, 25 bp, Homo sapien
cgcgacagtgaagcactaccacaag

SEQ ID NO: 90221 - DNA, 25 bp, Homo sapien
catggtacatgtaccattatagaac

SEQ ID NO: 90222 - DNA, 25 bp, Homo sapien
catggtacatgttccattatagaac

SEQ ID NO: 90223 - DNA, 25 bp, Homo sapien
tagtacgttttcttaggctcaagat

SEQ ID NO: 90224 - DNA, 25 bp, Homo sapien
tagtacgttttcataggctcaagat

SEQ ID NO: 90225 - DNA, 25 bp, Homo sapien
agacttttagtgtcgttacgttatc

SEQ ID NO: 90226 - DNA, 25 bp, Homo sapien
agacttttagtgacgttacgttatc

SEQ ID NO: 90227 - DNA, 25 bp, Homo sapien
gagttctgtgccagtgtctagtctc

SEQ ID NO: 90228 - DNA, 25 bp, Homo sapien
gagttctgtgcctgtgtctagtctc

SEQ ID NO: 90229 - DNA, 25 bp, Homo sapien
gtgtggttagagtctccacatactc

SEQ ID NO: 90230 - DNA, 25 bp, Homo sapien
gtgtggttagagactccacatactc

SEQ ID NO: 90231 - DNA, 25 bp, Homo sapien
gtggggttgtaaactcattatactc

SEQ ID NO: 90232 - DNA, 25 bp, Homo sapien
gtggggttgtaatctcattatactc

SEQ ID NO: 90233 - DNA, 25 bp, Homo sapien
gctgttattgaactcctatgtcgtg

SEQ ID NO: 90234 - DNA, 25 bp, Homo sapien
gctgttattgaagtcctatgtcgtg

SEQ ID NO: 90235 - DNA, 25 bp, Homo sapien
actatacggatcgaattttcgttta

SEQ ID NO: 90236 - DNA, 25 bp, Homo sapien
actatacggatccaattttcgttta

SEQ ID NO: 90237 - DNA, 25 bp, Homo sapien
cgatgtctgcctttttgtccgtcac

SEQ ID NO: 90238 - DNA, 25 bp, Homo sapien
cgatgtctgcctatttgtccgtcac

SEQ ID NO: 90239 - DNA, 25 bp, Homo sapien
gatctttatgtttgtagttacgtcc

SEQ ID NO: 90240 - DNA, 25 bp, Homo sapien
gatctttatgttagtagttacgtcc

SEQ ID NO: 90241 - DNA, 25 bp, Homo sapien
catcgttgacggtcgtaacaagtcc

SEQ ID NO: 90242 - DNA, 25 bp, Homo sapien
catcgttgacggacgtaacaagtcc

SEQ ID NO: 90243 - DNA, 25 bp, Homo sapien
cttcgggacataagatgtctctgtc

SEQ ID NO: 90244 - DNA, 25 bp, Homo sapien
cttcgggacatatgatgtctctgtc

SEQ ID NO: 90245 - DNA, 25 bp, Homo sapien
gtccgtccgaactctacttcgggtc

SEQ ID NO: 90246 - DNA, 25 bp, Homo sapien
gtccgtccgaacactacttcgggtc

SEQ ID NO: 90247 - DNA, 25 bp, Homo sapien
aggggacctaagtacttttacaagt

SEQ ID NO: 90248 - DNA, 25 bp, Homo sapien
aggggacctaagaacttttacaagt

SEQ ID NO: 90249 - DNA, 25 bp, Homo sapien
tgacatgtgtcttactaccttgatc

SEQ ID NO: 90250 - DNA, 25 bp, Homo sapien
tgacatgtgtctaactaccttgatc

SEQ ID NO: 90251 - DNA, 25 bp, Homo sapien
gacggcagtcttatcacacatgagc

SEQ ID NO: 90252 - DNA, 25 bp, Homo sapien
gacggcagtcttttcacacatgagc

SEQ ID NO: 90253 - DNA, 25 bp, Homo sapien
ccttgatctcctgataaacagagta

SEQ ID NO: 90254 - DNA, 25 bp, Homo sapien
ccttgatctcctcataaacagagta

SEQ ID NO: 90255 - DNA, 25 bp, Homo sapien
ctcgtatttctttacttctggggtc

SEQ ID NO: 90256 - DNA, 25 bp, Homo sapien
ctcgtatttcttaacttctggggtc

SEQ ID NO: 90257 - DNA, 25 bp, Homo sapien
ttctttgtcacaactctgaagaagg

SEQ ID NO: 90258 - DNA, 25 bp, Homo sapien
ttctttgtcacatctctgaagaagg

SEQ ID NO: 90259 - DNA, 25 bp, Homo sapien
cagtgcgacctacgaccgggaaggt

SEQ ID NO: 90260 - DNA, 25 bp, Homo sapien
cagtgcgacctaggaccgggaaggt

SEQ ID NO: 90261 - DNA, 25 bp, Homo sapien
acgtccgacggagacttgacatcag

SEQ ID NO: 90262 - DNA, 25 bp, Homo sapien
acgtccgacggacacttgacatcag

SEQ ID NO: 90263 - DNA, 25 bp, Homo sapien
gtatgaggtgagaaaccttcactca

SEQ ID NO: 90264 - DNA, 25 bp, Homo sapien
gtatgaggtgagtaaccttcactca

SEQ ID NO: 90265 - DNA, 25 bp, Homo sapien
aggtgtgtcgggaacgacaactgta

SEQ ID NO: 90266 - DNA, 25 bp, Homo sapien
aggtgtgtcgggtacgacaactgta

SEQ ID NO: 90267 - DNA, 25 bp, Homo sapien
gaggtctggacgacgacgaccttct

SEQ ID NO: 90268 - DNA, 25 bp, Homo sapien
gaggtctggacgtcgacgaccttct

SEQ ID NO: 90269 - DNA, 25 bp, Homo sapien
gtccagtggtcaagcgttggaccaa

SEQ ID NO: 90270 - DNA, 25 bp, Homo sapien
gtccagtggtcatgcgttggaccaa

SEQ ID NO: 90271 - DNA, 25 bp, Homo sapien
gaccattgtaagagtccgtcctcaa

SEQ ID NO: 90272 - DNA, 25 bp, Homo sapien
gaccattgtaagtgtccgtcctcaa

SEQ ID NO: 90273 - DNA, 25 bp, Homo sapien
ccttcggagaggtccggacctcgac

SEQ ID NO: 90274 - DNA, 25 bp, Homo sapien
ccttcggagaggaccggacctcgac

SEQ ID NO: 90275 - DNA, 25 bp, Homo sapien
caagaagagttagtcggaccgctag

SEQ ID NO: 90276 - DNA, 25 bp, Homo sapien
caagaagagttactcggaccgctag

SEQ ID NO: 90277 - DNA, 25 bp, Homo sapien
tcgacggaggcaaacccaccgtctt

SEQ ID NO: 90278 - DNA, 25 bp, Homo sapien
tcgacggaggcatacccaccgtctt

SEQ ID NO: 90279 - DNA, 25 bp, Homo sapien
gcgagggagccgacatcaacgactg

SEQ ID NO: 90280 - DNA, 25 bp, Homo sapien
gcgagggagccgtcatcaacgactg

SEQ ID NO: 90281 - DNA, 25 bp, Homo sapien
ctacatccgccgacgcagaagtatc

SEQ ID NO: 90282 - DNA, 25 bp, Homo sapien
ctacatccgccgtcgcagaagtatc

SEQ ID NO: 90283 - DNA, 25 bp, Homo sapien
tacagttacttggttcaagagtatc

SEQ ID NO: 90284 - DNA, 25 bp, Homo sapien
tacagttacttgcttcaagagtatc

SEQ ID NO: 90285 - DNA, 25 bp, Homo sapien
tgacggtagtttcgacactccgaag

SEQ ID NO: 90286 - DNA, 25 bp, Homo sapien
tgacggtagtttggacactccgaag

SEQ ID NO: 90287 - DNA, 25 bp, Homo sapien
gagatatagtgtagacgaccccgat

SEQ ID NO: 90288 - DNA, 25 bp, Homo sapien
gagatatagtgttgacgaccccgat

SEQ ID NO: 90289 - DNA, 25 bp, Homo sapien
cgtgtgagtgtggtcggaccctcct

SEQ ID NO: 90290 - DNA, 25 bp, Homo sapien
cgtgtgagtgtgctcggaccctcct

SEQ ID NO: 90291 - DNA, 25 bp, Homo sapien
gcgtgggacctccagaccggtcact

SEQ ID NO: 90292 - DNA, 25 bp, Homo sapien
gcgtgggacctcgagaccggtcact

SEQ ID NO: 90293 - DNA, 25 bp, Homo sapien
tgagtagaccgaagaaggactcgtc

SEQ ID NO: 90294 - DNA, 25 bp, Homo sapien
tgagtagaccgatgaaggactcgtc

SEQ ID NO: 90295 - DNA, 25 bp, Homo sapien
ctactagaccaggtagaagaccgat

SEQ ID NO: 90296 - DNA, 25 bp, Homo sapien
ctactagaccagctagaagaccgat

SEQ ID NO: 90297 - DNA, 25 bp, Homo sapien
tttagtgtattgagtacagaccact

SEQ ID NO: 90298 - DNA, 25 bp, Homo sapien
tttagtgtattgtgtacagaccact

SEQ ID NO: 90299 - DNA, 25 bp, Homo sapien
tactttagtgtgtcggaggaaactc

SEQ ID NO: 90300 - DNA, 25 bp, Homo sapien
tactttagtgtgacggaggaaactc

SEQ ID NO: 90301 - DNA, 25 bp, Homo sapien
tttacttattgtgacacgacgaata

SEQ ID NO: 90302 - DNA, 25 bp, Homo sapien
tttacttattgtcacacgacgaata

SEQ ID NO: 90303 - DNA, 25 bp, Homo sapien
gtcaattctcgtcctccgacttacg

SEQ ID NO: 90304 - DNA, 25 bp, Homo sapien
gtcaattctcgtgctccgacttacg

SEQ ID NO: 90305 - DNA, 25 bp, Homo sapien
ggttccggtgacagaccctacacac

SEQ ID NO: 90306 - DNA, 25 bp, Homo sapien
ggttccggtgactgaccctacacac

SEQ ID NO: 90307 - DNA, 25 bp, Homo sapien
gtagtcgattatacttacgtaacga

SEQ ID NO: 90308 - DNA, 25 bp, Homo sapien
gtagtcgattattcttacgtaacga

SEQ ID NO: 90309 - DNA, 25 bp, Homo sapien
atcgtgtcgtgtcttgtctttacga

SEQ ID NO: 90310 - DNA, 25 bp, Homo sapien
atcgtgtcgtgtgttgtctttacga

SEQ ID NO: 90311 - DNA, 25 bp, Homo sapien
aggagacctgaggacggatcgtcca

SEQ ID NO: 90312 - DNA, 25 bp, Homo sapien
aggagacctgagcacggatcgtcca

SEQ ID NO: 90313 - DNA, 25 bp, Homo sapien
acaacgaatagacatcgaggtcctc

SEQ ID NO: 90314 - DNA, 25 bp, Homo sapien
acaacgaatagagatcgaggtcctc

SEQ ID NO: 90315 - DNA, 25 bp, Homo sapien
tccaggacgggacctccgaggtcct

SEQ ID NO: 90316 - DNA, 25 bp, Homo sapien
tccaggacgggagctccgaggtcct

SEQ ID NO: 90317 - DNA, 25 bp, Homo sapien
gttccctaggacagcgtggtcggcc

SEQ ID NO: 90318 - DNA, 25 bp, Homo sapien
gttccctaggactgcgtggtcggcc

SEQ ID NO: 90319 - DNA, 25 bp, Homo sapien
cgtatttatggtgtgttgtcggtcc

SEQ ID NO: 90320 - DNA, 25 bp, Homo sapien
cgtatttatggtctgttgtcggtcc

SEQ ID NO: 90321 - DNA, 25 bp, Homo sapien
agtgactttgaactgggtactgaac

SEQ ID NO: 90322 - DNA, 25 bp, Homo sapien
agtgactttgaagtgggtactgaac

SEQ ID NO: 90323 - DNA, 25 bp, Homo sapien
aatatatgtaggtgaagaaccacac

SEQ ID NO: 90324 - DNA, 25 bp, Homo sapien
aatatatgtaggagaagaaccacac

SEQ ID NO: 90325 - DNA, 25 bp, Homo sapien
acaaagggttctgtaactttaccga

SEQ ID NO: 90326 - DNA, 25 bp, Homo sapien
acaaagggttctctaactttaccga

SEQ ID NO: 90327 - DNA, 25 bp, Homo sapien
ccagtgaggttttctgacgatttga

SEQ ID NO: 90328 - DNA, 25 bp, Homo sapien
ccagtgaggtttactgacgatttga

SEQ ID NO: 90329 - DNA, 25 bp, Homo sapien
catgttaagttccgtgtgaacctaa

SEQ ID NO: 90330 - DNA, 25 bp, Homo sapien
catgttaagttcggtgtgaacctaa

SEQ ID NO: 90331 - DNA, 25 bp, Homo sapien
agtttaatgtcgatgttctaccttt

SEQ ID NO: 90332 - DNA, 25 bp, Homo sapien
agtttaatgtcgttgttctaccttt

SEQ ID NO: 90333 - DNA, 25 bp, Homo sapien
accttcggtgtggtaggttccgtaa

SEQ ID NO: 90334 - DNA, 25 bp, Homo sapien
accttcggtgtgctaggttccgtaa

SEQ ID NO: 90335 - DNA, 25 bp, Homo sapien
gctgtgagtccaggtagaccgagaa

SEQ ID NO: 90336 - DNA, 25 bp, Homo sapien
gctgtgagtccacgtagaccgagaa

SEQ ID NO: 90337 - DNA, 25 bp, Homo sapien
ttgtgcttagacaaaaaccggacta

SEQ ID NO: 90338 - DNA, 25 bp, Homo sapien
ttgtgcttagactaaaaccggacta

SEQ ID NO: 90339 - DNA, 25 bp, Homo sapien
cgttacagtaaaagtactcaacgtc

SEQ ID NO: 90340 - DNA, 25 bp, Homo sapien
cgttacagtaaatgtactcaacgtc

SEQ ID NO: 90341 - DNA, 25 bp, Homo sapien
agtgtacagtacaaccatgatactc

SEQ ID NO: 90342 - DNA, 25 bp, Homo sapien
agtgtacagtactaccatgatactc

SEQ ID NO: 90343 - DNA, 25 bp, Homo sapien
gcgaggtccgaccacaacccgagtt

SEQ ID NO: 90344 - DNA, 25 bp, Homo sapien
gcgaggtccgacgacaacccgagtt

SEQ ID NO: 90345 - DNA, 25 bp, Homo sapien
tagagctacaacaagacccgttact

SEQ ID NO: 90346 - DNA, 25 bp, Homo sapien
tagagctacaactagacccgttact

SEQ ID NO: 90347 - DNA, 25 bp, Homo sapien
tgtgtctcccgtgcacgccggacgt

SEQ ID NO: 90348 - DNA, 25 bp, Homo sapien
tgtgtctcccgtccacgccggacgt

SEQ ID NO: 90349 - DNA, 25 bp, Homo sapien
agaagtcggtaagtctcctctcttc

SEQ ID NO: 90350 - DNA, 25 bp, Homo sapien
agaagtcggtaactctcctctcttc

SEQ ID NO: 90351 - DNA, 25 bp, Homo sapien
actgtcggtccgattttcgattccc

SEQ ID NO: 90352 - DNA, 25 bp, Homo sapien
actgtcggtccgtttttcgattccc

SEQ ID NO: 90353 - DNA, 25 bp, Homo sapien
ggtttccgattcatctcgtctcaac

SEQ ID NO: 90354 - DNA, 25 bp, Homo sapien
ggtttccgattcttctcgtctcaac

SEQ ID NO: 90355 - DNA, 25 bp, Homo sapien
tgtcgtacaacctcctctggttcaa

SEQ ID NO: 90356 - DNA, 25 bp, Homo sapien
tgtcgtacaaccacctctggttcaa

SEQ ID NO: 90357 - DNA, 25 bp, Homo sapien
caatctcggtacgacgtgggcacag

SEQ ID NO: 90358 - DNA, 25 bp, Homo sapien
caatctcggtaccacgtgggcacag

SEQ ID NO: 90359 - DNA, 25 bp, Homo sapien
ctttctttgaagacggggacgactg

SEQ ID NO: 90360 - DNA, 25 bp, Homo sapien
ctttctttgaagtcggggacgactg

SEQ ID NO: 90361 - DNA, 25 bp, Homo sapien
tatctgttgcagacgtggcttgtcg

SEQ ID NO: 90362 - DNA, 25 bp, Homo sapien
tatctgttgcagtcgtggcttgtcg

SEQ ID NO: 90363 - DNA, 25 bp, Homo sapien
gttctgtatgtacgtgtccgatgtg

SEQ ID NO: 90364 - DNA, 25 bp, Homo sapien
gttctgtatgtaggtgtccgatgtg

SEQ ID NO: 90365 - DNA, 25 bp, Homo sapien
cgtttcttcgcttcgacgcgtttgt

SEQ ID NO: 90366 - DNA, 25 bp, Homo sapien
cgtttcttcgctacgacgcgtttgt

SEQ ID NO: 90367 - DNA, 25 bp, Homo sapien
ctgttttgtagatccgactccgtgt

SEQ ID NO: 90368 - DNA, 25 bp, Homo sapien
ctgttttgtagaaccgactccgtgt

SEQ ID NO: 90369 - DNA, 25 bp, Homo sapien
cgttaacttttcagatatgttcttg

SEQ ID NO: 90370 - DNA, 25 bp, Homo sapien
cgttaacttttctgatatgttcttg

SEQ ID NO: 90371 - DNA, 25 bp, Homo sapien
gaaacctacttaaggttcctctatg

SEQ ID NO: 90372 - DNA, 25 bp, Homo sapien
gaaacctacttatggttcctctatg

SEQ ID NO: 90373 - DNA, 25 bp, Homo sapien
tgaagaatcctattttgcgtaggtc

SEQ ID NO: 90374 - DNA, 25 bp, Homo sapien
tgaagaatcctaatttgcgtaggtc

SEQ ID NO: 90375 - DNA, 25 bp, Homo sapien
acttagagtcggtacggaatcggaa

SEQ ID NO: 90376 - DNA, 25 bp, Homo sapien
acttagagtcggaacggaatcggaa

SEQ ID NO: 90377 - DNA, 25 bp, Homo sapien
tcccggggacacagacacagggagt

SEQ ID NO: 90378 - DNA, 25 bp, Homo sapien
tcccggggacactgacacagggagt

SEQ ID NO: 90379 - DNA, 25 bp, Homo sapien
tctgagacgtcagttcgacggacga

SEQ ID NO: 90380 - DNA, 25 bp, Homo sapien
tctgagacgtcacttcgacggacga

SEQ ID NO: 90381 - DNA, 25 bp, Homo sapien
ctgtcaagtgtaggttcagtcggac

SEQ ID NO: 90382 - DNA, 25 bp, Homo sapien
ctgtcaagtgtacgttcagtcggac

SEQ ID NO: 90383 - DNA, 25 bp, Homo sapien
agccgtcttagttcccaacctgtct

SEQ ID NO: 90384 - DNA, 25 bp, Homo sapien
agccgtcttagtacccaacctgtct

SEQ ID NO: 90385 - DNA, 25 bp, Homo sapien
aggattcctcgttcccgagccttgt

SEQ ID NO: 90386 - DNA, 25 bp, Homo sapien
aggattcctcgtacccgagccttgt

SEQ ID NO: 90387 - DNA, 25 bp, Homo sapien
ggtcaccgtagtctctggaatatgt

SEQ ID NO: 90388 - DNA, 25 bp, Homo sapien
ggtcaccgtagtgtctggaatatgt

SEQ ID NO: 90389 - DNA, 25 bp, Homo sapien
gtgtgtaccttatctaaaacggttt

SEQ ID NO: 90390 - DNA, 25 bp, Homo sapien
gtgtgtaccttaactaaaacggttt

SEQ ID NO: 90391 - DNA, 25 bp, Homo sapien
gtgtcgtctagactatgatcgtttt

SEQ ID NO: 90392 - DNA, 25 bp, Homo sapien
gtgtcgtctagagtatgatcgtttt

SEQ ID NO: 90393 - DNA, 25 bp, Homo sapien
aaaggtcgaacatgtttgacctaca

SEQ ID NO: 90394 - DNA, 25 bp, Homo sapien
aaaggtcgaacaagtttgacctaca

SEQ ID NO: 90395 - DNA, 25 bp, Homo sapien
agagattatactaaacagaccatag

SEQ ID NO: 90396 - DNA, 25 bp, Homo sapien
agagattatacttaacagaccatag

SEQ ID NO: 90397 - DNA, 25 bp, Homo sapien
gaacggacaagattattctctccaa

SEQ ID NO: 90398 - DNA, 25 bp, Homo sapien
gaacggacaagaatattctctccaa

SEQ ID NO: 90399 - DNA, 25 bp, Homo sapien
actggtccgtctttgtctcgcccag

SEQ ID NO: 90400 - DNA, 25 bp, Homo sapien
actggtccgtctatgtctcgcccag

SEQ ID NO: 90401 - DNA, 25 bp, Homo sapien
gatggtccttgtccttccacgagag

SEQ ID NO: 90402 - DNA, 25 bp, Homo sapien
gatggtccttgtgcttccacgagag

SEQ ID NO: 90403 - DNA, 25 bp, Homo sapien
gtggtgatttcctttccgtaccccg

SEQ ID NO: 90404 - DNA, 25 bp, Homo sapien
gtggtgatttccattccgtaccccg

SEQ ID NO: 90405 - DNA, 25 bp, Homo sapien
gtcggtgtcttttcgattttatccc

SEQ ID NO: 90406 - DNA, 25 bp, Homo sapien
gtcggtgtctttacgattttatccc

SEQ ID NO: 90407 - DNA, 25 bp, Homo sapien
ttgtgttgttaaaccagtcatccgg

SEQ ID NO: 90408 - DNA, 25 bp, Homo sapien
ttgtgttgttaatccagtcatccgg

SEQ ID NO: 90409 - DNA, 25 bp, Homo sapien
tctacttttctgttgtctggtcagg

SEQ ID NO: 90410 - DNA, 25 bp, Homo sapien
tctacttttctgatgtctggtcagg

SEQ ID NO: 90411 - DNA, 25 bp, Homo sapien
ccaacttctgtcagggctcggtcgc

SEQ ID NO: 90412 - DNA, 25 bp, Homo sapien
ccaacttctgtctgggctcggtcgc

SEQ ID NO: 90413 - DNA, 25 bp, Homo sapien
ctacagtgactttgtgagttgggtc

SEQ ID NO: 90414 - DNA, 25 bp, Homo sapien
ctacagtgacttagtgagttgggtc

SEQ ID NO: 90415 - DNA, 25 bp, Homo sapien
ggattaagatctctgacgcatggac

SEQ ID NO: 90416 - DNA, 25 bp, Homo sapien
ggattaagatctgtgacgcatggac

SEQ ID NO: 90417 - DNA, 25 bp, Homo sapien
caactagaagttgttaacgttatgc

SEQ ID NO: 90418 - DNA, 25 bp, Homo sapien
caactagaagttcttaacgttatgc

SEQ ID NO: 90419 - DNA, 25 bp, Homo sapien
gaccaatgtttgtatgaatcatacc

SEQ ID NO: 90420 - DNA, 25 bp, Homo sapien
gaccaatgtttgaatgaatcatacc

SEQ ID NO: 90421 - DNA, 25 bp, Homo sapien
tcggtactaagaatcaatgtaccct

SEQ ID NO: 90422 - DNA, 25 bp, Homo sapien
tcggtactaagattcaatgtaccct

SEQ ID NO: 90423 - DNA, 25 bp, Homo sapien
tctccaagggacaatgaattctctt

SEQ ID NO: 90424 - DNA, 25 bp, Homo sapien
tctccaagggactatgaattctctt

SEQ ID NO: 90425 - DNA, 25 bp, Homo sapien
ttacactccgagaggacctttctac

SEQ ID NO: 90426 - DNA, 25 bp, Homo sapien
ttacactccgagtggacctttctac

SEQ ID NO: 90427 - DNA, 25 bp, Homo sapien
ctttgacctccgatgaccctttcga

SEQ ID NO: 90428 - DNA, 25 bp, Homo sapien
ctttgacctccgttgaccctttcga

SEQ ID NO: 90429 - DNA, 25 bp, Homo sapien
gtctcgccattatcccgtagttata

SEQ ID NO: 90430 - DNA, 25 bp, Homo sapien
gtctcgccattaacccgtagttata

SEQ ID NO: 90431 - DNA, 25 bp, Homo sapien
acagcgagtcgtacttctagtcaag

SEQ ID NO: 90432 - DNA, 25 bp, Homo sapien
acagcgagtcgttcttctagtcaag

SEQ ID NO: 90433 - DNA, 25 bp, Homo sapien
aacagtactcgacgttcgaaggaaa

SEQ ID NO: 90434 - DNA, 25 bp, Homo sapien
aacagtactcgaggttcgaaggaaa

SEQ ID NO: 90435 - DNA, 25 bp, Homo sapien
gtggtggtcacgactcaaaagggta

SEQ ID NO: 90436 - DNA, 25 bp, Homo sapien
gtggtggtcacgtctcaaaagggta

SEQ ID NO: 90437 - DNA, 25 bp, Homo sapien
gaaatcaccacagtaaatcacgacg

SEQ ID NO: 90438 - DNA, 25 bp, Homo sapien
gaaatcaccacactaaatcacgacg

SEQ ID NO: 90439 - DNA, 25 bp, Homo sapien
tttcgatacgaagaaacgacccatc

SEQ ID NO: 90440 - DNA, 25 bp, Homo sapien
tttcgatacgaacaaacgacccatc

SEQ ID NO: 90441 - DNA, 25 bp, Homo sapien
tgtcgggtaccagggactcccttac

SEQ ID NO: 90442 - DNA, 25 bp, Homo sapien
tgtcgggtaccacggactcccttac

SEQ ID NO: 90443 - DNA, 25 bp, Homo sapien
agaccgtctacgatggccccaacgt

SEQ ID NO: 90444 - DNA, 25 bp, Homo sapien
agaccgtctacgttggccccaacgt

SEQ ID NO: 90445 - DNA, 25 bp, Homo sapien
agtcgaactcttcgttccttcaccg

SEQ ID NO: 90446 - DNA, 25 bp, Homo sapien
agtcgaactcttggttccttcaccg

SEQ ID NO: 90447 - DNA, 25 bp, Homo sapien
acttccttcttggttcgactttccg

SEQ ID NO: 90448 - DNA, 25 bp, Homo sapien
acttccttcttgcttcgactttccg

SEQ ID NO: 90449 - DNA, 25 bp, Homo sapien
cttgtctggttgttttaccctccta

SEQ ID NO: 90450 - DNA, 25 bp, Homo sapien
cttgtctggttgatttaccctccta

SEQ ID NO: 90451 - DNA, 25 bp, Homo sapien
ttctcttctctaatcttaacacaaa

SEQ ID NO: 90452 - DNA, 25 bp, Homo sapien
ttctcttctctattcttaacacaaa

SEQ ID NO: 90453 - DNA, 25 bp, Homo sapien
tttattttaccaaacacacacatac

SEQ ID NO: 90454 - DNA, 25 bp, Homo sapien
tttattttaccatacacacacatac

SEQ ID NO: 90455 - DNA, 25 bp, Homo sapien
ttttgtcttcgataaaccataacta

SEQ ID NO: 90456 - DNA, 25 bp, Homo sapien
ttttgtcttcgaaaaaccataacta

SEQ ID NO: 90457 - DNA, 25 bp, Homo sapien
tgtcgggacgagaaccacgcggtaa

SEQ ID NO: 90458 - DNA, 25 bp, Homo sapien
tgtcgggacgagtaccacgcggtaa

SEQ ID NO: 90459 - DNA, 25 bp, Homo sapien
gaatcggtcagcactctcatgtgaa

SEQ ID NO: 90460 - DNA, 25 bp, Homo sapien
gaatcggtcagctctctcatgtgaa

SEQ ID NO: 90461 - DNA, 25 bp, Homo sapien
gaggttcacaagtccacacgtgaac

SEQ ID NO: 90462 - DNA, 25 bp, Homo sapien
gaggttcacaagaccacacgtgaac

SEQ ID NO: 90463 - DNA, 25 bp, Homo sapien
tgaggggttcctaccacgcagggac

SEQ ID NO: 90464 - DNA, 25 bp, Homo sapien
tgaggggttccttccacgcagggac

SEQ ID NO: 90465 - DNA, 25 bp, Homo sapien
acgggacctccgtctcaggaacggg

SEQ ID NO: 90466 - DNA, 25 bp, Homo sapien
acgggacctccgactcaggaacggg

SEQ ID NO: 90467 - DNA, 25 bp, Homo sapien
cgatttttcgtggtggttctacaga

SEQ ID NO: 90468 - DNA, 25 bp, Homo sapien
cgatttttcgtgctggttctacaga

SEQ ID NO: 90469 - DNA, 25 bp, Homo sapien
taaagtactcggttgtctcgtcatc

SEQ ID NO: 90470 - DNA, 25 bp, Homo sapien
taaagtactcggatgtctcgtcatc

SEQ ID NO: 90471 - DNA, 25 bp, Homo sapien
caatagagtttgtgtcggtacttac

SEQ ID NO: 90472 - DNA, 25 bp, Homo sapien
caatagagtttgagtcggtacttac

SEQ ID NO: 90473 - DNA, 25 bp, Homo sapien
atggtctatttttggtcttattgac

SEQ ID NO: 90474 - DNA, 25 bp, Homo sapien
atggtctattttaggtcttattgac

SEQ ID NO: 90475 - DNA, 25 bp, Homo sapien
tagaaggtgtgtacccgagtttatc

SEQ ID NO: 90476 - DNA, 25 bp, Homo sapien
tagaaggtgtgttcccgagtttatc

SEQ ID NO: 90477 - DNA, 25 bp, Homo sapien
acggtggacggttccaggatctaac

SEQ ID NO: 90478 - DNA, 25 bp, Homo sapien
acggtggacggtaccaggatctaac

SEQ ID NO: 90479 - DNA, 25 bp, Homo sapien
tattgagccggtactcttttgtaga

SEQ ID NO: 90480 - DNA, 25 bp, Homo sapien
tattgagccggttctcttttgtaga

SEQ ID NO: 90481 - DNA, 25 bp, Homo sapien
tttacgacacatcgtattcttggat

SEQ ID NO: 90482 - DNA, 25 bp, Homo sapien
tttacgacacatggtattcttggat

SEQ ID NO: 90483 - DNA, 25 bp, Homo sapien
ctatttcacacatctttgactttta

SEQ ID NO: 90484 - DNA, 25 bp, Homo sapien
ctatttcacacaactttgactttta

SEQ ID NO: 90485 - DNA, 25 bp, Homo sapien
ctcgtgcaaacctttatagttatga

SEQ ID NO: 90486 - DNA, 25 bp, Homo sapien
ctcgtgcaaaccattatagttatga

SEQ ID NO: 90487 - DNA, 25 bp, Homo sapien
ctcttactttgactattgctggtga

SEQ ID NO: 90488 - DNA, 25 bp, Homo sapien
ctcttactttgagtattgctggtga

SEQ ID NO: 90489 - DNA, 25 bp, Homo sapien
gtcggttcgcaatatcggcctcagt

SEQ ID NO: 90490 - DNA, 25 bp, Homo sapien
gtcggttcgcaaaatcggcctcagt

SEQ ID NO: 90491 - DNA, 25 bp, Homo sapien
tcgtgtttttgtctcactcccgagt

SEQ ID NO: 90492 - DNA, 25 bp, Homo sapien
tcgtgtttttgtgtcactcccgagt

SEQ ID NO: 90493 - DNA, 25 bp, Homo sapien
cttcggtcgtggtctttctcccctt

SEQ ID NO: 90494 - DNA, 25 bp, Homo sapien
cttcggtcgtggactttctcccctt

SEQ ID NO: 90495 - DNA, 25 bp, Homo sapien
tttttggtacactattgtacccgtg

SEQ ID NO: 90496 - DNA, 25 bp, Homo sapien
tttttggtacacaattgtacccgtg

SEQ ID NO: 90497 - DNA, 25 bp, Homo sapien
tttattgtgcctgtctgtctcgagg

SEQ ID NO: 90498 - DNA, 25 bp, Homo sapien
tttattgtgcctctctgtctcgagg

SEQ ID NO: 90499 - DNA, 25 bp, Homo sapien
atttgttgttttcgtcatccgtaga

SEQ ID NO: 90500 - DNA, 25 bp, Homo sapien
atttgttgttttggtcatccgtaga

SEQ ID NO: 90501 - DNA, 25 bp, Homo sapien
ggtttttacgtgtaagtacacatac

SEQ ID NO: 90502 - DNA, 25 bp, Homo sapien
ggtttttacgtgaaagtacacatac

SEQ ID NO: 90503 - DNA, 25 bp, Homo sapien
ggaaactatcaatccgtctcacaag

SEQ ID NO: 90504 - DNA, 25 bp, Homo sapien
ggaaactatcaaaccgtctcacaag

SEQ ID NO: 90505 - DNA, 25 bp, Homo sapien
gaaaaaagactcgagaccaaacgga

SEQ ID NO: 90506 - DNA, 25 bp, Homo sapien
gaaaaaagactccagaccaaacgga

SEQ ID NO: 90507 - DNA, 25 bp, Homo sapien
atggtgatttacaaccaaaacggat

SEQ ID NO: 90508 - DNA, 25 bp, Homo sapien
atggtgatttactaccaaaacggat

SEQ ID NO: 90509 - DNA, 25 bp, Homo sapien
gttgtcctttacaccataaaccgtg

SEQ ID NO: 90510 - DNA, 25 bp, Homo sapien
gttgtcctttactccataaaccgtg

SEQ ID NO: 90511 - DNA, 25 bp, Homo sapien
aagactttacggaccccgaaaacca

SEQ ID NO: 90512 - DNA, 25 bp, Homo sapien
aagactttacggtccccgaaaacca

SEQ ID NO: 90513 - DNA, 25 bp, Homo sapien
gttgtatttcctctaagtaatcgtt

SEQ ID NO: 90514 - DNA, 25 bp, Homo sapien
gttgtatttcctgtaagtaatcgtt

SEQ ID NO: 90515 - DNA, 25 bp, Homo sapien
ccgtattcagtcgacaaccgaatac

SEQ ID NO: 90516 - DNA, 25 bp, Homo sapien
ccgtattcagtccacaaccgaatac

SEQ ID NO: 90517 - DNA, 25 bp, Homo sapien
caagttagacacacgttaccaatcg

SEQ ID NO: 90518 - DNA, 25 bp, Homo sapien
caagttagacactcgttaccaatcg

SEQ ID NO: 90519 - DNA, 25 bp, Homo sapien
caccggcgtgagcaacttaaacagg

SEQ ID NO: 90520 - DNA, 25 bp, Homo sapien
caccggcgtgaggaacttaaacagg

SEQ ID NO: 90521 - DNA, 25 bp, Homo sapien
ggatctaagctttggtttgggacac

SEQ ID NO: 90522 - DNA, 25 bp, Homo sapien
ggatctaagcttaggtttgggacac

SEQ ID NO: 90523 - DNA, 25 bp, Homo sapien
gtcgacgtagctcctgagggtgtct

SEQ ID NO: 90524 - DNA, 25 bp, Homo sapien
gtcgacgtagctgctgagggtgtct

SEQ ID NO: 90525 - DNA, 25 bp, Homo sapien
gcggcggtctcatcggcgtctgtct

SEQ ID NO: 90526 - DNA, 25 bp, Homo sapien
gcggcggtctcaacggcgtctgtct

SEQ ID NO: 90527 - DNA, 25 bp, Homo sapien
tggtagccctactagacgaactgta

SEQ ID NO: 90528 - DNA, 25 bp, Homo sapien
tggtagccctacaagacgaactgta

SEQ ID NO: 90529 - DNA, 25 bp, Homo sapien
cggctacacgaccaccaacggtgga

SEQ ID NO: 90530 - DNA, 25 bp, Homo sapien
cggctacacgacgaccaacggtgga

SEQ ID NO: 90531 - DNA, 25 bp, Homo sapien
accagtggacgtcacacgagtgtaa

SEQ ID NO: 90532 - DNA, 25 bp, Homo sapien
accagtggacgtgacacgagtgtaa

SEQ ID NO: 90533 - DNA, 25 bp, Homo sapien
ctggaagtcgaaagtcgagacataa

SEQ ID NO: 90534 - DNA, 25 bp, Homo sapien
ctggaagtcgaatgtcgagacataa

SEQ ID NO: 90535 - DNA, 25 bp, Homo sapien
gccaccggggaatgtagtgacttta

SEQ ID NO: 90536 - DNA, 25 bp, Homo sapien
gccaccggggaaagtagtgacttta

SEQ ID NO: 90537 - DNA, 25 bp, Homo sapien
tcacgggagaattacgctttgtagg

SEQ ID NO: 90538 - DNA, 25 bp, Homo sapien
tcacgggagaataacgctttgtagg

SEQ ID NO: 90539 - DNA, 25 bp, Homo sapien
agagacggtagtaaaggcctttcag

SEQ ID NO: 90540 - DNA, 25 bp, Homo sapien
agagacggtagttaaggcctttcag

SEQ ID NO: 90541 - DNA, 25 bp, Homo sapien
gacgaagtctttgacttgtatgact

SEQ ID NO: 90542 - DNA, 25 bp, Homo sapien
gacgaagtctttcacttgtatgact

SEQ ID NO: 90543 - DNA, 25 bp, Homo sapien
cgtgcaccgcttcgagtcgtgggta

SEQ ID NO: 90544 - DNA, 25 bp, Homo sapien
cgtgcaccgcttggagtcgtgggta

SEQ ID NO: 90545 - DNA, 25 bp, Homo sapien
ttaccgtcgccctcggattctgggt

SEQ ID NO: 90546 - DNA, 25 bp, Homo sapien
ttaccgtcgcccacggattctgggt

SEQ ID NO: 90547 - DNA, 25 bp, Homo sapien
caactcgtttctccaacgtttggtt

SEQ ID NO: 90548 - DNA, 25 bp, Homo sapien
caactcgtttctgcaacgtttggtt

SEQ ID NO: 90549 - DNA, 25 bp, Homo sapien
ggacagatccttccatcgttttgtt

SEQ ID NO: 90550 - DNA, 25 bp, Homo sapien
ggacagatccttgcatcgttttgtt

SEQ ID NO: 90551 - DNA, 25 bp, Homo sapien
gtgtatctttccttgccgtccgagt

SEQ ID NO: 90552 - DNA, 25 bp, Homo sapien
gtgtatctttccatgccgtccgagt

SEQ ID NO: 90553 - DNA, 25 bp, Homo sapien
tcacattgccgtcgattacctacgt

SEQ ID NO: 90554 - DNA, 25 bp, Homo sapien
tcacattgccgtggattacctacgt

SEQ ID NO: 90555 - DNA, 25 bp, Homo sapien
acgtgaccttagcactctgtttcca

SEQ ID NO: 90556 - DNA, 25 bp, Homo sapien
acgtgaccttaggactctgtttcca

SEQ ID NO: 90557 - DNA, 25 bp, Homo sapien
ctcatcgagttcctgtagtttcccg

SEQ ID NO: 90558 - DNA, 25 bp, Homo sapien
ctcatcgagttcgtgtagtttcccg

SEQ ID NO: 90559 - DNA, 25 bp, Homo sapien
cccggcacgcggacgatgtgtgttc

SEQ ID NO: 90560 - DNA, 25 bp, Homo sapien
cccggcacgcggtcgatgtgtgttc

SEQ ID NO: 90561 - DNA, 25 bp, Homo sapien
taaaggtcgacgagtccggttttgg

SEQ ID NO: 90562 - DNA, 25 bp, Homo sapien
taaaggtcgacgtgtccggttttgg

SEQ ID NO: 90563 - DNA, 25 bp, Homo sapien
aatgacgtctccagacagataggac

SEQ ID NO: 90564 - DNA, 25 bp, Homo sapien
aatgacgtctcctgacagataggac

SEQ ID NO: 90565 - DNA, 25 bp, Homo sapien
agggcgagactctcgttccggagcc

SEQ ID NO: 90566 - DNA, 25 bp, Homo sapien
agggcgagactcacgttccggagcc

SEQ ID NO: 90567 - DNA, 25 bp, Homo sapien
gtggtcgacatgacgtcccggaccc

SEQ ID NO: 90568 - DNA, 25 bp, Homo sapien
gtggtcgacatgtcgtcccggaccc

SEQ ID NO: 90569 - DNA, 25 bp, Homo sapien
tgttgactacagtttcctcggggac

SEQ ID NO: 90570 - DNA, 25 bp, Homo sapien
tgttgactacagattcctcggggac

SEQ ID NO: 90571 - DNA, 25 bp, Homo sapien
cctttgacctttgaccccgggtact

SEQ ID NO: 90572 - DNA, 25 bp, Homo sapien
cctttgacctttcaccccgggtact

SEQ ID NO: 90573 - DNA, 25 bp, Homo sapien
tttagtcctatttcacagttgatag

SEQ ID NO: 90574 - DNA, 25 bp, Homo sapien
tttagtcctattacacagttgatag

SEQ ID NO: 90575 - DNA, 25 bp, Homo sapien
gtggtgaacctatcaactcagagat

SEQ ID NO: 90576 - DNA, 25 bp, Homo sapien
gtggtgaacctaacaactcagagat

SEQ ID NO: 90577 - DNA, 25 bp, Homo sapien
atgatgaaagaaacaccagtctagt

SEQ ID NO: 90578 - DNA, 25 bp, Homo sapien
atgatgaaagaatcaccagtctagt

SEQ ID NO: 90579 - DNA, 25 bp, Homo sapien
ctgagactatgaacacgaacctcta

SEQ ID NO: 90580 - DNA, 25 bp, Homo sapien
ctgagactatgatcacgaacctcta

SEQ ID NO: 90581 - DNA, 25 bp, Homo sapien
aacgtttcacgttatttcgttttgc

SEQ ID NO: 90582 - DNA, 25 bp, Homo sapien
aacgtttcacgtaatttcgttttgc

SEQ ID NO: 90583 - DNA, 25 bp, Homo sapien
gacgttgactctttatgtccatctc

SEQ ID NO: 90584 - DNA, 25 bp, Homo sapien
gacgttgactctatatgtccatctc

SEQ ID NO: 90585 - DNA, 25 bp, Homo sapien
tcgacttatgtcactagtgcaacag

SEQ ID NO: 90586 - DNA, 25 bp, Homo sapien
tcgacttatgtctctagtgcaacag

SEQ ID NO: 90587 - DNA, 25 bp, Homo sapien
tcgtagttttttcctttgcaagacg

SEQ ID NO: 90588 - DNA, 25 bp, Homo sapien
tcgtagttttttgctttgcaagacg

SEQ ID NO: 90589 - DNA, 25 bp, Homo sapien
tctgtatgaccttttcactgaaagg

SEQ ID NO: 90590 - DNA, 25 bp, Homo sapien
tctgtatgacctattcactgaaagg

SEQ ID NO: 90591 - DNA, 25 bp, Homo sapien
tctttcaaagaggttcactgataga

SEQ ID NO: 90592 - DNA, 25 bp, Homo sapien
tctttcaaagagcttcactgataga

SEQ ID NO: 90593 - DNA, 25 bp, Homo sapien
tctctatcctgaagttttcttgaag

SEQ ID NO: 90594 - DNA, 25 bp, Homo sapien
tctctatcctgatgttttcttgaag

SEQ ID NO: 90595 - DNA, 25 bp, Homo sapien
aatgttcctacagtttctttagaag

SEQ ID NO: 90596 - DNA, 25 bp, Homo sapien
aatgttcctacactttctttagaag

SEQ ID NO: 90597 - DNA, 25 bp, Homo sapien
accattggcgacttactgttcaatc

SEQ ID NO: 90598 - DNA, 25 bp, Homo sapien
accattggcgacatactgttcaatc

SEQ ID NO: 90599 - DNA, 25 bp, Homo sapien
tagatgcgtaacatagctgacgtaa

SEQ ID NO: 90600 - DNA, 25 bp, Homo sapien
tagatgcgtaacttagctgacgtaa

SEQ ID NO: 90601 - DNA, 25 bp, Homo sapien
cgtcagtgtacgtaacttcaatctt

SEQ ID NO: 90602 - DNA, 25 bp, Homo sapien
cgtcagtgtacgaaacttcaatctt

SEQ ID NO: 90603 - DNA, 25 bp, Homo sapien
cgtttcttatagctaccggaaaatt

SEQ ID NO: 90604 - DNA, 25 bp, Homo sapien
cgtttcttataggtaccggaaaatt

SEQ ID NO: 90605 - DNA, 25 bp, Homo sapien
gtggtcttatacgtgcccaaattct

SEQ ID NO: 90606 - DNA, 25 bp, Homo sapien
gtggtcttatacctgcccaaattct

SEQ ID NO: 90607 - DNA, 25 bp, Homo sapien
gtaggtggtagaatttcccctagaa

SEQ ID NO: 90608 - DNA, 25 bp, Homo sapien
gtaggtggtagattttcccctagaa

SEQ ID NO: 90609 - DNA, 25 bp, Homo sapien
ggacctgtgcagtcttcgaccccaa

SEQ ID NO: 90610 - DNA, 25 bp, Homo sapien
ggacctgtgcagacttcgaccccaa

SEQ ID NO: 90611 - DNA, 25 bp, Homo sapien
ttagtcgagaaagagtccactacgg

SEQ ID NO: 90612 - DNA, 25 bp, Homo sapien
ttagtcgagaaacagtccactacgg

SEQ ID NO: 90613 - DNA, 25 bp, Homo sapien
ttagacacaaggaagacgctcgtca

SEQ ID NO: 90614 - DNA, 25 bp, Homo sapien
ttagacacaaggtagacgctcgtca

SEQ ID NO: 90615 - DNA, 25 bp, Homo sapien
acagaaccccaatagaacgacagta

SEQ ID NO: 90616 - DNA, 25 bp, Homo sapien
acagaaccccaaaagaacgacagta

SEQ ID NO: 90617 - DNA, 25 bp, Homo sapien
tggcgtcggcctgattcagcaggtt

SEQ ID NO: 90618 - DNA, 25 bp, Homo sapien
tggcgtcggcctcattcagcaggtt

SEQ ID NO: 90619 - DNA, 25 bp, Homo sapien
cagtagaaactcagtccactcaggg

SEQ ID NO: 90620 - DNA, 25 bp, Homo sapien
cagtagaaactctgtccactcaggg

SEQ ID NO: 90621 - DNA, 25 bp, Homo sapien
acgagaaccctatccctcggtcgag

SEQ ID NO: 90622 - DNA, 25 bp, Homo sapien
acgagaaccctaaccctcggtcgag

SEQ ID NO: 90623 - DNA, 25 bp, Homo sapien
aaggctacgaccaaactaaggacta

SEQ ID NO: 90624 - DNA, 25 bp, Homo sapien
aaggctacgacctaactaaggacta

SEQ ID NO: 90625 - DNA, 25 bp, Homo sapien
gaagaatttgtaaactactgtgacc

SEQ ID NO: 90626 - DNA, 25 bp, Homo sapien
gaagaatttgtatactactgtgacc

SEQ ID NO: 90627 - DNA, 25 bp, Homo sapien
gaaaacctactcagggtctgagaca

SEQ ID NO: 90628 - DNA, 25 bp, Homo sapien
gaaaacctactctgggtctgagaca

SEQ ID NO: 90629 - DNA, 25 bp, Homo sapien
gatacaatttactccatgtagagat

SEQ ID NO: 90630 - DNA, 25 bp, Homo sapien
gatacaatttacaccatgtagagat

SEQ ID NO: 90631 - DNA, 25 bp, Homo sapien
aagactgtaagtgacacatgagttc

SEQ ID NO: 90632 - DNA, 25 bp, Homo sapien
aagactgtaagtcacacatgagttc

SEQ ID NO: 90633 - DNA, 25 bp, Homo sapien
ggaaacgatcatttccatattcgtc

SEQ ID NO: 90634 - DNA, 25 bp, Homo sapien
ggaaacgatcatatccatattcgtc

SEQ ID NO: 90635 - DNA, 25 bp, Homo sapien
gactgacgatcaccacggaattttc

SEQ ID NO: 90636 - DNA, 25 bp, Homo sapien
gactgacgatcagcacggaattttc

SEQ ID NO: 90637 - DNA, 25 bp, Homo sapien
catgaggaagtctccttttctataa

SEQ ID NO: 90638 - DNA, 25 bp, Homo sapien
catgaggaagtcaccttttctataa

SEQ ID NO: 90639 - DNA, 25 bp, Homo sapien
aaggtccatcgagatgtttctgtaa

SEQ ID NO: 90640 - DNA, 25 bp, Homo sapien
aaggtccatcgacatgtttctgtaa

SEQ ID NO: 90641 - DNA, 25 bp, Homo sapien
ggatcgattaaacgttataactcta

SEQ ID NO: 90642 - DNA, 25 bp, Homo sapien
ggatcgattaaaggttataactcta

SEQ ID NO: 90643 - DNA, 25 bp, Homo sapien
cgtcatctttaactgtttacagtga

SEQ ID NO: 90644 - DNA, 25 bp, Homo sapien
cgtcatctttaagtgtttacagtga

SEQ ID NO: 90645 - DNA, 25 bp, Homo sapien
taactccgggagtcgtgatcaagag

SEQ ID NO: 90646 - DNA, 25 bp, Homo sapien
taactccgggagacgtgatcaagag

SEQ ID NO: 90647 - DNA, 25 bp, Homo sapien
aatgggtcgactgagagaccaggat

SEQ ID NO: 90648 - DNA, 25 bp, Homo sapien
aatgggtcgactcagagaccaggat

SEQ ID NO: 90649 - DNA, 25 bp, Homo sapien
aggtttctactacgacacacgtaga

SEQ ID NO: 90650 - DNA, 25 bp, Homo sapien
aggtttctactaggacacacgtaga

SEQ ID NO: 90651 - DNA, 25 bp, Homo sapien
cgtagagacatccaccgaaccatct

SEQ ID NO: 90652 - DNA, 25 bp, Homo sapien
cgtagagacatcgaccgaaccatct

SEQ ID NO: 90653 - DNA, 25 bp, Homo sapien
cagtcggaaccgaacgagacagaag

SEQ ID NO: 90654 - DNA, 25 bp, Homo sapien
cagtcggaaccgtacgagacagaag

SEQ ID NO: 90655 - DNA, 25 bp, Homo sapien
caagtggacactgaggacaacggta

SEQ ID NO: 90656 - DNA, 25 bp, Homo sapien
caagtggacactcaggacaacggta

SEQ ID NO: 90657 - DNA, 25 bp, Homo sapien
aacgcgtgtgccgtcgccaccgtga

SEQ ID NO: 90658 - DNA, 25 bp, Homo sapien
aacgcgtgtgccctcgccaccgtga

SEQ ID NO: 90659 - DNA, 25 bp, Homo sapien
ctgggtccatctccatctacggtat

SEQ ID NO: 90660 - DNA, 25 bp, Homo sapien
ctgggtccatctgcatctacggtat

SEQ ID NO: 90661 - DNA, 25 bp, Homo sapien
cgttggttctttgagaccaagtagt

SEQ ID NO: 90662 - DNA, 25 bp, Homo sapien
cgttggttctttcagaccaagtagt

SEQ ID NO: 90663 - DNA, 25 bp, Homo sapien
tttatgacgtcgtttgagtccgaaa

SEQ ID NO: 90664 - DNA, 25 bp, Homo sapien
tttatgacgtcgattgagtccgaaa

SEQ ID NO: 90665 - DNA, 25 bp, Homo sapien
ctctgattaccgaattgtcctcatg

SEQ ID NO: 90666 - DNA, 25 bp, Homo sapien
ctctgattaccgtattgtcctcatg

SEQ ID NO: 90667 - DNA, 25 bp, Homo sapien
ctggtcccgtcttctacagtccggg

SEQ ID NO: 90668 - DNA, 25 bp, Homo sapien
ctggtcccgtctactacagtccggg

SEQ ID NO: 90669 - DNA, 25 bp, Homo sapien
actcatctacaaggacctctccggc

SEQ ID NO: 90670 - DNA, 25 bp, Homo sapien
actcatctacaacgacctctccggc

SEQ ID NO: 90671 - DNA, 25 bp, Homo sapien
tcgtcctttaagtcacttcgatgat

SEQ ID NO: 90672 - DNA, 25 bp, Homo sapien
tcgtcctttaagacacttcgatgat

SEQ ID NO: 90673 - DNA, 25 bp, Homo sapien
atatctttcaaagaggttcactgat

SEQ ID NO: 90674 - DNA, 25 bp, Homo sapien
atatctttcaaacaggttcactgat

SEQ ID NO: 90675 - DNA, 25 bp, Homo sapien
cattaatttccactgtggttcaagt

SEQ ID NO: 90676 - DNA, 25 bp, Homo sapien
cattaatttccagtgtggttcaagt

SEQ ID NO: 90677 - DNA, 25 bp, Homo sapien
taatcccgtcgactgtcgaaatgtg

SEQ ID NO: 90678 - DNA, 25 bp, Homo sapien
taatcccgtcgagtgtcgaaatgtg

SEQ ID NO: 90679 - DNA, 25 bp, Homo sapien
agtaggctgaatgacagtcccgtgt

SEQ ID NO: 90680 - DNA, 25 bp, Homo sapien
agtaggctgaatcacagtcccgtgt

SEQ ID NO: 90681 - DNA, 25 bp, Homo sapien
gtagcctgtgtttacactatcggtt

SEQ ID NO: 90682 - DNA, 25 bp, Homo sapien
gtagcctgtgttaacactatcggtt

SEQ ID NO: 90683 - DNA, 25 bp, Homo sapien
gttaacatccggaaagacaacgata

SEQ ID NO: 90684 - DNA, 25 bp, Homo sapien
gttaacatccggtaagacaacgata

SEQ ID NO: 90685 - DNA, 25 bp, Homo sapien
gctaacaaagtttttacaagtctct

SEQ ID NO: 90686 - DNA, 25 bp, Homo sapien
gctaacaaagttattacaagtctct

SEQ ID NO: 90687 - DNA, 25 bp, Homo sapien
gcaggaaagttcaagtaataccgtc

SEQ ID NO: 90688 - DNA, 25 bp, Homo sapien
gcaggaaagttctagtaataccgtc

SEQ ID NO: 90689 - DNA, 25 bp, Homo sapien
tgacagtgggacatgtccatgtttc

SEQ ID NO: 90690 - DNA, 25 bp, Homo sapien
tgacagtgggacttgtccatgtttc

SEQ ID NO: 90691 - DNA, 25 bp, Homo sapien
caggtaacccatcgttacacctttg

SEQ ID NO: 90692 - DNA, 25 bp, Homo sapien
caggtaacccatggttacacctttg

SEQ ID NO: 90693 - DNA, 25 bp, Homo sapien
aaaagcccaagtaagtctacttctg

SEQ ID NO: 90694 - DNA, 25 bp, Homo sapien
aaaagcccaagttagtctacttctg

SEQ ID NO: 90695 - DNA, 25 bp, Homo sapien
gtgaataaagataaaattccctcag

SEQ ID NO: 90696 - DNA, 25 bp, Homo sapien
gtgaataaagattaaattccctcag

SEQ ID NO: 90697 - DNA, 25 bp, Homo sapien
taaacaaatatggaagatcccgttt

SEQ ID NO: 90698 - DNA, 25 bp, Homo sapien
taaacaaatatgcaagatcccgttt

SEQ ID NO: 90699 - DNA, 25 bp, Homo sapien
tcctctgagaagagcgtccgagttc

SEQ ID NO: 90700 - DNA, 25 bp, Homo sapien
tcctctgagaagtgcgtccgagttc

SEQ ID NO: 90701 - DNA, 25 bp, Homo sapien
gtccctgtcagtctttcctctgttc

SEQ ID NO: 90702 - DNA, 25 bp, Homo sapien
gtccctgtcagtgtttcctctgttc

SEQ ID NO: 90703 - DNA, 25 bp, Homo sapien
gtccgtctccgtgttctcgtactac

SEQ ID NO: 90704 - DNA, 25 bp, Homo sapien
gtccgtctccgtcttctcgtactac

SEQ ID NO: 90705 - DNA, 25 bp, Homo sapien
tatgggttctttccataatccgttc

SEQ ID NO: 90706 - DNA, 25 bp, Homo sapien
tatgggttctttgcataatccgttc

SEQ ID NO: 90707 - DNA, 25 bp, Homo sapien
gaggaccgcttatagaaacgcgtca

SEQ ID NO: 90708 - DNA, 25 bp, Homo sapien
gaggaccgcttaaagaaacgcgtca

SEQ ID NO: 90709 - DNA, 25 bp, Homo sapien
gtgactcctttacgtaacataagga

SEQ ID NO: 90710 - DNA, 25 bp, Homo sapien
gtgactcctttaggtaacataagga

SEQ ID NO: 90711 - DNA, 25 bp, Homo sapien
tttggaacttagtccaggctccgaa

SEQ ID NO: 90712 - DNA, 25 bp, Homo sapien
tttggaacttagaccaggctccgaa

SEQ ID NO: 90713 - DNA, 25 bp, Homo sapien
gaatttacactcgtaggaccactca

SEQ ID NO: 90714 - DNA, 25 bp, Homo sapien
gaatttacactcctaggaccactca

SEQ ID NO: 90715 - DNA, 25 bp, Homo sapien
ggtcacacccgacgaggtcaccaag

SEQ ID NO: 90716 - DNA, 25 bp, Homo sapien
ggtcacacccgaggaggtcaccaag

SEQ ID NO: 90717 - DNA, 25 bp, Homo sapien
ggcaactcgacgaggtagacatccc

SEQ ID NO: 90718 - DNA, 25 bp, Homo sapien
ggcaactcgacgtggtagacatccc

SEQ ID NO: 90719 - DNA, 25 bp, Homo sapien
gagtcgagaccgacggaaggcctaa

SEQ ID NO: 90720 - DNA, 25 bp, Homo sapien
gagtcgagaccgtcggaaggcctaa

SEQ ID NO: 90721 - DNA, 25 bp, Homo sapien
acacaagtaggatggaccggctgaa

SEQ ID NO: 90722 - DNA, 25 bp, Homo sapien
acacaagtaggaaggaccggctgaa

SEQ ID NO: 90723 - DNA, 25 bp, Homo sapien
acccagtgggacgtgaccatccaga

SEQ ID NO: 90724 - DNA, 25 bp, Homo sapien
acccagtgggacctgaccatccaga

SEQ ID NO: 90725 - DNA, 25 bp, Homo sapien
aaagaggtaccgttgtctttgacga

SEQ ID NO: 90726 - DNA, 25 bp, Homo sapien
aaagaggtaccgatgtctttgacga

SEQ ID NO: 90727 - DNA, 25 bp, Homo sapien
gaagggaccgacctactttaaccgt

SEQ ID NO: 90728 - DNA, 25 bp, Homo sapien
gaagggaccgacgtactttaaccgt

SEQ ID NO: 90729 - DNA, 25 bp, Homo sapien
agagagacgaataatctttgttacc

SEQ ID NO: 90730 - DNA, 25 bp, Homo sapien
agagagacgaattatctttgttacc

SEQ ID NO: 90731 - DNA, 25 bp, Homo sapien
aagatgtaacatgtcatcttagtcc

SEQ ID NO: 90732 - DNA, 25 bp, Homo sapien
aagatgtaacatctcatcttagtcc

SEQ ID NO: 90733 - DNA, 25 bp, Homo sapien
tattgaaagtagttaatcctaccga

SEQ ID NO: 90734 - DNA, 25 bp, Homo sapien
tattgaaagtagataatcctaccga

SEQ ID NO: 90735 - DNA, 25 bp, Homo sapien
gaaggttctaaggtgaatccgacca

SEQ ID NO: 90736 - DNA, 25 bp, Homo sapien
gaaggttctaagctgaatccgacca

SEQ ID NO: 90737 - DNA, 25 bp, Homo sapien
aatgatgtcttaggtcgtcagtctt

SEQ ID NO: 90738 - DNA, 25 bp, Homo sapien
aatgatgtcttacgtcgtcagtctt

SEQ ID NO: 90739 - DNA, 25 bp, Homo sapien
aagttcgaccgtggtagacctgcct

SEQ ID NO: 90740 - DNA, 25 bp, Homo sapien
aagttcgaccgtcgtagacctgcct

SEQ ID NO: 90741 - DNA, 25 bp, Homo sapien
ttccgtaggtctctcgggaccgggg

SEQ ID NO: 90742 - DNA, 25 bp, Homo sapien
ttccgtaggtctgtcgggaccgggg

SEQ ID NO: 90743 - DNA, 25 bp, Homo sapien
ttctgctatgggtgtcacgggtcgt

SEQ ID NO: 90744 - DNA, 25 bp, Homo sapien
ttctgctatgggagtcacgggtcgt

SEQ ID NO: 90745 - DNA, 25 bp, Homo sapien
tcccctgagggatgtccgtgcgtcg

SEQ ID NO: 90746 - DNA, 25 bp, Homo sapien
tcccctgagggaagtccgtgcgtcg

SEQ ID NO: 90747 - DNA, 25 bp, Homo sapien
cacaccgaagtggaatccgtgtctc

SEQ ID NO: 90748 - DNA, 25 bp, Homo sapien
cacaccgaagtgcaatccgtgtctc

SEQ ID NO: 90749 - DNA, 25 bp, Homo sapien
gtgccactggacagtatccggttcg

SEQ ID NO: 90750 - DNA, 25 bp, Homo sapien
gtgccactggactgtatccggttcg

SEQ ID NO: 90751 - DNA, 25 bp, Homo sapien
actcactccttgaaccgtgtctcgt

SEQ ID NO: 90752 - DNA, 25 bp, Homo sapien
actcactccttgtaccgtgtctcgt

SEQ ID NO: 90753 - DNA, 25 bp, Homo sapien
tcgagtccaccttcctccaaagggg

SEQ ID NO: 90754 - DNA, 25 bp, Homo sapien
tcgagtccacctacctccaaagggg

SEQ ID NO: 90755 - DNA, 25 bp, Homo sapien
gacccaatcttcgtagccagagggg

SEQ ID NO: 90756 - DNA, 25 bp, Homo sapien
gacccaatcttcctagccagagggg

SEQ ID NO: 90757 - DNA, 25 bp, Homo sapien
accccggtcctcctatcaagggtta

SEQ ID NO: 90758 - DNA, 25 bp, Homo sapien
accccggtcctcgtatcaagggtta

SEQ ID NO: 90759 - DNA, 25 bp, Homo sapien
tacccgggagccactgagagggttt

SEQ ID NO: 90760 - DNA, 25 bp, Homo sapien
tacccgggagcctctgagagggttt

SEQ ID NO: 90761 - DNA, 25 bp, Homo sapien
actcgacggccgtctcaagtttgac

SEQ ID NO: 90762 - DNA, 25 bp, Homo sapien
actcgacggccgactcaagtttgac

SEQ ID NO: 90763 - DNA, 25 bp, Homo sapien
tctccgaatcgactccggacttgtc

SEQ ID NO: 90764 - DNA, 25 bp, Homo sapien
tctccgaatcgagtccggacttgtc

SEQ ID NO: 90765 - DNA, 25 bp, Homo sapien
gtaaacacagtcgactacatctacg

SEQ ID NO: 90766 - DNA, 25 bp, Homo sapien
gtaaacacagtccactacatctacg

SEQ ID NO: 90767 - DNA, 25 bp, Homo sapien
tattgaaacgaagaaccatcatatg

SEQ ID NO: 90768 - DNA, 25 bp, Homo sapien
tattgaaacgaacaaccatcatatg

SEQ ID NO: 90769 - DNA, 25 bp, Homo sapien
ctgagacggaatgaccttatcattt

SEQ ID NO: 90770 - DNA, 25 bp, Homo sapien
ctgagacggaatcaccttatcattt

SEQ ID NO: 90771 - DNA, 25 bp, Homo sapien
ttcagacacgaactattctgttttg

SEQ ID NO: 90772 - DNA, 25 bp, Homo sapien
ttcagacacgaagtattctgttttg

SEQ ID NO: 90773 - DNA, 25 bp, Homo sapien
tctgaaggaaaactgtttcgtcgcg

SEQ ID NO: 90774 - DNA, 25 bp, Homo sapien
tctgaaggaaaagtgtttcgtcgcg

SEQ ID NO: 90775 - DNA, 25 bp, Homo sapien
actcaacggggagttattatgtctg

SEQ ID NO: 90776 - DNA, 25 bp, Homo sapien
actcaacggggacttattatgtctg

SEQ ID NO: 90777 - DNA, 25 bp, Homo sapien
acgaatggtggacctttgaccactc

SEQ ID NO: 90778 - DNA, 25 bp, Homo sapien
acgaatggtggagctttgaccactc

SEQ ID NO: 90779 - DNA, 25 bp, Homo sapien
ggttatcgtggaacctttggagacc

SEQ ID NO: 90780 - DNA, 25 bp, Homo sapien
ggttatcgtggatcctttggagacc

SEQ ID NO: 90781 - DNA, 25 bp, Homo sapien
ttgtaattcactgcttcttgttgaa

SEQ ID NO: 90782 - DNA, 25 bp, Homo sapien
ttgtaattcactccttcttgttgaa

SEQ ID NO: 90783 - DNA, 25 bp, Homo sapien
gtattagacctctatatcagtcaaa

SEQ ID NO: 90784 - DNA, 25 bp, Homo sapien
gtattagacctcaatatcagtcaaa

SEQ ID NO: 90785 - DNA, 25 bp, Homo sapien
gtattgcacggtgcatgatacaatt

SEQ ID NO: 90786 - DNA, 25 bp, Homo sapien
gtattgcacggtccatgatacaatt

SEQ ID NO: 90787 - DNA, 25 bp, Homo sapien
tatgtcaccgggagtgatctcagtg

SEQ ID NO: 90788 - DNA, 25 bp, Homo sapien
tatgtcaccgggtgtgatctcagtg

SEQ ID NO: 90789 - DNA, 25 bp, Homo sapien
caggcatcgggtggaccatacactg

SEQ ID NO: 90790 - DNA, 25 bp, Homo sapien
caggcatcgggtcgaccatacactg

SEQ ID NO: 90791 - DNA, 25 bp, Homo sapien
ttctcggtgtcaaccgactacacct

SEQ ID NO: 90792 - DNA, 25 bp, Homo sapien
ttctcggtgtcatccgactacacct

SEQ ID NO: 90793 - DNA, 25 bp, Homo sapien
tgtactccgttttatgtactacatt

SEQ ID NO: 90794 - DNA, 25 bp, Homo sapien
tgtactccgtttaatgtactacatt

SEQ ID NO: 90795 - DNA, 25 bp, Homo sapien
cgacgtgtagttacggagaccggtc

SEQ ID NO: 90796 - DNA, 25 bp, Homo sapien
cgacgtgtagtttcggagaccggtc

SEQ ID NO: 90797 - DNA, 25 bp, Homo sapien
ctcctacgtagtgtcgaccgccgga

SEQ ID NO: 90798 - DNA, 25 bp, Homo sapien
ctcctacgtagtctcgaccgccgga

SEQ ID NO: 90799 - DNA, 25 bp, Homo sapien
gtccgtggtcactccatcgacctgg

SEQ ID NO: 90800 - DNA, 25 bp, Homo sapien
gtccgtggtcacaccatcgacctgg

SEQ ID NO: 90801 - DNA, 25 bp, Homo sapien
ttcttttgatacgtcgtccggtggt

SEQ ID NO: 90802 - DNA, 25 bp, Homo sapien
ttcttttgatacctcgtccggtggt

SEQ ID NO: 90803 - DNA, 25 bp, Homo sapien
gtgtcagagtggaacaacgaatccc

SEQ ID NO: 90804 - DNA, 25 bp, Homo sapien
gtgtcagagtggtacaacgaatccc

SEQ ID NO: 90805 - DNA, 25 bp, Homo sapien
gtccatacgagtcttttgcggaccg

SEQ ID NO: 90806 - DNA, 25 bp, Homo sapien
gtccatacgagtgttttgcggaccg

SEQ ID NO: 90807 - DNA, 25 bp, Homo sapien
cgttcttggactacctgtacaagtc

SEQ ID NO: 90808 - DNA, 25 bp, Homo sapien
cgttcttggacttcctgtacaagtc

SEQ ID NO: 90809 - DNA, 25 bp, Homo sapien
ctttgaagatcgatgaatacattca

SEQ ID NO: 90810 - DNA, 25 bp, Homo sapien
ctttgaagatcgttgaatacattca

SEQ ID NO: 90811 - DNA, 25 bp, Homo sapien
gtctgtcaatgttcgggctcaccga

SEQ ID NO: 90812 - DNA, 25 bp, Homo sapien
gtctgtcaatgtacgggctcaccga

SEQ ID NO: 90813 - DNA, 25 bp, Homo sapien
ttccgacactgtgaaggctccggta

SEQ ID NO: 90814 - DNA, 25 bp, Homo sapien
ttccgacactgtcaaggctccggta

SEQ ID NO: 90815 - DNA, 25 bp, Homo sapien
tgtgtgtcctgcatcccgtccatgt

SEQ ID NO: 90816 - DNA, 25 bp, Homo sapien
tgtgtgtcctgcttcccgtccatgt

SEQ ID NO: 90817 - DNA, 25 bp, Homo sapien
tgagttctacaaggaatctttatct

SEQ ID NO: 90818 - DNA, 25 bp, Homo sapien
tgagttctacaacgaatctttatct

SEQ ID NO: 90819 - DNA, 25 bp, Homo sapien
ttcgtcacgaccagttctcctcagt

SEQ ID NO: 90820 - DNA, 25 bp, Homo sapien
ttcgtcacgacctgttctcctcagt

SEQ ID NO: 90821 - DNA, 25 bp, Homo sapien
gatgagtctaatttcgtcttcctag

SEQ ID NO: 90822 - DNA, 25 bp, Homo sapien
gatgagtctaatatcgtcttcctag

SEQ ID NO: 90823 - DNA, 25 bp, Homo sapien
ggaggacggaacactgtcctactaa

SEQ ID NO: 90824 - DNA, 25 bp, Homo sapien
ggaggacggaactctgtcctactaa

SEQ ID NO: 90825 - DNA, 25 bp, Homo sapien
gaggcagaaggtgtgacactacgtc

SEQ ID NO: 90826 - DNA, 25 bp, Homo sapien
gaggcagaaggtctgacactacgtc

SEQ ID NO: 90827 - DNA, 25 bp, Homo sapien
gtaaaaagaggtaacgttacgaccc

SEQ ID NO: 90828 - DNA, 25 bp, Homo sapien
gtaaaaagaggttacgttacgaccc

SEQ ID NO: 90829 - DNA, 25 bp, Homo sapien
ctttgcgatacgtgtctacgtttta

SEQ ID NO: 90830 - DNA, 25 bp, Homo sapien
ctttgcgatacgagtctacgtttta

SEQ ID NO: 90831 - DNA, 25 bp, Homo sapien
atagaacctggaacaatacgacaac

SEQ ID NO: 90832 - DNA, 25 bp, Homo sapien
atagaacctggatcaatacgacaac

SEQ ID NO: 90833 - DNA, 25 bp, Homo sapien
aacacggaccacgttccaccagaga

SEQ ID NO: 90834 - DNA, 25 bp, Homo sapien
aacacggaccaccttccaccagaga

SEQ ID NO: 90835 - DNA, 25 bp, Homo sapien
ctcggccgacgttatccaccaggag

SEQ ID NO: 90836 - DNA, 25 bp, Homo sapien
ctcggccgacgtaatccaccaggag

SEQ ID NO: 90837 - DNA, 25 bp, Homo sapien
gaccgcgacaggtctcacctcaaag

SEQ ID NO: 90838 - DNA, 25 bp, Homo sapien
gaccgcgacaggactcacctcaaag

SEQ ID NO: 90839 - DNA, 25 bp, Homo sapien
ccatggtacatgtaccattatagaa

SEQ ID NO: 90840 - DNA, 25 bp, Homo sapien
ccatggtacatgaaccattatagaa

SEQ ID NO: 90841 - DNA, 25 bp, Homo sapien
atatacgttatttgaccttcagaga

SEQ ID NO: 90842 - DNA, 25 bp, Homo sapien
atatacgttattagaccttcagaga

SEQ ID NO: 90843 - DNA, 25 bp, Homo sapien
agtctgtttggatcgaactaagtac

SEQ ID NO: 90844 - DNA, 25 bp, Homo sapien
agtctgtttggaacgaactaagtac

SEQ ID NO: 90845 - DNA, 25 bp, Homo sapien
agtctttgttcctgtctctagtgtc

SEQ ID NO: 90846 - DNA, 25 bp, Homo sapien
agtctttgttccagtctctagtgtc

SEQ ID NO: 90847 - DNA, 25 bp, Homo sapien
ggtggttaagatcagtacacaagtc

SEQ ID NO: 90848 - DNA, 25 bp, Homo sapien
ggtggttaagatgagtacacaagtc

SEQ ID NO: 90849 - DNA, 25 bp, Homo sapien
gtgagggttgaaacacgaccctctt

SEQ ID NO: 90850 - DNA, 25 bp, Homo sapien
gtgagggttgaatcacgaccctctt

SEQ ID NO: 90851 - DNA, 25 bp, Homo sapien
tttttcgtagagcacacttgtctgt

SEQ ID NO: 90852 - DNA, 25 bp, Homo sapien
tttttcgtagaggacacttgtctgt

SEQ ID NO: 90853 - DNA, 25 bp, Homo sapien
attcgtttctagaatgtttcttcag

SEQ ID NO: 90854 - DNA, 25 bp, Homo sapien
attcgtttctagtatgtttcttcag

SEQ ID NO: 90855 - DNA, 25 bp, Homo sapien
tcgatgtctgcctttttgtccgtca

SEQ ID NO: 90856 - DNA, 25 bp, Homo sapien
tcgatgtctgccattttgtccgtca

SEQ ID NO: 90857 - DNA, 25 bp, Homo sapien
aggttttagttttactttacgtcac

SEQ ID NO: 90858 - DNA, 25 bp, Homo sapien
aggttttagtttaactttacgtcac

SEQ ID NO: 90859 - DNA, 25 bp, Homo sapien
gatgtattactgtcacaaacgtgac

SEQ ID NO: 90860 - DNA, 25 bp, Homo sapien
gatgtattactgacacaaacgtgac

SEQ ID NO: 90861 - DNA, 25 bp, Homo sapien
atttaaggacttagaatacctgtac

SEQ ID NO: 90862 - DNA, 25 bp, Homo sapien
atttaaggactttgaatacctgtac

SEQ ID NO: 90863 - DNA, 25 bp, Homo sapien
gtcctccgatccttttacagtgact

SEQ ID NO: 90864 - DNA, 25 bp, Homo sapien
gtcctccgatccatttacagtgact

SEQ ID NO: 90865 - DNA, 25 bp, Homo sapien
caggggacctaagtacttttacaag

SEQ ID NO: 90866 - DNA, 25 bp, Homo sapien
caggggacctaactacttttacaag

SEQ ID NO: 90867 - DNA, 25 bp, Homo sapien
gtgacatgttactctacctatgtta

SEQ ID NO: 90868 - DNA, 25 bp, Homo sapien
gtgacatgttacactacctatgtta

SEQ ID NO: 90869 - DNA, 25 bp, Homo sapien
gacggcaaatacacacctatgactc

SEQ ID NO: 90870 - DNA, 25 bp, Homo sapien
gacggcaaatactcacctatgactc

SEQ ID NO: 90871 - DNA, 25 bp, Homo sapien
tcttgatctcctcgacaaacgtaga

SEQ ID NO: 90872 - DNA, 25 bp, Homo sapien
tcttgatctcctggacaaacgtaga

SEQ ID NO: 90873 - DNA, 25 bp, Homo sapien
ccatttcgctcaagtctaggacggc

SEQ ID NO: 90874 - DNA, 25 bp, Homo sapien
ccatttcgctcatgtctaggacggc

SEQ ID NO: 90875 - DNA, 25 bp, Homo sapien
ttttctctcgccatgtcaagacagg

SEQ ID NO: 90876 - DNA, 25 bp, Homo sapien
ttttctctcgccttgtcaagacagg

SEQ ID NO: 90877 - DNA, 25 bp, Homo sapien
acggtcgacctgaccagtgacaggt

SEQ ID NO: 90878 - DNA, 25 bp, Homo sapien
acggtcgacctgtccagtgacaggt

SEQ ID NO: 90879 - DNA, 25 bp, Homo sapien
acccgacgagtgtcccgagacgaag

SEQ ID NO: 90880 - DNA, 25 bp, Homo sapien
acccgacgagtgacccgagacgaag

SEQ ID NO: 90881 - DNA, 25 bp, Homo sapien
gaggatgggtggaaaccctgtatca

SEQ ID NO: 90882 - DNA, 25 bp, Homo sapien
gaggatgggtggtaaccctgtatca

SEQ ID NO: 90883 - DNA, 25 bp, Homo sapien
taaggtcggcggaccgacatctcag

SEQ ID NO: 90884 - DNA, 25 bp, Homo sapien
taaggtcggcggtccgacatctcag

SEQ ID NO: 90885 - DNA, 25 bp, Homo sapien
cggacgctcggctacgagactctta

SEQ ID NO: 90886 - DNA, 25 bp, Homo sapien
cggacgctcggcaacgagactctta

SEQ ID NO: 90887 - DNA, 25 bp, Homo sapien
accagggtagtcagctttgaccata

SEQ ID NO: 90888 - DNA, 25 bp, Homo sapien
accagggtagtctgctttgaccata

SEQ ID NO: 90889 - DNA, 25 bp, Homo sapien
accaagggtagtggtcgtctcccaa

SEQ ID NO: 90890 - DNA, 25 bp, Homo sapien
accaagggtagtcgtcgtctcccaa

SEQ ID NO: 90891 - DNA, 25 bp, Homo sapien
ccctacggagggtccgataccaacg

SEQ ID NO: 90892 - DNA, 25 bp, Homo sapien
ccctacggagggaccgataccaacg

SEQ ID NO: 90893 - DNA, 25 bp, Homo sapien
tcaagaagaggtggtcgagagccta

SEQ ID NO: 90894 - DNA, 25 bp, Homo sapien
tcaagaagaggtcgtcgagagccta

SEQ ID NO: 90895 - DNA, 25 bp, Homo sapien
tggagagaggaaactggacctctgt

SEQ ID NO: 90896 - DNA, 25 bp, Homo sapien
tggagagaggaatctggacctctgt

SEQ ID NO: 90897 - DNA, 25 bp, Homo sapien
tcggggtgtcggttctgtcaaactg

SEQ ID NO: 90898 - DNA, 25 bp, Homo sapien
tcggggtgtcggatctgtcaaactg

SEQ ID NO: 90899 - DNA, 25 bp, Homo sapien
tcctaatggccgacccgaacgatgt

SEQ ID NO: 90900 - DNA, 25 bp, Homo sapien
tcctaatggccgtcccgaacgatgt

SEQ ID NO: 90901 - DNA, 25 bp, Homo sapien
acagttacttggttcaagagtatct

SEQ ID NO: 90902 - DNA, 25 bp, Homo sapien
acagttacttggatcaagagtatct

SEQ ID NO: 90903 - DNA, 25 bp, Homo sapien
tctaggtcttagagacacacggaag

SEQ ID NO: 90904 - DNA, 25 bp, Homo sapien
tctaggtcttagtgacacacggaag

SEQ ID NO: 90905 - DNA, 25 bp, Homo sapien
gatggttatagtggacgaccccgac

SEQ ID NO: 90906 - DNA, 25 bp, Homo sapien
gatggttatagtcgacgaccccgac

SEQ ID NO: 90907 - DNA, 25 bp, Homo sapien
gtgtggtacgtgatacctaccctcc

SEQ ID NO: 90908 - DNA, 25 bp, Homo sapien
gtgtggtacgtgttacctaccctcc

SEQ ID NO: 90909 - DNA, 25 bp, Homo sapien
aggggaccgtcaccatcgtcgtcac

SEQ ID NO: 90910 - DNA, 25 bp, Homo sapien
aggggaccgtcagcatcgtcgtcac

SEQ ID NO: 90911 - DNA, 25 bp, Homo sapien
gatgagtaaccgagtataagacttc

SEQ ID NO: 90912 - DNA, 25 bp, Homo sapien
gatgagtaaccgtgtataagacttc

SEQ ID NO: 90913 - DNA, 25 bp, Homo sapien
cagtagacacgagtcgaagacgaga

SEQ ID NO: 90914 - DNA, 25 bp, Homo sapien
cagtagacacgactcgaagacgaga

SEQ ID NO: 90915 - DNA, 25 bp, Homo sapien
tgaggtaccagaacgtacaacgaca

SEQ ID NO: 90916 - DNA, 25 bp, Homo sapien
tgaggtaccagatcgtacaacgaca

SEQ ID NO: 90917 - DNA, 25 bp, Homo sapien
gaccttcttgtgtcggaggaacacc

SEQ ID NO: 90918 - DNA, 25 bp, Homo sapien
gaccttcttgtgacggaggaacacc

SEQ ID NO: 90919 - DNA, 25 bp, Homo sapien
tctttacttattgtgacacgacgaa

SEQ ID NO: 90920 - DNA, 25 bp, Homo sapien
tctttacttattctgacacgacgaa

SEQ ID NO: 90921 - DNA, 25 bp, Homo sapien
gtcatttattcgttctcgatgtacg

SEQ ID NO: 90922 - DNA, 25 bp, Homo sapien
gtcatttattcgatctcgatgtacg

SEQ ID NO: 90923 - DNA, 25 bp, Homo sapien
gagtctccgtctttgacccgtatta

SEQ ID NO: 90924 - DNA, 25 bp, Homo sapien
gagtctccgtctatgacccgtatta

SEQ ID NO: 90925 - DNA, 25 bp, Homo sapien
cgtagtgagttcatacttcgtaaga

SEQ ID NO: 90926 - DNA, 25 bp, Homo sapien
cgtagtgagttcttacttcgtaaga

SEQ ID NO: 90927 - DNA, 25 bp, Homo sapien
ctcgtgttgtcctgctatcttacga

SEQ ID NO: 90928 - DNA, 25 bp, Homo sapien
ctcgtgttgtccagctatcttacga

SEQ ID NO: 90929 - DNA, 25 bp, Homo sapien
agcaacatgagcagtgatcgaccga

SEQ ID NO: 90930 - DNA, 25 bp, Homo sapien
agcaacatgagctgtgatcgaccga

SEQ ID NO: 90931 - DNA, 25 bp, Homo sapien
acacgaaagtacctatgacggaccc

SEQ ID NO: 90932 - DNA, 25 bp, Homo sapien
acacgaaagtacgtatgacggaccc

SEQ ID NO: 90933 - DNA, 25 bp, Homo sapien
cagacggacggaagctccaagtcct

SEQ ID NO: 90934 - DNA, 25 bp, Homo sapien
cagacggacggatgctccaagtcct

SEQ ID NO: 90935 - DNA, 25 bp, Homo sapien
actcgacctggaagcgtggacctcc

SEQ ID NO: 90936 - DNA, 25 bp, Homo sapien
actcgacctggatgcgtggacctcc

SEQ ID NO: 90937 - DNA, 25 bp, Homo sapien
gactttctggtggtacttgccgtcc

SEQ ID NO: 90938 - DNA, 25 bp, Homo sapien
gactttctggtgctacttgccgtcc

SEQ ID NO: 90939 - DNA, 25 bp, Homo sapien
gttcttccgagactcgaagactgcc

SEQ ID NO: 90940 - DNA, 25 bp, Homo sapien
gttcttccgagagtcgaagactgcc

SEQ ID NO: 90941 - DNA, 25 bp, Homo sapien
acgttatgtcagagaaggaccacac

SEQ ID NO: 90942 - DNA, 25 bp, Homo sapien
acgttatgtcagtgaaggaccacac

SEQ ID NO: 90943 - DNA, 25 bp, Homo sapien
acaactgaggttaaaaagtctccca

SEQ ID NO: 90944 - DNA, 25 bp, Homo sapien
acaactgaggtttaaaagtctccca

SEQ ID NO: 90945 - DNA, 25 bp, Homo sapien
caggtggttgacatgactactttga

SEQ ID NO: 90946 - DNA, 25 bp, Homo sapien
caggtggttgacttgactactttga

SEQ ID NO: 90947 - DNA, 25 bp, Homo sapien
agtgttttataccagtaaccttaga

SEQ ID NO: 90948 - DNA, 25 bp, Homo sapien
agtgttttatacgagtaaccttaga

SEQ ID NO: 90949 - DNA, 25 bp, Homo sapien
gatgttaatgcgtggcgtactcttg

SEQ ID NO: 90950 - DNA, 25 bp, Homo sapien
gatgttaatgcgaggcgtactcttg

SEQ ID NO: 90951 - DNA, 25 bp, Homo sapien
ggcttcaggtaggtaggtatccgaa

SEQ ID NO: 90952 - DNA, 25 bp, Homo sapien
ggcttcaggtagctaggtatccgaa

SEQ ID NO: 90953 - DNA, 25 bp, Homo sapien
gcttcatcacacgtatacaagagac

SEQ ID NO: 90954 - DNA, 25 bp, Homo sapien
gcttcatcacacctatacaagagac

SEQ ID NO: 90955 - DNA, 25 bp, Homo sapien
gtgttcataaacataactcgtgtaa

SEQ ID NO: 90956 - DNA, 25 bp, Homo sapien
gtgttcataaacttaactcgtgtaa

SEQ ID NO: 90957 - DNA, 25 bp, Homo sapien
tcaagtaaacgtactcgttacgtct

SEQ ID NO: 90958 - DNA, 25 bp, Homo sapien
tcaagtaaacgttctcgttacgtct

SEQ ID NO: 90959 - DNA, 25 bp, Homo sapien
aagtcgaagtaagtctctgagtctc

SEQ ID NO: 90960 - DNA, 25 bp, Homo sapien
aagtcgaagtaactctctgagtctc

SEQ ID NO: 90961 - DNA, 25 bp, Homo sapien
agtagtgcagaccacataaacactt

SEQ ID NO: 90962 - DNA, 25 bp, Homo sapien
agtagtgcagacgacataaacactt

SEQ ID NO: 90963 - DNA, 25 bp, Homo sapien
gtcggcacagcgaatatacctgact

SEQ ID NO: 90964 - DNA, 25 bp, Homo sapien
gtcggcacagcgtatatacctgact

SEQ ID NO: 90965 - DNA, 25 bp, Homo sapien
tgttccgtcctggacctacgtgact

SEQ ID NO: 90966 - DNA, 25 bp, Homo sapien
tgttccgtcctgcacctacgtgact

SEQ ID NO: 90967 - DNA, 25 bp, Homo sapien
agtaacgtggtttatcccttctgac

SEQ ID NO: 90968 - DNA, 25 bp, Homo sapien
agtaacgtggttaatcccttctgac

SEQ ID NO: 90969 - DNA, 25 bp, Homo sapien
cttacagtttatattcgatgtccga

SEQ ID NO: 90970 - DNA, 25 bp, Homo sapien
cttacagtttattttcgatgtccga

SEQ ID NO: 90971 - DNA, 25 bp, Homo sapien
taagtccgtattatacagtctaaac

SEQ ID NO: 90972 - DNA, 25 bp, Homo sapien
taagtccgtattttacagtctaaac

SEQ ID NO: 90973 - DNA, 25 bp, Homo sapien
ggggtaaacctgacttggttcaagt

SEQ ID NO: 90974 - DNA, 25 bp, Homo sapien
ggggtaaacctgtcttggttcaagt

SEQ ID NO: 90975 - DNA, 25 bp, Homo sapien
cgagactcgtcgtccatgtggcagg

SEQ ID NO: 90976 - DNA, 25 bp, Homo sapien
cgagactcgtcgaccatgtggcagg

SEQ ID NO: 90977 - DNA, 25 bp, Homo sapien
tcttccttctgaacccggggcgctg

SEQ ID NO: 90978 - DNA, 25 bp, Homo sapien
tcttccttctgatcccggggcgctg

SEQ ID NO: 90979 - DNA, 25 bp, Homo sapien
gttctttgaacgtactggcgttccg

SEQ ID NO: 90980 - DNA, 25 bp, Homo sapien
gttctttgaacgaactggcgttccg

SEQ ID NO: 90981 - DNA, 25 bp, Homo sapien
acgtttagaagactgaccgacatcg

SEQ ID NO: 90982 - DNA, 25 bp, Homo sapien
acgtttagaagagtgaccgacatcg

SEQ ID NO: 90983 - DNA, 25 bp, Homo sapien
gcttctcatctttcgtacacgattg

SEQ ID NO: 90984 - DNA, 25 bp, Homo sapien
gcttctcatcttacgtacacgattg

SEQ ID NO: 90985 - DNA, 25 bp, Homo sapien
ctgtcctttgtagagactctcgagt

SEQ ID NO: 90986 - DNA, 25 bp, Homo sapien
ctgtcctttgtacagactctcgagt

SEQ ID NO: 90987 - DNA, 25 bp, Homo sapien
ccgatgtcttttagacatgtatttg

SEQ ID NO: 90988 - DNA, 25 bp, Homo sapien
ccgatgtctttttgacatgtatttg

SEQ ID NO: 90989 - DNA, 25 bp, Homo sapien
acgaggtaccctttggttcctgttg

SEQ ID NO: 90990 - DNA, 25 bp, Homo sapien
acgaggtaccctatggttcctgttg

SEQ ID NO: 90991 - DNA, 25 bp, Homo sapien
ctaagaccccatgtctgtcgagttc

SEQ ID NO: 90992 - DNA, 25 bp, Homo sapien
ctaagaccccatctctgtcgagttc

SEQ ID NO: 90993 - DNA, 25 bp, Homo sapien
cctgaggtaccgtggaagtcggacc

SEQ ID NO: 90994 - DNA, 25 bp, Homo sapien
cctgaggtaccgaggaagtcggacc

SEQ ID NO: 90995 - DNA, 25 bp, Homo sapien
tccacgagctgagtgacaacgagga

SEQ ID NO: 90996 - DNA, 25 bp, Homo sapien
tccacgagctgactgacaacgagga

SEQ ID NO: 90997 - DNA, 25 bp, Homo sapien
ttctgaagtcatatacgaccgtaga

SEQ ID NO: 90998 - DNA, 25 bp, Homo sapien
ttctgaagtcatttacgaccgtaga

SEQ ID NO: 90999 - DNA, 25 bp, Homo sapien
tcgtcgaagtattagtttagtccga

SEQ ID NO: 91000 - DNA, 25 bp, Homo sapien
tcgtcgaagtataagtttagtccga

SEQ ID NO: 91001 - DNA, 25 bp, Homo sapien
gagtcgtctaagtccccagcacgtc

SEQ ID NO: 91002 - DNA, 25 bp, Homo sapien
gagtcgtctaagaccccagcacgtc

SEQ ID NO: 91003 - DNA, 25 bp, Homo sapien
taggattcctcgttcccgagccttg

SEQ ID NO: 91004 - DNA, 25 bp, Homo sapien
taggattcctcgatcccgagccttg

SEQ ID NO: 91005 - DNA, 25 bp, Homo sapien
tgggactcctgtctcgctgaatgtg

SEQ ID NO: 91006 - DNA, 25 bp, Homo sapien
tgggactcctgtgtcgctgaatgtg

SEQ ID NO: 91007 - DNA, 25 bp, Homo sapien
tggtcgtcctgtctcaccaggtgtt

SEQ ID NO: 91008 - DNA, 25 bp, Homo sapien
tggtcgtcctgtgtcaccaggtgtt

SEQ ID NO: 91009 - DNA, 25 bp, Homo sapien
gtgtcactaaaggtaacgcgttgtt

SEQ ID NO: 91010 - DNA, 25 bp, Homo sapien
gtgtcactaaagctaacgcgttgtt

SEQ ID NO: 91011 - DNA, 25 bp, Homo sapien
gaagttcgaacaagaataacctaca

SEQ ID NO: 91012 - DNA, 25 bp, Homo sapien
gaagttcgaacatgaataacctaca

SEQ ID NO: 91013 - DNA, 25 bp, Homo sapien
aggtcttaacgtagaagctcgttag

SEQ ID NO: 91014 - DNA, 25 bp, Homo sapien
aggtcttaacgttgaagctcgttag

SEQ ID NO: 91015 - DNA, 25 bp, Homo sapien
aaaagaacaaattgtctgtaccgaa

SEQ ID NO: 91016 - DNA, 25 bp, Homo sapien
aaaagaacaaatagtctgtaccgaa

SEQ ID NO: 91017 - DNA, 25 bp, Homo sapien
tactggtccgtctttgtctcgccca

SEQ ID NO: 91018 - DNA, 25 bp, Homo sapien
tactggtccgtcattgtctcgccca

SEQ ID NO: 91019 - DNA, 25 bp, Homo sapien
actctggtcactgtcttccccgaag

SEQ ID NO: 91020 - DNA, 25 bp, Homo sapien
actctggtcactctcttccccgaag

SEQ ID NO: 91021 - DNA, 25 bp, Homo sapien
tggtgatttcctttccgtaccccgt

SEQ ID NO: 91022 - DNA, 25 bp, Homo sapien
tggtgatttcctatccgtaccccgt

SEQ ID NO: 91023 - DNA, 25 bp, Homo sapien
tgtacggtgattaccctatttcccc

SEQ ID NO: 91024 - DNA, 25 bp, Homo sapien
tgtacggtgatttccctatttcccc

SEQ ID NO: 91025 - DNA, 25 bp, Homo sapien
gtttgtgtgtttgacccatttccat

SEQ ID NO: 91026 - DNA, 25 bp, Homo sapien
gtttgtgtgtttcacccatttccat

SEQ ID NO: 91027 - DNA, 25 bp, Homo sapien
tcctgtcttttccttgactttccgg

SEQ ID NO: 91028 - DNA, 25 bp, Homo sapien
tcctgtcttttcgttgactttccgg

SEQ ID NO: 91029 - DNA, 25 bp, Homo sapien
gcctcaatcttcctggggtcctcgg

SEQ ID NO: 91030 - DNA, 25 bp, Homo sapien
gcctcaatcttcgtggggtcctcgg

SEQ ID NO: 91031 - DNA, 25 bp, Homo sapien
gcaactcagttctggagtctgggtg

SEQ ID NO: 91032 - DNA, 25 bp, Homo sapien
gcaactcagttcaggagtctgggtg

SEQ ID NO: 91033 - DNA, 25 bp, Homo sapien
tacagtacgtctctgagtttaggac

SEQ ID NO: 91034 - DNA, 25 bp, Homo sapien
tacagtacgtctgtgagtttaggac

SEQ ID NO: 91035 - DNA, 25 bp, Homo sapien
aatacgtaccctgtgtaagtgttgc

SEQ ID NO: 91036 - DNA, 25 bp, Homo sapien
aatacgtaccctctgtaagtgttgc

SEQ ID NO: 91037 - DNA, 25 bp, Homo sapien
cgacatgtctattttgaaattacac

SEQ ID NO: 91038 - DNA, 25 bp, Homo sapien
cgacatgtctatattgaaattacac

SEQ ID NO: 91039 - DNA, 25 bp, Homo sapien
tcagtgtagagaatcggattctcat

SEQ ID NO: 91040 - DNA, 25 bp, Homo sapien
tcagtgtagagattcggattctcat

SEQ ID NO: 91041 - DNA, 25 bp, Homo sapien
ccagaaggaaaaggtaacttctctt

SEQ ID NO: 91042 - DNA, 25 bp, Homo sapien
ccagaaggaaaacgtaacttctctt

SEQ ID NO: 91043 - DNA, 25 bp, Homo sapien
ggaatcacagaacgacctatatcat

SEQ ID NO: 91044 - DNA, 25 bp, Homo sapien
ggaatcacagaaggacctatatcat

SEQ ID NO: 91045 - DNA, 25 bp, Homo sapien
ttgcctcggtaaggacctacttcag

SEQ ID NO: 91046 - DNA, 25 bp, Homo sapien
ttgcctcggtaacgacctacttcag

SEQ ID NO: 91047 - DNA, 25 bp, Homo sapien
tcacctcagtaagtccgtattatac

SEQ ID NO: 91048 - DNA, 25 bp, Homo sapien
tcacctcagtaactccgtattatac

SEQ ID NO: 91049 - DNA, 25 bp, Homo sapien
tccatcgactcgaactccagtcaag

SEQ ID NO: 91050 - DNA, 25 bp, Homo sapien
tccatcgactcgtactccagtcaag

SEQ ID NO: 91051 - DNA, 25 bp, Homo sapien
tacggacgtcgactctcgaaggcca

SEQ ID NO: 91052 - DNA, 25 bp, Homo sapien
tacggacgtcgagtctcgaaggcca

SEQ ID NO: 91053 - DNA, 25 bp, Homo sapien
gtggtggatcggttccagaagctta

SEQ ID NO: 91054 - DNA, 25 bp, Homo sapien
gtggtggatcggatccagaagctta

SEQ ID NO: 91055 - DNA, 25 bp, Homo sapien
gaaagtcgaccatccaacatatcag

SEQ ID NO: 91056 - DNA, 25 bp, Homo sapien
gaaagtcgaccaaccaacatatcag

SEQ ID NO: 91057 - DNA, 25 bp, Homo sapien
ttcgatgacgacacaaccattatcg

SEQ ID NO: 91058 - DNA, 25 bp, Homo sapien
ttcgatgacgactcaaccattatcg

SEQ ID NO: 91059 - DNA, 25 bp, Homo sapien
gtctaggtccagtgactccctctac

SEQ ID NO: 91060 - DNA, 25 bp, Homo sapien
gtctaggtccagagactccctctac

SEQ ID NO: 91061 - DNA, 25 bp, Homo sapien
tagacgtgtccttggcgacccttct

SEQ ID NO: 91062 - DNA, 25 bp, Homo sapien
tagacgtgtcctaggcgacccttct

SEQ ID NO: 91063 - DNA, 25 bp, Homo sapien
gtcacgtatgttggtgtccttctgc

SEQ ID NO: 91064 - DNA, 25 bp, Homo sapien
gtcacgtatgttcgtgtccttctgc

SEQ ID NO: 91065 - DNA, 25 bp, Homo sapien
accctaccttttgtgcacttgtccg

SEQ ID NO: 91066 - DNA, 25 bp, Homo sapien
accctaccttttctgcacttgtccg

SEQ ID NO: 91067 - DNA, 25 bp, Homo sapien
tctactggttcactgaccctccgag

SEQ ID NO: 91068 - DNA, 25 bp, Homo sapien
tctactggttcagtgaccctccgag

SEQ ID NO: 91069 - DNA, 25 bp, Homo sapien
catttacgttgtattctaaacaaaa

SEQ ID NO: 91070 - DNA, 25 bp, Homo sapien
catttacgttgttttctaaacaaaa

SEQ ID NO: 91071 - DNA, 25 bp, Homo sapien
atgtttttcgtacctaaaaagaata

SEQ ID NO: 91072 - DNA, 25 bp, Homo sapien
atgtttttcgtagctaaaaagaata

SEQ ID NO: 91073 - DNA, 25 bp, Homo sapien
ttatttcttgtatacttaaaattac

SEQ ID NO: 91074 - DNA, 25 bp, Homo sapien
ttatttcttgtaaacttaaaattac

SEQ ID NO: 91075 - DNA, 25 bp, Homo sapien
tcgtcgggtagacacaaggtagttc

SEQ ID NO: 91076 - DNA, 25 bp, Homo sapien
tcgtcgggtagagacaaggtagttc

SEQ ID NO: 91077 - DNA, 25 bp, Homo sapien
aatcggacggacactccaagtgttg

SEQ ID NO: 91078 - DNA, 25 bp, Homo sapien
aatcggacggactctccaagtgttg

SEQ ID NO: 91079 - DNA, 25 bp, Homo sapien
agggcgaagagtcaccgaagtgtaa

SEQ ID NO: 91080 - DNA, 25 bp, Homo sapien
agggcgaagagtgaccgaagtgtaa

SEQ ID NO: 91081 - DNA, 25 bp, Homo sapien
gagggtcccgtacgacagcaggtcc

SEQ ID NO: 91082 - DNA, 25 bp, Homo sapien
gagggtcccgtaggacagcaggtcc

SEQ ID NO: 91083 - DNA, 25 bp, Homo sapien
tgggactcctctcctcaggtaaggg

SEQ ID NO: 91084 - DNA, 25 bp, Homo sapien
tgggactcctctgctcaggtaaggg

SEQ ID NO: 91085 - DNA, 25 bp, Homo sapien
tacattatttctctagagttcaagg

SEQ ID NO: 91086 - DNA, 25 bp, Homo sapien
tacattatttctgtagagttcaagg

SEQ ID NO: 91087 - DNA, 25 bp, Homo sapien
tcttaagtcccgagtctcgtcgatc

SEQ ID NO: 91088 - DNA, 25 bp, Homo sapien
tcttaagtcccgtgtctcgtcgatc

SEQ ID NO: 91089 - DNA, 25 bp, Homo sapien
gtagagtgtctggtagtccctactc

SEQ ID NO: 91090 - DNA, 25 bp, Homo sapien
gtagagtgtctgctagtccctactc

SEQ ID NO: 91091 - DNA, 25 bp, Homo sapien
gggcttaattctgtacgtgatttac

SEQ ID NO: 91092 - DNA, 25 bp, Homo sapien
gggcttaattctctacgtgatttac

SEQ ID NO: 91093 - DNA, 25 bp, Homo sapien
agaagagaggtagtccggcttagtc

SEQ ID NO: 91094 - DNA, 25 bp, Homo sapien
agaagagaggtactccggcttagtc

SEQ ID NO: 91095 - DNA, 25 bp, Homo sapien
gaggacgagtgtcttcggatgtaac

SEQ ID NO: 91096 - DNA, 25 bp, Homo sapien
gaggacgagtgtgttcggatgtaac

SEQ ID NO: 91097 - DNA, 25 bp, Homo sapien
ttaacggacctgactttgttagtga

SEQ ID NO: 91098 - DNA, 25 bp, Homo sapien
ttaacggacctgtctttgttagtga

SEQ ID NO: 91099 - DNA, 25 bp, Homo sapien
tacttagacaagagatctttacgga

SEQ ID NO: 91100 - DNA, 25 bp, Homo sapien
tacttagacaagtgatctttacgga

SEQ ID NO: 91101 - DNA, 25 bp, Homo sapien
cgtaagttccaatttgtaattctga

SEQ ID NO: 91102 - DNA, 25 bp, Homo sapien
cgtaagttccaaattgtaattctga

SEQ ID NO: 91103 - DNA, 25 bp, Homo sapien
tcttagtgccaaattaatgttctga

SEQ ID NO: 91104 - DNA, 25 bp, Homo sapien
tcttagtgccaatttaatgttctga

SEQ ID NO: 91105 - DNA, 25 bp, Homo sapien
ttcttttcagatcattgctccggta

SEQ ID NO: 91106 - DNA, 25 bp, Homo sapien
ttcttttcagatgattgctccggta

SEQ ID NO: 91107 - DNA, 25 bp, Homo sapien
ttggatcgacaaagtagtgccctca

SEQ ID NO: 91108 - DNA, 25 bp, Homo sapien
ttggatcgacaatgtagtgccctca

SEQ ID NO: 91109 - DNA, 25 bp, Homo sapien
tgtcgtgtttttgtctcactcccga

SEQ ID NO: 91110 - DNA, 25 bp, Homo sapien
tgtcgtgtttttctctcactcccga

SEQ ID NO: 91111 - DNA, 25 bp, Homo sapien
cacgtgtgtgtgtttttcctcacca

SEQ ID NO: 91112 - DNA, 25 bp, Homo sapien
cacgtgtgtgtgattttcctcacca

SEQ ID NO: 91113 - DNA, 25 bp, Homo sapien
ttgtggtaagaatattcgacccgtg

SEQ ID NO: 91114 - DNA, 25 bp, Homo sapien
ttgtggtaagaaaattcgacccgtg

SEQ ID NO: 91115 - DNA, 25 bp, Homo sapien
ttatttgtcctattctattcgagag

SEQ ID NO: 91116 - DNA, 25 bp, Homo sapien
ttatttgtcctaatctattcgagag

SEQ ID NO: 91117 - DNA, 25 bp, Homo sapien
aatgtttctgttcttccgatccgga

SEQ ID NO: 91118 - DNA, 25 bp, Homo sapien
aatgtttctgttgttccgatccgga

SEQ ID NO: 91119 - DNA, 25 bp, Homo sapien
tgttttgagtcttaggtaccgagtc

SEQ ID NO: 91120 - DNA, 25 bp, Homo sapien
tgttttgagtctaaggtaccgagtc

SEQ ID NO: 91121 - DNA, 25 bp, Homo sapien
ggagatctgtcatactgttcggagg

SEQ ID NO: 91122 - DNA, 25 bp, Homo sapien
ggagatctgtcaaactgttcggagg

SEQ ID NO: 91123 - DNA, 25 bp, Homo sapien
gaaaagacaccagaacccacgagga

SEQ ID NO: 91124 - DNA, 25 bp, Homo sapien
gaaaagacaccacaacccacgagga

SEQ ID NO: 91125 - DNA, 25 bp, Homo sapien
actcaagattcaaacccatagagga

SEQ ID NO: 91126 - DNA, 25 bp, Homo sapien
actcaagattcatacccatagagga

SEQ ID NO: 91127 - DNA, 25 bp, Homo sapien
ttgcctgtgactacccaagacaggt

SEQ ID NO: 91128 - DNA, 25 bp, Homo sapien
ttgcctgtgacttcccaagacaggt

SEQ ID NO: 91129 - DNA, 25 bp, Homo sapien
gtgtactgggtgaccccaaagaaga

SEQ ID NO: 91130 - DNA, 25 bp, Homo sapien
gtgtactgggtgtccccaaagaaga

SEQ ID NO: 91131 - DNA, 25 bp, Homo sapien
taatggtgtctttcccaataaagtt

SEQ ID NO: 91132 - DNA, 25 bp, Homo sapien
taatggtgtcttacccaataaagtt

SEQ ID NO: 91133 - DNA, 25 bp, Homo sapien
tcggattttaccatataacgaagta

SEQ ID NO: 91134 - DNA, 25 bp, Homo sapien
tcggattttaccttataacgaagta

SEQ ID NO: 91135 - DNA, 25 bp, Homo sapien
ttcggatcttccttacgatccaatg

SEQ ID NO: 91136 - DNA, 25 bp, Homo sapien
ttcggatcttccatacgatccaatg

SEQ ID NO: 91137 - DNA, 25 bp, Homo sapien
ggtccgacctgacgaacttaaaatc

SEQ ID NO: 91138 - DNA, 25 bp, Homo sapien
ggtccgacctgaggaacttaaaatc

SEQ ID NO: 91139 - DNA, 25 bp, Homo sapien
agtcaacgactttcgattttggaac

SEQ ID NO: 91140 - DNA, 25 bp, Homo sapien
agtcaacgacttacgattttggaac

SEQ ID NO: 91141 - DNA, 25 bp, Homo sapien
agtcggtacgcacgtgtgtgtgttt

SEQ ID NO: 91142 - DNA, 25 bp, Homo sapien
agtcggtacgcaggtgtgtgtgttt

SEQ ID NO: 91143 - DNA, 25 bp, Homo sapien
cgtggagtctgatcgtttatacgtt

SEQ ID NO: 91144 - DNA, 25 bp, Homo sapien
cgtggagtctgaacgtttatacgtt

SEQ ID NO: 91145 - DNA, 25 bp, Homo sapien
ttgaactgctgatgacgaatcgtat

SEQ ID NO: 91146 - DNA, 25 bp, Homo sapien
ttgaactgctgaagacgaatcgtat

SEQ ID NO: 91147 - DNA, 25 bp, Homo sapien
ctgtcactacggtccgagcgggtga

SEQ ID NO: 91148 - DNA, 25 bp, Homo sapien
ctgtcactacggaccgagcgggtga

SEQ ID NO: 91149 - DNA, 25 bp, Homo sapien
ccccacaggaatcacgacggtggac

SEQ ID NO: 91150 - DNA, 25 bp, Homo sapien
ccccacaggaatgacgacggtggac

SEQ ID NO: 91151 - DNA, 25 bp, Homo sapien
cgtccacatgaacgtcgggtataat

SEQ ID NO: 91152 - DNA, 25 bp, Homo sapien
cgtccacatgaaggtcgggtataat

SEQ ID NO: 91153 - DNA, 25 bp, Homo sapien
ctcacggataaagtagtcgattata

SEQ ID NO: 91154 - DNA, 25 bp, Homo sapien
ctcacggataaactagtcgattata

SEQ ID NO: 91155 - DNA, 25 bp, Homo sapien
tacgaggtaaattaccttgttgagt

SEQ ID NO: 91156 - DNA, 25 bp, Homo sapien
tacgaggtaaataaccttgttgagt

SEQ ID NO: 91157 - DNA, 25 bp, Homo sapien
agagacgggtagaaggaccctttga

SEQ ID NO: 91158 - DNA, 25 bp, Homo sapien
agagacgggtagtaggaccctttga

SEQ ID NO: 91159 - DNA, 25 bp, Homo sapien
agcgaagtccttgacttagaggagt

SEQ ID NO: 91160 - DNA, 25 bp, Homo sapien
agcgaagtccttcacttagaggagt

SEQ ID NO: 91161 - DNA, 25 bp, Homo sapien
gtatcaccgcttgtcgttggtgtag

SEQ ID NO: 91162 - DNA, 25 bp, Homo sapien
gtatcaccgcttctcgttggtgtag

SEQ ID NO: 91163 - DNA, 25 bp, Homo sapien
agtttcccgtcttcggattcaggtt

SEQ ID NO: 91164 - DNA, 25 bp, Homo sapien
agtttcccgtctacggattcaggtt

SEQ ID NO: 91165 - DNA, 25 bp, Homo sapien
acaagtctttctggatttcagtgtt

SEQ ID NO: 91166 - DNA, 25 bp, Homo sapien
acaagtctttctcgatttcagtgtt

SEQ ID NO: 91167 - DNA, 25 bp, Homo sapien
tgaagataagttccatcttcctgtt

SEQ ID NO: 91168 - DNA, 25 bp, Homo sapien
tgaagataagttgcatcttcctgtt

SEQ ID NO: 91169 - DNA, 25 bp, Homo sapien
tgattatagtccttgtaccgccgta

SEQ ID NO: 91170 - DNA, 25 bp, Homo sapien
tgattatagtccatgtaccgccgta

SEQ ID NO: 91171 - DNA, 25 bp, Homo sapien
tctaacatgctgtgactgtaccacg

SEQ ID NO: 91172 - DNA, 25 bp, Homo sapien
tctaacatgctgagactgtaccacg

SEQ ID NO: 91173 - DNA, 25 bp, Homo sapien
cgtgacctgcgtcgtactgcttcca

SEQ ID NO: 91174 - DNA, 25 bp, Homo sapien
cgtgacctgcgtggtactgcttcca

SEQ ID NO: 91175 - DNA, 25 bp, Homo sapien
ccatcgtgtctaatctagattcctg

SEQ ID NO: 91176 - DNA, 25 bp, Homo sapien
ccatcgtgtctattctagattcctg

SEQ ID NO: 91177 - DNA, 25 bp, Homo sapien
ccgcgagccgcaaacgtatttgttc

SEQ ID NO: 91178 - DNA, 25 bp, Homo sapien
ccgcgagccgcatacgtatttgttc

SEQ ID NO: 91179 - DNA, 25 bp, Homo sapien
tacaacagtcggagcacctttggtc

SEQ ID NO: 91180 - DNA, 25 bp, Homo sapien
tacaacagtcggtgcacctttggtc

SEQ ID NO: 91181 - DNA, 25 bp, Homo sapien
tcaaaaactctcacgcagatgtgta

SEQ ID NO: 91182 - DNA, 25 bp, Homo sapien
tcaaaaactctctcgcagatgtgta

SEQ ID NO: 91183 - DNA, 25 bp, Homo sapien
agggaaggtacttgttccgggactc

SEQ ID NO: 91184 - DNA, 25 bp, Homo sapien
agggaaggtactagttccgggactc

SEQ ID NO: 91185 - DNA, 25 bp, Homo sapien
gtgggacagtagtacgtgccaaccc

SEQ ID NO: 91186 - DNA, 25 bp, Homo sapien
gtgggacagtagaacgtgccaaccc

SEQ ID NO: 91187 - DNA, 25 bp, Homo sapien
ctgttcgtaaagtttcgtccggggg

SEQ ID NO: 91188 - DNA, 25 bp, Homo sapien
ctgttcgtaaagattcgtccggggg

SEQ ID NO: 91189 - DNA, 25 bp, Homo sapien
cttggaccgtttggaccgggacgtc

SEQ ID NO: 91190 - DNA, 25 bp, Homo sapien
cttggaccgtttcgaccgggacgtc

SEQ ID NO: 91191 - DNA, 25 bp, Homo sapien
tctcatccatactctaccggtgatg

SEQ ID NO: 91192 - DNA, 25 bp, Homo sapien
tctcatccatacactaccggtgatg

SEQ ID NO: 91193 - DNA, 25 bp, Homo sapien
tcgatgacatcgtacaaccaagtct

SEQ ID NO: 91194 - DNA, 25 bp, Homo sapien
tcgatgacatcgaacaaccaagtct

SEQ ID NO: 91195 - DNA, 25 bp, Homo sapien
gatagaagataaacctacagtcgtt

SEQ ID NO: 91196 - DNA, 25 bp, Homo sapien
gatagaagataatcctacagtcgtt

SEQ ID NO: 91197 - DNA, 25 bp, Homo sapien
ggactagaaaatgtcgactgtcgtg

SEQ ID NO: 91198 - DNA, 25 bp, Homo sapien
ggactagaaaatctcgactgtcgtg

SEQ ID NO: 91199 - DNA, 25 bp, Homo sapien
tgtttcacgaacattctgtatcttg

SEQ ID NO: 91200 - DNA, 25 bp, Homo sapien
tgtttcacgaactttctgtatcttg

SEQ ID NO: 91201 - DNA, 25 bp, Homo sapien
aggttgtcgtccttatacttctttg

SEQ ID NO: 91202 - DNA, 25 bp, Homo sapien
aggttgtcgtccatatacttctttg

SEQ ID NO: 91203 - DNA, 25 bp, Homo sapien
atacttcgttgtttctatgtcaaag

SEQ ID NO: 91204 - DNA, 25 bp, Homo sapien
atacttcgttgtatctatgtcaaag

SEQ ID NO: 91205 - DNA, 25 bp, Homo sapien
agtcgtagttttttcctttgcaaga

SEQ ID NO: 91206 - DNA, 25 bp, Homo sapien
agtcgtagttttatcctttgcaaga

SEQ ID NO: 91207 - DNA, 25 bp, Homo sapien
tctattgactgtgttcaagaacagg

SEQ ID NO: 91208 - DNA, 25 bp, Homo sapien
tctattgactgtcttcaagaacagg

SEQ ID NO: 91209 - DNA, 25 bp, Homo sapien
ctttcagggcggacactgtacgtaa

SEQ ID NO: 91210 - DNA, 25 bp, Homo sapien
ctttcagggcggtcactgtacgtaa

SEQ ID NO: 91211 - DNA, 25 bp, Homo sapien
cttatctaccgtgttttcgtttaag

SEQ ID NO: 91212 - DNA, 25 bp, Homo sapien
cttatctaccgtcttttcgtttaag

SEQ ID NO: 91213 - DNA, 25 bp, Homo sapien
gaattgttcacacttttcatgaacg

SEQ ID NO: 91214 - DNA, 25 bp, Homo sapien
gaattgttcacagttttcatgaacg

SEQ ID NO: 91215 - DNA, 25 bp, Homo sapien
actcagctggacgtttgtgccgatc

SEQ ID NO: 91216 - DNA, 25 bp, Homo sapien
actcagctggacctttgtgccgatc

SEQ ID NO: 91217 - DNA, 25 bp, Homo sapien
agttgacatcgtcagttagacgata

SEQ ID NO: 91218 - DNA, 25 bp, Homo sapien
agttgacatcgtgagttagacgata

SEQ ID NO: 91219 - DNA, 25 bp, Homo sapien
cgttgtgaagacagtcagatctagt

SEQ ID NO: 91220 - DNA, 25 bp, Homo sapien
cgttgtgaagactgtcagatctagt

SEQ ID NO: 91221 - DNA, 25 bp, Homo sapien
agtcacaagacctgggtcggatggt

SEQ ID NO: 91222 - DNA, 25 bp, Homo sapien
agtcacaagaccagggtcggatggt

SEQ ID NO: 91223 - DNA, 25 bp, Homo sapien
gagtcttgttgtccacctaaatctt

SEQ ID NO: 91224 - DNA, 25 bp, Homo sapien
gagtcttgttgtgcacctaaatctt

SEQ ID NO: 91225 - DNA, 25 bp, Homo sapien
ggagtcggggttcctccaacagaca

SEQ ID NO: 91226 - DNA, 25 bp, Homo sapien
ggagtcggggttgctccaacagaca

SEQ ID NO: 91227 - DNA, 25 bp, Homo sapien
gacctggacagtgttcgaaataaca

SEQ ID NO: 91228 - DNA, 25 bp, Homo sapien
gacctggacagtcttcgaaataaca

SEQ ID NO: 91229 - DNA, 25 bp, Homo sapien
gtagtgagagactcagttcactaga

SEQ ID NO: 91230 - DNA, 25 bp, Homo sapien
gtagtgagagacacagttcactaga

SEQ ID NO: 91231 - DNA, 25 bp, Homo sapien
tagacacaaggaagacgctcgtcac

SEQ ID NO: 91232 - DNA, 25 bp, Homo sapien
tagacacaaggatgacgctcgtcac

SEQ ID NO: 91233 - DNA, 25 bp, Homo sapien
cagaactaccctcaaagaagaccga

SEQ ID NO: 91234 - DNA, 25 bp, Homo sapien
cagaactaccctgaaagaagaccga

SEQ ID NO: 91235 - DNA, 25 bp, Homo sapien
ctgggtgccctggttcagtgacttt

SEQ ID NO: 91236 - DNA, 25 bp, Homo sapien
ctgggtgccctgcttcagtgacttt

SEQ ID NO: 91237 - DNA, 25 bp, Homo sapien
ccgtgaagaccgatccagtccgaag

SEQ ID NO: 91238 - DNA, 25 bp, Homo sapien
ccgtgaagaccgttccagtccgaag

SEQ ID NO: 91239 - DNA, 25 bp, Homo sapien
gagatcgaccgtttcatcgagtagg

SEQ ID NO: 91240 - DNA, 25 bp, Homo sapien
gagatcgaccgtatcatcgagtagg

SEQ ID NO: 91241 - DNA, 25 bp, Homo sapien
agaagccgaccgaattacaggttat

SEQ ID NO: 91242 - DNA, 25 bp, Homo sapien
agaagccgaccgtattacaggttat

SEQ ID NO: 91243 - DNA, 25 bp, Homo sapien
ggaaaacttgtcactactgtggact

SEQ ID NO: 91244 - DNA, 25 bp, Homo sapien
ggaaaacttgtctctactgtggact

SEQ ID NO: 91245 - DNA, 25 bp, Homo sapien
ctgagacaacctgtggttcagagga

SEQ ID NO: 91246 - DNA, 25 bp, Homo sapien
ctgagacaacctctggttcagagga

SEQ ID NO: 91247 - DNA, 25 bp, Homo sapien
gtaataattgactcacaccggagat

SEQ ID NO: 91248 - DNA, 25 bp, Homo sapien
gtaataattgacacacaccggagat

SEQ ID NO: 91249 - DNA, 25 bp, Homo sapien
gaaacttaagtgaactatcgtcatc

SEQ ID NO: 91250 - DNA, 25 bp, Homo sapien
gaaacttaagtgtactatcgtcatc

SEQ ID NO: 91251 - DNA, 25 bp, Homo sapien
ggacaacaaatgtttcaacttagac

SEQ ID NO: 91252 - DNA, 25 bp, Homo sapien
ggacaacaaatgattcaacttagac

SEQ ID NO: 91253 - DNA, 25 bp, Homo sapien
ggacagagaaagacagaactttcct

SEQ ID NO: 91254 - DNA, 25 bp, Homo sapien
ggacagagaaagtcagaactttcct

SEQ ID NO: 91255 - DNA, 25 bp, Homo sapien
cctagaaagaggtcctctttgttaa

SEQ ID NO: 91256 - DNA, 25 bp, Homo sapien
cctagaaagaggacctctttgttaa

SEQ ID NO: 91257 - DNA, 25 bp, Homo sapien
aagtatgatgagtacttttcgttaa

SEQ ID NO: 91258 - DNA, 25 bp, Homo sapien
aagtatgatgagaacttttcgttaa

SEQ ID NO: 91259 - DNA, 25 bp, Homo sapien
ggaaattagacatgtttactcacta

SEQ ID NO: 91260 - DNA, 25 bp, Homo sapien
ggaaattagacaagtttactcacta

SEQ ID NO: 91261 - DNA, 25 bp, Homo sapien
tcgatatattaaaactcttaaagta

SEQ ID NO: 91262 - DNA, 25 bp, Homo sapien
tcgatatattaatactcttaaagta

SEQ ID NO: 91263 - DNA, 25 bp, Homo sapien
ctgacgcatggactactaatcaaga

SEQ ID NO: 91264 - DNA, 25 bp, Homo sapien
ctgacgcatggagtactaatcaaga

SEQ ID NO: 91265 - DNA, 25 bp, Homo sapien
agagcacgtggaggtgtagaccaaa

SEQ ID NO: 91266 - DNA, 25 bp, Homo sapien
agagcacgtggacgtgtagaccaaa

SEQ ID NO: 91267 - DNA, 25 bp, Homo sapien
gaggtgtctgacttagaccaagtag

SEQ ID NO: 91268 - DNA, 25 bp, Homo sapien
gaggtgtctgacatagaccaagtag

SEQ ID NO: 91269 - DNA, 25 bp, Homo sapien
tagaggacctcctcgagtaccatgt

SEQ ID NO: 91270 - DNA, 25 bp, Homo sapien
tagaggacctccacgagtaccatgt

SEQ ID NO: 91271 - DNA, 25 bp, Homo sapien
acaggcagaccgtcgaactaccagt

SEQ ID NO: 91272 - DNA, 25 bp, Homo sapien
acaggcagaccgacgaactaccagt

SEQ ID NO: 91273 - DNA, 25 bp, Homo sapien
aaggagtacatctggaacaccgagt

SEQ ID NO: 91274 - DNA, 25 bp, Homo sapien
aaggagtacatcaggaacaccgagt

SEQ ID NO: 91275 - DNA, 25 bp, Homo sapien
acgcgtgtgccgtcgccaccgtgac

SEQ ID NO: 91276 - DNA, 25 bp, Homo sapien
acgcgtgtgccgacgccaccgtgac

SEQ ID NO: 91277 - DNA, 25 bp, Homo sapien
ccggtgtacccttgcacgttcggtt

SEQ ID NO: 91278 - DNA, 25 bp, Homo sapien
ccggtgtaccctagcacgttcggtt

SEQ ID NO: 91279 - DNA, 25 bp, Homo sapien
cgtcaggtctcttggagaaatagta

SEQ ID NO: 91280 - DNA, 25 bp, Homo sapien
cgtcaggtctctaggagaaatagta

SEQ ID NO: 91281 - DNA, 25 bp, Homo sapien
tgtccttggtcgtttggtaacaaat

SEQ ID NO: 91282 - DNA, 25 bp, Homo sapien
tgtccttggtcgattggtaacaaat

SEQ ID NO: 91283 - DNA, 25 bp, Homo sapien
ttctgatgaggaatttatcgacatc

SEQ ID NO: 91284 - DNA, 25 bp, Homo sapien
ttctgatgaggattttatcgacatc

SEQ ID NO: 91285 - DNA, 25 bp, Homo sapien
tttgagttccttttatatccgtagg

SEQ ID NO: 91286 - DNA, 25 bp, Homo sapien
tttgagttccttatatatccgtagg

SEQ ID NO: 91287 - DNA, 25 bp, Homo sapien
actaatctcatagacgtcttcctgg

SEQ ID NO: 91288 - DNA, 25 bp, Homo sapien
actaatctcatacacgtcttcctgg

SEQ ID NO: 91289 - DNA, 25 bp, Homo sapien
aacaccttcaggtctcttcactgag

SEQ ID NO: 91290 - DNA, 25 bp, Homo sapien
aacaccttcaggactcttcactgag

SEQ ID NO: 91291 - DNA, 25 bp, Homo sapien
aacctaatcaagtcgggttacatga

SEQ ID NO: 91292 - DNA, 25 bp, Homo sapien
aacctaatcaagacgggttacatga

SEQ ID NO: 91293 - DNA, 25 bp, Homo sapien
acgacttcccgaagtgggttccagt

SEQ ID NO: 91294 - DNA, 25 bp, Homo sapien
acgacttcccgatgtgggttccagt

SEQ ID NO: 91295 - DNA, 25 bp, Homo sapien
aatcccgtcgactgtcgaaatgtgg

SEQ ID NO: 91296 - DNA, 25 bp, Homo sapien
aatcccgtcgacagtcgaaatgtgg

SEQ ID NO: 91297 - DNA, 25 bp, Homo sapien
ggtcgtcctgacctccagtccgggt

SEQ ID NO: 91298 - DNA, 25 bp, Homo sapien
ggtcgtcctgacgtccagtccgggt

SEQ ID NO: 91299 - DNA, 25 bp, Homo sapien
gtgtccttacagttaacttactgtt

SEQ ID NO: 91300 - DNA, 25 bp, Homo sapien
gtgtccttacagataacttactgtt

SEQ ID NO: 91301 - DNA, 25 bp, Homo sapien
agtatagtaccgaaaagcaacggtt

SEQ ID NO: 91302 - DNA, 25 bp, Homo sapien
agtatagtaccgtaaagcaacggtt

SEQ ID NO: 91303 - DNA, 25 bp, Homo sapien
gaagaacgattaatgtcaagtctct

SEQ ID NO: 91304 - DNA, 25 bp, Homo sapien
gaagaacgattattgtcaagtctct

SEQ ID NO: 91305 - DNA, 25 bp, Homo sapien
cgacggaacactattagtcacatcc

SEQ ID NO: 91306 - DNA, 25 bp, Homo sapien
cgacggaacacttttagtcacatcc

SEQ ID NO: 91307 - DNA, 25 bp, Homo sapien
ccagtggacgatctcgagaagtttc

SEQ ID NO: 91308 - DNA, 25 bp, Homo sapien
ccagtggacgatgtcgagaagtttc

SEQ ID NO: 91309 - DNA, 25 bp, Homo sapien
cgaaacctcagtcgtaaacccttgt

SEQ ID NO: 91310 - DNA, 25 bp, Homo sapien
cgaaacctcagtggtaaacccttgt

SEQ ID NO: 91311 - DNA, 25 bp, Homo sapien
taactaaccccttcggagtcctttg

SEQ ID NO: 91312 - DNA, 25 bp, Homo sapien
taactaacccctacggagtcctttg

SEQ ID NO: 91313 - DNA, 25 bp, Homo sapien
gttaaagggacaaaatatccacttg

SEQ ID NO: 91314 - DNA, 25 bp, Homo sapien
gttaaagggacataatatccacttg

SEQ ID NO: 91315 - DNA, 25 bp, Homo sapien
ttaagaaggatgtagaatctccctt

SEQ ID NO: 91316 - DNA, 25 bp, Homo sapien
ttaagaaggatgaagaatctccctt

SEQ ID NO: 91317 - DNA, 25 bp, Homo sapien
catactgagtaaaattccgtgttac

SEQ ID NO: 91318 - DNA, 25 bp, Homo sapien
catactgagtaatattccgtgttac

SEQ ID NO: 91319 - DNA, 25 bp, Homo sapien
gctccctctcaactgtttcttggtc

SEQ ID NO: 91320 - DNA, 25 bp, Homo sapien
gctccctctcaagtgtttcttggtc

SEQ ID NO: 91321 - DNA, 25 bp, Homo sapien
tcacgtctccgttgctatgtacgta

SEQ ID NO: 91322 - DNA, 25 bp, Homo sapien
tcacgtctccgtagctatgtacgta

SEQ ID NO: 91323 - DNA, 25 bp, Homo sapien
gttctatgtcggtgtatctgtcgtc

SEQ ID NO: 91324 - DNA, 25 bp, Homo sapien
gttctatgtcggagtatctgtcgtc

SEQ ID NO: 91325 - DNA, 25 bp, Homo sapien
gtgaagacccttggtgaaccgcgcc

SEQ ID NO: 91326 - DNA, 25 bp, Homo sapien
gtgaagacccttcgtgaaccgcgcc

SEQ ID NO: 91327 - DNA, 25 bp, Homo sapien
tactacccttaccgtaacatctgga

SEQ ID NO: 91328 - DNA, 25 bp, Homo sapien
tactacccttacggtaacatctgga

SEQ ID NO: 91329 - DNA, 25 bp, Homo sapien
ttcataacgttgtccgggtgtccaa

SEQ ID NO: 91330 - DNA, 25 bp, Homo sapien
ttcataacgttgaccgggtgtccaa

SEQ ID NO: 91331 - DNA, 25 bp, Homo sapien
tacatcttcctctgtggccaccgat

SEQ ID NO: 91332 - DNA, 25 bp, Homo sapien
tacatcttcctcagtggccaccgat

SEQ ID NO: 91333 - DNA, 25 bp, Homo sapien
gtgtcctacgtccaagggtccatga

SEQ ID NO: 91334 - DNA, 25 bp, Homo sapien
gtgtcctacgtcgaagggtccatga

SEQ ID NO: 91335 - DNA, 25 bp, Homo sapien
ttgcaagtcgagagaggacattaca

SEQ ID NO: 91336 - DNA, 25 bp, Homo sapien
ttgcaagtcgagtgaggacattaca

SEQ ID NO: 91337 - DNA, 25 bp, Homo sapien
taggcgaacctaagtgatgccctaa

SEQ ID NO: 91338 - DNA, 25 bp, Homo sapien
taggcgaacctatgtgatgccctaa

SEQ ID NO: 91339 - DNA, 25 bp, Homo sapien
tgtccacacacatcggatcggccaa

SEQ ID NO: 91340 - DNA, 25 bp, Homo sapien
tgtccacacacaacggatcggccaa

SEQ ID NO: 91341 - DNA, 25 bp, Homo sapien
acccaagacaggagccagtccagac

SEQ ID NO: 91342 - DNA, 25 bp, Homo sapien
acccaagacaggtgccagtccagac

SEQ ID NO: 91343 - DNA, 25 bp, Homo sapien
aagacagtccgtcgtcgtaatgacc

SEQ ID NO: 91344 - DNA, 25 bp, Homo sapien
aagacagtccgtggtcgtaatgacc

SEQ ID NO: 91345 - DNA, 25 bp, Homo sapien
agatagggtccgggatgttaacgag

SEQ ID NO: 91346 - DNA, 25 bp, Homo sapien
agatagggtccgcgatgttaacgag

SEQ ID NO: 91347 - DNA, 25 bp, Homo sapien
agagagagacttatatgttgcacac

SEQ ID NO: 91348 - DNA, 25 bp, Homo sapien
agagagagacttttatgttgcacac

SEQ ID NO: 91349 - DNA, 25 bp, Homo sapien
aagagagtaacattaaactttgacc

SEQ ID NO: 91350 - DNA, 25 bp, Homo sapien
aagagagtaacaataaactttgacc

SEQ ID NO: 91351 - DNA, 25 bp, Homo sapien
taacggagaagttgtaatcccacga

SEQ ID NO: 91352 - DNA, 25 bp, Homo sapien
taacggagaagtagtaatcccacga

SEQ ID NO: 91353 - DNA, 25 bp, Homo sapien
agacgttgaattaacttccgtacca

SEQ ID NO: 91354 - DNA, 25 bp, Homo sapien
agacgttgaatttacttccgtacca

SEQ ID NO: 91355 - DNA, 25 bp, Homo sapien
atgatgtctatattgtgtactatat

SEQ ID NO: 91356 - DNA, 25 bp, Homo sapien
atgatgtctataatgtgtactatat

SEQ ID NO: 91357 - DNA, 25 bp, Homo sapien
agttcatcgtggaaggtatcgtcgt

SEQ ID NO: 91358 - DNA, 25 bp, Homo sapien
agttcatcgtggtaggtatcgtcgt

SEQ ID NO: 91359 - DNA, 25 bp, Homo sapien
tctcaggtctctagggttaccgggg

SEQ ID NO: 91360 - DNA, 25 bp, Homo sapien
tctcaggtctcttgggttaccgggg

SEQ ID NO: 91361 - DNA, 25 bp, Homo sapien
tctcagcactcgtggtagtccgggg

SEQ ID NO: 91362 - DNA, 25 bp, Homo sapien
tctcagcactcgaggtagtccgggg

SEQ ID NO: 91363 - DNA, 25 bp, Homo sapien
atcccctgagggatgtccgtgcgtc

SEQ ID NO: 91364 - DNA, 25 bp, Homo sapien
atcccctgagggttgtccgtgcgtc

SEQ ID NO: 91365 - DNA, 25 bp, Homo sapien
cacctaagtcggtacgtacctgacc

SEQ ID NO: 91366 - DNA, 25 bp, Homo sapien
cacctaagtcggaacgtacctgacc

SEQ ID NO: 91367 - DNA, 25 bp, Homo sapien
ggtgtccctgcagtgtccgtgtccg

SEQ ID NO: 91368 - DNA, 25 bp, Homo sapien
ggtgtccctgcactgtccgtgtccg

SEQ ID NO: 91369 - DNA, 25 bp, Homo sapien
acctctcctaggaacctctactcgt

SEQ ID NO: 91370 - DNA, 25 bp, Homo sapien
acctctcctaggtacctctactcgt

SEQ ID NO: 91371 - DNA, 25 bp, Homo sapien
ggaggcctcttccttcaaaggtccg

SEQ ID NO: 91372 - DNA, 25 bp, Homo sapien
ggaggcctcttcgttcaaaggtccg

SEQ ID NO: 91373 - DNA, 25 bp, Homo sapien
acaatcggtcctaccagaggtagag

SEQ ID NO: 91374 - DNA, 25 bp, Homo sapien
acaatcggtccttccagaggtagag

SEQ ID NO: 91375 - DNA, 25 bp, Homo sapien
cctaccggttctctatcaaaggaat

SEQ ID NO: 91376 - DNA, 25 bp, Homo sapien
cctaccggttctgtatcaaaggaat

SEQ ID NO: 91377 - DNA, 25 bp, Homo sapien
cctcggttatctcttagaagggtta

SEQ ID NO: 91378 - DNA, 25 bp, Homo sapien
cctcggttatctgttagaagggtta

SEQ ID NO: 91379 - DNA, 25 bp, Homo sapien
gactcactgcgctccgaagtttgcg

SEQ ID NO: 91380 - DNA, 25 bp, Homo sapien
gactcactgcgcaccgaagtttgcg

SEQ ID NO: 91381 - DNA, 25 bp, Homo sapien
cgtcagaagcgacacgacagattgg

SEQ ID NO: 91382 - DNA, 25 bp, Homo sapien
cgtcagaagcgagacgacagattgg

SEQ ID NO: 91383 - DNA, 25 bp, Homo sapien
cagaagaccagtagacactgtaccg

SEQ ID NO: 91384 - DNA, 25 bp, Homo sapien
cagaagaccagttgacactgtaccg

SEQ ID NO: 91385 - DNA, 25 bp, Homo sapien
gaaacaactacattcgaaagtaccg

SEQ ID NO: 91386 - DNA, 25 bp, Homo sapien
gaaacaactacaatcgaaagtaccg

SEQ ID NO: 91387 - DNA, 25 bp, Homo sapien
ggaacgagtaaaagctctaaatctt

SEQ ID NO: 91388 - DNA, 25 bp, Homo sapien
ggaacgagtaaatgctctaaatctt

SEQ ID NO: 91389 - DNA, 25 bp, Homo sapien
gacttcaacagaaattcctgttttg

SEQ ID NO: 91390 - DNA, 25 bp, Homo sapien
gacttcaacagatattcctgttttg

SEQ ID NO: 91391 - DNA, 25 bp, Homo sapien
gttcaaagaacattctgtcttttgt

SEQ ID NO: 91392 - DNA, 25 bp, Homo sapien
gttcaaagaacaatctgtcttttgt

SEQ ID NO: 91393 - DNA, 25 bp, Homo sapien
cttcaaggggaaatatcgtgttctg

SEQ ID NO: 91394 - DNA, 25 bp, Homo sapien
cttcaaggggaattatcgtgttctg

SEQ ID NO: 91395 - DNA, 25 bp, Homo sapien
gacaaggtggactttgtgtacccct

SEQ ID NO: 91396 - DNA, 25 bp, Homo sapien
gacaaggtggacattgtgtacccct

SEQ ID NO: 91397 - DNA, 25 bp, Homo sapien
ttgggactcgggacactttggaccc

SEQ ID NO: 91398 - DNA, 25 bp, Homo sapien
ttgggactcgggtcactttggaccc

SEQ ID NO: 91399 - DNA, 25 bp, Homo sapien
tgtgacatgcagtcctttgtaacca

SEQ ID NO: 91400 - DNA, 25 bp, Homo sapien
tgtgacatgcagacctttgtaacca

SEQ ID NO: 91401 - DNA, 25 bp, Homo sapien
cgtttgcatcattatcagacagtaa

SEQ ID NO: 91402 - DNA, 25 bp, Homo sapien
cgtttgcatcataatcagacagtaa

SEQ ID NO: 91403 - DNA, 25 bp, Homo sapien
cgtttgaccggttcactaaataaac

SEQ ID NO: 91404 - DNA, 25 bp, Homo sapien
cgtttgaccggtacactaaataaac

SEQ ID NO: 91405 - DNA, 25 bp, Homo sapien
ctttcgtccggcaaaagttacagtg

SEQ ID NO: 91406 - DNA, 25 bp, Homo sapien
ctttcgtccggctaaagttacagtg

SEQ ID NO: 91407 - DNA, 25 bp, Homo sapien
gttcgtgtcgggacgactcgaaatg

SEQ ID NO: 91408 - DNA, 25 bp, Homo sapien
gttcgtgtcgggtcgactcgaaatg

SEQ ID NO: 91409 - DNA, 25 bp, Homo sapien
aattctcggtgtcaaccgactccac

SEQ ID NO: 91410 - DNA, 25 bp, Homo sapien
aattctcggtgtgaaccgactccac

SEQ ID NO: 91411 - DNA, 25 bp, Homo sapien
aatagtatccgtatctatgacccta

SEQ ID NO: 91412 - DNA, 25 bp, Homo sapien
aatagtatccgtttctatgacccta

SEQ ID NO: 91413 - DNA, 25 bp, Homo sapien
ttcgactatttggagtagacctgtc

SEQ ID NO: 91414 - DNA, 25 bp, Homo sapien
ttcgactatttgcagtagacctgtc

SEQ ID NO: 91415 - DNA, 25 bp, Homo sapien
cgtgactactatgtctacccacggc

SEQ ID NO: 91416 - DNA, 25 bp, Homo sapien
cgtgactactatctctacccacggc

SEQ ID NO: 91417 - DNA, 25 bp, Homo sapien
tgtcgggatctatcccgatgccggg

SEQ ID NO: 91418 - DNA, 25 bp, Homo sapien
tgtcgggatctaacccgatgccggg

SEQ ID NO: 91419 - DNA, 25 bp, Homo sapien
ttttcgagactcgtagtccgttgag

SEQ ID NO: 91420 - DNA, 25 bp, Homo sapien
ttttcgagactcctagtccgttgag

SEQ ID NO: 91421 - DNA, 25 bp, Homo sapien
tgtcagagtggaacaacgaatcccg

SEQ ID NO: 91422 - DNA, 25 bp, Homo sapien
tgtcagagtggatcaacgaatcccg

SEQ ID NO: 91423 - DNA, 25 bp, Homo sapien
ccaataagttgaacgtggtacggcg

SEQ ID NO: 91424 - DNA, 25 bp, Homo sapien
ccaataagttgatcgtggtacggcg

SEQ ID NO: 91425 - DNA, 25 bp, Homo sapien
ctgtacaagtccctagcggtccgca

SEQ ID NO: 91426 - DNA, 25 bp, Homo sapien
ctgtacaagtccgtagcggtccgca

SEQ ID NO: 91427 - DNA, 25 bp, Homo sapien
cttatgaagaccaggaaaccctata

SEQ ID NO: 91428 - DNA, 25 bp, Homo sapien
cttatgaagacctggaaaccctata

SEQ ID NO: 91429 - DNA, 25 bp, Homo sapien
gtctgtaattttggagacggaccga

SEQ ID NO: 91430 - DNA, 25 bp, Homo sapien
gtctgtaattttcgagacggaccga

SEQ ID NO: 91431 - DNA, 25 bp, Homo sapien
tccgacactgtgaaggctccggtat

SEQ ID NO: 91432 - DNA, 25 bp, Homo sapien
tccgacactgtgtaggctccggtat

SEQ ID NO: 91433 - DNA, 25 bp, Homo sapien
ggatctcctgtgtcccgtccagtgt

SEQ ID NO: 91434 - DNA, 25 bp, Homo sapien
ggatctcctgtgacccgtccagtgt

SEQ ID NO: 91435 - DNA, 25 bp, Homo sapien
tgagttctacaaggaatctttatct

SEQ ID NO: 91436 - DNA, 25 bp, Homo sapien
tgagttctacaacgaatctttatct

SEQ ID NO: 91437 - DNA, 25 bp, Homo sapien
ctatcgtcagacgtgttctctcaac

SEQ ID NO: 91438 - DNA, 25 bp, Homo sapien
ctatcgtcagacctgttctctcaac

SEQ ID NO: 91439 - DNA, 25 bp, Homo sapien
ggttaagtcaattctcgtcctccga

SEQ ID NO: 91440 - DNA, 25 bp, Homo sapien
ggttaagtcaatactcgtcctccga

SEQ ID NO: 91441 - DNA, 25 bp, Homo sapien
ggagtagaccgaacaacgtccccaa

SEQ ID NO: 91442 - DNA, 25 bp, Homo sapien
ggagtagaccgatcaacgtccccaa

SEQ ID NO: 91443 - DNA, 25 bp, Homo sapien
ccgggactgaagaccttacacacac

SEQ ID NO: 91444 - DNA, 25 bp, Homo sapien
ccgggactgaagtccttacacacac

SEQ ID NO: 91445 - DNA, 25 bp, Homo sapien
aaggaaaagggtactgtagacctac

SEQ ID NO: 91446 - DNA, 25 bp, Homo sapien
aaggaaaagggttctgtagacctac

SEQ ID NO: 91447 - DNA, 25 bp, Homo sapien
ttcatacataaaagtcttttccagt

SEQ ID NO: 91448 - DNA, 25 bp, Homo sapien
ttcatacataaatgtcttttccagt

SEQ ID NO: 91449 - DNA, 25 bp, Homo sapien
aaaagaacctgtgtccacacgacaa

SEQ ID NO: 91450 - DNA, 25 bp, Homo sapien
aaaagaacctgtctccacacgacaa

SEQ ID NO: 91451 - DNA, 25 bp, Homo sapien
atcagacggtcacttccaccagaga

SEQ ID NO: 91452 - DNA, 25 bp, Homo sapien
atcagacggtcagttccaccagaga

SEQ ID NO: 91453 - DNA, 25 bp, Homo sapien
acaggccgtagtttcccgtcgaggg

SEQ ID NO: 91454 - DNA, 25 bp, Homo sapien
acaggccgtagtatcccgtcgaggg

SEQ ID NO: 91455 - DNA, 25 bp, Homo sapien
agacccccgtggtcgacctcaagag

SEQ ID NO: 91456 - DNA, 25 bp, Homo sapien
agacccccgtggacgacctcaagag

SEQ ID NO: 91457 - DNA, 25 bp, Homo sapien
actttacgactgtaccatctggaca

SEQ ID NO: 91458 - DNA, 25 bp, Homo sapien
actttacgactgaaccatctggaca

SEQ ID NO: 91459 - DNA, 25 bp, Homo sapien
aagtcgactagttggctttcagaga

SEQ ID NO: 91460 - DNA, 25 bp, Homo sapien
aagtcgactagtaggctttcagaga

SEQ ID NO: 91461 - DNA, 25 bp, Homo sapien
tagtctgattgacgacaacgtaaga

SEQ ID NO: 91462 - DNA, 25 bp, Homo sapien
tagtctgattgaggacaacgtaaga

SEQ ID NO: 91463 - DNA, 25 bp, Homo sapien
cttctgtttgtgtcggtctagtgta

SEQ ID NO: 91464 - DNA, 25 bp, Homo sapien
cttctgtttgtgacggtctagtgta

SEQ ID NO: 91465 - DNA, 25 bp, Homo sapien
attgatttaggtcagacactatgtc

SEQ ID NO: 91466 - DNA, 25 bp, Homo sapien
attgatttaggtgagacactatgtc

SEQ ID NO: 91467 - DNA, 25 bp, Homo sapien
gatgtgctcaataacgaccacttct

SEQ ID NO: 91468 - DNA, 25 bp, Homo sapien
gatgtgctcaattacgaccacttct

SEQ ID NO: 91469 - DNA, 25 bp, Homo sapien
ttttatcgtattccacttcgcgtgt

SEQ ID NO: 91470 - DNA, 25 bp, Homo sapien
ttttatcgtattgcacttcgcgtgt

SEQ ID NO: 91471 - DNA, 25 bp, Homo sapien
ttagttctctgattgttatcaccga

SEQ ID NO: 91472 - DNA, 25 bp, Homo sapien
ttagttctctgaatgttatcaccga

SEQ ID NO: 91473 - DNA, 25 bp, Homo sapien
gatgtctgcctttttgtccgtcact

SEQ ID NO: 91474 - DNA, 25 bp, Homo sapien
gatgtctgccttattgtccgtcact

SEQ ID NO: 91475 - DNA, 25 bp, Homo sapien
agtgttttaggttatatgtcctctc

SEQ ID NO: 91476 - DNA, 25 bp, Homo sapien
agtgttttaggtaatatgtcctctc

SEQ ID NO: 91477 - DNA, 25 bp, Homo sapien
agatgtattactgtcacaaacgtga

SEQ ID NO: 91478 - DNA, 25 bp, Homo sapien
agatgtattactctcacaaacgtga

SEQ ID NO: 91479 - DNA, 25 bp, Homo sapien
tgttaagttactgtacacatcagga

SEQ ID NO: 91480 - DNA, 25 bp, Homo sapien
tgttaagttactctacacatcagga

SEQ ID NO: 91481 - DNA, 25 bp, Homo sapien
gtcctccgatctcctctgtctggta

SEQ ID NO: 91482 - DNA, 25 bp, Homo sapien
gtcctccgatctgctctgtctggta

SEQ ID NO: 91483 - DNA, 25 bp, Homo sapien
ggtccccgtaaatctattctcaacg

SEQ ID NO: 91484 - DNA, 25 bp, Homo sapien
ggtccccgtaaaactattctcaacg

SEQ ID NO: 91485 - DNA, 25 bp, Homo sapien
cggacgatgaattcgttctatgttt

SEQ ID NO: 91486 - DNA, 25 bp, Homo sapien
cggacgatgaatacgttctatgttt

SEQ ID NO: 91487 - DNA, 25 bp, Homo sapien
tacggaataaacacaacgtatgtaa

SEQ ID NO: 91488 - DNA, 25 bp, Homo sapien
tacggaataaactcaacgtatgtaa

SEQ ID NO: 91489 - DNA, 25 bp, Homo sapien
gttaatcctactcgacgaatgagta

SEQ ID NO: 91490 - DNA, 25 bp, Homo sapien
gttaatcctactggacgaatgagta

SEQ ID NO: 91491 - DNA, 25 bp, Homo sapien
cacaaactccctaagtcaagaggtt

SEQ ID NO: 91492 - DNA, 25 bp, Homo sapien
cacaaactcccttagtcaagaggtt

SEQ ID NO: 91493 - DNA, 25 bp, Homo sapien
tttcgtctcgtctctcgcaaaaggt

SEQ ID NO: 91494 - DNA, 25 bp, Homo sapien
tttcgtctcgtcactcgcaaaaggt

SEQ ID NO: 91495 - DNA, 25 bp, Homo sapien
cttcatgtgcctacccaggtaaggt

SEQ ID NO: 91496 - DNA, 25 bp, Homo sapien
cttcatgtgccttcccaggtaaggt

SEQ ID NO: 91497 - DNA, 25 bp, Homo sapien
acccgaccgtggtcacgagacgaga

SEQ ID NO: 91498 - DNA, 25 bp, Homo sapien
acccgaccgtggacacgagacgaga

SEQ ID NO: 91499 - DNA, 25 bp, Homo sapien
gggtcggatccgagacccgtgtaaa

SEQ ID NO: 91500 - DNA, 25 bp, Homo sapien
gggtcggatccgtgacccgtgtaaa

SEQ ID NO: 91501 - DNA, 25 bp, Homo sapien
ggggtctacgggacctccgtctcag

SEQ ID NO: 91502 - DNA, 25 bp, Homo sapien
ggggtctacgggtcctccgtctcag

SEQ ID NO: 91503 - DNA, 25 bp, Homo sapien
cctggacccgggtacgagaccgtga

SEQ ID NO: 91504 - DNA, 25 bp, Homo sapien
cctggacccgggaacgagaccgtga

SEQ ID NO: 91505 - DNA, 25 bp, Homo sapien
accaaggccgaggtttcgactcgaa

SEQ ID NO: 91506 - DNA, 25 bp, Homo sapien
accaaggccgagctttcgactcgaa

SEQ ID NO: 91507 - DNA, 25 bp, Homo sapien
gaccaagggtagtggtcgtctccca

SEQ ID NO: 91508 - DNA, 25 bp, Homo sapien
gaccaagggtagaggtcgtctccca

SEQ ID NO: 91509 - DNA, 25 bp, Homo sapien
ctcgacgtggggtctgaaccacacg

SEQ ID NO: 91510 - DNA, 25 bp, Homo sapien
ctcgacgtggggactgaaccacacg

SEQ ID NO: 91511 - DNA, 25 bp, Homo sapien
actcagggaggactaagagcctacg

SEQ ID NO: 91512 - DNA, 25 bp, Homo sapien
actcagggaggagtaagagcctacg

SEQ ID NO: 91513 - DNA, 25 bp, Homo sapien
tggaggaaggtaacttgactccggt

SEQ ID NO: 91514 - DNA, 25 bp, Homo sapien
tggaggaaggtatcttgactccggt

SEQ ID NO: 91515 - DNA, 25 bp, Homo sapien
ggagcggcgtcgttcataacaactg

SEQ ID NO: 91516 - DNA, 25 bp, Homo sapien
ggagcggcgtcgatcataacaactg

SEQ ID NO: 91517 - DNA, 25 bp, Homo sapien
aaacatggcacgtcaagaacgatgt

SEQ ID NO: 91518 - DNA, 25 bp, Homo sapien
aaacatggcacgacaagaacgatgt

SEQ ID NO: 91519 - DNA, 25 bp, Homo sapien
gacattactgcgtcgtcataggatc

SEQ ID NO: 91520 - DNA, 25 bp, Homo sapien
gacattactgcgacgtcataggatc

SEQ ID NO: 91521 - DNA, 25 bp, Homo sapien
gacaggttctagaagaactacagga

SEQ ID NO: 91522 - DNA, 25 bp, Homo sapien
gacaggttctagtagaactacagga

SEQ ID NO: 91523 - DNA, 25 bp, Homo sapien
gagaggcatagtggtcgatcctcga

SEQ ID NO: 91524 - DNA, 25 bp, Homo sapien
gagaggcatagtcgtcgatcctcga

SEQ ID NO: 91525 - DNA, 25 bp, Homo sapien
gtgtcgtgaggtacctactcctgag

SEQ ID NO: 91526 - DNA, 25 bp, Homo sapien
gtgtcgtgaggttcctactcctgag

SEQ ID NO: 91527 - DNA, 25 bp, Homo sapien
ggaggcaccgcagagtcgtcgtcta

SEQ ID NO: 91528 - DNA, 25 bp, Homo sapien
ggaggcaccgcacagtcgtcgtcta

SEQ ID NO: 91529 - DNA, 25 bp, Homo sapien
gacgggttaccgttggtggtacttc

SEQ ID NO: 91530 - DNA, 25 bp, Homo sapien
gacgggttaccgatggtggtacttc

SEQ ID NO: 91531 - DNA, 25 bp, Homo sapien
acgaagcaacgagtgaacgactaac

SEQ ID NO: 91532 - DNA, 25 bp, Homo sapien
acgaagcaacgactgaacgactaac

SEQ ID NO: 91533 - DNA, 25 bp, Homo sapien
tcgaggaacgtgatacgaatacaac

SEQ ID NO: 91534 - DNA, 25 bp, Homo sapien
tcgaggaacgtgttacgaatacaac

SEQ ID NO: 91535 - DNA, 25 bp, Homo sapien
acctctcttgagtggaggactaata

SEQ ID NO: 91536 - DNA, 25 bp, Homo sapien
acctctcttgagaggaggactaata

SEQ ID NO: 91537 - DNA, 25 bp, Homo sapien
tcttctcttaatcgtcgacaccgga

SEQ ID NO: 91538 - DNA, 25 bp, Homo sapien
tcttctcttaatggtcgacaccgga

SEQ ID NO: 91539 - DNA, 25 bp, Homo sapien
tcctaaatgtcgttctacgatgtgt

SEQ ID NO: 91540 - DNA, 25 bp, Homo sapien
tcctaaatgtcgatctacgatgtgt

SEQ ID NO: 91541 - DNA, 25 bp, Homo sapien
aggtctccgtctttgaacgaggttc

SEQ ID NO: 91542 - DNA, 25 bp, Homo sapien
aggtctccgtctatgaacgaggttc

SEQ ID NO: 91543 - DNA, 25 bp, Homo sapien
gtcgacgtcgatacaatcacgaaga

SEQ ID NO: 91544 - DNA, 25 bp, Homo sapien
gtcgacgtcgattcaatcacgaaga

SEQ ID NO: 91545 - DNA, 25 bp, Homo sapien
ccgtcgactttccactatcgtcaga

SEQ ID NO: 91546 - DNA, 25 bp, Homo sapien
ccgtcgactttcgactatcgtcaga

SEQ ID NO: 91547 - DNA, 25 bp, Homo sapien
agaagagatcattgtaatcgtacca

SEQ ID NO: 91548 - DNA, 25 bp, Homo sapien
agaagagatcatagtaatcgtacca

SEQ ID NO: 91549 - DNA, 25 bp, Homo sapien
gaacagaaactacatgagcgtcaac

SEQ ID NO: 91550 - DNA, 25 bp, Homo sapien
gaacagaaactagatgagcgtcaac

SEQ ID NO: 91551 - DNA, 25 bp, Homo sapien
tcaacggaagatggtgtaacagcct

SEQ ID NO: 91552 - DNA, 25 bp, Homo sapien
tcaacggaagatcgtgtaacagcct

SEQ ID NO: 91553 - DNA, 25 bp, Homo sapien
gtgtagtcttgaagcgtgtgacccc

SEQ ID NO: 91554 - DNA, 25 bp, Homo sapien
gtgtagtcttgatgcgtgtgacccc

SEQ ID NO: 91555 - DNA, 25 bp, Homo sapien
gactctctctgtaaaaggtgcctcc

SEQ ID NO: 91556 - DNA, 25 bp, Homo sapien
gactctctctgttaaaggtgcctcc

SEQ ID NO: 91557 - DNA, 25 bp, Homo sapien
cgttcttctcaatggagtcgccgcc

SEQ ID NO: 91558 - DNA, 25 bp, Homo sapien
cgttcttctcaaaggagtcgccgcc

SEQ ID NO: 91559 - DNA, 25 bp, Homo sapien
aagtcagtccagaaggaggaccacc

SEQ ID NO: 91560 - DNA, 25 bp, Homo sapien
aagtcagtccagtaggaggaccacc

SEQ ID NO: 91561 - DNA, 25 bp, Homo sapien
agactagaagtcaaagaattaccca

SEQ ID NO: 91562 - DNA, 25 bp, Homo sapien
agactagaagtctaagaattaccca

SEQ ID NO: 91563 - DNA, 25 bp, Homo sapien
caggtaagttgaattatacatccat

SEQ ID NO: 91564 - DNA, 25 bp, Homo sapien
caggtaagttgatttatacatccat

SEQ ID NO: 91565 - DNA, 25 bp, Homo sapien
aggatacttaattgtatacctgaga

SEQ ID NO: 91566 - DNA, 25 bp, Homo sapien
aggatacttaatagtatacctgaga

SEQ ID NO: 91567 - DNA, 25 bp, Homo sapien
actgttaaaactagggtactcttcg

SEQ ID NO: 91568 - DNA, 25 bp, Homo sapien
actgttaaaacttgggtactcttcg

SEQ ID NO: 91569 - DNA, 25 bp, Homo sapien
gtcgtgtcaagtgtaggtattcttc

SEQ ID NO: 91570 - DNA, 25 bp, Homo sapien
gtcgtgtcaagtctaggtattcttc

SEQ ID NO: 91571 - DNA, 25 bp, Homo sapien
cgagcgttcaactccgttaaagaat

SEQ ID NO: 91572 - DNA, 25 bp, Homo sapien
cgagcgttcaacaccgttaaagaat

SEQ ID NO: 91573 - DNA, 25 bp, Homo sapien
gttgttcactagacctaagttagaa

SEQ ID NO: 91574 - DNA, 25 bp, Homo sapien
gttgttcactagtcctaagttagaa

SEQ ID NO: 91575 - DNA, 25 bp, Homo sapien
tacaataaccgtcagtcgtcgagtt

SEQ ID NO: 91576 - DNA, 25 bp, Homo sapien
tacaataaccgtgagtcgtcgagtt

SEQ ID NO: 91577 - DNA, 25 bp, Homo sapien
tatacgacaagagtcacgtgaggtt

SEQ ID NO: 91578 - DNA, 25 bp, Homo sapien
tatacgacaagactcacgtgaggtt

SEQ ID NO: 91579 - DNA, 25 bp, Homo sapien
ataggacagcacagaagagacactt

SEQ ID NO: 91580 - DNA, 25 bp, Homo sapien
ataggacagcactgaagagacactt

SEQ ID NO: 91581 - DNA, 25 bp, Homo sapien
gtcgagcagcttgaagtacgactgc

SEQ ID NO: 91582 - DNA, 25 bp, Homo sapien
gtcgagcagcttcaagtacgactgc

SEQ ID NO: 91583 - DNA, 25 bp, Homo sapien
ttgtctgtcctaacacactcgtcga

SEQ ID NO: 91584 - DNA, 25 bp, Homo sapien
ttgtctgtcctatcacactcgtcga

SEQ ID NO: 91585 - DNA, 25 bp, Homo sapien
caacctgtttcaatcacagtcgtga

SEQ ID NO: 91586 - DNA, 25 bp, Homo sapien
caacctgtttcattcacagtcgtga

SEQ ID NO: 91587 - DNA, 25 bp, Homo sapien
acacgtcttacttttcggtgccgat

SEQ ID NO: 91588 - DNA, 25 bp, Homo sapien
acacgtcttactattcggtgccgat

SEQ ID NO: 91589 - DNA, 25 bp, Homo sapien
aagtctcgttctacttgtcttagac

SEQ ID NO: 91590 - DNA, 25 bp, Homo sapien
aagtctcgttcttcttgtcttagac

SEQ ID NO: 91591 - DNA, 25 bp, Homo sapien
gggaaaacctgaagtcttcttccag

SEQ ID NO: 91592 - DNA, 25 bp, Homo sapien
gggaaaacctgatgtcttcttccag

SEQ ID NO: 91593 - DNA, 25 bp, Homo sapien
agataccgtttagatttgtcactag

SEQ ID NO: 91594 - DNA, 25 bp, Homo sapien
agataccgtttacatttgtcactag

SEQ ID NO: 91595 - DNA, 25 bp, Homo sapien
tcttgagtttcaaccccgggagctg

SEQ ID NO: 91596 - DNA, 25 bp, Homo sapien
tcttgagtttcatccccgggagctg

SEQ ID NO: 91597 - DNA, 25 bp, Homo sapien
ttgttttggaccttcggagttctgt

SEQ ID NO: 91598 - DNA, 25 bp, Homo sapien
ttgttttggaccatcggagttctgt

SEQ ID NO: 91599 - DNA, 25 bp, Homo sapien
gtttagacacgaaagaccgtcgacc

SEQ ID NO: 91600 - DNA, 25 bp, Homo sapien
gtttagacacgatagaccgtcgacc

SEQ ID NO: 91601 - DNA, 25 bp, Homo sapien
gctgtctcatctaccgacagacatg

SEQ ID NO: 91602 - DNA, 25 bp, Homo sapien
gctgtctcatcttccgacagacatg

SEQ ID NO: 91603 - DNA, 25 bp, Homo sapien
ctgtcacttctgtacgacctatcta

SEQ ID NO: 91604 - DNA, 25 bp, Homo sapien
ctgtcacttctgaacgacctatcta

SEQ ID NO: 91605 - DNA, 25 bp, Homo sapien
cgatatttcctttgacaggtattta

SEQ ID NO: 91606 - DNA, 25 bp, Homo sapien
cgatatttccttagacaggtattta

SEQ ID NO: 91607 - DNA, 25 bp, Homo sapien
taagtacccttaagtcaccctgttg

SEQ ID NO: 91608 - DNA, 25 bp, Homo sapien
taagtacccttatgtcaccctgttg

SEQ ID NO: 91609 - DNA, 25 bp, Homo sapien
ctctacaacccctttttgtcggttg

SEQ ID NO: 91610 - DNA, 25 bp, Homo sapien
ctctacaaccccattttgtcggttg

SEQ ID NO: 91611 - DNA, 25 bp, Homo sapien
cccgaggtaccgagaaatcgtgtcc

SEQ ID NO: 91612 - DNA, 25 bp, Homo sapien
cccgaggtaccgtgaaatcgtgtcc

SEQ ID NO: 91613 - DNA, 25 bp, Homo sapien
cccctaggctcaggtgaaggtgcga

SEQ ID NO: 91614 - DNA, 25 bp, Homo sapien
cccctaggctcacgtgaaggtgcga

SEQ ID NO: 91615 - DNA, 25 bp, Homo sapien
gccatctgaagctagaacgaccgga

SEQ ID NO: 91616 - DNA, 25 bp, Homo sapien
gccatctgaagcaagaacgaccgga

SEQ ID NO: 91617 - DNA, 25 bp, Homo sapien
ccgtcgaagtaaaagttacccgagt

SEQ ID NO: 91618 - DNA, 25 bp, Homo sapien
ccgtcgaagtaatagttacccgagt

SEQ ID NO: 91619 - DNA, 25 bp, Homo sapien
gagtcgtcatcgaagcccagaccgg

SEQ ID NO: 91620 - DNA, 25 bp, Homo sapien
gagtcgtcatcgtagcccagaccgg

SEQ ID NO: 91621 - DNA, 25 bp, Homo sapien
ctaggattcctcgttcccgagcctt

SEQ ID NO: 91622 - DNA, 25 bp, Homo sapien
ctaggattcctccttcccgagcctt

SEQ ID NO: 91623 - DNA, 25 bp, Homo sapien
tgggatcactcctcgaccaacagtg

SEQ ID NO: 91624 - DNA, 25 bp, Homo sapien
tgggatcactccacgaccaacagtg

SEQ ID NO: 91625 - DNA, 25 bp, Homo sapien
agggggtcctgcacgacacgaaatt

SEQ ID NO: 91626 - DNA, 25 bp, Homo sapien
agggggtcctgctcgacacgaaatt

SEQ ID NO: 91627 - DNA, 25 bp, Homo sapien
gttcacgatacagtacacgcaagtc

SEQ ID NO: 91628 - DNA, 25 bp, Homo sapien
gttcacgatacactacacgcaagtc

SEQ ID NO: 91629 - DNA, 25 bp, Homo sapien
gggagttcacaaacaactacccctt

SEQ ID NO: 91630 - DNA, 25 bp, Homo sapien
gggagttcacaatcaactacccctt

SEQ ID NO: 91631 - DNA, 25 bp, Homo sapien
aggtctatatctagaacggtgtctc

SEQ ID NO: 91632 - DNA, 25 bp, Homo sapien
aggtctatatcttgaacggtgtctc

SEQ ID NO: 91633 - DNA, 25 bp, Homo sapien
caaagatactatttcagggtctgaa

SEQ ID NO: 91634 - DNA, 25 bp, Homo sapien
caaagatactatatcagggtctgaa

SEQ ID NO: 91635 - DNA, 25 bp, Homo sapien
acgggctactcatttgtcgtcggaa

SEQ ID NO: 91636 - DNA, 25 bp, Homo sapien
acgggctactcaattgtcgtcggaa

SEQ ID NO: 91637 - DNA, 25 bp, Homo sapien
tgtcgggtcgctgtctgtccaggaa

SEQ ID NO: 91638 - DNA, 25 bp, Homo sapien
tgtcgggtcgctctctgtccaggaa

SEQ ID NO: 91639 - DNA, 25 bp, Homo sapien
gggtgtatttcctttaccatctctc

SEQ ID NO: 91640 - DNA, 25 bp, Homo sapien
gggtgtatttccattaccatctctc

SEQ ID NO: 91641 - DNA, 25 bp, Homo sapien
gtcaggtatttcactgtcaactccc

SEQ ID NO: 91642 - DNA, 25 bp, Homo sapien
gtcaggtatttctctgtcaactccc

SEQ ID NO: 91643 - DNA, 25 bp, Homo sapien
atgtgttgtgtttcccctttcaact

SEQ ID NO: 91644 - DNA, 25 bp, Homo sapien
atgtgttgtgttacccctttcaact

SEQ ID NO: 91645 - DNA, 25 bp, Homo sapien
ttgtcttttcacatcctttaggacg

SEQ ID NO: 91646 - DNA, 25 bp, Homo sapien
ttgtcttttcacttcctttaggacg

SEQ ID NO: 91647 - DNA, 25 bp, Homo sapien
ttcacagtttctagggttcactagg

SEQ ID NO: 91648 - DNA, 25 bp, Homo sapien
ttcacagtttcttgggttcactagg

SEQ ID NO: 91649 - DNA, 25 bp, Homo sapien
tccactcagtttcgtgtctctgatg

SEQ ID NO: 91650 - DNA, 25 bp, Homo sapien
tccactcagtttggtgtctctgatg

SEQ ID NO: 91651 - DNA, 25 bp, Homo sapien
ttcctgtcgtctgtgagtgttgaag

SEQ ID NO: 91652 - DNA, 25 bp, Homo sapien
ttcctgtcgtctctgagtgttgaag

SEQ ID NO: 91653 - DNA, 25 bp, Homo sapien
actaccgtgcctgtgagcggtgtgc

SEQ ID NO: 91654 - DNA, 25 bp, Homo sapien
actaccgtgcctctgagcggtgtgc

SEQ ID NO: 91655 - DNA, 25 bp, Homo sapien
ccatcgttatctttgataggtgtca

SEQ ID NO: 91656 - DNA, 25 bp, Homo sapien
ccatcgttatctatgataggtgtca

SEQ ID NO: 91657 - DNA, 25 bp, Homo sapien
gctacttgcgtaactgatattctca

SEQ ID NO: 91658 - DNA, 25 bp, Homo sapien
gctacttgcgtatctgatattctca

SEQ ID NO: 91659 - DNA, 25 bp, Homo sapien
cagaaggaggtatccgtcagttcca

SEQ ID NO: 91660 - DNA, 25 bp, Homo sapien
cagaaggaggtaaccgtcagttcca

SEQ ID NO: 91661 - DNA, 25 bp, Homo sapien
ggtaagtccggaaagaacattcact

SEQ ID NO: 91662 - DNA, 25 bp, Homo sapien
ggtaagtccggatagaacattcact

SEQ ID NO: 91663 - DNA, 25 bp, Homo sapien
tatgtctggtaaaacctattatacg

SEQ ID NO: 91664 - DNA, 25 bp, Homo sapien
tatgtctggtaatacctattatacg

SEQ ID NO: 91665 - DNA, 25 bp, Homo sapien
catcaccttaaatctcatattaacg

SEQ ID NO: 91666 - DNA, 25 bp, Homo sapien
catcaccttaaaactcatattaacg

SEQ ID NO: 91667 - DNA, 25 bp, Homo sapien
tcgcagcgacacagccctgtcagag

SEQ ID NO: 91668 - DNA, 25 bp, Homo sapien
tcgcagcgacactgccctgtcagag

SEQ ID NO: 91669 - DNA, 25 bp, Homo sapien
tcgtcgagtcaagtcaaggtccagt

SEQ ID NO: 91670 - DNA, 25 bp, Homo sapien
tcgtcgagtcaactcaaggtccagt

SEQ ID NO: 91671 - DNA, 25 bp, Homo sapien
ggtacgagtcggtcacaaggtccat

SEQ ID NO: 91672 - DNA, 25 bp, Homo sapien
ggtacgagtcggacacaaggtccat

SEQ ID NO: 91673 - DNA, 25 bp, Homo sapien
cgaggagacccgtacgcaaataaag

SEQ ID NO: 91674 - DNA, 25 bp, Homo sapien
cgaggagacccgaacgcaaataaag

SEQ ID NO: 91675 - DNA, 25 bp, Homo sapien
tatgagcacgttacaacctataaag

SEQ ID NO: 91676 - DNA, 25 bp, Homo sapien
tatgagcacgtttcaacctataaag

SEQ ID NO: 91677 - DNA, 25 bp, Homo sapien
gtgtctaggtcagtggactccccta

SEQ ID NO: 91678 - DNA, 25 bp, Homo sapien
gtgtctaggtcactggactccccta

SEQ ID NO: 91679 - DNA, 25 bp, Homo sapien
aatagttgtccctgtgacacccttc

SEQ ID NO: 91680 - DNA, 25 bp, Homo sapien
aatagttgtcccagtgacacccttc

SEQ ID NO: 91681 - DNA, 25 bp, Homo sapien
acgtcgcgttgtcaaggcccctgcg

SEQ ID NO: 91682 - DNA, 25 bp, Homo sapien
acgtcgcgttgtgaaggcccctgcg

SEQ ID NO: 91683 - DNA, 25 bp, Homo sapien
gtcctaccttttggaaacctgtcac

SEQ ID NO: 91684 - DNA, 25 bp, Homo sapien
gtcctaccttttcgaaacctgtcac

SEQ ID NO: 91685 - DNA, 25 bp, Homo sapien
atcattgtaagactgacaccccgag

SEQ ID NO: 91686 - DNA, 25 bp, Homo sapien
atcattgtaagagtgacaccccgag

SEQ ID NO: 91687 - DNA, 25 bp, Homo sapien
ttacgttgttaaagaacatacaata

SEQ ID NO: 91688 - DNA, 25 bp, Homo sapien
ttacgttgttaatgaacatacaata

SEQ ID NO: 91689 - DNA, 25 bp, Homo sapien
atgtatttaaacttgaacataaata

SEQ ID NO: 91690 - DNA, 25 bp, Homo sapien
atgtatttaaacatgaacataaata

SEQ ID NO: 91691 - DNA, 25 bp, Homo sapien
acttattttttatactaaaatttct

SEQ ID NO: 91692 - DNA, 25 bp, Homo sapien
acttattttttaaactaaaatttct

SEQ ID NO: 91693 - DNA, 25 bp, Homo sapien
acgtcgcggtaacagaagactgttt

SEQ ID NO: 91694 - DNA, 25 bp, Homo sapien
acgtcgcggtaagagaagactgttt

SEQ ID NO: 91695 - DNA, 25 bp, Homo sapien
atcggacggacactccaagtgttgt

SEQ ID NO: 91696 - DNA, 25 bp, Homo sapien
atcggacggacagtccaagtgttgt

SEQ ID NO: 91697 - DNA, 25 bp, Homo sapien
aagggaaacgagtccaaggtacgag

SEQ ID NO: 91698 - DNA, 25 bp, Homo sapien
aagggaaacgagaccaaggtacgag

SEQ ID NO: 91699 - DNA, 25 bp, Homo sapien
agggtcgccgaggacctccggacac

SEQ ID NO: 91700 - DNA, 25 bp, Homo sapien
agggtcgccgagcacctccggacac

SEQ ID NO: 91701 - DNA, 25 bp, Homo sapien
ttggagtcccggaccgtcgaagtcc

SEQ ID NO: 91702 - DNA, 25 bp, Homo sapien
ttggagtcccggtccgtcgaagtcc

SEQ ID NO: 91703 - DNA, 25 bp, Homo sapien
ttaaggctttctgtgacgttcaaga

SEQ ID NO: 91704 - DNA, 25 bp, Homo sapien
ttaaggctttctctgacgttcaaga

SEQ ID NO: 91705 - DNA, 25 bp, Homo sapien
gttttagtcgggttacttcgtcata

SEQ ID NO: 91706 - DNA, 25 bp, Homo sapien
gttttagtcgggatacttcgtcata

SEQ ID NO: 91707 - DNA, 25 bp, Homo sapien
ctgacgtgagtggttccgttactct

SEQ ID NO: 91708 - DNA, 25 bp, Homo sapien
ctgacgtgagtgcttccgttactct

SEQ ID NO: 91709 - DNA, 25 bp, Homo sapien
gtcttaataatgatctgtattctat

SEQ ID NO: 91710 - DNA, 25 bp, Homo sapien
gtcttaataatgttctgtattctat

SEQ ID NO: 91711 - DNA, 25 bp, Homo sapien
cgaagagaatagttcctgtttactc

SEQ ID NO: 91712 - DNA, 25 bp, Homo sapien
cgaagagaatagatcctgtttactc

SEQ ID NO: 91713 - DNA, 25 bp, Homo sapien
agggagaaggactcgtgtctgtacc

SEQ ID NO: 91714 - DNA, 25 bp, Homo sapien
agggagaaggacacgtgtctgtacc

SEQ ID NO: 91715 - DNA, 25 bp, Homo sapien
gaaacgacacagactttgtcttaag

SEQ ID NO: 91716 - DNA, 25 bp, Homo sapien
gaaacgacacagtctttgtcttaag

SEQ ID NO: 91717 - DNA, 25 bp, Homo sapien
ggatctagacatctagatctttgaa

SEQ ID NO: 91718 - DNA, 25 bp, Homo sapien
ggatctagacatgtagatctttgaa

SEQ ID NO: 91719 - DNA, 25 bp, Homo sapien
caagtgactcaagttgtacattgaa

SEQ ID NO: 91720 - DNA, 25 bp, Homo sapien
caagtgactcaacttgtacattgaa

SEQ ID NO: 91721 - DNA, 25 bp, Homo sapien
agttgaccaaattagactttcagag

SEQ ID NO: 91722 - DNA, 25 bp, Homo sapien
agttgaccaaataagactttcagag

SEQ ID NO: 91723 - DNA, 25 bp, Homo sapien
cgtttatcgagcagatggctccgaa

SEQ ID NO: 91724 - DNA, 25 bp, Homo sapien
cgtttatcgagctgatggctccgaa

SEQ ID NO: 91725 - DNA, 25 bp, Homo sapien
gttgactcggaaggtggaccccgac

SEQ ID NO: 91726 - DNA, 25 bp, Homo sapien
gttgactcggaacgtggaccccgac

SEQ ID NO: 91727 - DNA, 25 bp, Homo sapien
gtttatgtcacttgccacgtcccga

SEQ ID NO: 91728 - DNA, 25 bp, Homo sapien
gtttatgtcactagccacgtcccga

SEQ ID NO: 91729 - DNA, 25 bp, Homo sapien
actgtggtgtcgagaccgctcacca

SEQ ID NO: 91730 - DNA, 25 bp, Homo sapien
actgtggtgtcgtgaccgctcacca

SEQ ID NO: 91731 - DNA, 25 bp, Homo sapien
tttgtggaagaacacctcctaccta

SEQ ID NO: 91732 - DNA, 25 bp, Homo sapien
tttgtggaagaagacctcctaccta

SEQ ID NO: 91733 - DNA, 25 bp, Homo sapien
tttttgtctacacactatctccgac

SEQ ID NO: 91734 - DNA, 25 bp, Homo sapien
tttttgtctacagactatctccgac

SEQ ID NO: 91735 - DNA, 25 bp, Homo sapien
actttttcggttatgcgttctccga

SEQ ID NO: 91736 - DNA, 25 bp, Homo sapien
actttttcggttttgcgttctccga

SEQ ID NO: 91737 - DNA, 25 bp, Homo sapien
tacttgttagttagcgtaccgagac

SEQ ID NO: 91738 - DNA, 25 bp, Homo sapien
tacttgttagtttgcgtaccgagac

SEQ ID NO: 91739 - DNA, 25 bp, Homo sapien
gaagactttctctacttgtggaggt

SEQ ID NO: 91740 - DNA, 25 bp, Homo sapien
gaagactttctcaacttgtggaggt

SEQ ID NO: 91741 - DNA, 25 bp, Homo sapien
gaaaaaccgtttatcctcagggagt

SEQ ID NO: 91742 - DNA, 25 bp, Homo sapien
gaaaaaccgtttttcctcagggagt

SEQ ID NO: 91743 - DNA, 25 bp, Homo sapien
taaaagaagtcattcccaccaggta

SEQ ID NO: 91744 - DNA, 25 bp, Homo sapien
taaaagaagtcaatcccaccaggta

SEQ ID NO: 91745 - DNA, 25 bp, Homo sapien
taactagtagacacccacaaagagt

SEQ ID NO: 91746 - DNA, 25 bp, Homo sapien
taactagtagactcccacaaagagt

SEQ ID NO: 91747 - DNA, 25 bp, Homo sapien
ttgtcttgattgacctcaaaaagag

SEQ ID NO: 91748 - DNA, 25 bp, Homo sapien
ttgtcttgattgtcctcaaaaagag

SEQ ID NO: 91749 - DNA, 25 bp, Homo sapien
taatagtcggcaaccccaaaaagtt

SEQ ID NO: 91750 - DNA, 25 bp, Homo sapien
taatagtcggcatccccaaaaagtt

SEQ ID NO: 91751 - DNA, 25 bp, Homo sapien
gtcgtgacatctttcctaaaaagtt

SEQ ID NO: 91752 - DNA, 25 bp, Homo sapien
gtcgtgacatctatcctaaaaagtt

SEQ ID NO: 91753 - DNA, 25 bp, Homo sapien
ttggacttcatcttcttcaaagtgt

SEQ ID NO: 91754 - DNA, 25 bp, Homo sapien
ttggacttcatcatcttcaaagtgt

SEQ ID NO: 91755 - DNA, 25 bp, Homo sapien
gtccgacctgacgaacttaaaatct

SEQ ID NO: 91756 - DNA, 25 bp, Homo sapien
gtccgacctgaccaacttaaaatct

SEQ ID NO: 91757 - DNA, 25 bp, Homo sapien
atgtccacctgtcttgttgaggatc

SEQ ID NO: 91758 - DNA, 25 bp, Homo sapien
atgtccacctgtgttgttgaggatc

SEQ ID NO: 91759 - DNA, 25 bp, Homo sapien
actccgtagcgttgtgtaggtgtcc

SEQ ID NO: 91760 - DNA, 25 bp, Homo sapien
actccgtagcgtagtgtaggtgtcc

SEQ ID NO: 91761 - DNA, 25 bp, Homo sapien
catggtacgtctgtactttatcgtt

SEQ ID NO: 91762 - DNA, 25 bp, Homo sapien
catggtacgtctctactttatcgtt

SEQ ID NO: 91763 - DNA, 25 bp, Homo sapien
tctagaagtgcataaacagtcgact

SEQ ID NO: 91764 - DNA, 25 bp, Homo sapien
tctagaagtgcaaaaacagtcgact

SEQ ID NO: 91765 - DNA, 25 bp, Homo sapien
gctgtacaacggtgggacgacttga

SEQ ID NO: 91766 - DNA, 25 bp, Homo sapien
gctgtacaacggagggacgacttga

SEQ ID NO: 91767 - DNA, 25 bp, Homo sapien
cccctacaggagacggtacgctggc

SEQ ID NO: 91768 - DNA, 25 bp, Homo sapien
cccctacaggagtcggtacgctggc

SEQ ID NO: 91769 - DNA, 25 bp, Homo sapien
ccctacgaaagacgtaccggttcct

SEQ ID NO: 91770 - DNA, 25 bp, Homo sapien
ccctacgaaagaggtaccggttcct

SEQ ID NO: 91771 - DNA, 25 bp, Homo sapien
tccggaaagacgtcgtgatctatat

SEQ ID NO: 91772 - DNA, 25 bp, Homo sapien
tccggaaagacgacgtgatctatat

SEQ ID NO: 91773 - DNA, 25 bp, Homo sapien
cgattaagatgaccttagtcggagt

SEQ ID NO: 91774 - DNA, 25 bp, Homo sapien
cgattaagatgagcttagtcggagt

SEQ ID NO: 91775 - DNA, 25 bp, Homo sapien
gagacgggtagaaggaccctttgac

SEQ ID NO: 91776 - DNA, 25 bp, Homo sapien
gagacgggtagatggaccctttgac

SEQ ID NO: 91777 - DNA, 25 bp, Homo sapien
cccaggaagacctcgacctagagga

SEQ ID NO: 91778 - DNA, 25 bp, Homo sapien
cccaggaagaccacgacctagagga

SEQ ID NO: 91779 - DNA, 25 bp, Homo sapien
gtagcaccctgtggtcttagtgtgg

SEQ ID NO: 91780 - DNA, 25 bp, Homo sapien
gtagcaccctgtcgtcttagtgtgg

SEQ ID NO: 91781 - DNA, 25 bp, Homo sapien
gagttgaacccttccgtttacattt

SEQ ID NO: 91782 - DNA, 25 bp, Homo sapien
gagttgaaccctaccgtttacattt

SEQ ID NO: 91783 - DNA, 25 bp, Homo sapien
tctgaagttttccagatttcagttt

SEQ ID NO: 91784 - DNA, 25 bp, Homo sapien
tctgaagttttcgagatttcagttt

SEQ ID NO: 91785 - DNA, 25 bp, Homo sapien
cggaaggttttaacatttacctgat

SEQ ID NO: 91786 - DNA, 25 bp, Homo sapien
cggaaggttttatcatttacctgat

SEQ ID NO: 91787 - DNA, 25 bp, Homo sapien
gttgagttcttccttgtcactccta

SEQ ID NO: 91788 - DNA, 25 bp, Homo sapien
gttgagttcttcgttgtcactccta

SEQ ID NO: 91789 - DNA, 25 bp, Homo sapien
tttaatatgggttgatgtacgtcag

SEQ ID NO: 91790 - DNA, 25 bp, Homo sapien
tttaatatgggtagatgtacgtcag

SEQ ID NO: 91791 - DNA, 25 bp, Homo sapien
tgtgtcagtggacgtatgctcccat

SEQ ID NO: 91792 - DNA, 25 bp, Homo sapien
tgtgtcagtggaggtatgctcccat

SEQ ID NO: 91793 - DNA, 25 bp, Homo sapien
ccgtaatgttatactgtttcctcgt

SEQ ID NO: 91794 - DNA, 25 bp, Homo sapien
ccgtaatgttattctgtttcctcgt

SEQ ID NO: 91795 - DNA, 25 bp, Homo sapien
accagccctaacctattctgtgtcg

SEQ ID NO: 91796 - DNA, 25 bp, Homo sapien
accagccctaacgtattctgtgtcg

SEQ ID NO: 91797 - DNA, 25 bp, Homo sapien
gactcagtccgtagctgcttctggc

SEQ ID NO: 91798 - DNA, 25 bp, Homo sapien
gactcagtccgttgctgcttctggc

SEQ ID NO: 91799 - DNA, 25 bp, Homo sapien
taaataaaccttctgcagatgtgtt

SEQ ID NO: 91800 - DNA, 25 bp, Homo sapien
taaataaaccttgtgcagatgtgtt

SEQ ID NO: 91801 - DNA, 25 bp, Homo sapien
agggacacgcctgtccggggactac

SEQ ID NO: 91802 - DNA, 25 bp, Homo sapien
agggacacgcctctccggggactac

SEQ ID NO: 91803 - DNA, 25 bp, Homo sapien
cggagagacggtatctctccaaccc

SEQ ID NO: 91804 - DNA, 25 bp, Homo sapien
cggagagacggtttctctccaaccc

SEQ ID NO: 91805 - DNA, 25 bp, Homo sapien
ccttccgtagaccttcttccagggg

SEQ ID NO: 91806 - DNA, 25 bp, Homo sapien
ccttccgtagacgttcttccagggg

SEQ ID NO: 91807 - DNA, 25 bp, Homo sapien
catgtgcacacgtgtggccaggagc

SEQ ID NO: 91808 - DNA, 25 bp, Homo sapien
catgtgcacacgagtggccaggagc

SEQ ID NO: 91809 - DNA, 25 bp, Homo sapien
tttgctaccatttactccgatgatg

SEQ ID NO: 91810 - DNA, 25 bp, Homo sapien
tttgctaccattaactccgatgatg

SEQ ID NO: 91811 - DNA, 25 bp, Homo sapien
tgtgtcgtcgatgtacccacaagtc

SEQ ID NO: 91812 - DNA, 25 bp, Homo sapien
tgtgtcgtcgatctacccacaagtc

SEQ ID NO: 91813 - DNA, 25 bp, Homo sapien
gggactacgaagtgtatcctaaggc

SEQ ID NO: 91814 - DNA, 25 bp, Homo sapien
gggactacgaagagtatcctaaggc

SEQ ID NO: 91815 - DNA, 25 bp, Homo sapien
tctagaagacataccgtacctgtcg

SEQ ID NO: 91816 - DNA, 25 bp, Homo sapien
tctagaagacattccgtacctgtcg

SEQ ID NO: 91817 - DNA, 25 bp, Homo sapien
ttcacgtaacggttctgtatcagtg

SEQ ID NO: 91818 - DNA, 25 bp, Homo sapien
ttcacgtaacggatctgtatcagtg

SEQ ID NO: 91819 - DNA, 25 bp, Homo sapien
aggttctcgttcaatcctcgtttgt

SEQ ID NO: 91820 - DNA, 25 bp, Homo sapien
aggttctcgttctatcctcgtttgt

SEQ ID NO: 91821 - DNA, 25 bp, Homo sapien
cagtttctcgttcactttggtaaag

SEQ ID NO: 91822 - DNA, 25 bp, Homo sapien
cagtttctcgttgactttggtaaag

SEQ ID NO: 91823 - DNA, 25 bp, Homo sapien
gtctaattatattcactttcggaaa

SEQ ID NO: 91824 - DNA, 25 bp, Homo sapien
gtctaattatatacactttcggaaa

SEQ ID NO: 91825 - DNA, 25 bp, Homo sapien
tctttcactagtgttccgaaataag

SEQ ID NO: 91826 - DNA, 25 bp, Homo sapien
tctttcactagtcttccgaaataag

SEQ ID NO: 91827 - DNA, 25 bp, Homo sapien
cttccacgggcgtacacacaagaag

SEQ ID NO: 91828 - DNA, 25 bp, Homo sapien
cttccacgggcgaacacacaagaag

SEQ ID NO: 91829 - DNA, 25 bp, Homo sapien
tcctttgacctggaacctcttgaag

SEQ ID NO: 91830 - DNA, 25 bp, Homo sapien
tcctttgacctgcaacctcttgaag

SEQ ID NO: 91831 - DNA, 25 bp, Homo sapien
acttttgtccttttttacatgaagt

SEQ ID NO: 91832 - DNA, 25 bp, Homo sapien
acttttgtccttatttacatgaagt

SEQ ID NO: 91833 - DNA, 25 bp, Homo sapien
aataccgctgcattcttgcccgaac

SEQ ID NO: 91834 - DNA, 25 bp, Homo sapien
aataccgctgcaatcttgcccgaac

SEQ ID NO: 91835 - DNA, 25 bp, Homo sapien
gactgtgcactcaagtctgtcgaga

SEQ ID NO: 91836 - DNA, 25 bp, Homo sapien
gactgtgcactctagtctgtcgaga

SEQ ID NO: 91837 - DNA, 25 bp, Homo sapien
tggttggactaaacgtcaatcgtag

SEQ ID NO: 91838 - DNA, 25 bp, Homo sapien
tggttggactaatcgtcaatcgtag

SEQ ID NO: 91839 - DNA, 25 bp, Homo sapien
gttcaggtatgaccagaaacatgta

SEQ ID NO: 91840 - DNA, 25 bp, Homo sapien
gttcaggtatgagcagaaacatgta

SEQ ID NO: 91841 - DNA, 25 bp, Homo sapien
gttcatggtcgtccacataaattct

SEQ ID NO: 91842 - DNA, 25 bp, Homo sapien
gttcatggtcgtgcacataaattct

SEQ ID NO: 91843 - DNA, 25 bp, Homo sapien
ggtgtactgggtgaccccaaagaag

SEQ ID NO: 91844 - DNA, 25 bp, Homo sapien
ggtgtactgggtcaccccaaagaag

SEQ ID NO: 91845 - DNA, 25 bp, Homo sapien
gttctggtcagtgttcaaataagac

SEQ ID NO: 91846 - DNA, 25 bp, Homo sapien
gttctggtcagtcttcaaataagac

SEQ ID NO: 91847 - DNA, 25 bp, Homo sapien
cgatacacggacctcacttctaaga

SEQ ID NO: 91848 - DNA, 25 bp, Homo sapien
cgatacacggacgtcacttctaaga

SEQ ID NO: 91849 - DNA, 25 bp, Homo sapien
agacacacgaggaccgacaccgacg

SEQ ID NO: 91850 - DNA, 25 bp, Homo sapien
agacacacgaggtccgacaccgacg

SEQ ID NO: 91851 - DNA, 25 bp, Homo sapien
agaactccctgtcaaactacgccga

SEQ ID NO: 91852 - DNA, 25 bp, Homo sapien
agaactccctgtgaaactacgccga

SEQ ID NO: 91853 - DNA, 25 bp, Homo sapien
agaggttccctatgttgaagacttt

SEQ ID NO: 91854 - DNA, 25 bp, Homo sapien
agaggttccctaagttgaagacttt

SEQ ID NO: 91855 - DNA, 25 bp, Homo sapien
acgctgtaaaacgttcagtagcaga

SEQ ID NO: 91856 - DNA, 25 bp, Homo sapien
acgctgtaaaaccttcagtagcaga

SEQ ID NO: 91857 - DNA, 25 bp, Homo sapien
ggatacatacgtgtcgatgactaac

SEQ ID NO: 91858 - DNA, 25 bp, Homo sapien
ggatacatacgtctcgatgactaac

SEQ ID NO: 91859 - DNA, 25 bp, Homo sapien
gagactctacggaatctacgggtaa

SEQ ID NO: 91860 - DNA, 25 bp, Homo sapien
gagactctacggtatctacgggtaa

SEQ ID NO: 91861 - DNA, 25 bp, Homo sapien
gagtaacatcttctctactgtgagc

SEQ ID NO: 91862 - DNA, 25 bp, Homo sapien
gagtaacatcttgtctactgtgagc

SEQ ID NO: 91863 - DNA, 25 bp, Homo sapien
ctggtacaacctattgaccaagaga

SEQ ID NO: 91864 - DNA, 25 bp, Homo sapien
ctggtacaaccttttgaccaagaga

SEQ ID NO: 91865 - DNA, 25 bp, Homo sapien
ggtaataattgactcacaccggaga

SEQ ID NO: 91866 - DNA, 25 bp, Homo sapien
ggtaataattgagtcacaccggaga

SEQ ID NO: 91867 - DNA, 25 bp, Homo sapien
agataatctgatggactatgtcttc

SEQ ID NO: 91868 - DNA, 25 bp, Homo sapien
agataatctgatcgactatgtcttc

SEQ ID NO: 91869 - DNA, 25 bp, Homo sapien
gtgacaaaattcttgtcagtcttta

SEQ ID NO: 91870 - DNA, 25 bp, Homo sapien
gtgacaaaattcatgtcagtcttta

SEQ ID NO: 91871 - DNA, 25 bp, Homo sapien
cggacagaaaagtctgacagttttt

SEQ ID NO: 91872 - DNA, 25 bp, Homo sapien
cggacagaaaagactgacagttttt

SEQ ID NO: 91873 - DNA, 25 bp, Homo sapien
cctgaaacatagtccgtgaatttaa

SEQ ID NO: 91874 - DNA, 25 bp, Homo sapien
cctgaaacatagaccgtgaatttaa

SEQ ID NO: 91875 - DNA, 25 bp, Homo sapien
caggtttatgtacactcgaatttaa

SEQ ID NO: 91876 - DNA, 25 bp, Homo sapien
caggtttatgtagactcgaatttaa

SEQ ID NO: 91877 - DNA, 25 bp, Homo sapien
gggaattaaacttacgttttactac

SEQ ID NO: 91878 - DNA, 25 bp, Homo sapien
gggaattaaactaacgttttactac

SEQ ID NO: 91879 - DNA, 25 bp, Homo sapien
ggcattttagtaagaccttaaacta

SEQ ID NO: 91880 - DNA, 25 bp, Homo sapien
ggcattttagtatgaccttaaacta

SEQ ID NO: 91881 - DNA, 25 bp, Homo sapien
tgacgcatggactactaatcaagat

SEQ ID NO: 91882 - DNA, 25 bp, Homo sapien
tgacgcatggacaactaatcaagat

SEQ ID NO: 91883 - DNA, 25 bp, Homo sapien
aggtccgtggactgctaaacaagac

SEQ ID NO: 91884 - DNA, 25 bp, Homo sapien
aggtccgtggacagctaaacaagac

SEQ ID NO: 91885 - DNA, 25 bp, Homo sapien
tgaggtgtcttggtagaccatgacg

SEQ ID NO: 91886 - DNA, 25 bp, Homo sapien
tgaggtgtcttgctagaccatgacg

SEQ ID NO: 91887 - DNA, 25 bp, Homo sapien
ttgggacctccctgacacgtcttac

SEQ ID NO: 91888 - DNA, 25 bp, Homo sapien
ttgggacctcccagacacgtcttac

SEQ ID NO: 91889 - DNA, 25 bp, Homo sapien
caatgacagacctcgaccaccgtat

SEQ ID NO: 91890 - DNA, 25 bp, Homo sapien
caatgacagaccacgaccaccgtat

SEQ ID NO: 91891 - DNA, 25 bp, Homo sapien
attagtagatcttagaacctcgtag

SEQ ID NO: 91892 - DNA, 25 bp, Homo sapien
attagtagatctaagaacctcgtag

SEQ ID NO: 91893 - DNA, 25 bp, Homo sapien
acccgtagctgttgcacacgctcga

SEQ ID NO: 91894 - DNA, 25 bp, Homo sapien
acccgtagctgtagcacacgctcga

SEQ ID NO: 91895 - DNA, 25 bp, Homo sapien
cagggtccgtcttgcccgcggtcgt

SEQ ID NO: 91896 - DNA, 25 bp, Homo sapien
cagggtccgtctagcccgcggtcgt

SEQ ID NO: 91897 - DNA, 25 bp, Homo sapien
cggaggtccgtcacgataccaggtc

SEQ ID NO: 91898 - DNA, 25 bp, Homo sapien
cggaggtccgtctcgataccaggtc

SEQ ID NO: 91899 - DNA, 25 bp, Homo sapien
gccggtggtcagagcgtaacagaat

SEQ ID NO: 91900 - DNA, 25 bp, Homo sapien
gccggtggtcagtgcgtaacagaat

SEQ ID NO: 91901 - DNA, 25 bp, Homo sapien
cttgagtggtcaaagttatcataac

SEQ ID NO: 91902 - DNA, 25 bp, Homo sapien
cttgagtggtcatagttatcataac

SEQ ID NO: 91903 - DNA, 25 bp, Homo sapien
tttggtcctttcgttactctctaag

SEQ ID NO: 91904 - DNA, 25 bp, Homo sapien
tttggtcctttccttactctctaag

SEQ ID NO: 91905 - DNA, 25 bp, Homo sapien
ataggttattatcactttacctagg

SEQ ID NO: 91906 - DNA, 25 bp, Homo sapien
ataggttattatgactttacctagg

SEQ ID NO: 91907 - DNA, 25 bp, Homo sapien
gaatccttccggtctcaacactagg

SEQ ID NO: 91908 - DNA, 25 bp, Homo sapien
gaatccttccggactcaacactagg

SEQ ID NO: 91909 - DNA, 25 bp, Homo sapien
attaatctacagacagaatcctgag

SEQ ID NO: 91910 - DNA, 25 bp, Homo sapien
attaatctacagtcagaatcctgag

SEQ ID NO: 91911 - DNA, 25 bp, Homo sapien
tagacttcccgtacagggcccgact

SEQ ID NO: 91912 - DNA, 25 bp, Homo sapien
tagacttcccgttcagggcccgact

SEQ ID NO: 91913 - DNA, 25 bp, Homo sapien
tgggaatccctctcagaagatgtgg

SEQ ID NO: 91914 - DNA, 25 bp, Homo sapien
tgggaatccctcacagaagatgtgg

SEQ ID NO: 91915 - DNA, 25 bp, Homo sapien
cgtcgtcccgagactacaaccgggt

SEQ ID NO: 91916 - DNA, 25 bp, Homo sapien
cgtcgtcccgagtctacaaccgggt

SEQ ID NO: 91917 - DNA, 25 bp, Homo sapien
gtcgcttctaacttaatgtctgtgt

SEQ ID NO: 91918 - DNA, 25 bp, Homo sapien
gtcgcttctaacataatgtctgtgt

SEQ ID NO: 91919 - DNA, 25 bp, Homo sapien
cgtaatatcaaatgcaagtcgtact

SEQ ID NO: 91920 - DNA, 25 bp, Homo sapien
cgtaatatcaaaagcaagtcgtact

SEQ ID NO: 91921 - DNA, 25 bp, Homo sapien
gtgaatacctgtatgtcatgtactt

SEQ ID NO: 91922 - DNA, 25 bp, Homo sapien
gtgaatacctgtttgtcatgtactt

SEQ ID NO: 91923 - DNA, 25 bp, Homo sapien
acgggatacactacgggtcaaccct

SEQ ID NO: 91924 - DNA, 25 bp, Homo sapien
acgggatacacttcgggtcaaccct

SEQ ID NO: 91925 - DNA, 25 bp, Homo sapien
cgaaggttcgatttcggtagatttc

SEQ ID NO: 91926 - DNA, 25 bp, Homo sapien
cgaaggttcgatatcggtagatttc

SEQ ID NO: 91927 - DNA, 25 bp, Homo sapien
cgaagacgttcgtaatttcccttct

SEQ ID NO: 91928 - DNA, 25 bp, Homo sapien
cgaagacgttcgaaatttcccttct

SEQ ID NO: 91929 - DNA, 25 bp, Homo sapien
tatatgaccctctcggtcgcctttg

SEQ ID NO: 91930 - DNA, 25 bp, Homo sapien
tatatgaccctcacggtcgcctttg

SEQ ID NO: 91931 - DNA, 25 bp, Homo sapien
gtgtaaatcggataaactccaattg

SEQ ID NO: 91932 - DNA, 25 bp, Homo sapien
gtgtaaatcggaaaaactccaattg

SEQ ID NO: 91933 - DNA, 25 bp, Homo sapien
gttcagaacggaaaagaatccccac

SEQ ID NO: 91934 - DNA, 25 bp, Homo sapien
gttcagaacggataagaatccccac

SEQ ID NO: 91935 - DNA, 25 bp, Homo sapien
tacgtgagataaaatacgtcattac

SEQ ID NO: 91936 - DNA, 25 bp, Homo sapien
tacgtgagataatatacgtcattac

SEQ ID NO: 91937 - DNA, 25 bp, Homo sapien
tccgtccttagacttttccacggac

SEQ ID NO: 91938 - DNA, 25 bp, Homo sapien
tccgtccttagagttttccacggac

SEQ ID NO: 91939 - DNA, 25 bp, Homo sapien
ctcgagtaccttttcgtcgtgtcac

SEQ ID NO: 91940 - DNA, 25 bp, Homo sapien
ctcgagtaccttatcgtcgtgtcac

SEQ ID NO: 91941 - DNA, 25 bp, Homo sapien
gccaggcgtcgttagtgtctgtccg

SEQ ID NO: 91942 - DNA, 25 bp, Homo sapien
gccaggcgtcgtaagtgtctgtccg

SEQ ID NO: 91943 - DNA, 25 bp, Homo sapien
gtgaaggtcctttgtcagtccggcc

SEQ ID NO: 91944 - DNA, 25 bp, Homo sapien
gtgaaggtccttagtcagtccggcc

SEQ ID NO: 91945 - DNA, 25 bp, Homo sapien
aactaccctgtcgaaacgtcgggta

SEQ ID NO: 91946 - DNA, 25 bp, Homo sapien
aactaccctgtccaaacgtcgggta

SEQ ID NO: 91947 - DNA, 25 bp, Homo sapien
tcacgaactctgaccggattccata

SEQ ID NO: 91948 - DNA, 25 bp, Homo sapien
tcacgaactctgtccggattccata

SEQ ID NO: 91949 - DNA, 25 bp, Homo sapien
taccgtcttccctgggactcctgta

SEQ ID NO: 91950 - DNA, 25 bp, Homo sapien
taccgtcttcccagggactcctgta

SEQ ID NO: 91951 - DNA, 25 bp, Homo sapien
tcgtgtctgtcctacggagcccttc

SEQ ID NO: 91952 - DNA, 25 bp, Homo sapien
tcgtgtctgtccaacggagcccttc

SEQ ID NO: 91953 - DNA, 25 bp, Homo sapien
catcgacaagtccaagggaacctaa

SEQ ID NO: 91954 - DNA, 25 bp, Homo sapien
catcgacaagtcgaagggaacctaa

SEQ ID NO: 91955 - DNA, 25 bp, Homo sapien
aggaagacctacagggtgtcccata

SEQ ID NO: 91956 - DNA, 25 bp, Homo sapien
aggaagacctactgggtgtcccata

SEQ ID NO: 91957 - DNA, 25 bp, Homo sapien
gtgtggaaacaaggagacggcacaa

SEQ ID NO: 91958 - DNA, 25 bp, Homo sapien
gtgtggaaacaacgagacggcacaa

SEQ ID NO: 91959 - DNA, 25 bp, Homo sapien
cccacggaaggaaaccagtcctaag

SEQ ID NO: 91960 - DNA, 25 bp, Homo sapien
cccacggaaggataccagtcctaag

SEQ ID NO: 91961 - DNA, 25 bp, Homo sapien
aagacagtccgtcgtcgtaatgacc

SEQ ID NO: 91962 - DNA, 25 bp, Homo sapien
aagacagtccgtggtcgtaatgacc

SEQ ID NO: 91963 - DNA, 25 bp, Homo sapien
aagatgggccggtatcgtctagaga

SEQ ID NO: 91964 - DNA, 25 bp, Homo sapien
aagatgggccggaatcgtctagaga

SEQ ID NO: 91965 - DNA, 25 bp, Homo sapien
agagagtgacttgaaccttcgttaa

SEQ ID NO: 91966 - DNA, 25 bp, Homo sapien
agagagtgacttcaaccttcgttaa

SEQ ID NO: 91967 - DNA, 25 bp, Homo sapien
atgagagaacaacagacttggacga

SEQ ID NO: 91968 - DNA, 25 bp, Homo sapien
atgagagaacaagagacttggacga

SEQ ID NO: 91969 - DNA, 25 bp, Homo sapien
aggaagagatgaactcggacgacga

SEQ ID NO: 91970 - DNA, 25 bp, Homo sapien
aggaagagatgatctcggacgacga

SEQ ID NO: 91971 - DNA, 25 bp, Homo sapien
acgatgtagacaattattgtcacca

SEQ ID NO: 91972 - DNA, 25 bp, Homo sapien
acgatgtagacatttattgtcacca

SEQ ID NO: 91973 - DNA, 25 bp, Homo sapien
cgaatgatatcttatgatgtctata

SEQ ID NO: 91974 - DNA, 25 bp, Homo sapien
cgaatgatatctaatgatgtctata

SEQ ID NO: 91975 - DNA, 25 bp, Homo sapien
atcgaactctggttagcgtatgact

SEQ ID NO: 91976 - DNA, 25 bp, Homo sapien
atcgaactctggatagcgtatgact

SEQ ID NO: 91977 - DNA, 25 bp, Homo sapien
tcaggtccaagtcacgtaaccgggg

SEQ ID NO: 91978 - DNA, 25 bp, Homo sapien
tcaggtccaagtgacgtaaccgggg

SEQ ID NO: 91979 - DNA, 25 bp, Homo sapien
tttctctgtcctccttctgccgggg

SEQ ID NO: 91980 - DNA, 25 bp, Homo sapien
tttctctgtcctgcttctgccgggg

SEQ ID NO: 91981 - DNA, 25 bp, Homo sapien
caacctcttgtgtgttgccggagtc

SEQ ID NO: 91982 - DNA, 25 bp, Homo sapien
caacctcttgtgagttgccggagtc

SEQ ID NO: 91983 - DNA, 25 bp, Homo sapien
acactcaaggagtcacactaacgtc

SEQ ID NO: 91984 - DNA, 25 bp, Homo sapien
acactcaaggagacacactaacgtc

SEQ ID NO: 91985 - DNA, 25 bp, Homo sapien
gtcgtctctgaacgttccgtgtccg

SEQ ID NO: 91986 - DNA, 25 bp, Homo sapien
gtcgtctctgaaggttccgtgtccg

SEQ ID NO: 91987 - DNA, 25 bp, Homo sapien
acctctatcaggatactcttcgtct

SEQ ID NO: 91988 - DNA, 25 bp, Homo sapien
acctctatcaggttactcttcgtct

SEQ ID NO: 91989 - DNA, 25 bp, Homo sapien
ggacttcatcttcttcaaagtgttt

SEQ ID NO: 91990 - DNA, 25 bp, Homo sapien
ggacttcatcttgttcaaagtgttt

SEQ ID NO: 91991 - DNA, 25 bp, Homo sapien
agatcgtgtcctcttagaagtaggt

SEQ ID NO: 91992 - DNA, 25 bp, Homo sapien
agatcgtgtcctgttagaagtaggt

SEQ ID NO: 91993 - DNA, 25 bp, Homo sapien
tccgagtggtcgcttaataatgaat

SEQ ID NO: 91994 - DNA, 25 bp, Homo sapien
tccgagtggtcggttaataatgaat

SEQ ID NO: 91995 - DNA, 25 bp, Homo sapien
gacggttctcgtccttaaaaggtga

SEQ ID NO: 91996 - DNA, 25 bp, Homo sapien
gacggttctcgtgcttaaaaggtga

SEQ ID NO: 91997 - DNA, 25 bp, Homo sapien
cacctactcccgtcagaagtcttgg

SEQ ID NO: 91998 - DNA, 25 bp, Homo sapien
cacctactcccgacagaagtcttgg

SEQ ID NO: 91999 - DNA, 25 bp, Homo sapien
agttgtcagcgacgacgaacattgc

SEQ ID NO: 92000 - DNA, 25 bp, Homo sapien
agttgtcagcgaggacgaacattgc

SEQ ID NO: 92001 - DNA, 25 bp, Homo sapien
tcgagtaagaccagtataatctgcc

SEQ ID NO: 92002 - DNA, 25 bp, Homo sapien
tcgagtaagacctgtataatctgcc

SEQ ID NO: 92003 - DNA, 25 bp, Homo sapien
aaacgaacgtctcaccgaaagaccg

SEQ ID NO: 92004 - DNA, 25 bp, Homo sapien
aaacgaacgtctgaccgaaagaccg

SEQ ID NO: 92005 - DNA, 25 bp, Homo sapien
gtaactagtaaagatcaacctctgt

SEQ ID NO: 92006 - DNA, 25 bp, Homo sapien
gtaactagtaaacatcaacctctgt

SEQ ID NO: 92007 - DNA, 25 bp, Homo sapien
attcatcatataattccggtatttg

SEQ ID NO: 92008 - DNA, 25 bp, Homo sapien
attcatcatatatttccggtatttg

SEQ ID NO: 92009 - DNA, 25 bp, Homo sapien
tttccaaagatctcccgttttgtgt

SEQ ID NO: 92010 - DNA, 25 bp, Homo sapien
tttccaaagatcacccgttttgtgt

SEQ ID NO: 92011 - DNA, 25 bp, Homo sapien
cttcagacgggtcacatggtttttg

SEQ ID NO: 92012 - DNA, 25 bp, Homo sapien
cttcagacgggtgacatggtttttg

SEQ ID NO: 92013 - DNA, 25 bp, Homo sapien
tcaacgttgagattttcgtattcct

SEQ ID NO: 92014 - DNA, 25 bp, Homo sapien
tcaacgttgagaatttcgtattcct

SEQ ID NO: 92015 - DNA, 25 bp, Homo sapien
tgtgtccctgcgacatttgtccccg

SEQ ID NO: 92016 - DNA, 25 bp, Homo sapien
tgtgtccctgcgtcatttgtccccg

SEQ ID NO: 92017 - DNA, 25 bp, Homo sapien
gtcggatgcctatccgttttaccca

SEQ ID NO: 92018 - DNA, 25 bp, Homo sapien
gtcggatgcctaaccgttttaccca

SEQ ID NO: 92019 - DNA, 25 bp, Homo sapien
ttcgtttgcctttttacagaaggat

SEQ ID NO: 92020 - DNA, 25 bp, Homo sapien
ttcgtttgccttattacagaaggat

SEQ ID NO: 92021 - DNA, 25 bp, Homo sapien
cagtcttgccggtcatacaataagg

SEQ ID NO: 92022 - DNA, 25 bp, Homo sapien
cagtcttgccggacatacaataagg

SEQ ID NO: 92023 - DNA, 25 bp, Homo sapien
tcgtcttttccaccaaaatgtcagg

SEQ ID NO: 92024 - DNA, 25 bp, Homo sapien
tcgtcttttccagcaaaatgtcagg

SEQ ID NO: 92025 - DNA, 25 bp, Homo sapien
ttttcgtccaggtacgaccacaatc

SEQ ID NO: 92026 - DNA, 25 bp, Homo sapien
ttttcgtccaggaacgaccacaatc

SEQ ID NO: 92027 - DNA, 25 bp, Homo sapien
ttctctctgggtcagaccgagtttc

SEQ ID NO: 92028 - DNA, 25 bp, Homo sapien
ttctctctgggtgagaccgagtttc

SEQ ID NO: 92029 - DNA, 25 bp, Homo sapien
tataactatgttataagacgtccta

SEQ ID NO: 92030 - DNA, 25 bp, Homo sapien
tataactatgttttaagacgtccta

SEQ ID NO: 92031 - DNA, 25 bp, Homo sapien
agtatttatgttccagtgaccggtc

SEQ ID NO: 92032 - DNA, 25 bp, Homo sapien
agtatttatgttgcagtgaccggtc

SEQ ID NO: 92033 - DNA, 25 bp, Homo sapien
aacggtattatggttcctaacggtc

SEQ ID NO: 92034 - DNA, 25 bp, Homo sapien
aacggtattatgcttcctaacggtc

SEQ ID NO: 92035 - DNA, 25 bp, Homo sapien
gtggtcgttgtatcccctgcagtgg

SEQ ID NO: 92036 - DNA, 25 bp, Homo sapien
gtggtcgttgtaacccctgcagtgg

SEQ ID NO: 92037 - DNA, 25 bp, Homo sapien
tagtttcagcgtgcatccgagtaag

SEQ ID NO: 92038 - DNA, 25 bp, Homo sapien
tagtttcagcgtccatccgagtaag

SEQ ID NO: 92039 - DNA, 25 bp, Homo sapien
gtcgtggagtggaaaagaatctcct

SEQ ID NO: 92040 - DNA, 25 bp, Homo sapien
gtcgtggagtggtaaagaatctcct

SEQ ID NO: 92041 - DNA, 25 bp, Homo sapien
tatcttctattagcgcttgtagaag

SEQ ID NO: 92042 - DNA, 25 bp, Homo sapien
tatcttctattaccgcttgtagaag

SEQ ID NO: 92043 - DNA, 25 bp, Homo sapien
cggtccgcaaaagactcgtatggac

SEQ ID NO: 92044 - DNA, 25 bp, Homo sapien
cggtccgcaaaacactcgtatggac

SEQ ID NO: 92045 - DNA, 25 bp, Homo sapien
tttagaggactcagtgaaccttcaa

SEQ ID NO: 92046 - DNA, 25 bp, Homo sapien
tttagaggactctgtgaaccttcaa

SEQ ID NO: 92047 - DNA, 25 bp, Homo sapien
gctggtagttgttggtcacggacca

SEQ ID NO: 92048 - DNA, 25 bp, Homo sapien
gctggtagttgtaggtcacggacca

SEQ ID NO: 92049 - DNA, 25 bp, Homo sapien
acgagacactgtgagaggaccctca

SEQ ID NO: 92050 - DNA, 25 bp, Homo sapien
acgagacactgtcagaggaccctca

SEQ ID NO: 92051 - DNA, 25 bp, Homo sapien
gacctcctgtcgttccggtcctggt

SEQ ID NO: 92052 - DNA, 25 bp, Homo sapien
gacctcctgtcgatccggtcctggt

SEQ ID NO: 92053 - DNA, 25 bp, Homo sapien
gtgagttctacaaggaatctttatc

SEQ ID NO: 92054 - DNA, 25 bp, Homo sapien
gtgagttctacatggaatctttatc

SEQ ID NO: 92055 - DNA, 25 bp, Homo sapien
tagtctcagggtgactcttactatc

SEQ ID NO: 92056 - DNA, 25 bp, Homo sapien
tagtctcagggtcactcttactatc

SEQ ID NO: 92057 - DNA, 25 bp, Homo sapien
gttaggtccagtttcgtgctccgtc

SEQ ID NO: 92058 - DNA, 25 bp, Homo sapien
gttaggtccagtatcgtgctccgtc

SEQ ID NO: 92059 - DNA, 25 bp, Homo sapien
ggggagtatacagaactccaccgaa

SEQ ID NO: 92060 - DNA, 25 bp, Homo sapien
ggggagtatacacaactccaccgaa

SEQ ID NO: 92061 - DNA, 25 bp, Homo sapien
cccgggactgaagaccttacacaca

SEQ ID NO: 92062 - DNA, 25 bp, Homo sapien
cccgggactgaacaccttacacaca

SEQ ID NO: 92063 - DNA, 25 bp, Homo sapien
ggacaagaagttaactgtaactaac

SEQ ID NO: 92064 - DNA, 25 bp, Homo sapien
ggacaagaagtttactgtaactaac

SEQ ID NO: 92065 - DNA, 25 bp, Homo sapien
ttcaatcgagaggtactataactaa

SEQ ID NO: 92066 - DNA, 25 bp, Homo sapien
ttcaatcgagagctactataactaa

SEQ ID NO: 92067 - DNA, 25 bp, Homo sapien
atttacctgtgaggtctcagacaag

SEQ ID NO: 92068 - DNA, 25 bp, Homo sapien
atttacctgtgacgtctcagacaag

SEQ ID NO: 92069 - DNA, 25 bp, Homo sapien
atcgagcagcagacaccaccaagag

SEQ ID NO: 92070 - DNA, 25 bp, Homo sapien
atcgagcagcagtcaccaccaagag

SEQ ID NO: 92071 - DNA, 25 bp, Homo sapien
aacaggtccagtgacgccctcgggg

SEQ ID NO: 92072 - DNA, 25 bp, Homo sapien
aacaggtccagtcacgccctcgggg

SEQ ID NO: 92073 - DNA, 25 bp, Homo sapien
agacctacccaagcaccctgaagag

SEQ ID NO: 92074 - DNA, 25 bp, Homo sapien
agacctacccaaccaccctgaagag

SEQ ID NO: 92075 - DNA, 25 bp, Homo sapien
aacattacgcggtccgcactgcgaa

SEQ ID NO: 92076 - DNA, 25 bp, Homo sapien
aacattacgcggaccgcactgcgaa

SEQ ID NO: 92077 - DNA, 25 bp, Homo sapien
cagtatctagtctgcctttaagaga

SEQ ID NO: 92078 - DNA, 25 bp, Homo sapien
cagtatctagtcagcctttaagaga

SEQ ID NO: 92079 - DNA, 25 bp, Homo sapien
tttcgacttgagcacacagtagaga

SEQ ID NO: 92080 - DNA, 25 bp, Homo sapien
tttcgacttgaggacacagtagaga

SEQ ID NO: 92081 - DNA, 25 bp, Homo sapien
tcgtcctcttgtggtacgggtagga

SEQ ID NO: 92082 - DNA, 25 bp, Homo sapien
tcgtcctcttgtcgtacgggtagga

SEQ ID NO: 92083 - DNA, 25 bp, Homo sapien
ttgatttaggtcagacactatgtcg

SEQ ID NO: 92084 - DNA, 25 bp, Homo sapien
ttgatttaggtctgacactatgtcg

SEQ ID NO: 92085 - DNA, 25 bp, Homo sapien
gatggtttaatctacgtctattact

SEQ ID NO: 92086 - DNA, 25 bp, Homo sapien
gatggtttaatcaacgtctattact

SEQ ID NO: 92087 - DNA, 25 bp, Homo sapien
tagatggttcgaatcaccttcctgt

SEQ ID NO: 92088 - DNA, 25 bp, Homo sapien
tagatggttcgattcaccttcctgt

SEQ ID NO: 92089 - DNA, 25 bp, Homo sapien
taatgtttcgattgatactcacatg

SEQ ID NO: 92090 - DNA, 25 bp, Homo sapien
taatgtttcgatagatactcacatg

SEQ ID NO: 92091 - DNA, 25 bp, Homo sapien
attctatccttcttaagtcctcgat

SEQ ID NO: 92092 - DNA, 25 bp, Homo sapien
attctatccttcataagtcctcgat

SEQ ID NO: 92093 - DNA, 25 bp, Homo sapien
aggtttacatgtcaaactccgtctc

SEQ ID NO: 92094 - DNA, 25 bp, Homo sapien
aggtttacatgtgaaactccgtctc

SEQ ID NO: 92095 - DNA, 25 bp, Homo sapien
tgtattactgtcacaaacgtgacgt

SEQ ID NO: 92096 - DNA, 25 bp, Homo sapien
tgtattactgtctcaaacgtgacgt

SEQ ID NO: 92097 - DNA, 25 bp, Homo sapien
ctgtcttttctacagacatcaggac

SEQ ID NO: 92098 - DNA, 25 bp, Homo sapien
ctgtcttttctagagacatcaggac

SEQ ID NO: 92099 - DNA, 25 bp, Homo sapien
ttcttgacgctatgaccttctggag

SEQ ID NO: 92100 - DNA, 25 bp, Homo sapien
ttcttgacgctaagaccttctggag

SEQ ID NO: 92101 - DNA, 25 bp, Homo sapien
tctcctcgtggatcgtattctggac

SEQ ID NO: 92102 - DNA, 25 bp, Homo sapien
tctcctcgtggaacgtattctggac

SEQ ID NO: 92103 - DNA, 25 bp, Homo sapien
cgaacggagaataacgtcttggttt

SEQ ID NO: 92104 - DNA, 25 bp, Homo sapien
cgaacggagaattacgtcttggttt

SEQ ID NO: 92105 - DNA, 25 bp, Homo sapien
tcggaagagacatacatcgtattaa

SEQ ID NO: 92106 - DNA, 25 bp, Homo sapien
tcggaagagacaaacatcgtattaa

SEQ ID NO: 92107 - DNA, 25 bp, Homo sapien
ttaactgtatctcgactattgagta

SEQ ID NO: 92108 - DNA, 25 bp, Homo sapien
ttaactgtatctggactattgagta

SEQ ID NO: 92109 - DNA, 25 bp, Homo sapien
gaaacctccctttcaagtagagact

SEQ ID NO: 92110 - DNA, 25 bp, Homo sapien
gaaacctcccttacaagtagagact

SEQ ID NO: 92111 - DNA, 25 bp, Homo sapien
gtcttctccttttaccaagtaaggt

SEQ ID NO: 92112 - DNA, 25 bp, Homo sapien
gtcttctcctttaaccaagtaaggt

SEQ ID NO: 92113 - DNA, 25 bp, Homo sapien
tctcatctccctacctcgaaggagg

SEQ ID NO: 92114 - DNA, 25 bp, Homo sapien
tctcatctcccttcctcgaaggagg

SEQ ID NO: 92115 - DNA, 25 bp, Homo sapien
actccaccggacactcgagagagac

SEQ ID NO: 92116 - DNA, 25 bp, Homo sapien
actccaccggactctcgagagagac

SEQ ID NO: 92117 - DNA, 25 bp, Homo sapien
ggtcggatccgagacccgtgtaaag

SEQ ID NO: 92118 - DNA, 25 bp, Homo sapien
ggtcggatccgacacccgtgtaaag

SEQ ID NO: 92119 - DNA, 25 bp, Homo sapien
gggtgtcacgggaccttcgactccg

SEQ ID NO: 92120 - DNA, 25 bp, Homo sapien
gggtgtcacgggtccttcgactccg

SEQ ID NO: 92121 - DNA, 25 bp, Homo sapien
gtgtgtcaccggttaacgtgcagga

SEQ ID NO: 92122 - DNA, 25 bp, Homo sapien
gtgtgtcaccggataacgtgcagga

SEQ ID NO: 92123 - DNA, 25 bp, Homo sapien
ataagtacccgtgtttgactgagta

SEQ ID NO: 92124 - DNA, 25 bp, Homo sapien
ataagtacccgtctttgactgagta

SEQ ID NO: 92125 - DNA, 25 bp, Homo sapien
acacaagaggtttgggtctcggtaa

SEQ ID NO: 92126 - DNA, 25 bp, Homo sapien
acacaagaggttagggtctcggtaa

SEQ ID NO: 92127 - DNA, 25 bp, Homo sapien
tccacgatgggagtcggacccgaag

SEQ ID NO: 92128 - DNA, 25 bp, Homo sapien
tccacgatgggactcggacccgaag

SEQ ID NO: 92129 - DNA, 25 bp, Homo sapien
actcgaggcggacggagaggcggag

SEQ ID NO: 92130 - DNA, 25 bp, Homo sapien
actcgaggcggagggagaggcggag

SEQ ID NO: 92131 - DNA, 25 bp, Homo sapien
cggacgaaagagttattggtccgcg

SEQ ID NO: 92132 - DNA, 25 bp, Homo sapien
cggacgaaagagatattggtccgcg

SEQ ID NO: 92133 - DNA, 25 bp, Homo sapien
cagcgagcgtcgatcgataacaaag

SEQ ID NO: 92134 - DNA, 25 bp, Homo sapien
cagcgagcgtcgttcgataacaaag

SEQ ID NO: 92135 - DNA, 25 bp, Homo sapien
aaaaaccggacctcagtataaaagt

SEQ ID NO: 92136 - DNA, 25 bp, Homo sapien
aaaaaccggaccacagtataaaagt

SEQ ID NO: 92137 - DNA, 25 bp, Homo sapien
aaaccgatgtcgaactcaagtgatc

SEQ ID NO: 92138 - DNA, 25 bp, Homo sapien
aaaccgatgtcgtactcaagtgatc

SEQ ID NO: 92139 - DNA, 25 bp, Homo sapien
acacagttatagaagtcacttgaga

SEQ ID NO: 92140 - DNA, 25 bp, Homo sapien
acacagttatagtagtcacttgaga

SEQ ID NO: 92141 - DNA, 25 bp, Homo sapien
aacgtaatcaagagtcgataccaga

SEQ ID NO: 92142 - DNA, 25 bp, Homo sapien
aacgtaatcaagtgtcgataccaga

SEQ ID NO: 92143 - DNA, 25 bp, Homo sapien
cgtaacttaagttacctaccctgag

SEQ ID NO: 92144 - DNA, 25 bp, Homo sapien
cgtaacttaagtaacctaccctgag

SEQ ID NO: 92145 - DNA, 25 bp, Homo sapien
gaggcaccgcagagtcgtcgtctag

SEQ ID NO: 92146 - DNA, 25 bp, Homo sapien
gaggcaccgcagtgtcgtcgtctag

SEQ ID NO: 92147 - DNA, 25 bp, Homo sapien
gcgggtgtaagtagcgtttacgtcc

SEQ ID NO: 92148 - DNA, 25 bp, Homo sapien
gcgggtgtaagttgcgtttacgtcc

SEQ ID NO: 92149 - DNA, 25 bp, Homo sapien
gagaaggtaagagtgtgcacacacg

SEQ ID NO: 92150 - DNA, 25 bp, Homo sapien
gagaaggtaagactgtgcacacacg

SEQ ID NO: 92151 - DNA, 25 bp, Homo sapien
aagaggtagactctacgtaaaagac

SEQ ID NO: 92152 - DNA, 25 bp, Homo sapien
aagaggtagactgtacgtaaaagac

SEQ ID NO: 92153 - DNA, 25 bp, Homo sapien
ccacccgtgtagtggagtgtcataa

SEQ ID NO: 92154 - DNA, 25 bp, Homo sapien
ccacccgtgtagaggagtgtcataa

SEQ ID NO: 92155 - DNA, 25 bp, Homo sapien
cttctcttaatcgtcgacaccggac

SEQ ID NO: 92156 - DNA, 25 bp, Homo sapien
cttctcttaatcctcgacaccggac

SEQ ID NO: 92157 - DNA, 25 bp, Homo sapien
tctctaagaagttcctcgtacggta

SEQ ID NO: 92158 - DNA, 25 bp, Homo sapien
tctctaagaagtacctcgtacggta

SEQ ID NO: 92159 - DNA, 25 bp, Homo sapien
ggtctcggtactactccagaggttc

SEQ ID NO: 92160 - DNA, 25 bp, Homo sapien
ggtctcggtacttctccagaggttc

SEQ ID NO: 92161 - DNA, 25 bp, Homo sapien
tctgtcgtgtataccatcgagtaaa

SEQ ID NO: 92162 - DNA, 25 bp, Homo sapien
tctgtcgtgtattccatcgagtaaa

SEQ ID NO: 92163 - DNA, 25 bp, Homo sapien
tgtctgtgactgttcaattagtcaa

SEQ ID NO: 92164 - DNA, 25 bp, Homo sapien
tgtctgtgactgatcaattagtcaa

SEQ ID NO: 92165 - DNA, 25 bp, Homo sapien
ggaagtgtatcacaacttctacaca

SEQ ID NO: 92166 - DNA, 25 bp, Homo sapien
ggaagtgtatcagaacttctacaca

SEQ ID NO: 92167 - DNA, 25 bp, Homo sapien
gaaccgaatcagtaacagtgtcaca

SEQ ID NO: 92168 - DNA, 25 bp, Homo sapien
gaaccgaatcagaaacagtgtcaca

SEQ ID NO: 92169 - DNA, 25 bp, Homo sapien
aaacggatcgaagtgagtcgacctt

SEQ ID NO: 92170 - DNA, 25 bp, Homo sapien
aaacggatcgaactgagtcgacctt

SEQ ID NO: 92171 - DNA, 25 bp, Homo sapien
ttagagcgtctgtcggtgtgacccc

SEQ ID NO: 92172 - DNA, 25 bp, Homo sapien
ttagagcgtctgacggtgtgacccc

SEQ ID NO: 92173 - DNA, 25 bp, Homo sapien
tgctcgtgtgagaagtgtcaccccg

SEQ ID NO: 92174 - DNA, 25 bp, Homo sapien
tgctcgtgtgagtagtgtcaccccg

SEQ ID NO: 92175 - DNA, 25 bp, Homo sapien
ttcttctcggagtgatccccgacgt

SEQ ID NO: 92176 - DNA, 25 bp, Homo sapien
ttcttctcggagagatccccgacgt

SEQ ID NO: 92177 - DNA, 25 bp, Homo sapien
atctgtgaaacaagagtcgaccacc

SEQ ID NO: 92178 - DNA, 25 bp, Homo sapien
atctgtgaaacatgagtcgaccacc

SEQ ID NO: 92179 - DNA, 25 bp, Homo sapien
gactagaagtcaaagaattacccat

SEQ ID NO: 92180 - DNA, 25 bp, Homo sapien
gactagaagtcatagaattacccat

SEQ ID NO: 92181 - DNA, 25 bp, Homo sapien
tggaagtcgtgatttacacaaccat

SEQ ID NO: 92182 - DNA, 25 bp, Homo sapien
tggaagtcgtgaattacacaaccat

SEQ ID NO: 92183 - DNA, 25 bp, Homo sapien
aggatacttgtaaattactccgaca

SEQ ID NO: 92184 - DNA, 25 bp, Homo sapien
aggatacttgtatattactccgaca

SEQ ID NO: 92185 - DNA, 25 bp, Homo sapien
cgatgttaaaaaagggtactaccct

SEQ ID NO: 92186 - DNA, 25 bp, Homo sapien
cgatgttaaaaatgggtactaccct

SEQ ID NO: 92187 - DNA, 25 bp, Homo sapien
cttcggtcaagaagggttctctatc

SEQ ID NO: 92188 - DNA, 25 bp, Homo sapien
cttcggtcaagatgggttctctatc

SEQ ID NO: 92189 - DNA, 25 bp, Homo sapien
agacgttcaagattcggacataaat

SEQ ID NO: 92190 - DNA, 25 bp, Homo sapien
agacgttcaagaatcggacataaat

SEQ ID NO: 92191 - DNA, 25 bp, Homo sapien
ggttttgatacgaccttactctaaa

SEQ ID NO: 92192 - DNA, 25 bp, Homo sapien
ggttttgatacgtccttactctaaa

SEQ ID NO: 92193 - DNA, 25 bp, Homo sapien
tgttaaacgtgtctcagtctcactt

SEQ ID NO: 92194 - DNA, 25 bp, Homo sapien
tgttaaacgtgtgtcagtctcactt

SEQ ID NO: 92195 - DNA, 25 bp, Homo sapien
ttataaaatagtggagtcacgtgtt

SEQ ID NO: 92196 - DNA, 25 bp, Homo sapien
ttataaaatagtcgagtcacgtgtt

SEQ ID NO: 92197 - DNA, 25 bp, Homo sapien
aagttaagacaaaagacgacacgtt

SEQ ID NO: 92198 - DNA, 25 bp, Homo sapien
aagttaagacaatagacgacacgtt

SEQ ID NO: 92199 - DNA, 25 bp, Homo sapien
aaacggtaagacatttatacactgg

SEQ ID NO: 92200 - DNA, 25 bp, Homo sapien
aaacggtaagacttttatacactgg

SEQ ID NO: 92201 - DNA, 25 bp, Homo sapien
tagtgtcgtgtcctttacgcagtga

SEQ ID NO: 92202 - DNA, 25 bp, Homo sapien
tagtgtcgtgtcgtttacgcagtga

SEQ ID NO: 92203 - DNA, 25 bp, Homo sapien
ccatctctgtatacaatccaggaga

SEQ ID NO: 92204 - DNA, 25 bp, Homo sapien
ccatctctgtattcaatccaggaga

SEQ ID NO: 92205 - DNA, 25 bp, Homo sapien
accgtcggtctttgtcctgcgtcga

SEQ ID NO: 92206 - DNA, 25 bp, Homo sapien
accgtcggtcttagtcctgcgtcga

SEQ ID NO: 92207 - DNA, 25 bp, Homo sapien
aatcgtagttttgatactttacgac

SEQ ID NO: 92208 - DNA, 25 bp, Homo sapien
aatcgtagttttcatactttacgac

SEQ ID NO: 92209 - DNA, 25 bp, Homo sapien
aaaagtctgtatcgtctcttccgta

SEQ ID NO: 92210 - DNA, 25 bp, Homo sapien
aaaagtctgtatggtctcttccgta

SEQ ID NO: 92211 - DNA, 25 bp, Homo sapien
atacatttagtgtttctagtaccag

SEQ ID NO: 92212 - DNA, 25 bp, Homo sapien
atacatttagtgattctagtaccag

SEQ ID NO: 92213 - DNA, 25 bp, Homo sapien
gagttctcatcttctttacgagctg

SEQ ID NO: 92214 - DNA, 25 bp, Homo sapien
gagttctcatctactttacgagctg

SEQ ID NO: 92215 - DNA, 25 bp, Homo sapien
ctggtttagttctatcttagctctg

SEQ ID NO: 92216 - DNA, 25 bp, Homo sapien
ctggtttagttcaatcttagctctg

SEQ ID NO: 92217 - DNA, 25 bp, Homo sapien
tttacgaccgaaacggtgtcgactg

SEQ ID NO: 92218 - DNA, 25 bp, Homo sapien
tttacgaccgaatcggtgtcgactg

SEQ ID NO: 92219 - DNA, 25 bp, Homo sapien
cccgttacagttaccacagtcactg

SEQ ID NO: 92220 - DNA, 25 bp, Homo sapien
cccgttacagtttccacagtcactg

SEQ ID NO: 92221 - DNA, 25 bp, Homo sapien
ctgtcaggtctactacaagttcgta

SEQ ID NO: 92222 - DNA, 25 bp, Homo sapien
ctgtcaggtctagtacaagttcgta

SEQ ID NO: 92223 - DNA, 25 bp, Homo sapien
cattcgttacatctgaagagtttta

SEQ ID NO: 92224 - DNA, 25 bp, Homo sapien
cattcgttacatgtgaagagtttta

SEQ ID NO: 92225 - DNA, 25 bp, Homo sapien
ttgtacagactctgcgtcccttttg

SEQ ID NO: 92226 - DNA, 25 bp, Homo sapien
ttgtacagactcagcgtcccttttg

SEQ ID NO: 92227 - DNA, 25 bp, Homo sapien
tcttagacacccgtttttcgagtta

SEQ ID NO: 92228 - DNA, 25 bp, Homo sapien
tcttagacacccctttttcgagtta

SEQ ID NO: 92229 - DNA, 25 bp, Homo sapien
ccgaggtaccgagaaatcgtgtccg

SEQ ID NO: 92230 - DNA, 25 bp, Homo sapien
ccgaggtaccgacaaatcgtgtccg

SEQ ID NO: 92231 - DNA, 25 bp, Homo sapien
tccccgaggaccaggaacatggtca

SEQ ID NO: 92232 - DNA, 25 bp, Homo sapien
tccccgaggacctggaacatggtca

SEQ ID NO: 92233 - DNA, 25 bp, Homo sapien
tccccgtcgcgactccaaaggagga

SEQ ID NO: 92234 - DNA, 25 bp, Homo sapien
tccccgtcgcgagtccaaaggagga

SEQ ID NO: 92235 - DNA, 25 bp, Homo sapien
acgcccggaagttcaataacccgag

SEQ ID NO: 92236 - DNA, 25 bp, Homo sapien
acgcccggaagtacaataacccgag

SEQ ID NO: 92237 - DNA, 25 bp, Homo sapien
aagtctcgatggtaacacagtccgg

SEQ ID NO: 92238 - DNA, 25 bp, Homo sapien
aagtctcgatggaaacacagtccgg

SEQ ID NO: 92239 - DNA, 25 bp, Homo sapien
aatctcatgtgtagctcagaccggt

SEQ ID NO: 92240 - DNA, 25 bp, Homo sapien
aatctcatgtgttgctcagaccggt

SEQ ID NO: 92241 - DNA, 25 bp, Homo sapien
tataatcctctctcgaccaaggtcg

SEQ ID NO: 92242 - DNA, 25 bp, Homo sapien
tataatcctctcacgaccaaggtcg

SEQ ID NO: 92243 - DNA, 25 bp, Homo sapien
gacattcctccgagacacgagaagc

SEQ ID NO: 92244 - DNA, 25 bp, Homo sapien
gacattcctccgtgacacgagaagc

SEQ ID NO: 92245 - DNA, 25 bp, Homo sapien
gttcctacacgaactaaacaagacg

SEQ ID NO: 92246 - DNA, 25 bp, Homo sapien
gttcctacacgatctaaacaagacg

SEQ ID NO: 92247 - DNA, 25 bp, Homo sapien
ggattccaaaccacctcgacgtact

SEQ ID NO: 92248 - DNA, 25 bp, Homo sapien
ggattccaaacctcctcgacgtact

SEQ ID NO: 92249 - DNA, 25 bp, Homo sapien
aggtagtacattaacaaggtcgcta

SEQ ID NO: 92250 - DNA, 25 bp, Homo sapien
aggtagtacatttacaaggtcgcta

SEQ ID NO: 92251 - DNA, 25 bp, Homo sapien
gaagacgttatattcaattctgaca

SEQ ID NO: 92252 - DNA, 25 bp, Homo sapien
gaagacgttataatcaattctgaca

SEQ ID NO: 92253 - DNA, 25 bp, Homo sapien
acggagacattactagggtcggaca

SEQ ID NO: 92254 - DNA, 25 bp, Homo sapien
acggagacattagtagggtcggaca

SEQ ID NO: 92255 - DNA, 25 bp, Homo sapien
ggaggtcctggctgtccgagtagaa

SEQ ID NO: 92256 - DNA, 25 bp, Homo sapien
ggaggtcctggcagtccgagtagaa

SEQ ID NO: 92257 - DNA, 25 bp, Homo sapien
gtggaacctccgtttcgcatctctc

SEQ ID NO: 92258 - DNA, 25 bp, Homo sapien
gtggaacctccgattcgcatctctc

SEQ ID NO: 92259 - DNA, 25 bp, Homo sapien
tgggttaggcggattcaacgtccgc

SEQ ID NO: 92260 - DNA, 25 bp, Homo sapien
tgggttaggcggtttcaacgtccgc

SEQ ID NO: 92261 - DNA, 25 bp, Homo sapien
atgtatttatctggttccttgtcaa

SEQ ID NO: 92262 - DNA, 25 bp, Homo sapien
atgtatttatctcgttccttgtcaa

SEQ ID NO: 92263 - DNA, 25 bp, Homo sapien
aggtcttcttccttcactcttggac

SEQ ID NO: 92264 - DNA, 25 bp, Homo sapien
aggtcttcttccatcactcttggac

SEQ ID NO: 92265 - DNA, 25 bp, Homo sapien
atccactcttctataggcttctgcg

SEQ ID NO: 92266 - DNA, 25 bp, Homo sapien
atccactcttctttaggcttctgcg

SEQ ID NO: 92267 - DNA, 25 bp, Homo sapien
tccacctgtctttggacttgacgat

SEQ ID NO: 92268 - DNA, 25 bp, Homo sapien
tccacctgtcttaggacttgacgat

SEQ ID NO: 92269 - DNA, 25 bp, Homo sapien
agttccttttacgtaggcttcgaag

SEQ ID NO: 92270 - DNA, 25 bp, Homo sapien
agttccttttacctaggcttcgaag

SEQ ID NO: 92271 - DNA, 25 bp, Homo sapien
acaccgtccctgaggggtcgtcact

SEQ ID NO: 92272 - DNA, 25 bp, Homo sapien
acaccgtccctgtggggtcgtcact

SEQ ID NO: 92273 - DNA, 25 bp, Homo sapien
ccaccgtttctactcgtgtgggtcc

SEQ ID NO: 92274 - DNA, 25 bp, Homo sapien
ccaccgtttctagtcgtgtgggtcc

SEQ ID NO: 92275 - DNA, 25 bp, Homo sapien
ctcgtttcgtaggtggtcttctccg

SEQ ID NO: 92276 - DNA, 25 bp, Homo sapien
ctcgtttcgtagctggtcttctccg

SEQ ID NO: 92277 - DNA, 25 bp, Homo sapien
cagatggagtcaggtgcacttcaca

SEQ ID NO: 92278 - DNA, 25 bp, Homo sapien
cagatggagtcacgtgcacttcaca

SEQ ID NO: 92279 - DNA, 25 bp, Homo sapien
aggtaagtccggaaagaacattcac

SEQ ID NO: 92280 - DNA, 25 bp, Homo sapien
aggtaagtccggtaagaacattcac

SEQ ID NO: 92281 - DNA, 25 bp, Homo sapien
tttaagtccggtcataagaattcac

SEQ ID NO: 92282 - DNA, 25 bp, Homo sapien
tttaagtccggtgataagaattcac

SEQ ID NO: 92283 - DNA, 25 bp, Homo sapien
agtacccttggatctcaccttatag

SEQ ID NO: 92284 - DNA, 25 bp, Homo sapien
agtacccttggaactcaccttatag

SEQ ID NO: 92285 - DNA, 25 bp, Homo sapien
cgtcgcatccgtgaaccctttaagt

SEQ ID NO: 92286 - DNA, 25 bp, Homo sapien
cgtcgcatccgtcaaccctttaagt

SEQ ID NO: 92287 - DNA, 25 bp, Homo sapien
gtctagagcaacgtctaagtttcag

SEQ ID NO: 92288 - DNA, 25 bp, Homo sapien
gtctagagcaacctctaagtttcag

SEQ ID NO: 92289 - DNA, 25 bp, Homo sapien
aggtagtagtggtccacgagagcca

SEQ ID NO: 92290 - DNA, 25 bp, Homo sapien
aggtagtagtggaccacgagagcca

SEQ ID NO: 92291 - DNA, 25 bp, Homo sapien
gaagagactctgaagcacaagaaca

SEQ ID NO: 92292 - DNA, 25 bp, Homo sapien
gaagagactctgtagcacaagaaca

SEQ ID NO: 92293 - DNA, 25 bp, Homo sapien
taaggacgttgtacaaccgaaatag

SEQ ID NO: 92294 - DNA, 25 bp, Homo sapien
taaggacgttgttcaaccgaaatag

SEQ ID NO: 92295 - DNA, 25 bp, Homo sapien
ggtttagggtcaggaggacccccta

SEQ ID NO: 92296 - DNA, 25 bp, Homo sapien
ggtttagggtcacgaggacccccta

SEQ ID NO: 92297 - DNA, 25 bp, Homo sapien
taaagtgtcgttagggagacccttc

SEQ ID NO: 92298 - DNA, 25 bp, Homo sapien
taaagtgtcgtttgggagacccttc

SEQ ID NO: 92299 - DNA, 25 bp, Homo sapien
tgaacctctttagagcgaccctgtc

SEQ ID NO: 92300 - DNA, 25 bp, Homo sapien
tgaacctctttacagcgaccctgtc

SEQ ID NO: 92301 - DNA, 25 bp, Homo sapien
tcctctcttattggtaggccctgtc

SEQ ID NO: 92302 - DNA, 25 bp, Homo sapien
tcctctcttattcgtaggccctgtc

SEQ ID NO: 92303 - DNA, 25 bp, Homo sapien
gtcattgtattactgtctacccgaa

SEQ ID NO: 92304 - DNA, 25 bp, Homo sapien
gtcattgtattagtgtctacccgaa

SEQ ID NO: 92305 - DNA, 25 bp, Homo sapien
tcagtgttaataggttacatcaaac

SEQ ID NO: 92306 - DNA, 25 bp, Homo sapien
tcagtgttaatacgttacatcaaac

SEQ ID NO: 92307 - DNA, 25 bp, Homo sapien
gtgacagttaaaatgatcctaaatc

SEQ ID NO: 92308 - DNA, 25 bp, Homo sapien
gtgacagttaaattgatcctaaatc

SEQ ID NO: 92309 - DNA, 25 bp, Homo sapien
tacttattttttatactaaaatttc

SEQ ID NO: 92310 - DNA, 25 bp, Homo sapien
tacttattttttttactaaaatttc

SEQ ID NO: 92311 - DNA, 25 bp, Homo sapien
actcgggtatactgtaaaatgtctt

SEQ ID NO: 92312 - DNA, 25 bp, Homo sapien
actcgggtatacagtaaaatgtctt

SEQ ID NO: 92313 - DNA, 25 bp, Homo sapien
ggtcggaggtcactctttgtgttgt

SEQ ID NO: 92314 - DNA, 25 bp, Homo sapien
ggtcggaggtcagtctttgtgttgt

SEQ ID NO: 92315 - DNA, 25 bp, Homo sapien
acgggtgaagaccttccaaggtagg

SEQ ID NO: 92316 - DNA, 25 bp, Homo sapien
acgggtgaagacgttccaaggtagg

SEQ ID NO: 92317 - DNA, 25 bp, Homo sapien
acaggggcgccgaaacctcaggaac

SEQ ID NO: 92318 - DNA, 25 bp, Homo sapien
acaggggcgccgtaacctcaggaac

SEQ ID NO: 92319 - DNA, 25 bp, Homo sapien
ggcagtctgcggactgtcaagtcac

SEQ ID NO: 92320 - DNA, 25 bp, Homo sapien
ggcagtctgcggtctgtcaagtcac

SEQ ID NO: 92321 - DNA, 25 bp, Homo sapien
gagccgttttcctgtagtttataga

SEQ ID NO: 92322 - DNA, 25 bp, Homo sapien
gagccgttttccagtagtttataga

SEQ ID NO: 92323 - DNA, 25 bp, Homo sapien
agactctgttctcgagactttacaa

SEQ ID NO: 92324 - DNA, 25 bp, Homo sapien
agactctgttctggagactttacaa

SEQ ID NO: 92325 - DNA, 25 bp, Homo sapien
cgtgagtgaggtatccgctagtagt

SEQ ID NO: 92326 - DNA, 25 bp, Homo sapien
cgtgagtgaggtttccgctagtagt

SEQ ID NO: 92327 - DNA, 25 bp, Homo sapien
gttttatgacggatctatacttaca

SEQ ID NO: 92328 - DNA, 25 bp, Homo sapien
gttttatgacggttctatacttaca

SEQ ID NO: 92329 - DNA, 25 bp, Homo sapien
caacagaagtagttcttgtctgata

SEQ ID NO: 92330 - DNA, 25 bp, Homo sapien
caacagaagtagatcttgtctgata

SEQ ID NO: 92331 - DNA, 25 bp, Homo sapien
gagggagaagccatctgcgtgtaca

SEQ ID NO: 92332 - DNA, 25 bp, Homo sapien
gagggagaagccttctgcgtgtaca

SEQ ID NO: 92333 - DNA, 25 bp, Homo sapien
acgggacactagatctttgtctttg

SEQ ID NO: 92334 - DNA, 25 bp, Homo sapien
acgggacactagttctttgtctttg

SEQ ID NO: 92335 - DNA, 25 bp, Homo sapien
gagtccgactatcttagttttaaga

SEQ ID NO: 92336 - DNA, 25 bp, Homo sapien
gagtccgactatgttagttttaaga

SEQ ID NO: 92337 - DNA, 25 bp, Homo sapien
aatgaccgatacgttgtttttagat

SEQ ID NO: 92338 - DNA, 25 bp, Homo sapien
aatgaccgataccttgtttttagat

SEQ ID NO: 92339 - DNA, 25 bp, Homo sapien
gttgaccaacacttgtccttcttgt

SEQ ID NO: 92340 - DNA, 25 bp, Homo sapien
gttgaccaacacatgtccttcttgt

SEQ ID NO: 92341 - DNA, 25 bp, Homo sapien
gtttaccagcgaggtgtagttccaa

SEQ ID NO: 92342 - DNA, 25 bp, Homo sapien
gtttaccagcgacgtgtagttccaa

SEQ ID NO: 92343 - DNA, 25 bp, Homo sapien
gttagagtggaagagtatccccgat

SEQ ID NO: 92344 - DNA, 25 bp, Homo sapien
gttagagtggaacagtatccccgat

SEQ ID NO: 92345 - DNA, 25 bp, Homo sapien
gttgtatccctgcacttcgtccaca

SEQ ID NO: 92346 - DNA, 25 bp, Homo sapien
gttgtatccctggacttcgtccaca

SEQ ID NO: 92347 - DNA, 25 bp, Homo sapien
tggctctcgagtcactgacgtccca

SEQ ID NO: 92348 - DNA, 25 bp, Homo sapien
tggctctcgagtgactgacgtccca

SEQ ID NO: 92349 - DNA, 25 bp, Homo sapien
gtggacgttaacaaccctacaccta

SEQ ID NO: 92350 - DNA, 25 bp, Homo sapien
gtggacgttaactaccctacaccta

SEQ ID NO: 92351 - DNA, 25 bp, Homo sapien
gtttaggtataatcacactcgaccc

SEQ ID NO: 92352 - DNA, 25 bp, Homo sapien
gtttaggtataaacacactcgaccc

SEQ ID NO: 92353 - DNA, 25 bp, Homo sapien
gtgtagtggtttagcggtctccgac

SEQ ID NO: 92354 - DNA, 25 bp, Homo sapien
gtgtagtggttttgcggtctccgac

SEQ ID NO: 92355 - DNA, 25 bp, Homo sapien
ttgactgtttgtatgctccgagacg

SEQ ID NO: 92356 - DNA, 25 bp, Homo sapien
ttgactgtttgtttgctccgagacg

SEQ ID NO: 92357 - DNA, 25 bp, Homo sapien
gcgaccttctcgtcggttcggaggt

SEQ ID NO: 92358 - DNA, 25 bp, Homo sapien
gcgaccttctcgacggttcggaggt

SEQ ID NO: 92359 - DNA, 25 bp, Homo sapien
gaaaaccctcttaccgtctccggag

SEQ ID NO: 92360 - DNA, 25 bp, Homo sapien
gaaaaccctctttccgtctccggag

SEQ ID NO: 92361 - DNA, 25 bp, Homo sapien
ttaaagacatcctctccgcttagga

SEQ ID NO: 92362 - DNA, 25 bp, Homo sapien
ttaaagacatccactccgcttagga

SEQ ID NO: 92363 - DNA, 25 bp, Homo sapien
gacatgtacgtaacctccaaacgat

SEQ ID NO: 92364 - DNA, 25 bp, Homo sapien
gacatgtacgtatcctccaaacgat

SEQ ID NO: 92365 - DNA, 25 bp, Homo sapien
agtttgacctgaagaccaaagaaga

SEQ ID NO: 92366 - DNA, 25 bp, Homo sapien
agtttgacctgatgaccaaagaaga

SEQ ID NO: 92367 - DNA, 25 bp, Homo sapien
atattgtccgatagccaaaaacgat

SEQ ID NO: 92368 - DNA, 25 bp, Homo sapien
atattgtccgattgccaaaaacgat

SEQ ID NO: 92369 - DNA, 25 bp, Homo sapien
tagtctgcatctaaaccagaaaagg

SEQ ID NO: 92370 - DNA, 25 bp, Homo sapien
tagtctgcatcttaaccagaaaagg

SEQ ID NO: 92371 - DNA, 25 bp, Homo sapien
ttggacttcagtatcgtttaatatc

SEQ ID NO: 92372 - DNA, 25 bp, Homo sapien
ttggacttcagtttcgtttaatatc

SEQ ID NO: 92373 - DNA, 25 bp, Homo sapien
ggtcccctgatctacttataaactg

SEQ ID NO: 92374 - DNA, 25 bp, Homo sapien
ggtcccctgatcaacttataaactg

SEQ ID NO: 92375 - DNA, 25 bp, Homo sapien
tccccggtatgaggttgaggacgtc

SEQ ID NO: 92376 - DNA, 25 bp, Homo sapien
tccccggtatgacgttgaggacgtc

SEQ ID NO: 92377 - DNA, 25 bp, Homo sapien
cccctcttccgatgtgtagggtctc

SEQ ID NO: 92378 - DNA, 25 bp, Homo sapien
cccctcttccgaagtgtagggtctc

SEQ ID NO: 92379 - DNA, 25 bp, Homo sapien
tcatggtaccattgtattagtcgtt

SEQ ID NO: 92380 - DNA, 25 bp, Homo sapien
tcatggtaccatagtattagtcgtt

SEQ ID NO: 92381 - DNA, 25 bp, Homo sapien
ttgttgtactcatcagagaagtcat

SEQ ID NO: 92382 - DNA, 25 bp, Homo sapien
ttgttgtactcaacagagaagtcat

SEQ ID NO: 92383 - DNA, 25 bp, Homo sapien
tgtcgaagggtaacgggactcttat

SEQ ID NO: 92384 - DNA, 25 bp, Homo sapien
tgtcgaagggtatcgggactcttat

SEQ ID NO: 92385 - DNA, 25 bp, Homo sapien
ctcgaaaggacgacggtgaccgtga

SEQ ID NO: 92386 - DNA, 25 bp, Homo sapien
ctcgaaaggacgtcggtgaccgtga

SEQ ID NO: 92387 - DNA, 25 bp, Homo sapien
cttatacaaagacgtcacgttgttc

SEQ ID NO: 92388 - DNA, 25 bp, Homo sapien
cttatacaaagaggtcacgttgttc

SEQ ID NO: 92389 - DNA, 25 bp, Homo sapien
cctggacaaacgtctgttctacgtt

SEQ ID NO: 92390 - DNA, 25 bp, Homo sapien
cctggacaaacgactgttctacgtt

SEQ ID NO: 92391 - DNA, 25 bp, Homo sapien
ccacctaagagtccatttcgtcggt

SEQ ID NO: 92392 - DNA, 25 bp, Homo sapien
ccacctaagagtgcatttcgtcggt

SEQ ID NO: 92393 - DNA, 25 bp, Homo sapien
agagcggtgtgtaggaccctcttga

SEQ ID NO: 92394 - DNA, 25 bp, Homo sapien
agagcggtgtgttggaccctcttga

SEQ ID NO: 92395 - DNA, 25 bp, Homo sapien
ccaccggaatacgagaccatggtga

SEQ ID NO: 92396 - DNA, 25 bp, Homo sapien
ccaccggaataccagaccatggtga

SEQ ID NO: 92397 - DNA, 25 bp, Homo sapien
tatgaccgctgaggtcatggtagag

SEQ ID NO: 92398 - DNA, 25 bp, Homo sapien
tatgaccgctgacgtcatggtagag

SEQ ID NO: 92399 - DNA, 25 bp, Homo sapien
cgtccagacccttccgttatgtttt

SEQ ID NO: 92400 - DNA, 25 bp, Homo sapien
cgtccagaccctaccgttatgtttt

SEQ ID NO: 92401 - DNA, 25 bp, Homo sapien
cgaaggtctccttgcgttgttattt

SEQ ID NO: 92402 - DNA, 25 bp, Homo sapien
cgaaggtctcctagcgttgttattt

SEQ ID NO: 92403 - DNA, 25 bp, Homo sapien
ggaggattcctaagattcgtccttt

SEQ ID NO: 92404 - DNA, 25 bp, Homo sapien
ggaggattcctatgattcgtccttt

SEQ ID NO: 92405 - DNA, 25 bp, Homo sapien
gtctggttctttgagtgtcctccac

SEQ ID NO: 92406 - DNA, 25 bp, Homo sapien
gtctggttctttcagtgtcctccac

SEQ ID NO: 92407 - DNA, 25 bp, Homo sapien
ctttttaggtgtggaggtagtcagt

SEQ ID NO: 92408 - DNA, 25 bp, Homo sapien
ctttttaggtgtcgaggtagtcagt

SEQ ID NO: 92409 - DNA, 25 bp, Homo sapien
ggttggtgagagaatgacgtctcca

SEQ ID NO: 92410 - DNA, 25 bp, Homo sapien
ggttggtgagagtatgacgtctcca

SEQ ID NO: 92411 - DNA, 25 bp, Homo sapien
accgtaatgttatactgtttcctcg

SEQ ID NO: 92412 - DNA, 25 bp, Homo sapien
accgtaatgttaaactgtttcctcg

SEQ ID NO: 92413 - DNA, 25 bp, Homo sapien
ccctaaggtgtatcctattctggtg

SEQ ID NO: 92414 - DNA, 25 bp, Homo sapien
ccctaaggtgtaacctattctggtg

SEQ ID NO: 92415 - DNA, 25 bp, Homo sapien
acctacgctttgtcgacttctgcgc

SEQ ID NO: 92416 - DNA, 25 bp, Homo sapien
acctacgctttgacgacttctgcgc

SEQ ID NO: 92417 - DNA, 25 bp, Homo sapien
tgaagaacatttctgcatagcggtt

SEQ ID NO: 92418 - DNA, 25 bp, Homo sapien
tgaagaacatttgtgcatagcggtt

SEQ ID NO: 92419 - DNA, 25 bp, Homo sapien
gaggtccagcctgtaccgggagaac

SEQ ID NO: 92420 - DNA, 25 bp, Homo sapien
gaggtccagcctctaccgggagaac

SEQ ID NO: 92421 - DNA, 25 bp, Homo sapien
gagggagagtttaccaccgaaccct

SEQ ID NO: 92422 - DNA, 25 bp, Homo sapien
gagggagagttttccaccgaaccct

SEQ ID NO: 92423 - DNA, 25 bp, Homo sapien
ctgtcggtgccgtttgtccagccag

SEQ ID NO: 92424 - DNA, 25 bp, Homo sapien
ctgtcggtgccgattgtccagccag

SEQ ID NO: 92425 - DNA, 25 bp, Homo sapien
gtgtgacctctcgtggtccagccgc

SEQ ID NO: 92426 - DNA, 25 bp, Homo sapien
gtgtgacctctcctggtccagccgc

SEQ ID NO: 92427 - DNA, 25 bp, Homo sapien
tgaactcctctaggtccgaccggtg

SEQ ID NO: 92428 - DNA, 25 bp, Homo sapien
tgaactcctctacgtccgaccggtg

SEQ ID NO: 92429 - DNA, 25 bp, Homo sapien
tgaggtcgagcatgtaccaccagtc

SEQ ID NO: 92430 - DNA, 25 bp, Homo sapien
tgaggtcgagcaagtaccaccagtc

SEQ ID NO: 92431 - DNA, 25 bp, Homo sapien
taagggaagaagtctcccaacgagc

SEQ ID NO: 92432 - DNA, 25 bp, Homo sapien
taagggaagaagactcccaacgagc

SEQ ID NO: 92433 - DNA, 25 bp, Homo sapien
taagataagtattccgtacactgta

SEQ ID NO: 92434 - DNA, 25 bp, Homo sapien
taagataagtataccgtacactgta

SEQ ID NO: 92435 - DNA, 25 bp, Homo sapien
ttcacgtaacggttctgtatcagtg

SEQ ID NO: 92436 - DNA, 25 bp, Homo sapien
ttcacgtaacggatctgtatcagtg

SEQ ID NO: 92437 - DNA, 25 bp, Homo sapien
attgtctcgatcgaccctgttagtg

SEQ ID NO: 92438 - DNA, 25 bp, Homo sapien
attgtctcgatccaccctgttagtg

SEQ ID NO: 92439 - DNA, 25 bp, Homo sapien
catattctcgctccaggtggttaga

SEQ ID NO: 92440 - DNA, 25 bp, Homo sapien
catattctcgctgcaggtggttaga

SEQ ID NO: 92441 - DNA, 25 bp, Homo sapien
ttctaatgagtgtcctttagataaa

SEQ ID NO: 92442 - DNA, 25 bp, Homo sapien
ttctaatgagtgacctttagataaa

SEQ ID NO: 92443 - DNA, 25 bp, Homo sapien
ctttttactgtagtcttgaatcaag

SEQ ID NO: 92444 - DNA, 25 bp, Homo sapien
ctttttactgtactcttgaatcaag

SEQ ID NO: 92445 - DNA, 25 bp, Homo sapien
tttccggtccgttccgactaagagg

SEQ ID NO: 92446 - DNA, 25 bp, Homo sapien
tttccggtccgtaccgactaagagg

SEQ ID NO: 92447 - DNA, 25 bp, Homo sapien
catcttgagtctctgacctttgagg

SEQ ID NO: 92448 - DNA, 25 bp, Homo sapien
catcttgagtctgtgacctttgagg

SEQ ID NO: 92449 - DNA, 25 bp, Homo sapien
acatgttgatctttttgcctgaggt

SEQ ID NO: 92450 - DNA, 25 bp, Homo sapien
acatgttgatctatttgcctgaggt

SEQ ID NO: 92451 - DNA, 25 bp, Homo sapien
acaaccgaaagattttgcccgaact

SEQ ID NO: 92452 - DNA, 25 bp, Homo sapien
acaaccgaaagaatttgcccgaact

SEQ ID NO: 92453 - DNA, 25 bp, Homo sapien
aggagaggcgacgaagtctctcgaa

SEQ ID NO: 92454 - DNA, 25 bp, Homo sapien
aggagaggcgaccaagtctctcgaa

SEQ ID NO: 92455 - DNA, 25 bp, Homo sapien
aaagaggtggactaagtcgaatcac

SEQ ID NO: 92456 - DNA, 25 bp, Homo sapien
aaagaggtggacaaagtcgaatcac

SEQ ID NO: 92457 - DNA, 25 bp, Homo sapien
tcaggtatgaccagaaacatgtacg

SEQ ID NO: 92458 - DNA, 25 bp, Homo sapien
tcaggtatgacctgaaacatgtacg

SEQ ID NO: 92459 - DNA, 25 bp, Homo sapien
tctcagattgatcacgataaatgtt

SEQ ID NO: 92460 - DNA, 25 bp, Homo sapien
tctcagattgatgacgataaatgtt

SEQ ID NO: 92461 - DNA, 25 bp, Homo sapien
gtagtaccggttgaccatccaagga

SEQ ID NO: 92462 - DNA, 25 bp, Homo sapien
gtagtaccggttcaccatccaagga

SEQ ID NO: 92463 - DNA, 25 bp, Homo sapien
gttatggtctctataacaaatggac

SEQ ID NO: 92464 - DNA, 25 bp, Homo sapien
gttatggtctctttaacaaatggac

SEQ ID NO: 92465 - DNA, 25 bp, Homo sapien
cggactgagtctccacttctgacga

SEQ ID NO: 92466 - DNA, 25 bp, Homo sapien
cggactgagtctgcacttctgacga

SEQ ID NO: 92467 - DNA, 25 bp, Homo sapien
atacacgaggtgctaccgataccag

SEQ ID NO: 92468 - DNA, 25 bp, Homo sapien
atacacgaggtggtaccgataccag

SEQ ID NO: 92469 - DNA, 25 bp, Homo sapien
agaactccacggagaccgacgtgga

SEQ ID NO: 92470 - DNA, 25 bp, Homo sapien
agaactccacggtgaccgacgtgga

SEQ ID NO: 92471 - DNA, 25 bp, Homo sapien
gaattccctggtacggacgtgtcga

SEQ ID NO: 92472 - DNA, 25 bp, Homo sapien
gaattccctggttcggacgtgtcga

SEQ ID NO: 92473 - DNA, 25 bp, Homo sapien
cggctaacatacgtgcacgaggtga

SEQ ID NO: 92474 - DNA, 25 bp, Homo sapien
cggctaacatacctgcacgaggtga

SEQ ID NO: 92475 - DNA, 25 bp, Homo sapien
gacataccgtacctgtcgaagatca

SEQ ID NO: 92476 - DNA, 25 bp, Homo sapien
gacataccgtacgtgtcgaagatca

SEQ ID NO: 92477 - DNA, 25 bp, Homo sapien
gacactgtaggaatctagagtctca

SEQ ID NO: 92478 - DNA, 25 bp, Homo sapien
gacactgtaggattctagagtctca

SEQ ID NO: 92479 - DNA, 25 bp, Homo sapien
ggtacgacatcttttctggagagac

SEQ ID NO: 92480 - DNA, 25 bp, Homo sapien
ggtacgacatctattctggagagac

SEQ ID NO: 92481 - DNA, 25 bp, Homo sapien
gggaaactttagtttcctcgagaga

SEQ ID NO: 92482 - DNA, 25 bp, Homo sapien
gggaaactttagattcctcgagaga

SEQ ID NO: 92483 - DNA, 25 bp, Homo sapien
tagtgaaattcaggtaccccggtaa

SEQ ID NO: 92484 - DNA, 25 bp, Homo sapien
tagtgaaattcacgtaccccggtaa

SEQ ID NO: 92485 - DNA, 25 bp, Homo sapien
aaattatccgatggacactttctcg

SEQ ID NO: 92486 - DNA, 25 bp, Homo sapien
aaattatccgatcgacactttctcg

SEQ ID NO: 92487 - DNA, 25 bp, Homo sapien
gggtaaataattttgtggtcgttta

SEQ ID NO: 92488 - DNA, 25 bp, Homo sapien
gggtaaataattatgtggtcgttta

SEQ ID NO: 92489 - DNA, 25 bp, Homo sapien
cgtgcaggaaaactgacagtgtttt

SEQ ID NO: 92490 - DNA, 25 bp, Homo sapien
cgtgcaggaaaagtgacagtgtttt

SEQ ID NO: 92491 - DNA, 25 bp, Homo sapien
ccagaaagaagtagggacattttac

SEQ ID NO: 92492 - DNA, 25 bp, Homo sapien
ccagaaagaagttgggacattttac

SEQ ID NO: 92493 - DNA, 25 bp, Homo sapien
caggatttgtacaatgtacattcaa

SEQ ID NO: 92494 - DNA, 25 bp, Homo sapien
caggatttgtactatgtacattcaa

SEQ ID NO: 92495 - DNA, 25 bp, Homo sapien
ggaattaaacttacgttttactacg

SEQ ID NO: 92496 - DNA, 25 bp, Homo sapien
ggaattaaactttcgttttactacg

SEQ ID NO: 92497 - DNA, 25 bp, Homo sapien
ggtttttgacactgaccttaataca

SEQ ID NO: 92498 - DNA, 25 bp, Homo sapien
ggtttttgacacagaccttaataca

SEQ ID NO: 92499 - DNA, 25 bp, Homo sapien
tcactgatggactcgtaaacagaag

SEQ ID NO: 92500 - DNA, 25 bp, Homo sapien
tcactgatggacacgtaaacagaag

SEQ ID NO: 92501 - DNA, 25 bp, Homo sapien
accgccagtgacactacaacatcga

SEQ ID NO: 92502 - DNA, 25 bp, Homo sapien
accgccagtgactctacaacatcga

SEQ ID NO: 92503 - DNA, 25 bp, Homo sapien
caccgggagcctgtaaccacagacg

SEQ ID NO: 92504 - DNA, 25 bp, Homo sapien
caccgggagcctctaaccacagacg

SEQ ID NO: 92505 - DNA, 25 bp, Homo sapien
ctcgggaccccctgaccgagtgtgt

SEQ ID NO: 92506 - DNA, 25 bp, Homo sapien
ctcgggacccccagaccgagtgtgt

SEQ ID NO: 92507 - DNA, 25 bp, Homo sapien
gtagactgaccgacgctcaggtagt

SEQ ID NO: 92508 - DNA, 25 bp, Homo sapien
gtagactgaccgtcgctcaggtagt

SEQ ID NO: 92509 - DNA, 25 bp, Homo sapien
taaatagacgtcgtagaaactcgag

SEQ ID NO: 92510 - DNA, 25 bp, Homo sapien
taaatagacgtcctagaaactcgag

SEQ ID NO: 92511 - DNA, 25 bp, Homo sapien
ccccgggtcgtgtcgaagtactcga

SEQ ID NO: 92512 - DNA, 25 bp, Homo sapien
ccccgggtcgtgacgaagtactcga

SEQ ID NO: 92513 - DNA, 25 bp, Homo sapien
cccggcgctcttggaccgagcgtag

SEQ ID NO: 92514 - DNA, 25 bp, Homo sapien
cccggcgctcttcgaccgagcgtag

SEQ ID NO: 92515 - DNA, 25 bp, Homo sapien
gcgcggtcctcgctcggccagcgag

SEQ ID NO: 92516 - DNA, 25 bp, Homo sapien
gcgcggtcctcggtcggccagcgag

SEQ ID NO: 92517 - DNA, 25 bp, Homo sapien
gtccggggtccgtcgttccagtaga

SEQ ID NO: 92518 - DNA, 25 bp, Homo sapien
gtccggggtccgacgttccagtaga

SEQ ID NO: 92519 - DNA, 25 bp, Homo sapien
cagttggttgtccaagttaaaatac

SEQ ID NO: 92520 - DNA, 25 bp, Homo sapien
cagttggttgtcgaagttaaaatac

SEQ ID NO: 92521 - DNA, 25 bp, Homo sapien
tttgaaccgtttgtagtacctctaa

SEQ ID NO: 92522 - DNA, 25 bp, Homo sapien
tttgaaccgtttctagtacctctaa

SEQ ID NO: 92523 - DNA, 25 bp, Homo sapien
atgtctatatttcatattaccaagt

SEQ ID NO: 92524 - DNA, 25 bp, Homo sapien
atgtctatatttgatattaccaagt

SEQ ID NO: 92525 - DNA, 25 bp, Homo sapien
tcgtcttacacgacactcaacaagg

SEQ ID NO: 92526 - DNA, 25 bp, Homo sapien
tcgtcttacacgtcactcaacaagg

SEQ ID NO: 92527 - DNA, 25 bp, Homo sapien
atgttattcgatccagaagtcatgg

SEQ ID NO: 92528 - DNA, 25 bp, Homo sapien
atgttattcgatgcagaagtcatgg

SEQ ID NO: 92529 - DNA, 25 bp, Homo sapien
tgacttatcggacacgggcacgggt

SEQ ID NO: 92530 - DNA, 25 bp, Homo sapien
tgacttatcggagacgggcacgggt

SEQ ID NO: 92531 - DNA, 25 bp, Homo sapien
gggactcccggctaatgactggagt

SEQ ID NO: 92532 - DNA, 25 bp, Homo sapien
gggactcccggcaaatgactggagt

SEQ ID NO: 92533 - DNA, 25 bp, Homo sapien
tacgtcccgggaaccgagaccggag

SEQ ID NO: 92534 - DNA, 25 bp, Homo sapien
tacgtcccgggatccgagaccggag

SEQ ID NO: 92535 - DNA, 25 bp, Homo sapien
aggtctgtaaccttaatagtctgtg

SEQ ID NO: 92536 - DNA, 25 bp, Homo sapien
aggtctgtaaccataatagtctgtg

SEQ ID NO: 92537 - DNA, 25 bp, Homo sapien
cgtgactctcactaaaatagctcgt

SEQ ID NO: 92538 - DNA, 25 bp, Homo sapien
cgtgactctcacaaaaatagctcgt

SEQ ID NO: 92539 - DNA, 25 bp, Homo sapien
tggatatcacaaattcagtgtactt

SEQ ID NO: 92540 - DNA, 25 bp, Homo sapien
tggatatcacaatttcagtgtactt

SEQ ID NO: 92541 - DNA, 25 bp, Homo sapien
gagtgggaacagtgggtcaactcct

SEQ ID NO: 92542 - DNA, 25 bp, Homo sapien
gagtgggaacagagggtcaactcct

SEQ ID NO: 92543 - DNA, 25 bp, Homo sapien
caagtgtatcagttttgtgaccttc

SEQ ID NO: 92544 - DNA, 25 bp, Homo sapien
caagtgtatcagatttgtgaccttc

SEQ ID NO: 92545 - DNA, 25 bp, Homo sapien
ccgaatgttcaattattgtcctgtt

SEQ ID NO: 92546 - DNA, 25 bp, Homo sapien
ccgaatgttcaaatattgtcctgtt

SEQ ID NO: 92547 - DNA, 25 bp, Homo sapien
tttgagtacctgtcggtgccgtttg

SEQ ID NO: 92548 - DNA, 25 bp, Homo sapien
tttgagtacctgacggtgccgtttg

SEQ ID NO: 92549 - DNA, 25 bp, Homo sapien
aaataggctataaactcctgatatg

SEQ ID NO: 92550 - DNA, 25 bp, Homo sapien
aaataggctatatactcctgatatg

SEQ ID NO: 92551 - DNA, 25 bp, Homo sapien
tttaaaggaacaagtaagtctgcca

SEQ ID NO: 92552 - DNA, 25 bp, Homo sapien
tttaaaggaacatgtaagtctgcca

SEQ ID NO: 92553 - DNA, 25 bp, Homo sapien
agatcggagatagaagtcgtcaaga

SEQ ID NO: 92554 - DNA, 25 bp, Homo sapien
agatcggagatacaagtcgtcaaga

SEQ ID NO: 92555 - DNA, 25 bp, Homo sapien
ctccgtccttagacttttccacgga

SEQ ID NO: 92556 - DNA, 25 bp, Homo sapien
ctccgtccttagtcttttccacgga

SEQ ID NO: 92557 - DNA, 25 bp, Homo sapien
ctcgagtccactatctcgagtccgt

SEQ ID NO: 92558 - DNA, 25 bp, Homo sapien
ctcgagtccactttctcgagtccgt

SEQ ID NO: 92559 - DNA, 25 bp, Homo sapien
gcgcagagcttcttcgcgacgtccg

SEQ ID NO: 92560 - DNA, 25 bp, Homo sapien
gcgcagagcttcatcgcgacgtccg

SEQ ID NO: 92561 - DNA, 25 bp, Homo sapien
gtaagagccttattcaatcggcgcg

SEQ ID NO: 92562 - DNA, 25 bp, Homo sapien
gtaagagccttaatcaatcggcgcg

SEQ ID NO: 92563 - DNA, 25 bp, Homo sapien
taccccgctgtctaaacgaggtcga

SEQ ID NO: 92564 - DNA, 25 bp, Homo sapien
taccccgctgtcaaaacgaggtcga

SEQ ID NO: 92565 - DNA, 25 bp, Homo sapien
tacagacctcgtacggaaacccaat

SEQ ID NO: 92566 - DNA, 25 bp, Homo sapien
tacagacctcgttcggaaacccaat

SEQ ID NO: 92567 - DNA, 25 bp, Homo sapien
taccgtacttccgggttcacccaga

SEQ ID NO: 92568 - DNA, 25 bp, Homo sapien
taccgtacttcccggttcacccaga

SEQ ID NO: 92569 - DNA, 25 bp, Homo sapien
ttcgtctgctgctggagccctgtct

SEQ ID NO: 92570 - DNA, 25 bp, Homo sapien
ttcgtctgctgcaggagccctgtct

SEQ ID NO: 92571 - DNA, 25 bp, Homo sapien
catcgacttgcagaggggcctcggt

SEQ ID NO: 92572 - DNA, 25 bp, Homo sapien
catcgacttgcacaggggcctcggt

SEQ ID NO: 92573 - DNA, 25 bp, Homo sapien
acatgaaactcaagggagtcggcaa

SEQ ID NO: 92574 - DNA, 25 bp, Homo sapien
acatgaaactcatgggagtcggcaa

SEQ ID NO: 92575 - DNA, 25 bp, Homo sapien
ctatgacaagactcgcgaagggcaa

SEQ ID NO: 92576 - DNA, 25 bp, Homo sapien
ctatgacaagacacgcgaagggcaa

SEQ ID NO: 92577 - DNA, 25 bp, Homo sapien
tccccgggaagaaccacagtcctaa

SEQ ID NO: 92578 - DNA, 25 bp, Homo sapien
tccccgggaagatccacagtcctaa

SEQ ID NO: 92579 - DNA, 25 bp, Homo sapien
acagaagtctctgctctacatgaac

SEQ ID NO: 92580 - DNA, 25 bp, Homo sapien
acagaagtctctcctctacatgaac

SEQ ID NO: 92581 - DNA, 25 bp, Homo sapien
aatgtttgtgtccttctcgactagg

SEQ ID NO: 92582 - DNA, 25 bp, Homo sapien
aatgtttgtgtcgttctcgactagg

SEQ ID NO: 92583 - DNA, 25 bp, Homo sapien
gacgaggacttggtcctccgaagta

SEQ ID NO: 92584 - DNA, 25 bp, Homo sapien
gacgaggacttgctcctccgaagta

SEQ ID NO: 92585 - DNA, 25 bp, Homo sapien
ggaaggacactgtcacttccgacga

SEQ ID NO: 92586 - DNA, 25 bp, Homo sapien
ggaaggacactgacacttccgacga

SEQ ID NO: 92587 - DNA, 25 bp, Homo sapien
aaggagagtagactatactgcacaa

SEQ ID NO: 92588 - DNA, 25 bp, Homo sapien
aaggagagtagagtatactgcacaa

SEQ ID NO: 92589 - DNA, 25 bp, Homo sapien
taaggtagacacatcttctgaccca

SEQ ID NO: 92590 - DNA, 25 bp, Homo sapien
taaggtagacacttcttctgaccca

SEQ ID NO: 92591 - DNA, 25 bp, Homo sapien
gacgatgaattttggtctctacgta

SEQ ID NO: 92592 - DNA, 25 bp, Homo sapien
gacgatgaatttaggtctctacgta

SEQ ID NO: 92593 - DNA, 25 bp, Homo sapien
aacacgtcaacttgggtaggatgta

SEQ ID NO: 92594 - DNA, 25 bp, Homo sapien
aacacgtcaactagggtaggatgta

SEQ ID NO: 92595 - DNA, 25 bp, Homo sapien
tacaatcacatgttagataccttgg

SEQ ID NO: 92596 - DNA, 25 bp, Homo sapien
tacaatcacatgatagataccttgg

SEQ ID NO: 92597 - DNA, 25 bp, Homo sapien
tgaccttcactgagttgtcactggg

SEQ ID NO: 92598 - DNA, 25 bp, Homo sapien
tgaccttcactgtgttgtcactggg

SEQ ID NO: 92599 - DNA, 25 bp, Homo sapien
ctcttctagtagtagttgcacccgc

SEQ ID NO: 92600 - DNA, 25 bp, Homo sapien
ctcttctagtagaagttgcacccgc

SEQ ID NO: 92601 - DNA, 25 bp, Homo sapien
ctcgttcatgggagacctacacgtc

SEQ ID NO: 92602 - DNA, 25 bp, Homo sapien
ctcgttcatgggtgacctacacgtc

SEQ ID NO: 92603 - DNA, 25 bp, Homo sapien
cggacttgaaggttcactgtcgtct

SEQ ID NO: 92604 - DNA, 25 bp, Homo sapien
cggacttgaaggatcactgtcgtct

SEQ ID NO: 92605 - DNA, 25 bp, Homo sapien
ccctctacgtcgttgttctttcgtc

SEQ ID NO: 92606 - DNA, 25 bp, Homo sapien
ccctctacgtcgatgttctttcgtc

SEQ ID NO: 92607 - DNA, 25 bp, Homo sapien
ctctcactctctcttgaccagggtt

SEQ ID NO: 92608 - DNA, 25 bp, Homo sapien
ctctcactctctgttgaccagggtt

SEQ ID NO: 92609 - DNA, 25 bp, Homo sapien
tgtagactcgctgtgcataaatgtt

SEQ ID NO: 92610 - DNA, 25 bp, Homo sapien
tgtagactcgctctgcataaatgtt

SEQ ID NO: 92611 - DNA, 25 bp, Homo sapien
ggtaagagtggtcttacaaaaaact

SEQ ID NO: 92612 - DNA, 25 bp, Homo sapien
ggtaagagtggtgttacaaaaaact

SEQ ID NO: 92613 - DNA, 25 bp, Homo sapien
aaaggactctctctgtaaaaggtgc

SEQ ID NO: 92614 - DNA, 25 bp, Homo sapien
aaaggactctctgtgtaaaaggtgc

SEQ ID NO: 92615 - DNA, 25 bp, Homo sapien
ccgacatcctgtgcagtaagtttgg

SEQ ID NO: 92616 - DNA, 25 bp, Homo sapien
ccgacatcctgtccagtaagtttgg

SEQ ID NO: 92617 - DNA, 25 bp, Homo sapien
agttgtcaacgaaagtacaacttcc

SEQ ID NO: 92618 - DNA, 25 bp, Homo sapien
agttgtcaacgatagtacaacttcc

SEQ ID NO: 92619 - DNA, 25 bp, Homo sapien
tcgagtagagtccattcattgtccg

SEQ ID NO: 92620 - DNA, 25 bp, Homo sapien
tcgagtagagtcgattcattgtccg

SEQ ID NO: 92621 - DNA, 25 bp, Homo sapien
acgagtaccgtatccgatacccacg

SEQ ID NO: 92622 - DNA, 25 bp, Homo sapien
acgagtaccgtaaccgatacccacg

SEQ ID NO: 92623 - DNA, 25 bp, Homo sapien
agtaactagtaaagatcaacctctg

SEQ ID NO: 92624 - DNA, 25 bp, Homo sapien
agtaactagtaatgatcaacctctg

SEQ ID NO: 92625 - DNA, 25 bp, Homo sapien
gtcatcagataattccgtaattatg

SEQ ID NO: 92626 - DNA, 25 bp, Homo sapien
gtcatcagataaatccgtaattatg

SEQ ID NO: 92627 - DNA, 25 bp, Homo sapien
tttagtcacaaagaacccttcttgg

SEQ ID NO: 92628 - DNA, 25 bp, Homo sapien
tttagtcacaaacaacccttcttgg

SEQ ID NO: 92629 - DNA, 25 bp, Homo sapien
tgacaacggaggaatcgctgtttgg

SEQ ID NO: 92630 - DNA, 25 bp, Homo sapien
tgacaacggaggtatcgctgtttgg

SEQ ID NO: 92631 - DNA, 25 bp, Homo sapien
tgaccgtcgaaattcttcgtttcct

SEQ ID NO: 92632 - DNA, 25 bp, Homo sapien
tgaccgtcgaaaatcttcgtttcct

SEQ ID NO: 92633 - DNA, 25 bp, Homo sapien
tgttcaccttagagatttgtcaacc

SEQ ID NO: 92634 - DNA, 25 bp, Homo sapien
tgttcaccttagtgatttgtcaacc

SEQ ID NO: 92635 - DNA, 25 bp, Homo sapien
gtctgagtcccgtggtgttgcgcca

SEQ ID NO: 92636 - DNA, 25 bp, Homo sapien
gtctgagtcccgaggtgttgcgcca

SEQ ID NO: 92637 - DNA, 25 bp, Homo sapien
tctttgaccgatgttaagactaaga

SEQ ID NO: 92638 - DNA, 25 bp, Homo sapien
tctttgaccgatcttaagactaaga

SEQ ID NO: 92639 - DNA, 25 bp, Homo sapien
catcctgaccggtcatcacggaagc

SEQ ID NO: 92640 - DNA, 25 bp, Homo sapien
catcctgaccggacatcacggaagc

SEQ ID NO: 92641 - DNA, 25 bp, Homo sapien
tcgttgattccataaaatcgcagtg

SEQ ID NO: 92642 - DNA, 25 bp, Homo sapien
tcgttgattccaaaaaatcgcagtg

SEQ ID NO: 92643 - DNA, 25 bp, Homo sapien
tctttttcacaggaagtacccaatg

SEQ ID NO: 92644 - DNA, 25 bp, Homo sapien
tctttttcacagcaagtacccaatg

SEQ ID NO: 92645 - DNA, 25 bp, Homo sapien
tattccgtgggtagacagacggttg

SEQ ID NO: 92646 - DNA, 25 bp, Homo sapien
tattccgtgggttgacagacggttg

SEQ ID NO: 92647 - DNA, 25 bp, Homo sapien
tatacctattttcgagacgtcacct

SEQ ID NO: 92648 - DNA, 25 bp, Homo sapien
tatacctattttggagacgtcacct

SEQ ID NO: 92649 - DNA, 25 bp, Homo sapien
aataggatttacgagagaccagtac

SEQ ID NO: 92650 - DNA, 25 bp, Homo sapien
aataggatttaccagagaccagtac

SEQ ID NO: 92651 - DNA, 25 bp, Homo sapien
actctattgttcatcggaacgagtc

SEQ ID NO: 92652 - DNA, 25 bp, Homo sapien
actctattgttcttcggaacgagtc

SEQ ID NO: 92653 - DNA, 25 bp, Homo sapien
gtggtctgacgttttcctgcaggtg

SEQ ID NO: 92654 - DNA, 25 bp, Homo sapien
gtggtctgacgtattcctgcaggtg

SEQ ID NO: 92655 - DNA, 25 bp, Homo sapien
cagcttcaggtccttccgacggacg

SEQ ID NO: 92656 - DNA, 25 bp, Homo sapien
cagcttcaggtcgttccgacggacg

SEQ ID NO: 92657 - DNA, 25 bp, Homo sapien
ctgaagttgagatgagtaaactcct

SEQ ID NO: 92658 - DNA, 25 bp, Homo sapien
ctgaagttgagaagagtaaactcct

SEQ ID NO: 92659 - DNA, 25 bp, Homo sapien
gtctggcgcgcggacttctatatct

SEQ ID NO: 92660 - DNA, 25 bp, Homo sapien
gtctggcgcgcgcacttctatatct

SEQ ID NO: 92661 - DNA, 25 bp, Homo sapien
cgccgtaccacgttcaacttattgg

SEQ ID NO: 92662 - DNA, 25 bp, Homo sapien
cgccgtaccacgatcaacttattgg

SEQ ID NO: 92663 - DNA, 25 bp, Homo sapien
gtttaaggtctctgaaacctctgaa

SEQ ID NO: 92664 - DNA, 25 bp, Homo sapien
gtttaaggtctcagaaacctctgaa

SEQ ID NO: 92665 - DNA, 25 bp, Homo sapien
ctgggttcgataagccagacacact

SEQ ID NO: 92666 - DNA, 25 bp, Homo sapien
ctgggttcgatatgccagacacact

SEQ ID NO: 92667 - DNA, 25 bp, Homo sapien
ctaagacatgacagagaccacccat

SEQ ID NO: 92668 - DNA, 25 bp, Homo sapien
ctaagacatgactgagaccacccat

SEQ ID NO: 92669 - DNA, 25 bp, Homo sapien
gacccgcgtgagactacggtcccgg

SEQ ID NO: 92670 - DNA, 25 bp, Homo sapien
gacccgcgtgagtctacggtcccgg

SEQ ID NO: 92671 - DNA, 25 bp, Homo sapien
gtgagttctacaaggaatctttatc

SEQ ID NO: 92672 - DNA, 25 bp, Homo sapien
gtgagttctacatggaatctttatc

SEQ ID NO: 92673 - DNA, 25 bp, Homo sapien
agtaatctcgggacatcttactgtc

SEQ ID NO: 92674 - DNA, 25 bp, Homo sapien
agtaatctcgggtcatcttactgtc

SEQ ID NO: 92675 - DNA, 25 bp, Homo sapien
gaggagttccagtccgtgtctcacc

SEQ ID NO: 92676 - DNA, 25 bp, Homo sapien
gaggagttccagaccgtgtctcacc

SEQ ID NO: 92677 - DNA, 25 bp, Homo sapien
cggagatacacgagacccaccgaca

SEQ ID NO: 92678 - DNA, 25 bp, Homo sapien
cggagatacacgtgacccaccgaca

SEQ ID NO: 92679 - DNA, 25 bp, Homo sapien
ggacgacgtgaagaattactcgata

SEQ ID NO: 92680 - DNA, 25 bp, Homo sapien
ggacgacgtgaacaattactcgata

SEQ ID NO: 92681 - DNA, 25 bp, Homo sapien
gtgacagtggataatactgacctta

SEQ ID NO: 92682 - DNA, 25 bp, Homo sapien
gtgacagtggattatactgacctta

SEQ ID NO: 92683 - DNA, 25 bp, Homo sapien
tgtcgaaggaggtctacagactaac

SEQ ID NO: 92684 - DNA, 25 bp, Homo sapien
tgtcgaaggaggactacagactaac

SEQ ID NO: 92685 - DNA, 25 bp, Homo sapien
ttgtcaggacgagtctcggtacaag

SEQ ID NO: 92686 - DNA, 25 bp, Homo sapien
ttgtcaggacgactctcggtacaag

SEQ ID NO: 92687 - DNA, 25 bp, Homo sapien
tttacggcccagagccaccgacaga

SEQ ID NO: 92688 - DNA, 25 bp, Homo sapien
tttacggcccagtgccaccgacaga

SEQ ID NO: 92689 - DNA, 25 bp, Homo sapien
caacaggtccagtgacgccctcggg

SEQ ID NO: 92690 - DNA, 25 bp, Homo sapien
caacaggtccagagacgccctcggg

SEQ ID NO: 92691 - DNA, 25 bp, Homo sapien
agacaaccacaaagaccgccctagg

SEQ ID NO: 92692 - DNA, 25 bp, Homo sapien
agacaaccacaatgaccgccctagg

SEQ ID NO: 92693 - DNA, 25 bp, Homo sapien
aacatcacgaaagaccgacccgagg

SEQ ID NO: 92694 - DNA, 25 bp, Homo sapien
aacatcacgaaacaccgacccgagg

SEQ ID NO: 92695 - DNA, 25 bp, Homo sapien
agcgagttacagagccataaagaag

SEQ ID NO: 92696 - DNA, 25 bp, Homo sapien
agcgagttacagtgccataaagaag

SEQ ID NO: 92697 - DNA, 25 bp, Homo sapien
atgtcgattagacactaataaacgt

SEQ ID NO: 92698 - DNA, 25 bp, Homo sapien
atgtcgattagagactaataaacgt

SEQ ID NO: 92699 - DNA, 25 bp, Homo sapien
tatgtcttgtctgtacaggtggtac

SEQ ID NO: 92700 - DNA, 25 bp, Homo sapien
tatgtcttgtctctacaggtggtac

SEQ ID NO: 92701 - DNA, 25 bp, Homo sapien
tctgtattgtcgttacgaaatttac

SEQ ID NO: 92702 - DNA, 25 bp, Homo sapien
tctgtattgtcgatacgaaatttac

SEQ ID NO: 92703 - DNA, 25 bp, Homo sapien
tgatggtttaatctacgtctattac

SEQ ID NO: 92704 - DNA, 25 bp, Homo sapien
tgatggtttaatgtacgtctattac

SEQ ID NO: 92705 - DNA, 25 bp, Homo sapien
taatggtctgacataatcctgtcat

SEQ ID NO: 92706 - DNA, 25 bp, Homo sapien
taatggtctgacttaatcctgtcat

SEQ ID NO: 92707 - DNA, 25 bp, Homo sapien
tcttgttctccttgatactcagatg

SEQ ID NO: 92708 - DNA, 25 bp, Homo sapien
tcttgttctcctagatactcagatg

SEQ ID NO: 92709 - DNA, 25 bp, Homo sapien
tcctattcgttctgaagtcttacga

SEQ ID NO: 92710 - DNA, 25 bp, Homo sapien
tcctattcgttcagaagtcttacga

SEQ ID NO: 92711 - DNA, 25 bp, Homo sapien
gagtcttattgtccaagtcctctac

SEQ ID NO: 92712 - DNA, 25 bp, Homo sapien
gagtcttattgtgcaagtcctctac

SEQ ID NO: 92713 - DNA, 25 bp, Homo sapien
ttatgtacttcgactagatacgaac

SEQ ID NO: 92714 - DNA, 25 bp, Homo sapien
ttatgtacttcgtctagatacgaac

SEQ ID NO: 92715 - DNA, 25 bp, Homo sapien
ttttccttcttgtacagtctaggac

SEQ ID NO: 92716 - DNA, 25 bp, Homo sapien
ttttccttcttgaacagtctaggac

SEQ ID NO: 92717 - DNA, 25 bp, Homo sapien
ttttgtactctttacctatcgtggg

SEQ ID NO: 92718 - DNA, 25 bp, Homo sapien
ttttgtactcttaacctatcgtggg

SEQ ID NO: 92719 - DNA, 25 bp, Homo sapien
atcttctacgtcgtagacttttgga

SEQ ID NO: 92720 - DNA, 25 bp, Homo sapien
atcttctacgtcctagacttttgga

SEQ ID NO: 92721 - DNA, 25 bp, Homo sapien
cgtaaaggctatacgtttcgtgttg

SEQ ID NO: 92722 - DNA, 25 bp, Homo sapien
cgtaaaggctattcgtttcgtgttg

SEQ ID NO: 92723 - DNA, 25 bp, Homo sapien
cggaagagacatacatcgtattaag

SEQ ID NO: 92724 - DNA, 25 bp, Homo sapien
cggaagagacattcatcgtattaag

SEQ ID NO: 92725 - DNA, 25 bp, Homo sapien
cttagacgtgactttcagtaatgaa

SEQ ID NO: 92726 - DNA, 25 bp, Homo sapien
cttagacgtgacattcagtaatgaa

SEQ ID NO: 92727 - DNA, 25 bp, Homo sapien
tattacgctcacctttaaacggaag

SEQ ID NO: 92728 - DNA, 25 bp, Homo sapien
tattacgctcacgtttaaacggaag

SEQ ID NO: 92729 - DNA, 25 bp, Homo sapien
agtcttctccttttaccaagtaagg

SEQ ID NO: 92730 - DNA, 25 bp, Homo sapien
agtcttctccttataccaagtaagg

SEQ ID NO: 92731 - DNA, 25 bp, Homo sapien
ctgtctctccttacaacaagagaga

SEQ ID NO: 92732 - DNA, 25 bp, Homo sapien
ctgtctctcctttcaacaagagaga

SEQ ID NO: 92733 - DNA, 25 bp, Homo sapien
gatccctcggacgtacttgtagaga

SEQ ID NO: 92734 - DNA, 25 bp, Homo sapien
gatccctcggacctacttgtagaga

SEQ ID NO: 92735 - DNA, 25 bp, Homo sapien
ttgcgtctcgatgctcttgtagaga

SEQ ID NO: 92736 - DNA, 25 bp, Homo sapien
ttgcgtctcgatcctcttgtagaga

SEQ ID NO: 92737 - DNA, 25 bp, Homo sapien
gtgtgcatcggtaactcttgaactg

SEQ ID NO: 92738 - DNA, 25 bp, Homo sapien
gtgtgcatcggttactcttgaactg

SEQ ID NO: 92739 - DNA, 25 bp, Homo sapien
agtgtgcatcggtaactcttgaact

SEQ ID NO: 92740 - DNA, 25 bp, Homo sapien
agtgtgcatcggaaactcttgaact

SEQ ID NO: 92741 - DNA, 25 bp, Homo sapien
agtagacgacccttttctgttggta

SEQ ID NO: 92742 - DNA, 25 bp, Homo sapien
agtagacgacccatttctgttggta

SEQ ID NO: 92743 - DNA, 25 bp, Homo sapien
acaagagtcacgtgaggttcggtaa

SEQ ID NO: 92744 - DNA, 25 bp, Homo sapien
acaagagtcacgagaggttcggtaa

SEQ ID NO: 92745 - DNA, 25 bp, Homo sapien
cccagagcgggaaccggacccgatg

SEQ ID NO: 92746 - DNA, 25 bp, Homo sapien
cccagagcgggatccggacccgatg

SEQ ID NO: 92747 - DNA, 25 bp, Homo sapien
gactcgaggcggacggagaggcgga

SEQ ID NO: 92748 - DNA, 25 bp, Homo sapien
gactcgaggcggtcggagaggcgga

SEQ ID NO: 92749 - DNA, 25 bp, Homo sapien
gacggagacagttttcggtcgcgtc

SEQ ID NO: 92750 - DNA, 25 bp, Homo sapien
gacggagacagtattcggtcgcgtc

SEQ ID NO: 92751 - DNA, 25 bp, Homo sapien
gacgcgaacgcgaagaacgacagga

SEQ ID NO: 92752 - DNA, 25 bp, Homo sapien
gacgcgaacgcgtagaacgacagga

SEQ ID NO: 92753 - DNA, 25 bp, Homo sapien
tagactggagactcacgtaaaaagt

SEQ ID NO: 92754 - DNA, 25 bp, Homo sapien
tagactggagacacacgtaaaaagt

SEQ ID NO: 92755 - DNA, 25 bp, Homo sapien
aaagacggggtcctcctaatgatac

SEQ ID NO: 92756 - DNA, 25 bp, Homo sapien
aaagacggggtcgtcctaatgatac

SEQ ID NO: 92757 - DNA, 25 bp, Homo sapien
acaagtatgtgtaaccgacttagga

SEQ ID NO: 92758 - DNA, 25 bp, Homo sapien
acaagtatgtgttaccgacttagga

SEQ ID NO: 92759 - DNA, 25 bp, Homo sapien
acacgaatctaagtgtcgagttaaa

SEQ ID NO: 92760 - DNA, 25 bp, Homo sapien
acacgaatctaactgtcgagttaaa

SEQ ID NO: 92761 - DNA, 25 bp, Homo sapien
gagactaacagttcctacacctcga

SEQ ID NO: 92762 - DNA, 25 bp, Homo sapien
gagactaacagtacctacacctcga

SEQ ID NO: 92763 - DNA, 25 bp, Homo sapien
gagggacccacgttacgctcggacg

SEQ ID NO: 92764 - DNA, 25 bp, Homo sapien
gagggacccacgatacgctcggacg

SEQ ID NO: 92765 - DNA, 25 bp, Homo sapien
tgtaggggtaaggaggtcttactcc

SEQ ID NO: 92766 - DNA, 25 bp, Homo sapien
tgtaggggtaagcaggtcttactcc

SEQ ID NO: 92767 - DNA, 25 bp, Homo sapien
ccgagaaggtaagagtgtgcacaca

SEQ ID NO: 92768 - DNA, 25 bp, Homo sapien
ccgagaaggtaacagtgtgcacaca

SEQ ID NO: 92769 - DNA, 25 bp, Homo sapien
agaaggtcgaccagtcgatagaaga

SEQ ID NO: 92770 - DNA, 25 bp, Homo sapien
agaaggtcgacctgtcgatagaaga

SEQ ID NO: 92771 - DNA, 25 bp, Homo sapien
gtccacccggtgtccgggtaagtga

SEQ ID NO: 92772 - DNA, 25 bp, Homo sapien
gtccacccggtgaccgggtaagtga

SEQ ID NO: 92773 - DNA, 25 bp, Homo sapien
ctcctcggtgatgacggacaacaga

SEQ ID NO: 92774 - DNA, 25 bp, Homo sapien
ctcctcggtgatcacggacaacaga

SEQ ID NO: 92775 - DNA, 25 bp, Homo sapien
tactctaggtacaaccacagacgga

SEQ ID NO: 92776 - DNA, 25 bp, Homo sapien
tactctaggtactaccacagacgga

SEQ ID NO: 92777 - DNA, 25 bp, Homo sapien
tctggtaccctagcatagcgtagtc

SEQ ID NO: 92778 - DNA, 25 bp, Homo sapien
tctggtaccctaccatagcgtagtc

SEQ ID NO: 92779 - DNA, 25 bp, Homo sapien
acttctgtaccaccaagacgataag

SEQ ID NO: 92780 - DNA, 25 bp, Homo sapien
acttctgtaccagcaagacgataag

SEQ ID NO: 92781 - DNA, 25 bp, Homo sapien
tgatttactctaacggaaacgtcaa

SEQ ID NO: 92782 - DNA, 25 bp, Homo sapien
tgatttactctatcggaaacgtcaa

SEQ ID NO: 92783 - DNA, 25 bp, Homo sapien
gaagtcgatcaaatcttacgtaata

SEQ ID NO: 92784 - DNA, 25 bp, Homo sapien
gaagtcgatcaattcttacgtaata

SEQ ID NO: 92785 - DNA, 25 bp, Homo sapien
ataacgaattaaaacagtcgtctga

SEQ ID NO: 92786 - DNA, 25 bp, Homo sapien
ataacgaattaatacagtcgtctga

SEQ ID NO: 92787 - DNA, 25 bp, Homo sapien
actaaggaggaagtagagtcacacc

SEQ ID NO: 92788 - DNA, 25 bp, Homo sapien
actaaggaggaactagagtcacacc

SEQ ID NO: 92789 - DNA, 25 bp, Homo sapien
ccagggtcgtagtcgggtgacctcc

SEQ ID NO: 92790 - DNA, 25 bp, Homo sapien
ccagggtcgtagacgggtgacctcc

SEQ ID NO: 92791 - DNA, 25 bp, Homo sapien
ttcggtccttgaacaggtccctccg

SEQ ID NO: 92792 - DNA, 25 bp, Homo sapien
ttcggtccttgatcaggtccctccg

SEQ ID NO: 92793 - DNA, 25 bp, Homo sapien
attttatgtgtgtaagatcccccgt

SEQ ID NO: 92794 - DNA, 25 bp, Homo sapien
attttatgtgtgaaagatcccccgt

SEQ ID NO: 92795 - DNA, 25 bp, Homo sapien
acttaagtcgaattgagtcgacccc

SEQ ID NO: 92796 - DNA, 25 bp, Homo sapien
acttaagtcgaaatgagtcgacccc

SEQ ID NO: 92797 - DNA, 25 bp, Homo sapien
gagtaagtcaaatagttactctcat

SEQ ID NO: 92798 - DNA, 25 bp, Homo sapien
gagtaagtcaaaaagttactctcat

SEQ ID NO: 92799 - DNA, 25 bp, Homo sapien
gaaacgtactaatgatatcaaccga

SEQ ID NO: 92800 - DNA, 25 bp, Homo sapien
gaaacgtactaaagatatcaaccga

SEQ ID NO: 92801 - DNA, 25 bp, Homo sapien
gcgactattagttaataactcccag

SEQ ID NO: 92802 - DNA, 25 bp, Homo sapien
gcgactattagtaaataactcccag

SEQ ID NO: 92803 - DNA, 25 bp, Homo sapien
atcgtttgtaaaaggttacgtccat

SEQ ID NO: 92804 - DNA, 25 bp, Homo sapien
atcgtttgtaaatggttacgtccat

SEQ ID NO: 92805 - DNA, 25 bp, Homo sapien
ctatgggactgaagggttctcttgt

SEQ ID NO: 92806 - DNA, 25 bp, Homo sapien
ctatgggactgatgggttctcttgt

SEQ ID NO: 92807 - DNA, 25 bp, Homo sapien
tacgaatactgattggaactcaagt

SEQ ID NO: 92808 - DNA, 25 bp, Homo sapien
tacgaatactgaatggaactcaagt

SEQ ID NO: 92809 - DNA, 25 bp, Homo sapien
gtctttagaagtaaccccgtctaaa

SEQ ID NO: 92810 - DNA, 25 bp, Homo sapien
gtctttagaagttaccccgtctaaa

SEQ ID NO: 92811 - DNA, 25 bp, Homo sapien
tgttgagagtagttctcagtttacc

SEQ ID NO: 92812 - DNA, 25 bp, Homo sapien
tgttgagagtagatctcagtttacc

SEQ ID NO: 92813 - DNA, 25 bp, Homo sapien
gaaaatatagtagagacacgtcgtc

SEQ ID NO: 92814 - DNA, 25 bp, Homo sapien
gaaaatatagtacagacacgtcgtc

SEQ ID NO: 92815 - DNA, 25 bp, Homo sapien
cgataaagcgagaaagacggtcgtt

SEQ ID NO: 92816 - DNA, 25 bp, Homo sapien
cgataaagcgagtaagacggtcgtt

SEQ ID NO: 92817 - DNA, 25 bp, Homo sapien
taatataagacacatagtcactgag

SEQ ID NO: 92818 - DNA, 25 bp, Homo sapien
taatataagacagatagtcactgag

SEQ ID NO: 92819 - DNA, 25 bp, Homo sapien
aattacgtgtacctttacgataaga

SEQ ID NO: 92820 - DNA, 25 bp, Homo sapien
aattacgtgtacgtttacgataaga

SEQ ID NO: 92821 - DNA, 25 bp, Homo sapien
aactcttactgtaagaaccggcgaa

SEQ ID NO: 92822 - DNA, 25 bp, Homo sapien
aactcttactgttagaaccggcgaa

SEQ ID NO: 92823 - DNA, 25 bp, Homo sapien
acctcctttgtaacactcgctagag

SEQ ID NO: 92824 - DNA, 25 bp, Homo sapien
acctcctttgtatcactcgctagag

SEQ ID NO: 92825 - DNA, 25 bp, Homo sapien
acaacgatatttccacttatacgtc

SEQ ID NO: 92826 - DNA, 25 bp, Homo sapien
acaacgatatttgcacttatacgtc

SEQ ID NO: 92827 - DNA, 25 bp, Homo sapien
ataaaagtacttaaggtccttcttg

SEQ ID NO: 92828 - DNA, 25 bp, Homo sapien
ataaaagtactttaggtccttcttg

SEQ ID NO: 92829 - DNA, 25 bp, Homo sapien
attaaaagttttcatcttagtccgg

SEQ ID NO: 92830 - DNA, 25 bp, Homo sapien
attaaaagttttgatcttagtccgg

SEQ ID NO: 92831 - DNA, 25 bp, Homo sapien
acgggtctcatcgactttcagcgtg

SEQ ID NO: 92832 - DNA, 25 bp, Homo sapien
acgggtctcatccactttcagcgtg

SEQ ID NO: 92833 - DNA, 25 bp, Homo sapien
ggttctgtaacaatagtttcgtctg

SEQ ID NO: 92834 - DNA, 25 bp, Homo sapien
ggttctgtaacattagtttcgtctg

SEQ ID NO: 92835 - DNA, 25 bp, Homo sapien
ttattagactctaactggttcctcg

SEQ ID NO: 92836 - DNA, 25 bp, Homo sapien
ttattagactcttactggttcctcg

SEQ ID NO: 92837 - DNA, 25 bp, Homo sapien
tttgtgtactatttccctcgtcatg

SEQ ID NO: 92838 - DNA, 25 bp, Homo sapien
tttgtgtactatatccctcgtcatg

SEQ ID NO: 92839 - DNA, 25 bp, Homo sapien
tacgtgtattctctacaagttagtt

SEQ ID NO: 92840 - DNA, 25 bp, Homo sapien
tacgtgtattctgtacaagttagtt

SEQ ID NO: 92841 - DNA, 25 bp, Homo sapien
ctttctgttaatctcaggaagttta

SEQ ID NO: 92842 - DNA, 25 bp, Homo sapien
ctttctgttaatgtcaggaagttta

SEQ ID NO: 92843 - DNA, 25 bp, Homo sapien
tatgaaattagtcaccgtcgttttg

SEQ ID NO: 92844 - DNA, 25 bp, Homo sapien
tatgaaattagtgaccgtcgttttg

SEQ ID NO: 92845 - DNA, 25 bp, Homo sapien
tttgtactacctgttgtcttgatga

SEQ ID NO: 92846 - DNA, 25 bp, Homo sapien
tttgtactacctcttgtcttgatga

SEQ ID NO: 92847 - DNA, 25 bp, Homo sapien
cgagacccgacttttagtggtcgac

SEQ ID NO: 92848 - DNA, 25 bp, Homo sapien
cgagacccgactattagtggtcgac

SEQ ID NO: 92849 - DNA, 25 bp, Homo sapien
tctcccggagaccaaaatattcgca

SEQ ID NO: 92850 - DNA, 25 bp, Homo sapien
tctcccggagacgaaaatattcgca

SEQ ID NO: 92851 - DNA, 25 bp, Homo sapien
ccctccagtacgtccaacatgagga

SEQ ID NO: 92852 - DNA, 25 bp, Homo sapien
ccctccagtacgaccaacatgagga

SEQ ID NO: 92853 - DNA, 25 bp, Homo sapien
acgacccacgactaaaattaccgga

SEQ ID NO: 92854 - DNA, 25 bp, Homo sapien
acgacccacgacaaaaattaccgga

SEQ ID NO: 92855 - DNA, 25 bp, Homo sapien
taacctcgtactggacaaaccccga

SEQ ID NO: 92856 - DNA, 25 bp, Homo sapien
taacctcgtactcgacaaaccccga

SEQ ID NO: 92857 - DNA, 25 bp, Homo sapien
agtaatccattgacttacatccgag

SEQ ID NO: 92858 - DNA, 25 bp, Homo sapien
agtaatccattgtcttacatccgag

SEQ ID NO: 92859 - DNA, 25 bp, Homo sapien
ataagatcctcctcgtatgaacatg

SEQ ID NO: 92860 - DNA, 25 bp, Homo sapien
ataagatcctccacgtatgaacatg

SEQ ID NO: 92861 - DNA, 25 bp, Homo sapien
aattccgtccgtcacatgagatacc

SEQ ID NO: 92862 - DNA, 25 bp, Homo sapien
aattccgtccgtgacatgagatacc

SEQ ID NO: 92863 - DNA, 25 bp, Homo sapien
tcgtttcctcacacaaaagagacgt

SEQ ID NO: 92864 - DNA, 25 bp, Homo sapien
tcgtttcctcactcaaaagagacgt

SEQ ID NO: 92865 - DNA, 25 bp, Homo sapien
tgtttcccacgagcttcctcagtct

SEQ ID NO: 92866 - DNA, 25 bp, Homo sapien
tgtttcccacgaccttcctcagtct

SEQ ID NO: 92867 - DNA, 25 bp, Homo sapien
aagttgtcgacaaacatggtcactc

SEQ ID NO: 92868 - DNA, 25 bp, Homo sapien
aagttgtcgacatacatggtcactc

SEQ ID NO: 92869 - DNA, 25 bp, Homo sapien
gaaggtctacactcaatagtccacc

SEQ ID NO: 92870 - DNA, 25 bp, Homo sapien
gaaggtctacacacaatagtccacc

SEQ ID NO: 92871 - DNA, 25 bp, Homo sapien
agtaggactcttctagggcggacta

SEQ ID NO: 92872 - DNA, 25 bp, Homo sapien
agtaggactcttgtagggcggacta

SEQ ID NO: 92873 - DNA, 25 bp, Homo sapien
gggaggtacctctacatccggagca

SEQ ID NO: 92874 - DNA, 25 bp, Homo sapien
gggaggtacctcaacatccggagca

SEQ ID NO: 92875 - DNA, 25 bp, Homo sapien
tgtggggacctctggttccagttcc

SEQ ID NO: 92876 - DNA, 25 bp, Homo sapien
tgtggggacctcaggttccagttcc

SEQ ID NO: 92877 - DNA, 25 bp, Homo sapien
gtagggtaaggcaggttccactcca

SEQ ID NO: 92878 - DNA, 25 bp, Homo sapien
gtagggtaaggctggttccactcca

SEQ ID NO: 92879 - DNA, 25 bp, Homo sapien
tgattagagtcacgttcccctctaa

SEQ ID NO: 92880 - DNA, 25 bp, Homo sapien
tgattagagtcaggttcccctctaa

SEQ ID NO: 92881 - DNA, 25 bp, Homo sapien
tgatacttttacgttcacccgagga

SEQ ID NO: 92882 - DNA, 25 bp, Homo sapien
tgatacttttaccttcacccgagga

SEQ ID NO: 92883 - DNA, 25 bp, Homo sapien
tgtctcctttcctagatctcttgcg

SEQ ID NO: 92884 - DNA, 25 bp, Homo sapien
tgtctcctttccaagatctcttgcg

SEQ ID NO: 92885 - DNA, 25 bp, Homo sapien
cgtccctcttctttgccttgtcgtt

SEQ ID NO: 92886 - DNA, 25 bp, Homo sapien
cgtccctcttctatgccttgtcgtt

SEQ ID NO: 92887 - DNA, 25 bp, Homo sapien
agtctccttttcgacggctcagaga

SEQ ID NO: 92888 - DNA, 25 bp, Homo sapien
agtctccttttccacggctcagaga

SEQ ID NO: 92889 - DNA, 25 bp, Homo sapien
acaccgttcatgaggtgtcagttat

SEQ ID NO: 92890 - DNA, 25 bp, Homo sapien
acaccgttcatgtggtgtcagttat

SEQ ID NO: 92891 - DNA, 25 bp, Homo sapien
caactcgttttactcgggctgtgtt

SEQ ID NO: 92892 - DNA, 25 bp, Homo sapien
caactcgttttagtcgggctgtgtt

SEQ ID NO: 92893 - DNA, 25 bp, Homo sapien
ctggtctcgtaggtggttcttcagt

SEQ ID NO: 92894 - DNA, 25 bp, Homo sapien
ctggtctcgtagctggttcttcagt

SEQ ID NO: 92895 - DNA, 25 bp, Homo sapien
cagctgggtctaggtgagcaataag

SEQ ID NO: 92896 - DNA, 25 bp, Homo sapien
cagctgggtctacgtgagcaataag

SEQ ID NO: 92897 - DNA, 25 bp, Homo sapien
agagtgtccggagtgagcatgtcac

SEQ ID NO: 92898 - DNA, 25 bp, Homo sapien
agagtgtccggactgagcatgtcac

SEQ ID NO: 92899 - DNA, 25 bp, Homo sapien
atagaactcggtctgaatattacac

SEQ ID NO: 92900 - DNA, 25 bp, Homo sapien
atagaactcggtgtgaatattacac

SEQ ID NO: 92901 - DNA, 25 bp, Homo sapien
agacttcgttggtttcatacttatg

SEQ ID NO: 92902 - DNA, 25 bp, Homo sapien
agacttcgttggattcatacttatg

SEQ ID NO: 92903 - DNA, 25 bp, Homo sapien
gtccagtctcgttatcctcctcttg

SEQ ID NO: 92904 - DNA, 25 bp, Homo sapien
gtccagtctcgtaatcctcctcttg

SEQ ID NO: 92905 - DNA, 25 bp, Homo sapien
gtgtcttagaaagtcacagttgtca

SEQ ID NO: 92906 - DNA, 25 bp, Homo sapien
gtgtcttagaaactcacagttgtca

SEQ ID NO: 92907 - DNA, 25 bp, Homo sapien
tgtcgttactgataccacagagccc

SEQ ID NO: 92908 - DNA, 25 bp, Homo sapien
tgtcgttactgaaaccacagagccc

SEQ ID NO: 92909 - DNA, 25 bp, Homo sapien
taaacgtctatgtcgcacaagaacc

SEQ ID NO: 92910 - DNA, 25 bp, Homo sapien
taaacgtctatgacgcacaagaacc

SEQ ID NO: 92911 - DNA, 25 bp, Homo sapien
taagtatgtattacgctccagaata

SEQ ID NO: 92912 - DNA, 25 bp, Homo sapien
taagtatgtatttcgctccagaata

SEQ ID NO: 92913 - DNA, 25 bp, Homo sapien
gaggtctaggttgaggagcccccaa

SEQ ID NO: 92914 - DNA, 25 bp, Homo sapien
gaggtctaggttcaggagcccccaa

SEQ ID NO: 92915 - DNA, 25 bp, Homo sapien
aggaggtcgttaagggtgaccacaa

SEQ ID NO: 92916 - DNA, 25 bp, Homo sapien
aggaggtcgttatgggtgaccacaa

SEQ ID NO: 92917 - DNA, 25 bp, Homo sapien
gaaaaccttttgactcgaccctgtc

SEQ ID NO: 92918 - DNA, 25 bp, Homo sapien
gaaaaccttttgtctcgaccctgtc

SEQ ID NO: 92919 - DNA, 25 bp, Homo sapien
ttcacttgtgtctgtggcacctgtc

SEQ ID NO: 92920 - DNA, 25 bp, Homo sapien
ttcacttgtgtcagtggcacctgtc

SEQ ID NO: 92921 - DNA, 25 bp, Homo sapien
gatttttgtattctgttacctcgaa

SEQ ID NO: 92922 - DNA, 25 bp, Homo sapien
gatttttgtattgtgttacctcgaa

SEQ ID NO: 92923 - DNA, 25 bp, Homo sapien
gcattcttgaaaggtgtcatcacaa

SEQ ID NO: 92924 - DNA, 25 bp, Homo sapien
gcattcttgaaacgtgtcatcacaa

SEQ ID NO: 92925 - DNA, 25 bp, Homo sapien
gagaacttagaaatgaacgtccaaa

SEQ ID NO: 92926 - DNA, 25 bp, Homo sapien
gagaacttagaattgaacgtccaaa

SEQ ID NO: 92927 - DNA, 25 bp, Homo sapien
tttagtctttctattaaaatcaaac

SEQ ID NO: 92928 - DNA, 25 bp, Homo sapien
tttagtctttcttttaaaatcaaac

SEQ ID NO: 92929 - DNA, 25 bp, Homo sapien
agtctggtagtcaatacaatgttct

SEQ ID NO: 92930 - DNA, 25 bp, Homo sapien
agtctggtagtctatacaatgttct

SEQ ID NO: 92931 - DNA, 25 bp, Homo sapien
ggaggagtcgagctcacattgttgt

SEQ ID NO: 92932 - DNA, 25 bp, Homo sapien
ggaggagtcgaggtcacattgttgt

SEQ ID NO: 92933 - DNA, 25 bp, Homo sapien
aaaggagggtaccttcccaggtaga

SEQ ID NO: 92934 - DNA, 25 bp, Homo sapien
aaaggagggtacgttcccaggtaga

SEQ ID NO: 92935 - DNA, 25 bp, Homo sapien
actaagggtgccaatcccagtaata

SEQ ID NO: 92936 - DNA, 25 bp, Homo sapien
actaagggtgcctatcccagtaata

SEQ ID NO: 92937 - DNA, 25 bp, Homo sapien
tgggagtcggaccatctggaagtaa

SEQ ID NO: 92938 - DNA, 25 bp, Homo sapien
tgggagtcggacgatctggaagtaa

SEQ ID NO: 92939 - DNA, 25 bp, Homo sapien
gcagtattctccaagtctatataga

SEQ ID NO: 92940 - DNA, 25 bp, Homo sapien
gcagtattctcctagtctatataga

SEQ ID NO: 92941 - DNA, 25 bp, Homo sapien
acaattgtgtctcgggtctatacaa

SEQ ID NO: 92942 - DNA, 25 bp, Homo sapien
acaattgtgtctggggtctatacaa

SEQ ID NO: 92943 - DNA, 25 bp, Homo sapien
ggtagtcacggtagccgctacgacg

SEQ ID NO: 92944 - DNA, 25 bp, Homo sapien
ggtagtcacggttgccgctacgacg

SEQ ID NO: 92945 - DNA, 25 bp, Homo sapien
gtttttacacggttcgtcgtcttta

SEQ ID NO: 92946 - DNA, 25 bp, Homo sapien
gtttttacacggatcgtcgtcttta

SEQ ID NO: 92947 - DNA, 25 bp, Homo sapien
tgtaacggagagtcttcgtcgttta

SEQ ID NO: 92948 - DNA, 25 bp, Homo sapien
tgtaacggagagacttcgtcgttta

SEQ ID NO: 92949 - DNA, 25 bp, Homo sapien
gaggagcgtgaacattgtcggttac

SEQ ID NO: 92950 - DNA, 25 bp, Homo sapien
gaggagcgtgaagattgtcggttac

SEQ ID NO: 92951 - DNA, 25 bp, Homo sapien
aacgtgaaccggattatatgttttc

SEQ ID NO: 92952 - DNA, 25 bp, Homo sapien
aacgtgaaccggtttatatgttttc

SEQ ID NO: 92953 - DNA, 25 bp, Homo sapien
tgagtccacagtctcgatttcttcc

SEQ ID NO: 92954 - DNA, 25 bp, Homo sapien
tgagtccacagtgtcgatttcttcc

SEQ ID NO: 92955 - DNA, 25 bp, Homo sapien
acaatgggatacgtctcgtttttca

SEQ ID NO: 92956 - DNA, 25 bp, Homo sapien
acaatgggatacctctcgtttttca

SEQ ID NO: 92957 - DNA, 25 bp, Homo sapien
tgtgacccacactgggcttctctgt

SEQ ID NO: 92958 - DNA, 25 bp, Homo sapien
tgtgacccacacagggcttctctgt

SEQ ID NO: 92959 - DNA, 25 bp, Homo sapien
tttaccagcgaggtgtagttccaac

SEQ ID NO: 92960 - DNA, 25 bp, Homo sapien
tttaccagcgagctgtagttccaac

SEQ ID NO: 92961 - DNA, 25 bp, Homo sapien
gttctgtgaagactcgtagccccac

SEQ ID NO: 92962 - DNA, 25 bp, Homo sapien
gttctgtgaagagtcgtagccccac

SEQ ID NO: 92963 - DNA, 25 bp, Homo sapien
cgtatgtgtctcgtgagatccccca

SEQ ID NO: 92964 - DNA, 25 bp, Homo sapien
cgtatgtgtctcctgagatccccca

SEQ ID NO: 92965 - DNA, 25 bp, Homo sapien
tggtgctcgtcgttgatggtaccca

SEQ ID NO: 92966 - DNA, 25 bp, Homo sapien
tggtgctcgtcgatgatggtaccca

SEQ ID NO: 92967 - DNA, 25 bp, Homo sapien
ggggactgagacactccaactcagt

SEQ ID NO: 92968 - DNA, 25 bp, Homo sapien
ggggactgagactctccaactcagt

SEQ ID NO: 92969 - DNA, 25 bp, Homo sapien
tattagaggatatccactcacctcg

SEQ ID NO: 92970 - DNA, 25 bp, Homo sapien
tattagaggataaccactcacctcg

SEQ ID NO: 92971 - DNA, 25 bp, Homo sapien
ttcgggagttacaccggtctaccac

SEQ ID NO: 92972 - DNA, 25 bp, Homo sapien
ttcgggagttactccggtctaccac

SEQ ID NO: 92973 - DNA, 25 bp, Homo sapien
tgttgtgtctgtgtctcgtccgaac

SEQ ID NO: 92974 - DNA, 25 bp, Homo sapien
tgttgtgtctgtctctcgtccgaac

SEQ ID NO: 92975 - DNA, 25 bp, Homo sapien
gtgaccgagctttcggttcggagac

SEQ ID NO: 92976 - DNA, 25 bp, Homo sapien
gtgaccgagcttacggttcggagac

SEQ ID NO: 92977 - DNA, 25 bp, Homo sapien
gcaaccccttctacggtatccgagg

SEQ ID NO: 92978 - DNA, 25 bp, Homo sapien
gcaaccccttcttcggtatccgagg

SEQ ID NO: 92979 - DNA, 25 bp, Homo sapien
atcaaagcccctgtccacttcggta

SEQ ID NO: 92980 - DNA, 25 bp, Homo sapien
atcaaagcccctctccacttcggta

SEQ ID NO: 92981 - DNA, 25 bp, Homo sapien
aagtacatgactactttctatgaga

SEQ ID NO: 92982 - DNA, 25 bp, Homo sapien
aagtacatgacttctttctatgaga

SEQ ID NO: 92983 - DNA, 25 bp, Homo sapien
gttgacatgtactaccatatatgga

SEQ ID NO: 92984 - DNA, 25 bp, Homo sapien
gttgacatgtacaaccatatatgga

SEQ ID NO: 92985 - DNA, 25 bp, Homo sapien
agtagttgttcaaggccaaaaggac

SEQ ID NO: 92986 - DNA, 25 bp, Homo sapien
agtagttgttcatggccaaaaggac

SEQ ID NO: 92987 - DNA, 25 bp, Homo sapien
tattcggatctttaccagtgaaggg

SEQ ID NO: 92988 - DNA, 25 bp, Homo sapien
tattcggatcttaaccagtgaaggg

SEQ ID NO: 92989 - DNA, 25 bp, Homo sapien
ttgtgacctgtgaccagtcaaagtc

SEQ ID NO: 92990 - DNA, 25 bp, Homo sapien
ttgtgacctgtgtccagtcaaagtc

SEQ ID NO: 92991 - DNA, 25 bp, Homo sapien
gtcggcccgttctacttataagata

SEQ ID NO: 92992 - DNA, 25 bp, Homo sapien
gtcggcccgttcaacttataagata

SEQ ID NO: 92993 - DNA, 25 bp, Homo sapien
ccccatgtagacgtctgtatgactc

SEQ ID NO: 92994 - DNA, 25 bp, Homo sapien
ccccatgtagacctctgtatgactc

SEQ ID NO: 92995 - DNA, 25 bp, Homo sapien
accctcttcgagaggtgtgtgtacc

SEQ ID NO: 92996 - DNA, 25 bp, Homo sapien
accctcttcgagtggtgtgtgtacc

SEQ ID NO: 92997 - DNA, 25 bp, Homo sapien
gtctatgatcagtggtatgagtcct

SEQ ID NO: 92998 - DNA, 25 bp, Homo sapien
gtctatgatcagaggtatgagtcct

SEQ ID NO: 92999 - DNA, 25 bp, Homo sapien
ttgttgtactcatcagagaagtcat

SEQ ID NO: 93000 - DNA, 25 bp, Homo sapien
ttgttgtactcaacagagaagtcat

SEQ ID NO: 93001 - DNA, 25 bp, Homo sapien
cttcgaggtccgacgggctgtcagt

SEQ ID NO: 93002 - DNA, 25 bp, Homo sapien
cttcgaggtccgtcgggctgtcagt

SEQ ID NO: 93003 - DNA, 25 bp, Homo sapien
ctccctaggacgacgtggaccgagg

SEQ ID NO: 93004 - DNA, 25 bp, Homo sapien
ctccctaggacgtcgtggaccgagg

SEQ ID NO: 93005 - DNA, 25 bp, Homo sapien
tttacaggagacctcactgtcgtcc

SEQ ID NO: 93006 - DNA, 25 bp, Homo sapien
tttacaggagacgtcactgtcgtcc

SEQ ID NO: 93007 - DNA, 25 bp, Homo sapien
tccttcgaaaagtcgagttcgactt

SEQ ID NO: 93008 - DNA, 25 bp, Homo sapien
tccttcgaaaagacgagttcgactt

SEQ ID NO: 93009 - DNA, 25 bp, Homo sapien
ccttctaagactccagagtcccgtt

SEQ ID NO: 93010 - DNA, 25 bp, Homo sapien
ccttctaagactgcagagtcccgtt

SEQ ID NO: 93011 - DNA, 25 bp, Homo sapien
agacgggtttaaggtccggtcctaa

SEQ ID NO: 93012 - DNA, 25 bp, Homo sapien
agacgggtttaacgtccggtcctaa

SEQ ID NO: 93013 - DNA, 25 bp, Homo sapien
aaccggaataccaccgagagtcaga

SEQ ID NO: 93014 - DNA, 25 bp, Homo sapien
aaccggaatacctccgagagtcaga

SEQ ID NO: 93015 - DNA, 25 bp, Homo sapien
cggactcgtactgagtccaaggaga

SEQ ID NO: 93016 - DNA, 25 bp, Homo sapien
cggactcgtactcagtccaaggaga

SEQ ID NO: 93017 - DNA, 25 bp, Homo sapien
ggtcctatcacctaccttatggttt

SEQ ID NO: 93018 - DNA, 25 bp, Homo sapien
ggtcctatcaccaaccttatggttt

SEQ ID NO: 93019 - DNA, 25 bp, Homo sapien
gatatttcatgacgttagtgtattt

SEQ ID NO: 93020 - DNA, 25 bp, Homo sapien
gatatttcatgaggttagtgtattt

SEQ ID NO: 93021 - DNA, 25 bp, Homo sapien
gtaatttacatcagattaacacttt

SEQ ID NO: 93022 - DNA, 25 bp, Homo sapien
gtaatttacatctgattaacacttt

SEQ ID NO: 93023 - DNA, 25 bp, Homo sapien
gtctagtttcattcgagccattcac

SEQ ID NO: 93024 - DNA, 25 bp, Homo sapien
gtctagtttcatacgagccattcac

SEQ ID NO: 93025 - DNA, 25 bp, Homo sapien
ttttaggtgtcggacggtgtcgtct

SEQ ID NO: 93026 - DNA, 25 bp, Homo sapien
ttttaggtgtcgcacggtgtcgtct

SEQ ID NO: 93027 - DNA, 25 bp, Homo sapien
ggtctgggacggaatcctctctcgc

SEQ ID NO: 93028 - DNA, 25 bp, Homo sapien
ggtctgggacggtatcctctctcgc

SEQ ID NO: 93029 - DNA, 25 bp, Homo sapien
cgtacagttgttttactgtttctcc

SEQ ID NO: 93030 - DNA, 25 bp, Homo sapien
cgtacagttgttatactgtttctcc

SEQ ID NO: 93031 - DNA, 25 bp, Homo sapien
cgtcttagagtttacctgttttatg

SEQ ID NO: 93032 - DNA, 25 bp, Homo sapien
cgtcttagagttaacctgttttatg

SEQ ID NO: 93033 - DNA, 25 bp, Homo sapien
acttacgttattgatcgtattttgc

SEQ ID NO: 93034 - DNA, 25 bp, Homo sapien
acttacgttattcatcgtattttgc

SEQ ID NO: 93035 - DNA, 25 bp, Homo sapien
agaagaaaatctatccataggtgtc

SEQ ID NO: 93036 - DNA, 25 bp, Homo sapien
agaagaaaatctttccataggtgtc

SEQ ID NO: 93037 - DNA, 25 bp, Homo sapien
gggggacatcctttccggacggaac

SEQ ID NO: 93038 - DNA, 25 bp, Homo sapien
gggggacatcctatccggacggaac

SEQ ID NO: 93039 - DNA, 25 bp, Homo sapien
gaggggattgtctacaccacaagac

SEQ ID NO: 93040 - DNA, 25 bp, Homo sapien
gaggggattgtcaacaccacaagac

SEQ ID NO: 93041 - DNA, 25 bp, Homo sapien
cacttcgggacctttagccggacca

SEQ ID NO: 93042 - DNA, 25 bp, Homo sapien
cacttcgggaccattagccggacca

SEQ ID NO: 93043 - DNA, 25 bp, Homo sapien
gtgtcgaacctgttggtccggtcca

SEQ ID NO: 93044 - DNA, 25 bp, Homo sapien
gtgtcgaacctgatggtccggtcca

SEQ ID NO: 93045 - DNA, 25 bp, Homo sapien
gcttgaacttcaacggccgcgcggg

SEQ ID NO: 93046 - DNA, 25 bp, Homo sapien
gcttgaacttcatcggccgcgcggg

SEQ ID NO: 93047 - DNA, 25 bp, Homo sapien
aatgtaatcgacgaagccccgagac

SEQ ID NO: 93048 - DNA, 25 bp, Homo sapien
aatgtaatcgaccaagccccgagac

SEQ ID NO: 93049 - DNA, 25 bp, Homo sapien
aacaggaaggagagttccaacgacc

SEQ ID NO: 93050 - DNA, 25 bp, Homo sapien
aacaggaaggagtgttccaacgacc

SEQ ID NO: 93051 - DNA, 25 bp, Homo sapien
tctgaaaaagttaccgtaactgtat

SEQ ID NO: 93052 - DNA, 25 bp, Homo sapien
tctgaaaaagtttccgtaactgtat

SEQ ID NO: 93053 - DNA, 25 bp, Homo sapien
cttaaaagaacgtctctgttctgtt

SEQ ID NO: 93054 - DNA, 25 bp, Homo sapien
cttaaaagaacgactctgttctgtt

SEQ ID NO: 93055 - DNA, 25 bp, Homo sapien
tatctgttcaccactctctgttagg

SEQ ID NO: 93056 - DNA, 25 bp, Homo sapien
tatctgttcacctctctctgttagg

SEQ ID NO: 93057 - DNA, 25 bp, Homo sapien
aattttcgtctcacggtgcgtttag

SEQ ID NO: 93058 - DNA, 25 bp, Homo sapien
aattttcgtctctcggtgcgtttag

SEQ ID NO: 93059 - DNA, 25 bp, Homo sapien
tgtaagtgagtgtcccctgacaaca

SEQ ID NO: 93060 - DNA, 25 bp, Homo sapien
tgtaagtgagtgacccctgacaaca

SEQ ID NO: 93061 - DNA, 25 bp, Homo sapien
tcgttgtgtattttcccggataaag

SEQ ID NO: 93062 - DNA, 25 bp, Homo sapien
tcgttgtgtattatcccggataaag

SEQ ID NO: 93063 - DNA, 25 bp, Homo sapien
ttgagcggtccgttccggaacgaag

SEQ ID NO: 93064 - DNA, 25 bp, Homo sapien
ttgagcggtccgatccggaacgaag

SEQ ID NO: 93065 - DNA, 25 bp, Homo sapien
cactcttcggatctcgaccctgggg

SEQ ID NO: 93066 - DNA, 25 bp, Homo sapien
cactcttcggatgtcgaccctgggg

SEQ ID NO: 93067 - DNA, 25 bp, Homo sapien
tacatttcatgtgttttccagtggt

SEQ ID NO: 93068 - DNA, 25 bp, Homo sapien
tacatttcatgtcttttccagtggt

SEQ ID NO: 93069 - DNA, 25 bp, Homo sapien
acatgtgacaaattttcgcctaggg

SEQ ID NO: 93070 - DNA, 25 bp, Homo sapien
acatgtgacaaaatttcgcctaggg

SEQ ID NO: 93071 - DNA, 25 bp, Homo sapien
ctgagaaggtgacatagtcctggag

SEQ ID NO: 93072 - DNA, 25 bp, Homo sapien
ctgagaaggtgagatagtcctggag

SEQ ID NO: 93073 - DNA, 25 bp, Homo sapien
caaaagagtggagatactcgaaggc

SEQ ID NO: 93074 - DNA, 25 bp, Homo sapien
caaaagagtggacatactcgaaggc

SEQ ID NO: 93075 - DNA, 25 bp, Homo sapien
tcaggttgcctacgtcgacgatgcg

SEQ ID NO: 93076 - DNA, 25 bp, Homo sapien
tcaggttgcctaggtcgacgatgcg

SEQ ID NO: 93077 - DNA, 25 bp, Homo sapien
tatcaggtctaacagatgagatctt

SEQ ID NO: 93078 - DNA, 25 bp, Homo sapien
tatcaggtctaagagatgagatctt

SEQ ID NO: 93079 - DNA, 25 bp, Homo sapien
taagggttcgacagagcacaagaca

SEQ ID NO: 93080 - DNA, 25 bp, Homo sapien
taagggttcgactgagcacaagaca

SEQ ID NO: 93081 - DNA, 25 bp, Homo sapien
ttatggtcactgatgaaactaagca

SEQ ID NO: 93082 - DNA, 25 bp, Homo sapien
ttatggtcactgttgaaactaagca

SEQ ID NO: 93083 - DNA, 25 bp, Homo sapien
cggttagagtttgaagtacggcgac

SEQ ID NO: 93084 - DNA, 25 bp, Homo sapien
cggttagagtttcaagtacggcgac

SEQ ID NO: 93085 - DNA, 25 bp, Homo sapien
atactaacggttctccgactctcag

SEQ ID NO: 93086 - DNA, 25 bp, Homo sapien
atactaacggttgtccgactctcag

SEQ ID NO: 93087 - DNA, 25 bp, Homo sapien
gagctaccagtgttaacccgtgcat

SEQ ID NO: 93088 - DNA, 25 bp, Homo sapien
gagctaccagtgataacccgtgcat

SEQ ID NO: 93089 - DNA, 25 bp, Homo sapien
aggacacttccctggtgacccggca

SEQ ID NO: 93090 - DNA, 25 bp, Homo sapien
aggacacttcccaggtgacccggca

SEQ ID NO: 93091 - DNA, 25 bp, Homo sapien
ctagatacattagtgtctccggtca

SEQ ID NO: 93092 - DNA, 25 bp, Homo sapien
ctagatacattactgtctccggtca

SEQ ID NO: 93093 - DNA, 25 bp, Homo sapien
tgaacgagacgtcttcgaagagtta

SEQ ID NO: 93094 - DNA, 25 bp, Homo sapien
tgaacgagacgtgttcgaagagtta

SEQ ID NO: 93095 - DNA, 25 bp, Homo sapien
gggtcacggtaggtttacaagttca

SEQ ID NO: 93096 - DNA, 25 bp, Homo sapien
gggtcacggtagctttacaagttca

SEQ ID NO: 93097 - DNA, 25 bp, Homo sapien
gtcacagtctctttctctgatagac

SEQ ID NO: 93098 - DNA, 25 bp, Homo sapien
gtcacagtctctatctctgatagac

SEQ ID NO: 93099 - DNA, 25 bp, Homo sapien
ggaggcttcagtcgtcctcggagac

SEQ ID NO: 93100 - DNA, 25 bp, Homo sapien
ggaggcttcagtggtcctcggagac

SEQ ID NO: 93101 - DNA, 25 bp, Homo sapien
aggtaaattctggtaccctagcata

SEQ ID NO: 93102 - DNA, 25 bp, Homo sapien
aggtaaattctgctaccctagcata

SEQ ID NO: 93103 - DNA, 25 bp, Homo sapien
agattattcgattcgaatttcgtct

SEQ ID NO: 93104 - DNA, 25 bp, Homo sapien
agattattcgatacgaatttcgtct

SEQ ID NO: 93105 - DNA, 25 bp, Homo sapien
gaggaaatacctttttgacttttat

SEQ ID NO: 93106 - DNA, 25 bp, Homo sapien
gaggaaatacctatttgacttttat

SEQ ID NO: 93107 - DNA, 25 bp, Homo sapien
gtcaacaaaatagtgacctgttctt

SEQ ID NO: 93108 - DNA, 25 bp, Homo sapien
gtcaacaaaatactgacctgttctt

SEQ ID NO: 93109 - DNA, 25 bp, Homo sapien
cataaaaaggtgtcacatgttatct

SEQ ID NO: 93110 - DNA, 25 bp, Homo sapien
cataaaaaggtgacacatgttatct

SEQ ID NO: 93111 - DNA, 25 bp, Homo sapien
cgattatttgtctttgcagttcatg

SEQ ID NO: 93112 - DNA, 25 bp, Homo sapien
cgattatttgtcattgcagttcatg

SEQ ID NO: 93113 - DNA, 25 bp, Homo sapien
ggacgaattgaaataaccttgatcg

SEQ ID NO: 93114 - DNA, 25 bp, Homo sapien
ggacgaattgaattaaccttgatcg

SEQ ID NO: 93115 - DNA, 25 bp, Homo sapien
aggtcttttggatgacctgaacttg

SEQ ID NO: 93116 - DNA, 25 bp, Homo sapien
aggtcttttggaagacctgaacttg

SEQ ID NO: 93117 - DNA, 25 bp, Homo sapien
ttcctgttgtcgacgacaaacaaag

SEQ ID NO: 93118 - DNA, 25 bp, Homo sapien
ttcctgttgtcgtcgacaaacaaag

SEQ ID NO: 93119 - DNA, 25 bp, Homo sapien
ggccccatcgacgtacacaccaaga

SEQ ID NO: 93120 - DNA, 25 bp, Homo sapien
ggccccatcgacctacacaccaaga

SEQ ID NO: 93121 - DNA, 25 bp, Homo sapien
ccgtgaaccacttgacacgcacaga

SEQ ID NO: 93122 - DNA, 25 bp, Homo sapien
ccgtgaaccactagacacgcacaga

SEQ ID NO: 93123 - DNA, 25 bp, Homo sapien
ccgggaccaccttgactcggttagt

SEQ ID NO: 93124 - DNA, 25 bp, Homo sapien
ccgggaccacctagactcggttagt

SEQ ID NO: 93125 - DNA, 25 bp, Homo sapien
accagacctccgagtctaccggagt

SEQ ID NO: 93126 - DNA, 25 bp, Homo sapien
accagacctccgtgtctaccggagt

SEQ ID NO: 93127 - DNA, 25 bp, Homo sapien
ccgaagagagacgtagaagaccggt

SEQ ID NO: 93128 - DNA, 25 bp, Homo sapien
ccgaagagagacctagaagaccggt

SEQ ID NO: 93129 - DNA, 25 bp, Homo sapien
ccacgggagacctcgcagacacgat

SEQ ID NO: 93130 - DNA, 25 bp, Homo sapien
ccacgggagaccacgcagacacgat

SEQ ID NO: 93131 - DNA, 25 bp, Homo sapien
taccacggaggctagacgccggcga

SEQ ID NO: 93132 - DNA, 25 bp, Homo sapien
taccacggaggcaagacgccggcga

SEQ ID NO: 93133 - DNA, 25 bp, Homo sapien
agcaggtcgcgtcggacctcagcga

SEQ ID NO: 93134 - DNA, 25 bp, Homo sapien
agcaggtcgcgtgggacctcagcga

SEQ ID NO: 93135 - DNA, 25 bp, Homo sapien
tgggacggggccgggtatcctgtga

SEQ ID NO: 93136 - DNA, 25 bp, Homo sapien
tgggacggggcccggtatcctgtga

SEQ ID NO: 93137 - DNA, 25 bp, Homo sapien
agttgggtgtccacgaacagagaga

SEQ ID NO: 93138 - DNA, 25 bp, Homo sapien
agttgggtgtcctcgaacagagaga

SEQ ID NO: 93139 - DNA, 25 bp, Homo sapien
gttacaaccgttttgttacagacaa

SEQ ID NO: 93140 - DNA, 25 bp, Homo sapien
gttacaaccgttatgttacagacaa

SEQ ID NO: 93141 - DNA, 25 bp, Homo sapien
gattcactagttatgtaacaccgaa

SEQ ID NO: 93142 - DNA, 25 bp, Homo sapien
gattcactagttttgtaacaccgaa

SEQ ID NO: 93143 - DNA, 25 bp, Homo sapien
tccaacacgtaaacgtcaacagagg

SEQ ID NO: 93144 - DNA, 25 bp, Homo sapien
tccaacacgtaatcgtcaacagagg

SEQ ID NO: 93145 - DNA, 25 bp, Homo sapien
tttatgcacgttcaacagcataggt

SEQ ID NO: 93146 - DNA, 25 bp, Homo sapien
tttatgcacgttgaacagcataggt

SEQ ID NO: 93147 - DNA, 25 bp, Homo sapien
tgctgtatcgtgtcccgtggaaggt

SEQ ID NO: 93148 - DNA, 25 bp, Homo sapien
tgctgtatcgtgacccgtggaaggt

SEQ ID NO: 93149 - DNA, 25 bp, Homo sapien
gggtattccgggtcatcgaccaggt

SEQ ID NO: 93150 - DNA, 25 bp, Homo sapien
gggtattccgggacatcgaccaggt

SEQ ID NO: 93151 - DNA, 25 bp, Homo sapien
tagttcaaggtaaccgagaccacga

SEQ ID NO: 93152 - DNA, 25 bp, Homo sapien
tagttcaaggtatccgagaccacga

SEQ ID NO: 93153 - DNA, 25 bp, Homo sapien
agggtcaaacgcttaatatctctgt

SEQ ID NO: 93154 - DNA, 25 bp, Homo sapien
agggtcaaacgcataatatctctgt

SEQ ID NO: 93155 - DNA, 25 bp, Homo sapien
ctgccttacgaatacactcgtctgt

SEQ ID NO: 93156 - DNA, 25 bp, Homo sapien
ctgccttacgaaaacactcgtctgt

SEQ ID NO: 93157 - DNA, 25 bp, Homo sapien
tgtctcaagagtttcagtcgtcggt

SEQ ID NO: 93158 - DNA, 25 bp, Homo sapien
tgtctcaagagtatcagtcgtcggt

SEQ ID NO: 93159 - DNA, 25 bp, Homo sapien
aaaggaggaaagagaggtcatccgc

SEQ ID NO: 93160 - DNA, 25 bp, Homo sapien
aaaggaggaaagtgaggtcatccgc

SEQ ID NO: 93161 - DNA, 25 bp, Homo sapien
tgaacagttagaggtcgaccacgtc

SEQ ID NO: 93162 - DNA, 25 bp, Homo sapien
tgaacagttagacgtcgaccacgtc

SEQ ID NO: 93163 - DNA, 25 bp, Homo sapien
ccaatttactacttttttacccgct

SEQ ID NO: 93164 - DNA, 25 bp, Homo sapien
ccaatttactacatttttacccgct

SEQ ID NO: 93165 - DNA, 25 bp, Homo sapien
cttgatactcagatggtgccgggtc

SEQ ID NO: 93166 - DNA, 25 bp, Homo sapien
cttgatactcagttggtgccgggtc

SEQ ID NO: 93167 - DNA, 25 bp, Homo sapien
cgtaagtgcataaatgctcgaactg

SEQ ID NO: 93168 - DNA, 25 bp, Homo sapien
cgtaagtgcatatatgctcgaactg

SEQ ID NO: 93169 - DNA, 25 bp, Homo sapien
ttaacagtgaaataacgttctacca

SEQ ID NO: 93170 - DNA, 25 bp, Homo sapien
ttaacagtgaaaaaacgttctacca

SEQ ID NO: 93171 - DNA, 25 bp, Homo sapien
tttttaagggaacgaacgtctcaaa

SEQ ID NO: 93172 - DNA, 25 bp, Homo sapien
tttttaagggaaggaacgtctcaaa

SEQ ID NO: 93173 - DNA, 25 bp, Homo sapien
tcgtgacacttgagttttcaagaca

SEQ ID NO: 93174 - DNA, 25 bp, Homo sapien
tcgtgacacttgtgttttcaagaca

SEQ ID NO: 93175 - DNA, 25 bp, Homo sapien
tcaccggtccctagtcagagtaccg

SEQ ID NO: 93176 - DNA, 25 bp, Homo sapien
tcaccggtcccttgtcagagtaccg

SEQ ID NO: 93177 - DNA, 25 bp, Homo sapien
cgacagaatctcttccgtagacact

SEQ ID NO: 93178 - DNA, 25 bp, Homo sapien
cgacagaatctcatccgtagacact

SEQ ID NO: 93179 - DNA, 25 bp, Homo sapien
gaaacgacctcgattcattcttcgc

SEQ ID NO: 93180 - DNA, 25 bp, Homo sapien
gaaacgacctcgtttcattcttcgc

SEQ ID NO: 93181 - DNA, 25 bp, Homo sapien
taccagagcttctacaagtacctga

SEQ ID NO: 93182 - DNA, 25 bp, Homo sapien
taccagagcttcaacaagtacctga

SEQ ID NO: 93183 - DNA, 25 bp, Homo sapien
atacagacctcgtacggaaacccaa

SEQ ID NO: 93184 - DNA, 25 bp, Homo sapien
atacagacctcgaacggaaacccaa

SEQ ID NO: 93185 - DNA, 25 bp, Homo sapien
tctgactcccaggtagtccctctga

SEQ ID NO: 93186 - DNA, 25 bp, Homo sapien
tctgactcccagctagtccctctga

SEQ ID NO: 93187 - DNA, 25 bp, Homo sapien
ttcgactccagttggaaccgccgac

SEQ ID NO: 93188 - DNA, 25 bp, Homo sapien
ttcgactccagtaggaaccgccgac

SEQ ID NO: 93189 - DNA, 25 bp, Homo sapien
aatgacctcaccttaggggtcccgg

SEQ ID NO: 93190 - DNA, 25 bp, Homo sapien
aatgacctcaccataggggtcccgg

SEQ ID NO: 93191 - DNA, 25 bp, Homo sapien
taaagaaactctttggagctccaag

SEQ ID NO: 93192 - DNA, 25 bp, Homo sapien
taaagaaactctatggagctccaag

SEQ ID NO: 93193 - DNA, 25 bp, Homo sapien
tcaagaaatccaccaaggtccatag

SEQ ID NO: 93194 - DNA, 25 bp, Homo sapien
tcaagaaatccagcaaggtccatag

SEQ ID NO: 93195 - DNA, 25 bp, Homo sapien
tccactcgtggacatggacctccaa

SEQ ID NO: 93196 - DNA, 25 bp, Homo sapien
tccactcgtggagatggacctccaa

SEQ ID NO: 93197 - DNA, 25 bp, Homo sapien
ccagaacctctggatacttgaacgt

SEQ ID NO: 93198 - DNA, 25 bp, Homo sapien
ccagaacctctgcatacttgaacgt

SEQ ID NO: 93199 - DNA, 25 bp, Homo sapien
cacaaggatctgcagagtcgaaagt

SEQ ID NO: 93200 - DNA, 25 bp, Homo sapien
cacaaggatctggagagtcgaaagt

SEQ ID NO: 93201 - DNA, 25 bp, Homo sapien
cgaagaagttgaacggcgtcgaata

SEQ ID NO: 93202 - DNA, 25 bp, Homo sapien
cgaagaagttgatcggcgtcgaata

SEQ ID NO: 93203 - DNA, 25 bp, Homo sapien
ctacaggaatgatcactgtgtaaga

SEQ ID NO: 93204 - DNA, 25 bp, Homo sapien
ctacaggaatgaacactgtgtaaga

SEQ ID NO: 93205 - DNA, 25 bp, Homo sapien
taacagggtaaacctaatgtcaaat

SEQ ID NO: 93206 - DNA, 25 bp, Homo sapien
taacagggtaaagctaatgtcaaat

SEQ ID NO: 93207 - DNA, 25 bp, Homo sapien
aaagggactatacctttcgcataca

SEQ ID NO: 93208 - DNA, 25 bp, Homo sapien
aaagggactatagctttcgcataca

SEQ ID NO: 93209 - DNA, 25 bp, Homo sapien
aaggtgacctacattagtttctaca

SEQ ID NO: 93210 - DNA, 25 bp, Homo sapien
aaggtgacctactttagtttctaca

SEQ ID NO: 93211 - DNA, 25 bp, Homo sapien
aatgtacgaccttggattgagtcta

SEQ ID NO: 93212 - DNA, 25 bp, Homo sapien
aatgtacgacctaggattgagtcta

SEQ ID NO: 93213 - DNA, 25 bp, Homo sapien
acagtatcacgactctgattcttgg

SEQ ID NO: 93214 - DNA, 25 bp, Homo sapien
acagtatcacgagtctgattcttgg

SEQ ID NO: 93215 - DNA, 25 bp, Homo sapien
tgaccccactgtttattaactctgg

SEQ ID NO: 93216 - DNA, 25 bp, Homo sapien
tgaccccactgtatattaactctgg

SEQ ID NO: 93217 - DNA, 25 bp, Homo sapien
ttaccccgttagtgttctcacccgg

SEQ ID NO: 93218 - DNA, 25 bp, Homo sapien
ttaccccgttagagttctcacccgg

SEQ ID NO: 93219 - DNA, 25 bp, Homo sapien
taccttcatcgaggagagccaccgc

SEQ ID NO: 93220 - DNA, 25 bp, Homo sapien
taccttcatcgacgagagccaccgc

SEQ ID NO: 93221 - DNA, 25 bp, Homo sapien
gtcgtgcttcgagaatcgcagtcct

SEQ ID NO: 93222 - DNA, 25 bp, Homo sapien
gtcgtgcttcgacaatcgcagtcct

SEQ ID NO: 93223 - DNA, 25 bp, Homo sapien
tcaccttacgaccggtattcttacc

SEQ ID NO: 93224 - DNA, 25 bp, Homo sapien
tcaccttacgacgggtattcttacc

SEQ ID NO: 93225 - DNA, 25 bp, Homo sapien
gacctacactctctggacctggtcc

SEQ ID NO: 93226 - DNA, 25 bp, Homo sapien
gacctacactctgtggacctggtcc

SEQ ID NO: 93227 - DNA, 25 bp, Homo sapien
aacttagaacctggtgcaaaacttt

SEQ ID NO: 93228 - DNA, 25 bp, Homo sapien
aacttagaacctcgtgcaaaacttt

SEQ ID NO: 93229 - DNA, 25 bp, Homo sapien
tggtaagagtggtcttacaaaaaac

SEQ ID NO: 93230 - DNA, 25 bp, Homo sapien
tggtaagagtggacttacaaaaaac

SEQ ID NO: 93231 - DNA, 25 bp, Homo sapien
gacgaggactttcttaacagatgga

SEQ ID NO: 93232 - DNA, 25 bp, Homo sapien
gacgaggactttgttaacagatgga

SEQ ID NO: 93233 - DNA, 25 bp, Homo sapien
ccgacggtttctgacaaggttatgg

SEQ ID NO: 93234 - DNA, 25 bp, Homo sapien
ccgacggtttctcacaaggttatgg

SEQ ID NO: 93235 - DNA, 25 bp, Homo sapien
aggtgccgcgagaagtacaacttcc

SEQ ID NO: 93236 - DNA, 25 bp, Homo sapien
aggtgccgcgagtagtacaacttcc

SEQ ID NO: 93237 - DNA, 25 bp, Homo sapien
gtgtgtatgtctcttcagtgtgtcc

SEQ ID NO: 93238 - DNA, 25 bp, Homo sapien
gtgtgtatgtctgttcagtgtgtcc

SEQ ID NO: 93239 - DNA, 25 bp, Homo sapien
aactcgtaccggtagagtatccacg

SEQ ID NO: 93240 - DNA, 25 bp, Homo sapien
aactcgtaccggaagagtatccacg

SEQ ID NO: 93241 - DNA, 25 bp, Homo sapien
aactcgtaaagatcgacgccgtcta

SEQ ID NO: 93242 - DNA, 25 bp, Homo sapien
aactcgtaaagaacgacgccgtcta

SEQ ID NO: 93243 - DNA, 25 bp, Homo sapien
tatatacaagtataccaaatctatg

SEQ ID NO: 93244 - DNA, 25 bp, Homo sapien
tatatacaagtaaaccaaatctatg

SEQ ID NO: 93245 - DNA, 25 bp, Homo sapien
tgtaaacaaacacaccatacttaag

SEQ ID NO: 93246 - DNA, 25 bp, Homo sapien
tgtaaacaaacagaccatacttaag

SEQ ID NO: 93247 - DNA, 25 bp, Homo sapien
gaagaaagagaaacctgtctactgg

SEQ ID NO: 93248 - DNA, 25 bp, Homo sapien
gaagaaagagaatcctgtctactgg

SEQ ID NO: 93249 - DNA, 25 bp, Homo sapien
caagaacctaactatcgttgtttcc

SEQ ID NO: 93250 - DNA, 25 bp, Homo sapien
caagaacctaacaatcgttgtttcc

SEQ ID NO: 93251 - DNA, 25 bp, Homo sapien
tgacgtcccaagagattcttcaaac

SEQ ID NO: 93252 - DNA, 25 bp, Homo sapien
tgacgtcccaagtgattcttcaaac

SEQ ID NO: 93253 - DNA, 25 bp, Homo sapien
tatgtcgtcccgtgttttggaagac

SEQ ID NO: 93254 - DNA, 25 bp, Homo sapien
tatgtcgtcccgagttttggaagac

SEQ ID NO: 93255 - DNA, 25 bp, Homo sapien
tcgttcggccgaaggtctatgggaa

SEQ ID NO: 93256 - DNA, 25 bp, Homo sapien
tcgttcggccgatggtctatgggaa

SEQ ID NO: 93257 - DNA, 25 bp, Homo sapien
tcctcaccgagttcagtccgggacc

SEQ ID NO: 93258 - DNA, 25 bp, Homo sapien
tcctcaccgagtacagtccgggacc

SEQ ID NO: 93259 - DNA, 25 bp, Homo sapien
tttgatacaccgaaaaacatgaaag

SEQ ID NO: 93260 - DNA, 25 bp, Homo sapien
tttgatacaccgtaaaacatgaaag

SEQ ID NO: 93261 - DNA, 25 bp, Homo sapien
tcggttttaagggaagactccaaag

SEQ ID NO: 93262 - DNA, 25 bp, Homo sapien
tcggttttaaggcaagactccaaag

SEQ ID NO: 93263 - DNA, 25 bp, Homo sapien
tgttccaggggcagactagacggaa

SEQ ID NO: 93264 - DNA, 25 bp, Homo sapien
tgttccaggggctgactagacggaa

SEQ ID NO: 93265 - DNA, 25 bp, Homo sapien
gtctacctttttacgaacgtcagtg

SEQ ID NO: 93266 - DNA, 25 bp, Homo sapien
gtctaccttttttcgaacgtcagtg

SEQ ID NO: 93267 - DNA, 25 bp, Homo sapien
tgacgaaggatttcccgaacacata

SEQ ID NO: 93268 - DNA, 25 bp, Homo sapien
tgacgaaggattacccgaacacata

SEQ ID NO: 93269 - DNA, 25 bp, Homo sapien
gaactcgtttagacctccgaagatt

SEQ ID NO: 93270 - DNA, 25 bp, Homo sapien
gaactcgtttagtcctccgaagatt

SEQ ID NO: 93271 - DNA, 25 bp, Homo sapien
gagatcttacattaccctgcggggt

SEQ ID NO: 93272 - DNA, 25 bp, Homo sapien
gagatcttacataaccctgcggggt

SEQ ID NO: 93273 - DNA, 25 bp, Homo sapien
acaccttcagatctttacgactgac

SEQ ID NO: 93274 - DNA, 25 bp, Homo sapien
acaccttcagatgtttacgactgac

SEQ ID NO: 93275 - DNA, 25 bp, Homo sapien
ttaaggtggagacgactaaactctc

SEQ ID NO: 93276 - DNA, 25 bp, Homo sapien
ttaaggtggagaggactaaactctc

SEQ ID NO: 93277 - DNA, 25 bp, Homo sapien
gtacaaatcgaccgggtttacaacg

SEQ ID NO: 93278 - DNA, 25 bp, Homo sapien
gtacaaatcgacggggtttacaacg

SEQ ID NO: 93279 - DNA, 25 bp, Homo sapien
cttctacaagcgctaatagaagata

SEQ ID NO: 93280 - DNA, 25 bp, Homo sapien
cttctacaagcggtaatagaagata

SEQ ID NO: 93281 - DNA, 25 bp, Homo sapien
tagataaagtcctaaaccttcgaag

SEQ ID NO: 93282 - DNA, 25 bp, Homo sapien
tagataaagtccaaaaccttcgaag

SEQ ID NO: 93283 - DNA, 25 bp, Homo sapien
ctgaggttgtctgtcctaacacact

SEQ ID NO: 93284 - DNA, 25 bp, Homo sapien
ctgaggttgtctctcctaacacact

SEQ ID NO: 93285 - DNA, 25 bp, Homo sapien
actaagagtttcagaaccatccgta

SEQ ID NO: 93286 - DNA, 25 bp, Homo sapien
actaagagtttctgaaccatccgta

SEQ ID NO: 93287 - DNA, 25 bp, Homo sapien
taccggtgtggtatcgtgtcccgtt

SEQ ID NO: 93288 - DNA, 25 bp, Homo sapien
taccggtgtggtttcgtgtcccgtt

SEQ ID NO: 93289 - DNA, 25 bp, Homo sapien
gtggttttaaggtagtactgtctcc

SEQ ID NO: 93290 - DNA, 25 bp, Homo sapien
gtggttttaaggaagtactgtctcc

SEQ ID NO: 93291 - DNA, 25 bp, Homo sapien
agtagtattggacaatcttacgttc

SEQ ID NO: 93292 - DNA, 25 bp, Homo sapien
agtagtattggagaatcttacgttc

SEQ ID NO: 93293 - DNA, 25 bp, Homo sapien
gagaattccggtcacactcttcacc

SEQ ID NO: 93294 - DNA, 25 bp, Homo sapien
gagaattccggtgacactcttcacc

SEQ ID NO: 93295 - DNA, 25 bp, Homo sapien
atggagatccggacacacgccgacc

SEQ ID NO: 93296 - DNA, 25 bp, Homo sapien
atggagatccggtcacacgccgacc

SEQ ID NO: 93297 - DNA, 25 bp, Homo sapien
ggacggtgacttgacacctccacac

SEQ ID NO: 93298 - DNA, 25 bp, Homo sapien
ggacggtgacttcacacctccacac

SEQ ID NO: 93299 - DNA, 25 bp, Homo sapien
gtgacagtaaattctaccacactga

SEQ ID NO: 93300 - DNA, 25 bp, Homo sapien
gtgacagtaaatactaccacactga

SEQ ID NO: 93301 - DNA, 25 bp, Homo sapien
gtggaggtgaggtactactacaaac

SEQ ID NO: 93302 - DNA, 25 bp, Homo sapien
gtggaggtgaggaactactacaaac

SEQ ID NO: 93303 - DNA, 25 bp, Homo sapien
cctgtgggagagactcgtcgaaacg

SEQ ID NO: 93304 - DNA, 25 bp, Homo sapien
cctgtgggagagtctcgtcgaaacg

SEQ ID NO: 93305 - DNA, 25 bp, Homo sapien
tttgagctccggacccagtgaagag

SEQ ID NO: 93306 - DNA, 25 bp, Homo sapien
tttgagctccggtcccagtgaagag

SEQ ID NO: 93307 - DNA, 25 bp, Homo sapien
acaggtcctagttgccctatggtag

SEQ ID NO: 93308 - DNA, 25 bp, Homo sapien
acaggtcctagtagccctatggtag

SEQ ID NO: 93309 - DNA, 25 bp, Homo sapien
tgaaggcctagaagacacccctaga

SEQ ID NO: 93310 - DNA, 25 bp, Homo sapien
tgaaggcctagatgacacccctaga

SEQ ID NO: 93311 - DNA, 25 bp, Homo sapien
ctatgaccagtagaccgactccagg

SEQ ID NO: 93312 - DNA, 25 bp, Homo sapien
ctatgaccagtacaccgactccagg

SEQ ID NO: 93313 - DNA, 25 bp, Homo sapien
cgacttacgacgaaccccaaagaag

SEQ ID NO: 93314 - DNA, 25 bp, Homo sapien
cgacttacgacgtaccccaaagaag

SEQ ID NO: 93315 - DNA, 25 bp, Homo sapien
agatggaggacacacgaacagaagt

SEQ ID NO: 93316 - DNA, 25 bp, Homo sapien
agatggaggacagacgaacagaagt

SEQ ID NO: 93317 - DNA, 25 bp, Homo sapien
tctcttcttgctgtacccgtggtac

SEQ ID NO: 93318 - DNA, 25 bp, Homo sapien
tctcttcttgctctacccgtggtac

SEQ ID NO: 93319 - DNA, 25 bp, Homo sapien
tctgtattgtcgttacgaaatttac

SEQ ID NO: 93320 - DNA, 25 bp, Homo sapien
tctgtattgtcgatacgaaatttac

SEQ ID NO: 93321 - DNA, 25 bp, Homo sapien
aaggtttaagagaactactatctac

SEQ ID NO: 93322 - DNA, 25 bp, Homo sapien
aaggtttaagagtactactatctac

SEQ ID NO: 93323 - DNA, 25 bp, Homo sapien
gtaatgttcttcaaggtctcttcta

SEQ ID NO: 93324 - DNA, 25 bp, Homo sapien
gtaatgttcttctaggtctcttcta

SEQ ID NO: 93325 - DNA, 25 bp, Homo sapien
tcttgtttgtcttgggtacagacag

SEQ ID NO: 93326 - DNA, 25 bp, Homo sapien
tcttgtttgtctagggtacagacag

SEQ ID NO: 93327 - DNA, 25 bp, Homo sapien
ttcttttgttcaggagtctacgtta

SEQ ID NO: 93328 - DNA, 25 bp, Homo sapien
ttcttttgttcacgagtctacgtta

SEQ ID NO: 93329 - DNA, 25 bp, Homo sapien
aagttttgtgtagacatacacttac

SEQ ID NO: 93330 - DNA, 25 bp, Homo sapien
aagttttgtgtacacatacacttac

SEQ ID NO: 93331 - DNA, 25 bp, Homo sapien
ttatgtctatacctctgatgttacg

SEQ ID NO: 93332 - DNA, 25 bp, Homo sapien
ttatgtctatacgtctgatgttacg

SEQ ID NO: 93333 - DNA, 25 bp, Homo sapien
tttccttcttgtacagtctaggact

SEQ ID NO: 93334 - DNA, 25 bp, Homo sapien
tttccttcttgttcagtctaggact

SEQ ID NO: 93335 - DNA, 25 bp, Homo sapien
tatgttgtctctttaccatgtagaa

SEQ ID NO: 93336 - DNA, 25 bp, Homo sapien
tatgttgtctctataccatgtagaa

SEQ ID NO: 93337 - DNA, 25 bp, Homo sapien
atttgtaccgttaattatctcgaga

SEQ ID NO: 93338 - DNA, 25 bp, Homo sapien
atttgtaccgtttattatctcgaga

SEQ ID NO: 93339 - DNA, 25 bp, Homo sapien
cctataagagctaattgttcggttt

SEQ ID NO: 93340 - DNA, 25 bp, Homo sapien
cctataagagcttattgttcggttt

SEQ ID NO: 93341 - DNA, 25 bp, Homo sapien
ctagaggaacttacatcgtgtgttt

SEQ ID NO: 93342 - DNA, 25 bp, Homo sapien
ctagaggaactttcatcgtgtgttt

SEQ ID NO: 93343 - DNA, 25 bp, Homo sapien
cttacgacggactttaattgtataa

SEQ ID NO: 93344 - DNA, 25 bp, Homo sapien
cttacgacggacattaattgtataa

SEQ ID NO: 93345 - DNA, 25 bp, Homo sapien
agttgaccgacgatcttaaggcaag

SEQ ID NO: 93346 - DNA, 25 bp, Homo sapien
agttgaccgacgttcttaaggcaag

SEQ ID NO: 93347 - DNA, 25 bp, Homo sapien
acctattccgttcatcacaagaagg

SEQ ID NO: 93348 - DNA, 25 bp, Homo sapien
acctattccgttgatcacaagaagg

SEQ ID NO: 93349 - DNA, 25 bp, Homo sapien
ttctacttcctgaacttcaagagga

SEQ ID NO: 93350 - DNA, 25 bp, Homo sapien
ttctacttcctgtacttcaagagga

SEQ ID NO: 93351 - DNA, 25 bp, Homo sapien
tcgtctacccgtggaccctggtgga

SEQ ID NO: 93352 - DNA, 25 bp, Homo sapien
tcgtctacccgtcgaccctggtgga

SEQ ID NO: 93353 - DNA, 25 bp, Homo sapien
gtactcaccgtcacctctctgttga

SEQ ID NO: 93354 - DNA, 25 bp, Homo sapien
gtactcaccgtctcctctctgttga

SEQ ID NO: 93355 - DNA, 25 bp, Homo sapien
gtcgtccatgtgaccgttcgaacgg

SEQ ID NO: 93356 - DNA, 25 bp, Homo sapien
gtcgtccatgtgtccgttcgaacgg

SEQ ID NO: 93357 - DNA, 25 bp, Homo sapien
gaactgcatcggtaactcttgaact

SEQ ID NO: 93358 - DNA, 25 bp, Homo sapien
gaactgcatcggaaactcttgaact

SEQ ID NO: 93359 - DNA, 25 bp, Homo sapien
gtagacgacccttttctgttggtac

SEQ ID NO: 93360 - DNA, 25 bp, Homo sapien
gtagacgaccctattctgttggtac

SEQ ID NO: 93361 - DNA, 25 bp, Homo sapien
acgagtaaccacaggggttcggaac

SEQ ID NO: 93362 - DNA, 25 bp, Homo sapien
acgagtaaccactggggttcggaac

SEQ ID NO: 93363 - DNA, 25 bp, Homo sapien
tcgagaaccggaacgcggctccggc

SEQ ID NO: 93364 - DNA, 25 bp, Homo sapien
tcgagaaccggatcgcggctccggc

SEQ ID NO: 93365 - DNA, 25 bp, Homo sapien
agtctcaagcggacgttgcggcgaa

SEQ ID NO: 93366 - DNA, 25 bp, Homo sapien
agtctcaagcggtcgttgcggcgaa

SEQ ID NO: 93367 - DNA, 25 bp, Homo sapien
acggagacagttttcggtcgcgtct

SEQ ID NO: 93368 - DNA, 25 bp, Homo sapien
acggagacagttatcggtcgcgtct

SEQ ID NO: 93369 - DNA, 25 bp, Homo sapien
agaagagacgtaagaccgacgagga

SEQ ID NO: 93370 - DNA, 25 bp, Homo sapien
agaagagacgtatgaccgacgagga

SEQ ID NO: 93371 - DNA, 25 bp, Homo sapien
tgacttgagtaagagacacacaagt

SEQ ID NO: 93372 - DNA, 25 bp, Homo sapien
tgacttgagtaacagacacacaagt

SEQ ID NO: 93373 - DNA, 25 bp, Homo sapien
gacggggtcactccagacaatacgt

SEQ ID NO: 93374 - DNA, 25 bp, Homo sapien
gacggggtcactgcagacaatacgt

SEQ ID NO: 93375 - DNA, 25 bp, Homo sapien
acacagtctgtcgaccgagatagga

SEQ ID NO: 93376 - DNA, 25 bp, Homo sapien
acacagtctgtccaccgagatagga

SEQ ID NO: 93377 - DNA, 25 bp, Homo sapien
aacgaaatagtcctcgtggttagaa

SEQ ID NO: 93378 - DNA, 25 bp, Homo sapien
aacgaaatagtcgtcgtggttagaa

SEQ ID NO: 93379 - DNA, 25 bp, Homo sapien
gagactacatgttactctaaactga

SEQ ID NO: 93380 - DNA, 25 bp, Homo sapien
gagactacatgtaactctaaactga

SEQ ID NO: 93381 - DNA, 25 bp, Homo sapien
agacgcagtgcacctacatcggact

SEQ ID NO: 93382 - DNA, 25 bp, Homo sapien
agacgcagtgcagctacatcggact

SEQ ID NO: 93383 - DNA, 25 bp, Homo sapien
cggagcgcgaagaggacttaccgac

SEQ ID NO: 93384 - DNA, 25 bp, Homo sapien
cggagcgcgaagtggacttaccgac

SEQ ID NO: 93385 - DNA, 25 bp, Homo sapien
cgaaagagtacaagttgagtcacaa

SEQ ID NO: 93386 - DNA, 25 bp, Homo sapien
cgaaagagtacatgttgagtcacaa

SEQ ID NO: 93387 - DNA, 25 bp, Homo sapien
acgataagtacacctggattacaga

SEQ ID NO: 93388 - DNA, 25 bp, Homo sapien
acgataagtacagctggattacaga

SEQ ID NO: 93389 - DNA, 25 bp, Homo sapien
acacctagtgtgtctggcttatcga

SEQ ID NO: 93390 - DNA, 25 bp, Homo sapien
acacctagtgtgactggcttatcga

SEQ ID NO: 93391 - DNA, 25 bp, Homo sapien
cacactcggtgacacggactgaatt

SEQ ID NO: 93392 - DNA, 25 bp, Homo sapien
cacactcggtgagacggactgaatt

SEQ ID NO: 93393 - DNA, 25 bp, Homo sapien
tactcagtgactaccaggtatagac

SEQ ID NO: 93394 - DNA, 25 bp, Homo sapien
tactcagtgacttccaggtatagac

SEQ ID NO: 93395 - DNA, 25 bp, Homo sapien
tatgactcgaatccatgtctagtac

SEQ ID NO: 93396 - DNA, 25 bp, Homo sapien
tatgactcgaatgcatgtctagtac

SEQ ID NO: 93397 - DNA, 25 bp, Homo sapien
ctatcggacctatctaaagactaag

SEQ ID NO: 93398 - DNA, 25 bp, Homo sapien
ctatcggacctaactaaagactaag

SEQ ID NO: 93399 - DNA, 25 bp, Homo sapien
gagatctaacctaaagacaacgcaa

SEQ ID NO: 93400 - DNA, 25 bp, Homo sapien
gagatctaaccttaagacaacgcaa

SEQ ID NO: 93401 - DNA, 25 bp, Homo sapien
gaagacacttagaaacaacgcacta

SEQ ID NO: 93402 - DNA, 25 bp, Homo sapien
gaagacacttagtaacaacgcacta

SEQ ID NO: 93403 - DNA, 25 bp, Homo sapien
aagccgtataaacatacgtctgtag

SEQ ID NO: 93404 - DNA, 25 bp, Homo sapien
aagccgtataaagatacgtctgtag

SEQ ID NO: 93405 - DNA, 25 bp, Homo sapien
taaagcgagtaaaggtgatctaccc

SEQ ID NO: 93406 - DNA, 25 bp, Homo sapien
taaagcgagtaatggtgatctaccc

SEQ ID NO: 93407 - DNA, 25 bp, Homo sapien
cgtcagggttagtcggggtccatac

SEQ ID NO: 93408 - DNA, 25 bp, Homo sapien
cgtcagggttagacggggtccatac

SEQ ID NO: 93409 - DNA, 25 bp, Homo sapien
ttcagtccatgaagagcgccccgtc

SEQ ID NO: 93410 - DNA, 25 bp, Homo sapien
ttcagtccatgatgagcgccccgtc

SEQ ID NO: 93411 - DNA, 25 bp, Homo sapien
ttttgttactcgataggattcccct

SEQ ID NO: 93412 - DNA, 25 bp, Homo sapien
ttttgttactcgttaggattcccct

SEQ ID NO: 93413 - DNA, 25 bp, Homo sapien
tgatttatgactaaggtatcacccc

SEQ ID NO: 93414 - DNA, 25 bp, Homo sapien
tgatttatgacttaggtatcacccc

SEQ ID NO: 93415 - DNA, 25 bp, Homo sapien
gtcgtaatcaaaggtatgactcttt

SEQ ID NO: 93416 - DNA, 25 bp, Homo sapien
gtcgtaatcaaacgtatgactcttt

SEQ ID NO: 93417 - DNA, 25 bp, Homo sapien
aagaactcaaagtagtctaactaga

SEQ ID NO: 93418 - DNA, 25 bp, Homo sapien
aagaactcaaagaagtctaactaga

SEQ ID NO: 93419 - DNA, 25 bp, Homo sapien
agacattgagaaagtaccgcagtag

SEQ ID NO: 93420 - DNA, 25 bp, Homo sapien
agacattgagaatgtaccgcagtag

SEQ ID NO: 93421 - DNA, 25 bp, Homo sapien
ctttcgtaagaatgtatcgtcaact

SEQ ID NO: 93422 - DNA, 25 bp, Homo sapien
ctttcgtaagaaagtatcgtcaact

SEQ ID NO: 93423 - DNA, 25 bp, Homo sapien
ttatgggtcacaagggttcgtctcc

SEQ ID NO: 93424 - DNA, 25 bp, Homo sapien
ttatgggtcacatgggttcgtctcc

SEQ ID NO: 93425 - DNA, 25 bp, Homo sapien
tttacgaatactgattggaactcaa

SEQ ID NO: 93426 - DNA, 25 bp, Homo sapien
tttacgaatactcattggaactcaa

SEQ ID NO: 93427 - DNA, 25 bp, Homo sapien
gactcctaaagttcccgagtcttaa

SEQ ID NO: 93428 - DNA, 25 bp, Homo sapien
gactcctaaagtacccgagtcttaa

SEQ ID NO: 93429 - DNA, 25 bp, Homo sapien
ctcgtaagaggtctaccgagcttaa

SEQ ID NO: 93430 - DNA, 25 bp, Homo sapien
ctcgtaagaggtgtaccgagcttaa

SEQ ID NO: 93431 - DNA, 25 bp, Homo sapien
aaaatatagtagagacacgtcgtcg

SEQ ID NO: 93432 - DNA, 25 bp, Homo sapien
aaaatatagtagtgacacgtcgtcg

SEQ ID NO: 93433 - DNA, 25 bp, Homo sapien
ctataaggtcaaaggacggtgtact

SEQ ID NO: 93434 - DNA, 25 bp, Homo sapien
ctataaggtcaatggacggtgtact

SEQ ID NO: 93435 - DNA, 25 bp, Homo sapien
cacttaagtcaagtgtctatgacgt

SEQ ID NO: 93436 - DNA, 25 bp, Homo sapien
cacttaagtcaactgtctatgacgt

SEQ ID NO: 93437 - DNA, 25 bp, Homo sapien
tctaatgagtgtcctttagataaat

SEQ ID NO: 93438 - DNA, 25 bp, Homo sapien
tctaatgagtgtgctttagataaat

SEQ ID NO: 93439 - DNA, 25 bp, Homo sapien
actacactctttagataccgggaca

SEQ ID NO: 93440 - DNA, 25 bp, Homo sapien
actacactcttttgataccgggaca

SEQ ID NO: 93441 - DNA, 25 bp, Homo sapien
cacccactgttgttacacgtccaga

SEQ ID NO: 93442 - DNA, 25 bp, Homo sapien
cacccactgttgatacacgtccaga

SEQ ID NO: 93443 - DNA, 25 bp, Homo sapien
cctacacgagtttcccactttactt

SEQ ID NO: 93444 - DNA, 25 bp, Homo sapien
cctacacgagttacccactttactt

SEQ ID NO: 93445 - DNA, 25 bp, Homo sapien
taaagtactaaagtcctagtctatg

SEQ ID NO: 93446 - DNA, 25 bp, Homo sapien
taaagtactaaactcctagtctatg

SEQ ID NO: 93447 - DNA, 25 bp, Homo sapien
atcagaaattcacatcttatgacgg

SEQ ID NO: 93448 - DNA, 25 bp, Homo sapien
atcagaaattcagatcttatgacgg

SEQ ID NO: 93449 - DNA, 25 bp, Homo sapien
cgggtctcatcgactttcagcgtgt

SEQ ID NO: 93450 - DNA, 25 bp, Homo sapien
cgggtctcatcgtctttcagcgtgt

SEQ ID NO: 93451 - DNA, 25 bp, Homo sapien
gattatcgtagtcatttttaccgtg

SEQ ID NO: 93452 - DNA, 25 bp, Homo sapien
gattatcgtagtgatttttaccgtg

SEQ ID NO: 93453 - DNA, 25 bp, Homo sapien
ggtactagatgaactggtctccgtc

SEQ ID NO: 93454 - DNA, 25 bp, Homo sapien
ggtactagatgatctggtctccgtc

SEQ ID NO: 93455 - DNA, 25 bp, Homo sapien
tcgtgtttaatgtctctcctcctcg

SEQ ID NO: 93456 - DNA, 25 bp, Homo sapien
tcgtgtttaatgactctcctcctcg

SEQ ID NO: 93457 - DNA, 25 bp, Homo sapien
tcggtttttcgtctacaccccgtct

SEQ ID NO: 93458 - DNA, 25 bp, Homo sapien
tcggtttttcgtgtacaccccgtct

SEQ ID NO: 93459 - DNA, 25 bp, Homo sapien
tttgttgttagtctccgaaacctta

SEQ ID NO: 93460 - DNA, 25 bp, Homo sapien
tttgttgttagtgtccgaaacctta

SEQ ID NO: 93461 - DNA, 25 bp, Homo sapien
tttaatagaagtccaggtacttcta

SEQ ID NO: 93462 - DNA, 25 bp, Homo sapien
tttaatagaagtgcaggtacttcta

SEQ ID NO: 93463 - DNA, 25 bp, Homo sapien
cgtttagataaagttcctgtcatga

SEQ ID NO: 93464 - DNA, 25 bp, Homo sapien
cgtttagataaacttcctgtcatga

SEQ ID NO: 93465 - DNA, 25 bp, Homo sapien
tcagaacctcgtacttgtcggtgat

SEQ ID NO: 93466 - DNA, 25 bp, Homo sapien
tcagaacctcgttcttgtcggtgat

SEQ ID NO: 93467 - DNA, 25 bp, Homo sapien
ccgggaccgacaatatcttgacgac

SEQ ID NO: 93468 - DNA, 25 bp, Homo sapien
ccgggaccgacattatcttgacgac

SEQ ID NO: 93469 - DNA, 25 bp, Homo sapien
gaccaccaggtccccagaatgagga

SEQ ID NO: 93470 - DNA, 25 bp, Homo sapien
gaccaccaggtcgccagaatgagga

SEQ ID NO: 93471 - DNA, 25 bp, Homo sapien
accgacgacgacaccaatcaggtga

SEQ ID NO: 93472 - DNA, 25 bp, Homo sapien
accgacgacgactccaatcaggtga

SEQ ID NO: 93473 - DNA, 25 bp, Homo sapien
gaacgctcgacaaacgaaacaagca

SEQ ID NO: 93474 - DNA, 25 bp, Homo sapien
gaacgctcgacatacgaaacaagca

SEQ ID NO: 93475 - DNA, 25 bp, Homo sapien
gacccctttgccctacagtccgacg

SEQ ID NO: 93476 - DNA, 25 bp, Homo sapien
gacccctttgccgtacagtccgacg

SEQ ID NO: 93477 - DNA, 25 bp, Homo sapien
agacctctgtcatcgtatgaaccgg

SEQ ID NO: 93478 - DNA, 25 bp, Homo sapien
agacctctgtcaacgtatgaaccgg

SEQ ID NO: 93479 - DNA, 25 bp, Homo sapien
aaataaacgtccacatgaacgtcgg

SEQ ID NO: 93480 - DNA, 25 bp, Homo sapien
aaataaacgtcctcatgaacgtcgg

SEQ ID NO: 93481 - DNA, 25 bp, Homo sapien
tcgtttcctcacacaaaagagacgt

SEQ ID NO: 93482 - DNA, 25 bp, Homo sapien
tcgtttcctcactcaaaagagacgt

SEQ ID NO: 93483 - DNA, 25 bp, Homo sapien
tgttcttcccacagtttcccagtcg

SEQ ID NO: 93484 - DNA, 25 bp, Homo sapien
tgttcttcccactgtttcccagtcg

SEQ ID NO: 93485 - DNA, 25 bp, Homo sapien
tcactttcgacaagtcttgatgacc

SEQ ID NO: 93486 - DNA, 25 bp, Homo sapien
tcactttcgacatgtcttgatgacc

SEQ ID NO: 93487 - DNA, 25 bp, Homo sapien
gagaggttacacagaaaaatcgacc

SEQ ID NO: 93488 - DNA, 25 bp, Homo sapien
gagaggttacactgaaaaatcgacc

SEQ ID NO: 93489 - DNA, 25 bp, Homo sapien
tcgaggaaccgtctaggagcggata

SEQ ID NO: 93490 - DNA, 25 bp, Homo sapien
tcgaggaaccgtgtaggagcggata

SEQ ID NO: 93491 - DNA, 25 bp, Homo sapien
gtgtcgagcctctcggtccggagca

SEQ ID NO: 93492 - DNA, 25 bp, Homo sapien
gtgtcgagcctcacggtccggagca

SEQ ID NO: 93493 - DNA, 25 bp, Homo sapien
tgtggtctcttggtgtccagttctc

SEQ ID NO: 93494 - DNA, 25 bp, Homo sapien
tgtggtctcttgctgtccagttctc

SEQ ID NO: 93495 - DNA, 25 bp, Homo sapien
aggagaagcctgtgccagtcctacg

SEQ ID NO: 93496 - DNA, 25 bp, Homo sapien
aggagaagcctgagccagtcctacg

SEQ ID NO: 93497 - DNA, 25 bp, Homo sapien
aagattagagacagttttccctcca

SEQ ID NO: 93498 - DNA, 25 bp, Homo sapien
aagattagagactgttttccctcca

SEQ ID NO: 93499 - DNA, 25 bp, Homo sapien
gtctattatttctttctcctcggga

SEQ ID NO: 93500 - DNA, 25 bp, Homo sapien
gtctattatttcattctcctcggga

SEQ ID NO: 93501 - DNA, 25 bp, Homo sapien
tgtgttcttttgtgacctcgtgtgc

SEQ ID NO: 93502 - DNA, 25 bp, Homo sapien
tgtgttcttttgagacctcgtgtgc

SEQ ID NO: 93503 - DNA, 25 bp, Homo sapien
gttcccttctgaataccgtttcgtt

SEQ ID NO: 93504 - DNA, 25 bp, Homo sapien
gttcccttctgattaccgtttcgtt

SEQ ID NO: 93505 - DNA, 25 bp, Homo sapien
gtctccttttcgacggctcagagac

SEQ ID NO: 93506 - DNA, 25 bp, Homo sapien
gtctccttttcgtcggctcagagac

SEQ ID NO: 93507 - DNA, 25 bp, Homo sapien
ccctctatcgttggttcagtacgta

SEQ ID NO: 93508 - DNA, 25 bp, Homo sapien
ccctctatcgttcgttcagtacgta

SEQ ID NO: 93509 - DNA, 25 bp, Homo sapien
ctccccgtatttctcggtttgtgtg

SEQ ID NO: 93510 - DNA, 25 bp, Homo sapien
ctccccgtatttgtcggtttgtgtg

SEQ ID NO: 93511 - DNA, 25 bp, Homo sapien
tccccgagtttggttgtccttcagt

SEQ ID NO: 93512 - DNA, 25 bp, Homo sapien
tccccgagtttgcttgtccttcagt

SEQ ID NO: 93513 - DNA, 25 bp, Homo sapien
cagctggttctgtgaggaacgaagt

SEQ ID NO: 93514 - DNA, 25 bp, Homo sapien
cagctggttctgagaggaacgaagt

SEQ ID NO: 93515 - DNA, 25 bp, Homo sapien
agggtactcgggggagacatagtta

SEQ ID NO: 93516 - DNA, 25 bp, Homo sapien
agggtactcgggcgagacatagtta

SEQ ID NO: 93517 - DNA, 25 bp, Homo sapien
tatagaactcggtctgaatattaca

SEQ ID NO: 93518 - DNA, 25 bp, Homo sapien
tatagaactcggactgaatattaca

SEQ ID NO: 93519 - DNA, 25 bp, Homo sapien
atacctttggtttcagtacttaacg

SEQ ID NO: 93520 - DNA, 25 bp, Homo sapien
atacctttggttacagtacttaacg

SEQ ID NO: 93521 - DNA, 25 bp, Homo sapien
gagtctcgattatttccctaccttg

SEQ ID NO: 93522 - DNA, 25 bp, Homo sapien
gagtctcgattaattccctaccttg

SEQ ID NO: 93523 - DNA, 25 bp, Homo sapien
gtgtcttagcaacctccggtttcga

SEQ ID NO: 93524 - DNA, 25 bp, Homo sapien
gtgtcttagcaagctccggtttcga

SEQ ID NO: 93525 - DNA, 25 bp, Homo sapien
tgtccactgagacctcaagaactcc

SEQ ID NO: 93526 - DNA, 25 bp, Homo sapien
tgtccactgagagctcaagaactcc

SEQ ID NO: 93527 - DNA, 25 bp, Homo sapien
aactctagtaggtccacgaaatacc

SEQ ID NO: 93528 - DNA, 25 bp, Homo sapien
aactctagtaggaccacgaaatacc

SEQ ID NO: 93529 - DNA, 25 bp, Homo sapien
tgtcattgagataccgtccaaacta

SEQ ID NO: 93530 - DNA, 25 bp, Homo sapien
tgtcattgagattccgtccaaacta

SEQ ID NO: 93531 - DNA, 25 bp, Homo sapien
ggttcagtttaagaacctcctaaca

SEQ ID NO: 93532 - DNA, 25 bp, Homo sapien
ggttcagtttaacaacctcctaaca

SEQ ID NO: 93533 - DNA, 25 bp, Homo sapien
aggttagttaaaggtgaccactaca

SEQ ID NO: 93534 - DNA, 25 bp, Homo sapien
aggttagttaaacgtgaccactaca

SEQ ID NO: 93535 - DNA, 25 bp, Homo sapien
aaggttttatgtggtgaccactctg

SEQ ID NO: 93536 - DNA, 25 bp, Homo sapien
aaggttttatgtcgtgaccactctg

SEQ ID NO: 93537 - DNA, 25 bp, Homo sapien
actccttacggtttggtcacctctc

SEQ ID NO: 93538 - DNA, 25 bp, Homo sapien
actccttacggtatggtcacctctc

SEQ ID NO: 93539 - DNA, 25 bp, Homo sapien
gtttttctgtacatttggtcctcca

SEQ ID NO: 93540 - DNA, 25 bp, Homo sapien
gtttttctgtacttttggtcctcca

SEQ ID NO: 93541 - DNA, 25 bp, Homo sapien
gattttctgaataagttcttccgca

SEQ ID NO: 93542 - DNA, 25 bp, Homo sapien
gattttctgaattagttcttccgca

SEQ ID NO: 93543 - DNA, 25 bp, Homo sapien
agaacttagaaatgaacgtccaaat

SEQ ID NO: 93544 - DNA, 25 bp, Homo sapien
agaacttagaaaagaacgtccaaat

SEQ ID NO: 93545 - DNA, 25 bp, Homo sapien
agaattacgttattaaacccacata

SEQ ID NO: 93546 - DNA, 25 bp, Homo sapien
agaattacgttaataaacccacata

SEQ ID NO: 93547 - DNA, 25 bp, Homo sapien
agttttagtctaaagaactgtacct

SEQ ID NO: 93548 - DNA, 25 bp, Homo sapien
agttttagtctatagaactgtacct

SEQ ID NO: 93549 - DNA, 25 bp, Homo sapien
tctggggatcgtcgtccatactttt

SEQ ID NO: 93550 - DNA, 25 bp, Homo sapien
tctggggatcgtggtccatactttt

SEQ ID NO: 93551 - DNA, 25 bp, Homo sapien
atgggagtgtcgtttccctaggaat

SEQ ID NO: 93552 - DNA, 25 bp, Homo sapien
atgggagtgtcgattccctaggaat

SEQ ID NO: 93553 - DNA, 25 bp, Homo sapien
ctaagggtgccaatcccagtaatag

SEQ ID NO: 93554 - DNA, 25 bp, Homo sapien
ctaagggtgccattcccagtaatag

SEQ ID NO: 93555 - DNA, 25 bp, Homo sapien
cgaatcggacataccggtaagtaag

SEQ ID NO: 93556 - DNA, 25 bp, Homo sapien
cgaatcggacattccggtaagtaag

SEQ ID NO: 93557 - DNA, 25 bp, Homo sapien
aggatacttctctctgtcacataga

SEQ ID NO: 93558 - DNA, 25 bp, Homo sapien
aggatacttctcactgtcacataga

SEQ ID NO: 93559 - DNA, 25 bp, Homo sapien
agtgtcggtcgtcgacggcacaaga

SEQ ID NO: 93560 - DNA, 25 bp, Homo sapien
agtgtcggtcgtggacggcacaaga

SEQ ID NO: 93561 - DNA, 25 bp, Homo sapien
cgtagtccgtgaacccactacgagt

SEQ ID NO: 93562 - DNA, 25 bp, Homo sapien
cgtagtccgtgatcccactacgagt

SEQ ID NO: 93563 - DNA, 25 bp, Homo sapien
gtcttacgagagttctcgacttaat

SEQ ID NO: 93564 - DNA, 25 bp, Homo sapien
gtcttacgagagatctcgacttaat

SEQ ID NO: 93565 - DNA, 25 bp, Homo sapien
tcgacgtgaacgtcctcgcgtgcta

SEQ ID NO: 93566 - DNA, 25 bp, Homo sapien
tcgacgtgaacgacctcgcgtgcta

SEQ ID NO: 93567 - DNA, 25 bp, Homo sapien
ggaagactgaacgaccgttcggaac

SEQ ID NO: 93568 - DNA, 25 bp, Homo sapien
ggaagactgaaccaccgttcggaac

SEQ ID NO: 93569 - DNA, 25 bp, Homo sapien
gtgaagaaccgaattctatgttttc

SEQ ID NO: 93570 - DNA, 25 bp, Homo sapien
gtgaagaaccgatttctatgttttc

SEQ ID NO: 93571 - DNA, 25 bp, Homo sapien
tgatgacaccggtcattcttatccg

SEQ ID NO: 93572 - DNA, 25 bp, Homo sapien
tgatgacaccggacattcttatccg

SEQ ID NO: 93573 - DNA, 25 bp, Homo sapien
caatcgggttaccacttttgttcat

SEQ ID NO: 93574 - DNA, 25 bp, Homo sapien
caatcgggttacgacttttgttcat

SEQ ID NO: 93575 - DNA, 25 bp, Homo sapien
agtcacctcgacgttaggttttctg

SEQ ID NO: 93576 - DNA, 25 bp, Homo sapien
agtcacctcgaccttaggttttctg

SEQ ID NO: 93577 - DNA, 25 bp, Homo sapien
ggatgaccccggagtcgttccacac

SEQ ID NO: 93578 - DNA, 25 bp, Homo sapien
ggatgaccccggtgtcgttccacac

SEQ ID NO: 93579 - DNA, 25 bp, Homo sapien
gccgaggaggagctactgcccctac

SEQ ID NO: 93580 - DNA, 25 bp, Homo sapien
gccgaggaggaggtactgcccctac

SEQ ID NO: 93581 - DNA, 25 bp, Homo sapien
acctgtagctccaggagtgacccca

SEQ ID NO: 93582 - DNA, 25 bp, Homo sapien
acctgtagctcctggagtgacccca

SEQ ID NO: 93583 - DNA, 25 bp, Homo sapien
ctcagtatcttggtgataggtccca

SEQ ID NO: 93584 - DNA, 25 bp, Homo sapien
ctcagtatcttgctgataggtccca

SEQ ID NO: 93585 - DNA, 25 bp, Homo sapien
gggctgtgtctcacgccgactcagt

SEQ ID NO: 93586 - DNA, 25 bp, Homo sapien
gggctgtgtctctcgccgactcagt

SEQ ID NO: 93587 - DNA, 25 bp, Homo sapien
gatttaccggacttccatcacccgt

SEQ ID NO: 93588 - DNA, 25 bp, Homo sapien
gatttaccggacatccatcacccgt

SEQ ID NO: 93589 - DNA, 25 bp, Homo sapien
gtttcgggttaaacacgatgaccct

SEQ ID NO: 93590 - DNA, 25 bp, Homo sapien
gtttcgggttaatcacgatgaccct

SEQ ID NO: 93591 - DNA, 25 bp, Homo sapien
tttcgtggtctttacccgtcctaca

SEQ ID NO: 93592 - DNA, 25 bp, Homo sapien
tttcgtggtcttaacccgtcctaca

SEQ ID NO: 93593 - DNA, 25 bp, Homo sapien
gctgtgtctcttcgtctcgtgacac

SEQ ID NO: 93594 - DNA, 25 bp, Homo sapien
gctgtgtctcttggtctcgtgacac

SEQ ID NO: 93595 - DNA, 25 bp, Homo sapien
caacgcccttcttccgtacttggtg

SEQ ID NO: 93596 - DNA, 25 bp, Homo sapien
caacgcccttctaccgtacttggtg

SEQ ID NO: 93597 - DNA, 25 bp, Homo sapien
taaaggacccattcccgattcgcga

SEQ ID NO: 93598 - DNA, 25 bp, Homo sapien
taaaggacccatacccgattcgcga

SEQ ID NO: 93599 - DNA, 25 bp, Homo sapien
gagagcatgactcgtcctaatggta

SEQ ID NO: 93600 - DNA, 25 bp, Homo sapien
gagagcatgactggtcctaatggta

SEQ ID NO: 93601 - DNA, 25 bp, Homo sapien
gtcatgtacctagcatattgagtat

SEQ ID NO: 93602 - DNA, 25 bp, Homo sapien
gtcatgtacctaccatattgagtat

SEQ ID NO: 93603 - DNA, 25 bp, Homo sapien
gtattttcatttcctaaaagtagac

SEQ ID NO: 93604 - DNA, 25 bp, Homo sapien
gtattttcatttgctaaaagtagac

SEQ ID NO: 93605 - DNA, 25 bp, Homo sapien
ttgttcacacttttcatgaacgaga

SEQ ID NO: 93606 - DNA, 25 bp, Homo sapien
ttgttcacacttatcatgaacgaga

SEQ ID NO: 93607 - DNA, 25 bp, Homo sapien
ttagtaaccatgaccatcactgatg

SEQ ID NO: 93608 - DNA, 25 bp, Homo sapien
ttagtaaccatgtccatcactgatg

SEQ ID NO: 93609 - DNA, 25 bp, Homo sapien
tgtggaccaggttccttacaaggtg

SEQ ID NO: 93610 - DNA, 25 bp, Homo sapien
tgtggaccaggtaccttacaaggtg

SEQ ID NO: 93611 - DNA, 25 bp, Homo sapien
gcgtccacgtgtcaccttcctggtc

SEQ ID NO: 93612 - DNA, 25 bp, Homo sapien
gcgtccacgtgtgaccttcctggtc

SEQ ID NO: 93613 - DNA, 25 bp, Homo sapien
acccctctgacgagggtagagtcct

SEQ ID NO: 93614 - DNA, 25 bp, Homo sapien
acccctctgacgtgggtagagtcct

SEQ ID NO: 93615 - DNA, 25 bp, Homo sapien
aaatttcgagttcgagtagagtcct

SEQ ID NO: 93616 - DNA, 25 bp, Homo sapien
aaatttcgagttggagtagagtcct

SEQ ID NO: 93617 - DNA, 25 bp, Homo sapien
attgttgtactcatcagagaagtca

SEQ ID NO: 93618 - DNA, 25 bp, Homo sapien
attgttgtactcttcagagaagtca

SEQ ID NO: 93619 - DNA, 25 bp, Homo sapien
tctcgtgcaccgacgggctactcat

SEQ ID NO: 93620 - DNA, 25 bp, Homo sapien
tctcgtgcaccgtcgggctactcat

SEQ ID NO: 93621 - DNA, 25 bp, Homo sapien
tcgtcctccgacttacgggtccagg

SEQ ID NO: 93622 - DNA, 25 bp, Homo sapien
tcgtcctccgacatacgggtccagg

SEQ ID NO: 93623 - DNA, 25 bp, Homo sapien
tttccggtcgaccacgtctgctacc

SEQ ID NO: 93624 - DNA, 25 bp, Homo sapien
tttccggtcgacgacgtctgctacc

SEQ ID NO: 93625 - DNA, 25 bp, Homo sapien
tatcggacacactcgtacttcgctc

SEQ ID NO: 93626 - DNA, 25 bp, Homo sapien
tatcggacacacacgtacttcgctc

SEQ ID NO: 93627 - DNA, 25 bp, Homo sapien
cgtagaacgtaggagtacgttcctt

SEQ ID NO: 93628 - DNA, 25 bp, Homo sapien
cgtagaacgtagcagtacgttcctt

SEQ ID NO: 93629 - DNA, 25 bp, Homo sapien
gacgggtttaaggtccggtcctaag

SEQ ID NO: 93630 - DNA, 25 bp, Homo sapien
gacgggtttaagctccggtcctaag

SEQ ID NO: 93631 - DNA, 25 bp, Homo sapien
aaacggagaactgtccgagttcaag

SEQ ID NO: 93632 - DNA, 25 bp, Homo sapien
aaacggagaactctccgagttcaag

SEQ ID NO: 93633 - DNA, 25 bp, Homo sapien
gtcggacggagtctccaggtcgaat

SEQ ID NO: 93634 - DNA, 25 bp, Homo sapien
gtcggacggagtgtccaggtcgaat

SEQ ID NO: 93635 - DNA, 25 bp, Homo sapien
tcactgtcagaatccaagtgtgttt

SEQ ID NO: 93636 - DNA, 25 bp, Homo sapien
tcactgtcagaaaccaagtgtgttt

SEQ ID NO: 93637 - DNA, 25 bp, Homo sapien
ttattctcagtgcataacggtgttt

SEQ ID NO: 93638 - DNA, 25 bp, Homo sapien
ttattctcagtggataacggtgttt

SEQ ID NO: 93639 - DNA, 25 bp, Homo sapien
aaagatttacatagctaatcacatt

SEQ ID NO: 93640 - DNA, 25 bp, Homo sapien
aaagatttacattgctaatcacatt

SEQ ID NO: 93641 - DNA, 25 bp, Homo sapien
tgtctagtttcattcgagccattca

SEQ ID NO: 93642 - DNA, 25 bp, Homo sapien
tgtctagtttcaatcgagccattca

SEQ ID NO: 93643 - DNA, 25 bp, Homo sapien
tttatgggtgcgtcgtcgttacgtc

SEQ ID NO: 93644 - DNA, 25 bp, Homo sapien
tttatgggtgcgacgtcgttacgtc

SEQ ID NO: 93645 - DNA, 25 bp, Homo sapien
tctgttgtcgtgtcgccgcgtctgc

SEQ ID NO: 93646 - DNA, 25 bp, Homo sapien
tctgttgtcgtgacgccgcgtctgc

SEQ ID NO: 93647 - DNA, 25 bp, Homo sapien
tagagtctgttttcattcgtctctc

SEQ ID NO: 93648 - DNA, 25 bp, Homo sapien
tagagtctgtttacattcgtctctc

SEQ ID NO: 93649 - DNA, 25 bp, Homo sapien
tagtgtcatttacctgttcttatag

SEQ ID NO: 93650 - DNA, 25 bp, Homo sapien
tagtgtcatttagctgttcttatag

SEQ ID NO: 93651 - DNA, 25 bp, Homo sapien
ttagacgtgtttatcttcttatgac

SEQ ID NO: 93652 - DNA, 25 bp, Homo sapien
ttagacgtgtttttcttcttatgac

SEQ ID NO: 93653 - DNA, 25 bp, Homo sapien
gaaaagaatcgtttccatcaggtac

SEQ ID NO: 93654 - DNA, 25 bp, Homo sapien
gaaaagaatcgtatccatcaggtac

SEQ ID NO: 93655 - DNA, 25 bp, Homo sapien
agaacactactttatccggacggaa

SEQ ID NO: 93656 - DNA, 25 bp, Homo sapien
agaacactacttaatccggacggaa

SEQ ID NO: 93657 - DNA, 25 bp, Homo sapien
cgagaaagattttgtcctcacagaa

SEQ ID NO: 93658 - DNA, 25 bp, Homo sapien
cgagaaagatttagtcctcacagaa

SEQ ID NO: 93659 - DNA, 25 bp, Homo sapien
cactaagggcattgtagacctgaaa

SEQ ID NO: 93660 - DNA, 25 bp, Homo sapien
cactaagggcatagtagacctgaaa

SEQ ID NO: 93661 - DNA, 25 bp, Homo sapien
acagagaaacgctaaggtccggcaa

SEQ ID NO: 93662 - DNA, 25 bp, Homo sapien
acagagaaacgcaaaggtccggcaa

SEQ ID NO: 93663 - DNA, 25 bp, Homo sapien
agcaaaacgtccacgcgtccagggg

SEQ ID NO: 93664 - DNA, 25 bp, Homo sapien
agcaaaacgtcctcgcgtccagggg

SEQ ID NO: 93665 - DNA, 25 bp, Homo sapien
aacagacaaacatggccccgagacg

SEQ ID NO: 93666 - DNA, 25 bp, Homo sapien
aacagacaaacaaggccccgagacg

SEQ ID NO: 93667 - DNA, 25 bp, Homo sapien
aacatgaaacaggaggccaagacct

SEQ ID NO: 93668 - DNA, 25 bp, Homo sapien
aacatgaaacagcaggccaagacct

SEQ ID NO: 93669 - DNA, 25 bp, Homo sapien
ctgaagaaaccgacgacgaaactat

SEQ ID NO: 93670 - DNA, 25 bp, Homo sapien
ctgaagaaaccgtcgacgaaactat

SEQ ID NO: 93671 - DNA, 25 bp, Homo sapien
cttaaaaaccgagtctgtagtatta

SEQ ID NO: 93672 - DNA, 25 bp, Homo sapien
cttaaaaaccgactctgtagtatta

SEQ ID NO: 93673 - DNA, 25 bp, Homo sapien
tgagtgaaaccgactctctagttgc

SEQ ID NO: 93674 - DNA, 25 bp, Homo sapien
tgagtgaaaccgtctctctagttgc

SEQ ID NO: 93675 - DNA, 25 bp, Homo sapien
attctctgctcgaagctgacttgtg

SEQ ID NO: 93676 - DNA, 25 bp, Homo sapien
attctctgctcgtagctgacttgtg

SEQ ID NO: 93677 - DNA, 25 bp, Homo sapien
ggactgacgtgctgccctgaccagg

SEQ ID NO: 93678 - DNA, 25 bp, Homo sapien
ggactgacgtgcagccctgaccagg

SEQ ID NO: 93679 - DNA, 25 bp, Homo sapien
gtttgatgtttcacggacacttagt

SEQ ID NO: 93680 - DNA, 25 bp, Homo sapien
gtttgatgtttctcggacacttagt

SEQ ID NO: 93681 - DNA, 25 bp, Homo sapien
atggtcacgtccttccggaacgcgg

SEQ ID NO: 93682 - DNA, 25 bp, Homo sapien
atggtcacgtccatccggaacgcgg

SEQ ID NO: 93683 - DNA, 25 bp, Homo sapien
ctcgttccacgtctgcccagtgtgg

SEQ ID NO: 93684 - DNA, 25 bp, Homo sapien
ctcgttccacgtgtgcccagtgtgg

SEQ ID NO: 93685 - DNA, 25 bp, Homo sapien
tacattgtccttgttctttaggtgg

SEQ ID NO: 93686 - DNA, 25 bp, Homo sapien
tacattgtccttcttctttaggtgg

SEQ ID NO: 93687 - DNA, 25 bp, Homo sapien
aatggaaaacttgtcactactgtgg

SEQ ID NO: 93688 - DNA, 25 bp, Homo sapien
aatggaaaacttctcactactgtgg

SEQ ID NO: 93689 - DNA, 25 bp, Homo sapien
ctaaaagggtatcactagtttgtgg

SEQ ID NO: 93690 - DNA, 25 bp, Homo sapien
ctaaaagggtatgactagtttgtgg

SEQ ID NO: 93691 - DNA, 25 bp, Homo sapien
gaacaagtggctcactaggaaggac

SEQ ID NO: 93692 - DNA, 25 bp, Homo sapien
gaacaagtggctgactaggaaggac

SEQ ID NO: 93693 - DNA, 25 bp, Homo sapien
gcatcaagtaggcgaggtgcatgcg

SEQ ID NO: 93694 - DNA, 25 bp, Homo sapien
gcatcaagtaggggaggtgcatgcg

SEQ ID NO: 93695 - DNA, 25 bp, Homo sapien
ttcaggttcgacgtagagggattct

SEQ ID NO: 93696 - DNA, 25 bp, Homo sapien
ttcaggttcgacctagagggattct

SEQ ID NO: 93697 - DNA, 25 bp, Homo sapien
ctaagggttcgacagagcacaagac

SEQ ID NO: 93698 - DNA, 25 bp, Homo sapien
ctaagggttcgagagagcacaagac

SEQ ID NO: 93699 - DNA, 25 bp, Homo sapien
tgatgtggtccgagaaacaagtcac

SEQ ID NO: 93700 - DNA, 25 bp, Homo sapien
tgatgtggtccgtgaaacaagtcac

SEQ ID NO: 93701 - DNA, 25 bp, Homo sapien
cacgtttgatctcaaatacggtcac

SEQ ID NO: 93702 - DNA, 25 bp, Homo sapien
cacgtttgatctgaaatacggtcac

SEQ ID NO: 93703 - DNA, 25 bp, Homo sapien
aaagtcttggttctcgaaccgtctg

SEQ ID NO: 93704 - DNA, 25 bp, Homo sapien
aaagtcttggttgtcgaaccgtctg

SEQ ID NO: 93705 - DNA, 25 bp, Homo sapien
agtccgatagtggtacccctgcagt

SEQ ID NO: 93706 - DNA, 25 bp, Homo sapien
agtccgatagtgctacccctgcagt

SEQ ID NO: 93707 - DNA, 25 bp, Homo sapien
gaacctccgccccggactccggcag

SEQ ID NO: 93708 - DNA, 25 bp, Homo sapien
gaacctccgcccgggactccggcag

SEQ ID NO: 93709 - DNA, 25 bp, Homo sapien
acagccgtttctggtactccggcat

SEQ ID NO: 93710 - DNA, 25 bp, Homo sapien
acagccgtttctcgtactccggcat

SEQ ID NO: 93711 - DNA, 25 bp, Homo sapien
aaacacgaagtctttacaccattat

SEQ ID NO: 93712 - DNA, 25 bp, Homo sapien
aaacacgaagtcattacaccattat

SEQ ID NO: 93713 - DNA, 25 bp, Homo sapien
gggaccggagccttccgtagtatca

SEQ ID NO: 93714 - DNA, 25 bp, Homo sapien
gggaccggagccatccgtagtatca

SEQ ID NO: 93715 - DNA, 25 bp, Homo sapien
gtccggtcgctctgttctagaaact

SEQ ID NO: 93716 - DNA, 25 bp, Homo sapien
gtccggtcgctcagttctagaaact

SEQ ID NO: 93717 - DNA, 25 bp, Homo sapien
aaggagccttcctggctcgtggaac

SEQ ID NO: 93718 - DNA, 25 bp, Homo sapien
aaggagccttccaggctcgtggaac

SEQ ID NO: 93719 - DNA, 25 bp, Homo sapien
gtgtgaactttttacctctgtcaac

SEQ ID NO: 93720 - DNA, 25 bp, Homo sapien
gtgtgaacttttaacctctgtcaac

SEQ ID NO: 93721 - DNA, 25 bp, Homo sapien
cgaaacttgtgtcagaacttcctct

SEQ ID NO: 93722 - DNA, 25 bp, Homo sapien
cgaaacttgtgtgagaacttcctct

SEQ ID NO: 93723 - DNA, 25 bp, Homo sapien
tgacggaaaaacgtgtttcattttt

SEQ ID NO: 93724 - DNA, 25 bp, Homo sapien
tgacggaaaaacctgtttcattttt

SEQ ID NO: 93725 - DNA, 25 bp, Homo sapien
gtgtcaatctaactttgaccttttt

SEQ ID NO: 93726 - DNA, 25 bp, Homo sapien
gtgtcaatctaagtttgaccttttt

SEQ ID NO: 93727 - DNA, 25 bp, Homo sapien
catacaaaaggtggtgctatcaatt

SEQ ID NO: 93728 - DNA, 25 bp, Homo sapien
catacaaaaggtcgtgctatcaatt

SEQ ID NO: 93729 - DNA, 25 bp, Homo sapien
cgattagtaaaggtttccaatcata

SEQ ID NO: 93730 - DNA, 25 bp, Homo sapien
cgattagtaaagctttccaatcata

SEQ ID NO: 93731 - DNA, 25 bp, Homo sapien
gggatattacacactcccataatgt

SEQ ID NO: 93732 - DNA, 25 bp, Homo sapien
gggatattacactctcccataatgt

SEQ ID NO: 93733 - DNA, 25 bp, Homo sapien
taggtttatctggattcgccaattt

SEQ ID NO: 93734 - DNA, 25 bp, Homo sapien
taggtttatctgcattcgccaattt

SEQ ID NO: 93735 - DNA, 25 bp, Homo sapien
gttctttctgcgtgaaaccgaatat

SEQ ID NO: 93736 - DNA, 25 bp, Homo sapien
gttctttctgcgagaaaccgaatat

SEQ ID NO: 93737 - DNA, 25 bp, Homo sapien
cacctacaacacgacaacacaagtt

SEQ ID NO: 93738 - DNA, 25 bp, Homo sapien
cacctacaacaccacaacacaagtt

SEQ ID NO: 93739 - DNA, 25 bp, Homo sapien
ctgacgacgacctacgaccccagta

SEQ ID NO: 93740 - DNA, 25 bp, Homo sapien
ctgacgacgaccaacgaccccagta

SEQ ID NO: 93741 - DNA, 25 bp, Homo sapien
gcccgggaccaccttgactcggtta

SEQ ID NO: 93742 - DNA, 25 bp, Homo sapien
gcccgggaccacgttgactcggtta

SEQ ID NO: 93743 - DNA, 25 bp, Homo sapien
ctccgaccctgtggtcgtacctgat

SEQ ID NO: 93744 - DNA, 25 bp, Homo sapien
ctccgaccctgtcgtcgtacctgat

SEQ ID NO: 93745 - DNA, 25 bp, Homo sapien
ttccgaggggcctgaagaccgtagt

SEQ ID NO: 93746 - DNA, 25 bp, Homo sapien
ttccgaggggccagaagaccgtagt

SEQ ID NO: 93747 - DNA, 25 bp, Homo sapien
ttcccaggagacgtctgcagaaggt

SEQ ID NO: 93748 - DNA, 25 bp, Homo sapien
ttcccaggagacctctgcagaaggt

SEQ ID NO: 93749 - DNA, 25 bp, Homo sapien
acacaccggtggtagagcgcgagga

SEQ ID NO: 93750 - DNA, 25 bp, Homo sapien
acacaccggtggaagagcgcgagga

SEQ ID NO: 93751 - DNA, 25 bp, Homo sapien
gacagcgggtccgacctcacgtcac

SEQ ID NO: 93752 - DNA, 25 bp, Homo sapien
gacagcgggtcccacctcacgtcac

SEQ ID NO: 93753 - DNA, 25 bp, Homo sapien
tgccgaggtcggtcggcatcccgca

SEQ ID NO: 93754 - DNA, 25 bp, Homo sapien
tgccgaggtcggacggcatcccgca

SEQ ID NO: 93755 - DNA, 25 bp, Homo sapien
tatgttgggccgacaacagaggtat

SEQ ID NO: 93756 - DNA, 25 bp, Homo sapien
tatgttgggccgtcaacagaggtat

SEQ ID NO: 93757 - DNA, 25 bp, Homo sapien
tcgaaaccgttgtcgacaagagaca

SEQ ID NO: 93758 - DNA, 25 bp, Homo sapien
tcgaaaccgttgacgacaagagaca

SEQ ID NO: 93759 - DNA, 25 bp, Homo sapien
attcacgagtctctgaaagcgacgc

SEQ ID NO: 93760 - DNA, 25 bp, Homo sapien
attcacgagtctgtgaaagcgacgc

SEQ ID NO: 93761 - DNA, 25 bp, Homo sapien
ttcaagtactacttctcaaatagtc

SEQ ID NO: 93762 - DNA, 25 bp, Homo sapien
ttcaagtactacatctcaaatagtc

SEQ ID NO: 93763 - DNA, 25 bp, Homo sapien
tttatgcacgttcaacagcataggt

SEQ ID NO: 93764 - DNA, 25 bp, Homo sapien
tttatgcacgttgaacagcataggt

SEQ ID NO: 93765 - DNA, 25 bp, Homo sapien
tcttctcatgattccctgagaaggt

SEQ ID NO: 93766 - DNA, 25 bp, Homo sapien
tcttctcatgataccctgagaaggt

SEQ ID NO: 93767 - DNA, 25 bp, Homo sapien
gtcggttttgggaaatgacctcggt

SEQ ID NO: 93768 - DNA, 25 bp, Homo sapien
gtcggttttgggtaatgacctcggt

SEQ ID NO: 93769 - DNA, 25 bp, Homo sapien
taggtaccagctaccgacgacccgg

SEQ ID NO: 93770 - DNA, 25 bp, Homo sapien
taggtaccagcttccgacgacccgg

SEQ ID NO: 93771 - DNA, 25 bp, Homo sapien
aaggtctacccgtcacataccctgt

SEQ ID NO: 93772 - DNA, 25 bp, Homo sapien
aaggtctacccgacacataccctgt

SEQ ID NO: 93773 - DNA, 25 bp, Homo sapien
gtgccaccggcgtcacgtcgtctgt

SEQ ID NO: 93774 - DNA, 25 bp, Homo sapien
gtgccaccggcgacacgtcgtctgt

SEQ ID NO: 93775 - DNA, 25 bp, Homo sapien
tgtctcaagagtttcagtcgtcggt

SEQ ID NO: 93776 - DNA, 25 bp, Homo sapien
tgtctcaagagtatcagtcgtcggt

SEQ ID NO: 93777 - DNA, 25 bp, Homo sapien
gaagaaggtcaaaaggttcctcggg

SEQ ID NO: 93778 - DNA, 25 bp, Homo sapien
gaagaaggtcaataggttcctcggg

SEQ ID NO: 93779 - DNA, 25 bp, Homo sapien
gacacaacagtaggcgactcggtac

SEQ ID NO: 93780 - DNA, 25 bp, Homo sapien
gacacaacagtacgcgactcggtac

SEQ ID NO: 93781 - DNA, 25 bp, Homo sapien
aattgtacgtcgttttgttcccgtc

SEQ ID NO: 93782 - DNA, 25 bp, Homo sapien
aattgtacgtcgatttgttcccgtc

SEQ ID NO: 93783 - DNA, 25 bp, Homo sapien
ttaagatctcagtcggtgttggttc

SEQ ID NO: 93784 - DNA, 25 bp, Homo sapien
ttaagatctcagacggtgttggttc

SEQ ID NO: 93785 - DNA, 25 bp, Homo sapien
cgaagtagtcaaaataaccagtata

SEQ ID NO: 93786 - DNA, 25 bp, Homo sapien
cgaagtagtcaatataaccagtata

SEQ ID NO: 93787 - DNA, 25 bp, Homo sapien
tatgtaatgaaattaatactcttaa

SEQ ID NO: 93788 - DNA, 25 bp, Homo sapien
tatgtaatgaaaataatactcttaa

SEQ ID NO: 93789 - DNA, 25 bp, Homo sapien
ttttaaggtgaaagtatcccaaacg

SEQ ID NO: 93790 - DNA, 25 bp, Homo sapien
ttttaaggtgaatgtatcccaaacg

SEQ ID NO: 93791 - DNA, 25 bp, Homo sapien
tgacatcggtagagttttcataaac

SEQ ID NO: 93792 - DNA, 25 bp, Homo sapien
tgacatcggtagtgttttcataaac

SEQ ID NO: 93793 - DNA, 25 bp, Homo sapien
atcaaccgttcctttagtcaaatcg

SEQ ID NO: 93794 - DNA, 25 bp, Homo sapien
atcaaccgttccattagtcaaatcg

SEQ ID NO: 93795 - DNA, 25 bp, Homo sapien
cgacagaaactagtctagtagatct

SEQ ID NO: 93796 - DNA, 25 bp, Homo sapien
cgacagaaactactctagtagatct

SEQ ID NO: 93797 - DNA, 25 bp, Homo sapien
aataaaccgtcgatttatgtttgac

SEQ ID NO: 93798 - DNA, 25 bp, Homo sapien
aataaaccgtcgttttatgtttgac

SEQ ID NO: 93799 - DNA, 25 bp, Homo sapien
aaagtagcttcatgacatcggtgac

SEQ ID NO: 93800 - DNA, 25 bp, Homo sapien
aaagtagcttcaagacatcggtgac

SEQ ID NO: 93801 - DNA, 25 bp, Homo sapien
gaacagactctcaccgaaagccatc

SEQ ID NO: 93802 - DNA, 25 bp, Homo sapien
gaacagactctctccgaaagccatc

SEQ ID NO: 93803 - DNA, 25 bp, Homo sapien
tttagactcccaacagacctcctga

SEQ ID NO: 93804 - DNA, 25 bp, Homo sapien
tttagactcccatcagacctcctga

SEQ ID NO: 93805 - DNA, 25 bp, Homo sapien
cttcgactccagttggaaccgccga

SEQ ID NO: 93806 - DNA, 25 bp, Homo sapien
cttcgactccagatggaaccgccga

SEQ ID NO: 93807 - DNA, 25 bp, Homo sapien
acctgaccccgaatagggttcccta

SEQ ID NO: 93808 - DNA, 25 bp, Homo sapien
acctgaccccgattagggttcccta

SEQ ID NO: 93809 - DNA, 25 bp, Homo sapien
aagagaccaccactacgggcccatg

SEQ ID NO: 93810 - DNA, 25 bp, Homo sapien
aagagaccaccagtacgggcccatg

SEQ ID NO: 93811 - DNA, 25 bp, Homo sapien
tcagaaagaccctcggggaccactg

SEQ ID NO: 93812 - DNA, 25 bp, Homo sapien
tcagaaagacccacggggaccactg

SEQ ID NO: 93813 - DNA, 25 bp, Homo sapien
tccttgggaccgtggaccgagcata

SEQ ID NO: 93814 - DNA, 25 bp, Homo sapien
tccttgggaccgaggaccgagcata

SEQ ID NO: 93815 - DNA, 25 bp, Homo sapien
tactcgaaacccatgaacttggagt

SEQ ID NO: 93816 - DNA, 25 bp, Homo sapien
tactcgaaacccttgaacttggagt

SEQ ID NO: 93817 - DNA, 25 bp, Homo sapien
tccgaaagatctacacagtccaacg

SEQ ID NO: 93818 - DNA, 25 bp, Homo sapien
tccgaaagatcttcacagtccaacg

SEQ ID NO: 93819 - DNA, 25 bp, Homo sapien
tccaaaggttcgagggtcgacgaag

SEQ ID NO: 93820 - DNA, 25 bp, Homo sapien
tccaaaggttcgtgggtcgacgaag

SEQ ID NO: 93821 - DNA, 25 bp, Homo sapien
cccgaggattgatcgacttagaagg

SEQ ID NO: 93822 - DNA, 25 bp, Homo sapien
cccgaggattgaacgacttagaagg

SEQ ID NO: 93823 - DNA, 25 bp, Homo sapien
ctaacagggtaaacctaatgtcaaa

SEQ ID NO: 93824 - DNA, 25 bp, Homo sapien
ctaacagggtaatcctaatgtcaaa

SEQ ID NO: 93825 - DNA, 25 bp, Homo sapien
aaaacggcagtacagtttgacataa

SEQ ID NO: 93826 - DNA, 25 bp, Homo sapien
aaaacggcagtagagtttgacataa

SEQ ID NO: 93827 - DNA, 25 bp, Homo sapien
cataggttacccattaatcatacat

SEQ ID NO: 93828 - DNA, 25 bp, Homo sapien
cataggttaccctttaatcatacat

SEQ ID NO: 93829 - DNA, 25 bp, Homo sapien
gtcaatgaggcatggaatgactcta

SEQ ID NO: 93830 - DNA, 25 bp, Homo sapien
gtcaatgaggcaaggaatgactcta

SEQ ID NO: 93831 - DNA, 25 bp, Homo sapien
tcatattgtgacctcggattttggt

SEQ ID NO: 93832 - DNA, 25 bp, Homo sapien
tcatattgtgacgtcggattttggt

SEQ ID NO: 93833 - DNA, 25 bp, Homo sapien
tagaccctcttgtcaattattcgtg

SEQ ID NO: 93834 - DNA, 25 bp, Homo sapien
tagaccctcttgacaattattcgtg

SEQ ID NO: 93835 - DNA, 25 bp, Homo sapien
tgtcccttccggaatctaactccgg

SEQ ID NO: 93836 - DNA, 25 bp, Homo sapien
tgtcccttccggtatctaactccgg

SEQ ID NO: 93837 - DNA, 25 bp, Homo sapien
gtacccttatcgtttaaaccccggt

SEQ ID NO: 93838 - DNA, 25 bp, Homo sapien
gtacccttatcgattaaaccccggt

SEQ ID NO: 93839 - DNA, 25 bp, Homo sapien
cgtcgtcattgataagtcgacccat

SEQ ID NO: 93840 - DNA, 25 bp, Homo sapien
cgtcgtcattgaaaagtcgacccat

SEQ ID NO: 93841 - DNA, 25 bp, Homo sapien
tcgcacttacacgtatttacataca

SEQ ID NO: 93842 - DNA, 25 bp, Homo sapien
tcgcacttacacctatttacataca

SEQ ID NO: 93843 - DNA, 25 bp, Homo sapien
ggacgtccacttctggccggagtca

SEQ ID NO: 93844 - DNA, 25 bp, Homo sapien
ggacgtccacttgtggccggagtca

SEQ ID NO: 93845 - DNA, 25 bp, Homo sapien
agtccttgacatgtgcgtaaaattt

SEQ ID NO: 93846 - DNA, 25 bp, Homo sapien
agtccttgacatctgcgtaaaattt

SEQ ID NO: 93847 - DNA, 25 bp, Homo sapien
gtggtaagagtggtcttacaaaaaa

SEQ ID NO: 93848 - DNA, 25 bp, Homo sapien
gtggtaagagtgctcttacaaaaaa

SEQ ID NO: 93849 - DNA, 25 bp, Homo sapien
gaggaattcttcatacagagtcgaa

SEQ ID NO: 93850 - DNA, 25 bp, Homo sapien
gaggaattcttcttacagagtcgaa

SEQ ID NO: 93851 - DNA, 25 bp, Homo sapien
ttcgtgaattcttcaaaggtcgtga

SEQ ID NO: 93852 - DNA, 25 bp, Homo sapien
ttcgtgaattctacaaaggtcgtga

SEQ ID NO: 93853 - DNA, 25 bp, Homo sapien
aggtgcccgagctactcgacggtcc

SEQ ID NO: 93854 - DNA, 25 bp, Homo sapien
aggtgcccgagcaactcgacggtcc

SEQ ID NO: 93855 - DNA, 25 bp, Homo sapien
gagtcgtctcttctctcacaggtcc

SEQ ID NO: 93856 - DNA, 25 bp, Homo sapien
gagtcgtctcttgtctcacaggtcc

SEQ ID NO: 93857 - DNA, 25 bp, Homo sapien
tgacttctcggacaagtcgtcacgt

SEQ ID NO: 93858 - DNA, 25 bp, Homo sapien
tgacttctcggagaagtcgtcacgt

SEQ ID NO: 93859 - DNA, 25 bp, Homo sapien
agactctattgacgacgtagtgtca

SEQ ID NO: 93860 - DNA, 25 bp, Homo sapien
agactctattgaggacgtagtgtca

SEQ ID NO: 93861 - DNA, 25 bp, Homo sapien
ttaactagcgtttcacagaagttaa

SEQ ID NO: 93862 - DNA, 25 bp, Homo sapien
ttaactagcgttacacagaagttaa

SEQ ID NO: 93863 - DNA, 25 bp, Homo sapien
ctgtaaacaaacacaccatacttaa

SEQ ID NO: 93864 - DNA, 25 bp, Homo sapien
ctgtaaacaaactcaccatacttaa

SEQ ID NO: 93865 - DNA, 25 bp, Homo sapien
gaaacaacagtataccgtgttataa

SEQ ID NO: 93866 - DNA, 25 bp, Homo sapien
gaaacaacagtaaaccgtgttataa

SEQ ID NO: 93867 - DNA, 25 bp, Homo sapien
acaagaaatgacaccgttgttttct

SEQ ID NO: 93868 - DNA, 25 bp, Homo sapien
acaagaaatgactccgttgttttct

SEQ ID NO: 93869 - DNA, 25 bp, Homo sapien
ccgaactcaagaagacctttcaagc

SEQ ID NO: 93870 - DNA, 25 bp, Homo sapien
ccgaactcaagatgacctttcaagc

SEQ ID NO: 93871 - DNA, 25 bp, Homo sapien
tatagttctcagagttcttggaaac

SEQ ID NO: 93872 - DNA, 25 bp, Homo sapien
tatagttctcagtgttcttggaaac

SEQ ID NO: 93873 - DNA, 25 bp, Homo sapien
ctggtactcttgaggtcttgggtaa

SEQ ID NO: 93874 - DNA, 25 bp, Homo sapien
ctggtactcttgtggtcttgggtaa

SEQ ID NO: 93875 - DNA, 25 bp, Homo sapien
ccgtcccgactcgtgtcgtgggaac

SEQ ID NO: 93876 - DNA, 25 bp, Homo sapien
ccgtcccgactcctgtcgtgggaac

SEQ ID NO: 93877 - DNA, 25 bp, Homo sapien
ttgttgcaccgaaaaccgatgaaat

SEQ ID NO: 93878 - DNA, 25 bp, Homo sapien
ttgttgcaccgataaccgatgaaat

SEQ ID NO: 93879 - DNA, 25 bp, Homo sapien
ctacggttttggacacaacctcaaa

SEQ ID NO: 93880 - DNA, 25 bp, Homo sapien
ctacggttttggtcacaacctcaaa

SEQ ID NO: 93881 - DNA, 25 bp, Homo sapien
gttcctgggaaaacggtcgagaact

SEQ ID NO: 93882 - DNA, 25 bp, Homo sapien
gttcctgggaaatcggtcgagaact

SEQ ID NO: 93883 - DNA, 25 bp, Homo sapien
gtaccctttagtgtcaacgtcatct

SEQ ID NO: 93884 - DNA, 25 bp, Homo sapien
gtaccctttagtctcaacgtcatct

SEQ ID NO: 93885 - DNA, 25 bp, Homo sapien
agacccagttctacacgaactcata

SEQ ID NO: 93886 - DNA, 25 bp, Homo sapien
agacccagttcttcacgaactcata

SEQ ID NO: 93887 - DNA, 25 bp, Homo sapien
cgtaacacgcttcttcccgaacgaa

SEQ ID NO: 93888 - DNA, 25 bp, Homo sapien
cgtaacacgcttgttcccgaacgaa

SEQ ID NO: 93889 - DNA, 25 bp, Homo sapien
agagtcactctttaccctgggacgg

SEQ ID NO: 93890 - DNA, 25 bp, Homo sapien
agagtcactcttaaccctgggacgg

SEQ ID NO: 93891 - DNA, 25 bp, Homo sapien
acccgactcaaactattcgacggag

SEQ ID NO: 93892 - DNA, 25 bp, Homo sapien
acccgactcaaagtattcgacggag

SEQ ID NO: 93893 - DNA, 25 bp, Homo sapien
atgttagacgggacaggaaaacctc

SEQ ID NO: 93894 - DNA, 25 bp, Homo sapien
atgttagacgggtcaggaaaacctc

SEQ ID NO: 93895 - DNA, 25 bp, Homo sapien
ggctgctacttcgtacaaatcgacc

SEQ ID NO: 93896 - DNA, 25 bp, Homo sapien
ggctgctacttcctacaaatcgacc

SEQ ID NO: 93897 - DNA, 25 bp, Homo sapien
agatatagaagtccgcgcgccagac

SEQ ID NO: 93898 - DNA, 25 bp, Homo sapien
agatatagaagtgcgcgcgccagac

SEQ ID NO: 93899 - DNA, 25 bp, Homo sapien
gtaaaagtaccaaaacatctcgaag

SEQ ID NO: 93900 - DNA, 25 bp, Homo sapien
gtaaaagtaccataacatctcgaag

SEQ ID NO: 93901 - DNA, 25 bp, Homo sapien
cctagaggttccatgtcctactcaa

SEQ ID NO: 93902 - DNA, 25 bp, Homo sapien
cctagaggttccttgtcctactcaa

SEQ ID NO: 93903 - DNA, 25 bp, Homo sapien
aaagtagttaccagagacacttcaa

SEQ ID NO: 93904 - DNA, 25 bp, Homo sapien
aaagtagttacctgagacacttcaa

SEQ ID NO: 93905 - DNA, 25 bp, Homo sapien
tccggtgtcggtatcggtccacacg

SEQ ID NO: 93906 - DNA, 25 bp, Homo sapien
tccggtgtcggtttcggtccacacg

SEQ ID NO: 93907 - DNA, 25 bp, Homo sapien
gtggtctggggctagacgtctctcc

SEQ ID NO: 93908 - DNA, 25 bp, Homo sapien
gtggtctggggcaagacgtctctcc

SEQ ID NO: 93909 - DNA, 25 bp, Homo sapien
aggatgggaagaggtactcactatc

SEQ ID NO: 93910 - DNA, 25 bp, Homo sapien
aggatgggaagacgtactcactatc

SEQ ID NO: 93911 - DNA, 25 bp, Homo sapien
tagtagatgcggacagacttccacc

SEQ ID NO: 93912 - DNA, 25 bp, Homo sapien
tagtagatgcggtcagacttccacc

SEQ ID NO: 93913 - DNA, 25 bp, Homo sapien
agggaggaccggacacacctgagac

SEQ ID NO: 93914 - DNA, 25 bp, Homo sapien
agggaggaccggtcacacctgagac

SEQ ID NO: 93915 - DNA, 25 bp, Homo sapien
atgggggtgctttacctcccgacac

SEQ ID NO: 93916 - DNA, 25 bp, Homo sapien
atgggggtgcttaacctcccgacac

SEQ ID NO: 93917 - DNA, 25 bp, Homo sapien
gggacagtaaatagttccaccgact

SEQ ID NO: 93918 - DNA, 25 bp, Homo sapien
gggacagtaaattgttccaccgact

SEQ ID NO: 93919 - DNA, 25 bp, Homo sapien
gtggggtaacggtttccagactact

SEQ ID NO: 93920 - DNA, 25 bp, Homo sapien
gtggggtaacggattccagactact

SEQ ID NO: 93921 - DNA, 25 bp, Homo sapien
tgtgtgggacggacccgacactcgt

SEQ ID NO: 93922 - DNA, 25 bp, Homo sapien
tgtgtgggacggtcccgacactcgt

SEQ ID NO: 93923 - DNA, 25 bp, Homo sapien
ttttgactcgggtctcccgtgaaag

SEQ ID NO: 93924 - DNA, 25 bp, Homo sapien
ttttgactcgggactcccgtgaaag

SEQ ID NO: 93925 - DNA, 25 bp, Homo sapien
gactgtgtcctttactacccttggg

SEQ ID NO: 93926 - DNA, 25 bp, Homo sapien
gactgtgtccttaactacccttggg

SEQ ID NO: 93927 - DNA, 25 bp, Homo sapien
gaagagtcctaagacaccgagggag

SEQ ID NO: 93928 - DNA, 25 bp, Homo sapien
gaagagtcctaacacaccgagggag

SEQ ID NO: 93929 - DNA, 25 bp, Homo sapien
aatgactcggtagacaggtcctagg

SEQ ID NO: 93930 - DNA, 25 bp, Homo sapien
aatgactcggtacacaggtcctagg

SEQ ID NO: 93931 - DNA, 25 bp, Homo sapien
cgacgagtccgtaaccccaaacagg

SEQ ID NO: 93932 - DNA, 25 bp, Homo sapien
cgacgagtccgttaccccaaacagg

SEQ ID NO: 93933 - DNA, 25 bp, Homo sapien
aagatggaggacacacgaacagaag

SEQ ID NO: 93934 - DNA, 25 bp, Homo sapien
aagatggaggactcacgaacagaag

SEQ ID NO: 93935 - DNA, 25 bp, Homo sapien
gttcttgtctgtgacaccggagtag

SEQ ID NO: 93936 - DNA, 25 bp, Homo sapien
gttcttgtctgtcacaccggagtag

SEQ ID NO: 93937 - DNA, 25 bp, Homo sapien
tttactttcggtgataatgtactac

SEQ ID NO: 93938 - DNA, 25 bp, Homo sapien
tttactttcggtcataatgtactac

SEQ ID NO: 93939 - DNA, 25 bp, Homo sapien
ttaaggtatgtaaaatacattactc

SEQ ID NO: 93940 - DNA, 25 bp, Homo sapien
ttaaggtatgtataatacattactc

SEQ ID NO: 93941 - DNA, 25 bp, Homo sapien
taataggtcttaaaagtcacgattc

SEQ ID NO: 93942 - DNA, 25 bp, Homo sapien
taataggtcttataagtcacgattc

SEQ ID NO: 93943 - DNA, 25 bp, Homo sapien
actctgtatttttgtgtacacaaag

SEQ ID NO: 93944 - DNA, 25 bp, Homo sapien
actctgtattttagtgtacacaaag

SEQ ID NO: 93945 - DNA, 25 bp, Homo sapien
tgtccttttgttcaggttctcgtca

SEQ ID NO: 93946 - DNA, 25 bp, Homo sapien
tgtccttttgttgaggttctcgtca

SEQ ID NO: 93947 - DNA, 25 bp, Homo sapien
aaagttttgtaaggaacactacttc

SEQ ID NO: 93948 - DNA, 25 bp, Homo sapien
aaagttttgtaacgaacactacttc

SEQ ID NO: 93949 - DNA, 25 bp, Homo sapien
ttattagtaacgtcgtgagtgtctc

SEQ ID NO: 93950 - DNA, 25 bp, Homo sapien
ttattagtaacgacgtgagtgtctc

SEQ ID NO: 93951 - DNA, 25 bp, Homo sapien
ttctttagtctgtctgtacgtggac

SEQ ID NO: 93952 - DNA, 25 bp, Homo sapien
ttctttagtctgactgtacgtggac

SEQ ID NO: 93953 - DNA, 25 bp, Homo sapien
tttctctgttcttgtccatgtgaag

SEQ ID NO: 93954 - DNA, 25 bp, Homo sapien
tttctctgttctagtccatgtgaag

SEQ ID NO: 93955 - DNA, 25 bp, Homo sapien
attctgaccgtcataattagtcgga

SEQ ID NO: 93956 - DNA, 25 bp, Homo sapien
attctgaccgtcttaattagtcgga

SEQ ID NO: 93957 - DNA, 25 bp, Homo sapien
tgccttaatgtctctttctcggttg

SEQ ID NO: 93958 - DNA, 25 bp, Homo sapien
tgccttaatgtcactttctcggttg

SEQ ID NO: 93959 - DNA, 25 bp, Homo sapien
ccttaagtaaagtcatcgttgttgt

SEQ ID NO: 93960 - DNA, 25 bp, Homo sapien
ccttaagtaaagacatcgttgttgt

SEQ ID NO: 93961 - DNA, 25 bp, Homo sapien
ccttacgacggactttaattgtata

SEQ ID NO: 93962 - DNA, 25 bp, Homo sapien
ccttacgacggagtttaattgtata

SEQ ID NO: 93963 - DNA, 25 bp, Homo sapien
acgccgaccgagatcttctatgaaa

SEQ ID NO: 93964 - DNA, 25 bp, Homo sapien
acgccgaccgagttcttctatgaaa

SEQ ID NO: 93965 - DNA, 25 bp, Homo sapien
accgacttcaggtctcacaggaaag

SEQ ID NO: 93966 - DNA, 25 bp, Homo sapien
accgacttcaggactcacaggaaag

SEQ ID NO: 93967 - DNA, 25 bp, Homo sapien
taatacttcgggacccatacgagga

SEQ ID NO: 93968 - DNA, 25 bp, Homo sapien
taatacttcgggtcccatacgagga

SEQ ID NO: 93969 - DNA, 25 bp, Homo sapien
tacgtctcccggaacacccggagga

SEQ ID NO: 93970 - DNA, 25 bp, Homo sapien
tacgtctcccggtacacccggagga

SEQ ID NO: 93971 - DNA, 25 bp, Homo sapien
ggtctcgtcctcgtcacccgttgga

SEQ ID NO: 93972 - DNA, 25 bp, Homo sapien
ggtctcgtcctcctcacccgttgga

SEQ ID NO: 93973 - DNA, 25 bp, Homo sapien
gtactccttcggttaccggtgccgg

SEQ ID NO: 93974 - DNA, 25 bp, Homo sapien
gtactccttcggataccggtgccgg

SEQ ID NO: 93975 - DNA, 25 bp, Homo sapien
aactgtcctcggtatttcgtacaac

SEQ ID NO: 93976 - DNA, 25 bp, Homo sapien
aactgtcctcggaatttcgtacaac

SEQ ID NO: 93977 - DNA, 25 bp, Homo sapien
agtacagaccacttttcaggtggac

SEQ ID NO: 93978 - DNA, 25 bp, Homo sapien
agtacagaccacatttcaggtggac

SEQ ID NO: 93979 - DNA, 25 bp, Homo sapien
aaacgaaaccacattttgtcggatc

SEQ ID NO: 93980 - DNA, 25 bp, Homo sapien
aaacgaaaccactttttgtcggatc

SEQ ID NO: 93981 - DNA, 25 bp, Homo sapien
ttcgaaaccggtctcggttcccacg

SEQ ID NO: 93982 - DNA, 25 bp, Homo sapien
ttcgaaaccggtgtcggttcccacg

SEQ ID NO: 93983 - DNA, 25 bp, Homo sapien
tcacaaccggtccttgcccgtagta

SEQ ID NO: 93984 - DNA, 25 bp, Homo sapien
tcacaaccggtcgttgcccgtagta

SEQ ID NO: 93985 - DNA, 25 bp, Homo sapien
acggaaacgtctttctctacggtct

SEQ ID NO: 93986 - DNA, 25 bp, Homo sapien
acggaaacgtctatctctacggtct

SEQ ID NO: 93987 - DNA, 25 bp, Homo sapien
agagagagagtcagcactcaggacg

SEQ ID NO: 93988 - DNA, 25 bp, Homo sapien
agagagagagtctgcactcaggacg

SEQ ID NO: 93989 - DNA, 25 bp, Homo sapien
atactagtgaaagaacgtccggagt

SEQ ID NO: 93990 - DNA, 25 bp, Homo sapien
atactagtgaaacaacgtccggagt

SEQ ID NO: 93991 - DNA, 25 bp, Homo sapien
acgggaagtactccgacgacaagag

SEQ ID NO: 93992 - DNA, 25 bp, Homo sapien
acgggaagtactgcgacgacaagag

SEQ ID NO: 93993 - DNA, 25 bp, Homo sapien
caccgatcttcttcgcgaagtaggg

SEQ ID NO: 93994 - DNA, 25 bp, Homo sapien
caccgatcttctacgcgaagtaggg

SEQ ID NO: 93995 - DNA, 25 bp, Homo sapien
aacacatactgtaccgtgattaagg

SEQ ID NO: 93996 - DNA, 25 bp, Homo sapien
aacacatactgttccgtgattaagg

SEQ ID NO: 93997 - DNA, 25 bp, Homo sapien
cagacactacattccttactaaggg

SEQ ID NO: 93998 - DNA, 25 bp, Homo sapien
cagacactacataccttactaaggg

SEQ ID NO: 93999 - DNA, 25 bp, Homo sapien
ggcgtcagtgacgtgtacttcgtga

SEQ ID NO: 94000 - DNA, 25 bp, Homo sapien
ggcgtcagtgacctgtacttcgtga

SEQ ID NO: 94001 - DNA, 25 bp, Homo sapien
cggtcctctaggacggctctaccga

SEQ ID NO: 94002 - DNA, 25 bp, Homo sapien
cggtcctctaggtcggctctaccga

SEQ ID NO: 94003 - DNA, 25 bp, Homo sapien
ctatcaagacgtaatctggtccaga

SEQ ID NO: 94004 - DNA, 25 bp, Homo sapien
ctatcaagacgttatctggtccaga

SEQ ID NO: 94005 - DNA, 25 bp, Homo sapien
tcaacagtacgtgtgtgacttaaga

SEQ ID NO: 94006 - DNA, 25 bp, Homo sapien
tcaacagtacgtctgtgacttaaga

SEQ ID NO: 94007 - DNA, 25 bp, Homo sapien
ctaccagagagttctgtagaattga

SEQ ID NO: 94008 - DNA, 25 bp, Homo sapien
ctaccagagagtactgtagaattga

SEQ ID NO: 94009 - DNA, 25 bp, Homo sapien
tacctcgaggaacgtgatacgaata

SEQ ID NO: 94010 - DNA, 25 bp, Homo sapien
tacctcgaggaaggtgatacgaata

SEQ ID NO: 94011 - DNA, 25 bp, Homo sapien
tacgtcagtgatatcagtcataacg

SEQ ID NO: 94012 - DNA, 25 bp, Homo sapien
tacgtcagtgatttcagtcataacg

SEQ ID NO: 94013 - DNA, 25 bp, Homo sapien
tactcgaggaatcgtatccagtagt

SEQ ID NO: 94014 - DNA, 25 bp, Homo sapien
tactcgaggaatggtatccagtagt

SEQ ID NO: 94015 - DNA, 25 bp, Homo sapien
tattcggacctaaaaagactcacgt

SEQ ID NO: 94016 - DNA, 25 bp, Homo sapien
tattcggacctataaagactcacgt

SEQ ID NO: 94017 - DNA, 25 bp, Homo sapien
catttgaacctaagaaacgacaagt

SEQ ID NO: 94018 - DNA, 25 bp, Homo sapien
catttgaacctatgaaacgacaagt

SEQ ID NO: 94019 - DNA, 25 bp, Homo sapien
gtacgacgaccgtaaaacgacacag

SEQ ID NO: 94020 - DNA, 25 bp, Homo sapien
gtacgacgaccgaaaaacgacacag

SEQ ID NO: 94021 - DNA, 25 bp, Homo sapien
aagtcatgtaagagatacgccgtag

SEQ ID NO: 94022 - DNA, 25 bp, Homo sapien
aagtcatgtaagtgatacgccgtag

SEQ ID NO: 94023 - DNA, 25 bp, Homo sapien
ataggatatatgtagatacacacac

SEQ ID NO: 94024 - DNA, 25 bp, Homo sapien
ataggatatatgaagatacacacac

SEQ ID NO: 94025 - DNA, 25 bp, Homo sapien
cgtcaagggtagtcggggtataaac

SEQ ID NO: 94026 - DNA, 25 bp, Homo sapien
cgtcaagggtagacggggtataaac

SEQ ID NO: 94027 - DNA, 25 bp, Homo sapien
ttcatcgcagtgagggcgccgttcg

SEQ ID NO: 94028 - DNA, 25 bp, Homo sapien
ttcatcgcagtgtgggcgccgttcg

SEQ ID NO: 94029 - DNA, 25 bp, Homo sapien
tcttcgttctcgtcggggtacaccc

SEQ ID NO: 94030 - DNA, 25 bp, Homo sapien
tcttcgttctcgacggggtacaccc

SEQ ID NO: 94031 - DNA, 25 bp, Homo sapien
gattcttcgtctaaggggagtccac

SEQ ID NO: 94032 - DNA, 25 bp, Homo sapien
gattcttcgtcttaggggagtccac

SEQ ID NO: 94033 - DNA, 25 bp, Homo sapien
tcactgtacgataaggatggtcttt

SEQ ID NO: 94034 - DNA, 25 bp, Homo sapien
tcactgtacgattaggatggtcttt

SEQ ID NO: 94035 - DNA, 25 bp, Homo sapien
atacgtcaagagttacgtcaatgta

SEQ ID NO: 94036 - DNA, 25 bp, Homo sapien
atacgtcaagagatacgtcaatgta

SEQ ID NO: 94037 - DNA, 25 bp, Homo sapien
aacaaggaagacgtacacacggtag

SEQ ID NO: 94038 - DNA, 25 bp, Homo sapien
aacaaggaagacctacacacggtag

SEQ ID NO: 94039 - DNA, 25 bp, Homo sapien
cctggtaagaactgtctcgacttat

SEQ ID NO: 94040 - DNA, 25 bp, Homo sapien
cctggtaagaacagtctcgacttat

SEQ ID NO: 94041 - DNA, 25 bp, Homo sapien
acatgggtcaccagggtctctctcc

SEQ ID NO: 94042 - DNA, 25 bp, Homo sapien
acatgggtcacctgggtctctctcc

SEQ ID NO: 94043 - DNA, 25 bp, Homo sapien
ttctagaaacccttggagacctacc

SEQ ID NO: 94044 - DNA, 25 bp, Homo sapien
ttctagaaacccatggagacctacc

SEQ ID NO: 94045 - DNA, 25 bp, Homo sapien
ctgcacaagtccacgagctactaca

SEQ ID NO: 94046 - DNA, 25 bp, Homo sapien
ctgcacaagtcctcgagctactaca

SEQ ID NO: 94047 - DNA, 25 bp, Homo sapien
cttacgagggtacctaggaccttga

SEQ ID NO: 94048 - DNA, 25 bp, Homo sapien
cttacgagggtagctaggaccttga

SEQ ID NO: 94049 - DNA, 25 bp, Homo sapien
acaacataagaggttctacgtgtac

SEQ ID NO: 94050 - DNA, 25 bp, Homo sapien
acaacataagagcttctacgtgtac

SEQ ID NO: 94051 - DNA, 25 bp, Homo sapien
cctataaatcaacagtccgtagtat

SEQ ID NO: 94052 - DNA, 25 bp, Homo sapien
cctataaatcaagagtccgtagtat

SEQ ID NO: 94053 - DNA, 25 bp, Homo sapien
cattagtattatggtgtcactgtgt

SEQ ID NO: 94054 - DNA, 25 bp, Homo sapien
cattagtattatcgtgtcactgtgt

SEQ ID NO: 94055 - DNA, 25 bp, Homo sapien
caatggtagttttgtgactactaac

SEQ ID NO: 94056 - DNA, 25 bp, Homo sapien
caatggtagtttagtgactactaac

SEQ ID NO: 94057 - DNA, 25 bp, Homo sapien
atcagtatgtgtacgaatcggaaca

SEQ ID NO: 94058 - DNA, 25 bp, Homo sapien
atcagtatgtgttcgaatcggaaca

SEQ ID NO: 94059 - DNA, 25 bp, Homo sapien
acagcatgttcgttactcggtgagg

SEQ ID NO: 94060 - DNA, 25 bp, Homo sapien
acagcatgttcgatactcggtgagg

SEQ ID NO: 94061 - DNA, 25 bp, Homo sapien
actagtcgaggttgactcctttctt

SEQ ID NO: 94062 - DNA, 25 bp, Homo sapien
actagtcgaggtagactcctttctt

SEQ ID NO: 94063 - DNA, 25 bp, Homo sapien
tacattaacaaggtcgctaccttag

SEQ ID NO: 94064 - DNA, 25 bp, Homo sapien
tacattaacaagctcgctaccttag

SEQ ID NO: 94065 - DNA, 25 bp, Homo sapien
catgaattacgaccatcttaaagtg

SEQ ID NO: 94066 - DNA, 25 bp, Homo sapien
catgaattacgagcatcttaaagtg

SEQ ID NO: 94067 - DNA, 25 bp, Homo sapien
cgggttcagacgaatgtcctagggt

SEQ ID NO: 94068 - DNA, 25 bp, Homo sapien
cgggttcagacgtatgtcctagggt

SEQ ID NO: 94069 - DNA, 25 bp, Homo sapien
gacgatctcgagaagtttcttccgg

SEQ ID NO: 94070 - DNA, 25 bp, Homo sapien
gacgatctcgagtagtttcttccgg

SEQ ID NO: 94071 - DNA, 25 bp, Homo sapien
aggtctcgacggaactcggtccagg

SEQ ID NO: 94072 - DNA, 25 bp, Homo sapien
aggtctcgacggtactcggtccagg

SEQ ID NO: 94073 - DNA, 25 bp, Homo sapien
ccggtttcagtgtacctgtcccggt

SEQ ID NO: 94074 - DNA, 25 bp, Homo sapien
ccggtttcagtgaacctgtcccggt

SEQ ID NO: 94075 - DNA, 25 bp, Homo sapien
cggggttcttcgttgtcaacccgtt

SEQ ID NO: 94076 - DNA, 25 bp, Homo sapien
cggggttcttcgatgtcaacccgtt

SEQ ID NO: 94077 - DNA, 25 bp, Homo sapien
gtcgtgagttttgtctgaaaccttg

SEQ ID NO: 94078 - DNA, 25 bp, Homo sapien
gtcgtgagttttctctgaaaccttg

SEQ ID NO: 94079 - DNA, 25 bp, Homo sapien
gactacgtgaatccaagtacctcta

SEQ ID NO: 94080 - DNA, 25 bp, Homo sapien
gactacgtgaatgcaagtacctcta

SEQ ID NO: 94081 - DNA, 25 bp, Homo sapien
tgactagaagaagttccagtcaaag

SEQ ID NO: 94082 - DNA, 25 bp, Homo sapien
tgactagaagaacttccagtcaaag

SEQ ID NO: 94083 - DNA, 25 bp, Homo sapien
ttttagaacccgttctactggatga

SEQ ID NO: 94084 - DNA, 25 bp, Homo sapien
ttttagaacccgatctactggatga

SEQ ID NO: 94085 - DNA, 25 bp, Homo sapien
cacgaggacccgataacttagtgaa

SEQ ID NO: 94086 - DNA, 25 bp, Homo sapien
cacgaggacccgttaacttagtgaa

SEQ ID NO: 94087 - DNA, 25 bp, Homo sapien
acgacaggtccttctcgacttggga

SEQ ID NO: 94088 - DNA, 25 bp, Homo sapien
acgacaggtcctactcgacttggga

SEQ ID NO: 94089 - DNA, 25 bp, Homo sapien
ccacgcacatcctgaacagcgtgta

SEQ ID NO: 94090 - DNA, 25 bp, Homo sapien
ccacgcacatccagaacagcgtgta

SEQ ID NO: 94091 - DNA, 25 bp, Homo sapien
aacgctcgacaaacgaaacaagcac

SEQ ID NO: 94092 - DNA, 25 bp, Homo sapien
aacgctcgacaatcgaaacaagcac

SEQ ID NO: 94093 - DNA, 25 bp, Homo sapien
ggacccctttgccctacagtccgac

SEQ ID NO: 94094 - DNA, 25 bp, Homo sapien
ggacccctttgcgctacagtccgac

SEQ ID NO: 94095 - DNA, 25 bp, Homo sapien
gtaggaccctgtctcgtataaaccc

SEQ ID NO: 94096 - DNA, 25 bp, Homo sapien
gtaggaccctgtgtcgtataaaccc

SEQ ID NO: 94097 - DNA, 25 bp, Homo sapien
gtagacggcgtccttcatgaaccgg

SEQ ID NO: 94098 - DNA, 25 bp, Homo sapien
gtagacggcgtcgttcatgaaccgg

SEQ ID NO: 94099 - DNA, 25 bp, Homo sapien
tcgtttcctcacacaaaagagacgt

SEQ ID NO: 94100 - DNA, 25 bp, Homo sapien
tcgtttcctcactcaaaagagacgt

SEQ ID NO: 94101 - DNA, 25 bp, Homo sapien
ttctttcctaccagttgagtccatg

SEQ ID NO: 94102 - DNA, 25 bp, Homo sapien
ttctttcctacctgttgagtccatg

SEQ ID NO: 94103 - DNA, 25 bp, Homo sapien
ttactcttcctaatctgggtcgacc

SEQ ID NO: 94104 - DNA, 25 bp, Homo sapien
ttactcttcctattctgggtcgacc

SEQ ID NO: 94105 - DNA, 25 bp, Homo sapien
gtgaaagttgacagtgaaaatcacc

SEQ ID NO: 94106 - DNA, 25 bp, Homo sapien
gtgaaagttgactgtgaaaatcacc

SEQ ID NO: 94107 - DNA, 25 bp, Homo sapien
tacaggaacactgcactgagctaaa

SEQ ID NO: 94108 - DNA, 25 bp, Homo sapien
tacaggaacactccactgagctaaa

SEQ ID NO: 94109 - DNA, 25 bp, Homo sapien
ggtctgagtccctcagccgcgaaga

SEQ ID NO: 94110 - DNA, 25 bp, Homo sapien
ggtctgagtcccacagccgcgaaga

SEQ ID NO: 94111 - DNA, 25 bp, Homo sapien
tgtcgtccctgaagtcggagttata

SEQ ID NO: 94112 - DNA, 25 bp, Homo sapien
tgtcgtccctgatgtcggagttata

SEQ ID NO: 94113 - DNA, 25 bp, Homo sapien
aaggagaagcctgtgccagtcctac

SEQ ID NO: 94114 - DNA, 25 bp, Homo sapien
aaggagaagcctctgccagtcctac

SEQ ID NO: 94115 - DNA, 25 bp, Homo sapien
gttgagagaccgttggacctctcca

SEQ ID NO: 94116 - DNA, 25 bp, Homo sapien
gttgagagaccgatggacctctcca

SEQ ID NO: 94117 - DNA, 25 bp, Homo sapien
cttgtagtgtaatttccgctgtgga

SEQ ID NO: 94118 - DNA, 25 bp, Homo sapien
cttgtagtgtaaattccgctgtgga

SEQ ID NO: 94119 - DNA, 25 bp, Homo sapien
tgttttatctagtggtccgttagac

SEQ ID NO: 94120 - DNA, 25 bp, Homo sapien
tgttttatctagaggtccgttagac

SEQ ID NO: 94121 - DNA, 25 bp, Homo sapien
ttcccgttgtgatgtatcattcgtt

SEQ ID NO: 94122 - DNA, 25 bp, Homo sapien
ttcccgttgtgaagtatcattcgtt

SEQ ID NO: 94123 - DNA, 25 bp, Homo sapien
tccttatctgtgacgccgtcaggac

SEQ ID NO: 94124 - DNA, 25 bp, Homo sapien
tccttatctgtgtcgccgtcaggac

SEQ ID NO: 94125 - DNA, 25 bp, Homo sapien
cactccgtcgttgtctacagacact

SEQ ID NO: 94126 - DNA, 25 bp, Homo sapien
cactccgtcgttctctacagacact

SEQ ID NO: 94127 - DNA, 25 bp, Homo sapien
cccctactgcgtctggtttagctcg

SEQ ID NO: 94128 - DNA, 25 bp, Homo sapien
cccctactgcgtgtggtttagctcg

SEQ ID NO: 94129 - DNA, 25 bp, Homo sapien
tcccctacggttgttgtttagtatg

SEQ ID NO: 94130 - DNA, 25 bp, Homo sapien
tcccctacggttcttgtttagtatg

SEQ ID NO: 94131 - DNA, 25 bp, Homo sapien
cgccaggtctcgtgagttagagatg

SEQ ID NO: 94132 - DNA, 25 bp, Homo sapien
cgccaggtctcgagagttagagatg

SEQ ID NO: 94133 - DNA, 25 bp, Homo sapien
cagggactaggctcgaacaatgtag

SEQ ID NO: 94134 - DNA, 25 bp, Homo sapien
cagggactaggcacgaacaatgtag

SEQ ID NO: 94135 - DNA, 25 bp, Homo sapien
gagaactggtcgacgaaacactaca

SEQ ID NO: 94136 - DNA, 25 bp, Homo sapien
gagaactggtcgtcgaaacactaca

SEQ ID NO: 94137 - DNA, 25 bp, Homo sapien
acaaaacttggttctcagatataag

SEQ ID NO: 94138 - DNA, 25 bp, Homo sapien
acaaaacttggtactcagatataag

SEQ ID NO: 94139 - DNA, 25 bp, Homo sapien
ggagtaaacatttttcctctaattg

SEQ ID NO: 94140 - DNA, 25 bp, Homo sapien
ggagtaaacattattcctctaattg

SEQ ID NO: 94141 - DNA, 25 bp, Homo sapien
atgacttgtcaattccggtgttgtg

SEQ ID NO: 94142 - DNA, 25 bp, Homo sapien
atgacttgtcaaatccggtgttgtg

SEQ ID NO: 94143 - DNA, 25 bp, Homo sapien
tgccacgtagagtctctggaatctc

SEQ ID NO: 94144 - DNA, 25 bp, Homo sapien
tgccacgtagagactctggaatctc

SEQ ID NO: 94145 - DNA, 25 bp, Homo sapien
acgaaccgtgggtcccggaactacc

SEQ ID NO: 94146 - DNA, 25 bp, Homo sapien
acgaaccgtgggacccggaactacc

SEQ ID NO: 94147 - DNA, 25 bp, Homo sapien
tgtcatcgggttaccgccaaagtat

SEQ ID NO: 94148 - DNA, 25 bp, Homo sapien
tgtcatcgggtttccgccaaagtat

SEQ ID NO: 94149 - DNA, 25 bp, Homo sapien
ttcgtattgtattgtaaccccaaga

SEQ ID NO: 94150 - DNA, 25 bp, Homo sapien
ttcgtattgtatagtaaccccaaga

SEQ ID NO: 94151 - DNA, 25 bp, Homo sapien
cggttaagtaaagggtagcgactca

SEQ ID NO: 94152 - DNA, 25 bp, Homo sapien
cggttaagtaaacggtagcgactca

SEQ ID NO: 94153 - DNA, 25 bp, Homo sapien
ataaggtttataatgaggaccatcc

SEQ ID NO: 94154 - DNA, 25 bp, Homo sapien
ataaggtttatattgaggaccatcc

SEQ ID NO: 94155 - DNA, 25 bp, Homo sapien
aaccttgtacatttggtacatcaac

SEQ ID NO: 94156 - DNA, 25 bp, Homo sapien
aaccttgtacatatggtacatcaac

SEQ ID NO: 94157 - DNA, 25 bp, Homo sapien
tttttatacagttatggcataccga

SEQ ID NO: 94158 - DNA, 25 bp, Homo sapien
tttttatacagtaatggcataccga

SEQ ID NO: 94159 - DNA, 25 bp, Homo sapien
gttttttgacaatttgtgactccat

SEQ ID NO: 94160 - DNA, 25 bp, Homo sapien
gttttttgacaaattgtgactccat

SEQ ID NO: 94161 - DNA, 25 bp, Homo sapien
cggaattagaaactaactcaaagat

SEQ ID NO: 94162 - DNA, 25 bp, Homo sapien
cggaattagaaagtaactcaaagat

SEQ ID NO: 94163 - DNA, 25 bp, Homo sapien
tgaaattagtaaaataaacccaagt

SEQ ID NO: 94164 - DNA, 25 bp, Homo sapien
tgaaattagtaatataaacccaagt

SEQ ID NO: 94165 - DNA, 25 bp, Homo sapien
acttgtatcctaaaaacgcgacacg

SEQ ID NO: 94166 - DNA, 25 bp, Homo sapien
acttgtatcctataaacgcgacacg

SEQ ID NO: 94167 - DNA, 25 bp, Homo sapien
tctggggaacccacaacgttacggt

SEQ ID NO: 94168 - DNA, 25 bp, Homo sapien
tctggggaaccctcaacgttacggt

SEQ ID NO: 94169 - DNA, 25 bp, Homo sapien
tggggtagtacgttttcttaggctc

SEQ ID NO: 94170 - DNA, 25 bp, Homo sapien
tggggtagtacgatttcttaggctc

SEQ ID NO: 94171 - DNA, 25 bp, Homo sapien
gcaagaaggatcattcccagataag

SEQ ID NO: 94172 - DNA, 25 bp, Homo sapien
gcaagaaggatctttcccagataag

SEQ ID NO: 94173 - DNA, 25 bp, Homo sapien
aagaagggaactaccggctagtata

SEQ ID NO: 94174 - DNA, 25 bp, Homo sapien
aagaagggaacttccggctagtata

SEQ ID NO: 94175 - DNA, 25 bp, Homo sapien
cagaagtgtctctctgtgaatagta

SEQ ID NO: 94176 - DNA, 25 bp, Homo sapien
cagaagtgtctcactgtgaatagta

SEQ ID NO: 94177 - DNA, 25 bp, Homo sapien
agacgtgtgtgtcgacaggaccaac

SEQ ID NO: 94178 - DNA, 25 bp, Homo sapien
agacgtgtgtgtggacaggaccaac

SEQ ID NO: 94179 - DNA, 25 bp, Homo sapien
tcgtctctcagaacctcgactacga

SEQ ID NO: 94180 - DNA, 25 bp, Homo sapien
tcgtctctcagatcctcgactacga

SEQ ID NO: 94181 - DNA, 25 bp, Homo sapien
ttgtacttaaaggtctcgtatcaat

SEQ ID NO: 94182 - DNA, 25 bp, Homo sapien
ttgtacttaaagctctcgtatcaat

SEQ ID NO: 94183 - DNA, 25 bp, Homo sapien
ccgtcgtaaccgtcctcgtctgaat

SEQ ID NO: 94184 - DNA, 25 bp, Homo sapien
ccgtcgtaaccgacctcgtctgaat

SEQ ID NO: 94185 - DNA, 25 bp, Homo sapien
gacgagaccgcagacacttccgaat

SEQ ID NO: 94186 - DNA, 25 bp, Homo sapien
gacgagaccgcacacacttccgaat

SEQ ID NO: 94187 - DNA, 25 bp, Homo sapien
gaggaaccactaatcactgttcccg

SEQ ID NO: 94188 - DNA, 25 bp, Homo sapien
gaggaaccactattcactgttcccg

SEQ ID NO: 94189 - DNA, 25 bp, Homo sapien
agtgacaccgagtcattctatcatg

SEQ ID NO: 94190 - DNA, 25 bp, Homo sapien
agtgacaccgagacattctatcatg

SEQ ID NO: 94191 - DNA, 25 bp, Homo sapien
atcgacttgtacctcattgtttcag

SEQ ID NO: 94192 - DNA, 25 bp, Homo sapien
atcgacttgtacgtcattgtttcag

SEQ ID NO: 94193 - DNA, 25 bp, Homo sapien
agtcgaccgtcagttttcttcctag

SEQ ID NO: 94194 - DNA, 25 bp, Homo sapien
agtcgaccgtcacttttcttcctag

SEQ ID NO: 94195 - DNA, 25 bp, Homo sapien
ggaggacccgggaagttctactccc

SEQ ID NO: 94196 - DNA, 25 bp, Homo sapien
ggaggacccgggtagttctactccc

SEQ ID NO: 94197 - DNA, 25 bp, Homo sapien
ggccgaggaggagctactgccccta

SEQ ID NO: 94198 - DNA, 25 bp, Homo sapien
ggccgaggaggacctactgccccta

SEQ ID NO: 94199 - DNA, 25 bp, Homo sapien
acccgtagttctaggggctcccgac

SEQ ID NO: 94200 - DNA, 25 bp, Homo sapien
acccgtagttcttggggctcccgac

SEQ ID NO: 94201 - DNA, 25 bp, Homo sapien
gtccgatctatagtgggctcctcga

SEQ ID NO: 94202 - DNA, 25 bp, Homo sapien
gtccgatctatactgggctcctcga

SEQ ID NO: 94203 - DNA, 25 bp, Homo sapien
cgggcttgctactgtgttcctgagt

SEQ ID NO: 94204 - DNA, 25 bp, Homo sapien
cgggcttgctacagtgttcctgagt

SEQ ID NO: 94205 - DNA, 25 bp, Homo sapien
aggtccttgctaaccatcacacacg

SEQ ID NO: 94206 - DNA, 25 bp, Homo sapien
aggtccttgctatccatcacacacg

SEQ ID NO: 94207 - DNA, 25 bp, Homo sapien
tcgagattgagtcacgactcacctc

SEQ ID NO: 94208 - DNA, 25 bp, Homo sapien
tcgagattgagtgacgactcacctc

SEQ ID NO: 94209 - DNA, 25 bp, Homo sapien
tcttggagtcttagacccgtctaca

SEQ ID NO: 94210 - DNA, 25 bp, Homo sapien
tcttggagtctttgacccgtctaca

SEQ ID NO: 94211 - DNA, 25 bp, Homo sapien
agggagtctgttctccgtgacgagt

SEQ ID NO: 94212 - DNA, 25 bp, Homo sapien
agggagtctgttgtccgtgacgagt

SEQ ID NO: 94213 - DNA, 25 bp, Homo sapien
agtactccttcttccgctacgggtg

SEQ ID NO: 94214 - DNA, 25 bp, Homo sapien
agtactccttctaccgctacgggtg

SEQ ID NO: 94215 - DNA, 25 bp, Homo sapien
aagacggtacccttttaagatggga

SEQ ID NO: 94216 - DNA, 25 bp, Homo sapien
aagacggtacccatttaagatggga

SEQ ID NO: 94217 - DNA, 25 bp, Homo sapien
ggactgcacctaatgacctaatgga

SEQ ID NO: 94218 - DNA, 25 bp, Homo sapien
ggactgcacctattgacctaatgga

SEQ ID NO: 94219 - DNA, 25 bp, Homo sapien
gcagtgagtctactcgtatatggtt

SEQ ID NO: 94220 - DNA, 25 bp, Homo sapien
gcagtgagtctagtcgtatatggtt

SEQ ID NO: 94221 - DNA, 25 bp, Homo sapien
ttcctctaagtgttcctgaaagtga

SEQ ID NO: 94222 - DNA, 25 bp, Homo sapien
ttcctctaagtgatcctgaaagtga

SEQ ID NO: 94223 - DNA, 25 bp, Homo sapien
ttaggtcacctttttgtgtaacgaa

SEQ ID NO: 94224 - DNA, 25 bp, Homo sapien
ttaggtcaccttattgtgtaacgaa

SEQ ID NO: 94225 - DNA, 25 bp, Homo sapien
cttaagtccatgaatcagttcaaag

SEQ ID NO: 94226 - DNA, 25 bp, Homo sapien
cttaagtccatgtatcagttcaaag

SEQ ID NO: 94227 - DNA, 25 bp, Homo sapien
agaaccagacgttctcttcacaggg

SEQ ID NO: 94228 - DNA, 25 bp, Homo sapien
agaaccagacgtactcttcacaggg

SEQ ID NO: 94229 - DNA, 25 bp, Homo sapien
gacacctcgatacctttccggagtc

SEQ ID NO: 94230 - DNA, 25 bp, Homo sapien
gacacctcgatagctttccggagtc

SEQ ID NO: 94231 - DNA, 25 bp, Homo sapien
acccatcggtagtggttagttagct

SEQ ID NO: 94232 - DNA, 25 bp, Homo sapien
acccatcggtagaggttagttagct

SEQ ID NO: 94233 - DNA, 25 bp, Homo sapien
taaactttcgagtggagagacacat

SEQ ID NO: 94234 - DNA, 25 bp, Homo sapien
taaactttcgagaggagagacacat

SEQ ID NO: 94235 - DNA, 25 bp, Homo sapien
aattgtttctatacgggacacgtaa

SEQ ID NO: 94236 - DNA, 25 bp, Homo sapien
aattgtttctattcgggacacgtaa

SEQ ID NO: 94237 - DNA, 25 bp, Homo sapien
gtcgtggtaccgttcggtgcctctt

SEQ ID NO: 94238 - DNA, 25 bp, Homo sapien
gtcgtggtaccgatcggtgcctctt

SEQ ID NO: 94239 - DNA, 25 bp, Homo sapien
tttctcttccgtcatagggtcccgg

SEQ ID NO: 94240 - DNA, 25 bp, Homo sapien
tttctcttccgtgatagggtcccgg

SEQ ID NO: 94241 - DNA, 25 bp, Homo sapien
ttttctcgacgtcacaggttccccg

SEQ ID NO: 94242 - DNA, 25 bp, Homo sapien
ttttctcgacgtgacaggttccccg

SEQ ID NO: 94243 - DNA, 25 bp, Homo sapien
tactcgtgaccgtattacttccgct

SEQ ID NO: 94244 - DNA, 25 bp, Homo sapien
tactcgtgaccgaattacttccgct

SEQ ID NO: 94245 - DNA, 25 bp, Homo sapien
caagtacgaacatagtcgtgtccct

SEQ ID NO: 94246 - DNA, 25 bp, Homo sapien
caagtacgaacaaagtcgtgtccct

SEQ ID NO: 94247 - DNA, 25 bp, Homo sapien
gcggggtcatacaccgtgtccactg

SEQ ID NO: 94248 - DNA, 25 bp, Homo sapien
gcggggtcatactccgtgtccactg

SEQ ID NO: 94249 - DNA, 25 bp, Homo sapien
acaggtgatctcacgcggtctcagg

SEQ ID NO: 94250 - DNA, 25 bp, Homo sapien
acaggtgatctctcgcggtctcagg

SEQ ID NO: 94251 - DNA, 25 bp, Homo sapien
tgtggacggtgttctcaccggtgaa

SEQ ID NO: 94252 - DNA, 25 bp, Homo sapien
tgtggacggtgtactcaccggtgaa

SEQ ID NO: 94253 - DNA, 25 bp, Homo sapien
cgactgcggtaaacccacggtttgt

SEQ ID NO: 94254 - DNA, 25 bp, Homo sapien
cgactgcggtaatcccacggtttgt

SEQ ID NO: 94255 - DNA, 25 bp, Homo sapien
aatgtgtcagttcagacacggtttc

SEQ ID NO: 94256 - DNA, 25 bp, Homo sapien
aatgtgtcagttgagacacggtttc

SEQ ID NO: 94257 - DNA, 25 bp, Homo sapien
acaaatttcggttagctaaaacatg

SEQ ID NO: 94258 - DNA, 25 bp, Homo sapien
acaaatttcggtaagctaaaacatg

SEQ ID NO: 94259 - DNA, 25 bp, Homo sapien
atcagtttctttgacccagtaacag

SEQ ID NO: 94260 - DNA, 25 bp, Homo sapien
atcagtttctttcacccagtaacag

SEQ ID NO: 94261 - DNA, 25 bp, Homo sapien
attattttgacgtctcgtagtacga

SEQ ID NO: 94262 - DNA, 25 bp, Homo sapien
attattttgacgactcgtagtacga

SEQ ID NO: 94263 - DNA, 25 bp, Homo sapien
actgtagtggtgctcgcctcttgcg

SEQ ID NO: 94264 - DNA, 25 bp, Homo sapien
actgtagtggtggtcgcctcttgcg

SEQ ID NO: 94265 - DNA, 25 bp, Homo sapien
taagtctgagtctccgtcggtctcc

SEQ ID NO: 94266 - DNA, 25 bp, Homo sapien
taagtctgagtcaccgtcggtctcc

SEQ ID NO: 94267 - DNA, 25 bp, Homo sapien
gttaggtcagtttcaccttcgttaa

SEQ ID NO: 94268 - DNA, 25 bp, Homo sapien
gttaggtcagttacaccttcgttaa

SEQ ID NO: 94269 - DNA, 25 bp, Homo sapien
cctgtgagttttacactttcgttca

SEQ ID NO: 94270 - DNA, 25 bp, Homo sapien
cctgtgagtttttcactttcgttca

SEQ ID NO: 94271 - DNA, 25 bp, Homo sapien
ttaagaactcgttccgttatgagga

SEQ ID NO: 94272 - DNA, 25 bp, Homo sapien
ttaagaactcgtaccgttatgagga

SEQ ID NO: 94273 - DNA, 25 bp, Homo sapien
caaagacgatgtctcgtggaggaga

SEQ ID NO: 94274 - DNA, 25 bp, Homo sapien
caaagacgatgtgtcgtggaggaga

SEQ ID NO: 94275 - DNA, 25 bp, Homo sapien
agacaaagatgtttcggacacgaaa

SEQ ID NO: 94276 - DNA, 25 bp, Homo sapien
agacaaagatgtatcggacacgaaa

SEQ ID NO: 94277 - DNA, 25 bp, Homo sapien
cacagaggggtttctccctgaacac

SEQ ID NO: 94278 - DNA, 25 bp, Homo sapien
cacagaggggttactccctgaacac

SEQ ID NO: 94279 - DNA, 25 bp, Homo sapien
acagaaagtggaaagtgcctgttca

SEQ ID NO: 94280 - DNA, 25 bp, Homo sapien
acagaaagtggatagtgcctgttca

SEQ ID NO: 94281 - DNA, 25 bp, Homo sapien
cggaaagtcgcattccgtccttgga

SEQ ID NO: 94282 - DNA, 25 bp, Homo sapien
cggaaagtcgcaatccgtccttgga

SEQ ID NO: 94283 - DNA, 25 bp, Homo sapien
ttacacaaaccatcggtccctggag

SEQ ID NO: 94284 - DNA, 25 bp, Homo sapien
ttacacaaaccaacggtccctggag

SEQ ID NO: 94285 - DNA, 25 bp, Homo sapien
aaagaacacgaaccaccaagaccgt

SEQ ID NO: 94286 - DNA, 25 bp, Homo sapien
aaagaacacgaagcaccaagaccgt

SEQ ID NO: 94287 - DNA, 25 bp, Homo sapien
cagacaaaaagaacccgacgaaaat

SEQ ID NO: 94288 - DNA, 25 bp, Homo sapien
cagacaaaaagatcccgacgaaaat

SEQ ID NO: 94289 - DNA, 25 bp, Homo sapien
gtagtaaaataccacccggaaccta

SEQ ID NO: 94290 - DNA, 25 bp, Homo sapien
gtagtaaaatacgacccggaaccta

SEQ ID NO: 94291 - DNA, 25 bp, Homo sapien
gtgacgtcaaacgaccctctttcct

SEQ ID NO: 94292 - DNA, 25 bp, Homo sapien
gtgacgtcaaaccaccctctttcct

SEQ ID NO: 94293 - DNA, 25 bp, Homo sapien
ggtccaaccgaccatcgacgtttcg

SEQ ID NO: 94294 - DNA, 25 bp, Homo sapien
ggtccaaccgacgatcgacgtttcg

SEQ ID NO: 94295 - DNA, 25 bp, Homo sapien
gtactgctgcccactgacgacggtg

SEQ ID NO: 94296 - DNA, 25 bp, Homo sapien
gtactgctgccctctgacgacggtg

SEQ ID NO: 94297 - DNA, 25 bp, Homo sapien
ctttagattttccttgactggtagt

SEQ ID NO: 94298 - DNA, 25 bp, Homo sapien
ctttagattttcgttgactggtagt

SEQ ID NO: 94299 - DNA, 25 bp, Homo sapien
caatttccgtctctcactgaacggg

SEQ ID NO: 94300 - DNA, 25 bp, Homo sapien
caatttccgtctgtcactgaacggg

SEQ ID NO: 94301 - DNA, 25 bp, Homo sapien
ccctagtccactgtgctccatgggt

SEQ ID NO: 94302 - DNA, 25 bp, Homo sapien
ccctagtccactctgctccatgggt

SEQ ID NO: 94303 - DNA, 25 bp, Homo sapien
ccccttctgtatcttcttcagtggg

SEQ ID NO: 94304 - DNA, 25 bp, Homo sapien
ccccttctgtatgttcttcagtggg

SEQ ID NO: 94305 - DNA, 25 bp, Homo sapien
aatgtgttcaactttcctaatgtgg

SEQ ID NO: 94306 - DNA, 25 bp, Homo sapien
aatgtgttcaacattcctaatgtgg

SEQ ID NO: 94307 - DNA, 25 bp, Homo sapien
accaaaaatcttccagtattgtcgg

SEQ ID NO: 94308 - DNA, 25 bp, Homo sapien
accaaaaatcttgcagtattgtcgg

SEQ ID NO: 94309 - DNA, 25 bp, Homo sapien
aaagacgagtccttcagagaagtga

SEQ ID NO: 94310 - DNA, 25 bp, Homo sapien
aaagacgagtccatcagagaagtga

SEQ ID NO: 94311 - DNA, 25 bp, Homo sapien
gcatcacagggttccagtggatcgg

SEQ ID NO: 94312 - DNA, 25 bp, Homo sapien
gcatcacagggtaccagtggatcgg

SEQ ID NO: 94313 - DNA, 25 bp, Homo sapien
gttcaggttcgacgtagagggattc

SEQ ID NO: 94314 - DNA, 25 bp, Homo sapien
gttcaggttcgaggtagagggattc

SEQ ID NO: 94315 - DNA, 25 bp, Homo sapien
cttaagggtcggtagaggacaggtc

SEQ ID NO: 94316 - DNA, 25 bp, Homo sapien
cttaagggtcggaagaggacaggtc

SEQ ID NO: 94317 - DNA, 25 bp, Homo sapien
cgagtagggccgacaagactaaccc

SEQ ID NO: 94318 - DNA, 25 bp, Homo sapien
cgagtagggccgtcaagactaaccc

SEQ ID NO: 94319 - DNA, 25 bp, Homo sapien
cacttcagagctcagaatcgcgcct

SEQ ID NO: 94320 - DNA, 25 bp, Homo sapien
cacttcagagctgagaatcgcgcct

SEQ ID NO: 94321 - DNA, 25 bp, Homo sapien
aatctcgtggtccagacaacctacc

SEQ ID NO: 94322 - DNA, 25 bp, Homo sapien
aatctcgtggtcgagacaacctacc

SEQ ID NO: 94323 - DNA, 25 bp, Homo sapien
ggtaccggtaggtacgcacctgcga

SEQ ID NO: 94324 - DNA, 25 bp, Homo sapien
ggtaccggtaggaacgcacctgcga

SEQ ID NO: 94325 - DNA, 25 bp, Homo sapien
gcacccccgcccctgtactccggca

SEQ ID NO: 94326 - DNA, 25 bp, Homo sapien
gcacccccgcccgtgtactccggca

SEQ ID NO: 94327 - DNA, 25 bp, Homo sapien
ccctcgtttactggtcctgaccagt

SEQ ID NO: 94328 - DNA, 25 bp, Homo sapien
ccctcgtttactcgtcctgaccagt

SEQ ID NO: 94329 - DNA, 25 bp, Homo sapien
acacgtattctggtacgactcatga

SEQ ID NO: 94330 - DNA, 25 bp, Homo sapien
acacgtattctgctacgactcatga

SEQ ID NO: 94331 - DNA, 25 bp, Homo sapien
acgcgtgtagccacacacgtataga

SEQ ID NO: 94332 - DNA, 25 bp, Homo sapien
acgcgtgtagcctcacacgtataga

SEQ ID NO: 94333 - DNA, 25 bp, Homo sapien
gtcgtgtcactcttctacggaagac

SEQ ID NO: 94334 - DNA, 25 bp, Homo sapien
gtcgtgtcactcatctacggaagac

SEQ ID NO: 94335 - DNA, 25 bp, Homo sapien
gaaggagccttcctggctcgtggaa

SEQ ID NO: 94336 - DNA, 25 bp, Homo sapien
gaaggagccttcgtggctcgtggaa

SEQ ID NO: 94337 - DNA, 25 bp, Homo sapien
ggtgacactttgtgctcggtgagtc

SEQ ID NO: 94338 - DNA, 25 bp, Homo sapien
ggtgacactttgagctcggtgagtc

SEQ ID NO: 94339 - DNA, 25 bp, Homo sapien
ggtgtaaactttagaaccttacatc

SEQ ID NO: 94340 - DNA, 25 bp, Homo sapien
ggtgtaaacttttgaaccttacatc

SEQ ID NO: 94341 - DNA, 25 bp, Homo sapien
gacgaggaagatattttactttttt

SEQ ID NO: 94342 - DNA, 25 bp, Homo sapien
gacgaggaagattttttactttttt

SEQ ID NO: 94343 - DNA, 25 bp, Homo sapien
ggtaaacacaatttgcaccgttttt

SEQ ID NO: 94344 - DNA, 25 bp, Homo sapien
ggtaaacacaatatgcaccgttttt

SEQ ID NO: 94345 - DNA, 25 bp, Homo sapien
ataaatacatctaatgacatcaatt

SEQ ID NO: 94346 - DNA, 25 bp, Homo sapien
ataaatacatcttatgacatcaatt

SEQ ID NO: 94347 - DNA, 25 bp, Homo sapien
gtagttactaaagtttccaacttga

SEQ ID NO: 94348 - DNA, 25 bp, Homo sapien
gtagttactaaactttccaacttga

SEQ ID NO: 94349 - DNA, 25 bp, Homo sapien
gagaaatcttactttaccacattgg

SEQ ID NO: 94350 - DNA, 25 bp, Homo sapien
gagaaatcttacattaccacattgg

SEQ ID NO: 94351 - DNA, 25 bp, Homo sapien
tggtatttataggtattcccctttt

SEQ ID NO: 94352 - DNA, 25 bp, Homo sapien
tggtatttatagctattcccctttt

SEQ ID NO: 94353 - DNA, 25 bp, Homo sapien
tgttttgtacggtgaaaccgaacat

SEQ ID NO: 94354 - DNA, 25 bp, Homo sapien
tgttttgtacggagaaaccgaacat

SEQ ID NO: 94355 - DNA, 25 bp, Homo sapien
ctttctaaaaacagtaccatagtat

SEQ ID NO: 94356 - DNA, 25 bp, Homo sapien
ctttctaaaaactgtaccatagtat

SEQ ID NO: 94357 - DNA, 25 bp, Homo sapien
gtctgtaccaaaaccgaccctagtt

SEQ ID NO: 94358 - DNA, 25 bp, Homo sapien
gtctgtaccaaatccgaccctagtt

SEQ ID NO: 94359 - DNA, 25 bp, Homo sapien
ccgggacgtccctggactctgtata

SEQ ID NO: 94360 - DNA, 25 bp, Homo sapien
ccgggacgtcccaggactctgtata

SEQ ID NO: 94361 - DNA, 25 bp, Homo sapien
gccgacgtccgtacggtctgtctta

SEQ ID NO: 94362 - DNA, 25 bp, Homo sapien
gccgacgtccgttcggtctgtctta

SEQ ID NO: 94363 - DNA, 25 bp, Homo sapien
tcacaggtggacgtgaggtacagat

SEQ ID NO: 94364 - DNA, 25 bp, Homo sapien
tcacaggtggacctgaggtacagat

SEQ ID NO: 94365 - DNA, 25 bp, Homo sapien
tctccagtgggtgactgaggacaga

SEQ ID NO: 94366 - DNA, 25 bp, Homo sapien
tctccagtgggtcactgaggacaga

SEQ ID NO: 94367 - DNA, 25 bp, Homo sapien
aaacccaggtggtttacgcacagga

SEQ ID NO: 94368 - DNA, 25 bp, Homo sapien
aaacccaggtggattacgcacagga

SEQ ID NO: 94369 - DNA, 25 bp, Homo sapien
agtccgagggacactacctcagcac

SEQ ID NO: 94370 - DNA, 25 bp, Homo sapien
agtccgagggactctacctcagcac

SEQ ID NO: 94371 - DNA, 25 bp, Homo sapien
gcaggtgcgtcgtcccttccggtca

SEQ ID NO: 94372 - DNA, 25 bp, Homo sapien
gcaggtgcgtcgacccttccggtca

SEQ ID NO: 94373 - DNA, 25 bp, Homo sapien
gtacttgtggtcacccaagacggga

SEQ ID NO: 94374 - DNA, 25 bp, Homo sapien
gtacttgtggtctcccaagacggga

SEQ ID NO: 94375 - DNA, 25 bp, Homo sapien
tctcaatccttggtcagacgaggaa

SEQ ID NO: 94376 - DNA, 25 bp, Homo sapien
tctcaatccttgctcagacgaggaa

SEQ ID NO: 94377 - DNA, 25 bp, Homo sapien
tcaccgttcgtcctcgaagagcggc

SEQ ID NO: 94378 - DNA, 25 bp, Homo sapien
tcaccgttcgtcgtcgaagagcggc

SEQ ID NO: 94379 - DNA, 25 bp, Homo sapien
tctactatctacctcgtacaagggc

SEQ ID NO: 94380 - DNA, 25 bp, Homo sapien
tctactatctacgtcgtacaagggc

SEQ ID NO: 94381 - DNA, 25 bp, Homo sapien
ttttcgtcagttcgacagacctgac

SEQ ID NO: 94382 - DNA, 25 bp, Homo sapien
ttttcgtcagttggacagacctgac

SEQ ID NO: 94383 - DNA, 25 bp, Homo sapien
atcttctcatgattccctgagaagg

SEQ ID NO: 94384 - DNA, 25 bp, Homo sapien
atcttctcatgaatccctgagaagg

SEQ ID NO: 94385 - DNA, 25 bp, Homo sapien
aaggtctttgggagctaacactggt

SEQ ID NO: 94386 - DNA, 25 bp, Homo sapien
aaggtctttgggtgctaacactggt

SEQ ID NO: 94387 - DNA, 25 bp, Homo sapien
gttgtctcgaacacacagccgtcgg

SEQ ID NO: 94388 - DNA, 25 bp, Homo sapien
gttgtctcgaactcacagccgtcgg

SEQ ID NO: 94389 - DNA, 25 bp, Homo sapien
agtcgtactccgtctacaactcctg

SEQ ID NO: 94390 - DNA, 25 bp, Homo sapien
agtcgtactccgactacaactcctg

SEQ ID NO: 94391 - DNA, 25 bp, Homo sapien
gacacacgcggctgaacgtcctact

SEQ ID NO: 94392 - DNA, 25 bp, Homo sapien
gacacacgcggcagaacgtcctact

SEQ ID NO: 94393 - DNA, 25 bp, Homo sapien
tgcccggacgtagaagtcgtcgtcg

SEQ ID NO: 94394 - DNA, 25 bp, Homo sapien
tgcccggacgtacaagtcgtcgtcg

SEQ ID NO: 94395 - DNA, 25 bp, Homo sapien
aaaaatactgtgaggttcctacggg

SEQ ID NO: 94396 - DNA, 25 bp, Homo sapien
aaaaatactgtgtggttcctacggg

SEQ ID NO: 94397 - DNA, 25 bp, Homo sapien
aatacaatgtagttccgtcggtacg

SEQ ID NO: 94398 - DNA, 25 bp, Homo sapien
aatacaatgtagatccgtcggtacg

SEQ ID NO: 94399 - DNA, 25 bp, Homo sapien
atatttgacgacatagatccccgtc

SEQ ID NO: 94400 - DNA, 25 bp, Homo sapien
atatttgacgacttagatccccgtc

SEQ ID NO: 94401 - DNA, 25 bp, Homo sapien
taaaggtcacattcggtgtttcttc

SEQ ID NO: 94402 - DNA, 25 bp, Homo sapien
taaaggtcacatacggtgtttcttc

SEQ ID NO: 94403 - DNA, 25 bp, Homo sapien
ctttggtgagcgtctccggtcgtct

SEQ ID NO: 94404 - DNA, 25 bp, Homo sapien
ctttggtgagcgactccggtcgtct

SEQ ID NO: 94405 - DNA, 25 bp, Homo sapien
atgtatgcaaacacaccgtctgtaa

SEQ ID NO: 94406 - DNA, 25 bp, Homo sapien
atgtatgcaaactcaccgtctgtaa

SEQ ID NO: 94407 - DNA, 25 bp, Homo sapien
ttatatgttgaaccttacctaaaac

SEQ ID NO: 94408 - DNA, 25 bp, Homo sapien
ttatatgttgaagcttacctaaaac

SEQ ID NO: 94409 - DNA, 25 bp, Homo sapien
tgacattgtcgacgttttcattaat

SEQ ID NO: 94410 - DNA, 25 bp, Homo sapien
tgacattgtcgaggttttcattaat

SEQ ID NO: 94411 - DNA, 25 bp, Homo sapien
taaatcgtccgttttgacataatgt

SEQ ID NO: 94412 - DNA, 25 bp, Homo sapien
taaatcgtccgtattgacataatgt

SEQ ID NO: 94413 - DNA, 25 bp, Homo sapien
gcctataagaattactctagtgatt

SEQ ID NO: 94414 - DNA, 25 bp, Homo sapien
gcctataagaataactctagtgatt

SEQ ID NO: 94415 - DNA, 25 bp, Homo sapien
aagagacctctgaattatcattaga

SEQ ID NO: 94416 - DNA, 25 bp, Homo sapien
aagagacctctgtattatcattaga

SEQ ID NO: 94417 - DNA, 25 bp, Homo sapien
aagacaccatcatgactattgtaag

SEQ ID NO: 94418 - DNA, 25 bp, Homo sapien
aagacaccatcaagactattgtaag

SEQ ID NO: 94419 - DNA, 25 bp, Homo sapien
cgaaagctacgcacacaaaccaaag

SEQ ID NO: 94420 - DNA, 25 bp, Homo sapien
cgaaagctacgctcacaaaccaaag

SEQ ID NO: 94421 - DNA, 25 bp, Homo sapien
tttgactgtccgtaagcccgactga

SEQ ID NO: 94422 - DNA, 25 bp, Homo sapien
tttgactgtccgaaagcccgactga

SEQ ID NO: 94423 - DNA, 25 bp, Homo sapien
ttgtgattcagtacagacccaccac

SEQ ID NO: 94424 - DNA, 25 bp, Homo sapien
ttgtgattcagttcagacccaccac

SEQ ID NO: 94425 - DNA, 25 bp, Homo sapien
aagtgagctctgaattggtccacca

SEQ ID NO: 94426 - DNA, 25 bp, Homo sapien
aagtgagctctgtattggtccacca

SEQ ID NO: 94427 - DNA, 25 bp, Homo sapien
ataaacctcagagactggcccactg

SEQ ID NO: 94428 - DNA, 25 bp, Homo sapien
ataaacctcagacactggcccactg

SEQ ID NO: 94429 - DNA, 25 bp, Homo sapien
catataagcccgtcggggtaccaag

SEQ ID NO: 94430 - DNA, 25 bp, Homo sapien
catataagcccgacggggtaccaag

SEQ ID NO: 94431 - DNA, 25 bp, Homo sapien
ccctaaaggaccacggaggatcatg

SEQ ID NO: 94432 - DNA, 25 bp, Homo sapien
ccctaaaggacctcggaggatcatg

SEQ ID NO: 94433 - DNA, 25 bp, Homo sapien
tccacagccctaaggctactggagt

SEQ ID NO: 94434 - DNA, 25 bp, Homo sapien
tccacagccctatggctactggagt

SEQ ID NO: 94435 - DNA, 25 bp, Homo sapien
atccgagggacctccagtactgaag

SEQ ID NO: 94436 - DNA, 25 bp, Homo sapien
atccgagggaccaccagtactgaag

SEQ ID NO: 94437 - DNA, 25 bp, Homo sapien
cctaagggtcgcaaggttgagaagt

SEQ ID NO: 94438 - DNA, 25 bp, Homo sapien
cctaagggtcgctaggttgagaagt

SEQ ID NO: 94439 - DNA, 25 bp, Homo sapien
cctgagagccggtcgactctgagaa

SEQ ID NO: 94440 - DNA, 25 bp, Homo sapien
cctgagagccggacgactctgagaa

SEQ ID NO: 94441 - DNA, 25 bp, Homo sapien
tcgtgctgggtcacgcaattgataa

SEQ ID NO: 94442 - DNA, 25 bp, Homo sapien
tcgtgctgggtctcgcaattgataa

SEQ ID NO: 94443 - DNA, 25 bp, Homo sapien
aaaacggacacgtactttttgaaat

SEQ ID NO: 94444 - DNA, 25 bp, Homo sapien
aaaacggacacgaactttttgaaat

SEQ ID NO: 94445 - DNA, 25 bp, Homo sapien
acaaggttacccagaaactcaacgc

SEQ ID NO: 94446 - DNA, 25 bp, Homo sapien
acaaggttaccctgaaactcaacgc

SEQ ID NO: 94447 - DNA, 25 bp, Homo sapien
gtcacagaaaacatggaatcaccga

SEQ ID NO: 94448 - DNA, 25 bp, Homo sapien
gtcacagaaaacttggaatcaccga

SEQ ID NO: 94449 - DNA, 25 bp, Homo sapien
taccatctggacatgtgacttttga

SEQ ID NO: 94450 - DNA, 25 bp, Homo sapien
taccatctggacttgtgacttttga

SEQ ID NO: 94451 - DNA, 25 bp, Homo sapien
agcgacactttattcagacttttga

SEQ ID NO: 94452 - DNA, 25 bp, Homo sapien
agcgacactttaatcagacttttga

SEQ ID NO: 94453 - DNA, 25 bp, Homo sapien
gtcctctgttgaaacctagacccga

SEQ ID NO: 94454 - DNA, 25 bp, Homo sapien
gtcctctgttgatacctagacccga

SEQ ID NO: 94455 - DNA, 25 bp, Homo sapien
acatttgtcgtataataccaccgag

SEQ ID NO: 94456 - DNA, 25 bp, Homo sapien
acatttgtcgtaaaataccaccgag

SEQ ID NO: 94457 - DNA, 25 bp, Homo sapien
cgttcattgacaaaggacgacctag

SEQ ID NO: 94458 - DNA, 25 bp, Homo sapien
cgttcattgacataggacgacctag

SEQ ID NO: 94459 - DNA, 25 bp, Homo sapien
ctagcacttgacttcttgaactcag

SEQ ID NO: 94460 - DNA, 25 bp, Homo sapien
ctagcacttgacatcttgaactcag

SEQ ID NO: 94461 - DNA, 25 bp, Homo sapien
agtccatgtggttagtctgcatcta

SEQ ID NO: 94462 - DNA, 25 bp, Homo sapien
agtccatgtggtaagtctgcatcta

SEQ ID NO: 94463 - DNA, 25 bp, Homo sapien
gtcattcgatatcgtttgacaattt

SEQ ID NO: 94464 - DNA, 25 bp, Homo sapien
gtcattcgatatggtttgacaattt

SEQ ID NO: 94465 - DNA, 25 bp, Homo sapien
gtctgtaagattgcttcgaaccaaa

SEQ ID NO: 94466 - DNA, 25 bp, Homo sapien
gtctgtaagattccttcgaaccaaa

SEQ ID NO: 94467 - DNA, 25 bp, Homo sapien
tcggtgaagttttgtccagatacaa

SEQ ID NO: 94468 - DNA, 25 bp, Homo sapien
tcggtgaagtttagtccagatacaa

SEQ ID NO: 94469 - DNA, 25 bp, Homo sapien
ttcaacagtttctaccacggtctga

SEQ ID NO: 94470 - DNA, 25 bp, Homo sapien
ttcaacagtttcaaccacggtctga

SEQ ID NO: 94471 - DNA, 25 bp, Homo sapien
taggtggtccattaactgaggtagc

SEQ ID NO: 94472 - DNA, 25 bp, Homo sapien
taggtggtccataaactgaggtagc

SEQ ID NO: 94473 - DNA, 25 bp, Homo sapien
aggtctactgtcattctaaggtgac

SEQ ID NO: 94474 - DNA, 25 bp, Homo sapien
aggtctactgtctttctaaggtgac

SEQ ID NO: 94475 - DNA, 25 bp, Homo sapien
gtactacttcggatcatgtcgtata

SEQ ID NO: 94476 - DNA, 25 bp, Homo sapien
gtactacttcggttcatgtcgtata

SEQ ID NO: 94477 - DNA, 25 bp, Homo sapien
agtcgtcgttggttgtacttgtaca

SEQ ID NO: 94478 - DNA, 25 bp, Homo sapien
agtcgtcgttggatgtacttgtaca

SEQ ID NO: 94479 - DNA, 25 bp, Homo sapien
aacagttttcactgaactagtaagt

SEQ ID NO: 94480 - DNA, 25 bp, Homo sapien
aacagttttcacagaactagtaagt

SEQ ID NO: 94481 - DNA, 25 bp, Homo sapien
tcttaaaaagtctacacgaaatgaa

SEQ ID NO: 94482 - DNA, 25 bp, Homo sapien
tcttaaaaagtcaacacgaaatgaa

SEQ ID NO: 94483 - DNA, 25 bp, Homo sapien
aacacaagtacgttcatgttagtaa

SEQ ID NO: 94484 - DNA, 25 bp, Homo sapien
aacacaagtacgatcatgttagtaa

SEQ ID NO: 94485 - DNA, 25 bp, Homo sapien
aaaggaataaaaacgtcttctttct

SEQ ID NO: 94486 - DNA, 25 bp, Homo sapien
aaaggaataaaatcgtcttctttct

SEQ ID NO: 94487 - DNA, 25 bp, Homo sapien
accgaacataaggaaccttttaaga

SEQ ID NO: 94488 - DNA, 25 bp, Homo sapien
accgaacataagcaaccttttaaga

SEQ ID NO: 94489 - DNA, 25 bp, Homo sapien
gttttattcagtattctttacgaaa

SEQ ID NO: 94490 - DNA, 25 bp, Homo sapien
gttttattcagttttctttacgaaa

SEQ ID NO: 94491 - DNA, 25 bp, Homo sapien
cgggtatcctgtgagtttttgtgaa

SEQ ID NO: 94492 - DNA, 25 bp, Homo sapien
cgggtatcctgtcagtttttgtgaa

SEQ ID NO: 94493 - DNA, 25 bp, Homo sapien
ccgacctgtcaccttgtggtagaac

SEQ ID NO: 94494 - DNA, 25 bp, Homo sapien
ccgacctgtcacgttgtggtagaac

SEQ ID NO: 94495 - DNA, 25 bp, Homo sapien
tagacatgacatttcgatgaacgat

SEQ ID NO: 94496 - DNA, 25 bp, Homo sapien
tagacatgacatatcgatgaacgat

SEQ ID NO: 94497 - DNA, 25 bp, Homo sapien
attttgaacgacaacgactgagaga

SEQ ID NO: 94498 - DNA, 25 bp, Homo sapien
attttgaacgactacgactgagaga

SEQ ID NO: 94499 - DNA, 25 bp, Homo sapien
tctatgaggaaaacggtgacgacac

SEQ ID NO: 94500 - DNA, 25 bp, Homo sapien
tctatgaggaaatcggtgacgacac

SEQ ID NO: 94501 - DNA, 25 bp, Homo sapien
tgtattgttgatatcgatgtcacac

SEQ ID NO: 94502 - DNA, 25 bp, Homo sapien
tgtattgttgatttcgatgtcacac

SEQ ID NO: 94503 - DNA, 25 bp, Homo sapien
gactccgcttccttagaacgtcaga

SEQ ID NO: 94504 - DNA, 25 bp, Homo sapien
gactccgcttccatagaacgtcaga

SEQ ID NO: 94505 - DNA, 25 bp, Homo sapien
ctaaacgcggttttcacggacagaa

SEQ ID NO: 94506 - DNA, 25 bp, Homo sapien
ctaaacgcggttatcacggacagaa

SEQ ID NO: 94507 - DNA, 25 bp, Homo sapien
taacagtccctttgtcctggagagg

SEQ ID NO: 94508 - DNA, 25 bp, Homo sapien
taacagtcccttagtcctggagagg

SEQ ID NO: 94509 - DNA, 25 bp, Homo sapien
tcacccatccttactttcgacgagg

SEQ ID NO: 94510 - DNA, 25 bp, Homo sapien
tcacccatcctttctttcgacgagg

SEQ ID NO: 94511 - DNA, 25 bp, Homo sapien
atgaagacaccgtcatgaaaacctc

SEQ ID NO: 94512 - DNA, 25 bp, Homo sapien
atgaagacaccgacatgaaaacctc

SEQ ID NO: 94513 - DNA, 25 bp, Homo sapien
gacagtgaaccagcaccgtcgggcc

SEQ ID NO: 94514 - DNA, 25 bp, Homo sapien
gacagtgaaccaccaccgtcgggcc

SEQ ID NO: 94515 - DNA, 25 bp, Homo sapien
cgttgtaaacccggtcgatttgtac

SEQ ID NO: 94516 - DNA, 25 bp, Homo sapien
cgttgtaaaccccgtcgatttgtac

SEQ ID NO: 94517 - DNA, 25 bp, Homo sapien
gtcaaatgacataatcaaccgacag

SEQ ID NO: 94518 - DNA, 25 bp, Homo sapien
gtcaaatgacattatcaaccgacag

SEQ ID NO: 94519 - DNA, 25 bp, Homo sapien
aggtcaaggtctccttgtccccaac

SEQ ID NO: 94520 - DNA, 25 bp, Homo sapien
aggtcaaggtctgcttgtccccaac

SEQ ID NO: 94521 - DNA, 25 bp, Homo sapien
acacgagttcacaggacacttcaca

SEQ ID NO: 94522 - DNA, 25 bp, Homo sapien
acacgagttcactggacacttcaca

SEQ ID NO: 94523 - DNA, 25 bp, Homo sapien
gtccggtgtcggtatcggtccacac

SEQ ID NO: 94524 - DNA, 25 bp, Homo sapien
gtccggtgtcggaatcggtccacac

SEQ ID NO: 94525 - DNA, 25 bp, Homo sapien
ggcggtcggagtttcgacgtccctc

SEQ ID NO: 94526 - DNA, 25 bp, Homo sapien
ggcggtcggagtatcgacgtccctc

SEQ ID NO: 94527 - DNA, 25 bp, Homo sapien
agtcgacccggacgaggtctccttc

SEQ ID NO: 94528 - DNA, 25 bp, Homo sapien
agtcgacccggaggaggtctccttc

SEQ ID NO: 94529 - DNA, 25 bp, Homo sapien
agtgactcgaggtcgggtctccctc

SEQ ID NO: 94530 - DNA, 25 bp, Homo sapien
agtgactcgaggacgggtctccctc

SEQ ID NO: 94531 - DNA, 25 bp, Homo sapien
ggggtgtaccggatacaactcccac

SEQ ID NO: 94532 - DNA, 25 bp, Homo sapien
ggggtgtaccggttacaactcccac

SEQ ID NO: 94533 - DNA, 25 bp, Homo sapien
gatgggggtgctttacctcccgaca

SEQ ID NO: 94534 - DNA, 25 bp, Homo sapien
gatgggggtgctatacctcccgaca

SEQ ID NO: 94535 - DNA, 25 bp, Homo sapien
gtgggacagtaaatagttccaccga

SEQ ID NO: 94536 - DNA, 25 bp, Homo sapien
gtgggacagtaattagttccaccga

SEQ ID NO: 94537 - DNA, 25 bp, Homo sapien
ggacttatagtctttcctagacact

SEQ ID NO: 94538 - DNA, 25 bp, Homo sapien
ggacttatagtcattcctagacact

SEQ ID NO: 94539 - DNA, 25 bp, Homo sapien
gcgggcgagtcgacccgactacacg

SEQ ID NO: 94540 - DNA, 25 bp, Homo sapien
gcgggcgagtcgtcccgactacacg

SEQ ID NO: 94541 - DNA, 25 bp, Homo sapien
atctttttcgggtcttccgtgaaat

SEQ ID NO: 94542 - DNA, 25 bp, Homo sapien
atctttttcgggacttccgtgaaat

SEQ ID NO: 94543 - DNA, 25 bp, Homo sapien
gtatgtatcctctctcccgtagggg

SEQ ID NO: 94544 - DNA, 25 bp, Homo sapien
gtatgtatcctcactcccgtagggg

SEQ ID NO: 94545 - DNA, 25 bp, Homo sapien
gagtagaaccatacgcccggggacg

SEQ ID NO: 94546 - DNA, 25 bp, Homo sapien
gagtagaaccattcgcccggggacg

SEQ ID NO: 94547 - DNA, 25 bp, Homo sapien
aaccgaccggtagactcactcctgg

SEQ ID NO: 94548 - DNA, 25 bp, Homo sapien
aaccgaccggtacactcactcctgg

SEQ ID NO: 94549 - DNA, 25 bp, Homo sapien
tacggtccgtgaaaacaacacacgg

SEQ ID NO: 94550 - DNA, 25 bp, Homo sapien
tacggtccgtgataacaacacacgg

SEQ ID NO: 94551 - DNA, 25 bp, Homo sapien
taagatggaggacacacgaacagaa

SEQ ID NO: 94552 - DNA, 25 bp, Homo sapien
taagatggaggagacacgaacagaa

SEQ ID NO: 94553 - DNA, 25 bp, Homo sapien
atactctgtgtggtcacaccggaac

SEQ ID NO: 94554 - DNA, 25 bp, Homo sapien
atactctgtgtgctcacaccggaac

SEQ ID NO: 94555 - DNA, 25 bp, Homo sapien
tcactttctcgtgactaaagtcgtc

SEQ ID NO: 94556 - DNA, 25 bp, Homo sapien
tcactttctcgtcactaaagtcgtc

SEQ ID NO: 94557 - DNA, 25 bp, Homo sapien
gatttagattgtcataaacatgctc

SEQ ID NO: 94558 - DNA, 25 bp, Homo sapien
gatttagattgtgataaacatgctc

SEQ ID NO: 94559 - DNA, 25 bp, Homo sapien
aataggtcttaaaagtcacgattcg

SEQ ID NO: 94560 - DNA, 25 bp, Homo sapien
aataggtcttaatagtcacgattcg

SEQ ID NO: 94561 - DNA, 25 bp, Homo sapien
aaatccgttcttttgtgtaacaatg

SEQ ID NO: 94562 - DNA, 25 bp, Homo sapien
aaatccgttcttatgtgtaacaatg

SEQ ID NO: 94563 - DNA, 25 bp, Homo sapien
gttcctttggtaaagtgttctgtca

SEQ ID NO: 94564 - DNA, 25 bp, Homo sapien
gttcctttggtatagtgttctgtca

SEQ ID NO: 94565 - DNA, 25 bp, Homo sapien
aagttttgtagaggtcacactttcg

SEQ ID NO: 94566 - DNA, 25 bp, Homo sapien
aagttttgtagacgtcacactttcg

SEQ ID NO: 94567 - DNA, 25 bp, Homo sapien
tgtctttgacagttacgtggttctc

SEQ ID NO: 94568 - DNA, 25 bp, Homo sapien
tgtctttgacagatacgtggttctc

SEQ ID NO: 94569 - DNA, 25 bp, Homo sapien
atttttgtctgatcgtggtgacact

SEQ ID NO: 94570 - DNA, 25 bp, Homo sapien
atttttgtctgaacgtggtgacact

SEQ ID NO: 94571 - DNA, 25 bp, Homo sapien
ctttccttgtctcattcctgtgaag

SEQ ID NO: 94572 - DNA, 25 bp, Homo sapien
ctttccttgtctgattcctgtgaag

SEQ ID NO: 94573 - DNA, 25 bp, Homo sapien
attgccgtcgattacctacgtggag

SEQ ID NO: 94574 - DNA, 25 bp, Homo sapien
attgccgtcgataacctacgtggag

SEQ ID NO: 94575 - DNA, 25 bp, Homo sapien
ctttagtcgtcacctttcttgtatg

SEQ ID NO: 94576 - DNA, 25 bp, Homo sapien
ctttagtcgtcagctttcttgtatg

SEQ ID NO: 94577 - DNA, 25 bp, Homo sapien
ttcttaaatacatacagtttttcgt

SEQ ID NO: 94578 - DNA, 25 bp, Homo sapien
ttcttaaatacaaacagtttttcgt

SEQ ID NO: 94579 - DNA, 25 bp, Homo sapien
ctctgtacccgattttaatttatgt

SEQ ID NO: 94580 - DNA, 25 bp, Homo sapien
ctctgtacccgaatttaatttatgt

SEQ ID NO: 94581 - DNA, 25 bp, Homo sapien
gcgccagcgagatcttcatgagagc

SEQ ID NO: 94582 - DNA, 25 bp, Homo sapien
gcgccagcgagaacttcatgagagc

SEQ ID NO: 94583 - DNA, 25 bp, Homo sapien
accctgaacgagtctcacaaagaag

SEQ ID NO: 94584 - DNA, 25 bp, Homo sapien
accctgaacgagactcacaaagaag

SEQ ID NO: 94585 - DNA, 25 bp, Homo sapien
aacttcgtagggacccaagtgacga

SEQ ID NO: 94586 - DNA, 25 bp, Homo sapien
aacttcgtagggtcccaagtgacga

SEQ ID NO: 94587 - DNA, 25 bp, Homo sapien
acgtttacgggaacaccagatgcga

SEQ ID NO: 94588 - DNA, 25 bp, Homo sapien
acgtttacgggatcaccagatgcga

SEQ ID NO: 94589 - DNA, 25 bp, Homo sapien
cgtcgttcctgatccacagttatga

SEQ ID NO: 94590 - DNA, 25 bp, Homo sapien
cgtcgttcctgaaccacagttatga

SEQ ID NO: 94591 - DNA, 25 bp, Homo sapien
ccgtccatctggttccggtttcgag

SEQ ID NO: 94592 - DNA, 25 bp, Homo sapien
ccgtccatctggatccggtttcgag

SEQ ID NO: 94593 - DNA, 25 bp, Homo sapien
acctacactcggtgtacttgaacac

SEQ ID NO: 94594 - DNA, 25 bp, Homo sapien
acctacactcggagtacttgaacac

SEQ ID NO: 94595 - DNA, 25 bp, Homo sapien
gtacagactcctttcgtcaagaaac

SEQ ID NO: 94596 - DNA, 25 bp, Homo sapien
gtacagactcctatcgtcaagaaac

SEQ ID NO: 94597 - DNA, 25 bp, Homo sapien
aggaacctccgtgtcttgtcggatc

SEQ ID NO: 94598 - DNA, 25 bp, Homo sapien
aggaacctccgtctcttgtcggatc

SEQ ID NO: 94599 - DNA, 25 bp, Homo sapien
tcgaaaccggtctcggttcccacgt

SEQ ID NO: 94600 - DNA, 25 bp, Homo sapien
tcgaaaccggtcacggttcccacgt

SEQ ID NO: 94601 - DNA, 25 bp, Homo sapien
ccagaacggtcgaggtctacctgta

SEQ ID NO: 94602 - DNA, 25 bp, Homo sapien
ccagaacggtcgtggtctacctgta

SEQ ID NO: 94603 - DNA, 25 bp, Homo sapien
tcagacgaaacgaggtctgacggtc

SEQ ID NO: 94604 - DNA, 25 bp, Homo sapien
tcagacgaaacgtggtctgacggtc

SEQ ID NO: 94605 - DNA, 25 bp, Homo sapien
gagagagagagtcagcactcaggac

SEQ ID NO: 94606 - DNA, 25 bp, Homo sapien
gagagagagagtgagcactcaggac

SEQ ID NO: 94607 - DNA, 25 bp, Homo sapien
tagtcgagaaaggacctcactgagt

SEQ ID NO: 94608 - DNA, 25 bp, Homo sapien
tagtcgagaaagcacctcactgagt

SEQ ID NO: 94609 - DNA, 25 bp, Homo sapien
cagtagaagactcagtgacatgagt

SEQ ID NO: 94610 - DNA, 25 bp, Homo sapien
cagtagaagactgagtgacatgagt

SEQ ID NO: 94611 - DNA, 25 bp, Homo sapien
acaccagagaattcggtcagtatgg

SEQ ID NO: 94612 - DNA, 25 bp, Homo sapien
acaccagagaatacggtcagtatgg

SEQ ID NO: 94613 - DNA, 25 bp, Homo sapien
cacaccaacgtgacctgttagaatg

SEQ ID NO: 94614 - DNA, 25 bp, Homo sapien
cacaccaacgtgtcctgttagaatg

SEQ ID NO: 94615 - DNA, 25 bp, Homo sapien
cgaagaaccatttcgtgtacaaggg

SEQ ID NO: 94616 - DNA, 25 bp, Homo sapien
cgaagaaccattacgtgtacaaggg

SEQ ID NO: 94617 - DNA, 25 bp, Homo sapien
tcgaccactgacagtgtctattgta

SEQ ID NO: 94618 - DNA, 25 bp, Homo sapien
tcgaccactgactgtgtctattgta

SEQ ID NO: 94619 - DNA, 25 bp, Homo sapien
gtacctctaccgacgtcgtttccga

SEQ ID NO: 94620 - DNA, 25 bp, Homo sapien
gtacctctaccgtcgtcgtttccga

SEQ ID NO: 94621 - DNA, 25 bp, Homo sapien
tagtactaaaccagtcttgtcccga

SEQ ID NO: 94622 - DNA, 25 bp, Homo sapien
tagtactaaacctgtcttgtcccga

SEQ ID NO: 94623 - DNA, 25 bp, Homo sapien
gtcacagagactcgtgttatcaaga

SEQ ID NO: 94624 - DNA, 25 bp, Homo sapien
gtcacagagactggtgttatcaaga

SEQ ID NO: 94625 - DNA, 25 bp, Homo sapien
cgtcaagagacgatccgtaatttga

SEQ ID NO: 94626 - DNA, 25 bp, Homo sapien
cgtcaagagacgttccgtaatttga

SEQ ID NO: 94627 - DNA, 25 bp, Homo sapien
tctctcgagggtcgacgtatcaaag

SEQ ID NO: 94628 - DNA, 25 bp, Homo sapien
tctctcgagggtggacgtatcaaag

SEQ ID NO: 94629 - DNA, 25 bp, Homo sapien
tactcagagacttctctgtcttaag

SEQ ID NO: 94630 - DNA, 25 bp, Homo sapien
tactcagagactactctgtcttaag

SEQ ID NO: 94631 - DNA, 25 bp, Homo sapien
ttgagtcgacttcgtagtctaatag

SEQ ID NO: 94632 - DNA, 25 bp, Homo sapien
ttgagtcgacttggtagtctaatag

SEQ ID NO: 94633 - DNA, 25 bp, Homo sapien
ttattcggacctaaaaagactcacg

SEQ ID NO: 94634 - DNA, 25 bp, Homo sapien
ttattcggaccttaaaagactcacg

SEQ ID NO: 94635 - DNA, 25 bp, Homo sapien
catttggagtctcactaaagacaca

SEQ ID NO: 94636 - DNA, 25 bp, Homo sapien
catttggagtctgactaaagacaca

SEQ ID NO: 94637 - DNA, 25 bp, Homo sapien
tgtgcacgacctcataaagtaacag

SEQ ID NO: 94638 - DNA, 25 bp, Homo sapien
tgtgcacgacctgataaagtaacag

SEQ ID NO: 94639 - DNA, 25 bp, Homo sapien
gtgcagttagagatcaagactctag

SEQ ID NO: 94640 - DNA, 25 bp, Homo sapien
gtgcagttagagttcaagactctag

SEQ ID NO: 94641 - DNA, 25 bp, Homo sapien
gcgacgagtttgtgtatcgacacac

SEQ ID NO: 94642 - DNA, 25 bp, Homo sapien
gcgacgagtttgagtatcgacacac

SEQ ID NO: 94643 - DNA, 25 bp, Homo sapien
gtacaagtattctaggggttacaac

SEQ ID NO: 94644 - DNA, 25 bp, Homo sapien
gtacaagtattcaaggggttacaac

SEQ ID NO: 94645 - DNA, 25 bp, Homo sapien
ttacaaggtctgtaggggcgattcg

SEQ ID NO: 94646 - DNA, 25 bp, Homo sapien
ttacaaggtctgaaggggcgattcg

SEQ ID NO: 94647 - DNA, 25 bp, Homo sapien
agaacttctacgtcggcgtgcaccc

SEQ ID NO: 94648 - DNA, 25 bp, Homo sapien
agaacttctacgacggcgtgcaccc

SEQ ID NO: 94649 - DNA, 25 bp, Homo sapien
attcttcgtctaaggggagtccact

SEQ ID NO: 94650 - DNA, 25 bp, Homo sapien
attcttcgtctatggggagtccact

SEQ ID NO: 94651 - DNA, 25 bp, Homo sapien
ctacgacttataggaccggtctctt

SEQ ID NO: 94652 - DNA, 25 bp, Homo sapien
ctacgacttatacgaccggtctctt

SEQ ID NO: 94653 - DNA, 25 bp, Homo sapien
tacgacaagagtcacgtgaggttcg

SEQ ID NO: 94654 - DNA, 25 bp, Homo sapien
tacgacaagagtgacgtgaggttcg

SEQ ID NO: 94655 - DNA, 25 bp, Homo sapien
aactgacggaaaaccgaccgtcgtg

SEQ ID NO: 94656 - DNA, 25 bp, Homo sapien
aactgacggaaatccgaccgtcgtg

SEQ ID NO: 94657 - DNA, 25 bp, Homo sapien
ctgacgtaacgaactcgtcaatgta

SEQ ID NO: 94658 - DNA, 25 bp, Homo sapien
ctgacgtaacgatctcgtcaatgta

SEQ ID NO: 94659 - DNA, 25 bp, Homo sapien
gcagtgggcaccagtggtaccatcc

SEQ ID NO: 94660 - DNA, 25 bp, Homo sapien
gcagtgggcacctgtggtaccatcc

SEQ ID NO: 94661 - DNA, 25 bp, Homo sapien
gtcaagaaacaattggacccgtacc

SEQ ID NO: 94662 - DNA, 25 bp, Homo sapien
gtcaagaaacaaatggacccgtacc

SEQ ID NO: 94663 - DNA, 25 bp, Homo sapien
catgaacaagaatgaacctactaag

SEQ ID NO: 94664 - DNA, 25 bp, Homo sapien
catgaacaagaaagaacctactaag

SEQ ID NO: 94665 - DNA, 25 bp, Homo sapien
tgtactaaggaaacggaccttacag

SEQ ID NO: 94666 - DNA, 25 bp, Homo sapien
tgtactaaggaatcggaccttacag

SEQ ID NO: 94667 - DNA, 25 bp, Homo sapien
acaaccaacgacgactctacgatag

SEQ ID NO: 94668 - DNA, 25 bp, Homo sapien
acaaccaacgaccactctacgatag

SEQ ID NO: 94669 - DNA, 25 bp, Homo sapien
cagtaaaaacgaacacgtcttagta

SEQ ID NO: 94670 - DNA, 25 bp, Homo sapien
cagtaaaaacgatcacgtcttagta

SEQ ID NO: 94671 - DNA, 25 bp, Homo sapien
gcattagtattatggtgtcactgtg

SEQ ID NO: 94672 - DNA, 25 bp, Homo sapien
gcattagtattaaggtgtcactgtg

SEQ ID NO: 94673 - DNA, 25 bp, Homo sapien
catgatattcgtttgtctacgtagg

SEQ ID NO: 94674 - DNA, 25 bp, Homo sapien
catgatattcgtatgtctacgtagg

SEQ ID NO: 94675 - DNA, 25 bp, Homo sapien
cgtaattattcgaagtcgtgatcag

SEQ ID NO: 94676 - DNA, 25 bp, Homo sapien
cgtaattattcgtagtcgtgatcag

SEQ ID NO: 94677 - DNA, 25 bp, Homo sapien
agatcctttcgtaccggtgtacgtg

SEQ ID NO: 94678 - DNA, 25 bp, Homo sapien
agatcctttcgttccggtgtacgtg

SEQ ID NO: 94679 - DNA, 25 bp, Homo sapien
tacgagtttttacctcctttcgtgt

SEQ ID NO: 94680 - DNA, 25 bp, Homo sapien
tacgagtttttagctcctttcgtgt

SEQ ID NO: 94681 - DNA, 25 bp, Homo sapien
gtacattaacaaggtcgctacctta

SEQ ID NO: 94682 - DNA, 25 bp, Homo sapien
gtacattaacaacgtcgctacctta

SEQ ID NO: 94683 - DNA, 25 bp, Homo sapien
gtcgacattacagttcctataagtc

SEQ ID NO: 94684 - DNA, 25 bp, Homo sapien
gtcgacattacacttcctataagtc

SEQ ID NO: 94685 - DNA, 25 bp, Homo sapien
gggtgatacacgaattctcagtagg

SEQ ID NO: 94686 - DNA, 25 bp, Homo sapien
gggtgatacacgtattctcagtagg

SEQ ID NO: 94687 - DNA, 25 bp, Homo sapien
ggtgatctctagtctttcttcgtgg

SEQ ID NO: 94688 - DNA, 25 bp, Homo sapien
ggtgatctctagactttcttcgtgg

SEQ ID NO: 94689 - DNA, 25 bp, Homo sapien
ggagttcgaagcatcggacctagag

SEQ ID NO: 94690 - DNA, 25 bp, Homo sapien
ggagttcgaagcttcggacctagag

SEQ ID NO: 94691 - DNA, 25 bp, Homo sapien
cccggtttcagtgtacctgtcccgg

SEQ ID NO: 94692 - DNA, 25 bp, Homo sapien
cccggtttcagtctacctgtcccgg

SEQ ID NO: 94693 - DNA, 25 bp, Homo sapien
cggggtctcctctaccggaccggtg

SEQ ID NO: 94694 - DNA, 25 bp, Homo sapien
cggggtctcctcaaccggaccggtg

SEQ ID NO: 94695 - DNA, 25 bp, Homo sapien
tctggttgtctcttcccaacactgg

SEQ ID NO: 94696 - DNA, 25 bp, Homo sapien
tctggttgtctcatcccaacactgg

SEQ ID NO: 94697 - DNA, 25 bp, Homo sapien
gtacttataatccacagacagttag

SEQ ID NO: 94698 - DNA, 25 bp, Homo sapien
gtacttataatcgacagacagttag

SEQ ID NO: 94699 - DNA, 25 bp, Homo sapien
acaaactaaagtgcacagtacattg

SEQ ID NO: 94700 - DNA, 25 bp, Homo sapien
acaaactaaagtccacagtacattg

SEQ ID NO: 94701 - DNA, 25 bp, Homo sapien
tttagaaccgctactcagtgagttg

SEQ ID NO: 94702 - DNA, 25 bp, Homo sapien
tttagaaccgcttctcagtgagttg

SEQ ID NO: 94703 - DNA, 25 bp, Homo sapien
tcagaagacccgaacctgagtacaa

SEQ ID NO: 94704 - DNA, 25 bp, Homo sapien
tcagaagacccgtacctgagtacaa

SEQ ID NO: 94705 - DNA, 25 bp, Homo sapien
atacgagatcctgtacatggagaga

SEQ ID NO: 94706 - DNA, 25 bp, Homo sapien
atacgagatcctctacatggagaga

SEQ ID NO: 94707 - DNA, 25 bp, Homo sapien
cctagctacctcgtcatcaacgtga

SEQ ID NO: 94708 - DNA, 25 bp, Homo sapien
cctagctacctcctcatcaacgtga

SEQ ID NO: 94709 - DNA, 25 bp, Homo sapien
cctcgacaaacgtagacagacacgc

SEQ ID NO: 94710 - DNA, 25 bp, Homo sapien
cctcgacaaacgaagacagacacgc

SEQ ID NO: 94711 - DNA, 25 bp, Homo sapien
cggacccctttgccctacagtccga

SEQ ID NO: 94712 - DNA, 25 bp, Homo sapien
cggacccctttggcctacagtccga

SEQ ID NO: 94713 - DNA, 25 bp, Homo sapien
cagaccatccttggtcgacaatcca

SEQ ID NO: 94714 - DNA, 25 bp, Homo sapien
cagaccatccttcgtcgacaatcca

SEQ ID NO: 94715 - DNA, 25 bp, Homo sapien
atacgattcttttcaagtaaccgtg

SEQ ID NO: 94716 - DNA, 25 bp, Homo sapien
atacgattctttacaagtaaccgtg

SEQ ID NO: 94717 - DNA, 25 bp, Homo sapien
tgtcttcctcggttcgaaaaaacgt

SEQ ID NO: 94718 - DNA, 25 bp, Homo sapien
tgtcttcctcggatcgaaaaaacgt

SEQ ID NO: 94719 - DNA, 25 bp, Homo sapien
ttacttcctactctacgggttcatg

SEQ ID NO: 94720 - DNA, 25 bp, Homo sapien
ttacttcctactgtacgggttcatg

SEQ ID NO: 94721 - DNA, 25 bp, Homo sapien
tgttctcctcgacgtcggggcgacc

SEQ ID NO: 94722 - DNA, 25 bp, Homo sapien
tgttctcctcgaggtcggggcgacc

SEQ ID NO: 94723 - DNA, 25 bp, Homo sapien
gtcataagttcaaggacaaatctca

SEQ ID NO: 94724 - DNA, 25 bp, Homo sapien
gtcataagttcatggacaaatctca

SEQ ID NO: 94725 - DNA, 25 bp, Homo sapien
taaacgaacactgtactggttaaga

SEQ ID NO: 94726 - DNA, 25 bp, Homo sapien
taaacgaacactctactggttaaga

SEQ ID NO: 94727 - DNA, 25 bp, Homo sapien
ggtataactccctaacgtcccatga

SEQ ID NO: 94728 - DNA, 25 bp, Homo sapien
ggtataactcccaaacgtcccatga

SEQ ID NO: 94729 - DNA, 25 bp, Homo sapien
aaataagtccctgaggtccattata

SEQ ID NO: 94730 - DNA, 25 bp, Homo sapien
aaataagtccctcaggtccattata

SEQ ID NO: 94731 - DNA, 25 bp, Homo sapien
taaggagaagcctgtgccagtccta

SEQ ID NO: 94732 - DNA, 25 bp, Homo sapien
taaggagaagccagtgccagtccta

SEQ ID NO: 94733 - DNA, 25 bp, Homo sapien
acaccggagagcacttcggggagta

SEQ ID NO: 94734 - DNA, 25 bp, Homo sapien
acaccggagagctcttcggggagta

SEQ ID NO: 94735 - DNA, 25 bp, Homo sapien
tcgtcgaggaatcccgcgcatggag

SEQ ID NO: 94736 - DNA, 25 bp, Homo sapien
tcgtcgaggaatgccgcgcatggag

SEQ ID NO: 94737 - DNA, 25 bp, Homo sapien
cgtgtcattatatgccggcacagga

SEQ ID NO: 94738 - DNA, 25 bp, Homo sapien
cgtgtcattataagccggcacagga

SEQ ID NO: 94739 - DNA, 25 bp, Homo sapien
ttacacactttgtattccttcgagt

SEQ ID NO: 94740 - DNA, 25 bp, Homo sapien
ttacacactttgaattccttcgagt

SEQ ID NO: 94741 - DNA, 25 bp, Homo sapien
tgacctattgtgtcccgtctagaga

SEQ ID NO: 94742 - DNA, 25 bp, Homo sapien
tgacctattgtgacccgtctagaga

SEQ ID NO: 94743 - DNA, 25 bp, Homo sapien
tcatctctacggaatccagacgact

SEQ ID NO: 94744 - DNA, 25 bp, Homo sapien
tcatctctacggtatccagacgact

SEQ ID NO: 94745 - DNA, 25 bp, Homo sapien
ccctcttctctcgtggtcaagacag

SEQ ID NO: 94746 - DNA, 25 bp, Homo sapien
ccctcttctctcctggtcaagacag

SEQ ID NO: 94747 - DNA, 25 bp, Homo sapien
cctcccgtgttttcttgttatagaa

SEQ ID NO: 94748 - DNA, 25 bp, Homo sapien
cctcccgtgtttacttgttatagaa

SEQ ID NO: 94749 - DNA, 25 bp, Homo sapien
tcccagtagactcctggttagaaag

SEQ ID NO: 94750 - DNA, 25 bp, Homo sapien
tcccagtagactgctggttagaaag

SEQ ID NO: 94751 - DNA, 25 bp, Homo sapien
ccgggactagactccgaccaaagtg

SEQ ID NO: 94752 - DNA, 25 bp, Homo sapien
ccgggactagacaccgaccaaagtg

SEQ ID NO: 94753 - DNA, 25 bp, Homo sapien
agagactcgagtcaccataaaactc

SEQ ID NO: 94754 - DNA, 25 bp, Homo sapien
agagactcgagtgaccataaaactc

SEQ ID NO: 94755 - DNA, 25 bp, Homo sapien
gtaaagaactatcgttccaagtaaa

SEQ ID NO: 94756 - DNA, 25 bp, Homo sapien
gtaaagaactatggttccaagtaaa

SEQ ID NO: 94757 - DNA, 25 bp, Homo sapien
gaaagtaatacttttcccatgatgt

SEQ ID NO: 94758 - DNA, 25 bp, Homo sapien
gaaagtaatactattcccatgatgt

SEQ ID NO: 94759 - DNA, 25 bp, Homo sapien
tgtattagacaataccgtcttattg

SEQ ID NO: 94760 - DNA, 25 bp, Homo sapien
tgtattagacaaaaccgtcttattg

SEQ ID NO: 94761 - DNA, 25 bp, Homo sapien
ttgacctcggacacccggaagtctc

SEQ ID NO: 94762 - DNA, 25 bp, Homo sapien
ttgacctcggactcccggaagtctc

SEQ ID NO: 94763 - DNA, 25 bp, Homo sapien
atcaacctggagtcccgagggactc

SEQ ID NO: 94764 - DNA, 25 bp, Homo sapien
atcaacctggagacccgagggactc

SEQ ID NO: 94765 - DNA, 25 bp, Homo sapien
tccaccggtgtgacctcaaaagtcg

SEQ ID NO: 94766 - DNA, 25 bp, Homo sapien
tccaccggtgtgtcctcaaaagtcg

SEQ ID NO: 94767 - DNA, 25 bp, Homo sapien
gttcattgatagtaaacctcacaga

SEQ ID NO: 94768 - DNA, 25 bp, Homo sapien
gttcattgatagaaaacctcacaga

SEQ ID NO: 94769 - DNA, 25 bp, Homo sapien
cctaacagtaaaagtacagcaccga

SEQ ID NO: 94770 - DNA, 25 bp, Homo sapien
cctaacagtaaatgtacagcaccga

SEQ ID NO: 94771 - DNA, 25 bp, Homo sapien
taaggtttataatgaggaccatcct

SEQ ID NO: 94772 - DNA, 25 bp, Homo sapien
taaggtttataaagaggaccatcct

SEQ ID NO: 94773 - DNA, 25 bp, Homo sapien
tccttgaagttatggtacaacactc

SEQ ID NO: 94774 - DNA, 25 bp, Homo sapien
tccttgaagttaaggtacaacactc

SEQ ID NO: 94775 - DNA, 25 bp, Homo sapien
tcctcattaagttagggtcaaccga

SEQ ID NO: 94776 - DNA, 25 bp, Homo sapien
tcctcattaagtaagggtcaaccga

SEQ ID NO: 94777 - DNA, 25 bp, Homo sapien
ttcggttttcaaagttggactccat

SEQ ID NO: 94778 - DNA, 25 bp, Homo sapien
ttcggttttcaatgttggactccat

SEQ ID NO: 94779 - DNA, 25 bp, Homo sapien
cggaattacgaagaaaccaacagag

SEQ ID NO: 94780 - DNA, 25 bp, Homo sapien
cggaattacgaacaaaccaacagag

SEQ ID NO: 94781 - DNA, 25 bp, Homo sapien
gactattagagacaaacgacccaac

SEQ ID NO: 94782 - DNA, 25 bp, Homo sapien
gactattagagagaaacgacccaac

SEQ ID NO: 94783 - DNA, 25 bp, Homo sapien
aacttgttgctaaacacgaggaccg

SEQ ID NO: 94784 - DNA, 25 bp, Homo sapien
aacttgttgctatacacgaggaccg

SEQ ID NO: 94785 - DNA, 25 bp, Homo sapien
ttgacgtggaactacatcaacggcc

SEQ ID NO: 94786 - DNA, 25 bp, Homo sapien
ttgacgtggaacaacatcaacggcc

SEQ ID NO: 94787 - DNA, 25 bp, Homo sapien
gcgtggtaccggtttcttagagacc

SEQ ID NO: 94788 - DNA, 25 bp, Homo sapien
gcgtggtaccggattcttagagacc

SEQ ID NO: 94789 - DNA, 25 bp, Homo sapien
taagaagtgtacacatcccaaagag

SEQ ID NO: 94790 - DNA, 25 bp, Homo sapien
taagaagtgtactcatcccaaagag

SEQ ID NO: 94791 - DNA, 25 bp, Homo sapien
agaaacgaagggtaaaccccaatag

SEQ ID NO: 94792 - DNA, 25 bp, Homo sapien
agaaacgaagggaaaaccccaatag

SEQ ID NO: 94793 - DNA, 25 bp, Homo sapien
aagaaggtactctctccactaagtc

SEQ ID NO: 94794 - DNA, 25 bp, Homo sapien
aagaaggtactcactccactaagtc

SEQ ID NO: 94795 - DNA, 25 bp, Homo sapien
gttaagacgatttccaaggaccaac

SEQ ID NO: 94796 - DNA, 25 bp, Homo sapien
gttaagacgattaccaaggaccaac

SEQ ID NO: 94797 - DNA, 25 bp, Homo sapien
cagtgttctgaaaccgtctctacag

SEQ ID NO: 94798 - DNA, 25 bp, Homo sapien
cagtgttctgaatccgtctctacag

SEQ ID NO: 94799 - DNA, 25 bp, Homo sapien
tgtatactttgtgtctcgtattaac

SEQ ID NO: 94800 - DNA, 25 bp, Homo sapien
tgtatactttgtctctcgtattaac

SEQ ID NO: 94801 - DNA, 25 bp, Homo sapien
tctcgtgaaccgtctctattgaact

SEQ ID NO: 94802 - DNA, 25 bp, Homo sapien
tctcgtgaaccgactctattgaact

SEQ ID NO: 94803 - DNA, 25 bp, Homo sapien
gacgtgaccgcctgcctttcggagt

SEQ ID NO: 94804 - DNA, 25 bp, Homo sapien
gacgtgaccgccagcctttcggagt

SEQ ID NO: 94805 - DNA, 25 bp, Homo sapien
gaaggtacccacagcgctttccgta

SEQ ID NO: 94806 - DNA, 25 bp, Homo sapien
gaaggtacccactgcgctttccgta

SEQ ID NO: 94807 - DNA, 25 bp, Homo sapien
agtgacgaccgacgaatcttttatc

SEQ ID NO: 94808 - DNA, 25 bp, Homo sapien
agtgacgaccgaggaatcttttatc

SEQ ID NO: 94809 - DNA, 25 bp, Homo sapien
tgtacttgtacacattgtattcggt

SEQ ID NO: 94810 - DNA, 25 bp, Homo sapien
tgtacttgtacagattgtattcggt

SEQ ID NO: 94811 - DNA, 25 bp, Homo sapien
tggacgtgtcacctttatttccgtg

SEQ ID NO: 94812 - DNA, 25 bp, Homo sapien
tggacgtgtcacgtttatttccgtg

SEQ ID NO: 94813 - DNA, 25 bp, Homo sapien
tcggccgcgggctgttcttcgacct

SEQ ID NO: 94814 - DNA, 25 bp, Homo sapien
tcggccgcgggcagttcttcgacct

SEQ ID NO: 94815 - DNA, 25 bp, Homo sapien
cagagccggtggagctactgcccca

SEQ ID NO: 94816 - DNA, 25 bp, Homo sapien
cagagccggtggtgctactgcccca

SEQ ID NO: 94817 - DNA, 25 bp, Homo sapien
accctcgtgcgagagggccccgtag

SEQ ID NO: 94818 - DNA, 25 bp, Homo sapien
accctcgtgcgacagggccccgtag

SEQ ID NO: 94819 - DNA, 25 bp, Homo sapien
cagtccatgaagagcgccccgtcga

SEQ ID NO: 94820 - DNA, 25 bp, Homo sapien
cagtccatgaagtgcgccccgtcga

SEQ ID NO: 94821 - DNA, 25 bp, Homo sapien
caggcttagctactatcgtcccgag

SEQ ID NO: 94822 - DNA, 25 bp, Homo sapien
caggcttagctagtatcgtcccgag

SEQ ID NO: 94823 - DNA, 25 bp, Homo sapien
agggtcttgtcgttcccgtcacccg

SEQ ID NO: 94824 - DNA, 25 bp, Homo sapien
agggtcttgtcgatcccgtcacccg

SEQ ID NO: 94825 - DNA, 25 bp, Homo sapien
ctcaggtctggtcacggtctacctc

SEQ ID NO: 94826 - DNA, 25 bp, Homo sapien
ctcaggtctggtgacggtctacctc

SEQ ID NO: 94827 - DNA, 25 bp, Homo sapien
acctctggtcttagccggtcacgtc

SEQ ID NO: 94828 - DNA, 25 bp, Homo sapien
acctctggtctttgccggtcacgtc

SEQ ID NO: 94829 - DNA, 25 bp, Homo sapien
agcgggtctctcttcaccgcgagat

SEQ ID NO: 94830 - DNA, 25 bp, Homo sapien
agcgggtctctcatcaccgcgagat

SEQ ID NO: 94831 - DNA, 25 bp, Homo sapien
tgtaccctctactctgcagggacgt

SEQ ID NO: 94832 - DNA, 25 bp, Homo sapien
tgtaccctctacactgcagggacgt

SEQ ID NO: 94833 - DNA, 25 bp, Homo sapien
acgaaggtcccaacctaacatggga

SEQ ID NO: 94834 - DNA, 25 bp, Homo sapien
acgaaggtcccatcctaacatggga

SEQ ID NO: 94835 - DNA, 25 bp, Homo sapien
gacagtctccttcgagtcaatggta

SEQ ID NO: 94836 - DNA, 25 bp, Homo sapien
gacagtctccttggagtcaatggta

SEQ ID NO: 94837 - DNA, 25 bp, Homo sapien
catctatcgtttaacgtttatggtt

SEQ ID NO: 94838 - DNA, 25 bp, Homo sapien
catctatcgttttacgtttatggtt

SEQ ID NO: 94839 - DNA, 25 bp, Homo sapien
tccctaacgttggtctcaagtatga

SEQ ID NO: 94840 - DNA, 25 bp, Homo sapien
tccctaacgttgctctcaagtatga

SEQ ID NO: 94841 - DNA, 25 bp, Homo sapien
atcaggcaccgtatttctgataaga

SEQ ID NO: 94842 - DNA, 25 bp, Homo sapien
atcaggcaccgtttttctgataaga

SEQ ID NO: 94843 - DNA, 25 bp, Homo sapien
ccttaagtccctgtgcacgttcaaa

SEQ ID NO: 94844 - DNA, 25 bp, Homo sapien
ccttaagtccctctgcacgttcaaa

SEQ ID NO: 94845 - DNA, 25 bp, Homo sapien
gacaccaactaggtcttcgacaggg

SEQ ID NO: 94846 - DNA, 25 bp, Homo sapien
gacaccaactagctcttcgacaggg

SEQ ID NO: 94847 - DNA, 25 bp, Homo sapien
ggacactacctactattccgggtcg

SEQ ID NO: 94848 - DNA, 25 bp, Homo sapien
ggacactacctagtattccgggtcg

SEQ ID NO: 94849 - DNA, 25 bp, Homo sapien
cccatccggataagtctacgttccg

SEQ ID NO: 94850 - DNA, 25 bp, Homo sapien
cccatccggatatgtctacgttccg

SEQ ID NO: 94851 - DNA, 25 bp, Homo sapien
ccttaccggtactgtgacgaaaact

SEQ ID NO: 94852 - DNA, 25 bp, Homo sapien
ccttaccggtacagtgacgaaaact

SEQ ID NO: 94853 - DNA, 25 bp, Homo sapien
agattgttttatacagaacgacaac

SEQ ID NO: 94854 - DNA, 25 bp, Homo sapien
agattgttttattcagaacgacaac

SEQ ID NO: 94855 - DNA, 25 bp, Homo sapien
gtcgtggtaccgttcggtgcctctt

SEQ ID NO: 94856 - DNA, 25 bp, Homo sapien
gtcgtggtaccgatcggtgcctctt

SEQ ID NO: 94857 - DNA, 25 bp, Homo sapien
tccttcttccgctacgggtgccggt

SEQ ID NO: 94858 - DNA, 25 bp, Homo sapien
tccttcttccgcaacgggtgccggt

SEQ ID NO: 94859 - DNA, 25 bp, Homo sapien
tttctcgtcggaagagagtcaccct

SEQ ID NO: 94860 - DNA, 25 bp, Homo sapien
tttctcgtcggatgagagtcaccct

SEQ ID NO: 94861 - DNA, 25 bp, Homo sapien
tctaccgaccgttgatcttccgtgt

SEQ ID NO: 94862 - DNA, 25 bp, Homo sapien
tctaccgaccgtagatcttccgtgt

SEQ ID NO: 94863 - DNA, 25 bp, Homo sapien
agactgtagacagaaagtgttccct

SEQ ID NO: 94864 - DNA, 25 bp, Homo sapien
agactgtagacacaaagtgttccct

SEQ ID NO: 94865 - DNA, 25 bp, Homo sapien
caggaagcaacaaccggtaccacct

SEQ ID NO: 94866 - DNA, 25 bp, Homo sapien
caggaagcaacatccggtaccacct

SEQ ID NO: 94867 - DNA, 25 bp, Homo sapien
acagggactaccaccgtcttctagg

SEQ ID NO: 94868 - DNA, 25 bp, Homo sapien
acagggactacctccgtcttctagg

SEQ ID NO: 94869 - DNA, 25 bp, Homo sapien
agtgaggagtgtctcactttgacga

SEQ ID NO: 94870 - DNA, 25 bp, Homo sapien
agtgaggagtgtgtcactttgacga

SEQ ID NO: 94871 - DNA, 25 bp, Homo sapien
gactcggtgtatacccctggtgtgt

SEQ ID NO: 94872 - DNA, 25 bp, Homo sapien
gactcggtgtattcccctggtgtgt

SEQ ID NO: 94873 - DNA, 25 bp, Homo sapien
tcggtcgagtgtcacgccggtctcc

SEQ ID NO: 94874 - DNA, 25 bp, Homo sapien
tcggtcgagtgtgacgccggtctcc

SEQ ID NO: 94875 - DNA, 25 bp, Homo sapien
acacatttcggtttcttaagactgg

SEQ ID NO: 94876 - DNA, 25 bp, Homo sapien
acacatttcggtatcttaagactgg

SEQ ID NO: 94877 - DNA, 25 bp, Homo sapien
actacatttctttcgcacaaggagg

SEQ ID NO: 94878 - DNA, 25 bp, Homo sapien
actacatttcttacgcacaaggagg

SEQ ID NO: 94879 - DNA, 25 bp, Homo sapien
ggaattctttctcagaactgagaga

SEQ ID NO: 94880 - DNA, 25 bp, Homo sapien
ggaattctttctgagaactgagaga

SEQ ID NO: 94881 - DNA, 25 bp, Homo sapien
acgtagttggtgacaactgttagac

SEQ ID NO: 94882 - DNA, 25 bp, Homo sapien
acgtagttggtgtcaactgttagac

SEQ ID NO: 94883 - DNA, 25 bp, Homo sapien
gtaagaggtggtttcagtggtctcc

SEQ ID NO: 94884 - DNA, 25 bp, Homo sapien
gtaagaggtggtatcagtggtctcc

SEQ ID NO: 94885 - DNA, 25 bp, Homo sapien
gttaggttagtatccccgtatttga

SEQ ID NO: 94886 - DNA, 25 bp, Homo sapien
gttaggttagtaaccccgtatttga

SEQ ID NO: 94887 - DNA, 25 bp, Homo sapien
ctcgtggttttaacagtttcttgtg

SEQ ID NO: 94888 - DNA, 25 bp, Homo sapien
ctcgtggttttatcagtttcttgtg

SEQ ID NO: 94889 - DNA, 25 bp, Homo sapien
tagttttttcctttgcaagacgtac

SEQ ID NO: 94890 - DNA, 25 bp, Homo sapien
tagttttttcctatgcaagacgtac

SEQ ID NO: 94891 - DNA, 25 bp, Homo sapien
ataaggcacgtcctgtggtggagta

SEQ ID NO: 94892 - DNA, 25 bp, Homo sapien
ataaggcacgtcgtgtggtggagta

SEQ ID NO: 94893 - DNA, 25 bp, Homo sapien
aacaagacttcgtcggacgcagaga

SEQ ID NO: 94894 - DNA, 25 bp, Homo sapien
aacaagacttcgacggacgcagaga

SEQ ID NO: 94895 - DNA, 25 bp, Homo sapien
gaagaggggtctctcccgcgtagaa

SEQ ID NO: 94896 - DNA, 25 bp, Homo sapien
gaagaggggtctgtcccgcgtagaa

SEQ ID NO: 94897 - DNA, 25 bp, Homo sapien
cgaaacggtgggaagccctcgtgca

SEQ ID NO: 94898 - DNA, 25 bp, Homo sapien
cgaaacggtgggtagccctcgtgca

SEQ ID NO: 94899 - DNA, 25 bp, Homo sapien
tccacaggtggagtccgtgcttgga

SEQ ID NO: 94900 - DNA, 25 bp, Homo sapien
tccacaggtggactccgtgcttgga

SEQ ID NO: 94901 - DNA, 25 bp, Homo sapien
aaccacagaccttcggccgctgcga

SEQ ID NO: 94902 - DNA, 25 bp, Homo sapien
aaccacagacctacggccgctgcga

SEQ ID NO: 94903 - DNA, 25 bp, Homo sapien
aaagatacagaccttcccagtcacg

SEQ ID NO: 94904 - DNA, 25 bp, Homo sapien
aaagatacagacgttcccagtcacg

SEQ ID NO: 94905 - DNA, 25 bp, Homo sapien
agaaggacaagagactccgaaatat

SEQ ID NO: 94906 - DNA, 25 bp, Homo sapien
agaaggacaagacactccgaaatat

SEQ ID NO: 94907 - DNA, 25 bp, Homo sapien
gtaaaattagacgacgccgaacctc

SEQ ID NO: 94908 - DNA, 25 bp, Homo sapien
gtaaaattagaccacgccgaacctc

SEQ ID NO: 94909 - DNA, 25 bp, Homo sapien
ggtgacgtcaaacgaccctctttcc

SEQ ID NO: 94910 - DNA, 25 bp, Homo sapien
ggtgacgtcaaaggaccctctttcc

SEQ ID NO: 94911 - DNA, 25 bp, Homo sapien
cgtcaaagacgtgcatcgcgctccg

SEQ ID NO: 94912 - DNA, 25 bp, Homo sapien
cgtcaaagacgtccatcgcgctccg

SEQ ID NO: 94913 - DNA, 25 bp, Homo sapien
tctgaaacctctagtcgacggtctg

SEQ ID NO: 94914 - DNA, 25 bp, Homo sapien
tctgaaacctcttgtcgacggtctg

SEQ ID NO: 94915 - DNA, 25 bp, Homo sapien
actttagattttccttgactggtag

SEQ ID NO: 94916 - DNA, 25 bp, Homo sapien
actttagattttgcttgactggtag

SEQ ID NO: 94917 - DNA, 25 bp, Homo sapien
catacttctctgtttccattatggg

SEQ ID NO: 94918 - DNA, 25 bp, Homo sapien
catacttctctgattccattatggg

SEQ ID NO: 94919 - DNA, 25 bp, Homo sapien
ccctagtccactgtgctccatgggt

SEQ ID NO: 94920 - DNA, 25 bp, Homo sapien
ccctagtccactctgctccatgggt

SEQ ID NO: 94921 - DNA, 25 bp, Homo sapien
caccttcctagtctaccttttggtg

SEQ ID NO: 94922 - DNA, 25 bp, Homo sapien
caccttcctagtgtaccttttggtg

SEQ ID NO: 94923 - DNA, 25 bp, Homo sapien
aattttcactttcatgtaatcgtgg

SEQ ID NO: 94924 - DNA, 25 bp, Homo sapien
aattttcactttgatgtaatcgtgg

SEQ ID NO: 94925 - DNA, 25 bp, Homo sapien
aaataaaccttctgcagatgtgttg

SEQ ID NO: 94926 - DNA, 25 bp, Homo sapien
aaataaaccttcagcagatgtgttg

SEQ ID NO: 94927 - DNA, 25 bp, Homo sapien
atagcgacgttcttcgacagaagga

SEQ ID NO: 94928 - DNA, 25 bp, Homo sapien
atagcgacgttcatcgacagaagga

SEQ ID NO: 94929 - DNA, 25 bp, Homo sapien
atacagggctcaccactgaggtgag

SEQ ID NO: 94930 - DNA, 25 bp, Homo sapien
atacagggctcagcactgaggtgag

SEQ ID NO: 94931 - DNA, 25 bp, Homo sapien
gatcagtgggtagaagtgagacctc

SEQ ID NO: 94932 - DNA, 25 bp, Homo sapien
gatcagtgggtacaagtgagacctc

SEQ ID NO: 94933 - DNA, 25 bp, Homo sapien
acctaagggttgacagtcggaggtc

SEQ ID NO: 94934 - DNA, 25 bp, Homo sapien
acctaagggttgtcagtcggaggtc

SEQ ID NO: 94935 - DNA, 25 bp, Homo sapien
aactagaggtggaccgatcagaccc

SEQ ID NO: 94936 - DNA, 25 bp, Homo sapien
aactagaggtggtccgatcagaccc

SEQ ID NO: 94937 - DNA, 25 bp, Homo sapien
cgacatcaggagcagacgaaccgcc

SEQ ID NO: 94938 - DNA, 25 bp, Homo sapien
cgacatcaggaggagacgaaccgcc

SEQ ID NO: 94939 - DNA, 25 bp, Homo sapien
aacctgggtccaacgaaccgcgacg

SEQ ID NO: 94940 - DNA, 25 bp, Homo sapien
aacctgggtccatcgaaccgcgacg

SEQ ID NO: 94941 - DNA, 25 bp, Homo sapien
agatccgaggtgcaccgacccgaac

SEQ ID NO: 94942 - DNA, 25 bp, Homo sapien
agatccgaggtggaccgacccgaac

SEQ ID NO: 94943 - DNA, 25 bp, Homo sapien
actctccctcgtgtcgggccccgca

SEQ ID NO: 94944 - DNA, 25 bp, Homo sapien
actctccctcgtctcgggccccgca

SEQ ID NO: 94945 - DNA, 25 bp, Homo sapien
accgcttccgtttctggtccagcca

SEQ ID NO: 94946 - DNA, 25 bp, Homo sapien
accgcttccgttactggtccagcca

SEQ ID NO: 94947 - DNA, 25 bp, Homo sapien
ttactgaacgttatggtcctcatga

SEQ ID NO: 94948 - DNA, 25 bp, Homo sapien
ttactgaacgttttggtcctcatga

SEQ ID NO: 94949 - DNA, 25 bp, Homo sapien
tcagtcgtagccacacacacgtaga

SEQ ID NO: 94950 - DNA, 25 bp, Homo sapien
tcagtcgtagcctcacacacgtaga

SEQ ID NO: 94951 - DNA, 25 bp, Homo sapien
tagtgtatacatttctacggaacgc

SEQ ID NO: 94952 - DNA, 25 bp, Homo sapien
tagtgtatacatatctacggaacgc

SEQ ID NO: 94953 - DNA, 25 bp, Homo sapien
ggagaactgtcctggactgggagac

SEQ ID NO: 94954 - DNA, 25 bp, Homo sapien
ggagaactgtccaggactgggagac

SEQ ID NO: 94955 - DNA, 25 bp, Homo sapien
gaacatgtgtagtgctgagaacgac

SEQ ID NO: 94956 - DNA, 25 bp, Homo sapien
gaacatgtgtagagctgagaacgac

SEQ ID NO: 94957 - DNA, 25 bp, Homo sapien
gggaaacctatacagactttacatt

SEQ ID NO: 94958 - DNA, 25 bp, Homo sapien
gggaaacctatagagactttacatt

SEQ ID NO: 94959 - DNA, 25 bp, Homo sapien
gaccggaaacctttttctgttcctt

SEQ ID NO: 94960 - DNA, 25 bp, Homo sapien
gaccggaaacctatttctgttcctt

SEQ ID NO: 94961 - DNA, 25 bp, Homo sapien
gtgaaagaatatttcaccgttccat

SEQ ID NO: 94962 - DNA, 25 bp, Homo sapien
gtgaaagaatatatcaccgttccat

SEQ ID NO: 94963 - DNA, 25 bp, Homo sapien
ataaaaactatctttgacattcatt

SEQ ID NO: 94964 - DNA, 25 bp, Homo sapien
ataaaaactatcattgacattcatt

SEQ ID NO: 94965 - DNA, 25 bp, Homo sapien
aagaaactaacagttttcaacttta

SEQ ID NO: 94966 - DNA, 25 bp, Homo sapien
aagaaactaacacttttcaacttta

SEQ ID NO: 94967 - DNA, 25 bp, Homo sapien
tgaaaactcatcgataccacattgg

SEQ ID NO: 94968 - DNA, 25 bp, Homo sapien
tgaaaactcatccataccacattgg

SEQ ID NO: 94969 - DNA, 25 bp, Homo sapien
gtgaaattacgaaattccacttttg

SEQ ID NO: 94970 - DNA, 25 bp, Homo sapien
gtgaaattacgatattccacttttg

SEQ ID NO: 94971 - DNA, 25 bp, Homo sapien
gtctttgtactgataaaacctaaag

SEQ ID NO: 94972 - DNA, 25 bp, Homo sapien
gtctttgtactgttaaaacctaaag

SEQ ID NO: 94973 - DNA, 25 bp, Homo sapien
gacttttatgacacagttcaagtat

SEQ ID NO: 94974 - DNA, 25 bp, Homo sapien
gacttttatgactcagttcaagtat

SEQ ID NO: 94975 - DNA, 25 bp, Homo sapien
agtacttccaaatcggaacaacgat

SEQ ID NO: 94976 - DNA, 25 bp, Homo sapien
agtacttccaaaacggaacaacgat

SEQ ID NO: 94977 - DNA, 25 bp, Homo sapien
cactctgccgtcccaggactccaga

SEQ ID NO: 94978 - DNA, 25 bp, Homo sapien
cactctgccgtcgcaggactccaga

SEQ ID NO: 94979 - DNA, 25 bp, Homo sapien
gtccgtagtccttcggtaagtctta

SEQ ID NO: 94980 - DNA, 25 bp, Homo sapien
gtccgtagtcctacggtaagtctta

SEQ ID NO: 94981 - DNA, 25 bp, Homo sapien
gacagtgtctgacctaaggtacaat

SEQ ID NO: 94982 - DNA, 25 bp, Homo sapien
gacagtgtctgagctaaggtacaat

SEQ ID NO: 94983 - DNA, 25 bp, Homo sapien
ttgacgtgagagagctgaggacaca

SEQ ID NO: 94984 - DNA, 25 bp, Homo sapien
ttgacgtgagagtgctgaggacaca

SEQ ID NO: 94985 - DNA, 25 bp, Homo sapien
atatcacgggggttctggactccga

SEQ ID NO: 94986 - DNA, 25 bp, Homo sapien
atatcacgggggatctggactccga

SEQ ID NO: 94987 - DNA, 25 bp, Homo sapien
agagccggtggagctactgccccag

SEQ ID NO: 94988 - DNA, 25 bp, Homo sapien
agagccggtggacctactgccccag

SEQ ID NO: 94989 - DNA, 25 bp, Homo sapien
gagcgtcgttgttcccttctcggcc

SEQ ID NO: 94990 - DNA, 25 bp, Homo sapien
gagcgtcgttgtacccttctcggcc

SEQ ID NO: 94991 - DNA, 25 bp, Homo sapien
ttgaatcgggtcacccataagtgaa

SEQ ID NO: 94992 - DNA, 25 bp, Homo sapien
ttgaatcgggtctcccataagtgaa

SEQ ID NO: 94993 - DNA, 25 bp, Homo sapien
ggaccaatgtcttttcaggaggtaa

SEQ ID NO: 94994 - DNA, 25 bp, Homo sapien
ggaccaatgtctattcaggaggtaa

SEQ ID NO: 94995 - DNA, 25 bp, Homo sapien
cgaaccgttgctccagtagtgggct

SEQ ID NO: 94996 - DNA, 25 bp, Homo sapien
cgaaccgttgctgcagtagtgggct

SEQ ID NO: 94997 - DNA, 25 bp, Homo sapien
caactactagtctgtcataggggct

SEQ ID NO: 94998 - DNA, 25 bp, Homo sapien
caactactagtcagtcataggggct

SEQ ID NO: 94999 - DNA, 25 bp, Homo sapien
tattcgtcagttgcacaatcgctac

SEQ ID NO: 95000 - DNA, 25 bp, Homo sapien
tattcgtcagttccacaatcgctac

SEQ ID NO: 95001 - DNA, 25 bp, Homo sapien
atcttattgtgagtcccttaaatgt

SEQ ID NO: 95002 - DNA, 25 bp, Homo sapien
atcttattgtgactcccttaaatgt

SEQ ID NO: 95003 - DNA, 25 bp, Homo sapien
agtctttggtcgaccatatacttgt

SEQ ID NO: 95004 - DNA, 25 bp, Homo sapien
agtctttggtcgtccatatacttgt

SEQ ID NO: 95005 - DNA, 25 bp, Homo sapien
gttttacgagacaaccaggtcaccg

SEQ ID NO: 95006 - DNA, 25 bp, Homo sapien
gttttacgagactaccaggtcaccg

SEQ ID NO: 95007 - DNA, 25 bp, Homo sapien
gtcgtctactcgtaccagtcggctg

SEQ ID NO: 95008 - DNA, 25 bp, Homo sapien
gtcgtctactcgaaccagtcggctg

SEQ ID NO: 95009 - DNA, 25 bp, Homo sapien
cacacacgtcccttatacggacact

SEQ ID NO: 95010 - DNA, 25 bp, Homo sapien
cacacacgtcccatatacggacact

SEQ ID NO: 95011 - DNA, 25 bp, Homo sapien
cactccgaacacctaagtcgtcgtt

SEQ ID NO: 95012 - DNA, 25 bp, Homo sapien
cactccgaacacgtaagtcgtcgtt

SEQ ID NO: 95013 - DNA, 25 bp, Homo sapien
aaagaaacttgagagttccaacggt

SEQ ID NO: 95014 - DNA, 25 bp, Homo sapien
aaagaaacttgacagttccaacggt

SEQ ID NO: 95015 - DNA, 25 bp, Homo sapien
cgaactagtaaaacgttccgggtgt

SEQ ID NO: 95016 - DNA, 25 bp, Homo sapien
cgaactagtaaatcgttccgggtgt

SEQ ID NO: 95017 - DNA, 25 bp, Homo sapien
tcgttgtgagacataggacccagtg

SEQ ID NO: 95018 - DNA, 25 bp, Homo sapien
tcgttgtgagacttaggacccagtg

SEQ ID NO: 95019 - DNA, 25 bp, Homo sapien
gacaggtcgaagatgggtttctatc

SEQ ID NO: 95020 - DNA, 25 bp, Homo sapien
gacaggtcgaagttgggtttctatc

SEQ ID NO: 95021 - DNA, 25 bp, Homo sapien
gtcatgacttaagacgttcctaatc

SEQ ID NO: 95022 - DNA, 25 bp, Homo sapien
gtcatgacttaacacgttcctaatc

SEQ ID NO: 95023 - DNA, 25 bp, Homo sapien
agatgatgactaaaatcaacctgaa

SEQ ID NO: 95024 - DNA, 25 bp, Homo sapien
agatgatgactataatcaacctgaa

SEQ ID NO: 95025 - DNA, 25 bp, Homo sapien
gtaaatgttgaaccttacctgcatt

SEQ ID NO: 95026 - DNA, 25 bp, Homo sapien
gtaaatgttgaagcttacctgcatt

SEQ ID NO: 95027 - DNA, 25 bp, Homo sapien
tcctaattttgacgttttcatcaat

SEQ ID NO: 95028 - DNA, 25 bp, Homo sapien
tcctaattttgaggttttcatcaat

SEQ ID NO: 95029 - DNA, 25 bp, Homo sapien
caggttctccgttttgacttcagtt

SEQ ID NO: 95030 - DNA, 25 bp, Homo sapien
caggttctccgtattgacttcagtt

SEQ ID NO: 95031 - DNA, 25 bp, Homo sapien
ctataagaacgtcctctagcacgtt

SEQ ID NO: 95032 - DNA, 25 bp, Homo sapien
ctataagaacgtgctctagcacgtt

SEQ ID NO: 95033 - DNA, 25 bp, Homo sapien
aagatctctgcaggtactcaggaga

SEQ ID NO: 95034 - DNA, 25 bp, Homo sapien
aagatctctgcacgtactcaggaga

SEQ ID NO: 95035 - DNA, 25 bp, Homo sapien
caagtacctttcgaactagatgtaa

SEQ ID NO: 95036 - DNA, 25 bp, Homo sapien
caagtacctttccaactagatgtaa

SEQ ID NO: 95037 - DNA, 25 bp, Homo sapien
aaaagactcgagaccaaacggaaag

SEQ ID NO: 95038 - DNA, 25 bp, Homo sapien
aaaagactcgagtccaaacggaaag

SEQ ID NO: 95039 - DNA, 25 bp, Homo sapien
attaattgtaggaaagcccgactga

SEQ ID NO: 95040 - DNA, 25 bp, Homo sapien
attaattgtaggtaagcccgactga

SEQ ID NO: 95041 - DNA, 25 bp, Homo sapien
ttaattcagagtaagtcctcaccag

SEQ ID NO: 95042 - DNA, 25 bp, Homo sapien
ttaattcagagttagtcctcaccag

SEQ ID NO: 95043 - DNA, 25 bp, Homo sapien
agtgagctctgaattggtccaccac

SEQ ID NO: 95044 - DNA, 25 bp, Homo sapien
agtgagctctgatttggtccaccac

SEQ ID NO: 95045 - DNA, 25 bp, Homo sapien
aagcctcgaggtttgagcccgacgg

SEQ ID NO: 95046 - DNA, 25 bp, Homo sapien
aagcctcgaggtatgagcccgacgg

SEQ ID NO: 95047 - DNA, 25 bp, Homo sapien
catatcttcccgaggacggaccgga

SEQ ID NO: 95048 - DNA, 25 bp, Homo sapien
catatcttcccgtggacggaccgga

SEQ ID NO: 95049 - DNA, 25 bp, Homo sapien
cctaggctgccctggagaaccagtg

SEQ ID NO: 95050 - DNA, 25 bp, Homo sapien
cctaggctgcccaggagaaccagtg

SEQ ID NO: 95051 - DNA, 25 bp, Homo sapien
catccacaacccaggtagcatcagg

SEQ ID NO: 95052 - DNA, 25 bp, Homo sapien
catccacaaccctggtagcatcagg

SEQ ID NO: 95053 - DNA, 25 bp, Homo sapien
gactcccaacacctgttcaatgaag

SEQ ID NO: 95054 - DNA, 25 bp, Homo sapien
gactcccaacacgtgttcaatgaag

SEQ ID NO: 95055 - DNA, 25 bp, Homo sapien
ccaagggagcaacttgtacgacagt

SEQ ID NO: 95056 - DNA, 25 bp, Homo sapien
ccaagggagcaagttgtacgacagt

SEQ ID NO: 95057 - DNA, 25 bp, Homo sapien
cctagaacggggtcctctgtcggag

SEQ ID NO: 95058 - DNA, 25 bp, Homo sapien
cctagaacggggacctctgtcggag

SEQ ID NO: 95059 - DNA, 25 bp, Homo sapien
ctgtgtttggtgagcaacttgaaca

SEQ ID NO: 95060 - DNA, 25 bp, Homo sapien
ctgtgtttggtgtgcaacttgaaca

SEQ ID NO: 95061 - DNA, 25 bp, Homo sapien
cagaaaaacacgtggttgtctgaaa

SEQ ID NO: 95062 - DNA, 25 bp, Homo sapien
cagaaaaacacgaggttgtctgaaa

SEQ ID NO: 95063 - DNA, 25 bp, Homo sapien
ataaaggttcccataataccaaggt

SEQ ID NO: 95064 - DNA, 25 bp, Homo sapien
ataaaggttcccttaataccaaggt

SEQ ID NO: 95065 - DNA, 25 bp, Homo sapien
gaacgagcgaaacctggaaccacca

SEQ ID NO: 95066 - DNA, 25 bp, Homo sapien
gaacgagcgaaagctggaaccacca

SEQ ID NO: 95067 - DNA, 25 bp, Homo sapien
taccattgtgacatgtccctcttga

SEQ ID NO: 95068 - DNA, 25 bp, Homo sapien
taccattgtgacttgtccctcttga

SEQ ID NO: 95069 - DNA, 25 bp, Homo sapien
agtgacgactttcaaaccttttgta

SEQ ID NO: 95070 - DNA, 25 bp, Homo sapien
agtgacgactttgaaaccttttgta

SEQ ID NO: 95071 - DNA, 25 bp, Homo sapien
agtccctttgcaccagagactctca

SEQ ID NO: 95072 - DNA, 25 bp, Homo sapien
agtccctttgcagcagagactctca

SEQ ID NO: 95073 - DNA, 25 bp, Homo sapien
ttatccattgtgtaaaaccctcgag

SEQ ID NO: 95074 - DNA, 25 bp, Homo sapien
ttatccattgtgaaaaaccctcgag

SEQ ID NO: 95075 - DNA, 25 bp, Homo sapien
ccgtatttggaagagagcgtctcag

SEQ ID NO: 95076 - DNA, 25 bp, Homo sapien
ccgtatttggaacagagcgtctcag

SEQ ID NO: 95077 - DNA, 25 bp, Homo sapien
agtctatcattgtatcttgatcaag

SEQ ID NO: 95078 - DNA, 25 bp, Homo sapien
agtctatcattgaatcttgatcaag

SEQ ID NO: 95079 - DNA, 25 bp, Homo sapien
tcgtcgtcattgaaagttcgatttt

SEQ ID NO: 95080 - DNA, 25 bp, Homo sapien
tcgtcgtcattgtaagttcgatttt

SEQ ID NO: 95081 - DNA, 25 bp, Homo sapien
tctttctaatggagtcacgacattt

SEQ ID NO: 95082 - DNA, 25 bp, Homo sapien
tctttctaatggtgtcacgacattt

SEQ ID NO: 95083 - DNA, 25 bp, Homo sapien
tctgtgagatatcctgcccgcaaac

SEQ ID NO: 95084 - DNA, 25 bp, Homo sapien
tctgtgagatatgctgcccgcaaac

SEQ ID NO: 95085 - DNA, 25 bp, Homo sapien
tcggtgacattttgtaaatcaaact

SEQ ID NO: 95086 - DNA, 25 bp, Homo sapien
tcggtgacatttagtaaatcaaact

SEQ ID NO: 95087 - DNA, 25 bp, Homo sapien
ttcagacttttgataaccggtttat

SEQ ID NO: 95088 - DNA, 25 bp, Homo sapien
ttcagacttttgttaaccggtttat

SEQ ID NO: 95089 - DNA, 25 bp, Homo sapien
ttctgggtccagttgacggggtacc

SEQ ID NO: 95090 - DNA, 25 bp, Homo sapien
ttctgggtccagatgacggggtacc

SEQ ID NO: 95091 - DNA, 25 bp, Homo sapien
gatcttgtctatagtgaggtcgtac

SEQ ID NO: 95092 - DNA, 25 bp, Homo sapien
gatcttgtctattgtgaggtcgtac

SEQ ID NO: 95093 - DNA, 25 bp, Homo sapien
tgactattcgaatgtgtgtcgtgac

SEQ ID NO: 95094 - DNA, 25 bp, Homo sapien
tgactattcgaaagtgtgtcgtgac

SEQ ID NO: 95095 - DNA, 25 bp, Homo sapien
tagcggtgtcggtaacggtgtacga

SEQ ID NO: 95096 - DNA, 25 bp, Homo sapien
tagcggtgtcggaaacggtgtacga

SEQ ID NO: 95097 - DNA, 25 bp, Homo sapien
actacttttcgaggtacagtgtcat

SEQ ID NO: 95098 - DNA, 25 bp, Homo sapien
actacttttcgacgtacagtgtcat

SEQ ID NO: 95099 - DNA, 25 bp, Homo sapien
cgtgaaaacatctctcctaatgaca

SEQ ID NO: 95100 - DNA, 25 bp, Homo sapien
cgtgaaaacatcactcctaatgaca

SEQ ID NO: 95101 - DNA, 25 bp, Homo sapien
acacaagtacgttcatgttagtaat

SEQ ID NO: 95102 - DNA, 25 bp, Homo sapien
acacaagtacgtacatgttagtaat

SEQ ID NO: 95103 - DNA, 25 bp, Homo sapien
ggaatacaagtaacgtgttttactc

SEQ ID NO: 95104 - DNA, 25 bp, Homo sapien
ggaatacaagtatcgtgttttactc

SEQ ID NO: 95105 - DNA, 25 bp, Homo sapien
cgaaaagacgaatcttgtttatacc

SEQ ID NO: 95106 - DNA, 25 bp, Homo sapien
cgaaaagacgaaacttgtttatacc

SEQ ID NO: 95107 - DNA, 25 bp, Homo sapien
gttctaatgagtgtcctttagataa

SEQ ID NO: 95108 - DNA, 25 bp, Homo sapien
gttctaatgagtctcctttagataa

SEQ ID NO: 95109 - DNA, 25 bp, Homo sapien
ccgggtatcctgtgagtttttgtga

SEQ ID NO: 95110 - DNA, 25 bp, Homo sapien
ccgggtatcctgagagtttttgtga

SEQ ID NO: 95111 - DNA, 25 bp, Homo sapien
cgaggccacctgtacatttgggcac

SEQ ID NO: 95112 - DNA, 25 bp, Homo sapien
cgaggccacctgaacatttgggcac

SEQ ID NO: 95113 - DNA, 25 bp, Homo sapien
taactactgaagattgatcgaccat

SEQ ID NO: 95114 - DNA, 25 bp, Homo sapien
taactactgaagtttgatcgaccat

SEQ ID NO: 95115 - DNA, 25 bp, Homo sapien
atctttgacagcacacgtgaagtag

SEQ ID NO: 95116 - DNA, 25 bp, Homo sapien
atctttgacagctcacgtgaagtag

SEQ ID NO: 95117 - DNA, 25 bp, Homo sapien
tacatgaggacgtcccggacgacta

SEQ ID NO: 95118 - DNA, 25 bp, Homo sapien
tacatgaggacgacccggacgacta

SEQ ID NO: 95119 - DNA, 25 bp, Homo sapien
cgttttgggattccatgacgacact

SEQ ID NO: 95120 - DNA, 25 bp, Homo sapien
cgttttgggattgcatgacgacact

SEQ ID NO: 95121 - DNA, 25 bp, Homo sapien
cggctcagcggctctaaatacagac

SEQ ID NO: 95122 - DNA, 25 bp, Homo sapien
cggctcagcggcactaaatacagac

SEQ ID NO: 95123 - DNA, 25 bp, Homo sapien
gacaaaaggtttacaggctacacac

SEQ ID NO: 95124 - DNA, 25 bp, Homo sapien
gacaaaaggttttcaggctacacac

SEQ ID NO: 95125 - DNA, 25 bp, Homo sapien
taaacgttcttttgtccgtgattaa

SEQ ID NO: 95126 - DNA, 25 bp, Homo sapien
taaacgttctttagtccgtgattaa

SEQ ID NO: 95127 - DNA, 25 bp, Homo sapien
tcacccttcggtagtccggacgaaa

SEQ ID NO: 95128 - DNA, 25 bp, Homo sapien
tcacccttcggttgtccggacgaaa

SEQ ID NO: 95129 - DNA, 25 bp, Homo sapien
gaagaacgggtctaactaaaccgtc

SEQ ID NO: 95130 - DNA, 25 bp, Homo sapien
gaagaacgggtcaaactaaaccgtc

SEQ ID NO: 95131 - DNA, 25 bp, Homo sapien
ctttgtcgtaacgacagtgaaccag

SEQ ID NO: 95132 - DNA, 25 bp, Homo sapien
ctttgtcgtaaccacagtgaaccag

SEQ ID NO: 95133 - DNA, 25 bp, Homo sapien
ggtcgatttgtacgaagtagcagcc

SEQ ID NO: 95134 - DNA, 25 bp, Homo sapien
ggtcgatttgtaggaagtagcagcc

SEQ ID NO: 95135 - DNA, 25 bp, Homo sapien
gtcaaatattgtaatcgaatccagt

SEQ ID NO: 95136 - DNA, 25 bp, Homo sapien
gtcaaatattgttatcgaatccagt

SEQ ID NO: 95137 - DNA, 25 bp, Homo sapien
gggtcaataactccttgtttccaca

SEQ ID NO: 95138 - DNA, 25 bp, Homo sapien
gggtcaataactgcttgtttccaca

SEQ ID NO: 95139 - DNA, 25 bp, Homo sapien
aagacgctacagcagaacttcacga

SEQ ID NO: 95140 - DNA, 25 bp, Homo sapien
aagacgctacaggagaacttcacga

SEQ ID NO: 95141 - DNA, 25 bp, Homo sapien
gaccgtggtcggactcgtgtcaaca

SEQ ID NO: 95142 - DNA, 25 bp, Homo sapien
gaccgtggtcggtctcgtgtcaaca

SEQ ID NO: 95143 - DNA, 25 bp, Homo sapien
tgacgacggcgagtttgtcgtccca

SEQ ID NO: 95144 - DNA, 25 bp, Homo sapien
tgacgacggcgactttgtcgtccca

SEQ ID NO: 95145 - DNA, 25 bp, Homo sapien
gacgacccgaggtgttcgtcctccg

SEQ ID NO: 95146 - DNA, 25 bp, Homo sapien
gacgacccgaggagttcgtcctccg

SEQ ID NO: 95147 - DNA, 25 bp, Homo sapien
gaggctcgaccgtgtgtgtcccctc

SEQ ID NO: 95148 - DNA, 25 bp, Homo sapien
gaggctcgaccgagtgtgtcccctc

SEQ ID NO: 95149 - DNA, 25 bp, Homo sapien
acgagggtacccatttactacccac

SEQ ID NO: 95150 - DNA, 25 bp, Homo sapien
acgagggtacccttttactacccac

SEQ ID NO: 95151 - DNA, 25 bp, Homo sapien
tcgggggtccaggtcctacccgaag

SEQ ID NO: 95152 - DNA, 25 bp, Homo sapien
tcgggggtccagctcctacccgaag

SEQ ID NO: 95153 - DNA, 25 bp, Homo sapien
gtgggagtgtaaatcgacttccagg

SEQ ID NO: 95154 - DNA, 25 bp, Homo sapien
gtgggagtgtaattcgacttccagg

SEQ ID NO: 95155 - DNA, 25 bp, Homo sapien
ggatactataagttttctactgaac

SEQ ID NO: 95156 - DNA, 25 bp, Homo sapien
ggatactataagatttctactgaac

SEQ ID NO: 95157 - DNA, 25 bp, Homo sapien
acgcgggcgagtcgacccgactaca

SEQ ID NO: 95158 - DNA, 25 bp, Homo sapien
acgcgggcgagtggacccgactaca

SEQ ID NO: 95159 - DNA, 25 bp, Homo sapien
tctttttcggggtgtctgtagacaa

SEQ ID NO: 95160 - DNA, 25 bp, Homo sapien
tctttttcggggagtctgtagacaa

SEQ ID NO: 95161 - DNA, 25 bp, Homo sapien
agttttcatcttacccgtagaggtt

SEQ ID NO: 95162 - DNA, 25 bp, Homo sapien
agttttcatctttcccgtagaggtt

SEQ ID NO: 95163 - DNA, 25 bp, Homo sapien
agacgacctcatagtcccgtgggta

SEQ ID NO: 95164 - DNA, 25 bp, Homo sapien
agacgacctcattgtcccgtgggta

SEQ ID NO: 95165 - DNA, 25 bp, Homo sapien
agaccttcggtggaccctgtcgtgg

SEQ ID NO: 95166 - DNA, 25 bp, Homo sapien
agaccttcggtgcaccctgtcgtgg

SEQ ID NO: 95167 - DNA, 25 bp, Homo sapien
tacagaccggatcagacaatacagg

SEQ ID NO: 95168 - DNA, 25 bp, Homo sapien
tacagaccggatgagacaatacagg

SEQ ID NO: 95169 - DNA, 25 bp, Homo sapien
ctttatgagaggtaaccgaaacgaa

SEQ ID NO: 95170 - DNA, 25 bp, Homo sapien
ctttatgagaggaaaccgaaacgaa

SEQ ID NO: 95171 - DNA, 25 bp, Homo sapien
tctcgtgagtagaccgacccgatac

SEQ ID NO: 95172 - DNA, 25 bp, Homo sapien
tctcgtgagtagtccgacccgatac

SEQ ID NO: 95173 - DNA, 25 bp, Homo sapien
cgtcactgagtctgtgtcaaaggta

SEQ ID NO: 95174 - DNA, 25 bp, Homo sapien
cgtcactgagtcagtgtcaaaggta

SEQ ID NO: 95175 - DNA, 25 bp, Homo sapien
gttgtaatcatctaacacgatggac

SEQ ID NO: 95176 - DNA, 25 bp, Homo sapien
gttgtaatcatcaaacacgatggac

SEQ ID NO: 95177 - DNA, 25 bp, Homo sapien
atagtgtcataagacgacatatatc

SEQ ID NO: 95178 - DNA, 25 bp, Homo sapien
atagtgtcataacacgacatatatc

SEQ ID NO: 95179 - DNA, 25 bp, Homo sapien
aaaggttcatgaagtgtacctaatc

SEQ ID NO: 95180 - DNA, 25 bp, Homo sapien
aaaggttcatgatgtgtacctaatc

SEQ ID NO: 95181 - DNA, 25 bp, Homo sapien
gactacattgtgcaattgttcttcc

SEQ ID NO: 95182 - DNA, 25 bp, Homo sapien
gactacattgtggaattgttcttcc

SEQ ID NO: 95183 - DNA, 25 bp, Homo sapien
acttagttttggtcgtccattatcg

SEQ ID NO: 95184 - DNA, 25 bp, Homo sapien
acttagttttggacgtccattatcg

SEQ ID NO: 95185 - DNA, 25 bp, Homo sapien
tcttccttcgagtatactggtttcg

SEQ ID NO: 95186 - DNA, 25 bp, Homo sapien
tcttccttcgagaatactggtttcg

SEQ ID NO: 95187 - DNA, 25 bp, Homo sapien
acatttttcgtcaaggtgagttcac

SEQ ID NO: 95188 - DNA, 25 bp, Homo sapien
acatttttcgtctaggtgagttcac

SEQ ID NO: 95189 - DNA, 25 bp, Homo sapien
gttctttgtgtccatatccagtgaa

SEQ ID NO: 95190 - DNA, 25 bp, Homo sapien
gttctttgtgtcgatatccagtgaa

SEQ ID NO: 95191 - DNA, 25 bp, Homo sapien
cattgccgtcgattacctacgtgga

SEQ ID NO: 95192 - DNA, 25 bp, Homo sapien
cattgccgtcgaatacctacgtgga

SEQ ID NO: 95193 - DNA, 25 bp, Homo sapien
cctttagagtaacctgattatgtaa

SEQ ID NO: 95194 - DNA, 25 bp, Homo sapien
cctttagagtaagctgattatgtaa

SEQ ID NO: 95195 - DNA, 25 bp, Homo sapien
aattcttaaatacatacagtttttc

SEQ ID NO: 95196 - DNA, 25 bp, Homo sapien
aattcttaaatagatacagtttttc

SEQ ID NO: 95197 - DNA, 25 bp, Homo sapien
tacttacccgagtaagtatgttttt

SEQ ID NO: 95198 - DNA, 25 bp, Homo sapien
tacttacccgagaaagtatgttttt

SEQ ID NO: 95199 - DNA, 25 bp, Homo sapien
gtctctcaccgaatcttttgggtcg

SEQ ID NO: 95200 - DNA, 25 bp, Homo sapien
gtctctcaccgattcttttgggtcg

SEQ ID NO: 95201 - DNA, 25 bp, Homo sapien
ccctgaacgagtgtcatcaacggtc

SEQ ID NO: 95202 - DNA, 25 bp, Homo sapien
ccctgaacgagtctcatcaacggtc

SEQ ID NO: 95203 - DNA, 25 bp, Homo sapien
gaaccgcaggagacccaaggtcgac

SEQ ID NO: 95204 - DNA, 25 bp, Homo sapien
gaaccgcaggagtcccaaggtcgac

SEQ ID NO: 95205 - DNA, 25 bp, Homo sapien
cacaccgtagggacaccagtgagca

SEQ ID NO: 95206 - DNA, 25 bp, Homo sapien
cacaccgtagggtcaccagtgagca

SEQ ID NO: 95207 - DNA, 25 bp, Homo sapien
acgtagagtcctttcacaaggttga

SEQ ID NO: 95208 - DNA, 25 bp, Homo sapien
acgtagagtcctatcacaaggttga

SEQ ID NO: 95209 - DNA, 25 bp, Homo sapien
cgccactctctttcagagcttcgag

SEQ ID NO: 95210 - DNA, 25 bp, Homo sapien
cgccactctcttacagagcttcgag

SEQ ID NO: 95211 - DNA, 25 bp, Homo sapien
tgaccacaccggacgtggtcacaca

SEQ ID NO: 95212 - DNA, 25 bp, Homo sapien
tgaccacaccggtcgtggtcacaca

SEQ ID NO: 95213 - DNA, 25 bp, Homo sapien
gacacctaccggttctctatcaaag

SEQ ID NO: 95214 - DNA, 25 bp, Homo sapien
gacacctaccggatctctatcaaag

SEQ ID NO: 95215 - DNA, 25 bp, Homo sapien
aagaacccctcgtcatgtcggacct

SEQ ID NO: 95216 - DNA, 25 bp, Homo sapien
aagaacccctcgacatgtcggacct

SEQ ID NO: 95217 - DNA, 25 bp, Homo sapien
gaaactccgtctccttagttcccgt

SEQ ID NO: 95218 - DNA, 25 bp, Homo sapien
gaaactccgtctgcttagttcccgt

SEQ ID NO: 95219 - DNA, 25 bp, Homo sapien
cattacggtcgtgaggacgtcctga

SEQ ID NO: 95220 - DNA, 25 bp, Homo sapien
cattacggtcgtcaggacgtcctga

SEQ ID NO: 95221 - DNA, 25 bp, Homo sapien
agactatagagtaggactgtctgac

SEQ ID NO: 95222 - DNA, 25 bp, Homo sapien
agactatagagttggactgtctgac

SEQ ID NO: 95223 - DNA, 25 bp, Homo sapien
gaggtagtgtcacacgtcgagtgac

SEQ ID NO: 95224 - DNA, 25 bp, Homo sapien
gaggtagtgtcagacgtcgagtgac

SEQ ID NO: 95225 - DNA, 25 bp, Homo sapien
accgagagaaggttcgtcactgagt

SEQ ID NO: 95226 - DNA, 25 bp, Homo sapien
accgagagaaggatcgtcactgagt

SEQ ID NO: 95227 - DNA, 25 bp, Homo sapien
cacagagacgaagagtctacataat

SEQ ID NO: 95228 - DNA, 25 bp, Homo sapien
cacagagacgaacagtctacataat

SEQ ID NO: 95229 - DNA, 25 bp, Homo sapien
aaacacagtgaaatcatacacatgg

SEQ ID NO: 95230 - DNA, 25 bp, Homo sapien
aaacacagtgaattcatacacatgg

SEQ ID NO: 95231 - DNA, 25 bp, Homo sapien
acacctaccggttctctatcaaagg

SEQ ID NO: 95232 - DNA, 25 bp, Homo sapien
acacctaccggtactctatcaaagg

SEQ ID NO: 95233 - DNA, 25 bp, Homo sapien
aagtcccgagtgatcggtcaagggt

SEQ ID NO: 95234 - DNA, 25 bp, Homo sapien
aagtcccgagtgttcggtcaagggt

SEQ ID NO: 95235 - DNA, 25 bp, Homo sapien
atctccactcgtagttctttgtcgt

SEQ ID NO: 95236 - DNA, 25 bp, Homo sapien
atctccactcgttgttctttgtcgt

SEQ ID NO: 95237 - DNA, 25 bp, Homo sapien
agaccctccgacgtcttgtatcggt

SEQ ID NO: 95238 - DNA, 25 bp, Homo sapien
agaccctccgacctcttgtatcggt

SEQ ID NO: 95239 - DNA, 25 bp, Homo sapien
agattacaaccgatctttacccgtg

SEQ ID NO: 95240 - DNA, 25 bp, Homo sapien
agattacaaccgttctttacccgtg

SEQ ID NO: 95241 - DNA, 25 bp, Homo sapien
gaactgaacaggtttagacaacgta

SEQ ID NO: 95242 - DNA, 25 bp, Homo sapien
gaactgaacaggattagacaacgta

SEQ ID NO: 95243 - DNA, 25 bp, Homo sapien
tagaccacgaacaaccgaaattgta

SEQ ID NO: 95244 - DNA, 25 bp, Homo sapien
tagaccacgaactaccgaaattgta

SEQ ID NO: 95245 - DNA, 25 bp, Homo sapien
tctccgagaggtacgacggtaccaa

SEQ ID NO: 95246 - DNA, 25 bp, Homo sapien
tctccgagaggttcgacggtaccaa

SEQ ID NO: 95247 - DNA, 25 bp, Homo sapien
tcttcgagagatgactacttcaata

SEQ ID NO: 95248 - DNA, 25 bp, Homo sapien
tcttcgagagatcactacttcaata

SEQ ID NO: 95249 - DNA, 25 bp, Homo sapien
tatcgtaggattcgacgtataatac

SEQ ID NO: 95250 - DNA, 25 bp, Homo sapien
tatcgtaggattggacgtataatac

SEQ ID NO: 95251 - DNA, 25 bp, Homo sapien
tctagggagactaaaagaactctac

SEQ ID NO: 95252 - DNA, 25 bp, Homo sapien
tctagggagacttaaagaactctac

SEQ ID NO: 95253 - DNA, 25 bp, Homo sapien
atttgtggtctctgtaaaactactc

SEQ ID NO: 95254 - DNA, 25 bp, Homo sapien
atttgtggtctcagtaaaactactc

SEQ ID NO: 95255 - DNA, 25 bp, Homo sapien
agtgtgtcggtcctcagaaaagaag

SEQ ID NO: 95256 - DNA, 25 bp, Homo sapien
agtgtgtcggtcgtcagaaaagaag

SEQ ID NO: 95257 - DNA, 25 bp, Homo sapien
ggtccgagttgtggtcgaaagtcta

SEQ ID NO: 95258 - DNA, 25 bp, Homo sapien
ggtccgagttgtcgtcgaaagtcta

SEQ ID NO: 95259 - DNA, 25 bp, Homo sapien
gtctacgagttatgtgtgtttatcc

SEQ ID NO: 95260 - DNA, 25 bp, Homo sapien
gtctacgagttaagtgtgtttatcc

SEQ ID NO: 95261 - DNA, 25 bp, Homo sapien
gtaaagacttctttgtcgtttcacc

SEQ ID NO: 95262 - DNA, 25 bp, Homo sapien
gtaaagacttctatgtcgtttcacc

SEQ ID NO: 95263 - DNA, 25 bp, Homo sapien
ttacaatgtctctcgggtctccttc

SEQ ID NO: 95264 - DNA, 25 bp, Homo sapien
ttacaatgtctcacgggtctccttc

SEQ ID NO: 95265 - DNA, 25 bp, Homo sapien
agaactcacacttcgggtgcatcag

SEQ ID NO: 95266 - DNA, 25 bp, Homo sapien
agaactcacactacgggtgcatcag

SEQ ID NO: 95267 - DNA, 25 bp, Homo sapien
aacttcacgactatggtgacttcat

SEQ ID NO: 95268 - DNA, 25 bp, Homo sapien
aacttcacgactttggtgacttcat

SEQ ID NO: 95269 - DNA, 25 bp, Homo sapien
tctcgactattctgatcatcgtctg

SEQ ID NO: 95270 - DNA, 25 bp, Homo sapien
tctcgactattcagatcatcgtctg

SEQ ID NO: 95271 - DNA, 25 bp, Homo sapien
tattcgtacattagacggagcttcg

SEQ ID NO: 95272 - DNA, 25 bp, Homo sapien
tattcgtacatttgacggagcttcg

SEQ ID NO: 95273 - DNA, 25 bp, Homo sapien
aaagcgatataaacggtatcgttcg

SEQ ID NO: 95274 - DNA, 25 bp, Homo sapien
aaagcgatataatcggtatcgttcg

SEQ ID NO: 95275 - DNA, 25 bp, Homo sapien
tactcgacaacgaatgtctatattg

SEQ ID NO: 95276 - DNA, 25 bp, Homo sapien
tactcgacaacgtatgtctatattg

SEQ ID NO: 95277 - DNA, 25 bp, Homo sapien
gggcgcaccggtcagtccacgtcga

SEQ ID NO: 95278 - DNA, 25 bp, Homo sapien
gggcgcaccggtgagtccacgtcga

SEQ ID NO: 95279 - DNA, 25 bp, Homo sapien
agaaaaacagagttgagaccagacc

SEQ ID NO: 95280 - DNA, 25 bp, Homo sapien
agaaaaacagagatgagaccagacc

SEQ ID NO: 95281 - DNA, 25 bp, Homo sapien
tggaacatagaatcgaaccctacac

SEQ ID NO: 95282 - DNA, 25 bp, Homo sapien
tggaacatagaaacgaaccctacac

SEQ ID NO: 95283 - DNA, 25 bp, Homo sapien
aggaaacagaagaagaccttacagt

SEQ ID NO: 95284 - DNA, 25 bp, Homo sapien
aggaaacagaagtagaccttacagt

SEQ ID NO: 95285 - DNA, 25 bp, Homo sapien
ggtaatacccaagacactacactag

SEQ ID NO: 95286 - DNA, 25 bp, Homo sapien
ggtaatacccaacacactacactag

SEQ ID NO: 95287 - DNA, 25 bp, Homo sapien
aagtagaacaacacgatcttacgta

SEQ ID NO: 95288 - DNA, 25 bp, Homo sapien
aagtagaacaactcgatcttacgta

SEQ ID NO: 95289 - DNA, 25 bp, Homo sapien
cgctatgagactcatggtgtccctg

SEQ ID NO: 95290 - DNA, 25 bp, Homo sapien
cgctatgagactgatggtgtccctg

SEQ ID NO: 95291 - DNA, 25 bp, Homo sapien
actcttactgttgagtgtctacagg

SEQ ID NO: 95292 - DNA, 25 bp, Homo sapien
actcttactgttcagtgtctacagg

SEQ ID NO: 95293 - DNA, 25 bp, Homo sapien
tgacattatgttaaacgtgtctcag

SEQ ID NO: 95294 - DNA, 25 bp, Homo sapien
tgacattatgtttaacgtgtctcag

SEQ ID NO: 95295 - DNA, 25 bp, Homo sapien
gcaatcttatccaccggtgtcgtgt

SEQ ID NO: 95296 - DNA, 25 bp, Homo sapien
gcaatcttatcctccggtgtcgtgt

SEQ ID NO: 95297 - DNA, 25 bp, Homo sapien
gcaagtttagactgcccgtttcggt

SEQ ID NO: 95298 - DNA, 25 bp, Homo sapien
gcaagtttagacagcccgtttcggt

SEQ ID NO: 95299 - DNA, 25 bp, Homo sapien
gctaagtttaacagcgacctaatca

SEQ ID NO: 95300 - DNA, 25 bp, Homo sapien
gctaagtttaactgcgacctaatca

SEQ ID NO: 95301 - DNA, 25 bp, Homo sapien
cggtgaattacatggttctctaatc

SEQ ID NO: 95302 - DNA, 25 bp, Homo sapien
cggtgaattacaaggttctctaatc

SEQ ID NO: 95303 - DNA, 25 bp, Homo sapien
gggggttactaaactttcgacgtaa

SEQ ID NO: 95304 - DNA, 25 bp, Homo sapien
gggggttactaatctttcgacgtaa

SEQ ID NO: 95305 - DNA, 25 bp, Homo sapien
tgtggatctctcatatttttgtcgg

SEQ ID NO: 95306 - DNA, 25 bp, Homo sapien
tgtggatctctcttatttttgtcgg

SEQ ID NO: 95307 - DNA, 25 bp, Homo sapien
gagttcgaagcatcggacctagagt

SEQ ID NO: 95308 - DNA, 25 bp, Homo sapien
gagttcgaagcaacggacctagagt

SEQ ID NO: 95309 - DNA, 25 bp, Homo sapien
ccgtagtgtcatcgaccggtcccga

SEQ ID NO: 95310 - DNA, 25 bp, Homo sapien
ccgtagtgtcatggaccggtcccga

SEQ ID NO: 95311 - DNA, 25 bp, Homo sapien
cgtagttcaccgaccgcgacaggtt

SEQ ID NO: 95312 - DNA, 25 bp, Homo sapien
cgtagttcaccgtccgcgacaggtt

SEQ ID NO: 95313 - DNA, 25 bp, Homo sapien
cttcggattctctctccagaccgga

SEQ ID NO: 95314 - DNA, 25 bp, Homo sapien
cttcggattctcactccagaccgga

SEQ ID NO: 95315 - DNA, 25 bp, Homo sapien
tgtacttttgactacagaccgttcg

SEQ ID NO: 95316 - DNA, 25 bp, Homo sapien
tgtacttttgacaacagaccgttcg

SEQ ID NO: 95317 - DNA, 25 bp, Homo sapien
ccagagatactttaccacaacattg

SEQ ID NO: 95318 - DNA, 25 bp, Homo sapien
ccagagatacttaaccacaacattg

SEQ ID NO: 95319 - DNA, 25 bp, Homo sapien
aattttgaaccgaccctaagagttg

SEQ ID NO: 95320 - DNA, 25 bp, Homo sapien
aattttgaaccgtccctaagagttg

SEQ ID NO: 95321 - DNA, 25 bp, Homo sapien
tcctagaaacccttcgccgatagaa

SEQ ID NO: 95322 - DNA, 25 bp, Homo sapien
tcctagaaacccatcgccgatagaa

SEQ ID NO: 95323 - DNA, 25 bp, Homo sapien
actggtatccacataaccggacgaa

SEQ ID NO: 95324 - DNA, 25 bp, Homo sapien
actggtatccacttaaccggacgaa

SEQ ID NO: 95325 - DNA, 25 bp, Homo sapien
ccagaccctcttaactagaacggac

SEQ ID NO: 95326 - DNA, 25 bp, Homo sapien
ccagaccctctttactagaacggac

SEQ ID NO: 95327 - DNA, 25 bp, Homo sapien
cattacatgacgttcagagacgcga

SEQ ID NO: 95328 - DNA, 25 bp, Homo sapien
cattacatgacgatcagagacgcga

SEQ ID NO: 95329 - DNA, 25 bp, Homo sapien
cgaccctctttgcacagtcgaggga

SEQ ID NO: 95330 - DNA, 25 bp, Homo sapien
cgaccctctttggacagtcgaggga

SEQ ID NO: 95331 - DNA, 25 bp, Homo sapien
ggaacattctgtggtgttaagccga

SEQ ID NO: 95332 - DNA, 25 bp, Homo sapien
ggaacattctgtcgtgttaagccga

SEQ ID NO: 95333 - DNA, 25 bp, Homo sapien
ttcaaattcttttcatctaacactg

SEQ ID NO: 95334 - DNA, 25 bp, Homo sapien
ttcaaattctttacatctaacactg

SEQ ID NO: 95335 - DNA, 25 bp, Homo sapien
tgtcttcccagtggaaaatactact

SEQ ID NO: 95336 - DNA, 25 bp, Homo sapien
tgtcttcccagtcgaaaatactact

SEQ ID NO: 95337 - DNA, 25 bp, Homo sapien
gtcttcacctagaacgatgtatcaa

SEQ ID NO: 95338 - DNA, 25 bp, Homo sapien
gtcttcacctagtacgatgtatcaa

SEQ ID NO: 95339 - DNA, 25 bp, Homo sapien
tggtctcccgacgagaaggcgaccg

SEQ ID NO: 95340 - DNA, 25 bp, Homo sapien
tggtctcccgaccagaaggcgaccg

SEQ ID NO: 95341 - DNA, 25 bp, Homo sapien
tcataagttcaaggacaaatctcag

SEQ ID NO: 95342 - DNA, 25 bp, Homo sapien
tcataagttcaacgacaaatctcag

SEQ ID NO: 95343 - DNA, 25 bp, Homo sapien
aatatacggcatcgactagattaaa

SEQ ID NO: 95344 - DNA, 25 bp, Homo sapien
aatatacggcatggactagattaaa

SEQ ID NO: 95345 - DNA, 25 bp, Homo sapien
gatatagtctcctgtgacccaatta

SEQ ID NO: 95346 - DNA, 25 bp, Homo sapien
gatatagtctccagtgacccaatta

SEQ ID NO: 95347 - DNA, 25 bp, Homo sapien
aaagaagtcccgaagggcaagtatc

SEQ ID NO: 95348 - DNA, 25 bp, Homo sapien
aaagaagtcccgtagggcaagtatc

SEQ ID NO: 95349 - DNA, 25 bp, Homo sapien
gaagaaggagcgtggcctacgcctc

SEQ ID NO: 95350 - DNA, 25 bp, Homo sapien
gaagaaggagcgaggcctacgcctc

SEQ ID NO: 95351 - DNA, 25 bp, Homo sapien
gaaggacgaccctgactcttccgag

SEQ ID NO: 95352 - DNA, 25 bp, Homo sapien
gaaggacgacccagactcttccgag

SEQ ID NO: 95353 - DNA, 25 bp, Homo sapien
tccgggaactcaagactctctggag

SEQ ID NO: 95354 - DNA, 25 bp, Homo sapien
tccgggaactcatgactctctggag

SEQ ID NO: 95355 - DNA, 25 bp, Homo sapien
cgtgtcattatgtgtcggcacagga

SEQ ID NO: 95356 - DNA, 25 bp, Homo sapien
cgtgtcattatgagtcggcacagga

SEQ ID NO: 95357 - DNA, 25 bp, Homo sapien
ttacataaagtgtcttccttcgagt

SEQ ID NO: 95358 - DNA, 25 bp, Homo sapien
ttacataaagtgacttccttcgagt

SEQ ID NO: 95359 - DNA, 25 bp, Homo sapien
gactctattgtgtccactattgact

SEQ ID NO: 95360 - DNA, 25 bp, Homo sapien
gactctattgtgaccactattgact

SEQ ID NO: 95361 - DNA, 25 bp, Homo sapien
ctacatctccaaaaccgacacgact

SEQ ID NO: 95362 - DNA, 25 bp, Homo sapien
ctacatctccaataccgacacgact

SEQ ID NO: 95363 - DNA, 25 bp, Homo sapien
cgtcatcaccggatgtcagacacag

SEQ ID NO: 95364 - DNA, 25 bp, Homo sapien
cgtcatcaccggttgtcagacacag

SEQ ID NO: 95365 - DNA, 25 bp, Homo sapien
tcgccgtgtgtcgattcgcataaac

SEQ ID NO: 95366 - DNA, 25 bp, Homo sapien
tcgccgtgtgtccattcgcataaac

SEQ ID NO: 95367 - DNA, 25 bp, Homo sapien
tcatgtagatcctgtcgtaagaaag

SEQ ID NO: 95368 - DNA, 25 bp, Homo sapien
tcatgtagatccagtcgtaagaaag

SEQ ID NO: 95369 - DNA, 25 bp, Homo sapien
gtcggtactagataccactaaaagg

SEQ ID NO: 95370 - DNA, 25 bp, Homo sapien
gtcggtactagaaaccactaaaagg

SEQ ID NO: 95371 - DNA, 25 bp, Homo sapien
agtagtgtctgaagacacaaaaatc

SEQ ID NO: 95372 - DNA, 25 bp, Homo sapien
agtagtgtctgatgacacaaaaatc

SEQ ID NO: 95373 - DNA, 25 bp, Homo sapien
tgcaggaattatcatcctaagtaaa

SEQ ID NO: 95374 - DNA, 25 bp, Homo sapien
tgcaggaattatgatcctaagtaaa

SEQ ID NO: 95375 - DNA, 25 bp, Homo sapien
ggaagtacaattatcaccgatttat

SEQ ID NO: 95376 - DNA, 25 bp, Homo sapien
ggaagtacaattttcaccgatttat

SEQ ID NO: 95377 - DNA, 25 bp, Homo sapien
gtgactcaaaagttccgatatattg

SEQ ID NO: 95378 - DNA, 25 bp, Homo sapien
gtgactcaaaagatccgatatattg

SEQ ID NO: 95379 - DNA, 25 bp, Homo sapien
tgagtctagaacacccgaagagccg

SEQ ID NO: 95380 - DNA, 25 bp, Homo sapien
tgagtctagaactcccgaagagccg

SEQ ID NO: 95381 - DNA, 25 bp, Homo sapien
caactccgagaggtccggaaggacc

SEQ ID NO: 95382 - DNA, 25 bp, Homo sapien
caactccgagagctccggaaggacc

SEQ ID NO: 95383 - DNA, 25 bp, Homo sapien
cctacccgtgtgaccctaggtaatc

SEQ ID NO: 95384 - DNA, 25 bp, Homo sapien
cctacccgtgtgtccctaggtaatc

SEQ ID NO: 95385 - DNA, 25 bp, Homo sapien
gtcaatgatacgtccacccgagaca

SEQ ID NO: 95386 - DNA, 25 bp, Homo sapien
gtcaatgatacgaccacccgagaca

SEQ ID NO: 95387 - DNA, 25 bp, Homo sapien
acaaacgaaacaagcacggtaccga

SEQ ID NO: 95388 - DNA, 25 bp, Homo sapien
acaaacgaaacatgcacggtaccga

SEQ ID NO: 95389 - DNA, 25 bp, Homo sapien
taaggtcaaaaatggatacaccgct

SEQ ID NO: 95390 - DNA, 25 bp, Homo sapien
taaggtcaaaaaaggatacaccgct

SEQ ID NO: 95391 - DNA, 25 bp, Homo sapien
cctctcgaacgtagggaagacctct

SEQ ID NO: 95392 - DNA, 25 bp, Homo sapien
cctctcgaacgttgggaagacctct

SEQ ID NO: 95393 - DNA, 25 bp, Homo sapien
ctctatgacctatgggagtaaccat

SEQ ID NO: 95394 - DNA, 25 bp, Homo sapien
ctctatgacctaagggagtaaccat

SEQ ID NO: 95395 - DNA, 25 bp, Homo sapien
cttttgtcatagatcaggtaaccat

SEQ ID NO: 95396 - DNA, 25 bp, Homo sapien
cttttgtcatagttcaggtaaccat

SEQ ID NO: 95397 - DNA, 25 bp, Homo sapien
ggaagttacggagataccaaacaat

SEQ ID NO: 95398 - DNA, 25 bp, Homo sapien
ggaagttacggacataccaaacaat

SEQ ID NO: 95399 - DNA, 25 bp, Homo sapien
caagagttaggacaaggacccagat

SEQ ID NO: 95400 - DNA, 25 bp, Homo sapien
caagagttaggagaaggacccagat

SEQ ID NO: 95401 - DNA, 25 bp, Homo sapien
tatatcgttggaagacacgggtacc

SEQ ID NO: 95402 - DNA, 25 bp, Homo sapien
tatatcgttggatgacacgggtacc

SEQ ID NO: 95403 - DNA, 25 bp, Homo sapien
acgttacgtacctcttccacggacc

SEQ ID NO: 95404 - DNA, 25 bp, Homo sapien
acgttacgtaccacttccacggacc

SEQ ID NO: 95405 - DNA, 25 bp, Homo sapien
cgtggtaccggtttcttagagacct

SEQ ID NO: 95406 - DNA, 25 bp, Homo sapien
cgtggtaccggtatcttagagacct

SEQ ID NO: 95407 - DNA, 25 bp, Homo sapien
aagtaaggtaatgaccctaaaaagt

SEQ ID NO: 95408 - DNA, 25 bp, Homo sapien
aagtaaggtaatcaccctaaaaagt

SEQ ID NO: 95409 - DNA, 25 bp, Homo sapien
aaaacgtaaaggtcccctaaagaag

SEQ ID NO: 95410 - DNA, 25 bp, Homo sapien
aaaacgtaaaggacccctaaagaag

SEQ ID NO: 95411 - DNA, 25 bp, Homo sapien
tggtaaaggttccactccactaata

SEQ ID NO: 95412 - DNA, 25 bp, Homo sapien
tggtaaaggttcgactccactaata

SEQ ID NO: 95413 - DNA, 25 bp, Homo sapien
cgttgaaccgtgtaccaaggaccaa

SEQ ID NO: 95414 - DNA, 25 bp, Homo sapien
cgttgaaccgtgaaccaaggaccaa

SEQ ID NO: 95415 - DNA, 25 bp, Homo sapien
gacatttctacaaaccgtagtcgaa

SEQ ID NO: 95416 - DNA, 25 bp, Homo sapien
gacatttctacataccgtagtcgaa

SEQ ID NO: 95417 - DNA, 25 bp, Homo sapien
agttcgtttatcgtcacgtatgata

SEQ ID NO: 95418 - DNA, 25 bp, Homo sapien
agttcgtttatcctcacgtatgata

SEQ ID NO: 95419 - DNA, 25 bp, Homo sapien
ttgtgatcactcttgagttagaact

SEQ ID NO: 95420 - DNA, 25 bp, Homo sapien
ttgtgatcactcatgagttagaact

SEQ ID NO: 95421 - DNA, 25 bp, Homo sapien
actgacaactactgacttttcggtt

SEQ ID NO: 95422 - DNA, 25 bp, Homo sapien
actgacaactacagacttttcggtt

SEQ ID NO: 95423 - DNA, 25 bp, Homo sapien
gggagtaccaacaggcttagtcctc

SEQ ID NO: 95424 - DNA, 25 bp, Homo sapien
gggagtaccaactggcttagtcctc

SEQ ID NO: 95425 - DNA, 25 bp, Homo sapien
ttaaggacgaccacagaatcttttc

SEQ ID NO: 95426 - DNA, 25 bp, Homo sapien
ttaaggacgacctcagaatcttttc

SEQ ID NO: 95427 - DNA, 25 bp, Homo sapien
tcgggactattcacgaattatttgt

SEQ ID NO: 95428 - DNA, 25 bp, Homo sapien
tcgggactattctcgaattatttgt

SEQ ID NO: 95429 - DNA, 25 bp, Homo sapien
ggacgtgcacaggtctattcctctg

SEQ ID NO: 95430 - DNA, 25 bp, Homo sapien
ggacgtgcacagctctattcctctg

SEQ ID NO: 95431 - DNA, 25 bp, Homo sapien
tccgggcgagcgtcgtctttcgacc

SEQ ID NO: 95432 - DNA, 25 bp, Homo sapien
tccgggcgagcgacgtctttcgacc

SEQ ID NO: 95433 - DNA, 25 bp, Homo sapien
atatccggtggtcgaacaccttcca

SEQ ID NO: 95434 - DNA, 25 bp, Homo sapien
atatccggtggtggaacaccttcca

SEQ ID NO: 95435 - DNA, 25 bp, Homo sapien
ctaccactgggagacgggaccccgg

SEQ ID NO: 95436 - DNA, 25 bp, Homo sapien
ctaccactgggacacgggaccccgg

SEQ ID NO: 95437 - DNA, 25 bp, Homo sapien
catcctctggagaccgacccaccgg

SEQ ID NO: 95438 - DNA, 25 bp, Homo sapien
catcctctggagtccgacccaccgg

SEQ ID NO: 95439 - DNA, 25 bp, Homo sapien
cgccgggagctacgaccgcatcggt

SEQ ID NO: 95440 - DNA, 25 bp, Homo sapien
cgccgggagctaggaccgcatcggt

SEQ ID NO: 95441 - DNA, 25 bp, Homo sapien
cgaggaggttgcttcccacgaccgg

SEQ ID NO: 95442 - DNA, 25 bp, Homo sapien
cgaggaggttgcatcccacgaccgg

SEQ ID NO: 95443 - DNA, 25 bp, Homo sapien
cgatcagagtctggtccttccctcg

SEQ ID NO: 95444 - DNA, 25 bp, Homo sapien
cgatcagagtctcgtccttccctcg

SEQ ID NO: 95445 - DNA, 25 bp, Homo sapien
acctctggtcggtagcaggcgtctc

SEQ ID NO: 95446 - DNA, 25 bp, Homo sapien
acctctggtcggaagcaggcgtctc

SEQ ID NO: 95447 - DNA, 25 bp, Homo sapien
cagtcgggttctcacacacccttat

SEQ ID NO: 95448 - DNA, 25 bp, Homo sapien
cagtcgggttctgacacacccttat

SEQ ID NO: 95449 - DNA, 25 bp, Homo sapien
tcgacacctcttgctgtcaggtggt

SEQ ID NO: 95450 - DNA, 25 bp, Homo sapien
tcgacacctcttcctgtcaggtggt

SEQ ID NO: 95451 - DNA, 25 bp, Homo sapien
gagaaggtcccaacaattagggtga

SEQ ID NO: 95452 - DNA, 25 bp, Homo sapien
gagaaggtcccatcaattagggtga

SEQ ID NO: 95453 - DNA, 25 bp, Homo sapien
acatctcctgtcaggtcaaatagac

SEQ ID NO: 95454 - DNA, 25 bp, Homo sapien
acatctcctgtctggtcaaatagac

SEQ ID NO: 95455 - DNA, 25 bp, Homo sapien
gtcatctccgtttgactttaatgtt

SEQ ID NO: 95456 - DNA, 25 bp, Homo sapien
gtcatctccgttagactttaatgtt

SEQ ID NO: 95457 - DNA, 25 bp, Homo sapien
tccgtctaccttcctcgtcatttgg

SEQ ID NO: 95458 - DNA, 25 bp, Homo sapien
tccgtctaccttgctcgtcatttgg

SEQ ID NO: 95459 - DNA, 25 bp, Homo sapien
atcaggccctttgtctacgactcca

SEQ ID NO: 95460 - DNA, 25 bp, Homo sapien
atcaggccctttctctacgactcca

SEQ ID NO: 95461 - DNA, 25 bp, Homo sapien
ccctgagccctagtgactgcctaaa

SEQ ID NO: 95462 - DNA, 25 bp, Homo sapien
ccctgagccctactgactgcctaaa

SEQ ID NO: 95463 - DNA, 25 bp, Homo sapien
gagccaccgcgtacttcgacagagc

SEQ ID NO: 95464 - DNA, 25 bp, Homo sapien
gagccaccgcgttcttcgacagagc

SEQ ID NO: 95465 - DNA, 25 bp, Homo sapien
gctctactcgagcttgtgacgggcg

SEQ ID NO: 95466 - DNA, 25 bp, Homo sapien
gctctactcgaggttgtgacgggcg

SEQ ID NO: 95467 - DNA, 25 bp, Homo sapien
tccaaccgaggtgagtgaggtctcg

SEQ ID NO: 95468 - DNA, 25 bp, Homo sapien
tccaaccgaggtcagtgaggtctcg

SEQ ID NO: 95469 - DNA, 25 bp, Homo sapien
cgtcaccgagtcctgagagacgatc

SEQ ID NO: 95470 - DNA, 25 bp, Homo sapien
cgtcaccgagtcgtgagagacgatc

SEQ ID NO: 95471 - DNA, 25 bp, Homo sapien
tctgtgctcagtcctaaacgacatg

SEQ ID NO: 95472 - DNA, 25 bp, Homo sapien
tctgtgctcagtgctaaacgacatg

SEQ ID NO: 95473 - DNA, 25 bp, Homo sapien
gtagtagagtccttcaagacaactt

SEQ ID NO: 95474 - DNA, 25 bp, Homo sapien
gtagtagagtccatcaagacaactt

SEQ ID NO: 95475 - DNA, 25 bp, Homo sapien
tccttcttctccttccgggtaacga

SEQ ID NO: 95476 - DNA, 25 bp, Homo sapien
tccttcttctccatccgggtaacga

SEQ ID NO: 95477 - DNA, 25 bp, Homo sapien
tttcgtcgtctctcaagtcgtccct

SEQ ID NO: 95478 - DNA, 25 bp, Homo sapien
tttcgtcgtctcacaagtcgtccct

SEQ ID NO: 95479 - DNA, 25 bp, Homo sapien
taaccgtaccgtgaatttctgacgt

SEQ ID NO: 95480 - DNA, 25 bp, Homo sapien
taaccgtaccgtcaatttctgacgt

SEQ ID NO: 95481 - DNA, 25 bp, Homo sapien
gacttagactcctgaagtttctctg

SEQ ID NO: 95482 - DNA, 25 bp, Homo sapien
gacttagactccagaagtttctctg

SEQ ID NO: 95483 - DNA, 25 bp, Homo sapien
ggtaagactgacaagatgactccct

SEQ ID NO: 95484 - DNA, 25 bp, Homo sapien
ggtaagactgactagatgactccct

SEQ ID NO: 95485 - DNA, 25 bp, Homo sapien
atggatatacacacacgtttctgtt

SEQ ID NO: 95486 - DNA, 25 bp, Homo sapien
atggatatacactcacgtttctgtt

SEQ ID NO: 95487 - DNA, 25 bp, Homo sapien
aggaggagtccatcgagtttaacga

SEQ ID NO: 95488 - DNA, 25 bp, Homo sapien
aggaggagtccaacgagtttaacga

SEQ ID NO: 95489 - DNA, 25 bp, Homo sapien
agacggggttgaaccgactaggatt

SEQ ID NO: 95490 - DNA, 25 bp, Homo sapien
agacggggttgatccgactaggatt

SEQ ID NO: 95491 - DNA, 25 bp, Homo sapien
ccgtgggacgtgaacgacctgtccc

SEQ ID NO: 95492 - DNA, 25 bp, Homo sapien
ccgtgggacgtgtacgacctgtccc

SEQ ID NO: 95493 - DNA, 25 bp, Homo sapien
aaacattctggtctacatattccgg

SEQ ID NO: 95494 - DNA, 25 bp, Homo sapien
aaacattctggtgtacatattccgg

SEQ ID NO: 95495 - DNA, 25 bp, Homo sapien
acgaatcttttatcgcaagtgccgg

SEQ ID NO: 95496 - DNA, 25 bp, Homo sapien
acgaatcttttaacgcaagtgccgg

SEQ ID NO: 95497 - DNA, 25 bp, Homo sapien
gaaatgtctgttcgaacgactggga

SEQ ID NO: 95498 - DNA, 25 bp, Homo sapien
gaaatgtctgttggaacgactggga

SEQ ID NO: 95499 - DNA, 25 bp, Homo sapien
aagtgttcgatttcatactcggaga

SEQ ID NO: 95500 - DNA, 25 bp, Homo sapien
aagtgttcgattacatactcggaga

SEQ ID NO: 95501 - DNA, 25 bp, Homo sapien
gtgtataggtgtgctttcattttcc

SEQ ID NO: 95502 - DNA, 25 bp, Homo sapien
gtgtataggtgtcctttcattttcc

SEQ ID NO: 95503 - DNA, 25 bp, Homo sapien
gtactggtcgtgtccctgttcttga

SEQ ID NO: 95504 - DNA, 25 bp, Homo sapien
gtactggtcgtgaccctgttcttga

SEQ ID NO: 95505 - DNA, 25 bp, Homo sapien
cttgtgtcatgtccatagttttgtg

SEQ ID NO: 95506 - DNA, 25 bp, Homo sapien
cttgtgtcatgtgcatagttttgtg

SEQ ID NO: 95507 - DNA, 25 bp, Homo sapien
ccttggtctccaagagtatcctgaa

SEQ ID NO: 95508 - DNA, 25 bp, Homo sapien
ccttggtctccatgagtatcctgaa

SEQ ID NO: 95509 - DNA, 25 bp, Homo sapien
atacagaaccaccagtgcgggagtt

SEQ ID NO: 95510 - DNA, 25 bp, Homo sapien
atacagaaccacgagtgcgggagtt

SEQ ID NO: 95511 - DNA, 25 bp, Homo sapien
aacagtaagttctactagcaagaga

SEQ ID NO: 95512 - DNA, 25 bp, Homo sapien
aacagtaagttcaactagcaagaga

SEQ ID NO: 95513 - DNA, 25 bp, Homo sapien
atgagatttctcacaccggtagata

SEQ ID NO: 95514 - DNA, 25 bp, Homo sapien
atgagatttctctcaccggtagata

SEQ ID NO: 95515 - DNA, 25 bp, Homo sapien
atcaggtgtggctacaaccgtagaa

SEQ ID NO: 95516 - DNA, 25 bp, Homo sapien
atcaggtgtggcaacaaccgtagaa

SEQ ID NO: 95517 - DNA, 25 bp, Homo sapien
ccagagaggattcactgacagtgga

SEQ ID NO: 95518 - DNA, 25 bp, Homo sapien
ccagagaggattgactgacagtgga

SEQ ID NO: 95519 - DNA, 25 bp, Homo sapien
ccacagaccttcgtgtcgtctagaa

SEQ ID NO: 95520 - DNA, 25 bp, Homo sapien
ccacagaccttcctgtcgtctagaa

SEQ ID NO: 95521 - DNA, 25 bp, Homo sapien
gaaaaagttcgtgtcactagtcacg

SEQ ID NO: 95522 - DNA, 25 bp, Homo sapien
gaaaaagttcgtctcactagtcacg

SEQ ID NO: 95523 - DNA, 25 bp, Homo sapien
ataaagtacaaagatctcggagaat

SEQ ID NO: 95524 - DNA, 25 bp, Homo sapien
ataaagtacaaacatctcggagaat

SEQ ID NO: 95525 - DNA, 25 bp, Homo sapien
taataattgactcacaccggagatc

SEQ ID NO: 95526 - DNA, 25 bp, Homo sapien
taataattgactgacaccggagatc

SEQ ID NO: 95527 - DNA, 25 bp, Homo sapien
ggtaactctaaactagccattgtcc

SEQ ID NO: 95528 - DNA, 25 bp, Homo sapien
ggtaactctaaagtagccattgtcc

SEQ ID NO: 95529 - DNA, 25 bp, Homo sapien
agtccaagtcgtacatcggctcgcg

SEQ ID NO: 95530 - DNA, 25 bp, Homo sapien
agtccaagtcgttcatcggctcgcg

SEQ ID NO: 95531 - DNA, 25 bp, Homo sapien
ttagcccctgtggtcgacgtgtctg

SEQ ID NO: 95532 - DNA, 25 bp, Homo sapien
ttagcccctgtgctcgacgtgtctg

SEQ ID NO: 95533 - DNA, 25 bp, Homo sapien
attagtcattcaccttcgacgtggg

SEQ ID NO: 95534 - DNA, 25 bp, Homo sapien
attagtcattcagcttcgacgtggg

SEQ ID NO: 95535 - DNA, 25 bp, Homo sapien
ttatgttactttaaccttcactggg

SEQ ID NO: 95536 - DNA, 25 bp, Homo sapien
ttatgttacttttaccttcactggg

SEQ ID NO: 95537 - DNA, 25 bp, Homo sapien
cttctgtcctctatggtccctcggg

SEQ ID NO: 95538 - DNA, 25 bp, Homo sapien
cttctgtcctctttggtccctcggg

SEQ ID NO: 95539 - DNA, 25 bp, Homo sapien
cacctttctaggtccagtttggtgt

SEQ ID NO: 95540 - DNA, 25 bp, Homo sapien
cacctttctaggaccagtttggtgt

SEQ ID NO: 95541 - DNA, 25 bp, Homo sapien
atgtttcgaggttccagtttcgagg

SEQ ID NO: 95542 - DNA, 25 bp, Homo sapien
atgtttcgaggtaccagtttcgagg

SEQ ID NO: 95543 - DNA, 25 bp, Homo sapien
attgatagcttcttcagcgttgatg

SEQ ID NO: 95544 - DNA, 25 bp, Homo sapien
attgatagcttcatcagcgttgatg

SEQ ID NO: 95545 - DNA, 25 bp, Homo sapien
agagacacatcaacactgaaggtat

SEQ ID NO: 95546 - DNA, 25 bp, Homo sapien
agagacacatcatcactgaaggtat

SEQ ID NO: 95547 - DNA, 25 bp, Homo sapien
aaaacgacccgagactgagggtcgt

SEQ ID NO: 95548 - DNA, 25 bp, Homo sapien
aaaacgacccgacactgagggtcgt

SEQ ID NO: 95549 - DNA, 25 bp, Homo sapien
taacggtgggctgaatgagacgttc

SEQ ID NO: 95550 - DNA, 25 bp, Homo sapien
taacggtgggctcaatgagacgttc

SEQ ID NO: 95551 - DNA, 25 bp, Homo sapien
acagtggtgtcgaccgtcgaagtcc

SEQ ID NO: 95552 - DNA, 25 bp, Homo sapien
acagtggtgtcgtccgtcgaagtcc

SEQ ID NO: 95553 - DNA, 25 bp, Homo sapien
agacacctggggtcgagtcgagccc

SEQ ID NO: 95554 - DNA, 25 bp, Homo sapien
agacacctggggacgagtcgagccc

SEQ ID NO: 95555 - DNA, 25 bp, Homo sapien
cgaaacatgggacagaacaccgtcc

SEQ ID NO: 95556 - DNA, 25 bp, Homo sapien
cgaaacatgggagagaacaccgtcc

SEQ ID NO: 95557 - DNA, 25 bp, Homo sapien
aaatgtggtatcttaaacagtcgac

SEQ ID NO: 95558 - DNA, 25 bp, Homo sapien
aaatgtggtatcataaacagtcgac

SEQ ID NO: 95559 - DNA, 25 bp, Homo sapien
tacagtaggtagcaccgacccatcg

SEQ ID NO: 95560 - DNA, 25 bp, Homo sapien
tacagtaggtaggaccgacccatcg

SEQ ID NO: 95561 - DNA, 25 bp, Homo sapien
ggctcccttgtcgtgggccccatag

SEQ ID NO: 95562 - DNA, 25 bp, Homo sapien
ggctcccttgtcctgggccccatag

SEQ ID NO: 95563 - DNA, 25 bp, Homo sapien
ctcgcttccgttactgttcccggaa

SEQ ID NO: 95564 - DNA, 25 bp, Homo sapien
ctcgcttccgtttctgttcccggaa

SEQ ID NO: 95565 - DNA, 25 bp, Homo sapien
tcgatgaggtataccggtcccagga

SEQ ID NO: 95566 - DNA, 25 bp, Homo sapien
tcgatgaggtattccggtcccagga

SEQ ID NO: 95567 - DNA, 25 bp, Homo sapien
agtcagttgtcctacaccgagagat

SEQ ID NO: 95568 - DNA, 25 bp, Homo sapien
agtcagttgtccaacaccgagagat

SEQ ID NO: 95569 - DNA, 25 bp, Homo sapien
gtagttatcagtcacctaggaacac

SEQ ID NO: 95570 - DNA, 25 bp, Homo sapien
gtagttatcagtgacctaggaacac

SEQ ID NO: 95571 - DNA, 25 bp, Homo sapien
gtgacacgccactgacgctgggacc

SEQ ID NO: 95572 - DNA, 25 bp, Homo sapien
gtgacacgccacagacgctgggacc

SEQ ID NO: 95573 - DNA, 25 bp, Homo sapien
ggacagtgtcggtcccgagtgacac

SEQ ID NO: 95574 - DNA, 25 bp, Homo sapien
ggacagtgtcggacccgagtgacac

SEQ ID NO: 95575 - DNA, 25 bp, Homo sapien
ggacaacctagttgaacctctaaat

SEQ ID NO: 95576 - DNA, 25 bp, Homo sapien
ggacaacctagtagaacctctaaat

SEQ ID NO: 95577 - DNA, 25 bp, Homo sapien
gacggaatccatttttcgtctccat

SEQ ID NO: 95578 - DNA, 25 bp, Homo sapien
gacggaatccatatttcgtctccat

SEQ ID NO: 95579 - DNA, 25 bp, Homo sapien
gaaaacaacttggtctcggtccagt

SEQ ID NO: 95580 - DNA, 25 bp, Homo sapien
gaaaacaacttgctctcggtccagt

SEQ ID NO: 95581 - DNA, 25 bp, Homo sapien
aaaataacaattcgacgttgcatgt

SEQ ID NO: 95582 - DNA, 25 bp, Homo sapien
aaaataacaattggacgttgcatgt

SEQ ID NO: 95583 - DNA, 25 bp, Homo sapien
acgaaaaacgaattttaagaccttt

SEQ ID NO: 95584 - DNA, 25 bp, Homo sapien
acgaaaaacgaaatttaagaccttt

SEQ ID NO: 95585 - DNA, 25 bp, Homo sapien
aaataaccgttcgattaacattgta

SEQ ID NO: 95586 - DNA, 25 bp, Homo sapien
aaataaccgttccattaacattgta

SEQ ID NO: 95587 - DNA, 25 bp, Homo sapien
aaataacgtatgagtccacttattg

SEQ ID NO: 95588 - DNA, 25 bp, Homo sapien
aaataacgtatgtgtccacttattg

SEQ ID NO: 95589 - DNA, 25 bp, Homo sapien
tcgtttgtctaggaaacattacaag

SEQ ID NO: 95590 - DNA, 25 bp, Homo sapien
tcgtttgtctagcaaacattacaag

SEQ ID NO: 95591 - DNA, 25 bp, Homo sapien
cgatttttcgtacaattctaagtgt

SEQ ID NO: 95592 - DNA, 25 bp, Homo sapien
cgatttttcgtagaattctaagtgt

SEQ ID NO: 95593 - DNA, 25 bp, Homo sapien
aacttcagacataggacacaacgtt

SEQ ID NO: 95594 - DNA, 25 bp, Homo sapien
aacttcagacattggacacaacgtt

SEQ ID NO: 95595 - DNA, 25 bp, Homo sapien
acctcttctcacatgggaccctaga

SEQ ID NO: 95596 - DNA, 25 bp, Homo sapien
acctcttctcacttgggaccctaga

SEQ ID NO: 95597 - DNA, 25 bp, Homo sapien
aagacctgtaccttcggatgtctta

SEQ ID NO: 95598 - DNA, 25 bp, Homo sapien
aagacctgtaccatcggatgtctta

SEQ ID NO: 95599 - DNA, 25 bp, Homo sapien
gtcacgtgtctgtcaagttattact

SEQ ID NO: 95600 - DNA, 25 bp, Homo sapien
gtcacgtgtctgacaagttattact

SEQ ID NO: 95601 - DNA, 25 bp, Homo sapien
agggacaggagctgagtgacacact

SEQ ID NO: 95602 - DNA, 25 bp, Homo sapien
agggacaggagcagagtgacacact

SEQ ID NO: 95603 - DNA, 25 bp, Homo sapien
catactccggggtcccgagatacca

SEQ ID NO: 95604 - DNA, 25 bp, Homo sapien
catactccggggacccgagatacca

SEQ ID NO: 95605 - DNA, 25 bp, Homo sapien
aaccgggtcggcaactgcacgcgca

SEQ ID NO: 95606 - DNA, 25 bp, Homo sapien
aaccgggtcggctactgcacgcgca

SEQ ID NO: 95607 - DNA, 25 bp, Homo sapien
gaagtggtggtacctcttccgaccc

SEQ ID NO: 95608 - DNA, 25 bp, Homo sapien
gaagtggtggtagctcttccgaccc

SEQ ID NO: 95609 - DNA, 25 bp, Homo sapien
tcggacaagggcaccctagttggaa

SEQ ID NO: 95610 - DNA, 25 bp, Homo sapien
tcggacaagggctccctagttggaa

SEQ ID NO: 95611 - DNA, 25 bp, Homo sapien
ggagaaaagatctactccaggggaa

SEQ ID NO: 95612 - DNA, 25 bp, Homo sapien
ggagaaaagatcaactccaggggaa

SEQ ID NO: 95613 - DNA, 25 bp, Homo sapien
gaacctgtgctaccagaacgtgaac

SEQ ID NO: 95614 - DNA, 25 bp, Homo sapien
gaacctgtgctagcagaacgtgaac

SEQ ID NO: 95615 - DNA, 25 bp, Homo sapien
acacgactactaacccagtagggcc

SEQ ID NO: 95616 - DNA, 25 bp, Homo sapien
acacgactactatcccagtagggcc

SEQ ID NO: 95617 - DNA, 25 bp, Homo sapien
aatactgtcgtgattccataatgca

SEQ ID NO: 95618 - DNA, 25 bp, Homo sapien
aatactgtcgtgtttccataatgca

SEQ ID NO: 95619 - DNA, 25 bp, Homo sapien
atcaattgtcgaattccataaagtg

SEQ ID NO: 95620 - DNA, 25 bp, Homo sapien
atcaattgtcgatttccataaagtg

SEQ ID NO: 95621 - DNA, 25 bp, Homo sapien
gatgttgtcatcttaccaaacttgt

SEQ ID NO: 95622 - DNA, 25 bp, Homo sapien
gatgttgtcatcataccaaacttgt

SEQ ID NO: 95623 - DNA, 25 bp, Homo sapien
gtgtttatagacactaaagtcacct

SEQ ID NO: 95624 - DNA, 25 bp, Homo sapien
gtgtttatagactctaaagtcacct

SEQ ID NO: 95625 - DNA, 25 bp, Homo sapien
atgtcgtaactgtctacagtcggcc

SEQ ID NO: 95626 - DNA, 25 bp, Homo sapien
atgtcgtaactgactacagtcggcc

SEQ ID NO: 95627 - DNA, 25 bp, Homo sapien
tacgacacgtacgacttaggcgcct

SEQ ID NO: 95628 - DNA, 25 bp, Homo sapien
tacgacacgtaccacttaggcgcct

SEQ ID NO: 95629 - DNA, 25 bp, Homo sapien
cacacctccgaccagtagtcgagtt

SEQ ID NO: 95630 - DNA, 25 bp, Homo sapien
cacacctccgacgagtagtcgagtt

SEQ ID NO: 95631 - DNA, 25 bp, Homo sapien
aaaaaagtcttaaatgaccaacggt

SEQ ID NO: 95632 - DNA, 25 bp, Homo sapien
aaaaaagtcttatatgaccaacggt

SEQ ID NO: 95633 - DNA, 25 bp, Homo sapien
aacaagtaaaatgaccgagactagt

SEQ ID NO: 95634 - DNA, 25 bp, Homo sapien
aacaagtaaaatcaccgagactagt

SEQ ID NO: 95635 - DNA, 25 bp, Homo sapien
cgttgtgagacataggacccagtgt

SEQ ID NO: 95636 - DNA, 25 bp, Homo sapien
cgttgtgagacaaaggacccagtgt

SEQ ID NO: 95637 - DNA, 25 bp, Homo sapien
cgacttgtggaagaggatctacatg

SEQ ID NO: 95638 - DNA, 25 bp, Homo sapien
cgacttgtggaacaggatctacatg

SEQ ID NO: 95639 - DNA, 25 bp, Homo sapien
tcactgatgtcacagaacttaatcg

SEQ ID NO: 95640 - DNA, 25 bp, Homo sapien
tcactgatgtcagagaacttaatcg

SEQ ID NO: 95641 - DNA, 25 bp, Homo sapien
atataatgacaaaacgaaacataaa

SEQ ID NO: 95642 - DNA, 25 bp, Homo sapien
atataatgacaatacgaaacataaa

SEQ ID NO: 95643 - DNA, 25 bp, Homo sapien
aagaaatttaaagttaactgtcctt

SEQ ID NO: 95644 - DNA, 25 bp, Homo sapien
aagaaatttaaacttaactgtcctt

SEQ ID NO: 95645 - DNA, 25 bp, Homo sapien
ttaagtattttaaatttattccact

SEQ ID NO: 95646 - DNA, 25 bp, Homo sapien
ttaagtattttatatttattccact

SEQ ID NO: 95647 - DNA, 25 bp, Homo sapien
ggatctactcgttttgacttttact

SEQ ID NO: 95648 - DNA, 25 bp, Homo sapien
ggatctactcgtattgacttttact

SEQ ID NO: 95649 - DNA, 25 bp, Homo sapien
ctttacgtcgatgtcagcgtacgtt

SEQ ID NO: 95650 - DNA, 25 bp, Homo sapien
ctttacgtcgatctcagcgtacgtt

SEQ ID NO: 95651 - DNA, 25 bp, Homo sapien
actgtcgtcgcactatacagagaga

SEQ ID NO: 95652 - DNA, 25 bp, Homo sapien
actgtcgtcgcagtatacagagaga

SEQ ID NO: 95653 - DNA, 25 bp, Homo sapien
aggacgttcttctaactgaagtagg

SEQ ID NO: 95654 - DNA, 25 bp, Homo sapien
aggacgttcttcaaactgaagtagg

SEQ ID NO: 95655 - DNA, 25 bp, Homo sapien
aaaaagactcgagaccaaacggaaa

SEQ ID NO: 95656 - DNA, 25 bp, Homo sapien
aaaaagactcgacaccaaacggaaa

SEQ ID NO: 95657 - DNA, 25 bp, Homo sapien
ttaattgtaggaaagcccgactgag

SEQ ID NO: 95658 - DNA, 25 bp, Homo sapien
ttaattgtaggatagcccgactgag

SEQ ID NO: 95659 - DNA, 25 bp, Homo sapien
ttttgtactgacaagtcctcacaag

SEQ ID NO: 95660 - DNA, 25 bp, Homo sapien
ttttgtactgactagtcctcacaag

SEQ ID NO: 95661 - DNA, 25 bp, Homo sapien
ttgtctctggattaggtctccagac

SEQ ID NO: 95662 - DNA, 25 bp, Homo sapien
ttgtctctggataaggtctccagac

SEQ ID NO: 95663 - DNA, 25 bp, Homo sapien
agcttcaggtctaggactcacagac

SEQ ID NO: 95664 - DNA, 25 bp, Homo sapien
agcttcaggtcttggactcacagac

SEQ ID NO: 95665 - DNA, 25 bp, Homo sapien
taagacttcccgaggtcggatccac

SEQ ID NO: 95666 - DNA, 25 bp, Homo sapien
taagacttcccgtggtcggatccac

SEQ ID NO: 95667 - DNA, 25 bp, Homo sapien
cctaagatgcaccaagagaaccaag

SEQ ID NO: 95668 - DNA, 25 bp, Homo sapien
cctaagatgcacgaagagaaccaag

SEQ ID NO: 95669 - DNA, 25 bp, Homo sapien
tccgtcgaccccaggtggaccagag

SEQ ID NO: 95670 - DNA, 25 bp, Homo sapien
tccgtcgacccctggtggaccagag

SEQ ID NO: 95671 - DNA, 25 bp, Homo sapien
gaactgcaacacctggtccttgaag

SEQ ID NO: 95672 - DNA, 25 bp, Homo sapien
gaactgcaacacgtggtccttgaag

SEQ ID NO: 95673 - DNA, 25 bp, Homo sapien
cctgaggaaccgtagcctgtgtcag

SEQ ID NO: 95674 - DNA, 25 bp, Homo sapien
cctgaggaaccgaagcctgtgtcag

SEQ ID NO: 95675 - DNA, 25 bp, Homo sapien
gacctgaagaggggtcaccttcgga

SEQ ID NO: 95676 - DNA, 25 bp, Homo sapien
gacctgaagaggcgtcaccttcgga

SEQ ID NO: 95677 - DNA, 25 bp, Homo sapien
ttcttggagatagtcactctgaaga

SEQ ID NO: 95678 - DNA, 25 bp, Homo sapien
ttcttggagatactcactctgaaga

SEQ ID NO: 95679 - DNA, 25 bp, Homo sapien
ggtaaatgcgagtgggctctgaaca

SEQ ID NO: 95680 - DNA, 25 bp, Homo sapien
ggtaaatgcgagagggctctgaaca

SEQ ID NO: 95681 - DNA, 25 bp, Homo sapien
ctaagatgcaccaagagaaccaagg

SEQ ID NO: 95682 - DNA, 25 bp, Homo sapien
ctaagatgcacctagagaaccaagg

SEQ ID NO: 95683 - DNA, 25 bp, Homo sapien
taaagtatcaaacctggagccacca

SEQ ID NO: 95684 - DNA, 25 bp, Homo sapien
taaagtatcaaagctggagccacca

SEQ ID NO: 95685 - DNA, 25 bp, Homo sapien
gtaactttggaatgtccccgtcgga

SEQ ID NO: 95686 - DNA, 25 bp, Homo sapien
gtaactttggaaagtccccgtcgga

SEQ ID NO: 95687 - DNA, 25 bp, Homo sapien
gtgacgactttcaaaccttttgtat

SEQ ID NO: 95688 - DNA, 25 bp, Homo sapien
gtgacgactttctaaccttttgtat

SEQ ID NO: 95689 - DNA, 25 bp, Homo sapien
gtcctctgtgtgacgggtaactcca

SEQ ID NO: 95690 - DNA, 25 bp, Homo sapien
gtcctctgtgtgtcgggtaactcca

SEQ ID NO: 95691 - DNA, 25 bp, Homo sapien
tcgtccttggtttatcaaccctcga

SEQ ID NO: 95692 - DNA, 25 bp, Homo sapien
tcgtccttggttaatcaaccctcga

SEQ ID NO: 95693 - DNA, 25 bp, Homo sapien
ctttctgtggaaaagagttctcgac

SEQ ID NO: 95694 - DNA, 25 bp, Homo sapien
ctttctgtggaatagagttctcgac

SEQ ID NO: 95695 - DNA, 25 bp, Homo sapien
gtcatcacttgtctctgtttcacga

SEQ ID NO: 95696 - DNA, 25 bp, Homo sapien
gtcatcacttgtgtctgtttcacga

SEQ ID NO: 95697 - DNA, 25 bp, Homo sapien
ccctcagtgtgtgtattgtattatt

SEQ ID NO: 95698 - DNA, 25 bp, Homo sapien
ccctcagtgtgtctattgtattatt

SEQ ID NO: 95699 - DNA, 25 bp, Homo sapien
ccttcagatagtcctgtcccacttt

SEQ ID NO: 95700 - DNA, 25 bp, Homo sapien
ccttcagatagtgctgtcccacttt

SEQ ID NO: 95701 - DNA, 25 bp, Homo sapien
ctcgggagagaagtcggtccgccaa

SEQ ID NO: 95702 - DNA, 25 bp, Homo sapien
ctcgggagagaactcggtccgccaa

SEQ ID NO: 95703 - DNA, 25 bp, Homo sapien
gtgggagattatcgatcgaacaaac

SEQ ID NO: 95704 - DNA, 25 bp, Homo sapien
gtgggagattatggatcgaacaaac

SEQ ID NO: 95705 - DNA, 25 bp, Homo sapien
gtccaagtatttgcaacaagataat

SEQ ID NO: 95706 - DNA, 25 bp, Homo sapien
gtccaagtatttccaacaagataat

SEQ ID NO: 95707 - DNA, 25 bp, Homo sapien
tccgggggcattacggcgagtaact

SEQ ID NO: 95708 - DNA, 25 bp, Homo sapien
tccgggggcatttcggcgagtaact

SEQ ID NO: 95709 - DNA, 25 bp, Homo sapien
atcttgtctatagtgaggtcgtacg

SEQ ID NO: 95710 - DNA, 25 bp, Homo sapien
atcttgtctatactgaggtcgtacg

SEQ ID NO: 95711 - DNA, 25 bp, Homo sapien
tagtctttcgttcatgttctgtacg

SEQ ID NO: 95712 - DNA, 25 bp, Homo sapien
tagtctttcgttgatgttctgtacg

SEQ ID NO: 95713 - DNA, 25 bp, Homo sapien
ataacgggtcggacaggtcgacgtc

SEQ ID NO: 95714 - DNA, 25 bp, Homo sapien
ataacgggtcggtcaggtcgacgtc

SEQ ID NO: 95715 - DNA, 25 bp, Homo sapien
ataacgtgttgtagcaggtgacgac

SEQ ID NO: 95716 - DNA, 25 bp, Homo sapien
ataacgtgttgttgcaggtgacgac

SEQ ID NO: 95717 - DNA, 25 bp, Homo sapien
ctaaaaagatcatctgcgaataaga

SEQ ID NO: 95718 - DNA, 25 bp, Homo sapien
ctaaaaagatcaactgcgaataaga

SEQ ID NO: 95719 - DNA, 25 bp, Homo sapien
actacgagaacttccagagtataca

SEQ ID NO: 95720 - DNA, 25 bp, Homo sapien
actacgagaactaccagagtataca

SEQ ID NO: 95721 - DNA, 25 bp, Homo sapien
ggtaaacactgttactgatattaca

SEQ ID NO: 95722 - DNA, 25 bp, Homo sapien
ggtaaacactgtaactgatattaca

SEQ ID NO: 95723 - DNA, 25 bp, Homo sapien
gacaaacgacgatactgtttttatg

SEQ ID NO: 95724 - DNA, 25 bp, Homo sapien
gacaaacgacgaaactgtttttatg

SEQ ID NO: 95725 - DNA, 25 bp, Homo sapien
cagtatacgatagtccttttatatc

SEQ ID NO: 95726 - DNA, 25 bp, Homo sapien
cagtatacgatactccttttatatc

SEQ ID NO: 95727 - DNA, 25 bp, Homo sapien
gtatagacggtatcatttttaagta

SEQ ID NO: 95728 - DNA, 25 bp, Homo sapien
gtatagacggtaacatttttaagta

SEQ ID NO: 95729 - DNA, 25 bp, Homo sapien
tcgggccaccggtcctcctagggca

SEQ ID NO: 95730 - DNA, 25 bp, Homo sapien
tcgggccaccggacctcctagggca

SEQ ID NO: 95731 - DNA, 25 bp, Homo sapien
gtaacgccgagaacttcagcgccac

SEQ ID NO: 95732 - DNA, 25 bp, Homo sapien
gtaacgccgagatcttcagcgccac

SEQ ID NO: 95733 - DNA, 25 bp, Homo sapien
tccgttgcagctccagtgactatac

SEQ ID NO: 95734 - DNA, 25 bp, Homo sapien
tccgttgcagctgcagtgactatac

SEQ ID NO: 95735 - DNA, 25 bp, Homo sapien
acatgggacctgtagagacgacgag

SEQ ID NO: 95736 - DNA, 25 bp, Homo sapien
acatgggacctgaagagacgacgag

SEQ ID NO: 95737 - DNA, 25 bp, Homo sapien
tattatgaggatttactatagaccc

SEQ ID NO: 95738 - DNA, 25 bp, Homo sapien
tattatgaggatatactatagaccc

SEQ ID NO: 95739 - DNA, 25 bp, Homo sapien
ggctcagcggctctaaatacagacg

SEQ ID NO: 95740 - DNA, 25 bp, Homo sapien
ggctcagcggctgtaaatacagacg

SEQ ID NO: 95741 - DNA, 25 bp, Homo sapien
ataaaagtggtctttaggtctaccc

SEQ ID NO: 95742 - DNA, 25 bp, Homo sapien
ataaaagtggtcattaggtctaccc

SEQ ID NO: 95743 - DNA, 25 bp, Homo sapien
caaagttatgtttgtcaggtctttc

SEQ ID NO: 95744 - DNA, 25 bp, Homo sapien
caaagttatgttagtcaggtctttc

SEQ ID NO: 95745 - DNA, 25 bp, Homo sapien
tctcctttcgtgagtctgaataaac

SEQ ID NO: 95746 - DNA, 25 bp, Homo sapien
tctcctttcgtgtgtctgaataaac

SEQ ID NO: 95747 - DNA, 25 bp, Homo sapien
tacaaaggagtctaaaacgatcgtc

SEQ ID NO: 95748 - DNA, 25 bp, Homo sapien
tacaaaggagtcaaaaacgatcgtc

SEQ ID NO: 95749 - DNA, 25 bp, Homo sapien
cggcgtattggtcactttgtcgtaa

SEQ ID NO: 95750 - DNA, 25 bp, Homo sapien
cggcgtattggtgactttgtcgtaa

SEQ ID NO: 95751 - DNA, 25 bp, Homo sapien
ggcccgacggtgctggttcactgtc

SEQ ID NO: 95752 - DNA, 25 bp, Homo sapien
ggcccgacggtggtggttcactgtc

SEQ ID NO: 95753 - DNA, 25 bp, Homo sapien
gtcatgagtttgagtagcatccagt

SEQ ID NO: 95754 - DNA, 25 bp, Homo sapien
gtcatgagtttgtgtagcatccagt

SEQ ID NO: 95755 - DNA, 25 bp, Homo sapien
ggaacatgtaatcgtattattccca

SEQ ID NO: 95756 - DNA, 25 bp, Homo sapien
ggaacatgtaatggtattattccca

SEQ ID NO: 95757 - DNA, 25 bp, Homo sapien
cacaagtaatacgaaaacttccgag

SEQ ID NO: 95758 - DNA, 25 bp, Homo sapien
cacaagtaataccaaaacttccgag

SEQ ID NO: 95759 - DNA, 25 bp, Homo sapien
ccacagtggaggaactctattccga

SEQ ID NO: 95760 - DNA, 25 bp, Homo sapien
ccacagtggaggtactctattccga

SEQ ID NO: 95761 - DNA, 25 bp, Homo sapien
tcacagggaactttacgtgttccga

SEQ ID NO: 95762 - DNA, 25 bp, Homo sapien
tcacagggaactatacgtgttccga

SEQ ID NO: 95763 - DNA, 25 bp, Homo sapien
acactcacgatttatgtctcctcgg

SEQ ID NO: 95764 - DNA, 25 bp, Homo sapien
acactcacgattaatgtctcctcgg

SEQ ID NO: 95765 - DNA, 25 bp, Homo sapien
ggttctcgccgtgatgtatctcccc

SEQ ID NO: 95766 - DNA, 25 bp, Homo sapien
ggttctcgccgtcatgtatctcccc

SEQ ID NO: 95767 - DNA, 25 bp, Homo sapien
ggtttgtccgtcgtcttcgtcccac

SEQ ID NO: 95768 - DNA, 25 bp, Homo sapien
ggtttgtccgtcctcttcgtcccac

SEQ ID NO: 95769 - DNA, 25 bp, Homo sapien
cggtgggtcgccacactacctgaac

SEQ ID NO: 95770 - DNA, 25 bp, Homo sapien
cggtgggtcgcctcactacctgaac

SEQ ID NO: 95771 - DNA, 25 bp, Homo sapien
ggtcggaggttctcgctgtccaacg

SEQ ID NO: 95772 - DNA, 25 bp, Homo sapien
ggtcggaggttcacgctgtccaacg

SEQ ID NO: 95773 - DNA, 25 bp, Homo sapien
gtaaacagtaaggttctctaggaac

SEQ ID NO: 95774 - DNA, 25 bp, Homo sapien
gtaaacagtaagcttctctaggaac

SEQ ID NO: 95775 - DNA, 25 bp, Homo sapien
accaagtcacgtctctcgacgacaa

SEQ ID NO: 95776 - DNA, 25 bp, Homo sapien
accaagtcacgtgtctcgacgacaa

SEQ ID NO: 95777 - DNA, 25 bp, Homo sapien
accacggcggtctgtcgtgacacaa

SEQ ID NO: 95778 - DNA, 25 bp, Homo sapien
accacggcggtcagtcgtgacacaa

SEQ ID NO: 95779 - DNA, 25 bp, Homo sapien
ctttcgacacttacctcggagactt

SEQ ID NO: 95780 - DNA, 25 bp, Homo sapien
ctttcgacactttcctcggagactt

SEQ ID NO: 95781 - DNA, 25 bp, Homo sapien
gaaggtcccatcagtcccggaggtg

SEQ ID NO: 95782 - DNA, 25 bp, Homo sapien
gaaggtcccatctgtcccggaggtg

SEQ ID NO: 95783 - DNA, 25 bp, Homo sapien
cgacgcccggtgtccctgtgtgtgt

SEQ ID NO: 95784 - DNA, 25 bp, Homo sapien
cgacgcccggtgaccctgtgtgtgt

SEQ ID NO: 95785 - DNA, 25 bp, Homo sapien
ccacggaccggaaactccatcagtg

SEQ ID NO: 95786 - DNA, 25 bp, Homo sapien
ccacggaccggatactccatcagtg

SEQ ID NO: 95787 - DNA, 25 bp, Homo sapien
ttatcgagaggaacgccgatgcgaa

SEQ ID NO: 95788 - DNA, 25 bp, Homo sapien
ttatcgagaggatcgccgatgcgaa

SEQ ID NO: 95789 - DNA, 25 bp, Homo sapien
gtctcggagagaagagacccgatac

SEQ ID NO: 95790 - DNA, 25 bp, Homo sapien
gtctcggagagatgagacccgatac

SEQ ID NO: 95791 - DNA, 25 bp, Homo sapien
gtcacttacgtcttgtcgaaggtaa

SEQ ID NO: 95792 - DNA, 25 bp, Homo sapien
gtcacttacgtcatgtcgaaggtaa

SEQ ID NO: 95793 - DNA, 25 bp, Homo sapien
ttagtaatcatctcgcaaagagtat

SEQ ID NO: 95794 - DNA, 25 bp, Homo sapien
ttagtaatcatcacgcaaagagtat

SEQ ID NO: 95795 - DNA, 25 bp, Homo sapien
aacgtggtcatcaccgacaactaga

SEQ ID NO: 95796 - DNA, 25 bp, Homo sapien
aacgtggtcatctccgacaactaga

SEQ ID NO: 95797 - DNA, 25 bp, Homo sapien
acgggtctatcgtcgtgccatactc

SEQ ID NO: 95798 - DNA, 25 bp, Homo sapien
acgggtctatcgacgtgccatactc

SEQ ID NO: 95799 - DNA, 25 bp, Homo sapien
gtaataattgtccaaatgtgtttcc

SEQ ID NO: 95800 - DNA, 25 bp, Homo sapien
gtaataattgtcgaaatgtgtttcc

SEQ ID NO: 95801 - DNA, 25 bp, Homo sapien
atcagtttgggttcttctagttatc

SEQ ID NO: 95802 - DNA, 25 bp, Homo sapien
atcagtttgggtacttctagttatc

SEQ ID NO: 95803 - DNA, 25 bp, Homo sapien
acctgtttaggttatctcggtttct

SEQ ID NO: 95804 - DNA, 25 bp, Homo sapien
acctgtttaggtaatctcggtttct

SEQ ID NO: 95805 - DNA, 25 bp, Homo sapien
catttggtcgtcatatttgttctcg

SEQ ID NO: 95806 - DNA, 25 bp, Homo sapien
catttggtcgtcttatttgttctcg

SEQ ID NO: 95807 - DNA, 25 bp, Homo sapien
ttgttcttgtcctactgtcagttca

SEQ ID NO: 95808 - DNA, 25 bp, Homo sapien
ttgttcttgtccaactgtcagttca

SEQ ID NO: 95809 - DNA, 25 bp, Homo sapien
tctgtcgcgtcctctactcgttcga

SEQ ID NO: 95810 - DNA, 25 bp, Homo sapien
tctgtcgcgtccactactcgttcga

SEQ ID NO: 95811 - DNA, 25 bp, Homo sapien
cctttaagtcacttcgatgatgttt

SEQ ID NO: 95812 - DNA, 25 bp, Homo sapien
cctttaagtcacatcgatgatgttt

SEQ ID NO: 95813 - DNA, 25 bp, Homo sapien
gttacttgaatacttcatcattgtg

SEQ ID NO: 95814 - DNA, 25 bp, Homo sapien
gttacttgaatagttcatcattgtg

SEQ ID NO: 95815 - DNA, 25 bp, Homo sapien
gttttacctcaaatgagtgtctttt

SEQ ID NO: 95816 - DNA, 25 bp, Homo sapien
gttttacctcaattgagtgtctttt

SEQ ID NO: 95817 - DNA, 25 bp, Homo sapien
tctaccccgatatgtgagttctttc

SEQ ID NO: 95818 - DNA, 25 bp, Homo sapien
tctaccccgataagtgagttctttc

SEQ ID NO: 95819 - DNA, 25 bp, Homo sapien
ccttcgacaggtgtgagtgatggtt

SEQ ID NO: 95820 - DNA, 25 bp, Homo sapien
ccttcgacaggtctgagtgatggtt

SEQ ID NO: 95821 - DNA, 25 bp, Homo sapien
actccgtgggagactcaagaggtgc

SEQ ID NO: 95822 - DNA, 25 bp, Homo sapien
actccgtgggagtctcaagaggtgc

SEQ ID NO: 95823 - DNA, 25 bp, Homo sapien
ggcccaccggggacacacatgtgaa

SEQ ID NO: 95824 - DNA, 25 bp, Homo sapien
ggcccaccggggtcacacatgtgaa

SEQ ID NO: 95825 - DNA, 25 bp, Homo sapien
gagtgtgtccttacacaagcgtaaa

SEQ ID NO: 95826 - DNA, 25 bp, Homo sapien
gagtgtgtcctttcacaagcgtaaa

SEQ ID NO: 95827 - DNA, 25 bp, Homo sapien
cggacactccttcgagtagtttcga

SEQ ID NO: 95828 - DNA, 25 bp, Homo sapien
cggacactccttggagtagtttcga

SEQ ID NO: 95829 - DNA, 25 bp, Homo sapien
acatcacaccggagagagttccgac

SEQ ID NO: 95830 - DNA, 25 bp, Homo sapien
acatcacaccggtgagagttccgac

SEQ ID NO: 95831 - DNA, 25 bp, Homo sapien
gaccataccggacctatagttccac

SEQ ID NO: 95832 - DNA, 25 bp, Homo sapien
gaccataccggagctatagttccac

SEQ ID NO: 95833 - DNA, 25 bp, Homo sapien
gacaagacctcgaacatgggagact

SEQ ID NO: 95834 - DNA, 25 bp, Homo sapien
gacaagacctcgtacatgggagact

SEQ ID NO: 95835 - DNA, 25 bp, Homo sapien
gaagacgtcccgacatcggtccgcg

SEQ ID NO: 95836 - DNA, 25 bp, Homo sapien
gaagacgtcccgtcatcggtccgcg

SEQ ID NO: 95837 - DNA, 25 bp, Homo sapien
gacatcacgggtagcgagttccgag

SEQ ID NO: 95838 - DNA, 25 bp, Homo sapien
gacatcacgggttgcgagttccgag

SEQ ID NO: 95839 - DNA, 25 bp, Homo sapien
cgatcaagtagtaggactaaccgac

SEQ ID NO: 95840 - DNA, 25 bp, Homo sapien
cgatcaagtagttggactaaccgac

SEQ ID NO: 95841 - DNA, 25 bp, Homo sapien
agtatgtagtgtaaggctcagcgac

SEQ ID NO: 95842 - DNA, 25 bp, Homo sapien
agtatgtagtgttaggctcagcgac

SEQ ID NO: 95843 - DNA, 25 bp, Homo sapien
agcacgagccggtcgtccgcgacgt

SEQ ID NO: 95844 - DNA, 25 bp, Homo sapien
agcacgagccggacgtccgcgacgt

SEQ ID NO: 95845 - DNA, 25 bp, Homo sapien
acaggacgtcaatgactactataat

SEQ ID NO: 95846 - DNA, 25 bp, Homo sapien
acaggacgtcaaagactactataat

SEQ ID NO: 95847 - DNA, 25 bp, Homo sapien
aaaacagcgaacaaagaactcttgt

SEQ ID NO: 95848 - DNA, 25 bp, Homo sapien
aaaacagcgaactaagaactcttgt

SEQ ID NO: 95849 - DNA, 25 bp, Homo sapien
acccactcagcgtttatcaaacgag

SEQ ID NO: 95850 - DNA, 25 bp, Homo sapien
acccactcagcgattatcaaacgag

SEQ ID NO: 95851 - DNA, 25 bp, Homo sapien
gtacctcccagtatcgacgccaggg

SEQ ID NO: 95852 - DNA, 25 bp, Homo sapien
gtacctcccagtttcgacgccaggg

SEQ ID NO: 95853 - DNA, 25 bp, Homo sapien
cacccccgacttgttcgtgggtcgt

SEQ ID NO: 95854 - DNA, 25 bp, Homo sapien
cacccccgacttcttcgtgggtcgt

SEQ ID NO: 95855 - DNA, 25 bp, Homo sapien
tcgaccctcagtgtcctgaacgtgt

SEQ ID NO: 95856 - DNA, 25 bp, Homo sapien
tcgaccctcagtctcctgaacgtgt

SEQ ID NO: 95857 - DNA, 25 bp, Homo sapien
tggatcaaaccgttctttaggacgg

SEQ ID NO: 95858 - DNA, 25 bp, Homo sapien
tggatcaaaccgatctttaggacgg

SEQ ID NO: 95859 - DNA, 25 bp, Homo sapien
tgaacagacccgtattatccgacga

SEQ ID NO: 95860 - DNA, 25 bp, Homo sapien
tgaacagacccgaattatccgacga

SEQ ID NO: 95861 - DNA, 25 bp, Homo sapien
agaccacgaacaaccgaaattgtag

SEQ ID NO: 95862 - DNA, 25 bp, Homo sapien
agaccacgaacatccgaaattgtag

SEQ ID NO: 95863 - DNA, 25 bp, Homo sapien
tctcacgagacgaccgaggacaaag

SEQ ID NO: 95864 - DNA, 25 bp, Homo sapien
tctcacgagacgtccgaggacaaag

SEQ ID NO: 95865 - DNA, 25 bp, Homo sapien
cctactcgacgaatgagtatccaaa

SEQ ID NO: 95866 - DNA, 25 bp, Homo sapien
cctactcgacgattgagtatccaaa

SEQ ID NO: 95867 - DNA, 25 bp, Homo sapien
taactggtacgttggacgtaataac

SEQ ID NO: 95868 - DNA, 25 bp, Homo sapien
taactggtacgtaggacgtaataac

SEQ ID NO: 95869 - DNA, 25 bp, Homo sapien
gcctaaccggcaagaagaactacac

SEQ ID NO: 95870 - DNA, 25 bp, Homo sapien
gcctaaccggcatgaagaactacac

SEQ ID NO: 95871 - DNA, 25 bp, Homo sapien
acatttcggtcttgtaggaactata

SEQ ID NO: 95872 - DNA, 25 bp, Homo sapien
acatttcggtctagtaggaactata

SEQ ID NO: 95873 - DNA, 25 bp, Homo sapien
gaagtttgccgtcagtaaacaagag

SEQ ID NO: 95874 - DNA, 25 bp, Homo sapien
gaagtttgccgtgagtaaacaagag

SEQ ID NO: 95875 - DNA, 25 bp, Homo sapien
cgtccggtccgtgaggaagaactag

SEQ ID NO: 95876 - DNA, 25 bp, Homo sapien
cgtccggtccgtcaggaagaactag

SEQ ID NO: 95877 - DNA, 25 bp, Homo sapien
tgtcacgatcactggtgtttatctg

SEQ ID NO: 95878 - DNA, 25 bp, Homo sapien
tgtcacgatcacaggtgtttatctg

SEQ ID NO: 95879 - DNA, 25 bp, Homo sapien
gaagaacggcgttatgtgtttgacc

SEQ ID NO: 95880 - DNA, 25 bp, Homo sapien
gaagaacggcgtaatgtgtttgacc

SEQ ID NO: 95881 - DNA, 25 bp, Homo sapien
gtgtaaatgtcttcacaggtttttc

SEQ ID NO: 95882 - DNA, 25 bp, Homo sapien
gtgtaaatgtctacacaggtttttc

SEQ ID NO: 95883 - DNA, 25 bp, Homo sapien
ggaactctcacttcagatgtcttta

SEQ ID NO: 95884 - DNA, 25 bp, Homo sapien
ggaactctcactacagatgtcttta

SEQ ID NO: 95885 - DNA, 25 bp, Homo sapien
ggaactcctcgcactgagccttcat

SEQ ID NO: 95886 - DNA, 25 bp, Homo sapien
ggaactcctcgctctgagccttcat

SEQ ID NO: 95887 - DNA, 25 bp, Homo sapien
actcgcgctcctggagtcacttctg

SEQ ID NO: 95888 - DNA, 25 bp, Homo sapien
actcgcgctcctcgagtcacttctg

SEQ ID NO: 95889 - DNA, 25 bp, Homo sapien
cgtcgacgctctcgagtgaacctcg

SEQ ID NO: 95890 - DNA, 25 bp, Homo sapien
cgtcgacgctctggagtgaacctcg

SEQ ID NO: 95891 - DNA, 25 bp, Homo sapien
aaagacgactatagtccgatttcgt

SEQ ID NO: 95892 - DNA, 25 bp, Homo sapien
aaagacgactattgtccgatttcgt

SEQ ID NO: 95893 - DNA, 25 bp, Homo sapien
actacacgaccgagtccatatagtg

SEQ ID NO: 95894 - DNA, 25 bp, Homo sapien
actacacgaccgtgtccatatagtg

SEQ ID NO: 95895 - DNA, 25 bp, Homo sapien
ggggaccgaccgtcgacgccactta

SEQ ID NO: 95896 - DNA, 25 bp, Homo sapien
ggggaccgaccgacgacgccactta

SEQ ID NO: 95897 - DNA, 25 bp, Homo sapien
aagaaagaaggaagagacctgacct

SEQ ID NO: 95898 - DNA, 25 bp, Homo sapien
aagaaagaaggatgagacctgacct

SEQ ID NO: 95899 - DNA, 25 bp, Homo sapien
gcggacaacgaatcgaacctcgtcc

SEQ ID NO: 95900 - DNA, 25 bp, Homo sapien
gcggacaacgaaacgaacctcgtcc

SEQ ID NO: 95901 - DNA, 25 bp, Homo sapien
aagacaactaaagacgaccttaccg

SEQ ID NO: 95902 - DNA, 25 bp, Homo sapien
aagacaactaaacacgaccttaccg

SEQ ID NO: 95903 - DNA, 25 bp, Homo sapien
ggtgttacccaaggacgaatctacg

SEQ ID NO: 95904 - DNA, 25 bp, Homo sapien
ggtgttacccaacgacgaatctacg

SEQ ID NO: 95905 - DNA, 25 bp, Homo sapien
tgtagagacaaccacgatacttcac

SEQ ID NO: 95906 - DNA, 25 bp, Homo sapien
tgtagagacaacgacgatacttcac

SEQ ID NO: 95907 - DNA, 25 bp, Homo sapien
ttgagacgtgatcgatacggtcgag

SEQ ID NO: 95908 - DNA, 25 bp, Homo sapien
ttgagacgtgatggatacggtcgag

SEQ ID NO: 95909 - DNA, 25 bp, Homo sapien
taaccgagaggtagagtgtctcagg

SEQ ID NO: 95910 - DNA, 25 bp, Homo sapien
taaccgagaggttgagtgtctcagg

SEQ ID NO: 95911 - DNA, 25 bp, Homo sapien
tgacctgaagttaaacgcgtgtgta

SEQ ID NO: 95912 - DNA, 25 bp, Homo sapien
tgacctgaagtttaacgcgtgtgta

SEQ ID NO: 95913 - DNA, 25 bp, Homo sapien
cactattgttttaaccgtgtgtgtt

SEQ ID NO: 95914 - DNA, 25 bp, Homo sapien
cactattgtttttaccgtgtgtgtt

SEQ ID NO: 95915 - DNA, 25 bp, Homo sapien
cactaggtgtagttgtccctttcga

SEQ ID NO: 95916 - DNA, 25 bp, Homo sapien
cactaggtgtagatgtccctttcga

SEQ ID NO: 95917 - DNA, 25 bp, Homo sapien
cattactgtagatggctctaatcga

SEQ ID NO: 95918 - DNA, 25 bp, Homo sapien
cattactgtagaaggctctaatcga

SEQ ID NO: 95919 - DNA, 25 bp, Homo sapien
ggtgtacattcacgaatcttatatc

SEQ ID NO: 95920 - DNA, 25 bp, Homo sapien
ggtgtacattcaggaatcttatatc

SEQ ID NO: 95921 - DNA, 25 bp, Homo sapien
cgtcagagttacaaactttccgtaa

SEQ ID NO: 95922 - DNA, 25 bp, Homo sapien
cgtcagagttactaactttccgtaa

SEQ ID NO: 95923 - DNA, 25 bp, Homo sapien
gggatcgtcgtccatacttttatgg

SEQ ID NO: 95924 - DNA, 25 bp, Homo sapien
gggatcgtcgtcgatacttttatgg

SEQ ID NO: 95925 - DNA, 25 bp, Homo sapien
aagatgtcgaggtccggacagtaag

SEQ ID NO: 95926 - DNA, 25 bp, Homo sapien
aagatgtcgaggaccggacagtaag

SEQ ID NO: 95927 - DNA, 25 bp, Homo sapien
gaccgatgtcagtgacttgttccga

SEQ ID NO: 95928 - DNA, 25 bp, Homo sapien
gaccgatgtcagagacttgttccga

SEQ ID NO: 95929 - DNA, 25 bp, Homo sapien
tcgacttcagacacgggaacgcgtc

SEQ ID NO: 95930 - DNA, 25 bp, Homo sapien
tcgacttcagactcgggaacgcgtc

SEQ ID NO: 95931 - DNA, 25 bp, Homo sapien
cttgagcttctgcttcaggagccgc

SEQ ID NO: 95932 - DNA, 25 bp, Homo sapien
cttgagcttctggttcaggagccgc

SEQ ID NO: 95933 - DNA, 25 bp, Homo sapien
ctgtacttttgactacagaccgttc

SEQ ID NO: 95934 - DNA, 25 bp, Homo sapien
ctgtacttttgagtacagaccgttc

SEQ ID NO: 95935 - DNA, 25 bp, Homo sapien
cttaagaatgtatccagagacattg

SEQ ID NO: 95936 - DNA, 25 bp, Homo sapien
cttaagaatgtaaccagagacattg

SEQ ID NO: 95937 - DNA, 25 bp, Homo sapien
acttttggaacgaactcttaaattg

SEQ ID NO: 95938 - DNA, 25 bp, Homo sapien
acttttggaacgtactcttaaattg

SEQ ID NO: 95939 - DNA, 25 bp, Homo sapien
actcttgaaacctccgaacaagatg

SEQ ID NO: 95940 - DNA, 25 bp, Homo sapien
actcttgaaaccaccgaacaagatg

SEQ ID NO: 95941 - DNA, 25 bp, Homo sapien
actgttactcaaactaccgggagaa

SEQ ID NO: 95942 - DNA, 25 bp, Homo sapien
actgttactcaatctaccgggagaa

SEQ ID NO: 95943 - DNA, 25 bp, Homo sapien
ccgataccctgtcacacgtaaaggg

SEQ ID NO: 95944 - DNA, 25 bp, Homo sapien
ccgataccctgtgacacgtaaaggg

SEQ ID NO: 95945 - DNA, 25 bp, Homo sapien
ccatctaccgtttatcgacgaggga

SEQ ID NO: 95946 - DNA, 25 bp, Homo sapien
ccatctaccgttaatcgacgaggga

SEQ ID NO: 95947 - DNA, 25 bp, Homo sapien
cgacgccttggttcactagcggggc

SEQ ID NO: 95948 - DNA, 25 bp, Homo sapien
cgacgccttggtacactagcggggc

SEQ ID NO: 95949 - DNA, 25 bp, Homo sapien
taggacaattttggtttcaggcgct

SEQ ID NO: 95950 - DNA, 25 bp, Homo sapien
taggacaattttcgtttcaggcgct

SEQ ID NO: 95951 - DNA, 25 bp, Homo sapien
gtaaacatttttgtcagtcaaaccg

SEQ ID NO: 95952 - DNA, 25 bp, Homo sapien
gtaaacatttttctcagtcaaaccg

SEQ ID NO: 95953 - DNA, 25 bp, Homo sapien
cccgtcttcccagtgatagaaactt

SEQ ID NO: 95954 - DNA, 25 bp, Homo sapien
cccgtcttcccactgatagaaactt

SEQ ID NO: 95955 - DNA, 25 bp, Homo sapien
gttgttacctaatgatgatacatct

SEQ ID NO: 95956 - DNA, 25 bp, Homo sapien
gttgttacctaaagatgatacatct

SEQ ID NO: 95957 - DNA, 25 bp, Homo sapien
gtgtcgctcccagagaccggtgccg

SEQ ID NO: 95958 - DNA, 25 bp, Homo sapien
gtgtcgctcccacagaccggtgccg

SEQ ID NO: 95959 - DNA, 25 bp, Homo sapien
tgaccggttccagagaagatccagt

SEQ ID NO: 95960 - DNA, 25 bp, Homo sapien
tgaccggttccacagaagatccagt

SEQ ID NO: 95961 - DNA, 25 bp, Homo sapien
gaacgggtcagtcgaagagttgaca

SEQ ID NO: 95962 - DNA, 25 bp, Homo sapien
gaacgggtcagtggaagagttgaca

SEQ ID NO: 95963 - DNA, 25 bp, Homo sapien
gaataatcactgtaacgacagatta

SEQ ID NO: 95964 - DNA, 25 bp, Homo sapien
gaataatcactgaaacgacagatta

SEQ ID NO: 95965 - DNA, 25 bp, Homo sapien
aagacgatttccaaggaccaactaa

SEQ ID NO: 95966 - DNA, 25 bp, Homo sapien
aagacgatttcctaggaccaactaa

SEQ ID NO: 95967 - DNA, 25 bp, Homo sapien
agagggtcagagtggacctacgccc

SEQ ID NO: 95968 - DNA, 25 bp, Homo sapien
agagggtcagagaggacctacgccc

SEQ ID NO: 95969 - DNA, 25 bp, Homo sapien
tgagaaggagtccaggctctgccgc

SEQ ID NO: 95970 - DNA, 25 bp, Homo sapien
tgagaaggagtcgaggctctgccgc

SEQ ID NO: 95971 - DNA, 25 bp, Homo sapien
cgaagaggaacttgtgcttctggag

SEQ ID NO: 95972 - DNA, 25 bp, Homo sapien
cgaagaggaactagtgcttctggag

SEQ ID NO: 95973 - DNA, 25 bp, Homo sapien
cggtctagtttttatggtctcagga

SEQ ID NO: 95974 - DNA, 25 bp, Homo sapien
cggtctagttttaatggtctcagga

SEQ ID NO: 95975 - DNA, 25 bp, Homo sapien
attgtcagtaaagttcttccttcag

SEQ ID NO: 95976 - DNA, 25 bp, Homo sapien
attgtcagtaaacttcttccttcag

SEQ ID NO: 95977 - DNA, 25 bp, Homo sapien
gtgtaacatttgtcctaattcgacg

SEQ ID NO: 95978 - DNA, 25 bp, Homo sapien
gtgtaacatttgacctaattcgacg

SEQ ID NO: 95979 - DNA, 25 bp, Homo sapien
ctacatttgaacctacagactgtcg

SEQ ID NO: 95980 - DNA, 25 bp, Homo sapien
ctacatttgaacgtacagactgtcg

SEQ ID NO: 95981 - DNA, 25 bp, Homo sapien
actattaaccggatgtcaacatcgt

SEQ ID NO: 95982 - DNA, 25 bp, Homo sapien
actattaaccggttgtcaacatcgt

SEQ ID NO: 95983 - DNA, 25 bp, Homo sapien
tcctcttgtccgtctagcagaatgt

SEQ ID NO: 95984 - DNA, 25 bp, Homo sapien
tcctcttgtccgactagcagaatgt

SEQ ID NO: 95985 - DNA, 25 bp, Homo sapien
tgtctcctgctccatgttagaatag

SEQ ID NO: 95986 - DNA, 25 bp, Homo sapien
tgtctcctgctcgatgttagaatag

SEQ ID NO: 95987 - DNA, 25 bp, Homo sapien
tcggtactagataccactaaaaggt

SEQ ID NO: 95988 - DNA, 25 bp, Homo sapien
tcggtactagattccactaaaaggt

SEQ ID NO: 95989 - DNA, 25 bp, Homo sapien
ggaccgtcttacagacacaaaaatc

SEQ ID NO: 95990 - DNA, 25 bp, Homo sapien
ggaccgtcttactgacacaaaaatc

SEQ ID NO: 95991 - DNA, 25 bp, Homo sapien
gtcggttatagtactaccaagtaaa

SEQ ID NO: 95992 - DNA, 25 bp, Homo sapien
gtcggttatagttctaccaagtaaa

SEQ ID NO: 95993 - DNA, 25 bp, Homo sapien
ggcagtaaattcatcaaagttatct

SEQ ID NO: 95994 - DNA, 25 bp, Homo sapien
ggcagtaaattcttcaaagttatct

SEQ ID NO: 95995 - DNA, 25 bp, Homo sapien
ggtcttcaaaagacacgaatacttt

SEQ ID NO: 95996 - DNA, 25 bp, Homo sapien
ggtcttcaaaagtcacgaatacttt

SEQ ID NO: 95997 - DNA, 25 bp, Homo sapien
agtttcagaaccatccgtaagcttg

SEQ ID NO: 95998 - DNA, 25 bp, Homo sapien
agtttcagaaccttccgtaagcttg

SEQ ID NO: 95999 - DNA, 25 bp, Homo sapien
acgtccggacctcgtcgaagagtcc

SEQ ID NO: 96000 - DNA, 25 bp, Homo sapien
acgtccggacctggtcgaagagtcc

SEQ ID NO: 96001 - DNA, 25 bp, Homo sapien
atctacccgggatcacctggattcg

SEQ ID NO: 96002 - DNA, 25 bp, Homo sapien
atctacccgggaacacctggattcg

SEQ ID NO: 96003 - DNA, 25 bp, Homo sapien
agtcacagtgggttccacccgtgcc

SEQ ID NO: 96004 - DNA, 25 bp, Homo sapien
agtcacagtgggatccacccgtgcc

SEQ ID NO: 96005 - DNA, 25 bp, Homo sapien
acaacgcagaccaagtcacggtccc

SEQ ID NO: 96006 - DNA, 25 bp, Homo sapien
acaacgcagacctagtcacggtccc

SEQ ID NO: 96007 - DNA, 25 bp, Homo sapien
taagatcaaaaagacgtaactcgcc

SEQ ID NO: 96008 - DNA, 25 bp, Homo sapien
taagatcaaaaacacgtaactcgcc

SEQ ID NO: 96009 - DNA, 25 bp, Homo sapien
tcgtacacacaacgacgaaacggtc

SEQ ID NO: 96010 - DNA, 25 bp, Homo sapien
tcgtacacacaaggacgaaacggtc

SEQ ID NO: 96011 - DNA, 25 bp, Homo sapien
actgagtgacctaaggacaaacata

SEQ ID NO: 96012 - DNA, 25 bp, Homo sapien
actgagtgaccttaggacaaacata

SEQ ID NO: 96013 - DNA, 25 bp, Homo sapien
ctgttgtgtctattttatgaaccta

SEQ ID NO: 96014 - DNA, 25 bp, Homo sapien
ctgttgtgtctaatttatgaaccta

SEQ ID NO: 96015 - DNA, 25 bp, Homo sapien
gtgaaggaggacgaaccagaacaga

SEQ ID NO: 96016 - DNA, 25 bp, Homo sapien
gtgaaggaggaccaaccagaacaga

SEQ ID NO: 96017 - DNA, 25 bp, Homo sapien
caaaagaaggtacagaggaacccga

SEQ ID NO: 96018 - DNA, 25 bp, Homo sapien
caaaagaaggtagagaggaacccga

SEQ ID NO: 96019 - DNA, 25 bp, Homo sapien
tatatactttaagaacgagcgtcct

SEQ ID NO: 96020 - DNA, 25 bp, Homo sapien
tatatactttaacaacgagcgtcct

SEQ ID NO: 96021 - DNA, 25 bp, Homo sapien
cattcgtctttattcgacacggtcc

SEQ ID NO: 96022 - DNA, 25 bp, Homo sapien
cattcgtctttaatcgacacggtcc

SEQ ID NO: 96023 - DNA, 25 bp, Homo sapien
agtggtccgtgtttacactaaactc

SEQ ID NO: 96024 - DNA, 25 bp, Homo sapien
agtggtccgtgtatacactaaactc

SEQ ID NO: 96025 - DNA, 25 bp, Homo sapien
gaagagtctttaccactagaaatct

SEQ ID NO: 96026 - DNA, 25 bp, Homo sapien
gaagagtctttagcactagaaatct

SEQ ID NO: 96027 - DNA, 25 bp, Homo sapien
gtaaaaggaggttcccctaaataag

SEQ ID NO: 96028 - DNA, 25 bp, Homo sapien
gtaaaaggaggtacccctaaataag

SEQ ID NO: 96029 - DNA, 25 bp, Homo sapien
caggtcaaggtttcccacacatata

SEQ ID NO: 96030 - DNA, 25 bp, Homo sapien
caggtcaaggttacccacacatata

SEQ ID NO: 96031 - DNA, 25 bp, Homo sapien
acgggaaccgcgaccaaggacaacc

SEQ ID NO: 96032 - DNA, 25 bp, Homo sapien
acgggaaccgcgtccaaggacaacc

SEQ ID NO: 96033 - DNA, 25 bp, Homo sapien
ggacattccactatagcgtgaacac

SEQ ID NO: 96034 - DNA, 25 bp, Homo sapien
ggacattccactttagcgtgaacac

SEQ ID NO: 96035 - DNA, 25 bp, Homo sapien
gagttcgtccattcacgcgtggatg

SEQ ID NO: 96036 - DNA, 25 bp, Homo sapien
gagttcgtccatacacgcgtggatg

SEQ ID NO: 96037 - DNA, 25 bp, Homo sapien
tggtcgttcttcaggagttgaacgt

SEQ ID NO: 96038 - DNA, 25 bp, Homo sapien
tggtcgttcttctggagttgaacgt

SEQ ID NO: 96039 - DNA, 25 bp, Homo sapien
cggtcgtaacgttatttgttcgatt

SEQ ID NO: 96040 - DNA, 25 bp, Homo sapien
cggtcgtaacgtaatttgttcgatt

SEQ ID NO: 96041 - DNA, 25 bp, Homo sapien
tcagtccaacaggttcagtcgactt

SEQ ID NO: 96042 - DNA, 25 bp, Homo sapien
tcagtccaacagcttcagtcgactt

SEQ ID NO: 96043 - DNA, 25 bp, Homo sapien
cggacccagtcagcttactttactc

SEQ ID NO: 96044 - DNA, 25 bp, Homo sapien
cggacccagtcaccttactttactc

SEQ ID NO: 96045 - DNA, 25 bp, Homo sapien
tggagtacatccaccttagtatttg

SEQ ID NO: 96046 - DNA, 25 bp, Homo sapien
tggagtacatcctccttagtatttg

SEQ ID NO: 96047 - DNA, 25 bp, Homo sapien
ggtactgtaactgtctctgtccctg

SEQ ID NO: 96048 - DNA, 25 bp, Homo sapien
ggtactgtaactctctctgtccctg

SEQ ID NO: 96049 - DNA, 25 bp, Homo sapien
cgcgcgtgcaggtccttcgtcgatg

SEQ ID NO: 96050 - DNA, 25 bp, Homo sapien
cgcgcgtgcaggaccttcgtcgatg

SEQ ID NO: 96051 - DNA, 25 bp, Homo sapien
ccgtgtggtcggactatttcgcgag

SEQ ID NO: 96052 - DNA, 25 bp, Homo sapien
ccgtgtggtcggtctatttcgcgag

SEQ ID NO: 96053 - DNA, 25 bp, Homo sapien
tccatcgaggacacgggaccccagt

SEQ ID NO: 96054 - DNA, 25 bp, Homo sapien
tccatcgaggactcgggaccccagt

SEQ ID NO: 96055 - DNA, 25 bp, Homo sapien
tctcctcacgggaccgaaccagtgg

SEQ ID NO: 96056 - DNA, 25 bp, Homo sapien
tctcctcacgggtccgaaccagtgg

SEQ ID NO: 96057 - DNA, 25 bp, Homo sapien
ttcgccgcgaggtggccgcaccagt

SEQ ID NO: 96058 - DNA, 25 bp, Homo sapien
ttcgccgcgaggaggccgcaccagt

SEQ ID NO: 96059 - DNA, 25 bp, Homo sapien
tacgacagcatgtctcccagccggt

SEQ ID NO: 96060 - DNA, 25 bp, Homo sapien
tacgacagcatgactcccagccggt

SEQ ID NO: 96061 - DNA, 25 bp, Homo sapien
ggagtcgagattgtcttgtagcctg

SEQ ID NO: 96062 - DNA, 25 bp, Homo sapien
ggagtcgagattctcttgtagcctg

SEQ ID NO: 96063 - DNA, 25 bp, Homo sapien
acctctagtgtgtcaggaggtaccc

SEQ ID NO: 96064 - DNA, 25 bp, Homo sapien
acctctagtgtgacaggaggtaccc

SEQ ID NO: 96065 - DNA, 25 bp, Homo sapien
acctgtgatgttcacgacccctgtt

SEQ ID NO: 96066 - DNA, 25 bp, Homo sapien
acctgtgatgttgacgacccctgtt

SEQ ID NO: 96067 - DNA, 25 bp, Homo sapien
accagtcctttgtagtctacttggt

SEQ ID NO: 96068 - DNA, 25 bp, Homo sapien
accagtcctttgaagtctacttggt

SEQ ID NO: 96069 - DNA, 25 bp, Homo sapien
gagaagttcccatcaaattaggggt

SEQ ID NO: 96070 - DNA, 25 bp, Homo sapien
gagaagttcccaacaaattaggggt

SEQ ID NO: 96071 - DNA, 25 bp, Homo sapien
aacatctgcaccaggtccaaagacg

SEQ ID NO: 96072 - DNA, 25 bp, Homo sapien
aacatctgcacctggtccaaagacg

SEQ ID NO: 96073 - DNA, 25 bp, Homo sapien
gtacaatacctttcggttcaaagtt

SEQ ID NO: 96074 - DNA, 25 bp, Homo sapien
gtacaataccttacggttcaaagtt

SEQ ID NO: 96075 - DNA, 25 bp, Homo sapien
atcatcccgtgtactttactttggt

SEQ ID NO: 96076 - DNA, 25 bp, Homo sapien
atcatcccgtgttctttactttggt

SEQ ID NO: 96077 - DNA, 25 bp, Homo sapien
ttcgtgctcctgtttgcacctccat

SEQ ID NO: 96078 - DNA, 25 bp, Homo sapien
ttcgtgctcctgattgcacctccat

SEQ ID NO: 96079 - DNA, 25 bp, Homo sapien
ccgatgtgccctagtgaagaccaaa

SEQ ID NO: 96080 - DNA, 25 bp, Homo sapien
ccgatgtgcccttgtgaagaccaaa

SEQ ID NO: 96081 - DNA, 25 bp, Homo sapien
gtcgtctcccgtcatgtcacagaac

SEQ ID NO: 96082 - DNA, 25 bp, Homo sapien
gtcgtctcccgtgatgtcacagaac

SEQ ID NO: 96083 - DNA, 25 bp, Homo sapien
ggtccgtctcgacgtttaacgggag

SEQ ID NO: 96084 - DNA, 25 bp, Homo sapien
ggtccgtctcgaggtttaacgggag

SEQ ID NO: 96085 - DNA, 25 bp, Homo sapien
cctcatctcgggtgtataggtctac

SEQ ID NO: 96086 - DNA, 25 bp, Homo sapien
cctcatctcgggagtataggtctac

SEQ ID NO: 96087 - DNA, 25 bp, Homo sapien
tgtcgactctgtctggagacgactc

SEQ ID NO: 96088 - DNA, 25 bp, Homo sapien
tgtcgactctgtgtggagacgactc

SEQ ID NO: 96089 - DNA, 25 bp, Homo sapien
ccctggaccggtcgaggagacctcg

SEQ ID NO: 96090 - DNA, 25 bp, Homo sapien
ccctggaccggtggaggagacctcg

SEQ ID NO: 96091 - DNA, 25 bp, Homo sapien
cccggagagtcgtctcaggaaccgg

SEQ ID NO: 96092 - DNA, 25 bp, Homo sapien
cccggagagtcgactcaggaaccgg

SEQ ID NO: 96093 - DNA, 25 bp, Homo sapien
tccgttcttctctctccggacggaa

SEQ ID NO: 96094 - DNA, 25 bp, Homo sapien
tccgttcttctcactccggacggaa

SEQ ID NO: 96095 - DNA, 25 bp, Homo sapien
gttctctctccgtacaagtctaagc

SEQ ID NO: 96096 - DNA, 25 bp, Homo sapien
gttctctctccgaacaagtctaagc

SEQ ID NO: 96097 - DNA, 25 bp, Homo sapien
ttacaccaactcaatatctactgac

SEQ ID NO: 96098 - DNA, 25 bp, Homo sapien
ttacaccaactctatatctactgac

SEQ ID NO: 96099 - DNA, 25 bp, Homo sapien
aataaacttacttaattactcttcg

SEQ ID NO: 96100 - DNA, 25 bp, Homo sapien
aataaacttactaaattactcttcg

SEQ ID NO: 96101 - DNA, 25 bp, Homo sapien
aggtggactgacgaactgacctcac

SEQ ID NO: 96102 - DNA, 25 bp, Homo sapien
aggtggactgaccaactgacctcac

SEQ ID NO: 96103 - DNA, 25 bp, Homo sapien
tatgaagaaacaaccgttcgtctta

SEQ ID NO: 96104 - DNA, 25 bp, Homo sapien
tatgaagaaacatccgttcgtctta

SEQ ID NO: 96105 - DNA, 25 bp, Homo sapien
catagaagatccaacgaattaagta

SEQ ID NO: 96106 - DNA, 25 bp, Homo sapien
catagaagatcctacgaattaagta

SEQ ID NO: 96107 - DNA, 25 bp, Homo sapien
accaggagggttcaaggactgaata

SEQ ID NO: 96108 - DNA, 25 bp, Homo sapien
accaggagggttgaaggactgaata

SEQ ID NO: 96109 - DNA, 25 bp, Homo sapien
cgccggggatgaacggccgctactc

SEQ ID NO: 96110 - DNA, 25 bp, Homo sapien
cgccggggatgatcggccgctactc

SEQ ID NO: 96111 - DNA, 25 bp, Homo sapien
aacctttgagtcttcgagattccac

SEQ ID NO: 96112 - DNA, 25 bp, Homo sapien
aacctttgagtcatcgagattccac

SEQ ID NO: 96113 - DNA, 25 bp, Homo sapien
tagaattttagtcacggaatttcac

SEQ ID NO: 96114 - DNA, 25 bp, Homo sapien
tagaattttagtgacggaatttcac

SEQ ID NO: 96115 - DNA, 25 bp, Homo sapien
agaatgttacgtcgacagacttgca

SEQ ID NO: 96116 - DNA, 25 bp, Homo sapien
agaatgttacgtggacagacttgca

SEQ ID NO: 96117 - DNA, 25 bp, Homo sapien
aagtgtaccagtgtaaactctcgaa

SEQ ID NO: 96118 - DNA, 25 bp, Homo sapien
aagtgtaccagtctaaactctcgaa

SEQ ID NO: 96119 - DNA, 25 bp, Homo sapien
gttctagtgtctgtcccattcttcc

SEQ ID NO: 96120 - DNA, 25 bp, Homo sapien
gttctagtgtctctcccattcttcc

SEQ ID NO: 96121 - DNA, 25 bp, Homo sapien
cgtctttgtctgcacccttctttgc

SEQ ID NO: 96122 - DNA, 25 bp, Homo sapien
cgtctttgtctggacccttctttgc

SEQ ID NO: 96123 - DNA, 25 bp, Homo sapien
ggtcttttcactctcgatttgttgg

SEQ ID NO: 96124 - DNA, 25 bp, Homo sapien
ggtcttttcactgtcgatttgttgg

SEQ ID NO: 96125 - DNA, 25 bp, Homo sapien
gtcttggtctcctcgatgtcctttt

SEQ ID NO: 96126 - DNA, 25 bp, Homo sapien
gtcttggtctccacgatgtcctttt

SEQ ID NO: 96127 - DNA, 25 bp, Homo sapien
tataagagacccattgtccctagtt

SEQ ID NO: 96128 - DNA, 25 bp, Homo sapien
tataagagaccctttgtccctagtt

SEQ ID NO: 96129 - DNA, 25 bp, Homo sapien
accaaagaaatcgtctgtccagaga

SEQ ID NO: 96130 - DNA, 25 bp, Homo sapien
accaaagaaatcctctgtccagaga

SEQ ID NO: 96131 - DNA, 25 bp, Homo sapien
acaaatctttcgacgtactggagaa

SEQ ID NO: 96132 - DNA, 25 bp, Homo sapien
acaaatctttcgtcgtactggagaa

SEQ ID NO: 96133 - DNA, 25 bp, Homo sapien
atcatgtggtggttcaacgacgaaa

SEQ ID NO: 96134 - DNA, 25 bp, Homo sapien
atcatgtggtggatcaacgacgaaa

SEQ ID NO: 96135 - DNA, 25 bp, Homo sapien
cagggaggtacttcacacacgtgaa

SEQ ID NO: 96136 - DNA, 25 bp, Homo sapien
cagggaggtactacacacacgtgaa

SEQ ID NO: 96137 - DNA, 25 bp, Homo sapien
cggaccaacttggtgtcgtcgtaaa

SEQ ID NO: 96138 - DNA, 25 bp, Homo sapien
cggaccaacttgctgtcgtcgtaaa

SEQ ID NO: 96139 - DNA, 25 bp, Homo sapien
caaacaatgtatgtcactaagacgt

SEQ ID NO: 96140 - DNA, 25 bp, Homo sapien
caaacaatgtatctcactaagacgt

SEQ ID NO: 96141 - DNA, 25 bp, Homo sapien
atacccgtcaaagagctcaaggact

SEQ ID NO: 96142 - DNA, 25 bp, Homo sapien
atacccgtcaaacagctcaaggact

SEQ ID NO: 96143 - DNA, 25 bp, Homo sapien
taaagatcttaccagtcacaggatt

SEQ ID NO: 96144 - DNA, 25 bp, Homo sapien
taaagatcttacgagtcacaggatt

SEQ ID NO: 96145 - DNA, 25 bp, Homo sapien
gtcgaattaatacaaccgattgttt

SEQ ID NO: 96146 - DNA, 25 bp, Homo sapien
gtcgaattaatagaaccgattgttt

SEQ ID NO: 96147 - DNA, 25 bp, Homo sapien
actccgaagtgtaaggtcgggtctc

SEQ ID NO: 96148 - DNA, 25 bp, Homo sapien
actccgaagtgttaggtcgggtctc

SEQ ID NO: 96149 - DNA, 25 bp, Homo sapien
ctcctccgtcgtaggtgaggtactt

SEQ ID NO: 96150 - DNA, 25 bp, Homo sapien
ctcctccgtcgttggtgaggtactt

SEQ ID NO: 96151 - DNA, 25 bp, Homo sapien
cctttctttcccatcgacgtgactg

SEQ ID NO: 96152 - DNA, 25 bp, Homo sapien
cctttctttcccttcgacgtgactg

SEQ ID NO: 96153 - DNA, 25 bp, Homo sapien
ctagtcgtttgtacccttgagggtg

SEQ ID NO: 96154 - DNA, 25 bp, Homo sapien
ctagtcgtttgttcccttgagggtg

SEQ ID NO: 96155 - DNA, 25 bp, Homo sapien
atttcttaatctatggtctcagggg

SEQ ID NO: 96156 - DNA, 25 bp, Homo sapien
atttcttaatctttggtctcagggg

SEQ ID NO: 96157 - DNA, 25 bp, Homo sapien
catctttctctgtctaatgttcggg

SEQ ID NO: 96158 - DNA, 25 bp, Homo sapien
catctttctctgactaatgttcggg

SEQ ID NO: 96159 - DNA, 25 bp, Homo sapien
atctttctcgttctcaggttcacga

SEQ ID NO: 96160 - DNA, 25 bp, Homo sapien
atctttctcgttgtcaggttcacga

SEQ ID NO: 96161 - DNA, 25 bp, Homo sapien
tctcttaccttggtaagcgtttaca

SEQ ID NO: 96162 - DNA, 25 bp, Homo sapien
tctcttaccttgctaagcgtttaca

SEQ ID NO: 96163 - DNA, 25 bp, Homo sapien
ctgaagagatcgacacggttaggat

SEQ ID NO: 96164 - DNA, 25 bp, Homo sapien
ctgaagagatcgtcacggttaggat

SEQ ID NO: 96165 - DNA, 25 bp, Homo sapien
actaaaacaccgttcatgaggtgtc

SEQ ID NO: 96166 - DNA, 25 bp, Homo sapien
actaaaacaccgatcatgaggtgtc

SEQ ID NO: 96167 - DNA, 25 bp, Homo sapien
atggtccgagcctatggtacgtcgc

SEQ ID NO: 96168 - DNA, 25 bp, Homo sapien
atggtccgagccaatggtacgtcgc

SEQ ID NO: 96169 - DNA, 25 bp, Homo sapien
cacggtcggccgacctggacgtctg

SEQ ID NO: 96170 - DNA, 25 bp, Homo sapien
cacggtcggccgtcctggacgtctg

SEQ ID NO: 96171 - DNA, 25 bp, Homo sapien
accccgtggcggtctgtggactccg

SEQ ID NO: 96172 - DNA, 25 bp, Homo sapien
accccgtggcggactgtggactccg

SEQ ID NO: 96173 - DNA, 25 bp, Homo sapien
caaaccgggtcacaaagacactctc

SEQ ID NO: 96174 - DNA, 25 bp, Homo sapien
caaaccgggtcagaaagacactctc

SEQ ID NO: 96175 - DNA, 25 bp, Homo sapien
ctgtaggttcaaagacgtacgtcac

SEQ ID NO: 96176 - DNA, 25 bp, Homo sapien
ctgtaggttcaatgacgtacgtcac

SEQ ID NO: 96177 - DNA, 25 bp, Homo sapien
acggtgaaccgagtaatgtcgtcat

SEQ ID NO: 96178 - DNA, 25 bp, Homo sapien
acggtgaaccgactaatgtcgtcat

SEQ ID NO: 96179 - DNA, 25 bp, Homo sapien
cgtcatgtccgtggtgcaccaacag

SEQ ID NO: 96180 - DNA, 25 bp, Homo sapien
cgtcatgtccgtcgtgcaccaacag

SEQ ID NO: 96181 - DNA, 25 bp, Homo sapien
tctcgtcccgttacgggcgcaggaa

SEQ ID NO: 96182 - DNA, 25 bp, Homo sapien
tctcgtcccgtttcgggcgcaggaa

SEQ ID NO: 96183 - DNA, 25 bp, Homo sapien
cgacgttccgtttcggggtcaagga

SEQ ID NO: 96184 - DNA, 25 bp, Homo sapien
cgacgttccgttacggggtcaagga

SEQ ID NO: 96185 - DNA, 25 bp, Homo sapien
ccgatgtgtccgtacccgtagagta

SEQ ID NO: 96186 - DNA, 25 bp, Homo sapien
ccgatgtgtccgaacccgtagagta

SEQ ID NO: 96187 - DNA, 25 bp, Homo sapien
ttgctgttagtcttcccaccgaata

SEQ ID NO: 96188 - DNA, 25 bp, Homo sapien
ttgctgttagtcatcccaccgaata

SEQ ID NO: 96189 - DNA, 25 bp, Homo sapien
tgtgcgagactctcggcccggaccg

SEQ ID NO: 96190 - DNA, 25 bp, Homo sapien
tgtgcgagactcacggcccggaccg

SEQ ID NO: 96191 - DNA, 25 bp, Homo sapien
caggacagctcaaacgtccgggcac

SEQ ID NO: 96192 - DNA, 25 bp, Homo sapien
caggacagctcatacgtccgggcac

SEQ ID NO: 96193 - DNA, 25 bp, Homo sapien
tcggaaacctctcgaacttcaagat

SEQ ID NO: 96194 - DNA, 25 bp, Homo sapien
tcggaaacctctggaacttcaagat

SEQ ID NO: 96195 - DNA, 25 bp, Homo sapien
ggacagtccttggatatctctacca

SEQ ID NO: 96196 - DNA, 25 bp, Homo sapien
ggacagtccttgcatatctctacca

SEQ ID NO: 96197 - DNA, 25 bp, Homo sapien
aaacggtctgtggttcggtccgtag

SEQ ID NO: 96198 - DNA, 25 bp, Homo sapien
aaacggtctgtgcttcggtccgtag

SEQ ID NO: 96199 - DNA, 25 bp, Homo sapien
ccacgggaggtcttacctcgggact

SEQ ID NO: 96200 - DNA, 25 bp, Homo sapien
ccacgggaggtcatacctcgggact

SEQ ID NO: 96201 - DNA, 25 bp, Homo sapien
gacaaagaacatattacagctattt

SEQ ID NO: 96202 - DNA, 25 bp, Homo sapien
gacaaagaacattttacagctattt

SEQ ID NO: 96203 - DNA, 25 bp, Homo sapien
aaatacgaatgagattcacctttag

SEQ ID NO: 96204 - DNA, 25 bp, Homo sapien
aaatacgaatgacattcacctttag

SEQ ID NO: 96205 - DNA, 25 bp, Homo sapien
taaatactcatgacgttcctgattg

SEQ ID NO: 96206 - DNA, 25 bp, Homo sapien
taaatactcatgtcgttcctgattg

SEQ ID NO: 96207 - DNA, 25 bp, Homo sapien
tcatttgcgtagtcacacattcaag

SEQ ID NO: 96208 - DNA, 25 bp, Homo sapien
tcatttgcgtagacacacattcaag

SEQ ID NO: 96209 - DNA, 25 bp, Homo sapien
aacatgttttctgacaattctgatg

SEQ ID NO: 96210 - DNA, 25 bp, Homo sapien
aacatgttttctcacaattctgatg

SEQ ID NO: 96211 - DNA, 25 bp, Homo sapien
acgtttaactacacctaccagacgg

SEQ ID NO: 96212 - DNA, 25 bp, Homo sapien
acgtttaactactcctaccagacgg

SEQ ID NO: 96213 - DNA, 25 bp, Homo sapien
caccttatgaacaggcggacccgga

SEQ ID NO: 96214 - DNA, 25 bp, Homo sapien
caccttatgaactggcggacccgga

SEQ ID NO: 96215 - DNA, 25 bp, Homo sapien
tcgaatcttaccacggactgtttac

SEQ ID NO: 96216 - DNA, 25 bp, Homo sapien
tcgaatcttacctcggactgtttac

SEQ ID NO: 96217 - DNA, 25 bp, Homo sapien
gggtctgtcgtggtcaagttcttct

SEQ ID NO: 96218 - DNA, 25 bp, Homo sapien
gggtctgtcgtgctcaagttcttct

SEQ ID NO: 96219 - DNA, 25 bp, Homo sapien
gacggtcagtggtcgagtgactcct

SEQ ID NO: 96220 - DNA, 25 bp, Homo sapien
gacggtcagtggacgagtgactcct

SEQ ID NO: 96221 - DNA, 25 bp, Homo sapien
cgttcccggtggtctcgcggatcca

SEQ ID NO: 96222 - DNA, 25 bp, Homo sapien
cgttcccggtggactcgcggatcca

SEQ ID NO: 96223 - DNA, 25 bp, Homo sapien
aaccgggtctggtacgcccgtcgga

SEQ ID NO: 96224 - DNA, 25 bp, Homo sapien
aaccgggtctggaacgcccgtcgga

SEQ ID NO: 96225 - DNA, 25 bp, Homo sapien
agaagtggtggtacctcttccgacc

SEQ ID NO: 96226 - DNA, 25 bp, Homo sapien
agaagtggtggttcctcttccgacc

SEQ ID NO: 96227 - DNA, 25 bp, Homo sapien
tgtcaaaaggcgactcctttggatt

SEQ ID NO: 96228 - DNA, 25 bp, Homo sapien
tgtcaaaaggcgtctcctttggatt

SEQ ID NO: 96229 - DNA, 25 bp, Homo sapien
taaaaggagatctcccgagtgggaa

SEQ ID NO: 96230 - DNA, 25 bp, Homo sapien
taaaaggagatcacccgagtgggaa

SEQ ID NO: 96231 - DNA, 25 bp, Homo sapien
ctggaaccggacctcggacgaggaa

SEQ ID NO: 96232 - DNA, 25 bp, Homo sapien
ctggaaccggacgtcggacgaggaa

SEQ ID NO: 96233 - DNA, 25 bp, Homo sapien
tccgacgactcagtgcggacgggcc

SEQ ID NO: 96234 - DNA, 25 bp, Homo sapien
tccgacgactcactgcggacgggcc

SEQ ID NO: 96235 - DNA, 25 bp, Homo sapien
gacttactgttcaatccaaaggacc

SEQ ID NO: 96236 - DNA, 25 bp, Homo sapien
gacttactgttctatccaaaggacc

SEQ ID NO: 96237 - DNA, 25 bp, Homo sapien
caattgtacaactctacataaggtg

SEQ ID NO: 96238 - DNA, 25 bp, Homo sapien
caattgtacaacactacataaggtg

SEQ ID NO: 96239 - DNA, 25 bp, Homo sapien
cattgtaaagtctactcaaatgtgt

SEQ ID NO: 96240 - DNA, 25 bp, Homo sapien
cattgtaaagtcaactcaaatgtgt

SEQ ID NO: 96241 - DNA, 25 bp, Homo sapien
tgttatagagagaactaaaaccact

SEQ ID NO: 96242 - DNA, 25 bp, Homo sapien
tgttatagagagtactaaaaccact

SEQ ID NO: 96243 - DNA, 25 bp, Homo sapien
atcgtgtcactgactaagggtcgcg

SEQ ID NO: 96244 - DNA, 25 bp, Homo sapien
atcgtgtcactgtctaagggtcgcg

SEQ ID NO: 96245 - DNA, 25 bp, Homo sapien
acgagactacgagacttacggagcc

SEQ ID NO: 96246 - DNA, 25 bp, Homo sapien
acgagactacgacacttacggagcc

SEQ ID NO: 96247 - DNA, 25 bp, Homo sapien
gtactccgtccacagtgtcgagagt

SEQ ID NO: 96248 - DNA, 25 bp, Homo sapien
gtactccgtccagagtgtcgagagt

SEQ ID NO: 96249 - DNA, 25 bp, Homo sapien
acataactcccgaaagacacaaggt

SEQ ID NO: 96250 - DNA, 25 bp, Homo sapien
acataactcccgtaagacacaaggt

SEQ ID NO: 96251 - DNA, 25 bp, Homo sapien
caaaatagagtactgaccaatacgt

SEQ ID NO: 96252 - DNA, 25 bp, Homo sapien
caaaatagagtagtgaccaatacgt

SEQ ID NO: 96253 - DNA, 25 bp, Homo sapien
gattagaagaaggtgaccgctagtt

SEQ ID NO: 96254 - DNA, 25 bp, Homo sapien
gattagaagaagctgaccgctagtt

SEQ ID NO: 96255 - DNA, 25 bp, Homo sapien
cgttatcagaaaagggacccagtgt

SEQ ID NO: 96256 - DNA, 25 bp, Homo sapien
cgttatcagaaatgggacccagtgt

SEQ ID NO: 96257 - DNA, 25 bp, Homo sapien
cgcacattacgacaggacctaatcg

SEQ ID NO: 96258 - DNA, 25 bp, Homo sapien
cgcacattacgagaggacctaatcg

SEQ ID NO: 96259 - DNA, 25 bp, Homo sapien
attaaaacgaactcgggacatatta

SEQ ID NO: 96260 - DNA, 25 bp, Homo sapien
attaaaacgaacacgggacatatta

SEQ ID NO: 96261 - DNA, 25 bp, Homo sapien
caaaaggttaaagatcacagtgctt

SEQ ID NO: 96262 - DNA, 25 bp, Homo sapien
caaaaggttaaacatcacagtgctt

SEQ ID NO: 96263 - DNA, 25 bp, Homo sapien
gttaaactttaaaatttttacacct

SEQ ID NO: 96264 - DNA, 25 bp, Homo sapien
gttaaactttaatatttttacacct

SEQ ID NO: 96265 - DNA, 25 bp, Homo sapien
aaggatgtactcgacttgtattttc

SEQ ID NO: 96266 - DNA, 25 bp, Homo sapien
aaggatgtactccacttgtattttc

SEQ ID NO: 96267 - DNA, 25 bp, Homo sapien
cttcagccttgtgagtgtacgtagt

SEQ ID NO: 96268 - DNA, 25 bp, Homo sapien
cttcagccttgtcagtgtacgtagt

SEQ ID NO: 96269 - DNA, 25 bp, Homo sapien
actgtgtgtccgtttacgaagtgta

SEQ ID NO: 96270 - DNA, 25 bp, Homo sapien
actgtgtgtccgattacgaagtgta

SEQ ID NO: 96271 - DNA, 25 bp, Homo sapien
gaagttcttccttcgtgagagtcgg

SEQ ID NO: 96272 - DNA, 25 bp, Homo sapien
gaagttcttcctacgtgagagtcgg

SEQ ID NO: 96273 - DNA, 25 bp, Homo sapien
aaagagtcgggacctaacaagaagg

SEQ ID NO: 96274 - DNA, 25 bp, Homo sapien
aaagagtcgggagctaacaagaagg

SEQ ID NO: 96275 - DNA, 25 bp, Homo sapien
ggaagggtaggaatatccacgacca

SEQ ID NO: 96276 - DNA, 25 bp, Homo sapien
ggaagggtaggattatccacgacca

SEQ ID NO: 96277 - DNA, 25 bp, Homo sapien
acgactgcaagtcctcgacactagt

SEQ ID NO: 96278 - DNA, 25 bp, Homo sapien
acgactgcaagtgctcgacactagt

SEQ ID NO: 96279 - DNA, 25 bp, Homo sapien
gtttctctggacagggtcctcacag

SEQ ID NO: 96280 - DNA, 25 bp, Homo sapien
gtttctctggactgggtcctcacag

SEQ ID NO: 96281 - DNA, 25 bp, Homo sapien
cctacaggactaaagactccacacg

SEQ ID NO: 96282 - DNA, 25 bp, Homo sapien
cctacaggactatagactccacacg

SEQ ID NO: 96283 - DNA, 25 bp, Homo sapien
taaagtcctccgagatgcatcgcag

SEQ ID NO: 96284 - DNA, 25 bp, Homo sapien
taaagtcctccgtgatgcatcgcag

SEQ ID NO: 96285 - DNA, 25 bp, Homo sapien
aaagagtccccgaagagaatcacga

SEQ ID NO: 96286 - DNA, 25 bp, Homo sapien
aaagagtccccgtagagaatcacga

SEQ ID NO: 96287 - DNA, 25 bp, Homo sapien
tctgtcgcacccagggacgccgaga

SEQ ID NO: 96288 - DNA, 25 bp, Homo sapien
tctgtcgcaccctgggacgccgaga

SEQ ID NO: 96289 - DNA, 25 bp, Homo sapien
ggtcggccacacctggacccggaga

SEQ ID NO: 96290 - DNA, 25 bp, Homo sapien
ggtcggccacacgtggacccggaga

SEQ ID NO: 96291 - DNA, 25 bp, Homo sapien
agactaataccgtagctctgtgaca

SEQ ID NO: 96292 - DNA, 25 bp, Homo sapien
agactaataccgaagctctgtgaca

SEQ ID NO: 96293 - DNA, 25 bp, Homo sapien
cgtccagaacagacctcctcttgga

SEQ ID NO: 96294 - DNA, 25 bp, Homo sapien
cgtccagaacagtcctcctcttgga

SEQ ID NO: 96295 - DNA, 25 bp, Homo sapien
tctttgactgaagtctcgttgaaga

SEQ ID NO: 96296 - DNA, 25 bp, Homo sapien
tctttgactgaactctcgttgaaga

SEQ ID NO: 96297 - DNA, 25 bp, Homo sapien
cgtgaagtgccgtgatccttcgaaa

SEQ ID NO: 96298 - DNA, 25 bp, Homo sapien
cgtgaagtgccgagatccttcgaaa

SEQ ID NO: 96299 - DNA, 25 bp, Homo sapien
tagaatgtcactcaaaatccagatg

SEQ ID NO: 96300 - DNA, 25 bp, Homo sapien
tagaatgtcactgaaaatccagatg

SEQ ID NO: 96301 - DNA, 25 bp, Homo sapien
cagaatcaatgacagacctcgacca

SEQ ID NO: 96302 - DNA, 25 bp, Homo sapien
cagaatcaatgagagacctcgacca

SEQ ID NO: 96303 - DNA, 25 bp, Homo sapien
gacttctgtaaatgccccgtataat

SEQ ID NO: 96304 - DNA, 25 bp, Homo sapien
gacttctgtaaaagccccgtataat

SEQ ID NO: 96305 - DNA, 25 bp, Homo sapien
cggtctagtttaaacacattttgat

SEQ ID NO: 96306 - DNA, 25 bp, Homo sapien
cggtctagtttatacacattttgat

SEQ ID NO: 96307 - DNA, 25 bp, Homo sapien
gttcctgtcggatgaggtaattcga

SEQ ID NO: 96308 - DNA, 25 bp, Homo sapien
gttcctgtcggaagaggtaattcga

SEQ ID NO: 96309 - DNA, 25 bp, Homo sapien
ctgtccttggtccaaaaacttacag

SEQ ID NO: 96310 - DNA, 25 bp, Homo sapien
ctgtccttggtcgaaaaacttacag

SEQ ID NO: 96311 - DNA, 25 bp, Homo sapien
tttgttggtcaaaataatcacgtac

SEQ ID NO: 96312 - DNA, 25 bp, Homo sapien
tttgttggtcaatataatcacgtac

SEQ ID NO: 96313 - DNA, 25 bp, Homo sapien
atctttctcgttctcaggttcacga

SEQ ID NO: 96314 - DNA, 25 bp, Homo sapien
atctttctcgttgtcaggttcacga

SEQ ID NO: 96315 - DNA, 25 bp, Homo sapien
taccccagtgtgtcttatgattctt

SEQ ID NO: 96316 - DNA, 25 bp, Homo sapien
taccccagtgtgacttatgattctt

SEQ ID NO: 96317 - DNA, 25 bp, Homo sapien
ccttaggaagaggtagtccaacttt

SEQ ID NO: 96318 - DNA, 25 bp, Homo sapien
ccttaggaagagctagtccaacttt

SEQ ID NO: 96319 - DNA, 25 bp, Homo sapien
tctgtgggagtaaggcgagccccca

SEQ ID NO: 96320 - DNA, 25 bp, Homo sapien
tctgtgggagtatggcgagccccca

SEQ ID NO: 96321 - DNA, 25 bp, Homo sapien
ctcgggggtttggagacgaaaatac

SEQ ID NO: 96322 - DNA, 25 bp, Homo sapien
ctcgggggtttgcagacgaaaatac

SEQ ID NO: 96323 - DNA, 25 bp, Homo sapien
gtccagaggtattcccagaagaatt

SEQ ID NO: 96324 - DNA, 25 bp, Homo sapien
gtccagaggtatacccagaagaatt

SEQ ID NO: 96325 - DNA, 25 bp, Homo sapien
gggagcgactctcaggtcgaagact

SEQ ID NO: 96326 - DNA, 25 bp, Homo sapien
gggagcgactctgaggtcgaagact

SEQ ID NO: 96327 - DNA, 25 bp, Homo sapien
tactctcgtttggagtacggttacg

SEQ ID NO: 96328 - DNA, 25 bp, Homo sapien
tactctcgtttgcagtacggttacg

SEQ ID NO: 96329 - DNA, 25 bp, Homo sapien
tcgtactctgtgtgaggtgtctgtc

SEQ ID NO: 96330 - DNA, 25 bp, Homo sapien
tcgtactctgtgagaggtgtctgtc

SEQ ID NO: 96331 - DNA, 25 bp, Homo sapien
atccgggtcgagatgggtcacgtct

SEQ ID NO: 96332 - DNA, 25 bp, Homo sapien
atccgggtcgagttgggtcacgtct

SEQ ID NO: 96333 - DNA, 25 bp, Homo sapien
agtaggagtctgtgaaggtcacgtc

SEQ ID NO: 96334 - DNA, 25 bp, Homo sapien
agtaggagtctgagaaggtcacgtc

SEQ ID NO: 96335 - DNA, 25 bp, Homo sapien
aaacgacgatcacagctatagaaga

SEQ ID NO: 96336 - DNA, 25 bp, Homo sapien
aaacgacgatcagagctatagaaga

SEQ ID NO: 96337 - DNA, 25 bp, Homo sapien
tacgtcggaccttcgaatagaacat

SEQ ID NO: 96338 - DNA, 25 bp, Homo sapien
tacgtcggacctacgaatagaacat

SEQ ID NO: 96339 - DNA, 25 bp, Homo sapien
gttacaacgccgactcagtagaaca

SEQ ID NO: 96340 - DNA, 25 bp, Homo sapien
gttacaacgccgtctcagtagaaca

SEQ ID NO: 96341 - DNA, 25 bp, Homo sapien
cgaaaacacggctatctttttagtg

SEQ ID NO: 96342 - DNA, 25 bp, Homo sapien
cgaaaacacggcaatctttttagtg

SEQ ID NO: 96343 - DNA, 25 bp, Homo sapien
gagtcagaaccagtccttttataag

SEQ ID NO: 96344 - DNA, 25 bp, Homo sapien
gagtcagaaccactccttttataag

SEQ ID NO: 96345 - DNA, 25 bp, Homo sapien
gtatacgacctacttattatgaaga

SEQ ID NO: 96346 - DNA, 25 bp, Homo sapien
gtatacgacctagttattatgaaga

SEQ ID NO: 96347 - DNA, 25 bp, Homo sapien
gggtctacgctcaccgtccagggca

SEQ ID NO: 96348 - DNA, 25 bp, Homo sapien
gggtctacgctctccgtccagggca

SEQ ID NO: 96349 - DNA, 25 bp, Homo sapien
gttcacgccagtctcgtctaggcca

SEQ ID NO: 96350 - DNA, 25 bp, Homo sapien
gttcacgccagtgtcgtctaggcca

SEQ ID NO: 96351 - DNA, 25 bp, Homo sapien
tcgaccctacagtccagtgacttac

SEQ ID NO: 96352 - DNA, 25 bp, Homo sapien
tcgaccctacagaccagtgacttac

SEQ ID NO: 96353 - DNA, 25 bp, Homo sapien
cgacagtggaacacgggagacagac

SEQ ID NO: 96354 - DNA, 25 bp, Homo sapien
cgacagtggaactcgggagacagac

SEQ ID NO: 96355 - DNA, 25 bp, Homo sapien
atgacgagagtatttctagactaac

SEQ ID NO: 96356 - DNA, 25 bp, Homo sapien
atgacgagagtaattctagactaac

SEQ ID NO: 96357 - DNA, 25 bp, Homo sapien
ctcgaccagactcgtaaactcagac

SEQ ID NO: 96358 - DNA, 25 bp, Homo sapien
ctcgaccagactggtaaactcagac

SEQ ID NO: 96359 - DNA, 25 bp, Homo sapien
taaaacgggcagaacatcgtacacc

SEQ ID NO: 96360 - DNA, 25 bp, Homo sapien
taaaacgggcagtacatcgtacacc

SEQ ID NO: 96361 - DNA, 25 bp, Homo sapien
aaatcctgttactgtcattctattc

SEQ ID NO: 96362 - DNA, 25 bp, Homo sapien
aaatcctgttacagtcattctattc

SEQ ID NO: 96363 - DNA, 25 bp, Homo sapien
ttccttgtaggtgtctaaataatct

SEQ ID NO: 96364 - DNA, 25 bp, Homo sapien
ttccttgtaggtctctaaataatct

SEQ ID NO: 96365 - DNA, 25 bp, Homo sapien
ataaaaggtgtcctgaaacatctcg

SEQ ID NO: 96366 - DNA, 25 bp, Homo sapien
ataaaaggtgtcgtgaaacatctcg

SEQ ID NO: 96367 - DNA, 25 bp, Homo sapien
cggacaaaacgtgcaagtggccgta

SEQ ID NO: 96368 - DNA, 25 bp, Homo sapien
cggacaaaacgtccaagtggccgta

SEQ ID NO: 96369 - DNA, 25 bp, Homo sapien
ctggttcactgtcgttacgacaaag

SEQ ID NO: 96370 - DNA, 25 bp, Homo sapien
ctggttcactgtggttacgacaaag

SEQ ID NO: 96371 - DNA, 25 bp, Homo sapien
tctgcgagattgacgagtctatcca

SEQ ID NO: 96372 - DNA, 25 bp, Homo sapien
tctgcgagattgtcgagtctatcca

SEQ ID NO: 96373 - DNA, 25 bp, Homo sapien
gcactattaactcgaaggtcttcca

SEQ ID NO: 96374 - DNA, 25 bp, Homo sapien
gcactattaactggaaggtcttcca

SEQ ID NO: 96375 - DNA, 25 bp, Homo sapien
gacacaagtaaagataaccctcggg

SEQ ID NO: 96376 - DNA, 25 bp, Homo sapien
gacacaagtaaacataaccctcggg

SEQ ID NO: 96377 - DNA, 25 bp, Homo sapien
tcacagtggaggaacctctgcggag

SEQ ID NO: 96378 - DNA, 25 bp, Homo sapien
tcacagtggaggtacctctgcggag

SEQ ID NO: 96379 - DNA, 25 bp, Homo sapien
tcccagggacctgtctagtgtccga

SEQ ID NO: 96380 - DNA, 25 bp, Homo sapien
tcccagggacctctctagtgtccga

SEQ ID NO: 96381 - DNA, 25 bp, Homo sapien
cccactcgaatttaggtctcccgtg

SEQ ID NO: 96382 - DNA, 25 bp, Homo sapien
cccactcgaattaaggtctcccgtg

SEQ ID NO: 96383 - DNA, 25 bp, Homo sapien
aggtgtcggtgtgatgttctcccgc

SEQ ID NO: 96384 - DNA, 25 bp, Homo sapien
aggtgtcggtgtcatgttctcccgc

SEQ ID NO: 96385 - DNA, 25 bp, Homo sapien
gggtttgtccgtcgtcttcgtccca

SEQ ID NO: 96386 - DNA, 25 bp, Homo sapien
gggtttgtccgtggtcttcgtccca

SEQ ID NO: 96387 - DNA, 25 bp, Homo sapien
cggtcgaggcccacgaatccgtaca

SEQ ID NO: 96388 - DNA, 25 bp, Homo sapien
cggtcgaggccctcgaatccgtaca

SEQ ID NO: 96389 - DNA, 25 bp, Homo sapien
gagtcgggtccctcgagtagtccca

SEQ ID NO: 96390 - DNA, 25 bp, Homo sapien
gagtcgggtcccacgagtagtccca

SEQ ID NO: 96391 - DNA, 25 bp, Homo sapien
tgggaacaacagagcgtactggaac

SEQ ID NO: 96392 - DNA, 25 bp, Homo sapien
tgggaacaacagtgcgtactggaac

SEQ ID NO: 96393 - DNA, 25 bp, Homo sapien
ccaagtcacgtctctcgacgacaag

SEQ ID NO: 96394 - DNA, 25 bp, Homo sapien
ccaagtcacgtcactcgacgacaag

SEQ ID NO: 96395 - DNA, 25 bp, Homo sapien
cacaggtcactccagtagacaccag

SEQ ID NO: 96396 - DNA, 25 bp, Homo sapien
cacaggtcactcgagtagacaccag

SEQ ID NO: 96397 - DNA, 25 bp, Homo sapien
ttacagtactataccgtaggaatat

SEQ ID NO: 96398 - DNA, 25 bp, Homo sapien
ttacagtactattccgtaggaatat

SEQ ID NO: 96399 - DNA, 25 bp, Homo sapien
acctctaccacttagccgggaagtg

SEQ ID NO: 96400 - DNA, 25 bp, Homo sapien
acctctaccactaagccgggaagtg

SEQ ID NO: 96401 - DNA, 25 bp, Homo sapien
ggcaccctcgtgtccctgttcgtgt

SEQ ID NO: 96402 - DNA, 25 bp, Homo sapien
ggcaccctcgtgaccctgttcgtgt

SEQ ID NO: 96403 - DNA, 25 bp, Homo sapien
actgtctctcgaaacccatacagtg

SEQ ID NO: 96404 - DNA, 25 bp, Homo sapien
actgtctctcgatacccatacagtg

SEQ ID NO: 96405 - DNA, 25 bp, Homo sapien
tgtatcgtgtccatctccatgcaga

SEQ ID NO: 96406 - DNA, 25 bp, Homo sapien
tgtatcgtgtccttctccatgcaga

SEQ ID NO: 96407 - DNA, 25 bp, Homo sapien
cgtcgcggaggaagagtctccagtc

SEQ ID NO: 96408 - DNA, 25 bp, Homo sapien
cgtcgcggaggatgagtctccagtc

SEQ ID NO: 96409 - DNA, 25 bp, Homo sapien
cgcagtgactcaatacgaacctaac

SEQ ID NO: 96410 - DNA, 25 bp, Homo sapien
cgcagtgactcattacgaacctaac

SEQ ID NO: 96411 - DNA, 25 bp, Homo sapien
tttagtaatcatctcgcaaagagta

SEQ ID NO: 96412 - DNA, 25 bp, Homo sapien
tttagtaatcatgtcgcaaagagta

SEQ ID NO: 96413 - DNA, 25 bp, Homo sapien
acgagaggtcatgtccacaggagac

SEQ ID NO: 96414 - DNA, 25 bp, Homo sapien
acgagaggtcatctccacaggagac

SEQ ID NO: 96415 - DNA, 25 bp, Homo sapien
gacgcggtctgtcctgtgtccaatg

SEQ ID NO: 96416 - DNA, 25 bp, Homo sapien
gacgcggtctgtgctgtgtccaatg

SEQ ID NO: 96417 - DNA, 25 bp, Homo sapien
tttgatgtgttcaaatgttcactcc

SEQ ID NO: 96418 - DNA, 25 bp, Homo sapien
tttgatgtgttctaatgttcactcc

SEQ ID NO: 96419 - DNA, 25 bp, Homo sapien
atccttttggtgatgtatatacttc

SEQ ID NO: 96420 - DNA, 25 bp, Homo sapien
atccttttggtgttgtatatacttc

SEQ ID NO: 96421 - DNA, 25 bp, Homo sapien
aaaccttttggttgcctgtacatct

SEQ ID NO: 96422 - DNA, 25 bp, Homo sapien
aaaccttttggtagcctgtacatct

SEQ ID NO: 96423 - DNA, 25 bp, Homo sapien
tctgttgggtcgaattatagttctc

SEQ ID NO: 96424 - DNA, 25 bp, Homo sapien
tctgttgggtcgtattatagttctc

SEQ ID NO: 96425 - DNA, 25 bp, Homo sapien
tcgttttgtctctacttcttctcat

SEQ ID NO: 96426 - DNA, 25 bp, Homo sapien
tcgttttgtctcaacttcttctcat

SEQ ID NO: 96427 - DNA, 25 bp, Homo sapien
ttttagtgctcacctactatttcac

SEQ ID NO: 96428 - DNA, 25 bp, Homo sapien
ttttagtgctcagctactatttcac

SEQ ID NO: 96429 - DNA, 25 bp, Homo sapien
ttcctttaatctttcactgaaggat

SEQ ID NO: 96430 - DNA, 25 bp, Homo sapien
ttcctttaatctatcactgaaggat

SEQ ID NO: 96431 - DNA, 25 bp, Homo sapien
tttgttaatctttcatcagatgtcg

SEQ ID NO: 96432 - DNA, 25 bp, Homo sapien
tttgttaatcttacatcagatgtcg

SEQ ID NO: 96433 - DNA, 25 bp, Homo sapien
gttgtttccaaaagactctcttctg

SEQ ID NO: 96434 - DNA, 25 bp, Homo sapien
gttgtttccaaatgactctcttctg

SEQ ID NO: 96435 - DNA, 25 bp, Homo sapien
tctgtatcacagatgtaattctttg

SEQ ID NO: 96436 - DNA, 25 bp, Homo sapien
tctgtatcacagttgtaattctttg

SEQ ID NO: 96437 - DNA, 25 bp, Homo sapien
cttaccagagttgacgttgatgatt

SEQ ID NO: 96438 - DNA, 25 bp, Homo sapien
cttaccagagttcacgttgatgatt

SEQ ID NO: 96439 - DNA, 25 bp, Homo sapien
gacatagtctgattgacgacaacgt

SEQ ID NO: 96440 - DNA, 25 bp, Homo sapien
gacatagtctgaatgacgacaacgt

SEQ ID NO: 96441 - DNA, 25 bp, Homo sapien
cccccggagttgatacaggtgtgaa

SEQ ID NO: 96442 - DNA, 25 bp, Homo sapien
cccccggagttgttacaggtgtgaa

SEQ ID NO: 96443 - DNA, 25 bp, Homo sapien
caccggaactgtcgacaaggtagaa

SEQ ID NO: 96444 - DNA, 25 bp, Homo sapien
caccggaactgtggacaaggtagaa

SEQ ID NO: 96445 - DNA, 25 bp, Homo sapien
cccgagtctccttgcagaggctcga

SEQ ID NO: 96446 - DNA, 25 bp, Homo sapien
cccgagtctcctagcagaggctcga

SEQ ID NO: 96447 - DNA, 25 bp, Homo sapien
ctaaacctccggaaagacgtctcca

SEQ ID NO: 96448 - DNA, 25 bp, Homo sapien
ctaaacctccggtaagacgtctcca

SEQ ID NO: 96449 - DNA, 25 bp, Homo sapien
gacctaaccggacctggttcgacgc

SEQ ID NO: 96450 - DNA, 25 bp, Homo sapien
gacctaaccggagctggttcgacgc

SEQ ID NO: 96451 - DNA, 25 bp, Homo sapien
gggaaagatctgactatggtcaact

SEQ ID NO: 96452 - DNA, 25 bp, Homo sapien
gggaaagatctgtctatggtcaact

SEQ ID NO: 96453 - DNA, 25 bp, Homo sapien
tgtgaacagaacgttcatggtccgg

SEQ ID NO: 96454 - DNA, 25 bp, Homo sapien
tgtgaacagaaccttcatggtccgg

SEQ ID NO: 96455 - DNA, 25 bp, Homo sapien
agaatcagaggtccactgtgtccga

SEQ ID NO: 96456 - DNA, 25 bp, Homo sapien
agaatcagaggtgcactgtgtccga

SEQ ID NO: 96457 - DNA, 25 bp, Homo sapien
aatcaagagtaggagtcgtgacgcc

SEQ ID NO: 96458 - DNA, 25 bp, Homo sapien
aatcaagagtagcagtcgtgacgcc

SEQ ID NO: 96459 - DNA, 25 bp, Homo sapien
agaagagtacgttaggtcgcgagcc

SEQ ID NO: 96460 - DNA, 25 bp, Homo sapien
agaagagtacgtaaggtcgcgagcc

SEQ ID NO: 96461 - DNA, 25 bp, Homo sapien
aacacgagtccactcgtcggagact

SEQ ID NO: 96462 - DNA, 25 bp, Homo sapien
aacacgagtccagtcgtcggagact

SEQ ID NO: 96463 - DNA, 25 bp, Homo sapien
acacgatgacaatctactatataat

SEQ ID NO: 96464 - DNA, 25 bp, Homo sapien
acacgatgacaaactactatataat

SEQ ID NO: 96465 - DNA, 25 bp, Homo sapien
aagtcgagcacaaaagaatacttgt

SEQ ID NO: 96466 - DNA, 25 bp, Homo sapien
aagtcgagcacataagaatacttgt

SEQ ID NO: 96467 - DNA, 25 bp, Homo sapien
acccacgcaggaccttcgagaagag

SEQ ID NO: 96468 - DNA, 25 bp, Homo sapien
acccacgcaggagcttcgagaagag

SEQ ID NO: 96469 - DNA, 25 bp, Homo sapien
actcttcagagtaccgactccaggg

SEQ ID NO: 96470 - DNA, 25 bp, Homo sapien
actcttcagagttccgactccaggg

SEQ ID NO: 96471 - DNA, 25 bp, Homo sapien
cgactcccgatgttcttcgtggggt

SEQ ID NO: 96472 - DNA, 25 bp, Homo sapien
cgactcccgatgatcttcgtggggt

SEQ ID NO: 96473 - DNA, 25 bp, Homo sapien
cgtccgacctgtcctcctgagtggt

SEQ ID NO: 96474 - DNA, 25 bp, Homo sapien
cgtccgacctgtgctcctgagtggt

SEQ ID NO: 96475 - DNA, 25 bp, Homo sapien
ttactacaactcctccttaggacgg

SEQ ID NO: 96476 - DNA, 25 bp, Homo sapien
ttactacaactcgtccttaggacgg

SEQ ID NO: 96477 - DNA, 25 bp, Homo sapien
tgataccacccgtccgctgtgacga

SEQ ID NO: 96478 - DNA, 25 bp, Homo sapien
tgataccacccgaccgctgtgacga

SEQ ID NO: 96479 - DNA, 25 bp, Homo sapien
tagaacagtaactccggataggtga

SEQ ID NO: 96480 - DNA, 25 bp, Homo sapien
tagaacagtaacaccggataggtga

SEQ ID NO: 96481 - DNA, 25 bp, Homo sapien
atcaagtacgacaccagacgcaaag

SEQ ID NO: 96482 - DNA, 25 bp, Homo sapien
atcaagtacgactccagacgcaaag

SEQ ID NO: 96483 - DNA, 25 bp, Homo sapien
taccatggacatatacgtcgcaaca

SEQ ID NO: 96484 - DNA, 25 bp, Homo sapien
taccatggacatttacgtcgcaaca

SEQ ID NO: 96485 - DNA, 25 bp, Homo sapien
ttataccgctatttgacgttaaacg

SEQ ID NO: 96486 - DNA, 25 bp, Homo sapien
ttataccgctatatgacgttaaacg

SEQ ID NO: 96487 - DNA, 25 bp, Homo sapien
tctcttagggcaaccagaacgacac

SEQ ID NO: 96488 - DNA, 25 bp, Homo sapien
tctcttagggcatccagaacgacac

SEQ ID NO: 96489 - DNA, 25 bp, Homo sapien
attatacggtactctatagaactaa

SEQ ID NO: 96490 - DNA, 25 bp, Homo sapien
attatacggtacactatagaactaa

SEQ ID NO: 96491 - DNA, 25 bp, Homo sapien
agttaagtccgtcagacaaagatag

SEQ ID NO: 96492 - DNA, 25 bp, Homo sapien
agttaagtccgtgagacaaagatag

SEQ ID NO: 96493 - DNA, 25 bp, Homo sapien
acaacgtcgggtcgtcaggaaaagg

SEQ ID NO: 96494 - DNA, 25 bp, Homo sapien
acaacgtcgggtggtcaggaaaagg

SEQ ID NO: 96495 - DNA, 25 bp, Homo sapien
ccgtcagataacttggtctttctgt

SEQ ID NO: 96496 - DNA, 25 bp, Homo sapien
ccgtcagataacatggtctttctgt

SEQ ID NO: 96497 - DNA, 25 bp, Homo sapien
cgtgaggacgaggatattgttttcc

SEQ ID NO: 96498 - DNA, 25 bp, Homo sapien
cgtgaggacgagcatattgttttcc

SEQ ID NO: 96499 - DNA, 25 bp, Homo sapien
aggtcaaagacttgttggttttctc

SEQ ID NO: 96500 - DNA, 25 bp, Homo sapien
aggtcaaagactagttggttttctc

SEQ ID NO: 96501 - DNA, 25 bp, Homo sapien
gtcaatgttactttagattcttgtc

SEQ ID NO: 96502 - DNA, 25 bp, Homo sapien
gtcaatgttactatagattcttgtc

SEQ ID NO: 96503 - DNA, 25 bp, Homo sapien
agaaccctgtcaatgaccctcggtt

SEQ ID NO: 96504 - DNA, 25 bp, Homo sapien
agaaccctgtcattgaccctcggtt

SEQ ID NO: 96505 - DNA, 25 bp, Homo sapien
ctcgcgctcctggagtcacttctgt

SEQ ID NO: 96506 - DNA, 25 bp, Homo sapien
ctcgcgctcctgcagtcacttctgt

SEQ ID NO: 96507 - DNA, 25 bp, Homo sapien
gtcgacctctcgagtctacctcgtc

SEQ ID NO: 96508 - DNA, 25 bp, Homo sapien
gtcgacctctcgtgtctacctcgtc

SEQ ID NO: 96509 - DNA, 25 bp, Homo sapien
caaagacgactatagtccgatttcg

SEQ ID NO: 96510 - DNA, 25 bp, Homo sapien
caaagacgactaaagtccgatttcg

SEQ ID NO: 96511 - DNA, 25 bp, Homo sapien
ctacacgaccgagtccatatagtgt

SEQ ID NO: 96512 - DNA, 25 bp, Homo sapien
ctacacgaccgactccatatagtgt

SEQ ID NO: 96513 - DNA, 25 bp, Homo sapien
ggtactcgactctcggtcctatgtg

SEQ ID NO: 96514 - DNA, 25 bp, Homo sapien
ggtactcgactcacggtcctatgtg

SEQ ID NO: 96515 - DNA, 25 bp, Homo sapien
acaaagagtgtaagaaccgtgagtc

SEQ ID NO: 96516 - DNA, 25 bp, Homo sapien
acaaagagtgtatgaaccgtgagtc

SEQ ID NO: 96517 - DNA, 25 bp, Homo sapien
acggaagactgacgacacctctcct

SEQ ID NO: 96518 - DNA, 25 bp, Homo sapien
acggaagactgaggacacctctcct

SEQ ID NO: 96519 - DNA, 25 bp, Homo sapien
acaagacaacagaaggagaccccct

SEQ ID NO: 96520 - DNA, 25 bp, Homo sapien
acaagacaacagtaggagaccccct

SEQ ID NO: 96521 - DNA, 25 bp, Homo sapien
gggggacccaaggacgcgtcctact

SEQ ID NO: 96522 - DNA, 25 bp, Homo sapien
gggggacccaagcacgcgtcctact

SEQ ID NO: 96523 - DNA, 25 bp, Homo sapien
gtagagtaccacaggtagattcagt

SEQ ID NO: 96524 - DNA, 25 bp, Homo sapien
gtagagtaccactggtagattcagt

SEQ ID NO: 96525 - DNA, 25 bp, Homo sapien
cttggacgtgacgtgccgtgtcagt

SEQ ID NO: 96526 - DNA, 25 bp, Homo sapien
cttggacgtgacctgccgtgtcagt

SEQ ID NO: 96527 - DNA, 25 bp, Homo sapien
taacgaggggtacagtctccgaggt

SEQ ID NO: 96528 - DNA, 25 bp, Homo sapien
taacgaggggtagagtctccgaggt

SEQ ID NO: 96529 - DNA, 25 bp, Homo sapien
acctgtaacgttagtaacggtgtct

SEQ ID NO: 96530 - DNA, 25 bp, Homo sapien
acctgtaacgtttgtaacggtgtct

SEQ ID NO: 96531 - DNA, 25 bp, Homo sapien
ccatctgcctcttcggtcggtcgtt

SEQ ID NO: 96532 - DNA, 25 bp, Homo sapien
ccatctgcctctacggtcggtcgtt

SEQ ID NO: 96533 - DNA, 25 bp, Homo sapien
tccgatatgtcgtataacctttcga

SEQ ID NO: 96534 - DNA, 25 bp, Homo sapien
tccgatatgtcgaataacctttcga

SEQ ID NO: 96535 - DNA, 25 bp, Homo sapien
tacgacaatgtcaagtgctctttga

SEQ ID NO: 96536 - DNA, 25 bp, Homo sapien
tacgacaatgtctagtgctctttga

SEQ ID NO: 96537 - DNA, 25 bp, Homo sapien
gtaggacattcatgcttctcttacc

SEQ ID NO: 96538 - DNA, 25 bp, Homo sapien
gtaggacattcaagcttctcttacc

SEQ ID NO: 96539 - DNA, 25 bp, Homo sapien
gtcgggaggtcgaagtctttccaca

SEQ ID NO: 96540 - DNA, 25 bp, Homo sapien
gtcgggaggtcgtagtctttccaca

SEQ ID NO: 96541 - DNA, 25 bp, Homo sapien
gtcagatggtctcatcgtttctaaa

SEQ ID NO: 96542 - DNA, 25 bp, Homo sapien
gtcagatggtctgatcgtttctaaa

SEQ ID NO: 96543 - DNA, 25 bp, Homo sapien
cttgtatggaggaacctgactgaag

SEQ ID NO: 96544 - DNA, 25 bp, Homo sapien
cttgtatggaggtacctgactgaag

SEQ ID NO: 96545 - DNA, 25 bp, Homo sapien
aaatgtcgacgatacttgctctcat

SEQ ID NO: 96546 - DNA, 25 bp, Homo sapien
aaatgtcgacgaaacttgctctcat

SEQ ID NO: 96547 - DNA, 25 bp, Homo sapien
tcacttcacgagacctcgttacgca

SEQ ID NO: 96548 - DNA, 25 bp, Homo sapien
tcacttcacgagtcctcgttacgca

SEQ ID NO: 96549 - DNA, 25 bp, Homo sapien
gttcttcttctacttctaggggcgc

SEQ ID NO: 96550 - DNA, 25 bp, Homo sapien
gttcttcttctagttctaggggcgc

SEQ ID NO: 96551 - DNA, 25 bp, Homo sapien
ctactcgttttgcttacggggttcg

SEQ ID NO: 96552 - DNA, 25 bp, Homo sapien
ctactcgttttggttacggggttcg

SEQ ID NO: 96553 - DNA, 25 bp, Homo sapien
ctctaggtgaggtatcaggaattcg

SEQ ID NO: 96554 - DNA, 25 bp, Homo sapien
ctctaggtgaggaatcaggaattcg

SEQ ID NO: 96555 - DNA, 25 bp, Homo sapien
aacttagggaagtgtcaagaatctc

SEQ ID NO: 96556 - DNA, 25 bp, Homo sapien
aacttagggaagagtcaagaatctc

SEQ ID NO: 96557 - DNA, 25 bp, Homo sapien
acgattggaaccattcgaacaattg

SEQ ID NO: 96558 - DNA, 25 bp, Homo sapien
acgattggaacctttcgaacaattg

SEQ ID NO: 96559 - DNA, 25 bp, Homo sapien
gaacattacacagttccggtgaata

SEQ ID NO: 96560 - DNA, 25 bp, Homo sapien
gaacattacacacttccggtgaata

SEQ ID NO: 96561 - DNA, 25 bp, Homo sapien
tatacgcaccgtccacgaaggtggt

SEQ ID NO: 96562 - DNA, 25 bp, Homo sapien
tatacgcaccgtgcacgaaggtggt

SEQ ID NO: 96563 - DNA, 25 bp, Homo sapien
cccagtcctacttttacacggcgga

SEQ ID NO: 96564 - DNA, 25 bp, Homo sapien
cccagtcctactattacacggcgga

SEQ ID NO: 96565 - DNA, 25 bp, Homo sapien
cggcctttgtcagtctcggtggtcg

SEQ ID NO: 96566 - DNA, 25 bp, Homo sapien
cggcctttgtcactctcggtggtcg

SEQ ID NO: 96567 - DNA, 25 bp, Homo sapien
aggattattttccacttaagggact

SEQ ID NO: 96568 - DNA, 25 bp, Homo sapien
aggattattttcgacttaagggact

SEQ ID NO: 96569 - DNA, 25 bp, Homo sapien
gaataaagttttggtcatcaatacc

SEQ ID NO: 96570 - DNA, 25 bp, Homo sapien
gaataaagttttcgtcatcaatacc

SEQ ID NO: 96571 - DNA, 25 bp, Homo sapien
ccccctttcgcagaaacgagaactt

SEQ ID NO: 96572 - DNA, 25 bp, Homo sapien
ccccctttcgcacaaacgagaactt

SEQ ID NO: 96573 - DNA, 25 bp, Homo sapien
cggttttactcataaagatctccgt

SEQ ID NO: 96574 - DNA, 25 bp, Homo sapien
cggttttactcaaaaagatctccgt

SEQ ID NO: 96575 - DNA, 25 bp, Homo sapien
cggtcgatcctcaaaaacttaaccg

SEQ ID NO: 96576 - DNA, 25 bp, Homo sapien
cggtcgatcctctaaaacttaaccg

SEQ ID NO: 96577 - DNA, 25 bp, Homo sapien
atcccgtgttccataaaatgtccag

SEQ ID NO: 96578 - DNA, 25 bp, Homo sapien
atcccgtgttccttaaaatgtccag

SEQ ID NO: 96579 - DNA, 25 bp, Homo sapien
ggaaccggtccgagaagagtccgaa

SEQ ID NO: 96580 - DNA, 25 bp, Homo sapien
ggaaccggtccgtgaagagtccgaa

SEQ ID NO: 96581 - DNA, 25 bp, Homo sapien
gaaacatcatcagacgactcatcta

SEQ ID NO: 96582 - DNA, 25 bp, Homo sapien
gaaacatcatcacacgactcatcta

SEQ ID NO: 96583 - DNA, 25 bp, Homo sapien
aagaaatcctgagacgctacctaga

SEQ ID NO: 96584 - DNA, 25 bp, Homo sapien
aagaaatcctgacacgctacctaga

SEQ ID NO: 96585 - DNA, 25 bp, Homo sapien
acacgggcagacgccgtcctcgccc

SEQ ID NO: 96586 - DNA, 25 bp, Homo sapien
acacgggcagaccccgtcctcgccc

SEQ ID NO: 96587 - DNA, 25 bp, Homo sapien
tttgaggagtcctgacgcatgctcc

SEQ ID NO: 96588 - DNA, 25 bp, Homo sapien
tttgaggagtccagacgcatgctcc

SEQ ID NO: 96589 - DNA, 25 bp, Homo sapien
tcgaagaggaacttgtgcttctgga

SEQ ID NO: 96590 - DNA, 25 bp, Homo sapien
tcgaagaggaacatgtgcttctgga

SEQ ID NO: 96591 - DNA, 25 bp, Homo sapien
ggaagttatctattgccgtcaggac

SEQ ID NO: 96592 - DNA, 25 bp, Homo sapien
ggaagttatctaatgccgtcaggac

SEQ ID NO: 96593 - DNA, 25 bp, Homo sapien
tcgtgagtaaaccttttcctgtgac

SEQ ID NO: 96594 - DNA, 25 bp, Homo sapien
tcgtgagtaaacgttttcctgtgac

SEQ ID NO: 96595 - DNA, 25 bp, Homo sapien
ggtacacaattgtgactcattgtag

SEQ ID NO: 96596 - DNA, 25 bp, Homo sapien
ggtacacaattgagactcattgtag

SEQ ID NO: 96597 - DNA, 25 bp, Homo sapien
actacaattgacagagtcactatgg

SEQ ID NO: 96598 - DNA, 25 bp, Homo sapien
actacaattgactgagtcactatgg

SEQ ID NO: 96599 - DNA, 25 bp, Homo sapien
caacgaaaatgaaagtcactacatg

SEQ ID NO: 96600 - DNA, 25 bp, Homo sapien
caacgaaaatgatagtcactacatg

SEQ ID NO: 96601 - DNA, 25 bp, Homo sapien
acacgtatgtgtgttcttcataatg

SEQ ID NO: 96602 - DNA, 25 bp, Homo sapien
acacgtatgtgtcttcttcataatg

SEQ ID NO: 96603 - DNA, 25 bp, Homo sapien
ctacctcgctctgatgactaaagtg

SEQ ID NO: 96604 - DNA, 25 bp, Homo sapien
ctacctcgctctcatgactaaagtg

SEQ ID NO: 96605 - DNA, 25 bp, Homo sapien
gtagtctagacttaccttaaataga

SEQ ID NO: 96606 - DNA, 25 bp, Homo sapien
gtagtctagactaaccttaaataga

SEQ ID NO: 96607 - DNA, 25 bp, Homo sapien
cgaaacgtctaaagccacgaaaatc

SEQ ID NO: 96608 - DNA, 25 bp, Homo sapien
cgaaacgtctaatgccacgaaaatc

SEQ ID NO: 96609 - DNA, 25 bp, Homo sapien
tcggttatagtactaccaagtaaat

SEQ ID NO: 96610 - DNA, 25 bp, Homo sapien
tcggttatagtagtaccaagtaaat

SEQ ID NO: 96611 - DNA, 25 bp, Homo sapien
ggacaaaatatcatcatagagtccc

SEQ ID NO: 96612 - DNA, 25 bp, Homo sapien
ggacaaaatatcttcatagagtccc

SEQ ID NO: 96613 - DNA, 25 bp, Homo sapien
gggtgacaaaaattcaaagtcctct

SEQ ID NO: 96614 - DNA, 25 bp, Homo sapien
gggtgacaaaaaatcaaagtcctct

SEQ ID NO: 96615 - DNA, 25 bp, Homo sapien
ttcgtaagaacaatccaagtaactg

SEQ ID NO: 96616 - DNA, 25 bp, Homo sapien
ttcgtaagaacattccaagtaactg

SEQ ID NO: 96617 - DNA, 25 bp, Homo sapien
cacgcaggaccttcgagaagagtca

SEQ ID NO: 96618 - DNA, 25 bp, Homo sapien
cacgcaggacctacgagaagagtca

SEQ ID NO: 96619 - DNA, 25 bp, Homo sapien
caacttccggaatccctaggagtgg

SEQ ID NO: 96620 - DNA, 25 bp, Homo sapien
caacttccggaaaccctaggagtgg

SEQ ID NO: 96621 - DNA, 25 bp, Homo sapien
actctcaggggaacccgtctggacc

SEQ ID NO: 96622 - DNA, 25 bp, Homo sapien
actctcaggggatcccgtctggacc

SEQ ID NO: 96623 - DNA, 25 bp, Homo sapien
agcgacagcagcagcagcaggcgcc

SEQ ID NO: 96624 - DNA, 25 bp, Homo sapien
agcgacagcagctgcagcaggcgcc

SEQ ID NO: 96625 - DNA, 25 bp, Homo sapien
tacaggtatgaagaagcgtaatccc

SEQ ID NO: 96626 - DNA, 25 bp, Homo sapien
tacaggtatgaacaagcgtaatccc

SEQ ID NO: 96627 - DNA, 25 bp, Homo sapien
gtcgatactacaggaccaacggtac

SEQ ID NO: 96628 - DNA, 25 bp, Homo sapien
gtcgatactacacgaccaacggtac

SEQ ID NO: 96629 - DNA, 25 bp, Homo sapien
aaagcgactcaacgaacgaagacta

SEQ ID NO: 96630 - DNA, 25 bp, Homo sapien
aaagcgactcaaggaacgaagacta

SEQ ID NO: 96631 - DNA, 25 bp, Homo sapien
atatgcgctctacgtttgaagacta

SEQ ID NO: 96632 - DNA, 25 bp, Homo sapien
atatgcgctctaggtttgaagacta

SEQ ID NO: 96633 - DNA, 25 bp, Homo sapien
aaggaggccgtttctgagtacagag

SEQ ID NO: 96634 - DNA, 25 bp, Homo sapien
aaggaggccgttactgagtacagag

SEQ ID NO: 96635 - DNA, 25 bp, Homo sapien
tccaaaggaggatagacacaaacca

SEQ ID NO: 96636 - DNA, 25 bp, Homo sapien
tccaaaggaggaaagacacaaacca

SEQ ID NO: 96637 - DNA, 25 bp, Homo sapien
gaaagattaaaagacgagtcgtcac

SEQ ID NO: 96638 - DNA, 25 bp, Homo sapien
gaaagattaaaacacgagtcgtcac

SEQ ID NO: 96639 - DNA, 25 bp, Homo sapien
cgactcttacttaattgaccggccg

SEQ ID NO: 96640 - DNA, 25 bp, Homo sapien
cgactcttactttattgaccggccg

SEQ ID NO: 96641 - DNA, 25 bp, Homo sapien
cagcttgtgtgtttcctgaactcgt

SEQ ID NO: 96642 - DNA, 25 bp, Homo sapien
cagcttgtgtgtatcctgaactcgt

SEQ ID NO: 96643 - DNA, 25 bp, Homo sapien
gacatgtctttatatagtcagacct

SEQ ID NO: 96644 - DNA, 25 bp, Homo sapien
gacatgtctttaaatagtcagacct

SEQ ID NO: 96645 - DNA, 25 bp, Homo sapien
gaaagaggggtttccggtgaaacac

SEQ ID NO: 96646 - DNA, 25 bp, Homo sapien
gaaagaggggttaccggtgaaacac

SEQ ID NO: 96647 - DNA, 25 bp, Homo sapien
gacacatcaaggtttccctcaaatg

SEQ ID NO: 96648 - DNA, 25 bp, Homo sapien
gacacatcaaggattccctcaaatg

SEQ ID NO: 96649 - DNA, 25 bp, Homo sapien
ccggaacagcatccacgggaagaac

SEQ ID NO: 96650 - DNA, 25 bp, Homo sapien
ccggaacagcatgcacgggaagaac

SEQ ID NO: 96651 - DNA, 25 bp, Homo sapien
aggaaatccggtagaggatactaac

SEQ ID NO: 96652 - DNA, 25 bp, Homo sapien
aggaaatccggttgaggatactaac

SEQ ID NO: 96653 - DNA, 25 bp, Homo sapien
agtgtttccacttcggcgaagatgt

SEQ ID NO: 96654 - DNA, 25 bp, Homo sapien
agtgtttccactacggcgaagatgt

SEQ ID NO: 96655 - DNA, 25 bp, Homo sapien
gtgacttcggtcaaggttcgaacgt

SEQ ID NO: 96656 - DNA, 25 bp, Homo sapien
gtgacttcggtctaggttcgaacgt

SEQ ID NO: 96657 - DNA, 25 bp, Homo sapien
ccgtctagacgtcgttattatcatt

SEQ ID NO: 96658 - DNA, 25 bp, Homo sapien
ccgtctagacgtggttattatcatt

SEQ ID NO: 96659 - DNA, 25 bp, Homo sapien
acctcgtaaagtatcatcgacgtgt

SEQ ID NO: 96660 - DNA, 25 bp, Homo sapien
acctcgtaaagtttcatcgacgtgt

SEQ ID NO: 96661 - DNA, 25 bp, Homo sapien
cgtgccacgagtgtcttcggtcctt

SEQ ID NO: 96662 - DNA, 25 bp, Homo sapien
cgtgccacgagtctcttcggtcctt

SEQ ID NO: 96663 - DNA, 25 bp, Homo sapien
gtgtaccaccatcttacgattctcg

SEQ ID NO: 96664 - DNA, 25 bp, Homo sapien
gtgtaccaccatgttacgattctcg

SEQ ID NO: 96665 - DNA, 25 bp, Homo sapien
ggtacacgaactctcttagtcattt

SEQ ID NO: 96666 - DNA, 25 bp, Homo sapien
ggtacacgaactgtcttagtcattt

SEQ ID NO: 96667 - DNA, 25 bp, Homo sapien
cgatcgcgacggtccttctcgacgg

SEQ ID NO: 96668 - DNA, 25 bp, Homo sapien
cgatcgcgacggaccttctcgacgg

SEQ ID NO: 96669 - DNA, 25 bp, Homo sapien
cgtgtggtcggactatttcgcgagt

SEQ ID NO: 96670 - DNA, 25 bp, Homo sapien
cgtgtggtcggagtatttcgcgagt

SEQ ID NO: 96671 - DNA, 25 bp, Homo sapien
caccttcggacaagggcaccctagt

SEQ ID NO: 96672 - DNA, 25 bp, Homo sapien
caccttcggacatgggcaccctagt

SEQ ID NO: 96673 - DNA, 25 bp, Homo sapien
tctccgtccgggtctaggccagggt

SEQ ID NO: 96674 - DNA, 25 bp, Homo sapien
tctccgtccgggactaggccagggt

SEQ ID NO: 96675 - DNA, 25 bp, Homo sapien
ttaccgccgaggtctccgccaaagt

SEQ ID NO: 96676 - DNA, 25 bp, Homo sapien
ttaccgccgaggactccgccaaagt

SEQ ID NO: 96677 - DNA, 25 bp, Homo sapien
gacaccggagtgtcgtcccaaaagt

SEQ ID NO: 96678 - DNA, 25 bp, Homo sapien
gacaccggagtgacgtcccaaaagt

SEQ ID NO: 96679 - DNA, 25 bp, Homo sapien
ggagtcggagggctcatcgacccta

SEQ ID NO: 96680 - DNA, 25 bp, Homo sapien
ggagtcggaggggtcatcgacccta

SEQ ID NO: 96681 - DNA, 25 bp, Homo sapien
acgcccggtcgagacgaaggtaccc

SEQ ID NO: 96682 - DNA, 25 bp, Homo sapien
acgcccggtcgacacgaaggtaccc

SEQ ID NO: 96683 - DNA, 25 bp, Homo sapien
acctcggagtgtaccgcttctccta

SEQ ID NO: 96684 - DNA, 25 bp, Homo sapien
acctcggagtgttccgcttctccta

SEQ ID NO: 96685 - DNA, 25 bp, Homo sapien
cgaccggtcctttggagtcatgggt

SEQ ID NO: 96686 - DNA, 25 bp, Homo sapien
cgaccggtccttaggagtcatgggt

SEQ ID NO: 96687 - DNA, 25 bp, Homo sapien
gaacactctccctaaacccttgggt

SEQ ID NO: 96688 - DNA, 25 bp, Homo sapien
gaacactctcccaaaacccttgggt

SEQ ID NO: 96689 - DNA, 25 bp, Homo sapien
aacttcagcacaaggccttcgaccg

SEQ ID NO: 96690 - DNA, 25 bp, Homo sapien
aacttcagcacatggccttcgaccg

SEQ ID NO: 96691 - DNA, 25 bp, Homo sapien
tacaacctactttggtgtcaaagtt

SEQ ID NO: 96692 - DNA, 25 bp, Homo sapien
tacaacctacttaggtgtcaaagtt

SEQ ID NO: 96693 - DNA, 25 bp, Homo sapien
tatcatcccgtgtactttactttgg

SEQ ID NO: 96694 - DNA, 25 bp, Homo sapien
tatcatcccgtgaactttactttgg

SEQ ID NO: 96695 - DNA, 25 bp, Homo sapien
tcgtgctcctgtttgcacctcatcg

SEQ ID NO: 96696 - DNA, 25 bp, Homo sapien
tcgtgctcctgtatgcacctcatcg

SEQ ID NO: 96697 - DNA, 25 bp, Homo sapien
tatgtgccacttctacaaccacagc

SEQ ID NO: 96698 - DNA, 25 bp, Homo sapien
tatgtgccacttgtacaaccacagc

SEQ ID NO: 96699 - DNA, 25 bp, Homo sapien
gtggtccacgctcatgtcctagaac

SEQ ID NO: 96700 - DNA, 25 bp, Homo sapien
gtggtccacgctgatgtcctagaac

SEQ ID NO: 96701 - DNA, 25 bp, Homo sapien
ggtccgccgaccttctgactcggac

SEQ ID NO: 96702 - DNA, 25 bp, Homo sapien
ggtccgccgaccatctgactcggac

SEQ ID NO: 96703 - DNA, 25 bp, Homo sapien
cctcaccggggtgcttacggtcact

SEQ ID NO: 96704 - DNA, 25 bp, Homo sapien
cctcaccggggtccttacggtcact

SEQ ID NO: 96705 - DNA, 25 bp, Homo sapien
acgagtcgggactggtagagactct

SEQ ID NO: 96706 - DNA, 25 bp, Homo sapien
acgagtcgggacaggtagagactct

SEQ ID NO: 96707 - DNA, 25 bp, Homo sapien
gacttggactcgtggggaacgactc

SEQ ID NO: 96708 - DNA, 25 bp, Homo sapien
gacttggactcgaggggaacgactc

SEQ ID NO: 96709 - DNA, 25 bp, Homo sapien
ctccgagaagtctcgagaggaacca

SEQ ID NO: 96710 - DNA, 25 bp, Homo sapien
ctccgagaagtcacgagaggaacca

SEQ ID NO: 96711 - DNA, 25 bp, Homo sapien
tcgggtcatctctccacggacttaa

SEQ ID NO: 96712 - DNA, 25 bp, Homo sapien
tcgggtcatctcaccacggacttaa

SEQ ID NO: 96713 - DNA, 25 bp, Homo sapien
gttctctctccgtacaagtctaagc

SEQ ID NO: 96714 - DNA, 25 bp, Homo sapien
gttctctctccgaacaagtctaagc

SEQ ID NO: 96715 - DNA, 25 bp, Homo sapien
agttccctaaccaaatgactagtcg

SEQ ID NO: 96716 - DNA, 25 bp, Homo sapien
agttccctaacctaatgactagtcg

SEQ ID NO: 96717 - DNA, 25 bp, Homo sapien
gtaagatttactaaattatcgttcg

SEQ ID NO: 96718 - DNA, 25 bp, Homo sapien
gtaagatttacttaattatcgttcg

SEQ ID NO: 96719 - DNA, 25 bp, Homo sapien
ggtaggttgatcactgacttactac

SEQ ID NO: 96720 - DNA, 25 bp, Homo sapien
ggtaggttgatctctgacttactac

SEQ ID NO: 96721 - DNA, 25 bp, Homo sapien
gtacgaagaaaccttcttatctgta

SEQ ID NO: 96722 - DNA, 25 bp, Homo sapien
gtacgaagaaacgttcttatctgta

SEQ ID NO: 96723 - DNA, 25 bp, Homo sapien
tagaagagaccgtagtaatcaatac

SEQ ID NO: 96724 - DNA, 25 bp, Homo sapien
tagaagagaccgaagtaatcaatac

SEQ ID NO: 96725 - DNA, 25 bp, Homo sapien
actagaaaggatcaagttactcaaa

SEQ ID NO: 96726 - DNA, 25 bp, Homo sapien
actagaaaggatgaagttactcaaa

SEQ ID NO: 96727 - DNA, 25 bp, Homo sapien
ccgggaagatcgacggacacgaccc

SEQ ID NO: 96728 - DNA, 25 bp, Homo sapien
ccgggaagatcgtcggacacgaccc

SEQ ID NO: 96729 - DNA, 25 bp, Homo sapien
caccttgggtcttcggtagaaccct

SEQ ID NO: 96730 - DNA, 25 bp, Homo sapien
caccttgggtctacggtagaaccct

SEQ ID NO: 96731 - DNA, 25 bp, Homo sapien
agacacttgtaacacgcaattgtca

SEQ ID NO: 96732 - DNA, 25 bp, Homo sapien
agacacttgtaagacgcaattgtca

SEQ ID NO: 96733 - DNA, 25 bp, Homo sapien
aaaaatgtatgtgtcaactctgcat

SEQ ID NO: 96734 - DNA, 25 bp, Homo sapien
aaaaatgtatgtctcaactctgcat

SEQ ID NO: 96735 - DNA, 25 bp, Homo sapien
atgtaccacgtagaaaccgcgaagt

SEQ ID NO: 96736 - DNA, 25 bp, Homo sapien
atgtaccacgtacaaaccgcgaagt

SEQ ID NO: 96737 - DNA, 25 bp, Homo sapien
cgtgttattctgtacccattgttca

SEQ ID NO: 96738 - DNA, 25 bp, Homo sapien
cgtgttattctgaacccattgttca

SEQ ID NO: 96739 - DNA, 25 bp, Homo sapien
cgtgtttacgtgactccttttttgc

SEQ ID NO: 96740 - DNA, 25 bp, Homo sapien
cgtgtttacgtgtctccttttttgc

SEQ ID NO: 96741 - DNA, 25 bp, Homo sapien
ctttttcacttacctttgtgctagg

SEQ ID NO: 96742 - DNA, 25 bp, Homo sapien
ctttttcacttagctttgtgctagg

SEQ ID NO: 96743 - DNA, 25 bp, Homo sapien
tgtgtttggtcctccgattccttgg

SEQ ID NO: 96744 - DNA, 25 bp, Homo sapien
tgtgtttggtccaccgattccttgg

SEQ ID NO: 96745 - DNA, 25 bp, Homo sapien
taaagacggaacagtttccgtcagg

SEQ ID NO: 96746 - DNA, 25 bp, Homo sapien
taaagacggaactgtttccgtcagg

SEQ ID NO: 96747 - DNA, 25 bp, Homo sapien
acccagagacgactcttttccaagg

SEQ ID NO: 96748 - DNA, 25 bp, Homo sapien
acccagagacgagtcttttccaagg

SEQ ID NO: 96749 - DNA, 25 bp, Homo sapien
taaagatcgtatgttcactcgggaa

SEQ ID NO: 96750 - DNA, 25 bp, Homo sapien
taaagatcgtatcttcactcgggaa

SEQ ID NO: 96751 - DNA, 25 bp, Homo sapien
tatcatgcggggtacaccagagaag

SEQ ID NO: 96752 - DNA, 25 bp, Homo sapien
tatcatgcggggaacaccagagaag

SEQ ID NO: 96753 - DNA, 25 bp, Homo sapien
cagtgacgggactagacccagaagt

SEQ ID NO: 96754 - DNA, 25 bp, Homo sapien
cagtgacgggacaagacccagaagt

SEQ ID NO: 96755 - DNA, 25 bp, Homo sapien
gtaccgagagttggttctgtaacag

SEQ ID NO: 96756 - DNA, 25 bp, Homo sapien
gtaccgagagttcgttctgtaacag

SEQ ID NO: 96757 - DNA, 25 bp, Homo sapien
aataacatattttctaacgaaacgt

SEQ ID NO: 96758 - DNA, 25 bp, Homo sapien
aataacatatttactaacgaaacgt

SEQ ID NO: 96759 - DNA, 25 bp, Homo sapien
ataacggaaatagtgtccaaacgat

SEQ ID NO: 96760 - DNA, 25 bp, Homo sapien
ataacggaaatactgtccaaacgat

SEQ ID NO: 96761 - DNA, 25 bp, Homo sapien
attagaaattacttgcaccgagatt

SEQ ID NO: 96762 - DNA, 25 bp, Homo sapien
attagaaattacatgcaccgagatt

SEQ ID NO: 96763 - DNA, 25 bp, Homo sapien
ctacattaattcctggagttgtatt

SEQ ID NO: 96764 - DNA, 25 bp, Homo sapien
ctacattaattcgtggagttgtatt

SEQ ID NO: 96765 - DNA, 25 bp, Homo sapien
taacttgaactttagatggtgtctc

SEQ ID NO: 96766 - DNA, 25 bp, Homo sapien
taacttgaacttaagatggtgtctc

SEQ ID NO: 96767 - DNA, 25 bp, Homo sapien
tccacgtcctctacggtaaggtctc

SEQ ID NO: 96768 - DNA, 25 bp, Homo sapien
tccacgtcctcttcggtaaggtctc

SEQ ID NO: 96769 - DNA, 25 bp, Homo sapien
ccgtgtcctcttgtcatcggtgctg

SEQ ID NO: 96770 - DNA, 25 bp, Homo sapien
ccgtgtcctcttctcatcggtgctg

SEQ ID NO: 96771 - DNA, 25 bp, Homo sapien
cctactcttctctccacttgtgggg

SEQ ID NO: 96772 - DNA, 25 bp, Homo sapien
cctactcttctcaccacttgtgggg

SEQ ID NO: 96773 - DNA, 25 bp, Homo sapien
tattctttccggttggtccgagggg

SEQ ID NO: 96774 - DNA, 25 bp, Homo sapien
tattctttccggatggtccgagggg

SEQ ID NO: 96775 - DNA, 25 bp, Homo sapien
aactttctcctgtacaacttgggcg

SEQ ID NO: 96776 - DNA, 25 bp, Homo sapien
aactttctcctgaacaacttgggcg

SEQ ID NO: 96777 - DNA, 25 bp, Homo sapien
tcgttttcgttactgaagtttacga

SEQ ID NO: 96778 - DNA, 25 bp, Homo sapien
tcgttttcgttagtgaagtttacga

SEQ ID NO: 96779 - DNA, 25 bp, Homo sapien
tcttaccttggtaagcgtttacact

SEQ ID NO: 96780 - DNA, 25 bp, Homo sapien
tcttaccttggttagcgtttacact

SEQ ID NO: 96781 - DNA, 25 bp, Homo sapien
tacaacgaaaggaacggttgtcact

SEQ ID NO: 96782 - DNA, 25 bp, Homo sapien
tacaacgaaaggtacggttgtcact

SEQ ID NO: 96783 - DNA, 25 bp, Homo sapien
agtaaagacgacgttcgaggggttc

SEQ ID NO: 96784 - DNA, 25 bp, Homo sapien
agtaaagacgaccttcgaggggttc

SEQ ID NO: 96785 - DNA, 25 bp, Homo sapien
actagagcacggtgtcgagggatcc

SEQ ID NO: 96786 - DNA, 25 bp, Homo sapien
actagagcacggagtcgagggatcc

SEQ ID NO: 96787 - DNA, 25 bp, Homo sapien
atacaggtcaggaccctggactcag

SEQ ID NO: 96788 - DNA, 25 bp, Homo sapien
atacaggtcaggtccctggactcag

SEQ ID NO: 96789 - DNA, 25 bp, Homo sapien
agaccctgtgggactctgggattcg

SEQ ID NO: 96790 - DNA, 25 bp, Homo sapien
agaccctgtgggtctctgggattcg

SEQ ID NO: 96791 - DNA, 25 bp, Homo sapien
aaaaccgtgatgttccaagacattt

SEQ ID NO: 96792 - DNA, 25 bp, Homo sapien
aaaaccgtgatgatccaagacattt

SEQ ID NO: 96793 - DNA, 25 bp, Homo sapien
cctcgtaggtataaacggacactca

SEQ ID NO: 96794 - DNA, 25 bp, Homo sapien
cctcgtaggtattaacggacactca

SEQ ID NO: 96795 - DNA, 25 bp, Homo sapien
ttctgtaggattcgtgacatactct

SEQ ID NO: 96796 - DNA, 25 bp, Homo sapien
ttctgtaggattggtgacatactct

SEQ ID NO: 96797 - DNA, 25 bp, Homo sapien
tgcatcgtcggttggcaccagtaag

SEQ ID NO: 96798 - DNA, 25 bp, Homo sapien
tgcatcgtcggtaggcaccagtaag

SEQ ID NO: 96799 - DNA, 25 bp, Homo sapien
acgtcatctcggaggcgacggcgaa

SEQ ID NO: 96800 - DNA, 25 bp, Homo sapien
acgtcatctcggtggcgacggcgaa

SEQ ID NO: 96801 - DNA, 25 bp, Homo sapien
tcgtctcttgtgtcggggcaaggac

SEQ ID NO: 96802 - DNA, 25 bp, Homo sapien
tcgtctcttgtgacggggcaaggac

SEQ ID NO: 96803 - DNA, 25 bp, Homo sapien
cgtagagttccgaccctacgacgac

SEQ ID NO: 96804 - DNA, 25 bp, Homo sapien
cgtagagttccgtccctacgacgac

SEQ ID NO: 96805 - DNA, 25 bp, Homo sapien
cgtgtacgtcttgaccgacgcgaaa

SEQ ID NO: 96806 - DNA, 25 bp, Homo sapien
cgtgtacgtcttcaccgacgcgaaa

SEQ ID NO: 96807 - DNA, 25 bp, Homo sapien
atgggagcctgtgccgcacgaaccg

SEQ ID NO: 96808 - DNA, 25 bp, Homo sapien
atgggagcctgtcccgcacgaaccg

SEQ ID NO: 96809 - DNA, 25 bp, Homo sapien
caggaagtccacccggtcgaggtcc

SEQ ID NO: 96810 - DNA, 25 bp, Homo sapien
caggaagtccacgcggtcgaggtcc

SEQ ID NO: 96811 - DNA, 25 bp, Homo sapien
tctaaaacctctggaattcaggtag

SEQ ID NO: 96812 - DNA, 25 bp, Homo sapien
tctaaaacctctcgaattcaggtag

SEQ ID NO: 96813 - DNA, 25 bp, Homo sapien
ggacagtgtctcaggatattcgaaa

SEQ ID NO: 96814 - DNA, 25 bp, Homo sapien
ggacagtgtctctggatattcgaaa

SEQ ID NO: 96815 - DNA, 25 bp, Homo sapien
aatcgtgtctgagttcgtctgacga

SEQ ID NO: 96816 - DNA, 25 bp, Homo sapien
aatcgtgtctgacttcgtctgacga

SEQ ID NO: 96817 - DNA, 25 bp, Homo sapien
gtcacgagtcttcttacgtcaaggt

SEQ ID NO: 96818 - DNA, 25 bp, Homo sapien
gtcacgagtcttgttacgtcaaggt

SEQ ID NO: 96819 - DNA, 25 bp, Homo sapien
gaccatagaagattttcaccatgtt

SEQ ID NO: 96820 - DNA, 25 bp, Homo sapien
gaccatagaagaatttcaccatgtt

SEQ ID NO: 96821 - DNA, 25 bp, Homo sapien
aacctaaaggtaggattccctattc

SEQ ID NO: 96822 - DNA, 25 bp, Homo sapien
aacctaaaggtacgattccctattc

SEQ ID NO: 96823 - DNA, 25 bp, Homo sapien
taaacccgaaggattcccactctgt

SEQ ID NO: 96824 - DNA, 25 bp, Homo sapien
taaacccgaaggtttcccactctgt

SEQ ID NO: 96825 - DNA, 25 bp, Homo sapien
tacaatccctaggtcatcattaagg

SEQ ID NO: 96826 - DNA, 25 bp, Homo sapien
tacaatccctagctcatcattaagg

SEQ ID NO: 96827 - DNA, 25 bp, Homo sapien
atacatgtcctggtcaaatttaggg

SEQ ID NO: 96828 - DNA, 25 bp, Homo sapien
atacatgtcctgctcaaatttaggg

SEQ ID NO: 96829 - DNA, 25 bp, Homo sapien
gttctatcgtacgacctacagggcg

SEQ ID NO: 96830 - DNA, 25 bp, Homo sapien
gttctatcgtaccacctacagggcg

SEQ ID NO: 96831 - DNA, 25 bp, Homo sapien
tgttgataccgacgaacacgaggag

SEQ ID NO: 96832 - DNA, 25 bp, Homo sapien
tgttgataccgaggaacacgaggag

SEQ ID NO: 96833 - DNA, 25 bp, Homo sapien
ttgatcttaccttggaccgtgtcta

SEQ ID NO: 96834 - DNA, 25 bp, Homo sapien
ttgatcttacctaggaccgtgtcta

SEQ ID NO: 96835 - DNA, 25 bp, Homo sapien
gtgggtctgtcgtcctgaggtttct

SEQ ID NO: 96836 - DNA, 25 bp, Homo sapien
gtgggtctgtcgacctgaggtttct

SEQ ID NO: 96837 - DNA, 25 bp, Homo sapien
ggcttcagtcgtcctcggagaccct

SEQ ID NO: 96838 - DNA, 25 bp, Homo sapien
ggcttcagtcgtgctcggagaccct

SEQ ID NO: 96839 - DNA, 25 bp, Homo sapien
gttcccggtggtctcgcggatccac

SEQ ID NO: 96840 - DNA, 25 bp, Homo sapien
gttcccggtggtgtcgcggatccac

SEQ ID NO: 96841 - DNA, 25 bp, Homo sapien
gaacccagttgtcgtggccgccgac

SEQ ID NO: 96842 - DNA, 25 bp, Homo sapien
gaacccagttgtggtggccgccgac

SEQ ID NO: 96843 - DNA, 25 bp, Homo sapien
gaagaaggttggacttttccgtaac

SEQ ID NO: 96844 - DNA, 25 bp, Homo sapien
gaagaaggttggtcttttccgtaac

SEQ ID NO: 96845 - DNA, 25 bp, Homo sapien
ttaaaacagggtacccattatgata

SEQ ID NO: 96846 - DNA, 25 bp, Homo sapien
ttaaaacagggttcccattatgata

SEQ ID NO: 96847 - DNA, 25 bp, Homo sapien
tcgcaatcagatgtccggatgggaa

SEQ ID NO: 96848 - DNA, 25 bp, Homo sapien
tcgcaatcagatctccggatgggaa

SEQ ID NO: 96849 - DNA, 25 bp, Homo sapien
cgatgtcgaacactcactgggggaa

SEQ ID NO: 96850 - DNA, 25 bp, Homo sapien
cgatgtcgaacagtcactgggggaa

SEQ ID NO: 96851 - DNA, 25 bp, Homo sapien
tcgacgacgccagaggcagcggctc

SEQ ID NO: 96852 - DNA, 25 bp, Homo sapien
tcgacgacgccacaggcagcggctc

SEQ ID NO: 96853 - DNA, 25 bp, Homo sapien
atgtactgttccacgccgagggatc

SEQ ID NO: 96854 - DNA, 25 bp, Homo sapien
atgtactgttcctcgccgagggatc

SEQ ID NO: 96855 - DNA, 25 bp, Homo sapien
aattgtacgacatccactaaagggt

SEQ ID NO: 96856 - DNA, 25 bp, Homo sapien
aattgtacgacaaccactaaagggt

SEQ ID NO: 96857 - DNA, 25 bp, Homo sapien
ccctttaaactcgactcaaggtgtt

SEQ ID NO: 96858 - DNA, 25 bp, Homo sapien
ccctttaaactccactcaaggtgtt

SEQ ID NO: 96859 - DNA, 25 bp, Homo sapien
cgtgttaaacgaccaccgaaatctt

SEQ ID NO: 96860 - DNA, 25 bp, Homo sapien
cgtgttaaacgagcaccgaaatctt

SEQ ID NO: 96861 - DNA, 25 bp, Homo sapien
tacttagctcagacaaaggtcgtct

SEQ ID NO: 96862 - DNA, 25 bp, Homo sapien
tacttagctcagtcaaaggtcgtct

SEQ ID NO: 96863 - DNA, 25 bp, Homo sapien
taagtgacgctagacgttcgggacc

SEQ ID NO: 96864 - DNA, 25 bp, Homo sapien
taagtgacgctacacgttcgggacc

SEQ ID NO: 96865 - DNA, 25 bp, Homo sapien
gtacagctcctctcgtcgtcgacct

SEQ ID NO: 96866 - DNA, 25 bp, Homo sapien
gtacagctcctcacgtcgtcgacct

SEQ ID NO: 96867 - DNA, 25 bp, Homo sapien
gcacaaactccctaagtcaagaggt

SEQ ID NO: 96868 - DNA, 25 bp, Homo sapien
gcacaaactcccaaagtcaagaggt

SEQ ID NO: 96869 - DNA, 25 bp, Homo sapien
acaaaatagagtactgaccaatacg

SEQ ID NO: 96870 - DNA, 25 bp, Homo sapien
acaaaatagagttctgaccaatacg

SEQ ID NO: 96871 - DNA, 25 bp, Homo sapien
gattgatagtttggaccactgtcgt

SEQ ID NO: 96872 - DNA, 25 bp, Homo sapien
gattgatagtttcgaccactgtcgt

SEQ ID NO: 96873 - DNA, 25 bp, Homo sapien
gttatcacaagttagggacttcttg

SEQ ID NO: 96874 - DNA, 25 bp, Homo sapien
gttatcacaagtaagggacttcttg

SEQ ID NO: 96875 - DNA, 25 bp, Homo sapien
ttgacactaaatcagagactcaatg

SEQ ID NO: 96876 - DNA, 25 bp, Homo sapien
ttgacactaaatgagagactcaatg

SEQ ID NO: 96877 - DNA, 25 bp, Homo sapien
gaaataaagcaatggcactctatta

SEQ ID NO: 96878 - DNA, 25 bp, Homo sapien
gaaataaagcaaaggcactctatta

SEQ ID NO: 96879 - DNA, 25 bp, Homo sapien
aagacgtttcaagagtcgattcctt

SEQ ID NO: 96880 - DNA, 25 bp, Homo sapien
aagacgtttcaacagtcgattcctt

SEQ ID NO: 96881 - DNA, 25 bp, Homo sapien
aagtactatgaaaggttgtttccct

SEQ ID NO: 96882 - DNA, 25 bp, Homo sapien
aagtactatgaatggttgtttccct

SEQ ID NO: 96883 - DNA, 25 bp, Homo sapien
aaggattacagtgctcttacttttt

SEQ ID NO: 96884 - DNA, 25 bp, Homo sapien
aaggattacagtcctcttacttttt

SEQ ID NO: 96885 - DNA, 25 bp, Homo sapien
tccgcagcctcttctagtagtagtt

SEQ ID NO: 96886 - DNA, 25 bp, Homo sapien
tccgcagcctctactagtagtagtt

SEQ ID NO: 96887 - DNA, 25 bp, Homo sapien
cggtgtaccgtttcgatatagtact

SEQ ID NO: 96888 - DNA, 25 bp, Homo sapien
cggtgtaccgttacgatatagtact

SEQ ID NO: 96889 - DNA, 25 bp, Homo sapien
agacgtcgttcctatcgaagtcgta

SEQ ID NO: 96890 - DNA, 25 bp, Homo sapien
agacgtcgttccaatcgaagtcgta

SEQ ID NO: 96891 - DNA, 25 bp, Homo sapien
cagacgtgtagacctaaaattacgg

SEQ ID NO: 96892 - DNA, 25 bp, Homo sapien
cagacgtgtagagctaaaattacgg

SEQ ID NO: 96893 - DNA, 25 bp, Homo sapien
aaagtagtgtcaatataccagatca

SEQ ID NO: 96894 - DNA, 25 bp, Homo sapien
aaagtagtgtcattataccagatca

SEQ ID NO: 96895 - DNA, 25 bp, Homo sapien
agcgactccagttatctgacactat

SEQ ID NO: 96896 - DNA, 25 bp, Homo sapien
agcgactccagtaatctgacactat

SEQ ID NO: 96897 - DNA, 25 bp, Homo sapien
ttctcggtgacgatgagttcctcag

SEQ ID NO: 96898 - DNA, 25 bp, Homo sapien
ttctcggtgacgttgagttcctcag

SEQ ID NO: 96899 - DNA, 25 bp, Homo sapien
tctcaagtgacttaagtaccgacca

SEQ ID NO: 96900 - DNA, 25 bp, Homo sapien
tctcaagtgactaaagtaccgacca

SEQ ID NO: 96901 - DNA, 25 bp, Homo sapien
acagacctgcgccgaggcaccgcag

SEQ ID NO: 96902 - DNA, 25 bp, Homo sapien
acagacctgcgcggaggcaccgcag

SEQ ID NO: 96903 - DNA, 25 bp, Homo sapien
acaaacgccaccaactgcatcacga

SEQ ID NO: 96904 - DNA, 25 bp, Homo sapien
acaaacgccacctactgcatcacga

SEQ ID NO: 96905 - DNA, 25 bp, Homo sapien
atgcagcacctcaggtgaccgcaga

SEQ ID NO: 96906 - DNA, 25 bp, Homo sapien
atgcagcacctctggtgaccgcaga

SEQ ID NO: 96907 - DNA, 25 bp, Homo sapien
agggacggccaccttcgacccggga

SEQ ID NO: 96908 - DNA, 25 bp, Homo sapien
agggacggccacgttcgacccggga

SEQ ID NO: 96909 - DNA, 25 bp, Homo sapien
gactaataccgtagctctgtgacat

SEQ ID NO: 96910 - DNA, 25 bp, Homo sapien
gactaataccgttgctctgtgacat

SEQ ID NO: 96911 - DNA, 25 bp, Homo sapien
ctccatactagagactcctttgaga

SEQ ID NO: 96912 - DNA, 25 bp, Homo sapien
ctccatactagacactcctttgaga

SEQ ID NO: 96913 - DNA, 25 bp, Homo sapien
ctttgttctgaagtcacgtttaaat

SEQ ID NO: 96914 - DNA, 25 bp, Homo sapien
ctttgttctgaactcacgtttaaat

SEQ ID NO: 96915 - DNA, 25 bp, Homo sapien
ttgggtttcgaacctccgttgaaca

SEQ ID NO: 96916 - DNA, 25 bp, Homo sapien
ttgggtttcgaagctccgttgaaca

SEQ ID NO: 96917 - DNA, 25 bp, Homo sapien
taatgtgtcactcgaaacccgataa

SEQ ID NO: 96918 - DNA, 25 bp, Homo sapien
taatgtgtcactggaaacccgataa

SEQ ID NO: 96919 - DNA, 25 bp, Homo sapien
caaagtcaaagaaccgaccagacca

SEQ ID NO: 96920 - DNA, 25 bp, Homo sapien
caaagtcaaagatccgaccagacca

SEQ ID NO: 96921 - DNA, 25 bp, Homo sapien
tgacttctgtaaatgccccgtataa

SEQ ID NO: 96922 - DNA, 25 bp, Homo sapien
tgacttctgtaattgccccgtataa

SEQ ID NO: 96923 - DNA, 25 bp, Homo sapien
tcacgttactttaaacaactttgga

SEQ ID NO: 96924 - DNA, 25 bp, Homo sapien
tcacgttacttttaacaactttgga

SEQ ID NO: 96925 - DNA, 25 bp, Homo sapien
gtaccttggtagaagactgattcga

SEQ ID NO: 96926 - DNA, 25 bp, Homo sapien
gtaccttggtagtagactgattcga

SEQ ID NO: 96927 - DNA, 25 bp, Homo sapien
gcttcccctgtccaaaaacttcggt

SEQ ID NO: 96928 - DNA, 25 bp, Homo sapien
gcttcccctgtcgaaaaacttcggt

SEQ ID NO: 96929 - DNA, 25 bp, Homo sapien
ctttttcagtcaaataaactacaca

SEQ ID NO: 96930 - DNA, 25 bp, Homo sapien
ctttttcagtcatataaactacaca

SEQ ID NO: 96931 - DNA, 25 bp, Homo sapien
ctttttcacttgtcagacggtcaca

SEQ ID NO: 96932 - DNA, 25 bp, Homo sapien
ctttttcacttgacagacggtcaca

SEQ ID NO: 96933 - DNA, 25 bp, Homo sapien
gtatccctggtggtttatgacttta

SEQ ID NO: 96934 - DNA, 25 bp, Homo sapien
gtatccctggtgctttatgacttta

SEQ ID NO: 96935 - DNA, 25 bp, Homo sapien
ctttcggtaaggtagtccgatttat

SEQ ID NO: 96936 - DNA, 25 bp, Homo sapien
ctttcggtaaggaagtccgatttat

SEQ ID NO: 96937 - DNA, 25 bp, Homo sapien
tagtggtgacgtatgtggccctcca

SEQ ID NO: 96938 - DNA, 25 bp, Homo sapien
tagtggtgacgtttgtggccctcca

SEQ ID NO: 96939 - DNA, 25 bp, Homo sapien
taggtgtggttttgagacccgaagc

SEQ ID NO: 96940 - DNA, 25 bp, Homo sapien
taggtgtggtttagagacccgaagc

SEQ ID NO: 96941 - DNA, 25 bp, Homo sapien
aaccagtagatttctgcaaaaagtt

SEQ ID NO: 96942 - DNA, 25 bp, Homo sapien
aaccagtagattactgcaaaaagtt

SEQ ID NO: 96943 - DNA, 25 bp, Homo sapien
gaaagtgactctcaactcagtagac

SEQ ID NO: 96944 - DNA, 25 bp, Homo sapien
gaaagtgactctgaactcagtagac

SEQ ID NO: 96945 - DNA, 25 bp, Homo sapien
gtgctctcgtttggagtacggttac

SEQ ID NO: 96946 - DNA, 25 bp, Homo sapien
gtgctctcgtttcgagtacggttac

SEQ ID NO: 96947 - DNA, 25 bp, Homo sapien
ccgtcctgtgcgtcggtagcggtac

SEQ ID NO: 96948 - DNA, 25 bp, Homo sapien
ccgtcctgtgcgacggtagcggtac

SEQ ID NO: 96949 - DNA, 25 bp, Homo sapien
cgaccctacggtaggtgtgacgtct

SEQ ID NO: 96950 - DNA, 25 bp, Homo sapien
cgaccctacggttggtgtgacgtct

SEQ ID NO: 96951 - DNA, 25 bp, Homo sapien
cagtggaacacgtcgaggtgtcctc

SEQ ID NO: 96952 - DNA, 25 bp, Homo sapien
cagtggaacacgacgaggtgtcctc

SEQ ID NO: 96953 - DNA, 25 bp, Homo sapien
aaacgagacctagagctactgaaag

SEQ ID NO: 96954 - DNA, 25 bp, Homo sapien
aaacgagacctacagctactgaaag

SEQ ID NO: 96955 - DNA, 25 bp, Homo sapien
atacgtcggaccttcgaatagaaca

SEQ ID NO: 96956 - DNA, 25 bp, Homo sapien
atacgtcggaccatcgaatagaaca

SEQ ID NO: 96957 - DNA, 25 bp, Homo sapien
agtcgctaggccaacaactagaaca

SEQ ID NO: 96958 - DNA, 25 bp, Homo sapien
agtcgctaggcctacaactagaaca

SEQ ID NO: 96959 - DNA, 25 bp, Homo sapien
cataaacaggtctacgttttgttaa

SEQ ID NO: 96960 - DNA, 25 bp, Homo sapien
cataaacaggtcaacgttttgttaa

SEQ ID NO: 96961 - DNA, 25 bp, Homo sapien
gatcggaaccggaaccttgtgaaag

SEQ ID NO: 96962 - DNA, 25 bp, Homo sapien
gatcggaaccggtaccttgtgaaag

SEQ ID NO: 96963 - DNA, 25 bp, Homo sapien
cgtaacacctagtctttaaagacga

SEQ ID NO: 96964 - DNA, 25 bp, Homo sapien
cgtaacacctagactttaaagacga

SEQ ID NO: 96965 - DNA, 25 bp, Homo sapien
gtctcttcggacctctcagggacga

SEQ ID NO: 96966 - DNA, 25 bp, Homo sapien
gtctcttcggacgtctcagggacga

SEQ ID NO: 96967 - DNA, 25 bp, Homo sapien
tcacaccggtccagtcaggcgtaca

SEQ ID NO: 96968 - DNA, 25 bp, Homo sapien
tcacaccggtcctgtcaggcgtaca

SEQ ID NO: 96969 - DNA, 25 bp, Homo sapien
tcgaccacgtggtgtgtgtgctcta

SEQ ID NO: 96970 - DNA, 25 bp, Homo sapien
tcgaccacgtggagtgtgtgctcta

SEQ ID NO: 96971 - DNA, 25 bp, Homo sapien
caccggacgaacaagcgggacagac

SEQ ID NO: 96972 - DNA, 25 bp, Homo sapien
caccggacgaactagcgggacagac

SEQ ID NO: 96973 - DNA, 25 bp, Homo sapien
actgactagacgtttccgagacacc

SEQ ID NO: 96974 - DNA, 25 bp, Homo sapien
actgactagacgattccgagacacc

SEQ ID NO: 96975 - DNA, 25 bp, Homo sapien
tcgacgtcaagtctaaactctagtc

SEQ ID NO: 96976 - DNA, 25 bp, Homo sapien
tcgacgtcaagtgtaaactctagtc

SEQ ID NO: 96977 - DNA, 25 bp, Homo sapien
tagactagagccaacaactacactc

SEQ ID NO: 96978 - DNA, 25 bp, Homo sapien
tagactagagcctacaactacactc

SEQ ID NO: 96979 - DNA, 25 bp, Homo sapien
aataatgaaggtagtatactatatc

SEQ ID NO: 96980 - DNA, 25 bp, Homo sapien
aataatgaaggttgtatactatatc

SEQ ID NO: 96981 - DNA, 25 bp, Homo sapien
ttcctaaggtgagttcatattagtc

SEQ ID NO: 96982 - DNA, 25 bp, Homo sapien
ttcctaaggtgacttcatattagtc

SEQ ID NO: 96983 - DNA, 25 bp, Homo sapien
aataaaaggtctctaaacgcttcag

SEQ ID NO: 96984 - DNA, 25 bp, Homo sapien
aataaaaggtctgtaaacgcttcag

SEQ ID NO: 96985 - DNA, 25 bp, Homo sapien
cttgcgatctcggacaaaacgtgca

SEQ ID NO: 96986 - DNA, 25 bp, Homo sapien
cttgcgatctcgcacaaaacgtgca

SEQ ID NO: 96987 - DNA, 25 bp, Homo sapien
ttacgacaaagtgaccaatacgccg

SEQ ID NO: 96988 - DNA, 25 bp, Homo sapien
ttacgacaaagtcaccaatacgccg

SEQ ID NO: 96989 - DNA, 25 bp, Homo sapien
gtcccgagatctctgactctgtcca

SEQ ID NO: 96990 - DNA, 25 bp, Homo sapien
gtcccgagatctgtgactctgtcca

SEQ ID NO: 96991 - DNA, 25 bp, Homo sapien
ccatctttcttgtagagtctgtcca

SEQ ID NO: 96992 - DNA, 25 bp, Homo sapien
ccatctttcttgaagagtctgtcca

SEQ ID NO: 96993 - DNA, 25 bp, Homo sapien
tcactttatacagattccttcggag

SEQ ID NO: 96994 - DNA, 25 bp, Homo sapien
tcactttatacacattccttcggag

SEQ ID NO: 96995 - DNA, 25 bp, Homo sapien
tttacagtggggtacctccacggag

SEQ ID NO: 96996 - DNA, 25 bp, Homo sapien
tttacagtggggaacctccacggag

SEQ ID NO: 96997 - DNA, 25 bp, Homo sapien
tcccggggaccaaacctgtacggag

SEQ ID NO: 96998 - DNA, 25 bp, Homo sapien
tcccggggaccatacctgtacggag

SEQ ID NO: 96999 - DNA, 25 bp, Homo sapien
ccaccgagatatgtcctcccgtagt

SEQ ID NO: 97000 - DNA, 25 bp, Homo sapien
ccaccgagatatctcctcccgtagt

SEQ ID NO: 97001 - DNA, 25 bp, Homo sapien
gtgtctcgattgtgtcctcctcgtc

SEQ ID NO: 97002 - DNA, 25 bp, Homo sapien
gtgtctcgattgagtcctcctcgtc

SEQ ID NO: 97003 - DNA, 25 bp, Homo sapien
gggtttcgttgtgtctcctcgttcc

SEQ ID NO: 97004 - DNA, 25 bp, Homo sapien
gggtttcgttgtctctcctcgttcc

SEQ ID NO: 97005 - DNA, 25 bp, Homo sapien
gaggggaccgtcaccatcgtcgtca

SEQ ID NO: 97006 - DNA, 25 bp, Homo sapien
gaggggaccgtctccatcgtcgtca

SEQ ID NO: 97007 - DNA, 25 bp, Homo sapien
gaccggggcacgtcgacgtgtccca

SEQ ID NO: 97008 - DNA, 25 bp, Homo sapien
gaccggggcacgacgacgtgtccca

SEQ ID NO: 97009 - DNA, 25 bp, Homo sapien
gggagacaacataacgtgtgccgaa

SEQ ID NO: 97010 - DNA, 25 bp, Homo sapien
gggagacaacattacgtgtgccgaa

SEQ ID NO: 97011 - DNA, 25 bp, Homo sapien
cacaacactcggttcgagactagag

SEQ ID NO: 97012 - DNA, 25 bp, Homo sapien
cacaacactcggatcgagactagag

SEQ ID NO: 97013 - DNA, 25 bp, Homo sapien
actcggtcactcagataacgtacca

SEQ ID NO: 97014 - DNA, 25 bp, Homo sapien
actcggtcactctgataacgtacca

SEQ ID NO: 97015 - DNA, 25 bp, Homo sapien
ttacgtgtctctttcgtatagtaaa

SEQ ID NO: 97016 - DNA, 25 bp, Homo sapien
ttacgtgtctctatcgtatagtaaa

SEQ ID NO: 97017 - DNA, 25 bp, Homo sapien
tactacaacttgaacggtcgtaagg

SEQ ID NO: 97018 - DNA, 25 bp, Homo sapien
tactacaacttgtacggtcgtaagg

SEQ ID NO: 97019 - DNA, 25 bp, Homo sapien
tactcccctgtctacactgttgtgt

SEQ ID NO: 97020 - DNA, 25 bp, Homo sapien
tactcccctgtcaacactgttgtgt

SEQ ID NO: 97021 - DNA, 25 bp, Homo sapien
actactgccctacaccctagaaggt

SEQ ID NO: 97022 - DNA, 25 bp, Homo sapien
actactgccctagaccctagaaggt

SEQ ID NO: 97023 - DNA, 25 bp, Homo sapien
actacgtgtgcctcaacactgaaga

SEQ ID NO: 97024 - DNA, 25 bp, Homo sapien
actacgtgtgccacaacactgaaga

SEQ ID NO: 97025 - DNA, 25 bp, Homo sapien
cgtctcggaagaacaccacagagtc

SEQ ID NO: 97026 - DNA, 25 bp, Homo sapien
cgtctcggaagatcaccacagagtc

SEQ ID NO: 97027 - DNA, 25 bp, Homo sapien
ccgggtgaccttaacacacctacga

SEQ ID NO: 97028 - DNA, 25 bp, Homo sapien
ccgggtgacctttacacacctacga

SEQ ID NO: 97029 - DNA, 25 bp, Homo sapien
tttgtacatcatctgtgttaacaga

SEQ ID NO: 97030 - DNA, 25 bp, Homo sapien
tttgtacatcatgtgtgttaacaga

SEQ ID NO: 97031 - DNA, 25 bp, Homo sapien
aggaggtccgtcgtccactgggtat

SEQ ID NO: 97032 - DNA, 25 bp, Homo sapien
aggaggtccgtcctccactgggtat

SEQ ID NO: 97033 - DNA, 25 bp, Homo sapien
ccggaggtctgtccttccactaggg

SEQ ID NO: 97034 - DNA, 25 bp, Homo sapien
ccggaggtctgtgcttccactaggg

SEQ ID NO: 97035 - DNA, 25 bp, Homo sapien
tctggaggttggtgtggtctactcc

SEQ ID NO: 97036 - DNA, 25 bp, Homo sapien
tctggaggttggagtggtctactcc

SEQ ID NO: 97037 - DNA, 25 bp, Homo sapien
aactccttttgtcgaggaatctctc

SEQ ID NO: 97038 - DNA, 25 bp, Homo sapien
aactccttttgtggaggaatctctc

SEQ ID NO: 97039 - DNA, 25 bp, Homo sapien
aaccttttgggttcgacattacatg

SEQ ID NO: 97040 - DNA, 25 bp, Homo sapien
aaccttttgggtacgacattacatg

SEQ ID NO: 97041 - DNA, 25 bp, Homo sapien
cccttttggtggatatatgttactt

SEQ ID NO: 97042 - DNA, 25 bp, Homo sapien
cccttttggtggttatatgttactt

SEQ ID NO: 97043 - DNA, 25 bp, Homo sapien
ctcgttttgtctctacttcttctca

SEQ ID NO: 97044 - DNA, 25 bp, Homo sapien
ctcgttttgtctgtacttcttctca

SEQ ID NO: 97045 - DNA, 25 bp, Homo sapien
ctctttagagtgttgacttctttca

SEQ ID NO: 97046 - DNA, 25 bp, Homo sapien
ctctttagagtgatgacttctttca

SEQ ID NO: 97047 - DNA, 25 bp, Homo sapien
acgtttaactcatgtcaccaaggta

SEQ ID NO: 97048 - DNA, 25 bp, Homo sapien
acgtttaactcaagtcaccaaggta

SEQ ID NO: 97049 - DNA, 25 bp, Homo sapien
tttttaatcaacgttcagatcgtcg

SEQ ID NO: 97050 - DNA, 25 bp, Homo sapien
tttttaatcaaccttcagatcgtcg

SEQ ID NO: 97051 - DNA, 25 bp, Homo sapien
gttgttttacgtcaacatccctttg

SEQ ID NO: 97052 - DNA, 25 bp, Homo sapien
gttgttttacgtgaacatccctttg

SEQ ID NO: 97053 - DNA, 25 bp, Homo sapien
ctcctcacagtacatgttctgtctg

SEQ ID NO: 97054 - DNA, 25 bp, Homo sapien
ctcctcacagtagatgttctgtctg

SEQ ID NO: 97055 - DNA, 25 bp, Homo sapien
tccgtacccggtggacttgatgata

SEQ ID NO: 97056 - DNA, 25 bp, Homo sapien
tccgtacccggtcgacttgatgata

SEQ ID NO: 97057 - DNA, 25 bp, Homo sapien
gtctcccggaacacccggaggagta

SEQ ID NO: 97058 - DNA, 25 bp, Homo sapien
gtctcccggaactcccggaggagta

SEQ ID NO: 97059 - DNA, 25 bp, Homo sapien
cgtccccgaagaatcccggttagaa

SEQ ID NO: 97060 - DNA, 25 bp, Homo sapien
cgtccccgaagattcccggttagaa

SEQ ID NO: 97061 - DNA, 25 bp, Homo sapien
caccagaacgggtacacgaggagaa

SEQ ID NO: 97062 - DNA, 25 bp, Homo sapien
caccagaacgggaacacgaggagaa

SEQ ID NO: 97063 - DNA, 25 bp, Homo sapien
cccgacgcccgtaaggaacgggtca

SEQ ID NO: 97064 - DNA, 25 bp, Homo sapien
cccgacgcccgttaggaacgggtca

SEQ ID NO: 97065 - DNA, 25 bp, Homo sapien
ctattacctccgtggaggtctgtca

SEQ ID NO: 97066 - DNA, 25 bp, Homo sapien
ctattacctccgaggaggtctgtca

SEQ ID NO: 97067 - DNA, 25 bp, Homo sapien
tacttcgtccgcaggggtctcgtcc

SEQ ID NO: 97068 - DNA, 25 bp, Homo sapien
tacttcgtccgctggggtctcgtcc

SEQ ID NO: 97069 - DNA, 25 bp, Homo sapien
gttatgacttagacgtatgcgtcaa

SEQ ID NO: 97070 - DNA, 25 bp, Homo sapien
gttatgacttagtcgtatgcgtcaa

SEQ ID NO: 97071 - DNA, 25 bp, Homo sapien
cttgttcccccgttcatggtcacgg

SEQ ID NO: 97072 - DNA, 25 bp, Homo sapien
cttgttcccccgatcatggtcacgg

SEQ ID NO: 97073 - DNA, 25 bp, Homo sapien
ttttcgtcgggaccactggtccgcg

SEQ ID NO: 97074 - DNA, 25 bp, Homo sapien
ttttcgtcgggagcactggtccgcg

SEQ ID NO: 97075 - DNA, 25 bp, Homo sapien
atcgataagtagtagtgtagtccct

SEQ ID NO: 97076 - DNA, 25 bp, Homo sapien
atcgataagtagaagtgtagtccct

SEQ ID NO: 97077 - DNA, 25 bp, Homo sapien
aggagaagtgtcgtcgacgacgacc

SEQ ID NO: 97078 - DNA, 25 bp, Homo sapien
aggagaagtgtcctcgacgacgacc

SEQ ID NO: 97079 - DNA, 25 bp, Homo sapien
agaacgaggttcctctctcgtaact

SEQ ID NO: 97080 - DNA, 25 bp, Homo sapien
agaacgaggttcgtctctcgtaact

SEQ ID NO: 97081 - DNA, 25 bp, Homo sapien
acgaatgacctctacgtcttagagt

SEQ ID NO: 97082 - DNA, 25 bp, Homo sapien
acgaatgacctcaacgtcttagagt

SEQ ID NO: 97083 - DNA, 25 bp, Homo sapien
agaggaggacacctaaatattcggt

SEQ ID NO: 97084 - DNA, 25 bp, Homo sapien
agaggaggacacgtaaatattcggt

SEQ ID NO: 97085 - DNA, 25 bp, Homo sapien
accgcagcagcagcttacctaagct

SEQ ID NO: 97086 - DNA, 25 bp, Homo sapien
accgcagcagcaccttacctaagct

SEQ ID NO: 97087 - DNA, 25 bp, Homo sapien
gacctccgagtgaccgaaccagagc

SEQ ID NO: 97088 - DNA, 25 bp, Homo sapien
gacctccgagtgtccgaaccagagc

SEQ ID NO: 97089 - DNA, 25 bp, Homo sapien
gacgttcccggtttcatgtggaggt

SEQ ID NO: 97090 - DNA, 25 bp, Homo sapien
gacgttcccggtatcatgtggaggt

SEQ ID NO: 97091 - DNA, 25 bp, Homo sapien
tctcccactgtcgtctgtgaggagt

SEQ ID NO: 97092 - DNA, 25 bp, Homo sapien
tctcccactgtcctctgtgaggagt

SEQ ID NO: 97093 - DNA, 25 bp, Homo sapien
tgttctacacctctctcctgaagag

SEQ ID NO: 97094 - DNA, 25 bp, Homo sapien
tgttctacacctgtctcctgaagag

SEQ ID NO: 97095 - DNA, 25 bp, Homo sapien
taggtccctgtcgtccctcggacga

SEQ ID NO: 97096 - DNA, 25 bp, Homo sapien
taggtccctgtcctccctcggacga

SEQ ID NO: 97097 - DNA, 25 bp, Homo sapien
cgtagaaacaagtctcggttgggta

SEQ ID NO: 97098 - DNA, 25 bp, Homo sapien
cgtagaaacaagactcggttgggta

SEQ ID NO: 97099 - DNA, 25 bp, Homo sapien
tcagaaactaccaccggaacgaaag

SEQ ID NO: 97100 - DNA, 25 bp, Homo sapien
tcagaaactacctccggaacgaaag

SEQ ID NO: 97101 - DNA, 25 bp, Homo sapien
tacacaaggtactcttaggcgaaca

SEQ ID NO: 97102 - DNA, 25 bp, Homo sapien
tacacaaggtacacttaggcgaaca

SEQ ID NO: 97103 - DNA, 25 bp, Homo sapien
gttttaggacattgtagacacaaac

SEQ ID NO: 97104 - DNA, 25 bp, Homo sapien
gttttaggacatagtagacacaaac

SEQ ID NO: 97105 - DNA, 25 bp, Homo sapien
cctcttagggcacctagagacaaca

SEQ ID NO: 97106 - DNA, 25 bp, Homo sapien
cctcttagggcagctagagacaaca

SEQ ID NO: 97107 - DNA, 25 bp, Homo sapien
tcttagggacgattatacgacaaag

SEQ ID NO: 97108 - DNA, 25 bp, Homo sapien
tcttagggacgaatatacgacaaag

SEQ ID NO: 97109 - DNA, 25 bp, Homo sapien
gttaagtccgtcagacaaagatagt

SEQ ID NO: 97110 - DNA, 25 bp, Homo sapien
gttaagtccgtctgacaaagatagt

SEQ ID NO: 97111 - DNA, 25 bp, Homo sapien
acaacgggacgttgtcaaaaagaca

SEQ ID NO: 97112 - DNA, 25 bp, Homo sapien
acaacgggacgtagtcaaaaagaca

SEQ ID NO: 97113 - DNA, 25 bp, Homo sapien
acgtcgaatgacttaacgtcaatca

SEQ ID NO: 97114 - DNA, 25 bp, Homo sapien
acgtcgaatgacataacgtcaatca

SEQ ID NO: 97115 - DNA, 25 bp, Homo sapien
cgtcacggagaaaatcggttttcac

SEQ ID NO: 97116 - DNA, 25 bp, Homo sapien
cgtcacggagaatatcggttttcac

SEQ ID NO: 97117 - DNA, 25 bp, Homo sapien
tgacaaagttactttggttttactc

SEQ ID NO: 97118 - DNA, 25 bp, Homo sapien
tgacaaagttacattggttttactc

SEQ ID NO: 97119 - DNA, 25 bp, Homo sapien
tcgcaaagtttttgagtgtctggtc

SEQ ID NO: 97120 - DNA, 25 bp, Homo sapien
tcgcaaagttttagagtgtctggtc

SEQ ID NO: 97121 - DNA, 25 bp, Homo sapien
tcgaacccggttgtgtctcccggtc

SEQ ID NO: 97122 - DNA, 25 bp, Homo sapien
tcgaacccggttctgtctcccggtc

SEQ ID NO: 97123 - DNA, 25 bp, Homo sapien
agcaccgcgtccttgagcaccttgt

SEQ ID NO: 97124 - DNA, 25 bp, Homo sapien
agcaccgcgtccatgagcaccttgt

SEQ ID NO: 97125 - DNA, 25 bp, Homo sapien
gtcgacgcacacgacgtctccggta

SEQ ID NO: 97126 - DNA, 25 bp, Homo sapien
gtcgacgcacaccacgtctccggta

SEQ ID NO: 97127 - DNA, 25 bp, Homo sapien
aggagacgagacttccactcgttcg

SEQ ID NO: 97128 - DNA, 25 bp, Homo sapien
aggagacgagacatccactcgttcg

SEQ ID NO: 97129 - DNA, 25 bp, Homo sapien
ttacgagtcggagtctctatcttgt

SEQ ID NO: 97130 - DNA, 25 bp, Homo sapien
ttacgagtcggactctctatcttgt

SEQ ID NO: 97131 - DNA, 25 bp, Homo sapien
tggtactcaccgtagctcgttattg

SEQ ID NO: 97132 - DNA, 25 bp, Homo sapien
tggtactcaccgaagctcgttattg

SEQ ID NO: 97133 - DNA, 25 bp, Homo sapien
aatacaggtactaagcacgtttatc

SEQ ID NO: 97134 - DNA, 25 bp, Homo sapien
aatacaggtacttagcacgtttatc

SEQ ID NO: 97135 - DNA, 25 bp, Homo sapien
cttaaggtcgttccacctcgtctct

SEQ ID NO: 97136 - DNA, 25 bp, Homo sapien
cttaaggtcgttgcacctcgtctct

SEQ ID NO: 97137 - DNA, 25 bp, Homo sapien
gaagtacaccattgtcgaaccccct

SEQ ID NO: 97138 - DNA, 25 bp, Homo sapien
gaagtacaccatagtcgaaccccct

SEQ ID NO: 97139 - DNA, 25 bp, Homo sapien
ttgggggacccaaggacgcgtccta

SEQ ID NO: 97140 - DNA, 25 bp, Homo sapien
ttgggggacccatggacgcgtccta

SEQ ID NO: 97141 - DNA, 25 bp, Homo sapien
cccgtgataccctggtcgattctac

SEQ ID NO: 97142 - DNA, 25 bp, Homo sapien
cccgtgatacccaggtcgattctac

SEQ ID NO: 97143 - DNA, 25 bp, Homo sapien
gtcttggacgtgacgtgccgtgtca

SEQ ID NO: 97144 - DNA, 25 bp, Homo sapien
gtcttggacgtgtcgtgccgtgtca

SEQ ID NO: 97145 - DNA, 25 bp, Homo sapien
tttcgtaggtggtcttctccgagag

SEQ ID NO: 97146 - DNA, 25 bp, Homo sapien
tttcgtaggtggacttctccgagag

SEQ ID NO: 97147 - DNA, 25 bp, Homo sapien
acgttgtgagtcacgtacagggtcg

SEQ ID NO: 97148 - DNA, 25 bp, Homo sapien
acgttgtgagtctcgtacagggtcg

SEQ ID NO: 97149 - DNA, 25 bp, Homo sapien
tagtcttcggtctcggtgtcgcgtt

SEQ ID NO: 97150 - DNA, 25 bp, Homo sapien
tagtcttcggtcacggtgtcgcgtt

SEQ ID NO: 97151 - DNA, 25 bp, Homo sapien
cctagtagtgtctaaatttccgtat

SEQ ID NO: 97152 - DNA, 25 bp, Homo sapien
cctagtagtgtcaaaatttccgtat

SEQ ID NO: 97153 - DNA, 25 bp, Homo sapien
tacaatatgcgaaagatactcttga

SEQ ID NO: 97154 - DNA, 25 bp, Homo sapien
tacaatatgcgatagatactcttga

SEQ ID NO: 97155 - DNA, 25 bp, Homo sapien
gaaatagtcgatccttcgtctatcc

SEQ ID NO: 97156 - DNA, 25 bp, Homo sapien
gaaatagtcgatgcttcgtctatcc

SEQ ID NO: 97157 - DNA, 25 bp, Homo sapien
gtccagacggcagtcttatcacaca

SEQ ID NO: 97158 - DNA, 25 bp, Homo sapien
gtccagacggcactcttatcacaca

SEQ ID NO: 97159 - DNA, 25 bp, Homo sapien
gtgtcatgtgtcctccgtttcacaa

SEQ ID NO: 97160 - DNA, 25 bp, Homo sapien
gtgtcatgtgtcgtccgtttcacaa

SEQ ID NO: 97161 - DNA, 25 bp, Homo sapien
cctgtgatgtgtattccttacagaa

SEQ ID NO: 97162 - DNA, 25 bp, Homo sapien
cctgtgatgtgttttccttacagaa

SEQ ID NO: 97163 - DNA, 25 bp, Homo sapien
tagatcgtgtcctcgttgacctaac

SEQ ID NO: 97164 - DNA, 25 bp, Homo sapien
tagatcgtgtccacgttgacctaac

SEQ ID NO: 97165 - DNA, 25 bp, Homo sapien
ctgactctcctgactctgtgtcttc

SEQ ID NO: 97166 - DNA, 25 bp, Homo sapien
ctgactctcctgtctctgtgtcttc

SEQ ID NO: 97167 - DNA, 25 bp, Homo sapien
gtatcggtccttcttctggtgctcc

SEQ ID NO: 97168 - DNA, 25 bp, Homo sapien
gtatcggtccttgttctggtgctcc

SEQ ID NO: 97169 - DNA, 25 bp, Homo sapien
cttcctcttttggtgtaccgggtgg

SEQ ID NO: 97170 - DNA, 25 bp, Homo sapien
cttcctcttttgctgtaccgggtgg

SEQ ID NO: 97171 - DNA, 25 bp, Homo sapien
ctctaggtgaggtatcaggaattcg

SEQ ID NO: 97172 - DNA, 25 bp, Homo sapien
ctctaggtgaggaatcaggaattcg

SEQ ID NO: 97173 - DNA, 25 bp, Homo sapien
tccgaggagtaaggtcaagaatctc

SEQ ID NO: 97174 - DNA, 25 bp, Homo sapien
tccgaggagtaacgtcaagaatctc

SEQ ID NO: 97175 - DNA, 25 bp, Homo sapien
gtttcggaaacttctgtaacaattt

SEQ ID NO: 97176 - DNA, 25 bp, Homo sapien
gtttcggaaactactgtaacaattt

SEQ ID NO: 97177 - DNA, 25 bp, Homo sapien
tgcacagtgaaagtttcaggacata

SEQ ID NO: 97178 - DNA, 25 bp, Homo sapien
tgcacagtgaaactttcaggacata

SEQ ID NO: 97179 - DNA, 25 bp, Homo sapien
gtagacctaacttctcgaaattagt

SEQ ID NO: 97180 - DNA, 25 bp, Homo sapien
gtagacctaactactcgaaattagt

SEQ ID NO: 97181 - DNA, 25 bp, Homo sapien
actccgagacctttttcagcacgga

SEQ ID NO: 97182 - DNA, 25 bp, Homo sapien
actccgagacctatttcagcacgga

SEQ ID NO: 97183 - DNA, 25 bp, Homo sapien
acttgacctttcttatctggggtac

SEQ ID NO: 97184 - DNA, 25 bp, Homo sapien
acttgacctttcatatctggggtac

SEQ ID NO: 97185 - DNA, 25 bp, Homo sapien
aattagtcttatttatctcagggtc

SEQ ID NO: 97186 - DNA, 25 bp, Homo sapien
aattagtcttatatatctcagggtc

SEQ ID NO: 97187 - DNA, 25 bp, Homo sapien
aaaagtttatgtaacccagagtatc

SEQ ID NO: 97188 - DNA, 25 bp, Homo sapien
aaaagtttatgttacccagagtatc

SEQ ID NO: 97189 - DNA, 25 bp, Homo sapien
tcctgttcgacacgaatccgaatct

SEQ ID NO: 97190 - DNA, 25 bp, Homo sapien
tcctgttcgacaggaatccgaatct

SEQ ID NO: 97191 - DNA, 25 bp, Homo sapien
ttttcgtcaatagaaccgtacacgt

SEQ ID NO: 97192 - DNA, 25 bp, Homo sapien
ttttcgtcaatacaaccgtacacgt

SEQ ID NO: 97193 - DNA, 25 bp, Homo sapien
cgatgataccctaaagcaaaagacg

SEQ ID NO: 97194 - DNA, 25 bp, Homo sapien
cgatgatacccttaagcaaaagacg

SEQ ID NO: 97195 - DNA, 25 bp, Homo sapien
gtctggtatccttcaaataacacag

SEQ ID NO: 97196 - DNA, 25 bp, Homo sapien
gtctggtatcctacaaataacacag

SEQ ID NO: 97197 - DNA, 25 bp, Homo sapien
gtaaggtatccgaggagagaccgaa

SEQ ID NO: 97198 - DNA, 25 bp, Homo sapien
gtaaggtatccgtggagagaccgaa

SEQ ID NO: 97199 - DNA, 25 bp, Homo sapien
agtacgaaattagaaacgaccatca

SEQ ID NO: 97200 - DNA, 25 bp, Homo sapien
agtacgaaattacaaacgaccatca

SEQ ID NO: 97201 - DNA, 25 bp, Homo sapien
aagaaatcctcgacgacagctataa

SEQ ID NO: 97202 - DNA, 25 bp, Homo sapien
aagaaatcctcgtcgacagctataa

SEQ ID NO: 97203 - DNA, 25 bp, Homo sapien
aaacggagggcagctcgggtctccc

SEQ ID NO: 97204 - DNA, 25 bp, Homo sapien
aaacggagggcacctcgggtctccc

SEQ ID NO: 97205 - DNA, 25 bp, Homo sapien
cgtcgacgggcctgcgggtcttctc

SEQ ID NO: 97206 - DNA, 25 bp, Homo sapien
cgtcgacgggccagcgggtcttctc

SEQ ID NO: 97207 - DNA, 25 bp, Homo sapien
aactgagggacctgtggtatcttga

SEQ ID NO: 97208 - DNA, 25 bp, Homo sapien
aactgagggaccagtggtatcttga

SEQ ID NO: 97209 - DNA, 25 bp, Homo sapien
atgtaattgtcagtgcactacttga

SEQ ID NO: 97210 - DNA, 25 bp, Homo sapien
atgtaattgtcactgcactacttga

SEQ ID NO: 97211 - DNA, 25 bp, Homo sapien
atgtcctatgaccttccgtccttga

SEQ ID NO: 97212 - DNA, 25 bp, Homo sapien
atgtcctatgacgttccgtccttga

SEQ ID NO: 97213 - DNA, 25 bp, Homo sapien
gtccctttcgttgactcagtatgtg

SEQ ID NO: 97214 - DNA, 25 bp, Homo sapien
gtccctttcgttcactcagtatgtg

SEQ ID NO: 97215 - DNA, 25 bp, Homo sapien
ccactccacttgtaggtcctgtgtg

SEQ ID NO: 97216 - DNA, 25 bp, Homo sapien
ccactccacttgaaggtcctgtgtg

SEQ ID NO: 97217 - DNA, 25 bp, Homo sapien
aagtgacagggaagagtcaccgatg

SEQ ID NO: 97218 - DNA, 25 bp, Homo sapien
aagtgacagggatgagtcaccgatg

SEQ ID NO: 97219 - DNA, 25 bp, Homo sapien
agacgtcgatggaatcttcatcata

SEQ ID NO: 97220 - DNA, 25 bp, Homo sapien
agacgtcgatggtatcttcatcata

SEQ ID NO: 97221 - DNA, 25 bp, Homo sapien
ctctactgtcttaatcctaaagtgt

SEQ ID NO: 97222 - DNA, 25 bp, Homo sapien
ctctactgtctttatcctaaagtgt

SEQ ID NO: 97223 - DNA, 25 bp, Homo sapien
tagttagactcaccttatcatgacg

SEQ ID NO: 97224 - DNA, 25 bp, Homo sapien
tagttagactcagcttatcatgacg

SEQ ID NO: 97225 - DNA, 25 bp, Homo sapien
cctaagagctaaagaccaaaattcg

SEQ ID NO: 97226 - DNA, 25 bp, Homo sapien
cctaagagctaatgaccaaaattcg

SEQ ID NO: 97227 - DNA, 25 bp, Homo sapien
tacggaagtagtcgaccataaaacg

SEQ ID NO: 97228 - DNA, 25 bp, Homo sapien
tacggaagtagtggaccataaaacg

SEQ ID NO: 97229 - DNA, 25 bp, Homo sapien
ggaacagaagatgagccaagtccgc

SEQ ID NO: 97230 - DNA, 25 bp, Homo sapien
ggaacagaagatcagccaagtccgc

SEQ ID NO: 97231 - DNA, 25 bp, Homo sapien
ggggtaacataaaatcaacccctct

SEQ ID NO: 97232 - DNA, 25 bp, Homo sapien
ggggtaacataatatcaacccctct

SEQ ID NO: 97233 - DNA, 25 bp, Homo sapien
ttcgtataaagaatcctcgagcctt

SEQ ID NO: 97234 - DNA, 25 bp, Homo sapien
ttcgtataaagattcctcgagcctt

SEQ ID NO: 97235 - DNA, 25 bp, Homo sapien
tccgtcaggacaatcgagaccggca

SEQ ID NO: 97236 - DNA, 25 bp, Homo sapien
tccgtcaggacattcgagaccggca

SEQ ID NO: 97237 - DNA, 25 bp, Homo sapien
ctaccccaggaactccaggagtggt

SEQ ID NO: 97238 - DNA, 25 bp, Homo sapien
ctaccccaggaagtccaggagtggt

SEQ ID NO: 97239 - DNA, 25 bp, Homo sapien
acttctaaggaaaccatctgaaccg

SEQ ID NO: 97240 - DNA, 25 bp, Homo sapien
acttctaaggaatccatctgaaccg

SEQ ID NO: 97241 - DNA, 25 bp, Homo sapien
gagacaggacgcagacccaggaccc

SEQ ID NO: 97242 - DNA, 25 bp, Homo sapien
gagacaggacgctgacccaggaccc

SEQ ID NO: 97243 - DNA, 25 bp, Homo sapien
aggagattgaatgaaccagaacctc

SEQ ID NO: 97244 - DNA, 25 bp, Homo sapien
aggagattgaatcaaccagaacctc

SEQ ID NO: 97245 - DNA, 25 bp, Homo sapien
ggttgaactacgaaccacctacggc

SEQ ID NO: 97246 - DNA, 25 bp, Homo sapien
ggttgaactacgtaccacctacggc

SEQ ID NO: 97247 - DNA, 25 bp, Homo sapien
gttgaggatcaatcggacgaacgga

SEQ ID NO: 97248 - DNA, 25 bp, Homo sapien
gttgaggatcaaacggacgaacgga

SEQ ID NO: 97249 - DNA, 25 bp, Homo sapien
catgcgcatcagctcttgaaactac

SEQ ID NO: 97250 - DNA, 25 bp, Homo sapien
catgcgcatcaggtcttgaaactac

SEQ ID NO: 97251 - DNA, 25 bp, Homo sapien
agaggaggtccgtcgtgtgctaaca

SEQ ID NO: 97252 - DNA, 25 bp, Homo sapien
agaggaggtccgacgtgtgctaaca

SEQ ID NO: 97253 - DNA, 25 bp, Homo sapien
ctagaatgaggcttagacaaaaccc

SEQ ID NO: 97254 - DNA, 25 bp, Homo sapien
ctagaatgaggcatagacaaaaccc

SEQ ID NO: 97255 - DNA, 25 bp, Homo sapien
gatatagaataaagaccgaaacttc

SEQ ID NO: 97256 - DNA, 25 bp, Homo sapien
gatatagaataatgaccgaaacttc

SEQ ID NO: 97257 - DNA, 25 bp, Homo sapien
atctactaccgtaaaagacccgccg

SEQ ID NO: 97258 - DNA, 25 bp, Homo sapien
atctactaccgttaaagacccgccg

SEQ ID NO: 97259 - DNA, 25 bp, Homo sapien
catcctgtggtactcaccgtagctc

SEQ ID NO: 97260 - DNA, 25 bp, Homo sapien
catcctgtggtagtcaccgtagctc

SEQ ID NO: 97261 - DNA, 25 bp, Homo sapien
gaacatgtgttacttagtgagactc

SEQ ID NO: 97262 - DNA, 25 bp, Homo sapien
gaacatgtgttagttagtgagactc

SEQ ID NO: 97263 - DNA, 25 bp, Homo sapien
acagaggatttatccttgtaagacc

SEQ ID NO: 97264 - DNA, 25 bp, Homo sapien
acagaggatttaaccttgtaagacc

SEQ ID NO: 97265 - DNA, 25 bp, Homo sapien
gacacagaaatggttccctaaaagg

SEQ ID NO: 97266 - DNA, 25 bp, Homo sapien
gacacagaaatgcttccctaaaagg

SEQ ID NO: 97267 - DNA, 25 bp, Homo sapien
cgacgtcacaggtcccgggaaggac

SEQ ID NO: 97268 - DNA, 25 bp, Homo sapien
cgacgtcacaggacccgggaaggac

SEQ ID NO: 97269 - DNA, 25 bp, Homo sapien
tagacacaaaccaccgggatactaa

SEQ ID NO: 97270 - DNA, 25 bp, Homo sapien
tagacacaaacctccgggatactaa

SEQ ID NO: 97271 - DNA, 25 bp, Homo sapien
acatgtttccattggacgatcatat

SEQ ID NO: 97272 - DNA, 25 bp, Homo sapien
acatgtttccataggacgatcatat

SEQ ID NO: 97273 - DNA, 25 bp, Homo sapien
tgaccacgagtagagagttctaact

SEQ ID NO: 97274 - DNA, 25 bp, Homo sapien
tgaccacgagtacagagttctaact

SEQ ID NO: 97275 - DNA, 25 bp, Homo sapien
aaacgtcagactcttaagttctatg

SEQ ID NO: 97276 - DNA, 25 bp, Homo sapien
aaacgtcagactgttaagttctatg

SEQ ID NO: 97277 - DNA, 25 bp, Homo sapien
cgctaacatagtagtgagtccgtgt

SEQ ID NO: 97278 - DNA, 25 bp, Homo sapien
cgctaacatagttgtgagtccgtgt

SEQ ID NO: 97279 - DNA, 25 bp, Homo sapien
tggtcacacgtcgtttggtcctact

SEQ ID NO: 97280 - DNA, 25 bp, Homo sapien
tggtcacacgtcctttggtcctact

SEQ ID NO: 97281 - DNA, 25 bp, Homo sapien
gtgtaataccataattacattgtcg

SEQ ID NO: 97282 - DNA, 25 bp, Homo sapien
gtgtaataccattattacattgtcg

SEQ ID NO: 97283 - DNA, 25 bp, Homo sapien
tggtacaacactctttacgaggtta

SEQ ID NO: 97284 - DNA, 25 bp, Homo sapien
tggtacaacactgtttacgaggtta

SEQ ID NO: 97285 - DNA, 25 bp, Homo sapien
tgactgacacggtgtctattgtacc

SEQ ID NO: 97286 - DNA, 25 bp, Homo sapien
tgactgacacggagtctattgtacc

SEQ ID NO: 97287 - DNA, 25 bp, Homo sapien
atcgtggtcgtgtgtattttcgtcg

SEQ ID NO: 97288 - DNA, 25 bp, Homo sapien
atcgtggtcgtgagtattttcgtcg

SEQ ID NO: 97289 - DNA, 25 bp, Homo sapien
ccgtctcggcggagtgtctacccta

SEQ ID NO: 97290 - DNA, 25 bp, Homo sapien
ccgtctcggcggtgtgtctacccta

SEQ ID NO: 97291 - DNA, 25 bp, Homo sapien
atccgtccaggagcaggtccagcgg

SEQ ID NO: 97292 - DNA, 25 bp, Homo sapien
atccgtccaggaccaggtccagcgg

SEQ ID NO: 97293 - DNA, 25 bp, Homo sapien
tctccgacgaggtcgcccctagagg

SEQ ID NO: 97294 - DNA, 25 bp, Homo sapien
tctccgacgaggacgcccctagagg

SEQ ID NO: 97295 - DNA, 25 bp, Homo sapien
tgcacacaggggtacgtccccacaa

SEQ ID NO: 97296 - DNA, 25 bp, Homo sapien
tgcacacaggggaacgtccccacaa

SEQ ID NO: 97297 - DNA, 25 bp, Homo sapien
ggagccggagggtttcacgacccta

SEQ ID NO: 97298 - DNA, 25 bp, Homo sapien
ggagccggagggattcacgacccta

SEQ ID NO: 97299 - DNA, 25 bp, Homo sapien
caccctcgaggaggagaagtgccct

SEQ ID NO: 97300 - DNA, 25 bp, Homo sapien
caccctcgaggacgagaagtgccct

SEQ ID NO: 97301 - DNA, 25 bp, Homo sapien
gaccaccgtaggttgcctatcccta

SEQ ID NO: 97302 - DNA, 25 bp, Homo sapien
gaccaccgtaggatgcctatcccta

SEQ ID NO: 97303 - DNA, 25 bp, Homo sapien
gcgaccggccggagcatcatctcgg

SEQ ID NO: 97304 - DNA, 25 bp, Homo sapien
gcgaccggccggtgcatcatctcgg

SEQ ID NO: 97305 - DNA, 25 bp, Homo sapien
ggaccccctggagacccatagaggt

SEQ ID NO: 97306 - DNA, 25 bp, Homo sapien
ggaccccctggacacccatagaggt

SEQ ID NO: 97307 - DNA, 25 bp, Homo sapien
accttcagcattgaacctgtcaccg

SEQ ID NO: 97308 - DNA, 25 bp, Homo sapien
accttcagcattcaacctgtcaccg

SEQ ID NO: 97309 - DNA, 25 bp, Homo sapien
taggacaatgttcaggtcaaacgtt

SEQ ID NO: 97310 - DNA, 25 bp, Homo sapien
taggacaatgttgaggtcaaacgtt

SEQ ID NO: 97311 - DNA, 25 bp, Homo sapien
tcggtacaccggactttcatctcgg

SEQ ID NO: 97312 - DNA, 25 bp, Homo sapien
tcggtacaccggtctttcatctcgg

SEQ ID NO: 97313 - DNA, 25 bp, Homo sapien
ctcggctctcttttgtcaggtccgg

SEQ ID NO: 97314 - DNA, 25 bp, Homo sapien
ctcggctctcttatgtcaggtccgg

SEQ ID NO: 97315 - DNA, 25 bp, Homo sapien
cgtggcctagttctattaccccgtc

SEQ ID NO: 97316 - DNA, 25 bp, Homo sapien
cgtggcctagttgtattaccccgtc

SEQ ID NO: 97317 - DNA, 25 bp, Homo sapien
gggtctcgacctacttccgagccgt

SEQ ID NO: 97318 - DNA, 25 bp, Homo sapien
gggtctcgaccttcttccgagccgt

SEQ ID NO: 97319 - DNA, 25 bp, Homo sapien
agtgtgtcccctttctgatgacgct

SEQ ID NO: 97320 - DNA, 25 bp, Homo sapien
agtgtgtcccctatctgatgacgct

SEQ ID NO: 97321 - DNA, 25 bp, Homo sapien
cctacgaccgggaaggtcaggacct

SEQ ID NO: 97322 - DNA, 25 bp, Homo sapien
cctacgaccgggtaggtcaggacct

SEQ ID NO: 97323 - DNA, 25 bp, Homo sapien
tcccgtacggcgtggtagagacgct

SEQ ID NO: 97324 - DNA, 25 bp, Homo sapien
tcccgtacggcgaggtagagacgct

SEQ ID NO: 97325 - DNA, 25 bp, Homo sapien
tagttcgatctgtgcgggagcgacc

SEQ ID NO: 97326 - DNA, 25 bp, Homo sapien
tagttcgatctgagcgggagcgacc

SEQ ID NO: 97327 - DNA, 25 bp, Homo sapien
tcccgagaactcacgacggggcctt

SEQ ID NO: 97328 - DNA, 25 bp, Homo sapien
tcccgagaactctcgacggggcctt

SEQ ID NO: 97329 - DNA, 25 bp, Homo sapien
tcgtggttaacctccgtggactccc

SEQ ID NO: 97330 - DNA, 25 bp, Homo sapien
tcgtggttaaccaccgtggactccc

SEQ ID NO: 97331 - DNA, 25 bp, Homo sapien
gtcgtcctcccgtcgggttcgagac

SEQ ID NO: 97332 - DNA, 25 bp, Homo sapien
gtcgtcctcccgacgggttcgagac

SEQ ID NO: 97333 - DNA, 25 bp, Homo sapien
aggtcccgagaccaatggactagtc

SEQ ID NO: 97334 - DNA, 25 bp, Homo sapien
aggtcccgagacgaatggactagtc

SEQ ID NO: 97335 - DNA, 25 bp, Homo sapien
agtatgatgttaagacatcccgttc

SEQ ID NO: 97336 - DNA, 25 bp, Homo sapien
agtatgatgttatgacatcccgttc

SEQ ID NO: 97337 - DNA, 25 bp, Homo sapien
tctagtgtctgatgcccgacttatc

SEQ ID NO: 97338 - DNA, 25 bp, Homo sapien
tctagtgtctgaagcccgacttatc

SEQ ID NO: 97339 - DNA, 25 bp, Homo sapien
tcgaagagatacctcgaccatcttg

SEQ ID NO: 97340 - DNA, 25 bp, Homo sapien
tcgaagagatacgtcgaccatcttg

SEQ ID NO: 97341 - DNA, 25 bp, Homo sapien
agaagagaccgtagtaatcaatacg

SEQ ID NO: 97342 - DNA, 25 bp, Homo sapien
agaagagaccgttgtaatcaatacg

SEQ ID NO: 97343 - DNA, 25 bp, Homo sapien
ctagaaaggatcaagttactcaaac

SEQ ID NO: 97344 - DNA, 25 bp, Homo sapien
ctagaaaggatctagttactcaaac

SEQ ID NO: 97345 - DNA, 25 bp, Homo sapien
ctcgggaagatcctcggttacctcc

SEQ ID NO: 97346 - DNA, 25 bp, Homo sapien
ctcgggaagatcgtcggttacctcc

SEQ ID NO: 97347 - DNA, 25 bp, Homo sapien
ctgtgacgggtcttaggtaagaccc

SEQ ID NO: 97348 - DNA, 25 bp, Homo sapien
ctgtgacgggtcataggtaagaccc

SEQ ID NO: 97349 - DNA, 25 bp, Homo sapien
tagaagttcgaacaagaataaccta

SEQ ID NO: 97350 - DNA, 25 bp, Homo sapien
tagaagttcgaagaagaataaccta

SEQ ID NO: 97351 - DNA, 25 bp, Homo sapien
caaaaattatgtgtgatttcacagt

SEQ ID NO: 97352 - DNA, 25 bp, Homo sapien
caaaaattatgtctgatttcacagt

SEQ ID NO: 97353 - DNA, 25 bp, Homo sapien
gatgtaccacgtagaaaccgcgaag

SEQ ID NO: 97354 - DNA, 25 bp, Homo sapien
gatgtaccacgttgaaaccgcgaag

SEQ ID NO: 97355 - DNA, 25 bp, Homo sapien
gtgttattctgtacccattgttcat

SEQ ID NO: 97356 - DNA, 25 bp, Homo sapien
gtgttattctgttcccattgttcat

SEQ ID NO: 97357 - DNA, 25 bp, Homo sapien
cgttttctgcttcgtccttcttgac

SEQ ID NO: 97358 - DNA, 25 bp, Homo sapien
cgttttctgcttggtccttcttgac

SEQ ID NO: 97359 - DNA, 25 bp, Homo sapien
ttcgttctccttctcgttctgctga

SEQ ID NO: 97360 - DNA, 25 bp, Homo sapien
ttcgttctccttgtcgttctgctga

SEQ ID NO: 97361 - DNA, 25 bp, Homo sapien
gttttgtgtccatggattcccgaag

SEQ ID NO: 97362 - DNA, 25 bp, Homo sapien
gttttgtgtccaaggattcccgaag

SEQ ID NO: 97363 - DNA, 25 bp, Homo sapien
gagggacacgagattccgacgacga

SEQ ID NO: 97364 - DNA, 25 bp, Homo sapien
gagggacacgagtttccgacgacga

SEQ ID NO: 97365 - DNA, 25 bp, Homo sapien
ccactaccgcaaccatttccgaagg

SEQ ID NO: 97366 - DNA, 25 bp, Homo sapien
ccactaccgcaagcatttccgaagg

SEQ ID NO: 97367 - DNA, 25 bp, Homo sapien
ttcataaactatggttcatcaggaa

SEQ ID NO: 97368 - DNA, 25 bp, Homo sapien
ttcataaactatcgttcatcaggaa

SEQ ID NO: 97369 - DNA, 25 bp, Homo sapien
atcatgcggggtacaccagagaagt

SEQ ID NO: 97370 - DNA, 25 bp, Homo sapien
atcatgcggggttcaccagagaagt

SEQ ID NO: 97371 - DNA, 25 bp, Homo sapien
tccgtggtggagttagacccggaca

SEQ ID NO: 97372 - DNA, 25 bp, Homo sapien
tccgtggtggagatagacccggaca

SEQ ID NO: 97373 - DNA, 25 bp, Homo sapien
cggaccgaagaaagtctctgtacaa

SEQ ID NO: 97374 - DNA, 25 bp, Homo sapien
cggaccgaagaatgtctctgtacaa

SEQ ID NO: 97375 - DNA, 25 bp, Homo sapien
ccgacaaatctttcaacgtaagacg

SEQ ID NO: 97376 - DNA, 25 bp, Homo sapien
ccgacaaatcttacaacgtaagacg

SEQ ID NO: 97377 - DNA, 25 bp, Homo sapien
cataacggaaatagtgtccaaacga

SEQ ID NO: 97378 - DNA, 25 bp, Homo sapien
cataacggaaattgtgtccaaacga

SEQ ID NO: 97379 - DNA, 25 bp, Homo sapien
ccaagaagattcttgaccgagaatt

SEQ ID NO: 97380 - DNA, 25 bp, Homo sapien
ccaagaagattcatgaccgagaatt

SEQ ID NO: 97381 - DNA, 25 bp, Homo sapien
actaggacattctgtcgggattatt

SEQ ID NO: 97382 - DNA, 25 bp, Homo sapien
actaggacattcagtcgggattatt

SEQ ID NO: 97383 - DNA, 25 bp, Homo sapien
tatatgtagagatctgaagggtttt

SEQ ID NO: 97384 - DNA, 25 bp, Homo sapien
tatatgtagagaactgaagggtttt

SEQ ID NO: 97385 - DNA, 25 bp, Homo sapien
tcaccgctctctcgtgaaggtctac

SEQ ID NO: 97386 - DNA, 25 bp, Homo sapien
tcaccgctctctggtgaaggtctac

SEQ ID NO: 97387 - DNA, 25 bp, Homo sapien
cgtgtcccacttgagacgtgggctc

SEQ ID NO: 97388 - DNA, 25 bp, Homo sapien
cgtgtcccacttcagacgtgggctc

SEQ ID NO: 97389 - DNA, 25 bp, Homo sapien
cgtctaccttcctcgtcatttggga

SEQ ID NO: 97390 - DNA, 25 bp, Homo sapien
cgtctaccttccacgtcatttggga

SEQ ID NO: 97391 - DNA, 25 bp, Homo sapien
ttatcttccactcacggtccgggga

SEQ ID NO: 97392 - DNA, 25 bp, Homo sapien
ttatcttccactgacggtccgggga

SEQ ID NO: 97393 - DNA, 25 bp, Homo sapien
ctcgtcctcctggacgaccttgggg

SEQ ID NO: 97394 - DNA, 25 bp, Homo sapien
ctcgtcctcctgcacgaccttgggg

SEQ ID NO: 97395 - DNA, 25 bp, Homo sapien
tcgtgtttcgtcgagtcaattggat

SEQ ID NO: 97396 - DNA, 25 bp, Homo sapien
tcgtgtttcgtccagtcaattggat

SEQ ID NO: 97397 - DNA, 25 bp, Homo sapien
gtcgtgtccttttatagatttacac

SEQ ID NO: 97398 - DNA, 25 bp, Homo sapien
gtcgtgtcctttaatagatttacac

SEQ ID NO: 97399 - DNA, 25 bp, Homo sapien
tagaacaaaggtacgactcatcact

SEQ ID NO: 97400 - DNA, 25 bp, Homo sapien
tagaacaaaggttcgactcatcact

SEQ ID NO: 97401 - DNA, 25 bp, Homo sapien
gataaagacattgagagacgttctc

SEQ ID NO: 97402 - DNA, 25 bp, Homo sapien
gataaagacattcagagacgttctc

SEQ ID NO: 97403 - DNA, 25 bp, Homo sapien
cgttagaaccacttcatgagtatcc

SEQ ID NO: 97404 - DNA, 25 bp, Homo sapien
cgttagaaccacatcatgagtatcc

SEQ ID NO: 97405 - DNA, 25 bp, Homo sapien
agacgggcagtgaccacggtgaccc

SEQ ID NO: 97406 - DNA, 25 bp, Homo sapien
agacgggcagtgtccacggtgaccc

SEQ ID NO: 97407 - DNA, 25 bp, Homo sapien
taacgccggggtacctagggaatcg

SEQ ID NO: 97408 - DNA, 25 bp, Homo sapien
taacgccggggttcctagggaatcg

SEQ ID NO: 97409 - DNA, 25 bp, Homo sapien
aaactggtggttgtaacgacattac

SEQ ID NO: 97410 - DNA, 25 bp, Homo sapien
aaactggtggttctaacgacattac

SEQ ID NO: 97411 - DNA, 25 bp, Homo sapien
ccttcgtggttgacgtcgtacatca

SEQ ID NO: 97412 - DNA, 25 bp, Homo sapien
ccttcgtggttgtcgtcgtacatca

SEQ ID NO: 97413 - DNA, 25 bp, Homo sapien
ttcgtgaggaatggtatcatactac

SEQ ID NO: 97414 - DNA, 25 bp, Homo sapien
ttcgtgaggaatcgtatcatactac

SEQ ID NO: 97415 - DNA, 25 bp, Homo sapien
tatgcatagggtttgacacacaatg

SEQ ID NO: 97416 - DNA, 25 bp, Homo sapien
tatgcatagggtatgacacacaatg

SEQ ID NO: 97417 - DNA, 25 bp, Homo sapien
ctactcctccggtggcacggtgaga

SEQ ID NO: 97418 - DNA, 25 bp, Homo sapien
ctactcctccggaggcacggtgaga

SEQ ID NO: 97419 - DNA, 25 bp, Homo sapien
cgacttatgtcgtgggccatcggag

SEQ ID NO: 97420 - DNA, 25 bp, Homo sapien
cgacttatgtcgagggccatcggag

SEQ ID NO: 97421 - DNA, 25 bp, Homo sapien
agtggtataggtacactaacgagac

SEQ ID NO: 97422 - DNA, 25 bp, Homo sapien
agtggtataggttcactaacgagac

SEQ ID NO: 97423 - DNA, 25 bp, Homo sapien
ctactcagtactgttcgactgaaac

SEQ ID NO: 97424 - DNA, 25 bp, Homo sapien
ctactcagtactcttcgactgaaac

SEQ ID NO: 97425 - DNA, 25 bp, Homo sapien
ggagtgtccgttactgtcagaaccg

SEQ ID NO: 97426 - DNA, 25 bp, Homo sapien
ggagtgtccgtttctgtcagaaccg

SEQ ID NO: 97427 - DNA, 25 bp, Homo sapien
tacaggaggtccccgacggggaacc

SEQ ID NO: 97428 - DNA, 25 bp, Homo sapien
tacaggaggtccgcgacggggaacc

SEQ ID NO: 97429 - DNA, 25 bp, Homo sapien
gatcaaggacccaggaatgcaagag

SEQ ID NO: 97430 - DNA, 25 bp, Homo sapien
gatcaaggaccctggaatgcaagag

SEQ ID NO: 97431 - DNA, 25 bp, Homo sapien
gacagtgtctcaggatattcgaaac

SEQ ID NO: 97432 - DNA, 25 bp, Homo sapien
gacagtgtctcacgatattcgaaac

SEQ ID NO: 97433 - DNA, 25 bp, Homo sapien
tgaatatgtcgttcatttctgtaca

SEQ ID NO: 97434 - DNA, 25 bp, Homo sapien
tgaatatgtcgtacatttctgtaca

SEQ ID NO: 97435 - DNA, 25 bp, Homo sapien
catgtctgcacgtcgtacagacggt

SEQ ID NO: 97436 - DNA, 25 bp, Homo sapien
catgtctgcacgacgtacagacggt

SEQ ID NO: 97437 - DNA, 25 bp, Homo sapien
gcttataaacactttgcaccagtgg

SEQ ID NO: 97438 - DNA, 25 bp, Homo sapien
gcttataaacacattgcaccagtgg

SEQ ID NO: 97439 - DNA, 25 bp, Homo sapien
acctaaaggtaggattccctattct

SEQ ID NO: 97440 - DNA, 25 bp, Homo sapien
acctaaaggtagcattccctattct

SEQ ID NO: 97441 - DNA, 25 bp, Homo sapien
gatacgaacgatgacattcccattt

SEQ ID NO: 97442 - DNA, 25 bp, Homo sapien
gatacgaacgatcacattcccattt

SEQ ID NO: 97443 - DNA, 25 bp, Homo sapien
ctcaatccgaagtatctccttaagg

SEQ ID NO: 97444 - DNA, 25 bp, Homo sapien
ctcaatccgaagaatctccttaagg

SEQ ID NO: 97445 - DNA, 25 bp, Homo sapien
ctctcttcgcggatcaattttgtgg

SEQ ID NO: 97446 - DNA, 25 bp, Homo sapien
ctctcttcgcggttcaattttgtgg

SEQ ID NO: 97447 - DNA, 25 bp, Homo sapien
agtctcgttatcgtcctacctgtgg

SEQ ID NO: 97448 - DNA, 25 bp, Homo sapien
agtctcgttatcctcctacctgtgg

SEQ ID NO: 97449 - DNA, 25 bp, Homo sapien
atttgatatcaccgtaacagggagt

SEQ ID NO: 97450 - DNA, 25 bp, Homo sapien
atttgatatcacggtaacagggagt

SEQ ID NO: 97451 - DNA, 25 bp, Homo sapien
ttcggtttaccgacgtgaccggcta

SEQ ID NO: 97452 - DNA, 25 bp, Homo sapien
ttcggtttaccgtcgtgaccggcta

SEQ ID NO: 97453 - DNA, 25 bp, Homo sapien
gtgggtcttccacctcgaaggcacg

SEQ ID NO: 97454 - DNA, 25 bp, Homo sapien
gtgggtcttccagctcgaaggcacg

SEQ ID NO: 97455 - DNA, 25 bp, Homo sapien
tagcctccgtcgtctgagagacccg

SEQ ID NO: 97456 - DNA, 25 bp, Homo sapien
tagcctccgtcgactgagagacccg

SEQ ID NO: 97457 - DNA, 25 bp, Homo sapien
tcccacggtggacccgtggaccccg

SEQ ID NO: 97458 - DNA, 25 bp, Homo sapien
tcccacggtggagccgtggaccccg

SEQ ID NO: 97459 - DNA, 25 bp, Homo sapien
gacccagtgtgtctcgaacccggac

SEQ ID NO: 97460 - DNA, 25 bp, Homo sapien
gacccagtgtgtgtcgaacccggac

SEQ ID NO: 97461 - DNA, 25 bp, Homo sapien
acgaagtaatggatattttccagac

SEQ ID NO: 97462 - DNA, 25 bp, Homo sapien
acgaagtaatggttattttccagac

SEQ ID NO: 97463 - DNA, 25 bp, Homo sapien
ctagaacgattgaccctttatgaca

SEQ ID NO: 97464 - DNA, 25 bp, Homo sapien
ctagaacgattgtccctttatgaca

SEQ ID NO: 97465 - DNA, 25 bp, Homo sapien
acagatgactttaccggattggata

SEQ ID NO: 97466 - DNA, 25 bp, Homo sapien
acagatgacttttccggattggata

SEQ ID NO: 97467 - DNA, 25 bp, Homo sapien
ctctaggtctatgtttacttgtaaa

SEQ ID NO: 97468 - DNA, 25 bp, Homo sapien
ctctaggtctatctttacttgtaaa

SEQ ID NO: 97469 - DNA, 25 bp, Homo sapien
cgtgagacccagagcgtccgggctc

SEQ ID NO: 97470 - DNA, 25 bp, Homo sapien
cgtgagacccagtgcgtccgggctc

SEQ ID NO: 97471 - DNA, 25 bp, Homo sapien
actcaatctcctcgtccggggatct

SEQ ID NO: 97472 - DNA, 25 bp, Homo sapien
actcaatctcctggtccggggatct

SEQ ID NO: 97473 - DNA, 25 bp, Homo sapien
aggaattcgcgatccaagagggcgt

SEQ ID NO: 97474 - DNA, 25 bp, Homo sapien
aggaattcgcgaaccaagagggcgt

SEQ ID NO: 97475 - DNA, 25 bp, Homo sapien
ctcttttatcacgaacagaggtctt

SEQ ID NO: 97476 - DNA, 25 bp, Homo sapien
ctcttttatcaccaacagaggtctt

SEQ ID NO: 97477 - DNA, 25 bp, Homo sapien
cgtttacaagagtcactaaagtctc

SEQ ID NO: 97478 - DNA, 25 bp, Homo sapien
cgtttacaagagacactaaagtctc

SEQ ID NO: 97479 - DNA, 25 bp, Homo sapien
ttattccttacgacctagaggtctc

SEQ ID NO: 97480 - DNA, 25 bp, Homo sapien
ttattccttacgtcctagaggtctc

SEQ ID NO: 97481 - DNA, 25 bp, Homo sapien
cgactagttccagacttagaggacc

SEQ ID NO: 97482 - DNA, 25 bp, Homo sapien
cgactagttccacacttagaggacc

SEQ ID NO: 97483 - DNA, 25 bp, Homo sapien
tgtcagtccccgtcgtagtcgtctt

SEQ ID NO: 97484 - DNA, 25 bp, Homo sapien
tgtcagtccccgacgtagtcgtctt

SEQ ID NO: 97485 - DNA, 25 bp, Homo sapien
caaacactccgatatcacacgtggt

SEQ ID NO: 97486 - DNA, 25 bp, Homo sapien
caaacactccgaaatcacacgtggt

SEQ ID NO: 97487 - DNA, 25 bp, Homo sapien
acaaaatgcgtaaaacacgcagact

SEQ ID NO: 97488 - DNA, 25 bp, Homo sapien
acaaaatgcgtataacacgcagact

SEQ ID NO: 97489 - DNA, 25 bp, Homo sapien
attgactagatctgagaacactgtc

SEQ ID NO: 97490 - DNA, 25 bp, Homo sapien
attgactagatcagagaacactgtc

SEQ ID NO: 97491 - DNA, 25 bp, Homo sapien
gtctagtttaagtcgggcttctgtg

SEQ ID NO: 97492 - DNA, 25 bp, Homo sapien
gtctagtttaagacgggcttctgtg

SEQ ID NO: 97493 - DNA, 25 bp, Homo sapien
tatgagataaatcagatcttctgtc

SEQ ID NO: 97494 - DNA, 25 bp, Homo sapien
tatgagataaatgagatcttctgtc

SEQ ID NO: 97495 - DNA, 25 bp, Homo sapien
aaataaaccaacttagaatactttg

SEQ ID NO: 97496 - DNA, 25 bp, Homo sapien
aaataaaccaacatagaatactttg

SEQ ID NO: 97497 - DNA, 25 bp, Homo sapien
aagactcatcaaaaggacttctggt

SEQ ID NO: 97498 - DNA, 25 bp, Homo sapien
aagactcatcaataggacttctggt

SEQ ID NO: 97499 - DNA, 25 bp, Homo sapien
taagatgaacaacgtatgtttcatc

SEQ ID NO: 97500 - DNA, 25 bp, Homo sapien
taagatgaacaaggtatgtttcatc

SEQ ID NO: 97501 - DNA, 25 bp, Homo sapien
gaggtttacgatgctggacttctta

SEQ ID NO: 97502 - DNA, 25 bp, Homo sapien
gaggtttacgatcctggacttctta

SEQ ID NO: 97503 - DNA, 25 bp, Homo sapien
gttgtcccctcttcgtctactgtat

SEQ ID NO: 97504 - DNA, 25 bp, Homo sapien
gttgtcccctctacgtctactgtat

SEQ ID NO: 97505 - DNA, 25 bp, Homo sapien
tccgggtcccgttcgttactactct

SEQ ID NO: 97506 - DNA, 25 bp, Homo sapien
tccgggtcccgtacgttactactct

SEQ ID NO: 97507 - DNA, 25 bp, Homo sapien
agcgtcgctccctcgacgagacgat

SEQ ID NO: 97508 - DNA, 25 bp, Homo sapien
agcgtcgctcccacgacgagacgat

SEQ ID NO: 97509 - DNA, 25 bp, Homo sapien
agactgtcgacgtcaacgagggagt

SEQ ID NO: 97510 - DNA, 25 bp, Homo sapien
agactgtcgacgacaacgagggagt

SEQ ID NO: 97511 - DNA, 25 bp, Homo sapien
agaagtatgtgacactgacgaggca

SEQ ID NO: 97512 - DNA, 25 bp, Homo sapien
agaagtatgtgagactgacgaggca

SEQ ID NO: 97513 - DNA, 25 bp, Homo sapien
agggtgagtcgcagaaactgaccta

SEQ ID NO: 97514 - DNA, 25 bp, Homo sapien
agggtgagtcgctgaaactgaccta

SEQ ID NO: 97515 - DNA, 25 bp, Homo sapien
tctcgatcgacgagactactcataa

SEQ ID NO: 97516 - DNA, 25 bp, Homo sapien
tctcgatcgacgtgactactcataa

SEQ ID NO: 97517 - DNA, 25 bp, Homo sapien
ttcacatgtggtgatacctacacat

SEQ ID NO: 97518 - DNA, 25 bp, Homo sapien
ttcacatgtggtcatacctacacat

SEQ ID NO: 97519 - DNA, 25 bp, Homo sapien
agacctgtgacgtcgttccacgcag

SEQ ID NO: 97520 - DNA, 25 bp, Homo sapien
agacctgtgacgacgttccacgcag

SEQ ID NO: 97521 - DNA, 25 bp, Homo sapien
accagagccaccactgctagctcag

SEQ ID NO: 97522 - DNA, 25 bp, Homo sapien
accagagccacctctgctagctcag

SEQ ID NO: 97523 - DNA, 25 bp, Homo sapien
tgcgagtcaccgtgtgtcacccaga

SEQ ID NO: 97524 - DNA, 25 bp, Homo sapien
tgcgagtcaccgagtgtcacccaga

SEQ ID NO: 97525 - DNA, 25 bp, Homo sapien
ggttgacggtcatccatgcccggga

SEQ ID NO: 97526 - DNA, 25 bp, Homo sapien
ggttgacggtcaaccatgcccggga

SEQ ID NO: 97527 - DNA, 25 bp, Homo sapien
ttgacttatcctaagtcctgtcgca

SEQ ID NO: 97528 - DNA, 25 bp, Homo sapien
ttgacttatccttagtcctgtcgca

SEQ ID NO: 97529 - DNA, 25 bp, Homo sapien
gtttcagacttagttcctttgagat

SEQ ID NO: 97530 - DNA, 25 bp, Homo sapien
gtttcagacttacttcctttgagat

SEQ ID NO: 97531 - DNA, 25 bp, Homo sapien
tttctagctgaacctgatctttaag

SEQ ID NO: 97532 - DNA, 25 bp, Homo sapien
tttctagctgaagctgatctttaag

SEQ ID NO: 97533 - DNA, 25 bp, Homo sapien
tctgtgtgtttctcggtcattgaaa

SEQ ID NO: 97534 - DNA, 25 bp, Homo sapien
tctgtgtgtttcacggtcattgaaa

SEQ ID NO: 97535 - DNA, 25 bp, Homo sapien
ttggttgtctattacggaatccaaa

SEQ ID NO: 97536 - DNA, 25 bp, Homo sapien
ttggttgtctataacggaatccaaa

SEQ ID NO: 97537 - DNA, 25 bp, Homo sapien
caaacagtcaaaggtcgacccacca

SEQ ID NO: 97538 - DNA, 25 bp, Homo sapien
caaacagtcaaacgtcgacccacca

SEQ ID NO: 97539 - DNA, 25 bp, Homo sapien
tcctactttaatcggaccctataca

SEQ ID NO: 97540 - DNA, 25 bp, Homo sapien
tcctactttaatgggaccctataca

SEQ ID NO: 97541 - DNA, 25 bp, Homo sapien
ctccttttttaagactgttacacta

SEQ ID NO: 97542 - DNA, 25 bp, Homo sapien
ctccttttttaacactgttacacta

SEQ ID NO: 97543 - DNA, 25 bp, Homo sapien
tgaccttctgttacgactgaatcga

SEQ ID NO: 97544 - DNA, 25 bp, Homo sapien
tgaccttctgtttcgactgaatcga

SEQ ID NO: 97545 - DNA, 25 bp, Homo sapien
tccctcttcgttacatgtcttacgg

SEQ ID NO: 97546 - DNA, 25 bp, Homo sapien
tccctcttcgtttcatgtcttacgg

SEQ ID NO: 97547 - DNA, 25 bp, Homo sapien
ttgttatacgtagtaaaactactaa

SEQ ID NO: 97548 - DNA, 25 bp, Homo sapien
ttgttatacgtactaaaactactaa

SEQ ID NO: 97549 - DNA, 25 bp, Homo sapien
tttgcactgtacctcagggtccgag

SEQ ID NO: 97550 - DNA, 25 bp, Homo sapien
tttgcactgtacgtcagggtccgag

SEQ ID NO: 97551 - DNA, 25 bp, Homo sapien
gatttctgattccttagtgtcttca

SEQ ID NO: 97552 - DNA, 25 bp, Homo sapien
gatttctgattcgttagtgtcttca

SEQ ID NO: 97553 - DNA, 25 bp, Homo sapien
gttccgtatcggtagtgcgtctttt

SEQ ID NO: 97554 - DNA, 25 bp, Homo sapien
gttccgtatcggaagtgcgtctttt

SEQ ID NO: 97555 - DNA, 25 bp, Homo sapien
gtgagtatatgtgagtcccctcgtt

SEQ ID NO: 97556 - DNA, 25 bp, Homo sapien
gtgagtatatgtcagtcccctcgtt

SEQ ID NO: 97557 - DNA, 25 bp, Homo sapien
gtgggtgtatctgatccgacgaatc

SEQ ID NO: 97558 - DNA, 25 bp, Homo sapien
gtgggtgtatctcatccgacgaatc

SEQ ID NO: 97559 - DNA, 25 bp, Homo sapien
tagagaggtgactgacaccaaagtt

SEQ ID NO: 97560 - DNA, 25 bp, Homo sapien
tagagaggtgacagacaccaaagtt

SEQ ID NO: 97561 - DNA, 25 bp, Homo sapien
tagacaaggactggaacgtgggtac

SEQ ID NO: 97562 - DNA, 25 bp, Homo sapien
tagacaaggactcgaacgtgggtac

SEQ ID NO: 97563 - DNA, 25 bp, Homo sapien
acggcctgtctccaggtacggtcac

SEQ ID NO: 97564 - DNA, 25 bp, Homo sapien
acggcctgtctcgaggtacggtcac

SEQ ID NO: 97565 - DNA, 25 bp, Homo sapien
ctcgccgtgacgtggtacgcgtcct

SEQ ID NO: 97566 - DNA, 25 bp, Homo sapien
ctcgccgtgacgaggtacgcgtcct

SEQ ID NO: 97567 - DNA, 25 bp, Homo sapien
ggctcctgtgtcaggtgacgctact

SEQ ID NO: 97568 - DNA, 25 bp, Homo sapien
ggctcctgtgtctggtgacgctact

SEQ ID NO: 97569 - DNA, 25 bp, Homo sapien
agacaggggcagtactgttgtcctc

SEQ ID NO: 97570 - DNA, 25 bp, Homo sapien
agacaggggcagaactgttgtcctc

SEQ ID NO: 97571 - DNA, 25 bp, Homo sapien
caacgaaccagtgaccgtcagaata

SEQ ID NO: 97572 - DNA, 25 bp, Homo sapien
caacgaaccagtcaccgtcagaata

SEQ ID NO: 97573 - DNA, 25 bp, Homo sapien
acaacgtgtcccttacatgtgtaaa

SEQ ID NO: 97574 - DNA, 25 bp, Homo sapien
acaacgtgtcccatacatgtgtaaa

SEQ ID NO: 97575 - DNA, 25 bp, Homo sapien
ctggaatccagattcttgatgtggt

SEQ ID NO: 97576 - DNA, 25 bp, Homo sapien
ctggaatccagaatcttgatgtggt

SEQ ID NO: 97577 - DNA, 25 bp, Homo sapien
catggaagagcacgtcttatgtaaa

SEQ ID NO: 97578 - DNA, 25 bp, Homo sapien
catggaagagcaggtcttatgtaaa

SEQ ID NO: 97579 - DNA, 25 bp, Homo sapien
acctcggacacaagaaactttgaaa

SEQ ID NO: 97580 - DNA, 25 bp, Homo sapien
acctcggacacatgaaactttgaaa

SEQ ID NO: 97581 - DNA, 25 bp, Homo sapien
tcaaactcgtagtccgtttagaaga

SEQ ID NO: 97582 - DNA, 25 bp, Homo sapien
tcaaactcgtagaccgtttagaaga

SEQ ID NO: 97583 - DNA, 25 bp, Homo sapien
cgaccctcgagactccagaggacat

SEQ ID NO: 97584 - DNA, 25 bp, Homo sapien
cgaccctcgagagtccagaggacat

SEQ ID NO: 97585 - DNA, 25 bp, Homo sapien
atccactcagtcacgcagtgagaca

SEQ ID NO: 97586 - DNA, 25 bp, Homo sapien
atccactcagtctcgcagtgagaca

SEQ ID NO: 97587 - DNA, 25 bp, Homo sapien
cgacccgtagcacgtcgtggaactg

SEQ ID NO: 97588 - DNA, 25 bp, Homo sapien
cgacccgtagcaggtcgtggaactg

SEQ ID NO: 97589 - DNA, 25 bp, Homo sapien
aagaccagagcgaaccgggtaagac

SEQ ID NO: 97590 - DNA, 25 bp, Homo sapien
aagaccagagcgtaccgggtaagac

SEQ ID NO: 97591 - DNA, 25 bp, Homo sapien
gcccgtaggtttgacgacgacacgc

SEQ ID NO: 97592 - DNA, 25 bp, Homo sapien
gcccgtaggtttcacgacgacacgc

SEQ ID NO: 97593 - DNA, 25 bp, Homo sapien
gtcactcaactctcaactctagtac

SEQ ID NO: 97594 - DNA, 25 bp, Homo sapien
gtcactcaactcacaactctagtac

SEQ ID NO: 97595 - DNA, 25 bp, Homo sapien
gaactacgacccacttacagacgtc

SEQ ID NO: 97596 - DNA, 25 bp, Homo sapien
gaactacgaccctcttacagacgtc

SEQ ID NO: 97597 - DNA, 25 bp, Homo sapien
gaagtaactaaagttgttacatcac

SEQ ID NO: 97598 - DNA, 25 bp, Homo sapien
gaagtaactaaacttgttacatcac

SEQ ID NO: 97599 - DNA, 25 bp, Homo sapien
tttcttagggaggttcgactcttcc

SEQ ID NO: 97600 - DNA, 25 bp, Homo sapien
tttcttagggagcttcgactcttcc

SEQ ID NO: 97601 - DNA, 25 bp, Homo sapien
gactaaaagattgtaagtcctctca

SEQ ID NO: 97602 - DNA, 25 bp, Homo sapien
gactaaaagattctaagtcctctca

SEQ ID NO: 97603 - DNA, 25 bp, Homo sapien
tttagtcacgcaagcttgcgatctc

SEQ ID NO: 97604 - DNA, 25 bp, Homo sapien
tttagtcacgcatgcttgcgatctc

SEQ ID NO: 97605 - DNA, 25 bp, Homo sapien
tacggccacttgcacgttttgtccg

SEQ ID NO: 97606 - DNA, 25 bp, Homo sapien
tacggccacttggacgttttgtccg

SEQ ID NO: 97607 - DNA, 25 bp, Homo sapien
gtcccgagatcttctgccacgtgaa

SEQ ID NO: 97608 - DNA, 25 bp, Homo sapien
gtcccgagatctactgccacgtgaa

SEQ ID NO: 97609 - DNA, 25 bp, Homo sapien
cccttctgattgtgtgtcggtctca

SEQ ID NO: 97610 - DNA, 25 bp, Homo sapien
cccttctgattgagtgtcggtctca

SEQ ID NO: 97611 - DNA, 25 bp, Homo sapien
gttacctttaaagaatccccgtaag

SEQ ID NO: 97612 - DNA, 25 bp, Homo sapien
gttacctttaaacaatccccgtaag

SEQ ID NO: 97613 - DNA, 25 bp, Homo sapien
tctccagtggcgagaccccgaggtg

SEQ ID NO: 97614 - DNA, 25 bp, Homo sapien
tctccagtggcgtgaccccgaggtg

SEQ ID NO: 97615 - DNA, 25 bp, Homo sapien
tcctcaggccctcagaccagtaggg

SEQ ID NO: 97616 - DNA, 25 bp, Homo sapien
tcctcaggccctgagaccagtaggg

SEQ ID NO: 97617 - DNA, 25 bp, Homo sapien
ctcctgagatacttctcccctgtgt

SEQ ID NO: 97618 - DNA, 25 bp, Homo sapien
ctcctgagatacatctcccctgtgt

SEQ ID NO: 97619 - DNA, 25 bp, Homo sapien
tcgttgtattggtcttcctcgtcgt

SEQ ID NO: 97620 - DNA, 25 bp, Homo sapien
tcgttgtattggacttcctcgtcgt

SEQ ID NO: 97621 - DNA, 25 bp, Homo sapien
cgagtttactttgtcctctttctcg

SEQ ID NO: 97622 - DNA, 25 bp, Homo sapien
cgagtttactttctcctctttctcg

SEQ ID NO: 97623 - DNA, 25 bp, Homo sapien
gggtcgacctacgtccacttgtcta

SEQ ID NO: 97624 - DNA, 25 bp, Homo sapien
gggtcgacctacctccacttgtcta

SEQ ID NO: 97625 - DNA, 25 bp, Homo sapien
ggacggcggacctcgacgtgaccca

SEQ ID NO: 97626 - DNA, 25 bp, Homo sapien
ggacggcggaccacgacgtgaccca

SEQ ID NO: 97627 - DNA, 25 bp, Homo sapien
ggagacaacataacgtgtgccgaac

SEQ ID NO: 97628 - DNA, 25 bp, Homo sapien
ggagacaacatatcgtgtgccgaac

SEQ ID NO: 97629 - DNA, 25 bp, Homo sapien
ggacacaacagtcgtgttaactaat

SEQ ID NO: 97630 - DNA, 25 bp, Homo sapien
ggacacaacagtggtgttaactaat

SEQ ID NO: 97631 - DNA, 25 bp, Homo sapien
tcgtcggtcgccagttacacgacca

SEQ ID NO: 97632 - DNA, 25 bp, Homo sapien
tcgtcggtcgcctgttacacgacca

SEQ ID NO: 97633 - DNA, 25 bp, Homo sapien
cgactgtctacctacgtacagaaat

SEQ ID NO: 97634 - DNA, 25 bp, Homo sapien
cgactgtctaccaacgtacagaaat

SEQ ID NO: 97635 - DNA, 25 bp, Homo sapien
taacttaccttaacgtgtcgtgagg

SEQ ID NO: 97636 - DNA, 25 bp, Homo sapien
taacttaccttatcgtgtcgtgagg

SEQ ID NO: 97637 - DNA, 25 bp, Homo sapien
ttactcccctgtctacactgttgtg

SEQ ID NO: 97638 - DNA, 25 bp, Homo sapien
ttactcccctgtgtacactgttgtg

SEQ ID NO: 97639 - DNA, 25 bp, Homo sapien
aacagtgagtcctaaatactgaaac

SEQ ID NO: 97640 - DNA, 25 bp, Homo sapien
aacagtgagtccaaaatactgaaac

SEQ ID NO: 97641 - DNA, 25 bp, Homo sapien
tgtaggtgaagaaccacacagatac

SEQ ID NO: 97642 - DNA, 25 bp, Homo sapien
tgtaggtgaagatccacacagatac

SEQ ID NO: 97643 - DNA, 25 bp, Homo sapien
aaggtgacgttcttcacacctacga

SEQ ID NO: 97644 - DNA, 25 bp, Homo sapien
aaggtgacgttcatcacacctacga

SEQ ID NO: 97645 - DNA, 25 bp, Homo sapien
tttacatgattcataatacacacac

SEQ ID NO: 97646 - DNA, 25 bp, Homo sapien
tttacatgattcttaatacacacac

SEQ ID NO: 97647 - DNA, 25 bp, Homo sapien
gtgaggtctcgtgttacacatgcat

SEQ ID NO: 97648 - DNA, 25 bp, Homo sapien
gtgaggtctcgtcttacacatgcat

SEQ ID NO: 97649 - DNA, 25 bp, Homo sapien
cccgacgtgtttcctttctactgga

SEQ ID NO: 97650 - DNA, 25 bp, Homo sapien
cccgacgtgtttgctttctactgga

SEQ ID NO: 97651 - DNA, 25 bp, Homo sapien
ctgggtgtcaggtgtttctgtcgta

SEQ ID NO: 97652 - DNA, 25 bp, Homo sapien
ctgggtgtcaggagtttctgtcgta

SEQ ID NO: 97653 - DNA, 25 bp, Homo sapien
tactaactctttcgtgaggaatttc

SEQ ID NO: 97654 - DNA, 25 bp, Homo sapien
tactaactctttggtgaggaatttc

SEQ ID NO: 97655 - DNA, 25 bp, Homo sapien
ttctatggtggtacgaatatacttc

SEQ ID NO: 97656 - DNA, 25 bp, Homo sapien
ttctatggtggttcgaatatacttc

SEQ ID NO: 97657 - DNA, 25 bp, Homo sapien
tttgttttgttgatgtatatttatt

SEQ ID NO: 97658 - DNA, 25 bp, Homo sapien
tttgttttgttgttgtatatttatt

SEQ ID NO: 97659 - DNA, 25 bp, Homo sapien
ctggttcttataggtacttctttca

SEQ ID NO: 97660 - DNA, 25 bp, Homo sapien
ctggttcttatacgtacttctttca

SEQ ID NO: 97661 - DNA, 25 bp, Homo sapien
tctacaaagtttgacttcttgtcga

SEQ ID NO: 97662 - DNA, 25 bp, Homo sapien
tctacaaagtttcacttcttgtcga

SEQ ID NO: 97663 - DNA, 25 bp, Homo sapien
tagtttaagtcgtaaaccaaggtct

SEQ ID NO: 97664 - DNA, 25 bp, Homo sapien
tagtttaagtcgaaaaccaaggtct

SEQ ID NO: 97665 - DNA, 25 bp, Homo sapien
gattttaagtcatagtctcagaacc

SEQ ID NO: 97666 - DNA, 25 bp, Homo sapien
gattttaagtcaaagtctcagaacc

SEQ ID NO: 97667 - DNA, 25 bp, Homo sapien
tttgtttagtaatcatctcgcaaag

SEQ ID NO: 97668 - DNA, 25 bp, Homo sapien
tttgtttagtaaacatctcgcaaag

SEQ ID NO: 97669 - DNA, 25 bp, Homo sapien
ccggttatgtatcatttctgtatcg

SEQ ID NO: 97670 - DNA, 25 bp, Homo sapien
ccggttatgtatgatttctgtatcg

SEQ ID NO: 97671 - DNA, 25 bp, Homo sapien
taccgttctgtgttgactttaaatc

SEQ ID NO: 97672 - DNA, 25 bp, Homo sapien
taccgttctgtgatgactttaaatc

SEQ ID NO: 97673 - DNA, 25 bp, Homo sapien
gtctccgggtgcacccgaggtgatt

SEQ ID NO: 97674 - DNA, 25 bp, Homo sapien
gtctccgggtgctcccgaggtgatt

SEQ ID NO: 97675 - DNA, 25 bp, Homo sapien
tttcccagtagactcctggttagaa

SEQ ID NO: 97676 - DNA, 25 bp, Homo sapien
tttcccagtagagtcctggttagaa

SEQ ID NO: 97677 - DNA, 25 bp, Homo sapien
cgacgaagaggtcaccgagtgtgaa

SEQ ID NO: 97678 - DNA, 25 bp, Homo sapien
cgacgaagaggtgaccgagtgtgaa

SEQ ID NO: 97679 - DNA, 25 bp, Homo sapien
cccgacagaggaacggacacgggcc

SEQ ID NO: 97680 - DNA, 25 bp, Homo sapien
cccgacagaggatcggacacgggcc

SEQ ID NO: 97681 - DNA, 25 bp, Homo sapien
gcagcccacgcgtggaggtccgtca

SEQ ID NO: 97682 - DNA, 25 bp, Homo sapien
gcagcccacgcgaggaggtccgtca

SEQ ID NO: 97683 - DNA, 25 bp, Homo sapien
agtgtcactccgaggggaccgtcac

SEQ ID NO: 97684 - DNA, 25 bp, Homo sapien
agtgtcactccgtggggaccgtcac

SEQ ID NO: 97685 - DNA, 25 bp, Homo sapien
agttactaccctcgtcggggtcaga

SEQ ID NO: 97686 - DNA, 25 bp, Homo sapien
agttactaccctggtcggggtcaga

SEQ ID NO: 97687 - DNA, 25 bp, Homo sapien
aaggtcacggccttcagtggtccga

SEQ ID NO: 97688 - DNA, 25 bp, Homo sapien
aaggtcacggccatcagtggtccga

SEQ ID NO: 97689 - DNA, 25 bp, Homo sapien
ttctctcgtggtcaagacaggccgg

SEQ ID NO: 97690 - DNA, 25 bp, Homo sapien
ttctctcgtggtgaagacaggccgg

SEQ ID NO: 97691 - DNA, 25 bp, Homo sapien
actgtatagagaacagggtacccgt

SEQ ID NO: 97692 - DNA, 25 bp, Homo sapien
actgtatagagatcagggtacccgt

SEQ ID NO: 97693 - DNA, 25 bp, Homo sapien
cagagacgagtctcgacgagactcg

SEQ ID NO: 97694 - DNA, 25 bp, Homo sapien
cagagacgagtcacgacgagactcg

SEQ ID NO: 97695 - DNA, 25 bp, Homo sapien
tgaagtagacgttcactctccgcct

SEQ ID NO: 97696 - DNA, 25 bp, Homo sapien
tgaagtagacgtacactctccgcct

SEQ ID NO: 97697 - DNA, 25 bp, Homo sapien
tttacgaatgacgtcaactcctaag

SEQ ID NO: 97698 - DNA, 25 bp, Homo sapien
tttacgaatgacctcaactcctaag

SEQ ID NO: 97699 - DNA, 25 bp, Homo sapien
aaagaggagaaacctaaaactttcg

SEQ ID NO: 97700 - DNA, 25 bp, Homo sapien
aaagaggagaaagctaaaactttcg

SEQ ID NO: 97701 - DNA, 25 bp, Homo sapien
gcggacagcaacgcttacgacaggc

SEQ ID NO: 97702 - DNA, 25 bp, Homo sapien
gcggacagcaacccttacgacaggc

SEQ ID NO: 97703 - DNA, 25 bp, Homo sapien
gacgtacccgggaccttccaggtct

SEQ ID NO: 97704 - DNA, 25 bp, Homo sapien
gacgtacccgggtccttccaggtct

SEQ ID NO: 97705 - DNA, 25 bp, Homo sapien
aggtatccgggtttcacttgagggt

SEQ ID NO: 97706 - DNA, 25 bp, Homo sapien
aggtatccgggtatcacttgagggt

SEQ ID NO: 97707 - DNA, 25 bp, Homo sapien
tgacactcccacttccttgtgaggg

SEQ ID NO: 97708 - DNA, 25 bp, Homo sapien
tgacactcccacatccttgtgaggg

SEQ ID NO: 97709 - DNA, 25 bp, Homo sapien
tattatcacaagtctccttgaagag

SEQ ID NO: 97710 - DNA, 25 bp, Homo sapien
tattatcacaagactccttgaagag

SEQ ID NO: 97711 - DNA, 25 bp, Homo sapien
aaggtccctgcgaccgctcgagaca

SEQ ID NO: 97712 - DNA, 25 bp, Homo sapien
aaggtccctgcgtccgctcgagaca

SEQ ID NO: 97713 - DNA, 25 bp, Homo sapien
tctgtaacaaagaactccggtggga

SEQ ID NO: 97714 - DNA, 25 bp, Homo sapien
tctgtaacaaagtactccggtggga

SEQ ID NO: 97715 - DNA, 25 bp, Homo sapien
agactcgacaccaccggaaagacag

SEQ ID NO: 97716 - DNA, 25 bp, Homo sapien
agactcgacacctccggaaagacag

SEQ ID NO: 97717 - DNA, 25 bp, Homo sapien
ttacaaatgtactccggcgcggaca

SEQ ID NO: 97718 - DNA, 25 bp, Homo sapien
ttacaaatgtacaccggcgcggaca

SEQ ID NO: 97719 - DNA, 25 bp, Homo sapien
agttttaaacgaatctagaccagaa

SEQ ID NO: 97720 - DNA, 25 bp, Homo sapien
agttttaaacgattctagaccagaa

SEQ ID NO: 97721 - DNA, 25 bp, Homo sapien
cttataggagaaccagaacagtata

SEQ ID NO: 97722 - DNA, 25 bp, Homo sapien
cttataggagaagcagaacagtata

SEQ ID NO: 97723 - DNA, 25 bp, Homo sapien
cttttagggtacaatataccgaatg

SEQ ID NO: 97724 - DNA, 25 bp, Homo sapien
cttttagggtactatataccgaatg

SEQ ID NO: 97725 - DNA, 25 bp, Homo sapien
ttaatctcgcgaacgtactaaatgt

SEQ ID NO: 97726 - DNA, 25 bp, Homo sapien
ttaatctcgcgatcgtactaaatgt

SEQ ID NO: 97727 - DNA, 25 bp, Homo sapien
aagcggagagttaccaataagacat

SEQ ID NO: 97728 - DNA, 25 bp, Homo sapien
aagcggagagtttccaataagacat

SEQ ID NO: 97729 - DNA, 25 bp, Homo sapien
acgtcgtatatgttttgtcaatcct

SEQ ID NO: 97730 - DNA, 25 bp, Homo sapien
acgtcgtatatgatttgtcaatcct

SEQ ID NO: 97731 - DNA, 25 bp, Homo sapien
gtccagtaaacattccgttagttca

SEQ ID NO: 97732 - DNA, 25 bp, Homo sapien
gtccagtaaacaatccgttagttca

SEQ ID NO: 97733 - DNA, 25 bp, Homo sapien
tgtcttggttaaatccgttttactc

SEQ ID NO: 97734 - DNA, 25 bp, Homo sapien
tgtcttggttaattccgttttactc

SEQ ID NO: 97735 - DNA, 25 bp, Homo sapien
cgtctcggtactgtgtgtcaccggc

SEQ ID NO: 97736 - DNA, 25 bp, Homo sapien
cgtctcggtactctgtgtcaccggc

SEQ ID NO: 97737 - DNA, 25 bp, Homo sapien
gagccttcgtccttgtttacctggt

SEQ ID NO: 97738 - DNA, 25 bp, Homo sapien
gagccttcgtccatgtttacctggt

SEQ ID NO: 97739 - DNA, 25 bp, Homo sapien
ctcgagcacgacgtgtctcacatag

SEQ ID NO: 97740 - DNA, 25 bp, Homo sapien
ctcgagcacgacctgtctcacatag

SEQ ID NO: 97741 - DNA, 25 bp, Homo sapien
gtcgaagtagactcctatacggtgt

SEQ ID NO: 97742 - DNA, 25 bp, Homo sapien
gtcgaagtagacacctatacggtgt

SEQ ID NO: 97743 - DNA, 25 bp, Homo sapien
tttagagacgaacgtctctatgttt

SEQ ID NO: 97744 - DNA, 25 bp, Homo sapien
tttagagacgaaggtctctatgttt

SEQ ID NO: 97745 - DNA, 25 bp, Homo sapien
tgtgttgacgcggatcacgtgtttt

SEQ ID NO: 97746 - DNA, 25 bp, Homo sapien
tgtgttgacgcgcatcacgtgtttt

SEQ ID NO: 97747 - DNA, 25 bp, Homo sapien
tttacaagtcttcgacgtagtattt

SEQ ID NO: 97748 - DNA, 25 bp, Homo sapien
tttacaagtcttggacgtagtattt

SEQ ID NO: 97749 - DNA, 25 bp, Homo sapien
ctgtaaggtctctgcccgtactgtc

SEQ ID NO: 97750 - DNA, 25 bp, Homo sapien
ctgtaaggtctcagcccgtactgtc

SEQ ID NO: 97751 - DNA, 25 bp, Homo sapien
gaagtcagactgtgtcggtccgccc

SEQ ID NO: 97752 - DNA, 25 bp, Homo sapien
gaagtcagactgagtcggtccgccc

SEQ ID NO: 97753 - DNA, 25 bp, Homo sapien
gacgtggaccggagagacgctcctt

SEQ ID NO: 97754 - DNA, 25 bp, Homo sapien
gacgtggaccggtgagacgctcctt

SEQ ID NO: 97755 - DNA, 25 bp, Homo sapien
gtcggactactctcggtcgacttcc

SEQ ID NO: 97756 - DNA, 25 bp, Homo sapien
gtcggactactcacggtcgacttcc

SEQ ID NO: 97757 - DNA, 25 bp, Homo sapien
cctggtgacgagacggtccgttgac

SEQ ID NO: 97758 - DNA, 25 bp, Homo sapien
cctggtgacgagtcggtccgttgac

SEQ ID NO: 97759 - DNA, 25 bp, Homo sapien
ttcgaaggtagatctttcctagacg

SEQ ID NO: 97760 - DNA, 25 bp, Homo sapien
ttcgaaggtagaactttcctagacg

SEQ ID NO: 97761 - DNA, 25 bp, Homo sapien
ctacgtgtggagacactacgagggc

SEQ ID NO: 97762 - DNA, 25 bp, Homo sapien
ctacgtgtggagtcactacgagggc

SEQ ID NO: 97763 - DNA, 25 bp, Homo sapien
tactcgttgagtgtcagtgcgacgc

SEQ ID NO: 97764 - DNA, 25 bp, Homo sapien
tactcgttgagtctcagtgcgacgc

SEQ ID NO: 97765 - DNA, 25 bp, Homo sapien
cacgagttgtcttaaatttcacgct

SEQ ID NO: 97766 - DNA, 25 bp, Homo sapien
cacgagttgtctaaaatttcacgct

SEQ ID NO: 97767 - DNA, 25 bp, Homo sapien
gttccattggtaaacattactcaga

SEQ ID NO: 97768 - DNA, 25 bp, Homo sapien
gttccattggtatacattactcaga

SEQ ID NO: 97769 - DNA, 25 bp, Homo sapien
gacatactaggaacactgtttatca

SEQ ID NO: 97770 - DNA, 25 bp, Homo sapien
gacatactaggatcactgtttatca

SEQ ID NO: 97771 - DNA, 25 bp, Homo sapien
ttaagagcgagatccttttacacga

SEQ ID NO: 97772 - DNA, 25 bp, Homo sapien
ttaagagcgagaaccttttacacga

SEQ ID NO: 97773 - DNA, 25 bp, Homo sapien
gtcagtggtacctctcttacacaca

SEQ ID NO: 97774 - DNA, 25 bp, Homo sapien
gtcagtggtaccactcttacacaca

SEQ ID NO: 97775 - DNA, 25 bp, Homo sapien
accggtgatgttacttcttctcaaa

SEQ ID NO: 97776 - DNA, 25 bp, Homo sapien
accggtgatgtttcttcttctcaaa

SEQ ID NO: 97777 - DNA, 25 bp, Homo sapien
gtagatgttccgtagttagacgcaa

SEQ ID NO: 97778 - DNA, 25 bp, Homo sapien
gtagatgttccgaagttagacgcaa

SEQ ID NO: 97779 - DNA, 25 bp, Homo sapien
ggcactcactcgactcttcgtctaa

SEQ ID NO: 97780 - DNA, 25 bp, Homo sapien
ggcactcactcgtctcttcgtctaa

SEQ ID NO: 97781 - DNA, 25 bp, Homo sapien
atggcctcctgttccgttctctaca

SEQ ID NO: 97782 - DNA, 25 bp, Homo sapien
atggcctcctgtaccgttctctaca

SEQ ID NO: 97783 - DNA, 25 bp, Homo sapien
ctcctcctttgtacgcgtctgtggg

SEQ ID NO: 97784 - DNA, 25 bp, Homo sapien
ctcctcctttgttcgcgtctgtggg

SEQ ID NO: 97785 - DNA, 25 bp, Homo sapien
ctccgattagggttccggagtcttg

SEQ ID NO: 97786 - DNA, 25 bp, Homo sapien
ctccgattagggatccggagtcttg

SEQ ID NO: 97787 - DNA, 25 bp, Homo sapien
tctgagtcagaaggtcccggtcttc

SEQ ID NO: 97788 - DNA, 25 bp, Homo sapien
tctgagtcagaacgtcccggtcttc

SEQ ID NO: 97789 - DNA, 25 bp, Homo sapien
gattacggaaacatctcccaaagtc

SEQ ID NO: 97790 - DNA, 25 bp, Homo sapien
gattacggaaacttctcccaaagtc

SEQ ID NO: 97791 - DNA, 25 bp, Homo sapien
ctctacgggtaattttcaggacctt

SEQ ID NO: 97792 - DNA, 25 bp, Homo sapien
ctctacgggtaaatttcaggacctt

SEQ ID NO: 97793 - DNA, 25 bp, Homo sapien
cttataaccaactttcgaaacggtg

SEQ ID NO: 97794 - DNA, 25 bp, Homo sapien
cttataaccaacattcgaaacggtg

SEQ ID NO: 97795 - DNA, 25 bp, Homo sapien
tacacgaaccttagttgagcacggg

SEQ ID NO: 97796 - DNA, 25 bp, Homo sapien
tacacgaacctttgttgagcacggg

SEQ ID NO: 97797 - DNA, 25 bp, Homo sapien
actggtaactttttatctacggaaa

SEQ ID NO: 97798 - DNA, 25 bp, Homo sapien
actggtaactttatatctacggaaa

SEQ ID NO: 97799 - DNA, 25 bp, Homo sapien
tagtagttactatttttccggggac

SEQ ID NO: 97800 - DNA, 25 bp, Homo sapien
tagtagttactaattttccggggac

SEQ ID NO: 97801 - DNA, 25 bp, Homo sapien
ataagtaagatgatacaccaagatc

SEQ ID NO: 97802 - DNA, 25 bp, Homo sapien
ataagtaagatgttacaccaagatc

SEQ ID NO: 97803 - DNA, 25 bp, Homo sapien
tatatgtaagacatgcatccagacc

SEQ ID NO: 97804 - DNA, 25 bp, Homo sapien
tatatgtaagacttgcatccagacc

SEQ ID NO: 97805 - DNA, 25 bp, Homo sapien
cattgttcgtcttgtcaaaccacag

SEQ ID NO: 97806 - DNA, 25 bp, Homo sapien
cattgttcgtctagtcaaaccacag

SEQ ID NO: 97807 - DNA, 25 bp, Homo sapien
aactgaacctctagcgacaaataga

SEQ ID NO: 97808 - DNA, 25 bp, Homo sapien
aactgaacctcttgcgacaaataga

SEQ ID NO: 97809 - DNA, 25 bp, Homo sapien
agatgaatcctagacacatacaaga

SEQ ID NO: 97810 - DNA, 25 bp, Homo sapien
agatgaatcctacacacatacaaga

SEQ ID NO: 97811 - DNA, 25 bp, Homo sapien
agaactatatcctcggagatccaag

SEQ ID NO: 97812 - DNA, 25 bp, Homo sapien
agaactatatccacggagatccaag

SEQ ID NO: 97813 - DNA, 25 bp, Homo sapien
gacgagtagattcaaaaacctatca

SEQ ID NO: 97814 - DNA, 25 bp, Homo sapien
gacgagtagattgaaaaacctatca

SEQ ID NO: 97815 - DNA, 25 bp, Homo sapien
acgtaaatgctggaacacctataca

SEQ ID NO: 97816 - DNA, 25 bp, Homo sapien
acgtaaatgctgcaacacctataca

SEQ ID NO: 97817 - DNA, 25 bp, Homo sapien
aaacggaaccccttcgggtcttacc

SEQ ID NO: 97818 - DNA, 25 bp, Homo sapien
aaacggaaccccatcgggtcttacc

SEQ ID NO: 97819 - DNA, 25 bp, Homo sapien
aggagtcggacctcgggtcactacc

SEQ ID NO: 97820 - DNA, 25 bp, Homo sapien
aggagtcggaccacgggtcactacc

SEQ ID NO: 97821 - DNA, 25 bp, Homo sapien
acttagggtccatgagtgtctttac

SEQ ID NO: 97822 - DNA, 25 bp, Homo sapien
acttagggtccaagagtgtctttac

SEQ ID NO: 97823 - DNA, 25 bp, Homo sapien
ctgatatggtcagtggagtcatgac

SEQ ID NO: 97824 - DNA, 25 bp, Homo sapien
ctgatatggtcactggagtcatgac

SEQ ID NO: 97825 - DNA, 25 bp, Homo sapien
gtccggtgaccactctgtccgaact

SEQ ID NO: 97826 - DNA, 25 bp, Homo sapien
gtccggtgaccagtctgtccgaact

SEQ ID NO: 97827 - DNA, 25 bp, Homo sapien
tcctctttcgagtcgtctgtatgta

SEQ ID NO: 97828 - DNA, 25 bp, Homo sapien
tcctctttcgagacgtctgtatgta

SEQ ID NO: 97829 - DNA, 25 bp, Homo sapien
ctcctctcttgatgtgactttagtt

SEQ ID NO: 97830 - DNA, 25 bp, Homo sapien
ctcctctcttgaagtgactttagtt

SEQ ID NO: 97831 - DNA, 25 bp, Homo sapien
agtgtcagtttaaacgtcactgatt

SEQ ID NO: 97832 - DNA, 25 bp, Homo sapien
agtgtcagtttatacgtcactgatt

SEQ ID NO: 97833 - DNA, 25 bp, Homo sapien
agactcgataggtacttctacccaa

SEQ ID NO: 97834 - DNA, 25 bp, Homo sapien
agactcgataggaacttctacccaa

SEQ ID NO: 97835 - DNA, 25 bp, Homo sapien
gatgactgtcttaatcacagatgat

SEQ ID NO: 97836 - DNA, 25 bp, Homo sapien
gatgactgtctttatcacagatgat

SEQ ID NO: 97837 - DNA, 25 bp, Homo sapien
tagtgtagtccgttctttaatcgat

SEQ ID NO: 97838 - DNA, 25 bp, Homo sapien
tagtgtagtccgatctttaatcgat

SEQ ID NO: 97839 - DNA, 25 bp, Homo sapien
ccataggactaaagccaaacaagac

SEQ ID NO: 97840 - DNA, 25 bp, Homo sapien
ccataggactaatgccaaacaagac

SEQ ID NO: 97841 - DNA, 25 bp, Homo sapien
gagaacaaaactagtccacagaacc

SEQ ID NO: 97842 - DNA, 25 bp, Homo sapien
gagaacaaaacttgtccacagaacc

SEQ ID NO: 97843 - DNA, 25 bp, Homo sapien
tcgggacacaaaaagtcatacccca

SEQ ID NO: 97844 - DNA, 25 bp, Homo sapien
tcgggacacaaatagtcatacccca

SEQ ID NO: 97845 - DNA, 25 bp, Homo sapien
cttttacaagaaagtcatgaccctg

SEQ ID NO: 97846 - DNA, 25 bp, Homo sapien
cttttacaagaatgtcatgaccctg

SEQ ID NO: 97847 - DNA, 25 bp, Homo sapien
tgtcccagagcaaccagccggcgtg

SEQ ID NO: 97848 - DNA, 25 bp, Homo sapien
tgtcccagagcatccagccggcgtg

SEQ ID NO: 97849 - DNA, 25 bp, Homo sapien
taccccagggtactccatctctggt

SEQ ID NO: 97850 - DNA, 25 bp, Homo sapien
taccccagggtagtccatctctggt

SEQ ID NO: 97851 - DNA, 25 bp, Homo sapien
acttcaaagaaggtcgtttcgcccg

SEQ ID NO: 97852 - DNA, 25 bp, Homo sapien
acttcaaagaagctcgtttcgcccg

SEQ ID NO: 97853 - DNA, 25 bp, Homo sapien
agagtgaggtagagtcacttggccc

SEQ ID NO: 97854 - DNA, 25 bp, Homo sapien
agagtgaggtagtgtcacttggccc

SEQ ID NO: 97855 - DNA, 25 bp, Homo sapien
cgaagtgtggaaataacacaggccc

SEQ ID NO: 97856 - DNA, 25 bp, Homo sapien
cgaagtgtggaattaacacaggccc

SEQ ID NO: 97857 - DNA, 25 bp, Homo sapien
gtaggtggtgaaggaacaccctgcc

SEQ ID NO: 97858 - DNA, 25 bp, Homo sapien
gtaggtggtgaacgaacaccctgcc

SEQ ID NO: 97859 - DNA, 25 bp, Homo sapien
ggtggtgatcaagagacactggtac

SEQ ID NO: 97860 - DNA, 25 bp, Homo sapien
ggtggtgatcaacagacactggtac

SEQ ID NO: 97861 - DNA, 25 bp, Homo sapien
aggggatctattatcgacaatacgt

SEQ ID NO: 97862 - DNA, 25 bp, Homo sapien
aggggatctattttcgacaatacgt

SEQ ID NO: 97863 - DNA, 25 bp, Homo sapien
aaggaagtaccgaagtatgtcaaac

SEQ ID NO: 97864 - DNA, 25 bp, Homo sapien
aaggaagtaccgtagtatgtcaaac

SEQ ID NO: 97865 - DNA, 25 bp, Homo sapien
agacatggaacgtacgacaaaaacc

SEQ ID NO: 97866 - DNA, 25 bp, Homo sapien
agacatggaacgaacgacaaaaacc

SEQ ID NO: 97867 - DNA, 25 bp, Homo sapien
aaacagatatacacgccgaaaagtc

SEQ ID NO: 97868 - DNA, 25 bp, Homo sapien
aaacagatatactcgccgaaaagtc

SEQ ID NO: 97869 - DNA, 25 bp, Homo sapien
agaagttacctatgaacgacctccc

SEQ ID NO: 97870 - DNA, 25 bp, Homo sapien
agaagttacctaagaacgacctccc

SEQ ID NO: 97871 - DNA, 25 bp, Homo sapien
aatgtttcggtagtcacggtagccg

SEQ ID NO: 97872 - DNA, 25 bp, Homo sapien
aatgtttcggtactcacggtagccg

SEQ ID NO: 97873 - DNA, 25 bp, Homo sapien
gatacatcttgtctgtacagaacct

SEQ ID NO: 97874 - DNA, 25 bp, Homo sapien
gatacatcttgtgtgtacagaacct

SEQ ID NO: 97875 - DNA, 25 bp, Homo sapien
taaaggtaatttaccttgagaactc

SEQ ID NO: 97876 - DNA, 25 bp, Homo sapien
taaaggtaattttccttgagaactc

SEQ ID NO: 97877 - DNA, 25 bp, Homo sapien
aaacataagtgtacccagtaaaagg

SEQ ID NO: 97878 - DNA, 25 bp, Homo sapien
aaacataagtgttcccagtaaaagg

SEQ ID NO: 97879 - DNA, 25 bp, Homo sapien
aaaactcaagtgtccacggggaagc

SEQ ID NO: 97880 - DNA, 25 bp, Homo sapien
aaaactcaagtgaccacggggaagc

SEQ ID NO: 97881 - DNA, 25 bp, Homo sapien
acgagacaaaccaccggtcggagaa

SEQ ID NO: 97882 - DNA, 25 bp, Homo sapien
acgagacaaacctccggtcggagaa

SEQ ID NO: 97883 - DNA, 25 bp, Homo sapien
acaggtttccctaagaggatcgaat

SEQ ID NO: 97884 - DNA, 25 bp, Homo sapien
acaggtttcccttagaggatcgaat

SEQ ID NO: 97885 - DNA, 25 bp, Homo sapien
agatctaccccgttagaagtttaat

SEQ ID NO: 97886 - DNA, 25 bp, Homo sapien
agatctaccccgatagaagtttaat

SEQ ID NO: 97887 - DNA, 25 bp, Homo sapien
aaactacgagcctgtagaaatcatg

SEQ ID NO: 97888 - DNA, 25 bp, Homo sapien
aaactacgagccagtagaaatcatg

SEQ ID NO: 97889 - DNA, 25 bp, Homo sapien
atacaacgttatagaagtccgacgt

SEQ ID NO: 97890 - DNA, 25 bp, Homo sapien
atacaacgttattgaagtccgacgt

SEQ ID NO: 97891 - DNA, 25 bp, Homo sapien
ctgaccaacgtcttcttaggtctcc

SEQ ID NO: 97892 - DNA, 25 bp, Homo sapien
ctgaccaacgtcatcttaggtctcc

SEQ ID NO: 97893 - DNA, 25 bp, Homo sapien
tgtaacactgacataactatttgcg

SEQ ID NO: 97894 - DNA, 25 bp, Homo sapien
tgtaacactgacttaactatttgcg

SEQ ID NO: 97895 - DNA, 25 bp, Homo sapien
gtgtaaacgaacactgtactggtta

SEQ ID NO: 97896 - DNA, 25 bp, Homo sapien
gtgtaaacgaactctgtactggtta

SEQ ID NO: 97897 - DNA, 25 bp, Homo sapien
gtgtcaggaccgtgtctaaggtcct

SEQ ID NO: 97898 - DNA, 25 bp, Homo sapien
gtgtcaggaccgagtctaaggtcct

SEQ ID NO: 97899 - DNA, 25 bp, Homo sapien
tatcgtggtcgtgtgtattttcgtc

SEQ ID NO: 97900 - DNA, 25 bp, Homo sapien
tatcgtggtcgtctgtattttcgtc

SEQ ID NO: 97901 - DNA, 25 bp, Homo sapien
ccttctacagggagtagttaacctc

SEQ ID NO: 97902 - DNA, 25 bp, Homo sapien
ccttctacagggtgtagttaacctc

SEQ ID NO: 97903 - DNA, 25 bp, Homo sapien
gtccagggacaggtacacacgtctc

SEQ ID NO: 97904 - DNA, 25 bp, Homo sapien
gtccagggacagctacacacgtctc

SEQ ID NO: 97905 - DNA, 25 bp, Homo sapien
ttgcacacggaaacctcctagacgc

SEQ ID NO: 97906 - DNA, 25 bp, Homo sapien
ttgcacacggaatcctcctagacgc

SEQ ID NO: 97907 - DNA, 25 bp, Homo sapien
gctgtcaggtggtacccgtccaaga

SEQ ID NO: 97908 - DNA, 25 bp, Homo sapien
gctgtcaggtggaacccgtccaaga

SEQ ID NO: 97909 - DNA, 25 bp, Homo sapien
gagagccgaaggtccgccgacatta

SEQ ID NO: 97910 - DNA, 25 bp, Homo sapien
gagagccgaaggaccgccgacatta

SEQ ID NO: 97911 - DNA, 25 bp, Homo sapien
cacccacgagaagtaggggacctac

SEQ ID NO: 97912 - DNA, 25 bp, Homo sapien
cacccacgagaactaggggacctac

SEQ ID NO: 97913 - DNA, 25 bp, Homo sapien
gcacatcgagaagaccgacctccta

SEQ ID NO: 97914 - DNA, 25 bp, Homo sapien
gcacatcgagaacaccgacctccta

SEQ ID NO: 97915 - DNA, 25 bp, Homo sapien
ggacacggccagaccagacactttc

SEQ ID NO: 97916 - DNA, 25 bp, Homo sapien
ggacacggccagtccagacactttc

SEQ ID NO: 97917 - DNA, 25 bp, Homo sapien
ggacccctgcgagtcccatgttact

SEQ ID NO: 97918 - DNA, 25 bp, Homo sapien
ggacccctgcgactcccatgttact

SEQ ID NO: 97919 - DNA, 25 bp, Homo sapien
ccttcagcattgaacctgtcaccgt

SEQ ID NO: 97920 - DNA, 25 bp, Homo sapien
ccttcagcattgtacctgtcaccgt

SEQ ID NO: 97921 - DNA, 25 bp, Homo sapien
tggtacaaagttcatgtgatcactt

SEQ ID NO: 97922 - DNA, 25 bp, Homo sapien
tggtacaaagttgatgtgatcactt

SEQ ID NO: 97923 - DNA, 25 bp, Homo sapien
cggtacaccggactttcatctcggt

SEQ ID NO: 97924 - DNA, 25 bp, Homo sapien
cggtacaccggagtttcatctcggt

SEQ ID NO: 97925 - DNA, 25 bp, Homo sapien
tcggtcctcgtccagtttctgccgg

SEQ ID NO: 97926 - DNA, 25 bp, Homo sapien
tcggtcctcgtcgagtttctgccgg

SEQ ID NO: 97927 - DNA, 25 bp, Homo sapien
gggggcctacgtgtctgttcctccc

SEQ ID NO: 97928 - DNA, 25 bp, Homo sapien
gggggcctacgtctctgttcctccc

SEQ ID NO: 97929 - DNA, 25 bp, Homo sapien
ggtcgtagtacctcttccgcgaccg

SEQ ID NO: 97930 - DNA, 25 bp, Homo sapien
ggtcgtagtaccacttccgcgaccg

SEQ ID NO: 97931 - DNA, 25 bp, Homo sapien
ggtgtccgcctacctactggtgacc

SEQ ID NO: 97932 - DNA, 25 bp, Homo sapien
ggtgtccgcctagctactggtgacc

SEQ ID NO: 97933 - DNA, 25 bp, Homo sapien
tcgaagacgtcgaacgggaggacct

SEQ ID NO: 97934 - DNA, 25 bp, Homo sapien
tcgaagacgtcgtacgggaggacct

SEQ ID NO: 97935 - DNA, 25 bp, Homo sapien
tcacacggggttgcacgacgactct

SEQ ID NO: 97936 - DNA, 25 bp, Homo sapien
tcacacggggttccacgacgactct

SEQ ID NO: 97937 - DNA, 25 bp, Homo sapien
atgtcatcggattcctgaacgaccg

SEQ ID NO: 97938 - DNA, 25 bp, Homo sapien
atgtcatcggatacctgaacgaccg

SEQ ID NO: 97939 - DNA, 25 bp, Homo sapien
cacacggacccagacgggtgtcctg

SEQ ID NO: 97940 - DNA, 25 bp, Homo sapien
cacacggacccacacgggtgtcctg

SEQ ID NO: 97941 - DNA, 25 bp, Homo sapien
tctcggataacctctagggctcctt

SEQ ID NO: 97942 - DNA, 25 bp, Homo sapien
tctcggataaccactagggctcctt

SEQ ID NO: 97943 - DNA, 25 bp, Homo sapien
gctctctacccgagggtcgtcggtc

SEQ ID NO: 97944 - DNA, 25 bp, Homo sapien
gctctctacccgtgggtcgtcggtc

SEQ ID NO: 97945 - DNA, 25 bp, Homo sapien
ggtcgctacacctaacttcgcgttc

SEQ ID NO: 97946 - DNA, 25 bp, Homo sapien
ggtcgctacaccaaacttcgcgttc

SEQ ID NO: 97947 - DNA, 25 bp, Homo sapien
ttgtgtgtcacgtccctacatactc

SEQ ID NO: 97948 - DNA, 25 bp, Homo sapien
ttgtgtgtcacgaccctacatactc

SEQ ID NO: 97949 - DNA, 25 bp, Homo sapien
ccggaggataccagactcagtcttg

SEQ ID NO: 97950 - DNA, 25 bp, Homo sapien
ccggaggatacctgactcagtcttg

SEQ ID NO: 97951 - DNA, 25 bp, Homo sapien
acgataggaccttcgacctccttcg

SEQ ID NO: 97952 - DNA, 25 bp, Homo sapien
acgataggacctacgacctccttcg

SEQ ID NO: 97953 - DNA, 25 bp, Homo sapien
aggactaggatcaaggtctgaatct

SEQ ID NO: 97954 - DNA, 25 bp, Homo sapien
aggactaggatctaggtctgaatct

SEQ ID NO: 97955 - DNA, 25 bp, Homo sapien
tcgagtcaagttctcggttactccc

SEQ ID NO: 97956 - DNA, 25 bp, Homo sapien
tcgagtcaagttgtcggttactccc

SEQ ID NO: 97957 - DNA, 25 bp, Homo sapien
gctaggtagggttttgtataacctc

SEQ ID NO: 97958 - DNA, 25 bp, Homo sapien
gctaggtagggtattgtataacctc

SEQ ID NO: 97959 - DNA, 25 bp, Homo sapien
aatgaagttactgtcatggaaacca

SEQ ID NO: 97960 - DNA, 25 bp, Homo sapien
aatgaagttactctcatggaaacca

SEQ ID NO: 97961 - DNA, 25 bp, Homo sapien
ccgaaaattcatgtcgatattccag

SEQ ID NO: 97962 - DNA, 25 bp, Homo sapien
ccgaaaattcatctcgatattccag

SEQ ID NO: 97963 - DNA, 25 bp, Homo sapien
catgtctcacgcaggaactgcgaac

SEQ ID NO: 97964 - DNA, 25 bp, Homo sapien
catgtctcacgctggaactgcgaac

SEQ ID NO: 97965 - DNA, 25 bp, Homo sapien
tgtgttatttgtaccaatcttcaag

SEQ ID NO: 97966 - DNA, 25 bp, Homo sapien
tgtgttatttgttccaatcttcaag

SEQ ID NO: 97967 - DNA, 25 bp, Homo sapien
gttttatgtcttctgctattgagcg

SEQ ID NO: 97968 - DNA, 25 bp, Homo sapien
gttttatgtcttgtgctattgagcg

SEQ ID NO: 97969 - DNA, 25 bp, Homo sapien
tgctttaccttttcgttatggtagg

SEQ ID NO: 97970 - DNA, 25 bp, Homo sapien
tgctttacctttacgttatggtagg

SEQ ID NO: 97971 - DNA, 25 bp, Homo sapien
ttttgtgtccatggattcccgaagt

SEQ ID NO: 97972 - DNA, 25 bp, Homo sapien
ttttgtgtccatcgattcccgaagt

SEQ ID NO: 97973 - DNA, 25 bp, Homo sapien
gtcgcccacggtgtccgacgacgag

SEQ ID NO: 97974 - DNA, 25 bp, Homo sapien
gtcgcccacggtctccgacgacgag

SEQ ID NO: 97975 - DNA, 25 bp, Homo sapien
cctaggaccgaccatgctccggagg

SEQ ID NO: 97976 - DNA, 25 bp, Homo sapien
cctaggaccgacgatgctccggagg

SEQ ID NO: 97977 - DNA, 25 bp, Homo sapien
tataggactgacgatcaccacggaa

SEQ ID NO: 97978 - DNA, 25 bp, Homo sapien
tataggactgaccatcaccacggaa

SEQ ID NO: 97979 - DNA, 25 bp, Homo sapien
tcgtatgcaggagacaccagaacag

SEQ ID NO: 97980 - DNA, 25 bp, Homo sapien
tcgtatgcaggacacaccagaacag

SEQ ID NO: 97981 - DNA, 25 bp, Homo sapien
ccgacgggtgagttcaccaggacat

SEQ ID NO: 97982 - DNA, 25 bp, Homo sapien
ccgacgggtgagatcaccaggacat

SEQ ID NO: 97983 - DNA, 25 bp, Homo sapien
gcgacccaagaactactccgtaaat

SEQ ID NO: 97984 - DNA, 25 bp, Homo sapien
gcgacccaagaagtactccgtaaat

SEQ ID NO: 97985 - DNA, 25 bp, Homo sapien
tcacgccagagtaatcaacctaaag

SEQ ID NO: 97986 - DNA, 25 bp, Homo sapien
tcacgccagagttatcaacctaaag

SEQ ID NO: 97987 - DNA, 25 bp, Homo sapien
taactcgaaagtgagttcaaaccat

SEQ ID NO: 97988 - DNA, 25 bp, Homo sapien
taactcgaaagtcagttcaaaccat

SEQ ID NO: 97989 - DNA, 25 bp, Homo sapien
gcaagaaatatcatgacccgacctt

SEQ ID NO: 97990 - DNA, 25 bp, Homo sapien
gcaagaaatatcttgacccgacctt

SEQ ID NO: 97991 - DNA, 25 bp, Homo sapien
ctaggacacttcttggcgacacctc

SEQ ID NO: 97992 - DNA, 25 bp, Homo sapien
ctaggacacttcatggcgacacctc

SEQ ID NO: 97993 - DNA, 25 bp, Homo sapien
tacatgaagacctgtgagggtcctg

SEQ ID NO: 97994 - DNA, 25 bp, Homo sapien
tacatgaagaccagtgagggtcctg

SEQ ID NO: 97995 - DNA, 25 bp, Homo sapien
tcaacagaccttcgagaagtgctct

SEQ ID NO: 97996 - DNA, 25 bp, Homo sapien
tcaacagaccttggagaagtgctct

SEQ ID NO: 97997 - DNA, 25 bp, Homo sapien
gtgcccctgtgtacgtagggacgtc

SEQ ID NO: 97998 - DNA, 25 bp, Homo sapien
gtgcccctgtgttcgtagggacgtc

SEQ ID NO: 97999 - DNA, 25 bp, Homo sapien
acgttcttgtcctttcatttgtgga

SEQ ID NO: 98000 - DNA, 25 bp, Homo sapien
acgttcttgtccattcatttgtgga

SEQ ID NO: 98001 - DNA, 25 bp, Homo sapien
cttttagtcgaatccgatgggtgga

SEQ ID NO: 98002 - DNA, 25 bp, Homo sapien
cttttagtcgaaaccgatgggtgga

SEQ ID NO: 98003 - DNA, 25 bp, Homo sapien
cctgtcttcgaagaccccggggacg

SEQ ID NO: 98004 - DNA, 25 bp, Homo sapien
cctgtcttcgaacaccccggggacg

SEQ ID NO: 98005 - DNA, 25 bp, Homo sapien
ctcgtttctttcagtcaataggtta

SEQ ID NO: 98006 - DNA, 25 bp, Homo sapien
ctcgtttctttctgtcaataggtta

SEQ ID NO: 98007 - DNA, 25 bp, Homo sapien
cttcgtgtcctttttcgagtcttcc

SEQ ID NO: 98008 - DNA, 25 bp, Homo sapien
cttcgtgtccttattcgagtcttcc

SEQ ID NO: 98009 - DNA, 25 bp, Homo sapien
gtagaacaaaggtacgactcatcac

SEQ ID NO: 98010 - DNA, 25 bp, Homo sapien
gtagaacaaaggaacgactcatcac

SEQ ID NO: 98011 - DNA, 25 bp, Homo sapien
acgacgaaaaagagagtgcttctac

SEQ ID NO: 98012 - DNA, 25 bp, Homo sapien
acgacgaaaaagtgagtgcttctac

SEQ ID NO: 98013 - DNA, 25 bp, Homo sapien
tcgataaacagactcatggttgacg

SEQ ID NO: 98014 - DNA, 25 bp, Homo sapien
tcgataaacagagtcatggttgacg

SEQ ID NO: 98015 - DNA, 25 bp, Homo sapien
gctgtgcgagtgaacgccgggaacc

SEQ ID NO: 98016 - DNA, 25 bp, Homo sapien
gctgtgcgagtgtacgccgggaacc

SEQ ID NO: 98017 - DNA, 25 bp, Homo sapien
gacatcgggtgtacccggcacatct

SEQ ID NO: 98018 - DNA, 25 bp, Homo sapien
gacatcgggtgttcccggcacatct

SEQ ID NO: 98019 - DNA, 25 bp, Homo sapien
aatgggtgttcagacgtctagagtc

SEQ ID NO: 98020 - DNA, 25 bp, Homo sapien
aatgggtgttcacacgtctagagtc

SEQ ID NO: 98021 - DNA, 25 bp, Homo sapien
ccttttaggttgttcgcgtcagtca

SEQ ID NO: 98022 - DNA, 25 bp, Homo sapien
ccttttaggttgatcgcgtcagtca

SEQ ID NO: 98023 - DNA, 25 bp, Homo sapien
cttagtgaggaaaccgttctagcta

SEQ ID NO: 98024 - DNA, 25 bp, Homo sapien
cttagtgaggaatccgttctagcta

SEQ ID NO: 98025 - DNA, 25 bp, Homo sapien
atttcataaggactgcactcaactg

SEQ ID NO: 98026 - DNA, 25 bp, Homo sapien
atttcataaggagtgcactcaactg

SEQ ID NO: 98027 - DNA, 25 bp, Homo sapien
aatactccccggagccagtgtcgga

SEQ ID NO: 98028 - DNA, 25 bp, Homo sapien
aatactccccggtgccagtgtcgga

SEQ ID NO: 98029 - DNA, 25 bp, Homo sapien
acgacttatgtcgtgggccatcgga

SEQ ID NO: 98030 - DNA, 25 bp, Homo sapien
acgacttatgtcctgggccatcgga

SEQ ID NO: 98031 - DNA, 25 bp, Homo sapien
aaaggtttgtggacacaacgagtac

SEQ ID NO: 98032 - DNA, 25 bp, Homo sapien
aaaggtttgtggtcacaacgagtac

SEQ ID NO: 98033 - DNA, 25 bp, Homo sapien
agtgctcgagttgttcacgtcaaac

SEQ ID NO: 98034 - DNA, 25 bp, Homo sapien
agtgctcgagttcttcacgtcaaac

SEQ ID NO: 98035 - DNA, 25 bp, Homo sapien
ggacgtgtccatttgtactacaaag

SEQ ID NO: 98036 - DNA, 25 bp, Homo sapien
ggacgtgtccatatgtactacaaag

SEQ ID NO: 98037 - DNA, 25 bp, Homo sapien
aaggaggtcctcgaagtgagaacac

SEQ ID NO: 98038 - DNA, 25 bp, Homo sapien
aaggaggtcctccaagtgagaacac

SEQ ID NO: 98039 - DNA, 25 bp, Homo sapien
tcaagatcccggtaagtgcaccgag

SEQ ID NO: 98040 - DNA, 25 bp, Homo sapien
tcaagatcccggaaagtgcaccgag

SEQ ID NO: 98041 - DNA, 25 bp, Homo sapien
tcagaagtagcctgagaggttcaaa

SEQ ID NO: 98042 - DNA, 25 bp, Homo sapien
tcagaagtagccagagaggttcaaa

SEQ ID NO: 98043 - DNA, 25 bp, Homo sapien
acgaatatggtggaattcaacgact

SEQ ID NO: 98044 - DNA, 25 bp, Homo sapien
acgaatatggtgcaattcaacgact

SEQ ID NO: 98045 - DNA, 25 bp, Homo sapien
attattactggatactacagaccgt

SEQ ID NO: 98046 - DNA, 25 bp, Homo sapien
attattactggaaactacagaccgt

SEQ ID NO: 98047 - DNA, 25 bp, Homo sapien
ctttataacaaggaaccacagtcgc

SEQ ID NO: 98048 - DNA, 25 bp, Homo sapien
ctttataacaagcaaccacagtcgc

SEQ ID NO: 98049 - DNA, 25 bp, Homo sapien
actctaaagactacacaaaccattc

SEQ ID NO: 98050 - DNA, 25 bp, Homo sapien
actctaaagacttcacaaaccattc

SEQ ID NO: 98051 - DNA, 25 bp, Homo sapien
gagtgaccgacgtccttacccattc

SEQ ID NO: 98052 - DNA, 25 bp, Homo sapien
gagtgaccgacgaccttacccattc

SEQ ID NO: 98053 - DNA, 25 bp, Homo sapien
tctcttcgcggatcaattttgtggt

SEQ ID NO: 98054 - DNA, 25 bp, Homo sapien
tctcttcgcggaacaattttgtggt

SEQ ID NO: 98055 - DNA, 25 bp, Homo sapien
ttagttcttatcgaactctttagag

SEQ ID NO: 98056 - DNA, 25 bp, Homo sapien
ttagttcttatccaactctttagag

SEQ ID NO: 98057 - DNA, 25 bp, Homo sapien
ttctcctactccctaacggcgtgag

SEQ ID NO: 98058 - DNA, 25 bp, Homo sapien
ttctcctactccgtaacggcgtgag

SEQ ID NO: 98059 - DNA, 25 bp, Homo sapien
ttccgcatctcgtacggacacggca

SEQ ID NO: 98060 - DNA, 25 bp, Homo sapien
ttccgcatctcgaacggacacggca

SEQ ID NO: 98061 - DNA, 25 bp, Homo sapien
tgcggcttaccgtccgaaccactac

SEQ ID NO: 98062 - DNA, 25 bp, Homo sapien
tgcggcttaccgaccgaaccactac

SEQ ID NO: 98063 - DNA, 25 bp, Homo sapien
ctggaggccccgtaccgagaaccgg

SEQ ID NO: 98064 - DNA, 25 bp, Homo sapien
ctggaggccccgaaccgagaaccgg

SEQ ID NO: 98065 - DNA, 25 bp, Homo sapien
ccacggagaccgacgtggaccctcg

SEQ ID NO: 98066 - DNA, 25 bp, Homo sapien
ccacggagaccgtcgtggaccctcg

SEQ ID NO: 98067 - DNA, 25 bp, Homo sapien
accacggtaaggtcgtaacccggag

SEQ ID NO: 98068 - DNA, 25 bp, Homo sapien
accacggtaaggacgtaacccggag

SEQ ID NO: 98069 - DNA, 25 bp, Homo sapien
acgtaaacttggaattatgtccgca

SEQ ID NO: 98070 - DNA, 25 bp, Homo sapien
acgtaaacttggtattatgtccgca

SEQ ID NO: 98071 - DNA, 25 bp, Homo sapien
tgatcattaggaccactgttatgaa

SEQ ID NO: 98072 - DNA, 25 bp, Homo sapien
tgatcattaggagcactgttatgaa

SEQ ID NO: 98073 - DNA, 25 bp, Homo sapien
gcgagatttattaccctattgttaa

SEQ ID NO: 98074 - DNA, 25 bp, Homo sapien
gcgagatttatttccctattgttaa

SEQ ID NO: 98075 - DNA, 25 bp, Homo sapien
accgtgtattgtctctaggtctatg

SEQ ID NO: 98076 - DNA, 25 bp, Homo sapien
accgtgtattgtgtctaggtctatg

SEQ ID NO: 98077 - DNA, 25 bp, Homo sapien
ctgtgaccacggagcccgaggtcct

SEQ ID NO: 98078 - DNA, 25 bp, Homo sapien
ctgtgaccacggtgcccgaggtcct

SEQ ID NO: 98079 - DNA, 25 bp, Homo sapien
cactgagctccctatctggggacct

SEQ ID NO: 98080 - DNA, 25 bp, Homo sapien
cactgagctcccaatctggggacct

SEQ ID NO: 98081 - DNA, 25 bp, Homo sapien
gagtcttccgacctcagagagggac

SEQ ID NO: 98082 - DNA, 25 bp, Homo sapien
gagtcttccgacgtcagagagggac

SEQ ID NO: 98083 - DNA, 25 bp, Homo sapien
atgttttctcacgtccgacgagggg

SEQ ID NO: 98084 - DNA, 25 bp, Homo sapien
atgttttctcacctccgacgagggg

SEQ ID NO: 98085 - DNA, 25 bp, Homo sapien
tacgtttatgggtcctcagagtacc

SEQ ID NO: 98086 - DNA, 25 bp, Homo sapien
tacgtttatgggacctcagagtacc

SEQ ID NO: 98087 - DNA, 25 bp, Homo sapien
ttattaagttcgaacttgaggtcgc

SEQ ID NO: 98088 - DNA, 25 bp, Homo sapien
ttattaagttcgtacttgaggtcgc

SEQ ID NO: 98089 - DNA, 25 bp, Homo sapien
cggactttgacagacttgtacagcc

SEQ ID NO: 98090 - DNA, 25 bp, Homo sapien
cggactttgacacacttgtacagcc

SEQ ID NO: 98091 - DNA, 25 bp, Homo sapien
catctgtgactccttgtagtcgtcc

SEQ ID NO: 98092 - DNA, 25 bp, Homo sapien
catctgtgactcgttgtagtcgtcc

SEQ ID NO: 98093 - DNA, 25 bp, Homo sapien
caaacagtgactgtctcgagagtgg

SEQ ID NO: 98094 - DNA, 25 bp, Homo sapien
caaacagtgactctctcgagagtgg

SEQ ID NO: 98095 - DNA, 25 bp, Homo sapien
aaccaaaggctaacaacgagcaacg

SEQ ID NO: 98096 - DNA, 25 bp, Homo sapien
aaccaaaggctatcaacgagcaacg

SEQ ID NO: 98097 - DNA, 25 bp, Homo sapien
caacttgcagactcgcaacactgtc

SEQ ID NO: 98098 - DNA, 25 bp, Homo sapien
caacttgcagacacgcaacactgtc

SEQ ID NO: 98099 - DNA, 25 bp, Homo sapien
ttcttatttgcgtgggattcgtgtc

SEQ ID NO: 98100 - DNA, 25 bp, Homo sapien
ttcttatttgcgagggattcgtgtc

SEQ ID NO: 98101 - DNA, 25 bp, Homo sapien
tttctgacgaaaaagatttctcgtc

SEQ ID NO: 98102 - DNA, 25 bp, Homo sapien
tttctgacgaaatagatttctcgtc

SEQ ID NO: 98103 - DNA, 25 bp, Homo sapien
taaatttaaatcttacgatttttgt

SEQ ID NO: 98104 - DNA, 25 bp, Homo sapien
taaatttaaatcatacgatttttgt

SEQ ID NO: 98105 - DNA, 25 bp, Homo sapien
aggactaatcattacagcatttggt

SEQ ID NO: 98106 - DNA, 25 bp, Homo sapien
aggactaatcataacagcatttggt

SEQ ID NO: 98107 - DNA, 25 bp, Homo sapien
aacataaacaagagtctgttctgtg

SEQ ID NO: 98108 - DNA, 25 bp, Homo sapien
aacataaacaagtgtctgttctgtg

SEQ ID NO: 98109 - DNA, 25 bp, Homo sapien
gatgtcaacactgtgtatattctta

SEQ ID NO: 98110 - DNA, 25 bp, Homo sapien
gatgtcaacactctgtatattctta

SEQ ID NO: 98111 - DNA, 25 bp, Homo sapien
tttctccggtctcgtctactacgta

SEQ ID NO: 98112 - DNA, 25 bp, Homo sapien
tttctccggtctggtctactacgta

SEQ ID NO: 98113 - DNA, 25 bp, Homo sapien
accagggtccacgtcgttactctct

SEQ ID NO: 98114 - DNA, 25 bp, Homo sapien
accagggtccacctcgttactctct

SEQ ID NO: 98115 - DNA, 25 bp, Homo sapien
accccggtcctctcgacgtagtgat

SEQ ID NO: 98116 - DNA, 25 bp, Homo sapien
accccggtcctcacgacgtagtgat

SEQ ID NO: 98117 - DNA, 25 bp, Homo sapien
tccatacttgtgtcgaacggtgggt

SEQ ID NO: 98118 - DNA, 25 bp, Homo sapien
tccatacttgtgacgaacggtgggt

SEQ ID NO: 98119 - DNA, 25 bp, Homo sapien
gaatgtagttacactgacgtcggga

SEQ ID NO: 98120 - DNA, 25 bp, Homo sapien
gaatgtagttactctgacgtcggga

SEQ ID NO: 98121 - DNA, 25 bp, Homo sapien
ggagtgtagtcctgaagactcggaa

SEQ ID NO: 98122 - DNA, 25 bp, Homo sapien
ggagtgtagtccagaagactcggaa

SEQ ID NO: 98123 - DNA, 25 bp, Homo sapien
tctgagtgtctaacgaactacaaat

SEQ ID NO: 98124 - DNA, 25 bp, Homo sapien
tctgagtgtctatcgaactacaaat

SEQ ID NO: 98125 - DNA, 25 bp, Homo sapien
ttctacattgttgtacttacgaagt

SEQ ID NO: 98126 - DNA, 25 bp, Homo sapien
ttctacattgttctacttacgaagt

SEQ ID NO: 98127 - DNA, 25 bp, Homo sapien
agcgacttcacgtgtcacccgacgg

SEQ ID NO: 98128 - DNA, 25 bp, Homo sapien
agcgacttcacgagtcacccgacgg

SEQ ID NO: 98129 - DNA, 25 bp, Homo sapien
aacagagcccggactgctccgtagg

SEQ ID NO: 98130 - DNA, 25 bp, Homo sapien
aacagagcccggtctgctccgtagg

SEQ ID NO: 98131 - DNA, 25 bp, Homo sapien
gagccgaccggttagtcaccctagg

SEQ ID NO: 98132 - DNA, 25 bp, Homo sapien
gagccgaccggtaagtcaccctagg

SEQ ID NO: 98133 - DNA, 25 bp, Homo sapien
gttgacggtcatccatgcccgggat

SEQ ID NO: 98134 - DNA, 25 bp, Homo sapien
gttgacggtcatgcatgcccgggat

SEQ ID NO: 98135 - DNA, 25 bp, Homo sapien
tgagtacttgtcacagccgcgtgga

SEQ ID NO: 98136 - DNA, 25 bp, Homo sapien
tgagtacttgtctcagccgcgtgga

SEQ ID NO: 98137 - DNA, 25 bp, Homo sapien
gattcagacctagtttccggtgcga

SEQ ID NO: 98138 - DNA, 25 bp, Homo sapien
gattcagacctactttccggtgcga

SEQ ID NO: 98139 - DNA, 25 bp, Homo sapien
cagttgtaacttgatcctgtacgag

SEQ ID NO: 98140 - DNA, 25 bp, Homo sapien
cagttgtaacttcatcctgtacgag

SEQ ID NO: 98141 - DNA, 25 bp, Homo sapien
ttgagtatctatggtgtcattgaaa

SEQ ID NO: 98142 - DNA, 25 bp, Homo sapien
ttgagtatctatcgtgtcattgaaa

SEQ ID NO: 98143 - DNA, 25 bp, Homo sapien
gtttgacttcttgtcgaattcaaca

SEQ ID NO: 98144 - DNA, 25 bp, Homo sapien
gtttgacttcttctcgaattcaaca

SEQ ID NO: 98145 - DNA, 25 bp, Homo sapien
agaatcaatgacagacctcgaccac

SEQ ID NO: 98146 - DNA, 25 bp, Homo sapien
agaatcaatgactgacctcgaccac

SEQ ID NO: 98147 - DNA, 25 bp, Homo sapien
ctttacattaatctgacgcaatata

SEQ ID NO: 98148 - DNA, 25 bp, Homo sapien
ctttacattaatgtgacgcaatata

SEQ ID NO: 98149 - DNA, 25 bp, Homo sapien
cccttttacttaaaatcttatactt

SEQ ID NO: 98150 - DNA, 25 bp, Homo sapien
cccttttacttataatcttatactt

SEQ ID NO: 98151 - DNA, 25 bp, Homo sapien
ggtgttacttacacgactttatctt

SEQ ID NO: 98152 - DNA, 25 bp, Homo sapien
ggtgttacttactcgactttatctt

SEQ ID NO: 98153 - DNA, 25 bp, Homo sapien
tcacttcttgtctcactgttgacga

SEQ ID NO: 98154 - DNA, 25 bp, Homo sapien
tcacttcttgtcacactgttgacga

SEQ ID NO: 98155 - DNA, 25 bp, Homo sapien
cgtgttatactactacgattctgaa

SEQ ID NO: 98156 - DNA, 25 bp, Homo sapien
cgtgttatactagtacgattctgaa

SEQ ID NO: 98157 - DNA, 25 bp, Homo sapien
gtttcttaggtctcaggagtccgag

SEQ ID NO: 98158 - DNA, 25 bp, Homo sapien
gtttcttaggtcacaggagtccgag

SEQ ID NO: 98159 - DNA, 25 bp, Homo sapien
tccgtccggataagtacgacatctt

SEQ ID NO: 98160 - DNA, 25 bp, Homo sapien
tccgtccggatatgtacgacatctt

SEQ ID NO: 98161 - DNA, 25 bp, Homo sapien
gtggtcgacagtgagtctccccggt

SEQ ID NO: 98162 - DNA, 25 bp, Homo sapien
gtggtcgacagtcagtctccccggt

SEQ ID NO: 98163 - DNA, 25 bp, Homo sapien
gggagtgtgtacgagtccaccacac

SEQ ID NO: 98164 - DNA, 25 bp, Homo sapien
gggagtgtgtaccagtccaccacac

SEQ ID NO: 98165 - DNA, 25 bp, Homo sapien
gtaaagttgtacaaaccgaacctct

SEQ ID NO: 98166 - DNA, 25 bp, Homo sapien
gtaaagttgtactaaccgaacctct

SEQ ID NO: 98167 - DNA, 25 bp, Homo sapien
gtagaacgggacagagaaggtcatc

SEQ ID NO: 98168 - DNA, 25 bp, Homo sapien
gtagaacgggactgagaaggtcatc

SEQ ID NO: 98169 - DNA, 25 bp, Homo sapien
gacgtgccttctcagggggtactac

SEQ ID NO: 98170 - DNA, 25 bp, Homo sapien
gacgtgccttctgagggggtactac

SEQ ID NO: 98171 - DNA, 25 bp, Homo sapien
tctcgccgtgacgtgctacgcgtcc

SEQ ID NO: 98172 - DNA, 25 bp, Homo sapien
tctcgccgtgacctgctacgcgtcc

SEQ ID NO: 98173 - DNA, 25 bp, Homo sapien
tgcgtcccggtctggtaacgcgacg

SEQ ID NO: 98174 - DNA, 25 bp, Homo sapien
tgcgtcccggtcaggtaacgcgacg

SEQ ID NO: 98175 - DNA, 25 bp, Homo sapien
caaagggttcagtctatatgtccga

SEQ ID NO: 98176 - DNA, 25 bp, Homo sapien
caaagggttcagactatatgtccga

SEQ ID NO: 98177 - DNA, 25 bp, Homo sapien
cggaccagtcgaacgtcataactac

SEQ ID NO: 98178 - DNA, 25 bp, Homo sapien
cggaccagtcgatcgtcataactac

SEQ ID NO: 98179 - DNA, 25 bp, Homo sapien
aggtaccttactcacgtgtcgtaaa

SEQ ID NO: 98180 - DNA, 25 bp, Homo sapien
aggtaccttactgacgtgtcgtaaa

SEQ ID NO: 98181 - DNA, 25 bp, Homo sapien
cctacagccacaacaagagacacac

SEQ ID NO: 98182 - DNA, 25 bp, Homo sapien
cctacagccacatcaagagacacac

SEQ ID NO: 98183 - DNA, 25 bp, Homo sapien
tggaagtaccacccttgtcgaagac

SEQ ID NO: 98184 - DNA, 25 bp, Homo sapien
tggaagtaccacgcttgtcgaagac

SEQ ID NO: 98185 - DNA, 25 bp, Homo sapien
acctggacacttcacccgttggcaa

SEQ ID NO: 98186 - DNA, 25 bp, Homo sapien
acctggacacttgacccgttggcaa

SEQ ID NO: 98187 - DNA, 25 bp, Homo sapien
ggtcggaaactgtccgttgagtaaa

SEQ ID NO: 98188 - DNA, 25 bp, Homo sapien
ggtcggaaactgaccgttgagtaaa

SEQ ID NO: 98189 - DNA, 25 bp, Homo sapien
gtccaactctagacctcagggacat

SEQ ID NO: 98190 - DNA, 25 bp, Homo sapien
gtccaactctagtcctcagggacat

SEQ ID NO: 98191 - DNA, 25 bp, Homo sapien
ctctcactctatccagtcagggtca

SEQ ID NO: 98192 - DNA, 25 bp, Homo sapien
ctctcactctatgcagtcagggtca

SEQ ID NO: 98193 - DNA, 25 bp, Homo sapien
ccgacccatgaggtcgtacggaaac

SEQ ID NO: 98194 - DNA, 25 bp, Homo sapien
ccgacccatgagctcgtacggaaac

SEQ ID NO: 98195 - DNA, 25 bp, Homo sapien
ggagaccgaagtgaacggggtcaac

SEQ ID NO: 98196 - DNA, 25 bp, Homo sapien
ggagaccgaagtcaacggggtcaac

SEQ ID NO: 98197 - DNA, 25 bp, Homo sapien
gagaccgcgaggttctgcaacacac

SEQ ID NO: 98198 - DNA, 25 bp, Homo sapien
gagaccgcgaggatctgcaacacac

SEQ ID NO: 98199 - DNA, 25 bp, Homo sapien
tgtcactcaactctcaactctagta

SEQ ID NO: 98200 - DNA, 25 bp, Homo sapien
tgtcactcaactgtcaactctagta

SEQ ID NO: 98201 - DNA, 25 bp, Homo sapien
acactaacgactctacttaaccgta

SEQ ID NO: 98202 - DNA, 25 bp, Homo sapien
acactaacgactgtacttaaccgta

SEQ ID NO: 98203 - DNA, 25 bp, Homo sapien
gaaattaaaccgtagttaatactcg

SEQ ID NO: 98204 - DNA, 25 bp, Homo sapien
gaaattaaaccgaagttaatactcg

SEQ ID NO: 98205 - DNA, 25 bp, Homo sapien
ttttatgttggacgttggtctgtcc

SEQ ID NO: 98206 - DNA, 25 bp, Homo sapien
ttttatgttggaggttggtctgtcc

SEQ ID NO: 98207 - DNA, 25 bp, Homo sapien
agacagacaattgtaagtcagtcca

SEQ ID NO: 98208 - DNA, 25 bp, Homo sapien
agacagacaattctaagtcagtcca

SEQ ID NO: 98209 - DNA, 25 bp, Homo sapien
tagcgataaaaggtactcacttgct

SEQ ID NO: 98210 - DNA, 25 bp, Homo sapien
tagcgataaaagctactcacttgct

SEQ ID NO: 98211 - DNA, 25 bp, Homo sapien
tgcacgttttgtccgagatcgcaag

SEQ ID NO: 98212 - DNA, 25 bp, Homo sapien
tgcacgttttgtgcgagatcgcaag

SEQ ID NO: 98213 - DNA, 25 bp, Homo sapien
ctcgtgaggtcaactgtccacggaa

SEQ ID NO: 98214 - DNA, 25 bp, Homo sapien
ctcgtgaggtcatctgtccacggaa

SEQ ID NO: 98215 - DNA, 25 bp, Homo sapien
ctttcggtctcgtgtatacggttca

SEQ ID NO: 98216 - DNA, 25 bp, Homo sapien
ctttcggtctcgagtatacggttca

SEQ ID NO: 98217 - DNA, 25 bp, Homo sapien
tacctcataaatgaggtccctttag

SEQ ID NO: 98218 - DNA, 25 bp, Homo sapien
tacctcataaatcaggtccctttag

SEQ ID NO: 98219 - DNA, 25 bp, Homo sapien
tcgaccagggagagagcctcaggac

SEQ ID NO: 98220 - DNA, 25 bp, Homo sapien
tcgaccagggagtgagcctcaggac

SEQ ID NO: 98221 - DNA, 25 bp, Homo sapien
tgtgtcagggccttgaccttagggt

SEQ ID NO: 98222 - DNA, 25 bp, Homo sapien
tgtgtcagggccatgaccttagggt

SEQ ID NO: 98223 - DNA, 25 bp, Homo sapien
gtccgggactcaatcctccgatcgt

SEQ ID NO: 98224 - DNA, 25 bp, Homo sapien
gtccgggactcattcctccgatcgt

SEQ ID NO: 98225 - DNA, 25 bp, Homo sapien
gtctctctttggtctcgtcctctgt

SEQ ID NO: 98226 - DNA, 25 bp, Homo sapien
gtctctctttggactcgtcctctgt

SEQ ID NO: 98227 - DNA, 25 bp, Homo sapien
aacggttttttggtcctcttctggt

SEQ ID NO: 98228 - DNA, 25 bp, Homo sapien
aacggttttttgctcctcttctggt

SEQ ID NO: 98229 - DNA, 25 bp, Homo sapien
agggtgatctcgtccgacgtttgtg

SEQ ID NO: 98230 - DNA, 25 bp, Homo sapien
agggtgatctcgaccgacgtttgtg

SEQ ID NO: 98231 - DNA, 25 bp, Homo sapien
gacgcgggatcctcgcgcgccgccg

SEQ ID NO: 98232 - DNA, 25 bp, Homo sapien
gacgcgggatccacgcgcgccgccg

SEQ ID NO: 98233 - DNA, 25 bp, Homo sapien
tgggaggacaactccgtcgtgcccc

SEQ ID NO: 98234 - DNA, 25 bp, Homo sapien
tgggaggacaacaccgtcgtgcccc

SEQ ID NO: 98235 - DNA, 25 bp, Homo sapien
ggaccagacagacgtatggacgtca

SEQ ID NO: 98236 - DNA, 25 bp, Homo sapien
ggaccagacagaggtatggacgtca

SEQ ID NO: 98237 - DNA, 25 bp, Homo sapien
gttcgaggtcccagtctacactcca

SEQ ID NO: 98238 - DNA, 25 bp, Homo sapien
gttcgaggtccctgtctacactcca

SEQ ID NO: 98239 - DNA, 25 bp, Homo sapien
gtagggtgtccctctacagagacac

SEQ ID NO: 98240 - DNA, 25 bp, Homo sapien
gtagggtgtcccactacagagacac

SEQ ID NO: 98241 - DNA, 25 bp, Homo sapien
actaacttccctacgatgagagact

SEQ ID NO: 98242 - DNA, 25 bp, Homo sapien
actaacttcccttcgatgagagact

SEQ ID NO: 98243 - DNA, 25 bp, Homo sapien
ttctacctccggtgtcatagtgggt

SEQ ID NO: 98244 - DNA, 25 bp, Homo sapien
ttctacctccggagtcatagtgggt

SEQ ID NO: 98245 - DNA, 25 bp, Homo sapien
agagagatcccttgagacgtaggaa

SEQ ID NO: 98246 - DNA, 25 bp, Homo sapien
agagagatccctagagacgtaggaa

SEQ ID NO: 98247 - DNA, 25 bp, Homo sapien
atgtaggtgaagaaccacacagata

SEQ ID NO: 98248 - DNA, 25 bp, Homo sapien
atgtaggtgaagtaccacacagata

SEQ ID NO: 98249 - DNA, 25 bp, Homo sapien
aggtacggtaccttcactacactaa

SEQ ID NO: 98250 - DNA, 25 bp, Homo sapien
aggtacggtaccatcactacactaa

SEQ ID NO: 98251 - DNA, 25 bp, Homo sapien
tatagagtcatcgattatacaacga

SEQ ID NO: 98252 - DNA, 25 bp, Homo sapien
tatagagtcatccattatacaacga

SEQ ID NO: 98253 - DNA, 25 bp, Homo sapien
tcgggtcctaccttcactactgcta

SEQ ID NO: 98254 - DNA, 25 bp, Homo sapien
tcgggtcctaccatcactactgcta

SEQ ID NO: 98255 - DNA, 25 bp, Homo sapien
tccccgtgtctcctctttcttgggt

SEQ ID NO: 98256 - DNA, 25 bp, Homo sapien
tccccgtgtctcgtctttcttgggt

SEQ ID NO: 98257 - DNA, 25 bp, Homo sapien
cagggtgtctacgtttttatgacat

SEQ ID NO: 98258 - DNA, 25 bp, Homo sapien
cagggtgtctacctttttatgacat

SEQ ID NO: 98259 - DNA, 25 bp, Homo sapien
tcccttttggtggatatatgttact

SEQ ID NO: 98260 - DNA, 25 bp, Homo sapien
tcccttttggtgcatatatgttact

SEQ ID NO: 98261 - DNA, 25 bp, Homo sapien
actagtggtggtgtaactattcgac

SEQ ID NO: 98262 - DNA, 25 bp, Homo sapien
actagtggtggtctaactattcgac

SEQ ID NO: 98263 - DNA, 25 bp, Homo sapien
ctttaacttttgtttatattatcat

SEQ ID NO: 98264 - DNA, 25 bp, Homo sapien
ctttaacttttgattatattatcat

SEQ ID NO: 98265 - DNA, 25 bp, Homo sapien
ctaggactttttgatatcttgtcat

SEQ ID NO: 98266 - DNA, 25 bp, Homo sapien
ctaggactttttcatatcttgtcat

SEQ ID NO: 98267 - DNA, 25 bp, Homo sapien
gtctacatggtttacattttgtcac

SEQ ID NO: 98268 - DNA, 25 bp, Homo sapien
gtctacatggttaacattttgtcac

SEQ ID NO: 98269 - DNA, 25 bp, Homo sapien
tagtgagaagtccaaatcgaatgtc

SEQ ID NO: 98270 - DNA, 25 bp, Homo sapien
tagtgagaagtcgaaatcgaatgtc

SEQ ID NO: 98271 - DNA, 25 bp, Homo sapien
cttgagtaatcaatattcacaggac

SEQ ID NO: 98272 - DNA, 25 bp, Homo sapien
cttgagtaatcattattcacaggac

SEQ ID NO: 98273 - DNA, 25 bp, Homo sapien
tgttggtgatactcattcatcgaag

SEQ ID NO: 98274 - DNA, 25 bp, Homo sapien
tgttggtgatacacattcatcgaag

SEQ ID NO: 98275 - DNA, 25 bp, Homo sapien
tgacggactgtacattttgtacacg

SEQ ID NO: 98276 - DNA, 25 bp, Homo sapien
tgacggactgtagattttgtacacg

SEQ ID NO: 98277 - DNA, 25 bp, Homo sapien
tgtccgtttccgttgattgaaatct

SEQ ID NO: 98278 - DNA, 25 bp, Homo sapien
tgtccgtttccgatgattgaaatct

SEQ ID NO: 98279 - DNA, 25 bp, Homo sapien
ttcctctgtgtcacccgaaggctct

SEQ ID NO: 98280 - DNA, 25 bp, Homo sapien
ttcctctgtgtctcccgaaggctct

SEQ ID NO: 98281 - DNA, 25 bp, Homo sapien
tttcccagggctcaccatgtagcag

SEQ ID NO: 98282 - DNA, 25 bp, Homo sapien
tttcccagggctgaccatgtagcag

SEQ ID NO: 98283 - DNA, 25 bp, Homo sapien
gacgaagaggtcaccgagtgtgaat

SEQ ID NO: 98284 - DNA, 25 bp, Homo sapien
gacgaagaggtctccgagtgtgaat

SEQ ID NO: 98285 - DNA, 25 bp, Homo sapien
acgatagacggaaggtccggtgaca

SEQ ID NO: 98286 - DNA, 25 bp, Homo sapien
acgatagacggatggtccggtgaca

SEQ ID NO: 98287 - DNA, 25 bp, Homo sapien
cggagtacccggtggtgcgtccaca

SEQ ID NO: 98288 - DNA, 25 bp, Homo sapien
cggagtacccggaggtgcgtccaca

SEQ ID NO: 98289 - DNA, 25 bp, Homo sapien
gggacctcgtcgacggaggccttac

SEQ ID NO: 98290 - DNA, 25 bp, Homo sapien
gggacctcgtcgtcggaggccttac

SEQ ID NO: 98291 - DNA, 25 bp, Homo sapien
cagttacaccttctcgaccggtcaa

SEQ ID NO: 98292 - DNA, 25 bp, Homo sapien
cagttacaccttgtcgaccggtcaa

SEQ ID NO: 98293 - DNA, 25 bp, Homo sapien
aggtacaggtcctcgagtaggtgca

SEQ ID NO: 98294 - DNA, 25 bp, Homo sapien
aggtacaggtccacgagtaggtgca

SEQ ID NO: 98295 - DNA, 25 bp, Homo sapien
attccgtgatcgagaaggactcgtg

SEQ ID NO: 98296 - DNA, 25 bp, Homo sapien
attccgtgatcgtgaaggactcgtg

SEQ ID NO: 98297 - DNA, 25 bp, Homo sapien
aaaccgtaagagtcataagtacctt

SEQ ID NO: 98298 - DNA, 25 bp, Homo sapien
aaaccgtaagagacataagtacctt

SEQ ID NO: 98299 - DNA, 25 bp, Homo sapien
acctagaagatcgactcggactacg

SEQ ID NO: 98300 - DNA, 25 bp, Homo sapien
acctagaagatccactcggactacg

SEQ ID NO: 98301 - DNA, 25 bp, Homo sapien
agacgagtcgagtccccgtcgtcct

SEQ ID NO: 98302 - DNA, 25 bp, Homo sapien
agacgagtcgagaccccgtcgtcct

SEQ ID NO: 98303 - DNA, 25 bp, Homo sapien
tttcgcaccgacacaactcgtcttg

SEQ ID NO: 98304 - DNA, 25 bp, Homo sapien
tttcgcaccgactcaactcgtcttg

SEQ ID NO: 98305 - DNA, 25 bp, Homo sapien
ataaggaaagtacctaataagttcc

SEQ ID NO: 98306 - DNA, 25 bp, Homo sapien
ataaggaaagtagctaataagttcc

SEQ ID NO: 98307 - DNA, 25 bp, Homo sapien
ggtagaaacaacgattacacttcac

SEQ ID NO: 98308 - DNA, 25 bp, Homo sapien
ggtagaaacaaccattacacttcac

SEQ ID NO: 98309 - DNA, 25 bp, Homo sapien
gacgaggaccggacattcctccgct

SEQ ID NO: 98310 - DNA, 25 bp, Homo sapien
gacgaggaccggtcattcctccgct

SEQ ID NO: 98311 - DNA, 25 bp, Homo sapien
aggacacactggtcgtccttggggt

SEQ ID NO: 98312 - DNA, 25 bp, Homo sapien
aggacacactggacgtccttggggt

SEQ ID NO: 98313 - DNA, 25 bp, Homo sapien
tgagatccctagttccatatggggt

SEQ ID NO: 98314 - DNA, 25 bp, Homo sapien
tgagatccctagatccatatggggt

SEQ ID NO: 98315 - DNA, 25 bp, Homo sapien
aaaactccctagtcccttggtgact

SEQ ID NO: 98316 - DNA, 25 bp, Homo sapien
aaaactccctagacccttggtgact

SEQ ID NO: 98317 - DNA, 25 bp, Homo sapien
agtctcctgtgtaccctgagacgta

SEQ ID NO: 98318 - DNA, 25 bp, Homo sapien
agtctcctgtgttccctgagacgta

SEQ ID NO: 98319 - DNA, 25 bp, Homo sapien
taagataatcggttcacggtggaca

SEQ ID NO: 98320 - DNA, 25 bp, Homo sapien
taagataatcggatcacggtggaca

SEQ ID NO: 98321 - DNA, 25 bp, Homo sapien
agagtgacaccggtgtgaggaaaca

SEQ ID NO: 98322 - DNA, 25 bp, Homo sapien
agagtgacaccgctgtgaggaaaca

SEQ ID NO: 98323 - DNA, 25 bp, Homo sapien
actaacggattctcggggacgaaca

SEQ ID NO: 98324 - DNA, 25 bp, Homo sapien
actaacggattcacggggacgaaca

SEQ ID NO: 98325 - DNA, 25 bp, Homo sapien
agtatttagaactctcagaacagga

SEQ ID NO: 98326 - DNA, 25 bp, Homo sapien
agtatttagaacactcagaacagga

SEQ ID NO: 98327 - DNA, 25 bp, Homo sapien
gggacttaaggaaacacaaacaatg

SEQ ID NO: 98328 - DNA, 25 bp, Homo sapien
gggacttaaggatacacaaacaatg

SEQ ID NO: 98329 - DNA, 25 bp, Homo sapien
cctcttctagggtataaaccgattc

SEQ ID NO: 98330 - DNA, 25 bp, Homo sapien
cctcttctagggaataaaccgattc

SEQ ID NO: 98331 - DNA, 25 bp, Homo sapien
cttaatctcgcgaacgtactaaatg

SEQ ID NO: 98332 - DNA, 25 bp, Homo sapien
cttaatctcgcgtacgtactaaatg

SEQ ID NO: 98333 - DNA, 25 bp, Homo sapien
agggagagtatctcagactaggaca

SEQ ID NO: 98334 - DNA, 25 bp, Homo sapien
agggagagtatcacagactaggaca

SEQ ID NO: 98335 - DNA, 25 bp, Homo sapien
gccgtgtaaaatttgtactaatcct

SEQ ID NO: 98336 - DNA, 25 bp, Homo sapien
gccgtgtaaaatatgtactaatcct

SEQ ID NO: 98337 - DNA, 25 bp, Homo sapien
tccgattaatagttctgtcagttga

SEQ ID NO: 98338 - DNA, 25 bp, Homo sapien
tccgattaatagatctgtcagttga

SEQ ID NO: 98339 - DNA, 25 bp, Homo sapien
gtcttggttaaatccgttttactct

SEQ ID NO: 98340 - DNA, 25 bp, Homo sapien
gtcttggttaaaaccgttttactct

SEQ ID NO: 98341 - DNA, 25 bp, Homo sapien
agtcctttgtctctgtgtcaccggc

SEQ ID NO: 98342 - DNA, 25 bp, Homo sapien
agtcctttgtctgtgtgtcaccggc

SEQ ID NO: 98343 - DNA, 25 bp, Homo sapien
agctctcctcctttttaccgtcggt

SEQ ID NO: 98344 - DNA, 25 bp, Homo sapien
agctctcctcctatttaccgtcggt

SEQ ID NO: 98345 - DNA, 25 bp, Homo sapien
cctgagtcctcctctacgactaagt

SEQ ID NO: 98346 - DNA, 25 bp, Homo sapien
cctgagtcctccactacgactaagt

SEQ ID NO: 98347 - DNA, 25 bp, Homo sapien
gtgtaacgagtgtcactcgaagtgt

SEQ ID NO: 98348 - DNA, 25 bp, Homo sapien
gtgtaacgagtgacactcgaagtgt

SEQ ID NO: 98349 - DNA, 25 bp, Homo sapien
aacttaagacgatgtgtcctgattt

SEQ ID NO: 98350 - DNA, 25 bp, Homo sapien
aacttaagacgaagtgtcctgattt

SEQ ID NO: 98351 - DNA, 25 bp, Homo sapien
gtatatcgatacaagtcactgattt

SEQ ID NO: 98352 - DNA, 25 bp, Homo sapien
gtatatcgatactagtcactgattt

SEQ ID NO: 98353 - DNA, 25 bp, Homo sapien
tgttacacctcttaagtcgtgtttt

SEQ ID NO: 98354 - DNA, 25 bp, Homo sapien
tgttacacctctaaagtcgtgtttt

SEQ ID NO: 98355 - DNA, 25 bp, Homo sapien
ctgtagaggtgctgatcagtatgac

SEQ ID NO: 98356 - DNA, 25 bp, Homo sapien
ctgtagaggtgcagatcagtatgac

SEQ ID NO: 98357 - DNA, 25 bp, Homo sapien
cgagttagatgttgaagtcagcacc

SEQ ID NO: 98358 - DNA, 25 bp, Homo sapien
cgagttagatgtagaagtcagcacc

SEQ ID NO: 98359 - DNA, 25 bp, Homo sapien
gagtaagagtgaggaggacctccct

SEQ ID NO: 98360 - DNA, 25 bp, Homo sapien
gagtaagagtgacgaggacctccct

SEQ ID NO: 98361 - DNA, 25 bp, Homo sapien
ggtacggcgtctctggcgcgtccac

SEQ ID NO: 98362 - DNA, 25 bp, Homo sapien
ggtacggcgtctgtggcgcgtccac

SEQ ID NO: 98363 - DNA, 25 bp, Homo sapien
acagggcgacgggggcggtctcgac

SEQ ID NO: 98364 - DNA, 25 bp, Homo sapien
acagggcgacggcggcggtctcgac

SEQ ID NO: 98365 - DNA, 25 bp, Homo sapien
tgtgttaggacgtactttacctagg

SEQ ID NO: 98366 - DNA, 25 bp, Homo sapien
tgtgttaggacgaactttacctagg

SEQ ID NO: 98367 - DNA, 25 bp, Homo sapien
cacggaggtacgacctgacgtctgc

SEQ ID NO: 98368 - DNA, 25 bp, Homo sapien
cacggaggtacgtcctgacgtctgc

SEQ ID NO: 98369 - DNA, 25 bp, Homo sapien
ttacctgagacgtccggtgcgtacc

SEQ ID NO: 98370 - DNA, 25 bp, Homo sapien
ttacctgagacgaccggtgcgtacc

SEQ ID NO: 98371 - DNA, 25 bp, Homo sapien
cacgtagttttctcggtttctacct

SEQ ID NO: 98372 - DNA, 25 bp, Homo sapien
cacgtagttttcacggtttctacct

SEQ ID NO: 98373 - DNA, 25 bp, Homo sapien
gttccctgtgaaaacattccagtct

SEQ ID NO: 98374 - DNA, 25 bp, Homo sapien
gttccctgtgaatacattccagtct

SEQ ID NO: 98375 - DNA, 25 bp, Homo sapien
cgtgaccttagcactctgtttccat

SEQ ID NO: 98376 - DNA, 25 bp, Homo sapien
cgtgaccttagctctctgtttccat

SEQ ID NO: 98377 - DNA, 25 bp, Homo sapien
gtctaaagtctaatccgtttgtcaa

SEQ ID NO: 98378 - DNA, 25 bp, Homo sapien
gtctaaagtctattccgtttgtcaa

SEQ ID NO: 98379 - DNA, 25 bp, Homo sapien
gacgaagggatctcgtttcgtcaac

SEQ ID NO: 98380 - DNA, 25 bp, Homo sapien
gacgaagggatcacgtttcgtcaac

SEQ ID NO: 98381 - DNA, 25 bp, Homo sapien
tccgaggatcgttatctttttcaaa

SEQ ID NO: 98382 - DNA, 25 bp, Homo sapien
tccgaggatcgtaatctttttcaaa

SEQ ID NO: 98383 - DNA, 25 bp, Homo sapien
gcaaggttctcgtagttgaccagta

SEQ ID NO: 98384 - DNA, 25 bp, Homo sapien
gcaaggttctcgaagttgaccagta

SEQ ID NO: 98385 - DNA, 25 bp, Homo sapien
gtaagtcagtcgacttctacctaac

SEQ ID NO: 98386 - DNA, 25 bp, Homo sapien
gtaagtcagtcgtcttctacctaac

SEQ ID NO: 98387 - DNA, 25 bp, Homo sapien
gttggcttcatctccgttaccacta

SEQ ID NO: 98388 - DNA, 25 bp, Homo sapien
gttggcttcatcaccgttaccacta

SEQ ID NO: 98389 - DNA, 25 bp, Homo sapien
ctcccttctgttacctctgtgacag

SEQ ID NO: 98390 - DNA, 25 bp, Homo sapien
ctcccttctgtttcctctgtgacag

SEQ ID NO: 98391 - DNA, 25 bp, Homo sapien
tcctcactggggttccggagttggt

SEQ ID NO: 98392 - DNA, 25 bp, Homo sapien
tcctcactggggatccggagttggt

SEQ ID NO: 98393 - DNA, 25 bp, Homo sapien
gtttcatgtggaggtcccggtccgc

SEQ ID NO: 98394 - DNA, 25 bp, Homo sapien
gtttcatgtggacgtcccggtccgc

SEQ ID NO: 98395 - DNA, 25 bp, Homo sapien
gttccggtgaaggtctcccaacacc

SEQ ID NO: 98396 - DNA, 25 bp, Homo sapien
gttccggtgaagctctcccaacacc

SEQ ID NO: 98397 - DNA, 25 bp, Homo sapien
tctcggcaaccttgtcagagaatct

SEQ ID NO: 98398 - DNA, 25 bp, Homo sapien
tctcggcaacctagtcagagaatct

SEQ ID NO: 98399 - DNA, 25 bp, Homo sapien
gtagtagcccctatcgagaagaggt

SEQ ID NO: 98400 - DNA, 25 bp, Homo sapien
gtagtagcccctttcgagaagaggt

SEQ ID NO: 98401 - DNA, 25 bp, Homo sapien
taagagaccttggtctcgaggaagg

SEQ ID NO: 98402 - DNA, 25 bp, Homo sapien
taagagaccttgctctcgaggaagg

SEQ ID NO: 98403 - DNA, 25 bp, Homo sapien
ttaggtcacattcttctaggtaaag

SEQ ID NO: 98404 - DNA, 25 bp, Homo sapien
ttaggtcacattgttctaggtaaag

SEQ ID NO: 98405 - DNA, 25 bp, Homo sapien
ttaggtgctgtttttccggtgtcac

SEQ ID NO: 98406 - DNA, 25 bp, Homo sapien
ttaggtgctgttattccggtgtcac

SEQ ID NO: 98407 - DNA, 25 bp, Homo sapien
acaagttacgatatgactcatgacc

SEQ ID NO: 98408 - DNA, 25 bp, Homo sapien
acaagttacgatttgactcatgacc

SEQ ID NO: 98409 - DNA, 25 bp, Homo sapien
taccagaagacttgggtcaggacct

SEQ ID NO: 98410 - DNA, 25 bp, Homo sapien
taccagaagactagggtcaggacct

SEQ ID NO: 98411 - DNA, 25 bp, Homo sapien
gatttcttctttgaagactcgacat

SEQ ID NO: 98412 - DNA, 25 bp, Homo sapien
gatttcttctttcaagactcgacat

SEQ ID NO: 98413 - DNA, 25 bp, Homo sapien
actcggcactcttgcgacaaaacac

SEQ ID NO: 98414 - DNA, 25 bp, Homo sapien
actcggcactctagcgacaaaacac

SEQ ID NO: 98415 - DNA, 25 bp, Homo sapien
taatgaatctataaaacattaagac

SEQ ID NO: 98416 - DNA, 25 bp, Homo sapien
taatgaatctattaaacattaagac

SEQ ID NO: 98417 - DNA, 25 bp, Homo sapien
agacaaaatctccacggagatcaaa

SEQ ID NO: 98418 - DNA, 25 bp, Homo sapien
agacaaaatctcgacggagatcaaa

SEQ ID NO: 98419 - DNA, 25 bp, Homo sapien
gacagaaacttagagaaaccgttca

SEQ ID NO: 98420 - DNA, 25 bp, Homo sapien
gacagaaacttacagaaaccgttca

SEQ ID NO: 98421 - DNA, 25 bp, Homo sapien
tcagtaagaccgtgaaaacctatca

SEQ ID NO: 98422 - DNA, 25 bp, Homo sapien
tcagtaagaccgagaaaacctatca

SEQ ID NO: 98423 - DNA, 25 bp, Homo sapien
acgtgtagacctgtatcaaccttcc

SEQ ID NO: 98424 - DNA, 25 bp, Homo sapien
acgtgtagacctctatcaaccttcc

SEQ ID NO: 98425 - DNA, 25 bp, Homo sapien
agggacccactctgagtagtcctcc

SEQ ID NO: 98426 - DNA, 25 bp, Homo sapien
agggacccactcagagtagtcctcc

SEQ ID NO: 98427 - DNA, 25 bp, Homo sapien
gattgcgctcaagacgtctctttac

SEQ ID NO: 98428 - DNA, 25 bp, Homo sapien
gattgcgctcaacacgtctctttac

SEQ ID NO: 98429 - DNA, 25 bp, Homo sapien
tagtaatcctcaatggttctaagac

SEQ ID NO: 98430 - DNA, 25 bp, Homo sapien
tagtaatcctcattggttctaagac

SEQ ID NO: 98431 - DNA, 25 bp, Homo sapien
ctgtttgcacctccatcgcctagag

SEQ ID NO: 98432 - DNA, 25 bp, Homo sapien
ctgtttgcacctgcatcgcctagag

SEQ ID NO: 98433 - DNA, 25 bp, Homo sapien
ctccctatcgatgctcggtactgta

SEQ ID NO: 98434 - DNA, 25 bp, Homo sapien
ctccctatcgatcctcggtactgta

SEQ ID NO: 98435 - DNA, 25 bp, Homo sapien
ctcctctcttgatgtgactttagtt

SEQ ID NO: 98436 - DNA, 25 bp, Homo sapien
ctcctctcttgaagtgactttagtt

SEQ ID NO: 98437 - DNA, 25 bp, Homo sapien
cgtcgacgtttattagtcttcggtt

SEQ ID NO: 98438 - DNA, 25 bp, Homo sapien
cgtcgacgtttaatagtcttcggtt

SEQ ID NO: 98439 - DNA, 25 bp, Homo sapien
gaccgtctcgtgaaccttacccatt

SEQ ID NO: 98440 - DNA, 25 bp, Homo sapien
gaccgtctcgtgtaccttacccatt

SEQ ID NO: 98441 - DNA, 25 bp, Homo sapien
cggtgctgttatttctactagaaat

SEQ ID NO: 98442 - DNA, 25 bp, Homo sapien
cggtgctgttatatctactagaaat

SEQ ID NO: 98443 - DNA, 25 bp, Homo sapien
ggtatttctacgttctataaaacga

SEQ ID NO: 98444 - DNA, 25 bp, Homo sapien
ggtatttctacgatctataaaacga

SEQ ID NO: 98445 - DNA, 25 bp, Homo sapien
agataggacgatggaccaaacaaca

SEQ ID NO: 98446 - DNA, 25 bp, Homo sapien
agataggacgatcgaccaaacaaca

SEQ ID NO: 98447 - DNA, 25 bp, Homo sapien
gaacgagaataattgcgtcaaaacc

SEQ ID NO: 98448 - DNA, 25 bp, Homo sapien
gaacgagaataaatgcgtcaaaacc

SEQ ID NO: 98449 - DNA, 25 bp, Homo sapien
gaggaattaaacagtcaaacaccct

SEQ ID NO: 98450 - DNA, 25 bp, Homo sapien
gaggaattaaactgtcaaacaccct

SEQ ID NO: 98451 - DNA, 25 bp, Homo sapien
tgtttacttcaaggtcaaacccacg

SEQ ID NO: 98452 - DNA, 25 bp, Homo sapien
tgtttacttcaacgtcaaacccacg

SEQ ID NO: 98453 - DNA, 25 bp, Homo sapien
ttcgtccaaataaccagcccgacga

SEQ ID NO: 98454 - DNA, 25 bp, Homo sapien
ttcgtccaaatatccagcccgacga

SEQ ID NO: 98455 - DNA, 25 bp, Homo sapien
atcccccgggagctctgatctcagg

SEQ ID NO: 98456 - DNA, 25 bp, Homo sapien
atcccccgggaggtctgatctcagg

SEQ ID NO: 98457 - DNA, 25 bp, Homo sapien
ctctcaactaaagtgtgacttccgg

SEQ ID NO: 98458 - DNA, 25 bp, Homo sapien
ctctcaactaaactgtgacttccgg

SEQ ID NO: 98459 - DNA, 25 bp, Homo sapien
gagtctgtgatgagccttggaccac

SEQ ID NO: 98460 - DNA, 25 bp, Homo sapien
gagtctgtgatgtgccttggaccac

SEQ ID NO: 98461 - DNA, 25 bp, Homo sapien
gaggtgtgaccgttttcaaggctcc

SEQ ID NO: 98462 - DNA, 25 bp, Homo sapien
gaggtgtgaccgatttcaaggctcc

SEQ ID NO: 98463 - DNA, 25 bp, Homo sapien
taggagggaaagacacctactccgc

SEQ ID NO: 98464 - DNA, 25 bp, Homo sapien
taggagggaaagtcacctactccgc

SEQ ID NO: 98465 - DNA, 25 bp, Homo sapien
gtgtgtggatcaaccaccacttaac

SEQ ID NO: 98466 - DNA, 25 bp, Homo sapien
gtgtgtggatcatccaccacttaac

SEQ ID NO: 98467 - DNA, 25 bp, Homo sapien
gggtgtgaacatctctgactgaagt

SEQ ID NO: 98468 - DNA, 25 bp, Homo sapien
gggtgtgaacatgtctgactgaagt

SEQ ID NO: 98469 - DNA, 25 bp, Homo sapien
caaggttatcatggtctgttaaact

SEQ ID NO: 98470 - DNA, 25 bp, Homo sapien
caaggttatcatcgtctgttaaact

SEQ ID NO: 98471 - DNA, 25 bp, Homo sapien
aaactgtagaacttccgaaagaacc

SEQ ID NO: 98472 - DNA, 25 bp, Homo sapien
aaactgtagaacatccgaaagaacc

SEQ ID NO: 98473 - DNA, 25 bp, Homo sapien
taaactgtagaacttccgaaagaac

SEQ ID NO: 98474 - DNA, 25 bp, Homo sapien
taaactgtagaagttccgaaagaac

SEQ ID NO: 98475 - DNA, 25 bp, Homo sapien
gagaatgtccactgaccgaacctcc

SEQ ID NO: 98476 - DNA, 25 bp, Homo sapien
gagaatgtccacagaccgaacctcc

SEQ ID NO: 98477 - DNA, 25 bp, Homo sapien
tcatttccggtaaactacatagccg

SEQ ID NO: 98478 - DNA, 25 bp, Homo sapien
tcatttccggtatactacatagccg

SEQ ID NO: 98479 - DNA, 25 bp, Homo sapien
tcatctttctgtttgtcatagccgt

SEQ ID NO: 98480 - DNA, 25 bp, Homo sapien
tcatctttctgtatgtcatagccgt

SEQ ID NO: 98481 - DNA, 25 bp, Homo sapien
aacgggtctttctcctgtgagaccc

SEQ ID NO: 98482 - DNA, 25 bp, Homo sapien
aacgggtctttcacctgtgagaccc

SEQ ID NO: 98483 - DNA, 25 bp, Homo sapien
accacgaattactccagtaagaagg

SEQ ID NO: 98484 - DNA, 25 bp, Homo sapien
accacgaattacaccagtaagaagg

SEQ ID NO: 98485 - DNA, 25 bp, Homo sapien
aatacctacaagtcccggggaaccg

SEQ ID NO: 98486 - DNA, 25 bp, Homo sapien
aatacctacaagacccggggaaccg

SEQ ID NO: 98487 - DNA, 25 bp, Homo sapien
agtaaccaaacttccggtccgaaag

SEQ ID NO: 98488 - DNA, 25 bp, Homo sapien
agtaaccaaactaccggtccgaaag

SEQ ID NO: 98489 - DNA, 25 bp, Homo sapien
gaggtaactcccaacgatcaccaat

SEQ ID NO: 98490 - DNA, 25 bp, Homo sapien
gaggtaactccctacgatcaccaat

SEQ ID NO: 98491 - DNA, 25 bp, Homo sapien
gggttatacccctagtattacttaa

SEQ ID NO: 98492 - DNA, 25 bp, Homo sapien
gggttataccccaagtattacttaa

SEQ ID NO: 98493 - DNA, 25 bp, Homo sapien
cgaagatcagcctcgacagatcaag

SEQ ID NO: 98494 - DNA, 25 bp, Homo sapien
cgaagatcagccacgacagatcaag

SEQ ID NO: 98495 - DNA, 25 bp, Homo sapien
ggagatcccttatgtcgaagtccag

SEQ ID NO: 98496 - DNA, 25 bp, Homo sapien
ggagatcccttaagtcgaagtccag

SEQ ID NO: 98497 - DNA, 25 bp, Homo sapien
gactctaccgactttgtagaccccg

SEQ ID NO: 98498 - DNA, 25 bp, Homo sapien
gactctaccgacattgtagaccccg

SEQ ID NO: 98499 - DNA, 25 bp, Homo sapien
gagttactgtacattacttgtccct

SEQ ID NO: 98500 - DNA, 25 bp, Homo sapien
gagttactgtactttacttgtccct

SEQ ID NO: 98501 - DNA, 25 bp, Homo sapien
gatgtattcaactttgtcttgtatc

SEQ ID NO: 98502 - DNA, 25 bp, Homo sapien
gatgtattcaacattgtcttgtatc

SEQ ID NO: 98503 - DNA, 25 bp, Homo sapien
ggtttaggaccttggtatgtagtcc

SEQ ID NO: 98504 - DNA, 25 bp, Homo sapien
ggtttaggacctaggtatgtagtcc

SEQ ID NO: 98505 - DNA, 25 bp, Homo sapien
tattaggtcccttagtatttagtac

SEQ ID NO: 98506 - DNA, 25 bp, Homo sapien
tattaggtccctaagtatttagtac

SEQ ID NO: 98507 - DNA, 25 bp, Homo sapien
cctttggggtctaagtagttcctat

SEQ ID NO: 98508 - DNA, 25 bp, Homo sapien
cctttggggtcttagtagttcctat

SEQ ID NO: 98509 - DNA, 25 bp, Homo sapien
tgtccagtgttctgaaaccgtctct

SEQ ID NO: 98510 - DNA, 25 bp, Homo sapien
tgtccagtgttcagaaaccgtctct

SEQ ID NO: 98511 - DNA, 25 bp, Homo sapien
aattgcaccggacaatcctagtctc

SEQ ID NO: 98512 - DNA, 25 bp, Homo sapien
aattgcaccggagaatcctagtctc

SEQ ID NO: 98513 - DNA, 25 bp, Homo sapien
aacttgtcggggtccctccgttaac

SEQ ID NO: 98514 - DNA, 25 bp, Homo sapien
aacttgtcggggaccctccgttaac

SEQ ID NO: 98515 - DNA, 25 bp, Homo sapien
gaggggagaagttccccagatgtac

SEQ ID NO: 98516 - DNA, 25 bp, Homo sapien
gaggggagaagtaccccagatgtac

SEQ ID NO: 98517 - DNA, 25 bp, Homo sapien
cacaccacgaggtcgtgtgggaccc

SEQ ID NO: 98518 - DNA, 25 bp, Homo sapien
cacaccacgaggacgtgtgggaccc

SEQ ID NO: 98519 - DNA, 25 bp, Homo sapien
tcgaacccagaaacactgtcttcca

SEQ ID NO: 98520 - DNA, 25 bp, Homo sapien
tcgaacccagaatcactgtcttcca

SEQ ID NO: 98521 - DNA, 25 bp, Homo sapien
gacacgaccaagaccggaccttaca

SEQ ID NO: 98522 - DNA, 25 bp, Homo sapien
gacacgaccaagtccggaccttaca

SEQ ID NO: 98523 - DNA, 25 bp, Homo sapien
gacgccccgacgattccgcagtgga

SEQ ID NO: 98524 - DNA, 25 bp, Homo sapien
gacgccccgacgtttccgcagtgga

SEQ ID NO: 98525 - DNA, 25 bp, Homo sapien
ctcgacagcgagtgaaccagccact

SEQ ID NO: 98526 - DNA, 25 bp, Homo sapien
ctcgacagcgagagaaccagccact

SEQ ID NO: 98527 - DNA, 25 bp, Homo sapien
cttttaagataggtgatggatccct

SEQ ID NO: 98528 - DNA, 25 bp, Homo sapien
cttttaagatagctgatggatccct

SEQ ID NO: 98529 - DNA, 25 bp, Homo sapien
tacaaggatcttaacagtatacggt

SEQ ID NO: 98530 - DNA, 25 bp, Homo sapien
tacaaggatctttacagtatacggt

SEQ ID NO: 98531 - DNA, 25 bp, Homo sapien
agatccccagtccagttttgacagg

SEQ ID NO: 98532 - DNA, 25 bp, Homo sapien
agatccccagtcgagttttgacagg

SEQ ID NO: 98533 - DNA, 25 bp, Homo sapien
gagtgacgccttagtggttcctccc

SEQ ID NO: 98534 - DNA, 25 bp, Homo sapien
gagtgacgcctttgtggttcctccc

SEQ ID NO: 98535 - DNA, 25 bp, Homo sapien
gagtcgtacttctgtttcagtcccg

SEQ ID NO: 98536 - DNA, 25 bp, Homo sapien
gagtcgtacttcagtttcagtcccg

SEQ ID NO: 98537 - DNA, 25 bp, Homo sapien
gtgtgtcgtccttggtcaggtgtcc

SEQ ID NO: 98538 - DNA, 25 bp, Homo sapien
gtgtgtcgtcctaggtcaggtgtcc

SEQ ID NO: 98539 - DNA, 25 bp, Homo sapien
tctcgcggctcgaccggaggtacct

SEQ ID NO: 98540 - DNA, 25 bp, Homo sapien
tctcgcggctcgtccggaggtacct

SEQ ID NO: 98541 - DNA, 25 bp, Homo sapien
tagttccggggtagcgagagactct

SEQ ID NO: 98542 - DNA, 25 bp, Homo sapien
tagttccggggttgcgagagactct

SEQ ID NO: 98543 - DNA, 25 bp, Homo sapien
tatgtcccgggtcacctgaacagtg

SEQ ID NO: 98544 - DNA, 25 bp, Homo sapien
tatgtcccgggtgacctgaacagtg

SEQ ID NO: 98545 - DNA, 25 bp, Homo sapien
aaactgacagaagaggtgttacctg

SEQ ID NO: 98546 - DNA, 25 bp, Homo sapien
aaactgacagaacaggtgttacctg

SEQ ID NO: 98547 - DNA, 25 bp, Homo sapien
cactcatgaacctcagtggttcctc

SEQ ID NO: 98548 - DNA, 25 bp, Homo sapien
cactcatgaaccacagtggttcctc

SEQ ID NO: 98549 - DNA, 25 bp, Homo sapien
cttctccgtgacagtgttcgcagtc

SEQ ID NO: 98550 - DNA, 25 bp, Homo sapien
cttctccgtgactgtgttcgcagtc

SEQ ID NO: 98551 - DNA, 25 bp, Homo sapien
aggtgtcactcctactattccgctc

SEQ ID NO: 98552 - DNA, 25 bp, Homo sapien
aggtgtcactccaactattccgctc

SEQ ID NO: 98553 - DNA, 25 bp, Homo sapien
ctttgtgtccgttccacgacggctc

SEQ ID NO: 98554 - DNA, 25 bp, Homo sapien
ctttgtgtccgtaccacgacggctc

SEQ ID NO: 98555 - DNA, 25 bp, Homo sapien
tggcctggggacacgaccagtttgt

SEQ ID NO: 98556 - DNA, 25 bp, Homo sapien
tggcctggggactcgaccagtttgt

SEQ ID NO: 98557 - DNA, 25 bp, Homo sapien
acagtcggttcttcacccacatcgt

SEQ ID NO: 98558 - DNA, 25 bp, Homo sapien
acagtcggttctacacccacatcgt

SEQ ID NO: 98559 - DNA, 25 bp, Homo sapien
aggctggagtacttggatcgaagtc

SEQ ID NO: 98560 - DNA, 25 bp, Homo sapien
aggctggagtacatggatcgaagtc

SEQ ID NO: 98561 - DNA, 25 bp, Homo sapien
tacgagtaatttctggtaagaccac

SEQ ID NO: 98562 - DNA, 25 bp, Homo sapien
tacgagtaatttgtggtaagaccac

SEQ ID NO: 98563 - DNA, 25 bp, Homo sapien
cgtagaaggagtcgtgttaaaccgg

SEQ ID NO: 98564 - DNA, 25 bp, Homo sapien
cgtagaaggagtggtgttaaaccgg

SEQ ID NO: 98565 - DNA, 25 bp, Homo sapien
gaatgtatctagatcatgaaaacca

SEQ ID NO: 98566 - DNA, 25 bp, Homo sapien
gaatgtatctagttcatgaaaacca

SEQ ID NO: 98567 - DNA, 25 bp, Homo sapien
gaaagtaacaatgtctaaatcacag

SEQ ID NO: 98568 - DNA, 25 bp, Homo sapien
gaaagtaacaatctctaaatcacag

SEQ ID NO: 98569 - DNA, 25 bp, Homo sapien
acatgtcactttcgagaagtcgaac

SEQ ID NO: 98570 - DNA, 25 bp, Homo sapien
acatgtcactttggagaagtcgaac

SEQ ID NO: 98571 - DNA, 25 bp, Homo sapien
aggacatttttggaacttagtccag

SEQ ID NO: 98572 - DNA, 25 bp, Homo sapien
aggacatttttgcaacttagtccag

SEQ ID NO: 98573 - DNA, 25 bp, Homo sapien
gtgactttttctctctctaatccgg

SEQ ID NO: 98574 - DNA, 25 bp, Homo sapien
gtgactttttctgtctctaatccgg

SEQ ID NO: 98575 - DNA, 25 bp, Homo sapien
cgacgtttttatgtctcatggtgtg

SEQ ID NO: 98576 - DNA, 25 bp, Homo sapien
cgacgtttttatctctcatggtgtg

SEQ ID NO: 98577 - DNA, 25 bp, Homo sapien
tgtgtaacatgtcactttcgagaag

SEQ ID NO: 98578 - DNA, 25 bp, Homo sapien
tgtgtaacatgtgactttcgagaag

SEQ ID NO: 98579 - DNA, 25 bp, Homo sapien
ggtcgcccacggtgtccgacgacga

SEQ ID NO: 98580 - DNA, 25 bp, Homo sapien
ggtcgcccacggagtccgacgacga

SEQ ID NO: 98581 - DNA, 25 bp, Homo sapien
tatcgtccacgatagctctcggagg

SEQ ID NO: 98582 - DNA, 25 bp, Homo sapien
tatcgtccacgaaagctctcggagg

SEQ ID NO: 98583 - DNA, 25 bp, Homo sapien
tataatatcgacgatctccaggatt

SEQ ID NO: 98584 - DNA, 25 bp, Homo sapien
tataatatcgaccatctccaggatt

SEQ ID NO: 98585 - DNA, 25 bp, Homo sapien
cgtaagatggtaatcacacaaacat

SEQ ID NO: 98586 - DNA, 25 bp, Homo sapien
cgtaagatggtattcacacaaacat

SEQ ID NO: 98587 - DNA, 25 bp, Homo sapien
ccccgtgtggtacctccagaggaca

SEQ ID NO: 98588 - DNA, 25 bp, Homo sapien
ccccgtgtggtagctccagaggaca

SEQ ID NO: 98589 - DNA, 25 bp, Homo sapien
gccttagaagatcaccagacacagt

SEQ ID NO: 98590 - DNA, 25 bp, Homo sapien
gccttagaagatgaccagacacagt

SEQ ID NO: 98591 - DNA, 25 bp, Homo sapien
gtccctacagagacttcccactaag

SEQ ID NO: 98592 - DNA, 25 bp, Homo sapien
gtccctacagagtcttcccactaag

SEQ ID NO: 98593 - DNA, 25 bp, Homo sapien
tcttacggaagtgacttaaaaccat

SEQ ID NO: 98594 - DNA, 25 bp, Homo sapien
tcttacggaagtcacttaaaaccat

SEQ ID NO: 98595 - DNA, 25 bp, Homo sapien
caaaaagacgtaactcgcccgacca

SEQ ID NO: 98596 - DNA, 25 bp, Homo sapien
caaaaagacgtatctcgcccgacca

SEQ ID NO: 98597 - DNA, 25 bp, Homo sapien
taggacactgttactgtcgtcaccc

SEQ ID NO: 98598 - DNA, 25 bp, Homo sapien
taggacactgtttctgtcgtcaccc

SEQ ID NO: 98599 - DNA, 25 bp, Homo sapien
cttcctgaaacctgaggtgtgcccg

SEQ ID NO: 98600 - DNA, 25 bp, Homo sapien
cttcctgaaaccagaggtgtgcccg

SEQ ID NO: 98601 - DNA, 25 bp, Homo sapien
cataagaccttaagcagatgctact

SEQ ID NO: 98602 - DNA, 25 bp, Homo sapien
cataagaccttatgcagatgctact

SEQ ID NO: 98603 - DNA, 25 bp, Homo sapien
cttcgaaccgtttggtggtgacgtc

SEQ ID NO: 98604 - DNA, 25 bp, Homo sapien
cttcgaaccgttaggtggtgacgtc

SEQ ID NO: 98605 - DNA, 25 bp, Homo sapien
gagtcctgtccctttcagttttggg

SEQ ID NO: 98606 - DNA, 25 bp, Homo sapien
gagtcctgtcccattcagttttggg

SEQ ID NO: 98607 - DNA, 25 bp, Homo sapien
cttttcgtcaaacttacgtttcggg

SEQ ID NO: 98608 - DNA, 25 bp, Homo sapien
cttttcgtcaaagttacgtttcggg

SEQ ID NO: 98609 - DNA, 25 bp, Homo sapien
tcctttcgtcaagaaaccacgggag

SEQ ID NO: 98610 - DNA, 25 bp, Homo sapien
tcctttcgtcaacaaaccacgggag

SEQ ID NO: 98611 - DNA, 25 bp, Homo sapien
ttgtgtctattcacactgggtatag

SEQ ID NO: 98612 - DNA, 25 bp, Homo sapien
ttgtgtctattctcactgggtatag

SEQ ID NO: 98613 - DNA, 25 bp, Homo sapien
ctaatcgtcctttttcgttcggttc

SEQ ID NO: 98614 - DNA, 25 bp, Homo sapien
ctaatcgtccttattcgttcggttc

SEQ ID NO: 98615 - DNA, 25 bp, Homo sapien
atatgaaacagatagtactcagttc

SEQ ID NO: 98616 - DNA, 25 bp, Homo sapien
atatgaaacagaaagtactcagttc

SEQ ID NO: 98617 - DNA, 25 bp, Homo sapien
aagagaaaaacgataggtaccattc

SEQ ID NO: 98618 - DNA, 25 bp, Homo sapien
aagagaaaaacgttaggtaccattc

SEQ ID NO: 98619 - DNA, 25 bp, Homo sapien
gacgaaaaagagttagatccttcac

SEQ ID NO: 98620 - DNA, 25 bp, Homo sapien
gacgaaaaagagatagatccttcac

SEQ ID NO: 98621 - DNA, 25 bp, Homo sapien
gcgtcgagcaggagccggtctatcc

SEQ ID NO: 98622 - DNA, 25 bp, Homo sapien
gcgtcgagcaggtgccggtctatcc

SEQ ID NO: 98623 - DNA, 25 bp, Homo sapien
atggctcgggtgacccggtccgaac

SEQ ID NO: 98624 - DNA, 25 bp, Homo sapien
atggctcgggtgtcccggtccgaac

SEQ ID NO: 98625 - DNA, 25 bp, Homo sapien
aatggatgatccaactcgagtagac

SEQ ID NO: 98626 - DNA, 25 bp, Homo sapien
aatggatgatcctactcgagtagac

SEQ ID NO: 98627 - DNA, 25 bp, Homo sapien
tcttagtcgagtttgaccagtcgag

SEQ ID NO: 98628 - DNA, 25 bp, Homo sapien
tcttagtcgagtatgaccagtcgag

SEQ ID NO: 98629 - DNA, 25 bp, Homo sapien
ttaggtatacgacaccgtcccgcag

SEQ ID NO: 98630 - DNA, 25 bp, Homo sapien
ttaggtatacgagaccgtcccgcag

SEQ ID NO: 98631 - DNA, 25 bp, Homo sapien
tattagaaggaggtgcatcaaccgt

SEQ ID NO: 98632 - DNA, 25 bp, Homo sapien
tattagaaggagctgcatcaaccgt

SEQ ID NO: 98633 - DNA, 25 bp, Homo sapien
aatatcttccggacgggatgtaccc

SEQ ID NO: 98634 - DNA, 25 bp, Homo sapien
aatatcttccggtcgggatgtaccc

SEQ ID NO: 98635 - DNA, 25 bp, Homo sapien
catacgtcttccaggggcaatgtga

SEQ ID NO: 98636 - DNA, 25 bp, Homo sapien
catacgtcttcctggggcaatgtga

SEQ ID NO: 98637 - DNA, 25 bp, Homo sapien
aaaggtttgcgctgcacgaacgagc

SEQ ID NO: 98638 - DNA, 25 bp, Homo sapien
aaaggtttgcgcagcacgaacgagc

SEQ ID NO: 98639 - DNA, 25 bp, Homo sapien
agtgactcggtgtcggcctaccatc

SEQ ID NO: 98640 - DNA, 25 bp, Homo sapien
agtgactcggtgacggcctaccatc

SEQ ID NO: 98641 - DNA, 25 bp, Homo sapien
ggctacgtcacaatgtgcacacaca

SEQ ID NO: 98642 - DNA, 25 bp, Homo sapien
ggctacgtcacattgtgcacacaca

SEQ ID NO: 98643 - DNA, 25 bp, Homo sapien
caaggaggtcctcgaagtgagaaca

SEQ ID NO: 98644 - DNA, 25 bp, Homo sapien
caaggaggtcctggaagtgagaaca

SEQ ID NO: 98645 - DNA, 25 bp, Homo sapien
caggctccgcggtatgtggtccgac

SEQ ID NO: 98646 - DNA, 25 bp, Homo sapien
caggctccgcggaatgtggtccgac

SEQ ID NO: 98647 - DNA, 25 bp, Homo sapien
tcaaacggcgaggaaggtgactaaa

SEQ ID NO: 98648 - DNA, 25 bp, Homo sapien
tcaaacggcgagcaaggtgactaaa

SEQ ID NO: 98649 - DNA, 25 bp, Homo sapien
taagaattgtgagagatctcaacac

SEQ ID NO: 98650 - DNA, 25 bp, Homo sapien
taagaattgtgacagatctcaacac

SEQ ID NO: 98651 - DNA, 25 bp, Homo sapien
attattggtagttaactcatactcg

SEQ ID NO: 98652 - DNA, 25 bp, Homo sapien
attattggtagtaaactcatactcg

SEQ ID NO: 98653 - DNA, 25 bp, Homo sapien
ttttagaacatggtgaaacatcgtc

SEQ ID NO: 98654 - DNA, 25 bp, Homo sapien
ttttagaacatgctgaaacatcgtc

SEQ ID NO: 98655 - DNA, 25 bp, Homo sapien
tgttaagacgtttaagaatcacttc

SEQ ID NO: 98656 - DNA, 25 bp, Homo sapien
tgttaagacgttaaagaatcacttc

SEQ ID NO: 98657 - DNA, 25 bp, Homo sapien
ggattctagacgtaacaaaccaatc

SEQ ID NO: 98658 - DNA, 25 bp, Homo sapien
ggattctagacgaaacaaaccaatc

SEQ ID NO: 98659 - DNA, 25 bp, Homo sapien
tctcggtcggcctgaacttttgtgg

SEQ ID NO: 98660 - DNA, 25 bp, Homo sapien
tctcggtcggccagaacttttgtgg

SEQ ID NO: 98661 - DNA, 25 bp, Homo sapien
atgttcctactcgacgtttttagag

SEQ ID NO: 98662 - DNA, 25 bp, Homo sapien
atgttcctactccacgtttttagag

SEQ ID NO: 98663 - DNA, 25 bp, Homo sapien
tcccgtctcactaagcgacgtagag

SEQ ID NO: 98664 - DNA, 25 bp, Homo sapien
tcccgtctcacttagcgacgtagag

SEQ ID NO: 98665 - DNA, 25 bp, Homo sapien
tcaactatcgtttcgagaacggaca

SEQ ID NO: 98666 - DNA, 25 bp, Homo sapien
tcaactatcgttacgagaacggaca

SEQ ID NO: 98667 - DNA, 25 bp, Homo sapien
cgcggcttaccgaccgaaccactat

SEQ ID NO: 98668 - DNA, 25 bp, Homo sapien
cgcggcttaccgtccgaaccactat

SEQ ID NO: 98669 - DNA, 25 bp, Homo sapien
acctcgggccccggccggaccacag

SEQ ID NO: 98670 - DNA, 25 bp, Homo sapien
acctcgggcccccgccggaccacag

SEQ ID NO: 98671 - DNA, 25 bp, Homo sapien
gtcccgggaacgacgggaccgacat

SEQ ID NO: 98672 - DNA, 25 bp, Homo sapien
gtcccgggaacgtcgggaccgacat

SEQ ID NO: 98673 - DNA, 25 bp, Homo sapien
gacccgtcagggtcgttaccccggt

SEQ ID NO: 98674 - DNA, 25 bp, Homo sapien
gacccgtcagggacgttaccccggt

SEQ ID NO: 98675 - DNA, 25 bp, Homo sapien
aagacaaccgggaaattgtccactt

SEQ ID NO: 98676 - DNA, 25 bp, Homo sapien
aagacaaccgggtaattgtccactt

SEQ ID NO: 98677 - DNA, 25 bp, Homo sapien
gaccaagtgtcgtagacttaatgaa

SEQ ID NO: 98678 - DNA, 25 bp, Homo sapien
gaccaagtgtcgaagacttaatgaa

SEQ ID NO: 98679 - DNA, 25 bp, Homo sapien
gtgatttgtctcaacctttcgtaaa

SEQ ID NO: 98680 - DNA, 25 bp, Homo sapien
gtgatttgtctctacctttcgtaaa

SEQ ID NO: 98681 - DNA, 25 bp, Homo sapien
gagttcgtccttccttccaaggaat

SEQ ID NO: 98682 - DNA, 25 bp, Homo sapien
gagttcgtccttgcttccaaggaat

SEQ ID NO: 98683 - DNA, 25 bp, Homo sapien
gttgactaccggagcctgcggaact

SEQ ID NO: 98684 - DNA, 25 bp, Homo sapien
gttgactaccggtgcctgcggaact

SEQ ID NO: 98685 - DNA, 25 bp, Homo sapien
agtggttccgatttctttgtgacct

SEQ ID NO: 98686 - DNA, 25 bp, Homo sapien
agtggttccgatatctttgtgacct

SEQ ID NO: 98687 - DNA, 25 bp, Homo sapien
gtcgttcagtacctcctggtcgcac

SEQ ID NO: 98688 - DNA, 25 bp, Homo sapien
gtcgttcagtacgtcctggtcgcac

SEQ ID NO: 98689 - DNA, 25 bp, Homo sapien
ttttttcggtactgccgagagggtg

SEQ ID NO: 98690 - DNA, 25 bp, Homo sapien
ttttttcggtacagccgagagggtg

SEQ ID NO: 98691 - DNA, 25 bp, Homo sapien
cgtttctgggaaccgcgagagtcag

SEQ ID NO: 98692 - DNA, 25 bp, Homo sapien
cgtttctgggaagcgcgagagtcag

SEQ ID NO: 98693 - DNA, 25 bp, Homo sapien
tattccgagtcgagtctggagtcgg

SEQ ID NO: 98694 - DNA, 25 bp, Homo sapien
tattccgagtcgtgtctggagtcgg

SEQ ID NO: 98695 - DNA, 25 bp, Homo sapien
acttactgtacctactttagtatcc

SEQ ID NO: 98696 - DNA, 25 bp, Homo sapien
acttactgtaccaactttagtatcc

SEQ ID NO: 98697 - DNA, 25 bp, Homo sapien
cagtcggagcagctattagacgtcc

SEQ ID NO: 98698 - DNA, 25 bp, Homo sapien
cagtcggagcaggtattagacgtcc

SEQ ID NO: 98699 - DNA, 25 bp, Homo sapien
caaacggtgactgctgtaaggtgtg

SEQ ID NO: 98700 - DNA, 25 bp, Homo sapien
caaacggtgactcctgtaaggtgtg

SEQ ID NO: 98701 - DNA, 25 bp, Homo sapien
ccaccggcgctaatagacgggaact

SEQ ID NO: 98702 - DNA, 25 bp, Homo sapien
ccaccggcgctattagacgggaact

SEQ ID NO: 98703 - DNA, 25 bp, Homo sapien
cattctggagcatctcaacaggtac

SEQ ID NO: 98704 - DNA, 25 bp, Homo sapien
cattctggagcaactcaacaggtac

SEQ ID NO: 98705 - DNA, 25 bp, Homo sapien
cttctttgttggtggtaaacgtttc

SEQ ID NO: 98706 - DNA, 25 bp, Homo sapien
cttctttgttggaggtaaacgtttc

SEQ ID NO: 98707 - DNA, 25 bp, Homo sapien
gtttttcgaaagaaacgttttcttc

SEQ ID NO: 98708 - DNA, 25 bp, Homo sapien
gtttttcgaaagtaacgttttcttc

SEQ ID NO: 98709 - DNA, 25 bp, Homo sapien
gtctcgaaagtgttcgagtttcttt

SEQ ID NO: 98710 - DNA, 25 bp, Homo sapien
gtctcgaaagtgatcgagtttcttt

SEQ ID NO: 98711 - DNA, 25 bp, Homo sapien
gtctaaacatcagacgtatttatgt

SEQ ID NO: 98712 - DNA, 25 bp, Homo sapien
gtctaaacatcacacgtatttatgt

SEQ ID NO: 98713 - DNA, 25 bp, Homo sapien
aaatcataaacaggtctacgttttg

SEQ ID NO: 98714 - DNA, 25 bp, Homo sapien
aaatcataaacacgtctacgttttg

SEQ ID NO: 98715 - DNA, 25 bp, Homo sapien
gtaagcgaaataatcgtcatcttta

SEQ ID NO: 98716 - DNA, 25 bp, Homo sapien
gtaagcgaaatattcgtcatcttta

SEQ ID NO: 98717 - DNA, 25 bp, Homo sapien
gtgtaccggtcctactactacgtac

SEQ ID NO: 98718 - DNA, 25 bp, Homo sapien
gtgtaccggtccaactactacgtac

SEQ ID NO: 98719 - DNA, 25 bp, Homo sapien
gactcagtgatctaccagtcttctt

SEQ ID NO: 98720 - DNA, 25 bp, Homo sapien
gactcagtgatcaaccagtcttctt

SEQ ID NO: 98721 - DNA, 25 bp, Homo sapien
accctggtcctaccggtagtgtcag

SEQ ID NO: 98722 - DNA, 25 bp, Homo sapien
accctggtcctagcggtagtgtcag

SEQ ID NO: 98723 - DNA, 25 bp, Homo sapien
acacttacttggtcgtcctgtggag

SEQ ID NO: 98724 - DNA, 25 bp, Homo sapien
acacttacttggacgtcctgtggag

SEQ ID NO: 98725 - DNA, 25 bp, Homo sapien
cgaaagttctacgactgtcggagga

SEQ ID NO: 98726 - DNA, 25 bp, Homo sapien
cgaaagttctaccactgtcggagga

SEQ ID NO: 98727 - DNA, 25 bp, Homo sapien
tacggatgtagtaccacaatggaca

SEQ ID NO: 98728 - DNA, 25 bp, Homo sapien
tacggatgtagttccacaatggaca

SEQ ID NO: 98729 - DNA, 25 bp, Homo sapien
cgagtagtagacacaactacagata

SEQ ID NO: 98730 - DNA, 25 bp, Homo sapien
cgagtagtagactcaactacagata

SEQ ID NO: 98731 - DNA, 25 bp, Homo sapien
ttctacattcttagtataacactat

SEQ ID NO: 98732 - DNA, 25 bp, Homo sapien
ttctacattctttgtataacactat

SEQ ID NO: 98733 - DNA, 25 bp, Homo sapien
ctgagttcacttaagaacctactgt

SEQ ID NO: 98734 - DNA, 25 bp, Homo sapien
ctgagttcactttagaacctactgt

SEQ ID NO: 98735 - DNA, 25 bp, Homo sapien
agagaccccggaagacctccgaccg

SEQ ID NO: 98736 - DNA, 25 bp, Homo sapien
agagaccccggatgacctccgaccg

SEQ ID NO: 98737 - DNA, 25 bp, Homo sapien
gactcgctcggtcgacgaccctaag

SEQ ID NO: 98738 - DNA, 25 bp, Homo sapien
gactcgctcggtggacgaccctaag

SEQ ID NO: 98739 - DNA, 25 bp, Homo sapien
gttgaccgtcctccatccggggaac

SEQ ID NO: 98740 - DNA, 25 bp, Homo sapien
gttgaccgtcctgcatccggggaac

SEQ ID NO: 98741 - DNA, 25 bp, Homo sapien
tcgagtcgtttctagagccggggac

SEQ ID NO: 98742 - DNA, 25 bp, Homo sapien
tcgagtcgtttcaagagccggggac

SEQ ID NO: 98743 - DNA, 25 bp, Homo sapien
ttcgagaatcgcagtcctcggtgga

SEQ ID NO: 98744 - DNA, 25 bp, Homo sapien
ttcgagaatcgctgtcctcggtgga

SEQ ID NO: 98745 - DNA, 25 bp, Homo sapien
ccgtttagatgtgacgtcggttagg

SEQ ID NO: 98746 - DNA, 25 bp, Homo sapien
ccgtttagatgtcacgtcggttagg

SEQ ID NO: 98747 - DNA, 25 bp, Homo sapien
cttgatctacttgatggacttgaaa

SEQ ID NO: 98748 - DNA, 25 bp, Homo sapien
cttgatctacttcatggacttgaaa

SEQ ID NO: 98749 - DNA, 25 bp, Homo sapien
tgtttgacatttcgtgaattcttca

SEQ ID NO: 98750 - DNA, 25 bp, Homo sapien
tgtttgacatttggtgaattcttca

SEQ ID NO: 98751 - DNA, 25 bp, Homo sapien
tagaatcctgtgacattgacacacg

SEQ ID NO: 98752 - DNA, 25 bp, Homo sapien
tagaatcctgtgtcattgacacacg

SEQ ID NO: 98753 - DNA, 25 bp, Homo sapien
cgtaaaattcatttgaccggtaata

SEQ ID NO: 98754 - DNA, 25 bp, Homo sapien
cgtaaaattcatatgaccggtaata

SEQ ID NO: 98755 - DNA, 25 bp, Homo sapien
agccttttacatgtcactctttctt

SEQ ID NO: 98756 - DNA, 25 bp, Homo sapien
agccttttacatctcactctttctt

SEQ ID NO: 98757 - DNA, 25 bp, Homo sapien
tgtgtattacatgctgatgtttcct

SEQ ID NO: 98758 - DNA, 25 bp, Homo sapien
tgtgtattacatcctgatgtttcct

SEQ ID NO: 98759 - DNA, 25 bp, Homo sapien
gtccttcctgtttgactttgtacat

SEQ ID NO: 98760 - DNA, 25 bp, Homo sapien
gtccttcctgttagactttgtacat

SEQ ID NO: 98761 - DNA, 25 bp, Homo sapien
tgacctgtttcctagatttgtaact

SEQ ID NO: 98762 - DNA, 25 bp, Homo sapien
tgacctgtttccaagatttgtaact

SEQ ID NO: 98763 - DNA, 25 bp, Homo sapien
gtttcttgctacgacatgtgtcctc

SEQ ID NO: 98764 - DNA, 25 bp, Homo sapien
gtttcttgctaccacatgtgtcctc

SEQ ID NO: 98765 - DNA, 25 bp, Homo sapien
gacacgtctccgtttagaacagttg

SEQ ID NO: 98766 - DNA, 25 bp, Homo sapien
gacacgtctccgattagaacagttg

SEQ ID NO: 98767 - DNA, 25 bp, Homo sapien
agttgtcgacggacgtccccggtgt

SEQ ID NO: 98768 - DNA, 25 bp, Homo sapien
agttgtcgacggtcgtccccggtgt

SEQ ID NO: 98769 - DNA, 25 bp, Homo sapien
tggggtctactagttccccgactac

SEQ ID NO: 98770 - DNA, 25 bp, Homo sapien
tggggtctactacttccccgactac

SEQ ID NO: 98771 - DNA, 25 bp, Homo sapien
agtaaggttgtcaagaccgaagaac

SEQ ID NO: 98772 - DNA, 25 bp, Homo sapien
agtaaggttgtctagaccgaagaac

SEQ ID NO: 98773 - DNA, 25 bp, Homo sapien
gtaagcgggacgagctaggacctac

SEQ ID NO: 98774 - DNA, 25 bp, Homo sapien
gtaagcgggacgtgctaggacctac

SEQ ID NO: 98775 - DNA, 25 bp, Homo sapien
ggactccgcttcgtggagagcctac

SEQ ID NO: 98776 - DNA, 25 bp, Homo sapien
ggactccgcttcctggagagcctac

SEQ ID NO: 98777 - DNA, 25 bp, Homo sapien
caccctcgtatcgtgtcgaggtcac

SEQ ID NO: 98778 - DNA, 25 bp, Homo sapien
caccctcgtatcctgtcgaggtcac

SEQ ID NO: 98779 - DNA, 25 bp, Homo sapien
tgtcgtccacgcgcgtgtaacgtca

SEQ ID NO: 98780 - DNA, 25 bp, Homo sapien
tgtcgtccacgcccgtgtaacgtca

SEQ ID NO: 98781 - DNA, 25 bp, Homo sapien
cataggggtcgaagcctaaatccga

SEQ ID NO: 98782 - DNA, 25 bp, Homo sapien
cataggggtcgatgcctaaatccga

SEQ ID NO: 98783 - DNA, 25 bp, Homo sapien
cggtccgagcgaacgcgcgtcacta

SEQ ID NO: 98784 - DNA, 25 bp, Homo sapien
cggtccgagcgatcgcgcgtcacta

SEQ ID NO: 98785 - DNA, 25 bp, Homo sapien
ataaccgttacttcggcgtacatat

SEQ ID NO: 98786 - DNA, 25 bp, Homo sapien
ataaccgttactacggcgtacatat

SEQ ID NO: 98787 - DNA, 25 bp, Homo sapien
acccacaaccacaacatgagacaca

SEQ ID NO: 98788 - DNA, 25 bp, Homo sapien
acccacaaccactacatgagacaca

SEQ ID NO: 98789 - DNA, 25 bp, Homo sapien
gaaagaacactaacacttcgaacac

SEQ ID NO: 98790 - DNA, 25 bp, Homo sapien
gaaagaacactatcacttcgaacac

SEQ ID NO: 98791 - DNA, 25 bp, Homo sapien
cctggaacgactaccggagggacaa

SEQ ID NO: 98792 - DNA, 25 bp, Homo sapien
cctggaacgacttccggagggacaa

SEQ ID NO: 98793 - DNA, 25 bp, Homo sapien
caggtggaaatgacctctggttaga

SEQ ID NO: 98794 - DNA, 25 bp, Homo sapien
caggtggaaatgtcctctggttaga

SEQ ID NO: 98795 - DNA, 25 bp, Homo sapien
ttatcaatcacgacctctggtgaca

SEQ ID NO: 98796 - DNA, 25 bp, Homo sapien
ttatcaatcacgtcctctggtgaca

SEQ ID NO: 98797 - DNA, 25 bp, Homo sapien
gtctcgtacatctccttctggtgca

SEQ ID NO: 98798 - DNA, 25 bp, Homo sapien
gtctcgtacatcaccttctggtgca

SEQ ID NO: 98799 - DNA, 25 bp, Homo sapien
tcggtctccaaaggtccggtagaca

SEQ ID NO: 98800 - DNA, 25 bp, Homo sapien
tcggtctccaaacgtccggtagaca

SEQ ID NO: 98801 - DNA, 25 bp, Homo sapien
ctgtggacaaaggaagggcgtcaca

SEQ ID NO: 98802 - DNA, 25 bp, Homo sapien
ctgtggacaaagcaagggcgtcaca

SEQ ID NO: 98803 - DNA, 25 bp, Homo sapien
gcgaaccacaggacggactagtcaa

SEQ ID NO: 98804 - DNA, 25 bp, Homo sapien
gcgaaccacaggtcggactagtcaa

SEQ ID NO: 98805 - DNA, 25 bp, Homo sapien
gttgaccgaactctcgatactccat

SEQ ID NO: 98806 - DNA, 25 bp, Homo sapien
gttgaccgaactgtcgatactccat

SEQ ID NO: 98807 - DNA, 25 bp, Homo sapien
ttctacggagatcgacgttactcca

SEQ ID NO: 98808 - DNA, 25 bp, Homo sapien
ttctacggagatggacgttactcca

SEQ ID NO: 98809 - DNA, 25 bp, Homo sapien
gctatttgaaaggtactttatcacg

SEQ ID NO: 98810 - DNA, 25 bp, Homo sapien
gctatttgaaagctactttatcacg

SEQ ID NO: 98811 - DNA, 25 bp, Homo sapien
tgtttcggtaggagttttctgtctc

SEQ ID NO: 98812 - DNA, 25 bp, Homo sapien
tgtttcggtaggtgttttctgtctc

SEQ ID NO: 98813 - DNA, 25 bp, Homo sapien
gcgattgtagcttgagaaccgtgtg

SEQ ID NO: 98814 - DNA, 25 bp, Homo sapien
gcgattgtagctagagaaccgtgtg

SEQ ID NO: 98815 - DNA, 25 bp, Homo sapien
ggtcgattgtgaggaaaacctctcg

SEQ ID NO: 98816 - DNA, 25 bp, Homo sapien
ggtcgattgtgacgaaaacctctcg

SEQ ID NO: 98817 - DNA, 25 bp, Homo sapien
tggtcaatagagcaaaaaccgttcg

SEQ ID NO: 98818 - DNA, 25 bp, Homo sapien
tggtcaatagaggaaaaaccgttcg

SEQ ID NO: 98819 - DNA, 25 bp, Homo sapien
gaagaagaaaggacaaaaccgttcg

SEQ ID NO: 98820 - DNA, 25 bp, Homo sapien
gaagaagaaaggtcaaaaccgttcg

SEQ ID NO: 98821 - DNA, 25 bp, Homo sapien
agagaaattcctaagtcaccgaact

SEQ ID NO: 98822 - DNA, 25 bp, Homo sapien
agagaaattccttagtcaccgaact

SEQ ID NO: 98823 - DNA, 25 bp, Homo sapien
ggaccgtcgctagcgataaaaggta

SEQ ID NO: 98824 - DNA, 25 bp, Homo sapien
ggaccgtcgctaccgataaaaggta

SEQ ID NO: 98825 - DNA, 25 bp, Homo sapien
gagatcgcaagcttgcgtgactaaa

SEQ ID NO: 98826 - DNA, 25 bp, Homo sapien
gagatcgcaagcatgcgtgactaaa

SEQ ID NO: 98827 - DNA, 25 bp, Homo sapien
ctcgtcgggtcaagtgtcccgggtc

SEQ ID NO: 98828 - DNA, 25 bp, Homo sapien
ctcgtcgggtcatgtgtcccgggtc

SEQ ID NO: 98829 - DNA, 25 bp, Homo sapien
cagccggaagagtataaagtccttc

SEQ ID NO: 98830 - DNA, 25 bp, Homo sapien
cagccggaagagaataaagtccttc

SEQ ID NO: 98831 - DNA, 25 bp, Homo sapien
gtacctcataaatgaggtcccttta

SEQ ID NO: 98832 - DNA, 25 bp, Homo sapien
gtacctcataaaagaggtcccttta

SEQ ID NO: 98833 - DNA, 25 bp, Homo sapien
ctctagaggagaaggaccgtcagca

SEQ ID NO: 98834 - DNA, 25 bp, Homo sapien
ctctagaggagatggaccgtcagca

SEQ ID NO: 98835 - DNA, 25 bp, Homo sapien
gtcgtcaggggctcgacctcacagg

SEQ ID NO: 98836 - DNA, 25 bp, Homo sapien
gtcgtcaggggcacgacctcacagg

SEQ ID NO: 98837 - DNA, 25 bp, Homo sapien
ctcacggcaaacaacctctcgaggt

SEQ ID NO: 98838 - DNA, 25 bp, Homo sapien
ctcacggcaaactacctctcgaggt

SEQ ID NO: 98839 - DNA, 25 bp, Homo sapien
tctctcttgcggtgtcgtctctctg

SEQ ID NO: 98840 - DNA, 25 bp, Homo sapien
tctctcttgcggagtcgtctctctg

SEQ ID NO: 98841 - DNA, 25 bp, Homo sapien
aggtctctcttgtgtcgattttggt

SEQ ID NO: 98842 - DNA, 25 bp, Homo sapien
aggtctctcttgagtcgattttggt

SEQ ID NO: 98843 - DNA, 25 bp, Homo sapien
atggtgttctcgaacccggttgtgt

SEQ ID NO: 98844 - DNA, 25 bp, Homo sapien
atggtgttctcgtacccggttgtgt

SEQ ID NO: 98845 - DNA, 25 bp, Homo sapien
acgtggtggtccttagccctctggt

SEQ ID NO: 98846 - DNA, 25 bp, Homo sapien
acgtggtggtccatagccctctggt

SEQ ID NO: 98847 - DNA, 25 bp, Homo sapien
ggcgtggcgacctctgtcgcccttt

SEQ ID NO: 98848 - DNA, 25 bp, Homo sapien
ggcgtggcgaccactgtcgcccttt

SEQ ID NO: 98849 - DNA, 25 bp, Homo sapien
gtgacacaacaatacgtcgccacta

SEQ ID NO: 98850 - DNA, 25 bp, Homo sapien
gtgacacaacaaaacgtcgccacta

SEQ ID NO: 98851 - DNA, 25 bp, Homo sapien
cgaggaggtcccagtcgtaccccag

SEQ ID NO: 98852 - DNA, 25 bp, Homo sapien
cgaggaggtccctgtcgtaccccag

SEQ ID NO: 98853 - DNA, 25 bp, Homo sapien
ccgaggggcccgtctccgagacgac

SEQ ID NO: 98854 - DNA, 25 bp, Homo sapien
ccgaggggcccgactccgagacgac

SEQ ID NO: 98855 - DNA, 25 bp, Homo sapien
cactaacttccctacgatgagagac

SEQ ID NO: 98856 - DNA, 25 bp, Homo sapien
cactaacttcccaacgatgagagac

SEQ ID NO: 98857 - DNA, 25 bp, Homo sapien
cctatcccgaactgtcatagtggtt

SEQ ID NO: 98858 - DNA, 25 bp, Homo sapien
cctatcccgaacagtcatagtggtt

SEQ ID NO: 98859 - DNA, 25 bp, Homo sapien
gcgagccttcaagtcgacatcggct

SEQ ID NO: 98860 - DNA, 25 bp, Homo sapien
gcgagccttcaactcgacatcggct

SEQ ID NO: 98861 - DNA, 25 bp, Homo sapien
acaggagtcccttcggagaggacta

SEQ ID NO: 98862 - DNA, 25 bp, Homo sapien
acaggagtccctacggagaggacta

SEQ ID NO: 98863 - DNA, 25 bp, Homo sapien
tactgggtcaagaaccactcagagc

SEQ ID NO: 98864 - DNA, 25 bp, Homo sapien
tactgggtcaagtaccactcagagc

SEQ ID NO: 98865 - DNA, 25 bp, Homo sapien
ccagagacgagacttctctacacaa

SEQ ID NO: 98866 - DNA, 25 bp, Homo sapien
ccagagacgagagttctctacacaa

SEQ ID NO: 98867 - DNA, 25 bp, Homo sapien
tgagccagtcggttcgtaacaacga

SEQ ID NO: 98868 - DNA, 25 bp, Homo sapien
tgagccagtcggatcgtaacaacga

SEQ ID NO: 98869 - DNA, 25 bp, Homo sapien
tgaggtcctacagtctatactgcgg

SEQ ID NO: 98870 - DNA, 25 bp, Homo sapien
tgaggtcctacactctatactgcgg

SEQ ID NO: 98871 - DNA, 25 bp, Homo sapien
tccgacgagtctctcctttctggct

SEQ ID NO: 98872 - DNA, 25 bp, Homo sapien
tccgacgagtctgtcctttctggct

SEQ ID NO: 98873 - DNA, 25 bp, Homo sapien
ccagggtgtctacgtttttatgaca

SEQ ID NO: 98874 - DNA, 25 bp, Homo sapien
ccagggtgtctaggtttttatgaca

SEQ ID NO: 98875 - DNA, 25 bp, Homo sapien
atcctttgtcgtcgtgcaattgttt

SEQ ID NO: 98876 - DNA, 25 bp, Homo sapien
atcctttgtcgtggtgcaattgttt

SEQ ID NO: 98877 - DNA, 25 bp, Homo sapien
tacgttactggttcgtaacattgtc

SEQ ID NO: 98878 - DNA, 25 bp, Homo sapien
tacgttactggtacgtaacattgtc

SEQ ID NO: 98879 - DNA, 25 bp, Homo sapien
tttttattttagtatacatatatca

SEQ ID NO: 98880 - DNA, 25 bp, Homo sapien
tttttattttagaatacatatatca

SEQ ID NO: 98881 - DNA, 25 bp, Homo sapien
taggactttgtttctcatatgtcat

SEQ ID NO: 98882 - DNA, 25 bp, Homo sapien
taggactttgttactcatatgtcat

SEQ ID NO: 98883 - DNA, 25 bp, Homo sapien
tgtctacatggtttacattttgtca

SEQ ID NO: 98884 - DNA, 25 bp, Homo sapien
tgtctacatggtatacattttgtca

SEQ ID NO: 98885 - DNA, 25 bp, Homo sapien
tatacggggtagaaacatcaatgtc

SEQ ID NO: 98886 - DNA, 25 bp, Homo sapien
tatacggggtagtaacatcaatgtc

SEQ ID NO: 98887 - DNA, 25 bp, Homo sapien
tcttgagtaatcaatattcacagga

SEQ ID NO: 98888 - DNA, 25 bp, Homo sapien
tcttgagtaatctatattcacagga

SEQ ID NO: 98889 - DNA, 25 bp, Homo sapien
gtcaggtacccgtcattacatgaag

SEQ ID NO: 98890 - DNA, 25 bp, Homo sapien
gtcaggtacccgacattacatgaag

SEQ ID NO: 98891 - DNA, 25 bp, Homo sapien
gtgacggactgtacattttgtacac

SEQ ID NO: 98892 - DNA, 25 bp, Homo sapien
gtgacggactgttcattttgtacac

SEQ ID NO: 98893 - DNA, 25 bp, Homo sapien
cgagtttaccgttcatatgataatt

SEQ ID NO: 98894 - DNA, 25 bp, Homo sapien
cgagtttaccgtacatatgataatt

SEQ ID NO: 98895 - DNA, 25 bp, Homo sapien
tccggtgtctcgacccgttggactc

SEQ ID NO: 98896 - DNA, 25 bp, Homo sapien
tccggtgtctcgtcccgttggactc

SEQ ID NO: 98897 - DNA, 25 bp, Homo sapien
cccggctcgcgtaccatgagacggt

SEQ ID NO: 98898 - DNA, 25 bp, Homo sapien
cccggctcgcgttccatgagacggt

SEQ ID NO: 98899 - DNA, 25 bp, Homo sapien
gcagagacggcgactcaggtgacct

SEQ ID NO: 98900 - DNA, 25 bp, Homo sapien
gcagagacggcgtctcaggtgacct

SEQ ID NO: 98901 - DNA, 25 bp, Homo sapien
tcgacgagcggtaggtccggtcacc

SEQ ID NO: 98902 - DNA, 25 bp, Homo sapien
tcgacgagcggttggtccggtcacc

SEQ ID NO: 98903 - DNA, 25 bp, Homo sapien
cgtcgacccgcgtgagggctcacag

SEQ ID NO: 98904 - DNA, 25 bp, Homo sapien
cgtcgacccgcgagagggctcacag

SEQ ID NO: 98905 - DNA, 25 bp, Homo sapien
cgccgacctcgcgcggaagctcttc

SEQ ID NO: 98906 - DNA, 25 bp, Homo sapien
cgccgacctcgcccggaagctcttc

SEQ ID NO: 98907 - DNA, 25 bp, Homo sapien
tcgaaacaccatggtgacaggtgaa

SEQ ID NO: 98908 - DNA, 25 bp, Homo sapien
tcgaaacaccatcgtgacaggtgaa

SEQ ID NO: 98909 - DNA, 25 bp, Homo sapien
gtacaggtcctcgagtaggtgcagt

SEQ ID NO: 98910 - DNA, 25 bp, Homo sapien
gtacaggtcctccagtaggtgcagt

SEQ ID NO: 98911 - DNA, 25 bp, Homo sapien
tggtccggacccagaaggactcgtt

SEQ ID NO: 98912 - DNA, 25 bp, Homo sapien
tggtccggaccctgaaggactcgtt

SEQ ID NO: 98913 - DNA, 25 bp, Homo sapien
acccgtaacgagtcaccgttacctt

SEQ ID NO: 98914 - DNA, 25 bp, Homo sapien
acccgtaacgagacaccgttacctt

SEQ ID NO: 98915 - DNA, 25 bp, Homo sapien
tcctagacacggacgctcggctacg

SEQ ID NO: 98916 - DNA, 25 bp, Homo sapien
tcctagacacggtcgctcggctacg

SEQ ID NO: 98917 - DNA, 25 bp, Homo sapien
tcggacgtagggtccccgtcgacct

SEQ ID NO: 98918 - DNA, 25 bp, Homo sapien
tcggacgtagggaccccgtcgacct

SEQ ID NO: 98919 - DNA, 25 bp, Homo sapien
ttcgactgacgacacaaccgtcttc

SEQ ID NO: 98920 - DNA, 25 bp, Homo sapien
ttcgactgacgagacaaccgtcttc

SEQ ID NO: 98921 - DNA, 25 bp, Homo sapien
gtaataataagaaccatatagtttc

SEQ ID NO: 98922 - DNA, 25 bp, Homo sapien
gtaataataagatccatatagtttc

SEQ ID NO: 98923 - DNA, 25 bp, Homo sapien
tgtagaaaagaccatgtgtcgttcc

SEQ ID NO: 98924 - DNA, 25 bp, Homo sapien
tgtagaaaagacgatgtgtcgttcc

SEQ ID NO: 98925 - DNA, 25 bp, Homo sapien
tcgggacgaggaacatgtccttctc

SEQ ID NO: 98926 - DNA, 25 bp, Homo sapien
tcgggacgaggatcatgtccttctc

SEQ ID NO: 98927 - DNA, 25 bp, Homo sapien
aggaaagtgtcgtccttctcgggag

SEQ ID NO: 98928 - DNA, 25 bp, Homo sapien
aggaaagtgtcgaccttctcgggag

SEQ ID NO: 98929 - DNA, 25 bp, Homo sapien
cggactacctctaagcctttagggg

SEQ ID NO: 98930 - DNA, 25 bp, Homo sapien
cggactacctcttagcctttagggg

SEQ ID NO: 98931 - DNA, 25 bp, Homo sapien
gagacccactactcccatggtagac

SEQ ID NO: 98932 - DNA, 25 bp, Homo sapien
gagacccactacacccatggtagac

SEQ ID NO: 98933 - DNA, 25 bp, Homo sapien
aagactctccggaccactcgaacga

SEQ ID NO: 98934 - DNA, 25 bp, Homo sapien
aagactctccggtccactcgaacga

SEQ ID NO: 98935 - DNA, 25 bp, Homo sapien
caggaacctcggacccgtggacacg

SEQ ID NO: 98936 - DNA, 25 bp, Homo sapien
caggaacctcggtcccgtggacacg

SEQ ID NO: 98937 - DNA, 25 bp, Homo sapien
gaggtgacccgttagtgccaaaacg

SEQ ID NO: 98938 - DNA, 25 bp, Homo sapien
gaggtgacccgtaagtgccaaaacg

SEQ ID NO: 98939 - DNA, 25 bp, Homo sapien
cagaaggacttctaggtgcagaagg

SEQ ID NO: 98940 - DNA, 25 bp, Homo sapien
cagaaggacttcaaggtgcagaagg

SEQ ID NO: 98941 - DNA, 25 bp, Homo sapien
agaatgaacccctagaactagagac

SEQ ID NO: 98942 - DNA, 25 bp, Homo sapien
agaatgaaccccaagaactagagac

SEQ ID NO: 98943 - DNA, 25 bp, Homo sapien
gaggataaaggatccacaatcaatg

SEQ ID NO: 98944 - DNA, 25 bp, Homo sapien
gaggataaaggaaccacaatcaatg

SEQ ID NO: 98945 - DNA, 25 bp, Homo sapien
cacttaagcggctacagatcattct

SEQ ID NO: 98946 - DNA, 25 bp, Homo sapien
cacttaagcggcaacagatcattct

SEQ ID NO: 98947 - DNA, 25 bp, Homo sapien
ctttagcttcggatagtacttaatg

SEQ ID NO: 98948 - DNA, 25 bp, Homo sapien
ctttagcttcggttagtacttaatg

SEQ ID NO: 98949 - DNA, 25 bp, Homo sapien
gggtaaagttcgtcagactgaactt

SEQ ID NO: 98950 - DNA, 25 bp, Homo sapien
gggtaaagttcgacagactgaactt

SEQ ID NO: 98951 - DNA, 25 bp, Homo sapien
cgggtgaaagtgtctgaccgattct

SEQ ID NO: 98952 - DNA, 25 bp, Homo sapien
cgggtgaaagtgactgaccgattct

SEQ ID NO: 98953 - DNA, 25 bp, Homo sapien
cgggtctaatagtactcccgatgta

SEQ ID NO: 98954 - DNA, 25 bp, Homo sapien
cgggtctaatagaactcccgatgta

SEQ ID NO: 98955 - DNA, 25 bp, Homo sapien
aggtggtgtaaatccttacttacta

SEQ ID NO: 98956 - DNA, 25 bp, Homo sapien
aggtggtgtaaaaccttacttacta

SEQ ID NO: 98957 - DNA, 25 bp, Homo sapien
gtacttgtctcgaacccactgtaca

SEQ ID NO: 98958 - DNA, 25 bp, Homo sapien
gtacttgtctcgtacccactgtaca

SEQ ID NO: 98959 - DNA, 25 bp, Homo sapien
cctagtgtgtctctttacactccgg

SEQ ID NO: 98960 - DNA, 25 bp, Homo sapien
cctagtgtgtctgtttacactccgg

SEQ ID NO: 98961 - DNA, 25 bp, Homo sapien
tgttctctctagttctcacctcggt

SEQ ID NO: 98962 - DNA, 25 bp, Homo sapien
tgttctctctagatctcacctcggt

SEQ ID NO: 98963 - DNA, 25 bp, Homo sapien
cctgcgcctggatcgacatcgacgt

SEQ ID NO: 98964 - DNA, 25 bp, Homo sapien
cctgcgcctggaacgacatcgacgt

SEQ ID NO: 98965 - DNA, 25 bp, Homo sapien
cggtggacagtggacactacaagtg

SEQ ID NO: 98966 - DNA, 25 bp, Homo sapien
cggtggacagtgcacactacaagtg

SEQ ID NO: 98967 - DNA, 25 bp, Homo sapien
cattaagaagtgctcactacttgtt

SEQ ID NO: 98968 - DNA, 25 bp, Homo sapien
cattaagaagtggtcactacttgtt

SEQ ID NO: 98969 - DNA, 25 bp, Homo sapien
tgatatcatagtcgtctctgtattt

SEQ ID NO: 98970 - DNA, 25 bp, Homo sapien
tgatatcatagtggtctctgtattt

SEQ ID NO: 98971 - DNA, 25 bp, Homo sapien
gatctctcgttaggatcgtgttatt

SEQ ID NO: 98972 - DNA, 25 bp, Homo sapien
gatctctcgttacgatcgtgttatt

SEQ ID NO: 98973 - DNA, 25 bp, Homo sapien
tagtaatgttactgtactcattgac

SEQ ID NO: 98974 - DNA, 25 bp, Homo sapien
tagtaatgttacagtactcattgac

SEQ ID NO: 98975 - DNA, 25 bp, Homo sapien
gtagagtatagtcagatcagtcacc

SEQ ID NO: 98976 - DNA, 25 bp, Homo sapien
gtagagtatagtgagatcagtcacc

SEQ ID NO: 98977 - DNA, 25 bp, Homo sapien
ggaaggtaagtctgagcggtcacct

SEQ ID NO: 98978 - DNA, 25 bp, Homo sapien
ggaaggtaagtcagagcggtcacct

SEQ ID NO: 98979 - DNA, 25 bp, Homo sapien
ggcgagacgtctgtgtgactgtcca

SEQ ID NO: 98980 - DNA, 25 bp, Homo sapien
ggcgagacgtctctgtgactgtcca

SEQ ID NO: 98981 - DNA, 25 bp, Homo sapien
aaccggtcgcggacgaccggtccga

SEQ ID NO: 98982 - DNA, 25 bp, Homo sapien
aaccggtcgcggtcgaccggtccga

SEQ ID NO: 98983 - DNA, 25 bp, Homo sapien
tggtgtatgagaactatatcctcgg

SEQ ID NO: 98984 - DNA, 25 bp, Homo sapien
tggtgtatgagatctatatcctcgg

SEQ ID NO: 98985 - DNA, 25 bp, Homo sapien
ccaggactcacgtcatgacgtctgc

SEQ ID NO: 98986 - DNA, 25 bp, Homo sapien
ccaggactcacgacatgacgtctgc

SEQ ID NO: 98987 - DNA, 25 bp, Homo sapien
ccgtgaacgcccggtcgtctacgcg

SEQ ID NO: 98988 - DNA, 25 bp, Homo sapien
ccgtgaacgccccgtcgtctacgcg

SEQ ID NO: 98989 - DNA, 25 bp, Homo sapien
cctttagttgtctggttgttaccgt

SEQ ID NO: 98990 - DNA, 25 bp, Homo sapien
cctttagttgtcaggttgttaccgt

SEQ ID NO: 98991 - DNA, 25 bp, Homo sapien
acttcctttaggaccggtttcagct

SEQ ID NO: 98992 - DNA, 25 bp, Homo sapien
acttcctttaggtccggtttcagct

SEQ ID NO: 98993 - DNA, 25 bp, Homo sapien
aggtcctctttcaccggttcccgat

SEQ ID NO: 98994 - DNA, 25 bp, Homo sapien
aggtcctctttctccggttcccgat

SEQ ID NO: 98995 - DNA, 25 bp, Homo sapien
gtcacggagtctatcctttttctat

SEQ ID NO: 98996 - DNA, 25 bp, Homo sapien
gtcacggagtctttcctttttctat

SEQ ID NO: 98997 - DNA, 25 bp, Homo sapien
tacaaagtgattcgtttatccgact

SEQ ID NO: 98998 - DNA, 25 bp, Homo sapien
tacaaagtgattggtttatccgact

SEQ ID NO: 98999 - DNA, 25 bp, Homo sapien
cggattcttatcgtgtttacgaaat

SEQ ID NO: 99000 - DNA, 25 bp, Homo sapien
cggattcttatcctgtttacgaaat

SEQ ID NO: 99001 - DNA, 25 bp, Homo sapien
atagtcgttctctacgtggtcatta

SEQ ID NO: 99002 - DNA, 25 bp, Homo sapien
atagtcgttctcaacgtggtcatta

SEQ ID NO: 99003 - DNA, 25 bp, Homo sapien
gtaggtctcacgaatgtaccactaa

SEQ ID NO: 99004 - DNA, 25 bp, Homo sapien
gtaggtctcacgtatgtaccactaa

SEQ ID NO: 99005 - DNA, 25 bp, Homo sapien
tgtcggggtccctccgttaacgaga

SEQ ID NO: 99006 - DNA, 25 bp, Homo sapien
tgtcggggtcccaccgttaacgaga

SEQ ID NO: 99007 - DNA, 25 bp, Homo sapien
cccactgttgttacacgtccagaca

SEQ ID NO: 99008 - DNA, 25 bp, Homo sapien
cccactgttgtttcacgtccagaca

SEQ ID NO: 99009 - DNA, 25 bp, Homo sapien
atcccactggggtcacctcggtcga

SEQ ID NO: 99010 - DNA, 25 bp, Homo sapien
atcccactggggacacctcggtcga

SEQ ID NO: 99011 - DNA, 25 bp, Homo sapien
gtcccatgttaattcaccggtcctc

SEQ ID NO: 99012 - DNA, 25 bp, Homo sapien
gtcccatgttaaatcaccggtcctc

SEQ ID NO: 99013 - DNA, 25 bp, Homo sapien
ttcgaggtggagtccccgacacctc

SEQ ID NO: 99014 - DNA, 25 bp, Homo sapien
ttcgaggtggagaccccgacacctc

SEQ ID NO: 99015 - DNA, 25 bp, Homo sapien
tcgggacaactttcctaggacatct

SEQ ID NO: 99016 - DNA, 25 bp, Homo sapien
tcgggacaacttacctaggacatct

SEQ ID NO: 99017 - DNA, 25 bp, Homo sapien
agtagtagcccctatcgagaagagg

SEQ ID NO: 99018 - DNA, 25 bp, Homo sapien
agtagtagccccaatcgagaagagg

SEQ ID NO: 99019 - DNA, 25 bp, Homo sapien
aagacccgtctctaccggagaaggt

SEQ ID NO: 99020 - DNA, 25 bp, Homo sapien
aagacccgtctcaaccggagaaggt

SEQ ID NO: 99021 - DNA, 25 bp, Homo sapien
taaggtaacattcgtccaggaggag

SEQ ID NO: 99022 - DNA, 25 bp, Homo sapien
taaggtaacattggtccaggaggag

SEQ ID NO: 99023 - DNA, 25 bp, Homo sapien
tcttcgggccgtttgttcctggtca

SEQ ID NO: 99024 - DNA, 25 bp, Homo sapien
tcttcgggccgtatgttcctggtca

SEQ ID NO: 99025 - DNA, 25 bp, Homo sapien
caagaggttacaaatcaccctgacc

SEQ ID NO: 99026 - DNA, 25 bp, Homo sapien
caagaggttacatatcaccctgacc

SEQ ID NO: 99027 - DNA, 25 bp, Homo sapien
taacagagatattaagcgtttgacc

SEQ ID NO: 99028 - DNA, 25 bp, Homo sapien
taacagagatataaagcgtttgacc

SEQ ID NO: 99029 - DNA, 25 bp, Homo sapien
gattattatgtttgcatacgtcaca

SEQ ID NO: 99030 - DNA, 25 bp, Homo sapien
gattattatgttagcatacgtcaca

SEQ ID NO: 99031 - DNA, 25 bp, Homo sapien
gtatcggtcaattggcaactaacta

SEQ ID NO: 99032 - DNA, 25 bp, Homo sapien
gtatcggtcaataggcaactaacta

SEQ ID NO: 99033 - DNA, 25 bp, Homo sapien
atcggacctatctaaagactaagta

SEQ ID NO: 99034 - DNA, 25 bp, Homo sapien
atcggacctatcaaaagactaagta

SEQ ID NO: 99035 - DNA, 25 bp, Homo sapien
agaaagaatcgtctacaaaaagaac

SEQ ID NO: 99036 - DNA, 25 bp, Homo sapien
agaaagaatcgtgtacaaaaagaac

SEQ ID NO: 99037 - DNA, 25 bp, Homo sapien
gaaagaaccgagtataaacacttta

SEQ ID NO: 99038 - DNA, 25 bp, Homo sapien
gaaagaaccgagaataaacacttta

SEQ ID NO: 99039 - DNA, 25 bp, Homo sapien
agtaggaccaattagtaaccttcta

SEQ ID NO: 99040 - DNA, 25 bp, Homo sapien
agtaggaccaataagtaaccttcta

SEQ ID NO: 99041 - DNA, 25 bp, Homo sapien
gtaccgaaccagattcaaccttccg

SEQ ID NO: 99042 - DNA, 25 bp, Homo sapien
gtaccgaaccagtttcaaccttccg

SEQ ID NO: 99043 - DNA, 25 bp, Homo sapien
cgggagaccccaggagatcgctccg

SEQ ID NO: 99044 - DNA, 25 bp, Homo sapien
cgggagaccccacgagatcgctccg

SEQ ID NO: 99045 - DNA, 25 bp, Homo sapien
ttgactacgcaagacgtctcctccg

SEQ ID NO: 99046 - DNA, 25 bp, Homo sapien
ttgactacgcaacacgtctcctccg

SEQ ID NO: 99047 - DNA, 25 bp, Homo sapien
ctagtaatcctcaatggttctaaga

SEQ ID NO: 99048 - DNA, 25 bp, Homo sapien
ctagtaatcctctatggttctaaga

SEQ ID NO: 99049 - DNA, 25 bp, Homo sapien
caaatcctcaaggtcccgagtcgac

SEQ ID NO: 99050 - DNA, 25 bp, Homo sapien
caaatcctcaagctcccgagtcgac

SEQ ID NO: 99051 - DNA, 25 bp, Homo sapien
ctccccttcgataactaggtctaag

SEQ ID NO: 99052 - DNA, 25 bp, Homo sapien
ctccccttcgattactaggtctaag

SEQ ID NO: 99053 - DNA, 25 bp, Homo sapien
ctccactcttgacgtacgaatcttg

SEQ ID NO: 99054 - DNA, 25 bp, Homo sapien
ctccactcttgaggtacgaatcttg

SEQ ID NO: 99055 - DNA, 25 bp, Homo sapien
ctacctcgtcgctagtcttcggtct

SEQ ID NO: 99056 - DNA, 25 bp, Homo sapien
ctacctcgtcgcaagtcttcggtct

SEQ ID NO: 99057 - DNA, 25 bp, Homo sapien
gacacgtcactgacgatgtcccctt

SEQ ID NO: 99058 - DNA, 25 bp, Homo sapien
gacacgtcactgtcgatgtcccctt

SEQ ID NO: 99059 - DNA, 25 bp, Homo sapien
gtgacgtccttctttactagtaaat

SEQ ID NO: 99060 - DNA, 25 bp, Homo sapien
gtgacgtccttcattactagtaaat

SEQ ID NO: 99061 - DNA, 25 bp, Homo sapien
ggttcgttcgtgactacataaggat

SEQ ID NO: 99062 - DNA, 25 bp, Homo sapien
ggttcgttcgtgtctacataaggat

SEQ ID NO: 99063 - DNA, 25 bp, Homo sapien
accggtcgatgtgacctaaaaacag

SEQ ID NO: 99064 - DNA, 25 bp, Homo sapien
accggtcgatgtcacctaaaaacag

SEQ ID NO: 99065 - DNA, 25 bp, Homo sapien
accgacttttctggtaaacacacag

SEQ ID NO: 99066 - DNA, 25 bp, Homo sapien
accgacttttctcgtaaacacacag

SEQ ID NO: 99067 - DNA, 25 bp, Homo sapien
gtgagaggatttttggacaaactcc

SEQ ID NO: 99068 - DNA, 25 bp, Homo sapien
gtgagaggatttatggacaaactcc

SEQ ID NO: 99069 - DNA, 25 bp, Homo sapien
taagtgaattaatagtcggcaaccc

SEQ ID NO: 99070 - DNA, 25 bp, Homo sapien
taagtgaattaaaagtcggcaaccc

SEQ ID NO: 99071 - DNA, 25 bp, Homo sapien
tgtcactgacaagtctaaacctccg

SEQ ID NO: 99072 - DNA, 25 bp, Homo sapien
tgtcactgacaactctaaacctccg

SEQ ID NO: 99073 - DNA, 25 bp, Homo sapien
gtttctccgaaaatccggcaccaac

SEQ ID NO: 99074 - DNA, 25 bp, Homo sapien
gtttctccgaaattccggcaccaac

SEQ ID NO: 99075 - DNA, 25 bp, Homo sapien
tttcctcggagacgtccttctcaga

SEQ ID NO: 99076 - DNA, 25 bp, Homo sapien
tttcctcggagaggtccttctcaga

SEQ ID NO: 99077 - DNA, 25 bp, Homo sapien
acttcaataaggtagtgacttccga

SEQ ID NO: 99078 - DNA, 25 bp, Homo sapien
acttcaataaggaagtgacttccga

SEQ ID NO: 99079 - DNA, 25 bp, Homo sapien
gatctgtgatctgtaaagggaccac

SEQ ID NO: 99080 - DNA, 25 bp, Homo sapien
gatctgtgatctctaaagggaccac

SEQ ID NO: 99081 - DNA, 25 bp, Homo sapien
ggtggtaccttctttagggtctcgc

SEQ ID NO: 99082 - DNA, 25 bp, Homo sapien
ggtggtaccttcattagggtctcgc

SEQ ID NO: 99083 - DNA, 25 bp, Homo sapien
tggagggtaaacaataactactccc

SEQ ID NO: 99084 - DNA, 25 bp, Homo sapien
tggagggtaaactataactactccc

SEQ ID NO: 99085 - DNA, 25 bp, Homo sapien
ggttatggaagaatcgaaccttaac

SEQ ID NO: 99086 - DNA, 25 bp, Homo sapien
ggttatggaagattcgaaccttaac

SEQ ID NO: 99087 - DNA, 25 bp, Homo sapien
tgttggatacatccttccgttcagt

SEQ ID NO: 99088 - DNA, 25 bp, Homo sapien
tgttggatacatgcttccgttcagt

SEQ ID NO: 99089 - DNA, 25 bp, Homo sapien
acaaggttatcatggtctgttaaac

SEQ ID NO: 99090 - DNA, 25 bp, Homo sapien
acaaggttatcaaggtctgttaaac

SEQ ID NO: 99091 - DNA, 25 bp, Homo sapien
aaacttaccacatcctcaagaacct

SEQ ID NO: 99092 - DNA, 25 bp, Homo sapien
aaacttaccacaacctcaagaacct

SEQ ID NO: 99093 - DNA, 25 bp, Homo sapien
aagtcagtcgaacattcgaaagacc

SEQ ID NO: 99094 - DNA, 25 bp, Homo sapien
aagtcagtcgaagattcgaaagacc

SEQ ID NO: 99095 - DNA, 25 bp, Homo sapien
gaagatgttcactgagcggtcctcc

SEQ ID NO: 99096 - DNA, 25 bp, Homo sapien
gaagatgttcacagagcggtcctcc

SEQ ID NO: 99097 - DNA, 25 bp, Homo sapien
agcttcgcgagtaagacgcggtgcc

SEQ ID NO: 99098 - DNA, 25 bp, Homo sapien
agcttcgcgagttagacgcggtgcc

SEQ ID NO: 99099 - DNA, 25 bp, Homo sapien
cgagttttccgttccgttatagcct

SEQ ID NO: 99100 - DNA, 25 bp, Homo sapien
cgagttttccgtaccgttatagcct

SEQ ID NO: 99101 - DNA, 25 bp, Homo sapien
agaggctttgtctccggggtagacc

SEQ ID NO: 99102 - DNA, 25 bp, Homo sapien
agaggctttgtcaccggggtagacc

SEQ ID NO: 99103 - DNA, 25 bp, Homo sapien
aagtcacatttctccactgaatagg

SEQ ID NO: 99104 - DNA, 25 bp, Homo sapien
aagtcacatttcaccactgaatagg

SEQ ID NO: 99105 - DNA, 25 bp, Homo sapien
cttagcaaaggttccggaggaaccg

SEQ ID NO: 99106 - DNA, 25 bp, Homo sapien
cttagcaaaggtaccggaggaaccg

SEQ ID NO: 99107 - DNA, 25 bp, Homo sapien
tatcacaaagagtccggccgaaact

SEQ ID NO: 99108 - DNA, 25 bp, Homo sapien
tatcacaaagagaccggccgaaact

SEQ ID NO: 99109 - DNA, 25 bp, Homo sapien
tgatagactgctaccgttcacaaat

SEQ ID NO: 99110 - DNA, 25 bp, Homo sapien
tgatagactgcttccgttcacaaat

SEQ ID NO: 99111 - DNA, 25 bp, Homo sapien
ggttatacccctagtattacttaag

SEQ ID NO: 99112 - DNA, 25 bp, Homo sapien
ggttataccccttgtattacttaag

SEQ ID NO: 99113 - DNA, 25 bp, Homo sapien
ccgaaccagacctagtacaataaag

SEQ ID NO: 99114 - DNA, 25 bp, Homo sapien
ccgaaccagaccaagtacaataaag

SEQ ID NO: 99115 - DNA, 25 bp, Homo sapien
gactatcccctagacgaatactaag

SEQ ID NO: 99116 - DNA, 25 bp, Homo sapien
gactatcccctacacgaatactaag

SEQ ID NO: 99117 - DNA, 25 bp, Homo sapien
agtcccactactcagtagaccctgt

SEQ ID NO: 99118 - DNA, 25 bp, Homo sapien
agtcccactactgagtagaccctgt

SEQ ID NO: 99119 - DNA, 25 bp, Homo sapien
cgagttctttctgactatgtctctc

SEQ ID NO: 99120 - DNA, 25 bp, Homo sapien
cgagttctttctcactatgtctctc

SEQ ID NO: 99121 - DNA, 25 bp, Homo sapien
gtgatcgatgtctgcctttttgtcc

SEQ ID NO: 99122 - DNA, 25 bp, Homo sapien
gtgatcgatgtcagcctttttgtcc

SEQ ID NO: 99123 - DNA, 25 bp, Homo sapien
ggagtcggtgcgacttggtttctcc

SEQ ID NO: 99124 - DNA, 25 bp, Homo sapien
ggagtcggtgcgtcttggtttctcc

SEQ ID NO: 99125 - DNA, 25 bp, Homo sapien
tcttcggtcgtctctgtttcgtata

SEQ ID NO: 99126 - DNA, 25 bp, Homo sapien
tcttcggtcgtcactgtttcgtata

SEQ ID NO: 99127 - DNA, 25 bp, Homo sapien
gaccttctggggtaactttctcgta

SEQ ID NO: 99128 - DNA, 25 bp, Homo sapien
gaccttctggggaaactttctcgta

SEQ ID NO: 99129 - DNA, 25 bp, Homo sapien
tgtccagactgtagacacctcctct

SEQ ID NO: 99130 - DNA, 25 bp, Homo sapien
tgtccagactgttgacacctcctct

SEQ ID NO: 99131 - DNA, 25 bp, Homo sapien
cttgtcccggattagatcctgacta

SEQ ID NO: 99132 - DNA, 25 bp, Homo sapien
cttgtcccggataagatcctgacta

SEQ ID NO: 99133 - DNA, 25 bp, Homo sapien
gaacctgtggggtattccactcaac

SEQ ID NO: 99134 - DNA, 25 bp, Homo sapien
gaacctgtggggaattccactcaac

SEQ ID NO: 99135 - DNA, 25 bp, Homo sapien
gagagggacgcataccaccatatga

SEQ ID NO: 99136 - DNA, 25 bp, Homo sapien
gagagggacgcaaaccaccatatga

SEQ ID NO: 99137 - DNA, 25 bp, Homo sapien
cagaagacgaggaacggaaaacctc

SEQ ID NO: 99138 - DNA, 25 bp, Homo sapien
cagaagacgaggtacggaaaacctc

SEQ ID NO: 99139 - DNA, 25 bp, Homo sapien
tcgaatgacagtttcgatctttccc

SEQ ID NO: 99140 - DNA, 25 bp, Homo sapien
tcgaatgacagtatcgatctttccc

SEQ ID NO: 99141 - DNA, 25 bp, Homo sapien
gacagtcggaggtccggaccctacc

SEQ ID NO: 99142 - DNA, 25 bp, Homo sapien
gacagtcggaggaccggaccctacc

SEQ ID NO: 99143 - DNA, 25 bp, Homo sapien
acgacgaccagaccttcccaggtga

SEQ ID NO: 99144 - DNA, 25 bp, Homo sapien
acgacgaccagagcttcccaggtga

SEQ ID NO: 99145 - DNA, 25 bp, Homo sapien
gtgccaccagagtggcacagccgac

SEQ ID NO: 99146 - DNA, 25 bp, Homo sapien
gtgccaccagagaggcacagccgac

SEQ ID NO: 99147 - DNA, 25 bp, Homo sapien
ctttaagtagggttgacatccgact

SEQ ID NO: 99148 - DNA, 25 bp, Homo sapien
ctttaagtagggatgacatccgact

SEQ ID NO: 99149 - DNA, 25 bp, Homo sapien
tcaaagggtcgtaccagtaacgact

SEQ ID NO: 99150 - DNA, 25 bp, Homo sapien
tcaaagggtcgttccagtaacgact

SEQ ID NO: 99151 - DNA, 25 bp, Homo sapien
agtttccacgatcttgtttagcagg

SEQ ID NO: 99152 - DNA, 25 bp, Homo sapien
agtttccacgatgttgtttagcagg

SEQ ID NO: 99153 - DNA, 25 bp, Homo sapien
agtgacgccttagtggttcctccct

SEQ ID NO: 99154 - DNA, 25 bp, Homo sapien
agtgacgccttactggttcctccct

SEQ ID NO: 99155 - DNA, 25 bp, Homo sapien
aacgttcactcctgtttcacaccct

SEQ ID NO: 99156 - DNA, 25 bp, Homo sapien
aacgttcactccagtttcacaccct

SEQ ID NO: 99157 - DNA, 25 bp, Homo sapien
gtgtgcgacatctggtgccggtcac

SEQ ID NO: 99158 - DNA, 25 bp, Homo sapien
gtgtgcgacatcaggtgccggtcac

SEQ ID NO: 99159 - DNA, 25 bp, Homo sapien
tgtgggacccgatcgcgacggtcct

SEQ ID NO: 99160 - DNA, 25 bp, Homo sapien
tgtgggacccgaacgcgacggtcct

SEQ ID NO: 99161 - DNA, 25 bp, Homo sapien
ctttcgacagggaaccggagtctct

SEQ ID NO: 99162 - DNA, 25 bp, Homo sapien
ctttcgacagggtaccggagtctct

SEQ ID NO: 99163 - DNA, 25 bp, Homo sapien
gtatttgacgggaccgtgagacatt

SEQ ID NO: 99164 - DNA, 25 bp, Homo sapien
gtatttgacgggtccgtgagacatt

SEQ ID NO: 99165 - DNA, 25 bp, Homo sapien
aactaaactggttggtgtaacctgt

SEQ ID NO: 99166 - DNA, 25 bp, Homo sapien
aactaaactggtaggtgtaacctgt

SEQ ID NO: 99167 - DNA, 25 bp, Homo sapien
cagtaacaaacctcggtcgtttccc

SEQ ID NO: 99168 - DNA, 25 bp, Homo sapien
cagtaacaaaccacggtcgtttccc

SEQ ID NO: 99169 - DNA, 25 bp, Homo sapien
aaagaaccctgaagtgtttacagtt

SEQ ID NO: 99170 - DNA, 25 bp, Homo sapien
aaagaaccctgatgtgtttacagtt

SEQ ID NO: 99171 - DNA, 25 bp, Homo sapien
atgtgccgtccatctttaccactgt

SEQ ID NO: 99172 - DNA, 25 bp, Homo sapien
atgtgccgtccaactttaccactgt

SEQ ID NO: 99173 - DNA, 25 bp, Homo sapien
gggggtcctagctgtactaagactt

SEQ ID NO: 99174 - DNA, 25 bp, Homo sapien
gggggtcctagcagtactaagactt

SEQ ID NO: 99175 - DNA, 25 bp, Homo sapien
tcctgtggtcctacggacgggtctc

SEQ ID NO: 99176 - DNA, 25 bp, Homo sapien
tcctgtggtccttcggacgggtctc

SEQ ID NO: 99177 - DNA, 25 bp, Homo sapien
tcgtggcctgggtcttcaaatttct

SEQ ID NO: 99178 - DNA, 25 bp, Homo sapien
tcgtggcctgggacttcaaatttct

SEQ ID NO: 99179 - DNA, 25 bp, Homo sapien
tcagtcggtgtcttcgacacaaccc

SEQ ID NO: 99180 - DNA, 25 bp, Homo sapien
tcagtcggtgtcatcgacacaaccc

SEQ ID NO: 99181 - DNA, 25 bp, Homo sapien
actgggactatctactagtatagtc

SEQ ID NO: 99182 - DNA, 25 bp, Homo sapien
actgggactatcaactagtatagtc

SEQ ID NO: 99183 - DNA, 25 bp, Homo sapien
acgaataatgtaatcgacgaagccc

SEQ ID NO: 99184 - DNA, 25 bp, Homo sapien
acgaataatgtattcgacgaagccc

SEQ ID NO: 99185 - DNA, 25 bp, Homo sapien
tcgagaaaggtgctaccgaaacgcc

SEQ ID NO: 99186 - DNA, 25 bp, Homo sapien
tcgagaaaggtggtaccgaaacgcc

SEQ ID NO: 99187 - DNA, 25 bp, Homo sapien
gttactgtattgttgacaaaaacca

SEQ ID NO: 99188 - DNA, 25 bp, Homo sapien
gttactgtattgatgacaaaaacca

SEQ ID NO: 99189 - DNA, 25 bp, Homo sapien
agtaacataaccaaatcaaaaccag

SEQ ID NO: 99190 - DNA, 25 bp, Homo sapien
agtaacataacctaatcaaaaccag

SEQ ID NO: 99191 - DNA, 25 bp, Homo sapien
gacattcacgtttgtcaacatctaa

SEQ ID NO: 99192 - DNA, 25 bp, Homo sapien
gacattcacgttagtcaacatctaa

SEQ ID NO: 99193 - DNA, 25 bp, Homo sapien
agagaatcttttgtatattgttcac

SEQ ID NO: 99194 - DNA, 25 bp, Homo sapien
agagaatcttttctatattgttcac

SEQ ID NO: 99195 - DNA, 25 bp, Homo sapien
gagaccttttcttgtccatttcacg

SEQ ID NO: 99196 - DNA, 25 bp, Homo sapien
gagaccttttctagtccatttcacg

SEQ ID NO: 99197 - DNA, 25 bp, Homo sapien
ggactcttgtttgttcatccggacg

SEQ ID NO: 99198 - DNA, 25 bp, Homo sapien
ggactcttgtttcttcatccggacg

SEQ ID NO: 99199 - DNA, 25 bp, Homo sapien
cgttctgtgacctggctttcggagg

SEQ ID NO: 99200 - DNA, 25 bp, Homo sapien
cgttctgtgaccaggctttcggagg

SEQ ID NO: 99201 - DNA, 25 bp, Homo sapien
gagtccgcaggctgtccgtcgagac

SEQ ID NO: 99202 - DNA, 25 bp, Homo sapien
gagtccgcaggcagtccgtcgagac

SEQ ID NO: 99203 - DNA, 25 bp, Homo sapien
gaacgtccaaaaactctcgtaagtg

SEQ ID NO: 99204 - DNA, 25 bp, Homo sapien
gaacgtccaaaatctctcgtaagtg

SEQ ID NO: 99205 - DNA, 25 bp, Homo sapien
tctaagaccgatttctcccgtgatt

SEQ ID NO: 99206 - DNA, 25 bp, Homo sapien
tctaagaccgatatctcccgtgatt

SEQ ID NO: 99207 - DNA, 25 bp, Homo sapien
actaagttgagtacgccaccaatat

SEQ ID NO: 99208 - DNA, 25 bp, Homo sapien
actaagttgagttcgccaccaatat

SEQ ID NO: 99209 - DNA, 25 bp, Homo sapien
cctccgttggtctccggacgacgaa

SEQ ID NO: 99210 - DNA, 25 bp, Homo sapien
cctccgttggtcaccggacgacgaa

SEQ ID NO: 99211 - DNA, 25 bp, Homo sapien
gggccttagaagatcaccagacaca

SEQ ID NO: 99212 - DNA, 25 bp, Homo sapien
gggccttagaagttcaccagacaca

SEQ ID NO: 99213 - DNA, 25 bp, Homo sapien
gtccctaaacggaatccacacgtca

SEQ ID NO: 99214 - DNA, 25 bp, Homo sapien
gtccctaaacggtatccacacgtca

SEQ ID NO: 99215 - DNA, 25 bp, Homo sapien
gtcggtaggagaaccgttaaaacca

SEQ ID NO: 99216 - DNA, 25 bp, Homo sapien
gtcggtaggagatccgttaaaacca

SEQ ID NO: 99217 - DNA, 25 bp, Homo sapien
cagaaaaacgttgtatacgagacca

SEQ ID NO: 99218 - DNA, 25 bp, Homo sapien
cagaaaaacgttctatacgagacca

SEQ ID NO: 99219 - DNA, 25 bp, Homo sapien
agagacactgtcactttctaccgac

SEQ ID NO: 99220 - DNA, 25 bp, Homo sapien
agagacactgtctctttctaccgac

SEQ ID NO: 99221 - DNA, 25 bp, Homo sapien
ccagaagactctgaggtggtcctcg

SEQ ID NO: 99222 - DNA, 25 bp, Homo sapien
ccagaagactctcaggtggtcctcg

SEQ ID NO: 99223 - DNA, 25 bp, Homo sapien
tcataggaccttagtcagtagtcca

SEQ ID NO: 99224 - DNA, 25 bp, Homo sapien
tcataggacctttgtcagtagtcca

SEQ ID NO: 99225 - DNA, 25 bp, Homo sapien
ttcgaactcttctgtgtcgttccac

SEQ ID NO: 99226 - DNA, 25 bp, Homo sapien
ttcgaactcttcagtgtcgttccac

SEQ ID NO: 99227 - DNA, 25 bp, Homo sapien
gtccttccgccaacagtttttagac

SEQ ID NO: 99228 - DNA, 25 bp, Homo sapien
gtccttccgccatcagtttttagac

SEQ ID NO: 99229 - DNA, 25 bp, Homo sapien
tttccgttacatttacgtttactgg

SEQ ID NO: 99230 - DNA, 25 bp, Homo sapien
tttccgttacatatacgtttactgg

SEQ ID NO: 99231 - DNA, 25 bp, Homo sapien
cctgtcccggaggaaactccggtgg

SEQ ID NO: 99232 - DNA, 25 bp, Homo sapien
cctgtcccggagcaaactccggtgg

SEQ ID NO: 99233 - DNA, 25 bp, Homo sapien
atgtctgttcgaacgactgggaacg

SEQ ID NO: 99234 - DNA, 25 bp, Homo sapien
atgtctgttcgatcgactgggaacg

SEQ ID NO: 99235 - DNA, 25 bp, Homo sapien
taaaatgcattgttgtctctggttc

SEQ ID NO: 99236 - DNA, 25 bp, Homo sapien
taaaatgcattgatgtctctggttc

SEQ ID NO: 99237 - DNA, 25 bp, Homo sapien
ttgactaccaagagtactgagttct

SEQ ID NO: 99238 - DNA, 25 bp, Homo sapien
ttgactaccaagtgtactgagttct

SEQ ID NO: 99239 - DNA, 25 bp, Homo sapien
aaagaaacggagacggtccattact

SEQ ID NO: 99240 - DNA, 25 bp, Homo sapien
aaagaaacggagtcggtccattact

SEQ ID NO: 99241 - DNA, 25 bp, Homo sapien
aaagaagaggaggtctctatctact

SEQ ID NO: 99242 - DNA, 25 bp, Homo sapien
aaagaagaggagctctctatctact

SEQ ID NO: 99243 - DNA, 25 bp, Homo sapien
gttgagaagtcgagaccggcttcac

SEQ ID NO: 99244 - DNA, 25 bp, Homo sapien
gttgagaagtcgtgaccggcttcac

SEQ ID NO: 99245 - DNA, 25 bp, Homo sapien
tgtgtcgggcgtgtcacaggtccaa

SEQ ID NO: 99246 - DNA, 25 bp, Homo sapien
tgtgtcgggcgtctcacaggtccaa

SEQ ID NO: 99247 - DNA, 25 bp, Homo sapien
agggtaagggatctccattacgaaa

SEQ ID NO: 99248 - DNA, 25 bp, Homo sapien
agggtaagggatgtccattacgaaa

SEQ ID NO: 99249 - DNA, 25 bp, Homo sapien
gtctgtaccagtccttccgatcgag

SEQ ID NO: 99250 - DNA, 25 bp, Homo sapien
gtctgtaccagtgcttccgatcgag

SEQ ID NO: 99251 - DNA, 25 bp, Homo sapien
gaggtacgacgacacgtcccactgg

SEQ ID NO: 99252 - DNA, 25 bp, Homo sapien
gaggtacgacgagacgtcccactgg

SEQ ID NO: 99253 - DNA, 25 bp, Homo sapien
gtaatacgagaggtacgtcccctgg

SEQ ID NO: 99254 - DNA, 25 bp, Homo sapien
gtaatacgagagctacgtcccctgg

SEQ ID NO: 99255 - DNA, 25 bp, Homo sapien
ttctggacgagatcgggtatgaccc

SEQ ID NO: 99256 - DNA, 25 bp, Homo sapien
ttctggacgagaacgggtatgaccc

SEQ ID NO: 99257 - DNA, 25 bp, Homo sapien
cgtctcccgtcggaggcaaggtcgc

SEQ ID NO: 99258 - DNA, 25 bp, Homo sapien
cgtctcccgtcgcaggcaaggtcgc

SEQ ID NO: 99259 - DNA, 25 bp, Homo sapien
tcaggtcctccgtgaacaagacgac

SEQ ID NO: 99260 - DNA, 25 bp, Homo sapien
tcaggtcctccgagaacaagacgac

SEQ ID NO: 99261 - DNA, 25 bp, Homo sapien
gtactcgtcgtctcagctcacaatc

SEQ ID NO: 99262 - DNA, 25 bp, Homo sapien
gtactcgtcgtcacagctcacaatc

SEQ ID NO: 99263 - DNA, 25 bp, Homo sapien
gagactacgtcaaaagaccctcaca

SEQ ID NO: 99264 - DNA, 25 bp, Homo sapien
gagactacgtcataagaccctcaca

SEQ ID NO: 99265 - DNA, 25 bp, Homo sapien
caggagtagtcctaaagtaattaca

SEQ ID NO: 99266 - DNA, 25 bp, Homo sapien
caggagtagtccaaaagtaattaca

SEQ ID NO: 99267 - DNA, 25 bp, Homo sapien
aacaggttcccctataggtgtctca

SEQ ID NO: 99268 - DNA, 25 bp, Homo sapien
aacaggttccccaataggtgtctca

SEQ ID NO: 99269 - DNA, 25 bp, Homo sapien
caaacggcgaggaaggtgactaaac

SEQ ID NO: 99270 - DNA, 25 bp, Homo sapien
caaacggcgaggtaggtgactaaac

SEQ ID NO: 99271 - DNA, 25 bp, Homo sapien
gaaagttgacgagagagttcatcac

SEQ ID NO: 99272 - DNA, 25 bp, Homo sapien
gaaagttgacgacagagttcatcac

SEQ ID NO: 99273 - DNA, 25 bp, Homo sapien
gaatgtgttaggttttaccgatctc

SEQ ID NO: 99274 - DNA, 25 bp, Homo sapien
gaatgtgttaggatttaccgatctc

SEQ ID NO: 99275 - DNA, 25 bp, Homo sapien
ttctgtatcagtgtaaacacatgtt

SEQ ID NO: 99276 - DNA, 25 bp, Homo sapien
ttctgtatcagtctaaacacatgtt

SEQ ID NO: 99277 - DNA, 25 bp, Homo sapien
tcgttgagacctaagaaatcatatt

SEQ ID NO: 99278 - DNA, 25 bp, Homo sapien
tcgttgagaccttagaaatcatatt

SEQ ID NO: 99279 - DNA, 25 bp, Homo sapien
atttcagacggaataaactcattcg

SEQ ID NO: 99280 - DNA, 25 bp, Homo sapien
atttcagacggattaaactcattcg

SEQ ID NO: 99281 - DNA, 25 bp, Homo sapien
ggagagacctataagaaagtctcgt

SEQ ID NO: 99282 - DNA, 25 bp, Homo sapien
ggagagacctattagaaagtctcgt

SEQ ID NO: 99283 - DNA, 25 bp, Homo sapien
ccggtctcgcctcaacttgcagtgg

SEQ ID NO: 99284 - DNA, 25 bp, Homo sapien
ccggtctcgcctgaacttgcagtgg

SEQ ID NO: 99285 - DNA, 25 bp, Homo sapien
acatgtatccaccgacactttttaa

SEQ ID NO: 99286 - DNA, 25 bp, Homo sapien
acatgtatccacggacactttttaa

SEQ ID NO: 99287 - DNA, 25 bp, Homo sapien
accttcccgtctcctgtatcgcagg

SEQ ID NO: 99288 - DNA, 25 bp, Homo sapien
accttcccgtctgctgtatcgcagg

SEQ ID NO: 99289 - DNA, 25 bp, Homo sapien
atctaacatcttggtgacatgacat

SEQ ID NO: 99290 - DNA, 25 bp, Homo sapien
atctaacatcttcgtgacatgacat

SEQ ID NO: 99291 - DNA, 25 bp, Homo sapien
gaggtacttcagaccgtgccactat

SEQ ID NO: 99292 - DNA, 25 bp, Homo sapien
gaggtacttcagtccgtgccactat

SEQ ID NO: 99293 - DNA, 25 bp, Homo sapien
ccggggtccgccacgtagaccaagt

SEQ ID NO: 99294 - DNA, 25 bp, Homo sapien
ccggggtccgcctcgtagaccaagt

SEQ ID NO: 99295 - DNA, 25 bp, Homo sapien
gtcgttagaggacttacgggaccaa

SEQ ID NO: 99296 - DNA, 25 bp, Homo sapien
gtcgttagaggagttacgggaccaa

SEQ ID NO: 99297 - DNA, 25 bp, Homo sapien
gactcagggggttcgtctcccgtcc

SEQ ID NO: 99298 - DNA, 25 bp, Homo sapien
gactcagggggtacgtctcccgtcc

SEQ ID NO: 99299 - DNA, 25 bp, Homo sapien
ttacaagggggttttacgaccactt

SEQ ID NO: 99300 - DNA, 25 bp, Homo sapien
ttacaagggggtattacgaccactt

SEQ ID NO: 99301 - DNA, 25 bp, Homo sapien
cgataaaggtcaaacttcgatgata

SEQ ID NO: 99302 - DNA, 25 bp, Homo sapien
cgataaaggtcatacttcgatgata

SEQ ID NO: 99303 - DNA, 25 bp, Homo sapien
gtgagtttcccaactttacgctaaa

SEQ ID NO: 99304 - DNA, 25 bp, Homo sapien
gtgagtttcccatctttacgctaaa

SEQ ID NO: 99305 - DNA, 25 bp, Homo sapien
cggttgtcctgtatatcctagggaa

SEQ ID NO: 99306 - DNA, 25 bp, Homo sapien
cggttgtcctgtttatcctagggaa

SEQ ID NO: 99307 - DNA, 25 bp, Homo sapien
gggttggtcctgacccagacggacc

SEQ ID NO: 99308 - DNA, 25 bp, Homo sapien
gggttggtcctgtcccagacggacc

SEQ ID NO: 99309 - DNA, 25 bp, Homo sapien
tgtagttccaactccttgtgaccgt

SEQ ID NO: 99310 - DNA, 25 bp, Homo sapien
tgtagttccaacaccttgtgaccgt

SEQ ID NO: 99311 - DNA, 25 bp, Homo sapien
agttccctacgtcctctaggtgccg

SEQ ID NO: 99312 - DNA, 25 bp, Homo sapien
agttccctacgtgctctaggtgccg

SEQ ID NO: 99313 - DNA, 25 bp, Homo sapien
gtttaattcggcgtccgaggtgagg

SEQ ID NO: 99314 - DNA, 25 bp, Homo sapien
gtttaattcggcctccgaggtgagg

SEQ ID NO: 99315 - DNA, 25 bp, Homo sapien
cttactcgtgggtccgttgtgtcag

SEQ ID NO: 99316 - DNA, 25 bp, Homo sapien
cttactcgtgggaccgttgtgtcag

SEQ ID NO: 99317 - DNA, 25 bp, Homo sapien
tttcgtgtgtcaatactggatcgtt

SEQ ID NO: 99318 - DNA, 25 bp, Homo sapien
tttcgtgtgtcattactggatcgtt

SEQ ID NO: 99319 - DNA, 25 bp, Homo sapien
catgtatgtatcgtactttgattct

SEQ ID NO: 99320 - DNA, 25 bp, Homo sapien
catgtatgtatcctactttgattct

SEQ ID NO: 99321 - DNA, 25 bp, Homo sapien
tcccagtctgaggattttaatccgt

SEQ ID NO: 99322 - DNA, 25 bp, Homo sapien
tcccagtctgagcattttaatccgt

SEQ ID NO: 99323 - DNA, 25 bp, Homo sapien
ctaaagtggtactctctaatgtggt

SEQ ID NO: 99324 - DNA, 25 bp, Homo sapien
ctaaagtggtacactctaatgtggt

SEQ ID NO: 99325 - DNA, 25 bp, Homo sapien
gcacctggcgcgacagacgatggct

SEQ ID NO: 99326 - DNA, 25 bp, Homo sapien
gcacctggcgcgtcagacgatggct

SEQ ID NO: 99327 - DNA, 25 bp, Homo sapien
tactttgacgagtctcaatagtgac

SEQ ID NO: 99328 - DNA, 25 bp, Homo sapien
tactttgacgagactcaatagtgac

SEQ ID NO: 99329 - DNA, 25 bp, Homo sapien
ccttatgtctgacgaaaaacttgac

SEQ ID NO: 99330 - DNA, 25 bp, Homo sapien
ccttatgtctgaggaaaaacttgac

SEQ ID NO: 99331 - DNA, 25 bp, Homo sapien
attatcgaagaggaacttgtgcttc

SEQ ID NO: 99332 - DNA, 25 bp, Homo sapien
attatcgaagagcaacttgtgcttc

SEQ ID NO: 99333 - DNA, 25 bp, Homo sapien
tgtaccaaagagtcacggtgtcttt

SEQ ID NO: 99334 - DNA, 25 bp, Homo sapien
tgtaccaaagagacacggtgtcttt

SEQ ID NO: 99335 - DNA, 25 bp, Homo sapien
gtctacgaaaaagacgattcctcgt

SEQ ID NO: 99336 - DNA, 25 bp, Homo sapien
gtctacgaaaaacacgattcctcgt

SEQ ID NO: 99337 - DNA, 25 bp, Homo sapien
aagtcgataaacagactcatggttg

SEQ ID NO: 99338 - DNA, 25 bp, Homo sapien
aagtcgataaactgactcatggttg

SEQ ID NO: 99339 - DNA, 25 bp, Homo sapien
gggaaggaaaacaactcatcctagg

SEQ ID NO: 99340 - DNA, 25 bp, Homo sapien
gggaaggaaaactactcatcctagg

SEQ ID NO: 99341 - DNA, 25 bp, Homo sapien
cgagagacggtagcatcacgagtag

SEQ ID NO: 99342 - DNA, 25 bp, Homo sapien
cgagagacggtaccatcacgagtag

SEQ ID NO: 99343 - DNA, 25 bp, Homo sapien
acaccggaacaaccagtctaggtgt

SEQ ID NO: 99344 - DNA, 25 bp, Homo sapien
acaccggaacaagcagtctaggtgt

SEQ ID NO: 99345 - DNA, 25 bp, Homo sapien
accacccgggtcgtccgagtctggg

SEQ ID NO: 99346 - DNA, 25 bp, Homo sapien
accacccgggtcctccgagtctggg

SEQ ID NO: 99347 - DNA, 25 bp, Homo sapien
caaactcttcggtcgcgagtgggtg

SEQ ID NO: 99348 - DNA, 25 bp, Homo sapien
caaactcttcggacgcgagtgggtg

SEQ ID NO: 99349 - DNA, 25 bp, Homo sapien
cccgaatattgagacgtcggggata

SEQ ID NO: 99350 - DNA, 25 bp, Homo sapien
cccgaatattgacacgtcggggata

SEQ ID NO: 99351 - DNA, 25 bp, Homo sapien
gtggccaattataccacgcagggaa

SEQ ID NO: 99352 - DNA, 25 bp, Homo sapien
gtggccaattattccacgcagggaa

SEQ ID NO: 99353 - DNA, 25 bp, Homo sapien
cccagaatacacacagacacagaag

SEQ ID NO: 99354 - DNA, 25 bp, Homo sapien
cccagaatacactcagacacagaag

SEQ ID NO: 99355 - DNA, 25 bp, Homo sapien
tcatatctaatcagtaacacatact

SEQ ID NO: 99356 - DNA, 25 bp, Homo sapien
tcatatctaatctgtaacacatact

SEQ ID NO: 99357 - DNA, 25 bp, Homo sapien
atgtctcttcagtgtgtccgacatg

SEQ ID NO: 99358 - DNA, 25 bp, Homo sapien
atgtctcttcagagtgtccgacatg

SEQ ID NO: 99359 - DNA, 25 bp, Homo sapien
gaggactcccagttgacctcagacc

SEQ ID NO: 99360 - DNA, 25 bp, Homo sapien
gaggactcccagatgacctcagacc

SEQ ID NO: 99361 - DNA, 25 bp, Homo sapien
agggaccctcaagacgacacctcag

SEQ ID NO: 99362 - DNA, 25 bp, Homo sapien
agggaccctcaacacgacacctcag

SEQ ID NO: 99363 - DNA, 25 bp, Homo sapien
gtggacctcgccaatcccgatgaga

SEQ ID NO: 99364 - DNA, 25 bp, Homo sapien
gtggacctcgcctatcccgatgaga

SEQ ID NO: 99365 - DNA, 25 bp, Homo sapien
attgatctttgttaagccgggagct

SEQ ID NO: 99366 - DNA, 25 bp, Homo sapien
attgatctttgtaaagccgggagct

SEQ ID NO: 99367 - DNA, 25 bp, Homo sapien
tcggagagactgagtacccggggat

SEQ ID NO: 99368 - DNA, 25 bp, Homo sapien
tcggagagactgtgtacccggggat

SEQ ID NO: 99369 - DNA, 25 bp, Homo sapien
accacggttacgtcgtcccggcagg

SEQ ID NO: 99370 - DNA, 25 bp, Homo sapien
accacggttacgacgtcccggcagg

SEQ ID NO: 99371 - DNA, 25 bp, Homo sapien
ttcgatcgcttccttgcatgtaaag

SEQ ID NO: 99372 - DNA, 25 bp, Homo sapien
ttcgatcgcttcgttgcatgtaaag

SEQ ID NO: 99373 - DNA, 25 bp, Homo sapien
agtcttgaaattcttgaagtcttca

SEQ ID NO: 99374 - DNA, 25 bp, Homo sapien
agtcttgaaattgttgaagtcttca

SEQ ID NO: 99375 - DNA, 25 bp, Homo sapien
ttagaaacctgttcgacaatcccga

SEQ ID NO: 99376 - DNA, 25 bp, Homo sapien
ttagaaacctgtacgacaatcccga

SEQ ID NO: 99377 - DNA, 25 bp, Homo sapien
tacacgacattcttttcaatgtaaa

SEQ ID NO: 99378 - DNA, 25 bp, Homo sapien
tacacgacattcatttcaatgtaaa

SEQ ID NO: 99379 - DNA, 25 bp, Homo sapien
acccgttgtcatttaatctttatag

SEQ ID NO: 99380 - DNA, 25 bp, Homo sapien
acccgttgtcatataatctttatag

SEQ ID NO: 99381 - DNA, 25 bp, Homo sapien
tgtgttgacagtggtgtacttttcc

SEQ ID NO: 99382 - DNA, 25 bp, Homo sapien
tgtgttgacagtcgtgtacttttcc

SEQ ID NO: 99383 - DNA, 25 bp, Homo sapien
gtttataaccgttcgtgattttaca

SEQ ID NO: 99384 - DNA, 25 bp, Homo sapien
gtttataaccgtacgtgattttaca

SEQ ID NO: 99385 - DNA, 25 bp, Homo sapien
gagactcctttctcagatttgtaat

SEQ ID NO: 99386 - DNA, 25 bp, Homo sapien
gagactcctttcacagatttgtaat

SEQ ID NO: 99387 - DNA, 25 bp, Homo sapien
ggtttacttccccacgaatgtaccc

SEQ ID NO: 99388 - DNA, 25 bp, Homo sapien
ggtttacttcccgacgaatgtaccc

SEQ ID NO: 99389 - DNA, 25 bp, Homo sapien
tgggacttcctctcagactagaccc

SEQ ID NO: 99390 - DNA, 25 bp, Homo sapien
tgggacttcctcacagactagaccc

SEQ ID NO: 99391 - DNA, 25 bp, Homo sapien
ctagacacgtcctaatgaaccgttc

SEQ ID NO: 99392 - DNA, 25 bp, Homo sapien
ctagacacgtccaaatgaaccgttc

SEQ ID NO: 99393 - DNA, 25 bp, Homo sapien
tcaatgtcaagaactccaccgtagg

SEQ ID NO: 99394 - DNA, 25 bp, Homo sapien
tcaatgtcaagatctccaccgtagg

SEQ ID NO: 99395 - DNA, 25 bp, Homo sapien
gggtcggtcctcgttccgaccgaac

SEQ ID NO: 99396 - DNA, 25 bp, Homo sapien
gggtcggtcctccttccgaccgaac

SEQ ID NO: 99397 - DNA, 25 bp, Homo sapien
aaaggacagtcataccgtaactaac

SEQ ID NO: 99398 - DNA, 25 bp, Homo sapien
aaaggacagtcaaaccgtaactaac

SEQ ID NO: 99399 - DNA, 25 bp, Homo sapien
ggtaagcgggacgagctaggaccta

SEQ ID NO: 99400 - DNA, 25 bp, Homo sapien
ggtaagcgggaccagctaggaccta

SEQ ID NO: 99401 - DNA, 25 bp, Homo sapien
cgggtctaccggaccaaaggacctc

SEQ ID NO: 99402 - DNA, 25 bp, Homo sapien
cgggtctaccggtccaaaggacctc

SEQ ID NO: 99403 - DNA, 25 bp, Homo sapien
acccgcttccgtaggtcgtactacg

SEQ ID NO: 99404 - DNA, 25 bp, Homo sapien
acccgcttccgttggtcgtactacg

SEQ ID NO: 99405 - DNA, 25 bp, Homo sapien
gtctctcgagacctgtgagcgtcat

SEQ ID NO: 99406 - DNA, 25 bp, Homo sapien
gtctctcgagacgtgtgagcgtcat

SEQ ID NO: 99407 - DNA, 25 bp, Homo sapien
gagtcgggtcggacctcaagccgat

SEQ ID NO: 99408 - DNA, 25 bp, Homo sapien
gagtcgggtcggtcctcaagccgat

SEQ ID NO: 99409 - DNA, 25 bp, Homo sapien
taaggtccggcaaccgacgtccact

SEQ ID NO: 99410 - DNA, 25 bp, Homo sapien
taaggtccggcatccgacgtccact

SEQ ID NO: 99411 - DNA, 25 bp, Homo sapien
actgccgcgacgtcgggacctacgt

SEQ ID NO: 99412 - DNA, 25 bp, Homo sapien
actgccgcgacgacgggacctacgt

SEQ ID NO: 99413 - DNA, 25 bp, Homo sapien
ccacaaccacaacatgagacacacg

SEQ ID NO: 99414 - DNA, 25 bp, Homo sapien
ccacaaccacaagatgagacacacg

SEQ ID NO: 99415 - DNA, 25 bp, Homo sapien
aatagaatacacatcattcgaaact

SEQ ID NO: 99416 - DNA, 25 bp, Homo sapien
aatagaatacacttcattcgaaact

SEQ ID NO: 99417 - DNA, 25 bp, Homo sapien
caaaggcatctcgtgagagtgacaa

SEQ ID NO: 99418 - DNA, 25 bp, Homo sapien
caaaggcatctcctgagagtgacaa

SEQ ID NO: 99419 - DNA, 25 bp, Homo sapien
aggtggaacatctcatcagtattaa

SEQ ID NO: 99420 - DNA, 25 bp, Homo sapien
aggtggaacatcacatcagtattaa

SEQ ID NO: 99421 - DNA, 25 bp, Homo sapien
agttatacttcgacatctggtagaa

SEQ ID NO: 99422 - DNA, 25 bp, Homo sapien
agttatacttcgtcatctggtagaa

SEQ ID NO: 99423 - DNA, 25 bp, Homo sapien
accgcgaactcgcgcatctggtgca

SEQ ID NO: 99424 - DNA, 25 bp, Homo sapien
accgcgaactcgggcatctggtgca

SEQ ID NO: 99425 - DNA, 25 bp, Homo sapien
tcgtccccaagacgtccggtgacat

SEQ ID NO: 99426 - DNA, 25 bp, Homo sapien
tcgtccccaagaggtccggtgacat

SEQ ID NO: 99427 - DNA, 25 bp, Homo sapien
tggacaaatcgatggggacgacagt

SEQ ID NO: 99428 - DNA, 25 bp, Homo sapien
tggacaaatcgaaggggacgacagt

SEQ ID NO: 99429 - DNA, 25 bp, Homo sapien
gtcaaaacaccgacgagaatcacat

SEQ ID NO: 99430 - DNA, 25 bp, Homo sapien
gtcaaaacaccgtcgagaatcacat

SEQ ID NO: 99431 - DNA, 25 bp, Homo sapien
taaccgagtaggacgtatactccat

SEQ ID NO: 99432 - DNA, 25 bp, Homo sapien
taaccgagtaggtcgtatactccat

SEQ ID NO: 99433 - DNA, 25 bp, Homo sapien
tttaaggtgtctacagtgcctcagg

SEQ ID NO: 99434 - DNA, 25 bp, Homo sapien
tttaaggtgtcttcagtgcctcagg

SEQ ID NO: 99435 - DNA, 25 bp, Homo sapien
atttatggataggtcctatctcact

SEQ ID NO: 99436 - DNA, 25 bp, Homo sapien
atttatggatagctcctatctcact

SEQ ID NO: 99437 - DNA, 25 bp, Homo sapien
ctctgtggtaggtgtttctactttc

SEQ ID NO: 99438 - DNA, 25 bp, Homo sapien
ctctgtggtaggagtttctactttc

SEQ ID NO: 99439 - DNA, 25 bp, Homo sapien
ctggattactgttggaaccgtcggt

SEQ ID NO: 99440 - DNA, 25 bp, Homo sapien
ctggattactgtaggaaccgtcggt

SEQ ID NO: 99441 - DNA, 25 bp, Homo sapien
gtcggagtctgaggaaacgacctcc

SEQ ID NO: 99442 - DNA, 25 bp, Homo sapien
gtcggagtctgacgaaacgacctcc

SEQ ID NO: 99443 - DNA, 25 bp, Homo sapien
ggtcgacatcagtgcaacccgttac

SEQ ID NO: 99444 - DNA, 25 bp, Homo sapien
ggtcgacatcagagcaacccgttac

SEQ ID NO: 99445 - DNA, 25 bp, Homo sapien
gaagaagaaaggacaaaaccgttcg

SEQ ID NO: 99446 - DNA, 25 bp, Homo sapien
gaagaagaaaggtcaaaaccgttcg

SEQ ID NO: 99447 - DNA, 25 bp, Homo sapien
cagatgagtcccaagtcccgtacct

SEQ ID NO: 99448 - DNA, 25 bp, Homo sapien
cagatgagtccctagtcccgtacct

SEQ ID NO: 99449 - DNA, 25 bp, Homo sapien
catgcactctatagaaattgggact

SEQ ID NO: 99450 - DNA, 25 bp, Homo sapien
catgcactctattgaaattgggact

SEQ ID NO: 99451 - DNA, 25 bp, Homo sapien
agcaagtgagtaccttttatcgcta

SEQ ID NO: 99452 - DNA, 25 bp, Homo sapien
agcaagtgagtagcttttatcgcta

SEQ ID NO: 99453 - DNA, 25 bp, Homo sapien
acgtctggccacagtgtcccagcga

SEQ ID NO: 99454 - DNA, 25 bp, Homo sapien
acgtctggccactgtgtcccagcga

SEQ ID NO: 99455 - DNA, 25 bp, Homo sapien
ttcagtactcgttgtccggtgtcag

SEQ ID NO: 99456 - DNA, 25 bp, Homo sapien
ttcagtactcgtagtccggtgtcag

SEQ ID NO: 99457 - DNA, 25 bp, Homo sapien
gttctgataacctgggtcctttcga

SEQ ID NO: 99458 - DNA, 25 bp, Homo sapien
gttctgataaccagggtcctttcga

SEQ ID NO: 99459 - DNA, 25 bp, Homo sapien
cgcttataagagaaggtcccactca

SEQ ID NO: 99460 - DNA, 25 bp, Homo sapien
cgcttataagagtaggtcccactca

SEQ ID NO: 99461 - DNA, 25 bp, Homo sapien
tttccaggggtcttcgtacccccga

SEQ ID NO: 99462 - DNA, 25 bp, Homo sapien
tttccaggggtcatcgtacccccga

SEQ ID NO: 99463 - DNA, 25 bp, Homo sapien
ttcctaggcagtgacaaccccggct

SEQ ID NO: 99464 - DNA, 25 bp, Homo sapien
ttcctaggcagtcacaaccccggct

SEQ ID NO: 99465 - DNA, 25 bp, Homo sapien
tttttcgttgggtgtctactactcc

SEQ ID NO: 99466 - DNA, 25 bp, Homo sapien
tttttcgttgggagtctactactcc

SEQ ID NO: 99467 - DNA, 25 bp, Homo sapien
tattcttcgggctgtcatttgtcct

SEQ ID NO: 99468 - DNA, 25 bp, Homo sapien
tattcttcgggcagtcatttgtcct

SEQ ID NO: 99469 - DNA, 25 bp, Homo sapien
caatttggactcaacccgtttgagt

SEQ ID NO: 99470 - DNA, 25 bp, Homo sapien
caatttggactctacccgtttgagt

SEQ ID NO: 99471 - DNA, 25 bp, Homo sapien
aatgaggtatcattgaccatctggt

SEQ ID NO: 99472 - DNA, 25 bp, Homo sapien
aatgaggtatcaatgaccatctggt

SEQ ID NO: 99473 - DNA, 25 bp, Homo sapien
aaagtggactcatcttctcccttgt

SEQ ID NO: 99474 - DNA, 25 bp, Homo sapien
aaagtggactcaacttctcccttgt

SEQ ID NO: 99475 - DNA, 25 bp, Homo sapien
tgacagacacaattgtctccgatgt

SEQ ID NO: 99476 - DNA, 25 bp, Homo sapien
tgacagacacaaatgtctccgatgt

SEQ ID NO: 99477 - DNA, 25 bp, Homo sapien
ggagggtctacaatgtactccgggt

SEQ ID NO: 99478 - DNA, 25 bp, Homo sapien
ggagggtctacattgtactccgggt

SEQ ID NO: 99479 - DNA, 25 bp, Homo sapien
ccgaggggtcccatagagcagagac

SEQ ID NO: 99480 - DNA, 25 bp, Homo sapien
ccgaggggtcccttagagcagagac

SEQ ID NO: 99481 - DNA, 25 bp, Homo sapien
cctcacttcccttacagtgaggact

SEQ ID NO: 99482 - DNA, 25 bp, Homo sapien
cctcacttccctaacagtgaggact

SEQ ID NO: 99483 - DNA, 25 bp, Homo sapien
aactctgtcccgacaacagagggat

SEQ ID NO: 99484 - DNA, 25 bp, Homo sapien
aactctgtcccgtcaacagagggat

SEQ ID NO: 99485 - DNA, 25 bp, Homo sapien
acggtccccaagacgcagtgtagct

SEQ ID NO: 99486 - DNA, 25 bp, Homo sapien
acggtccccaagtcgcagtgtagct

SEQ ID NO: 99487 - DNA, 25 bp, Homo sapien
cagacactcccttcgaggtggagtc

SEQ ID NO: 99488 - DNA, 25 bp, Homo sapien
cagacactccctacgaggtggagtc

SEQ ID NO: 99489 - DNA, 25 bp, Homo sapien
actgggtcaagaaccactcagagcg

SEQ ID NO: 99490 - DNA, 25 bp, Homo sapien
actgggtcaagatccactcagagcg

SEQ ID NO: 99491 - DNA, 25 bp, Homo sapien
tccggacgacgaagatcctccacaa

SEQ ID NO: 99492 - DNA, 25 bp, Homo sapien
tccggacgacgatgatcctccacaa

SEQ ID NO: 99493 - DNA, 25 bp, Homo sapien
tgagacacgaggtccgtctcaagac

SEQ ID NO: 99494 - DNA, 25 bp, Homo sapien
tgagacacgaggaccgtctcaagac

SEQ ID NO: 99495 - DNA, 25 bp, Homo sapien
tgtgagtgtcgaaaacgcttctggg

SEQ ID NO: 99496 - DNA, 25 bp, Homo sapien
tgtgagtgtcgataacgcttctggg

SEQ ID NO: 99497 - DNA, 25 bp, Homo sapien
gagactctacctacgcttctaggct

SEQ ID NO: 99498 - DNA, 25 bp, Homo sapien
gagactctaccttcgcttctaggct

SEQ ID NO: 99499 - DNA, 25 bp, Homo sapien
gggtgttacctttctttagacgagt

SEQ ID NO: 99500 - DNA, 25 bp, Homo sapien
gggtgttaccttactttagacgagt

SEQ ID NO: 99501 - DNA, 25 bp, Homo sapien
gtccatttgtctctgcgaatttatt

SEQ ID NO: 99502 - DNA, 25 bp, Homo sapien
gtccatttgtctgtgcgaatttatt

SEQ ID NO: 99503 - DNA, 25 bp, Homo sapien
ccttcttctggttcaagtgttgtgt

SEQ ID NO: 99504 - DNA, 25 bp, Homo sapien
ccttcttctggtacaagtgttgtgt

SEQ ID NO: 99505 - DNA, 25 bp, Homo sapien
cttttgtttatattatcatttaagt

SEQ ID NO: 99506 - DNA, 25 bp, Homo sapien
cttttgtttataatatcatttaagt

SEQ ID NO: 99507 - DNA, 25 bp, Homo sapien
cggtagtttgttctcagttctctat

SEQ ID NO: 99508 - DNA, 25 bp, Homo sapien
cggtagtttgttgtcagttctctat

SEQ ID NO: 99509 - DNA, 25 bp, Homo sapien
tacttgtacgtcttcattgttgtca

SEQ ID NO: 99510 - DNA, 25 bp, Homo sapien
tacttgtacgtcatcattgttgtca

SEQ ID NO: 99511 - DNA, 25 bp, Homo sapien
ccgaaatggtagtaacatcaatgtc

SEQ ID NO: 99512 - DNA, 25 bp, Homo sapien
ccgaaatggtagaaacatcaatgtc

SEQ ID NO: 99513 - DNA, 25 bp, Homo sapien
atttaataatacaatttcataagta

SEQ ID NO: 99514 - DNA, 25 bp, Homo sapien
atttaataatactatttcataagta

SEQ ID NO: 99515 - DNA, 25 bp, Homo sapien
gttaggtactccaccttcgatgtaa

SEQ ID NO: 99516 - DNA, 25 bp, Homo sapien
gttaggtactcctccttcgatgtaa

SEQ ID NO: 99517 - DNA, 25 bp, Homo sapien
agtgacggactgtacattttgtaca

SEQ ID NO: 99518 - DNA, 25 bp, Homo sapien
agtgacggactgaacattttgtaca

SEQ ID NO: 99519 - DNA, 25 bp, Homo sapien
ggtgtaaccgttcatatcttatctt

SEQ ID NO: 99520 - DNA, 25 bp, Homo sapien
ggtgtaaccgttgatatcttatctt

SEQ ID NO: 99521 - DNA, 25 bp, Homo sapien
tggtagtctgcctcttggacgtcgt

SEQ ID NO: 99522 - DNA, 25 bp, Homo sapien
tggtagtctgccacttggacgtcgt

SEQ ID NO: 99523 - DNA, 25 bp, Homo sapien
ctctggtctccgtttcaggaacggt

SEQ ID NO: 99524 - DNA, 25 bp, Homo sapien
ctctggtctccgattcaggaacggt

SEQ ID NO: 99525 - DNA, 25 bp, Homo sapien
tcaggtactgcgtcgggcgtgacct

SEQ ID NO: 99526 - DNA, 25 bp, Homo sapien
tcaggtactgcgacgggcgtgacct

SEQ ID NO: 99527 - DNA, 25 bp, Homo sapien
tcgaccgacggttgtccgggtcacc

SEQ ID NO: 99528 - DNA, 25 bp, Homo sapien
tcgaccgacggtagtccgggtcacc

SEQ ID NO: 99529 - DNA, 25 bp, Homo sapien
cgtcgactgccgaaggggccacgac

SEQ ID NO: 99530 - DNA, 25 bp, Homo sapien
cgtcgactgccgtaggggccacgac

SEQ ID NO: 99531 - DNA, 25 bp, Homo sapien
ccgcgacccagagtgagagaccttc

SEQ ID NO: 99532 - DNA, 25 bp, Homo sapien
ccgcgacccagactgagagaccttc

SEQ ID NO: 99533 - DNA, 25 bp, Homo sapien
tgaggacccaggttcagaggtgaca

SEQ ID NO: 99534 - DNA, 25 bp, Homo sapien
tgaggacccaggatcagaggtgaca

SEQ ID NO: 99535 - DNA, 25 bp, Homo sapien
aaaagacaggcatcacagaggtgca

SEQ ID NO: 99536 - DNA, 25 bp, Homo sapien
aaaagacaggcaacacagaggtgca

SEQ ID NO: 99537 - DNA, 25 bp, Homo sapien
tggtcaatacccagaaggaccgtac

SEQ ID NO: 99538 - DNA, 25 bp, Homo sapien
tggtcaataccctgaaggaccgtac

SEQ ID NO: 99539 - DNA, 25 bp, Homo sapien
aacagacgactctccctgtaccgtt

SEQ ID NO: 99540 - DNA, 25 bp, Homo sapien
aacagacgactcaccctgtaccgtt

SEQ ID NO: 99541 - DNA, 25 bp, Homo sapien
tcaccgtaacggacctgcgacgtgt

SEQ ID NO: 99542 - DNA, 25 bp, Homo sapien
tcaccgtaacggtcctgcgacgtgt

SEQ ID NO: 99543 - DNA, 25 bp, Homo sapien
gtgactcgtgcgtccccgacagtgt

SEQ ID NO: 99544 - DNA, 25 bp, Homo sapien
gtgactcgtgcgaccccgacagtgt

SEQ ID NO: 99545 - DNA, 25 bp, Homo sapien
tacatgtacgaggacacccgtcagg

SEQ ID NO: 99546 - DNA, 25 bp, Homo sapien
tacatgtacgagcacacccgtcagg

SEQ ID NO: 99547 - DNA, 25 bp, Homo sapien
tacaaatgtagaaccctgaggtatc

SEQ ID NO: 99548 - DNA, 25 bp, Homo sapien
tacaaatgtagatccctgaggtatc

SEQ ID NO: 99549 - DNA, 25 bp, Homo sapien
ttagaagagagacatactgggtcac

SEQ ID NO: 99550 - DNA, 25 bp, Homo sapien
ttagaagagagagatactgggtcac

SEQ ID NO: 99551 - DNA, 25 bp, Homo sapien
tgtcggagaggagtcctcctgtctc

SEQ ID NO: 99552 - DNA, 25 bp, Homo sapien
tgtcggagaggactcctcctgtctc

SEQ ID NO: 99553 - DNA, 25 bp, Homo sapien
aaaaaagtgtcatcctttccgtgag

SEQ ID NO: 99554 - DNA, 25 bp, Homo sapien
aaaaaagtgtcaacctttccgtgag

SEQ ID NO: 99555 - DNA, 25 bp, Homo sapien
acgaatatatctcgtccttttaggg

SEQ ID NO: 99556 - DNA, 25 bp, Homo sapien
acgaatatatctggtccttttaggg

SEQ ID NO: 99557 - DNA, 25 bp, Homo sapien
gagcatgactcgtcctaatggtacc

SEQ ID NO: 99558 - DNA, 25 bp, Homo sapien
gagcatgactcgacctaatggtacc

SEQ ID NO: 99559 - DNA, 25 bp, Homo sapien
taagatcacacgtctaaatcggaga

SEQ ID NO: 99560 - DNA, 25 bp, Homo sapien
taagatcacacgactaaatcggaga

SEQ ID NO: 99561 - DNA, 25 bp, Homo sapien
ggaccctcggtggacagtggacact

SEQ ID NO: 99562 - DNA, 25 bp, Homo sapien
ggaccctcggtgcacagtggacact

SEQ ID NO: 99563 - DNA, 25 bp, Homo sapien
gtggttcatcgttgtcgaaaaacac

SEQ ID NO: 99564 - DNA, 25 bp, Homo sapien
gtggttcatcgtagtcgaaaaacac

SEQ ID NO: 99565 - DNA, 25 bp, Homo sapien
tacagagacttcttgtggaaaaact

SEQ ID NO: 99566 - DNA, 25 bp, Homo sapien
tacagagacttcatgtggaaaaact

SEQ ID NO: 99567 - DNA, 25 bp, Homo sapien
actgaatcccgttaaactaagacgt

SEQ ID NO: 99568 - DNA, 25 bp, Homo sapien
actgaatcccgtaaaactaagacgt

SEQ ID NO: 99569 - DNA, 25 bp, Homo sapien
ataaggtgacccaaacgtctaaacg

SEQ ID NO: 99570 - DNA, 25 bp, Homo sapien
ataaggtgaccctaacgtctaaacg

SEQ ID NO: 99571 - DNA, 25 bp, Homo sapien
cagtaaggggtcctcagagtcgaaa

SEQ ID NO: 99572 - DNA, 25 bp, Homo sapien
cagtaaggggtcgtcagagtcgaaa

SEQ ID NO: 99573 - DNA, 25 bp, Homo sapien
tactggtgtcggagacgtgaacacg

SEQ ID NO: 99574 - DNA, 25 bp, Homo sapien
tactggtgtcggtgacgtgaacacg

SEQ ID NO: 99575 - DNA, 25 bp, Homo sapien
ggaaatgttcggtcgatgaacgtct

SEQ ID NO: 99576 - DNA, 25 bp, Homo sapien
ggaaatgttcggacgatgaacgtct

SEQ ID NO: 99577 - DNA, 25 bp, Homo sapien
gggtcgaaagtgtcaactaccttat

SEQ ID NO: 99578 - DNA, 25 bp, Homo sapien
gggtcgaaagtgacaactaccttat

SEQ ID NO: 99579 - DNA, 25 bp, Homo sapien
cttggtgcaatgtctcctacatcga

SEQ ID NO: 99580 - DNA, 25 bp, Homo sapien
cttggtgcaatgactcctacatcga

SEQ ID NO: 99581 - DNA, 25 bp, Homo sapien
gggtggtttatatccttctctactg

SEQ ID NO: 99582 - DNA, 25 bp, Homo sapien
gggtggtttataaccttctctactg

SEQ ID NO: 99583 - DNA, 25 bp, Homo sapien
gtctcgtgtctcaaccctagctaat

SEQ ID NO: 99584 - DNA, 25 bp, Homo sapien
gtctcgtgtctctaccctagctaat

SEQ ID NO: 99585 - DNA, 25 bp, Homo sapien
accgacttgtctctgttaccaccga

SEQ ID NO: 99586 - DNA, 25 bp, Homo sapien
accgacttgtctgtgttaccaccga

SEQ ID NO: 99587 - DNA, 25 bp, Homo sapien
tatgttccgttttactccactcgag

SEQ ID NO: 99588 - DNA, 25 bp, Homo sapien
tatgttccgtttaactccactcgag

SEQ ID NO: 99589 - DNA, 25 bp, Homo sapien
ccgggacgcgtgactccatcgacgt

SEQ ID NO: 99590 - DNA, 25 bp, Homo sapien
ccgggacgcgtgtctccatcgacgt

SEQ ID NO: 99591 - DNA, 25 bp, Homo sapien
tcgtgcaccgtgtacccagtgtcgt

SEQ ID NO: 99592 - DNA, 25 bp, Homo sapien
tcgtgcaccgtgaacccagtgtcgt

SEQ ID NO: 99593 - DNA, 25 bp, Homo sapien
cattagcaagtgtaacttagttact

SEQ ID NO: 99594 - DNA, 25 bp, Homo sapien
cattagcaagtgaaacttagttact

SEQ ID NO: 99595 - DNA, 25 bp, Homo sapien
tgtatatcttataactcacttcttt

SEQ ID NO: 99596 - DNA, 25 bp, Homo sapien
tgtatatcttattactcacttcttt

SEQ ID NO: 99597 - DNA, 25 bp, Homo sapien
agattccttatgatcacgtcgtatt

SEQ ID NO: 99598 - DNA, 25 bp, Homo sapien
agattccttatgttcacgtcgtatt

SEQ ID NO: 99599 - DNA, 25 bp, Homo sapien
actactttgtactgttcacttgcgt

SEQ ID NO: 99600 - DNA, 25 bp, Homo sapien
actactttgtacagttcacttgcgt

SEQ ID NO: 99601 - DNA, 25 bp, Homo sapien
gcgtatagtgttcagatcagtcttt

SEQ ID NO: 99602 - DNA, 25 bp, Homo sapien
gcgtatagtgttgagatcagtcttt

SEQ ID NO: 99603 - DNA, 25 bp, Homo sapien
ggtgaacgaagtgagaacggtcatc

SEQ ID NO: 99604 - DNA, 25 bp, Homo sapien
ggtgaacgaagtcagaacggtcatc

SEQ ID NO: 99605 - DNA, 25 bp, Homo sapien
gggagcctgtgactactgtcactac

SEQ ID NO: 99606 - DNA, 25 bp, Homo sapien
gggagcctgtgagtactgtcactac

SEQ ID NO: 99607 - DNA, 25 bp, Homo sapien
gtacccggggtgacaccgagtccga

SEQ ID NO: 99608 - DNA, 25 bp, Homo sapien
gtacccggggtgtcaccgagtccga

SEQ ID NO: 99609 - DNA, 25 bp, Homo sapien
aaggtggagacgactaaactctcgg

SEQ ID NO: 99610 - DNA, 25 bp, Homo sapien
aaggtggagacgtctaaactctcgg

SEQ ID NO: 99611 - DNA, 25 bp, Homo sapien
gaggacacgacgtcaccgacccggt

SEQ ID NO: 99612 - DNA, 25 bp, Homo sapien
gaggacacgacgacaccgacccggt

SEQ ID NO: 99613 - DNA, 25 bp, Homo sapien
ccatgtaacacgacccgtaacacgg

SEQ ID NO: 99614 - DNA, 25 bp, Homo sapien
ccatgtaacacgtcccgtaacacgg

SEQ ID NO: 99615 - DNA, 25 bp, Homo sapien
ccttctagagtttcggctcgaaccg

SEQ ID NO: 99616 - DNA, 25 bp, Homo sapien
ccttctagagttacggctcgaaccg

SEQ ID NO: 99617 - DNA, 25 bp, Homo sapien
ccttctacggcaaccgtttgaccgt

SEQ ID NO: 99618 - DNA, 25 bp, Homo sapien
ccttctacggcatccgtttgaccgt

SEQ ID NO: 99619 - DNA, 25 bp, Homo sapien
atgtccttcaacaccggtgtaccca

SEQ ID NO: 99620 - DNA, 25 bp, Homo sapien
atgtccttcaactccggtgtaccca

SEQ ID NO: 99621 - DNA, 25 bp, Homo sapien
gatgtcattgttcattctttttcat

SEQ ID NO: 99622 - DNA, 25 bp, Homo sapien
gatgtcattgttgattctttttcat

SEQ ID NO: 99623 - DNA, 25 bp, Homo sapien
acataaatgtagttttttaatccat

SEQ ID NO: 99624 - DNA, 25 bp, Homo sapien
acataaatgtagatttttaatccat

SEQ ID NO: 99625 - DNA, 25 bp, Homo sapien
acggattcttatcgtgtttacgaaa

SEQ ID NO: 99626 - DNA, 25 bp, Homo sapien
acggattcttatggtgtttacgaaa

SEQ ID NO: 99627 - DNA, 25 bp, Homo sapien
tcattctctctcgtcgggtagatta

SEQ ID NO: 99628 - DNA, 25 bp, Homo sapien
tcattctctctcctcgggtagatta

SEQ ID NO: 99629 - DNA, 25 bp, Homo sapien
taggtctcacgaatgtaccactaat

SEQ ID NO: 99630 - DNA, 25 bp, Homo sapien
taggtctcacgattgtaccactaat

SEQ ID NO: 99631 - DNA, 25 bp, Homo sapien
tccggaggtcccttctagtcaccaa

SEQ ID NO: 99632 - DNA, 25 bp, Homo sapien
tccggaggtcccatctagtcaccaa

SEQ ID NO: 99633 - DNA, 25 bp, Homo sapien
caccagtgtggtacccgctaccgaa

SEQ ID NO: 99634 - DNA, 25 bp, Homo sapien
caccagtgtggttcccgctaccgaa

SEQ ID NO: 99635 - DNA, 25 bp, Homo sapien
acccagtgggtgtcttctccgtcga

SEQ ID NO: 99636 - DNA, 25 bp, Homo sapien
acccagtgggtgacttctccgtcga

SEQ ID NO: 99637 - DNA, 25 bp, Homo sapien
tcccagggaagatcctgtgtctccg

SEQ ID NO: 99638 - DNA, 25 bp, Homo sapien
tcccagggaagaacctgtgtctccg

SEQ ID NO: 99639 - DNA, 25 bp, Homo sapien
atcgtaatggactcccggagacctc

SEQ ID NO: 99640 - DNA, 25 bp, Homo sapien
atcgtaatggacacccggagacctc

SEQ ID NO: 99641 - DNA, 25 bp, Homo sapien
gtcggggacgacacccgtggtcctc

SEQ ID NO: 99642 - DNA, 25 bp, Homo sapien
gtcggggacgactcccgtggtcctc

SEQ ID NO: 99643 - DNA, 25 bp, Homo sapien
tagttagacccctgatctattaagg

SEQ ID NO: 99644 - DNA, 25 bp, Homo sapien
tagttagaccccagatctattaagg

SEQ ID NO: 99645 - DNA, 25 bp, Homo sapien
taagaaatctcatccggagtaaagt

SEQ ID NO: 99646 - DNA, 25 bp, Homo sapien
taagaaatctcaaccggagtaaagt

SEQ ID NO: 99647 - DNA, 25 bp, Homo sapien
agagaaactattcaccgaggagaat

SEQ ID NO: 99648 - DNA, 25 bp, Homo sapien
agagaaactattgaccgaggagaat

SEQ ID NO: 99649 - DNA, 25 bp, Homo sapien
ctcgttggccgtttgctcggggtga

SEQ ID NO: 99650 - DNA, 25 bp, Homo sapien
ctcgttggccgtatgctcggggtga

SEQ ID NO: 99651 - DNA, 25 bp, Homo sapien
caagggttcgtgtcgtcccaccacc

SEQ ID NO: 99652 - DNA, 25 bp, Homo sapien
caagggttcgtgacgtcccaccacc

SEQ ID NO: 99653 - DNA, 25 bp, Homo sapien
atagagaggtcaagggcgtttcacc

SEQ ID NO: 99654 - DNA, 25 bp, Homo sapien
atagagaggtcatgggcgtttcacc

SEQ ID NO: 99655 - DNA, 25 bp, Homo sapien
aagaggttattggacatacgttacc

SEQ ID NO: 99656 - DNA, 25 bp, Homo sapien
aagaggttattgcacatacgttacc

SEQ ID NO: 99657 - DNA, 25 bp, Homo sapien
cgtaaggtcaagtggaccgacttca

SEQ ID NO: 99658 - DNA, 25 bp, Homo sapien
cgtaaggtcaagaggaccgacttca

SEQ ID NO: 99659 - DNA, 25 bp, Homo sapien
gttacgccctataaaacagctagaa

SEQ ID NO: 99660 - DNA, 25 bp, Homo sapien
gttacgccctattaaacagctagaa

SEQ ID NO: 99661 - DNA, 25 bp, Homo sapien
gaaaagacaaccagacaaaaagaac

SEQ ID NO: 99662 - DNA, 25 bp, Homo sapien
gaaaagacaacctgacaaaaagaac

SEQ ID NO: 99663 - DNA, 25 bp, Homo sapien
gaataacgatcatgaaaacctttag

SEQ ID NO: 99664 - DNA, 25 bp, Homo sapien
gaataacgatcaagaaaacctttag

SEQ ID NO: 99665 - DNA, 25 bp, Homo sapien
agacagaccctaacacgaacctttg

SEQ ID NO: 99666 - DNA, 25 bp, Homo sapien
agacagaccctatcacgaacctttg

SEQ ID NO: 99667 - DNA, 25 bp, Homo sapien
ggaacgaaccagtgcatcctatctg

SEQ ID NO: 99668 - DNA, 25 bp, Homo sapien
ggaacgaaccagagcatcctatctg

SEQ ID NO: 99669 - DNA, 25 bp, Homo sapien
tcgatcagaccctaggaactccttg

SEQ ID NO: 99670 - DNA, 25 bp, Homo sapien
tcgatcagacccaaggaactccttg

SEQ ID NO: 99671 - DNA, 25 bp, Homo sapien
attaaccctgaggatcgtcctcacg

SEQ ID NO: 99672 - DNA, 25 bp, Homo sapien
attaaccctgagcatcgtcctcacg

SEQ ID NO: 99673 - DNA, 25 bp, Homo sapien
catagagtcccgagacgagttgaaa

SEQ ID NO: 99674 - DNA, 25 bp, Homo sapien
catagagtcccgtgacgagttgaaa

SEQ ID NO: 99675 - DNA, 25 bp, Homo sapien
cgcgacttttccatcgaaggcctaa

SEQ ID NO: 99676 - DNA, 25 bp, Homo sapien
cgcgacttttccttcgaaggcctaa

SEQ ID NO: 99677 - DNA, 25 bp, Homo sapien
cgaacccctcttctatcaggctaag

SEQ ID NO: 99678 - DNA, 25 bp, Homo sapien
cgaacccctcttgtatcaggctaag

SEQ ID NO: 99679 - DNA, 25 bp, Homo sapien
gtccaccatttgaaccgaagctaag

SEQ ID NO: 99680 - DNA, 25 bp, Homo sapien
gtccaccatttgtaccgaagctaag

SEQ ID NO: 99681 - DNA, 25 bp, Homo sapien
accacctcggcgaagtcatctacat

SEQ ID NO: 99682 - DNA, 25 bp, Homo sapien
accacctcggcgtagtcatctacat

SEQ ID NO: 99683 - DNA, 25 bp, Homo sapien
ggaccccaggtgacgtctaccctgt

SEQ ID NO: 99684 - DNA, 25 bp, Homo sapien
ggaccccaggtgtcgtctaccctgt

SEQ ID NO: 99685 - DNA, 25 bp, Homo sapien
gggtgacgtcctttgtcttactaaa

SEQ ID NO: 99686 - DNA, 25 bp, Homo sapien
gggtgacgtcctatgtcttactaaa

SEQ ID NO: 99687 - DNA, 25 bp, Homo sapien
gggtcacgtttgaaatactacaaat

SEQ ID NO: 99688 - DNA, 25 bp, Homo sapien
gggtcacgtttgtaatactacaaat

SEQ ID NO: 99689 - DNA, 25 bp, Homo sapien
cccgactggtgtgacctagaaaacc

SEQ ID NO: 99690 - DNA, 25 bp, Homo sapien
cccgactggtgtcacctagaaaacc

SEQ ID NO: 99691 - DNA, 25 bp, Homo sapien
atcatgttgtcaggacaaacacgat

SEQ ID NO: 99692 - DNA, 25 bp, Homo sapien
atcatgttgtcacgacaaacacgat

SEQ ID NO: 99693 - DNA, 25 bp, Homo sapien
tggaggaattaaacagtcaaacacc

SEQ ID NO: 99694 - DNA, 25 bp, Homo sapien
tggaggaattaatcagtcaaacacc

SEQ ID NO: 99695 - DNA, 25 bp, Homo sapien
gaggagtatcaattaggacacaacc

SEQ ID NO: 99696 - DNA, 25 bp, Homo sapien
gaggagtatcaaataggacacaacc

SEQ ID NO: 99697 - DNA, 25 bp, Homo sapien
ggttcgacgttcaattaagaacccc

SEQ ID NO: 99698 - DNA, 25 bp, Homo sapien
ggttcgacgttctattaagaacccc

SEQ ID NO: 99699 - DNA, 25 bp, Homo sapien
ggttatccagaaatcaagctccatc

SEQ ID NO: 99700 - DNA, 25 bp, Homo sapien
ggttatccagaattcaagctccatc

SEQ ID NO: 99701 - DNA, 25 bp, Homo sapien
gtttcccgggctcacagttgtcaag

SEQ ID NO: 99702 - DNA, 25 bp, Homo sapien
gtttcccgggctgacagttgtcaag

SEQ ID NO: 99703 - DNA, 25 bp, Homo sapien
actccgaaaaggagtcgttgtcgga

SEQ ID NO: 99704 - DNA, 25 bp, Homo sapien
actccgaaaaggtgtcgttgtcgga

SEQ ID NO: 99705 - DNA, 25 bp, Homo sapien
tctgtcatcgtatgaaccgggaccc

SEQ ID NO: 99706 - DNA, 25 bp, Homo sapien
tctgtcatcgtaagaaccgggaccc

SEQ ID NO: 99707 - DNA, 25 bp, Homo sapien
tgttcgtcacctgttaccgggccgc

SEQ ID NO: 99708 - DNA, 25 bp, Homo sapien
tgttcgtcacctcttaccgggccgc

SEQ ID NO: 99709 - DNA, 25 bp, Homo sapien
ttttagggaaactaacctcgtaccc

SEQ ID NO: 99710 - DNA, 25 bp, Homo sapien
ttttagggaaacaaacctcgtaccc

SEQ ID NO: 99711 - DNA, 25 bp, Homo sapien
tttagggaagtgaagacacctaaac

SEQ ID NO: 99712 - DNA, 25 bp, Homo sapien
tttagggaagtgtagacacctaaac

SEQ ID NO: 99713 - DNA, 25 bp, Homo sapien
tgtgcgcgaacaagcacaccttcag

SEQ ID NO: 99714 - DNA, 25 bp, Homo sapien
tgtgcgcgaacatgcacaccttcag

SEQ ID NO: 99715 - DNA, 25 bp, Homo sapien
ctagaggttccatgtcctactcaaa

SEQ ID NO: 99716 - DNA, 25 bp, Homo sapien
ctagaggttccaagtcctactcaaa

SEQ ID NO: 99717 - DNA, 25 bp, Homo sapien
aaagttagccagacctacggaacct

SEQ ID NO: 99718 - DNA, 25 bp, Homo sapien
aaagttagccagtcctacggaacct

SEQ ID NO: 99719 - DNA, 25 bp, Homo sapien
aagtcagtggtacatgaacaacacc

SEQ ID NO: 99720 - DNA, 25 bp, Homo sapien
aagtcagtggtagatgaacaacacc

SEQ ID NO: 99721 - DNA, 25 bp, Homo sapien
taacggtagttcgaagggctctacc

SEQ ID NO: 99722 - DNA, 25 bp, Homo sapien
taacggtagttccaagggctctacc

SEQ ID NO: 99723 - DNA, 25 bp, Homo sapien
aggtgtctcgctcagtaccgctgcc

SEQ ID NO: 99724 - DNA, 25 bp, Homo sapien
aggtgtctcgctgagtaccgctgcc

SEQ ID NO: 99725 - DNA, 25 bp, Homo sapien
tcgtggttctcctaccgtttgtcct

SEQ ID NO: 99726 - DNA, 25 bp, Homo sapien
tcgtggttctccaaccgtttgtcct

SEQ ID NO: 99727 - DNA, 25 bp, Homo sapien
cagggctttgtctccctcggaacac

SEQ ID NO: 99728 - DNA, 25 bp, Homo sapien
cagggctttgtcaccctcggaacac

SEQ ID NO: 99729 - DNA, 25 bp, Homo sapien
aaagtcattttcaccccggacagtg

SEQ ID NO: 99730 - DNA, 25 bp, Homo sapien
aaagtcattttctccccggacagtg

SEQ ID NO: 99731 - DNA, 25 bp, Homo sapien
ccgtagattaggtccgcgaggaacc

SEQ ID NO: 99732 - DNA, 25 bp, Homo sapien
ccgtagattaggaccgcgaggaacc

SEQ ID NO: 99733 - DNA, 25 bp, Homo sapien
gcaaagacggtatcggcggaacact

SEQ ID NO: 99734 - DNA, 25 bp, Homo sapien
gcaaagacggtaacggcggaacact

SEQ ID NO: 99735 - DNA, 25 bp, Homo sapien
agagaagatgcaccacttcacgaaa

SEQ ID NO: 99736 - DNA, 25 bp, Homo sapien
agagaagatgcagcacttcacgaaa

SEQ ID NO: 99737 - DNA, 25 bp, Homo sapien
ggcgttacccctacgttcaggaagt

SEQ ID NO: 99738 - DNA, 25 bp, Homo sapien
ggcgttaccccttcgttcaggaagt

SEQ ID NO: 99739 - DNA, 25 bp, Homo sapien
gggtacacccactagtcaaagaagt

SEQ ID NO: 99740 - DNA, 25 bp, Homo sapien
gggtacacccacaagtcaaagaagt

SEQ ID NO: 99741 - DNA, 25 bp, Homo sapien
gatattacccgatacgataataagt

SEQ ID NO: 99742 - DNA, 25 bp, Homo sapien
gatattacccgaaacgataataagt

SEQ ID NO: 99743 - DNA, 25 bp, Homo sapien
gatcacaccgttcacgagacaatct

SEQ ID NO: 99744 - DNA, 25 bp, Homo sapien
gatcacaccgttgacgagacaatct

SEQ ID NO: 99745 - DNA, 25 bp, Homo sapien
gatactcttgttcacgtcagtcttc

SEQ ID NO: 99746 - DNA, 25 bp, Homo sapien
gatactcttgttgacgtcagtcttc

SEQ ID NO: 99747 - DNA, 25 bp, Homo sapien
aggacgacttcttcctttttctccg

SEQ ID NO: 99748 - DNA, 25 bp, Homo sapien
aggacgacttctacctttttctccg

SEQ ID NO: 99749 - DNA, 25 bp, Homo sapien
aggtgtcggtggtatctgttttccc

SEQ ID NO: 99750 - DNA, 25 bp, Homo sapien
aggtgtcggtggaatctgttttccc

SEQ ID NO: 99751 - DNA, 25 bp, Homo sapien
ctatggtagacttgttttcgttact

SEQ ID NO: 99752 - DNA, 25 bp, Homo sapien
ctatggtagactagttttcgttact

SEQ ID NO: 99753 - DNA, 25 bp, Homo sapien
ctttaggtacggttatctttcggac

SEQ ID NO: 99754 - DNA, 25 bp, Homo sapien
ctttaggtacggatatctttcggac

SEQ ID NO: 99755 - DNA, 25 bp, Homo sapien
cttcgaagagttagacaccgtcctg

SEQ ID NO: 99756 - DNA, 25 bp, Homo sapien
cttcgaagagtttgacaccgtcctg

SEQ ID NO: 99757 - DNA, 25 bp, Homo sapien
ctgttcccggctctactgctcgata

SEQ ID NO: 99758 - DNA, 25 bp, Homo sapien
ctgttcccggctgtactgctcgata

SEQ ID NO: 99759 - DNA, 25 bp, Homo sapien
agacttgtaaggtctttcccgtcaa

SEQ ID NO: 99760 - DNA, 25 bp, Homo sapien
agacttgtaaggactttcccgtcaa

SEQ ID NO: 99761 - DNA, 25 bp, Homo sapien
gaatctgagacttcgccaccattga

SEQ ID NO: 99762 - DNA, 25 bp, Homo sapien
gaatctgagactacgccaccattga

SEQ ID NO: 99763 - DNA, 25 bp, Homo sapien
ccggaaacagtgacggaagaacctc

SEQ ID NO: 99764 - DNA, 25 bp, Homo sapien
ccggaaacagtgtcggaagaacctc

SEQ ID NO: 99765 - DNA, 25 bp, Homo sapien
tccgagagaaatttcggttgtgccc

SEQ ID NO: 99766 - DNA, 25 bp, Homo sapien
tccgagagaaatatcggttgtgccc

SEQ ID NO: 99767 - DNA, 25 bp, Homo sapien
acgacgcagagtagcgggccctcac

SEQ ID NO: 99768 - DNA, 25 bp, Homo sapien
acgacgcagagttgcgggccctcac

SEQ ID NO: 99769 - DNA, 25 bp, Homo sapien
acacccagagtcttcccagagaact

SEQ ID NO: 99770 - DNA, 25 bp, Homo sapien
acacccagagtcatcccagagaact

SEQ ID NO: 99771 - DNA, 25 bp, Homo sapien
tgtgccaccagagtggcacagccga

SEQ ID NO: 99772 - DNA, 25 bp, Homo sapien
tgtgccaccagactggcacagccga

SEQ ID NO: 99773 - DNA, 25 bp, Homo sapien
tccataagagcgtcacgacttccga

SEQ ID NO: 99774 - DNA, 25 bp, Homo sapien
tccataagagcgacacgacttccga

SEQ ID NO: 99775 - DNA, 25 bp, Homo sapien
aaaggtcgtcacctagtactcgagt

SEQ ID NO: 99776 - DNA, 25 bp, Homo sapien
aaaggtcgtcacgtagtactcgagt

SEQ ID NO: 99777 - DNA, 25 bp, Homo sapien
tagttccacgaaaccctttagaagg

SEQ ID NO: 99778 - DNA, 25 bp, Homo sapien
tagttccacgaatccctttagaagg

SEQ ID NO: 99779 - DNA, 25 bp, Homo sapien
gagtaacccttagttttctgtatca

SEQ ID NO: 99780 - DNA, 25 bp, Homo sapien
gagtaacccttacttttctgtatca

SEQ ID NO: 99781 - DNA, 25 bp, Homo sapien
cgagacgttcatgagttttcacccc

SEQ ID NO: 99782 - DNA, 25 bp, Homo sapien
cgagacgttcatcagttttcacccc

SEQ ID NO: 99783 - DNA, 25 bp, Homo sapien
aggtgcacagtctgggtacaggtta

SEQ ID NO: 99784 - DNA, 25 bp, Homo sapien
aggtgcacagtcagggtacaggtta

SEQ ID NO: 99785 - DNA, 25 bp, Homo sapien
gtaggcagtcggtccgtcggtcact

SEQ ID NO: 99786 - DNA, 25 bp, Homo sapien
gtaggcagtcggaccgtcggtcact

SEQ ID NO: 99787 - DNA, 25 bp, Homo sapien
aggtacagtgacaaccgtggacact

SEQ ID NO: 99788 - DNA, 25 bp, Homo sapien
aggtacagtgactaccgtggacact

SEQ ID NO: 99789 - DNA, 25 bp, Homo sapien
ttttgtacggtgaaaccgaacatat

SEQ ID NO: 99790 - DNA, 25 bp, Homo sapien
ttttgtacggtgtaaccgaacatat

SEQ ID NO: 99791 - DNA, 25 bp, Homo sapien
gacttacatgtgtagatgtatccat

SEQ ID NO: 99792 - DNA, 25 bp, Homo sapien
gacttacatgtgaagatgtatccat

SEQ ID NO: 99793 - DNA, 25 bp, Homo sapien
ggtaaaaatcgatggagtttcctct

SEQ ID NO: 99794 - DNA, 25 bp, Homo sapien
ggtaaaaatcgaaggagtttcctct

SEQ ID NO: 99795 - DNA, 25 bp, Homo sapien
aaagtcaacctgtgtgtttacactt

SEQ ID NO: 99796 - DNA, 25 bp, Homo sapien
aaagtcaacctgagtgtttacactt

SEQ ID NO: 99797 - DNA, 25 bp, Homo sapien
gtatctgacctcgagttgttccatt

SEQ ID NO: 99798 - DNA, 25 bp, Homo sapien
gtatctgacctccagttgttccatt

SEQ ID NO: 99799 - DNA, 25 bp, Homo sapien
gggggcccagacgactaagacgtct

SEQ ID NO: 99800 - DNA, 25 bp, Homo sapien
gggggcccagaccactaagacgtct

SEQ ID NO: 99801 - DNA, 25 bp, Homo sapien
gggtcgagcactacggatggtctac

SEQ ID NO: 99802 - DNA, 25 bp, Homo sapien
gggtcgagcacttcggatggtctac

SEQ ID NO: 99803 - DNA, 25 bp, Homo sapien
cgtggacacttctgacgtagttctc

SEQ ID NO: 99804 - DNA, 25 bp, Homo sapien
cgtggacacttcagacgtagttctc

SEQ ID NO: 99805 - DNA, 25 bp, Homo sapien
ttgaggtagtacttcacactgcacc

SEQ ID NO: 99806 - DNA, 25 bp, Homo sapien
ttgaggtagtacatcacactgcacc

SEQ ID NO: 99807 - DNA, 25 bp, Homo sapien
agagggatactatcacacttctgtc

SEQ ID NO: 99808 - DNA, 25 bp, Homo sapien
agagggatactaacacacttctgtc

SEQ ID NO: 99809 - DNA, 25 bp, Homo sapien
agaaaagttgtaggacaagacgccg

SEQ ID NO: 99810 - DNA, 25 bp, Homo sapien
agaaaagttgtacgacaagacgccg

SEQ ID NO: 99811 - DNA, 25 bp, Homo sapien
acggaagagtgtgagaccaaaccct

SEQ ID NO: 99812 - DNA, 25 bp, Homo sapien
acggaagagtgtcagaccaaaccct

SEQ ID NO: 99813 - DNA, 25 bp, Homo sapien
atttgtatatgtgaaccaaaaccag

SEQ ID NO: 99814 - DNA, 25 bp, Homo sapien
atttgtatatgtcaaccaaaaccag

SEQ ID NO: 99815 - DNA, 25 bp, Homo sapien
caggtcttaaccacccaagaaccag

SEQ ID NO: 99816 - DNA, 25 bp, Homo sapien
caggtcttaacctcccaagaaccag

SEQ ID NO: 99817 - DNA, 25 bp, Homo sapien
aggaaatcaccttcgcaaagataca

SEQ ID NO: 99818 - DNA, 25 bp, Homo sapien
aggaaatcacctacgcaaagataca

SEQ ID NO: 99819 - DNA, 25 bp, Homo sapien
gagacttctttcgactattcgttca

SEQ ID NO: 99820 - DNA, 25 bp, Homo sapien
gagacttctttccactattcgttca

SEQ ID NO: 99821 - DNA, 25 bp, Homo sapien
gaaccgtttctgtgtccattattac

SEQ ID NO: 99822 - DNA, 25 bp, Homo sapien
gaaccgtttctgagtccattattac

SEQ ID NO: 99823 - DNA, 25 bp, Homo sapien
acgttatttagtcttcatcacggag

SEQ ID NO: 99824 - DNA, 25 bp, Homo sapien
acgttatttagtgttcatcacggag

SEQ ID NO: 99825 - DNA, 25 bp, Homo sapien
cgtccagtcgccttgttttccgagg

SEQ ID NO: 99826 - DNA, 25 bp, Homo sapien
cgtccagtcgccatgttttccgagg

SEQ ID NO: 99827 - DNA, 25 bp, Homo sapien
gacgtccgtcgaggctgcccggact

SEQ ID NO: 99828 - DNA, 25 bp, Homo sapien
gacgtccgtcgacgctgcccggact

SEQ ID NO: 99829 - DNA, 25 bp, Homo sapien
gaacgtctcggacaacctcgtgcga

SEQ ID NO: 99830 - DNA, 25 bp, Homo sapien
gaacgtctcggagaacctcgtgcga

SEQ ID NO: 99831 - DNA, 25 bp, Homo sapien
gaagccgtaggtggacccgtcatat

SEQ ID NO: 99832 - DNA, 25 bp, Homo sapien
gaagccgtaggtcgacccgtcatat

SEQ ID NO: 99833 - DNA, 25 bp, Homo sapien
agagttcagtgttcgcagcgcatat

SEQ ID NO: 99834 - DNA, 25 bp, Homo sapien
agagttcagtgtacgcagcgcatat

SEQ ID NO: 99835 - DNA, 25 bp, Homo sapien
actgctacggtgttccagcgacgaa

SEQ ID NO: 99836 - DNA, 25 bp, Homo sapien
actgctacggtgatccagcgacgaa

SEQ ID NO: 99837 - DNA, 25 bp, Homo sapien
gtcctcgtagatgtcaacgacacaa

SEQ ID NO: 99838 - DNA, 25 bp, Homo sapien
gtcctcgtagatctcaacgacacaa

SEQ ID NO: 99839 - DNA, 25 bp, Homo sapien
ggtctccgacaatgattcaacatca

SEQ ID NO: 99840 - DNA, 25 bp, Homo sapien
ggtctccgacaaagattcaacatca

SEQ ID NO: 99841 - DNA, 25 bp, Homo sapien
actcggtggagaaccttcaccctca

SEQ ID NO: 99842 - DNA, 25 bp, Homo sapien
actcggtggagatccttcaccctca

SEQ ID NO: 99843 - DNA, 25 bp, Homo sapien
acgaaaaacgtttcgatgaccctac

SEQ ID NO: 99844 - DNA, 25 bp, Homo sapien
acgaaaaacgttacgatgaccctac

SEQ ID NO: 99845 - DNA, 25 bp, Homo sapien
acgagtaaagttacggtgtctccac

SEQ ID NO: 99846 - DNA, 25 bp, Homo sapien
acgagtaaagtttcggtgtctccac

SEQ ID NO: 99847 - DNA, 25 bp, Homo sapien
cagactcagtcttgggtcgtctctc

SEQ ID NO: 99848 - DNA, 25 bp, Homo sapien
cagactcagtctagggtcgtctctc

SEQ ID NO: 99849 - DNA, 25 bp, Homo sapien
taagatgaccttagtcggagtctga

SEQ ID NO: 99850 - DNA, 25 bp, Homo sapien
taagatgacctttgtcggagtctga

SEQ ID NO: 99851 - DNA, 25 bp, Homo sapien
tcgagacgtttctacgtcggccgac

SEQ ID NO: 99852 - DNA, 25 bp, Homo sapien
tcgagacgtttcaacgtcggccgac

SEQ ID NO: 99853 - DNA, 25 bp, Homo sapien
ccgacgcatctacgtgtgactacga

SEQ ID NO: 99854 - DNA, 25 bp, Homo sapien
ccgacgcatctaggtgtgactacga

SEQ ID NO: 99855 - DNA, 25 bp, Homo sapien
ctccgacacattaggtgtctacgag

SEQ ID NO: 99856 - DNA, 25 bp, Homo sapien
ctccgacacatttggtgtctacgag

SEQ ID NO: 99857 - DNA, 25 bp, Homo sapien
ctgtcccggaggtcatctggacggt

SEQ ID NO: 99858 - DNA, 25 bp, Homo sapien
ctgtcccggaggacatctggacggt

SEQ ID NO: 99859 - DNA, 25 bp, Homo sapien
tttgtggactcaagactacggggcg

SEQ ID NO: 99860 - DNA, 25 bp, Homo sapien
tttgtggactcatgactacggggcg

SEQ ID NO: 99861 - DNA, 25 bp, Homo sapien
tatttgtaatctatgtctctgtgcc

SEQ ID NO: 99862 - DNA, 25 bp, Homo sapien
tatttgtaatctttgtctctgtgcc

SEQ ID NO: 99863 - DNA, 25 bp, Homo sapien
ttgatgtcaccacttctctggtcct

SEQ ID NO: 99864 - DNA, 25 bp, Homo sapien
ttgatgtcaccagttctctggtcct

SEQ ID NO: 99865 - DNA, 25 bp, Homo sapien
tgagaagacggattacagccattac

SEQ ID NO: 99866 - DNA, 25 bp, Homo sapien
tgagaagacggaatacagccattac

SEQ ID NO: 99867 - DNA, 25 bp, Homo sapien
aagaagagataaagacctacttacg

SEQ ID NO: 99868 - DNA, 25 bp, Homo sapien
aagaagagataatgacctacttacg

SEQ ID NO: 99869 - DNA, 25 bp, Homo sapien
gtctaaaagacgagatcggtcaaac

SEQ ID NO: 99870 - DNA, 25 bp, Homo sapien
gtctaaaagacgtgatcggtcaaac

SEQ ID NO: 99871 - DNA, 25 bp, Homo sapien
ggtcgagggtcagacagagtcaaac

SEQ ID NO: 99872 - DNA, 25 bp, Homo sapien
ggtcgagggtcacacagagtcaaac

SEQ ID NO: 99873 - DNA, 25 bp, Homo sapien
agtaggaggatactcctcttgagaa

SEQ ID NO: 99874 - DNA, 25 bp, Homo sapien
agtaggaggatagtcctcttgagaa

SEQ ID NO: 99875 - DNA, 25 bp, Homo sapien
ggtccgacccgtttcgtccgaggag

SEQ ID NO: 99876 - DNA, 25 bp, Homo sapien
ggtccgacccgtatcgtccgaggag

SEQ ID NO: 99877 - DNA, 25 bp, Homo sapien
aggcgtaccgtccagtctcccgtgg

SEQ ID NO: 99878 - DNA, 25 bp, Homo sapien
aggcgtaccgtcgagtctcccgtgg

SEQ ID NO: 99879 - DNA, 25 bp, Homo sapien
gaagtactagtcacgtcacccgttg

SEQ ID NO: 99880 - DNA, 25 bp, Homo sapien
gaagtactagtctcgtcacccgttg

SEQ ID NO: 99881 - DNA, 25 bp, Homo sapien
cgacggcagaaccgtgacgtcaccc

SEQ ID NO: 99882 - DNA, 25 bp, Homo sapien
cgacggcagaacggtgacgtcaccc

SEQ ID NO: 99883 - DNA, 25 bp, Homo sapien
ccgtccgcgtcgacgggtaggggtc

SEQ ID NO: 99884 - DNA, 25 bp, Homo sapien
ccgtccgcgtcgtcgggtaggggtc

SEQ ID NO: 99885 - DNA, 25 bp, Homo sapien
tcgggtctcccgtgaaagtcgacgg

SEQ ID NO: 99886 - DNA, 25 bp, Homo sapien
tcgggtctcccgagaaagtcgacgg

SEQ ID NO: 99887 - DNA, 25 bp, Homo sapien
cggtactactgctcatacaaaggtc

SEQ ID NO: 99888 - DNA, 25 bp, Homo sapien
cggtactactgcacatacaaaggtc

SEQ ID NO: 99889 - DNA, 25 bp, Homo sapien
agggtacaccggaaaaccctcacac

SEQ ID NO: 99890 - DNA, 25 bp, Homo sapien
agggtacaccggtaaaccctcacac

SEQ ID NO: 99891 - DNA, 25 bp, Homo sapien
cgggtagagaccttgaagtaatcaa

SEQ ID NO: 99892 - DNA, 25 bp, Homo sapien
cgggtagagaccatgaagtaatcaa

SEQ ID NO: 99893 - DNA, 25 bp, Homo sapien
accgggtagccctaataggtacaag

SEQ ID NO: 99894 - DNA, 25 bp, Homo sapien
accgggtagcccaaataggtacaag

SEQ ID NO: 99895 - DNA, 25 bp, Homo sapien
aaacacgttcccaaggtaactaaag

SEQ ID NO: 99896 - DNA, 25 bp, Homo sapien
aaacacgttccctaggtaactaaag

SEQ ID NO: 99897 - DNA, 25 bp, Homo sapien
agaacattgacaggtcatatctaaa

SEQ ID NO: 99898 - DNA, 25 bp, Homo sapien
agaacattgacacgtcatatctaaa

SEQ ID NO: 99899 - DNA, 25 bp, Homo sapien
agcattgttagagtttcacgtaaac

SEQ ID NO: 99900 - DNA, 25 bp, Homo sapien
agcattgttagactttcacgtaaac

SEQ ID NO: 99901 - DNA, 25 bp, Homo sapien
tcttgtataagttcttaaccttagg

SEQ ID NO: 99902 - DNA, 25 bp, Homo sapien
tcttgtataagtacttaaccttagg

SEQ ID NO: 99903 - DNA, 25 bp, Homo sapien
ttctcgttgagaaaagaacccaatt

SEQ ID NO: 99904 - DNA, 25 bp, Homo sapien
ttctcgttgagataagaacccaatt

SEQ ID NO: 99905 - DNA, 25 bp, Homo sapien
atatttaagcgaaacaagccaatcg

SEQ ID NO: 99906 - DNA, 25 bp, Homo sapien
atatttaagcgatacaagccaatcg

SEQ ID NO: 99907 - DNA, 25 bp, Homo sapien
gtcgaaagacctcaagagtaatctg

SEQ ID NO: 99908 - DNA, 25 bp, Homo sapien
gtcgaaagacctgaagagtaatctg

SEQ ID NO: 99909 - DNA, 25 bp, Homo sapien
tcggttccctcatgttcgacatctg

SEQ ID NO: 99910 - DNA, 25 bp, Homo sapien
tcggttccctcaagttcgacatctg

SEQ ID NO: 99911 - DNA, 25 bp, Homo sapien
aggttccacgcgtctatctcttaca

SEQ ID NO: 99912 - DNA, 25 bp, Homo sapien
aggttccacgcgactatctcttaca

SEQ ID NO: 99913 - DNA, 25 bp, Homo sapien
acctgcccgtctgtatctcagagac

SEQ ID NO: 99914 - DNA, 25 bp, Homo sapien
acctgcccgtctctatctcagagac

SEQ ID NO: 99915 - DNA, 25 bp, Homo sapien
atctaacatcttggtgacatgacat

SEQ ID NO: 99916 - DNA, 25 bp, Homo sapien
atctaacatcttcgtgacatgacat

SEQ ID NO: 99917 - DNA, 25 bp, Homo sapien
agagactctctcttcgcggatcaat

SEQ ID NO: 99918 - DNA, 25 bp, Homo sapien
agagactctctcatcgcggatcaat

SEQ ID NO: 99919 - DNA, 25 bp, Homo sapien
ctgggtcccgtcgtcgagactgaag

SEQ ID NO: 99920 - DNA, 25 bp, Homo sapien
ctgggtcccgtcctcgagactgaag

SEQ ID NO: 99921 - DNA, 25 bp, Homo sapien
gtgttaagctcctgtcaggactcaa

SEQ ID NO: 99922 - DNA, 25 bp, Homo sapien
gtgttaagctccagtcaggactcaa

SEQ ID NO: 99923 - DNA, 25 bp, Homo sapien
gtcttcggggcgtctactgcctcga

SEQ ID NO: 99924 - DNA, 25 bp, Homo sapien
gtcttcggggcgactactgcctcga

SEQ ID NO: 99925 - DNA, 25 bp, Homo sapien
cacgggggctcaactcgacaccgtt

SEQ ID NO: 99926 - DNA, 25 bp, Homo sapien
cacgggggctcatctcgacaccgtt

SEQ ID NO: 99927 - DNA, 25 bp, Homo sapien
tcaagtaaggtcacatccgactgga

SEQ ID NO: 99928 - DNA, 25 bp, Homo sapien
tcaagtaaggtctcatccgactgga

SEQ ID NO: 99929 - DNA, 25 bp, Homo sapien
gtgaagttcccgtaattgctagaga

SEQ ID NO: 99930 - DNA, 25 bp, Homo sapien
gtgaagttcccgaaattgctagaga

SEQ ID NO: 99931 - DNA, 25 bp, Homo sapien
gggaagcctcttcatcctcgggaga

SEQ ID NO: 99932 - DNA, 25 bp, Homo sapien
gggaagcctcttgatcctcgggaga

SEQ ID NO: 99933 - DNA, 25 bp, Homo sapien
actggtaccgtgtcccagaggacct

SEQ ID NO: 99934 - DNA, 25 bp, Homo sapien
actggtaccgtgacccagaggacct

SEQ ID NO: 99935 - DNA, 25 bp, Homo sapien
atctgtggtcctcttccaaggacct

SEQ ID NO: 99936 - DNA, 25 bp, Homo sapien
atctgtggtcctgttccaaggacct

SEQ ID NO: 99937 - DNA, 25 bp, Homo sapien
gttccctacgtcctctaggtgccgt

SEQ ID NO: 99938 - DNA, 25 bp, Homo sapien
gttccctacgtcgtctaggtgccgt

SEQ ID NO: 99939 - DNA, 25 bp, Homo sapien
tttaccttggccagtcaggagacag

SEQ ID NO: 99940 - DNA, 25 bp, Homo sapien
tttaccttggcctgtcaggagacag

SEQ ID NO: 99941 - DNA, 25 bp, Homo sapien
gtcctctctgggtcgtctctggttg

SEQ ID NO: 99942 - DNA, 25 bp, Homo sapien
gtcctctctgggacgtctctggttg

SEQ ID NO: 99943 - DNA, 25 bp, Homo sapien
cttacttgtagaaacgtgggtctct

SEQ ID NO: 99944 - DNA, 25 bp, Homo sapien
cttacttgtagatacgtgggtctct

SEQ ID NO: 99945 - DNA, 25 bp, Homo sapien
ccatgtatgtatcgtactttgattc

SEQ ID NO: 99946 - DNA, 25 bp, Homo sapien
ccatgtatgtatggtactttgattc

SEQ ID NO: 99947 - DNA, 25 bp, Homo sapien
ccgtctcgacagtgattttaatcct

SEQ ID NO: 99948 - DNA, 25 bp, Homo sapien
ccgtctcgacagagattttaatcct

SEQ ID NO: 99949 - DNA, 25 bp, Homo sapien
ccgaccagggacgacactaattgct

SEQ ID NO: 99950 - DNA, 25 bp, Homo sapien
ccgaccagggaccacactaattgct

SEQ ID NO: 99951 - DNA, 25 bp, Homo sapien
cgccccggtcgcacaggactaggct

SEQ ID NO: 99952 - DNA, 25 bp, Homo sapien
cgccccggtcgctcaggactaggct

SEQ ID NO: 99953 - DNA, 25 bp, Homo sapien
ccctcagtcgaggtcacaatggtct

SEQ ID NO: 99954 - DNA, 25 bp, Homo sapien
ccctcagtcgagctcacaatggtct

SEQ ID NO: 99955 - DNA, 25 bp, Homo sapien
accttatgtctgacgaaaaacttga

SEQ ID NO: 99956 - DNA, 25 bp, Homo sapien
accttatgtctgtcgaaaaacttga

SEQ ID NO: 99957 - DNA, 25 bp, Homo sapien
ttatccagagcgacttccactgtct

SEQ ID NO: 99958 - DNA, 25 bp, Homo sapien
ttatccagagcgtcttccactgtct

SEQ ID NO: 99959 - DNA, 25 bp, Homo sapien
tgtaccaagggaaacgtgtctcctt

SEQ ID NO: 99960 - DNA, 25 bp, Homo sapien
tgtaccaagggatacgtgtctcctt

SEQ ID NO: 99961 - DNA, 25 bp, Homo sapien
tcgcaagtaggagtagcttcactcg

SEQ ID NO: 99962 - DNA, 25 bp, Homo sapien
tcgcaagtaggactagcttcactcg

SEQ ID NO: 99963 - DNA, 25 bp, Homo sapien
tagtcgaaaatacgtcatgttatcg

SEQ ID NO: 99964 - DNA, 25 bp, Homo sapien
tagtcgaaaataggtcatgttatcg

SEQ ID NO: 99965 - DNA, 25 bp, Homo sapien
actaggataaatgatctgtcctaag

SEQ ID NO: 99966 - DNA, 25 bp, Homo sapien
actaggataaatcatctgtcctaag

SEQ ID NO: 99967 - DNA, 25 bp, Homo sapien
aggacggataggatcagtacacatg

SEQ ID NO: 99968 - DNA, 25 bp, Homo sapien
aggacggataggttcagtacacatg

SEQ ID NO: 99969 - DNA, 25 bp, Homo sapien
gacaccggaacaaccagtctaggtg

SEQ ID NO: 99970 - DNA, 25 bp, Homo sapien
gacaccggaacatccagtctaggtg

SEQ ID NO: 99971 - DNA, 25 bp, Homo sapien
gaccgacccgggtattcagttggtg

SEQ ID NO: 99972 - DNA, 25 bp, Homo sapien
gaccgacccgggaattcagttggtg

SEQ ID NO: 99973 - DNA, 25 bp, Homo sapien
caactctttcggtcctacgtttgtt

SEQ ID NO: 99974 - DNA, 25 bp, Homo sapien
caactctttcggacctacgtttgtt

SEQ ID NO: 99975 - DNA, 25 bp, Homo sapien
caaggtattggagctcgcgttttat

SEQ ID NO: 99976 - DNA, 25 bp, Homo sapien
caaggtattggacctcgcgttttat

SEQ ID NO: 99977 - DNA, 25 bp, Homo sapien
cgtcacagattaagcccagggtata

SEQ ID NO: 99978 - DNA, 25 bp, Homo sapien
cgtcacagattatgcccagggtata

SEQ ID NO: 99979 - DNA, 25 bp, Homo sapien
ctccagcatccacctagaaagagtg

SEQ ID NO: 99980 - DNA, 25 bp, Homo sapien
ctccagcatccagctagaaagagtg

SEQ ID NO: 99981 - DNA, 25 bp, Homo sapien
tccaagataccaacgtgaaaatcgt

SEQ ID NO: 99982 - DNA, 25 bp, Homo sapien
tccaagataccatcgtgaaaatcgt

SEQ ID NO: 99983 - DNA, 25 bp, Homo sapien
atagaccttacaagcgtgggacatt

SEQ ID NO: 99984 - DNA, 25 bp, Homo sapien
atagaccttacatgcgtgggacatt

SEQ ID NO: 99985 - DNA, 25 bp, Homo sapien
aggacttccagttggctcagacgct

SEQ ID NO: 99986 - DNA, 25 bp, Homo sapien
aggacttccagtaggctcagacgct

SEQ ID NO: 99987 - DNA, 25 bp, Homo sapien
ttggaccccatctcgacacctaagt

SEQ ID NO: 99988 - DNA, 25 bp, Homo sapien
ttggaccccatcacgacacctaagt

SEQ ID NO: 99989 - DNA, 25 bp, Homo sapien
gtggaccctctgaaaccacccgagg

SEQ ID NO: 99990 - DNA, 25 bp, Homo sapien
gtggaccctctgtaaccacccgagg

SEQ ID NO: 99991 - DNA, 25 bp, Homo sapien
ttgagtcttctgacacccgaaagat

SEQ ID NO: 99992 - DNA, 25 bp, Homo sapien
ttgagtcttctgtcacccgaaagat

SEQ ID NO: 99993 - DNA, 25 bp, Homo sapien
tgaaggactcgtttacactggggat

SEQ ID NO: 99994 - DNA, 25 bp, Homo sapien
tgaaggactcgtatacactggggat

SEQ ID NO: 99995 - DNA, 25 bp, Homo sapien
actctagaggtctctaccgggcagc

SEQ ID NO: 99996 - DNA, 25 bp, Homo sapien
actctagaggtcactaccgggcagc

SEQ ID NO: 99997 - DNA, 25 bp, Homo sapien
tgtcatgctgtcacttaatgaaacg

SEQ ID NO: 99998 - DNA, 25 bp, Homo sapien
tgtcatgctgtctcttaatgaaacg

SEQ ID NO: 99999 - DNA, 25 bp, Homo sapien
tccgtgattaaacttgaagtcttca

SEQ ID NO: 100000 - DNA, 25 bp, Homo sapien
tccgtgattaaagttgaagtcttca

SEQ ID NO: 100001 - DNA, 25 bp, Homo sapien
ttaaataacggtgacaaagtcctaa

SEQ ID NO: 100002 - DNA, 25 bp, Homo sapien
ttaaataacggtcacaaagtcctaa

SEQ ID NO: 100003 - DNA, 25 bp, Homo sapien
atacgaattcttttactaatcgaaa

SEQ ID NO: 100004 - DNA, 25 bp, Homo sapien
atacgaattcttatactaatcgaaa

SEQ ID NO: 100005 - DNA, 25 bp, Homo sapien
gaaacttgtcatttaattcgacttg

SEQ ID NO: 100006 - DNA, 25 bp, Homo sapien
gaaacttgtcatataattcgacttg

SEQ ID NO: 100007 - DNA, 25 bp, Homo sapien
gtcgtggtcactgtgcttgtcgtcc

SEQ ID NO: 100008 - DNA, 25 bp, Homo sapien
gtcgtggtcactctgcttgtcgtcc

SEQ ID NO: 100009 - DNA, 25 bp, Homo sapien
ggataaatccgtctgaatgtgtaca

SEQ ID NO: 100010 - DNA, 25 bp, Homo sapien
ggataaatccgtgtgaatgtgtaca

SEQ ID NO: 100011 - DNA, 25 bp, Homo sapien
ggattctataacactagatcttgaa

SEQ ID NO: 100012 - DNA, 25 bp, Homo sapien
ggattctataactctagatcttgaa

SEQ ID NO: 100013 - DNA, 25 bp, Homo sapien
gtttgtactccacgtagaacttccc

SEQ ID NO: 100014 - DNA, 25 bp, Homo sapien
gtttgtactccaggtagaacttccc

SEQ ID NO: 100015 - DNA, 25 bp, Homo sapien
ggtgtacaccctgtaaacacacctc

SEQ ID NO: 100016 - DNA, 25 bp, Homo sapien
ggtgtacaccctctaaacacacctc

SEQ ID NO: 100017 - DNA, 25 bp, Homo sapien
tgacctccgttaaagatactctccg

SEQ ID NO: 100018 - DNA, 25 bp, Homo sapien
tgacctccgttatagatactctccg

SEQ ID NO: 100019 - DNA, 25 bp, Homo sapien
aggacaggaactcacactacgtagg

SEQ ID NO: 100020 - DNA, 25 bp, Homo sapien
aggacaggaactgacactacgtagg

SEQ ID NO: 100021 - DNA, 25 bp, Homo sapien
gggggtctgaacatcacgacagaag

SEQ ID NO: 100022 - DNA, 25 bp, Homo sapien
gggggtctgaacttcacgacagaag

SEQ ID NO: 100023 - DNA, 25 bp, Homo sapien
aaggtacagtaagtcctaacgtcac

SEQ ID NO: 100024 - DNA, 25 bp, Homo sapien
aaggtacagtaactcctaacgtcac

SEQ ID NO: 100025 - DNA, 25 bp, Homo sapien
gaagagcgttatgaccaggacctat

SEQ ID NO: 100026 - DNA, 25 bp, Homo sapien
gaagagcgttatcaccaggacctat

SEQ ID NO: 100027 - DNA, 25 bp, Homo sapien
agggtagtcgggtcccaaggacctc

SEQ ID NO: 100028 - DNA, 25 bp, Homo sapien
agggtagtcgggacccaaggacctc

SEQ ID NO: 100029 - DNA, 25 bp, Homo sapien
gggccggcttccagacgtagctcta

SEQ ID NO: 100030 - DNA, 25 bp, Homo sapien
gggccggcttcctgacgtagctcta

SEQ ID NO: 100031 - DNA, 25 bp, Homo sapien
gtctactcgaactttcgacgtctca

SEQ ID NO: 100032 - DNA, 25 bp, Homo sapien
gtctactcgaacattcgacgtctca

SEQ ID NO: 100033 - DNA, 25 bp, Homo sapien
gaggggttaccgacagtcaagccat

SEQ ID NO: 100034 - DNA, 25 bp, Homo sapien
gaggggttaccgtcagtcaagccat

SEQ ID NO: 100035 - DNA, 25 bp, Homo sapien
agaggtccgtcgacccgagtctcct

SEQ ID NO: 100036 - DNA, 25 bp, Homo sapien
agaggtccgtcgtcccgagtctcct

SEQ ID NO: 100037 - DNA, 25 bp, Homo sapien
aacgtgaaccggtcgaggacctagt

SEQ ID NO: 100038 - DNA, 25 bp, Homo sapien
aacgtgaaccggacgaggacctagt

SEQ ID NO: 100039 - DNA, 25 bp, Homo sapien
ggacagagcacaaggacgtggcccg

SEQ ID NO: 100040 - DNA, 25 bp, Homo sapien
ggacagagcacatggacgtggcccg

SEQ ID NO: 100041 - DNA, 25 bp, Homo sapien
taatacaaacctccatgcggaacgt

SEQ ID NO: 100042 - DNA, 25 bp, Homo sapien
taatacaaacctgcatgcggaacgt

SEQ ID NO: 100043 - DNA, 25 bp, Homo sapien
aagagtcatcgcagtggaggtcgaa

SEQ ID NO: 100044 - DNA, 25 bp, Homo sapien
aagagtcatcgctgtggaggtcgaa

SEQ ID NO: 100045 - DNA, 25 bp, Homo sapien
agggtaaacatctcattgtaataac

SEQ ID NO: 100046 - DNA, 25 bp, Homo sapien
agggtaaacatcacattgtaataac

SEQ ID NO: 100047 - DNA, 25 bp, Homo sapien
agcgtaaacttttacattcggtgaa

SEQ ID NO: 100048 - DNA, 25 bp, Homo sapien
agcgtaaactttaacattcggtgaa

SEQ ID NO: 100049 - DNA, 25 bp, Homo sapien
acgtggaacttgaacatcccgtgca

SEQ ID NO: 100050 - DNA, 25 bp, Homo sapien
acgtggaacttgtacatcccgtgca

SEQ ID NO: 100051 - DNA, 25 bp, Homo sapien
tccacagctaaacgtcactgttaca

SEQ ID NO: 100052 - DNA, 25 bp, Homo sapien
tccacagctaaaggtcactgttaca

SEQ ID NO: 100053 - DNA, 25 bp, Homo sapien
gtgtcaacatgatggggcgttacgt

SEQ ID NO: 100054 - DNA, 25 bp, Homo sapien
gtgtcaacatgaaggggcgttacgt

SEQ ID NO: 100055 - DNA, 25 bp, Homo sapien
taaagaacactgacgtgaggcttat

SEQ ID NO: 100056 - DNA, 25 bp, Homo sapien
taaagaacactgtcgtgaggcttat

SEQ ID NO: 100057 - DNA, 25 bp, Homo sapien
aagtccatacggtgtatcacacagt

SEQ ID NO: 100058 - DNA, 25 bp, Homo sapien
aagtccatacggagtatcacacagt

SEQ ID NO: 100059 - DNA, 25 bp, Homo sapien
ctaccagacgtcgaggacgtcactg

SEQ ID NO: 100060 - DNA, 25 bp, Homo sapien
ctaccagacgtccaggacgtcactg

SEQ ID NO: 100061 - DNA, 25 bp, Homo sapien
gtcagtggacaggtcacacgtcctt

SEQ ID NO: 100062 - DNA, 25 bp, Homo sapien
gtcagtggacagctcacacgtcctt

SEQ ID NO: 100063 - DNA, 25 bp, Homo sapien
cactcctggtggtgtttcagtttgt

SEQ ID NO: 100064 - DNA, 25 bp, Homo sapien
cactcctggtggagtttcagtttgt

SEQ ID NO: 100065 - DNA, 25 bp, Homo sapien
atctggtttccgatggatctctggt

SEQ ID NO: 100066 - DNA, 25 bp, Homo sapien
atctggtttccgttggatctctggt

SEQ ID NO: 100067 - DNA, 25 bp, Homo sapien
tgtcggtgttctggtggactcttgc

SEQ ID NO: 100068 - DNA, 25 bp, Homo sapien
tgtcggtgttctcgtggactcttgc

SEQ ID NO: 100069 - DNA, 25 bp, Homo sapien
ggtcagagtctgtcgggacccctac

SEQ ID NO: 100070 - DNA, 25 bp, Homo sapien
ggtcagagtctgacgggacccctac

SEQ ID NO: 100071 - DNA, 25 bp, Homo sapien
gtaagatcaaagagaaacaaccttc

SEQ ID NO: 100072 - DNA, 25 bp, Homo sapien
gtaagatcaaagtgaaacaaccttc

SEQ ID NO: 100073 - DNA, 25 bp, Homo sapien
atacaaggtcccacgtcccgagact

SEQ ID NO: 100074 - DNA, 25 bp, Homo sapien
atacaaggtccctcgtcccgagact

SEQ ID NO: 100075 - DNA, 25 bp, Homo sapien
agatgtggacgccacgattggtcgc

SEQ ID NO: 100076 - DNA, 25 bp, Homo sapien
agatgtggacgcgacgattggtcgc

SEQ ID NO: 100077 - DNA, 25 bp, Homo sapien
taccttttatcgctagcgacggtcc

SEQ ID NO: 100078 - DNA, 25 bp, Homo sapien
taccttttatcggtagcgacggtcc

SEQ ID NO: 100079 - DNA, 25 bp, Homo sapien
aattcgtgcacgaaggtccccggat

SEQ ID NO: 100080 - DNA, 25 bp, Homo sapien
aattcgtgcacgtaggtccccggat

SEQ ID NO: 100081 - DNA, 25 bp, Homo sapien
tcagtactcgttgtccggtgtcagt

SEQ ID NO: 100082 - DNA, 25 bp, Homo sapien
tcagtactcgttctccggtgtcagt

SEQ ID NO: 100083 - DNA, 25 bp, Homo sapien
caactagaccttctccggtatcagt

SEQ ID NO: 100084 - DNA, 25 bp, Homo sapien
caactagaccttgtccggtatcagt

SEQ ID NO: 100085 - DNA, 25 bp, Homo sapien
tgtaaacgagtacgtgtacccacca

SEQ ID NO: 100086 - DNA, 25 bp, Homo sapien
tgtaaacgagtaggtgtacccacca

SEQ ID NO: 100087 - DNA, 25 bp, Homo sapien
tccgagaaggtctcgtaggcccacg

SEQ ID NO: 100088 - DNA, 25 bp, Homo sapien
tccgagaaggtcacgtaggcccacg

SEQ ID NO: 100089 - DNA, 25 bp, Homo sapien
ttcctagaaatggaaccttcggagt

SEQ ID NO: 100090 - DNA, 25 bp, Homo sapien
ttcctagaaatgcaaccttcggagt

SEQ ID NO: 100091 - DNA, 25 bp, Homo sapien
ttcttgttaaaggaagttataccct

SEQ ID NO: 100092 - DNA, 25 bp, Homo sapien
ttcttgttaaagcaagttataccct

SEQ ID NO: 100093 - DNA, 25 bp, Homo sapien
tatgtttgtgaatccatctttccgt

SEQ ID NO: 100094 - DNA, 25 bp, Homo sapien
tatgtttgtgaaaccatctttccgt

SEQ ID NO: 100095 - DNA, 25 bp, Homo sapien
aagggtggaccaaccactgtttagt

SEQ ID NO: 100096 - DNA, 25 bp, Homo sapien
aagggtggaccatccactgtttagt

SEQ ID NO: 100097 - DNA, 25 bp, Homo sapien
aaatgaggtatcattgaccatctgg

SEQ ID NO: 100098 - DNA, 25 bp, Homo sapien
aaatgaggtatctttgaccatctgg

SEQ ID NO: 100099 - DNA, 25 bp, Homo sapien
agacaggtcgacattttctcccttg

SEQ ID NO: 100100 - DNA, 25 bp, Homo sapien
agacaggtcgactttttctcccttg

SEQ ID NO: 100101 - DNA, 25 bp, Homo sapien
cgagtaccatcttcgttccgtatgt

SEQ ID NO: 100102 - DNA, 25 bp, Homo sapien
cgagtaccatctacgttccgtatgt

SEQ ID NO: 100103 - DNA, 25 bp, Homo sapien
acgagtgatgacttttctccgtggt

SEQ ID NO: 100104 - DNA, 25 bp, Homo sapien
acgagtgatgacatttctccgtggt

SEQ ID NO: 100105 - DNA, 25 bp, Homo sapien
gtaggaggtcctcatggtccgagac

SEQ ID NO: 100106 - DNA, 25 bp, Homo sapien
gtaggaggtcctgatggtccgagac

SEQ ID NO: 100107 - DNA, 25 bp, Homo sapien
ctgctcactcccttaagtgagaact

SEQ ID NO: 100108 - DNA, 25 bp, Homo sapien
ctgctcactcccataagtgagaact

SEQ ID NO: 100109 - DNA, 25 bp, Homo sapien
aactctgtcccgacaacagagggat

SEQ ID NO: 100110 - DNA, 25 bp, Homo sapien
aactctgtcccgtcaacagagggat

SEQ ID NO: 100111 - DNA, 25 bp, Homo sapien
actcctccagagaccagtatagact

SEQ ID NO: 100112 - DNA, 25 bp, Homo sapien
actcctccagagtccagtatagact

SEQ ID NO: 100113 - DNA, 25 bp, Homo sapien
cctacgaccccgtcagaagtgagtc

SEQ ID NO: 100114 - DNA, 25 bp, Homo sapien
cctacgaccccgacagaagtgagtc

SEQ ID NO: 100115 - DNA, 25 bp, Homo sapien
ctgggtcaagaaccactcagagcgt

SEQ ID NO: 100116 - DNA, 25 bp, Homo sapien
ctgggtcaagaagcactcagagcgt

SEQ ID NO: 100117 - DNA, 25 bp, Homo sapien
ctcgcgacgacgaggagcacccgga

SEQ ID NO: 100118 - DNA, 25 bp, Homo sapien
ctcgcgacgacgtggagcacccgga

SEQ ID NO: 100119 - DNA, 25 bp, Homo sapien
tccgacagacggtcgctcctctaga

SEQ ID NO: 100120 - DNA, 25 bp, Homo sapien
tccgacagacggacgctcctctaga

SEQ ID NO: 100121 - DNA, 25 bp, Homo sapien
gtgacatcggtgtaccttctgtagg

SEQ ID NO: 100122 - DNA, 25 bp, Homo sapien
gtgacatcggtgaaccttctgtagg

SEQ ID NO: 100123 - DNA, 25 bp, Homo sapien
gatactgacgttacgttttaagact

SEQ ID NO: 100124 - DNA, 25 bp, Homo sapien
gatactgacgtttcgttttaagact

SEQ ID NO: 100125 - DNA, 25 bp, Homo sapien
gagtctcctttcgtttacgacacgt

SEQ ID NO: 100126 - DNA, 25 bp, Homo sapien
gagtctcctttcctttacgacacgt

SEQ ID NO: 100127 - DNA, 25 bp, Homo sapien
cactttactcttggtgactttgatt

SEQ ID NO: 100128 - DNA, 25 bp, Homo sapien
cactttactcttcgtgactttgatt

SEQ ID NO: 100129 - DNA, 25 bp, Homo sapien
ctcttctttcttttactattgagtt

SEQ ID NO: 100130 - DNA, 25 bp, Homo sapien
ctcttctttcttatactattgagtt

SEQ ID NO: 100131 - DNA, 25 bp, Homo sapien
tgttgttgtttttgttctattgaat

SEQ ID NO: 100132 - DNA, 25 bp, Homo sapien
tgttgttgttttagttctattgaat

SEQ ID NO: 100133 - DNA, 25 bp, Homo sapien
gtgggtttgtctcgtcagttctggt

SEQ ID NO: 100134 - DNA, 25 bp, Homo sapien
gtgggtttgtctggtcagttctggt

SEQ ID NO: 100135 - DNA, 25 bp, Homo sapien
ttttactttcgatctgttatcgacg

SEQ ID NO: 100136 - DNA, 25 bp, Homo sapien
ttttactttcgaactgttatcgacg

SEQ ID NO: 100137 - DNA, 25 bp, Homo sapien
acaagatgagaggacttatcaattc

SEQ ID NO: 100138 - DNA, 25 bp, Homo sapien
acaagatgagagcacttatcaattc

SEQ ID NO: 100139 - DNA, 25 bp, Homo sapien
taagtaatcaagaatgtatcattta

SEQ ID NO: 100140 - DNA, 25 bp, Homo sapien
taagtaatcaagtatgtatcattta

SEQ ID NO: 100141 - DNA, 25 bp, Homo sapien
ttttgactacagaccgttcgattta

SEQ ID NO: 100142 - DNA, 25 bp, Homo sapien
ttttgactacagtccgttcgattta

SEQ ID NO: 100143 - DNA, 25 bp, Homo sapien
actgtcatactgtcactggattaca

SEQ ID NO: 100144 - DNA, 25 bp, Homo sapien
actgtcatactgacactggattaca

SEQ ID NO: 100145 - DNA, 25 bp, Homo sapien
ggtgttacagtacactagtccttcc

SEQ ID NO: 100146 - DNA, 25 bp, Homo sapien
ggtgttacagtagactagtccttcc

SEQ ID NO: 100147 - DNA, 25 bp, Homo sapien
tgtgtagtctgagacatcacatcgc

SEQ ID NO: 100148 - DNA, 25 bp, Homo sapien
tgtgtagtctgacacatcacatcgc

SEQ ID NO: 100149 - DNA, 25 bp, Homo sapien
cggtggtcgtaactgcaagaacggt

SEQ ID NO: 100150 - DNA, 25 bp, Homo sapien
cggtggtcgtaagtgcaagaacggt

SEQ ID NO: 100151 - DNA, 25 bp, Homo sapien
ctccggtacttggtggggcgcgact

SEQ ID NO: 100152 - DNA, 25 bp, Homo sapien
ctccggtacttgctggggcgcgact

SEQ ID NO: 100153 - DNA, 25 bp, Homo sapien
tacatcgacgcgtgcgggcgcacct

SEQ ID NO: 100154 - DNA, 25 bp, Homo sapien
tacatcgacgcgagcgggcgcacct

SEQ ID NO: 100155 - DNA, 25 bp, Homo sapien
cgacgaccgaggacggggcgacaac

SEQ ID NO: 100156 - DNA, 25 bp, Homo sapien
cgacgaccgaggtcggggcgacaac

SEQ ID NO: 100157 - DNA, 25 bp, Homo sapien
ccgtgactcaagttttggtcacttc

SEQ ID NO: 100158 - DNA, 25 bp, Homo sapien
ccgtgactcaagatttggtcacttc

SEQ ID NO: 100159 - DNA, 25 bp, Homo sapien
gaggactcccaggtccaggtgtaca

SEQ ID NO: 100160 - DNA, 25 bp, Homo sapien
gaggactcccagctccaggtgtaca

SEQ ID NO: 100161 - DNA, 25 bp, Homo sapien
aagaactacgagtgccagaagtgga

SEQ ID NO: 100162 - DNA, 25 bp, Homo sapien
aagaactacgagagccagaagtgga

SEQ ID NO: 100163 - DNA, 25 bp, Homo sapien
ggtctaaaccctcaagaggttacgt

SEQ ID NO: 100164 - DNA, 25 bp, Homo sapien
ggtctaaaccctgaagaggttacgt

SEQ ID NO: 100165 - DNA, 25 bp, Homo sapien
acctagacactgtgcccgagtctct

SEQ ID NO: 100166 - DNA, 25 bp, Homo sapien
acctagacactgagcccgagtctct

SEQ ID NO: 100167 - DNA, 25 bp, Homo sapien
ctctcctaagcgacccgagtcgtag

SEQ ID NO: 100168 - DNA, 25 bp, Homo sapien
ctctcctaagcgtcccgagtcgtag

SEQ ID NO: 100169 - DNA, 25 bp, Homo sapien
gtcccgagtcggtccgacaagtagt

SEQ ID NO: 100170 - DNA, 25 bp, Homo sapien
gtcccgagtcggaccgacaagtagt

SEQ ID NO: 100171 - DNA, 25 bp, Homo sapien
gtcctgtgacggatactcctaggtg

SEQ ID NO: 100172 - DNA, 25 bp, Homo sapien
gtcctgtgacggttactcctaggtg

SEQ ID NO: 100173 - DNA, 25 bp, Homo sapien
acaaattagtcaccactgaagagtg

SEQ ID NO: 100174 - DNA, 25 bp, Homo sapien
acaaattagtcagcactgaagagtg

SEQ ID NO: 100175 - DNA, 25 bp, Homo sapien
gatagaaaacaccatactgatagca

SEQ ID NO: 100176 - DNA, 25 bp, Homo sapien
gatagaaaacacgatactgatagca

SEQ ID NO: 100177 - DNA, 25 bp, Homo sapien
ccgagacgggatacgactcctgctc

SEQ ID NO: 100178 - DNA, 25 bp, Homo sapien
ccgagacgggattcgactcctgctc

SEQ ID NO: 100179 - DNA, 25 bp, Homo sapien
taaaacacggaatctttcccgtaga

SEQ ID NO: 100180 - DNA, 25 bp, Homo sapien
taaaacacggaaactttcccgtaga

SEQ ID NO: 100181 - DNA, 25 bp, Homo sapien
tgacacataattcatccttttgggt

SEQ ID NO: 100182 - DNA, 25 bp, Homo sapien
tgacacataattgatccttttgggt

SEQ ID NO: 100183 - DNA, 25 bp, Homo sapien
tagacaataccgtcttattggttct

SEQ ID NO: 100184 - DNA, 25 bp, Homo sapien
tagacaataccgacttattggttct

SEQ ID NO: 100185 - DNA, 25 bp, Homo sapien
aaattcaggactaaactcgtgtaga

SEQ ID NO: 100186 - DNA, 25 bp, Homo sapien
aaattcaggacttaactcgtgtaga

SEQ ID NO: 100187 - DNA, 25 bp, Homo sapien
gaaccactacggtgacagtgtgctc

SEQ ID NO: 100188 - DNA, 25 bp, Homo sapien
gaaccactacggagacagtgtgctc

SEQ ID NO: 100189 - DNA, 25 bp, Homo sapien
gtgtgatcaatatgtcataaaacac

SEQ ID NO: 100190 - DNA, 25 bp, Homo sapien
gtgtgatcaataagtcataaaacac

SEQ ID NO: 100191 - DNA, 25 bp, Homo sapien
tacaacgactgattgggacaaatct

SEQ ID NO: 100192 - DNA, 25 bp, Homo sapien
tacaacgactgaatgggacaaatct

SEQ ID NO: 100193 - DNA, 25 bp, Homo sapien
gactgaatcccgttaaactaagacg

SEQ ID NO: 100194 - DNA, 25 bp, Homo sapien
gactgaatcccgataaactaagacg

SEQ ID NO: 100195 - DNA, 25 bp, Homo sapien
tcaaggtatccaaaagtacaatacg

SEQ ID NO: 100196 - DNA, 25 bp, Homo sapien
tcaaggtatccataagtacaatacg

SEQ ID NO: 100197 - DNA, 25 bp, Homo sapien
cataagggcgtcaaacgactgaata

SEQ ID NO: 100198 - DNA, 25 bp, Homo sapien
cataagggcgtctaacgactgaata

SEQ ID NO: 100199 - DNA, 25 bp, Homo sapien
catggcggtctcttagacgtgaaag

SEQ ID NO: 100200 - DNA, 25 bp, Homo sapien
catggcggtctcatagacgtgaaag

SEQ ID NO: 100201 - DNA, 25 bp, Homo sapien
tataatgttctttctactcgaatct

SEQ ID NO: 100202 - DNA, 25 bp, Homo sapien
tataatgttcttactactcgaatct

SEQ ID NO: 100203 - DNA, 25 bp, Homo sapien
ggggtcgaaagtgtcaactacctta

SEQ ID NO: 100204 - DNA, 25 bp, Homo sapien
ggggtcgaaagtctcaactacctta

SEQ ID NO: 100205 - DNA, 25 bp, Homo sapien
ttggtgcaatgtctcctacatcgac

SEQ ID NO: 100206 - DNA, 25 bp, Homo sapien
ttggtgcaatgtgtcctacatcgac

SEQ ID NO: 100207 - DNA, 25 bp, Homo sapien
tgggggtttgtatccccgtatactt

SEQ ID NO: 100208 - DNA, 25 bp, Homo sapien
tgggggtttgtaaccccgtatactt

SEQ ID NO: 100209 - DNA, 25 bp, Homo sapien
ggtctgattcaaaccgtgctacact

SEQ ID NO: 100210 - DNA, 25 bp, Homo sapien
ggtctgattcaatccgtgctacact

SEQ ID NO: 100211 - DNA, 25 bp, Homo sapien
tcctactggtttcttcgtcgactca

SEQ ID NO: 100212 - DNA, 25 bp, Homo sapien
tcctactggtttgttcgtcgactca

SEQ ID NO: 100213 - DNA, 25 bp, Homo sapien
aactcttggttttatagtcgaccga

SEQ ID NO: 100214 - DNA, 25 bp, Homo sapien
aactcttggtttaatagtcgaccga

SEQ ID NO: 100215 - DNA, 25 bp, Homo sapien
taccggggaccgactctacactcga

SEQ ID NO: 100216 - DNA, 25 bp, Homo sapien
taccggggaccgtctctacactcga

SEQ ID NO: 100217 - DNA, 25 bp, Homo sapien
catggagacatgtatctcagtgtag

SEQ ID NO: 100218 - DNA, 25 bp, Homo sapien
catggagacatgaatctcagtgtag

SEQ ID NO: 100219 - DNA, 25 bp, Homo sapien
acatatgcatacgaatctgatgtat

SEQ ID NO: 100220 - DNA, 25 bp, Homo sapien
acatatgcataccaatctgatgtat

SEQ ID NO: 100221 - DNA, 25 bp, Homo sapien
aaatgtatgcaattaacacttttat

SEQ ID NO: 100222 - DNA, 25 bp, Homo sapien
aaatgtatgcaaataacacttttat

SEQ ID NO: 100223 - DNA, 25 bp, Homo sapien
gagtttccaatgatcactcgactat

SEQ ID NO: 100224 - DNA, 25 bp, Homo sapien
gagtttccaatgttcactcgactat

SEQ ID NO: 100225 - DNA, 25 bp, Homo sapien
tgactactttgtactgttcacttgc

SEQ ID NO: 100226 - DNA, 25 bp, Homo sapien
tgactactttgttctgttcacttgc

SEQ ID NO: 100227 - DNA, 25 bp, Homo sapien
aagcttattgttcacgttcattgtt

SEQ ID NO: 100228 - DNA, 25 bp, Homo sapien
aagcttattgttgacgttcattgtt

SEQ ID NO: 100229 - DNA, 25 bp, Homo sapien
aggttcagaggtgacaacagcagtc

SEQ ID NO: 100230 - DNA, 25 bp, Homo sapien
aggttcagaggtcacaacagcagtc

SEQ ID NO: 100231 - DNA, 25 bp, Homo sapien
ggagacacttcgatgtctgtcatct

SEQ ID NO: 100232 - DNA, 25 bp, Homo sapien
ggagacacttcgttgtctgtcatct

SEQ ID NO: 100233 - DNA, 25 bp, Homo sapien
gtacccggggtgacaccgagtccga

SEQ ID NO: 100234 - DNA, 25 bp, Homo sapien
gtacccggggtgtcaccgagtccga

SEQ ID NO: 100235 - DNA, 25 bp, Homo sapien
accgtggggtagctcaacagctcgg

SEQ ID NO: 100236 - DNA, 25 bp, Homo sapien
accgtggggtaggtcaacagctcgg

SEQ ID NO: 100237 - DNA, 25 bp, Homo sapien
gtcggaactacgtcctaacactcgg

SEQ ID NO: 100238 - DNA, 25 bp, Homo sapien
gtcggaactacgacctaacactcgg

SEQ ID NO: 100239 - DNA, 25 bp, Homo sapien
ctgtgtacacatacctctacaacgg

SEQ ID NO: 100240 - DNA, 25 bp, Homo sapien
ctgtgtacacattcctctacaacgg

SEQ ID NO: 100241 - DNA, 25 bp, Homo sapien
gtctctaagtattcgccgtgacagg

SEQ ID NO: 100242 - DNA, 25 bp, Homo sapien
gtctctaagtatacgccgtgacagg

SEQ ID NO: 100243 - DNA, 25 bp, Homo sapien
accttctacggcaaccgtttgaccg

SEQ ID NO: 100244 - DNA, 25 bp, Homo sapien
accttctacggctaccgtttgaccg

SEQ ID NO: 100245 - DNA, 25 bp, Homo sapien
atatccttcagaccttggttatgaa

SEQ ID NO: 100246 - DNA, 25 bp, Homo sapien
atatccttcagagcttggttatgaa

SEQ ID NO: 100247 - DNA, 25 bp, Homo sapien
gattccctttgaagtcgtattttta

SEQ ID NO: 100248 - DNA, 25 bp, Homo sapien
gattccctttgatgtcgtattttta

SEQ ID NO: 100249 - DNA, 25 bp, Homo sapien
tatataaatgttttgtcttttaatt

SEQ ID NO: 100250 - DNA, 25 bp, Homo sapien
tatataaatgttatgtcttttaatt

SEQ ID NO: 100251 - DNA, 25 bp, Homo sapien
tacagacatgttttggtttacaaac

SEQ ID NO: 100252 - DNA, 25 bp, Homo sapien
tacagacatgttatggtttacaaac

SEQ ID NO: 100253 - DNA, 25 bp, Homo sapien
actctctcctccggagtctaacata

SEQ ID NO: 100254 - DNA, 25 bp, Homo sapien
actctctcctcccgagtctaacata

SEQ ID NO: 100255 - DNA, 25 bp, Homo sapien
cttaggtctccgacgtgtcctctca

SEQ ID NO: 100256 - DNA, 25 bp, Homo sapien
cttaggtctccgtcgtgtcctctca

SEQ ID NO: 100257 - DNA, 25 bp, Homo sapien
ccgagaggttcatctcttccctata

SEQ ID NO: 100258 - DNA, 25 bp, Homo sapien
ccgagaggttcaactcttccctata

SEQ ID NO: 100259 - DNA, 25 bp, Homo sapien
gcccgaggtaggaccctcgaccaga

SEQ ID NO: 100260 - DNA, 25 bp, Homo sapien
gcccgaggtaggtccctcgaccaga

SEQ ID NO: 100261 - DNA, 25 bp, Homo sapien
ccgactggagcgacctttccgtcga

SEQ ID NO: 100262 - DNA, 25 bp, Homo sapien
ccgactggagcgtcctttccgtcga

SEQ ID NO: 100263 - DNA, 25 bp, Homo sapien
gtcacatgggaactacctttgtcag

SEQ ID NO: 100264 - DNA, 25 bp, Homo sapien
gtcacatgggaagtacctttgtcag

SEQ ID NO: 100265 - DNA, 25 bp, Homo sapien
ctcaaggagagagaccagaggctac

SEQ ID NO: 100266 - DNA, 25 bp, Homo sapien
ctcaaggagagacaccagaggctac

SEQ ID NO: 100267 - DNA, 25 bp, Homo sapien
tcggtaggacccagaccggaggctc

SEQ ID NO: 100268 - DNA, 25 bp, Homo sapien
tcggtaggaccctgaccggaggctc

SEQ ID NO: 100269 - DNA, 25 bp, Homo sapien
tcgttaaacaactgacttttagttg

SEQ ID NO: 100270 - DNA, 25 bp, Homo sapien
tcgttaaacaacagacttttagttg

SEQ ID NO: 100271 - DNA, 25 bp, Homo sapien
attagaaaatcacctgtgtcgaaag

SEQ ID NO: 100272 - DNA, 25 bp, Homo sapien
attagaaaatcagctgtgtcgaaag

SEQ ID NO: 100273 - DNA, 25 bp, Homo sapien
atgacgataaatacaccatgaagat

SEQ ID NO: 100274 - DNA, 25 bp, Homo sapien
atgacgataaattcaccatgaagat

SEQ ID NO: 100275 - DNA, 25 bp, Homo sapien
ctttgagtctgtctccacgggagga

SEQ ID NO: 100276 - DNA, 25 bp, Homo sapien
ctttgagtctgtgtccacgggagga

SEQ ID NO: 100277 - DNA, 25 bp, Homo sapien
caaggagtcaggtcccgcatcgcac

SEQ ID NO: 100278 - DNA, 25 bp, Homo sapien
caaggagtcaggacccgcatcgcac

SEQ ID NO: 100279 - DNA, 25 bp, Homo sapien
tacgggacgtaaacggccgtttccc

SEQ ID NO: 100280 - DNA, 25 bp, Homo sapien
tacgggacgtaatcggccgtttccc

SEQ ID NO: 100281 - DNA, 25 bp, Homo sapien
aaggcggatctggacggtctcgtcc

SEQ ID NO: 100282 - DNA, 25 bp, Homo sapien
aaggcggatctgcacggtctcgtcc

SEQ ID NO: 100283 - DNA, 25 bp, Homo sapien
cgtaaggtcaagtggaccgacttca

SEQ ID NO: 100284 - DNA, 25 bp, Homo sapien
cgtaaggtcaagaggaccgacttca

SEQ ID NO: 100285 - DNA, 25 bp, Homo sapien
gaagtcccagtaaaactaacagaca

SEQ ID NO: 100286 - DNA, 25 bp, Homo sapien
gaagtcccagtataactaacagaca

SEQ ID NO: 100287 - DNA, 25 bp, Homo sapien
gaaagaccccgtactcaaaagtaca

SEQ ID NO: 100288 - DNA, 25 bp, Homo sapien
gaaagaccccgttctcaaaagtaca

SEQ ID NO: 100289 - DNA, 25 bp, Homo sapien
tgagaaacccactgaaatgattata

SEQ ID NO: 100290 - DNA, 25 bp, Homo sapien
tgagaaacccacagaaatgattata

SEQ ID NO: 100291 - DNA, 25 bp, Homo sapien
agaagacacccaaaagaacagtttt

SEQ ID NO: 100292 - DNA, 25 bp, Homo sapien
agaagacacccataagaacagtttt

SEQ ID NO: 100293 - DNA, 25 bp, Homo sapien
ttgaaaaacgcagtgaaccctttgt

SEQ ID NO: 100294 - DNA, 25 bp, Homo sapien
ttgaaaaacgcactgaaccctttgt

SEQ ID NO: 100295 - DNA, 25 bp, Homo sapien
ggggacaactcataaaactcgcttg

SEQ ID NO: 100296 - DNA, 25 bp, Homo sapien
ggggacaactcaaaaaactcgcttg

SEQ ID NO: 100297 - DNA, 25 bp, Homo sapien
gaatatacccaacgagtctccgtaa

SEQ ID NO: 100298 - DNA, 25 bp, Homo sapien
gaatatacccaaggagtctccgtaa

SEQ ID NO: 100299 - DNA, 25 bp, Homo sapien
ccaagagtacccacgggtccggaag

SEQ ID NO: 100300 - DNA, 25 bp, Homo sapien
ccaagagtaccctcgggtccggaag

SEQ ID NO: 100301 - DNA, 25 bp, Homo sapien
gcgattgtccactcgggtcctcaga

SEQ ID NO: 100302 - DNA, 25 bp, Homo sapien
gcgattgtccacacgggtcctcaga

SEQ ID NO: 100303 - DNA, 25 bp, Homo sapien
gcgacccctcttcgagggactctgg

SEQ ID NO: 100304 - DNA, 25 bp, Homo sapien
gcgacccctcttggagggactctgg

SEQ ID NO: 100305 - DNA, 25 bp, Homo sapien
caccagtttcgttacaaagtcttag

SEQ ID NO: 100306 - DNA, 25 bp, Homo sapien
caccagtttcgtaacaaagtcttag

SEQ ID NO: 100307 - DNA, 25 bp, Homo sapien
aaacgcttagtcaagtcatctacag

SEQ ID NO: 100308 - DNA, 25 bp, Homo sapien
aaacgcttagtctagtcatctacag

SEQ ID NO: 100309 - DNA, 25 bp, Homo sapien
gaccccagtatgacgtcctcaacgt

SEQ ID NO: 100310 - DNA, 25 bp, Homo sapien
gaccccagtatgtcgtcctcaacgt

SEQ ID NO: 100311 - DNA, 25 bp, Homo sapien
cagggtgtcaattttcgttactaaa

SEQ ID NO: 100312 - DNA, 25 bp, Homo sapien
cagggtgtcaatattcgttactaaa

SEQ ID NO: 100313 - DNA, 25 bp, Homo sapien
gggtgctgttgaaggactctagaca

SEQ ID NO: 100314 - DNA, 25 bp, Homo sapien
gggtgctgttgatggactctagaca

SEQ ID NO: 100315 - DNA, 25 bp, Homo sapien
ggaacatggtgtgacttcaaaacac

SEQ ID NO: 100316 - DNA, 25 bp, Homo sapien
ggaacatggtgtcacttcaaaacac

SEQ ID NO: 100317 - DNA, 25 bp, Homo sapien
gatcatgttgtcaggacaaacacga

SEQ ID NO: 100318 - DNA, 25 bp, Homo sapien
gatcatgttgtctggacaaacacga

SEQ ID NO: 100319 - DNA, 25 bp, Homo sapien
aggaagtgtaacgtgacaagtaacc

SEQ ID NO: 100320 - DNA, 25 bp, Homo sapien
aggaagtgtaacctgacaagtaacc

SEQ ID NO: 100321 - DNA, 25 bp, Homo sapien
ggaagatcagagtagcagactaaac

SEQ ID NO: 100322 - DNA, 25 bp, Homo sapien
ggaagatcagagaagcagactaaac

SEQ ID NO: 100323 - DNA, 25 bp, Homo sapien
gttacgggcacgataaatagacccc

SEQ ID NO: 100324 - DNA, 25 bp, Homo sapien
gttacgggcacgttaaatagacccc

SEQ ID NO: 100325 - DNA, 25 bp, Homo sapien
ttaccagaagatgaacgactcaatg

SEQ ID NO: 100326 - DNA, 25 bp, Homo sapien
ttaccagaagatcaacgactcaatg

SEQ ID NO: 100327 - DNA, 25 bp, Homo sapien
tcttcccgagggacggactgacaag

SEQ ID NO: 100328 - DNA, 25 bp, Homo sapien
tcttcccgagggtcggactgacaag

SEQ ID NO: 100329 - DNA, 25 bp, Homo sapien
ctccaagaaccgagtcgtgagcaga

SEQ ID NO: 100330 - DNA, 25 bp, Homo sapien
ctccaagaaccgtgtcgtgagcaga

SEQ ID NO: 100331 - DNA, 25 bp, Homo sapien
tccggaggaccgttccggagacccg

SEQ ID NO: 100332 - DNA, 25 bp, Homo sapien
tccggaggaccgatccggagacccg

SEQ ID NO: 100333 - DNA, 25 bp, Homo sapien
gggcgagactctcgttccggagccc

SEQ ID NO: 100334 - DNA, 25 bp, Homo sapien
gggcgagactctggttccggagccc

SEQ ID NO: 100335 - DNA, 25 bp, Homo sapien
tgggaggaactctgacctcgaccgc

SEQ ID NO: 100336 - DNA, 25 bp, Homo sapien
tgggaggaactcagacctcgaccgc

SEQ ID NO: 100337 - DNA, 25 bp, Homo sapien
ttggtggaagaaagacactcgtcaa

SEQ ID NO: 100338 - DNA, 25 bp, Homo sapien
ttggtggaagaatgacactcgtcaa

SEQ ID NO: 100339 - DNA, 25 bp, Homo sapien
cctaggccataaaggacaccttgag

SEQ ID NO: 100340 - DNA, 25 bp, Homo sapien
cctaggccataatggacaccttgag

SEQ ID NO: 100341 - DNA, 25 bp, Homo sapien
ctgacggtcacctatactcccgaaa

SEQ ID NO: 100342 - DNA, 25 bp, Homo sapien
ctgacggtcaccaatactcccgaaa

SEQ ID NO: 100343 - DNA, 25 bp, Homo sapien
aaaggaactcggacctacgaaacct

SEQ ID NO: 100344 - DNA, 25 bp, Homo sapien
aaaggaactcggtcctacgaaacct

SEQ ID NO: 100345 - DNA, 25 bp, Homo sapien
aacaactggtattgtgatcgaaacc

SEQ ID NO: 100346 - DNA, 25 bp, Homo sapien
aacaactggtatagtgatcgaaacc

SEQ ID NO: 100347 - DNA, 25 bp, Homo sapien
cgacggaggtcttaagggacttacc

SEQ ID NO: 100348 - DNA, 25 bp, Homo sapien
cgacggaggtctaaagggacttacc

SEQ ID NO: 100349 - DNA, 25 bp, Homo sapien
acgggtggtcctagtacccgtgcgc

SEQ ID NO: 100350 - DNA, 25 bp, Homo sapien
acgggtggtccttgtacccgtgcgc

SEQ ID NO: 100351 - DNA, 25 bp, Homo sapien
tcggttcggtcctcctgtcagtcct

SEQ ID NO: 100352 - DNA, 25 bp, Homo sapien
tcggttcggtccacctgtcagtcct

SEQ ID NO: 100353 - DNA, 25 bp, Homo sapien
tcagggctttgtctccctcggaaca

SEQ ID NO: 100354 - DNA, 25 bp, Homo sapien
tcagggctttgtgtccctcggaaca

SEQ ID NO: 100355 - DNA, 25 bp, Homo sapien
aaagtgttattgaccccggacaccg

SEQ ID NO: 100356 - DNA, 25 bp, Homo sapien
aaagtgttattgtccccggacaccg

SEQ ID NO: 100357 - DNA, 25 bp, Homo sapien
cccagaattgtgtcccgcggtgacc

SEQ ID NO: 100358 - DNA, 25 bp, Homo sapien
cccagaattgtgacccgcggtgacc

SEQ ID NO: 100359 - DNA, 25 bp, Homo sapien
cggaaagagtgtgacggtggagacc

SEQ ID NO: 100360 - DNA, 25 bp, Homo sapien
cggaaagagtgtcacggtggagacc

SEQ ID NO: 100361 - DNA, 25 bp, Homo sapien
aaacagaagggtgactatcagaaac

SEQ ID NO: 100362 - DNA, 25 bp, Homo sapien
aaacagaagggtcactatcagaaac

SEQ ID NO: 100363 - DNA, 25 bp, Homo sapien
aggttactcctgacgtatcaaaggt

SEQ ID NO: 100364 - DNA, 25 bp, Homo sapien
aggttactcctgtcgtatcaaaggt

SEQ ID NO: 100365 - DNA, 25 bp, Homo sapien
acgggatccctctacgaccaaaagt

SEQ ID NO: 100366 - DNA, 25 bp, Homo sapien
acgggatccctcaacgaccaaaagt

SEQ ID NO: 100367 - DNA, 25 bp, Homo sapien
tcgggtttacccagatcatcaaagt

SEQ ID NO: 100368 - DNA, 25 bp, Homo sapien
tcgggtttaccctgatcatcaaagt

SEQ ID NO: 100369 - DNA, 25 bp, Homo sapien
tgatcacaccgttcacgagacaatc

SEQ ID NO: 100370 - DNA, 25 bp, Homo sapien
tgatcacaccgtacacgagacaatc

SEQ ID NO: 100371 - DNA, 25 bp, Homo sapien
ttgagttctatgacagtacatttct

SEQ ID NO: 100372 - DNA, 25 bp, Homo sapien
ttgagttctatgtcagtacatttct

SEQ ID NO: 100373 - DNA, 25 bp, Homo sapien
ttaaggagttcttgccttttctccg

SEQ ID NO: 100374 - DNA, 25 bp, Homo sapien
ttaaggagttctagccttttctccg

SEQ ID NO: 100375 - DNA, 25 bp, Homo sapien
atcgggtgatggtattcgttttccc

SEQ ID NO: 100376 - DNA, 25 bp, Homo sapien
atcgggtgatggaattcgttttccc

SEQ ID NO: 100377 - DNA, 25 bp, Homo sapien
ggattatggaattcttcttgtctct

SEQ ID NO: 100378 - DNA, 25 bp, Homo sapien
ggattatggaatacttcttgtctct

SEQ ID NO: 100379 - DNA, 25 bp, Homo sapien
tgttggtactcttacttttaggtac

SEQ ID NO: 100380 - DNA, 25 bp, Homo sapien
tgttggtactctaacttttaggtac

SEQ ID NO: 100381 - DNA, 25 bp, Homo sapien
tcgaagacttaatcgtaccgtcttc

SEQ ID NO: 100382 - DNA, 25 bp, Homo sapien
tcgaagacttaaacgtaccgtcttc

SEQ ID NO: 100383 - DNA, 25 bp, Homo sapien
ttatcccgttctatactgttgtaag

SEQ ID NO: 100384 - DNA, 25 bp, Homo sapien
ttatcccgttctttactgttgtaag

SEQ ID NO: 100385 - DNA, 25 bp, Homo sapien
agacttataaaggtattccttgcaa

SEQ ID NO: 100386 - DNA, 25 bp, Homo sapien
agacttataaagctattccttgcaa

SEQ ID NO: 100387 - DNA, 25 bp, Homo sapien
agatcttaagatttccacacattga

SEQ ID NO: 100388 - DNA, 25 bp, Homo sapien
agatcttaagatatccacacattga

SEQ ID NO: 100389 - DNA, 25 bp, Homo sapien
cggcaaaagtaatcgaaacatcatc

SEQ ID NO: 100390 - DNA, 25 bp, Homo sapien
cggcaaaagtaaacgaaacatcatc

SEQ ID NO: 100391 - DNA, 25 bp, Homo sapien
ccgagagaaatttcggttgtgccct

SEQ ID NO: 100392 - DNA, 25 bp, Homo sapien
ccgagagaaattacggttgtgccct

SEQ ID NO: 100393 - DNA, 25 bp, Homo sapien
gagaacgacaagaggggccctgact

SEQ ID NO: 100394 - DNA, 25 bp, Homo sapien
gagaacgacaagtggggccctgact

SEQ ID NO: 100395 - DNA, 25 bp, Homo sapien
gacacccaggattccctacgaaact

SEQ ID NO: 100396 - DNA, 25 bp, Homo sapien
gacacccaggataccctacgaaact

SEQ ID NO: 100397 - DNA, 25 bp, Homo sapien
tggcccgacaggtggcaacgactgc

SEQ ID NO: 100398 - DNA, 25 bp, Homo sapien
tggcccgacaggaggcaacgactgc

SEQ ID NO: 100399 - DNA, 25 bp, Homo sapien
ctgagaagagcgtccgagttccgag

SEQ ID NO: 100400 - DNA, 25 bp, Homo sapien
ctgagaagagcgaccgagttccgag

SEQ ID NO: 100401 - DNA, 25 bp, Homo sapien
aagaaaagtctatcactgtctcgag

SEQ ID NO: 100402 - DNA, 25 bp, Homo sapien
aagaaaagtctaacactgtctcgag

SEQ ID NO: 100403 - DNA, 25 bp, Homo sapien
tcgtcttcacaaacccactgaaagg

SEQ ID NO: 100404 - DNA, 25 bp, Homo sapien
tcgtcttcacaatcccactgaaagg

SEQ ID NO: 100405 - DNA, 25 bp, Homo sapien
ccgtctcccttagtctttcataagg

SEQ ID NO: 100406 - DNA, 25 bp, Homo sapien
ccgtctcccttactctttcataagg

SEQ ID NO: 100407 - DNA, 25 bp, Homo sapien
gtgtattcactccttcttcgcctgc

SEQ ID NO: 100408 - DNA, 25 bp, Homo sapien
gtgtattcactcgttcttcgcctgc

SEQ ID NO: 100409 - DNA, 25 bp, Homo sapien
tttgtcaccgtctggtgcgaactta

SEQ ID NO: 100410 - DNA, 25 bp, Homo sapien
tttgtcaccgtcaggtgcgaactta

SEQ ID NO: 100411 - DNA, 25 bp, Homo sapien
gggcgccgtcggtcctgactacgta

SEQ ID NO: 100412 - DNA, 25 bp, Homo sapien
gggcgccgtcggacctgactacgta

SEQ ID NO: 100413 - DNA, 25 bp, Homo sapien
aagtacggtgagaaccgtgtctaca

SEQ ID NO: 100414 - DNA, 25 bp, Homo sapien
aagtacggtgagtaccgtgtctaca

SEQ ID NO: 100415 - DNA, 25 bp, Homo sapien
tttgggtacgggaaacctgactatt

SEQ ID NO: 100416 - DNA, 25 bp, Homo sapien
tttgggtacgggtaacctgactatt

SEQ ID NO: 100417 - DNA, 25 bp, Homo sapien
cgtgtactactgtcagaatgaccat

SEQ ID NO: 100418 - DNA, 25 bp, Homo sapien
cgtgtactactgacagaatgaccat

SEQ ID NO: 100419 - DNA, 25 bp, Homo sapien
cgaaaaatcgaatgtattgaccacg

SEQ ID NO: 100420 - DNA, 25 bp, Homo sapien
cgaaaaatcgaaagtattgaccacg

SEQ ID NO: 100421 - DNA, 25 bp, Homo sapien
aagtcaaccgtaatggtcaaaccgt

SEQ ID NO: 100422 - DNA, 25 bp, Homo sapien
aagtcaaccgtattggtcaaaccgt

SEQ ID NO: 100423 - DNA, 25 bp, Homo sapien
gtttcacactcatatgtgccagtat

SEQ ID NO: 100424 - DNA, 25 bp, Homo sapien
gtttcacactcaaatgtgccagtat

SEQ ID NO: 100425 - DNA, 25 bp, Homo sapien
gggtgcgcctacactcccaagtact

SEQ ID NO: 100426 - DNA, 25 bp, Homo sapien
gggtgcgcctactctcccaagtact

SEQ ID NO: 100427 - DNA, 25 bp, Homo sapien
aggtggagctctacggtatccctac

SEQ ID NO: 100428 - DNA, 25 bp, Homo sapien
aggtggagctcttcggtatccctac

SEQ ID NO: 100429 - DNA, 25 bp, Homo sapien
tgcgtggcgacttctcgactcatcc

SEQ ID NO: 100430 - DNA, 25 bp, Homo sapien
tgcgtggcgactactcgactcatcc

SEQ ID NO: 100431 - DNA, 25 bp, Homo sapien
tagtgggtagaactaactgtacccg

SEQ ID NO: 100432 - DNA, 25 bp, Homo sapien
tagtgggtagaagtaactgtacccg

SEQ ID NO: 100433 - DNA, 25 bp, Homo sapien
gaaagaggggtaaagtacatttgtc

SEQ ID NO: 100434 - DNA, 25 bp, Homo sapien
gaaagaggggtatagtacatttgtc

SEQ ID NO: 100435 - DNA, 25 bp, Homo sapien
agaaacggttagagacagtgacacc

SEQ ID NO: 100436 - DNA, 25 bp, Homo sapien
agaaacggttagtgacagtgacacc

SEQ ID NO: 100437 - DNA, 25 bp, Homo sapien
gacgaaaacttataacagaaccagt

SEQ ID NO: 100438 - DNA, 25 bp, Homo sapien
gacgaaaacttaaaacagaaccagt

SEQ ID NO: 100439 - DNA, 25 bp, Homo sapien
gtactagttaagtcccaaataccag

SEQ ID NO: 100440 - DNA, 25 bp, Homo sapien
gtactagttaagacccaaataccag

SEQ ID NO: 100441 - DNA, 25 bp, Homo sapien
gggaccaaccgaacccaagagccag

SEQ ID NO: 100442 - DNA, 25 bp, Homo sapien
gggaccaaccgatcccaagagccag

SEQ ID NO: 100443 - DNA, 25 bp, Homo sapien
aggaggaaccatctcaaaacactac

SEQ ID NO: 100444 - DNA, 25 bp, Homo sapien
aggaggaaccatgtcaaaacactac

SEQ ID NO: 100445 - DNA, 25 bp, Homo sapien
gaggtacttttcgaatatcgttcta

SEQ ID NO: 100446 - DNA, 25 bp, Homo sapien
gaggtacttttccaatatcgttcta

SEQ ID NO: 100447 - DNA, 25 bp, Homo sapien
taaggatacctgtgccattatctat

SEQ ID NO: 100448 - DNA, 25 bp, Homo sapien
taaggatacctgagccattatctat

SEQ ID NO: 100449 - DNA, 25 bp, Homo sapien
aacgtttcttacacgccagttccag

SEQ ID NO: 100450 - DNA, 25 bp, Homo sapien
aacgtttcttactcgccagttccag

SEQ ID NO: 100451 - DNA, 25 bp, Homo sapien
gtccttcgacacctgctttcggggt

SEQ ID NO: 100452 - DNA, 25 bp, Homo sapien
gtccttcgacacgtgctttcggggt

SEQ ID NO: 100453 - DNA, 25 bp, Homo sapien
ccgtctcacgaggtctcctctgggt

SEQ ID NO: 100454 - DNA, 25 bp, Homo sapien
ccgtctcacgagctctcctctgggt

SEQ ID NO: 100455 - DNA, 25 bp, Homo sapien
actacctcgagagactcctctggtt

SEQ ID NO: 100456 - DNA, 25 bp, Homo sapien
actacctcgagacactcctctggtt

SEQ ID NO: 100457 - DNA, 25 bp, Homo sapien
gagacccgtcagtcgtccctacatt

SEQ ID NO: 100458 - DNA, 25 bp, Homo sapien
gagacccgtcagacgtccctacatt

SEQ ID NO: 100459 - DNA, 25 bp, Homo sapien
tggactccatgttacgaccccagta

SEQ ID NO: 100460 - DNA, 25 bp, Homo sapien
tggactccatgtaacgaccccagta

SEQ ID NO: 100461 - DNA, 25 bp, Homo sapien
ctagtcacagagttacccgcagaag

SEQ ID NO: 100462 - DNA, 25 bp, Homo sapien
ctagtcacagagatacccgcagaag

SEQ ID NO: 100463 - DNA, 25 bp, Homo sapien
tccggacgagtggtcttccgacaag

SEQ ID NO: 100464 - DNA, 25 bp, Homo sapien
tccggacgagtgctcttccgacaag

SEQ ID NO: 100465 - DNA, 25 bp, Homo sapien
gcggcccgcaatgacttgaacccta

SEQ ID NO: 100466 - DNA, 25 bp, Homo sapien
gcggcccgcaatcacttgaacccta

SEQ ID NO: 100467 - DNA, 25 bp, Homo sapien
accggggaggaccttcgacccccgt

SEQ ID NO: 100468 - DNA, 25 bp, Homo sapien
accggggaggacgttcgacccccgt

SEQ ID NO: 100469 - DNA, 25 bp, Homo sapien
aaggagaaacgttttatacccctct

SEQ ID NO: 100470 - DNA, 25 bp, Homo sapien
aaggagaaacgtattatacccctct

SEQ ID NO: 100471 - DNA, 25 bp, Homo sapien
gacgagtaatagtaacgacttccca

SEQ ID NO: 100472 - DNA, 25 bp, Homo sapien
gacgagtaatagaaacgacttccca

SEQ ID NO: 100473 - DNA, 25 bp, Homo sapien
agtacgttagtcatgaggtgacttc

SEQ ID NO: 100474 - DNA, 25 bp, Homo sapien
agtacgttagtcttgaggtgacttc

SEQ ID NO: 100475 - DNA, 25 bp, Homo sapien
aagatgtaagacttgtcgggttcac

SEQ ID NO: 100476 - DNA, 25 bp, Homo sapien
aagatgtaagacatgtcgggttcac

SEQ ID NO: 100477 - DNA, 25 bp, Homo sapien
tcgtagagtctcctactcgtggccc

SEQ ID NO: 100478 - DNA, 25 bp, Homo sapien
tcgtagagtctcgtactcgtggccc

SEQ ID NO: 100479 - DNA, 25 bp, Homo sapien
cccgacgacttcttcgggacgacac

SEQ ID NO: 100480 - DNA, 25 bp, Homo sapien
cccgacgacttcatcgggacgacac

SEQ ID NO: 100481 - DNA, 25 bp, Homo sapien
acgccgacaagtcgtcggtgcagag

SEQ ID NO: 100482 - DNA, 25 bp, Homo sapien
acgccgacaagtggtcggtgcagag

SEQ ID NO: 100483 - DNA, 25 bp, Homo sapien
ccacccgaagggtactgtgtgactg

SEQ ID NO: 100484 - DNA, 25 bp, Homo sapien
ccacccgaagggaactgtgtgactg

SEQ ID NO: 100485 - DNA, 25 bp, Homo sapien
cttggagtcgtctagactcggtggc

SEQ ID NO: 100486 - DNA, 25 bp, Homo sapien
cttggagtcgtcaagactcggtggc

SEQ ID NO: 100487 - DNA, 25 bp, Homo sapien
attttcaatcgtttgatctgtggtc

SEQ ID NO: 100488 - DNA, 25 bp, Homo sapien
attttcaatcgtatgatctgtggtc

SEQ ID NO: 100489 - DNA, 25 bp, Homo sapien
tgtttcatctgaagtcttgtgtctt

SEQ ID NO: 100490 - DNA, 25 bp, Homo sapien
tgtttcatctgatgtcttgtgtctt

SEQ ID NO: 100491 - DNA, 25 bp, Homo sapien
gtgagaagacggattacagccatta

SEQ ID NO: 100492 - DNA, 25 bp, Homo sapien
gtgagaagacggtttacagccatta

SEQ ID NO: 100493 - DNA, 25 bp, Homo sapien
aaaaacgtcgactgacaacctattg

SEQ ID NO: 100494 - DNA, 25 bp, Homo sapien
aaaaacgtcgacagacaacctattg

SEQ ID NO: 100495 - DNA, 25 bp, Homo sapien
agatcaaaagacacgaaggtcaacc

SEQ ID NO: 100496 - DNA, 25 bp, Homo sapien
agatcaaaagactcgaaggtcaacc

SEQ ID NO: 100497 - DNA, 25 bp, Homo sapien
agaaacagggactccacagtcaaac

SEQ ID NO: 100498 - DNA, 25 bp, Homo sapien
agaaacagggacaccacagtcaaac

SEQ ID NO: 100499 - DNA, 25 bp, Homo sapien
aggatcaggtatatcctcttggaac

SEQ ID NO: 100500 - DNA, 25 bp, Homo sapien
aggatcaggtatttcctcttggaac

SEQ ID NO: 100501 - DNA, 25 bp, Homo sapien
aggtccgacccgtttcgtccgagga

SEQ ID NO: 100502 - DNA, 25 bp, Homo sapien
aggtccgacccgattcgtccgagga

SEQ ID NO: 100503 - DNA, 25 bp, Homo sapien
agatggtaccgtgatgtcttcctgg

SEQ ID NO: 100504 - DNA, 25 bp, Homo sapien
agatggtaccgtcatgtcttcctgg

SEQ ID NO: 100505 - DNA, 25 bp, Homo sapien
aaaagtccgtcgataccacccttcg

SEQ ID NO: 100506 - DNA, 25 bp, Homo sapien
aaaagtccgtcgttaccacccttcg

SEQ ID NO: 100507 - DNA, 25 bp, Homo sapien
gcactgacgcgagaggacgcacccg

SEQ ID NO: 100508 - DNA, 25 bp, Homo sapien
gcactgacgcgacaggacgcacccg

SEQ ID NO: 100509 - DNA, 25 bp, Homo sapien
cgccgacgcgttcagaaggtgcgtc

SEQ ID NO: 100510 - DNA, 25 bp, Homo sapien
cgccgacgcgttgagaaggtgcgtc

SEQ ID NO: 100511 - DNA, 25 bp, Homo sapien
cacgggccgacctaaaggtcgacga

SEQ ID NO: 100512 - DNA, 25 bp, Homo sapien
cacgggccgaccaaaaggtcgacga

SEQ ID NO: 100513 - DNA, 25 bp, Homo sapien
ccggcaccgcgagaccaggaggtac

SEQ ID NO: 100514 - DNA, 25 bp, Homo sapien
ccggcaccgcgacaccaggaggtac

SEQ ID NO: 100515 - DNA, 25 bp, Homo sapien
acgggtgaccggtaaaacctcacac

SEQ ID NO: 100516 - DNA, 25 bp, Homo sapien
acgggtgaccggaaaaacctcacac

SEQ ID NO: 100517 - DNA, 25 bp, Homo sapien
agacggtgaaccttttaacctcgaa

SEQ ID NO: 100518 - DNA, 25 bp, Homo sapien
agacggtgaaccatttaacctcgaa

SEQ ID NO: 100519 - DNA, 25 bp, Homo sapien
atccgtgaaccctttaagtctaatg

SEQ ID NO: 100520 - DNA, 25 bp, Homo sapien
atccgtgaacccattaagtctaatg

SEQ ID NO: 100521 - DNA, 25 bp, Homo sapien
aacagggtacccattatgataacag

SEQ ID NO: 100522 - DNA, 25 bp, Homo sapien
aacagggtaccctttatgataacag

SEQ ID NO: 100523 - DNA, 25 bp, Homo sapien
aatgacctgaactgtcatattagaa

SEQ ID NO: 100524 - DNA, 25 bp, Homo sapien
aatgacctgaacagtcatattagaa

SEQ ID NO: 100525 - DNA, 25 bp, Homo sapien
agaaggcgaagaattatcctaagac

SEQ ID NO: 100526 - DNA, 25 bp, Homo sapien
agaaggcgaagatttatcctaagac

SEQ ID NO: 100527 - DNA, 25 bp, Homo sapien
cattgtcagtgttttaaccgtatga

SEQ ID NO: 100528 - DNA, 25 bp, Homo sapien
cattgtcagtgtattaaccgtatga

SEQ ID NO: 100529 - DNA, 25 bp, Homo sapien
ttcagttgtcgaaaaatcccgaaag

SEQ ID NO: 100530 - DNA, 25 bp, Homo sapien
ttcagttgtcgataaatcccgaaag

SEQ ID NO: 100531 - DNA, 25 bp, Homo sapien
tcgttgtttccaaaatgccgaaagt

SEQ ID NO: 100532 - DNA, 25 bp, Homo sapien
tcgttgtttccataatgccgaaagt

SEQ ID NO: 100533 - DNA, 25 bp, Homo sapien
gtccacacaccaaacgcgatatctg

SEQ ID NO: 100534 - DNA, 25 bp, Homo sapien
gtccacacaccatacgcgatatctg

SEQ ID NO: 100535 - DNA, 25 bp, Homo sapien
cgagtcctacctgttccgaatctcg

SEQ ID NO: 100536 - DNA, 25 bp, Homo sapien
cgagtcctacctcttccgaatctcg

SEQ ID NO: 100537 - DNA, 25 bp, Homo sapien
ggtatccctcgttcgtttacgttaa

SEQ ID NO: 100538 - DNA, 25 bp, Homo sapien
ggtatccctcgtacgtttacgttaa

SEQ ID NO: 100539 - DNA, 25 bp, Homo sapien
tctcaccgtctggtaatcaacgact

SEQ ID NO: 100540 - DNA, 25 bp, Homo sapien
tctcaccgtctgctaatcaacgact

SEQ ID NO: 100541 - DNA, 25 bp, Homo sapien
gtcaccattagtggtgacactgaca

SEQ ID NO: 100542 - DNA, 25 bp, Homo sapien
gtcaccattagtcgtgacactgaca

SEQ ID NO: 100543 - DNA, 25 bp, Homo sapien
gacagactttctaccggtatataat

SEQ ID NO: 100544 - DNA, 25 bp, Homo sapien
gacagactttcttccggtatataat

SEQ ID NO: 100545 - DNA, 25 bp, Homo sapien
gcgtggttcccgtgacagatataag

SEQ ID NO: 100546 - DNA, 25 bp, Homo sapien
gcgtggttcccgagacagatataag

SEQ ID NO: 100547 - DNA, 25 bp, Homo sapien
tgtcggtctcacttaacagagtcaa

SEQ ID NO: 100548 - DNA, 25 bp, Homo sapien
tgtcggtctcacataacagagtcaa

SEQ ID NO: 100549 - DNA, 25 bp, Homo sapien
tcttcggggcgtctactgcctcgac

SEQ ID NO: 100550 - DNA, 25 bp, Homo sapien
tcttcggggcgtgtactgcctcgac

SEQ ID NO: 100551 - DNA, 25 bp, Homo sapien
aaccgggggctcgagtcgaactgct

SEQ ID NO: 100552 - DNA, 25 bp, Homo sapien
aaccgggggctccagtcgaactgct

SEQ ID NO: 100553 - DNA, 25 bp, Homo sapien
accacagaagggacatctgcagagg

SEQ ID NO: 100554 - DNA, 25 bp, Homo sapien
accacagaagggtcatctgcagagg

SEQ ID NO: 100555 - DNA, 25 bp, Homo sapien
ccggaacccgggtaatttctagtaa

SEQ ID NO: 100556 - DNA, 25 bp, Homo sapien
ccggaacccgggaaatttctagtaa

SEQ ID NO: 100557 - DNA, 25 bp, Homo sapien
ggacagccactccaattgcgagaat

SEQ ID NO: 100558 - DNA, 25 bp, Homo sapien
ggacagccactcgaattgcgagaat

SEQ ID NO: 100559 - DNA, 25 bp, Homo sapien
gacatgaccgtccacccagggaact

SEQ ID NO: 100560 - DNA, 25 bp, Homo sapien
gacatgaccgtcgacccagggaact

SEQ ID NO: 100561 - DNA, 25 bp, Homo sapien
tcgggacctcgagtcctagggacct

SEQ ID NO: 100562 - DNA, 25 bp, Homo sapien
tcgggacctcgactcctagggacct

SEQ ID NO: 100563 - DNA, 25 bp, Homo sapien
gtcccgtactcttactaagtgtccg

SEQ ID NO: 100564 - DNA, 25 bp, Homo sapien
gtcccgtactctaactaagtgtccg

SEQ ID NO: 100565 - DNA, 25 bp, Homo sapien
gtccgtccagccagtaccggagaag

SEQ ID NO: 100566 - DNA, 25 bp, Homo sapien
gtccgtccagcctgtaccggagaag

SEQ ID NO: 100567 - DNA, 25 bp, Homo sapien
gtcctcagggtctgtcgtcttgtta

SEQ ID NO: 100568 - DNA, 25 bp, Homo sapien
gtcctcagggtcagtcgtcttgtta

SEQ ID NO: 100569 - DNA, 25 bp, Homo sapien
tacctttgtgtagtcgtgtgtgttc

SEQ ID NO: 100570 - DNA, 25 bp, Homo sapien
tacctttgtgtactcgtgtgtgttc

SEQ ID NO: 100571 - DNA, 25 bp, Homo sapien
catgtagttacagactctgtggttc

SEQ ID NO: 100572 - DNA, 25 bp, Homo sapien
catgtagttacacactctgtggttc

SEQ ID NO: 100573 - DNA, 25 bp, Homo sapien
cccttcgaggtttttcgttaagcct

SEQ ID NO: 100574 - DNA, 25 bp, Homo sapien
cccttcgaggttattcgttaagcct

SEQ ID NO: 100575 - DNA, 25 bp, Homo sapien
ccgcgaccgaggacccatcaaggtt

SEQ ID NO: 100576 - DNA, 25 bp, Homo sapien
ccgcgaccgaggtcccatcaaggtt

SEQ ID NO: 100577 - DNA, 25 bp, Homo sapien
gcgtcaaggtccacaggacgaaggt

SEQ ID NO: 100578 - DNA, 25 bp, Homo sapien
gcgtcaaggtcctcaggacgaaggt

SEQ ID NO: 100579 - DNA, 25 bp, Homo sapien
accatatgtcaggtcacaagaggta

SEQ ID NO: 100580 - DNA, 25 bp, Homo sapien
accatatgtcagctcacaagaggta

SEQ ID NO: 100581 - DNA, 25 bp, Homo sapien
tccaatgttttccaacaagtgtgta

SEQ ID NO: 100582 - DNA, 25 bp, Homo sapien
tccaatgttttcgaacaagtgtgta

SEQ ID NO: 100583 - DNA, 25 bp, Homo sapien
ttacctagggtgattaatactgtct

SEQ ID NO: 100584 - DNA, 25 bp, Homo sapien
ttacctagggtgtttaatactgtct

SEQ ID NO: 100585 - DNA, 25 bp, Homo sapien
ttaccacagaagtgtcgtatccctt

SEQ ID NO: 100586 - DNA, 25 bp, Homo sapien
ttaccacagaagagtcgtatccctt

SEQ ID NO: 100587 - DNA, 25 bp, Homo sapien
tccaaagaggactcgctccactcgt

SEQ ID NO: 100588 - DNA, 25 bp, Homo sapien
tccaaagaggacacgctccactcgt

SEQ ID NO: 100589 - DNA, 25 bp, Homo sapien
taggaagtaagacttattctaccgt

SEQ ID NO: 100590 - DNA, 25 bp, Homo sapien
taggaagtaagagttattctaccgt

SEQ ID NO: 100591 - DNA, 25 bp, Homo sapien
ctaggttagacaacagtttcttgtg

SEQ ID NO: 100592 - DNA, 25 bp, Homo sapien
ctaggttagacatcagtttcttgtg

SEQ ID NO: 100593 - DNA, 25 bp, Homo sapien
taggtactcgaattttgtcttactg

SEQ ID NO: 100594 - DNA, 25 bp, Homo sapien
taggtactcgaaatttgtcttactg

SEQ ID NO: 100595 - DNA, 25 bp, Homo sapien
ccgacccggaaggttctgctagctg

SEQ ID NO: 100596 - DNA, 25 bp, Homo sapien
ccgacccggaagcttctgctagctg

SEQ ID NO: 100597 - DNA, 25 bp, Homo sapien
acaccggggaattcagttgagacgt

SEQ ID NO: 100598 - DNA, 25 bp, Homo sapien
acaccggggaatacagttgagacgt

SEQ ID NO: 100599 - DNA, 25 bp, Homo sapien
gaccttatggaacctcgttatagat

SEQ ID NO: 100600 - DNA, 25 bp, Homo sapien
gaccttatggaagctcgttatagat

SEQ ID NO: 100601 - DNA, 25 bp, Homo sapien
aaacggtgtctggagagccgtttga

SEQ ID NO: 100602 - DNA, 25 bp, Homo sapien
aaacggtgtctgcagagccgtttga

SEQ ID NO: 100603 - DNA, 25 bp, Homo sapien
cgacgacggtttctgccaggataac

SEQ ID NO: 100604 - DNA, 25 bp, Homo sapien
cgacgacggtttgtgccaggataac

SEQ ID NO: 100605 - DNA, 25 bp, Homo sapien
cgccagtgctcctggtagaagagaa

SEQ ID NO: 100606 - DNA, 25 bp, Homo sapien
cgccagtgctccaggtagaagagaa

SEQ ID NO: 100607 - DNA, 25 bp, Homo sapien
accaaacgtatcagacgtgcaaatt

SEQ ID NO: 100608 - DNA, 25 bp, Homo sapien
accaaacgtatctgacgtgcaaatt

SEQ ID NO: 100609 - DNA, 25 bp, Homo sapien
ataacaccactcacggaagacatgt

SEQ ID NO: 100610 - DNA, 25 bp, Homo sapien
ataacaccactctcggaagacatgt

SEQ ID NO: 100611 - DNA, 25 bp, Homo sapien
agaactttcacttgaactaaggact

SEQ ID NO: 100612 - DNA, 25 bp, Homo sapien
agaactttcactagaactaaggact

SEQ ID NO: 100613 - DNA, 25 bp, Homo sapien
atgaaccccatcaacatacagaact

SEQ ID NO: 100614 - DNA, 25 bp, Homo sapien
atgaaccccatctacatacagaact

SEQ ID NO: 100615 - DNA, 25 bp, Homo sapien
aaggacatcctgaaaccactcctgg

SEQ ID NO: 100616 - DNA, 25 bp, Homo sapien
aaggacatcctgtaaccactcctgg

SEQ ID NO: 100617 - DNA, 25 bp, Homo sapien
tgtacttcctcgacgcccgcatggt

SEQ ID NO: 100618 - DNA, 25 bp, Homo sapien
tgtacttcctcgtcgcccgcatggt

SEQ ID NO: 100619 - DNA, 25 bp, Homo sapien
tggagcacgtcttgcatgcggagct

SEQ ID NO: 100620 - DNA, 25 bp, Homo sapien
tggagcacgtctagcatgcggagct

SEQ ID NO: 100621 - DNA, 25 bp, Homo sapien
tctcaggagtcgagcctggtcggac

SEQ ID NO: 100622 - DNA, 25 bp, Homo sapien
tctcaggagtcgtgcctggtcggac

SEQ ID NO: 100623 - DNA, 25 bp, Homo sapien
gtcatgtcagtcgttggaggaacag

SEQ ID NO: 100624 - DNA, 25 bp, Homo sapien
gtcatgtcagtccttggaggaacag

SEQ ID NO: 100625 - DNA, 25 bp, Homo sapien
gcactgtccgtccttggacgcttca

SEQ ID NO: 100626 - DNA, 25 bp, Homo sapien
gcactgtccgtcgttggacgcttca

SEQ ID NO: 100627 - DNA, 25 bp, Homo sapien
ttaaataacggtgacaaagtcctaa

SEQ ID NO: 100628 - DNA, 25 bp, Homo sapien
ttaaataacggtcacaaagtcctaa

SEQ ID NO: 100629 - DNA, 25 bp, Homo sapien
tgtacaattacctaacaatctcata

SEQ ID NO: 100630 - DNA, 25 bp, Homo sapien
tgtacaattaccaaacaatctcata

SEQ ID NO: 100631 - DNA, 25 bp, Homo sapien
caaattgatataaaacttcgacttt

SEQ ID NO: 100632 - DNA, 25 bp, Homo sapien
caaattgatatataacttcgacttt

SEQ ID NO: 100633 - DNA, 25 bp, Homo sapien
agcttagtacatctgtttcgagtcc

SEQ ID NO: 100634 - DNA, 25 bp, Homo sapien
agcttagtacatgtgtttcgagtcc

SEQ ID NO: 100635 - DNA, 25 bp, Homo sapien
gggaatttccgtctgatatggaact

SEQ ID NO: 100636 - DNA, 25 bp, Homo sapien
gggaatttccgtgtgatatggaact

SEQ ID NO: 100637 - DNA, 25 bp, Homo sapien
gaattctagacttacagctcttgaa

SEQ ID NO: 100638 - DNA, 25 bp, Homo sapien
gaattctagactaacagctcttgaa

SEQ ID NO: 100639 - DNA, 25 bp, Homo sapien
ggtttgtcaccttgtaatcttccga

SEQ ID NO: 100640 - DNA, 25 bp, Homo sapien
ggtttgtcacctagtaatcttccga

SEQ ID NO: 100641 - DNA, 25 bp, Homo sapien
gaggggtcccctctaatcacagcac

SEQ ID NO: 100642 - DNA, 25 bp, Homo sapien
gaggggtcccctgtaatcacagcac

SEQ ID NO: 100643 - DNA, 25 bp, Homo sapien
agggacctcctttaggttcctccgt

SEQ ID NO: 100644 - DNA, 25 bp, Homo sapien
agggacctccttaaggttcctccgt

SEQ ID NO: 100645 - DNA, 25 bp, Homo sapien
acggacacgtgtgagccctagacgg

SEQ ID NO: 100646 - DNA, 25 bp, Homo sapien
acggacacgtgtcagccctagacgg

SEQ ID NO: 100647 - DNA, 25 bp, Homo sapien
ggtgaggagtgacaccacactagaa

SEQ ID NO: 100648 - DNA, 25 bp, Homo sapien
ggtgaggagtgagaccacactagaa

SEQ ID NO: 100649 - DNA, 25 bp, Homo sapien
taaggaccgagacgtccgtatccac

SEQ ID NO: 100650 - DNA, 25 bp, Homo sapien
taaggaccgagaggtccgtatccac

SEQ ID NO: 100651 - DNA, 25 bp, Homo sapien
gaagtgcgtcatgagccggtcgcac

SEQ ID NO: 100652 - DNA, 25 bp, Homo sapien
gaagtgcgtcatcagccggtcgcac

SEQ ID NO: 100653 - DNA, 25 bp, Homo sapien
agggatctgagtctccgcggcgccc

SEQ ID NO: 100654 - DNA, 25 bp, Homo sapien
agggatctgagtgtccgcggcgccc

SEQ ID NO: 100655 - DNA, 25 bp, Homo sapien
ggagccggactgacgacgactgcca

SEQ ID NO: 100656 - DNA, 25 bp, Homo sapien
ggagccggactgtcgacgactgcca

SEQ ID NO: 100657 - DNA, 25 bp, Homo sapien
gacatcagtcaactctacggtctca

SEQ ID NO: 100658 - DNA, 25 bp, Homo sapien
gacatcagtcaagtctacggtctca

SEQ ID NO: 100659 - DNA, 25 bp, Homo sapien
aggcagtcacggacggtcaccccag

SEQ ID NO: 100660 - DNA, 25 bp, Homo sapien
aggcagtcacggtcggtcaccccag

SEQ ID NO: 100661 - DNA, 25 bp, Homo sapien
ggtaaggacccgacgcacgcgtcca

SEQ ID NO: 100662 - DNA, 25 bp, Homo sapien
ggtaaggacccgtcgcacgcgtcca

SEQ ID NO: 100663 - DNA, 25 bp, Homo sapien
ggaactcttccgtgcgacggccagt

SEQ ID NO: 100664 - DNA, 25 bp, Homo sapien
ggaactcttccgagcgacggccagt

SEQ ID NO: 100665 - DNA, 25 bp, Homo sapien
gggaaacgtcaaagggatgacccgt

SEQ ID NO: 100666 - DNA, 25 bp, Homo sapien
gggaaacgtcaatgggatgacccgt

SEQ ID NO: 100667 - DNA, 25 bp, Homo sapien
tatagagacctggagtggacgaacg

SEQ ID NO: 100668 - DNA, 25 bp, Homo sapien
tatagagacctgcagtggacgaacg

SEQ ID NO: 100669 - DNA, 25 bp, Homo sapien
gacgtcagtactaccggggtcgata

SEQ ID NO: 100670 - DNA, 25 bp, Homo sapien
gacgtcagtacttccggggtcgata

SEQ ID NO: 100671 - DNA, 25 bp, Homo sapien
ggccgactcatctcacttaatagaa

SEQ ID NO: 100672 - DNA, 25 bp, Homo sapien
ggccgactcatcacacttaatagaa

SEQ ID NO: 100673 - DNA, 25 bp, Homo sapien
gaccgacaacttacaagtttctgaa

SEQ ID NO: 100674 - DNA, 25 bp, Homo sapien
gaccgacaactttcaagtttctgaa

SEQ ID NO: 100675 - DNA, 25 bp, Homo sapien
aaaggagactttactgtccctaaca

SEQ ID NO: 100676 - DNA, 25 bp, Homo sapien
aaaggagacttttctgtccctaaca

SEQ ID NO: 100677 - DNA, 25 bp, Homo sapien
tacgagattattcgtccttctacag

SEQ ID NO: 100678 - DNA, 25 bp, Homo sapien
tacgagattattggtccttctacag

SEQ ID NO: 100679 - DNA, 25 bp, Homo sapien
tgcagaactgtggacgaggcttagt

SEQ ID NO: 100680 - DNA, 25 bp, Homo sapien
tgcagaactgtgcacgaggcttagt

SEQ ID NO: 100681 - DNA, 25 bp, Homo sapien
agttcaaagtcgaacagaggtctta

SEQ ID NO: 100682 - DNA, 25 bp, Homo sapien
agttcaaagtcgtacagaggtctta

SEQ ID NO: 100683 - DNA, 25 bp, Homo sapien
ggagcacgaaggatgtagtcacaca

SEQ ID NO: 100684 - DNA, 25 bp, Homo sapien
ggagcacgaaggttgtagtcacaca

SEQ ID NO: 100685 - DNA, 25 bp, Homo sapien
tcgtccacagtgtggagtcgtactg

SEQ ID NO: 100686 - DNA, 25 bp, Homo sapien
tcgtccacagtgaggagtcgtactg

SEQ ID NO: 100687 - DNA, 25 bp, Homo sapien
tcgagtggtcgagtgacgagacctt

SEQ ID NO: 100688 - DNA, 25 bp, Homo sapien
tcgagtggtcgactgacgagacctt

SEQ ID NO: 100689 - DNA, 25 bp, Homo sapien
actgctggggactttaccagtctta

SEQ ID NO: 100690 - DNA, 25 bp, Homo sapien
actgctggggacattaccagtctta

SEQ ID NO: 100691 - DNA, 25 bp, Homo sapien
ctctgcggtcccaaggctctcgtgg

SEQ ID NO: 100692 - DNA, 25 bp, Homo sapien
ctctgcggtccctaggctctcgtgg

SEQ ID NO: 100693 - DNA, 25 bp, Homo sapien
ttgtttgtcttcatggctcttacgg

SEQ ID NO: 100694 - DNA, 25 bp, Homo sapien
ttgtttgtcttcttggctcttacgg

SEQ ID NO: 100695 - DNA, 25 bp, Homo sapien
gatggttggtcttcccggacccccg

SEQ ID NO: 100696 - DNA, 25 bp, Homo sapien
gatggttggtctacccggacccccg

SEQ ID NO: 100697 - DNA, 25 bp, Homo sapien
gaagttaagaagagcaaactccttt

SEQ ID NO: 100698 - DNA, 25 bp, Homo sapien
gaagttaagaagtgcaaactccttt

SEQ ID NO: 100699 - DNA, 25 bp, Homo sapien
cacaagtgacccacgtctctggtac

SEQ ID NO: 100700 - DNA, 25 bp, Homo sapien
cacaagtgaccctcgtctctggtac

SEQ ID NO: 100701 - DNA, 25 bp, Homo sapien
ttcacggaagagatgtggacgccac

SEQ ID NO: 100702 - DNA, 25 bp, Homo sapien
ttcacggaagagttgtggacgccac

SEQ ID NO: 100703 - DNA, 25 bp, Homo sapien
agtcccaatttctatagagtgcatg

SEQ ID NO: 100704 - DNA, 25 bp, Homo sapien
agtcccaatttcaatagagtgcatg

SEQ ID NO: 100705 - DNA, 25 bp, Homo sapien
tcggttctgacaccaggtgcccgga

SEQ ID NO: 100706 - DNA, 25 bp, Homo sapien
tcggttctgacagcaggtgcccgga

SEQ ID NO: 100707 - DNA, 25 bp, Homo sapien
ttagtctgtctggtccgcgcgcggt

SEQ ID NO: 100708 - DNA, 25 bp, Homo sapien
ttagtctgtctgctccgcgcgcggt

SEQ ID NO: 100709 - DNA, 25 bp, Homo sapien
tacgtaacggttcctccgggtcggt

SEQ ID NO: 100710 - DNA, 25 bp, Homo sapien
tacgtaacggttgctccgggtcggt

SEQ ID NO: 100711 - DNA, 25 bp, Homo sapien
cgtacaagtgtattcgtacccccga

SEQ ID NO: 100712 - DNA, 25 bp, Homo sapien
cgtacaagtgtaatcgtacccccga

SEQ ID NO: 100713 - DNA, 25 bp, Homo sapien
ttgggacgcgtctcgtacggcccct

SEQ ID NO: 100714 - DNA, 25 bp, Homo sapien
ttgggacgcgtcacgtacggcccct

SEQ ID NO: 100715 - DNA, 25 bp, Homo sapien
acttcctagaaatggaaccttcgga

SEQ ID NO: 100716 - DNA, 25 bp, Homo sapien
acttcctagaaaaggaaccttcgga

SEQ ID NO: 100717 - DNA, 25 bp, Homo sapien
ttcatgtaaagacgaagtaactcca

SEQ ID NO: 100718 - DNA, 25 bp, Homo sapien
ttcatgtaaagaggaagtaactcca

SEQ ID NO: 100719 - DNA, 25 bp, Homo sapien
ttatgtttgtgaatccatctttccg

SEQ ID NO: 100720 - DNA, 25 bp, Homo sapien
ttatgtttgtgattccatctttccg

SEQ ID NO: 100721 - DNA, 25 bp, Homo sapien
ggaagggtggaccaaccactgttta

SEQ ID NO: 100722 - DNA, 25 bp, Homo sapien
ggaagggtggacgaaccactgttta

SEQ ID NO: 100723 - DNA, 25 bp, Homo sapien
agaaggggtccaggtgaccttttcg

SEQ ID NO: 100724 - DNA, 25 bp, Homo sapien
agaaggggtccacgtgaccttttcg

SEQ ID NO: 100725 - DNA, 25 bp, Homo sapien
gacaaccgggaaattgtccactttg

SEQ ID NO: 100726 - DNA, 25 bp, Homo sapien
gacaaccgggaatttgtccactttg

SEQ ID NO: 100727 - DNA, 25 bp, Homo sapien
cggtatgtgtacttcgtttcgttgt

SEQ ID NO: 100728 - DNA, 25 bp, Homo sapien
cggtatgtgtacatcgtttcgttgt

SEQ ID NO: 100729 - DNA, 25 bp, Homo sapien
acggtagatgttatcgttactgttt

SEQ ID NO: 100730 - DNA, 25 bp, Homo sapien
acggtagatgttttcgttactgttt

SEQ ID NO: 100731 - DNA, 25 bp, Homo sapien
gtagtgggtcataatgttacctgac

SEQ ID NO: 100732 - DNA, 25 bp, Homo sapien
gtagtgggtcattatgttacctgac

SEQ ID NO: 100733 - DNA, 25 bp, Homo sapien
ctgaccaactcctttgtgacgaact

SEQ ID NO: 100734 - DNA, 25 bp, Homo sapien
ctgaccaactccattgtgacgaact

SEQ ID NO: 100735 - DNA, 25 bp, Homo sapien
aacttgtccctccagagacatggat

SEQ ID NO: 100736 - DNA, 25 bp, Homo sapien
aacttgtccctcgagagacatggat

SEQ ID NO: 100737 - DNA, 25 bp, Homo sapien
gaactcctccagagaccagtataga

SEQ ID NO: 100738 - DNA, 25 bp, Homo sapien
gaactcctccagtgaccagtataga

SEQ ID NO: 100739 - DNA, 25 bp, Homo sapien
cgactcccgacttcaacagtgagac

SEQ ID NO: 100740 - DNA, 25 bp, Homo sapien
cgactcccgactacaacagtgagac

SEQ ID NO: 100741 - DNA, 25 bp, Homo sapien
ctcggggacgaacaaccgacgaggt

SEQ ID NO: 100742 - DNA, 25 bp, Homo sapien
ctcggggacgaagaaccgacgaggt

SEQ ID NO: 100743 - DNA, 25 bp, Homo sapien
ctctcgcggggaagacctcctcgga

SEQ ID NO: 100744 - DNA, 25 bp, Homo sapien
ctctcgcggggatgacctcctcgga

SEQ ID NO: 100745 - DNA, 25 bp, Homo sapien
tgttccggagagtgacccatcgaga

SEQ ID NO: 100746 - DNA, 25 bp, Homo sapien
tgttccggagagagacccatcgaga

SEQ ID NO: 100747 - DNA, 25 bp, Homo sapien
gttctcctgggttaccttgtcgagg

SEQ ID NO: 100748 - DNA, 25 bp, Homo sapien
gttctcctgggtaaccttgtcgagg

SEQ ID NO: 100749 - DNA, 25 bp, Homo sapien
cttagactgagtttcgtttcgtaaa

SEQ ID NO: 100750 - DNA, 25 bp, Homo sapien
cttagactgagtatcgtttcgtaaa

SEQ ID NO: 100751 - DNA, 25 bp, Homo sapien
gaagtctcggttttctattacagat

SEQ ID NO: 100752 - DNA, 25 bp, Homo sapien
gaagtctcggttatctattacagat

SEQ ID NO: 100753 - DNA, 25 bp, Homo sapien
actggtcgcggtgtgtacttgtgaa

SEQ ID NO: 100754 - DNA, 25 bp, Homo sapien
actggtcgcggtctgtacttgtgaa

SEQ ID NO: 100755 - DNA, 25 bp, Homo sapien
gacttgtccgtcttttacatctgaa

SEQ ID NO: 100756 - DNA, 25 bp, Homo sapien
gacttgtccgtcatttacatctgaa

SEQ ID NO: 100757 - DNA, 25 bp, Homo sapien
gtcgttgttggttcgtccattgtaa

SEQ ID NO: 100758 - DNA, 25 bp, Homo sapien
gtcgttgttggtacgtccattgtaa

SEQ ID NO: 100759 - DNA, 25 bp, Homo sapien
gtcacttttgttagtcatatctggt

SEQ ID NO: 100760 - DNA, 25 bp, Homo sapien
gtcacttttgtttgtcatatctggt

SEQ ID NO: 100761 - DNA, 25 bp, Homo sapien
gtttctagtgtcgactctttatgac

SEQ ID NO: 100762 - DNA, 25 bp, Homo sapien
gtttctagtgtccactctttatgac

SEQ ID NO: 100763 - DNA, 25 bp, Homo sapien
acagaggagagagatcatcataacc

SEQ ID NO: 100764 - DNA, 25 bp, Homo sapien
acagaggagagacatcatcataacc

SEQ ID NO: 100765 - DNA, 25 bp, Homo sapien
gaaagaaggaagacgtcatcatttc

SEQ ID NO: 100766 - DNA, 25 bp, Homo sapien
gaaagaaggaagtcgtcatcatttc

SEQ ID NO: 100767 - DNA, 25 bp, Homo sapien
tcactgatagagaccgatcatctta

SEQ ID NO: 100768 - DNA, 25 bp, Homo sapien
tcactgatagagtccgatcatctta

SEQ ID NO: 100769 - DNA, 25 bp, Homo sapien
gtaacgtactgttacctgtgattca

SEQ ID NO: 100770 - DNA, 25 bp, Homo sapien
gtaacgtactgtaacctgtgattca

SEQ ID NO: 100771 - DNA, 25 bp, Homo sapien
cggttttaggtacacaggactgtcc

SEQ ID NO: 100772 - DNA, 25 bp, Homo sapien
cggttttaggtagacaggactgtcc

SEQ ID NO: 100773 - DNA, 25 bp, Homo sapien
attgagtcgtgtaaacatcacatgg

SEQ ID NO: 100774 - DNA, 25 bp, Homo sapien
attgagtcgtgttaacatcacatgg

SEQ ID NO: 100775 - DNA, 25 bp, Homo sapien
gttgacgtcgttcgtgaacagatgg

SEQ ID NO: 100776 - DNA, 25 bp, Homo sapien
gttgacgtcgttggtgaacagatgg

SEQ ID NO: 100777 - DNA, 25 bp, Homo sapien
cttcgtgtcctgtggacacgccgac

SEQ ID NO: 100778 - DNA, 25 bp, Homo sapien
cttcgtgtcctgaggacacgccgac

SEQ ID NO: 100779 - DNA, 25 bp, Homo sapien
ttacttgaccggtgagcacgaccct

SEQ ID NO: 100780 - DNA, 25 bp, Homo sapien
ttacttgaccggagagcacgaccct

SEQ ID NO: 100781 - DNA, 25 bp, Homo sapien
acaacgtcgacgacgggcggcacac

SEQ ID NO: 100782 - DNA, 25 bp, Homo sapien
acaacgtcgacgtcgggcggcacac

SEQ ID NO: 100783 - DNA, 25 bp, Homo sapien
ccgacgataaagctttgcgcacaat

SEQ ID NO: 100784 - DNA, 25 bp, Homo sapien
ccgacgataaaggtttgcgcacaat

SEQ ID NO: 100785 - DNA, 25 bp, Homo sapien
aagactcccgattcgacgggtatca

SEQ ID NO: 100786 - DNA, 25 bp, Homo sapien
aagactcccgatacgacgggtatca

SEQ ID NO: 100787 - DNA, 25 bp, Homo sapien
agaaactgacgatgtccagaggaaa

SEQ ID NO: 100788 - DNA, 25 bp, Homo sapien
agaaactgacgaagtccagaggaaa

SEQ ID NO: 100789 - DNA, 25 bp, Homo sapien
ggaggtacaaactctacaaggatta

SEQ ID NO: 100790 - DNA, 25 bp, Homo sapien
ggaggtacaaacactacaaggatta

SEQ ID NO: 100791 - DNA, 25 bp, Homo sapien
gacccaatactttcgacacggatcc

SEQ ID NO: 100792 - DNA, 25 bp, Homo sapien
gacccaatacttacgacacggatcc

SEQ ID NO: 100793 - DNA, 25 bp, Homo sapien
gtccttcctatagaacccgagtacc

SEQ ID NO: 100794 - DNA, 25 bp, Homo sapien
gtccttcctatacaacccgagtacc

SEQ ID NO: 100795 - DNA, 25 bp, Homo sapien
gctccagacgcgaacgcacgaaggt

SEQ ID NO: 100796 - DNA, 25 bp, Homo sapien
gctccagacgcgtacgcacgaaggt

SEQ ID NO: 100797 - DNA, 25 bp, Homo sapien
gcgttcagcgagaaccactacggtg

SEQ ID NO: 100798 - DNA, 25 bp, Homo sapien
gcgttcagcgagtaccactacggtg

SEQ ID NO: 100799 - DNA, 25 bp, Homo sapien
aaaattagcacgtacacacgaatgt

SEQ ID NO: 100800 - DNA, 25 bp, Homo sapien
aaaattagcacgaacacacgaatgt

SEQ ID NO: 100801 - DNA, 25 bp, Homo sapien
gataaaattcagatctacagagaca

SEQ ID NO: 100802 - DNA, 25 bp, Homo sapien
gataaaattcagttctacagagaca

SEQ ID NO: 100803 - DNA, 25 bp, Homo sapien
gaaaacgcggaagacgtcctcgcta

SEQ ID NO: 100804 - DNA, 25 bp, Homo sapien
gaaaacgcggaacacgtcctcgcta

SEQ ID NO: 100805 - DNA, 25 bp, Homo sapien
aaacacggaatctttcccgtagact

SEQ ID NO: 100806 - DNA, 25 bp, Homo sapien
aaacacggaatcattcccgtagact

SEQ ID NO: 100807 - DNA, 25 bp, Homo sapien
caaattcttatcgttttgtcgtcgt

SEQ ID NO: 100808 - DNA, 25 bp, Homo sapien
caaattcttatccttttgtcgtcgt

SEQ ID NO: 100809 - DNA, 25 bp, Homo sapien
gacatgacgtcgtcttcgttgggtc

SEQ ID NO: 100810 - DNA, 25 bp, Homo sapien
gacatgacgtcgacttcgttgggtc

SEQ ID NO: 100811 - DNA, 25 bp, Homo sapien
atttacagtgacaatctcggtagtt

SEQ ID NO: 100812 - DNA, 25 bp, Homo sapien
atttacagtgactatctcggtagtt

SEQ ID NO: 100813 - DNA, 25 bp, Homo sapien
cggaccctacggatgaggtggctct

SEQ ID NO: 100814 - DNA, 25 bp, Homo sapien
cggaccctacggttgaggtggctct

SEQ ID NO: 100815 - DNA, 25 bp, Homo sapien
gtgaccgttactttcacgataaccc

SEQ ID NO: 100816 - DNA, 25 bp, Homo sapien
gtgaccgttactatcacgataaccc

SEQ ID NO: 100817 - DNA, 25 bp, Homo sapien
tacaacgactgattgggacaaatct

SEQ ID NO: 100818 - DNA, 25 bp, Homo sapien
tacaacgactgaatgggacaaatct

SEQ ID NO: 100819 - DNA, 25 bp, Homo sapien
catagaacgacctgcaaacaagtag

SEQ ID NO: 100820 - DNA, 25 bp, Homo sapien
catagaacgaccagcaaacaagtag

SEQ ID NO: 100821 - DNA, 25 bp, Homo sapien
tccagaggtccacaacgtcaacgac

SEQ ID NO: 100822 - DNA, 25 bp, Homo sapien
tccagaggtccagaacgtcaacgac

SEQ ID NO: 100823 - DNA, 25 bp, Homo sapien
ttaaggggtcgaaagtgtcaactac

SEQ ID NO: 100824 - DNA, 25 bp, Homo sapien
ttaaggggtcgatagtgtcaactac

SEQ ID NO: 100825 - DNA, 25 bp, Homo sapien
caaggtcgctaccttaggacgaaag

SEQ ID NO: 100826 - DNA, 25 bp, Homo sapien
caaggtcgctacgttaggacgaaag

SEQ ID NO: 100827 - DNA, 25 bp, Homo sapien
gtcatgatgttctttcgtaccaaat

SEQ ID NO: 100828 - DNA, 25 bp, Homo sapien
gtcatgatgttcattcgtaccaaat

SEQ ID NO: 100829 - DNA, 25 bp, Homo sapien
cgggtttattatgatcaactcctta

SEQ ID NO: 100830 - DNA, 25 bp, Homo sapien
cgggtttattatcatcaactcctta

SEQ ID NO: 100831 - DNA, 25 bp, Homo sapien
tggtgcaatgtctcctacatcgact

SEQ ID NO: 100832 - DNA, 25 bp, Homo sapien
tggtgcaatgtcacctacatcgact

SEQ ID NO: 100833 - DNA, 25 bp, Homo sapien
gtggtggtatttaaacccttcgtgt

SEQ ID NO: 100834 - DNA, 25 bp, Homo sapien
gtggtggtattttaacccttcgtgt

SEQ ID NO: 100835 - DNA, 25 bp, Homo sapien
gtgtactgattcactccgtttctat

SEQ ID NO: 100836 - DNA, 25 bp, Homo sapien
gtgtactgattctctccgtttctat

SEQ ID NO: 100837 - DNA, 25 bp, Homo sapien
atctaaggtgttcgttgtcacgtca

SEQ ID NO: 100838 - DNA, 25 bp, Homo sapien
atctaaggtgttggttgtcacgtca

SEQ ID NO: 100839 - DNA, 25 bp, Homo sapien
tcttgtggtgtcttagtaccgtcga

SEQ ID NO: 100840 - DNA, 25 bp, Homo sapien
tcttgtggtgtcatagtaccgtcga

SEQ ID NO: 100841 - DNA, 25 bp, Homo sapien
cgtggagccgtaagtactacacgaa

SEQ ID NO: 100842 - DNA, 25 bp, Homo sapien
cgtggagccgtatgtactacacgaa

SEQ ID NO: 100843 - DNA, 25 bp, Homo sapien
cacctgagattgtgtctaagtgagt

SEQ ID NO: 100844 - DNA, 25 bp, Homo sapien
cacctgagattgagtctaagtgagt

SEQ ID NO: 100845 - DNA, 25 bp, Homo sapien
accaatgtcatcgactattgttgtg

SEQ ID NO: 100846 - DNA, 25 bp, Homo sapien
accaatgtcatccactattgttgtg

SEQ ID NO: 100847 - DNA, 25 bp, Homo sapien
gcaaaagatgagaccaacactttta

SEQ ID NO: 100848 - DNA, 25 bp, Homo sapien
gcaaaagatgagtccaacactttta

SEQ ID NO: 100849 - DNA, 25 bp, Homo sapien
ggtttatcaagtgatcgagtcacta

SEQ ID NO: 100850 - DNA, 25 bp, Homo sapien
ggtttatcaagtcatcgagtcacta

SEQ ID NO: 100851 - DNA, 25 bp, Homo sapien
gactactttgtactgttcacttgcg

SEQ ID NO: 100852 - DNA, 25 bp, Homo sapien
gactactttgtagtgttcacttgcg

SEQ ID NO: 100853 - DNA, 25 bp, Homo sapien
gactgtacttgtgtactgtccttgg

SEQ ID NO: 100854 - DNA, 25 bp, Homo sapien
gactgtacttgtctactgtccttgg

SEQ ID NO: 100855 - DNA, 25 bp, Homo sapien
ttctgtagggactgcgacgcgagtc

SEQ ID NO: 100856 - DNA, 25 bp, Homo sapien
ttctgtagggacagcgacgcgagtc

SEQ ID NO: 100857 - DNA, 25 bp, Homo sapien
taattacgttcgataggtgtcgatc

SEQ ID NO: 100858 - DNA, 25 bp, Homo sapien
taattacgttcgttaggtgtcgatc

SEQ ID NO: 100859 - DNA, 25 bp, Homo sapien
tacccggggtgacaccgagtccgac

SEQ ID NO: 100860 - DNA, 25 bp, Homo sapien
tacccggggtgagaccgagtccgac

SEQ ID NO: 100861 - DNA, 25 bp, Homo sapien
acctgggagtcgtctcaactccgcg

SEQ ID NO: 100862 - DNA, 25 bp, Homo sapien
acctgggagtcgactcaactccgcg

SEQ ID NO: 100863 - DNA, 25 bp, Homo sapien
tcggaactcgtagactatactatgg

SEQ ID NO: 100864 - DNA, 25 bp, Homo sapien
tcggaactcgtacactatactatgg

SEQ ID NO: 100865 - DNA, 25 bp, Homo sapien
ttcgtacacttacatactacagtgg

SEQ ID NO: 100866 - DNA, 25 bp, Homo sapien
ttcgtacacttagatactacagtgg

SEQ ID NO: 100867 - DNA, 25 bp, Homo sapien
cgttataggtcttcgcagtagaagg

SEQ ID NO: 100868 - DNA, 25 bp, Homo sapien
cgttataggtctacgcagtagaagg

SEQ ID NO: 100869 - DNA, 25 bp, Homo sapien
gacctttcggttacggactggtccg

SEQ ID NO: 100870 - DNA, 25 bp, Homo sapien
gacctttcggtttcggactggtccg

SEQ ID NO: 100871 - DNA, 25 bp, Homo sapien
tttccttcaggcatggtagactgaa

SEQ ID NO: 100872 - DNA, 25 bp, Homo sapien
tttccttcaggcttggtagactgaa

SEQ ID NO: 100873 - DNA, 25 bp, Homo sapien
tatctccctcttctttcttttacta

SEQ ID NO: 100874 - DNA, 25 bp, Homo sapien
tatctccctcttgtttcttttacta

SEQ ID NO: 100875 - DNA, 25 bp, Homo sapien
attaaagtgtttggtttaatatatt

SEQ ID NO: 100876 - DNA, 25 bp, Homo sapien
attaaagtgtttcgtttaatatatt

SEQ ID NO: 100877 - DNA, 25 bp, Homo sapien
ttaccgatgtttagagtttctaaac

SEQ ID NO: 100878 - DNA, 25 bp, Homo sapien
ttaccgatgttttgagtttctaaac

SEQ ID NO: 100879 - DNA, 25 bp, Homo sapien
actctatgtctctgggtctataacc

SEQ ID NO: 100880 - DNA, 25 bp, Homo sapien
actctatgtctcagggtctataacc

SEQ ID NO: 100881 - DNA, 25 bp, Homo sapien
ttctggtctgcagtagtccttacag

SEQ ID NO: 100882 - DNA, 25 bp, Homo sapien
ttctggtctgcactagtccttacag

SEQ ID NO: 100883 - DNA, 25 bp, Homo sapien
ccaagagttccactagtctcctgac

SEQ ID NO: 100884 - DNA, 25 bp, Homo sapien
ccaagagttccagtagtctcctgac

SEQ ID NO: 100885 - DNA, 25 bp, Homo sapien
ccctagagacaaagacactccggac

SEQ ID NO: 100886 - DNA, 25 bp, Homo sapien
ccctagagacaatgacactccggac

SEQ ID NO: 100887 - DNA, 25 bp, Homo sapien
cgtcggggtaccaagttgtcctcga

SEQ ID NO: 100888 - DNA, 25 bp, Homo sapien
cgtcggggtacctagttgtcctcga

SEQ ID NO: 100889 - DNA, 25 bp, Homo sapien
taccatgcgtgacttaccctttcag

SEQ ID NO: 100890 - DNA, 25 bp, Homo sapien
taccatgcgtgagttaccctttcag

SEQ ID NO: 100891 - DNA, 25 bp, Homo sapien
actcaaggagagagaccagaggcta

SEQ ID NO: 100892 - DNA, 25 bp, Homo sapien
actcaaggagagtgaccagaggcta

SEQ ID NO: 100893 - DNA, 25 bp, Homo sapien
gtcgaggaatcctgaccgggacctc

SEQ ID NO: 100894 - DNA, 25 bp, Homo sapien
gtcgaggaatccagaccgggacctc

SEQ ID NO: 100895 - DNA, 25 bp, Homo sapien
cgttaaaagacaactgtcttagtgg

SEQ ID NO: 100896 - DNA, 25 bp, Homo sapien
cgttaaaagacatctgtcttagtgg

SEQ ID NO: 100897 - DNA, 25 bp, Homo sapien
tgtgaaattctacctgtataacaag

SEQ ID NO: 100898 - DNA, 25 bp, Homo sapien
tgtgaaattctagctgtataacaag

SEQ ID NO: 100899 - DNA, 25 bp, Homo sapien
aatgaaaagtttccacgatcaagac

SEQ ID NO: 100900 - DNA, 25 bp, Homo sapien
aatgaaaagtttgcacgatcaagac

SEQ ID NO: 100901 - DNA, 25 bp, Homo sapien
catggaactagtcatccagggagaa

SEQ ID NO: 100902 - DNA, 25 bp, Homo sapien
catggaactagtgatccagggagaa

SEQ ID NO: 100903 - DNA, 25 bp, Homo sapien
aaggggtcacggtccctcaggaact

SEQ ID NO: 100904 - DNA, 25 bp, Homo sapien
aaggggtcacggaccctcaggaact

SEQ ID NO: 100905 - DNA, 25 bp, Homo sapien
atcgggcgacgaacggccattcccg

SEQ ID NO: 100906 - DNA, 25 bp, Homo sapien
atcgggcgacgatcggccattcccg

SEQ ID NO: 100907 - DNA, 25 bp, Homo sapien
aaaaaggtcatctgccggttcctcg

SEQ ID NO: 100908 - DNA, 25 bp, Homo sapien
aaaaaggtcatcagccggttcctcg

SEQ ID NO: 100909 - DNA, 25 bp, Homo sapien
cagaggttaacgaggactccttcct

SEQ ID NO: 100910 - DNA, 25 bp, Homo sapien
cagaggttaacgtggactccttcct

SEQ ID NO: 100911 - DNA, 25 bp, Homo sapien
agagtcccttaaggataacacacag

SEQ ID NO: 100912 - DNA, 25 bp, Homo sapien
agagtcccttaacgataacacacag

SEQ ID NO: 100913 - DNA, 25 bp, Homo sapien
agaggtctcctcactaaaagagtca

SEQ ID NO: 100914 - DNA, 25 bp, Homo sapien
agaggtctcctctctaaaagagtca

SEQ ID NO: 100915 - DNA, 25 bp, Homo sapien
agacaacgaccatgacaattatgaa

SEQ ID NO: 100916 - DNA, 25 bp, Homo sapien
agacaacgaccaagacaattatgaa

SEQ ID NO: 100917 - DNA, 25 bp, Homo sapien
gaaaaacacgcaaagaatttttcgt

SEQ ID NO: 100918 - DNA, 25 bp, Homo sapien
gaaaaacacgcatagaatttttcgt

SEQ ID NO: 100919 - DNA, 25 bp, Homo sapien
gaggaagaaccgtcggaaccctttg

SEQ ID NO: 100920 - DNA, 25 bp, Homo sapien
gaggaagaaccgacggaaccctttg

SEQ ID NO: 100921 - DNA, 25 bp, Homo sapien
ggaggacctacacagaaaccggttg

SEQ ID NO: 100922 - DNA, 25 bp, Homo sapien
ggaggacctacagagaaaccggttg

SEQ ID NO: 100923 - DNA, 25 bp, Homo sapien
cggaaacccctactgagccggtaga

SEQ ID NO: 100924 - DNA, 25 bp, Homo sapien
cggaaacccctagtgagccggtaga

SEQ ID NO: 100925 - DNA, 25 bp, Homo sapien
aacgtatacctcagcgggtccgggg

SEQ ID NO: 100926 - DNA, 25 bp, Homo sapien
aacgtatacctctgcgggtccgggg

SEQ ID NO: 100927 - DNA, 25 bp, Homo sapien
ggtgtccgtccctcgggtcctaaac

SEQ ID NO: 100928 - DNA, 25 bp, Homo sapien
ggtgtccgtcccacgggtcctaaac

SEQ ID NO: 100929 - DNA, 25 bp, Homo sapien
gtcctccgtcactcggggctactgg

SEQ ID NO: 100930 - DNA, 25 bp, Homo sapien
gtcctccgtcacacggggctactgg

SEQ ID NO: 100931 - DNA, 25 bp, Homo sapien
cccagtaagtctcacaagagtttag

SEQ ID NO: 100932 - DNA, 25 bp, Homo sapien
cccagtaagtctgacaagagtttag

SEQ ID NO: 100933 - DNA, 25 bp, Homo sapien
tagtttagtcgaatactacgtctaa

SEQ ID NO: 100934 - DNA, 25 bp, Homo sapien
tagtttagtcgattactacgtctaa

SEQ ID NO: 100935 - DNA, 25 bp, Homo sapien
gaaccacaggtcgtcgtacctcaac

SEQ ID NO: 100936 - DNA, 25 bp, Homo sapien
gaaccacaggtcctcgtacctcaac

SEQ ID NO: 100937 - DNA, 25 bp, Homo sapien
tcaggtgtgtcaaattcctttataa

SEQ ID NO: 100938 - DNA, 25 bp, Homo sapien
tcaggtgtgtcatattcctttataa

SEQ ID NO: 100939 - DNA, 25 bp, Homo sapien
gaggacgtctgttggggctctcaca

SEQ ID NO: 100940 - DNA, 25 bp, Homo sapien
gaggacgtctgtaggggctctcaca

SEQ ID NO: 100941 - DNA, 25 bp, Homo sapien
gagtaatgtgttgagccggaagacc

SEQ ID NO: 100942 - DNA, 25 bp, Homo sapien
gagtaatgtgttcagccggaagacc

SEQ ID NO: 100943 - DNA, 25 bp, Homo sapien
gagacgatttatcaatacaaacaga

SEQ ID NO: 100944 - DNA, 25 bp, Homo sapien
gagacgatttatgaatacaaacaga

SEQ ID NO: 100945 - DNA, 25 bp, Homo sapien
ttgaaagtcgacacgcacaatctcc

SEQ ID NO: 100946 - DNA, 25 bp, Homo sapien
ttgaaagtcgactcgcacaatctcc

SEQ ID NO: 100947 - DNA, 25 bp, Homo sapien
ggaaagtcagacagtagtcaaaacc

SEQ ID NO: 100948 - DNA, 25 bp, Homo sapien
ggaaagtcagactgtagtcaaaacc

SEQ ID NO: 100949 - DNA, 25 bp, Homo sapien
gtgtcaagacggactaactaacccc

SEQ ID NO: 100950 - DNA, 25 bp, Homo sapien
gtgtcaagacggtctaactaacccc

SEQ ID NO: 100951 - DNA, 25 bp, Homo sapien
ttaacagaagataagacagacccta

SEQ ID NO: 100952 - DNA, 25 bp, Homo sapien
ttaacagaagattagacagacccta

SEQ ID NO: 100953 - DNA, 25 bp, Homo sapien
cttcacgaagggtaagacgtgctaa

SEQ ID NO: 100954 - DNA, 25 bp, Homo sapien
cttcacgaagggaaagacgtgctaa

SEQ ID NO: 100955 - DNA, 25 bp, Homo sapien
gtccgacaagggagacgtagaccaa

SEQ ID NO: 100956 - DNA, 25 bp, Homo sapien
gtccgacaagggtgacgtagaccaa

SEQ ID NO: 100957 - DNA, 25 bp, Homo sapien
ggctgaaggccgtccgagacctccg

SEQ ID NO: 100958 - DNA, 25 bp, Homo sapien
ggctgaaggccgaccgagacctccg

SEQ ID NO: 100959 - DNA, 25 bp, Homo sapien
gggccgacggtccggccgggactcc

SEQ ID NO: 100960 - DNA, 25 bp, Homo sapien
gggccgacggtcgggccgggactcc

SEQ ID NO: 100961 - DNA, 25 bp, Homo sapien
ggaggtacgacctgacgtctgccgc

SEQ ID NO: 100962 - DNA, 25 bp, Homo sapien
ggaggtacgaccagacgtctgccgc

SEQ ID NO: 100963 - DNA, 25 bp, Homo sapien
tggtggaagaaagacactcgtcaag

SEQ ID NO: 100964 - DNA, 25 bp, Homo sapien
tggtggaagaaacacactcgtcaag

SEQ ID NO: 100965 - DNA, 25 bp, Homo sapien
ccggagccagacaccgaatcttgag

SEQ ID NO: 100966 - DNA, 25 bp, Homo sapien
ccggagccagactccgaatcttgag

SEQ ID NO: 100967 - DNA, 25 bp, Homo sapien
gtcctgaggccctttcttccatgat

SEQ ID NO: 100968 - DNA, 25 bp, Homo sapien
gtcctgaggcccattcttccatgat

SEQ ID NO: 100969 - DNA, 25 bp, Homo sapien
agaggacaccggacctaggtgatct

SEQ ID NO: 100970 - DNA, 25 bp, Homo sapien
agaggacaccggtcctaggtgatct

SEQ ID NO: 100971 - DNA, 25 bp, Homo sapien
aaaggtagagtcctgatcagagacc

SEQ ID NO: 100972 - DNA, 25 bp, Homo sapien
aaaggtagagtcgtgatcagagacc

SEQ ID NO: 100973 - DNA, 25 bp, Homo sapien
gacaggaggtcctggctaaggtacc

SEQ ID NO: 100974 - DNA, 25 bp, Homo sapien
gacaggaggtccaggctaaggtacc

SEQ ID NO: 100975 - DNA, 25 bp, Homo sapien
accgtgtggcatagtccgacgcgcc

SEQ ID NO: 100976 - DNA, 25 bp, Homo sapien
accgtgtggcattgtccgacgcgcc

SEQ ID NO: 100977 - DNA, 25 bp, Homo sapien
cgtttgcgcatgtccgtgacgtcct

SEQ ID NO: 100978 - DNA, 25 bp, Homo sapien
cgtttgcgcatgaccgtgacgtcct

SEQ ID NO: 100979 - DNA, 25 bp, Homo sapien
agggttttgattcacctccgagaca

SEQ ID NO: 100980 - DNA, 25 bp, Homo sapien
agggttttgattgacctccgagaca

SEQ ID NO: 100981 - DNA, 25 bp, Homo sapien
aagggtttttctgacacctgacacc

SEQ ID NO: 100982 - DNA, 25 bp, Homo sapien
aagggtttttctcacacctgacacc

SEQ ID NO: 100983 - DNA, 25 bp, Homo sapien
ccggaatttgcgttcccttcgactc

SEQ ID NO: 100984 - DNA, 25 bp, Homo sapien
ccggaatttgcgatcccttcgactc

SEQ ID NO: 100985 - DNA, 25 bp, Homo sapien
acggatgaagtgcacctttagactc

SEQ ID NO: 100986 - DNA, 25 bp, Homo sapien
acggatgaagtggacctttagactc

SEQ ID NO: 100987 - DNA, 25 bp, Homo sapien
accagagggtgttacttccagaacg

SEQ ID NO: 100988 - DNA, 25 bp, Homo sapien
accagagggtgtaacttccagaacg

SEQ ID NO: 100989 - DNA, 25 bp, Homo sapien
ggaggtgccctgacgtgtccaacag

SEQ ID NO: 100990 - DNA, 25 bp, Homo sapien
ggaggtgccctgtcgtgtccaacag

SEQ ID NO: 100991 - DNA, 25 bp, Homo sapien
gagtgctccctgtatacttaaaagt

SEQ ID NO: 100992 - DNA, 25 bp, Homo sapien
gagtgctccctgaatacttaaaagt

SEQ ID NO: 100993 - DNA, 25 bp, Homo sapien
gggtataaactcaaacttcaaacgt

SEQ ID NO: 100994 - DNA, 25 bp, Homo sapien
gggtataaactctaacttcaaacgt

SEQ ID NO: 100995 - DNA, 25 bp, Homo sapien
ggaacgaaccgttgactcacgaaac

SEQ ID NO: 100996 - DNA, 25 bp, Homo sapien
ggaacgaaccgtagactcacgaaac

SEQ ID NO: 100997 - DNA, 25 bp, Homo sapien
ggacttcagtcgacatcgacgtttc

SEQ ID NO: 100998 - DNA, 25 bp, Homo sapien
ggacttcagtcgtcatcgacgtttc

SEQ ID NO: 100999 - DNA, 25 bp, Homo sapien
cttaggactttatgcgcttcccctc

SEQ ID NO: 101000 - DNA, 25 bp, Homo sapien
cttaggactttaagcgcttcccctc

SEQ ID NO: 101001 - DNA, 25 bp, Homo sapien
cgggtgatggtattcgttttcccta

SEQ ID NO: 101002 - DNA, 25 bp, Homo sapien
cgggtgatggtaatcgttttcccta

SEQ ID NO: 101003 - DNA, 25 bp, Homo sapien
tggattatggaattcttcttgtctc

SEQ ID NO: 101004 - DNA, 25 bp, Homo sapien
tggattatggaaatcttcttgtctc

SEQ ID NO: 101005 - DNA, 25 bp, Homo sapien
ggtccttggactgatacttcttttc

SEQ ID NO: 101006 - DNA, 25 bp, Homo sapien
ggtccttggactcatacttcttttc

SEQ ID NO: 101007 - DNA, 25 bp, Homo sapien
ctagagaacttattcgtttgtgtcg

SEQ ID NO: 101008 - DNA, 25 bp, Homo sapien
ctagagaacttaatcgtttgtgtcg

SEQ ID NO: 101009 - DNA, 25 bp, Homo sapien
gttacccgtgtcactacgtttttgt

SEQ ID NO: 101010 - DNA, 25 bp, Homo sapien
gttacccgtgtctctacgtttttgt

SEQ ID NO: 101011 - DNA, 25 bp, Homo sapien
ttagtaaagactttcacttgtcaag

SEQ ID NO: 101012 - DNA, 25 bp, Homo sapien
ttagtaaagactatcacttgtcaag

SEQ ID NO: 101013 - DNA, 25 bp, Homo sapien
gggtctgtaaactaaccaaatctta

SEQ ID NO: 101014 - DNA, 25 bp, Homo sapien
gggtctgtaaacaaaccaaatctta

SEQ ID NO: 101015 - DNA, 25 bp, Homo sapien
gcggcggaaaaatgacagacctttt

SEQ ID NO: 101016 - DNA, 25 bp, Homo sapien
gcggcggaaaaaagacagacctttt

SEQ ID NO: 101017 - DNA, 25 bp, Homo sapien
ccaggaaaataagagacgtcgtttt

SEQ ID NO: 101018 - DNA, 25 bp, Homo sapien
ccaggaaaataacagacgtcgtttt

SEQ ID NO: 101019 - DNA, 25 bp, Homo sapien
gtaccagtcaagagggagccctggt

SEQ ID NO: 101020 - DNA, 25 bp, Homo sapien
gtaccagtcaagtgggagccctggt

SEQ ID NO: 101021 - DNA, 25 bp, Homo sapien
tggaccaaaggattaccctaaaagt

SEQ ID NO: 101022 - DNA, 25 bp, Homo sapien
tggaccaaaggaataccctaaaagt

SEQ ID NO: 101023 - DNA, 25 bp, Homo sapien
gccagagtaggatgagcagcctgct

SEQ ID NO: 101024 - DNA, 25 bp, Homo sapien
gccagagtaggaagagcagcctgct

SEQ ID NO: 101025 - DNA, 25 bp, Homo sapien
tgagaatcgtcgtccagtcctcggt

SEQ ID NO: 101026 - DNA, 25 bp, Homo sapien
tgagaatcgtcgaccagtcctcggt

SEQ ID NO: 101027 - DNA, 25 bp, Homo sapien
ttgagaacacagaaaattctcgtag

SEQ ID NO: 101028 - DNA, 25 bp, Homo sapien
ttgagaacacagtaaattctcgtag

SEQ ID NO: 101029 - DNA, 25 bp, Homo sapien
ttcttcaaagactcctgatctgtag

SEQ ID NO: 101030 - DNA, 25 bp, Homo sapien
ttcttcaaagacacctgatctgtag

SEQ ID NO: 101031 - DNA, 25 bp, Homo sapien
ttccagatgaccattcgatacagtg

SEQ ID NO: 101032 - DNA, 25 bp, Homo sapien
ttccagatgacctttcgatacagtg

SEQ ID NO: 101033 - DNA, 25 bp, Homo sapien
gttagcacacgtcttctgtccttgg

SEQ ID NO: 101034 - DNA, 25 bp, Homo sapien
gttagcacacgtgttctgtccttgg

SEQ ID NO: 101035 - DNA, 25 bp, Homo sapien
cgtcttcaccttctgcgacctgtag

SEQ ID NO: 101036 - DNA, 25 bp, Homo sapien
cgtcttcaccttgtgcgacctgtag

SEQ ID NO: 101037 - DNA, 25 bp, Homo sapien
cgggaccgcgagtacctgcacgacg

SEQ ID NO: 101038 - DNA, 25 bp, Homo sapien
cgggaccgcgagaacctgcacgacg

SEQ ID NO: 101039 - DNA, 25 bp, Homo sapien
aagagaccgtagaactaccgttcca

SEQ ID NO: 101040 - DNA, 25 bp, Homo sapien
aagagaccgtagtactaccgttcca

SEQ ID NO: 101041 - DNA, 25 bp, Homo sapien
gtaagggacgaggaaacctgctctt

SEQ ID NO: 101042 - DNA, 25 bp, Homo sapien
gtaagggacgagcaaacctgctctt

SEQ ID NO: 101043 - DNA, 25 bp, Homo sapien
ctcttagacgtgaaagattgctcat

SEQ ID NO: 101044 - DNA, 25 bp, Homo sapien
ctcttagacgtgtaagattgctcat

SEQ ID NO: 101045 - DNA, 25 bp, Homo sapien
gagtcaaaccaactacttgacctag

SEQ ID NO: 101046 - DNA, 25 bp, Homo sapien
gagtcaaaccaagtacttgacctag

SEQ ID NO: 101047 - DNA, 25 bp, Homo sapien
agaacaactcgaagtttacaaacag

SEQ ID NO: 101048 - DNA, 25 bp, Homo sapien
agaacaactcgatgtttacaaacag

SEQ ID NO: 101049 - DNA, 25 bp, Homo sapien
ttcacactctattacataatcagtt

SEQ ID NO: 101050 - DNA, 25 bp, Homo sapien
ttcacactctataacataatcagtt

SEQ ID NO: 101051 - DNA, 25 bp, Homo sapien
aaggccaccgtaaaccctacaagtt

SEQ ID NO: 101052 - DNA, 25 bp, Homo sapien
aaggccaccgtataccctacaagtt

SEQ ID NO: 101053 - DNA, 25 bp, Homo sapien
aggggagttctaagagtgtccccgt

SEQ ID NO: 101054 - DNA, 25 bp, Homo sapien
aggggagttctatgagtgtccccgt

SEQ ID NO: 101055 - DNA, 25 bp, Homo sapien
ggtgcgtcctgtgacacgtaccccg

SEQ ID NO: 101056 - DNA, 25 bp, Homo sapien
ggtgcgtcctgtcacacgtaccccg

SEQ ID NO: 101057 - DNA, 25 bp, Homo sapien
gtgtaggtaaataacaggtactccg

SEQ ID NO: 101058 - DNA, 25 bp, Homo sapien
gtgtaggtaaattacaggtactccg

SEQ ID NO: 101059 - DNA, 25 bp, Homo sapien
gaaagacaggtttaatacatttcgc

SEQ ID NO: 101060 - DNA, 25 bp, Homo sapien
gaaagacaggttaaatacatttcgc

SEQ ID NO: 101061 - DNA, 25 bp, Homo sapien
aaggaaccgaagagacagtttactc

SEQ ID NO: 101062 - DNA, 25 bp, Homo sapien
aaggaaccgaagtgacagtttactc

SEQ ID NO: 101063 - DNA, 25 bp, Homo sapien
cgaaaacttaaatcacgtacaacgg

SEQ ID NO: 101064 - DNA, 25 bp, Homo sapien
cgaaaacttaaaacacgtacaacgg

SEQ ID NO: 101065 - DNA, 25 bp, Homo sapien
tcgtcttaattcccactaaacactg

SEQ ID NO: 101066 - DNA, 25 bp, Homo sapien
tcgtcttaattcgcactaaacactg

SEQ ID NO: 101067 - DNA, 25 bp, Homo sapien
ggtccacatcgaacccgaaaacctt

SEQ ID NO: 101068 - DNA, 25 bp, Homo sapien
ggtccacatcgatcccgaaaacctt

SEQ ID NO: 101069 - DNA, 25 bp, Homo sapien
cagacgactcatctacaaggacctc

SEQ ID NO: 101070 - DNA, 25 bp, Homo sapien
cagacgactcatgtacaaggacctc

SEQ ID NO: 101071 - DNA, 25 bp, Homo sapien
cagggacttttcgtaagtgtcccta

SEQ ID NO: 101072 - DNA, 25 bp, Homo sapien
cagggacttttcctaagtgtcccta

SEQ ID NO: 101073 - DNA, 25 bp, Homo sapien
ctgaagaacctttcccgagtcatca

SEQ ID NO: 101074 - DNA, 25 bp, Homo sapien
ctgaagaaccttacccgagtcatca

SEQ ID NO: 101075 - DNA, 25 bp, Homo sapien
caactggtatttaccctgtatccag

SEQ ID NO: 101076 - DNA, 25 bp, Homo sapien
caactggtattttccctgtatccag

SEQ ID NO: 101077 - DNA, 25 bp, Homo sapien
agttgttcgtcactgacttggtggg

SEQ ID NO: 101078 - DNA, 25 bp, Homo sapien
agttgttcgtcagtgacttggtggg

SEQ ID NO: 101079 - DNA, 25 bp, Homo sapien
gttccgccgacaggacaccctgggt

SEQ ID NO: 101080 - DNA, 25 bp, Homo sapien
gttccgccgacacgacaccctgggt

SEQ ID NO: 101081 - DNA, 25 bp, Homo sapien
tacaaggacgaggaccccgtggtgt

SEQ ID NO: 101082 - DNA, 25 bp, Homo sapien
tacaaggacgagcaccccgtggtgt

SEQ ID NO: 101083 - DNA, 25 bp, Homo sapien
cataaccgtgtcgaacccctaggtt

SEQ ID NO: 101084 - DNA, 25 bp, Homo sapien
cataaccgtgtccaacccctaggtt

SEQ ID NO: 101085 - DNA, 25 bp, Homo sapien
tggatcctatactcaccgacccgta

SEQ ID NO: 101086 - DNA, 25 bp, Homo sapien
tggatcctatacacaccgacccgta

SEQ ID NO: 101087 - DNA, 25 bp, Homo sapien
acatcctagacgacccgacagacga

SEQ ID NO: 101088 - DNA, 25 bp, Homo sapien
acatcctagacgtcccgacagacga

SEQ ID NO: 101089 - DNA, 25 bp, Homo sapien
ccgtgagagcgactcccgacacagt

SEQ ID NO: 101090 - DNA, 25 bp, Homo sapien
ccgtgagagcgagtcccgacacagt

SEQ ID NO: 101091 - DNA, 25 bp, Homo sapien
cctcgtgagatgtttcggagtccta

SEQ ID NO: 101092 - DNA, 25 bp, Homo sapien
cctcgtgagatgattcggagtccta

SEQ ID NO: 101093 - DNA, 25 bp, Homo sapien
cctgaaggtagactcgaaccctcgt

SEQ ID NO: 101094 - DNA, 25 bp, Homo sapien
cctgaaggtagagtcgaaccctcgt

SEQ ID NO: 101095 - DNA, 25 bp, Homo sapien
gacgagtaggtatctttacccctct

SEQ ID NO: 101096 - DNA, 25 bp, Homo sapien
gacgagtaggtaactttacccctct

SEQ ID NO: 101097 - DNA, 25 bp, Homo sapien
aagatcatcggtaacgacttcccat

SEQ ID NO: 101098 - DNA, 25 bp, Homo sapien
aagatcatcggttacgacttcccat

SEQ ID NO: 101099 - DNA, 25 bp, Homo sapien
aagtacttttactgagagttacttc

SEQ ID NO: 101100 - DNA, 25 bp, Homo sapien
aagtacttttacagagagttacttc

SEQ ID NO: 101101 - DNA, 25 bp, Homo sapien
aaggtctacagtaatgtcagttttc

SEQ ID NO: 101102 - DNA, 25 bp, Homo sapien
aaggtctacagttatgtcagttttc

SEQ ID NO: 101103 - DNA, 25 bp, Homo sapien
cgtagtagtgtttcacgtggttctg

SEQ ID NO: 101104 - DNA, 25 bp, Homo sapien
cgtagtagtgttacacgtggttctg

SEQ ID NO: 101105 - DNA, 25 bp, Homo sapien
accacgacttactgacgggacacac

SEQ ID NO: 101106 - DNA, 25 bp, Homo sapien
accacgacttacagacgggacacac

SEQ ID NO: 101107 - DNA, 25 bp, Homo sapien
agactcaccagtagcggtaacagac

SEQ ID NO: 101108 - DNA, 25 bp, Homo sapien
agactcaccagttgcggtaacagac

SEQ ID NO: 101109 - DNA, 25 bp, Homo sapien
cacgccacagggactcgaggacgag

SEQ ID NO: 101110 - DNA, 25 bp, Homo sapien
cacgccacagggtctcgaggacgag

SEQ ID NO: 101111 - DNA, 25 bp, Homo sapien
ctcgtggaagtctctaccgtgggac

SEQ ID NO: 101112 - DNA, 25 bp, Homo sapien
ctcgtggaagtcactaccgtgggac

SEQ ID NO: 101113 - DNA, 25 bp, Homo sapien
attttgaatttacactcgtaggacc

SEQ ID NO: 101114 - DNA, 25 bp, Homo sapien
attttgaatttagactcgtaggacc

SEQ ID NO: 101115 - DNA, 25 bp, Homo sapien
gtttaacttctcaagtcttaggtcc

SEQ ID NO: 101116 - DNA, 25 bp, Homo sapien
gtttaacttctctagtcttaggtcc

SEQ ID NO: 101117 - DNA, 25 bp, Homo sapien
tgtgtaagggtagtatcgccggttc

SEQ ID NO: 101118 - DNA, 25 bp, Homo sapien
tgtgtaagggtactatcgccggttc

SEQ ID NO: 101119 - DNA, 25 bp, Homo sapien
gaagaaaccgacgacgaaactattt

SEQ ID NO: 101120 - DNA, 25 bp, Homo sapien
gaagaaaccgaccacgaaactattt

SEQ ID NO: 101121 - DNA, 25 bp, Homo sapien
gtcataaaacgtacaaggtcctatt

SEQ ID NO: 101122 - DNA, 25 bp, Homo sapien
gtcataaaacgttcaaggtcctatt

SEQ ID NO: 101123 - DNA, 25 bp, Homo sapien
gcaaaacaggactctcaggtcaaac

SEQ ID NO: 101124 - DNA, 25 bp, Homo sapien
gcaaaacaggacactcaggtcaaac

SEQ ID NO: 101125 - DNA, 25 bp, Homo sapien
actgaacatagaaaacccatggaac

SEQ ID NO: 101126 - DNA, 25 bp, Homo sapien
actgaacatagataacccatggaac

SEQ ID NO: 101127 - DNA, 25 bp, Homo sapien
atagtctgattcttttcgtcgggac

SEQ ID NO: 101128 - DNA, 25 bp, Homo sapien
atagtctgattcatttcgtcgggac

SEQ ID NO: 101129 - DNA, 25 bp, Homo sapien
gagtattgacctattgtgtcccgtc

SEQ ID NO: 101130 - DNA, 25 bp, Homo sapien
gagtattgaccttttgtgtcccgtc

SEQ ID NO: 101131 - DNA, 25 bp, Homo sapien
gagaatgctctgaccgtccacctcg

SEQ ID NO: 101132 - DNA, 25 bp, Homo sapien
gagaatgctctgtccgtccacctcg

SEQ ID NO: 101133 - DNA, 25 bp, Homo sapien
aacatgcgtcacgagtgcccctcgt

SEQ ID NO: 101134 - DNA, 25 bp, Homo sapien
aacatgcgtcaccagtgcccctcgt

SEQ ID NO: 101135 - DNA, 25 bp, Homo sapien
acgccgacactacacgaaccaggtc

SEQ ID NO: 101136 - DNA, 25 bp, Homo sapien
acgccgacactagacgaaccaggtc

SEQ ID NO: 101137 - DNA, 25 bp, Homo sapien
acgacgcgccgacaacgaacctgaa

SEQ ID NO: 101138 - DNA, 25 bp, Homo sapien
acgacgcgccgagaacgaacctgaa

SEQ ID NO: 101139 - DNA, 25 bp, Homo sapien
gccgagtcactgaaaaccaagggta

SEQ ID NO: 101140 - DNA, 25 bp, Homo sapien
gccgagtcactgtaaaccaagggta

SEQ ID NO: 101141 - DNA, 25 bp, Homo sapien
aacggggaccctaaaaacccgatcg

SEQ ID NO: 101142 - DNA, 25 bp, Homo sapien
aacggggacccttaaaacccgatcg

SEQ ID NO: 101143 - DNA, 25 bp, Homo sapien
tcgaatagaaccttttgacctgata

SEQ ID NO: 101144 - DNA, 25 bp, Homo sapien
tcgaatagaaccatttgacctgata

SEQ ID NO: 101145 - DNA, 25 bp, Homo sapien
tataatgaaccattttaggtcactg

SEQ ID NO: 101146 - DNA, 25 bp, Homo sapien
tataatgaaccaatttaggtcactg

SEQ ID NO: 101147 - DNA, 25 bp, Homo sapien
ctaggtgtctccatttacgttcaca

SEQ ID NO: 101148 - DNA, 25 bp, Homo sapien
ctaggtgtctccttttacgttcaca

SEQ ID NO: 101149 - DNA, 25 bp, Homo sapien
gaatatgtcccgtctttatattgaa

SEQ ID NO: 101150 - DNA, 25 bp, Homo sapien
gaatatgtcccgactttatattgaa

SEQ ID NO: 101151 - DNA, 25 bp, Homo sapien
cgaagaagaggagacatcatccaaa

SEQ ID NO: 101152 - DNA, 25 bp, Homo sapien
cgaagaagaggacacatcatccaaa

SEQ ID NO: 101153 - DNA, 25 bp, Homo sapien
atactggatcgttgttataccaaat

SEQ ID NO: 101154 - DNA, 25 bp, Homo sapien
atactggatcgtagttataccaaat

SEQ ID NO: 101155 - DNA, 25 bp, Homo sapien
tcattggcatgaatcccgaagacgt

SEQ ID NO: 101156 - DNA, 25 bp, Homo sapien
tcattggcatgattcccgaagacgt

SEQ ID NO: 101157 - DNA, 25 bp, Homo sapien
tttgttgccacaaagtcccaggagt

SEQ ID NO: 101158 - DNA, 25 bp, Homo sapien
tttgttgccacatagtcccaggagt

SEQ ID NO: 101159 - DNA, 25 bp, Homo sapien
gcagcgacaccgaatccacagcgtg

SEQ ID NO: 101160 - DNA, 25 bp, Homo sapien
gcagcgacaccgtatccacagcgtg

SEQ ID NO: 101161 - DNA, 25 bp, Homo sapien
cgacccgtagctgttgcacacgctc

SEQ ID NO: 101162 - DNA, 25 bp, Homo sapien
cgacccgtagctcttgcacacgctc

SEQ ID NO: 101163 - DNA, 25 bp, Homo sapien
cagtatccctcgatcttctagctgg

SEQ ID NO: 101164 - DNA, 25 bp, Homo sapien
cagtatccctcgttcttctagctgg

SEQ ID NO: 101165 - DNA, 25 bp, Homo sapien
ttcgtccgttaggatagtccagact

SEQ ID NO: 101166 - DNA, 25 bp, Homo sapien
ttcgtccgttagcatagtccagact

SEQ ID NO: 101167 - DNA, 25 bp, Homo sapien
cgacaccatttcgacgagactgaat

SEQ ID NO: 101168 - DNA, 25 bp, Homo sapien
cgacaccatttccacgagactgaat

SEQ ID NO: 101169 - DNA, 25 bp, Homo sapien
gttgcttgtctacacggactaaagt

SEQ ID NO: 101170 - DNA, 25 bp, Homo sapien
gttgcttgtctagacggactaaagt

SEQ ID NO: 101171 - DNA, 25 bp, Homo sapien
cgtggttcccgtgacagatataaga

SEQ ID NO: 101172 - DNA, 25 bp, Homo sapien
cgtggttcccgtcacagatataaga

SEQ ID NO: 101173 - DNA, 25 bp, Homo sapien
tcggtctcacttaacagagtcaagt

SEQ ID NO: 101174 - DNA, 25 bp, Homo sapien
tcggtctcactttacagagtcaagt

SEQ ID NO: 101175 - DNA, 25 bp, Homo sapien
tttgggtccgctctactcgctcaga

SEQ ID NO: 101176 - DNA, 25 bp, Homo sapien
tttgggtccgctgtactcgctcaga

SEQ ID NO: 101177 - DNA, 25 bp, Homo sapien
ttccgggccgctgtccggaagtact

SEQ ID NO: 101178 - DNA, 25 bp, Homo sapien
ttccgggccgctctccggaagtact

SEQ ID NO: 101179 - DNA, 25 bp, Homo sapien
ccaccgaacgggaccctgtgggtcg

SEQ ID NO: 101180 - DNA, 25 bp, Homo sapien
ccaccgaacgggtccctgtgggtcg

SEQ ID NO: 101181 - DNA, 25 bp, Homo sapien
gggaaaccggggtttacttctgaac

SEQ ID NO: 101182 - DNA, 25 bp, Homo sapien
gggaaaccggggattacttctgaac

SEQ ID NO: 101183 - DNA, 25 bp, Homo sapien
gggcaaccacctcaagttgcggacc

SEQ ID NO: 101184 - DNA, 25 bp, Homo sapien
gggcaaccacctgaagttgcggacc

SEQ ID NO: 101185 - DNA, 25 bp, Homo sapien
ggacatgaccgtccacccagggaac

SEQ ID NO: 101186 - DNA, 25 bp, Homo sapien
ggacatgaccgtgcacccagggaac

SEQ ID NO: 101187 - DNA, 25 bp, Homo sapien
tggggaaccgtagtccaggagacct

SEQ ID NO: 101188 - DNA, 25 bp, Homo sapien
tggggaaccgtactccaggagacct

SEQ ID NO: 101189 - DNA, 25 bp, Homo sapien
tgtactaccctcttctagtggtacc

SEQ ID NO: 101190 - DNA, 25 bp, Homo sapien
tgtactaccctcatctagtggtacc

SEQ ID NO: 101191 - DNA, 25 bp, Homo sapien
gccgtcctcgcgagtccggagtcag

SEQ ID NO: 101192 - DNA, 25 bp, Homo sapien
gccgtcctcgcgtgtccggagtcag

SEQ ID NO: 101193 - DNA, 25 bp, Homo sapien
gtcccggggtctctctactgtctat

SEQ ID NO: 101194 - DNA, 25 bp, Homo sapien
gtcccggggtctgtctactgtctat

SEQ ID NO: 101195 - DNA, 25 bp, Homo sapien
ctcttgtgtgtagacgtcatgtgtc

SEQ ID NO: 101196 - DNA, 25 bp, Homo sapien
ctcttgtgtgtacacgtcatgtgtc

SEQ ID NO: 101197 - DNA, 25 bp, Homo sapien
tctgtatgtaatgacccgtaggtcc

SEQ ID NO: 101198 - DNA, 25 bp, Homo sapien
tctgtatgtaatcacccgtaggtcc

SEQ ID NO: 101199 - DNA, 25 bp, Homo sapien
ttcttggcgtattttgctaggtctc

SEQ ID NO: 101200 - DNA, 25 bp, Homo sapien
ttcttggcgtatattgctaggtctc

SEQ ID NO: 101201 - DNA, 25 bp, Homo sapien
actgtcccgaggacctcaacaattc

SEQ ID NO: 101202 - DNA, 25 bp, Homo sapien
actgtcccgaggtcctcaacaattc

SEQ ID NO: 101203 - DNA, 25 bp, Homo sapien
agggcgaaggccaacacaacaagta

SEQ ID NO: 101204 - DNA, 25 bp, Homo sapien
agggcgaaggcctacacaacaagta

SEQ ID NO: 101205 - DNA, 25 bp, Homo sapien
gaccaatgtcgagtcaagcagcgag

SEQ ID NO: 101206 - DNA, 25 bp, Homo sapien
gaccaatgtcgactcaagcagcgag

SEQ ID NO: 101207 - DNA, 25 bp, Homo sapien
tcaaaattgttttcacgaatgtcga

SEQ ID NO: 101208 - DNA, 25 bp, Homo sapien
tcaaaattgtttacacgaatgtcga

SEQ ID NO: 101209 - DNA, 25 bp, Homo sapien
agttagtgttgaaacagtcgtcgtc

SEQ ID NO: 101210 - DNA, 25 bp, Homo sapien
agttagtgttgatacagtcgtcgtc

SEQ ID NO: 101211 - DNA, 25 bp, Homo sapien
aattccaataattgttatcgtcctt

SEQ ID NO: 101212 - DNA, 25 bp, Homo sapien
aattccaataatagttatcgtcctt

SEQ ID NO: 101213 - DNA, 25 bp, Homo sapien
gatcccaaagggtcggtcactctct

SEQ ID NO: 101214 - DNA, 25 bp, Homo sapien
gatcccaaagggacggtcactctct

SEQ ID NO: 101215 - DNA, 25 bp, Homo sapien
gaagtaaatacgatgtcctactcgt

SEQ ID NO: 101216 - DNA, 25 bp, Homo sapien
gaagtaaatacgttgtcctactcgt

SEQ ID NO: 101217 - DNA, 25 bp, Homo sapien
ctaagtgtgaacatgtttctcttgt

SEQ ID NO: 101218 - DNA, 25 bp, Homo sapien
ctaagtgtgaacttgtttctcttgt

SEQ ID NO: 101219 - DNA, 25 bp, Homo sapien
taagtccatatagttgttactctag

SEQ ID NO: 101220 - DNA, 25 bp, Homo sapien
taagtccatatacttgttactctag

SEQ ID NO: 101221 - DNA, 25 bp, Homo sapien
ccaccctgagaggtttcgtcacctt

SEQ ID NO: 101222 - DNA, 25 bp, Homo sapien
ccaccctgagagctttcgtcacctt

SEQ ID NO: 101223 - DNA, 25 bp, Homo sapien
tgaccggggccttcagtcggaacgt

SEQ ID NO: 101224 - DNA, 25 bp, Homo sapien
tgaccggggcctacagtcggaacgt

SEQ ID NO: 101225 - DNA, 25 bp, Homo sapien
gtatcttgtggattctgttactgac

SEQ ID NO: 101226 - DNA, 25 bp, Homo sapien
gtatcttgtggaatctgttactgac

SEQ ID NO: 101227 - DNA, 25 bp, Homo sapien
aagttgtcgctgagatccttctcga

SEQ ID NO: 101228 - DNA, 25 bp, Homo sapien
aagttgtcgctgtgatccttctcga

SEQ ID NO: 101229 - DNA, 25 bp, Homo sapien
cggagttttagatgtccaggttcga

SEQ ID NO: 101230 - DNA, 25 bp, Homo sapien
cggagttttagaagtccaggttcga

SEQ ID NO: 101231 - DNA, 25 bp, Homo sapien
cccccagtttcctagtcaagtagga

SEQ ID NO: 101232 - DNA, 25 bp, Homo sapien
cccccagtttccaagtcaagtagga

SEQ ID NO: 101233 - DNA, 25 bp, Homo sapien
cccgagagcttcagagtggacagaa

SEQ ID NO: 101234 - DNA, 25 bp, Homo sapien
cccgagagcttctgagtggacagaa

SEQ ID NO: 101235 - DNA, 25 bp, Homo sapien
aagacgctcgtcacggactaagatg

SEQ ID NO: 101236 - DNA, 25 bp, Homo sapien
aagacgctcgtctcggactaagatg

SEQ ID NO: 101237 - DNA, 25 bp, Homo sapien
agtaaatgtcctccaataagtgtac

SEQ ID NO: 101238 - DNA, 25 bp, Homo sapien
agtaaatgtcctgcaataagtgtac

SEQ ID NO: 101239 - DNA, 25 bp, Homo sapien
agaacgacccatgagactataaatt

SEQ ID NO: 101240 - DNA, 25 bp, Homo sapien
agaacgacccatcagactataaatt

SEQ ID NO: 101241 - DNA, 25 bp, Homo sapien
aaagagaatccataaacctaccagg

SEQ ID NO: 101242 - DNA, 25 bp, Homo sapien
aaagagaatccaaaaacctaccagg

SEQ ID NO: 101243 - DNA, 25 bp, Homo sapien
gaattttcccgaggaccccatgtgt

SEQ ID NO: 101244 - DNA, 25 bp, Homo sapien
gaattttcccgacgaccccatgtgt

SEQ ID NO: 101245 - DNA, 25 bp, Homo sapien
tcgtgctacctgtgcatgtcggggt

SEQ ID NO: 101246 - DNA, 25 bp, Homo sapien
tcgtgctacctgagcatgtcggggt

SEQ ID NO: 101247 - DNA, 25 bp, Homo sapien
ttctcagatctgaggctcggtcggg

SEQ ID NO: 101248 - DNA, 25 bp, Homo sapien
ttctcagatctgtggctcggtcggg

SEQ ID NO: 101249 - DNA, 25 bp, Homo sapien
cgtcatgtcagttttggacttggag

SEQ ID NO: 101250 - DNA, 25 bp, Homo sapien
cgtcatgtcagtattggacttggag

SEQ ID NO: 101251 - DNA, 25 bp, Homo sapien
gggctattccgtcttgtagaatcca

SEQ ID NO: 101252 - DNA, 25 bp, Homo sapien
gggctattccgtgttgtagaatcca

SEQ ID NO: 101253 - DNA, 25 bp, Homo sapien
gataaataacgtgtattgagtccca

SEQ ID NO: 101254 - DNA, 25 bp, Homo sapien
gataaataacgtctattgagtccca

SEQ ID NO: 101255 - DNA, 25 bp, Homo sapien
ggtaaattatcaaaaatcgacacga

SEQ ID NO: 101256 - DNA, 25 bp, Homo sapien
ggtaaattatcataaatcgacacga

SEQ ID NO: 101257 - DNA, 25 bp, Homo sapien
ggtaaattagaaccaattcgacatt

SEQ ID NO: 101258 - DNA, 25 bp, Homo sapien
ggtaaattagaagcaattcgacatt

SEQ ID NO: 101259 - DNA, 25 bp, Homo sapien
aactttactagtcttcttcgaccct

SEQ ID NO: 101260 - DNA, 25 bp, Homo sapien
aactttactagtgttcttcgaccct

SEQ ID NO: 101261 - DNA, 25 bp, Homo sapien
gaaatttccgactgtctttgaacct

SEQ ID NO: 101262 - DNA, 25 bp, Homo sapien
gaaatttccgacagtctttgaacct

SEQ ID NO: 101263 - DNA, 25 bp, Homo sapien
agagattctcccagtcctcttgacc

SEQ ID NO: 101264 - DNA, 25 bp, Homo sapien
agagattctccctgtcctcttgacc

SEQ ID NO: 101265 - DNA, 25 bp, Homo sapien
ttagttctcacttgaagtcttgaac

SEQ ID NO: 101266 - DNA, 25 bp, Homo sapien
ttagttctcactagaagtcttgaac

SEQ ID NO: 101267 - DNA, 25 bp, Homo sapien
gttgagtccctcttgtaacccaacc

SEQ ID NO: 101268 - DNA, 25 bp, Homo sapien
gttgagtccctcatgtaacccaacc

SEQ ID NO: 101269 - DNA, 25 bp, Homo sapien
gggacccctttgactccgtcgacgt

SEQ ID NO: 101270 - DNA, 25 bp, Homo sapien
gggacccctttgtctccgtcgacgt

SEQ ID NO: 101271 - DNA, 25 bp, Homo sapien
acaacgcgtgttggtcgctgacgag

SEQ ID NO: 101272 - DNA, 25 bp, Homo sapien
acaacgcgtgttcgtcgctgacgag

SEQ ID NO: 101273 - DNA, 25 bp, Homo sapien
cctgaagggtactccgacctaacga

SEQ ID NO: 101274 - DNA, 25 bp, Homo sapien
cctgaagggtacaccgacctaacga

SEQ ID NO: 101275 - DNA, 25 bp, Homo sapien
actgggaccggtcgaactatccgac

SEQ ID NO: 101276 - DNA, 25 bp, Homo sapien
actgggaccggtggaactatccgac

SEQ ID NO: 101277 - DNA, 25 bp, Homo sapien
aagggtcatgaaacggtcgacgacg

SEQ ID NO: 101278 - DNA, 25 bp, Homo sapien
aagggtcatgaatcggtcgacgacg

SEQ ID NO: 101279 - DNA, 25 bp, Homo sapien
agcggagaggttctccggtgtcccc

SEQ ID NO: 101280 - DNA, 25 bp, Homo sapien
agcggagaggttgtccggtgtcccc

SEQ ID NO: 101281 - DNA, 25 bp, Homo sapien
agggacccggttcgacgagaccccc

SEQ ID NO: 101282 - DNA, 25 bp, Homo sapien
agggacccggttggacgagaccccc

SEQ ID NO: 101283 - DNA, 25 bp, Homo sapien
gagactcatgaactcgtaggtcttt

SEQ ID NO: 101284 - DNA, 25 bp, Homo sapien
gagactcatgaagtcgtaggtcttt

SEQ ID NO: 101285 - DNA, 25 bp, Homo sapien
aggaagtcactcaccgtgaccatca

SEQ ID NO: 101286 - DNA, 25 bp, Homo sapien
aggaagtcactctccgtgaccatca

SEQ ID NO: 101287 - DNA, 25 bp, Homo sapien
acgggaaggacccgtcgcgggccca

SEQ ID NO: 101288 - DNA, 25 bp, Homo sapien
acgggaaggaccggtcgcgggccca

SEQ ID NO: 101289 - DNA, 25 bp, Homo sapien
agggaatctgcatcaggaacgccag

SEQ ID NO: 101290 - DNA, 25 bp, Homo sapien
agggaatctgcaacaggaacgccag

SEQ ID NO: 101291 - DNA, 25 bp, Homo sapien
tggggagacgtctaaaggaggccct

SEQ ID NO: 101292 - DNA, 25 bp, Homo sapien
tggggagacgtcaaaaggaggccct

SEQ ID NO: 101293 - DNA, 25 bp, Homo sapien
ggtatacgacacgtgaatggcgcct

SEQ ID NO: 101294 - DNA, 25 bp, Homo sapien
ggtatacgacacctgaatggcgcct

SEQ ID NO: 101295 - DNA, 25 bp, Homo sapien
gtagaccgacttctgtggtcgaact

SEQ ID NO: 101296 - DNA, 25 bp, Homo sapien
gtagaccgacttgtgtggtcgaact

SEQ ID NO: 101297 - DNA, 25 bp, Homo sapien
tcgaccgtctactcagtctttagaa

SEQ ID NO: 101298 - DNA, 25 bp, Homo sapien
tcgaccgtctacacagtctttagaa

SEQ ID NO: 101299 - DNA, 25 bp, Homo sapien
actcaagttctggaagtttcgtgaa

SEQ ID NO: 101300 - DNA, 25 bp, Homo sapien
actcaagttctgcaagtttcgtgaa

SEQ ID NO: 101301 - DNA, 25 bp, Homo sapien
acgagatatttgaagtaccctgaca

SEQ ID NO: 101302 - DNA, 25 bp, Homo sapien
acgagatatttgtagtaccctgaca

SEQ ID NO: 101303 - DNA, 25 bp, Homo sapien
gtgaatatagttacgtcacctccag

SEQ ID NO: 101304 - DNA, 25 bp, Homo sapien
gtgaatatagtttcgtcacctccag

SEQ ID NO: 101305 - DNA, 25 bp, Homo sapien
gacacacagtgagaacgcgctctag

SEQ ID NO: 101306 - DNA, 25 bp, Homo sapien
gacacacagtgacaacgcgctctag

SEQ ID NO: 101307 - DNA, 25 bp, Homo sapien
actacgacgcgaacaacggtactta

SEQ ID NO: 101308 - DNA, 25 bp, Homo sapien
actacgacgcgatcaacggtactta

SEQ ID NO: 101309 - DNA, 25 bp, Homo sapien
gggagcacagaggagtgtacccaca

SEQ ID NO: 101310 - DNA, 25 bp, Homo sapien
gggagcacagagcagtgtacccaca

SEQ ID NO: 101311 - DNA, 25 bp, Homo sapien
tcccaggtagaggagagtgtacgta

SEQ ID NO: 101312 - DNA, 25 bp, Homo sapien
tcccaggtagagcagagtgtacgta

SEQ ID NO: 101313 - DNA, 25 bp, Homo sapien
gtctagtacagtcaaggaagacctt

SEQ ID NO: 101314 - DNA, 25 bp, Homo sapien
gtctagtacagtgaaggaagacctt

SEQ ID NO: 101315 - DNA, 25 bp, Homo sapien
atgacaaggatatttaacagtcctt

SEQ ID NO: 101316 - DNA, 25 bp, Homo sapien
atgacaaggataattaacagtcctt

SEQ ID NO: 101317 - DNA, 25 bp, Homo sapien
acggcggacacctaggccacgtcgg

SEQ ID NO: 101318 - DNA, 25 bp, Homo sapien
acggcggacaccaaggccacgtcgg

SEQ ID NO: 101319 - DNA, 25 bp, Homo sapien
ttgtggtcttacagggcctagacgg

SEQ ID NO: 101320 - DNA, 25 bp, Homo sapien
ttgtggtcttactgggcctagacgg

SEQ ID NO: 101321 - DNA, 25 bp, Homo sapien
ttttctggtacttccgggcatcagg

SEQ ID NO: 101322 - DNA, 25 bp, Homo sapien
ttttctggtactaccgggcatcagg

SEQ ID NO: 101323 - DNA, 25 bp, Homo sapien
tatgtttagaaaagtgaaacccttc

SEQ ID NO: 101324 - DNA, 25 bp, Homo sapien
tatgtttagaaatgtgaaacccttc

SEQ ID NO: 101325 - DNA, 25 bp, Homo sapien
cctcagtagactgttgtcctcttac

SEQ ID NO: 101326 - DNA, 25 bp, Homo sapien
cctcagtagactcttgtcctcttac

SEQ ID NO: 101327 - DNA, 25 bp, Homo sapien
ctctgcctttaggtagcgagctggt

SEQ ID NO: 101328 - DNA, 25 bp, Homo sapien
ctctgcctttagctagcgagctggt

SEQ ID NO: 101329 - DNA, 25 bp, Homo sapien
gcgaccaatcgtggcgtccacatct

SEQ ID NO: 101330 - DNA, 25 bp, Homo sapien
gcgaccaatcgtcgcgtccacatct

SEQ ID NO: 101331 - DNA, 25 bp, Homo sapien
ccaggtcggacacaggtctccggga

SEQ ID NO: 101332 - DNA, 25 bp, Homo sapien
ccaggtcggacagaggtctccggga

SEQ ID NO: 101333 - DNA, 25 bp, Homo sapien
gtgtctagtagtgtccgtccggtgt

SEQ ID NO: 101334 - DNA, 25 bp, Homo sapien
gtgtctagtagtctccgtccggtgt

SEQ ID NO: 101335 - DNA, 25 bp, Homo sapien
ttacgtaacggttcctccgggtcgg

SEQ ID NO: 101336 - DNA, 25 bp, Homo sapien
ttacgtaacggtacctccgggtcgg

SEQ ID NO: 101337 - DNA, 25 bp, Homo sapien
tggtactaagttttgtgaccaccga

SEQ ID NO: 101338 - DNA, 25 bp, Homo sapien
tggtactaagttatgtgaccaccga

SEQ ID NO: 101339 - DNA, 25 bp, Homo sapien
tgggagacgcgtttctagcggaccc

SEQ ID NO: 101340 - DNA, 25 bp, Homo sapien
tgggagacgcgtatctagcggaccc

SEQ ID NO: 101341 - DNA, 25 bp, Homo sapien
acctagtaagaaagataccgccgga

SEQ ID NO: 101342 - DNA, 25 bp, Homo sapien
acctagtaagaatgataccgccgga

SEQ ID NO: 101343 - DNA, 25 bp, Homo sapien
accggaagagggtagacactaccga

SEQ ID NO: 101344 - DNA, 25 bp, Homo sapien
accggaagagggaagacactaccga

SEQ ID NO: 101345 - DNA, 25 bp, Homo sapien
ttttgtgttgaaaccagactttcat

SEQ ID NO: 101346 - DNA, 25 bp, Homo sapien
ttttgtgttgaatccagactttcat

SEQ ID NO: 101347 - DNA, 25 bp, Homo sapien
ttggtgtgtcgataacgacctttta

SEQ ID NO: 101348 - DNA, 25 bp, Homo sapien
ttggtgtgtcgaaaacgacctttta

SEQ ID NO: 101349 - DNA, 25 bp, Homo sapien
gggtcggaccgtcacctactcttcg

SEQ ID NO: 101350 - DNA, 25 bp, Homo sapien
gggtcggaccgtgacctactcttcg

SEQ ID NO: 101351 - DNA, 25 bp, Homo sapien
acagggtgatctcgtccgacgtttg

SEQ ID NO: 101352 - DNA, 25 bp, Homo sapien
acagggtgatctggtccgacgtttg

SEQ ID NO: 101353 - DNA, 25 bp, Homo sapien
aagcggaagttcgtgtcggttctgt

SEQ ID NO: 101354 - DNA, 25 bp, Homo sapien
aagcggaagttcctgtcggttctgt

SEQ ID NO: 101355 - DNA, 25 bp, Homo sapien
cacgggaggtataccgttctgtgtt

SEQ ID NO: 101356 - DNA, 25 bp, Homo sapien
cacgggaggtattccgttctgtgtt

SEQ ID NO: 101357 - DNA, 25 bp, Homo sapien
agaggagtcatatccgttctatgtg

SEQ ID NO: 101358 - DNA, 25 bp, Homo sapien
agaggagtcataaccgttctatgtg

SEQ ID NO: 101359 - DNA, 25 bp, Homo sapien
ctagaggtaactcaatttgacatgt

SEQ ID NO: 101360 - DNA, 25 bp, Homo sapien
ctagaggtaactgaatttgacatgt

SEQ ID NO: 101361 - DNA, 25 bp, Homo sapien
actgggtcctcgaaggagtatcgga

SEQ ID NO: 101362 - DNA, 25 bp, Homo sapien
actgggtcctcgtaggagtatcgga

SEQ ID NO: 101363 - DNA, 25 bp, Homo sapien
atctcctcgcagatgaccagaaagt

SEQ ID NO: 101364 - DNA, 25 bp, Homo sapien
atctcctcgcagttgaccagaaagt

SEQ ID NO: 101365 - DNA, 25 bp, Homo sapien
cccgttcccgacatgtacacaggaa

SEQ ID NO: 101366 - DNA, 25 bp, Homo sapien
cccgttcccgacttgtacacaggaa

SEQ ID NO: 101367 - DNA, 25 bp, Homo sapien
actcggcaccagtaaaccgagtagg

SEQ ID NO: 101368 - DNA, 25 bp, Homo sapien
actcggcaccagaaaaccgagtagg

SEQ ID NO: 101369 - DNA, 25 bp, Homo sapien
tctcggtcgggaagaagtcccggac

SEQ ID NO: 101370 - DNA, 25 bp, Homo sapien
tctcggtcgggatgaagtcccggac

SEQ ID NO: 101371 - DNA, 25 bp, Homo sapien
tttcggcgagaaggacgtgcatgaa

SEQ ID NO: 101372 - DNA, 25 bp, Homo sapien
tttcggcgagaacgacgtgcatgaa

SEQ ID NO: 101373 - DNA, 25 bp, Homo sapien
gttcctctcgcgacccttatgagag

SEQ ID NO: 101374 - DNA, 25 bp, Homo sapien
gttcctctcgcgtcccttatgagag

SEQ ID NO: 101375 - DNA, 25 bp, Homo sapien
ccgcgttgccggtcctcttcgtgaa

SEQ ID NO: 101376 - DNA, 25 bp, Homo sapien
ccgcgttgccggacctcttcgtgaa

SEQ ID NO: 101377 - DNA, 25 bp, Homo sapien
acgaagttcggttacgtttttcaag

SEQ ID NO: 101378 - DNA, 25 bp, Homo sapien
acgaagttcggtaacgtttttcaag

SEQ ID NO: 101379 - DNA, 25 bp, Homo sapien
acaagtatccgtaactgatgttgaa

SEQ ID NO: 101380 - DNA, 25 bp, Homo sapien
acaagtatccgttactgatgttgaa

SEQ ID NO: 101381 - DNA, 25 bp, Homo sapien
agttgtctttatttactgtctgaca

SEQ ID NO: 101382 - DNA, 25 bp, Homo sapien
agttgtctttatatactgtctgaca

SEQ ID NO: 101383 - DNA, 25 bp, Homo sapien
gacttattgtcttcgtgcatttaat

SEQ ID NO: 101384 - DNA, 25 bp, Homo sapien
gacttattgtctacgtgcatttaat

SEQ ID NO: 101385 - DNA, 25 bp, Homo sapien
tatttttttttcagtcataactggt

SEQ ID NO: 101386 - DNA, 25 bp, Homo sapien
tatttttttttctgtcataactggt

SEQ ID NO: 101387 - DNA, 25 bp, Homo sapien
ctgtctctgtgtccatgattatgac

SEQ ID NO: 101388 - DNA, 25 bp, Homo sapien
ctgtctctgtgtgcatgattatgac

SEQ ID NO: 101389 - DNA, 25 bp, Homo sapien
aaggggagactgttctacaaaacct

SEQ ID NO: 101390 - DNA, 25 bp, Homo sapien
aaggggagactgatctacaaaacct

SEQ ID NO: 101391 - DNA, 25 bp, Homo sapien
aggaggacagaaacatacattacct

SEQ ID NO: 101392 - DNA, 25 bp, Homo sapien
aggaggacagaatcatacattacct

SEQ ID NO: 101393 - DNA, 25 bp, Homo sapien
catgagtgtagtaacagatcatcca

SEQ ID NO: 101394 - DNA, 25 bp, Homo sapien
catgagtgtagttacagatcatcca

SEQ ID NO: 101395 - DNA, 25 bp, Homo sapien
aaaaaaggaaagtgttcacgacgac

SEQ ID NO: 101396 - DNA, 25 bp, Homo sapien
aaaaaaggaaagagttcacgacgac

SEQ ID NO: 101397 - DNA, 25 bp, Homo sapien
ggataatttagagagagactcgtcc

SEQ ID NO: 101398 - DNA, 25 bp, Homo sapien
ggataatttagacagagactcgtcc

SEQ ID NO: 101399 - DNA, 25 bp, Homo sapien
gatgattgtagaaatcactctcagt

SEQ ID NO: 101400 - DNA, 25 bp, Homo sapien
gatgattgtagatatcactctcagt

SEQ ID NO: 101401 - DNA, 25 bp, Homo sapien
tgtacgtacgtgacggaaccactgg

SEQ ID NO: 101402 - DNA, 25 bp, Homo sapien
tgtacgtacgtgtcggaaccactgg

SEQ ID NO: 101403 - DNA, 25 bp, Homo sapien
ggttcgtgtacctcagaacctccga

SEQ ID NO: 101404 - DNA, 25 bp, Homo sapien
ggttcgtgtaccacagaacctccga

SEQ ID NO: 101405 - DNA, 25 bp, Homo sapien
gttactgataccacagagcccacct

SEQ ID NO: 101406 - DNA, 25 bp, Homo sapien
gttactgatacctcagagcccacct

SEQ ID NO: 101407 - DNA, 25 bp, Homo sapien
cacaacgtcgacgacgggcggcaca

SEQ ID NO: 101408 - DNA, 25 bp, Homo sapien
cacaacgtcgaccacgggcggcaca

SEQ ID NO: 101409 - DNA, 25 bp, Homo sapien
cccgtacataaacgtctttcggaaa

SEQ ID NO: 101410 - DNA, 25 bp, Homo sapien
cccgtacataaaggtctttcggaaa

SEQ ID NO: 101411 - DNA, 25 bp, Homo sapien
tagatcaacgtttccgtggagtaag

SEQ ID NO: 101412 - DNA, 25 bp, Homo sapien
tagatcaacgttaccgtggagtaag

SEQ ID NO: 101413 - DNA, 25 bp, Homo sapien
gaaataccgaccttaaccaggataa

SEQ ID NO: 101414 - DNA, 25 bp, Homo sapien
gaaataccgaccataaccaggataa

SEQ ID NO: 101415 - DNA, 25 bp, Homo sapien
gagaactcaaacatccaaggtcttt

SEQ ID NO: 101416 - DNA, 25 bp, Homo sapien
gagaactcaaacttccaaggtcttt

SEQ ID NO: 101417 - DNA, 25 bp, Homo sapien
gggtcctcagacttttcccggatcc

SEQ ID NO: 101418 - DNA, 25 bp, Homo sapien
gggtcctcagacatttcccggatcc

SEQ ID NO: 101419 - DNA, 25 bp, Homo sapien
ttttaggtatacgaacccagtacct

SEQ ID NO: 101420 - DNA, 25 bp, Homo sapien
ttttaggtataccaacccagtacct

SEQ ID NO: 101421 - DNA, 25 bp, Homo sapien
ctacacagagtaccaaccggaaggt

SEQ ID NO: 101422 - DNA, 25 bp, Homo sapien
ctacacagagtagcaaccggaaggt

SEQ ID NO: 101423 - DNA, 25 bp, Homo sapien
tcctctcagtctcagaccagacggg

SEQ ID NO: 101424 - DNA, 25 bp, Homo sapien
tcctctcagtctgagaccagacggg

SEQ ID NO: 101425 - DNA, 25 bp, Homo sapien
agtctagacgaggaacacgaagtgt

SEQ ID NO: 101426 - DNA, 25 bp, Homo sapien
agtctagacgagcaacacgaagtgt

SEQ ID NO: 101427 - DNA, 25 bp, Homo sapien
cgataaaattggtacgtcgaagaca

SEQ ID NO: 101428 - DNA, 25 bp, Homo sapien
cgataaaattggaacgtcgaagaca

SEQ ID NO: 101429 - DNA, 25 bp, Homo sapien
aaaacgtatgaagacggactgacag

SEQ ID NO: 101430 - DNA, 25 bp, Homo sapien
aaaacgtatgaacacggactgacag

SEQ ID NO: 101431 - DNA, 25 bp, Homo sapien
agaacaagacattcttcactgtcag

SEQ ID NO: 101432 - DNA, 25 bp, Homo sapien
agaacaagacatacttcactgtcag

SEQ ID NO: 101433 - DNA, 25 bp, Homo sapien
gagaacttccatactttccgtgact

SEQ ID NO: 101434 - DNA, 25 bp, Homo sapien
gagaacttccattctttccgtgact

SEQ ID NO: 101435 - DNA, 25 bp, Homo sapien
gaatgactacgatctcgtctgggga

SEQ ID NO: 101436 - DNA, 25 bp, Homo sapien
gaatgactacgaactcgtctgggga

SEQ ID NO: 101437 - DNA, 25 bp, Homo sapien
aagtcacaaacaagtctcgagtaga

SEQ ID NO: 101438 - DNA, 25 bp, Homo sapien
aagtcacaaacatgtctcgagtaga

SEQ ID NO: 101439 - DNA, 25 bp, Homo sapien
gacccgagagacaagtcgtcaggac

SEQ ID NO: 101440 - DNA, 25 bp, Homo sapien
gacccgagagactagtcgtcaggac

SEQ ID NO: 101441 - DNA, 25 bp, Homo sapien
gtgatcttctttcagagttacaccg

SEQ ID NO: 101442 - DNA, 25 bp, Homo sapien
gtgatcttctttgagagttacaccg

SEQ ID NO: 101443 - DNA, 25 bp, Homo sapien
cgagactatgtgtttgaacaacatt

SEQ ID NO: 101444 - DNA, 25 bp, Homo sapien
cgagactatgtgattgaacaacatt

SEQ ID NO: 101445 - DNA, 25 bp, Homo sapien
tgagagaacgactccgagaaaagag

SEQ ID NO: 101446 - DNA, 25 bp, Homo sapien
tgagagaacgacaccgagaaaagag

SEQ ID NO: 101447 - DNA, 25 bp, Homo sapien
tcgtggggtccactacaggagacgc

SEQ ID NO: 101448 - DNA, 25 bp, Homo sapien
tcgtggggtccagtacaggagacgc

SEQ ID NO: 101449 - DNA, 25 bp, Homo sapien
ctagaggaggtccagaggcaacgct

SEQ ID NO: 101450 - DNA, 25 bp, Homo sapien
ctagaggaggtcgagaggcaacgct

SEQ ID NO: 101451 - DNA, 25 bp, Homo sapien
agcgaaggcggatcttaggacaaga

SEQ ID NO: 101452 - DNA, 25 bp, Homo sapien
agcgaaggcggaacttaggacaaga

SEQ ID NO: 101453 - DNA, 25 bp, Homo sapien
gtacatgaggttcatttagaccaat

SEQ ID NO: 101454 - DNA, 25 bp, Homo sapien
gtacatgaggttgatttagaccaat

SEQ ID NO: 101455 - DNA, 25 bp, Homo sapien
gggtttattatgatcaactccttac

SEQ ID NO: 101456 - DNA, 25 bp, Homo sapien
gggtttattatgttcaactccttac

SEQ ID NO: 101457 - DNA, 25 bp, Homo sapien
gttgacacatgtgcttctcctgtct

SEQ ID NO: 101458 - DNA, 25 bp, Homo sapien
gttgacacatgtccttctcctgtct

SEQ ID NO: 101459 - DNA, 25 bp, Homo sapien
gggggttactttaccccgtctgtct

SEQ ID NO: 101460 - DNA, 25 bp, Homo sapien
gggggttacttttccccgtctgtct

SEQ ID NO: 101461 - DNA, 25 bp, Homo sapien
gtgacgtaattcctgttacttttat

SEQ ID NO: 101462 - DNA, 25 bp, Homo sapien
gtgacgtaattcgtgttacttttat

SEQ ID NO: 101463 - DNA, 25 bp, Homo sapien
tacaagttctgtcgtttaagtctat

SEQ ID NO: 101464 - DNA, 25 bp, Homo sapien
tacaagttctgtggtttaagtctat

SEQ ID NO: 101465 - DNA, 25 bp, Homo sapien
tcctcttggtgttcgtatcagtcag

SEQ ID NO: 101466 - DNA, 25 bp, Homo sapien
tcctcttggtgtacgtatcagtcag

SEQ ID NO: 101467 - DNA, 25 bp, Homo sapien
ccactgttagggacgtcacagtaag

SEQ ID NO: 101468 - DNA, 25 bp, Homo sapien
ccactgttagggtcgtcacagtaag

SEQ ID NO: 101469 - DNA, 25 bp, Homo sapien
cacattgaagtgtgtctaagactat

SEQ ID NO: 101470 - DNA, 25 bp, Homo sapien
cacattgaagtgagtctaagactat

SEQ ID NO: 101471 - DNA, 25 bp, Homo sapien
tccagatgttattccatcttatagg

SEQ ID NO: 101472 - DNA, 25 bp, Homo sapien
tccagatgttataccatcttatagg

SEQ ID NO: 101473 - DNA, 25 bp, Homo sapien
caaaacattgaacaccacgtttgag

SEQ ID NO: 101474 - DNA, 25 bp, Homo sapien
caaaacattgaagaccacgtttgag

SEQ ID NO: 101475 - DNA, 25 bp, Homo sapien
cggttttacagaggacaccgtccta

SEQ ID NO: 101476 - DNA, 25 bp, Homo sapien
cggttttacagacgacaccgtccta

SEQ ID NO: 101477 - DNA, 25 bp, Homo sapien
gctcttgttacatgttctttcgtcg

SEQ ID NO: 101478 - DNA, 25 bp, Homo sapien
gctcttgttacaagttctttcgtcg

SEQ ID NO: 101479 - DNA, 25 bp, Homo sapien
gctcgccgtggaactgtcctatcgg

SEQ ID NO: 101480 - DNA, 25 bp, Homo sapien
gctcgccgtggatctgtcctatcgg

SEQ ID NO: 101481 - DNA, 25 bp, Homo sapien
tgtctagtagtgtccgtccggtgtc

SEQ ID NO: 101482 - DNA, 25 bp, Homo sapien
tgtctagtagtgaccgtccggtgtc

SEQ ID NO: 101483 - DNA, 25 bp, Homo sapien
tgattacgttacagtggtgtaccta

SEQ ID NO: 101484 - DNA, 25 bp, Homo sapien
tgattacgttactgtggtgtaccta

SEQ ID NO: 101485 - DNA, 25 bp, Homo sapien
tacccggggtgacaccgagtccgac

SEQ ID NO: 101486 - DNA, 25 bp, Homo sapien
tacccggggtgagaccgagtccgac

SEQ ID NO: 101487 - DNA, 25 bp, Homo sapien
ttctcggagaggtctcagagccacg

SEQ ID NO: 101488 - DNA, 25 bp, Homo sapien
ttctcggagaggactcagagccacg

SEQ ID NO: 101489 - DNA, 25 bp, Homo sapien
actcggacactgcacgtaaacatgg

SEQ ID NO: 101490 - DNA, 25 bp, Homo sapien
actcggacactggacgtaaacatgg

SEQ ID NO: 101491 - DNA, 25 bp, Homo sapien
atctcgtaagtttacgaatacattg

SEQ ID NO: 101492 - DNA, 25 bp, Homo sapien
atctcgtaagttaacgaatacattg

SEQ ID NO: 101493 - DNA, 25 bp, Homo sapien
ccctttggtcgtacgctataaagag

SEQ ID NO: 101494 - DNA, 25 bp, Homo sapien
ccctttggtcgttcgctataaagag

SEQ ID NO: 101495 - DNA, 25 bp, Homo sapien
acctcttcggtgtcggtttaggtcg

SEQ ID NO: 101496 - DNA, 25 bp, Homo sapien
acctcttcggtgacggtttaggtcg

SEQ ID NO: 101497 - DNA, 25 bp, Homo sapien
tcttctcgaggcacgctaatgacta

SEQ ID NO: 101498 - DNA, 25 bp, Homo sapien
tcttctcgaggctcgctaatgacta

SEQ ID NO: 101499 - DNA, 25 bp, Homo sapien
atttcccttgtgtcttcttgttaca

SEQ ID NO: 101500 - DNA, 25 bp, Homo sapien
atttcccttgtgacttcttgttaca

SEQ ID NO: 101501 - DNA, 25 bp, Homo sapien
acttaactttttgatttaccttatt

SEQ ID NO: 101502 - DNA, 25 bp, Homo sapien
acttaactttttcatttaccttatt

SEQ ID NO: 101503 - DNA, 25 bp, Homo sapien
tgtcaggtgttttaattccgtaaac

SEQ ID NO: 101504 - DNA, 25 bp, Homo sapien
tgtcaggtgtttaaattccgtaaac

SEQ ID NO: 101505 - DNA, 25 bp, Homo sapien
atcacctgtgtcgaaagtcttaaca

SEQ ID NO: 101506 - DNA, 25 bp, Homo sapien
atcacctgtgtccaaagtcttaaca

SEQ ID NO: 101507 - DNA, 25 bp, Homo sapien
tccttgtctgaaggatcctagacac

SEQ ID NO: 101508 - DNA, 25 bp, Homo sapien
tccttgtctgaacgatcctagacac

SEQ ID NO: 101509 - DNA, 25 bp, Homo sapien
caagagttccactagtctcctgact

SEQ ID NO: 101510 - DNA, 25 bp, Homo sapien
caagagttccacaagtctcctgact

SEQ ID NO: 101511 - DNA, 25 bp, Homo sapien
ggaggtagtcgcaggactagaccaa

SEQ ID NO: 101512 - DNA, 25 bp, Homo sapien
ggaggtagtcgctggactagaccaa

SEQ ID NO: 101513 - DNA, 25 bp, Homo sapien
tcgaggcgtccgagtctgtaaccag

SEQ ID NO: 101514 - DNA, 25 bp, Homo sapien
tcgaggcgtccgtgtctgtaaccag

SEQ ID NO: 101515 - DNA, 25 bp, Homo sapien
ccacttgtgtgcttcctctattcag

SEQ ID NO: 101516 - DNA, 25 bp, Homo sapien
ccacttgtgtgcatcctctattcag

SEQ ID NO: 101517 - DNA, 25 bp, Homo sapien
atcaagtgaggtagacaagtttcac

SEQ ID NO: 101518 - DNA, 25 bp, Homo sapien
atcaagtgaggttgacaagtttcac

SEQ ID NO: 101519 - DNA, 25 bp, Homo sapien
tcgggtaccttcgtaccggtgtccc

SEQ ID NO: 101520 - DNA, 25 bp, Homo sapien
tcgggtaccttcctaccggtgtccc

SEQ ID NO: 101521 - DNA, 25 bp, Homo sapien
cggagatggtcaaccgtctgtcggc

SEQ ID NO: 101522 - DNA, 25 bp, Homo sapien
cggagatggtcatccgtctgtcggc

SEQ ID NO: 101523 - DNA, 25 bp, Homo sapien
gtgaaattctacctgtataacaagt

SEQ ID NO: 101524 - DNA, 25 bp, Homo sapien
gtgaaattctacgtgtataacaagt

SEQ ID NO: 101525 - DNA, 25 bp, Homo sapien
gtggaatattgtccagagtaaacac

SEQ ID NO: 101526 - DNA, 25 bp, Homo sapien
gtggaatattgtgcagagtaaacac

SEQ ID NO: 101527 - DNA, 25 bp, Homo sapien
gtgactttatcgttccgagggagaa

SEQ ID NO: 101528 - DNA, 25 bp, Homo sapien
gtgactttatcgatccgagggagaa

SEQ ID NO: 101529 - DNA, 25 bp, Homo sapien
cgggaggtcatctcccgcgtgagaa

SEQ ID NO: 101530 - DNA, 25 bp, Homo sapien
cgggaggtcatcacccgcgtgagaa

SEQ ID NO: 101531 - DNA, 25 bp, Homo sapien
cgccgaggccgaaagccatttcacg

SEQ ID NO: 101532 - DNA, 25 bp, Homo sapien
cgccgaggccgatagccatttcacg

SEQ ID NO: 101533 - DNA, 25 bp, Homo sapien
acgacaggtcagaagccgtttttag

SEQ ID NO: 101534 - DNA, 25 bp, Homo sapien
acgacaggtcagtagccgtttttag

SEQ ID NO: 101535 - DNA, 25 bp, Homo sapien
caacggataaaaggactacctttat

SEQ ID NO: 101536 - DNA, 25 bp, Homo sapien
caacggataaaacgactacctttat

SEQ ID NO: 101537 - DNA, 25 bp, Homo sapien
taagttccaatacgaaacgacaagt

SEQ ID NO: 101538 - DNA, 25 bp, Homo sapien
taagttccaataggaaacgacaagt

SEQ ID NO: 101539 - DNA, 25 bp, Homo sapien
gagtgtcgtcccaaaagtaagacca

SEQ ID NO: 101540 - DNA, 25 bp, Homo sapien
gagtgtcgtccctaaagtaagacca

SEQ ID NO: 101541 - DNA, 25 bp, Homo sapien
tgaagactacccaaaagttatgcga

SEQ ID NO: 101542 - DNA, 25 bp, Homo sapien
tgaagactaccctaaagttatgcga

SEQ ID NO: 101543 - DNA, 25 bp, Homo sapien
aaaacagaccaaagagactttgctg

SEQ ID NO: 101544 - DNA, 25 bp, Homo sapien
aaaacagaccaatgagactttgctg

SEQ ID NO: 101545 - DNA, 25 bp, Homo sapien
ggacaaaaccgttcgaaagcctttg

SEQ ID NO: 101546 - DNA, 25 bp, Homo sapien
ggacaaaaccgtacgaaagcctttg

SEQ ID NO: 101547 - DNA, 25 bp, Homo sapien
ggaggacaccgacacaaatctttcg

SEQ ID NO: 101548 - DNA, 25 bp, Homo sapien
ggaggacaccgagacaaatctttcg

SEQ ID NO: 101549 - DNA, 25 bp, Homo sapien
cgagaaacccccatgcatcggtagg

SEQ ID NO: 101550 - DNA, 25 bp, Homo sapien
cgagaaacccccttgcatcggtagg

SEQ ID NO: 101551 - DNA, 25 bp, Homo sapien
acactacctccgtcggtccgtctgg

SEQ ID NO: 101552 - DNA, 25 bp, Homo sapien
acactacctccgacggtccgtctgg

SEQ ID NO: 101553 - DNA, 25 bp, Homo sapien
ttgggtccttcctcgggtcctgccg

SEQ ID NO: 101554 - DNA, 25 bp, Homo sapien
ttgggtccttccacgggtcctgccg

SEQ ID NO: 101555 - DNA, 25 bp, Homo sapien
gtcactctccagtcggggctgtgtc

SEQ ID NO: 101556 - DNA, 25 bp, Homo sapien
gtcactctccagacggggctgtgtc

SEQ ID NO: 101557 - DNA, 25 bp, Homo sapien
cgaccagacagaagaccaggtgtga

SEQ ID NO: 101558 - DNA, 25 bp, Homo sapien
cgaccagacagatgaccaggtgtga

SEQ ID NO: 101559 - DNA, 25 bp, Homo sapien
tggttactacgaagacacgtgttac

SEQ ID NO: 101560 - DNA, 25 bp, Homo sapien
tggttactacgatgacacgtgttac

SEQ ID NO: 101561 - DNA, 25 bp, Homo sapien
cacgtacgtgtcgtcgtacatgaag

SEQ ID NO: 101562 - DNA, 25 bp, Homo sapien
cacgtacgtgtcctcgtacatgaag

SEQ ID NO: 101563 - DNA, 25 bp, Homo sapien
ggtgtcgtacaaattcccttacaat

SEQ ID NO: 101564 - DNA, 25 bp, Homo sapien
ggtgtcgtacaatttcccttacaat

SEQ ID NO: 101565 - DNA, 25 bp, Homo sapien
agtgtggtactttcggggcttcatt

SEQ ID NO: 101566 - DNA, 25 bp, Homo sapien
agtgtggtacttacggggcttcatt

SEQ ID NO: 101567 - DNA, 25 bp, Homo sapien
tataagatgttaggaccggaaactc

SEQ ID NO: 101568 - DNA, 25 bp, Homo sapien
tataagatgttacgaccggaaactc

SEQ ID NO: 101569 - DNA, 25 bp, Homo sapien
aacgagatttaacgtacagaaactt

SEQ ID NO: 101570 - DNA, 25 bp, Homo sapien
aacgagatttaaggtacagaaactt

SEQ ID NO: 101571 - DNA, 25 bp, Homo sapien
gataagggtctcagaggtcaaaacc

SEQ ID NO: 101572 - DNA, 25 bp, Homo sapien
gataagggtctctgaggtcaaaacc

SEQ ID NO: 101573 - DNA, 25 bp, Homo sapien
ggacaacgtttaagagtaccaaacc

SEQ ID NO: 101574 - DNA, 25 bp, Homo sapien
ggacaacgtttatgagtaccaaacc

SEQ ID NO: 101575 - DNA, 25 bp, Homo sapien
ggtaatgagagtacatacaacaccc

SEQ ID NO: 101576 - DNA, 25 bp, Homo sapien
ggtaatgagagttcatacaacaccc

SEQ ID NO: 101577 - DNA, 25 bp, Homo sapien
tgaacaggatattagtaggacccta

SEQ ID NO: 101578 - DNA, 25 bp, Homo sapien
tgaacaggatataagtaggacccta

SEQ ID NO: 101579 - DNA, 25 bp, Homo sapien
ttaccgagagtgtcgtaacgggcaa

SEQ ID NO: 101580 - DNA, 25 bp, Homo sapien
ttaccgagagtgacgtaacgggcaa

SEQ ID NO: 101581 - DNA, 25 bp, Homo sapien
tctctaaggggttagacgtagcaaa

SEQ ID NO: 101582 - DNA, 25 bp, Homo sapien
tctctaaggggtaagacgtagcaaa

SEQ ID NO: 101583 - DNA, 25 bp, Homo sapien
tggagacggccgaaccgtgccaccg

SEQ ID NO: 101584 - DNA, 25 bp, Homo sapien
tggagacggccgtaccgtgccaccg

SEQ ID NO: 101585 - DNA, 25 bp, Homo sapien
ggccgacggtccggccgggactccg

SEQ ID NO: 101586 - DNA, 25 bp, Homo sapien
ggccgacggtcccgccgggactccg

SEQ ID NO: 101587 - DNA, 25 bp, Homo sapien
agcggggtaccgtccgctgaacgtc

SEQ ID NO: 101588 - DNA, 25 bp, Homo sapien
agcggggtaccgaccgctgaacgtc

SEQ ID NO: 101589 - DNA, 25 bp, Homo sapien
gggacagacaggacgaccgtcacag

SEQ ID NO: 101590 - DNA, 25 bp, Homo sapien
gggacagacaggtcgaccgtcacag

SEQ ID NO: 101591 - DNA, 25 bp, Homo sapien
cccggagccagacaccgaatcttga

SEQ ID NO: 101592 - DNA, 25 bp, Homo sapien
cccggagccagagaccgaatcttga

SEQ ID NO: 101593 - DNA, 25 bp, Homo sapien
ccggagagaccctatcttcaataag

SEQ ID NO: 101594 - DNA, 25 bp, Homo sapien
ccggagagacccaatcttcaataag

SEQ ID NO: 101595 - DNA, 25 bp, Homo sapien
gaaggacctcagttcttattgatac

SEQ ID NO: 101596 - DNA, 25 bp, Homo sapien
gaaggacctcagatcttattgatac

SEQ ID NO: 101597 - DNA, 25 bp, Homo sapien
aaagaggaagtgaagactcaggacc

SEQ ID NO: 101598 - DNA, 25 bp, Homo sapien
aaagaggaagtgtagactcaggacc

SEQ ID NO: 101599 - DNA, 25 bp, Homo sapien
gaaggagtccggagcataggtactc

SEQ ID NO: 101600 - DNA, 25 bp, Homo sapien
gaaggagtccggtgcataggtactc

SEQ ID NO: 101601 - DNA, 25 bp, Homo sapien
gagcgtgggccgagtccacactcct

SEQ ID NO: 101602 - DNA, 25 bp, Homo sapien
gagcgtgggccgtgtccacactcct

SEQ ID NO: 101603 - DNA, 25 bp, Homo sapien
ggttccgcggcgtaccgcgagtcct

SEQ ID NO: 101604 - DNA, 25 bp, Homo sapien
ggttccgcggcgaaccgcgagtcct

SEQ ID NO: 101605 - DNA, 25 bp, Homo sapien
acgggtttctgaaagacccggaaga

SEQ ID NO: 101606 - DNA, 25 bp, Homo sapien
acgggtttctgatagacccggaaga

SEQ ID NO: 101607 - DNA, 25 bp, Homo sapien
aatgttttggttgacctttacagac

SEQ ID NO: 101608 - DNA, 25 bp, Homo sapien
aatgttttggttcacctttacagac

SEQ ID NO: 101609 - DNA, 25 bp, Homo sapien
gtaacttgcgtgaccgcttcactac

SEQ ID NO: 101610 - DNA, 25 bp, Homo sapien
gtaacttgcgtgtccgcttcactac

SEQ ID NO: 101611 - DNA, 25 bp, Homo sapien
acgaatgagattcacctttagtcct

SEQ ID NO: 101612 - DNA, 25 bp, Homo sapien
acgaatgagattgacctttagtcct

SEQ ID NO: 101613 - DNA, 25 bp, Homo sapien
acaagtaaggtttctctcgaaaact

SEQ ID NO: 101614 - DNA, 25 bp, Homo sapien
acaagtaaggttactctcgaaaact

SEQ ID NO: 101615 - DNA, 25 bp, Homo sapien
agttgacctatgacgtctccataat

SEQ ID NO: 101616 - DNA, 25 bp, Homo sapien
agttgacctatgtcgtctccataat

SEQ ID NO: 101617 - DNA, 25 bp, Homo sapien
gtgatttccttgtcgtcctaccaat

SEQ ID NO: 101618 - DNA, 25 bp, Homo sapien
gtgatttccttgacgtcctaccaat

SEQ ID NO: 101619 - DNA, 25 bp, Homo sapien
ggggtatcaactccaacgtctccaa

SEQ ID NO: 101620 - DNA, 25 bp, Homo sapien
ggggtatcaactgcaacgtctccaa

SEQ ID NO: 101621 - DNA, 25 bp, Homo sapien
gggtccgaacctcagacgtcccaac

SEQ ID NO: 101622 - DNA, 25 bp, Homo sapien
gggtccgaacctgagacgtcccaac

SEQ ID NO: 101623 - DNA, 25 bp, Homo sapien
gtggacttcccgacgagtcccgttc

SEQ ID NO: 101624 - DNA, 25 bp, Homo sapien
gtggacttcccgtcgagtcccgttc

SEQ ID NO: 101625 - DNA, 25 bp, Homo sapien
tcgaggaatctatgccgttcccatc

SEQ ID NO: 101626 - DNA, 25 bp, Homo sapien
tcgaggaatctaagccgttcccatc

SEQ ID NO: 101627 - DNA, 25 bp, Homo sapien
cggtggttcttatctttttaccata

SEQ ID NO: 101628 - DNA, 25 bp, Homo sapien
cggtggttcttaactttttaccata

SEQ ID NO: 101629 - DNA, 25 bp, Homo sapien
gtatttagtgaattttactctgacc

SEQ ID NO: 101630 - DNA, 25 bp, Homo sapien
gtatttagtgaaatttactctgacc

SEQ ID NO: 101631 - DNA, 25 bp, Homo sapien
agggattgagacaatactttttacc

SEQ ID NO: 101632 - DNA, 25 bp, Homo sapien
agggattgagactatactttttacc

SEQ ID NO: 101633 - DNA, 25 bp, Homo sapien
ccgactgagaattacacctttgttc

SEQ ID NO: 101634 - DNA, 25 bp, Homo sapien
ccgactgagaataacacctttgttc

SEQ ID NO: 101635 - DNA, 25 bp, Homo sapien
gtgcacgaggtgaacactttttagt

SEQ ID NO: 101636 - DNA, 25 bp, Homo sapien
gtgcacgaggtgtacactttttagt

SEQ ID NO: 101637 - DNA, 25 bp, Homo sapien
cttggtaagcgtttacactttttgt

SEQ ID NO: 101638 - DNA, 25 bp, Homo sapien
cttggtaagcgtatacactttttgt

SEQ ID NO: 101639 - DNA, 25 bp, Homo sapien
gggttgtaaaacacaaatactcttt

SEQ ID NO: 101640 - DNA, 25 bp, Homo sapien
gggttgtaaaactcaaatactcttt

SEQ ID NO: 101641 - DNA, 25 bp, Homo sapien
gtcggggaaaagtccggattcttgt

SEQ ID NO: 101642 - DNA, 25 bp, Homo sapien
gtcggggaaaagaccggattcttgt

SEQ ID NO: 101643 - DNA, 25 bp, Homo sapien
cacaggaaaataaccccgtgttata

SEQ ID NO: 101644 - DNA, 25 bp, Homo sapien
cacaggaaaatatccccgtgttata

SEQ ID NO: 101645 - DNA, 25 bp, Homo sapien
agccggtcgaagagcccccggtgtt

SEQ ID NO: 101646 - DNA, 25 bp, Homo sapien
agccggtcgaagtgcccccggtgtt

SEQ ID NO: 101647 - DNA, 25 bp, Homo sapien
ccggagcagaagtgaaccccagggt

SEQ ID NO: 101648 - DNA, 25 bp, Homo sapien
ccggagcagaagagaaccccagggt

SEQ ID NO: 101649 - DNA, 25 bp, Homo sapien
cgcagagaccaaagcgagacctcct

SEQ ID NO: 101650 - DNA, 25 bp, Homo sapien
cgcagagaccaatgcgagacctcct

SEQ ID NO: 101651 - DNA, 25 bp, Homo sapien
ggaggcgtaccgtccagtctcccgt

SEQ ID NO: 101652 - DNA, 25 bp, Homo sapien
ggaggcgtaccgaccagtctcccgt

SEQ ID NO: 101653 - DNA, 25 bp, Homo sapien
tgtgaatcacaaacaagttactcag

SEQ ID NO: 101654 - DNA, 25 bp, Homo sapien
tgtgaatcacaatcaagttactcag

SEQ ID NO: 101655 - DNA, 25 bp, Homo sapien
ttatacaatgactcagagaactcag

SEQ ID NO: 101656 - DNA, 25 bp, Homo sapien
ttatacaatgacacagagaactcag

SEQ ID NO: 101657 - DNA, 25 bp, Homo sapien
tttacaagttacgatatgactcatg

SEQ ID NO: 101658 - DNA, 25 bp, Homo sapien
tttacaagttaccatatgactcatg

SEQ ID NO: 101659 - DNA, 25 bp, Homo sapien
ttacacagtcacgtctggactctgg

SEQ ID NO: 101660 - DNA, 25 bp, Homo sapien
ttacacagtcacctctggactctgg

SEQ ID NO: 101661 - DNA, 25 bp, Homo sapien
gtctctacccatgtgtcactccgtg

SEQ ID NO: 101662 - DNA, 25 bp, Homo sapien
gtctctacccatctgtcactccgtg

SEQ ID NO: 101663 - DNA, 25 bp, Homo sapien
gccgggaccgcgagtacctgcacga

SEQ ID NO: 101664 - DNA, 25 bp, Homo sapien
gccgggaccgcgtgtacctgcacga

SEQ ID NO: 101665 - DNA, 25 bp, Homo sapien
tgagaccgtacataccgtacccagt

SEQ ID NO: 101666 - DNA, 25 bp, Homo sapien
tgagaccgtacaaaccgtacccagt

SEQ ID NO: 101667 - DNA, 25 bp, Homo sapien
cgatgggtacacgagaaccacccat

SEQ ID NO: 101668 - DNA, 25 bp, Homo sapien
cgatgggtacaccagaaccacccat

SEQ ID NO: 101669 - DNA, 25 bp, Homo sapien
acttatacagtgagaattatctcta

SEQ ID NO: 101670 - DNA, 25 bp, Homo sapien
acttatacagtgtgaattatctcta

SEQ ID NO: 101671 - DNA, 25 bp, Homo sapien
gatgtaaacagagacacttgaacta

SEQ ID NO: 101672 - DNA, 25 bp, Homo sapien
gatgtaaacagacacacttgaacta

SEQ ID NO: 101673 - DNA, 25 bp, Homo sapien
aataatactagaaggctcacaacag

SEQ ID NO: 101674 - DNA, 25 bp, Homo sapien
aataatactagatggctcacaacag

SEQ ID NO: 101675 - DNA, 25 bp, Homo sapien
ttcagactctcttcaagtatcagtg

SEQ ID NO: 101676 - DNA, 25 bp, Homo sapien
ttcagactctctacaagtatcagtg

SEQ ID NO: 101677 - DNA, 25 bp, Homo sapien
ctttccgaccggtccctataagtgt

SEQ ID NO: 101678 - DNA, 25 bp, Homo sapien
ctttccgaccggaccctataagtgt

SEQ ID NO: 101679 - DNA, 25 bp, Homo sapien
caggggagttctaagagtgtccccg

SEQ ID NO: 101680 - DNA, 25 bp, Homo sapien
caggggagttcttagagtgtccccg

SEQ ID NO: 101681 - DNA, 25 bp, Homo sapien
accgagaggagtctgtgaagtcccc

SEQ ID NO: 101682 - DNA, 25 bp, Homo sapien
accgagaggagtgtgtgaagtcccc

SEQ ID NO: 101683 - DNA, 25 bp, Homo sapien
aagaaggaggtctatgaatgactcc

SEQ ID NO: 101684 - DNA, 25 bp, Homo sapien
aagaaggaggtcaatgaatgactcc

SEQ ID NO: 101685 - DNA, 25 bp, Homo sapien
aaacagaaggttctgatattctacc

SEQ ID NO: 101686 - DNA, 25 bp, Homo sapien
aaacagaaggttgtgatattctacc

SEQ ID NO: 101687 - DNA, 25 bp, Homo sapien
acggaaagaagaggaggtctctatc

SEQ ID NO: 101688 - DNA, 25 bp, Homo sapien
acggaaagaagacgaggtctctatc

SEQ ID NO: 101689 - DNA, 25 bp, Homo sapien
ccgaaaattacaaacactgtaagag

SEQ ID NO: 101690 - DNA, 25 bp, Homo sapien
ccgaaaattacatacactgtaagag

SEQ ID NO: 101691 - DNA, 25 bp, Homo sapien
ggtgataattcagacgtaagaccta

SEQ ID NO: 101692 - DNA, 25 bp, Homo sapien
ggtgataattcacacgtaagaccta

SEQ ID NO: 101693 - DNA, 25 bp, Homo sapien
gagttcatattcaccagaaaccgtt

SEQ ID NO: 101694 - DNA, 25 bp, Homo sapien
gagttcatattctccagaaaccgtt

SEQ ID NO: 101695 - DNA, 25 bp, Homo sapien
cgagagatctatcgacacaaatctt

SEQ ID NO: 101696 - DNA, 25 bp, Homo sapien
cgagagatctatggacacaaatctt

SEQ ID NO: 101697 - DNA, 25 bp, Homo sapien
cgagggagttttgactaaggtccca

SEQ ID NO: 101698 - DNA, 25 bp, Homo sapien
cgagggagttttcactaaggtccca

SEQ ID NO: 101699 - DNA, 25 bp, Homo sapien
agaccgatacctttcccggcatcta

SEQ ID NO: 101700 - DNA, 25 bp, Homo sapien
agaccgatacctatcccggcatcta

SEQ ID NO: 101701 - DNA, 25 bp, Homo sapien
cagtctccttttaccctagtcccta

SEQ ID NO: 101702 - DNA, 25 bp, Homo sapien
cagtctcctttttccctagtcccta

SEQ ID NO: 101703 - DNA, 25 bp, Homo sapien
agtttaccgtcgtctccttagggcc

SEQ ID NO: 101704 - DNA, 25 bp, Homo sapien
agtttaccgtcgactccttagggcc

SEQ ID NO: 101705 - DNA, 25 bp, Homo sapien
gtgtcccgtccacactaccgggggt

SEQ ID NO: 101706 - DNA, 25 bp, Homo sapien
gtgtcccgtccagactaccgggggt

SEQ ID NO: 101707 - DNA, 25 bp, Homo sapien
gtcaccgggagtgatctcagtggtt

SEQ ID NO: 101708 - DNA, 25 bp, Homo sapien
gtcaccgggagtcatctcagtggtt

SEQ ID NO: 101709 - DNA, 25 bp, Homo sapien
cggtcaccgtcgagaagccctgggt

SEQ ID NO: 101710 - DNA, 25 bp, Homo sapien
cggtcaccgtcgtgaagccctgggt

SEQ ID NO: 101711 - DNA, 25 bp, Homo sapien
ctgtcgatccttaatgcaccccgtc

SEQ ID NO: 101712 - DNA, 25 bp, Homo sapien
ctgtcgatcctttatgcaccccgtc

SEQ ID NO: 101713 - DNA, 25 bp, Homo sapien
tggtcactcctaaggtgccacaacc

SEQ ID NO: 101714 - DNA, 25 bp, Homo sapien
tggtcactcctatggtgccacaacc

SEQ ID NO: 101715 - DNA, 25 bp, Homo sapien
cagtgagactcatgacaccacacct

SEQ ID NO: 101716 - DNA, 25 bp, Homo sapien
cagtgagactcaagacaccacacct

SEQ ID NO: 101717 - DNA, 25 bp, Homo sapien
acccgaactcgttatcggagtccat

SEQ ID NO: 101718 - DNA, 25 bp, Homo sapien
acccgaactcgtaatcggagtccat

SEQ ID NO: 101719 - DNA, 25 bp, Homo sapien
tccctgaaggtagactcgaaccctc

SEQ ID NO: 101720 - DNA, 25 bp, Homo sapien
tccctgaaggtacactcgaaccctc

SEQ ID NO: 101721 - DNA, 25 bp, Homo sapien
ccggattagatcctgactaccctct

SEQ ID NO: 101722 - DNA, 25 bp, Homo sapien
ccggattagatcgtgactaccctct

SEQ ID NO: 101723 - DNA, 25 bp, Homo sapien
tgagtcatcggtcaacttccttagt

SEQ ID NO: 101724 - DNA, 25 bp, Homo sapien
tgagtcatcggtgaacttccttagt

SEQ ID NO: 101725 - DNA, 25 bp, Homo sapien
taagtctcttcatgagactttctcg

SEQ ID NO: 101726 - DNA, 25 bp, Homo sapien
taagtctcttcaagagactttctcg

SEQ ID NO: 101727 - DNA, 25 bp, Homo sapien
atggtcgtaactttgtcacgttttt

SEQ ID NO: 101728 - DNA, 25 bp, Homo sapien
atggtcgtaactatgtcacgttttt

SEQ ID NO: 101729 - DNA, 25 bp, Homo sapien
gtacggtcgtattctcgggtctgtg

SEQ ID NO: 101730 - DNA, 25 bp, Homo sapien
gtacggtcgtatactcgggtctgtg

SEQ ID NO: 101731 - DNA, 25 bp, Homo sapien
tgacgagacttcagacgggtcacat

SEQ ID NO: 101732 - DNA, 25 bp, Homo sapien
tgacgagacttctgacgggtcacat

SEQ ID NO: 101733 - DNA, 25 bp, Homo sapien
agagacaaccacagtcggaacagac

SEQ ID NO: 101734 - DNA, 25 bp, Homo sapien
agagacaaccactgtcggaacagac

SEQ ID NO: 101735 - DNA, 25 bp, Homo sapien
cacggaaacgggaactcgagacaag

SEQ ID NO: 101736 - DNA, 25 bp, Homo sapien
cacggaaacgggtactcgagacaag

SEQ ID NO: 101737 - DNA, 25 bp, Homo sapien
gtcgtggcagtcctcgtccgggcac

SEQ ID NO: 101738 - DNA, 25 bp, Homo sapien
gtcgtggcagtcgtcgtccgggcac

SEQ ID NO: 101739 - DNA, 25 bp, Homo sapien
gattttggaattcgtcctaagacct

SEQ ID NO: 101740 - DNA, 25 bp, Homo sapien
gattttggaattggtcctaagacct

SEQ ID NO: 101741 - DNA, 25 bp, Homo sapien
ttttagagtttcgtgtccaggacga

SEQ ID NO: 101742 - DNA, 25 bp, Homo sapien
ttttagagtttcctgtccaggacga

SEQ ID NO: 101743 - DNA, 25 bp, Homo sapien
atttgagtaggtggttcctcgggtc

SEQ ID NO: 101744 - DNA, 25 bp, Homo sapien
atttgagtaggtcgttcctcgggtc

SEQ ID NO: 101745 - DNA, 25 bp, Homo sapien
taaagaatcgtagtctccagtattt

SEQ ID NO: 101746 - DNA, 25 bp, Homo sapien
taaagaatcgtactctccagtattt

SEQ ID NO: 101747 - DNA, 25 bp, Homo sapien
aggacaaaaccgttcgaaagccttt

SEQ ID NO: 101748 - DNA, 25 bp, Homo sapien
aggacaaaaccgatcgaaagccttt

SEQ ID NO: 101749 - DNA, 25 bp, Homo sapien
cggagaaaagaagtcgcagagcaaa

SEQ ID NO: 101750 - DNA, 25 bp, Homo sapien
cggagaaaagaactcgcagagcaaa

SEQ ID NO: 101751 - DNA, 25 bp, Homo sapien
gactgaacatagaaaacccatggaa

SEQ ID NO: 101752 - DNA, 25 bp, Homo sapien
gactgaacatagtaaacccatggaa

SEQ ID NO: 101753 - DNA, 25 bp, Homo sapien
catattgactatcttctgtgaggac

SEQ ID NO: 101754 - DNA, 25 bp, Homo sapien
catattgactatgttctgtgaggac

SEQ ID NO: 101755 - DNA, 25 bp, Homo sapien
gatacttgctctcattcttccaggt

SEQ ID NO: 101756 - DNA, 25 bp, Homo sapien
gatacttgctctgattcttccaggt

SEQ ID NO: 101757 - DNA, 25 bp, Homo sapien
gaatgggtcggaaccgtctccacgg

SEQ ID NO: 101758 - DNA, 25 bp, Homo sapien
gaatgggtcggatccgtctccacgg

SEQ ID NO: 101759 - DNA, 25 bp, Homo sapien
acatggtcctcgtcgtcgcgccggt

SEQ ID NO: 101760 - DNA, 25 bp, Homo sapien
acatggtcctcgacgtcgcgccggt

SEQ ID NO: 101761 - DNA, 25 bp, Homo sapien
ccgctcacatcccgaccgcgacggc

SEQ ID NO: 101762 - DNA, 25 bp, Homo sapien
ccgctcacatccggaccgcgacggc

SEQ ID NO: 101763 - DNA, 25 bp, Homo sapien
caggaccggtcctcaagaaccggaa

SEQ ID NO: 101764 - DNA, 25 bp, Homo sapien
caggaccggtccacaagaaccggaa

SEQ ID NO: 101765 - DNA, 25 bp, Homo sapien
cacagtccttcaaacacctaggcga

SEQ ID NO: 101766 - DNA, 25 bp, Homo sapien
cacagtccttcatacacctaggcga

SEQ ID NO: 101767 - DNA, 25 bp, Homo sapien
cgaagtgacttcattacccccgaca

SEQ ID NO: 101768 - DNA, 25 bp, Homo sapien
cgaagtgacttctttacccccgaca

SEQ ID NO: 101769 - DNA, 25 bp, Homo sapien
tcgaagagatcctacccgaactgaa

SEQ ID NO: 101770 - DNA, 25 bp, Homo sapien
tcgaagagatccaacccgaactgaa

SEQ ID NO: 101771 - DNA, 25 bp, Homo sapien
gttaatggaccaagatgaatcctag

SEQ ID NO: 101772 - DNA, 25 bp, Homo sapien
gttaatggaccatgatgaatcctag

SEQ ID NO: 101773 - DNA, 25 bp, Homo sapien
gtctgggacccagtgacttcgacta

SEQ ID NO: 101774 - DNA, 25 bp, Homo sapien
gtctgggacccactgacttcgacta

SEQ ID NO: 101775 - DNA, 25 bp, Homo sapien
gttgtcccgactcattaagttcaac

SEQ ID NO: 101776 - DNA, 25 bp, Homo sapien
gttgtcccgactgattaagttcaac

SEQ ID NO: 101777 - DNA, 25 bp, Homo sapien
aagacaggcgagtcatccggcacaa

SEQ ID NO: 101778 - DNA, 25 bp, Homo sapien
aagacaggcgagacatccggcacaa

SEQ ID NO: 101779 - DNA, 25 bp, Homo sapien
taacgggtattatgactatccgaaa

SEQ ID NO: 101780 - DNA, 25 bp, Homo sapien
taacgggtattaagactatccgaaa

SEQ ID NO: 101781 - DNA, 25 bp, Homo sapien
acgattggtcatgacttcccgaaca

SEQ ID NO: 101782 - DNA, 25 bp, Homo sapien
acgattggtcatcacttcccgaaca

SEQ ID NO: 101783 - DNA, 25 bp, Homo sapien
ttactgttgccaaacctccctggag

SEQ ID NO: 101784 - DNA, 25 bp, Homo sapien
ttactgttgccatacctccctggag

SEQ ID NO: 101785 - DNA, 25 bp, Homo sapien
tgacgtaggacacttctccaccggg

SEQ ID NO: 101786 - DNA, 25 bp, Homo sapien
tgacgtaggacagttctccaccggg

SEQ ID NO: 101787 - DNA, 25 bp, Homo sapien
tcgacgtgccctggtttcaccgatc

SEQ ID NO: 101788 - DNA, 25 bp, Homo sapien
tcgacgtgccctcgtttcaccgatc

SEQ ID NO: 101789 - DNA, 25 bp, Homo sapien
cagtagcactacgactcttcaaagc

SEQ ID NO: 101790 - DNA, 25 bp, Homo sapien
cagtagcactaccactcttcaaagc

SEQ ID NO: 101791 - DNA, 25 bp, Homo sapien
tcgctctcctagaatagcaacgact

SEQ ID NO: 101792 - DNA, 25 bp, Homo sapien
tcgctctcctagtatagcaacgact

SEQ ID NO: 101793 - DNA, 25 bp, Homo sapien
gattctatttacgtctagactgaca

SEQ ID NO: 101794 - DNA, 25 bp, Homo sapien
gattctatttacctctagactgaca

SEQ ID NO: 101795 - DNA, 25 bp, Homo sapien
ttgtctttatacctcgaagtgtata

SEQ ID NO: 101796 - DNA, 25 bp, Homo sapien
ttgtctttatacgtcgaagtgtata

SEQ ID NO: 101797 - DNA, 25 bp, Homo sapien
ctaggtttccgtccacataagtaga

SEQ ID NO: 101798 - DNA, 25 bp, Homo sapien
ctaggtttccgtgcacataagtaga

SEQ ID NO: 101799 - DNA, 25 bp, Homo sapien
cacttctcgactccacagagtgaag

SEQ ID NO: 101800 - DNA, 25 bp, Homo sapien
cacttctcgactgcacagagtgaag

SEQ ID NO: 101801 - DNA, 25 bp, Homo sapien
cccggtaccgttctaccgtcgaaga

SEQ ID NO: 101802 - DNA, 25 bp, Homo sapien
cccggtaccgttgtaccgtcgaaga

SEQ ID NO: 101803 - DNA, 25 bp, Homo sapien
accgggaccgctctcggagaagacg

SEQ ID NO: 101804 - DNA, 25 bp, Homo sapien
accgggaccgctgtcggagaagacg

SEQ ID NO: 101805 - DNA, 25 bp, Homo sapien
ctagaacggggtcctctgtcggagc

SEQ ID NO: 101806 - DNA, 25 bp, Homo sapien
ctagaacggggtgctctgtcggagc

SEQ ID NO: 101807 - DNA, 25 bp, Homo sapien
cgaaaacggcggttcctcctgtcac

SEQ ID NO: 101808 - DNA, 25 bp, Homo sapien
cgaaaacggcggatcctcctgtcac

SEQ ID NO: 101809 - DNA, 25 bp, Homo sapien
gggaaaccatattcactctgggcac

SEQ ID NO: 101810 - DNA, 25 bp, Homo sapien
gggaaaccatatacactctgggcac

SEQ ID NO: 101811 - DNA, 25 bp, Homo sapien
ggaagtgctattgacacgcagggaa

SEQ ID NO: 101812 - DNA, 25 bp, Homo sapien
ggaagtgctattcacacgcagggaa

SEQ ID NO: 101813 - DNA, 25 bp, Homo sapien
atggggaaccgtagtccaggagacc

SEQ ID NO: 101814 - DNA, 25 bp, Homo sapien
atggggaaccgttgtccaggagacc

SEQ ID NO: 101815 - DNA, 25 bp, Homo sapien
tagtcacccgtgttctactcgaacc

SEQ ID NO: 101816 - DNA, 25 bp, Homo sapien
tagtcacccgtgatctactcgaacc

SEQ ID NO: 101817 - DNA, 25 bp, Homo sapien
ctcttcctcctttcacgtggtacag

SEQ ID NO: 101818 - DNA, 25 bp, Homo sapien
ctcttcctccttacacgtggtacag

SEQ ID NO: 101819 - DNA, 25 bp, Homo sapien
tcctcggtggtcaccgcgttctcgt

SEQ ID NO: 101820 - DNA, 25 bp, Homo sapien
tcctcggtggtctccgcgttctcgt

SEQ ID NO: 101821 - DNA, 25 bp, Homo sapien
cacttagttgtctcgtacgatggtg

SEQ ID NO: 101822 - DNA, 25 bp, Homo sapien
cacttagttgtcacgtacgatggtg

SEQ ID NO: 101823 - DNA, 25 bp, Homo sapien
tctcgatagttaacccactagagcc

SEQ ID NO: 101824 - DNA, 25 bp, Homo sapien
tctcgatagttatcccactagagcc

SEQ ID NO: 101825 - DNA, 25 bp, Homo sapien
gttgggtatccgtgactagagtctg

SEQ ID NO: 101826 - DNA, 25 bp, Homo sapien
gttgggtatccgagactagagtctg

SEQ ID NO: 101827 - DNA, 25 bp, Homo sapien
acgttgtccgggtgtccaaacattg

SEQ ID NO: 101828 - DNA, 25 bp, Homo sapien
acgttgtccgggagtccaaacattg

SEQ ID NO: 101829 - DNA, 25 bp, Homo sapien
aggtgcaaggtctacaaaacccgta

SEQ ID NO: 101830 - DNA, 25 bp, Homo sapien
aggtgcaaggtcaacaaaacccgta

SEQ ID NO: 101831 - DNA, 25 bp, Homo sapien
agccaatagtcgacccgagcccagt

SEQ ID NO: 101832 - DNA, 25 bp, Homo sapien
agccaatagtcgtcccgagcccagt

SEQ ID NO: 101833 - DNA, 25 bp, Homo sapien
gagccattgatttcagaacctcgta

SEQ ID NO: 101834 - DNA, 25 bp, Homo sapien
gagccattgattacagaacctcgta

SEQ ID NO: 101835 - DNA, 25 bp, Homo sapien
atccatttgtgtaaatcagtctcga

SEQ ID NO: 101836 - DNA, 25 bp, Homo sapien
atccatttgtgttaatcagtctcga

SEQ ID NO: 101837 - DNA, 25 bp, Homo sapien
catcccattaattactttcgtcgaa

SEQ ID NO: 101838 - DNA, 25 bp, Homo sapien
catcccattaataactttcgtcgaa

SEQ ID NO: 101839 - DNA, 25 bp, Homo sapien
tccgcccaaaggactcgttcactcc

SEQ ID NO: 101840 - DNA, 25 bp, Homo sapien
tccgcccaaaggtctcgttcactcc

SEQ ID NO: 101841 - DNA, 25 bp, Homo sapien
acgaagaacggtcagtgccactcgt

SEQ ID NO: 101842 - DNA, 25 bp, Homo sapien
acgaagaacggtgagtgccactcgt

SEQ ID NO: 101843 - DNA, 25 bp, Homo sapien
cttaagtggaacgtcgagttcccat

SEQ ID NO: 101844 - DNA, 25 bp, Homo sapien
cttaagtggaacctcgagttcccat

SEQ ID NO: 101845 - DNA, 25 bp, Homo sapien
gtaagtccactaagctagtttaata

SEQ ID NO: 101846 - DNA, 25 bp, Homo sapien
gtaagtccactatgctagtttaata

SEQ ID NO: 101847 - DNA, 25 bp, Homo sapien
taccctgacaacatgtgtgaactat

SEQ ID NO: 101848 - DNA, 25 bp, Homo sapien
taccctgacaacttgtgtgaactat

SEQ ID NO: 101849 - DNA, 25 bp, Homo sapien
tgactgtgggccttagatggactct

SEQ ID NO: 101850 - DNA, 25 bp, Homo sapien
tgactgtgggccatagatggactct

SEQ ID NO: 101851 - DNA, 25 bp, Homo sapien
tgaccttgagggttctatgacagtc

SEQ ID NO: 101852 - DNA, 25 bp, Homo sapien
tgaccttgagggatctatgacagtc

SEQ ID NO: 101853 - DNA, 25 bp, Homo sapien
gttgtgtcgagggatccttctcgtg

SEQ ID NO: 101854 - DNA, 25 bp, Homo sapien
gttgtgtcgaggcatccttctcgtg

SEQ ID NO: 101855 - DNA, 25 bp, Homo sapien
tgtgattcctgatgtaccctttcgg

SEQ ID NO: 101856 - DNA, 25 bp, Homo sapien
tgtgattcctgaagtaccctttcgg

SEQ ID NO: 101857 - DNA, 25 bp, Homo sapien
cccagtcgtcccttagcacaatgag

SEQ ID NO: 101858 - DNA, 25 bp, Homo sapien
cccagtcgtcccatagcacaatgag

SEQ ID NO: 101859 - DNA, 25 bp, Homo sapien
catgagtgacttcagagtaggcaaa

SEQ ID NO: 101860 - DNA, 25 bp, Homo sapien
catgagtgacttgagagtaggcaaa

SEQ ID NO: 101861 - DNA, 25 bp, Homo sapien
accagagtccgtggaggtcgaaatg

SEQ ID NO: 101862 - DNA, 25 bp, Homo sapien
accagagtccgtcgaggtcgaaatg

SEQ ID NO: 101863 - DNA, 25 bp, Homo sapien
aggtaatatgcacacataaaagtac

SEQ ID NO: 101864 - DNA, 25 bp, Homo sapien
aggtaatatgcagacataaaagtac

SEQ ID NO: 101865 - DNA, 25 bp, Homo sapien
tagaacatccgacgaatagacaaat

SEQ ID NO: 101866 - DNA, 25 bp, Homo sapien
tagaacatccgaggaatagacaaat

SEQ ID NO: 101867 - DNA, 25 bp, Homo sapien
agacagaatccctaaaagaccatgt

SEQ ID NO: 101868 - DNA, 25 bp, Homo sapien
agacagaatcccaaaaagaccatgt

SEQ ID NO: 101869 - DNA, 25 bp, Homo sapien
cgatgtttcccagacacttcttgtg

SEQ ID NO: 101870 - DNA, 25 bp, Homo sapien
cgatgtttcccacacacttcttgtg

SEQ ID NO: 101871 - DNA, 25 bp, Homo sapien
aattgtatacctcaaaattctggtg

SEQ ID NO: 101872 - DNA, 25 bp, Homo sapien
aattgtatacctgaaaattctggtg

SEQ ID NO: 101873 - DNA, 25 bp, Homo sapien
tcagactcggacgagactccgtggg

SEQ ID NO: 101874 - DNA, 25 bp, Homo sapien
tcagactcggaccagactccgtggg

SEQ ID NO: 101875 - DNA, 25 bp, Homo sapien
tcacttctacggtttgcgtcttgaa

SEQ ID NO: 101876 - DNA, 25 bp, Homo sapien
tcacttctacggattgcgtcttgaa

SEQ ID NO: 101877 - DNA, 25 bp, Homo sapien
ttattaccggatggtgtttcgacat

SEQ ID NO: 101878 - DNA, 25 bp, Homo sapien
ttattaccggatcgtgtttcgacat

SEQ ID NO: 101879 - DNA, 25 bp, Homo sapien
ataaataacgtgtattgagtcccag

SEQ ID NO: 101880 - DNA, 25 bp, Homo sapien
ataaataacgtgaattgagtcccag

SEQ ID NO: 101881 - DNA, 25 bp, Homo sapien
gtaaaacctcggaaaatctcacgat

SEQ ID NO: 101882 - DNA, 25 bp, Homo sapien
gtaaaacctcggtaaatctcacgat

SEQ ID NO: 101883 - DNA, 25 bp, Homo sapien
tgggaaataacacacaatttaatgt

SEQ ID NO: 101884 - DNA, 25 bp, Homo sapien
tgggaaataacagacaatttaatgt

SEQ ID NO: 101885 - DNA, 25 bp, Homo sapien
aacgttatcgatcgttctttaccct

SEQ ID NO: 101886 - DNA, 25 bp, Homo sapien
aacgttatcgatggttctttaccct

SEQ ID NO: 101887 - DNA, 25 bp, Homo sapien
aaaagttttagaggttcgtttaccc

SEQ ID NO: 101888 - DNA, 25 bp, Homo sapien
aaaagttttagacgttcgtttaccc

SEQ ID NO: 101889 - DNA, 25 bp, Homo sapien
aacatctctccccttcttagagccg

SEQ ID NO: 101890 - DNA, 25 bp, Homo sapien
aacatctctcccgttcttagagccg

SEQ ID NO: 101891 - DNA, 25 bp, Homo sapien
taattctcattgacttactgtcgac

SEQ ID NO: 101892 - DNA, 25 bp, Homo sapien
taattctcattgtcttactgtcgac

SEQ ID NO: 101893 - DNA, 25 bp, Homo sapien
agtctggtgtcctatggcctcaacc

SEQ ID NO: 101894 - DNA, 25 bp, Homo sapien
agtctggtgtccaatggcctcaacc

SEQ ID NO: 101895 - DNA, 25 bp, Homo sapien
tgggtaccctctaggcttacctccg

SEQ ID NO: 101896 - DNA, 25 bp, Homo sapien
tgggtaccctcttggcttacctccg

SEQ ID NO: 101897 - DNA, 25 bp, Homo sapien
actaccgtttgtggtctcggtactg

SEQ ID NO: 101898 - DNA, 25 bp, Homo sapien
actaccgtttgtcgtctcggtactg

SEQ ID NO: 101899 - DNA, 25 bp, Homo sapien
ctgacgagggcgtcgacgaccaata

SEQ ID NO: 101900 - DNA, 25 bp, Homo sapien
ctgacgagggcgacgacgaccaata

SEQ ID NO: 101901 - DNA, 25 bp, Homo sapien
tctctggacccgacgaaccttcgta

SEQ ID NO: 101902 - DNA, 25 bp, Homo sapien
tctctggacccgtcgaaccttcgta

SEQ ID NO: 101903 - DNA, 25 bp, Homo sapien
atgacggtcaataaaggtcgtacga

SEQ ID NO: 101904 - DNA, 25 bp, Homo sapien
atgacggtcaattaaggtcgtacga

SEQ ID NO: 101905 - DNA, 25 bp, Homo sapien
actggacgaggtcttccgggtccca

SEQ ID NO: 101906 - DNA, 25 bp, Homo sapien
actggacgaggtgttccgggtccca

SEQ ID NO: 101907 - DNA, 25 bp, Homo sapien
acaggacagcggtgacagggacccc

SEQ ID NO: 101908 - DNA, 25 bp, Homo sapien
acaggacagcggagacagggacccc

SEQ ID NO: 101909 - DNA, 25 bp, Homo sapien
gagaccactgaactttacgtcgtta

SEQ ID NO: 101910 - DNA, 25 bp, Homo sapien
gagaccactgaagtttacgtcgtta

SEQ ID NO: 101911 - DNA, 25 bp, Homo sapien
acgggagtaatcaccggaccttcct

SEQ ID NO: 101912 - DNA, 25 bp, Homo sapien
acgggagtaatctccggaccttcct

SEQ ID NO: 101913 - DNA, 25 bp, Homo sapien
ctgagaagaaccatgactgagccca

SEQ ID NO: 101914 - DNA, 25 bp, Homo sapien
ctgagaagaaccttgactgagccca

SEQ ID NO: 101915 - DNA, 25 bp, Homo sapien
aagggaaaaggtctacggaacgcca

SEQ ID NO: 101916 - DNA, 25 bp, Homo sapien
aagggaaaaggtgtacggaacgcca

SEQ ID NO: 101917 - DNA, 25 bp, Homo sapien
ggaactgtcgttaaaggaggccgct

SEQ ID NO: 101918 - DNA, 25 bp, Homo sapien
ggaactgtcgtttaaggaggccgct

SEQ ID NO: 101919 - DNA, 25 bp, Homo sapien
gtcgtctcggtcgtgaactggtccc

SEQ ID NO: 101920 - DNA, 25 bp, Homo sapien
gtcgtctcggtcctgaactggtccc

SEQ ID NO: 101921 - DNA, 25 bp, Homo sapien
gggtactgcgttgctactggcgaat

SEQ ID NO: 101922 - DNA, 25 bp, Homo sapien
gggtactgcgttcctactggcgaat

SEQ ID NO: 101923 - DNA, 25 bp, Homo sapien
tcgactctgacttacagtctttaaa

SEQ ID NO: 101924 - DNA, 25 bp, Homo sapien
tcgactctgactaacagtctttaaa

SEQ ID NO: 101925 - DNA, 25 bp, Homo sapien
acctcagtttggaagttacgcggaa

SEQ ID NO: 101926 - DNA, 25 bp, Homo sapien
acctcagtttggtagttacgcggaa

SEQ ID NO: 101927 - DNA, 25 bp, Homo sapien
tgacatattttgtgtcacctgtaat

SEQ ID NO: 101928 - DNA, 25 bp, Homo sapien
tgacatattttgagtcacctgtaat

SEQ ID NO: 101929 - DNA, 25 bp, Homo sapien
agatacgtatttgtcgacccctagt

SEQ ID NO: 101930 - DNA, 25 bp, Homo sapien
agatacgtatttctcgacccctagt

SEQ ID NO: 101931 - DNA, 25 bp, Homo sapien
gacacagtggttgagacctcgtcag

SEQ ID NO: 101932 - DNA, 25 bp, Homo sapien
gacacagtggttcagacctcgtcag

SEQ ID NO: 101933 - DNA, 25 bp, Homo sapien
acctcgcctacatcgagtcgtacta

SEQ ID NO: 101934 - DNA, 25 bp, Homo sapien
acctcgcctacaacgagtcgtacta

SEQ ID NO: 101935 - DNA, 25 bp, Homo sapien
ggagaactcaaggaggacctccgag

SEQ ID NO: 101936 - DNA, 25 bp, Homo sapien
ggagaactcaagcaggacctccgag

SEQ ID NO: 101937 - DNA, 25 bp, Homo sapien
actgcaggtagaagacggcgtagta

SEQ ID NO: 101938 - DNA, 25 bp, Homo sapien
actgcaggtagatgacggcgtagta

SEQ ID NO: 101939 - DNA, 25 bp, Homo sapien
agtcgagtcatggacagacacgtgt

SEQ ID NO: 101940 - DNA, 25 bp, Homo sapien
agtcgagtcatgcacagacacgtgt

SEQ ID NO: 101941 - DNA, 25 bp, Homo sapien
aatgaaaggactaatctaaatcatg

SEQ ID NO: 101942 - DNA, 25 bp, Homo sapien
aatgaaaggacttatctaaatcatg

SEQ ID NO: 101943 - DNA, 25 bp, Homo sapien
acggggaactcgtagggatcgtcac

SEQ ID NO: 101944 - DNA, 25 bp, Homo sapien
acggggaactcgaagggatcgtcac

SEQ ID NO: 101945 - DNA, 25 bp, Homo sapien
cactgaggaagtagggcctagtcga

SEQ ID NO: 101946 - DNA, 25 bp, Homo sapien
cactgaggaagttgggcctagtcga

SEQ ID NO: 101947 - DNA, 25 bp, Homo sapien
ttccacggtacttccggtccatggg

SEQ ID NO: 101948 - DNA, 25 bp, Homo sapien
ttccacggtactaccggtccatggg

SEQ ID NO: 101949 - DNA, 25 bp, Homo sapien
ttctctgatatacggaacaactttc

SEQ ID NO: 101950 - DNA, 25 bp, Homo sapien
ttctctgatatagggaacaactttc

SEQ ID NO: 101951 - DNA, 25 bp, Homo sapien
ctaaagtacgggttagtcctactta

SEQ ID NO: 101952 - DNA, 25 bp, Homo sapien
ctaaagtacgggatagtcctactta

SEQ ID NO: 101953 - DNA, 25 bp, Homo sapien
tcgatgtggtctctgcctttaggta

SEQ ID NO: 101954 - DNA, 25 bp, Homo sapien
tcgatgtggtctgtgcctttaggta

SEQ ID NO: 101955 - DNA, 25 bp, Homo sapien
gtggcgtccacatctcttccgtgaa

SEQ ID NO: 101956 - DNA, 25 bp, Homo sapien
gtggcgtccacaactcttccgtgaa

SEQ ID NO: 101957 - DNA, 25 bp, Homo sapien
acgtcggtggaacagcgtccccgga

SEQ ID NO: 101958 - DNA, 25 bp, Homo sapien
acgtcggtggaagagcgtccccgga

SEQ ID NO: 101959 - DNA, 25 bp, Homo sapien
agtgtctagtagtgtccgtccggtg

SEQ ID NO: 101960 - DNA, 25 bp, Homo sapien
agtgtctagtagagtccgtccggtg

SEQ ID NO: 101961 - DNA, 25 bp, Homo sapien
tagacagacggttcattcgggtccg

SEQ ID NO: 101962 - DNA, 25 bp, Homo sapien
tagacagacggtacattcgggtccg

SEQ ID NO: 101963 - DNA, 25 bp, Homo sapien
gggtctaagtttaggaccacggtac

SEQ ID NO: 101964 - DNA, 25 bp, Homo sapien
gggtctaagttttggaccacggtac

SEQ ID NO: 101965 - DNA, 25 bp, Homo sapien
acgagtgaaggtttctcgaccaccc

SEQ ID NO: 101966 - DNA, 25 bp, Homo sapien
acgagtgaaggtatctcgaccaccc

SEQ ID NO: 101967 - DNA, 25 bp, Homo sapien
acgatggagaacagatccgtgggac

SEQ ID NO: 101968 - DNA, 25 bp, Homo sapien
acgatggagaactgatccgtgggac

SEQ ID NO: 101969 - DNA, 25 bp, Homo sapien
agctgaagaaggtacgctctgcgta

SEQ ID NO: 101970 - DNA, 25 bp, Homo sapien
agctgaagaaggaacgctctgcgta

SEQ ID NO: 101971 - DNA, 25 bp, Homo sapien
cttcctgcagaagaagctcttctag

SEQ ID NO: 101972 - DNA, 25 bp, Homo sapien
cttcctgcagaacaagctcttctag

SEQ ID NO: 101973 - DNA, 25 bp, Homo sapien
tttcgggtgcaaaacacttttctac

SEQ ID NO: 101974 - DNA, 25 bp, Homo sapien
tttcgggtgcaatacacttttctac

SEQ ID NO: 101975 - DNA, 25 bp, Homo sapien
gggcgtacgagaacaccctcttccg

SEQ ID NO: 101976 - DNA, 25 bp, Homo sapien
gggcgtacgagatcaccctcttccg

SEQ ID NO: 101977 - DNA, 25 bp, Homo sapien
acaaggtacgagtgagcccttcgtg

SEQ ID NO: 101978 - DNA, 25 bp, Homo sapien
acaaggtacgagagagcccttcgtg

SEQ ID NO: 101979 - DNA, 25 bp, Homo sapien
tcacaaggatgtagccgtcggtttg

SEQ ID NO: 101980 - DNA, 25 bp, Homo sapien
tcacaaggatgttgccgtcggtttg

SEQ ID NO: 101981 - DNA, 25 bp, Homo sapien
gacacaggggttacccgtattgtgt

SEQ ID NO: 101982 - DNA, 25 bp, Homo sapien
gacacaggggtttcccgtattgtgt

SEQ ID NO: 101983 - DNA, 25 bp, Homo sapien
caagtgagtctaatgactttctgtg

SEQ ID NO: 101984 - DNA, 25 bp, Homo sapien
caagtgagtctattgactttctgtg

SEQ ID NO: 101985 - DNA, 25 bp, Homo sapien
gtcaaggacatttcttattcagtgt

SEQ ID NO: 101986 - DNA, 25 bp, Homo sapien
gtcaaggacattacttattcagtgt

SEQ ID NO: 101987 - DNA, 25 bp, Homo sapien
gtctgggtcccgccggcgttcgaat

SEQ ID NO: 101988 - DNA, 25 bp, Homo sapien
gtctgggtcccggcggcgttcgaat

SEQ ID NO: 101989 - DNA, 25 bp, Homo sapien
ctccgtcgtcagtgacctcagaagt

SEQ ID NO: 101990 - DNA, 25 bp, Homo sapien
ctccgtcgtcagagacctcagaagt

SEQ ID NO: 101991 - DNA, 25 bp, Homo sapien
ccctcgtcccagtgacgtcgaggaa

SEQ ID NO: 101992 - DNA, 25 bp, Homo sapien
ccctcgtcccagagacgtcgaggaa

SEQ ID NO: 101993 - DNA, 25 bp, Homo sapien
acctcgacctcataacgcggaagag

SEQ ID NO: 101994 - DNA, 25 bp, Homo sapien
acctcgacctcaaaacgcggaagag

SEQ ID NO: 101995 - DNA, 25 bp, Homo sapien
atctcggtcgggaagaagtcccgga

SEQ ID NO: 101996 - DNA, 25 bp, Homo sapien
atctcggtcgggtagaagtcccgga

SEQ ID NO: 101997 - DNA, 25 bp, Homo sapien
cgtcggtcgaaagaggacccgacac

SEQ ID NO: 101998 - DNA, 25 bp, Homo sapien
cgtcggtcgaaacaggacccgacac

SEQ ID NO: 101999 - DNA, 25 bp, Homo sapien
tgtcggcgtcggacaccctctgaca

SEQ ID NO: 102000 - DNA, 25 bp, Homo sapien
tgtcggcgtcggtcaccctctgaca

SEQ ID NO: 102001 - DNA, 25 bp, Homo sapien
cggtaggtccggtcacccactgaca

SEQ ID NO: 102002 - DNA, 25 bp, Homo sapien
cggtaggtccggacacccactgaca

SEQ ID NO: 102003 - DNA, 25 bp, Homo sapien
aacgaagttcggttacgtttttcaa

SEQ ID NO: 102004 - DNA, 25 bp, Homo sapien
aacgaagttcggatacgtttttcaa

SEQ ID NO: 102005 - DNA, 25 bp, Homo sapien
ctaatgtctctatcggatgttagaa

SEQ ID NO: 102006 - DNA, 25 bp, Homo sapien
ctaatgtctctaacggatgttagaa

SEQ ID NO: 102007 - DNA, 25 bp, Homo sapien
cgttttatgtatccacttatgacag

SEQ ID NO: 102008 - DNA, 25 bp, Homo sapien
cgttttatgtatgcacttatgacag

SEQ ID NO: 102009 - DNA, 25 bp, Homo sapien
agacttattgtcttcgtgcatttaa

SEQ ID NO: 102010 - DNA, 25 bp, Homo sapien
agacttattgtcatcgtgcatttaa

SEQ ID NO: 102011 - DNA, 25 bp, Homo sapien
gattcttgtttcagacaatcttcgt

SEQ ID NO: 102012 - DNA, 25 bp, Homo sapien
gattcttgtttctgacaatcttcgt

SEQ ID NO: 102013 - DNA, 25 bp, Homo sapien
agactttgtttcctataagtttgac

SEQ ID NO: 102014 - DNA, 25 bp, Homo sapien
agactttgtttcgtataagtttgac

SEQ ID NO: 102015 - DNA, 25 bp, Homo sapien
aaaggggagctgttctctaaagagc

SEQ ID NO: 102016 - DNA, 25 bp, Homo sapien
aaaggggagctgatctctaaagagc

SEQ ID NO: 102017 - DNA, 25 bp, Homo sapien
tcaggggtaaggtcttaattacgac

SEQ ID NO: 102018 - DNA, 25 bp, Homo sapien
tcaggggtaaggacttaattacgac

SEQ ID NO: 102019 - DNA, 25 bp, Homo sapien
tcacttgagggtgcacctcatccta

SEQ ID NO: 102020 - DNA, 25 bp, Homo sapien
tcacttgagggtccacctcatccta

SEQ ID NO: 102021 - DNA, 25 bp, Homo sapien
ctaaggttgtcacgaggactaccga

SEQ ID NO: 102022 - DNA, 25 bp, Homo sapien
ctaaggttgtcaggaggactaccga

SEQ ID NO: 102023 - DNA, 25 bp, Homo sapien
ctgaagttgtaaggagagacacttc

SEQ ID NO: 102024 - DNA, 25 bp, Homo sapien
ctgaagttgtaacgagagacacttc

SEQ ID NO: 102025 - DNA, 25 bp, Homo sapien
cgaaagttgtaaaaagtctatacac

SEQ ID NO: 102026 - DNA, 25 bp, Homo sapien
cgaaagttgtaataagtctatacac

SEQ ID NO: 102027 - DNA, 25 bp, Homo sapien
ccctagagtcttacggaagtcttgg

SEQ ID NO: 102028 - DNA, 25 bp, Homo sapien
ccctagagtctttcggaagtcttgg

SEQ ID NO: 102029 - DNA, 25 bp, Homo sapien
gtcctgtgtacctcggaaggtccac

SEQ ID NO: 102030 - DNA, 25 bp, Homo sapien
gtcctgtgtaccacggaaggtccac

SEQ ID NO: 102031 - DNA, 25 bp, Homo sapien
attatagataccacggggacaccac

SEQ ID NO: 102032 - DNA, 25 bp, Homo sapien
attatagatacctcggggacaccac

SEQ ID NO: 102033 - DNA, 25 bp, Homo sapien
gggtaccagtcctacgggcgccgca

SEQ ID NO: 102034 - DNA, 25 bp, Homo sapien
gggtaccagtccaacgggcgccgca

SEQ ID NO: 102035 - DNA, 25 bp, Homo sapien
gacacgtatgtggtcggttcggaaa

SEQ ID NO: 102036 - DNA, 25 bp, Homo sapien
gacacgtatgtgctcggttcggaaa

SEQ ID NO: 102037 - DNA, 25 bp, Homo sapien
atatatcagtacctcaggtcggaaa

SEQ ID NO: 102038 - DNA, 25 bp, Homo sapien
atatatcagtacgtcaggtcggaaa

SEQ ID NO: 102039 - DNA, 25 bp, Homo sapien
tacaaccgatctttacccgtgaaag

SEQ ID NO: 102040 - DNA, 25 bp, Homo sapien
tacaaccgatctatacccgtgaaag

SEQ ID NO: 102041 - DNA, 25 bp, Homo sapien
tgaacaaacttccaaggtactgtgt

SEQ ID NO: 102042 - DNA, 25 bp, Homo sapien
tgaacaaacttcgaaggtactgtgt

SEQ ID NO: 102043 - DNA, 25 bp, Homo sapien
gtctctcagacaattcccgaggttt

SEQ ID NO: 102044 - DNA, 25 bp, Homo sapien
gtctctcagacatttcccgaggttt

SEQ ID NO: 102045 - DNA, 25 bp, Homo sapien
cttttaggtatacgaacccagtacc

SEQ ID NO: 102046 - DNA, 25 bp, Homo sapien
cttttaggtataggaacccagtacc

SEQ ID NO: 102047 - DNA, 25 bp, Homo sapien
ttaaacgagttctacgccgaacggt

SEQ ID NO: 102048 - DNA, 25 bp, Homo sapien
ttaaacgagttcaacgccgaacggt

SEQ ID NO: 102049 - DNA, 25 bp, Homo sapien
tccctacagttcttccgacgatagg

SEQ ID NO: 102050 - DNA, 25 bp, Homo sapien
tccctacagttcatccgacgatagg

SEQ ID NO: 102051 - DNA, 25 bp, Homo sapien
cgagtctatagaaccaccgacaggt

SEQ ID NO: 102052 - DNA, 25 bp, Homo sapien
cgagtctatagatccaccgacaggt

SEQ ID NO: 102053 - DNA, 25 bp, Homo sapien
aaaacctattggttcgtcgagaaat

SEQ ID NO: 102054 - DNA, 25 bp, Homo sapien
aaaacctattggatcgtcgagaaat

SEQ ID NO: 102055 - DNA, 25 bp, Homo sapien
aacaactcgggatcggtagtgacag

SEQ ID NO: 102056 - DNA, 25 bp, Homo sapien
aacaactcgggaacggtagtgacag

SEQ ID NO: 102057 - DNA, 25 bp, Homo sapien
gacaaactacatgacttaactgaga

SEQ ID NO: 102058 - DNA, 25 bp, Homo sapien
gacaaactacatcacttaactgaga

SEQ ID NO: 102059 - DNA, 25 bp, Homo sapien
gagatagaccatacgtttccgtcgc

SEQ ID NO: 102060 - DNA, 25 bp, Homo sapien
gagatagaccattcgtttccgtcgc

SEQ ID NO: 102061 - DNA, 25 bp, Homo sapien
agtaagacacgtttccttcgcgaga

SEQ ID NO: 102062 - DNA, 25 bp, Homo sapien
agtaagacacgtatccttcgcgaga

SEQ ID NO: 102063 - DNA, 25 bp, Homo sapien
aactcaccgaagagtccgactagac

SEQ ID NO: 102064 - DNA, 25 bp, Homo sapien
aactcaccgaagtgtccgactagac

SEQ ID NO: 102065 - DNA, 25 bp, Homo sapien
tagccacggggaagtccgagtagac

SEQ ID NO: 102066 - DNA, 25 bp, Homo sapien
tagccacggggatgtccgagtagac

SEQ ID NO: 102067 - DNA, 25 bp, Homo sapien
ttgatctggcgtaggggtactaccg

SEQ ID NO: 102068 - DNA, 25 bp, Homo sapien
ttgatctggcgttggggtactaccg

SEQ ID NO: 102069 - DNA, 25 bp, Homo sapien
cgaacagtggtcttgaggaacaggt

SEQ ID NO: 102070 - DNA, 25 bp, Homo sapien
cgaacagtggtcatgaggaacaggt

SEQ ID NO: 102071 - DNA, 25 bp, Homo sapien
ggacgagaccgtgtcagaaaagcgt

SEQ ID NO: 102072 - DNA, 25 bp, Homo sapien
ggacgagaccgtctcagaaaagcgt

SEQ ID NO: 102073 - DNA, 25 bp, Homo sapien
tgtgaagacgtaccacccaggaacc

SEQ ID NO: 102074 - DNA, 25 bp, Homo sapien
tgtgaagacgtagcacccaggaacc

SEQ ID NO: 102075 - DNA, 25 bp, Homo sapien
agaggtgaggttcaaggacaacgtc

SEQ ID NO: 102076 - DNA, 25 bp, Homo sapien
agaggtgaggttgaaggacaacgtc

SEQ ID NO: 102077 - DNA, 25 bp, Homo sapien
agcacaggacggtcttgccagaggt

SEQ ID NO: 102078 - DNA, 25 bp, Homo sapien
agcacaggacggacttgccagaggt

SEQ ID NO: 102079 - DNA, 25 bp, Homo sapien
aaacactggctccagttgagcaaat

SEQ ID NO: 102080 - DNA, 25 bp, Homo sapien
aaacactggctcgagttgagcaaat

SEQ ID NO: 102081 - DNA, 25 bp, Homo sapien
gccttgtttaccagtccgaccctta

SEQ ID NO: 102082 - DNA, 25 bp, Homo sapien
gccttgtttacctgtccgaccctta

SEQ ID NO: 102083 - DNA, 25 bp, Homo sapien
gtttatcgataggtccctacctgtc

SEQ ID NO: 102084 - DNA, 25 bp, Homo sapien
gtttatcgatagctccctacctgtc

SEQ ID NO: 102085 - DNA, 25 bp, Homo sapien
tgtgattcttgaactccctctcgct

SEQ ID NO: 102086 - DNA, 25 bp, Homo sapien
tgtgattcttgatctccctctcgct

SEQ ID NO: 102087 - DNA, 25 bp, Homo sapien
cgtgagaacttcatttcgtgcttat

SEQ ID NO: 102088 - DNA, 25 bp, Homo sapien
cgtgagaacttcttttcgtgcttat

SEQ ID NO: 102089 - DNA, 25 bp, Homo sapien
atacaagttctgtcgtttaagtcta

SEQ ID NO: 102090 - DNA, 25 bp, Homo sapien
atacaagttctgacgtttaagtcta

SEQ ID NO: 102091 - DNA, 25 bp, Homo sapien
gtccatatggtcagtacttcagtga

SEQ ID NO: 102092 - DNA, 25 bp, Homo sapien
gtccatatggtctgtacttcagtga

SEQ ID NO: 102093 - DNA, 25 bp, Homo sapien
cctcattgtgggaccgtactgtaag

SEQ ID NO: 102094 - DNA, 25 bp, Homo sapien
cctcattgtgggtccgtactgtaag

SEQ ID NO: 102095 - DNA, 25 bp, Homo sapien
ccacatgaggggtctcgtaagaggt

SEQ ID NO: 102096 - DNA, 25 bp, Homo sapien
ccacatgaggggactcgtaagaggt

SEQ ID NO: 102097 - DNA, 25 bp, Homo sapien
cacagtgtgatgtcgatcgttaagg

SEQ ID NO: 102098 - DNA, 25 bp, Homo sapien
cacagtgtgatgacgatcgttaagg

SEQ ID NO: 102099 - DNA, 25 bp, Homo sapien
aaaaatgttaacacccgttagttag

SEQ ID NO: 102100 - DNA, 25 bp, Homo sapien
aaaaatgttaactcccgttagttag

SEQ ID NO: 102101 - DNA, 25 bp, Homo sapien
acaagtttaagaggtacctcttata

SEQ ID NO: 102102 - DNA, 25 bp, Homo sapien
acaagtttaagacgtacctcttata

SEQ ID NO: 102103 - DNA, 25 bp, Homo sapien
atttactttaaagtgtctttcgtcg

SEQ ID NO: 102104 - DNA, 25 bp, Homo sapien
atttactttaaactgtctttcgtcg

SEQ ID NO: 102105 - DNA, 25 bp, Homo sapien
tttgccgtgtaaacatctcttacgg

SEQ ID NO: 102106 - DNA, 25 bp, Homo sapien
tttgccgtgtaatcatctcttacgg

SEQ ID NO: 102107 - DNA, 25 bp, Homo sapien
tttcgtcacgttctccggtcggtgc

SEQ ID NO: 102108 - DNA, 25 bp, Homo sapien
tttcgtcacgttgtccggtcggtgc

SEQ ID NO: 102109 - DNA, 25 bp, Homo sapien
tgactgtatgtaagtcgggtctctt

SEQ ID NO: 102110 - DNA, 25 bp, Homo sapien
tgactgtatgtatgtcgggtctctt

SEQ ID NO: 102111 - DNA, 25 bp, Homo sapien
gccgcggcgtgacgaccgtgtccat

SEQ ID NO: 102112 - DNA, 25 bp, Homo sapien
gccgcggcgtgaggaccgtgtccat

SEQ ID NO: 102113 - DNA, 25 bp, Homo sapien
cttccgggagagaactcgggccacg

SEQ ID NO: 102114 - DNA, 25 bp, Homo sapien
cttccgggagagtactcgggccacg

SEQ ID NO: 102115 - DNA, 25 bp, Homo sapien
ccccggagactgtagtcagaatcga

SEQ ID NO: 102116 - DNA, 25 bp, Homo sapien
ccccggagactgaagtcagaatcga

SEQ ID NO: 102117 - DNA, 25 bp, Homo sapien
cactcgacgagtttgtaaacattgt

SEQ ID NO: 102118 - DNA, 25 bp, Homo sapien
cactcgacgagtatgtaaacattgt

SEQ ID NO: 102119 - DNA, 25 bp, Homo sapien
cccttactcggctaccacataagag

SEQ ID NO: 102120 - DNA, 25 bp, Homo sapien
cccttactcggcaaccacataagag

SEQ ID NO: 102121 - DNA, 25 bp, Homo sapien
aaccctctcgggtcgcttcaatacg

SEQ ID NO: 102122 - DNA, 25 bp, Homo sapien
aaccctctcgggacgcttcaatacg

SEQ ID NO: 102123 - DNA, 25 bp, Homo sapien
atctcgtcggggagtccatgactcg

SEQ ID NO: 102124 - DNA, 25 bp, Homo sapien
atctcgtcggggtgtccatgactcg

SEQ ID NO: 102125 - DNA, 25 bp, Homo sapien
tttcccttgtgtcttcttgttacag

SEQ ID NO: 102126 - DNA, 25 bp, Homo sapien
tttcccttgtgtgttcttgttacag

SEQ ID NO: 102127 - DNA, 25 bp, Homo sapien
tatgtagtctttttgtttttctttt

SEQ ID NO: 102128 - DNA, 25 bp, Homo sapien
tatgtagtctttatgtttttctttt

SEQ ID NO: 102129 - DNA, 25 bp, Homo sapien
ttatacggttttttattgactattt

SEQ ID NO: 102130 - DNA, 25 bp, Homo sapien
ttatacggttttatattgactattt

SEQ ID NO: 102131 - DNA, 25 bp, Homo sapien
gtataacctttcgatttcgtcttga

SEQ ID NO: 102132 - DNA, 25 bp, Homo sapien
gtataacctttccatttcgtcttga

SEQ ID NO: 102133 - DNA, 25 bp, Homo sapien
gtccttgtctgaaggatcctagaca

SEQ ID NO: 102134 - DNA, 25 bp, Homo sapien
gtccttgtctgatggatcctagaca

SEQ ID NO: 102135 - DNA, 25 bp, Homo sapien
caacagttccaaagtctccgtcagt

SEQ ID NO: 102136 - DNA, 25 bp, Homo sapien
caacagttccaatgtctccgtcagt

SEQ ID NO: 102137 - DNA, 25 bp, Homo sapien
cggggagtccatgactcgaccgaag

SEQ ID NO: 102138 - DNA, 25 bp, Homo sapien
cggggagtccatcactcgaccgaag

SEQ ID NO: 102139 - DNA, 25 bp, Homo sapien
atcgagggtaccaccgtcaccgaag

SEQ ID NO: 102140 - DNA, 25 bp, Homo sapien
atcgagggtacctccgtcaccgaag

SEQ ID NO: 102141 - DNA, 25 bp, Homo sapien
acgttgcgtgcgtaccgtcataaag

SEQ ID NO: 102142 - DNA, 25 bp, Homo sapien
acgttgcgtgcgaaccgtcataaag

SEQ ID NO: 102143 - DNA, 25 bp, Homo sapien
atcaacgggagtacgaaggattcga

SEQ ID NO: 102144 - DNA, 25 bp, Homo sapien
atcaacgggagttcgaaggattcga

SEQ ID NO: 102145 - DNA, 25 bp, Homo sapien
ttcagagaggatggtaccgggtccc

SEQ ID NO: 102146 - DNA, 25 bp, Homo sapien
ttcagagaggatcgtaccgggtccc

SEQ ID NO: 102147 - DNA, 25 bp, Homo sapien
tccagtaagggtttaggttgtcggc

SEQ ID NO: 102148 - DNA, 25 bp, Homo sapien
tccagtaagggtataggttgtcggc

SEQ ID NO: 102149 - DNA, 25 bp, Homo sapien
ggatatttacacctttaacgaacgt

SEQ ID NO: 102150 - DNA, 25 bp, Homo sapien
ggatatttacacgtttaacgaacgt

SEQ ID NO: 102151 - DNA, 25 bp, Homo sapien
aggagaaattctccttagaatacag

SEQ ID NO: 102152 - DNA, 25 bp, Homo sapien
aggagaaattctgcttagaatacag

SEQ ID NO: 102153 - DNA, 25 bp, Homo sapien
aggaattatcatcctaagtaaaacg

SEQ ID NO: 102154 - DNA, 25 bp, Homo sapien
aggaattatcatgctaagtaaaacg

SEQ ID NO: 102155 - DNA, 25 bp, Homo sapien
gggtggtcactctccctcgtgaaga

SEQ ID NO: 102156 - DNA, 25 bp, Homo sapien
gggtggtcactcaccctcgtgaaga

SEQ ID NO: 102157 - DNA, 25 bp, Homo sapien
cgagaggacctaaaggcaggtatca

SEQ ID NO: 102158 - DNA, 25 bp, Homo sapien
cgagaggacctataggcaggtatca

SEQ ID NO: 102159 - DNA, 25 bp, Homo sapien
agagagagttataaggtacttttta

SEQ ID NO: 102160 - DNA, 25 bp, Homo sapien
agagagagttattaggtacttttta

SEQ ID NO: 102161 - DNA, 25 bp, Homo sapien
gtagcggattaatggcacctcgttt

SEQ ID NO: 102162 - DNA, 25 bp, Homo sapien
gtagcggattaaaggcacctcgttt

SEQ ID NO: 102163 - DNA, 25 bp, Homo sapien
ctaagttccaatacgaaacgacaag

SEQ ID NO: 102164 - DNA, 25 bp, Homo sapien
ctaagttccaattcgaaacgacaag

SEQ ID NO: 102165 - DNA, 25 bp, Homo sapien
gtcgttaccactagaagaacgacca

SEQ ID NO: 102166 - DNA, 25 bp, Homo sapien
gtcgttaccacttgaagaacgacca

SEQ ID NO: 102167 - DNA, 25 bp, Homo sapien
taaccgatactccttaaagtttgga

SEQ ID NO: 102168 - DNA, 25 bp, Homo sapien
taaccgatactcgttaaagtttgga

SEQ ID NO: 102169 - DNA, 25 bp, Homo sapien
aaagaaaccgaaaagaccttggtgt

SEQ ID NO: 102170 - DNA, 25 bp, Homo sapien
aaagaaaccgaatagaccttggtgt

SEQ ID NO: 102171 - DNA, 25 bp, Homo sapien
agacaaaacagacaaaccttgactg

SEQ ID NO: 102172 - DNA, 25 bp, Homo sapien
agacaaaacagagaaaccttgactg

SEQ ID NO: 102173 - DNA, 25 bp, Homo sapien
tggactgcccgacacgaaagttttg

SEQ ID NO: 102174 - DNA, 25 bp, Homo sapien
tggactgcccgagacgaaagttttg

SEQ ID NO: 102175 - DNA, 25 bp, Homo sapien
cagagaacccccagggatgtggtcg

SEQ ID NO: 102176 - DNA, 25 bp, Homo sapien
cagagaaccccctgggatgtggtcg

SEQ ID NO: 102177 - DNA, 25 bp, Homo sapien
acacaccactcgtcgagacctatgg

SEQ ID NO: 102178 - DNA, 25 bp, Homo sapien
acacaccactcgacgagacctatgg

SEQ ID NO: 102179 - DNA, 25 bp, Homo sapien
cgtccatcactatcggactccttgg

SEQ ID NO: 102180 - DNA, 25 bp, Homo sapien
cgtccatcactaacggactccttgg

SEQ ID NO: 102181 - DNA, 25 bp, Homo sapien
ctgtctctcccgacggggcagtgtc

SEQ ID NO: 102182 - DNA, 25 bp, Homo sapien
ctgtctctcccgtcggggcagtgtc

SEQ ID NO: 102183 - DNA, 25 bp, Homo sapien
acgaccagtccgacgcctggtggac

SEQ ID NO: 102184 - DNA, 25 bp, Homo sapien
acgaccagtccgtcgcctggtggac

SEQ ID NO: 102185 - DNA, 25 bp, Homo sapien
gggtgtcgtttgacgaccggttact

SEQ ID NO: 102186 - DNA, 25 bp, Homo sapien
gggtgtcgtttgtcgaccggttact

SEQ ID NO: 102187 - DNA, 25 bp, Homo sapien
ggacgtatctacgttactaccgaag

SEQ ID NO: 102188 - DNA, 25 bp, Homo sapien
ggacgtatctaccttactaccgaag

SEQ ID NO: 102189 - DNA, 25 bp, Homo sapien
ggtgtcaaattacctccttcgtaga

SEQ ID NO: 102190 - DNA, 25 bp, Homo sapien
ggtgtcaaattagctccttcgtaga

SEQ ID NO: 102191 - DNA, 25 bp, Homo sapien
ggtgctacttatagtcggcctttct

SEQ ID NO: 102192 - DNA, 25 bp, Homo sapien
ggtgctacttattgtcggcctttct

SEQ ID NO: 102193 - DNA, 25 bp, Homo sapien
ataggacttcgtggacgggaagttc

SEQ ID NO: 102194 - DNA, 25 bp, Homo sapien
ataggacttcgtcgacgggaagttc

SEQ ID NO: 102195 - DNA, 25 bp, Homo sapien
gaagatattatctgtcagaagctct

SEQ ID NO: 102196 - DNA, 25 bp, Homo sapien
gaagatattatcagtcagaagctct

SEQ ID NO: 102197 - DNA, 25 bp, Homo sapien
ctagaagatccaggagcaaagactc

SEQ ID NO: 102198 - DNA, 25 bp, Homo sapien
ctagaagatccacgagcaaagactc

SEQ ID NO: 102199 - DNA, 25 bp, Homo sapien
acacaaagtttaaggcacaaactcg

SEQ ID NO: 102200 - DNA, 25 bp, Homo sapien
acacaaagtttatggcacaaactcg

SEQ ID NO: 102201 - DNA, 25 bp, Homo sapien
taaggggtatcaacacaccactcgt

SEQ ID NO: 102202 - DNA, 25 bp, Homo sapien
taaggggtatcatcacaccactcgt

SEQ ID NO: 102203 - DNA, 25 bp, Homo sapien
tgtcaaggagattacgtaaaccctg

SEQ ID NO: 102204 - DNA, 25 bp, Homo sapien
tgtcaaggagataacgtaaaccctg

SEQ ID NO: 102205 - DNA, 25 bp, Homo sapien
gtcacgtgagtgatgaaagaccata

SEQ ID NO: 102206 - DNA, 25 bp, Homo sapien
gtcacgtgagtgttgaaagaccata

SEQ ID NO: 102207 - DNA, 25 bp, Homo sapien
atcctacagcggtgtaaggtccaac

SEQ ID NO: 102208 - DNA, 25 bp, Homo sapien
atcctacagcggagtaaggtccaac

SEQ ID NO: 102209 - DNA, 25 bp, Homo sapien
ggacgagtgcgcaacagtgtcaatc

SEQ ID NO: 102210 - DNA, 25 bp, Homo sapien
ggacgagtgcgctacagtgtcaatc

SEQ ID NO: 102211 - DNA, 25 bp, Homo sapien
gcgacgaccgccgcgtggtgcgtcc

SEQ ID NO: 102212 - DNA, 25 bp, Homo sapien
gcgacgaccgccccgtggtgcgtcc

SEQ ID NO: 102213 - DNA, 25 bp, Homo sapien
agtccggatacctctggtggcgtcg

SEQ ID NO: 102214 - DNA, 25 bp, Homo sapien
agtccggataccactggtggcgtcg

SEQ ID NO: 102215 - DNA, 25 bp, Homo sapien
ccgacacgaaggacgaccgcgacgg

SEQ ID NO: 102216 - DNA, 25 bp, Homo sapien
ccgacacgaaggtcgaccgcgacgg

SEQ ID NO: 102217 - DNA, 25 bp, Homo sapien
cgacggcctcgacaggaacctcgga

SEQ ID NO: 102218 - DNA, 25 bp, Homo sapien
cgacggcctcgagaggaacctcgga

SEQ ID NO: 102219 - DNA, 25 bp, Homo sapien
tccggagcccagttctaaaactaga

SEQ ID NO: 102220 - DNA, 25 bp, Homo sapien
tccggagcccagatctaaaactaga

SEQ ID NO: 102221 - DNA, 25 bp, Homo sapien
aatagagacccacacttattgtgta

SEQ ID NO: 102222 - DNA, 25 bp, Homo sapien
aatagagacccagacttattgtgta

SEQ ID NO: 102223 - DNA, 25 bp, Homo sapien
aaggacacagtgaacgaccaggatt

SEQ ID NO: 102224 - DNA, 25 bp, Homo sapien
aaggacacagtgtacgaccaggatt

SEQ ID NO: 102225 - DNA, 25 bp, Homo sapien
gaaggtccctgcaacgaaggtatct

SEQ ID NO: 102226 - DNA, 25 bp, Homo sapien
gaaggtccctgctacgaaggtatct

SEQ ID NO: 102227 - DNA, 25 bp, Homo sapien
ggcggggcgtcccgtacttcctcct

SEQ ID NO: 102228 - DNA, 25 bp, Homo sapien
ggcggggcgtccggtacttcctcct

SEQ ID NO: 102229 - DNA, 25 bp, Homo sapien
ggtctctgcccgtactgtcatgtct

SEQ ID NO: 102230 - DNA, 25 bp, Homo sapien
ggtctctgcccgaactgtcatgtct

SEQ ID NO: 102231 - DNA, 25 bp, Homo sapien
gggttctaacatgatccggatagtt

SEQ ID NO: 102232 - DNA, 25 bp, Homo sapien
gggttctaacatcatccggatagtt

SEQ ID NO: 102233 - DNA, 25 bp, Homo sapien
tagttttagagttcccttatagatc

SEQ ID NO: 102234 - DNA, 25 bp, Homo sapien
tagttttagagtacccttatagatc

SEQ ID NO: 102235 - DNA, 25 bp, Homo sapien
gtatgtgtaggtgtcttctatcatc

SEQ ID NO: 102236 - DNA, 25 bp, Homo sapien
gtatgtgtaggtctcttctatcatc

SEQ ID NO: 102237 - DNA, 25 bp, Homo sapien
tacgaatgagattcacctttagtcc

SEQ ID NO: 102238 - DNA, 25 bp, Homo sapien
tacgaatgagatacacctttagtcc

SEQ ID NO: 102239 - DNA, 25 bp, Homo sapien
aaagaagacttaacctacaagtgat

SEQ ID NO: 102240 - DNA, 25 bp, Homo sapien
aaagaagacttatcctacaagtgat

SEQ ID NO: 102241 - DNA, 25 bp, Homo sapien
ttgacatatcgatcgcttagatgat

SEQ ID NO: 102242 - DNA, 25 bp, Homo sapien
ttgacatatcgaacgcttagatgat

SEQ ID NO: 102243 - DNA, 25 bp, Homo sapien
cgtgatttccttgtcgtcctaccaa

SEQ ID NO: 102244 - DNA, 25 bp, Homo sapien
cgtgatttccttctcgtcctaccaa

SEQ ID NO: 102245 - DNA, 25 bp, Homo sapien
acgggagttcgaacccaaccttcaa

SEQ ID NO: 102246 - DNA, 25 bp, Homo sapien
acgggagttcgatcccaaccttcaa

SEQ ID NO: 102247 - DNA, 25 bp, Homo sapien
gtcggccgagactcacactctgcaa

SEQ ID NO: 102248 - DNA, 25 bp, Homo sapien
gtcggccgagacacacactctgcaa

SEQ ID NO: 102249 - DNA, 25 bp, Homo sapien
gtgccttccggtacggtcactcgaa

SEQ ID NO: 102250 - DNA, 25 bp, Homo sapien
gtgccttccggttcggtcactcgaa

SEQ ID NO: 102251 - DNA, 25 bp, Homo sapien
gaggacattggttccgtcctcagtc

SEQ ID NO: 102252 - DNA, 25 bp, Homo sapien
gaggacattggtaccgtcctcagtc

SEQ ID NO: 102253 - DNA, 25 bp, Homo sapien
ccgggtctctgtttattcttcctta

SEQ ID NO: 102254 - DNA, 25 bp, Homo sapien
ccgggtctctgtatattcttcctta

SEQ ID NO: 102255 - DNA, 25 bp, Homo sapien
ggtcccgtgaagtttctacttcaac

SEQ ID NO: 102256 - DNA, 25 bp, Homo sapien
ggtcccgtgaagattctacttcaac

SEQ ID NO: 102257 - DNA, 25 bp, Homo sapien
ggggatgttacaacttactttttcc

SEQ ID NO: 102258 - DNA, 25 bp, Homo sapien
ggggatgttacatcttactttttcc

SEQ ID NO: 102259 - DNA, 25 bp, Homo sapien
gtatcagagtataaaccttttcgtc

SEQ ID NO: 102260 - DNA, 25 bp, Homo sapien
gtatcagagtattaaccttttcgtc

SEQ ID NO: 102261 - DNA, 25 bp, Homo sapien
gagtcacgatgtaaccaattttagt

SEQ ID NO: 102262 - DNA, 25 bp, Homo sapien
gagtcacgatgttaccaattttagt

SEQ ID NO: 102263 - DNA, 25 bp, Homo sapien
ctgtttagggtatccctgttcttgt

SEQ ID NO: 102264 - DNA, 25 bp, Homo sapien
ctgtttagggtaaccctgttcttgt

SEQ ID NO: 102265 - DNA, 25 bp, Homo sapien
ttgttaaagaacatacaatatcttt

SEQ ID NO: 102266 - DNA, 25 bp, Homo sapien
ttgttaaagaacttacaatatcttt

SEQ ID NO: 102267 - DNA, 25 bp, Homo sapien
taggtgaaatggtctcaattttcgt

SEQ ID NO: 102268 - DNA, 25 bp, Homo sapien
taggtgaaatggactcaattttcgt

SEQ ID NO: 102269 - DNA, 25 bp, Homo sapien
taaggacaaataacaacctgttgta

SEQ ID NO: 102270 - DNA, 25 bp, Homo sapien
taaggacaaatatcaacctgttgta

SEQ ID NO: 102271 - DNA, 25 bp, Homo sapien
accgaggacaaaacccctcgaggtt

SEQ ID NO: 102272 - DNA, 25 bp, Homo sapien
accgaggacaaatcccctcgaggtt

SEQ ID NO: 102273 - DNA, 25 bp, Homo sapien
ccacgaggagatcgacccgccaggg

SEQ ID NO: 102274 - DNA, 25 bp, Homo sapien
ccacgaggagatggacccgccaggg

SEQ ID NO: 102275 - DNA, 25 bp, Homo sapien
cggagacgaagaaactcgaaccttc

SEQ ID NO: 102276 - DNA, 25 bp, Homo sapien
cggagacgaagatactcgaaccttc

SEQ ID NO: 102277 - DNA, 25 bp, Homo sapien
gaggagcagttcctagtactctccg

SEQ ID NO: 102278 - DNA, 25 bp, Homo sapien
gaggagcagttcgtagtactctccg

SEQ ID NO: 102279 - DNA, 25 bp, Homo sapien
gtttgaggaccatccacagtttccg

SEQ ID NO: 102280 - DNA, 25 bp, Homo sapien
gtttgaggaccaaccacagtttccg

SEQ ID NO: 102281 - DNA, 25 bp, Homo sapien
taacgaaggtacctctaaaatctag

SEQ ID NO: 102282 - DNA, 25 bp, Homo sapien
taacgaaggtacgtctaaaatctag

SEQ ID NO: 102283 - DNA, 25 bp, Homo sapien
gaacatacgttagtcatgacttatg

SEQ ID NO: 102284 - DNA, 25 bp, Homo sapien
gaacatacgttactcatgacttatg

SEQ ID NO: 102285 - DNA, 25 bp, Homo sapien
tacgacagtcaggtctggtttgagt

SEQ ID NO: 102286 - DNA, 25 bp, Homo sapien
tacgacagtcagctctggtttgagt

SEQ ID NO: 102287 - DNA, 25 bp, Homo sapien
ctcgacccagacgtcgtcattgacg

SEQ ID NO: 102288 - DNA, 25 bp, Homo sapien
ctcgacccagacctcgtcattgacg

SEQ ID NO: 102289 - DNA, 25 bp, Homo sapien
atggcgactccgagaccttctagac

SEQ ID NO: 102290 - DNA, 25 bp, Homo sapien
atggcgactccgtgaccttctagac

SEQ ID NO: 102291 - DNA, 25 bp, Homo sapien
tggactcactataactccccgacgt

SEQ ID NO: 102292 - DNA, 25 bp, Homo sapien
tggactcactattactccccgacgt

SEQ ID NO: 102293 - DNA, 25 bp, Homo sapien
cacgtggggtcctaaactccccact

SEQ ID NO: 102294 - DNA, 25 bp, Homo sapien
cacgtggggtccaaaactccccact

SEQ ID NO: 102295 - DNA, 25 bp, Homo sapien
atacgtgtcgaaagacttatcctat

SEQ ID NO: 102296 - DNA, 25 bp, Homo sapien
atacgtgtcgaatgacttatcctat

SEQ ID NO: 102297 - DNA, 25 bp, Homo sapien
gtataacacgagaagactttacaat

SEQ ID NO: 102298 - DNA, 25 bp, Homo sapien
gtataacacgagtagactttacaat

SEQ ID NO: 102299 - DNA, 25 bp, Homo sapien
aaagttactagagtccttaaaacgt

SEQ ID NO: 102300 - DNA, 25 bp, Homo sapien
aaagttactagactccttaaaacgt

SEQ ID NO: 102301 - DNA, 25 bp, Homo sapien
tccaatacgtattcgacataaagtg

SEQ ID NO: 102302 - DNA, 25 bp, Homo sapien
tccaatacgtatacgacataaagtg

SEQ ID NO: 102303 - DNA, 25 bp, Homo sapien
ttccggacacgtttaccggtaaatt

SEQ ID NO: 102304 - DNA, 25 bp, Homo sapien
ttccggacacgtataccggtaaatt

SEQ ID NO: 102305 - DNA, 25 bp, Homo sapien
cagggcgacgtcgaagagcgcctcc

SEQ ID NO: 102306 - DNA, 25 bp, Homo sapien
cagggcgacgtccaagagcgcctcc

SEQ ID NO: 102307 - DNA, 25 bp, Homo sapien
acacagggatccagtggcgcctcct

SEQ ID NO: 102308 - DNA, 25 bp, Homo sapien
acacagggatcctgtggcgcctcct

SEQ ID NO: 102309 - DNA, 25 bp, Homo sapien
aacgaaggggtccagggatcatccg

SEQ ID NO: 102310 - DNA, 25 bp, Homo sapien
aacgaaggggtcgagggatcatccg

SEQ ID NO: 102311 - DNA, 25 bp, Homo sapien
aacaaagggttctgtaactttaccg

SEQ ID NO: 102312 - DNA, 25 bp, Homo sapien
aacaaagggttcagtaactttaccg

SEQ ID NO: 102313 - DNA, 25 bp, Homo sapien
acagaagagaagaaaggtctctacc

SEQ ID NO: 102314 - DNA, 25 bp, Homo sapien
acagaagagaagtaaggtctctacc

SEQ ID NO: 102315 - DNA, 25 bp, Homo sapien
cacaaaagttacgagacatgacaac

SEQ ID NO: 102316 - DNA, 25 bp, Homo sapien
cacaaaagttaccagacatgacaac

SEQ ID NO: 102317 - DNA, 25 bp, Homo sapien
gactcaaatttcgacgagagactta

SEQ ID NO: 102318 - DNA, 25 bp, Homo sapien
gactcaaatttccacgagagactta

SEQ ID NO: 102319 - DNA, 25 bp, Homo sapien
tgagccatttcgactcaaacgcctt

SEQ ID NO: 102320 - DNA, 25 bp, Homo sapien
tgagccatttcgtctcaaacgcctt

SEQ ID NO: 102321 - DNA, 25 bp, Homo sapien
acgagactcctaaggacaaagattt

SEQ ID NO: 102322 - DNA, 25 bp, Homo sapien
acgagactcctatggacaaagattt

SEQ ID NO: 102323 - DNA, 25 bp, Homo sapien
aagcacgtttatcgataggtcccta

SEQ ID NO: 102324 - DNA, 25 bp, Homo sapien
aagcacgtttatggataggtcccta

SEQ ID NO: 102325 - DNA, 25 bp, Homo sapien
gaggcacctttagaagagctatcta

SEQ ID NO: 102326 - DNA, 25 bp, Homo sapien
gaggcacctttacaagagctatcta

SEQ ID NO: 102327 - DNA, 25 bp, Homo sapien
gtcttcctatataccacagacacca

SEQ ID NO: 102328 - DNA, 25 bp, Homo sapien
gtcttcctatattccacagacacca

SEQ ID NO: 102329 - DNA, 25 bp, Homo sapien
gtcgtgtggtcactcctaaggtgcc

SEQ ID NO: 102330 - DNA, 25 bp, Homo sapien
gtcgtgtggtcagtcctaaggtgcc

SEQ ID NO: 102331 - DNA, 25 bp, Homo sapien
gttccctctagattctcacgggggt

SEQ ID NO: 102332 - DNA, 25 bp, Homo sapien
gttccctctagaatctcacgggggt

SEQ ID NO: 102333 - DNA, 25 bp, Homo sapien
gactcacccggagagtccagtgagc

SEQ ID NO: 102334 - DNA, 25 bp, Homo sapien
gactcacccggacagtccagtgagc

SEQ ID NO: 102335 - DNA, 25 bp, Homo sapien
gtcactcgggtgcagtcccagaggt

SEQ ID NO: 102336 - DNA, 25 bp, Homo sapien
gtcactcgggtggagtcccagaggt

SEQ ID NO: 102337 - DNA, 25 bp, Homo sapien
tgtcactcctggaagtccttcgagc

SEQ ID NO: 102338 - DNA, 25 bp, Homo sapien
tgtcactcctggtagtccttcgagc

SEQ ID NO: 102339 - DNA, 25 bp, Homo sapien
ttgtgtcacaatacgggtccccagc

SEQ ID NO: 102340 - DNA, 25 bp, Homo sapien
ttgtgtcacaattcgggtccccagc

SEQ ID NO: 102341 - DNA, 25 bp, Homo sapien
acgtgacacagatgacgacccacct

SEQ ID NO: 102342 - DNA, 25 bp, Homo sapien
acgtgacacagaagacgacccacct

SEQ ID NO: 102343 - DNA, 25 bp, Homo sapien
aaccatcagtaaacggtctctcact

SEQ ID NO: 102344 - DNA, 25 bp, Homo sapien
aaccatcagtaatcggtctctcact

SEQ ID NO: 102345 - DNA, 25 bp, Homo sapien
ttcctgaaggtaaagtccactgctc

SEQ ID NO: 102346 - DNA, 25 bp, Homo sapien
ttcctgaaggtatagtccactgctc

SEQ ID NO: 102347 - DNA, 25 bp, Homo sapien
acacggataggagagtgacggcctc

SEQ ID NO: 102348 - DNA, 25 bp, Homo sapien
acacggataggacagtgacggcctc

SEQ ID NO: 102349 - DNA, 25 bp, Homo sapien
ttacgagacatgacaacttcctgac

SEQ ID NO: 102350 - DNA, 25 bp, Homo sapien
ttacgagacatgtcaacttcctgac

SEQ ID NO: 102351 - DNA, 25 bp, Homo sapien
aatccttcgttgaatgtctcgtacg

SEQ ID NO: 102352 - DNA, 25 bp, Homo sapien
aatccttcgttgtatgtctcgtacg

SEQ ID NO: 102353 - DNA, 25 bp, Homo sapien
gtacaactgtactgtcactttatgt

SEQ ID NO: 102354 - DNA, 25 bp, Homo sapien
gtacaactgtacagtcactttatgt

SEQ ID NO: 102355 - DNA, 25 bp, Homo sapien
cgtaggacttagttgttcgtctgtg

SEQ ID NO: 102356 - DNA, 25 bp, Homo sapien
cgtaggacttagatgttcgtctgtg

SEQ ID NO: 102357 - DNA, 25 bp, Homo sapien
tgtcgtgactgacacggtgtctatt

SEQ ID NO: 102358 - DNA, 25 bp, Homo sapien
tgtcgtgactgagacggtgtctatt

SEQ ID NO: 102359 - DNA, 25 bp, Homo sapien
acgctaggtcacagcggtaacgaga

SEQ ID NO: 102360 - DNA, 25 bp, Homo sapien
acgctaggtcactgcggtaacgaga

SEQ ID NO: 102361 - DNA, 25 bp, Homo sapien
cgaatagtgacgacgagtgacgaag

SEQ ID NO: 102362 - DNA, 25 bp, Homo sapien
cgaatagtgacgtcgagtgacgaag

SEQ ID NO: 102363 - DNA, 25 bp, Homo sapien
gaccggcaggacttcggtcgagcac

SEQ ID NO: 102364 - DNA, 25 bp, Homo sapien
gaccggcaggacatcggtcgagcac

SEQ ID NO: 102365 - DNA, 25 bp, Homo sapien
gtttttgaatgtttcacgtaaacct

SEQ ID NO: 102366 - DNA, 25 bp, Homo sapien
gtttttgaatgtatcacgtaaacct

SEQ ID NO: 102367 - DNA, 25 bp, Homo sapien
tttttggtattggtgccagagaccg

SEQ ID NO: 102368 - DNA, 25 bp, Homo sapien
tttttggtattgctgccagagaccg

SEQ ID NO: 102369 - DNA, 25 bp, Homo sapien
aatgttttcggtggttcccaggtac

SEQ ID NO: 102370 - DNA, 25 bp, Homo sapien
aatgttttcggtcgttcccaggtac

SEQ ID NO: 102371 - DNA, 25 bp, Homo sapien
agttgcaaatgtgtctcacaatgtt

SEQ ID NO: 102372 - DNA, 25 bp, Homo sapien
agttgcaaatgtctctcacaatgtt

SEQ ID NO: 102373 - DNA, 25 bp, Homo sapien
ctagggacaagagttcacaattttt

SEQ ID NO: 102374 - DNA, 25 bp, Homo sapien
ctagggacaagacttcacaattttt

SEQ ID NO: 102375 - DNA, 25 bp, Homo sapien
ggagcacaaaacttccgaaaactaa

SEQ ID NO: 102376 - DNA, 25 bp, Homo sapien
ggagcacaaaacatccgaaaactaa

SEQ ID NO: 102377 - DNA, 25 bp, Homo sapien
tctgccactagacaaccaaaagaga

SEQ ID NO: 102378 - DNA, 25 bp, Homo sapien
tctgccactagagaaccaaaagaga

SEQ ID NO: 102379 - DNA, 25 bp, Homo sapien
cagtatgtgctaagggtcctgagga

SEQ ID NO: 102380 - DNA, 25 bp, Homo sapien
cagtatgtgctatgggtcctgagga

SEQ ID NO: 102381 - DNA, 25 bp, Homo sapien
atacttgctctgattaccaaccgtg

SEQ ID NO: 102382 - DNA, 25 bp, Homo sapien
atacttgctctgtttaccaaccgtg

SEQ ID NO: 102383 - DNA, 25 bp, Homo sapien
aagtggcgtcggagtacaacacagg

SEQ ID NO: 102384 - DNA, 25 bp, Homo sapien
aagtggcgtcggtgtacaacacagg

SEQ ID NO: 102385 - DNA, 25 bp, Homo sapien
gacatggtcctcgtcgtcgcgccgg

SEQ ID NO: 102386 - DNA, 25 bp, Homo sapien
gacatggtcctcctcgtcgcgccgg

SEQ ID NO: 102387 - DNA, 25 bp, Homo sapien
ccaccgtcggctcggacccgaccgc

SEQ ID NO: 102388 - DNA, 25 bp, Homo sapien
ccaccgtcggctgggacccgaccgc

SEQ ID NO: 102389 - DNA, 25 bp, Homo sapien
ggacccgccggctgtagaaccagaa

SEQ ID NO: 102390 - DNA, 25 bp, Homo sapien
ggacccgccggcagtagaaccagaa

SEQ ID NO: 102391 - DNA, 25 bp, Homo sapien
acagtccttcaaacacctaggcgag

SEQ ID NO: 102392 - DNA, 25 bp, Homo sapien
acagtccttcaatcacctaggcgag

SEQ ID NO: 102393 - DNA, 25 bp, Homo sapien
atcaaggacttgagccctacggaca

SEQ ID NO: 102394 - DNA, 25 bp, Homo sapien
atcaaggacttgtgccctacggaca

SEQ ID NO: 102395 - DNA, 25 bp, Homo sapien
tcgaagagatcctacccgaactgaa

SEQ ID NO: 102396 - DNA, 25 bp, Homo sapien
tcgaagagatccaacccgaactgaa

SEQ ID NO: 102397 - DNA, 25 bp, Homo sapien
tgttaatggaccaagatgaatccta

SEQ ID NO: 102398 - DNA, 25 bp, Homo sapien
tgttaatggacctagatgaatccta

SEQ ID NO: 102399 - DNA, 25 bp, Homo sapien
tctttgtacccaagtgacttgcagt

SEQ ID NO: 102400 - DNA, 25 bp, Homo sapien
tctttgtacccatgtgacttgcagt

SEQ ID NO: 102401 - DNA, 25 bp, Homo sapien
gggtcccgactcattgactataaag

SEQ ID NO: 102402 - DNA, 25 bp, Homo sapien
gggtcccgactctttgactataaag

SEQ ID NO: 102403 - DNA, 25 bp, Homo sapien
cagggcgagcagtctttgcggacaa

SEQ ID NO: 102404 - DNA, 25 bp, Homo sapien
cagggcgagcagactttgcggacaa

SEQ ID NO: 102405 - DNA, 25 bp, Homo sapien
tatcgggacatactatgttcgtaaa

SEQ ID NO: 102406 - DNA, 25 bp, Homo sapien
tatcgggacatagtatgttcgtaaa

SEQ ID NO: 102407 - DNA, 25 bp, Homo sapien
agtatatgaaaattgtcctcgaaca

SEQ ID NO: 102408 - DNA, 25 bp, Homo sapien
agtatatgaaaaatgtcctcgaaca

SEQ ID NO: 102409 - DNA, 25 bp, Homo sapien
ctttttagaacagacaccccaagag

SEQ ID NO: 102410 - DNA, 25 bp, Homo sapien
ctttttagaacacacaccccaagag

SEQ ID NO: 102411 - DNA, 25 bp, Homo sapien
gccgtagagacacttccgtcccggg

SEQ ID NO: 102412 - DNA, 25 bp, Homo sapien
gccgtagagacagttccgtcccggg

SEQ ID NO: 102413 - DNA, 25 bp, Homo sapien
gagcgtgccatcacggtcccgagtc

SEQ ID NO: 102414 - DNA, 25 bp, Homo sapien
gagcgtgccatctcggtcccgagtc

SEQ ID NO: 102415 - DNA, 25 bp, Homo sapien
ctgtgtccaccgactgtcaccagtt

SEQ ID NO: 102416 - DNA, 25 bp, Homo sapien
ctgtgtccaccgtctgtcaccagtt

SEQ ID NO: 102417 - DNA, 25 bp, Homo sapien
ctacgtcttcctatataccacagac

SEQ ID NO: 102418 - DNA, 25 bp, Homo sapien
ctacgtcttcctttataccacagac

SEQ ID NO: 102419 - DNA, 25 bp, Homo sapien
attctatttacgtctagactgacag

SEQ ID NO: 102420 - DNA, 25 bp, Homo sapien
attctatttacgactagactgacag

SEQ ID NO: 102421 - DNA, 25 bp, Homo sapien
tgtttcacttaactcgagcgtgtta

SEQ ID NO: 102422 - DNA, 25 bp, Homo sapien
tgtttcacttaagtcgagcgtgtta

SEQ ID NO: 102423 - DNA, 25 bp, Homo sapien
tagagttctggtcctcgaacagtga

SEQ ID NO: 102424 - DNA, 25 bp, Homo sapien
tagagttctggtgctcgaacagtga

SEQ ID NO: 102425 - DNA, 25 bp, Homo sapien
ttctcactttcgtctctacaaggaa

SEQ ID NO: 102426 - DNA, 25 bp, Homo sapien
ttctcactttcgactctacaaggaa

SEQ ID NO: 102427 - DNA, 25 bp, Homo sapien
tctcggtaggttcgtacggtcggaa

SEQ ID NO: 102428 - DNA, 25 bp, Homo sapien
tctcggtaggttggtacggtcggaa

SEQ ID NO: 102429 - DNA, 25 bp, Homo sapien
ctcacgaccgttctggaggagacgt

SEQ ID NO: 102430 - DNA, 25 bp, Homo sapien
ctcacgaccgttgtggaggagacgt

SEQ ID NO: 102431 - DNA, 25 bp, Homo sapien
atgacaaccgttgtcgtgtcgggac

SEQ ID NO: 102432 - DNA, 25 bp, Homo sapien
atgacaaccgttctcgtgtcgggac

SEQ ID NO: 102433 - DNA, 25 bp, Homo sapien
aaaaacgaggtttacgatgctggac

SEQ ID NO: 102434 - DNA, 25 bp, Homo sapien
aaaaacgaggttaacgatgctggac

SEQ ID NO: 102435 - DNA, 25 bp, Homo sapien
gaaacaccatgaaacctcgcgtgcc

SEQ ID NO: 102436 - DNA, 25 bp, Homo sapien
gaaacaccatgatacctcgcgtgcc

SEQ ID NO: 102437 - DNA, 25 bp, Homo sapien
gtcaagtagactttcctccagggga

SEQ ID NO: 102438 - DNA, 25 bp, Homo sapien
gtcaagtagactatcctccagggga

SEQ ID NO: 102439 - DNA, 25 bp, Homo sapien
gatgatagacgtactccgagggaac

SEQ ID NO: 102440 - DNA, 25 bp, Homo sapien
gatgatagacgttctccgagggaac

SEQ ID NO: 102441 - DNA, 25 bp, Homo sapien
tatcacacatgagctactcggtaac

SEQ ID NO: 102442 - DNA, 25 bp, Homo sapien
tatcacacatgacctactcggtaac

SEQ ID NO: 102443 - DNA, 25 bp, Homo sapien
tcttcctcctttcacgtggtacagt

SEQ ID NO: 102444 - DNA, 25 bp, Homo sapien
tcttcctcctttgacgtggtacagt

SEQ ID NO: 102445 - DNA, 25 bp, Homo sapien
ttcctccgggttttcgctgtaccgt

SEQ ID NO: 102446 - DNA, 25 bp, Homo sapien
ttcctccgggttatcgctgtaccgt

SEQ ID NO: 102447 - DNA, 25 bp, Homo sapien
accggtgcggcttctacgagtggtg

SEQ ID NO: 102448 - DNA, 25 bp, Homo sapien
accggtgcggctactacgagtggtg

SEQ ID NO: 102449 - DNA, 25 bp, Homo sapien
tccgtataggtatccccttcgaccg

SEQ ID NO: 102450 - DNA, 25 bp, Homo sapien
tccgtataggtaaccccttcgaccg

SEQ ID NO: 102451 - DNA, 25 bp, Homo sapien
gttaagggtccgtagatatagaccg

SEQ ID NO: 102452 - DNA, 25 bp, Homo sapien
gttaagggtccgaagatatagaccg

SEQ ID NO: 102453 - DNA, 25 bp, Homo sapien
tatggttcacggtgtcaaataattc

SEQ ID NO: 102454 - DNA, 25 bp, Homo sapien
tatggttcacggagtcaaataattc

SEQ ID NO: 102455 - DNA, 25 bp, Homo sapien
ggtgcaaggtctacaaaacccgtat

SEQ ID NO: 102456 - DNA, 25 bp, Homo sapien
ggtgcaaggtcttcaaaacccgtat

SEQ ID NO: 102457 - DNA, 25 bp, Homo sapien
gcccataggtatcaccaacaccagt

SEQ ID NO: 102458 - DNA, 25 bp, Homo sapien
gcccataggtatgaccaacaccagt

SEQ ID NO: 102459 - DNA, 25 bp, Homo sapien
accctgtagatttctgaaaccgtgt

SEQ ID NO: 102460 - DNA, 25 bp, Homo sapien
accctgtagattactgaaaccgtgt

SEQ ID NO: 102461 - DNA, 25 bp, Homo sapien
ttctattgtgttacaaagaccgtgt

SEQ ID NO: 102462 - DNA, 25 bp, Homo sapien
ttctattgtgtttcaaagaccgtgt

SEQ ID NO: 102463 - DNA, 25 bp, Homo sapien
ccttgtagtacttacatgtatcaat

SEQ ID NO: 102464 - DNA, 25 bp, Homo sapien
ccttgtagtactaacatgtatcaat

SEQ ID NO: 102465 - DNA, 25 bp, Homo sapien
ccactataagacacgtcgtttaaac

SEQ ID NO: 102466 - DNA, 25 bp, Homo sapien
ccactataagactcgtcgtttaaac

SEQ ID NO: 102467 - DNA, 25 bp, Homo sapien
acacagaaacatcaggtatacgacc

SEQ ID NO: 102468 - DNA, 25 bp, Homo sapien
acacagaaacatgaggtatacgacc

SEQ ID NO: 102469 - DNA, 25 bp, Homo sapien
tttaactgtaaaacgtgatgtccca

SEQ ID NO: 102470 - DNA, 25 bp, Homo sapien
tttaactgtaaatcgtgatgtccca

SEQ ID NO: 102471 - DNA, 25 bp, Homo sapien
gtaagttacaacacgatacttaaag

SEQ ID NO: 102472 - DNA, 25 bp, Homo sapien
gtaagttacaactcgatacttaaag

SEQ ID NO: 102473 - DNA, 25 bp, Homo sapien
tactcctgagacatgtgtttacaca

SEQ ID NO: 102474 - DNA, 25 bp, Homo sapien
tactcctgagacttgtgtttacaca

SEQ ID NO: 102475 - DNA, 25 bp, Homo sapien
gactgtcggtgcaactttaggacac

SEQ ID NO: 102476 - DNA, 25 bp, Homo sapien
gactgtcggtgctactttaggacac

SEQ ID NO: 102477 - DNA, 25 bp, Homo sapien
agaccttgagactcagtatcgcagc

SEQ ID NO: 102478 - DNA, 25 bp, Homo sapien
agaccttgagacacagtatcgcagc

SEQ ID NO: 102479 - DNA, 25 bp, Homo sapien
tatgttcgaccgtatcagtttcgtg

SEQ ID NO: 102480 - DNA, 25 bp, Homo sapien
tatgttcgaccgaatcagtttcgtg

SEQ ID NO: 102481 - DNA, 25 bp, Homo sapien
ttattcacgtaaagttcctttcgtg

SEQ ID NO: 102482 - DNA, 25 bp, Homo sapien
ttattcacgtaatgttcctttcgtg

SEQ ID NO: 102483 - DNA, 25 bp, Homo sapien
tcacgcgtacacgtgtgcacaaggg

SEQ ID NO: 102484 - DNA, 25 bp, Homo sapien
tcacgcgtacacctgtgcacaaggg

SEQ ID NO: 102485 - DNA, 25 bp, Homo sapien
taagttactctgtgtaccgacaaag

SEQ ID NO: 102486 - DNA, 25 bp, Homo sapien
taagttactctgagtaccgacaaag

SEQ ID NO: 102487 - DNA, 25 bp, Homo sapien
ccaaagattcgtgtggtcgatgatg

SEQ ID NO: 102488 - DNA, 25 bp, Homo sapien
ccaaagattcgtctggtcgatgatg

SEQ ID NO: 102489 - DNA, 25 bp, Homo sapien
tgataattgtcacagtatcatgatc

SEQ ID NO: 102490 - DNA, 25 bp, Homo sapien
tgataattgtcagagtatcatgatc

SEQ ID NO: 102491 - DNA, 25 bp, Homo sapien
acgaagatctcacaagtattaaagt

SEQ ID NO: 102492 - DNA, 25 bp, Homo sapien
acgaagatctcagaagtattaaagt

SEQ ID NO: 102493 - DNA, 25 bp, Homo sapien
gagacgaatccctaaaagaataact

SEQ ID NO: 102494 - DNA, 25 bp, Homo sapien
gagacgaatcccaaaaagaataact

SEQ ID NO: 102495 - DNA, 25 bp, Homo sapien
cgatgttttccgtaaacaatagttg

SEQ ID NO: 102496 - DNA, 25 bp, Homo sapien
cgatgttttccgaaaacaatagttg

SEQ ID NO: 102497 - DNA, 25 bp, Homo sapien
aattttacccacaatagtctcaggg

SEQ ID NO: 102498 - DNA, 25 bp, Homo sapien
aattttacccactatagtctcaggg

SEQ ID NO: 102499 - DNA, 25 bp, Homo sapien
tgtagccgcgacgagtacctggcgc

SEQ ID NO: 102500 - DNA, 25 bp, Homo sapien
tgtagccgcgaccagtacctggcgc

SEQ ID NO: 102501 - DNA, 25 bp, Homo sapien
ttccgtttcggtctcgagtcttgga

SEQ ID NO: 102502 - DNA, 25 bp, Homo sapien
ttccgtttcggtgtcgagtcttgga

SEQ ID NO: 102503 - DNA, 25 bp, Homo sapien
cttcattggtcttgtagtttcgaat

SEQ ID NO: 102504 - DNA, 25 bp, Homo sapien
cttcattggtctagtagtttcgaat

SEQ ID NO: 102505 - DNA, 25 bp, Homo sapien
gactcaaaacggtttgggtcaccag

SEQ ID NO: 102506 - DNA, 25 bp, Homo sapien
gactcaaaacggattgggtcaccag

SEQ ID NO: 102507 - DNA, 25 bp, Homo sapien
gaagaactgtcgaagaaatctcaga

SEQ ID NO: 102508 - DNA, 25 bp, Homo sapien
gaagaactgtcgtagaaatctcaga

SEQ ID NO: 102509 - DNA, 25 bp, Homo sapien
ctggtaaaacaactaacattttatt

SEQ ID NO: 102510 - DNA, 25 bp, Homo sapien
ctggtaaaacaagtaacattttatt

SEQ ID NO: 102511 - DNA, 25 bp, Homo sapien
gtaataagtcgatttgctttacctt

SEQ ID NO: 102512 - DNA, 25 bp, Homo sapien
gtaataagtcgaattgctttacctt

SEQ ID NO: 102513 - DNA, 25 bp, Homo sapien
aaaattcgttgatgttcgtctttca

SEQ ID NO: 102514 - DNA, 25 bp, Homo sapien
aaaattcgttgaagttcgtctttca

SEQ ID NO: 102515 - DNA, 25 bp, Homo sapien
caacatctctccccttcttagagcc

SEQ ID NO: 102516 - DNA, 25 bp, Homo sapien
caacatctctccgcttcttagagcc

SEQ ID NO: 102517 - DNA, 25 bp, Homo sapien
agtttaccttggtcttcgagtcgac

SEQ ID NO: 102518 - DNA, 25 bp, Homo sapien
agtttaccttggacttcgagtcgac

SEQ ID NO: 102519 - DNA, 25 bp, Homo sapien
attgtctgtccttggtcccctgacc

SEQ ID NO: 102520 - DNA, 25 bp, Homo sapien
attgtctgtcctaggtcccctgacc

SEQ ID NO: 102521 - DNA, 25 bp, Homo sapien
tgttagtccctgacgccttcagtcc

SEQ ID NO: 102522 - DNA, 25 bp, Homo sapien
tgttagtccctgtcgccttcagtcc

SEQ ID NO: 102523 - DNA, 25 bp, Homo sapien
cactcgtttgcgaacgtcgagactg

SEQ ID NO: 102524 - DNA, 25 bp, Homo sapien
cactcgtttgcgtacgtcgagactg

SEQ ID NO: 102525 - DNA, 25 bp, Homo sapien
ctgaaccgtttacgacactctaatg

SEQ ID NO: 102526 - DNA, 25 bp, Homo sapien
ctgaaccgtttaggacactctaatg

SEQ ID NO: 102527 - DNA, 25 bp, Homo sapien
tctctggtcccgttgaagtccctag

SEQ ID NO: 102528 - DNA, 25 bp, Homo sapien
tctctggtcccgatgaagtccctag

SEQ ID NO: 102529 - DNA, 25 bp, Homo sapien
acgtcgaggtacaatgacaggtcaa

SEQ ID NO: 102530 - DNA, 25 bp, Homo sapien
acgtcgaggtactatgacaggtcaa

SEQ ID NO: 102531 - DNA, 25 bp, Homo sapien
atgtgacggagcaatccaggtcccc

SEQ ID NO: 102532 - DNA, 25 bp, Homo sapien
atgtgacggagctatccaggtcccc

SEQ ID NO: 102533 - DNA, 25 bp, Homo sapien
aaagcggagtggtgtccagtgcccc

SEQ ID NO: 102534 - DNA, 25 bp, Homo sapien
aaagcggagtggagtccagtgcccc

SEQ ID NO: 102535 - DNA, 25 bp, Homo sapien
aagaaccgggaactttactcggtcg

SEQ ID NO: 102536 - DNA, 25 bp, Homo sapien
aagaaccgggaagtttactcggtcg

SEQ ID NO: 102537 - DNA, 25 bp, Homo sapien
acgaggaaggtgtcgggatctatcc

SEQ ID NO: 102538 - DNA, 25 bp, Homo sapien
acgaggaaggtgacgggatctatcc

SEQ ID NO: 102539 - DNA, 25 bp, Homo sapien
ttctgaaaggccgtgactggcctca

SEQ ID NO: 102540 - DNA, 25 bp, Homo sapien
ttctgaaaggccctgactggcctca

SEQ ID NO: 102541 - DNA, 25 bp, Homo sapien
gtaggtaagaccttccaggaaccca

SEQ ID NO: 102542 - DNA, 25 bp, Homo sapien
gtaggtaagaccatccaggaaccca

SEQ ID NO: 102543 - DNA, 25 bp, Homo sapien
tcggagaactgcatcaaaggcccct

SEQ ID NO: 102544 - DNA, 25 bp, Homo sapien
tcggagaactgcttcaaaggcccct

SEQ ID NO: 102545 - DNA, 25 bp, Homo sapien
gaggtccgcgtcgtcaagcgccacc

SEQ ID NO: 102546 - DNA, 25 bp, Homo sapien
gaggtccgcgtcctcaagcgccacc

SEQ ID NO: 102547 - DNA, 25 bp, Homo sapien
ggaggactcgcgttcatgaggcaca

SEQ ID NO: 102548 - DNA, 25 bp, Homo sapien
ggaggactcgcgatcatgaggcaca

SEQ ID NO: 102549 - DNA, 25 bp, Homo sapien
gagaccagacgttgtgtcttgtaaa

SEQ ID NO: 102550 - DNA, 25 bp, Homo sapien
gagaccagacgtagtgtcttgtaaa

SEQ ID NO: 102551 - DNA, 25 bp, Homo sapien
cctcagcttcggtcgtcacggaaag

SEQ ID NO: 102552 - DNA, 25 bp, Homo sapien
cctcagcttcggacgtcacggaaag

SEQ ID NO: 102553 - DNA, 25 bp, Homo sapien
ttcacgattttgtcttccgtgaagt

SEQ ID NO: 102554 - DNA, 25 bp, Homo sapien
ttcacgattttgacttccgtgaagt

SEQ ID NO: 102555 - DNA, 25 bp, Homo sapien
agatgtgtgttcgtacaccgtgaat

SEQ ID NO: 102556 - DNA, 25 bp, Homo sapien
agatgtgtgttcctacaccgtgaat

SEQ ID NO: 102557 - DNA, 25 bp, Homo sapien
gacaagtcgacgtcacaccgttaat

SEQ ID NO: 102558 - DNA, 25 bp, Homo sapien
gacaagtcgacgacacaccgttaat

SEQ ID NO: 102559 - DNA, 25 bp, Homo sapien
aaacccgcatctcgacgtcgtacta

SEQ ID NO: 102560 - DNA, 25 bp, Homo sapien
aaacccgcatctggacgtcgtacta

SEQ ID NO: 102561 - DNA, 25 bp, Homo sapien
gaaaccagacagtagacctacctcg

SEQ ID NO: 102562 - DNA, 25 bp, Homo sapien
gaaaccagacagaagacctacctcg

SEQ ID NO: 102563 - DNA, 25 bp, Homo sapien
tgagcagcgagaagcgcgacgtctt

SEQ ID NO: 102564 - DNA, 25 bp, Homo sapien
tgagcagcgagatgcgcgacgtctt

SEQ ID NO: 102565 - DNA, 25 bp, Homo sapien
agtcgagtcatatgcgtaacgtata

SEQ ID NO: 102566 - DNA, 25 bp, Homo sapien
agtcgagtcataagcgtaacgtata

SEQ ID NO: 102567 - DNA, 25 bp, Homo sapien
aactcgaaagtgagttcaaaccata

SEQ ID NO: 102568 - DNA, 25 bp, Homo sapien
aactcgaaagtgtgttcaaaccata

SEQ ID NO: 102569 - DNA, 25 bp, Homo sapien
gaaggtggtccctagggactgtctc

SEQ ID NO: 102570 - DNA, 25 bp, Homo sapien
gaaggtggtcccaagggactgtctc

SEQ ID NO: 102571 - DNA, 25 bp, Homo sapien
cgaggacacgcaaggcactagttac

SEQ ID NO: 102572 - DNA, 25 bp, Homo sapien
cgaggacacgcatggcactagttac

SEQ ID NO: 102573 - DNA, 25 bp, Homo sapien
ttccagagaccctcgtccagggtcg

SEQ ID NO: 102574 - DNA, 25 bp, Homo sapien
ttccagagacccacgtccagggtcg

SEQ ID NO: 102575 - DNA, 25 bp, Homo sapien
cttcctcgagatcaggaacccaatc

SEQ ID NO: 102576 - DNA, 25 bp, Homo sapien
cttcctcgagatgaggaacccaatc

SEQ ID NO: 102577 - DNA, 25 bp, Homo sapien
taaagagaggtaacgtcgtctttcg

SEQ ID NO: 102578 - DNA, 25 bp, Homo sapien
taaagagaggtatcgtcgtctttcg

SEQ ID NO: 102579 - DNA, 25 bp, Homo sapien
agcctagtagtcgatgtggtctctg

SEQ ID NO: 102580 - DNA, 25 bp, Homo sapien
agcctagtagtccatgtggtctctg

SEQ ID NO: 102581 - DNA, 25 bp, Homo sapien
accagctcgctacctaaaggcagag

SEQ ID NO: 102582 - DNA, 25 bp, Homo sapien
accagctcgctagctaaaggcagag

SEQ ID NO: 102583 - DNA, 25 bp, Homo sapien
cgtcggtggaacagcgtccccggaa

SEQ ID NO: 102584 - DNA, 25 bp, Homo sapien
cgtcggtggaactgcgtccccggaa

SEQ ID NO: 102585 - DNA, 25 bp, Homo sapien
gagttcagtagaggtccgccgacag

SEQ ID NO: 102586 - DNA, 25 bp, Homo sapien
gagttcagtagacgtccgccgacag

SEQ ID NO: 102587 - DNA, 25 bp, Homo sapien
tggatcagtctctgtccgggaccgt

SEQ ID NO: 102588 - DNA, 25 bp, Homo sapien
tggatcagtctcagtccgggaccgt

SEQ ID NO: 102589 - DNA, 25 bp, Homo sapien
ggtctaagtttaggaccacggtact

SEQ ID NO: 102590 - DNA, 25 bp, Homo sapien
ggtctaagtttacgaccacggtact

SEQ ID NO: 102591 - DNA, 25 bp, Homo sapien
gacgagaaggcgaccgaccaccacg

SEQ ID NO: 102592 - DNA, 25 bp, Homo sapien
gacgagaaggcgtccgaccaccacg

SEQ ID NO: 102593 - DNA, 25 bp, Homo sapien
cgatggtaacacagtccggtcgggc

SEQ ID NO: 102594 - DNA, 25 bp, Homo sapien
cgatggtaacactgtccggtcgggc

SEQ ID NO: 102595 - DNA, 25 bp, Homo sapien
gacttagtagaagaacactcgggta

SEQ ID NO: 102596 - DNA, 25 bp, Homo sapien
gacttagtagaacaacactcgggta

SEQ ID NO: 102597 - DNA, 25 bp, Homo sapien
ccgtgagacgaaagaagatcttcat

SEQ ID NO: 102598 - DNA, 25 bp, Homo sapien
ccgtgagacgaatgaagatcttcat

SEQ ID NO: 102599 - DNA, 25 bp, Homo sapien
ttgggatgtaaaacacgtatttcac

SEQ ID NO: 102600 - DNA, 25 bp, Homo sapien
ttgggatgtaaatcacgtatttcac

SEQ ID NO: 102601 - DNA, 25 bp, Homo sapien
ggaggacgtaggtccgtccttctcg

SEQ ID NO: 102602 - DNA, 25 bp, Homo sapien
ggaggacgtaggaccgtccttctcg

SEQ ID NO: 102603 - DNA, 25 bp, Homo sapien
acggggtcgtgaagaccccttcgtc

SEQ ID NO: 102604 - DNA, 25 bp, Homo sapien
acggggtcgtgatgaccccttcgtc

SEQ ID NO: 102605 - DNA, 25 bp, Homo sapien
tctaccagtggtatcccgtcatttc

SEQ ID NO: 102606 - DNA, 25 bp, Homo sapien
tctaccagtggtttcccgtcatttc

SEQ ID NO: 102607 - DNA, 25 bp, Homo sapien
ataagagtggttaccctgttctcgt

SEQ ID NO: 102608 - DNA, 25 bp, Homo sapien
ataagagtggtttccctgttctcgt

SEQ ID NO: 102609 - DNA, 25 bp, Homo sapien
gaagagacttcttcactttctcgtg

SEQ ID NO: 102610 - DNA, 25 bp, Homo sapien
gaagagacttctacactttctcgtg

SEQ ID NO: 102611 - DNA, 25 bp, Homo sapien
cattaagtgacaaaacttttcagtg

SEQ ID NO: 102612 - DNA, 25 bp, Homo sapien
cattaagtgacataacttttcagtg

SEQ ID NO: 102613 - DNA, 25 bp, Homo sapien
atctggtccccgaaggcttcgacct

SEQ ID NO: 102614 - DNA, 25 bp, Homo sapien
atctggtccccgtaggcttcgacct

SEQ ID NO: 102615 - DNA, 25 bp, Homo sapien
cctccgtcgtcagtgacctcagaag

SEQ ID NO: 102616 - DNA, 25 bp, Homo sapien
cctccgtcgtcactgacctcagaag

SEQ ID NO: 102617 - DNA, 25 bp, Homo sapien
ccctccgtcacagagactcagaaag

SEQ ID NO: 102618 - DNA, 25 bp, Homo sapien
ccctccgtcacacagactcagaaag

SEQ ID NO: 102619 - DNA, 25 bp, Homo sapien
acctaccagtcacagaccagtaaag

SEQ ID NO: 102620 - DNA, 25 bp, Homo sapien
acctaccagtcagagaccagtaaag

SEQ ID NO: 102621 - DNA, 25 bp, Homo sapien
tagtcgtcgtggaaaacgtcccgga

SEQ ID NO: 102622 - DNA, 25 bp, Homo sapien
tagtcgtcgtggtaaacgtcccgga

SEQ ID NO: 102623 - DNA, 25 bp, Homo sapien
ctcggtagaaataggtactccaact

SEQ ID NO: 102624 - DNA, 25 bp, Homo sapien
ctcggtagaaattggtactccaact

SEQ ID NO: 102625 - DNA, 25 bp, Homo sapien
tgtcgtgaccggacccgcgcgtgca

SEQ ID NO: 102626 - DNA, 25 bp, Homo sapien
tgtcgtgaccggtcccgcgcgtgca

SEQ ID NO: 102627 - DNA, 25 bp, Homo sapien
ccgaggtaccggtctccctctgggt

SEQ ID NO: 102628 - DNA, 25 bp, Homo sapien
ccgaggtaccggactccctctgggt

SEQ ID NO: 102629 - DNA, 25 bp, Homo sapien
acgaggtctcggttgtgccttaaag

SEQ ID NO: 102630 - DNA, 25 bp, Homo sapien
acgaggtctcggatgtgccttaaag

SEQ ID NO: 102631 - DNA, 25 bp, Homo sapien
cacagtagctcgatcggggttagga

SEQ ID NO: 102632 - DNA, 25 bp, Homo sapien
cacagtagctcgttcggggttagga

SEQ ID NO: 102633 - DNA, 25 bp, Homo sapien
cattctactgttcctcattgagtag

SEQ ID NO: 102634 - DNA, 25 bp, Homo sapien
cattctactgttgctcattgagtag

SEQ ID NO: 102635 - DNA, 25 bp, Homo sapien
tgattttcgtctcgtgactattaaa

SEQ ID NO: 102636 - DNA, 25 bp, Homo sapien
tgattttcgtctggtgactattaaa

SEQ ID NO: 102637 - DNA, 25 bp, Homo sapien
gattcgttcttactgaagaaatcgt

SEQ ID NO: 102638 - DNA, 25 bp, Homo sapien
gattcgttcttagtgaagaaatcgt

SEQ ID NO: 102639 - DNA, 25 bp, Homo sapien
aactgtcttcttgtttaggtttacg

SEQ ID NO: 102640 - DNA, 25 bp, Homo sapien
aactgtcttcttctttaggtttacg

SEQ ID NO: 102641 - DNA, 25 bp, Homo sapien
aaggggttctcgttccaaccgagtc

SEQ ID NO: 102642 - DNA, 25 bp, Homo sapien
aaggggttctcgatccaaccgagtc

SEQ ID NO: 102643 - DNA, 25 bp, Homo sapien
gaaggggtaaggtccgacatcagac

SEQ ID NO: 102644 - DNA, 25 bp, Homo sapien
gaaggggtaaggaccgacatcagac

SEQ ID NO: 102645 - DNA, 25 bp, Homo sapien
tcctctggaggcacctcttcacagt

SEQ ID NO: 102646 - DNA, 25 bp, Homo sapien
tcctctggaggctcctcttcacagt

SEQ ID NO: 102647 - DNA, 25 bp, Homo sapien
tacagagaagtcgacaggataccga

SEQ ID NO: 102648 - DNA, 25 bp, Homo sapien
tacagagaagtccacaggataccga

SEQ ID NO: 102649 - DNA, 25 bp, Homo sapien
cgaagttacgtagacaggacgattt

SEQ ID NO: 102650 - DNA, 25 bp, Homo sapien
cgaagttacgtacacaggacgattt

SEQ ID NO: 102651 - DNA, 25 bp, Homo sapien
cgagaagtattcacagtagacataa

SEQ ID NO: 102652 - DNA, 25 bp, Homo sapien
cgagaagtattctcagtagacataa

SEQ ID NO: 102653 - DNA, 25 bp, Homo sapien
cgataagtcactgtaaagtcttggt

SEQ ID NO: 102654 - DNA, 25 bp, Homo sapien
cgataagtcactctaaagtcttggt

SEQ ID NO: 102655 - DNA, 25 bp, Homo sapien
tgtccgggtccgtcggagatctccc

SEQ ID NO: 102656 - DNA, 25 bp, Homo sapien
tgtccgggtccgacggagatctccc

SEQ ID NO: 102657 - DNA, 25 bp, Homo sapien
tggataggactcgacggaggacccc

SEQ ID NO: 102658 - DNA, 25 bp, Homo sapien
tggataggactccacggaggacccc

SEQ ID NO: 102659 - DNA, 25 bp, Homo sapien
agtactggtccatcgggtcctccag

SEQ ID NO: 102660 - DNA, 25 bp, Homo sapien
agtactggtccaacgggtcctccag

SEQ ID NO: 102661 - DNA, 25 bp, Homo sapien
ggcagatcgtcgacgaggtccaaga

SEQ ID NO: 102662 - DNA, 25 bp, Homo sapien
ggcagatcgtcgtcgaggtccaaga

SEQ ID NO: 102663 - DNA, 25 bp, Homo sapien
gtagtgacagtaagtcgggtccaaa

SEQ ID NO: 102664 - DNA, 25 bp, Homo sapien
gtagtgacagtatgtcgggtccaaa

SEQ ID NO: 102665 - DNA, 25 bp, Homo sapien
tggtacactattgtacccgtgataa

SEQ ID NO: 102666 - DNA, 25 bp, Homo sapien
tggtacactattctacccgtgataa

SEQ ID NO: 102667 - DNA, 25 bp, Homo sapien
ttgatacacacctccgcaggactgg

SEQ ID NO: 102668 - DNA, 25 bp, Homo sapien
ttgatacacaccaccgcaggactgg

SEQ ID NO: 102669 - DNA, 25 bp, Homo sapien
ttagtttaaacaattcaccggtttg

SEQ ID NO: 102670 - DNA, 25 bp, Homo sapien
ttagtttaaacatttcaccggtttg

SEQ ID NO: 102671 - DNA, 25 bp, Homo sapien
tttcaggtagtagaaccataactcg

SEQ ID NO: 102672 - DNA, 25 bp, Homo sapien
tttcaggtagtacaaccataactcg

SEQ ID NO: 102673 - DNA, 25 bp, Homo sapien
tataaacactatcaagcgacaacgg

SEQ ID NO: 102674 - DNA, 25 bp, Homo sapien
tataaacactatgaagcgacaacgg

SEQ ID NO: 102675 - DNA, 25 bp, Homo sapien
ccctacagttcttccgacgataggt

SEQ ID NO: 102676 - DNA, 25 bp, Homo sapien
ccctacagttctaccgacgataggt

SEQ ID NO: 102677 - DNA, 25 bp, Homo sapien
tccttcttgactcaccgacgacagg

SEQ ID NO: 102678 - DNA, 25 bp, Homo sapien
tccttcttgactgaccgacgacagg

SEQ ID NO: 102679 - DNA, 25 bp, Homo sapien
aaactctttggtacgtatgacatat

SEQ ID NO: 102680 - DNA, 25 bp, Homo sapien
aaactctttggttcgtatgacatat

SEQ ID NO: 102681 - DNA, 25 bp, Homo sapien
aactaatgtggtgtattacgtacag

SEQ ID NO: 102682 - DNA, 25 bp, Homo sapien
aactaatgtggtctattacgtacag

SEQ ID NO: 102683 - DNA, 25 bp, Homo sapien
gacaacatagaggacctagattaca

SEQ ID NO: 102684 - DNA, 25 bp, Homo sapien
gacaacatagagcacctagattaca

SEQ ID NO: 102685 - DNA, 25 bp, Homo sapien
agaagacgaagtcgtttctcgagtc

SEQ ID NO: 102686 - DNA, 25 bp, Homo sapien
agaagacgaagtggtttctcgagtc

SEQ ID NO: 102687 - DNA, 25 bp, Homo sapien
atatcgacagtgtatgttaccgaga

SEQ ID NO: 102688 - DNA, 25 bp, Homo sapien
atatcgacagtgaatgttaccgaga

SEQ ID NO: 102689 - DNA, 25 bp, Homo sapien
gaatcaggaacgttgtcacactata

SEQ ID NO: 102690 - DNA, 25 bp, Homo sapien
gaatcaggaacgatgtcacactata

SEQ ID NO: 102691 - DNA, 25 bp, Homo sapien
tgatccgtgggaagtccgaggtact

SEQ ID NO: 102692 - DNA, 25 bp, Homo sapien
tgatccgtgggatgtccgaggtact

SEQ ID NO: 102693 - DNA, 25 bp, Homo sapien
tgagtctggacgacgggtgactcct

SEQ ID NO: 102694 - DNA, 25 bp, Homo sapien
tgagtctggacgtcgggtgactcct

SEQ ID NO: 102695 - DNA, 25 bp, Homo sapien
cttcagggacatgaggtagacacgg

SEQ ID NO: 102696 - DNA, 25 bp, Homo sapien
cttcagggacatcaggtagacacgg

SEQ ID NO: 102697 - DNA, 25 bp, Homo sapien
cggagaccgtctgcagcagtaaggt

SEQ ID NO: 102698 - DNA, 25 bp, Homo sapien
cggagaccgtctccagcagtaaggt

SEQ ID NO: 102699 - DNA, 25 bp, Homo sapien
gtcgaagagtatccactaccggaaa

SEQ ID NO: 102700 - DNA, 25 bp, Homo sapien
gtcgaagagtatgcactaccggaaa

SEQ ID NO: 102701 - DNA, 25 bp, Homo sapien
acgagggagtctccacggagaagta

SEQ ID NO: 102702 - DNA, 25 bp, Homo sapien
acgagggagtctgcacggagaagta

SEQ ID NO: 102703 - DNA, 25 bp, Homo sapien
tacgggacggtctttccagaagtcg

SEQ ID NO: 102704 - DNA, 25 bp, Homo sapien
tacgggacggtcattccagaagtcg

SEQ ID NO: 102705 - DNA, 25 bp, Homo sapien
tgacctggacgtcaattcaaaaact

SEQ ID NO: 102706 - DNA, 25 bp, Homo sapien
tgacctggacgtgaattcaaaaact

SEQ ID NO: 102707 - DNA, 25 bp, Homo sapien
cctttgtctacgactccacgcggaa

SEQ ID NO: 102708 - DNA, 25 bp, Homo sapien
cctttgtctacgtctccacgcggaa

SEQ ID NO: 102709 - DNA, 25 bp, Homo sapien
atgttggtcaagctccacaccgtga

SEQ ID NO: 102710 - DNA, 25 bp, Homo sapien
atgttggtcaaggtccacaccgtga

SEQ ID NO: 102711 - DNA, 25 bp, Homo sapien
cttagtctttcaagagccccttgac

SEQ ID NO: 102712 - DNA, 25 bp, Homo sapien
cttagtctttcatgagccccttgac

SEQ ID NO: 102713 - DNA, 25 bp, Homo sapien
cgtggatagtatgttccgtgtttct

SEQ ID NO: 102714 - DNA, 25 bp, Homo sapien
cgtggatagtatcttccgtgtttct

SEQ ID NO: 102715 - DNA, 25 bp, Homo sapien
agacgtaagtttcgtctttacattt

SEQ ID NO: 102716 - DNA, 25 bp, Homo sapien
agacgtaagtttggtctttacattt

SEQ ID NO: 102717 - DNA, 25 bp, Homo sapien
agtaccgttatccttgacttcatga

SEQ ID NO: 102718 - DNA, 25 bp, Homo sapien
agtaccgttatcgttgacttcatga

SEQ ID NO: 102719 - DNA, 25 bp, Homo sapien
aaccatgttggttgtaccgttgtaa

SEQ ID NO: 102720 - DNA, 25 bp, Homo sapien
aaccatgttggtagtaccgttgtaa

SEQ ID NO: 102721 - DNA, 25 bp, Homo sapien
tccacttaagggactaccgtaagga

SEQ ID NO: 102722 - DNA, 25 bp, Homo sapien
tccacttaagggtctaccgtaagga

SEQ ID NO: 102723 - DNA, 25 bp, Homo sapien
aactagttgaggtcgaccagtaggg

SEQ ID NO: 102724 - DNA, 25 bp, Homo sapien
aactagttgaggacgaccagtaggg

SEQ ID NO: 102725 - DNA, 25 bp, Homo sapien
aaagtgtaatagaccctctacgtta

SEQ ID NO: 102726 - DNA, 25 bp, Homo sapien
aaagtgtaatagtccctctacgtta

SEQ ID NO: 102727 - DNA, 25 bp, Homo sapien
actaagagtacatggccctcttcta

SEQ ID NO: 102728 - DNA, 25 bp, Homo sapien
actaagagtacaaggccctcttcta

SEQ ID NO: 102729 - DNA, 25 bp, Homo sapien
ataacttatgaagcttcgtcttgtc

SEQ ID NO: 102730 - DNA, 25 bp, Homo sapien
ataacttatgaaccttcgtcttgtc

SEQ ID NO: 102731 - DNA, 25 bp, Homo sapien
ttatgtcccgtatcctttcttgtcg

SEQ ID NO: 102732 - DNA, 25 bp, Homo sapien
ttatgtcccgtaacctttcttgtcg

SEQ ID NO: 102733 - DNA, 25 bp, Homo sapien
tttcgtcacactcttacactcgggc

SEQ ID NO: 102734 - DNA, 25 bp, Homo sapien
tttcgtcacactgttacactcgggc

SEQ ID NO: 102735 - DNA, 25 bp, Homo sapien
ttcgacactccgaagtccggttctt

SEQ ID NO: 102736 - DNA, 25 bp, Homo sapien
ttcgacactccgtagtccggttctt

SEQ ID NO: 102737 - DNA, 25 bp, Homo sapien
gtccggcgcgagagcctacgtccta

SEQ ID NO: 102738 - DNA, 25 bp, Homo sapien
gtccggcgcgagtgcctacgtccta

SEQ ID NO: 102739 - DNA, 25 bp, Homo sapien
cttcagggacggtacagggtcgtca

SEQ ID NO: 102740 - DNA, 25 bp, Homo sapien
cttcagggacggaacagggtcgtca

SEQ ID NO: 102741 - DNA, 25 bp, Homo sapien
ttcagagaactggtgacagaagtca

SEQ ID NO: 102742 - DNA, 25 bp, Homo sapien
ttcagagaactgctgacagaagtca

SEQ ID NO: 102743 - DNA, 25 bp, Homo sapien
acactgaccgagtgtaagaatctgt

SEQ ID NO: 102744 - DNA, 25 bp, Homo sapien
acactgaccgagagtaagaatctgt

SEQ ID NO: 102745 - DNA, 25 bp, Homo sapien
cttccggcacacatacatacacgtg

SEQ ID NO: 102746 - DNA, 25 bp, Homo sapien
cttccggcacacttacatacacgtg

SEQ ID NO: 102747 - DNA, 25 bp, Homo sapien
cgtctttcgggcagtctccaagtag

SEQ ID NO: 102748 - DNA, 25 bp, Homo sapien
cgtctttcgggctgtctccaagtag

SEQ ID NO: 102749 - DNA, 25 bp, Homo sapien
agttcggcggccagtccatgacgtg

SEQ ID NO: 102750 - DNA, 25 bp, Homo sapien
agttcggcggcctgtccatgacgtg

SEQ ID NO: 102751 - DNA, 25 bp, Homo sapien
gtactcttcggtcttctttataacg

SEQ ID NO: 102752 - DNA, 25 bp, Homo sapien
gtactcttcggtgttctttataacg

SEQ ID NO: 102753 - DNA, 25 bp, Homo sapien
cttagatcttttatttttgttatat

SEQ ID NO: 102754 - DNA, 25 bp, Homo sapien
cttagatcttttttttttgttatat

SEQ ID NO: 102755 - DNA, 25 bp, Homo sapien
ttttagattttgtttgtgtaagttt

SEQ ID NO: 102756 - DNA, 25 bp, Homo sapien
ttttagattttgattgtgtaagttt

SEQ ID NO: 102757 - DNA, 25 bp, Homo sapien
cctatgacacttagtgattttttga

SEQ ID NO: 102758 - DNA, 25 bp, Homo sapien
cctatgacactttgtgattttttga

SEQ ID NO: 102759 - DNA, 25 bp, Homo sapien
tgtgctatgttgagttatgtcctca

SEQ ID NO: 102760 - DNA, 25 bp, Homo sapien
tgtgctatgttgtgttatgtcctca

SEQ ID NO: 102761 - DNA, 25 bp, Homo sapien
tcaacagttccaaagtctccgtcag

SEQ ID NO: 102762 - DNA, 25 bp, Homo sapien
tcaacagttccatagtctccgtcag

SEQ ID NO: 102763 - DNA, 25 bp, Homo sapien
gacgggactccctactacccgaagt

SEQ ID NO: 102764 - DNA, 25 bp, Homo sapien
gacgggactcccaactacccgaagt

SEQ ID NO: 102765 - DNA, 25 bp, Homo sapien
tgtggaggacaccaggtcaccgaag

SEQ ID NO: 102766 - DNA, 25 bp, Homo sapien
tgtggaggacacgaggtcaccgaag

SEQ ID NO: 102767 - DNA, 25 bp, Homo sapien
acgaacgcgtcctactgcaacaacg

SEQ ID NO: 102768 - DNA, 25 bp, Homo sapien
acgaacgcgtccaactgcaacaacg

SEQ ID NO: 102769 - DNA, 25 bp, Homo sapien
agcagcgggagtgacaaggacccac

SEQ ID NO: 102770 - DNA, 25 bp, Homo sapien
agcagcgggagtcacaaggacccac

SEQ ID NO: 102771 - DNA, 25 bp, Homo sapien
tcagcaggacgtggaagtgccactc

SEQ ID NO: 102772 - DNA, 25 bp, Homo sapien
tcagcaggacgtcgaagtgccactc

SEQ ID NO: 102773 - DNA, 25 bp, Homo sapien
ccgagcaggcgttcaggcatcggac

SEQ ID NO: 102774 - DNA, 25 bp, Homo sapien
ccgagcaggcgtacaggcatcggac

SEQ ID NO: 102775 - DNA, 25 bp, Homo sapien
tggatatttacacctttaacgaacg

SEQ ID NO: 102776 - DNA, 25 bp, Homo sapien
tggatatttacagctttaacgaacg

SEQ ID NO: 102777 - DNA, 25 bp, Homo sapien
cgaaaaatactcagacttgaaaacg

SEQ ID NO: 102778 - DNA, 25 bp, Homo sapien
cgaaaaatactctgacttgaaaacg

SEQ ID NO: 102779 - DNA, 25 bp, Homo sapien
gtaaggtttactccgtaagtaaaag

SEQ ID NO: 102780 - DNA, 25 bp, Homo sapien
gtaaggtttactgcgtaagtaaaag

SEQ ID NO: 102781 - DNA, 25 bp, Homo sapien
ggtcacgtcctctaccactgggaga

SEQ ID NO: 102782 - DNA, 25 bp, Homo sapien
ggtcacgtcctcaaccactgggaga

SEQ ID NO: 102783 - DNA, 25 bp, Homo sapien
gtgaagtcctacaagggaggaccat

SEQ ID NO: 102784 - DNA, 25 bp, Homo sapien
gtgaagtcctactagggaggaccat

SEQ ID NO: 102785 - DNA, 25 bp, Homo sapien
cgtgagttctacaaggaatctttat

SEQ ID NO: 102786 - DNA, 25 bp, Homo sapien
cgtgagttctactaggaatctttat

SEQ ID NO: 102787 - DNA, 25 bp, Homo sapien
tggtggaccacatgggacctcgttt

SEQ ID NO: 102788 - DNA, 25 bp, Homo sapien
tggtggaccacaagggacctcgttt

SEQ ID NO: 102789 - DNA, 25 bp, Homo sapien
cgggtgctcacaaacgaaaacgatg

SEQ ID NO: 102790 - DNA, 25 bp, Homo sapien
cgggtgctcacatacgaaaacgatg

SEQ ID NO: 102791 - DNA, 25 bp, Homo sapien
ggtctcaccacagagaaacgctaag

SEQ ID NO: 102792 - DNA, 25 bp, Homo sapien
ggtctcaccacacagaaacgctaag

SEQ ID NO: 102793 - DNA, 25 bp, Homo sapien
ggtatccaactccataaatcatgga

SEQ ID NO: 102794 - DNA, 25 bp, Homo sapien
ggtatccaactcgataaatcatgga

SEQ ID NO: 102795 - DNA, 25 bp, Homo sapien
aaagaagccagagtaacctgtggtt

SEQ ID NO: 102796 - DNA, 25 bp, Homo sapien
aaagaagccagactaacctgtggtt

SEQ ID NO: 102797 - DNA, 25 bp, Homo sapien
taagaagtcagaaaagaccttgaac

SEQ ID NO: 102798 - DNA, 25 bp, Homo sapien
taagaagtcagataagaccttgaac

SEQ ID NO: 102799 - DNA, 25 bp, Homo sapien
tttatgaaccgacgataaagctttg

SEQ ID NO: 102800 - DNA, 25 bp, Homo sapien
tttatgaaccgaggataaagctttg

SEQ ID NO: 102801 - DNA, 25 bp, Homo sapien
agaggaccacccaggggtctgtcgc

SEQ ID NO: 102802 - DNA, 25 bp, Homo sapien
agaggaccaccctggggtctgtcgc

SEQ ID NO: 102803 - DNA, 25 bp, Homo sapien
aaaccatctcgtcgacgctcatggt

SEQ ID NO: 102804 - DNA, 25 bp, Homo sapien
aaaccatctcgtggacgctcatggt

SEQ ID NO: 102805 - DNA, 25 bp, Homo sapien
tgaccaccacgtgagactccttggt

SEQ ID NO: 102806 - DNA, 25 bp, Homo sapien
tgaccaccacgtcagactccttggt

SEQ ID NO: 102807 - DNA, 25 bp, Homo sapien
agtctgtctccgacgtggccatgtc

SEQ ID NO: 102808 - DNA, 25 bp, Homo sapien
agtctgtctccgtcgtggccatgtc

SEQ ID NO: 102809 - DNA, 25 bp, Homo sapien
tctcgtcctccgacggcttgtaggc

SEQ ID NO: 102810 - DNA, 25 bp, Homo sapien
tctcgtcctccgtcggcttgtaggc

SEQ ID NO: 102811 - DNA, 25 bp, Homo sapien
cgtcggtctttgtcctgcgtcgact

SEQ ID NO: 102812 - DNA, 25 bp, Homo sapien
cgtcggtctttgacctgcgtcgact

SEQ ID NO: 102813 - DNA, 25 bp, Homo sapien
tcggcgttctctgacaaccgacgag

SEQ ID NO: 102814 - DNA, 25 bp, Homo sapien
tcggcgttctctcacaaccgacgag

SEQ ID NO: 102815 - DNA, 25 bp, Homo sapien
aggtcaaatagtccattatacgaga

SEQ ID NO: 102816 - DNA, 25 bp, Homo sapien
aggtcaaatagtgcattatacgaga

SEQ ID NO: 102817 - DNA, 25 bp, Homo sapien
gagggtctttatagtcccctctacc

SEQ ID NO: 102818 - DNA, 25 bp, Homo sapien
gagggtctttattgtcccctctacc

SEQ ID NO: 102819 - DNA, 25 bp, Homo sapien
ggggtccttctctgcgggaactccg

SEQ ID NO: 102820 - DNA, 25 bp, Homo sapien
ggggtccttctcagcgggaactccg

SEQ ID NO: 102821 - DNA, 25 bp, Homo sapien
gagaaatactatgtgcagaagtccg

SEQ ID NO: 102822 - DNA, 25 bp, Homo sapien
gagaaatactatctgcagaagtccg

SEQ ID NO: 102823 - DNA, 25 bp, Homo sapien
actgaaagtaaagagaccaagtctc

SEQ ID NO: 102824 - DNA, 25 bp, Homo sapien
actgaaagtaaacagaccaagtctc

SEQ ID NO: 102825 - DNA, 25 bp, Homo sapien
gaaaaagtatcattggacaaactac

SEQ ID NO: 102826 - DNA, 25 bp, Homo sapien
gaaaaagtatcaatggacaaactac

SEQ ID NO: 102827 - DNA, 25 bp, Homo sapien
aataagagaggacacccacaactgt

SEQ ID NO: 102828 - DNA, 25 bp, Homo sapien
aataagagaggagacccacaactgt

SEQ ID NO: 102829 - DNA, 25 bp, Homo sapien
cgaaacggagatggtcaaccgtctg

SEQ ID NO: 102830 - DNA, 25 bp, Homo sapien
cgaaacggagatcgtcaaccgtctg

SEQ ID NO: 102831 - DNA, 25 bp, Homo sapien
gaagtcgggtgtgaaagaccgacat

SEQ ID NO: 102832 - DNA, 25 bp, Homo sapien
gaagtcgggtgtcaaagaccgacat

SEQ ID NO: 102833 - DNA, 25 bp, Homo sapien
accctgagtcggtgagactgtccaa

SEQ ID NO: 102834 - DNA, 25 bp, Homo sapien
accctgagtcggagagactgtccaa

SEQ ID NO: 102835 - DNA, 25 bp, Homo sapien
tggtcgagtcgcaatcatgtccaat

SEQ ID NO: 102836 - DNA, 25 bp, Homo sapien
tggtcgagtcgctatcatgtccaat

SEQ ID NO: 102837 - DNA, 25 bp, Homo sapien
ggggctcgccgacaggtccgactac

SEQ ID NO: 102838 - DNA, 25 bp, Homo sapien
ggggctcgccgagaggtccgactac

SEQ ID NO: 102839 - DNA, 25 bp, Homo sapien
agtgcgaccacctcggagtcgggac

SEQ ID NO: 102840 - DNA, 25 bp, Homo sapien
agtgcgaccaccacggagtcgggac

SEQ ID NO: 102841 - DNA, 25 bp, Homo sapien
cggaccgaacctcagactcgcggag

SEQ ID NO: 102842 - DNA, 25 bp, Homo sapien
cggaccgaacctgagactcgcggag

SEQ ID NO: 102843 - DNA, 25 bp, Homo sapien
tcggccgcgagacgtcgaaccagga

SEQ ID NO: 102844 - DNA, 25 bp, Homo sapien
tcggccgcgagaggtcgaaccagga

SEQ ID NO: 102845 - DNA, 25 bp, Homo sapien
ccggagcccagttctaaaactagac

SEQ ID NO: 102846 - DNA, 25 bp, Homo sapien
ccggagcccagtactaaaactagac

SEQ ID NO: 102847 - DNA, 25 bp, Homo sapien
taataagacccctcttataggtgtg

SEQ ID NO: 102848 - DNA, 25 bp, Homo sapien
taataagaccccacttataggtgtg

SEQ ID NO: 102849 - DNA, 25 bp, Homo sapien
gataagcctgtaaacatctaggatg

SEQ ID NO: 102850 - DNA, 25 bp, Homo sapien
gataagcctgtatacatctaggatg

SEQ ID NO: 102851 - DNA, 25 bp, Homo sapien
agaagagtacccagtccccaggata

SEQ ID NO: 102852 - DNA, 25 bp, Homo sapien
agaagagtaccctgtccccaggata

SEQ ID NO: 102853 - DNA, 25 bp, Homo sapien
ggggagccatcctctgtcgcgtcct

SEQ ID NO: 102854 - DNA, 25 bp, Homo sapien
ggggagccatccactgtcgcgtcct

SEQ ID NO: 102855 - DNA, 25 bp, Homo sapien
gactcgtggccctctgtcactgtgt

SEQ ID NO: 102856 - DNA, 25 bp, Homo sapien
gactcgtggcccactgtcactgtgt

SEQ ID NO: 102857 - DNA, 25 bp, Homo sapien
gtgtaacaacccttccgcgagtgtt

SEQ ID NO: 102858 - DNA, 25 bp, Homo sapien
gtgtaacaacccatccgcgagtgtt

SEQ ID NO: 102859 - DNA, 25 bp, Homo sapien
gtgtgtcaggctcctcttataggtt

SEQ ID NO: 102860 - DNA, 25 bp, Homo sapien
gtgtgtcaggctgctcttataggtt

SEQ ID NO: 102861 - DNA, 25 bp, Homo sapien
gttcgtgttgtgactttataacgtc

SEQ ID NO: 102862 - DNA, 25 bp, Homo sapien
gttcgtgttgtgtctttataacgtc

SEQ ID NO: 102863 - DNA, 25 bp, Homo sapien
ccgaactggttgacctcttatctcg

SEQ ID NO: 102864 - DNA, 25 bp, Homo sapien
ccgaactggttgtcctcttatctcg

SEQ ID NO: 102865 - DNA, 25 bp, Homo sapien
acaagaatgaacctactaagtcgag

SEQ ID NO: 102866 - DNA, 25 bp, Homo sapien
acaagaatgaacgtactaagtcgag

SEQ ID NO: 102867 - DNA, 25 bp, Homo sapien
tcacaatcactaccttagacgtcgg

SEQ ID NO: 102868 - DNA, 25 bp, Homo sapien
tcacaatcactagcttagacgtcgg

SEQ ID NO: 102869 - DNA, 25 bp, Homo sapien
gaacttctcattctcgacctaaagg

SEQ ID NO: 102870 - DNA, 25 bp, Homo sapien
gaacttctcattgtcgacctaaagg

SEQ ID NO: 102871 - DNA, 25 bp, Homo sapien
cgagaggttccctccgactctttaa

SEQ ID NO: 102872 - DNA, 25 bp, Homo sapien
cgagaggttcccaccgactctttaa

SEQ ID NO: 102873 - DNA, 25 bp, Homo sapien
ggtcggaccggcacaatctcgacaa

SEQ ID NO: 102874 - DNA, 25 bp, Homo sapien
ggtcggaccggctcaatctcgacaa

SEQ ID NO: 102875 - DNA, 25 bp, Homo sapien
gggctctgtccgactcggtctcaaa

SEQ ID NO: 102876 - DNA, 25 bp, Homo sapien
gggctctgtccgtctcggtctcaaa

SEQ ID NO: 102877 - DNA, 25 bp, Homo sapien
gagtctaccatgtgccgtcccagtc

SEQ ID NO: 102878 - DNA, 25 bp, Homo sapien
gagtctaccatgagccgtcccagtc

SEQ ID NO: 102879 - DNA, 25 bp, Homo sapien
gttgtctcatgtaaatcgttcctaa

SEQ ID NO: 102880 - DNA, 25 bp, Homo sapien
gttgtctcatgttaatcgttcctaa

SEQ ID NO: 102881 - DNA, 25 bp, Homo sapien
aggtgtctctcgtgttatttatcaa

SEQ ID NO: 102882 - DNA, 25 bp, Homo sapien
aggtgtctctcgagttatttatcaa

SEQ ID NO: 102883 - DNA, 25 bp, Homo sapien
ggttctatacgaactgtctttccca

SEQ ID NO: 102884 - DNA, 25 bp, Homo sapien
ggttctatacgatctgtctttccca

SEQ ID NO: 102885 - DNA, 25 bp, Homo sapien
atgtcatacgtaaatccttttcgtc

SEQ ID NO: 102886 - DNA, 25 bp, Homo sapien
atgtcatacgtatatccttttcgtc

SEQ ID NO: 102887 - DNA, 25 bp, Homo sapien
gagtcaggtagaactccaattgtat

SEQ ID NO: 102888 - DNA, 25 bp, Homo sapien
gagtcaggtagatctccaattgtat

SEQ ID NO: 102889 - DNA, 25 bp, Homo sapien
tcggtgatagggtcccttagtttct

SEQ ID NO: 102890 - DNA, 25 bp, Homo sapien
tcggtgatagggacccttagtttct

SEQ ID NO: 102891 - DNA, 25 bp, Homo sapien
tgtcatactacgtcaacaattcttt

SEQ ID NO: 102892 - DNA, 25 bp, Homo sapien
tgtcatactacgacaacaattcttt

SEQ ID NO: 102893 - DNA, 25 bp, Homo sapien
aggttcaggtcgacccaattattct

SEQ ID NO: 102894 - DNA, 25 bp, Homo sapien
aggttcaggtcgtcccaattattct

SEQ ID NO: 102895 - DNA, 25 bp, Homo sapien
caggtgacaaaacaactcgttttat

SEQ ID NO: 102896 - DNA, 25 bp, Homo sapien
caggtgacaaaagaactcgttttat

SEQ ID NO: 102897 - DNA, 25 bp, Homo sapien
ctcatcgggaactatccccggggtt

SEQ ID NO: 102898 - DNA, 25 bp, Homo sapien
ctcatcgggaacaatccccggggtt

SEQ ID NO: 102899 - DNA, 25 bp, Homo sapien
aacgggacgacgagtcgccccagga

SEQ ID NO: 102900 - DNA, 25 bp, Homo sapien
aacgggacgacgtgtcgccccagga

SEQ ID NO: 102901 - DNA, 25 bp, Homo sapien
cagagacgaagagtctacataatta

SEQ ID NO: 102902 - DNA, 25 bp, Homo sapien
cagagacgaagactctacataatta

SEQ ID NO: 102903 - DNA, 25 bp, Homo sapien
tgagacgaacagtcagtgatgtccg

SEQ ID NO: 102904 - DNA, 25 bp, Homo sapien
tgagacgaacagacagtgatgtccg

SEQ ID NO: 102905 - DNA, 25 bp, Homo sapien
atcgagtaaccgtcccggtttcacg

SEQ ID NO: 102906 - DNA, 25 bp, Homo sapien
atcgagtaaccgacccggtttcacg

SEQ ID NO: 102907 - DNA, 25 bp, Homo sapien
cgagtaagtgtacttcacctatcta

SEQ ID NO: 102908 - DNA, 25 bp, Homo sapien
cgagtaagtgtagttcacctatcta

SEQ ID NO: 102909 - DNA, 25 bp, Homo sapien
taacatacgtgtcgaaagacttatc

SEQ ID NO: 102910 - DNA, 25 bp, Homo sapien
taacatacgtgtggaaagacttatc

SEQ ID NO: 102911 - DNA, 25 bp, Homo sapien
cgacagtcgtaaggttcgtttgagt

SEQ ID NO: 102912 - DNA, 25 bp, Homo sapien
cgacagtcgtaacgttcgtttgagt

SEQ ID NO: 102913 - DNA, 25 bp, Homo sapien
actcaccgtagctcgttattgacgt

SEQ ID NO: 102914 - DNA, 25 bp, Homo sapien
actcaccgtagcacgttattgacgt

SEQ ID NO: 102915 - DNA, 25 bp, Homo sapien
ttaagggagccgagatcttctagac

SEQ ID NO: 102916 - DNA, 25 bp, Homo sapien
ttaagggagccgtgatcttctagac

SEQ ID NO: 102917 - DNA, 25 bp, Homo sapien
ttgagtcactgtactcgcacgcgac

SEQ ID NO: 102918 - DNA, 25 bp, Homo sapien
ttgagtcactgttctcgcacgcgac

SEQ ID NO: 102919 - DNA, 25 bp, Homo sapien
tgattgaaccccaactgtaaagttt

SEQ ID NO: 102920 - DNA, 25 bp, Homo sapien
tgattgaacccctactgtaaagttt

SEQ ID NO: 102921 - DNA, 25 bp, Homo sapien
agaagttcagttaactcttcctagt

SEQ ID NO: 102922 - DNA, 25 bp, Homo sapien
agaagttcagtttactcttcctagt

SEQ ID NO: 102923 - DNA, 25 bp, Homo sapien
gatgactacgtacagacttcaatat

SEQ ID NO: 102924 - DNA, 25 bp, Homo sapien
gatgactacgtagagacttcaatat

SEQ ID NO: 102925 - DNA, 25 bp, Homo sapien
agacgtaaccgaggtcactgtgaaa

SEQ ID NO: 102926 - DNA, 25 bp, Homo sapien
agacgtaaccgacgtcactgtgaaa

SEQ ID NO: 102927 - DNA, 25 bp, Homo sapien
tccggaccgactcacaagtaatatg

SEQ ID NO: 102928 - DNA, 25 bp, Homo sapien
tccggaccgactgacaagtaatatg

SEQ ID NO: 102929 - DNA, 25 bp, Homo sapien
gttgggaccacaaccggttatactt

SEQ ID NO: 102930 - DNA, 25 bp, Homo sapien
gttgggaccacatccggttatactt

SEQ ID NO: 102931 - DNA, 25 bp, Homo sapien
cggggtgactcatacagcctcctct

SEQ ID NO: 102932 - DNA, 25 bp, Homo sapien
cggggtgactcaaacagcctcctct

SEQ ID NO: 102933 - DNA, 25 bp, Homo sapien
atacaagggacccggaagcctccct

SEQ ID NO: 102934 - DNA, 25 bp, Homo sapien
atacaagggaccgggaagcctccct

SEQ ID NO: 102935 - DNA, 25 bp, Homo sapien
aataaaaggttacaggcgccatccg

SEQ ID NO: 102936 - DNA, 25 bp, Homo sapien
aataaaaggttagaggcgccatccg

SEQ ID NO: 102937 - DNA, 25 bp, Homo sapien
aagaaatgtggttcataaccatccg

SEQ ID NO: 102938 - DNA, 25 bp, Homo sapien
aagaaatgtggtacataaccatccg

SEQ ID NO: 102939 - DNA, 25 bp, Homo sapien
aaatatagagagagaaggtcccacg

SEQ ID NO: 102940 - DNA, 25 bp, Homo sapien
aaatatagagagtgaaggtcccacg

SEQ ID NO: 102941 - DNA, 25 bp, Homo sapien
gcaaaggatagagagacactgaccc

SEQ ID NO: 102942 - DNA, 25 bp, Homo sapien
gcaaaggatagacagacactgaccc

SEQ ID NO: 102943 - DNA, 25 bp, Homo sapien
accaacgatttcacgagtaactctg

SEQ ID NO: 102944 - DNA, 25 bp, Homo sapien
accaacgatttctcgagtaactctg

SEQ ID NO: 102945 - DNA, 25 bp, Homo sapien
tggccattctgtcttagagaaactt

SEQ ID NO: 102946 - DNA, 25 bp, Homo sapien
tggccattctgtgttagagaaactt

SEQ ID NO: 102947 - DNA, 25 bp, Homo sapien
cacaagtctccttgaagagaatatt

SEQ ID NO: 102948 - DNA, 25 bp, Homo sapien
cacaagtctcctagaagagaatatt

SEQ ID NO: 102949 - DNA, 25 bp, Homo sapien
acaaagtttgtgtaaagtacctctt

SEQ ID NO: 102950 - DNA, 25 bp, Homo sapien
acaaagtttgtgaaaagtacctctt

SEQ ID NO: 102951 - DNA, 25 bp, Homo sapien
gagagtcccttataaaagtctctta

SEQ ID NO: 102952 - DNA, 25 bp, Homo sapien
gagagtcccttaaaaaagtctctta

SEQ ID NO: 102953 - DNA, 25 bp, Homo sapien
atgattcataatacacacacaccca

SEQ ID NO: 102954 - DNA, 25 bp, Homo sapien
atgattcataattcacacacaccca

SEQ ID NO: 102955 - DNA, 25 bp, Homo sapien
agtatgtttctactccaagtgacca

SEQ ID NO: 102956 - DNA, 25 bp, Homo sapien
agtatgtttctagtccaagtgacca

SEQ ID NO: 102957 - DNA, 25 bp, Homo sapien
ggttctcccttatgtctcagggctt

SEQ ID NO: 102958 - DNA, 25 bp, Homo sapien
ggttctcccttaagtctcagggctt

SEQ ID NO: 102959 - DNA, 25 bp, Homo sapien
ctgctcacctggacagtccagggtc

SEQ ID NO: 102960 - DNA, 25 bp, Homo sapien
ctgctcacctggtcagtccagggtc

SEQ ID NO: 102961 - DNA, 25 bp, Homo sapien
tacacgtcgggttcgagacccgggc

SEQ ID NO: 102962 - DNA, 25 bp, Homo sapien
tacacgtcgggtacgagacccgggc

SEQ ID NO: 102963 - DNA, 25 bp, Homo sapien
tgtcctccaggtgagcctggtacct

SEQ ID NO: 102964 - DNA, 25 bp, Homo sapien
tgtcctccaggtcagcctggtacct

SEQ ID NO: 102965 - DNA, 25 bp, Homo sapien
agtccacttaaccagtcccctagtc

SEQ ID NO: 102966 - DNA, 25 bp, Homo sapien
agtccacttaacgagtcccctagtc

SEQ ID NO: 102967 - DNA, 25 bp, Homo sapien
gagcctaacataaagacgacccacc

SEQ ID NO: 102968 - DNA, 25 bp, Homo sapien
gagcctaacatatagacgacccacc

SEQ ID NO: 102969 - DNA, 25 bp, Homo sapien
acctctaaaggaacggtcaccgact

SEQ ID NO: 102970 - DNA, 25 bp, Homo sapien
acctctaaaggatcggtcaccgact

SEQ ID NO: 102971 - DNA, 25 bp, Homo sapien
tcctgaaagagtagtctcagcgcct

SEQ ID NO: 102972 - DNA, 25 bp, Homo sapien
tcctgaaagagttgtctcagcgcct

SEQ ID NO: 102973 - DNA, 25 bp, Homo sapien
agctcggaagaagtggacgagccct

SEQ ID NO: 102974 - DNA, 25 bp, Homo sapien
agctcggaagaactggacgagccct

SEQ ID NO: 102975 - DNA, 25 bp, Homo sapien
ccttcggaataaacaaggtcctgat

SEQ ID NO: 102976 - DNA, 25 bp, Homo sapien
ccttcggaataatcaaggtcctgat

SEQ ID NO: 102977 - DNA, 25 bp, Homo sapien
acaatccttcgttgaatgtctcgta

SEQ ID NO: 102978 - DNA, 25 bp, Homo sapien
acaatccttcgtagaatgtctcgta

SEQ ID NO: 102979 - DNA, 25 bp, Homo sapien
cggttcacctgttgtcatgtctatt

SEQ ID NO: 102980 - DNA, 25 bp, Homo sapien
cggttcacctgtagtcatgtctatt

SEQ ID NO: 102981 - DNA, 25 bp, Homo sapien
tcgtagctgtagatctttcgtaggt

SEQ ID NO: 102982 - DNA, 25 bp, Homo sapien
tcgtagctgtagttctttcgtaggt

SEQ ID NO: 102983 - DNA, 25 bp, Homo sapien
attcgtgacatactctgtgttgtct

SEQ ID NO: 102984 - DNA, 25 bp, Homo sapien
attcgtgacatagtctgtgttgtct

SEQ ID NO: 102985 - DNA, 25 bp, Homo sapien
ccggacgtctacagtcgggtgcgta

SEQ ID NO: 102986 - DNA, 25 bp, Homo sapien
ccggacgtctactgtcgggtgcgta

SEQ ID NO: 102987 - DNA, 25 bp, Homo sapien
ccgaatagtgacgacgagtgacgaa

SEQ ID NO: 102988 - DNA, 25 bp, Homo sapien
ccgaatagtgaccacgagtgacgaa

SEQ ID NO: 102989 - DNA, 25 bp, Homo sapien
ctcgcgaaggaccacgggtagctct

SEQ ID NO: 102990 - DNA, 25 bp, Homo sapien
ctcgcgaaggacgacgggtagctct

SEQ ID NO: 102991 - DNA, 25 bp, Homo sapien
cgtttttgaatgtttcacgtaaacc

SEQ ID NO: 102992 - DNA, 25 bp, Homo sapien
cgtttttgaatgattcacgtaaacc

SEQ ID NO: 102993 - DNA, 25 bp, Homo sapien
ttatttggtagactttcagaagacc

SEQ ID NO: 102994 - DNA, 25 bp, Homo sapien
ttatttggtagagtttcagaagacc

SEQ ID NO: 102995 - DNA, 25 bp, Homo sapien
aacttttggatagttccacgaggtc

SEQ ID NO: 102996 - DNA, 25 bp, Homo sapien
aacttttggatacttccacgaggtc

SEQ ID NO: 102997 - DNA, 25 bp, Homo sapien
ctttattaaggtgttcgacacattt

SEQ ID NO: 102998 - DNA, 25 bp, Homo sapien
ctttattaaggtcttcgacacattt

SEQ ID NO: 102999 - DNA, 25 bp, Homo sapien
cgataggaaaatgtcagaattattt

SEQ ID NO: 103000 - DNA, 25 bp, Homo sapien
cgataggaaaatctcagaattattt

SEQ ID NO: 103001 - DNA, 25 bp, Homo sapien
gtcaacagaaaactccgaaatgtta

SEQ ID NO: 103002 - DNA, 25 bp, Homo sapien
gtcaacagaaaagtccgaaatgtta

SEQ ID NO: 103003 - DNA, 25 bp, Homo sapien
ttatctttagacaaaccagaaagaa

SEQ ID NO: 103004 - DNA, 25 bp, Homo sapien
ttatctttagactaaccagaaagaa

SEQ ID NO: 103005 - DNA, 25 bp, Homo sapien
ccatgtgtatacagggtccgaagga

SEQ ID NO: 103006 - DNA, 25 bp, Homo sapien
ccatgtgtatactgggtccgaagga

SEQ ID NO: 103007 - DNA, 25 bp, Homo sapien
tacttggtgtaggagtcacaaccgg

SEQ ID NO: 103008 - DNA, 25 bp, Homo sapien
tacttggtgtagcagtcacaaccgg

SEQ ID NO: 103009 - DNA, 25 bp, Homo sapien
acgtcggcggccaacaacacagagt

SEQ ID NO: 103010 - DNA, 25 bp, Homo sapien
acgtcggcggcctacaacacagagt

SEQ ID NO: 103011 - DNA, 25 bp, Homo sapien
tacagggtcctggtcgacctcggag

SEQ ID NO: 103012 - DNA, 25 bp, Homo sapien
tacagggtcctgctcgacctcggag

SEQ ID NO: 103013 - DNA, 25 bp, Homo sapien
accgaggacaggtcgtcactaccgc

SEQ ID NO: 103014 - DNA, 25 bp, Homo sapien
accgaggacaggacgtcactaccgc

SEQ ID NO: 103015 - DNA, 25 bp, Homo sapien
aggcaccgggagtgaagaccaaccg

SEQ ID NO: 103016 - DNA, 25 bp, Homo sapien
aggcaccgggagagaagaccaaccg

SEQ ID NO: 103017 - DNA, 25 bp, Homo sapien
gtcacgccggtcacacaaaggacgg

SEQ ID NO: 103018 - DNA, 25 bp, Homo sapien
gtcacgccggtctcacaaaggacgg

SEQ ID NO: 103019 - DNA, 25 bp, Homo sapien
gttcaggacgtttccccagaggaca

SEQ ID NO: 103020 - DNA, 25 bp, Homo sapien
gttcaggacgttaccccagaggaca

SEQ ID NO: 103021 - DNA, 25 bp, Homo sapien
ccaggatccatacccacggagtaca

SEQ ID NO: 103022 - DNA, 25 bp, Homo sapien
ccaggatccatagccacggagtaca

SEQ ID NO: 103023 - DNA, 25 bp, Homo sapien
caagtgtgtccaagccggaactcta

SEQ ID NO: 103024 - DNA, 25 bp, Homo sapien
caagtgtgtccatgccggaactcta

SEQ ID NO: 103025 - DNA, 25 bp, Homo sapien
caattgttaccctggtgacttgaag

SEQ ID NO: 103026 - DNA, 25 bp, Homo sapien
caattgttacccaggtgacttgaag

SEQ ID NO: 103027 - DNA, 25 bp, Homo sapien
tctctacgagttcgtgacttaacag

SEQ ID NO: 103028 - DNA, 25 bp, Homo sapien
tctctacgagttggtgacttaacag

SEQ ID NO: 103029 - DNA, 25 bp, Homo sapien
gtaccgtaggtctttggagacagag

SEQ ID NO: 103030 - DNA, 25 bp, Homo sapien
gtaccgtaggtcattggagacagag

SEQ ID NO: 103031 - DNA, 25 bp, Homo sapien
taacggtgacaactagtgatcgaaa

SEQ ID NO: 103032 - DNA, 25 bp, Homo sapien
taacggtgacaagtagtgatcgaaa

SEQ ID NO: 103033 - DNA, 25 bp, Homo sapien
cgtagatcgaaatatcgtgttcaaa

SEQ ID NO: 103034 - DNA, 25 bp, Homo sapien
cgtagatcgaaaaatcgtgttcaaa

SEQ ID NO: 103035 - DNA, 25 bp, Homo sapien
tctgttgaacaggaagacctcaaag

SEQ ID NO: 103036 - DNA, 25 bp, Homo sapien
tctgttgaacagcaagacctcaaag

SEQ ID NO: 103037 - DNA, 25 bp, Homo sapien
gtggtgagacccaaactccctgtgt

SEQ ID NO: 103038 - DNA, 25 bp, Homo sapien
gtggtgagaccctaactccctgtgt

SEQ ID NO: 103039 - DNA, 25 bp, Homo sapien
gaggttcggttcacggtcccagtgt

SEQ ID NO: 103040 - DNA, 25 bp, Homo sapien
gaggttcggttctcggtcccagtgt

SEQ ID NO: 103041 - DNA, 25 bp, Homo sapien
tgttctacaccgtcttcgcaagtgt

SEQ ID NO: 103042 - DNA, 25 bp, Homo sapien
tgttctacaccgacttcgcaagtgt

SEQ ID NO: 103043 - DNA, 25 bp, Homo sapien
gacgtaccttccacttacaaagtcg

SEQ ID NO: 103044 - DNA, 25 bp, Homo sapien
gacgtaccttcctcttacaaagtcg

SEQ ID NO: 103045 - DNA, 25 bp, Homo sapien
acatttgtcacgtcgtaaggacgag

SEQ ID NO: 103046 - DNA, 25 bp, Homo sapien
acatttgtcacgacgtaaggacgag

SEQ ID NO: 103047 - DNA, 25 bp, Homo sapien
ttatcagtgtaagtcgagcgaacga

SEQ ID NO: 103048 - DNA, 25 bp, Homo sapien
ttatcagtgtaactcgagcgaacga

SEQ ID NO: 103049 - DNA, 25 bp, Homo sapien
tgttcctcgagtcactcgaagagga

SEQ ID NO: 103050 - DNA, 25 bp, Homo sapien
tgttcctcgagtgactcgaagagga

SEQ ID NO: 103051 - DNA, 25 bp, Homo sapien
tttcgactttcgtcggtaacgggga

SEQ ID NO: 103052 - DNA, 25 bp, Homo sapien
tttcgactttcgacggtaacgggga

SEQ ID NO: 103053 - DNA, 25 bp, Homo sapien
tttccttggttgtgagtcgagacat

SEQ ID NO: 103054 - DNA, 25 bp, Homo sapien
tttccttggttgagagtcgagacat

SEQ ID NO: 103055 - DNA, 25 bp, Homo sapien
tcctagaccctgagacacgagaggt

SEQ ID NO: 103056 - DNA, 25 bp, Homo sapien
tcctagaccctgtgacacgagaggt

SEQ ID NO: 103057 - DNA, 25 bp, Homo sapien
actgacctctcgacggtcggacgag

SEQ ID NO: 103058 - DNA, 25 bp, Homo sapien
actgacctctcgtcggtcggacgag

SEQ ID NO: 103059 - DNA, 25 bp, Homo sapien
aacaaagggttatctatgactgagg

SEQ ID NO: 103060 - DNA, 25 bp, Homo sapien
aacaaagggttaactatgactgagg

SEQ ID NO: 103061 - DNA, 25 bp, Homo sapien
gaagaaccagcagtacaccgcggcc

SEQ ID NO: 103062 - DNA, 25 bp, Homo sapien
gaagaaccagcactacaccgcggcc

SEQ ID NO: 103063 - DNA, 25 bp, Homo sapien
acaagactctgtaccccgagtggga

SEQ ID NO: 103064 - DNA, 25 bp, Homo sapien
acaagactctgttccccgagtggga

SEQ ID NO: 103065 - DNA, 25 bp, Homo sapien
aacatcaagtcgtttccggggatac

SEQ ID NO: 103066 - DNA, 25 bp, Homo sapien
aacatcaagtcgattccggggatac

SEQ ID NO: 103067 - DNA, 25 bp, Homo sapien
tacgtcagacgttagacctatggaa

SEQ ID NO: 103068 - DNA, 25 bp, Homo sapien
tacgtcagacgtaagacctatggaa

SEQ ID NO: 103069 - DNA, 25 bp, Homo sapien
ttgacctcgcttctcgtggtactct

SEQ ID NO: 103070 - DNA, 25 bp, Homo sapien
ttgacctcgcttgtcgtggtactct

SEQ ID NO: 103071 - DNA, 25 bp, Homo sapien
ttcctcggcgacttttcatgtccgt

SEQ ID NO: 103072 - DNA, 25 bp, Homo sapien
ttcctcggcgacatttcatgtccgt

SEQ ID NO: 103073 - DNA, 25 bp, Homo sapien
acccgtgtcggcggtaccggtgttg

SEQ ID NO: 103074 - DNA, 25 bp, Homo sapien
acccgtgtcggccgtaccggtgttg

SEQ ID NO: 103075 - DNA, 25 bp, Homo sapien
gtttccttgggtccccgttgaccgt

SEQ ID NO: 103076 - DNA, 25 bp, Homo sapien
gtttccttgggtgcccgttgaccgt

SEQ ID NO: 103077 - DNA, 25 bp, Homo sapien
gactcggggatgtcgaatagaccgt

SEQ ID NO: 103078 - DNA, 25 bp, Homo sapien
gactcggggatgacgaatagaccgt

SEQ ID NO: 103079 - DNA, 25 bp, Homo sapien
atgagagtccaggaggaaacaattc

SEQ ID NO: 103080 - DNA, 25 bp, Homo sapien
atgagagtccagcaggaaacaattc

SEQ ID NO: 103081 - DNA, 25 bp, Homo sapien
gtgaaaacgtcagtaaacacctata

SEQ ID NO: 103082 - DNA, 25 bp, Homo sapien
gtgaaaacgtcactaaacacctata

SEQ ID NO: 103083 - DNA, 25 bp, Homo sapien
gcacgccagtaaacacgcaacccat

SEQ ID NO: 103084 - DNA, 25 bp, Homo sapien
gcacgccagtaatcacgcaacccat

SEQ ID NO: 103085 - DNA, 25 bp, Homo sapien
caccctgtagatttctgaaaccgtg

SEQ ID NO: 103086 - DNA, 25 bp, Homo sapien
caccctgtagatatctgaaaccgtg

SEQ ID NO: 103087 - DNA, 25 bp, Homo sapien
tctcttgtcgttatcaagacggtat

SEQ ID NO: 103088 - DNA, 25 bp, Homo sapien
tctcttgtcgttttcaagacggtat

SEQ ID NO: 103089 - DNA, 25 bp, Homo sapien
tctcctttcgtcataaataacatat

SEQ ID NO: 103090 - DNA, 25 bp, Homo sapien
tctcctttcgtcttaaataacatat

SEQ ID NO: 103091 - DNA, 25 bp, Homo sapien
accacttggtacacgtctttacaga

SEQ ID NO: 103092 - DNA, 25 bp, Homo sapien
accacttggtactcgtctttacaga

SEQ ID NO: 103093 - DNA, 25 bp, Homo sapien
ccctagagagacatgggagacgtaa

SEQ ID NO: 103094 - DNA, 25 bp, Homo sapien
ccctagagagacttgggagacgtaa

SEQ ID NO: 103095 - DNA, 25 bp, Homo sapien
ttaactgtaaaacgtgatgtcccat

SEQ ID NO: 103096 - DNA, 25 bp, Homo sapien
ttaactgtaaaaggtgatgtcccat

SEQ ID NO: 103097 - DNA, 25 bp, Homo sapien
taagatcacaaaggatctaacacag

SEQ ID NO: 103098 - DNA, 25 bp, Homo sapien
taagatcacaaacgatctaacacag

SEQ ID NO: 103099 - DNA, 25 bp, Homo sapien
tattcggaatctggtcttacactac

SEQ ID NO: 103100 - DNA, 25 bp, Homo sapien
tattcggaatctcgtcttacactac

SEQ ID NO: 103101 - DNA, 25 bp, Homo sapien
tcgcggtagtctccttctagagaac

SEQ ID NO: 103102 - DNA, 25 bp, Homo sapien
tcgcggtagtctgcttctagagaac

SEQ ID NO: 103103 - DNA, 25 bp, Homo sapien
ggccttgtaccggcacttgacgagc

SEQ ID NO: 103104 - DNA, 25 bp, Homo sapien
ggccttgtaccgccacttgacgagc

SEQ ID NO: 103105 - DNA, 25 bp, Homo sapien
ggtgttcaccgacctcgatttcgtc

SEQ ID NO: 103106 - DNA, 25 bp, Homo sapien
ggtgttcaccgagctcgatttcgtc

SEQ ID NO: 103107 - DNA, 25 bp, Homo sapien
tatataccgtaaacgttttattgta

SEQ ID NO: 103108 - DNA, 25 bp, Homo sapien
tatataccgtaatcgttttattgta

SEQ ID NO: 103109 - DNA, 25 bp, Homo sapien
tccgtcgagacctgtgagtcatggg

SEQ ID NO: 103110 - DNA, 25 bp, Homo sapien
tccgtcgagaccagtgagtcatggg

SEQ ID NO: 103111 - DNA, 25 bp, Homo sapien
tgtgtgcacgcgtgtatcatagaag

SEQ ID NO: 103112 - DNA, 25 bp, Homo sapien
tgtgtgcacgcgagtatcatagaag

SEQ ID NO: 103113 - DNA, 25 bp, Homo sapien
taggtcttacgtgtttcatgacgtg

SEQ ID NO: 103114 - DNA, 25 bp, Homo sapien
taggtcttacgtctttcatgacgtg

SEQ ID NO: 103115 - DNA, 25 bp, Homo sapien
gagaagtttacacattcgatgtctt

SEQ ID NO: 103116 - DNA, 25 bp, Homo sapien
gagaagtttacagattcgatgtctt

SEQ ID NO: 103117 - DNA, 25 bp, Homo sapien
caaagttatcgacaagtctgtgttt

SEQ ID NO: 103118 - DNA, 25 bp, Homo sapien
caaagttatcgagaagtctgtgttt

SEQ ID NO: 103119 - DNA, 25 bp, Homo sapien
gagaaagtcccatttaccgataatt

SEQ ID NO: 103120 - DNA, 25 bp, Homo sapien
gagaaagtcccaattaccgataatt

SEQ ID NO: 103121 - DNA, 25 bp, Homo sapien
accaggttttcctacaaaaagagtg

SEQ ID NO: 103122 - DNA, 25 bp, Homo sapien
accaggttttccaacaaaaagagtg

SEQ ID NO: 103123 - DNA, 25 bp, Homo sapien
atttatcccgacacttatcagacgg

SEQ ID NO: 103124 - DNA, 25 bp, Homo sapien
atttatcccgactcttatcagacgg

SEQ ID NO: 103125 - DNA, 25 bp, Homo sapien
gtcgtgccgcacagtgccgtggacc

SEQ ID NO: 103126 - DNA, 25 bp, Homo sapien
gtcgtgccgcactgtgccgtggacc

SEQ ID NO: 103127 - DNA, 25 bp, Homo sapien
cgagtatctcggtgtggacttaggc

SEQ ID NO: 103128 - DNA, 25 bp, Homo sapien
cgagtatctcggagtggacttaggc

SEQ ID NO: 103129 - DNA, 25 bp, Homo sapien
ttcactccggacctagtgtttagaa

SEQ ID NO: 103130 - DNA, 25 bp, Homo sapien
ttcactccggacgtagtgtttagaa

SEQ ID NO: 103131 - DNA, 25 bp, Homo sapien
cgggtcgtcgagacccgacgtgaaa

SEQ ID NO: 103132 - DNA, 25 bp, Homo sapien
cgggtcgtcgagtcccgacgtgaaa

SEQ ID NO: 103133 - DNA, 25 bp, Homo sapien
cctaagacactgaagagatatccaa

SEQ ID NO: 103134 - DNA, 25 bp, Homo sapien
cctaagacactgtagagatatccaa

SEQ ID NO: 103135 - DNA, 25 bp, Homo sapien
tacacaacaaggacatgtcttatat

SEQ ID NO: 103136 - DNA, 25 bp, Homo sapien
tacacaacaaggtcatgtcttatat

SEQ ID NO: 103137 - DNA, 25 bp, Homo sapien
gaaaacaagtttacggttactactt

SEQ ID NO: 103138 - DNA, 25 bp, Homo sapien
gaaaacaagttttcggttactactt

SEQ ID NO: 103139 - DNA, 25 bp, Homo sapien
agataatgttgtttcagtcgtttca

SEQ ID NO: 103140 - DNA, 25 bp, Homo sapien
agataatgttgtatcagtcgtttca

SEQ ID NO: 103141 - DNA, 25 bp, Homo sapien
ccaaattttcagtgtttagtgtcac

SEQ ID NO: 103142 - DNA, 25 bp, Homo sapien
ccaaattttcagagtttagtgtcac

SEQ ID NO: 103143 - DNA, 25 bp, Homo sapien
gtggatttgagatcttactgtcgac

SEQ ID NO: 103144 - DNA, 25 bp, Homo sapien
gtggatttgagaacttactgtcgac

SEQ ID NO: 103145 - DNA, 25 bp, Homo sapien
tcagccgtactttggcaccctggtc

SEQ ID NO: 103146 - DNA, 25 bp, Homo sapien
tcagccgtacttaggcaccctggtc

SEQ ID NO: 103147 - DNA, 25 bp, Homo sapien
ttaacccactagagcccttaggtac

SEQ ID NO: 103148 - DNA, 25 bp, Homo sapien
ttaacccactagtgcccttaggtac

SEQ ID NO: 103149 - DNA, 25 bp, Homo sapien
gatccccttttcaactactgactgt

SEQ ID NO: 103150 - DNA, 25 bp, Homo sapien
gatccccttttctactactgactgt

SEQ ID NO: 103151 - DNA, 25 bp, Homo sapien
atcctacctttagacagtcacgatg

SEQ ID NO: 103152 - DNA, 25 bp, Homo sapien
atcctacctttacacagtcacgatg

SEQ ID NO: 103153 - DNA, 25 bp, Homo sapien
tatcttacccctgtaagttcgactg

SEQ ID NO: 103154 - DNA, 25 bp, Homo sapien
tatcttacccctctaagttcgactg

SEQ ID NO: 103155 - DNA, 25 bp, Homo sapien
ctcgagttacagaaaacgcgtcata

SEQ ID NO: 103156 - DNA, 25 bp, Homo sapien
ctcgagttacagtaaacgcgtcata

SEQ ID NO: 103157 - DNA, 25 bp, Homo sapien
acacggagagagatccaggtcccct

SEQ ID NO: 103158 - DNA, 25 bp, Homo sapien
acacggagagagttccaggtcccct

SEQ ID NO: 103159 - DNA, 25 bp, Homo sapien
tagacaaggtagtttccaggtcccc

SEQ ID NO: 103160 - DNA, 25 bp, Homo sapien
tagacaaggtagattccaggtcccc

SEQ ID NO: 103161 - DNA, 25 bp, Homo sapien
ggaaacggtgaacgagtatccgctc

SEQ ID NO: 103162 - DNA, 25 bp, Homo sapien
ggaaacggtgaaggagtatccgctc

SEQ ID NO: 103163 - DNA, 25 bp, Homo sapien
aagtgataaggtgatggtttcatcc

SEQ ID NO: 103164 - DNA, 25 bp, Homo sapien
aagtgataaggtcatggtttcatcc

SEQ ID NO: 103165 - DNA, 25 bp, Homo sapien
atgtaaaggcgggggtcggcttaca

SEQ ID NO: 103166 - DNA, 25 bp, Homo sapien
atgtaaaggcggcggtcggcttaca

SEQ ID NO: 103167 - DNA, 25 bp, Homo sapien
aagttagaaacctcctggatcttca

SEQ ID NO: 103168 - DNA, 25 bp, Homo sapien
aagttagaaaccacctggatcttca

SEQ ID NO: 103169 - DNA, 25 bp, Homo sapien
atgagaattgcacaaaggacttcct

SEQ ID NO: 103170 - DNA, 25 bp, Homo sapien
atgagaattgcagaaaggacttcct

SEQ ID NO: 103171 - DNA, 25 bp, Homo sapien
aagcatccggtcgtcgaggagcccc

SEQ ID NO: 103172 - DNA, 25 bp, Homo sapien
aagcatccggtcctcgaggagcccc

SEQ ID NO: 103173 - DNA, 25 bp, Homo sapien
gcgggtactcggtcatcgaggcccg

SEQ ID NO: 103174 - DNA, 25 bp, Homo sapien
gcgggtactcggacatcgaggcccg

SEQ ID NO: 103175 - DNA, 25 bp, Homo sapien
ggacacacgacgtgagtaccttcca

SEQ ID NO: 103176 - DNA, 25 bp, Homo sapien
ggacacacgacgagagtaccttcca

SEQ ID NO: 103177 - DNA, 25 bp, Homo sapien
ccgaagacccggtgacgacggaaga

SEQ ID NO: 103178 - DNA, 25 bp, Homo sapien
ccgaagacccggagacgacggaaga

SEQ ID NO: 103179 - DNA, 25 bp, Homo sapien
tgtcaatctctggataatccgaaat

SEQ ID NO: 103180 - DNA, 25 bp, Homo sapien
tgtcaatctctgcataatccgaaat

SEQ ID NO: 103181 - DNA, 25 bp, Homo sapien
agtactatcgtttttacaccgtcaa

SEQ ID NO: 103182 - DNA, 25 bp, Homo sapien
agtactatcgttattacaccgtcaa

SEQ ID NO: 103183 - DNA, 25 bp, Homo sapien
gacatagtgtcttataatacgcaat

SEQ ID NO: 103184 - DNA, 25 bp, Homo sapien
gacatagtgtctaataatacgcaat

SEQ ID NO: 103185 - DNA, 25 bp, Homo sapien
aaggtccatgtggtacgctactact

SEQ ID NO: 103186 - DNA, 25 bp, Homo sapien
aaggtccatgtgctacgctactact

SEQ ID NO: 103187 - DNA, 25 bp, Homo sapien
aaaacaccgaacaggagaccttacc

SEQ ID NO: 103188 - DNA, 25 bp, Homo sapien
aaaacaccgaactggagaccttacc

SEQ ID NO: 103189 - DNA, 25 bp, Homo sapien
aaagactcagtctgggccggtctct

SEQ ID NO: 103190 - DNA, 25 bp, Homo sapien
aaagactcagtcagggccggtctct

SEQ ID NO: 103191 - DNA, 25 bp, Homo sapien
ctcgagtagagtagtctaacgtatt

SEQ ID NO: 103192 - DNA, 25 bp, Homo sapien
ctcgagtagagttgtctaacgtatt

SEQ ID NO: 103193 - DNA, 25 bp, Homo sapien
cacaagactgggtttaaaccgagtt

SEQ ID NO: 103194 - DNA, 25 bp, Homo sapien
cacaagactgggattaaaccgagtt

SEQ ID NO: 103195 - DNA, 25 bp, Homo sapien
ggggcgtactcctcggagcagtcct

SEQ ID NO: 103196 - DNA, 25 bp, Homo sapien
ggggcgtactccacggagcagtcct

SEQ ID NO: 103197 - DNA, 25 bp, Homo sapien
acgaggacacgcaaggcactagtta

SEQ ID NO: 103198 - DNA, 25 bp, Homo sapien
acgaggacacgctaggcactagtta

SEQ ID NO: 103199 - DNA, 25 bp, Homo sapien
tccagagaccctcgtccagggtcgt

SEQ ID NO: 103200 - DNA, 25 bp, Homo sapien
tccagagaccctggtccagggtcgt

SEQ ID NO: 103201 - DNA, 25 bp, Homo sapien
acctagaaacaggagcccgaactcg

SEQ ID NO: 103202 - DNA, 25 bp, Homo sapien
acctagaaacagcagcccgaactcg

SEQ ID NO: 103203 - DNA, 25 bp, Homo sapien
agaaggacggtactacgtgtagatc

SEQ ID NO: 103204 - DNA, 25 bp, Homo sapien
agaaggacggtagtacgtgtagatc

SEQ ID NO: 103205 - DNA, 25 bp, Homo sapien
catcaataagcctagtagtcgatgt

SEQ ID NO: 103206 - DNA, 25 bp, Homo sapien
catcaataagccaagtagtcgatgt

SEQ ID NO: 103207 - DNA, 25 bp, Homo sapien
tacctaaaggcagagaccacatcga

SEQ ID NO: 103208 - DNA, 25 bp, Homo sapien
tacctaaaggcacagaccacatcga

SEQ ID NO: 103209 - DNA, 25 bp, Homo sapien
accgtggggaaccttctcccgcaga

SEQ ID NO: 103210 - DNA, 25 bp, Homo sapien
accgtggggaacgttctcccgcaga

SEQ ID NO: 103211 - DNA, 25 bp, Homo sapien
gggaggtccctaggtctccacacag

SEQ ID NO: 103212 - DNA, 25 bp, Homo sapien
gggaggtccctacgtctccacacag

SEQ ID NO: 103213 - DNA, 25 bp, Homo sapien
tgaagtccgtctggtccaggacgtc

SEQ ID NO: 103214 - DNA, 25 bp, Homo sapien
tgaagtccgtctcgtccaggacgtc

SEQ ID NO: 103215 - DNA, 25 bp, Homo sapien
gtaggtaaggttgacgtccaggtac

SEQ ID NO: 103216 - DNA, 25 bp, Homo sapien
gtaggtaaggttcacgtccaggtac

SEQ ID NO: 103217 - DNA, 25 bp, Homo sapien
gacggagggacgtcgactccaccga

SEQ ID NO: 103218 - DNA, 25 bp, Homo sapien
gacggagggacgacgactccaccga

SEQ ID NO: 103219 - DNA, 25 bp, Homo sapien
ggtggaccgacgaccagtccgacgc

SEQ ID NO: 103220 - DNA, 25 bp, Homo sapien
ggtggaccgacgtccagtccgacgc

SEQ ID NO: 103221 - DNA, 25 bp, Homo sapien
ggattgtaagaggaacaccgacggc

SEQ ID NO: 103222 - DNA, 25 bp, Homo sapien
ggattgtaagagcaacaccgacggc

SEQ ID NO: 103223 - DNA, 25 bp, Homo sapien
ggagacgtagaccaagacccggact

SEQ ID NO: 103224 - DNA, 25 bp, Homo sapien
ggagacgtagacgaagacccggact

SEQ ID NO: 103225 - DNA, 25 bp, Homo sapien
tttggatcgaactaagtacatccat

SEQ ID NO: 103226 - DNA, 25 bp, Homo sapien
tttggatcgaacaaagtacatccat

SEQ ID NO: 103227 - DNA, 25 bp, Homo sapien
agtggagtacgaagaaactcctttc

SEQ ID NO: 103228 - DNA, 25 bp, Homo sapien
agtggagtacgatgaaactcctttc

SEQ ID NO: 103229 - DNA, 25 bp, Homo sapien
tatcgggtcagtgtcacccttcgtc

SEQ ID NO: 103230 - DNA, 25 bp, Homo sapien
tatcgggtcagtctcacccttcgtc

SEQ ID NO: 103231 - DNA, 25 bp, Homo sapien
gataccatgtgtacctcccagtttc

SEQ ID NO: 103232 - DNA, 25 bp, Homo sapien
gataccatgtgttcctcccagtttc

SEQ ID NO: 103233 - DNA, 25 bp, Homo sapien
ttataaatgagtgtccaagttccgt

SEQ ID NO: 103234 - DNA, 25 bp, Homo sapien
ttataaatgagtctccaagttccgt

SEQ ID NO: 103235 - DNA, 25 bp, Homo sapien
gtaagaactgtctcgacttatgtca

SEQ ID NO: 103236 - DNA, 25 bp, Homo sapien
gtaagaactgtcacgacttatgtca

SEQ ID NO: 103237 - DNA, 25 bp, Homo sapien
acttaagctcagaaactttatgttg

SEQ ID NO: 103238 - DNA, 25 bp, Homo sapien
acttaagctcagtaactttatgttg

SEQ ID NO: 103239 - DNA, 25 bp, Homo sapien
tcgtggtgcaccaacggcatcgcgc

SEQ ID NO: 103240 - DNA, 25 bp, Homo sapien
tcgtggtgcacctacggcatcgcgc

SEQ ID NO: 103241 - DNA, 25 bp, Homo sapien
cctcgtcgtccaggagcgctcggaa

SEQ ID NO: 103242 - DNA, 25 bp, Homo sapien
cctcgtcgtccacgagcgctcggaa

SEQ ID NO: 103243 - DNA, 25 bp, Homo sapien
ccaccgtcacagtgtccgagagaag

SEQ ID NO: 103244 - DNA, 25 bp, Homo sapien
ccaccgtcacagagtccgagagaag

SEQ ID NO: 103245 - DNA, 25 bp, Homo sapien
cctccacgcgttagaccacgagaag

SEQ ID NO: 103246 - DNA, 25 bp, Homo sapien
cctccacgcgtttgaccacgagaag

SEQ ID NO: 103247 - DNA, 25 bp, Homo sapien
tagtcggggtcctacgcacgacgga

SEQ ID NO: 103248 - DNA, 25 bp, Homo sapien
tagtcggggtccaacgcacgacgga

SEQ ID NO: 103249 - DNA, 25 bp, Homo sapien
atacggtacgattatttgttccaat

SEQ ID NO: 103250 - DNA, 25 bp, Homo sapien
atacggtacgataatttgttccaat

SEQ ID NO: 103251 - DNA, 25 bp, Homo sapien
tgtctgtcactgacccgaggtccag

SEQ ID NO: 103252 - DNA, 25 bp, Homo sapien
tgtctgtcactgtcccgaggtccag

SEQ ID NO: 103253 - DNA, 25 bp, Homo sapien
tcatggtcacggaccctacctgggt

SEQ ID NO: 103254 - DNA, 25 bp, Homo sapien
tcatggtcacggtccctacctgggt

SEQ ID NO: 103255 - DNA, 25 bp, Homo sapien
ctgtgtcgtcggttggatcttagga

SEQ ID NO: 103256 - DNA, 25 bp, Homo sapien
ctgtgtcgtcggatggatcttagga

SEQ ID NO: 103257 - DNA, 25 bp, Homo sapien
ctctcgtcccgttacgggcgcagga

SEQ ID NO: 103258 - DNA, 25 bp, Homo sapien
ctctcgtcccgtaacgggcgcagga

SEQ ID NO: 103259 - DNA, 25 bp, Homo sapien
cctctctccgtccttcggttgatag

SEQ ID NO: 103260 - DNA, 25 bp, Homo sapien
cctctctccgtcgttcggttgatag

SEQ ID NO: 103261 - DNA, 25 bp, Homo sapien
attgtctcactgtgctatagtaata

SEQ ID NO: 103262 - DNA, 25 bp, Homo sapien
attgtctcactgagctatagtaata

SEQ ID NO: 103263 - DNA, 25 bp, Homo sapien
ggtatgctctctctgagagaaagtt

SEQ ID NO: 103264 - DNA, 25 bp, Homo sapien
ggtatgctctctgtgagagaaagtt

SEQ ID NO: 103265 - DNA, 25 bp, Homo sapien
aactctgtccttgtcttgtttagtc

SEQ ID NO: 103266 - DNA, 25 bp, Homo sapien
aactctgtccttctcttgtttagtc

SEQ ID NO: 103267 - DNA, 25 bp, Homo sapien
gagagggtatgtttccagatcagac

SEQ ID NO: 103268 - DNA, 25 bp, Homo sapien
gagagggtatgtatccagatcagac

SEQ ID NO: 103269 - DNA, 25 bp, Homo sapien
ggtgagttattttccgacatcacga

SEQ ID NO: 103270 - DNA, 25 bp, Homo sapien
ggtgagttatttaccgacatcacga

SEQ ID NO: 103271 - DNA, 25 bp, Homo sapien
ccctagaaggtcaccctagacacag

SEQ ID NO: 103272 - DNA, 25 bp, Homo sapien
ccctagaaggtctccctagacacag

SEQ ID NO: 103273 - DNA, 25 bp, Homo sapien
ttcagacaagtcggcagggaactag

SEQ ID NO: 103274 - DNA, 25 bp, Homo sapien
ttcagacaagtccgcagggaactag

SEQ ID NO: 103275 - DNA, 25 bp, Homo sapien
tgctaaggacgtgtcaggagactga

SEQ ID NO: 103276 - DNA, 25 bp, Homo sapien
tgctaaggacgtctcaggagactga

SEQ ID NO: 103277 - DNA, 25 bp, Homo sapien
cacgaatgatacacagaagactata

SEQ ID NO: 103278 - DNA, 25 bp, Homo sapien
cacgaatgatactcagaagactata

SEQ ID NO: 103279 - DNA, 25 bp, Homo sapien
cagtaatgtacctaaaactatgtag

SEQ ID NO: 103280 - DNA, 25 bp, Homo sapien
cagtaatgtaccaaaaactatgtag

SEQ ID NO: 103281 - DNA, 25 bp, Homo sapien
ttccgtggtgcctgaaacacctctc

SEQ ID NO: 103282 - DNA, 25 bp, Homo sapien
ttccgtggtgccagaaacacctctc

SEQ ID NO: 103283 - DNA, 25 bp, Homo sapien
tcctatgagatcgaggaggtccacc

SEQ ID NO: 103284 - DNA, 25 bp, Homo sapien
tcctatgagatccaggaggtccacc

SEQ ID NO: 103285 - DNA, 25 bp, Homo sapien
ttcgtctggtgcttgtggtcctcca

SEQ ID NO: 103286 - DNA, 25 bp, Homo sapien
ttcgtctggtgcatgtggtcctcca

SEQ ID NO: 103287 - DNA, 25 bp, Homo sapien
tgctagtttcgtgtaggtccagaga

SEQ ID NO: 103288 - DNA, 25 bp, Homo sapien
tgctagtttcgtctaggtccagaga

SEQ ID NO: 103289 - DNA, 25 bp, Homo sapien
gtagagacgggtgtagtgtccaaca

SEQ ID NO: 103290 - DNA, 25 bp, Homo sapien
gtagagacgggtctagtgtccaaca

SEQ ID NO: 103291 - DNA, 25 bp, Homo sapien
gacgacagtattctgaccgtcataa

SEQ ID NO: 103292 - DNA, 25 bp, Homo sapien
gacgacagtattgtgaccgtcataa

SEQ ID NO: 103293 - DNA, 25 bp, Homo sapien
ttgactcacacgtccccgggatgac

SEQ ID NO: 103294 - DNA, 25 bp, Homo sapien
ttgactcacacgaccccgggatgac

SEQ ID NO: 103295 - DNA, 25 bp, Homo sapien
gtgtttaaacaaattcccgatattt

SEQ ID NO: 103296 - DNA, 25 bp, Homo sapien
gtgtttaaacaatttcccgatattt

SEQ ID NO: 103297 - DNA, 25 bp, Homo sapien
gtttcaggtagtagaaccataactc

SEQ ID NO: 103298 - DNA, 25 bp, Homo sapien
gtttcaggtagttgaaccataactc

SEQ ID NO: 103299 - DNA, 25 bp, Homo sapien
gtctaaacgacttggaacataactg

SEQ ID NO: 103300 - DNA, 25 bp, Homo sapien
gtctaaacgactaggaacataactg

SEQ ID NO: 103301 - DNA, 25 bp, Homo sapien
tagactaacttctccgacatagtgt

SEQ ID NO: 103302 - DNA, 25 bp, Homo sapien
tagactaacttcaccgacatagtgt

SEQ ID NO: 103303 - DNA, 25 bp, Homo sapien
cattcttagtaccaccgagatatgt

SEQ ID NO: 103304 - DNA, 25 bp, Homo sapien
cattcttagtacgaccgagatatgt

SEQ ID NO: 103305 - DNA, 25 bp, Homo sapien
gcaatcattggtacgacgtgacttt

SEQ ID NO: 103306 - DNA, 25 bp, Homo sapien
gcaatcattggttcgacgtgacttt

SEQ ID NO: 103307 - DNA, 25 bp, Homo sapien
aaactaatgtggtgtattacgtaca

SEQ ID NO: 103308 - DNA, 25 bp, Homo sapien
aaactaatgtggagtattacgtaca

SEQ ID NO: 103309 - DNA, 25 bp, Homo sapien
gaacttataagtgacctagtattcc

SEQ ID NO: 103310 - DNA, 25 bp, Homo sapien
gaacttataagtcacctagtattcc

SEQ ID NO: 103311 - DNA, 25 bp, Homo sapien
gtagaaaaagtacgtcttacaggac

SEQ ID NO: 103312 - DNA, 25 bp, Homo sapien
gtagaaaaagtaggtcttacaggac

SEQ ID NO: 103313 - DNA, 25 bp, Homo sapien
gtagatcaagtaggttcttcgcggc

SEQ ID NO: 103314 - DNA, 25 bp, Homo sapien
gtagatcaagtacgttcttcgcggc

SEQ ID NO: 103315 - DNA, 25 bp, Homo sapien
aactctggtatgttttacctagtat

SEQ ID NO: 103316 - DNA, 25 bp, Homo sapien
aactctggtatgatttacctagtat

SEQ ID NO: 103317 - DNA, 25 bp, Homo sapien
tctcggtgtgtactaacgaggtact

SEQ ID NO: 103318 - DNA, 25 bp, Homo sapien
tctcggtgtgtagtaacgaggtact

SEQ ID NO: 103319 - DNA, 25 bp, Homo sapien
tgtagcttgagaaccgtgtgattct

SEQ ID NO: 103320 - DNA, 25 bp, Homo sapien
tgtagcttgagatccgtgtgattct

SEQ ID NO: 103321 - DNA, 25 bp, Homo sapien
ttcgacagtgaatgggtcgactgag

SEQ ID NO: 103322 - DNA, 25 bp, Homo sapien
ttcgacagtgaaagggtcgactgag

SEQ ID NO: 103323 - DNA, 25 bp, Homo sapien
ttagaacgcgacgaggcattagagt

SEQ ID NO: 103324 - DNA, 25 bp, Homo sapien
ttagaacgcgaccaggcattagagt

SEQ ID NO: 103325 - DNA, 25 bp, Homo sapien
attgtcgtaaagttccattccgaaa

SEQ ID NO: 103326 - DNA, 25 bp, Homo sapien
attgtcgtaaagatccattccgaaa

SEQ ID NO: 103327 - DNA, 25 bp, Homo sapien
cgtcgaggggttctagacacgaaga

SEQ ID NO: 103328 - DNA, 25 bp, Homo sapien
cgtcgaggggttgtagacacgaaga

SEQ ID NO: 103329 - DNA, 25 bp, Homo sapien
cacggcgacggtttctactggaaga

SEQ ID NO: 103330 - DNA, 25 bp, Homo sapien
cacggcgacggtatctactggaaga

SEQ ID NO: 103331 - DNA, 25 bp, Homo sapien
tgccgaaggtccttctcaaaagact

SEQ ID NO: 103332 - DNA, 25 bp, Homo sapien
tgccgaaggtccatctcaaaagact

SEQ ID NO: 103333 - DNA, 25 bp, Homo sapien
gcttccgtctctaccacgacgggaa

SEQ ID NO: 103334 - DNA, 25 bp, Homo sapien
gcttccgtctcttccacgacgggaa

SEQ ID NO: 103335 - DNA, 25 bp, Homo sapien
gtttcgagtcactgggacacaggga

SEQ ID NO: 103336 - DNA, 25 bp, Homo sapien
gtttcgagtcacagggacacaggga

SEQ ID NO: 103337 - DNA, 25 bp, Homo sapien
ctttcttcgcacaggcccggcagag

SEQ ID NO: 103338 - DNA, 25 bp, Homo sapien
ctttcttcgcactggcccggcagag

SEQ ID NO: 103339 - DNA, 25 bp, Homo sapien
tggtggtgagtcgttccggtctaat

SEQ ID NO: 103340 - DNA, 25 bp, Homo sapien
tggtggtgagtccttccggtctaat

SEQ ID NO: 103341 - DNA, 25 bp, Homo sapien
ttcgtcgaggttcacgttttcattt

SEQ ID NO: 103342 - DNA, 25 bp, Homo sapien
ttcgtcgaggttgacgttttcattt

SEQ ID NO: 103343 - DNA, 25 bp, Homo sapien
aagtccggattctgttcttcgatca

SEQ ID NO: 103344 - DNA, 25 bp, Homo sapien
aagtccggattcagttcttcgatca

SEQ ID NO: 103345 - DNA, 25 bp, Homo sapien
gaactcacttctcttgactcttaaa

SEQ ID NO: 103346 - DNA, 25 bp, Homo sapien
gaactcacttctgttgactcttaaa

SEQ ID NO: 103347 - DNA, 25 bp, Homo sapien
tcccttaaggtgttaccctcagtta

SEQ ID NO: 103348 - DNA, 25 bp, Homo sapien
tcccttaaggtgataccctcagtta

SEQ ID NO: 103349 - DNA, 25 bp, Homo sapien
gacctttaggtgtaccgctgagaag

SEQ ID NO: 103350 - DNA, 25 bp, Homo sapien
gacctttaggtgaaccgctgagaag

SEQ ID NO: 103351 - DNA, 25 bp, Homo sapien
taaagtagtttgaacccggacgata

SEQ ID NO: 103352 - DNA, 25 bp, Homo sapien
taaagtagtttgtacccggacgata

SEQ ID NO: 103353 - DNA, 25 bp, Homo sapien
tagtaagactattgtgcccgttttt

SEQ ID NO: 103354 - DNA, 25 bp, Homo sapien
tagtaagactatagtgcccgttttt

SEQ ID NO: 103355 - DNA, 25 bp, Homo sapien
ttaacggtattaaggttctctggtc

SEQ ID NO: 103356 - DNA, 25 bp, Homo sapien
ttaacggtattatggttctctggtc

SEQ ID NO: 103357 - DNA, 25 bp, Homo sapien
tcggtctaccgatcctacttcttgc

SEQ ID NO: 103358 - DNA, 25 bp, Homo sapien
tcggtctaccgaacctacttcttgc

SEQ ID NO: 103359 - DNA, 25 bp, Homo sapien
ctcgtgtcccgtcgttcattgagtc

SEQ ID NO: 103360 - DNA, 25 bp, Homo sapien
ctcgtgtcccgtggttcattgagtc

SEQ ID NO: 103361 - DNA, 25 bp, Homo sapien
agttacgaccctgaagtccggtttc

SEQ ID NO: 103362 - DNA, 25 bp, Homo sapien
agttacgaccctcaagtccggtttc

SEQ ID NO: 103363 - DNA, 25 bp, Homo sapien
gtccgtcggcagacgaccacttctg

SEQ ID NO: 103364 - DNA, 25 bp, Homo sapien
gtccgtcggcagtcgaccacttctg

SEQ ID NO: 103365 - DNA, 25 bp, Homo sapien
ctttcaggacggttaaggattcacg

SEQ ID NO: 103366 - DNA, 25 bp, Homo sapien
ctttcaggacggataaggattcacg

SEQ ID NO: 103367 - DNA, 25 bp, Homo sapien
tattaagacccgtcgaagaagctag

SEQ ID NO: 103368 - DNA, 25 bp, Homo sapien
tattaagacccgacgaagaagctag

SEQ ID NO: 103369 - DNA, 25 bp, Homo sapien
atactatgaccgatttgagaatcta

SEQ ID NO: 103370 - DNA, 25 bp, Homo sapien
atactatgaccgttttgagaatcta

SEQ ID NO: 103371 - DNA, 25 bp, Homo sapien
ttcgtcggcaccggtagagaacgag

SEQ ID NO: 103372 - DNA, 25 bp, Homo sapien
ttcgtcggcacccgtagagaacgag

SEQ ID NO: 103373 - DNA, 25 bp, Homo sapien
gattttcggaacctctaagtaaggt

SEQ ID NO: 103374 - DNA, 25 bp, Homo sapien
gattttcggaacgtctaagtaaggt

SEQ ID NO: 103375 - DNA, 25 bp, Homo sapien
gacttggacccctctacagtgacgg

SEQ ID NO: 103376 - DNA, 25 bp, Homo sapien
gacttggaccccactacagtgacgg

SEQ ID NO: 103377 - DNA, 25 bp, Homo sapien
gtatcttaccgacatttgtacgagg

SEQ ID NO: 103378 - DNA, 25 bp, Homo sapien
gtatcttaccgagatttgtacgagg

SEQ ID NO: 103379 - DNA, 25 bp, Homo sapien
gggatctctttcatttttgactata

SEQ ID NO: 103380 - DNA, 25 bp, Homo sapien
gggatctctttcttttttgactata

SEQ ID NO: 103381 - DNA, 25 bp, Homo sapien
ttgttgatgtatatttattgacttt

SEQ ID NO: 103382 - DNA, 25 bp, Homo sapien
ttgttgatgtatttttattgacttt

SEQ ID NO: 103383 - DNA, 25 bp, Homo sapien
ttaagtacattgattttcttttgta

SEQ ID NO: 103384 - DNA, 25 bp, Homo sapien
ttaagtacattgtttttcttttgta

SEQ ID NO: 103385 - DNA, 25 bp, Homo sapien
cttcggatgttgtataatgtcctta

SEQ ID NO: 103386 - DNA, 25 bp, Homo sapien
cttcggatgttgaataatgtcctta

SEQ ID NO: 103387 - DNA, 25 bp, Homo sapien
cccaagagttccactagtctcctga

SEQ ID NO: 103388 - DNA, 25 bp, Homo sapien
cccaagagttcctctagtctcctga

SEQ ID NO: 103389 - DNA, 25 bp, Homo sapien
cagcggcctacttcactcccggagt

SEQ ID NO: 103390 - DNA, 25 bp, Homo sapien
cagcggcctactacactcccggagt

SEQ ID NO: 103391 - DNA, 25 bp, Homo sapien
cggctgcggccacagagcccgaagt

SEQ ID NO: 103392 - DNA, 25 bp, Homo sapien
cggctgcggccagagagcccgaagt

SEQ ID NO: 103393 - DNA, 25 bp, Homo sapien
ttcgagacccctgtgcaccgtacag

SEQ ID NO: 103394 - DNA, 25 bp, Homo sapien
ttcgagacccctctgcaccgtacag

SEQ ID NO: 103395 - DNA, 25 bp, Homo sapien
gtcgaggttgagtcacaggacccag

SEQ ID NO: 103396 - DNA, 25 bp, Homo sapien
gtcgaggttgagacacaggacccag

SEQ ID NO: 103397 - DNA, 25 bp, Homo sapien
tcgaggtaggacaagtagggccctc

SEQ ID NO: 103398 - DNA, 25 bp, Homo sapien
tcgaggtaggactagtagggccctc

SEQ ID NO: 103399 - DNA, 25 bp, Homo sapien
cccgagcaggcgttcaggcatcgga

SEQ ID NO: 103400 - DNA, 25 bp, Homo sapien
cccgagcaggcgatcaggcatcgga

SEQ ID NO: 103401 - DNA, 25 bp, Homo sapien
tccgaagtttactgactttaacaag

SEQ ID NO: 103402 - DNA, 25 bp, Homo sapien
tccgaagtttacagactttaacaag

SEQ ID NO: 103403 - DNA, 25 bp, Homo sapien
gaactaactttcacttgaacgaagt

SEQ ID NO: 103404 - DNA, 25 bp, Homo sapien
gaactaactttctcttgaacgaagt

SEQ ID NO: 103405 - DNA, 25 bp, Homo sapien
gagcaggtttcacctagtaagaaag

SEQ ID NO: 103406 - DNA, 25 bp, Homo sapien
gagcaggtttcagctagtaagaaag

SEQ ID NO: 103407 - DNA, 25 bp, Homo sapien
tggtccgtccttacccgtaggcaga

SEQ ID NO: 103408 - DNA, 25 bp, Homo sapien
tggtccgtcctttcccgtaggcaga

SEQ ID NO: 103409 - DNA, 25 bp, Homo sapien
gtaacagtcctaagggcaggaacag

SEQ ID NO: 103410 - DNA, 25 bp, Homo sapien
gtaacagtcctatgggcaggaacag

SEQ ID NO: 103411 - DNA, 25 bp, Homo sapien
cgtgagttctacaaggaatctttat

SEQ ID NO: 103412 - DNA, 25 bp, Homo sapien
cgtgagttctactaggaatctttat

SEQ ID NO: 103413 - DNA, 25 bp, Homo sapien
gtcggtccgacctgggacctcggct

SEQ ID NO: 103414 - DNA, 25 bp, Homo sapien
gtcggtccgaccagggacctcggct

SEQ ID NO: 103415 - DNA, 25 bp, Homo sapien
cgggaaccacataacggattcagtc

SEQ ID NO: 103416 - DNA, 25 bp, Homo sapien
cgggaaccacattacggattcagtc

SEQ ID NO: 103417 - DNA, 25 bp, Homo sapien
gttacaccgacagacgagttgacaa

SEQ ID NO: 103418 - DNA, 25 bp, Homo sapien
gttacaccgacacacgagttgacaa

SEQ ID NO: 103419 - DNA, 25 bp, Homo sapien
aggatcttaacacaaacagtttgca

SEQ ID NO: 103420 - DNA, 25 bp, Homo sapien
aggatcttaacagaaacagtttgca

SEQ ID NO: 103421 - DNA, 25 bp, Homo sapien
caagaaaccaacttacacccgggtt

SEQ ID NO: 103422 - DNA, 25 bp, Homo sapien
caagaaaccaacatacacccgggtt

SEQ ID NO: 103423 - DNA, 25 bp, Homo sapien
gatagacgagaaaagacaccggaac

SEQ ID NO: 103424 - DNA, 25 bp, Homo sapien
gatagacgagaatagacaccggaac

SEQ ID NO: 103425 - DNA, 25 bp, Homo sapien
tggaaacagaaaagacagtcttatc

SEQ ID NO: 103426 - DNA, 25 bp, Homo sapien
tggaaacagaaatgacagtcttatc

SEQ ID NO: 103427 - DNA, 25 bp, Homo sapien
agggaccacacatggggtgtcagtc

SEQ ID NO: 103428 - DNA, 25 bp, Homo sapien
agggaccacacaaggggtgtcagtc

SEQ ID NO: 103429 - DNA, 25 bp, Homo sapien
acaaccatcactcgacgtgcatctg

SEQ ID NO: 103430 - DNA, 25 bp, Homo sapien
acaaccatcactggacgtgcatctg

SEQ ID NO: 103431 - DNA, 25 bp, Homo sapien
ttcgctaccatcggtacgtccttgg

SEQ ID NO: 103432 - DNA, 25 bp, Homo sapien
ttcgctaccatccgtacgtccttgg

SEQ ID NO: 103433 - DNA, 25 bp, Homo sapien
tcatctcctgcgactggtccttcgg

SEQ ID NO: 103434 - DNA, 25 bp, Homo sapien
tcatctcctgcgtctggtccttcgg

SEQ ID NO: 103435 - DNA, 25 bp, Homo sapien
tcgtctctcgctaagggtcttgcgc

SEQ ID NO: 103436 - DNA, 25 bp, Homo sapien
tcgtctctcgcttagggtcttgcgc

SEQ ID NO: 103437 - DNA, 25 bp, Homo sapien
ctgttgtgttagagtactggtcgac

SEQ ID NO: 103438 - DNA, 25 bp, Homo sapien
ctgttgtgttagtgtactggtcgac

SEQ ID NO: 103439 - DNA, 25 bp, Homo sapien
tcgggtcttgtaggatccgtcgacg

SEQ ID NO: 103440 - DNA, 25 bp, Homo sapien
tcgggtcttgtacgatccgtcgacg

SEQ ID NO: 103441 - DNA, 25 bp, Homo sapien
gtcgaagaacggtctataccgacga

SEQ ID NO: 103442 - DNA, 25 bp, Homo sapien
gtcgaagaacggactataccgacga

SEQ ID NO: 103443 - DNA, 25 bp, Homo sapien
ggggtttatatcgtcctccggacct

SEQ ID NO: 103444 - DNA, 25 bp, Homo sapien
ggggtttatatcctcctccggacct

SEQ ID NO: 103445 - DNA, 25 bp, Homo sapien
cgggttatttctacgggtgactcct

SEQ ID NO: 103446 - DNA, 25 bp, Homo sapien
cgggttatttcttcgggtgactcct

SEQ ID NO: 103447 - DNA, 25 bp, Homo sapien
cgagattttatgttcgaaggaccct

SEQ ID NO: 103448 - DNA, 25 bp, Homo sapien
cgagattttatgatcgaaggaccct

SEQ ID NO: 103449 - DNA, 25 bp, Homo sapien
acgaaaatcaagacgaacaagttct

SEQ ID NO: 103450 - DNA, 25 bp, Homo sapien
acgaaaatcaagtcgaacaagttct

SEQ ID NO: 103451 - DNA, 25 bp, Homo sapien
gagaagacactacaatggcaataac

SEQ ID NO: 103452 - DNA, 25 bp, Homo sapien
gagaagacactagaatggcaataac

SEQ ID NO: 103453 - DNA, 25 bp, Homo sapien
gtaaaagaatgaacccctagaacta

SEQ ID NO: 103454 - DNA, 25 bp, Homo sapien
gtaaaagaatgatcccctagaacta

SEQ ID NO: 103455 - DNA, 25 bp, Homo sapien
aaagagacggaggactccaggtctg

SEQ ID NO: 103456 - DNA, 25 bp, Homo sapien
aaagagacggagcactccaggtctg

SEQ ID NO: 103457 - DNA, 25 bp, Homo sapien
ctgaagggctgtgaacagaacgtaa

SEQ ID NO: 103458 - DNA, 25 bp, Homo sapien
ctgaagggctgtcaacagaacgtaa

SEQ ID NO: 103459 - DNA, 25 bp, Homo sapien
caaccactaaggtgaagcagtccaa

SEQ ID NO: 103460 - DNA, 25 bp, Homo sapien
caaccactaaggagaagcagtccaa

SEQ ID NO: 103461 - DNA, 25 bp, Homo sapien
ttctcgagtcataataatgtccatg

SEQ ID NO: 103462 - DNA, 25 bp, Homo sapien
ttctcgagtcattataatgtccatg

SEQ ID NO: 103463 - DNA, 25 bp, Homo sapien
tggggctcgccgacaggtccgacta

SEQ ID NO: 103464 - DNA, 25 bp, Homo sapien
tggggctcgccgtcaggtccgacta

SEQ ID NO: 103465 - DNA, 25 bp, Homo sapien
agttgaacgatctcggatcggagta

SEQ ID NO: 103466 - DNA, 25 bp, Homo sapien
agttgaacgatcacggatcggagta

SEQ ID NO: 103467 - DNA, 25 bp, Homo sapien
tcgagaccggacctctcgatgggag

SEQ ID NO: 103468 - DNA, 25 bp, Homo sapien
tcgagaccggacgtctcgatgggag

SEQ ID NO: 103469 - DNA, 25 bp, Homo sapien
ggtgacccggacctccacgttagga

SEQ ID NO: 103470 - DNA, 25 bp, Homo sapien
ggtgacccggacgtccacgttagga

SEQ ID NO: 103471 - DNA, 25 bp, Homo sapien
gcgtacccgaagtacccgaactgac

SEQ ID NO: 103472 - DNA, 25 bp, Homo sapien
gcgtacccgaagaacccgaactgac

SEQ ID NO: 103473 - DNA, 25 bp, Homo sapien
aaaagaccgacaatattaccggtgg

SEQ ID NO: 103474 - DNA, 25 bp, Homo sapien
aaaagaccgacattattaccggtgg

SEQ ID NO: 103475 - DNA, 25 bp, Homo sapien
acgatacacccaaaatctggtactg

SEQ ID NO: 103476 - DNA, 25 bp, Homo sapien
acgatacacccataatctggtactg

SEQ ID NO: 103477 - DNA, 25 bp, Homo sapien
agaacagtacggagtccccagaaca

SEQ ID NO: 103478 - DNA, 25 bp, Homo sapien
agaacagtacggtgtccccagaaca

SEQ ID NO: 103479 - DNA, 25 bp, Homo sapien
ttgggggcatcctctcgcgtctctc

SEQ ID NO: 103480 - DNA, 25 bp, Homo sapien
ttgggggcatccactcgcgtctctc

SEQ ID NO: 103481 - DNA, 25 bp, Homo sapien
tgttgagacccttctcgctatgtgt

SEQ ID NO: 103482 - DNA, 25 bp, Homo sapien
tgttgagaccctactcgctatgtgt

SEQ ID NO: 103483 - DNA, 25 bp, Homo sapien
tagatacaacctttacagcatgtgt

SEQ ID NO: 103484 - DNA, 25 bp, Homo sapien
tagatacaacctatacagcatgtgt

SEQ ID NO: 103485 - DNA, 25 bp, Homo sapien
tttacatgtctcatacatatgtgtg

SEQ ID NO: 103486 - DNA, 25 bp, Homo sapien
tttacatgtctcttacatatgtgtg

SEQ ID NO: 103487 - DNA, 25 bp, Homo sapien
ttctcgaccgttcctgttaaacgtc

SEQ ID NO: 103488 - DNA, 25 bp, Homo sapien
ttctcgaccgttgctgttaaacgtc

SEQ ID NO: 103489 - DNA, 25 bp, Homo sapien
ctctcctggtttaccttagactccg

SEQ ID NO: 103490 - DNA, 25 bp, Homo sapien
ctctcctggttttccttagactccg

SEQ ID NO: 103491 - DNA, 25 bp, Homo sapien
aaagaatagaacactatgtacgacg

SEQ ID NO: 103492 - DNA, 25 bp, Homo sapien
aaagaatagaactctatgtacgacg

SEQ ID NO: 103493 - DNA, 25 bp, Homo sapien
ttacaataaccgtcagtcgtcgagt

SEQ ID NO: 103494 - DNA, 25 bp, Homo sapien
ttacaataaccgacagtcgtcgagt

SEQ ID NO: 103495 - DNA, 25 bp, Homo sapien
aagtatttcattctgccttctagtg

SEQ ID NO: 103496 - DNA, 25 bp, Homo sapien
aagtatttcattgtgccttctagtg

SEQ ID NO: 103497 - DNA, 25 bp, Homo sapien
gcgatgttctccttccattttaacg

SEQ ID NO: 103498 - DNA, 25 bp, Homo sapien
gcgatgttctccatccattttaacg

SEQ ID NO: 103499 - DNA, 25 bp, Homo sapien
ggacggtcctgcacagatccacatc

SEQ ID NO: 103500 - DNA, 25 bp, Homo sapien
ggacggtcctgctcagatccacatc

SEQ ID NO: 103501 - DNA, 25 bp, Homo sapien
gggagcctgtcctcggtgttcgaaa

SEQ ID NO: 103502 - DNA, 25 bp, Homo sapien
gggagcctgtccacggtgttcgaaa

SEQ ID NO: 103503 - DNA, 25 bp, Homo sapien
cagaactccatgtgcctctccgatt

SEQ ID NO: 103504 - DNA, 25 bp, Homo sapien
cagaactccatgagcctctccgatt

SEQ ID NO: 103505 - DNA, 25 bp, Homo sapien
catctttcttgtagagtctgtccaa

SEQ ID NO: 103506 - DNA, 25 bp, Homo sapien
catctttcttgttgagtctgtccaa

SEQ ID NO: 103507 - DNA, 25 bp, Homo sapien
cgtttctcgttttagttgtactaaa

SEQ ID NO: 103508 - DNA, 25 bp, Homo sapien
cgtttctcgtttaagttgtactaaa

SEQ ID NO: 103509 - DNA, 25 bp, Homo sapien
ggttctatcgtccaatattacccga

SEQ ID NO: 103510 - DNA, 25 bp, Homo sapien
ggttctatcgtcgaatattacccga

SEQ ID NO: 103511 - DNA, 25 bp, Homo sapien
aggtcatgtaaatttgtcgccgtac

SEQ ID NO: 103512 - DNA, 25 bp, Homo sapien
aggtcatgtaaaattgtcgccgtac

SEQ ID NO: 103513 - DNA, 25 bp, Homo sapien
gagtcagtgtcgaccccggtggtct

SEQ ID NO: 103514 - DNA, 25 bp, Homo sapien
gagtcagtgtcgtccccggtggtct

SEQ ID NO: 103515 - DNA, 25 bp, Homo sapien
gtggtgcatgtgtcccttttctcgt

SEQ ID NO: 103516 - DNA, 25 bp, Homo sapien
gtggtgcatgtgacccttttctcgt

SEQ ID NO: 103517 - DNA, 25 bp, Homo sapien
ctcataccgtttaacgaacttttgt

SEQ ID NO: 103518 - DNA, 25 bp, Homo sapien
ctcataccgttttacgaacttttgt

SEQ ID NO: 103519 - DNA, 25 bp, Homo sapien
tacagagtcgatgtactagattttc

SEQ ID NO: 103520 - DNA, 25 bp, Homo sapien
tacagagtcgatctactagattttc

SEQ ID NO: 103521 - DNA, 25 bp, Homo sapien
ctgggaccgaaactaatcgtttatt

SEQ ID NO: 103522 - DNA, 25 bp, Homo sapien
ctgggaccgaaagtaatcgtttatt

SEQ ID NO: 103523 - DNA, 25 bp, Homo sapien
tgggagactaatccacgggaggtat

SEQ ID NO: 103524 - DNA, 25 bp, Homo sapien
tgggagactaatgcacgggaggtat

SEQ ID NO: 103525 - DNA, 25 bp, Homo sapien
agggacgagcatccactgggcgact

SEQ ID NO: 103526 - DNA, 25 bp, Homo sapien
agggacgagcatgcactgggcgact

SEQ ID NO: 103527 - DNA, 25 bp, Homo sapien
aagaacgacgaagactactttggtt

SEQ ID NO: 103528 - DNA, 25 bp, Homo sapien
aagaacgacgaacactactttggtt

SEQ ID NO: 103529 - DNA, 25 bp, Homo sapien
taagacacatagtcactgagatctc

SEQ ID NO: 103530 - DNA, 25 bp, Homo sapien
taagacacatagacactgagatctc

SEQ ID NO: 103531 - DNA, 25 bp, Homo sapien
atgagacaccttgaacgttttcact

SEQ ID NO: 103532 - DNA, 25 bp, Homo sapien
atgagacaccttcaacgttttcact

SEQ ID NO: 103533 - DNA, 25 bp, Homo sapien
tcgagaagactacagcctacatcac

SEQ ID NO: 103534 - DNA, 25 bp, Homo sapien
tcgagaagactagagcctacatcac

SEQ ID NO: 103535 - DNA, 25 bp, Homo sapien
tcaagtacgagttcggaaacatctc

SEQ ID NO: 103536 - DNA, 25 bp, Homo sapien
tcaagtacgagtacggaaacatctc

SEQ ID NO: 103537 - DNA, 25 bp, Homo sapien
tcacagtcgtaagagttttactacg

SEQ ID NO: 103538 - DNA, 25 bp, Homo sapien
tcacagtcgtaacagttttactacg

SEQ ID NO: 103539 - DNA, 25 bp, Homo sapien
ataacactagactattgtctgacgt

SEQ ID NO: 103540 - DNA, 25 bp, Homo sapien
ataacactagacaattgtctgacgt

SEQ ID NO: 103541 - DNA, 25 bp, Homo sapien
tagtggataccgtgatcgttctaga

SEQ ID NO: 103542 - DNA, 25 bp, Homo sapien
tagtggataccgagatcgttctaga

SEQ ID NO: 103543 - DNA, 25 bp, Homo sapien
ttgtgtagtccgactcgcgcaccac

SEQ ID NO: 103544 - DNA, 25 bp, Homo sapien
ttgtgtagtccgtctcgcgcaccac

SEQ ID NO: 103545 - DNA, 25 bp, Homo sapien
aatggggacgtcacacaaccctcct

SEQ ID NO: 103546 - DNA, 25 bp, Homo sapien
aatggggacgtctcacaaccctcct

SEQ ID NO: 103547 - DNA, 25 bp, Homo sapien
agaactactcagacccttctcgtgt

SEQ ID NO: 103548 - DNA, 25 bp, Homo sapien
agaactactcagtcccttctcgtgt

SEQ ID NO: 103549 - DNA, 25 bp, Homo sapien
tatgtactcgattcgacaccaagtt

SEQ ID NO: 103550 - DNA, 25 bp, Homo sapien
tatgtactcgatacgacaccaagtt

SEQ ID NO: 103551 - DNA, 25 bp, Homo sapien
gacgtaaccgaggtcactgtgaaag

SEQ ID NO: 103552 - DNA, 25 bp, Homo sapien
gacgtaaccgagctcactgtgaaag

SEQ ID NO: 103553 - DNA, 25 bp, Homo sapien
acgtgtaccgtacacatagagacaa

SEQ ID NO: 103554 - DNA, 25 bp, Homo sapien
acgtgtaccgtagacatagagacaa

SEQ ID NO: 103555 - DNA, 25 bp, Homo sapien
gttgggccgacaacagaggtatccg

SEQ ID NO: 103556 - DNA, 25 bp, Homo sapien
gttgggccgacatcagaggtatccg

SEQ ID NO: 103557 - DNA, 25 bp, Homo sapien
gggtcgactcgaaacaacgactccc

SEQ ID NO: 103558 - DNA, 25 bp, Homo sapien
gggtcgactcgatacaacgactccc

SEQ ID NO: 103559 - DNA, 25 bp, Homo sapien
gtgggcgagaccaagaaacctccct

SEQ ID NO: 103560 - DNA, 25 bp, Homo sapien
gtgggcgagacctagaaacctccct

SEQ ID NO: 103561 - DNA, 25 bp, Homo sapien
aataaaaggttacaggcgccatccg

SEQ ID NO: 103562 - DNA, 25 bp, Homo sapien
aataaaaggttagaggcgccatccg

SEQ ID NO: 103563 - DNA, 25 bp, Homo sapien
agagaaattgagtgggaccataccg

SEQ ID NO: 103564 - DNA, 25 bp, Homo sapien
agagaaattgagagggaccataccg

SEQ ID NO: 103565 - DNA, 25 bp, Homo sapien
tcgaaatttaagacggggtcaacac

SEQ ID NO: 103566 - DNA, 25 bp, Homo sapien
tcgaaatttaagtcggggtcaacac

SEQ ID NO: 103567 - DNA, 25 bp, Homo sapien
caaacgtttagagctaaatgactcc

SEQ ID NO: 103568 - DNA, 25 bp, Homo sapien
caaacgtttagacctaaatgactcc

SEQ ID NO: 103569 - DNA, 25 bp, Homo sapien
cgaacaaatttcaggagtaacctgt

SEQ ID NO: 103570 - DNA, 25 bp, Homo sapien
cgaacaaatttctggagtaacctgt

SEQ ID NO: 103571 - DNA, 25 bp, Homo sapien
agccaatacttactgggtataacat

SEQ ID NO: 103572 - DNA, 25 bp, Homo sapien
agccaatacttagtgggtataacat

SEQ ID NO: 103573 - DNA, 25 bp, Homo sapien
acccagcgtcccagtgagtgaaatt

SEQ ID NO: 103574 - DNA, 25 bp, Homo sapien
acccagcgtccctgtgagtgaaatt

SEQ ID NO: 103575 - DNA, 25 bp, Homo sapien
aaacaaggtttgttcaagacaactt

SEQ ID NO: 103576 - DNA, 25 bp, Homo sapien
aaacaaggtttgatcaagacaactt

SEQ ID NO: 103577 - DNA, 25 bp, Homo sapien
tggaaccggtttttaaagtcctctg

SEQ ID NO: 103578 - DNA, 25 bp, Homo sapien
tggaaccggtttataaagtcctctg

SEQ ID NO: 103579 - DNA, 25 bp, Homo sapien
gaagtcataatgaataactcccgta

SEQ ID NO: 103580 - DNA, 25 bp, Homo sapien
gaagtcataatgtataactcccgta

SEQ ID NO: 103581 - DNA, 25 bp, Homo sapien
gacagtttcagctacaagtacacaa

SEQ ID NO: 103582 - DNA, 25 bp, Homo sapien
gacagtttcagcaacaagtacacaa

SEQ ID NO: 103583 - DNA, 25 bp, Homo sapien
gtttctcctgacgtcttagtgggat

SEQ ID NO: 103584 - DNA, 25 bp, Homo sapien
gtttctcctgacctcttagtgggat

SEQ ID NO: 103585 - DNA, 25 bp, Homo sapien
tgcgtcgcccggaccatcggggtct

SEQ ID NO: 103586 - DNA, 25 bp, Homo sapien
tgcgtcgcccggtccatcggggtct

SEQ ID NO: 103587 - DNA, 25 bp, Homo sapien
tcagtcgtcggtcagagtcccgggc

SEQ ID NO: 103588 - DNA, 25 bp, Homo sapien
tcagtcgtcggtgagagtcccgggc

SEQ ID NO: 103589 - DNA, 25 bp, Homo sapien
tcctgcgacggtaagcaccggtcct

SEQ ID NO: 103590 - DNA, 25 bp, Homo sapien
tcctgcgacggttagcaccggtcct

SEQ ID NO: 103591 - DNA, 25 bp, Homo sapien
atacacagtgtcaggagcccctgtc

SEQ ID NO: 103592 - DNA, 25 bp, Homo sapien
atacacagtgtctggagcccctgtc

SEQ ID NO: 103593 - DNA, 25 bp, Homo sapien
tggaccagcatgagcgacctcctct

SEQ ID NO: 103594 - DNA, 25 bp, Homo sapien
tggaccagcatgtgcgacctcctct

SEQ ID NO: 103595 - DNA, 25 bp, Homo sapien
agtacctcaaagaccggtaacacct

SEQ ID NO: 103596 - DNA, 25 bp, Homo sapien
agtacctcaaagtccggtaacacct

SEQ ID NO: 103597 - DNA, 25 bp, Homo sapien
tcccctataagttccgtcaggtcct

SEQ ID NO: 103598 - DNA, 25 bp, Homo sapien
tcccctataagtaccgtcaggtcct

SEQ ID NO: 103599 - DNA, 25 bp, Homo sapien
cgccggaagagaccgaaacaggtcc

SEQ ID NO: 103600 - DNA, 25 bp, Homo sapien
cgccggaagagagcgaaacaggtcc

SEQ ID NO: 103601 - DNA, 25 bp, Homo sapien
cctgtggacaaaggaagggcgtcac

SEQ ID NO: 103602 - DNA, 25 bp, Homo sapien
cctgtggacaaacgaagggcgtcac

SEQ ID NO: 103603 - DNA, 25 bp, Homo sapien
aaagtccgttctcagatactggtca

SEQ ID NO: 103604 - DNA, 25 bp, Homo sapien
aaagtccgttctgagatactggtca

SEQ ID NO: 103605 - DNA, 25 bp, Homo sapien
cgatgtcattctgagacatgtcttt

SEQ ID NO: 103606 - DNA, 25 bp, Homo sapien
cgatgtcattctcagacatgtcttt

SEQ ID NO: 103607 - DNA, 25 bp, Homo sapien
ttctattctcgacttactcgtacgg

SEQ ID NO: 103608 - DNA, 25 bp, Homo sapien
ttctattctcgagttactcgtacgg

SEQ ID NO: 103609 - DNA, 25 bp, Homo sapien
tctctaaactaagtcgtcttgtcgt

SEQ ID NO: 103610 - DNA, 25 bp, Homo sapien
tctctaaactaactcgtcttgtcgt

SEQ ID NO: 103611 - DNA, 25 bp, Homo sapien
cactaatactatcacgtggggtagt

SEQ ID NO: 103612 - DNA, 25 bp, Homo sapien
cactaatactatgacgtggggtagt

SEQ ID NO: 103613 - DNA, 25 bp, Homo sapien
ccacgtaaggaggacatcacgaagt

SEQ ID NO: 103614 - DNA, 25 bp, Homo sapien
ccacgtaaggagcacatcacgaagt

SEQ ID NO: 103615 - DNA, 25 bp, Homo sapien
gccgagacggagcaatcgtaggtct

SEQ ID NO: 103616 - DNA, 25 bp, Homo sapien
gccgagacggaggaatcgtaggtct

SEQ ID NO: 103617 - DNA, 25 bp, Homo sapien
ctattgtctgagtgttgcataaatc

SEQ ID NO: 103618 - DNA, 25 bp, Homo sapien
ctattgtctgagagttgcataaatc

SEQ ID NO: 103619 - DNA, 25 bp, Homo sapien
tttcctggaactttcgaacagaccg

SEQ ID NO: 103620 - DNA, 25 bp, Homo sapien
tttcctggaactatcgaacagaccg

SEQ ID NO: 103621 - DNA, 25 bp, Homo sapien
ttattttgagatattcgccagtgtc

SEQ ID NO: 103622 - DNA, 25 bp, Homo sapien
ttattttgagattttcgccagtgtc

SEQ ID NO: 103623 - DNA, 25 bp, Homo sapien
tttacctaacggttttgccagtggt

SEQ ID NO: 103624 - DNA, 25 bp, Homo sapien
tttacctaacggatttgccagtggt

SEQ ID NO: 103625 - DNA, 25 bp, Homo sapien
cttgtaaaaatctcatgatcaggtt

SEQ ID NO: 103626 - DNA, 25 bp, Homo sapien
cttgtaaaaatcacatgatcaggtt

SEQ ID NO: 103627 - DNA, 25 bp, Homo sapien
tctgaagaaaacctcggaagttgaa

SEQ ID NO: 103628 - DNA, 25 bp, Homo sapien
tctgaagaaaacgtcggaagttgaa

SEQ ID NO: 103629 - DNA, 25 bp, Homo sapien
taattagtatgaaacccagaaaaat

SEQ ID NO: 103630 - DNA, 25 bp, Homo sapien
taattagtatgatacccagaaaaat

SEQ ID NO: 103631 - DNA, 25 bp, Homo sapien
acatgtgtagtaaggctcggcggaa

SEQ ID NO: 103632 - DNA, 25 bp, Homo sapien
acatgtgtagtatggctcggcggaa

SEQ ID NO: 103633 - DNA, 25 bp, Homo sapien
acttgtgtatacgtccgaccacggg

SEQ ID NO: 103634 - DNA, 25 bp, Homo sapien
acttgtgtatacctccgaccacggg

SEQ ID NO: 103635 - DNA, 25 bp, Homo sapien
cgtggaggaacttcaactacagcgt

SEQ ID NO: 103636 - DNA, 25 bp, Homo sapien
cgtggaggaactacaactacagcgt

SEQ ID NO: 103637 - DNA, 25 bp, Homo sapien
tgtcaggactcaagttccctcggag

SEQ ID NO: 103638 - DNA, 25 bp, Homo sapien
tgtcaggactcatgttccctcggag

SEQ ID NO: 103639 - DNA, 25 bp, Homo sapien
ctcacgaacgacaggggcacaccga

SEQ ID NO: 103640 - DNA, 25 bp, Homo sapien
ctcacgaacgactggggcacaccga

SEQ ID NO: 103641 - DNA, 25 bp, Homo sapien
tggctccgaggagaagagccgcacc

SEQ ID NO: 103642 - DNA, 25 bp, Homo sapien
tggctccgaggacaagagccgcacc

SEQ ID NO: 103643 - DNA, 25 bp, Homo sapien
gacggccggtccagacagaacaagg

SEQ ID NO: 103644 - DNA, 25 bp, Homo sapien
gacggccggtcctgacagaacaagg

SEQ ID NO: 103645 - DNA, 25 bp, Homo sapien
tttggtcactgttccccaaagtaca

SEQ ID NO: 103646 - DNA, 25 bp, Homo sapien
tttggtcactgtaccccaaagtaca

SEQ ID NO: 103647 - DNA, 25 bp, Homo sapien
tagggataccgaaccaagggtacag

SEQ ID NO: 103648 - DNA, 25 bp, Homo sapien
tagggataccgatccaagggtacag

SEQ ID NO: 103649 - DNA, 25 bp, Homo sapien
agtgtgtctcgaacccggaccctcg

SEQ ID NO: 103650 - DNA, 25 bp, Homo sapien
agtgtgtctcgatcccggaccctcg

SEQ ID NO: 103651 - DNA, 25 bp, Homo sapien
aattgtgtctcgtcgggaggtcccg

SEQ ID NO: 103652 - DNA, 25 bp, Homo sapien
aattgtgtctcgacgggaggtcccg

SEQ ID NO: 103653 - DNA, 25 bp, Homo sapien
gtctacggtatactcgacttagaac

SEQ ID NO: 103654 - DNA, 25 bp, Homo sapien
gtctacggtatagtcgacttagaac

SEQ ID NO: 103655 - DNA, 25 bp, Homo sapien
tcgcgtgtgtgtgtggagtagatac

SEQ ID NO: 103656 - DNA, 25 bp, Homo sapien
tcgcgtgtgtgtctggagtagatac

SEQ ID NO: 103657 - DNA, 25 bp, Homo sapien
tgacgtggcacctcgtcgatgaaat

SEQ ID NO: 103658 - DNA, 25 bp, Homo sapien
tgacgtggcaccacgtcgatgaaat

SEQ ID NO: 103659 - DNA, 25 bp, Homo sapien
atcgatcggatacatgtcgttcaaa

SEQ ID NO: 103660 - DNA, 25 bp, Homo sapien
atcgatcggatagatgtcgttcaaa

SEQ ID NO: 103661 - DNA, 25 bp, Homo sapien
ttcgataaataggagagacttccaa

SEQ ID NO: 103662 - DNA, 25 bp, Homo sapien
ttcgataaatagcagagacttccaa

SEQ ID NO: 103663 - DNA, 25 bp, Homo sapien
tccgggaactgcaagctccctagtt

SEQ ID NO: 103664 - DNA, 25 bp, Homo sapien
tccgggaactgctagctccctagtt

SEQ ID NO: 103665 - DNA, 25 bp, Homo sapien
tgtgtatggtgtccaggccctgtgt

SEQ ID NO: 103666 - DNA, 25 bp, Homo sapien
tgtgtatggtgtgcaggccctgtgt

SEQ ID NO: 103667 - DNA, 25 bp, Homo sapien
tctttcgacccgagtctgcaggtgt

SEQ ID NO: 103668 - DNA, 25 bp, Homo sapien
tctttcgacccgtgtctgcaggtgt

SEQ ID NO: 103669 - DNA, 25 bp, Homo sapien
tacgtcctccctgtatacaaagtag

SEQ ID NO: 103670 - DNA, 25 bp, Homo sapien
tacgtcctccctctatacaaagtag

SEQ ID NO: 103671 - DNA, 25 bp, Homo sapien
gaccacttcctcctgtaaggacgag

SEQ ID NO: 103672 - DNA, 25 bp, Homo sapien
gaccacttcctcgtgtaaggacgag

SEQ ID NO: 103673 - DNA, 25 bp, Homo sapien
tctctatctttctggtcaggaacga

SEQ ID NO: 103674 - DNA, 25 bp, Homo sapien
tctctatctttcaggtcaggaacga

SEQ ID NO: 103675 - DNA, 25 bp, Homo sapien
tagtcgtctgcgaactacatgagga

SEQ ID NO: 103676 - DNA, 25 bp, Homo sapien
tagtcgtctgcgtactacatgagga

SEQ ID NO: 103677 - DNA, 25 bp, Homo sapien
tatgtggtctcgtcggaactcggga

SEQ ID NO: 103678 - DNA, 25 bp, Homo sapien
tatgtggtctcgacggaactcggga

SEQ ID NO: 103679 - DNA, 25 bp, Homo sapien
aattttccttcgaggaactcgaaca

SEQ ID NO: 103680 - DNA, 25 bp, Homo sapien
aattttccttcgtggaactcgaaca

SEQ ID NO: 103681 - DNA, 25 bp, Homo sapien
cctacgccctagacgtccgtagagg

SEQ ID NO: 103682 - DNA, 25 bp, Homo sapien
cctacgccctagtcgtccgtagagg

SEQ ID NO: 103683 - DNA, 25 bp, Homo sapien
tccgacggtctgacgtgcgtgtaga

SEQ ID NO: 103684 - DNA, 25 bp, Homo sapien
tccgacggtctgtcgtgcgtgtaga

SEQ ID NO: 103685 - DNA, 25 bp, Homo sapien
aactcagggtactggtgttctgagg

SEQ ID NO: 103686 - DNA, 25 bp, Homo sapien
aactcagggtacaggtgttctgagg

SEQ ID NO: 103687 - DNA, 25 bp, Homo sapien
gggacccgggactacccgtcggacc

SEQ ID NO: 103688 - DNA, 25 bp, Homo sapien
gggacccgggacaacccgtcggacc

SEQ ID NO: 103689 - DNA, 25 bp, Homo sapien
gacaagactgtgacccgaccgggga

SEQ ID NO: 103690 - DNA, 25 bp, Homo sapien
gacaagactgtgtcccgaccgggga

SEQ ID NO: 103691 - DNA, 25 bp, Homo sapien
ggaaaactcaagtgtccacggggaa

SEQ ID NO: 103692 - DNA, 25 bp, Homo sapien
ggaaaactcaagagtccacggggaa

SEQ ID NO: 103693 - DNA, 25 bp, Homo sapien
aatctcggcataccactcgtcggaa

SEQ ID NO: 103694 - DNA, 25 bp, Homo sapien
aatctcggcatagcactcgtcggaa

SEQ ID NO: 103695 - DNA, 25 bp, Homo sapien
tcgcgaccgtttcctgtcggtacac

SEQ ID NO: 103696 - DNA, 25 bp, Homo sapien
tcgcgaccgtttgctgtcggtacac

SEQ ID NO: 103697 - DNA, 25 bp, Homo sapien
tatctccgtcgctatttcgggccgt

SEQ ID NO: 103698 - DNA, 25 bp, Homo sapien
tatctccgtcgcaatttcgggccgt

SEQ ID NO: 103699 - DNA, 25 bp, Homo sapien
actctcgtgtcaccccacgcggttc

SEQ ID NO: 103700 - DNA, 25 bp, Homo sapien
actctcgtgtcagcccacgcggttc

SEQ ID NO: 103701 - DNA, 25 bp, Homo sapien
agttttcctgtgtctccacttgacc

SEQ ID NO: 103702 - DNA, 25 bp, Homo sapien
agttttcctgtgactccacttgacc

SEQ ID NO: 103703 - DNA, 25 bp, Homo sapien
atccatcggcggagaacagatgacc

SEQ ID NO: 103704 - DNA, 25 bp, Homo sapien
atccatcggcggtgaacagatgacc

SEQ ID NO: 103705 - DNA, 25 bp, Homo sapien
tcacggtgtcagtggaaacaatgtc

SEQ ID NO: 103706 - DNA, 25 bp, Homo sapien
tcacggtgtcagaggaaacaatgtc

SEQ ID NO: 103707 - DNA, 25 bp, Homo sapien
gtgaagaagtccggaaccaccatcg

SEQ ID NO: 103708 - DNA, 25 bp, Homo sapien
gtgaagaagtcccgaaccaccatcg

SEQ ID NO: 103709 - DNA, 25 bp, Homo sapien
gtgacacggagttccaacccaccat

SEQ ID NO: 103710 - DNA, 25 bp, Homo sapien
gtgacacggagtaccaacccaccat

SEQ ID NO: 103711 - DNA, 25 bp, Homo sapien
cctagagttaccatgaacactcggt

SEQ ID NO: 103712 - DNA, 25 bp, Homo sapien
cctagagttaccttgaacactcggt

SEQ ID NO: 103713 - DNA, 25 bp, Homo sapien
ctcctgttccgtatcgaacccgtat

SEQ ID NO: 103714 - DNA, 25 bp, Homo sapien
ctcctgttccgtttcgaacccgtat

SEQ ID NO: 103715 - DNA, 25 bp, Homo sapien
aatctcctttcgtcataaataacat

SEQ ID NO: 103716 - DNA, 25 bp, Homo sapien
aatctcctttcgacataaataacat

SEQ ID NO: 103717 - DNA, 25 bp, Homo sapien
tctaactttcgaaagtctttacatt

SEQ ID NO: 103718 - DNA, 25 bp, Homo sapien
tctaactttcgatagtctttacatt

SEQ ID NO: 103719 - DNA, 25 bp, Homo sapien
cctaggtagacgagggacacagtac

SEQ ID NO: 103720 - DNA, 25 bp, Homo sapien
cctaggtagacgtgggacacagtac

SEQ ID NO: 103721 - DNA, 25 bp, Homo sapien
ctgtaaaaacggagtacgacacgtt

SEQ ID NO: 103722 - DNA, 25 bp, Homo sapien
ctgtaaaaacggtgtacgacacgtt

SEQ ID NO: 103723 - DNA, 25 bp, Homo sapien
acacagtcacaagagaccacaccgg

SEQ ID NO: 103724 - DNA, 25 bp, Homo sapien
acacagtcacaacagaccacaccgg

SEQ ID NO: 103725 - DNA, 25 bp, Homo sapien
ttcgtccaaactcgtcaaccgtcgt

SEQ ID NO: 103726 - DNA, 25 bp, Homo sapien
ttcgtccaaactggtcaaccgtcgt

SEQ ID NO: 103727 - DNA, 25 bp, Homo sapien
tctaggtattaggttcacgagagac

SEQ ID NO: 103728 - DNA, 25 bp, Homo sapien
tctaggtattagcttcacgagagac

SEQ ID NO: 103729 - DNA, 25 bp, Homo sapien
cctcgagtaggtgcagttagagatc

SEQ ID NO: 103730 - DNA, 25 bp, Homo sapien
cctcgagtaggtccagttagagatc

SEQ ID NO: 103731 - DNA, 25 bp, Homo sapien
ggtcgagaccgaccagtctctgttc

SEQ ID NO: 103732 - DNA, 25 bp, Homo sapien
ggtcgagaccgagcagtctctgttc

SEQ ID NO: 103733 - DNA, 25 bp, Homo sapien
tagtataccgaaagttttctgttac

SEQ ID NO: 103734 - DNA, 25 bp, Homo sapien
tagtataccgaatgttttctgttac

SEQ ID NO: 103735 - DNA, 25 bp, Homo sapien
tacttccgaaagttgtcactggtac

SEQ ID NO: 103736 - DNA, 25 bp, Homo sapien
tacttccgaaagatgtcactggtac

SEQ ID NO: 103737 - DNA, 25 bp, Homo sapien
gtgtgtggaccctgtatcataagtc

SEQ ID NO: 103738 - DNA, 25 bp, Homo sapien
gtgtgtggacccagtatcataagtc

SEQ ID NO: 103739 - DNA, 25 bp, Homo sapien
atgtgaccacccggtgtcatgacgg

SEQ ID NO: 103740 - DNA, 25 bp, Homo sapien
atgtgaccaccccgtgtcatgacgg

SEQ ID NO: 103741 - DNA, 25 bp, Homo sapien
aaggactatcctccttgatgtactt

SEQ ID NO: 103742 - DNA, 25 bp, Homo sapien
aaggactatcctgcttgatgtactt

SEQ ID NO: 103743 - DNA, 25 bp, Homo sapien
cagaaatatcctcaatcttatactt

SEQ ID NO: 103744 - DNA, 25 bp, Homo sapien
cagaaatatcctgaatcttatactt

SEQ ID NO: 103745 - DNA, 25 bp, Homo sapien
ggtaaatcccaactcctactatatt

SEQ ID NO: 103746 - DNA, 25 bp, Homo sapien
ggtaaatcccaagtcctactatatt

SEQ ID NO: 103747 - DNA, 25 bp, Homo sapien
cacagtttcccaaaaagacacgatg

SEQ ID NO: 103748 - DNA, 25 bp, Homo sapien
cacagtttcccataaagacacgatg

SEQ ID NO: 103749 - DNA, 25 bp, Homo sapien
accagtatcccattttatacaggag

SEQ ID NO: 103750 - DNA, 25 bp, Homo sapien
accagtatcccaatttatacaggag

SEQ ID NO: 103751 - DNA, 25 bp, Homo sapien
tcgaggtcccacagtgacatggcct

SEQ ID NO: 103752 - DNA, 25 bp, Homo sapien
tcgaggtcccactgtgacatggcct

SEQ ID NO: 103753 - DNA, 25 bp, Homo sapien
gtcggagtctccattggtctcaggc

SEQ ID NO: 103754 - DNA, 25 bp, Homo sapien
gtcggagtctcctttggtctcaggc

SEQ ID NO: 103755 - DNA, 25 bp, Homo sapien
tattccatccgacttaggtttgaat

SEQ ID NO: 103756 - DNA, 25 bp, Homo sapien
tattccatccgagttaggtttgaat

SEQ ID NO: 103757 - DNA, 25 bp, Homo sapien
ctattccacgatctttgggttctaa

SEQ ID NO: 103758 - DNA, 25 bp, Homo sapien
ctattccacgatgtttgggttctaa

SEQ ID NO: 103759 - DNA, 25 bp, Homo sapien
ccaagaccttgatcggatctcaagt

SEQ ID NO: 103760 - DNA, 25 bp, Homo sapien
ccaagaccttgaacggatctcaagt

SEQ ID NO: 103761 - DNA, 25 bp, Homo sapien
ccagaacaagtgacacagtttcagt

SEQ ID NO: 103762 - DNA, 25 bp, Homo sapien
ccagaacaagtgtcacagtttcagt

SEQ ID NO: 103763 - DNA, 25 bp, Homo sapien
cgtaaataatgtttcggttctctat

SEQ ID NO: 103764 - DNA, 25 bp, Homo sapien
cgtaaataatgtatcggttctctat

SEQ ID NO: 103765 - DNA, 25 bp, Homo sapien
gataatgttgtttcagtcgtttcat

SEQ ID NO: 103766 - DNA, 25 bp, Homo sapien
gataatgttgttacagtcgtttcat

SEQ ID NO: 103767 - DNA, 25 bp, Homo sapien
cgaaatatttgtgaacactttgtcc

SEQ ID NO: 103768 - DNA, 25 bp, Homo sapien
cgaaatatttgtcaacactttgtcc

SEQ ID NO: 103769 - DNA, 25 bp, Homo sapien
acatgggtatttgaaacttatgcac

SEQ ID NO: 103770 - DNA, 25 bp, Homo sapien
acatgggtatttcaaacttatgcac

SEQ ID NO: 103771 - DNA, 25 bp, Homo sapien
ctagggtaccttctcgaccctgatc

SEQ ID NO: 103772 - DNA, 25 bp, Homo sapien
ctagggtaccttgtcgaccctgatc

SEQ ID NO: 103773 - DNA, 25 bp, Homo sapien
aaggaacccctgaccccttgagtac

SEQ ID NO: 103774 - DNA, 25 bp, Homo sapien
aaggaacccctgtccccttgagtac

SEQ ID NO: 103775 - DNA, 25 bp, Homo sapien
gcccttctagtttcaactactgctg

SEQ ID NO: 103776 - DNA, 25 bp, Homo sapien
gcccttctagttacaactactgctg

SEQ ID NO: 103777 - DNA, 25 bp, Homo sapien
aacctgtcttattagaagtccgttg

SEQ ID NO: 103778 - DNA, 25 bp, Homo sapien
aacctgtcttataagaagtccgttg

SEQ ID NO: 103779 - DNA, 25 bp, Homo sapien
caattccacttactaggttcgactg

SEQ ID NO: 103780 - DNA, 25 bp, Homo sapien
caattccacttagtaggttcgactg

SEQ ID NO: 103781 - DNA, 25 bp, Homo sapien
cttcggtctcggaagagacggtcaa

SEQ ID NO: 103782 - DNA, 25 bp, Homo sapien
cttcggtctcggtagagacggtcaa

SEQ ID NO: 103783 - DNA, 25 bp, Homo sapien
acaggggagattgaggtacctgtct

SEQ ID NO: 103784 - DNA, 25 bp, Homo sapien
acaggggagattcaggtacctgtct

SEQ ID NO: 103785 - DNA, 25 bp, Homo sapien
cgacaggggtattcacaggtccgga

SEQ ID NO: 103786 - DNA, 25 bp, Homo sapien
cgacaggggtatacacaggtccgga

SEQ ID NO: 103787 - DNA, 25 bp, Homo sapien
gagagaagggaacatactctgctag

SEQ ID NO: 103788 - DNA, 25 bp, Homo sapien
gagagaagggaagatactctgctag

SEQ ID NO: 103789 - DNA, 25 bp, Homo sapien
ggacaagggataggttctgatacag

SEQ ID NO: 103790 - DNA, 25 bp, Homo sapien
ggacaagggatacgttctgatacag

SEQ ID NO: 103791 - DNA, 25 bp, Homo sapien
atggacagccggtggttccatcacg

SEQ ID NO: 103792 - DNA, 25 bp, Homo sapien
atggacagccggaggttccatcacg

SEQ ID NO: 103793 - DNA, 25 bp, Homo sapien
gttgaacccccgaaggactcttaca

SEQ ID NO: 103794 - DNA, 25 bp, Homo sapien
gttgaacccccgtaggactcttaca

SEQ ID NO: 103795 - DNA, 25 bp, Homo sapien
gaagattccaggtcagagactgtca

SEQ ID NO: 103796 - DNA, 25 bp, Homo sapien
gaagattccaggacagagactgtca

SEQ ID NO: 103797 - DNA, 25 bp, Homo sapien
aacaacccctaggtgaggtgcttca

SEQ ID NO: 103798 - DNA, 25 bp, Homo sapien
aacaacccctagctgaggtgcttca

SEQ ID NO: 103799 - DNA, 25 bp, Homo sapien
ccggactccgtgtcaggtgtgcctc

SEQ ID NO: 103800 - DNA, 25 bp, Homo sapien
ccggactccgtgacaggtgtgcctc

SEQ ID NO: 103801 - DNA, 25 bp, Homo sapien
gaaggaccaccgagagagagttcca

SEQ ID NO: 103802 - DNA, 25 bp, Homo sapien
gaaggaccaccgtgagagagttcca

SEQ ID NO: 103803 - DNA, 25 bp, Homo sapien
cgcagaagcccgcggcggcgaagac

SEQ ID NO: 103804 - DNA, 25 bp, Homo sapien
cgcagaagcccggggcggcgaagac

SEQ ID NO: 103805 - DNA, 25 bp, Homo sapien
ccctcaattctgtgtgctccaaacg

SEQ ID NO: 103806 - DNA, 25 bp, Homo sapien
ccctcaattctgagtgctccaaacg

SEQ ID NO: 103807 - DNA, 25 bp, Homo sapien
cagtaagtcgtcttattcctctgaa

SEQ ID NO: 103808 - DNA, 25 bp, Homo sapien
cagtaagtcgtcatattcctctgaa

SEQ ID NO: 103809 - DNA, 25 bp, Homo sapien
gaagtgtcgcagacactaccatagt

SEQ ID NO: 103810 - DNA, 25 bp, Homo sapien
gaagtgtcgcagtcactaccatagt

SEQ ID NO: 103811 - DNA, 25 bp, Homo sapien
gtcgtccagttagttacgactacgt

SEQ ID NO: 103812 - DNA, 25 bp, Homo sapien
gtcgtccagttacttacgactacgt

SEQ ID NO: 103813 - DNA, 25 bp, Homo sapien
aacgtcgactacaggagatccgacc

SEQ ID NO: 103814 - DNA, 25 bp, Homo sapien
aacgtcgactactggagatccgacc

SEQ ID NO: 103815 - DNA, 25 bp, Homo sapien
agaagctgcgtctggagccgtgtcc

SEQ ID NO: 103816 - DNA, 25 bp, Homo sapien
agaagctgcgtcaggagccgtgtcc

SEQ ID NO: 103817 - DNA, 25 bp, Homo sapien
gtcgtcgttaagagtcagtacgttt

SEQ ID NO: 103818 - DNA, 25 bp, Homo sapien
gtcgtcgttaagtgtcagtacgttt

SEQ ID NO: 103819 - DNA, 25 bp, Homo sapien
ccgaagaccgtgtattttacacatt

SEQ ID NO: 103820 - DNA, 25 bp, Homo sapien
ccgaagaccgtgaattttacacatt

SEQ ID NO: 103821 - DNA, 25 bp, Homo sapien
cggtagcgcccgtcgggacagacct

SEQ ID NO: 103822 - DNA, 25 bp, Homo sapien
cggtagcgcccgacgggacagacct

SEQ ID NO: 103823 - DNA, 25 bp, Homo sapien
agtcggaccgctaggcacagtagag

SEQ ID NO: 103824 - DNA, 25 bp, Homo sapien
agtcggaccgcttggcacagtagag

SEQ ID NO: 103825 - DNA, 25 bp, Homo sapien
aagagacccgtgtccagagacgtcg

SEQ ID NO: 103826 - DNA, 25 bp, Homo sapien
aagagacccgtgaccagagacgtcg

SEQ ID NO: 103827 - DNA, 25 bp, Homo sapien
ccgtaggaaagcagcccgacactcg

SEQ ID NO: 103828 - DNA, 25 bp, Homo sapien
ccgtaggaaagctgcccgacactcg

SEQ ID NO: 103829 - DNA, 25 bp, Homo sapien
gaaggtgacggtacgacggtaatac

SEQ ID NO: 103830 - DNA, 25 bp, Homo sapien
gaaggtgacggttcgacggtaatac

SEQ ID NO: 103831 - DNA, 25 bp, Homo sapien
cccgcgctcaactatcgaccgacca

SEQ ID NO: 103832 - DNA, 25 bp, Homo sapien
cccgcgctcaacaatcgaccgacca

SEQ ID NO: 103833 - DNA, 25 bp, Homo sapien
cagagaccacatcgactactaggct

SEQ ID NO: 103834 - DNA, 25 bp, Homo sapien
cagagaccacatggactactaggct

SEQ ID NO: 103835 - DNA, 25 bp, Homo sapien
tcggtggagaaccttcaccctcagg

SEQ ID NO: 103836 - DNA, 25 bp, Homo sapien
tcggtggagaacgttcaccctcagg

SEQ ID NO: 103837 - DNA, 25 bp, Homo sapien
cagaggaggcccagagtcccaccgg

SEQ ID NO: 103838 - DNA, 25 bp, Homo sapien
cagaggaggccctgagtcccaccgg

SEQ ID NO: 103839 - DNA, 25 bp, Homo sapien
gagagaccctgacctcgactgacgc

SEQ ID NO: 103840 - DNA, 25 bp, Homo sapien
gagagaccctgagctcgactgacgc

SEQ ID NO: 103841 - DNA, 25 bp, Homo sapien
gaggagacctgtctacgacggagac

SEQ ID NO: 103842 - DNA, 25 bp, Homo sapien
gaggagacctgtgtacgacggagac

SEQ ID NO: 103843 - DNA, 25 bp, Homo sapien
ggagggtacgcttgtctcgacccga

SEQ ID NO: 103844 - DNA, 25 bp, Homo sapien
ggagggtacgctagtctcgacccga

SEQ ID NO: 103845 - DNA, 25 bp, Homo sapien
aagtgtggcccgactacagccggcg

SEQ ID NO: 103846 - DNA, 25 bp, Homo sapien
aagtgtggcccgtctacagccggcg

SEQ ID NO: 103847 - DNA, 25 bp, Homo sapien
gcgaggtccaggtccaccgacggct

SEQ ID NO: 103848 - DNA, 25 bp, Homo sapien
gcgaggtccaggaccaccgacggct

SEQ ID NO: 103849 - DNA, 25 bp, Homo sapien
aggtccgtacagacacgacccgagc

SEQ ID NO: 103850 - DNA, 25 bp, Homo sapien
aggtccgtacagtcacgacccgagc

SEQ ID NO: 103851 - DNA, 25 bp, Homo sapien
ttggactcatcttaagtcgaaccga

SEQ ID NO: 103852 - DNA, 25 bp, Homo sapien
ttggactcatctaaagtcgaaccga

SEQ ID NO: 103853 - DNA, 25 bp, Homo sapien
agtagaatcgaaataactcattccg

SEQ ID NO: 103854 - DNA, 25 bp, Homo sapien
agtagaatcgaattaactcattccg

SEQ ID NO: 103855 - DNA, 25 bp, Homo sapien
tagagattcagtttaaccagtttcg

SEQ ID NO: 103856 - DNA, 25 bp, Homo sapien
tagagattcagtataaccagtttcg

SEQ ID NO: 103857 - DNA, 25 bp, Homo sapien
ggatatgctgttacctcaccttttc

SEQ ID NO: 103858 - DNA, 25 bp, Homo sapien
ggatatgctgtttcctcaccttttc

SEQ ID NO: 103859 - DNA, 25 bp, Homo sapien
gttataaatgagtgtccaagttccg

SEQ ID NO: 103860 - DNA, 25 bp, Homo sapien
gttataaatgagagtccaagttccg

SEQ ID NO: 103861 - DNA, 25 bp, Homo sapien
taagaactgtctcgacttatgtcac

SEQ ID NO: 103862 - DNA, 25 bp, Homo sapien
taagaactgtctggacttatgtcac

SEQ ID NO: 103863 - DNA, 25 bp, Homo sapien
ttaagataccgtttactttctgttg

SEQ ID NO: 103864 - DNA, 25 bp, Homo sapien
ttaagataccgtatactttctgttg

SEQ ID NO: 103865 - DNA, 25 bp, Homo sapien
tcgtaagtgtcgtcaactgtttccc

SEQ ID NO: 103866 - DNA, 25 bp, Homo sapien
tcgtaagtgtcgacaactgtttccc

SEQ ID NO: 103867 - DNA, 25 bp, Homo sapien
gcccgtctccgagacgacggtccaa

SEQ ID NO: 103868 - DNA, 25 bp, Homo sapien
gcccgtctccgacacgacggtccaa

SEQ ID NO: 103869 - DNA, 25 bp, Homo sapien
cccacgttccagtgtctagagaaag

SEQ ID NO: 103870 - DNA, 25 bp, Homo sapien
cccacgttccagagtctagagaaag

SEQ ID NO: 103871 - DNA, 25 bp, Homo sapien
cctcacacctgtaaccctagagaga

SEQ ID NO: 103872 - DNA, 25 bp, Homo sapien
cctcacacctgttaccctagagaga

SEQ ID NO: 103873 - DNA, 25 bp, Homo sapien
cgtcggaggtcaaccgactagagga

SEQ ID NO: 103874 - DNA, 25 bp, Homo sapien
cgtcggaggtcatccgactagagga

SEQ ID NO: 103875 - DNA, 25 bp, Homo sapien
ccaaggtacgagtaatttctggtaa

SEQ ID NO: 103876 - DNA, 25 bp, Homo sapien
ccaaggtacgagaaatttctggtaa

SEQ ID NO: 103877 - DNA, 25 bp, Homo sapien
cgtggtgtcatgtcccgcggctcag

SEQ ID NO: 103878 - DNA, 25 bp, Homo sapien
cgtggtgtcatgacccgcggctcag

SEQ ID NO: 103879 - DNA, 25 bp, Homo sapien
ccagtgtcagtgacccgtcctcatt

SEQ ID NO: 103880 - DNA, 25 bp, Homo sapien
ccagtgtcagtgtcccgtcctcatt

SEQ ID NO: 103881 - DNA, 25 bp, Homo sapien
tcgttgtctcggttccactccagga

SEQ ID NO: 103882 - DNA, 25 bp, Homo sapien
tcgttgtctcggatccactccagga

SEQ ID NO: 103883 - DNA, 25 bp, Homo sapien
acttagtctccttacgagccccgga

SEQ ID NO: 103884 - DNA, 25 bp, Homo sapien
acttagtctcctaacgagccccgga

SEQ ID NO: 103885 - DNA, 25 bp, Homo sapien
tttctcctaccgataccgtgtggta

SEQ ID NO: 103886 - DNA, 25 bp, Homo sapien
tttctcctaccgttaccgtgtggta

SEQ ID NO: 103887 - DNA, 25 bp, Homo sapien
attgtctccgttttgactcgtggta

SEQ ID NO: 103888 - DNA, 25 bp, Homo sapien
attgtctccgttatgactcgtggta

SEQ ID NO: 103889 - DNA, 25 bp, Homo sapien
tggtttctcctgtctagggagagtt

SEQ ID NO: 103890 - DNA, 25 bp, Homo sapien
tggtttctcctgactagggagagtt

SEQ ID NO: 103891 - DNA, 25 bp, Homo sapien
tatttgtcccttcacttgtgaagtc

SEQ ID NO: 103892 - DNA, 25 bp, Homo sapien
tatttgtcccttgacttgtgaagtc

SEQ ID NO: 103893 - DNA, 25 bp, Homo sapien
gaggggttcgtttcactgtgtcagc

SEQ ID NO: 103894 - DNA, 25 bp, Homo sapien
gaggggttcgttacactgtgtcagc

SEQ ID NO: 103895 - DNA, 25 bp, Homo sapien
ggtgtttgtttacacagtcacgtct

SEQ ID NO: 103896 - DNA, 25 bp, Homo sapien
ggtgtttgtttagacagtcacgtct

SEQ ID NO: 103897 - DNA, 25 bp, Homo sapien
ccaacgaaagttagccagacctacg

SEQ ID NO: 103898 - DNA, 25 bp, Homo sapien
ccaacgaaagtttgccagacctacg

SEQ ID NO: 103899 - DNA, 25 bp, Homo sapien
cccacaaagtcagacaccgaactag

SEQ ID NO: 103900 - DNA, 25 bp, Homo sapien
cccacaaagtcacacaccgaactag

SEQ ID NO: 103901 - DNA, 25 bp, Homo sapien
gtcacaaccgtctcaaagactacga

SEQ ID NO: 103902 - DNA, 25 bp, Homo sapien
gtcacaaccgtcacaaagactacga

SEQ ID NO: 103903 - DNA, 25 bp, Homo sapien
gaccgaaattctacagaaactagac

SEQ ID NO: 103904 - DNA, 25 bp, Homo sapien
gaccgaaattcttcagaaactagac

SEQ ID NO: 103905 - DNA, 25 bp, Homo sapien
gaaatagtactctaaacgactttag

SEQ ID NO: 103906 - DNA, 25 bp, Homo sapien
gaaatagtactcaaaacgactttag

SEQ ID NO: 103907 - DNA, 25 bp, Homo sapien
cagtgttgacctaaatcaccttcgt

SEQ ID NO: 103908 - DNA, 25 bp, Homo sapien
cagtgttgaccttaatcaccttcgt

SEQ ID NO: 103909 - DNA, 25 bp, Homo sapien
ccaggaagaccgaaaggacctactc

SEQ ID NO: 103910 - DNA, 25 bp, Homo sapien
ccaggaagaccgtaaggacctactc

SEQ ID NO: 103911 - DNA, 25 bp, Homo sapien
tccctggtgacagtgcgtctctcca

SEQ ID NO: 103912 - DNA, 25 bp, Homo sapien
tccctggtgacactgcgtctctcca

SEQ ID NO: 103913 - DNA, 25 bp, Homo sapien
cctacgtttactgaaggcctagaag

SEQ ID NO: 103914 - DNA, 25 bp, Homo sapien
cctacgtttactcaaggcctagaag

SEQ ID NO: 103915 - DNA, 25 bp, Homo sapien
tagaagtagggtccaggtccggaca

SEQ ID NO: 103916 - DNA, 25 bp, Homo sapien
tagaagtagggtgcaggtccggaca

SEQ ID NO: 103917 - DNA, 25 bp, Homo sapien
tagacggagcttcgagagccagtaa

SEQ ID NO: 103918 - DNA, 25 bp, Homo sapien
tagacggagcttggagagccagtaa

SEQ ID NO: 103919 - DNA, 25 bp, Homo sapien
tgtagaccaacgtccgaaaagaaac

SEQ ID NO: 103920 - DNA, 25 bp, Homo sapien
tgtagaccaacgaccgaaaagaaac

SEQ ID NO: 103921 - DNA, 25 bp, Homo sapien
tgtttaaatgaattctcagaattat

SEQ ID NO: 103922 - DNA, 25 bp, Homo sapien
tgtttaaatgaaatctcagaattat

SEQ ID NO: 103923 - DNA, 25 bp, Homo sapien
gtttctccggaaagataccaacata

SEQ ID NO: 103924 - DNA, 25 bp, Homo sapien
gtttctccggaatgataccaacata

SEQ ID NO: 103925 - DNA, 25 bp, Homo sapien
gtttagagagattacggaacaaatt

SEQ ID NO: 103926 - DNA, 25 bp, Homo sapien
gtttagagagataacggaacaaatt

SEQ ID NO: 103927 - DNA, 25 bp, Homo sapien
agagtaccttcgatacccatagtgt

SEQ ID NO: 103928 - DNA, 25 bp, Homo sapien
agagtaccttcgttacccatagtgt

SEQ ID NO: 103929 - DNA, 25 bp, Homo sapien
acattcttagtaccaccgagatatg

SEQ ID NO: 103930 - DNA, 25 bp, Homo sapien
acattcttagtagcaccgagatatg

SEQ ID NO: 103931 - DNA, 25 bp, Homo sapien
tactcattgtgtgaccgtcgacttc

SEQ ID NO: 103932 - DNA, 25 bp, Homo sapien
tactcattgtgtcaccgtcgacttc

SEQ ID NO: 103933 - DNA, 25 bp, Homo sapien
tactaattcgtgaatgtcctacact

SEQ ID NO: 103934 - DNA, 25 bp, Homo sapien
tactaattcgtgtatgtcctacact

SEQ ID NO: 103935 - DNA, 25 bp, Homo sapien
agactataactggacagatattacc

SEQ ID NO: 103936 - DNA, 25 bp, Homo sapien
agactataactgcacagatattacc

SEQ ID NO: 103937 - DNA, 25 bp, Homo sapien
acgataagatgtcgtcggtacagga

SEQ ID NO: 103938 - DNA, 25 bp, Homo sapien
acgataagatgtggtcggtacagga

SEQ ID NO: 103939 - DNA, 25 bp, Homo sapien
cgaagtcagactgtgtcggtccgcc

SEQ ID NO: 103940 - DNA, 25 bp, Homo sapien
cgaagtcagactctgtcggtccgcc

SEQ ID NO: 103941 - DNA, 25 bp, Homo sapien
gaacgtcagcttcatcggccgtgtc

SEQ ID NO: 103942 - DNA, 25 bp, Homo sapien
gaacgtcagcttgatcggccgtgtc

SEQ ID NO: 103943 - DNA, 25 bp, Homo sapien
acattacgtgttttcgtaacggtgc

SEQ ID NO: 103944 - DNA, 25 bp, Homo sapien
acattacgtgttatcgtaacggtgc

SEQ ID NO: 103945 - DNA, 25 bp, Homo sapien
agaacgtaagagaaccgagggttct

SEQ ID NO: 103946 - DNA, 25 bp, Homo sapien
agaacgtaagagtaccgagggttct

SEQ ID NO: 103947 - DNA, 25 bp, Homo sapien
cgtacacagtggtacgggtgattat

SEQ ID NO: 103948 - DNA, 25 bp, Homo sapien
cgtacacagtggaacgggtgattat

SEQ ID NO: 103949 - DNA, 25 bp, Homo sapien
gttagaacgcgacgaggcattagag

SEQ ID NO: 103950 - DNA, 25 bp, Homo sapien
gttagaacgcgaggaggcattagag

SEQ ID NO: 103951 - DNA, 25 bp, Homo sapien
gttgtctaaagtccaatttcaagac

SEQ ID NO: 103952 - DNA, 25 bp, Homo sapien
gttgtctaaagtgcaatttcaagac

SEQ ID NO: 103953 - DNA, 25 bp, Homo sapien
gtgtcacgagggtgatgaccaagac

SEQ ID NO: 103954 - DNA, 25 bp, Homo sapien
gtgtcacgagggagatgaccaagac

SEQ ID NO: 103955 - DNA, 25 bp, Homo sapien
cgtcgcggagcgtcttcaggaacga

SEQ ID NO: 103956 - DNA, 25 bp, Homo sapien
cgtcgcggagcgacttcaggaacga

SEQ ID NO: 103957 - DNA, 25 bp, Homo sapien
ccgaaggcctactttataagtagac

SEQ ID NO: 103958 - DNA, 25 bp, Homo sapien
ccgaaggcctacattataagtagac

SEQ ID NO: 103959 - DNA, 25 bp, Homo sapien
cctccgtcgtctacttacgaaagga

SEQ ID NO: 103960 - DNA, 25 bp, Homo sapien
cctccgtcgtcttcttacgaaagga

SEQ ID NO: 103961 - DNA, 25 bp, Homo sapien
ctgagtcgacgtcagcgaccaggga

SEQ ID NO: 103962 - DNA, 25 bp, Homo sapien
ctgagtcgacgtgagcgaccaggga

SEQ ID NO: 103963 - DNA, 25 bp, Homo sapien
cttgctgagtctagggcctgacagg

SEQ ID NO: 103964 - DNA, 25 bp, Homo sapien
cttgctgagtcttgggcctgacagg

SEQ ID NO: 103965 - DNA, 25 bp, Homo sapien
ttggtcagtggtgattccactcagg

SEQ ID NO: 103966 - DNA, 25 bp, Homo sapien
ttggtcagtggtcattccactcagg

SEQ ID NO: 103967 - DNA, 25 bp, Homo sapien
ctttcaggttacagttttacattgt

SEQ ID NO: 103968 - DNA, 25 bp, Homo sapien
ctttcaggttactgttttacattgt

SEQ ID NO: 103969 - DNA, 25 bp, Homo sapien
aaggtcggagttgttcttcgatctc

SEQ ID NO: 103970 - DNA, 25 bp, Homo sapien
aaggtcggagttcttcttcgatctc

SEQ ID NO: 103971 - DNA, 25 bp, Homo sapien
gtgtaacccctcttgttgatttaaa

SEQ ID NO: 103972 - DNA, 25 bp, Homo sapien
gtgtaacccctcatgttgatttaaa

SEQ ID NO: 103973 - DNA, 25 bp, Homo sapien
cccttaaggtgttaccctcagttac

SEQ ID NO: 103974 - DNA, 25 bp, Homo sapien
cccttaaggtgtaaccctcagttac

SEQ ID NO: 103975 - DNA, 25 bp, Homo sapien
ccttgtaggtgagcacccgagacta

SEQ ID NO: 103976 - DNA, 25 bp, Homo sapien
ccttgtaggtgaccacccgagacta

SEQ ID NO: 103977 - DNA, 25 bp, Homo sapien
acagctactttgtcacacggagata

SEQ ID NO: 103978 - DNA, 25 bp, Homo sapien
acagctactttgacacacggagata

SEQ ID NO: 103979 - DNA, 25 bp, Homo sapien
gaaacgtattaggtcccttagtatt

SEQ ID NO: 103980 - DNA, 25 bp, Homo sapien
gaaacgtattagctcccttagtatt

SEQ ID NO: 103981 - DNA, 25 bp, Homo sapien
tgaactgtataaacggtaccctttc

SEQ ID NO: 103982 - DNA, 25 bp, Homo sapien
tgaactgtataatcggtaccctttc

SEQ ID NO: 103983 - DNA, 25 bp, Homo sapien
ggtgtctactcgtgctatttttacg

SEQ ID NO: 103984 - DNA, 25 bp, Homo sapien
ggtgtctactcgagctatttttacg

SEQ ID NO: 103985 - DNA, 25 bp, Homo sapien
tcgtgtcccgtcgttcattgagtcg

SEQ ID NO: 103986 - DNA, 25 bp, Homo sapien
tcgtgtcccgtccttcattgagtcg

SEQ ID NO: 103987 - DNA, 25 bp, Homo sapien
gtgtcactaccctagtctcagtttc

SEQ ID NO: 103988 - DNA, 25 bp, Homo sapien
gtgtcactacccaagtctcagtttc

SEQ ID NO: 103989 - DNA, 25 bp, Homo sapien
ggtccgtgggacacgacccgtgtcc

SEQ ID NO: 103990 - DNA, 25 bp, Homo sapien
ggtccgtgggactcgacccgtgtcc

SEQ ID NO: 103991 - DNA, 25 bp, Homo sapien
gttccggtagagtttaggacttctc

SEQ ID NO: 103992 - DNA, 25 bp, Homo sapien
gttccggtagagattaggacttctc

SEQ ID NO: 103993 - DNA, 25 bp, Homo sapien
gtagttcaaccgaatcaagaacctc

SEQ ID NO: 103994 - DNA, 25 bp, Homo sapien
gtagttcaaccgtatcaagaacctc

SEQ ID NO: 103995 - DNA, 25 bp, Homo sapien
catatgtcaccttttgagaagttac

SEQ ID NO: 103996 - DNA, 25 bp, Homo sapien
catatgtcacctattgagaagttac

SEQ ID NO: 103997 - DNA, 25 bp, Homo sapien
attgtccggactgacgtaacaagtg

SEQ ID NO: 103998 - DNA, 25 bp, Homo sapien
attgtccggactcacgtaacaagtg

SEQ ID NO: 103999 - DNA, 25 bp, Homo sapien
ttttctggacttcaacgtatagtcg

SEQ ID NO: 104000 - DNA, 25 bp, Homo sapien
ttttctggacttgaacgtatagtcg

SEQ ID NO: 104001 - DNA, 25 bp, Homo sapien
acttggacccctctacagtgacggt

SEQ ID NO: 104002 - DNA, 25 bp, Homo sapien
acttggacccctgtacagtgacggt

SEQ ID NO: 104003 - DNA, 25 bp, Homo sapien
agtactttaccgacattatagaatg

SEQ ID NO: 104004 - DNA, 25 bp, Homo sapien
agtactttaccgtcattatagaatg

SEQ ID NO: 104005 - DNA, 25 bp, Homo sapien
gttgaattttcgattgttattaata

SEQ ID NO: 104006 - DNA, 25 bp, Homo sapien
gttgaattttcgtttgttattaata

SEQ ID NO: 104007 - DNA, 25 bp, Homo sapien
atgtcttatgtagtctttttgtttt

SEQ ID NO: 104008 - DNA, 25 bp, Homo sapien
atgtcttatgtactctttttgtttt

SEQ ID NO: 104009 - DNA, 25 bp, Homo sapien
tttaatgtatatgttattttgtttt

SEQ ID NO: 104010 - DNA, 25 bp, Homo sapien
tttaatgtatatcttattttgtttt

SEQ ID NO: 104011 - DNA, 25 bp, Homo sapien
ttaggaagttactatcatttctctg

SEQ ID NO: 104012 - DNA, 25 bp, Homo sapien
ttaggaagttacaatcatttctctg

SEQ ID NO: 104013 - DNA, 25 bp, Homo sapien
ttaagaattccgtaagtctcttgag

SEQ ID NO: 104014 - DNA, 25 bp, Homo sapien
ttaagaattccgaaagtctcttgag

SEQ ID NO: 104015 - DNA, 25 bp, Homo sapien
aagggttactactaccgtcccggct

SEQ ID NO: 104016 - DNA, 25 bp, Homo sapien
aagggttactacaaccgtcccggct

SEQ ID NO: 104017 - DNA, 25 bp, Homo sapien
ggcgtgagcgaccagaagagcccaa

SEQ ID NO: 104018 - DNA, 25 bp, Homo sapien
ggcgtgagcgacgagaagagcccaa

SEQ ID NO: 104019 - DNA, 25 bp, Homo sapien
cgtgatccctcagaggaccgacgag

SEQ ID NO: 104020 - DNA, 25 bp, Homo sapien
cgtgatccctcacaggaccgacgag

SEQ ID NO: 104021 - DNA, 25 bp, Homo sapien
aggccggtccggatcaaggacccag

SEQ ID NO: 104022 - DNA, 25 bp, Homo sapien
aggccggtccggttcaaggacccag

SEQ ID NO: 104023 - DNA, 25 bp, Homo sapien
agttacggtacatgagaggaccctc

SEQ ID NO: 104024 - DNA, 25 bp, Homo sapien
agttacggtacaagagaggaccctc

SEQ ID NO: 104025 - DNA, 25 bp, Homo sapien
tcatcaggtcgaaagggactcgcgg

SEQ ID NO: 104026 - DNA, 25 bp, Homo sapien
tcatcaggtcgatagggactcgcgg

SEQ ID NO: 104027 - DNA, 25 bp, Homo sapien
tccaagacttactatgaacccgagt

SEQ ID NO: 104028 - DNA, 25 bp, Homo sapien
tccaagacttacaatgaacccgagt

SEQ ID NO: 104029 - DNA, 25 bp, Homo sapien
ccaacctctgagatggtacacaagt

SEQ ID NO: 104030 - DNA, 25 bp, Homo sapien
ccaacctctgagttggtacacaagt

SEQ ID NO: 104031 - DNA, 25 bp, Homo sapien
ccaacaatttcacctagtgacaagg

SEQ ID NO: 104032 - DNA, 25 bp, Homo sapien
ccaacaatttcagctagtgacaagg

SEQ ID NO: 104033 - DNA, 25 bp, Homo sapien
tggtccttctttctacgtaggagaa

SEQ ID NO: 104034 - DNA, 25 bp, Homo sapien
tggtccttctttgtacgtaggagaa

SEQ ID NO: 104035 - DNA, 25 bp, Homo sapien
ggtaacagcgctttgtggtcggaaa

SEQ ID NO: 104036 - DNA, 25 bp, Homo sapien
ggtaacagcgctatgtggtcggaaa

SEQ ID NO: 104037 - DNA, 25 bp, Homo sapien
ccgcgagtattaatggagacctttg

SEQ ID NO: 104038 - DNA, 25 bp, Homo sapien
ccgcgagtattattggagacctttg

SEQ ID NO: 104039 - DNA, 25 bp, Homo sapien
gcggttagaataaggacctgttact

SEQ ID NO: 104040 - DNA, 25 bp, Homo sapien
gcggttagaatatggacctgttact

SEQ ID NO: 104041 - DNA, 25 bp, Homo sapien
cacaggaaagactaaggacttcatc

SEQ ID NO: 104042 - DNA, 25 bp, Homo sapien
cacaggaaagacaaaggacttcatc

SEQ ID NO: 104043 - DNA, 25 bp, Homo sapien
agttcaagacgaggaggttgtcccg

SEQ ID NO: 104044 - DNA, 25 bp, Homo sapien
agttcaagacgacgaggttgtcccg

SEQ ID NO: 104045 - DNA, 25 bp, Homo sapien
atattcgaacaggaaacagtttcca

SEQ ID NO: 104046 - DNA, 25 bp, Homo sapien
atattcgaacagcaaacagtttcca

SEQ ID NO: 104047 - DNA, 25 bp, Homo sapien
aataaacatgaaacagtcacggcta

SEQ ID NO: 104048 - DNA, 25 bp, Homo sapien
aataaacatgaatcagtcacggcta

SEQ ID NO: 104049 - DNA, 25 bp, Homo sapien
gaggtaaagaatatcgaaccggaac

SEQ ID NO: 104050 - DNA, 25 bp, Homo sapien
gaggtaaagaatttcgaaccggaac

SEQ ID NO: 104051 - DNA, 25 bp, Homo sapien
acggaaagacaagtgacatcggacc

SEQ ID NO: 104052 - DNA, 25 bp, Homo sapien
acggaaagacaactgacatcggacc

SEQ ID NO: 104053 - DNA, 25 bp, Homo sapien
ggaacggtacaaaggtagtttcatc

SEQ ID NO: 104054 - DNA, 25 bp, Homo sapien
ggaacggtacaatggtagtttcatc

SEQ ID NO: 104055 - DNA, 25 bp, Homo sapien
cgataccaaactggtgtcgtaattc

SEQ ID NO: 104056 - DNA, 25 bp, Homo sapien
cgataccaaactcgtgtcgtaattc

SEQ ID NO: 104057 - DNA, 25 bp, Homo sapien
ctactacttatcgtcgtcgtgttgg

SEQ ID NO: 104058 - DNA, 25 bp, Homo sapien
ctactacttatcctcgtcgtgttgg

SEQ ID NO: 104059 - DNA, 25 bp, Homo sapien
ctcatatgttcttgtctctcgtgtg

SEQ ID NO: 104060 - DNA, 25 bp, Homo sapien
ctcatatgttctagtctctcgtgtg

SEQ ID NO: 104061 - DNA, 25 bp, Homo sapien
gttgtcacttctcgtggtctctggg

SEQ ID NO: 104062 - DNA, 25 bp, Homo sapien
gttgtcacttctggtggtctctggg

SEQ ID NO: 104063 - DNA, 25 bp, Homo sapien
ctcttttgttaggttcttagtgacg

SEQ ID NO: 104064 - DNA, 25 bp, Homo sapien
ctcttttgttagcttcttagtgacg

SEQ ID NO: 104065 - DNA, 25 bp, Homo sapien
ccggcgtcgttgacattgtcgacgt

SEQ ID NO: 104066 - DNA, 25 bp, Homo sapien
ccggcgtcgttgtcattgtcgacgt

SEQ ID NO: 104067 - DNA, 25 bp, Homo sapien
tcgatctacccgtacataccgtcga

SEQ ID NO: 104068 - DNA, 25 bp, Homo sapien
tcgatctacccgaacataccgtcga

SEQ ID NO: 104069 - DNA, 25 bp, Homo sapien
gggggtttatatcgtcctccggacc

SEQ ID NO: 104070 - DNA, 25 bp, Homo sapien
gggggtttatatggtcctccggacc

SEQ ID NO: 104071 - DNA, 25 bp, Homo sapien
cgggtatcttttacgggtgtccgtt

SEQ ID NO: 104072 - DNA, 25 bp, Homo sapien
cgggtatctttttcgggtgtccgtt

SEQ ID NO: 104073 - DNA, 25 bp, Homo sapien
ggcggatttctttgtctgaggtccc

SEQ ID NO: 104074 - DNA, 25 bp, Homo sapien
ggcggatttcttagtctgaggtccc

SEQ ID NO: 104075 - DNA, 25 bp, Homo sapien
gaaaatcatagaaagacatcgttct

SEQ ID NO: 104076 - DNA, 25 bp, Homo sapien
gaaaatcatagatagacatcgttct

SEQ ID NO: 104077 - DNA, 25 bp, Homo sapien
gtgataaacaccagattgcaattct

SEQ ID NO: 104078 - DNA, 25 bp, Homo sapien
gtgataaacacctgattgcaattct

SEQ ID NO: 104079 - DNA, 25 bp, Homo sapien
gtaaacaacatggacccctgagaga

SEQ ID NO: 104080 - DNA, 25 bp, Homo sapien
gtaaacaacatgcacccctgagaga

SEQ ID NO: 104081 - DNA, 25 bp, Homo sapien
acaggtcgtgaacctccaggtcgag

SEQ ID NO: 104082 - DNA, 25 bp, Homo sapien
acaggtcgtgaagctccaggtcgag

SEQ ID NO: 104083 - DNA, 25 bp, Homo sapien
cagaagggcgtgacacagaagcgat

SEQ ID NO: 104084 - DNA, 25 bp, Homo sapien
cagaagggcgtgtcacagaagcgat

SEQ ID NO: 104085 - DNA, 25 bp, Homo sapien
aaccaaaggggatgccaccgtcagt

SEQ ID NO: 104086 - DNA, 25 bp, Homo sapien
aaccaaaggggaagccaccgtcagt

SEQ ID NO: 104087 - DNA, 25 bp, Homo sapien
ttgtcagtcggtaagaaaaccgatt

SEQ ID NO: 104088 - DNA, 25 bp, Homo sapien
ttgtcagtcggttagaaaaccgatt

SEQ ID NO: 104089 - DNA, 25 bp, Homo sapien
tgctccctcgggaagaagtccgaca

SEQ ID NO: 104090 - DNA, 25 bp, Homo sapien
tgctccctcgggtagaagtccgaca

SEQ ID NO: 104091 - DNA, 25 bp, Homo sapien
tggtctacgatcatagcatgtgata

SEQ ID NO: 104092 - DNA, 25 bp, Homo sapien
tggtctacgatcttagcatgtgata

SEQ ID NO: 104093 - DNA, 25 bp, Homo sapien
ttcggactgtgacactcgaagtgga

SEQ ID NO: 104094 - DNA, 25 bp, Homo sapien
ttcggactgtgagactcgaagtgga

SEQ ID NO: 104095 - DNA, 25 bp, Homo sapien
agaggcccgagccctcatcgtagga

SEQ ID NO: 104096 - DNA, 25 bp, Homo sapien
agaggcccgagcgctcatcgtagga

SEQ ID NO: 104097 - DNA, 25 bp, Homo sapien
gacgtaccacaagtccaacatcgac

SEQ ID NO: 104098 - DNA, 25 bp, Homo sapien
gacgtaccacaactccaacatcgac

SEQ ID NO: 104099 - DNA, 25 bp, Homo sapien
gagtgtaccgacaattcttcggtgg

SEQ ID NO: 104100 - DNA, 25 bp, Homo sapien
gagtgtaccgactattcttcggtgg

SEQ ID NO: 104101 - DNA, 25 bp, Homo sapien
tacgatgacccctttatcgggtccg

SEQ ID NO: 104102 - DNA, 25 bp, Homo sapien
tacgatgaccccattatcgggtccg

SEQ ID NO: 104103 - DNA, 25 bp, Homo sapien
gcacgaaagcggacgccccgggtca

SEQ ID NO: 104104 - DNA, 25 bp, Homo sapien
gcacgaaagcggtcgccccgggtca

SEQ ID NO: 104105 - DNA, 25 bp, Homo sapien
tgggggcctcgactctcgtctttac

SEQ ID NO: 104106 - DNA, 25 bp, Homo sapien
tgggggcctcgagtctcgtctttac

SEQ ID NO: 104107 - DNA, 25 bp, Homo sapien
ttgttgagacccttctcgctatgtg

SEQ ID NO: 104108 - DNA, 25 bp, Homo sapien
ttgttgagacccatctcgctatgtg

SEQ ID NO: 104109 - DNA, 25 bp, Homo sapien
ccttaacaagcctcagacagtgtgt

SEQ ID NO: 104110 - DNA, 25 bp, Homo sapien
ccttaacaagccacagacagtgtgt

SEQ ID NO: 104111 - DNA, 25 bp, Homo sapien
tcacagtgaccgtacatatgtgtgt

SEQ ID NO: 104112 - DNA, 25 bp, Homo sapien
tcacagtgaccgaacatatgtgtgt

SEQ ID NO: 104113 - DNA, 25 bp, Homo sapien
tctccattctcgatcttatggtcgt

SEQ ID NO: 104114 - DNA, 25 bp, Homo sapien
tctccattctcgttcttatggtcgt

SEQ ID NO: 104115 - DNA, 25 bp, Homo sapien
actctccagtttcctttaggtacgg

SEQ ID NO: 104116 - DNA, 25 bp, Homo sapien
actctccagtttgctttaggtacgg

SEQ ID NO: 104117 - DNA, 25 bp, Homo sapien
attaagacatgaaccttatgtacgg

SEQ ID NO: 104118 - DNA, 25 bp, Homo sapien
attaagacatgatccttatgtacgg

SEQ ID NO: 104119 - DNA, 25 bp, Homo sapien
taacgcaaacagtgtgtcgtcgtgt

SEQ ID NO: 104120 - DNA, 25 bp, Homo sapien
taacgcaaacagagtgtcgtcgtgt

SEQ ID NO: 104121 - DNA, 25 bp, Homo sapien
tatgttaatgtactgctttacttcg

SEQ ID NO: 104122 - DNA, 25 bp, Homo sapien
tatgttaatgtagtgctttacttcg

SEQ ID NO: 104123 - DNA, 25 bp, Homo sapien
cggtgttctagtttccttttctaac

SEQ ID NO: 104124 - DNA, 25 bp, Homo sapien
cggtgttctagtatccttttctaac

SEQ ID NO: 104125 - DNA, 25 bp, Homo sapien
cgacggtttgtctctgatctgcttc

SEQ ID NO: 104126 - DNA, 25 bp, Homo sapien
cgacggtttgtcactgatctgcttc

SEQ ID NO: 104127 - DNA, 25 bp, Homo sapien
agagccgttcctcaggtcttgcatc

SEQ ID NO: 104128 - DNA, 25 bp, Homo sapien
agagccgttcctgaggtcttgcatc

SEQ ID NO: 104129 - DNA, 25 bp, Homo sapien
gacgaactcccctgggttctccttt

SEQ ID NO: 104130 - DNA, 25 bp, Homo sapien
gacgaactccccagggttctccttt

SEQ ID NO: 104131 - DNA, 25 bp, Homo sapien
caaactttctgtaggtctgttttat

SEQ ID NO: 104132 - DNA, 25 bp, Homo sapien
caaactttctgttggtctgttttat

SEQ ID NO: 104133 - DNA, 25 bp, Homo sapien
taattttactatttacgttgttaaa

SEQ ID NO: 104134 - DNA, 25 bp, Homo sapien
taattttactatatacgttgttaaa

SEQ ID NO: 104135 - DNA, 25 bp, Homo sapien
agttttcgtagtcaattgtcctacc

SEQ ID NO: 104136 - DNA, 25 bp, Homo sapien
agttttcgtagtgaattgtcctacc

SEQ ID NO: 104137 - DNA, 25 bp, Homo sapien
gtgtaattatagtatgtcgtcccgc

SEQ ID NO: 104138 - DNA, 25 bp, Homo sapien
gtgtaattatagaatgtcgtcccgc

SEQ ID NO: 104139 - DNA, 25 bp, Homo sapien
agtcttacgtcgaccctcggtggac

SEQ ID NO: 104140 - DNA, 25 bp, Homo sapien
agtcttacgtcgtccctcggtggac

SEQ ID NO: 104141 - DNA, 25 bp, Homo sapien
gtgggtcctggttcctcgtcttttg

SEQ ID NO: 104142 - DNA, 25 bp, Homo sapien
gtgggtcctggtacctcgtcttttg

SEQ ID NO: 104143 - DNA, 25 bp, Homo sapien
ccctcacgggtttcgagacttttag

SEQ ID NO: 104144 - DNA, 25 bp, Homo sapien
ccctcacgggttacgagacttttag

SEQ ID NO: 104145 - DNA, 25 bp, Homo sapien
cagacaagtgattgtacaatttcta

SEQ ID NO: 104146 - DNA, 25 bp, Homo sapien
cagacaagtgatagtacaatttcta

SEQ ID NO: 104147 - DNA, 25 bp, Homo sapien
tcagggcctaaactaatcgttgttt

SEQ ID NO: 104148 - DNA, 25 bp, Homo sapien
tcagggcctaaagtaatcgttgttt

SEQ ID NO: 104149 - DNA, 25 bp, Homo sapien
ggggagtagagggagtcggaggtgt

SEQ ID NO: 104150 - DNA, 25 bp, Homo sapien
ggggagtagaggcagtcggaggtgt

SEQ ID NO: 104151 - DNA, 25 bp, Homo sapien
gagaagagacaggacacgggggacg

SEQ ID NO: 104152 - DNA, 25 bp, Homo sapien
gagaagagacagcacacgggggacg

SEQ ID NO: 104153 - DNA, 25 bp, Homo sapien
tcagaagcgacacgacagattggta

SEQ ID NO: 104154 - DNA, 25 bp, Homo sapien
tcagaagcgacaggacagattggta

SEQ ID NO: 104155 - DNA, 25 bp, Homo sapien
acagagtcgacaaggaacttgattc

SEQ ID NO: 104156 - DNA, 25 bp, Homo sapien
acagagtcgacatggaacttgattc

SEQ ID NO: 104157 - DNA, 25 bp, Homo sapien
tgaagacactttgacacggttgtcc

SEQ ID NO: 104158 - DNA, 25 bp, Homo sapien
tgaagacactttcacacggttgtcc

SEQ ID NO: 104159 - DNA, 25 bp, Homo sapien
ggggagaatatacacaaacatacac

SEQ ID NO: 104160 - DNA, 25 bp, Homo sapien
ggggagaatatagacaaacatacac

SEQ ID NO: 104161 - DNA, 25 bp, Homo sapien
tggcaactaactaacggataaatcc

SEQ ID NO: 104162 - DNA, 25 bp, Homo sapien
tggcaactaacttacggataaatcc

SEQ ID NO: 104163 - DNA, 25 bp, Homo sapien
aggaccaactaaggacgttttaccg

SEQ ID NO: 104164 - DNA, 25 bp, Homo sapien
aggaccaactaacgacgttttaccg

SEQ ID NO: 104165 - DNA, 25 bp, Homo sapien
aacggataaacaaccatatttaggt

SEQ ID NO: 104166 - DNA, 25 bp, Homo sapien
aacggataaacatccatatttaggt

SEQ ID NO: 104167 - DNA, 25 bp, Homo sapien
cttgtgatacactcgagttgtcagg

SEQ ID NO: 104168 - DNA, 25 bp, Homo sapien
cttgtgatacacacgagttgtcagg

SEQ ID NO: 104169 - DNA, 25 bp, Homo sapien
tcttgaggtccgaccgtccgctcgg

SEQ ID NO: 104170 - DNA, 25 bp, Homo sapien
tcttgaggtccgtccgtccgctcgg

SEQ ID NO: 104171 - DNA, 25 bp, Homo sapien
cggggacttcctgagacccgtccgt

SEQ ID NO: 104172 - DNA, 25 bp, Homo sapien
cggggacttcctcagacccgtccgt

SEQ ID NO: 104173 - DNA, 25 bp, Homo sapien
cgaagacaccacacacctggtctgt

SEQ ID NO: 104174 - DNA, 25 bp, Homo sapien
cgaagacaccactcacctggtctgt

SEQ ID NO: 104175 - DNA, 25 bp, Homo sapien
acatagaccgattccgcctaggtct

SEQ ID NO: 104176 - DNA, 25 bp, Homo sapien
acatagaccgataccgcctaggtct

SEQ ID NO: 104177 - DNA, 25 bp, Homo sapien
acgtaaccacgtaacctcgaccaag

SEQ ID NO: 104178 - DNA, 25 bp, Homo sapien
acgtaaccacgttacctcgaccaag

SEQ ID NO: 104179 - DNA, 25 bp, Homo sapien
cgtgtactcgactgcctaagagaga

SEQ ID NO: 104180 - DNA, 25 bp, Homo sapien
cgtgtactcgacagcctaagagaga

SEQ ID NO: 104181 - DNA, 25 bp, Homo sapien
ttggtgccgacacacctcgtgtccg

SEQ ID NO: 104182 - DNA, 25 bp, Homo sapien
ttggtgccgacagacctcgtgtccg

SEQ ID NO: 104183 - DNA, 25 bp, Homo sapien
agtggtgaccatatacacctccacg

SEQ ID NO: 104184 - DNA, 25 bp, Homo sapien
agtggtgaccatttacacctccacg

SEQ ID NO: 104185 - DNA, 25 bp, Homo sapien
gaggggccctgactaccgtctacct

SEQ ID NO: 104186 - DNA, 25 bp, Homo sapien
gaggggccctgagtaccgtctacct

SEQ ID NO: 104187 - DNA, 25 bp, Homo sapien
tgactaaggttcaggggtcctcccg

SEQ ID NO: 104188 - DNA, 25 bp, Homo sapien
tgactaaggttctggggtcctcccg

SEQ ID NO: 104189 - DNA, 25 bp, Homo sapien
gagagaaattgagtgggaccatacc

SEQ ID NO: 104190 - DNA, 25 bp, Homo sapien
gagagaaattgactgggaccatacc

SEQ ID NO: 104191 - DNA, 25 bp, Homo sapien
tcaaatattgactagggttcagacc

SEQ ID NO: 104192 - DNA, 25 bp, Homo sapien
tcaaatattgacaagggttcagacc

SEQ ID NO: 104193 - DNA, 25 bp, Homo sapien
aaacgtttagagctaaatgactcct

SEQ ID NO: 104194 - DNA, 25 bp, Homo sapien
aaacgtttagaggtaaatgactcct

SEQ ID NO: 104195 - DNA, 25 bp, Homo sapien
ccaaaaagttatgacaagtgtcctt

SEQ ID NO: 104196 - DNA, 25 bp, Homo sapien
ccaaaaagttatcacaagtgtcctt

SEQ ID NO: 104197 - DNA, 25 bp, Homo sapien
cgcggaatcctactgatgtataaat

SEQ ID NO: 104198 - DNA, 25 bp, Homo sapien
cgcggaatcctagtgatgtataaat

SEQ ID NO: 104199 - DNA, 25 bp, Homo sapien
ctccagactcccaggacggaagttc

SEQ ID NO: 104200 - DNA, 25 bp, Homo sapien
ctccagactccctggacggaagttc

SEQ ID NO: 104201 - DNA, 25 bp, Homo sapien
agatcataggttttggaagaacctt

SEQ ID NO: 104202 - DNA, 25 bp, Homo sapien
agatcataggttatggaagaacctt

SEQ ID NO: 104203 - DNA, 25 bp, Homo sapien
ggaaagaggtttttagacatccctt

SEQ ID NO: 104204 - DNA, 25 bp, Homo sapien
ggaaagaggtttatagacatccctt

SEQ ID NO: 104205 - DNA, 25 bp, Homo sapien
aatacaagttgtaagtaacgtccca

SEQ ID NO: 104206 - DNA, 25 bp, Homo sapien
aatacaagttgttagtaacgtccca

SEQ ID NO: 104207 - DNA, 25 bp, Homo sapien
gacagctttgacacgaccgacacaa

SEQ ID NO: 104208 - DNA, 25 bp, Homo sapien
gacagctttgactcgaccgacacaa

SEQ ID NO: 104209 - DNA, 25 bp, Homo sapien
gggtccctgtactcacttaggagat

SEQ ID NO: 104210 - DNA, 25 bp, Homo sapien
gggtccctgtacacacttaggagat

SEQ ID NO: 104211 - DNA, 25 bp, Homo sapien
cgagcccagtgaccactgagcggtt

SEQ ID NO: 104212 - DNA, 25 bp, Homo sapien
cgagcccagtgagcactgagcggtt

SEQ ID NO: 104213 - DNA, 25 bp, Homo sapien
gtccgctcgtcacgaggacctgggc

SEQ ID NO: 104214 - DNA, 25 bp, Homo sapien
gtccgctcgtcaggaggacctgggc

SEQ ID NO: 104215 - DNA, 25 bp, Homo sapien
ccctacggacggaacgacatcggca

SEQ ID NO: 104216 - DNA, 25 bp, Homo sapien
ccctacggacggtacgacatcggca

SEQ ID NO: 104217 - DNA, 25 bp, Homo sapien
ttaactactcacagggcacccgttc

SEQ ID NO: 104218 - DNA, 25 bp, Homo sapien
ttaactactcactgggcacccgttc

SEQ ID NO: 104219 - DNA, 25 bp, Homo sapien
tggaccagcatgagcgacctcctct

SEQ ID NO: 104220 - DNA, 25 bp, Homo sapien
tggaccagcatgtgcgacctcctct

SEQ ID NO: 104221 - DNA, 25 bp, Homo sapien
aagtacctcaaagaccggtaacacc

SEQ ID NO: 104222 - DNA, 25 bp, Homo sapien
aagtacctcaaacaccggtaacacc

SEQ ID NO: 104223 - DNA, 25 bp, Homo sapien
aactccaatatgtccgacaggtcat

SEQ ID NO: 104224 - DNA, 25 bp, Homo sapien
aactccaatatgaccgacaggtcat

SEQ ID NO: 104225 - DNA, 25 bp, Homo sapien
acgccggagagatccgaatcaggca

SEQ ID NO: 104226 - DNA, 25 bp, Homo sapien
acgccggagagaaccgaatcaggca

SEQ ID NO: 104227 - DNA, 25 bp, Homo sapien
cctcttgacatcttcaatgggtcac

SEQ ID NO: 104228 - DNA, 25 bp, Homo sapien
cctcttgacatcatcaatgggtcac

SEQ ID NO: 104229 - DNA, 25 bp, Homo sapien
ctaagtccgttctggaagtgtgtaa

SEQ ID NO: 104230 - DNA, 25 bp, Homo sapien
ctaagtccgttcaggaagtgtgtaa

SEQ ID NO: 104231 - DNA, 25 bp, Homo sapien
ctatactaattcgtgaatgtcctac

SEQ ID NO: 104232 - DNA, 25 bp, Homo sapien
ctatactaattcctgaatgtcctac

SEQ ID NO: 104233 - DNA, 25 bp, Homo sapien
ttaccgtatcctcttctcgacgacg

SEQ ID NO: 104234 - DNA, 25 bp, Homo sapien
ttaccgtatcctgttctcgacgacg

SEQ ID NO: 104235 - DNA, 25 bp, Homo sapien
tctcaacagtaggttgttacgtcgt

SEQ ID NO: 104236 - DNA, 25 bp, Homo sapien
tctcaacagtagcttgttacgtcgt

SEQ ID NO: 104237 - DNA, 25 bp, Homo sapien
actatagtctatgatactgggtact

SEQ ID NO: 104238 - DNA, 25 bp, Homo sapien
actatagtctatcatactgggtact

SEQ ID NO: 104239 - DNA, 25 bp, Homo sapien
ccacacagtcgattcgaccaggagt

SEQ ID NO: 104240 - DNA, 25 bp, Homo sapien
ccacacagtcgaatcgaccaggagt

SEQ ID NO: 104241 - DNA, 25 bp, Homo sapien
ccacgagtcgacaaactgtagttgt

SEQ ID NO: 104242 - DNA, 25 bp, Homo sapien
ccacgagtcgactaactgtagttgt

SEQ ID NO: 104243 - DNA, 25 bp, Homo sapien
ctattgtacccgtgataaatgattc

SEQ ID NO: 104244 - DNA, 25 bp, Homo sapien
ctattgtacccgagataaatgattc

SEQ ID NO: 104245 - DNA, 25 bp, Homo sapien
cttttctcggaaaactcaagtgtcc

SEQ ID NO: 104246 - DNA, 25 bp, Homo sapien
cttttctcggaatactcaagtgtcc

SEQ ID NO: 104247 - DNA, 25 bp, Homo sapien
gttttctatgaattttcccgaggac

SEQ ID NO: 104248 - DNA, 25 bp, Homo sapien
gttttctatgaaatttcccgaggac

SEQ ID NO: 104249 - DNA, 25 bp, Homo sapien
tacttccatacgtatttgccagaag

SEQ ID NO: 104250 - DNA, 25 bp, Homo sapien
tacttccatacgaatttgccagaag

SEQ ID NO: 104251 - DNA, 25 bp, Homo sapien
tcgtaaaattcatttgaccggtaat

SEQ ID NO: 104252 - DNA, 25 bp, Homo sapien
tcgtaaaattcaattgaccggtaat

SEQ ID NO: 104253 - DNA, 25 bp, Homo sapien
ttcacaaacaacccgaaaatgtaat

SEQ ID NO: 104254 - DNA, 25 bp, Homo sapien
ttcacaaacaacgcgaaaatgtaat

SEQ ID NO: 104255 - DNA, 25 bp, Homo sapien
tagatcaacacctagaacgtaaagt

SEQ ID NO: 104256 - DNA, 25 bp, Homo sapien
tagatcaacaccaagaacgtaaagt

SEQ ID NO: 104257 - DNA, 25 bp, Homo sapien
acatgtgtagtaaggctcggcggaa

SEQ ID NO: 104258 - DNA, 25 bp, Homo sapien
acatgtgtagtatggctcggcggaa

SEQ ID NO: 104259 - DNA, 25 bp, Homo sapien
catgttctgtaagtcacgagccggg

SEQ ID NO: 104260 - DNA, 25 bp, Homo sapien
catgttctgtaactcacgagccggg

SEQ ID NO: 104261 - DNA, 25 bp, Homo sapien
caccgtccgagtgaaccaagccagg

SEQ ID NO: 104262 - DNA, 25 bp, Homo sapien
caccgtccgagtcaaccaagccagg

SEQ ID NO: 104263 - DNA, 25 bp, Homo sapien
ccgtcaggatctacatcacctgcga

SEQ ID NO: 104264 - DNA, 25 bp, Homo sapien
ccgtcaggatcttcatcacctgcga

SEQ ID NO: 104265 - DNA, 25 bp, Homo sapien
ttcgtacaggccagtgaggcccgga

SEQ ID NO: 104266 - DNA, 25 bp, Homo sapien
ttcgtacaggcctgtgaggcccgga

SEQ ID NO: 104267 - DNA, 25 bp, Homo sapien
cctaccgaggtcgaaggccagtcac

SEQ ID NO: 104268 - DNA, 25 bp, Homo sapien
cctaccgaggtccaaggccagtcac

SEQ ID NO: 104269 - DNA, 25 bp, Homo sapien
gtcgaggtccaagagacagacgacg

SEQ ID NO: 104270 - DNA, 25 bp, Homo sapien
gtcgaggtccaacagacagacgacg

SEQ ID NO: 104271 - DNA, 25 bp, Homo sapien
tgcgtcgagtcgaccccaaagagcg

SEQ ID NO: 104272 - DNA, 25 bp, Homo sapien
tgcgtcgagtcgtccccaaagagcg

SEQ ID NO: 104273 - DNA, 25 bp, Homo sapien
gtgggactccgaaccatggacgaag

SEQ ID NO: 104274 - DNA, 25 bp, Homo sapien
gtgggactccgatccatggacgaag

SEQ ID NO: 104275 - DNA, 25 bp, Homo sapien
aggtctactagaacccgaacccact

SEQ ID NO: 104276 - DNA, 25 bp, Homo sapien
aggtctactagatcccgaacccact

SEQ ID NO: 104277 - DNA, 25 bp, Homo sapien
taattgtgtctcgtcgggaggtccc

SEQ ID NO: 104278 - DNA, 25 bp, Homo sapien
taattgtgtctcctcgggaggtccc

SEQ ID NO: 104279 - DNA, 25 bp, Homo sapien
gttcgtcgtctactcaggagacacg

SEQ ID NO: 104280 - DNA, 25 bp, Homo sapien
gttcgtcgtctagtcaggagacacg

SEQ ID NO: 104281 - DNA, 25 bp, Homo sapien
actgtggtgtgtgtcgaagtgtaac

SEQ ID NO: 104282 - DNA, 25 bp, Homo sapien
actgtggtgtgtctcgaagtgtaac

SEQ ID NO: 104283 - DNA, 25 bp, Homo sapien
tggtgcgacaggtcgttatggaact

SEQ ID NO: 104284 - DNA, 25 bp, Homo sapien
tggtgcgacaggacgttatggaact

SEQ ID NO: 104285 - DNA, 25 bp, Homo sapien
atggtcaaaccgtagtcgatcaaac

SEQ ID NO: 104286 - DNA, 25 bp, Homo sapien
atggtcaaaccgaagtcgatcaaac

SEQ ID NO: 104287 - DNA, 25 bp, Homo sapien
cttcgagaaatgtaagacttcaata

SEQ ID NO: 104288 - DNA, 25 bp, Homo sapien
cttcgagaaatgaaagacttcaata

SEQ ID NO: 104289 - DNA, 25 bp, Homo sapien
tctctggattttaagatcacaagtt

SEQ ID NO: 104290 - DNA, 25 bp, Homo sapien
tctctggatttttagatcacaagtt

SEQ ID NO: 104291 - DNA, 25 bp, Homo sapien
tcgtgaacgtttttggtccctgtct

SEQ ID NO: 104292 - DNA, 25 bp, Homo sapien
tcgtgaacgtttatggtccctgtct

SEQ ID NO: 104293 - DNA, 25 bp, Homo sapien
tcttaccacccgaagtcttcggtgg

SEQ ID NO: 104294 - DNA, 25 bp, Homo sapien
tcttaccacccgtagtcttcggtgg

SEQ ID NO: 104295 - DNA, 25 bp, Homo sapien
cttttccacccttttctaaagtagt

SEQ ID NO: 104296 - DNA, 25 bp, Homo sapien
cttttccaccctattctaaagtagt

SEQ ID NO: 104297 - DNA, 25 bp, Homo sapien
agtccttctttctttagaacgtagt

SEQ ID NO: 104298 - DNA, 25 bp, Homo sapien
agtccttctttcattagaacgtagt

SEQ ID NO: 104299 - DNA, 25 bp, Homo sapien
tattcgactttcttgtactggaagg

SEQ ID NO: 104300 - DNA, 25 bp, Homo sapien
tattcgactttcatgtactggaagg

SEQ ID NO: 104301 - DNA, 25 bp, Homo sapien
cacgtgtcttcgtttcagtagagga

SEQ ID NO: 104302 - DNA, 25 bp, Homo sapien
cacgtgtcttcgattcagtagagga

SEQ ID NO: 104303 - DNA, 25 bp, Homo sapien
taggagtgtcttcgaagatcggaga

SEQ ID NO: 104304 - DNA, 25 bp, Homo sapien
taggagtgtcttggaagatcggaga

SEQ ID NO: 104305 - DNA, 25 bp, Homo sapien
ttatcgttacttgaggagaaccaaa

SEQ ID NO: 104306 - DNA, 25 bp, Homo sapien
ttatcgttacttcaggagaaccaaa

SEQ ID NO: 104307 - DNA, 25 bp, Homo sapien
ccactgcagagaacgacgacgaaag

SEQ ID NO: 104308 - DNA, 25 bp, Homo sapien
ccactgcagagatcgacgacgaaag

SEQ ID NO: 104309 - DNA, 25 bp, Homo sapien
ccctcgacaccgacgtgacggagat

SEQ ID NO: 104310 - DNA, 25 bp, Homo sapien
ccctcgacaccgtcgtgacggagat

SEQ ID NO: 104311 - DNA, 25 bp, Homo sapien
gacacacgtggaccttgttgtgagg

SEQ ID NO: 104312 - DNA, 25 bp, Homo sapien
gacacacgtggagcttgttgtgagg

SEQ ID NO: 104313 - DNA, 25 bp, Homo sapien
cgcccacgggtattcctgtcggagg

SEQ ID NO: 104314 - DNA, 25 bp, Homo sapien
cgcccacgggtaatcctgtcggagg

SEQ ID NO: 104315 - DNA, 25 bp, Homo sapien
tgtcgaaattagacaccaccgggga

SEQ ID NO: 104316 - DNA, 25 bp, Homo sapien
tgtcgaaattagtcaccaccgggga

SEQ ID NO: 104317 - DNA, 25 bp, Homo sapien
gaaaactcaagtgtccacggggaag

SEQ ID NO: 104318 - DNA, 25 bp, Homo sapien
gaaaactcaagtctccacggggaag

SEQ ID NO: 104319 - DNA, 25 bp, Homo sapien
gcaatcagagactccactctcggaa

SEQ ID NO: 104320 - DNA, 25 bp, Homo sapien
gcaatcagagacaccactctcggaa

SEQ ID NO: 104321 - DNA, 25 bp, Homo sapien
caataccagcgtagggtgtcggaca

SEQ ID NO: 104322 - DNA, 25 bp, Homo sapien
caataccagcgttgggtgtcggaca

SEQ ID NO: 104323 - DNA, 25 bp, Homo sapien
tagttccgcggtcatttgtggcggt

SEQ ID NO: 104324 - DNA, 25 bp, Homo sapien
tagttccgcggtgatttgtggcggt

SEQ ID NO: 104325 - DNA, 25 bp, Homo sapien
gttacgtctctgtggcaccgggttc

SEQ ID NO: 104326 - DNA, 25 bp, Homo sapien
gttacgtctctgaggcaccgggttc

SEQ ID NO: 104327 - DNA, 25 bp, Homo sapien
aggggtctctgtgaaccccttgacc

SEQ ID NO: 104328 - DNA, 25 bp, Homo sapien
aggggtctctgtcaaccccttgacc

SEQ ID NO: 104329 - DNA, 25 bp, Homo sapien
aggcactcggggacgtcaaaggacc

SEQ ID NO: 104330 - DNA, 25 bp, Homo sapien
aggcactcggggtcgtcaaaggacc

SEQ ID NO: 104331 - DNA, 25 bp, Homo sapien
acaggtgtccggtgaaaacatgtac

SEQ ID NO: 104332 - DNA, 25 bp, Homo sapien
acaggtgtccggagaaaacatgtac

SEQ ID NO: 104333 - DNA, 25 bp, Homo sapien
tgaagaagaccgaaagacccgttcg

SEQ ID NO: 104334 - DNA, 25 bp, Homo sapien
tgaagaagaccgtaagacccgttcg

SEQ ID NO: 104335 - DNA, 25 bp, Homo sapien
tgaaggactcccacgtcacgacctt

SEQ ID NO: 104336 - DNA, 25 bp, Homo sapien
tgaaggactccctcgtcacgacctt

SEQ ID NO: 104337 - DNA, 25 bp, Homo sapien
gtcactgatgccagtcaagactctt

SEQ ID NO: 104338 - DNA, 25 bp, Homo sapien
gtcactgatgcctgtcaagactctt

SEQ ID NO: 104339 - DNA, 25 bp, Homo sapien
gtccgttgtcctttctaacaccgta

SEQ ID NO: 104340 - DNA, 25 bp, Homo sapien
gtccgttgtcctatctaacaccgta

SEQ ID NO: 104341 - DNA, 25 bp, Homo sapien
attccgtgttcatatacaacaagag

SEQ ID NO: 104342 - DNA, 25 bp, Homo sapien
attccgtgttcaaatacaacaagag

SEQ ID NO: 104343 - DNA, 25 bp, Homo sapien
tcttacgtgccaaagtctttcgata

SEQ ID NO: 104344 - DNA, 25 bp, Homo sapien
tcttacgtgccatagtctttcgata

SEQ ID NO: 104345 - DNA, 25 bp, Homo sapien
accccggtgacgtgtggaacagtac

SEQ ID NO: 104346 - DNA, 25 bp, Homo sapien
accccggtgacgagtggaacagtac

SEQ ID NO: 104347 - DNA, 25 bp, Homo sapien
ccaaggaacagagtagtcgacagta

SEQ ID NO: 104348 - DNA, 25 bp, Homo sapien
ccaaggaacagactagtcgacagta

SEQ ID NO: 104349 - DNA, 25 bp, Homo sapien
cacgagtccaaatactcgtccacga

SEQ ID NO: 104350 - DNA, 25 bp, Homo sapien
cacgagtccaaaaactcgtccacga

SEQ ID NO: 104351 - DNA, 25 bp, Homo sapien
gaagccagaactctcgctacacgac

SEQ ID NO: 104352 - DNA, 25 bp, Homo sapien
gaagccagaactgtcgctacacgac

SEQ ID NO: 104353 - DNA, 25 bp, Homo sapien
atgacagtataacctctccacggac

SEQ ID NO: 104354 - DNA, 25 bp, Homo sapien
atgacagtataagctctccacggac

SEQ ID NO: 104355 - DNA, 25 bp, Homo sapien
actctcagtattgcacttgtcgttc

SEQ ID NO: 104356 - DNA, 25 bp, Homo sapien
actctcagtattccacttgtcgttc

SEQ ID NO: 104357 - DNA, 25 bp, Homo sapien
ctctagacctaccgagatgcgtctc

SEQ ID NO: 104358 - DNA, 25 bp, Homo sapien
ctctagacctacggagatgcgtctc

SEQ ID NO: 104359 - DNA, 25 bp, Homo sapien
tctagagaccgaattgttattgttc

SEQ ID NO: 104360 - DNA, 25 bp, Homo sapien
tctagagaccgatttgttattgttc

SEQ ID NO: 104361 - DNA, 25 bp, Homo sapien
tataaaccgaagtatgtaccggtgc

SEQ ID NO: 104362 - DNA, 25 bp, Homo sapien
tataaaccgaagaatgtaccggtgc

SEQ ID NO: 104363 - DNA, 25 bp, Homo sapien
tgtagtcggacctttgtccagacgc

SEQ ID NO: 104364 - DNA, 25 bp, Homo sapien
tgtagtcggaccattgtccagacgc

SEQ ID NO: 104365 - DNA, 25 bp, Homo sapien
ggtcccgacctcttagtcaagacgg

SEQ ID NO: 104366 - DNA, 25 bp, Homo sapien
ggtcccgacctcatagtcaagacgg

SEQ ID NO: 104367 - DNA, 25 bp, Homo sapien
aaaggtcaccctcaaaagtgtactg

SEQ ID NO: 104368 - DNA, 25 bp, Homo sapien
aaaggtcaccctgaaaagtgtactg

SEQ ID NO: 104369 - DNA, 25 bp, Homo sapien
ggaaataatcctgaatttatctacg

SEQ ID NO: 104370 - DNA, 25 bp, Homo sapien
ggaaataatcctcaatttatctacg

SEQ ID NO: 104371 - DNA, 25 bp, Homo sapien
ggtaatgtcccacttctatatttgt

SEQ ID NO: 104372 - DNA, 25 bp, Homo sapien
ggtaatgtcccagttctatatttgt

SEQ ID NO: 104373 - DNA, 25 bp, Homo sapien
aatctgtccccagatacgaacgatg

SEQ ID NO: 104374 - DNA, 25 bp, Homo sapien
aatctgtccccacatacgaacgatg

SEQ ID NO: 104375 - DNA, 25 bp, Homo sapien
ccatagtacacctacattatcaggg

SEQ ID NO: 104376 - DNA, 25 bp, Homo sapien
ccatagtacaccaacattatcaggg

SEQ ID NO: 104377 - DNA, 25 bp, Homo sapien
cctagatcccgaagataatcggcat

SEQ ID NO: 104378 - DNA, 25 bp, Homo sapien
cctagatcccgatgataatcggcat

SEQ ID NO: 104379 - DNA, 25 bp, Homo sapien
cgtcggctcccagtggatcgaggat

SEQ ID NO: 104380 - DNA, 25 bp, Homo sapien
cgtcggctcccactggatcgaggat

SEQ ID NO: 104381 - DNA, 25 bp, Homo sapien
ctttcgaaaccgacttgggatgaat

SEQ ID NO: 104382 - DNA, 25 bp, Homo sapien
ctttcgaaaccgtcttgggatgaat

SEQ ID NO: 104383 - DNA, 25 bp, Homo sapien
tatttcagacttcgttggtttcata

SEQ ID NO: 104384 - DNA, 25 bp, Homo sapien
tatttcagacttggttggtttcata

SEQ ID NO: 104385 - DNA, 25 bp, Homo sapien
ttcgaaagactttggggatctcgaa

SEQ ID NO: 104386 - DNA, 25 bp, Homo sapien
ttcgaaagacttaggggatctcgaa

SEQ ID NO: 104387 - DNA, 25 bp, Homo sapien
caaacatagagtttaagtctctaag

SEQ ID NO: 104388 - DNA, 25 bp, Homo sapien
caaacatagagtataagtctctaag

SEQ ID NO: 104389 - DNA, 25 bp, Homo sapien
cgttaaggatttaggtctactacta

SEQ ID NO: 104390 - DNA, 25 bp, Homo sapien
cgttaaggattttggtctactacta

SEQ ID NO: 104391 - DNA, 25 bp, Homo sapien
ataaagagacttttagttagttcat

SEQ ID NO: 104392 - DNA, 25 bp, Homo sapien
ataaagagacttatagttagttcat

SEQ ID NO: 104393 - DNA, 25 bp, Homo sapien
cggaacatgaattgacctatttcct

SEQ ID NO: 104394 - DNA, 25 bp, Homo sapien
cggaacatgaatagacctatttcct

SEQ ID NO: 104395 - DNA, 25 bp, Homo sapien
agaggggcttataaacactttgcac

SEQ ID NO: 104396 - DNA, 25 bp, Homo sapien
agaggggcttattaacactttgcac

SEQ ID NO: 104397 - DNA, 25 bp, Homo sapien
tagggtcaattacgacgcacgtgcc

SEQ ID NO: 104398 - DNA, 25 bp, Homo sapien
tagggtcaattaggacgcacgtgcc

SEQ ID NO: 104399 - DNA, 25 bp, Homo sapien
aggagcccatgtgtcccggtgcgtc

SEQ ID NO: 104400 - DNA, 25 bp, Homo sapien
aggagcccatgtctcccggtgcgtc

SEQ ID NO: 104401 - DNA, 25 bp, Homo sapien
tgggccctttgtctcaaccgtaatc

SEQ ID NO: 104402 - DNA, 25 bp, Homo sapien
tgggccctttgtgtcaaccgtaatc

SEQ ID NO: 104403 - DNA, 25 bp, Homo sapien
ggatctcttttatacgaatcgttta

SEQ ID NO: 104404 - DNA, 25 bp, Homo sapien
ggatctcttttaaacgaatcgttta

SEQ ID NO: 104405 - DNA, 25 bp, Homo sapien
taattcgcttgactacggtcttcta

SEQ ID NO: 104406 - DNA, 25 bp, Homo sapien
taattcgcttgagtacggtcttcta

SEQ ID NO: 104407 - DNA, 25 bp, Homo sapien
ccttggctgtgcagacggagtcaca

SEQ ID NO: 104408 - DNA, 25 bp, Homo sapien
ccttggctgtgctgacggagtcaca

SEQ ID NO: 104409 - DNA, 25 bp, Homo sapien
tacaggggagattgaggtacctgtc

SEQ ID NO: 104410 - DNA, 25 bp, Homo sapien
tacaggggagatagaggtacctgtc

SEQ ID NO: 104411 - DNA, 25 bp, Homo sapien
gacaggaggattgacttgtcctgtg

SEQ ID NO: 104412 - DNA, 25 bp, Homo sapien
gacaggaggattcacttgtcctgtg

SEQ ID NO: 104413 - DNA, 25 bp, Homo sapien
acaaagtgagatcttgttacgtctg

SEQ ID NO: 104414 - DNA, 25 bp, Homo sapien
acaaagtgagatgttgttacgtctg

SEQ ID NO: 104415 - DNA, 25 bp, Homo sapien
agaccaatggatgtgtctcgaccag

SEQ ID NO: 104416 - DNA, 25 bp, Homo sapien
agaccaatggatctgtctcgaccag

SEQ ID NO: 104417 - DNA, 25 bp, Homo sapien
tgagccccggaacttaccactcagt

SEQ ID NO: 104418 - DNA, 25 bp, Homo sapien
tgagccccggaagttaccactcagt

SEQ ID NO: 104419 - DNA, 25 bp, Homo sapien
tgggaacctccgacgggaccttaca

SEQ ID NO: 104420 - DNA, 25 bp, Homo sapien
tgggaacctccgtcgggaccttaca

SEQ ID NO: 104421 - DNA, 25 bp, Homo sapien
gaggaggtcccatgcaggagcttca

SEQ ID NO: 104422 - DNA, 25 bp, Homo sapien
gaggaggtcccaagcaggagcttca

SEQ ID NO: 104423 - DNA, 25 bp, Homo sapien
aaggactccctaaacgcggttttca

SEQ ID NO: 104424 - DNA, 25 bp, Homo sapien
aaggactccctatacgcggttttca

SEQ ID NO: 104425 - DNA, 25 bp, Homo sapien
acggcaccgctgtaacggtttcacc

SEQ ID NO: 104426 - DNA, 25 bp, Homo sapien
acggcaccgctgaaacggtttcacc

SEQ ID NO: 104427 - DNA, 25 bp, Homo sapien
gacggtggtcacgaaaagtttccac

SEQ ID NO: 104428 - DNA, 25 bp, Homo sapien
gacggtggtcaccaaaagtttccac

SEQ ID NO: 104429 - DNA, 25 bp, Homo sapien
gagaggagacccacgggctcacaac

SEQ ID NO: 104430 - DNA, 25 bp, Homo sapien
gagaggagaccctcgggctcacaac

SEQ ID NO: 104431 - DNA, 25 bp, Homo sapien
ctggtatcgttgtgtgctcttaaac

SEQ ID NO: 104432 - DNA, 25 bp, Homo sapien
ctggtatcgttgagtgctcttaaac

SEQ ID NO: 104433 - DNA, 25 bp, Homo sapien
gagaagtgtcgtaggtctccgtgga

SEQ ID NO: 104434 - DNA, 25 bp, Homo sapien
gagaagtgtcgttggtctccgtgga

SEQ ID NO: 104435 - DNA, 25 bp, Homo sapien
gcaaggtcgttgagtcactcagagt

SEQ ID NO: 104436 - DNA, 25 bp, Homo sapien
gcaaggtcgttgtgtcactcagagt

SEQ ID NO: 104437 - DNA, 25 bp, Homo sapien
taaggtcggtgttatgaccactagt

SEQ ID NO: 104438 - DNA, 25 bp, Homo sapien
taaggtcggtgtaatgaccactagt

SEQ ID NO: 104439 - DNA, 25 bp, Homo sapien
acgtgcttacgtcgtatactcgaca

SEQ ID NO: 104440 - DNA, 25 bp, Homo sapien
acgtgcttacgtggtatactcgaca

SEQ ID NO: 104441 - DNA, 25 bp, Homo sapien
aagcagcgtcaggactccgtccacg

SEQ ID NO: 104442 - DNA, 25 bp, Homo sapien
aagcagcgtcagcactccgtccacg

SEQ ID NO: 104443 - DNA, 25 bp, Homo sapien
cagttgtgtcagagtacatacgtta

SEQ ID NO: 104444 - DNA, 25 bp, Homo sapien
cagttgtgtcagtgtacatacgtta

SEQ ID NO: 104445 - DNA, 25 bp, Homo sapien
cccagtaacgtgaatgttgacattt

SEQ ID NO: 104446 - DNA, 25 bp, Homo sapien
cccagtaacgtgtatgttgacattt

SEQ ID NO: 104447 - DNA, 25 bp, Homo sapien
cgctaagccgagtaggcgaagacac

SEQ ID NO: 104448 - DNA, 25 bp, Homo sapien
cgctaagccgagaaggcgaagacac

SEQ ID NO: 104449 - DNA, 25 bp, Homo sapien
tgtgacgccgtcaggacgaatagac

SEQ ID NO: 104450 - DNA, 25 bp, Homo sapien
tgtgacgccgtctggacgaatagac

SEQ ID NO: 104451 - DNA, 25 bp, Homo sapien
gagtgacccgtctcacgaagagtat

SEQ ID NO: 104452 - DNA, 25 bp, Homo sapien
gagtgacccgtcacacgaagagtat

SEQ ID NO: 104453 - DNA, 25 bp, Homo sapien
accgtaggaaagcagcccgacactc

SEQ ID NO: 104454 - DNA, 25 bp, Homo sapien
accgtaggaaaggagcccgacactc

SEQ ID NO: 104455 - DNA, 25 bp, Homo sapien
cagtgttagggtacacggtatatac

SEQ ID NO: 104456 - DNA, 25 bp, Homo sapien
cagtgttagggttcacggtatatac

SEQ ID NO: 104457 - DNA, 25 bp, Homo sapien
gcggcatttagttagctactcaacg

SEQ ID NO: 104458 - DNA, 25 bp, Homo sapien
gcggcatttagtaagctactcaacg

SEQ ID NO: 104459 - DNA, 25 bp, Homo sapien
acatcgactactaggcttattgatg

SEQ ID NO: 104460 - DNA, 25 bp, Homo sapien
acatcgactacttggcttattgatg

SEQ ID NO: 104461 - DNA, 25 bp, Homo sapien
gtggttggagtccttctgcaccagg

SEQ ID NO: 104462 - DNA, 25 bp, Homo sapien
gtggttggagtcgttctgcaccagg

SEQ ID NO: 104463 - DNA, 25 bp, Homo sapien
ccgaggaggcctgacttcccctgag

SEQ ID NO: 104464 - DNA, 25 bp, Homo sapien
ccgaggaggcctcacttcccctgag

SEQ ID NO: 104465 - DNA, 25 bp, Homo sapien
tcaggggcccgccctcgacgtgcgg

SEQ ID NO: 104466 - DNA, 25 bp, Homo sapien
tcaggggcccgcgctcgacgtgcgg

SEQ ID NO: 104467 - DNA, 25 bp, Homo sapien
gaggtgcaccttctacagacgagac

SEQ ID NO: 104468 - DNA, 25 bp, Homo sapien
gaggtgcaccttgtacagacgagac

SEQ ID NO: 104469 - DNA, 25 bp, Homo sapien
gagaggtgcacttgttcatcgagat

SEQ ID NO: 104470 - DNA, 25 bp, Homo sapien
gagaggtgcactagttcatcgagat

SEQ ID NO: 104471 - DNA, 25 bp, Homo sapien
aggacggacccgacgtcgacccgga

SEQ ID NO: 104472 - DNA, 25 bp, Homo sapien
aggacggacccgtcgtcgacccgga

SEQ ID NO: 104473 - DNA, 25 bp, Homo sapien
gacggttccaggatctaacccggct

SEQ ID NO: 104474 - DNA, 25 bp, Homo sapien
gacggttccaggttctaacccggct

SEQ ID NO: 104475 - DNA, 25 bp, Homo sapien
cagtggtccaagaacagaccaggac

SEQ ID NO: 104476 - DNA, 25 bp, Homo sapien
cagtggtccaagtacagaccaggac

SEQ ID NO: 104477 - DNA, 25 bp, Homo sapien
aaaggttcagtgtacagtacaacca

SEQ ID NO: 104478 - DNA, 25 bp, Homo sapien
aaaggttcagtgaacagtacaacca

SEQ ID NO: 104479 - DNA, 25 bp, Homo sapien
agtaaatcagagaaacgttaatctc

SEQ ID NO: 104480 - DNA, 25 bp, Homo sapien
agtaaatcagagtaacgttaatctc

SEQ ID NO: 104481 - DNA, 25 bp, Homo sapien
gtagagattcagtttaaccagtttc

SEQ ID NO: 104482 - DNA, 25 bp, Homo sapien
gtagagattcagattaaccagtttc

SEQ ID NO: 104483 - DNA, 25 bp, Homo sapien
tgatatgtgtagaaacccccttttc

SEQ ID NO: 104484 - DNA, 25 bp, Homo sapien
tgatatgtgtagtaacccccttttc

SEQ ID NO: 104485 - DNA, 25 bp, Homo sapien
gttataaatgagtgtccaagttccg

SEQ ID NO: 104486 - DNA, 25 bp, Homo sapien
gttataaatgagagtccaagttccg

SEQ ID NO: 104487 - DNA, 25 bp, Homo sapien
taataaagtacagttcgatttgtcc

SEQ ID NO: 104488 - DNA, 25 bp, Homo sapien
taataaagtacacttcgatttgtcc

SEQ ID NO: 104489 - DNA, 25 bp, Homo sapien
ataaagagtccgtttcttctttctg

SEQ ID NO: 104490 - DNA, 25 bp, Homo sapien
ataaagagtccgattcttctttctg

SEQ ID NO: 104491 - DNA, 25 bp, Homo sapien
tacggatgtcggtgacttctttccg

SEQ ID NO: 104492 - DNA, 25 bp, Homo sapien
tacggatgtcggagacttctttccg

SEQ ID NO: 104493 - DNA, 25 bp, Homo sapien
cccgtctccgagacgacggtccaat

SEQ ID NO: 104494 - DNA, 25 bp, Homo sapien
cccgtctccgagtcgacggtccaat

SEQ ID NO: 104495 - DNA, 25 bp, Homo sapien
acgacgttcctgtgtcgtaaggaag

SEQ ID NO: 104496 - DNA, 25 bp, Homo sapien
acgacgttcctgagtcgtaaggaag

SEQ ID NO: 104497 - DNA, 25 bp, Homo sapien
ctccacaccgtgactcaagaggtgt

SEQ ID NO: 104498 - DNA, 25 bp, Homo sapien
ctccacaccgtgtctcaagaggtgt

SEQ ID NO: 104499 - DNA, 25 bp, Homo sapien
ctccagacgcgaacgcacgaaggta

SEQ ID NO: 104500 - DNA, 25 bp, Homo sapien
ctccagacgcgatcgcacgaaggta

SEQ ID NO: 104501 - DNA, 25 bp, Homo sapien
cggacgacgagtactttcgggtgta

SEQ ID NO: 104502 - DNA, 25 bp, Homo sapien
cggacgacgagttctttcgggtgta

SEQ ID NO: 104503 - DNA, 25 bp, Homo sapien
cgtcgggtcaagtgtcccgggtcct

SEQ ID NO: 104504 - DNA, 25 bp, Homo sapien
cgtcgggtcaagagtcccgggtcct

SEQ ID NO: 104505 - DNA, 25 bp, Homo sapien
cgccagttatagacaccgtcctttt

SEQ ID NO: 104506 - DNA, 25 bp, Homo sapien
cgccagttatagtcaccgtcctttt

SEQ ID NO: 104507 - DNA, 25 bp, Homo sapien
tctctctctgaggtcaccccagaat

SEQ ID NO: 104508 - DNA, 25 bp, Homo sapien
tctctctctgagctcaccccagaat

SEQ ID NO: 104509 - DNA, 25 bp, Homo sapien
tctgtgctcggaggacccctcggac

SEQ ID NO: 104510 - DNA, 25 bp, Homo sapien
tctgtgctcggacgacccctcggac

SEQ ID NO: 104511 - DNA, 25 bp, Homo sapien
agtcttttccgagaaccagtgagta

SEQ ID NO: 104512 - DNA, 25 bp, Homo sapien
agtcttttccgacaaccagtgagta

SEQ ID NO: 104513 - DNA, 25 bp, Homo sapien
ctatgttctgttttgactgtcgaga

SEQ ID NO: 104514 - DNA, 25 bp, Homo sapien
ctatgttctgttatgactgtcgaga

SEQ ID NO: 104515 - DNA, 25 bp, Homo sapien
atggtctgtccctgcactgggggta

SEQ ID NO: 104516 - DNA, 25 bp, Homo sapien
atggtctgtcccagcactgggggta

SEQ ID NO: 104517 - DNA, 25 bp, Homo sapien
tgtctcttcccaacactggaagagg

SEQ ID NO: 104518 - DNA, 25 bp, Homo sapien
tgtctcttcccatcactggaagagg

SEQ ID NO: 104519 - DNA, 25 bp, Homo sapien
gtaggggtttcctcaccgttcagtc

SEQ ID NO: 104520 - DNA, 25 bp, Homo sapien
gtaggggtttccacaccgttcagtc

SEQ ID NO: 104521 - DNA, 25 bp, Homo sapien
ggttcctccaacagacatcacgtct

SEQ ID NO: 104522 - DNA, 25 bp, Homo sapien
ggttcctccaactgacatcacgtct

SEQ ID NO: 104523 - DNA, 25 bp, Homo sapien
ctatagaaacttctccagtccgacg

SEQ ID NO: 104524 - DNA, 25 bp, Homo sapien
ctatagaaacttgtccagtccgacg

SEQ ID NO: 104525 - DNA, 25 bp, Homo sapien
acctataaagttgtcacaagacacg

SEQ ID NO: 104526 - DNA, 25 bp, Homo sapien
acctataaagttctcacaagacacg

SEQ ID NO: 104527 - DNA, 25 bp, Homo sapien
gacacacatcgctcgaaagacaccg

SEQ ID NO: 104528 - DNA, 25 bp, Homo sapien
gacacacatcgcacgaaagacaccg

SEQ ID NO: 104529 - DNA, 25 bp, Homo sapien
agagacactcctacaagaacttacg

SEQ ID NO: 104530 - DNA, 25 bp, Homo sapien
agagacactccttcaagaacttacg

SEQ ID NO: 104531 - DNA, 25 bp, Homo sapien
atgacacgtatcttcaacgagttta

SEQ ID NO: 104532 - DNA, 25 bp, Homo sapien
atgacacgtatcatcaacgagttta

SEQ ID NO: 104533 - DNA, 25 bp, Homo sapien
tcagtagttgtactaaaacatcatg

SEQ ID NO: 104534 - DNA, 25 bp, Homo sapien
tcagtagttgtagtaaaacatcatg

SEQ ID NO: 104535 - DNA, 25 bp, Homo sapien
cacgaggaaccgaaagtaagcttct

SEQ ID NO: 104536 - DNA, 25 bp, Homo sapien
cacgaggaaccgtaagtaagcttct

SEQ ID NO: 104537 - DNA, 25 bp, Homo sapien
cctctgagacacgaggtccgtctca

SEQ ID NO: 104538 - DNA, 25 bp, Homo sapien
cctctgagacaccaggtccgtctca

SEQ ID NO: 104539 - DNA, 25 bp, Homo sapien
ccctacgtttactgaaggcctagaa

SEQ ID NO: 104540 - DNA, 25 bp, Homo sapien
ccctacgtttacagaaggcctagaa

SEQ ID NO: 104541 - DNA, 25 bp, Homo sapien
tagaagtagatgacacgcggcggca

SEQ ID NO: 104542 - DNA, 25 bp, Homo sapien
tagaagtagatgtcacgcggcggca

SEQ ID NO: 104543 - DNA, 25 bp, Homo sapien
gaccgagactgtggaagcgacagaa

SEQ ID NO: 104544 - DNA, 25 bp, Homo sapien
gaccgagactgtcgaagcgacagaa

SEQ ID NO: 104545 - DNA, 25 bp, Homo sapien
agacaagacgttccaaaacgtaaac

SEQ ID NO: 104546 - DNA, 25 bp, Homo sapien
agacaagacgttgcaaaacgtaaac

SEQ ID NO: 104547 - DNA, 25 bp, Homo sapien
tctctgaaatgatttcctgacataa

SEQ ID NO: 104548 - DNA, 25 bp, Homo sapien
tctctgaaatgaattcctgacataa

SEQ ID NO: 104549 - DNA, 25 bp, Homo sapien
gtattccagagaaagctcaaccaca

SEQ ID NO: 104550 - DNA, 25 bp, Homo sapien
gtattccagagatagctcaaccaca

SEQ ID NO: 104551 - DNA, 25 bp, Homo sapien
aagtgttcagaagtccaacaaatat

SEQ ID NO: 104552 - DNA, 25 bp, Homo sapien
aagtgttcagaactccaacaaatat

SEQ ID NO: 104553 - DNA, 25 bp, Homo sapien
acggtaccgccgtacgacacatgtg

SEQ ID NO: 104554 - DNA, 25 bp, Homo sapien
acggtaccgccgaacgacacatgtg

SEQ ID NO: 104555 - DNA, 25 bp, Homo sapien
aaattagcacgtacacacgaatgtg

SEQ ID NO: 104556 - DNA, 25 bp, Homo sapien
aaattagcacgttcacacgaatgtg

SEQ ID NO: 104557 - DNA, 25 bp, Homo sapien
ctaccgtatcttcgacagtcgattc

SEQ ID NO: 104558 - DNA, 25 bp, Homo sapien
ctaccgtatcttggacagtcgattc

SEQ ID NO: 104559 - DNA, 25 bp, Homo sapien
ctaaattgtcgtaacatcgacaccg

SEQ ID NO: 104560 - DNA, 25 bp, Homo sapien
ctaaattgtcgttacatcgacaccg

SEQ ID NO: 104561 - DNA, 25 bp, Homo sapien
agactacaaccttgagagtcttacc

SEQ ID NO: 104562 - DNA, 25 bp, Homo sapien
agactacaacctagagagtcttacc

SEQ ID NO: 104563 - DNA, 25 bp, Homo sapien
cctaaagactgtgtgagtacgaaac

SEQ ID NO: 104564 - DNA, 25 bp, Homo sapien
cctaaagactgtctgagtacgaaac

SEQ ID NO: 104565 - DNA, 25 bp, Homo sapien
caggtcagacgtttcgggacctcgc

SEQ ID NO: 104566 - DNA, 25 bp, Homo sapien
caggtcagacgtatcgggacctcgc

SEQ ID NO: 104567 - DNA, 25 bp, Homo sapien
gacgactcatctacaaggacctctc

SEQ ID NO: 104568 - DNA, 25 bp, Homo sapien
gacgactcatcttcaaggacctctc

SEQ ID NO: 104569 - DNA, 25 bp, Homo sapien
ccgtttactttgtagtaaccgtcgc

SEQ ID NO: 104570 - DNA, 25 bp, Homo sapien
ccgtttactttgaagtaaccgtcgc

SEQ ID NO: 104571 - DNA, 25 bp, Homo sapien
gacgatgtaagtagaccaggcgtcc

SEQ ID NO: 104572 - DNA, 25 bp, Homo sapien
gacgatgtaagttgaccaggcgtcc

SEQ ID NO: 104573 - DNA, 25 bp, Homo sapien
tactccagggtaacgggagcgttat

SEQ ID NO: 104574 - DNA, 25 bp, Homo sapien
tactccagggtatcgggagcgttat

SEQ ID NO: 104575 - DNA, 25 bp, Homo sapien
gagttacgacaggaagggcaactaa

SEQ ID NO: 104576 - DNA, 25 bp, Homo sapien
gagttacgacagcaagggcaactaa

SEQ ID NO: 104577 - DNA, 25 bp, Homo sapien
gtgctccagtctcaactttcaagat

SEQ ID NO: 104578 - DNA, 25 bp, Homo sapien
gtgctccagtctgaactttcaagat

SEQ ID NO: 104579 - DNA, 25 bp, Homo sapien
tagtcacccgggactagacgcaaga

SEQ ID NO: 104580 - DNA, 25 bp, Homo sapien
tagtcacccgggtctagacgcaaga

SEQ ID NO: 104581 - DNA, 25 bp, Homo sapien
cgtcggccgcgttttaggagtaaga

SEQ ID NO: 104582 - DNA, 25 bp, Homo sapien
cgtcggccgcgtattaggagtaaga

SEQ ID NO: 104583 - DNA, 25 bp, Homo sapien
ccagaggacggttgtttctagtaga

SEQ ID NO: 104584 - DNA, 25 bp, Homo sapien
ccagaggacggtagtttctagtaga

SEQ ID NO: 104585 - DNA, 25 bp, Homo sapien
cacacgggtttcatcaactagagag

SEQ ID NO: 104586 - DNA, 25 bp, Homo sapien
cacacgggtttcttcaactagagag

SEQ ID NO: 104587 - DNA, 25 bp, Homo sapien
ctagaagacgacaggacacacggga

SEQ ID NO: 104588 - DNA, 25 bp, Homo sapien
ctagaagacgactggacacacggga

SEQ ID NO: 104589 - DNA, 25 bp, Homo sapien
tccgtctggcccgggcctcgacaag

SEQ ID NO: 104590 - DNA, 25 bp, Homo sapien
tccgtctggccccggcctcgacaag

SEQ ID NO: 104591 - DNA, 25 bp, Homo sapien
tgcgtccgggtcctttccacacgag

SEQ ID NO: 104592 - DNA, 25 bp, Homo sapien
tgcgtccgggtcgtttccacacgag

SEQ ID NO: 104593 - DNA, 25 bp, Homo sapien
taggtcaggttcatcatccactgtg

SEQ ID NO: 104594 - DNA, 25 bp, Homo sapien
taggtcaggttcttcatccactgtg

SEQ ID NO: 104595 - DNA, 25 bp, Homo sapien
aaggtggaagtaggtctttcactgc

SEQ ID NO: 104596 - DNA, 25 bp, Homo sapien
aaggtggaagtacgtctttcactgc

SEQ ID NO: 104597 - DNA, 25 bp, Homo sapien
tgaagtctcccagttcttttaagag

SEQ ID NO: 104598 - DNA, 25 bp, Homo sapien
tgaagtctcccacttcttttaagag

SEQ ID NO: 104599 - DNA, 25 bp, Homo sapien
ccctaaactggttcgtcccatagtc

SEQ ID NO: 104600 - DNA, 25 bp, Homo sapien
ccctaaactggtacgtcccatagtc

SEQ ID NO: 104601 - DNA, 25 bp, Homo sapien
ttttgtaggtggttacccgaacgta

SEQ ID NO: 104602 - DNA, 25 bp, Homo sapien
ttttgtaggtggatacccgaacgta

SEQ ID NO: 104603 - DNA, 25 bp, Homo sapien
acaatttagtaggttacaccagata

SEQ ID NO: 104604 - DNA, 25 bp, Homo sapien
acaatttagtagcttacaccagata

SEQ ID NO: 104605 - DNA, 25 bp, Homo sapien
ctagaacataaggtcctcatagtaa

SEQ ID NO: 104606 - DNA, 25 bp, Homo sapien
ctagaacataagctcctcatagtaa

SEQ ID NO: 104607 - DNA, 25 bp, Homo sapien
gtatatcttataactcacttctttc

SEQ ID NO: 104608 - DNA, 25 bp, Homo sapien
gtatatcttatatctcacttctttc

SEQ ID NO: 104609 - DNA, 25 bp, Homo sapien
gtgtcgtactgatggattctatccg

SEQ ID NO: 104610 - DNA, 25 bp, Homo sapien
gtgtcgtactgaaggattctatccg

SEQ ID NO: 104611 - DNA, 25 bp, Homo sapien
cgttcccgtccttctactgaggtcg

SEQ ID NO: 104612 - DNA, 25 bp, Homo sapien
cgttcccgtcctactactgaggtcg

SEQ ID NO: 104613 - DNA, 25 bp, Homo sapien
gacgtttctccctgtctcgtatttc

SEQ ID NO: 104614 - DNA, 25 bp, Homo sapien
gacgtttctcccagtctcgtatttc

SEQ ID NO: 104615 - DNA, 25 bp, Homo sapien
ggtcccggagacaccaccgtgtgtc

SEQ ID NO: 104616 - DNA, 25 bp, Homo sapien
ggtcccggagactccaccgtgtgtc

SEQ ID NO: 104617 - DNA, 25 bp, Homo sapien
cgatcacgggatttaggacgttcgc

SEQ ID NO: 104618 - DNA, 25 bp, Homo sapien
cgatcacgggatataggacgttcgc

SEQ ID NO: 104619 - DNA, 25 bp, Homo sapien
gtaacgacaccgaataagaaacttc

SEQ ID NO: 104620 - DNA, 25 bp, Homo sapien
gtaacgacaccgtataagaaacttc

SEQ ID NO: 104621 - DNA, 25 bp, Homo sapien
gacagtcccttatcagtaacagttc

SEQ ID NO: 104622 - DNA, 25 bp, Homo sapien
gacagtcccttaacagtaacagttc

SEQ ID NO: 104623 - DNA, 25 bp, Homo sapien
ctgatgtgtcttaccagtaaagttg

SEQ ID NO: 104624 - DNA, 25 bp, Homo sapien
ctgatgtgtctttccagtaaagttg

SEQ ID NO: 104625 - DNA, 25 bp, Homo sapien
gttttctactgaacacaacgtttcg

SEQ ID NO: 104626 - DNA, 25 bp, Homo sapien
gttttctactgatcacaacgtttcg

SEQ ID NO: 104627 - DNA, 25 bp, Homo sapien
acttgtcactcaacttcaacggccg

SEQ ID NO: 104628 - DNA, 25 bp, Homo sapien
acttgtcactcatcttcaacggccg

SEQ ID NO: 104629 - DNA, 25 bp, Homo sapien
agtacttcgaccctttcaagattcg

SEQ ID NO: 104630 - DNA, 25 bp, Homo sapien
agtacttcgaccgtttcaagattcg

SEQ ID NO: 104631 - DNA, 25 bp, Homo sapien
ttgtagattgtaccatttcaaaaca

SEQ ID NO: 104632 - DNA, 25 bp, Homo sapien
ttgtagattgtagcatttcaaaaca

SEQ ID NO: 104633 - DNA, 25 bp, Homo sapien
ttcgtcattgtagattctcttgaaa

SEQ ID NO: 104634 - DNA, 25 bp, Homo sapien
ttcgtcattgtacattctcttgaaa

SEQ ID NO: 104635 - DNA, 25 bp, Homo sapien
ttcctattcttcttcttttgattct

SEQ ID NO: 104636 - DNA, 25 bp, Homo sapien
ttcctattcttcatcttttgattct

SEQ ID NO: 104637 - DNA, 25 bp, Homo sapien
tttagaatgacattttgtgctctcg

SEQ ID NO: 104638 - DNA, 25 bp, Homo sapien
tttagaatgacaatttgtgctctcg

SEQ ID NO: 104639 - DNA, 25 bp, Homo sapien
aacaagttcaacttgtctttcgacg

SEQ ID NO: 104640 - DNA, 25 bp, Homo sapien
aacaagttcaacatgtctttcgacg

SEQ ID NO: 104641 - DNA, 25 bp, Homo sapien
aaagagcgtgaagtccgtcccggct

SEQ ID NO: 104642 - DNA, 25 bp, Homo sapien
aaagagcgtgaactccgtcccggct

SEQ ID NO: 104643 - DNA, 25 bp, Homo sapien
gtagagctacaacaagacccgttac

SEQ ID NO: 104644 - DNA, 25 bp, Homo sapien
gtagagctacaagaagacccgttac

SEQ ID NO: 104645 - DNA, 25 bp, Homo sapien
cggtgatcccacgagacggacccga

SEQ ID NO: 104646 - DNA, 25 bp, Homo sapien
cggtgatcccaccagacggacccga

SEQ ID NO: 104647 - DNA, 25 bp, Homo sapien
tccggtccgacagaaggtcctcagt

SEQ ID NO: 104648 - DNA, 25 bp, Homo sapien
tccggtccgacacaaggtcctcagt

SEQ ID NO: 104649 - DNA, 25 bp, Homo sapien
cagttacggtcagagggaccatact

SEQ ID NO: 104650 - DNA, 25 bp, Homo sapien
cagttacggtcacagggaccatact

SEQ ID NO: 104651 - DNA, 25 bp, Homo sapien
actttggtacaagtaggaccgcgag

SEQ ID NO: 104652 - DNA, 25 bp, Homo sapien
actttggtacaactaggaccgcgag

SEQ ID NO: 104653 - DNA, 25 bp, Homo sapien
ttccaagacttactatgaacccgag

SEQ ID NO: 104654 - DNA, 25 bp, Homo sapien
ttccaagacttagtatgaacccgag

SEQ ID NO: 104655 - DNA, 25 bp, Homo sapien
tcccagggtaggatggacacatagt

SEQ ID NO: 104656 - DNA, 25 bp, Homo sapien
tcccagggtaggttggacacatagt

SEQ ID NO: 104657 - DNA, 25 bp, Homo sapien
ttaagaactttcagctggacaagta

SEQ ID NO: 104658 - DNA, 25 bp, Homo sapien
ttaagaactttctgctggacaagta

SEQ ID NO: 104659 - DNA, 25 bp, Homo sapien
ctgtgcctttttactcgaacgagaa

SEQ ID NO: 104660 - DNA, 25 bp, Homo sapien
ctgtgccttttttctcgaacgagaa

SEQ ID NO: 104661 - DNA, 25 bp, Homo sapien
ggacacactgttttgtgtcggagaa

SEQ ID NO: 104662 - DNA, 25 bp, Homo sapien
ggacacactgttatgtgtcggagaa

SEQ ID NO: 104663 - DNA, 25 bp, Homo sapien
ggacatattagagtggtcctctaag

SEQ ID NO: 104664 - DNA, 25 bp, Homo sapien
ggacatattagactggtcctctaag

SEQ ID NO: 104665 - DNA, 25 bp, Homo sapien
ggtctagaagaaccacctgttacgt

SEQ ID NO: 104666 - DNA, 25 bp, Homo sapien
ggtctagaagaagcacctgttacgt

SEQ ID NO: 104667 - DNA, 25 bp, Homo sapien
ctgtgagaagacattaggacccatc

SEQ ID NO: 104668 - DNA, 25 bp, Homo sapien
ctgtgagaagactttaggacccatc

SEQ ID NO: 104669 - DNA, 25 bp, Homo sapien
tgtaaagagcgtgaagtccgtcccg

SEQ ID NO: 104670 - DNA, 25 bp, Homo sapien
tgtaaagagcgtcaagtccgtcccg

SEQ ID NO: 104671 - DNA, 25 bp, Homo sapien
tttgaagaggatacatcgtgtccat

SEQ ID NO: 104672 - DNA, 25 bp, Homo sapien
tttgaagaggattcatcgtgtccat

SEQ ID NO: 104673 - DNA, 25 bp, Homo sapien
taataaaaataacagtcagtcgtaa

SEQ ID NO: 104674 - DNA, 25 bp, Homo sapien
taataaaaataagagtcagtcgtaa

SEQ ID NO: 104675 - DNA, 25 bp, Homo sapien
ttagcgaaaaatactcagacttgaa

SEQ ID NO: 104676 - DNA, 25 bp, Homo sapien
ttagcgaaaaattctcagacttgaa

SEQ ID NO: 104677 - DNA, 25 bp, Homo sapien
aggagacataaaggtccctggactc

SEQ ID NO: 104678 - DNA, 25 bp, Homo sapien
aggagacataaacgtccctggactc

SEQ ID NO: 104679 - DNA, 25 bp, Homo sapien
gaaacagaagaaggtattctgactc

SEQ ID NO: 104680 - DNA, 25 bp, Homo sapien
gaaacagaagaacgtattctgactc

SEQ ID NO: 104681 - DNA, 25 bp, Homo sapien
agataaaagtctgtatcgtctcttc

SEQ ID NO: 104682 - DNA, 25 bp, Homo sapien
agataaaagtctctatcgtctcttc

SEQ ID NO: 104683 - DNA, 25 bp, Homo sapien
tacgatatatcgtttacgtgtgtgc

SEQ ID NO: 104684 - DNA, 25 bp, Homo sapien
tacgatatatcgattacgtgtgtgc

SEQ ID NO: 104685 - DNA, 25 bp, Homo sapien
taccgattgttcttgtcctactgtc

SEQ ID NO: 104686 - DNA, 25 bp, Homo sapien
taccgattgttcatgtcctactgtc

SEQ ID NO: 104687 - DNA, 25 bp, Homo sapien
tgtcttccttctttggtcctcggag

SEQ ID NO: 104688 - DNA, 25 bp, Homo sapien
tgtcttccttctatggtcctcggag

SEQ ID NO: 104689 - DNA, 25 bp, Homo sapien
tccccctttataccttcgttaggag

SEQ ID NO: 104690 - DNA, 25 bp, Homo sapien
tccccctttatagcttcgttaggag

SEQ ID NO: 104691 - DNA, 25 bp, Homo sapien
gggtcgtagtcgacacttgtagacg

SEQ ID NO: 104692 - DNA, 25 bp, Homo sapien
gggtcgtagtcgtcacttgtagacg

SEQ ID NO: 104693 - DNA, 25 bp, Homo sapien
ctagaaccggcgtaactacttgacg

SEQ ID NO: 104694 - DNA, 25 bp, Homo sapien
ctagaaccggcgaaactacttgacg

SEQ ID NO: 104695 - DNA, 25 bp, Homo sapien
ataggtttacttcgtccgctctgcc

SEQ ID NO: 104696 - DNA, 25 bp, Homo sapien
ataggtttacttggtccgctctgcc

SEQ ID NO: 104697 - DNA, 25 bp, Homo sapien
gggttcgtctttgacggtttacatt

SEQ ID NO: 104698 - DNA, 25 bp, Homo sapien
gggttcgtctttcacggtttacatt

SEQ ID NO: 104699 - DNA, 25 bp, Homo sapien
gggaggtttcctctactgtttccgc

SEQ ID NO: 104700 - DNA, 25 bp, Homo sapien
gggaggtttcctgtactgtttccgc

SEQ ID NO: 104701 - DNA, 25 bp, Homo sapien
cggaaatcattcaagagttcggtct

SEQ ID NO: 104702 - DNA, 25 bp, Homo sapien
cggaaatcattctagagttcggtct

SEQ ID NO: 104703 - DNA, 25 bp, Homo sapien
atggtaaacacaatttgcaccgttt

SEQ ID NO: 104704 - DNA, 25 bp, Homo sapien
atggtaaacacattttgcaccgttt

SEQ ID NO: 104705 - DNA, 25 bp, Homo sapien
gaagaaacgatgtctgccaacgatt

SEQ ID NO: 104706 - DNA, 25 bp, Homo sapien
gaagaaacgatgactgccaacgatt

SEQ ID NO: 104707 - DNA, 25 bp, Homo sapien
aagttacgtgaccactccagcgagg

SEQ ID NO: 104708 - DNA, 25 bp, Homo sapien
aagttacgtgacgactccagcgagg

SEQ ID NO: 104709 - DNA, 25 bp, Homo sapien
agagtatgacggacacaaagtacga

SEQ ID NO: 104710 - DNA, 25 bp, Homo sapien
agagtatgacggtcacaaagtacga

SEQ ID NO: 104711 - DNA, 25 bp, Homo sapien
cagaaggacggagactcgacactca

SEQ ID NO: 104712 - DNA, 25 bp, Homo sapien
cagaaggacggacactcgacactca

SEQ ID NO: 104713 - DNA, 25 bp, Homo sapien
ggtcagtgcgggaaacgactcctat

SEQ ID NO: 104714 - DNA, 25 bp, Homo sapien
ggtcagtgcgggtaacgactcctat

SEQ ID NO: 104715 - DNA, 25 bp, Homo sapien
gctccagcgggtaaaagtgtctaca

SEQ ID NO: 104716 - DNA, 25 bp, Homo sapien
gctccagcgggttaaagtgtctaca

SEQ ID NO: 104717 - DNA, 25 bp, Homo sapien
tcgagatcgtaaatccactgtgata

SEQ ID NO: 104718 - DNA, 25 bp, Homo sapien
tcgagatcgtaattccactgtgata

SEQ ID NO: 104719 - DNA, 25 bp, Homo sapien
ctttcagatgaagaccgacagtgaa

SEQ ID NO: 104720 - DNA, 25 bp, Homo sapien
ctttcagatgaacaccgacagtgaa

SEQ ID NO: 104721 - DNA, 25 bp, Homo sapien
gaggcccgagccctcatcgtaggag

SEQ ID NO: 104722 - DNA, 25 bp, Homo sapien
gaggcccgagccgtcatcgtaggag

SEQ ID NO: 104723 - DNA, 25 bp, Homo sapien
gacgccggagacgaccatgagcgac

SEQ ID NO: 104724 - DNA, 25 bp, Homo sapien
gacgccggagaccaccatgagcgac

SEQ ID NO: 104725 - DNA, 25 bp, Homo sapien
acgacaccgacaagacacttggtgg

SEQ ID NO: 104726 - DNA, 25 bp, Homo sapien
acgacaccgacatgacacttggtgg

SEQ ID NO: 104727 - DNA, 25 bp, Homo sapien
aagtgacccaagaactacgggaccg

SEQ ID NO: 104728 - DNA, 25 bp, Homo sapien
aagtgacccaagtactacgggaccg

SEQ ID NO: 104729 - DNA, 25 bp, Homo sapien
gaagacaaggacaaccccacgggcc

SEQ ID NO: 104730 - DNA, 25 bp, Homo sapien
gaagacaaggactaccccacgggcc

SEQ ID NO: 104731 - DNA, 25 bp, Homo sapien
tgggggtcccgaacaccttagtaac

SEQ ID NO: 104732 - DNA, 25 bp, Homo sapien
tgggggtcccgatcaccttagtaac

SEQ ID NO: 104733 - DNA, 25 bp, Homo sapien
tgtgtcggcccgttctacttataag

SEQ ID NO: 104734 - DNA, 25 bp, Homo sapien
tgtgtcggcccgatctacttataag

SEQ ID NO: 104735 - DNA, 25 bp, Homo sapien
tgtgctgatccctagacgagtgtgt

SEQ ID NO: 104736 - DNA, 25 bp, Homo sapien
tgtgctgatcccaagacgagtgtgt

SEQ ID NO: 104737 - DNA, 25 bp, Homo sapien
tcgacaagacgtcaaactatgtctt

SEQ ID NO: 104738 - DNA, 25 bp, Homo sapien
tcgacaagacgtgaaactatgtctt

SEQ ID NO: 104739 - DNA, 25 bp, Homo sapien
acttctaagtctggactctatggtt

SEQ ID NO: 104740 - DNA, 25 bp, Homo sapien
acttctaagtctcgactctatggtt

SEQ ID NO: 104741 - DNA, 25 bp, Homo sapien
tctcttcaggttgtctgacggtcgg

SEQ ID NO: 104742 - DNA, 25 bp, Homo sapien
tctcttcaggttctctgacggtcgg

SEQ ID NO: 104743 - DNA, 25 bp, Homo sapien
tttaagaactcgttccgttatgagg

SEQ ID NO: 104744 - DNA, 25 bp, Homo sapien
tttaagaactcgatccgttatgagg

SEQ ID NO: 104745 - DNA, 25 bp, Homo sapien
aaaacgacatgatcgctgtgggtgt

SEQ ID NO: 104746 - DNA, 25 bp, Homo sapien
aaaacgacatgaacgctgtgggtgt

SEQ ID NO: 104747 - DNA, 25 bp, Homo sapien
ttattaaagtgtcgtctctctttcg

SEQ ID NO: 104748 - DNA, 25 bp, Homo sapien
ttattaaagtgtggtctctctttcg

SEQ ID NO: 104749 - DNA, 25 bp, Homo sapien
gggtgtttcaagttccttctcttgc

SEQ ID NO: 104750 - DNA, 25 bp, Homo sapien
gggtgtttcaagatccttctcttgc

SEQ ID NO: 104751 - DNA, 25 bp, Homo sapien
cagtttcgtggatccgatctttgtc

SEQ ID NO: 104752 - DNA, 25 bp, Homo sapien
cagtttcgtggaaccgatctttgtc

SEQ ID NO: 104753 - DNA, 25 bp, Homo sapien
aggatccttcccagacgttcttttc

SEQ ID NO: 104754 - DNA, 25 bp, Homo sapien
aggatccttccctgacgttcttttc

SEQ ID NO: 104755 - DNA, 25 bp, Homo sapien
taaggtatccctctgggtttccttc

SEQ ID NO: 104756 - DNA, 25 bp, Homo sapien
taaggtatccctgtgggtttccttc

SEQ ID NO: 104757 - DNA, 25 bp, Homo sapien
gagtcgcttttgaggtctttcttgt

SEQ ID NO: 104758 - DNA, 25 bp, Homo sapien
gagtcgcttttgtggtctttcttgt

SEQ ID NO: 104759 - DNA, 25 bp, Homo sapien
gtaatgtttctgtgtccttatacaa

SEQ ID NO: 104760 - DNA, 25 bp, Homo sapien
gtaatgtttctgagtccttatacaa

SEQ ID NO: 104761 - DNA, 25 bp, Homo sapien
tgggtatttctgcatctcttaaccc

SEQ ID NO: 104762 - DNA, 25 bp, Homo sapien
tgggtatttctggatctcttaaccc

SEQ ID NO: 104763 - DNA, 25 bp, Homo sapien
tacacacacgctgacggtcagacgt

SEQ ID NO: 104764 - DNA, 25 bp, Homo sapien
tacacacacgctcacggtcagacgt

SEQ ID NO: 104765 - DNA, 25 bp, Homo sapien
gactgtactgttaacctctcgttaa

SEQ ID NO: 104766 - DNA, 25 bp, Homo sapien
gactgtactgtttacctctcgttaa

SEQ ID NO: 104767 - DNA, 25 bp, Homo sapien
tgggttgtggtatgtcttccttctg

SEQ ID NO: 104768 - DNA, 25 bp, Homo sapien
tgggttgtggtaagtcttccttctg

SEQ ID NO: 104769 - DNA, 25 bp, Homo sapien
ccgccgcgcgaatcggacttatctg

SEQ ID NO: 104770 - DNA, 25 bp, Homo sapien
ccgccgcgcgaaacggacttatctg

SEQ ID NO: 104771 - DNA, 25 bp, Homo sapien
gatcaaggtacttgtaaactcttta

SEQ ID NO: 104772 - DNA, 25 bp, Homo sapien
gatcaaggtactagtaaactcttta

SEQ ID NO: 104773 - DNA, 25 bp, Homo sapien
cccggccgtaaagtcatcgtctttc

SEQ ID NO: 104774 - DNA, 25 bp, Homo sapien
cccggccgtaaactcatcgtctttc

SEQ ID NO: 104775 - DNA, 25 bp, Homo sapien
ccgggagagcgagagcgtcgttgtt

SEQ ID NO: 104776 - DNA, 25 bp, Homo sapien
ccgggagagcgacagcgtcgttgtt

SEQ ID NO: 104777 - DNA, 25 bp, Homo sapien
tggaaaagaagaaccgcgtgtggct

SEQ ID NO: 104778 - DNA, 25 bp, Homo sapien
tggaaaagaagatccgcgtgtggct

SEQ ID NO: 104779 - DNA, 25 bp, Homo sapien
caaaggacacgtcaccattagtggt

SEQ ID NO: 104780 - DNA, 25 bp, Homo sapien
caaaggacacgtgaccattagtggt

SEQ ID NO: 104781 - DNA, 25 bp, Homo sapien
ctgagaagatacagggacttgattc

SEQ ID NO: 104782 - DNA, 25 bp, Homo sapien
ctgagaagatactgggacttgattc

SEQ ID NO: 104783 - DNA, 25 bp, Homo sapien
ctcggagaatttgacacacttgttc

SEQ ID NO: 104784 - DNA, 25 bp, Homo sapien
ctcggagaatttcacacacttgttc

SEQ ID NO: 104785 - DNA, 25 bp, Homo sapien
tggatagaatgacacaaatatacac

SEQ ID NO: 104786 - DNA, 25 bp, Homo sapien
tggatagaatgagacaaatatacac

SEQ ID NO: 104787 - DNA, 25 bp, Homo sapien
ggtaagactgacaacgaaaattcag

SEQ ID NO: 104788 - DNA, 25 bp, Homo sapien
ggtaagactgactacgaaaattcag

SEQ ID NO: 104789 - DNA, 25 bp, Homo sapien
ggaccacatacaaaagtctttaccg

SEQ ID NO: 104790 - DNA, 25 bp, Homo sapien
ggaccacatacataagtctttaccg

SEQ ID NO: 104791 - DNA, 25 bp, Homo sapien
taacggataaacaaccatatttagg

SEQ ID NO: 104792 - DNA, 25 bp, Homo sapien
taacggataaactaccatatttagg

SEQ ID NO: 104793 - DNA, 25 bp, Homo sapien
ctttagaccatccagtgtagtcagg

SEQ ID NO: 104794 - DNA, 25 bp, Homo sapien
ctttagaccatcgagtgtagtcagg

SEQ ID NO: 104795 - DNA, 25 bp, Homo sapien
ctccgaggtccgtccttacgtctgg

SEQ ID NO: 104796 - DNA, 25 bp, Homo sapien
ctccgaggtccgaccttacgtctgg

SEQ ID NO: 104797 - DNA, 25 bp, Homo sapien
cggaggtttcatgactctcctcggt

SEQ ID NO: 104798 - DNA, 25 bp, Homo sapien
cggaggtttcatcactctcctcggt

SEQ ID NO: 104799 - DNA, 25 bp, Homo sapien
gaagacgacccagaccaccgtctag

SEQ ID NO: 104800 - DNA, 25 bp, Homo sapien
gaagacgacccacaccaccgtctag

SEQ ID NO: 104801 - DNA, 25 bp, Homo sapien
tgaacgtagaccaaactccctagga

SEQ ID NO: 104802 - DNA, 25 bp, Homo sapien
tgaacgtagacctaactccctagga

SEQ ID NO: 104803 - DNA, 25 bp, Homo sapien
gaacggacacggaaaccactcgaag

SEQ ID NO: 104804 - DNA, 25 bp, Homo sapien
gaacggacacggtaaccactcgaag

SEQ ID NO: 104805 - DNA, 25 bp, Homo sapien
accgtcaccgagtcctgagagacga

SEQ ID NO: 104806 - DNA, 25 bp, Homo sapien
accgtcaccgagacctgagagacga

SEQ ID NO: 104807 - DNA, 25 bp, Homo sapien
tgacgtcccgacacgtactttagcc

SEQ ID NO: 104808 - DNA, 25 bp, Homo sapien
tgacgtcccgactcgtactttagcc

SEQ ID NO: 104809 - DNA, 25 bp, Homo sapien
tggacgccactgacactcgtcctag

SEQ ID NO: 104810 - DNA, 25 bp, Homo sapien
tggacgccactgtcactcgtcctag

SEQ ID NO: 104811 - DNA, 25 bp, Homo sapien
aggggcacatcacgtacacgtcctg

SEQ ID NO: 104812 - DNA, 25 bp, Homo sapien
aggggcacatcaggtacacgtcctg

SEQ ID NO: 104813 - DNA, 25 bp, Homo sapien
ctgactaaggttcaggggtcctccc

SEQ ID NO: 104814 - DNA, 25 bp, Homo sapien
ctgactaaggttgaggggtcctccc

SEQ ID NO: 104815 - DNA, 25 bp, Homo sapien
cgaaagattcaggtgggacccgacc

SEQ ID NO: 104816 - DNA, 25 bp, Homo sapien
cgaaagattcagctgggacccgacc

SEQ ID NO: 104817 - DNA, 25 bp, Homo sapien
ttaaacatctgcttgggttcctccg

SEQ ID NO: 104818 - DNA, 25 bp, Homo sapien
ttaaacatctgcatgggttcctccg

SEQ ID NO: 104819 - DNA, 25 bp, Homo sapien
agaaagttgtgagtaacttgctcgc

SEQ ID NO: 104820 - DNA, 25 bp, Homo sapien
agaaagttgtgactaacttgctcgc

SEQ ID NO: 104821 - DNA, 25 bp, Homo sapien
ccaaaagatctggacaatcgacctt

SEQ ID NO: 104822 - DNA, 25 bp, Homo sapien
ccaaaagatctgcacaatcgacctt

SEQ ID NO: 104823 - DNA, 25 bp, Homo sapien
gagaaattctgtcaattacgacaat

SEQ ID NO: 104824 - DNA, 25 bp, Homo sapien
gagaaattctgtgaattacgacaat

SEQ ID NO: 104825 - DNA, 25 bp, Homo sapien
gacgaaatctctaggaggacacgga

SEQ ID NO: 104826 - DNA, 25 bp, Homo sapien
gacgaaatctcttggaggacacgga

SEQ ID NO: 104827 - DNA, 25 bp, Homo sapien
atataaagtcttttggatgaactta

SEQ ID NO: 104828 - DNA, 25 bp, Homo sapien
atataaagtcttatggatgaactta

SEQ ID NO: 104829 - DNA, 25 bp, Homo sapien
gtaaaaaggttctagtggaaccctt

SEQ ID NO: 104830 - DNA, 25 bp, Homo sapien
gtaaaaaggttcaagtggaaccctt

SEQ ID NO: 104831 - DNA, 25 bp, Homo sapien
aacacctgtgacaagtaagacccat

SEQ ID NO: 104832 - DNA, 25 bp, Homo sapien
aacacctgtgactagtaagacccat

SEQ ID NO: 104833 - DNA, 25 bp, Homo sapien
ggaccctttgtcacgtagtgaccaa

SEQ ID NO: 104834 - DNA, 25 bp, Homo sapien
ggaccctttgtctcgtagtgaccaa

SEQ ID NO: 104835 - DNA, 25 bp, Homo sapien
gcatccgtttactcactaatcagag

SEQ ID NO: 104836 - DNA, 25 bp, Homo sapien
gcatccgtttacacactaatcagag

SEQ ID NO: 104837 - DNA, 25 bp, Homo sapien
tcgacccctgttccagtgaaccgtt

SEQ ID NO: 104838 - DNA, 25 bp, Homo sapien
tcgacccctgttgcagtgaaccgtt

SEQ ID NO: 104839 - DNA, 25 bp, Homo sapien
ctagtcccccggtggactcagaggc

SEQ ID NO: 104840 - DNA, 25 bp, Homo sapien
ctagtcccccggaggactcagaggc

SEQ ID NO: 104841 - DNA, 25 bp, Homo sapien
tcccgctgcgcgagtacatcgggac

SEQ ID NO: 104842 - DNA, 25 bp, Homo sapien
tcccgctgcgcgtgtacatcgggac

SEQ ID NO: 104843 - DNA, 25 bp, Homo sapien
aatctcagactgagggaaccgggtc

SEQ ID NO: 104844 - DNA, 25 bp, Homo sapien
aatctcagactgtgggaaccgggtc

SEQ ID NO: 104845 - DNA, 25 bp, Homo sapien
tggcacctttgtagtgacccgcgtc

SEQ ID NO: 104846 - DNA, 25 bp, Homo sapien
tggcacctttgttgtgacccgcgtc

SEQ ID NO: 104847 - DNA, 25 bp, Homo sapien
aggttccagagagaccggtcacacc

SEQ ID NO: 104848 - DNA, 25 bp, Homo sapien
aggttccagagacaccggtcacacc

SEQ ID NO: 104849 - DNA, 25 bp, Homo sapien
gatttcaacaaccaccgcaggtcct

SEQ ID NO: 104850 - DNA, 25 bp, Homo sapien
gatttcaacaacgaccgcaggtcct

SEQ ID NO: 104851 - DNA, 25 bp, Homo sapien
cttgcgacaacaccaagcaggccgt

SEQ ID NO: 104852 - DNA, 25 bp, Homo sapien
cttgcgacaacagcaagcaggccgt

SEQ ID NO: 104853 - DNA, 25 bp, Homo sapien
ccttctagcacctcaaagaggtcag

SEQ ID NO: 104854 - DNA, 25 bp, Homo sapien
ccttctagcaccacaaagaggtcag

SEQ ID NO: 104855 - DNA, 25 bp, Homo sapien
caagtcttgttacaagtcgtgtata

SEQ ID NO: 104856 - DNA, 25 bp, Homo sapien
caagtcttgttagaagtcgtgtata

SEQ ID NO: 104857 - DNA, 25 bp, Homo sapien
cactatgtagttgtgaatttactac

SEQ ID NO: 104858 - DNA, 25 bp, Homo sapien
cactatgtagttctgaatttactac

SEQ ID NO: 104859 - DNA, 25 bp, Homo sapien
gtgtaatatcttcgtgtctcgaacg

SEQ ID NO: 104860 - DNA, 25 bp, Homo sapien
gtgtaatatcttggtgtctcgaacg

SEQ ID NO: 104861 - DNA, 25 bp, Homo sapien
tttacgaacgatgtatgtcacgtgt

SEQ ID NO: 104862 - DNA, 25 bp, Homo sapien
tttacgaacgatctatgtcacgtgt

SEQ ID NO: 104863 - DNA, 25 bp, Homo sapien
tctcgagtcatgtactcgacacgtt

SEQ ID NO: 104864 - DNA, 25 bp, Homo sapien
tctcgagtcatgaactcgacacgtt

SEQ ID NO: 104865 - DNA, 25 bp, Homo sapien
cgatcaagtcgtttataccacggat

SEQ ID NO: 104866 - DNA, 25 bp, Homo sapien
cgatcaagtcgtatataccacggat

SEQ ID NO: 104867 - DNA, 25 bp, Homo sapien
atactacatcactaaccgtagtgtg

SEQ ID NO: 104868 - DNA, 25 bp, Homo sapien
atactacatcacaaaccgtagtgtg

SEQ ID NO: 104869 - DNA, 25 bp, Homo sapien
tttgtcacgtagtgaccaatgattc

SEQ ID NO: 104870 - DNA, 25 bp, Homo sapien
tttgtcacgtagagaccaatgattc

SEQ ID NO: 104871 - DNA, 25 bp, Homo sapien
tatatcctcggagatccaagttctt

SEQ ID NO: 104872 - DNA, 25 bp, Homo sapien
tatatcctcggacatccaagttctt

SEQ ID NO: 104873 - DNA, 25 bp, Homo sapien
gtttaactgaattttcccgttgtat

SEQ ID NO: 104874 - DNA, 25 bp, Homo sapien
gtttaactgaatattcccgttgtat

SEQ ID NO: 104875 - DNA, 25 bp, Homo sapien
gtacttccatacgtatttgccagaa

SEQ ID NO: 104876 - DNA, 25 bp, Homo sapien
gtacttccatacctatttgccagaa

SEQ ID NO: 104877 - DNA, 25 bp, Homo sapien
ctgacatcatatcaattgaccggaa

SEQ ID NO: 104878 - DNA, 25 bp, Homo sapien
ctgacatcatatgaattgaccggaa

SEQ ID NO: 104879 - DNA, 25 bp, Homo sapien
acaacaatacgtcctgaaaggtaat

SEQ ID NO: 104880 - DNA, 25 bp, Homo sapien
acaacaatacgtgctgaaaggtaat

SEQ ID NO: 104881 - DNA, 25 bp, Homo sapien
gagaatcgaccaccaagaagtgaat

SEQ ID NO: 104882 - DNA, 25 bp, Homo sapien
gagaatcgaccagcaagaagtgaat

SEQ ID NO: 104883 - DNA, 25 bp, Homo sapien
acttgtctacgtaggcggtgcagaa

SEQ ID NO: 104884 - DNA, 25 bp, Homo sapien
acttgtctacgttggcggtgcagaa

SEQ ID NO: 104885 - DNA, 25 bp, Homo sapien
catcttcggtaagtcgcaacacagg

SEQ ID NO: 104886 - DNA, 25 bp, Homo sapien
catcttcggtaactcgcaacacagg

SEQ ID NO: 104887 - DNA, 25 bp, Homo sapien
tgtccgccgaggtcctacagccagg

SEQ ID NO: 104888 - DNA, 25 bp, Homo sapien
tgtccgccgaggacctacagccagg

SEQ ID NO: 104889 - DNA, 25 bp, Homo sapien
gcccaggactctacttcatccgaat

SEQ ID NO: 104890 - DNA, 25 bp, Homo sapien
gcccaggactcttcttcatccgaat

SEQ ID NO: 104891 - DNA, 25 bp, Homo sapien
tctacacaggacttgtgcccccggg

SEQ ID NO: 104892 - DNA, 25 bp, Homo sapien
tctacacaggacatgtgcccccggg

SEQ ID NO: 104893 - DNA, 25 bp, Homo sapien
tatccctgaagagaaggccagtctc

SEQ ID NO: 104894 - DNA, 25 bp, Homo sapien
tatccctgaagacaaggccagtctc

SEQ ID NO: 104895 - DNA, 25 bp, Homo sapien
gtcgagatccaatctaaagacgacg

SEQ ID NO: 104896 - DNA, 25 bp, Homo sapien
gtcgagatccaaactaaagacgacg

SEQ ID NO: 104897 - DNA, 25 bp, Homo sapien
gggtccgcgaacacccctaagaagc

SEQ ID NO: 104898 - DNA, 25 bp, Homo sapien
gggtccgcgaactcccctaagaagc

SEQ ID NO: 104899 - DNA, 25 bp, Homo sapien
cagcgggaccctacctaaggaggag

SEQ ID NO: 104900 - DNA, 25 bp, Homo sapien
cagcgggacccttcctaaggaggag

SEQ ID NO: 104901 - DNA, 25 bp, Homo sapien
gaggtcgacacgttcccgaaatgtt

SEQ ID NO: 104902 - DNA, 25 bp, Homo sapien
gaggtcgacacgatcccgaaatgtt

SEQ ID NO: 104903 - DNA, 25 bp, Homo sapien
cgagtgtttccgaacgggaggtccc

SEQ ID NO: 104904 - DNA, 25 bp, Homo sapien
cgagtgtttccgtacgggaggtccc

SEQ ID NO: 104905 - DNA, 25 bp, Homo sapien
ttcctacgtgaccactaggagaccg

SEQ ID NO: 104906 - DNA, 25 bp, Homo sapien
ttcctacgtgacgactaggagaccg

SEQ ID NO: 104907 - DNA, 25 bp, Homo sapien
tatgtcatgtgtccttacagttaac

SEQ ID NO: 104908 - DNA, 25 bp, Homo sapien
tatgtcatgtgtgcttacagttaac

SEQ ID NO: 104909 - DNA, 25 bp, Homo sapien
gtgccagtggtcctactacggtaac

SEQ ID NO: 104910 - DNA, 25 bp, Homo sapien
gtgccagtggtcgtactacggtaac

SEQ ID NO: 104911 - DNA, 25 bp, Homo sapien
gtggtacaaccggtccgaccagaac

SEQ ID NO: 104912 - DNA, 25 bp, Homo sapien
gtggtacaaccgctccgaccagaac

SEQ ID NO: 104913 - DNA, 25 bp, Homo sapien
cttgagattaagaggcgtaccaaac

SEQ ID NO: 104914 - DNA, 25 bp, Homo sapien
cttgagattaagtggcgtaccaaac

SEQ ID NO: 104915 - DNA, 25 bp, Homo sapien
cttctggcttttaaggcccgagtgt

SEQ ID NO: 104916 - DNA, 25 bp, Homo sapien
cttctggctttttaggcccgagtgt

SEQ ID NO: 104917 - DNA, 25 bp, Homo sapien
ccggaactttacttgtggtcctgtt

SEQ ID NO: 104918 - DNA, 25 bp, Homo sapien
ccggaactttacatgtggtcctgtt

SEQ ID NO: 104919 - DNA, 25 bp, Homo sapien
cttctctatcctagttagtccgtgg

SEQ ID NO: 104920 - DNA, 25 bp, Homo sapien
cttctctatccttgttagtccgtgg

SEQ ID NO: 104921 - DNA, 25 bp, Homo sapien
tgtttcatcacttttcgtgacgagg

SEQ ID NO: 104922 - DNA, 25 bp, Homo sapien
tgtttcatcactattcgtgacgagg

SEQ ID NO: 104923 - DNA, 25 bp, Homo sapien
gtcactcctgttttctaggtacgag

SEQ ID NO: 104924 - DNA, 25 bp, Homo sapien
gtcactcctgttatctaggtacgag

SEQ ID NO: 104925 - DNA, 25 bp, Homo sapien
tttcggtttacgtgacttgatacag

SEQ ID NO: 104926 - DNA, 25 bp, Homo sapien
tttcggtttacgagacttgatacag

SEQ ID NO: 104927 - DNA, 25 bp, Homo sapien
gtcatgtcgttctttacataaggag

SEQ ID NO: 104928 - DNA, 25 bp, Homo sapien
gtcatgtcgttcattacataaggag

SEQ ID NO: 104929 - DNA, 25 bp, Homo sapien
aggagtgtcttcgaagatcggagat

SEQ ID NO: 104930 - DNA, 25 bp, Homo sapien
aggagtgtcttccaagatcggagat

SEQ ID NO: 104931 - DNA, 25 bp, Homo sapien
gtgttctctcggagagactctaaac

SEQ ID NO: 104932 - DNA, 25 bp, Homo sapien
gtgttctctcggtgagactctaaac

SEQ ID NO: 104933 - DNA, 25 bp, Homo sapien
tattactccgaggtcacgaccaaag

SEQ ID NO: 104934 - DNA, 25 bp, Homo sapien
tattactccgagctcacgaccaaag

SEQ ID NO: 104935 - DNA, 25 bp, Homo sapien
gccccagacaccacgtgacggagat

SEQ ID NO: 104936 - DNA, 25 bp, Homo sapien
gccccagacacctcgtgacggagat

SEQ ID NO: 104937 - DNA, 25 bp, Homo sapien
tcccacgtgcgacctttgaagaggt

SEQ ID NO: 104938 - DNA, 25 bp, Homo sapien
tcccacgtgcgagctttgaagaggt

SEQ ID NO: 104939 - DNA, 25 bp, Homo sapien
taccacccgggactccttcgtggtg

SEQ ID NO: 104940 - DNA, 25 bp, Homo sapien
taccacccgggagtccttcgtggtg

SEQ ID NO: 104941 - DNA, 25 bp, Homo sapien
tcgaaattagacaccaccggggacg

SEQ ID NO: 104942 - DNA, 25 bp, Homo sapien
tcgaaattagactccaccggggacg

SEQ ID NO: 104943 - DNA, 25 bp, Homo sapien
acagaaccaaggtcgccgaggagaa

SEQ ID NO: 104944 - DNA, 25 bp, Homo sapien
acagaaccaaggacgccgaggagaa

SEQ ID NO: 104945 - DNA, 25 bp, Homo sapien
gtcaagtcaaggtccagtatgtgca

SEQ ID NO: 104946 - DNA, 25 bp, Homo sapien
gtcaagtcaaggaccagtatgtgca

SEQ ID NO: 104947 - DNA, 25 bp, Homo sapien
cgccactccaggacgcggaggcgaa

SEQ ID NO: 104948 - DNA, 25 bp, Homo sapien
cgccactccaggtcgcggaggcgaa

SEQ ID NO: 104949 - DNA, 25 bp, Homo sapien
cggagttcccggtccttctggaccg

SEQ ID NO: 104950 - DNA, 25 bp, Homo sapien
cggagttcccggaccttctggaccg

SEQ ID NO: 104951 - DNA, 25 bp, Homo sapien
ctggtacttccgtggctcctggtgg

SEQ ID NO: 104952 - DNA, 25 bp, Homo sapien
ctggtacttccgaggctcctggtgg

SEQ ID NO: 104953 - DNA, 25 bp, Homo sapien
aaggtgtcggtgtgagcccttgacc

SEQ ID NO: 104954 - DNA, 25 bp, Homo sapien
aaggtgtcggtgagagcccttgacc

SEQ ID NO: 104955 - DNA, 25 bp, Homo sapien
ctggtcccggggagtcacttggacc

SEQ ID NO: 104956 - DNA, 25 bp, Homo sapien
ctggtcccggggtgtcacttggacc

SEQ ID NO: 104957 - DNA, 25 bp, Homo sapien
ccgaagtccgggtgaacaacttgtc

SEQ ID NO: 104958 - DNA, 25 bp, Homo sapien
ccgaagtccgggagaacaacttgtc

SEQ ID NO: 104959 - DNA, 25 bp, Homo sapien
caggaccgacccaaagacccggtcg

SEQ ID NO: 104960 - DNA, 25 bp, Homo sapien
caggaccgaccctaagacccggtcg

SEQ ID NO: 104961 - DNA, 25 bp, Homo sapien
ttaaggtctctccaagactcacctt

SEQ ID NO: 104962 - DNA, 25 bp, Homo sapien
ttaaggtctctcgaagactcacctt

SEQ ID NO: 104963 - DNA, 25 bp, Homo sapien
gttaagagtcccaagaagactctat

SEQ ID NO: 104964 - DNA, 25 bp, Homo sapien
gttaagagtccctagaagactctat

SEQ ID NO: 104965 - DNA, 25 bp, Homo sapien
gtctgtgtccctttacaccgaccga

SEQ ID NO: 104966 - DNA, 25 bp, Homo sapien
gtctgtgtccctatacaccgaccga

SEQ ID NO: 104967 - DNA, 25 bp, Homo sapien
gattctgtttcgtgatcgaacataa

SEQ ID NO: 104968 - DNA, 25 bp, Homo sapien
gattctgtttcgagatcgaacataa

SEQ ID NO: 104969 - DNA, 25 bp, Homo sapien
tgtctctgtgccagaagactttcaa

SEQ ID NO: 104970 - DNA, 25 bp, Homo sapien
tgtctctgtgcctgaagactttcaa

SEQ ID NO: 104971 - DNA, 25 bp, Homo sapien
cgtcccctgtcgtgttggacgagac

SEQ ID NO: 104972 - DNA, 25 bp, Homo sapien
cgtcccctgtcgagttggacgagac

SEQ ID NO: 104973 - DNA, 25 bp, Homo sapien
ccaggcgaccgtggactaggacaga

SEQ ID NO: 104974 - DNA, 25 bp, Homo sapien
ccaggcgaccgtcgactaggacaga

SEQ ID NO: 104975 - DNA, 25 bp, Homo sapien
accgagtcgtcgtccaacctgcaga

SEQ ID NO: 104976 - DNA, 25 bp, Homo sapien
accgagtcgtcgaccaacctgcaga

SEQ ID NO: 104977 - DNA, 25 bp, Homo sapien
tgtaaaacatcttctttgaccgaag

SEQ ID NO: 104978 - DNA, 25 bp, Homo sapien
tgtaaaacatctactttgaccgaag

SEQ ID NO: 104979 - DNA, 25 bp, Homo sapien
atgcatagtacaccagtgccgtcgc

SEQ ID NO: 104980 - DNA, 25 bp, Homo sapien
atgcatagtacagcagtgccgtcgc

SEQ ID NO: 104981 - DNA, 25 bp, Homo sapien
gacttacagttttagacttgtctcc

SEQ ID NO: 104982 - DNA, 25 bp, Homo sapien
gacttacagtttaagacttgtctcc

SEQ ID NO: 104983 - DNA, 25 bp, Homo sapien
tatcgtctcgactccgagagggtcc

SEQ ID NO: 104984 - DNA, 25 bp, Homo sapien
tatcgtctcgacaccgagagggtcc

SEQ ID NO: 104985 - DNA, 25 bp, Homo sapien
ttctagagtccatttgttaatgttc

SEQ ID NO: 104986 - DNA, 25 bp, Homo sapien
ttctagagtccaattgttaatgttc

SEQ ID NO: 104987 - DNA, 25 bp, Homo sapien
cagtccgaacgtagttaccggtgtc

SEQ ID NO: 104988 - DNA, 25 bp, Homo sapien
cagtccgaacgttgttaccggtgtc

SEQ ID NO: 104989 - DNA, 25 bp, Homo sapien
ttcgagtcagggtttgtccaggtct

SEQ ID NO: 104990 - DNA, 25 bp, Homo sapien
ttcgagtcagggattgtccaggtct

SEQ ID NO: 104991 - DNA, 25 bp, Homo sapien
tgtgccagaccttgtgtcacgaatt

SEQ ID NO: 104992 - DNA, 25 bp, Homo sapien
tgtgccagacctagtgtcacgaatt

SEQ ID NO: 104993 - DNA, 25 bp, Homo sapien
aaattaccctctcataaagatctgt

SEQ ID NO: 104994 - DNA, 25 bp, Homo sapien
aaattaccctctgataaagatctgt

SEQ ID NO: 104995 - DNA, 25 bp, Homo sapien
gaaaactcatctggaatttacttag

SEQ ID NO: 104996 - DNA, 25 bp, Homo sapien
gaaaactcatctcgaatttacttag

SEQ ID NO: 104997 - DNA, 25 bp, Homo sapien
gagtaaatcttattcccttatttgt

SEQ ID NO: 104998 - DNA, 25 bp, Homo sapien
gagtaaatcttaatcccttatttgt

SEQ ID NO: 104999 - DNA, 25 bp, Homo sapien
gtgaattgtccctcgggtgtaaatg

SEQ ID NO: 105000 - DNA, 25 bp, Homo sapien
gtgaattgtcccacgggtgtaaatg

SEQ ID NO: 105001 - DNA, 25 bp, Homo sapien
ttcaatagtccctcattgacaggta

SEQ ID NO: 105002 - DNA, 25 bp, Homo sapien
ttcaatagtcccacattgacaggta

SEQ ID NO: 105003 - DNA, 25 bp, Homo sapien
gcctagatcccgaagataatcggca

SEQ ID NO: 105004 - DNA, 25 bp, Homo sapien
gcctagatcccgtagataatcggca

SEQ ID NO: 105005 - DNA, 25 bp, Homo sapien
gcgcgggtcccagtgaacacagcga

SEQ ID NO: 105006 - DNA, 25 bp, Homo sapien
gcgcgggtcccactgaacacagcga

SEQ ID NO: 105007 - DNA, 25 bp, Homo sapien
agttcaagtaccaatggggaccgaa

SEQ ID NO: 105008 - DNA, 25 bp, Homo sapien
agttcaagtacctatggggaccgaa

SEQ ID NO: 105009 - DNA, 25 bp, Homo sapien
tattgaagatctctaagtggtccaa

SEQ ID NO: 105010 - DNA, 25 bp, Homo sapien
tattgaagatctgtaagtggtccaa

SEQ ID NO: 105011 - DNA, 25 bp, Homo sapien
tggaacatttgtaagtcgatccaca

SEQ ID NO: 105012 - DNA, 25 bp, Homo sapien
tggaacatttgttagtcgatccaca

SEQ ID NO: 105013 - DNA, 25 bp, Homo sapien
ccgaagagataatagtgatcctaga

SEQ ID NO: 105014 - DNA, 25 bp, Homo sapien
ccgaagagataaaagtgatcctaga

SEQ ID NO: 105015 - DNA, 25 bp, Homo sapien
cggtggagagtaatgggtcctacat

SEQ ID NO: 105016 - DNA, 25 bp, Homo sapien
cggtggagagtattgggtcctacat

SEQ ID NO: 105017 - DNA, 25 bp, Homo sapien
tataaagagacttttagttagttca

SEQ ID NO: 105018 - DNA, 25 bp, Homo sapien
tataaagagactattagttagttca

SEQ ID NO: 105019 - DNA, 25 bp, Homo sapien
aaaaagagacgtagtcaatattcct

SEQ ID NO: 105020 - DNA, 25 bp, Homo sapien
aaaaagagacgttgtcaatattcct

SEQ ID NO: 105021 - DNA, 25 bp, Homo sapien
agggggtctttgtcctcttagtcac

SEQ ID NO: 105022 - DNA, 25 bp, Homo sapien
agggggtctttgacctcttagtcac

SEQ ID NO: 105023 - DNA, 25 bp, Homo sapien
tagggcgacacgtgccgctactgcc

SEQ ID NO: 105024 - DNA, 25 bp, Homo sapien
tagggcgacacgagccgctactgcc

SEQ ID NO: 105025 - DNA, 25 bp, Homo sapien
agcgccaccgtagtcttgtctgctc

SEQ ID NO: 105026 - DNA, 25 bp, Homo sapien
agcgccaccgtactcttgtctgctc

SEQ ID NO: 105027 - DNA, 25 bp, Homo sapien
gacccgttggtactcctcacgtttc

SEQ ID NO: 105028 - DNA, 25 bp, Homo sapien
gacccgttggtagtcctcacgtttc

SEQ ID NO: 105029 - DNA, 25 bp, Homo sapien
gatctgtttctcgtcacaggttata

SEQ ID NO: 105030 - DNA, 25 bp, Homo sapien
gatctgtttctcctcacaggttata

SEQ ID NO: 105031 - DNA, 25 bp, Homo sapien
gtaatccgttctaccacgttcttca

SEQ ID NO: 105032 - DNA, 25 bp, Homo sapien
gtaatccgttcttccacgttcttca

SEQ ID NO: 105033 - DNA, 25 bp, Homo sapien
gtcttggtttgcaacttagttcagt

SEQ ID NO: 105034 - DNA, 25 bp, Homo sapien
gtcttggtttgctacttagttcagt

SEQ ID NO: 105035 - DNA, 25 bp, Homo sapien
tatactagggggtcaaggacccgtt

SEQ ID NO: 105036 - DNA, 25 bp, Homo sapien
tatactagggggacaaggacccgtt

SEQ ID NO: 105037 - DNA, 25 bp, Homo sapien
tcagacaggggattccttcggccgg

SEQ ID NO: 105038 - DNA, 25 bp, Homo sapien
tcagacaggggaatccttcggccgg

SEQ ID NO: 105039 - DNA, 25 bp, Homo sapien
catcaagaggagtaacttgaacttg

SEQ ID NO: 105040 - DNA, 25 bp, Homo sapien
catcaagaggagaaacttgaacttg

SEQ ID NO: 105041 - DNA, 25 bp, Homo sapien
aaccagatgggaggttgtgatccgt

SEQ ID NO: 105042 - DNA, 25 bp, Homo sapien
aaccagatgggacgttgtgatccgt

SEQ ID NO: 105043 - DNA, 25 bp, Homo sapien
agaaccccgggtaagataccatcat

SEQ ID NO: 105044 - DNA, 25 bp, Homo sapien
agaaccccgggttagataccatcat

SEQ ID NO: 105045 - DNA, 25 bp, Homo sapien
tggaacccctcaatggacacttcac

SEQ ID NO: 105046 - DNA, 25 bp, Homo sapien
tggaacccctcattggacacttcac

SEQ ID NO: 105047 - DNA, 25 bp, Homo sapien
ggagtagccccagaagaccgttcag

SEQ ID NO: 105048 - DNA, 25 bp, Homo sapien
ggagtagccccacaagaccgttcag

SEQ ID NO: 105049 - DNA, 25 bp, Homo sapien
aagaagccacactcctgtctttcag

SEQ ID NO: 105050 - DNA, 25 bp, Homo sapien
aagaagccacacacctgtctttcag

SEQ ID NO: 105051 - DNA, 25 bp, Homo sapien
tacggaaccctactaaggttttgtc

SEQ ID NO: 105052 - DNA, 25 bp, Homo sapien
tacggaaccctagtaaggttttgtc

SEQ ID NO: 105053 - DNA, 25 bp, Homo sapien
gtaggtccctaatataagttctccc

SEQ ID NO: 105054 - DNA, 25 bp, Homo sapien
gtaggtccctaaaataagttctccc

SEQ ID NO: 105055 - DNA, 25 bp, Homo sapien
gagaggaccctcaatgggctaacct

SEQ ID NO: 105056 - DNA, 25 bp, Homo sapien
gagaggaccctctatgggctaacct

SEQ ID NO: 105057 - DNA, 25 bp, Homo sapien
tcggagttctcgtgtcggtttaccc

SEQ ID NO: 105058 - DNA, 25 bp, Homo sapien
tcggagttctcgagtcggtttaccc

SEQ ID NO: 105059 - DNA, 25 bp, Homo sapien
tgaagtgtgtcgtgggtcactcgga

SEQ ID NO: 105060 - DNA, 25 bp, Homo sapien
tgaagtgtgtcgagggtcactcgga

SEQ ID NO: 105061 - DNA, 25 bp, Homo sapien
cgaagttcgttgtgtcgccgtagtt

SEQ ID NO: 105062 - DNA, 25 bp, Homo sapien
cgaagttcgttgagtcgccgtagtt

SEQ ID NO: 105063 - DNA, 25 bp, Homo sapien
tggtaaggtggttttctacctctat

SEQ ID NO: 105064 - DNA, 25 bp, Homo sapien
tggtaaggtggtattctacctctat

SEQ ID NO: 105065 - DNA, 25 bp, Homo sapien
acgtgggtacgtcttatcgacgagt

SEQ ID NO: 105066 - DNA, 25 bp, Homo sapien
acgtgggtacgtgttatcgacgagt

SEQ ID NO: 105067 - DNA, 25 bp, Homo sapien
ctataggacacggactccgtccacg

SEQ ID NO: 105068 - DNA, 25 bp, Homo sapien
ctataggacacgcactccgtccacg

SEQ ID NO: 105069 - DNA, 25 bp, Homo sapien
ggcttatggtcactgtcctacttag

SEQ ID NO: 105070 - DNA, 25 bp, Homo sapien
ggcttatggtcagtgtcctacttag

SEQ ID NO: 105071 - DNA, 25 bp, Homo sapien
cagtaacgagttgttcgactatgat

SEQ ID NO: 105072 - DNA, 25 bp, Homo sapien
cagtaacgagttcttcgactatgat

SEQ ID NO: 105073 - DNA, 25 bp, Homo sapien
tctataagcctatagggcagactac

SEQ ID NO: 105074 - DNA, 25 bp, Homo sapien
tctataagcctaaagggcagactac

SEQ ID NO: 105075 - DNA, 25 bp, Homo sapien
ctgtgacgccgtcaggacgaataga

SEQ ID NO: 105076 - DNA, 25 bp, Homo sapien
ctgtgacgccgtgaggacgaataga

SEQ ID NO: 105077 - DNA, 25 bp, Homo sapien
gtagtgacccgctcgcgcgagagac

SEQ ID NO: 105078 - DNA, 25 bp, Homo sapien
gtagtgacccgcacgcgcgagagac

SEQ ID NO: 105079 - DNA, 25 bp, Homo sapien
cgtagtgaacaaggtcgtcggaacc

SEQ ID NO: 105080 - DNA, 25 bp, Homo sapien
cgtagtgaacaacgtcgtcggaacc

SEQ ID NO: 105081 - DNA, 25 bp, Homo sapien
cggttgtggcgtgacacgtgtattc

SEQ ID NO: 105082 - DNA, 25 bp, Homo sapien
cggttgtggcgtcacacgtgtattc

SEQ ID NO: 105083 - DNA, 25 bp, Homo sapien
agtaggaatcgcggcatttagttag

SEQ ID NO: 105084 - DNA, 25 bp, Homo sapien
agtaggaatcgccgcatttagttag

SEQ ID NO: 105085 - DNA, 25 bp, Homo sapien
tggtcggtcgatagttgagcgcggg

SEQ ID NO: 105086 - DNA, 25 bp, Homo sapien
tggtcggtcgattgttgagcgcggg

SEQ ID NO: 105087 - DNA, 25 bp, Homo sapien
tcggataagtgtctttgacccaggt

SEQ ID NO: 105088 - DNA, 25 bp, Homo sapien
tcggataagtgtgtttgacccaggt

SEQ ID NO: 105089 - DNA, 25 bp, Homo sapien
ccgggagtccctacttggccgaggt

SEQ ID NO: 105090 - DNA, 25 bp, Homo sapien
ccgggagtcccttcttggccgaggt

SEQ ID NO: 105091 - DNA, 25 bp, Homo sapien
gaggggcccgtctccgagacgacgg

SEQ ID NO: 105092 - DNA, 25 bp, Homo sapien
gaggggcccgtcaccgagacgacgg

SEQ ID NO: 105093 - DNA, 25 bp, Homo sapien
gggtgacacctcttgacgtgcgaac

SEQ ID NO: 105094 - DNA, 25 bp, Homo sapien
gggtgacacctcatgacgtgcgaac

SEQ ID NO: 105095 - DNA, 25 bp, Homo sapien
gtaggagtacctcatgtctgtggat

SEQ ID NO: 105096 - DNA, 25 bp, Homo sapien
gtaggagtacctgatgtctgtggat

SEQ ID NO: 105097 - DNA, 25 bp, Homo sapien
tggtgtagacctacgtcgccggcga

SEQ ID NO: 105098 - DNA, 25 bp, Homo sapien
tggtgtagaccttcgtcgccggcga

SEQ ID NO: 105099 - DNA, 25 bp, Homo sapien
agtggtccgtgcactaccaccggct

SEQ ID NO: 105100 - DNA, 25 bp, Homo sapien
agtggtccgtgctctaccaccggct

SEQ ID NO: 105101 - DNA, 25 bp, Homo sapien
aggtgtccgaactcgagtctccgga

SEQ ID NO: 105102 - DNA, 25 bp, Homo sapien
aggtgtccgaacacgagtctccgga

SEQ ID NO: 105103 - DNA, 25 bp, Homo sapien
aaggttcagtgtacagtacaaccat

SEQ ID NO: 105104 - DNA, 25 bp, Homo sapien
aaggttcagtgttcagtacaaccat

SEQ ID NO: 105105 - DNA, 25 bp, Homo sapien
agacatgtcaggtcgacgtgaatcc

SEQ ID NO: 105106 - DNA, 25 bp, Homo sapien
agacatgtcaggacgacgtgaatcc

SEQ ID NO: 105107 - DNA, 25 bp, Homo sapien
ttagatattcagatgtccttgtttc

SEQ ID NO: 105108 - DNA, 25 bp, Homo sapien
ttagatattcagttgtccttgtttc

SEQ ID NO: 105109 - DNA, 25 bp, Homo sapien
agaatatgtagaaaaaccctgtttc

SEQ ID NO: 105110 - DNA, 25 bp, Homo sapien
agaatatgtagataaaccctgtttc

SEQ ID NO: 105111 - DNA, 25 bp, Homo sapien
agttataaatgagtgtccaagttcc

SEQ ID NO: 105112 - DNA, 25 bp, Homo sapien
agttataaatgactgtccaagttcc

SEQ ID NO: 105113 - DNA, 25 bp, Homo sapien
tcataaataaggttcgtttgtgcac

SEQ ID NO: 105114 - DNA, 25 bp, Homo sapien
tcataaataaggatcgtttgtgcac

SEQ ID NO: 105115 - DNA, 25 bp, Homo sapien
aggataagtccgtctctgtctttcc

SEQ ID NO: 105116 - DNA, 25 bp, Homo sapien
aggataagtccgactctgtctttcc

SEQ ID NO: 105117 - DNA, 25 bp, Homo sapien
agggatcgtccgtcgtcaactttcc

SEQ ID NO: 105118 - DNA, 25 bp, Homo sapien
agggatcgtccgacgtcaactttcc

SEQ ID NO: 105119 - DNA, 25 bp, Homo sapien
ctcgtcgtcgagaagaacgtcctca

SEQ ID NO: 105120 - DNA, 25 bp, Homo sapien
ctcgtcgtcgagtagaacgtcctca

SEQ ID NO: 105121 - DNA, 25 bp, Homo sapien
ctcgtgtctggctgtcataggtaag

SEQ ID NO: 105122 - DNA, 25 bp, Homo sapien
ctcgtgtctggcagtcataggtaag

SEQ ID NO: 105123 - DNA, 25 bp, Homo sapien
ccgacgactggaacccagagtagag

SEQ ID NO: 105124 - DNA, 25 bp, Homo sapien
ccgacgactggatcccagagtagag

SEQ ID NO: 105125 - DNA, 25 bp, Homo sapien
ccgcgtcacgcgaccacgaggagat

SEQ ID NO: 105126 - DNA, 25 bp, Homo sapien
ccgcgtcacgcgtccacgaggagat

SEQ ID NO: 105127 - DNA, 25 bp, Homo sapien
cggagtaaggaccttcggagtagtt

SEQ ID NO: 105128 - DNA, 25 bp, Homo sapien
cggagtaaggacgttcggagtagtt

SEQ ID NO: 105129 - DNA, 25 bp, Homo sapien
tcgtcgggtcaagtgtcccgggtcc

SEQ ID NO: 105130 - DNA, 25 bp, Homo sapien
tcgtcgggtcaactgtcccgggtcc

SEQ ID NO: 105131 - DNA, 25 bp, Homo sapien
ctcgggttagagtccctcggtcttc

SEQ ID NO: 105132 - DNA, 25 bp, Homo sapien
ctcgggttagagaccctcggtcttc

SEQ ID NO: 105133 - DNA, 25 bp, Homo sapien
gtctcttgagaggtcacactccaaa

SEQ ID NO: 105134 - DNA, 25 bp, Homo sapien
gtctcttgagagctcacactccaaa

SEQ ID NO: 105135 - DNA, 25 bp, Homo sapien
ttacttctaggagaacccgacggac

SEQ ID NO: 105136 - DNA, 25 bp, Homo sapien
ttacttctaggacaacccgacggac

SEQ ID NO: 105137 - DNA, 25 bp, Homo sapien
agttgtgctccagaaccacgtcaac

SEQ ID NO: 105138 - DNA, 25 bp, Homo sapien
agttgtgctccacaaccacgtcaac

SEQ ID NO: 105139 - DNA, 25 bp, Homo sapien
cagtgccttatgtcgactgtcagag

SEQ ID NO: 105140 - DNA, 25 bp, Homo sapien
cagtgccttatgacgactgtcagag

SEQ ID NO: 105141 - DNA, 25 bp, Homo sapien
gagactgacctcttacctcggggga

SEQ ID NO: 105142 - DNA, 25 bp, Homo sapien
gagactgacctcatacctcggggga

SEQ ID NO: 105143 - DNA, 25 bp, Homo sapien
cgtaactgtcctcatcaaggaaagg

SEQ ID NO: 105144 - DNA, 25 bp, Homo sapien
cgtaactgtcctgatcaaggaaagg

SEQ ID NO: 105145 - DNA, 25 bp, Homo sapien
gtgggttcttcctcgacctactggg

SEQ ID NO: 105146 - DNA, 25 bp, Homo sapien
gtgggttcttccacgacctactggg

SEQ ID NO: 105147 - DNA, 25 bp, Homo sapien
ggggttctcccgaaagaccacagtt

SEQ ID NO: 105148 - DNA, 25 bp, Homo sapien
ggggttctcccgtaagaccacagtt

SEQ ID NO: 105149 - DNA, 25 bp, Homo sapien
ctatgactcccgatgtcccgtccac

SEQ ID NO: 105150 - DNA, 25 bp, Homo sapien
ctatgactcccgttgtcccgtccac

SEQ ID NO: 105151 - DNA, 25 bp, Homo sapien
tagtataagtctggtcggagaacac

SEQ ID NO: 105152 - DNA, 25 bp, Homo sapien
tagtataagtctcgtcggagaacac

SEQ ID NO: 105153 - DNA, 25 bp, Homo sapien
gacacctttacatcgacggaaaccg

SEQ ID NO: 105154 - DNA, 25 bp, Homo sapien
gacacctttacaacgacggaaaccg

SEQ ID NO: 105155 - DNA, 25 bp, Homo sapien
tgacagcccacttcgaagaactcta

SEQ ID NO: 105156 - DNA, 25 bp, Homo sapien
tgacagcccactacgaagaactcta

SEQ ID NO: 105157 - DNA, 25 bp, Homo sapien
tttagaccttactgcaagagtatca

SEQ ID NO: 105158 - DNA, 25 bp, Homo sapien
tttagaccttacagcaagagtatca

SEQ ID NO: 105159 - DNA, 25 bp, Homo sapien
tacaagttgagtcacaaaatattcg

SEQ ID NO: 105160 - DNA, 25 bp, Homo sapien
tacaagttgagtgacaaaatattcg

SEQ ID NO: 105161 - DNA, 25 bp, Homo sapien
agacaagtgaacgaaactggtcttc

SEQ ID NO: 105162 - DNA, 25 bp, Homo sapien
agacaagtgaaccaaactggtcttc

SEQ ID NO: 105163 - DNA, 25 bp, Homo sapien
tccacgtcggccaagatccgttcta

SEQ ID NO: 105164 - DNA, 25 bp, Homo sapien
tccacgtcggcctagatccgttcta

SEQ ID NO: 105165 - DNA, 25 bp, Homo sapien
cccgttgacaaactctctgactacg

SEQ ID NO: 105166 - DNA, 25 bp, Homo sapien
cccgttgacaaagtctctgactacg

SEQ ID NO: 105167 - DNA, 25 bp, Homo sapien
agtcgaagaacgaccgcggcggcac

SEQ ID NO: 105168 - DNA, 25 bp, Homo sapien
agtcgaagaacgtccgcggcggcac

SEQ ID NO: 105169 - DNA, 25 bp, Homo sapien
tggtaccagaagttcgaagaccaaa

SEQ ID NO: 105170 - DNA, 25 bp, Homo sapien
tggtaccagaagatcgaagaccaaa

SEQ ID NO: 105171 - DNA, 25 bp, Homo sapien
agagacaagactctggaacacaaac

SEQ ID NO: 105172 - DNA, 25 bp, Homo sapien
agagacaagactgtggaacacaaac

SEQ ID NO: 105173 - DNA, 25 bp, Homo sapien
cctagaacatttgtgatgactaata

SEQ ID NO: 105174 - DNA, 25 bp, Homo sapien
cctagaacatttctgatgactaata

SEQ ID NO: 105175 - DNA, 25 bp, Homo sapien
tcttccaacgaaacggtaaaccaga

SEQ ID NO: 105176 - DNA, 25 bp, Homo sapien
tcttccaacgaatcggtaaaccaga

SEQ ID NO: 105177 - DNA, 25 bp, Homo sapien
tttctaaaagtctgagaaccagtat

SEQ ID NO: 105178 - DNA, 25 bp, Homo sapien
tttctaaaagtcagagaaccagtat

SEQ ID NO: 105179 - DNA, 25 bp, Homo sapien
acctaccgacacaggacactcagtg

SEQ ID NO: 105180 - DNA, 25 bp, Homo sapien
acctaccgacactggacactcagtg

SEQ ID NO: 105181 - DNA, 25 bp, Homo sapien
tcaaatcaggatacccgaatagtag

SEQ ID NO: 105182 - DNA, 25 bp, Homo sapien
tcaaatcaggattcccgaatagtag

SEQ ID NO: 105183 - DNA, 25 bp, Homo sapien
acacctagtctgttgacggtggtta

SEQ ID NO: 105184 - DNA, 25 bp, Homo sapien
acacctagtctgatgacggtggtta

SEQ ID NO: 105185 - DNA, 25 bp, Homo sapien
tctcagatactggtcacgatgaatc

SEQ ID NO: 105186 - DNA, 25 bp, Homo sapien
tctcagatactgctcacgatgaatc

SEQ ID NO: 105187 - DNA, 25 bp, Homo sapien
tcaagaaccactcagagcgtatacc

SEQ ID NO: 105188 - DNA, 25 bp, Homo sapien
tcaagaaccactgagagcgtatacc

SEQ ID NO: 105189 - DNA, 25 bp, Homo sapien
taaagtacggtcgtcagtgtacacc

SEQ ID NO: 105190 - DNA, 25 bp, Homo sapien
taaagtacggtcctcagtgtacacc

SEQ ID NO: 105191 - DNA, 25 bp, Homo sapien
aggtcagacgtttcgggacctcgct

SEQ ID NO: 105192 - DNA, 25 bp, Homo sapien
aggtcagacgttacgggacctcgct

SEQ ID NO: 105193 - DNA, 25 bp, Homo sapien
gtacctcatttcgtggacgtctctc

SEQ ID NO: 105194 - DNA, 25 bp, Homo sapien
gtacctcatttcctggacgtctctc

SEQ ID NO: 105195 - DNA, 25 bp, Homo sapien
tctttatttcggttagtactgtccg

SEQ ID NO: 105196 - DNA, 25 bp, Homo sapien
tctttatttcggatagtactgtccg

SEQ ID NO: 105197 - DNA, 25 bp, Homo sapien
gatgatcgttgtgactagttgtcac

SEQ ID NO: 105198 - DNA, 25 bp, Homo sapien
gatgatcgttgtcactagttgtcac

SEQ ID NO: 105199 - DNA, 25 bp, Homo sapien
atactccagggtaacgggagcgtta

SEQ ID NO: 105200 - DNA, 25 bp, Homo sapien
atactccagggttacgggagcgtta

SEQ ID NO: 105201 - DNA, 25 bp, Homo sapien
cgagttagcaggtgcagctagagaa

SEQ ID NO: 105202 - DNA, 25 bp, Homo sapien
cgagttagcaggagcagctagagaa

SEQ ID NO: 105203 - DNA, 25 bp, Homo sapien
ggtctgcagttcgacagtcagaaga

SEQ ID NO: 105204 - DNA, 25 bp, Homo sapien
ggtctgcagttccacagtcagaaga

SEQ ID NO: 105205 - DNA, 25 bp, Homo sapien
tgttacctacggtcactaaccagga

SEQ ID NO: 105206 - DNA, 25 bp, Homo sapien
tgttacctacggacactaaccagga

SEQ ID NO: 105207 - DNA, 25 bp, Homo sapien
gtcaatagcgttatggacgtaacga

SEQ ID NO: 105208 - DNA, 25 bp, Homo sapien
gtcaatagcgttttggacgtaacga

SEQ ID NO: 105209 - DNA, 25 bp, Homo sapien
gccaaagactgttcttgtagagtga

SEQ ID NO: 105210 - DNA, 25 bp, Homo sapien
gccaaagactgtacttgtagagtga

SEQ ID NO: 105211 - DNA, 25 bp, Homo sapien
taccagcggtttgtctaagtaggta

SEQ ID NO: 105212 - DNA, 25 bp, Homo sapien
taccagcggtttctctaagtaggta

SEQ ID NO: 105213 - DNA, 25 bp, Homo sapien
agaagacgacaggacacacgggact

SEQ ID NO: 105214 - DNA, 25 bp, Homo sapien
agaagacgacagcacacacgggact

SEQ ID NO: 105215 - DNA, 25 bp, Homo sapien
tcctgggaccacaggtccacactga

SEQ ID NO: 105216 - DNA, 25 bp, Homo sapien
tcctgggaccactggtccacactga

SEQ ID NO: 105217 - DNA, 25 bp, Homo sapien
tgcgtctgggcgtgttactcaccga

SEQ ID NO: 105218 - DNA, 25 bp, Homo sapien
tgcgtctgggcgagttactcaccga

SEQ ID NO: 105219 - DNA, 25 bp, Homo sapien
cggttaggttccaatctccgtagtg

SEQ ID NO: 105220 - DNA, 25 bp, Homo sapien
cggttaggttcctatctccgtagtg

SEQ ID NO: 105221 - DNA, 25 bp, Homo sapien
aggttgaggtaacctcatcactaga

SEQ ID NO: 105222 - DNA, 25 bp, Homo sapien
aggttgaggtaagctcatcactaga

SEQ ID NO: 105223 - DNA, 25 bp, Homo sapien
aagtcttccagaagcctttacaacg

SEQ ID NO: 105224 - DNA, 25 bp, Homo sapien
aagtcttccagatgcctttacaacg

SEQ ID NO: 105225 - DNA, 25 bp, Homo sapien
acctaagatggttgactttacagac

SEQ ID NO: 105226 - DNA, 25 bp, Homo sapien
acctaagatggtagactttacagac

SEQ ID NO: 105227 - DNA, 25 bp, Homo sapien
tatgtaagtggtacccgacactacg

SEQ ID NO: 105228 - DNA, 25 bp, Homo sapien
tatgtaagtggttcccgacactacg

SEQ ID NO: 105229 - DNA, 25 bp, Homo sapien
caagtttataggaacattacgacta

SEQ ID NO: 105230 - DNA, 25 bp, Homo sapien
caagtttataggtacattacgacta

SEQ ID NO: 105231 - DNA, 25 bp, Homo sapien
atcacaaaactaggtcccatgtaag

SEQ ID NO: 105232 - DNA, 25 bp, Homo sapien
atcacaaaactacgtcccatgtaag

SEQ ID NO: 105233 - DNA, 25 bp, Homo sapien
gggttatttgtaacccttctgtatc

SEQ ID NO: 105234 - DNA, 25 bp, Homo sapien
gggttatttgtatcccttctgtatc

SEQ ID NO: 105235 - DNA, 25 bp, Homo sapien
ggtttgtcgttggaggattcttacc

SEQ ID NO: 105236 - DNA, 25 bp, Homo sapien
ggtttgtcgttgcaggattcttacc

SEQ ID NO: 105237 - DNA, 25 bp, Homo sapien
cgttcccgtccgtactctggagact

SEQ ID NO: 105238 - DNA, 25 bp, Homo sapien
cgttcccgtccgaactctggagact

SEQ ID NO: 105239 - DNA, 25 bp, Homo sapien
cgaagttccctcgtagtctctttgc

SEQ ID NO: 105240 - DNA, 25 bp, Homo sapien
cgaagttccctcctagtctctttgc

SEQ ID NO: 105241 - DNA, 25 bp, Homo sapien
ggcgaccagaaccagcacctggcgt

SEQ ID NO: 105242 - DNA, 25 bp, Homo sapien
ggcgaccagaacgagcacctggcgt

SEQ ID NO: 105243 - DNA, 25 bp, Homo sapien
gactcacgggtatgagacccgttcc

SEQ ID NO: 105244 - DNA, 25 bp, Homo sapien
gactcacgggtaagagacccgttcc

SEQ ID NO: 105245 - DNA, 25 bp, Homo sapien
agaagaagtgaaagacgaaactcct

SEQ ID NO: 105246 - DNA, 25 bp, Homo sapien
agaagaagtgaatgacgaaactcct

SEQ ID NO: 105247 - DNA, 25 bp, Homo sapien
gccgaagtccgcaccagaacattac

SEQ ID NO: 105248 - DNA, 25 bp, Homo sapien
gccgaagtccgctccagaacattac

SEQ ID NO: 105249 - DNA, 25 bp, Homo sapien
atcaatgtcggtttccgataaatta

SEQ ID NO: 105250 - DNA, 25 bp, Homo sapien
atcaatgtcggtatccgataaatta

SEQ ID NO: 105251 - DNA, 25 bp, Homo sapien
tatgtctcgttaaggacaacgtttg

SEQ ID NO: 105252 - DNA, 25 bp, Homo sapien
tatgtctcgttatggacaacgtttg

SEQ ID NO: 105253 - DNA, 25 bp, Homo sapien
atactgtattcacttacaaggtacc

SEQ ID NO: 105254 - DNA, 25 bp, Homo sapien
atactgtattcagttacaaggtacc

SEQ ID NO: 105255 - DNA, 25 bp, Homo sapien
cagtacttcgaccctttcaagattc

SEQ ID NO: 105256 - DNA, 25 bp, Homo sapien
cagtacttcgacgctttcaagattc

SEQ ID NO: 105257 - DNA, 25 bp, Homo sapien
tgtagattgtaccatttcaaaacac

SEQ ID NO: 105258 - DNA, 25 bp, Homo sapien
tgtagattgtacgatttcaaaacac

SEQ ID NO: 105259 - DNA, 25 bp, Homo sapien
cgttcgattgaaatattctctgaaa

SEQ ID NO: 105260 - DNA, 25 bp, Homo sapien
cgttcgattgaattattctctgaaa

SEQ ID NO: 105261 - DNA, 25 bp, Homo sapien
ctccgacttctttattttttatgct

SEQ ID NO: 105262 - DNA, 25 bp, Homo sapien
ctccgacttcttaattttttatgct

SEQ ID NO: 105263 - DNA, 25 bp, Homo sapien
cgttataatgaattttgtctctctg

SEQ ID NO: 105264 - DNA, 25 bp, Homo sapien
cgttataatgaaatttgtctctctg

SEQ ID NO: 105265 - DNA, 25 bp, Homo sapien
actaaaggcaagtatttgtcgtacg

SEQ ID NO: 105266 - DNA, 25 bp, Homo sapien
actaaaggcaagaatttgtcgtacg

SEQ ID NO: 105267 - DNA, 25 bp, Homo sapien
agagaagtgacagaacgttcggtcc

SEQ ID NO: 105268 - DNA, 25 bp, Homo sapien
agagaagtgacacaacgttcggtcc

SEQ ID NO: 105269 - DNA, 25 bp, Homo sapien
agtaatgactcacaacactcggttc

SEQ ID NO: 105270 - DNA, 25 bp, Homo sapien
agtaatgactcagaacactcggttc

SEQ ID NO: 105271 - DNA, 25 bp, Homo sapien
ggtaatccacctgaacctcctcgtt

SEQ ID NO: 105272 - DNA, 25 bp, Homo sapien
ggtaatccacctcaacctcctcgtt

SEQ ID NO: 105273 - DNA, 25 bp, Homo sapien
tcggtgtccagatgaacctcccagt

SEQ ID NO: 105274 - DNA, 25 bp, Homo sapien
tcggtgtccagaagaacctcccagt

SEQ ID NO: 105275 - DNA, 25 bp, Homo sapien
catgtcagtcacgaggttccactac

SEQ ID NO: 105276 - DNA, 25 bp, Homo sapien
catgtcagtcaccaggttccactac

SEQ ID NO: 105277 - DNA, 25 bp, Homo sapien
atttggtacagtgtggaccgtcact

SEQ ID NO: 105278 - DNA, 25 bp, Homo sapien
atttggtacagtctggaccgtcact

SEQ ID NO: 105279 - DNA, 25 bp, Homo sapien
tccgaagactaaagttgaacctaga

SEQ ID NO: 105280 - DNA, 25 bp, Homo sapien
tccgaagactaatgttgaacctaga

SEQ ID NO: 105281 - DNA, 25 bp, Homo sapien
ccaaggtgtaggatgacacgttaag

SEQ ID NO: 105282 - DNA, 25 bp, Homo sapien
ccaaggtgtaggttgacacgttaag

SEQ ID NO: 105283 - DNA, 25 bp, Homo sapien
ttaaatcttagtgctgtacacaaag

SEQ ID NO: 105284 - DNA, 25 bp, Homo sapien
ttaaatcttagtcctgtacacaaag

SEQ ID NO: 105285 - DNA, 25 bp, Homo sapien
tgtccttctggtgactcggacaaga

SEQ ID NO: 105286 - DNA, 25 bp, Homo sapien
tgtccttctggtcactcggacaaga

SEQ ID NO: 105287 - DNA, 25 bp, Homo sapien
tcactacgttattttgacgacagaa

SEQ ID NO: 105288 - DNA, 25 bp, Homo sapien
tcactacgttatattgacgacagaa

SEQ ID NO: 105289 - DNA, 25 bp, Homo sapien
cacgatattacagttgtagtcctaa

SEQ ID NO: 105290 - DNA, 25 bp, Homo sapien
cacgatattacacttgtagtcctaa

SEQ ID NO: 105291 - DNA, 25 bp, Homo sapien
cattagaagagacacttgtcgtagt

SEQ ID NO: 105292 - DNA, 25 bp, Homo sapien
cattagaagagagacttgtcgtagt

SEQ ID NO: 105293 - DNA, 25 bp, Homo sapien
taggagacatacaaaggacgcctta

SEQ ID NO: 105294 - DNA, 25 bp, Homo sapien
taggagacatactaaggacgcctta

SEQ ID NO: 105295 - DNA, 25 bp, Homo sapien
ctaggacacaacgtcaagaccccgg

SEQ ID NO: 105296 - DNA, 25 bp, Homo sapien
ctaggacacaacctcaagaccccgg

SEQ ID NO: 105297 - DNA, 25 bp, Homo sapien
ttgtggaaagatataacgtgtcacc

SEQ ID NO: 105298 - DNA, 25 bp, Homo sapien
ttgtggaaagatttaacgtgtcacc

SEQ ID NO: 105299 - DNA, 25 bp, Homo sapien
aataaaaataacagtcagtcgtaac

SEQ ID NO: 105300 - DNA, 25 bp, Homo sapien
aataaaaataactgtcagtcgtaac

SEQ ID NO: 105301 - DNA, 25 bp, Homo sapien
tttggaataaatactccagggtaac

SEQ ID NO: 105302 - DNA, 25 bp, Homo sapien
tttggaataaattctccagggtaac

SEQ ID NO: 105303 - DNA, 25 bp, Homo sapien
ttggaagactaaggtaccctggacc

SEQ ID NO: 105304 - DNA, 25 bp, Homo sapien
ttggaagactaacgtaccctggacc

SEQ ID NO: 105305 - DNA, 25 bp, Homo sapien
agtgacaagaaaacggttctgtgcc

SEQ ID NO: 105306 - DNA, 25 bp, Homo sapien
agtgacaagaaatcggttctgtgcc

SEQ ID NO: 105307 - DNA, 25 bp, Homo sapien
atgacaagaagttcggttctacccc

SEQ ID NO: 105308 - DNA, 25 bp, Homo sapien
atgacaagaagtacggttctacccc

SEQ ID NO: 105309 - DNA, 25 bp, Homo sapien
ttagctctctcgtttacgtcgctcc

SEQ ID NO: 105310 - DNA, 25 bp, Homo sapien
ttagctctctcgattacgtcgctcc

SEQ ID NO: 105311 - DNA, 25 bp, Homo sapien
tcggagatggtcatgtgtctctgtc

SEQ ID NO: 105312 - DNA, 25 bp, Homo sapien
tcggagatggtcttgtgtctctgtc

SEQ ID NO: 105313 - DNA, 25 bp, Homo sapien
tctctggtcttcgttgtgttctggg

SEQ ID NO: 105314 - DNA, 25 bp, Homo sapien
tctctggtcttccttgtgttctggg

SEQ ID NO: 105315 - DNA, 25 bp, Homo sapien
cactccggacttcactccttttgga

SEQ ID NO: 105316 - DNA, 25 bp, Homo sapien
cactccggacttgactccttttgga

SEQ ID NO: 105317 - DNA, 25 bp, Homo sapien
ggagtagtagtaacctcgacttggg

SEQ ID NO: 105318 - DNA, 25 bp, Homo sapien
ggagtagtagtatcctcgacttggg

SEQ ID NO: 105319 - DNA, 25 bp, Homo sapien
ctgaagtgaacgtacactcttatac

SEQ ID NO: 105320 - DNA, 25 bp, Homo sapien
ctgaagtgaacgaacactcttatac

SEQ ID NO: 105321 - DNA, 25 bp, Homo sapien
gtatgttaatgacgtcccttgacat

SEQ ID NO: 105322 - DNA, 25 bp, Homo sapien
gtatgttaatgaggtcccttgacat

SEQ ID NO: 105323 - DNA, 25 bp, Homo sapien
gggtgagacttgtcccttacatact

SEQ ID NO: 105324 - DNA, 25 bp, Homo sapien
gggtgagacttgacccttacatact

SEQ ID NO: 105325 - DNA, 25 bp, Homo sapien
tgagtgttgtcctgcctgtttcctt

SEQ ID NO: 105326 - DNA, 25 bp, Homo sapien
tgagtgttgtccagcctgtttcctt

SEQ ID NO: 105327 - DNA, 25 bp, Homo sapien
cgggtttccctcataatgtctctct

SEQ ID NO: 105328 - DNA, 25 bp, Homo sapien
cgggtttccctcttaatgtctctct

SEQ ID NO: 105329 - DNA, 25 bp, Homo sapien
cagggtgaaacactattaaatcttt

SEQ ID NO: 105330 - DNA, 25 bp, Homo sapien
cagggtgaaacagtattaaatcttt

SEQ ID NO: 105331 - DNA, 25 bp, Homo sapien
gggaaacgatcatttccatattcgt

SEQ ID NO: 105332 - DNA, 25 bp, Homo sapien
gggaaacgatcaattccatattcgt

SEQ ID NO: 105333 - DNA, 25 bp, Homo sapien
acgactaccacactccagtctaggt

SEQ ID NO: 105334 - DNA, 25 bp, Homo sapien
acgactaccacagtccagtctaggt

SEQ ID NO: 105335 - DNA, 25 bp, Homo sapien
gaactaccggacgtcacgagataga

SEQ ID NO: 105336 - DNA, 25 bp, Homo sapien
gaactaccggacctcacgagataga

SEQ ID NO: 105337 - DNA, 25 bp, Homo sapien
aacacggacgggtactcggactcac

SEQ ID NO: 105338 - DNA, 25 bp, Homo sapien
aacacggacgggaactcggactcac

SEQ ID NO: 105339 - DNA, 25 bp, Homo sapien
gagctcaggggtacaacgactccat

SEQ ID NO: 105340 - DNA, 25 bp, Homo sapien
gagctcaggggttcaacgactccat

SEQ ID NO: 105341 - DNA, 25 bp, Homo sapien
aagatccaccggtgtcaagttccga

SEQ ID NO: 105342 - DNA, 25 bp, Homo sapien
aagatccaccggagtcaagttccga

SEQ ID NO: 105343 - DNA, 25 bp, Homo sapien
cttgcaccgacaatccatcgtagaa

SEQ ID NO: 105344 - DNA, 25 bp, Homo sapien
cttgcaccgacattccatcgtagaa

SEQ ID NO: 105345 - DNA, 25 bp, Homo sapien
cttgaaataacatcgcctatgtgaa

SEQ ID NO: 105346 - DNA, 25 bp, Homo sapien
cttgaaataacaacgcctatgtgaa

SEQ ID NO: 105347 - DNA, 25 bp, Homo sapien
gagcctacagctctcagacgtaggg

SEQ ID NO: 105348 - DNA, 25 bp, Homo sapien
gagcctacagctgtcagacgtaggg

SEQ ID NO: 105349 - DNA, 25 bp, Homo sapien
gacggcggcgacgaccgaggacggg

SEQ ID NO: 105350 - DNA, 25 bp, Homo sapien
gacggcggcgaccaccgaggacggg

SEQ ID NO: 105351 - DNA, 25 bp, Homo sapien
tgtcgagacccaggacctctgcggg

SEQ ID NO: 105352 - DNA, 25 bp, Homo sapien
tgtcgagacccacgacctctgcggg

SEQ ID NO: 105353 - DNA, 25 bp, Homo sapien
gagaacgtctcacagactcgggccg

SEQ ID NO: 105354 - DNA, 25 bp, Homo sapien
gagaacgtctcagagactcgggccg

SEQ ID NO: 105355 - DNA, 25 bp, Homo sapien
cgaaggagaggatactccccgggcc

SEQ ID NO: 105356 - DNA, 25 bp, Homo sapien
cgaaggagaggaaactccccgggcc

SEQ ID NO: 105357 - DNA, 25 bp, Homo sapien
ggggttcctcgacaccgaagtaccg

SEQ ID NO: 105358 - DNA, 25 bp, Homo sapien
ggggttcctcgagaccgaagtaccg

SEQ ID NO: 105359 - DNA, 25 bp, Homo sapien
agggggtcccctgatctacttataa

SEQ ID NO: 105360 - DNA, 25 bp, Homo sapien
agggggtcccctcatctacttataa

SEQ ID NO: 105361 - DNA, 25 bp, Homo sapien
tgtgctctattcgactgatatatgt

SEQ ID NO: 105362 - DNA, 25 bp, Homo sapien
tgtgctctattccactgatatatgt

SEQ ID NO: 105363 - DNA, 25 bp, Homo sapien
gtgacgtaaagtcacactaatcttt

SEQ ID NO: 105364 - DNA, 25 bp, Homo sapien
gtgacgtaaagtgacactaatcttt

SEQ ID NO: 105365 - DNA, 25 bp, Homo sapien
gactactctacagtgacactttttg

SEQ ID NO: 105366 - DNA, 25 bp, Homo sapien
gactactctacactgacactttttg

SEQ ID NO: 105367 - DNA, 25 bp, Homo sapien
accttcactgcttcctgcggtacgg

SEQ ID NO: 105368 - DNA, 25 bp, Homo sapien
accttcactgctacctgcggtacgg

SEQ ID NO: 105369 - DNA, 25 bp, Homo sapien
tatcatagacccttcctgtggagtt

SEQ ID NO: 105370 - DNA, 25 bp, Homo sapien
tatcatagacccatcctgtggagtt

SEQ ID NO: 105371 - DNA, 25 bp, Homo sapien
ttcaacacctcgaagtcttggtggt

SEQ ID NO: 105372 - DNA, 25 bp, Homo sapien
ttcaacacctcgtagtcttggtggt

SEQ ID NO: 105373 - DNA, 25 bp, Homo sapien
tgtctaaatgtatgtctcttgtgac

SEQ ID NO: 105374 - DNA, 25 bp, Homo sapien
tgtctaaatgtaagtctcttgtgac

SEQ ID NO: 105375 - DNA, 25 bp, Homo sapien
tgggtcttcaattcatctttcggac

SEQ ID NO: 105376 - DNA, 25 bp, Homo sapien
tgggtcttcaatacatctttcggac

SEQ ID NO: 105377 - DNA, 25 bp, Homo sapien
cgagttttcggttcggattatggac

SEQ ID NO: 105378 - DNA, 25 bp, Homo sapien
cgagttttcggtacggattatggac

SEQ ID NO: 105379 - DNA, 25 bp, Homo sapien
gagaattttcctagtgtttctttac

SEQ ID NO: 105380 - DNA, 25 bp, Homo sapien
gagaattttccttgtgtttctttac

SEQ ID NO: 105381 - DNA, 25 bp, Homo sapien
gaggatccctttcgttctattctcc

SEQ ID NO: 105382 - DNA, 25 bp, Homo sapien
gaggatccctttggttctattctcc

SEQ ID NO: 105383 - DNA, 25 bp, Homo sapien
gtgatgtctctttggggcttctttg

SEQ ID NO: 105384 - DNA, 25 bp, Homo sapien
gtgatgtctcttaggggcttctttg

SEQ ID NO: 105385 - DNA, 25 bp, Homo sapien
gatatcggtctcagggtccttccaa

SEQ ID NO: 105386 - DNA, 25 bp, Homo sapien
gatatcggtctctgggtccttccaa

SEQ ID NO: 105387 - DNA, 25 bp, Homo sapien
cggttgtgttcttggtcttttacca

SEQ ID NO: 105388 - DNA, 25 bp, Homo sapien
cggttgtgttctaggtcttttacca

SEQ ID NO: 105389 - DNA, 25 bp, Homo sapien
gtggtaagtcttgttctctctcctc

SEQ ID NO: 105390 - DNA, 25 bp, Homo sapien
gtggtaagtcttcttctctctcctc

SEQ ID NO: 105391 - DNA, 25 bp, Homo sapien
gtcagttactgtagtatcttcttca

SEQ ID NO: 105392 - DNA, 25 bp, Homo sapien
gtcagttactgttgtatcttcttca

SEQ ID NO: 105393 - DNA, 25 bp, Homo sapien
tgtcgtgtttgatgtgtcccttcag

SEQ ID NO: 105394 - DNA, 25 bp, Homo sapien
tgtcgtgtttgaagtgtcccttcag

SEQ ID NO: 105395 - DNA, 25 bp, Homo sapien
ccgatcatagaaggtgccgttctag

SEQ ID NO: 105396 - DNA, 25 bp, Homo sapien
ccgatcatagaacgtgccgttctag

SEQ ID NO: 105397 - DNA, 25 bp, Homo sapien
ggtcgaaggatacgaaaccgtatta

SEQ ID NO: 105398 - DNA, 25 bp, Homo sapien
ggtcgaaggataggaaaccgtatta

SEQ ID NO: 105399 - DNA, 25 bp, Homo sapien
ccacccgaagaggtcccgtcgtttc

SEQ ID NO: 105400 - DNA, 25 bp, Homo sapien
ccacccgaagagctcccgtcgtttc

SEQ ID NO: 105401 - DNA, 25 bp, Homo sapien
ccgaacgtagaggacaaggtttgta

SEQ ID NO: 105402 - DNA, 25 bp, Homo sapien
ccgaacgtagagcacaaggtttgta

SEQ ID NO: 105403 - DNA, 25 bp, Homo sapien
aaagaactgacaccggtagtggtac

SEQ ID NO: 105404 - DNA, 25 bp, Homo sapien
aaagaactgacagcggtagtggtac

SEQ ID NO: 105405 - DNA, 25 bp, Homo sapien
ccaaaggacggaacgggttataggt

SEQ ID NO: 105406 - DNA, 25 bp, Homo sapien
ccaaaggacggatcgggttataggt

SEQ ID NO: 105407 - DNA, 25 bp, Homo sapien
ctaaaacgaaggaagacttgatcta

SEQ ID NO: 105408 - DNA, 25 bp, Homo sapien
ctaaaacgaaggtagacttgatcta

SEQ ID NO: 105409 - DNA, 25 bp, Homo sapien
tcgtaaaatgatgatactcttgttc

SEQ ID NO: 105410 - DNA, 25 bp, Homo sapien
tcgtaaaatgatcatactcttgttc

SEQ ID NO: 105411 - DNA, 25 bp, Homo sapien
tgagacatatgacatcacagtataa

SEQ ID NO: 105412 - DNA, 25 bp, Homo sapien
tgagacatatgagatcacagtataa

SEQ ID NO: 105413 - DNA, 25 bp, Homo sapien
gactagactagagacattaatatca

SEQ ID NO: 105414 - DNA, 25 bp, Homo sapien
gactagactagacacattaatatca

SEQ ID NO: 105415 - DNA, 25 bp, Homo sapien
acccagtaaaaggtgtgttactacg

SEQ ID NO: 105416 - DNA, 25 bp, Homo sapien
acccagtaaaagctgtgttactacg

SEQ ID NO: 105417 - DNA, 25 bp, Homo sapien
tacacgaaaatatccttgtgttagg

SEQ ID NO: 105418 - DNA, 25 bp, Homo sapien
tacacgaaaataaccttgtgttagg

SEQ ID NO: 105419 - DNA, 25 bp, Homo sapien
gactttagaatactcatcgtatggg

SEQ ID NO: 105420 - DNA, 25 bp, Homo sapien
gactttagaatagtcatcgtatggg

SEQ ID NO: 105421 - DNA, 25 bp, Homo sapien
ctccgaggatacgtccgtcgatggg

SEQ ID NO: 105422 - DNA, 25 bp, Homo sapien
ctccgaggatacctccgtcgatggg

SEQ ID NO: 105423 - DNA, 25 bp, Homo sapien
cgaggggtctcacacgtccgtctgg

SEQ ID NO: 105424 - DNA, 25 bp, Homo sapien
cgaggggtctcagacgtccgtctgg

SEQ ID NO: 105425 - DNA, 25 bp, Homo sapien
tgggacggtccagacttcacgtcag

SEQ ID NO: 105426 - DNA, 25 bp, Homo sapien
tgggacggtccacacttcacgtcag

SEQ ID NO: 105427 - DNA, 25 bp, Homo sapien
gaaacgcgctaaactaccctgtcac

SEQ ID NO: 105428 - DNA, 25 bp, Homo sapien
gaaacgcgctaatctaccctgtcac

SEQ ID NO: 105429 - DNA, 25 bp, Homo sapien
gataaacgacggaacacctccgtcc

SEQ ID NO: 105430 - DNA, 25 bp, Homo sapien
gataaacgacggtacacctccgtcc

SEQ ID NO: 105431 - DNA, 25 bp, Homo sapien
gactagtcccggtccctgacgtgag

SEQ ID NO: 105432 - DNA, 25 bp, Homo sapien
gactagtcccggaccctgacgtgag

SEQ ID NO: 105433 - DNA, 25 bp, Homo sapien
gttacgtcccgaacccttaagtcga

SEQ ID NO: 105434 - DNA, 25 bp, Homo sapien
gttacgtcccgatcccttaagtcga

SEQ ID NO: 105435 - DNA, 25 bp, Homo sapien
tggagacgctttactctagccgtag

SEQ ID NO: 105436 - DNA, 25 bp, Homo sapien
tggagacgcttttctctagccgtag

SEQ ID NO: 105437 - DNA, 25 bp, Homo sapien
ggcgtaccattactacagtatctcg

SEQ ID NO: 105438 - DNA, 25 bp, Homo sapien
ggcgtaccattagtacagtatctcg

SEQ ID NO: 105439 - DNA, 25 bp, Homo sapien
attatatagagacacggggtccccc

SEQ ID NO: 105440 - DNA, 25 bp, Homo sapien
attatatagagagacggggtccccc

SEQ ID NO: 105441 - DNA, 25 bp, Homo sapien
agtacattccgctgtgaacccgacc

SEQ ID NO: 105442 - DNA, 25 bp, Homo sapien
agtacattccgcagtgaacccgacc

SEQ ID NO: 105443 - DNA, 25 bp, Homo sapien
gttaaacatctgcttgggttcctcc

SEQ ID NO: 105444 - DNA, 25 bp, Homo sapien
gttaaacatctggttgggttcctcc

SEQ ID NO: 105445 - DNA, 25 bp, Homo sapien
agaaatgtcgtgtttgatgtgtccc

SEQ ID NO: 105446 - DNA, 25 bp, Homo sapien
agaaatgtcgtgattgatgtgtccc

SEQ ID NO: 105447 - DNA, 25 bp, Homo sapien
ccacaaaaatctgtgaagagtcctt

SEQ ID NO: 105448 - DNA, 25 bp, Homo sapien
ccacaaaaatctctgaagagtcctt

SEQ ID NO: 105449 - DNA, 25 bp, Homo sapien
agagacaatttaacaattatacctt

SEQ ID NO: 105450 - DNA, 25 bp, Homo sapien
agagacaatttatcaattatacctt

SEQ ID NO: 105451 - DNA, 25 bp, Homo sapien
acaaaacttcttcgaggacaccgac

SEQ ID NO: 105452 - DNA, 25 bp, Homo sapien
acaaaacttcttggaggacaccgac

SEQ ID NO: 105453 - DNA, 25 bp, Homo sapien
ataaaaacttttggatagttccacg

SEQ ID NO: 105454 - DNA, 25 bp, Homo sapien
ataaaaacttttcgatagttccacg

SEQ ID NO: 105455 - DNA, 25 bp, Homo sapien
gaaaaagatacttggggatccactg

SEQ ID NO: 105456 - DNA, 25 bp, Homo sapien
gaaaaagatactaggggatccactg

SEQ ID NO: 105457 - DNA, 25 bp, Homo sapien
aaagagtgtgacggtggagaccaag

SEQ ID NO: 105458 - DNA, 25 bp, Homo sapien
aaagagtgtgaccgtggagaccaag

SEQ ID NO: 105459 - DNA, 25 bp, Homo sapien
gactcctttgcgacagtgaccgacc

SEQ ID NO: 105460 - DNA, 25 bp, Homo sapien
gactcctttgcgtcagtgaccgacc

SEQ ID NO: 105461 - DNA, 25 bp, Homo sapien
ggacccacgtctctgcactaatcaa

SEQ ID NO: 105462 - DNA, 25 bp, Homo sapien
ggacccacgtctgtgcactaatcaa

SEQ ID NO: 105463 - DNA, 25 bp, Homo sapien
tccagacctgttccagtgaccctgt

SEQ ID NO: 105464 - DNA, 25 bp, Homo sapien
tccagacctgttgcagtgaccctgt

SEQ ID NO: 105465 - DNA, 25 bp, Homo sapien
aactcctgcctgtggacgtgaaagg

SEQ ID NO: 105466 - DNA, 25 bp, Homo sapien
aactcctgcctgaggacgtgaaagg

SEQ ID NO: 105467 - DNA, 25 bp, Homo sapien
cacccggtccggaagtcactgggac

SEQ ID NO: 105468 - DNA, 25 bp, Homo sapien
cacccggtccggtagtcactgggac

SEQ ID NO: 105469 - DNA, 25 bp, Homo sapien
tacccacggtcaagggtcccgggtc

SEQ ID NO: 105470 - DNA, 25 bp, Homo sapien
tacccacggtcatgggtcccgggtc

SEQ ID NO: 105471 - DNA, 25 bp, Homo sapien
gccactttatgtactaaccacggtt

SEQ ID NO: 105472 - DNA, 25 bp, Homo sapien
gccactttatgttctaaccacggtt

SEQ ID NO: 105473 - DNA, 25 bp, Homo sapien
tctctcgatatttccgagcacgacc

SEQ ID NO: 105474 - DNA, 25 bp, Homo sapien
tctctcgatattaccgagcacgacc

SEQ ID NO: 105475 - DNA, 25 bp, Homo sapien
tttccgtacaactgccgtggtgcct

SEQ ID NO: 105476 - DNA, 25 bp, Homo sapien
tttccgtacaacagccgtggtgcct

SEQ ID NO: 105477 - DNA, 25 bp, Homo sapien
ttcgcgacccgcaagcagagactcg

SEQ ID NO: 105478 - DNA, 25 bp, Homo sapien
ttcgcgacccgctagcagagactcg

SEQ ID NO: 105479 - DNA, 25 bp, Homo sapien
ttgacgaacgcctaccgaggacagt

SEQ ID NO: 105480 - DNA, 25 bp, Homo sapien
ttgacgaacgccaaccgaggacagt

SEQ ID NO: 105481 - DNA, 25 bp, Homo sapien
cactagtcatgttgacgaaactgaa

SEQ ID NO: 105482 - DNA, 25 bp, Homo sapien
cactagtcatgtagacgaaactgaa

SEQ ID NO: 105483 - DNA, 25 bp, Homo sapien
atccagtttattgtacgaaattata

SEQ ID NO: 105484 - DNA, 25 bp, Homo sapien
atccagtttattctacgaaattata

SEQ ID NO: 105485 - DNA, 25 bp, Homo sapien
ttttgttaaatcaaggtgtctcaac

SEQ ID NO: 105486 - DNA, 25 bp, Homo sapien
ttttgttaaatctaggtgtctcaac

SEQ ID NO: 105487 - DNA, 25 bp, Homo sapien
tttacagtcgaagtagtgtactaca

SEQ ID NO: 105488 - DNA, 25 bp, Homo sapien
tttacagtcgaactagtgtactaca

SEQ ID NO: 105489 - DNA, 25 bp, Homo sapien
ttacatcatagtgacgtcgaagtat

SEQ ID NO: 105490 - DNA, 25 bp, Homo sapien
ttacatcatagtcacgtcgaagtat

SEQ ID NO: 105491 - DNA, 25 bp, Homo sapien
tgatccgagtcctttatcgacggta

SEQ ID NO: 105492 - DNA, 25 bp, Homo sapien
tgatccgagtccattatcgacggta

SEQ ID NO: 105493 - DNA, 25 bp, Homo sapien
gatgtcatctacctataacgtgttg

SEQ ID NO: 105494 - DNA, 25 bp, Homo sapien
gatgtcatctacgtataacgtgttg

SEQ ID NO: 105495 - DNA, 25 bp, Homo sapien
ctgtgacgatcttaccaatgtttac

SEQ ID NO: 105496 - DNA, 25 bp, Homo sapien
ctgtgacgatctaaccaatgtttac

SEQ ID NO: 105497 - DNA, 25 bp, Homo sapien
tcttatcgaaagtcacaagtgtctt

SEQ ID NO: 105498 - DNA, 25 bp, Homo sapien
tcttatcgaaagacacaagtgtctt

SEQ ID NO: 105499 - DNA, 25 bp, Homo sapien
ggtctttgatatcttccactgttat

SEQ ID NO: 105500 - DNA, 25 bp, Homo sapien
ggtctttgatatgttccactgttat

SEQ ID NO: 105501 - DNA, 25 bp, Homo sapien
acttccatacgtatttgccagaagt

SEQ ID NO: 105502 - DNA, 25 bp, Homo sapien
acttccatacgtttttgccagaagt

SEQ ID NO: 105503 - DNA, 25 bp, Homo sapien
gtcttcatatccactgccggtatat

SEQ ID NO: 105504 - DNA, 25 bp, Homo sapien
gtcttcatatcctctgccggtatat

SEQ ID NO: 105505 - DNA, 25 bp, Homo sapien
gacaaaagtcggtttgaacggaact

SEQ ID NO: 105506 - DNA, 25 bp, Homo sapien
gacaaaagtcggattgaacggaact

SEQ ID NO: 105507 - DNA, 25 bp, Homo sapien
gagagagtcagcactcaggacggaa

SEQ ID NO: 105508 - DNA, 25 bp, Homo sapien
gagagagtcagctctcaggacggaa

SEQ ID NO: 105509 - DNA, 25 bp, Homo sapien
agttgtggttacctcggtgacgaaa

SEQ ID NO: 105510 - DNA, 25 bp, Homo sapien
agttgtggttacgtcggtgacgaaa

SEQ ID NO: 105511 - DNA, 25 bp, Homo sapien
cattgtcagacagtggaccgataga

SEQ ID NO: 105512 - DNA, 25 bp, Homo sapien
cattgtcagacactggaccgataga

SEQ ID NO: 105513 - DNA, 25 bp, Homo sapien
ctcccgtcggagtcgctgagcctaa

SEQ ID NO: 105514 - DNA, 25 bp, Homo sapien
ctcccgtcggagacgctgagcctaa

SEQ ID NO: 105515 - DNA, 25 bp, Homo sapien
gacccgtgtaacacttcattcgata

SEQ ID NO: 105516 - DNA, 25 bp, Homo sapien
gacccgtgtaactcttcattcgata

SEQ ID NO: 105517 - DNA, 25 bp, Homo sapien
aaaaggactatttccgacccgacga

SEQ ID NO: 105518 - DNA, 25 bp, Homo sapien
aaaaggactattaccgacccgacga

SEQ ID NO: 105519 - DNA, 25 bp, Homo sapien
accatgaacagtgagggccggtgta

SEQ ID NO: 105520 - DNA, 25 bp, Homo sapien
accatgaacagtcagggccggtgta

SEQ ID NO: 105521 - DNA, 25 bp, Homo sapien
tgtcgagacctcaggacccgggacg

SEQ ID NO: 105522 - DNA, 25 bp, Homo sapien
tgtcgagacctctggacccgggacg

SEQ ID NO: 105523 - DNA, 25 bp, Homo sapien
caagcacggaacaccgcaaagaagc

SEQ ID NO: 105524 - DNA, 25 bp, Homo sapien
caagcacggaactccgcaaagaagc

SEQ ID NO: 105525 - DNA, 25 bp, Homo sapien
aaggtgaatcctacgtcaaagaggg

SEQ ID NO: 105526 - DNA, 25 bp, Homo sapien
aaggtgaatccttcgtcaaagaggg

SEQ ID NO: 105527 - DNA, 25 bp, Homo sapien
gacggtctaccttcccgataataat

SEQ ID NO: 105528 - DNA, 25 bp, Homo sapien
gacggtctacctacccgataataat

SEQ ID NO: 105529 - DNA, 25 bp, Homo sapien
gagtctgtctccacgggaggaaact

SEQ ID NO: 105530 - DNA, 25 bp, Homo sapien
gagtctgtctcctcgggaggaaact

SEQ ID NO: 105531 - DNA, 25 bp, Homo sapien
agttctctcgggtgtaggaactcgt

SEQ ID NO: 105532 - DNA, 25 bp, Homo sapien
agttctctcgggagtaggaactcgt

SEQ ID NO: 105533 - DNA, 25 bp, Homo sapien
aatgtcctcgtgactaacggtttct

SEQ ID NO: 105534 - DNA, 25 bp, Homo sapien
aatgtcctcgtgtctaacggtttct

SEQ ID NO: 105535 - DNA, 25 bp, Homo sapien
gataccagggtccacgtcgttactc

SEQ ID NO: 105536 - DNA, 25 bp, Homo sapien
gataccagggtcgacgtcgttactc

SEQ ID NO: 105537 - DNA, 25 bp, Homo sapien
agtggtacaaccggtccgaccagaa

SEQ ID NO: 105538 - DNA, 25 bp, Homo sapien
agtggtacaacccgtccgaccagaa

SEQ ID NO: 105539 - DNA, 25 bp, Homo sapien
attcagagttaacataggaccaaac

SEQ ID NO: 105540 - DNA, 25 bp, Homo sapien
attcagagttaagataggaccaaac

SEQ ID NO: 105541 - DNA, 25 bp, Homo sapien
ttaaggtctttgtaggcctcggagt

SEQ ID NO: 105542 - DNA, 25 bp, Homo sapien
ttaaggtctttgaaggcctcggagt

SEQ ID NO: 105543 - DNA, 25 bp, Homo sapien
ctggaacttccgaggccactagtgt

SEQ ID NO: 105544 - DNA, 25 bp, Homo sapien
ctggaacttccgtggccactagtgt

SEQ ID NO: 105545 - DNA, 25 bp, Homo sapien
tcgtccatccctagtgtccgtgtcg

SEQ ID NO: 105546 - DNA, 25 bp, Homo sapien
tcgtccatcccttgtgtccgtgtcg

SEQ ID NO: 105547 - DNA, 25 bp, Homo sapien
gtttccgtctctttctgcgacgggt

SEQ ID NO: 105548 - DNA, 25 bp, Homo sapien
gtttccgtctctatctgcgacgggt

SEQ ID NO: 105549 - DNA, 25 bp, Homo sapien
cggtcaccctgtggtttgacgtagg

SEQ ID NO: 105550 - DNA, 25 bp, Homo sapien
cggtcaccctgtcgtttgacgtagg

SEQ ID NO: 105551 - DNA, 25 bp, Homo sapien
attatggtttcgatgacttgagtgg

SEQ ID NO: 105552 - DNA, 25 bp, Homo sapien
attatggtttcgttgacttgagtgg

SEQ ID NO: 105553 - DNA, 25 bp, Homo sapien
aagtaattcctctttactttatgag

SEQ ID NO: 105554 - DNA, 25 bp, Homo sapien
aagtaattcctcattactttatgag

SEQ ID NO: 105555 - DNA, 25 bp, Homo sapien
gagattcttcagtagacgtcgggta

SEQ ID NO: 105556 - DNA, 25 bp, Homo sapien
gagattcttcagaagacgtcgggta

SEQ ID NO: 105557 - DNA, 25 bp, Homo sapien
ggagtatttgtgaaggaccacgaac

SEQ ID NO: 105558 - DNA, 25 bp, Homo sapien
ggagtatttgtgtaggaccacgaac

SEQ ID NO: 105559 - DNA, 25 bp, Homo sapien
gtatctaccgggtcacgtccacaac

SEQ ID NO: 105560 - DNA, 25 bp, Homo sapien
gtatctaccgggacacgtccacaac

SEQ ID NO: 105561 - DNA, 25 bp, Homo sapien
ccccgcgtatccaacgtgtagaaat

SEQ ID NO: 105562 - DNA, 25 bp, Homo sapien
ccccgcgtatcctacgtgtagaaat

SEQ ID NO: 105563 - DNA, 25 bp, Homo sapien
ccagcgtcgtaacctttgtgaagag

SEQ ID NO: 105564 - DNA, 25 bp, Homo sapien
ccagcgtcgtaagctttgtgaagag

SEQ ID NO: 105565 - DNA, 25 bp, Homo sapien
tcccacgacgaatcctctttgtggg

SEQ ID NO: 105566 - DNA, 25 bp, Homo sapien
tcccacgacgaaacctctttgtggg

SEQ ID NO: 105567 - DNA, 25 bp, Homo sapien
ttgtcaatggacaaccctctgtggg

SEQ ID NO: 105568 - DNA, 25 bp, Homo sapien
ttgtcaatggactaccctctgtggg

SEQ ID NO: 105569 - DNA, 25 bp, Homo sapien
tcaggaccttggtagaccggtggaa

SEQ ID NO: 105570 - DNA, 25 bp, Homo sapien
tcaggaccttggaagaccggtggaa

SEQ ID NO: 105571 - DNA, 25 bp, Homo sapien
tcagtagcaaggtcgccggtaggcc

SEQ ID NO: 105572 - DNA, 25 bp, Homo sapien
tcagtagcaaggacgccggtaggcc

SEQ ID NO: 105573 - DNA, 25 bp, Homo sapien
ctcagaccaagcaaccgtcggggaa

SEQ ID NO: 105574 - DNA, 25 bp, Homo sapien
ctcagaccaagctaccgtcggggaa

SEQ ID NO: 105575 - DNA, 25 bp, Homo sapien
agtgaatccaggtcccgtagggacc

SEQ ID NO: 105576 - DNA, 25 bp, Homo sapien
agtgaatccaggacccgtagggacc

SEQ ID NO: 105577 - DNA, 25 bp, Homo sapien
tggttgtccgggaactcctgtgagc

SEQ ID NO: 105578 - DNA, 25 bp, Homo sapien
tggttgtccgggtactcctgtgagc

SEQ ID NO: 105579 - DNA, 25 bp, Homo sapien
acaggtgggacgagacccatggacc

SEQ ID NO: 105580 - DNA, 25 bp, Homo sapien
acaggtgggacgtgacccatggacc

SEQ ID NO: 105581 - DNA, 25 bp, Homo sapien
tggtcccggggagtcacttggacct

SEQ ID NO: 105582 - DNA, 25 bp, Homo sapien
tggtcccggggactcacttggacct

SEQ ID NO: 105583 - DNA, 25 bp, Homo sapien
caactactcgggtaaccatcttcgc

SEQ ID NO: 105584 - DNA, 25 bp, Homo sapien
caactactcgggaaaccatcttcgc

SEQ ID NO: 105585 - DNA, 25 bp, Homo sapien
caagactccccgaaagattatgtct

SEQ ID NO: 105586 - DNA, 25 bp, Homo sapien
caagactccccgtaagattatgtct

SEQ ID NO: 105587 - DNA, 25 bp, Homo sapien
ttaagctcctgtcaggactcaagtt

SEQ ID NO: 105588 - DNA, 25 bp, Homo sapien
ttaagctcctgtgaggactcaagtt

SEQ ID NO: 105589 - DNA, 25 bp, Homo sapien
taactagtcctctgagacaattagt

SEQ ID NO: 105590 - DNA, 25 bp, Homo sapien
taactagtcctcagagacaattagt

SEQ ID NO: 105591 - DNA, 25 bp, Homo sapien
agtctatgtccctgaacacagtcca

SEQ ID NO: 105592 - DNA, 25 bp, Homo sapien
agtctatgtcccagaacacagtcca

SEQ ID NO: 105593 - DNA, 25 bp, Homo sapien
gatctctttccgtgttacataaagg

SEQ ID NO: 105594 - DNA, 25 bp, Homo sapien
gatctctttccgagttacataaagg

SEQ ID NO: 105595 - DNA, 25 bp, Homo sapien
tagtctttgccctaggtcttcaagt

SEQ ID NO: 105596 - DNA, 25 bp, Homo sapien
tagtctttgcccaaggtcttcaagt

SEQ ID NO: 105597 - DNA, 25 bp, Homo sapien
gtcttacctgtgtagtttgacagtc

SEQ ID NO: 105598 - DNA, 25 bp, Homo sapien
gtcttacctgtgaagtttgacagtc

SEQ ID NO: 105599 - DNA, 25 bp, Homo sapien
gacgacgacagtgtctagtgacatc

SEQ ID NO: 105600 - DNA, 25 bp, Homo sapien
gacgacgacagtctctagtgacatc

SEQ ID NO: 105601 - DNA, 25 bp, Homo sapien
acgggacgtcgactccctgtgctga

SEQ ID NO: 105602 - DNA, 25 bp, Homo sapien
acgggacgtcgagtccctgtgctga

SEQ ID NO: 105603 - DNA, 25 bp, Homo sapien
ccgacgtatcggacgtgacagagga

SEQ ID NO: 105604 - DNA, 25 bp, Homo sapien
ccgacgtatcggtcgtgacagagga

SEQ ID NO: 105605 - DNA, 25 bp, Homo sapien
taaagacaagaaccagagacatgtc

SEQ ID NO: 105606 - DNA, 25 bp, Homo sapien
taaagacaagaagcagagacatgtc

SEQ ID NO: 105607 - DNA, 25 bp, Homo sapien
tgacagtaagattaaacgtttatcc

SEQ ID NO: 105608 - DNA, 25 bp, Homo sapien
tgacagtaagataaaacgtttatcc

SEQ ID NO: 105609 - DNA, 25 bp, Homo sapien
gtttcgttgaaactagactggtcac

SEQ ID NO: 105610 - DNA, 25 bp, Homo sapien
gtttcgttgaaagtagactggtcac

SEQ ID NO: 105611 - DNA, 25 bp, Homo sapien
tctgagtaccaagtgttaaagtctt

SEQ ID NO: 105612 - DNA, 25 bp, Homo sapien
tctgagtaccaactgttaaagtctt

SEQ ID NO: 105613 - DNA, 25 bp, Homo sapien
tcataccgacggagttccggtagcg

SEQ ID NO: 105614 - DNA, 25 bp, Homo sapien
tcataccgacggtgttccggtagcg

SEQ ID NO: 105615 - DNA, 25 bp, Homo sapien
gttcggtgaagttttgtccagatac

SEQ ID NO: 105616 - DNA, 25 bp, Homo sapien
gttcggtgaagtattgtccagatac

SEQ ID NO: 105617 - DNA, 25 bp, Homo sapien
tgtgacttaaccatggcagattact

SEQ ID NO: 105618 - DNA, 25 bp, Homo sapien
tgtgacttaaccttggcagattact

SEQ ID NO: 105619 - DNA, 25 bp, Homo sapien
atgtatttccctttagaacggtcta

SEQ ID NO: 105620 - DNA, 25 bp, Homo sapien
atgtatttccctatagaacggtcta

SEQ ID NO: 105621 - DNA, 25 bp, Homo sapien
cggaaaatcttcgataatttacttg

SEQ ID NO: 105622 - DNA, 25 bp, Homo sapien
cggaaaatcttccataatttacttg

SEQ ID NO: 105623 - DNA, 25 bp, Homo sapien
gagttaattgttacctcgtttcatg

SEQ ID NO: 105624 - DNA, 25 bp, Homo sapien
gagttaattgtttcctcgtttcatg

SEQ ID NO: 105625 - DNA, 25 bp, Homo sapien
tgtcaattcccgtccggtgaagatg

SEQ ID NO: 105626 - DNA, 25 bp, Homo sapien
tgtcaattcccgaccggtgaagatg

SEQ ID NO: 105627 - DNA, 25 bp, Homo sapien
aaattacgtctcacagttgaagtta

SEQ ID NO: 105628 - DNA, 25 bp, Homo sapien
aaattacgtctctcagttgaagtta

SEQ ID NO: 105629 - DNA, 25 bp, Homo sapien
ccctattccgacaagagtattccca

SEQ ID NO: 105630 - DNA, 25 bp, Homo sapien
ccctattccgactagagtattccca

SEQ ID NO: 105631 - DNA, 25 bp, Homo sapien
ccgatgaccaccaggaagacatcga

SEQ ID NO: 105632 - DNA, 25 bp, Homo sapien
ccgatgaccacctggaagacatcga

SEQ ID NO: 105633 - DNA, 25 bp, Homo sapien
aagactccaacctccggggacctaa

SEQ ID NO: 105634 - DNA, 25 bp, Homo sapien
aagactccaaccaccggggacctaa

SEQ ID NO: 105635 - DNA, 25 bp, Homo sapien
aaggtcccatgtctgagggtccaac

SEQ ID NO: 105636 - DNA, 25 bp, Homo sapien
aaggtcccatgtgtgagggtccaac

SEQ ID NO: 105637 - DNA, 25 bp, Homo sapien
acgggaacatcttaaaggactccaa

SEQ ID NO: 105638 - DNA, 25 bp, Homo sapien
acgggaacatctaaaaggactccaa

SEQ ID NO: 105639 - DNA, 25 bp, Homo sapien
ccacgaagaggtaaaggggtcccga

SEQ ID NO: 105640 - DNA, 25 bp, Homo sapien
ccacgaagaggttaaggggtcccga

SEQ ID NO: 105641 - DNA, 25 bp, Homo sapien
agaggagagtctaagtggctcctga

SEQ ID NO: 105642 - DNA, 25 bp, Homo sapien
agaggagagtcttagtggctcctga

SEQ ID NO: 105643 - DNA, 25 bp, Homo sapien
atgataaaagtttttgtcagttaca

SEQ ID NO: 105644 - DNA, 25 bp, Homo sapien
atgataaaagttattgtcagttaca

SEQ ID NO: 105645 - DNA, 25 bp, Homo sapien
taaaaagagacgtagtcaatattcc

SEQ ID NO: 105646 - DNA, 25 bp, Homo sapien
taaaaagagacgaagtcaatattcc

SEQ ID NO: 105647 - DNA, 25 bp, Homo sapien
ggaagggcatgaggtcccttatcct

SEQ ID NO: 105648 - DNA, 25 bp, Homo sapien
ggaagggcatgacgtcccttatcct

SEQ ID NO: 105649 - DNA, 25 bp, Homo sapien
ctagtggcagtgagccgtcttcgcc

SEQ ID NO: 105650 - DNA, 25 bp, Homo sapien
ctagtggcagtgtgccgtcttcgcc

SEQ ID NO: 105651 - DNA, 25 bp, Homo sapien
gtaggagcaccgtacttgtcttgcc

SEQ ID NO: 105652 - DNA, 25 bp, Homo sapien
gtaggagcaccgaacttgtcttgcc

SEQ ID NO: 105653 - DNA, 25 bp, Homo sapien
tgcccagtaggtctcctcaggttct

SEQ ID NO: 105654 - DNA, 25 bp, Homo sapien
tgcccagtaggtgtcctcaggttct

SEQ ID NO: 105655 - DNA, 25 bp, Homo sapien
gcatagtatttcgtccatgttctat

SEQ ID NO: 105656 - DNA, 25 bp, Homo sapien
gcatagtatttcctccatgttctat

SEQ ID NO: 105657 - DNA, 25 bp, Homo sapien
gacgatgtgttatccccgttcctca

SEQ ID NO: 105658 - DNA, 25 bp, Homo sapien
gacgatgtgttaaccccgttcctca

SEQ ID NO: 105659 - DNA, 25 bp, Homo sapien
gtccttgttaatcctacttgttaat

SEQ ID NO: 105660 - DNA, 25 bp, Homo sapien
gtccttgttaatgctacttgttaat

SEQ ID NO: 105661 - DNA, 25 bp, Homo sapien
tgtctggtcggtttcaaggtttctt

SEQ ID NO: 105662 - DNA, 25 bp, Homo sapien
tgtctggtcggtatcaaggtttctt

SEQ ID NO: 105663 - DNA, 25 bp, Homo sapien
gaagtaaggggcttcctaggtgcca

SEQ ID NO: 105664 - DNA, 25 bp, Homo sapien
gaagtaaggggcatcctaggtgcca

SEQ ID NO: 105665 - DNA, 25 bp, Homo sapien
gaagtccaggggtctctgtgaaccc

SEQ ID NO: 105666 - DNA, 25 bp, Homo sapien
gaagtccaggggactctgtgaaccc

SEQ ID NO: 105667 - DNA, 25 bp, Homo sapien
gacagccaagggtatcggggatcct

SEQ ID NO: 105668 - DNA, 25 bp, Homo sapien
gacagccaagggaatcggggatcct

SEQ ID NO: 105669 - DNA, 25 bp, Homo sapien
tagaaccccgggtaagataccatca

SEQ ID NO: 105670 - DNA, 25 bp, Homo sapien
tagaaccccgggaaagataccatca

SEQ ID NO: 105671 - DNA, 25 bp, Homo sapien
ggacacccttaaactccgaccatga

SEQ ID NO: 105672 - DNA, 25 bp, Homo sapien
ggacacccttaatctccgaccatga

SEQ ID NO: 105673 - DNA, 25 bp, Homo sapien
gcgaagctcccacaagcctcggtag

SEQ ID NO: 105674 - DNA, 25 bp, Homo sapien
gcgaagctcccagaagcctcggtag

SEQ ID NO: 105675 - DNA, 25 bp, Homo sapien
acgcagacccagtccttctctggag

SEQ ID NO: 105676 - DNA, 25 bp, Homo sapien
acgcagacccagaccttctctggag

SEQ ID NO: 105677 - DNA, 25 bp, Homo sapien
gcagacgcctagaacatgtttgttt

SEQ ID NO: 105678 - DNA, 25 bp, Homo sapien
gcagacgcctagtacatgtttgttt

SEQ ID NO: 105679 - DNA, 25 bp, Homo sapien
taaggttcccaatatatgtgttttc

SEQ ID NO: 105680 - DNA, 25 bp, Homo sapien
taaggttcccaaaatatgtgttttc

SEQ ID NO: 105681 - DNA, 25 bp, Homo sapien
taagtgaaccttaatggtgtctttc

SEQ ID NO: 105682 - DNA, 25 bp, Homo sapien
taagtgaacctttatggtgtctttc

SEQ ID NO: 105683 - DNA, 25 bp, Homo sapien
tagggctcgtgttcgggtgctccct

SEQ ID NO: 105684 - DNA, 25 bp, Homo sapien
tagggctcgtgtacgggtgctccct

SEQ ID NO: 105685 - DNA, 25 bp, Homo sapien
cgtgaagttgtcacgggttccacga

SEQ ID NO: 105686 - DNA, 25 bp, Homo sapien
cgtgaagttgtctcgggttccacga

SEQ ID NO: 105687 - DNA, 25 bp, Homo sapien
gggactttcttgtctcgtccgacgg

SEQ ID NO: 105688 - DNA, 25 bp, Homo sapien
gggactttcttgactcgtccgacgg

SEQ ID NO: 105689 - DNA, 25 bp, Homo sapien
gactgagtcgggacgtctaccctgt

SEQ ID NO: 105690 - DNA, 25 bp, Homo sapien
gactgagtcgggtcgtctaccctgt

SEQ ID NO: 105691 - DNA, 25 bp, Homo sapien
acgacgcgagcgatctttcgacgag

SEQ ID NO: 105692 - DNA, 25 bp, Homo sapien
acgacgcgagcgttctttcgacgag

SEQ ID NO: 105693 - DNA, 25 bp, Homo sapien
acgagacgacagtaccactaccgag

SEQ ID NO: 105694 - DNA, 25 bp, Homo sapien
acgagacgacagaaccactaccgag

SEQ ID NO: 105695 - DNA, 25 bp, Homo sapien
tgggctggacacccgtccgtcttag

SEQ ID NO: 105696 - DNA, 25 bp, Homo sapien
tgggctggacacgcgtccgtcttag

SEQ ID NO: 105697 - DNA, 25 bp, Homo sapien
cagaccggtagtaggtacgacttca

SEQ ID NO: 105698 - DNA, 25 bp, Homo sapien
cagaccggtagttggtacgacttca

SEQ ID NO: 105699 - DNA, 25 bp, Homo sapien
tctaaagcctaaaggagacctcagt

SEQ ID NO: 105700 - DNA, 25 bp, Homo sapien
tctaaagcctaatggagacctcagt

SEQ ID NO: 105701 - DNA, 25 bp, Homo sapien
cgtgaactcggtcaggacgacaaag

SEQ ID NO: 105702 - DNA, 25 bp, Homo sapien
cgtgaactcggtgaggacgacaaag

SEQ ID NO: 105703 - DNA, 25 bp, Homo sapien
gtagctacccgcacggacacggacg

SEQ ID NO: 105704 - DNA, 25 bp, Homo sapien
gtagctacccgctcggacacggacg

SEQ ID NO: 105705 - DNA, 25 bp, Homo sapien
gtaacaacgagaggtctcgaaccct

SEQ ID NO: 105706 - DNA, 25 bp, Homo sapien
gtaacaacgagacgtctcgaaccct

SEQ ID NO: 105707 - DNA, 25 bp, Homo sapien
agacttgtcgggttcacgttattct

SEQ ID NO: 105708 - DNA, 25 bp, Homo sapien
agacttgtcgggatcacgttattct

SEQ ID NO: 105709 - DNA, 25 bp, Homo sapien
catagagactggtctcagtaggaat

SEQ ID NO: 105710 - DNA, 25 bp, Homo sapien
catagagactggactcagtaggaat

SEQ ID NO: 105711 - DNA, 25 bp, Homo sapien
cgttgagtagctaactaaatgccgc

SEQ ID NO: 105712 - DNA, 25 bp, Homo sapien
cgttgagtagcttactaaatgccgc

SEQ ID NO: 105713 - DNA, 25 bp, Homo sapien
ttggaaacgtgtatttagaccaaac

SEQ ID NO: 105714 - DNA, 25 bp, Homo sapien
ttggaaacgtgtttttagaccaaac

SEQ ID NO: 105715 - DNA, 25 bp, Homo sapien
ctggggtccctaattgacgtcaaac

SEQ ID NO: 105716 - DNA, 25 bp, Homo sapien
ctggggtccctatttgacgtcaaac

SEQ ID NO: 105717 - DNA, 25 bp, Homo sapien
aggagtcccacctaccgagacggta

SEQ ID NO: 105718 - DNA, 25 bp, Homo sapien
aggagtcccaccaaccgagacggta

SEQ ID NO: 105719 - DNA, 25 bp, Homo sapien
gggggacactccacgcgcacgagta

SEQ ID NO: 105720 - DNA, 25 bp, Homo sapien
gggggacactcctcgcgcacgagta

SEQ ID NO: 105721 - DNA, 25 bp, Homo sapien
gagtgatctctcgtgtctcgtaaac

SEQ ID NO: 105722 - DNA, 25 bp, Homo sapien
gagtgatctctcctgtctcgtaaac

SEQ ID NO: 105723 - DNA, 25 bp, Homo sapien
tgtagttgatctcgtctccgacgga

SEQ ID NO: 105724 - DNA, 25 bp, Homo sapien
tgtagttgatctggtctccgacgga

SEQ ID NO: 105725 - DNA, 25 bp, Homo sapien
tgacgtggtgtcatgtcccgcggct

SEQ ID NO: 105726 - DNA, 25 bp, Homo sapien
tgacgtggtgtcttgtcccgcggct

SEQ ID NO: 105727 - DNA, 25 bp, Homo sapien
gtctcggtacagtcgtgtctcggga

SEQ ID NO: 105728 - DNA, 25 bp, Homo sapien
gtctcggtacagacgtgtctcggga

SEQ ID NO: 105729 - DNA, 25 bp, Homo sapien
tgtcttctatgtactatccagcagt

SEQ ID NO: 105730 - DNA, 25 bp, Homo sapien
tgtcttctatgttctatccagcagt

SEQ ID NO: 105731 - DNA, 25 bp, Homo sapien
agacatgtcacctcagtggacctct

SEQ ID NO: 105732 - DNA, 25 bp, Homo sapien
agacatgtcaccacagtggacctct

SEQ ID NO: 105733 - DNA, 25 bp, Homo sapien
ctgactatttagatgacaggttttc

SEQ ID NO: 105734 - DNA, 25 bp, Homo sapien
ctgactatttagttgacaggttttc

SEQ ID NO: 105735 - DNA, 25 bp, Homo sapien
gaagaaactaaagaccactgtttcg

SEQ ID NO: 105736 - DNA, 25 bp, Homo sapien
gaagaaactaaacaccactgtttcg

SEQ ID NO: 105737 - DNA, 25 bp, Homo sapien
agttataaatgagtgtccaagttcc

SEQ ID NO: 105738 - DNA, 25 bp, Homo sapien
agttataaatgactgtccaagttcc

SEQ ID NO: 105739 - DNA, 25 bp, Homo sapien
tcctaacagtggtgtcgtttgtgcc

SEQ ID NO: 105740 - DNA, 25 bp, Homo sapien
tcctaacagtggagtcgtttgtgcc

SEQ ID NO: 105741 - DNA, 25 bp, Homo sapien
agggatcatccgacggttctgttcc

SEQ ID NO: 105742 - DNA, 25 bp, Homo sapien
agggatcatccgtcggttctgttcc

SEQ ID NO: 105743 - DNA, 25 bp, Homo sapien
gggatcgtccgtcgtcaactttcct

SEQ ID NO: 105744 - DNA, 25 bp, Homo sapien
gggatcgtccgtggtcaactttcct

SEQ ID NO: 105745 - DNA, 25 bp, Homo sapien
tctctcgacggaggaacttcacact

SEQ ID NO: 105746 - DNA, 25 bp, Homo sapien
tctctcgacggacgaacttcacact

SEQ ID NO: 105747 - DNA, 25 bp, Homo sapien
cccgtatactggtgtcatagtgtta

SEQ ID NO: 105748 - DNA, 25 bp, Homo sapien
cccgtatactggagtcatagtgtta

SEQ ID NO: 105749 - DNA, 25 bp, Homo sapien
tcgacgtagaggacgtcaaggtaga

SEQ ID NO: 105750 - DNA, 25 bp, Homo sapien
tcgacgtagaggtcgtcaaggtaga

SEQ ID NO: 105751 - DNA, 25 bp, Homo sapien
gtgtcgtcagaaactcaaggacgat

SEQ ID NO: 105752 - DNA, 25 bp, Homo sapien
gtgtcgtcagaatctcaaggacgat

SEQ ID NO: 105753 - DNA, 25 bp, Homo sapien
gactagtgccgtacggtagtacgtt

SEQ ID NO: 105754 - DNA, 25 bp, Homo sapien
gactagtgccgttcggtagtacgtt

SEQ ID NO: 105755 - DNA, 25 bp, Homo sapien
ttcccgggtcaagtgtttggtgtcc

SEQ ID NO: 105756 - DNA, 25 bp, Homo sapien
ttcccgggtcaactgtttggtgtcc

SEQ ID NO: 105757 - DNA, 25 bp, Homo sapien
ggtcggttgacgtccctcggtcgcc

SEQ ID NO: 105758 - DNA, 25 bp, Homo sapien
ggtcggttgacgaccctcggtcgcc

SEQ ID NO: 105759 - DNA, 25 bp, Homo sapien
ccgtctttgaggaccaccacagaat

SEQ ID NO: 105760 - DNA, 25 bp, Homo sapien
ccgtctttgaggtccaccacagaat

SEQ ID NO: 105761 - DNA, 25 bp, Homo sapien
ttcagtatgagagaacctcacggat

SEQ ID NO: 105762 - DNA, 25 bp, Homo sapien
ttcagtatgagacaacctcacggat

SEQ ID NO: 105763 - DNA, 25 bp, Homo sapien
tcgtgctcgacacgaactcctcgaa

SEQ ID NO: 105764 - DNA, 25 bp, Homo sapien
tcgtgctcgacaggaactcctcgaa

SEQ ID NO: 105765 - DNA, 25 bp, Homo sapien
catgtctgtacaagaacaccgcgaa

SEQ ID NO: 105766 - DNA, 25 bp, Homo sapien
catgtctgtacatgaacaccgcgaa

SEQ ID NO: 105767 - DNA, 25 bp, Homo sapien
acactgtacttccacctgtgaggaa

SEQ ID NO: 105768 - DNA, 25 bp, Homo sapien
acactgtacttcgacctgtgaggaa

SEQ ID NO: 105769 - DNA, 25 bp, Homo sapien
ggacaccgtcctacccaggagagaa

SEQ ID NO: 105770 - DNA, 25 bp, Homo sapien
ggacaccgtccttcccaggagagaa

SEQ ID NO: 105771 - DNA, 25 bp, Homo sapien
gggttggttcttcgttgcctctgga

SEQ ID NO: 105772 - DNA, 25 bp, Homo sapien
gggttggttcttggttgcctctgga

SEQ ID NO: 105773 - DNA, 25 bp, Homo sapien
gtggtttcccggtgaacgtcatatt

SEQ ID NO: 105774 - DNA, 25 bp, Homo sapien
gtggtttcccggagaacgtcatatt

SEQ ID NO: 105775 - DNA, 25 bp, Homo sapien
gtattaccacggtgtccctacctcg

SEQ ID NO: 105776 - DNA, 25 bp, Homo sapien
gtattaccacggagtccctacctcg

SEQ ID NO: 105777 - DNA, 25 bp, Homo sapien
tagtaaagacgtcacgccggacaac

SEQ ID NO: 105778 - DNA, 25 bp, Homo sapien
tagtaaagacgtgacgccggacaac

SEQ ID NO: 105779 - DNA, 25 bp, Homo sapien
gaccgatttctatcgacggtgaata

SEQ ID NO: 105780 - DNA, 25 bp, Homo sapien
gaccgatttctaacgacggtgaata

SEQ ID NO: 105781 - DNA, 25 bp, Homo sapien
tgacagacccaacgaagcaacgagt

SEQ ID NO: 105782 - DNA, 25 bp, Homo sapien
tgacagacccaaggaagcaacgagt

SEQ ID NO: 105783 - DNA, 25 bp, Homo sapien
tcttgtcccacagcaagtacgacca

SEQ ID NO: 105784 - DNA, 25 bp, Homo sapien
tcttgtcccacaccaagtacgacca

SEQ ID NO: 105785 - DNA, 25 bp, Homo sapien
gatacaacttcgtacgaaaaatttg

SEQ ID NO: 105786 - DNA, 25 bp, Homo sapien
gatacaacttcgaacgaaaaatttg

SEQ ID NO: 105787 - DNA, 25 bp, Homo sapien
gatacattcgaacaaagggtcttcg

SEQ ID NO: 105788 - DNA, 25 bp, Homo sapien
gatacattcgaagaaagggtcttcg

SEQ ID NO: 105789 - DNA, 25 bp, Homo sapien
tctcccggtccgaaagcacgtttct

SEQ ID NO: 105790 - DNA, 25 bp, Homo sapien
tctcccggtccgtaagcacgtttct

SEQ ID NO: 105791 - DNA, 25 bp, Homo sapien
ctcctcgtgataggacctcctgatc

SEQ ID NO: 105792 - DNA, 25 bp, Homo sapien
ctcctcgtgatacgacctcctgatc

SEQ ID NO: 105793 - DNA, 25 bp, Homo sapien
cgtcgaagagagaaccacgctggaa

SEQ ID NO: 105794 - DNA, 25 bp, Homo sapien
cgtcgaagagagtaccacgctggaa

SEQ ID NO: 105795 - DNA, 25 bp, Homo sapien
tgataccagaagttcgaagaccaaa

SEQ ID NO: 105796 - DNA, 25 bp, Homo sapien
tgataccagaagatcgaagaccaaa

SEQ ID NO: 105797 - DNA, 25 bp, Homo sapien
taagacacagatcatgggaccattc

SEQ ID NO: 105798 - DNA, 25 bp, Homo sapien
taagacacagatgatgggaccattc

SEQ ID NO: 105799 - DNA, 25 bp, Homo sapien
ctaaaaagtttggtggtgactcatc

SEQ ID NO: 105800 - DNA, 25 bp, Homo sapien
ctaaaaagtttgctggtgactcatc

SEQ ID NO: 105801 - DNA, 25 bp, Homo sapien
ttcacatagtagacggaaacacaat

SEQ ID NO: 105802 - DNA, 25 bp, Homo sapien
ttcacatagtagtcggaaacacaat

SEQ ID NO: 105803 - DNA, 25 bp, Homo sapien
ttctcgaaggatgagaaacacctat

SEQ ID NO: 105804 - DNA, 25 bp, Homo sapien
ttctcgaaggatcagaaacacctat

SEQ ID NO: 105805 - DNA, 25 bp, Homo sapien
ctgtaccgactcaggacacgacggg

SEQ ID NO: 105806 - DNA, 25 bp, Homo sapien
ctgtaccgactctggacacgacggg

SEQ ID NO: 105807 - DNA, 25 bp, Homo sapien
gacaaattaagactcacctaatgtg

SEQ ID NO: 105808 - DNA, 25 bp, Homo sapien
gacaaattaagagtcacctaatgtg

SEQ ID NO: 105809 - DNA, 25 bp, Homo sapien
acaccagtcggttgagcagtgtcag

SEQ ID NO: 105810 - DNA, 25 bp, Homo sapien
acaccagtcggtagagcagtgtcag

SEQ ID NO: 105811 - DNA, 25 bp, Homo sapien
ctcgagactcggtgacctgtaactc

SEQ ID NO: 105812 - DNA, 25 bp, Homo sapien
ctcgagactcggagacctgtaactc

SEQ ID NO: 105813 - DNA, 25 bp, Homo sapien
ctcacacgaccctcgagaggtaatt

SEQ ID NO: 105814 - DNA, 25 bp, Homo sapien
ctcacacgacccacgagaggtaatt

SEQ ID NO: 105815 - DNA, 25 bp, Homo sapien
taacgacatcctgtcaggtagaccg

SEQ ID NO: 105816 - DNA, 25 bp, Homo sapien
taacgacatcctctcaggtagaccg

SEQ ID NO: 105817 - DNA, 25 bp, Homo sapien
gagtcagagttctggggtactgtct

SEQ ID NO: 105818 - DNA, 25 bp, Homo sapien
gagtcagagttcaggggtactgtct

SEQ ID NO: 105819 - DNA, 25 bp, Homo sapien
attcatcatttcatggactcctcgt

SEQ ID NO: 105820 - DNA, 25 bp, Homo sapien
attcatcatttcttggactcctcgt

SEQ ID NO: 105821 - DNA, 25 bp, Homo sapien
tctctctatgttggtattctacccg

SEQ ID NO: 105822 - DNA, 25 bp, Homo sapien
tctctctatgttcgtattctacccg

SEQ ID NO: 105823 - DNA, 25 bp, Homo sapien
ctctatcgtcttgactgtcacgacc

SEQ ID NO: 105824 - DNA, 25 bp, Homo sapien
ctctatcgtcttcactgtcacgacc

SEQ ID NO: 105825 - DNA, 25 bp, Homo sapien
acccacggacgtaaaggtaccatac

SEQ ID NO: 105826 - DNA, 25 bp, Homo sapien
acccacggacgttaaggtaccatac

SEQ ID NO: 105827 - DNA, 25 bp, Homo sapien
acgtctccacggtgaagatcaacac

SEQ ID NO: 105828 - DNA, 25 bp, Homo sapien
acgtctccacggagaagatcaacac

SEQ ID NO: 105829 - DNA, 25 bp, Homo sapien
tgacgttgcagttccaagcaagaag

SEQ ID NO: 105830 - DNA, 25 bp, Homo sapien
tgacgttgcagtaccaagcaagaag

SEQ ID NO: 105831 - DNA, 25 bp, Homo sapien
attattcggacaactagaccaggag

SEQ ID NO: 105832 - DNA, 25 bp, Homo sapien
attattcggacatctagaccaggag

SEQ ID NO: 105833 - DNA, 25 bp, Homo sapien
gtcatgagtcttatgtgtctacaga

SEQ ID NO: 105834 - DNA, 25 bp, Homo sapien
gtcatgagtcttttgtgtctacaga

SEQ ID NO: 105835 - DNA, 25 bp, Homo sapien
gtccaacagcttccttaggagtgta

SEQ ID NO: 105836 - DNA, 25 bp, Homo sapien
gtccaacagcttgcttaggagtgta

SEQ ID NO: 105837 - DNA, 25 bp, Homo sapien
tccagtccgtgttgcttaagcgaga

SEQ ID NO: 105838 - DNA, 25 bp, Homo sapien
tccagtccgtgtagcttaagcgaga

SEQ ID NO: 105839 - DNA, 25 bp, Homo sapien
gagaagagacaggacacggcgacga

SEQ ID NO: 105840 - DNA, 25 bp, Homo sapien
gagaagagacagcacacggcgacga

SEQ ID NO: 105841 - DNA, 25 bp, Homo sapien
cctgcggcgatcaggcgccactgag

SEQ ID NO: 105842 - DNA, 25 bp, Homo sapien
cctgcggcgatctggcgccactgag

SEQ ID NO: 105843 - DNA, 25 bp, Homo sapien
gtgttctgtgggtgagactcaccga

SEQ ID NO: 105844 - DNA, 25 bp, Homo sapien
gtgttctgtgggagagactcaccga

SEQ ID NO: 105845 - DNA, 25 bp, Homo sapien
cgtttatggctcagagaccctactg

SEQ ID NO: 105846 - DNA, 25 bp, Homo sapien
cgtttatggctctgagaccctactg

SEQ ID NO: 105847 - DNA, 25 bp, Homo sapien
acgttgtgtggttcccggtcatagg

SEQ ID NO: 105848 - DNA, 25 bp, Homo sapien
acgttgtgtggtacccggtcatagg

SEQ ID NO: 105849 - DNA, 25 bp, Homo sapien
gaactttcaagaacccttcgtagaa

SEQ ID NO: 105850 - DNA, 25 bp, Homo sapien
gaactttcaagatcccttcgtagaa

SEQ ID NO: 105851 - DNA, 25 bp, Homo sapien
tacctaagatggttgactttacaga

SEQ ID NO: 105852 - DNA, 25 bp, Homo sapien
tacctaagatggatgactttacaga

SEQ ID NO: 105853 - DNA, 25 bp, Homo sapien
tatcttgaagaggtaactcccaacg

SEQ ID NO: 105854 - DNA, 25 bp, Homo sapien
tatcttgaagagctaactcccaacg

SEQ ID NO: 105855 - DNA, 25 bp, Homo sapien
agttttatgtgtacgacttacacta

SEQ ID NO: 105856 - DNA, 25 bp, Homo sapien
agttttatgtgttcgacttacacta

SEQ ID NO: 105857 - DNA, 25 bp, Homo sapien
tacagtaaaactgtacccttgagag

SEQ ID NO: 105858 - DNA, 25 bp, Homo sapien
tacagtaaaactctacccttgagag

SEQ ID NO: 105859 - DNA, 25 bp, Homo sapien
ggtttataagaaaccctcttgtaca

SEQ ID NO: 105860 - DNA, 25 bp, Homo sapien
ggtttataagaatccctcttgtaca

SEQ ID NO: 105861 - DNA, 25 bp, Homo sapien
ggttctggaagcaggagtttctacc

SEQ ID NO: 105862 - DNA, 25 bp, Homo sapien
ggttctggaagctggagtttctacc

SEQ ID NO: 105863 - DNA, 25 bp, Homo sapien
ttgccgtacacgtgtactggacgac

SEQ ID NO: 105864 - DNA, 25 bp, Homo sapien
ttgccgtacacgagtactggacgac

SEQ ID NO: 105865 - DNA, 25 bp, Homo sapien
gatgttccttcttgatcgtttagtc

SEQ ID NO: 105866 - DNA, 25 bp, Homo sapien
gatgttccttctagatcgtttagtc

SEQ ID NO: 105867 - DNA, 25 bp, Homo sapien
gaggagccgactcaggcacctggtc

SEQ ID NO: 105868 - DNA, 25 bp, Homo sapien
gaggagccgactgaggcacctggtc

SEQ ID NO: 105869 - DNA, 25 bp, Homo sapien
cccgggtatagtcacccggtacgtc

SEQ ID NO: 105870 - DNA, 25 bp, Homo sapien
cccgggtatagtgacccggtacgtc

SEQ ID NO: 105871 - DNA, 25 bp, Homo sapien
gaaagacgtaaatgacccactctct

SEQ ID NO: 105872 - DNA, 25 bp, Homo sapien
gaaagacgtaaaagacccactctct

SEQ ID NO: 105873 - DNA, 25 bp, Homo sapien
gtcggagcaccaaccacaacattac

SEQ ID NO: 105874 - DNA, 25 bp, Homo sapien
gtcggagcaccatccacaacattac

SEQ ID NO: 105875 - DNA, 25 bp, Homo sapien
ttgagaggtcacactccaaaataac

SEQ ID NO: 105876 - DNA, 25 bp, Homo sapien
ttgagaggtcactctccaaaataac

SEQ ID NO: 105877 - DNA, 25 bp, Homo sapien
atagtaccgtctgagtcaaagtttg

SEQ ID NO: 105878 - DNA, 25 bp, Homo sapien
atagtaccgtctcagtcaaagtttg

SEQ ID NO: 105879 - DNA, 25 bp, Homo sapien
tagagtatgtcagtctcaagtgacc

SEQ ID NO: 105880 - DNA, 25 bp, Homo sapien
tagagtatgtcactctcaagtgacc

SEQ ID NO: 105881 - DNA, 25 bp, Homo sapien
atagatcgatcgacttcaacggttc

SEQ ID NO: 105882 - DNA, 25 bp, Homo sapien
atagatcgatcgtcttcaacggttc

SEQ ID NO: 105883 - DNA, 25 bp, Homo sapien
tttgaatgtgttatttccaagacac

SEQ ID NO: 105884 - DNA, 25 bp, Homo sapien
tttgaatgtgttttttccaagacac

SEQ ID NO: 105885 - DNA, 25 bp, Homo sapien
acatcgtgtagtttagttcctgaaa

SEQ ID NO: 105886 - DNA, 25 bp, Homo sapien
acatcgtgtagtatagttcctgaaa

SEQ ID NO: 105887 - DNA, 25 bp, Homo sapien
tccgactcttctttccgtcttttgg

SEQ ID NO: 105888 - DNA, 25 bp, Homo sapien
tccgactcttctatccgtcttttgg

SEQ ID NO: 105889 - DNA, 25 bp, Homo sapien
gtgtataatgacctcactttttctg

SEQ ID NO: 105890 - DNA, 25 bp, Homo sapien
gtgtataatgacgtcactttttctg

SEQ ID NO: 105891 - DNA, 25 bp, Homo sapien
tactaaaggcaagtatttgtcgtac

SEQ ID NO: 105892 - DNA, 25 bp, Homo sapien
tactaaaggcaactatttgtcgtac

SEQ ID NO: 105893 - DNA, 25 bp, Homo sapien
agagtagtgacagtaagtcgggtcc

SEQ ID NO: 105894 - DNA, 25 bp, Homo sapien
agagtagtgacactaagtcgggtcc

SEQ ID NO: 105895 - DNA, 25 bp, Homo sapien
gagaaagacctacaacatcagtctg

SEQ ID NO: 105896 - DNA, 25 bp, Homo sapien
gagaaagacctagaacatcagtctg

SEQ ID NO: 105897 - DNA, 25 bp, Homo sapien
gaaactccacctgacaaccctgagt

SEQ ID NO: 105898 - DNA, 25 bp, Homo sapien
gaaactccacctcacaaccctgagt

SEQ ID NO: 105899 - DNA, 25 bp, Homo sapien
tcggtcccgtagtgaaccctccggt

SEQ ID NO: 105900 - DNA, 25 bp, Homo sapien
tcggtcccgtagagaaccctccggt

SEQ ID NO: 105901 - DNA, 25 bp, Homo sapien
cagttacatcacgacgaagtccaca

SEQ ID NO: 105902 - DNA, 25 bp, Homo sapien
cagttacatcaccacgaagtccaca

SEQ ID NO: 105903 - DNA, 25 bp, Homo sapien
tgtgacgtacagacgggaccgaagt

SEQ ID NO: 105904 - DNA, 25 bp, Homo sapien
tgtgacgtacagtcgggaccgaagt

SEQ ID NO: 105905 - DNA, 25 bp, Homo sapien
cgaacgtactaaatgtgatcttaac

SEQ ID NO: 105906 - DNA, 25 bp, Homo sapien
cgaacgtactaattgtgatcttaac

SEQ ID NO: 105907 - DNA, 25 bp, Homo sapien
ttcccaagtggagtgtgaacttaca

SEQ ID NO: 105908 - DNA, 25 bp, Homo sapien
ttcccaagtggactgtgaacttaca

SEQ ID NO: 105909 - DNA, 25 bp, Homo sapien
tctaaattgtgtcgtgtaacttcta

SEQ ID NO: 105910 - DNA, 25 bp, Homo sapien
tctaaattgtgtggtgtaacttcta

SEQ ID NO: 105911 - DNA, 25 bp, Homo sapien
tcttaactttggtatcggactaaag

SEQ ID NO: 105912 - DNA, 25 bp, Homo sapien
tcttaactttggaatcggactaaag

SEQ ID NO: 105913 - DNA, 25 bp, Homo sapien
tcaccgtgtgcgtttcggtacggaa

SEQ ID NO: 105914 - DNA, 25 bp, Homo sapien
tcaccgtgtgcgattcggtacggaa

SEQ ID NO: 105915 - DNA, 25 bp, Homo sapien
cacatattagacattgttcgaccag

SEQ ID NO: 105916 - DNA, 25 bp, Homo sapien
cacatattagactttgttcgaccag

SEQ ID NO: 105917 - DNA, 25 bp, Homo sapien
aatataatgactcgtctagcgtagt

SEQ ID NO: 105918 - DNA, 25 bp, Homo sapien
aatataatgactggtctagcgtagt

SEQ ID NO: 105919 - DNA, 25 bp, Homo sapien
agcagcataaaacgacggtaccgtt

SEQ ID NO: 105920 - DNA, 25 bp, Homo sapien
agcagcataaaaggacggtaccgtt

SEQ ID NO: 105921 - DNA, 25 bp, Homo sapien
ggtaccagacatcaaacaactcgag

SEQ ID NO: 105922 - DNA, 25 bp, Homo sapien
ggtaccagacatgaaacaactcgag

SEQ ID NO: 105923 - DNA, 25 bp, Homo sapien
gtaaagtacagtatatacgtgtcca

SEQ ID NO: 105924 - DNA, 25 bp, Homo sapien
gtaaagtacagtttatacgtgtcca

SEQ ID NO: 105925 - DNA, 25 bp, Homo sapien
cataaaagacgttttacagtcgtca

SEQ ID NO: 105926 - DNA, 25 bp, Homo sapien
cataaaagacgtattacagtcgtca

SEQ ID NO: 105927 - DNA, 25 bp, Homo sapien
gtgataaaaagtaactcttggtcac

SEQ ID NO: 105928 - DNA, 25 bp, Homo sapien
gtgataaaaagttactcttggtcac

SEQ ID NO: 105929 - DNA, 25 bp, Homo sapien
atggtgaagcaactaccgtcttgcc

SEQ ID NO: 105930 - DNA, 25 bp, Homo sapien
atggtgaagcaagtaccgtcttgcc

SEQ ID NO: 105931 - DNA, 25 bp, Homo sapien
gtgttacaggaagagtgctgtgtcc

SEQ ID NO: 105932 - DNA, 25 bp, Homo sapien
gtgttacaggaacagtgctgtgtcc

SEQ ID NO: 105933 - DNA, 25 bp, Homo sapien
agaggtaaaaagtcagtgcagtccc

SEQ ID NO: 105934 - DNA, 25 bp, Homo sapien
agaggtaaaaagacagtgcagtccc

SEQ ID NO: 105935 - DNA, 25 bp, Homo sapien
tagctctctcgtttacgtcgctccg

SEQ ID NO: 105936 - DNA, 25 bp, Homo sapien
tagctctctcgtatacgtcgctccg

SEQ ID NO: 105937 - DNA, 25 bp, Homo sapien
gcggctccgtcctgtgtctcgtgtc

SEQ ID NO: 105938 - DNA, 25 bp, Homo sapien
gcggctccgtccagtgtctcgtgtc

SEQ ID NO: 105939 - DNA, 25 bp, Homo sapien
tttcggtttccgtttttctcgagag

SEQ ID NO: 105940 - DNA, 25 bp, Homo sapien
tttcggtttccgattttctcgagag

SEQ ID NO: 105941 - DNA, 25 bp, Homo sapien
tctccgtcttacgtcgtttcttgga

SEQ ID NO: 105942 - DNA, 25 bp, Homo sapien
tctccgtcttacctcgtttcttgga

SEQ ID NO: 105943 - DNA, 25 bp, Homo sapien
cgcaggtgtagtcctaccgtttggg

SEQ ID NO: 105944 - DNA, 25 bp, Homo sapien
cgcaggtgtagtgctaccgtttggg

SEQ ID NO: 105945 - DNA, 25 bp, Homo sapien
actaaagagaaatcgtacctgagac

SEQ ID NO: 105946 - DNA, 25 bp, Homo sapien
actaaagagaaaacgtacctgagac

SEQ ID NO: 105947 - DNA, 25 bp, Homo sapien
gtatgtgcatgaggacctcctcgaa

SEQ ID NO: 105948 - DNA, 25 bp, Homo sapien
gtatgtgcatgacgacctcctcgaa

SEQ ID NO: 105949 - DNA, 25 bp, Homo sapien
gtggtgacactgacaccaaacgaac

SEQ ID NO: 105950 - DNA, 25 bp, Homo sapien
gtggtgacactgtcaccaaacgaac

SEQ ID NO: 105951 - DNA, 25 bp, Homo sapien
gagtcgggtccttacctttgaccat

SEQ ID NO: 105952 - DNA, 25 bp, Homo sapien
gagtcgggtcctaacctttgaccat

SEQ ID NO: 105953 - DNA, 25 bp, Homo sapien
agggtttcacgaccctaatgtccgc

SEQ ID NO: 105954 - DNA, 25 bp, Homo sapien
agggtttcacgagcctaatgtccgc

SEQ ID NO: 105955 - DNA, 25 bp, Homo sapien
gtgttaaacgaccaccgaaatcttc

SEQ ID NO: 105956 - DNA, 25 bp, Homo sapien
gtgttaaacgacgaccgaaatcttc

SEQ ID NO: 105957 - DNA, 25 bp, Homo sapien
agggaaacgatcatttccatattcg

SEQ ID NO: 105958 - DNA, 25 bp, Homo sapien
agggaaacgatcttttccatattcg

SEQ ID NO: 105959 - DNA, 25 bp, Homo sapien
tacagtacccagacacagtctgagt

SEQ ID NO: 105960 - DNA, 25 bp, Homo sapien
tacagtacccagtcacagtctgagt

SEQ ID NO: 105961 - DNA, 25 bp, Homo sapien
cgaaacggacgagtctagagttaga

SEQ ID NO: 105962 - DNA, 25 bp, Homo sapien
cgaaacggacgactctagagttaga

SEQ ID NO: 105963 - DNA, 25 bp, Homo sapien
gagaaggagtcactactgagctcga

SEQ ID NO: 105964 - DNA, 25 bp, Homo sapien
gagaaggagtcagtactgagctcga

SEQ ID NO: 105965 - DNA, 25 bp, Homo sapien
aagacaaggaggtttatagacccga

SEQ ID NO: 105966 - DNA, 25 bp, Homo sapien
aagacaaggaggattatagacccga

SEQ ID NO: 105967 - DNA, 25 bp, Homo sapien
gagtcacacgggtaccaagtcccac

SEQ ID NO: 105968 - DNA, 25 bp, Homo sapien
gagtcacacgggaaccaagtcccac

SEQ ID NO: 105969 - DNA, 25 bp, Homo sapien
cttcgacccgcaacgcatgttagaa

SEQ ID NO: 105970 - DNA, 25 bp, Homo sapien
cttcgacccgcatcgcatgttagaa

SEQ ID NO: 105971 - DNA, 25 bp, Homo sapien
cgtatgaaagccatgcatattgtaa

SEQ ID NO: 105972 - DNA, 25 bp, Homo sapien
cgtatgaaagccttgcatattgtaa

SEQ ID NO: 105973 - DNA, 25 bp, Homo sapien
gagactctcgaggtccaatgtgagg

SEQ ID NO: 105974 - DNA, 25 bp, Homo sapien
gagactctcgagctccaatgtgagg

SEQ ID NO: 105975 - DNA, 25 bp, Homo sapien
agtcacggacgattcacaggacggg

SEQ ID NO: 105976 - DNA, 25 bp, Homo sapien
agtcacggacgaatcacaggacggg

SEQ ID NO: 105977 - DNA, 25 bp, Homo sapien
ttcgaacgggacgaccttgacgagg

SEQ ID NO: 105978 - DNA, 25 bp, Homo sapien
ttcgaacgggaccaccttgacgagg

SEQ ID NO: 105979 - DNA, 25 bp, Homo sapien
agtaacgtgtaacaactcgtgaaat

SEQ ID NO: 105980 - DNA, 25 bp, Homo sapien
agtaacgtgtaagaactcgtgaaat

SEQ ID NO: 105981 - DNA, 25 bp, Homo sapien
aaggagaggatactccccgggccgt

SEQ ID NO: 105982 - DNA, 25 bp, Homo sapien
aaggagaggatagtccccgggccgt

SEQ ID NO: 105983 - DNA, 25 bp, Homo sapien
aggcgttcagcgacccgaagtccgt

SEQ ID NO: 105984 - DNA, 25 bp, Homo sapien
aggcgttcagcgtcccgaagtccgt

SEQ ID NO: 105985 - DNA, 25 bp, Homo sapien
gggggtaccccgtgtcgtcattatc

SEQ ID NO: 105986 - DNA, 25 bp, Homo sapien
gggggtaccccgagtcgtcattatc

SEQ ID NO: 105987 - DNA, 25 bp, Homo sapien
ttgtgctctattcgactgatatatg

SEQ ID NO: 105988 - DNA, 25 bp, Homo sapien
ttgtgctctattggactgatatatg

SEQ ID NO: 105989 - DNA, 25 bp, Homo sapien
gggactctatatccatcagtatctt

SEQ ID NO: 105990 - DNA, 25 bp, Homo sapien
gggactctatatgcatcagtatctt

SEQ ID NO: 105991 - DNA, 25 bp, Homo sapien
gtgttactacgaggtgcattttatc

SEQ ID NO: 105992 - DNA, 25 bp, Homo sapien
gtgttactacgacgtgcattttatc

SEQ ID NO: 105993 - DNA, 25 bp, Homo sapien
cttctacggcgtcgactgccgttcg

SEQ ID NO: 105994 - DNA, 25 bp, Homo sapien
cttctacggcgtggactgccgttcg

SEQ ID NO: 105995 - DNA, 25 bp, Homo sapien
cgactacgacccttccaggctatct

SEQ ID NO: 105996 - DNA, 25 bp, Homo sapien
cgactacgacccatccaggctatct

SEQ ID NO: 105997 - DNA, 25 bp, Homo sapien
ttctacaatccgaccttaggttagt

SEQ ID NO: 105998 - DNA, 25 bp, Homo sapien
ttctacaatccgtccttaggttagt

SEQ ID NO: 105999 - DNA, 25 bp, Homo sapien
ttgtcaactccgtgttcgttattat

SEQ ID NO: 106000 - DNA, 25 bp, Homo sapien
ttgtcaactccgagttcgttattat

SEQ ID NO: 106001 - DNA, 25 bp, Homo sapien
gtgtcttcaagtccaatgttcggag

SEQ ID NO: 106002 - DNA, 25 bp, Homo sapien
gtgtcttcaagtgcaatgttcggag

SEQ ID NO: 106003 - DNA, 25 bp, Homo sapien
ccgagttttcggttcggattatgga

SEQ ID NO: 106004 - DNA, 25 bp, Homo sapien
ccgagttttcggatcggattatgga

SEQ ID NO: 106005 - DNA, 25 bp, Homo sapien
gaacatttctgcatagcggtttgga

SEQ ID NO: 106006 - DNA, 25 bp, Homo sapien
gaacatttctgcttagcggtttgga

SEQ ID NO: 106007 - DNA, 25 bp, Homo sapien
gggatacgtctcgtttttcatttcc

SEQ ID NO: 106008 - DNA, 25 bp, Homo sapien
gggatacgtctcctttttcatttcc

SEQ ID NO: 106009 - DNA, 25 bp, Homo sapien
gtccatgtctcttggggtttctttc

SEQ ID NO: 106010 - DNA, 25 bp, Homo sapien
gtccatgtctctaggggtttctttc

SEQ ID NO: 106011 - DNA, 25 bp, Homo sapien
cgactaggattcaggggcttccttc

SEQ ID NO: 106012 - DNA, 25 bp, Homo sapien
cgactaggattctggggcttccttc

SEQ ID NO: 106013 - DNA, 25 bp, Homo sapien
ggatctggttcttggccttcctcct

SEQ ID NO: 106014 - DNA, 25 bp, Homo sapien
ggatctggttctaggccttcctcct

SEQ ID NO: 106015 - DNA, 25 bp, Homo sapien
tcggtaagtcctgtttctctacttg

SEQ ID NO: 106016 - DNA, 25 bp, Homo sapien
tcggtaagtcctctttctctacttg

SEQ ID NO: 106017 - DNA, 25 bp, Homo sapien
gtcatgtacagaaatttactatctg

SEQ ID NO: 106018 - DNA, 25 bp, Homo sapien
gtcatgtacagatatttactatctg

SEQ ID NO: 106019 - DNA, 25 bp, Homo sapien
tgtcgtttgtggaggtactcttcag

SEQ ID NO: 106020 - DNA, 25 bp, Homo sapien
tgtcgtttgtggtggtactcttcag

SEQ ID NO: 106021 - DNA, 25 bp, Homo sapien
ctgggttcataactggaccgttctg

SEQ ID NO: 106022 - DNA, 25 bp, Homo sapien
ctgggttcataagtggaccgttctg

SEQ ID NO: 106023 - DNA, 25 bp, Homo sapien
tggtgaagaaaggtcacgacctttc

SEQ ID NO: 106024 - DNA, 25 bp, Homo sapien
tggtgaagaaagctcacgacctttc

SEQ ID NO: 106025 - DNA, 25 bp, Homo sapien
cgactaaagaacgtccctcgtttct

SEQ ID NO: 106026 - DNA, 25 bp, Homo sapien
cgactaaagaacctccctcgtttct

SEQ ID NO: 106027 - DNA, 25 bp, Homo sapien
cgaagtggaacatcggtcctagtat

SEQ ID NO: 106028 - DNA, 25 bp, Homo sapien
cgaagtggaacaacggtcctagtat

SEQ ID NO: 106029 - DNA, 25 bp, Homo sapien
aatgagagagactacggaggacgtc

SEQ ID NO: 106030 - DNA, 25 bp, Homo sapien
aatgagagagacaacggaggacgtc

SEQ ID NO: 106031 - DNA, 25 bp, Homo sapien
tcaaaaggacggatggtcattacgg

SEQ ID NO: 106032 - DNA, 25 bp, Homo sapien
tcaaaaggacggttggtcattacgg

SEQ ID NO: 106033 - DNA, 25 bp, Homo sapien
ctaagaacgaaaggagtttgtccta

SEQ ID NO: 106034 - DNA, 25 bp, Homo sapien
ctaagaacgaaacgagtttgtccta

SEQ ID NO: 106035 - DNA, 25 bp, Homo sapien
cgacaaagagatttacttgtgttac

SEQ ID NO: 106036 - DNA, 25 bp, Homo sapien
cgacaaagagatatacttgtgttac

SEQ ID NO: 106037 - DNA, 25 bp, Homo sapien
ggaatatcatacatacctagtaata

SEQ ID NO: 106038 - DNA, 25 bp, Homo sapien
ggaatatcatacttacctagtaata

SEQ ID NO: 106039 - DNA, 25 bp, Homo sapien
cactagaaaccgtatctaagtatga

SEQ ID NO: 106040 - DNA, 25 bp, Homo sapien
cactagaaaccgaatctaagtatga

SEQ ID NO: 106041 - DNA, 25 bp, Homo sapien
acccgtaacacaaccgttgctactg

SEQ ID NO: 106042 - DNA, 25 bp, Homo sapien
acccgtaacacatccgttgctactg

SEQ ID NO: 106043 - DNA, 25 bp, Homo sapien
tcacgacaagatacctctcttatgg

SEQ ID NO: 106044 - DNA, 25 bp, Homo sapien
tcacgacaagattcctctcttatgg

SEQ ID NO: 106045 - DNA, 25 bp, Homo sapien
acagtgagaattatctctatggagt

SEQ ID NO: 106046 - DNA, 25 bp, Homo sapien
acagtgagaattttctctatggagt

SEQ ID NO: 106047 - DNA, 25 bp, Homo sapien
ctccccaagagtttcctcgactggg

SEQ ID NO: 106048 - DNA, 25 bp, Homo sapien
ctccccaagagtatcctcgactggg

SEQ ID NO: 106049 - DNA, 25 bp, Homo sapien
caggggtacgtcatccctcgcgagg

SEQ ID NO: 106050 - DNA, 25 bp, Homo sapien
caggggtacgtcttccctcgcgagg

SEQ ID NO: 106051 - DNA, 25 bp, Homo sapien
tgacggacctcctactcttccgttg

SEQ ID NO: 106052 - DNA, 25 bp, Homo sapien
tgacggacctccaactcttccgttg

SEQ ID NO: 106053 - DNA, 25 bp, Homo sapien
ggaaacgcgctaaactaccctgtca

SEQ ID NO: 106054 - DNA, 25 bp, Homo sapien
ggaaacgcgctatactaccctgtca

SEQ ID NO: 106055 - DNA, 25 bp, Homo sapien
gactaacctaggactactcccgttc

SEQ ID NO: 106056 - DNA, 25 bp, Homo sapien
gactaacctaggtctactcccgttc

SEQ ID NO: 106057 - DNA, 25 bp, Homo sapien
gacgaacccgagtgtcccagtcgac

SEQ ID NO: 106058 - DNA, 25 bp, Homo sapien
gacgaacccgagagtcccagtcgac

SEQ ID NO: 106059 - DNA, 25 bp, Homo sapien
gggtcggacccgaaccgtccaagga

SEQ ID NO: 106060 - DNA, 25 bp, Homo sapien
gggtcggacccgtaccgtccaagga

SEQ ID NO: 106061 - DNA, 25 bp, Homo sapien
tgtgccattactactcgtgaccgta

SEQ ID NO: 106062 - DNA, 25 bp, Homo sapien
tgtgccattacttctcgtgaccgta

SEQ ID NO: 106063 - DNA, 25 bp, Homo sapien
ggtcgtcctttacctcgacgagttg

SEQ ID NO: 106064 - DNA, 25 bp, Homo sapien
ggtcgtcctttagctcgacgagttg

SEQ ID NO: 106065 - DNA, 25 bp, Homo sapien
ttatatagagacacggggtccccct

SEQ ID NO: 106066 - DNA, 25 bp, Homo sapien
ttatatagagactcggggtccccct

SEQ ID NO: 106067 - DNA, 25 bp, Homo sapien
gatacatgtcgaacttcgatccccc

SEQ ID NO: 106068 - DNA, 25 bp, Homo sapien
gatacatgtcgatcttcgatccccc

SEQ ID NO: 106069 - DNA, 25 bp, Homo sapien
gagtacattaggtttggttctatcc

SEQ ID NO: 106070 - DNA, 25 bp, Homo sapien
gagtacattaggattggttctatcc

SEQ ID NO: 106071 - DNA, 25 bp, Homo sapien
aataaattcggaatacgggttctcc

SEQ ID NO: 106072 - DNA, 25 bp, Homo sapien
aataaattcggattacgggttctcc

SEQ ID NO: 106073 - DNA, 25 bp, Homo sapien
aatttaatcgtttgacagagtcctt

SEQ ID NO: 106074 - DNA, 25 bp, Homo sapien
aatttaatcgttagacagagtcctt

SEQ ID NO: 106075 - DNA, 25 bp, Homo sapien
gagtgaaaatcaatacattgtcctt

SEQ ID NO: 106076 - DNA, 25 bp, Homo sapien
gagtgaaaatcattacattgtcctt

SEQ ID NO: 106077 - DNA, 25 bp, Homo sapien
tagaacacttcttccaggacctcgc

SEQ ID NO: 106078 - DNA, 25 bp, Homo sapien
tagaacacttctaccaggacctcgc

SEQ ID NO: 106079 - DNA, 25 bp, Homo sapien
gaaaaacttttacaagtcgttcact

SEQ ID NO: 106080 - DNA, 25 bp, Homo sapien
gaaaaacttttagaagtcgttcact

SEQ ID NO: 106081 - DNA, 25 bp, Homo sapien
aaagaaaaatatagggacttcctgt

SEQ ID NO: 106082 - DNA, 25 bp, Homo sapien
aaagaaaaatattgggacttcctgt

SEQ ID NO: 106083 - DNA, 25 bp, Homo sapien
aaagatgtcgacgtgaacaccttgt

SEQ ID NO: 106084 - DNA, 25 bp, Homo sapien
aaagatgtcgacctgaacaccttgt

SEQ ID NO: 106085 - DNA, 25 bp, Homo sapien
gacctgtttccgacagaaccgttct

SEQ ID NO: 106086 - DNA, 25 bp, Homo sapien
gacctgtttccgtcagaaccgttct

SEQ ID NO: 106087 - DNA, 25 bp, Homo sapien
cgacccgtcttgagccgtaaccgga

SEQ ID NO: 106088 - DNA, 25 bp, Homo sapien
cgacccgtcttgtgccgtaaccgga

SEQ ID NO: 106089 - DNA, 25 bp, Homo sapien
cacacacctggtctgtgtcctcggt

SEQ ID NO: 106090 - DNA, 25 bp, Homo sapien
cacacacctggtgtgtgtcctcggt

SEQ ID NO: 106091 - DNA, 25 bp, Homo sapien
aggtccttcctgtcggtcgccctgg

SEQ ID NO: 106092 - DNA, 25 bp, Homo sapien
aggtccttcctgacggtcgccctgg

SEQ ID NO: 106093 - DNA, 25 bp, Homo sapien
gcccgtcgtcgcgcaagtccagggc

SEQ ID NO: 106094 - DNA, 25 bp, Homo sapien
gcccgtcgtcgcccaagtccagggc

SEQ ID NO: 106095 - DNA, 25 bp, Homo sapien
ttcccgtgggcaagagtcccgggtc

SEQ ID NO: 106096 - DNA, 25 bp, Homo sapien
ttcccgtgggcatgagtcccgggtc

SEQ ID NO: 106097 - DNA, 25 bp, Homo sapien
ctccttgtactgactactccacgga

SEQ ID NO: 106098 - DNA, 25 bp, Homo sapien
ctccttgtactgtctactccacgga

SEQ ID NO: 106099 - DNA, 25 bp, Homo sapien
tcctgtgtactgtcctgtcccgcgt

SEQ ID NO: 106100 - DNA, 25 bp, Homo sapien
tcctgtgtactgacctgtcccgcgt

SEQ ID NO: 106101 - DNA, 25 bp, Homo sapien
ttttctgtcacacgtcctggaccct

SEQ ID NO: 106102 - DNA, 25 bp, Homo sapien
ttttctgtcacaggtcctggaccct

SEQ ID NO: 106103 - DNA, 25 bp, Homo sapien
ttcgtccccggtttcgagatcgtcg

SEQ ID NO: 106104 - DNA, 25 bp, Homo sapien
ttcgtccccggtatcgagatcgtcg

SEQ ID NO: 106105 - DNA, 25 bp, Homo sapien
tgtcacgccgcgtaccagtgctacg

SEQ ID NO: 106106 - DNA, 25 bp, Homo sapien
tgtcacgccgcgaaccagtgctacg

SEQ ID NO: 106107 - DNA, 25 bp, Homo sapien
cctgtcattccgaatacacagagag

SEQ ID NO: 106108 - DNA, 25 bp, Homo sapien
cctgtcattccgtatacacagagag

SEQ ID NO: 106109 - DNA, 25 bp, Homo sapien
gaatccttttgtgtcgaacaatata

SEQ ID NO: 106110 - DNA, 25 bp, Homo sapien
gaatccttttgtctcgaacaatata

SEQ ID NO: 106111 - DNA, 25 bp, Homo sapien
atttataagatcacgagtgacctaa

SEQ ID NO: 106112 - DNA, 25 bp, Homo sapien
atttataagatctcgagtgacctaa

SEQ ID NO: 106113 - DNA, 25 bp, Homo sapien
ttacaccgtcgatgtgatctctaca

SEQ ID NO: 106114 - DNA, 25 bp, Homo sapien
ttacaccgtcgaagtgatctctaca

SEQ ID NO: 106115 - DNA, 25 bp, Homo sapien
cggaacactgacaggacgtcgaaat

SEQ ID NO: 106116 - DNA, 25 bp, Homo sapien
cggaacactgactggacgtcgaaat

SEQ ID NO: 106117 - DNA, 25 bp, Homo sapien
atcacgagcccgagtcgtaggtacg

SEQ ID NO: 106118 - DNA, 25 bp, Homo sapien
atcacgagcccgtgtcgtaggtacg

SEQ ID NO: 106119 - DNA, 25 bp, Homo sapien
ttatgtcagtcaccatatcgtttct

SEQ ID NO: 106120 - DNA, 25 bp, Homo sapien
ttatgtcagtcagcatatcgtttct

SEQ ID NO: 106121 - DNA, 25 bp, Homo sapien
gtaacgactcgtaccaatagttata

SEQ ID NO: 106122 - DNA, 25 bp, Homo sapien
gtaacgactcgttccaatagttata

SEQ ID NO: 106123 - DNA, 25 bp, Homo sapien
ctctatatcaatttcgaatgttctt

SEQ ID NO: 106124 - DNA, 25 bp, Homo sapien
ctctatatcaatatcgaatgttctt

SEQ ID NO: 106125 - DNA, 25 bp, Homo sapien
gaccttatgaatttcttcggttctt

SEQ ID NO: 106126 - DNA, 25 bp, Homo sapien
gaccttatgaatatcttcggttctt

SEQ ID NO: 106127 - DNA, 25 bp, Homo sapien
acgtttagaagttgttctgccattt

SEQ ID NO: 106128 - DNA, 25 bp, Homo sapien
acgtttagaagtagttctgccattt

SEQ ID NO: 106129 - DNA, 25 bp, Homo sapien
gtcttacgaagtcattccctccata

SEQ ID NO: 106130 - DNA, 25 bp, Homo sapien
gtcttacgaagtgattccctccata

SEQ ID NO: 106131 - DNA, 25 bp, Homo sapien
gtcgaacaagggtttccacttaagt

SEQ ID NO: 106132 - DNA, 25 bp, Homo sapien
gtcgaacaagggattccacttaagt

SEQ ID NO: 106133 - DNA, 25 bp, Homo sapien
tgtaactaagcgaccaagaccgaca

SEQ ID NO: 106134 - DNA, 25 bp, Homo sapien
tgtaactaagcgtccaagaccgaca

SEQ ID NO: 106135 - DNA, 25 bp, Homo sapien
cattctaagcacctggagacgaaac

SEQ ID NO: 106136 - DNA, 25 bp, Homo sapien
cattctaagcacgtggagacgaaac

SEQ ID NO: 106137 - DNA, 25 bp, Homo sapien
gacattttatcagttgtaccgaaat

SEQ ID NO: 106138 - DNA, 25 bp, Homo sapien
gacattttatcacttgtaccgaaat

SEQ ID NO: 106139 - DNA, 25 bp, Homo sapien
cttttgagtagtaacttgaccataa

SEQ ID NO: 106140 - DNA, 25 bp, Homo sapien
cttttgagtagttacttgaccataa

SEQ ID NO: 106141 - DNA, 25 bp, Homo sapien
acccgtgtgacgacttgtatatgaa

SEQ ID NO: 106142 - DNA, 25 bp, Homo sapien
acccgtgtgacgtcttgtatatgaa

SEQ ID NO: 106143 - DNA, 25 bp, Homo sapien
cacaggctgtgtgtcgtacttcaga

SEQ ID NO: 106144 - DNA, 25 bp, Homo sapien
cacaggctgtgtctcgtacttcaga

SEQ ID NO: 106145 - DNA, 25 bp, Homo sapien
tccatcccagtgtgcgtccgcgtga

SEQ ID NO: 106146 - DNA, 25 bp, Homo sapien
tccatcccagtgagcgtccgcgtga

SEQ ID NO: 106147 - DNA, 25 bp, Homo sapien
catgtcggttcccgagacccgggac

SEQ ID NO: 106148 - DNA, 25 bp, Homo sapien
catgtcggttccggagacccgggac

SEQ ID NO: 106149 - DNA, 25 bp, Homo sapien
ccggaacttccgagaagcgacgacg

SEQ ID NO: 106150 - DNA, 25 bp, Homo sapien
ccggaacttccgtgaagcgacgacg

SEQ ID NO: 106151 - DNA, 25 bp, Homo sapien
acggttaatcttacgtcctaaggga

SEQ ID NO: 106152 - DNA, 25 bp, Homo sapien
acggttaatctttcgtcctaaggga

SEQ ID NO: 106153 - DNA, 25 bp, Homo sapien
gacggatccgtttaccgaaaacact

SEQ ID NO: 106154 - DNA, 25 bp, Homo sapien
gacggatccgttaaccgaaaacact

SEQ ID NO: 106155 - DNA, 25 bp, Homo sapien
gacacggaccccagaggaggaacct

SEQ ID NO: 106156 - DNA, 25 bp, Homo sapien
gacacggacccctgaggaggaacct

SEQ ID NO: 106157 - DNA, 25 bp, Homo sapien
gaggaactcctggagtaggaactcg

SEQ ID NO: 106158 - DNA, 25 bp, Homo sapien
gaggaactcctgcagtaggaactcg

SEQ ID NO: 106159 - DNA, 25 bp, Homo sapien
cataggactctcacaagtgaactct

SEQ ID NO: 106160 - DNA, 25 bp, Homo sapien
cataggactctctcaagtgaactct

SEQ ID NO: 106161 - DNA, 25 bp, Homo sapien
ttcgaccgggtgaacgtcgtcacct

SEQ ID NO: 106162 - DNA, 25 bp, Homo sapien
ttcgaccgggtgtacgtcgtcacct

SEQ ID NO: 106163 - DNA, 25 bp, Homo sapien
gggaccctcggtgacgtacctacca

SEQ ID NO: 106164 - DNA, 25 bp, Homo sapien
gggaccctcggtcacgtacctacca

SEQ ID NO: 106165 - DNA, 25 bp, Homo sapien
cggaactatcgatggacctatacac

SEQ ID NO: 106166 - DNA, 25 bp, Homo sapien
cggaactatcgaaggacctatacac

SEQ ID NO: 106167 - DNA, 25 bp, Homo sapien
tagggtctttactaggacctgtaac

SEQ ID NO: 106168 - DNA, 25 bp, Homo sapien
tagggtctttacaaggacctgtaac

SEQ ID NO: 106169 - DNA, 25 bp, Homo sapien
ctgtggtccccgaggaaccgtaggt

SEQ ID NO: 106170 - DNA, 25 bp, Homo sapien
ctgtggtccccgtggaaccgtaggt

SEQ ID NO: 106171 - DNA, 25 bp, Homo sapien
cttgtctcctacgtttgtgtccttc

SEQ ID NO: 106172 - DNA, 25 bp, Homo sapien
cttgtctcctacctttgtgtccttc

SEQ ID NO: 106173 - DNA, 25 bp, Homo sapien
gtctcgcgctttttcgtgcacccgt

SEQ ID NO: 106174 - DNA, 25 bp, Homo sapien
gtctcgcgctttatcgtgcacccgt

SEQ ID NO: 106175 - DNA, 25 bp, Homo sapien
tgtgcccctgtaatttcgacgtatc

SEQ ID NO: 106176 - DNA, 25 bp, Homo sapien
tgtgcccctgtattttcgacgtatc

SEQ ID NO: 106177 - DNA, 25 bp, Homo sapien
cattactcttgtgtgtgcttggtgg

SEQ ID NO: 106178 - DNA, 25 bp, Homo sapien
cattactcttgtctgtgcttggtgg

SEQ ID NO: 106179 - DNA, 25 bp, Homo sapien
ctgacttatttcttgactctaatgg

SEQ ID NO: 106180 - DNA, 25 bp, Homo sapien
ctgacttatttcatgactctaatgg

SEQ ID NO: 106181 - DNA, 25 bp, Homo sapien
gagatatgttcagacacggtaccga

SEQ ID NO: 106182 - DNA, 25 bp, Homo sapien
gagatatgttcacacacggtaccga

SEQ ID NO: 106183 - DNA, 25 bp, Homo sapien
gggattctgtcgtccacgtctcaga

SEQ ID NO: 106184 - DNA, 25 bp, Homo sapien
gggattctgtcgaccacgtctcaga

SEQ ID NO: 106185 - DNA, 25 bp, Homo sapien
tgttcagtgtcgaccgtcccatacg

SEQ ID NO: 106186 - DNA, 25 bp, Homo sapien
tgttcagtgtcgtccgtcccatacg

SEQ ID NO: 106187 - DNA, 25 bp, Homo sapien
gtcttagactcctcgtgtgacaagt

SEQ ID NO: 106188 - DNA, 25 bp, Homo sapien
gtcttagactccacgtgtgacaagt

SEQ ID NO: 106189 - DNA, 25 bp, Homo sapien
cgacgtgtcgacctctttgtcccag

SEQ ID NO: 106190 - DNA, 25 bp, Homo sapien
cgacgtgtcgacgtctttgtcccag

SEQ ID NO: 106191 - DNA, 25 bp, Homo sapien
ccacgtgagactccttggtgtggtg

SEQ ID NO: 106192 - DNA, 25 bp, Homo sapien
ccacgtgagactgcttggtgtggtg

SEQ ID NO: 106193 - DNA, 25 bp, Homo sapien
ttattaatggactaccttcagtggg

SEQ ID NO: 106194 - DNA, 25 bp, Homo sapien
ttattaatggacaaccttcagtggg

SEQ ID NO: 106195 - DNA, 25 bp, Homo sapien
caggaccttggtagaccggtggaac

SEQ ID NO: 106196 - DNA, 25 bp, Homo sapien
caggaccttggttgaccggtggaac

SEQ ID NO: 106197 - DNA, 25 bp, Homo sapien
tcctgtcctgggtcgaccggggtcc

SEQ ID NO: 106198 - DNA, 25 bp, Homo sapien
tcctgtcctgggacgaccggggtcc

SEQ ID NO: 106199 - DNA, 25 bp, Homo sapien
tctctgctccgacttacccggggaa

SEQ ID NO: 106200 - DNA, 25 bp, Homo sapien
tctctgctccgagttacccggggaa

SEQ ID NO: 106201 - DNA, 25 bp, Homo sapien
agtgaatccaggtcccgtagggacc

SEQ ID NO: 106202 - DNA, 25 bp, Homo sapien
agtgaatccaggacccgtagggacc

SEQ ID NO: 106203 - DNA, 25 bp, Homo sapien
tcgagcctccggagccgatgtgaga

SEQ ID NO: 106204 - DNA, 25 bp, Homo sapien
tcgagcctccggtgccgatgtgaga

SEQ ID NO: 106205 - DNA, 25 bp, Homo sapien
acaggtcctgtggaggccatggtca

SEQ ID NO: 106206 - DNA, 25 bp, Homo sapien
acaggtcctgtgcaggccatggtca

SEQ ID NO: 106207 - DNA, 25 bp, Homo sapien
ggtccccgggagacatttgtaccgt

SEQ ID NO: 106208 - DNA, 25 bp, Homo sapien
ggtccccgggagtcatttgtaccgt

SEQ ID NO: 106209 - DNA, 25 bp, Homo sapien
cgtcctctcgggtaaccctgtgaca

SEQ ID NO: 106210 - DNA, 25 bp, Homo sapien
cgtcctctcgggaaaccctgtgaca

SEQ ID NO: 106211 - DNA, 25 bp, Homo sapien
gtacgtccacggaaacgtctttgtt

SEQ ID NO: 106212 - DNA, 25 bp, Homo sapien
gtacgtccacggtaacgtctttgtt

SEQ ID NO: 106213 - DNA, 25 bp, Homo sapien
ctatgactccttcacagccactgtt

SEQ ID NO: 106214 - DNA, 25 bp, Homo sapien
ctatgactccttgacagccactgtt

SEQ ID NO: 106215 - DNA, 25 bp, Homo sapien
tttaacgtactctcatgacaatgtg

SEQ ID NO: 106216 - DNA, 25 bp, Homo sapien
tttaacgtactcacatgacaatgtg

SEQ ID NO: 106217 - DNA, 25 bp, Homo sapien
atttctactcaaatagactatctca

SEQ ID NO: 106218 - DNA, 25 bp, Homo sapien
atttctactcaattagactatctca

SEQ ID NO: 106219 - DNA, 25 bp, Homo sapien
ggttcttttccatttcgattcgtaa

SEQ ID NO: 106220 - DNA, 25 bp, Homo sapien
ggttcttttccaattcgattcgtaa

SEQ ID NO: 106221 - DNA, 25 bp, Homo sapien
tctttgtccaaccagtaatcgaagt

SEQ ID NO: 106222 - DNA, 25 bp, Homo sapien
tctttgtccaacgagtaatcgaagt

SEQ ID NO: 106223 - DNA, 25 bp, Homo sapien
agtttcctgtagtgtgtcagatatt

SEQ ID NO: 106224 - DNA, 25 bp, Homo sapien
agtttcctgtagagtgtcagatatt

SEQ ID NO: 106225 - DNA, 25 bp, Homo sapien
gtcgaccaggacgtagtacgacatc

SEQ ID NO: 106226 - DNA, 25 bp, Homo sapien
gtcgaccaggacctagtacgacatc

SEQ ID NO: 106227 - DNA, 25 bp, Homo sapien
gagagggacggactccctgtgaatt

SEQ ID NO: 106228 - DNA, 25 bp, Homo sapien
gagagggacggagtccctgtgaatt

SEQ ID NO: 106229 - DNA, 25 bp, Homo sapien
tgttttctgaagacggccccgcttc

SEQ ID NO: 106230 - DNA, 25 bp, Homo sapien
tgttttctgaagtcggccccgcttc

SEQ ID NO: 106231 - DNA, 25 bp, Homo sapien
aataaatacaacacgacgacaggtc

SEQ ID NO: 106232 - DNA, 25 bp, Homo sapien
aataaatacaactcgacgacaggtc

SEQ ID NO: 106233 - DNA, 25 bp, Homo sapien
acataagtaaagacgtacatatcga

SEQ ID NO: 106234 - DNA, 25 bp, Homo sapien
acataagtaaagtcgtacatatcga

SEQ ID NO: 106235 - DNA, 25 bp, Homo sapien
ttttatcgaaagacgaccgtagtca

SEQ ID NO: 106236 - DNA, 25 bp, Homo sapien
ttttatcgaaagtcgaccgtagtca

SEQ ID NO: 106237 - DNA, 25 bp, Homo sapien
cttcggtagcaagttcagtcagtta

SEQ ID NO: 106238 - DNA, 25 bp, Homo sapien
cttcggtagcaacttcagtcagtta

SEQ ID NO: 106239 - DNA, 25 bp, Homo sapien
ttccgtcaccggtgtgtccagtgtg

SEQ ID NO: 106240 - DNA, 25 bp, Homo sapien
ttccgtcaccggagtgtccagtgtg

SEQ ID NO: 106241 - DNA, 25 bp, Homo sapien
tctcgaggaatttgtgtctcaggta

SEQ ID NO: 106242 - DNA, 25 bp, Homo sapien
tctcgaggaattagtgtctcaggta

SEQ ID NO: 106243 - DNA, 25 bp, Homo sapien
gtgatgagtattaagtcctgattat

SEQ ID NO: 106244 - DNA, 25 bp, Homo sapien
gtgatgagtatttagtcctgattat

SEQ ID NO: 106245 - DNA, 25 bp, Homo sapien
tgtgttgaccatttataacgtttac

SEQ ID NO: 106246 - DNA, 25 bp, Homo sapien
tgtgttgaccatatataacgtttac

SEQ ID NO: 106247 - DNA, 25 bp, Homo sapien
atataatacgttgtacaatttcatg

SEQ ID NO: 106248 - DNA, 25 bp, Homo sapien
atataatacgttctacaatttcatg

SEQ ID NO: 106249 - DNA, 25 bp, Homo sapien
aatcaagtcttttacaagtttcagg

SEQ ID NO: 106250 - DNA, 25 bp, Homo sapien
aatcaagtctttaacaagtttcagg

SEQ ID NO: 106251 - DNA, 25 bp, Homo sapien
gtctcaatcccgtccttcatagatg

SEQ ID NO: 106252 - DNA, 25 bp, Homo sapien
gtctcaatcccgaccttcatagatg

SEQ ID NO: 106253 - DNA, 25 bp, Homo sapien
taatagtagccgacctttaagtaca

SEQ ID NO: 106254 - DNA, 25 bp, Homo sapien
taatagtagccgtcctttaagtaca

SEQ ID NO: 106255 - DNA, 25 bp, Homo sapien
ccttattacgacaacaacttccgca

SEQ ID NO: 106256 - DNA, 25 bp, Homo sapien
ccttattacgactacaacttccgca

SEQ ID NO: 106257 - DNA, 25 bp, Homo sapien
attctacacaccaggacagaatcgc

SEQ ID NO: 106258 - DNA, 25 bp, Homo sapien
attctacacacctggacagaatcgc

SEQ ID NO: 106259 - DNA, 25 bp, Homo sapien
attctccctacctccggggaatgtc

SEQ ID NO: 106260 - DNA, 25 bp, Homo sapien
attctccctaccaccggggaatgtc

SEQ ID NO: 106261 - DNA, 25 bp, Homo sapien
taagagcccatgtggggctcagaac

SEQ ID NO: 106262 - DNA, 25 bp, Homo sapien
taagagcccatgaggggctcagaac

SEQ ID NO: 106263 - DNA, 25 bp, Homo sapien
cgggaacgatctctaaggctccagg

SEQ ID NO: 106264 - DNA, 25 bp, Homo sapien
cgggaacgatctgtaaggctccagg

SEQ ID NO: 106265 - DNA, 25 bp, Homo sapien
tcccggagaccaagaagggcccgag

SEQ ID NO: 106266 - DNA, 25 bp, Homo sapien
tcccggagaccatgaagggcccgag

SEQ ID NO: 106267 - DNA, 25 bp, Homo sapien
gagaggaagacactgaggtcactga

SEQ ID NO: 106268 - DNA, 25 bp, Homo sapien
gagaggaagacagtgaggtcactga

SEQ ID NO: 106269 - DNA, 25 bp, Homo sapien
agaagaaagttattgtgacacatcc

SEQ ID NO: 106270 - DNA, 25 bp, Homo sapien
agaagaaagttaatgtgacacatcc

SEQ ID NO: 106271 - DNA, 25 bp, Homo sapien
aaaagtagagactttgaaaactcac

SEQ ID NO: 106272 - DNA, 25 bp, Homo sapien
aaaagtagagacattgaaaactcac

SEQ ID NO: 106273 - DNA, 25 bp, Homo sapien
gaagaaccatgaataacgcttaccc

SEQ ID NO: 106274 - DNA, 25 bp, Homo sapien
gaagaaccatgattaacgcttaccc

SEQ ID NO: 106275 - DNA, 25 bp, Homo sapien
caggtgcaggtttgcgtttcgaccg

SEQ ID NO: 106276 - DNA, 25 bp, Homo sapien
caggtgcaggttagcgtttcgaccg

SEQ ID NO: 106277 - DNA, 25 bp, Homo sapien
ggtggtagcacctctgtctttagca

SEQ ID NO: 106278 - DNA, 25 bp, Homo sapien
ggtggtagcaccactgtctttagca

SEQ ID NO: 106279 - DNA, 25 bp, Homo sapien
ccacgagagcgacgtcgccaagtcc

SEQ ID NO: 106280 - DNA, 25 bp, Homo sapien
ccacgagagcgaggtcgccaagtcc

SEQ ID NO: 106281 - DNA, 25 bp, Homo sapien
cctagatagttttccatgtattagt

SEQ ID NO: 106282 - DNA, 25 bp, Homo sapien
cctagatagtttaccatgtattagt

SEQ ID NO: 106283 - DNA, 25 bp, Homo sapien
aacatgagtcaaacccgattcgtca

SEQ ID NO: 106284 - DNA, 25 bp, Homo sapien
aacatgagtcaatcccgattcgtca

SEQ ID NO: 106285 - DNA, 25 bp, Homo sapien
tctactgtgtcacgtcccttttgat

SEQ ID NO: 106286 - DNA, 25 bp, Homo sapien
tctactgtgtcaggtcccttttgat

SEQ ID NO: 106287 - DNA, 25 bp, Homo sapien
cgtgagtcggttgacaccttttctt

SEQ ID NO: 106288 - DNA, 25 bp, Homo sapien
cgtgagtcggttcacaccttttctt

SEQ ID NO: 106289 - DNA, 25 bp, Homo sapien
gaaggagcggtggtccctcttttca

SEQ ID NO: 106290 - DNA, 25 bp, Homo sapien
gaaggagcggtgctccctcttttca

SEQ ID NO: 106291 - DNA, 25 bp, Homo sapien
aacccagggggacctcgtgtatcca

SEQ ID NO: 106292 - DNA, 25 bp, Homo sapien
aacccagggggagctcgtgtatcca

SEQ ID NO: 106293 - DNA, 25 bp, Homo sapien
gaccaggaagggtatctcgggttcc

SEQ ID NO: 106294 - DNA, 25 bp, Homo sapien
gaccaggaagggaatctcgggttcc

SEQ ID NO: 106295 - DNA, 25 bp, Homo sapien
agaaggacagggtgtatacccatcc

SEQ ID NO: 106296 - DNA, 25 bp, Homo sapien
agaaggacagggagtatacccatcc

SEQ ID NO: 106297 - DNA, 25 bp, Homo sapien
gtcgaacccttcgatccgatcatga

SEQ ID NO: 106298 - DNA, 25 bp, Homo sapien
gtcgaacccttccatccgatcatga

SEQ ID NO: 106299 - DNA, 25 bp, Homo sapien
cgaagtccctcgaaaagaccccgtg

SEQ ID NO: 106300 - DNA, 25 bp, Homo sapien
cgaagtccctcgtaaagaccccgtg

SEQ ID NO: 106301 - DNA, 25 bp, Homo sapien
acacagtcccattcctttcgacgga

SEQ ID NO: 106302 - DNA, 25 bp, Homo sapien
acacagtcccatacctttcgacgga

SEQ ID NO: 106303 - DNA, 25 bp, Homo sapien
cgcatcgacctgacctcgttctgaa

SEQ ID NO: 106304 - DNA, 25 bp, Homo sapien
cgcatcgacctgtcctcgttctgaa

SEQ ID NO: 106305 - DNA, 25 bp, Homo sapien
atgttcgccaagtacttgctttcac

SEQ ID NO: 106306 - DNA, 25 bp, Homo sapien
atgttcgccaagaacttgctttcac

SEQ ID NO: 106307 - DNA, 25 bp, Homo sapien
tatggaccctcttcttggtcttctc

SEQ ID NO: 106308 - DNA, 25 bp, Homo sapien
tatggaccctctacttggtcttctc

SEQ ID NO: 106309 - DNA, 25 bp, Homo sapien
ctagggctcgtgttcgggtgctccc

SEQ ID NO: 106310 - DNA, 25 bp, Homo sapien
ctagggctcgtgatcgggtgctccc

SEQ ID NO: 106311 - DNA, 25 bp, Homo sapien
gtgggttgtcctgaggttctgactc

SEQ ID NO: 106312 - DNA, 25 bp, Homo sapien
gtgggttgtcctcaggttctgactc

SEQ ID NO: 106313 - DNA, 25 bp, Homo sapien
aggggatgttttataccttcgactg

SEQ ID NO: 106314 - DNA, 25 bp, Homo sapien
aggggatgttttttaccttcgactg

SEQ ID NO: 106315 - DNA, 25 bp, Homo sapien
gataggtcactgttactctaacttt

SEQ ID NO: 106316 - DNA, 25 bp, Homo sapien
gataggtcactgatactctaacttt

SEQ ID NO: 106317 - DNA, 25 bp, Homo sapien
tttgacgcgaagatcactgtaccgg

SEQ ID NO: 106318 - DNA, 25 bp, Homo sapien
tttgacgcgaagttcactgtaccgg

SEQ ID NO: 106319 - DNA, 25 bp, Homo sapien
tacggactagagtaagacgtactca

SEQ ID NO: 106320 - DNA, 25 bp, Homo sapien
tacggactagagaaagacgtactca

SEQ ID NO: 106321 - DNA, 25 bp, Homo sapien
gaggctcggacagtcgtccctctac

SEQ ID NO: 106322 - DNA, 25 bp, Homo sapien
gaggctcggacactcgtccctctac

SEQ ID NO: 106323 - DNA, 25 bp, Homo sapien
agacagacccataagtgtaccttcc

SEQ ID NO: 106324 - DNA, 25 bp, Homo sapien
agacagacccattagtgtaccttcc

SEQ ID NO: 106325 - DNA, 25 bp, Homo sapien
tttctaaagcctaaaggagacctca

SEQ ID NO: 106326 - DNA, 25 bp, Homo sapien
tttctaaagccttaaggagacctca

SEQ ID NO: 106327 - DNA, 25 bp, Homo sapien
cccgaacaccggaggacgacggaag

SEQ ID NO: 106328 - DNA, 25 bp, Homo sapien
cccgaacaccggtggacgacggaag

SEQ ID NO: 106329 - DNA, 25 bp, Homo sapien
ggtatcaccccaacggaacgtagac

SEQ ID NO: 106330 - DNA, 25 bp, Homo sapien
ggtatcaccccatcggaacgtagac

SEQ ID NO: 106331 - DNA, 25 bp, Homo sapien
gtccagacagtaatgtgaacgcact

SEQ ID NO: 106332 - DNA, 25 bp, Homo sapien
gtccagacagtattgtgaacgcact

SEQ ID NO: 106333 - DNA, 25 bp, Homo sapien
agacgttgtccgtcaccttacctct

SEQ ID NO: 106334 - DNA, 25 bp, Homo sapien
agacgttgtccgacaccttacctct

SEQ ID NO: 106335 - DNA, 25 bp, Homo sapien
tctggtccggtccatagagactggt

SEQ ID NO: 106336 - DNA, 25 bp, Homo sapien
tctggtccggtcgatagagactggt

SEQ ID NO: 106337 - DNA, 25 bp, Homo sapien
ctaactaaatgccgcgattcctact

SEQ ID NO: 106338 - DNA, 25 bp, Homo sapien
ctaactaaatgcggcgattcctact

SEQ ID NO: 106339 - DNA, 25 bp, Homo sapien
gtgatagacgttacttgaaccaaat

SEQ ID NO: 106340 - DNA, 25 bp, Homo sapien
gtgatagacgtttcttgaaccaaat

SEQ ID NO: 106341 - DNA, 25 bp, Homo sapien
tgagacgttacctttttgaccaaca

SEQ ID NO: 106342 - DNA, 25 bp, Homo sapien
tgagacgttaccattttgaccaaca

SEQ ID NO: 106343 - DNA, 25 bp, Homo sapien
agggtcccaacttccgtaaccacgt

SEQ ID NO: 106344 - DNA, 25 bp, Homo sapien
agggtcccaactaccgtaaccacgt

SEQ ID NO: 106345 - DNA, 25 bp, Homo sapien
aaggggtccccgacggacgacacta

SEQ ID NO: 106346 - DNA, 25 bp, Homo sapien
aaggggtccccgtcggacgacacta

SEQ ID NO: 106347 - DNA, 25 bp, Homo sapien
ccggtggtcctcctgcgtcgtgaac

SEQ ID NO: 106348 - DNA, 25 bp, Homo sapien
ccggtggtcctcgtgcgtcgtgaac

SEQ ID NO: 106349 - DNA, 25 bp, Homo sapien
tcgagtatgatctgtgcttcgacaa

SEQ ID NO: 106350 - DNA, 25 bp, Homo sapien
tcgagtatgatcagtgcttcgacaa

SEQ ID NO: 106351 - DNA, 25 bp, Homo sapien
gacgtatctgtctcgctcccggtac

SEQ ID NO: 106352 - DNA, 25 bp, Homo sapien
gacgtatctgtcacgctcccggtac

SEQ ID NO: 106353 - DNA, 25 bp, Homo sapien
acgcttgtgcgatcgtgtcccggac

SEQ ID NO: 106354 - DNA, 25 bp, Homo sapien
acgcttgtgcgaacgtgtcccggac

SEQ ID NO: 106355 - DNA, 25 bp, Homo sapien
tacgtctttaggacgtatcttccct

SEQ ID NO: 106356 - DNA, 25 bp, Homo sapien
tacgtctttaggtcgtatcttccct

SEQ ID NO: 106357 - DNA, 25 bp, Homo sapien
aggacctttatcttacagtggccct

SEQ ID NO: 106358 - DNA, 25 bp, Homo sapien
aggacctttatcatacagtggccct

SEQ ID NO: 106359 - DNA, 25 bp, Homo sapien
atgaattctcgaagacagagttttc

SEQ ID NO: 106360 - DNA, 25 bp, Homo sapien
atgaattctcgatgacagagttttc

SEQ ID NO: 106361 - DNA, 25 bp, Homo sapien
ttgaaagtgacatgaccactttgtc

SEQ ID NO: 106362 - DNA, 25 bp, Homo sapien
ttgaaagtgacaagaccactttgtc

SEQ ID NO: 106363 - DNA, 25 bp, Homo sapien
cgtaaaaatcgagttaccaagttaa

SEQ ID NO: 106364 - DNA, 25 bp, Homo sapien
cgtaaaaatcgacttaccaagttaa

SEQ ID NO: 106365 - DNA, 25 bp, Homo sapien
ttcaaagtgttttacgtttcgtcca

SEQ ID NO: 106366 - DNA, 25 bp, Homo sapien
ttcaaagtgtttaacgtttcgtcca

SEQ ID NO: 106367 - DNA, 25 bp, Homo sapien
ggaaccactctttgagtttcttcac

SEQ ID NO: 106368 - DNA, 25 bp, Homo sapien
ggaaccactcttagagtttcttcac

SEQ ID NO: 106369 - DNA, 25 bp, Homo sapien
ggagacgatctcagggtttatttcc

SEQ ID NO: 106370 - DNA, 25 bp, Homo sapien
ggagacgatctctgggtttatttcc

SEQ ID NO: 106371 - DNA, 25 bp, Homo sapien
atctctcgacggaggaacttcacac

SEQ ID NO: 106372 - DNA, 25 bp, Homo sapien
atctctcgacggtggaacttcacac

SEQ ID NO: 106373 - DNA, 25 bp, Homo sapien
attcttactcggagcagtactgtta

SEQ ID NO: 106374 - DNA, 25 bp, Homo sapien
attcttactcggtgcagtactgtta

SEQ ID NO: 106375 - DNA, 25 bp, Homo sapien
tattagtacaggacgtcaatgacta

SEQ ID NO: 106376 - DNA, 25 bp, Homo sapien
tattagtacaggtcgtcaatgacta

SEQ ID NO: 106377 - DNA, 25 bp, Homo sapien
tagttcgtcggaatctaaagtgcta

SEQ ID NO: 106378 - DNA, 25 bp, Homo sapien
tagttcgtcggattctaaagtgcta

SEQ ID NO: 106379 - DNA, 25 bp, Homo sapien
ccgacagggcacagagtacgtagtt

SEQ ID NO: 106380 - DNA, 25 bp, Homo sapien
ccgacagggcactgagtacgtagtt

SEQ ID NO: 106381 - DNA, 25 bp, Homo sapien
cccgaagtgtaagtgtttggatctt

SEQ ID NO: 106382 - DNA, 25 bp, Homo sapien
cccgaagtgtaactgtttggatctt

SEQ ID NO: 106383 - DNA, 25 bp, Homo sapien
gaacggttgacgtccctgtggactc

SEQ ID NO: 106384 - DNA, 25 bp, Homo sapien
gaacggttgacgaccctgtggactc

SEQ ID NO: 106385 - DNA, 25 bp, Homo sapien
cccgtctttgaggaccaccacagaa

SEQ ID NO: 106386 - DNA, 25 bp, Homo sapien
cccgtctttgagcaccaccacagaa

SEQ ID NO: 106387 - DNA, 25 bp, Homo sapien
cttcagtatgagagaacctcacgga

SEQ ID NO: 106388 - DNA, 25 bp, Homo sapien
cttcagtatgagtgaacctcacgga

SEQ ID NO: 106389 - DNA, 25 bp, Homo sapien
tgtcgaggtgaacgacgactcccca

SEQ ID NO: 106390 - DNA, 25 bp, Homo sapien
tgtcgaggtgaaggacgactcccca

SEQ ID NO: 106391 - DNA, 25 bp, Homo sapien
ccgagtctgaacagtgaccccgatc

SEQ ID NO: 106392 - DNA, 25 bp, Homo sapien
ccgagtctgaactgtgaccccgatc

SEQ ID NO: 106393 - DNA, 25 bp, Homo sapien
gactcgtgtccctccgtcgtgggaa

SEQ ID NO: 106394 - DNA, 25 bp, Homo sapien
gactcgtgtcccaccgtcgtgggaa

SEQ ID NO: 106395 - DNA, 25 bp, Homo sapien
gacacttcccttaccgtcggaggaa

SEQ ID NO: 106396 - DNA, 25 bp, Homo sapien
gacacttccctttccgtcggaggaa

SEQ ID NO: 106397 - DNA, 25 bp, Homo sapien
ggttggatctttacagactttggac

SEQ ID NO: 106398 - DNA, 25 bp, Homo sapien
ggttggatcttttcagactttggac

SEQ ID NO: 106399 - DNA, 25 bp, Homo sapien
gggtttccctgtatactgtatattt

SEQ ID NO: 106400 - DNA, 25 bp, Homo sapien
gggtttccctgtttactgtatattt

SEQ ID NO: 106401 - DNA, 25 bp, Homo sapien
gatactcctaggtgtccctctactc

SEQ ID NO: 106402 - DNA, 25 bp, Homo sapien
gatactcctaggagtccctctactc

SEQ ID NO: 106403 - DNA, 25 bp, Homo sapien
gtatacaagtatgacaccgttcatc

SEQ ID NO: 106404 - DNA, 25 bp, Homo sapien
gtatacaagtatcacaccgttcatc

SEQ ID NO: 106405 - DNA, 25 bp, Homo sapien
gagactcaattttcgcggttatatt

SEQ ID NO: 106406 - DNA, 25 bp, Homo sapien
gagactcaatttacgcggttatatt

SEQ ID NO: 106407 - DNA, 25 bp, Homo sapien
agaactacccagttagggtcaaagt

SEQ ID NO: 106408 - DNA, 25 bp, Homo sapien
agaactacccagatagggtcaaagt

SEQ ID NO: 106409 - DNA, 25 bp, Homo sapien
gtattccctagaggaagtctcgaca

SEQ ID NO: 106410 - DNA, 25 bp, Homo sapien
gtattccctagacgaagtctcgaca

SEQ ID NO: 106411 - DNA, 25 bp, Homo sapien
gaacgaattcaccaaaagacttaag

SEQ ID NO: 106412 - DNA, 25 bp, Homo sapien
gaacgaattcacgaaaagacttaag

SEQ ID NO: 106413 - DNA, 25 bp, Homo sapien
aaacattgaaatacaggagtctccg

SEQ ID NO: 106414 - DNA, 25 bp, Homo sapien
aaacattgaaattcaggagtctccg

SEQ ID NO: 106415 - DNA, 25 bp, Homo sapien
catattggaccgaaaggagtatcct

SEQ ID NO: 106416 - DNA, 25 bp, Homo sapien
catattggaccgtaaggagtatcct

SEQ ID NO: 106417 - DNA, 25 bp, Homo sapien
actaacgtcggagttcatcctgatc

SEQ ID NO: 106418 - DNA, 25 bp, Homo sapien
actaacgtcggacttcatcctgatc

SEQ ID NO: 106419 - DNA, 25 bp, Homo sapien
cgtcggcgacgtcgagcagcttgaa

SEQ ID NO: 106420 - DNA, 25 bp, Homo sapien
cgtcggcgacgtggagcagcttgaa

SEQ ID NO: 106421 - DNA, 25 bp, Homo sapien
agtgtaccaaagttgaaacccgaat

SEQ ID NO: 106422 - DNA, 25 bp, Homo sapien
agtgtaccaaagatgaaacccgaat

SEQ ID NO: 106423 - DNA, 25 bp, Homo sapien
aggaccagaactaggcacacaggtc

SEQ ID NO: 106424 - DNA, 25 bp, Homo sapien
aggaccagaacttggcacacaggtc

SEQ ID NO: 106425 - DNA, 25 bp, Homo sapien
aaagacagttaagttgtcgacaatc

SEQ ID NO: 106426 - DNA, 25 bp, Homo sapien
aaagacagttaacttgtcgacaatc

SEQ ID NO: 106427 - DNA, 25 bp, Homo sapien
ctgtcacaaagtacgggaccaatac

SEQ ID NO: 106428 - DNA, 25 bp, Homo sapien
ctgtcacaaagttcgggaccaatac

SEQ ID NO: 106429 - DNA, 25 bp, Homo sapien
gcttctgaagtgtgggaactcctat

SEQ ID NO: 106430 - DNA, 25 bp, Homo sapien
gcttctgaagtgagggaactcctat

SEQ ID NO: 106431 - DNA, 25 bp, Homo sapien
ttctcggtagtgacaggcactctgg

SEQ ID NO: 106432 - DNA, 25 bp, Homo sapien
ttctcggtagtgtcaggcactctgg

SEQ ID NO: 106433 - DNA, 25 bp, Homo sapien
aatcctttaagacaacgcacgattg

SEQ ID NO: 106434 - DNA, 25 bp, Homo sapien
aatcctttaagagaacgcacgattg

SEQ ID NO: 106435 - DNA, 25 bp, Homo sapien
gaacaccagtgagacccacggtctg

SEQ ID NO: 106436 - DNA, 25 bp, Homo sapien
gaacaccagtgacacccacggtctg

SEQ ID NO: 106437 - DNA, 25 bp, Homo sapien
cgtcgagactgtctgatctttactc

SEQ ID NO: 106438 - DNA, 25 bp, Homo sapien
cgtcgagactgtgtgatctttactc

SEQ ID NO: 106439 - DNA, 25 bp, Homo sapien
ctaccactaccctaaaggtaactac

SEQ ID NO: 106440 - DNA, 25 bp, Homo sapien
ctaccactacccaaaaggtaactac

SEQ ID NO: 106441 - DNA, 25 bp, Homo sapien
ttcaccatctctacgtcaggtgatc

SEQ ID NO: 106442 - DNA, 25 bp, Homo sapien
ttcaccatctcttcgtcaggtgatc

SEQ ID NO: 106443 - DNA, 25 bp, Homo sapien
atcaggagtcgtagtggtcgtgtct

SEQ ID NO: 106444 - DNA, 25 bp, Homo sapien
atcaggagtcgttgtggtcgtgtct

SEQ ID NO: 106445 - DNA, 25 bp, Homo sapien
cttcatcattgtgatcggtttgtgt

SEQ ID NO: 106446 - DNA, 25 bp, Homo sapien
cttcatcattgtcatcggtttgtgt

SEQ ID NO: 106447 - DNA, 25 bp, Homo sapien
ctgtcattgtattactgtctacccg

SEQ ID NO: 106448 - DNA, 25 bp, Homo sapien
ctgtcattgtataactgtctacccg

SEQ ID NO: 106449 - DNA, 25 bp, Homo sapien
gactcgatgtcttccttactagacc

SEQ ID NO: 106450 - DNA, 25 bp, Homo sapien
gactcgatgtctaccttactagacc

SEQ ID NO: 106451 - DNA, 25 bp, Homo sapien
cgccacgcgtctctccgactacatc

SEQ ID NO: 106452 - DNA, 25 bp, Homo sapien
cgccacgcgtctgtccgactacatc

SEQ ID NO: 106453 - DNA, 25 bp, Homo sapien
gactcccaggtccaggtgtacaagc

SEQ ID NO: 106454 - DNA, 25 bp, Homo sapien
gactcccaggtcgaggtgtacaagc

SEQ ID NO: 106455 - DNA, 25 bp, Homo sapien
atgagttgtcagacggaaacacaaa

SEQ ID NO: 106456 - DNA, 25 bp, Homo sapien
atgagttgtcagtcggaaacacaaa

SEQ ID NO: 106457 - DNA, 25 bp, Homo sapien
atatgttcagacacggtaccgaaga

SEQ ID NO: 106458 - DNA, 25 bp, Homo sapien
atatgttcagactcggtaccgaaga

SEQ ID NO: 106459 - DNA, 25 bp, Homo sapien
gtctttacgtttatcgtgacacaag

SEQ ID NO: 106460 - DNA, 25 bp, Homo sapien
gtctttacgtttttcgtgacacaag

SEQ ID NO: 106461 - DNA, 25 bp, Homo sapien
cgtccaaagtttcctctcctaggac

SEQ ID NO: 106462 - DNA, 25 bp, Homo sapien
cgtccaaagtttgctctcctaggac

SEQ ID NO: 106463 - DNA, 25 bp, Homo sapien
ttaccacttggttgttctaatgaga

SEQ ID NO: 106464 - DNA, 25 bp, Homo sapien
ttaccacttggtagttctaatgaga

SEQ ID NO: 106465 - DNA, 25 bp, Homo sapien
gaaaggacagtttacgtgtgacgac

SEQ ID NO: 106466 - DNA, 25 bp, Homo sapien
gaaaggacagttaacgtgtgacgac

SEQ ID NO: 106467 - DNA, 25 bp, Homo sapien
cgggagcgcagcaggcaccccgacg

SEQ ID NO: 106468 - DNA, 25 bp, Homo sapien
cgggagcgcagctggcaccccgacg

SEQ ID NO: 106469 - DNA, 25 bp, Homo sapien
ttatctggggtacgagactcccacg

SEQ ID NO: 106470 - DNA, 25 bp, Homo sapien
ttatctggggtaggagactcccacg

SEQ ID NO: 106471 - DNA, 25 bp, Homo sapien
tttctgacgtctccagatcctaccg

SEQ ID NO: 106472 - DNA, 25 bp, Homo sapien
tttctgacgtctgcagatcctaccg

SEQ ID NO: 106473 - DNA, 25 bp, Homo sapien
aacttttcgattgacaggtcaatgt

SEQ ID NO: 106474 - DNA, 25 bp, Homo sapien
aacttttcgattcacaggtcaatgt

SEQ ID NO: 106475 - DNA, 25 bp, Homo sapien
aacctttcaacagaccttcgagaag

SEQ ID NO: 106476 - DNA, 25 bp, Homo sapien
aacctttcaacacaccttcgagaag

SEQ ID NO: 106477 - DNA, 25 bp, Homo sapien
tacctgataatgttgtcttcgtaaa

SEQ ID NO: 106478 - DNA, 25 bp, Homo sapien
tacctgataatgatgtcttcgtaaa

SEQ ID NO: 106479 - DNA, 25 bp, Homo sapien
ctaagaacgtacgtaatctcaaacg

SEQ ID NO: 106480 - DNA, 25 bp, Homo sapien
ctaagaacgtacctaatctcaaacg

SEQ ID NO: 106481 - DNA, 25 bp, Homo sapien
tttatacgtgtagacagtacatacg

SEQ ID NO: 106482 - DNA, 25 bp, Homo sapien
tttatacgtgtacacagtacatacg

SEQ ID NO: 106483 - DNA, 25 bp, Homo sapien
tagtaaatgactgtatccatacaag

SEQ ID NO: 106484 - DNA, 25 bp, Homo sapien
tagtaaatgactctatccatacaag

SEQ ID NO: 106485 - DNA, 25 bp, Homo sapien
gtattaactgaaaccgccatgtgta

SEQ ID NO: 106486 - DNA, 25 bp, Homo sapien
gtattaactgaatccgccatgtgta

SEQ ID NO: 106487 - DNA, 25 bp, Homo sapien
aggttctgataacctgggtcctttc

SEQ ID NO: 106488 - DNA, 25 bp, Homo sapien
aggttctgataagctgggtcctttc

SEQ ID NO: 106489 - DNA, 25 bp, Homo sapien
tggggtaccgtatgtacagttacgc

SEQ ID NO: 106490 - DNA, 25 bp, Homo sapien
tggggtaccgtaagtacagttacgc

SEQ ID NO: 106491 - DNA, 25 bp, Homo sapien
ggttccgttactctatctgttaccg

SEQ ID NO: 106492 - DNA, 25 bp, Homo sapien
ggttccgttactgtatctgttaccg

SEQ ID NO: 106493 - DNA, 25 bp, Homo sapien
aggagccgactcaggcacctggtct

SEQ ID NO: 106494 - DNA, 25 bp, Homo sapien
aggagccgactctggcacctggtct

SEQ ID NO: 106495 - DNA, 25 bp, Homo sapien
caagggtatacgttcccgacgagtc

SEQ ID NO: 106496 - DNA, 25 bp, Homo sapien
caagggtatacgatcccgacgagtc

SEQ ID NO: 106497 - DNA, 25 bp, Homo sapien
tgaaagacgtaaatgacccactctc

SEQ ID NO: 106498 - DNA, 25 bp, Homo sapien
tgaaagacgtaattgacccactctc

SEQ ID NO: 106499 - DNA, 25 bp, Homo sapien
agagaagacgcatcacacccattct

SEQ ID NO: 106500 - DNA, 25 bp, Homo sapien
agagaagacgcaacacacccattct

SEQ ID NO: 106501 - DNA, 25 bp, Homo sapien
ccgagggtcacgacccgagggaaac

SEQ ID NO: 106502 - DNA, 25 bp, Homo sapien
ccgagggtcacgtcccgagggaaac

SEQ ID NO: 106503 - DNA, 25 bp, Homo sapien
gattagtccctcaactaaagtattg

SEQ ID NO: 106504 - DNA, 25 bp, Homo sapien
gattagtccctctactaaagtattg

SEQ ID NO: 106505 - DNA, 25 bp, Homo sapien
cggaggactccagtctcaagtctcc

SEQ ID NO: 106506 - DNA, 25 bp, Homo sapien
cggaggactccactctcaagtctcc

SEQ ID NO: 106507 - DNA, 25 bp, Homo sapien
agagtcgtctcgtgttcatagtttc

SEQ ID NO: 106508 - DNA, 25 bp, Homo sapien
agagtcgtctcgagttcatagtttc

SEQ ID NO: 106509 - DNA, 25 bp, Homo sapien
ggtgatggttctagttctcaaggac

SEQ ID NO: 106510 - DNA, 25 bp, Homo sapien
ggtgatggttcttgttctcaaggac

SEQ ID NO: 106511 - DNA, 25 bp, Homo sapien
cataatgttttctgttccgaaagac

SEQ ID NO: 106512 - DNA, 25 bp, Homo sapien
cataatgttttcagttccgaaagac

SEQ ID NO: 106513 - DNA, 25 bp, Homo sapien
accactgttcttaccttttagagag

SEQ ID NO: 106514 - DNA, 25 bp, Homo sapien
accactgttctttccttttagagag

SEQ ID NO: 106515 - DNA, 25 bp, Homo sapien
ccgtatagtgttttccttttacctg

SEQ ID NO: 106516 - DNA, 25 bp, Homo sapien
ccgtatagtgttatccttttacctg

SEQ ID NO: 106517 - DNA, 25 bp, Homo sapien
atcttacaggaaaacattttcgtcg

SEQ ID NO: 106518 - DNA, 25 bp, Homo sapien
atcttacaggaatacattttcgtcg

SEQ ID NO: 106519 - DNA, 25 bp, Homo sapien
agagagtgacacacagagcgtgtca

SEQ ID NO: 106520 - DNA, 25 bp, Homo sapien
agagagtgacactcagagcgtgtca

SEQ ID NO: 106521 - DNA, 25 bp, Homo sapien
ggaaggaccgtaagacaatggtctg

SEQ ID NO: 106522 - DNA, 25 bp, Homo sapien
ggaaggaccgtatgacaatggtctg

SEQ ID NO: 106523 - DNA, 25 bp, Homo sapien
agaaactccacctgacaaccctgag

SEQ ID NO: 106524 - DNA, 25 bp, Homo sapien
agaaactccaccagacaaccctgag

SEQ ID NO: 106525 - DNA, 25 bp, Homo sapien
gggtcccgacgcaagaaccctgcgt

SEQ ID NO: 106526 - DNA, 25 bp, Homo sapien
gggtcccgacgctagaaccctgcgt

SEQ ID NO: 106527 - DNA, 25 bp, Homo sapien
gaagttaaacacagtgaatcccact

SEQ ID NO: 106528 - DNA, 25 bp, Homo sapien
gaagttaaacactgtgaatcccact

SEQ ID NO: 106529 - DNA, 25 bp, Homo sapien
atttttacacatcgagactcgaagt

SEQ ID NO: 106530 - DNA, 25 bp, Homo sapien
atttttacacatggagactcgaagt

SEQ ID NO: 106531 - DNA, 25 bp, Homo sapien
ttcgtacgtaacaatgaaccgtaat

SEQ ID NO: 106532 - DNA, 25 bp, Homo sapien
ttcgtacgtaactatgaaccgtaat

SEQ ID NO: 106533 - DNA, 25 bp, Homo sapien
acccaagtgcacgtggaactcctac

SEQ ID NO: 106534 - DNA, 25 bp, Homo sapien
acccaagtgcacctggaactcctac

SEQ ID NO: 106535 - DNA, 25 bp, Homo sapien
accaaagttctacagtgaaccttag

SEQ ID NO: 106536 - DNA, 25 bp, Homo sapien
accaaagttctagagtgaaccttag

SEQ ID NO: 106537 - DNA, 25 bp, Homo sapien
gttcgaaattttcgatcaactaaag

SEQ ID NO: 106538 - DNA, 25 bp, Homo sapien
gttcgaaattttggatcaactaaag

SEQ ID NO: 106539 - DNA, 25 bp, Homo sapien
ataaccttccggtacgtaacggaag

SEQ ID NO: 106540 - DNA, 25 bp, Homo sapien
ataaccttccggaacgtaacggaag

SEQ ID NO: 106541 - DNA, 25 bp, Homo sapien
acatacttgatactagttccgaacg

SEQ ID NO: 106542 - DNA, 25 bp, Homo sapien
acatacttgatagtagttccgaacg

SEQ ID NO: 106543 - DNA, 25 bp, Homo sapien
aatacatacatgtaggtctcgaggt

SEQ ID NO: 106544 - DNA, 25 bp, Homo sapien
aatacatacatgaaggtctcgaggt

SEQ ID NO: 106545 - DNA, 25 bp, Homo sapien
cgaacctagaatagagtctcacgtt

SEQ ID NO: 106546 - DNA, 25 bp, Homo sapien
cgaacctagaattgagtctcacgtt

SEQ ID NO: 106547 - DNA, 25 bp, Homo sapien
gggtaccagacatcaaacaactcga

SEQ ID NO: 106548 - DNA, 25 bp, Homo sapien
gggtaccagacaacaaacaactcga

SEQ ID NO: 106549 - DNA, 25 bp, Homo sapien
gcaaagatacatataacgttcgaca

SEQ ID NO: 106550 - DNA, 25 bp, Homo sapien
gcaaagatacatttaacgttcgaca

SEQ ID NO: 106551 - DNA, 25 bp, Homo sapien
caaaataacgtgtagtatgtcttac

SEQ ID NO: 106552 - DNA, 25 bp, Homo sapien
caaaataacgtgaagtatgtcttac

SEQ ID NO: 106553 - DNA, 25 bp, Homo sapien
gggtaaaacaattatcttgtctcta

SEQ ID NO: 106554 - DNA, 25 bp, Homo sapien
gggtaaaacaataatcttgtctcta

SEQ ID NO: 106555 - DNA, 25 bp, Homo sapien
gtgggacagcagaaaccgtttatgc

SEQ ID NO: 106556 - DNA, 25 bp, Homo sapien
gtgggacagcagtaaccgtttatgc

SEQ ID NO: 106557 - DNA, 25 bp, Homo sapien
ttggacaggagagagcctcttcacg

SEQ ID NO: 106558 - DNA, 25 bp, Homo sapien
ttggacaggagacagcctcttcacg

SEQ ID NO: 106559 - DNA, 25 bp, Homo sapien
cgctagaagaagtcagaccatccac

SEQ ID NO: 106560 - DNA, 25 bp, Homo sapien
cgctagaagaagacagaccatccac

SEQ ID NO: 106561 - DNA, 25 bp, Homo sapien
gtaactactccgtctactgtctccg

SEQ ID NO: 106562 - DNA, 25 bp, Homo sapien
gtaactactccgactactgtctccg

SEQ ID NO: 106563 - DNA, 25 bp, Homo sapien
ggacggttcccctgtcgtctcggtc

SEQ ID NO: 106564 - DNA, 25 bp, Homo sapien
ggacggttccccagtcgtctcggtc

SEQ ID NO: 106565 - DNA, 25 bp, Homo sapien
ggtttactcactagtactctgagta

SEQ ID NO: 106566 - DNA, 25 bp, Homo sapien
ggtttactcacttgtactctgagta

SEQ ID NO: 106567 - DNA, 25 bp, Homo sapien
cctggtttatgtttgtactctgtga

SEQ ID NO: 106568 - DNA, 25 bp, Homo sapien
cctggtttatgtatgtactctgtga

SEQ ID NO: 106569 - DNA, 25 bp, Homo sapien
gcaggtgtagtcctaccgtttgggt

SEQ ID NO: 106570 - DNA, 25 bp, Homo sapien
gcaggtgtagtcgtaccgtttgggt

SEQ ID NO: 106571 - DNA, 25 bp, Homo sapien
acgtaaataacatgtctcatgagac

SEQ ID NO: 106572 - DNA, 25 bp, Homo sapien
acgtaaataacaagtctcatgagac

SEQ ID NO: 106573 - DNA, 25 bp, Homo sapien
taacgtgacaagtaacccaccgaga

SEQ ID NO: 106574 - DNA, 25 bp, Homo sapien
taacgtgacaagaaacccaccgaga

SEQ ID NO: 106575 - DNA, 25 bp, Homo sapien
ttggtgccgtagacaccacatcgaa

SEQ ID NO: 106576 - DNA, 25 bp, Homo sapien
ttggtgccgtagtcaccacatcgaa

SEQ ID NO: 106577 - DNA, 25 bp, Homo sapien
ggtggcacgttcctctcgtcgacca

SEQ ID NO: 106578 - DNA, 25 bp, Homo sapien
ggtggcacgttcgtctcgtcgacca

SEQ ID NO: 106579 - DNA, 25 bp, Homo sapien
agggctcatcgaccctaatgtccgc

SEQ ID NO: 106580 - DNA, 25 bp, Homo sapien
agggctcatcgagcctaatgtccgc

SEQ ID NO: 106581 - DNA, 25 bp, Homo sapien
gggtcttaacgacaccagaagcttc

SEQ ID NO: 106582 - DNA, 25 bp, Homo sapien
gggtcttaacgagaccagaagcttc

SEQ ID NO: 106583 - DNA, 25 bp, Homo sapien
ggggaaacgagagtttcacagattc

SEQ ID NO: 106584 - DNA, 25 bp, Homo sapien
ggggaaacgagactttcacagattc

SEQ ID NO: 106585 - DNA, 25 bp, Homo sapien
cttacacgccagttccagtacttag

SEQ ID NO: 106586 - DNA, 25 bp, Homo sapien
cttacacgccagatccagtacttag

SEQ ID NO: 106587 - DNA, 25 bp, Homo sapien
acgaaactgaagttcacagtagtaa

SEQ ID NO: 106588 - DNA, 25 bp, Homo sapien
acgaaactgaagatcacagtagtaa

SEQ ID NO: 106589 - DNA, 25 bp, Homo sapien
gagataacagaactctctgtctcat

SEQ ID NO: 106590 - DNA, 25 bp, Homo sapien
gagataacagaagtctctgtctcat

SEQ ID NO: 106591 - DNA, 25 bp, Homo sapien
gacaaacgaggagaggagactcgat

SEQ ID NO: 106592 - DNA, 25 bp, Homo sapien
gacaaacgaggacaggagactcgat

SEQ ID NO: 106593 - DNA, 25 bp, Homo sapien
gtcacacggtgaaccatgacgtccc

SEQ ID NO: 106594 - DNA, 25 bp, Homo sapien
gtcacacggtgatccatgacgtccc

SEQ ID NO: 106595 - DNA, 25 bp, Homo sapien
cttcgatggacatcgcgatcttgaa

SEQ ID NO: 106596 - DNA, 25 bp, Homo sapien
cttcgatggacaacgcgatcttgaa

SEQ ID NO: 106597 - DNA, 25 bp, Homo sapien
tccgaatgactcctgcgaacttgaa

SEQ ID NO: 106598 - DNA, 25 bp, Homo sapien
tccgaatgactcgtgcgaacttgaa

SEQ ID NO: 106599 - DNA, 25 bp, Homo sapien
taagactcactacgtccaagggaga

SEQ ID NO: 106600 - DNA, 25 bp, Homo sapien
taagactcactaggtccaagggaga

SEQ ID NO: 106601 - DNA, 25 bp, Homo sapien
aagtcacgacggtccagaccgggtg

SEQ ID NO: 106602 - DNA, 25 bp, Homo sapien
aagtcacgacggaccagaccgggtg

SEQ ID NO: 106603 - DNA, 25 bp, Homo sapien
ttcaagagggacgacatatgacggg

SEQ ID NO: 106604 - DNA, 25 bp, Homo sapien
ttcaagagggaccacatatgacggg

SEQ ID NO: 106605 - DNA, 25 bp, Homo sapien
aaaacggtgtaacaaacgtgaacat

SEQ ID NO: 106606 - DNA, 25 bp, Homo sapien
aaaacggtgtaagaaacgtgaacat

SEQ ID NO: 106607 - DNA, 25 bp, Homo sapien
acaaaagaactactgcgaccgggcc

SEQ ID NO: 106608 - DNA, 25 bp, Homo sapien
acaaaagaactagtgcgaccgggcc

SEQ ID NO: 106609 - DNA, 25 bp, Homo sapien
gacgtgcttcaggagcaccgggccg

SEQ ID NO: 106610 - DNA, 25 bp, Homo sapien
gacgtgcttcagcagcaccgggccg

SEQ ID NO: 106611 - DNA, 25 bp, Homo sapien
gggggtccctccttcggagtctacc

SEQ ID NO: 106612 - DNA, 25 bp, Homo sapien
gggggtccctccatcggagtctacc

SEQ ID NO: 106613 - DNA, 25 bp, Homo sapien
tttgaccgtattctctaagttactg

SEQ ID NO: 106614 - DNA, 25 bp, Homo sapien
tttgaccgtattgtctaagttactg

SEQ ID NO: 106615 - DNA, 25 bp, Homo sapien
gaagggacctttgttcatagtctgt

SEQ ID NO: 106616 - DNA, 25 bp, Homo sapien
gaagggacctttcttcatagtctgt

SEQ ID NO: 106617 - DNA, 25 bp, Homo sapien
acgagggacctaggtgcctcttttt

SEQ ID NO: 106618 - DNA, 25 bp, Homo sapien
acgagggacctacgtgcctcttttt

SEQ ID NO: 106619 - DNA, 25 bp, Homo sapien
ggcctgccgggtctactgccgtgct

SEQ ID NO: 106620 - DNA, 25 bp, Homo sapien
ggcctgccgggtgtactgccgtgct

SEQ ID NO: 106621 - DNA, 25 bp, Homo sapien
gactacacgggtacctaggtcagct

SEQ ID NO: 106622 - DNA, 25 bp, Homo sapien
gactacacgggttcctaggtcagct

SEQ ID NO: 106623 - DNA, 25 bp, Homo sapien
tcccacgatcggacctgtaggttgt

SEQ ID NO: 106624 - DNA, 25 bp, Homo sapien
tcccacgatcggtcctgtaggttgt

SEQ ID NO: 106625 - DNA, 25 bp, Homo sapien
tacagcaacccgtcttcgtgtttgt

SEQ ID NO: 106626 - DNA, 25 bp, Homo sapien
tacagcaacccgacttcgtgtttgt

SEQ ID NO: 106627 - DNA, 25 bp, Homo sapien
ttcgtctcagactgaccatgttgga

SEQ ID NO: 106628 - DNA, 25 bp, Homo sapien
ttcgtctcagacagaccatgttgga

SEQ ID NO: 106629 - DNA, 25 bp, Homo sapien
accgatttgacgtatccttttggta

SEQ ID NO: 106630 - DNA, 25 bp, Homo sapien
accgatttgacgaatccttttggta

SEQ ID NO: 106631 - DNA, 25 bp, Homo sapien
gatcatcttccgacccgatcttgga

SEQ ID NO: 106632 - DNA, 25 bp, Homo sapien
gatcatcttccgtcccgatcttgga

SEQ ID NO: 106633 - DNA, 25 bp, Homo sapien
gatgagtttaccattttgatttcac

SEQ ID NO: 106634 - DNA, 25 bp, Homo sapien
gatgagtttacctttttgatttcac

SEQ ID NO: 106635 - DNA, 25 bp, Homo sapien
cgtcaggttcttgtggtcttttgta

SEQ ID NO: 106636 - DNA, 25 bp, Homo sapien
cgtcaggttcttctggtcttttgta

SEQ ID NO: 106637 - DNA, 25 bp, Homo sapien
ctctaggattaaggaggattcctaa

SEQ ID NO: 106638 - DNA, 25 bp, Homo sapien
ctctaggattaacgaggattcctaa

SEQ ID NO: 106639 - DNA, 25 bp, Homo sapien
tgacgttttaaggacttcctactct

SEQ ID NO: 106640 - DNA, 25 bp, Homo sapien
tgacgttttaagcacttcctactct

SEQ ID NO: 106641 - DNA, 25 bp, Homo sapien
ctgagtatcgttgttcttgtatctg

SEQ ID NO: 106642 - DNA, 25 bp, Homo sapien
ctgagtatcgttcttcttgtatctg

SEQ ID NO: 106643 - DNA, 25 bp, Homo sapien
tgtgactggtaactttttatctacg

SEQ ID NO: 106644 - DNA, 25 bp, Homo sapien
tgtgactggtaagtttttatctacg

SEQ ID NO: 106645 - DNA, 25 bp, Homo sapien
catgtttttgggtcgttcttcgtag

SEQ ID NO: 106646 - DNA, 25 bp, Homo sapien
catgtttttgggacgttcttcgtag

SEQ ID NO: 106647 - DNA, 25 bp, Homo sapien
gtgtgttcctgacgtggtcccctcg

SEQ ID NO: 106648 - DNA, 25 bp, Homo sapien
gtgtgttcctgaggtggtcccctcg

SEQ ID NO: 106649 - DNA, 25 bp, Homo sapien
taggttggagaggtctcgatctttc

SEQ ID NO: 106650 - DNA, 25 bp, Homo sapien
taggttggagagctctcgatctttc

SEQ ID NO: 106651 - DNA, 25 bp, Homo sapien
gaacgaaggacagtaccatctttct

SEQ ID NO: 106652 - DNA, 25 bp, Homo sapien
gaacgaaggacactaccatctttct

SEQ ID NO: 106653 - DNA, 25 bp, Homo sapien
acatggaacgactgagtcgatgtat

SEQ ID NO: 106654 - DNA, 25 bp, Homo sapien
acatggaacgacagagtcgatgtat

SEQ ID NO: 106655 - DNA, 25 bp, Homo sapien
gatcgtgaaacagtgacggtagtct

SEQ ID NO: 106656 - DNA, 25 bp, Homo sapien
gatcgtgaaacactgacggtagtct

SEQ ID NO: 106657 - DNA, 25 bp, Homo sapien
cgcaaatggaagaggtccggtagct

SEQ ID NO: 106658 - DNA, 25 bp, Homo sapien
cgcaaatggaagtggtccggtagct

SEQ ID NO: 106659 - DNA, 25 bp, Homo sapien
ctacaaaagaagagtttgccgacgt

SEQ ID NO: 106660 - DNA, 25 bp, Homo sapien
ctacaaaagaagtgtttgccgacgt

SEQ ID NO: 106661 - DNA, 25 bp, Homo sapien
tccaagaagagatctttagattact

SEQ ID NO: 106662 - DNA, 25 bp, Homo sapien
tccaagaagagaactttagattact

SEQ ID NO: 106663 - DNA, 25 bp, Homo sapien
gacaggacagacatgtctagtaata

SEQ ID NO: 106664 - DNA, 25 bp, Homo sapien
gacaggacagacttgtctagtaata

SEQ ID NO: 106665 - DNA, 25 bp, Homo sapien
acgagaaactactacttagagttaa

SEQ ID NO: 106666 - DNA, 25 bp, Homo sapien
acgagaaactacaacttagagttaa

SEQ ID NO: 106667 - DNA, 25 bp, Homo sapien
tccactaacacaaccgatgtcggag

SEQ ID NO: 106668 - DNA, 25 bp, Homo sapien
tccactaacacatccgatgtcggag

SEQ ID NO: 106669 - DNA, 25 bp, Homo sapien
acaaacgaacgacctcgtctctggg

SEQ ID NO: 106670 - DNA, 25 bp, Homo sapien
acaaacgaacgagctcgtctctggg

SEQ ID NO: 106671 - DNA, 25 bp, Homo sapien
aagtcggaaataactctcatgtcag

SEQ ID NO: 106672 - DNA, 25 bp, Homo sapien
aagtcggaaatatctctcatgtcag

SEQ ID NO: 106673 - DNA, 25 bp, Homo sapien
gtcaaccaaaggttcccactaggtc

SEQ ID NO: 106674 - DNA, 25 bp, Homo sapien
gtcaaccaaaggatcccactaggtc

SEQ ID NO: 106675 - DNA, 25 bp, Homo sapien
aggacgaggtcttcccgaccgagtg

SEQ ID NO: 106676 - DNA, 25 bp, Homo sapien
aggacgaggtctacccgaccgagtg

SEQ ID NO: 106677 - DNA, 25 bp, Homo sapien
gagtcgaccttatacctctccggtg

SEQ ID NO: 106678 - DNA, 25 bp, Homo sapien
gagtcgaccttaaacctctccggtg

SEQ ID NO: 106679 - DNA, 25 bp, Homo sapien
ggaggccgacgagactcctcgtgca

SEQ ID NO: 106680 - DNA, 25 bp, Homo sapien
ggaggccgacgacactcctcgtgca

SEQ ID NO: 106681 - DNA, 25 bp, Homo sapien
gaagccacggttaacgtcacagtcc

SEQ ID NO: 106682 - DNA, 25 bp, Homo sapien
gaagccacggtttacgtcacagtcc

SEQ ID NO: 106683 - DNA, 25 bp, Homo sapien
aggcgaacccgaaagcccggtcgcg

SEQ ID NO: 106684 - DNA, 25 bp, Homo sapien
aggcgaacccgatagcccggtcgcg

SEQ ID NO: 106685 - DNA, 25 bp, Homo sapien
ttggggaccgcgtccgtccgaatga

SEQ ID NO: 106686 - DNA, 25 bp, Homo sapien
ttggggaccgcgaccgtccgaatga

SEQ ID NO: 106687 - DNA, 25 bp, Homo sapien
ttttgtgcccgtctttcgtgacgca

SEQ ID NO: 106688 - DNA, 25 bp, Homo sapien
ttttgtgcccgtgtttcgtgacgca

SEQ ID NO: 106689 - DNA, 25 bp, Homo sapien
aggtcccgtcgtttcgcgagacggg

SEQ ID NO: 106690 - DNA, 25 bp, Homo sapien
aggtcccgtcgtatcgcgagacggg

SEQ ID NO: 106691 - DNA, 25 bp, Homo sapien
agtagtaaccgtcagggtcggccgc

SEQ ID NO: 106692 - DNA, 25 bp, Homo sapien
agtagtaaccgtgagggtcggccgc

SEQ ID NO: 106693 - DNA, 25 bp, Homo sapien
atatatgtctacgttcgttccccgc

SEQ ID NO: 106694 - DNA, 25 bp, Homo sapien
atatatgtctaccttcgttccccgc

SEQ ID NO: 106695 - DNA, 25 bp, Homo sapien
gatacatgtcatagtgcttctagcc

SEQ ID NO: 106696 - DNA, 25 bp, Homo sapien
gatacatgtcattgtgcttctagcc

SEQ ID NO: 106697 - DNA, 25 bp, Homo sapien
tacatgtaagaatggagtctactcc

SEQ ID NO: 106698 - DNA, 25 bp, Homo sapien
tacatgtaagaaaggagtctactcc

SEQ ID NO: 106699 - DNA, 25 bp, Homo sapien
atttaacgatcgtctgaagatcctt

SEQ ID NO: 106700 - DNA, 25 bp, Homo sapien
atttaacgatcgactgaagatcctt

SEQ ID NO: 106701 - DNA, 25 bp, Homo sapien
tacttaaaatcaactcatcctcctg

SEQ ID NO: 106702 - DNA, 25 bp, Homo sapien
tacttaaaatcatctcatcctcctg

SEQ ID NO: 106703 - DNA, 25 bp, Homo sapien
cataaatgttcttccgagtcccccg

SEQ ID NO: 106704 - DNA, 25 bp, Homo sapien
cataaatgttctaccgagtcccccg

SEQ ID NO: 106705 - DNA, 25 bp, Homo sapien
aaaaaagttttcagatgtcttacct

SEQ ID NO: 106706 - DNA, 25 bp, Homo sapien
aaaaaagttttctgatgtcttacct

SEQ ID NO: 106707 - DNA, 25 bp, Homo sapien
aagaaataaactatcgggaccctgt

SEQ ID NO: 106708 - DNA, 25 bp, Homo sapien
aagaaataaactttcgggaccctgt

SEQ ID NO: 106709 - DNA, 25 bp, Homo sapien
gacaagaggtcccgtgccgccctgt

SEQ ID NO: 106710 - DNA, 25 bp, Homo sapien
gacaagaggtccggtgccgccctgt

SEQ ID NO: 106711 - DNA, 25 bp, Homo sapien
gtccatgtgtcctcacgagctcctt

SEQ ID NO: 106712 - DNA, 25 bp, Homo sapien
gtccatgtgtccacacgagctcctt

SEQ ID NO: 106713 - DNA, 25 bp, Homo sapien
agaccctttcgagagctaactcgga

SEQ ID NO: 106714 - DNA, 25 bp, Homo sapien
agaccctttcgacagctaactcgga

SEQ ID NO: 106715 - DNA, 25 bp, Homo sapien
ccaccactgagtcagggtacttcgc

SEQ ID NO: 106716 - DNA, 25 bp, Homo sapien
ccaccactgagtgagggtacttcgc

SEQ ID NO: 106717 - DNA, 25 bp, Homo sapien
gcatctacagtgtcggtgaacctgg

SEQ ID NO: 106718 - DNA, 25 bp, Homo sapien
gcatctacagtgacggtgaacctgg

SEQ ID NO: 106719 - DNA, 25 bp, Homo sapien
gtccctcgggccggtgacagtgtgc

SEQ ID NO: 106720 - DNA, 25 bp, Homo sapien
gtccctcgggcccgtgacagtgtgc

SEQ ID NO: 106721 - DNA, 25 bp, Homo sapien
ccgtggtcgtccggcgtcccgtggc

SEQ ID NO: 106722 - DNA, 25 bp, Homo sapien
ccgtggtcgtcccgcgtcccgtggc

SEQ ID NO: 106723 - DNA, 25 bp, Homo sapien
ccttcgtttcagacttccacggtac

SEQ ID NO: 106724 - DNA, 25 bp, Homo sapien
ccttcgtttcagtcttccacggtac

SEQ ID NO: 106725 - DNA, 25 bp, Homo sapien
tttcttagtatctccatccggtcgt

SEQ ID NO: 106726 - DNA, 25 bp, Homo sapien
tttcttagtatcaccatccggtcgt

SEQ ID NO: 106727 - DNA, 25 bp, Homo sapien
gtttttgtctcactcccgagtcctt

SEQ ID NO: 106728 - DNA, 25 bp, Homo sapien
gtttttgtctcagtcccgagtcctt

SEQ ID NO: 106729 - DNA, 25 bp, Homo sapien
tttccaaagttcagagttacgtcgt

SEQ ID NO: 106730 - DNA, 25 bp, Homo sapien
tttccaaagttctgagttacgtcgt

SEQ ID NO: 106731 - DNA, 25 bp, Homo sapien
tatgtccactggtactaagtgactt

SEQ ID NO: 106732 - DNA, 25 bp, Homo sapien
tatgtccactggaactaagtgactt

SEQ ID NO: 106733 - DNA, 25 bp, Homo sapien
cagtcgtcactaaccggaaagagaa

SEQ ID NO: 106734 - DNA, 25 bp, Homo sapien
cagtcgtcactatccggaaagagaa

SEQ ID NO: 106735 - DNA, 25 bp, Homo sapien
gaactcctcgtttttggacaaattg

SEQ ID NO: 106736 - DNA, 25 bp, Homo sapien
gaactcctcgttattggacaaattg

SEQ ID NO: 106737 - DNA, 25 bp, Homo sapien
accttctaattcttcaagacctaat

SEQ ID NO: 106738 - DNA, 25 bp, Homo sapien
accttctaattcatcaagacctaat

SEQ ID NO: 106739 - DNA, 25 bp, Homo sapien
gtctacacctagtcgttcgtcctca

SEQ ID NO: 106740 - DNA, 25 bp, Homo sapien
gtctacacctagacgttcgtcctca

SEQ ID NO: 106741 - DNA, 25 bp, Homo sapien
tgtgaccactgaagggtccgtaagt

SEQ ID NO: 106742 - DNA, 25 bp, Homo sapien
tgtgaccactgatgggtccgtaagt

SEQ ID NO: 106743 - DNA, 25 bp, Homo sapien
atacccgacctcagggtcgttgacg

SEQ ID NO: 106744 - DNA, 25 bp, Homo sapien
atacccgacctctgggtcgttgacg

SEQ ID NO: 106745 - DNA, 25 bp, Homo sapien
gttattccgtcctgagatgtattcg

SEQ ID NO: 106746 - DNA, 25 bp, Homo sapien
gttattccgtccagagatgtattcg

SEQ ID NO: 106747 - DNA, 25 bp, Homo sapien
aaataggtccgtacagaatttatac

SEQ ID NO: 106748 - DNA, 25 bp, Homo sapien
aaataggtccgttcagaatttatac

SEQ ID NO: 106749 - DNA, 25 bp, Homo sapien
ttatatcaggtcctcaagtttctac

SEQ ID NO: 106750 - DNA, 25 bp, Homo sapien
ttatatcaggtcgtcaagtttctac

SEQ ID NO: 106751 - DNA, 25 bp, Homo sapien
agccgtaagtcatattcttggttca

SEQ ID NO: 106752 - DNA, 25 bp, Homo sapien
agccgtaagtcaaattcttggttca

SEQ ID NO: 106753 - DNA, 25 bp, Homo sapien
ctgtatgaagtactttgaccatgtt

SEQ ID NO: 106754 - DNA, 25 bp, Homo sapien
ctgtatgaagtagtttgaccatgtt

SEQ ID NO: 106755 - DNA, 25 bp, Homo sapien
agtcttgaagtagcttttatccttt

SEQ ID NO: 106756 - DNA, 25 bp, Homo sapien
agtcttgaagtaccttttatccttt

SEQ ID NO: 106757 - DNA, 25 bp, Homo sapien
agtcataatatgtcttgttaccttg

SEQ ID NO: 106758 - DNA, 25 bp, Homo sapien
agtcataatatgacttgttaccttg

SEQ ID NO: 106759 - DNA, 25 bp, Homo sapien
tgtaaaagtcggaaataactctcat

SEQ ID NO: 106760 - DNA, 25 bp, Homo sapien
tgtaaaagtcggtaataactctcat

SEQ ID NO: 106761 - DNA, 25 bp, Homo sapien
ctttaaatcgacttaggatcgtcaa

SEQ ID NO: 106762 - DNA, 25 bp, Homo sapien
ctttaaatcgacataggatcgtcaa

SEQ ID NO: 106763 - DNA, 25 bp, Homo sapien
tctgagtcaatattacgtcgtaaat

SEQ ID NO: 106764 - DNA, 25 bp, Homo sapien
tctgagtcaataatacgtcgtaaat

SEQ ID NO: 106765 - DNA, 25 bp, Homo sapien
aatgtttgtatgaatcataccaaat

SEQ ID NO: 106766 - DNA, 25 bp, Homo sapien
aatgtttgtatgtatcataccaaat

SEQ ID NO: 106767 - DNA, 25 bp, Homo sapien
acctcggagtagacttcgtaaagga

SEQ ID NO: 106768 - DNA, 25 bp, Homo sapien
acctcggagtagtcttcgtaaagga

SEQ ID NO: 106769 - DNA, 25 bp, Homo sapien
acaagggtaagtgtcgtcttggagt

SEQ ID NO: 106770 - DNA, 25 bp, Homo sapien
acaagggtaagtctcgtcttggagt

SEQ ID NO: 106771 - DNA, 25 bp, Homo sapien
aaatcgcggaggtcgtcgccgagga

SEQ ID NO: 106772 - DNA, 25 bp, Homo sapien
aaatcgcggaggacgtcgccgagga

SEQ ID NO: 106773 - DNA, 25 bp, Homo sapien
cgaagaggtcccacgaccgctggac

SEQ ID NO: 106774 - DNA, 25 bp, Homo sapien
cgaagaggtccctcgaccgctggac

SEQ ID NO: 106775 - DNA, 25 bp, Homo sapien
acccgaggcttcgagacagggacgc

SEQ ID NO: 106776 - DNA, 25 bp, Homo sapien
acccgaggcttccagacagggacgc

SEQ ID NO: 106777 - DNA, 25 bp, Homo sapien
accctaagtctttccataagggtct

SEQ ID NO: 106778 - DNA, 25 bp, Homo sapien
accctaagtcttaccataagggtct

SEQ ID NO: 106779 - DNA, 25 bp, Homo sapien
caatcgtcgtatcaacgaaagatct

SEQ ID NO: 106780 - DNA, 25 bp, Homo sapien
caatcgtcgtatgaacgaaagatct

SEQ ID NO: 106781 - DNA, 25 bp, Homo sapien
acagaccacttgctgagaacgacct

SEQ ID NO: 106782 - DNA, 25 bp, Homo sapien
acagaccacttggtgagaacgacct

SEQ ID NO: 106783 - DNA, 25 bp, Homo sapien
gaggacacttctgtggtacggatcg

SEQ ID NO: 106784 - DNA, 25 bp, Homo sapien
gaggacacttctctggtacggatcg

SEQ ID NO: 106785 - DNA, 25 bp, Homo sapien
aagagagagacttccccgggaactc

SEQ ID NO: 106786 - DNA, 25 bp, Homo sapien
aagagagagactaccccgggaactc

SEQ ID NO: 106787 - DNA, 25 bp, Homo sapien
aaattcacccttggacgtgtcacct

SEQ ID NO: 106788 - DNA, 25 bp, Homo sapien
aaattcacccttcgacgtgtcacct

SEQ ID NO: 106789 - DNA, 25 bp, Homo sapien
gaagggaccatttccgacctaccta

SEQ ID NO: 106790 - DNA, 25 bp, Homo sapien
gaagggaccattaccgacctaccta

SEQ ID NO: 106791 - DNA, 25 bp, Homo sapien
agagacgaactagaaccacctgtca

SEQ ID NO: 106792 - DNA, 25 bp, Homo sapien
agagacgaactacaaccacctgtca

SEQ ID NO: 106793 - DNA, 25 bp, Homo sapien
aaagggtctttcctagaacccgtga

SEQ ID NO: 106794 - DNA, 25 bp, Homo sapien
aaagggtctttcgtagaacccgtga

SEQ ID NO: 106795 - DNA, 25 bp, Homo sapien
cttgcaccccgtgaggacccgtgag

SEQ ID NO: 106796 - DNA, 25 bp, Homo sapien
cttgcaccccgtcaggacccgtgag

SEQ ID NO: 106797 - DNA, 25 bp, Homo sapien
cttcgacccgtcgtttgtaccaatg

SEQ ID NO: 106798 - DNA, 25 bp, Homo sapien
cttcgacccgtcctttgtaccaatg

SEQ ID NO: 106799 - DNA, 25 bp, Homo sapien
atgtctgcctttttgtccgtcactt

SEQ ID NO: 106800 - DNA, 25 bp, Homo sapien
atgtctgcctttatgtccgtcactt

SEQ ID NO: 106801 - DNA, 25 bp, Homo sapien
gtttgcctgcttcttctcgacgagc

SEQ ID NO: 106802 - DNA, 25 bp, Homo sapien
gtttgcctgcttgttctcgacgagc

SEQ ID NO: 106803 - DNA, 25 bp, Homo sapien
tatttaccctattttgtcttcgggg

SEQ ID NO: 106804 - DNA, 25 bp, Homo sapien
tatttaccctatattgtcttcgggg

SEQ ID NO: 106805 - DNA, 25 bp, Homo sapien
ttagacttctttgaggtcttaatgc

SEQ ID NO: 106806 - DNA, 25 bp, Homo sapien
ttagacttctttcaggtcttaatgc

SEQ ID NO: 106807 - DNA, 25 bp, Homo sapien
ggaaatacgtcagaccgtgtatcga

SEQ ID NO: 106808 - DNA, 25 bp, Homo sapien
ggaaatacgtcacaccgtgtatcga

SEQ ID NO: 106809 - DNA, 25 bp, Homo sapien
cagggatgattctcccgcacagacg

SEQ ID NO: 106810 - DNA, 25 bp, Homo sapien
cagggatgattcacccgcacagacg

SEQ ID NO: 106811 - DNA, 25 bp, Homo sapien
ttgtcagtagtcataccagccaacg

SEQ ID NO: 106812 - DNA, 25 bp, Homo sapien
ttgtcagtagtcttaccagccaacg

SEQ ID NO: 106813 - DNA, 25 bp, Homo sapien
gtgttacgactctccgtatgagaag

SEQ ID NO: 106814 - DNA, 25 bp, Homo sapien
gtgttacgactcaccgtatgagaag

SEQ ID NO: 106815 - DNA, 25 bp, Homo sapien
cggtgtgactcgtcctacgtgccgg

SEQ ID NO: 106816 - DNA, 25 bp, Homo sapien
cggtgtgactcgacctacgtgccgg

SEQ ID NO: 106817 - DNA, 25 bp, Homo sapien
cagtggacgtcacacgagtgtaagg

SEQ ID NO: 106818 - DNA, 25 bp, Homo sapien
cagtggacgtcagacgagtgtaagg

SEQ ID NO: 106819 - DNA, 25 bp, Homo sapien
tattaaggaatatccggcagtcggg

SEQ ID NO: 106820 - DNA, 25 bp, Homo sapien
tattaaggaataaccggcagtcggg

SEQ ID NO: 106821 - DNA, 25 bp, Homo sapien
agcacgatgtttacaccgttgtgga

SEQ ID NO: 106822 - DNA, 25 bp, Homo sapien
agcacgatgttttcaccgttgtgga

SEQ ID NO: 106823 - DNA, 25 bp, Homo sapien
tccgttcctggctcctcagggtcga

SEQ ID NO: 106824 - DNA, 25 bp, Homo sapien
tccgttcctggcacctcagggtcga

SEQ ID NO: 106825 - DNA, 25 bp, Homo sapien
ttcatcccggcgaaccgcaggagca

SEQ ID NO: 106826 - DNA, 25 bp, Homo sapien
ttcatcccggcgtaccgcaggagca

SEQ ID NO: 106827 - DNA, 25 bp, Homo sapien
gtgaacgccgggaacccgtgaaacc

SEQ ID NO: 106828 - DNA, 25 bp, Homo sapien
gtgaacgccgggtacccgtgaaacc

SEQ ID NO: 106829 - DNA, 25 bp, Homo sapien
tagagtccctggagtcacctgtgaa

SEQ ID NO: 106830 - DNA, 25 bp, Homo sapien
tagagtccctggtgtcacctgtgaa

SEQ ID NO: 106831 - DNA, 25 bp, Homo sapien
agtgtcctgaggtgacccgttcgca

SEQ ID NO: 106832 - DNA, 25 bp, Homo sapien
agtgtcctgaggagacccgttcgca

SEQ ID NO: 106833 - DNA, 25 bp, Homo sapien
ggtccccgggagacatacgttcggc

SEQ ID NO: 106834 - DNA, 25 bp, Homo sapien
ggtccccgggagtcatacgttcggc

SEQ ID NO: 106835 - DNA, 25 bp, Homo sapien
ccacctacggggtcccgtgagacag

SEQ ID NO: 106836 - DNA, 25 bp, Homo sapien
ccacctacggggacccgtgagacag

SEQ ID NO: 106837 - DNA, 25 bp, Homo sapien
tgacactccgagaaactcgttgatt

SEQ ID NO: 106838 - DNA, 25 bp, Homo sapien
tgacactccgagtaactcgttgatt

SEQ ID NO: 106839 - DNA, 25 bp, Homo sapien
ctacgactccttcacagccactgtt

SEQ ID NO: 106840 - DNA, 25 bp, Homo sapien
ctacgactccttgacagccactgtt

SEQ ID NO: 106841 - DNA, 25 bp, Homo sapien
tctttactcccttcaagcggatgtg

SEQ ID NO: 106842 - DNA, 25 bp, Homo sapien
tctttactccctacaagcggatgtg

SEQ ID NO: 106843 - DNA, 25 bp, Homo sapien
tgtttcacgtcacatagaatctcag

SEQ ID NO: 106844 - DNA, 25 bp, Homo sapien
tgtttcacgtcagatagaatctcag

SEQ ID NO: 106845 - DNA, 25 bp, Homo sapien
cttttcgttccaattgagttcgaca

SEQ ID NO: 106846 - DNA, 25 bp, Homo sapien
cttttcgttccatttgagttcgaca

SEQ ID NO: 106847 - DNA, 25 bp, Homo sapien
atctttgtccaaccagtaatcgaag

SEQ ID NO: 106848 - DNA, 25 bp, Homo sapien
atctttgtccaagcagtaatcgaag

SEQ ID NO: 106849 - DNA, 25 bp, Homo sapien
ttttcactgtgatctgtcaggatat

SEQ ID NO: 106850 - DNA, 25 bp, Homo sapien
ttttcactgtgaactgtcaggatat

SEQ ID NO: 106851 - DNA, 25 bp, Homo sapien
tacagttgagacgtactacggaact

SEQ ID NO: 106852 - DNA, 25 bp, Homo sapien
tacagttgagacctactacggaact

SEQ ID NO: 106853 - DNA, 25 bp, Homo sapien
ggtgaacagaatgaccatcgaatgt

SEQ ID NO: 106854 - DNA, 25 bp, Homo sapien
ggtgaacagaatcaccatcgaatgt

SEQ ID NO: 106855 - DNA, 25 bp, Homo sapien
cgatcagacataaaaacgacacgat

SEQ ID NO: 106856 - DNA, 25 bp, Homo sapien
cgatcagacatataaacgacacgat

SEQ ID NO: 106857 - DNA, 25 bp, Homo sapien
aaaagaacacactcgagactgagat

SEQ ID NO: 106858 - DNA, 25 bp, Homo sapien
aaaagaacacacacgagactgagat

SEQ ID NO: 106859 - DNA, 25 bp, Homo sapien
aaccagtaaaagacggtacttagat

SEQ ID NO: 106860 - DNA, 25 bp, Homo sapien
aaccagtaaaagtcggtacttagat

SEQ ID NO: 106861 - DNA, 25 bp, Homo sapien
cgttttgataagacgcagtgtacta

SEQ ID NO: 106862 - DNA, 25 bp, Homo sapien
cgttttgataagtcgcagtgtacta

SEQ ID NO: 106863 - DNA, 25 bp, Homo sapien
cttccgtgaacagtgctcgaagtta

SEQ ID NO: 106864 - DNA, 25 bp, Homo sapien
cttccgtgaacactgctcgaagtta

SEQ ID NO: 106865 - DNA, 25 bp, Homo sapien
tgtccgtctagcagaatgtccaggg

SEQ ID NO: 106866 - DNA, 25 bp, Homo sapien
tgtccgtctagctgaatgtccaggg

SEQ ID NO: 106867 - DNA, 25 bp, Homo sapien
tctcagacccttaagtgttcagagg

SEQ ID NO: 106868 - DNA, 25 bp, Homo sapien
tctcagaccctttagtgttcagagg

SEQ ID NO: 106869 - DNA, 25 bp, Homo sapien
agtgatgagtattaagtcctgatta

SEQ ID NO: 106870 - DNA, 25 bp, Homo sapien
agtgatgagtataaagtcctgatta

SEQ ID NO: 106871 - DNA, 25 bp, Homo sapien
ctggatgacaatgtcaactgtatac

SEQ ID NO: 106872 - DNA, 25 bp, Homo sapien
ctggatgacaatctcaactgtatac

SEQ ID NO: 106873 - DNA, 25 bp, Homo sapien
cgtataatgaactcgaatttgactg

SEQ ID NO: 106874 - DNA, 25 bp, Homo sapien
cgtataatgaacacgaatttgactg

SEQ ID NO: 106875 - DNA, 25 bp, Homo sapien
aagtcaaaattaccaatttcgacgg

SEQ ID NO: 106876 - DNA, 25 bp, Homo sapien
aagtcaaaattagcaatttcgacgg

SEQ ID NO: 106877 - DNA, 25 bp, Homo sapien
ctcaactcctgatccttgaccgagg

SEQ ID NO: 106878 - DNA, 25 bp, Homo sapien
ctcaactcctgaaccttgaccgagg

SEQ ID NO: 106879 - DNA, 25 bp, Homo sapien
aagatacgtcggaccttcgaataga

SEQ ID NO: 106880 - DNA, 25 bp, Homo sapien
aagatacgtcggtccttcgaataga

SEQ ID NO: 106881 - DNA, 25 bp, Homo sapien
ccaagtatatgaaaattgtcctcga

SEQ ID NO: 106882 - DNA, 25 bp, Homo sapien
ccaagtatatgataattgtcctcga

SEQ ID NO: 106883 - DNA, 25 bp, Homo sapien
accgactcactcacggaagaatcga

SEQ ID NO: 106884 - DNA, 25 bp, Homo sapien
accgactcactctcggaagaatcga

SEQ ID NO: 106885 - DNA, 25 bp, Homo sapien
ctcccgtcaccacagaagattagtc

SEQ ID NO: 106886 - DNA, 25 bp, Homo sapien
ctcccgtcaccagagaagattagtc

SEQ ID NO: 106887 - DNA, 25 bp, Homo sapien
taagttaccttgtaggggcgaaatc

SEQ ID NO: 106888 - DNA, 25 bp, Homo sapien
taagttaccttgaaggggcgaaatc

SEQ ID NO: 106889 - DNA, 25 bp, Homo sapien
caggtgaccttacaaggtcacaagg

SEQ ID NO: 106890 - DNA, 25 bp, Homo sapien
caggtgaccttagaaggtcacaagg

SEQ ID NO: 106891 - DNA, 25 bp, Homo sapien
gcacctgcccagggagggacccgag

SEQ ID NO: 106892 - DNA, 25 bp, Homo sapien
gcacctgcccagcgagggacccgag

SEQ ID NO: 106893 - DNA, 25 bp, Homo sapien
gtagggatagatctgaatcctcgag

SEQ ID NO: 106894 - DNA, 25 bp, Homo sapien
gtagggatagatgtgaatcctcgag

SEQ ID NO: 106895 - DNA, 25 bp, Homo sapien
tgaagtgagattgtggaccatcacg

SEQ ID NO: 106896 - DNA, 25 bp, Homo sapien
tgaagtgagattctggaccatcacg

SEQ ID NO: 106897 - DNA, 25 bp, Homo sapien
ggtaaagtaggagtctgaacaatcc

SEQ ID NO: 106898 - DNA, 25 bp, Homo sapien
ggtaaagtaggactctgaacaatcc

SEQ ID NO: 106899 - DNA, 25 bp, Homo sapien
gtaaaagcatgtatagaccacattc

SEQ ID NO: 106900 - DNA, 25 bp, Homo sapien
gtaaaagcatgtttagaccacattc

SEQ ID NO: 106901 - DNA, 25 bp, Homo sapien
gggggtcatgtttgacctccacgtc

SEQ ID NO: 106902 - DNA, 25 bp, Homo sapien
gggggtcatgttagacctccacgtc

SEQ ID NO: 106903 - DNA, 25 bp, Homo sapien
ggtcggagcctgacggtttctaaca

SEQ ID NO: 106904 - DNA, 25 bp, Homo sapien
ggtcggagcctgtcggtttctaaca

SEQ ID NO: 106905 - DNA, 25 bp, Homo sapien
gccgacaggcgagtctcacaggtcc

SEQ ID NO: 106906 - DNA, 25 bp, Homo sapien
gccgacaggcgactctcacaggtcc

SEQ ID NO: 106907 - DNA, 25 bp, Homo sapien
ccttaagtggtttccgaagtataat

SEQ ID NO: 106908 - DNA, 25 bp, Homo sapien
ccttaagtggttaccgaagtataat

SEQ ID NO: 106909 - DNA, 25 bp, Homo sapien
taacttaggtcattgtccattgtaa

SEQ ID NO: 106910 - DNA, 25 bp, Homo sapien
taacttaggtcaatgtccattgtaa

SEQ ID NO: 106911 - DNA, 25 bp, Homo sapien
gtctactggtcactaacccttatga

SEQ ID NO: 106912 - DNA, 25 bp, Homo sapien
gtctactggtcagtaacccttatga

SEQ ID NO: 106913 - DNA, 25 bp, Homo sapien
cctctgagtcgtgttaacctttttt

SEQ ID NO: 106914 - DNA, 25 bp, Homo sapien
cctctgagtcgtcttaacctttttt

SEQ ID NO: 106915 - DNA, 25 bp, Homo sapien
cgaagtgaggttgtttctgttttta

SEQ ID NO: 106916 - DNA, 25 bp, Homo sapien
cgaagtgaggttctttctgttttta

SEQ ID NO: 106917 - DNA, 25 bp, Homo sapien
aacctccgggtcactctctttgtca

SEQ ID NO: 106918 - DNA, 25 bp, Homo sapien
aacctccgggtctctctctttgtca

SEQ ID NO: 106919 - DNA, 25 bp, Homo sapien
tcaggagagagtcgtttcggtttcc

SEQ ID NO: 106920 - DNA, 25 bp, Homo sapien
tcaggagagagtggtttcggtttcc

SEQ ID NO: 106921 - DNA, 25 bp, Homo sapien
gacagggatggtttcaccggtatcc

SEQ ID NO: 106922 - DNA, 25 bp, Homo sapien
gacagggatggtatcaccggtatcc

SEQ ID NO: 106923 - DNA, 25 bp, Homo sapien
aggaccgacttcaacccgagcatga

SEQ ID NO: 106924 - DNA, 25 bp, Homo sapien
aggaccgacttctacccgagcatga

SEQ ID NO: 106925 - DNA, 25 bp, Homo sapien
cgaaggacctctacaagaacagtgg

SEQ ID NO: 106926 - DNA, 25 bp, Homo sapien
cgaaggacctcttcaagaacagtgg

SEQ ID NO: 106927 - DNA, 25 bp, Homo sapien
tacgacgggccctcctgaagagtga

SEQ ID NO: 106928 - DNA, 25 bp, Homo sapien
tacgacgggcccacctgaagagtga

SEQ ID NO: 106929 - DNA, 25 bp, Homo sapien
gtcaaccccagaacctcttcgtgaa

SEQ ID NO: 106930 - DNA, 25 bp, Homo sapien
gtcaaccccagatcctcttcgtgaa

SEQ ID NO: 106931 - DNA, 25 bp, Homo sapien
ctgactcccctgaacttcgctttca

SEQ ID NO: 106932 - DNA, 25 bp, Homo sapien
ctgactcccctgtacttcgctttca

SEQ ID NO: 106933 - DNA, 25 bp, Homo sapien
cagggaccacttctgtggtcttcgg

SEQ ID NO: 106934 - DNA, 25 bp, Homo sapien
cagggaccacttgtgtggtcttcgg

SEQ ID NO: 106935 - DNA, 25 bp, Homo sapien
ccgtgtgaaccgtgtcgggtgcccc

SEQ ID NO: 106936 - DNA, 25 bp, Homo sapien
ccgtgtgaaccgagtcgggtgcccc

SEQ ID NO: 106937 - DNA, 25 bp, Homo sapien
gtcgagggttccgaggtgcggtacc

SEQ ID NO: 106938 - DNA, 25 bp, Homo sapien
gtcgagggttcccaggtgcggtacc

SEQ ID NO: 106939 - DNA, 25 bp, Homo sapien
gagggaagttttaccctcggtacag

SEQ ID NO: 106940 - DNA, 25 bp, Homo sapien
gagggaagtttttccctcggtacag

SEQ ID NO: 106941 - DNA, 25 bp, Homo sapien
ccgaacggtctctccgtctaacttg

SEQ ID NO: 106942 - DNA, 25 bp, Homo sapien
ccgaacggtctcaccgtctaacttg

SEQ ID NO: 106943 - DNA, 25 bp, Homo sapien
ctaacgacgtcaagtttctgaccga

SEQ ID NO: 106944 - DNA, 25 bp, Homo sapien
ctaacgacgtcatgtttctgaccga

SEQ ID NO: 106945 - DNA, 25 bp, Homo sapien
tagctacaggtattagtgtaccagt

SEQ ID NO: 106946 - DNA, 25 bp, Homo sapien
tagctacaggtaatagtgtaccagt

SEQ ID NO: 106947 - DNA, 25 bp, Homo sapien
gagtctctcgaagttacgcctcagt

SEQ ID NO: 106948 - DNA, 25 bp, Homo sapien
gagtctctcgaacttacgcctcagt

SEQ ID NO: 106949 - DNA, 25 bp, Homo sapien
tcggacgtccataagtctaacccct

SEQ ID NO: 106950 - DNA, 25 bp, Homo sapien
tcggacgtccattagtctaacccct

SEQ ID NO: 106951 - DNA, 25 bp, Homo sapien
cgcagtatagccaaaagagacctca

SEQ ID NO: 106952 - DNA, 25 bp, Homo sapien
cgcagtatagcctaaagagacctca

SEQ ID NO: 106953 - DNA, 25 bp, Homo sapien
agtaaactgttaaggactacggaca

SEQ ID NO: 106954 - DNA, 25 bp, Homo sapien
agtaaactgttatggactacggaca

SEQ ID NO: 106955 - DNA, 25 bp, Homo sapien
cgacgttcaccctagacggaccgga

SEQ ID NO: 106956 - DNA, 25 bp, Homo sapien
cgacgttcacccaagacggaccgga

SEQ ID NO: 106957 - DNA, 25 bp, Homo sapien
gtccacgaaatatgtagaccgtcac

SEQ ID NO: 106958 - DNA, 25 bp, Homo sapien
gtccacgaaataagtagaccgtcac

SEQ ID NO: 106959 - DNA, 25 bp, Homo sapien
ggacgttgtctggacactcctctcc

SEQ ID NO: 106960 - DNA, 25 bp, Homo sapien
ggacgttgtctgcacactcctctcc

SEQ ID NO: 106961 - DNA, 25 bp, Homo sapien
ctgtgcccgtgacacaggtctggtc

SEQ ID NO: 106962 - DNA, 25 bp, Homo sapien
ctgtgcccgtgagacaggtctggtc

SEQ ID NO: 106963 - DNA, 25 bp, Homo sapien
attcctactgagaccagtctctatg

SEQ ID NO: 106964 - DNA, 25 bp, Homo sapien
attcctactgagtccagtctctatg

SEQ ID NO: 106965 - DNA, 25 bp, Homo sapien
gacgaggacgtggtttgaaccaatt

SEQ ID NO: 106966 - DNA, 25 bp, Homo sapien
gacgaggacgtgctttgaaccaatt

SEQ ID NO: 106967 - DNA, 25 bp, Homo sapien
gagacgttacctttttgaccaacat

SEQ ID NO: 106968 - DNA, 25 bp, Homo sapien
gagacgttacctatttgaccaacat

SEQ ID NO: 106969 - DNA, 25 bp, Homo sapien
agagggtcccgattgtccgtcccac

SEQ ID NO: 106970 - DNA, 25 bp, Homo sapien
agagggtcccgaatgtccgtcccac

SEQ ID NO: 106971 - DNA, 25 bp, Homo sapien
aggaggccgccgtcgagcacgactc

SEQ ID NO: 106972 - DNA, 25 bp, Homo sapien
aggaggccgccgacgagcacgactc

SEQ ID NO: 106973 - DNA, 25 bp, Homo sapien
cgaggctccgcgacgagtccgtaac

SEQ ID NO: 106974 - DNA, 25 bp, Homo sapien
cgaggctccgcgtcgagtccgtaac

SEQ ID NO: 106975 - DNA, 25 bp, Homo sapien
tcgatactgaggttgtctgtcctaa

SEQ ID NO: 106976 - DNA, 25 bp, Homo sapien
tcgatactgaggatgtctgtcctaa

SEQ ID NO: 106977 - DNA, 25 bp, Homo sapien
ggacgtatctgtctcgctcccggta

SEQ ID NO: 106978 - DNA, 25 bp, Homo sapien
ggacgtatctgtgtcgctcccggta

SEQ ID NO: 106979 - DNA, 25 bp, Homo sapien
cacgcttgtgcgatcgtgtcccgga

SEQ ID NO: 106980 - DNA, 25 bp, Homo sapien
cacgcttgtgcgttcgtgtcccgga

SEQ ID NO: 106981 - DNA, 25 bp, Homo sapien
agtcttgtcggttcggtcctcctgt

SEQ ID NO: 106982 - DNA, 25 bp, Homo sapien
agtcttgtcggtacggtcctcctgt

SEQ ID NO: 106983 - DNA, 25 bp, Homo sapien
ggacgtttcatttcggtcgtgcctc

SEQ ID NO: 106984 - DNA, 25 bp, Homo sapien
ggacgtttcattacggtcgtgcctc

SEQ ID NO: 106985 - DNA, 25 bp, Homo sapien
aagtaattactgacaagagtttcgc

SEQ ID NO: 106986 - DNA, 25 bp, Homo sapien
aagtaattactgtcaagagtttcgc

SEQ ID NO: 106987 - DNA, 25 bp, Homo sapien
tgtatattgagacaccagtattgtc

SEQ ID NO: 106988 - DNA, 25 bp, Homo sapien
tgtatattgagagaccagtattgtc

SEQ ID NO: 106989 - DNA, 25 bp, Homo sapien
caacaattacaaaacacaagtttat

SEQ ID NO: 106990 - DNA, 25 bp, Homo sapien
caacaattacaatacacaagtttat

SEQ ID NO: 106991 - DNA, 25 bp, Homo sapien
tttaaagtgttttacccgtcgacca

SEQ ID NO: 106992 - DNA, 25 bp, Homo sapien
tttaaagtgtttaacccgtcgacca

SEQ ID NO: 106993 - DNA, 25 bp, Homo sapien
tttaccatgtttcaggtgtcttaac

SEQ ID NO: 106994 - DNA, 25 bp, Homo sapien
tttaccatgtttgaggtgtcttaac

SEQ ID NO: 106995 - DNA, 25 bp, Homo sapien
tatagcttcgtatggtgtttcttca

SEQ ID NO: 106996 - DNA, 25 bp, Homo sapien
tatagcttcgtaaggtgtttcttca

SEQ ID NO: 106997 - DNA, 25 bp, Homo sapien
catcttcgacggtgggtacttctcc

SEQ ID NO: 106998 - DNA, 25 bp, Homo sapien
catcttcgacggagggtacttctcc

SEQ ID NO: 106999 - DNA, 25 bp, Homo sapien
acttttaccggtgtggtatcgtgtc

SEQ ID NO: 107000 - DNA, 25 bp, Homo sapien
acttttaccggtctggtatcgtgtc

SEQ ID NO: 107001 - DNA, 25 bp, Homo sapien
cttgtaacacggaccaatcgtatag

SEQ ID NO: 107002 - DNA, 25 bp, Homo sapien
cttgtaacacggtccaatcgtatag

SEQ ID NO: 107003 - DNA, 25 bp, Homo sapien
ttgtgtgcaacttctataatgacta

SEQ ID NO: 107004 - DNA, 25 bp, Homo sapien
ttgtgtgcaactactataatgacta

SEQ ID NO: 107005 - DNA, 25 bp, Homo sapien
gtctcgaagggcttaagagtgtcgt

SEQ ID NO: 107006 - DNA, 25 bp, Homo sapien
gtctcgaagggcataagagtgtcgt

SEQ ID NO: 107007 - DNA, 25 bp, Homo sapien
ccgtaagagaagagcactggagttt

SEQ ID NO: 107008 - DNA, 25 bp, Homo sapien
ccgtaagagaagtgcactggagttt

SEQ ID NO: 107009 - DNA, 25 bp, Homo sapien
ggagaaggaagttccctgggtactc

SEQ ID NO: 107010 - DNA, 25 bp, Homo sapien
ggagaaggaagtaccctgggtactc

SEQ ID NO: 107011 - DNA, 25 bp, Homo sapien
cgttttgagagaacgactccgagaa

SEQ ID NO: 107012 - DNA, 25 bp, Homo sapien
cgttttgagagatcgactccgagaa

SEQ ID NO: 107013 - DNA, 25 bp, Homo sapien
tcgatagtgagttgatcctcagaga

SEQ ID NO: 107014 - DNA, 25 bp, Homo sapien
tcgatagtgagtagatcctcagaga

SEQ ID NO: 107015 - DNA, 25 bp, Homo sapien
tcgactcgtgaacgaggtccgcgga

SEQ ID NO: 107016 - DNA, 25 bp, Homo sapien
tcgactcgtgaaggaggtccgcgga

SEQ ID NO: 107017 - DNA, 25 bp, Homo sapien
ctcgaccttaatggcgccgacgacc

SEQ ID NO: 107018 - DNA, 25 bp, Homo sapien
ctcgaccttaatcgcgccgacgacc

SEQ ID NO: 107019 - DNA, 25 bp, Homo sapien
gtctacgggacctccgtctcaggaa

SEQ ID NO: 107020 - DNA, 25 bp, Homo sapien
gtctacgggaccaccgtctcaggaa

SEQ ID NO: 107021 - DNA, 25 bp, Homo sapien
cctttctcccgtacggtcggaggaa

SEQ ID NO: 107022 - DNA, 25 bp, Homo sapien
cctttctcccgttcggtcggaggaa

SEQ ID NO: 107023 - DNA, 25 bp, Homo sapien
caccctgtcggtcaggtctggtagc

SEQ ID NO: 107024 - DNA, 25 bp, Homo sapien
caccctgtcggtgaggtctggtagc

SEQ ID NO: 107025 - DNA, 25 bp, Homo sapien
accctcgtgtgtggtgtccggagta

SEQ ID NO: 107026 - DNA, 25 bp, Homo sapien
accctcgtgtgtcgtgtccggagta

SEQ ID NO: 107027 - DNA, 25 bp, Homo sapien
accccgtatgaggtcgcacggtagg

SEQ ID NO: 107028 - DNA, 25 bp, Homo sapien
accccgtatgagctcgcacggtagg

SEQ ID NO: 107029 - DNA, 25 bp, Homo sapien
tacactgtcagttctcccgactggg

SEQ ID NO: 107030 - DNA, 25 bp, Homo sapien
tacactgtcagtactcccgactggg

SEQ ID NO: 107031 - DNA, 25 bp, Homo sapien
caccggtcatgtcctcacgctaggg

SEQ ID NO: 107032 - DNA, 25 bp, Homo sapien
caccggtcatgtgctcacgctaggg

SEQ ID NO: 107033 - DNA, 25 bp, Homo sapien
ggttcggattatggaccccttggac

SEQ ID NO: 107034 - DNA, 25 bp, Homo sapien
ggttcggattatcgaccccttggac

SEQ ID NO: 107035 - DNA, 25 bp, Homo sapien
tggtttcccggtgaacgtcatatta

SEQ ID NO: 107036 - DNA, 25 bp, Homo sapien
tggtttcccggtcaacgtcatatta

SEQ ID NO: 107037 - DNA, 25 bp, Homo sapien
gtctttcctcggagacgtccttctc

SEQ ID NO: 107038 - DNA, 25 bp, Homo sapien
gtctttcctcggtgacgtccttctc

SEQ ID NO: 107039 - DNA, 25 bp, Homo sapien
gttttactacagattcaggttaatc

SEQ ID NO: 107040 - DNA, 25 bp, Homo sapien
gttttactacagtttcaggttaatc

SEQ ID NO: 107041 - DNA, 25 bp, Homo sapien
gaactctttatttcgggttagactt

SEQ ID NO: 107042 - DNA, 25 bp, Homo sapien
gaactctttattacgggttagactt

SEQ ID NO: 107043 - DNA, 25 bp, Homo sapien
gtagaactacccagttagggtcaaa

SEQ ID NO: 107044 - DNA, 25 bp, Homo sapien
gtagaactaccctgttagggtcaaa

SEQ ID NO: 107045 - DNA, 25 bp, Homo sapien
ggtgattgcctattcgaagccgaga

SEQ ID NO: 107046 - DNA, 25 bp, Homo sapien
ggtgattgcctaatcgaagccgaga

SEQ ID NO: 107047 - DNA, 25 bp, Homo sapien
actgaattcctgtgaacgactagaa

SEQ ID NO: 107048 - DNA, 25 bp, Homo sapien
actgaattcctgagaacgactagaa

SEQ ID NO: 107049 - DNA, 25 bp, Homo sapien
acagatgaaagtacagaagtctcac

SEQ ID NO: 107050 - DNA, 25 bp, Homo sapien
acagatgaaagttcagaagtctcac

SEQ ID NO: 107051 - DNA, 25 bp, Homo sapien
cgatttgagaatctaggagatccgt

SEQ ID NO: 107052 - DNA, 25 bp, Homo sapien
cgatttgagaatgtaggagatccgt

SEQ ID NO: 107053 - DNA, 25 bp, Homo sapien
actctacgggtaattttcaggacct

SEQ ID NO: 107054 - DNA, 25 bp, Homo sapien
actctacgggtatttttcaggacct

SEQ ID NO: 107055 - DNA, 25 bp, Homo sapien
cgtctcggagtggaataccttgaca

SEQ ID NO: 107056 - DNA, 25 bp, Homo sapien
cgtctcggagtgcaataccttgaca

SEQ ID NO: 107057 - DNA, 25 bp, Homo sapien
gtgtcactaatgtaaaacacacgaa

SEQ ID NO: 107058 - DNA, 25 bp, Homo sapien
gtgtcactaatgaaaaacacacgaa

SEQ ID NO: 107059 - DNA, 25 bp, Homo sapien
gaggacctaaaggacggcccagagc

SEQ ID NO: 107060 - DNA, 25 bp, Homo sapien
gaggacctaaagcacggcccagagc

SEQ ID NO: 107061 - DNA, 25 bp, Homo sapien
cgaagacagttgagatgcgaccatc

SEQ ID NO: 107062 - DNA, 25 bp, Homo sapien
cgaagacagttgtgatgcgaccatc

SEQ ID NO: 107063 - DNA, 25 bp, Homo sapien
cggtcgacatattggaggaccaaac

SEQ ID NO: 107064 - DNA, 25 bp, Homo sapien
cggtcgacatataggaggaccaaac

SEQ ID NO: 107065 - DNA, 25 bp, Homo sapien
ggcttctgaagtgtgggaactccta

SEQ ID NO: 107066 - DNA, 25 bp, Homo sapien
ggcttctgaagtctgggaactccta

SEQ ID NO: 107067 - DNA, 25 bp, Homo sapien
ccttctcgcttgacgggtccctggt

SEQ ID NO: 107068 - DNA, 25 bp, Homo sapien
ccttctcgcttgtcgggtccctggt

SEQ ID NO: 107069 - DNA, 25 bp, Homo sapien
ctactctttagtcgaacccatgtcg

SEQ ID NO: 107070 - DNA, 25 bp, Homo sapien
ctactctttagtggaacccatgtcg

SEQ ID NO: 107071 - DNA, 25 bp, Homo sapien
atacctcagtgtgtctccgaggtgg

SEQ ID NO: 107072 - DNA, 25 bp, Homo sapien
atacctcagtgtctctccgaggtgg

SEQ ID NO: 107073 - DNA, 25 bp, Homo sapien
accgcagactgtttgagtgtttacc

SEQ ID NO: 107074 - DNA, 25 bp, Homo sapien
accgcagactgtatgagtgtttacc

SEQ ID NO: 107075 - DNA, 25 bp, Homo sapien
cgtaccacccggtgagaggtgtatc

SEQ ID NO: 107076 - DNA, 25 bp, Homo sapien
cgtaccacccggagagaggtgtatc

SEQ ID NO: 107077 - DNA, 25 bp, Homo sapien
gtctccctcgtgagtgagggtcgtc

SEQ ID NO: 107078 - DNA, 25 bp, Homo sapien
gtctccctcgtgtgtgagggtcgtc

SEQ ID NO: 107079 - DNA, 25 bp, Homo sapien
tttgggagtcgtagtgtgtcgtcct

SEQ ID NO: 107080 - DNA, 25 bp, Homo sapien
tttgggagtcgttgtgtgtcgtcct

SEQ ID NO: 107081 - DNA, 25 bp, Homo sapien
caccgcttgtcgttggtgtagtggt

SEQ ID NO: 107082 - DNA, 25 bp, Homo sapien
caccgcttgtcgatggtgtagtggt

SEQ ID NO: 107083 - DNA, 25 bp, Homo sapien
tcggatactgtcatactgtcactgg

SEQ ID NO: 107084 - DNA, 25 bp, Homo sapien
tcggatactgtcttactgtcactgg

SEQ ID NO: 107085 - DNA, 25 bp, Homo sapien
gtcgtggttcgttcgtcttaagatc

SEQ ID NO: 107086 - DNA, 25 bp, Homo sapien
gtcgtggttcgtacgtcttaagatc

SEQ ID NO: 107087 - DNA, 25 bp, Homo sapien
gcatcgactctaagtctacgaaatc

SEQ ID NO: 107088 - DNA, 25 bp, Homo sapien
gcatcgactctatgtctacgaaatc

SEQ ID NO: 107089 - DNA, 25 bp, Homo sapien
cctagacgtcgtgagtctgcgaatc

SEQ ID NO: 107090 - DNA, 25 bp, Homo sapien
cctagacgtcgtcagtctgcgaatc

SEQ ID NO: 107091 - DNA, 25 bp, Homo sapien
agttagcaggtgcagctagagaagc

SEQ ID NO: 107092 - DNA, 25 bp, Homo sapien
agttagcaggtggagctagagaagc

SEQ ID NO: 107093 - DNA, 25 bp, Homo sapien
ccattagttgtggaccggtccaaga

SEQ ID NO: 107094 - DNA, 25 bp, Homo sapien
ccattagttgtgcaccggtccaaga

SEQ ID NO: 107095 - DNA, 25 bp, Homo sapien
gatctttagtagatgggcgcacaag

SEQ ID NO: 107096 - DNA, 25 bp, Homo sapien
gatctttagtagttgggcgcacaag

SEQ ID NO: 107097 - DNA, 25 bp, Homo sapien
gccaatagtcttgtctctacgaagc

SEQ ID NO: 107098 - DNA, 25 bp, Homo sapien
gccaatagtcttctctctacgaagc

SEQ ID NO: 107099 - DNA, 25 bp, Homo sapien
cgttcattgttttatctaacagaga

SEQ ID NO: 107100 - DNA, 25 bp, Homo sapien
cgttcattgtttaatctaacagaga

SEQ ID NO: 107101 - DNA, 25 bp, Homo sapien
gaaagtgaacgatacgtggactact

SEQ ID NO: 107102 - DNA, 25 bp, Homo sapien
gaaagtgaacgaaacgtggactact

SEQ ID NO: 107103 - DNA, 25 bp, Homo sapien
cttcgagaacagaggctaccccacg

SEQ ID NO: 107104 - DNA, 25 bp, Homo sapien
cttcgagaacagtggctaccccacg

SEQ ID NO: 107105 - DNA, 25 bp, Homo sapien
ctttttcggtgtggagacttaccag

SEQ ID NO: 107106 - DNA, 25 bp, Homo sapien
ctttttcggtgtcgagacttaccag

SEQ ID NO: 107107 - DNA, 25 bp, Homo sapien
ctttctgacctacgaagtcatcgag

SEQ ID NO: 107108 - DNA, 25 bp, Homo sapien
ctttctgacctaggaagtcatcgag

SEQ ID NO: 107109 - DNA, 25 bp, Homo sapien
aagtttccgaaacagatctaatagt

SEQ ID NO: 107110 - DNA, 25 bp, Homo sapien
aagtttccgaaagagatctaatagt

SEQ ID NO: 107111 - DNA, 25 bp, Homo sapien
cctcttcaacaggaccatcgtgagg

SEQ ID NO: 107112 - DNA, 25 bp, Homo sapien
cctcttcaacagcaccatcgtgagg

SEQ ID NO: 107113 - DNA, 25 bp, Homo sapien
accgtttaatcgatctcatcgaaga

SEQ ID NO: 107114 - DNA, 25 bp, Homo sapien
accgtttaatcgttctcatcgaaga

SEQ ID NO: 107115 - DNA, 25 bp, Homo sapien
ccttataaagtagttactgtcgaaa

SEQ ID NO: 107116 - DNA, 25 bp, Homo sapien
ccttataaagtacttactgtcgaaa

SEQ ID NO: 107117 - DNA, 25 bp, Homo sapien
tctttatacctactgtgtacgaacg

SEQ ID NO: 107118 - DNA, 25 bp, Homo sapien
tctttatacctagtgtgtacgaacg

SEQ ID NO: 107119 - DNA, 25 bp, Homo sapien
atgattcactacgtagttttacaag

SEQ ID NO: 107120 - DNA, 25 bp, Homo sapien
atgattcactacctagttttacaag

SEQ ID NO: 107121 - DNA, 25 bp, Homo sapien
tagtttactcaacctccattgtgag

SEQ ID NO: 107122 - DNA, 25 bp, Homo sapien
tagtttactcaagctccattgtgag

SEQ ID NO: 107123 - DNA, 25 bp, Homo sapien
gggtttgttccgtagtggtcctttc

SEQ ID NO: 107124 - DNA, 25 bp, Homo sapien
gggtttgttccgaagtggtcctttc

SEQ ID NO: 107125 - DNA, 25 bp, Homo sapien
tgtttggcggacagtttcagtttcg

SEQ ID NO: 107126 - DNA, 25 bp, Homo sapien
tgtttggcggactgtttcagtttcg

SEQ ID NO: 107127 - DNA, 25 bp, Homo sapien
ggattccgctacgtcttcattatcg

SEQ ID NO: 107128 - DNA, 25 bp, Homo sapien
ggattccgctacctcttcattatcg

SEQ ID NO: 107129 - DNA, 25 bp, Homo sapien
gtagagccgactggagcgacctttc

SEQ ID NO: 107130 - DNA, 25 bp, Homo sapien
gtagagccgactcgagcgacctttc

SEQ ID NO: 107131 - DNA, 25 bp, Homo sapien
aaggagtgtacgtccgacgaggtac

SEQ ID NO: 107132 - DNA, 25 bp, Homo sapien
aaggagtgtacgaccgacgaggtac

SEQ ID NO: 107133 - DNA, 25 bp, Homo sapien
cttaagagtaaagaccaccgtctct

SEQ ID NO: 107134 - DNA, 25 bp, Homo sapien
cttaagagtaaacaccaccgtctct

SEQ ID NO: 107135 - DNA, 25 bp, Homo sapien
aaaacgacgacgtcagaccaagttt

SEQ ID NO: 107136 - DNA, 25 bp, Homo sapien
aaaacgacgacgacagaccaagttt

SEQ ID NO: 107137 - DNA, 25 bp, Homo sapien
gccagaagccgtaaccaagggaaac

SEQ ID NO: 107138 - DNA, 25 bp, Homo sapien
gccagaagccgttaccaagggaaac

SEQ ID NO: 107139 - DNA, 25 bp, Homo sapien
atcgagtccatcaacaagaatgtgt

SEQ ID NO: 107140 - DNA, 25 bp, Homo sapien
atcgagtccatctacaagaatgtgt

SEQ ID NO: 107141 - DNA, 25 bp, Homo sapien
gagaggacctctgtctcaggtattg

SEQ ID NO: 107142 - DNA, 25 bp, Homo sapien
gagaggacctctctctcaggtattg

SEQ ID NO: 107143 - DNA, 25 bp, Homo sapien
aaagtgttccgactgcatagtattc

SEQ ID NO: 107144 - DNA, 25 bp, Homo sapien
aaagtgttccgagtgcatagtattc

SEQ ID NO: 107145 - DNA, 25 bp, Homo sapien
ggaatgttatctcttcttaatgtac

SEQ ID NO: 107146 - DNA, 25 bp, Homo sapien
ggaatgttatctgttcttaatgtac

SEQ ID NO: 107147 - DNA, 25 bp, Homo sapien
agtacatttgttcgttggacatgac

SEQ ID NO: 107148 - DNA, 25 bp, Homo sapien
agtacatttgttggttggacatgac

SEQ ID NO: 107149 - DNA, 25 bp, Homo sapien
agcacattttttgctttacagtaga

SEQ ID NO: 107150 - DNA, 25 bp, Homo sapien
agcacattttttcctttacagtaga

SEQ ID NO: 107151 - DNA, 25 bp, Homo sapien
cctatgtatgtcgaccttttacctg

SEQ ID NO: 107152 - DNA, 25 bp, Homo sapien
cctatgtatgtccaccttttacctg

SEQ ID NO: 107153 - DNA, 25 bp, Homo sapien
agtctttagttgacactatttttcg

SEQ ID NO: 107154 - DNA, 25 bp, Homo sapien
agtctttagttgtcactatttttcg

SEQ ID NO: 107155 - DNA, 25 bp, Homo sapien
tggtagtggcccagatgtcgtcgac

SEQ ID NO: 107156 - DNA, 25 bp, Homo sapien
tggtagtggccctgatgtcgtcgac

SEQ ID NO: 107157 - DNA, 25 bp, Homo sapien
ttaggtcctactgacaatgagtcta

SEQ ID NO: 107158 - DNA, 25 bp, Homo sapien
ttaggtcctactcacaatgagtcta

SEQ ID NO: 107159 - DNA, 25 bp, Homo sapien
tactatgtcctctgaaagtgtctga

SEQ ID NO: 107160 - DNA, 25 bp, Homo sapien
tactatgtcctcagaaagtgtctga

SEQ ID NO: 107161 - DNA, 25 bp, Homo sapien
gtgtccggacccaaagcactcgacg

SEQ ID NO: 107162 - DNA, 25 bp, Homo sapien
gtgtccggaccctaagcactcgacg

SEQ ID NO: 107163 - DNA, 25 bp, Homo sapien
gaagtcgaacaccatgaacaaccct

SEQ ID NO: 107164 - DNA, 25 bp, Homo sapien
gaagtcgaacacgatgaacaaccct

SEQ ID NO: 107165 - DNA, 25 bp, Homo sapien
agtttccacgatcaagactacgggt

SEQ ID NO: 107166 - DNA, 25 bp, Homo sapien
agtttccacgatgaagactacgggt

SEQ ID NO: 107167 - DNA, 25 bp, Homo sapien
gtttaatacgattgagactcgtaac

SEQ ID NO: 107168 - DNA, 25 bp, Homo sapien
gtttaatacgatagagactcgtaac

SEQ ID NO: 107169 - DNA, 25 bp, Homo sapien
gatcgtagaacatggaacgtcctac

SEQ ID NO: 107170 - DNA, 25 bp, Homo sapien
gatcgtagaacaaggaacgtcctac

SEQ ID NO: 107171 - DNA, 25 bp, Homo sapien
aactaagttacaaaggactccttag

SEQ ID NO: 107172 - DNA, 25 bp, Homo sapien
aactaagttacataggactccttag

SEQ ID NO: 107173 - DNA, 25 bp, Homo sapien
cttcacaaatttcgacaaacttaga

SEQ ID NO: 107174 - DNA, 25 bp, Homo sapien
cttcacaaatttggacaaacttaga

SEQ ID NO: 107175 - DNA, 25 bp, Homo sapien
taaacgacttggaacataactgtaa

SEQ ID NO: 107176 - DNA, 25 bp, Homo sapien
taaacgacttggtacataactgtaa

SEQ ID NO: 107177 - DNA, 25 bp, Homo sapien
acgaaccgtggttacagtgccgaga

SEQ ID NO: 107178 - DNA, 25 bp, Homo sapien
acgaaccgtggtaacagtgccgaga

SEQ ID NO: 107179 - DNA, 25 bp, Homo sapien
taaacagacctttagtgactgaggt

SEQ ID NO: 107180 - DNA, 25 bp, Homo sapien
taaacagaccttaagtgactgaggt

SEQ ID NO: 107181 - DNA, 25 bp, Homo sapien
gaacctacgattcaggactcgtcgg

SEQ ID NO: 107182 - DNA, 25 bp, Homo sapien
gaacctacgattgaggactcgtcgg

SEQ ID NO: 107183 - DNA, 25 bp, Homo sapien
gtagacaccacatcgaaagcctaca

SEQ ID NO: 107184 - DNA, 25 bp, Homo sapien
gtagacaccacaacgaaagcctaca

SEQ ID NO: 107185 - DNA, 25 bp, Homo sapien
ggagaacgatcaaacaacgaccgca

SEQ ID NO: 107186 - DNA, 25 bp, Homo sapien
ggagaacgatcatacaacgaccgca

SEQ ID NO: 107187 - DNA, 25 bp, Homo sapien
acagagatataaagaaatcgtccta

SEQ ID NO: 107188 - DNA, 25 bp, Homo sapien
acagagatataatgaaatcgtccta

SEQ ID NO: 107189 - DNA, 25 bp, Homo sapien
gtgttaaagtaactttcatgtccta

SEQ ID NO: 107190 - DNA, 25 bp, Homo sapien
gtgttaaagtaagtttcatgtccta

SEQ ID NO: 107191 - DNA, 25 bp, Homo sapien
ggtggtcagttaataacctttccta

SEQ ID NO: 107192 - DNA, 25 bp, Homo sapien
ggtggtcagttattaacctttccta

SEQ ID NO: 107193 - DNA, 25 bp, Homo sapien
ctttggacaggagagagcctcttca

SEQ ID NO: 107194 - DNA, 25 bp, Homo sapien
ctttggacaggacagagcctcttca

SEQ ID NO: 107195 - DNA, 25 bp, Homo sapien
tcgagtgaagggagaaccagtccac

SEQ ID NO: 107196 - DNA, 25 bp, Homo sapien
tcgagtgaagggtgaaccagtccac

SEQ ID NO: 107197 - DNA, 25 bp, Homo sapien
ggaatacgtgtctacctgtccgacg

SEQ ID NO: 107198 - DNA, 25 bp, Homo sapien
ggaatacgtgtcaacctgtccgacg

SEQ ID NO: 107199 - DNA, 25 bp, Homo sapien
ggaggactccgttacagtctgggtc

SEQ ID NO: 107200 - DNA, 25 bp, Homo sapien
ggaggactccgtaacagtctgggtc

SEQ ID NO: 107201 - DNA, 25 bp, Homo sapien
tagggttcctcgaagtacttgagta

SEQ ID NO: 107202 - DNA, 25 bp, Homo sapien
tagggttcctcgtagtacttgagta

SEQ ID NO: 107203 - DNA, 25 bp, Homo sapien
gactgggttagtctctgtacttggg

SEQ ID NO: 107204 - DNA, 25 bp, Homo sapien
gactgggttagtgtctgtacttggg

SEQ ID NO: 107205 - DNA, 25 bp, Homo sapien
ttacgaggtgttttccgactctggg

SEQ ID NO: 107206 - DNA, 25 bp, Homo sapien
ttacgaggtgttatccgactctggg

SEQ ID NO: 107207 - DNA, 25 bp, Homo sapien
acgaagtgtccattacctatgttac

SEQ ID NO: 107208 - DNA, 25 bp, Homo sapien
acgaagtgtccaatacctatgttac

SEQ ID NO: 107209 - DNA, 25 bp, Homo sapien
ctaaggagtgtatagactccccaga

SEQ ID NO: 107210 - DNA, 25 bp, Homo sapien
ctaaggagtgtaaagactccccaga

SEQ ID NO: 107211 - DNA, 25 bp, Homo sapien
agaggtctgtaaacctcactccaat

SEQ ID NO: 107212 - DNA, 25 bp, Homo sapien
agaggtctgtaatcctcactccaat

SEQ ID NO: 107213 - DNA, 25 bp, Homo sapien
gttgggactatcctcgtctccgtta

SEQ ID NO: 107214 - DNA, 25 bp, Homo sapien
gttgggactatcgtcgtctccgtta

SEQ ID NO: 107215 - DNA, 25 bp, Homo sapien
gggctcatcgaccctaatgtccgcg

SEQ ID NO: 107216 - DNA, 25 bp, Homo sapien
gggctcatcgacgctaatgtccgcg

SEQ ID NO: 107217 - DNA, 25 bp, Homo sapien
gggtcctaacgacgaccaggggcct

SEQ ID NO: 107218 - DNA, 25 bp, Homo sapien
gggtcctaacgaggaccaggggcct

SEQ ID NO: 107219 - DNA, 25 bp, Homo sapien
ggggaaactgaggtttccggacttt

SEQ ID NO: 107220 - DNA, 25 bp, Homo sapien
ggggaaactgagctttccggacttt

SEQ ID NO: 107221 - DNA, 25 bp, Homo sapien
ttatacaccaagaccgagtacttag

SEQ ID NO: 107222 - DNA, 25 bp, Homo sapien
ttatacaccaagtccgagtacttag

SEQ ID NO: 107223 - DNA, 25 bp, Homo sapien
tccagactcaagatcacagatagta

SEQ ID NO: 107224 - DNA, 25 bp, Homo sapien
tccagactcaagttcacagatagta

SEQ ID NO: 107225 - DNA, 25 bp, Homo sapien
tagataacaagaatctcagactgag

SEQ ID NO: 107226 - DNA, 25 bp, Homo sapien
tagataacaagattctcagactgag

SEQ ID NO: 107227 - DNA, 25 bp, Homo sapien
cgacataactagacccgaagactga

SEQ ID NO: 107228 - DNA, 25 bp, Homo sapien
cgacataactagtcccgaagactga

SEQ ID NO: 107229 - DNA, 25 bp, Homo sapien
cgtccacggagaaccctaagtcaac

SEQ ID NO: 107230 - DNA, 25 bp, Homo sapien
cgtccacggagatccctaagtcaac

SEQ ID NO: 107231 - DNA, 25 bp, Homo sapien
tgagactcggactaccataatcgaa

SEQ ID NO: 107232 - DNA, 25 bp, Homo sapien
tgagactcggacaaccataatcgaa

SEQ ID NO: 107233 - DNA, 25 bp, Homo sapien
gccagtctcgctagtggaacttgaa

SEQ ID NO: 107234 - DNA, 25 bp, Homo sapien
gccagtctcgcttgtggaacttgaa

SEQ ID NO: 107235 - DNA, 25 bp, Homo sapien
ataatctcactctctcatagtggga

SEQ ID NO: 107236 - DNA, 25 bp, Homo sapien
ataatctcactcactcatagtggga

SEQ ID NO: 107237 - DNA, 25 bp, Homo sapien
aaagatctgccgtccagtccaggtg

SEQ ID NO: 107238 - DNA, 25 bp, Homo sapien
aaagatctgccgaccagtccaggtg

SEQ ID NO: 107239 - DNA, 25 bp, Homo sapien
agatcgaagggagtccattgagggt

SEQ ID NO: 107240 - DNA, 25 bp, Homo sapien
agatcgaagggactccattgagggt

SEQ ID NO: 107241 - DNA, 25 bp, Homo sapien
gaatagtggtaatccacctgaacct

SEQ ID NO: 107242 - DNA, 25 bp, Homo sapien
gaatagtggtaaaccacctgaacct

SEQ ID NO: 107243 - DNA, 25 bp, Homo sapien
caaatgaactttcacaccgagagcc

SEQ ID NO: 107244 - DNA, 25 bp, Homo sapien
caaatgaactttgacaccgagagcc

SEQ ID NO: 107245 - DNA, 25 bp, Homo sapien
agtctcaccgagagacaccaggtcc

SEQ ID NO: 107246 - DNA, 25 bp, Homo sapien
agtctcaccgagtgacaccaggtcc

SEQ ID NO: 107247 - DNA, 25 bp, Homo sapien
tgttccctccgaaccgagtgtctac

SEQ ID NO: 107248 - DNA, 25 bp, Homo sapien
tgttccctccgatccgagtgtctac

SEQ ID NO: 107249 - DNA, 25 bp, Homo sapien
tgtttacctcttagtctaagaactg

SEQ ID NO: 107250 - DNA, 25 bp, Homo sapien
tgtttacctctttgtctaagaactg

SEQ ID NO: 107251 - DNA, 25 bp, Homo sapien
aagggacccttggtcgtcagacctc

SEQ ID NO: 107252 - DNA, 25 bp, Homo sapien
aagggacccttgctcgtcagacctc

SEQ ID NO: 107253 - DNA, 25 bp, Homo sapien
acaagaggtcccgtgccgccctgtt

SEQ ID NO: 107254 - DNA, 25 bp, Homo sapien
acaagaggtcccctgccgccctgtt

SEQ ID NO: 107255 - DNA, 25 bp, Homo sapien
ccctgtccggacccgctgccagtct

SEQ ID NO: 107256 - DNA, 25 bp, Homo sapien
ccctgtccggacgcgctgccagtct

SEQ ID NO: 107257 - DNA, 25 bp, Homo sapien
ctttacagtaggtcctcggtcagct

SEQ ID NO: 107258 - DNA, 25 bp, Homo sapien
ctttacagtaggacctcggtcagct

SEQ ID NO: 107259 - DNA, 25 bp, Homo sapien
cgacctaatgtgtttctgtaggttt

SEQ ID NO: 107260 - DNA, 25 bp, Homo sapien
cgacctaatgtgattctgtaggttt

SEQ ID NO: 107261 - DNA, 25 bp, Homo sapien
tacaactcccggtcgtcctgtttcg

SEQ ID NO: 107262 - DNA, 25 bp, Homo sapien
tacaactcccggacgtcctgtttcg

SEQ ID NO: 107263 - DNA, 25 bp, Homo sapien
ttccgtcagacgtcggatcgtggga

SEQ ID NO: 107264 - DNA, 25 bp, Homo sapien
ttccgtcagacgacggatcgtggga

SEQ ID NO: 107265 - DNA, 25 bp, Homo sapien
cacttgtgacgaaacctcttatgca

SEQ ID NO: 107266 - DNA, 25 bp, Homo sapien
cacttgtgacgatacctcttatgca

SEQ ID NO: 107267 - DNA, 25 bp, Homo sapien
cactctgtccgtatcctatttgtaa

SEQ ID NO: 107268 - DNA, 25 bp, Homo sapien
cactctgtccgtttcctatttgtaa

SEQ ID NO: 107269 - DNA, 25 bp, Homo sapien
gagggtttaactttccttatattcc

SEQ ID NO: 107270 - DNA, 25 bp, Homo sapien
gagggtttaactatccttatattcc

SEQ ID NO: 107271 - DNA, 25 bp, Homo sapien
gccgggtatcctgtgagtttttgtg

SEQ ID NO: 107272 - DNA, 25 bp, Homo sapien
gccgggtatcctctgagtttttgtg

SEQ ID NO: 107273 - DNA, 25 bp, Homo sapien
ccagtggtcatagaggatgtcttaa

SEQ ID NO: 107274 - DNA, 25 bp, Homo sapien
ccagtggtcatacaggatgtcttaa

SEQ ID NO: 107275 - DNA, 25 bp, Homo sapien
tgagtcatcgaacgattcctgtact

SEQ ID NO: 107276 - DNA, 25 bp, Homo sapien
tgagtcatcgaaggattcctgtact

SEQ ID NO: 107277 - DNA, 25 bp, Homo sapien
gtgagtaacttaggttttcgacctg

SEQ ID NO: 107278 - DNA, 25 bp, Homo sapien
gtgagtaacttacgttttcgacctg

SEQ ID NO: 107279 - DNA, 25 bp, Homo sapien
gtggcggtactactgtttttactcg

SEQ ID NO: 107280 - DNA, 25 bp, Homo sapien
gtggcggtactagtgtttttactcg

SEQ ID NO: 107281 - DNA, 25 bp, Homo sapien
gtgttctttgggtctttacgtcgta

SEQ ID NO: 107282 - DNA, 25 bp, Homo sapien
gtgttctttgggactttacgtcgta

SEQ ID NO: 107283 - DNA, 25 bp, Homo sapien
gtgctttctcgtcgagcgcccactg

SEQ ID NO: 107284 - DNA, 25 bp, Homo sapien
gtgctttctcgtggagcgcccactg

SEQ ID NO: 107285 - DNA, 25 bp, Homo sapien
gacttggttaggctcgctctctctc

SEQ ID NO: 107286 - DNA, 25 bp, Homo sapien
gacttggttagggtcgctctctctc

SEQ ID NO: 107287 - DNA, 25 bp, Homo sapien
tcagacaggtcagagtcctcgtttc

SEQ ID NO: 107288 - DNA, 25 bp, Homo sapien
tcagacaggtcacagtcctcgtttc

SEQ ID NO: 107289 - DNA, 25 bp, Homo sapien
actatcggaatagacgtcgagtgtc

SEQ ID NO: 107290 - DNA, 25 bp, Homo sapien
actatcggaatacacgtcgagtgtc

SEQ ID NO: 107291 - DNA, 25 bp, Homo sapien
gggtctcgagaactcgagacggttt

SEQ ID NO: 107292 - DNA, 25 bp, Homo sapien
gggtctcgagaagtcgagacggttt

SEQ ID NO: 107293 - DNA, 25 bp, Homo sapien
tcgcaaatggaagaggtccggtagc

SEQ ID NO: 107294 - DNA, 25 bp, Homo sapien
tcgcaaatggaacaggtccggtagc

SEQ ID NO: 107295 - DNA, 25 bp, Homo sapien
actgataaaagaagtttgtctcact

SEQ ID NO: 107296 - DNA, 25 bp, Homo sapien
actgataaaagatgtttgtctcact

SEQ ID NO: 107297 - DNA, 25 bp, Homo sapien
tccatagaactttctgttgattcgt

SEQ ID NO: 107298 - DNA, 25 bp, Homo sapien
tccatagaacttactgttgattcgt

SEQ ID NO: 107299 - DNA, 25 bp, Homo sapien
aagacactacgtactgtacagaaac

SEQ ID NO: 107300 - DNA, 25 bp, Homo sapien
aagacactacgttctgtacagaaac

SEQ ID NO: 107301 - DNA, 25 bp, Homo sapien
ggtgaaacatcgtcttaagtatgac

SEQ ID NO: 107302 - DNA, 25 bp, Homo sapien
ggtgaaacatcgacttaagtatgac

SEQ ID NO: 107303 - DNA, 25 bp, Homo sapien
ttccactaacacaaccgatgtcgga

SEQ ID NO: 107304 - DNA, 25 bp, Homo sapien
ttccactaacactaccgatgtcgga

SEQ ID NO: 107305 - DNA, 25 bp, Homo sapien
caaacagactaggtcgttcgtccgg

SEQ ID NO: 107306 - DNA, 25 bp, Homo sapien
caaacagactagctcgttcgtccgg

SEQ ID NO: 107307 - DNA, 25 bp, Homo sapien
aaagtcggaaataactctcatgtca

SEQ ID NO: 107308 - DNA, 25 bp, Homo sapien
aaagtcggaaattactctcatgtca

SEQ ID NO: 107309 - DNA, 25 bp, Homo sapien
tcaactccaacgtctccaaaggacg

SEQ ID NO: 107310 - DNA, 25 bp, Homo sapien
tcaactccaacgactccaaaggacg

SEQ ID NO: 107311 - DNA, 25 bp, Homo sapien
tggacgacagtctcccgtcgagagg

SEQ ID NO: 107312 - DNA, 25 bp, Homo sapien
tggacgacagtcacccgtcgagagg

SEQ ID NO: 107313 - DNA, 25 bp, Homo sapien
ggtgaccactactacttctaccagg

SEQ ID NO: 107314 - DNA, 25 bp, Homo sapien
ggtgaccactacaacttctaccagg

SEQ ID NO: 107315 - DNA, 25 bp, Homo sapien
ggccgacgaagatcctctacgacac

SEQ ID NO: 107316 - DNA, 25 bp, Homo sapien
ggccgacgaagaacctctacgacac

SEQ ID NO: 107317 - DNA, 25 bp, Homo sapien
gaaaaagtagtaaacacactagtcc

SEQ ID NO: 107318 - DNA, 25 bp, Homo sapien
gaaaaagtagtatacacactagtcc

SEQ ID NO: 107319 - DNA, 25 bp, Homo sapien
taggcgaacccgaaagcccggtcgc

SEQ ID NO: 107320 - DNA, 25 bp, Homo sapien
taggcgaacccgtaagcccggtcgc

SEQ ID NO: 107321 - DNA, 25 bp, Homo sapien
ttccgaacctcgactcgtccaatga

SEQ ID NO: 107322 - DNA, 25 bp, Homo sapien
ttccgaacctcgtctcgtccaatga

SEQ ID NO: 107323 - DNA, 25 bp, Homo sapien
cttttgacctgtgtcttcgtgttca

SEQ ID NO: 107324 - DNA, 25 bp, Homo sapien
cttttgacctgtctcttcgtgttca

SEQ ID NO: 107325 - DNA, 25 bp, Homo sapien
ttggtctctggtttccgtcgtagga

SEQ ID NO: 107326 - DNA, 25 bp, Homo sapien
ttggtctctggtatccgtcgtagga

SEQ ID NO: 107327 - DNA, 25 bp, Homo sapien
tctggtaacgcgacgggcgcgtccc

SEQ ID NO: 107328 - DNA, 25 bp, Homo sapien
tctggtaacgcgtcgggcgcgtccc

SEQ ID NO: 107329 - DNA, 25 bp, Homo sapien
cttttgtcgacaagtgttcgcaccc

SEQ ID NO: 107330 - DNA, 25 bp, Homo sapien
cttttgtcgacatgtgttcgcaccc

SEQ ID NO: 107331 - DNA, 25 bp, Homo sapien
ggtctttcgactgtcgacttccgcc

SEQ ID NO: 107332 - DNA, 25 bp, Homo sapien
ggtctttcgactctcgacttccgcc

SEQ ID NO: 107333 - DNA, 25 bp, Homo sapien
tcactgtatgactacggatgactcc

SEQ ID NO: 107334 - DNA, 25 bp, Homo sapien
tcactgtatgacaacggatgactcc

SEQ ID NO: 107335 - DNA, 25 bp, Homo sapien
atttagagatcactcaaggtacgcc

SEQ ID NO: 107336 - DNA, 25 bp, Homo sapien
atttagagatcagtcaaggtacgcc

SEQ ID NO: 107337 - DNA, 25 bp, Homo sapien
tactgtaaagattgttcaaggtccc

SEQ ID NO: 107338 - DNA, 25 bp, Homo sapien
tactgtaaagatagttcaaggtccc

SEQ ID NO: 107339 - DNA, 25 bp, Homo sapien
aaaaaggtcagtccagaccgcccgt

SEQ ID NO: 107340 - DNA, 25 bp, Homo sapien
aaaaaggtcagtgcagaccgcccgt

SEQ ID NO: 107341 - DNA, 25 bp, Homo sapien
gaaaaaagttttagagccagtacgc

SEQ ID NO: 107342 - DNA, 25 bp, Homo sapien
gaaaaaagtttttgagccagtacgc

SEQ ID NO: 107343 - DNA, 25 bp, Homo sapien
ataaaagacgatgtctggaccctgt

SEQ ID NO: 107344 - DNA, 25 bp, Homo sapien
ataaaagacgatctctggaccctgt

SEQ ID NO: 107345 - DNA, 25 bp, Homo sapien
atcaagtaggttcttcgcggccgtg

SEQ ID NO: 107346 - DNA, 25 bp, Homo sapien
atcaagtaggttgttcgcggccgtg

SEQ ID NO: 107347 - DNA, 25 bp, Homo sapien
gtccagggatcatccgacggttctg

SEQ ID NO: 107348 - DNA, 25 bp, Homo sapien
gtccagggatcaaccgacggttctg

SEQ ID NO: 107349 - DNA, 25 bp, Homo sapien
ccgctgtgacgagagtctaattgta

SEQ ID NO: 107350 - DNA, 25 bp, Homo sapien
ccgctgtgacgacagtctaattgta

SEQ ID NO: 107351 - DNA, 25 bp, Homo sapien
tccctctacgtgatcaggttcttta

SEQ ID NO: 107352 - DNA, 25 bp, Homo sapien
tccctctacgtgttcaggttcttta

SEQ ID NO: 107353 - DNA, 25 bp, Homo sapien
cacttacagtgttccggccactgtc

SEQ ID NO: 107354 - DNA, 25 bp, Homo sapien
cacttacagtgtaccggccactgtc

SEQ ID NO: 107355 - DNA, 25 bp, Homo sapien
cgtccctcgagaaggggcactgtgc

SEQ ID NO: 107356 - DNA, 25 bp, Homo sapien
cgtccctcgagatggggcactgtgc

SEQ ID NO: 107357 - DNA, 25 bp, Homo sapien
acccacgggtgtgacggccagtggc

SEQ ID NO: 107358 - DNA, 25 bp, Homo sapien
acccacgggtgtcacggccagtggc

SEQ ID NO: 107359 - DNA, 25 bp, Homo sapien
cctggttgttacacacgcccgtgtc

SEQ ID NO: 107360 - DNA, 25 bp, Homo sapien
cctggttgttactcacgcccgtgtc

SEQ ID NO: 107361 - DNA, 25 bp, Homo sapien
cgtctgtcgtcgtccgaccgggtcg

SEQ ID NO: 107362 - DNA, 25 bp, Homo sapien
cgtctgtcgtcgaccgaccgggtcg

SEQ ID NO: 107363 - DNA, 25 bp, Homo sapien
tttatgttcagacaccgacgtgatt

SEQ ID NO: 107364 - DNA, 25 bp, Homo sapien
tttatgttcagagaccgacgtgatt

SEQ ID NO: 107365 - DNA, 25 bp, Homo sapien
tttgtttacaacactcgagttctcg

SEQ ID NO: 107366 - DNA, 25 bp, Homo sapien
tttgtttacaactctcgagttctcg

SEQ ID NO: 107367 - DNA, 25 bp, Homo sapien
ttttcctctccgtatggtgtatact

SEQ ID NO: 107368 - DNA, 25 bp, Homo sapien
ttttcctctccgaatggtgtatact

SEQ ID NO: 107369 - DNA, 25 bp, Homo sapien
gaatctcacttccaggaagtgtata

SEQ ID NO: 107370 - DNA, 25 bp, Homo sapien
gaatctcacttcgaggaagtgtata

SEQ ID NO: 107371 - DNA, 25 bp, Homo sapien
aacccgtattctttggaatatgtta

SEQ ID NO: 107372 - DNA, 25 bp, Homo sapien
aacccgtattctatggaatatgtta

SEQ ID NO: 107373 - DNA, 25 bp, Homo sapien
ctacctttaggtgtgtgaatcctaa

SEQ ID NO: 107374 - DNA, 25 bp, Homo sapien
ctacctttaggtctgtgaatcctaa

SEQ ID NO: 107375 - DNA, 25 bp, Homo sapien
tagtaccatccgtcgtaacgtccca

SEQ ID NO: 107376 - DNA, 25 bp, Homo sapien
tagtaccatccgacgtaacgtccca

SEQ ID NO: 107377 - DNA, 25 bp, Homo sapien
gttggtcctctgacgggtcttagag

SEQ ID NO: 107378 - DNA, 25 bp, Homo sapien
gttggtcctctgtcgggtcttagag

SEQ ID NO: 107379 - DNA, 25 bp, Homo sapien
acactgactcacaggtgtacgttgg

SEQ ID NO: 107380 - DNA, 25 bp, Homo sapien
acactgactcactggtgtacgttgg

SEQ ID NO: 107381 - DNA, 25 bp, Homo sapien
gtctaatccacgtgacgtattatgg

SEQ ID NO: 107382 - DNA, 25 bp, Homo sapien
gtctaatccacgagacgtattatgg

SEQ ID NO: 107383 - DNA, 25 bp, Homo sapien
acaaaatccgtcagaagatttgtat

SEQ ID NO: 107384 - DNA, 25 bp, Homo sapien
acaaaatccgtctgaagatttgtat

SEQ ID NO: 107385 - DNA, 25 bp, Homo sapien
taatacacggtcacatatgattacg

SEQ ID NO: 107386 - DNA, 25 bp, Homo sapien
taatacacggtctcatatgattacg

SEQ ID NO: 107387 - DNA, 25 bp, Homo sapien
agtaggtcacggtttccaggttacc

SEQ ID NO: 107388 - DNA, 25 bp, Homo sapien
agtaggtcacggattccaggttacc

SEQ ID NO: 107389 - DNA, 25 bp, Homo sapien
gtatgtcataacttgtcacggattt

SEQ ID NO: 107390 - DNA, 25 bp, Homo sapien
gtatgtcataacatgtcacggattt

SEQ ID NO: 107391 - DNA, 25 bp, Homo sapien
cgttctgatagacgttgtttcattt

SEQ ID NO: 107392 - DNA, 25 bp, Homo sapien
cgttctgatagaggttgtttcattt

SEQ ID NO: 107393 - DNA, 25 bp, Homo sapien
gagtccactaatctctggttccttg

SEQ ID NO: 107394 - DNA, 25 bp, Homo sapien
gagtccactaatgtctggttccttg

SEQ ID NO: 107395 - DNA, 25 bp, Homo sapien
cgtaaatatcggatgatacatttgt

SEQ ID NO: 107396 - DNA, 25 bp, Homo sapien
cgtaaatatcggttgatacatttgt

SEQ ID NO: 107397 - DNA, 25 bp, Homo sapien
cgtttaaattcttagaaccgtaaag

SEQ ID NO: 107398 - DNA, 25 bp, Homo sapien
cgtttaaattctaagaaccgtaaag

SEQ ID NO: 107399 - DNA, 25 bp, Homo sapien
ctcctggatgtaaagataccgtaaa

SEQ ID NO: 107400 - DNA, 25 bp, Homo sapien
ctcctggatgtatagataccgtaaa

SEQ ID NO: 107401 - DNA, 25 bp, Homo sapien
tgtgtgtcgttgactgataccaata

SEQ ID NO: 107402 - DNA, 25 bp, Homo sapien
tgtgtgtcgttgtctgataccaata

SEQ ID NO: 107403 - DNA, 25 bp, Homo sapien
gtcgacgagtagactctataaatga

SEQ ID NO: 107404 - DNA, 25 bp, Homo sapien
gtcgacgagtagtctctataaatga

SEQ ID NO: 107405 - DNA, 25 bp, Homo sapien
aagacgggtaaccagttctctggag

SEQ ID NO: 107406 - DNA, 25 bp, Homo sapien
aagacgggtaacgagttctctggag

SEQ ID NO: 107407 - DNA, 25 bp, Homo sapien
caccggagaacatcgcgctcaggag

SEQ ID NO: 107408 - DNA, 25 bp, Homo sapien
caccggagaacaacgcgctcaggag

SEQ ID NO: 107409 - DNA, 25 bp, Homo sapien
cgacacgaggacaccagcccagggt

SEQ ID NO: 107410 - DNA, 25 bp, Homo sapien
cgacacgaggactccagcccagggt

SEQ ID NO: 107411 - DNA, 25 bp, Homo sapien
cccaggtccgtcgaggaaggacgtc

SEQ ID NO: 107412 - DNA, 25 bp, Homo sapien
cccaggtccgtccaggaaggacgtc

SEQ ID NO: 107413 - DNA, 25 bp, Homo sapien
caccctaagtctttccataagggtc

SEQ ID NO: 107414 - DNA, 25 bp, Homo sapien
caccctaagtctatccataagggtc

SEQ ID NO: 107415 - DNA, 25 bp, Homo sapien
ccacagtcgcatcgacagacagaat

SEQ ID NO: 107416 - DNA, 25 bp, Homo sapien
ccacagtcgcatggacagacagaat

SEQ ID NO: 107417 - DNA, 25 bp, Homo sapien
acgacgtccatgttgagacagactt

SEQ ID NO: 107418 - DNA, 25 bp, Homo sapien
acgacgtccatgatgagacagactt

SEQ ID NO: 107419 - DNA, 25 bp, Homo sapien
aggacacttctgtggtacggatcgt

SEQ ID NO: 107420 - DNA, 25 bp, Homo sapien
aggacacttctgaggtacggatcgt

SEQ ID NO: 107421 - DNA, 25 bp, Homo sapien
cagaagacgttaggtcaggagaatc

SEQ ID NO: 107422 - DNA, 25 bp, Homo sapien
cagaagacgttacgtcaggagaatc

SEQ ID NO: 107423 - DNA, 25 bp, Homo sapien
agctacaccacttacagggcacgct

SEQ ID NO: 107424 - DNA, 25 bp, Homo sapien
agctacaccactaacagggcacgct

SEQ ID NO: 107425 - DNA, 25 bp, Homo sapien
acagggaccctaagaccaggaccct

SEQ ID NO: 107426 - DNA, 25 bp, Homo sapien
acagggaccctatgaccaggaccct

SEQ ID NO: 107427 - DNA, 25 bp, Homo sapien
aagggacacacatacgacccttcct

SEQ ID NO: 107428 - DNA, 25 bp, Homo sapien
aagggacacacaaacgacccttcct

SEQ ID NO: 107429 - DNA, 25 bp, Homo sapien
atagggtttcgtctcatccctgact

SEQ ID NO: 107430 - DNA, 25 bp, Homo sapien
atagggtttcgtgtcatccctgact

SEQ ID NO: 107431 - DNA, 25 bp, Homo sapien
tttcggacccatgacgaaccctgtg

SEQ ID NO: 107432 - DNA, 25 bp, Homo sapien
tttcggacccatcacgaaccctgtg

SEQ ID NO: 107433 - DNA, 25 bp, Homo sapien
ttcgaccctttcgacgaccactgtg

SEQ ID NO: 107434 - DNA, 25 bp, Homo sapien
ttcgaccctttccacgaccactgtg

SEQ ID NO: 107435 - DNA, 25 bp, Homo sapien
gtgtggctcttttccgtcacttctt

SEQ ID NO: 107436 - DNA, 25 bp, Homo sapien
gtgtggctctttaccgtcacttctt

SEQ ID NO: 107437 - DNA, 25 bp, Homo sapien
tagtatctgcttctactcctacggc

SEQ ID NO: 107438 - DNA, 25 bp, Homo sapien
tagtatctgcttgtactcctacggc

SEQ ID NO: 107439 - DNA, 25 bp, Homo sapien
ctgtttcgacatacttttttcgggg

SEQ ID NO: 107440 - DNA, 25 bp, Homo sapien
ctgtttcgacattcttttttcgggg

SEQ ID NO: 107441 - DNA, 25 bp, Homo sapien
tttatcgttttccaggattaatgtc

SEQ ID NO: 107442 - DNA, 25 bp, Homo sapien
tttatcgttttcgaggattaatgtc

SEQ ID NO: 107443 - DNA, 25 bp, Homo sapien
gttatactaccaggaccgtagaata

SEQ ID NO: 107444 - DNA, 25 bp, Homo sapien
gttatactaccacgaccgtagaata

SEQ ID NO: 107445 - DNA, 25 bp, Homo sapien
cagggtaggacttttcacccataga

SEQ ID NO: 107446 - DNA, 25 bp, Homo sapien
cagggtaggactattcacccataga

SEQ ID NO: 107447 - DNA, 25 bp, Homo sapien
gtcagtacagtggttcccaccagag

SEQ ID NO: 107448 - DNA, 25 bp, Homo sapien
gtcagtacagtgcttcccaccagag

SEQ ID NO: 107449 - DNA, 25 bp, Homo sapien
gttataagaccgttaccgtctgaaa

SEQ ID NO: 107450 - DNA, 25 bp, Homo sapien
gttataagaccgataccgtctgaaa

SEQ ID NO: 107451 - DNA, 25 bp, Homo sapien
aggttgtacacgtcctcgtcgctcc

SEQ ID NO: 107452 - DNA, 25 bp, Homo sapien
aggttgtacacgacctcgtcgctcc

SEQ ID NO: 107453 - DNA, 25 bp, Homo sapien
cagtgtgcccgtcacgagtcaagac

SEQ ID NO: 107454 - DNA, 25 bp, Homo sapien
cagtgtgcccgtgacgagtcaagac

SEQ ID NO: 107455 - DNA, 25 bp, Homo sapien
gtttccaggaaccaccggacagggg

SEQ ID NO: 107456 - DNA, 25 bp, Homo sapien
gtttccaggaacgaccggacagggg

SEQ ID NO: 107457 - DNA, 25 bp, Homo sapien
ctacagtcgttgacccgaccgggag

SEQ ID NO: 107458 - DNA, 25 bp, Homo sapien
ctacagtcgttgtcccgaccgggag

SEQ ID NO: 107459 - DNA, 25 bp, Homo sapien
cctcaccgtggtttacctcagggga

SEQ ID NO: 107460 - DNA, 25 bp, Homo sapien
cctcaccgtggtatacctcagggga

SEQ ID NO: 107461 - DNA, 25 bp, Homo sapien
tcacccggagcgactccagggcgtc

SEQ ID NO: 107462 - DNA, 25 bp, Homo sapien
tcacccggagcgtctccagggcgtc

SEQ ID NO: 107463 - DNA, 25 bp, Homo sapien
agagccgaggggacccgtcgaaacc

SEQ ID NO: 107464 - DNA, 25 bp, Homo sapien
agagccgaggggtcccgtcgaaacc

SEQ ID NO: 107465 - DNA, 25 bp, Homo sapien
agaccgtcctggacgtcacccggga

SEQ ID NO: 107466 - DNA, 25 bp, Homo sapien
agaccgtcctggtcgtcacccggga

SEQ ID NO: 107467 - DNA, 25 bp, Homo sapien
ggagctcctgggtccccgtgtccga

SEQ ID NO: 107468 - DNA, 25 bp, Homo sapien
ggagctcctgggaccccgtgtccga

SEQ ID NO: 107469 - DNA, 25 bp, Homo sapien
gtgtccctggggacttcgaccgaca

SEQ ID NO: 107470 - DNA, 25 bp, Homo sapien
gtgtccctggggtcttcgaccgaca

SEQ ID NO: 107471 - DNA, 25 bp, Homo sapien
gcccctcaggggtcttcgggacacg

SEQ ID NO: 107472 - DNA, 25 bp, Homo sapien
gcccctcaggggacttcgggacacg

SEQ ID NO: 107473 - DNA, 25 bp, Homo sapien
gtcaactctcggacacacggtgatg

SEQ ID NO: 107474 - DNA, 25 bp, Homo sapien
gtcaactctcggtcacacggtgatg

SEQ ID NO: 107475 - DNA, 25 bp, Homo sapien
tacgatcctatatcccgaacgttgt

SEQ ID NO: 107476 - DNA, 25 bp, Homo sapien
tacgatcctataacccgaacgttgt

SEQ ID NO: 107477 - DNA, 25 bp, Homo sapien
cattacacccaaaagcagatcgtag

SEQ ID NO: 107478 - DNA, 25 bp, Homo sapien
cattacacccaatagcagatcgtag

SEQ ID NO: 107479 - DNA, 25 bp, Homo sapien
tgtaatacaccaacatagaaaacgg

SEQ ID NO: 107480 - DNA, 25 bp, Homo sapien
tgtaatacaccatcatagaaaacgg

SEQ ID NO: 107481 - DNA, 25 bp, Homo sapien
ttgtacttctccattgagttgtaag

SEQ ID NO: 107482 - DNA, 25 bp, Homo sapien
ttgtacttctcctttgagttgtaag

SEQ ID NO: 107483 - DNA, 25 bp, Homo sapien
ttttgtgttccatgcctaatgaagt

SEQ ID NO: 107484 - DNA, 25 bp, Homo sapien
ttttgtgttccaagcctaatgaagt

SEQ ID NO: 107485 - DNA, 25 bp, Homo sapien
ggttttcaatgatcgttaccggaat

SEQ ID NO: 107486 - DNA, 25 bp, Homo sapien
ggttttcaatgaacgttaccggaat

SEQ ID NO: 107487 - DNA, 25 bp, Homo sapien
gtacagttgagacgtactacggaac

SEQ ID NO: 107488 - DNA, 25 bp, Homo sapien
gtacagttgagaggtactacggaac

SEQ ID NO: 107489 - DNA, 25 bp, Homo sapien
tagtaacaaggtgaccctgaactcg

SEQ ID NO: 107490 - DNA, 25 bp, Homo sapien
tagtaacaaggtcaccctgaactcg

SEQ ID NO: 107491 - DNA, 25 bp, Homo sapien
agttcagagtcacacaagacacgac

SEQ ID NO: 107492 - DNA, 25 bp, Homo sapien
agttcagagtcagacaagacacgac

SEQ ID NO: 107493 - DNA, 25 bp, Homo sapien
aggtaagagaacgtacagacaacat

SEQ ID NO: 107494 - DNA, 25 bp, Homo sapien
aggtaagagaacctacagacaacat

SEQ ID NO: 107495 - DNA, 25 bp, Homo sapien
ccccaataaaagacggtacacaagt

SEQ ID NO: 107496 - DNA, 25 bp, Homo sapien
ccccaataaaagtcggtacacaagt

SEQ ID NO: 107497 - DNA, 25 bp, Homo sapien
ccaatatgaaggttcggaggacgta

SEQ ID NO: 107498 - DNA, 25 bp, Homo sapien
ccaatatgaaggatcggaggacgta

SEQ ID NO: 107499 - DNA, 25 bp, Homo sapien
tctcgtaaacatgatccgtaggtta

SEQ ID NO: 107500 - DNA, 25 bp, Homo sapien
tctcgtaaacatcatccgtaggtta

SEQ ID NO: 107501 - DNA, 25 bp, Homo sapien
tttaccgtcaccacattccggttgt

SEQ ID NO: 107502 - DNA, 25 bp, Homo sapien
tttaccgtcacctcattccggttgt

SEQ ID NO: 107503 - DNA, 25 bp, Homo sapien
tctacagtccctagacggtgcaaag

SEQ ID NO: 107504 - DNA, 25 bp, Homo sapien
tctacagtcccttgacggtgcaaag

SEQ ID NO: 107505 - DNA, 25 bp, Homo sapien
cgtaaactgtcttgagtcttgataa

SEQ ID NO: 107506 - DNA, 25 bp, Homo sapien
cgtaaactgtctagagtcttgataa

SEQ ID NO: 107507 - DNA, 25 bp, Homo sapien
cgaattgaagtagtcgaactgagac

SEQ ID NO: 107508 - DNA, 25 bp, Homo sapien
cgaattgaagtactcgaactgagac

SEQ ID NO: 107509 - DNA, 25 bp, Homo sapien
tcgtcaatgtaaaaccatcatgaag

SEQ ID NO: 107510 - DNA, 25 bp, Homo sapien
tcgtcaatgtaataccatcatgaag

SEQ ID NO: 107511 - DNA, 25 bp, Homo sapien
ctcaatagattttgatcttcgtatg

SEQ ID NO: 107512 - DNA, 25 bp, Homo sapien
ctcaatagatttagatcttcgtatg

SEQ ID NO: 107513 - DNA, 25 bp, Homo sapien
tcagatacctgtttctttactcggg

SEQ ID NO: 107514 - DNA, 25 bp, Homo sapien
tcagatacctgtatctttactcggg

SEQ ID NO: 107515 - DNA, 25 bp, Homo sapien
atagatcggtgtcaccatgaagaga

SEQ ID NO: 107516 - DNA, 25 bp, Homo sapien
atagatcggtgtgaccatgaagaga

SEQ ID NO: 107517 - DNA, 25 bp, Homo sapien
caattatcgtggtaatgtcactgat

SEQ ID NO: 107518 - DNA, 25 bp, Homo sapien
caattatcgtggaaatgtcactgat

SEQ ID NO: 107519 - DNA, 25 bp, Homo sapien
ccaccgttcttgacgagataaatta

SEQ ID NO: 107520 - DNA, 25 bp, Homo sapien
ccaccgttcttgtcgagataaatta

SEQ ID NO: 107521 - DNA, 25 bp, Homo sapien
ccccagtctccacatagtaaatata

SEQ ID NO: 107522 - DNA, 25 bp, Homo sapien
ccccagtctccagatagtaaatata

SEQ ID NO: 107523 - DNA, 25 bp, Homo sapien
tttctccgttgaagccggcaaactc

SEQ ID NO: 107524 - DNA, 25 bp, Homo sapien
tttctccgttgatgccggcaaactc

SEQ ID NO: 107525 - DNA, 25 bp, Homo sapien
gtgagtcgttatcaccgggaaagtt

SEQ ID NO: 107526 - DNA, 25 bp, Homo sapien
gtgagtcgttatgaccgggaaagtt

SEQ ID NO: 107527 - DNA, 25 bp, Homo sapien
actgtggcaaggatacgggaactga

SEQ ID NO: 107528 - DNA, 25 bp, Homo sapien
actgtggcaaggttacgggaactga

SEQ ID NO: 107529 - DNA, 25 bp, Homo sapien
tagggtaagtgtctagaatcctcta

SEQ ID NO: 107530 - DNA, 25 bp, Homo sapien
tagggtaagtgtgtagaatcctcta

SEQ ID NO: 107531 - DNA, 25 bp, Homo sapien
gaagtgacaatgtaggatctactca

SEQ ID NO: 107532 - DNA, 25 bp, Homo sapien
gaagtgacaatgaaggatctactca

SEQ ID NO: 107533 - DNA, 25 bp, Homo sapien
ggaaccgaccgagtagggaacatcc

SEQ ID NO: 107534 - DNA, 25 bp, Homo sapien
ggaaccgaccgactagggaacatcc

SEQ ID NO: 107535 - DNA, 25 bp, Homo sapien
agaaactaccttagtgattacattc

SEQ ID NO: 107536 - DNA, 25 bp, Homo sapien
agaaactacctttgtgattacattc

SEQ ID NO: 107537 - DNA, 25 bp, Homo sapien
gcggtctcggtttcgacctcgggtc

SEQ ID NO: 107538 - DNA, 25 bp, Homo sapien
gcggtctcggttacgacctcgggtc

SEQ ID NO: 107539 - DNA, 25 bp, Homo sapien
ggtggcgccggcagcgacctctcaa

SEQ ID NO: 107540 - DNA, 25 bp, Homo sapien
ggtggcgccggctgcgacctctcaa

SEQ ID NO: 107541 - DNA, 25 bp, Homo sapien
gtggacctgcgagtacccaacgtca

SEQ ID NO: 107542 - DNA, 25 bp, Homo sapien
gtggacctgcgactacccaacgtca

SEQ ID NO: 107543 - DNA, 25 bp, Homo sapien
tccttaagtggtttccgaagtataa

SEQ ID NO: 107544 - DNA, 25 bp, Homo sapien
tccttaagtggtatccgaagtataa

SEQ ID NO: 107545 - DNA, 25 bp, Homo sapien
aacttaggtcattgtccattgtaat

SEQ ID NO: 107546 - DNA, 25 bp, Homo sapien
aacttaggtcatagtccattgtaat

SEQ ID NO: 107547 - DNA, 25 bp, Homo sapien
ggtattgagttaggaacccttctga

SEQ ID NO: 107548 - DNA, 25 bp, Homo sapien
ggtattgagttacgaacccttctga

SEQ ID NO: 107549 - DNA, 25 bp, Homo sapien
ccctgggtctcttcacctttctgta

SEQ ID NO: 107550 - DNA, 25 bp, Homo sapien
ccctgggtctctacacctttctgta

SEQ ID NO: 107551 - DNA, 25 bp, Homo sapien
gtgaaggggtttctcccgtttttat

SEQ ID NO: 107552 - DNA, 25 bp, Homo sapien
gtgaaggggtttgtcccgtttttat

SEQ ID NO: 107553 - DNA, 25 bp, Homo sapien
aagactcggggtagtttcagtttca

SEQ ID NO: 107554 - DNA, 25 bp, Homo sapien
aagactcggggttgtttcagtttca

SEQ ID NO: 107555 - DNA, 25 bp, Homo sapien
gcggagacgaagtgtttgagtttcc

SEQ ID NO: 107556 - DNA, 25 bp, Homo sapien
gcggagacgaagagtttgagtttcc

SEQ ID NO: 107557 - DNA, 25 bp, Homo sapien
gggtggactgttttaccacgcatcc

SEQ ID NO: 107558 - DNA, 25 bp, Homo sapien
gggtggactgttataccacgcatcc

SEQ ID NO: 107559 - DNA, 25 bp, Homo sapien
taggccatgtctaacccgccttaca

SEQ ID NO: 107560 - DNA, 25 bp, Homo sapien
taggccatgtcttacccgccttaca

SEQ ID NO: 107561 - DNA, 25 bp, Homo sapien
acaaagaccgtttaccagtaattgg

SEQ ID NO: 107562 - DNA, 25 bp, Homo sapien
acaaagaccgttaaccagtaattgg

SEQ ID NO: 107563 - DNA, 25 bp, Homo sapien
accgaaaccgctaccagaggagtga

SEQ ID NO: 107564 - DNA, 25 bp, Homo sapien
accgaaaccgcttccagaggagtga

SEQ ID NO: 107565 - DNA, 25 bp, Homo sapien
acgaaaccccggtacctcaagtgaa

SEQ ID NO: 107566 - DNA, 25 bp, Homo sapien
acgaaaccccggaacctcaagtgaa

SEQ ID NO: 107567 - DNA, 25 bp, Homo sapien
ggtagtaccccgagtattcctttaa

SEQ ID NO: 107568 - DNA, 25 bp, Homo sapien
ggtagtaccccgtgtattcctttaa

SEQ ID NO: 107569 - DNA, 25 bp, Homo sapien
taggttccagtttttgactcttaga

SEQ ID NO: 107570 - DNA, 25 bp, Homo sapien
taggttccagttattgactcttaga

SEQ ID NO: 107571 - DNA, 25 bp, Homo sapien
cagtaggaaccgtccgggtccccgg

SEQ ID NO: 107572 - DNA, 25 bp, Homo sapien
cagtaggaaccgaccgggtccccgg

SEQ ID NO: 107573 - DNA, 25 bp, Homo sapien
gtcggaggccgcgttgtgctcgacc

SEQ ID NO: 107574 - DNA, 25 bp, Homo sapien
gtcggaggccgccttgtgctcgacc

SEQ ID NO: 107575 - DNA, 25 bp, Homo sapien
tgggagattgtgtatgctccgtaca

SEQ ID NO: 107576 - DNA, 25 bp, Homo sapien
tgggagattgtgaatgctccgtaca

SEQ ID NO: 107577 - DNA, 25 bp, Homo sapien
acgacaagtttgtcggtctcactta

SEQ ID NO: 107578 - DNA, 25 bp, Homo sapien
acgacaagtttgacggtctcactta

SEQ ID NO: 107579 - DNA, 25 bp, Homo sapien
ctctaactcgtctgatgtttagcca

SEQ ID NO: 107580 - DNA, 25 bp, Homo sapien
ctctaactcgtcagatgtttagcca

SEQ ID NO: 107581 - DNA, 25 bp, Homo sapien
tggtcaggtgtaagtgtacacgact

SEQ ID NO: 107582 - DNA, 25 bp, Homo sapien
tggtcaggtgtatgtgtacacgact

SEQ ID NO: 107583 - DNA, 25 bp, Homo sapien
cccatcttcagaggtctggtcacag

SEQ ID NO: 107584 - DNA, 25 bp, Homo sapien
cccatcttcagacgtctggtcacag

SEQ ID NO: 107585 - DNA, 25 bp, Homo sapien
cgagtccgcagtgtcgtaaccctag

SEQ ID NO: 107586 - DNA, 25 bp, Homo sapien
cgagtccgcagtctcgtaaccctag

SEQ ID NO: 107587 - DNA, 25 bp, Homo sapien
cacaatgccatataggacgaccgta

SEQ ID NO: 107588 - DNA, 25 bp, Homo sapien
cacaatgccataaaggacgaccgta

SEQ ID NO: 107589 - DNA, 25 bp, Homo sapien
taaactgttaaggactacggacact

SEQ ID NO: 107590 - DNA, 25 bp, Homo sapien
taaactgttaagcactacggacact

SEQ ID NO: 107591 - DNA, 25 bp, Homo sapien
gacttgacctagtgcgagacggcga

SEQ ID NO: 107592 - DNA, 25 bp, Homo sapien
gacttgacctagagcgagacggcga

SEQ ID NO: 107593 - DNA, 25 bp, Homo sapien
ctctcgaccagaaggacgaccggag

SEQ ID NO: 107594 - DNA, 25 bp, Homo sapien
ctctcgaccagatggacgaccggag

SEQ ID NO: 107595 - DNA, 25 bp, Homo sapien
tcgtcgttgatggtacccactctcc

SEQ ID NO: 107596 - DNA, 25 bp, Homo sapien
tcgtcgttgatgctacccactctcc

SEQ ID NO: 107597 - DNA, 25 bp, Homo sapien
agagcgcgccgaggctgtgcccgtg

SEQ ID NO: 107598 - DNA, 25 bp, Homo sapien
agagcgcgccgacgctgtgcccgtg

SEQ ID NO: 107599 - DNA, 25 bp, Homo sapien
accagtctctatggaccggaccaga

SEQ ID NO: 107600 - DNA, 25 bp, Homo sapien
accagtctctatcgaccggaccaga

SEQ ID NO: 107601 - DNA, 25 bp, Homo sapien
tcgaggcttcttaagaaacatatat

SEQ ID NO: 107602 - DNA, 25 bp, Homo sapien
tcgaggcttctttagaaacatatat

SEQ ID NO: 107603 - DNA, 25 bp, Homo sapien
aggttcactgatagagaccgatcat

SEQ ID NO: 107604 - DNA, 25 bp, Homo sapien
aggttcactgattgagaccgatcat

SEQ ID NO: 107605 - DNA, 25 bp, Homo sapien
aaggtgtccctattgtgcccaacgt

SEQ ID NO: 107606 - DNA, 25 bp, Homo sapien
aaggtgtccctaatgtgcccaacgt

SEQ ID NO: 107607 - DNA, 25 bp, Homo sapien
tggattcccacgtagaccgacgacc

SEQ ID NO: 107608 - DNA, 25 bp, Homo sapien
tggattcccacgaagaccgacgacc

SEQ ID NO: 107609 - DNA, 25 bp, Homo sapien
gtggtccacgagagacgtcgagacc

SEQ ID NO: 107610 - DNA, 25 bp, Homo sapien
gtggtccacgagtgacgtcgagacc

SEQ ID NO: 107611 - DNA, 25 bp, Homo sapien
cgagtactgggagttacgacgacaa

SEQ ID NO: 107612 - DNA, 25 bp, Homo sapien
cgagtactgggacttacgacgacaa

SEQ ID NO: 107613 - DNA, 25 bp, Homo sapien
cgcgagctctgtctcctcgacgggg

SEQ ID NO: 107614 - DNA, 25 bp, Homo sapien
cgcgagctctgtgtcctcgacgggg

SEQ ID NO: 107615 - DNA, 25 bp, Homo sapien
ccgctccgtcgcatatgtaccgggg

SEQ ID NO: 107616 - DNA, 25 bp, Homo sapien
ccgctccgtcgcttatgtaccgggg

SEQ ID NO: 107617 - DNA, 25 bp, Homo sapien
gagtcttgtcggttcggtcctcctg

SEQ ID NO: 107618 - DNA, 25 bp, Homo sapien
gagtcttgtcggatcggtcctcctg

SEQ ID NO: 107619 - DNA, 25 bp, Homo sapien
ggagtgtgtcacactgcgtcccctc

SEQ ID NO: 107620 - DNA, 25 bp, Homo sapien
ggagtgtgtcactctgcgtcccctc

SEQ ID NO: 107621 - DNA, 25 bp, Homo sapien
gacgataatttgtcaagacttgtcc

SEQ ID NO: 107622 - DNA, 25 bp, Homo sapien
gacgataatttgacaagacttgtcc

SEQ ID NO: 107623 - DNA, 25 bp, Homo sapien
tgtatatgacagacacaattgtctc

SEQ ID NO: 107624 - DNA, 25 bp, Homo sapien
tgtatatgacagtcacaattgtctc

SEQ ID NO: 107625 - DNA, 25 bp, Homo sapien
tgatttcaatacctagcaaggacaa

SEQ ID NO: 107626 - DNA, 25 bp, Homo sapien
tgatttcaatacgtagcaaggacaa

SEQ ID NO: 107627 - DNA, 25 bp, Homo sapien
gaaagtacgatttcaccgatacaca

SEQ ID NO: 107628 - DNA, 25 bp, Homo sapien
gaaagtacgattacaccgatacaca

SEQ ID NO: 107629 - DNA, 25 bp, Homo sapien
ttacagatgtatttacgaggttcca

SEQ ID NO: 107630 - DNA, 25 bp, Homo sapien
ttacagatgtatatacgaggttcca

SEQ ID NO: 107631 - DNA, 25 bp, Homo sapien
ccatacgcctgatggtcgtttttta

SEQ ID NO: 107632 - DNA, 25 bp, Homo sapien
ccatacgcctgaaggtcgtttttta

SEQ ID NO: 107633 - DNA, 25 bp, Homo sapien
cgatcgttctggtctttacttcttc

SEQ ID NO: 107634 - DNA, 25 bp, Homo sapien
cgatcgttctggactttacttcttc

SEQ ID NO: 107635 - DNA, 25 bp, Homo sapien
cctcttctcgggtgcgtgtatcttc

SEQ ID NO: 107636 - DNA, 25 bp, Homo sapien
cctcttctcgggagcgtgtatcttc

SEQ ID NO: 107637 - DNA, 25 bp, Homo sapien
ttcgtaccaagtaccgttatcttcg

SEQ ID NO: 107638 - DNA, 25 bp, Homo sapien
ttcgtaccaagttccgttatcttcg

SEQ ID NO: 107639 - DNA, 25 bp, Homo sapien
gtttttgcagacttcttaatgtaac

SEQ ID NO: 107640 - DNA, 25 bp, Homo sapien
gtttttgcagacatcttaatgtaac

SEQ ID NO: 107641 - DNA, 25 bp, Homo sapien
tgctagaacggaggttaacagtgtc

SEQ ID NO: 107642 - DNA, 25 bp, Homo sapien
tgctagaacggacgttaacagtgtc

SEQ ID NO: 107643 - DNA, 25 bp, Homo sapien
gtctagaaaagaaccctgaagtgtt

SEQ ID NO: 107644 - DNA, 25 bp, Homo sapien
gtctagaaaagatccctgaagtgtt

SEQ ID NO: 107645 - DNA, 25 bp, Homo sapien
ggtagaaaaggtctctctggagatc

SEQ ID NO: 107646 - DNA, 25 bp, Homo sapien
ggtagaaaaggtgtctctggagatc

SEQ ID NO: 107647 - DNA, 25 bp, Homo sapien
tccttgagtagaacactggagacta

SEQ ID NO: 107648 - DNA, 25 bp, Homo sapien
tccttgagtagatcactggagacta

SEQ ID NO: 107649 - DNA, 25 bp, Homo sapien
gatcgaagtgagtcgaccttccgaa

SEQ ID NO: 107650 - DNA, 25 bp, Homo sapien
gatcgaagtgagacgaccttccgaa

SEQ ID NO: 107651 - DNA, 25 bp, Homo sapien
catcaggtcgaaagggactcgcgga

SEQ ID NO: 107652 - DNA, 25 bp, Homo sapien
catcaggtcgaatgggactcgcgga

SEQ ID NO: 107653 - DNA, 25 bp, Homo sapien
cgacgcgtcacatgggtactggcac

SEQ ID NO: 107654 - DNA, 25 bp, Homo sapien
cgacgcgtcacaagggtactggcac

SEQ ID NO: 107655 - DNA, 25 bp, Homo sapien
tcacgaggtacctcatcctcgcgaa

SEQ ID NO: 107656 - DNA, 25 bp, Homo sapien
tcacgaggtaccacatcctcgcgaa

SEQ ID NO: 107657 - DNA, 25 bp, Homo sapien
ccgtaacgtcccacgatcaggagaa

SEQ ID NO: 107658 - DNA, 25 bp, Homo sapien
ccgtaacgtccctcgatcaggagaa

SEQ ID NO: 107659 - DNA, 25 bp, Homo sapien
ccgccactccatcatcgttggtagg

SEQ ID NO: 107660 - DNA, 25 bp, Homo sapien
ccgccactccatgatcgttggtagg

SEQ ID NO: 107661 - DNA, 25 bp, Homo sapien
gacccttcggtggtgactcgggtac

SEQ ID NO: 107662 - DNA, 25 bp, Homo sapien
gacccttcggtgctgactcgggtac

SEQ ID NO: 107663 - DNA, 25 bp, Homo sapien
agccggtctcggtacgccggtagtc

SEQ ID NO: 107664 - DNA, 25 bp, Homo sapien
agccggtctcggaacgccggtagtc

SEQ ID NO: 107665 - DNA, 25 bp, Homo sapien
tacgtccgacctgtcctcctgagtg

SEQ ID NO: 107666 - DNA, 25 bp, Homo sapien
tacgtccgacctctcctcctgagtg

SEQ ID NO: 107667 - DNA, 25 bp, Homo sapien
cgacacgcgcaggtccttcctgtgg

SEQ ID NO: 107668 - DNA, 25 bp, Homo sapien
cgacacgcgcagctccttcctgtgg

SEQ ID NO: 107669 - DNA, 25 bp, Homo sapien
gttcggattatggaccccttggact

SEQ ID NO: 107670 - DNA, 25 bp, Homo sapien
gttcggattatgcaccccttggact

SEQ ID NO: 107671 - DNA, 25 bp, Homo sapien
aggtcttcgccgacaacaatgtgta

SEQ ID NO: 107672 - DNA, 25 bp, Homo sapien
aggtcttcgccgtcaacaatgtgta

SEQ ID NO: 107673 - DNA, 25 bp, Homo sapien
gaagtttcccggacgtaccctgtcc

SEQ ID NO: 107674 - DNA, 25 bp, Homo sapien
gaagtttcccggtcgtaccctgtcc

SEQ ID NO: 107675 - DNA, 25 bp, Homo sapien
gtgtctttccggtcacacgttgatc

SEQ ID NO: 107676 - DNA, 25 bp, Homo sapien
gtgtctttccggacacacgttgatc

SEQ ID NO: 107677 - DNA, 25 bp, Homo sapien
cgtctattacttatgacgttagatt

SEQ ID NO: 107678 - DNA, 25 bp, Homo sapien
cgtctattacttttgacgttagatt

SEQ ID NO: 107679 - DNA, 25 bp, Homo sapien
ggacgaacccttaaggatcgatata

SEQ ID NO: 107680 - DNA, 25 bp, Homo sapien
ggacgaaccctttaggatcgatata

SEQ ID NO: 107681 - DNA, 25 bp, Homo sapien
gggtgagcgacattgaacgccagat

SEQ ID NO: 107682 - DNA, 25 bp, Homo sapien
gggtgagcgacaatgaacgccagat

SEQ ID NO: 107683 - DNA, 25 bp, Homo sapien
gacttgtcaccgtgtacacgccaac

SEQ ID NO: 107684 - DNA, 25 bp, Homo sapien
gacttgtcaccgagtacacgccaac

SEQ ID NO: 107685 - DNA, 25 bp, Homo sapien
cgacgttgacactgttaagaacccc

SEQ ID NO: 107686 - DNA, 25 bp, Homo sapien
cgacgttgacacagttaagaacccc

SEQ ID NO: 107687 - DNA, 25 bp, Homo sapien
tatatagaagagtacaggacctcct

SEQ ID NO: 107688 - DNA, 25 bp, Homo sapien
tatatagaagagaacaggacctcct

SEQ ID NO: 107689 - DNA, 25 bp, Homo sapien
acttgtggaagtatgtcgggacgac

SEQ ID NO: 107690 - DNA, 25 bp, Homo sapien
acttgtggaagtttgtcgggacgac

SEQ ID NO: 107691 - DNA, 25 bp, Homo sapien
cgtttggagaagtacctgtagtaca

SEQ ID NO: 107692 - DNA, 25 bp, Homo sapien
cgtttggagaagaacctgtagtaca

SEQ ID NO: 107693 - DNA, 25 bp, Homo sapien
gtgtacctaatcgagcaacttagaa

SEQ ID NO: 107694 - DNA, 25 bp, Homo sapien
gtgtacctaatccagcaacttagaa

SEQ ID NO: 107695 - DNA, 25 bp, Homo sapien
aaggcctagaagacacccctagacc

SEQ ID NO: 107696 - DNA, 25 bp, Homo sapien
aaggcctagaagtcacccctagacc

SEQ ID NO: 107697 - DNA, 25 bp, Homo sapien
agaagaagttgttcgaggacccctc

SEQ ID NO: 107698 - DNA, 25 bp, Homo sapien
agaagaagttgtacgaggacccctc

SEQ ID NO: 107699 - DNA, 25 bp, Homo sapien
aggagaaatatggagtgacccctac

SEQ ID NO: 107700 - DNA, 25 bp, Homo sapien
aggagaaatatgcagtgacccctac

SEQ ID NO: 107701 - DNA, 25 bp, Homo sapien
tcgtacgtaaatgctggaacaccta

SEQ ID NO: 107702 - DNA, 25 bp, Homo sapien
tcgtacgtaaatcctggaacaccta

SEQ ID NO: 107703 - DNA, 25 bp, Homo sapien
gtatccgtcttttacgggtccctcc

SEQ ID NO: 107704 - DNA, 25 bp, Homo sapien
gtatccgtctttaacgggtccctcc

SEQ ID NO: 107705 - DNA, 25 bp, Homo sapien
tatcctctcttatggaacccgatgc

SEQ ID NO: 107706 - DNA, 25 bp, Homo sapien
tatcctctcttaaggaacccgatgc

SEQ ID NO: 107707 - DNA, 25 bp, Homo sapien
atccctacatgtcgtctccctgtgg

SEQ ID NO: 107708 - DNA, 25 bp, Homo sapien
atccctacatgtggtctccctgtgg

SEQ ID NO: 107709 - DNA, 25 bp, Homo sapien
taccgcacgccgtgtcggtgtttgg

SEQ ID NO: 107710 - DNA, 25 bp, Homo sapien
taccgcacgccgagtcggtgtttgg

SEQ ID NO: 107711 - DNA, 25 bp, Homo sapien
cgtgaccctcggtagcgggtgtaac

SEQ ID NO: 107712 - DNA, 25 bp, Homo sapien
cgtgaccctcggaagcgggtgtaac

SEQ ID NO: 107713 - DNA, 25 bp, Homo sapien
tggtccccgtcgagtcgagaggttt

SEQ ID NO: 107714 - DNA, 25 bp, Homo sapien
tggtccccgtcgtgtcgagaggttt

SEQ ID NO: 107715 - DNA, 25 bp, Homo sapien
gtttcggcgtttggtcgcgtcgtct

SEQ ID NO: 107716 - DNA, 25 bp, Homo sapien
gtttcggcgtttcgtcgcgtcgtct

SEQ ID NO: 107717 - DNA, 25 bp, Homo sapien
actgctgtgtcgttcgagtgttcgg

SEQ ID NO: 107718 - DNA, 25 bp, Homo sapien
actgctgtgtcgatcgagtgttcgg

SEQ ID NO: 107719 - DNA, 25 bp, Homo sapien
gcgtagcttagtaatctgttactgg

SEQ ID NO: 107720 - DNA, 25 bp, Homo sapien
gcgtagcttagttatctgttactgg

SEQ ID NO: 107721 - DNA, 25 bp, Homo sapien
gtcgggtcacgtttcatagtaagta

SEQ ID NO: 107722 - DNA, 25 bp, Homo sapien
gtcgggtcacgtatcatagtaagta

SEQ ID NO: 107723 - DNA, 25 bp, Homo sapien
gggtcccgtcctagtccgtgaactc

SEQ ID NO: 107724 - DNA, 25 bp, Homo sapien
gggtcccgtccttgtccgtgaactc

SEQ ID NO: 107725 - DNA, 25 bp, Homo sapien
gaacccgtaccgtgtccgtcgaaac

SEQ ID NO: 107726 - DNA, 25 bp, Homo sapien
gaacccgtaccgagtccgtcgaaac

SEQ ID NO: 107727 - DNA, 25 bp, Homo sapien
gtatccaagcgtacgacaggacagc

SEQ ID NO: 107728 - DNA, 25 bp, Homo sapien
gtatccaagcgttcgacaggacagc

SEQ ID NO: 107729 - DNA, 25 bp, Homo sapien
tcgtctagcgcgtcggtccgaagcg

SEQ ID NO: 107730 - DNA, 25 bp, Homo sapien
tcgtctagcgcgacggtccgaagcg

SEQ ID NO: 107731 - DNA, 25 bp, Homo sapien
atttctaagagtctaggcacagacg

SEQ ID NO: 107732 - DNA, 25 bp, Homo sapien
atttctaagagtgtaggcacagacg

SEQ ID NO: 107733 - DNA, 25 bp, Homo sapien
tcgtagtatatcgtgtcgtcgaaac

SEQ ID NO: 107734 - DNA, 25 bp, Homo sapien
tcgtagtatatcctgtcgtcgaaac

SEQ ID NO: 107735 - DNA, 25 bp, Homo sapien
tgtttattgtcttctttatgaagat

SEQ ID NO: 107736 - DNA, 25 bp, Homo sapien
tgtttattgtctactttatgaagat

SEQ ID NO: 107737 - DNA, 25 bp, Homo sapien
acgaaagtgaacgatacgtggacta

SEQ ID NO: 107738 - DNA, 25 bp, Homo sapien
acgaaagtgaaccatacgtggacta

SEQ ID NO: 107739 - DNA, 25 bp, Homo sapien
cgttaggaaccgaccgaactcggca

SEQ ID NO: 107740 - DNA, 25 bp, Homo sapien
cgttaggaaccgtccgaactcggca

SEQ ID NO: 107741 - DNA, 25 bp, Homo sapien
tactttaagttggagtacttctcag

SEQ ID NO: 107742 - DNA, 25 bp, Homo sapien
tactttaagttgcagtacttctcag

SEQ ID NO: 107743 - DNA, 25 bp, Homo sapien
aatttttacctacgacgttttcgag

SEQ ID NO: 107744 - DNA, 25 bp, Homo sapien
aatttttacctaggacgttttcgag

SEQ ID NO: 107745 - DNA, 25 bp, Homo sapien
aggttccgacacaggacgatcctaa

SEQ ID NO: 107746 - DNA, 25 bp, Homo sapien
aggttccgacactggacgatcctaa

SEQ ID NO: 107747 - DNA, 25 bp, Homo sapien
ctactgtcagaatgaccatcgtgga

SEQ ID NO: 107748 - DNA, 25 bp, Homo sapien
ctactgtcagaaagaccatcgtgga

SEQ ID NO: 107749 - DNA, 25 bp, Homo sapien
gactctcttcgaaggtccatgaaga

SEQ ID NO: 107750 - DNA, 25 bp, Homo sapien
gactctcttcgatggtccatgaaga

SEQ ID NO: 107751 - DNA, 25 bp, Homo sapien
ctatattaagatgtataccgcgaaa

SEQ ID NO: 107752 - DNA, 25 bp, Homo sapien
ctatattaagatctataccgcgaaa

SEQ ID NO: 107753 - DNA, 25 bp, Homo sapien
ctgtcgtatacctctcgtcacaacg

SEQ ID NO: 107754 - DNA, 25 bp, Homo sapien
ctgtcgtataccactcgtcacaacg

SEQ ID NO: 107755 - DNA, 25 bp, Homo sapien
tctttacactacgtgtcctctaagg

SEQ ID NO: 107756 - DNA, 25 bp, Homo sapien
tctttacactacctgtcctctaagg

SEQ ID NO: 107757 - DNA, 25 bp, Homo sapien
atagttttcatactcctttagtggt

SEQ ID NO: 107758 - DNA, 25 bp, Homo sapien
atagttttcatagtcctttagtggt

SEQ ID NO: 107759 - DNA, 25 bp, Homo sapien
cgagttgttccattggtgtttgtcg

SEQ ID NO: 107760 - DNA, 25 bp, Homo sapien
cgagttgttccaatggtgtttgtcg

SEQ ID NO: 107761 - DNA, 25 bp, Homo sapien
tttctgtgcggtatctctgatgttc

SEQ ID NO: 107762 - DNA, 25 bp, Homo sapien
tttctgtgcggtttctctgatgttc

SEQ ID NO: 107763 - DNA, 25 bp, Homo sapien
gtgttatccccgttcctcatgatcg

SEQ ID NO: 107764 - DNA, 25 bp, Homo sapien
gtgttatccccgatcctcatgatcg

SEQ ID NO: 107765 - DNA, 25 bp, Homo sapien
gtgaacccactctcggaccgtttct

SEQ ID NO: 107766 - DNA, 25 bp, Homo sapien
gtgaacccactcacggaccgtttct

SEQ ID NO: 107767 - DNA, 25 bp, Homo sapien
acacggactgtgcaacgacgggtcg

SEQ ID NO: 107768 - DNA, 25 bp, Homo sapien
acacggactgtggaacgacgggtcg

SEQ ID NO: 107769 - DNA, 25 bp, Homo sapien
ctcaggtaactagagcacggtgtcg

SEQ ID NO: 107770 - DNA, 25 bp, Homo sapien
ctcaggtaactacagcacggtgtcg

SEQ ID NO: 107771 - DNA, 25 bp, Homo sapien
aaaacgagacatttcctgagtctct

SEQ ID NO: 107772 - DNA, 25 bp, Homo sapien
aaaacgagacatatcctgagtctct

SEQ ID NO: 107773 - DNA, 25 bp, Homo sapien
caaagtctagttccaagatgaacac

SEQ ID NO: 107774 - DNA, 25 bp, Homo sapien
caaagtctagttgcaagatgaacac

SEQ ID NO: 107775 - DNA, 25 bp, Homo sapien
atcagttaagtctacgaaagatctt

SEQ ID NO: 107776 - DNA, 25 bp, Homo sapien
atcagttaagtcaacgaaagatctt

SEQ ID NO: 107777 - DNA, 25 bp, Homo sapien
gagagaactttcactcaagtatctt

SEQ ID NO: 107778 - DNA, 25 bp, Homo sapien
gagagaactttctctcaagtatctt

SEQ ID NO: 107779 - DNA, 25 bp, Homo sapien
aaggattcctatttcgatgtatatc

SEQ ID NO: 107780 - DNA, 25 bp, Homo sapien
aaggattcctatatcgatgtatatc

SEQ ID NO: 107781 - DNA, 25 bp, Homo sapien
agagttttacctctatctaaacttc

SEQ ID NO: 107782 - DNA, 25 bp, Homo sapien
agagttttacctgtatctaaacttc

SEQ ID NO: 107783 - DNA, 25 bp, Homo sapien
cagactttttgtgttctgatatgac

SEQ ID NO: 107784 - DNA, 25 bp, Homo sapien
cagactttttgtcttctgatatgac

SEQ ID NO: 107785 - DNA, 25 bp, Homo sapien
cacctgtctttggacttgacgataa

SEQ ID NO: 107786 - DNA, 25 bp, Homo sapien
cacctgtctttgcacttgacgataa

SEQ ID NO: 107787 - DNA, 25 bp, Homo sapien
cccttttgtactacctgttgtcttg

SEQ ID NO: 107788 - DNA, 25 bp, Homo sapien
cccttttgtacttcctgttgtcttg

SEQ ID NO: 107789 - DNA, 25 bp, Homo sapien
atacgtttgtgtccaccatttttag

SEQ ID NO: 107790 - DNA, 25 bp, Homo sapien
atacgtttgtgtgcaccatttttag

SEQ ID NO: 107791 - DNA, 25 bp, Homo sapien
cctttgtacgggtccaatttcgacg

SEQ ID NO: 107792 - DNA, 25 bp, Homo sapien
cctttgtacgggaccaatttcgacg

SEQ ID NO: 107793 - DNA, 25 bp, Homo sapien
ttcagtcgcattcaattacgtcacg

SEQ ID NO: 107794 - DNA, 25 bp, Homo sapien
ttcagtcgcattgaattacgtcacg

SEQ ID NO: 107795 - DNA, 25 bp, Homo sapien
tcatgtcctcgacaagttctagtac

SEQ ID NO: 107796 - DNA, 25 bp, Homo sapien
tcatgtcctcgagaagttctagtac

SEQ ID NO: 107797 - DNA, 25 bp, Homo sapien
tcagctacgccgaaagctactaccg

SEQ ID NO: 107798 - DNA, 25 bp, Homo sapien
tcagctacgccgtaagctactaccg

SEQ ID NO: 107799 - DNA, 25 bp, Homo sapien
gaaggaacactctaaacggacgtcc

SEQ ID NO: 107800 - DNA, 25 bp, Homo sapien
gaaggaacactcaaaacggacgtcc

SEQ ID NO: 107801 - DNA, 25 bp, Homo sapien
agtttcgacctaagagcggtaccgg

SEQ ID NO: 107802 - DNA, 25 bp, Homo sapien
agtttcgacctatgagcggtaccgg

SEQ ID NO: 107803 - DNA, 25 bp, Homo sapien
atttaatctatgagacgtcctacgt

SEQ ID NO: 107804 - DNA, 25 bp, Homo sapien
atttaatctatgtgacgtcctacgt

SEQ ID NO: 107805 - DNA, 25 bp, Homo sapien
tatttaatctatgagacgtcctacg

SEQ ID NO: 107806 - DNA, 25 bp, Homo sapien
tatttaatctatcagacgtcctacg

SEQ ID NO: 107807 - DNA, 25 bp, Homo sapien
aaatattgacatatcgatcgcttag

SEQ ID NO: 107808 - DNA, 25 bp, Homo sapien
aaatattgacatttcgatcgcttag

SEQ ID NO: 107809 - DNA, 25 bp, Homo sapien
tgaaaatgtttgacgatacgtctta

SEQ ID NO: 107810 - DNA, 25 bp, Homo sapien
tgaaaatgtttgtcgatacgtctta

SEQ ID NO: 107811 - DNA, 25 bp, Homo sapien
taaacatagttgaacaaacatatat

SEQ ID NO: 107812 - DNA, 25 bp, Homo sapien
taaacatagttgtacaaacatatat

SEQ ID NO: 107813 - DNA, 25 bp, Homo sapien
acgagacaggtggacagcacctata

SEQ ID NO: 107814 - DNA, 25 bp, Homo sapien
acgagacaggtgcacagcacctata

SEQ ID NO: 107815 - DNA, 25 bp, Homo sapien
taagacataccctatagaccgtaga

SEQ ID NO: 107816 - DNA, 25 bp, Homo sapien
taagacatacccaatagaccgtaga

SEQ ID NO: 107817 - DNA, 25 bp, Homo sapien
ccgaacactcacctcaggacgttgg

SEQ ID NO: 107818 - DNA, 25 bp, Homo sapien
ccgaacactcacgtcaggacgttgg

SEQ ID NO: 107819 - DNA, 25 bp, Homo sapien
tgaaccacaacgaacagtacctgtg

SEQ ID NO: 107820 - DNA, 25 bp, Homo sapien
tgaaccacaacgtacagtacctgtg

SEQ ID NO: 107821 - DNA, 25 bp, Homo sapien
gtagaacatttatcacacgaccgca

SEQ ID NO: 107822 - DNA, 25 bp, Homo sapien
gtagaacatttaacacacgaccgca

SEQ ID NO: 107823 - DNA, 25 bp, Homo sapien
aagaccagtattaacacatagtcca

SEQ ID NO: 107824 - DNA, 25 bp, Homo sapien
aagaccagtatttacacatagtcca

SEQ ID NO: 107825 - DNA, 25 bp, Homo sapien
cggtaaagacaagttgaattcctag

SEQ ID NO: 107826 - DNA, 25 bp, Homo sapien
cggtaaagacaacttgaattcctag

SEQ ID NO: 107827 - DNA, 25 bp, Homo sapien
ggtgtcgtcattaattctaattcca

SEQ ID NO: 107828 - DNA, 25 bp, Homo sapien
ggtgtcgtcatttattctaattcca

SEQ ID NO: 107829 - DNA, 25 bp, Homo sapien
tttgctctggacgtaagaactttca

SEQ ID NO: 107830 - DNA, 25 bp, Homo sapien
tttgctctggacctaagaactttca

SEQ ID NO: 107831 - DNA, 25 bp, Homo sapien
tcatgtacatggtaaaccggtctcc

SEQ ID NO: 107832 - DNA, 25 bp, Homo sapien
tcatgtacatggaaaaccggtctcc

SEQ ID NO: 107833 - DNA, 25 bp, Homo sapien
agaagagtaacaaccgtgaccgtcg

SEQ ID NO: 107834 - DNA, 25 bp, Homo sapien
agaagagtaacatccgtgaccgtcg

SEQ ID NO: 107835 - DNA, 25 bp, Homo sapien
ggaggagtcgccactctagaggtct

SEQ ID NO: 107836 - DNA, 25 bp, Homo sapien
ggaggagtcgcctctctagaggtct

SEQ ID NO: 107837 - DNA, 25 bp, Homo sapien
gagtcggttcctcatatattaggat

SEQ ID NO: 107838 - DNA, 25 bp, Homo sapien
gagtcggttcctgatatattaggat

SEQ ID NO: 107839 - DNA, 25 bp, Homo sapien
cagcggttcgtctgtgtctttaggg

SEQ ID NO: 107840 - DNA, 25 bp, Homo sapien
cagcggttcgtcagtgtctttaggg

SEQ ID NO: 107841 - DNA, 25 bp, Homo sapien
gtttaggtgtttatctagatcaggg

SEQ ID NO: 107842 - DNA, 25 bp, Homo sapien
gtttaggtgtttttctagatcaggg

SEQ ID NO: 107843 - DNA, 25 bp, Homo sapien
ttgagagttccctgtacttgagtta

SEQ ID NO: 107844 - DNA, 25 bp, Homo sapien
ttgagagttcccagtacttgagtta

SEQ ID NO: 107845 - DNA, 25 bp, Homo sapien
taaggagtgtatagactccccagat

SEQ ID NO: 107846 - DNA, 25 bp, Homo sapien
taaggagtgtattgactccccagat

SEQ ID NO: 107847 - DNA, 25 bp, Homo sapien
agaggacatagaacacatatccaat

SEQ ID NO: 107848 - DNA, 25 bp, Homo sapien
agaggacatagatcacatatccaat

SEQ ID NO: 107849 - DNA, 25 bp, Homo sapien
gtcattgagatcctctctcctatag

SEQ ID NO: 107850 - DNA, 25 bp, Homo sapien
gtcattgagatcgtctctcctatag

SEQ ID NO: 107851 - DNA, 25 bp, Homo sapien
aagggactcatgttccaattctgag

SEQ ID NO: 107852 - DNA, 25 bp, Homo sapien
aagggactcatgatccaattctgag

SEQ ID NO: 107853 - DNA, 25 bp, Homo sapien
agaagtccacaacgaccaaggtgaa

SEQ ID NO: 107854 - DNA, 25 bp, Homo sapien
agaagtccacaaggaccaaggtgaa

SEQ ID NO: 107855 - DNA, 25 bp, Homo sapien
agtacaactgagcacccgggacttt

SEQ ID NO: 107856 - DNA, 25 bp, Homo sapien
agtacaactgaggacccgggacttt

SEQ ID NO: 107857 - DNA, 25 bp, Homo sapien
tttatccggaaaacgtcagactctt

SEQ ID NO: 107858 - DNA, 25 bp, Homo sapien
tttatccggaaatcgtcagactctt

SEQ ID NO: 107859 - DNA, 25 bp, Homo sapien
ttccacgagtcaatctctaagattg

SEQ ID NO: 107860 - DNA, 25 bp, Homo sapien
ttccacgagtcattctctaagattg

SEQ ID NO: 107861 - DNA, 25 bp, Homo sapien
ttagaaataagaagtcgtccatctg

SEQ ID NO: 107862 - DNA, 25 bp, Homo sapien
ttagaaataagatgtcgtccatctg

SEQ ID NO: 107863 - DNA, 25 bp, Homo sapien
cgtaaagatacgacccgtaaaacgg

SEQ ID NO: 107864 - DNA, 25 bp, Homo sapien
cgtaaagatacgtcccgtaaaacgg

SEQ ID NO: 107865 - DNA, 25 bp, Homo sapien
aaggtaaaggagacccgtaaaagac

SEQ ID NO: 107866 - DNA, 25 bp, Homo sapien
aaggtaaaggagtcccgtaaaagac

SEQ ID NO: 107867 - DNA, 25 bp, Homo sapien
agtgaaaccgtataccatgatgata

SEQ ID NO: 107868 - DNA, 25 bp, Homo sapien
agtgaaaccgtaaaccatgatgata

SEQ ID NO: 107869 - DNA, 25 bp, Homo sapien
gaccaggaccgtagtgcagaaggaa

SEQ ID NO: 107870 - DNA, 25 bp, Homo sapien
gaccaggaccgttgtgcagaaggaa

SEQ ID NO: 107871 - DNA, 25 bp, Homo sapien
caacttccctcttgacaagtaggaa

SEQ ID NO: 107872 - DNA, 25 bp, Homo sapien
caacttccctctagacaagtaggaa

SEQ ID NO: 107873 - DNA, 25 bp, Homo sapien
ttaacatcttccaccagtcccggtg

SEQ ID NO: 107874 - DNA, 25 bp, Homo sapien
ttaacatcttcctccagtcccggtg

SEQ ID NO: 107875 - DNA, 25 bp, Homo sapien
aagtacaaaggacctccattttggt

SEQ ID NO: 107876 - DNA, 25 bp, Homo sapien
aagtacaaaggagctccattttggt

SEQ ID NO: 107877 - DNA, 25 bp, Homo sapien
gagaagtaggagtcagaactgaacc

SEQ ID NO: 107878 - DNA, 25 bp, Homo sapien
gagaagtaggagacagaactgaacc

SEQ ID NO: 107879 - DNA, 25 bp, Homo sapien
caaatgagcgaacaactcagaaacg

SEQ ID NO: 107880 - DNA, 25 bp, Homo sapien
caaatgagcgaagaactcagaaacg

SEQ ID NO: 107881 - DNA, 25 bp, Homo sapien
gagtcccacgataaacaccatgcac

SEQ ID NO: 107882 - DNA, 25 bp, Homo sapien
gagtcccacgattaacaccatgcac

SEQ ID NO: 107883 - DNA, 25 bp, Homo sapien
tcacccgtcgtcaaccatagtacac

SEQ ID NO: 107884 - DNA, 25 bp, Homo sapien
tcacccgtcgtctaccatagtacac

SEQ ID NO: 107885 - DNA, 25 bp, Homo sapien
gttctagtccctctctcagacatag

SEQ ID NO: 107886 - DNA, 25 bp, Homo sapien
gttctagtccctgtctcagacatag

SEQ ID NO: 107887 - DNA, 25 bp, Homo sapien
ggatgggccctttgtctcaaccgta

SEQ ID NO: 107888 - DNA, 25 bp, Homo sapien
ggatgggcccttagtctcaaccgta

SEQ ID NO: 107889 - DNA, 25 bp, Homo sapien
aagggttccagtcccgtccgaggtt

SEQ ID NO: 107890 - DNA, 25 bp, Homo sapien
aagggttccagtgccgtccgaggtt

SEQ ID NO: 107891 - DNA, 25 bp, Homo sapien
gtctcggatcgtcacggacccgtct

SEQ ID NO: 107892 - DNA, 25 bp, Homo sapien
gtctcggatcgtgacggacccgtct

SEQ ID NO: 107893 - DNA, 25 bp, Homo sapien
ctgttccgagggttgtccgtctgct

SEQ ID NO: 107894 - DNA, 25 bp, Homo sapien
ctgttccgagggatgtccgtctgct

SEQ ID NO: 107895 - DNA, 25 bp, Homo sapien
ccgacctaatgtgtttctgtaggtt

SEQ ID NO: 107896 - DNA, 25 bp, Homo sapien
ccgacctaatgtctttctgtaggtt

SEQ ID NO: 107897 - DNA, 25 bp, Homo sapien
atccaacttctgtctgttctgtttg

SEQ ID NO: 107898 - DNA, 25 bp, Homo sapien
atccaacttctgactgttctgtttg

SEQ ID NO: 107899 - DNA, 25 bp, Homo sapien
ttacctcgcacgtcggaccttggtg

SEQ ID NO: 107900 - DNA, 25 bp, Homo sapien
ttacctcgcacgacggaccttggtg

SEQ ID NO: 107901 - DNA, 25 bp, Homo sapien
acttgtgacgaaacctcttatgcat

SEQ ID NO: 107902 - DNA, 25 bp, Homo sapien
acttgtgacgaatcctcttatgcat

SEQ ID NO: 107903 - DNA, 25 bp, Homo sapien
cacctgccgtacctccgtctttgaa

SEQ ID NO: 107904 - DNA, 25 bp, Homo sapien
cacctgccgtacgtccgtctttgaa

SEQ ID NO: 107905 - DNA, 25 bp, Homo sapien
gaggttgccgtattaccctttgaca

SEQ ID NO: 107906 - DNA, 25 bp, Homo sapien
gaggttgccgtaataccctttgaca

SEQ ID NO: 107907 - DNA, 25 bp, Homo sapien
gtccggtttcctaaacattttgtaa

SEQ ID NO: 107908 - DNA, 25 bp, Homo sapien
gtccggtttccttaacattttgtaa

SEQ ID NO: 107909 - DNA, 25 bp, Homo sapien
accagtggtacaacaaaactttaaa

SEQ ID NO: 107910 - DNA, 25 bp, Homo sapien
accagtggtacatcaaaactttaaa

SEQ ID NO: 107911 - DNA, 25 bp, Homo sapien
agtgacgtaatcaatttttactgac

SEQ ID NO: 107912 - DNA, 25 bp, Homo sapien
agtgacgtaatctatttttactgac

SEQ ID NO: 107913 - DNA, 25 bp, Homo sapien
ggtgtaactactttcgtttttacca

SEQ ID NO: 107914 - DNA, 25 bp, Homo sapien
ggtgtaactactatcgtttttacca

SEQ ID NO: 107915 - DNA, 25 bp, Homo sapien
gtagaaggtacactttagcttaccg

SEQ ID NO: 107916 - DNA, 25 bp, Homo sapien
gtagaaggtacagtttagcttaccg

SEQ ID NO: 107917 - DNA, 25 bp, Homo sapien
ggttactgggggttttcgtactgac

SEQ ID NO: 107918 - DNA, 25 bp, Homo sapien
ggttactgggggatttcgtactgac

SEQ ID NO: 107919 - DNA, 25 bp, Homo sapien
ggtttgtcggtgaaggtaccctacc

SEQ ID NO: 107920 - DNA, 25 bp, Homo sapien
ggtttgtcggtgtaggtaccctacc

SEQ ID NO: 107921 - DNA, 25 bp, Homo sapien
gtttgacgtcgaggaacgaccctcc

SEQ ID NO: 107922 - DNA, 25 bp, Homo sapien
gtttgacgtcgacgaacgaccctcc

SEQ ID NO: 107923 - DNA, 25 bp, Homo sapien
acataagcgtcacagtcctttcgtg

SEQ ID NO: 107924 - DNA, 25 bp, Homo sapien
acataagcgtcagagtcctttcgtg

SEQ ID NO: 107925 - DNA, 25 bp, Homo sapien
caagtattcataagcgacttgtgtc

SEQ ID NO: 107926 - DNA, 25 bp, Homo sapien
caagtattcatatgcgacttgtgtc

SEQ ID NO: 107927 - DNA, 25 bp, Homo sapien
gacgtccggtatctcggacggtgtt

SEQ ID NO: 107928 - DNA, 25 bp, Homo sapien
gacgtccggtatgtcggacggtgtt

SEQ ID NO: 107929 - DNA, 25 bp, Homo sapien
ttcaattggacgtgggtccggtgtc

SEQ ID NO: 107930 - DNA, 25 bp, Homo sapien
ttcaattggacgagggtccggtgtc

SEQ ID NO: 107931 - DNA, 25 bp, Homo sapien
cacagttcagtaagaagttttccct

SEQ ID NO: 107932 - DNA, 25 bp, Homo sapien
cacagttcagtatgaagttttccct

SEQ ID NO: 107933 - DNA, 25 bp, Homo sapien
ccgataaatcgtaatgtttcttagt

SEQ ID NO: 107934 - DNA, 25 bp, Homo sapien
ccgataaatcgttatgtttcttagt

SEQ ID NO: 107935 - DNA, 25 bp, Homo sapien
gaacgacactcttattccgtgaact

SEQ ID NO: 107936 - DNA, 25 bp, Homo sapien
gaacgacactctaattccgtgaact

SEQ ID NO: 107937 - DNA, 25 bp, Homo sapien
gtgaagtcttctgattaggtatcac

SEQ ID NO: 107938 - DNA, 25 bp, Homo sapien
gtgaagtcttctcattaggtatcac

SEQ ID NO: 107939 - DNA, 25 bp, Homo sapien
tcgaaccactaccacggctgtcgga

SEQ ID NO: 107940 - DNA, 25 bp, Homo sapien
tcgaaccactacgacggctgtcgga

SEQ ID NO: 107941 - DNA, 25 bp, Homo sapien
acacctcaacgtcatcgttgtccgg

SEQ ID NO: 107942 - DNA, 25 bp, Homo sapien
acacctcaacgtgatcgttgtccgg

SEQ ID NO: 107943 - DNA, 25 bp, Homo sapien
aaatcggagataaagtcctaggtcc

SEQ ID NO: 107944 - DNA, 25 bp, Homo sapien
aaatcggagatatagtcctaggtcc

SEQ ID NO: 107945 - DNA, 25 bp, Homo sapien
ccgtactccaagtgtgtccaagccg

SEQ ID NO: 107946 - DNA, 25 bp, Homo sapien
ccgtactccaagagtgtccaagccg

SEQ ID NO: 107947 - DNA, 25 bp, Homo sapien
ttgcagacacggtccacggagaccg

SEQ ID NO: 107948 - DNA, 25 bp, Homo sapien
ttgcagacacggaccacggagaccg

SEQ ID NO: 107949 - DNA, 25 bp, Homo sapien
tggaactcacgcacctcagcgacgg

SEQ ID NO: 107950 - DNA, 25 bp, Homo sapien
tggaactcacgctcctcagcgacgg

SEQ ID NO: 107951 - DNA, 25 bp, Homo sapien
gacgtgacgacaacccaacgtacac

SEQ ID NO: 107952 - DNA, 25 bp, Homo sapien
gacgtgacgacatcccaacgtacac

SEQ ID NO: 107953 - DNA, 25 bp, Homo sapien
gaaatagtggaaacacgatagtctc

SEQ ID NO: 107954 - DNA, 25 bp, Homo sapien
gaaatagtggaatcacgatagtctc

SEQ ID NO: 107955 - DNA, 25 bp, Homo sapien
gacgaaccgcggaagccacggccgt

SEQ ID NO: 107956 - DNA, 25 bp, Homo sapien
gacgaaccgcggtagccacggccgt

SEQ ID NO: 107957 - DNA, 25 bp, Homo sapien
tgacgaactccgactcggaccggga

SEQ ID NO: 107958 - DNA, 25 bp, Homo sapien
tgacgaactccgtctcggaccggga

SEQ ID NO: 107959 - DNA, 25 bp, Homo sapien
tttcttaccagtctcttcgtcgggg

SEQ ID NO: 107960 - DNA, 25 bp, Homo sapien
tttcttaccagtgtcttcgtcgggg

SEQ ID NO: 107961 - DNA, 25 bp, Homo sapien
ctttgtgtactggtgttccgttggg

SEQ ID NO: 107962 - DNA, 25 bp, Homo sapien
ctttgtgtactgctgttccgttggg

SEQ ID NO: 107963 - DNA, 25 bp, Homo sapien
catttggaacggacgggcctccgtc

SEQ ID NO: 107964 - DNA, 25 bp, Homo sapien
catttggaacggtcgggcctccgtc

SEQ ID NO: 107965 - DNA, 25 bp, Homo sapien
ccttggtgtccaagtggtccctacc

SEQ ID NO: 107966 - DNA, 25 bp, Homo sapien
ccttggtgtccatgtggtccctacc

SEQ ID NO: 107967 - DNA, 25 bp, Homo sapien
tctgttgtcatggtcctcccgtccg

SEQ ID NO: 107968 - DNA, 25 bp, Homo sapien
tctgttgtcatgctcctcccgtccg

SEQ ID NO: 107969 - DNA, 25 bp, Homo sapien
tagtcctgaagactcggaagactcc

SEQ ID NO: 107970 - DNA, 25 bp, Homo sapien
tagtcctgaagagtcggaagactcc

SEQ ID NO: 107971 - DNA, 25 bp, Homo sapien
tatttaggatctttgggagtactcc

SEQ ID NO: 107972 - DNA, 25 bp, Homo sapien
tatttaggatctatgggagtactcc

SEQ ID NO: 107973 - DNA, 25 bp, Homo sapien
gacgtgaaagattgctcatgggtcc

SEQ ID NO: 107974 - DNA, 25 bp, Homo sapien
gacgtgaaagatagctcatgggtcc

SEQ ID NO: 107975 - DNA, 25 bp, Homo sapien
actgaagatcagtcatagcggtcct

SEQ ID NO: 107976 - DNA, 25 bp, Homo sapien
actgaagatcagacatagcggtcct

SEQ ID NO: 107977 - DNA, 25 bp, Homo sapien
acaaaaggttaaagatcacagtgct

SEQ ID NO: 107978 - DNA, 25 bp, Homo sapien
acaaaaggttaatgatcacagtgct

SEQ ID NO: 107979 - DNA, 25 bp, Homo sapien
tataaaagagttatttaacaccgac

SEQ ID NO: 107980 - DNA, 25 bp, Homo sapien
tataaaagagttttttaacaccgac

SEQ ID NO: 107981 - DNA, 25 bp, Homo sapien
tagtcacaaggtttgttgtggaccc

SEQ ID NO: 107982 - DNA, 25 bp, Homo sapien
tagtcacaaggtatgttgtggaccc

SEQ ID NO: 107983 - DNA, 25 bp, Homo sapien
tccagtggtacctctgtagttctcc

SEQ ID NO: 107984 - DNA, 25 bp, Homo sapien
tccagtggtaccactgtagttctcc

SEQ ID NO: 107985 - DNA, 25 bp, Homo sapien
tccgatggacgacgagttttgtgtc

SEQ ID NO: 107986 - DNA, 25 bp, Homo sapien
tccgatggacgaggagttttgtgtc

SEQ ID NO: 107987 - DNA, 25 bp, Homo sapien
atccctccggtcagaggtttatgtt

SEQ ID NO: 107988 - DNA, 25 bp, Homo sapien
atccctccggtctgaggtttatgtt

SEQ ID NO: 107989 - DNA, 25 bp, Homo sapien
ctctaccggtcgaggacgcactgcg

SEQ ID NO: 107990 - DNA, 25 bp, Homo sapien
ctctaccggtcgtggacgcactgcg

SEQ ID NO: 107991 - DNA, 25 bp, Homo sapien
ccttcatgtagaaggggaccatgtc

SEQ ID NO: 107992 - DNA, 25 bp, Homo sapien
ccttcatgtagatggggaccatgtc

SEQ ID NO: 107993 - DNA, 25 bp, Homo sapien
actcccggtggtcgtggcagtcctc

SEQ ID NO: 107994 - DNA, 25 bp, Homo sapien
actcccggtggtggtggcagtcctc

SEQ ID NO: 107995 - DNA, 25 bp, Homo sapien
ctccggggttggggtcccgtcgtct

SEQ ID NO: 107996 - DNA, 25 bp, Homo sapien
ctccggggttggcgtcccgtcgtct

SEQ ID NO: 107997 - DNA, 25 bp, Homo sapien
actctagtcgtctccctcggttcgt

SEQ ID NO: 107998 - DNA, 25 bp, Homo sapien
actctagtcgtcaccctcggttcgt

SEQ ID NO: 107999 - DNA, 25 bp, Homo sapien
gttagttttaccacctacggtatct

SEQ ID NO: 108000 - DNA, 25 bp, Homo sapien
gttagttttacctcctacggtatct

SEQ ID NO: 108001 - DNA, 25 bp, Homo sapien
ttgtttacaacactcgagttctcgt

SEQ ID NO: 108002 - DNA, 25 bp, Homo sapien
ttgtttacaacagtcgagttctcgt

SEQ ID NO: 108003 - DNA, 25 bp, Homo sapien
acttttctcacctttaggtgtgact

SEQ ID NO: 108004 - DNA, 25 bp, Homo sapien
acttttctcaccattaggtgtgact

SEQ ID NO: 108005 - DNA, 25 bp, Homo sapien
acctctgacttaacgggtaagttta

SEQ ID NO: 108006 - DNA, 25 bp, Homo sapien
acctctgacttatcgggtaagttta

SEQ ID NO: 108007 - DNA, 25 bp, Homo sapien
acctactttctctgtggaagtttta

SEQ ID NO: 108008 - DNA, 25 bp, Homo sapien
acctactttctcagtggaagtttta

SEQ ID NO: 108009 - DNA, 25 bp, Homo sapien
tcctttaggtttcgaacgtccgtga

SEQ ID NO: 108010 - DNA, 25 bp, Homo sapien
tcctttaggtttggaacgtccgtga

SEQ ID NO: 108011 - DNA, 25 bp, Homo sapien
agtaccatccgtcgtaacgtcccag

SEQ ID NO: 108012 - DNA, 25 bp, Homo sapien
agtaccatccgtggtaacgtcccag

SEQ ID NO: 108013 - DNA, 25 bp, Homo sapien
gttgcccgtcggactggtcctcggt

SEQ ID NO: 108014 - DNA, 25 bp, Homo sapien
gttgcccgtcggtctggtcctcggt

SEQ ID NO: 108015 - DNA, 25 bp, Homo sapien
acccgacgtcacttgtcacgtgtgg

SEQ ID NO: 108016 - DNA, 25 bp, Homo sapien
acccgacgtcacatgtcacgtgtgg

SEQ ID NO: 108017 - DNA, 25 bp, Homo sapien
gttacatcctcctctacagatagag

SEQ ID NO: 108018 - DNA, 25 bp, Homo sapien
gttacatcctccactacagatagag

SEQ ID NO: 108019 - DNA, 25 bp, Homo sapien
ccaagtaatcctagataacgtttga

SEQ ID NO: 108020 - DNA, 25 bp, Homo sapien
ccaagtaatccttgataacgtttga

SEQ ID NO: 108021 - DNA, 25 bp, Homo sapien
aaataacggtcatatacgtgttgtc

SEQ ID NO: 108022 - DNA, 25 bp, Homo sapien
aaataacggtcaaatacgtgttgtc

SEQ ID NO: 108023 - DNA, 25 bp, Homo sapien
tagcaacggagtacagacggttctc

SEQ ID NO: 108024 - DNA, 25 bp, Homo sapien
tagcaacggagttcagacggttctc

SEQ ID NO: 108025 - DNA, 25 bp, Homo sapien
gaccgacattagtttagcgggttct

SEQ ID NO: 108026 - DNA, 25 bp, Homo sapien
gaccgacattagattagcgggttct

SEQ ID NO: 108027 - DNA, 25 bp, Homo sapien
tcgacgagtagtcttgtttggttct

SEQ ID NO: 108028 - DNA, 25 bp, Homo sapien
tcgacgagtagtgttgtttggttct

SEQ ID NO: 108029 - DNA, 25 bp, Homo sapien
acgtttactaattccaggttccttg

SEQ ID NO: 108030 - DNA, 25 bp, Homo sapien
acgtttactaataccaggttccttg

SEQ ID NO: 108031 - DNA, 25 bp, Homo sapien
ccgtcaaagcggagactccttatgt

SEQ ID NO: 108032 - DNA, 25 bp, Homo sapien
ccgtcaaagcggtgactccttatgt

SEQ ID NO: 108033 - DNA, 25 bp, Homo sapien
cattaaacttcgagaaccgagttgt

SEQ ID NO: 108034 - DNA, 25 bp, Homo sapien
cattaaacttcgtgaaccgagttgt

SEQ ID NO: 108035 - DNA, 25 bp, Homo sapien
gcccaggattacaggtaacggtaaa

SEQ ID NO: 108036 - DNA, 25 bp, Homo sapien
gcccaggattactggtaacggtaaa

SEQ ID NO: 108037 - DNA, 25 bp, Homo sapien
ctgtttcatagttctgaactcagaa

SEQ ID NO: 108038 - DNA, 25 bp, Homo sapien
ctgtttcatagtactgaactcagaa

SEQ ID NO: 108039 - DNA, 25 bp, Homo sapien
taaggtcaccagacgtctaaaagga

SEQ ID NO: 108040 - DNA, 25 bp, Homo sapien
taaggtcaccagtcgtctaaaagga

SEQ ID NO: 108041 - DNA, 25 bp, Homo sapien
agaccgtcgaaccagtatctcccgg

SEQ ID NO: 108042 - DNA, 25 bp, Homo sapien
agaccgtcgaacgagtatctcccgg

SEQ ID NO: 108043 - DNA, 25 bp, Homo sapien
ccggagctacgacgactactcaggg

SEQ ID NO: 108044 - DNA, 25 bp, Homo sapien
ccggagctacgaggactactcaggg

SEQ ID NO: 108045 - DNA, 25 bp, Homo sapien
caagaggaaacgaagatactctggg

SEQ ID NO: 108046 - DNA, 25 bp, Homo sapien
caagaggaaacgtagatactctggg

SEQ ID NO: 108047 - DNA, 25 bp, Homo sapien
cccccggcggacgggagaagggtct

SEQ ID NO: 108048 - DNA, 25 bp, Homo sapien
cccccggcggaccggagaagggtct

SEQ ID NO: 108049 - DNA, 25 bp, Homo sapien
ctccacacgtcgtctccaaagaggg

SEQ ID NO: 108050 - DNA, 25 bp, Homo sapien
ctccacacgtcgactccaaagaggg

SEQ ID NO: 108051 - DNA, 25 bp, Homo sapien
cacacagggtctccaagacagacgg

SEQ ID NO: 108052 - DNA, 25 bp, Homo sapien
cacacagggtctgcaagacagacgg

SEQ ID NO: 108053 - DNA, 25 bp, Homo sapien
aacagtaccgacaccagaacgactt

SEQ ID NO: 108054 - DNA, 25 bp, Homo sapien
aacagtaccgactccagaacgactt

SEQ ID NO: 108055 - DNA, 25 bp, Homo sapien
ctggagaacttcttctggaggatgt

SEQ ID NO: 108056 - DNA, 25 bp, Homo sapien
ctggagaacttcatctggaggatgt

SEQ ID NO: 108057 - DNA, 25 bp, Homo sapien
tcgacgacgaagacctcagggaatg

SEQ ID NO: 108058 - DNA, 25 bp, Homo sapien
tcgacgacgaagtcctcagggaatg

SEQ ID NO: 108059 - DNA, 25 bp, Homo sapien
tgaggtcacctttcacgcgggaccg

SEQ ID NO: 108060 - DNA, 25 bp, Homo sapien
tgaggtcaccttacacgcgggaccg

SEQ ID NO: 108061 - DNA, 25 bp, Homo sapien
actggtatcccgtagtccgggaccc

SEQ ID NO: 108062 - DNA, 25 bp, Homo sapien
actggtatcccgaagtccgggaccc

SEQ ID NO: 108063 - DNA, 25 bp, Homo sapien
tcagaaccacgataccgaccgttcc

SEQ ID NO: 108064 - DNA, 25 bp, Homo sapien
tcagaaccacgaaaccgaccgttcc

SEQ ID NO: 108065 - DNA, 25 bp, Homo sapien
gatagggtttcgtctcatccctgac

SEQ ID NO: 108066 - DNA, 25 bp, Homo sapien
gatagggtttcgactcatccctgac

SEQ ID NO: 108067 - DNA, 25 bp, Homo sapien
tatcgcgaccaatgtcaaccctctg

SEQ ID NO: 108068 - DNA, 25 bp, Homo sapien
tatcgcgaccaaagtcaaccctctg

SEQ ID NO: 108069 - DNA, 25 bp, Homo sapien
cgtggaacctttggagaccctcgtg

SEQ ID NO: 108070 - DNA, 25 bp, Homo sapien
cgtggaacctttcgagaccctcgtg

SEQ ID NO: 108071 - DNA, 25 bp, Homo sapien
taggaagtctttctagtcctttagt

SEQ ID NO: 108072 - DNA, 25 bp, Homo sapien
taggaagtctttgtagtcctttagt

SEQ ID NO: 108073 - DNA, 25 bp, Homo sapien
tcgtttgtcttggtctcctcgatgt

SEQ ID NO: 108074 - DNA, 25 bp, Homo sapien
tcgtttgtcttgctctcctcgatgt

SEQ ID NO: 108075 - DNA, 25 bp, Homo sapien
gtattcatgttcttctttgcgggtg

SEQ ID NO: 108076 - DNA, 25 bp, Homo sapien
gtattcatgttcatctttgcgggtg

SEQ ID NO: 108077 - DNA, 25 bp, Homo sapien
ttcaccgtttgtctggatggatgtg

SEQ ID NO: 108078 - DNA, 25 bp, Homo sapien
ttcaccgtttgtgtggatggatgtg

SEQ ID NO: 108079 - DNA, 25 bp, Homo sapien
cctttttccgtaggacttgataagt

SEQ ID NO: 108080 - DNA, 25 bp, Homo sapien
cctttttccgtacgacttgataagt

SEQ ID NO: 108081 - DNA, 25 bp, Homo sapien
caggttgtgactttttaaccatggt

SEQ ID NO: 108082 - DNA, 25 bp, Homo sapien
caggttgtgactatttaaccatggt

SEQ ID NO: 108083 - DNA, 25 bp, Homo sapien
cgggtgtaagtcgttctctcccagg

SEQ ID NO: 108084 - DNA, 25 bp, Homo sapien
cgggtgtaagtccttctctcccagg

SEQ ID NO: 108085 - DNA, 25 bp, Homo sapien
cggagtataacaacttcctctgaaa

SEQ ID NO: 108086 - DNA, 25 bp, Homo sapien
cggagtataacatcttcctctgaaa

SEQ ID NO: 108087 - DNA, 25 bp, Homo sapien
gtgttagtaccgtcggtcgagctcc

SEQ ID NO: 108088 - DNA, 25 bp, Homo sapien
gtgttagtaccgacggtcgagctcc

SEQ ID NO: 108089 - DNA, 25 bp, Homo sapien
agtctgcccgtaacacgacgagacc

SEQ ID NO: 108090 - DNA, 25 bp, Homo sapien
agtctgcccgtatcacgacgagacc

SEQ ID NO: 108091 - DNA, 25 bp, Homo sapien
tactccagcagctaccggaccggga

SEQ ID NO: 108092 - DNA, 25 bp, Homo sapien
tactccagcagcaaccggaccggga

SEQ ID NO: 108093 - DNA, 25 bp, Homo sapien
ccgtaagtttgtaccggccggttag

SEQ ID NO: 108094 - DNA, 25 bp, Homo sapien
ccgtaagtttgttccggccggttag

SEQ ID NO: 108095 - DNA, 25 bp, Homo sapien
ctcacggtgtgactcccggggagac

SEQ ID NO: 108096 - DNA, 25 bp, Homo sapien
ctcacggtgtgagtcccggggagac

SEQ ID NO: 108097 - DNA, 25 bp, Homo sapien
cacctgtggacgggccaggtgacac

SEQ ID NO: 108098 - DNA, 25 bp, Homo sapien
cacctgtggacgcgccaggtgacac

SEQ ID NO: 108099 - DNA, 25 bp, Homo sapien
tagtccctggggtctcccagagacc

SEQ ID NO: 108100 - DNA, 25 bp, Homo sapien
tagtccctggggactcccagagacc

SEQ ID NO: 108101 - DNA, 25 bp, Homo sapien
ttcgacccctggacccacagagaat

SEQ ID NO: 108102 - DNA, 25 bp, Homo sapien
ttcgacccctggtcccacagagaat

SEQ ID NO: 108103 - DNA, 25 bp, Homo sapien
tggagcccccggtccacaggcggta

SEQ ID NO: 108104 - DNA, 25 bp, Homo sapien
tggagcccccggaccacaggcggta

SEQ ID NO: 108105 - DNA, 25 bp, Homo sapien
agagccctgcggacgctcagccaga

SEQ ID NO: 108106 - DNA, 25 bp, Homo sapien
agagccctgcggtcgctcagccaga

SEQ ID NO: 108107 - DNA, 25 bp, Homo sapien
aacccagacgggtctccgaggagcg

SEQ ID NO: 108108 - DNA, 25 bp, Homo sapien
aacccagacgggactccgaggagcg

SEQ ID NO: 108109 - DNA, 25 bp, Homo sapien
gtccgcgcacggaccacgaggagat

SEQ ID NO: 108110 - DNA, 25 bp, Homo sapien
gtccgcgcacggtccacgaggagat

SEQ ID NO: 108111 - DNA, 25 bp, Homo sapien
cctcgagccggttacccgaccaggt

SEQ ID NO: 108112 - DNA, 25 bp, Homo sapien
cctcgagccggtaacccgaccaggt

SEQ ID NO: 108113 - DNA, 25 bp, Homo sapien
ttacacccgagacatacaagtctag

SEQ ID NO: 108114 - DNA, 25 bp, Homo sapien
ttacacccgagagatacaagtctag

SEQ ID NO: 108115 - DNA, 25 bp, Homo sapien
ccataggacccaaagagacaaacgg

SEQ ID NO: 108116 - DNA, 25 bp, Homo sapien
ccataggacccatagagacaaacgg

SEQ ID NO: 108117 - DNA, 25 bp, Homo sapien
ttgacgttccctagtaggggtcgag

SEQ ID NO: 108118 - DNA, 25 bp, Homo sapien
ttgacgttcccttgtaggggtcgag

SEQ ID NO: 108119 - DNA, 25 bp, Homo sapien
gttttgtgttccatgcctaatgaag

SEQ ID NO: 108120 - DNA, 25 bp, Homo sapien
gttttgtgttccttgcctaatgaag

SEQ ID NO: 108121 - DNA, 25 bp, Homo sapien
agtttcggaatgttcttacaggaac

SEQ ID NO: 108122 - DNA, 25 bp, Homo sapien
agtttcggaatgatcttacaggaac

SEQ ID NO: 108123 - DNA, 25 bp, Homo sapien
agtacagttgagacgtactacggaa

SEQ ID NO: 108124 - DNA, 25 bp, Homo sapien
agtacagttgagtcgtactacggaa

SEQ ID NO: 108125 - DNA, 25 bp, Homo sapien
tacgacgacaaggtcccaagaaccg

SEQ ID NO: 108126 - DNA, 25 bp, Homo sapien
tacgacgacaagctcccaagaaccg

SEQ ID NO: 108127 - DNA, 25 bp, Homo sapien
ccgagtcaagtctcggaagacacac

SEQ ID NO: 108128 - DNA, 25 bp, Homo sapien
ccgagtcaagtcacggaagacacac

SEQ ID NO: 108129 - DNA, 25 bp, Homo sapien
gggtacaagaccatcggagaaccgt

SEQ ID NO: 108130 - DNA, 25 bp, Homo sapien
gggtacaagaccttcggagaaccgt

SEQ ID NO: 108131 - DNA, 25 bp, Homo sapien
ccagacaagccggtgagtactaaag

SEQ ID NO: 108132 - DNA, 25 bp, Homo sapien
ccagacaagccgctgagtactaaag

SEQ ID NO: 108133 - DNA, 25 bp, Homo sapien
caatctgaaccgatctcgtataaga

SEQ ID NO: 108134 - DNA, 25 bp, Homo sapien
caatctgaaccgttctcgtataaga

SEQ ID NO: 108135 - DNA, 25 bp, Homo sapien
cgtcgtaaacgacacccgtgtggta

SEQ ID NO: 108136 - DNA, 25 bp, Homo sapien
cgtcgtaaacgagacccgtgtggta

SEQ ID NO: 108137 - DNA, 25 bp, Homo sapien
tttcctcaccacaaagtctccggtg

SEQ ID NO: 108138 - DNA, 25 bp, Homo sapien
tttcctcaccactaagtctccggtg

SEQ ID NO: 108139 - DNA, 25 bp, Homo sapien
ttcacgtcacatagaatctcagatg

SEQ ID NO: 108140 - DNA, 25 bp, Homo sapien
ttcacgtcacattgaatctcagatg

SEQ ID NO: 108141 - DNA, 25 bp, Homo sapien
tctagtacatgttcgaattcataag

SEQ ID NO: 108142 - DNA, 25 bp, Homo sapien
tctagtacatgtacgaattcataag

SEQ ID NO: 108143 - DNA, 25 bp, Homo sapien
tcgtaatatgacaattcgatccaac

SEQ ID NO: 108144 - DNA, 25 bp, Homo sapien
tcgtaatatgactattcgatccaac

SEQ ID NO: 108145 - DNA, 25 bp, Homo sapien
ttcagattacgataatgtcaccaag

SEQ ID NO: 108146 - DNA, 25 bp, Homo sapien
ttcagattacgaaaatgtcaccaag

SEQ ID NO: 108147 - DNA, 25 bp, Homo sapien
attcattgagttcatgatcttcatg

SEQ ID NO: 108148 - DNA, 25 bp, Homo sapien
attcattgagttgatgatcttcatg

SEQ ID NO: 108149 - DNA, 25 bp, Homo sapien
ttcatgtcctatttcacttatcggg

SEQ ID NO: 108150 - DNA, 25 bp, Homo sapien
ttcatgtcctatatcacttatcggg

SEQ ID NO: 108151 - DNA, 25 bp, Homo sapien
gacaatcctagtctcgatcaaagag

SEQ ID NO: 108152 - DNA, 25 bp, Homo sapien
gacaatcctagtgtcgatcaaagag

SEQ ID NO: 108153 - DNA, 25 bp, Homo sapien
aacctatactggtagatcgcgaaga

SEQ ID NO: 108154 - DNA, 25 bp, Homo sapien
aacctatactggaagatcgcgaaga

SEQ ID NO: 108155 - DNA, 25 bp, Homo sapien
tcaactttatggaagacgtcaaatt

SEQ ID NO: 108156 - DNA, 25 bp, Homo sapien
tcaactttatggtagacgtcaaatt

SEQ ID NO: 108157 - DNA, 25 bp, Homo sapien
tcccattctgggaacgtaaacatct

SEQ ID NO: 108158 - DNA, 25 bp, Homo sapien
tcccattctgggtacgtaaacatct

SEQ ID NO: 108159 - DNA, 25 bp, Homo sapien
gttccctatcgcagccggcataatt

SEQ ID NO: 108160 - DNA, 25 bp, Homo sapien
gttccctatcgctgccggcataatt

SEQ ID NO: 108161 - DNA, 25 bp, Homo sapien
ttcggctcgtcctgcctggaaggtt

SEQ ID NO: 108162 - DNA, 25 bp, Homo sapien
ttcggctcgtccagcctggaaggtt

SEQ ID NO: 108163 - DNA, 25 bp, Homo sapien
atgaggtcccggaaccggaactgac

SEQ ID NO: 108164 - DNA, 25 bp, Homo sapien
atgaggtcccggtaccggaactgac

SEQ ID NO: 108165 - DNA, 25 bp, Homo sapien
ctgaggtcacgtcttaccaacctta

SEQ ID NO: 108166 - DNA, 25 bp, Homo sapien
ctgaggtcacgtgttaccaacctta

SEQ ID NO: 108167 - DNA, 25 bp, Homo sapien
atgacactatgtgatgaactctcta

SEQ ID NO: 108168 - DNA, 25 bp, Homo sapien
atgacactatgtcatgaactctcta

SEQ ID NO: 108169 - DNA, 25 bp, Homo sapien
gcacggacgacagacaggaacatga

SEQ ID NO: 108170 - DNA, 25 bp, Homo sapien
gcacggacgacacacaggaacatga

SEQ ID NO: 108171 - DNA, 25 bp, Homo sapien
aaacgatctcttacggtaaaattcg

SEQ ID NO: 108172 - DNA, 25 bp, Homo sapien
aaacgatctctttcggtaaaattcg

SEQ ID NO: 108173 - DNA, 25 bp, Homo sapien
tggggttcggttctaactcggagtc

SEQ ID NO: 108174 - DNA, 25 bp, Homo sapien
tggggttcggttgtaactcggagtc

SEQ ID NO: 108175 - DNA, 25 bp, Homo sapien
gtggctcctggtggtcctaccacta

SEQ ID NO: 108176 - DNA, 25 bp, Homo sapien
gtggctcctggtcgtcctaccacta

SEQ ID NO: 108177 - DNA, 25 bp, Homo sapien
ggagactccgagcttcgtccatcca

SEQ ID NO: 108178 - DNA, 25 bp, Homo sapien
ggagactccgaggttcgtccatcca

SEQ ID NO: 108179 - DNA, 25 bp, Homo sapien
cgcgtaaaggtgttatgtccattaa

SEQ ID NO: 108180 - DNA, 25 bp, Homo sapien
cgcgtaaaggtgatatgtccattaa

SEQ ID NO: 108181 - DNA, 25 bp, Homo sapien
acttaagttctggttcatatgtaca

SEQ ID NO: 108182 - DNA, 25 bp, Homo sapien
acttaagttctgcttcatatgtaca

SEQ ID NO: 108183 - DNA, 25 bp, Homo sapien
acttcacggtgtacacccttctgag

SEQ ID NO: 108184 - DNA, 25 bp, Homo sapien
acttcacggtgttcacccttctgag

SEQ ID NO: 108185 - DNA, 25 bp, Homo sapien
cagtctcggttctcacctctttgag

SEQ ID NO: 108186 - DNA, 25 bp, Homo sapien
cagtctcggttcacacctctttgag

SEQ ID NO: 108187 - DNA, 25 bp, Homo sapien
ggggtcctgtgtctctcctgtttta

SEQ ID NO: 108188 - DNA, 25 bp, Homo sapien
ggggtcctgtgtgtctcctgtttta

SEQ ID NO: 108189 - DNA, 25 bp, Homo sapien
gggttcgggtctctgttctatttaa

SEQ ID NO: 108190 - DNA, 25 bp, Homo sapien
gggttcgggtctgtgttctatttaa

SEQ ID NO: 108191 - DNA, 25 bp, Homo sapien
gtcgaaagtcggtgtttggtttccg

SEQ ID NO: 108192 - DNA, 25 bp, Homo sapien
gtcgaaagtcggagtttggtttccg

SEQ ID NO: 108193 - DNA, 25 bp, Homo sapien
gtgagggacggtattattctttctc

SEQ ID NO: 108194 - DNA, 25 bp, Homo sapien
gtgagggacggttttattctttctc

SEQ ID NO: 108195 - DNA, 25 bp, Homo sapien
tagagcacattttttgctttacagt

SEQ ID NO: 108196 - DNA, 25 bp, Homo sapien
tagagcacatttattgctttacagt

SEQ ID NO: 108197 - DNA, 25 bp, Homo sapien
aaaagaggttctcctgtagattcgg

SEQ ID NO: 108198 - DNA, 25 bp, Homo sapien
aaaagaggttctgctgtagattcgg

SEQ ID NO: 108199 - DNA, 25 bp, Homo sapien
gaccgcaacgccaccatggagtcga

SEQ ID NO: 108200 - DNA, 25 bp, Homo sapien
gaccgcaacgcctccatggagtcga

SEQ ID NO: 108201 - DNA, 25 bp, Homo sapien
acgaaaccccggtacctcaagtgaa

SEQ ID NO: 108202 - DNA, 25 bp, Homo sapien
acgaaaccccggaacctcaagtgaa

SEQ ID NO: 108203 - DNA, 25 bp, Homo sapien
taggttccccggttttcctggtaat

SEQ ID NO: 108204 - DNA, 25 bp, Homo sapien
taggttccccggatttcctggtaat

SEQ ID NO: 108205 - DNA, 25 bp, Homo sapien
ggtggtccggtgtgttacctttaga

SEQ ID NO: 108206 - DNA, 25 bp, Homo sapien
ggtggtccggtgagttacctttaga

SEQ ID NO: 108207 - DNA, 25 bp, Homo sapien
tagtgcgccagatccgggttccagg

SEQ ID NO: 108208 - DNA, 25 bp, Homo sapien
tagtgcgccagaaccgggttccagg

SEQ ID NO: 108209 - DNA, 25 bp, Homo sapien
tgcgagggtgacgtcttgctagacc

SEQ ID NO: 108210 - DNA, 25 bp, Homo sapien
tgcgagggtgacctcttgctagacc

SEQ ID NO: 108211 - DNA, 25 bp, Homo sapien
ttgcgaatgtgtcattggtcggatc

SEQ ID NO: 108212 - DNA, 25 bp, Homo sapien
ttgcgaatgtgtgattggtcggatc

SEQ ID NO: 108213 - DNA, 25 bp, Homo sapien
acgaatagtttcattgctgtattac

SEQ ID NO: 108214 - DNA, 25 bp, Homo sapien
acgaatagtttctttgctgtattac

SEQ ID NO: 108215 - DNA, 25 bp, Homo sapien
actataagtgtgaattgtctgctcc

SEQ ID NO: 108216 - DNA, 25 bp, Homo sapien
actataagtgtgtattgtctgctcc

SEQ ID NO: 108217 - DNA, 25 bp, Homo sapien
ctattggtcagtaataattccgcgt

SEQ ID NO: 108218 - DNA, 25 bp, Homo sapien
ctattggtcagttataattccgcgt

SEQ ID NO: 108219 - DNA, 25 bp, Homo sapien
gctgattgtcaaatacgtgtgtcca

SEQ ID NO: 108220 - DNA, 25 bp, Homo sapien
gctgattgtcaattacgtgtgtcca

SEQ ID NO: 108221 - DNA, 25 bp, Homo sapien
ggtgcttgcagtgtcgtgtatcaag

SEQ ID NO: 108222 - DNA, 25 bp, Homo sapien
ggtgcttgcagtctcgtgtatcaag

SEQ ID NO: 108223 - DNA, 25 bp, Homo sapien
acccaatgccaatgtggacgatgta

SEQ ID NO: 108224 - DNA, 25 bp, Homo sapien
acccaatgccaaagtggacgatgta

SEQ ID NO: 108225 - DNA, 25 bp, Homo sapien
actcgtgtaaatgacgacggatact

SEQ ID NO: 108226 - DNA, 25 bp, Homo sapien
actcgtgtaaatcacgacggatact

SEQ ID NO: 108227 - DNA, 25 bp, Homo sapien
agcttccgtctctaccacgacggga

SEQ ID NO: 108228 - DNA, 25 bp, Homo sapien
agcttccgtctcaaccacgacggga

SEQ ID NO: 108229 - DNA, 25 bp, Homo sapien
cctctcgaccagaaggacgaccgga

SEQ ID NO: 108230 - DNA, 25 bp, Homo sapien
cctctcgaccagtaggacgaccgga

SEQ ID NO: 108231 - DNA, 25 bp, Homo sapien
tgtggtgtactcgtacccaccgtcc

SEQ ID NO: 108232 - DNA, 25 bp, Homo sapien
tgtggtgtactcctacccaccgtcc

SEQ ID NO: 108233 - DNA, 25 bp, Homo sapien
tttgaggtcgcgcccggtatagagc

SEQ ID NO: 108234 - DNA, 25 bp, Homo sapien
tttgaggtcgcggccggtatagagc

SEQ ID NO: 108235 - DNA, 25 bp, Homo sapien
gaccagacctgtgtcacgggcacag

SEQ ID NO: 108236 - DNA, 25 bp, Homo sapien
gaccagacctgtctcacgggcacag

SEQ ID NO: 108237 - DNA, 25 bp, Homo sapien
gacacgattcttagaatacacgtaa

SEQ ID NO: 108238 - DNA, 25 bp, Homo sapien
gacacgattctttgaatacacgtaa

SEQ ID NO: 108239 - DNA, 25 bp, Homo sapien
gagagtcatcattgaactacatcct

SEQ ID NO: 108240 - DNA, 25 bp, Homo sapien
gagagtcatcatagaactacatcct

SEQ ID NO: 108241 - DNA, 25 bp, Homo sapien
aaggttcatcgttctgttccaccag

SEQ ID NO: 108242 - DNA, 25 bp, Homo sapien
aaggttcatcgtactgttccaccag

SEQ ID NO: 108243 - DNA, 25 bp, Homo sapien
aggactccttcctagtccagactcg

SEQ ID NO: 108244 - DNA, 25 bp, Homo sapien
aggactccttccaagtccagactcg

SEQ ID NO: 108245 - DNA, 25 bp, Homo sapien
tggtccacgagagacgtcgagacct

SEQ ID NO: 108246 - DNA, 25 bp, Homo sapien
tggtccacgagacacgtcgagacct

SEQ ID NO: 108247 - DNA, 25 bp, Homo sapien
gacgtgcgacgagtcacgtaggaac

SEQ ID NO: 108248 - DNA, 25 bp, Homo sapien
gacgtgcgacgactcacgtaggaac

SEQ ID NO: 108249 - DNA, 25 bp, Homo sapien
cggtctccggatcctcgagcggtag

SEQ ID NO: 108250 - DNA, 25 bp, Homo sapien
cggtctccggatgctcgagcggtag

SEQ ID NO: 108251 - DNA, 25 bp, Homo sapien
gtcccgtctctcacaggtcgcgggg

SEQ ID NO: 108252 - DNA, 25 bp, Homo sapien
gtcccgtctctctcaggtcgcgggg

SEQ ID NO: 108253 - DNA, 25 bp, Homo sapien
acctgtcgtccgttctgtcccggtg

SEQ ID NO: 108254 - DNA, 25 bp, Homo sapien
acctgtcgtccgatctgtcccggtg

SEQ ID NO: 108255 - DNA, 25 bp, Homo sapien
gtggtcgtaccctgagtctccctcg

SEQ ID NO: 108256 - DNA, 25 bp, Homo sapien
gtggtcgtacccagagtctccctcg

SEQ ID NO: 108257 - DNA, 25 bp, Homo sapien
taagaaattcggtcaagtcttcccg

SEQ ID NO: 108258 - DNA, 25 bp, Homo sapien
taagaaattcggacaagtcttcccg

SEQ ID NO: 108259 - DNA, 25 bp, Homo sapien
tgacgttgtcagaccgatttctatc

SEQ ID NO: 108260 - DNA, 25 bp, Homo sapien
tgacgttgtcagtccgatttctatc

SEQ ID NO: 108261 - DNA, 25 bp, Homo sapien
gaaggacacagaaacacaactgttt

SEQ ID NO: 108262 - DNA, 25 bp, Homo sapien
gaaggacacagatacacaactgttt

SEQ ID NO: 108263 - DNA, 25 bp, Homo sapien
gaaggtaatatacacacatacgcac

SEQ ID NO: 108264 - DNA, 25 bp, Homo sapien
gaaggtaatatagacacatacgcac

SEQ ID NO: 108265 - DNA, 25 bp, Homo sapien
tataagagacgataacacattccga

SEQ ID NO: 108266 - DNA, 25 bp, Homo sapien
tataagagacgaaaacacattccga

SEQ ID NO: 108267 - DNA, 25 bp, Homo sapien
catcgttcaaagaacgacttttgta

SEQ ID NO: 108268 - DNA, 25 bp, Homo sapien
catcgttcaaagtacgacttttgta

SEQ ID NO: 108269 - DNA, 25 bp, Homo sapien
gagtctttgagaccttaacttcttc

SEQ ID NO: 108270 - DNA, 25 bp, Homo sapien
gagtctttgagagcttaacttcttc

SEQ ID NO: 108271 - DNA, 25 bp, Homo sapien
cgttgtccggtgtcagtacgttttc

SEQ ID NO: 108272 - DNA, 25 bp, Homo sapien
cgttgtccggtgacagtacgttttc

SEQ ID NO: 108273 - DNA, 25 bp, Homo sapien
tgtcctcctaagaatgtattcttcg

SEQ ID NO: 108274 - DNA, 25 bp, Homo sapien
tgtcctcctaagtatgtattcttcg

SEQ ID NO: 108275 - DNA, 25 bp, Homo sapien
gtcttttgacatttattattactaa

SEQ ID NO: 108276 - DNA, 25 bp, Homo sapien
gtcttttgacatatattattactaa

SEQ ID NO: 108277 - DNA, 25 bp, Homo sapien
tgtctgaaggatcctagacacggac

SEQ ID NO: 108278 - DNA, 25 bp, Homo sapien
tgtctgaaggatgctagacacggac

SEQ ID NO: 108279 - DNA, 25 bp, Homo sapien
gtcgtgaccaaaaccactgaggtgg

SEQ ID NO: 108280 - DNA, 25 bp, Homo sapien
gtcgtgaccaaatccactgaggtgg

SEQ ID NO: 108281 - DNA, 25 bp, Homo sapien
ggttgtaaaagtcctctctgaaatg

SEQ ID NO: 108282 - DNA, 25 bp, Homo sapien
ggttgtaaaagtgctctctgaaatg

SEQ ID NO: 108283 - DNA, 25 bp, Homo sapien
ttcaggtagaagacactcgagagaa

SEQ ID NO: 108284 - DNA, 25 bp, Homo sapien
ttcaggtagaagtcactcgagagaa

SEQ ID NO: 108285 - DNA, 25 bp, Homo sapien
gtcgagtgtgaaggaccgtgtccaa

SEQ ID NO: 108286 - DNA, 25 bp, Homo sapien
gtcgagtgtgaacgaccgtgtccaa

SEQ ID NO: 108287 - DNA, 25 bp, Homo sapien
actctgcgtcaaaccggctccggag

SEQ ID NO: 108288 - DNA, 25 bp, Homo sapien
actctgcgtcaatccggctccggag

SEQ ID NO: 108289 - DNA, 25 bp, Homo sapien
tgacgctactaatccggtctgggag

SEQ ID NO: 108290 - DNA, 25 bp, Homo sapien
tgacgctactaaaccggtctgggag

SEQ ID NO: 108291 - DNA, 25 bp, Homo sapien
cgtccaggaccgacatcttcggaga

SEQ ID NO: 108292 - DNA, 25 bp, Homo sapien
cgtccaggaccgtcatcttcggaga

SEQ ID NO: 108293 - DNA, 25 bp, Homo sapien
tcaccttcgtccacgatcttgagaa

SEQ ID NO: 108294 - DNA, 25 bp, Homo sapien
tcaccttcgtcctcgatcttgagaa

SEQ ID NO: 108295 - DNA, 25 bp, Homo sapien
ctccgtcctcgctcgatttggacat

SEQ ID NO: 108296 - DNA, 25 bp, Homo sapien
ctccgtcctcgcacgatttggacat

SEQ ID NO: 108297 - DNA, 25 bp, Homo sapien
gttcccccagtggtgacacgggtac

SEQ ID NO: 108298 - DNA, 25 bp, Homo sapien
gttcccccagtgctgacacgggtac

SEQ ID NO: 108299 - DNA, 25 bp, Homo sapien
cggcaggtccggtagcacgctcgtc

SEQ ID NO: 108300 - DNA, 25 bp, Homo sapien
cggcaggtccggaagcacgctcgtc

SEQ ID NO: 108301 - DNA, 25 bp, Homo sapien
cttccgaccgtcgaatcctcgagtt

SEQ ID NO: 108302 - DNA, 25 bp, Homo sapien
cttccgaccgtccaatcctcgagtt

SEQ ID NO: 108303 - DNA, 25 bp, Homo sapien
gttccgacattccttcctcgtcgag

SEQ ID NO: 108304 - DNA, 25 bp, Homo sapien
gttccgacattcgttcctcgtcgag

SEQ ID NO: 108305 - DNA, 25 bp, Homo sapien
ataggattctgttccctctgtgtca

SEQ ID NO: 108306 - DNA, 25 bp, Homo sapien
ataggattctgtaccctctgtgtca

SEQ ID NO: 108307 - DNA, 25 bp, Homo sapien
agtcggttcttcacccacatcgtga

SEQ ID NO: 108308 - DNA, 25 bp, Homo sapien
agtcggttcttctcccacatcgtga

SEQ ID NO: 108309 - DNA, 25 bp, Homo sapien
gggatgttcccgtcgctaccttggc

SEQ ID NO: 108310 - DNA, 25 bp, Homo sapien
gggatgttcccgacgctaccttggc

SEQ ID NO: 108311 - DNA, 25 bp, Homo sapien
tagtcttccgggtcacagtatcggg

SEQ ID NO: 108312 - DNA, 25 bp, Homo sapien
tagtcttccgggacacagtatcggg

SEQ ID NO: 108313 - DNA, 25 bp, Homo sapien
cttacgtgtcttactgactgtcatc

SEQ ID NO: 108314 - DNA, 25 bp, Homo sapien
cttacgtgtctttctgactgtcatc

SEQ ID NO: 108315 - DNA, 25 bp, Homo sapien
catcgtcgacttaatgaccgtaata

SEQ ID NO: 108316 - DNA, 25 bp, Homo sapien
catcgtcgactttatgaccgtaata

SEQ ID NO: 108317 - DNA, 25 bp, Homo sapien
ggggttcgacgattgaaccgttatt

SEQ ID NO: 108318 - DNA, 25 bp, Homo sapien
ggggttcgacgaatgaaccgttatt

SEQ ID NO: 108319 - DNA, 25 bp, Homo sapien
catgttgactcgtgacacccgacct

SEQ ID NO: 108320 - DNA, 25 bp, Homo sapien
catgttgactcgagacacccgacct

SEQ ID NO: 108321 - DNA, 25 bp, Homo sapien
actcttagaccgagacgagacccgc

SEQ ID NO: 108322 - DNA, 25 bp, Homo sapien
actcttagaccgtgacgagacccgc

SEQ ID NO: 108323 - DNA, 25 bp, Homo sapien
tttacagagagagactaagacccct

SEQ ID NO: 108324 - DNA, 25 bp, Homo sapien
tttacagagagacactaagacccct

SEQ ID NO: 108325 - DNA, 25 bp, Homo sapien
ttctagggaagtcttgagaccacgt

SEQ ID NO: 108326 - DNA, 25 bp, Homo sapien
ttctagggaagtgttgagaccacgt

SEQ ID NO: 108327 - DNA, 25 bp, Homo sapien
cacttaggaaagtcttgtacgtaat

SEQ ID NO: 108328 - DNA, 25 bp, Homo sapien
cacttaggaaagacttgtacgtaat

SEQ ID NO: 108329 - DNA, 25 bp, Homo sapien
ggacctacaccctgacacattgaat

SEQ ID NO: 108330 - DNA, 25 bp, Homo sapien
ggacctacacccagacacattgaat

SEQ ID NO: 108331 - DNA, 25 bp, Homo sapien
gcaggcgtctgaagccacccctgcc

SEQ ID NO: 108332 - DNA, 25 bp, Homo sapien
gcaggcgtctgatgccacccctgcc

SEQ ID NO: 108333 - DNA, 25 bp, Homo sapien
gtcaggcggattaccaggcccgctc

SEQ ID NO: 108334 - DNA, 25 bp, Homo sapien
gtcaggcggatttccaggcccgctc

SEQ ID NO: 108335 - DNA, 25 bp, Homo sapien
gacggagacaaacgagggacccctc

SEQ ID NO: 108336 - DNA, 25 bp, Homo sapien
gacggagacaaaggagggacccctc

SEQ ID NO: 108337 - DNA, 25 bp, Homo sapien
cgtacgtaaatgctggaacacctat

SEQ ID NO: 108338 - DNA, 25 bp, Homo sapien
cgtacgtaaatggtggaacacctat

SEQ ID NO: 108339 - DNA, 25 bp, Homo sapien
tcggtctaacgttgtggtccctctc

SEQ ID NO: 108340 - DNA, 25 bp, Homo sapien
tcggtctaacgtagtggtccctctc

SEQ ID NO: 108341 - DNA, 25 bp, Homo sapien
gcgctcaagtggtactccgactcct

SEQ ID NO: 108342 - DNA, 25 bp, Homo sapien
gcgctcaagtggaactccgactcct

SEQ ID NO: 108343 - DNA, 25 bp, Homo sapien
ataccgtccattctctctcctgtgg

SEQ ID NO: 108344 - DNA, 25 bp, Homo sapien
ataccgtccattgtctctcctgtgg

SEQ ID NO: 108345 - DNA, 25 bp, Homo sapien
acctccgacgttcctcggtgtttgg

SEQ ID NO: 108346 - DNA, 25 bp, Homo sapien
acctccgacgttgctcggtgtttgg

SEQ ID NO: 108347 - DNA, 25 bp, Homo sapien
ccgcccgtcggatgaacgtgtgaac

SEQ ID NO: 108348 - DNA, 25 bp, Homo sapien
ccgcccgtcggaagaacgtgtgaac

SEQ ID NO: 108349 - DNA, 25 bp, Homo sapien
tggtcccggtcgttataacatgttt

SEQ ID NO: 108350 - DNA, 25 bp, Homo sapien
tggtcccggtcgatataacatgttt

SEQ ID NO: 108351 - DNA, 25 bp, Homo sapien
ctttggtgatctgactaccgtcgtt

SEQ ID NO: 108352 - DNA, 25 bp, Homo sapien
ctttggtgatctcactaccgtcgtt

SEQ ID NO: 108353 - DNA, 25 bp, Homo sapien
tctaggttgtagttcgatctgtgcg

SEQ ID NO: 108354 - DNA, 25 bp, Homo sapien
tctaggttgtagatcgatctgtgcg

SEQ ID NO: 108355 - DNA, 25 bp, Homo sapien
gtactgctattaacgtctatctttg

SEQ ID NO: 108356 - DNA, 25 bp, Homo sapien
gtactgctattatcgtctatctttg

SEQ ID NO: 108357 - DNA, 25 bp, Homo sapien
tctcgggtatctttcttagaagtag

SEQ ID NO: 108358 - DNA, 25 bp, Homo sapien
tctcgggtatctatcttagaagtag

SEQ ID NO: 108359 - DNA, 25 bp, Homo sapien
cgtcaccgtcctatccgtaacggta

SEQ ID NO: 108360 - DNA, 25 bp, Homo sapien
cgtcaccgtcctttccgtaacggta

SEQ ID NO: 108361 - DNA, 25 bp, Homo sapien
tccgtcccgtccttgccgtgtaaga

SEQ ID NO: 108362 - DNA, 25 bp, Homo sapien
tccgtcccgtccatgccgtgtaaga

SEQ ID NO: 108363 - DNA, 25 bp, Homo sapien
gctcagagagctagccggacgagac

SEQ ID NO: 108364 - DNA, 25 bp, Homo sapien
gctcagagagcttgccggacgagac

SEQ ID NO: 108365 - DNA, 25 bp, Homo sapien
gccgtctgtgcgtcgacccgatgac

SEQ ID NO: 108366 - DNA, 25 bp, Homo sapien
gccgtctgtgcgacgacccgatgac

SEQ ID NO: 108367 - DNA, 25 bp, Homo sapien
catcttcagaggtctggtcacagac

SEQ ID NO: 108368 - DNA, 25 bp, Homo sapien
catcttcagaggactggtcacagac

SEQ ID NO: 108369 - DNA, 25 bp, Homo sapien
cttgagaatgttacgtcgacagact

SEQ ID NO: 108370 - DNA, 25 bp, Homo sapien
cttgagaatgtttcgtcgacagact

SEQ ID NO: 108371 - DNA, 25 bp, Homo sapien
tagatctttgtcttactttggacaa

SEQ ID NO: 108372 - DNA, 25 bp, Homo sapien
tagatctttgtcatactttggacaa

SEQ ID NO: 108373 - DNA, 25 bp, Homo sapien
aaaaaactgaacatatcgtggcagt

SEQ ID NO: 108374 - DNA, 25 bp, Homo sapien
aaaaaactgaacttatcgtggcagt

SEQ ID NO: 108375 - DNA, 25 bp, Homo sapien
ccgaaggcagagaccgtaactggaa

SEQ ID NO: 108376 - DNA, 25 bp, Homo sapien
ccgaaggcagagtccgtaactggaa

SEQ ID NO: 108377 - DNA, 25 bp, Homo sapien
actggtaagttgactactgtcgtca

SEQ ID NO: 108378 - DNA, 25 bp, Homo sapien
actggtaagttgtctactgtcgtca

SEQ ID NO: 108379 - DNA, 25 bp, Homo sapien
aattcttttatctggacgtttccag

SEQ ID NO: 108380 - DNA, 25 bp, Homo sapien
aattcttttatcaggacgtttccag

SEQ ID NO: 108381 - DNA, 25 bp, Homo sapien
tgttactctacagtgacgatccaga

SEQ ID NO: 108382 - DNA, 25 bp, Homo sapien
tgttactctacactgacgatccaga

SEQ ID NO: 108383 - DNA, 25 bp, Homo sapien
tactttacgactgtaccatctggac

SEQ ID NO: 108384 - DNA, 25 bp, Homo sapien
tactttacgactctaccatctggac

SEQ ID NO: 108385 - DNA, 25 bp, Homo sapien
ggtctcttcgctctcctctaaagat

SEQ ID NO: 108386 - DNA, 25 bp, Homo sapien
ggtctcttcgctgtcctctaaagat

SEQ ID NO: 108387 - DNA, 25 bp, Homo sapien
agtctttaagatgttaccaacgaca

SEQ ID NO: 108388 - DNA, 25 bp, Homo sapien
agtctttaagatcttaccaacgaca

SEQ ID NO: 108389 - DNA, 25 bp, Homo sapien
ctttcgacttcctctagctacgaag

SEQ ID NO: 108390 - DNA, 25 bp, Homo sapien
ctttcgacttccactagctacgaag

SEQ ID NO: 108391 - DNA, 25 bp, Homo sapien
tcttcagtctccaccgtcacagtag

SEQ ID NO: 108392 - DNA, 25 bp, Homo sapien
tcttcagtctcctccgtcacagtag

SEQ ID NO: 108393 - DNA, 25 bp, Homo sapien
tcgttcctactactcttttacgtgg

SEQ ID NO: 108394 - DNA, 25 bp, Homo sapien
tcgttcctactagtcttttacgtgg

SEQ ID NO: 108395 - DNA, 25 bp, Homo sapien
acgagtttatcttaatgtttttccg

SEQ ID NO: 108396 - DNA, 25 bp, Homo sapien
acgagtttatctaaatgtttttccg

SEQ ID NO: 108397 - DNA, 25 bp, Homo sapien
gttttatcgaaaccttctatgttcg

SEQ ID NO: 108398 - DNA, 25 bp, Homo sapien
gttttatcgaaagcttctatgttcg

SEQ ID NO: 108399 - DNA, 25 bp, Homo sapien
gttacttccggaccttacagtgatg

SEQ ID NO: 108400 - DNA, 25 bp, Homo sapien
gttacttccggagcttacagtgatg

SEQ ID NO: 108401 - DNA, 25 bp, Homo sapien
tgaactccgcgctcaacacgtggcg

SEQ ID NO: 108402 - DNA, 25 bp, Homo sapien
tgaactccgcgcacaacacgtggcg

SEQ ID NO: 108403 - DNA, 25 bp, Homo sapien
aacgacgatgtccactaacggctcg

SEQ ID NO: 108404 - DNA, 25 bp, Homo sapien
aacgacgatgtcgactaacggctcg

SEQ ID NO: 108405 - DNA, 25 bp, Homo sapien
agtgagacgtaccaacgacggtgcg

SEQ ID NO: 108406 - DNA, 25 bp, Homo sapien
agtgagacgtacgaacgacggtgcg

SEQ ID NO: 108407 - DNA, 25 bp, Homo sapien
aaagggtatacattcctggttacgt

SEQ ID NO: 108408 - DNA, 25 bp, Homo sapien
aaagggtatacaatcctggttacgt

SEQ ID NO: 108409 - DNA, 25 bp, Homo sapien
cagaagctattggaagggcgacacg

SEQ ID NO: 108410 - DNA, 25 bp, Homo sapien
cagaagctattgcaagggcgacacg

SEQ ID NO: 108411 - DNA, 25 bp, Homo sapien
gtcgttatagtctagacaaatctct

SEQ ID NO: 108412 - DNA, 25 bp, Homo sapien
gtcgttatagtcaagacaaatctct

SEQ ID NO: 108413 - DNA, 25 bp, Homo sapien
gagtaagtactcatcgtcaaatctt

SEQ ID NO: 108414 - DNA, 25 bp, Homo sapien
gagtaagtactcttcgtcaaatctt

SEQ ID NO: 108415 - DNA, 25 bp, Homo sapien
aaatgtatattcctttacatgattc

SEQ ID NO: 108416 - DNA, 25 bp, Homo sapien
aaatgtatattcgtttacatgattc

SEQ ID NO: 108417 - DNA, 25 bp, Homo sapien
aagttttaaccgtcttcaggacttc

SEQ ID NO: 108418 - DNA, 25 bp, Homo sapien
aagttttaaccgacttcaggacttc

SEQ ID NO: 108419 - DNA, 25 bp, Homo sapien
atctttgttgttttactgacgatgc

SEQ ID NO: 108420 - DNA, 25 bp, Homo sapien
atctttgttgttatactgacgatgc

SEQ ID NO: 108421 - DNA, 25 bp, Homo sapien
ggtctttcttgttaactttcgataa

SEQ ID NO: 108422 - DNA, 25 bp, Homo sapien
ggtctttcttgtaaactttcgataa

SEQ ID NO: 108423 - DNA, 25 bp, Homo sapien
gacctcttttgtaaaacttcttttt

SEQ ID NO: 108424 - DNA, 25 bp, Homo sapien
gacctcttttgttaaacttcttttt

SEQ ID NO: 108425 - DNA, 25 bp, Homo sapien
acagttttgtagttcccccttttag

SEQ ID NO: 108426 - DNA, 25 bp, Homo sapien
acagttttgtagatcccccttttag

SEQ ID NO: 108427 - DNA, 25 bp, Homo sapien
accttttgagtcttaacaattttac

SEQ ID NO: 108428 - DNA, 25 bp, Homo sapien
accttttgagtcataacaattttac

SEQ ID NO: 108429 - DNA, 25 bp, Homo sapien
tttctgttcatcaagatgtgtccgt

SEQ ID NO: 108430 - DNA, 25 bp, Homo sapien
tttctgttcatctagatgtgtccgt

SEQ ID NO: 108431 - DNA, 25 bp, Homo sapien
tcatcgttcgtgagagattctgacg

SEQ ID NO: 108432 - DNA, 25 bp, Homo sapien
tcatcgttcgtgtgagattctgacg

SEQ ID NO: 108433 - DNA, 25 bp, Homo sapien
ggcttggtctccaacatctactacc

SEQ ID NO: 108434 - DNA, 25 bp, Homo sapien
ggcttggtctcctacatctactacc

SEQ ID NO: 108435 - DNA, 25 bp, Homo sapien
aggtagggattcttaaatgactccg

SEQ ID NO: 108436 - DNA, 25 bp, Homo sapien
aggtagggattcataaatgactccg

SEQ ID NO: 108437 - DNA, 25 bp, Homo sapien
tgttcgtatctaggagaggtccgag

SEQ ID NO: 108438 - DNA, 25 bp, Homo sapien
tgttcgtatctacgagaggtccgag

SEQ ID NO: 108439 - DNA, 25 bp, Homo sapien
acttttaccttatggacgtcacagt

SEQ ID NO: 108440 - DNA, 25 bp, Homo sapien
acttttaccttaaggacgtcacagt

SEQ ID NO: 108441 - DNA, 25 bp, Homo sapien
cttcttcagacaatagtacgtccag

SEQ ID NO: 108442 - DNA, 25 bp, Homo sapien
cttcttcagacattagtacgtccag

SEQ ID NO: 108443 - DNA, 25 bp, Homo sapien
agatatcgttcaacattatccgttg

SEQ ID NO: 108444 - DNA, 25 bp, Homo sapien
agatatcgttcatcattatccgttg

SEQ ID NO: 108445 - DNA, 25 bp, Homo sapien
acaaagttgttgtctaactacttag

SEQ ID NO: 108446 - DNA, 25 bp, Homo sapien
acaaagttgttgactaactacttag

SEQ ID NO: 108447 - DNA, 25 bp, Homo sapien
taacaaaattgtcaataccagttat

SEQ ID NO: 108448 - DNA, 25 bp, Homo sapien
taacaaaattgtgaataccagttat

SEQ ID NO: 108449 - DNA, 25 bp, Homo sapien
ggggaagaagatggacgaaccctta

SEQ ID NO: 108450 - DNA, 25 bp, Homo sapien
ggggaagaagatcgacgaaccctta

SEQ ID NO: 108451 - DNA, 25 bp, Homo sapien
gtaagacttacctatatacctcgga

SEQ ID NO: 108452 - DNA, 25 bp, Homo sapien
gtaagacttaccaatatacctcgga

SEQ ID NO: 108453 - DNA, 25 bp, Homo sapien
tgacatcaccactgtcgacgttgtg

SEQ ID NO: 108454 - DNA, 25 bp, Homo sapien
tgacatcaccacagtcgacgttgtg

SEQ ID NO: 108455 - DNA, 25 bp, Homo sapien
gaaactcaacgtaactagatctgat

SEQ ID NO: 108456 - DNA, 25 bp, Homo sapien
gaaactcaacgttactagatctgat

SEQ ID NO: 108457 - DNA, 25 bp, Homo sapien
gtaacaatctgagtacacaccgtaa

SEQ ID NO: 108458 - DNA, 25 bp, Homo sapien
gtaacaatctgactacacaccgtaa

SEQ ID NO: 108459 - DNA, 25 bp, Homo sapien
aaactcagtagtcatccacagtgaa

SEQ ID NO: 108460 - DNA, 25 bp, Homo sapien
aaactcagtagtgatccacagtgaa

SEQ ID NO: 108461 - DNA, 25 bp, Homo sapien
gaagacacagaaatgtcagatccta

SEQ ID NO: 108462 - DNA, 25 bp, Homo sapien
gaagacacagaattgtcagatccta

SEQ ID NO: 108463 - DNA, 25 bp, Homo sapien
gggactcacctaaaagtaattccat

SEQ ID NO: 108464 - DNA, 25 bp, Homo sapien
gggactcacctataagtaattccat

SEQ ID NO: 108465 - DNA, 25 bp, Homo sapien
gtctccggacctaacgatttaccta

SEQ ID NO: 108466 - DNA, 25 bp, Homo sapien
gtctccggaccttacgatttaccta

SEQ ID NO: 108467 - DNA, 25 bp, Homo sapien
attagttcctggtaaatgtctccac

SEQ ID NO: 108468 - DNA, 25 bp, Homo sapien
attagttcctggaaaatgtctccac

SEQ ID NO: 108469 - DNA, 25 bp, Homo sapien
gaacatgaaataactcgtcgacacc

SEQ ID NO: 108470 - DNA, 25 bp, Homo sapien
gaacatgaaatatctcgtcgacacc

SEQ ID NO: 108471 - DNA, 25 bp, Homo sapien
gagagaagccactccgacgacggtc

SEQ ID NO: 108472 - DNA, 25 bp, Homo sapien
gagagaagccacaccgacgacggtc

SEQ ID NO: 108473 - DNA, 25 bp, Homo sapien
agggagatctcctacattacgtgtt

SEQ ID NO: 108474 - DNA, 25 bp, Homo sapien
agggagatctccaacattacgtgtt

SEQ ID NO: 108475 - DNA, 25 bp, Homo sapien
tcaggagtttactgccatgtaggtg

SEQ ID NO: 108476 - DNA, 25 bp, Homo sapien
tcaggagtttacagccatgtaggtg

SEQ ID NO: 108477 - DNA, 25 bp, Homo sapien
cgtttaggtgtcgaatccatggtgg

SEQ ID NO: 108478 - DNA, 25 bp, Homo sapien
cgtttaggtgtccaatccatggtgg

SEQ ID NO: 108479 - DNA, 25 bp, Homo sapien
ttaaacgttcccttcaagagttacg

SEQ ID NO: 108480 - DNA, 25 bp, Homo sapien
ttaaacgttcccatcaagagttacg

SEQ ID NO: 108481 - DNA, 25 bp, Homo sapien
tgtaagaagtgtacacatcccaaag

SEQ ID NO: 108482 - DNA, 25 bp, Homo sapien
tgtaagaagtgttcacatcccaaag

SEQ ID NO: 108483 - DNA, 25 bp, Homo sapien
gacgaagattaaacactttccagac

SEQ ID NO: 108484 - DNA, 25 bp, Homo sapien
gacgaagattaatcactttccagac

SEQ ID NO: 108485 - DNA, 25 bp, Homo sapien
gaagttcagttaactcttcctagtc

SEQ ID NO: 108486 - DNA, 25 bp, Homo sapien
gaagttcagttatctcttcctagtc

SEQ ID NO: 108487 - DNA, 25 bp, Homo sapien
aaggtcatcccgtttcgttttctga

SEQ ID NO: 108488 - DNA, 25 bp, Homo sapien
aaggtcatcccgattcgttttctga

SEQ ID NO: 108489 - DNA, 25 bp, Homo sapien
agaagtccacaacgaccaaggtgaa

SEQ ID NO: 108490 - DNA, 25 bp, Homo sapien
agaagtccacaaggaccaaggtgaa

SEQ ID NO: 108491 - DNA, 25 bp, Homo sapien
agtgtaaccgaggacccgggtccct

SEQ ID NO: 108492 - DNA, 25 bp, Homo sapien
agtgtaaccgagcacccgggtccct

SEQ ID NO: 108493 - DNA, 25 bp, Homo sapien
ttaaccgaagagagtacagtctcat

SEQ ID NO: 108494 - DNA, 25 bp, Homo sapien
ttaaccgaagagtgtacagtctcat

SEQ ID NO: 108495 - DNA, 25 bp, Homo sapien
ctttccggtgagttttaacgtattt

SEQ ID NO: 108496 - DNA, 25 bp, Homo sapien
ctttccggtgagatttaacgtattt

SEQ ID NO: 108497 - DNA, 25 bp, Homo sapien
gaccagtaagtaattacacagtctg

SEQ ID NO: 108498 - DNA, 25 bp, Homo sapien
gaccagtaagtatttacacagtctg

SEQ ID NO: 108499 - DNA, 25 bp, Homo sapien
gtaacatacgacgtctccaaaacgc

SEQ ID NO: 108500 - DNA, 25 bp, Homo sapien
gtaacatacgacctctccaaaacgc

SEQ ID NO: 108501 - DNA, 25 bp, Homo sapien
aaggtataagggtttgtcgaaaaga

SEQ ID NO: 108502 - DNA, 25 bp, Homo sapien
aaggtataagggattgtcgaaaaga

SEQ ID NO: 108503 - DNA, 25 bp, Homo sapien
cagtgaaccactgaaccttgatgaa

SEQ ID NO: 108504 - DNA, 25 bp, Homo sapien
cagtgaaccactcaaccttgatgaa

SEQ ID NO: 108505 - DNA, 25 bp, Homo sapien
aaggagccctacagacccagaggaa

SEQ ID NO: 108506 - DNA, 25 bp, Homo sapien
aaggagccctactgacccagaggaa

SEQ ID NO: 108507 - DNA, 25 bp, Homo sapien
aaaagtccttctagtacaaacggaa

SEQ ID NO: 108508 - DNA, 25 bp, Homo sapien
aaaagtccttcttgtacaaacggaa

SEQ ID NO: 108509 - DNA, 25 bp, Homo sapien
cttaaagtttcctcctaaatgagtg

SEQ ID NO: 108510 - DNA, 25 bp, Homo sapien
cttaaagtttccacctaaatgagtg

SEQ ID NO: 108511 - DNA, 25 bp, Homo sapien
aataaagacggagaccctttgtgtg

SEQ ID NO: 108512 - DNA, 25 bp, Homo sapien
aataaagacggacaccctttgtgtg

SEQ ID NO: 108513 - DNA, 25 bp, Homo sapien
aaggaggagcccagactgagaccgt

SEQ ID NO: 108514 - DNA, 25 bp, Homo sapien
aaggaggagccctgactgagaccgt

SEQ ID NO: 108515 - DNA, 25 bp, Homo sapien
cgcaaagaggaacaacctaagatct

SEQ ID NO: 108516 - DNA, 25 bp, Homo sapien
cgcaaagaggaagaacctaagatct

SEQ ID NO: 108517 - DNA, 25 bp, Homo sapien
tgaaccaacgaagacacaatgacct

SEQ ID NO: 108518 - DNA, 25 bp, Homo sapien
tgaaccaacgaacacacaatgacct

SEQ ID NO: 108519 - DNA, 25 bp, Homo sapien
acaccgcgcgcgaacaactgagcgt

SEQ ID NO: 108520 - DNA, 25 bp, Homo sapien
acaccgcgcgcgtacaactgagcgt

SEQ ID NO: 108521 - DNA, 25 bp, Homo sapien
tgtctagtcacctctctgaaactag

SEQ ID NO: 108522 - DNA, 25 bp, Homo sapien
tgtctagtcaccactctgaaactag

SEQ ID NO: 108523 - DNA, 25 bp, Homo sapien
atggtaccctcctattcgaacagta

SEQ ID NO: 108524 - DNA, 25 bp, Homo sapien
atggtaccctccaattcgaacagta

SEQ ID NO: 108525 - DNA, 25 bp, Homo sapien
atggtattgcctacctcaacggtgt

SEQ ID NO: 108526 - DNA, 25 bp, Homo sapien
atggtattgccttcctcaacggtgt

SEQ ID NO: 108527 - DNA, 25 bp, Homo sapien
tagtctcgcgccttcggcactgtct

SEQ ID NO: 108528 - DNA, 25 bp, Homo sapien
tagtctcgcgccatcggcactgtct

SEQ ID NO: 108529 - DNA, 25 bp, Homo sapien
cggctccgacgtcgagtcccgttgc

SEQ ID NO: 108530 - DNA, 25 bp, Homo sapien
cggctccgacgtggagtcccgttgc

SEQ ID NO: 108531 - DNA, 25 bp, Homo sapien
ccgaactttgtggttccgtgaggtc

SEQ ID NO: 108532 - DNA, 25 bp, Homo sapien
ccgaactttgtgcttccgtgaggtc

SEQ ID NO: 108533 - DNA, 25 bp, Homo sapien
tccgaactctgttcacatttgtttg

SEQ ID NO: 108534 - DNA, 25 bp, Homo sapien
tccgaactctgtacacatttgtttg

SEQ ID NO: 108535 - DNA, 25 bp, Homo sapien
atttacctccagtcagattttagtg

SEQ ID NO: 108536 - DNA, 25 bp, Homo sapien
atttacctccagacagattttagtg

SEQ ID NO: 108537 - DNA, 25 bp, Homo sapien
cactgtcacgaaacgttattattga

SEQ ID NO: 108538 - DNA, 25 bp, Homo sapien
cactgtcacgaatcgttattattga

SEQ ID NO: 108539 - DNA, 25 bp, Homo sapien
ccccgtgccaatcctttcgtgtaac

SEQ ID NO: 108540 - DNA, 25 bp, Homo sapien
ccccgtgccaatgctttcgtgtaac

SEQ ID NO: 108541 - DNA, 25 bp, Homo sapien
aagtgtgtcctgtccctttgacgac

SEQ ID NO: 108542 - DNA, 25 bp, Homo sapien
aagtgtgtcctgaccctttgacgac

SEQ ID NO: 108543 - DNA, 25 bp, Homo sapien
tttggttgcctgtacatctttggta

SEQ ID NO: 108544 - DNA, 25 bp, Homo sapien
tttggttgcctgaacatctttggta

SEQ ID NO: 108545 - DNA, 25 bp, Homo sapien
aacctcggacacaagaaactttgaa

SEQ ID NO: 108546 - DNA, 25 bp, Homo sapien
aacctcggacactagaaactttgaa

SEQ ID NO: 108547 - DNA, 25 bp, Homo sapien
aaatcagacgatacagttttttgac

SEQ ID NO: 108548 - DNA, 25 bp, Homo sapien
aaatcagacgattcagttttttgac

SEQ ID NO: 108549 - DNA, 25 bp, Homo sapien
gactgtaaactgtacttgtgtttca

SEQ ID NO: 108550 - DNA, 25 bp, Homo sapien
gactgtaaactgaacttgtgtttca

SEQ ID NO: 108551 - DNA, 25 bp, Homo sapien
tgaagtgcacctttagactctctac

SEQ ID NO: 108552 - DNA, 25 bp, Homo sapien
tgaagtgcacctatagactctctac

SEQ ID NO: 108553 - DNA, 25 bp, Homo sapien
ggtcacggcggaccattgtcttgac

SEQ ID NO: 108554 - DNA, 25 bp, Homo sapien
ggtcacggcggagcattgtcttgac

SEQ ID NO: 108555 - DNA, 25 bp, Homo sapien
gttcttgacgggaaggtttctcgac

SEQ ID NO: 108556 - DNA, 25 bp, Homo sapien
gttcttgacgggtaggtttctcgac

SEQ ID NO: 108557 - DNA, 25 bp, Homo sapien
ggttagtacggagaacgaccactcc

SEQ ID NO: 108558 - DNA, 25 bp, Homo sapien
ggttagtacggacaacgaccactcc

SEQ ID NO: 108559 - DNA, 25 bp, Homo sapien
acgaaacctacacagtcatgttctg

SEQ ID NO: 108560 - DNA, 25 bp, Homo sapien
acgaaacctacagagtcatgttctg

SEQ ID NO: 108561 - DNA, 25 bp, Homo sapien
tccaagactcccaagtccttgtctc

SEQ ID NO: 108562 - DNA, 25 bp, Homo sapien
tccaagactccctagtccttgtctc

SEQ ID NO: 108563 - DNA, 25 bp, Homo sapien
agacgaccggtgtgcgtgtctgttc

SEQ ID NO: 108564 - DNA, 25 bp, Homo sapien
agacgaccggtgagcgtgtctgttc

SEQ ID NO: 108565 - DNA, 25 bp, Homo sapien
acgagtcggacgtagggtccccgtc

SEQ ID NO: 108566 - DNA, 25 bp, Homo sapien
acgagtcggacgaagggtccccgtc

SEQ ID NO: 108567 - DNA, 25 bp, Homo sapien
aacgagtcataaagaggtttcccgt

SEQ ID NO: 108568 - DNA, 25 bp, Homo sapien
aacgagtcataatgaggtttcccgt

SEQ ID NO: 108569 - DNA, 25 bp, Homo sapien
ctcaaacatactaattattcttcgt

SEQ ID NO: 108570 - DNA, 25 bp, Homo sapien
ctcaaacatacttattattcttcgt

SEQ ID NO: 108571 - DNA, 25 bp, Homo sapien
gaacgcatcgtttccactgtatact

SEQ ID NO: 108572 - DNA, 25 bp, Homo sapien
gaacgcatcgttaccactgtatact

SEQ ID NO: 108573 - DNA, 25 bp, Homo sapien
gactagtcttctcaccaggtctcac

SEQ ID NO: 108574 - DNA, 25 bp, Homo sapien
gactagtcttctgaccaggtctcac

SEQ ID NO: 108575 - DNA, 25 bp, Homo sapien
gtactatcctctccagggtcgtcga

SEQ ID NO: 108576 - DNA, 25 bp, Homo sapien
gtactatcctctgcagggtcgtcga

SEQ ID NO: 108577 - DNA, 25 bp, Homo sapien
ctacctcaggtcacgccgtaccgag

SEQ ID NO: 108578 - DNA, 25 bp, Homo sapien
ctacctcaggtctcgccgtaccgag

SEQ ID NO: 108579 - DNA, 25 bp, Homo sapien
agtacataagtaagatccaggtccg

SEQ ID NO: 108580 - DNA, 25 bp, Homo sapien
agtacataagtatgatccaggtccg

SEQ ID NO: 108581 - DNA, 25 bp, Homo sapien
gtacctgtaatctttccatagtccg

SEQ ID NO: 108582 - DNA, 25 bp, Homo sapien
gtacctgtaatcattccatagtccg

SEQ ID NO: 108583 - DNA, 25 bp, Homo sapien
tgttcagaacccttcaggtagactg

SEQ ID NO: 108584 - DNA, 25 bp, Homo sapien
tgttcagaacccatcaggtagactg

SEQ ID NO: 108585 - DNA, 25 bp, Homo sapien
agaaatccgactacgccatcgacgg

SEQ ID NO: 108586 - DNA, 25 bp, Homo sapien
agaaatccgacttcgccatcgacgg

SEQ ID NO: 108587 - DNA, 25 bp, Homo sapien
gagtcgacgacttcctacacacaag

SEQ ID NO: 108588 - DNA, 25 bp, Homo sapien
gagtcgacgactacctacacacaag

SEQ ID NO: 108589 - DNA, 25 bp, Homo sapien
tagataggtgaagtacacttactcg

SEQ ID NO: 108590 - DNA, 25 bp, Homo sapien
tagataggtgaactacacttactcg

SEQ ID NO: 108591 - DNA, 25 bp, Homo sapien
aaaacaaccgaggaagccacagacc

SEQ ID NO: 108592 - DNA, 25 bp, Homo sapien
aaaacaaccgagcaagccacagacc

SEQ ID NO: 108593 - DNA, 25 bp, Homo sapien
tctctaatctgtctctcacccggtg

SEQ ID NO: 108594 - DNA, 25 bp, Homo sapien
tctctaatctgtgtctcacccggtg

SEQ ID NO: 108595 - DNA, 25 bp, Homo sapien
tccctttgctgtggttctcctgggt

SEQ ID NO: 108596 - DNA, 25 bp, Homo sapien
tccctttgctgtcgttctcctgggt

SEQ ID NO: 108597 - DNA, 25 bp, Homo sapien
ttttggaacagaacgggccctcgac

SEQ ID NO: 108598 - DNA, 25 bp, Homo sapien
ttttggaacagatcgggccctcgac

SEQ ID NO: 108599 - DNA, 25 bp, Homo sapien
tccttggcgccgagtgtgagccctc

SEQ ID NO: 108600 - DNA, 25 bp, Homo sapien
tccttggcgccgtgtgtgagccctc

SEQ ID NO: 108601 - DNA, 25 bp, Homo sapien
tatgtatcctatgtcttcccgtctc

SEQ ID NO: 108602 - DNA, 25 bp, Homo sapien
tatgtatcctatctcttcccgtctc

SEQ ID NO: 108603 - DNA, 25 bp, Homo sapien
agtcttgacagactcgtgtaaatga

SEQ ID NO: 108604 - DNA, 25 bp, Homo sapien
agtcttgacagagtcgtgtaaatga

SEQ ID NO: 108605 - DNA, 25 bp, Homo sapien
atttaggatctttgggagtactccg

SEQ ID NO: 108606 - DNA, 25 bp, Homo sapien
atttaggatcttagggagtactccg

SEQ ID NO: 108607 - DNA, 25 bp, Homo sapien
gagtgaaaattactgatttactcac

SEQ ID NO: 108608 - DNA, 25 bp, Homo sapien
gagtgaaaattagtgatttactcac

SEQ ID NO: 108609 - DNA, 25 bp, Homo sapien
tcgagaagatctttcaataccgtcc

SEQ ID NO: 108610 - DNA, 25 bp, Homo sapien
tcgagaagatctatcaataccgtcc

SEQ ID NO: 108611 - DNA, 25 bp, Homo sapien
agaaaaggttcacagactaagtcgc

SEQ ID NO: 108612 - DNA, 25 bp, Homo sapien
agaaaaggttcagagactaagtcgc

SEQ ID NO: 108613 - DNA, 25 bp, Homo sapien
aaaaggagtttatcttaacagcgtc

SEQ ID NO: 108614 - DNA, 25 bp, Homo sapien
aaaaggagtttaacttaacagcgtc

SEQ ID NO: 108615 - DNA, 25 bp, Homo sapien
ggattaaacggttttttggtcctct

SEQ ID NO: 108616 - DNA, 25 bp, Homo sapien
ggattaaacggtattttggtcctct

SEQ ID NO: 108617 - DNA, 25 bp, Homo sapien
tccatcgtgtcctttaggttcacct

SEQ ID NO: 108618 - DNA, 25 bp, Homo sapien
tccatcgtgtccattaggttcacct

SEQ ID NO: 108619 - DNA, 25 bp, Homo sapien
gtccgagggagagagtctttgtctt

SEQ ID NO: 108620 - DNA, 25 bp, Homo sapien
gtccgagggagacagtctttgtctt

SEQ ID NO: 108621 - DNA, 25 bp, Homo sapien
tccaaccgtagaacggtgtttttgt

SEQ ID NO: 108622 - DNA, 25 bp, Homo sapien
tccaaccgtagatcggtgtttttgt

SEQ ID NO: 108623 - DNA, 25 bp, Homo sapien
gacctccggtaccaggtcgtcctgg

SEQ ID NO: 108624 - DNA, 25 bp, Homo sapien
gacctccggtacgaggtcgtcctgg

SEQ ID NO: 108625 - DNA, 25 bp, Homo sapien
ccaccatcgggacgaggaacatgtc

SEQ ID NO: 108626 - DNA, 25 bp, Homo sapien
ccaccatcgggaggaggaacatgtc

SEQ ID NO: 108627 - DNA, 25 bp, Homo sapien
tcccggtggtcgtggcagtcctcgt

SEQ ID NO: 108628 - DNA, 25 bp, Homo sapien
tcccggtggtcgaggcagtcctcgt

SEQ ID NO: 108629 - DNA, 25 bp, Homo sapien
ccgctccagttgtggggcccgtctt

SEQ ID NO: 108630 - DNA, 25 bp, Homo sapien
ccgctccagttgaggggcccgtctt

SEQ ID NO: 108631 - DNA, 25 bp, Homo sapien
cctacgtccgttgaggcccggtctt

SEQ ID NO: 108632 - DNA, 25 bp, Homo sapien
cctacgtccgttcaggcccggtctt

SEQ ID NO: 108633 - DNA, 25 bp, Homo sapien
gttagtattatactgtcctgtgttc

SEQ ID NO: 108634 - DNA, 25 bp, Homo sapien
gttagtattatagtgtcctgtgttc

SEQ ID NO: 108635 - DNA, 25 bp, Homo sapien
tgtctctctaactcctgtgtcgtct

SEQ ID NO: 108636 - DNA, 25 bp, Homo sapien
tgtctctctaacacctgtgtcgtct

SEQ ID NO: 108637 - DNA, 25 bp, Homo sapien
tgacttttctcacctttaggtgtga

SEQ ID NO: 108638 - DNA, 25 bp, Homo sapien
tgacttttctcagctttaggtgtga

SEQ ID NO: 108639 - DNA, 25 bp, Homo sapien
ccccttacgtaaaccggtaatgtta

SEQ ID NO: 108640 - DNA, 25 bp, Homo sapien
ccccttacgtaatccggtaatgtta

SEQ ID NO: 108641 - DNA, 25 bp, Homo sapien
tacctactttctctgtggaagtttt

SEQ ID NO: 108642 - DNA, 25 bp, Homo sapien
tacctactttctgtgtggaagtttt

SEQ ID NO: 108643 - DNA, 25 bp, Homo sapien
tcctccaagtttcgaacgtgtgtgc

SEQ ID NO: 108644 - DNA, 25 bp, Homo sapien
tcctccaagtttggaacgtgtgtgc

SEQ ID NO: 108645 - DNA, 25 bp, Homo sapien
gtaccatccgtcgtaacgtcccagt

SEQ ID NO: 108646 - DNA, 25 bp, Homo sapien
gtaccatccgtcctaacgtcccagt

SEQ ID NO: 108647 - DNA, 25 bp, Homo sapien
tgtgtccttcgcaactgtccccggt

SEQ ID NO: 108648 - DNA, 25 bp, Homo sapien
tgtgtccttcgctactgtccccggt

SEQ ID NO: 108649 - DNA, 25 bp, Homo sapien
ccacacatcttcttcggagcaaggg

SEQ ID NO: 108650 - DNA, 25 bp, Homo sapien
ccacacatcttcatcggagcaaggg

SEQ ID NO: 108651 - DNA, 25 bp, Homo sapien
gtgaattctccttctccggtagcgt

SEQ ID NO: 108652 - DNA, 25 bp, Homo sapien
gtgaattctcctactccggtagcgt

SEQ ID NO: 108653 - DNA, 25 bp, Homo sapien
ccatgacatttacgaaactcttgta

SEQ ID NO: 108654 - DNA, 25 bp, Homo sapien
ccatgacatttaggaaactcttgta

SEQ ID NO: 108655 - DNA, 25 bp, Homo sapien
atatacggttacttatctgttagtc

SEQ ID NO: 108656 - DNA, 25 bp, Homo sapien
atatacggttacatatctgttagtc

SEQ ID NO: 108657 - DNA, 25 bp, Homo sapien
agtagcacgagggttaaggtttctc

SEQ ID NO: 108658 - DNA, 25 bp, Homo sapien
agtagcacgaggcttaaggtttctc

SEQ ID NO: 108659 - DNA, 25 bp, Homo sapien
agaacaaagagttaaacggcgttct

SEQ ID NO: 108660 - DNA, 25 bp, Homo sapien
agaacaaagagtaaaacggcgttct

SEQ ID NO: 108661 - DNA, 25 bp, Homo sapien
acacggtgaggtcttggagtcgtct

SEQ ID NO: 108662 - DNA, 25 bp, Homo sapien
acacggtgaggtgttggagtcgtct

SEQ ID NO: 108663 - DNA, 25 bp, Homo sapien
ctttctacttaaccaggtgccttcg

SEQ ID NO: 108664 - DNA, 25 bp, Homo sapien
ctttctacttaagcaggtgccttcg

SEQ ID NO: 108665 - DNA, 25 bp, Homo sapien
gacccgaaagggagtctccgtcttt

SEQ ID NO: 108666 - DNA, 25 bp, Homo sapien
gacccgaaagggtgtctccgtcttt

SEQ ID NO: 108667 - DNA, 25 bp, Homo sapien
cattaagacaggagaaccgatgtgt

SEQ ID NO: 108668 - DNA, 25 bp, Homo sapien
cattaagacaggtgaaccgatgtgt

SEQ ID NO: 108669 - DNA, 25 bp, Homo sapien
cacacaggatttcatgacggtaaat

SEQ ID NO: 108670 - DNA, 25 bp, Homo sapien
cacacaggatttgatgacggtaaat

SEQ ID NO: 108671 - DNA, 25 bp, Homo sapien
ttctcttccatatactaagaccaaa

SEQ ID NO: 108672 - DNA, 25 bp, Homo sapien
ttctcttccataaactaagaccaaa

SEQ ID NO: 108673 - DNA, 25 bp, Homo sapien
tatgttcactggacgtcaataatga

SEQ ID NO: 108674 - DNA, 25 bp, Homo sapien
tatgttcactggtcgtcaataatga

SEQ ID NO: 108675 - DNA, 25 bp, Homo sapien
tcgtcctcgacagactttctaccgg

SEQ ID NO: 108676 - DNA, 25 bp, Homo sapien
tcgtcctcgacacactttctaccgg

SEQ ID NO: 108677 - DNA, 25 bp, Homo sapien
cgacgacgataacacacctacggcg

SEQ ID NO: 108678 - DNA, 25 bp, Homo sapien
cgacgacgataagacacctacggcg

SEQ ID NO: 108679 - DNA, 25 bp, Homo sapien
caagggacacgaaaaatctacgtga

SEQ ID NO: 108680 - DNA, 25 bp, Homo sapien
caagggacacgataaatctacgtga

SEQ ID NO: 108681 - DNA, 25 bp, Homo sapien
cccgtggacggacaggaatcggtct

SEQ ID NO: 108682 - DNA, 25 bp, Homo sapien
cccgtggacggagaggaatcggtct

SEQ ID NO: 108683 - DNA, 25 bp, Homo sapien
gtccccgtcgcgactccaaaggagg

SEQ ID NO: 108684 - DNA, 25 bp, Homo sapien
gtccccgtcgcgtctccaaaggagg

SEQ ID NO: 108685 - DNA, 25 bp, Homo sapien
acaacggggactccacagaggactg

SEQ ID NO: 108686 - DNA, 25 bp, Homo sapien
acaacggggactgcacagaggactg

SEQ ID NO: 108687 - DNA, 25 bp, Homo sapien
gcaaagaacgacaccaacacactgt

SEQ ID NO: 108688 - DNA, 25 bp, Homo sapien
gcaaagaacgactccaacacactgt

SEQ ID NO: 108689 - DNA, 25 bp, Homo sapien
ggagagacttactcgtgggtccgtt

SEQ ID NO: 108690 - DNA, 25 bp, Homo sapien
ggagagacttacacgtgggtccgtt

SEQ ID NO: 108691 - DNA, 25 bp, Homo sapien
ctacggagtcgtaccccgtggaatg

SEQ ID NO: 108692 - DNA, 25 bp, Homo sapien
ctacggagtcgttccccgtggaatg

SEQ ID NO: 108693 - DNA, 25 bp, Homo sapien
tacggccgctactaccggggactcg

SEQ ID NO: 108694 - DNA, 25 bp, Homo sapien
tacggccgctacaaccggggactcg

SEQ ID NO: 108695 - DNA, 25 bp, Homo sapien
actgtaggtccacaaccgggaccgg

SEQ ID NO: 108696 - DNA, 25 bp, Homo sapien
actgtaggtccagaaccgggaccgg

SEQ ID NO: 108697 - DNA, 25 bp, Homo sapien
tctaggtccctagtccgtcctatcc

SEQ ID NO: 108698 - DNA, 25 bp, Homo sapien
tctaggtccctactccgtcctatcc

SEQ ID NO: 108699 - DNA, 25 bp, Homo sapien
tgatagggtttcgtctcatccctga

SEQ ID NO: 108700 - DNA, 25 bp, Homo sapien
tgatagggtttcctctcatccctga

SEQ ID NO: 108701 - DNA, 25 bp, Homo sapien
atagggtccgaacgtcaccccgaca

SEQ ID NO: 108702 - DNA, 25 bp, Homo sapien
atagggtccgaaggtcaccccgaca

SEQ ID NO: 108703 - DNA, 25 bp, Homo sapien
tctgtggatcctgttcgaacctcca

SEQ ID NO: 108704 - DNA, 25 bp, Homo sapien
tctgtggatcctcttcgaacctcca

SEQ ID NO: 108705 - DNA, 25 bp, Homo sapien
cttatgggtcttatgtatcctttag

SEQ ID NO: 108706 - DNA, 25 bp, Homo sapien
cttatgggtcttttgtatcctttag

SEQ ID NO: 108707 - DNA, 25 bp, Homo sapien
gaatgtgtctgtatggtccgccatg

SEQ ID NO: 108708 - DNA, 25 bp, Homo sapien
gaatgtgtctgtttggtccgccatg

SEQ ID NO: 108709 - DNA, 25 bp, Homo sapien
gtttcatcggtcaaggtatccgggg

SEQ ID NO: 108710 - DNA, 25 bp, Homo sapien
gtttcatcggtctaggtatccgggg

SEQ ID NO: 108711 - DNA, 25 bp, Homo sapien
tcaccgttctgtctgaaaaatagtt

SEQ ID NO: 108712 - DNA, 25 bp, Homo sapien
tcaccgttctgtgtgaaaaatagtt

SEQ ID NO: 108713 - DNA, 25 bp, Homo sapien
ccccagttcttcgtgaacatgaagg

SEQ ID NO: 108714 - DNA, 25 bp, Homo sapien
ccccagttcttcctgaacatgaagg

SEQ ID NO: 108715 - DNA, 25 bp, Homo sapien
caccctgtcctcgtttagatcatgg

SEQ ID NO: 108716 - DNA, 25 bp, Homo sapien
caccctgtcctcctttagatcatgg

SEQ ID NO: 108717 - DNA, 25 bp, Homo sapien
gggtgtcactccttgtctccctaca

SEQ ID NO: 108718 - DNA, 25 bp, Homo sapien
gggtgtcactccatgtctccctaca

SEQ ID NO: 108719 - DNA, 25 bp, Homo sapien
cggagtgcaccctcagtctcgacaa

SEQ ID NO: 108720 - DNA, 25 bp, Homo sapien
cggagtgcacccacagtctcgacaa

SEQ ID NO: 108721 - DNA, 25 bp, Homo sapien
gtcgtgtgtacctcagtcgtagcca

SEQ ID NO: 108722 - DNA, 25 bp, Homo sapien
gtcgtgtgtaccacagtcgtagcca

SEQ ID NO: 108723 - DNA, 25 bp, Homo sapien
gacgtatgaacaacaccgacgaacc

SEQ ID NO: 108724 - DNA, 25 bp, Homo sapien
gacgtatgaacatcaccgacgaacc

SEQ ID NO: 108725 - DNA, 25 bp, Homo sapien
actccagcagctaccggaccgggac

SEQ ID NO: 108726 - DNA, 25 bp, Homo sapien
actccagcagcttccggaccgggac

SEQ ID NO: 108727 - DNA, 25 bp, Homo sapien
ccgagaggtggtactccgccggttt

SEQ ID NO: 108728 - DNA, 25 bp, Homo sapien
ccgagaggtggttctccgccggttt

SEQ ID NO: 108729 - DNA, 25 bp, Homo sapien
cccaggttgagacctccgggtgcag

SEQ ID NO: 108730 - DNA, 25 bp, Homo sapien
cccaggttgagagctccgggtgcag

SEQ ID NO: 108731 - DNA, 25 bp, Homo sapien
gtcaaccctgtcgaggcccagggca

SEQ ID NO: 108732 - DNA, 25 bp, Homo sapien
gtcaaccctgtccaggcccagggca

SEQ ID NO: 108733 - DNA, 25 bp, Homo sapien
aagtcctggtggtccccgagaccct

SEQ ID NO: 108734 - DNA, 25 bp, Homo sapien
aagtcctggtggaccccgagaccct

SEQ ID NO: 108735 - DNA, 25 bp, Homo sapien
tcatctgctggaaccaccggcacat

SEQ ID NO: 108736 - DNA, 25 bp, Homo sapien
tcatctgctggatccaccggcacat

SEQ ID NO: 108737 - DNA, 25 bp, Homo sapien
ggaaccctggcatcctacagggaga

SEQ ID NO: 108738 - DNA, 25 bp, Homo sapien
ggaaccctggcaacctacagggaga

SEQ ID NO: 108739 - DNA, 25 bp, Homo sapien
gagccctgtgtgtgccaccggagac

SEQ ID NO: 108740 - DNA, 25 bp, Homo sapien
gagccctgtgtgagccaccggagac

SEQ ID NO: 108741 - DNA, 25 bp, Homo sapien
tgacctctagaggtggctccagggc

SEQ ID NO: 108742 - DNA, 25 bp, Homo sapien
tgacctctagagctggctccagggc

SEQ ID NO: 108743 - DNA, 25 bp, Homo sapien
tactgtcaacggtccacagcgagta

SEQ ID NO: 108744 - DNA, 25 bp, Homo sapien
tactgtcaacggaccacagcgagta

SEQ ID NO: 108745 - DNA, 25 bp, Homo sapien
cctagtcggcggttagccaccgggt

SEQ ID NO: 108746 - DNA, 25 bp, Homo sapien
cctagtcggcggatagccaccgggt

SEQ ID NO: 108747 - DNA, 25 bp, Homo sapien
gtcacccgtagaaataacccgtagt

SEQ ID NO: 108748 - DNA, 25 bp, Homo sapien
gtcacccgtagatataacccgtagt

SEQ ID NO: 108749 - DNA, 25 bp, Homo sapien
ccaagtccccataaaggtaacacga

SEQ ID NO: 108750 - DNA, 25 bp, Homo sapien
ccaagtccccattaaggtaacacga

SEQ ID NO: 108751 - DNA, 25 bp, Homo sapien
cccaattccctgaaggtagactcga

SEQ ID NO: 108752 - DNA, 25 bp, Homo sapien
cccaattccctgtaggtagactcga

SEQ ID NO: 108753 - DNA, 25 bp, Homo sapien
ttttggtctccagacagaagacgaa

SEQ ID NO: 108754 - DNA, 25 bp, Homo sapien
ttttggtctccacacagaagacgaa

SEQ ID NO: 108755 - DNA, 25 bp, Homo sapien
tagtttgcaagtctctcagacggaa

SEQ ID NO: 108756 - DNA, 25 bp, Homo sapien
tagtttgcaagtgtctcagacggaa

SEQ ID NO: 108757 - DNA, 25 bp, Homo sapien
cgttgtcggtgtgtcagtaacggaa

SEQ ID NO: 108758 - DNA, 25 bp, Homo sapien
cgttgtcggtgtctcagtaacggaa

SEQ ID NO: 108759 - DNA, 25 bp, Homo sapien
gctgagacatgtacctaaagaactg

SEQ ID NO: 108760 - DNA, 25 bp, Homo sapien
gctgagacatgttcctaaagaactg

SEQ ID NO: 108761 - DNA, 25 bp, Homo sapien
tccgaccaagtctccacagacgtaa

SEQ ID NO: 108762 - DNA, 25 bp, Homo sapien
tccgaccaagtcaccacagacgtaa

SEQ ID NO: 108763 - DNA, 25 bp, Homo sapien
ggggtacaagaccatcggagaaccg

SEQ ID NO: 108764 - DNA, 25 bp, Homo sapien
ggggtacaagacgatcggagaaccg

SEQ ID NO: 108765 - DNA, 25 bp, Homo sapien
gaggaacgaccggtgagacgacccg

SEQ ID NO: 108766 - DNA, 25 bp, Homo sapien
gaggaacgaccgctgagacgacccg

SEQ ID NO: 108767 - DNA, 25 bp, Homo sapien
cctaccgtgaaccttctgtataaag

SEQ ID NO: 108768 - DNA, 25 bp, Homo sapien
cctaccgtgaacgttctgtataaag

SEQ ID NO: 108769 - DNA, 25 bp, Homo sapien
ctctagtgacgaccacccggggagt

SEQ ID NO: 108770 - DNA, 25 bp, Homo sapien
ctctagtgacgagcacccggggagt

SEQ ID NO: 108771 - DNA, 25 bp, Homo sapien
tttccagacccgacagtctagaggg

SEQ ID NO: 108772 - DNA, 25 bp, Homo sapien
tttccagacccgtcagtctagaggg

SEQ ID NO: 108773 - DNA, 25 bp, Homo sapien
taccgtcgacttaccatctcaagtc

SEQ ID NO: 108774 - DNA, 25 bp, Homo sapien
taccgtcgactttccatctcaagtc

SEQ ID NO: 108775 - DNA, 25 bp, Homo sapien
agtacgtactagtcaattcagtgag

SEQ ID NO: 108776 - DNA, 25 bp, Homo sapien
agtacgtactagacaattcagtgag

SEQ ID NO: 108777 - DNA, 25 bp, Homo sapien
tcgaaaggagaaataggtccgtgac

SEQ ID NO: 108778 - DNA, 25 bp, Homo sapien
tcgaaaggagaattaggtccgtgac

SEQ ID NO: 108779 - DNA, 25 bp, Homo sapien
ttgatttacggaaaagtcaccaagt

SEQ ID NO: 108780 - DNA, 25 bp, Homo sapien
ttgatttacggataagtcaccaagt

SEQ ID NO: 108781 - DNA, 25 bp, Homo sapien
aatttttagttgtgacgtcccatgt

SEQ ID NO: 108782 - DNA, 25 bp, Homo sapien
aatttttagttgagacgtcccatgt

SEQ ID NO: 108783 - DNA, 25 bp, Homo sapien
tgtcttgtcattgttacttaacatg

SEQ ID NO: 108784 - DNA, 25 bp, Homo sapien
tgtcttgtcattcttacttaacatg

SEQ ID NO: 108785 - DNA, 25 bp, Homo sapien
aagactttccttcgtttcgagaaag

SEQ ID NO: 108786 - DNA, 25 bp, Homo sapien
aagactttccttggtttcgagaaag

SEQ ID NO: 108787 - DNA, 25 bp, Homo sapien
atgtccttctggtgactcggacaag

SEQ ID NO: 108788 - DNA, 25 bp, Homo sapien
atgtccttctggagactcggacaag

SEQ ID NO: 108789 - DNA, 25 bp, Homo sapien
acagtatgtggtagacgtccaagtg

SEQ ID NO: 108790 - DNA, 25 bp, Homo sapien
acagtatgtggttgacgtccaagtg

SEQ ID NO: 108791 - DNA, 25 bp, Homo sapien
ccagtttggtgtggtcgaacgatag

SEQ ID NO: 108792 - DNA, 25 bp, Homo sapien
ccagtttggtgtcgtcgaacgatag

SEQ ID NO: 108793 - DNA, 25 bp, Homo sapien
gggttctcctttagccccacaatat

SEQ ID NO: 108794 - DNA, 25 bp, Homo sapien
gggttctccttttgccccacaatat

SEQ ID NO: 108795 - DNA, 25 bp, Homo sapien
gtctctgcttccagtccgggaagga

SEQ ID NO: 108796 - DNA, 25 bp, Homo sapien
gtctctgcttcctgtccgggaagga

SEQ ID NO: 108797 - DNA, 25 bp, Homo sapien
atagggtccaggaacccgaacctac

SEQ ID NO: 108798 - DNA, 25 bp, Homo sapien
atagggtccaggtacccgaacctac

SEQ ID NO: 108799 - DNA, 25 bp, Homo sapien
cgatgttgtcatcttaccaaacttg

SEQ ID NO: 108800 - DNA, 25 bp, Homo sapien
cgatgttgtcatgttaccaaacttg

SEQ ID NO: 108801 - DNA, 25 bp, Homo sapien
tgatcgaccttgttatagaaatctt

SEQ ID NO: 108802 - DNA, 25 bp, Homo sapien
tgatcgaccttgatatagaaatctt

SEQ ID NO: 108803 - DNA, 25 bp, Homo sapien
ctcaagctactctgacaggaaatga

SEQ ID NO: 108804 - DNA, 25 bp, Homo sapien
ctcaagctactcagacaggaaatga

SEQ ID NO: 108805 - DNA, 25 bp, Homo sapien
aaagtcctctcgacggaaaacttcg

SEQ ID NO: 108806 - DNA, 25 bp, Homo sapien
aaagtcctctcgtcggaaaacttcg

SEQ ID NO: 108807 - DNA, 25 bp, Homo sapien
acaggggtccggaggtaaccaagtc

SEQ ID NO: 108808 - DNA, 25 bp, Homo sapien
acaggggtccggtggtaaccaagtc

SEQ ID NO: 108809 - DNA, 25 bp, Homo sapien
agtgggtccttgactcccgcgacta

SEQ ID NO: 108810 - DNA, 25 bp, Homo sapien
agtgggtccttgtctcccgcgacta

SEQ ID NO: 108811 - DNA, 25 bp, Homo sapien
gagagactctctcttcgcggatcaa

SEQ ID NO: 108812 - DNA, 25 bp, Homo sapien
gagagactctctgttcgcggatcaa

SEQ ID NO: 108813 - DNA, 25 bp, Homo sapien
gttacgatagtttttgtgtcattaa

SEQ ID NO: 108814 - DNA, 25 bp, Homo sapien
gttacgatagttattgtgtcattaa

SEQ ID NO: 108815 - DNA, 25 bp, Homo sapien
tcttaagtttggatcacgatgtatc

SEQ ID NO: 108816 - DNA, 25 bp, Homo sapien
tcttaagtttggttcacgatgtatc

SEQ ID NO: 108817 - DNA, 25 bp, Homo sapien
acttctattgtcacccgtcttcgag

SEQ ID NO: 108818 - DNA, 25 bp, Homo sapien
acttctattgtctcccgtcttcgag

SEQ ID NO: 108819 - DNA, 25 bp, Homo sapien
atctcggtcttagtccttttagacg

SEQ ID NO: 108820 - DNA, 25 bp, Homo sapien
atctcggtcttactccttttagacg

SEQ ID NO: 108821 - DNA, 25 bp, Homo sapien
gaaatcctgtgtctattcttgttca

SEQ ID NO: 108822 - DNA, 25 bp, Homo sapien
gaaatcctgtgtgtattcttgttca

SEQ ID NO: 108823 - DNA, 25 bp, Homo sapien
tggattcattgtctttcgtttgaac

SEQ ID NO: 108824 - DNA, 25 bp, Homo sapien
tggattcattgtgtttcgtttgaac

SEQ ID NO: 108825 - DNA, 25 bp, Homo sapien
ggaaccgaggtttgtttgggttacc

SEQ ID NO: 108826 - DNA, 25 bp, Homo sapien
ggaaccgaggttagtttgggttacc

SEQ ID NO: 108827 - DNA, 25 bp, Homo sapien
ggcacggggttcattttctgttcct

SEQ ID NO: 108828 - DNA, 25 bp, Homo sapien
ggcacggggttctttttctgttcct

SEQ ID NO: 108829 - DNA, 25 bp, Homo sapien
ggtaagctagattttttttttctct

SEQ ID NO: 108830 - DNA, 25 bp, Homo sapien
ggtaagctagatattttttttctct

SEQ ID NO: 108831 - DNA, 25 bp, Homo sapien
gaaataaggtctcgtctttattcag

SEQ ID NO: 108832 - DNA, 25 bp, Homo sapien
gaaataaggtctggtctttattcag

SEQ ID NO: 108833 - DNA, 25 bp, Homo sapien
gtgccgaacccgaccatggagtcgg

SEQ ID NO: 108834 - DNA, 25 bp, Homo sapien
gtgccgaacccgtccatggagtcgg

SEQ ID NO: 108835 - DNA, 25 bp, Homo sapien
agagtcccccaggacacttaaggga

SEQ ID NO: 108836 - DNA, 25 bp, Homo sapien
agagtcccccagcacacttaaggga

SEQ ID NO: 108837 - DNA, 25 bp, Homo sapien
aagtccaaccagttttcattgaagt

SEQ ID NO: 108838 - DNA, 25 bp, Homo sapien
aagtccaaccagatttcattgaagt

SEQ ID NO: 108839 - DNA, 25 bp, Homo sapien
agtcggggcagatttcacttaagac

SEQ ID NO: 108840 - DNA, 25 bp, Homo sapien
agtcggggcagaattcacttaagac

SEQ ID NO: 108841 - DNA, 25 bp, Homo sapien
ggtcgagccagaaccggctctccaa

SEQ ID NO: 108842 - DNA, 25 bp, Homo sapien
ggtcgagccagatccggctctccaa

SEQ ID NO: 108843 - DNA, 25 bp, Homo sapien
gtgcaggggtcctgtctgcagctac

SEQ ID NO: 108844 - DNA, 25 bp, Homo sapien
gtgcaggggtccagtctgcagctac

SEQ ID NO: 108845 - DNA, 25 bp, Homo sapien
tctgcaaaggtagtattgtcggttc

SEQ ID NO: 108846 - DNA, 25 bp, Homo sapien
tctgcaaaggtactattgtcggttc

SEQ ID NO: 108847 - DNA, 25 bp, Homo sapien
tttacaaaggtatccttgtgttttc

SEQ ID NO: 108848 - DNA, 25 bp, Homo sapien
tttacaaaggtaaccttgtgttttc

SEQ ID NO: 108849 - DNA, 25 bp, Homo sapien
aacgaaaggagactttactgtccct

SEQ ID NO: 108850 - DNA, 25 bp, Homo sapien
aacgaaaggagagtttactgtccct

SEQ ID NO: 108851 - DNA, 25 bp, Homo sapien
acctttggttaggttagtatccccg

SEQ ID NO: 108852 - DNA, 25 bp, Homo sapien
acctttggttagcttagtatccccg

SEQ ID NO: 108853 - DNA, 25 bp, Homo sapien
gggattgtccacagacgtctgtcaa

SEQ ID NO: 108854 - DNA, 25 bp, Homo sapien
gggattgtccactgacgtctgtcaa

SEQ ID NO: 108855 - DNA, 25 bp, Homo sapien
ccggactttcatctcggtatcaggt

SEQ ID NO: 108856 - DNA, 25 bp, Homo sapien
ccggactttcatgtcggtatcaggt

SEQ ID NO: 108857 - DNA, 25 bp, Homo sapien
acgttacttccctcgggacgatgta

SEQ ID NO: 108858 - DNA, 25 bp, Homo sapien
acgttacttcccacgggacgatgta

SEQ ID NO: 108859 - DNA, 25 bp, Homo sapien
actcgtcgacactcacgacggttag

SEQ ID NO: 108860 - DNA, 25 bp, Homo sapien
actcgtcgacacacacgacggttag

SEQ ID NO: 108861 - DNA, 25 bp, Homo sapien
agatttcgtccgtacaacgggtcga

SEQ ID NO: 108862 - DNA, 25 bp, Homo sapien
agatttcgtccgaacaacgggtcga

SEQ ID NO: 108863 - DNA, 25 bp, Homo sapien
tctacccgtcggagtgacgaccgga

SEQ ID NO: 108864 - DNA, 25 bp, Homo sapien
tctacccgtcggtgtgacgaccgga

SEQ ID NO: 108865 - DNA, 25 bp, Homo sapien
gtcgcgtgtatgtccgcacgcgcac

SEQ ID NO: 108866 - DNA, 25 bp, Homo sapien
gtcgcgtgtatgaccgcacgcgcac

SEQ ID NO: 108867 - DNA, 25 bp, Homo sapien
cgtactagaggccataactttgagg

SEQ ID NO: 108868 - DNA, 25 bp, Homo sapien
cgtactagaggcgataactttgagg

SEQ ID NO: 108869 - DNA, 25 bp, Homo sapien
cacgggcacagcctcggcgcgctct

SEQ ID NO: 108870 - DNA, 25 bp, Homo sapien
cacgggcacagcgtcggcgcgctct

SEQ ID NO: 108871 - DNA, 25 bp, Homo sapien
cgacacatccctaaataacagtaca

SEQ ID NO: 108872 - DNA, 25 bp, Homo sapien
cgacacatcccttaataacagtaca

SEQ ID NO: 108873 - DNA, 25 bp, Homo sapien
gaatctactccttgaactccgtgtc

SEQ ID NO: 108874 - DNA, 25 bp, Homo sapien
gaatctactcctagaactccgtgtc

SEQ ID NO: 108875 - DNA, 25 bp, Homo sapien
aggtctcttcactgtttctcctcag

SEQ ID NO: 108876 - DNA, 25 bp, Homo sapien
aggtctcttcacagtttctcctcag

SEQ ID NO: 108877 - DNA, 25 bp, Homo sapien
ataggttccttcgatgccagacggt

SEQ ID NO: 108878 - DNA, 25 bp, Homo sapien
ataggttccttccatgccagacggt

SEQ ID NO: 108879 - DNA, 25 bp, Homo sapien
gctgagcctagaatctctcgaacct

SEQ ID NO: 108880 - DNA, 25 bp, Homo sapien
gctgagcctagattctctcgaacct

SEQ ID NO: 108881 - DNA, 25 bp, Homo sapien
aggtacgggagagacctacggtaac

SEQ ID NO: 108882 - DNA, 25 bp, Homo sapien
aggtacgggagacacctacggtaac

SEQ ID NO: 108883 - DNA, 25 bp, Homo sapien
gccggtcccggatcccgaggagact

SEQ ID NO: 108884 - DNA, 25 bp, Homo sapien
gccggtcccggaacccgaggagact

SEQ ID NO: 108885 - DNA, 25 bp, Homo sapien
cgtcccgtcttcacaggctcaggtt

SEQ ID NO: 108886 - DNA, 25 bp, Homo sapien
cgtcccgtcttctcaggctcaggtt

SEQ ID NO: 108887 - DNA, 25 bp, Homo sapien
acctcgtctccggggtcgtccgggt

SEQ ID NO: 108888 - DNA, 25 bp, Homo sapien
acctcgtctccgcggtcgtccgggt

SEQ ID NO: 108889 - DNA, 25 bp, Homo sapien
ggccgtgtccgcaagtctcccgtag

SEQ ID NO: 108890 - DNA, 25 bp, Homo sapien
ggccgtgtccgctagtctcccgtag

SEQ ID NO: 108891 - DNA, 25 bp, Homo sapien
aggagatccgggtacagtctgtccc

SEQ ID NO: 108892 - DNA, 25 bp, Homo sapien
aggagatccgggaacagtctgtccc

SEQ ID NO: 108893 - DNA, 25 bp, Homo sapien
gacggtatggagcacgagtttcctc

SEQ ID NO: 108894 - DNA, 25 bp, Homo sapien
gacggtatggaggacgagtttcctc

SEQ ID NO: 108895 - DNA, 25 bp, Homo sapien
ttaaggacaaataacaacctgttgt

SEQ ID NO: 108896 - DNA, 25 bp, Homo sapien
ttaaggacaaattacaacctgttgt

SEQ ID NO: 108897 - DNA, 25 bp, Homo sapien
tggaggagattacacccgtcctagt

SEQ ID NO: 108898 - DNA, 25 bp, Homo sapien
tggaggagattagacccgtcctagt

SEQ ID NO: 108899 - DNA, 25 bp, Homo sapien
tgaaggacgaaccactaccagccga

SEQ ID NO: 108900 - DNA, 25 bp, Homo sapien
tgaaggacgaacgactaccagccga

SEQ ID NO: 108901 - DNA, 25 bp, Homo sapien
ttttcgtagagcacacttgtctgta

SEQ ID NO: 108902 - DNA, 25 bp, Homo sapien
ttttcgtagagctcacttgtctgta

SEQ ID NO: 108903 - DNA, 25 bp, Homo sapien
ggatctttcgaaacttatctgttta

SEQ ID NO: 108904 - DNA, 25 bp, Homo sapien
ggatctttcgaatcttatctgttta

SEQ ID NO: 108905 - DNA, 25 bp, Homo sapien
attgttccgtttgagtcgtctcttc

SEQ ID NO: 108906 - DNA, 25 bp, Homo sapien
attgttccgtttcagtcgtctcttc

SEQ ID NO: 108907 - DNA, 25 bp, Homo sapien
tgtcctttagataaatactgtcttc

SEQ ID NO: 108908 - DNA, 25 bp, Homo sapien
tgtcctttagattaatactgtcttc

SEQ ID NO: 108909 - DNA, 25 bp, Homo sapien
ttatctgacggtttttactttaacg

SEQ ID NO: 108910 - DNA, 25 bp, Homo sapien
ttatctgacggtatttactttaacg

SEQ ID NO: 108911 - DNA, 25 bp, Homo sapien
ctgttgaaggactctagacacttct

SEQ ID NO: 108912 - DNA, 25 bp, Homo sapien
ctgttgaaggacactagacacttct

SEQ ID NO: 108913 - DNA, 25 bp, Homo sapien
ctgaccaaaccctagtacactgtcg

SEQ ID NO: 108914 - DNA, 25 bp, Homo sapien
ctgaccaaacccaagtacactgtcg

SEQ ID NO: 108915 - DNA, 25 bp, Homo sapien
gtatgaaaactatcttccgaacatg

SEQ ID NO: 108916 - DNA, 25 bp, Homo sapien
gtatgaaaactaacttccgaacatg

SEQ ID NO: 108917 - DNA, 25 bp, Homo sapien
tacaaggacaataacgtcgagtaaa

SEQ ID NO: 108918 - DNA, 25 bp, Homo sapien
tacaaggacaattacgtcgagtaaa

SEQ ID NO: 108919 - DNA, 25 bp, Homo sapien
ggtcgagggtaagttcttctcgaag

SEQ ID NO: 108920 - DNA, 25 bp, Homo sapien
ggtcgagggtaacttcttctcgaag

SEQ ID NO: 108921 - DNA, 25 bp, Homo sapien
gacccgacggtacaccgggtccgga

SEQ ID NO: 108922 - DNA, 25 bp, Homo sapien
gacccgacggtagaccgggtccgga

SEQ ID NO: 108923 - DNA, 25 bp, Homo sapien
atgtcgagttgttccgtgtctggga

SEQ ID NO: 108924 - DNA, 25 bp, Homo sapien
atgtcgagttgtaccgtgtctggga

SEQ ID NO: 108925 - DNA, 25 bp, Homo sapien
gtctttctggccacatgttcggaga

SEQ ID NO: 108926 - DNA, 25 bp, Homo sapien
gtctttctggcctcatgttcggaga

SEQ ID NO: 108927 - DNA, 25 bp, Homo sapien
tgtcgccttgaccttcatttgaaag

SEQ ID NO: 108928 - DNA, 25 bp, Homo sapien
tgtcgccttgacgttcatttgaaag

SEQ ID NO: 108929 - DNA, 25 bp, Homo sapien
tcctcgtcccggacatttggtcagt

SEQ ID NO: 108930 - DNA, 25 bp, Homo sapien
tcctcgtcccggtcatttggtcagt

SEQ ID NO: 108931 - DNA, 25 bp, Homo sapien
cttccctccggaggtgacagacgga

SEQ ID NO: 108932 - DNA, 25 bp, Homo sapien
cttccctccggacgtgacagacgga

SEQ ID NO: 108933 - DNA, 25 bp, Homo sapien
ctacgagtccggtagtcccgtcgtc

SEQ ID NO: 108934 - DNA, 25 bp, Homo sapien
ctacgagtccggaagtcccgtcgtc

SEQ ID NO: 108935 - DNA, 25 bp, Homo sapien
taacacgatctcgattctatgagtt

SEQ ID NO: 108936 - DNA, 25 bp, Homo sapien
taacacgatctccattctatgagtt

SEQ ID NO: 108937 - DNA, 25 bp, Homo sapien
taccgagacgttcttatctcgacgg

SEQ ID NO: 108938 - DNA, 25 bp, Homo sapien
taccgagacgttgttatctcgacgg

SEQ ID NO: 108939 - DNA, 25 bp, Homo sapien
aaggttgttgttgttcgtagtggag

SEQ ID NO: 108940 - DNA, 25 bp, Homo sapien
aaggttgttgttcttcgtagtggag

SEQ ID NO: 108941 - DNA, 25 bp, Homo sapien
cagggtctttttaacccagtgtgtg

SEQ ID NO: 108942 - DNA, 25 bp, Homo sapien
cagggtcttttttacccagtgtgtg

SEQ ID NO: 108943 - DNA, 25 bp, Homo sapien
gggatgttcccttcctttggagacg

SEQ ID NO: 108944 - DNA, 25 bp, Homo sapien
gggatgttccctacctttggagacg

SEQ ID NO: 108945 - DNA, 25 bp, Homo sapien
tgtgtctcccggtcctaagacggag

SEQ ID NO: 108946 - DNA, 25 bp, Homo sapien
tgtgtctcccggacctaagacggag

SEQ ID NO: 108947 - DNA, 25 bp, Homo sapien
tgttacttcgtgactatacggaatc

SEQ ID NO: 108948 - DNA, 25 bp, Homo sapien
tgttacttcgtgtctatacggaatc

SEQ ID NO: 108949 - DNA, 25 bp, Homo sapien
gatctgacagagttgacacgtaatt

SEQ ID NO: 108950 - DNA, 25 bp, Homo sapien
gatctgacagagatgacacgtaatt

SEQ ID NO: 108951 - DNA, 25 bp, Homo sapien
gggtcgtgtcggttgatacctttgt

SEQ ID NO: 108952 - DNA, 25 bp, Homo sapien
gggtcgtgtcggatgatacctttgt

SEQ ID NO: 108953 - DNA, 25 bp, Homo sapien
tcatgttgactcgtgacacccgacc

SEQ ID NO: 108954 - DNA, 25 bp, Homo sapien
tcatgttgactcctgacacccgacc

SEQ ID NO: 108955 - DNA, 25 bp, Homo sapien
tagcgttagacctcgcgagcccacg

SEQ ID NO: 108956 - DNA, 25 bp, Homo sapien
tagcgttagaccacgcgagcccacg

SEQ ID NO: 108957 - DNA, 25 bp, Homo sapien
gtagtaagagaagacaagacctctg

SEQ ID NO: 108958 - DNA, 25 bp, Homo sapien
gtagtaagagaacacaagacctctg

SEQ ID NO: 108959 - DNA, 25 bp, Homo sapien
aattctagggaagtcttgagaccac

SEQ ID NO: 108960 - DNA, 25 bp, Homo sapien
aattctagggaactcttgagaccac

SEQ ID NO: 108961 - DNA, 25 bp, Homo sapien
tccttgtcgaaaaccttagacgaca

SEQ ID NO: 108962 - DNA, 25 bp, Homo sapien
tccttgtcgaaatccttagacgaca

SEQ ID NO: 108963 - DNA, 25 bp, Homo sapien
tccttcgacgcctcacagagtgaca

SEQ ID NO: 108964 - DNA, 25 bp, Homo sapien
tccttcgacgccacacagagtgaca

SEQ ID NO: 108965 - DNA, 25 bp, Homo sapien
tgcttaagagtcgaccacctagccg

SEQ ID NO: 108966 - DNA, 25 bp, Homo sapien
tgcttaagagtccaccacctagccg

SEQ ID NO: 108967 - DNA, 25 bp, Homo sapien
gaatgtgttatttccaagacacccc

SEQ ID NO: 108968 - DNA, 25 bp, Homo sapien
gaatgtgttattaccaagacacccc

SEQ ID NO: 108969 - DNA, 25 bp, Homo sapien
gggtagaagatacagaagacatccc

SEQ ID NO: 108970 - DNA, 25 bp, Homo sapien
gggtagaagatagagaagacatccc

SEQ ID NO: 108971 - DNA, 25 bp, Homo sapien
acgtagataatggtcgtaaaaccta

SEQ ID NO: 108972 - DNA, 25 bp, Homo sapien
acgtagataatgctcgtaaaaccta

SEQ ID NO: 108973 - DNA, 25 bp, Homo sapien
cctcggttacttctggtccatctac

SEQ ID NO: 108974 - DNA, 25 bp, Homo sapien
cctcggttacttgtggtccatctac

SEQ ID NO: 108975 - DNA, 25 bp, Homo sapien
ggatcaccgttgattccgatctcgt

SEQ ID NO: 108976 - DNA, 25 bp, Homo sapien
ggatcaccgttgtttccgatctcgt

SEQ ID NO: 108977 - DNA, 25 bp, Homo sapien
tcggtccagtttcacctccgttcgg

SEQ ID NO: 108978 - DNA, 25 bp, Homo sapien
tcggtccagtttgacctccgttcgg

SEQ ID NO: 108979 - DNA, 25 bp, Homo sapien
gcctcagagtgttccgtgtttgtgg

SEQ ID NO: 108980 - DNA, 25 bp, Homo sapien
gcctcagagtgtaccgtgtttgtgg

SEQ ID NO: 108981 - DNA, 25 bp, Homo sapien
tccccgacgtcgtccgagtattgga

SEQ ID NO: 108982 - DNA, 25 bp, Homo sapien
tccccgacgtcgaccgagtattgga

SEQ ID NO: 108983 - DNA, 25 bp, Homo sapien
agggtacccgtgtattaaatcttat

SEQ ID NO: 108984 - DNA, 25 bp, Homo sapien
agggtacccgtgaattaaatcttat

SEQ ID NO: 108985 - DNA, 25 bp, Homo sapien
tacttggtctattacttaccgtgtt

SEQ ID NO: 108986 - DNA, 25 bp, Homo sapien
tacttggtctataacttaccgtgtt

SEQ ID NO: 108987 - DNA, 25 bp, Homo sapien
tctggtctgtaaacgtagtctgtca

SEQ ID NO: 108988 - DNA, 25 bp, Homo sapien
tctggtctgtaatcgtagtctgtca

SEQ ID NO: 108989 - DNA, 25 bp, Homo sapien
cttcgactctataactctgtctttt

SEQ ID NO: 108990 - DNA, 25 bp, Homo sapien
cttcgactctattactctgtctttt

SEQ ID NO: 108991 - DNA, 25 bp, Homo sapien
gtctggattctctgtcttatacaat

SEQ ID NO: 108992 - DNA, 25 bp, Homo sapien
gtctggattctcagtcttatacaat

SEQ ID NO: 108993 - DNA, 25 bp, Homo sapien
gactcctgcccgatccgtagacaga

SEQ ID NO: 108994 - DNA, 25 bp, Homo sapien
gactcctgcccgttccgtagacaga

SEQ ID NO: 108995 - DNA, 25 bp, Homo sapien
tccgactccgaccatgaccgggaga

SEQ ID NO: 108996 - DNA, 25 bp, Homo sapien
tccgactccgacgatgaccgggaga

SEQ ID NO: 108997 - DNA, 25 bp, Homo sapien
gccgagacgcggcgccggcgacgac

SEQ ID NO: 108998 - DNA, 25 bp, Homo sapien
gccgagacgcggggccggcgacgac

SEQ ID NO: 108999 - DNA, 25 bp, Homo sapien
gcgccggcggcgtaccgagtagtac

SEQ ID NO: 109000 - DNA, 25 bp, Homo sapien
gcgccggcggcgaaccgagtagtac

SEQ ID NO: 109001 - DNA, 25 bp, Homo sapien
tcgtcgctggcgtcgaggtcactga

SEQ ID NO: 109002 - DNA, 25 bp, Homo sapien
tcgtcgctggcgacgaggtcactga

SEQ ID NO: 109003 - DNA, 25 bp, Homo sapien
ctgttgcactgacgtactcacaact

SEQ ID NO: 109004 - DNA, 25 bp, Homo sapien
ctgttgcactgaggtactcacaact

SEQ ID NO: 109005 - DNA, 25 bp, Homo sapien
tgtagtcttttcctttgtgagaaac

SEQ ID NO: 109006 - DNA, 25 bp, Homo sapien
tgtagtcttttcgtttgtgagaaac

SEQ ID NO: 109007 - DNA, 25 bp, Homo sapien
aagaaaacttagttcagtgtcggca

SEQ ID NO: 109008 - DNA, 25 bp, Homo sapien
aagaaaacttagatcagtgtcggca

SEQ ID NO: 109009 - DNA, 25 bp, Homo sapien
gcgacaaacacaaaccgaactgcaa

SEQ ID NO: 109010 - DNA, 25 bp, Homo sapien
gcgacaaacacataccgaactgcaa

SEQ ID NO: 109011 - DNA, 25 bp, Homo sapien
gaataggtcattcgaagtgtctgac

SEQ ID NO: 109012 - DNA, 25 bp, Homo sapien
gaataggtcattggaagtgtctgac

SEQ ID NO: 109013 - DNA, 25 bp, Homo sapien
gaagaacagtgttttgggtttccac

SEQ ID NO: 109014 - DNA, 25 bp, Homo sapien
gaagaacagtgtattgggtttccac

SEQ ID NO: 109015 - DNA, 25 bp, Homo sapien
tcacagttcttattggcgagtccaa

SEQ ID NO: 109016 - DNA, 25 bp, Homo sapien
tcacagttcttaatggcgagtccaa

SEQ ID NO: 109017 - DNA, 25 bp, Homo sapien
caattggttgtcttttacactagtg

SEQ ID NO: 109018 - DNA, 25 bp, Homo sapien
caattggttgtcatttacactagtg

SEQ ID NO: 109019 - DNA, 25 bp, Homo sapien
tctgtatcgtctcttccgtataagg

SEQ ID NO: 109020 - DNA, 25 bp, Homo sapien
tctgtatcgtctgttccgtataagg

SEQ ID NO: 109021 - DNA, 25 bp, Homo sapien
acgtcttgaaatgtgtccgataaag

SEQ ID NO: 109022 - DNA, 25 bp, Homo sapien
acgtcttgaaatctgtccgataaag

SEQ ID NO: 109023 - DNA, 25 bp, Homo sapien
gtcgtcacttccttccgctacgaga

SEQ ID NO: 109024 - DNA, 25 bp, Homo sapien
gtcgtcacttccatccgctacgaga

SEQ ID NO: 109025 - DNA, 25 bp, Homo sapien
ttctctgactccaccgtcgacgggt

SEQ ID NO: 109026 - DNA, 25 bp, Homo sapien
ttctctgactcctccgtcgacgggt

SEQ ID NO: 109027 - DNA, 25 bp, Homo sapien
tgtgtctctatacactgtgtctggg

SEQ ID NO: 109028 - DNA, 25 bp, Homo sapien
tgtgtctctatagactgtgtctggg

SEQ ID NO: 109029 - DNA, 25 bp, Homo sapien
ggggttttcttaaggatgtcttccg

SEQ ID NO: 109030 - DNA, 25 bp, Homo sapien
ggggttttcttatggatgtcttccg

SEQ ID NO: 109031 - DNA, 25 bp, Homo sapien
gttttctccaaggtgtcgttattct

SEQ ID NO: 109032 - DNA, 25 bp, Homo sapien
gttttctccaagctgtcgttattct

SEQ ID NO: 109033 - DNA, 25 bp, Homo sapien
attcttccggattgtccgtagactt

SEQ ID NO: 109034 - DNA, 25 bp, Homo sapien
attcttccggatagtccgtagactt

SEQ ID NO: 109035 - DNA, 25 bp, Homo sapien
gtacctctcgcctaaaactgagtac

SEQ ID NO: 109036 - DNA, 25 bp, Homo sapien
gtacctctcgccaaaaactgagtac

SEQ ID NO: 109037 - DNA, 25 bp, Homo sapien
caacgagtccggaactaacggacag

SEQ ID NO: 109038 - DNA, 25 bp, Homo sapien
caacgagtccggtactaacggacag

SEQ ID NO: 109039 - DNA, 25 bp, Homo sapien
gaagagtaggtacctaaacggaacg

SEQ ID NO: 109040 - DNA, 25 bp, Homo sapien
gaagagtaggtagctaaacggaacg

SEQ ID NO: 109041 - DNA, 25 bp, Homo sapien
aaatgtgtacgtcaatcatggttac

SEQ ID NO: 109042 - DNA, 25 bp, Homo sapien
aaatgtgtacgtgaatcatggttac

SEQ ID NO: 109043 - DNA, 25 bp, Homo sapien
cagacagccatgcacagatggtccg

SEQ ID NO: 109044 - DNA, 25 bp, Homo sapien
cagacagccatggacagatggtccg

SEQ ID NO: 109045 - DNA, 25 bp, Homo sapien
tggacttaagtctcgaaacatccgt

SEQ ID NO: 109046 - DNA, 25 bp, Homo sapien
tggacttaagtcacgaaacatccgt

SEQ ID NO: 109047 - DNA, 25 bp, Homo sapien
gcgacgtaaatcagttcaaactcct

SEQ ID NO: 109048 - DNA, 25 bp, Homo sapien
gcgacgtaaatctgttcaaactcct

SEQ ID NO: 109049 - DNA, 25 bp, Homo sapien
gatgtgtatagtcttgtacaaaacc

SEQ ID NO: 109050 - DNA, 25 bp, Homo sapien
gatgtgtatagtgttgtacaaaacc

SEQ ID NO: 109051 - DNA, 25 bp, Homo sapien
gttcagtaacggtctgtcaggaacc

SEQ ID NO: 109052 - DNA, 25 bp, Homo sapien
gttcagtaacggactgtcaggaacc

SEQ ID NO: 109053 - DNA, 25 bp, Homo sapien
aattttttgagcttccgacgagtcc

SEQ ID NO: 109054 - DNA, 25 bp, Homo sapien
aattttttgagcatccgacgagtcc

SEQ ID NO: 109055 - DNA, 25 bp, Homo sapien
gtgtcttttatgtgaccttacataa

SEQ ID NO: 109056 - DNA, 25 bp, Homo sapien
gtgtcttttatgagaccttacataa

SEQ ID NO: 109057 - DNA, 25 bp, Homo sapien
tcctttatttacaactctcatttat

SEQ ID NO: 109058 - DNA, 25 bp, Homo sapien
tcctttatttactactctcatttat

SEQ ID NO: 109059 - DNA, 25 bp, Homo sapien
attttatgtgtaacccctcttgttg

SEQ ID NO: 109060 - DNA, 25 bp, Homo sapien
attttatgtgtatcccctcttgttg

SEQ ID NO: 109061 - DNA, 25 bp, Homo sapien
gtaccttttggttctagaaatttcc

SEQ ID NO: 109062 - DNA, 25 bp, Homo sapien
gtaccttttggtactagaaatttcc

SEQ ID NO: 109063 - DNA, 25 bp, Homo sapien
tttatgtgcactgattttcgtctcg

SEQ ID NO: 109064 - DNA, 25 bp, Homo sapien
tttatgtgcactcattttcgtctcg

SEQ ID NO: 109065 - DNA, 25 bp, Homo sapien
tcactcggtgtgaggactctgtgag

SEQ ID NO: 109066 - DNA, 25 bp, Homo sapien
tcactcggtgtgtggactctgtgag

SEQ ID NO: 109067 - DNA, 25 bp, Homo sapien
acttggttcgctaacgaccctactg

SEQ ID NO: 109068 - DNA, 25 bp, Homo sapien
acttggttcgcttacgaccctactg

SEQ ID NO: 109069 - DNA, 25 bp, Homo sapien
ggtagggattcttaaatgactccgt

SEQ ID NO: 109070 - DNA, 25 bp, Homo sapien
ggtagggattctaaaatgactccgt

SEQ ID NO: 109071 - DNA, 25 bp, Homo sapien
tttcgtgtcgtaacagacgtgttcc

SEQ ID NO: 109072 - DNA, 25 bp, Homo sapien
tttcgtgtcgtatcagacgtgttcc

SEQ ID NO: 109073 - DNA, 25 bp, Homo sapien
attagtactaccaaaggtgtcacac

SEQ ID NO: 109074 - DNA, 25 bp, Homo sapien
attagtactacctaaggtgtcacac

SEQ ID NO: 109075 - DNA, 25 bp, Homo sapien
ttctccgaggacgacgtacgtcaca

SEQ ID NO: 109076 - DNA, 25 bp, Homo sapien
ttctccgaggaccacgtacgtcaca

SEQ ID NO: 109077 - DNA, 25 bp, Homo sapien
acatcgttcaaacgatcgtcgtaag

SEQ ID NO: 109078 - DNA, 25 bp, Homo sapien
acatcgttcaaaggatcgtcgtaag

SEQ ID NO: 109079 - DNA, 25 bp, Homo sapien
ccaagttcgttgataactccttacg

SEQ ID NO: 109080 - DNA, 25 bp, Homo sapien
ccaagttcgttgttaactccttacg

SEQ ID NO: 109081 - DNA, 25 bp, Homo sapien
gaggaaaagttggaacctccgtcta

SEQ ID NO: 109082 - DNA, 25 bp, Homo sapien
gaggaaaagttgcaacctccgtcta

SEQ ID NO: 109083 - DNA, 25 bp, Homo sapien
cgatgtaaaatccaattatctcgga

SEQ ID NO: 109084 - DNA, 25 bp, Homo sapien
cgatgtaaaatcgaattatctcgga

SEQ ID NO: 109085 - DNA, 25 bp, Homo sapien
tgttaccatcacgattacggttgtc

SEQ ID NO: 109086 - DNA, 25 bp, Homo sapien
tgttaccatcaccattacggttgtc

SEQ ID NO: 109087 - DNA, 25 bp, Homo sapien
actcctcagagaactagactctgta

SEQ ID NO: 109088 - DNA, 25 bp, Homo sapien
actcctcagagatctagactctgta

SEQ ID NO: 109089 - DNA, 25 bp, Homo sapien
catgaccatcaagtacgacaccaga

SEQ ID NO: 109090 - DNA, 25 bp, Homo sapien
catgaccatcaactacgacaccaga

SEQ ID NO: 109091 - DNA, 25 bp, Homo sapien
caggaccatactcagtcccattaga

SEQ ID NO: 109092 - DNA, 25 bp, Homo sapien
caggaccatactgagtcccattaga

SEQ ID NO: 109093 - DNA, 25 bp, Homo sapien
gacggaccaagaacttccatctctt

SEQ ID NO: 109094 - DNA, 25 bp, Homo sapien
gacggaccaagatcttccatctctt

SEQ ID NO: 109095 - DNA, 25 bp, Homo sapien
gggccacccatagtcagtagtccct

SEQ ID NO: 109096 - DNA, 25 bp, Homo sapien
gggccacccatactcagtagtccct

SEQ ID NO: 109097 - DNA, 25 bp, Homo sapien
cagtcccagaccagaacttagtcca

SEQ ID NO: 109098 - DNA, 25 bp, Homo sapien
cagtcccagacctgaacttagtcca

SEQ ID NO: 109099 - DNA, 25 bp, Homo sapien
gtgtgcgtcgagtaacatcttccac

SEQ ID NO: 109100 - DNA, 25 bp, Homo sapien
gtgtgcgtcgagaaacatcttccac

SEQ ID NO: 109101 - DNA, 25 bp, Homo sapien
ggcgagctgacaaaactccgacctc

SEQ ID NO: 109102 - DNA, 25 bp, Homo sapien
ggcgagctgacataactccgacctc

SEQ ID NO: 109103 - DNA, 25 bp, Homo sapien
agacgaagcccgactaccggacgtc

SEQ ID NO: 109104 - DNA, 25 bp, Homo sapien
agacgaagcccgtctaccggacgtc

SEQ ID NO: 109105 - DNA, 25 bp, Homo sapien
gtcgtaaccccgtatactccgtgtt

SEQ ID NO: 109106 - DNA, 25 bp, Homo sapien
gtcgtaaccccgaatactccgtgtt

SEQ ID NO: 109107 - DNA, 25 bp, Homo sapien
acagtcggttcgtcgccatgggtag

SEQ ID NO: 109108 - DNA, 25 bp, Homo sapien
acagtcggttcgacgccatgggtag

SEQ ID NO: 109109 - DNA, 25 bp, Homo sapien
ctggtgtaccgaacccactggtaga

SEQ ID NO: 109110 - DNA, 25 bp, Homo sapien
ctggtgtaccgatcccactggtaga

SEQ ID NO: 109111 - DNA, 25 bp, Homo sapien
tttaaactaccgtcttgaaggttag

SEQ ID NO: 109112 - DNA, 25 bp, Homo sapien
tttaaactaccgacttgaaggttag

SEQ ID NO: 109113 - DNA, 25 bp, Homo sapien
attaaaagtgtgtcggtcctcagaa

SEQ ID NO: 109114 - DNA, 25 bp, Homo sapien
attaaaagtgtgacggtcctcagaa

SEQ ID NO: 109115 - DNA, 25 bp, Homo sapien
tgacgaagattaaacactttccaga

SEQ ID NO: 109116 - DNA, 25 bp, Homo sapien
tgacgaagattatacactttccaga

SEQ ID NO: 109117 - DNA, 25 bp, Homo sapien
aacgaagatccgtctcctgtccttc

SEQ ID NO: 109118 - DNA, 25 bp, Homo sapien
aacgaagatccgactcctgtccttc

SEQ ID NO: 109119 - DNA, 25 bp, Homo sapien
aatgcagcccgtatttgtagtatca

SEQ ID NO: 109120 - DNA, 25 bp, Homo sapien
aatgcagcccgtttttgtagtatca

SEQ ID NO: 109121 - DNA, 25 bp, Homo sapien
agaagtccacaacgaccaaggtgaa

SEQ ID NO: 109122 - DNA, 25 bp, Homo sapien
agaagtccacaaggaccaaggtgaa

SEQ ID NO: 109123 - DNA, 25 bp, Homo sapien
ataaggaacagaggacccagggaac

SEQ ID NO: 109124 - DNA, 25 bp, Homo sapien
ataaggaacagacgacccagggaac

SEQ ID NO: 109125 - DNA, 25 bp, Homo sapien
ttaacagaacgtcctctaggttctt

SEQ ID NO: 109126 - DNA, 25 bp, Homo sapien
ttaacagaacgtgctctaggttctt

SEQ ID NO: 109127 - DNA, 25 bp, Homo sapien
tttccggtgacgatcctcgattatt

SEQ ID NO: 109128 - DNA, 25 bp, Homo sapien
tttccggtgacgttcctcgattatt

SEQ ID NO: 109129 - DNA, 25 bp, Homo sapien
caccagtagagtagagtaccatatg

SEQ ID NO: 109130 - DNA, 25 bp, Homo sapien
caccagtagagttgagtaccatatg

SEQ ID NO: 109131 - DNA, 25 bp, Homo sapien
taacgagtagacgttcctaattata

SEQ ID NO: 109132 - DNA, 25 bp, Homo sapien
taacgagtagaccttcctaattata

SEQ ID NO: 109133 - DNA, 25 bp, Homo sapien
gtataagtggtgattcgaacagaga

SEQ ID NO: 109134 - DNA, 25 bp, Homo sapien
gtataagtggtgtttcgaacagaga

SEQ ID NO: 109135 - DNA, 25 bp, Homo sapien
gtgtaaccactttactttgaaagac

SEQ ID NO: 109136 - DNA, 25 bp, Homo sapien
gtgtaaccacttaactttgaaagac

SEQ ID NO: 109137 - DNA, 25 bp, Homo sapien
aagggaccttctacactgaagagaa

SEQ ID NO: 109138 - DNA, 25 bp, Homo sapien
aagggaccttcttcactgaagagaa

SEQ ID NO: 109139 - DNA, 25 bp, Homo sapien
tgaaaccctgctttacaaacgtgaa

SEQ ID NO: 109140 - DNA, 25 bp, Homo sapien
tgaaaccctgctatacaaacgtgaa

SEQ ID NO: 109141 - DNA, 25 bp, Homo sapien
taacagtttccgtcttaaagaagtc

SEQ ID NO: 109142 - DNA, 25 bp, Homo sapien
taacagtttccgacttaaagaagtc

SEQ ID NO: 109143 - DNA, 25 bp, Homo sapien
taaaatgagtgaaaccctgttttcg

SEQ ID NO: 109144 - DNA, 25 bp, Homo sapien
taaaatgagtgataccctgttttcg

SEQ ID NO: 109145 - DNA, 25 bp, Homo sapien
tgaagaggaggaaccaccctttcct

SEQ ID NO: 109146 - DNA, 25 bp, Homo sapien
tgaagaggaggatccaccctttcct

SEQ ID NO: 109147 - DNA, 25 bp, Homo sapien
tcacaagaaggattgaaccttataa

SEQ ID NO: 109148 - DNA, 25 bp, Homo sapien
tcacaagaaggaatgaaccttataa

SEQ ID NO: 109149 - DNA, 25 bp, Homo sapien
atgaaaaggaattccagtataacct

SEQ ID NO: 109150 - DNA, 25 bp, Homo sapien
atgaaaaggaataccagtataacct

SEQ ID NO: 109151 - DNA, 25 bp, Homo sapien
gtcaaaggcggtacacatactgagc

SEQ ID NO: 109152 - DNA, 25 bp, Homo sapien
gtcaaaggcggttcacatactgagc

SEQ ID NO: 109153 - DNA, 25 bp, Homo sapien
ggttcagtgaactcacataaagtag

SEQ ID NO: 109154 - DNA, 25 bp, Homo sapien
ggttcagtgaacacacataaagtag

SEQ ID NO: 109155 - DNA, 25 bp, Homo sapien
cgttcacccacactcgtcgaaagta

SEQ ID NO: 109156 - DNA, 25 bp, Homo sapien
cgttcacccacagtcgtcgaaagta

SEQ ID NO: 109157 - DNA, 25 bp, Homo sapien
atcggttttcacaccggaaccgtcg

SEQ ID NO: 109158 - DNA, 25 bp, Homo sapien
atcggttttcactccggaaccgtcg

SEQ ID NO: 109159 - DNA, 25 bp, Homo sapien
tagatttcgcccttcggtcatagac

SEQ ID NO: 109160 - DNA, 25 bp, Homo sapien
tagatttcgcccatcggtcatagac

SEQ ID NO: 109161 - DNA, 25 bp, Homo sapien
gacctcagactccataaccgttgtc

SEQ ID NO: 109162 - DNA, 25 bp, Homo sapien
gacctcagactcgataaccgttgtc

SEQ ID NO: 109163 - DNA, 25 bp, Homo sapien
aactgtcagtcgacccgtcgaggtc

SEQ ID NO: 109164 - DNA, 25 bp, Homo sapien
aactgtcagtcgtcccgtcgaggtc

SEQ ID NO: 109165 - DNA, 25 bp, Homo sapien
aactctgtagtccaatgtgtaactg

SEQ ID NO: 109166 - DNA, 25 bp, Homo sapien
aactctgtagtcgaatgtgtaactg

SEQ ID NO: 109167 - DNA, 25 bp, Homo sapien
ttaccgtcacagtcaacatgtaatg

SEQ ID NO: 109168 - DNA, 25 bp, Homo sapien
ttaccgtcacagacaacatgtaatg

SEQ ID NO: 109169 - DNA, 25 bp, Homo sapien
cctcgtcgctataactgtttattga

SEQ ID NO: 109170 - DNA, 25 bp, Homo sapien
cctcgtcgctattactgtttattga

SEQ ID NO: 109171 - DNA, 25 bp, Homo sapien
cccctgaccaatttgatctgtatag

SEQ ID NO: 109172 - DNA, 25 bp, Homo sapien
cccctgaccaatatgatctgtatag

SEQ ID NO: 109173 - DNA, 25 bp, Homo sapien
aaagtgtgtcctgtccctttgacga

SEQ ID NO: 109174 - DNA, 25 bp, Homo sapien
aaagtgtgtcctctccctttgacga

SEQ ID NO: 109175 - DNA, 25 bp, Homo sapien
ttacggtgcctgtgactctttccga

SEQ ID NO: 109176 - DNA, 25 bp, Homo sapien
ttacggtgcctgagactctttccga

SEQ ID NO: 109177 - DNA, 25 bp, Homo sapien
taccacggctacaacatcctttgga

SEQ ID NO: 109178 - DNA, 25 bp, Homo sapien
taccacggctactacatcctttgga

SEQ ID NO: 109179 - DNA, 25 bp, Homo sapien
acaacagtacaaacggtttatttga

SEQ ID NO: 109180 - DNA, 25 bp, Homo sapien
acaacagtacaatcggtttatttga

SEQ ID NO: 109181 - DNA, 25 bp, Homo sapien
cgactgagcattgactgtttttgta

SEQ ID NO: 109182 - DNA, 25 bp, Homo sapien
cgactgagcattcactgtttttgta

SEQ ID NO: 109183 - DNA, 25 bp, Homo sapien
atgaagtcgtccttcttacttttac

SEQ ID NO: 109184 - DNA, 25 bp, Homo sapien
atgaagtcgtccatcttacttttac

SEQ ID NO: 109185 - DNA, 25 bp, Homo sapien
ggacgggtccactttagtgtttacg

SEQ ID NO: 109186 - DNA, 25 bp, Homo sapien
ggacgggtccacattagtgtttacg

SEQ ID NO: 109187 - DNA, 25 bp, Homo sapien
agtaggcgacgaccaggtttctcac

SEQ ID NO: 109188 - DNA, 25 bp, Homo sapien
agtaggcgacgagcaggtttctcac

SEQ ID NO: 109189 - DNA, 25 bp, Homo sapien
gtataaacggaggagacgataaccc

SEQ ID NO: 109190 - DNA, 25 bp, Homo sapien
gtataaacggagcagacgataaccc

SEQ ID NO: 109191 - DNA, 25 bp, Homo sapien
tcgaagaccagacatccttaacgtg

SEQ ID NO: 109192 - DNA, 25 bp, Homo sapien
tcgaagaccagagatccttaacgtg

SEQ ID NO: 109193 - DNA, 25 bp, Homo sapien
tcaaagacccctggtcctgatacct

SEQ ID NO: 109194 - DNA, 25 bp, Homo sapien
tcaaagacccctcgtcctgatacct

SEQ ID NO: 109195 - DNA, 25 bp, Homo sapien
acagactcggtgtcgcagtcctacc

SEQ ID NO: 109196 - DNA, 25 bp, Homo sapien
acagactcggtgacgcagtcctacc

SEQ ID NO: 109197 - DNA, 25 bp, Homo sapien
ccaaacgaggggtagaggtccctcc

SEQ ID NO: 109198 - DNA, 25 bp, Homo sapien
ccaaacgaggggaagaggtccctcc

SEQ ID NO: 109199 - DNA, 25 bp, Homo sapien
aagacgtcgaaaaagagatccctgt

SEQ ID NO: 109200 - DNA, 25 bp, Homo sapien
aagacgtcgaaatagagatccctgt

SEQ ID NO: 109201 - DNA, 25 bp, Homo sapien
gacacaaaaatcgtgatctcctcgt

SEQ ID NO: 109202 - DNA, 25 bp, Homo sapien
gacacaaaaatcctgatctcctcgt

SEQ ID NO: 109203 - DNA, 25 bp, Homo sapien
gaagtcttactttcacacggtatat

SEQ ID NO: 109204 - DNA, 25 bp, Homo sapien
gaagtcttacttacacacggtatat

SEQ ID NO: 109205 - DNA, 25 bp, Homo sapien
tgctgtcttcgtcaccgaatgtaat

SEQ ID NO: 109206 - DNA, 25 bp, Homo sapien
tgctgtcttcgtgaccgaatgtaat

SEQ ID NO: 109207 - DNA, 25 bp, Homo sapien
cgtcttcctactcccggaggacgag

SEQ ID NO: 109208 - DNA, 25 bp, Homo sapien
cgtcttcctactgccggaggacgag

SEQ ID NO: 109209 - DNA, 25 bp, Homo sapien
cgtactccagcagctaccggaccgg

SEQ ID NO: 109210 - DNA, 25 bp, Homo sapien
cgtactccagcacctaccggaccgg

SEQ ID NO: 109211 - DNA, 25 bp, Homo sapien
gtatataatgtgtccagactcacgt

SEQ ID NO: 109212 - DNA, 25 bp, Homo sapien
gtatataatgtgaccagactcacgt

SEQ ID NO: 109213 - DNA, 25 bp, Homo sapien
ttatagtaaatctagtccatgtccg

SEQ ID NO: 109214 - DNA, 25 bp, Homo sapien
ttatagtaaatcaagtccatgtccg

SEQ ID NO: 109215 - DNA, 25 bp, Homo sapien
gttatcaaacccactagtgtaaccg

SEQ ID NO: 109216 - DNA, 25 bp, Homo sapien
gttatcaaaccctctagtgtaaccg

SEQ ID NO: 109217 - DNA, 25 bp, Homo sapien
aaaaacacacaggtccggtagactg

SEQ ID NO: 109218 - DNA, 25 bp, Homo sapien
aaaaacacacagctccggtagactg

SEQ ID NO: 109219 - DNA, 25 bp, Homo sapien
tatgtacgacacgaccacgacaaag

SEQ ID NO: 109220 - DNA, 25 bp, Homo sapien
tatgtacgacaccaccacgacaaag

SEQ ID NO: 109221 - DNA, 25 bp, Homo sapien
tgatagatgacaaacgcctagtacg

SEQ ID NO: 109222 - DNA, 25 bp, Homo sapien
tgatagatgacatacgcctagtacg

SEQ ID NO: 109223 - DNA, 25 bp, Homo sapien
cagaccgagcgaatcctaagacgtc

SEQ ID NO: 109224 - DNA, 25 bp, Homo sapien
cagaccgagcgattcctaagacgtc

SEQ ID NO: 109225 - DNA, 25 bp, Homo sapien
actagagtcgcgactcagccagtgg

SEQ ID NO: 109226 - DNA, 25 bp, Homo sapien
actagagtcgcgtctcagccagtgg

SEQ ID NO: 109227 - DNA, 25 bp, Homo sapien
tcttgatgtgatcctagaccactgg

SEQ ID NO: 109228 - DNA, 25 bp, Homo sapien
tcttgatgtgatgctagaccactgg

SEQ ID NO: 109229 - DNA, 25 bp, Homo sapien
cctcatttctgtgttttacgatggt

SEQ ID NO: 109230 - DNA, 25 bp, Homo sapien
cctcatttctgtcttttacgatggt

SEQ ID NO: 109231 - DNA, 25 bp, Homo sapien
gttttggaacagaacgggccctcga

SEQ ID NO: 109232 - DNA, 25 bp, Homo sapien
gttttggaacagtacgggccctcga

SEQ ID NO: 109233 - DNA, 25 bp, Homo sapien
tttattggccacgtagggccccgtc

SEQ ID NO: 109234 - DNA, 25 bp, Homo sapien
tttattggccacctagggccccgtc

SEQ ID NO: 109235 - DNA, 25 bp, Homo sapien
atactgaacctttccttctacctcc

SEQ ID NO: 109236 - DNA, 25 bp, Homo sapien
atactgaaccttaccttctacctcc

SEQ ID NO: 109237 - DNA, 25 bp, Homo sapien
cagtttgactaaaccgtgtgaatta

SEQ ID NO: 109238 - DNA, 25 bp, Homo sapien
cagtttgactaatccgtgtgaatta

SEQ ID NO: 109239 - DNA, 25 bp, Homo sapien
atttacgtgttcatggggacttacc

SEQ ID NO: 109240 - DNA, 25 bp, Homo sapien
atttacgtgttcttggggacttacc

SEQ ID NO: 109241 - DNA, 25 bp, Homo sapien
tatgggatatcaagtggtttctcac

SEQ ID NO: 109242 - DNA, 25 bp, Homo sapien
tatgggatatcatgtggtttctcac

SEQ ID NO: 109243 - DNA, 25 bp, Homo sapien
agtgaggaatcttttatatcatcct

SEQ ID NO: 109244 - DNA, 25 bp, Homo sapien
agtgaggaatctattatatcatcct

SEQ ID NO: 109245 - DNA, 25 bp, Homo sapien
ggttgggagttctcagtctaagtcc

SEQ ID NO: 109246 - DNA, 25 bp, Homo sapien
ggttgggagttcacagtctaagtcc

SEQ ID NO: 109247 - DNA, 25 bp, Homo sapien
ggaacggagttttattcgacaggac

SEQ ID NO: 109248 - DNA, 25 bp, Homo sapien
ggaacggagtttaattcgacaggac

SEQ ID NO: 109249 - DNA, 25 bp, Homo sapien
tgatcttaccggtgtatttggaccc

SEQ ID NO: 109250 - DNA, 25 bp, Homo sapien
tgatcttaccggagtatttggaccc

SEQ ID NO: 109251 - DNA, 25 bp, Homo sapien
ggtaccacccgtgtttgggtcctct

SEQ ID NO: 109252 - DNA, 25 bp, Homo sapien
ggtaccacccgtctttgggtcctct

SEQ ID NO: 109253 - DNA, 25 bp, Homo sapien
ggtccacggggcaacctttcgtcta

SEQ ID NO: 109254 - DNA, 25 bp, Homo sapien
ggtccacggggctacctttcgtcta

SEQ ID NO: 109255 - DNA, 25 bp, Homo sapien
ttccaaccgtagaacggtgtttttg

SEQ ID NO: 109256 - DNA, 25 bp, Homo sapien
ttccaaccgtagtacggtgtttttg

SEQ ID NO: 109257 - DNA, 25 bp, Homo sapien
tgtaaaccgtgtaagaggttcctgg

SEQ ID NO: 109258 - DNA, 25 bp, Homo sapien
tgtaaaccgtgttagaggttcctgg

SEQ ID NO: 109259 - DNA, 25 bp, Homo sapien
tgcatcgaccgagaggatccgtgtc

SEQ ID NO: 109260 - DNA, 25 bp, Homo sapien
tgcatcgaccgacaggatccgtgtc

SEQ ID NO: 109261 - DNA, 25 bp, Homo sapien
tcccggtgtgcgtggtctagtttat

SEQ ID NO: 109262 - DNA, 25 bp, Homo sapien
tcccggtgtgcgaggtctagtttat

SEQ ID NO: 109263 - DNA, 25 bp, Homo sapien
cgcttcgttggatcggggtcccttt

SEQ ID NO: 109264 - DNA, 25 bp, Homo sapien
cgcttcgttggaacggggtcccttt

SEQ ID NO: 109265 - DNA, 25 bp, Homo sapien
ggctcccgtgcaggacccgtgtctt

SEQ ID NO: 109266 - DNA, 25 bp, Homo sapien
ggctcccgtgcacgacccgtgtctt

SEQ ID NO: 109267 - DNA, 25 bp, Homo sapien
gttgactctgacatgtctctttctc

SEQ ID NO: 109268 - DNA, 25 bp, Homo sapien
gttgactctgacttgtctctttctc

SEQ ID NO: 109269 - DNA, 25 bp, Homo sapien
tctgtctgtctaaatcctttcgtcg

SEQ ID NO: 109270 - DNA, 25 bp, Homo sapien
tctgtctgtctatatcctttcgtcg

SEQ ID NO: 109271 - DNA, 25 bp, Homo sapien
ccttttcgtcaaacttacgtttcgg

SEQ ID NO: 109272 - DNA, 25 bp, Homo sapien
ccttttcgtcaatcttacgtttcgg

SEQ ID NO: 109273 - DNA, 25 bp, Homo sapien
gtttcgtataacgtgtaatgtctct

SEQ ID NO: 109274 - DNA, 25 bp, Homo sapien
gtttcgtataacctgtaatgtctct

SEQ ID NO: 109275 - DNA, 25 bp, Homo sapien
atcatgtctcttacgggacatgttt

SEQ ID NO: 109276 - DNA, 25 bp, Homo sapien
atcatgtctctttcgggacatgttt

SEQ ID NO: 109277 - DNA, 25 bp, Homo sapien
ctatctcccatttgcagacggtgcc

SEQ ID NO: 109278 - DNA, 25 bp, Homo sapien
ctatctcccattagcagacggtgcc

SEQ ID NO: 109279 - DNA, 25 bp, Homo sapien
gcaagtccgtccagacgttcacgat

SEQ ID NO: 109280 - DNA, 25 bp, Homo sapien
gcaagtccgtcctgacgttcacgat

SEQ ID NO: 109281 - DNA, 25 bp, Homo sapien
gagcgttatccgacgtgcctcaggt

SEQ ID NO: 109282 - DNA, 25 bp, Homo sapien
gagcgttatccgtcgtgcctcaggt

SEQ ID NO: 109283 - DNA, 25 bp, Homo sapien
ggactcgtaacctgggtccgccggt

SEQ ID NO: 109284 - DNA, 25 bp, Homo sapien
ggactcgtaaccagggtccgccggt

SEQ ID NO: 109285 - DNA, 25 bp, Homo sapien
gtaaatctcactgactccgaagtgt

SEQ ID NO: 109286 - DNA, 25 bp, Homo sapien
gtaaatctcactcactccgaagtgt

SEQ ID NO: 109287 - DNA, 25 bp, Homo sapien
cataaatgtgtacgtcaatcatggt

SEQ ID NO: 109288 - DNA, 25 bp, Homo sapien
cataaatgtgtaggtcaatcatggt

SEQ ID NO: 109289 - DNA, 25 bp, Homo sapien
aattatatgtctgcattcggtagtc

SEQ ID NO: 109290 - DNA, 25 bp, Homo sapien
aattatatgtctccattcggtagtc

SEQ ID NO: 109291 - DNA, 25 bp, Homo sapien
tattctcagtgcataacggtgtttc

SEQ ID NO: 109292 - DNA, 25 bp, Homo sapien
tattctcagtgcttaacggtgtttc

SEQ ID NO: 109293 - DNA, 25 bp, Homo sapien
taccagagacgttatgggagttact

SEQ ID NO: 109294 - DNA, 25 bp, Homo sapien
taccagagacgtaatgggagttact

SEQ ID NO: 109295 - DNA, 25 bp, Homo sapien
ctccgtgacagtgttcgcagtctct

SEQ ID NO: 109296 - DNA, 25 bp, Homo sapien
ctccgtgacagtcttcgcagtctct

SEQ ID NO: 109297 - DNA, 25 bp, Homo sapien
ctttcgttctaaccagtggcataac

SEQ ID NO: 109298 - DNA, 25 bp, Homo sapien
ctttcgttctaagcagtggcataac

SEQ ID NO: 109299 - DNA, 25 bp, Homo sapien
tcactcaaagggagtctcgacctcc

SEQ ID NO: 109300 - DNA, 25 bp, Homo sapien
tcactcaaagggtgtctcgacctcc

SEQ ID NO: 109301 - DNA, 25 bp, Homo sapien
tactcaagaaggtgagctcgatctt

SEQ ID NO: 109302 - DNA, 25 bp, Homo sapien
tactcaagaaggagagctcgatctt

SEQ ID NO: 109303 - DNA, 25 bp, Homo sapien
ccaccaaaatgtcagggacgtaatt

SEQ ID NO: 109304 - DNA, 25 bp, Homo sapien
ccaccaaaatgtgagggacgtaatt

SEQ ID NO: 109305 - DNA, 25 bp, Homo sapien
gcctaccaaacgtacacgagccaaa

SEQ ID NO: 109306 - DNA, 25 bp, Homo sapien
gcctaccaaacgaacacgagccaaa

SEQ ID NO: 109307 - DNA, 25 bp, Homo sapien
attcttcatcggacgcaactgagca

SEQ ID NO: 109308 - DNA, 25 bp, Homo sapien
attcttcatcggtcgcaactgagca

SEQ ID NO: 109309 - DNA, 25 bp, Homo sapien
ttttcgtccccaggacttgtcacca

SEQ ID NO: 109310 - DNA, 25 bp, Homo sapien
ttttcgtccccacgacttgtcacca

SEQ ID NO: 109311 - DNA, 25 bp, Homo sapien
gcaacgtatacacactacccgcgtg

SEQ ID NO: 109312 - DNA, 25 bp, Homo sapien
gcaacgtatacagactacccgcgtg

SEQ ID NO: 109313 - DNA, 25 bp, Homo sapien
cagtgtgacataaaaacactcgtgg

SEQ ID NO: 109314 - DNA, 25 bp, Homo sapien
cagtgtgacatataaacactcgtgg

SEQ ID NO: 109315 - DNA, 25 bp, Homo sapien
ccgtggacgatacttaaatcgtgtt

SEQ ID NO: 109316 - DNA, 25 bp, Homo sapien
ccgtggacgatagttaaatcgtgtt

SEQ ID NO: 109317 - DNA, 25 bp, Homo sapien
ccctctcggttcttcaacaggtgcg

SEQ ID NO: 109318 - DNA, 25 bp, Homo sapien
ccctctcggttcatcaacaggtgcg

SEQ ID NO: 109319 - DNA, 25 bp, Homo sapien
ccccgggagactcgaacgagaactc

SEQ ID NO: 109320 - DNA, 25 bp, Homo sapien
ccccgggagactggaacgagaactc

SEQ ID NO: 109321 - DNA, 25 bp, Homo sapien
caagaacgacagcaagacaacgtcg

SEQ ID NO: 109322 - DNA, 25 bp, Homo sapien
caagaacgacaggaagacaacgtcg

SEQ ID NO: 109323 - DNA, 25 bp, Homo sapien
gagagacgtcacgtcgaatgtcctt

SEQ ID NO: 109324 - DNA, 25 bp, Homo sapien
gagagacgtcacctcgaatgtcctt

SEQ ID NO: 109325 - DNA, 25 bp, Homo sapien
agtccaggacgtacacccatgcatg

SEQ ID NO: 109326 - DNA, 25 bp, Homo sapien
agtccaggacgttcacccatgcatg

SEQ ID NO: 109327 - DNA, 25 bp, Homo sapien
cacgggaggtcttacctcgggactc

SEQ ID NO: 109328 - DNA, 25 bp, Homo sapien
cacgggaggtctaacctcgggactc

SEQ ID NO: 109329 - DNA, 25 bp, Homo sapien
tgcgaggtcgaacaacccggacgga

SEQ ID NO: 109330 - DNA, 25 bp, Homo sapien
tgcgaggtcgaagaacccggacgga

SEQ ID NO: 109331 - DNA, 25 bp, Homo sapien
ccaggtccctgaaccgtttagtgtc

SEQ ID NO: 109332 - DNA, 25 bp, Homo sapien
ccaggtccctgatccgtttagtgtc

SEQ ID NO: 109333 - DNA, 25 bp, Homo sapien
gaagaggttccagcacctccgatgc

SEQ ID NO: 109334 - DNA, 25 bp, Homo sapien
gaagaggttccaccacctccgatgc

SEQ ID NO: 109335 - DNA, 25 bp, Homo sapien
ggtgaggtgccactaccccgagacc

SEQ ID NO: 109336 - DNA, 25 bp, Homo sapien
ggtgaggtgccagtaccccgagacc

SEQ ID NO: 109337 - DNA, 25 bp, Homo sapien
ttggggtcctgagtcgacctcaacc

SEQ ID NO: 109338 - DNA, 25 bp, Homo sapien
ttggggtcctgactcgacctcaacc

SEQ ID NO: 109339 - DNA, 25 bp, Homo sapien
ctgggagtgtctcttcgaccctttc

SEQ ID NO: 109340 - DNA, 25 bp, Homo sapien
ctgggagtgtctgttcgaccctttc

SEQ ID NO: 109341 - DNA, 25 bp, Homo sapien
ctagttgtgtgtgtgtgttcccttg

SEQ ID NO: 109342 - DNA, 25 bp, Homo sapien
ctagttgtgtgtctgtgttcccttg

SEQ ID NO: 109343 - DNA, 25 bp, Homo sapien
catgtcctggtcgtgcttccgcggg

SEQ ID NO: 109344 - DNA, 25 bp, Homo sapien
catgtcctggtcctgcttccgcggg

SEQ ID NO: 109345 - DNA, 25 bp, Homo sapien
ccctcctttctgtagacacatagtg

SEQ ID NO: 109346 - DNA, 25 bp, Homo sapien
ccctcctttctgaagacacatagtg

SEQ ID NO: 109347 - DNA, 25 bp, Homo sapien
cttcattcgttctaaacggtcaagg

SEQ ID NO: 109348 - DNA, 25 bp, Homo sapien
cttcattcgttcaaaacggtcaagg

SEQ ID NO: 109349 - DNA, 25 bp, Homo sapien
cccggtgtccctcgttaggcactgg

SEQ ID NO: 109350 - DNA, 25 bp, Homo sapien
cccggtgtccctggttaggcactgg

SEQ ID NO: 109351 - DNA, 25 bp, Homo sapien
ggggtgctatcctgtttccctagtt

SEQ ID NO: 109352 - DNA, 25 bp, Homo sapien
ggggtgctatccagtttccctagtt

SEQ ID NO: 109353 - DNA, 25 bp, Homo sapien
tcggggtcacccaacattgacacta

SEQ ID NO: 109354 - DNA, 25 bp, Homo sapien
tcggggtcaccctacattgacacta

SEQ ID NO: 109355 - DNA, 25 bp, Homo sapien
ggaggtccacgctacatctaccaca

SEQ ID NO: 109356 - DNA, 25 bp, Homo sapien
ggaggtccacgcaacatctaccaca

SEQ ID NO: 109357 - DNA, 25 bp, Homo sapien
gcgagtctgaactacgactgacccc

SEQ ID NO: 109358 - DNA, 25 bp, Homo sapien
gcgagtctgaacaacgactgacccc

SEQ ID NO: 109359 - DNA, 25 bp, Homo sapien
cctcagcgaggtactcgagccggaa

SEQ ID NO: 109360 - DNA, 25 bp, Homo sapien
cctcagcgaggttctcgagccggaa

SEQ ID NO: 109361 - DNA, 25 bp, Homo sapien
cgctcaggtggtaccggatcgattt

SEQ ID NO: 109362 - DNA, 25 bp, Homo sapien
cgctcaggtggttccggatcgattt

SEQ ID NO: 109363 - DNA, 25 bp, Homo sapien
cccggtggacgtcctcgagaaggca

SEQ ID NO: 109364 - DNA, 25 bp, Homo sapien
cccggtggacgtgctcgagaaggca

SEQ ID NO: 109365 - DNA, 25 bp, Homo sapien
atctctctcaactgccacaggagca

SEQ ID NO: 109366 - DNA, 25 bp, Homo sapien
atctctctcaacagccacaggagca

SEQ ID NO: 109367 - DNA, 25 bp, Homo sapien
tgcctaagtaggtcccaggacctct

SEQ ID NO: 109368 - DNA, 25 bp, Homo sapien
tgcctaagtaggacccaggacctct

SEQ ID NO: 109369 - DNA, 25 bp, Homo sapien
ctctgacagtgaacctccgggactt

SEQ ID NO: 109370 - DNA, 25 bp, Homo sapien
ctctgacagtgatcctccgggactt

SEQ ID NO: 109371 - DNA, 25 bp, Homo sapien
gaaccctggcatcctacagggagag

SEQ ID NO: 109372 - DNA, 25 bp, Homo sapien
gaaccctggcatgctacagggagag

SEQ ID NO: 109373 - DNA, 25 bp, Homo sapien
aaacgccacgggtgcctacgggagc

SEQ ID NO: 109374 - DNA, 25 bp, Homo sapien
aaacgccacgggagcctacgggagc

SEQ ID NO: 109375 - DNA, 25 bp, Homo sapien
tgtaccttgggtcaatcacaggatc

SEQ ID NO: 109376 - DNA, 25 bp, Homo sapien
tgtaccttgggtgaatcacaggatc

SEQ ID NO: 109377 - DNA, 25 bp, Homo sapien
tcacttccgggatccgacagcagta

SEQ ID NO: 109378 - DNA, 25 bp, Homo sapien
tcacttccgggaaccgacagcagta

SEQ ID NO: 109379 - DNA, 25 bp, Homo sapien
cctactggacaggatctcaccgggt

SEQ ID NO: 109380 - DNA, 25 bp, Homo sapien
cctactggacagcatctcaccgggt

SEQ ID NO: 109381 - DNA, 25 bp, Homo sapien
cgtacgaccaacatcaaccacgagt

SEQ ID NO: 109382 - DNA, 25 bp, Homo sapien
cgtacgaccaacttcaaccacgagt

SEQ ID NO: 109383 - DNA, 25 bp, Homo sapien
cacaaccaccacatctgagaaccgg

SEQ ID NO: 109384 - DNA, 25 bp, Homo sapien
cacaaccaccacttctgagaaccgg

SEQ ID NO: 109385 - DNA, 25 bp, Homo sapien
taccaatctccctatcgatgctcgg

SEQ ID NO: 109386 - DNA, 25 bp, Homo sapien
taccaatctcccaatcgatgctcgg

SEQ ID NO: 109387 - DNA, 25 bp, Homo sapien
gtttgagtctccaacaaaaggtaag

SEQ ID NO: 109388 - DNA, 25 bp, Homo sapien
gtttgagtctcctacaaaaggtaag

SEQ ID NO: 109389 - DNA, 25 bp, Homo sapien
ctttttaatcgtctctaagacggaa

SEQ ID NO: 109390 - DNA, 25 bp, Homo sapien
ctttttaatcgtgtctaagacggaa

SEQ ID NO: 109391 - DNA, 25 bp, Homo sapien
gttgtgactcgtgtcacggaagaag

SEQ ID NO: 109392 - DNA, 25 bp, Homo sapien
gttgtgactcgtctcacggaagaag

SEQ ID NO: 109393 - DNA, 25 bp, Homo sapien
ttgtacatgtcaccttaatagactg

SEQ ID NO: 109394 - DNA, 25 bp, Homo sapien
ttgtacatgtcagcttaatagactg

SEQ ID NO: 109395 - DNA, 25 bp, Homo sapien
gtccctacatgtgtaccaaagacta

SEQ ID NO: 109396 - DNA, 25 bp, Homo sapien
gtccctacatgtctaccaaagacta

SEQ ID NO: 109397 - DNA, 25 bp, Homo sapien
gggggtaacagacatacaacgaaag

SEQ ID NO: 109398 - DNA, 25 bp, Homo sapien
gggggtaacagagatacaacgaaag

SEQ ID NO: 109399 - DNA, 25 bp, Homo sapien
aggtaaagacggagagtacacctcg

SEQ ID NO: 109400 - DNA, 25 bp, Homo sapien
aggtaaagacggtgagtacacctcg

SEQ ID NO: 109401 - DNA, 25 bp, Homo sapien
cgtccgtgaacatctctaaacaccg

SEQ ID NO: 109402 - DNA, 25 bp, Homo sapien
cgtccgtgaacaactctaaacaccg

SEQ ID NO: 109403 - DNA, 25 bp, Homo sapien
gttagtcgacaccgactccaaggtt

SEQ ID NO: 109404 - DNA, 25 bp, Homo sapien
gttagtcgacacggactccaaggtt

SEQ ID NO: 109405 - DNA, 25 bp, Homo sapien
gtcttcaaccgggacagtcagggtg

SEQ ID NO: 109406 - DNA, 25 bp, Homo sapien
gtcttcaaccggcacagtcagggtg

SEQ ID NO: 109407 - DNA, 25 bp, Homo sapien
acacgtagaccgaccatctgagagc

SEQ ID NO: 109408 - DNA, 25 bp, Homo sapien
acacgtagaccgtccatctgagagc

SEQ ID NO: 109409 - DNA, 25 bp, Homo sapien
caatcgtactaggtaccaataagga

SEQ ID NO: 109410 - DNA, 25 bp, Homo sapien
caatcgtactagctaccaataagga

SEQ ID NO: 109411 - DNA, 25 bp, Homo sapien
cgaaagagaccaagtacatccggac

SEQ ID NO: 109412 - DNA, 25 bp, Homo sapien
cgaaagagaccatgtacatccggac

SEQ ID NO: 109413 - DNA, 25 bp, Homo sapien
cgtatgtaaggaattactaaccaga

SEQ ID NO: 109414 - DNA, 25 bp, Homo sapien
cgtatgtaaggatttactaaccaga

SEQ ID NO: 109415 - DNA, 25 bp, Homo sapien
tttcaaggaggtgagtacccagtgt

SEQ ID NO: 109416 - DNA, 25 bp, Homo sapien
tttcaaggaggtcagtacccagtgt

SEQ ID NO: 109417 - DNA, 25 bp, Homo sapien
ttttcgtaagatggtaatcacacaa

SEQ ID NO: 109418 - DNA, 25 bp, Homo sapien
ttttcgtaagatcgtaatcacacaa

SEQ ID NO: 109419 - DNA, 25 bp, Homo sapien
tccgtttcacttcgttttaacagag

SEQ ID NO: 109420 - DNA, 25 bp, Homo sapien
tccgtttcacttggttttaacagag

SEQ ID NO: 109421 - DNA, 25 bp, Homo sapien
ttgttttcagtgtgaccgttactaa

SEQ ID NO: 109422 - DNA, 25 bp, Homo sapien
ttgttttcagtgagaccgttactaa

SEQ ID NO: 109423 - DNA, 25 bp, Homo sapien
cgaatgtcagtgagactccacagtt

SEQ ID NO: 109424 - DNA, 25 bp, Homo sapien
cgaatgtcagtgtgactccacagtt

SEQ ID NO: 109425 - DNA, 25 bp, Homo sapien
cgtaatgtttggacgtcgaacggtt

SEQ ID NO: 109426 - DNA, 25 bp, Homo sapien
cgtaatgtttggtcgtcgaacggtt

SEQ ID NO: 109427 - DNA, 25 bp, Homo sapien
gttctccttttgtgcgtcgccctgt

SEQ ID NO: 109428 - DNA, 25 bp, Homo sapien
gttctccttttgagcgtcgccctgt

SEQ ID NO: 109429 - DNA, 25 bp, Homo sapien
gtatcttttccgtccgggcaccgta

SEQ ID NO: 109430 - DNA, 25 bp, Homo sapien
gtatcttttccgaccgggcaccgta

SEQ ID NO: 109431 - DNA, 25 bp, Homo sapien
aatagggtccaggaacccgaaccta

SEQ ID NO: 109432 - DNA, 25 bp, Homo sapien
aatagggtccagcaacccgaaccta

SEQ ID NO: 109433 - DNA, 25 bp, Homo sapien
gatgtaggtaattcactccaaattt

SEQ ID NO: 109434 - DNA, 25 bp, Homo sapien
gatgtaggtaatacactccaaattt

SEQ ID NO: 109435 - DNA, 25 bp, Homo sapien
gtgttctaccttctcgtgacaattt

SEQ ID NO: 109436 - DNA, 25 bp, Homo sapien
gtgttctaccttgtcgtgacaattt

SEQ ID NO: 109437 - DNA, 25 bp, Homo sapien
gaaagtctacttcaactgaagatga

SEQ ID NO: 109438 - DNA, 25 bp, Homo sapien
gaaagtctacttgaactgaagatga

SEQ ID NO: 109439 - DNA, 25 bp, Homo sapien
gataggcacgtgaggacaagactgg

SEQ ID NO: 109440 - DNA, 25 bp, Homo sapien
gataggcacgtgtggacaagactgg

SEQ ID NO: 109441 - DNA, 25 bp, Homo sapien
agtaaggctcggcggaaccgacaga

SEQ ID NO: 109442 - DNA, 25 bp, Homo sapien
agtaaggctcgggggaaccgacaga

SEQ ID NO: 109443 - DNA, 25 bp, Homo sapien
gagttggtcacttcggccccggatt

SEQ ID NO: 109444 - DNA, 25 bp, Homo sapien
gagttggtcactacggccccggatt

SEQ ID NO: 109445 - DNA, 25 bp, Homo sapien
ggtgaacctactcttccatcgtcaa

SEQ ID NO: 109446 - DNA, 25 bp, Homo sapien
ggtgaacctactgttccatcgtcaa

SEQ ID NO: 109447 - DNA, 25 bp, Homo sapien
gttaatactttgtttcttgtcgaac

SEQ ID NO: 109448 - DNA, 25 bp, Homo sapien
gttaatactttgattcttgtcgaac

SEQ ID NO: 109449 - DNA, 25 bp, Homo sapien
ttttcaatttggatctatcggagtc

SEQ ID NO: 109450 - DNA, 25 bp, Homo sapien
ttttcaatttggttctatcggagtc

SEQ ID NO: 109451 - DNA, 25 bp, Homo sapien
gtctcttgtcgtctcctgtcttcgg

SEQ ID NO: 109452 - DNA, 25 bp, Homo sapien
gtctcttgtcgtgtcctgtcttcgg

SEQ ID NO: 109453 - DNA, 25 bp, Homo sapien
gtctacgttcttcgtttgttctgcg

SEQ ID NO: 109454 - DNA, 25 bp, Homo sapien
gtctacgttcttggtttgttctgcg

SEQ ID NO: 109455 - DNA, 25 bp, Homo sapien
aatgtcgatgtgagattcttgtcca

SEQ ID NO: 109456 - DNA, 25 bp, Homo sapien
aatgtcgatgtgtgattcttgtcca

SEQ ID NO: 109457 - DNA, 25 bp, Homo sapien
attcatgtgtttcatgtgttcacat

SEQ ID NO: 109458 - DNA, 25 bp, Homo sapien
attcatgtgtttgatgtgttcacat

SEQ ID NO: 109459 - DNA, 25 bp, Homo sapien
cgaacttaggtttgtttgctttagc

SEQ ID NO: 109460 - DNA, 25 bp, Homo sapien
cgaacttaggttagtttgctttagc

SEQ ID NO: 109461 - DNA, 25 bp, Homo sapien
cagaacggggttctatgtttttgac

SEQ ID NO: 109462 - DNA, 25 bp, Homo sapien
cagaacggggttgtatgtttttgac

SEQ ID NO: 109463 - DNA, 25 bp, Homo sapien
gagacacatgatcttttgttgtttc

SEQ ID NO: 109464 - DNA, 25 bp, Homo sapien
gagacacatgatgttttgttgtttc

SEQ ID NO: 109465 - DNA, 25 bp, Homo sapien
agtaaaaatgttctcttctgtgttc

SEQ ID NO: 109466 - DNA, 25 bp, Homo sapien
agtaaaaatgttgtcttctgtgttc

SEQ ID NO: 109467 - DNA, 25 bp, Homo sapien
atcccaatcctcctcatggtgtctg

SEQ ID NO: 109468 - DNA, 25 bp, Homo sapien
atcccaatcctcgtcatggtgtctg

SEQ ID NO: 109469 - DNA, 25 bp, Homo sapien
agcgtacccccttaagaccaggggg

SEQ ID NO: 109470 - DNA, 25 bp, Homo sapien
agcgtaccccctaaagaccaggggg

SEQ ID NO: 109471 - DNA, 25 bp, Homo sapien
gaatccccacagagatcatctaaag

SEQ ID NO: 109472 - DNA, 25 bp, Homo sapien
gaatccccacagtgatcatctaaag

SEQ ID NO: 109473 - DNA, 25 bp, Homo sapien
tgtctggcgcaggaactcattaaac

SEQ ID NO: 109474 - DNA, 25 bp, Homo sapien
tgtctggcgcagcaactcattaaac

SEQ ID NO: 109475 - DNA, 25 bp, Homo sapien
gggtgagcacagacccgtttcccac

SEQ ID NO: 109476 - DNA, 25 bp, Homo sapien
gggtgagcacagtcccgtttcccac

SEQ ID NO: 109477 - DNA, 25 bp, Homo sapien
ggtgcgacgaaatgccgctgcagca

SEQ ID NO: 109478 - DNA, 25 bp, Homo sapien
ggtgcgacgaaaagccgctgcagca

SEQ ID NO: 109479 - DNA, 25 bp, Homo sapien
aggcaaagagtagtgtctggacttc

SEQ ID NO: 109480 - DNA, 25 bp, Homo sapien
aggcaaagagtactgtctggacttc

SEQ ID NO: 109481 - DNA, 25 bp, Homo sapien
cttgagaataggtcctttaagtttc

SEQ ID NO: 109482 - DNA, 25 bp, Homo sapien
cttgagaataggacctttaagtttc

SEQ ID NO: 109483 - DNA, 25 bp, Homo sapien
cagaaacagggagtgtgatgtcgcc

SEQ ID NO: 109484 - DNA, 25 bp, Homo sapien
cagaaacagggactgtgatgtcgcc

SEQ ID NO: 109485 - DNA, 25 bp, Homo sapien
cagacattgagtaggggtatcaccc

SEQ ID NO: 109486 - DNA, 25 bp, Homo sapien
cagacattgagttggggtatcaccc

SEQ ID NO: 109487 - DNA, 25 bp, Homo sapien
gcgagttggtccataggtggtccac

SEQ ID NO: 109488 - DNA, 25 bp, Homo sapien
gcgagttggtccttaggtggtccac

SEQ ID NO: 109489 - DNA, 25 bp, Homo sapien
cccgtgtactttactttggttcatg

SEQ ID NO: 109490 - DNA, 25 bp, Homo sapien
cccgtgtacttttctttggttcatg

SEQ ID NO: 109491 - DNA, 25 bp, Homo sapien
cgtaggagtccctcggaatatgtat

SEQ ID NO: 109492 - DNA, 25 bp, Homo sapien
cgtaggagtcccacggaatatgtat

SEQ ID NO: 109493 - DNA, 25 bp, Homo sapien
agactccacgacctaacagtgtgag

SEQ ID NO: 109494 - DNA, 25 bp, Homo sapien
agactccacgacgtaacagtgtgag

SEQ ID NO: 109495 - DNA, 25 bp, Homo sapien
agatacatctcagctacccgggtga

SEQ ID NO: 109496 - DNA, 25 bp, Homo sapien
agatacatctcacctacccgggtga

SEQ ID NO: 109497 - DNA, 25 bp, Homo sapien
tcacccgtcaggtcgcaccgtgagt

SEQ ID NO: 109498 - DNA, 25 bp, Homo sapien
tcacccgtcaggacgcaccgtgagt

SEQ ID NO: 109499 - DNA, 25 bp, Homo sapien
gcgacggtcgtttccgcacgtccag

SEQ ID NO: 109500 - DNA, 25 bp, Homo sapien
gcgacggtcgttaccgcacgtccag

SEQ ID NO: 109501 - DNA, 25 bp, Homo sapien
ggtcggtggtcgaacgtactagagg

SEQ ID NO: 109502 - DNA, 25 bp, Homo sapien
ggtcggtggtcgtacgtactagagg

SEQ ID NO: 109503 - DNA, 25 bp, Homo sapien
gctctataccgggcgcgacctcaaa

SEQ ID NO: 109504 - DNA, 25 bp, Homo sapien
gctctataccggccgcgacctcaaa

SEQ ID NO: 109505 - DNA, 25 bp, Homo sapien
gacacatccctaaataacagtacat

SEQ ID NO: 109506 - DNA, 25 bp, Homo sapien
gacacatccctatataacagtacat

SEQ ID NO: 109507 - DNA, 25 bp, Homo sapien
cgattctccctatgacacttagtga

SEQ ID NO: 109508 - DNA, 25 bp, Homo sapien
cgattctccctaagacacttagtga

SEQ ID NO: 109509 - DNA, 25 bp, Homo sapien
gtctctatcttttatcgtctctgag

SEQ ID NO: 109510 - DNA, 25 bp, Homo sapien
gtctctatctttaatcgtctctgag

SEQ ID NO: 109511 - DNA, 25 bp, Homo sapien
agggtctccttggattctctggtgt

SEQ ID NO: 109512 - DNA, 25 bp, Homo sapien
agggtctccttgcattctctggtgt

SEQ ID NO: 109513 - DNA, 25 bp, Homo sapien
gctgaactactacttcttctaggtt

SEQ ID NO: 109514 - DNA, 25 bp, Homo sapien
gctgaactactagttcttctaggtt

SEQ ID NO: 109515 - DNA, 25 bp, Homo sapien
gggtaccggaacctactctacggcc

SEQ ID NO: 109516 - DNA, 25 bp, Homo sapien
gggtaccggaacgtactctacggcc

SEQ ID NO: 109517 - DNA, 25 bp, Homo sapien
gcgtaccgcgagtcctcaggagcgt

SEQ ID NO: 109518 - DNA, 25 bp, Homo sapien
gcgtaccgcgagacctcaggagcgt

SEQ ID NO: 109519 - DNA, 25 bp, Homo sapien
ttcttcctcggcagcctcaggtcgt

SEQ ID NO: 109520 - DNA, 25 bp, Homo sapien
ttcttcctcggctgcctcaggtcgt

SEQ ID NO: 109521 - DNA, 25 bp, Homo sapien
atctcctctgtctggtactccgggt

SEQ ID NO: 109522 - DNA, 25 bp, Homo sapien
atctcctctgtcaggtactccgggt

SEQ ID NO: 109523 - DNA, 25 bp, Homo sapien
cggtccggcttccagtacccggtgt

SEQ ID NO: 109524 - DNA, 25 bp, Homo sapien
cggtccggcttcgagtacccggtgt

SEQ ID NO: 109525 - DNA, 25 bp, Homo sapien
aggaatccgccgtaacgcttcgagc

SEQ ID NO: 109526 - DNA, 25 bp, Homo sapien
aggaatccgccgaaacgcttcgagc

SEQ ID NO: 109527 - DNA, 25 bp, Homo sapien
gacgacgatccgaaagagattcctc

SEQ ID NO: 109528 - DNA, 25 bp, Homo sapien
gacgacgatccgtaagagattcctc

SEQ ID NO: 109529 - DNA, 25 bp, Homo sapien
tttaaggacaaataacaacctgttg

SEQ ID NO: 109530 - DNA, 25 bp, Homo sapien
tttaaggacaaaaaacaacctgttg

SEQ ID NO: 109531 - DNA, 25 bp, Homo sapien
gtggaggagattacacccgtcctag

SEQ ID NO: 109532 - DNA, 25 bp, Homo sapien
gtggaggagatttcacccgtcctag

SEQ ID NO: 109533 - DNA, 25 bp, Homo sapien
tgaaggtgacgagtccgcagtccga

SEQ ID NO: 109534 - DNA, 25 bp, Homo sapien
tgaaggtgacgactccgcagtccga

SEQ ID NO: 109535 - DNA, 25 bp, Homo sapien
attttcgtcgaggttcacgttttca

SEQ ID NO: 109536 - DNA, 25 bp, Homo sapien
attttcgtcgagcttcacgttttca

SEQ ID NO: 109537 - DNA, 25 bp, Homo sapien
ttttcgagactcgtagtccgttgag

SEQ ID NO: 109538 - DNA, 25 bp, Homo sapien
ttttcgagactcctagtccgttgag

SEQ ID NO: 109539 - DNA, 25 bp, Homo sapien
aagtttctcgttaaagtgtctttac

SEQ ID NO: 109540 - DNA, 25 bp, Homo sapien
aagtttctcgtttaagtgtctttac

SEQ ID NO: 109541 - DNA, 25 bp, Homo sapien
gtacttttccggataatgtgtttac

SEQ ID NO: 109542 - DNA, 25 bp, Homo sapien
gtacttttccggttaatgtgtttac

SEQ ID NO: 109543 - DNA, 25 bp, Homo sapien
attattccggtgttttactccaacg

SEQ ID NO: 109544 - DNA, 25 bp, Homo sapien
attattccggtgatttactccaacg

SEQ ID NO: 109545 - DNA, 25 bp, Homo sapien
tcttatgagggatttacgtcatcta

SEQ ID NO: 109546 - DNA, 25 bp, Homo sapien
tcttatgagggaattacgtcatcta

SEQ ID NO: 109547 - DNA, 25 bp, Homo sapien
tgaccaaaccctagtacactgtcgt

SEQ ID NO: 109548 - DNA, 25 bp, Homo sapien
tgaccaaacccttgtacactgtcgt

SEQ ID NO: 109549 - DNA, 25 bp, Homo sapien
cttatagaaaacaacttccgaaagg

SEQ ID NO: 109550 - DNA, 25 bp, Homo sapien
cttatagaaaactacttccgaaagg

SEQ ID NO: 109551 - DNA, 25 bp, Homo sapien
ttaaaggtacagcttcgttacaaga

SEQ ID NO: 109552 - DNA, 25 bp, Homo sapien
ttaaaggtacaggttcgttacaaga

SEQ ID NO: 109553 - DNA, 25 bp, Homo sapien
ggacaggtgacagtatcgctcagaa

SEQ ID NO: 109554 - DNA, 25 bp, Homo sapien
ggacaggtgacactatcgctcagaa

SEQ ID NO: 109555 - DNA, 25 bp, Homo sapien
acgaccgaagaccactggccggaga

SEQ ID NO: 109556 - DNA, 25 bp, Homo sapien
acgaccgaagacgactggccggaga

SEQ ID NO: 109557 - DNA, 25 bp, Homo sapien
aatcgtattttactgtcgtcgggta

SEQ ID NO: 109558 - DNA, 25 bp, Homo sapien
aatcgtattttagtgtcgtcgggta

SEQ ID NO: 109559 - DNA, 25 bp, Homo sapien
atatgttagttcacactgttggcga

SEQ ID NO: 109560 - DNA, 25 bp, Homo sapien
atatgttagttctcactgttggcga

SEQ ID NO: 109561 - DNA, 25 bp, Homo sapien
gagggtcggtccttcatgttgaaag

SEQ ID NO: 109562 - DNA, 25 bp, Homo sapien
gagggtcggtccatcatgttgaaag

SEQ ID NO: 109563 - DNA, 25 bp, Homo sapien
cggcctaccgcgacatcatggtcag

SEQ ID NO: 109564 - DNA, 25 bp, Homo sapien
cggcctaccgcgtcatcatggtcag

SEQ ID NO: 109565 - DNA, 25 bp, Homo sapien
cttcctcccgacgtggcgagacgga

SEQ ID NO: 109566 - DNA, 25 bp, Homo sapien
cttcctcccgacctggcgagacgga

SEQ ID NO: 109567 - DNA, 25 bp, Homo sapien
tcctacgagccttgagcaactcgac

SEQ ID NO: 109568 - DNA, 25 bp, Homo sapien
tcctacgagcctagagcaactcgac

SEQ ID NO: 109569 - DNA, 25 bp, Homo sapien
cacacgacggccaagtttatgagtc

SEQ ID NO: 109570 - DNA, 25 bp, Homo sapien
cacacgacggcctagtttatgagtc

SEQ ID NO: 109571 - DNA, 25 bp, Homo sapien
cgacaggacgttcagtttgtcggag

SEQ ID NO: 109572 - DNA, 25 bp, Homo sapien
cgacaggacgttgagtttgtcggag

SEQ ID NO: 109573 - DNA, 25 bp, Homo sapien
taaggttgttgttgttcgtagtgga

SEQ ID NO: 109574 - DNA, 25 bp, Homo sapien
taaggttgttgtagttcgtagtgga

SEQ ID NO: 109575 - DNA, 25 bp, Homo sapien
gtcgttttgtatgccgagtagtata

SEQ ID NO: 109576 - DNA, 25 bp, Homo sapien
gtcgttttgtatcccgagtagtata

SEQ ID NO: 109577 - DNA, 25 bp, Homo sapien
gggaggtccacctttctttgcgaac

SEQ ID NO: 109578 - DNA, 25 bp, Homo sapien
gggaggtccaccattctttgcgaac

SEQ ID NO: 109579 - DNA, 25 bp, Homo sapien
gaaggtccaccactcctggcgagag

SEQ ID NO: 109580 - DNA, 25 bp, Homo sapien
gaaggtccaccagtcctggcgagag

SEQ ID NO: 109581 - DNA, 25 bp, Homo sapien
gatgtccttctggtgactcggacaa

SEQ ID NO: 109582 - DNA, 25 bp, Homo sapien
gatgtccttctgctgactcggacaa

SEQ ID NO: 109583 - DNA, 25 bp, Homo sapien
gtcctgtcgggaagacacgacagct

SEQ ID NO: 109584 - DNA, 25 bp, Homo sapien
gtcctgtcgggatgacacgacagct

SEQ ID NO: 109585 - DNA, 25 bp, Homo sapien
gacctagtcgaggtaggaccctgtt

SEQ ID NO: 109586 - DNA, 25 bp, Homo sapien
gacctagtcgagctaggaccctgtt

SEQ ID NO: 109587 - DNA, 25 bp, Homo sapien
tcggtcttggtagtgagtacccacc

SEQ ID NO: 109588 - DNA, 25 bp, Homo sapien
tcggtcttggtactgagtacccacc

SEQ ID NO: 109589 - DNA, 25 bp, Homo sapien
aagacttagatttagagatctccac

SEQ ID NO: 109590 - DNA, 25 bp, Homo sapien
aagacttagattaagagatctccac

SEQ ID NO: 109591 - DNA, 25 bp, Homo sapien
gtagtaaaagaatacagtgaccctg

SEQ ID NO: 109592 - DNA, 25 bp, Homo sapien
gtagtaaaagaaaacagtgaccctg

SEQ ID NO: 109593 - DNA, 25 bp, Homo sapien
gaatcagaagaagtacttgcaccgg

SEQ ID NO: 109594 - DNA, 25 bp, Homo sapien
gaatcagaagaactacttgcaccgg

SEQ ID NO: 109595 - DNA, 25 bp, Homo sapien
acttggaacataactgtaacgacga

SEQ ID NO: 109596 - DNA, 25 bp, Homo sapien
acttggaacatatctgtaacgacga

SEQ ID NO: 109597 - DNA, 25 bp, Homo sapien
ccgttacgtgtcgttccagaggaca

SEQ ID NO: 109598 - DNA, 25 bp, Homo sapien
ccgttacgtgtccttccagaggaca

SEQ ID NO: 109599 - DNA, 25 bp, Homo sapien
cctctagggtcgaccgaccgagtca

SEQ ID NO: 109600 - DNA, 25 bp, Homo sapien
cctctagggtcgtccgaccgagtca

SEQ ID NO: 109601 - DNA, 25 bp, Homo sapien
tatgtgtgtaattccaaacacccta

SEQ ID NO: 109602 - DNA, 25 bp, Homo sapien
tatgtgtgtaataccaaacacccta

SEQ ID NO: 109603 - DNA, 25 bp, Homo sapien
gtggtaaaaatacaagacctcactc

SEQ ID NO: 109604 - DNA, 25 bp, Homo sapien
gtggtaaaaatagaagacctcactc

SEQ ID NO: 109605 - DNA, 25 bp, Homo sapien
ttagaagaaatcgtcgaaacacaca

SEQ ID NO: 109606 - DNA, 25 bp, Homo sapien
ttagaagaaatcctcgaaacacaca

SEQ ID NO: 109607 - DNA, 25 bp, Homo sapien
actgatatatgtctgtgtccacacc

SEQ ID NO: 109608 - DNA, 25 bp, Homo sapien
actgatatatgtgtgtgtccacacc

SEQ ID NO: 109609 - DNA, 25 bp, Homo sapien
gtgattacagtaaggcgccgacctc

SEQ ID NO: 109610 - DNA, 25 bp, Homo sapien
gtgattacagtatggcgccgacctc

SEQ ID NO: 109611 - DNA, 25 bp, Homo sapien
tggttacagttatcccaccgactgc

SEQ ID NO: 109612 - DNA, 25 bp, Homo sapien
tggttacagttaacccaccgactgc

SEQ ID NO: 109613 - DNA, 25 bp, Homo sapien
gtcctcctggtatccggtccggtgg

SEQ ID NO: 109614 - DNA, 25 bp, Homo sapien
gtcctcctggtaaccggtccggtgg

SEQ ID NO: 109615 - DNA, 25 bp, Homo sapien
ctctggtcgtcgtccgagttctggg

SEQ ID NO: 109616 - DNA, 25 bp, Homo sapien
ctctggtcgtcgaccgagttctggg

SEQ ID NO: 109617 - DNA, 25 bp, Homo sapien
tacccgtgtataccatattgttagt

SEQ ID NO: 109618 - DNA, 25 bp, Homo sapien
tacccgtgtatagcatattgttagt

SEQ ID NO: 109619 - DNA, 25 bp, Homo sapien
tactttgtacgaagtctctatgttt

SEQ ID NO: 109620 - DNA, 25 bp, Homo sapien
tactttgtacgatgtctctatgttt

SEQ ID NO: 109621 - DNA, 25 bp, Homo sapien
ctaagtgtgtaaacgtatcgttaca

SEQ ID NO: 109622 - DNA, 25 bp, Homo sapien
ctaagtgtgtaatcgtatcgttaca

SEQ ID NO: 109623 - DNA, 25 bp, Homo sapien
actctcactcttaagctaggttcag

SEQ ID NO: 109624 - DNA, 25 bp, Homo sapien
actctcactctttagctaggttcag

SEQ ID NO: 109625 - DNA, 25 bp, Homo sapien
tctgagaatctcgtcttcacacagt

SEQ ID NO: 109626 - DNA, 25 bp, Homo sapien
tctgagaatctcctcttcacacagt

SEQ ID NO: 109627 - DNA, 25 bp, Homo sapien
atctatgacccgttcctgacagtgt

SEQ ID NO: 109628 - DNA, 25 bp, Homo sapien
atctatgacccgatcctgacagtgt

SEQ ID NO: 109629 - DNA, 25 bp, Homo sapien
ttccactccgacgacatccgggggt

SEQ ID NO: 109630 - DNA, 25 bp, Homo sapien
ttccactccgaccacatccgggggt

SEQ ID NO: 109631 - DNA, 25 bp, Homo sapien
cacccgaaccggatcccgggagacg

SEQ ID NO: 109632 - DNA, 25 bp, Homo sapien
cacccgaaccggttcccgggagacg

SEQ ID NO: 109633 - DNA, 25 bp, Homo sapien
aaacgccggtcgtccccgtagagac

SEQ ID NO: 109634 - DNA, 25 bp, Homo sapien
aaacgccggtcgaccccgtagagac

SEQ ID NO: 109635 - DNA, 25 bp, Homo sapien
cgtagatcggtctcgacgggactga

SEQ ID NO: 109636 - DNA, 25 bp, Homo sapien
cgtagatcggtcacgacgggactga

SEQ ID NO: 109637 - DNA, 25 bp, Homo sapien
cccgtgtatggagaggttcggaact

SEQ ID NO: 109638 - DNA, 25 bp, Homo sapien
cccgtgtatggacaggttcggaact

SEQ ID NO: 109639 - DNA, 25 bp, Homo sapien
tgttacgtttgtctcattaagaaac

SEQ ID NO: 109640 - DNA, 25 bp, Homo sapien
tgttacgtttgtgtcattaagaaac

SEQ ID NO: 109641 - DNA, 25 bp, Homo sapien
aggtactgattttatccgtgggaca

SEQ ID NO: 109642 - DNA, 25 bp, Homo sapien
aggtactgatttaatccgtgggaca

SEQ ID NO: 109643 - DNA, 25 bp, Homo sapien
ggctaacacaccaacctcaggacaa

SEQ ID NO: 109644 - DNA, 25 bp, Homo sapien
ggctaacacacctacctcaggacaa

SEQ ID NO: 109645 - DNA, 25 bp, Homo sapien
agaagaacccctcgtcatgtcggac

SEQ ID NO: 109646 - DNA, 25 bp, Homo sapien
agaagaacccctggtcatgtcggac

SEQ ID NO: 109647 - DNA, 25 bp, Homo sapien
gagaaagatttgctaggtttgtccc

SEQ ID NO: 109648 - DNA, 25 bp, Homo sapien
gagaaagatttggtaggtttgtccc

SEQ ID NO: 109649 - DNA, 25 bp, Homo sapien
ataaaggtttagacggtcattcaac

SEQ ID NO: 109650 - DNA, 25 bp, Homo sapien
ataaaggtttagtcggtcattcaac

SEQ ID NO: 109651 - DNA, 25 bp, Homo sapien
ctctattgtagtgttaacgttacaa

SEQ ID NO: 109652 - DNA, 25 bp, Homo sapien
ctctattgtagtcttaacgttacaa

SEQ ID NO: 109653 - DNA, 25 bp, Homo sapien
gtttatatgttccttcagaacgagg

SEQ ID NO: 109654 - DNA, 25 bp, Homo sapien
gtttatatgttcgttcagaacgagg

SEQ ID NO: 109655 - DNA, 25 bp, Homo sapien
cgtttacgaaatttgtcacgtgaaa

SEQ ID NO: 109656 - DNA, 25 bp, Homo sapien
cgtttacgaaatatgtcacgtgaaa

SEQ ID NO: 109657 - DNA, 25 bp, Homo sapien
ttggtctcattcatatcgtcgcaaa

SEQ ID NO: 109658 - DNA, 25 bp, Homo sapien
ttggtctcattcttatcgtcgcaaa

SEQ ID NO: 109659 - DNA, 25 bp, Homo sapien
tcgtctgctcctaccgactaacagt

SEQ ID NO: 109660 - DNA, 25 bp, Homo sapien
tcgtctgctccttccgactaacagt

SEQ ID NO: 109661 - DNA, 25 bp, Homo sapien
aacttctcttactactgtgactggg

SEQ ID NO: 109662 - DNA, 25 bp, Homo sapien
aacttctcttacaactgtgactggg

SEQ ID NO: 109663 - DNA, 25 bp, Homo sapien
ggtctcttctgtaggaggtcggtcc

SEQ ID NO: 109664 - DNA, 25 bp, Homo sapien
ggtctcttctgttggaggtcggtcc

SEQ ID NO: 109665 - DNA, 25 bp, Homo sapien
cttttaccgaaggtagtctttatgt

SEQ ID NO: 109666 - DNA, 25 bp, Homo sapien
cttttaccgaagctagtctttatgt

SEQ ID NO: 109667 - DNA, 25 bp, Homo sapien
tactcttcggaaattctactgatgt

SEQ ID NO: 109668 - DNA, 25 bp, Homo sapien
tactcttcggaatttctactgatgt

SEQ ID NO: 109669 - DNA, 25 bp, Homo sapien
gaccgttcccactttactatgatag

SEQ ID NO: 109670 - DNA, 25 bp, Homo sapien
gaccgttcccacattactatgatag

SEQ ID NO: 109671 - DNA, 25 bp, Homo sapien
tccacggtcgggaactatatcgata

SEQ ID NO: 109672 - DNA, 25 bp, Homo sapien
tccacggtcgggtactatatcgata

SEQ ID NO: 109673 - DNA, 25 bp, Homo sapien
gacagagtaggtgttatacactaac

SEQ ID NO: 109674 - DNA, 25 bp, Homo sapien
gacagagtaggtcttatacactaac

SEQ ID NO: 109675 - DNA, 25 bp, Homo sapien
aaatgtcagtgacgtcaaacgtgac

SEQ ID NO: 109676 - DNA, 25 bp, Homo sapien
aaatgtcagtgaggtcaaacgtgac

SEQ ID NO: 109677 - DNA, 25 bp, Homo sapien
cgaaggtccatgaagagactaatcc

SEQ ID NO: 109678 - DNA, 25 bp, Homo sapien
cgaaggtccatgtagagactaatcc

SEQ ID NO: 109679 - DNA, 25 bp, Homo sapien
ggacggtcgaacacgaaacatcact

SEQ ID NO: 109680 - DNA, 25 bp, Homo sapien
ggacggtcgaactcgaaacatcact

SEQ ID NO: 109681 - DNA, 25 bp, Homo sapien
acgacgacgagaatcttaaaaccct

SEQ ID NO: 109682 - DNA, 25 bp, Homo sapien
acgacgacgagattcttaaaaccct

SEQ ID NO: 109683 - DNA, 25 bp, Homo sapien
aatgtgacagatttcgtaaattacc

SEQ ID NO: 109684 - DNA, 25 bp, Homo sapien
aatgtgacagatatcgtaaattacc

SEQ ID NO: 109685 - DNA, 25 bp, Homo sapien
tgcggaaggcactgtctaggaactc

SEQ ID NO: 109686 - DNA, 25 bp, Homo sapien
tgcggaaggcacagtctaggaactc

SEQ ID NO: 109687 - DNA, 25 bp, Homo sapien
atatttttggacagctcagacgacc

SEQ ID NO: 109688 - DNA, 25 bp, Homo sapien
atatttttggactgctcagacgacc

SEQ ID NO: 109689 - DNA, 25 bp, Homo sapien
ttttactttttgtgacctgaatcag

SEQ ID NO: 109690 - DNA, 25 bp, Homo sapien
ttttactttttgagacctgaatcag

SEQ ID NO: 109691 - DNA, 25 bp, Homo sapien
ttcggttttgtcacctaatgttact

SEQ ID NO: 109692 - DNA, 25 bp, Homo sapien
ttcggttttgtctcctaatgttact

SEQ ID NO: 109693 - DNA, 25 bp, Homo sapien
cctgtacgtgttaccctctttgttg

SEQ ID NO: 109694 - DNA, 25 bp, Homo sapien
cctgtacgtgtttccctctttgttg

SEQ ID NO: 109695 - DNA, 25 bp, Homo sapien
gtacccgtcttggtttccaatttgg

SEQ ID NO: 109696 - DNA, 25 bp, Homo sapien
gtacccgtcttgctttccaatttgg

SEQ ID NO: 109697 - DNA, 25 bp, Homo sapien
aggttttgaccctgattgttcttcg

SEQ ID NO: 109698 - DNA, 25 bp, Homo sapien
aggttttgacccagattgttcttcg

SEQ ID NO: 109699 - DNA, 25 bp, Homo sapien
tcttgagttttagagtctcgtcgag

SEQ ID NO: 109700 - DNA, 25 bp, Homo sapien
tcttgagttttacagtctcgtcgag

SEQ ID NO: 109701 - DNA, 25 bp, Homo sapien
ctataggtttacttcgtccgctctg

SEQ ID NO: 109702 - DNA, 25 bp, Homo sapien
ctataggtttacatcgtccgctctg

SEQ ID NO: 109703 - DNA, 25 bp, Homo sapien
tatagtgataattaacatgctccgt

SEQ ID NO: 109704 - DNA, 25 bp, Homo sapien
tatagtgataataaacatgctccgt

SEQ ID NO: 109705 - DNA, 25 bp, Homo sapien
catgttatgtctacggacgtgtccc

SEQ ID NO: 109706 - DNA, 25 bp, Homo sapien
catgttatgtcttcggacgtgtccc

SEQ ID NO: 109707 - DNA, 25 bp, Homo sapien
acttgtgacgcaacagggtcgtaca

SEQ ID NO: 109708 - DNA, 25 bp, Homo sapien
acttgtgacgcatcagggtcgtaca

SEQ ID NO: 109709 - DNA, 25 bp, Homo sapien
gatttctacgacgtccatagctaca

SEQ ID NO: 109710 - DNA, 25 bp, Homo sapien
gatttctacgacctccatagctaca

SEQ ID NO: 109711 - DNA, 25 bp, Homo sapien
catcgttcaaacgatcgtcgtaagt

SEQ ID NO: 109712 - DNA, 25 bp, Homo sapien
catcgttcaaaccatcgtcgtaagt

SEQ ID NO: 109713 - DNA, 25 bp, Homo sapien
ccagagtgtcttcacactatttaag

SEQ ID NO: 109714 - DNA, 25 bp, Homo sapien
ccagagtgtcttgacactatttaag

SEQ ID NO: 109715 - DNA, 25 bp, Homo sapien
gtcccaaactcttgcaagttagtta

SEQ ID NO: 109716 - DNA, 25 bp, Homo sapien
gtcccaaactctagcaagttagtta

SEQ ID NO: 109717 - DNA, 25 bp, Homo sapien
agaaggaaattcagaacccactcta

SEQ ID NO: 109718 - DNA, 25 bp, Homo sapien
agaaggaaattctgaacccactcta

SEQ ID NO: 109719 - DNA, 25 bp, Homo sapien
gtcacgtaaaatgcaatcaaccgga

SEQ ID NO: 109720 - DNA, 25 bp, Homo sapien
gtcacgtaaaatccaatcaaccgga

SEQ ID NO: 109721 - DNA, 25 bp, Homo sapien
ccgttaaatccgtagttacattgat

SEQ ID NO: 109722 - DNA, 25 bp, Homo sapien
ccgttaaatccgaagttacattgat

SEQ ID NO: 109723 - DNA, 25 bp, Homo sapien
tcgtcccacggaggtacgacctgac

SEQ ID NO: 109724 - DNA, 25 bp, Homo sapien
tcgtcccacggacgtacgacctgac

SEQ ID NO: 109725 - DNA, 25 bp, Homo sapien
atgaccatcaagtacgacaccagac

SEQ ID NO: 109726 - DNA, 25 bp, Homo sapien
atgaccatcaagaacgacaccagac

SEQ ID NO: 109727 - DNA, 25 bp, Homo sapien
gcaggacgtacattcggcccatcca

SEQ ID NO: 109728 - DNA, 25 bp, Homo sapien
gcaggacgtacaatcggcccatcca

SEQ ID NO: 109729 - DNA, 25 bp, Homo sapien
ggaccaacgccttccgtatctacta

SEQ ID NO: 109730 - DNA, 25 bp, Homo sapien
ggaccaacgcctaccgtatctacta

SEQ ID NO: 109731 - DNA, 25 bp, Homo sapien
ggtcccaccgaagtcaagtcactgt

SEQ ID NO: 109732 - DNA, 25 bp, Homo sapien
ggtcccaccgaactcaagtcactgt

SEQ ID NO: 109733 - DNA, 25 bp, Homo sapien
agtccccgtaattataccagtccta

SEQ ID NO: 109734 - DNA, 25 bp, Homo sapien
agtccccgtaataataccagtccta

SEQ ID NO: 109735 - DNA, 25 bp, Homo sapien
ggacgtgtactcaaaaatcttccac

SEQ ID NO: 109736 - DNA, 25 bp, Homo sapien
ggacgtgtactctaaaatcttccac

SEQ ID NO: 109737 - DNA, 25 bp, Homo sapien
cgagggacggacaaacagtccgccc

SEQ ID NO: 109738 - DNA, 25 bp, Homo sapien
cgagggacggactaacagtccgccc

SEQ ID NO: 109739 - DNA, 25 bp, Homo sapien
ggctagagcctggacaccggagtcg

SEQ ID NO: 109740 - DNA, 25 bp, Homo sapien
ggctagagcctgcacaccggagtcg

SEQ ID NO: 109741 - DNA, 25 bp, Homo sapien
gactaagcccgtcacctcagtatct

SEQ ID NO: 109742 - DNA, 25 bp, Homo sapien
gactaagcccgtgacctcagtatct

SEQ ID NO: 109743 - DNA, 25 bp, Homo sapien
gaacgcgaaccgtcccatcggtgta

SEQ ID NO: 109744 - DNA, 25 bp, Homo sapien
gaacgcgaaccgacccatcggtgta

SEQ ID NO: 109745 - DNA, 25 bp, Homo sapien
gccagtgaccgaaccgccttgtagg

SEQ ID NO: 109746 - DNA, 25 bp, Homo sapien
gccagtgaccgatccgccttgtagg

SEQ ID NO: 109747 - DNA, 25 bp, Homo sapien
atatacgcaccgtccacgaaggtgg

SEQ ID NO: 109748 - DNA, 25 bp, Homo sapien
atatacgcaccgaccacgaaggtgg

SEQ ID NO: 109749 - DNA, 25 bp, Homo sapien
tttaataactggtacctcggggaag

SEQ ID NO: 109750 - DNA, 25 bp, Homo sapien
tttaataactggaacctcggggaag

SEQ ID NO: 109751 - DNA, 25 bp, Homo sapien
aaaaagatgtcgaacctttggagac

SEQ ID NO: 109752 - DNA, 25 bp, Homo sapien
aaaaagatgtcgtacctttggagac

SEQ ID NO: 109753 - DNA, 25 bp, Homo sapien
aaaagacattcgtaccgtttccttt

SEQ ID NO: 109754 - DNA, 25 bp, Homo sapien
aaaagacattcgaaccgtttccttt

SEQ ID NO: 109755 - DNA, 25 bp, Homo sapien
aaagggaaccgtatagtgttttcct

SEQ ID NO: 109756 - DNA, 25 bp, Homo sapien
aaagggaaccgtttagtgttttcct

SEQ ID NO: 109757 - DNA, 25 bp, Homo sapien
agaagtccacaacgaccaaggtgaa

SEQ ID NO: 109758 - DNA, 25 bp, Homo sapien
agaagtccacaaggaccaaggtgaa

SEQ ID NO: 109759 - DNA, 25 bp, Homo sapien
ggaagaccgacaaggcccagggaca

SEQ ID NO: 109760 - DNA, 25 bp, Homo sapien
ggaagaccgacatggcccagggaca

SEQ ID NO: 109761 - DNA, 25 bp, Homo sapien
acagtacagtcgtcgtaggtttact

SEQ ID NO: 109762 - DNA, 25 bp, Homo sapien
acagtacagtcgacgtaggtttact

SEQ ID NO: 109763 - DNA, 25 bp, Homo sapien
cccgacacgtgtgctcgagttgtcg

SEQ ID NO: 109764 - DNA, 25 bp, Homo sapien
cccgacacgtgtcctcgagttgtcg

SEQ ID NO: 109765 - DNA, 25 bp, Homo sapien
gtccagagagtcctactccgacttg

SEQ ID NO: 109766 - DNA, 25 bp, Homo sapien
gtccagagagtcgtactccgacttg

SEQ ID NO: 109767 - DNA, 25 bp, Homo sapien
aagggaacaaacgtctcctaattta

SEQ ID NO: 109768 - DNA, 25 bp, Homo sapien
aagggaacaaacctctcctaattta

SEQ ID NO: 109769 - DNA, 25 bp, Homo sapien
tggaagttcgtgatccgaactgaga

SEQ ID NO: 109770 - DNA, 25 bp, Homo sapien
tggaagttcgtgttccgaactgaga

SEQ ID NO: 109771 - DNA, 25 bp, Homo sapien
ggtgaaccaactttttgaaacgtat

SEQ ID NO: 109772 - DNA, 25 bp, Homo sapien
ggtgaaccaactatttgaaacgtat

SEQ ID NO: 109773 - DNA, 25 bp, Homo sapien
taggggtaccttttcaccaaagaat

SEQ ID NO: 109774 - DNA, 25 bp, Homo sapien
taggggtaccttatcaccaaagaat

SEQ ID NO: 109775 - DNA, 25 bp, Homo sapien
gtgaaatccgttgtcacaaaggcat

SEQ ID NO: 109776 - DNA, 25 bp, Homo sapien
gtgaaatccgttctcacaaaggcat

SEQ ID NO: 109777 - DNA, 25 bp, Homo sapien
ttaaagtttacctcttgtggaagtc

SEQ ID NO: 109778 - DNA, 25 bp, Homo sapien
ttaaagtttaccacttgtggaagtc

SEQ ID NO: 109779 - DNA, 25 bp, Homo sapien
ataaatcgttcataccttaggtttg

SEQ ID NO: 109780 - DNA, 25 bp, Homo sapien
ataaatcgttcaaaccttaggtttg

SEQ ID NO: 109781 - DNA, 25 bp, Homo sapien
tggtaaggaggaacccccggttgtt

SEQ ID NO: 109782 - DNA, 25 bp, Homo sapien
tggtaaggaggatcccccggttgtt

SEQ ID NO: 109783 - DNA, 25 bp, Homo sapien
agacagaagaacttccgacctttaa

SEQ ID NO: 109784 - DNA, 25 bp, Homo sapien
agacagaagaacatccgacctttaa

SEQ ID NO: 109785 - DNA, 25 bp, Homo sapien
tagaaaagtgaaacccttctgacct

SEQ ID NO: 109786 - DNA, 25 bp, Homo sapien
tagaaaagtgaatcccttctgacct

SEQ ID NO: 109787 - DNA, 25 bp, Homo sapien
tttagtaaggggaccttcagacgct

SEQ ID NO: 109788 - DNA, 25 bp, Homo sapien
tttagtaaggggtccttcagacgct

SEQ ID NO: 109789 - DNA, 25 bp, Homo sapien
gtttacgagtgagaacccgtaaatg

SEQ ID NO: 109790 - DNA, 25 bp, Homo sapien
gtttacgagtgacaacccgtaaatg

SEQ ID NO: 109791 - DNA, 25 bp, Homo sapien
gttcctcaactactcgagtcaagtg

SEQ ID NO: 109792 - DNA, 25 bp, Homo sapien
gttcctcaactagtcgagtcaagtg

SEQ ID NO: 109793 - DNA, 25 bp, Homo sapien
cgagtttccacactgagtagacatc

SEQ ID NO: 109794 - DNA, 25 bp, Homo sapien
cgagtttccacagtgagtagacatc

SEQ ID NO: 109795 - DNA, 25 bp, Homo sapien
ggatttctcccgtacggacgaagta

SEQ ID NO: 109796 - DNA, 25 bp, Homo sapien
ggatttctcccgaacggacgaagta

SEQ ID NO: 109797 - DNA, 25 bp, Homo sapien
acaccggacccgatacagacgtttc

SEQ ID NO: 109798 - DNA, 25 bp, Homo sapien
acaccggacccgttacagacgtttc

SEQ ID NO: 109799 - DNA, 25 bp, Homo sapien
gatgcacgtccgatccgtacaggtc

SEQ ID NO: 109800 - DNA, 25 bp, Homo sapien
gatgcacgtccgttccgtacaggtc

SEQ ID NO: 109801 - DNA, 25 bp, Homo sapien
agattcgtacgtctttcgtgtcctg

SEQ ID NO: 109802 - DNA, 25 bp, Homo sapien
agattcgtacgtgtttcgtgtcctg

SEQ ID NO: 109803 - DNA, 25 bp, Homo sapien
atgtacagtcacagaaaaccttttg

SEQ ID NO: 109804 - DNA, 25 bp, Homo sapien
atgtacagtcactgaaaaccttttg

SEQ ID NO: 109805 - DNA, 25 bp, Homo sapien
tactcgtcgatgaaatcgttattga

SEQ ID NO: 109806 - DNA, 25 bp, Homo sapien
tactcgtcgatgtaatcgttattga

SEQ ID NO: 109807 - DNA, 25 bp, Homo sapien
ctctgtccaggtctcgatgtttacg

SEQ ID NO: 109808 - DNA, 25 bp, Homo sapien
ctctgtccaggtgtcgatgtttacg

SEQ ID NO: 109809 - DNA, 25 bp, Homo sapien
acatgtgtcctgtccttatctgtga

SEQ ID NO: 109810 - DNA, 25 bp, Homo sapien
acatgtgtcctgaccttatctgtga

SEQ ID NO: 109811 - DNA, 25 bp, Homo sapien
ttataattcctgaagctttcacgga

SEQ ID NO: 109812 - DNA, 25 bp, Homo sapien
ttataattcctgtagctttcacgga

SEQ ID NO: 109813 - DNA, 25 bp, Homo sapien
ccgacaggtcactcatcattcagga

SEQ ID NO: 109814 - DNA, 25 bp, Homo sapien
ccgacaggtcacacatcattcagga

SEQ ID NO: 109815 - DNA, 25 bp, Homo sapien
cgaaagagtcaaacttcattgtgga

SEQ ID NO: 109816 - DNA, 25 bp, Homo sapien
cgaaagagtcaatcttcattgtgga

SEQ ID NO: 109817 - DNA, 25 bp, Homo sapien
aactgaccctgtgactttattggat

SEQ ID NO: 109818 - DNA, 25 bp, Homo sapien
aactgaccctgtcactttattggat

SEQ ID NO: 109819 - DNA, 25 bp, Homo sapien
aatgacccttcatctcattaatact

SEQ ID NO: 109820 - DNA, 25 bp, Homo sapien
aatgacccttcaactcattaatact

SEQ ID NO: 109821 - DNA, 25 bp, Homo sapien
caggtacggtttcatcatattttac

SEQ ID NO: 109822 - DNA, 25 bp, Homo sapien
caggtacggtttgatcatattttac

SEQ ID NO: 109823 - DNA, 25 bp, Homo sapien
atagggaccctcagtcttctatacg

SEQ ID NO: 109824 - DNA, 25 bp, Homo sapien
atagggaccctctgtcttctatacg

SEQ ID NO: 109825 - DNA, 25 bp, Homo sapien
gtagtaagaccaggtggtaaacccg

SEQ ID NO: 109826 - DNA, 25 bp, Homo sapien
gtagtaagaccacgtggtaaacccg

SEQ ID NO: 109827 - DNA, 25 bp, Homo sapien
cgaagaccagaccacttaataacgc

SEQ ID NO: 109828 - DNA, 25 bp, Homo sapien
cgaagaccagacgacttaataacgc

SEQ ID NO: 109829 - DNA, 25 bp, Homo sapien
cggagagacccgtggtttgacgacc

SEQ ID NO: 109830 - DNA, 25 bp, Homo sapien
cggagagacccgaggtttgacgacc

SEQ ID NO: 109831 - DNA, 25 bp, Homo sapien
agacccgtggacgacgtcgacaccg

SEQ ID NO: 109832 - DNA, 25 bp, Homo sapien
agacccgtggaccacgtcgacaccg

SEQ ID NO: 109833 - DNA, 25 bp, Homo sapien
agacaaaaggggtcacggtccctca

SEQ ID NO: 109834 - DNA, 25 bp, Homo sapien
agacaaaaggggacacggtccctca

SEQ ID NO: 109835 - DNA, 25 bp, Homo sapien
tcagagtggaacaacgaatcccgtg

SEQ ID NO: 109836 - DNA, 25 bp, Homo sapien
tcagagtggaactacgaatcccgtg

SEQ ID NO: 109837 - DNA, 25 bp, Homo sapien
gtcataaataacacgtaatcccggt

SEQ ID NO: 109838 - DNA, 25 bp, Homo sapien
gtcataaataactcgtaatcccggt

SEQ ID NO: 109839 - DNA, 25 bp, Homo sapien
aggaaagtttacatgaaaccacgtt

SEQ ID NO: 109840 - DNA, 25 bp, Homo sapien
aggaaagtttacttgaaaccacgtt

SEQ ID NO: 109841 - DNA, 25 bp, Homo sapien
ttgtcgttctacacgaagtgtatat

SEQ ID NO: 109842 - DNA, 25 bp, Homo sapien
ttgtcgttctactcgaagtgtatat

SEQ ID NO: 109843 - DNA, 25 bp, Homo sapien
tcctgcatcgtctcggacggagtag

SEQ ID NO: 109844 - DNA, 25 bp, Homo sapien
tcctgcatcgtcacggacggagtag

SEQ ID NO: 109845 - DNA, 25 bp, Homo sapien
actccctaggacgacgtggaccgag

SEQ ID NO: 109846 - DNA, 25 bp, Homo sapien
actccctaggaccacgtggaccgag

SEQ ID NO: 109847 - DNA, 25 bp, Homo sapien
tagctactatcgtcccgagacccgt

SEQ ID NO: 109848 - DNA, 25 bp, Homo sapien
tagctactatcgacccgagacccgt

SEQ ID NO: 109849 - DNA, 25 bp, Homo sapien
aagttactatacaagtccctgaccg

SEQ ID NO: 109850 - DNA, 25 bp, Homo sapien
aagttactatactagtccctgaccg

SEQ ID NO: 109851 - DNA, 25 bp, Homo sapien
tgactaaaactcaacttgtgaccgt

SEQ ID NO: 109852 - DNA, 25 bp, Homo sapien
tgactaaaactctacttgtgaccgt

SEQ ID NO: 109853 - DNA, 25 bp, Homo sapien
aaggaaaaacgaggtccgtggactg

SEQ ID NO: 109854 - DNA, 25 bp, Homo sapien
aaggaaaaacgacgtccgtggactg

SEQ ID NO: 109855 - DNA, 25 bp, Homo sapien
actgacgactcgtcccgtctaaacg

SEQ ID NO: 109856 - DNA, 25 bp, Homo sapien
actgacgactcgacccgtctaaacg

SEQ ID NO: 109857 - DNA, 25 bp, Homo sapien
agtactacgaataactcgttagacg

SEQ ID NO: 109858 - DNA, 25 bp, Homo sapien
agtactacgaattactcgttagacg

SEQ ID NO: 109859 - DNA, 25 bp, Homo sapien
gagagacgaccgagtcccagacgtc

SEQ ID NO: 109860 - DNA, 25 bp, Homo sapien
gagagacgaccgtgtcccagacgtc

SEQ ID NO: 109861 - DNA, 25 bp, Homo sapien
actacagtcgcctcagtcgcagtaa

SEQ ID NO: 109862 - DNA, 25 bp, Homo sapien
actacagtcgccacagtcgcagtaa

SEQ ID NO: 109863 - DNA, 25 bp, Homo sapien
ttttgattaagtactaaccacgaag

SEQ ID NO: 109864 - DNA, 25 bp, Homo sapien
ttttgattaagttctaaccacgaag

SEQ ID NO: 109865 - DNA, 25 bp, Homo sapien
ctccctcttctttcttttactattg

SEQ ID NO: 109866 - DNA, 25 bp, Homo sapien
ctccctcttcttacttttactattg

SEQ ID NO: 109867 - DNA, 25 bp, Homo sapien
tctttcgatcacacggtcccctgtg

SEQ ID NO: 109868 - DNA, 25 bp, Homo sapien
tctttcgatcactcggtcccctgtg

SEQ ID NO: 109869 - DNA, 25 bp, Homo sapien
tatttgagggactccggccactgtc

SEQ ID NO: 109870 - DNA, 25 bp, Homo sapien
tatttgagggacaccggccactgtc

SEQ ID NO: 109871 - DNA, 25 bp, Homo sapien
atactcaaccgctccttctagctgg

SEQ ID NO: 109872 - DNA, 25 bp, Homo sapien
atactcaaccgcaccttctagctgg

SEQ ID NO: 109873 - DNA, 25 bp, Homo sapien
agtctactgcaagcacttgagatgc

SEQ ID NO: 109874 - DNA, 25 bp, Homo sapien
agtctactgcaaccacttgagatgc

SEQ ID NO: 109875 - DNA, 25 bp, Homo sapien
agtttactgccatgtaggtgcatca

SEQ ID NO: 109876 - DNA, 25 bp, Homo sapien
agtttactgccaagtaggtgcatca

SEQ ID NO: 109877 - DNA, 25 bp, Homo sapien
aggggatactcagtcgggtcttaca

SEQ ID NO: 109878 - DNA, 25 bp, Homo sapien
aggggatactcactcgggtcttaca

SEQ ID NO: 109879 - DNA, 25 bp, Homo sapien
atctaggaaccttctttatcatcat

SEQ ID NO: 109880 - DNA, 25 bp, Homo sapien
atctaggaacctactttatcatcat

SEQ ID NO: 109881 - DNA, 25 bp, Homo sapien
ttcggtgagatgtcattaataccgt

SEQ ID NO: 109882 - DNA, 25 bp, Homo sapien
ttcggtgagatgacattaataccgt

SEQ ID NO: 109883 - DNA, 25 bp, Homo sapien
taacgtgatatttaaccgacaacag

SEQ ID NO: 109884 - DNA, 25 bp, Homo sapien
taacgtgatattaaaccgacaacag

SEQ ID NO: 109885 - DNA, 25 bp, Homo sapien
tagatccttcggtgtctttgtgccc

SEQ ID NO: 109886 - DNA, 25 bp, Homo sapien
tagatccttcggagtctttgtgccc

SEQ ID NO: 109887 - DNA, 25 bp, Homo sapien
gtttcacaccgtcgtagttgggccc

SEQ ID NO: 109888 - DNA, 25 bp, Homo sapien
gtttcacaccgtggtagttgggccc

SEQ ID NO: 109889 - DNA, 25 bp, Homo sapien
gtgtccacggggaagctctgcgccc

SEQ ID NO: 109890 - DNA, 25 bp, Homo sapien
gtgtccacggggtagctctgcgccc

SEQ ID NO: 109891 - DNA, 25 bp, Homo sapien
gttcaaactcggaggtgtttattac

SEQ ID NO: 109892 - DNA, 25 bp, Homo sapien
gttcaaactcggtggtgtttattac

SEQ ID NO: 109893 - DNA, 25 bp, Homo sapien
gttgtaaaccgtcaagagttttttc

SEQ ID NO: 109894 - DNA, 25 bp, Homo sapien
gttgtaaaccgtgaagagttttttc

SEQ ID NO: 109895 - DNA, 25 bp, Homo sapien
tcatacgacctcaaggatggtgtct

SEQ ID NO: 109896 - DNA, 25 bp, Homo sapien
tcatacgacctctaggatggtgtct

SEQ ID NO: 109897 - DNA, 25 bp, Homo sapien
ttccgagattcttgggtagtcgttt

SEQ ID NO: 109898 - DNA, 25 bp, Homo sapien
ttccgagattctagggtagtcgttt

SEQ ID NO: 109899 - DNA, 25 bp, Homo sapien
accttcttgaaacaggtcagtcttt

SEQ ID NO: 109900 - DNA, 25 bp, Homo sapien
accttcttgaaagaggtcagtcttt

SEQ ID NO: 109901 - DNA, 25 bp, Homo sapien
tcggcgtccgggaggcccgtcctct

SEQ ID NO: 109902 - DNA, 25 bp, Homo sapien
tcggcgtccgggtggcccgtcctct

SEQ ID NO: 109903 - DNA, 25 bp, Homo sapien
tgtcacgtcgggatcgtccttcttc

SEQ ID NO: 109904 - DNA, 25 bp, Homo sapien
tgtcacgtcgggttcgtccttcttc

SEQ ID NO: 109905 - DNA, 25 bp, Homo sapien
tcttactacggacttccttcgtctg

SEQ ID NO: 109906 - DNA, 25 bp, Homo sapien
tcttactacggagttccttcgtctg

SEQ ID NO: 109907 - DNA, 25 bp, Homo sapien
tccttgacttcaaactttctgtcgg

SEQ ID NO: 109908 - DNA, 25 bp, Homo sapien
tccttgacttcatactttctgtcgg

SEQ ID NO: 109909 - DNA, 25 bp, Homo sapien
gtgtgtctaagaccttttgtacgtt

SEQ ID NO: 109910 - DNA, 25 bp, Homo sapien
gtgtgtctaagagcttttgtacgtt

SEQ ID NO: 109911 - DNA, 25 bp, Homo sapien
atcggtgttcttaagcagcaacttt

SEQ ID NO: 109912 - DNA, 25 bp, Homo sapien
atcggtgttctttagcagcaacttt

SEQ ID NO: 109913 - DNA, 25 bp, Homo sapien
cagtctcccatttccagaacgaggg

SEQ ID NO: 109914 - DNA, 25 bp, Homo sapien
cagtctcccattaccagaacgaggg

SEQ ID NO: 109915 - DNA, 25 bp, Homo sapien
gattacgcaatcgtccagattccta

SEQ ID NO: 109916 - DNA, 25 bp, Homo sapien
gattacgcaatcctccagattccta

SEQ ID NO: 109917 - DNA, 25 bp, Homo sapien
tgagatcttccgactgtttcagtat

SEQ ID NO: 109918 - DNA, 25 bp, Homo sapien
tgagatcttccgtctgtttcagtat

SEQ ID NO: 109919 - DNA, 25 bp, Homo sapien
gcttctacctagctgtctgtccggt

SEQ ID NO: 109920 - DNA, 25 bp, Homo sapien
gcttctacctaggtgtctgtccggt

SEQ ID NO: 109921 - DNA, 25 bp, Homo sapien
agtaaatctcactgactccgaagtg

SEQ ID NO: 109922 - DNA, 25 bp, Homo sapien
agtaaatctcacagactccgaagtg

SEQ ID NO: 109923 - DNA, 25 bp, Homo sapien
taaactgtacgttgtccctcatcgg

SEQ ID NO: 109924 - DNA, 25 bp, Homo sapien
taaactgtacgtagtccctcatcgg

SEQ ID NO: 109925 - DNA, 25 bp, Homo sapien
atgtactatgtgtcaacgtcggttg

SEQ ID NO: 109926 - DNA, 25 bp, Homo sapien
atgtactatgtgacaacgtcggttg

SEQ ID NO: 109927 - DNA, 25 bp, Homo sapien
ttctcagtgcataacggtgtttcgt

SEQ ID NO: 109928 - DNA, 25 bp, Homo sapien
ttctcagtgcattacggtgtttcgt

SEQ ID NO: 109929 - DNA, 25 bp, Homo sapien
accacggactatctagtgaggtcgt

SEQ ID NO: 109930 - DNA, 25 bp, Homo sapien
accacggactatgtagtgaggtcgt

SEQ ID NO: 109931 - DNA, 25 bp, Homo sapien
taccgtaccgagtcttagcgggtct

SEQ ID NO: 109932 - DNA, 25 bp, Homo sapien
taccgtaccgagacttagcgggtct

SEQ ID NO: 109933 - DNA, 25 bp, Homo sapien
gtctttgttctagacagtgggcatc

SEQ ID NO: 109934 - DNA, 25 bp, Homo sapien
gtctttgttctacacagtgggcatc

SEQ ID NO: 109935 - DNA, 25 bp, Homo sapien
tcatttcaggcgaggtgacacttac

SEQ ID NO: 109936 - DNA, 25 bp, Homo sapien
tcatttcaggcgtggtgacacttac

SEQ ID NO: 109937 - DNA, 25 bp, Homo sapien
ttcaaacagaggtaggtccgattgt

SEQ ID NO: 109938 - DNA, 25 bp, Homo sapien
ttcaaacagaggaaggtccgattgt

SEQ ID NO: 109939 - DNA, 25 bp, Homo sapien
cctcaaataagtgaaggtcgccatg

SEQ ID NO: 109940 - DNA, 25 bp, Homo sapien
cctcaaataagtcaaggtcgccatg

SEQ ID NO: 109941 - DNA, 25 bp, Homo sapien
tgcataaataaggtccggtccagaa

SEQ ID NO: 109942 - DNA, 25 bp, Homo sapien
tgcataaataagctccggtccagaa

SEQ ID NO: 109943 - DNA, 25 bp, Homo sapien
tttctacttcggagacaacaagcga

SEQ ID NO: 109944 - DNA, 25 bp, Homo sapien
tttctacttcggtgacaacaagcga

SEQ ID NO: 109945 - DNA, 25 bp, Homo sapien
tcttccatcgggactctgtacacca

SEQ ID NO: 109946 - DNA, 25 bp, Homo sapien
tcttccatcgggtctctgtacacca

SEQ ID NO: 109947 - DNA, 25 bp, Homo sapien
ccggaaggtacacgactacccacta

SEQ ID NO: 109948 - DNA, 25 bp, Homo sapien
ccggaaggtacaggactacccacta

SEQ ID NO: 109949 - DNA, 25 bp, Homo sapien
caggtagacgtatcgggaaccctga

SEQ ID NO: 109950 - DNA, 25 bp, Homo sapien
caggtagacgtaacgggaaccctga

SEQ ID NO: 109951 - DNA, 25 bp, Homo sapien
cattgtcgttacgttataatcgttt

SEQ ID NO: 109952 - DNA, 25 bp, Homo sapien
cattgtcgttaccttataatcgttt

SEQ ID NO: 109953 - DNA, 25 bp, Homo sapien
cctctaaggttactctaaaagttcg

SEQ ID NO: 109954 - DNA, 25 bp, Homo sapien
cctctaaggttagtctaaaagttcg

SEQ ID NO: 109955 - DNA, 25 bp, Homo sapien
tcccaagggacttgagacgaagttt

SEQ ID NO: 109956 - DNA, 25 bp, Homo sapien
tcccaagggactagagacgaagttt

SEQ ID NO: 109957 - DNA, 25 bp, Homo sapien
ccaaaagtacacgaagagaactcgt

SEQ ID NO: 109958 - DNA, 25 bp, Homo sapien
ccaaaagtacaccaagagaactcgt

SEQ ID NO: 109959 - DNA, 25 bp, Homo sapien
aaggaacgtcacacgacaggcctgt

SEQ ID NO: 109960 - DNA, 25 bp, Homo sapien
aaggaacgtcactcgacaggcctgt

SEQ ID NO: 109961 - DNA, 25 bp, Homo sapien
ggaccgaggtagactcccattcctg

SEQ ID NO: 109962 - DNA, 25 bp, Homo sapien
ggaccgaggtagtctcccattcctg

SEQ ID NO: 109963 - DNA, 25 bp, Homo sapien
aaccggaagtcttctcaccgggctc

SEQ ID NO: 109964 - DNA, 25 bp, Homo sapien
aaccggaagtctactcaccgggctc

SEQ ID NO: 109965 - DNA, 25 bp, Homo sapien
aacgaagagaattgacaccggagga

SEQ ID NO: 109966 - DNA, 25 bp, Homo sapien
aacgaagagaatagacaccggagga

SEQ ID NO: 109967 - DNA, 25 bp, Homo sapien
tccatgtcccggaccggttagagtt

SEQ ID NO: 109968 - DNA, 25 bp, Homo sapien
tccatgtcccggtccggttagagtt

SEQ ID NO: 109969 - DNA, 25 bp, Homo sapien
gtcaaggtctccgataccccggtga

SEQ ID NO: 109970 - DNA, 25 bp, Homo sapien
gtcaaggtctcccataccccggtga

SEQ ID NO: 109971 - DNA, 25 bp, Homo sapien
gtcgagagggtccaacgccccggca

SEQ ID NO: 109972 - DNA, 25 bp, Homo sapien
gtcgagagggtcgaacgccccggca

SEQ ID NO: 109973 - DNA, 25 bp, Homo sapien
tggggtcctgagtcgacctcaacct

SEQ ID NO: 109974 - DNA, 25 bp, Homo sapien
tggggtcctgagacgacctcaacct

SEQ ID NO: 109975 - DNA, 25 bp, Homo sapien
gggtagtagtctcttgttctctttc

SEQ ID NO: 109976 - DNA, 25 bp, Homo sapien
gggtagtagtctgttgttctctttc

SEQ ID NO: 109977 - DNA, 25 bp, Homo sapien
cggggtcgttctcgtgttctccttc

SEQ ID NO: 109978 - DNA, 25 bp, Homo sapien
cggggtcgttctggtgttctccttc

SEQ ID NO: 109979 - DNA, 25 bp, Homo sapien
tcagtgtcttgtctggtttcccttc

SEQ ID NO: 109980 - DNA, 25 bp, Homo sapien
tcagtgtcttgtgtggtttcccttc

SEQ ID NO: 109981 - DNA, 25 bp, Homo sapien
tccttcgtttggagactacgattcg

SEQ ID NO: 109982 - DNA, 25 bp, Homo sapien
tccttcgtttggtgactacgattcg

SEQ ID NO: 109983 - DNA, 25 bp, Homo sapien
gtcgttacagtgtcgagtcgatgtg

SEQ ID NO: 109984 - DNA, 25 bp, Homo sapien
gtcgttacagtgacgagtcgatgtg

SEQ ID NO: 109985 - DNA, 25 bp, Homo sapien
tccggtgtccctcgaacggaatcag

SEQ ID NO: 109986 - DNA, 25 bp, Homo sapien
tccggtgtccctggaacggaatcag

SEQ ID NO: 109987 - DNA, 25 bp, Homo sapien
ggggttcttctcgaggcacgctaat

SEQ ID NO: 109988 - DNA, 25 bp, Homo sapien
ggggttcttctccaggcacgctaat

SEQ ID NO: 109989 - DNA, 25 bp, Homo sapien
ccgatggtccccaaagtctgcacga

SEQ ID NO: 109990 - DNA, 25 bp, Homo sapien
ccgatggtcccctaagtctgcacga

SEQ ID NO: 109991 - DNA, 25 bp, Homo sapien
aggtccgcgtcgtcactcaccaagt

SEQ ID NO: 109992 - DNA, 25 bp, Homo sapien
aggtccgcgtcgacactcaccaagt

SEQ ID NO: 109993 - DNA, 25 bp, Homo sapien
tcggtcaagacgtacacgtgcacca

SEQ ID NO: 109994 - DNA, 25 bp, Homo sapien
tcggtcaagacgaacacgtgcacca

SEQ ID NO: 109995 - DNA, 25 bp, Homo sapien
ctcgtagctgacacacgagccgaaa

SEQ ID NO: 109996 - DNA, 25 bp, Homo sapien
ctcgtagctgactcacgagccgaaa

SEQ ID NO: 109997 - DNA, 25 bp, Homo sapien
ccacgtgtagagactcggatcaatg

SEQ ID NO: 109998 - DNA, 25 bp, Homo sapien
ccacgtgtagagtctcggatcaatg

SEQ ID NO: 109999 - DNA, 25 bp, Homo sapien
cggatgagagttccagaagacctag

SEQ ID NO: 110000 - DNA, 25 bp, Homo sapien
cggatgagagttgcagaagacctag

SEQ ID NO: 110001 - DNA, 25 bp, Homo sapien
cgatacctctcaatgccaaggagga

SEQ ID NO: 110002 - DNA, 25 bp, Homo sapien
cgatacctctcattgccaaggagga

SEQ ID NO: 110003 - DNA, 25 bp, Homo sapien
tcctagagagcgtcccaggaactat

SEQ ID NO: 110004 - DNA, 25 bp, Homo sapien
tcctagagagcgacccaggaactat

SEQ ID NO: 110005 - DNA, 25 bp, Homo sapien
cctgacacgacacgatcacgggatt

SEQ ID NO: 110006 - DNA, 25 bp, Homo sapien
cctgacacgacaggatcacgggatt

SEQ ID NO: 110007 - DNA, 25 bp, Homo sapien
cccgttaggcatcctcgagaagagg

SEQ ID NO: 110008 - DNA, 25 bp, Homo sapien
cccgttaggcatgctcgagaagagg

SEQ ID NO: 110009 - DNA, 25 bp, Homo sapien
tacacctcagggtgctcgccgggac

SEQ ID NO: 110010 - DNA, 25 bp, Homo sapien
tacacctcagggagctcgccgggac

SEQ ID NO: 110011 - DNA, 25 bp, Homo sapien
ttccttgggttcgtcacagagaact

SEQ ID NO: 110012 - DNA, 25 bp, Homo sapien
ttccttgggttcctcacagagaact

SEQ ID NO: 110013 - DNA, 25 bp, Homo sapien
cctctcgcgggtgtgacaggtacga

SEQ ID NO: 110014 - DNA, 25 bp, Homo sapien
cctctcgcgggtctgacaggtacga

SEQ ID NO: 110015 - DNA, 25 bp, Homo sapien
ctcactggacggaatcaactggagt

SEQ ID NO: 110016 - DNA, 25 bp, Homo sapien
ctcactggacggtatcaactggagt

SEQ ID NO: 110017 - DNA, 25 bp, Homo sapien
ccgaggacggagatacaaccggacg

SEQ ID NO: 110018 - DNA, 25 bp, Homo sapien
ccgaggacggagttacaaccggacg

SEQ ID NO: 110019 - DNA, 25 bp, Homo sapien
cccaccagacgtgtcttagaaccga

SEQ ID NO: 110020 - DNA, 25 bp, Homo sapien
cccaccagacgtctcttagaaccga

SEQ ID NO: 110021 - DNA, 25 bp, Homo sapien
tccacaaaccgattctcgattccgg

SEQ ID NO: 110022 - DNA, 25 bp, Homo sapien
tccacaaaccgaatctcgattccgg

SEQ ID NO: 110023 - DNA, 25 bp, Homo sapien
tcttagagctcaatcaaattgatag

SEQ ID NO: 110024 - DNA, 25 bp, Homo sapien
tcttagagctcattcaaattgatag

SEQ ID NO: 110025 - DNA, 25 bp, Homo sapien
ttttaatcgtctctaagacggaagt

SEQ ID NO: 110026 - DNA, 25 bp, Homo sapien
ttttaatcgtctgtaagacggaagt

SEQ ID NO: 110027 - DNA, 25 bp, Homo sapien
atctttgactctgtcatgaggtaag

SEQ ID NO: 110028 - DNA, 25 bp, Homo sapien
atctttgactctctcatgaggtaag

SEQ ID NO: 110029 - DNA, 25 bp, Homo sapien
gtctatagattcctctaaaacgatg

SEQ ID NO: 110030 - DNA, 25 bp, Homo sapien
gtctatagattcgtctaaaacgatg

SEQ ID NO: 110031 - DNA, 25 bp, Homo sapien
tgtcctacatctggaccaaacgatt

SEQ ID NO: 110032 - DNA, 25 bp, Homo sapien
tgtcctacatctcgaccaaacgatt

SEQ ID NO: 110033 - DNA, 25 bp, Homo sapien
gggaggtacaaactctacaaggatt

SEQ ID NO: 110034 - DNA, 25 bp, Homo sapien
gggaggtacaaagtctacaaggatt

SEQ ID NO: 110035 - DNA, 25 bp, Homo sapien
aggacaacatgtaaacgaacttcgt

SEQ ID NO: 110036 - DNA, 25 bp, Homo sapien
aggacaacatgttaacgaacttcgt

SEQ ID NO: 110037 - DNA, 25 bp, Homo sapien
cgtctctcgagatgtctcaacaacc

SEQ ID NO: 110038 - DNA, 25 bp, Homo sapien
cgtctctcgagaagtctcaacaacc

SEQ ID NO: 110039 - DNA, 25 bp, Homo sapien
tccgtcgactactccaacagacgta

SEQ ID NO: 110040 - DNA, 25 bp, Homo sapien
tccgtcgactacaccaacagacgta

SEQ ID NO: 110041 - DNA, 25 bp, Homo sapien
gcatcacgaggacctacacggcgta

SEQ ID NO: 110042 - DNA, 25 bp, Homo sapien
gcatcacgaggagctacacggcgta

SEQ ID NO: 110043 - DNA, 25 bp, Homo sapien
cccagtaacacgacacatctgaggg

SEQ ID NO: 110044 - DNA, 25 bp, Homo sapien
cccagtaacacgtcacatctgaggg

SEQ ID NO: 110045 - DNA, 25 bp, Homo sapien
cactacctacagccacaacaagaga

SEQ ID NO: 110046 - DNA, 25 bp, Homo sapien
cactacctacaggcacaacaagaga

SEQ ID NO: 110047 - DNA, 25 bp, Homo sapien
tcgaaagagaccaagtacatccgga

SEQ ID NO: 110048 - DNA, 25 bp, Homo sapien
tcgaaagagacctagtacatccgga

SEQ ID NO: 110049 - DNA, 25 bp, Homo sapien
tcaggaaggatagtacttcgcagac

SEQ ID NO: 110050 - DNA, 25 bp, Homo sapien
tcaggaaggatactacttcgcagac

SEQ ID NO: 110051 - DNA, 25 bp, Homo sapien
ttttaacggaagaatacaccagtag

SEQ ID NO: 110052 - DNA, 25 bp, Homo sapien
ttttaacggaagtatacaccagtag

SEQ ID NO: 110053 - DNA, 25 bp, Homo sapien
ccttcgttcaagtggaatcacaatg

SEQ ID NO: 110054 - DNA, 25 bp, Homo sapien
ccttcgttcaagaggaatcacaatg

SEQ ID NO: 110055 - DNA, 25 bp, Homo sapien
tccgttaaattaccttcttagaagg

SEQ ID NO: 110056 - DNA, 25 bp, Homo sapien
tccgttaaattagcttcttagaagg

SEQ ID NO: 110057 - DNA, 25 bp, Homo sapien
cttttttgagtgtagacctgactaa

SEQ ID NO: 110058 - DNA, 25 bp, Homo sapien
cttttttgagtgaagacctgactaa

SEQ ID NO: 110059 - DNA, 25 bp, Homo sapien
ccgtaattcagtgtaacgccatgtt

SEQ ID NO: 110060 - DNA, 25 bp, Homo sapien
ccgtaattcagtctaacgccatgtt

SEQ ID NO: 110061 - DNA, 25 bp, Homo sapien
cgtaatcttgggttcgtcgacaggg

SEQ ID NO: 110062 - DNA, 25 bp, Homo sapien
cgtaatcttgggatcgtcgacaggg

SEQ ID NO: 110063 - DNA, 25 bp, Homo sapien
agttctccttttgtgcgtcgccctg

SEQ ID NO: 110064 - DNA, 25 bp, Homo sapien
agttctccttttctgcgtcgccctg

SEQ ID NO: 110065 - DNA, 25 bp, Homo sapien
cgttctctttctcattcgggaaccc

SEQ ID NO: 110066 - DNA, 25 bp, Homo sapien
cgttctctttctgattcgggaaccc

SEQ ID NO: 110067 - DNA, 25 bp, Homo sapien
tgtatgtgtccatagacccgaatcc

SEQ ID NO: 110068 - DNA, 25 bp, Homo sapien
tgtatgtgtccaaagacccgaatcc

SEQ ID NO: 110069 - DNA, 25 bp, Homo sapien
acatgtatgtaacatacccaaattc

SEQ ID NO: 110070 - DNA, 25 bp, Homo sapien
acatgtatgtaagatacccaaattc

SEQ ID NO: 110071 - DNA, 25 bp, Homo sapien
taggttcaccttacggtgaaatctt

SEQ ID NO: 110072 - DNA, 25 bp, Homo sapien
taggttcacctttcggtgaaatctt

SEQ ID NO: 110073 - DNA, 25 bp, Homo sapien
aacaacctctggaacgtgaacatga

SEQ ID NO: 110074 - DNA, 25 bp, Homo sapien
aacaacctctggtacgtgaacatga

SEQ ID NO: 110075 - DNA, 25 bp, Homo sapien
gagaaccgacagaggtcatacatgg

SEQ ID NO: 110076 - DNA, 25 bp, Homo sapien
gagaaccgacagtggtcatacatgg

SEQ ID NO: 110077 - DNA, 25 bp, Homo sapien
gaaagggtactgaggacatcaagac

SEQ ID NO: 110078 - DNA, 25 bp, Homo sapien
gaaagggtactgtggacatcaagac

SEQ ID NO: 110079 - DNA, 25 bp, Homo sapien
agaatgttaacttggaccaccaaac

SEQ ID NO: 110080 - DNA, 25 bp, Homo sapien
agaatgttaactaggaccaccaaac

SEQ ID NO: 110081 - DNA, 25 bp, Homo sapien
gtcgatttacgtcttaccactgaaa

SEQ ID NO: 110082 - DNA, 25 bp, Homo sapien
gtcgatttacgtgttaccactgaaa

SEQ ID NO: 110083 - DNA, 25 bp, Homo sapien
gtcatgttcttttgtctgtggatac

SEQ ID NO: 110084 - DNA, 25 bp, Homo sapien
gtcatgttctttagtctgtggatac

SEQ ID NO: 110085 - DNA, 25 bp, Homo sapien
ttaagatctctgacgcatggactac

SEQ ID NO: 110086 - DNA, 25 bp, Homo sapien
ttaagatctctgtcgcatggactac

SEQ ID NO: 110087 - DNA, 25 bp, Homo sapien
ggccctagtcgtctccacgtttcag

SEQ ID NO: 110088 - DNA, 25 bp, Homo sapien
ggccctagtcgtgtccacgtttcag

SEQ ID NO: 110089 - DNA, 25 bp, Homo sapien
tcggtcctctttagtttgtctccgg

SEQ ID NO: 110090 - DNA, 25 bp, Homo sapien
tcggtcctcttttgtttgtctccgg

SEQ ID NO: 110091 - DNA, 25 bp, Homo sapien
attgacatcgtacgatttctttcca

SEQ ID NO: 110092 - DNA, 25 bp, Homo sapien
attgacatcgtaggatttctttcca

SEQ ID NO: 110093 - DNA, 25 bp, Homo sapien
tatcgatcggatacatgtcgttcaa

SEQ ID NO: 110094 - DNA, 25 bp, Homo sapien
tatcgatcggattcatgtcgttcaa

SEQ ID NO: 110095 - DNA, 25 bp, Homo sapien
caagttagggacttcttgcttaaat

SEQ ID NO: 110096 - DNA, 25 bp, Homo sapien
caagttagggacatcttgcttaaat

SEQ ID NO: 110097 - DNA, 25 bp, Homo sapien
tcagaaggggcgtaatgtgttttcc

SEQ ID NO: 110098 - DNA, 25 bp, Homo sapien
tcagaaggggcgaaatgtgttttcc

SEQ ID NO: 110099 - DNA, 25 bp, Homo sapien
tagacattgaggattttgttttgtt

SEQ ID NO: 110100 - DNA, 25 bp, Homo sapien
tagacattgaggtttttgttttgtt

SEQ ID NO: 110101 - DNA, 25 bp, Homo sapien
ctaaaagatcttgtcgttttgtgtc

SEQ ID NO: 110102 - DNA, 25 bp, Homo sapien
ctaaaagatcttctcgttttgtgtc

SEQ ID NO: 110103 - DNA, 25 bp, Homo sapien
atcccaattctgttcttgtggtggt

SEQ ID NO: 110104 - DNA, 25 bp, Homo sapien
atcccaattctgatcttgtggtggt

SEQ ID NO: 110105 - DNA, 25 bp, Homo sapien
ctctaccctttctactctgggtggt

SEQ ID NO: 110106 - DNA, 25 bp, Homo sapien
ctctaccctttcaactctgggtggt

SEQ ID NO: 110107 - DNA, 25 bp, Homo sapien
actccgcctctacagatcatgaaga

SEQ ID NO: 110108 - DNA, 25 bp, Homo sapien
actccgcctctagagatcatgaaga

SEQ ID NO: 110109 - DNA, 25 bp, Homo sapien
gatttccgcccgagactgattaaac

SEQ ID NO: 110110 - DNA, 25 bp, Homo sapien
gatttccgcccgtgactgattaaac

SEQ ID NO: 110111 - DNA, 25 bp, Homo sapien
gtcgagacagcgacccgtttcacca

SEQ ID NO: 110112 - DNA, 25 bp, Homo sapien
gtcgagacagcgtcccgtttcacca

SEQ ID NO: 110113 - DNA, 25 bp, Homo sapien
agtcgctacaattcccttgtctgca

SEQ ID NO: 110114 - DNA, 25 bp, Homo sapien
agtcgctacaatacccttgtctgca

SEQ ID NO: 110115 - DNA, 25 bp, Homo sapien
caggcaaaagagtgtctgtaactaa

SEQ ID NO: 110116 - DNA, 25 bp, Homo sapien
caggcaaaagagagtctgtaactaa

SEQ ID NO: 110117 - DNA, 25 bp, Homo sapien
cctaagaaagggtctctgaagtttc

SEQ ID NO: 110118 - DNA, 25 bp, Homo sapien
cctaagaaagggactctgaagtttc

SEQ ID NO: 110119 - DNA, 25 bp, Homo sapien
cgaaaaagggacaaggaagccgtcg

SEQ ID NO: 110120 - DNA, 25 bp, Homo sapien
cgaaaaagggactaggaagccgtcg

SEQ ID NO: 110121 - DNA, 25 bp, Homo sapien
gacaaataagaggggtttagtcccc

SEQ ID NO: 110122 - DNA, 25 bp, Homo sapien
gacaaataagagcggtttagtcccc

SEQ ID NO: 110123 - DNA, 25 bp, Homo sapien
cggacagttgaagatgttggaccac

SEQ ID NO: 110124 - DNA, 25 bp, Homo sapien
cggacagttgaacatgttggaccac

SEQ ID NO: 110125 - DNA, 25 bp, Homo sapien
catggtatttacctgttggatcatg

SEQ ID NO: 110126 - DNA, 25 bp, Homo sapien
catggtatttacgtgttggatcatg

SEQ ID NO: 110127 - DNA, 25 bp, Homo sapien
gtagtcttcccgtggtatatatgta

SEQ ID NO: 110128 - DNA, 25 bp, Homo sapien
gtagtcttcccgaggtatatatgta

SEQ ID NO: 110129 - DNA, 25 bp, Homo sapien
gccccacgacggtacacgtagtaga

SEQ ID NO: 110130 - DNA, 25 bp, Homo sapien
gccccacgacggaacacgtagtaga

SEQ ID NO: 110131 - DNA, 25 bp, Homo sapien
cacactactcgaaccccggagtaga

SEQ ID NO: 110132 - DNA, 25 bp, Homo sapien
cacactactcgatccccggagtaga

SEQ ID NO: 110133 - DNA, 25 bp, Homo sapien
gaccactcagaccacggcgacggag

SEQ ID NO: 110134 - DNA, 25 bp, Homo sapien
gaccactcagacgacggcgacggag

SEQ ID NO: 110135 - DNA, 25 bp, Homo sapien
gacacatagtcttccgggtcacagt

SEQ ID NO: 110136 - DNA, 25 bp, Homo sapien
gacacatagtctaccgggtcacagt

SEQ ID NO: 110137 - DNA, 25 bp, Homo sapien
tataaatgtaaccaggtcggtggtc

SEQ ID NO: 110138 - DNA, 25 bp, Homo sapien
tataaatgtaacgaggtcggtggtc

SEQ ID NO: 110139 - DNA, 25 bp, Homo sapien
cctcaaagttatggcctctagtacg

SEQ ID NO: 110140 - DNA, 25 bp, Homo sapien
cctcaaagttatcgcctctagtacg

SEQ ID NO: 110141 - DNA, 25 bp, Homo sapien
gctacatcccgtcgtaagacaacat

SEQ ID NO: 110142 - DNA, 25 bp, Homo sapien
gctacatcccgtggtaagacaacat

SEQ ID NO: 110143 - DNA, 25 bp, Homo sapien
atagttccctactgtacagtgaaga

SEQ ID NO: 110144 - DNA, 25 bp, Homo sapien
atagttccctacagtacagtgaaga

SEQ ID NO: 110145 - DNA, 25 bp, Homo sapien
gtacttatctgttctatatttcgag

SEQ ID NO: 110146 - DNA, 25 bp, Homo sapien
gtacttatctgtactatatttcgag

SEQ ID NO: 110147 - DNA, 25 bp, Homo sapien
gtctctacttgatttactcctcgag

SEQ ID NO: 110148 - DNA, 25 bp, Homo sapien
gtctctacttgaattactcctcgag

SEQ ID NO: 110149 - DNA, 25 bp, Homo sapien
tcgtgaactataggttcttcacttt

SEQ ID NO: 110150 - DNA, 25 bp, Homo sapien
tcgtgaactatacgttcttcacttt

SEQ ID NO: 110151 - DNA, 25 bp, Homo sapien
gggtaccggaaccttctctacggtc

SEQ ID NO: 110152 - DNA, 25 bp, Homo sapien
gggtaccggaacgttctctacggtc

SEQ ID NO: 110153 - DNA, 25 bp, Homo sapien
cggcgtaccgcgagtcctcaggagc

SEQ ID NO: 110154 - DNA, 25 bp, Homo sapien
cggcgtaccgcgtgtcctcaggagc

SEQ ID NO: 110155 - DNA, 25 bp, Homo sapien
tctttcctggtcaggccgtcggtct

SEQ ID NO: 110156 - DNA, 25 bp, Homo sapien
tctttcctggtctggccgtcggtct

SEQ ID NO: 110157 - DNA, 25 bp, Homo sapien
tgcccgtcggactggtcctcggtgt

SEQ ID NO: 110158 - DNA, 25 bp, Homo sapien
tgcccgtcggacaggtcctcggtgt

SEQ ID NO: 110159 - DNA, 25 bp, Homo sapien
tgcacgtggtccaggcactcggtgt

SEQ ID NO: 110160 - DNA, 25 bp, Homo sapien
tgcacgtggtcctggcactcggtgt

SEQ ID NO: 110161 - DNA, 25 bp, Homo sapien
gggatcggccggacctctcgtagac

SEQ ID NO: 110162 - DNA, 25 bp, Homo sapien
gggatcggccggtcctctcgtagac

SEQ ID NO: 110163 - DNA, 25 bp, Homo sapien
tcggcgttcgcgaaagaattcgcgc

SEQ ID NO: 110164 - DNA, 25 bp, Homo sapien
tcggcgttcgcgtaagaattcgcgc

SEQ ID NO: 110165 - DNA, 25 bp, Homo sapien
aaggacacagaaacacaactgtttg

SEQ ID NO: 110166 - DNA, 25 bp, Homo sapien
aaggacacagaatcacaactgtttg

SEQ ID NO: 110167 - DNA, 25 bp, Homo sapien
atgtgaagaattacccgttctctag

SEQ ID NO: 110168 - DNA, 25 bp, Homo sapien
atgtgaagaatttcccgttctctag

SEQ ID NO: 110169 - DNA, 25 bp, Homo sapien
atgaggaggagactccggtagtccc

SEQ ID NO: 110170 - DNA, 25 bp, Homo sapien
atgaggaggagagtccggtagtccc

SEQ ID NO: 110171 - DNA, 25 bp, Homo sapien
tacttttaggaggttaacttgttcc

SEQ ID NO: 110172 - DNA, 25 bp, Homo sapien
tacttttaggagcttaacttgttcc

SEQ ID NO: 110173 - DNA, 25 bp, Homo sapien
gtctgggagactctattcgtgtcgg

SEQ ID NO: 110174 - DNA, 25 bp, Homo sapien
gtctgggagactgtattcgtgtcgg

SEQ ID NO: 110175 - DNA, 25 bp, Homo sapien
gaggttttacataaagtgtcttcct

SEQ ID NO: 110176 - DNA, 25 bp, Homo sapien
gaggttttacattaagtgtcttcct

SEQ ID NO: 110177 - DNA, 25 bp, Homo sapien
gacatttccgtgtaagtctcttcct

SEQ ID NO: 110178 - DNA, 25 bp, Homo sapien
gacatttccgtgaaagtctcttcct

SEQ ID NO: 110179 - DNA, 25 bp, Homo sapien
tgtctttctttgtttgactccaccg

SEQ ID NO: 110180 - DNA, 25 bp, Homo sapien
tgtctttctttgattgactccaccg

SEQ ID NO: 110181 - DNA, 25 bp, Homo sapien
tctttgtagggtcgttacgtccccg

SEQ ID NO: 110182 - DNA, 25 bp, Homo sapien
tctttgtagggtggttacgtccccg

SEQ ID NO: 110183 - DNA, 25 bp, Homo sapien
tctaaagaccctacgtctctcgtcg

SEQ ID NO: 110184 - DNA, 25 bp, Homo sapien
tctaaagacccttcgtctctcgtcg

SEQ ID NO: 110185 - DNA, 25 bp, Homo sapien
tactgaagaacatttctgcatagcg

SEQ ID NO: 110186 - DNA, 25 bp, Homo sapien
tactgaagaacaattctgcatagcg

SEQ ID NO: 110187 - DNA, 25 bp, Homo sapien
ttagaacttacacctttgtcaagtg

SEQ ID NO: 110188 - DNA, 25 bp, Homo sapien
ttagaacttacagctttgtcaagtg

SEQ ID NO: 110189 - DNA, 25 bp, Homo sapien
tgagatgtgtacgtcttgttcaatc

SEQ ID NO: 110190 - DNA, 25 bp, Homo sapien
tgagatgtgtacctcttgttcaatc

SEQ ID NO: 110191 - DNA, 25 bp, Homo sapien
ggacaaccagaccttgagccggaac

SEQ ID NO: 110192 - DNA, 25 bp, Homo sapien
ggacaaccagacgttgagccggaac

SEQ ID NO: 110193 - DNA, 25 bp, Homo sapien
tcgactgttatagtgtcgtcgggat

SEQ ID NO: 110194 - DNA, 25 bp, Homo sapien
tcgactgttatactgtcgtcgggat

SEQ ID NO: 110195 - DNA, 25 bp, Homo sapien
ttctcgtattcaaccttagtggtgg

SEQ ID NO: 110196 - DNA, 25 bp, Homo sapien
ttctcgtattcatccttagtggtgg

SEQ ID NO: 110197 - DNA, 25 bp, Homo sapien
gtatcttcggttttctattctgaaa

SEQ ID NO: 110198 - DNA, 25 bp, Homo sapien
gtatcttcggttatctattctgaaa

SEQ ID NO: 110199 - DNA, 25 bp, Homo sapien
gacgggcccgcgatcaccatggtga

SEQ ID NO: 110200 - DNA, 25 bp, Homo sapien
gacgggcccgcgttcaccatggtga

SEQ ID NO: 110201 - DNA, 25 bp, Homo sapien
cgttcttcaccgtctaagacgggga

SEQ ID NO: 110202 - DNA, 25 bp, Homo sapien
cgttcttcaccgactaagacgggga

SEQ ID NO: 110203 - DNA, 25 bp, Homo sapien
ctccacgagcagtgtagaccctcga

SEQ ID NO: 110204 - DNA, 25 bp, Homo sapien
ctccacgagcagagtagaccctcga

SEQ ID NO: 110205 - DNA, 25 bp, Homo sapien
cgacactcggccaagtccaggagtc

SEQ ID NO: 110206 - DNA, 25 bp, Homo sapien
cgacactcggcctagtccaggagtc

SEQ ID NO: 110207 - DNA, 25 bp, Homo sapien
gaactagagcttcacgtttgagaag

SEQ ID NO: 110208 - DNA, 25 bp, Homo sapien
gaactagagcttgacgtttgagaag

SEQ ID NO: 110209 - DNA, 25 bp, Homo sapien
aggttgttgttgttcgtagtggagt

SEQ ID NO: 110210 - DNA, 25 bp, Homo sapien
aggttgttgttgatcgtagtggagt

SEQ ID NO: 110211 - DNA, 25 bp, Homo sapien
tcgttgttgtatacgacgacgagaa

SEQ ID NO: 110212 - DNA, 25 bp, Homo sapien
tcgttgttgtattcgacgacgagaa

SEQ ID NO: 110213 - DNA, 25 bp, Homo sapien
agatgtaacctttctcgtgtggaac

SEQ ID NO: 110214 - DNA, 25 bp, Homo sapien
agatgtaaccttactcgtgtggaac

SEQ ID NO: 110215 - DNA, 25 bp, Homo sapien
gaaggttcccacttcgacaggggag

SEQ ID NO: 110216 - DNA, 25 bp, Homo sapien
gaaggttcccacatcgacaggggag

SEQ ID NO: 110217 - DNA, 25 bp, Homo sapien
gtgagtctcttcgatgactcgggaa

SEQ ID NO: 110218 - DNA, 25 bp, Homo sapien
gtgagtctcttccatgactcgggaa

SEQ ID NO: 110219 - DNA, 25 bp, Homo sapien
gtcccgacgggaagacgtcacaact

SEQ ID NO: 110220 - DNA, 25 bp, Homo sapien
gtcccgacgggatgacgtcacaact

SEQ ID NO: 110221 - DNA, 25 bp, Homo sapien
aacactagtcgaggttgactccttt

SEQ ID NO: 110222 - DNA, 25 bp, Homo sapien
aacactagtcgacgttgactccttt

SEQ ID NO: 110223 - DNA, 25 bp, Homo sapien
tcggaatgagaggatagtacccatc

SEQ ID NO: 110224 - DNA, 25 bp, Homo sapien
tcggaatgagagcatagtacccatc

SEQ ID NO: 110225 - DNA, 25 bp, Homo sapien
gacgattcgagtgaagtaatctccc

SEQ ID NO: 110226 - DNA, 25 bp, Homo sapien
gacgattcgagtcaagtaatctccc

SEQ ID NO: 110227 - DNA, 25 bp, Homo sapien
gtgcgaatagagcaactgtgccccg

SEQ ID NO: 110228 - DNA, 25 bp, Homo sapien
gtgcgaatagaggaactgtgccccg

SEQ ID NO: 110229 - DNA, 25 bp, Homo sapien
gacctcgaaaaagactggacacccg

SEQ ID NO: 110230 - DNA, 25 bp, Homo sapien
gacctcgaaaaacactggacacccg

SEQ ID NO: 110231 - DNA, 25 bp, Homo sapien
cacctgagaaagattgtacgaccct

SEQ ID NO: 110232 - DNA, 25 bp, Homo sapien
cacctgagaaagtttgtacgaccct

SEQ ID NO: 110233 - DNA, 25 bp, Homo sapien
tccgtctaccgtgtgtccagcaaca

SEQ ID NO: 110234 - DNA, 25 bp, Homo sapien
tccgtctaccgtctgtccagcaaca

SEQ ID NO: 110235 - DNA, 25 bp, Homo sapien
ccacgcgggtcgacacgaggagcta

SEQ ID NO: 110236 - DNA, 25 bp, Homo sapien
ccacgcgggtcgtcacgaggagcta

SEQ ID NO: 110237 - DNA, 25 bp, Homo sapien
ttctcgtgtatttcgcaaaaagtta

SEQ ID NO: 110238 - DNA, 25 bp, Homo sapien
ttctcgtgtattacgcaaaaagtta

SEQ ID NO: 110239 - DNA, 25 bp, Homo sapien
gtgtgagtaaaaaccgagaaccaaa

SEQ ID NO: 110240 - DNA, 25 bp, Homo sapien
gtgtgagtaaaatccgagaaccaaa

SEQ ID NO: 110241 - DNA, 25 bp, Homo sapien
attaaagaaatcgagatccactcag

SEQ ID NO: 110242 - DNA, 25 bp, Homo sapien
attaaagaaatccagatccactcag

SEQ ID NO: 110243 - DNA, 25 bp, Homo sapien
cacaaagtaactcgaggtcccaccg

SEQ ID NO: 110244 - DNA, 25 bp, Homo sapien
cacaaagtaactggaggtcccaccg

SEQ ID NO: 110245 - DNA, 25 bp, Homo sapien
atgtaagtaccgacgggtccgcccg

SEQ ID NO: 110246 - DNA, 25 bp, Homo sapien
atgtaagtaccgtcgggtccgcccg

SEQ ID NO: 110247 - DNA, 25 bp, Homo sapien
cggtataacgcatccgctccaggtc

SEQ ID NO: 110248 - DNA, 25 bp, Homo sapien
cggtataacgcaaccgctccaggtc

SEQ ID NO: 110249 - DNA, 25 bp, Homo sapien
ccgtctactggaacgcgaccggggc

SEQ ID NO: 110250 - DNA, 25 bp, Homo sapien
ccgtctactggatcgcgaccggggc

SEQ ID NO: 110251 - DNA, 25 bp, Homo sapien
gcctctttcgcgtccgatttcggcg

SEQ ID NO: 110252 - DNA, 25 bp, Homo sapien
gcctctttcgcgaccgatttcggcg

SEQ ID NO: 110253 - DNA, 25 bp, Homo sapien
atacgttacggtcgacatattggag

SEQ ID NO: 110254 - DNA, 25 bp, Homo sapien
atacgttacggtggacatattggag

SEQ ID NO: 110255 - DNA, 25 bp, Homo sapien
catacttcggtcactaacatgtgtt

SEQ ID NO: 110256 - DNA, 25 bp, Homo sapien
catacttcggtctctaacatgtgtt

SEQ ID NO: 110257 - DNA, 25 bp, Homo sapien
tctacatgtgtacacgagtgtgtcc

SEQ ID NO: 110258 - DNA, 25 bp, Homo sapien
tctacatgtgtagacgagtgtgtcc

SEQ ID NO: 110259 - DNA, 25 bp, Homo sapien
cctacagctctcagacgtagggtca

SEQ ID NO: 110260 - DNA, 25 bp, Homo sapien
cctacagctctctgacgtagggtca

SEQ ID NO: 110261 - DNA, 25 bp, Homo sapien
ctctgagaatctcgtcttcacacag

SEQ ID NO: 110262 - DNA, 25 bp, Homo sapien
ctctgagaatctggtcttcacacag

SEQ ID NO: 110263 - DNA, 25 bp, Homo sapien
tattataacctgttcgtcccagagt

SEQ ID NO: 110264 - DNA, 25 bp, Homo sapien
tattataacctgatcgtcccagagt

SEQ ID NO: 110265 - DNA, 25 bp, Homo sapien
tctccctacctctctatctgggggt

SEQ ID NO: 110266 - DNA, 25 bp, Homo sapien
tctccctacctcactatctgggggt

SEQ ID NO: 110267 - DNA, 25 bp, Homo sapien
cctccaactctgtcgcagcggagcg

SEQ ID NO: 110268 - DNA, 25 bp, Homo sapien
cctccaactctgacgcagcggagcg

SEQ ID NO: 110269 - DNA, 25 bp, Homo sapien
gaaacgccggtcgtccccgtagaga

SEQ ID NO: 110270 - DNA, 25 bp, Homo sapien
gaaacgccggtcctccccgtagaga

SEQ ID NO: 110271 - DNA, 25 bp, Homo sapien
agacgtccggtcgagacgaggacaa

SEQ ID NO: 110272 - DNA, 25 bp, Homo sapien
agacgtccggtccagacgaggacaa

SEQ ID NO: 110273 - DNA, 25 bp, Homo sapien
acccacggccggtcgaggttcaaac

SEQ ID NO: 110274 - DNA, 25 bp, Homo sapien
acccacggccggacgaggttcaaac

SEQ ID NO: 110275 - DNA, 25 bp, Homo sapien
tctctacttcttctcataaagtaaa

SEQ ID NO: 110276 - DNA, 25 bp, Homo sapien
tctctacttcttgtcataaagtaaa

SEQ ID NO: 110277 - DNA, 25 bp, Homo sapien
atgtattatagataccacggggaca

SEQ ID NO: 110278 - DNA, 25 bp, Homo sapien
atgtattatagaaaccacggggaca

SEQ ID NO: 110279 - DNA, 25 bp, Homo sapien
cgttacacacgtgaaccagggaaca

SEQ ID NO: 110280 - DNA, 25 bp, Homo sapien
cgttacacacgtcaaccagggaaca

SEQ ID NO: 110281 - DNA, 25 bp, Homo sapien
cagaagaacccctcgtcatgtcgga

SEQ ID NO: 110282 - DNA, 25 bp, Homo sapien
cagaagaaccccacgtcatgtcgga

SEQ ID NO: 110283 - DNA, 25 bp, Homo sapien
gaaaagatcccgttaagttcttcca

SEQ ID NO: 110284 - DNA, 25 bp, Homo sapien
gaaaagatcccgataagttcttcca

SEQ ID NO: 110285 - DNA, 25 bp, Homo sapien
aaaagttcagtgaacttcattcaga

SEQ ID NO: 110286 - DNA, 25 bp, Homo sapien
aaaagttcagtgtacttcattcaga

SEQ ID NO: 110287 - DNA, 25 bp, Homo sapien
tcgattgtaaactttcgttacagac

SEQ ID NO: 110288 - DNA, 25 bp, Homo sapien
tcgattgtaaacattcgttacagac

SEQ ID NO: 110289 - DNA, 25 bp, Homo sapien
gtttacttgatcctttataagacga

SEQ ID NO: 110290 - DNA, 25 bp, Homo sapien
gtttacttgatcgtttataagacga

SEQ ID NO: 110291 - DNA, 25 bp, Homo sapien
ccgttgacaaatgttacacaagtaa

SEQ ID NO: 110292 - DNA, 25 bp, Homo sapien
ccgttgacaaatcttacacaagtaa

SEQ ID NO: 110293 - DNA, 25 bp, Homo sapien
ctgtgtctcattacgtattgccaca

SEQ ID NO: 110294 - DNA, 25 bp, Homo sapien
ctgtgtctcatttcgtattgccaca

SEQ ID NO: 110295 - DNA, 25 bp, Homo sapien
tgtgtcgttggtcgttggactccat

SEQ ID NO: 110296 - DNA, 25 bp, Homo sapien
tgtgtcgttggtggttggactccat

SEQ ID NO: 110297 - DNA, 25 bp, Homo sapien
cgatctcctctgtctggtactccgg

SEQ ID NO: 110298 - DNA, 25 bp, Homo sapien
cgatctcctctgactggtactccgg

SEQ ID NO: 110299 - DNA, 25 bp, Homo sapien
ggcttcctgtgtcgaccgtaggtcc

SEQ ID NO: 110300 - DNA, 25 bp, Homo sapien
ggcttcctgtgtggaccgtaggtcc

SEQ ID NO: 110301 - DNA, 25 bp, Homo sapien
acttttaccgaaggtagtctttatg

SEQ ID NO: 110302 - DNA, 25 bp, Homo sapien
acttttaccgaacgtagtctttatg

SEQ ID NO: 110303 - DNA, 25 bp, Homo sapien
ctactcttcggaaattctactgatg

SEQ ID NO: 110304 - DNA, 25 bp, Homo sapien
ctactcttcggatattctactgatg

SEQ ID NO: 110305 - DNA, 25 bp, Homo sapien
gaccgttccctaaattacgtaaacg

SEQ ID NO: 110306 - DNA, 25 bp, Homo sapien
gaccgttccctatattacgtaaacg

SEQ ID NO: 110307 - DNA, 25 bp, Homo sapien
accaccggagtgttactgtatcaga

SEQ ID NO: 110308 - DNA, 25 bp, Homo sapien
accaccggagtgatactgtatcaga

SEQ ID NO: 110309 - DNA, 25 bp, Homo sapien
tgacagggcgtcatcttacgtaaac

SEQ ID NO: 110310 - DNA, 25 bp, Homo sapien
tgacagggcgtcttcttacgtaaac

SEQ ID NO: 110311 - DNA, 25 bp, Homo sapien
aaagactgttgtacttcaaaagact

SEQ ID NO: 110312 - DNA, 25 bp, Homo sapien
aaagactgttgttcttcaaaagact

SEQ ID NO: 110313 - DNA, 25 bp, Homo sapien
cgtaagtggacacaagagacaatcc

SEQ ID NO: 110314 - DNA, 25 bp, Homo sapien
cgtaagtggacagaagagacaatcc

SEQ ID NO: 110315 - DNA, 25 bp, Homo sapien
gggacggtcgaacacgaaacatcac

SEQ ID NO: 110316 - DNA, 25 bp, Homo sapien
gggacggtcgaagacgaaacatcac

SEQ ID NO: 110317 - DNA, 25 bp, Homo sapien
aagacgagtagattcaaaaacctat

SEQ ID NO: 110318 - DNA, 25 bp, Homo sapien
aagacgagtagaatcaaaaacctat

SEQ ID NO: 110319 - DNA, 25 bp, Homo sapien
ctatgacgagagattacaaattcat

SEQ ID NO: 110320 - DNA, 25 bp, Homo sapien
ctatgacgagagtttacaaattcat

SEQ ID NO: 110321 - DNA, 25 bp, Homo sapien
cgaggaaggtcatcgctaaggacat

SEQ ID NO: 110322 - DNA, 25 bp, Homo sapien
cgaggaaggtcaacgctaaggacat

SEQ ID NO: 110323 - DNA, 25 bp, Homo sapien
atgttggcgacaggtcagtacgaca

SEQ ID NO: 110324 - DNA, 25 bp, Homo sapien
atgttggcgacacgtcagtacgaca

SEQ ID NO: 110325 - DNA, 25 bp, Homo sapien
acgtgtctcttgagacctgaactca

SEQ ID NO: 110326 - DNA, 25 bp, Homo sapien
acgtgtctcttgtgacctgaactca

SEQ ID NO: 110327 - DNA, 25 bp, Homo sapien
aatgttctttctactcgaatcttac

SEQ ID NO: 110328 - DNA, 25 bp, Homo sapien
aatgttctttcttctcgaatcttac

SEQ ID NO: 110329 - DNA, 25 bp, Homo sapien
atgtatgtatctccctcttctttct

SEQ ID NO: 110330 - DNA, 25 bp, Homo sapien
atgtatgtatctgcctcttctttct

SEQ ID NO: 110331 - DNA, 25 bp, Homo sapien
tgaccatttcgagttccattttggt

SEQ ID NO: 110332 - DNA, 25 bp, Homo sapien
tgaccatttcgacttccattttggt

SEQ ID NO: 110333 - DNA, 25 bp, Homo sapien
gtttctcccttgaatgttacttacg

SEQ ID NO: 110334 - DNA, 25 bp, Homo sapien
gtttctcccttgtatgttacttacg

SEQ ID NO: 110335 - DNA, 25 bp, Homo sapien
ttcttgtacctttagggttagtcgg

SEQ ID NO: 110336 - DNA, 25 bp, Homo sapien
ttcttgtaccttaagggttagtcgg

SEQ ID NO: 110337 - DNA, 25 bp, Homo sapien
cttggttctatatgcggtatactag

SEQ ID NO: 110338 - DNA, 25 bp, Homo sapien
cttggttctataagcggtatactag

SEQ ID NO: 110339 - DNA, 25 bp, Homo sapien
ttatagtgataattaacatgctccg

SEQ ID NO: 110340 - DNA, 25 bp, Homo sapien
ttatagtgataaataacatgctccg

SEQ ID NO: 110341 - DNA, 25 bp, Homo sapien
atggttagacgtaacggtagtttcc

SEQ ID NO: 110342 - DNA, 25 bp, Homo sapien
atggttagacgttacggtagtttcc

SEQ ID NO: 110343 - DNA, 25 bp, Homo sapien
ggtcgtacgacaacgggacgtgaca

SEQ ID NO: 110344 - DNA, 25 bp, Homo sapien
ggtcgtacgacatcgggacgtgaca

SEQ ID NO: 110345 - DNA, 25 bp, Homo sapien
agttgttactaaggtccagaggaca

SEQ ID NO: 110346 - DNA, 25 bp, Homo sapien
agttgttactaacgtccagaggaca

SEQ ID NO: 110347 - DNA, 25 bp, Homo sapien
ccatcgttacaaggtcagagttaat

SEQ ID NO: 110348 - DNA, 25 bp, Homo sapien
ccatcgttacaacgtcagagttaat

SEQ ID NO: 110349 - DNA, 25 bp, Homo sapien
ctcaaggtctattgtcgttgtgtaa

SEQ ID NO: 110350 - DNA, 25 bp, Homo sapien
ctcaaggtctatagtcgttgtgtaa

SEQ ID NO: 110351 - DNA, 25 bp, Homo sapien
ctcccaactcttggatacttgtaag

SEQ ID NO: 110352 - DNA, 25 bp, Homo sapien
ctcccaactcttcgatacttgtaag

SEQ ID NO: 110353 - DNA, 25 bp, Homo sapien
taaggtaaattctggtaccctagca

SEQ ID NO: 110354 - DNA, 25 bp, Homo sapien
taaggtaaattcaggtaccctagca

SEQ ID NO: 110355 - DNA, 25 bp, Homo sapien
cacgaaaagtgtagttcaaccgaat

SEQ ID NO: 110356 - DNA, 25 bp, Homo sapien
cacgaaaagtgttgttcaaccgaat

SEQ ID NO: 110357 - DNA, 25 bp, Homo sapien
cagtgaagatccatgttacattggt

SEQ ID NO: 110358 - DNA, 25 bp, Homo sapien
cagtgaagatccttgttacattggt

SEQ ID NO: 110359 - DNA, 25 bp, Homo sapien
tttaccccacgtcaggacgacctaa

SEQ ID NO: 110360 - DNA, 25 bp, Homo sapien
tttaccccacgtgaggacgacctaa

SEQ ID NO: 110361 - DNA, 25 bp, Homo sapien
tgaccatcaagtacgacaccagacg

SEQ ID NO: 110362 - DNA, 25 bp, Homo sapien
tgaccatcaagttcgacaccagacg

SEQ ID NO: 110363 - DNA, 25 bp, Homo sapien
catgacgactatcgaccccatcgga

SEQ ID NO: 110364 - DNA, 25 bp, Homo sapien
catgacgactatggaccccatcgga

SEQ ID NO: 110365 - DNA, 25 bp, Homo sapien
cggccttcgccatccggtcgtagta

SEQ ID NO: 110366 - DNA, 25 bp, Homo sapien
cggccttcgccaaccggtcgtagta

SEQ ID NO: 110367 - DNA, 25 bp, Homo sapien
ctgtcccaagaagtccagtcacgtc

SEQ ID NO: 110368 - DNA, 25 bp, Homo sapien
ctgtcccaagaactccagtcacgtc

SEQ ID NO: 110369 - DNA, 25 bp, Homo sapien
agtctccgacgagttatccagtccc

SEQ ID NO: 110370 - DNA, 25 bp, Homo sapien
agtctccgacgacttatccagtccc

SEQ ID NO: 110371 - DNA, 25 bp, Homo sapien
gtctccacagagtagctacttccac

SEQ ID NO: 110372 - DNA, 25 bp, Homo sapien
gtctccacagagaagctacttccac

SEQ ID NO: 110373 - DNA, 25 bp, Homo sapien
cggcgttcgcgaaagaattcgcgcc

SEQ ID NO: 110374 - DNA, 25 bp, Homo sapien
cggcgttcgcgatagaattcgcgcc

SEQ ID NO: 110375 - DNA, 25 bp, Homo sapien
gcgtggcactagtacatcggtagag

SEQ ID NO: 110376 - DNA, 25 bp, Homo sapien
gcgtggcactagaacatcggtagag

SEQ ID NO: 110377 - DNA, 25 bp, Homo sapien
tacgtgagctacgaccctcagttac

SEQ ID NO: 110378 - DNA, 25 bp, Homo sapien
tacgtgagctaccaccctcagttac

SEQ ID NO: 110379 - DNA, 25 bp, Homo sapien
aagagtataccatgtccatggtgac

SEQ ID NO: 110380 - DNA, 25 bp, Homo sapien
aagagtataccaagtccatggtgac

SEQ ID NO: 110381 - DNA, 25 bp, Homo sapien
tcaagtgccgtaactacctctttgc

SEQ ID NO: 110382 - DNA, 25 bp, Homo sapien
tcaagtgccgtatctacctctttgc

SEQ ID NO: 110383 - DNA, 25 bp, Homo sapien
acaaaggacacgtcaccattagtgg

SEQ ID NO: 110384 - DNA, 25 bp, Homo sapien
acaaaggacacgacaccattagtgg

SEQ ID NO: 110385 - DNA, 25 bp, Homo sapien
gtctcaaaatggtcaccggttaaag

SEQ ID NO: 110386 - DNA, 25 bp, Homo sapien
gtctcaaaatggacaccggttaaag

SEQ ID NO: 110387 - DNA, 25 bp, Homo sapien
ataaaatgtacgtccgtttggtaac

SEQ ID NO: 110388 - DNA, 25 bp, Homo sapien
ataaaatgtacgaccgtttggtaac

SEQ ID NO: 110389 - DNA, 25 bp, Homo sapien
acgataagattcaccgttttgttag

SEQ ID NO: 110390 - DNA, 25 bp, Homo sapien
acgataagattctccgttttgttag

SEQ ID NO: 110391 - DNA, 25 bp, Homo sapien
acacggagacacacatgtgttttcc

SEQ ID NO: 110392 - DNA, 25 bp, Homo sapien
acacggagacactcatgtgttttcc

SEQ ID NO: 110393 - DNA, 25 bp, Homo sapien
aaacctagaaatcaccaaggttaga

SEQ ID NO: 110394 - DNA, 25 bp, Homo sapien
aaacctagaaatgaccaaggttaga

SEQ ID NO: 110395 - DNA, 25 bp, Homo sapien
agacgaccaactaggcccaggaaga

SEQ ID NO: 110396 - DNA, 25 bp, Homo sapien
agacgaccaacttggcccaggaaga

SEQ ID NO: 110397 - DNA, 25 bp, Homo sapien
acgctactagtcctgaggttactac

SEQ ID NO: 110398 - DNA, 25 bp, Homo sapien
acgctactagtcgtgaggttactac

SEQ ID NO: 110399 - DNA, 25 bp, Homo sapien
cacataagtgtaggagacgttgtcg

SEQ ID NO: 110400 - DNA, 25 bp, Homo sapien
cacataagtgtacgagacgttgtcg

SEQ ID NO: 110401 - DNA, 25 bp, Homo sapien
caagacgagtcagtctacgtctgtc

SEQ ID NO: 110402 - DNA, 25 bp, Homo sapien
caagacgagtcactctacgtctgtc

SEQ ID NO: 110403 - DNA, 25 bp, Homo sapien
gttcaaacgatcgtcgtaagtatta

SEQ ID NO: 110404 - DNA, 25 bp, Homo sapien
gttcaaacgatcctcgtaagtatta

SEQ ID NO: 110405 - DNA, 25 bp, Homo sapien
gtgttaagtaaatcctcaacgtgga

SEQ ID NO: 110406 - DNA, 25 bp, Homo sapien
gtgttaagtaaaacctcaacgtgga

SEQ ID NO: 110407 - DNA, 25 bp, Homo sapien
ggtttacctaaatccgttgaaactt

SEQ ID NO: 110408 - DNA, 25 bp, Homo sapien
ggtttacctaaaaccgttgaaactt

SEQ ID NO: 110409 - DNA, 25 bp, Homo sapien
ggtaacctaagaaccctagaagaat

SEQ ID NO: 110410 - DNA, 25 bp, Homo sapien
ggtaacctaagatccctagaagaat

SEQ ID NO: 110411 - DNA, 25 bp, Homo sapien
ttgataaccttggtccaatggtcat

SEQ ID NO: 110412 - DNA, 25 bp, Homo sapien
ttgataaccttgctccaatggtcat

SEQ ID NO: 110413 - DNA, 25 bp, Homo sapien
ttttatctcctctcttgtagggacc

SEQ ID NO: 110414 - DNA, 25 bp, Homo sapien
ttttatctcctcacttgtagggacc

SEQ ID NO: 110415 - DNA, 25 bp, Homo sapien
taaatcgttcataccttaggtttgt

SEQ ID NO: 110416 - DNA, 25 bp, Homo sapien
taaatcgttcattccttaggtttgt

SEQ ID NO: 110417 - DNA, 25 bp, Homo sapien
tcggaagggacaacctccaagtttt

SEQ ID NO: 110418 - DNA, 25 bp, Homo sapien
tcggaagggacatcctccaagtttt

SEQ ID NO: 110419 - DNA, 25 bp, Homo sapien
gactgaagaacttcctcatttatag

SEQ ID NO: 110420 - DNA, 25 bp, Homo sapien
gactgaagaactacctcatttatag

SEQ ID NO: 110421 - DNA, 25 bp, Homo sapien
tgagaaagtaccttccttttgactc

SEQ ID NO: 110422 - DNA, 25 bp, Homo sapien
tgagaaagtaccatccttttgactc

SEQ ID NO: 110423 - DNA, 25 bp, Homo sapien
ttagtagaaggatgtccttttagcc

SEQ ID NO: 110424 - DNA, 25 bp, Homo sapien
ttagtagaaggaagtccttttagcc

SEQ ID NO: 110425 - DNA, 25 bp, Homo sapien
gtgtgacaaactgaaccctagaaag

SEQ ID NO: 110426 - DNA, 25 bp, Homo sapien
gtgtgacaaactcaaccctagaaag

SEQ ID NO: 110427 - DNA, 25 bp, Homo sapien
cgtcgaactgaaatccgagtcaagg

SEQ ID NO: 110428 - DNA, 25 bp, Homo sapien
cgtcgaactgaattccgagtcaagg

SEQ ID NO: 110429 - DNA, 25 bp, Homo sapien
gcggaatcctactgatgtataaatc

SEQ ID NO: 110430 - DNA, 25 bp, Homo sapien
gcggaatcctacagatgtataaatc

SEQ ID NO: 110431 - DNA, 25 bp, Homo sapien
ggatatttcccgacagacggactct

SEQ ID NO: 110432 - DNA, 25 bp, Homo sapien
ggatatttcccgtcagacggactct

SEQ ID NO: 110433 - DNA, 25 bp, Homo sapien
cgtaccggacccagtcagcttactt

SEQ ID NO: 110434 - DNA, 25 bp, Homo sapien
cgtaccggaccctgtcagcttactt

SEQ ID NO: 110435 - DNA, 25 bp, Homo sapien
gaacgtgacgtccatccgtcagacc

SEQ ID NO: 110436 - DNA, 25 bp, Homo sapien
gaacgtgacgtcgatccgtcagacc

SEQ ID NO: 110437 - DNA, 25 bp, Homo sapien
agaatacgtacgactttatctgctc

SEQ ID NO: 110438 - DNA, 25 bp, Homo sapien
agaatacgtacgtctttatctgctc

SEQ ID NO: 110439 - DNA, 25 bp, Homo sapien
gtaatctacgagtaattacattctg

SEQ ID NO: 110440 - DNA, 25 bp, Homo sapien
gtaatctacgagaaattacattctg

SEQ ID NO: 110441 - DNA, 25 bp, Homo sapien
cgtcacgtcgtggaaatctttttat

SEQ ID NO: 110442 - DNA, 25 bp, Homo sapien
cgtcacgtcgtgcaaatctttttat

SEQ ID NO: 110443 - DNA, 25 bp, Homo sapien
cctactgtaaaggttagtcatttta

SEQ ID NO: 110444 - DNA, 25 bp, Homo sapien
cctactgtaaagcttagtcatttta

SEQ ID NO: 110445 - DNA, 25 bp, Homo sapien
acatgttacttgctctttagtttgg

SEQ ID NO: 110446 - DNA, 25 bp, Homo sapien
acatgttacttggtctttagtttgg

SEQ ID NO: 110447 - DNA, 25 bp, Homo sapien
aaaaattaccgtagtcttttccgga

SEQ ID NO: 110448 - DNA, 25 bp, Homo sapien
aaaaattaccgttgtcttttccgga

SEQ ID NO: 110449 - DNA, 25 bp, Homo sapien
aacaggtacatgtactaattcaggg

SEQ ID NO: 110450 - DNA, 25 bp, Homo sapien
aacaggtacatgaactaattcaggg

SEQ ID NO: 110451 - DNA, 25 bp, Homo sapien
aaaagagactaaacttaattccagg

SEQ ID NO: 110452 - DNA, 25 bp, Homo sapien
aaaagagactaatcttaattccagg

SEQ ID NO: 110453 - DNA, 25 bp, Homo sapien
gactgaccgactccattttgcgtga

SEQ ID NO: 110454 - DNA, 25 bp, Homo sapien
gactgaccgactgcattttgcgtga

SEQ ID NO: 110455 - DNA, 25 bp, Homo sapien
aatgactccttcgtttggagactac

SEQ ID NO: 110456 - DNA, 25 bp, Homo sapien
aatgactccttcctttggagactac

SEQ ID NO: 110457 - DNA, 25 bp, Homo sapien
acacggtatgatctttatatgtttc

SEQ ID NO: 110458 - DNA, 25 bp, Homo sapien
acacggtatgatgtttatatgtttc

SEQ ID NO: 110459 - DNA, 25 bp, Homo sapien
acatcggagaccttctattcttaag

SEQ ID NO: 110460 - DNA, 25 bp, Homo sapien
acatcggagaccatctattcttaag

SEQ ID NO: 110461 - DNA, 25 bp, Homo sapien
gagaaccgacaggtgaaactacccg

SEQ ID NO: 110462 - DNA, 25 bp, Homo sapien
gagaaccgacagctgaaactacccg

SEQ ID NO: 110463 - DNA, 25 bp, Homo sapien
gaaacgtccgacgtacttaaaggcg

SEQ ID NO: 110464 - DNA, 25 bp, Homo sapien
gaaacgtccgacctacttaaaggcg

SEQ ID NO: 110465 - DNA, 25 bp, Homo sapien
gagagagacccgagttatcaggacc

SEQ ID NO: 110466 - DNA, 25 bp, Homo sapien
gagagagacccgtgttatcaggacc

SEQ ID NO: 110467 - DNA, 25 bp, Homo sapien
cacaccgggacttcgtacgtaaccg

SEQ ID NO: 110468 - DNA, 25 bp, Homo sapien
cacaccgggactacgtacgtaaccg

SEQ ID NO: 110469 - DNA, 25 bp, Homo sapien
atactaaaggggtcagtgtcccacc

SEQ ID NO: 110470 - DNA, 25 bp, Homo sapien
atactaaaggggacagtgtcccacc

SEQ ID NO: 110471 - DNA, 25 bp, Homo sapien
cttcatgtggaggaaggatccgctc

SEQ ID NO: 110472 - DNA, 25 bp, Homo sapien
cttcatgtggagcaaggatccgctc

SEQ ID NO: 110473 - DNA, 25 bp, Homo sapien
gacataaaagtgagagatcctcgtt

SEQ ID NO: 110474 - DNA, 25 bp, Homo sapien
gacataaaagtgtgagatcctcgtt

SEQ ID NO: 110475 - DNA, 25 bp, Homo sapien
cgaaggttgtacagtgaatcttctt

SEQ ID NO: 110476 - DNA, 25 bp, Homo sapien
cgaaggttgtactgtgaatcttctt

SEQ ID NO: 110477 - DNA, 25 bp, Homo sapien
ttatcgttctatacatggtagtact

SEQ ID NO: 110478 - DNA, 25 bp, Homo sapien
ttatcgttctattcatggtagtact

SEQ ID NO: 110479 - DNA, 25 bp, Homo sapien
atccagtttcggtacggtcggagag

SEQ ID NO: 110480 - DNA, 25 bp, Homo sapien
atccagtttcggaacggtcggagag

SEQ ID NO: 110481 - DNA, 25 bp, Homo sapien
tcccagacgcacgacgggagcgacg

SEQ ID NO: 110482 - DNA, 25 bp, Homo sapien
tcccagacgcaccacgggagcgacg

SEQ ID NO: 110483 - DNA, 25 bp, Homo sapien
gacaccactcgatccgggagtccgt

SEQ ID NO: 110484 - DNA, 25 bp, Homo sapien
gacaccactcgaaccgggagtccgt

SEQ ID NO: 110485 - DNA, 25 bp, Homo sapien
ccaaacgtataaacgtccctgatcg

SEQ ID NO: 110486 - DNA, 25 bp, Homo sapien
ccaaacgtataatcgtccctgatcg

SEQ ID NO: 110487 - DNA, 25 bp, Homo sapien
gacgaagatactagtctccggatcg

SEQ ID NO: 110488 - DNA, 25 bp, Homo sapien
gacgaagatacttgtctccggatcg

SEQ ID NO: 110489 - DNA, 25 bp, Homo sapien
ggaaagactcactctcgcggacgcg

SEQ ID NO: 110490 - DNA, 25 bp, Homo sapien
ggaaagactcacactcgcggacgcg

SEQ ID NO: 110491 - DNA, 25 bp, Homo sapien
ctccagacgtcgtcccgtctcagag

SEQ ID NO: 110492 - DNA, 25 bp, Homo sapien
ctccagacgtcgacccgtctcagag

SEQ ID NO: 110493 - DNA, 25 bp, Homo sapien
cgagtactacgaataactcgttaga

SEQ ID NO: 110494 - DNA, 25 bp, Homo sapien
cgagtactacgattaactcgttaga

SEQ ID NO: 110495 - DNA, 25 bp, Homo sapien
gacgtcgtactctttcccagtagac

SEQ ID NO: 110496 - DNA, 25 bp, Homo sapien
gacgtcgtactcattcccagtagac

SEQ ID NO: 110497 - DNA, 25 bp, Homo sapien
tggtcgtcgctcttctcgcagtgta

SEQ ID NO: 110498 - DNA, 25 bp, Homo sapien
tggtcgtcgctcatctcgcagtgta

SEQ ID NO: 110499 - DNA, 25 bp, Homo sapien
ttttcgaatacgtaatcccacgaag

SEQ ID NO: 110500 - DNA, 25 bp, Homo sapien
ttttcgaatacgaaatcccacgaag

SEQ ID NO: 110501 - DNA, 25 bp, Homo sapien
cctcgtgtcctatcttttagtcttg

SEQ ID NO: 110502 - DNA, 25 bp, Homo sapien
cctcgtgtcctaacttttagtcttg

SEQ ID NO: 110503 - DNA, 25 bp, Homo sapien
cttccgagtcaaactgtccttcatg

SEQ ID NO: 110504 - DNA, 25 bp, Homo sapien
cttccgagtcaatctgtccttcatg

SEQ ID NO: 110505 - DNA, 25 bp, Homo sapien
gttcttggagcctccgttctctttg

SEQ ID NO: 110506 - DNA, 25 bp, Homo sapien
gttcttggagccaccgttctctttg

SEQ ID NO: 110507 - DNA, 25 bp, Homo sapien
aaactccgacacgaacctttcctgg

SEQ ID NO: 110508 - DNA, 25 bp, Homo sapien
aaactccgacaccaacctttcctgg

SEQ ID NO: 110509 - DNA, 25 bp, Homo sapien
acgtcacaaataaccttatcatgac

SEQ ID NO: 110510 - DNA, 25 bp, Homo sapien
acgtcacaaatatccttatcatgac

SEQ ID NO: 110511 - DNA, 25 bp, Homo sapien
actgtacgtgtcgattttgtcatga

SEQ ID NO: 110512 - DNA, 25 bp, Homo sapien
actgtacgtgtccattttgtcatga

SEQ ID NO: 110513 - DNA, 25 bp, Homo sapien
ggtagggtaccattcagtagtcaaa

SEQ ID NO: 110514 - DNA, 25 bp, Homo sapien
ggtagggtaccaatcagtagtcaaa

SEQ ID NO: 110515 - DNA, 25 bp, Homo sapien
atttaggaaccgtctcttgcagttt

SEQ ID NO: 110516 - DNA, 25 bp, Homo sapien
atttaggaaccgactcttgcagttt

SEQ ID NO: 110517 - DNA, 25 bp, Homo sapien
tctcggtgaggtctcgataaagatt

SEQ ID NO: 110518 - DNA, 25 bp, Homo sapien
tctcggtgaggtgtcgataaagatt

SEQ ID NO: 110519 - DNA, 25 bp, Homo sapien
tacaggatagtctgagatgacataa

SEQ ID NO: 110520 - DNA, 25 bp, Homo sapien
tacaggatagtcagagatgacataa

SEQ ID NO: 110521 - DNA, 25 bp, Homo sapien
gagttcttcggtttctttaaccacc

SEQ ID NO: 110522 - DNA, 25 bp, Homo sapien
gagttcttcggtatctttaaccacc

SEQ ID NO: 110523 - DNA, 25 bp, Homo sapien
gttaccaccacgacacggtgggccc

SEQ ID NO: 110524 - DNA, 25 bp, Homo sapien
gttaccaccacgtcacggtgggccc

SEQ ID NO: 110525 - DNA, 25 bp, Homo sapien
tgtccacggggaagctctgcgcccg

SEQ ID NO: 110526 - DNA, 25 bp, Homo sapien
tgtccacggggatgctctgcgcccg

SEQ ID NO: 110527 - DNA, 25 bp, Homo sapien
tatcaaagtccgaggttgtaatcag

SEQ ID NO: 110528 - DNA, 25 bp, Homo sapien
tatcaaagtccgtggttgtaatcag

SEQ ID NO: 110529 - DNA, 25 bp, Homo sapien
ctaagaaagtcttaaggtttttcac

SEQ ID NO: 110530 - DNA, 25 bp, Homo sapien
ctaagaaagtctaaaggtttttcac

SEQ ID NO: 110531 - DNA, 25 bp, Homo sapien
tcagacgacaacaaccattgtgtct

SEQ ID NO: 110532 - DNA, 25 bp, Homo sapien
tcagacgacaactaccattgtgtct

SEQ ID NO: 110533 - DNA, 25 bp, Homo sapien
ttcacgaaagtctccgagatgtgta

SEQ ID NO: 110534 - DNA, 25 bp, Homo sapien
ttcacgaaagtcaccgagatgtgta

SEQ ID NO: 110535 - DNA, 25 bp, Homo sapien
gtgtcctgaaggacggacgatcttt

SEQ ID NO: 110536 - DNA, 25 bp, Homo sapien
gtgtcctgaaggtcggacgatcttt

SEQ ID NO: 110537 - DNA, 25 bp, Homo sapien
atctggttgtggaggccggttctct

SEQ ID NO: 110538 - DNA, 25 bp, Homo sapien
atctggttgtggtggccggttctct

SEQ ID NO: 110539 - DNA, 25 bp, Homo sapien
gggtcctcggagacccgtctctctt

SEQ ID NO: 110540 - DNA, 25 bp, Homo sapien
gggtcctcggagtcccgtctctctt

SEQ ID NO: 110541 - DNA, 25 bp, Homo sapien
gtctataccggactactttcctctg

SEQ ID NO: 110542 - DNA, 25 bp, Homo sapien
gtctataccggagtactttcctctg

SEQ ID NO: 110543 - DNA, 25 bp, Homo sapien
tccttagacccgagacttttcagtg

SEQ ID NO: 110544 - DNA, 25 bp, Homo sapien
tccttagacccgtgacttttcagtg

SEQ ID NO: 110545 - DNA, 25 bp, Homo sapien
gtgtacactattgacttctttcgtt

SEQ ID NO: 110546 - DNA, 25 bp, Homo sapien
gtgtacactattcacttctttcgtt

SEQ ID NO: 110547 - DNA, 25 bp, Homo sapien
tacggttatctttcggactcatttt

SEQ ID NO: 110548 - DNA, 25 bp, Homo sapien
tacggttatcttacggactcatttt

SEQ ID NO: 110549 - DNA, 25 bp, Homo sapien
aatctgcatatttcggaaccgaggg

SEQ ID NO: 110550 - DNA, 25 bp, Homo sapien
aatctgcatattacggaaccgaggg

SEQ ID NO: 110551 - DNA, 25 bp, Homo sapien
ggttacctaatgtaccgaactttta

SEQ ID NO: 110552 - DNA, 25 bp, Homo sapien
ggttacctaatgaaccgaactttta

SEQ ID NO: 110553 - DNA, 25 bp, Homo sapien
tggtgtttcgacacaatgtcagtat

SEQ ID NO: 110554 - DNA, 25 bp, Homo sapien
tggtgtttcgactcaatgtcagtat

SEQ ID NO: 110555 - DNA, 25 bp, Homo sapien
ggcttctacgctccagtcagttagg

SEQ ID NO: 110556 - DNA, 25 bp, Homo sapien
ggcttctacgctgcagtcagttagg

SEQ ID NO: 110557 - DNA, 25 bp, Homo sapien
cggagatccactcagtcacgcagtg

SEQ ID NO: 110558 - DNA, 25 bp, Homo sapien
cggagatccactgagtcacgcagtg

SEQ ID NO: 110559 - DNA, 25 bp, Homo sapien
gagcgtcgtctttcgacctcctcgg

SEQ ID NO: 110560 - DNA, 25 bp, Homo sapien
gagcgtcgtcttacgacctcctcgg

SEQ ID NO: 110561 - DNA, 25 bp, Homo sapien
aggtcattgtcagcacgtgtctctg

SEQ ID NO: 110562 - DNA, 25 bp, Homo sapien
aggtcattgtcaccacgtgtctctg

SEQ ID NO: 110563 - DNA, 25 bp, Homo sapien
gtcttcagtcggaccgggtctccgt

SEQ ID NO: 110564 - DNA, 25 bp, Homo sapien
gtcttcagtcggtccgggtctccgt

SEQ ID NO: 110565 - DNA, 25 bp, Homo sapien
ctccagtggttcgtaggacgagtgt

SEQ ID NO: 110566 - DNA, 25 bp, Homo sapien
ctccagtggttcctaggacgagtgt

SEQ ID NO: 110567 - DNA, 25 bp, Homo sapien
ttcacgtccgatcttaggacggtac

SEQ ID NO: 110568 - DNA, 25 bp, Homo sapien
ttcacgtccgatgttaggacggtac

SEQ ID NO: 110569 - DNA, 25 bp, Homo sapien
ctgtttttcgaagacaggggacttc

SEQ ID NO: 110570 - DNA, 25 bp, Homo sapien
ctgtttttcgaacacaggggacttc

SEQ ID NO: 110571 - DNA, 25 bp, Homo sapien
tttcagaacgtaagggaacgactct

SEQ ID NO: 110572 - DNA, 25 bp, Homo sapien
tttcagaacgtatgggaacgactct

SEQ ID NO: 110573 - DNA, 25 bp, Homo sapien
ttcaactaaggttggagaactctgt

SEQ ID NO: 110574 - DNA, 25 bp, Homo sapien
ttcaactaaggtaggagaactctgt

SEQ ID NO: 110575 - DNA, 25 bp, Homo sapien
ccctaatagtaacaaggtgaccctg

SEQ ID NO: 110576 - DNA, 25 bp, Homo sapien
ccctaatagtaagaaggtgaccctg

SEQ ID NO: 110577 - DNA, 25 bp, Homo sapien
tgtcatcataaagaccttccagaga

SEQ ID NO: 110578 - DNA, 25 bp, Homo sapien
tgtcatcataaacaccttccagaga

SEQ ID NO: 110579 - DNA, 25 bp, Homo sapien
cgatttccaaggaccaactaaggac

SEQ ID NO: 110580 - DNA, 25 bp, Homo sapien
cgatttccaaggtccaactaaggac

SEQ ID NO: 110581 - DNA, 25 bp, Homo sapien
gtccatgagcgtacccgtacagtga

SEQ ID NO: 110582 - DNA, 25 bp, Homo sapien
gtccatgagcgttcccgtacagtga

SEQ ID NO: 110583 - DNA, 25 bp, Homo sapien
ttcggacaacgtcaggactccccta

SEQ ID NO: 110584 - DNA, 25 bp, Homo sapien
ttcggacaacgtgaggactccccta

SEQ ID NO: 110585 - DNA, 25 bp, Homo sapien
aggtcaggagaagacggacacccca

SEQ ID NO: 110586 - DNA, 25 bp, Homo sapien
aggtcaggagaacacggacacccca

SEQ ID NO: 110587 - DNA, 25 bp, Homo sapien
ccagtggtggtagttacacatcttt

SEQ ID NO: 110588 - DNA, 25 bp, Homo sapien
ccagtggtggtacttacacatcttt

SEQ ID NO: 110589 - DNA, 25 bp, Homo sapien
ccccgaaggtctctcaagaagtctc

SEQ ID NO: 110590 - DNA, 25 bp, Homo sapien
ccccgaaggtctgtcaagaagtctc

SEQ ID NO: 110591 - DNA, 25 bp, Homo sapien
ctccaaggttcgtacgaacaggatt

SEQ ID NO: 110592 - DNA, 25 bp, Homo sapien
ctccaaggttcgaacgaacaggatt

SEQ ID NO: 110593 - DNA, 25 bp, Homo sapien
ccaacaggtcgagaacgacggactg

SEQ ID NO: 110594 - DNA, 25 bp, Homo sapien
ccaacaggtcgacaacgacggactg

SEQ ID NO: 110595 - DNA, 25 bp, Homo sapien
acgaaatcgactacgtaagcgccat

SEQ ID NO: 110596 - DNA, 25 bp, Homo sapien
acgaaatcgacttcgtaagcgccat

SEQ ID NO: 110597 - DNA, 25 bp, Homo sapien
gagagccaggagaccccggttcccg

SEQ ID NO: 110598 - DNA, 25 bp, Homo sapien
gagagccaggagtccccggttcccg

SEQ ID NO: 110599 - DNA, 25 bp, Homo sapien
tccgaggagtactcgtcccgggtta

SEQ ID NO: 110600 - DNA, 25 bp, Homo sapien
tccgaggagtacacgtcccgggtta

SEQ ID NO: 110601 - DNA, 25 bp, Homo sapien
cgagacggtaattgacccgggacag

SEQ ID NO: 110602 - DNA, 25 bp, Homo sapien
cgagacggtaatagacccgggacag

SEQ ID NO: 110603 - DNA, 25 bp, Homo sapien
tcctgtcacctgaaccgggtgtagg

SEQ ID NO: 110604 - DNA, 25 bp, Homo sapien
tcctgtcacctgtaccgggtgtagg

SEQ ID NO: 110605 - DNA, 25 bp, Homo sapien
tcgaagagacccgagtccccggtta

SEQ ID NO: 110606 - DNA, 25 bp, Homo sapien
tcgaagagaccccagtccccggtta

SEQ ID NO: 110607 - DNA, 25 bp, Homo sapien
tcaggaggtcccagtccctgagaat

SEQ ID NO: 110608 - DNA, 25 bp, Homo sapien
tcaggaggtccctgtccctgagaat

SEQ ID NO: 110609 - DNA, 25 bp, Homo sapien
atggggacccgacgaacctcaactt

SEQ ID NO: 110610 - DNA, 25 bp, Homo sapien
atggggacccgaggaacctcaactt

SEQ ID NO: 110611 - DNA, 25 bp, Homo sapien
gagcgagagcgtcgttgttcccttc

SEQ ID NO: 110612 - DNA, 25 bp, Homo sapien
gagcgagagcgtggttgttcccttc

SEQ ID NO: 110613 - DNA, 25 bp, Homo sapien
cgggatctgttcctgttactcctcc

SEQ ID NO: 110614 - DNA, 25 bp, Homo sapien
cgggatctgttcgtgttactcctcc

SEQ ID NO: 110615 - DNA, 25 bp, Homo sapien
gaacagggttggtcggtttcgcccc

SEQ ID NO: 110616 - DNA, 25 bp, Homo sapien
gaacagggttggacggtttcgcccc

SEQ ID NO: 110617 - DNA, 25 bp, Homo sapien
tccttttaagtgacgctagacgttc

SEQ ID NO: 110618 - DNA, 25 bp, Homo sapien
tccttttaagtgtcgctagacgttc

SEQ ID NO: 110619 - DNA, 25 bp, Homo sapien
cgtcgttaagagtcagtacgtttac

SEQ ID NO: 110620 - DNA, 25 bp, Homo sapien
cgtcgttaagagacagtacgtttac

SEQ ID NO: 110621 - DNA, 25 bp, Homo sapien
cgggtccctcggtcgcgagtgtcac

SEQ ID NO: 110622 - DNA, 25 bp, Homo sapien
cgggtccctcggacgcgagtgtcac

SEQ ID NO: 110623 - DNA, 25 bp, Homo sapien
tgggttacttcctaggctacttacc

SEQ ID NO: 110624 - DNA, 25 bp, Homo sapien
tgggttacttccaaggctacttacc

SEQ ID NO: 110625 - DNA, 25 bp, Homo sapien
agtcggtcttccaaaggagacacgg

SEQ ID NO: 110626 - DNA, 25 bp, Homo sapien
agtcggtcttcctaaggagacacgg

SEQ ID NO: 110627 - DNA, 25 bp, Homo sapien
taggcacagtcgtgaccaccagtag

SEQ ID NO: 110628 - DNA, 25 bp, Homo sapien
taggcacagtcgagaccaccagtag

SEQ ID NO: 110629 - DNA, 25 bp, Homo sapien
ttacggcaaacgtccgtccacggta

SEQ ID NO: 110630 - DNA, 25 bp, Homo sapien
ttacggcaaacgaccgtccacggta

SEQ ID NO: 110631 - DNA, 25 bp, Homo sapien
tcggtaccgacaacgcgcgcccgaa

SEQ ID NO: 110632 - DNA, 25 bp, Homo sapien
tcggtaccgacatcgcgcgcccgaa

SEQ ID NO: 110633 - DNA, 25 bp, Homo sapien
cgtcgttggtagaccggacgtcaaa

SEQ ID NO: 110634 - DNA, 25 bp, Homo sapien
cgtcgttggtagtccggacgtcaaa

SEQ ID NO: 110635 - DNA, 25 bp, Homo sapien
cgtcttcggacgtgacgggagacca

SEQ ID NO: 110636 - DNA, 25 bp, Homo sapien
cgtcttcggacgagacgggagacca

SEQ ID NO: 110637 - DNA, 25 bp, Homo sapien
agactctcctacgattccaggggga

SEQ ID NO: 110638 - DNA, 25 bp, Homo sapien
agactctcctaccattccaggggga

SEQ ID NO: 110639 - DNA, 25 bp, Homo sapien
atacctgtaaggtccgggggtctag

SEQ ID NO: 110640 - DNA, 25 bp, Homo sapien
atacctgtaaggaccgggggtctag

SEQ ID NO: 110641 - DNA, 25 bp, Homo sapien
ccctgacataaggactctagggttt

SEQ ID NO: 110642 - DNA, 25 bp, Homo sapien
ccctgacataagcactctagggttt

SEQ ID NO: 110643 - DNA, 25 bp, Homo sapien
cgcctggtgcatcatcagaaacagt

SEQ ID NO: 110644 - DNA, 25 bp, Homo sapien
cgcctggtgcatgatcagaaacagt

SEQ ID NO: 110645 - DNA, 25 bp, Homo sapien
gctccctgagggtagtcccacggga

SEQ ID NO: 110646 - DNA, 25 bp, Homo sapien
gctccctgagggaagtcccacggga

SEQ ID NO: 110647 - DNA, 25 bp, Homo sapien
ctgagtctggggaacccacaggaac

SEQ ID NO: 110648 - DNA, 25 bp, Homo sapien
ctgagtctggggtacccacaggaac

SEQ ID NO: 110649 - DNA, 25 bp, Homo sapien
cctctcgcgggtgtgacaggtacga

SEQ ID NO: 110650 - DNA, 25 bp, Homo sapien
cctctcgcgggtctgacaggtacga

SEQ ID NO: 110651 - DNA, 25 bp, Homo sapien
ctccggtcgggctcaccggtagagt

SEQ ID NO: 110652 - DNA, 25 bp, Homo sapien
ctccggtcgggcacaccggtagagt

SEQ ID NO: 110653 - DNA, 25 bp, Homo sapien
tccggtgacgcgaccagactcggcg

SEQ ID NO: 110654 - DNA, 25 bp, Homo sapien
tccggtgacgcgtccagactcggcg

SEQ ID NO: 110655 - DNA, 25 bp, Homo sapien
ccaccagacgtgtcttagaaccgag

SEQ ID NO: 110656 - DNA, 25 bp, Homo sapien
ccaccagacgtgacttagaaccgag

SEQ ID NO: 110657 - DNA, 25 bp, Homo sapien
ctaccaaaacgtgtccgattacaag

SEQ ID NO: 110658 - DNA, 25 bp, Homo sapien
ctaccaaaacgtctccgattacaag

SEQ ID NO: 110659 - DNA, 25 bp, Homo sapien
tcttgaatgacttcccattgtatgt

SEQ ID NO: 110660 - DNA, 25 bp, Homo sapien
tcttgaatgactacccattgtatgt

SEQ ID NO: 110661 - DNA, 25 bp, Homo sapien
ttagacttccgactcaactgatagt

SEQ ID NO: 110662 - DNA, 25 bp, Homo sapien
ttagacttccgagtcaactgatagt

SEQ ID NO: 110663 - DNA, 25 bp, Homo sapien
atctttaccgtcgggtcaaaggaag

SEQ ID NO: 110664 - DNA, 25 bp, Homo sapien
atctttaccgtccggtcaaaggaag

SEQ ID NO: 110665 - DNA, 25 bp, Homo sapien
ggtttagcttcgtcgaaataacgtg

SEQ ID NO: 110666 - DNA, 25 bp, Homo sapien
ggtttagcttcgacgaaataacgtg

SEQ ID NO: 110667 - DNA, 25 bp, Homo sapien
tacctaacttgtgacgcaacagggt

SEQ ID NO: 110668 - DNA, 25 bp, Homo sapien
tacctaacttgtcacgcaacagggt

SEQ ID NO: 110669 - DNA, 25 bp, Homo sapien
cgtaggtaattcgtcacaacggggt

SEQ ID NO: 110670 - DNA, 25 bp, Homo sapien
cgtaggtaattcctcacaacggggt

SEQ ID NO: 110671 - DNA, 25 bp, Homo sapien
aggtcagtacacgttcaaattacgt

SEQ ID NO: 110672 - DNA, 25 bp, Homo sapien
aggtcagtacaccttcaaattacgt

SEQ ID NO: 110673 - DNA, 25 bp, Homo sapien
acgttcgtataattctcaactcacc

SEQ ID NO: 110674 - DNA, 25 bp, Homo sapien
acgttcgtataaatctcaactcacc

SEQ ID NO: 110675 - DNA, 25 bp, Homo sapien
ctaccttaacatccaacagagtact

SEQ ID NO: 110676 - DNA, 25 bp, Homo sapien
ctaccttaacatgcaacagagtact

SEQ ID NO: 110677 - DNA, 25 bp, Homo sapien
acgtcgactcgacaggcacagggta

SEQ ID NO: 110678 - DNA, 25 bp, Homo sapien
acgtcgactcgagaggcacagggta

SEQ ID NO: 110679 - DNA, 25 bp, Homo sapien
tcccgacacacaagaccctaggagg

SEQ ID NO: 110680 - DNA, 25 bp, Homo sapien
tcccgacacacatgaccctaggagg

SEQ ID NO: 110681 - DNA, 25 bp, Homo sapien
cactacccacaaccacaacatgaga

SEQ ID NO: 110682 - DNA, 25 bp, Homo sapien
cactacccacaagcacaacatgaga

SEQ ID NO: 110683 - DNA, 25 bp, Homo sapien
agacaagacgacacagaacctgtaa

SEQ ID NO: 110684 - DNA, 25 bp, Homo sapien
agacaagacgactcagaacctgtaa

SEQ ID NO: 110685 - DNA, 25 bp, Homo sapien
gagaaagcgataggatatcgcagtc

SEQ ID NO: 110686 - DNA, 25 bp, Homo sapien
gagaaagcgatacgatatcgcagtc

SEQ ID NO: 110687 - DNA, 25 bp, Homo sapien
ttgtctcgtgaaaatacaccagtag

SEQ ID NO: 110688 - DNA, 25 bp, Homo sapien
ttgtctcgtgaatatacaccagtag

SEQ ID NO: 110689 - DNA, 25 bp, Homo sapien
attatttccggacaatcacgacagg

SEQ ID NO: 110690 - DNA, 25 bp, Homo sapien
attatttccggagaatcacgacagg

SEQ ID NO: 110691 - DNA, 25 bp, Homo sapien
gtccgttaggagtccgttttgaagg

SEQ ID NO: 110692 - DNA, 25 bp, Homo sapien
gtccgttaggagaccgttttgaagg

SEQ ID NO: 110693 - DNA, 25 bp, Homo sapien
ttcttttgagtagtaacttgaccat

SEQ ID NO: 110694 - DNA, 25 bp, Homo sapien
ttcttttgagtactaacttgaccat

SEQ ID NO: 110695 - DNA, 25 bp, Homo sapien
caacaattcagtggaacatcatatt

SEQ ID NO: 110696 - DNA, 25 bp, Homo sapien
caacaattcagtcgaacatcatatt

SEQ ID NO: 110697 - DNA, 25 bp, Homo sapien
ctaactttagggacagtacgatgtc

SEQ ID NO: 110698 - DNA, 25 bp, Homo sapien
ctaactttagggtcagtacgatgtc

SEQ ID NO: 110699 - DNA, 25 bp, Homo sapien
tattacctttatgagtggtcccttc

SEQ ID NO: 110700 - DNA, 25 bp, Homo sapien
tattacctttatcagtggtcccttc

SEQ ID NO: 110701 - DNA, 25 bp, Homo sapien
ctttctttctcaaggagacaacccg

SEQ ID NO: 110702 - DNA, 25 bp, Homo sapien
ctttctttctcatggagacaacccg

SEQ ID NO: 110703 - DNA, 25 bp, Homo sapien
tatatgttcctaaggaagtcaatcc

SEQ ID NO: 110704 - DNA, 25 bp, Homo sapien
tatatgttcctatggaagtcaatcc

SEQ ID NO: 110705 - DNA, 25 bp, Homo sapien
attcgtcgaactcatcatcaaattc

SEQ ID NO: 110706 - DNA, 25 bp, Homo sapien
attcgtcgaactgatcatcaaattc

SEQ ID NO: 110707 - DNA, 25 bp, Homo sapien
tggtcctactatttggtcgaaatta

SEQ ID NO: 110708 - DNA, 25 bp, Homo sapien
tggtcctactatatggtcgaaatta

SEQ ID NO: 110709 - DNA, 25 bp, Homo sapien
accgtaaccatgagctgagaactga

SEQ ID NO: 110710 - DNA, 25 bp, Homo sapien
accgtaaccatgtgctgagaactga

SEQ ID NO: 110711 - DNA, 25 bp, Homo sapien
gaaccgaagttggaggtcactgacg

SEQ ID NO: 110712 - DNA, 25 bp, Homo sapien
gaaccgaagttgcaggtcactgacg

SEQ ID NO: 110713 - DNA, 25 bp, Homo sapien
acagaaggtaagtggcagttctgac

SEQ ID NO: 110714 - DNA, 25 bp, Homo sapien
acagaaggtaagaggcagttctgac

SEQ ID NO: 110715 - DNA, 25 bp, Homo sapien
tgaagggagaaccagtccaccaaac

SEQ ID NO: 110716 - DNA, 25 bp, Homo sapien
tgaagggagaacgagtccaccaaac

SEQ ID NO: 110717 - DNA, 25 bp, Homo sapien
agaagttaggtactgtcacctgaaa

SEQ ID NO: 110718 - DNA, 25 bp, Homo sapien
agaagttaggtagtgtcacctgaaa

SEQ ID NO: 110719 - DNA, 25 bp, Homo sapien
gtcctggtcatttatactgtgaaac

SEQ ID NO: 110720 - DNA, 25 bp, Homo sapien
gtcctggtcattaatactgtgaaac

SEQ ID NO: 110721 - DNA, 25 bp, Homo sapien
gtttacgatcctacagacatgaaat

SEQ ID NO: 110722 - DNA, 25 bp, Homo sapien
gtttacgatccttcagacatgaaat

SEQ ID NO: 110723 - DNA, 25 bp, Homo sapien
gccctgtcttctgcatgtacgaagt

SEQ ID NO: 110724 - DNA, 25 bp, Homo sapien
gccctgtcttctccatgtacgaagt

SEQ ID NO: 110725 - DNA, 25 bp, Homo sapien
tgagccacacttacttctttcaggt

SEQ ID NO: 110726 - DNA, 25 bp, Homo sapien
tgagccacactttcttctttcaggt

SEQ ID NO: 110727 - DNA, 25 bp, Homo sapien
ttttgacatgtgtctgttcttgcaa

SEQ ID NO: 110728 - DNA, 25 bp, Homo sapien
ttttgacatgtgactgttcttgcaa

SEQ ID NO: 110729 - DNA, 25 bp, Homo sapien
tagagactcggatcaatgttgtcaa

SEQ ID NO: 110730 - DNA, 25 bp, Homo sapien
tagagactcggaacaatgttgtcaa

SEQ ID NO: 110731 - DNA, 25 bp, Homo sapien
aagtcaggtgacacatgtcttcatt

SEQ ID NO: 110732 - DNA, 25 bp, Homo sapien
aagtcaggtgactcatgtcttcatt

SEQ ID NO: 110733 - DNA, 25 bp, Homo sapien
ctgaagtgggtgacagtggttttcc

SEQ ID NO: 110734 - DNA, 25 bp, Homo sapien
ctgaagtgggtgtcagtggttttcc

SEQ ID NO: 110735 - DNA, 25 bp, Homo sapien
taatttagatgaatcttgtttttgt

SEQ ID NO: 110736 - DNA, 25 bp, Homo sapien
taatttagatgattcttgtttttgt

SEQ ID NO: 110737 - DNA, 25 bp, Homo sapien
attaagatcactgtcatttagtgtc

SEQ ID NO: 110738 - DNA, 25 bp, Homo sapien
attaagatcactctcatttagtgtc

SEQ ID NO: 110739 - DNA, 25 bp, Homo sapien
attcaaatgtcttcacgttttgtgg

SEQ ID NO: 110740 - DNA, 25 bp, Homo sapien
attcaaatgtctacacgttttgtgg

SEQ ID NO: 110741 - DNA, 25 bp, Homo sapien
tctaaacctctttcttgtgtgtgag

SEQ ID NO: 110742 - DNA, 25 bp, Homo sapien
tctaaacctcttacttgtgtgtgag

SEQ ID NO: 110743 - DNA, 25 bp, Homo sapien
catcggcctttggactcaagtagga

SEQ ID NO: 110744 - DNA, 25 bp, Homo sapien
catcggcctttgcactcaagtagga

SEQ ID NO: 110745 - DNA, 25 bp, Homo sapien
aatcgttccctcgacctgaagtgaa

SEQ ID NO: 110746 - DNA, 25 bp, Homo sapien
aatcgttccctccacctgaagtgaa

SEQ ID NO: 110747 - DNA, 25 bp, Homo sapien
aggtctatccggacccgtcattcca

SEQ ID NO: 110748 - DNA, 25 bp, Homo sapien
aggtctatccggtcccgtcattcca

SEQ ID NO: 110749 - DNA, 25 bp, Homo sapien
tggtgaccatgttccacttgttgga

SEQ ID NO: 110750 - DNA, 25 bp, Homo sapien
tggtgaccatgtaccacttgttgga

SEQ ID NO: 110751 - DNA, 25 bp, Homo sapien
cggtgtccaaagaccctgtatgtaa

SEQ ID NO: 110752 - DNA, 25 bp, Homo sapien
cggtgtccaaagtccctgtatgtaa

SEQ ID NO: 110753 - DNA, 25 bp, Homo sapien
cgactgaaggggtaccacaatgttc

SEQ ID NO: 110754 - DNA, 25 bp, Homo sapien
cgactgaaggggaaccacaatgttc

SEQ ID NO: 110755 - DNA, 25 bp, Homo sapien
cgtaaaaggggcatcgcaagtcctg

SEQ ID NO: 110756 - DNA, 25 bp, Homo sapien
cgtaaaaggggcttcgcaagtcctg

SEQ ID NO: 110757 - DNA, 25 bp, Homo sapien
gctcaataggagaggttatatcccc

SEQ ID NO: 110758 - DNA, 25 bp, Homo sapien
gctcaataggagtggttatatcccc

SEQ ID NO: 110759 - DNA, 25 bp, Homo sapien
atgaaatatgatcgttgttggccac

SEQ ID NO: 110760 - DNA, 25 bp, Homo sapien
atgaaatatgatggttgttggccac

SEQ ID NO: 110761 - DNA, 25 bp, Homo sapien
cgtatggtttaactttatgtatcca

SEQ ID NO: 110762 - DNA, 25 bp, Homo sapien
cgtatggtttaagtttatgtatcca

SEQ ID NO: 110763 - DNA, 25 bp, Homo sapien
gtatttctctcctgtgttaatgact

SEQ ID NO: 110764 - DNA, 25 bp, Homo sapien
gtatttctctccagtgttaatgact

SEQ ID NO: 110765 - DNA, 25 bp, Homo sapien
tccctccgaccatctagtagtgtat

SEQ ID NO: 110766 - DNA, 25 bp, Homo sapien
tccctccgaccaactagtagtgtat

SEQ ID NO: 110767 - DNA, 25 bp, Homo sapien
tactacctctgaacccggggtcgta

SEQ ID NO: 110768 - DNA, 25 bp, Homo sapien
tactacctctgatcccggggtcgta

SEQ ID NO: 110769 - DNA, 25 bp, Homo sapien
ggaccactcagaccacggcgacgga

SEQ ID NO: 110770 - DNA, 25 bp, Homo sapien
ggaccactcagagcacggcgacgga

SEQ ID NO: 110771 - DNA, 25 bp, Homo sapien
ggacaaccgacttcaggtctcacag

SEQ ID NO: 110772 - DNA, 25 bp, Homo sapien
ggacaaccgactacaggtctcacag

SEQ ID NO: 110773 - DNA, 25 bp, Homo sapien
atcaagtactgttataaatgtaacc

SEQ ID NO: 110774 - DNA, 25 bp, Homo sapien
atcaagtactgtaataaatgtaacc

SEQ ID NO: 110775 - DNA, 25 bp, Homo sapien
cctctagtacgttcgaccaccgacc

SEQ ID NO: 110776 - DNA, 25 bp, Homo sapien
cctctagtacgtacgaccaccgacc

SEQ ID NO: 110777 - DNA, 25 bp, Homo sapien
tacagtagacctctaaccaacgact

SEQ ID NO: 110778 - DNA, 25 bp, Homo sapien
tacagtagacctgtaaccaacgact

SEQ ID NO: 110779 - DNA, 25 bp, Homo sapien
tacatatccgtagacacgtaaagat

SEQ ID NO: 110780 - DNA, 25 bp, Homo sapien
tacatatccgtacacacgtaaagat

SEQ ID NO: 110781 - DNA, 25 bp, Homo sapien
gactaatctcgttcaaagtacaagt

SEQ ID NO: 110782 - DNA, 25 bp, Homo sapien
gactaatctcgtacaaagtacaagt

SEQ ID NO: 110783 - DNA, 25 bp, Homo sapien
tgtctcgcttgactctaatcgtcag

SEQ ID NO: 110784 - DNA, 25 bp, Homo sapien
tgtctcgcttgagtctaatcgtcag

SEQ ID NO: 110785 - DNA, 25 bp, Homo sapien
tgtctacgactatgggtttcatata

SEQ ID NO: 110786 - DNA, 25 bp, Homo sapien
tgtctacgactaagggtttcatata

SEQ ID NO: 110787 - DNA, 25 bp, Homo sapien
cgggaccgaaaggtctttacagtct

SEQ ID NO: 110788 - DNA, 25 bp, Homo sapien
cgggaccgaaagctctttacagtct

SEQ ID NO: 110789 - DNA, 25 bp, Homo sapien
ctcgagaccggaagtccttagaagc

SEQ ID NO: 110790 - DNA, 25 bp, Homo sapien
ctcgagaccggatgtccttagaagc

SEQ ID NO: 110791 - DNA, 25 bp, Homo sapien
ttcatcctgagtttccacgccgtct

SEQ ID NO: 110792 - DNA, 25 bp, Homo sapien
ttcatcctgagtatccacgccgtct

SEQ ID NO: 110793 - DNA, 25 bp, Homo sapien
tggtcctccgacagtagtccccggt

SEQ ID NO: 110794 - DNA, 25 bp, Homo sapien
tggtcctccgactgtagtccccggt

SEQ ID NO: 110795 - DNA, 25 bp, Homo sapien
gaggacttcgcctgagcccgagtgt

SEQ ID NO: 110796 - DNA, 25 bp, Homo sapien
gaggacttcgccagagcccgagtgt

SEQ ID NO: 110797 - DNA, 25 bp, Homo sapien
ggagaagacgccactctccgtgacg

SEQ ID NO: 110798 - DNA, 25 bp, Homo sapien
ggagaagacgcctctctccgtgacg

SEQ ID NO: 110799 - DNA, 25 bp, Homo sapien
tacgggccggaaagaactgtcggtc

SEQ ID NO: 110800 - DNA, 25 bp, Homo sapien
tacgggccggaatgaactgtcggtc

SEQ ID NO: 110801 - DNA, 25 bp, Homo sapien
gaaggtacagaaacacaactgtttg

SEQ ID NO: 110802 - DNA, 25 bp, Homo sapien
gaaggtacagaatcacaactgtttg

SEQ ID NO: 110803 - DNA, 25 bp, Homo sapien
tatgtgaagaattacccgttctcta

SEQ ID NO: 110804 - DNA, 25 bp, Homo sapien
tatgtgaagaataacccgttctcta

SEQ ID NO: 110805 - DNA, 25 bp, Homo sapien
tgaggaggagactccggtagtccct

SEQ ID NO: 110806 - DNA, 25 bp, Homo sapien
tgaggaggagacaccggtagtccct

SEQ ID NO: 110807 - DNA, 25 bp, Homo sapien
tatgtttaaggacatacttgtcccg

SEQ ID NO: 110808 - DNA, 25 bp, Homo sapien
tatgtttaaggagatacttgtcccg

SEQ ID NO: 110809 - DNA, 25 bp, Homo sapien
atttggtggagtgtcttcgtgtcgc

SEQ ID NO: 110810 - DNA, 25 bp, Homo sapien
atttggtggagtctcttcgtgtcgc

SEQ ID NO: 110811 - DNA, 25 bp, Homo sapien
gtgtgttacagtatgtctctgcgac

SEQ ID NO: 110812 - DNA, 25 bp, Homo sapien
gtgtgttacagtttgtctctgcgac

SEQ ID NO: 110813 - DNA, 25 bp, Homo sapien
aagtgttaccgattgttcttgtcct

SEQ ID NO: 110814 - DNA, 25 bp, Homo sapien
aagtgttaccgaatgttcttgtcct

SEQ ID NO: 110815 - DNA, 25 bp, Homo sapien
gtctttctttgtttgactccaccgt

SEQ ID NO: 110816 - DNA, 25 bp, Homo sapien
gtctttctttgtatgactccaccgt

SEQ ID NO: 110817 - DNA, 25 bp, Homo sapien
tttgtgggtcggttgacgtccctcg

SEQ ID NO: 110818 - DNA, 25 bp, Homo sapien
tttgtgggtcggatgacgtccctcg

SEQ ID NO: 110819 - DNA, 25 bp, Homo sapien
tcttaaagtccgtgtctctacttcg

SEQ ID NO: 110820 - DNA, 25 bp, Homo sapien
tcttaaagtccgagtctctacttcg

SEQ ID NO: 110821 - DNA, 25 bp, Homo sapien
acgttataaatcgttggtcatgtcg

SEQ ID NO: 110822 - DNA, 25 bp, Homo sapien
acgttataaatccttggtcatgtcg

SEQ ID NO: 110823 - DNA, 25 bp, Homo sapien
tagaacctacccagtttcaacgtgt

SEQ ID NO: 110824 - DNA, 25 bp, Homo sapien
tagaacctaccctgtttcaacgtgt

SEQ ID NO: 110825 - DNA, 25 bp, Homo sapien
gagtctacgttactctgtttaaatt

SEQ ID NO: 110826 - DNA, 25 bp, Homo sapien
gagtctacgttagtctgtttaaatt

SEQ ID NO: 110827 - DNA, 25 bp, Homo sapien
aacacgatacaacttggtctaggaa

SEQ ID NO: 110828 - DNA, 25 bp, Homo sapien
aacacgatacaagttggtctaggaa

SEQ ID NO: 110829 - DNA, 25 bp, Homo sapien
ccctacagttgaggtgttcgtgaat

SEQ ID NO: 110830 - DNA, 25 bp, Homo sapien
ccctacagttgacgtgttcgtgaat

SEQ ID NO: 110831 - DNA, 25 bp, Homo sapien
ccactgtccgtagttagtgtggtgt

SEQ ID NO: 110832 - DNA, 25 bp, Homo sapien
ccactgtccgtacttagtgtggtgt

SEQ ID NO: 110833 - DNA, 25 bp, Homo sapien
cgttttcggttctttgttcctaaga

SEQ ID NO: 110834 - DNA, 25 bp, Homo sapien
cgttttcggttcattgttcctaaga

SEQ ID NO: 110835 - DNA, 25 bp, Homo sapien
agggtcacgtcctctaccactggga

SEQ ID NO: 110836 - DNA, 25 bp, Homo sapien
agggtcacgtccactaccactggga

SEQ ID NO: 110837 - DNA, 25 bp, Homo sapien
tcttcctctctcactaagacgggga

SEQ ID NO: 110838 - DNA, 25 bp, Homo sapien
tcttcctctctctctaagacgggga

SEQ ID NO: 110839 - DNA, 25 bp, Homo sapien
ctcccgaccatcgtagacttcgtga

SEQ ID NO: 110840 - DNA, 25 bp, Homo sapien
ctcccgaccatcctagacttcgtga

SEQ ID NO: 110841 - DNA, 25 bp, Homo sapien
cccctcgacccggacgtcctggagc

SEQ ID NO: 110842 - DNA, 25 bp, Homo sapien
cccctcgacccgcacgtcctggagc

SEQ ID NO: 110843 - DNA, 25 bp, Homo sapien
caacagtaccctaacgtttgacgga

SEQ ID NO: 110844 - DNA, 25 bp, Homo sapien
caacagtacccttacgtttgacgga

SEQ ID NO: 110845 - DNA, 25 bp, Homo sapien
cagacgttcttttcgttgtggtaat

SEQ ID NO: 110846 - DNA, 25 bp, Homo sapien
cagacgttctttacgttgtggtaat

SEQ ID NO: 110847 - DNA, 25 bp, Homo sapien
accgtttattagaaccgacgtaaat

SEQ ID NO: 110848 - DNA, 25 bp, Homo sapien
accgtttattagtaccgacgtaaat

SEQ ID NO: 110849 - DNA, 25 bp, Homo sapien
aagaagttcctttctacgaggtgaa

SEQ ID NO: 110850 - DNA, 25 bp, Homo sapien
aagaagttccttactacgaggtgaa

SEQ ID NO: 110851 - DNA, 25 bp, Homo sapien
aggaggttctcacctacacagggaa

SEQ ID NO: 110852 - DNA, 25 bp, Homo sapien
aggaggttctcagctacacagggaa

SEQ ID NO: 110853 - DNA, 25 bp, Homo sapien
agtgatttcgtcgataactgaccaa

SEQ ID NO: 110854 - DNA, 25 bp, Homo sapien
agtgatttcgtccataactgaccaa

SEQ ID NO: 110855 - DNA, 25 bp, Homo sapien
ctccgaggacgacgtacgtcacaca

SEQ ID NO: 110856 - DNA, 25 bp, Homo sapien
ctccgaggacgaggtacgtcacaca

SEQ ID NO: 110857 - DNA, 25 bp, Homo sapien
aactctaggtcggagtgctccctgt

SEQ ID NO: 110858 - DNA, 25 bp, Homo sapien
aactctaggtcgcagtgctccctgt

SEQ ID NO: 110859 - DNA, 25 bp, Homo sapien
gtacagtgagaggagagttctcttc

SEQ ID NO: 110860 - DNA, 25 bp, Homo sapien
gtacagtgagagcagagttctcttc

SEQ ID NO: 110861 - DNA, 25 bp, Homo sapien
cagaatcgacggttagttttacctc

SEQ ID NO: 110862 - DNA, 25 bp, Homo sapien
cagaatcgacggatagttttacctc

SEQ ID NO: 110863 - DNA, 25 bp, Homo sapien
gaagaagtagaggaacttgctgcac

SEQ ID NO: 110864 - DNA, 25 bp, Homo sapien
gaagaagtagagcaacttgctgcac

SEQ ID NO: 110865 - DNA, 25 bp, Homo sapien
accgaagtaagagatgtaccatccg

SEQ ID NO: 110866 - DNA, 25 bp, Homo sapien
accgaagtaagacatgtaccatccg

SEQ ID NO: 110867 - DNA, 25 bp, Homo sapien
acaatggtaaagtaacgtcgactcc

SEQ ID NO: 110868 - DNA, 25 bp, Homo sapien
acaatggtaaagaaacgtcgactcc

SEQ ID NO: 110869 - DNA, 25 bp, Homo sapien
ctcattggtgctgaccagtcaactt

SEQ ID NO: 110870 - DNA, 25 bp, Homo sapien
ctcattggtgctcaccagtcaactt

SEQ ID NO: 110871 - DNA, 25 bp, Homo sapien
ctccccggtgtctccggagagtctt

SEQ ID NO: 110872 - DNA, 25 bp, Homo sapien
ctccccggtgtcaccggagagtctt

SEQ ID NO: 110873 - DNA, 25 bp, Homo sapien
gtccctaggtctccacacagaatta

SEQ ID NO: 110874 - DNA, 25 bp, Homo sapien
gtccctaggtctgcacacagaatta

SEQ ID NO: 110875 - DNA, 25 bp, Homo sapien
gtgtgagagaagaaacagaacccaa

SEQ ID NO: 110876 - DNA, 25 bp, Homo sapien
gtgtgagagaagtaacagaacccaa

SEQ ID NO: 110877 - DNA, 25 bp, Homo sapien
tctacaagcgagttccagatccaaa

SEQ ID NO: 110878 - DNA, 25 bp, Homo sapien
tctacaagcgagatccagatccaaa

SEQ ID NO: 110879 - DNA, 25 bp, Homo sapien
gtcacaagacaatgtctggtccccc

SEQ ID NO: 110880 - DNA, 25 bp, Homo sapien
gtcacaagacaaagtctggtccccc

SEQ ID NO: 110881 - DNA, 25 bp, Homo sapien
tacagcaacacgaagggtccgccac

SEQ ID NO: 110882 - DNA, 25 bp, Homo sapien
tacagcaacacgtagggtccgccac

SEQ ID NO: 110883 - DNA, 25 bp, Homo sapien
tcggtgaaccatcttctccgcgtcg

SEQ ID NO: 110884 - DNA, 25 bp, Homo sapien
tcggtgaaccatgttctccgcgtcg

SEQ ID NO: 110885 - DNA, 25 bp, Homo sapien
cggcatcgcgaagacgtcgcgccgc

SEQ ID NO: 110886 - DNA, 25 bp, Homo sapien
cggcatcgcgaacacgtcgcgccgc

SEQ ID NO: 110887 - DNA, 25 bp, Homo sapien
ccctgtttccggatcgaatccggcg

SEQ ID NO: 110888 - DNA, 25 bp, Homo sapien
ccctgtttccggttcgaatccggcg

SEQ ID NO: 110889 - DNA, 25 bp, Homo sapien
cagtattcgggtcagcagtctcggg

SEQ ID NO: 110890 - DNA, 25 bp, Homo sapien
cagtattcgggtgagcagtctcggg

SEQ ID NO: 110891 - DNA, 25 bp, Homo sapien
cttacttggtgttgtcacgatggtt

SEQ ID NO: 110892 - DNA, 25 bp, Homo sapien
cttacttggtgtagtcacgatggtt

SEQ ID NO: 110893 - DNA, 25 bp, Homo sapien
tgtcttgggtacagacagagtgccg

SEQ ID NO: 110894 - DNA, 25 bp, Homo sapien
tgtcttgggtactgacagagtgccg

SEQ ID NO: 110895 - DNA, 25 bp, Homo sapien
ccactagtctcctgactagcgaggc

SEQ ID NO: 110896 - DNA, 25 bp, Homo sapien
ccactagtctccagactagcgaggc

SEQ ID NO: 110897 - DNA, 25 bp, Homo sapien
gtaccgaaatccaacgtatcaccag

SEQ ID NO: 110898 - DNA, 25 bp, Homo sapien
gtaccgaaatcctacgtatcaccag

SEQ ID NO: 110899 - DNA, 25 bp, Homo sapien
gtctcaaggctcaacgtctccagag

SEQ ID NO: 110900 - DNA, 25 bp, Homo sapien
gtctcaaggctctacgtctccagag

SEQ ID NO: 110901 - DNA, 25 bp, Homo sapien
ccgtccgacaagtcttctacggggg

SEQ ID NO: 110902 - DNA, 25 bp, Homo sapien
ccgtccgacaagacttctacggggg

SEQ ID NO: 110903 - DNA, 25 bp, Homo sapien
cgctccgaacatcgtcgctcagggg

SEQ ID NO: 110904 - DNA, 25 bp, Homo sapien
cgctccgaacatggtcgctcagggg

SEQ ID NO: 110905 - DNA, 25 bp, Homo sapien
gaccaaccggtggtcgcaccagagg

SEQ ID NO: 110906 - DNA, 25 bp, Homo sapien
gaccaaccggtgctcgcaccagagg

SEQ ID NO: 110907 - DNA, 25 bp, Homo sapien
tccatccggtcgtacggagccagat

SEQ ID NO: 110908 - DNA, 25 bp, Homo sapien
tccatccggtcgaacggagccagat

SEQ ID NO: 110909 - DNA, 25 bp, Homo sapien
cccaggccggtcaaggtgacgaaag

SEQ ID NO: 110910 - DNA, 25 bp, Homo sapien
cccaggccggtctaggtgacgaaag

SEQ ID NO: 110911 - DNA, 25 bp, Homo sapien
ctctacttcttctcataaagtaaat

SEQ ID NO: 110912 - DNA, 25 bp, Homo sapien
ctctacttcttcacataaagtaaat

SEQ ID NO: 110913 - DNA, 25 bp, Homo sapien
cgattagttatgtcaccatgaggaa

SEQ ID NO: 110914 - DNA, 25 bp, Homo sapien
cgattagttatgacaccatgaggaa

SEQ ID NO: 110915 - DNA, 25 bp, Homo sapien
acttcttaatgtaacccagggagca

SEQ ID NO: 110916 - DNA, 25 bp, Homo sapien
acttcttaatgttacccagggagca

SEQ ID NO: 110917 - DNA, 25 bp, Homo sapien
gaaaacctaccgtctctgtgtcgga

SEQ ID NO: 110918 - DNA, 25 bp, Homo sapien
gaaaacctaccgactctgtgtcgga

SEQ ID NO: 110919 - DNA, 25 bp, Homo sapien
gaaaaaccaccgtttatttgtatga

SEQ ID NO: 110920 - DNA, 25 bp, Homo sapien
gaaaaaccaccgattatttgtatga

SEQ ID NO: 110921 - DNA, 25 bp, Homo sapien
aaatattcacgtattctttgtggac

SEQ ID NO: 110922 - DNA, 25 bp, Homo sapien
aaatattcacgttttctttgtggac

SEQ ID NO: 110923 - DNA, 25 bp, Homo sapien
ggtctattgaaatcttgtctcaact

SEQ ID NO: 110924 - DNA, 25 bp, Homo sapien
ggtctattgaaaacttgtctcaact

SEQ ID NO: 110925 - DNA, 25 bp, Homo sapien
gttttatgtatccacttatgacaga

SEQ ID NO: 110926 - DNA, 25 bp, Homo sapien
gttttatgtatcgacttatgacaga

SEQ ID NO: 110927 - DNA, 25 bp, Homo sapien
cttgtttagtatgtctagaccagaa

SEQ ID NO: 110928 - DNA, 25 bp, Homo sapien
cttgtttagtatctctagaccagaa

SEQ ID NO: 110929 - DNA, 25 bp, Homo sapien
tgtgtctcattacgtattgccacac

SEQ ID NO: 110930 - DNA, 25 bp, Homo sapien
tgtgtctcattaggtattgccacac

SEQ ID NO: 110931 - DNA, 25 bp, Homo sapien
gtgtctgtttgtggtttgtacctca

SEQ ID NO: 110932 - DNA, 25 bp, Homo sapien
gtgtctgtttgtcgtttgtacctca

SEQ ID NO: 110933 - DNA, 25 bp, Homo sapien
ccggtgtccctgtgtgtgtctccgg

SEQ ID NO: 110934 - DNA, 25 bp, Homo sapien
ccggtgtccctgagtgtgtctccgg

SEQ ID NO: 110935 - DNA, 25 bp, Homo sapien
tttgtcctgcgtcgactgtcggtcc

SEQ ID NO: 110936 - DNA, 25 bp, Homo sapien
tttgtcctgcgtggactgtcggtcc

SEQ ID NO: 110937 - DNA, 25 bp, Homo sapien
ctttttacagaaggatctcgttgtt

SEQ ID NO: 110938 - DNA, 25 bp, Homo sapien
ctttttacagaacgatctcgttgtt

SEQ ID NO: 110939 - DNA, 25 bp, Homo sapien
ggttccttccaaattctacgtcttg

SEQ ID NO: 110940 - DNA, 25 bp, Homo sapien
ggttccttccaatttctacgtcttg

SEQ ID NO: 110941 - DNA, 25 bp, Homo sapien
ccgttctctacagttctgtcgtaag

SEQ ID NO: 110942 - DNA, 25 bp, Homo sapien
ccgttctctacacttctgtcgtaag

SEQ ID NO: 110943 - DNA, 25 bp, Homo sapien
cgtcactccgagtttaccgttcata

SEQ ID NO: 110944 - DNA, 25 bp, Homo sapien
cgtcactccgagattaccgttcata

SEQ ID NO: 110945 - DNA, 25 bp, Homo sapien
gtgacacggggtcctttagtaggac

SEQ ID NO: 110946 - DNA, 25 bp, Homo sapien
gtgacacggggtgctttagtaggac

SEQ ID NO: 110947 - DNA, 25 bp, Homo sapien
agaactgtccgagttcaaggtagac

SEQ ID NO: 110948 - DNA, 25 bp, Homo sapien
agaactgtccgacttcaaggtagac

SEQ ID NO: 110949 - DNA, 25 bp, Homo sapien
cacaatgacaaaggacgacaggtcc

SEQ ID NO: 110950 - DNA, 25 bp, Homo sapien
cacaatgacaaacgacgacaggtcc

SEQ ID NO: 110951 - DNA, 25 bp, Homo sapien
ccggatgtcagacacagtagaaacc

SEQ ID NO: 110952 - DNA, 25 bp, Homo sapien
ccggatgtcagagacagtagaaacc

SEQ ID NO: 110953 - DNA, 25 bp, Homo sapien
cctaagagagaaataactaaaccta

SEQ ID NO: 110954 - DNA, 25 bp, Homo sapien
cctaagagagaattaactaaaccta

SEQ ID NO: 110955 - DNA, 25 bp, Homo sapien
cttgcgagacagtacaaactcttat

SEQ ID NO: 110956 - DNA, 25 bp, Homo sapien
cttgcgagacagaacaaactcttat

SEQ ID NO: 110957 - DNA, 25 bp, Homo sapien
tcgaggaacatcaacctccggtaca

SEQ ID NO: 110958 - DNA, 25 bp, Homo sapien
tcgaggaacatctacctccggtaca

SEQ ID NO: 110959 - DNA, 25 bp, Homo sapien
agatttctggaatgtcagacgacga

SEQ ID NO: 110960 - DNA, 25 bp, Homo sapien
agatttctggaaagtcagacgacga

SEQ ID NO: 110961 - DNA, 25 bp, Homo sapien
acgtatctcttggagtcaccaaccc

SEQ ID NO: 110962 - DNA, 25 bp, Homo sapien
acgtatctcttgcagtcaccaaccc

SEQ ID NO: 110963 - DNA, 25 bp, Homo sapien
aatgttgtttctaccggcactactc

SEQ ID NO: 110964 - DNA, 25 bp, Homo sapien
aatgttgtttcttccggcactactc

SEQ ID NO: 110965 - DNA, 25 bp, Homo sapien
acatgtatgtatctccctcttcttt

SEQ ID NO: 110966 - DNA, 25 bp, Homo sapien
acatgtatgtatgtccctcttcttt

SEQ ID NO: 110967 - DNA, 25 bp, Homo sapien
gatattgtatttccacttacctggt

SEQ ID NO: 110968 - DNA, 25 bp, Homo sapien
gatattgtatttgcacttacctggt

SEQ ID NO: 110969 - DNA, 25 bp, Homo sapien
ttctccctgtagacttgtacgttat

SEQ ID NO: 110970 - DNA, 25 bp, Homo sapien
ttctccctgtagtcttgtacgttat

SEQ ID NO: 110971 - DNA, 25 bp, Homo sapien
ttttgtacctatggtctgtggtgac

SEQ ID NO: 110972 - DNA, 25 bp, Homo sapien
ttttgtacctatcgtctgtggtgac

SEQ ID NO: 110973 - DNA, 25 bp, Homo sapien
ctattgttacaatctggagtctagt

SEQ ID NO: 110974 - DNA, 25 bp, Homo sapien
ctattgttacaaactggagtctagt

SEQ ID NO: 110975 - DNA, 25 bp, Homo sapien
atagtgagtcaaaacgaagatctct

SEQ ID NO: 110976 - DNA, 25 bp, Homo sapien
atagtgagtcaatacgaagatctct

SEQ ID NO: 110977 - DNA, 25 bp, Homo sapien
acagggtaggtaacggtacgttttc

SEQ ID NO: 110978 - DNA, 25 bp, Homo sapien
acagggtaggtatcggtacgttttc

SEQ ID NO: 110979 - DNA, 25 bp, Homo sapien
ccgggtatcgtatcgggactgtcag

SEQ ID NO: 110980 - DNA, 25 bp, Homo sapien
ccgggtatcgtaacgggactgtcag

SEQ ID NO: 110981 - DNA, 25 bp, Homo sapien
tgtgtccgtatcgtcgggatgacac

SEQ ID NO: 110982 - DNA, 25 bp, Homo sapien
tgtgtccgtatcctcgggatgacac

SEQ ID NO: 110983 - DNA, 25 bp, Homo sapien
tctgtcgtcacacttgacgatgtaa

SEQ ID NO: 110984 - DNA, 25 bp, Homo sapien
tctgtcgtcacagttgacgatgtaa

SEQ ID NO: 110985 - DNA, 25 bp, Homo sapien
acaagcttagtgttcgttgtgtaac

SEQ ID NO: 110986 - DNA, 25 bp, Homo sapien
acaagcttagtgatcgttgtgtaac

SEQ ID NO: 110987 - DNA, 25 bp, Homo sapien
ggtccaaatttcaagtacttgtata

SEQ ID NO: 110988 - DNA, 25 bp, Homo sapien
ggtccaaatttctagtacttgtata

SEQ ID NO: 110989 - DNA, 25 bp, Homo sapien
tatgaagagatttcggacccacgga

SEQ ID NO: 110990 - DNA, 25 bp, Homo sapien
tatgaagagattacggacccacgga

SEQ ID NO: 110991 - DNA, 25 bp, Homo sapien
cgtgaaaatgtaattcacaacgaat

SEQ ID NO: 110992 - DNA, 25 bp, Homo sapien
cgtgaaaatgtatttcacaacgaat

SEQ ID NO: 110993 - DNA, 25 bp, Homo sapien
gataaagatcgtatgttcactcggg

SEQ ID NO: 110994 - DNA, 25 bp, Homo sapien
gataaagatcgtttgttcactcggg

SEQ ID NO: 110995 - DNA, 25 bp, Homo sapien
ttaccgttcagtagtgtcgtccaga

SEQ ID NO: 110996 - DNA, 25 bp, Homo sapien
ttaccgttcagttgtgtcgtccaga

SEQ ID NO: 110997 - DNA, 25 bp, Homo sapien
ctgacgcacacaggttccaccgaag

SEQ ID NO: 110998 - DNA, 25 bp, Homo sapien
ctgacgcacacacgttccaccgaag

SEQ ID NO: 110999 - DNA, 25 bp, Homo sapien
atgacgactatcgaccccatcggac

SEQ ID NO: 111000 - DNA, 25 bp, Homo sapien
atgacgactatccaccccatcggac

SEQ ID NO: 111001 - DNA, 25 bp, Homo sapien
ccgcgacttgacacaccggacgaga

SEQ ID NO: 111002 - DNA, 25 bp, Homo sapien
ccgcgacttgactcaccggacgaga

SEQ ID NO: 111003 - DNA, 25 bp, Homo sapien
tgtcccgtaaaagtccgagacagta

SEQ ID NO: 111004 - DNA, 25 bp, Homo sapien
tgtcccgtaaaactccgagacagta

SEQ ID NO: 111005 - DNA, 25 bp, Homo sapien
atcccgacaatcgtaccagtcgatc

SEQ ID NO: 111006 - DNA, 25 bp, Homo sapien
atcccgacaatcctaccagtcgatc

SEQ ID NO: 111007 - DNA, 25 bp, Homo sapien
cgtctccacagagtagctacttcca

SEQ ID NO: 111008 - DNA, 25 bp, Homo sapien
cgtctccacagactagctacttcca

SEQ ID NO: 111009 - DNA, 25 bp, Homo sapien
ggtttcacgaccctaatgtccgcac

SEQ ID NO: 111010 - DNA, 25 bp, Homo sapien
ggtttcacgaccgtaatgtccgcac

SEQ ID NO: 111011 - DNA, 25 bp, Homo sapien
tgtctctgcgaccagaattcggtaa

SEQ ID NO: 111012 - DNA, 25 bp, Homo sapien
tgtctctgcgacgagaattcggtaa

SEQ ID NO: 111013 - DNA, 25 bp, Homo sapien
acccctcgggaagatcctcggttac

SEQ ID NO: 111014 - DNA, 25 bp, Homo sapien
acccctcgggaacatcctcggttac

SEQ ID NO: 111015 - DNA, 25 bp, Homo sapien
aagagtatcaacctccctgagtgag

SEQ ID NO: 111016 - DNA, 25 bp, Homo sapien
aagagtatcaacgtccctgagtgag

SEQ ID NO: 111017 - DNA, 25 bp, Homo sapien
tcaattacggagatactctctttgg

SEQ ID NO: 111018 - DNA, 25 bp, Homo sapien
tcaattacggagttactctctttgg

SEQ ID NO: 111019 - DNA, 25 bp, Homo sapien
ccgaacaggaactaatccttagtgg

SEQ ID NO: 111020 - DNA, 25 bp, Homo sapien
ccgaacaggaacaaatccttagtgg

SEQ ID NO: 111021 - DNA, 25 bp, Homo sapien
gtccaaatcaaatcaacgcttgaag

SEQ ID NO: 111022 - DNA, 25 bp, Homo sapien
gtccaaatcaaaacaacgcttgaag

SEQ ID NO: 111023 - DNA, 25 bp, Homo sapien
aagaaaactacgacaattgttaacg

SEQ ID NO: 111024 - DNA, 25 bp, Homo sapien
aagaaaactacgtcaattgttaacg

SEQ ID NO: 111025 - DNA, 25 bp, Homo sapien
aacttacgattcaccttttggtacg

SEQ ID NO: 111026 - DNA, 25 bp, Homo sapien
aacttacgattctccttttggtacg

SEQ ID NO: 111027 - DNA, 25 bp, Homo sapien
catcgagaccgcaagtctgttttcc

SEQ ID NO: 111028 - DNA, 25 bp, Homo sapien
catcgagaccgctagtctgttttcc

SEQ ID NO: 111029 - DNA, 25 bp, Homo sapien
acccgtcgaaaccaccggggttcga

SEQ ID NO: 111030 - DNA, 25 bp, Homo sapien
acccgtcgaaacgaccggggttcga

SEQ ID NO: 111031 - DNA, 25 bp, Homo sapien
cccgttactaagacctcgggagaga

SEQ ID NO: 111032 - DNA, 25 bp, Homo sapien
cccgttactaagtcctcgggagaga

SEQ ID NO: 111033 - DNA, 25 bp, Homo sapien
ttgacggaggtcctgagagttagtc

SEQ ID NO: 111034 - DNA, 25 bp, Homo sapien
ttgacggaggtcgtgagagttagtc

SEQ ID NO: 111035 - DNA, 25 bp, Homo sapien
gcacagtagtggtaggagtatctcg

SEQ ID NO: 111036 - DNA, 25 bp, Homo sapien
gcacagtagtggaaggagtatctcg

SEQ ID NO: 111037 - DNA, 25 bp, Homo sapien
ggacagaggtcagtgagtcagtcgt

SEQ ID NO: 111038 - DNA, 25 bp, Homo sapien
ggacagaggtcactgagtcagtcgt

SEQ ID NO: 111039 - DNA, 25 bp, Homo sapien
tgttaaaacatcgtcagagacatat

SEQ ID NO: 111040 - DNA, 25 bp, Homo sapien
tgttaaaacatcctcagagacatat

SEQ ID NO: 111041 - DNA, 25 bp, Homo sapien
tcgtataaagaatcctcgagccttt

SEQ ID NO: 111042 - DNA, 25 bp, Homo sapien
tcgtataaagaaacctcgagccttt

SEQ ID NO: 111043 - DNA, 25 bp, Homo sapien
ggttattaagaatccgtgttcaatc

SEQ ID NO: 111044 - DNA, 25 bp, Homo sapien
ggttattaagaaaccgtgttcaatc

SEQ ID NO: 111045 - DNA, 25 bp, Homo sapien
ttaatacacagaacctcaacgagaa

SEQ ID NO: 111046 - DNA, 25 bp, Homo sapien
ttaatacacagatcctcaacgagaa

SEQ ID NO: 111047 - DNA, 25 bp, Homo sapien
gttagacctcatacacaatggtaca

SEQ ID NO: 111048 - DNA, 25 bp, Homo sapien
gttagacctcattcacaatggtaca

SEQ ID NO: 111049 - DNA, 25 bp, Homo sapien
atcttcctctattctccgtgggacc

SEQ ID NO: 111050 - DNA, 25 bp, Homo sapien
atcttcctctatactccgtgggacc

SEQ ID NO: 111051 - DNA, 25 bp, Homo sapien
acatgttacatcattgtcgagtttg

SEQ ID NO: 111052 - DNA, 25 bp, Homo sapien
acatgttacatctttgtcgagtttg

SEQ ID NO: 111053 - DNA, 25 bp, Homo sapien
ggacaagaaatctttcgagattctt

SEQ ID NO: 111054 - DNA, 25 bp, Homo sapien
ggacaagaaatcattcgagattctt

SEQ ID NO: 111055 - DNA, 25 bp, Homo sapien
tgactgaggaaatcttctaggtttt

SEQ ID NO: 111056 - DNA, 25 bp, Homo sapien
tgactgaggaaaacttctaggtttt

SEQ ID NO: 111057 - DNA, 25 bp, Homo sapien
tgaggtggtaaaaccgttttcctac

SEQ ID NO: 111058 - DNA, 25 bp, Homo sapien
tgaggtggtaaatccgttttcctac

SEQ ID NO: 111059 - DNA, 25 bp, Homo sapien
tcagtgtaagagtcttcttctttcc

SEQ ID NO: 111060 - DNA, 25 bp, Homo sapien
tcagtgtaagagacttcttctttcc

SEQ ID NO: 111061 - DNA, 25 bp, Homo sapien
ggtgtataacgaataacaccttaaa

SEQ ID NO: 111062 - DNA, 25 bp, Homo sapien
ggtgtataacgattaacaccttaaa

SEQ ID NO: 111063 - DNA, 25 bp, Homo sapien
cggagactcgacactcacaacaagg

SEQ ID NO: 111064 - DNA, 25 bp, Homo sapien
cggagactcgactctcacaacaagg

SEQ ID NO: 111065 - DNA, 25 bp, Homo sapien
gcgaacccaccgtcgtgtacaagtc

SEQ ID NO: 111066 - DNA, 25 bp, Homo sapien
gcgaacccaccgacgtgtacaagtc

SEQ ID NO: 111067 - DNA, 25 bp, Homo sapien
tcatcccacgcgagagacggatcgt

SEQ ID NO: 111068 - DNA, 25 bp, Homo sapien
tcatcccacgcgtgagacggatcgt

SEQ ID NO: 111069 - DNA, 25 bp, Homo sapien
tctcaccggccgagtcaggtatcct

SEQ ID NO: 111070 - DNA, 25 bp, Homo sapien
tctcaccggccgtgtcaggtatcct

SEQ ID NO: 111071 - DNA, 25 bp, Homo sapien
acaagacgtccttccgcgagtaccg

SEQ ID NO: 111072 - DNA, 25 bp, Homo sapien
acaagacgtcctaccgcgagtaccg

SEQ ID NO: 111073 - DNA, 25 bp, Homo sapien
agaactacgcgcacatcctgtcgtc

SEQ ID NO: 111074 - DNA, 25 bp, Homo sapien
agaactacgcgctcatcctgtcgtc

SEQ ID NO: 111075 - DNA, 25 bp, Homo sapien
tatctacggaaagacacggtcgtcg

SEQ ID NO: 111076 - DNA, 25 bp, Homo sapien
tatctacggaaacacacggtcgtcg

SEQ ID NO: 111077 - DNA, 25 bp, Homo sapien
ttcagtcgtaagaaatccaagttct

SEQ ID NO: 111078 - DNA, 25 bp, Homo sapien
ttcagtcgtaagtaatccaagttct

SEQ ID NO: 111079 - DNA, 25 bp, Homo sapien
tcagtcgaatgtaatccgtatttat

SEQ ID NO: 111080 - DNA, 25 bp, Homo sapien
tcagtcgaatgttatccgtatttat

SEQ ID NO: 111081 - DNA, 25 bp, Homo sapien
atttacaaccgtcatctgtgttggt

SEQ ID NO: 111082 - DNA, 25 bp, Homo sapien
atttacaaccgtgatctgtgttggt

SEQ ID NO: 111083 - DNA, 25 bp, Homo sapien
aaaagattcagtctgtatttttgat

SEQ ID NO: 111084 - DNA, 25 bp, Homo sapien
aaaagattcagtgtgtatttttgat

SEQ ID NO: 111085 - DNA, 25 bp, Homo sapien
aaagtacatgactactttctatgag

SEQ ID NO: 111086 - DNA, 25 bp, Homo sapien
aaagtacatgacaactttctatgag

SEQ ID NO: 111087 - DNA, 25 bp, Homo sapien
agaaatgtacattccaattaccagg

SEQ ID NO: 111088 - DNA, 25 bp, Homo sapien
agaaatgtacataccaattaccagg

SEQ ID NO: 111089 - DNA, 25 bp, Homo sapien
gaaccgtccgactcattttaccagg

SEQ ID NO: 111090 - DNA, 25 bp, Homo sapien
gaaccgtccgacacattttaccagg

SEQ ID NO: 111091 - DNA, 25 bp, Homo sapien
aattcccatcggttctggaacgtac

SEQ ID NO: 111092 - DNA, 25 bp, Homo sapien
aattcccatcggatctggaacgtac

SEQ ID NO: 111093 - DNA, 25 bp, Homo sapien
aaagagtctgttgctttttcgtttc

SEQ ID NO: 111094 - DNA, 25 bp, Homo sapien
aaagagtctgttcctttttcgtttc

SEQ ID NO: 111095 - DNA, 25 bp, Homo sapien
acggtccgatcttttgttcgttaat

SEQ ID NO: 111096 - DNA, 25 bp, Homo sapien
acggtccgatctattgttcgttaat

SEQ ID NO: 111097 - DNA, 25 bp, Homo sapien
cgagaaccgacaggtgaaactaccc

SEQ ID NO: 111098 - DNA, 25 bp, Homo sapien
cgagaaccgacacgtgaaactaccc

SEQ ID NO: 111099 - DNA, 25 bp, Homo sapien
cagagacccgtacgtcaaacgaggg

SEQ ID NO: 111100 - DNA, 25 bp, Homo sapien
cagagacccgtaggtcaaacgaggg

SEQ ID NO: 111101 - DNA, 25 bp, Homo sapien
gagaagtcccgagtctgtcctgacc

SEQ ID NO: 111102 - DNA, 25 bp, Homo sapien
gagaagtcccgactctgtcctgacc

SEQ ID NO: 111103 - DNA, 25 bp, Homo sapien
aaaccgacccggtcgttctgaactg

SEQ ID NO: 111104 - DNA, 25 bp, Homo sapien
aaaccgacccggacgttctgaactg

SEQ ID NO: 111105 - DNA, 25 bp, Homo sapien
agttaacgggggtcacgcccggacc

SEQ ID NO: 111106 - DNA, 25 bp, Homo sapien
agttaacgggggacacgcccggacc

SEQ ID NO: 111107 - DNA, 25 bp, Homo sapien
tgaggggtagaaaggacctcgactc

SEQ ID NO: 111108 - DNA, 25 bp, Homo sapien
tgaggggtagaatggacctcgactc

SEQ ID NO: 111109 - DNA, 25 bp, Homo sapien
tacagaagggaagtagacctctctt

SEQ ID NO: 111110 - DNA, 25 bp, Homo sapien
tacagaagggaactagacctctctt

SEQ ID NO: 111111 - DNA, 25 bp, Homo sapien
ctcggaagttgaagtgaaactcttt

SEQ ID NO: 111112 - DNA, 25 bp, Homo sapien
ctcggaagttgatgtgaaactcttt

SEQ ID NO: 111113 - DNA, 25 bp, Homo sapien
aatcgtgatataacttctcgtgtat

SEQ ID NO: 111114 - DNA, 25 bp, Homo sapien
aatcgtgatatatcttctcgtgtat

SEQ ID NO: 111115 - DNA, 25 bp, Homo sapien
ctccagtttgtgtcagtggacgtat

SEQ ID NO: 111116 - DNA, 25 bp, Homo sapien
ctccagtttgtgacagtggacgtat

SEQ ID NO: 111117 - DNA, 25 bp, Homo sapien
ctcccatcgtcatcactgcgggtag

SEQ ID NO: 111118 - DNA, 25 bp, Homo sapien
ctcccatcgtcaacactgcgggtag

SEQ ID NO: 111119 - DNA, 25 bp, Homo sapien
ttaccgtcactcaaagggagtctcg

SEQ ID NO: 111120 - DNA, 25 bp, Homo sapien
ttaccgtcactctaagggagtctcg

SEQ ID NO: 111121 - DNA, 25 bp, Homo sapien
tatacactaacaactcagggactcg

SEQ ID NO: 111122 - DNA, 25 bp, Homo sapien
tatacactaacatctcagggactcg

SEQ ID NO: 111123 - DNA, 25 bp, Homo sapien
acgtacaatataacgtcccagttcg

SEQ ID NO: 111124 - DNA, 25 bp, Homo sapien
acgtacaatatatcgtcccagttcg

SEQ ID NO: 111125 - DNA, 25 bp, Homo sapien
cggaaagactcactctcgcggacgc

SEQ ID NO: 111126 - DNA, 25 bp, Homo sapien
cggaaagactcagtctcgcggacgc

SEQ ID NO: 111127 - DNA, 25 bp, Homo sapien
tctacaacgcgtttccgtatcacgg

SEQ ID NO: 111128 - DNA, 25 bp, Homo sapien
tctacaacgcgtatccgtatcacgg

SEQ ID NO: 111129 - DNA, 25 bp, Homo sapien
acatagtagacgatcctcgtcagtt

SEQ ID NO: 111130 - DNA, 25 bp, Homo sapien
acatagtagacgttcctcgtcagtt

SEQ ID NO: 111131 - DNA, 25 bp, Homo sapien
cgtacgtacgatttctccactagac

SEQ ID NO: 111132 - DNA, 25 bp, Homo sapien
cgtacgtacgatatctccactagac

SEQ ID NO: 111133 - DNA, 25 bp, Homo sapien
tttgactcggtcatacaccatgtac

SEQ ID NO: 111134 - DNA, 25 bp, Homo sapien
tttgactcggtcttacaccatgtac

SEQ ID NO: 111135 - DNA, 25 bp, Homo sapien
atttctcgaaacgtaatccccgatg

SEQ ID NO: 111136 - DNA, 25 bp, Homo sapien
atttctcgaaacctaatccccgatg

SEQ ID NO: 111137 - DNA, 25 bp, Homo sapien
gacctctatccatccttctgtgatg

SEQ ID NO: 111138 - DNA, 25 bp, Homo sapien
gacctctatccaaccttctgtgatg

SEQ ID NO: 111139 - DNA, 25 bp, Homo sapien
cgtatccaacaacagttcgttaatg

SEQ ID NO: 111140 - DNA, 25 bp, Homo sapien
cgtatccaacaagagttcgttaatg

SEQ ID NO: 111141 - DNA, 25 bp, Homo sapien
tagttctgaccctcggttctctttc

SEQ ID NO: 111142 - DNA, 25 bp, Homo sapien
tagttctgacccacggttctctttc

SEQ ID NO: 111143 - DNA, 25 bp, Homo sapien
tccgactccagagctacttcctgtt

SEQ ID NO: 111144 - DNA, 25 bp, Homo sapien
tccgactccagacctacttcctgtt

SEQ ID NO: 111145 - DNA, 25 bp, Homo sapien
cgtcaaataaaggttgtcactgtat

SEQ ID NO: 111146 - DNA, 25 bp, Homo sapien
cgtcaaataaagcttgtcactgtat

SEQ ID NO: 111147 - DNA, 25 bp, Homo sapien
ctactgacctaggaattttcatgta

SEQ ID NO: 111148 - DNA, 25 bp, Homo sapien
ctactgacctagcaattttcatgta

SEQ ID NO: 111149 - DNA, 25 bp, Homo sapien
gagtcccgtccagtcaggtcacaca

SEQ ID NO: 111150 - DNA, 25 bp, Homo sapien
gagtcccgtccactcaggtcacaca

SEQ ID NO: 111151 - DNA, 25 bp, Homo sapien
ttgtgacgaaacctcttatgcattt

SEQ ID NO: 111152 - DNA, 25 bp, Homo sapien
ttgtgacgaaacgtcttatgcattt

SEQ ID NO: 111153 - DNA, 25 bp, Homo sapien
ttaacggaagttctcgaagacattt

SEQ ID NO: 111154 - DNA, 25 bp, Homo sapien
ttaacggaagttgtcgaagacattt

SEQ ID NO: 111155 - DNA, 25 bp, Homo sapien
caagatactctgttgtgactatata

SEQ ID NO: 111156 - DNA, 25 bp, Homo sapien
caagatactctgatgtgactatata

SEQ ID NO: 111157 - DNA, 25 bp, Homo sapien
gatttctcggacttcttgtaaaccc

SEQ ID NO: 111158 - DNA, 25 bp, Homo sapien
gatttctcggacatcttgtaaaccc

SEQ ID NO: 111159 - DNA, 25 bp, Homo sapien
gtttctacgggaaccggttgttccc

SEQ ID NO: 111160 - DNA, 25 bp, Homo sapien
gtttctacgggatccggttgttccc

SEQ ID NO: 111161 - DNA, 25 bp, Homo sapien
ttcctaggtgccagacgttggtcca

SEQ ID NO: 111162 - DNA, 25 bp, Homo sapien
ttcctaggtgcctgacgttggtcca

SEQ ID NO: 111163 - DNA, 25 bp, Homo sapien
gatcaaatctctaggtttgtatcat

SEQ ID NO: 111164 - DNA, 25 bp, Homo sapien
gatcaaatctcttggtttgtatcat

SEQ ID NO: 111165 - DNA, 25 bp, Homo sapien
taaaattctatacgttctattcact

SEQ ID NO: 111166 - DNA, 25 bp, Homo sapien
taaaattctataggttctattcact

SEQ ID NO: 111167 - DNA, 25 bp, Homo sapien
ttcaacgagataaagttcttttact

SEQ ID NO: 111168 - DNA, 25 bp, Homo sapien
ttcaacgagatatagttcttttact

SEQ ID NO: 111169 - DNA, 25 bp, Homo sapien
atcacaagatcttcgggacttgtac

SEQ ID NO: 111170 - DNA, 25 bp, Homo sapien
atcacaagatctacgggacttgtac

SEQ ID NO: 111171 - DNA, 25 bp, Homo sapien
ccactaaacgtgacggactctcttt

SEQ ID NO: 111172 - DNA, 25 bp, Homo sapien
ccactaaacgtgtcggactctcttt

SEQ ID NO: 111173 - DNA, 25 bp, Homo sapien
tctgttttgacgacggaagattctt

SEQ ID NO: 111174 - DNA, 25 bp, Homo sapien
tctgttttgacgtcggaagattctt

SEQ ID NO: 111175 - DNA, 25 bp, Homo sapien
gggtcttcgtggacgccgtctccgc

SEQ ID NO: 111176 - DNA, 25 bp, Homo sapien
gggtcttcgtggtcgccgtctccgc

SEQ ID NO: 111177 - DNA, 25 bp, Homo sapien
gttcgtctgggactccttcccgtgt

SEQ ID NO: 111178 - DNA, 25 bp, Homo sapien
gttcgtctgggagtccttcccgtgt

SEQ ID NO: 111179 - DNA, 25 bp, Homo sapien
tctttaatcggaaacttttacacgg

SEQ ID NO: 111180 - DNA, 25 bp, Homo sapien
tctttaatcggatacttttacacgg

SEQ ID NO: 111181 - DNA, 25 bp, Homo sapien
ttgaacagtcgtcactgtttcagtt

SEQ ID NO: 111182 - DNA, 25 bp, Homo sapien
ttgaacagtcgtgactgtttcagtt

SEQ ID NO: 111183 - DNA, 25 bp, Homo sapien
acgttcatgtgttgacattatcttt

SEQ ID NO: 111184 - DNA, 25 bp, Homo sapien
acgttcatgtgtagacattatcttt

SEQ ID NO: 111185 - DNA, 25 bp, Homo sapien
cctccatctcttcgaaccgtagggt

SEQ ID NO: 111186 - DNA, 25 bp, Homo sapien
cctccatctcttggaaccgtagggt

SEQ ID NO: 111187 - DNA, 25 bp, Homo sapien
gttccgatctcttacggaccatttt

SEQ ID NO: 111188 - DNA, 25 bp, Homo sapien
gttccgatctctaacggaccatttt

SEQ ID NO: 111189 - DNA, 25 bp, Homo sapien
gttctgtttcacgaacattctgtat

SEQ ID NO: 111190 - DNA, 25 bp, Homo sapien
gttctgtttcaccaacattctgtat

SEQ ID NO: 111191 - DNA, 25 bp, Homo sapien
gaggttcacactcacccagtttagt

SEQ ID NO: 111192 - DNA, 25 bp, Homo sapien
gaggttcacactgacccagtttagt

SEQ ID NO: 111193 - DNA, 25 bp, Homo sapien
gcaggagtatcctcagctacgggtg

SEQ ID NO: 111194 - DNA, 25 bp, Homo sapien
gcaggagtatccacagctacgggtg

SEQ ID NO: 111195 - DNA, 25 bp, Homo sapien
cagccgtgtcttcgtaccgccggtg

SEQ ID NO: 111196 - DNA, 25 bp, Homo sapien
cagccgtgtcttggtaccgccggtg

SEQ ID NO: 111197 - DNA, 25 bp, Homo sapien
gaaggatttcgtagaacggtctctg

SEQ ID NO: 111198 - DNA, 25 bp, Homo sapien
gaaggatttcgttgaacggtctctg

SEQ ID NO: 111199 - DNA, 25 bp, Homo sapien
ttccccgtcgtgacacgggtctcgg

SEQ ID NO: 111200 - DNA, 25 bp, Homo sapien
ttccccgtcgtgtcacgggtctcgg

SEQ ID NO: 111201 - DNA, 25 bp, Homo sapien
ctcggacgtggtaccgggtcatcgt

SEQ ID NO: 111202 - DNA, 25 bp, Homo sapien
ctcggacgtggttccgggtcatcgt

SEQ ID NO: 111203 - DNA, 25 bp, Homo sapien
tctagagcgacttcttaggcgcgtg

SEQ ID NO: 111204 - DNA, 25 bp, Homo sapien
tctagagcgactacttaggcgcgtg

SEQ ID NO: 111205 - DNA, 25 bp, Homo sapien
tatgtttatagttccaatgggcttc

SEQ ID NO: 111206 - DNA, 25 bp, Homo sapien
tatgtttatagtaccaatgggcttc

SEQ ID NO: 111207 - DNA, 25 bp, Homo sapien
gtttttagaacaggtggtacctcct

SEQ ID NO: 111208 - DNA, 25 bp, Homo sapien
gtttttagaacacgtggtacctcct

SEQ ID NO: 111209 - DNA, 25 bp, Homo sapien
atttagactaaggttggacaacctt

SEQ ID NO: 111210 - DNA, 25 bp, Homo sapien
atttagactaagcttggacaacctt

SEQ ID NO: 111211 - DNA, 25 bp, Homo sapien
ctaataagtaagctaacggggcctg

SEQ ID NO: 111212 - DNA, 25 bp, Homo sapien
ctaataagtaaggtaacggggcctg

SEQ ID NO: 111213 - DNA, 25 bp, Homo sapien
gtcactataaaagtccttcttgaag

SEQ ID NO: 111214 - DNA, 25 bp, Homo sapien
gtcactataaaactccttcttgaag

SEQ ID NO: 111215 - DNA, 25 bp, Homo sapien
ttactccagaggtctccaaaggacg

SEQ ID NO: 111216 - DNA, 25 bp, Homo sapien
ttactccagaggactccaaaggacg

SEQ ID NO: 111217 - DNA, 25 bp, Homo sapien
atccaagtcgtgttccaacagtcga

SEQ ID NO: 111218 - DNA, 25 bp, Homo sapien
atccaagtcgtgatccaacagtcga

SEQ ID NO: 111219 - DNA, 25 bp, Homo sapien
tcggccgaatctgaggctaccccga

SEQ ID NO: 111220 - DNA, 25 bp, Homo sapien
tcggccgaatctcaggctaccccga

SEQ ID NO: 111221 - DNA, 25 bp, Homo sapien
agcgtgacggaagagggacccccat

SEQ ID NO: 111222 - DNA, 25 bp, Homo sapien
agcgtgacggaacagggacccccat

SEQ ID NO: 111223 - DNA, 25 bp, Homo sapien
ggcgaggagtagaggaacccctctt

SEQ ID NO: 111224 - DNA, 25 bp, Homo sapien
ggcgaggagtagtggaacccctctt

SEQ ID NO: 111225 - DNA, 25 bp, Homo sapien
gacaccgaaggtttggacagcattc

SEQ ID NO: 111226 - DNA, 25 bp, Homo sapien
gacaccgaaggtatggacagcattc

SEQ ID NO: 111227 - DNA, 25 bp, Homo sapien
caacaaggttcagacatcgaactct

SEQ ID NO: 111228 - DNA, 25 bp, Homo sapien
caacaaggttcacacatcgaactct

SEQ ID NO: 111229 - DNA, 25 bp, Homo sapien
gtcaagggtgtagaactcggactat

SEQ ID NO: 111230 - DNA, 25 bp, Homo sapien
gtcaagggtgtacaactcggactat

SEQ ID NO: 111231 - DNA, 25 bp, Homo sapien
gacaaattagtaaaatctcgtcagt

SEQ ID NO: 111232 - DNA, 25 bp, Homo sapien
gacaaattagtataatctcgtcagt

SEQ ID NO: 111233 - DNA, 25 bp, Homo sapien
gaagacaagaagacaacaggttccc

SEQ ID NO: 111234 - DNA, 25 bp, Homo sapien
gaagacaagaagtcaacaggttccc

SEQ ID NO: 111235 - DNA, 25 bp, Homo sapien
cagtaggagacctccgtcgggttag

SEQ ID NO: 111236 - DNA, 25 bp, Homo sapien
cagtaggagaccaccgtcgggttag

SEQ ID NO: 111237 - DNA, 25 bp, Homo sapien
cacgacggtttcgacccaggtactg

SEQ ID NO: 111238 - DNA, 25 bp, Homo sapien
cacgacggtttccacccaggtactg

SEQ ID NO: 111239 - DNA, 25 bp, Homo sapien
aagtcgacctgaactggcggtacgg

SEQ ID NO: 111240 - DNA, 25 bp, Homo sapien
aagtcgacctgatctggcggtacgg

SEQ ID NO: 111241 - DNA, 25 bp, Homo sapien
gtccaagagacagagccccgagtca

SEQ ID NO: 111242 - DNA, 25 bp, Homo sapien
gtccaagagacacagccccgagtca

SEQ ID NO: 111243 - DNA, 25 bp, Homo sapien
ctacgggatccctgtccctggtatt

SEQ ID NO: 111244 - DNA, 25 bp, Homo sapien
ctacgggatcccagtccctggtatt

SEQ ID NO: 111245 - DNA, 25 bp, Homo sapien
ggggatccgaagactctcggtcgtt

SEQ ID NO: 111246 - DNA, 25 bp, Homo sapien
ggggatccgaagtctctcggtcgtt

SEQ ID NO: 111247 - DNA, 25 bp, Homo sapien
agcgagagcgtcgttgttcccttct

SEQ ID NO: 111248 - DNA, 25 bp, Homo sapien
agcgagagcgtccttgttcccttct

SEQ ID NO: 111249 - DNA, 25 bp, Homo sapien
cgtggattgtgcttattctcttcgc

SEQ ID NO: 111250 - DNA, 25 bp, Homo sapien
cgtggattgtgcatattctcttcgc

SEQ ID NO: 111251 - DNA, 25 bp, Homo sapien
acgtgttgtgcgtcagtttcgcccc

SEQ ID NO: 111252 - DNA, 25 bp, Homo sapien
acgtgttgtgcgacagtttcgcccc

SEQ ID NO: 111253 - DNA, 25 bp, Homo sapien
tttgtttaagattctctgacgctac

SEQ ID NO: 111254 - DNA, 25 bp, Homo sapien
tttgtttaagatactctgacgctac

SEQ ID NO: 111255 - DNA, 25 bp, Homo sapien
cgtctctaaggactgacgactgtac

SEQ ID NO: 111256 - DNA, 25 bp, Homo sapien
cgtctctaaggagtgacgactgtac

SEQ ID NO: 111257 - DNA, 25 bp, Homo sapien
cgggtctccgtctccggactgtgac

SEQ ID NO: 111258 - DNA, 25 bp, Homo sapien
cgggtctccgtcaccggactgtgac

SEQ ID NO: 111259 - DNA, 25 bp, Homo sapien
ggatctgtcctcagggtctgtcgtc

SEQ ID NO: 111260 - DNA, 25 bp, Homo sapien
ggatctgtcctctgggtctgtcgtc

SEQ ID NO: 111261 - DNA, 25 bp, Homo sapien
gtcgagttgtcctcggacgaacagg

SEQ ID NO: 111262 - DNA, 25 bp, Homo sapien
gtcgagttgtccacggacgaacagg

SEQ ID NO: 111263 - DNA, 25 bp, Homo sapien
ttggcgtcgaccttagccaccagtg

SEQ ID NO: 111264 - DNA, 25 bp, Homo sapien
ttggcgtcgaccatagccaccagtg

SEQ ID NO: 111265 - DNA, 25 bp, Homo sapien
ttcgagaggaagtcactcaccgtga

SEQ ID NO: 111266 - DNA, 25 bp, Homo sapien
ttcgagaggaagacactcaccgtga

SEQ ID NO: 111267 - DNA, 25 bp, Homo sapien
tatcggtcggcgacgcggtcccaga

SEQ ID NO: 111268 - DNA, 25 bp, Homo sapien
tatcggtcggcgtcgcggtcccaga

SEQ ID NO: 111269 - DNA, 25 bp, Homo sapien
tacctcagtgtgtccggactcaaac

SEQ ID NO: 111270 - DNA, 25 bp, Homo sapien
tacctcagtgtgaccggactcaaac

SEQ ID NO: 111271 - DNA, 25 bp, Homo sapien
tcacttcggtcgacgaaggtaacca

SEQ ID NO: 111272 - DNA, 25 bp, Homo sapien
tcacttcggtcgtcgaaggtaacca

SEQ ID NO: 111273 - DNA, 25 bp, Homo sapien
atcccttcggactccaagagtcgga

SEQ ID NO: 111274 - DNA, 25 bp, Homo sapien
atcccttcggacaccaagagtcgga

SEQ ID NO: 111275 - DNA, 25 bp, Homo sapien
actccttaagtgtccgaaggtcctc

SEQ ID NO: 111276 - DNA, 25 bp, Homo sapien
actccttaagtgaccgaaggtcctc

SEQ ID NO: 111277 - DNA, 25 bp, Homo sapien
acccaacaagaggaccaggcactac

SEQ ID NO: 111278 - DNA, 25 bp, Homo sapien
acccaacaagagcaccaggcactac

SEQ ID NO: 111279 - DNA, 25 bp, Homo sapien
gcagtagcaacacactcaaacacag

SEQ ID NO: 111280 - DNA, 25 bp, Homo sapien
gcagtagcaacagactcaaacacag

SEQ ID NO: 111281 - DNA, 25 bp, Homo sapien
taccataggtggaagtcccgatgaa

SEQ ID NO: 111282 - DNA, 25 bp, Homo sapien
taccataggtggtagtcccgatgaa

SEQ ID NO: 111283 - DNA, 25 bp, Homo sapien
gtaagtaaggggtccccgatgtaac

SEQ ID NO: 111284 - DNA, 25 bp, Homo sapien
gtaagtaaggggaccccgatgtaac

SEQ ID NO: 111285 - DNA, 25 bp, Homo sapien
gttactggggtcagtccatgtacat

SEQ ID NO: 111286 - DNA, 25 bp, Homo sapien
gttactggggtctgtccatgtacat

SEQ ID NO: 111287 - DNA, 25 bp, Homo sapien
gtccaggtcggctactacaggtaat

SEQ ID NO: 111288 - DNA, 25 bp, Homo sapien
gtccaggtcggcaactacaggtaat

SEQ ID NO: 111289 - DNA, 25 bp, Homo sapien
tccggtgtgtcgacctacgatcaga

SEQ ID NO: 111290 - DNA, 25 bp, Homo sapien
tccggtgtgtcgtcctacgatcaga

SEQ ID NO: 111291 - DNA, 25 bp, Homo sapien
cacttagtactgtcttgagtaagta

SEQ ID NO: 111292 - DNA, 25 bp, Homo sapien
cacttagtactgacttgagtaagta

SEQ ID NO: 111293 - DNA, 25 bp, Homo sapien
atcctaaaagtcaccgaagtctaag

SEQ ID NO: 111294 - DNA, 25 bp, Homo sapien
atcctaaaagtctccgaagtctaag

SEQ ID NO: 111295 - DNA, 25 bp, Homo sapien
ctcttgaatgacttcccattgtatg

SEQ ID NO: 111296 - DNA, 25 bp, Homo sapien
ctcttgaatgacatcccattgtatg

SEQ ID NO: 111297 - DNA, 25 bp, Homo sapien
cttactattacataccatatgatat

SEQ ID NO: 111298 - DNA, 25 bp, Homo sapien
cttactattacaaaccatatgatat

SEQ ID NO: 111299 - DNA, 25 bp, Homo sapien
ggctttcctcggtcgacatggaagt

SEQ ID NO: 111300 - DNA, 25 bp, Homo sapien
ggctttcctcggacgacatggaagt

SEQ ID NO: 111301 - DNA, 25 bp, Homo sapien
gactttgttctgtcaatatagaccg

SEQ ID NO: 111302 - DNA, 25 bp, Homo sapien
gactttgttctgacaatatagaccg

SEQ ID NO: 111303 - DNA, 25 bp, Homo sapien
ctctctcactctatccagtcagggt

SEQ ID NO: 111304 - DNA, 25 bp, Homo sapien
ctctctcactctttccagtcagggt

SEQ ID NO: 111305 - DNA, 25 bp, Homo sapien
agtagaaactcagtccactcagggt

SEQ ID NO: 111306 - DNA, 25 bp, Homo sapien
agtagaaactcactccactcagggt

SEQ ID NO: 111307 - DNA, 25 bp, Homo sapien
caggtaagtcaggtaccaaaagtat

SEQ ID NO: 111308 - DNA, 25 bp, Homo sapien
caggtaagtcagctaccaaaagtat

SEQ ID NO: 111309 - DNA, 25 bp, Homo sapien
agttagtgagaaacgtcaaccagtt

SEQ ID NO: 111310 - DNA, 25 bp, Homo sapien
agttagtgagaatcgtcaaccagtt

SEQ ID NO: 111311 - DNA, 25 bp, Homo sapien
ccgtcgactactccaacagacgtat

SEQ ID NO: 111312 - DNA, 25 bp, Homo sapien
ccgtcgactactgcaacagacgtat

SEQ ID NO: 111313 - DNA, 25 bp, Homo sapien
gctcgaccccgacgtgacacgggta

SEQ ID NO: 111314 - DNA, 25 bp, Homo sapien
gctcgaccccgaggtgacacgggta

SEQ ID NO: 111315 - DNA, 25 bp, Homo sapien
tgcagacccagtcactccagggtag

SEQ ID NO: 111316 - DNA, 25 bp, Homo sapien
tgcagacccagtgactccagggtag

SEQ ID NO: 111317 - DNA, 25 bp, Homo sapien
actacccacaaccacaacatgagac

SEQ ID NO: 111318 - DNA, 25 bp, Homo sapien
actacccacaacgacaacatgagac

SEQ ID NO: 111319 - DNA, 25 bp, Homo sapien
agaccaacctccagagacctgtcag

SEQ ID NO: 111320 - DNA, 25 bp, Homo sapien
agaccaacctcctgagacctgtcag

SEQ ID NO: 111321 - DNA, 25 bp, Homo sapien
gaacgacagcaagacaacgtcgaga

SEQ ID NO: 111322 - DNA, 25 bp, Homo sapien
gaacgacagcaacacaacgtcgaga

SEQ ID NO: 111323 - DNA, 25 bp, Homo sapien
tagtctacggaagtagtcgaccata

SEQ ID NO: 111324 - DNA, 25 bp, Homo sapien
tagtctacggaactagtcgaccata

SEQ ID NO: 111325 - DNA, 25 bp, Homo sapien
tttagtcacggaatttcacgaaagt

SEQ ID NO: 111326 - DNA, 25 bp, Homo sapien
tttagtcacggattttcacgaaagt

SEQ ID NO: 111327 - DNA, 25 bp, Homo sapien
ttttgcgacggcacttctgtaaggt

SEQ ID NO: 111328 - DNA, 25 bp, Homo sapien
ttttgcgacggctcttctgtaaggt

SEQ ID NO: 111329 - DNA, 25 bp, Homo sapien
ccttttgtgggatacatgttacaat

SEQ ID NO: 111330 - DNA, 25 bp, Homo sapien
ccttttgtgggaaacatgttacaat

SEQ ID NO: 111331 - DNA, 25 bp, Homo sapien
atacctttaggtgtagaatcacatt

SEQ ID NO: 111332 - DNA, 25 bp, Homo sapien
atacctttaggtctagaatcacatt

SEQ ID NO: 111333 - DNA, 25 bp, Homo sapien
actactctttgacagtgatcatgtt

SEQ ID NO: 111334 - DNA, 25 bp, Homo sapien
actactctttgagagtgatcatgtt

SEQ ID NO: 111335 - DNA, 25 bp, Homo sapien
gactttcctcttacagggtcccttc

SEQ ID NO: 111336 - DNA, 25 bp, Homo sapien
gactttcctctttcagggtcccttc

SEQ ID NO: 111337 - DNA, 25 bp, Homo sapien
ctttcaattacaagtggacccccgt

SEQ ID NO: 111338 - DNA, 25 bp, Homo sapien
ctttcaattacatgtggacccccgt

SEQ ID NO: 111339 - DNA, 25 bp, Homo sapien
tttgaactttagtcagtaacagtcc

SEQ ID NO: 111340 - DNA, 25 bp, Homo sapien
tttgaactttagacagtaacagtcc

SEQ ID NO: 111341 - DNA, 25 bp, Homo sapien
gattggacttcgaaaccaatactcc

SEQ ID NO: 111342 - DNA, 25 bp, Homo sapien
gattggacttcgtaaccaatactcc

SEQ ID NO: 111343 - DNA, 25 bp, Homo sapien
ttagttcacactgttggcgaatttc

SEQ ID NO: 111344 - DNA, 25 bp, Homo sapien
ttagttcacactcttggcgaatttc

SEQ ID NO: 111345 - DNA, 25 bp, Homo sapien
atatcgcaccttctgtggaaatgtc

SEQ ID NO: 111346 - DNA, 25 bp, Homo sapien
atatcgcaccttgtgtggaaatgtc

SEQ ID NO: 111347 - DNA, 25 bp, Homo sapien
tgaaccgaagttggaggtcactgac

SEQ ID NO: 111348 - DNA, 25 bp, Homo sapien
tgaaccgaagttcgaggtcactgac

SEQ ID NO: 111349 - DNA, 25 bp, Homo sapien
accagggatagatcggggttcagac

SEQ ID NO: 111350 - DNA, 25 bp, Homo sapien
accagggatagaacggggttcagac

SEQ ID NO: 111351 - DNA, 25 bp, Homo sapien
gaggaggtgaacacggacccaaacg

SEQ ID NO: 111352 - DNA, 25 bp, Homo sapien
gaggaggtgaactcggacccaaacg

SEQ ID NO: 111353 - DNA, 25 bp, Homo sapien
aggattagatttccacctgtacaac

SEQ ID NO: 111354 - DNA, 25 bp, Homo sapien
aggattagatttgcacctgtacaac

SEQ ID NO: 111355 - DNA, 25 bp, Homo sapien
gtatcatgaatttaacttgtcaacg

SEQ ID NO: 111356 - DNA, 25 bp, Homo sapien
gtatcatgaattaaacttgtcaacg

SEQ ID NO: 111357 - DNA, 25 bp, Homo sapien
tgttcaatcttttgacgactggaag

SEQ ID NO: 111358 - DNA, 25 bp, Homo sapien
tgttcaatctttagacgactggaag

SEQ ID NO: 111359 - DNA, 25 bp, Homo sapien
ttccgagtcgttacagcatagaaag

SEQ ID NO: 111360 - DNA, 25 bp, Homo sapien
ttccgagtcgtttcagcatagaaag

SEQ ID NO: 111361 - DNA, 25 bp, Homo sapien
agagctcaatttagctcttactaag

SEQ ID NO: 111362 - DNA, 25 bp, Homo sapien
agagctcaattttgctcttactaag

SEQ ID NO: 111363 - DNA, 25 bp, Homo sapien
ctatgtcaaggttttgattcgctaa

SEQ ID NO: 111364 - DNA, 25 bp, Homo sapien
ctatgtcaaggtattgattcgctaa

SEQ ID NO: 111365 - DNA, 25 bp, Homo sapien
ccagagctagtgttcaatttgtaaa

SEQ ID NO: 111366 - DNA, 25 bp, Homo sapien
ccagagctagtgatcaatttgtaaa

SEQ ID NO: 111367 - DNA, 25 bp, Homo sapien
aagtcacggtgtccaattcttgaac

SEQ ID NO: 111368 - DNA, 25 bp, Homo sapien
aagtcacggtgtgcaattcttgaac

SEQ ID NO: 111369 - DNA, 25 bp, Homo sapien
aaagtcggttggtgtcggtgtttcc

SEQ ID NO: 111370 - DNA, 25 bp, Homo sapien
aaagtcggttggagtcggtgtttcc

SEQ ID NO: 111371 - DNA, 25 bp, Homo sapien
attatacgatgagcctgtttttatg

SEQ ID NO: 111372 - DNA, 25 bp, Homo sapien
attatacgatgaccctgtttttatg

SEQ ID NO: 111373 - DNA, 25 bp, Homo sapien
ttaagattacagatcgatatttccg

SEQ ID NO: 111374 - DNA, 25 bp, Homo sapien
ttaagattacagttcgatatttccg

SEQ ID NO: 111375 - DNA, 25 bp, Homo sapien
cttcaaatgtgatcacggtttatgg

SEQ ID NO: 111376 - DNA, 25 bp, Homo sapien
cttcaaatgtgaacacggtttatgg

SEQ ID NO: 111377 - DNA, 25 bp, Homo sapien
atctaaacctctttcttgtgtgtga

SEQ ID NO: 111378 - DNA, 25 bp, Homo sapien
atctaaacctctatcttgtgtgtga

SEQ ID NO: 111379 - DNA, 25 bp, Homo sapien
catggactctttacccgtgaaggta

SEQ ID NO: 111380 - DNA, 25 bp, Homo sapien
catggactcttttcccgtgaaggta

SEQ ID NO: 111381 - DNA, 25 bp, Homo sapien
atgttctcctcgtccggagtaaggc

SEQ ID NO: 111382 - DNA, 25 bp, Homo sapien
atgttctcctcgaccggagtaaggc

SEQ ID NO: 111383 - DNA, 25 bp, Homo sapien
aataattgaaggattctctaaacac

SEQ ID NO: 111384 - DNA, 25 bp, Homo sapien
aataattgaaggtttctctaaacac

SEQ ID NO: 111385 - DNA, 25 bp, Homo sapien
taggttacaatgtcccttcctgaga

SEQ ID NO: 111386 - DNA, 25 bp, Homo sapien
taggttacaatgacccttcctgaga

SEQ ID NO: 111387 - DNA, 25 bp, Homo sapien
ggtgccgacaggaccccgactcgaa

SEQ ID NO: 111388 - DNA, 25 bp, Homo sapien
ggtgccgacaggtccccgactcgaa

SEQ ID NO: 111389 - DNA, 25 bp, Homo sapien
cgactggagaagaaaccaaattaac

SEQ ID NO: 111390 - DNA, 25 bp, Homo sapien
cgactggagaagtaaccaaattaac

SEQ ID NO: 111391 - DNA, 25 bp, Homo sapien
tctatagaagggacatgcataacca

SEQ ID NO: 111392 - DNA, 25 bp, Homo sapien
tctatagaagggtcatgcataacca

SEQ ID NO: 111393 - DNA, 25 bp, Homo sapien
caataggtaatggttaatatacccg

SEQ ID NO: 111394 - DNA, 25 bp, Homo sapien
caataggtaatgcttaatatacccg

SEQ ID NO: 111395 - DNA, 25 bp, Homo sapien
ctgaaagatggtgttttaagtccac

SEQ ID NO: 111396 - DNA, 25 bp, Homo sapien
ctgaaagatggtcttttaagtccac

SEQ ID NO: 111397 - DNA, 25 bp, Homo sapien
cacaacgtttaacgtttggagtcca

SEQ ID NO: 111398 - DNA, 25 bp, Homo sapien
cacaacgtttaaggtttggagtcca

SEQ ID NO: 111399 - DNA, 25 bp, Homo sapien
cagatttatacctcggttaattagt

SEQ ID NO: 111400 - DNA, 25 bp, Homo sapien
cagatttataccacggttaattagt

SEQ ID NO: 111401 - DNA, 25 bp, Homo sapien
atccctccgaccatctagtagtgta

SEQ ID NO: 111402 - DNA, 25 bp, Homo sapien
atccctccgaccttctagtagtgta

SEQ ID NO: 111403 - DNA, 25 bp, Homo sapien
actactccgacgaccgggacggtga

SEQ ID NO: 111404 - DNA, 25 bp, Homo sapien
actactccgacgtccgggacggtga

SEQ ID NO: 111405 - DNA, 25 bp, Homo sapien
ggcccaccgagaccatagcgacgga

SEQ ID NO: 111406 - DNA, 25 bp, Homo sapien
ggcccaccgagagcatagcgacgga

SEQ ID NO: 111407 - DNA, 25 bp, Homo sapien
agggaacccgactcgaggtctagaa

SEQ ID NO: 111408 - DNA, 25 bp, Homo sapien
agggaacccgacacgaggtctagaa

SEQ ID NO: 111409 - DNA, 25 bp, Homo sapien
tccaatgcctatatcaagtactgtt

SEQ ID NO: 111410 - DNA, 25 bp, Homo sapien
tccaatgcctatttcaagtactgtt

SEQ ID NO: 111411 - DNA, 25 bp, Homo sapien
gaccaccgacctggttacatttata

SEQ ID NO: 111412 - DNA, 25 bp, Homo sapien
gaccaccgacctcgttacatttata

SEQ ID NO: 111413 - DNA, 25 bp, Homo sapien
acgtagaccgtcctatcaagacgta

SEQ ID NO: 111414 - DNA, 25 bp, Homo sapien
acgtagaccgtcgtatcaagacgta

SEQ ID NO: 111415 - DNA, 25 bp, Homo sapien
ctagttcgtctagacacgtaaagtt

SEQ ID NO: 111416 - DNA, 25 bp, Homo sapien
ctagttcgtctacacacgtaaagtt

SEQ ID NO: 111417 - DNA, 25 bp, Homo sapien
agtgcttttcgttacaaggtacaat

SEQ ID NO: 111418 - DNA, 25 bp, Homo sapien
agtgcttttcgtaacaaggtacaat

SEQ ID NO: 111419 - DNA, 25 bp, Homo sapien
gtcccgtgtcgacacaacgtctaca

SEQ ID NO: 111420 - DNA, 25 bp, Homo sapien
gtcccgtgtcgagacaacgtctaca

SEQ ID NO: 111421 - DNA, 25 bp, Homo sapien
cttcacgactatggtgacttcattg

SEQ ID NO: 111422 - DNA, 25 bp, Homo sapien
cttcacgactatcgtgacttcattg

SEQ ID NO: 111423 - DNA, 25 bp, Homo sapien
acgggaccaaaggtcgttcctatgt

SEQ ID NO: 111424 - DNA, 25 bp, Homo sapien
acgggaccaaagctcgttcctatgt

SEQ ID NO: 111425 - DNA, 25 bp, Homo sapien
ctcaacgcggacagtctttgacaga

SEQ ID NO: 111426 - DNA, 25 bp, Homo sapien
ctcaacgcggactgtctttgacaga

SEQ ID NO: 111427 - DNA, 25 bp, Homo sapien
tgaacctgtagatctcccgctcgct

SEQ ID NO: 111428 - DNA, 25 bp, Homo sapien
tgaacctgtagaactcccgctcgct

SEQ ID NO: 111429 - DNA, 25 bp, Homo sapien
aggacgcccgacagtatctccctgt

SEQ ID NO: 111430 - DNA, 25 bp, Homo sapien
aggacgcccgactgtatctccctgt

SEQ ID NO: 111431 - DNA, 25 bp, Homo sapien
agtcgagtgccctgaccccgagact

SEQ ID NO: 111432 - DNA, 25 bp, Homo sapien
agtcgagtgcccagaccccgagact

SEQ ID NO: 111433 - DNA, 25 bp, Homo sapien
ggtagggtcacgactctctcgtgag

SEQ ID NO: 111434 - DNA, 25 bp, Homo sapien
ggtagggtcacgtctctctcgtgag

SEQ ID NO: 111435 - DNA, 25 bp, Homo sapien
ggacacgggacattactgcgtcgtc

SEQ ID NO: 111436 - DNA, 25 bp, Homo sapien
ggacacgggacaatactgcgtcgtc

SEQ ID NO: 111437 - DNA, 25 bp, Homo sapien
aaaacacgataccaaactggtgtcg

SEQ ID NO: 111438 - DNA, 25 bp, Homo sapien
aaaacacgatacgaaactggtgtcg

SEQ ID NO: 111439 - DNA, 25 bp, Homo sapien
aatgagaggatagtacccatctcta

SEQ ID NO: 111440 - DNA, 25 bp, Homo sapien
aatgagaggatactacccatctcta

SEQ ID NO: 111441 - DNA, 25 bp, Homo sapien
ttaggaggaacgacgccgatctctc

SEQ ID NO: 111442 - DNA, 25 bp, Homo sapien
ttaggaggaacgtcgccgatctctc

SEQ ID NO: 111443 - DNA, 25 bp, Homo sapien
gatttgagggtacacatgtgtcctg

SEQ ID NO: 111444 - DNA, 25 bp, Homo sapien
gatttgagggtagacatgtgtcctg

SEQ ID NO: 111445 - DNA, 25 bp, Homo sapien
atttgagtgagacgttgttgtcccg

SEQ ID NO: 111446 - DNA, 25 bp, Homo sapien
atttgagtgagaggttgttgtcccg

SEQ ID NO: 111447 - DNA, 25 bp, Homo sapien
gtgtgtgtcagaactgtcgtcccag

SEQ ID NO: 111448 - DNA, 25 bp, Homo sapien
gtgtgtgtcagatctgtcgtcccag

SEQ ID NO: 111449 - DNA, 25 bp, Homo sapien
agaaggttgcagttttctccgtcta

SEQ ID NO: 111450 - DNA, 25 bp, Homo sapien
agaaggttgcagatttctccgtcta

SEQ ID NO: 111451 - DNA, 25 bp, Homo sapien
gcttgtctggttttgttcctcgacg

SEQ ID NO: 111452 - DNA, 25 bp, Homo sapien
gcttgtctggttatgttcctcgacg

SEQ ID NO: 111453 - DNA, 25 bp, Homo sapien
cttgtgctgtgtcttgactcctctc

SEQ ID NO: 111454 - DNA, 25 bp, Homo sapien
cttgtgctgtgtgttgactcctctc

SEQ ID NO: 111455 - DNA, 25 bp, Homo sapien
cgttaaggtcagttcctctctctac

SEQ ID NO: 111456 - DNA, 25 bp, Homo sapien
cgttaaggtcagatcctctctctac

SEQ ID NO: 111457 - DNA, 25 bp, Homo sapien
cactcttaaatcgtactaggtttga

SEQ ID NO: 111458 - DNA, 25 bp, Homo sapien
cactcttaaatcctactaggtttga

SEQ ID NO: 111459 - DNA, 25 bp, Homo sapien
atacacacacacccatggtctattt

SEQ ID NO: 111460 - DNA, 25 bp, Homo sapien
atacacacacacgcatggtctattt

SEQ ID NO: 111461 - DNA, 25 bp, Homo sapien
ggtcagtagtaaactatgttcattt

SEQ ID NO: 111462 - DNA, 25 bp, Homo sapien
ggtcagtagtaatctatgttcattt

SEQ ID NO: 111463 - DNA, 25 bp, Homo sapien
caaccgacagagaatttgtccgaaa

SEQ ID NO: 111464 - DNA, 25 bp, Homo sapien
caaccgacagagtatttgtccgaaa

SEQ ID NO: 111465 - DNA, 25 bp, Homo sapien
ccccgagatagaggtgtaccgtaaa

SEQ ID NO: 111466 - DNA, 25 bp, Homo sapien
ccccgagatagacgtgtaccgtaaa

SEQ ID NO: 111467 - DNA, 25 bp, Homo sapien
cacgacttctgagtgttgtcggtgt

SEQ ID NO: 111468 - DNA, 25 bp, Homo sapien
cacgacttctgactgttgtcggtgt

SEQ ID NO: 111469 - DNA, 25 bp, Homo sapien
gtctcgcgttctgttgtcctcggtg

SEQ ID NO: 111470 - DNA, 25 bp, Homo sapien
gtctcgcgttctcttgtcctcggtg

SEQ ID NO: 111471 - DNA, 25 bp, Homo sapien
gtgtcgactcttcgttcctgggtag

SEQ ID NO: 111472 - DNA, 25 bp, Homo sapien
gtgtcgactcttggttcctgggtag

SEQ ID NO: 111473 - DNA, 25 bp, Homo sapien
gtttcccgtctgcacttccggggac

SEQ ID NO: 111474 - DNA, 25 bp, Homo sapien
gtttcccgtctggacttccggggac

SEQ ID NO: 111475 - DNA, 25 bp, Homo sapien
cgtcaccaccggattaattcgtgta

SEQ ID NO: 111476 - DNA, 25 bp, Homo sapien
cgtcaccaccggtttaattcgtgta

SEQ ID NO: 111477 - DNA, 25 bp, Homo sapien
cctcaggacccgtcgtaattgacga

SEQ ID NO: 111478 - DNA, 25 bp, Homo sapien
cctcaggacccgacgtaattgacga

SEQ ID NO: 111479 - DNA, 25 bp, Homo sapien
tcacaggtcccgacagatgacgaga

SEQ ID NO: 111480 - DNA, 25 bp, Homo sapien
tcacaggtcccgtcagatgacgaga

SEQ ID NO: 111481 - DNA, 25 bp, Homo sapien
ctaacggtacttacggtgtgtggaa

SEQ ID NO: 111482 - DNA, 25 bp, Homo sapien
ctaacggtactttcggtgtgtggaa

SEQ ID NO: 111483 - DNA, 25 bp, Homo sapien
acttgtttatgttaccgagtaacat

SEQ ID NO: 111484 - DNA, 25 bp, Homo sapien
acttgtttatgtaaccgagtaacat

SEQ ID NO: 111485 - DNA, 25 bp, Homo sapien
aacgttctcttcaacgagtgtataa

SEQ ID NO: 111486 - DNA, 25 bp, Homo sapien
aacgttctcttctacgagtgtataa

SEQ ID NO: 111487 - DNA, 25 bp, Homo sapien
agtaggttctcaaccagtaggaaca

SEQ ID NO: 111488 - DNA, 25 bp, Homo sapien
agtaggttctcatccagtaggaaca

SEQ ID NO: 111489 - DNA, 25 bp, Homo sapien
atggtttgtacattaactgacccag

SEQ ID NO: 111490 - DNA, 25 bp, Homo sapien
atggtttgtacaataactgacccag

SEQ ID NO: 111491 - DNA, 25 bp, Homo sapien
gcttggagacgtaagtacggtcaca

SEQ ID NO: 111492 - DNA, 25 bp, Homo sapien
gcttggagacgttagtacggtcaca

SEQ ID NO: 111493 - DNA, 25 bp, Homo sapien
aatactgtgtcatgtgtcctccgtt

SEQ ID NO: 111494 - DNA, 25 bp, Homo sapien
aatactgtgtcaagtgtcctccgtt

SEQ ID NO: 111495 - DNA, 25 bp, Homo sapien
actagtggtagtggtcgtccctatc

SEQ ID NO: 111496 - DNA, 25 bp, Homo sapien
actagtggtagtcgtcgtccctatc

SEQ ID NO: 111497 - DNA, 25 bp, Homo sapien
caaagtcgaggagtacgtttcactc

SEQ ID NO: 111498 - DNA, 25 bp, Homo sapien
caaagtcgaggactacgtttcactc

SEQ ID NO: 111499 - DNA, 25 bp, Homo sapien
gaaaaggagtgaaccggcggtctac

SEQ ID NO: 111500 - DNA, 25 bp, Homo sapien
gaaaaggagtgatccggcggtctac

SEQ ID NO: 111501 - DNA, 25 bp, Homo sapien
acaaagaagaaaggtaccgagcgtc

SEQ ID NO: 111502 - DNA, 25 bp, Homo sapien
acaaagaagaaacgtaccgagcgtc

SEQ ID NO: 111503 - DNA, 25 bp, Homo sapien
actaatggtaataagtaaccgacca

SEQ ID NO: 111504 - DNA, 25 bp, Homo sapien
actaatggtaattagtaaccgacca

SEQ ID NO: 111505 - DNA, 25 bp, Homo sapien
tcataaggtccgacctgacgaactt

SEQ ID NO: 111506 - DNA, 25 bp, Homo sapien
tcataaggtccgtcctgacgaactt

SEQ ID NO: 111507 - DNA, 25 bp, Homo sapien
aacatcgtgggctccggagagtctc

SEQ ID NO: 111508 - DNA, 25 bp, Homo sapien
aacatcgtgggcaccggagagtctc

SEQ ID NO: 111509 - DNA, 25 bp, Homo sapien
gtccctccgtgtccacaagagttca

SEQ ID NO: 111510 - DNA, 25 bp, Homo sapien
gtccctccgtgtgcacaagagttca

SEQ ID NO: 111511 - DNA, 25 bp, Homo sapien
gagtggagaaggttcgagaaaccca

SEQ ID NO: 111512 - DNA, 25 bp, Homo sapien
gagtggagaaggatcgagaaaccca

SEQ ID NO: 111513 - DNA, 25 bp, Homo sapien
gtaccagtgggtgcagaaacacaca

SEQ ID NO: 111514 - DNA, 25 bp, Homo sapien
gtaccagtgggtccagaaacacaca

SEQ ID NO: 111515 - DNA, 25 bp, Homo sapien
tacgacagacaatatggtcccacat

SEQ ID NO: 111516 - DNA, 25 bp, Homo sapien
tacgacagacaaaatggtcccacat

SEQ ID NO: 111517 - DNA, 25 bp, Homo sapien
ctcaacatacagagggccgaccact

SEQ ID NO: 111518 - DNA, 25 bp, Homo sapien
ctcaacatacagtgggccgaccact

SEQ ID NO: 111519 - DNA, 25 bp, Homo sapien
ttcggtcggaccttaggttcccctc

SEQ ID NO: 111520 - DNA, 25 bp, Homo sapien
ttcggtcggaccataggttcccctc

SEQ ID NO: 111521 - DNA, 25 bp, Homo sapien
cggaagtcgcgttaccgatggtccc

SEQ ID NO: 111522 - DNA, 25 bp, Homo sapien
cggaagtcgcgtaaccgatggtccc

SEQ ID NO: 111523 - DNA, 25 bp, Homo sapien
cctggttccggatcggaccgggtac

SEQ ID NO: 111524 - DNA, 25 bp, Homo sapien
cctggttccggaacggaccgggtac

SEQ ID NO: 111525 - DNA, 25 bp, Homo sapien
acgtattcagtggaggacccggtcg

SEQ ID NO: 111526 - DNA, 25 bp, Homo sapien
acgtattcagtgcaggacccggtcg

SEQ ID NO: 111527 - DNA, 25 bp, Homo sapien
ccttactttcggtagttcgttggtt

SEQ ID NO: 111528 - DNA, 25 bp, Homo sapien
ccttactttcggaagttcgttggtt

SEQ ID NO: 111529 - DNA, 25 bp, Homo sapien
ttgtacttgggtcaccagggcgtgt

SEQ ID NO: 111530 - DNA, 25 bp, Homo sapien
ttgtacttgggtgaccagggcgtgt

SEQ ID NO: 111531 - DNA, 25 bp, Homo sapien
cactagtctcctgactagcgaggcg

SEQ ID NO: 111532 - DNA, 25 bp, Homo sapien
cactagtctcctcactagcgaggcg

SEQ ID NO: 111533 - DNA, 25 bp, Homo sapien
ggtaccgaaatccaacgtatcacca

SEQ ID NO: 111534 - DNA, 25 bp, Homo sapien
ggtaccgaaatcgaacgtatcacca

SEQ ID NO: 111535 - DNA, 25 bp, Homo sapien
tcgtcccaggtcgacacttcacgaa

SEQ ID NO: 111536 - DNA, 25 bp, Homo sapien
tcgtcccaggtccacacttcacgaa

SEQ ID NO: 111537 - DNA, 25 bp, Homo sapien
ctcgcgcggaagctcttcttggtga

SEQ ID NO: 111538 - DNA, 25 bp, Homo sapien
ctcgcgcggaaggtcttcttggtga

SEQ ID NO: 111539 - DNA, 25 bp, Homo sapien
cgacttcaacatcgtccttgatgat

SEQ ID NO: 111540 - DNA, 25 bp, Homo sapien
cgacttcaacatggtccttgatgat

SEQ ID NO: 111541 - DNA, 25 bp, Homo sapien
aagaccaaccggacgccagcgaggg

SEQ ID NO: 111542 - DNA, 25 bp, Homo sapien
aagaccaaccggtcgccagcgaggg

SEQ ID NO: 111543 - DNA, 25 bp, Homo sapien
tcctagtacccgtgcgcgagcatgg

SEQ ID NO: 111544 - DNA, 25 bp, Homo sapien
tcctagtacccgagcgcgagcatgg

SEQ ID NO: 111545 - DNA, 25 bp, Homo sapien
cccgagtcacccaaggtcgtcaagg

SEQ ID NO: 111546 - DNA, 25 bp, Homo sapien
cccgagtcaccctaggtcgtcaagg

SEQ ID NO: 111547 - DNA, 25 bp, Homo sapien
tctcggcgttcaccattggtaagat

SEQ ID NO: 111548 - DNA, 25 bp, Homo sapien
tctcggcgttcagcattggtaagat

SEQ ID NO: 111549 - DNA, 25 bp, Homo sapien
tctagatcgtgttacccttggggat

SEQ ID NO: 111550 - DNA, 25 bp, Homo sapien
tctagatcgtgtaacccttggggat

SEQ ID NO: 111551 - DNA, 25 bp, Homo sapien
cttcttaatgtaacccagggagcat

SEQ ID NO: 111552 - DNA, 25 bp, Homo sapien
cttcttaatgtatcccagggagcat

SEQ ID NO: 111553 - DNA, 25 bp, Homo sapien
gaaagacttaggacacaggtcggat

SEQ ID NO: 111554 - DNA, 25 bp, Homo sapien
gaaagacttaggtcacaggtcggat

SEQ ID NO: 111555 - DNA, 25 bp, Homo sapien
aagaccgaccttattatgtgtgtat

SEQ ID NO: 111556 - DNA, 25 bp, Homo sapien
aagaccgacctttttatgtgtgtat

SEQ ID NO: 111557 - DNA, 25 bp, Homo sapien
aaacttccgacgatttactttgtga

SEQ ID NO: 111558 - DNA, 25 bp, Homo sapien
aaacttccgacgttttactttgtga

SEQ ID NO: 111559 - DNA, 25 bp, Homo sapien
gtctttcgaaacctctagtactgaa

SEQ ID NO: 111560 - DNA, 25 bp, Homo sapien
gtctttcgaaacgtctagtactgaa

SEQ ID NO: 111561 - DNA, 25 bp, Homo sapien
aggttttcgttccatcaacgacagg

SEQ ID NO: 111562 - DNA, 25 bp, Homo sapien
aggttttcgttcgatcaacgacagg

SEQ ID NO: 111563 - DNA, 25 bp, Homo sapien
gtgttcttacttgttacccgataag

SEQ ID NO: 111564 - DNA, 25 bp, Homo sapien
gtgttcttacttcttacccgataag

SEQ ID NO: 111565 - DNA, 25 bp, Homo sapien
gtgtcgccttagatatatccctaca

SEQ ID NO: 111566 - DNA, 25 bp, Homo sapien
gtgtcgccttagttatatccctaca

SEQ ID NO: 111567 - DNA, 25 bp, Homo sapien
gtgtccgacttttcgttatcctcca

SEQ ID NO: 111568 - DNA, 25 bp, Homo sapien
gtgtccgactttacgttatcctcca

SEQ ID NO: 111569 - DNA, 25 bp, Homo sapien
cctgtgcacatgtctgtgttccacg

SEQ ID NO: 111570 - DNA, 25 bp, Homo sapien
cctgtgcacatgactgtgttccacg

SEQ ID NO: 111571 - DNA, 25 bp, Homo sapien
tttcctactggtctagtagttgacc

SEQ ID NO: 111572 - DNA, 25 bp, Homo sapien
tttcctactggtgtagtagttgacc

SEQ ID NO: 111573 - DNA, 25 bp, Homo sapien
cttttcactgaaagggtcgtctgct

SEQ ID NO: 111574 - DNA, 25 bp, Homo sapien
cttttcactgaatgggtcgtctgct

SEQ ID NO: 111575 - DNA, 25 bp, Homo sapien
gatgtccgtgtcaaattttgtcttt

SEQ ID NO: 111576 - DNA, 25 bp, Homo sapien
gatgtccgtgtctaattttgtcttt

SEQ ID NO: 111577 - DNA, 25 bp, Homo sapien
tccgtttaacacggtattcgtctaa

SEQ ID NO: 111578 - DNA, 25 bp, Homo sapien
tccgtttaacaccgtattcgtctaa

SEQ ID NO: 111579 - DNA, 25 bp, Homo sapien
acgtccgtcacacttaagtctcaag

SEQ ID NO: 111580 - DNA, 25 bp, Homo sapien
acgtccgtcacagttaagtctcaag

SEQ ID NO: 111581 - DNA, 25 bp, Homo sapien
tgacacggaggtccagtgagtcgaa

SEQ ID NO: 111582 - DNA, 25 bp, Homo sapien
tgacacggaggtgcagtgagtcgaa

SEQ ID NO: 111583 - DNA, 25 bp, Homo sapien
gagaactgtccgagttcaaggtaga

SEQ ID NO: 111584 - DNA, 25 bp, Homo sapien
gagaactgtccgtgttcaaggtaga

SEQ ID NO: 111585 - DNA, 25 bp, Homo sapien
acaatcaaatacctcaaggtacgcg

SEQ ID NO: 111586 - DNA, 25 bp, Homo sapien
acaatcaaatacgtcaaggtacgcg

SEQ ID NO: 111587 - DNA, 25 bp, Homo sapien
cggatagttcatcacagtaaatacc

SEQ ID NO: 111588 - DNA, 25 bp, Homo sapien
cggatagttcatgacagtaaatacc

SEQ ID NO: 111589 - DNA, 25 bp, Homo sapien
aagagtagactaaaccgaacatcac

SEQ ID NO: 111590 - DNA, 25 bp, Homo sapien
aagagtagactataccgaacatcac

SEQ ID NO: 111591 - DNA, 25 bp, Homo sapien
gttacgataacatacagacacttga

SEQ ID NO: 111592 - DNA, 25 bp, Homo sapien
gttacgataacaaacagacacttga

SEQ ID NO: 111593 - DNA, 25 bp, Homo sapien
tcgaggaaaacgtggtccggtacga

SEQ ID NO: 111594 - DNA, 25 bp, Homo sapien
tcgaggaaaacgaggtccggtacga

SEQ ID NO: 111595 - DNA, 25 bp, Homo sapien
gggaggttctgacgaatcaagacga

SEQ ID NO: 111596 - DNA, 25 bp, Homo sapien
gggaggttctgaggaatcaagacga

SEQ ID NO: 111597 - DNA, 25 bp, Homo sapien
gagtttctctaggttcccaacctac

SEQ ID NO: 111598 - DNA, 25 bp, Homo sapien
gagtttctctagcttcccaacctac

SEQ ID NO: 111599 - DNA, 25 bp, Homo sapien
aatttgtctctttcccgacgaaccg

SEQ ID NO: 111600 - DNA, 25 bp, Homo sapien
aatttgtctcttacccgacgaaccg

SEQ ID NO: 111601 - DNA, 25 bp, Homo sapien
acctgttaggtctcccctgtacttt

SEQ ID NO: 111602 - DNA, 25 bp, Homo sapien
acctgttaggtcacccctgtacttt

SEQ ID NO: 111603 - DNA, 25 bp, Homo sapien
agatattgtatttccacttacctgg

SEQ ID NO: 111604 - DNA, 25 bp, Homo sapien
agatattgtattaccacttacctgg

SEQ ID NO: 111605 - DNA, 25 bp, Homo sapien
tccttcctgagtactggacgtagtt

SEQ ID NO: 111606 - DNA, 25 bp, Homo sapien
tccttcctgagttctggacgtagtt

SEQ ID NO: 111607 - DNA, 25 bp, Homo sapien
ttacttgaccttgtactgtaaggac

SEQ ID NO: 111608 - DNA, 25 bp, Homo sapien
ttacttgaccttctactgtaaggac

SEQ ID NO: 111609 - DNA, 25 bp, Homo sapien
tcctattgttacaatctggagtcta

SEQ ID NO: 111610 - DNA, 25 bp, Homo sapien
tcctattgttactatctggagtcta

SEQ ID NO: 111611 - DNA, 25 bp, Homo sapien
ttatgtgtcacaaacgtaaatcgta

SEQ ID NO: 111612 - DNA, 25 bp, Homo sapien
ttatgtgtcacatacgtaaatcgta

SEQ ID NO: 111613 - DNA, 25 bp, Homo sapien
cggaagggtgcatgttacgttttct

SEQ ID NO: 111614 - DNA, 25 bp, Homo sapien
cggaagggtgcaagttacgttttct

SEQ ID NO: 111615 - DNA, 25 bp, Homo sapien
gaccgggaggtatttacgctgtccg

SEQ ID NO: 111616 - DNA, 25 bp, Homo sapien
gaccgggaggtaattacgctgtccg

SEQ ID NO: 111617 - DNA, 25 bp, Homo sapien
ttcgtgacgattacgggactgaacg

SEQ ID NO: 111618 - DNA, 25 bp, Homo sapien
ttcgtgacgatttcgggactgaacg

SEQ ID NO: 111619 - DNA, 25 bp, Homo sapien
atttcgtgacgattacgggactgaa

SEQ ID NO: 111620 - DNA, 25 bp, Homo sapien
atttcgtgacgaatacgggactgaa

SEQ ID NO: 111621 - DNA, 25 bp, Homo sapien
acatgttagtaggacgtcttttaac

SEQ ID NO: 111622 - DNA, 25 bp, Homo sapien
acatgttagtagcacgtcttttaac

SEQ ID NO: 111623 - DNA, 25 bp, Homo sapien
tgtccaataatacacgtatatttga

SEQ ID NO: 111624 - DNA, 25 bp, Homo sapien
tgtccaataatagacgtatatttga

SEQ ID NO: 111625 - DNA, 25 bp, Homo sapien
gtcgaaacaatatgtgaccctcaga

SEQ ID NO: 111626 - DNA, 25 bp, Homo sapien
gtcgaaacaataagtgaccctcaga

SEQ ID NO: 111627 - DNA, 25 bp, Homo sapien
gggaaactagagaattccatagaac

SEQ ID NO: 111628 - DNA, 25 bp, Homo sapien
gggaaactagagtattccatagaac

SEQ ID NO: 111629 - DNA, 25 bp, Homo sapien
gatcgaatacggtgtgttcatcggg

SEQ ID NO: 111630 - DNA, 25 bp, Homo sapien
gatcgaatacggagtgttcatcggg

SEQ ID NO: 111631 - DNA, 25 bp, Homo sapien
gttaccttggtagtgtgtctacgga

SEQ ID NO: 111632 - DNA, 25 bp, Homo sapien
gttaccttggtactgtgtctacgga

SEQ ID NO: 111633 - DNA, 25 bp, Homo sapien
ttctcgacgtcacaggttccccgaa

SEQ ID NO: 111634 - DNA, 25 bp, Homo sapien
ttctcgacgtcagaggttccccgaa

SEQ ID NO: 111635 - DNA, 25 bp, Homo sapien
ctttgacactaagagataccctgga

SEQ ID NO: 111636 - DNA, 25 bp, Homo sapien
ctttgacactaacagataccctgga

SEQ ID NO: 111637 - DNA, 25 bp, Homo sapien
gtgacgtcttgaccagacacgggga

SEQ ID NO: 111638 - DNA, 25 bp, Homo sapien
gtgacgtcttgagcagacacgggga

SEQ ID NO: 111639 - DNA, 25 bp, Homo sapien
agtcctcgtaagacttccgagaaac

SEQ ID NO: 111640 - DNA, 25 bp, Homo sapien
agtcctcgtaagtcttccgagaaac

SEQ ID NO: 111641 - DNA, 25 bp, Homo sapien
atccgtcgacaagagtccaggttag

SEQ ID NO: 111642 - DNA, 25 bp, Homo sapien
atccgtcgacaacagtccaggttag

SEQ ID NO: 111643 - DNA, 25 bp, Homo sapien
ttctcgcacagatgtaaccatccga

SEQ ID NO: 111644 - DNA, 25 bp, Homo sapien
ttctcgcacagaagtaaccatccga

SEQ ID NO: 111645 - DNA, 25 bp, Homo sapien
gggtttcacgaccctaatgtccgca

SEQ ID NO: 111646 - DNA, 25 bp, Homo sapien
gggtttcacgacgctaatgtccgca

SEQ ID NO: 111647 - DNA, 25 bp, Homo sapien
gttctctaccacgataactgggtaa

SEQ ID NO: 111648 - DNA, 25 bp, Homo sapien
gttctctaccaccataactgggtaa

SEQ ID NO: 111649 - DNA, 25 bp, Homo sapien
cactgggaagaaaccgtcgagttcg

SEQ ID NO: 111650 - DNA, 25 bp, Homo sapien
cactgggaagaatccgtcgagttcg

SEQ ID NO: 111651 - DNA, 25 bp, Homo sapien
aaagtagcagaccttcctcgaagtg

SEQ ID NO: 111652 - DNA, 25 bp, Homo sapien
aaagtagcagacgttcctcgaagtg

SEQ ID NO: 111653 - DNA, 25 bp, Homo sapien
ataatttcgaagaactctcacttgg

SEQ ID NO: 111654 - DNA, 25 bp, Homo sapien
ataatttcgaagtactctcacttgg

SEQ ID NO: 111655 - DNA, 25 bp, Homo sapien
actaaagtgaaatattctacttcgg

SEQ ID NO: 111656 - DNA, 25 bp, Homo sapien
actaaagtgaaaaattctacttcgg

SEQ ID NO: 111657 - DNA, 25 bp, Homo sapien
caatatgcgaaagatactcttgaag

SEQ ID NO: 111658 - DNA, 25 bp, Homo sapien
caatatgcgaaacatactcttgaag

SEQ ID NO: 111659 - DNA, 25 bp, Homo sapien
cgaagaaaactacgacaattgttaa

SEQ ID NO: 111660 - DNA, 25 bp, Homo sapien
cgaagaaaactaggacaattgttaa

SEQ ID NO: 111661 - DNA, 25 bp, Homo sapien
gaatagtgattcgaactttctgatc

SEQ ID NO: 111662 - DNA, 25 bp, Homo sapien
gaatagtgattccaactttctgatc

SEQ ID NO: 111663 - DNA, 25 bp, Homo sapien
cactgagatgacgaacgtattttcc

SEQ ID NO: 111664 - DNA, 25 bp, Homo sapien
cactgagatgaccaacgtattttcc

SEQ ID NO: 111665 - DNA, 25 bp, Homo sapien
actccacagacacagacggggttca

SEQ ID NO: 111666 - DNA, 25 bp, Homo sapien
actccacagacagagacggggttca

SEQ ID NO: 111667 - DNA, 25 bp, Homo sapien
cccgtgactcgagtgactgggagaa

SEQ ID NO: 111668 - DNA, 25 bp, Homo sapien
cccgtgactcgactgactgggagaa

SEQ ID NO: 111669 - DNA, 25 bp, Homo sapien
ccaacgcgattcctggtagtgtgac

SEQ ID NO: 111670 - DNA, 25 bp, Homo sapien
ccaacgcgattcgtggtagtgtgac

SEQ ID NO: 111671 - DNA, 25 bp, Homo sapien
cacacgcgtgtgtgcgcgtgtgtac

SEQ ID NO: 111672 - DNA, 25 bp, Homo sapien
cacacgcgtgtgagcgcgtgtgtac

SEQ ID NO: 111673 - DNA, 25 bp, Homo sapien
gacacagacgcagacgacgcagtag

SEQ ID NO: 111674 - DNA, 25 bp, Homo sapien
gacacagacgcacacgacgcagtag

SEQ ID NO: 111675 - DNA, 25 bp, Homo sapien
atgttaaaacatcgtcagagacata

SEQ ID NO: 111676 - DNA, 25 bp, Homo sapien
atgttaaaacatggtcagagacata

SEQ ID NO: 111677 - DNA, 25 bp, Homo sapien
aaggtaaacaactccgtggccgttt

SEQ ID NO: 111678 - DNA, 25 bp, Homo sapien
aaggtaaacaacaccgtggccgttt

SEQ ID NO: 111679 - DNA, 25 bp, Homo sapien
tcttataaagagtccggtcctttct

SEQ ID NO: 111680 - DNA, 25 bp, Homo sapien
tcttataaagagaccggtcctttct

SEQ ID NO: 111681 - DNA, 25 bp, Homo sapien
gtctttatacaataccggaacgaaa

SEQ ID NO: 111682 - DNA, 25 bp, Homo sapien
gtctttatacaaaaccggaacgaaa

SEQ ID NO: 111683 - DNA, 25 bp, Homo sapien
tggtgacactgacaccaaacgaaca

SEQ ID NO: 111684 - DNA, 25 bp, Homo sapien
tggtgacactgagaccaaacgaaca

SEQ ID NO: 111685 - DNA, 25 bp, Homo sapien
tgtgtccactatgtccgaaggacct

SEQ ID NO: 111686 - DNA, 25 bp, Homo sapien
tgtgtccactatctccgaaggacct

SEQ ID NO: 111687 - DNA, 25 bp, Homo sapien
actatacggaatccttgtcagggtt

SEQ ID NO: 111688 - DNA, 25 bp, Homo sapien
actatacggaatgcttgtcagggtt

SEQ ID NO: 111689 - DNA, 25 bp, Homo sapien
atgaaagaaatgtttcacatgtctc

SEQ ID NO: 111690 - DNA, 25 bp, Homo sapien
atgaaagaaatgattcacatgtctc

SEQ ID NO: 111691 - DNA, 25 bp, Homo sapien
atgctgtgaaactatccttgtgttt

SEQ ID NO: 111692 - DNA, 25 bp, Homo sapien
atgctgtgaaacaatccttgtgttt

SEQ ID NO: 111693 - DNA, 25 bp, Homo sapien
atgaggtggtaaaaccgttttccta

SEQ ID NO: 111694 - DNA, 25 bp, Homo sapien
atgaggtggtaataccgttttccta

SEQ ID NO: 111695 - DNA, 25 bp, Homo sapien
atgaggaaagactttgtgtttaccc

SEQ ID NO: 111696 - DNA, 25 bp, Homo sapien
atgaggaaagacattgtgtttaccc

SEQ ID NO: 111697 - DNA, 25 bp, Homo sapien
atgggataaaatgaccggttcacat

SEQ ID NO: 111698 - DNA, 25 bp, Homo sapien
atgggataaaatcaccggttcacat

SEQ ID NO: 111699 - DNA, 25 bp, Homo sapien
acggaagtcgaacacctacacaagg

SEQ ID NO: 111700 - DNA, 25 bp, Homo sapien
acggaagtcgaagacctacacaagg

SEQ ID NO: 111701 - DNA, 25 bp, Homo sapien
taaggaatcacagaccgtgaaagtc

SEQ ID NO: 111702 - DNA, 25 bp, Homo sapien
taaggaatcacacaccgtgaaagtc

SEQ ID NO: 111703 - DNA, 25 bp, Homo sapien
tcatctcccgcgtgagaacactcgt

SEQ ID NO: 111704 - DNA, 25 bp, Homo sapien
tcatctcccgcgagagaacactcgt

SEQ ID NO: 111705 - DNA, 25 bp, Homo sapien
ttgtcaccccccagtaagtccccgt

SEQ ID NO: 111706 - DNA, 25 bp, Homo sapien
ttgtcacccccctgtaagtccccgt

SEQ ID NO: 111707 - DNA, 25 bp, Homo sapien
gcaccagaacattaccgcggtacgc

SEQ ID NO: 111708 - DNA, 25 bp, Homo sapien
gcaccagaacataaccgcggtacgc

SEQ ID NO: 111709 - DNA, 25 bp, Homo sapien
cgagacagacgaccagatccggtcc

SEQ ID NO: 111710 - DNA, 25 bp, Homo sapien
cgagacagacgagcagatccggtcc

SEQ ID NO: 111711 - DNA, 25 bp, Homo sapien
atctcggagagagacagtagtcgac

SEQ ID NO: 111712 - DNA, 25 bp, Homo sapien
atctcggagagacacagtagtcgac

SEQ ID NO: 111713 - DNA, 25 bp, Homo sapien
tgttaatcaggaaaatcaagtctct

SEQ ID NO: 111714 - DNA, 25 bp, Homo sapien
tgttaatcaggataatcaagtctct

SEQ ID NO: 111715 - DNA, 25 bp, Homo sapien
cttgatcgacaaattgcgtatttat

SEQ ID NO: 111716 - DNA, 25 bp, Homo sapien
cttgatcgacaatttgcgtatttat

SEQ ID NO: 111717 - DNA, 25 bp, Homo sapien
tatacacacacgtttctgttatgtg

SEQ ID NO: 111718 - DNA, 25 bp, Homo sapien
tatacacacacgattctgttatgtg

SEQ ID NO: 111719 - DNA, 25 bp, Homo sapien
aatttcatcgacatttttatgtcgt

SEQ ID NO: 111720 - DNA, 25 bp, Homo sapien
aatttcatcgacttttttatgtcgt

SEQ ID NO: 111721 - DNA, 25 bp, Homo sapien
aagacacatgactacatgttgtgta

SEQ ID NO: 111722 - DNA, 25 bp, Homo sapien
aagacacatgacaacatgttgtgta

SEQ ID NO: 111723 - DNA, 25 bp, Homo sapien
tgaaacctaagttccaattcttagg

SEQ ID NO: 111724 - DNA, 25 bp, Homo sapien
tgaaacctaagtaccaattcttagg

SEQ ID NO: 111725 - DNA, 25 bp, Homo sapien
acaagtcacgactcttaattcaagg

SEQ ID NO: 111726 - DNA, 25 bp, Homo sapien
acaagtcacgacacttaattcaagg

SEQ ID NO: 111727 - DNA, 25 bp, Homo sapien
taaatcccattgttacgacggaata

SEQ ID NO: 111728 - DNA, 25 bp, Homo sapien
taaatcccattgatacgacggaata

SEQ ID NO: 111729 - DNA, 25 bp, Homo sapien
taaagattgttggtttggtcgataa

SEQ ID NO: 111730 - DNA, 25 bp, Homo sapien
taaagattgttgctttggtcgataa

SEQ ID NO: 111731 - DNA, 25 bp, Homo sapien
ccgtcaggtctatttgttcatatat

SEQ ID NO: 111732 - DNA, 25 bp, Homo sapien
ccgtcaggtctaattgttcatatat

SEQ ID NO: 111733 - DNA, 25 bp, Homo sapien
ctagaaccactactggaactcgtca

SEQ ID NO: 111734 - DNA, 25 bp, Homo sapien
ctagaaccactagtggaactcgtca

SEQ ID NO: 111735 - DNA, 25 bp, Homo sapien
ttaagactcactacgtccaagggag

SEQ ID NO: 111736 - DNA, 25 bp, Homo sapien
ttaagactcacttcgtccaagggag

SEQ ID NO: 111737 - DNA, 25 bp, Homo sapien
aagagtcccgatctgccgtcgacac

SEQ ID NO: 111738 - DNA, 25 bp, Homo sapien
aagagtcccgatgtgccgtcgacac

SEQ ID NO: 111739 - DNA, 25 bp, Homo sapien
agaaggacccggtcgcctgtacaca

SEQ ID NO: 111740 - DNA, 25 bp, Homo sapien
agaaggacccggacgcctgtacaca

SEQ ID NO: 111741 - DNA, 25 bp, Homo sapien
ggaaggacatcgtcacgtcccgcca

SEQ ID NO: 111742 - DNA, 25 bp, Homo sapien
ggaaggacatcgacacgtcccgcca

SEQ ID NO: 111743 - DNA, 25 bp, Homo sapien
gcagagggtgacacgtcccgtcctt

SEQ ID NO: 111744 - DNA, 25 bp, Homo sapien
gcagagggtgactcgtcccgtcctt

SEQ ID NO: 111745 - DNA, 25 bp, Homo sapien
tcggaagggtgagagacctctctgt

SEQ ID NO: 111746 - DNA, 25 bp, Homo sapien
tcggaagggtgacagacctctctgt

SEQ ID NO: 111747 - DNA, 25 bp, Homo sapien
cctcgaaaggtgcaccaaccttatt

SEQ ID NO: 111748 - DNA, 25 bp, Homo sapien
cctcgaaaggtggaccaaccttatt

SEQ ID NO: 111749 - DNA, 25 bp, Homo sapien
agagcggtataaccatcgtagtgtt

SEQ ID NO: 111750 - DNA, 25 bp, Homo sapien
agagcggtataagcatcgtagtgtt

SEQ ID NO: 111751 - DNA, 25 bp, Homo sapien
cctccagtttgtgtcagtggacgta

SEQ ID NO: 111752 - DNA, 25 bp, Homo sapien
cctccagtttgtctcagtggacgta

SEQ ID NO: 111753 - DNA, 25 bp, Homo sapien
acctcctgctgcttcacttggcgta

SEQ ID NO: 111754 - DNA, 25 bp, Homo sapien
acctcctgctgcatcacttggcgta

SEQ ID NO: 111755 - DNA, 25 bp, Homo sapien
ccctgtctccccagaatgggtcgtg

SEQ ID NO: 111756 - DNA, 25 bp, Homo sapien
ccctgtctcccctgaatgggtcgtg

SEQ ID NO: 111757 - DNA, 25 bp, Homo sapien
ccctttacattcactcaggtgaacg

SEQ ID NO: 111758 - DNA, 25 bp, Homo sapien
ccctttacattctctcaggtgaacg

SEQ ID NO: 111759 - DNA, 25 bp, Homo sapien
gtacgtaacttatcgtccagagccg

SEQ ID NO: 111760 - DNA, 25 bp, Homo sapien
gtacgtaacttaacgtccagagccg

SEQ ID NO: 111761 - DNA, 25 bp, Homo sapien
ggacacagctcttcgccggacgacc

SEQ ID NO: 111762 - DNA, 25 bp, Homo sapien
ggacacagctctacgccggacgacc

SEQ ID NO: 111763 - DNA, 25 bp, Homo sapien
agacaacaccgtttccggacacgtt

SEQ ID NO: 111764 - DNA, 25 bp, Homo sapien
agacaacaccgtatccggacacgtt

SEQ ID NO: 111765 - DNA, 25 bp, Homo sapien
aatggtcgacgatcgctcgcacgtt

SEQ ID NO: 111766 - DNA, 25 bp, Homo sapien
aatggtcgacgaacgctcgcacgtt

SEQ ID NO: 111767 - DNA, 25 bp, Homo sapien
acgtcggagtgaactcgtagacaga

SEQ ID NO: 111768 - DNA, 25 bp, Homo sapien
acgtcggagtgatctcgtagacaga

SEQ ID NO: 111769 - DNA, 25 bp, Homo sapien
tctgtctctggtactacaccaagta

SEQ ID NO: 111770 - DNA, 25 bp, Homo sapien
tctgtctctggttctacaccaagta

SEQ ID NO: 111771 - DNA, 25 bp, Homo sapien
tttcgtctaccagtttccactgaag

SEQ ID NO: 111772 - DNA, 25 bp, Homo sapien
tttcgtctaccactttccactgaag

SEQ ID NO: 111773 - DNA, 25 bp, Homo sapien
accttctcctcgttctcctgtgagg

SEQ ID NO: 111774 - DNA, 25 bp, Homo sapien
accttctcctcgatctcctgtgagg

SEQ ID NO: 111775 - DNA, 25 bp, Homo sapien
atacctaacaaccattacgttcctg

SEQ ID NO: 111776 - DNA, 25 bp, Homo sapien
atacctaacaacgattacgttcctg

SEQ ID NO: 111777 - DNA, 25 bp, Homo sapien
tttactcaccgcttggttcccttcg

SEQ ID NO: 111778 - DNA, 25 bp, Homo sapien
tttactcaccgcatggttcccttcg

SEQ ID NO: 111779 - DNA, 25 bp, Homo sapien
ctccgacttccttcgacttcctgtt

SEQ ID NO: 111780 - DNA, 25 bp, Homo sapien
ctccgacttcctacgacttcctgtt

SEQ ID NO: 111781 - DNA, 25 bp, Homo sapien
tgcgcgaaataaagccttcactatt

SEQ ID NO: 111782 - DNA, 25 bp, Homo sapien
tgcgcgaaataatgccttcactatt

SEQ ID NO: 111783 - DNA, 25 bp, Homo sapien
cgtctgcacagaaacctttgatgtt

SEQ ID NO: 111784 - DNA, 25 bp, Homo sapien
cgtctgcacagatacctttgatgtt

SEQ ID NO: 111785 - DNA, 25 bp, Homo sapien
gagtaccactccatccttgtcgaaa

SEQ ID NO: 111786 - DNA, 25 bp, Homo sapien
gagtaccactccttccttgtcgaaa

SEQ ID NO: 111787 - DNA, 25 bp, Homo sapien
tggtcgactaacacgttatgaaatt

SEQ ID NO: 111788 - DNA, 25 bp, Homo sapien
tggtcgactaactcgttatgaaatt

SEQ ID NO: 111789 - DNA, 25 bp, Homo sapien
taaggagaatatccgaagaatcgtt

SEQ ID NO: 111790 - DNA, 25 bp, Homo sapien
taaggagaatatgcgaagaatcgtt

SEQ ID NO: 111791 - DNA, 25 bp, Homo sapien
acgaagatactctgggtcgtttaag

SEQ ID NO: 111792 - DNA, 25 bp, Homo sapien
acgaagatactcagggtcgtttaag

SEQ ID NO: 111793 - DNA, 25 bp, Homo sapien
tgtccggtacgaacagtgtcaaccc

SEQ ID NO: 111794 - DNA, 25 bp, Homo sapien
tgtccggtacgatcagtgtcaaccc

SEQ ID NO: 111795 - DNA, 25 bp, Homo sapien
gatgtctcgggaaccggtcattgcc

SEQ ID NO: 111796 - DNA, 25 bp, Homo sapien
gatgtctcgggatccggtcattgcc

SEQ ID NO: 111797 - DNA, 25 bp, Homo sapien
actcttcggcggagacgtctggccc

SEQ ID NO: 111798 - DNA, 25 bp, Homo sapien
actcttcggcggtgacgtctggccc

SEQ ID NO: 111799 - DNA, 25 bp, Homo sapien
atcaaagtccttcctgggtctcagt

SEQ ID NO: 111800 - DNA, 25 bp, Homo sapien
atcaaagtccttgctgggtctcagt

SEQ ID NO: 111801 - DNA, 25 bp, Homo sapien
gtaaatattccatgtggttatcact

SEQ ID NO: 111802 - DNA, 25 bp, Homo sapien
gtaaatattccaagtggttatcact

SEQ ID NO: 111803 - DNA, 25 bp, Homo sapien
atcaagatctcaagttgtttagact

SEQ ID NO: 111804 - DNA, 25 bp, Homo sapien
atcaagatctcatgttgtttagact

SEQ ID NO: 111805 - DNA, 25 bp, Homo sapien
gtacaagagatttcgggtcgtggac

SEQ ID NO: 111806 - DNA, 25 bp, Homo sapien
gtacaagagattacgggtcgtggac

SEQ ID NO: 111807 - DNA, 25 bp, Homo sapien
ccccgtaacatgacggcgttcgcga

SEQ ID NO: 111808 - DNA, 25 bp, Homo sapien
ccccgtaacatgtcggcgttcgcga

SEQ ID NO: 111809 - DNA, 25 bp, Homo sapien
ccgcctttacgtcgtgaacgttttt

SEQ ID NO: 111810 - DNA, 25 bp, Homo sapien
ccgcctttacgtggtgaacgttttt

SEQ ID NO: 111811 - DNA, 25 bp, Homo sapien
ctagtacgtggaacgaccgctccgc

SEQ ID NO: 111812 - DNA, 25 bp, Homo sapien
ctagtacgtggatcgaccgctccgc

SEQ ID NO: 111813 - DNA, 25 bp, Homo sapien
agttctctgtggagcgcttcatggt

SEQ ID NO: 111814 - DNA, 25 bp, Homo sapien
agttctctgtggtgcgcttcatggt

SEQ ID NO: 111815 - DNA, 25 bp, Homo sapien
tcttaaatccgtagacttattaagg

SEQ ID NO: 111816 - DNA, 25 bp, Homo sapien
tcttaaatccgttgacttattaagg

SEQ ID NO: 111817 - DNA, 25 bp, Homo sapien
cctgaaagtactgactatgtttatt

SEQ ID NO: 111818 - DNA, 25 bp, Homo sapien
cctgaaagtactcactatgtttatt

SEQ ID NO: 111819 - DNA, 25 bp, Homo sapien
aactcaggtagtcgacatttatgtt

SEQ ID NO: 111820 - DNA, 25 bp, Homo sapien
aactcaggtagtggacatttatgtt

SEQ ID NO: 111821 - DNA, 25 bp, Homo sapien
ccatctttgtcgaacacgagagtct

SEQ ID NO: 111822 - DNA, 25 bp, Homo sapien
ccatctttgtcgtacacgagagtct

SEQ ID NO: 111823 - DNA, 25 bp, Homo sapien
agtcgcatctccagtgaccatattt

SEQ ID NO: 111824 - DNA, 25 bp, Homo sapien
agtcgcatctcctgtgaccatattt

SEQ ID NO: 111825 - DNA, 25 bp, Homo sapien
tttgttacgtcctaacattacagta

SEQ ID NO: 111826 - DNA, 25 bp, Homo sapien
tttgttacgtccaaacattacagta

SEQ ID NO: 111827 - DNA, 25 bp, Homo sapien
cacggttcgtccagaccacatcttt

SEQ ID NO: 111828 - DNA, 25 bp, Homo sapien
cacggttcgtcctgaccacatcttt

SEQ ID NO: 111829 - DNA, 25 bp, Homo sapien
gtataggagtatcctgaccctgggg

SEQ ID NO: 111830 - DNA, 25 bp, Homo sapien
gtataggagtatgctgaccctgggg

SEQ ID NO: 111831 - DNA, 25 bp, Homo sapien
ccagggtgttctggaccctaggtag

SEQ ID NO: 111832 - DNA, 25 bp, Homo sapien
ccagggtgttctcgaccctaggtag

SEQ ID NO: 111833 - DNA, 25 bp, Homo sapien
gtacatgatttttaacaccgtattg

SEQ ID NO: 111834 - DNA, 25 bp, Homo sapien
gtacatgattttaaacaccgtattg

SEQ ID NO: 111835 - DNA, 25 bp, Homo sapien
tctccccgacagacacgtcggttgg

SEQ ID NO: 111836 - DNA, 25 bp, Homo sapien
tctccccgacagtcacgtcggttgg

SEQ ID NO: 111837 - DNA, 25 bp, Homo sapien
ctgtgacgtcgaggtccgtggccct

SEQ ID NO: 111838 - DNA, 25 bp, Homo sapien
ctgtgacgtcgacgtccgtggccct

SEQ ID NO: 111839 - DNA, 25 bp, Homo sapien
acttgtgtgactcctctaggtcctt

SEQ ID NO: 111840 - DNA, 25 bp, Homo sapien
acttgtgtgactgctctaggtcctt

SEQ ID NO: 111841 - DNA, 25 bp, Homo sapien
tttcacttgcatgactctggctgtc

SEQ ID NO: 111842 - DNA, 25 bp, Homo sapien
tttcacttgcatcactctggctgtc

SEQ ID NO: 111843 - DNA, 25 bp, Homo sapien
tgtttttacgtgaaagtgctcctcc

SEQ ID NO: 111844 - DNA, 25 bp, Homo sapien
tgtttttacgtgtaagtgctcctcc

SEQ ID NO: 111845 - DNA, 25 bp, Homo sapien
tttatgacaccgagggacaacctat

SEQ ID NO: 111846 - DNA, 25 bp, Homo sapien
tttatgacaccgtgggacaacctat

SEQ ID NO: 111847 - DNA, 25 bp, Homo sapien
ctaaggacgaatacgggtggacctg

SEQ ID NO: 111848 - DNA, 25 bp, Homo sapien
ctaaggacgaattcgggtggacctg

SEQ ID NO: 111849 - DNA, 25 bp, Homo sapien
tatcagtaacaattccttcaggaag

SEQ ID NO: 111850 - DNA, 25 bp, Homo sapien
tatcagtaacaaatccttcaggaag

SEQ ID NO: 111851 - DNA, 25 bp, Homo sapien
cttctgtcctggtctttaaagaacg

SEQ ID NO: 111852 - DNA, 25 bp, Homo sapien
cttctgtcctggactttaaagaacg

SEQ ID NO: 111853 - DNA, 25 bp, Homo sapien
agtcccggtcggtcccacagacagt

SEQ ID NO: 111854 - DNA, 25 bp, Homo sapien
agtcccggtcggacccacagacagt

SEQ ID NO: 111855 - DNA, 25 bp, Homo sapien
tcatccgacaggaggctccacacat

SEQ ID NO: 111856 - DNA, 25 bp, Homo sapien
tcatccgacaggtggctccacacat

SEQ ID NO: 111857 - DNA, 25 bp, Homo sapien
agagccgcgagaacaggggccccat

SEQ ID NO: 111858 - DNA, 25 bp, Homo sapien
agagccgcgagatcaggggccccat

SEQ ID NO: 111859 - DNA, 25 bp, Homo sapien
cggcaacgacggaggaatctcccct

SEQ ID NO: 111860 - DNA, 25 bp, Homo sapien
cggcaacgacggtggaatctcccct

SEQ ID NO: 111861 - DNA, 25 bp, Homo sapien
tgcccgaccgtgtgggacccaggtc

SEQ ID NO: 111862 - DNA, 25 bp, Homo sapien
tgcccgaccgtgagggacccaggtc

SEQ ID NO: 111863 - DNA, 25 bp, Homo sapien
ggcacaacaggttcaaacatgccct

SEQ ID NO: 111864 - DNA, 25 bp, Homo sapien
ggcacaacaggtacaaacatgccct

SEQ ID NO: 111865 - DNA, 25 bp, Homo sapien
gcacgggttgaggaactgcgactac

SEQ ID NO: 111866 - DNA, 25 bp, Homo sapien
gcacgggttgagcaactgcgactac

SEQ ID NO: 111867 - DNA, 25 bp, Homo sapien
caatgtatacgacaacttgtctacg

SEQ ID NO: 111868 - DNA, 25 bp, Homo sapien
caatgtatacgagaacttgtctacg

SEQ ID NO: 111869 - DNA, 25 bp, Homo sapien
acgacaagagagtcaaagggtccac

SEQ ID NO: 111870 - DNA, 25 bp, Homo sapien
acgacaagagagacaaagggtccac

SEQ ID NO: 111871 - DNA, 25 bp, Homo sapien
ccaacggagcgctcacgtgagccta

SEQ ID NO: 111872 - DNA, 25 bp, Homo sapien
ccaacggagcgcacacgtgagccta

SEQ ID NO: 111873 - DNA, 25 bp, Homo sapien
cagacgtggttcgaccgaattctgt

SEQ ID NO: 111874 - DNA, 25 bp, Homo sapien
cagacgtggttccaccgaattctgt

SEQ ID NO: 111875 - DNA, 25 bp, Homo sapien
taagtcgcttagctctggcgtgtgg

SEQ ID NO: 111876 - DNA, 25 bp, Homo sapien
taagtcgcttaggtctggcgtgtgg

SEQ ID NO: 111877 - DNA, 25 bp, Homo sapien
cccactagaggatggccccggtcgg

SEQ ID NO: 111878 - DNA, 25 bp, Homo sapien
cccactagaggaaggccccggtcgg

SEQ ID NO: 111879 - DNA, 25 bp, Homo sapien
cgacgaatccactgccgacgggttc

SEQ ID NO: 111880 - DNA, 25 bp, Homo sapien
cgacgaatccacagccgacgggttc

SEQ ID NO: 111881 - DNA, 25 bp, Homo sapien
gacagttaccaacttcgtcggtgtc

SEQ ID NO: 111882 - DNA, 25 bp, Homo sapien
gacagttaccaagttcgtcggtgtc

SEQ ID NO: 111883 - DNA, 25 bp, Homo sapien
gcaggtgtcgcttgtgtcccgatct

SEQ ID NO: 111884 - DNA, 25 bp, Homo sapien
gcaggtgtcgctagtgtcccgatct

SEQ ID NO: 111885 - DNA, 25 bp, Homo sapien
ttgtaattgtggttctgtccctgtc

SEQ ID NO: 111886 - DNA, 25 bp, Homo sapien
ttgtaattgtggatctgtccctgtc

SEQ ID NO: 111887 - DNA, 25 bp, Homo sapien
cggtttgggtgacgtgtccaccgac

SEQ ID NO: 111888 - DNA, 25 bp, Homo sapien
cggtttgggtgaggtgtccaccgac

SEQ ID NO: 111889 - DNA, 25 bp, Homo sapien
ctttgtttaagattctctgacgcta

SEQ ID NO: 111890 - DNA, 25 bp, Homo sapien
ctttgtttaagaatctctgacgcta

SEQ ID NO: 111891 - DNA, 25 bp, Homo sapien
ggtcctagaggttctgcgacgtcgc

SEQ ID NO: 111892 - DNA, 25 bp, Homo sapien
ggtcctagaggtactgcgacgtcgc

SEQ ID NO: 111893 - DNA, 25 bp, Homo sapien
ccgggtctccgtctccggactgtga

SEQ ID NO: 111894 - DNA, 25 bp, Homo sapien
ccgggtctccgtgtccggactgtga

SEQ ID NO: 111895 - DNA, 25 bp, Homo sapien
gcatctcgcgccggtggcggtcgta

SEQ ID NO: 111896 - DNA, 25 bp, Homo sapien
gcatctcgcgcccgtggcggtcgta

SEQ ID NO: 111897 - DNA, 25 bp, Homo sapien
ggtagattgtcctcgggtaagagtc

SEQ ID NO: 111898 - DNA, 25 bp, Homo sapien
ggtagattgtccacgggtaagagtc

SEQ ID NO: 111899 - DNA, 25 bp, Homo sapien
gatctccccagttcgacacgagtcg

SEQ ID NO: 111900 - DNA, 25 bp, Homo sapien
gatctccccagtacgacacgagtcg

SEQ ID NO: 111901 - DNA, 25 bp, Homo sapien
cgtaggacacagtacctcgtccgga

SEQ ID NO: 111902 - DNA, 25 bp, Homo sapien
cgtaggacacagaacctcgtccgga

SEQ ID NO: 111903 - DNA, 25 bp, Homo sapien
attggtgaacgaacgggtctctgga

SEQ ID NO: 111904 - DNA, 25 bp, Homo sapien
attggtgaacgatcgggtctctgga

SEQ ID NO: 111905 - DNA, 25 bp, Homo sapien
tctagtcaggtgacgggccaagtac

SEQ ID NO: 111906 - DNA, 25 bp, Homo sapien
tctagtcaggtgtcgggccaagtac

SEQ ID NO: 111907 - DNA, 25 bp, Homo sapien
ttgtttaggtcgatcggggaaccta

SEQ ID NO: 111908 - DNA, 25 bp, Homo sapien
ttgtttaggtcgttcggggaaccta

SEQ ID NO: 111909 - DNA, 25 bp, Homo sapien
cttccttcggactcctgtaggtgga

SEQ ID NO: 111910 - DNA, 25 bp, Homo sapien
cttccttcggacacctgtaggtgga

SEQ ID NO: 111911 - DNA, 25 bp, Homo sapien
tccttggtggtcgtaagttcgttac

SEQ ID NO: 111912 - DNA, 25 bp, Homo sapien
tccttggtggtcctaagttcgttac

SEQ ID NO: 111913 - DNA, 25 bp, Homo sapien
cccgatactaagtcgtccaggtcca

SEQ ID NO: 111914 - DNA, 25 bp, Homo sapien
cccgatactaagacgtccaggtcca

SEQ ID NO: 111915 - DNA, 25 bp, Homo sapien
cagtaccaacacgctcaaacacagt

SEQ ID NO: 111916 - DNA, 25 bp, Homo sapien
cagtaccaacaccctcaaacacagt

SEQ ID NO: 111917 - DNA, 25 bp, Homo sapien
ccatagctagacacgtcctaatgaa

SEQ ID NO: 111918 - DNA, 25 bp, Homo sapien
ccatagctagactcgtcctaatgaa

SEQ ID NO: 111919 - DNA, 25 bp, Homo sapien
tttcgaagttggtctcgccgatgaa

SEQ ID NO: 111920 - DNA, 25 bp, Homo sapien
tttcgaagttggactcgccgatgaa

SEQ ID NO: 111921 - DNA, 25 bp, Homo sapien
cgttattgggtcagaccactatgta

SEQ ID NO: 111922 - DNA, 25 bp, Homo sapien
cgttattgggtctgaccactatgta

SEQ ID NO: 111923 - DNA, 25 bp, Homo sapien
tgccacgggtgctactacggctgat

SEQ ID NO: 111924 - DNA, 25 bp, Homo sapien
tgccacgggtgcaactacggctgat

SEQ ID NO: 111925 - DNA, 25 bp, Homo sapien
acttcggtggtgaccacgaccgtga

SEQ ID NO: 111926 - DNA, 25 bp, Homo sapien
acttcggtggtgtccacgaccgtga

SEQ ID NO: 111927 - DNA, 25 bp, Homo sapien
ctacatgtctcgtctaaagtggtac

SEQ ID NO: 111928 - DNA, 25 bp, Homo sapien
ctacatgtctcgactaaagtggtac

SEQ ID NO: 111929 - DNA, 25 bp, Homo sapien
acctttgtagttatcgaagtctaag

SEQ ID NO: 111930 - DNA, 25 bp, Homo sapien
acctttgtagttttcgaagtctaag

SEQ ID NO: 111931 - DNA, 25 bp, Homo sapien
ctcaaatgtaatttcctgtagtatg

SEQ ID NO: 111932 - DNA, 25 bp, Homo sapien
ctcaaatgtaatatcctgtagtatg

SEQ ID NO: 111933 - DNA, 25 bp, Homo sapien
gtactattaaaacacactgtagtag

SEQ ID NO: 111934 - DNA, 25 bp, Homo sapien
gtactattaaaagacactgtagtag

SEQ ID NO: 111935 - DNA, 25 bp, Homo sapien
ggaattcctcgagtaccctaggaag

SEQ ID NO: 111936 - DNA, 25 bp, Homo sapien
ggaattcctcgactaccctaggaag

SEQ ID NO: 111937 - DNA, 25 bp, Homo sapien
gtatttgtgtcttctaccaaaaccg

SEQ ID NO: 111938 - DNA, 25 bp, Homo sapien
gtatttgtgtctactaccaaaaccg

SEQ ID NO: 111939 - DNA, 25 bp, Homo sapien
cctctctcactctatccagtcaggg

SEQ ID NO: 111940 - DNA, 25 bp, Homo sapien
cctctctcactcaatccagtcaggg

SEQ ID NO: 111941 - DNA, 25 bp, Homo sapien
ggttcacactcagtctccgtccggg

SEQ ID NO: 111942 - DNA, 25 bp, Homo sapien
ggttcacactcactctccgtccggg

SEQ ID NO: 111943 - DNA, 25 bp, Homo sapien
acaggaagtctaaaccgataaagac

SEQ ID NO: 111944 - DNA, 25 bp, Homo sapien
acaggaagtctataccgataaagac

SEQ ID NO: 111945 - DNA, 25 bp, Homo sapien
agttgtgtagactccagagcagtat

SEQ ID NO: 111946 - DNA, 25 bp, Homo sapien
agttgtgtagacaccagagcagtat

SEQ ID NO: 111947 - DNA, 25 bp, Homo sapien
ttcgcgtcgaccagccgacagacct

SEQ ID NO: 111948 - DNA, 25 bp, Homo sapien
ttcgcgtcgacctgccgacagacct

SEQ ID NO: 111949 - DNA, 25 bp, Homo sapien
ctcaccgaccatggacgtcgagatc

SEQ ID NO: 111950 - DNA, 25 bp, Homo sapien
ctcaccgaccatcgacgtcgagatc

SEQ ID NO: 111951 - DNA, 25 bp, Homo sapien
gacccccgagtcctcgtcagaggtg

SEQ ID NO: 111952 - DNA, 25 bp, Homo sapien
gacccccgagtcgtcgtcagaggtg

SEQ ID NO: 111953 - DNA, 25 bp, Homo sapien
ctaccgtccaatctaacagtgaacg

SEQ ID NO: 111954 - DNA, 25 bp, Homo sapien
ctaccgtccaatgtaacagtgaacg

SEQ ID NO: 111955 - DNA, 25 bp, Homo sapien
aaccgaccactcgtgtaaagtcaag

SEQ ID NO: 111956 - DNA, 25 bp, Homo sapien
aaccgaccactcctgtaaagtcaag

SEQ ID NO: 111957 - DNA, 25 bp, Homo sapien
gatcgaatacaatacaactcggacg

SEQ ID NO: 111958 - DNA, 25 bp, Homo sapien
gatcgaatacaaaacaactcggacg

SEQ ID NO: 111959 - DNA, 25 bp, Homo sapien
atgtctacggaattgtaacgactta

SEQ ID NO: 111960 - DNA, 25 bp, Homo sapien
atgtctacggaaatgtaacgactta

SEQ ID NO: 111961 - DNA, 25 bp, Homo sapien
tttggtcacgtgaatcttcaaagat

SEQ ID NO: 111962 - DNA, 25 bp, Homo sapien
tttggtcacgtgtatcttcaaagat

SEQ ID NO: 111963 - DNA, 25 bp, Homo sapien
tttcgtcgcggagtcttcgagaaga

SEQ ID NO: 111964 - DNA, 25 bp, Homo sapien
tttcgtcgcggactcttcgagaaga

SEQ ID NO: 111965 - DNA, 25 bp, Homo sapien
tcccctttgggatacattcgacaat

SEQ ID NO: 111966 - DNA, 25 bp, Homo sapien
tcccctttgggaaacattcgacaat

SEQ ID NO: 111967 - DNA, 25 bp, Homo sapien
gtcctttgacgtctcattcacgaat

SEQ ID NO: 111968 - DNA, 25 bp, Homo sapien
gtcctttgacgtgtcattcacgaat

SEQ ID NO: 111969 - DNA, 25 bp, Homo sapien
actagttttgtacacggtgtcaatt

SEQ ID NO: 111970 - DNA, 25 bp, Homo sapien
actagttttgtagacggtgtcaatt

SEQ ID NO: 111971 - DNA, 25 bp, Homo sapien
atttctcttttcaagtgtggcttac

SEQ ID NO: 111972 - DNA, 25 bp, Homo sapien
atttctcttttctagtgtggcttac

SEQ ID NO: 111973 - DNA, 25 bp, Homo sapien
ttctccatatcttaatggcccccgt

SEQ ID NO: 111974 - DNA, 25 bp, Homo sapien
ttctccatatctaaatggcccccgt

SEQ ID NO: 111975 - DNA, 25 bp, Homo sapien
ttgaacttaagtacaggcagaccgt

SEQ ID NO: 111976 - DNA, 25 bp, Homo sapien
ttgaacttaagttcaggcagaccgt

SEQ ID NO: 111977 - DNA, 25 bp, Homo sapien
ttgagtcttatgacgcaatacccgt

SEQ ID NO: 111978 - DNA, 25 bp, Homo sapien
ttgagtcttatgtcgcaatacccgt

SEQ ID NO: 111979 - DNA, 25 bp, Homo sapien
gtcttgacttttcgtcagattgtct

SEQ ID NO: 111980 - DNA, 25 bp, Homo sapien
gtcttgacttttggtcagattgtct

SEQ ID NO: 111981 - DNA, 25 bp, Homo sapien
atttcgtcacttctgcggaaaagtc

SEQ ID NO: 111982 - DNA, 25 bp, Homo sapien
atttcgtcacttgtgcggaaaagtc

SEQ ID NO: 111983 - DNA, 25 bp, Homo sapien
gtgaaccgaagttggaggtcactga

SEQ ID NO: 111984 - DNA, 25 bp, Homo sapien
gtgaaccgaagtaggaggtcactga

SEQ ID NO: 111985 - DNA, 25 bp, Homo sapien
accagtgcactgtcggggtttgacg

SEQ ID NO: 111986 - DNA, 25 bp, Homo sapien
accagtgcactgacggggtttgacg

SEQ ID NO: 111987 - DNA, 25 bp, Homo sapien
gaggggtcgcacctggagcacaaac

SEQ ID NO: 111988 - DNA, 25 bp, Homo sapien
gaggggtcgcacgtggagcacaaac

SEQ ID NO: 111989 - DNA, 25 bp, Homo sapien
gaatgtagaatatggaccacaagac

SEQ ID NO: 111990 - DNA, 25 bp, Homo sapien
gaatgtagaataaggaccacaagac

SEQ ID NO: 111991 - DNA, 25 bp, Homo sapien
agcaagagttaggacaaggacccag

SEQ ID NO: 111992 - DNA, 25 bp, Homo sapien
agcaagagttagcacaaggacccag

SEQ ID NO: 111993 - DNA, 25 bp, Homo sapien
gttcaatcttttgacgactggaagt

SEQ ID NO: 111994 - DNA, 25 bp, Homo sapien
gttcaatcttttcacgactggaagt

SEQ ID NO: 111995 - DNA, 25 bp, Homo sapien
ctttctgagttttccgacaaaaagt

SEQ ID NO: 111996 - DNA, 25 bp, Homo sapien
ctttctgagtttaccgacaaaaagt

SEQ ID NO: 111997 - DNA, 25 bp, Homo sapien
aacctcagattgacgacctcctaag

SEQ ID NO: 111998 - DNA, 25 bp, Homo sapien
aacctcagattgtcgacctcctaag

SEQ ID NO: 111999 - DNA, 25 bp, Homo sapien
catcgcctagagtgttgaccccttg

SEQ ID NO: 112000 - DNA, 25 bp, Homo sapien
catcgcctagagagttgaccccttg

SEQ ID NO: 112001 - DNA, 25 bp, Homo sapien
cgaagagccgtgtcattctttataa

SEQ ID NO: 112002 - DNA, 25 bp, Homo sapien
cgaagagccgtgacattctttataa

SEQ ID NO: 112003 - DNA, 25 bp, Homo sapien
acgaagacggtttcactttcttaaa

SEQ ID NO: 112004 - DNA, 25 bp, Homo sapien
acgaagacggttacactttcttaaa

SEQ ID NO: 112005 - DNA, 25 bp, Homo sapien
acagtgagttggagttttgtaccac

SEQ ID NO: 112006 - DNA, 25 bp, Homo sapien
acagtgagttggtgttttgtaccac

SEQ ID NO: 112007 - DNA, 25 bp, Homo sapien
cagtttgatggcttatttgaactac

SEQ ID NO: 112008 - DNA, 25 bp, Homo sapien
cagtttgatggcatatttgaactac

SEQ ID NO: 112009 - DNA, 25 bp, Homo sapien
gagtcttgattccatgtattttaac

SEQ ID NO: 112010 - DNA, 25 bp, Homo sapien
gagtcttgattcgatgtattttaac

SEQ ID NO: 112011 - DNA, 25 bp, Homo sapien
ctttatgagtgtaaatcgtttttga

SEQ ID NO: 112012 - DNA, 25 bp, Homo sapien
ctttatgagtgttaatcgtttttga

SEQ ID NO: 112013 - DNA, 25 bp, Homo sapien
gtcgaaagcttaatctttctagtga

SEQ ID NO: 112014 - DNA, 25 bp, Homo sapien
gtcgaaagcttattctttctagtga

SEQ ID NO: 112015 - DNA, 25 bp, Homo sapien
atgtcgacattttaccacagaagga

SEQ ID NO: 112016 - DNA, 25 bp, Homo sapien
atgtcgacatttaaccacagaagga

SEQ ID NO: 112017 - DNA, 25 bp, Homo sapien
taggttccctcgacctgagacaggg

SEQ ID NO: 112018 - DNA, 25 bp, Homo sapien
taggttccctcgtcctgagacaggg

SEQ ID NO: 112019 - DNA, 25 bp, Homo sapien
gtactttcctcgaccctcgaaatca

SEQ ID NO: 112020 - DNA, 25 bp, Homo sapien
gtactttcctcgtccctcgaaatca

SEQ ID NO: 112021 - DNA, 25 bp, Homo sapien
tgacctgaactgtcgccttcaccaa

SEQ ID NO: 112022 - DNA, 25 bp, Homo sapien
tgacctgaactgacgccttcaccaa

SEQ ID NO: 112023 - DNA, 25 bp, Homo sapien
gggtgggcaggaaccccgagtggat

SEQ ID NO: 112024 - DNA, 25 bp, Homo sapien
gggtgggcaggatccccgagtggat

SEQ ID NO: 112025 - DNA, 25 bp, Homo sapien
cgggggaacggataccacgattcac

SEQ ID NO: 112026 - DNA, 25 bp, Homo sapien
cgggggaacggaaaccacgattcac

SEQ ID NO: 112027 - DNA, 25 bp, Homo sapien
ctatagaagggacatgcataaccac

SEQ ID NO: 112028 - DNA, 25 bp, Homo sapien
ctatagaagggagatgcataaccac

SEQ ID NO: 112029 - DNA, 25 bp, Homo sapien
tcaaagtggtatggtgtgtaaaccc

SEQ ID NO: 112030 - DNA, 25 bp, Homo sapien
tcaaagtggtatcgtgtgtaaaccc

SEQ ID NO: 112031 - DNA, 25 bp, Homo sapien
aatgtaatgtatcttgtaagtccac

SEQ ID NO: 112032 - DNA, 25 bp, Homo sapien
aatgtaatgtatgttgtaagtccac

SEQ ID NO: 112033 - DNA, 25 bp, Homo sapien
acaatgtattaatcttgggacttca

SEQ ID NO: 112034 - DNA, 25 bp, Homo sapien
acaatgtattaaacttgggacttca

SEQ ID NO: 112035 - DNA, 25 bp, Homo sapien
gatgtgttatcatcagtctacattt

SEQ ID NO: 112036 - DNA, 25 bp, Homo sapien
gatgtgttatcaacagtctacattt

SEQ ID NO: 112037 - DNA, 25 bp, Homo sapien
accctcagacccatctacgaggtat

SEQ ID NO: 112038 - DNA, 25 bp, Homo sapien
accctcagacccttctacgaggtat

SEQ ID NO: 112039 - DNA, 25 bp, Homo sapien
tagactcacgagaccgggaccagta

SEQ ID NO: 112040 - DNA, 25 bp, Homo sapien
tagactcacgagtccgggaccagta

SEQ ID NO: 112041 - DNA, 25 bp, Homo sapien
tcccgtcgcggaccaagacgcggag

SEQ ID NO: 112042 - DNA, 25 bp, Homo sapien
tcccgtcgcggagcaagacgcggag

SEQ ID NO: 112043 - DNA, 25 bp, Homo sapien
ggggtccccgacaacaagtcggaac

SEQ ID NO: 112044 - DNA, 25 bp, Homo sapien
ggggtccccgactacaagtcggaac

SEQ ID NO: 112045 - DNA, 25 bp, Homo sapien
cgcgtggtaacggggacaaagtgat

SEQ ID NO: 112046 - DNA, 25 bp, Homo sapien
cgcgtggtaacgcggacaaagtgat

SEQ ID NO: 112047 - DNA, 25 bp, Homo sapien
ggttacatttataacagtacttgat

SEQ ID NO: 112048 - DNA, 25 bp, Homo sapien
ggttacatttattacagtacttgat

SEQ ID NO: 112049 - DNA, 25 bp, Homo sapien
aaagtagacatctctacgaagacag

SEQ ID NO: 112050 - DNA, 25 bp, Homo sapien
aaagtagacatcactacgaagacag

SEQ ID NO: 112051 - DNA, 25 bp, Homo sapien
ccgttactctaaggtacgacaagtt

SEQ ID NO: 112052 - DNA, 25 bp, Homo sapien
ccgttactctaacgtacgacaagtt

SEQ ID NO: 112053 - DNA, 25 bp, Homo sapien
aagtcccgtttccacaagagtaata

SEQ ID NO: 112054 - DNA, 25 bp, Homo sapien
aagtcccgtttcgacaagagtaata

SEQ ID NO: 112055 - DNA, 25 bp, Homo sapien
taccggtgtctaaaagactactaat

SEQ ID NO: 112056 - DNA, 25 bp, Homo sapien
taccggtgtctataagactactaat

SEQ ID NO: 112057 - DNA, 25 bp, Homo sapien
gtacacgacgttggtaaatgacttt

SEQ ID NO: 112058 - DNA, 25 bp, Homo sapien
gtacacgacgttcgtaaatgacttt

SEQ ID NO: 112059 - DNA, 25 bp, Homo sapien
gacgggaccaaaggtcgttcctatg

SEQ ID NO: 112060 - DNA, 25 bp, Homo sapien
gacgggaccaaacgtcgttcctatg

SEQ ID NO: 112061 - DNA, 25 bp, Homo sapien
gacgacaacgggagtcgttgttcaa

SEQ ID NO: 112062 - DNA, 25 bp, Homo sapien
gacgacaacgggtgtcgttgttcaa

SEQ ID NO: 112063 - DNA, 25 bp, Homo sapien
tataacctgagatcgtgtcctttac

SEQ ID NO: 112064 - DNA, 25 bp, Homo sapien
tataacctgagaacgtgtcctttac

SEQ ID NO: 112065 - DNA, 25 bp, Homo sapien
aggacctcagacgagttctctccgt

SEQ ID NO: 112066 - DNA, 25 bp, Homo sapien
aggacctcagaccagttctctccgt

SEQ ID NO: 112067 - DNA, 25 bp, Homo sapien
gtccgtgcagactgacgctctggct

SEQ ID NO: 112068 - DNA, 25 bp, Homo sapien
gtccgtgcagacagacgctctggct

SEQ ID NO: 112069 - DNA, 25 bp, Homo sapien
tataggtgacagaacctcgtcggac

SEQ ID NO: 112070 - DNA, 25 bp, Homo sapien
tataggtgacagtacctcgtcggac

SEQ ID NO: 112071 - DNA, 25 bp, Homo sapien
tcgtttccctaaacacaaaacggga

SEQ ID NO: 112072 - DNA, 25 bp, Homo sapien
tcgtttccctaatcacaaaacggga

SEQ ID NO: 112073 - DNA, 25 bp, Homo sapien
taaaacacgataccaaactggtgtc

SEQ ID NO: 112074 - DNA, 25 bp, Homo sapien
taaaacacgatagcaaactggtgtc

SEQ ID NO: 112075 - DNA, 25 bp, Homo sapien
aacataagggaagtacaccattgtc

SEQ ID NO: 112076 - DNA, 25 bp, Homo sapien
aacataagggaactacaccattgtc

SEQ ID NO: 112077 - DNA, 25 bp, Homo sapien
aacgaggagaggagactcgattgtc

SEQ ID NO: 112078 - DNA, 25 bp, Homo sapien
aacgaggagaggtgactcgattgtc

SEQ ID NO: 112079 - DNA, 25 bp, Homo sapien
ggaaatgagggagtctatgtgcctc

SEQ ID NO: 112080 - DNA, 25 bp, Homo sapien
ggaaatgagggactctatgtgcctc

SEQ ID NO: 112081 - DNA, 25 bp, Homo sapien
ataggtggaagacttgtatgctccg

SEQ ID NO: 112082 - DNA, 25 bp, Homo sapien
ataggtggaagagttgtatgctccg

SEQ ID NO: 112083 - DNA, 25 bp, Homo sapien
aggtgtgtgtcagtctgctcagtcc

SEQ ID NO: 112084 - DNA, 25 bp, Homo sapien
aggtgtgtgtcactctgctcagtcc

SEQ ID NO: 112085 - DNA, 25 bp, Homo sapien
aggaggtgtaccatttagttcctca

SEQ ID NO: 112086 - DNA, 25 bp, Homo sapien
aggaggtgtaccttttagttcctca

SEQ ID NO: 112087 - DNA, 25 bp, Homo sapien
gacgtttgtctccttctttccccga

SEQ ID NO: 112088 - DNA, 25 bp, Homo sapien
gacgtttgtctcgttctttccccga

SEQ ID NO: 112089 - DNA, 25 bp, Homo sapien
atttgtctgtgtactgtgcccacac

SEQ ID NO: 112090 - DNA, 25 bp, Homo sapien
atttgtctgtgttctgtgcccacac

SEQ ID NO: 112091 - DNA, 25 bp, Homo sapien
ttcttaaggttagtcctctctcgac

SEQ ID NO: 112092 - DNA, 25 bp, Homo sapien
ttcttaaggttactcctctctcgac

SEQ ID NO: 112093 - DNA, 25 bp, Homo sapien
ccttttacagtttctgtagtcttga

SEQ ID NO: 112094 - DNA, 25 bp, Homo sapien
ccttttacagttactgtagtcttga

SEQ ID NO: 112095 - DNA, 25 bp, Homo sapien
tatatacgacactgcctggtttctt

SEQ ID NO: 112096 - DNA, 25 bp, Homo sapien
tatatacgacacagcctggtttctt

SEQ ID NO: 112097 - DNA, 25 bp, Homo sapien
ggttagagacaccactgtctttctt

SEQ ID NO: 112098 - DNA, 25 bp, Homo sapien
ggttagagacacgactgtctttctt

SEQ ID NO: 112099 - DNA, 25 bp, Homo sapien
acaacgaaggaagtctgtctggtaa

SEQ ID NO: 112100 - DNA, 25 bp, Homo sapien
acaacgaaggaactctgtctggtaa

SEQ ID NO: 112101 - DNA, 25 bp, Homo sapien
cccgagatagaggtgtaccgtaaat

SEQ ID NO: 112102 - DNA, 25 bp, Homo sapien
cccgagatagagctgtaccgtaaat

SEQ ID NO: 112103 - DNA, 25 bp, Homo sapien
cccgctatatgagtcgttggtgtct

SEQ ID NO: 112104 - DNA, 25 bp, Homo sapien
cccgctatatgactcgttggtgtct

SEQ ID NO: 112105 - DNA, 25 bp, Homo sapien
gttccttcttacgtgtctctctgtc

SEQ ID NO: 112106 - DNA, 25 bp, Homo sapien
gttccttcttacctgtctctctgtc

SEQ ID NO: 112107 - DNA, 25 bp, Homo sapien
tgtgtcaacttccttcctttgtacg

SEQ ID NO: 112108 - DNA, 25 bp, Homo sapien
tgtgtcaacttcgttcctttgtacg

SEQ ID NO: 112109 - DNA, 25 bp, Homo sapien
gttttcctcgttccttccgtgataa

SEQ ID NO: 112110 - DNA, 25 bp, Homo sapien
gttttcctcgttgcttccgtgataa

SEQ ID NO: 112111 - DNA, 25 bp, Homo sapien
gtctaccaccggtcttttacgtcat

SEQ ID NO: 112112 - DNA, 25 bp, Homo sapien
gtctaccaccggacttttacgtcat

SEQ ID NO: 112113 - DNA, 25 bp, Homo sapien
gctcagagaccctactgttttacat

SEQ ID NO: 112114 - DNA, 25 bp, Homo sapien
gctcagagacccaactgttttacat

SEQ ID NO: 112115 - DNA, 25 bp, Homo sapien
gcccagagtcccaccggtgtaggag

SEQ ID NO: 112116 - DNA, 25 bp, Homo sapien
gcccagagtccctccggtgtaggag

SEQ ID NO: 112117 - DNA, 25 bp, Homo sapien
gaacaacggtccaacgttgtgggca

SEQ ID NO: 112118 - DNA, 25 bp, Homo sapien
gaacaacggtcctacgttgtgggca

SEQ ID NO: 112119 - DNA, 25 bp, Homo sapien
tccgttgagtagttacgcgataaat

SEQ ID NO: 112120 - DNA, 25 bp, Homo sapien
tccgttgagtagatacgcgataaat

SEQ ID NO: 112121 - DNA, 25 bp, Homo sapien
gaacggttcaacaacgtggtagaac

SEQ ID NO: 112122 - DNA, 25 bp, Homo sapien
gaacggttcaactacgtggtagaac

SEQ ID NO: 112123 - DNA, 25 bp, Homo sapien
gtagagactccagacacgtggaaca

SEQ ID NO: 112124 - DNA, 25 bp, Homo sapien
gtagagactccacacacgtggaaca

SEQ ID NO: 112125 - DNA, 25 bp, Homo sapien
aagtttcgtaactaactgacctaag

SEQ ID NO: 112126 - DNA, 25 bp, Homo sapien
aagtttcgtaacaaactgacctaag

SEQ ID NO: 112127 - DNA, 25 bp, Homo sapien
ggtgtgaaacgaactgactctacac

SEQ ID NO: 112128 - DNA, 25 bp, Homo sapien
ggtgtgaaacgatctgactctacac

SEQ ID NO: 112129 - DNA, 25 bp, Homo sapien
gacgttgtagtaagagttccttgtc

SEQ ID NO: 112130 - DNA, 25 bp, Homo sapien
gacgttgtagtatgagttccttgtc

SEQ ID NO: 112131 - DNA, 25 bp, Homo sapien
gataagtagtagtgtagtcccttac

SEQ ID NO: 112132 - DNA, 25 bp, Homo sapien
gataagtagtagagtagtcccttac

SEQ ID NO: 112133 - DNA, 25 bp, Homo sapien
cacaaaagagacgtcgtccgtcacc

SEQ ID NO: 112134 - DNA, 25 bp, Homo sapien
cacaaaagagacctcgtccgtcacc

SEQ ID NO: 112135 - DNA, 25 bp, Homo sapien
gcacaaaaggacctcggtccgcgac

SEQ ID NO: 112136 - DNA, 25 bp, Homo sapien
gcacaaaaggacgtcggtccgcgac

SEQ ID NO: 112137 - DNA, 25 bp, Homo sapien
aacacaaataagctatgtccgggtc

SEQ ID NO: 112138 - DNA, 25 bp, Homo sapien
aacacaaataaggtatgtccgggtc

SEQ ID NO: 112139 - DNA, 25 bp, Homo sapien
acaaaggtaactatatgagacacta

SEQ ID NO: 112140 - DNA, 25 bp, Homo sapien
acaaaggtaactttatgagacacta

SEQ ID NO: 112141 - DNA, 25 bp, Homo sapien
tacgaaagggactcataagatactt

SEQ ID NO: 112142 - DNA, 25 bp, Homo sapien
tacgaaagggacacataagatactt

SEQ ID NO: 112143 - DNA, 25 bp, Homo sapien
atcactaggaggattcagggatctt

SEQ ID NO: 112144 - DNA, 25 bp, Homo sapien
atcactaggaggtttcagggatctt

SEQ ID NO: 112145 - DNA, 25 bp, Homo sapien
atcccgtcggtgcttacagggttta

SEQ ID NO: 112146 - DNA, 25 bp, Homo sapien
atcccgtcggtggttacagggttta

SEQ ID NO: 112147 - DNA, 25 bp, Homo sapien
gtattgtgaaggtaaacagacccta

SEQ ID NO: 112148 - DNA, 25 bp, Homo sapien
gtattgtgaaggaaaacagacccta

SEQ ID NO: 112149 - DNA, 25 bp, Homo sapien
gtacccgaccggataagacaaccca

SEQ ID NO: 112150 - DNA, 25 bp, Homo sapien
gtacccgaccggttaagacaaccca

SEQ ID NO: 112151 - DNA, 25 bp, Homo sapien
acccagaaagaaaggacaccacagt

SEQ ID NO: 112152 - DNA, 25 bp, Homo sapien
acccagaaagaatggacaccacagt

SEQ ID NO: 112153 - DNA, 25 bp, Homo sapien
cctcgagaacagagggccgactcct

SEQ ID NO: 112154 - DNA, 25 bp, Homo sapien
cctcgagaacagtgggccgactcct

SEQ ID NO: 112155 - DNA, 25 bp, Homo sapien
tctccggagacttggggtccgaccc

SEQ ID NO: 112156 - DNA, 25 bp, Homo sapien
tctccggagactaggggtccgaccc

SEQ ID NO: 112157 - DNA, 25 bp, Homo sapien
gttccgaatccataggtcgcgtccc

SEQ ID NO: 112158 - DNA, 25 bp, Homo sapien
gttccgaatccaaaggtcgcgtccc

SEQ ID NO: 112159 - DNA, 25 bp, Homo sapien
tacccgacttccaacaggaccgggg

SEQ ID NO: 112160 - DNA, 25 bp, Homo sapien
tacccgacttcctacaggaccgggg

SEQ ID NO: 112161 - DNA, 25 bp, Homo sapien
acgtctatacaggtcaggaccctgg

SEQ ID NO: 112162 - DNA, 25 bp, Homo sapien
acgtctatacagctcaggaccctgg

SEQ ID NO: 112163 - DNA, 25 bp, Homo sapien
cacttactgtcacaagtccctgggt

SEQ ID NO: 112164 - DNA, 25 bp, Homo sapien
cacttactgtcagaagtccctgggt

SEQ ID NO: 112165 - DNA, 25 bp, Homo sapien
cttgacttcggtagccagtgggtcg

SEQ ID NO: 112166 - DNA, 25 bp, Homo sapien
cttgacttcggttgccagtgggtcg

SEQ ID NO: 112167 - DNA, 25 bp, Homo sapien
cgcctgactctggaccggaggtacg

SEQ ID NO: 112168 - DNA, 25 bp, Homo sapien
cgcctgactctgcaccggaggtacg

SEQ ID NO: 112169 - DNA, 25 bp, Homo sapien
gggtccagaatccaggtctcaccac

SEQ ID NO: 112170 - DNA, 25 bp, Homo sapien
gggtccagaatcgaggtctcaccac

SEQ ID NO: 112171 - DNA, 25 bp, Homo sapien
gggcccgaggtaggaccctcgacca

SEQ ID NO: 112172 - DNA, 25 bp, Homo sapien
gggcccgaggtacgaccctcgacca

SEQ ID NO: 112173 - DNA, 25 bp, Homo sapien
tccggagtaatcgtatcttgagtga

SEQ ID NO: 112174 - DNA, 25 bp, Homo sapien
tccggagtaatcctatcttgagtga

SEQ ID NO: 112175 - DNA, 25 bp, Homo sapien
agtctctggaatctccttagatcgc

SEQ ID NO: 112176 - DNA, 25 bp, Homo sapien
agtctctggaatgtccttagatcgc

SEQ ID NO: 112177 - DNA, 25 bp, Homo sapien
aagacctcaaagagcccgtcgcagg

SEQ ID NO: 112178 - DNA, 25 bp, Homo sapien
aagacctcaaagtgcccgtcgcagg

SEQ ID NO: 112179 - DNA, 25 bp, Homo sapien
gacctatacctttgcctagtcttgg

SEQ ID NO: 112180 - DNA, 25 bp, Homo sapien
gacctataccttagcctagtcttgg

SEQ ID NO: 112181 - DNA, 25 bp, Homo sapien
ctcccatctcctagggtgtcaagag

SEQ ID NO: 112182 - DNA, 25 bp, Homo sapien
ctcccatctccttgggtgtcaagag

SEQ ID NO: 112183 - DNA, 25 bp, Homo sapien
atccagattcttgatgtggtaacga

SEQ ID NO: 112184 - DNA, 25 bp, Homo sapien
atccagattcttcatgtggtaacga

SEQ ID NO: 112185 - DNA, 25 bp, Homo sapien
tctataagtacttcccagggtagga

SEQ ID NO: 112186 - DNA, 25 bp, Homo sapien
tctataagtactacccagggtagga

SEQ ID NO: 112187 - DNA, 25 bp, Homo sapien
acgcttagatgtacccaggaggata

SEQ ID NO: 112188 - DNA, 25 bp, Homo sapien
acgcttagatgttcccaggaggata

SEQ ID NO: 112189 - DNA, 25 bp, Homo sapien
ataagactgtgtctcccggacggag

SEQ ID NO: 112190 - DNA, 25 bp, Homo sapien
ataagactgtgtgtcccggacggag

SEQ ID NO: 112191 - DNA, 25 bp, Homo sapien
agggacgatcttatctactggtgtt

SEQ ID NO: 112192 - DNA, 25 bp, Homo sapien
agggacgatcttttctactggtgtt

SEQ ID NO: 112193 - DNA, 25 bp, Homo sapien
aaactagtcaacttttagtcttgga

SEQ ID NO: 112194 - DNA, 25 bp, Homo sapien
aaactagtcaacatttagtcttgga

SEQ ID NO: 112195 - DNA, 25 bp, Homo sapien
gtactatcttagtgtctttactgaa

SEQ ID NO: 112196 - DNA, 25 bp, Homo sapien
gtactatcttagagtctttactgaa

SEQ ID NO: 112197 - DNA, 25 bp, Homo sapien
agtcttttcttacttcatcgagaag

SEQ ID NO: 112198 - DNA, 25 bp, Homo sapien
agtcttttcttagttcatcgagaag

SEQ ID NO: 112199 - DNA, 25 bp, Homo sapien
gttctttactatgtcctctgaaagt

SEQ ID NO: 112200 - DNA, 25 bp, Homo sapien
gttctttactatctcctctgaaagt

SEQ ID NO: 112201 - DNA, 25 bp, Homo sapien
tgttcccgtctaggtcttccctcta

SEQ ID NO: 112202 - DNA, 25 bp, Homo sapien
tgttcccgtctacgtcttccctcta

SEQ ID NO: 112203 - DNA, 25 bp, Homo sapien
ggtaccgtccttctttcgtctcaca

SEQ ID NO: 112204 - DNA, 25 bp, Homo sapien
ggtaccgtccttgtttcgtctcaca

SEQ ID NO: 112205 - DNA, 25 bp, Homo sapien
tggcacgtatcgtgtatcgttcaat

SEQ ID NO: 112206 - DNA, 25 bp, Homo sapien
tggcacgtatcgagtatcgttcaat

SEQ ID NO: 112207 - DNA, 25 bp, Homo sapien
gattccatagtgactagtatttcct

SEQ ID NO: 112208 - DNA, 25 bp, Homo sapien
gattccatagtgtctagtatttcct

SEQ ID NO: 112209 - DNA, 25 bp, Homo sapien
ttcgatgacatgttacgtcgttcct

SEQ ID NO: 112210 - DNA, 25 bp, Homo sapien
ttcgatgacatgatacgtcgttcct

SEQ ID NO: 112211 - DNA, 25 bp, Homo sapien
gaattctgtcaagttatctcgtttc

SEQ ID NO: 112212 - DNA, 25 bp, Homo sapien
gaattctgtcaacttatctcgtttc

SEQ ID NO: 112213 - DNA, 25 bp, Homo sapien
aggatcctttaatcagttgcgttta

SEQ ID NO: 112214 - DNA, 25 bp, Homo sapien
aggatcctttaaacagttgcgttta

SEQ ID NO: 112215 - DNA, 25 bp, Homo sapien
taacgtcccagaagttcggctcaag

SEQ ID NO: 112216 - DNA, 25 bp, Homo sapien
taacgtcccagatgttcggctcaag

SEQ ID NO: 112217 - DNA, 25 bp, Homo sapien
ataccgagatgttaggagtcgtaca

SEQ ID NO: 112218 - DNA, 25 bp, Homo sapien
ataccgagatgtaaggagtcgtaca

SEQ ID NO: 112219 - DNA, 25 bp, Homo sapien
atttcgtcgacgaagttcaatgtaa

SEQ ID NO: 112220 - DNA, 25 bp, Homo sapien
atttcgtcgacgtagttcaatgtaa

SEQ ID NO: 112221 - DNA, 25 bp, Homo sapien
acaatctccgtaccttcaaggaacg

SEQ ID NO: 112222 - DNA, 25 bp, Homo sapien
acaatctccgtagcttcaaggaacg

SEQ ID NO: 112223 - DNA, 25 bp, Homo sapien
aacaagtgttcacacaagacagacc

SEQ ID NO: 112224 - DNA, 25 bp, Homo sapien
aacaagtgttcagacaagacagacc

SEQ ID NO: 112225 - DNA, 25 bp, Homo sapien
ggaagagacacagtatgaacataca

SEQ ID NO: 112226 - DNA, 25 bp, Homo sapien
ggaagagacacactatgaacataca

SEQ ID NO: 112227 - DNA, 25 bp, Homo sapien
ggatgacacacacacaggacttgac

SEQ ID NO: 112228 - DNA, 25 bp, Homo sapien
ggatgacacacagacaggacttgac

SEQ ID NO: 112229 - DNA, 25 bp, Homo sapien
ggaggtcacaagtaggtaccgtgaa

SEQ ID NO: 112230 - DNA, 25 bp, Homo sapien
ggaggtcacaagaaggtaccgtgaa

SEQ ID NO: 112231 - DNA, 25 bp, Homo sapien
gggacggctcttcgaccccgagaga

SEQ ID NO: 112232 - DNA, 25 bp, Homo sapien
gggacggctcttggaccccgagaga

SEQ ID NO: 112233 - DNA, 25 bp, Homo sapien
gggaactctgtcgtcccgaagctac

SEQ ID NO: 112234 - DNA, 25 bp, Homo sapien
gggaactctgtcctcccgaagctac

SEQ ID NO: 112235 - DNA, 25 bp, Homo sapien
aattttccgtgttcccgtaacaccg

SEQ ID NO: 112236 - DNA, 25 bp, Homo sapien
aattttccgtgtacccgtaacaccg

SEQ ID NO: 112237 - DNA, 25 bp, Homo sapien
cacctttggtgaacccctcgacatt

SEQ ID NO: 112238 - DNA, 25 bp, Homo sapien
cacctttggtgatcccctcgacatt

SEQ ID NO: 112239 - DNA, 25 bp, Homo sapien
caatgtgtctagtcccgtctcctgg

SEQ ID NO: 112240 - DNA, 25 bp, Homo sapien
caatgtgtctagacccgtctcctgg

SEQ ID NO: 112241 - DNA, 25 bp, Homo sapien
attgtcctgagtggtagcgcgtgtt

SEQ ID NO: 112242 - DNA, 25 bp, Homo sapien
attgtcctgagtcgtagcgcgtgtt

SEQ ID NO: 112243 - DNA, 25 bp, Homo sapien
ttattgacctgcttagtgtaaaacg

SEQ ID NO: 112244 - DNA, 25 bp, Homo sapien
ttattgacctgcatagtgtaaaacg

SEQ ID NO: 112245 - DNA, 25 bp, Homo sapien
tcttagtggttacatgtaaagctac

SEQ ID NO: 112246 - DNA, 25 bp, Homo sapien
tcttagtggttagatgtaaagctac

SEQ ID NO: 112247 - DNA, 25 bp, Homo sapien
ttggtgctaaactgtagaagtctct

SEQ ID NO: 112248 - DNA, 25 bp, Homo sapien
ttggtgctaaacagtagaagtctct

SEQ ID NO: 112249 - DNA, 25 bp, Homo sapien
tgtcggtgtacacttacggtttact

SEQ ID NO: 112250 - DNA, 25 bp, Homo sapien
tgtcggtgtacagttacggtttact

SEQ ID NO: 112251 - DNA, 25 bp, Homo sapien
acggaggtgtagtttacgccgtctt

SEQ ID NO: 112252 - DNA, 25 bp, Homo sapien
acggaggtgtagattacgccgtctt

SEQ ID NO: 112253 - DNA, 25 bp, Homo sapien
tcgtcggagtgtagggactagtcat

SEQ ID NO: 112254 - DNA, 25 bp, Homo sapien
tcgtcggagtgttgggactagtcat

SEQ ID NO: 112255 - DNA, 25 bp, Homo sapien
tctggagtacgttacgggaggtaca

SEQ ID NO: 112256 - DNA, 25 bp, Homo sapien
tctggagtacgtaacgggaggtaca

SEQ ID NO: 112257 - DNA, 25 bp, Homo sapien
caactggtgtgtgacactttagtaa

SEQ ID NO: 112258 - DNA, 25 bp, Homo sapien
caactggtgtgtcacactttagtaa

SEQ ID NO: 112259 - DNA, 25 bp, Homo sapien
tgcacaccaatccactactgctgga

SEQ ID NO: 112260 - DNA, 25 bp, Homo sapien
tgcacaccaatcgactactgctgga

SEQ ID NO: 112261 - DNA, 25 bp, Homo sapien
gccgacaacaatgtgtacgcccaca

SEQ ID NO: 112262 - DNA, 25 bp, Homo sapien
gccgacaacaatctgtacgcccaca

SEQ ID NO: 112263 - DNA, 25 bp, Homo sapien
ggagaaactataaattccatatgtc

SEQ ID NO: 112264 - DNA, 25 bp, Homo sapien
ggagaaactatatattccatatgtc

SEQ ID NO: 112265 - DNA, 25 bp, Homo sapien
agggtccaactgggtgccatcggtg

SEQ ID NO: 112266 - DNA, 25 bp, Homo sapien
agggtccaactgcgtgccatcggtg

SEQ ID NO: 112267 - DNA, 25 bp, Homo sapien
agttccgttgttcgtcgtgttcgga

SEQ ID NO: 112268 - DNA, 25 bp, Homo sapien
agttccgttgttggtcgtgttcgga

SEQ ID NO: 112269 - DNA, 25 bp, Homo sapien
tgctcccacgtgtgttcgacccgaa

SEQ ID NO: 112270 - DNA, 25 bp, Homo sapien
tgctcccacgtgagttcgacccgaa

SEQ ID NO: 112271 - DNA, 25 bp, Homo sapien
tgtcttgcctaagtaggtcccagga

SEQ ID NO: 112272 - DNA, 25 bp, Homo sapien
tgtcttgcctaactaggtcccagga

SEQ ID NO: 112273 - DNA, 25 bp, Homo sapien
tggtgtgtcgacgagtcacggaaga

SEQ ID NO: 112274 - DNA, 25 bp, Homo sapien
tggtgtgtcgaccagtcacggaaga

SEQ ID NO: 112275 - DNA, 25 bp, Homo sapien
tcggtccgggacaccggagagcact

SEQ ID NO: 112276 - DNA, 25 bp, Homo sapien
tcggtccgggactccggagagcact

SEQ ID NO: 112277 - DNA, 25 bp, Homo sapien
ccgtcgaactaccagtccagtcgga

SEQ ID NO: 112278 - DNA, 25 bp, Homo sapien
ccgtcgaactacgagtccagtcgga

SEQ ID NO: 112279 - DNA, 25 bp, Homo sapien
tatcgtccgcgataaacccaaccga

SEQ ID NO: 112280 - DNA, 25 bp, Homo sapien
tatcgtccgcgaaaaacccaaccga

SEQ ID NO: 112281 - DNA, 25 bp, Homo sapien
gttcgtttcacactcatatgtgcca

SEQ ID NO: 112282 - DNA, 25 bp, Homo sapien
gttcgtttcacagtcatatgtgcca

SEQ ID NO: 112283 - DNA, 25 bp, Homo sapien
tgtttgtgcccgtatactggtgtca

SEQ ID NO: 112284 - DNA, 25 bp, Homo sapien
tgtttgtgcccgaatactggtgtca

SEQ ID NO: 112285 - DNA, 25 bp, Homo sapien
cctagtggaagaaaccgacgtataa

SEQ ID NO: 112286 - DNA, 25 bp, Homo sapien
cctagtggaagataccgacgtataa

SEQ ID NO: 112287 - DNA, 25 bp, Homo sapien
accagtcgggaccttccggatagta

SEQ ID NO: 112288 - DNA, 25 bp, Homo sapien
accagtcgggacgttccggatagta

SEQ ID NO: 112289 - DNA, 25 bp, Homo sapien
acatctgtgtgacaatcccgtctgg

SEQ ID NO: 112290 - DNA, 25 bp, Homo sapien
acatctgtgtgagaatcccgtctgg

SEQ ID NO: 112291 - DNA, 25 bp, Homo sapien
aaaatgtataagtatccatctaccg

SEQ ID NO: 112292 - DNA, 25 bp, Homo sapien
aaaatgtataagaatccatctaccg

SEQ ID NO: 112293 - DNA, 25 bp, Homo sapien
aagtatgtcaaacacaacatgtaag

SEQ ID NO: 112294 - DNA, 25 bp, Homo sapien
aagtatgtcaaagacaacatgtaag

SEQ ID NO: 112295 - DNA, 25 bp, Homo sapien
aagagaaaatactcaattgtcgtca

SEQ ID NO: 112296 - DNA, 25 bp, Homo sapien
aagagaaaatacacaattgtcgtca

SEQ ID NO: 112297 - DNA, 25 bp, Homo sapien
acgaagaaactcgaaccttctcggc

SEQ ID NO: 112298 - DNA, 25 bp, Homo sapien
acgaagaaactccaaccttctcggc

SEQ ID NO: 112299 - DNA, 25 bp, Homo sapien
atgaatgacacatcgatgttgacac

SEQ ID NO: 112300 - DNA, 25 bp, Homo sapien
atgaatgacacaacgatgttgacac

SEQ ID NO: 112301 - DNA, 25 bp, Homo sapien
cgtcgtaataaccagacaggtgcca

SEQ ID NO: 112302 - DNA, 25 bp, Homo sapien
cgtcgtaataacgagacaggtgcca

SEQ ID NO: 112303 - DNA, 25 bp, Homo sapien
cccccgagaccgtgtgcagggagca

SEQ ID NO: 112304 - DNA, 25 bp, Homo sapien
cccccgagaccgagtgcagggagca

SEQ ID NO: 112305 - DNA, 25 bp, Homo sapien
actccccaacggtgtccggggatga

SEQ ID NO: 112306 - DNA, 25 bp, Homo sapien
actccccaacggagtccggggatga

SEQ ID NO: 112307 - DNA, 25 bp, Homo sapien
tgactgcgagtttgcgtggtagtac

SEQ ID NO: 112308 - DNA, 25 bp, Homo sapien
tgactgcgagttagcgtggtagtac

SEQ ID NO: 112309 - DNA, 25 bp, Homo sapien
gactgacgacgatggagacgtgata

SEQ ID NO: 112310 - DNA, 25 bp, Homo sapien
gactgacgacgaaggagacgtgata

SEQ ID NO: 112311 - DNA, 25 bp, Homo sapien
tgtcaaagaagtcgttacagacaac

SEQ ID NO: 112312 - DNA, 25 bp, Homo sapien
tgtcaaagaagtggttacagacaac

SEQ ID NO: 112313 - DNA, 25 bp, Homo sapien
atggttaagaactccggggacactt

SEQ ID NO: 112314 - DNA, 25 bp, Homo sapien
atggttaagaacaccggggacactt

SEQ ID NO: 112315 - DNA, 25 bp, Homo sapien
ttattaagaaactaccgtgggtttc

SEQ ID NO: 112316 - DNA, 25 bp, Homo sapien
ttattaagaaacaaccgtgggtttc

SEQ ID NO: 112317 - DNA, 25 bp, Homo sapien
tgtgtgagtaaaaaccgagaaccaa

SEQ ID NO: 112318 - DNA, 25 bp, Homo sapien
tgtgtgagtaaataccgagaaccaa

SEQ ID NO: 112319 - DNA, 25 bp, Homo sapien
tggtgccgtagacaccacatcgaaa

SEQ ID NO: 112320 - DNA, 25 bp, Homo sapien
tggtgccgtagagaccacatcgaaa

SEQ ID NO: 112321 - DNA, 25 bp, Homo sapien
gtgtgcacgtatatcgctcaaggcc

SEQ ID NO: 112322 - DNA, 25 bp, Homo sapien
gtgtgcacgtatttcgctcaaggcc

SEQ ID NO: 112323 - DNA, 25 bp, Homo sapien
atataccacgaattctttcagagga

SEQ ID NO: 112324 - DNA, 25 bp, Homo sapien
atataccacgaaatctttcagagga

SEQ ID NO: 112325 - DNA, 25 bp, Homo sapien
attaaagacgaacagtttcagttta

SEQ ID NO: 112326 - DNA, 25 bp, Homo sapien
attaaagacgaagagtttcagttta

SEQ ID NO: 112327 - DNA, 25 bp, Homo sapien
tctatgatagacattcacttggttt

SEQ ID NO: 112328 - DNA, 25 bp, Homo sapien
tctatgatagactttcacttggttt

SEQ ID NO: 112329 - DNA, 25 bp, Homo sapien
aagtcatttaattccgtttcctcta

SEQ ID NO: 112330 - DNA, 25 bp, Homo sapien
aagtcatttaataccgtttcctcta

SEQ ID NO: 112331 - DNA, 25 bp, Homo sapien
aagaaaagacttaggttatacctac

SEQ ID NO: 112332 - DNA, 25 bp, Homo sapien
aagaaaagactttggttatacctac

SEQ ID NO: 112333 - DNA, 25 bp, Homo sapien
agtttgataagattcaacgattcca

SEQ ID NO: 112334 - DNA, 25 bp, Homo sapien
agtttgataagaatcaacgattcca

SEQ ID NO: 112335 - DNA, 25 bp, Homo sapien
acggaaggtagatcaacacctagaa

SEQ ID NO: 112336 - DNA, 25 bp, Homo sapien
acggaaggtagaacaacacctagaa

SEQ ID NO: 112337 - DNA, 25 bp, Homo sapien
aacggggtccgaaaccgtgaaggtc

SEQ ID NO: 112338 - DNA, 25 bp, Homo sapien
aacggggtccgataccgtgaaggtc

SEQ ID NO: 112339 - DNA, 25 bp, Homo sapien
aaattacctccttcgtagaagatgt

SEQ ID NO: 112340 - DNA, 25 bp, Homo sapien
aaattacctcctacgtagaagatgt

SEQ ID NO: 112341 - DNA, 25 bp, Homo sapien
tttgtcaccccccagtaagtccccg

SEQ ID NO: 112342 - DNA, 25 bp, Homo sapien
tttgtcacccccgagtaagtccccg

SEQ ID NO: 112343 - DNA, 25 bp, Homo sapien
gtcaccagtgcattacacgggtatc

SEQ ID NO: 112344 - DNA, 25 bp, Homo sapien
gtcaccagtgcaatacacgggtatc

SEQ ID NO: 112345 - DNA, 25 bp, Homo sapien
tcagcagcataaaacgacggtaccg

SEQ ID NO: 112346 - DNA, 25 bp, Homo sapien
tcagcagcataatacgacggtaccg

SEQ ID NO: 112347 - DNA, 25 bp, Homo sapien
tttaccaggaagttcacatagtcac

SEQ ID NO: 112348 - DNA, 25 bp, Homo sapien
tttaccaggaagatcacatagtcac

SEQ ID NO: 112349 - DNA, 25 bp, Homo sapien
tttgactcaggcacgtttaagtctt

SEQ ID NO: 112350 - DNA, 25 bp, Homo sapien
tttgactcaggctcgtttaagtctt

SEQ ID NO: 112351 - DNA, 25 bp, Homo sapien
ttttgatcccactctcggtacttta

SEQ ID NO: 112352 - DNA, 25 bp, Homo sapien
ttttgatcccacactcggtacttta

SEQ ID NO: 112353 - DNA, 25 bp, Homo sapien
taagttccacacttctatgtcttgg

SEQ ID NO: 112354 - DNA, 25 bp, Homo sapien
taagttccacacatctatgtcttgg

SEQ ID NO: 112355 - DNA, 25 bp, Homo sapien
agatctcacggaactttgtcttgtc

SEQ ID NO: 112356 - DNA, 25 bp, Homo sapien
agatctcacggatctttgtcttgtc

SEQ ID NO: 112357 - DNA, 25 bp, Homo sapien
agacgagagaacttcagtgttttac

SEQ ID NO: 112358 - DNA, 25 bp, Homo sapien
agacgagagaacatcagtgttttac

SEQ ID NO: 112359 - DNA, 25 bp, Homo sapien
tgggaactagagtcccattcttctt

SEQ ID NO: 112360 - DNA, 25 bp, Homo sapien
tgggaactagagacccattcttctt

SEQ ID NO: 112361 - DNA, 25 bp, Homo sapien
agtaagtcaacgaccttttcaagtt

SEQ ID NO: 112362 - DNA, 25 bp, Homo sapien
agtaagtcaacgtccttttcaagtt

SEQ ID NO: 112363 - DNA, 25 bp, Homo sapien
gtaaatcccgatccaagacggaaga

SEQ ID NO: 112364 - DNA, 25 bp, Homo sapien
gtaaatcccgatgcaagacggaaga

SEQ ID NO: 112365 - DNA, 25 bp, Homo sapien
gataaacgttttcggtttgggataa

SEQ ID NO: 112366 - DNA, 25 bp, Homo sapien
gataaacgttttgggtttgggataa

SEQ ID NO: 112367 - DNA, 25 bp, Homo sapien
ccgatgtgtacatttgtgcgatgta

SEQ ID NO: 112368 - DNA, 25 bp, Homo sapien
ccgatgtgtacaattgtgcgatgta

SEQ ID NO: 112369 - DNA, 25 bp, Homo sapien
tcaaacacactactggacgtattga

SEQ ID NO: 112370 - DNA, 25 bp, Homo sapien
tcaaacacactagtggacgtattga

SEQ ID NO: 112371 - DNA, 25 bp, Homo sapien
cttaagactcactacgtccaaggga

SEQ ID NO: 112372 - DNA, 25 bp, Homo sapien
cttaagactcacaacgtccaaggga

SEQ ID NO: 112373 - DNA, 25 bp, Homo sapien
taagagtcccgatgcccgtctcggc

SEQ ID NO: 112374 - DNA, 25 bp, Homo sapien
taagagtcccgaagcccgtctcggc

SEQ ID NO: 112375 - DNA, 25 bp, Homo sapien
gaaggtagactcgaaccctcgtcca

SEQ ID NO: 112376 - DNA, 25 bp, Homo sapien
gaaggtagactccaaccctcgtcca

SEQ ID NO: 112377 - DNA, 25 bp, Homo sapien
gaaaggtagagtccttgtcccccga

SEQ ID NO: 112378 - DNA, 25 bp, Homo sapien
gaaaggtagagtgcttgtcccccga

SEQ ID NO: 112379 - DNA, 25 bp, Homo sapien
ggatagaggattgtgtcccgtcctt

SEQ ID NO: 112380 - DNA, 25 bp, Homo sapien
ggatagaggattctgtcccgtcctt

SEQ ID NO: 112381 - DNA, 25 bp, Homo sapien
gtccggaaggatctgcacctccgtt

SEQ ID NO: 112382 - DNA, 25 bp, Homo sapien
gtccggaaggatgtgcacctccgtt

SEQ ID NO: 112383 - DNA, 25 bp, Homo sapien
tccaaacggtgtacggaactcttta

SEQ ID NO: 112384 - DNA, 25 bp, Homo sapien
tccaaacggtgttcggaactcttta

SEQ ID NO: 112385 - DNA, 25 bp, Homo sapien
agtccgtgtacttccatacgtattt

SEQ ID NO: 112386 - DNA, 25 bp, Homo sapien
agtccgtgtactaccatacgtattt

SEQ ID NO: 112387 - DNA, 25 bp, Homo sapien
acactttgtacagctagtacggata

SEQ ID NO: 112388 - DNA, 25 bp, Homo sapien
acactttgtacacctagtacggata

SEQ ID NO: 112389 - DNA, 25 bp, Homo sapien
tcctcctgtctattccactgtggaa

SEQ ID NO: 112390 - DNA, 25 bp, Homo sapien
tcctcctgtctaatccactgtggaa

SEQ ID NO: 112391 - DNA, 25 bp, Homo sapien
ctactgctcctacctgaacagggga

SEQ ID NO: 112392 - DNA, 25 bp, Homo sapien
ctactgctcctagctgaacagggga

SEQ ID NO: 112393 - DNA, 25 bp, Homo sapien
cctatccctaacttctcagtgggac

SEQ ID NO: 112394 - DNA, 25 bp, Homo sapien
cctatccctaacatctcagtgggac

SEQ ID NO: 112395 - DNA, 25 bp, Homo sapien
cgtctcgtaatatcgcctggacgac

SEQ ID NO: 112396 - DNA, 25 bp, Homo sapien
cgtctcgtaataacgcctggacgac

SEQ ID NO: 112397 - DNA, 25 bp, Homo sapien
gcgcaacgtctatgcaccgacgacc

SEQ ID NO: 112398 - DNA, 25 bp, Homo sapien
gcgcaacgtctaagcaccgacgacc

SEQ ID NO: 112399 - DNA, 25 bp, Homo sapien
tctagacaccggttccggacactct

SEQ ID NO: 112400 - DNA, 25 bp, Homo sapien
tctagacaccggatccggacactct

SEQ ID NO: 112401 - DNA, 25 bp, Homo sapien
taagatcgacgaggtccgactcgtc

SEQ ID NO: 112402 - DNA, 25 bp, Homo sapien
taagatcgacgacgtccgactcgtc

SEQ ID NO: 112403 - DNA, 25 bp, Homo sapien
taccggagtgagtgacgactacgag

SEQ ID NO: 112404 - DNA, 25 bp, Homo sapien
taccggagtgagagacgactacgag

SEQ ID NO: 112405 - DNA, 25 bp, Homo sapien
cttcctcgtcgtcgacacaacagta

SEQ ID NO: 112406 - DNA, 25 bp, Homo sapien
cttcctcgtcgtggacacaacagta

SEQ ID NO: 112407 - DNA, 25 bp, Homo sapien
ctatgcttccatgtgtcacatgaag

SEQ ID NO: 112408 - DNA, 25 bp, Homo sapien
ctatgcttccatctgtcacatgaag

SEQ ID NO: 112409 - DNA, 25 bp, Homo sapien
tgagcttccctcactaccaggacgg

SEQ ID NO: 112410 - DNA, 25 bp, Homo sapien
tgagcttccctctctaccaggacgg

SEQ ID NO: 112411 - DNA, 25 bp, Homo sapien
gtaagtacaaaccacttagtttctg

SEQ ID NO: 112412 - DNA, 25 bp, Homo sapien
gtaagtacaaacgacttagtttctg

SEQ ID NO: 112413 - DNA, 25 bp, Homo sapien
cagtgtcgacccttggttctccttc

SEQ ID NO: 112414 - DNA, 25 bp, Homo sapien
cagtgtcgacccatggttctccttc

SEQ ID NO: 112415 - DNA, 25 bp, Homo sapien
ccgtagacttctaaggtcttccttc

SEQ ID NO: 112416 - DNA, 25 bp, Homo sapien
ccgtagacttcttaggtcttccttc

SEQ ID NO: 112417 - DNA, 25 bp, Homo sapien
ccgaaatgatagatactgtcttatt

SEQ ID NO: 112418 - DNA, 25 bp, Homo sapien
ccgaaatgatagttactgtcttatt

SEQ ID NO: 112419 - DNA, 25 bp, Homo sapien
tgtatgcaattaacacttttatatt

SEQ ID NO: 112420 - DNA, 25 bp, Homo sapien
tgtatgcaattatcacttttatatt

SEQ ID NO: 112421 - DNA, 25 bp, Homo sapien
tggactccatccagccgtttgagaa

SEQ ID NO: 112422 - DNA, 25 bp, Homo sapien
tggactccatcctgccgtttgagaa

SEQ ID NO: 112423 - DNA, 25 bp, Homo sapien
gctgggaaaccctgttgagaatagt

SEQ ID NO: 112424 - DNA, 25 bp, Homo sapien
gctgggaaacccagttgagaatagt

SEQ ID NO: 112425 - DNA, 25 bp, Homo sapien
tataggacgaaacttgacggatctt

SEQ ID NO: 112426 - DNA, 25 bp, Homo sapien
tataggacgaaagttgacggatctt

SEQ ID NO: 112427 - DNA, 25 bp, Homo sapien
aacgaagagatggtggtggattagt

SEQ ID NO: 112428 - DNA, 25 bp, Homo sapien
aacgaagagatgctggtggattagt

SEQ ID NO: 112429 - DNA, 25 bp, Homo sapien
gtcagagagaactggtgacgattac

SEQ ID NO: 112430 - DNA, 25 bp, Homo sapien
gtcagagagaacaggtgacgattac

SEQ ID NO: 112431 - DNA, 25 bp, Homo sapien
tgtctcggaggtcactgtcatttta

SEQ ID NO: 112432 - DNA, 25 bp, Homo sapien
tgtctcggaggtgactgtcatttta

SEQ ID NO: 112433 - DNA, 25 bp, Homo sapien
ctactacaggggacacgtcttgcca

SEQ ID NO: 112434 - DNA, 25 bp, Homo sapien
ctactacaggggtcacgtcttgcca

SEQ ID NO: 112435 - DNA, 25 bp, Homo sapien
tctgaagcctctcacttgagtccct

SEQ ID NO: 112436 - DNA, 25 bp, Homo sapien
tctgaagcctctgacttgagtccct

SEQ ID NO: 112437 - DNA, 25 bp, Homo sapien
tgtaaatattccatgtggttatcac

SEQ ID NO: 112438 - DNA, 25 bp, Homo sapien
tgtaaatattccttgtggttatcac

SEQ ID NO: 112439 - DNA, 25 bp, Homo sapien
caaatttcgtctgttgtatatagac

SEQ ID NO: 112440 - DNA, 25 bp, Homo sapien
caaatttcgtctcttgtatatagac

SEQ ID NO: 112441 - DNA, 25 bp, Homo sapien
ccgatttaggttcgtggtcgtggac

SEQ ID NO: 112442 - DNA, 25 bp, Homo sapien
ccgatttaggttggtggtcgtggac

SEQ ID NO: 112443 - DNA, 25 bp, Homo sapien
acctctaagtgtacgggttgtgtag

SEQ ID NO: 112444 - DNA, 25 bp, Homo sapien
acctctaagtgttcgggttgtgtag

SEQ ID NO: 112445 - DNA, 25 bp, Homo sapien
ctgtcctgtattcctggagtctttt

SEQ ID NO: 112446 - DNA, 25 bp, Homo sapien
ctgtcctgtattgctggagtctttt

SEQ ID NO: 112447 - DNA, 25 bp, Homo sapien
gcgacgtcgtgtatgaccgcccgtc

SEQ ID NO: 112448 - DNA, 25 bp, Homo sapien
gcgacgtcgtgtttgaccgcccgtc

SEQ ID NO: 112449 - DNA, 25 bp, Homo sapien
cgttctccttttcgactctctatgg

SEQ ID NO: 112450 - DNA, 25 bp, Homo sapien
cgttctccttttggactctctatgg

SEQ ID NO: 112451 - DNA, 25 bp, Homo sapien
tactgtacatctctttgatttaagg

SEQ ID NO: 112452 - DNA, 25 bp, Homo sapien
tactgtacatctgtttgatttaagg

SEQ ID NO: 112453 - DNA, 25 bp, Homo sapien
tgtcacgtgacatatgaattctttt

SEQ ID NO: 112454 - DNA, 25 bp, Homo sapien
tgtcacgtgacaaatgaattctttt

SEQ ID NO: 112455 - DNA, 25 bp, Homo sapien
actaccgaggtacttaagtttttat

SEQ ID NO: 112456 - DNA, 25 bp, Homo sapien
actaccgaggtagttaagtttttat

SEQ ID NO: 112457 - DNA, 25 bp, Homo sapien
cacttttacgtctacacgaacgtct

SEQ ID NO: 112458 - DNA, 25 bp, Homo sapien
cacttttacgtcaacacgaacgtct

SEQ ID NO: 112459 - DNA, 25 bp, Homo sapien
gtagtcatcacatgtgaaactattt

SEQ ID NO: 112460 - DNA, 25 bp, Homo sapien
gtagtcatcacaagtgaaactattt

SEQ ID NO: 112461 - DNA, 25 bp, Homo sapien
tcgttagtaccgaaataatactgta

SEQ ID NO: 112462 - DNA, 25 bp, Homo sapien
tcgttagtaccgtaataatactgta

SEQ ID NO: 112463 - DNA, 25 bp, Homo sapien
cacttctgtctgcaccaatcgtgtt

SEQ ID NO: 112464 - DNA, 25 bp, Homo sapien
cacttctgtctggaccaatcgtgtt

SEQ ID NO: 112465 - DNA, 25 bp, Homo sapien
gctcgggtgtcctgacccttgacgg

SEQ ID NO: 112466 - DNA, 25 bp, Homo sapien
gctcgggtgtccagacccttgacgg

SEQ ID NO: 112467 - DNA, 25 bp, Homo sapien
gccggagggtttcacgaccctaatg

SEQ ID NO: 112468 - DNA, 25 bp, Homo sapien
gccggagggtttgacgaccctaatg

SEQ ID NO: 112469 - DNA, 25 bp, Homo sapien
gtccgtgaatttaacaacctctctg

SEQ ID NO: 112470 - DNA, 25 bp, Homo sapien
gtccgtgaattttacaacctctctg

SEQ ID NO: 112471 - DNA, 25 bp, Homo sapien
gccccctacacggacgagtcctttg

SEQ ID NO: 112472 - DNA, 25 bp, Homo sapien
gccccctacacgcacgagtcctttg

SEQ ID NO: 112473 - DNA, 25 bp, Homo sapien
ttctgtgcggagacgcgtccctctc

SEQ ID NO: 112474 - DNA, 25 bp, Homo sapien
ttctgtgcggagtcgcgtccctctc

SEQ ID NO: 112475 - DNA, 25 bp, Homo sapien
gacgttgggtcgtccgtggttctct

SEQ ID NO: 112476 - DNA, 25 bp, Homo sapien
gacgttgggtcgaccgtggttctct

SEQ ID NO: 112477 - DNA, 25 bp, Homo sapien
aaatccttcggaacacttggtttct

SEQ ID NO: 112478 - DNA, 25 bp, Homo sapien
aaatccttcggatcacttggtttct

SEQ ID NO: 112479 - DNA, 25 bp, Homo sapien
tgatgtttatagagagtgtccatcc

SEQ ID NO: 112480 - DNA, 25 bp, Homo sapien
tgatgtttatagtgagtgtccatcc

SEQ ID NO: 112481 - DNA, 25 bp, Homo sapien
tctacggacaagagggacagacttc

SEQ ID NO: 112482 - DNA, 25 bp, Homo sapien
tctacggacaagtgggacagacttc

SEQ ID NO: 112483 - DNA, 25 bp, Homo sapien
ctcagagaatctagggtaggacatc

SEQ ID NO: 112484 - DNA, 25 bp, Homo sapien
ctcagagaatcttgggtaggacatc

SEQ ID NO: 112485 - DNA, 25 bp, Homo sapien
tatcaaacctctcgtcggtgaggaa

SEQ ID NO: 112486 - DNA, 25 bp, Homo sapien
tatcaaacctctggtcggtgaggaa

SEQ ID NO: 112487 - DNA, 25 bp, Homo sapien
ttttagtaccttcttttgaacgaag

SEQ ID NO: 112488 - DNA, 25 bp, Homo sapien
ttttagtaccttgttttgaacgaag

SEQ ID NO: 112489 - DNA, 25 bp, Homo sapien
aagtccacccggtgccagacgcagt

SEQ ID NO: 112490 - DNA, 25 bp, Homo sapien
aagtccacccggagccagacgcagt

SEQ ID NO: 112491 - DNA, 25 bp, Homo sapien
ctcattggaggtaggctccaccacg

SEQ ID NO: 112492 - DNA, 25 bp, Homo sapien
ctcattggaggttggctccaccacg

SEQ ID NO: 112493 - DNA, 25 bp, Homo sapien
tagcgtgacggaagagggaccccca

SEQ ID NO: 112494 - DNA, 25 bp, Homo sapien
tagcgtgacggatgagggaccccca

SEQ ID NO: 112495 - DNA, 25 bp, Homo sapien
ggacttcgacataggtaatcccacc

SEQ ID NO: 112496 - DNA, 25 bp, Homo sapien
ggacttcgacattggtaatcccacc

SEQ ID NO: 112497 - DNA, 25 bp, Homo sapien
cgtagtcgtctttgggacccacagc

SEQ ID NO: 112498 - DNA, 25 bp, Homo sapien
cgtagtcgtcttagggacccacagc

SEQ ID NO: 112499 - DNA, 25 bp, Homo sapien
aggccagccggtagaagaagtcccc

SEQ ID NO: 112500 - DNA, 25 bp, Homo sapien
aggccagccggttgaagaagtcccc

SEQ ID NO: 112501 - DNA, 25 bp, Homo sapien
accggtaacgaggacagtccgacga

SEQ ID NO: 112502 - DNA, 25 bp, Homo sapien
accggtaacgagcacagtccgacga

SEQ ID NO: 112503 - DNA, 25 bp, Homo sapien
gaatttacgaacaacgtgagtcagt

SEQ ID NO: 112504 - DNA, 25 bp, Homo sapien
gaatttacgaactacgtgagtcagt

SEQ ID NO: 112505 - DNA, 25 bp, Homo sapien
cgaaagaagaaacacgagtgtcccg

SEQ ID NO: 112506 - DNA, 25 bp, Homo sapien
cgaaagaagaaagacgagtgtcccg

SEQ ID NO: 112507 - DNA, 25 bp, Homo sapien
cacagacgggagtccctgagtcctc

SEQ ID NO: 112508 - DNA, 25 bp, Homo sapien
cacagacgggagaccctgagtcctc

SEQ ID NO: 112509 - DNA, 25 bp, Homo sapien
aacgggatccaccacagtctcgtcg

SEQ ID NO: 112510 - DNA, 25 bp, Homo sapien
aacgggatccacgacagtctcgtcg

SEQ ID NO: 112511 - DNA, 25 bp, Homo sapien
ttaagcgcaacgtctcaccgtctgg

SEQ ID NO: 112512 - DNA, 25 bp, Homo sapien
ttaagcgcaacgactcaccgtctgg

SEQ ID NO: 112513 - DNA, 25 bp, Homo sapien
cgccttggtggctactacgaagtgt

SEQ ID NO: 112514 - DNA, 25 bp, Homo sapien
cgccttggtggcaactacgaagtgt

SEQ ID NO: 112515 - DNA, 25 bp, Homo sapien
caaacgacaaaggacacggcgtgtc

SEQ ID NO: 112516 - DNA, 25 bp, Homo sapien
caaacgacaaagcacacggcgtgtc

SEQ ID NO: 112517 - DNA, 25 bp, Homo sapien
cgaataaagaagacggtcggtgtct

SEQ ID NO: 112518 - DNA, 25 bp, Homo sapien
cgaataaagaagtcggtcggtgtct

SEQ ID NO: 112519 - DNA, 25 bp, Homo sapien
cgctagagggcatggttcgcgactt

SEQ ID NO: 112520 - DNA, 25 bp, Homo sapien
cgctagagggcaaggttcgcgactt

SEQ ID NO: 112521 - DNA, 25 bp, Homo sapien
tacgaattgtatcaattccgctgtc

SEQ ID NO: 112522 - DNA, 25 bp, Homo sapien
tacgaattgtatgaattccgctgtc

SEQ ID NO: 112523 - DNA, 25 bp, Homo sapien
taggttcggggactgtctgcagacg

SEQ ID NO: 112524 - DNA, 25 bp, Homo sapien
taggttcggggagtgtctgcagacg

SEQ ID NO: 112525 - DNA, 25 bp, Homo sapien
tgtatgtttcgtcagaatcttgcca

SEQ ID NO: 112526 - DNA, 25 bp, Homo sapien
tgtatgtttcgtgagaatcttgcca

SEQ ID NO: 112527 - DNA, 25 bp, Homo sapien
cacgtccagaggatcttcgaccacg

SEQ ID NO: 112528 - DNA, 25 bp, Homo sapien
cacgtccagaggttcttcgaccacg

SEQ ID NO: 112529 - DNA, 25 bp, Homo sapien
cctccgctctgagtccgtgactggg

SEQ ID NO: 112530 - DNA, 25 bp, Homo sapien
cctccgctctgactccgtgactggg

SEQ ID NO: 112531 - DNA, 25 bp, Homo sapien
tcacctcgcgactctgtgtctcggg

SEQ ID NO: 112532 - DNA, 25 bp, Homo sapien
tcacctcgcgacactgtgtctcggg

SEQ ID NO: 112533 - DNA, 25 bp, Homo sapien
ctaatctctcccagggtactaggtc

SEQ ID NO: 112534 - DNA, 25 bp, Homo sapien
ctaatctctccctgggtactaggtc

SEQ ID NO: 112535 - DNA, 25 bp, Homo sapien
tagtagtccccctgttagctacttc

SEQ ID NO: 112536 - DNA, 25 bp, Homo sapien
tagtagtcccccagttagctacttc

SEQ ID NO: 112537 - DNA, 25 bp, Homo sapien
tgtgtcctaccgtcctgttcgtgac

SEQ ID NO: 112538 - DNA, 25 bp, Homo sapien
tgtgtcctaccgacctgttcgtgac

SEQ ID NO: 112539 - DNA, 25 bp, Homo sapien
ttggtgacagaggacatctttagac

SEQ ID NO: 112540 - DNA, 25 bp, Homo sapien
ttggtgacagagcacatctttagac

SEQ ID NO: 112541 - DNA, 25 bp, Homo sapien
gtcagagggtaatcgggtccaagta

SEQ ID NO: 112542 - DNA, 25 bp, Homo sapien
gtcagagggtaaacgggtccaagta

SEQ ID NO: 112543 - DNA, 25 bp, Homo sapien
tgtttaggtcgatcggggaacctag

SEQ ID NO: 112544 - DNA, 25 bp, Homo sapien
tgtttaggtcgaacggggaacctag

SEQ ID NO: 112545 - DNA, 25 bp, Homo sapien
cttggttcggacacgtggaggcgga

SEQ ID NO: 112546 - DNA, 25 bp, Homo sapien
cttggttcggactcgtggaggcgga

SEQ ID NO: 112547 - DNA, 25 bp, Homo sapien
tttcctctgggtcgtcggagtttta

SEQ ID NO: 112548 - DNA, 25 bp, Homo sapien
tttcctctgggtggtcggagtttta

SEQ ID NO: 112549 - DNA, 25 bp, Homo sapien
aaccgaagtggtgagtccgggtcca

SEQ ID NO: 112550 - DNA, 25 bp, Homo sapien
aaccgaagtggtcagtccgggtcca

SEQ ID NO: 112551 - DNA, 25 bp, Homo sapien
gccgtaccttccgctccgaaacgat

SEQ ID NO: 112552 - DNA, 25 bp, Homo sapien
gccgtaccttcccctccgaaacgat

SEQ ID NO: 112553 - DNA, 25 bp, Homo sapien
atagacgtgaccccttacactgtaa

SEQ ID NO: 112554 - DNA, 25 bp, Homo sapien
atagacgtgaccgcttacactgtaa

SEQ ID NO: 112555 - DNA, 25 bp, Homo sapien
tttcgaggctgacgtggttcatgaa

SEQ ID NO: 112556 - DNA, 25 bp, Homo sapien
tttcgaggctgaggtggttcatgaa

SEQ ID NO: 112557 - DNA, 25 bp, Homo sapien
ggttagttggtggtcatcatatgta

SEQ ID NO: 112558 - DNA, 25 bp, Homo sapien
ggttagttggtgctcatcatatgta

SEQ ID NO: 112559 - DNA, 25 bp, Homo sapien
cgctggtggtgctactcgaacggta

SEQ ID NO: 112560 - DNA, 25 bp, Homo sapien
cgctggtggtgcaactcgaacggta

SEQ ID NO: 112561 - DNA, 25 bp, Homo sapien
gttgacgtgcggacacataccggta

SEQ ID NO: 112562 - DNA, 25 bp, Homo sapien
gttgacgtgcggtcacataccggta

SEQ ID NO: 112563 - DNA, 25 bp, Homo sapien
ccttcaggtccgtcaacatgtcgta

SEQ ID NO: 112564 - DNA, 25 bp, Homo sapien
ccttcaggtccgacaacatgtcgta

SEQ ID NO: 112565 - DNA, 25 bp, Homo sapien
acgtcttttcttatacgatgttcag

SEQ ID NO: 112566 - DNA, 25 bp, Homo sapien
acgtcttttcttttacgatgttcag

SEQ ID NO: 112567 - DNA, 25 bp, Homo sapien
caacgtcaatgtttttcatgttggt

SEQ ID NO: 112568 - DNA, 25 bp, Homo sapien
caacgtcaatgtatttcatgttggt

SEQ ID NO: 112569 - DNA, 25 bp, Homo sapien
cgtctatgtttatccgaccttagta

SEQ ID NO: 112570 - DNA, 25 bp, Homo sapien
cgtctatgtttaaccgaccttagta

SEQ ID NO: 112571 - DNA, 25 bp, Homo sapien
cggaattcctcgagtaccctaggaa

SEQ ID NO: 112572 - DNA, 25 bp, Homo sapien
cggaattcctcgtgtaccctaggaa

SEQ ID NO: 112573 - DNA, 25 bp, Homo sapien
gctgatgtttcctctccgataaacc

SEQ ID NO: 112574 - DNA, 25 bp, Homo sapien
gctgatgtttccactccgataaacc

SEQ ID NO: 112575 - DNA, 25 bp, Homo sapien
gtccttccacgcacgccagaaggtg

SEQ ID NO: 112576 - DNA, 25 bp, Homo sapien
gtccttccacgctcgccagaaggtg

SEQ ID NO: 112577 - DNA, 25 bp, Homo sapien
ctttcacccactctcgacgccggcg

SEQ ID NO: 112578 - DNA, 25 bp, Homo sapien
ctttcacccactgtcgacgccggcg

SEQ ID NO: 112579 - DNA, 25 bp, Homo sapien
cagtgacatccactcgttacagagc

SEQ ID NO: 112580 - DNA, 25 bp, Homo sapien
cagtgacatccagtcgttacagagc

SEQ ID NO: 112581 - DNA, 25 bp, Homo sapien
agtttctacgacattctaagatgtt

SEQ ID NO: 112582 - DNA, 25 bp, Homo sapien
agtttctacgactttctaagatgtt

SEQ ID NO: 112583 - DNA, 25 bp, Homo sapien
tagttcggtcacacccgacgaggtc

SEQ ID NO: 112584 - DNA, 25 bp, Homo sapien
tagttcggtcactcccgacgaggtc

SEQ ID NO: 112585 - DNA, 25 bp, Homo sapien
actgacgtcatactcgtcgacgatc

SEQ ID NO: 112586 - DNA, 25 bp, Homo sapien
actgacgtcatagtcgtcgacgatc

SEQ ID NO: 112587 - DNA, 25 bp, Homo sapien
acaccctagctagtcgtgacggtcg

SEQ ID NO: 112588 - DNA, 25 bp, Homo sapien
acaccctagctactcgtgacggtcg

SEQ ID NO: 112589 - DNA, 25 bp, Homo sapien
cgtgcacccagtctaacgagtcggg

SEQ ID NO: 112590 - DNA, 25 bp, Homo sapien
cgtgcacccagtgtaacgagtcggg

SEQ ID NO: 112591 - DNA, 25 bp, Homo sapien
caagcacctacttcggaaatacatg

SEQ ID NO: 112592 - DNA, 25 bp, Homo sapien
caagcacctactacggaaatacatg

SEQ ID NO: 112593 - DNA, 25 bp, Homo sapien
atcgaataacacttactgactggtc

SEQ ID NO: 112594 - DNA, 25 bp, Homo sapien
atcgaataacacatactgactggtc

SEQ ID NO: 112595 - DNA, 25 bp, Homo sapien
aggaactgaacaacggactagtgta

SEQ ID NO: 112596 - DNA, 25 bp, Homo sapien
aggaactgaacatcggactagtgta

SEQ ID NO: 112597 - DNA, 25 bp, Homo sapien
cattggcatgaatcccgaagacgtt

SEQ ID NO: 112598 - DNA, 25 bp, Homo sapien
cattggcatgaaacccgaagacgtt

SEQ ID NO: 112599 - DNA, 25 bp, Homo sapien
tttgtaccgctttcctcgagagaga

SEQ ID NO: 112600 - DNA, 25 bp, Homo sapien
tttgtaccgcttacctcgagagaga

SEQ ID NO: 112601 - DNA, 25 bp, Homo sapien
acctttggcagaccatgtagaacat

SEQ ID NO: 112602 - DNA, 25 bp, Homo sapien
acctttggcagagcatgtagaacat

SEQ ID NO: 112603 - DNA, 25 bp, Homo sapien
ccgtccttggagagcatcaacgaag

SEQ ID NO: 112604 - DNA, 25 bp, Homo sapien
ccgtccttggagtgcatcaacgaag

SEQ ID NO: 112605 - DNA, 25 bp, Homo sapien
acatcttgtgtgtcgttctcgaatt

SEQ ID NO: 112606 - DNA, 25 bp, Homo sapien
acatcttgtgtgacgttctcgaatt

SEQ ID NO: 112607 - DNA, 25 bp, Homo sapien
tctcctttccggatcttgacttact

SEQ ID NO: 112608 - DNA, 25 bp, Homo sapien
tctcctttccggttcttgacttact

SEQ ID NO: 112609 - DNA, 25 bp, Homo sapien
taccagtatcaatatcgtccccact

SEQ ID NO: 112610 - DNA, 25 bp, Homo sapien
taccagtatcaaaatcgtccccact

SEQ ID NO: 112611 - DNA, 25 bp, Homo sapien
tcagtctcgacaataccggcaacct

SEQ ID NO: 112612 - DNA, 25 bp, Homo sapien
tcagtctcgacattaccggcaacct

SEQ ID NO: 112613 - DNA, 25 bp, Homo sapien
gacgtccgacggacctgaatctcgt

SEQ ID NO: 112614 - DNA, 25 bp, Homo sapien
gacgtccgacggtcctgaatctcgt

SEQ ID NO: 112615 - DNA, 25 bp, Homo sapien
ttgacgtcggttttccagattgtcg

SEQ ID NO: 112616 - DNA, 25 bp, Homo sapien
ttgacgtcggttatccagattgtcg

SEQ ID NO: 112617 - DNA, 25 bp, Homo sapien
gaattgttcttcctgcagaagaagc

SEQ ID NO: 112618 - DNA, 25 bp, Homo sapien
gaattgttcttcgtgcagaagaagc

SEQ ID NO: 112619 - DNA, 25 bp, Homo sapien
agtgagaccggcatgaccggcatga

SEQ ID NO: 112620 - DNA, 25 bp, Homo sapien
agtgagaccggcttgaccggcatga

SEQ ID NO: 112621 - DNA, 25 bp, Homo sapien
atcatcgtcatttcgcgggacttga

SEQ ID NO: 112622 - DNA, 25 bp, Homo sapien
atcatcgtcattacgcgggacttga

SEQ ID NO: 112623 - DNA, 25 bp, Homo sapien
gaggggtcggatacggtgtgcataa

SEQ ID NO: 112624 - DNA, 25 bp, Homo sapien
gaggggtcggattcggtgtgcataa

SEQ ID NO: 112625 - DNA, 25 bp, Homo sapien
tggtaatgtaaatctggacccgaaa

SEQ ID NO: 112626 - DNA, 25 bp, Homo sapien
tggtaatgtaaaactggacccgaaa

SEQ ID NO: 112627 - DNA, 25 bp, Homo sapien
ggtacatccgacagaagattttaaa

SEQ ID NO: 112628 - DNA, 25 bp, Homo sapien
ggtacatccgactgaagattttaaa

SEQ ID NO: 112629 - DNA, 25 bp, Homo sapien
attctacatctttttcgatggtaat

SEQ ID NO: 112630 - DNA, 25 bp, Homo sapien
attctacatcttattcgatggtaat

SEQ ID NO: 112631 - DNA, 25 bp, Homo sapien
ttctgtatactttttacaacagtaa

SEQ ID NO: 112632 - DNA, 25 bp, Homo sapien
ttctgtatacttattacaacagtaa

SEQ ID NO: 112633 - DNA, 25 bp, Homo sapien
aacccacgttgtcgagaccccagag

SEQ ID NO: 112634 - DNA, 25 bp, Homo sapien
aacccacgttgtggagaccccagag

SEQ ID NO: 112635 - DNA, 25 bp, Homo sapien
aggaccacggtctttgtccccactg

SEQ ID NO: 112636 - DNA, 25 bp, Homo sapien
aggaccacggtcattgtccccactg

SEQ ID NO: 112637 - DNA, 25 bp, Homo sapien
ctgaaggtcctgacattcttttatt

SEQ ID NO: 112638 - DNA, 25 bp, Homo sapien
ctgaaggtcctgtcattcttttatt

SEQ ID NO: 112639 - DNA, 25 bp, Homo sapien
gaacgtgtcgtttcacttctttcaa

SEQ ID NO: 112640 - DNA, 25 bp, Homo sapien
gaacgtgtcgttacacttctttcaa

SEQ ID NO: 112641 - DNA, 25 bp, Homo sapien
caggtggtgttgagtttctgtcgcc

SEQ ID NO: 112642 - DNA, 25 bp, Homo sapien
caggtggtgttgtgtttctgtcgcc

SEQ ID NO: 112643 - DNA, 25 bp, Homo sapien
cagtttcgatatcgttttttaacga

SEQ ID NO: 112644 - DNA, 25 bp, Homo sapien
cagtttcgatatggttttttaacga

SEQ ID NO: 112645 - DNA, 25 bp, Homo sapien
gtctcgtgattcatttactttatga

SEQ ID NO: 112646 - DNA, 25 bp, Homo sapien
gtctcgtgattcttttactttatga

SEQ ID NO: 112647 - DNA, 25 bp, Homo sapien
cttattgaagttctcgatctttgag

SEQ ID NO: 112648 - DNA, 25 bp, Homo sapien
cttattgaagttgtcgatctttgag

SEQ ID NO: 112649 - DNA, 25 bp, Homo sapien
tgaaaggtgtacagttttctggagt

SEQ ID NO: 112650 - DNA, 25 bp, Homo sapien
tgaaaggtgtactgttttctggagt

SEQ ID NO: 112651 - DNA, 25 bp, Homo sapien
atccgaattatactcacagaagaga

SEQ ID NO: 112652 - DNA, 25 bp, Homo sapien
atccgaattatagtcacagaagaga

SEQ ID NO: 112653 - DNA, 25 bp, Homo sapien
gacccttcctgaactctggacaggg

SEQ ID NO: 112654 - DNA, 25 bp, Homo sapien
gacccttcctgatctctggacaggg

SEQ ID NO: 112655 - DNA, 25 bp, Homo sapien
gttatttcctctactccggaaatga

SEQ ID NO: 112656 - DNA, 25 bp, Homo sapien
gttatttcctcttctccggaaatga

SEQ ID NO: 112657 - DNA, 25 bp, Homo sapien
tccgatttactctccctggaccgaa

SEQ ID NO: 112658 - DNA, 25 bp, Homo sapien
tccgatttactcaccctggaccgaa

SEQ ID NO: 112659 - DNA, 25 bp, Homo sapien
gtggggtcgcaaaccccggaagaga

SEQ ID NO: 112660 - DNA, 25 bp, Homo sapien
gtggggtcgcaatccccggaagaga

SEQ ID NO: 112661 - DNA, 25 bp, Homo sapien
tcgggtggacagcacctccagggaa

SEQ ID NO: 112662 - DNA, 25 bp, Homo sapien
tcgggtggacaggacctccagggaa

SEQ ID NO: 112663 - DNA, 25 bp, Homo sapien
cgggaggttcgacatgcagacagaa

SEQ ID NO: 112664 - DNA, 25 bp, Homo sapien
cgggaggttcgagatgcagacagaa

SEQ ID NO: 112665 - DNA, 25 bp, Homo sapien
gtcaaagtcggtaacctggaaaatc

SEQ ID NO: 112666 - DNA, 25 bp, Homo sapien
gtcaaagtcggttacctggaaaatc

SEQ ID NO: 112667 - DNA, 25 bp, Homo sapien
aacgtaagatgtactttgtaaacca

SEQ ID NO: 112668 - DNA, 25 bp, Homo sapien
aacgtaagatgttctttgtaaacca

SEQ ID NO: 112669 - DNA, 25 bp, Homo sapien
gaaacttttacgtctgatggaatca

SEQ ID NO: 112670 - DNA, 25 bp, Homo sapien
gaaacttttacgactgatggaatca

SEQ ID NO: 112671 - DNA, 25 bp, Homo sapien
gttcgtgttatctaaacactacttg

SEQ ID NO: 112672 - DNA, 25 bp, Homo sapien
gttcgtgttatcaaaacactacttg

SEQ ID NO: 112673 - DNA, 25 bp, Homo sapien
gccctcaagaacagacacacgttag

SEQ ID NO: 112674 - DNA, 25 bp, Homo sapien
gccctcaagaactgacacacgttag

SEQ ID NO: 112675 - DNA, 25 bp, Homo sapien
gacactcatagaaccgggccgtgtg

SEQ ID NO: 112676 - DNA, 25 bp, Homo sapien
gacactcatagatccgggccgtgtg

SEQ ID NO: 112677 - DNA, 25 bp, Homo sapien
acccgcacggacacggacgtcgagg

SEQ ID NO: 112678 - DNA, 25 bp, Homo sapien
acccgcacggactcggacgtcgagg

SEQ ID NO: 112679 - DNA, 25 bp, Homo sapien
ggtccccgagacgtccggtcgagac

SEQ ID NO: 112680 - DNA, 25 bp, Homo sapien
ggtccccgagacctccggtcgagac

SEQ ID NO: 112681 - DNA, 25 bp, Homo sapien
agttttacaccacaagcaagacggt

SEQ ID NO: 112682 - DNA, 25 bp, Homo sapien
agttttacaccagaagcaagacggt

SEQ ID NO: 112683 - DNA, 25 bp, Homo sapien
aacagtacttgatataggcattgga

SEQ ID NO: 112684 - DNA, 25 bp, Homo sapien
aacagtacttgaaataggcattgga

SEQ ID NO: 112685 - DNA, 25 bp, Homo sapien
aaggtggagtctttacgacacgaag

SEQ ID NO: 112686 - DNA, 25 bp, Homo sapien
aaggtggagtctatacgacacgaag

SEQ ID NO: 112687 - DNA, 25 bp, Homo sapien
accgtaactgtatccgtcgacaaga

SEQ ID NO: 112688 - DNA, 25 bp, Homo sapien
accgtaactgtaaccgtcgacaaga

SEQ ID NO: 112689 - DNA, 25 bp, Homo sapien
accgttactactcaccgaagagaga

SEQ ID NO: 112690 - DNA, 25 bp, Homo sapien
accgttactactgaccgaagagaga

SEQ ID NO: 112691 - DNA, 25 bp, Homo sapien
acgtcttttacgaaagacgactaac

SEQ ID NO: 112692 - DNA, 25 bp, Homo sapien
acgtcttttacgtaagacgactaac

SEQ ID NO: 112693 - DNA, 25 bp, Homo sapien
agtagacgttcagtaaatcgctatt

SEQ ID NO: 112694 - DNA, 25 bp, Homo sapien
agtagacgttcactaaatcgctatt

SEQ ID NO: 112695 - DNA, 25 bp, Homo sapien
acggcacccgatgtcttcgtctatg

SEQ ID NO: 112696 - DNA, 25 bp, Homo sapien
acggcacccgatctcttcgtctatg

SEQ ID NO: 112697 - DNA, 25 bp, Homo sapien
tgcggaagggatcgtcgtttctacc

SEQ ID NO: 112698 - DNA, 25 bp, Homo sapien
tgcggaagggatggtcgtttctacc

SEQ ID NO: 112699 - DNA, 25 bp, Homo sapien
gggaaactagagtcggttctgacac

SEQ ID NO: 112700 - DNA, 25 bp, Homo sapien
gggaaactagagacggttctgacac

SEQ ID NO: 112701 - DNA, 25 bp, Homo sapien
aggaactactacctcggttcgtccc

SEQ ID NO: 112702 - DNA, 25 bp, Homo sapien
aggaactactacgtcggttcgtccc

SEQ ID NO: 112703 - DNA, 25 bp, Homo sapien
gaccgtcgagaagacgtgtctcggc

SEQ ID NO: 112704 - DNA, 25 bp, Homo sapien
gaccgtcgagaacacgtgtctcggc

SEQ ID NO: 112705 - DNA, 25 bp, Homo sapien
taggctgaagaacctacgtaggact

SEQ ID NO: 112706 - DNA, 25 bp, Homo sapien
taggctgaagaagctacgtaggact

SEQ ID NO: 112707 - DNA, 25 bp, Homo sapien
ttggacctggtaagaactgtctcga

SEQ ID NO: 112708 - DNA, 25 bp, Homo sapien
ttggacctggtatgaactgtctcga

SEQ ID NO: 112709 - DNA, 25 bp, Homo sapien
ttagaaacgtgaataaaccgtgttc

SEQ ID NO: 112710 - DNA, 25 bp, Homo sapien
ttagaaacgtgattaaaccgtgttc

SEQ ID NO: 112711 - DNA, 25 bp, Homo sapien
gttagaaggacagtaagcagtctgc

SEQ ID NO: 112712 - DNA, 25 bp, Homo sapien
gttagaaggacactaagcagtctgc

SEQ ID NO: 112713 - DNA, 25 bp, Homo sapien
aagagtgacaggaagtccatgtgtc

SEQ ID NO: 112714 - DNA, 25 bp, Homo sapien
aagagtgacaggtagtccatgtgtc

SEQ ID NO: 112715 - DNA, 25 bp, Homo sapien
gaagaagagagagttaagtcccgtc

SEQ ID NO: 112716 - DNA, 25 bp, Homo sapien
gaagaagagagacttaagtcccgtc

SEQ ID NO: 112717 - DNA, 25 bp, Homo sapien
aaggtagtaagactattgtgcccgt

SEQ ID NO: 112718 - DNA, 25 bp, Homo sapien
aaggtagtaagagtattgtgcccgt

SEQ ID NO: 112719 - DNA, 25 bp, Homo sapien
gaagggtgtcgaggagtgtctcccc

SEQ ID NO: 112720 - DNA, 25 bp, Homo sapien
gaagggtgtcgacgagtgtctcccc

SEQ ID NO: 112721 - DNA, 25 bp, Homo sapien
acggagggtcctaaagatcccctac

SEQ ID NO: 112722 - DNA, 25 bp, Homo sapien
acggagggtccttaagatcccctac

SEQ ID NO: 112723 - DNA, 25 bp, Homo sapien
cgatgtgcgtctttccttccaccta

SEQ ID NO: 112724 - DNA, 25 bp, Homo sapien
cgatgtgcgtctatccttccaccta

SEQ ID NO: 112725 - DNA, 25 bp, Homo sapien
gtttagtctgtcacttagtccctaa

SEQ ID NO: 112726 - DNA, 25 bp, Homo sapien
gtttagtctgtctcttagtccctaa

SEQ ID NO: 112727 - DNA, 25 bp, Homo sapien
tgtcttttggtctttacacctctga

SEQ ID NO: 112728 - DNA, 25 bp, Homo sapien
tgtcttttggtcattacacctctga

SEQ ID NO: 112729 - DNA, 25 bp, Homo sapien
ctgtggactgtcattaacaattgat

SEQ ID NO: 112730 - DNA, 25 bp, Homo sapien
ctgtggactgtctttaacaattgat

SEQ ID NO: 112731 - DNA, 25 bp, Homo sapien
tgatactagactgtcgtggtttctt

SEQ ID NO: 112732 - DNA, 25 bp, Homo sapien
tgatactagactctcgtggtttctt

SEQ ID NO: 112733 - DNA, 25 bp, Homo sapien
gggtgagagacctctctgtttactt

SEQ ID NO: 112734 - DNA, 25 bp, Homo sapien
gggtgagagaccactctgtttactt

SEQ ID NO: 112735 - DNA, 25 bp, Homo sapien
aagactggagaagtctttggtcgac

SEQ ID NO: 112736 - DNA, 25 bp, Homo sapien
aagactggagaactctttggtcgac

SEQ ID NO: 112737 - DNA, 25 bp, Homo sapien
agactcgtcgagtagagcctccaaa

SEQ ID NO: 112738 - DNA, 25 bp, Homo sapien
agactcgtcgagaagagcctccaaa

SEQ ID NO: 112739 - DNA, 25 bp, Homo sapien
ccgctagatagaagtctgtcggttc

SEQ ID NO: 112740 - DNA, 25 bp, Homo sapien
ccgctagatagatgtctgtcggttc

SEQ ID NO: 112741 - DNA, 25 bp, Homo sapien
ccctatcgtctctgtgtgtcttctc

SEQ ID NO: 112742 - DNA, 25 bp, Homo sapien
ccctatcgtctcagtgtgtcttctc

SEQ ID NO: 112743 - DNA, 25 bp, Homo sapien
gtctaacttctcatgttctatcgtg

SEQ ID NO: 112744 - DNA, 25 bp, Homo sapien
gtctaacttctcttgttctatcgtg

SEQ ID NO: 112745 - DNA, 25 bp, Homo sapien
gttctcccgtgtccttgttcatcag

SEQ ID NO: 112746 - DNA, 25 bp, Homo sapien
gttctcccgtgtgcttgttcatcag

SEQ ID NO: 112747 - DNA, 25 bp, Homo sapien
gtctccgaccggagtgtttactctt

SEQ ID NO: 112748 - DNA, 25 bp, Homo sapien
gtctccgaccggtgtgtttactctt

SEQ ID NO: 112749 - DNA, 25 bp, Homo sapien
ggtcggagaccttgggttgttacat

SEQ ID NO: 112750 - DNA, 25 bp, Homo sapien
ggtcggagacctagggttgttacat

SEQ ID NO: 112751 - DNA, 25 bp, Homo sapien
tcccagatcccgtaccggtatggag

SEQ ID NO: 112752 - DNA, 25 bp, Homo sapien
tcccagatcccgaaccggtatggag

SEQ ID NO: 112753 - DNA, 25 bp, Homo sapien
gtccgaagattccacgtcaggggga

SEQ ID NO: 112754 - DNA, 25 bp, Homo sapien
gtccgaagattcgacgtcaggggga

SEQ ID NO: 112755 - DNA, 25 bp, Homo sapien
tatgtcttggagacgtcgacgaaag

SEQ ID NO: 112756 - DNA, 25 bp, Homo sapien
tatgtcttggagtcgtcgacgaaag

SEQ ID NO: 112757 - DNA, 25 bp, Homo sapien
gaacgggtagaattcgaggacgaac

SEQ ID NO: 112758 - DNA, 25 bp, Homo sapien
gaacgggtagaaatcgaggacgaac

SEQ ID NO: 112759 - DNA, 25 bp, Homo sapien
cacgagacctcaagaactggaacag

SEQ ID NO: 112760 - DNA, 25 bp, Homo sapien
cacgagacctcatgaactggaacag

SEQ ID NO: 112761 - DNA, 25 bp, Homo sapien
aagtttctagactaactcaaacgag

SEQ ID NO: 112762 - DNA, 25 bp, Homo sapien
aagtttctagacaaactcaaacgag

SEQ ID NO: 112763 - DNA, 25 bp, Homo sapien
ggtggaactacgacagagtcgtcga

SEQ ID NO: 112764 - DNA, 25 bp, Homo sapien
ggtggaactacgtcagagtcgtcga

SEQ ID NO: 112765 - DNA, 25 bp, Homo sapien
gagtagttgataggtgaccttcgtc

SEQ ID NO: 112766 - DNA, 25 bp, Homo sapien
gagtagttgatacgtgaccttcgtc

SEQ ID NO: 112767 - DNA, 25 bp, Homo sapien
gtctatagtaaatgtagactccttc

SEQ ID NO: 112768 - DNA, 25 bp, Homo sapien
gtctatagtaaaagtagactccttc

SEQ ID NO: 112769 - DNA, 25 bp, Homo sapien
cacaaaagagacgtcgtccgtcacc

SEQ ID NO: 112770 - DNA, 25 bp, Homo sapien
cacaaaagagacctcgtccgtcacc

SEQ ID NO: 112771 - DNA, 25 bp, Homo sapien
gacccagaaggactcgttcgtctca

SEQ ID NO: 112772 - DNA, 25 bp, Homo sapien
gacccagaaggagtcgttcgtctca

SEQ ID NO: 112773 - DNA, 25 bp, Homo sapien
taccaaaaggagtagtcgggtgtcg

SEQ ID NO: 112774 - DNA, 25 bp, Homo sapien
taccaaaaggagaagtcgggtgtcg

SEQ ID NO: 112775 - DNA, 25 bp, Homo sapien
gacaaagtttacaaactggaactac

SEQ ID NO: 112776 - DNA, 25 bp, Homo sapien
gacaaagtttactaactggaactac

SEQ ID NO: 112777 - DNA, 25 bp, Homo sapien
gtaaagagggatttaactagatatt

SEQ ID NO: 112778 - DNA, 25 bp, Homo sapien
gtaaagagggatataactagatatt

SEQ ID NO: 112779 - DNA, 25 bp, Homo sapien
catcatgtcgggtgtcaagggtctt

SEQ ID NO: 112780 - DNA, 25 bp, Homo sapien
catcatgtcgggagtcaagggtctt

SEQ ID NO: 112781 - DNA, 25 bp, Homo sapien
tcctcgtcggagagtaacaggttta

SEQ ID NO: 112782 - DNA, 25 bp, Homo sapien
tcctcgtcggagtgtaacaggttta

SEQ ID NO: 112783 - DNA, 25 bp, Homo sapien
tttggctaagtttaacagcgaccta

SEQ ID NO: 112784 - DNA, 25 bp, Homo sapien
tttggctaagttaaacagcgaccta

SEQ ID NO: 112785 - DNA, 25 bp, Homo sapien
ggaccggaccggaaaatgacaccat

SEQ ID NO: 112786 - DNA, 25 bp, Homo sapien
ggaccggaccggtaaatgacaccat

SEQ ID NO: 112787 - DNA, 25 bp, Homo sapien
acgacggaaggcaagggaccacgat

SEQ ID NO: 112788 - DNA, 25 bp, Homo sapien
acgacggaaggctagggaccacgat

SEQ ID NO: 112789 - DNA, 25 bp, Homo sapien
cccgacggaagtcgaggccaccgtt

SEQ ID NO: 112790 - DNA, 25 bp, Homo sapien
cccgacggaagtggaggccaccgtt

SEQ ID NO: 112791 - DNA, 25 bp, Homo sapien
tgtccccggagttggggtccccgac

SEQ ID NO: 112792 - DNA, 25 bp, Homo sapien
tgtccccggagtaggggtccccgac

SEQ ID NO: 112793 - DNA, 25 bp, Homo sapien
ggtccaatcgaaagggtcgagcctc

SEQ ID NO: 112794 - DNA, 25 bp, Homo sapien
ggtccaatcgaatgggtcgagcctc

SEQ ID NO: 112795 - DNA, 25 bp, Homo sapien
agccgacctccgaagaggcggcagc

SEQ ID NO: 112796 - DNA, 25 bp, Homo sapien
agccgacctccgtagaggcggcagc

SEQ ID NO: 112797 - DNA, 25 bp, Homo sapien
gctacacagagtcaggcgtccggtg

SEQ ID NO: 112798 - DNA, 25 bp, Homo sapien
gctacacagagtgaggcgtccggtg

SEQ ID NO: 112799 - DNA, 25 bp, Homo sapien
tcataacagtcagaagcctcagagg

SEQ ID NO: 112800 - DNA, 25 bp, Homo sapien
tcataacagtcacaagcctcagagg

SEQ ID NO: 112801 - DNA, 25 bp, Homo sapien
attgacagtggtaggcacccgagtg

SEQ ID NO: 112802 - DNA, 25 bp, Homo sapien
attgacagtggttggcacccgagtg

SEQ ID NO: 112803 - DNA, 25 bp, Homo sapien
gcccgtggtctcgctccacgagtcg

SEQ ID NO: 112804 - DNA, 25 bp, Homo sapien
gcccgtggtctccctccacgagtcg

SEQ ID NO: 112805 - DNA, 25 bp, Homo sapien
tctcaggactacctggtctcccgag

SEQ ID NO: 112806 - DNA, 25 bp, Homo sapien
tctcaggactacgtggtctcccgag

SEQ ID NO: 112807 - DNA, 25 bp, Homo sapien
gggacctggcacgtccctgactcga

SEQ ID NO: 112808 - DNA, 25 bp, Homo sapien
gggacctggcacctccctgactcga

SEQ ID NO: 112809 - DNA, 25 bp, Homo sapien
gttccagtttccacttgacgtcgag

SEQ ID NO: 112810 - DNA, 25 bp, Homo sapien
gttccagtttcctcttgacgtcgag

SEQ ID NO: 112811 - DNA, 25 bp, Homo sapien
gtcttgattatagtccttgtaccgc

SEQ ID NO: 112812 - DNA, 25 bp, Homo sapien
gtcttgattatactccttgtaccgc

SEQ ID NO: 112813 - DNA, 25 bp, Homo sapien
tgacctcaatcgaccatcagtcagg

SEQ ID NO: 112814 - DNA, 25 bp, Homo sapien
tgacctcaatcgtccatcagtcagg

SEQ ID NO: 112815 - DNA, 25 bp, Homo sapien
actctaccctcactcttgtcgttgg

SEQ ID NO: 112816 - DNA, 25 bp, Homo sapien
actctaccctcagtcttgtcgttgg

SEQ ID NO: 112817 - DNA, 25 bp, Homo sapien
ctcccagtacccacagtggctaagg

SEQ ID NO: 112818 - DNA, 25 bp, Homo sapien
ctcccagtaccctcagtggctaagg

SEQ ID NO: 112819 - DNA, 25 bp, Homo sapien
ttccgagacctttacatgtggcaca

SEQ ID NO: 112820 - DNA, 25 bp, Homo sapien
ttccgagaccttaacatgtggcaca

SEQ ID NO: 112821 - DNA, 25 bp, Homo sapien
ttataaacttaacctacggcgtgga

SEQ ID NO: 112822 - DNA, 25 bp, Homo sapien
ttataaacttaagctacggcgtgga

SEQ ID NO: 112823 - DNA, 25 bp, Homo sapien
ccgttatattctcgacagaaggtaa

SEQ ID NO: 112824 - DNA, 25 bp, Homo sapien
ccgttatattctggacagaaggtaa

SEQ ID NO: 112825 - DNA, 25 bp, Homo sapien
cttaagacttagaccaccggaggag

SEQ ID NO: 112826 - DNA, 25 bp, Homo sapien
cttaagacttagtccaccggaggag

SEQ ID NO: 112827 - DNA, 25 bp, Homo sapien
gttgtactctttacaactggtgtgt

SEQ ID NO: 112828 - DNA, 25 bp, Homo sapien
gttgtactcttttcaactggtgtgt

SEQ ID NO: 112829 - DNA, 25 bp, Homo sapien
tattcatacagtatagtactctgga

SEQ ID NO: 112830 - DNA, 25 bp, Homo sapien
tattcatacagtttagtactctgga

SEQ ID NO: 112831 - DNA, 25 bp, Homo sapien
tacttacttacgtgtttgtgtctaa

SEQ ID NO: 112832 - DNA, 25 bp, Homo sapien
tacttacttacgagtttgtgtctaa

SEQ ID NO: 112833 - DNA, 25 bp, Homo sapien
tgttttcgtttaattcagtcgtcaa

SEQ ID NO: 112834 - DNA, 25 bp, Homo sapien
tgttttcgtttatttcagtcgtcaa

SEQ ID NO: 112835 - DNA, 25 bp, Homo sapien
gtgtttactctttgtcctcggaaag

SEQ ID NO: 112836 - DNA, 25 bp, Homo sapien
gtgtttactcttagtcctcggaaag

SEQ ID NO: 112837 - DNA, 25 bp, Homo sapien
tgttcaccgtctttgctcccacgta

SEQ ID NO: 112838 - DNA, 25 bp, Homo sapien
tgttcaccgtctatgctcccacgta

SEQ ID NO: 112839 - DNA, 25 bp, Homo sapien
cggtccgacgatagatttcctcaca

SEQ ID NO: 112840 - DNA, 25 bp, Homo sapien
cggtccgacgattgatttcctcaca

SEQ ID NO: 112841 - DNA, 25 bp, Homo sapien
tcgccgtgtatgtgttagtatcatt

SEQ ID NO: 112842 - DNA, 25 bp, Homo sapien
tcgccgtgtatgagttagtatcatt

SEQ ID NO: 112843 - DNA, 25 bp, Homo sapien
catcccgttaggacttcttactgct

SEQ ID NO: 112844 - DNA, 25 bp, Homo sapien
catcccgttaggtcttcttactgct

SEQ ID NO: 112845 - DNA, 25 bp, Homo sapien
ttacttgagtatttcgtcatcgtct

SEQ ID NO: 112846 - DNA, 25 bp, Homo sapien
ttacttgagtatatcgtcatcgtct

SEQ ID NO: 112847 - DNA, 25 bp, Homo sapien
gaagatctttatgtttctcttgtac

SEQ ID NO: 112848 - DNA, 25 bp, Homo sapien
gaagatctttatctttctcttgtac

SEQ ID NO: 112849 - DNA, 25 bp, Homo sapien
gactctctttaattgtctagattta

SEQ ID NO: 112850 - DNA, 25 bp, Homo sapien
gactctctttaaatgtctagattta

SEQ ID NO: 112851 - DNA, 25 bp, Homo sapien
agagtcccgacgaagttcaccctaa

SEQ ID NO: 112852 - DNA, 25 bp, Homo sapien
agagtcccgacgtagttcaccctaa

SEQ ID NO: 112853 - DNA, 25 bp, Homo sapien
acccgacgactgttgtcgactgaga

SEQ ID NO: 112854 - DNA, 25 bp, Homo sapien
acccgacgactgatgtcgactgaga

SEQ ID NO: 112855 - DNA, 25 bp, Homo sapien
ctcgtcggataggtcgaactcgaga

SEQ ID NO: 112856 - DNA, 25 bp, Homo sapien
ctcgtcggatagctcgaactcgaga

SEQ ID NO: 112857 - DNA, 25 bp, Homo sapien
acaactctcttcgtctaaaggagac

SEQ ID NO: 112858 - DNA, 25 bp, Homo sapien
acaactctcttcctctaaaggagac

SEQ ID NO: 112859 - DNA, 25 bp, Homo sapien
acagagttttactacaaaacgaccg

SEQ ID NO: 112860 - DNA, 25 bp, Homo sapien
acagagttttacaacaaaacgaccg

SEQ ID NO: 112861 - DNA, 25 bp, Homo sapien
ggagaagaccaaatacaactatacc

SEQ ID NO: 112862 - DNA, 25 bp, Homo sapien
ggagaagaccaattacaactatacc

SEQ ID NO: 112863 - DNA, 25 bp, Homo sapien
aggaaaaccattgacgcactatgta

SEQ ID NO: 112864 - DNA, 25 bp, Homo sapien
aggaaaaccattcacgcactatgta

SEQ ID NO: 112865 - DNA, 25 bp, Homo sapien
ctaggatacaagtggtactcgtgaa

SEQ ID NO: 112866 - DNA, 25 bp, Homo sapien
ctaggatacaagaggtactcgtgaa

SEQ ID NO: 112867 - DNA, 25 bp, Homo sapien
ggtggtgcacttcgacacccggcga

SEQ ID NO: 112868 - DNA, 25 bp, Homo sapien
ggtggtgcacttggacacccggcga

SEQ ID NO: 112869 - DNA, 25 bp, Homo sapien
cgggaactctgtcgtcccgaagcta

SEQ ID NO: 112870 - DNA, 25 bp, Homo sapien
cgggaactctgtggtcccgaagcta

SEQ ID NO: 112871 - DNA, 25 bp, Homo sapien
ctcgtctccgtttcccgtatacaag

SEQ ID NO: 112872 - DNA, 25 bp, Homo sapien
ctcgtctccgttacccgtatacaag

SEQ ID NO: 112873 - DNA, 25 bp, Homo sapien
tatctgtgtggtaatcccctcaatt

SEQ ID NO: 112874 - DNA, 25 bp, Homo sapien
tatctgtgtggttatcccctcaatt

SEQ ID NO: 112875 - DNA, 25 bp, Homo sapien
aaatgtccgtcgtcccttcacgggt

SEQ ID NO: 112876 - DNA, 25 bp, Homo sapien
aaatgtccgtcgacccttcacgggt

SEQ ID NO: 112877 - DNA, 25 bp, Homo sapien
aagtgtacgtccacccgtgggtgat

SEQ ID NO: 112878 - DNA, 25 bp, Homo sapien
aagtgtacgtcctcccgtgggtgat

SEQ ID NO: 112879 - DNA, 25 bp, Homo sapien
tatgtcgtccttcgtgtggaaacgt

SEQ ID NO: 112880 - DNA, 25 bp, Homo sapien
tatgtcgtccttggtgtggaaacgt

SEQ ID NO: 112881 - DNA, 25 bp, Homo sapien
ctctagtggtttcttgagaagatac

SEQ ID NO: 112882 - DNA, 25 bp, Homo sapien
ctctagtggtttgttgagaagatac

SEQ ID NO: 112883 - DNA, 25 bp, Homo sapien
ttcggtgacaatttcgatacgttct

SEQ ID NO: 112884 - DNA, 25 bp, Homo sapien
ttcggtgacaatatcgatacgttct

SEQ ID NO: 112885 - DNA, 25 bp, Homo sapien
ttgtcggtgtacacttacggtttac

SEQ ID NO: 112886 - DNA, 25 bp, Homo sapien
ttgtcggtgtactcttacggtttac

SEQ ID NO: 112887 - DNA, 25 bp, Homo sapien
aacgtgatttagtttgctcgactat

SEQ ID NO: 112888 - DNA, 25 bp, Homo sapien
aacgtgatttagattgctcgactat

SEQ ID NO: 112889 - DNA, 25 bp, Homo sapien
cgtgtgagtgtttgtcgactagacc

SEQ ID NO: 112890 - DNA, 25 bp, Homo sapien
cgtgtgagtgttagtcgactagacc

SEQ ID NO: 112891 - DNA, 25 bp, Homo sapien
tccttcggtagtacgggaggtacgc

SEQ ID NO: 112892 - DNA, 25 bp, Homo sapien
tccttcggtagttcgggaggtacgc

SEQ ID NO: 112893 - DNA, 25 bp, Homo sapien
acctggtgtagtcctctgtcataga

SEQ ID NO: 112894 - DNA, 25 bp, Homo sapien
acctggtgtagtgctctgtcataga

SEQ ID NO: 112895 - DNA, 25 bp, Homo sapien
gtcaaccacttcagctcttcgagga

SEQ ID NO: 112896 - DNA, 25 bp, Homo sapien
gtcaaccacttctgctcttcgagga

SEQ ID NO: 112897 - DNA, 25 bp, Homo sapien
ccgacaacaatgtgtacgcccacag

SEQ ID NO: 112898 - DNA, 25 bp, Homo sapien
ccgacaacaatgagtacgcccacag

SEQ ID NO: 112899 - DNA, 25 bp, Homo sapien
gtgtaaagacaattatgtccatttc

SEQ ID NO: 112900 - DNA, 25 bp, Homo sapien
gtgtaaagacaaatatgtccatttc

SEQ ID NO: 112901 - DNA, 25 bp, Homo sapien
gggtccaactgggtgccatcggtgt

SEQ ID NO: 112902 - DNA, 25 bp, Homo sapien
gggtccaactggctgccatcggtgt

SEQ ID NO: 112903 - DNA, 25 bp, Homo sapien
tagtctccttttcgacggctcagag

SEQ ID NO: 112904 - DNA, 25 bp, Homo sapien
tagtctccttttggacggctcagag

SEQ ID NO: 112905 - DNA, 25 bp, Homo sapien
tattctccctcgtgcggacccggag

SEQ ID NO: 112906 - DNA, 25 bp, Homo sapien
tattctccctcgagcggacccggag

SEQ ID NO: 112907 - DNA, 25 bp, Homo sapien
tgcttcccatccaggtgaccacaga

SEQ ID NO: 112908 - DNA, 25 bp, Homo sapien
tgcttcccatcctggtgaccacaga

SEQ ID NO: 112909 - DNA, 25 bp, Homo sapien
ttcggtctacgacagtcgacggaaa

SEQ ID NO: 112910 - DNA, 25 bp, Homo sapien
ttcggtctacgagagtcgacggaaa

SEQ ID NO: 112911 - DNA, 25 bp, Homo sapien
tgccgtgtcgacgtcctccggaaga

SEQ ID NO: 112912 - DNA, 25 bp, Homo sapien
tgccgtgtcgacctcctccggaaga

SEQ ID NO: 112913 - DNA, 25 bp, Homo sapien
ttccgcggctcacgccggtcgagac

SEQ ID NO: 112914 - DNA, 25 bp, Homo sapien
ttccgcggctcaggccggtcgagac

SEQ ID NO: 112915 - DNA, 25 bp, Homo sapien
gatcccggaaaactccatacgacag

SEQ ID NO: 112916 - DNA, 25 bp, Homo sapien
gatcccggaaaagtccatacgacag

SEQ ID NO: 112917 - DNA, 25 bp, Homo sapien
gttcgcctcacacttatccgttgca

SEQ ID NO: 112918 - DNA, 25 bp, Homo sapien
gttcgcctcacagttatccgttgca

SEQ ID NO: 112919 - DNA, 25 bp, Homo sapien
tgttcctccttctatctcggtccga

SEQ ID NO: 112920 - DNA, 25 bp, Homo sapien
tgttcctccttcaatctcggtccga

SEQ ID NO: 112921 - DNA, 25 bp, Homo sapien
ttccttcaatgactccgacgtaaag

SEQ ID NO: 112922 - DNA, 25 bp, Homo sapien
ttccttcaatgagtccgacgtaaag

SEQ ID NO: 112923 - DNA, 25 bp, Homo sapien
cacgtgtcgggactctccaatgtac

SEQ ID NO: 112924 - DNA, 25 bp, Homo sapien
cacgtgtcgggagtctccaatgtac

SEQ ID NO: 112925 - DNA, 25 bp, Homo sapien
tctgtctgatacagatacctcttga

SEQ ID NO: 112926 - DNA, 25 bp, Homo sapien
tctgtctgatactgatacctcttga

SEQ ID NO: 112927 - DNA, 25 bp, Homo sapien
aagatgaacacgtactaccattgag

SEQ ID NO: 112928 - DNA, 25 bp, Homo sapien
aagatgaacacgaactaccattgag

SEQ ID NO: 112929 - DNA, 25 bp, Homo sapien
gaagtatgtcaaacacaacatgtaa

SEQ ID NO: 112930 - DNA, 25 bp, Homo sapien
gaagtatgtcaatcacaacatgtaa

SEQ ID NO: 112931 - DNA, 25 bp, Homo sapien
gagagaaataacctcaaattgtctt

SEQ ID NO: 112932 - DNA, 25 bp, Homo sapien
gagagaaataacgtcaaattgtctt

SEQ ID NO: 112933 - DNA, 25 bp, Homo sapien
aaaagtaaatacgatacctctttgg

SEQ ID NO: 112934 - DNA, 25 bp, Homo sapien
aaaagtaaataccatacctctttgg

SEQ ID NO: 112935 - DNA, 25 bp, Homo sapien
atataaggtcataacgattatgacc

SEQ ID NO: 112936 - DNA, 25 bp, Homo sapien
atataaggtcattacgattatgacc

SEQ ID NO: 112937 - DNA, 25 bp, Homo sapien
cgtgactaaactcagtaagttccca

SEQ ID NO: 112938 - DNA, 25 bp, Homo sapien
cgtgactaaactgagtaagttccca

SEQ ID NO: 112939 - DNA, 25 bp, Homo sapien
gcccaacggaagtggcaggcagaac

SEQ ID NO: 112940 - DNA, 25 bp, Homo sapien
gcccaacggaagaggcaggcagaac

SEQ ID NO: 112941 - DNA, 25 bp, Homo sapien
cccacagtaaagtcccgggtcataa

SEQ ID NO: 112942 - DNA, 25 bp, Homo sapien
cccacagtaaagacccgggtcataa

SEQ ID NO: 112943 - DNA, 25 bp, Homo sapien
ccaagactggagacccgtggacgac

SEQ ID NO: 112944 - DNA, 25 bp, Homo sapien
ccaagactggagtcccgtggacgac

SEQ ID NO: 112945 - DNA, 25 bp, Homo sapien
actgacgacgatggagacgtgatac

SEQ ID NO: 112946 - DNA, 25 bp, Homo sapien
actgacgacgatcgagacgtgatac

SEQ ID NO: 112947 - DNA, 25 bp, Homo sapien
taaaacagacgtctcacgagtacaa

SEQ ID NO: 112948 - DNA, 25 bp, Homo sapien
taaaacagacgtgtcacgagtacaa

SEQ ID NO: 112949 - DNA, 25 bp, Homo sapien
gcgggaagaacatccgcaagaacta

SEQ ID NO: 112950 - DNA, 25 bp, Homo sapien
gcgggaagaacaaccgcaagaacta

SEQ ID NO: 112951 - DNA, 25 bp, Homo sapien
ctattaagacaaaccctggagtttt

SEQ ID NO: 112952 - DNA, 25 bp, Homo sapien
ctattaagacaatccctggagtttt

SEQ ID NO: 112953 - DNA, 25 bp, Homo sapien
tttgtagataaagtcctaaaccttc

SEQ ID NO: 112954 - DNA, 25 bp, Homo sapien
tttgtagataaactcctaaaccttc

SEQ ID NO: 112955 - DNA, 25 bp, Homo sapien
ggtgccgtagacaccacatcgaaag

SEQ ID NO: 112956 - DNA, 25 bp, Homo sapien
ggtgccgtagactccacatcgaaag

SEQ ID NO: 112957 - DNA, 25 bp, Homo sapien
gggcactactactcctacaggaaat

SEQ ID NO: 112958 - DNA, 25 bp, Homo sapien
gggcactactacacctacaggaaat

SEQ ID NO: 112959 - DNA, 25 bp, Homo sapien
gttagcacacttcttactcagatga

SEQ ID NO: 112960 - DNA, 25 bp, Homo sapien
gttagcacacttgttactcagatga

SEQ ID NO: 112961 - DNA, 25 bp, Homo sapien
ttggcgacgatacatttcattgtat

SEQ ID NO: 112962 - DNA, 25 bp, Homo sapien
ttggcgacgatagatttcattgtat

SEQ ID NO: 112963 - DNA, 25 bp, Homo sapien
ttcttgacaccgatctgatttgttt

SEQ ID NO: 112964 - DNA, 25 bp, Homo sapien
ttcttgacaccgttctgatttgttt

SEQ ID NO: 112965 - DNA, 25 bp, Homo sapien
catcatgtcaagtactgtttttata

SEQ ID NO: 112966 - DNA, 25 bp, Homo sapien
catcatgtcaagaactgtttttata

SEQ ID NO: 112967 - DNA, 25 bp, Homo sapien
aagtctagataatgtgtttctctac

SEQ ID NO: 112968 - DNA, 25 bp, Homo sapien
aagtctagataaagtgtttctctac

SEQ ID NO: 112969 - DNA, 25 bp, Homo sapien
gtttgataagattcaacgattccac

SEQ ID NO: 112970 - DNA, 25 bp, Homo sapien
gtttgataagatacaacgattccac

SEQ ID NO: 112971 - DNA, 25 bp, Homo sapien
tacggcagagtataatcatactcaa

SEQ ID NO: 112972 - DNA, 25 bp, Homo sapien
tacggcagagtaaaatcatactcaa

SEQ ID NO: 112973 - DNA, 25 bp, Homo sapien
gtcggggtgtcatacctgacaagac

SEQ ID NO: 112974 - DNA, 25 bp, Homo sapien
gtcggggtgtcaaacctgacaagac

SEQ ID NO: 112975 - DNA, 25 bp, Homo sapien
caaattacctccttcgtagaagatg

SEQ ID NO: 112976 - DNA, 25 bp, Homo sapien
caaattacctccatcgtagaagatg

SEQ ID NO: 112977 - DNA, 25 bp, Homo sapien
tttatcattccctaggtagtggtcc

SEQ ID NO: 112978 - DNA, 25 bp, Homo sapien
tttatcattcccaaggtagtggtcc

SEQ ID NO: 112979 - DNA, 25 bp, Homo sapien
agtcacctgtcctttgcgtggtata

SEQ ID NO: 112980 - DNA, 25 bp, Homo sapien
agtcacctgtccattgcgtggtata

SEQ ID NO: 112981 - DNA, 25 bp, Homo sapien
tcaccggtccctagtcagagtaccg

SEQ ID NO: 112982 - DNA, 25 bp, Homo sapien
tcaccggtcccttgtcagagtaccg

SEQ ID NO: 112983 - DNA, 25 bp, Homo sapien
agttataagggattccgaagtcacg

SEQ ID NO: 112984 - DNA, 25 bp, Homo sapien
agttataagggaatccgaagtcacg

SEQ ID NO: 112985 - DNA, 25 bp, Homo sapien
ttactacgaggtgcattttatcagt

SEQ ID NO: 112986 - DNA, 25 bp, Homo sapien
ttactacgaggtccattttatcagt

SEQ ID NO: 112987 - DNA, 25 bp, Homo sapien
tgtgaaccacatcataggtatttat

SEQ ID NO: 112988 - DNA, 25 bp, Homo sapien
tgtgaaccacatgataggtatttat

SEQ ID NO: 112989 - DNA, 25 bp, Homo sapien
cgactctcgacatgtcttgtttgta

SEQ ID NO: 112990 - DNA, 25 bp, Homo sapien
cgactctcgacaagtcttgtttgta

SEQ ID NO: 112991 - DNA, 25 bp, Homo sapien
gactctcgacatgtcttgtttgtat

SEQ ID NO: 112992 - DNA, 25 bp, Homo sapien
gactctcgacatctcttgtttgtat

SEQ ID NO: 112993 - DNA, 25 bp, Homo sapien
gacgagagaacttcagtgttttact

SEQ ID NO: 112994 - DNA, 25 bp, Homo sapien
gacgagagaactacagtgttttact

SEQ ID NO: 112995 - DNA, 25 bp, Homo sapien
cggggaacggaacttcactttttct

SEQ ID NO: 112996 - DNA, 25 bp, Homo sapien
cggggaacggaagttcactttttct

SEQ ID NO: 112997 - DNA, 25 bp, Homo sapien
gaggagacgataacccttttcaatt

SEQ ID NO: 112998 - DNA, 25 bp, Homo sapien
gaggagacgatatcccttttcaatt

SEQ ID NO: 112999 - DNA, 25 bp, Homo sapien
cgagagatgacgaacccaagggaaa

SEQ ID NO: 113000 - DNA, 25 bp, Homo sapien
cgagagatgacgtacccaagggaaa

SEQ ID NO: 113001 - DNA, 25 bp, Homo sapien
gaaagtctctcttatctttgggaaa

SEQ ID NO: 113002 - DNA, 25 bp, Homo sapien
gaaagtctctctaatctttgggaaa

SEQ ID NO: 113003 - DNA, 25 bp, Homo sapien
cgtcgacttgatcttagttcgaata

SEQ ID NO: 113004 - DNA, 25 bp, Homo sapien
cgtcgacttgatgttagttcgaata

SEQ ID NO: 113005 - DNA, 25 bp, Homo sapien
acagattacactctaggagttttac

SEQ ID NO: 113006 - DNA, 25 bp, Homo sapien
acagattacactgtaggagttttac

SEQ ID NO: 113007 - DNA, 25 bp, Homo sapien
cgacaagacaccttacccaaggtca

SEQ ID NO: 113008 - DNA, 25 bp, Homo sapien
cgacaagacaccatacccaaggtca

SEQ ID NO: 113009 - DNA, 25 bp, Homo sapien
ctacggtcaccatgccggtctccgc

SEQ ID NO: 113010 - DNA, 25 bp, Homo sapien
ctacggtcaccaagccggtctccgc

SEQ ID NO: 113011 - DNA, 25 bp, Homo sapien
gaagtgtgtatcgtgtccatctcca

SEQ ID NO: 113012 - DNA, 25 bp, Homo sapien
gaagtgtgtatcctgtccatctcca

SEQ ID NO: 113013 - DNA, 25 bp, Homo sapien
aatataggaagacctttccctccga

SEQ ID NO: 113014 - DNA, 25 bp, Homo sapien
aatataggaagagctttccctccga

SEQ ID NO: 113015 - DNA, 25 bp, Homo sapien
gtggaagggatttcagtcccttctt

SEQ ID NO: 113016 - DNA, 25 bp, Homo sapien
gtggaagggattacagtcccttctt

SEQ ID NO: 113017 - DNA, 25 bp, Homo sapien
cgagaacaagtcctgcacctgcgtt

SEQ ID NO: 113018 - DNA, 25 bp, Homo sapien
cgagaacaagtcgtgcacctgcgtt

SEQ ID NO: 113019 - DNA, 25 bp, Homo sapien
ggacccaaaagtaggaacctgtcta

SEQ ID NO: 113020 - DNA, 25 bp, Homo sapien
ggacccaaaagttggaacctgtcta

SEQ ID NO: 113021 - DNA, 25 bp, Homo sapien
gatctcgttgttccactcgtagtta

SEQ ID NO: 113022 - DNA, 25 bp, Homo sapien
gatctcgttgttgcactcgtagtta

SEQ ID NO: 113023 - DNA, 25 bp, Homo sapien
gacgattcttacgactgacgagaga

SEQ ID NO: 113024 - DNA, 25 bp, Homo sapien
gacgattcttaccactgacgagaga

SEQ ID NO: 113025 - DNA, 25 bp, Homo sapien
ttcccctgtcttacctctgtcggga

SEQ ID NO: 113026 - DNA, 25 bp, Homo sapien
ttcccctgtctttcctctgtcggga

SEQ ID NO: 113027 - DNA, 25 bp, Homo sapien
ttctctgctccgacttacccgggga

SEQ ID NO: 113028 - DNA, 25 bp, Homo sapien
ttctctgctccgtcttacccgggga

SEQ ID NO: 113029 - DNA, 25 bp, Homo sapien
acggtcccttacttaccaggggtat

SEQ ID NO: 113030 - DNA, 25 bp, Homo sapien
acggtcccttacataccaggggtat

SEQ ID NO: 113031 - DNA, 25 bp, Homo sapien
aagccctgaatatcgtcactcggca

SEQ ID NO: 113032 - DNA, 25 bp, Homo sapien
aagccctgaataacgtcactcggca

SEQ ID NO: 113033 - DNA, 25 bp, Homo sapien
cggactaatctacgtgaccgactcc

SEQ ID NO: 113034 - DNA, 25 bp, Homo sapien
cggactaatctaggtgaccgactcc

SEQ ID NO: 113035 - DNA, 25 bp, Homo sapien
gtggtcaacgtgttaccggaactac

SEQ ID NO: 113036 - DNA, 25 bp, Homo sapien
gtggtcaacgtgataccggaactac

SEQ ID NO: 113037 - DNA, 25 bp, Homo sapien
agtagatacgtgtatccgagactcg

SEQ ID NO: 113038 - DNA, 25 bp, Homo sapien
agtagatacgtgaatccgagactcg

SEQ ID NO: 113039 - DNA, 25 bp, Homo sapien
aatagaatcgagcttacgagtactg

SEQ ID NO: 113040 - DNA, 25 bp, Homo sapien
aatagaatcgaggttacgagtactg

SEQ ID NO: 113041 - DNA, 25 bp, Homo sapien
aacttcctacgttggcctaactagg

SEQ ID NO: 113042 - DNA, 25 bp, Homo sapien
aacttcctacgtaggcctaactagg

SEQ ID NO: 113043 - DNA, 25 bp, Homo sapien
aacctatccatcgtgtcctttaggt

SEQ ID NO: 113044 - DNA, 25 bp, Homo sapien
aacctatccatcctgtcctttaggt

SEQ ID NO: 113045 - DNA, 25 bp, Homo sapien
gagacttccttctcgtaaatcaggt

SEQ ID NO: 113046 - DNA, 25 bp, Homo sapien
gagacttccttcacgtaaatcaggt

SEQ ID NO: 113047 - DNA, 25 bp, Homo sapien
gtatgttatcacctactgttttcgg

SEQ ID NO: 113048 - DNA, 25 bp, Homo sapien
gtatgttatcacgtactgttttcgg

SEQ ID NO: 113049 - DNA, 25 bp, Homo sapien
atgtgtactttatgtttcccttacg

SEQ ID NO: 113050 - DNA, 25 bp, Homo sapien
atgtgtactttaagtttcccttacg

SEQ ID NO: 113051 - DNA, 25 bp, Homo sapien
ccgtagtattagaaggtggttcttc

SEQ ID NO: 113052 - DNA, 25 bp, Homo sapien
ccgtagtattagtaggtggttcttc

SEQ ID NO: 113053 - DNA, 25 bp, Homo sapien
accaaatgtaagatagaggtctctt

SEQ ID NO: 113054 - DNA, 25 bp, Homo sapien
accaaatgtaagttagaggtctctt

SEQ ID NO: 113055 - DNA, 25 bp, Homo sapien
gtatgcaactttaatcttgatcgtt

SEQ ID NO: 113056 - DNA, 25 bp, Homo sapien
gtatgcaacttttatcttgatcgtt

SEQ ID NO: 113057 - DNA, 25 bp, Homo sapien
tgaagtcaatccagccgtttgagaa

SEQ ID NO: 113058 - DNA, 25 bp, Homo sapien
tgaagtcaatcctgccgtttgagaa

SEQ ID NO: 113059 - DNA, 25 bp, Homo sapien
gacggagtacagcacccattggaaa

SEQ ID NO: 113060 - DNA, 25 bp, Homo sapien
gacggagtacaggacccattggaaa

SEQ ID NO: 113061 - DNA, 25 bp, Homo sapien
attatgacaaaacatgcggatacct

SEQ ID NO: 113062 - DNA, 25 bp, Homo sapien
attatgacaaaagatgcggatacct

SEQ ID NO: 113063 - DNA, 25 bp, Homo sapien
aaccaaattgtaggtggttactcgt

SEQ ID NO: 113064 - DNA, 25 bp, Homo sapien
aaccaaattgtacgtggttactcgt

SEQ ID NO: 113065 - DNA, 25 bp, Homo sapien
tagcagaaaaaggtgcgtgtcgtcg

SEQ ID NO: 113066 - DNA, 25 bp, Homo sapien
tagcagaaaaagctgcgtgtcgtcg

SEQ ID NO: 113067 - DNA, 25 bp, Homo sapien
agtccggaggtatagacctttctcg

SEQ ID NO: 113068 - DNA, 25 bp, Homo sapien
agtccggaggtaaagacctttctcg

SEQ ID NO: 113069 - DNA, 25 bp, Homo sapien
aagtccgggtgaacaacttgtcttg

SEQ ID NO: 113070 - DNA, 25 bp, Homo sapien
aagtccgggtgatcaacttgtcttg

SEQ ID NO: 113071 - DNA, 25 bp, Homo sapien
ttccagttcgtccacatggtcccgt

SEQ ID NO: 113072 - DNA, 25 bp, Homo sapien
ttccagttcgtcgacatggtcccgt

SEQ ID NO: 113073 - DNA, 25 bp, Homo sapien
gttttaaacttccattggtgttaac

SEQ ID NO: 113074 - DNA, 25 bp, Homo sapien
gttttaaacttcgattggtgttaac

SEQ ID NO: 113075 - DNA, 25 bp, Homo sapien
gacccaaatttcattgtgtcttaga

SEQ ID NO: 113076 - DNA, 25 bp, Homo sapien
gacccaaatttctttgtgtcttaga

SEQ ID NO: 113077 - DNA, 25 bp, Homo sapien
gacccacttcgttttttggttcaac

SEQ ID NO: 113078 - DNA, 25 bp, Homo sapien
gacccacttcgtattttggttcaac

SEQ ID NO: 113079 - DNA, 25 bp, Homo sapien
gacaagacctctgtttgggtgtgaa

SEQ ID NO: 113080 - DNA, 25 bp, Homo sapien
gacaagacctctctttgggtgtgaa

SEQ ID NO: 113081 - DNA, 25 bp, Homo sapien
tgacctctaggtcgtggagtggctt

SEQ ID NO: 113082 - DNA, 25 bp, Homo sapien
tgacctctaggtggtggagtggctt

SEQ ID NO: 113083 - DNA, 25 bp, Homo sapien
ctcgtcgtgtagtgacgagtccttt

SEQ ID NO: 113084 - DNA, 25 bp, Homo sapien
ctcgtcgtgtagagacgagtccttt

SEQ ID NO: 113085 - DNA, 25 bp, Homo sapien
tgtttccgtttttgaccgtcactga

SEQ ID NO: 113086 - DNA, 25 bp, Homo sapien
tgtttccgttttagaccgtcactga

SEQ ID NO: 113087 - DNA, 25 bp, Homo sapien
cttctatctttttagatcaatacga

SEQ ID NO: 113088 - DNA, 25 bp, Homo sapien
cttctatcttttaagatcaatacga

SEQ ID NO: 113089 - DNA, 25 bp, Homo sapien
tgtcgtagtacctaacaattctttt

SEQ ID NO: 113090 - DNA, 25 bp, Homo sapien
tgtcgtagtaccaaacaattctttt

SEQ ID NO: 113091 - DNA, 25 bp, Homo sapien
ttccgagctatgtacatcgttgtta

SEQ ID NO: 113092 - DNA, 25 bp, Homo sapien
ttccgagctatgaacatcgttgtta

SEQ ID NO: 113093 - DNA, 25 bp, Homo sapien
cccacctttatgtcgtagagtcgtc

SEQ ID NO: 113094 - DNA, 25 bp, Homo sapien
cccacctttatgacgtagagtcgtc

SEQ ID NO: 113095 - DNA, 25 bp, Homo sapien
ctgtacatacgtttgcgaataattt

SEQ ID NO: 113096 - DNA, 25 bp, Homo sapien
ctgtacatacgtatgcgaataattt

SEQ ID NO: 113097 - DNA, 25 bp, Homo sapien
tgtctgtacgtactaaatacaatta

SEQ ID NO: 113098 - DNA, 25 bp, Homo sapien
tgtctgtacgtagtaaatacaatta

SEQ ID NO: 113099 - DNA, 25 bp, Homo sapien
ttatatagtgttacgaccaatgttt

SEQ ID NO: 113100 - DNA, 25 bp, Homo sapien
ttatatagtgtttcgaccaatgttt

SEQ ID NO: 113101 - DNA, 25 bp, Homo sapien
tcacaagtgtcttccccatgagtgt

SEQ ID NO: 113102 - DNA, 25 bp, Homo sapien
tcacaagtgtctaccccatgagtgt

SEQ ID NO: 113103 - DNA, 25 bp, Homo sapien
tcggagggctcatcgaccctaatgt

SEQ ID NO: 113104 - DNA, 25 bp, Homo sapien
tcggagggctcaacgaccctaatgt

SEQ ID NO: 113105 - DNA, 25 bp, Homo sapien
tgtggaatgttaacacatctcttgt

SEQ ID NO: 113106 - DNA, 25 bp, Homo sapien
tgtggaatgttatcacatctcttgt

SEQ ID NO: 113107 - DNA, 25 bp, Homo sapien
cccgaccgtcagtgcactcgtttgt

SEQ ID NO: 113108 - DNA, 25 bp, Homo sapien
cccgaccgtcagagcactcgtttgt

SEQ ID NO: 113109 - DNA, 25 bp, Homo sapien
tttccgaacgggaggtccctctact

SEQ ID NO: 113110 - DNA, 25 bp, Homo sapien
tttccgaacgggtggtccctctact

SEQ ID NO: 113111 - DNA, 25 bp, Homo sapien
gtgttcgggtcgtccaggactcact

SEQ ID NO: 113112 - DNA, 25 bp, Homo sapien
gtgttcgggtcgaccaggactcact

SEQ ID NO: 113113 - DNA, 25 bp, Homo sapien
gtcctccggacagtctcggacttct

SEQ ID NO: 113114 - DNA, 25 bp, Homo sapien
gtcctccggacactctcggacttct

SEQ ID NO: 113115 - DNA, 25 bp, Homo sapien
ggtactctttagaggtcgggatcct

SEQ ID NO: 113116 - DNA, 25 bp, Homo sapien
ggtactctttagtggtcgggatcct

SEQ ID NO: 113117 - DNA, 25 bp, Homo sapien
cgaccgacagagaagggcaagtctt

SEQ ID NO: 113118 - DNA, 25 bp, Homo sapien
cgaccgacagagtagggcaagtctt

SEQ ID NO: 113119 - DNA, 25 bp, Homo sapien
taaagataccgaaggggagacatct

SEQ ID NO: 113120 - DNA, 25 bp, Homo sapien
taaagataccgatggggagacatct

SEQ ID NO: 113121 - DNA, 25 bp, Homo sapien
agtgaaacctctctggacacggata

SEQ ID NO: 113122 - DNA, 25 bp, Homo sapien
agtgaaacctctgtggacacggata

SEQ ID NO: 113123 - DNA, 25 bp, Homo sapien
acagccacaacaagagacacacgac

SEQ ID NO: 113124 - DNA, 25 bp, Homo sapien
acagccacaacatgagacacacgac

SEQ ID NO: 113125 - DNA, 25 bp, Homo sapien
agtcctacccgtacagctgaaccag

SEQ ID NO: 113126 - DNA, 25 bp, Homo sapien
agtcctacccgttcagctgaaccag

SEQ ID NO: 113127 - DNA, 25 bp, Homo sapien
ctggtcgtgggtagagctccaccat

SEQ ID NO: 113128 - DNA, 25 bp, Homo sapien
ctggtcgtgggttgagctccaccat

SEQ ID NO: 113129 - DNA, 25 bp, Homo sapien
acgtgtgacggcggagggccctgca

SEQ ID NO: 113130 - DNA, 25 bp, Homo sapien
acgtgtgacggccgagggccctgca

SEQ ID NO: 113131 - DNA, 25 bp, Homo sapien
gtcttagtacttagggatctcaacc

SEQ ID NO: 113132 - DNA, 25 bp, Homo sapien
gtcttagtactttgggatctcaacc

SEQ ID NO: 113133 - DNA, 25 bp, Homo sapien
cgaagtacttgtacggagccaacgc

SEQ ID NO: 113134 - DNA, 25 bp, Homo sapien
cgaagtacttgttcggagccaacgc

SEQ ID NO: 113135 - DNA, 25 bp, Homo sapien
ggggagtcattacaagaagtcaccc

SEQ ID NO: 113136 - DNA, 25 bp, Homo sapien
ggggagtcattagaagaagtcaccc

SEQ ID NO: 113137 - DNA, 25 bp, Homo sapien
tgacaggttcgagtacggtccgacc

SEQ ID NO: 113138 - DNA, 25 bp, Homo sapien
tgacaggttcgactacggtccgacc

SEQ ID NO: 113139 - DNA, 25 bp, Homo sapien
tgaattgtacgactgtacaggtcga

SEQ ID NO: 113140 - DNA, 25 bp, Homo sapien
tgaattgtacgagtgtacaggtcga

SEQ ID NO: 113141 - DNA, 25 bp, Homo sapien
gaaaaattagagtcgacggtagcag

SEQ ID NO: 113142 - DNA, 25 bp, Homo sapien
gaaaaattagagacgacggtagcag

SEQ ID NO: 113143 - DNA, 25 bp, Homo sapien
acagagagtgtgtccagtgagttca

SEQ ID NO: 113144 - DNA, 25 bp, Homo sapien
acagagagtgtgaccagtgagttca

SEQ ID NO: 113145 - DNA, 25 bp, Homo sapien
agaaacgggagtccaagacatcttc

SEQ ID NO: 113146 - DNA, 25 bp, Homo sapien
agaaacgggagtgcaagacatcttc

SEQ ID NO: 113147 - DNA, 25 bp, Homo sapien
caagcgcaacgtttcctgtctaggt

SEQ ID NO: 113148 - DNA, 25 bp, Homo sapien
caagcgcaacgtatcctgtctaggt

SEQ ID NO: 113149 - DNA, 25 bp, Homo sapien
tacctaaggtcacgatttgtttatg

SEQ ID NO: 113150 - DNA, 25 bp, Homo sapien
tacctaaggtcaggatttgtttatg

SEQ ID NO: 113151 - DNA, 25 bp, Homo sapien
tacctaaactaagagcaccgtttgc

SEQ ID NO: 113152 - DNA, 25 bp, Homo sapien
tacctaaactaacagcaccgtttgc

SEQ ID NO: 113153 - DNA, 25 bp, Homo sapien
ctcagtaacaaacctcggtcgtttc

SEQ ID NO: 113154 - DNA, 25 bp, Homo sapien
ctcagtaacaaagctcggtcgtttc

SEQ ID NO: 113155 - DNA, 25 bp, Homo sapien
cagacgtaatcattcgttcgatctt

SEQ ID NO: 113156 - DNA, 25 bp, Homo sapien
cagacgtaatcaatcgttcgatctt

SEQ ID NO: 113157 - DNA, 25 bp, Homo sapien
acgacatttaagcattgtcgcttct

SEQ ID NO: 113158 - DNA, 25 bp, Homo sapien
acgacatttaaggattgtcgcttct

SEQ ID NO: 113159 - DNA, 25 bp, Homo sapien
tgtttctgggagagttcgtcgaacg

SEQ ID NO: 113160 - DNA, 25 bp, Homo sapien
tgtttctgggagtgttcgtcgaacg

SEQ ID NO: 113161 - DNA, 25 bp, Homo sapien
ataatgtttcgtggaagagttccca

SEQ ID NO: 113162 - DNA, 25 bp, Homo sapien
ataatgtttcgtcgaagagttccca

SEQ ID NO: 113163 - DNA, 25 bp, Homo sapien
atcattcgggtcagctatcgaccac

SEQ ID NO: 113164 - DNA, 25 bp, Homo sapien
atcattcgggtctgctatcgaccac

SEQ ID NO: 113165 - DNA, 25 bp, Homo sapien
cacccgatcgtgtatccggatagga

SEQ ID NO: 113166 - DNA, 25 bp, Homo sapien
cacccgatcgtgaatccggatagga

SEQ ID NO: 113167 - DNA, 25 bp, Homo sapien
tagactccgtcctccgtgtctcggg

SEQ ID NO: 113168 - DNA, 25 bp, Homo sapien
tagactccgtccaccgtgtctcggg

SEQ ID NO: 113169 - DNA, 25 bp, Homo sapien
tgtaatcttaccactggtatcgtcc

SEQ ID NO: 113170 - DNA, 25 bp, Homo sapien
tgtaatcttacctctggtatcgtcc

SEQ ID NO: 113171 - DNA, 25 bp, Homo sapien
acagttctcccctgtgtgtctctaa

SEQ ID NO: 113172 - DNA, 25 bp, Homo sapien
acagttctccccagtgtgtctctaa

SEQ ID NO: 113173 - DNA, 25 bp, Homo sapien
gtgtctctacgtcctttcgttcgga

SEQ ID NO: 113174 - DNA, 25 bp, Homo sapien
gtgtctctacgtgctttcgttcgga

SEQ ID NO: 113175 - DNA, 25 bp, Homo sapien
tttgtgaatacggtactagttttaa

SEQ ID NO: 113176 - DNA, 25 bp, Homo sapien
tttgtgaatacgctactagttttaa

SEQ ID NO: 113177 - DNA, 25 bp, Homo sapien
tcagagggaagaggtcgtccatgac

SEQ ID NO: 113178 - DNA, 25 bp, Homo sapien
tcagagggaagacgtcgtccatgac

SEQ ID NO: 113179 - DNA, 25 bp, Homo sapien
ggttaggtacaaggtcggttaccta

SEQ ID NO: 113180 - DNA, 25 bp, Homo sapien
ggttaggtacaacgtcggttaccta

SEQ ID NO: 113181 - DNA, 25 bp, Homo sapien
ttaggttcggcactgagaccaccga

SEQ ID NO: 113182 - DNA, 25 bp, Homo sapien
ttaggttcggcagtgagaccaccga

SEQ ID NO: 113183 - DNA, 25 bp, Homo sapien
tcgatctgtgttctacgggtttcta

SEQ ID NO: 113184 - DNA, 25 bp, Homo sapien
tcgatctgtgttgtacgggtttcta

SEQ ID NO: 113185 - DNA, 25 bp, Homo sapien
aacccggtgttctgaggtgttccta

SEQ ID NO: 113186 - DNA, 25 bp, Homo sapien
aacccggtgttcagaggtgttccta

SEQ ID NO: 113187 - DNA, 25 bp, Homo sapien
ctcgaccttccgtctccgtctggat

SEQ ID NO: 113188 - DNA, 25 bp, Homo sapien
ctcgaccttccgactccgtctggat

SEQ ID NO: 113189 - DNA, 25 bp, Homo sapien
caacgactcccgatacttacatgga

SEQ ID NO: 113190 - DNA, 25 bp, Homo sapien
caacgactcccgttacttacatgga

SEQ ID NO: 113191 - DNA, 25 bp, Homo sapien
tttcgaggctgacgtggttcatgaa

SEQ ID NO: 113192 - DNA, 25 bp, Homo sapien
tttcgaggctgaggtggttcatgaa

SEQ ID NO: 113193 - DNA, 25 bp, Homo sapien
tggttgtcggagtccatctatagga

SEQ ID NO: 113194 - DNA, 25 bp, Homo sapien
tggttgtcggagaccatctatagga

SEQ ID NO: 113195 - DNA, 25 bp, Homo sapien
cgttgagtgggactaccatagagtt

SEQ ID NO: 113196 - DNA, 25 bp, Homo sapien
cgttgagtgggagtaccatagagtt

SEQ ID NO: 113197 - DNA, 25 bp, Homo sapien
gtatgagtgccgacaagtactggtg

SEQ ID NO: 113198 - DNA, 25 bp, Homo sapien
gtatgagtgccgtcaagtactggtg

SEQ ID NO: 113199 - DNA, 25 bp, Homo sapien
acttgaggtcgctccagatctcgtc

SEQ ID NO: 113200 - DNA, 25 bp, Homo sapien
acttgaggtcgcaccagatctcgtc

SEQ ID NO: 113201 - DNA, 25 bp, Homo sapien
cgtcttttcttatacgatgttcagt

SEQ ID NO: 113202 - DNA, 25 bp, Homo sapien
cgtcttttcttaaacgatgttcagt

SEQ ID NO: 113203 - DNA, 25 bp, Homo sapien
atgtccatctttttcatgcgtgagt

SEQ ID NO: 113204 - DNA, 25 bp, Homo sapien
atgtccatctttatcatgcgtgagt

SEQ ID NO: 113205 - DNA, 25 bp, Homo sapien
taccatgtatgtatcgtactttgat

SEQ ID NO: 113206 - DNA, 25 bp, Homo sapien
taccatgtatgtttcgtactttgat

SEQ ID NO: 113207 - DNA, 25 bp, Homo sapien
cggagacccccgttatccactggga

SEQ ID NO: 113208 - DNA, 25 bp, Homo sapien
cggagacccccgatatccactggga

SEQ ID NO: 113209 - DNA, 25 bp, Homo sapien
tgaagtttcacattactgaaaacga

SEQ ID NO: 113210 - DNA, 25 bp, Homo sapien
tgaagtttcacaatactgaaaacga

SEQ ID NO: 113211 - DNA, 25 bp, Homo sapien
cctattcccaacctcagaagtgtcg

SEQ ID NO: 113212 - DNA, 25 bp, Homo sapien
cctattcccaacgtcagaagtgtcg

SEQ ID NO: 113213 - DNA, 25 bp, Homo sapien
accttccctcactggtgtatccggg

SEQ ID NO: 113214 - DNA, 25 bp, Homo sapien
accttccctcacaggtgtatccggg

SEQ ID NO: 113215 - DNA, 25 bp, Homo sapien
acaggaagtcaaggtgtataccgaa

SEQ ID NO: 113216 - DNA, 25 bp, Homo sapien
acaggaagtcaacgtgtataccgaa

SEQ ID NO: 113217 - DNA, 25 bp, Homo sapien
cgtttctcgacgtcttagagattat

SEQ ID NO: 113218 - DNA, 25 bp, Homo sapien
cgtttctcgacgacttagagattat

SEQ ID NO: 113219 - DNA, 25 bp, Homo sapien
ttctcgtgcacgacgtccgacaggc

SEQ ID NO: 113220 - DNA, 25 bp, Homo sapien
ttctcgtgcacgtcgtccgacaggc

SEQ ID NO: 113221 - DNA, 25 bp, Homo sapien
cgtgacgaataccactacgacgtcc

SEQ ID NO: 113222 - DNA, 25 bp, Homo sapien
cgtgacgaatacgactacgacgtcc

SEQ ID NO: 113223 - DNA, 25 bp, Homo sapien
ccacctcagtaagacgtcgagttcg

SEQ ID NO: 113224 - DNA, 25 bp, Homo sapien
ccacctcagtaacacgtcgagttcg

SEQ ID NO: 113225 - DNA, 25 bp, Homo sapien
gttcacccttcacacgacgtcggta

SEQ ID NO: 113226 - DNA, 25 bp, Homo sapien
gttcacccttcagacgacgtcggta

SEQ ID NO: 113227 - DNA, 25 bp, Homo sapien
cactatcccgtctcgaaagataatg

SEQ ID NO: 113228 - DNA, 25 bp, Homo sapien
cactatcccgtcacgaaagataatg

SEQ ID NO: 113229 - DNA, 25 bp, Homo sapien
atggactgacctaactaactaagtc

SEQ ID NO: 113230 - DNA, 25 bp, Homo sapien
atggactgaccttactaactaagtc

SEQ ID NO: 113231 - DNA, 25 bp, Homo sapien
tcggaactgtatcaacgtaattgta

SEQ ID NO: 113232 - DNA, 25 bp, Homo sapien
tcggaactgtatgaacgtaattgta

SEQ ID NO: 113233 - DNA, 25 bp, Homo sapien
attcggaacgagaagccggaaggta

SEQ ID NO: 113234 - DNA, 25 bp, Homo sapien
attcggaacgagtagccggaaggta

SEQ ID NO: 113235 - DNA, 25 bp, Homo sapien
tattgtcacccgtcttcgagacgga

SEQ ID NO: 113236 - DNA, 25 bp, Homo sapien
tattgtcacccgacttcgagacgga

SEQ ID NO: 113237 - DNA, 25 bp, Homo sapien
ctttgtcgacgccacactttaagga

SEQ ID NO: 113238 - DNA, 25 bp, Homo sapien
ctttgtcgacgcgacactttaagga

SEQ ID NO: 113239 - DNA, 25 bp, Homo sapien
cgtcttttgtcaaacctttaaggag

SEQ ID NO: 113240 - DNA, 25 bp, Homo sapien
cgtcttttgtcatacctttaaggag

SEQ ID NO: 113241 - DNA, 25 bp, Homo sapien
tcctatcttttgtctctatgtaagg

SEQ ID NO: 113242 - DNA, 25 bp, Homo sapien
tcctatcttttgactctatgtaagg

SEQ ID NO: 113243 - DNA, 25 bp, Homo sapien
tctccctttcatacttgtagtatta

SEQ ID NO: 113244 - DNA, 25 bp, Homo sapien
tctccctttcattcttgtagtatta

SEQ ID NO: 113245 - DNA, 25 bp, Homo sapien
tccgagctcaattagtgtaacatca

SEQ ID NO: 113246 - DNA, 25 bp, Homo sapien
tccgagctcaataagtgtaacatca

SEQ ID NO: 113247 - DNA, 25 bp, Homo sapien
atctgagttcaataccggacagctt

SEQ ID NO: 113248 - DNA, 25 bp, Homo sapien
atctgagttcaaaaccggacagctt

SEQ ID NO: 113249 - DNA, 25 bp, Homo sapien
ggatcgcgaagaacgggaaactact

SEQ ID NO: 113250 - DNA, 25 bp, Homo sapien
ggatcgcgaagatcgggaaactact

SEQ ID NO: 113251 - DNA, 25 bp, Homo sapien
tgaagtggttgtaccgagacgtttc

SEQ ID NO: 113252 - DNA, 25 bp, Homo sapien
tgaagtggttgttccgagacgtttc

SEQ ID NO: 113253 - DNA, 25 bp, Homo sapien
gaatcgaatttcttgaccagaaatc

SEQ ID NO: 113254 - DNA, 25 bp, Homo sapien
gaatcgaatttcatgaccagaaatc

SEQ ID NO: 113255 - DNA, 25 bp, Homo sapien
atagagactcttatgaccaacatcc

SEQ ID NO: 113256 - DNA, 25 bp, Homo sapien
atagagactcttttgaccaacatcc

SEQ ID NO: 113257 - DNA, 25 bp, Homo sapien
aaccctctcttttgggagactctcc

SEQ ID NO: 113258 - DNA, 25 bp, Homo sapien
aaccctctctttagggagactctcc

SEQ ID NO: 113259 - DNA, 25 bp, Homo sapien
accggttgagatggagcggcatata

SEQ ID NO: 113260 - DNA, 25 bp, Homo sapien
accggttgagatcgagcggcatata

SEQ ID NO: 113261 - DNA, 25 bp, Homo sapien
cgcaatggaaacgaaccacgagata

SEQ ID NO: 113262 - DNA, 25 bp, Homo sapien
cgcaatggaaaccaaccacgagata

SEQ ID NO: 113263 - DNA, 25 bp, Homo sapien
cgtaagaccgtagacaatctttaaa

SEQ ID NO: 113264 - DNA, 25 bp, Homo sapien
cgtaagaccgtacacaatctttaaa

SEQ ID NO: 113265 - DNA, 25 bp, Homo sapien
gtgattccttctagattctatggaa

SEQ ID NO: 113266 - DNA, 25 bp, Homo sapien
gtgattccttcttgattctatggaa

SEQ ID NO: 113267 - DNA, 25 bp, Homo sapien
ctgtatactttttacaacagtaagt

SEQ ID NO: 113268 - DNA, 25 bp, Homo sapien
ctgtatacttttaacaacagtaagt

SEQ ID NO: 113269 - DNA, 25 bp, Homo sapien
ggacctcaatggagtcgaccgactc

SEQ ID NO: 113270 - DNA, 25 bp, Homo sapien
ggacctcaatggtgtcgaccgactc

SEQ ID NO: 113271 - DNA, 25 bp, Homo sapien
aggtaccaggtcctttcccggacac

SEQ ID NO: 113272 - DNA, 25 bp, Homo sapien
aggtaccaggtcgtttcccggacac

SEQ ID NO: 113273 - DNA, 25 bp, Homo sapien
tggagtgtccggtcattctttgtcc

SEQ ID NO: 113274 - DNA, 25 bp, Homo sapien
tggagtgtccggacattctttgtcc

SEQ ID NO: 113275 - DNA, 25 bp, Homo sapien
gtcacgtgtcgtctcattttcttca

SEQ ID NO: 113276 - DNA, 25 bp, Homo sapien
gtcacgtgtcgtgtcattttcttca

SEQ ID NO: 113277 - DNA, 25 bp, Homo sapien
cgtcttgtttgcatgttctgtctca

SEQ ID NO: 113278 - DNA, 25 bp, Homo sapien
cgtcttgtttgcttgttctgtctca

SEQ ID NO: 113279 - DNA, 25 bp, Homo sapien
gacgtttagattcttcttattgaac

SEQ ID NO: 113280 - DNA, 25 bp, Homo sapien
gacgtttagattgttcttattgaac

SEQ ID NO: 113281 - DNA, 25 bp, Homo sapien
tctgtagtattcaatgtctttgtcc

SEQ ID NO: 113282 - DNA, 25 bp, Homo sapien
tctgtagtattctatgtctttgtcc

SEQ ID NO: 113283 - DNA, 25 bp, Homo sapien
actatttgaatttcacgattttgtc

SEQ ID NO: 113284 - DNA, 25 bp, Homo sapien
actatttgaattacacgattttgtc

SEQ ID NO: 113285 - DNA, 25 bp, Homo sapien
agtgataaatgtcgtcttttcggtc

SEQ ID NO: 113286 - DNA, 25 bp, Homo sapien
agtgataaatgtggtcttttcggtc

SEQ ID NO: 113287 - DNA, 25 bp, Homo sapien
tatctgaaataacttcagtcacgga

SEQ ID NO: 113288 - DNA, 25 bp, Homo sapien
tatctgaaataagttcagtcacgga

SEQ ID NO: 113289 - DNA, 25 bp, Homo sapien
gaccttatttgacttcatcagagtg

SEQ ID NO: 113290 - DNA, 25 bp, Homo sapien
gaccttatttgagttcatcagagtg

SEQ ID NO: 113291 - DNA, 25 bp, Homo sapien
tatttacttttcaggcaaatgacgt

SEQ ID NO: 113292 - DNA, 25 bp, Homo sapien
tatttacttttctggcaaatgacgt

SEQ ID NO: 113293 - DNA, 25 bp, Homo sapien
ccactttactcttctcggggcaaga

SEQ ID NO: 113294 - DNA, 25 bp, Homo sapien
ccactttactctactcggggcaaga

SEQ ID NO: 113295 - DNA, 25 bp, Homo sapien
tggtatcttcgaaccccggaagaga

SEQ ID NO: 113296 - DNA, 25 bp, Homo sapien
tggtatcttcgatccccggaagaga

SEQ ID NO: 113297 - DNA, 25 bp, Homo sapien
gtcgggatccagacccgccgaggaa

SEQ ID NO: 113298 - DNA, 25 bp, Homo sapien
gtcgggatccagtcccgccgaggaa

SEQ ID NO: 113299 - DNA, 25 bp, Homo sapien
cccgagtttacgacatccaacaaag

SEQ ID NO: 113300 - DNA, 25 bp, Homo sapien
cccgagtttacgtcatccaacaaag

SEQ ID NO: 113301 - DNA, 25 bp, Homo sapien
tctacaagttcgacctgaaaaaagt

SEQ ID NO: 113302 - DNA, 25 bp, Homo sapien
tctacaagttcgtcctgaaaaaagt

SEQ ID NO: 113303 - DNA, 25 bp, Homo sapien
aacgagtgttgtcttaggtaaaccc

SEQ ID NO: 113304 - DNA, 25 bp, Homo sapien
aacgagtgttgtgttaggtaaaccc

SEQ ID NO: 113305 - DNA, 25 bp, Homo sapien
acacttttgaacgagtggacgaccc

SEQ ID NO: 113306 - DNA, 25 bp, Homo sapien
acacttttgaaccagtggacgaccc

SEQ ID NO: 113307 - DNA, 25 bp, Homo sapien
gctcagtgtctctaaccagtagttg

SEQ ID NO: 113308 - DNA, 25 bp, Homo sapien
gctcagtgtctcaaaccagtagttg

SEQ ID NO: 113309 - DNA, 25 bp, Homo sapien
ccagtagtaacgaacaagaacttag

SEQ ID NO: 113310 - DNA, 25 bp, Homo sapien
ccagtagtaacgtacaagaacttag

SEQ ID NO: 113311 - DNA, 25 bp, Homo sapien
actgtgactgaaacggagccgtgtg

SEQ ID NO: 113312 - DNA, 25 bp, Homo sapien
actgtgactgaatcggagccgtgtg

SEQ ID NO: 113313 - DNA, 25 bp, Homo sapien
accgcagtgacttcgagagtctgtg

SEQ ID NO: 113314 - DNA, 25 bp, Homo sapien
accgcagtgactacgagagtctgtg

SEQ ID NO: 113315 - DNA, 25 bp, Homo sapien
gggacccaagacgtctcggtccggt

SEQ ID NO: 113316 - DNA, 25 bp, Homo sapien
gggacccaagacctctcggtccggt

SEQ ID NO: 113317 - DNA, 25 bp, Homo sapien
ctgagttgtccgtagtgtagtctat

SEQ ID NO: 113318 - DNA, 25 bp, Homo sapien
ctgagttgtccgaagtgtagtctat

SEQ ID NO: 113319 - DNA, 25 bp, Homo sapien
atcactttgtccccgttaccacgcg

SEQ ID NO: 113320 - DNA, 25 bp, Homo sapien
atcactttgtccgcgttaccacgcg

SEQ ID NO: 113321 - DNA, 25 bp, Homo sapien
gggtggtagtacttatgactcgaac

SEQ ID NO: 113322 - DNA, 25 bp, Homo sapien
gggtggtagtacatatgactcgaac

SEQ ID NO: 113323 - DNA, 25 bp, Homo sapien
gaccgagctcgatactcgacaagat

SEQ ID NO: 113324 - DNA, 25 bp, Homo sapien
gaccgagctcgaaactcgacaagat

SEQ ID NO: 113325 - DNA, 25 bp, Homo sapien
acacgtgcgtctcctacaacaggac

SEQ ID NO: 113326 - DNA, 25 bp, Homo sapien
acacgtgcgtctgctacaacaggac

SEQ ID NO: 113327 - DNA, 25 bp, Homo sapien
actcttatcgaggagagacacatac

SEQ ID NO: 113328 - DNA, 25 bp, Homo sapien
actcttatcgagcagagacacatac

SEQ ID NO: 113329 - DNA, 25 bp, Homo sapien
aggcgctagacgaacaatccgtatt

SEQ ID NO: 113330 - DNA, 25 bp, Homo sapien
aggcgctagacgtacaatccgtatt

SEQ ID NO: 113331 - DNA, 25 bp, Homo sapien
aagcaccagaacgtcttcgctctcg

SEQ ID NO: 113332 - DNA, 25 bp, Homo sapien
aagcaccagaacctcttcgctctcg

SEQ ID NO: 113333 - DNA, 25 bp, Homo sapien
ggacgagggactcctgtgtagtccc

SEQ ID NO: 113334 - DNA, 25 bp, Homo sapien
ggacgagggactgctgtgtagtccc

SEQ ID NO: 113335 - DNA, 25 bp, Homo sapien
gggataactggttactgttcttacc

SEQ ID NO: 113336 - DNA, 25 bp, Homo sapien
gggataactggtaactgttcttacc

SEQ ID NO: 113337 - DNA, 25 bp, Homo sapien
tgggatactccgacgtttctaccct

SEQ ID NO: 113338 - DNA, 25 bp, Homo sapien
tgggatactccgtcgtttctaccct

SEQ ID NO: 113339 - DNA, 25 bp, Homo sapien
ggtgtgtcaccagactcgtctccgc

SEQ ID NO: 113340 - DNA, 25 bp, Homo sapien
ggtgtgtcaccacactcgtctccgc

SEQ ID NO: 113341 - DNA, 25 bp, Homo sapien
ttgcgtctagtcagaacttcaggac

SEQ ID NO: 113342 - DNA, 25 bp, Homo sapien
ttgcgtctagtctgaacttcaggac

SEQ ID NO: 113343 - DNA, 25 bp, Homo sapien
ttttgcgtctagtcagaacttcagg

SEQ ID NO: 113344 - DNA, 25 bp, Homo sapien
ttttgcgtctagacagaacttcagg

SEQ ID NO: 113345 - DNA, 25 bp, Homo sapien
agaccacgttctaagaaccgttgtc

SEQ ID NO: 113346 - DNA, 25 bp, Homo sapien
agaccacgttcttagaaccgttgtc

SEQ ID NO: 113347 - DNA, 25 bp, Homo sapien
gttgaagacatctcaacagtatgtc

SEQ ID NO: 113348 - DNA, 25 bp, Homo sapien
gttgaagacatcacaacagtatgtc

SEQ ID NO: 113349 - DNA, 25 bp, Homo sapien
gagtgacaggaaaccgtactctatc

SEQ ID NO: 113350 - DNA, 25 bp, Homo sapien
gagtgacaggaatccgtactctatc

SEQ ID NO: 113351 - DNA, 25 bp, Homo sapien
gtgacaaaagaagttcagtctcagc

SEQ ID NO: 113352 - DNA, 25 bp, Homo sapien
gtgacaaaagaacttcagtctcagc

SEQ ID NO: 113353 - DNA, 25 bp, Homo sapien
aaaggtagtaagactattgtgcccg

SEQ ID NO: 113354 - DNA, 25 bp, Homo sapien
aaaggtagtaagtctattgtgcccg

SEQ ID NO: 113355 - DNA, 25 bp, Homo sapien
gggtcgtgtcgactatcgtcctccc

SEQ ID NO: 113356 - DNA, 25 bp, Homo sapien
gggtcgtgtcgagtatcgtcctccc

SEQ ID NO: 113357 - DNA, 25 bp, Homo sapien
agagggtccaacagagtccctcgta

SEQ ID NO: 113358 - DNA, 25 bp, Homo sapien
agagggtccaactgagtccctcgta

SEQ ID NO: 113359 - DNA, 25 bp, Homo sapien
agttgtgttcagcacgttaccccta

SEQ ID NO: 113360 - DNA, 25 bp, Homo sapien
agttgtgttcaggacgttaccccta

SEQ ID NO: 113361 - DNA, 25 bp, Homo sapien
gttacgtctgtcagaatatccttca

SEQ ID NO: 113362 - DNA, 25 bp, Homo sapien
gttacgtctgtctgaatatccttca

SEQ ID NO: 113363 - DNA, 25 bp, Homo sapien
gtcttttgtcctatacccgtctgtc

SEQ ID NO: 113364 - DNA, 25 bp, Homo sapien
gtcttttgtcctttacccgtctgtc

SEQ ID NO: 113365 - DNA, 25 bp, Homo sapien
tttcatgtgttcttattcgatcgac

SEQ ID NO: 113366 - DNA, 25 bp, Homo sapien
tttcatgtgttcatattcgatcgac

SEQ ID NO: 113367 - DNA, 25 bp, Homo sapien
tcgtcactatatgtgtcgtgtttta

SEQ ID NO: 113368 - DNA, 25 bp, Homo sapien
tcgtcactatatctgtcgtgtttta

SEQ ID NO: 113369 - DNA, 25 bp, Homo sapien
ggacgacgactcaactctatttatt

SEQ ID NO: 113370 - DNA, 25 bp, Homo sapien
ggacgacgactctactctatttatt

SEQ ID NO: 113371 - DNA, 25 bp, Homo sapien
atactgagaggagtctctcgggtga

SEQ ID NO: 113372 - DNA, 25 bp, Homo sapien
atactgagaggactctctcgggtga

SEQ ID NO: 113373 - DNA, 25 bp, Homo sapien
atactcacgagtggaccctttaaga

SEQ ID NO: 113374 - DNA, 25 bp, Homo sapien
atactcacgagtcgaccctttaaga

SEQ ID NO: 113375 - DNA, 25 bp, Homo sapien
ccgacggaacgatgtgttcgttgac

SEQ ID NO: 113376 - DNA, 25 bp, Homo sapien
ccgacggaacgaagtgttcgttgac

SEQ ID NO: 113377 - DNA, 25 bp, Homo sapien
caccctagttctcgtcgttttcgtc

SEQ ID NO: 113378 - DNA, 25 bp, Homo sapien
caccctagttctggtcgttttcgtc

SEQ ID NO: 113379 - DNA, 25 bp, Homo sapien
ggtctaacttataccgtttctcgtg

SEQ ID NO: 113380 - DNA, 25 bp, Homo sapien
ggtctaacttattccgtttctcgtg

SEQ ID NO: 113381 - DNA, 25 bp, Homo sapien
agtgtctccctttctctttgtcctg

SEQ ID NO: 113382 - DNA, 25 bp, Homo sapien
agtgtctcccttactctttgtcctg

SEQ ID NO: 113383 - DNA, 25 bp, Homo sapien
gtcctccctgtcagtgttaactcat

SEQ ID NO: 113384 - DNA, 25 bp, Homo sapien
gtcctccctgtctgtgttaactcat

SEQ ID NO: 113385 - DNA, 25 bp, Homo sapien
gggtcggacccttctggttctccct

SEQ ID NO: 113386 - DNA, 25 bp, Homo sapien
gggtcggaccctactggttctccct

SEQ ID NO: 113387 - DNA, 25 bp, Homo sapien
gtccggatcccgtctcagttccgag

SEQ ID NO: 113388 - DNA, 25 bp, Homo sapien
gtccggatcccgactcagttccgag

SEQ ID NO: 113389 - DNA, 25 bp, Homo sapien
agggaagatctccaccgaagtggga

SEQ ID NO: 113390 - DNA, 25 bp, Homo sapien
agggaagatctcgaccgaagtggga

SEQ ID NO: 113391 - DNA, 25 bp, Homo sapien
ctaagtttaggaccacggtactaaa

SEQ ID NO: 113392 - DNA, 25 bp, Homo sapien
ctaagtttaggagcacggtactaaa

SEQ ID NO: 113393 - DNA, 25 bp, Homo sapien
aagtggtacggtaccgagaacgaat

SEQ ID NO: 113394 - DNA, 25 bp, Homo sapien
aagtggtacggttccgagaacgaat

SEQ ID NO: 113395 - DNA, 25 bp, Homo sapien
tcacgagacctcaagaactggaaca

SEQ ID NO: 113396 - DNA, 25 bp, Homo sapien
tcacgagacctctagaactggaaca

SEQ ID NO: 113397 - DNA, 25 bp, Homo sapien
agttcgtcagactgaacttaaagat

SEQ ID NO: 113398 - DNA, 25 bp, Homo sapien
agttcgtcagacagaacttaaagat

SEQ ID NO: 113399 - DNA, 25 bp, Homo sapien
gtgtagtaatagacacgagactcga

SEQ ID NO: 113400 - DNA, 25 bp, Homo sapien
gtgtagtaatagtcacgagactcga

SEQ ID NO: 113401 - DNA, 25 bp, Homo sapien
ttggatatcataggtcgatttcgac

SEQ ID NO: 113402 - DNA, 25 bp, Homo sapien
ttggatatcatacgtcgatttcgac

SEQ ID NO: 113403 - DNA, 25 bp, Homo sapien
attatagtcgaatcgtagtatttcc

SEQ ID NO: 113404 - DNA, 25 bp, Homo sapien
attatagtcgaaacgtagtatttcc

SEQ ID NO: 113405 - DNA, 25 bp, Homo sapien
cacaaaagagacgtcgtccgtcacc

SEQ ID NO: 113406 - DNA, 25 bp, Homo sapien
cacaaaagagacctcgtccgtcacc

SEQ ID NO: 113407 - DNA, 25 bp, Homo sapien
gaaccaaagagaaagtcgtgtccta

SEQ ID NO: 113408 - DNA, 25 bp, Homo sapien
gaaccaaagagatagtcgtgtccta

SEQ ID NO: 113409 - DNA, 25 bp, Homo sapien
caaaaaaggacgttagcggcgtctt

SEQ ID NO: 113410 - DNA, 25 bp, Homo sapien
caaaaaaggacgatagcggcgtctt

SEQ ID NO: 113411 - DNA, 25 bp, Homo sapien
tgacaaaggtaaaacgaccggaatt

SEQ ID NO: 113412 - DNA, 25 bp, Homo sapien
tgacaaaggtaatacgaccggaatt

SEQ ID NO: 113413 - DNA, 25 bp, Homo sapien
gtaaaaggcgctataacaactatct

SEQ ID NO: 113414 - DNA, 25 bp, Homo sapien
gtaaaaggcgctttaacaactatct

SEQ ID NO: 113415 - DNA, 25 bp, Homo sapien
gtcacttccgtgtctgtaagggttt

SEQ ID NO: 113416 - DNA, 25 bp, Homo sapien
gtcacttccgtgactgtaagggttt

SEQ ID NO: 113417 - DNA, 25 bp, Homo sapien
tcctagtggggcttcgaggtatgta

SEQ ID NO: 113418 - DNA, 25 bp, Homo sapien
tcctagtggggcatcgaggtatgta

SEQ ID NO: 113419 - DNA, 25 bp, Homo sapien
cttcgggtggttctcaggtaactag

SEQ ID NO: 113420 - DNA, 25 bp, Homo sapien
cttcgggtggttgtcaggtaactag

SEQ ID NO: 113421 - DNA, 25 bp, Homo sapien
cggccggaccggtgcacagctagca

SEQ ID NO: 113422 - DNA, 25 bp, Homo sapien
cggccggaccggagcacagctagca

SEQ ID NO: 113423 - DNA, 25 bp, Homo sapien
tagtcgtgaaggagtaggtgaccca

SEQ ID NO: 113424 - DNA, 25 bp, Homo sapien
tagtcgtgaaggtgtaggtgaccca

SEQ ID NO: 113425 - DNA, 25 bp, Homo sapien
ttgaggtatgttgaggcccacgtgt

SEQ ID NO: 113426 - DNA, 25 bp, Homo sapien
ttgaggtatgttcaggcccacgtgt

SEQ ID NO: 113427 - DNA, 25 bp, Homo sapien
tcccgacgggttaagggtctcccct

SEQ ID NO: 113428 - DNA, 25 bp, Homo sapien
tcccgacgggtttagggtctcccct

SEQ ID NO: 113429 - DNA, 25 bp, Homo sapien
ggtctcaatcggagggtccgaacgc

SEQ ID NO: 113430 - DNA, 25 bp, Homo sapien
ggtctcaatcggtgggtccgaacgc

SEQ ID NO: 113431 - DNA, 25 bp, Homo sapien
gtgcgcacccaggagaggcccgagc

SEQ ID NO: 113432 - DNA, 25 bp, Homo sapien
gtgcgcacccagcagaggcccgagc

SEQ ID NO: 113433 - DNA, 25 bp, Homo sapien
gaccacctaggtcaggctgtcgagg

SEQ ID NO: 113434 - DNA, 25 bp, Homo sapien
gaccacctaggtgaggctgtcgagg

SEQ ID NO: 113435 - DNA, 25 bp, Homo sapien
tcagttacggcagaggcctcaagtg

SEQ ID NO: 113436 - DNA, 25 bp, Homo sapien
tcagttacggcacaggcctcaagtg

SEQ ID NO: 113437 - DNA, 25 bp, Homo sapien
tacatgaacggcacggcccctagtg

SEQ ID NO: 113438 - DNA, 25 bp, Homo sapien
tacatgaacggctcggcccctagtg

SEQ ID NO: 113439 - DNA, 25 bp, Homo sapien
gacccgtggtctcttcgctgtagtg

SEQ ID NO: 113440 - DNA, 25 bp, Homo sapien
gacccgtggtctgttcgctgtagtg

SEQ ID NO: 113441 - DNA, 25 bp, Homo sapien
cgactcaggcacctggtctccggag

SEQ ID NO: 113442 - DNA, 25 bp, Homo sapien
cgactcaggcacgtggtctccggag

SEQ ID NO: 113443 - DNA, 25 bp, Homo sapien
ggtacctggtcaatcctatcgccat

SEQ ID NO: 113444 - DNA, 25 bp, Homo sapien
ggtacctggtcattcctatcgccat

SEQ ID NO: 113445 - DNA, 25 bp, Homo sapien
ttcacagttctcggctcttccgtgg

SEQ ID NO: 113446 - DNA, 25 bp, Homo sapien
ttcacagttctccgctcttccgtgg

SEQ ID NO: 113447 - DNA, 25 bp, Homo sapien
gacttcagtttaggtcatttactcc

SEQ ID NO: 113448 - DNA, 25 bp, Homo sapien
gacttcagtttacgtcatttactcc

SEQ ID NO: 113449 - DNA, 25 bp, Homo sapien
tgacctccgatgaccctttcgagtc

SEQ ID NO: 113450 - DNA, 25 bp, Homo sapien
tgacctccgatgtccctttcgagtc

SEQ ID NO: 113451 - DNA, 25 bp, Homo sapien
acttacctcaacctcttgtgtgttg

SEQ ID NO: 113452 - DNA, 25 bp, Homo sapien
acttacctcaacgtcttgtgtgttg

SEQ ID NO: 113453 - DNA, 25 bp, Homo sapien
cctcagtccactaggtcaggtaagg

SEQ ID NO: 113454 - DNA, 25 bp, Homo sapien
cctcagtccacttggtcaggtaagg

SEQ ID NO: 113455 - DNA, 25 bp, Homo sapien
attgcagccttaccatgtgtgacaa

SEQ ID NO: 113456 - DNA, 25 bp, Homo sapien
attgcagccttagcatgtgtgacaa

SEQ ID NO: 113457 - DNA, 25 bp, Homo sapien
ctttatgaattacactactgggtaa

SEQ ID NO: 113458 - DNA, 25 bp, Homo sapien
ctttatgaattagactactgggtaa

SEQ ID NO: 113459 - DNA, 25 bp, Homo sapien
acttaggtgtctcgaaagaggtaca

SEQ ID NO: 113460 - DNA, 25 bp, Homo sapien
acttaggtgtctggaaagaggtaca

SEQ ID NO: 113461 - DNA, 25 bp, Homo sapien
ctacagagaatgttccaccggggag

SEQ ID NO: 113462 - DNA, 25 bp, Homo sapien
ctacagagaatgatccaccggggag

SEQ ID NO: 113463 - DNA, 25 bp, Homo sapien
gagtagacgttttcacaacaggtgg

SEQ ID NO: 113464 - DNA, 25 bp, Homo sapien
gagtagacgtttacacaacaggtgg

SEQ ID NO: 113465 - DNA, 25 bp, Homo sapien
tcatgtctattgaactgacttgtga

SEQ ID NO: 113466 - DNA, 25 bp, Homo sapien
tcatgtctattgtactgacttgtga

SEQ ID NO: 113467 - DNA, 25 bp, Homo sapien
tctctgacttacgagtttgtttgat

SEQ ID NO: 113468 - DNA, 25 bp, Homo sapien
tctctgacttaccagtttgtttgat

SEQ ID NO: 113469 - DNA, 25 bp, Homo sapien
tctgttgactttgttgacgtctaaa

SEQ ID NO: 113470 - DNA, 25 bp, Homo sapien
tctgttgactttcttgacgtctaaa

SEQ ID NO: 113471 - DNA, 25 bp, Homo sapien
gtagttttcttggtcctacagaaag

SEQ ID NO: 113472 - DNA, 25 bp, Homo sapien
gtagttttcttgctcctacagaaag

SEQ ID NO: 113473 - DNA, 25 bp, Homo sapien
ggtcttccgtcttccgctcacggga

SEQ ID NO: 113474 - DNA, 25 bp, Homo sapien
ggtcttccgtctaccgctcacggga

SEQ ID NO: 113475 - DNA, 25 bp, Homo sapien
gtgtccgaatggatgttccgtcaga

SEQ ID NO: 113476 - DNA, 25 bp, Homo sapien
gtgtccgaatggttgttccgtcaga

SEQ ID NO: 113477 - DNA, 25 bp, Homo sapien
tgtcttatatagtgttacgaccaat

SEQ ID NO: 113478 - DNA, 25 bp, Homo sapien
tgtcttatatagagttacgaccaat

SEQ ID NO: 113479 - DNA, 25 bp, Homo sapien
ctatccttaaagacgttgttcagtt

SEQ ID NO: 113480 - DNA, 25 bp, Homo sapien
ctatccttaaagtcgttgttcagtt

SEQ ID NO: 113481 - DNA, 25 bp, Homo sapien
tctgtaagtgtttttacactcgtct

SEQ ID NO: 113482 - DNA, 25 bp, Homo sapien
tctgtaagtgttattacactcgtct

SEQ ID NO: 113483 - DNA, 25 bp, Homo sapien
aaagacttgttggttttctcttgtc

SEQ ID NO: 113484 - DNA, 25 bp, Homo sapien
aaagacttgttgcttttctcttgtc

SEQ ID NO: 113485 - DNA, 25 bp, Homo sapien
ggatctactttgtatgacttttcta

SEQ ID NO: 113486 - DNA, 25 bp, Homo sapien
ggatctactttgaatgacttttcta

SEQ ID NO: 113487 - DNA, 25 bp, Homo sapien
gagtcccgacgaagttcaccctaat

SEQ ID NO: 113488 - DNA, 25 bp, Homo sapien
gagtcccgacgatgttcaccctaat

SEQ ID NO: 113489 - DNA, 25 bp, Homo sapien
tcaccgcgtacttgcgacctcgaat

SEQ ID NO: 113490 - DNA, 25 bp, Homo sapien
tcaccgcgtactagcgacctcgaat

SEQ ID NO: 113491 - DNA, 25 bp, Homo sapien
agtactcggagagtcgaagtcgtga

SEQ ID NO: 113492 - DNA, 25 bp, Homo sapien
agtactcggagactcgaagtcgtga

SEQ ID NO: 113493 - DNA, 25 bp, Homo sapien
aaagaccgagtcgtactacaaggga

SEQ ID NO: 113494 - DNA, 25 bp, Homo sapien
aaagaccgagtcctactacaaggga

SEQ ID NO: 113495 - DNA, 25 bp, Homo sapien
ccagagatgttcactataatagaca

SEQ ID NO: 113496 - DNA, 25 bp, Homo sapien
ccagagatgttctctataatagaca

SEQ ID NO: 113497 - DNA, 25 bp, Homo sapien
ggtagaagagccactaagaagacat

SEQ ID NO: 113498 - DNA, 25 bp, Homo sapien
ggtagaagagcctctaagaagacat

SEQ ID NO: 113499 - DNA, 25 bp, Homo sapien
gagtaacaaaacttcagacatagga

SEQ ID NO: 113500 - DNA, 25 bp, Homo sapien
gagtaacaaaacatcagacatagga

SEQ ID NO: 113501 - DNA, 25 bp, Homo sapien
taggtatacgaacccagtaccttaa

SEQ ID NO: 113502 - DNA, 25 bp, Homo sapien
taggtatacgaagccagtaccttaa

SEQ ID NO: 113503 - DNA, 25 bp, Homo sapien
tggagtatcggtcgaacccggtcga

SEQ ID NO: 113504 - DNA, 25 bp, Homo sapien
tggagtatcggtggaacccggtcga

SEQ ID NO: 113505 - DNA, 25 bp, Homo sapien
ataccgtgtggtaaccgcggctagt

SEQ ID NO: 113506 - DNA, 25 bp, Homo sapien
ataccgtgtggttaccgcggctagt

SEQ ID NO: 113507 - DNA, 25 bp, Homo sapien
tgtctgtgttccacgtatacacagt

SEQ ID NO: 113508 - DNA, 25 bp, Homo sapien
tgtctgtgttcctcgtatacacagt

SEQ ID NO: 113509 - DNA, 25 bp, Homo sapien
tttggtgtcgtttcgcccgtctcaa

SEQ ID NO: 113510 - DNA, 25 bp, Homo sapien
tttggtgtcgttacgcccgtctcaa

SEQ ID NO: 113511 - DNA, 25 bp, Homo sapien
gaaaatttcgtttacccctcaggag

SEQ ID NO: 113512 - DNA, 25 bp, Homo sapien
gaaaatttcgttaacccctcaggag

SEQ ID NO: 113513 - DNA, 25 bp, Homo sapien
caaggtagtccgacccggccgcgag

SEQ ID NO: 113514 - DNA, 25 bp, Homo sapien
caaggtagtccgtcccggccgcgag

SEQ ID NO: 113515 - DNA, 25 bp, Homo sapien
tatgtctcctgtgtgtgtcgaatat

SEQ ID NO: 113516 - DNA, 25 bp, Homo sapien
tatgtctcctgtctgtgtcgaatat

SEQ ID NO: 113517 - DNA, 25 bp, Homo sapien
cttgtgtattctttgtggcatatac

SEQ ID NO: 113518 - DNA, 25 bp, Homo sapien
cttgtgtattctatgtggcatatac

SEQ ID NO: 113519 - DNA, 25 bp, Homo sapien
tgtgtgtgtgactctttcgctgttc

SEQ ID NO: 113520 - DNA, 25 bp, Homo sapien
tgtgtgtgtgacactttcgctgttc

SEQ ID NO: 113521 - DNA, 25 bp, Homo sapien
agtatttcggttcctctccggtttc

SEQ ID NO: 113522 - DNA, 25 bp, Homo sapien
agtatttcggttgctctccggtttc

SEQ ID NO: 113523 - DNA, 25 bp, Homo sapien
atacactgatgtttcttggtcgctt

SEQ ID NO: 113524 - DNA, 25 bp, Homo sapien
atacactgatgtatcttggtcgctt

SEQ ID NO: 113525 - DNA, 25 bp, Homo sapien
acgttgagtccttgtcgatagaccg

SEQ ID NO: 113526 - DNA, 25 bp, Homo sapien
acgttgagtcctagtcgatagaccg

SEQ ID NO: 113527 - DNA, 25 bp, Homo sapien
ggtccttcggctacatgaagtaccg

SEQ ID NO: 113528 - DNA, 25 bp, Homo sapien
ggtccttcggcttcatgaagtaccg

SEQ ID NO: 113529 - DNA, 25 bp, Homo sapien
accggacggtgtccatgtactataa

SEQ ID NO: 113530 - DNA, 25 bp, Homo sapien
accggacggtgtgcatgtactataa

SEQ ID NO: 113531 - DNA, 25 bp, Homo sapien
atcacgaccctggttcacttcagga

SEQ ID NO: 113532 - DNA, 25 bp, Homo sapien
atcacgaccctgcttcacttcagga

SEQ ID NO: 113533 - DNA, 25 bp, Homo sapien
atcggaacctgctctacggccacag

SEQ ID NO: 113534 - DNA, 25 bp, Homo sapien
atcggaacctgcactacggccacag

SEQ ID NO: 113535 - DNA, 25 bp, Homo sapien
tttaagacacagttattcgccaaag

SEQ ID NO: 113536 - DNA, 25 bp, Homo sapien
tttaagacacagatattcgccaaag

SEQ ID NO: 113537 - DNA, 25 bp, Homo sapien
agggtaaaactttctgaccaagggt

SEQ ID NO: 113538 - DNA, 25 bp, Homo sapien
agggtaaaacttactgaccaagggt

SEQ ID NO: 113539 - DNA, 25 bp, Homo sapien
tatctcacttgtaggacgggtcccg

SEQ ID NO: 113540 - DNA, 25 bp, Homo sapien
tatctcacttgttggacgggtcccg

SEQ ID NO: 113541 - DNA, 25 bp, Homo sapien
tgtgtttccccgtgcggttcccgcg

SEQ ID NO: 113542 - DNA, 25 bp, Homo sapien
tgtgtttccccgagcggttcccgcg

SEQ ID NO: 113543 - DNA, 25 bp, Homo sapien
gtcggttccacagtggggccacaca

SEQ ID NO: 113544 - DNA, 25 bp, Homo sapien
gtcggttccacactggggccacaca

SEQ ID NO: 113545 - DNA, 25 bp, Homo sapien
atcgtgtatctacagtcgtggaaac

SEQ ID NO: 113546 - DNA, 25 bp, Homo sapien
atcgtgtatctagagtcgtggaaac

SEQ ID NO: 113547 - DNA, 25 bp, Homo sapien
tgactcggtcacttgccgtggaaat

SEQ ID NO: 113548 - DNA, 25 bp, Homo sapien
tgactcggtcacatgccgtggaaat

SEQ ID NO: 113549 - DNA, 25 bp, Homo sapien
tgtctgtgccactgacccggcggtc

SEQ ID NO: 113550 - DNA, 25 bp, Homo sapien
tgtctgtgccacagacccggcggtc

SEQ ID NO: 113551 - DNA, 25 bp, Homo sapien
ttccgtagcaaactcctagtcgagc

SEQ ID NO: 113552 - DNA, 25 bp, Homo sapien
ttccgtagcaaagtcctagtcgagc

SEQ ID NO: 113553 - DNA, 25 bp, Homo sapien
gtctcgcctcaacttgcagtggaag

SEQ ID NO: 113554 - DNA, 25 bp, Homo sapien
gtctcgcctcaagttgcagtggaag

SEQ ID NO: 113555 - DNA, 25 bp, Homo sapien
tcgttcctccgtctttcacggttaa

SEQ ID NO: 113556 - DNA, 25 bp, Homo sapien
tcgttcctccgtgtttcacggttaa

SEQ ID NO: 113557 - DNA, 25 bp, Homo sapien
tagttttcaaagagtcacgacgaaa

SEQ ID NO: 113558 - DNA, 25 bp, Homo sapien
tagttttcaaagtgtcacgacgaaa

SEQ ID NO: 113559 - DNA, 25 bp, Homo sapien
tcacgtgtcgggactctccaatgta

SEQ ID NO: 113560 - DNA, 25 bp, Homo sapien
tcacgtgtcgggtctctccaatgta

SEQ ID NO: 113561 - DNA, 25 bp, Homo sapien
gtgtcgttcggatattccacttgta

SEQ ID NO: 113562 - DNA, 25 bp, Homo sapien
gtgtcgttcggaaattccacttgta

SEQ ID NO: 113563 - DNA, 25 bp, Homo sapien
agtagttgagaatcaaccagttgac

SEQ ID NO: 113564 - DNA, 25 bp, Homo sapien
agtagttgagaaacaaccagttgac

SEQ ID NO: 113565 - DNA, 25 bp, Homo sapien
gaagatttcataaccataatgtaga

SEQ ID NO: 113566 - DNA, 25 bp, Homo sapien
gaagatttcatatccataatgtaga

SEQ ID NO: 113567 - DNA, 25 bp, Homo sapien
cgaggatataaactcaaaatgtctt

SEQ ID NO: 113568 - DNA, 25 bp, Homo sapien
cgaggatataaagtcaaaatgtctt

SEQ ID NO: 113569 - DNA, 25 bp, Homo sapien
aaaagtaacaagactccttattagg

SEQ ID NO: 113570 - DNA, 25 bp, Homo sapien
aaaagtaacaagtctccttattagg

SEQ ID NO: 113571 - DNA, 25 bp, Homo sapien
taaaaggttatcctttatgactacg

SEQ ID NO: 113572 - DNA, 25 bp, Homo sapien
taaaaggttatcgtttatgactacg

SEQ ID NO: 113573 - DNA, 25 bp, Homo sapien
ccgtagaagaattgaagtttcctgt

SEQ ID NO: 113574 - DNA, 25 bp, Homo sapien
ccgtagaagaatagaagtttcctgt

SEQ ID NO: 113575 - DNA, 25 bp, Homo sapien
acccgaggaagctgagaagccccag

SEQ ID NO: 113576 - DNA, 25 bp, Homo sapien
acccgaggaagcagagaagccccag

SEQ ID NO: 113577 - DNA, 25 bp, Homo sapien
acccaggagaggcccgagccctcat

SEQ ID NO: 113578 - DNA, 25 bp, Homo sapien
acccaggagagggccgagccctcat

SEQ ID NO: 113579 - DNA, 25 bp, Homo sapien
accaagactggagacccgtggacga

SEQ ID NO: 113580 - DNA, 25 bp, Homo sapien
accaagactggacacccgtggacga

SEQ ID NO: 113581 - DNA, 25 bp, Homo sapien
atccggactgggactcggacggaac

SEQ ID NO: 113582 - DNA, 25 bp, Homo sapien
atccggactgggtctcggacggaac

SEQ ID NO: 113583 - DNA, 25 bp, Homo sapien
gagaagaacgtcctccacgtaaacg

SEQ ID NO: 113584 - DNA, 25 bp, Homo sapien
gagaagaacgtcgtccacgtaaacg

SEQ ID NO: 113585 - DNA, 25 bp, Homo sapien
agataagaaatcgtcagaaactact

SEQ ID NO: 113586 - DNA, 25 bp, Homo sapien
agataagaaatcctcagaaactact

SEQ ID NO: 113587 - DNA, 25 bp, Homo sapien
ttatgacgagaaacccgacattatt

SEQ ID NO: 113588 - DNA, 25 bp, Homo sapien
ttatgacgagaatcccgacattatt

SEQ ID NO: 113589 - DNA, 25 bp, Homo sapien
ttgtagataaagtcctaaaccttcg

SEQ ID NO: 113590 - DNA, 25 bp, Homo sapien
ttgtagataaagacctaaaccttcg

SEQ ID NO: 113591 - DNA, 25 bp, Homo sapien
gtgactactaacgacacagaaccaa

SEQ ID NO: 113592 - DNA, 25 bp, Homo sapien
gtgactactaaccacacagaaccaa

SEQ ID NO: 113593 - DNA, 25 bp, Homo sapien
cggtgactattaactccaaagaaag

SEQ ID NO: 113594 - DNA, 25 bp, Homo sapien
cggtgactattatctccaaagaaag

SEQ ID NO: 113595 - DNA, 25 bp, Homo sapien
gtagcagtactttctgacaagatgc

SEQ ID NO: 113596 - DNA, 25 bp, Homo sapien
gtagcagtacttactgacaagatgc

SEQ ID NO: 113597 - DNA, 25 bp, Homo sapien
ttttcgacgataaatgttttctgtt

SEQ ID NO: 113598 - DNA, 25 bp, Homo sapien
ttttcgacgatatatgttttctgtt

SEQ ID NO: 113599 - DNA, 25 bp, Homo sapien
ttatcgacggagatccgactttttt

SEQ ID NO: 113600 - DNA, 25 bp, Homo sapien
ttatcgacggagttccgactttttt

SEQ ID NO: 113601 - DNA, 25 bp, Homo sapien
atacatgtcaggtcgggtcgttttc

SEQ ID NO: 113602 - DNA, 25 bp, Homo sapien
atacatgtcaggacgggtcgttttc

SEQ ID NO: 113603 - DNA, 25 bp, Homo sapien
aaagtctgtaaaagatctctcttcg

SEQ ID NO: 113604 - DNA, 25 bp, Homo sapien
aaagtctgtaaatgatctctcttcg

SEQ ID NO: 113605 - DNA, 25 bp, Homo sapien
gtactatgattgttgccaccttccc

SEQ ID NO: 113606 - DNA, 25 bp, Homo sapien
gtactatgattgatgccaccttccc

SEQ ID NO: 113607 - DNA, 25 bp, Homo sapien
gttaagtcatagaaaaccgaatcaa

SEQ ID NO: 113608 - DNA, 25 bp, Homo sapien
gttaagtcatagtaaaccgaatcaa

SEQ ID NO: 113609 - DNA, 25 bp, Homo sapien
tcaggctgtcgaggacccgaaagag

SEQ ID NO: 113610 - DNA, 25 bp, Homo sapien
tcaggctgtcgacgacccgaaagag

SEQ ID NO: 113611 - DNA, 25 bp, Homo sapien
aaaacttactccttcgagagaagta

SEQ ID NO: 113612 - DNA, 25 bp, Homo sapien
aaaacttactccatcgagagaagta

SEQ ID NO: 113613 - DNA, 25 bp, Homo sapien
atatatttctcctacagagtggtcc

SEQ ID NO: 113614 - DNA, 25 bp, Homo sapien
atatatttctccaacagagtggtcc

SEQ ID NO: 113615 - DNA, 25 bp, Homo sapien
agtcacctgtcctttgcgtggtata

SEQ ID NO: 113616 - DNA, 25 bp, Homo sapien
agtcacctgtccattgcgtggtata

SEQ ID NO: 113617 - DNA, 25 bp, Homo sapien
ctccgtacctctaagtcagagtacc

SEQ ID NO: 113618 - DNA, 25 bp, Homo sapien
ctccgtacctcttagtcagagtacc

SEQ ID NO: 113619 - DNA, 25 bp, Homo sapien
gttataagggattccgaagtcacgt

SEQ ID NO: 113620 - DNA, 25 bp, Homo sapien
gttataagggataccgaagtcacgt

SEQ ID NO: 113621 - DNA, 25 bp, Homo sapien
tacttcaggtcctgtggtttctagt

SEQ ID NO: 113622 - DNA, 25 bp, Homo sapien
tacttcaggtccagtggtttctagt

SEQ ID NO: 113623 - DNA, 25 bp, Homo sapien
tggacctcttattatacggttttat

SEQ ID NO: 113624 - DNA, 25 bp, Homo sapien
tggacctcttataatacggttttat

SEQ ID NO: 113625 - DNA, 25 bp, Homo sapien
agtgagtccgactatcttagtttta

SEQ ID NO: 113626 - DNA, 25 bp, Homo sapien
agtgagtccgacaatcttagtttta

SEQ ID NO: 113627 - DNA, 25 bp, Homo sapien
ggtccagacatcgtcttttattagt

SEQ ID NO: 113628 - DNA, 25 bp, Homo sapien
ggtccagacatcctcttttattagt

SEQ ID NO: 113629 - DNA, 25 bp, Homo sapien
gtcaagaagtacatcatgttttact

SEQ ID NO: 113630 - DNA, 25 bp, Homo sapien
gtcaagaagtacttcatgttttact

SEQ ID NO: 113631 - DNA, 25 bp, Homo sapien
gttagagtagaaggtctcctttttt

SEQ ID NO: 113632 - DNA, 25 bp, Homo sapien
gttagagtagaacgtctcctttttt

SEQ ID NO: 113633 - DNA, 25 bp, Homo sapien
gtcggacgatttcctacctttaatt

SEQ ID NO: 113634 - DNA, 25 bp, Homo sapien
gtcggacgatttgctacctttaatt

SEQ ID NO: 113635 - DNA, 25 bp, Homo sapien
gaggactgcgttaccaagtcggaaa

SEQ ID NO: 113636 - DNA, 25 bp, Homo sapien
gaggactgcgtttccaagtcggaaa

SEQ ID NO: 113637 - DNA, 25 bp, Homo sapien
taaacttccgtcttttgtgggataa

SEQ ID NO: 113638 - DNA, 25 bp, Homo sapien
taaacttccgtcatttgtgggataa

SEQ ID NO: 113639 - DNA, 25 bp, Homo sapien
tcgtctctgactttggtgtcgaatt

SEQ ID NO: 113640 - DNA, 25 bp, Homo sapien
tcgtctctgactatggtgtcgaatt

SEQ ID NO: 113641 - DNA, 25 bp, Homo sapien
acagtttcactgaacggtatttgtg

SEQ ID NO: 113642 - DNA, 25 bp, Homo sapien
acagtttcactgtacggtatttgtg

SEQ ID NO: 113643 - DNA, 25 bp, Homo sapien
acgactaatccctactcaatggtga

SEQ ID NO: 113644 - DNA, 25 bp, Homo sapien
acgactaatcccaactcaatggtga

SEQ ID NO: 113645 - DNA, 25 bp, Homo sapien
acggtcgaccaacacgaggtcggtc

SEQ ID NO: 113646 - DNA, 25 bp, Homo sapien
acggtcgaccaagacgaggtcggtc

SEQ ID NO: 113647 - DNA, 25 bp, Homo sapien
aagtggatcaaagagtcgtcggact

SEQ ID NO: 113648 - DNA, 25 bp, Homo sapien
aagtggatcaaacagtcgtcggact

SEQ ID NO: 113649 - DNA, 25 bp, Homo sapien
taaggacgaacgagatcatgtccgc

SEQ ID NO: 113650 - DNA, 25 bp, Homo sapien
taaggacgaacgtgatcatgtccgc

SEQ ID NO: 113651 - DNA, 25 bp, Homo sapien
ggaaagggatacttacttccttttc

SEQ ID NO: 113652 - DNA, 25 bp, Homo sapien
ggaaagggatacatacttccttttc

SEQ ID NO: 113653 - DNA, 25 bp, Homo sapien
aggagaatatttacccgtgtcgtgt

SEQ ID NO: 113654 - DNA, 25 bp, Homo sapien
aggagaatattttcccgtgtcgtgt

SEQ ID NO: 113655 - DNA, 25 bp, Homo sapien
acagcaaaagtaagtgaccctggac

SEQ ID NO: 113656 - DNA, 25 bp, Homo sapien
acagcaaaagtatgtgaccctggac

SEQ ID NO: 113657 - DNA, 25 bp, Homo sapien
cataggttgtctcaactacgtgtta

SEQ ID NO: 113658 - DNA, 25 bp, Homo sapien
cataggttgtctgaactacgtgtta

SEQ ID NO: 113659 - DNA, 25 bp, Homo sapien
ttgacattcttagtaccaccgagat

SEQ ID NO: 113660 - DNA, 25 bp, Homo sapien
ttgacattcttactaccaccgagat

SEQ ID NO: 113661 - DNA, 25 bp, Homo sapien
tgttgtcatgttacctctgacgggg

SEQ ID NO: 113662 - DNA, 25 bp, Homo sapien
tgttgtcatgtttcctctgacgggg

SEQ ID NO: 113663 - DNA, 25 bp, Homo sapien
gatcctctttccacttacccgggga

SEQ ID NO: 113664 - DNA, 25 bp, Homo sapien
gatcctctttcctcttacccgggga

SEQ ID NO: 113665 - DNA, 25 bp, Homo sapien
tacgatactacctcatcaaggggat

SEQ ID NO: 113666 - DNA, 25 bp, Homo sapien
tacgatactaccacatcaaggggat

SEQ ID NO: 113667 - DNA, 25 bp, Homo sapien
ccagaacatcgtcactcgacgacta

SEQ ID NO: 113668 - DNA, 25 bp, Homo sapien
ccagaacatcgtgactcgacgacta

SEQ ID NO: 113669 - DNA, 25 bp, Homo sapien
gacgccgaaacacgtgaacgaccct

SEQ ID NO: 113670 - DNA, 25 bp, Homo sapien
gacgccgaaacaggtgaacgaccct

SEQ ID NO: 113671 - DNA, 25 bp, Homo sapien
cgggtcgaatattcccgacgacact

SEQ ID NO: 113672 - DNA, 25 bp, Homo sapien
cgggtcgaatatacccgacgacact

SEQ ID NO: 113673 - DNA, 25 bp, Homo sapien
gtatactctagatcaccgagacact

SEQ ID NO: 113674 - DNA, 25 bp, Homo sapien
gtatactctagaacaccgagacact

SEQ ID NO: 113675 - DNA, 25 bp, Homo sapien
aagacgactcgaaccacgagactag

SEQ ID NO: 113676 - DNA, 25 bp, Homo sapien
aagacgactcgatccacgagactag

SEQ ID NO: 113677 - DNA, 25 bp, Homo sapien
gagattgacacgtcggtcccactgg

SEQ ID NO: 113678 - DNA, 25 bp, Homo sapien
gagattgacacgacggtcccactgg

SEQ ID NO: 113679 - DNA, 25 bp, Homo sapien
aaacctatccatcgtgtcctttagg

SEQ ID NO: 113680 - DNA, 25 bp, Homo sapien
aaacctatccatggtgtcctttagg

SEQ ID NO: 113681 - DNA, 25 bp, Homo sapien
gacctctctcttgcagggatctggt

SEQ ID NO: 113682 - DNA, 25 bp, Homo sapien
gacctctctcttccagggatctggt

SEQ ID NO: 113683 - DNA, 25 bp, Homo sapien
gacttgtcttccactaatacttcgg

SEQ ID NO: 113684 - DNA, 25 bp, Homo sapien
gacttgtcttcctctaatacttcgg

SEQ ID NO: 113685 - DNA, 25 bp, Homo sapien
tagtgtctgtgtttcttccactctc

SEQ ID NO: 113686 - DNA, 25 bp, Homo sapien
tagtgtctgtgtatcttccactctc

SEQ ID NO: 113687 - DNA, 25 bp, Homo sapien
tcgtgtattagtacggccttcctac

SEQ ID NO: 113688 - DNA, 25 bp, Homo sapien
tcgtgtattagttcggccttcctac

SEQ ID NO: 113689 - DNA, 25 bp, Homo sapien
cctaatatgtggtcgagtgactcct

SEQ ID NO: 113690 - DNA, 25 bp, Homo sapien
cctaatatgtggacgagtgactcct

SEQ ID NO: 113691 - DNA, 25 bp, Homo sapien
gtctgcgaattcaactgttgaacct

SEQ ID NO: 113692 - DNA, 25 bp, Homo sapien
gtctgcgaattctactgttgaacct

SEQ ID NO: 113693 - DNA, 25 bp, Homo sapien
gaacgtggttgcatccgtttggaca

SEQ ID NO: 113694 - DNA, 25 bp, Homo sapien
gaacgtggttgcttccgtttggaca

SEQ ID NO: 113695 - DNA, 25 bp, Homo sapien
aggtagacaggatccctcttgcgaa

SEQ ID NO: 113696 - DNA, 25 bp, Homo sapien
aggtagacaggaaccctcttgcgaa

SEQ ID NO: 113697 - DNA, 25 bp, Homo sapien
gtaaaacagaaacacttcggttaat

SEQ ID NO: 113698 - DNA, 25 bp, Homo sapien
gtaaaacagaaagacttcggttaat

SEQ ID NO: 113699 - DNA, 25 bp, Homo sapien
acctgacacttgaagggttactact

SEQ ID NO: 113700 - DNA, 25 bp, Homo sapien
acctgacacttgtagggttactact

SEQ ID NO: 113701 - DNA, 25 bp, Homo sapien
accgaacactgagagggtgcgtcgt

SEQ ID NO: 113702 - DNA, 25 bp, Homo sapien
accgaacactgacagggtgcgtcgt

SEQ ID NO: 113703 - DNA, 25 bp, Homo sapien
cagtccggaggtatagacctttctc

SEQ ID NO: 113704 - DNA, 25 bp, Homo sapien
cagtccggaggtttagacctttctc

SEQ ID NO: 113705 - DNA, 25 bp, Homo sapien
atctataccgtgtgaaaactttttg

SEQ ID NO: 113706 - DNA, 25 bp, Homo sapien
atctataccgtgagaaaactttttg

SEQ ID NO: 113707 - DNA, 25 bp, Homo sapien
ccgagtctcgtcgaactgtgccacg

SEQ ID NO: 113708 - DNA, 25 bp, Homo sapien
ccgagtctcgtccaactgtgccacg

SEQ ID NO: 113709 - DNA, 25 bp, Homo sapien
gtacatatcgtccaaagttgttaac

SEQ ID NO: 113710 - DNA, 25 bp, Homo sapien
gtacatatcgtcgaaagttgttaac

SEQ ID NO: 113711 - DNA, 25 bp, Homo sapien
gcccaaatatctgtgttttactaga

SEQ ID NO: 113712 - DNA, 25 bp, Homo sapien
gcccaaatatctctgttttactaga

SEQ ID NO: 113713 - DNA, 25 bp, Homo sapien
actccacttactcttttgggtagaa

SEQ ID NO: 113714 - DNA, 25 bp, Homo sapien
actccacttactgttttgggtagaa

SEQ ID NO: 113715 - DNA, 25 bp, Homo sapien
taccttaccttttttggtgtgtaaa

SEQ ID NO: 113716 - DNA, 25 bp, Homo sapien
taccttacctttattggtgtgtaaa

SEQ ID NO: 113717 - DNA, 25 bp, Homo sapien
gacacttaggtgctggtaaggtcga

SEQ ID NO: 113718 - DNA, 25 bp, Homo sapien
gacacttaggtggtggtaaggtcga

SEQ ID NO: 113719 - DNA, 25 bp, Homo sapien
ccccgtcgtcgacgacgagctcttt

SEQ ID NO: 113720 - DNA, 25 bp, Homo sapien
ccccgtcgtcgaggacgagctcttt

SEQ ID NO: 113721 - DNA, 25 bp, Homo sapien
tatcctccttctggaccggacttac

SEQ ID NO: 113722 - DNA, 25 bp, Homo sapien
tatcctccttctcgaccggacttac

SEQ ID NO: 113723 - DNA, 25 bp, Homo sapien
cctgaaacttttcgagtcgagatca

SEQ ID NO: 113724 - DNA, 25 bp, Homo sapien
cctgaaacttttggagtcgagatca

SEQ ID NO: 113725 - DNA, 25 bp, Homo sapien
tgactagacttttcagactttttgt

SEQ ID NO: 113726 - DNA, 25 bp, Homo sapien
tgactagactttacagactttttgt

SEQ ID NO: 113727 - DNA, 25 bp, Homo sapien
gtcgtaagtcttgacaattctgttt

SEQ ID NO: 113728 - DNA, 25 bp, Homo sapien
gtcgtaagtcttcacaattctgttt

SEQ ID NO: 113729 - DNA, 25 bp, Homo sapien
acaccttctctaaactaagtcgtct

SEQ ID NO: 113730 - DNA, 25 bp, Homo sapien
acaccttctctatactaagtcgtct

SEQ ID NO: 113731 - DNA, 25 bp, Homo sapien
gtagtacgatgtctgcatgaatctt

SEQ ID NO: 113732 - DNA, 25 bp, Homo sapien
gtagtacgatgtgtgcatgaatctt

SEQ ID NO: 113733 - DNA, 25 bp, Homo sapien
gtctgcttagtttaaaacaactata

SEQ ID NO: 113734 - DNA, 25 bp, Homo sapien
gtctgcttagttaaaaacaactata

SEQ ID NO: 113735 - DNA, 25 bp, Homo sapien
gtttatcttgtcttagaccaatttg

SEQ ID NO: 113736 - DNA, 25 bp, Homo sapien
gtttatcttgtcatagaccaatttg

SEQ ID NO: 113737 - DNA, 25 bp, Homo sapien
attctaaagtttgacccaatgtgtg

SEQ ID NO: 113738 - DNA, 25 bp, Homo sapien
attctaaagtttcacccaatgtgtg

SEQ ID NO: 113739 - DNA, 25 bp, Homo sapien
gtcggagggctcatcgaccctaatg

SEQ ID NO: 113740 - DNA, 25 bp, Homo sapien
gtcggagggctcttcgaccctaatg

SEQ ID NO: 113741 - DNA, 25 bp, Homo sapien
tgagatatggtaactaacttacttg

SEQ ID NO: 113742 - DNA, 25 bp, Homo sapien
tgagatatggtatctaacttacttg

SEQ ID NO: 113743 - DNA, 25 bp, Homo sapien
caccaagtcagtcgacacttttacg

SEQ ID NO: 113744 - DNA, 25 bp, Homo sapien
caccaagtcagtggacacttttacg

SEQ ID NO: 113745 - DNA, 25 bp, Homo sapien
tttcaaaccgagaagactccccgtc

SEQ ID NO: 113746 - DNA, 25 bp, Homo sapien
tttcaaaccgagtagactccccgtc

SEQ ID NO: 113747 - DNA, 25 bp, Homo sapien
ggtttcaagtgttacaccggctcct

SEQ ID NO: 113748 - DNA, 25 bp, Homo sapien
ggtttcaagtgtaacaccggctcct

SEQ ID NO: 113749 - DNA, 25 bp, Homo sapien
gtccctcgtgcatctccggtagttt

SEQ ID NO: 113750 - DNA, 25 bp, Homo sapien
gtccctcgtgcaactccggtagttt

SEQ ID NO: 113751 - DNA, 25 bp, Homo sapien
aggaccatcgtgaggtcaggttacc

SEQ ID NO: 113752 - DNA, 25 bp, Homo sapien
aggaccatcgtgtggtcaggttacc

SEQ ID NO: 113753 - DNA, 25 bp, Homo sapien
ggggaccgaagataggtccaattct

SEQ ID NO: 113754 - DNA, 25 bp, Homo sapien
ggggaccgaagaaaggtccaattct

SEQ ID NO: 113755 - DNA, 25 bp, Homo sapien
gttcaacgaaagaaccgggaattct

SEQ ID NO: 113756 - DNA, 25 bp, Homo sapien
gttcaacgaaagtaccgggaattct

SEQ ID NO: 113757 - DNA, 25 bp, Homo sapien
gttaaaccgtcgacggggacatata

SEQ ID NO: 113758 - DNA, 25 bp, Homo sapien
gttaaaccgtcgtcggggacatata

SEQ ID NO: 113759 - DNA, 25 bp, Homo sapien
gtctaaacgatctcttgagaccatc

SEQ ID NO: 113760 - DNA, 25 bp, Homo sapien
gtctaaacgatcacttgagaccatc

SEQ ID NO: 113761 - DNA, 25 bp, Homo sapien
ggtattacaccgacattgacagaag

SEQ ID NO: 113762 - DNA, 25 bp, Homo sapien
ggtattacaccgtcattgacagaag

SEQ ID NO: 113763 - DNA, 25 bp, Homo sapien
catgttcgtgggaaagtttccctat

SEQ ID NO: 113764 - DNA, 25 bp, Homo sapien
catgttcgtgggtaagtttccctat

SEQ ID NO: 113765 - DNA, 25 bp, Homo sapien
tcacggtgacggtgggcccttgcac

SEQ ID NO: 113766 - DNA, 25 bp, Homo sapien
tcacggtgacggagggcccttgcac

SEQ ID NO: 113767 - DNA, 25 bp, Homo sapien
ggtttacgttattgggatcttccct

SEQ ID NO: 113768 - DNA, 25 bp, Homo sapien
ggtttacgttatagggatcttccct

SEQ ID NO: 113769 - DNA, 25 bp, Homo sapien
cgtaagatattaacggaacatgtcc

SEQ ID NO: 113770 - DNA, 25 bp, Homo sapien
cgtaagatattatcggaacatgtcc

SEQ ID NO: 113771 - DNA, 25 bp, Homo sapien
ggatcatatacattggtagtcatcc

SEQ ID NO: 113772 - DNA, 25 bp, Homo sapien
ggatcatatacaatggtagtcatcc

SEQ ID NO: 113773 - DNA, 25 bp, Homo sapien
tgcagcgttcgtgtcgtgtccgtcc

SEQ ID NO: 113774 - DNA, 25 bp, Homo sapien
tgcagcgttcgtctcgtgtccgtcc

SEQ ID NO: 113775 - DNA, 25 bp, Homo sapien
taaagttcacgtctgactaccggac

SEQ ID NO: 113776 - DNA, 25 bp, Homo sapien
taaagttcacgtgtgactaccggac

SEQ ID NO: 113777 - DNA, 25 bp, Homo sapien
caaaaagttcggtcgtacgaggtca

SEQ ID NO: 113778 - DNA, 25 bp, Homo sapien
caaaaagttcggacgtacgaggtca

SEQ ID NO: 113779 - DNA, 25 bp, Homo sapien
cgaaagaccgtcgacccgtggttca

SEQ ID NO: 113780 - DNA, 25 bp, Homo sapien
cgaaagaccgtccacccgtggttca

SEQ ID NO: 113781 - DNA, 25 bp, Homo sapien
aagaatcggggtccaaatatatcac

SEQ ID NO: 113782 - DNA, 25 bp, Homo sapien
aagaatcggggtgcaaatatatcac

SEQ ID NO: 113783 - DNA, 25 bp, Homo sapien
tcatagccaagttctagtttctgag

SEQ ID NO: 113784 - DNA, 25 bp, Homo sapien
tcatagccaagtactagtttctgag

SEQ ID NO: 113785 - DNA, 25 bp, Homo sapien
cactctaagttgtgacctttttatg

SEQ ID NO: 113786 - DNA, 25 bp, Homo sapien
cactctaagttgagacctttttatg

SEQ ID NO: 113787 - DNA, 25 bp, Homo sapien
caaaactaaggactactgtttacct

SEQ ID NO: 113788 - DNA, 25 bp, Homo sapien
caaaactaaggagtactgtttacct

SEQ ID NO: 113789 - DNA, 25 bp, Homo sapien
tgcttaaaagaacctgtgtagtttc

SEQ ID NO: 113790 - DNA, 25 bp, Homo sapien
tgcttaaaagaagctgtgtagtttc

SEQ ID NO: 113791 - DNA, 25 bp, Homo sapien
acagtataacgattctgtcgtattt

SEQ ID NO: 113792 - DNA, 25 bp, Homo sapien
acagtataacgaatctgtcgtattt

SEQ ID NO: 113793 - DNA, 25 bp, Homo sapien
ccatggtaagaactcgtcgttatgt

SEQ ID NO: 113794 - DNA, 25 bp, Homo sapien
ccatggtaagaagtcgtcgttatgt

SEQ ID NO: 113795 - DNA, 25 bp, Homo sapien
tcgttttgggaaacgacgtcggaga

SEQ ID NO: 113796 - DNA, 25 bp, Homo sapien
tcgttttgggaatcgacgtcggaga

SEQ ID NO: 113797 - DNA, 25 bp, Homo sapien
aattagttcctggtaaatgtctcca

SEQ ID NO: 113798 - DNA, 25 bp, Homo sapien
aattagttcctgctaaatgtctcca

SEQ ID NO: 113799 - DNA, 25 bp, Homo sapien
cttttcctggacagatgtcgactcc

SEQ ID NO: 113800 - DNA, 25 bp, Homo sapien
cttttcctggactgatgtcgactcc

SEQ ID NO: 113801 - DNA, 25 bp, Homo sapien
gtactccacctgtaccgccatagga

SEQ ID NO: 113802 - DNA, 25 bp, Homo sapien
gtactccacctgaaccgccatagga

SEQ ID NO: 113803 - DNA, 25 bp, Homo sapien
tcgatcacgtgccctcggtacaggg

SEQ ID NO: 113804 - DNA, 25 bp, Homo sapien
tcgatcacgtgcgctcggtacaggg

SEQ ID NO: 113805 - DNA, 25 bp, Homo sapien
ttcatcgttcgctactgctaccacc

SEQ ID NO: 113806 - DNA, 25 bp, Homo sapien
ttcatcgttcgcaactgctaccacc

SEQ ID NO: 113807 - DNA, 25 bp, Homo sapien
tcattatgtccacgtgtgtccacat

SEQ ID NO: 113808 - DNA, 25 bp, Homo sapien
tcattatgtccaggtgtgtccacat

SEQ ID NO: 113809 - DNA, 25 bp, Homo sapien
gtatatactcgtcttgtcgatcaca

SEQ ID NO: 113810 - DNA, 25 bp, Homo sapien
gtatatactcgtgttgtcgatcaca

SEQ ID NO: 113811 - DNA, 25 bp, Homo sapien
agatttgtgtaatccctgtgttcaa

SEQ ID NO: 113812 - DNA, 25 bp, Homo sapien
agatttgtgtaaaccctgtgttcaa

SEQ ID NO: 113813 - DNA, 25 bp, Homo sapien
ttgaggagcaacctgtcctacggac

SEQ ID NO: 113814 - DNA, 25 bp, Homo sapien
ttgaggagcaacgtgtcctacggac

SEQ ID NO: 113815 - DNA, 25 bp, Homo sapien
ttgttagtgacaacgagggttaccc

SEQ ID NO: 113816 - DNA, 25 bp, Homo sapien
ttgttagtgacatcgagggttaccc

SEQ ID NO: 113817 - DNA, 25 bp, Homo sapien
ggtcgaggcaccagagacctaccct

SEQ ID NO: 113818 - DNA, 25 bp, Homo sapien
ggtcgaggcacctgagacctaccct

SEQ ID NO: 113819 - DNA, 25 bp, Homo sapien
cgtatactggttctcggattataag

SEQ ID NO: 113820 - DNA, 25 bp, Homo sapien
cgtatactggttgtcggattataag

SEQ ID NO: 113821 - DNA, 25 bp, Homo sapien
aacaccgtgttttccgtggttgtaa

SEQ ID NO: 113822 - DNA, 25 bp, Homo sapien
aacaccgtgtttaccgtggttgtaa

SEQ ID NO: 113823 - DNA, 25 bp, Homo sapien
actcacactttgactcacgtattga

SEQ ID NO: 113824 - DNA, 25 bp, Homo sapien
actcacactttgtctcacgtattga

SEQ ID NO: 113825 - DNA, 25 bp, Homo sapien
acccgtatccggactctatattcga

SEQ ID NO: 113826 - DNA, 25 bp, Homo sapien
acccgtatccggtctctatattcga

SEQ ID NO: 113827 - DNA, 25 bp, Homo sapien
tttcagtcttgtcagggttcattta

SEQ ID NO: 113828 - DNA, 25 bp, Homo sapien
tttcagtcttgtgagggttcattta

SEQ ID NO: 113829 - DNA, 25 bp, Homo sapien
tcgaatgggtagtccgtcttaagga

SEQ ID NO: 113830 - DNA, 25 bp, Homo sapien
tcgaatgggtagaccgtcttaagga

SEQ ID NO: 113831 - DNA, 25 bp, Homo sapien
ccgagtgagtggaaagtctcaaatt

SEQ ID NO: 113832 - DNA, 25 bp, Homo sapien
ccgagtgagtggtaagtctcaaatt

SEQ ID NO: 113833 - DNA, 25 bp, Homo sapien
ttagtgatgccgacagtcatttcgt

SEQ ID NO: 113834 - DNA, 25 bp, Homo sapien
ttagtgatgccgtcagtcatttcgt

SEQ ID NO: 113835 - DNA, 25 bp, Homo sapien
acttgatgtcatgacctaatccgtt

SEQ ID NO: 113836 - DNA, 25 bp, Homo sapien
acttgatgtcatcacctaatccgtt

SEQ ID NO: 113837 - DNA, 25 bp, Homo sapien
cgtcttgtctcgacccgaattctag

SEQ ID NO: 113838 - DNA, 25 bp, Homo sapien
cgtcttgtctcgtcccgaattctag

SEQ ID NO: 113839 - DNA, 25 bp, Homo sapien
cgtcctgctgccttcgatgagtcag

SEQ ID NO: 113840 - DNA, 25 bp, Homo sapien
cgtcctgctgccatcgatgagtcag

SEQ ID NO: 113841 - DNA, 25 bp, Homo sapien
gtaccgtatttcagatcattgtaat

SEQ ID NO: 113842 - DNA, 25 bp, Homo sapien
gtaccgtatttctgatcattgtaat

SEQ ID NO: 113843 - DNA, 25 bp, Homo sapien
gagtcgcaccagcatccacttggac

SEQ ID NO: 113844 - DNA, 25 bp, Homo sapien
gagtcgcaccaggatccacttggac

SEQ ID NO: 113845 - DNA, 25 bp, Homo sapien
aaggttgtcaagaccgaagaacgac

SEQ ID NO: 113846 - DNA, 25 bp, Homo sapien
aaggttgtcaagtccgaagaacgac

SEQ ID NO: 113847 - DNA, 25 bp, Homo sapien
accgtatcctcctctaccaagatgg

SEQ ID NO: 113848 - DNA, 25 bp, Homo sapien
accgtatcctccactaccaagatgg

SEQ ID NO: 113849 - DNA, 25 bp, Homo sapien
acctatcatcctctgtaactcgggg

SEQ ID NO: 113850 - DNA, 25 bp, Homo sapien
acctatcatcctgtgtaactcgggg

SEQ ID NO: 113851 - DNA, 25 bp, Homo sapien
cgggatatctaaggagttaccgtga

SEQ ID NO: 113852 - DNA, 25 bp, Homo sapien
cgggatatctaacgagttaccgtga

SEQ ID NO: 113853 - DNA, 25 bp, Homo sapien
cccatttcgacacgttagacattag

SEQ ID NO: 113854 - DNA, 25 bp, Homo sapien
cccatttcgacaggttagacattag

SEQ ID NO: 113855 - DNA, 25 bp, Homo sapien
cttctgtcaccgactcacgcaggag

SEQ ID NO: 113856 - DNA, 25 bp, Homo sapien
cttctgtcaccgtctcacgcaggag

SEQ ID NO: 113857 - DNA, 25 bp, Homo sapien
tccgtacgcacaagcaccgacgtgc

SEQ ID NO: 113858 - DNA, 25 bp, Homo sapien
tccgtacgcacatgcaccgacgtgc

SEQ ID NO: 113859 - DNA, 25 bp, Homo sapien
ctcagactcaatcgaccgtagtatc

SEQ ID NO: 113860 - DNA, 25 bp, Homo sapien
ctcagactcaatggaccgtagtatc

SEQ ID NO: 113861 - DNA, 25 bp, Homo sapien
ttacaccctttctacgacgtgagtt

SEQ ID NO: 113862 - DNA, 25 bp, Homo sapien
ttacaccctttcaacgacgtgagtt

SEQ ID NO: 113863 - DNA, 25 bp, Homo sapien
cgaatcaacgtctccgtaaaaagtg

SEQ ID NO: 113864 - DNA, 25 bp, Homo sapien
cgaatcaacgtcaccgtaaaaagtg

SEQ ID NO: 113865 - DNA, 25 bp, Homo sapien
aatgtcatcgatctctaatagagtc

SEQ ID NO: 113866 - DNA, 25 bp, Homo sapien
aatgtcatcgatgtctaatagagtc

SEQ ID NO: 113867 - DNA, 25 bp, Homo sapien
attgggcttatgtacgtaatcttac

SEQ ID NO: 113868 - DNA, 25 bp, Homo sapien
attgggcttatgaacgtaatcttac

SEQ ID NO: 113869 - DNA, 25 bp, Homo sapien
cttcgtaggacaaacgcccatctta

SEQ ID NO: 113870 - DNA, 25 bp, Homo sapien
cttcgtaggacatacgcccatctta

SEQ ID NO: 113871 - DNA, 25 bp, Homo sapien
attgtcacccgtcttcgagacggag

SEQ ID NO: 113872 - DNA, 25 bp, Homo sapien
attgtcacccgtgttcgagacggag

SEQ ID NO: 113873 - DNA, 25 bp, Homo sapien
gtttgtcgagacctccttaatggac

SEQ ID NO: 113874 - DNA, 25 bp, Homo sapien
gtttgtcgagacgtccttaatggac

SEQ ID NO: 113875 - DNA, 25 bp, Homo sapien
tcctttgttcagaccctctaagggt

SEQ ID NO: 113876 - DNA, 25 bp, Homo sapien
tcctttgttcagtccctctaagggt

SEQ ID NO: 113877 - DNA, 25 bp, Homo sapien
aatccttctttacaaccataggagg

SEQ ID NO: 113878 - DNA, 25 bp, Homo sapien
aatccttctttagaaccataggagg

SEQ ID NO: 113879 - DNA, 25 bp, Homo sapien
aacccctttctcaccagagagtaga

SEQ ID NO: 113880 - DNA, 25 bp, Homo sapien
aacccctttctctccagagagtaga

SEQ ID NO: 113881 - DNA, 25 bp, Homo sapien
gtcacatctccagatgtaaagtcta

SEQ ID NO: 113882 - DNA, 25 bp, Homo sapien
gtcacatctccacatgtaaagtcta

SEQ ID NO: 113883 - DNA, 25 bp, Homo sapien
agtatgaatcactctccgaaagctt

SEQ ID NO: 113884 - DNA, 25 bp, Homo sapien
agtatgaatcacactccgaaagctt

SEQ ID NO: 113885 - DNA, 25 bp, Homo sapien
tgtgataccgaaaccgggacacctc

SEQ ID NO: 113886 - DNA, 25 bp, Homo sapien
tgtgataccgaatccgggacacctc

SEQ ID NO: 113887 - DNA, 25 bp, Homo sapien
ctggaaccgatgacggtagagtttc

SEQ ID NO: 113888 - DNA, 25 bp, Homo sapien
ctggaaccgatgtcggtagagtttc

SEQ ID NO: 113889 - DNA, 25 bp, Homo sapien
taatgaatttcctgttcgagaaatc

SEQ ID NO: 113890 - DNA, 25 bp, Homo sapien
taatgaatttccagttcgagaaatc

SEQ ID NO: 113891 - DNA, 25 bp, Homo sapien
aatgaatgtagtcaagccaaatatc

SEQ ID NO: 113892 - DNA, 25 bp, Homo sapien
aatgaatgtagtgaagccaaatatc

SEQ ID NO: 113893 - DNA, 25 bp, Homo sapien
aataaatctcttgagggagattacc

SEQ ID NO: 113894 - DNA, 25 bp, Homo sapien
aataaatctcttcagggagattacc

SEQ ID NO: 113895 - DNA, 25 bp, Homo sapien
aacgtttggtatggacgggactttc

SEQ ID NO: 113896 - DNA, 25 bp, Homo sapien
aacgtttggtatcgacgggactttc

SEQ ID NO: 113897 - DNA, 25 bp, Homo sapien
ggcaatgtgaaacgagaccattata

SEQ ID NO: 113898 - DNA, 25 bp, Homo sapien
ggcaatgtgaaaggagaccattata

SEQ ID NO: 113899 - DNA, 25 bp, Homo sapien
cgtcacgaccagaaaatctttcaag

SEQ ID NO: 113900 - DNA, 25 bp, Homo sapien
cgtcacgaccagtaaatctttcaag

SEQ ID NO: 113901 - DNA, 25 bp, Homo sapien
ggtcttgtctccatgaattgtggaa

SEQ ID NO: 113902 - DNA, 25 bp, Homo sapien
ggtcttgtctccttgaattgtggaa

SEQ ID NO: 113903 - DNA, 25 bp, Homo sapien
ttttttacacttatgacccgagaag

SEQ ID NO: 113904 - DNA, 25 bp, Homo sapien
ttttttacacttttgacccgagaag

SEQ ID NO: 113905 - DNA, 25 bp, Homo sapien
tgcactacccgtgtagacccggagg

SEQ ID NO: 113906 - DNA, 25 bp, Homo sapien
tgcactacccgtctagacccggagg

SEQ ID NO: 113907 - DNA, 25 bp, Homo sapien
tggaacggactcctttcccggacac

SEQ ID NO: 113908 - DNA, 25 bp, Homo sapien
tggaacggactcgtttcccggacac

SEQ ID NO: 113909 - DNA, 25 bp, Homo sapien
atggaggaaggacgtttcctgtgcc

SEQ ID NO: 113910 - DNA, 25 bp, Homo sapien
atggaggaaggaggtttcctgtgcc

SEQ ID NO: 113911 - DNA, 25 bp, Homo sapien
cgcagagagtgactttgttctgtca

SEQ ID NO: 113912 - DNA, 25 bp, Homo sapien
cgcagagagtgagtttgttctgtca

SEQ ID NO: 113913 - DNA, 25 bp, Homo sapien
gtatatgtatatcttgtttcgtcca

SEQ ID NO: 113914 - DNA, 25 bp, Homo sapien
gtatatgtatatgttgtttcgtcca

SEQ ID NO: 113915 - DNA, 25 bp, Homo sapien
gagatctaattcgttgtttcttaac

SEQ ID NO: 113916 - DNA, 25 bp, Homo sapien
gagatctaattccttgtttcttaac

SEQ ID NO: 113917 - DNA, 25 bp, Homo sapien
tctgtagtattcaatgtctttgtcc

SEQ ID NO: 113918 - DNA, 25 bp, Homo sapien
tctgtagtattctatgtctttgtcc

SEQ ID NO: 113919 - DNA, 25 bp, Homo sapien
acattcgggtatattagattttcct

SEQ ID NO: 113920 - DNA, 25 bp, Homo sapien
acattcgggtattttagattttcct

SEQ ID NO: 113921 - DNA, 25 bp, Homo sapien
cttctggtaggttctcttttcggtc

SEQ ID NO: 113922 - DNA, 25 bp, Homo sapien
cttctggtaggtactcttttcggtc

SEQ ID NO: 113923 - DNA, 25 bp, Homo sapien
tctcgaacatgactgtttcaggact

SEQ ID NO: 113924 - DNA, 25 bp, Homo sapien
tctcgaacatgagtgtttcaggact

SEQ ID NO: 113925 - DNA, 25 bp, Homo sapien
ctaagactataagttacatcaacgg

SEQ ID NO: 113926 - DNA, 25 bp, Homo sapien
ctaagactataacttacatcaacgg

SEQ ID NO: 113927 - DNA, 25 bp, Homo sapien
tatttattgttccagtccagatgag

SEQ ID NO: 113928 - DNA, 25 bp, Homo sapien
tatttattgttcgagtccagatgag

SEQ ID NO: 113929 - DNA, 25 bp, Homo sapien
ttgtcttcttctgaggggacacgag

SEQ ID NO: 113930 - DNA, 25 bp, Homo sapien
ttgtcttcttctcaggggacacgag

SEQ ID NO: 113931 - DNA, 25 bp, Homo sapien
cggtctcttcagtcacacggaatga

SEQ ID NO: 113932 - DNA, 25 bp, Homo sapien
cggtctcttcagacacacggaatga

SEQ ID NO: 113933 - DNA, 25 bp, Homo sapien
gggttcacatataccgaccaagaga

SEQ ID NO: 113934 - DNA, 25 bp, Homo sapien
gggttcacatattccgaccaagaga

SEQ ID NO: 113935 - DNA, 25 bp, Homo sapien
ctatcggtgaagaaatcccaaaagt

SEQ ID NO: 113936 - DNA, 25 bp, Homo sapien
ctatcggtgaagtaatcccaaaagt

SEQ ID NO: 113937 - DNA, 25 bp, Homo sapien
tttcatagaacgacctgcaaacaag

SEQ ID NO: 113938 - DNA, 25 bp, Homo sapien
tttcatagaacgtcctgcaaacaag

SEQ ID NO: 113939 - DNA, 25 bp, Homo sapien
ttacggttgtgtcttccgaaacgaa

SEQ ID NO: 113940 - DNA, 25 bp, Homo sapien
ttacggttgtgtgttccgaaacgaa

SEQ ID NO: 113941 - DNA, 25 bp, Homo sapien
cacttttgaacgagtggacgacccg

SEQ ID NO: 113942 - DNA, 25 bp, Homo sapien
cacttttgaacgtgtggacgacccg

SEQ ID NO: 113943 - DNA, 25 bp, Homo sapien
gcttctgctacatcacctacggttt

SEQ ID NO: 113944 - DNA, 25 bp, Homo sapien
gcttctgctacaacacctacggttt

SEQ ID NO: 113945 - DNA, 25 bp, Homo sapien
atctttaggacgaaaccgaacttgt

SEQ ID NO: 113946 - DNA, 25 bp, Homo sapien
atctttaggacgtaaccgaacttgt

SEQ ID NO: 113947 - DNA, 25 bp, Homo sapien
tgtcttgaggaaaggagacctcgag

SEQ ID NO: 113948 - DNA, 25 bp, Homo sapien
tgtcttgaggaatggagacctcgag

SEQ ID NO: 113949 - DNA, 25 bp, Homo sapien
agctctcgcagtacttgggctcgag

SEQ ID NO: 113950 - DNA, 25 bp, Homo sapien
agctctcgcagttcttgggctcgag

SEQ ID NO: 113951 - DNA, 25 bp, Homo sapien
ggactccctgacttgcgtgtctcgg

SEQ ID NO: 113952 - DNA, 25 bp, Homo sapien
ggactccctgacatgcgtgtctcgg

SEQ ID NO: 113953 - DNA, 25 bp, Homo sapien
ttcgtagactgagttgtccgtagtg

SEQ ID NO: 113954 - DNA, 25 bp, Homo sapien
ttcgtagactgacttgtccgtagtg

SEQ ID NO: 113955 - DNA, 25 bp, Homo sapien
tctactgttcccagtgtgtaccccg

SEQ ID NO: 113956 - DNA, 25 bp, Homo sapien
tctactgttccctgtgtgtaccccg

SEQ ID NO: 113957 - DNA, 25 bp, Homo sapien
gtcggttggatcttaggaccgaacg

SEQ ID NO: 113958 - DNA, 25 bp, Homo sapien
gtcggttggatcataggaccgaacg

SEQ ID NO: 113959 - DNA, 25 bp, Homo sapien
ccaccgagaccatagcgacggaggt

SEQ ID NO: 113960 - DNA, 25 bp, Homo sapien
ccaccgagaccaaagcgacggaggt

SEQ ID NO: 113961 - DNA, 25 bp, Homo sapien
actcggagtctaccaagacagacag

SEQ ID NO: 113962 - DNA, 25 bp, Homo sapien
actcggagtctagcaagacagacag

SEQ ID NO: 113963 - DNA, 25 bp, Homo sapien
cctctactcgagtaacgactacaag

SEQ ID NO: 113964 - DNA, 25 bp, Homo sapien
cctctactcgagaaacgactacaag

SEQ ID NO: 113965 - DNA, 25 bp, Homo sapien
atgagctagtcgtcaagtcacttgt

SEQ ID NO: 113966 - DNA, 25 bp, Homo sapien
atgagctagtcgacaagtcacttgt

SEQ ID NO: 113967 - DNA, 25 bp, Homo sapien
acgaaccataacacttgtacgtctg

SEQ ID NO: 113968 - DNA, 25 bp, Homo sapien
acgaaccataactcttgtacgtctg

SEQ ID NO: 113969 - DNA, 25 bp, Homo sapien
ggacacaggactcttcagtctctcg

SEQ ID NO: 113970 - DNA, 25 bp, Homo sapien
ggacacaggactgttcagtctctcg

SEQ ID NO: 113971 - DNA, 25 bp, Homo sapien
agtatagacgggtatgtgttctacc

SEQ ID NO: 113972 - DNA, 25 bp, Homo sapien
agtatagacgggaatgtgttctacc

SEQ ID NO: 113973 - DNA, 25 bp, Homo sapien
tgagtaaacatgacggtttacaccg

SEQ ID NO: 113974 - DNA, 25 bp, Homo sapien
tgagtaaacatgtcggtttacaccg

SEQ ID NO: 113975 - DNA, 25 bp, Homo sapien
aggtgttcctcaaccgtgtctcctc

SEQ ID NO: 113976 - DNA, 25 bp, Homo sapien
aggtgttcctcatccgtgtctcctc

SEQ ID NO: 113977 - DNA, 25 bp, Homo sapien
tttgcgtctagtcagaacttcagga

SEQ ID NO: 113978 - DNA, 25 bp, Homo sapien
tttgcgtctagtgagaacttcagga

SEQ ID NO: 113979 - DNA, 25 bp, Homo sapien
tttgtgacctcgtccgaatcaaggt

SEQ ID NO: 113980 - DNA, 25 bp, Homo sapien
tttgtgacctcgaccgaatcaaggt

SEQ ID NO: 113981 - DNA, 25 bp, Homo sapien
gaccacgttctaagaaccgttgtct

SEQ ID NO: 113982 - DNA, 25 bp, Homo sapien
gaccacgttctatgaaccgttgtct

SEQ ID NO: 113983 - DNA, 25 bp, Homo sapien
ttaggactatcgtcatcagttgcgt

SEQ ID NO: 113984 - DNA, 25 bp, Homo sapien
ttaggactatcgacatcagttgcgt

SEQ ID NO: 113985 - DNA, 25 bp, Homo sapien
gtagactagtcgacatctactttct

SEQ ID NO: 113986 - DNA, 25 bp, Homo sapien
gtagactagtcgtcatctactttct

SEQ ID NO: 113987 - DNA, 25 bp, Homo sapien
gtcaggaagatagttcatctgagac

SEQ ID NO: 113988 - DNA, 25 bp, Homo sapien
gtcaggaagatacttcatctgagac

SEQ ID NO: 113989 - DNA, 25 bp, Homo sapien
ccagagatagagacgtattgtgcaa

SEQ ID NO: 113990 - DNA, 25 bp, Homo sapien
ccagagatagagtcgtattgtgcaa

SEQ ID NO: 113991 - DNA, 25 bp, Homo sapien
gggtcgaggtctcactgtccgtccc

SEQ ID NO: 113992 - DNA, 25 bp, Homo sapien
gggtcgaggtctgactgtccgtccc

SEQ ID NO: 113993 - DNA, 25 bp, Homo sapien
tcgggtggcctcagagtcctccgac

SEQ ID NO: 113994 - DNA, 25 bp, Homo sapien
tcgggtggcctctgagtcctccgac

SEQ ID NO: 113995 - DNA, 25 bp, Homo sapien
atttgtagatcacgacgttccaccc

SEQ ID NO: 113996 - DNA, 25 bp, Homo sapien
atttgtagatcaggacgttccaccc

SEQ ID NO: 113997 - DNA, 25 bp, Homo sapien
ggttgtcgtataagaaagccctcac

SEQ ID NO: 113998 - DNA, 25 bp, Homo sapien
ggttgtcgtatatgaaagccctcac

SEQ ID NO: 113999 - DNA, 25 bp, Homo sapien
gtttttgtaggttaacccactactc

SEQ ID NO: 114000 - DNA, 25 bp, Homo sapien
gtttttgtaggtaaacccactactc

SEQ ID NO: 114001 - DNA, 25 bp, Homo sapien
attgtatgtgttcaatatcatcgtc

SEQ ID NO: 114002 - DNA, 25 bp, Homo sapien
attgtatgtgttgaatatcatcgtc

SEQ ID NO: 114003 - DNA, 25 bp, Homo sapien
tacgcactgatctggtcgttcttca

SEQ ID NO: 114004 - DNA, 25 bp, Homo sapien
tacgcactgatcaggtcgttcttca

SEQ ID NO: 114005 - DNA, 25 bp, Homo sapien
acggagacggtcgtacctatttaat

SEQ ID NO: 114006 - DNA, 25 bp, Homo sapien
acggagacggtcctacctatttaat

SEQ ID NO: 114007 - DNA, 25 bp, Homo sapien
aatcgtagaggactcttacctgtga

SEQ ID NO: 114008 - DNA, 25 bp, Homo sapien
aatcgtagaggagtcttacctgtga

SEQ ID NO: 114009 - DNA, 25 bp, Homo sapien
atagttagagtgtacctttctaaac

SEQ ID NO: 114010 - DNA, 25 bp, Homo sapien
atagttagagtgaacctttctaaac

SEQ ID NO: 114011 - DNA, 25 bp, Homo sapien
gaccacggaggattgttcgtcgttc

SEQ ID NO: 114012 - DNA, 25 bp, Homo sapien
gaccacggaggaatgttcgtcgttc

SEQ ID NO: 114013 - DNA, 25 bp, Homo sapien
ccactgtagtcaagacgtttccgtc

SEQ ID NO: 114014 - DNA, 25 bp, Homo sapien
ccactgtagtcatgacgtttccgtc

SEQ ID NO: 114015 - DNA, 25 bp, Homo sapien
gtcatgttacttacgttatctctcg

SEQ ID NO: 114016 - DNA, 25 bp, Homo sapien
gtcatgttactttcgttatctctcg

SEQ ID NO: 114017 - DNA, 25 bp, Homo sapien
gtgtctgacctttgtctttgtccag

SEQ ID NO: 114018 - DNA, 25 bp, Homo sapien
gtgtctgaccttagtctttgtccag

SEQ ID NO: 114019 - DNA, 25 bp, Homo sapien
agtcctccctgtcagtgttaactca

SEQ ID NO: 114020 - DNA, 25 bp, Homo sapien
agtcctccctgtgagtgttaactca

SEQ ID NO: 114021 - DNA, 25 bp, Homo sapien
ggtaccgacccttggtgacttcctc

SEQ ID NO: 114022 - DNA, 25 bp, Homo sapien
ggtaccgaccctaggtgacttcctc

SEQ ID NO: 114023 - DNA, 25 bp, Homo sapien
gtctcgtgaaccttacccattcctg

SEQ ID NO: 114024 - DNA, 25 bp, Homo sapien
gtctcgtgaaccatacccattcctg

SEQ ID NO: 114025 - DNA, 25 bp, Homo sapien
acggaaggaacctacaccatcggca

SEQ ID NO: 114026 - DNA, 25 bp, Homo sapien
acggaaggaaccaacaccatcggca

SEQ ID NO: 114027 - DNA, 25 bp, Homo sapien
cagagtttaggctacgagtctcgaa

SEQ ID NO: 114028 - DNA, 25 bp, Homo sapien
cagagtttaggcaacgagtctcgaa

SEQ ID NO: 114029 - DNA, 25 bp, Homo sapien
actagtggcggtagacgacaagaag

SEQ ID NO: 114030 - DNA, 25 bp, Homo sapien
actagtggcggttgacgacaagaag

SEQ ID NO: 114031 - DNA, 25 bp, Homo sapien
cacgaccccggataccggagacagt

SEQ ID NO: 114032 - DNA, 25 bp, Homo sapien
cacgaccccggaaaccggagacagt

SEQ ID NO: 114033 - DNA, 25 bp, Homo sapien
acgtagctcaacaatacagaagaat

SEQ ID NO: 114034 - DNA, 25 bp, Homo sapien
acgtagctcaactatacagaagaat

SEQ ID NO: 114035 - DNA, 25 bp, Homo sapien
cgagttaaatagaacacgataccta

SEQ ID NO: 114036 - DNA, 25 bp, Homo sapien
cgagttaaatagtacacgataccta

SEQ ID NO: 114037 - DNA, 25 bp, Homo sapien
cggagttgagaggtcgattgtctac

SEQ ID NO: 114038 - DNA, 25 bp, Homo sapien
cggagttgagagctcgattgtctac

SEQ ID NO: 114039 - DNA, 25 bp, Homo sapien
acgtttatcagttgtacgttttcct

SEQ ID NO: 114040 - DNA, 25 bp, Homo sapien
acgtttatcagtagtacgttttcct

SEQ ID NO: 114041 - DNA, 25 bp, Homo sapien
agtaaatgtatagtcccgtacacac

SEQ ID NO: 114042 - DNA, 25 bp, Homo sapien
agtaaatgtatactcccgtacacac

SEQ ID NO: 114043 - DNA, 25 bp, Homo sapien
gaactcaagaggtggtcggtcacac

SEQ ID NO: 114044 - DNA, 25 bp, Homo sapien
gaactcaagaggaggtcggtcacac

SEQ ID NO: 114045 - DNA, 25 bp, Homo sapien
ccgaataaaaggttacaggcgccat

SEQ ID NO: 114046 - DNA, 25 bp, Homo sapien
ccgaataaaaggatacaggcgccat

SEQ ID NO: 114047 - DNA, 25 bp, Homo sapien
agaataaggacaggtcacgggcctt

SEQ ID NO: 114048 - DNA, 25 bp, Homo sapien
agaataaggacacgtcacgggcctt

SEQ ID NO: 114049 - DNA, 25 bp, Homo sapien
ataaaaggctctctagaagactgta

SEQ ID NO: 114050 - DNA, 25 bp, Homo sapien
ataaaaggctctgtagaagactgta

SEQ ID NO: 114051 - DNA, 25 bp, Homo sapien
agtcaacccgttttgaatgacggtt

SEQ ID NO: 114052 - DNA, 25 bp, Homo sapien
agtcaacccgttatgaatgacggtt

SEQ ID NO: 114053 - DNA, 25 bp, Homo sapien
atccgtgggaagtccgaggtactga

SEQ ID NO: 114054 - DNA, 25 bp, Homo sapien
atccgtgggaagaccgaggtactga

SEQ ID NO: 114055 - DNA, 25 bp, Homo sapien
ccgggtcggtaactcagagtaacct

SEQ ID NO: 114056 - DNA, 25 bp, Homo sapien
ccgggtcggtaagtcagagtaacct

SEQ ID NO: 114057 - DNA, 25 bp, Homo sapien
ccgtgacgacggagccgagcagtca

SEQ ID NO: 114058 - DNA, 25 bp, Homo sapien
ccgtgacgacggtgccgagcagtca

SEQ ID NO: 114059 - DNA, 25 bp, Homo sapien
aggtcgaagggtaacggcgaccaca

SEQ ID NO: 114060 - DNA, 25 bp, Homo sapien
aggtcgaagggttacggcgaccaca

SEQ ID NO: 114061 - DNA, 25 bp, Homo sapien
tggagaagtctttggtcgaccatat

SEQ ID NO: 114062 - DNA, 25 bp, Homo sapien
tggagaagtcttaggtcgaccatat

SEQ ID NO: 114063 - DNA, 25 bp, Homo sapien
ggtgcgagagttacgggtcccatat

SEQ ID NO: 114064 - DNA, 25 bp, Homo sapien
ggtgcgagagtttcgggtcccatat

SEQ ID NO: 114065 - DNA, 25 bp, Homo sapien
cggtgccaaaggacgggccgacaca

SEQ ID NO: 114066 - DNA, 25 bp, Homo sapien
cggtgccaaaggtcgggccgacaca

SEQ ID NO: 114067 - DNA, 25 bp, Homo sapien
tgtggcacccggacggcccgcgccg

SEQ ID NO: 114068 - DNA, 25 bp, Homo sapien
tgtggcacccggtcggcccgcgccg

SEQ ID NO: 114069 - DNA, 25 bp, Homo sapien
agagaccaaggtcagtccttcgagg

SEQ ID NO: 114070 - DNA, 25 bp, Homo sapien
agagaccaaggtgagtccttcgagg

SEQ ID NO: 114071 - DNA, 25 bp, Homo sapien
tttaggacccaggaagtccctgagg

SEQ ID NO: 114072 - DNA, 25 bp, Homo sapien
tttaggacccagcaagtccctgagg

SEQ ID NO: 114073 - DNA, 25 bp, Homo sapien
agtcgtggaagtccaaggccccagg

SEQ ID NO: 114074 - DNA, 25 bp, Homo sapien
agtcgtggaagtgcaaggccccagg

SEQ ID NO: 114075 - DNA, 25 bp, Homo sapien
gagaacgtggacgacgctcccaggt

SEQ ID NO: 114076 - DNA, 25 bp, Homo sapien
gagaacgtggaccacgctcccaggt

SEQ ID NO: 114077 - DNA, 25 bp, Homo sapien
ctcgacaggaacctcggacccgtgg

SEQ ID NO: 114078 - DNA, 25 bp, Homo sapien
ctcgacaggaacgtcggacccgtgg

SEQ ID NO: 114079 - DNA, 25 bp, Homo sapien
gtacgtcacgaggacagccttccca

SEQ ID NO: 114080 - DNA, 25 bp, Homo sapien
gtacgtcacgagcacagccttccca

SEQ ID NO: 114081 - DNA, 25 bp, Homo sapien
gtgccacgttccaggtcttctcggg

SEQ ID NO: 114082 - DNA, 25 bp, Homo sapien
gtgccacgttcctggtcttctcggg

SEQ ID NO: 114083 - DNA, 25 bp, Homo sapien
gacccgagtttggttagtttactca

SEQ ID NO: 114084 - DNA, 25 bp, Homo sapien
gacccgagtttgcttagtttactca

SEQ ID NO: 114085 - DNA, 25 bp, Homo sapien
gaccacggactgttcccttatagaa

SEQ ID NO: 114086 - DNA, 25 bp, Homo sapien
gaccacggactgatcccttatagaa

SEQ ID NO: 114087 - DNA, 25 bp, Homo sapien
gataattactaactctttcgtgagg

SEQ ID NO: 114088 - DNA, 25 bp, Homo sapien
gataattactaagtctttcgtgagg

SEQ ID NO: 114089 - DNA, 25 bp, Homo sapien
cctacattcacttttaccggtgtgg

SEQ ID NO: 114090 - DNA, 25 bp, Homo sapien
cctacattcactattaccggtgtgg

SEQ ID NO: 114091 - DNA, 25 bp, Homo sapien
gtacagactcatctatttgtcgtaa

SEQ ID NO: 114092 - DNA, 25 bp, Homo sapien
gtacagactcatgtatttgtcgtaa

SEQ ID NO: 114093 - DNA, 25 bp, Homo sapien
gttttgacacttctcttatgagtaa

SEQ ID NO: 114094 - DNA, 25 bp, Homo sapien
gttttgacacttgtcttatgagtaa

SEQ ID NO: 114095 - DNA, 25 bp, Homo sapien
ccattagagacttggacattggtaa

SEQ ID NO: 114096 - DNA, 25 bp, Homo sapien
ccattagagactaggacattggtaa

SEQ ID NO: 114097 - DNA, 25 bp, Homo sapien
cactgtgatatcttatcccgggaga

SEQ ID NO: 114098 - DNA, 25 bp, Homo sapien
cactgtgatatcatatcccgggaga

SEQ ID NO: 114099 - DNA, 25 bp, Homo sapien
caaataacttctaaacaccgagggg

SEQ ID NO: 114100 - DNA, 25 bp, Homo sapien
caaataacttcttaacaccgagggg

SEQ ID NO: 114101 - DNA, 25 bp, Homo sapien
tagtacttatgactcgaacgtgtga

SEQ ID NO: 114102 - DNA, 25 bp, Homo sapien
tagtacttatgagtcgaacgtgtga

SEQ ID NO: 114103 - DNA, 25 bp, Homo sapien
gttttcacttacgatactggtttta

SEQ ID NO: 114104 - DNA, 25 bp, Homo sapien
gttttcacttaccatactggtttta

SEQ ID NO: 114105 - DNA, 25 bp, Homo sapien
cgtctttcctttgtaagactgtaaa

SEQ ID NO: 114106 - DNA, 25 bp, Homo sapien
cgtctttcctttctaagactgtaaa

SEQ ID NO: 114107 - DNA, 25 bp, Homo sapien
cgttgtttccttctaagtcagaaag

SEQ ID NO: 114108 - DNA, 25 bp, Homo sapien
cgttgtttccttgtaagtcagaaag

SEQ ID NO: 114109 - DNA, 25 bp, Homo sapien
gttgttgtcctttctccgtcaaggg

SEQ ID NO: 114110 - DNA, 25 bp, Homo sapien
gttgttgtccttactccgtcaaggg

SEQ ID NO: 114111 - DNA, 25 bp, Homo sapien
tgtttacactgtatgttcagtctgc

SEQ ID NO: 114112 - DNA, 25 bp, Homo sapien
tgtttacactgtttgttcagtctgc

SEQ ID NO: 114113 - DNA, 25 bp, Homo sapien
atgtcttatatagtgttacgaccaa

SEQ ID NO: 114114 - DNA, 25 bp, Homo sapien
atgtcttatatactgttacgaccaa

SEQ ID NO: 114115 - DNA, 25 bp, Homo sapien
acttcttagaagtcgtatttcaagt

SEQ ID NO: 114116 - DNA, 25 bp, Homo sapien
acttcttagaagacgtatttcaagt

SEQ ID NO: 114117 - DNA, 25 bp, Homo sapien
gtctgtaagtgtttttacactcgtc

SEQ ID NO: 114118 - DNA, 25 bp, Homo sapien
gtctgtaagtgtatttacactcgtc

SEQ ID NO: 114119 - DNA, 25 bp, Homo sapien
agaacttgtctacttttctgttgtc

SEQ ID NO: 114120 - DNA, 25 bp, Homo sapien
agaacttgtctagttttctgttgtc

SEQ ID NO: 114121 - DNA, 25 bp, Homo sapien
gattcttctagtttctctttatgta

SEQ ID NO: 114122 - DNA, 25 bp, Homo sapien
gattcttctagtatctctttatgta

SEQ ID NO: 114123 - DNA, 25 bp, Homo sapien
gagtcccgacgaagttcgccctaat

SEQ ID NO: 114124 - DNA, 25 bp, Homo sapien
gagtcccgacgatgttcgccctaat

SEQ ID NO: 114125 - DNA, 25 bp, Homo sapien
gctcacaccgacgagtcgccaatat

SEQ ID NO: 114126 - DNA, 25 bp, Homo sapien
gctcacaccgaccagtcgccaatat

SEQ ID NO: 114127 - DNA, 25 bp, Homo sapien
tctcgtctccgaccactcaatgtga

SEQ ID NO: 114128 - DNA, 25 bp, Homo sapien
tctcgtctccgagcactcaatgtga

SEQ ID NO: 114129 - DNA, 25 bp, Homo sapien
aacagtcagacgaacaccgaaggga

SEQ ID NO: 114130 - DNA, 25 bp, Homo sapien
aacagtcagacgtacaccgaaggga

SEQ ID NO: 114131 - DNA, 25 bp, Homo sapien
ctacggatgtccacacacacagcga

SEQ ID NO: 114132 - DNA, 25 bp, Homo sapien
ctacggatgtcctcacacacagcga

SEQ ID NO: 114133 - DNA, 25 bp, Homo sapien
aggtgaaggtccttcgaaaagtcga

SEQ ID NO: 114134 - DNA, 25 bp, Homo sapien
aggtgaaggtccatcgaaaagtcga

SEQ ID NO: 114135 - DNA, 25 bp, Homo sapien
gaaaacttaaatcacgtacaacgga

SEQ ID NO: 114136 - DNA, 25 bp, Homo sapien
gaaaacttaaatgacgtacaacgga

SEQ ID NO: 114137 - DNA, 25 bp, Homo sapien
gttttactgaaagagtacctactaa

SEQ ID NO: 114138 - DNA, 25 bp, Homo sapien
gttttactgaaacagtacctactaa

SEQ ID NO: 114139 - DNA, 25 bp, Homo sapien
gtggtgtaccggtaggctccagtca

SEQ ID NO: 114140 - DNA, 25 bp, Homo sapien
gtggtgtaccggaaggctccagtca

SEQ ID NO: 114141 - DNA, 25 bp, Homo sapien
tactcgagggtaaccgtcggtacga

SEQ ID NO: 114142 - DNA, 25 bp, Homo sapien
tactcgagggtatccgtcggtacga

SEQ ID NO: 114143 - DNA, 25 bp, Homo sapien
tgtctgtacgtaggacggcgttaaa

SEQ ID NO: 114144 - DNA, 25 bp, Homo sapien
tgtctgtacgtacgacggcgttaaa

SEQ ID NO: 114145 - DNA, 25 bp, Homo sapien
gtcgtctactcgacggccgtctcaa

SEQ ID NO: 114146 - DNA, 25 bp, Homo sapien
gtcgtctactcgtcggccgtctcaa

SEQ ID NO: 114147 - DNA, 25 bp, Homo sapien
aaactagtttgttcccccagtcacg

SEQ ID NO: 114148 - DNA, 25 bp, Homo sapien
aaactagtttgtacccccagtcacg

SEQ ID NO: 114149 - DNA, 25 bp, Homo sapien
atagtgattcgtaccgggacacggg

SEQ ID NO: 114150 - DNA, 25 bp, Homo sapien
atagtgattcgttccgggacacggg

SEQ ID NO: 114151 - DNA, 25 bp, Homo sapien
ctgagtccctgtggtgtgcagagtt

SEQ ID NO: 114152 - DNA, 25 bp, Homo sapien
ctgagtccctgtcgtgtgcagagtt

SEQ ID NO: 114153 - DNA, 25 bp, Homo sapien
gtatagtttactttgtgaggattac

SEQ ID NO: 114154 - DNA, 25 bp, Homo sapien
gtatagtttactatgtgaggattac

SEQ ID NO: 114155 - DNA, 25 bp, Homo sapien
gtaggtgtgataacagttccagttc

SEQ ID NO: 114156 - DNA, 25 bp, Homo sapien
gtaggtgtgatatcagttccagttc

SEQ ID NO: 114157 - DNA, 25 bp, Homo sapien
agcgttgtggttttcccgagttgtc

SEQ ID NO: 114158 - DNA, 25 bp, Homo sapien
agcgttgtggttatcccgagttgtc

SEQ ID NO: 114159 - DNA, 25 bp, Homo sapien
gtatacttggttattctcggtcctg

SEQ ID NO: 114160 - DNA, 25 bp, Homo sapien
gtatacttggtttttctcggtcctg

SEQ ID NO: 114161 - DNA, 25 bp, Homo sapien
gcacgttcagtcgtttgacgtgccg

SEQ ID NO: 114162 - DNA, 25 bp, Homo sapien
gcacgttcagtcctttgacgtgccg

SEQ ID NO: 114163 - DNA, 25 bp, Homo sapien
tggtccttcggctacatgaagtacc

SEQ ID NO: 114164 - DNA, 25 bp, Homo sapien
tggtccttcggcaacatgaagtacc

SEQ ID NO: 114165 - DNA, 25 bp, Homo sapien
ccggacggtgtccatgtactataat

SEQ ID NO: 114166 - DNA, 25 bp, Homo sapien
ccggacggtgtcgatgtactataat

SEQ ID NO: 114167 - DNA, 25 bp, Homo sapien
ccctcctgtgtcgtactgtcaaagt

SEQ ID NO: 114168 - DNA, 25 bp, Homo sapien
ccctcctgtgtcctactgtcaaagt

SEQ ID NO: 114169 - DNA, 25 bp, Homo sapien
accggaatcttctctacggccacag

SEQ ID NO: 114170 - DNA, 25 bp, Homo sapien
accggaatcttcactacggccacag

SEQ ID NO: 114171 - DNA, 25 bp, Homo sapien
taaacgaaagtcattgaccatacag

SEQ ID NO: 114172 - DNA, 25 bp, Homo sapien
taaacgaaagtctttgaccatacag

SEQ ID NO: 114173 - DNA, 25 bp, Homo sapien
ggtgaacaactttttgactaaactt

SEQ ID NO: 114174 - DNA, 25 bp, Homo sapien
ggtgaacaacttattgactaaactt

SEQ ID NO: 114175 - DNA, 25 bp, Homo sapien
tacgccaactgtaggagctcgtccc

SEQ ID NO: 114176 - DNA, 25 bp, Homo sapien
tacgccaactgttggagctcgtccc

SEQ ID NO: 114177 - DNA, 25 bp, Homo sapien
tttcttcctccgtggattgtccgag

SEQ ID NO: 114178 - DNA, 25 bp, Homo sapien
tttcttcctccgaggattgtccgag

SEQ ID NO: 114179 - DNA, 25 bp, Homo sapien
gggtttcacaccagaacagctccca

SEQ ID NO: 114180 - DNA, 25 bp, Homo sapien
gggtttcacacctgaacagctccca

SEQ ID NO: 114181 - DNA, 25 bp, Homo sapien
tttcttacgttacaggtctcggaac

SEQ ID NO: 114182 - DNA, 25 bp, Homo sapien
tttcttacgttagaggtctcggaac

SEQ ID NO: 114183 - DNA, 25 bp, Homo sapien
attgttcatcacttagcctgtgaaa

SEQ ID NO: 114184 - DNA, 25 bp, Homo sapien
attgttcatcacatagcctgtgaaa

SEQ ID NO: 114185 - DNA, 25 bp, Homo sapien
tgtcccgaccacagaaccgggtgtc

SEQ ID NO: 114186 - DNA, 25 bp, Homo sapien
tgtcccgaccactgaaccgggtgtc

SEQ ID NO: 114187 - DNA, 25 bp, Homo sapien
gtccgagaccatcatcgcgtgggac

SEQ ID NO: 114188 - DNA, 25 bp, Homo sapien
gtccgagaccatgatcgcgtgggac

SEQ ID NO: 114189 - DNA, 25 bp, Homo sapien
ggtctcgcctcaacttgcagtggaa

SEQ ID NO: 114190 - DNA, 25 bp, Homo sapien
ggtctcgcctcatcttgcagtggaa

SEQ ID NO: 114191 - DNA, 25 bp, Homo sapien
gtcttcctcttacgtttctgggaag

SEQ ID NO: 114192 - DNA, 25 bp, Homo sapien
gtcttcctcttaggtttctgggaag

SEQ ID NO: 114193 - DNA, 25 bp, Homo sapien
gttctttcagggttgtcgggataac

SEQ ID NO: 114194 - DNA, 25 bp, Homo sapien
gttctttcagggatgtcgggataac

SEQ ID NO: 114195 - DNA, 25 bp, Homo sapien
ttccggtcgggaactcttccacaga

SEQ ID NO: 114196 - DNA, 25 bp, Homo sapien
ttccggtcgggatctcttccacaga

SEQ ID NO: 114197 - DNA, 25 bp, Homo sapien
gttcgtctccggtgtcctcctaaga

SEQ ID NO: 114198 - DNA, 25 bp, Homo sapien
gttcgtctccggagtcctcctaaga

SEQ ID NO: 114199 - DNA, 25 bp, Homo sapien
gattgtctacgctcaaccatgtgac

SEQ ID NO: 114200 - DNA, 25 bp, Homo sapien
gattgtctacgcacaaccatgtgac

SEQ ID NO: 114201 - DNA, 25 bp, Homo sapien
ggatgttcaaacgacacgatggtat

SEQ ID NO: 114202 - DNA, 25 bp, Homo sapien
ggatgttcaaaccacacgatggtat

SEQ ID NO: 114203 - DNA, 25 bp, Homo sapien
aggaatagacacactccaaatgttt

SEQ ID NO: 114204 - DNA, 25 bp, Homo sapien
aggaatagacactctccaaatgttt

SEQ ID NO: 114205 - DNA, 25 bp, Homo sapien
cacaaaggaatgaccctaattagtg

SEQ ID NO: 114206 - DNA, 25 bp, Homo sapien
cacaaaggaatgtccctaattagtg

SEQ ID NO: 114207 - DNA, 25 bp, Homo sapien
taaagtggaatccttcatgtgtacg

SEQ ID NO: 114208 - DNA, 25 bp, Homo sapien
taaagtggaatcgttcatgtgtacg

SEQ ID NO: 114209 - DNA, 25 bp, Homo sapien
ccggaggacatttacagttttgtag

SEQ ID NO: 114210 - DNA, 25 bp, Homo sapien
ccggaggacattaacagttttgtag

SEQ ID NO: 114211 - DNA, 25 bp, Homo sapien
cccgacggactagaggaagccccga

SEQ ID NO: 114212 - DNA, 25 bp, Homo sapien
cccgacggactacaggaagccccga

SEQ ID NO: 114213 - DNA, 25 bp, Homo sapien
cgaaggaacgggaagagaccctcga

SEQ ID NO: 114214 - DNA, 25 bp, Homo sapien
cgaaggaacgggtagagaccctcga

SEQ ID NO: 114215 - DNA, 25 bp, Homo sapien
cagagactcggagaccaagcgtcag

SEQ ID NO: 114216 - DNA, 25 bp, Homo sapien
cagagactcggacaccaagcgtcag

SEQ ID NO: 114217 - DNA, 25 bp, Homo sapien
tcacgtgctgggacccgtagacccg

SEQ ID NO: 114218 - DNA, 25 bp, Homo sapien
tcacgtgctgggtcccgtagacccg

SEQ ID NO: 114219 - DNA, 25 bp, Homo sapien
gagaagaacgtcctccacgtaaacg

SEQ ID NO: 114220 - DNA, 25 bp, Homo sapien
gagaagaacgtcgtccacgtaaacg

SEQ ID NO: 114221 - DNA, 25 bp, Homo sapien
aaataagatatctcacgtaagaacg

SEQ ID NO: 114222 - DNA, 25 bp, Homo sapien
aaataagatatcacacgtaagaacg

SEQ ID NO: 114223 - DNA, 25 bp, Homo sapien
ggttcaggaaaaccccgacataatt

SEQ ID NO: 114224 - DNA, 25 bp, Homo sapien
ggttcaggaaaagcccgacataatt

SEQ ID NO: 114225 - DNA, 25 bp, Homo sapien
ctttagagaaaatccatagaacctg

SEQ ID NO: 114226 - DNA, 25 bp, Homo sapien
ctttagagaaaaaccatagaacctg

SEQ ID NO: 114227 - DNA, 25 bp, Homo sapien
cgggagcaagacgacaaagaccata

SEQ ID NO: 114228 - DNA, 25 bp, Homo sapien
cgggagcaagaccacaaagaccata

SEQ ID NO: 114229 - DNA, 25 bp, Homo sapien
ggaacaccaactcaacaagacatag

SEQ ID NO: 114230 - DNA, 25 bp, Homo sapien
ggaacaccaactgaacaagacatag

SEQ ID NO: 114231 - DNA, 25 bp, Homo sapien
gggagtaagactttcggcaacaagc

SEQ ID NO: 114232 - DNA, 25 bp, Homo sapien
gggagtaagactatcggcaacaagc

SEQ ID NO: 114233 - DNA, 25 bp, Homo sapien
tttcccgtataaatcgttttctgtg

SEQ ID NO: 114234 - DNA, 25 bp, Homo sapien
tttcccgtataattcgttttctgtg

SEQ ID NO: 114235 - DNA, 25 bp, Homo sapien
atttatccagagaccgtttcttgtt

SEQ ID NO: 114236 - DNA, 25 bp, Homo sapien
atttatccagagtccgtttcttgtt

SEQ ID NO: 114237 - DNA, 25 bp, Homo sapien
atacattcaagttctcctcctttct

SEQ ID NO: 114238 - DNA, 25 bp, Homo sapien
atacattcaagtactcctcctttct

SEQ ID NO: 114239 - DNA, 25 bp, Homo sapien
acgatgtctgccaacgattctcttg

SEQ ID NO: 114240 - DNA, 25 bp, Homo sapien
acgatgtctgcctacgattctcttg

SEQ ID NO: 114241 - DNA, 25 bp, Homo sapien
cacttgtgtctgtggcacctgtccc

SEQ ID NO: 114242 - DNA, 25 bp, Homo sapien
cacttgtgtctgaggcacctgtccc

SEQ ID NO: 114243 - DNA, 25 bp, Homo sapien
gttaagtgtcggagaactgcatcaa

SEQ ID NO: 114244 - DNA, 25 bp, Homo sapien
gttaagtgtcggtgaactgcatcaa

SEQ ID NO: 114245 - DNA, 25 bp, Homo sapien
tgacgtgttggtggaccaacaacag

SEQ ID NO: 114246 - DNA, 25 bp, Homo sapien
tgacgtgttggtcgaccaacaacag

SEQ ID NO: 114247 - DNA, 25 bp, Homo sapien
ataaagtcgttctgtcaagaacgag

SEQ ID NO: 114248 - DNA, 25 bp, Homo sapien
ataaagtcgttcagtcaagaacgag

SEQ ID NO: 114249 - DNA, 25 bp, Homo sapien
aattttcgtctgtcacgaggtgacc

SEQ ID NO: 114250 - DNA, 25 bp, Homo sapien
aattttcgtctgacacgaggtgacc

SEQ ID NO: 114251 - DNA, 25 bp, Homo sapien
tttaacctgtcttcttaggtcggaa

SEQ ID NO: 114252 - DNA, 25 bp, Homo sapien
tttaacctgtctacttaggtcggaa

SEQ ID NO: 114253 - DNA, 25 bp, Homo sapien
ttgcctcgtcccaagtcgacggcta

SEQ ID NO: 114254 - DNA, 25 bp, Homo sapien
ttgcctcgtccctagtcgacggcta

SEQ ID NO: 114255 - DNA, 25 bp, Homo sapien
tcttaacggaagttctcgaagacat

SEQ ID NO: 114256 - DNA, 25 bp, Homo sapien
tcttaacggaagatctcgaagacat

SEQ ID NO: 114257 - DNA, 25 bp, Homo sapien
atacttcaaatctgtggttatccgt

SEQ ID NO: 114258 - DNA, 25 bp, Homo sapien
atacttcaaatcagtggttatccgt

SEQ ID NO: 114259 - DNA, 25 bp, Homo sapien
agtttcctttaggtacggttatctt

SEQ ID NO: 114260 - DNA, 25 bp, Homo sapien
agtttcctttagctacggttatctt

SEQ ID NO: 114261 - DNA, 25 bp, Homo sapien
aggagtcggtcatgtcttcggttta

SEQ ID NO: 114262 - DNA, 25 bp, Homo sapien
aggagtcggtcaagtcttcggttta

SEQ ID NO: 114263 - DNA, 25 bp, Homo sapien
tggtccagacatcgtcttttattag

SEQ ID NO: 114264 - DNA, 25 bp, Homo sapien
tggtccagacatggtcttttattag

SEQ ID NO: 114265 - DNA, 25 bp, Homo sapien
gtctacagtaatgtcagttttcagt

SEQ ID NO: 114266 - DNA, 25 bp, Homo sapien
gtctacagtaatctcagttttcagt

SEQ ID NO: 114267 - DNA, 25 bp, Homo sapien
acgtaagaagataagtccctttttg

SEQ ID NO: 114268 - DNA, 25 bp, Homo sapien
acgtaagaagattagtccctttttg

SEQ ID NO: 114269 - DNA, 25 bp, Homo sapien
gtggacgatctctctcactttcatc

SEQ ID NO: 114270 - DNA, 25 bp, Homo sapien
gtggacgatctcactcactttcatc

SEQ ID NO: 114271 - DNA, 25 bp, Homo sapien
agtgaccggttctaccatcaaagag

SEQ ID NO: 114272 - DNA, 25 bp, Homo sapien
agtgaccggttcaaccatcaaagag

SEQ ID NO: 114273 - DNA, 25 bp, Homo sapien
gaactacccgtttttcggaggaaat

SEQ ID NO: 114274 - DNA, 25 bp, Homo sapien
gaactacccgttattcggaggaaat

SEQ ID NO: 114275 - DNA, 25 bp, Homo sapien
atctgtcctcatttggtgtcgggat

SEQ ID NO: 114276 - DNA, 25 bp, Homo sapien
atctgtcctcatatggtgtcgggat

SEQ ID NO: 114277 - DNA, 25 bp, Homo sapien
aacatttcctgaagagtctgtattg

SEQ ID NO: 114278 - DNA, 25 bp, Homo sapien
aacatttcctgatgagtctgtattg

SEQ ID NO: 114279 - DNA, 25 bp, Homo sapien
taccttatctcataccaatggtaga

SEQ ID NO: 114280 - DNA, 25 bp, Homo sapien
taccttatctcaaaccaatggtaga

SEQ ID NO: 114281 - DNA, 25 bp, Homo sapien
cggtgcgacacagacgagcgtggac

SEQ ID NO: 114282 - DNA, 25 bp, Homo sapien
cggtgcgacacacacgagcgtggac

SEQ ID NO: 114283 - DNA, 25 bp, Homo sapien
ggagtgagtcacacaagcgtaggac

SEQ ID NO: 114284 - DNA, 25 bp, Homo sapien
ggagtgagtcactcaagcgtaggac

SEQ ID NO: 114285 - DNA, 25 bp, Homo sapien
agagcagctacgacatcagcgccgc

SEQ ID NO: 114286 - DNA, 25 bp, Homo sapien
agagcagctacgtcatcagcgccgc

SEQ ID NO: 114287 - DNA, 25 bp, Homo sapien
ggagaagggaagttattcctccaac

SEQ ID NO: 114288 - DNA, 25 bp, Homo sapien
ggagaagggaagatattcctccaac

SEQ ID NO: 114289 - DNA, 25 bp, Homo sapien
acggagtgaaggtttcctcttcggt

SEQ ID NO: 114290 - DNA, 25 bp, Homo sapien
acggagtgaaggattcctcttcggt

SEQ ID NO: 114291 - DNA, 25 bp, Homo sapien
gcacaacgagattgtccctgtgact

SEQ ID NO: 114292 - DNA, 25 bp, Homo sapien
gcacaacgagatagtccctgtgact

SEQ ID NO: 114293 - DNA, 25 bp, Homo sapien
caactacgtttcagccacgagttat

SEQ ID NO: 114294 - DNA, 25 bp, Homo sapien
caactacgtttctgccacgagttat

SEQ ID NO: 114295 - DNA, 25 bp, Homo sapien
acactatctgtagtaccagactcga

SEQ ID NO: 114296 - DNA, 25 bp, Homo sapien
acactatctgtactaccagactcga

SEQ ID NO: 114297 - DNA, 25 bp, Homo sapien
gtctgtcctggtacctcccgacggg

SEQ ID NO: 114298 - DNA, 25 bp, Homo sapien
gtctgtcctggttcctcccgacggg

SEQ ID NO: 114299 - DNA, 25 bp, Homo sapien
tcctacttccacgtctttctggggg

SEQ ID NO: 114300 - DNA, 25 bp, Homo sapien
tcctacttccacctctttctggggg

SEQ ID NO: 114301 - DNA, 25 bp, Homo sapien
gctaaactccccggtcacagaggga

SEQ ID NO: 114302 - DNA, 25 bp, Homo sapien
gctaaactcccccgtcacagaggga

SEQ ID NO: 114303 - DNA, 25 bp, Homo sapien
caccgaacaactgacgaccgacgta

SEQ ID NO: 114304 - DNA, 25 bp, Homo sapien
caccgaacaactcacgaccgacgta

SEQ ID NO: 114305 - DNA, 25 bp, Homo sapien
cggacccgaaaacgtgtgacctacc

SEQ ID NO: 114306 - DNA, 25 bp, Homo sapien
cggacccgaaaaggtgtgacctacc

SEQ ID NO: 114307 - DNA, 25 bp, Homo sapien
cgtcggggaaagaccgacacgacac

SEQ ID NO: 114308 - DNA, 25 bp, Homo sapien
cgtcggggaaagtccgacacgacac

SEQ ID NO: 114309 - DNA, 25 bp, Homo sapien
gactacatacgatccgtcgaaccgt

SEQ ID NO: 114310 - DNA, 25 bp, Homo sapien
gactacatacgaaccgtcgaaccgt

SEQ ID NO: 114311 - DNA, 25 bp, Homo sapien
gtagtacaaccgaccgacgtaactg

SEQ ID NO: 114312 - DNA, 25 bp, Homo sapien
gtagtacaaccgtccgacgtaactg

SEQ ID NO: 114313 - DNA, 25 bp, Homo sapien
acctatgtgacaaccggtccaatgg

SEQ ID NO: 114314 - DNA, 25 bp, Homo sapien
acctatgtgacatccggtccaatgg

SEQ ID NO: 114315 - DNA, 25 bp, Homo sapien
accctatgtcattggtcctttatgt

SEQ ID NO: 114316 - DNA, 25 bp, Homo sapien
accctatgtcataggtcctttatgt

SEQ ID NO: 114317 - DNA, 25 bp, Homo sapien
ccctctctacatgtaggggactatt

SEQ ID NO: 114318 - DNA, 25 bp, Homo sapien
ccctctctacatctaggggactatt

SEQ ID NO: 114319 - DNA, 25 bp, Homo sapien
gtcttcgttttcatcgaaacctccg

SEQ ID NO: 114320 - DNA, 25 bp, Homo sapien
gtcttcgttttcttcgaaacctccg

SEQ ID NO: 114321 - DNA, 25 bp, Homo sapien
ttcgtttcgttcttcttgcaccacg

SEQ ID NO: 114322 - DNA, 25 bp, Homo sapien
ttcgtttcgttcatcttgcaccacg

SEQ ID NO: 114323 - DNA, 25 bp, Homo sapien
atctgttgtgtctagactttaccac

SEQ ID NO: 114324 - DNA, 25 bp, Homo sapien
atctgttgtgtcaagactttaccac

SEQ ID NO: 114325 - DNA, 25 bp, Homo sapien
acatcaaatggtgtacggtgaccct

SEQ ID NO: 114326 - DNA, 25 bp, Homo sapien
acatcaaatggtctacggtgaccct

SEQ ID NO: 114327 - DNA, 25 bp, Homo sapien
gtctgaacatatttctagctgaacc

SEQ ID NO: 114328 - DNA, 25 bp, Homo sapien
gtctgaacatatatctagctgaacc

SEQ ID NO: 114329 - DNA, 25 bp, Homo sapien
ggtatggggatgtcttctgagacac

SEQ ID NO: 114330 - DNA, 25 bp, Homo sapien
ggtatggggatgacttctgagacac

SEQ ID NO: 114331 - DNA, 25 bp, Homo sapien
aggtggaccggatcccttgggacat

SEQ ID NO: 114332 - DNA, 25 bp, Homo sapien
aggtggaccggaacccttgggacat

SEQ ID NO: 114333 - DNA, 25 bp, Homo sapien
gaaaactggatacacttaggtccat

SEQ ID NO: 114334 - DNA, 25 bp, Homo sapien
gaaaactggatagacttaggtccat

SEQ ID NO: 114335 - DNA, 25 bp, Homo sapien
cactggactgtgttatcggtatctt

SEQ ID NO: 114336 - DNA, 25 bp, Homo sapien
cactggactgtgatatcggtatctt

SEQ ID NO: 114337 - DNA, 25 bp, Homo sapien
accgttgtatgaactaacggtcctt

SEQ ID NO: 114338 - DNA, 25 bp, Homo sapien
accgttgtatgatctaacggtcctt

SEQ ID NO: 114339 - DNA, 25 bp, Homo sapien
cagtcctggcgtatgagtcctcttt

SEQ ID NO: 114340 - DNA, 25 bp, Homo sapien
cagtcctggcgtttgagtcctcttt

SEQ ID NO: 114341 - DNA, 25 bp, Homo sapien
tccgtcacgtcgtggaaatcttttt

SEQ ID NO: 114342 - DNA, 25 bp, Homo sapien
tccgtcacgtcgaggaaatcttttt

SEQ ID NO: 114343 - DNA, 25 bp, Homo sapien
tccccggtctgtccaaagtggaccg

SEQ ID NO: 114344 - DNA, 25 bp, Homo sapien
tccccggtctgtgcaaagtggaccg

SEQ ID NO: 114345 - DNA, 25 bp, Homo sapien
ccgtcatgtggtacaagttgttaac

SEQ ID NO: 114346 - DNA, 25 bp, Homo sapien
ccgtcatgtggttcaagttgttaac

SEQ ID NO: 114347 - DNA, 25 bp, Homo sapien
gccaagagacatatgttttactaga

SEQ ID NO: 114348 - DNA, 25 bp, Homo sapien
gccaagagacatttgttttactaga

SEQ ID NO: 114349 - DNA, 25 bp, Homo sapien
cggtccatgactcgtttttggaaga

SEQ ID NO: 114350 - DNA, 25 bp, Homo sapien
cggtccatgactggtttttggaaga

SEQ ID NO: 114351 - DNA, 25 bp, Homo sapien
atctctcatatttttgtcgggtaaa

SEQ ID NO: 114352 - DNA, 25 bp, Homo sapien
atctctcatattattgtcgggtaaa

SEQ ID NO: 114353 - DNA, 25 bp, Homo sapien
atgcacctatgttctgggagtatca

SEQ ID NO: 114354 - DNA, 25 bp, Homo sapien
atgcacctatgtactgggagtatca

SEQ ID NO: 114355 - DNA, 25 bp, Homo sapien
gacccttgtgatcactagctcctct

SEQ ID NO: 114356 - DNA, 25 bp, Homo sapien
gacccttgtgatgactagctcctct

SEQ ID NO: 114357 - DNA, 25 bp, Homo sapien
ctcccgattcttgacgtgagattct

SEQ ID NO: 114358 - DNA, 25 bp, Homo sapien
ctcccgattcttcacgtgagattct

SEQ ID NO: 114359 - DNA, 25 bp, Homo sapien
tcgaaccttctcggcgatgagctta

SEQ ID NO: 114360 - DNA, 25 bp, Homo sapien
tcgaaccttctccgcgatgagctta

SEQ ID NO: 114361 - DNA, 25 bp, Homo sapien
tgactaatgtttcacgccacgtttg

SEQ ID NO: 114362 - DNA, 25 bp, Homo sapien
tgactaatgtttgacgccacgtttg

SEQ ID NO: 114363 - DNA, 25 bp, Homo sapien
ggtctaatcttgtcattcgtattat

SEQ ID NO: 114364 - DNA, 25 bp, Homo sapien
ggtctaatcttgacattcgtattat

SEQ ID NO: 114365 - DNA, 25 bp, Homo sapien
ataacttcgtcaatacgaggtcgtt

SEQ ID NO: 114366 - DNA, 25 bp, Homo sapien
ataacttcgtcattacgaggtcgtt

SEQ ID NO: 114367 - DNA, 25 bp, Homo sapien
taggtaattctgtactgacatctgt

SEQ ID NO: 114368 - DNA, 25 bp, Homo sapien
taggtaattctgaactgacatctgt

SEQ ID NO: 114369 - DNA, 25 bp, Homo sapien
ttaggtaagttcgacaaccgtatta

SEQ ID NO: 114370 - DNA, 25 bp, Homo sapien
ttaggtaagttccacaaccgtatta

SEQ ID NO: 114371 - DNA, 25 bp, Homo sapien
gtttactcatggaaacacgaattta

SEQ ID NO: 114372 - DNA, 25 bp, Homo sapien
gtttactcatggtaacacgaattta

SEQ ID NO: 114373 - DNA, 25 bp, Homo sapien
ttgtaaaggtttgcacatacttcta

SEQ ID NO: 114374 - DNA, 25 bp, Homo sapien
ttgtaaaggtttccacatacttcta

SEQ ID NO: 114375 - DNA, 25 bp, Homo sapien
gagagggagtctaccaccgtagatg

SEQ ID NO: 114376 - DNA, 25 bp, Homo sapien
gagagggagtcttccaccgtagatg

SEQ ID NO: 114377 - DNA, 25 bp, Homo sapien
gagactagactgtaaactgtacttg

SEQ ID NO: 114378 - DNA, 25 bp, Homo sapien
gagactagactgaaaactgtacttg

SEQ ID NO: 114379 - DNA, 25 bp, Homo sapien
aacaaaaccagtcgaccttatgtcg

SEQ ID NO: 114380 - DNA, 25 bp, Homo sapien
aacaaaaccagtggaccttatgtcg

SEQ ID NO: 114381 - DNA, 25 bp, Homo sapien
tattacaatgagacgacctcctgtc

SEQ ID NO: 114382 - DNA, 25 bp, Homo sapien
tattacaatgagtcgacctcctgtc

SEQ ID NO: 114383 - DNA, 25 bp, Homo sapien
gtttcgcataggtccagtctctcct

SEQ ID NO: 114384 - DNA, 25 bp, Homo sapien
gtttcgcataggaccagtctctcct

SEQ ID NO: 114385 - DNA, 25 bp, Homo sapien
gttccatagtgatctccagttactt

SEQ ID NO: 114386 - DNA, 25 bp, Homo sapien
gttccatagtgaactccagttactt

SEQ ID NO: 114387 - DNA, 25 bp, Homo sapien
aggttcacctcgagcttaaggtacc

SEQ ID NO: 114388 - DNA, 25 bp, Homo sapien
aggttcacctcgtgcttaaggtacc

SEQ ID NO: 114389 - DNA, 25 bp, Homo sapien
gggtctaaagggtttccagatctct

SEQ ID NO: 114390 - DNA, 25 bp, Homo sapien
gggtctaaagggattccagatctct

SEQ ID NO: 114391 - DNA, 25 bp, Homo sapien
gttcgaagaacaaactgttcaaatt

SEQ ID NO: 114392 - DNA, 25 bp, Homo sapien
gttcgaagaacatactgttcaaatt

SEQ ID NO: 114393 - DNA, 25 bp, Homo sapien
gtcaagaaccataagttgtacaatt

SEQ ID NO: 114394 - DNA, 25 bp, Homo sapien
gtcaagaaccattagttgtacaatt

SEQ ID NO: 114395 - DNA, 25 bp, Homo sapien
ttaagagaccatatcgtgtcacatc

SEQ ID NO: 114396 - DNA, 25 bp, Homo sapien
ttaagagaccatttcgtgtcacatc

SEQ ID NO: 114397 - DNA, 25 bp, Homo sapien
taggagaccggtgactccgacaaag

SEQ ID NO: 114398 - DNA, 25 bp, Homo sapien
taggagaccggtcactccgacaaag

SEQ ID NO: 114399 - DNA, 25 bp, Homo sapien
cattatgagggaaagttacctgaca

SEQ ID NO: 114400 - DNA, 25 bp, Homo sapien
cattatgagggatagttacctgaca

SEQ ID NO: 114401 - DNA, 25 bp, Homo sapien
aggtaccgggggtccacttgtctag

SEQ ID NO: 114402 - DNA, 25 bp, Homo sapien
aggtaccgggggaccacttgtctag

SEQ ID NO: 114403 - DNA, 25 bp, Homo sapien
tagggttcgtttagggatttacctc

SEQ ID NO: 114404 - DNA, 25 bp, Homo sapien
tagggttcgttttgggatttacctc

SEQ ID NO: 114405 - DNA, 25 bp, Homo sapien
gtacagatttataggacactgtcct

SEQ ID NO: 114406 - DNA, 25 bp, Homo sapien
gtacagatttattggacactgtcct

SEQ ID NO: 114407 - DNA, 25 bp, Homo sapien
aggtacatgtagattggtccagtcc

SEQ ID NO: 114408 - DNA, 25 bp, Homo sapien
aggtacatgtagtttggtccagtcc

SEQ ID NO: 114409 - DNA, 25 bp, Homo sapien
cggtacaagtatcttcggtccgtcc

SEQ ID NO: 114410 - DNA, 25 bp, Homo sapien
cggtacaagtatgttcggtccgtcc

SEQ ID NO: 114411 - DNA, 25 bp, Homo sapien
tttaagttcacttctgtctcacgga

SEQ ID NO: 114412 - DNA, 25 bp, Homo sapien
tttaagttcactactgtctcacgga

SEQ ID NO: 114413 - DNA, 25 bp, Homo sapien
aaagagtccgtggtgcgttgtcgat

SEQ ID NO: 114414 - DNA, 25 bp, Homo sapien
aaagagtccgtgctgcgttgtcgat

SEQ ID NO: 114415 - DNA, 25 bp, Homo sapien
ataacggtcatatacgtgttgtcat

SEQ ID NO: 114416 - DNA, 25 bp, Homo sapien
ataacggtcataaacgtgttgtcat

SEQ ID NO: 114417 - DNA, 25 bp, Homo sapien
caaaagggtccaatacgtattcgac

SEQ ID NO: 114418 - DNA, 25 bp, Homo sapien
caaaagggtccattacgtattcgac

SEQ ID NO: 114419 - DNA, 25 bp, Homo sapien
aagaatccagtgtcatgttctgacg

SEQ ID NO: 114420 - DNA, 25 bp, Homo sapien
aagaatccagtgacatgttctgacg

SEQ ID NO: 114421 - DNA, 25 bp, Homo sapien
acaacttagattgtggcttttttcg

SEQ ID NO: 114422 - DNA, 25 bp, Homo sapien
acaacttagattctggcttttttcg

SEQ ID NO: 114423 - DNA, 25 bp, Homo sapien
ataaagtaagggttactgtcttccg

SEQ ID NO: 114424 - DNA, 25 bp, Homo sapien
ataaagtaagggatactgtcttccg

SEQ ID NO: 114425 - DNA, 25 bp, Homo sapien
acgatcagagagtgcttgtgtttcg

SEQ ID NO: 114426 - DNA, 25 bp, Homo sapien
acgatcagagagagcttgtgtttcg

SEQ ID NO: 114427 - DNA, 25 bp, Homo sapien
gacacacagttacatcttctctttt

SEQ ID NO: 114428 - DNA, 25 bp, Homo sapien
gacacacagttagatcttctctttt

SEQ ID NO: 114429 - DNA, 25 bp, Homo sapien
cacaggtaagagtatcgctcgtatg

SEQ ID NO: 114430 - DNA, 25 bp, Homo sapien
cacaggtaagagaatcgctcgtatg

SEQ ID NO: 114431 - DNA, 25 bp, Homo sapien
ttcatgaagaggaaccgtcggagtg

SEQ ID NO: 114432 - DNA, 25 bp, Homo sapien
ttcatgaagaggtaccgtcggagtg

SEQ ID NO: 114433 - DNA, 25 bp, Homo sapien
attatattcatagaaatcgccgcag

SEQ ID NO: 114434 - DNA, 25 bp, Homo sapien
attatattcatacaaatcgccgcag

SEQ ID NO: 114435 - DNA, 25 bp, Homo sapien
aatctgttcctgcaaaagtgatcat

SEQ ID NO: 114436 - DNA, 25 bp, Homo sapien
aatctgttcctggaaaagtgatcat

SEQ ID NO: 114437 - DNA, 25 bp, Homo sapien
cctcgaacactgtccgtcctaagga

SEQ ID NO: 114438 - DNA, 25 bp, Homo sapien
cctcgaacactgaccgtcctaagga

SEQ ID NO: 114439 - DNA, 25 bp, Homo sapien
cgcgactcatgcagcacctcaggtg

SEQ ID NO: 114440 - DNA, 25 bp, Homo sapien
cgcgactcatgctgcacctcaggtg

SEQ ID NO: 114441 - DNA, 25 bp, Homo sapien
gttcatttcctatctagtatcccgg

SEQ ID NO: 114442 - DNA, 25 bp, Homo sapien
gttcatttcctaactagtatcccgg

SEQ ID NO: 114443 - DNA, 25 bp, Homo sapien
tatctatttccacgacggcctcggt

SEQ ID NO: 114444 - DNA, 25 bp, Homo sapien
tatctatttccaggacggcctcggt

SEQ ID NO: 114445 - DNA, 25 bp, Homo sapien
aagttattacttggttgtcctctca

SEQ ID NO: 114446 - DNA, 25 bp, Homo sapien
aagttattacttcgttgtcctctca

SEQ ID NO: 114447 - DNA, 25 bp, Homo sapien
gaacttttcaaagtctgtgtcctaa

SEQ ID NO: 114448 - DNA, 25 bp, Homo sapien
gaacttttcaaactctgtgtcctaa

SEQ ID NO: 114449 - DNA, 25 bp, Homo sapien
ttcaggaaccactagtcccgtagac

SEQ ID NO: 114450 - DNA, 25 bp, Homo sapien
ttcaggaaccacaagtcccgtagac

SEQ ID NO: 114451 - DNA, 25 bp, Homo sapien
aatgttagggcaccgagggttcccg

SEQ ID NO: 114452 - DNA, 25 bp, Homo sapien
aatgttagggcagcgagggttcccg

SEQ ID NO: 114453 - DNA, 25 bp, Homo sapien
acaggtcggtgtcatcagggctccc

SEQ ID NO: 114454 - DNA, 25 bp, Homo sapien
acaggtcggtgtgatcagggctccc

SEQ ID NO: 114455 - DNA, 25 bp, Homo sapien
tcacgttatgttttccgggtttatg

SEQ ID NO: 114456 - DNA, 25 bp, Homo sapien
tcacgttatgttatccgggtttatg

SEQ ID NO: 114457 - DNA, 25 bp, Homo sapien
gcacacacttttaacctggttgtca

SEQ ID NO: 114458 - DNA, 25 bp, Homo sapien
gcacacactttttacctggttgtca

SEQ ID NO: 114459 - DNA, 25 bp, Homo sapien
ctcacttcttgtctcactgttgacg

SEQ ID NO: 114460 - DNA, 25 bp, Homo sapien
ctcacttcttgtgtcactgttgacg

SEQ ID NO: 114461 - DNA, 25 bp, Homo sapien
caccgtaacttgttgcaagttcgag

SEQ ID NO: 114462 - DNA, 25 bp, Homo sapien
caccgtaacttgatgcaagttcgag

SEQ ID NO: 114463 - DNA, 25 bp, Homo sapien
tccagtcttttacgttgtcattgag

SEQ ID NO: 114464 - DNA, 25 bp, Homo sapien
tccagtcttttaggttgtcattgag

SEQ ID NO: 114465 - DNA, 25 bp, Homo sapien
ctcgaattggtgtgtacctaaagga

SEQ ID NO: 114466 - DNA, 25 bp, Homo sapien
ctcgaattggtgagtacctaaagga

SEQ ID NO: 114467 - DNA, 25 bp, Homo sapien
cccgtgtagtggagtgtcataaatg

SEQ ID NO: 114468 - DNA, 25 bp, Homo sapien
cccgtgtagtggtgtgtcataaatg

SEQ ID NO: 114469 - DNA, 25 bp, Homo sapien
agtgatgccgtgttcctgtgtatgt

SEQ ID NO: 114470 - DNA, 25 bp, Homo sapien
agtgatgccgtgatcctgtgtatgt

SEQ ID NO: 114471 - DNA, 25 bp, Homo sapien
acttgaacgtccgacacctttgtgt

SEQ ID NO: 114472 - DNA, 25 bp, Homo sapien
acttgaacgtcccacacctttgtgt

SEQ ID NO: 114473 - DNA, 25 bp, Homo sapien
ccgtcttgtctcgacccgaattcta

SEQ ID NO: 114474 - DNA, 25 bp, Homo sapien
ccgtcttgtctccacccgaattcta

SEQ ID NO: 114475 - DNA, 25 bp, Homo sapien
cctccttcagtctccgttagagtca

SEQ ID NO: 114476 - DNA, 25 bp, Homo sapien
cctccttcagtcaccgttagagtca

SEQ ID NO: 114477 - DNA, 25 bp, Homo sapien
gttaccttcttcgatcctaagtaga

SEQ ID NO: 114478 - DNA, 25 bp, Homo sapien
gttaccttcttccatcctaagtaga

SEQ ID NO: 114479 - DNA, 25 bp, Homo sapien
gtgtccacctgtaacttcacctgga

SEQ ID NO: 114480 - DNA, 25 bp, Homo sapien
gtgtccacctgttacttcacctgga

SEQ ID NO: 114481 - DNA, 25 bp, Homo sapien
tctggtttcaattgcgaacgtaaga

SEQ ID NO: 114482 - DNA, 25 bp, Homo sapien
tctggtttcaatagcgaacgtaaga

SEQ ID NO: 114483 - DNA, 25 bp, Homo sapien
tctgtctcatcctcgagcccgatgg

SEQ ID NO: 114484 - DNA, 25 bp, Homo sapien
tctgtctcatccacgagcccgatgg

SEQ ID NO: 114485 - DNA, 25 bp, Homo sapien
gcctccatctctcgaggccggtggt

SEQ ID NO: 114486 - DNA, 25 bp, Homo sapien
gcctccatctctggaggccggtggt

SEQ ID NO: 114487 - DNA, 25 bp, Homo sapien
ccccatactctttggatccgtgagt

SEQ ID NO: 114488 - DNA, 25 bp, Homo sapien
ccccatactcttaggatccgtgagt

SEQ ID NO: 114489 - DNA, 25 bp, Homo sapien
cccttgtgtcactggtgaagtattg

SEQ ID NO: 114490 - DNA, 25 bp, Homo sapien
cccttgtgtcacaggtgaagtattg

SEQ ID NO: 114491 - DNA, 25 bp, Homo sapien
cccttggttccgagtctagtaaggg

SEQ ID NO: 114492 - DNA, 25 bp, Homo sapien
cccttggttccgtgtctagtaaggg

SEQ ID NO: 114493 - DNA, 25 bp, Homo sapien
ccgtcgtacccgtgtcacgtcgggg

SEQ ID NO: 114494 - DNA, 25 bp, Homo sapien
ccgtcgtacccgagtcacgtcgggg

SEQ ID NO: 114495 - DNA, 25 bp, Homo sapien
acggactcgcatcgtagtcggagtc

SEQ ID NO: 114496 - DNA, 25 bp, Homo sapien
acggactcgcatggtagtcggagtc

SEQ ID NO: 114497 - DNA, 25 bp, Homo sapien
acggacgtctctgtgtcgaggagtc

SEQ ID NO: 114498 - DNA, 25 bp, Homo sapien
acggacgtctctctgtcgaggagtc

SEQ ID NO: 114499 - DNA, 25 bp, Homo sapien
aaactacacgtctccgaagggactc

SEQ ID NO: 114500 - DNA, 25 bp, Homo sapien
aaactacacgtcaccgaagggactc

SEQ ID NO: 114501 - DNA, 25 bp, Homo sapien
tagtcgaccatcagctaaagagtac

SEQ ID NO: 114502 - DNA, 25 bp, Homo sapien
tagtcgaccatctgctaaagagtac

SEQ ID NO: 114503 - DNA, 25 bp, Homo sapien
gttggtacctcatgtcctaatcata

SEQ ID NO: 114504 - DNA, 25 bp, Homo sapien
gttggtacctcaagtcctaatcata

SEQ ID NO: 114505 - DNA, 25 bp, Homo sapien
ttcgtaggacaaacgcccatcttag

SEQ ID NO: 114506 - DNA, 25 bp, Homo sapien
ttcgtaggacaatcgcccatcttag

SEQ ID NO: 114507 - DNA, 25 bp, Homo sapien
tcggcacgcctgctaccgaacgtgg

SEQ ID NO: 114508 - DNA, 25 bp, Homo sapien
tcggcacgcctggtaccgaacgtgg

SEQ ID NO: 114509 - DNA, 25 bp, Homo sapien
gtccgactcgtcgtatcaagtagac

SEQ ID NO: 114510 - DNA, 25 bp, Homo sapien
gtccgactcgtcctatcaagtagac

SEQ ID NO: 114511 - DNA, 25 bp, Homo sapien
tgtgtccacgttctatcaaagacgt

SEQ ID NO: 114512 - DNA, 25 bp, Homo sapien
tgtgtccacgttgtatcaaagacgt

SEQ ID NO: 114513 - DNA, 25 bp, Homo sapien
tccttctccttcaacttttgacggt

SEQ ID NO: 114514 - DNA, 25 bp, Homo sapien
tccttctccttctacttttgacggt

SEQ ID NO: 114515 - DNA, 25 bp, Homo sapien
accccttgtgtcactggtgaagtat

SEQ ID NO: 114516 - DNA, 25 bp, Homo sapien
accccttgtgtctctggtgaagtat

SEQ ID NO: 114517 - DNA, 25 bp, Homo sapien
gtcacatttctccactgaataggtt

SEQ ID NO: 114518 - DNA, 25 bp, Homo sapien
gtcacatttctcgactgaataggtt

SEQ ID NO: 114519 - DNA, 25 bp, Homo sapien
agtaagaagccctacacaatcggtt

SEQ ID NO: 114520 - DNA, 25 bp, Homo sapien
agtaagaagcccaacacaatcggtt

SEQ ID NO: 114521 - DNA, 25 bp, Homo sapien
gtatgtgaaccaaacccaacatctt

SEQ ID NO: 114522 - DNA, 25 bp, Homo sapien
gtatgtgaaccatacccaacatctt

SEQ ID NO: 114523 - DNA, 25 bp, Homo sapien
tggaccacaggtaccgaacggtctc

SEQ ID NO: 114524 - DNA, 25 bp, Homo sapien
tggaccacaggttccgaacggtctc

SEQ ID NO: 114525 - DNA, 25 bp, Homo sapien
gtaagtgaaacaaccttgggaaatc

SEQ ID NO: 114526 - DNA, 25 bp, Homo sapien
gtaagtgaaacatccttgggaaatc

SEQ ID NO: 114527 - DNA, 25 bp, Homo sapien
ataaatgtatcgtgccgtataattc

SEQ ID NO: 114528 - DNA, 25 bp, Homo sapien
ataaatgtatcgagccgtataattc

SEQ ID NO: 114529 - DNA, 25 bp, Homo sapien
tcataaatgttttggcagtattctc

SEQ ID NO: 114530 - DNA, 25 bp, Homo sapien
tcataaatgtttaggcagtattctc

SEQ ID NO: 114531 - DNA, 25 bp, Homo sapien
actttggactgaacgaagacttctg

SEQ ID NO: 114532 - DNA, 25 bp, Homo sapien
actttggactgatcgaagacttctg

SEQ ID NO: 114533 - DNA, 25 bp, Homo sapien
acattcgagtatctgacagagttta

SEQ ID NO: 114534 - DNA, 25 bp, Homo sapien
acattcgagtatgtgacagagttta

SEQ ID NO: 114535 - DNA, 25 bp, Homo sapien
accacaccataatagttgtctcaag

SEQ ID NO: 114536 - DNA, 25 bp, Homo sapien
accacaccataaaagttgtctcaag

SEQ ID NO: 114537 - DNA, 25 bp, Homo sapien
tcttgtctcctacacgattcttgga

SEQ ID NO: 114538 - DNA, 25 bp, Homo sapien
tcttgtctcctagacgattcttgga

SEQ ID NO: 114539 - DNA, 25 bp, Homo sapien
gttttttcctaaaaaccgtatgaga

SEQ ID NO: 114540 - DNA, 25 bp, Homo sapien
gttttttcctaataaccgtatgaga

SEQ ID NO: 114541 - DNA, 25 bp, Homo sapien
acctacctcgtactagaccaggaat

SEQ ID NO: 114542 - DNA, 25 bp, Homo sapien
acctacctcgtagtagaccaggaat

SEQ ID NO: 114543 - DNA, 25 bp, Homo sapien
aggacctgaccgagtgtgccggaca

SEQ ID NO: 114544 - DNA, 25 bp, Homo sapien
aggacctgaccgtgtgtgccggaca

SEQ ID NO: 114545 - DNA, 25 bp, Homo sapien
ttaggtaagatgaggtttcctggcc

SEQ ID NO: 114546 - DNA, 25 bp, Homo sapien
ttaggtaagatgtggtttcctggcc

SEQ ID NO: 114547 - DNA, 25 bp, Homo sapien
gaggcgaaattagtttacttggtcc

SEQ ID NO: 114548 - DNA, 25 bp, Homo sapien
gaggcgaaattactttacttggtcc

SEQ ID NO: 114549 - DNA, 25 bp, Homo sapien
gtctttagttttcgttgtcgtccac

SEQ ID NO: 114550 - DNA, 25 bp, Homo sapien
gtctttagttttggttgtcgtccac

SEQ ID NO: 114551 - DNA, 25 bp, Homo sapien
gagtatctaaatcttgctttgtgac

SEQ ID NO: 114552 - DNA, 25 bp, Homo sapien
gagtatctaaatgttgctttgtgac

SEQ ID NO: 114553 - DNA, 25 bp, Homo sapien
aacttagttatgtaggtcttttcac

SEQ ID NO: 114554 - DNA, 25 bp, Homo sapien
aacttagttatgaaggtcttttcac

SEQ ID NO: 114555 - DNA, 25 bp, Homo sapien
caagtgtagatttaaagacttttcc

SEQ ID NO: 114556 - DNA, 25 bp, Homo sapien
caagtgtagattaaaagacttttcc

SEQ ID NO: 114557 - DNA, 25 bp, Homo sapien
tattacgttaggtccagtttcgtgc

SEQ ID NO: 114558 - DNA, 25 bp, Homo sapien
tattacgttaggaccagtttcgtgc

SEQ ID NO: 114559 - DNA, 25 bp, Homo sapien
tcggaagagtgacagtttcgcgaac

SEQ ID NO: 114560 - DNA, 25 bp, Homo sapien
tcggaagagtgagagtttcgcgaac

SEQ ID NO: 114561 - DNA, 25 bp, Homo sapien
tctaaagaggtagtgacttcaacac

SEQ ID NO: 114562 - DNA, 25 bp, Homo sapien
tctaaagaggtactgacttcaacac

SEQ ID NO: 114563 - DNA, 25 bp, Homo sapien
tatatacttgttggttacccgatga

SEQ ID NO: 114564 - DNA, 25 bp, Homo sapien
tatatacttgttcgttacccgatga

SEQ ID NO: 114565 - DNA, 25 bp, Homo sapien
ccttattcttctaccaggggactgg

SEQ ID NO: 114566 - DNA, 25 bp, Homo sapien
ccttattcttcttccaggggactgg

SEQ ID NO: 114567 - DNA, 25 bp, Homo sapien
gtgtctcttattacacctgaagtga

SEQ ID NO: 114568 - DNA, 25 bp, Homo sapien
gtgtctcttatttcacctgaagtga

SEQ ID NO: 114569 - DNA, 25 bp, Homo sapien
cagtgctcaaataacacccagagaa

SEQ ID NO: 114570 - DNA, 25 bp, Homo sapien
cagtgctcaaattacacccagagaa

SEQ ID NO: 114571 - DNA, 25 bp, Homo sapien
aaatcgatgaaagaacccgaaatgt

SEQ ID NO: 114572 - DNA, 25 bp, Homo sapien
aaatcgatgaaacaacccgaaatgt

SEQ ID NO: 114573 - DNA, 25 bp, Homo sapien
ttttcatgaagtaccaaaaacatat

SEQ ID NO: 114574 - DNA, 25 bp, Homo sapien
ttttcatgaagttccaaaaacatat

SEQ ID NO: 114575 - DNA, 25 bp, Homo sapien
tgtgtgtgttttcaccgaaactaat

SEQ ID NO: 114576 - DNA, 25 bp, Homo sapien
tgtgtgtgttttgaccgaaactaat

SEQ ID NO: 114577 - DNA, 25 bp, Homo sapien
gttctttaagtgatggtactaccag

SEQ ID NO: 114578 - DNA, 25 bp, Homo sapien
gttctttaagtgttggtactaccag

SEQ ID NO: 114579 - DNA, 25 bp, Homo sapien
gacctttgttaattacgctaggttt

SEQ ID NO: 114580 - DNA, 25 bp, Homo sapien
gacctttgttaaatacgctaggttt

SEQ ID NO: 114581 - DNA, 25 bp, Homo sapien
tgtctttagaggaataccacacttt

SEQ ID NO: 114582 - DNA, 25 bp, Homo sapien
tgtctttagaggtataccacacttt

SEQ ID NO: 114583 - DNA, 25 bp, Homo sapien
cagtcttgagggacccactctgagt

SEQ ID NO: 114584 - DNA, 25 bp, Homo sapien
cagtcttgagggtcccactctgagt

SEQ ID NO: 114585 - DNA, 25 bp, Homo sapien
tagctctcgcagtacttgggctcga

SEQ ID NO: 114586 - DNA, 25 bp, Homo sapien
tagctctcgcagaacttgggctcga

SEQ ID NO: 114587 - DNA, 25 bp, Homo sapien
aggaaccccgacttcggtgcacggt

SEQ ID NO: 114588 - DNA, 25 bp, Homo sapien
aggaaccccgacatcggtgcacggt

SEQ ID NO: 114589 - DNA, 25 bp, Homo sapien
cacatttactttcgtagactgagtt

SEQ ID NO: 114590 - DNA, 25 bp, Homo sapien
cacatttactttggtagactgagtt

SEQ ID NO: 114591 - DNA, 25 bp, Homo sapien
acgagtggccgcagtgtgtacccct

SEQ ID NO: 114592 - DNA, 25 bp, Homo sapien
acgagtggccgctgtgtgtacccct

SEQ ID NO: 114593 - DNA, 25 bp, Homo sapien
gcggtgcggaccacgagactcgacc

SEQ ID NO: 114594 - DNA, 25 bp, Homo sapien
gcggtgcggacctcgagactcgacc

SEQ ID NO: 114595 - DNA, 25 bp, Homo sapien
accactcagaccacggcgacggagg

SEQ ID NO: 114596 - DNA, 25 bp, Homo sapien
accactcagacctcggcgacggagg

SEQ ID NO: 114597 - DNA, 25 bp, Homo sapien
cctgagtacctggaagtacacgaag

SEQ ID NO: 114598 - DNA, 25 bp, Homo sapien
cctgagtacctgcaagtacacgaag

SEQ ID NO: 114599 - DNA, 25 bp, Homo sapien
cacttcgcctggaacgtctacaacg

SEQ ID NO: 114600 - DNA, 25 bp, Homo sapien
cacttcgcctggtacgtctacaacg

SEQ ID NO: 114601 - DNA, 25 bp, Homo sapien
aagtctcctccgttacgtccttcgt

SEQ ID NO: 114602 - DNA, 25 bp, Homo sapien
aagtctcctccgatacgtccttcgt

SEQ ID NO: 114603 - DNA, 25 bp, Homo sapien
agaagtcaatacgatatcgtacatg

SEQ ID NO: 114604 - DNA, 25 bp, Homo sapien
agaagtcaataccatatcgtacatg

SEQ ID NO: 114605 - DNA, 25 bp, Homo sapien
ggccaagatccgttctagtccgtcg

SEQ ID NO: 114606 - DNA, 25 bp, Homo sapien
ggccaagatccgatctagtccgtcg

SEQ ID NO: 114607 - DNA, 25 bp, Homo sapien
gtgagacaggattgtagtgttctcc

SEQ ID NO: 114608 - DNA, 25 bp, Homo sapien
gtgagacaggatagtagtgttctcc

SEQ ID NO: 114609 - DNA, 25 bp, Homo sapien
ttaatagaaatgactgttgactacc

SEQ ID NO: 114610 - DNA, 25 bp, Homo sapien
ttaatagaaatgtctgttgactacc

SEQ ID NO: 114611 - DNA, 25 bp, Homo sapien
tcggagttcctcttcctaggacctc

SEQ ID NO: 114612 - DNA, 25 bp, Homo sapien
tcggagttcctcatcctaggacctc

SEQ ID NO: 114613 - DNA, 25 bp, Homo sapien
ctttggtttcagtacttaacgtgat

SEQ ID NO: 114614 - DNA, 25 bp, Homo sapien
ctttggtttcagaacttaacgtgat

SEQ ID NO: 114615 - DNA, 25 bp, Homo sapien
gttttgaccttcgacgaataagcgg

SEQ ID NO: 114616 - DNA, 25 bp, Homo sapien
gttttgaccttccacgaataagcgg

SEQ ID NO: 114617 - DNA, 25 bp, Homo sapien
agtccctctctcagacataggtgtc

SEQ ID NO: 114618 - DNA, 25 bp, Homo sapien
agtccctctctctgacataggtgtc

SEQ ID NO: 114619 - DNA, 25 bp, Homo sapien
tgtaccgctctttgtctcagttggt

SEQ ID NO: 114620 - DNA, 25 bp, Homo sapien
tgtaccgctcttagtctcagttggt

SEQ ID NO: 114621 - DNA, 25 bp, Homo sapien
agttaacgtgttacatcacttgtgt

SEQ ID NO: 114622 - DNA, 25 bp, Homo sapien
agttaacgtgtttcatcacttgtgt

SEQ ID NO: 114623 - DNA, 25 bp, Homo sapien
tcagtaaagagagtcttcctagtaa

SEQ ID NO: 114624 - DNA, 25 bp, Homo sapien
tcagtaaagagactcttcctagtaa

SEQ ID NO: 114625 - DNA, 25 bp, Homo sapien
gtccgaaaagaaacgactttccgaa

SEQ ID NO: 114626 - DNA, 25 bp, Homo sapien
gtccgaaaagaatcgactttccgaa

SEQ ID NO: 114627 - DNA, 25 bp, Homo sapien
gaggaaggtactcatgtgatacacc

SEQ ID NO: 114628 - DNA, 25 bp, Homo sapien
gaggaaggtactgatgtgatacacc

SEQ ID NO: 114629 - DNA, 25 bp, Homo sapien
cgggacgtggtccagagtcctaccc

SEQ ID NO: 114630 - DNA, 25 bp, Homo sapien
cgggacgtggtcgagagtcctaccc

SEQ ID NO: 114631 - DNA, 25 bp, Homo sapien
tgtttatttagcagtacgtccaccc

SEQ ID NO: 114632 - DNA, 25 bp, Homo sapien
tgtttatttagctgtacgtccaccc

SEQ ID NO: 114633 - DNA, 25 bp, Homo sapien
tgagtattcgataagagattccccc

SEQ ID NO: 114634 - DNA, 25 bp, Homo sapien
tgagtattcgattagagattccccc

SEQ ID NO: 114635 - DNA, 25 bp, Homo sapien
ttatgtttagtggagataccctacc

SEQ ID NO: 114636 - DNA, 25 bp, Homo sapien
ttatgtttagtgcagataccctacc

SEQ ID NO: 114637 - DNA, 25 bp, Homo sapien
ttaggtatttcgaatagtctatacc

SEQ ID NO: 114638 - DNA, 25 bp, Homo sapien
ttaggtatttcgtatagtctatacc

SEQ ID NO: 114639 - DNA, 25 bp, Homo sapien
cggtagtaattggtgttactgtcac

SEQ ID NO: 114640 - DNA, 25 bp, Homo sapien
cggtagtaattgctgttactgtcac

SEQ ID NO: 114641 - DNA, 25 bp, Homo sapien
atgagtaagtgtgactctatttcac

SEQ ID NO: 114642 - DNA, 25 bp, Homo sapien
atgagtaagtgtcactctatttcac

SEQ ID NO: 114643 - DNA, 25 bp, Homo sapien
cagatgtaaggtctcctccttgacg

SEQ ID NO: 114644 - DNA, 25 bp, Homo sapien
cagatgtaaggtgtcctccttgacg

SEQ ID NO: 114645 - DNA, 25 bp, Homo sapien
acacgtgtgaggacccgttcttcac

SEQ ID NO: 114646 - DNA, 25 bp, Homo sapien
acacgtgtgaggtcccgttcttcac

SEQ ID NO: 114647 - DNA, 25 bp, Homo sapien
cacgtccgggagtacattgtgtctc

SEQ ID NO: 114648 - DNA, 25 bp, Homo sapien
cacgtccgggagaacattgtgtctc

SEQ ID NO: 114649 - DNA, 25 bp, Homo sapien
tccactgaagtaagacgttgtcacc

SEQ ID NO: 114650 - DNA, 25 bp, Homo sapien
tccactgaagtatgacgttgtcacc

SEQ ID NO: 114651 - DNA, 25 bp, Homo sapien
tcgtaatgatataaccgtttcttcg

SEQ ID NO: 114652 - DNA, 25 bp, Homo sapien
tcgtaatgatattaccgtttcttcg

SEQ ID NO: 114653 - DNA, 25 bp, Homo sapien
tgtgaacctttaccttctgttacag

SEQ ID NO: 114654 - DNA, 25 bp, Homo sapien
tgtgaacctttagcttctgttacag

SEQ ID NO: 114655 - DNA, 25 bp, Homo sapien
cttctccccttaggtttacttacag

SEQ ID NO: 114656 - DNA, 25 bp, Homo sapien
cttctccccttacgtttacttacag

SEQ ID NO: 114657 - DNA, 25 bp, Homo sapien
gttccccttatacgtcgcatccgtg

SEQ ID NO: 114658 - DNA, 25 bp, Homo sapien
gttccccttataggtcgcatccgtg

SEQ ID NO: 114659 - DNA, 25 bp, Homo sapien
gtatcggcctttgtcagtctcggtg

SEQ ID NO: 114660 - DNA, 25 bp, Homo sapien
gtatcggcctttctcagtctcggtg

SEQ ID NO: 114661 - DNA, 25 bp, Homo sapien
accatgggaccttcccagtgacggg

SEQ ID NO: 114662 - DNA, 25 bp, Homo sapien
accatgggacctacccagtgacggg

SEQ ID NO: 114663 - DNA, 25 bp, Homo sapien
ctgagtatcaggtcgacggtgtgaa

SEQ ID NO: 114664 - DNA, 25 bp, Homo sapien
ctgagtatcaggacgacggtgtgaa

SEQ ID NO: 114665 - DNA, 25 bp, Homo sapien
cagtagccgatcagaccgagagaag

SEQ ID NO: 114666 - DNA, 25 bp, Homo sapien
cagtagccgatctgaccgagagaag

SEQ ID NO: 114667 - DNA, 25 bp, Homo sapien
cgacggctggaaaccggagacgtat

SEQ ID NO: 114668 - DNA, 25 bp, Homo sapien
cgacggctggaatccggagacgtat

SEQ ID NO: 114669 - DNA, 25 bp, Homo sapien
aacgcgcgcgccaaacagaagagta

SEQ ID NO: 114670 - DNA, 25 bp, Homo sapien
aacgcgcgcgcctaacagaagagta

SEQ ID NO: 114671 - DNA, 25 bp, Homo sapien
ccagctataaagacacgacaccgta

SEQ ID NO: 114672 - DNA, 25 bp, Homo sapien
ccagctataaagtcacgacaccgta

SEQ ID NO: 114673 - DNA, 25 bp, Homo sapien
aaaggttcagaggtcgaaatctacg

SEQ ID NO: 114674 - DNA, 25 bp, Homo sapien
aaaggttcagagctcgaaatctacg

SEQ ID NO: 114675 - DNA, 25 bp, Homo sapien
accgttataagttgcgtattcctct

SEQ ID NO: 114676 - DNA, 25 bp, Homo sapien
accgttataagtagcgtattcctct

SEQ ID NO: 114677 - DNA, 25 bp, Homo sapien
gtaaatgtatagtcccgtacacact

SEQ ID NO: 114678 - DNA, 25 bp, Homo sapien
gtaaatgtatagacccgtacacact

SEQ ID NO: 114679 - DNA, 25 bp, Homo sapien
gaaccgtaagagtggcgtcggaccc

SEQ ID NO: 114680 - DNA, 25 bp, Homo sapien
gaaccgtaagagaggcgtcggaccc

SEQ ID NO: 114681 - DNA, 25 bp, Homo sapien
acacatgaagagtgcggtggacctt

SEQ ID NO: 114682 - DNA, 25 bp, Homo sapien
acacatgaagagagcggtggacctt

SEQ ID NO: 114683 - DNA, 25 bp, Homo sapien
aggagtgaagcaggtcctgcacctt

SEQ ID NO: 114684 - DNA, 25 bp, Homo sapien
aggagtgaagcacgtcctgcacctt

SEQ ID NO: 114685 - DNA, 25 bp, Homo sapien
aaaaggctctctagaagactgtacg

SEQ ID NO: 114686 - DNA, 25 bp, Homo sapien
aaaaggctctcttgaagactgtacg

SEQ ID NO: 114687 - DNA, 25 bp, Homo sapien
cttaaaccgtattctgaattactgg

SEQ ID NO: 114688 - DNA, 25 bp, Homo sapien
cttaaaccgtatactgaattactgg

SEQ ID NO: 114689 - DNA, 25 bp, Homo sapien
attacgtgaacgtaaaacattctga

SEQ ID NO: 114690 - DNA, 25 bp, Homo sapien
attacgtgaacgaaaaacattctga

SEQ ID NO: 114691 - DNA, 25 bp, Homo sapien
ctgagacgaaattcagtgaacacgt

SEQ ID NO: 114692 - DNA, 25 bp, Homo sapien
ctgagacgaaatacagtgaacacgt

SEQ ID NO: 114693 - DNA, 25 bp, Homo sapien
ccgtgacgaccctacacgagggtga

SEQ ID NO: 114694 - DNA, 25 bp, Homo sapien
ccgtgacgacccaacacgagggtga

SEQ ID NO: 114695 - DNA, 25 bp, Homo sapien
aagtgcgcgcggaaccgcaccgaga

SEQ ID NO: 114696 - DNA, 25 bp, Homo sapien
aagtgcgcgcggtaccgcaccgaga

SEQ ID NO: 114697 - DNA, 25 bp, Homo sapien
cgaggacgtccttcgcgtgccagta

SEQ ID NO: 114698 - DNA, 25 bp, Homo sapien
cgaggacgtcctacgcgtgccagta

SEQ ID NO: 114699 - DNA, 25 bp, Homo sapien
gtgcgaggtttcaggtccgaccgat

SEQ ID NO: 114700 - DNA, 25 bp, Homo sapien
gtgcgaggtttctggtccgaccgat

SEQ ID NO: 114701 - DNA, 25 bp, Homo sapien
cgggggtaagggacccgtctcacca

SEQ ID NO: 114702 - DNA, 25 bp, Homo sapien
cgggggtaagggtcccgtctcacca

SEQ ID NO: 114703 - DNA, 25 bp, Homo sapien
gtaggctccgggagaacgtccacca

SEQ ID NO: 114704 - DNA, 25 bp, Homo sapien
gtaggctccgggtgaacgtccacca

SEQ ID NO: 114705 - DNA, 25 bp, Homo sapien
ctaccagagagtggactcttcgagg

SEQ ID NO: 114706 - DNA, 25 bp, Homo sapien
ctaccagagagtcgactcttcgagg

SEQ ID NO: 114707 - DNA, 25 bp, Homo sapien
ctccactcagaggaatctctccggg

SEQ ID NO: 114708 - DNA, 25 bp, Homo sapien
ctccactcagagcaatctctccggg

SEQ ID NO: 114709 - DNA, 25 bp, Homo sapien
cgtggagagccggaggctcgccggg

SEQ ID NO: 114710 - DNA, 25 bp, Homo sapien
cgtggagagccgcaggctcgccggg

SEQ ID NO: 114711 - DNA, 25 bp, Homo sapien
gtagagagagtccacgggctcccaa

SEQ ID NO: 114712 - DNA, 25 bp, Homo sapien
gtagagagagtcgacgggctcccaa

SEQ ID NO: 114713 - DNA, 25 bp, Homo sapien
gtcacaggactcgtccgtacccgga

SEQ ID NO: 114714 - DNA, 25 bp, Homo sapien
gtcacaggactcctccgtacccgga

SEQ ID NO: 114715 - DNA, 25 bp, Homo sapien
gacgtcacggttgacaccttcccga

SEQ ID NO: 114716 - DNA, 25 bp, Homo sapien
gacgtcacggttcacaccttcccga

SEQ ID NO: 114717 - DNA, 25 bp, Homo sapien
tgacctgttcctcagtcttccgggt

SEQ ID NO: 114718 - DNA, 25 bp, Homo sapien
tgacctgttcctgagtcttccgggt

SEQ ID NO: 114719 - DNA, 25 bp, Homo sapien
gacccacgtctctggtacttttcca

SEQ ID NO: 114720 - DNA, 25 bp, Homo sapien
gacccacgtctcaggtacttttcca

SEQ ID NO: 114721 - DNA, 25 bp, Homo sapien
gaccctacgcttgaccctgttaaca

SEQ ID NO: 114722 - DNA, 25 bp, Homo sapien
gaccctacgcttcaccctgttaaca

SEQ ID NO: 114723 - DNA, 25 bp, Homo sapien
gactacctttataccctttagagag

SEQ ID NO: 114724 - DNA, 25 bp, Homo sapien
gactacctttattccctttagagag

SEQ ID NO: 114725 - DNA, 25 bp, Homo sapien
ccaattcacttcctcacgggtgacg

SEQ ID NO: 114726 - DNA, 25 bp, Homo sapien
ccaattcacttcgtcacgggtgacg

SEQ ID NO: 114727 - DNA, 25 bp, Homo sapien
gtaatccagtcttatcttgtagtaa

SEQ ID NO: 114728 - DNA, 25 bp, Homo sapien
gtaatccagtctaatcttgtagtaa

SEQ ID NO: 114729 - DNA, 25 bp, Homo sapien
cagtgtccgagtctcgtttgagtaa

SEQ ID NO: 114730 - DNA, 25 bp, Homo sapien
cagtgtccgagtgtcgtttgagtaa

SEQ ID NO: 114731 - DNA, 25 bp, Homo sapien
ccccgtcgggactcggcattggaag

SEQ ID NO: 114732 - DNA, 25 bp, Homo sapien
ccccgtcgggacacggcattggaag

SEQ ID NO: 114733 - DNA, 25 bp, Homo sapien
ccctggaactccagacaacggagga

SEQ ID NO: 114734 - DNA, 25 bp, Homo sapien
ccctggaactcctgacaacggagga

SEQ ID NO: 114735 - DNA, 25 bp, Homo sapien
cagtatcttctcacaccgacgtggg

SEQ ID NO: 114736 - DNA, 25 bp, Homo sapien
cagtatcttctctcaccgacgtggg

SEQ ID NO: 114737 - DNA, 25 bp, Homo sapien
gttgtgtctttgtccagaggtcgag

SEQ ID NO: 114738 - DNA, 25 bp, Homo sapien
gttgtgtctttgaccagaggtcgag

SEQ ID NO: 114739 - DNA, 25 bp, Homo sapien
actttcagtttgtactacggtttta

SEQ ID NO: 114740 - DNA, 25 bp, Homo sapien
actttcagtttgaactacggtttta

SEQ ID NO: 114741 - DNA, 25 bp, Homo sapien
cctctttcatttgtcagtttacagg

SEQ ID NO: 114742 - DNA, 25 bp, Homo sapien
cctctttcatttctcagtttacagg

SEQ ID NO: 114743 - DNA, 25 bp, Homo sapien
gttgtttccttctaagtcagaaagt

SEQ ID NO: 114744 - DNA, 25 bp, Homo sapien
gttgtttccttcaaagtcagaaagt

SEQ ID NO: 114745 - DNA, 25 bp, Homo sapien
ctgtgcttcctctcacctcaagggt

SEQ ID NO: 114746 - DNA, 25 bp, Homo sapien
ctgtgcttcctcacacctcaagggt

SEQ ID NO: 114747 - DNA, 25 bp, Homo sapien
tgtggtgcaccgactcttcagttga

SEQ ID NO: 114748 - DNA, 25 bp, Homo sapien
tgtggtgcaccgtctcttcagttga

SEQ ID NO: 114749 - DNA, 25 bp, Homo sapien
tagtctctatagtcttgtcacaaga

SEQ ID NO: 114750 - DNA, 25 bp, Homo sapien
tagtctctatagacttgtcacaaga

SEQ ID NO: 114751 - DNA, 25 bp, Homo sapien
gaagtctcaaagtcttcaacaacgt

SEQ ID NO: 114752 - DNA, 25 bp, Homo sapien
gaagtctcaaagacttcaacaacgt

SEQ ID NO: 114753 - DNA, 25 bp, Homo sapien
ccgttctaatgttagtttaccctcg

SEQ ID NO: 114754 - DNA, 25 bp, Homo sapien
ccgttctaatgtaagtttaccctcg

SEQ ID NO: 114755 - DNA, 25 bp, Homo sapien
aactttcgaagtattggtactcgtc

SEQ ID NO: 114756 - DNA, 25 bp, Homo sapien
aactttcgaagttttggtactcgtc

SEQ ID NO: 114757 - DNA, 25 bp, Homo sapien
cgattcttcaggtttacgattatga

SEQ ID NO: 114758 - DNA, 25 bp, Homo sapien
cgattcttcaggattacgattatga

SEQ ID NO: 114759 - DNA, 25 bp, Homo sapien
gagtcctcagagtccctcacgtaga

SEQ ID NO: 114760 - DNA, 25 bp, Homo sapien
gagtcctcagagaccctcacgtaga

SEQ ID NO: 114761 - DNA, 25 bp, Homo sapien
tgctcctccgagtaccacacagaat

SEQ ID NO: 114762 - DNA, 25 bp, Homo sapien
tgctcctccgagaaccacacagaat

SEQ ID NO: 114763 - DNA, 25 bp, Homo sapien
tctcgtactcagaaagtcaacttga

SEQ ID NO: 114764 - DNA, 25 bp, Homo sapien
tctcgtactcagtaagtcaacttga

SEQ ID NO: 114765 - DNA, 25 bp, Homo sapien
caccgtactcacagaaccgagggga

SEQ ID NO: 114766 - DNA, 25 bp, Homo sapien
caccgtactcactgaaccgagggga

SEQ ID NO: 114767 - DNA, 25 bp, Homo sapien
caccgtattccgtgacacacaagac

SEQ ID NO: 114768 - DNA, 25 bp, Homo sapien
caccgtattccgagacacacaagac

SEQ ID NO: 114769 - DNA, 25 bp, Homo sapien
ggtgagacgtccttcggaccatcga

SEQ ID NO: 114770 - DNA, 25 bp, Homo sapien
ggtgagacgtccatcggaccatcga

SEQ ID NO: 114771 - DNA, 25 bp, Homo sapien
gaatgctcaccatcgaacaagtgac

SEQ ID NO: 114772 - DNA, 25 bp, Homo sapien
gaatgctcaccaacgaacaagtgac

SEQ ID NO: 114773 - DNA, 25 bp, Homo sapien
ggtttgactgagtaaaacacacgaa

SEQ ID NO: 114774 - DNA, 25 bp, Homo sapien
ggtttgactgagaaaaacacacgaa

SEQ ID NO: 114775 - DNA, 25 bp, Homo sapien
tagttgaccgagaaatctgcacgaa

SEQ ID NO: 114776 - DNA, 25 bp, Homo sapien
tagttgaccgagtaatctgcacgaa

SEQ ID NO: 114777 - DNA, 25 bp, Homo sapien
agacagagatagaaccgtcggacga

SEQ ID NO: 114778 - DNA, 25 bp, Homo sapien
agacagagatagtaccgtcggacga

SEQ ID NO: 114779 - DNA, 25 bp, Homo sapien
agacttacaggtcagtcgttagaga

SEQ ID NO: 114780 - DNA, 25 bp, Homo sapien
agacttacaggtgagtcgttagaga

SEQ ID NO: 114781 - DNA, 25 bp, Homo sapien
agtcgtcgtcttacgggtctcagaa

SEQ ID NO: 114782 - DNA, 25 bp, Homo sapien
agtcgtcgtctttcgggtctcagaa

SEQ ID NO: 114783 - DNA, 25 bp, Homo sapien
atgtttatatcacgtaccagtcagt

SEQ ID NO: 114784 - DNA, 25 bp, Homo sapien
atgtttatatcaggtaccagtcagt

SEQ ID NO: 114785 - DNA, 25 bp, Homo sapien
aaaatgttatcgaccggacaccgga

SEQ ID NO: 114786 - DNA, 25 bp, Homo sapien
aaaatgttatcgtccggacaccgga

SEQ ID NO: 114787 - DNA, 25 bp, Homo sapien
cgtgtcctctgtgtgaacagtgtgt

SEQ ID NO: 114788 - DNA, 25 bp, Homo sapien
cgtgtcctctgtctgaacagtgtgt

SEQ ID NO: 114789 - DNA, 25 bp, Homo sapien
tttgtcttactactggatacgattc

SEQ ID NO: 114790 - DNA, 25 bp, Homo sapien
tttgtcttactagtggatacgattc

SEQ ID NO: 114791 - DNA, 25 bp, Homo sapien
attaagttgttaacggtttaccttc

SEQ ID NO: 114792 - DNA, 25 bp, Homo sapien
attaagttgttatcggtttaccttc

SEQ ID NO: 114793 - DNA, 25 bp, Homo sapien
aactatagtggtgtgtgtccattgc

SEQ ID NO: 114794 - DNA, 25 bp, Homo sapien
aactatagtggtctgtgtccattgc

SEQ ID NO: 114795 - DNA, 25 bp, Homo sapien
tacgttgtagttagttatcggtccc

SEQ ID NO: 114796 - DNA, 25 bp, Homo sapien
tacgttgtagtttgttatcggtccc

SEQ ID NO: 114797 - DNA, 25 bp, Homo sapien
gcgttctaagtagtcttcggtgcac

SEQ ID NO: 114798 - DNA, 25 bp, Homo sapien
gcgttctaagtactcttcggtgcac

SEQ ID NO: 114799 - DNA, 25 bp, Homo sapien
gtgatgtgagactcatagaggtccg

SEQ ID NO: 114800 - DNA, 25 bp, Homo sapien
gtgatgtgagacacatagaggtccg

SEQ ID NO: 114801 - DNA, 25 bp, Homo sapien
gtgacggttaactatactagtaact

SEQ ID NO: 114802 - DNA, 25 bp, Homo sapien
gtgacggttaacaatactagtaact

SEQ ID NO: 114803 - DNA, 25 bp, Homo sapien
cacacgtctgcgaacacgtcaaagt

SEQ ID NO: 114804 - DNA, 25 bp, Homo sapien
cacacgtctgcgtacacgtcaaagt

SEQ ID NO: 114805 - DNA, 25 bp, Homo sapien
acacggacccttatcaggtccgaca

SEQ ID NO: 114806 - DNA, 25 bp, Homo sapien
acacggacccttttcaggtccgaca

SEQ ID NO: 114807 - DNA, 25 bp, Homo sapien
atcaacgcatattttgatcacacgg

SEQ ID NO: 114808 - DNA, 25 bp, Homo sapien
atcaacgcatatattgatcacacgg

SEQ ID NO: 114809 - DNA, 25 bp, Homo sapien
tgaaccactgtctatcataaacggt

SEQ ID NO: 114810 - DNA, 25 bp, Homo sapien
tgaaccactgtcaatcataaacggt

SEQ ID NO: 114811 - DNA, 25 bp, Homo sapien
ttcaacaactgtagaggttgtccct

SEQ ID NO: 114812 - DNA, 25 bp, Homo sapien
ttcaacaactgttgaggttgtccct

SEQ ID NO: 114813 - DNA, 25 bp, Homo sapien
tgttcaccccttagggtctgtccgg

SEQ ID NO: 114814 - DNA, 25 bp, Homo sapien
tgttcacccctttgggtctgtccgg

SEQ ID NO: 114815 - DNA, 25 bp, Homo sapien
cgggtttccgacacaacttctccaa

SEQ ID NO: 114816 - DNA, 25 bp, Homo sapien
cgggtttccgactcaacttctccaa

SEQ ID NO: 114817 - DNA, 25 bp, Homo sapien
cgtttctgagttaaattccgttaat

SEQ ID NO: 114818 - DNA, 25 bp, Homo sapien
cgtttctgagtttaattccgttaat

SEQ ID NO: 114819 - DNA, 25 bp, Homo sapien
agtgtttcattcttcgtccccgaaa

SEQ ID NO: 114820 - DNA, 25 bp, Homo sapien
agtgtttcattcatcgtccccgaaa

SEQ ID NO: 114821 - DNA, 25 bp, Homo sapien
tgtcaccgacccaggacaggacggc

SEQ ID NO: 114822 - DNA, 25 bp, Homo sapien
tgtcaccgaccctggacaggacggc

SEQ ID NO: 114823 - DNA, 25 bp, Homo sapien
gtcccgactctccctcgtgtcgggc

SEQ ID NO: 114824 - DNA, 25 bp, Homo sapien
gtcccgactctcgctcgtgtcgggc

SEQ ID NO: 114825 - DNA, 25 bp, Homo sapien
tcgcgtccgtctacttctcggggaa

SEQ ID NO: 114826 - DNA, 25 bp, Homo sapien
tcgcgtccgtcttcttctcggggaa

SEQ ID NO: 114827 - DNA, 25 bp, Homo sapien
aatctcgtctttctttctggtgtca

SEQ ID NO: 114828 - DNA, 25 bp, Homo sapien
aatctcgtctttgtttctggtgtca

SEQ ID NO: 114829 - DNA, 25 bp, Homo sapien
tttctttcccagtttcggggtctac

SEQ ID NO: 114830 - DNA, 25 bp, Homo sapien
tttctttcccagattcggggtctac

SEQ ID NO: 114831 - DNA, 25 bp, Homo sapien
ccgatcgaggagattcggccgacga

SEQ ID NO: 114832 - DNA, 25 bp, Homo sapien
ccgatcgaggagtttcggccgacga

SEQ ID NO: 114833 - DNA, 25 bp, Homo sapien
gtccgctcagggttcctctcagtca

SEQ ID NO: 114834 - DNA, 25 bp, Homo sapien
gtccgctcagggatcctctcagtca

SEQ ID NO: 114835 - DNA, 25 bp, Homo sapien
gactcttccgactccccatgtaagt

SEQ ID NO: 114836 - DNA, 25 bp, Homo sapien
gactcttccgacaccccatgtaagt

SEQ ID NO: 114837 - DNA, 25 bp, Homo sapien
aggatgttcaaacgacacgatggta

SEQ ID NO: 114838 - DNA, 25 bp, Homo sapien
aggatgttcaaaggacacgatggta

SEQ ID NO: 114839 - DNA, 25 bp, Homo sapien
aggaagagatacacccgaaagaatt

SEQ ID NO: 114840 - DNA, 25 bp, Homo sapien
aggaagagatactcccgaaagaatt

SEQ ID NO: 114841 - DNA, 25 bp, Homo sapien
gaccaaaggattaccctaaaagtct

SEQ ID NO: 114842 - DNA, 25 bp, Homo sapien
gaccaaaggatttccctaaaagtct

SEQ ID NO: 114843 - DNA, 25 bp, Homo sapien
agaaggtgaatcctacgtcaaagag

SEQ ID NO: 114844 - DNA, 25 bp, Homo sapien
agaaggtgaatcgtacgtcaaagag

SEQ ID NO: 114845 - DNA, 25 bp, Homo sapien
cccggggctatttatgtcatatgac

SEQ ID NO: 114846 - DNA, 25 bp, Homo sapien
cccggggctattaatgtcatatgac

SEQ ID NO: 114847 - DNA, 25 bp, Homo sapien
cccgggctaacagaaacatccgtcg

SEQ ID NO: 114848 - DNA, 25 bp, Homo sapien
cccgggctaacacaaacatccgtcg

SEQ ID NO: 114849 - DNA, 25 bp, Homo sapien
cgcagagataaaccagagcctccgc

SEQ ID NO: 114850 - DNA, 25 bp, Homo sapien
cgcagagataaagcagagcctccgc

SEQ ID NO: 114851 - DNA, 25 bp, Homo sapien
actcaagatggaggaactcacctcc

SEQ ID NO: 114852 - DNA, 25 bp, Homo sapien
actcaagatggacgaactcacctcc

SEQ ID NO: 114853 - DNA, 25 bp, Homo sapien
tcactggtgagtgtaccctatatcc

SEQ ID NO: 114854 - DNA, 25 bp, Homo sapien
tcactggtgagtctaccctatatcc

SEQ ID NO: 114855 - DNA, 25 bp, Homo sapien
cgagaagaacgtcctccacgtaaac

SEQ ID NO: 114856 - DNA, 25 bp, Homo sapien
cgagaagaacgtgctccacgtaaac

SEQ ID NO: 114857 - DNA, 25 bp, Homo sapien
taaataaagttctctactaaggacg

SEQ ID NO: 114858 - DNA, 25 bp, Homo sapien
taaataaagttcactactaaggacg

SEQ ID NO: 114859 - DNA, 25 bp, Homo sapien
gtttaaacaaattcccgatatttgt

SEQ ID NO: 114860 - DNA, 25 bp, Homo sapien
gtttaaacaaatacccgatatttgt

SEQ ID NO: 114861 - DNA, 25 bp, Homo sapien
atttagacagaactccaaagtttag

SEQ ID NO: 114862 - DNA, 25 bp, Homo sapien
atttagacagaagtccaaagtttag

SEQ ID NO: 114863 - DNA, 25 bp, Homo sapien
cgaggaccaggagaccagacgccaa

SEQ ID NO: 114864 - DNA, 25 bp, Homo sapien
cgaggaccaggacaccagacgccaa

SEQ ID NO: 114865 - DNA, 25 bp, Homo sapien
gagagaatcattcaccacggacaag

SEQ ID NO: 114866 - DNA, 25 bp, Homo sapien
gagagaatcattgaccacggacaag

SEQ ID NO: 114867 - DNA, 25 bp, Homo sapien
aaggtgatacttaggcaactacagc

SEQ ID NO: 114868 - DNA, 25 bp, Homo sapien
aaggtgatactttggcaactacagc

SEQ ID NO: 114869 - DNA, 25 bp, Homo sapien
tttcacctataagtcggatccagtt

SEQ ID NO: 114870 - DNA, 25 bp, Homo sapien
tttcacctataactcggatccagtt

SEQ ID NO: 114871 - DNA, 25 bp, Homo sapien
gggtttccagacaccgtcttttgtg

SEQ ID NO: 114872 - DNA, 25 bp, Homo sapien
gggtttccagactccgtcttttgtg

SEQ ID NO: 114873 - DNA, 25 bp, Homo sapien
tactgtgtcatgtgtcctccgtttc

SEQ ID NO: 114874 - DNA, 25 bp, Homo sapien
tactgtgtcatgagtcctccgtttc

SEQ ID NO: 114875 - DNA, 25 bp, Homo sapien
gacggtgtcgtctaaacgatttttc

SEQ ID NO: 114876 - DNA, 25 bp, Homo sapien
gacggtgtcgtcaaaacgatttttc

SEQ ID NO: 114877 - DNA, 25 bp, Homo sapien
tgaaatgttctgagggaactgttcc

SEQ ID NO: 114878 - DNA, 25 bp, Homo sapien
tgaaatgttctgtgggaactgttcc

SEQ ID NO: 114879 - DNA, 25 bp, Homo sapien
gtatagaggctgagagcggcattcc

SEQ ID NO: 114880 - DNA, 25 bp, Homo sapien
gtatagaggctgtgagcggcattcc

SEQ ID NO: 114881 - DNA, 25 bp, Homo sapien
aaaacggttgatgagcaaacttcag

SEQ ID NO: 114882 - DNA, 25 bp, Homo sapien
aaaacggttgatcagcaaacttcag

SEQ ID NO: 114883 - DNA, 25 bp, Homo sapien
caaataagagtagtgcaacagcgag

SEQ ID NO: 114884 - DNA, 25 bp, Homo sapien
caaataagagtactgcaacagcgag

SEQ ID NO: 114885 - DNA, 25 bp, Homo sapien
taatttatgacacagacaatgacgc

SEQ ID NO: 114886 - DNA, 25 bp, Homo sapien
taatttatgacagagacaatgacgc

SEQ ID NO: 114887 - DNA, 25 bp, Homo sapien
tctttatctttttctcaggagtgaa

SEQ ID NO: 114888 - DNA, 25 bp, Homo sapien
tctttatcttttactcaggagtgaa

SEQ ID NO: 114889 - DNA, 25 bp, Homo sapien
tttgttctgttcaaagtcgactgaa

SEQ ID NO: 114890 - DNA, 25 bp, Homo sapien
tttgttctgttctaagtcgactgaa

SEQ ID NO: 114891 - DNA, 25 bp, Homo sapien
tctttgtcggatacacgatagacag

SEQ ID NO: 114892 - DNA, 25 bp, Homo sapien
tctttgtcggattcacgatagacag

SEQ ID NO: 114893 - DNA, 25 bp, Homo sapien
atttctagtaattgtggtcaccggt

SEQ ID NO: 114894 - DNA, 25 bp, Homo sapien
atttctagtaatagtggtcaccggt

SEQ ID NO: 114895 - DNA, 25 bp, Homo sapien
aagtttcattatgtacgtgttccat

SEQ ID NO: 114896 - DNA, 25 bp, Homo sapien
aagtttcattatctacgtgttccat

SEQ ID NO: 114897 - DNA, 25 bp, Homo sapien
aagaagtaggtttgttcgcgtttca

SEQ ID NO: 114898 - DNA, 25 bp, Homo sapien
aagaagtaggttagttcgcgtttca

SEQ ID NO: 114899 - DNA, 25 bp, Homo sapien
gagagaaactatctctttactttag

SEQ ID NO: 114900 - DNA, 25 bp, Homo sapien
gagagaaactatgtctttactttag

SEQ ID NO: 114901 - DNA, 25 bp, Homo sapien
caagtgtaaaatgtctagtttgcct

SEQ ID NO: 114902 - DNA, 25 bp, Homo sapien
caagtgtaaaatctctagtttgcct

SEQ ID NO: 114903 - DNA, 25 bp, Homo sapien
aaaagaagaacactccgtatttgtc

SEQ ID NO: 114904 - DNA, 25 bp, Homo sapien
aaaagaagaacagtccgtatttgtc

SEQ ID NO: 114905 - DNA, 25 bp, Homo sapien
aagggaatatcatcgtttttctgtc

SEQ ID NO: 114906 - DNA, 25 bp, Homo sapien
aagggaatatcaacgtttttctgtc

SEQ ID NO: 114907 - DNA, 25 bp, Homo sapien
ataacgacattctcctgtcattagg

SEQ ID NO: 114908 - DNA, 25 bp, Homo sapien
ataacgacattcacctgtcattagg

SEQ ID NO: 114909 - DNA, 25 bp, Homo sapien
gtacacaccacgtccttcggggaaa

SEQ ID NO: 114910 - DNA, 25 bp, Homo sapien
gtacacaccacgaccttcggggaaa

SEQ ID NO: 114911 - DNA, 25 bp, Homo sapien
tcttcgcaccctttggtgtccgaca

SEQ ID NO: 114912 - DNA, 25 bp, Homo sapien
tcttcgcaccctatggtgtccgaca

SEQ ID NO: 114913 - DNA, 25 bp, Homo sapien
acatattccctcaagagatgtttgt

SEQ ID NO: 114914 - DNA, 25 bp, Homo sapien
acatattccctctagagatgtttgt

SEQ ID NO: 114915 - DNA, 25 bp, Homo sapien
acatgttcttattccaagttgtgta

SEQ ID NO: 114916 - DNA, 25 bp, Homo sapien
acatgttcttataccaagttgtgta

SEQ ID NO: 114917 - DNA, 25 bp, Homo sapien
caccggggtccaaagacggtggact

SEQ ID NO: 114918 - DNA, 25 bp, Homo sapien
caccggggtccatagacggtggact

SEQ ID NO: 114919 - DNA, 25 bp, Homo sapien
cccggagtttccacagtagacgggc

SEQ ID NO: 114920 - DNA, 25 bp, Homo sapien
cccggagtttcctcagtagacgggc

SEQ ID NO: 114921 - DNA, 25 bp, Homo sapien
gagagagtttcgaccctagacccgc

SEQ ID NO: 114922 - DNA, 25 bp, Homo sapien
gagagagtttcgtccctagacccgc

SEQ ID NO: 114923 - DNA, 25 bp, Homo sapien
gggtaaaggaactcttctcccagtg

SEQ ID NO: 114924 - DNA, 25 bp, Homo sapien
gggtaaaggaacacttctcccagtg

SEQ ID NO: 114925 - DNA, 25 bp, Homo sapien
gtaaccatgaattttcctcttgagt

SEQ ID NO: 114926 - DNA, 25 bp, Homo sapien
gtaaccatgaatattcctcttgagt

SEQ ID NO: 114927 - DNA, 25 bp, Homo sapien
cgaagcaaagacttccctgtagact

SEQ ID NO: 114928 - DNA, 25 bp, Homo sapien
cgaagcaaagacatccctgtagact

SEQ ID NO: 114929 - DNA, 25 bp, Homo sapien
agacttatagtcatcgcaccgtcat

SEQ ID NO: 114930 - DNA, 25 bp, Homo sapien
agacttatagtcttcgcaccgtcat

SEQ ID NO: 114931 - DNA, 25 bp, Homo sapien
gtctgtctctactgtccagacgtga

SEQ ID NO: 114932 - DNA, 25 bp, Homo sapien
gtctgtctctacagtccagacgtga

SEQ ID NO: 114933 - DNA, 25 bp, Homo sapien
ccgtcctgcatcgtctcggacggag

SEQ ID NO: 114934 - DNA, 25 bp, Homo sapien
ccgtcctgcatcctctcggacggag

SEQ ID NO: 114935 - DNA, 25 bp, Homo sapien
tctacttctgtagtttcccggggcg

SEQ ID NO: 114936 - DNA, 25 bp, Homo sapien
tctacttctgtactttcccggggcg

SEQ ID NO: 114937 - DNA, 25 bp, Homo sapien
ggtccactccacgtgtcccgggtga

SEQ ID NO: 114938 - DNA, 25 bp, Homo sapien
ggtccactccacctgtcccgggtga

SEQ ID NO: 114939 - DNA, 25 bp, Homo sapien
accgcgaacggcagtcgacgccgta

SEQ ID NO: 114940 - DNA, 25 bp, Homo sapien
accgcgaacggctgtcgacgccgta

SEQ ID NO: 114941 - DNA, 25 bp, Homo sapien
cgcggcccgcaatgacttgaaccct

SEQ ID NO: 114942 - DNA, 25 bp, Homo sapien
cgcggcccgcaaagacttgaaccct

SEQ ID NO: 114943 - DNA, 25 bp, Homo sapien
gtcgccggaaagactcactctcgcg

SEQ ID NO: 114944 - DNA, 25 bp, Homo sapien
gtcgccggaaagtctcactctcgcg

SEQ ID NO: 114945 - DNA, 25 bp, Homo sapien
aagagtacaagatcctcgacgtcag

SEQ ID NO: 114946 - DNA, 25 bp, Homo sapien
aagagtacaagaacctcgacgtcag

SEQ ID NO: 114947 - DNA, 25 bp, Homo sapien
gatactctacacaccgtcgactctg

SEQ ID NO: 114948 - DNA, 25 bp, Homo sapien
gatactctacactccgtcgactctg

SEQ ID NO: 114949 - DNA, 25 bp, Homo sapien
cgtggacacccgttccgtgatcgcg

SEQ ID NO: 114950 - DNA, 25 bp, Homo sapien
cgtggacacccgatccgtgatcgcg

SEQ ID NO: 114951 - DNA, 25 bp, Homo sapien
ccgatgtacacacgtgtccttttcg

SEQ ID NO: 114952 - DNA, 25 bp, Homo sapien
ccgatgtacacaggtgtccttttcg

SEQ ID NO: 114953 - DNA, 25 bp, Homo sapien
cctccttacgatgttcggtgtcatt

SEQ ID NO: 114954 - DNA, 25 bp, Homo sapien
cctccttacgatcttcggtgtcatt

SEQ ID NO: 114955 - DNA, 25 bp, Homo sapien
gctctgtttatcatgttgtgactcc

SEQ ID NO: 114956 - DNA, 25 bp, Homo sapien
gctctgtttatcttgttgtgactcc

SEQ ID NO: 114957 - DNA, 25 bp, Homo sapien
ttcgtgtatccttgttgtgcgcacc

SEQ ID NO: 114958 - DNA, 25 bp, Homo sapien
ttcgtgtatcctagttgtgcgcacc

SEQ ID NO: 114959 - DNA, 25 bp, Homo sapien
gattctttaggtataacgtttacca

SEQ ID NO: 114960 - DNA, 25 bp, Homo sapien
gattctttaggtttaacgtttacca

SEQ ID NO: 114961 - DNA, 25 bp, Homo sapien
actttaaatgttctacgaggtaaat

SEQ ID NO: 114962 - DNA, 25 bp, Homo sapien
actttaaatgttgtacgaggtaaat

SEQ ID NO: 114963 - DNA, 25 bp, Homo sapien
cgtgttcatagtttccctgtaacct

SEQ ID NO: 114964 - DNA, 25 bp, Homo sapien
cgtgttcatagtatccctgtaacct

SEQ ID NO: 114965 - DNA, 25 bp, Homo sapien
ttatggtggatgaacgtcccaacac

SEQ ID NO: 114966 - DNA, 25 bp, Homo sapien
ttatggtggatgtacgtcccaacac

SEQ ID NO: 114967 - DNA, 25 bp, Homo sapien
ggggactggacgtacctttgcgaca

SEQ ID NO: 114968 - DNA, 25 bp, Homo sapien
ggggactggacgaacctttgcgaca

SEQ ID NO: 114969 - DNA, 25 bp, Homo sapien
aaaactagggtactcttcggtaaga

SEQ ID NO: 114970 - DNA, 25 bp, Homo sapien
aaaactagggtagtcttcggtaaga

SEQ ID NO: 114971 - DNA, 25 bp, Homo sapien
catagacgtgtttttcggttacgta

SEQ ID NO: 114972 - DNA, 25 bp, Homo sapien
catagacgtgttattcggttacgta

SEQ ID NO: 114973 - DNA, 25 bp, Homo sapien
caacccgttttgaatgacggttatt

SEQ ID NO: 114974 - DNA, 25 bp, Homo sapien
caacccgttttgtatgacggttatt

SEQ ID NO: 114975 - DNA, 25 bp, Homo sapien
atcgttattcgtatggtcctttact

SEQ ID NO: 114976 - DNA, 25 bp, Homo sapien
atcgttattcgtttggtcctttact

SEQ ID NO: 114977 - DNA, 25 bp, Homo sapien
accgtgaccgttgaaaatcttcttt

SEQ ID NO: 114978 - DNA, 25 bp, Homo sapien
accgtgaccgttcaaaatcttcttt

SEQ ID NO: 114979 - DNA, 25 bp, Homo sapien
cccccggttcatgaaggtcggacct

SEQ ID NO: 114980 - DNA, 25 bp, Homo sapien
cccccggttcatcaaggtcggacct

SEQ ID NO: 114981 - DNA, 25 bp, Homo sapien
gtcactcagggtgtcaattgtgaac

SEQ ID NO: 114982 - DNA, 25 bp, Homo sapien
gtcactcagggtctcaattgtgaac

SEQ ID NO: 114983 - DNA, 25 bp, Homo sapien
cctcaggatatagtgttttactgta

SEQ ID NO: 114984 - DNA, 25 bp, Homo sapien
cctcaggatatactgttttactgta

SEQ ID NO: 114985 - DNA, 25 bp, Homo sapien
tgtcctctgcgctattcttgggaga

SEQ ID NO: 114986 - DNA, 25 bp, Homo sapien
tgtcctctgcgcaattcttgggaga

SEQ ID NO: 114987 - DNA, 25 bp, Homo sapien
agtccttcctccttttcgtgatgaa

SEQ ID NO: 114988 - DNA, 25 bp, Homo sapien
agtccttcctccatttcgtgatgaa

SEQ ID NO: 114989 - DNA, 25 bp, Homo sapien
ccacctttatgtcgtagagtcgtca

SEQ ID NO: 114990 - DNA, 25 bp, Homo sapien
ccacctttatgtggtagagtcgtca

SEQ ID NO: 114991 - DNA, 25 bp, Homo sapien
ggccctggtggtgctaggtactccg

SEQ ID NO: 114992 - DNA, 25 bp, Homo sapien
ggccctggtggtcctaggtactccg

SEQ ID NO: 114993 - DNA, 25 bp, Homo sapien
gtcgccatgggtagtcgagatgtct

SEQ ID NO: 114994 - DNA, 25 bp, Homo sapien
gtcgccatgggttgtcgagatgtct

SEQ ID NO: 114995 - DNA, 25 bp, Homo sapien
gtcccgtgttccggtcggagactta

SEQ ID NO: 114996 - DNA, 25 bp, Homo sapien
gtcccgtgttcccgtcggagactta

SEQ ID NO: 114997 - DNA, 25 bp, Homo sapien
gtgtactattgctcgcgccactttg

SEQ ID NO: 114998 - DNA, 25 bp, Homo sapien
gtgtactattgcacgcgccactttg

SEQ ID NO: 114999 - DNA, 25 bp, Homo sapien
tggtctaatcttgtcattcgtatta

SEQ ID NO: 115000 - DNA, 25 bp, Homo sapien
tggtctaatcttctcattcgtatta

SEQ ID NO: 115001 - DNA, 25 bp, Homo sapien
attagtgtgtcaacacagtgtcgat

SEQ ID NO: 115002 - DNA, 25 bp, Homo sapien
attagtgtgtcatcacagtgtcgat

SEQ ID NO: 115003 - DNA, 25 bp, Homo sapien
agagagtaattctatcccactctgt

SEQ ID NO: 115004 - DNA, 25 bp, Homo sapien
agagagtaattcaatcccactctgt

SEQ ID NO: 115005 - DNA, 25 bp, Homo sapien
tagaagagttcctatccgtgttagt

SEQ ID NO: 115006 - DNA, 25 bp, Homo sapien
tagaagagttccaatccgtgttagt

SEQ ID NO: 115007 - DNA, 25 bp, Homo sapien
tatacaacaggaagaccgaagtttt

SEQ ID NO: 115008 - DNA, 25 bp, Homo sapien
tatacaacaggatgaccgaagtttt

SEQ ID NO: 115009 - DNA, 25 bp, Homo sapien
taagaaggatctgcaccacgtttct

SEQ ID NO: 115010 - DNA, 25 bp, Homo sapien
taagaaggatctccaccacgtttct

SEQ ID NO: 115011 - DNA, 25 bp, Homo sapien
tgaaacggagtcaccaacgtgtcat

SEQ ID NO: 115012 - DNA, 25 bp, Homo sapien
tgaaacggagtctccaacgtgtcat

SEQ ID NO: 115013 - DNA, 25 bp, Homo sapien
acggagaagatgtaaccttcgtcag

SEQ ID NO: 115014 - DNA, 25 bp, Homo sapien
acggagaagatgaaaccttcgtcag

SEQ ID NO: 115015 - DNA, 25 bp, Homo sapien
aacgaagtaagagaggacccttctg

SEQ ID NO: 115016 - DNA, 25 bp, Homo sapien
aacgaagtaagacaggacccttctg

SEQ ID NO: 115017 - DNA, 25 bp, Homo sapien
aaaccgagatgaacacctctctgtc

SEQ ID NO: 115018 - DNA, 25 bp, Homo sapien
aaaccgagatgatcacctctctgtc

SEQ ID NO: 115019 - DNA, 25 bp, Homo sapien
agttatggaaggttcacagtcttcc

SEQ ID NO: 115020 - DNA, 25 bp, Homo sapien
agttatggaaggatcacagtcttcc

SEQ ID NO: 115021 - DNA, 25 bp, Homo sapien
ttccactagtgacacccgtgtacta

SEQ ID NO: 115022 - DNA, 25 bp, Homo sapien
ttccactagtgagacccgtgtacta

SEQ ID NO: 115023 - DNA, 25 bp, Homo sapien
cagggtccccggattcacagtgacc

SEQ ID NO: 115024 - DNA, 25 bp, Homo sapien
cagggtccccggtttcacagtgacc

SEQ ID NO: 115025 - DNA, 25 bp, Homo sapien
gaggtgaatggggtcccatatccgt

SEQ ID NO: 115026 - DNA, 25 bp, Homo sapien
gaggtgaatgggctcccatatccgt

SEQ ID NO: 115027 - DNA, 25 bp, Homo sapien
ctcggaaaacagaacattcaaatgt

SEQ ID NO: 115028 - DNA, 25 bp, Homo sapien
ctcggaaaacagtacattcaaatgt

SEQ ID NO: 115029 - DNA, 25 bp, Homo sapien
tcgaaagtcacaacagtatgaaatt

SEQ ID NO: 115030 - DNA, 25 bp, Homo sapien
tcgaaagtcacatcagtatgaaatt

SEQ ID NO: 115031 - DNA, 25 bp, Homo sapien
ttaagagaccatatcgtgtcacatc

SEQ ID NO: 115032 - DNA, 25 bp, Homo sapien
ttaagagaccatttcgtgtcacatc

SEQ ID NO: 115033 - DNA, 25 bp, Homo sapien
tatcgagaccggaacctctctaaag

SEQ ID NO: 115034 - DNA, 25 bp, Homo sapien
tatcgagaccggtacctctctaaag

SEQ ID NO: 115035 - DNA, 25 bp, Homo sapien
taagtcagggagtatatctctaaac

SEQ ID NO: 115036 - DNA, 25 bp, Homo sapien
taagtcagggagaatatctctaaac

SEQ ID NO: 115037 - DNA, 25 bp, Homo sapien
aggaccgcggggaaccgtcctgtcc

SEQ ID NO: 115038 - DNA, 25 bp, Homo sapien
aggaccgcggggtaccgtcctgtcc

SEQ ID NO: 115039 - DNA, 25 bp, Homo sapien
gaggtctgtctgtgggagtttatcc

SEQ ID NO: 115040 - DNA, 25 bp, Homo sapien
gaggtctgtctgagggagtttatcc

SEQ ID NO: 115041 - DNA, 25 bp, Homo sapien
ttacagttttagacggaatgtcgac

SEQ ID NO: 115042 - DNA, 25 bp, Homo sapien
ttacagttttagtcggaatgtcgac

SEQ ID NO: 115043 - DNA, 25 bp, Homo sapien
agtaattgtctctggttcagtctac

SEQ ID NO: 115044 - DNA, 25 bp, Homo sapien
agtaattgtctcaggttcagtctac

SEQ ID NO: 115045 - DNA, 25 bp, Homo sapien
tagagacaatgtcgatggtcggtcc

SEQ ID NO: 115046 - DNA, 25 bp, Homo sapien
tagagacaatgtggatggtcggtcc

SEQ ID NO: 115047 - DNA, 25 bp, Homo sapien
tgtaacgttctgtctgttcacagac

SEQ ID NO: 115048 - DNA, 25 bp, Homo sapien
tgtaacgttctgactgttcacagac

SEQ ID NO: 115049 - DNA, 25 bp, Homo sapien
gaaagtctcgtactcggtcctacat

SEQ ID NO: 115050 - DNA, 25 bp, Homo sapien
gaaagtctcgtagtcggtcctacat

SEQ ID NO: 115051 - DNA, 25 bp, Homo sapien
aaaagtctagtgtggtctcgtctgt

SEQ ID NO: 115052 - DNA, 25 bp, Homo sapien
aaaagtctagtgaggtctcgtctgt

SEQ ID NO: 115053 - DNA, 25 bp, Homo sapien
ccaaaagaggttgaaacggtgtctg

SEQ ID NO: 115054 - DNA, 25 bp, Homo sapien
ccaaaagaggttcaaacggtgtctg

SEQ ID NO: 115055 - DNA, 25 bp, Homo sapien
ccaataaaagtgtcttgtgtcgttg

SEQ ID NO: 115056 - DNA, 25 bp, Homo sapien
ccaataaaagtgacttgtgtcgttg

SEQ ID NO: 115057 - DNA, 25 bp, Homo sapien
cagtcaattacagtgggttttcttg

SEQ ID NO: 115058 - DNA, 25 bp, Homo sapien
cagtcaattacactgggttttcttg

SEQ ID NO: 115059 - DNA, 25 bp, Homo sapien
tccatatgaaggtgtatgtttccgt

SEQ ID NO: 115060 - DNA, 25 bp, Homo sapien
tccatatgaaggagtatgtttccgt

SEQ ID NO: 115061 - DNA, 25 bp, Homo sapien
catcggtcaggaccttagttgttcg

SEQ ID NO: 115062 - DNA, 25 bp, Homo sapien
catcggtcaggagcttagttgttcg

SEQ ID NO: 115063 - DNA, 25 bp, Homo sapien
ccaacccgtctaaaacttacttttc

SEQ ID NO: 115064 - DNA, 25 bp, Homo sapien
ccaacccgtctataacttacttttc

SEQ ID NO: 115065 - DNA, 25 bp, Homo sapien
ccacagatgtagaatatcggtcatg

SEQ ID NO: 115066 - DNA, 25 bp, Homo sapien
ccacagatgtagtatatcggtcatg

SEQ ID NO: 115067 - DNA, 25 bp, Homo sapien
tcatgactgaggaacggttgacgtc

SEQ ID NO: 115068 - DNA, 25 bp, Homo sapien
tcatgactgaggtacggttgacgtc

SEQ ID NO: 115069 - DNA, 25 bp, Homo sapien
ttctttgttggataccgaccgacgg

SEQ ID NO: 115070 - DNA, 25 bp, Homo sapien
ttctttgttggaaaccgaccgacgg

SEQ ID NO: 115071 - DNA, 25 bp, Homo sapien
catttctttgcgaaacatcggcgag

SEQ ID NO: 115072 - DNA, 25 bp, Homo sapien
catttctttgcgtaacatcggcgag

SEQ ID NO: 115073 - DNA, 25 bp, Homo sapien
tcgtactaatgttgcgacctgggac

SEQ ID NO: 115074 - DNA, 25 bp, Homo sapien
tcgtactaatgtagcgacctgggac

SEQ ID NO: 115075 - DNA, 25 bp, Homo sapien
ccgttacgatgtcttacctcgggtg

SEQ ID NO: 115076 - DNA, 25 bp, Homo sapien
ccgttacgatgtgttacctcgggtg

SEQ ID NO: 115077 - DNA, 25 bp, Homo sapien
cgttcttcttcttgacagaacccgg

SEQ ID NO: 115078 - DNA, 25 bp, Homo sapien
cgttcttcttctagacagaacccgg

SEQ ID NO: 115079 - DNA, 25 bp, Homo sapien
ttctttgacctacactgtctccggt

SEQ ID NO: 115080 - DNA, 25 bp, Homo sapien
ttctttgacctagactgtctccggt

SEQ ID NO: 115081 - DNA, 25 bp, Homo sapien
caggttatcataccatttcctctca

SEQ ID NO: 115082 - DNA, 25 bp, Homo sapien
caggttatcatagcatttcctctca

SEQ ID NO: 115083 - DNA, 25 bp, Homo sapien
gaaatttccagagttccgtctacca

SEQ ID NO: 115084 - DNA, 25 bp, Homo sapien
gaaatttccagacttccgtctacca

SEQ ID NO: 115085 - DNA, 25 bp, Homo sapien
attccagacccttagacccgtacga

SEQ ID NO: 115086 - DNA, 25 bp, Homo sapien
attccagaccctaagacccgtacga

SEQ ID NO: 115087 - DNA, 25 bp, Homo sapien
ttgttcggcgcacgtgacggcccgc

SEQ ID NO: 115088 - DNA, 25 bp, Homo sapien
ttgttcggcgcaggtgacggcccgc

SEQ ID NO: 115089 - DNA, 25 bp, Homo sapien
cttaggtggcgctttaggagctccc

SEQ ID NO: 115090 - DNA, 25 bp, Homo sapien
cttaggtggcgcattaggagctccc

SEQ ID NO: 115091 - DNA, 25 bp, Homo sapien
ttcagttggattgtcgggtactttc

SEQ ID NO: 115092 - DNA, 25 bp, Homo sapien
ttcagttggattctcgggtactttc

SEQ ID NO: 115093 - DNA, 25 bp, Homo sapien
catatagttgttactctaggttttc

SEQ ID NO: 115094 - DNA, 25 bp, Homo sapien
catatagttgtttctctaggttttc

SEQ ID NO: 115095 - DNA, 25 bp, Homo sapien
gtcatactttgtttcagttgtaacg

SEQ ID NO: 115096 - DNA, 25 bp, Homo sapien
gtcatactttgtatcagttgtaacg

SEQ ID NO: 115097 - DNA, 25 bp, Homo sapien
cactctcactcttaagctaggttca

SEQ ID NO: 115098 - DNA, 25 bp, Homo sapien
cactctcactctaaagctaggttca

SEQ ID NO: 115099 - DNA, 25 bp, Homo sapien
tccgtcttattaagtctgtctttgg

SEQ ID NO: 115100 - DNA, 25 bp, Homo sapien
tccgtcttattatgtctgtctttgg

SEQ ID NO: 115101 - DNA, 25 bp, Homo sapien
ccagcttcgggaagtcctaaggtga

SEQ ID NO: 115102 - DNA, 25 bp, Homo sapien
ccagcttcgggatgtcctaaggtga

SEQ ID NO: 115103 - DNA, 25 bp, Homo sapien
tctccgggggacagtccatagaggg

SEQ ID NO: 115104 - DNA, 25 bp, Homo sapien
tctccgggggactgtccatagaggg

SEQ ID NO: 115105 - DNA, 25 bp, Homo sapien
aggtatgaacgttaccctgagttat

SEQ ID NO: 115106 - DNA, 25 bp, Homo sapien
aggtatgaacgtaaccctgagttat

SEQ ID NO: 115107 - DNA, 25 bp, Homo sapien
gatgtagaagacgtaaaccttcttt

SEQ ID NO: 115108 - DNA, 25 bp, Homo sapien
gatgtagaagacctaaaccttcttt

SEQ ID NO: 115109 - DNA, 25 bp, Homo sapien
cgagcttgtgactcgaacacatttt

SEQ ID NO: 115110 - DNA, 25 bp, Homo sapien
cgagcttgtgacacgaacacatttt

SEQ ID NO: 115111 - DNA, 25 bp, Homo sapien
ccaccttcagtcgtgtctctggtca

SEQ ID NO: 115112 - DNA, 25 bp, Homo sapien
ccaccttcagtcctgtctctggtca

SEQ ID NO: 115113 - DNA, 25 bp, Homo sapien
gtctacgtttcatcaatcctcagga

SEQ ID NO: 115114 - DNA, 25 bp, Homo sapien
gtctacgtttcaacaatcctcagga

SEQ ID NO: 115115 - DNA, 25 bp, Homo sapien
agggccccgtagaacttgaccagga

SEQ ID NO: 115116 - DNA, 25 bp, Homo sapien
agggccccgtagtacttgaccagga

SEQ ID NO: 115117 - DNA, 25 bp, Homo sapien
ctggtgtttaagtagcgcgcgaaga

SEQ ID NO: 115118 - DNA, 25 bp, Homo sapien
ctggtgtttaagaagcgcgcgaaga

SEQ ID NO: 115119 - DNA, 25 bp, Homo sapien
tggtcatcgacagcagcccggtgta

SEQ ID NO: 115120 - DNA, 25 bp, Homo sapien
tggtcatcgacaccagcccggtgta

SEQ ID NO: 115121 - DNA, 25 bp, Homo sapien
gccccttctctttgtgcacggttgt

SEQ ID NO: 115122 - DNA, 25 bp, Homo sapien
gccccttctcttagtgcacggttgt

SEQ ID NO: 115123 - DNA, 25 bp, Homo sapien
ccccatactctttggatccgtgagt

SEQ ID NO: 115124 - DNA, 25 bp, Homo sapien
ccccatactcttaggatccgtgagt

SEQ ID NO: 115125 - DNA, 25 bp, Homo sapien
cccttaacgtattgggacacattgt

SEQ ID NO: 115126 - DNA, 25 bp, Homo sapien
cccttaacgtatagggacacattgt

SEQ ID NO: 115127 - DNA, 25 bp, Homo sapien
cccttgggaccgatggtctaagttg

SEQ ID NO: 115128 - DNA, 25 bp, Homo sapien
cccttgggaccgttggtctaagttg

SEQ ID NO: 115129 - DNA, 25 bp, Homo sapien
cccccggtaccgtgtctgtcggatg

SEQ ID NO: 115130 - DNA, 25 bp, Homo sapien
cccccggtaccgagtctgtcggatg

SEQ ID NO: 115131 - DNA, 25 bp, Homo sapien
acgctgtaccacaggcgtcggatac

SEQ ID NO: 115132 - DNA, 25 bp, Homo sapien
acgctgtaccactggcgtcggatac

SEQ ID NO: 115133 - DNA, 25 bp, Homo sapien
acgcctctactctggtacgggactc

SEQ ID NO: 115134 - DNA, 25 bp, Homo sapien
acgcctctactcaggtacgggactc

SEQ ID NO: 115135 - DNA, 25 bp, Homo sapien
tccgactacctctacaaagggaccg

SEQ ID NO: 115136 - DNA, 25 bp, Homo sapien
tccgactacctcaacaaagggaccg

SEQ ID NO: 115137 - DNA, 25 bp, Homo sapien
cgtagtactccatccgctattgatc

SEQ ID NO: 115138 - DNA, 25 bp, Homo sapien
cgtagtactccaaccgctattgatc

SEQ ID NO: 115139 - DNA, 25 bp, Homo sapien
tcgggactaaaatcctacatcgata

SEQ ID NO: 115140 - DNA, 25 bp, Homo sapien
tcgggactaaaaacctacatcgata

SEQ ID NO: 115141 - DNA, 25 bp, Homo sapien
gtccgtggaaaaacccacgtcctat

SEQ ID NO: 115142 - DNA, 25 bp, Homo sapien
gtccgtggaaaatcccacgtcctat

SEQ ID NO: 115143 - DNA, 25 bp, Homo sapien
tcggtccgacctcgtgcgagagtga

SEQ ID NO: 115144 - DNA, 25 bp, Homo sapien
tcggtccgacctggtgcgagagtga

SEQ ID NO: 115145 - DNA, 25 bp, Homo sapien
gggtactgacccttgcgagagtgac

SEQ ID NO: 115146 - DNA, 25 bp, Homo sapien
gggtactgacccatgcgagagtgac

SEQ ID NO: 115147 - DNA, 25 bp, Homo sapien
cgggtctccccaactcgaaggacgt

SEQ ID NO: 115148 - DNA, 25 bp, Homo sapien
cgggtctccccatctcgaaggacgt

SEQ ID NO: 115149 - DNA, 25 bp, Homo sapien
ctgtgtccttcaacttccaccgtgt

SEQ ID NO: 115150 - DNA, 25 bp, Homo sapien
ctgtgtccttcatcttccaccgtgt

SEQ ID NO: 115151 - DNA, 25 bp, Homo sapien
tacccattgttgaactggttacaat

SEQ ID NO: 115152 - DNA, 25 bp, Homo sapien
tacccattgttgtactggttacaat

SEQ ID NO: 115153 - DNA, 25 bp, Homo sapien
ccatgtagtttcttcgataaggtat

SEQ ID NO: 115154 - DNA, 25 bp, Homo sapien
ccatgtagtttcatcgataaggtat

SEQ ID NO: 115155 - DNA, 25 bp, Homo sapien
gtaataaaccctaacgacaaaggtt

SEQ ID NO: 115156 - DNA, 25 bp, Homo sapien
gtaataaacccttacgacaaaggtt

SEQ ID NO: 115157 - DNA, 25 bp, Homo sapien
ggtaagaaatccaccaatacatgtt

SEQ ID NO: 115158 - DNA, 25 bp, Homo sapien
ggtaagaaatcctccaatacatgtt

SEQ ID NO: 115159 - DNA, 25 bp, Homo sapien
aggggacaccgacttccgaacagcc

SEQ ID NO: 115160 - DNA, 25 bp, Homo sapien
aggggacaccgagttccgaacagcc

SEQ ID NO: 115161 - DNA, 25 bp, Homo sapien
gaagagagaaccacgctggaaaggc

SEQ ID NO: 115162 - DNA, 25 bp, Homo sapien
gaagagagaacctcgctggaaaggc

SEQ ID NO: 115163 - DNA, 25 bp, Homo sapien
cgataatagatgggggtataacttc

SEQ ID NO: 115164 - DNA, 25 bp, Homo sapien
cgataatagatgcgggtataacttc

SEQ ID NO: 115165 - DNA, 25 bp, Homo sapien
agaaactagttttgtgcaaacttac

SEQ ID NO: 115166 - DNA, 25 bp, Homo sapien
agaaactagtttagtgcaaacttac

SEQ ID NO: 115167 - DNA, 25 bp, Homo sapien
tatttgggtagagaacgagtctctc

SEQ ID NO: 115168 - DNA, 25 bp, Homo sapien
tatttgggtagacaacgagtctctc

SEQ ID NO: 115169 - DNA, 25 bp, Homo sapien
acattcgagtatctgacagagttta

SEQ ID NO: 115170 - DNA, 25 bp, Homo sapien
acattcgagtatgtgacagagttta

SEQ ID NO: 115171 - DNA, 25 bp, Homo sapien
gcccaaccaatcttgtttgtctaag

SEQ ID NO: 115172 - DNA, 25 bp, Homo sapien
gcccaaccaatcatgtttgtctaag

SEQ ID NO: 115173 - DNA, 25 bp, Homo sapien
gattttccaagtcacggttttgaga

SEQ ID NO: 115174 - DNA, 25 bp, Homo sapien
gattttccaagtgacggttttgaga

SEQ ID NO: 115175 - DNA, 25 bp, Homo sapien
ttcatgtgtccatgaaacgtttgaa

SEQ ID NO: 115176 - DNA, 25 bp, Homo sapien
ttcatgtgtccaagaaacgtttgaa

SEQ ID NO: 115177 - DNA, 25 bp, Homo sapien
ccaggactcttacaacgtcagaaat

SEQ ID NO: 115178 - DNA, 25 bp, Homo sapien
ccaggactcttagaacgtcagaaat

SEQ ID NO: 115179 - DNA, 25 bp, Homo sapien
gaccagtactctaagtggaacaaca

SEQ ID NO: 115180 - DNA, 25 bp, Homo sapien
gaccagtactcttagtggaacaaca

SEQ ID NO: 115181 - DNA, 25 bp, Homo sapien
aggaagatcgtttactttcctccca

SEQ ID NO: 115182 - DNA, 25 bp, Homo sapien
aggaagatcgttaactttcctccca

SEQ ID NO: 115183 - DNA, 25 bp, Homo sapien
acggagaacattcttttctcgatcc

SEQ ID NO: 115184 - DNA, 25 bp, Homo sapien
acggagaacattgttttctcgatcc

SEQ ID NO: 115185 - DNA, 25 bp, Homo sapien
gttttcgttttagacttcgtccgac

SEQ ID NO: 115186 - DNA, 25 bp, Homo sapien
gttttcgttttacacttcgtccgac

SEQ ID NO: 115187 - DNA, 25 bp, Homo sapien
gtatcaactactgatttctttggac

SEQ ID NO: 115188 - DNA, 25 bp, Homo sapien
gtatcaactactcatttctttggac

SEQ ID NO: 115189 - DNA, 25 bp, Homo sapien
agtatttgtactcagtgatttttcc

SEQ ID NO: 115190 - DNA, 25 bp, Homo sapien
agtatttgtactgagtgatttttcc

SEQ ID NO: 115191 - DNA, 25 bp, Homo sapien
gaagtctgaatttaagacatcttcc

SEQ ID NO: 115192 - DNA, 25 bp, Homo sapien
gaagtctgaattaaagacatcttcc

SEQ ID NO: 115193 - DNA, 25 bp, Homo sapien
attacttaggtactaccttctgtga

SEQ ID NO: 115194 - DNA, 25 bp, Homo sapien
attacttaggtagtaccttctgtga

SEQ ID NO: 115195 - DNA, 25 bp, Homo sapien
aacagtgaagtaggtagtcgcgaac

SEQ ID NO: 115196 - DNA, 25 bp, Homo sapien
aacagtgaagtacgtagtcgcgaac

SEQ ID NO: 115197 - DNA, 25 bp, Homo sapien
tctataaagaaggtcattacccgac

SEQ ID NO: 115198 - DNA, 25 bp, Homo sapien
tctataaagaagctcattacccgac

SEQ ID NO: 115199 - DNA, 25 bp, Homo sapien
ctatcaggtatgtcacaccgatgac

SEQ ID NO: 115200 - DNA, 25 bp, Homo sapien
ctatcaggtatgacacaccgatgac

SEQ ID NO: 115201 - DNA, 25 bp, Homo sapien
cgattatcttcgtccagggaacggg

SEQ ID NO: 115202 - DNA, 25 bp, Homo sapien
cgattatcttcgaccagggaacggg

SEQ ID NO: 115203 - DNA, 25 bp, Homo sapien
tgtctcttcgtaaacacataaaggc

SEQ ID NO: 115204 - DNA, 25 bp, Homo sapien
tgtctcttcgtatacacataaaggc

SEQ ID NO: 115205 - DNA, 25 bp, Homo sapien
acgtgaccaaacgaacatcagagca

SEQ ID NO: 115206 - DNA, 25 bp, Homo sapien
acgtgaccaaaccaacatcagagca

SEQ ID NO: 115207 - DNA, 25 bp, Homo sapien
tcgatctaacacgaactccgagggg

SEQ ID NO: 115208 - DNA, 25 bp, Homo sapien
tcgatctaacaccaactccgagggg

SEQ ID NO: 115209 - DNA, 25 bp, Homo sapien
gtttgagcacagacaaactaaaatt

SEQ ID NO: 115210 - DNA, 25 bp, Homo sapien
gtttgagcacagtcaaactaaaatt

SEQ ID NO: 115211 - DNA, 25 bp, Homo sapien
gtgtgtgattttcgtaagtactatt

SEQ ID NO: 115212 - DNA, 25 bp, Homo sapien
gtgtgtgattttggtaagtactatt

SEQ ID NO: 115213 - DNA, 25 bp, Homo sapien
ggtctttatagtgtttcgtactcat

SEQ ID NO: 115214 - DNA, 25 bp, Homo sapien
ggtctttatagtctttcgtactcat

SEQ ID NO: 115215 - DNA, 25 bp, Homo sapien
atatttttagattacgacatgtcta

SEQ ID NO: 115216 - DNA, 25 bp, Homo sapien
atatttttagataacgacatgtcta

SEQ ID NO: 115217 - DNA, 25 bp, Homo sapien
tttaatgagtgaaaccgactctcta

SEQ ID NO: 115218 - DNA, 25 bp, Homo sapien
tttaatgagtgataccgactctcta

SEQ ID NO: 115219 - DNA, 25 bp, Homo sapien
tctttgttagggaaaccattgacgt

SEQ ID NO: 115220 - DNA, 25 bp, Homo sapien
tctttgttagggtaaccattgacgt

SEQ ID NO: 115221 - DNA, 25 bp, Homo sapien
gtcctctctcagtcttgtaatctga

SEQ ID NO: 115222 - DNA, 25 bp, Homo sapien
gtcctctctcagacttgtaatctga

SEQ ID NO: 115223 - DNA, 25 bp, Homo sapien
tgggatctccccttcgataactagg

SEQ ID NO: 115224 - DNA, 25 bp, Homo sapien
tgggatctccccatcgataactagg

SEQ ID NO: 115225 - DNA, 25 bp, Homo sapien
tacctatagacacatttactttcgt

SEQ ID NO: 115226 - DNA, 25 bp, Homo sapien
tacctatagacagatttactttcgt

SEQ ID NO: 115227 - DNA, 25 bp, Homo sapien
gaaagtcggcacgactgttctccct

SEQ ID NO: 115228 - DNA, 25 bp, Homo sapien
gaaagtcggcaccactgttctccct

SEQ ID NO: 115229 - DNA, 25 bp, Homo sapien
aacgagtgtcaacataggactcccg

SEQ ID NO: 115230 - DNA, 25 bp, Homo sapien
aacgagtgtcaagataggactcccg

SEQ ID NO: 115231 - DNA, 25 bp, Homo sapien
ccgacttgacctagtgcgagacggc

SEQ ID NO: 115232 - DNA, 25 bp, Homo sapien
ccgacttgaccttgtgcgagacggc

SEQ ID NO: 115233 - DNA, 25 bp, Homo sapien
acctgtagtcctggtagaggcgcga

SEQ ID NO: 115234 - DNA, 25 bp, Homo sapien
acctgtagtcctcgtagaggcgcga

SEQ ID NO: 115235 - DNA, 25 bp, Homo sapien
acttcgcctggaacgtctacaacgt

SEQ ID NO: 115236 - DNA, 25 bp, Homo sapien
acttcgcctggatcgtctacaacgt

SEQ ID NO: 115237 - DNA, 25 bp, Homo sapien
tttgttcctccgtcgtctacttacg

SEQ ID NO: 115238 - DNA, 25 bp, Homo sapien
tttgttcctccgacgtctacttacg

SEQ ID NO: 115239 - DNA, 25 bp, Homo sapien
taagtcacaaacaagtctcgagtag

SEQ ID NO: 115240 - DNA, 25 bp, Homo sapien
taagtcacaaactagtctcgagtag

SEQ ID NO: 115241 - DNA, 25 bp, Homo sapien
aacaaaactactactgtcgacgtcg

SEQ ID NO: 115242 - DNA, 25 bp, Homo sapien
aacaaaactacttctgtcgacgtcg

SEQ ID NO: 115243 - DNA, 25 bp, Homo sapien
tgagtacaaatctgttgtgtccagt

SEQ ID NO: 115244 - DNA, 25 bp, Homo sapien
tgagtacaaatcagttgtgtccagt

SEQ ID NO: 115245 - DNA, 25 bp, Homo sapien
tgcagagaaatgacttgtgtccgac

SEQ ID NO: 115246 - DNA, 25 bp, Homo sapien
tgcagagaaatgtcttgtgtccgac

SEQ ID NO: 115247 - DNA, 25 bp, Homo sapien
ccgagtcccgtcttcttggagtcgc

SEQ ID NO: 115248 - DNA, 25 bp, Homo sapien
ccgagtcccgtcatcttggagtcgc

SEQ ID NO: 115249 - DNA, 25 bp, Homo sapien
cttcatgtttccaactgaagtgtat

SEQ ID NO: 115250 - DNA, 25 bp, Homo sapien
cttcatgtttcctactgaagtgtat

SEQ ID NO: 115251 - DNA, 25 bp, Homo sapien
gtttggactcttcgacagtgaatgg

SEQ ID NO: 115252 - DNA, 25 bp, Homo sapien
gtttggactcttggacagtgaatgg

SEQ ID NO: 115253 - DNA, 25 bp, Homo sapien
gagtcctcgtttcaatctaggtgct

SEQ ID NO: 115254 - DNA, 25 bp, Homo sapien
gagtcctcgtttgaatctaggtgct

SEQ ID NO: 115255 - DNA, 25 bp, Homo sapien
ctgtaccgctctttgtctcagttgg

SEQ ID NO: 115256 - DNA, 25 bp, Homo sapien
ctgtaccgctctatgtctcagttgg

SEQ ID NO: 115257 - DNA, 25 bp, Homo sapien
ctgtacaaccttacggtctactttg

SEQ ID NO: 115258 - DNA, 25 bp, Homo sapien
ctgtacaacctttcggtctactttg

SEQ ID NO: 115259 - DNA, 25 bp, Homo sapien
cgtagtaaaagaattctcctgtaga

SEQ ID NO: 115260 - DNA, 25 bp, Homo sapien
cgtagtaaaagatttctcctgtaga

SEQ ID NO: 115261 - DNA, 25 bp, Homo sapien
cagaagaagagtgactcctcagaga

SEQ ID NO: 115262 - DNA, 25 bp, Homo sapien
cagaagaagagtcactcctcagaga

SEQ ID NO: 115263 - DNA, 25 bp, Homo sapien
gaactagagactcatgagtaacaac

SEQ ID NO: 115264 - DNA, 25 bp, Homo sapien
gaactagagactgatgagtaacaac

SEQ ID NO: 115265 - DNA, 25 bp, Homo sapien
cgggaccgagacgaggttcaccgac

SEQ ID NO: 115266 - DNA, 25 bp, Homo sapien
cgggaccgagaccaggttcaccgac

SEQ ID NO: 115267 - DNA, 25 bp, Homo sapien
tgattttaagtcatagtctcagaac

SEQ ID NO: 115268 - DNA, 25 bp, Homo sapien
tgattttaagtcttagtctcagaac

SEQ ID NO: 115269 - DNA, 25 bp, Homo sapien
aggagatgtcgaaaggatcctccaa

SEQ ID NO: 115270 - DNA, 25 bp, Homo sapien
aggagatgtcgataggatcctccaa

SEQ ID NO: 115271 - DNA, 25 bp, Homo sapien
tttgtatatgtagaagactccagtc

SEQ ID NO: 115272 - DNA, 25 bp, Homo sapien
tttgtatatgtacaagactccagtc

SEQ ID NO: 115273 - DNA, 25 bp, Homo sapien
ttagattgtctgatgtatcacagac

SEQ ID NO: 115274 - DNA, 25 bp, Homo sapien
ttagattgtctgttgtatcacagac

SEQ ID NO: 115275 - DNA, 25 bp, Homo sapien
cgggagtacattgtgtctcgtccac

SEQ ID NO: 115276 - DNA, 25 bp, Homo sapien
cgggagtacattctgtctcgtccac

SEQ ID NO: 115277 - DNA, 25 bp, Homo sapien
tatagatacagtgtcgtttgtccac

SEQ ID NO: 115278 - DNA, 25 bp, Homo sapien
tatagatacagtctcgtttgtccac

SEQ ID NO: 115279 - DNA, 25 bp, Homo sapien
aaagtgaggagtctcctcctcggta

SEQ ID NO: 115280 - DNA, 25 bp, Homo sapien
aaagtgaggagtgtcctcctcggta

SEQ ID NO: 115281 - DNA, 25 bp, Homo sapien
aacgtagaacggaccctttgtcacg

SEQ ID NO: 115282 - DNA, 25 bp, Homo sapien
aacgtagaacggtccctttgtcacg

SEQ ID NO: 115283 - DNA, 25 bp, Homo sapien
cacgtgacgggaccaaaggtcgttc

SEQ ID NO: 115284 - DNA, 25 bp, Homo sapien
cacgtgacgggagcaaaggtcgttc

SEQ ID NO: 115285 - DNA, 25 bp, Homo sapien
cccgaggaagacctactaggtccac

SEQ ID NO: 115286 - DNA, 25 bp, Homo sapien
cccgaggaagacgtactaggtccac

SEQ ID NO: 115287 - DNA, 25 bp, Homo sapien
cgagacgtgataaatacgggtccta

SEQ ID NO: 115288 - DNA, 25 bp, Homo sapien
cgagacgtgatatatacgggtccta

SEQ ID NO: 115289 - DNA, 25 bp, Homo sapien
ggacaacgtttacctttagtccagt

SEQ ID NO: 115290 - DNA, 25 bp, Homo sapien
ggacaacgtttagctttagtccagt

SEQ ID NO: 115291 - DNA, 25 bp, Homo sapien
tcttctccccttaggtttacttaca

SEQ ID NO: 115292 - DNA, 25 bp, Homo sapien
tcttctcccctttggtttacttaca

SEQ ID NO: 115293 - DNA, 25 bp, Homo sapien
tgctcccctattgtcgtcggtcctg

SEQ ID NO: 115294 - DNA, 25 bp, Homo sapien
tgctcccctattctcgtcggtcctg

SEQ ID NO: 115295 - DNA, 25 bp, Homo sapien
tctctctccttttgtcagacccgtg

SEQ ID NO: 115296 - DNA, 25 bp, Homo sapien
tctctctcctttagtcagacccgtg

SEQ ID NO: 115297 - DNA, 25 bp, Homo sapien
atgtgtgaccttttcggagacgcgg

SEQ ID NO: 115298 - DNA, 25 bp, Homo sapien
atgtgtgaccttatcggagacgcgg

SEQ ID NO: 115299 - DNA, 25 bp, Homo sapien
ctgggtaccgtttctcggtagggac

SEQ ID NO: 115300 - DNA, 25 bp, Homo sapien
ctgggtaccgttactcggtagggac

SEQ ID NO: 115301 - DNA, 25 bp, Homo sapien
tctcggagccgatgagacctgagga

SEQ ID NO: 115302 - DNA, 25 bp, Homo sapien
tctcggagccgaagagacctgagga

SEQ ID NO: 115303 - DNA, 25 bp, Homo sapien
ccgacggctggaaaccggagacgta

SEQ ID NO: 115304 - DNA, 25 bp, Homo sapien
ccgacggctggataccggagacgta

SEQ ID NO: 115305 - DNA, 25 bp, Homo sapien
acgtcggcctgttgtcagaagagta

SEQ ID NO: 115306 - DNA, 25 bp, Homo sapien
acgtcggcctgtagtcagaagagta

SEQ ID NO: 115307 - DNA, 25 bp, Homo sapien
ccgtggtctttggaacgaacagtat

SEQ ID NO: 115308 - DNA, 25 bp, Homo sapien
ccgtggtctttgcaacgaacagtat

SEQ ID NO: 115309 - DNA, 25 bp, Homo sapien
caaaggttcagaggtcgaaatctac

SEQ ID NO: 115310 - DNA, 25 bp, Homo sapien
caaaggttcagacgtcgaaatctac

SEQ ID NO: 115311 - DNA, 25 bp, Homo sapien
caacaggttcagtcgacttttgtct

SEQ ID NO: 115312 - DNA, 25 bp, Homo sapien
caacaggttcagacgacttttgtct

SEQ ID NO: 115313 - DNA, 25 bp, Homo sapien
ggagatatagtacaccttacactct

SEQ ID NO: 115314 - DNA, 25 bp, Homo sapien
ggagatatagtagaccttacactct

SEQ ID NO: 115315 - DNA, 25 bp, Homo sapien
gaagtgtaagagaaggagcaacctc

SEQ ID NO: 115316 - DNA, 25 bp, Homo sapien
gaagtgtaagagtaggagcaacctc

SEQ ID NO: 115317 - DNA, 25 bp, Homo sapien
ccgaattcacagtggaggaacctct

SEQ ID NO: 115318 - DNA, 25 bp, Homo sapien
ccgaattcacagaggaggaacctct

SEQ ID NO: 115319 - DNA, 25 bp, Homo sapien
aaagtaaaagaggtcatgacccgtt

SEQ ID NO: 115320 - DNA, 25 bp, Homo sapien
aaagtaaaagagctcatgacccgtt

SEQ ID NO: 115321 - DNA, 25 bp, Homo sapien
taagaaagctttcagagagactgac

SEQ ID NO: 115322 - DNA, 25 bp, Homo sapien
taagaaagctttgagagagactgac

SEQ ID NO: 115323 - DNA, 25 bp, Homo sapien
ttaacatagtctttggaatactctg

SEQ ID NO: 115324 - DNA, 25 bp, Homo sapien
ttaacatagtctatggaatactctg

SEQ ID NO: 115325 - DNA, 25 bp, Homo sapien
atgtcgtgaagttccaatattctaa

SEQ ID NO: 115326 - DNA, 25 bp, Homo sapien
atgtcgtgaagtaccaatattctaa

SEQ ID NO: 115327 - DNA, 25 bp, Homo sapien
cgtcgaacgaaaaccctgataacgt

SEQ ID NO: 115328 - DNA, 25 bp, Homo sapien
cgtcgaacgaaatccctgataacgt

SEQ ID NO: 115329 - DNA, 25 bp, Homo sapien
ctcgagagtctctcacgatgagtgg

SEQ ID NO: 115330 - DNA, 25 bp, Homo sapien
ctcgagagtctcacacgatgagtgg

SEQ ID NO: 115331 - DNA, 25 bp, Homo sapien
aggtgacggcggcgacgaccgagga

SEQ ID NO: 115332 - DNA, 25 bp, Homo sapien
aggtgacggcggggacgaccgagga

SEQ ID NO: 115333 - DNA, 25 bp, Homo sapien
ccgagaggaccgttccggcacagat

SEQ ID NO: 115334 - DNA, 25 bp, Homo sapien
ccgagaggaccgatccggcacagat

SEQ ID NO: 115335 - DNA, 25 bp, Homo sapien
gtagcgcgacgcactggtccgccga

SEQ ID NO: 115336 - DNA, 25 bp, Homo sapien
gtagcgcgacgctctggtccgccga

SEQ ID NO: 115337 - DNA, 25 bp, Homo sapien
ggggcaagagtgactccctctacca

SEQ ID NO: 115338 - DNA, 25 bp, Homo sapien
ggggcaagagtgtctccctctacca

SEQ ID NO: 115339 - DNA, 25 bp, Homo sapien
taggctccgggagaacgtccaccac

SEQ ID NO: 115340 - DNA, 25 bp, Homo sapien
taggctccgggacaacgtccaccac

SEQ ID NO: 115341 - DNA, 25 bp, Homo sapien
tgctccgtagggacgcgctctcagg

SEQ ID NO: 115342 - DNA, 25 bp, Homo sapien
tgctccgtagggtcgcgctctcagg

SEQ ID NO: 115343 - DNA, 25 bp, Homo sapien
tccaccggaggaagtctctcccggt

SEQ ID NO: 115344 - DNA, 25 bp, Homo sapien
tccaccggaggatgtctctcccggt

SEQ ID NO: 115345 - DNA, 25 bp, Homo sapien
cgcagaccgagaaggctactccggg

SEQ ID NO: 115346 - DNA, 25 bp, Homo sapien
cgcagaccgagatggctactccggg

SEQ ID NO: 115347 - DNA, 25 bp, Homo sapien
tagagagagtccacgggctcccaag

SEQ ID NO: 115348 - DNA, 25 bp, Homo sapien
tagagagagtcctcgggctcccaag

SEQ ID NO: 115349 - DNA, 25 bp, Homo sapien
atacacaacctcgtgcgaccgcgaa

SEQ ID NO: 115350 - DNA, 25 bp, Homo sapien
atacacaacctcctgcgaccgcgaa

SEQ ID NO: 115351 - DNA, 25 bp, Homo sapien
tacctagagtgtacacacttccgaa

SEQ ID NO: 115352 - DNA, 25 bp, Homo sapien
tacctagagtgttcacacttccgaa

SEQ ID NO: 115353 - DNA, 25 bp, Homo sapien
ttcctaatcttgaacttctcgagtg

SEQ ID NO: 115354 - DNA, 25 bp, Homo sapien
ttcctaatcttgtacttctcgagtg

SEQ ID NO: 115355 - DNA, 25 bp, Homo sapien
ctcactctctctgtatttctgacag

SEQ ID NO: 115356 - DNA, 25 bp, Homo sapien
ctcactctctctctatttctgacag

SEQ ID NO: 115357 - DNA, 25 bp, Homo sapien
gaccctcgttgacgtctttctaaca

SEQ ID NO: 115358 - DNA, 25 bp, Homo sapien
gaccctcgttgaggtctttctaaca

SEQ ID NO: 115359 - DNA, 25 bp, Homo sapien
gacctctttccttccgtttgagacg

SEQ ID NO: 115360 - DNA, 25 bp, Homo sapien
gacctctttcctaccgtttgagacg

SEQ ID NO: 115361 - DNA, 25 bp, Homo sapien
tcccaattcacttcctcacgggtga

SEQ ID NO: 115362 - DNA, 25 bp, Homo sapien
tcccaattcactacctcacgggtga

SEQ ID NO: 115363 - DNA, 25 bp, Homo sapien
ccctccagtcgtttcttgagtacag

SEQ ID NO: 115364 - DNA, 25 bp, Homo sapien
ccctccagtcgtatcttgagtacag

SEQ ID NO: 115365 - DNA, 25 bp, Homo sapien
ggttaccgagttactttaactacat

SEQ ID NO: 115366 - DNA, 25 bp, Homo sapien
ggttaccgagtttctttaactacat

SEQ ID NO: 115367 - DNA, 25 bp, Homo sapien
ccctcgggtgactcccggtttcgaa

SEQ ID NO: 115368 - DNA, 25 bp, Homo sapien
ccctcgggtgacacccggtttcgaa

SEQ ID NO: 115369 - DNA, 25 bp, Homo sapien
acctggaacaacgacgaccggagga

SEQ ID NO: 115370 - DNA, 25 bp, Homo sapien
acctggaacaaccacgaccggagga

SEQ ID NO: 115371 - DNA, 25 bp, Homo sapien
catgtactgttccacgccgagggat

SEQ ID NO: 115372 - DNA, 25 bp, Homo sapien
catgtactgttcgacgccgagggat

SEQ ID NO: 115373 - DNA, 25 bp, Homo sapien
cgtctttgtgtcgacgacggcgacg

SEQ ID NO: 115374 - DNA, 25 bp, Homo sapien
cgtctttgtgtccacgacggcgacg

SEQ ID NO: 115375 - DNA, 25 bp, Homo sapien
tgtctcatttagtcacgagtttatc

SEQ ID NO: 115376 - DNA, 25 bp, Homo sapien
tgtctcatttagacacgagtttatc

SEQ ID NO: 115377 - DNA, 25 bp, Homo sapien
tgctttcatttcgtcaggtagtttg

SEQ ID NO: 115378 - DNA, 25 bp, Homo sapien
tgctttcatttcctcaggtagtttg

SEQ ID NO: 115379 - DNA, 25 bp, Homo sapien
gttttttccacgtacattgtaatgt

SEQ ID NO: 115380 - DNA, 25 bp, Homo sapien
gttttttccacgaacattgtaatgt

SEQ ID NO: 115381 - DNA, 25 bp, Homo sapien
ttccttcttccgtcctgagacgggt

SEQ ID NO: 115382 - DNA, 25 bp, Homo sapien
ttccttcttccgacctgagacgggt

SEQ ID NO: 115383 - DNA, 25 bp, Homo sapien
gtggtgcaccgactcttcagttgat

SEQ ID NO: 115384 - DNA, 25 bp, Homo sapien
gtggtgcaccgagtcttcagttgat

SEQ ID NO: 115385 - DNA, 25 bp, Homo sapien
acttaggtcatgatttgcacgaaga

SEQ ID NO: 115386 - DNA, 25 bp, Homo sapien
acttaggtcatgttttgcacgaaga

SEQ ID NO: 115387 - DNA, 25 bp, Homo sapien
ataaagtccgaatgttttcaacaag

SEQ ID NO: 115388 - DNA, 25 bp, Homo sapien
ataaagtccgaaagttttcaacaag

SEQ ID NO: 115389 - DNA, 25 bp, Homo sapien
tgtcgtaaggtctgttctaccgagg

SEQ ID NO: 115390 - DNA, 25 bp, Homo sapien
tgtcgtaaggtcagttctaccgagg

SEQ ID NO: 115391 - DNA, 25 bp, Homo sapien
cctgttcgaagtatgtcatacatac

SEQ ID NO: 115392 - DNA, 25 bp, Homo sapien
cctgttcgaagtttgtcatacatac

SEQ ID NO: 115393 - DNA, 25 bp, Homo sapien
cttcgtgtcagttttgacttatgta

SEQ ID NO: 115394 - DNA, 25 bp, Homo sapien
cttcgtgtcagtattgacttatgta

SEQ ID NO: 115395 - DNA, 25 bp, Homo sapien
ggatcctacaggtaccctaccgtca

SEQ ID NO: 115396 - DNA, 25 bp, Homo sapien
ggatcctacaggaaccctaccgtca

SEQ ID NO: 115397 - DNA, 25 bp, Homo sapien
caccggagagcacttcggggagtaa

SEQ ID NO: 115398 - DNA, 25 bp, Homo sapien
caccggagagcagttcggggagtaa

SEQ ID NO: 115399 - DNA, 25 bp, Homo sapien
cttcgttcaggacctcaactgtgag

SEQ ID NO: 115400 - DNA, 25 bp, Homo sapien
cttcgttcaggagctcaactgtgag

SEQ ID NO: 115401 - DNA, 25 bp, Homo sapien
agtactcgaggagctacagcaggag

SEQ ID NO: 115402 - DNA, 25 bp, Homo sapien
agtactcgaggacctacagcaggag

SEQ ID NO: 115403 - DNA, 25 bp, Homo sapien
cgacgtgtaccgtgcacatagagac

SEQ ID NO: 115404 - DNA, 25 bp, Homo sapien
cgacgtgtaccgagcacatagagac

SEQ ID NO: 115405 - DNA, 25 bp, Homo sapien
ggacgagtccccagaccgtagtaga

SEQ ID NO: 115406 - DNA, 25 bp, Homo sapien
ggacgagtcccctgaccgtagtaga

SEQ ID NO: 115407 - DNA, 25 bp, Homo sapien
agtctccaccgtcacagtagtagac

SEQ ID NO: 115408 - DNA, 25 bp, Homo sapien
agtctccaccgtgacagtagtagac

SEQ ID NO: 115409 - DNA, 25 bp, Homo sapien
ttactgatggaagagaccgacggac

SEQ ID NO: 115410 - DNA, 25 bp, Homo sapien
ttactgatggaacagaccgacggac

SEQ ID NO: 115411 - DNA, 25 bp, Homo sapien
gtcagactgagaaaccaacacggat

SEQ ID NO: 115412 - DNA, 25 bp, Homo sapien
gtcagactgagataccaacacggat

SEQ ID NO: 115413 - DNA, 25 bp, Homo sapien
tacaggtatacgaaccgtagaagat

SEQ ID NO: 115414 - DNA, 25 bp, Homo sapien
tacaggtatacgtaccgtagaagat

SEQ ID NO: 115415 - DNA, 25 bp, Homo sapien
aaacgtactcgttacgtctgtagga

SEQ ID NO: 115416 - DNA, 25 bp, Homo sapien
aaacgtactcgtaacgtctgtagga

SEQ ID NO: 115417 - DNA, 25 bp, Homo sapien
ggattcgttgtaacgaggtctccaa

SEQ ID NO: 115418 - DNA, 25 bp, Homo sapien
ggattcgttgtatcgaggtctccaa

SEQ ID NO: 115419 - DNA, 25 bp, Homo sapien
gactttgttagtgaggtatacctca

SEQ ID NO: 115420 - DNA, 25 bp, Homo sapien
gactttgttagtcaggtatacctca

SEQ ID NO: 115421 - DNA, 25 bp, Homo sapien
taaaatgttatacgagggtaaccca

SEQ ID NO: 115422 - DNA, 25 bp, Homo sapien
taaaatgttataggagggtaaccca

SEQ ID NO: 115423 - DNA, 25 bp, Homo sapien
gtcctgtttcttgtgtaaacgttgt

SEQ ID NO: 115424 - DNA, 25 bp, Homo sapien
gtcctgtttcttctgtaaacgttgt

SEQ ID NO: 115425 - DNA, 25 bp, Homo sapien
tctttgtcttactttggacaaggtt

SEQ ID NO: 115426 - DNA, 25 bp, Homo sapien
tctttgtcttacattggacaaggtt

SEQ ID NO: 115427 - DNA, 25 bp, Homo sapien
atatagcttcgtatggtgtttcttc

SEQ ID NO: 115428 - DNA, 25 bp, Homo sapien
atatagcttcgtttggtgtttcttc

SEQ ID NO: 115429 - DNA, 25 bp, Homo sapien
aactatatcggctcggtctcctttc

SEQ ID NO: 115430 - DNA, 25 bp, Homo sapien
aactatatcggcacggtctcctttc

SEQ ID NO: 115431 - DNA, 25 bp, Homo sapien
cgtaatagtcttagtttcatctccg

SEQ ID NO: 115432 - DNA, 25 bp, Homo sapien
cgtaatagtctttgtttcatctccg

SEQ ID NO: 115433 - DNA, 25 bp, Homo sapien
cggtcctcagtatgtttcggtccga

SEQ ID NO: 115434 - DNA, 25 bp, Homo sapien
cggtcctcagtaagtttcggtccga

SEQ ID NO: 115435 - DNA, 25 bp, Homo sapien
tcgagttgagacgtcatgtgctacc

SEQ ID NO: 115436 - DNA, 25 bp, Homo sapien
tcgagttgagacctcatgtgctacc

SEQ ID NO: 115437 - DNA, 25 bp, Homo sapien
ggtgtacgagtaacgtcattatgaa

SEQ ID NO: 115438 - DNA, 25 bp, Homo sapien
ggtgtacgagtatcgtcattatgaa

SEQ ID NO: 115439 - DNA, 25 bp, Homo sapien
tccacgtacgtatcgcgaactccaa

SEQ ID NO: 115440 - DNA, 25 bp, Homo sapien
tccacgtacgtaacgcgaactccaa

SEQ ID NO: 115441 - DNA, 25 bp, Homo sapien
acaggacccgtgacatggtccacac

SEQ ID NO: 115442 - DNA, 25 bp, Homo sapien
acaggacccgtgtcatggtccacac

SEQ ID NO: 115443 - DNA, 25 bp, Homo sapien
atcaatcacttttgtaggtcaccgg

SEQ ID NO: 115444 - DNA, 25 bp, Homo sapien
atcaatcactttagtaggtcaccgg

SEQ ID NO: 115445 - DNA, 25 bp, Homo sapien
ctgaaccactgtctatcataaacgg

SEQ ID NO: 115446 - DNA, 25 bp, Homo sapien
ctgaaccactgtgtatcataaacgg

SEQ ID NO: 115447 - DNA, 25 bp, Homo sapien
atgaacaactgtaaagggtacccct

SEQ ID NO: 115448 - DNA, 25 bp, Homo sapien
atgaacaactgttaagggtacccct

SEQ ID NO: 115449 - DNA, 25 bp, Homo sapien
ttgaaccgcactacgggcttccggt

SEQ ID NO: 115450 - DNA, 25 bp, Homo sapien
ttgaaccgcacttcgggcttccggt

SEQ ID NO: 115451 - DNA, 25 bp, Homo sapien
gggtttccgacacaacttctccaac

SEQ ID NO: 115452 - DNA, 25 bp, Homo sapien
gggtttccgacagaacttctccaac

SEQ ID NO: 115453 - DNA, 25 bp, Homo sapien
acgtgtttgacgataaaatccaaat

SEQ ID NO: 115454 - DNA, 25 bp, Homo sapien
acgtgtttgacgttaaaatccaaat

SEQ ID NO: 115455 - DNA, 25 bp, Homo sapien
aggttagttaatatctccaccgaaa

SEQ ID NO: 115456 - DNA, 25 bp, Homo sapien
aggttagttaatttctccaccgaaa

SEQ ID NO: 115457 - DNA, 25 bp, Homo sapien
cttcaacatcctcgacatgacgaag

SEQ ID NO: 115458 - DNA, 25 bp, Homo sapien
cttcaacatcctggacatgacgaag

SEQ ID NO: 115459 - DNA, 25 bp, Homo sapien
gtcccgactctcctggctggagtcg

SEQ ID NO: 115460 - DNA, 25 bp, Homo sapien
gtcccgactctcgtggctggagtcg

SEQ ID NO: 115461 - DNA, 25 bp, Homo sapien
ggtccctacttcgtctgccggagcg

SEQ ID NO: 115462 - DNA, 25 bp, Homo sapien
ggtccctacttcctctgccggagcg

SEQ ID NO: 115463 - DNA, 25 bp, Homo sapien
actctctcttcgtccttacggggca

SEQ ID NO: 115464 - DNA, 25 bp, Homo sapien
actctctcttcgaccttacggggca

SEQ ID NO: 115465 - DNA, 25 bp, Homo sapien
gttcttttgccctgtcggggtacta

SEQ ID NO: 115466 - DNA, 25 bp, Homo sapien
gttcttttgcccagtcggggtacta

SEQ ID NO: 115467 - DNA, 25 bp, Homo sapien
accttatcagggtttcggtcggcta

SEQ ID NO: 115468 - DNA, 25 bp, Homo sapien
accttatcagggattcggtcggcta

SEQ ID NO: 115469 - DNA, 25 bp, Homo sapien
gacggtccatggattcgttcagtca

SEQ ID NO: 115470 - DNA, 25 bp, Homo sapien
gacggtccatggtttcgttcagtca

SEQ ID NO: 115471 - DNA, 25 bp, Homo sapien
gactcttccgagtgcttcccgtagg

SEQ ID NO: 115472 - DNA, 25 bp, Homo sapien
gactcttccgagagcttcccgtagg

SEQ ID NO: 115473 - DNA, 25 bp, Homo sapien
gtatgctacaaacactacgttggtt

SEQ ID NO: 115474 - DNA, 25 bp, Homo sapien
gtatgctacaaagactacgttggtt

SEQ ID NO: 115475 - DNA, 25 bp, Homo sapien
cgtaaggctagaacccaaataagtt

SEQ ID NO: 115476 - DNA, 25 bp, Homo sapien
cgtaaggctagatcccaaataagtt

SEQ ID NO: 115477 - DNA, 25 bp, Homo sapien
ggaccaaaggattaccctaaaagtc

SEQ ID NO: 115478 - DNA, 25 bp, Homo sapien
ggaccaaaggataaccctaaaagtc

SEQ ID NO: 115479 - DNA, 25 bp, Homo sapien
gataggtgacatcctacaaaacggt

SEQ ID NO: 115480 - DNA, 25 bp, Homo sapien
gataggtgacatgctacaaaacggt

SEQ ID NO: 115481 - DNA, 25 bp, Homo sapien
cccagggaccatttatcagaagacg

SEQ ID NO: 115482 - DNA, 25 bp, Homo sapien
cccagggaccatatatcagaagacg

SEQ ID NO: 115483 - DNA, 25 bp, Homo sapien
cgtggtctaacaggaacacctccgc

SEQ ID NO: 115484 - DNA, 25 bp, Homo sapien
cgtggtctaacacgaacacctccgc

SEQ ID NO: 115485 - DNA, 25 bp, Homo sapien
gactgagatgaaccattacctccac

SEQ ID NO: 115486 - DNA, 25 bp, Homo sapien
gactgagatgaagcattacctccac

SEQ ID NO: 115487 - DNA, 25 bp, Homo sapien
gagctcgaatagaaggaaccaccca

SEQ ID NO: 115488 - DNA, 25 bp, Homo sapien
gagctcgaatagtaggaaccaccca

SEQ ID NO: 115489 - DNA, 25 bp, Homo sapien
tcatggtagatagattctacctcct

SEQ ID NO: 115490 - DNA, 25 bp, Homo sapien
tcatggtagatacattctacctcct

SEQ ID NO: 115491 - DNA, 25 bp, Homo sapien
acgagaagagctcctcatagacaca

SEQ ID NO: 115492 - DNA, 25 bp, Homo sapien
acgagaagagctgctcatagacaca

SEQ ID NO: 115493 - DNA, 25 bp, Homo sapien
aagaaagggtcttactctgaccgag

SEQ ID NO: 115494 - DNA, 25 bp, Homo sapien
aagaaagggtctaactctgaccgag

SEQ ID NO: 115495 - DNA, 25 bp, Homo sapien
gttttaaacaaagaccattgttctg

SEQ ID NO: 115496 - DNA, 25 bp, Homo sapien
gttttaaacaaacaccattgttctg

SEQ ID NO: 115497 - DNA, 25 bp, Homo sapien
ttctaaaggtataccataacgtttg

SEQ ID NO: 115498 - DNA, 25 bp, Homo sapien
ttctaaaggtattccataacgtttg

SEQ ID NO: 115499 - DNA, 25 bp, Homo sapien
aggacacaggattccggtccctatt

SEQ ID NO: 115500 - DNA, 25 bp, Homo sapien
aggacacaggataccggtccctatt

SEQ ID NO: 115501 - DNA, 25 bp, Homo sapien
gagagaatcattaccgtcagaaggt

SEQ ID NO: 115502 - DNA, 25 bp, Homo sapien
gagagaatcatttccgtcagaaggt

SEQ ID NO: 115503 - DNA, 25 bp, Homo sapien
cagggagtttcttggagactacagg

SEQ ID NO: 115504 - DNA, 25 bp, Homo sapien
cagggagtttctaggagactacagg

SEQ ID NO: 115505 - DNA, 25 bp, Homo sapien
atacgaccgtttatcggaacacatg

SEQ ID NO: 115506 - DNA, 25 bp, Homo sapien
atacgaccgtttttcggaacacatg

SEQ ID NO: 115507 - DNA, 25 bp, Homo sapien
aggtttcccgtttccgttttatggt

SEQ ID NO: 115508 - DNA, 25 bp, Homo sapien
aggtttcccgttaccgttttatggt

SEQ ID NO: 115509 - DNA, 25 bp, Homo sapien
gtgtagttcatgtttcatccgttta

SEQ ID NO: 115510 - DNA, 25 bp, Homo sapien
gtgtagttcatgattcatccgttta

SEQ ID NO: 115511 - DNA, 25 bp, Homo sapien
tgacggttgactagaacatgatttc

SEQ ID NO: 115512 - DNA, 25 bp, Homo sapien
tgacggttgacttgaacatgatttc

SEQ ID NO: 115513 - DNA, 25 bp, Homo sapien
ggactaggttcttggaggaatttcc

SEQ ID NO: 115514 - DNA, 25 bp, Homo sapien
ggactaggttctaggaggaatttcc

SEQ ID NO: 115515 - DNA, 25 bp, Homo sapien
cgatagggtgtgtgggacccttacc

SEQ ID NO: 115516 - DNA, 25 bp, Homo sapien
cgatagggtgtgagggacccttacc

SEQ ID NO: 115517 - DNA, 25 bp, Homo sapien
aaaggatgatatacatccttcgacg

SEQ ID NO: 115518 - DNA, 25 bp, Homo sapien
aaaggatgatattcatccttcgacg

SEQ ID NO: 115519 - DNA, 25 bp, Homo sapien
agagacaaggtatgtgcaacatcgg

SEQ ID NO: 115520 - DNA, 25 bp, Homo sapien
agagacaaggtaagtgcaacatcgg

SEQ ID NO: 115521 - DNA, 25 bp, Homo sapien
taataagttcaacagtcaatgacga

SEQ ID NO: 115522 - DNA, 25 bp, Homo sapien
taataagttcaagagtcaatgacga

SEQ ID NO: 115523 - DNA, 25 bp, Homo sapien
actttatttcctcctcagggtagaa

SEQ ID NO: 115524 - DNA, 25 bp, Homo sapien
actttatttcctgctcagggtagaa

SEQ ID NO: 115525 - DNA, 25 bp, Homo sapien
atttttctgtgctcagtcctaaacg

SEQ ID NO: 115526 - DNA, 25 bp, Homo sapien
atttttctgtgcacagtcctaaacg

SEQ ID NO: 115527 - DNA, 25 bp, Homo sapien
tcgatttcttggaatactcatgaag

SEQ ID NO: 115528 - DNA, 25 bp, Homo sapien
tcgatttcttggtatactcatgaag

SEQ ID NO: 115529 - DNA, 25 bp, Homo sapien
attccgtgaactttaggtacccggt

SEQ ID NO: 115530 - DNA, 25 bp, Homo sapien
attccgtgaactataggtacccggt

SEQ ID NO: 115531 - DNA, 25 bp, Homo sapien
gattctcaagtagactaggttccag

SEQ ID NO: 115532 - DNA, 25 bp, Homo sapien
gattctcaagtacactaggttccag

SEQ ID NO: 115533 - DNA, 25 bp, Homo sapien
aaaacgtggttacataggtattcac

SEQ ID NO: 115534 - DNA, 25 bp, Homo sapien
aaaacgtggttagataggtattcac

SEQ ID NO: 115535 - DNA, 25 bp, Homo sapien
aagaggaactttcttgtcttactag

SEQ ID NO: 115536 - DNA, 25 bp, Homo sapien
aagaggaactttgttgtcttactag

SEQ ID NO: 115537 - DNA, 25 bp, Homo sapien
caatgaaagtgtgcacttttgtcct

SEQ ID NO: 115538 - DNA, 25 bp, Homo sapien
caatgaaagtgtccacttttgtcct

SEQ ID NO: 115539 - DNA, 25 bp, Homo sapien
gacatggagaaaagtccttttgtct

SEQ ID NO: 115540 - DNA, 25 bp, Homo sapien
gacatggagaaatgtccttttgtct

SEQ ID NO: 115541 - DNA, 25 bp, Homo sapien
ttgtgaagtccatgtacctttttct

SEQ ID NO: 115542 - DNA, 25 bp, Homo sapien
ttgtgaagtccaagtacctttttct

SEQ ID NO: 115543 - DNA, 25 bp, Homo sapien
atagaacatcactacttgttttgtg

SEQ ID NO: 115544 - DNA, 25 bp, Homo sapien
atagaacatcacaacttgttttgtg

SEQ ID NO: 115545 - DNA, 25 bp, Homo sapien
gtaagacccccaatagcgaggaaga

SEQ ID NO: 115546 - DNA, 25 bp, Homo sapien
gtaagacccccattagcgaggaaga

SEQ ID NO: 115547 - DNA, 25 bp, Homo sapien
ttagtcccccatagaggaccgagtc

SEQ ID NO: 115548 - DNA, 25 bp, Homo sapien
ttagtcccccattgaggaccgagtc

SEQ ID NO: 115549 - DNA, 25 bp, Homo sapien
taatttccgctgtggagacgtgggt

SEQ ID NO: 115550 - DNA, 25 bp, Homo sapien
taatttccgctgaggagacgtgggt

SEQ ID NO: 115551 - DNA, 25 bp, Homo sapien
aatttccgctgtggagacgtgggta

SEQ ID NO: 115552 - DNA, 25 bp, Homo sapien
aatttccgctgtcgagacgtgggta

SEQ ID NO: 115553 - DNA, 25 bp, Homo sapien
tccggggtcccgactacggtggtat

SEQ ID NO: 115554 - DNA, 25 bp, Homo sapien
tccggggtcccgtctacggtggtat

SEQ ID NO: 115555 - DNA, 25 bp, Homo sapien
tcctgaagttccaacctaccgggtc

SEQ ID NO: 115556 - DNA, 25 bp, Homo sapien
tcctgaagttcctacctaccgggtc

SEQ ID NO: 115557 - DNA, 25 bp, Homo sapien
ggggtgtccgtcgtcctagacctgc

SEQ ID NO: 115558 - DNA, 25 bp, Homo sapien
ggggtgtccgtcctcctagacctgc

SEQ ID NO: 115559 - DNA, 25 bp, Homo sapien
ggctcatgaacgtcttccacacagg

SEQ ID NO: 115560 - DNA, 25 bp, Homo sapien
ggctcatgaacgacttccacacagg

SEQ ID NO: 115561 - DNA, 25 bp, Homo sapien
agtaaccatgaattttcctcttgag

SEQ ID NO: 115562 - DNA, 25 bp, Homo sapien
agtaaccatgaaatttcctcttgag

SEQ ID NO: 115563 - DNA, 25 bp, Homo sapien
aagagacacgtagttccctgtagac

SEQ ID NO: 115564 - DNA, 25 bp, Homo sapien
aagagacacgtacttccctgtagac

SEQ ID NO: 115565 - DNA, 25 bp, Homo sapien
gagcttatatttcctatagtacacg

SEQ ID NO: 115566 - DNA, 25 bp, Homo sapien
gagcttatatttgctatagtacacg

SEQ ID NO: 115567 - DNA, 25 bp, Homo sapien
gtgtctcgttacttccagactcgta

SEQ ID NO: 115568 - DNA, 25 bp, Homo sapien
gtgtctcgttacatccagactcgta

SEQ ID NO: 115569 - DNA, 25 bp, Homo sapien
ccgtcctgtttagtccggtcgtgcg

SEQ ID NO: 115570 - DNA, 25 bp, Homo sapien
ccgtcctgtttactccggtcgtgcg

SEQ ID NO: 115571 - DNA, 25 bp, Homo sapien
ttccgtcagaccttttccgcgggcg

SEQ ID NO: 115572 - DNA, 25 bp, Homo sapien
ttccgtcagaccatttccgcgggcg

SEQ ID NO: 115573 - DNA, 25 bp, Homo sapien
gtccactaccaggtggtccggggtt

SEQ ID NO: 115574 - DNA, 25 bp, Homo sapien
gtccactaccagctggtccggggtt

SEQ ID NO: 115575 - DNA, 25 bp, Homo sapien
ccccgtagaccgttgtaggccgtat

SEQ ID NO: 115576 - DNA, 25 bp, Homo sapien
ccccgtagaccgatgtaggccgtat

SEQ ID NO: 115577 - DNA, 25 bp, Homo sapien
ggtcctaccaatcacgttgagccct

SEQ ID NO: 115578 - DNA, 25 bp, Homo sapien
ggtcctaccaatgacgttgagccct

SEQ ID NO: 115579 - DNA, 25 bp, Homo sapien
gagcctcggaactgaggtcaccccg

SEQ ID NO: 115580 - DNA, 25 bp, Homo sapien
gagcctcggaacagaggtcaccccg

SEQ ID NO: 115581 - DNA, 25 bp, Homo sapien
aacgagactaaggtacctacactgg

SEQ ID NO: 115582 - DNA, 25 bp, Homo sapien
aacgagactaagctacctacactgg

SEQ ID NO: 115583 - DNA, 25 bp, Homo sapien
taaacgactccgacctactactgtg

SEQ ID NO: 115584 - DNA, 25 bp, Homo sapien
taaacgactccgtcctactactgtg

SEQ ID NO: 115585 - DNA, 25 bp, Homo sapien
tgtcggaactccttcctcagtaccg

SEQ ID NO: 115586 - DNA, 25 bp, Homo sapien
tgtcggaactccatcctcagtaccg

SEQ ID NO: 115587 - DNA, 25 bp, Homo sapien
gggccgattaacctgttcctccttc

SEQ ID NO: 115588 - DNA, 25 bp, Homo sapien
gggccgattaacgtgttcctccttc

SEQ ID NO: 115589 - DNA, 25 bp, Homo sapien
ccccgtgacgaacgttccgtgcatt

SEQ ID NO: 115590 - DNA, 25 bp, Homo sapien
ccccgtgacgaaggttccgtgcatt

SEQ ID NO: 115591 - DNA, 25 bp, Homo sapien
ccctttgtactaaatgttgtgccct

SEQ ID NO: 115592 - DNA, 25 bp, Homo sapien
ccctttgtactatatgttgtgccct

SEQ ID NO: 115593 - DNA, 25 bp, Homo sapien
tgatgatctctctgatgtgtccacc

SEQ ID NO: 115594 - DNA, 25 bp, Homo sapien
tgatgatctctcagatgtgtccacc

SEQ ID NO: 115595 - DNA, 25 bp, Homo sapien
tttattccgttgtcgttctacacga

SEQ ID NO: 115596 - DNA, 25 bp, Homo sapien
tttattccgttgacgttctacacga

SEQ ID NO: 115597 - DNA, 25 bp, Homo sapien
acttcttaatttcctatgttacaca

SEQ ID NO: 115598 - DNA, 25 bp, Homo sapien
acttcttaatttgctatgttacaca

SEQ ID NO: 115599 - DNA, 25 bp, Homo sapien
gtgtgtctcatgtttcatttccact

SEQ ID NO: 115600 - DNA, 25 bp, Homo sapien
gtgtgtctcatgattcatttccact

SEQ ID NO: 115601 - DNA, 25 bp, Homo sapien
tttggttgtgtatttccactaccac

SEQ ID NO: 115602 - DNA, 25 bp, Homo sapien
tttggttgtgtaattccactaccac

SEQ ID NO: 115603 - DNA, 25 bp, Homo sapien
gtgtgcggtgaatcttttctcgcag

SEQ ID NO: 115604 - DNA, 25 bp, Homo sapien
gtgtgcggtgaaacttttctcgcag

SEQ ID NO: 115605 - DNA, 25 bp, Homo sapien
ctgagcagggtacttatcttaacat

SEQ ID NO: 115606 - DNA, 25 bp, Homo sapien
ctgagcagggtagttatcttaacat

SEQ ID NO: 115607 - DNA, 25 bp, Homo sapien
ccaaacgtgtatatgtgttgtacta

SEQ ID NO: 115608 - DNA, 25 bp, Homo sapien
ccaaacgtgtatttgtgttgtacta

SEQ ID NO: 115609 - DNA, 25 bp, Homo sapien
caacccgtccttcttgtcgtggttg

SEQ ID NO: 115610 - DNA, 25 bp, Homo sapien
caacccgtccttgttgtcgtggttg

SEQ ID NO: 115611 - DNA, 25 bp, Homo sapien
ttaaacggttttttggtcctcttct

SEQ ID NO: 115612 - DNA, 25 bp, Homo sapien
ttaaacggttttatggtcctcttct

SEQ ID NO: 115613 - DNA, 25 bp, Homo sapien
acccaccgggaaagacgtcctcttt

SEQ ID NO: 115614 - DNA, 25 bp, Homo sapien
acccaccgggaatgacgtcctcttt

SEQ ID NO: 115615 - DNA, 25 bp, Homo sapien
ccgcccggtgtgagaacctcggagc

SEQ ID NO: 115616 - DNA, 25 bp, Homo sapien
ccgcccggtgtgtgaacctcggagc

SEQ ID NO: 115617 - DNA, 25 bp, Homo sapien
tccccgtcgtgtcagtaaatttgaa

SEQ ID NO: 115618 - DNA, 25 bp, Homo sapien
tccccgtcgtgtgagtaaatttgaa

SEQ ID NO: 115619 - DNA, 25 bp, Homo sapien
ctcaggatatagtgttttactgtac

SEQ ID NO: 115620 - DNA, 25 bp, Homo sapien
ctcaggatatagagttttactgtac

SEQ ID NO: 115621 - DNA, 25 bp, Homo sapien
tgtcttgggaagtttcttgcaggac

SEQ ID NO: 115622 - DNA, 25 bp, Homo sapien
tgtcttgggaagattcttgcaggac

SEQ ID NO: 115623 - DNA, 25 bp, Homo sapien
ggcttatagcccttttctgcagata

SEQ ID NO: 115624 - DNA, 25 bp, Homo sapien
ggcttatagcccatttctgcagata

SEQ ID NO: 115625 - DNA, 25 bp, Homo sapien
agacttaagtatcgtgagtcgacga

SEQ ID NO: 115626 - DNA, 25 bp, Homo sapien
agacttaagtatggtgagtcgacga

SEQ ID NO: 115627 - DNA, 25 bp, Homo sapien
gtccctcggggtaccggtcgtaccg

SEQ ID NO: 115628 - DNA, 25 bp, Homo sapien
gtccctcggggttccggtcgtaccg

SEQ ID NO: 115629 - DNA, 25 bp, Homo sapien
gacccctgtcggagtcgagtgtctg

SEQ ID NO: 115630 - DNA, 25 bp, Homo sapien
gacccctgtcggtgtcgagtgtctg

SEQ ID NO: 115631 - DNA, 25 bp, Homo sapien
gtccctgtggcagtcgagtaccgta

SEQ ID NO: 115632 - DNA, 25 bp, Homo sapien
gtccctgtggcactcgagtaccgta

SEQ ID NO: 115633 - DNA, 25 bp, Homo sapien
tgtcacttcgactcatctgatattg

SEQ ID NO: 115634 - DNA, 25 bp, Homo sapien
tgtcacttcgacacatctgatattg

SEQ ID NO: 115635 - DNA, 25 bp, Homo sapien
ggtctatagttgacaatgtctttac

SEQ ID NO: 115636 - DNA, 25 bp, Homo sapien
ggtctatagttgtcaatgtctttac

SEQ ID NO: 115637 - DNA, 25 bp, Homo sapien
aaattattgggtcacccagtgtcga

SEQ ID NO: 115638 - DNA, 25 bp, Homo sapien
aaattattgggtgacccagtgtcga

SEQ ID NO: 115639 - DNA, 25 bp, Homo sapien
aggagtaatgggtcgcactgtactt

SEQ ID NO: 115640 - DNA, 25 bp, Homo sapien
aggagtaatgggacgcactgtactt

SEQ ID NO: 115641 - DNA, 25 bp, Homo sapien
agttaagtccacactccgtgtatat

SEQ ID NO: 115642 - DNA, 25 bp, Homo sapien
agttaagtccactctccgtgtatat

SEQ ID NO: 115643 - DNA, 25 bp, Homo sapien
acacgaaaggcacctagaggtgttt

SEQ ID NO: 115644 - DNA, 25 bp, Homo sapien
acacgaaaggcagctagaggtgttt

SEQ ID NO: 115645 - DNA, 25 bp, Homo sapien
agacagaagggtgtctcaccgattt

SEQ ID NO: 115646 - DNA, 25 bp, Homo sapien
agacagaagggtctctcaccgattt

SEQ ID NO: 115647 - DNA, 25 bp, Homo sapien
aaaaaacggagcacttacagtattt

SEQ ID NO: 115648 - DNA, 25 bp, Homo sapien
aaaaaacggagctcttacagtattt

SEQ ID NO: 115649 - DNA, 25 bp, Homo sapien
gaggatagaatgtatccttacgttc

SEQ ID NO: 115650 - DNA, 25 bp, Homo sapien
gaggatagaatgaatccttacgttc

SEQ ID NO: 115651 - DNA, 25 bp, Homo sapien
aacgtgagacaagaggtccgcttca

SEQ ID NO: 115652 - DNA, 25 bp, Homo sapien
aacgtgagacaacaggtccgcttca

SEQ ID NO: 115653 - DNA, 25 bp, Homo sapien
accacaaatcgactacctccgtgtc

SEQ ID NO: 115654 - DNA, 25 bp, Homo sapien
accacaaatcgagtacctccgtgtc

SEQ ID NO: 115655 - DNA, 25 bp, Homo sapien
gaaaagaacggaccacagtcctgtc

SEQ ID NO: 115656 - DNA, 25 bp, Homo sapien
gaaaagaacggagcacagtcctgtc

SEQ ID NO: 115657 - DNA, 25 bp, Homo sapien
tctcactacggatacccgagactgt

SEQ ID NO: 115658 - DNA, 25 bp, Homo sapien
tctcactacggaaacccgagactgt

SEQ ID NO: 115659 - DNA, 25 bp, Homo sapien
acagggacccaggatttaaggactt

SEQ ID NO: 115660 - DNA, 25 bp, Homo sapien
acagggacccagcatttaaggactt

SEQ ID NO: 115661 - DNA, 25 bp, Homo sapien
tgaggtgaatggggtcccatatccg

SEQ ID NO: 115662 - DNA, 25 bp, Homo sapien
tgaggtgaatggcgtcccatatccg

SEQ ID NO: 115663 - DNA, 25 bp, Homo sapien
cgaggaaacccgtacatccaacctg

SEQ ID NO: 115664 - DNA, 25 bp, Homo sapien
cgaggaaacccgaacatccaacctg

SEQ ID NO: 115665 - DNA, 25 bp, Homo sapien
tggacaactcacacttaggagaatt

SEQ ID NO: 115666 - DNA, 25 bp, Homo sapien
tggacaactcactcttaggagaatt

SEQ ID NO: 115667 - DNA, 25 bp, Homo sapien
aaacagtaccatagtatgtaacata

SEQ ID NO: 115668 - DNA, 25 bp, Homo sapien
aaacagtaccattgtatgtaacata

SEQ ID NO: 115669 - DNA, 25 bp, Homo sapien
caaatacataccattaatgtctaaa

SEQ ID NO: 115670 - DNA, 25 bp, Homo sapien
caaatacatacctttaatgtctaaa

SEQ ID NO: 115671 - DNA, 25 bp, Homo sapien
tcaaatctgaggttaattccgtaaa

SEQ ID NO: 115672 - DNA, 25 bp, Homo sapien
tcaaatctgaggataattccgtaaa

SEQ ID NO: 115673 - DNA, 25 bp, Homo sapien
cagaactctgggaaaatccgtcaca

SEQ ID NO: 115674 - DNA, 25 bp, Homo sapien
cagaactctgggtaaatccgtcaca

SEQ ID NO: 115675 - DNA, 25 bp, Homo sapien
caggtctgtctgtggtgtttcttta

SEQ ID NO: 115676 - DNA, 25 bp, Homo sapien
caggtctgtctgaggtgtttcttta

SEQ ID NO: 115677 - DNA, 25 bp, Homo sapien
ttcagttgcagttcttatattagac

SEQ ID NO: 115678 - DNA, 25 bp, Homo sapien
ttcagttgcagtacttatattagac

SEQ ID NO: 115679 - DNA, 25 bp, Homo sapien
tgttttgagtctcgttgagtactac

SEQ ID NO: 115680 - DNA, 25 bp, Homo sapien
tgttttgagtctggttgagtactac

SEQ ID NO: 115681 - DNA, 25 bp, Homo sapien
ggctaatggtcttgtctgagtcgtc

SEQ ID NO: 115682 - DNA, 25 bp, Homo sapien
ggctaatggtctagtctgagtcgtc

SEQ ID NO: 115683 - DNA, 25 bp, Homo sapien
tacgtcaatgtgtcagttcagacac

SEQ ID NO: 115684 - DNA, 25 bp, Homo sapien
tacgtcaatgtgacagttcagacac

SEQ ID NO: 115685 - DNA, 25 bp, Homo sapien
aagtaaatctcactgactccgaagt

SEQ ID NO: 115686 - DNA, 25 bp, Homo sapien
aagtaaatctcagtgactccgaagt

SEQ ID NO: 115687 - DNA, 25 bp, Homo sapien
taaagtccgtcctgtacccgtctgt

SEQ ID NO: 115688 - DNA, 25 bp, Homo sapien
taaagtccgtccagtacccgtctgt

SEQ ID NO: 115689 - DNA, 25 bp, Homo sapien
gaaacgaaggtctgaaacggtgctt

SEQ ID NO: 115690 - DNA, 25 bp, Homo sapien
gaaacgaaggtcagaaacggtgctt

SEQ ID NO: 115691 - DNA, 25 bp, Homo sapien
ccaatcatattctcttcggtcgttt

SEQ ID NO: 115692 - DNA, 25 bp, Homo sapien
ccaatcatattcacttcggtcgttt

SEQ ID NO: 115693 - DNA, 25 bp, Homo sapien
taatcttacagtctgagttttcttg

SEQ ID NO: 115694 - DNA, 25 bp, Homo sapien
taatcttacagtgtgagttttcttg

SEQ ID NO: 115695 - DNA, 25 bp, Homo sapien
gaccgtctgatgtggtattttccgt

SEQ ID NO: 115696 - DNA, 25 bp, Homo sapien
gaccgtctgatgaggtattttccgt

SEQ ID NO: 115697 - DNA, 25 bp, Homo sapien
atttcatgtagcttatactgttcgt

SEQ ID NO: 115698 - DNA, 25 bp, Homo sapien
atttcatgtagcatatactgttcgt

SEQ ID NO: 115699 - DNA, 25 bp, Homo sapien
ccaaagggtcatatttacttttcgt

SEQ ID NO: 115700 - DNA, 25 bp, Homo sapien
ccaaagggtcatttttacttttcgt

SEQ ID NO: 115701 - DNA, 25 bp, Homo sapien
caaccacagaagtttttcggttggt

SEQ ID NO: 115702 - DNA, 25 bp, Homo sapien
caaccacagaagattttcggttggt

SEQ ID NO: 115703 - DNA, 25 bp, Homo sapien
ccaagatgtaggtcggtcggtacgc

SEQ ID NO: 115704 - DNA, 25 bp, Homo sapien
ccaagatgtaggacggtcggtacgc

SEQ ID NO: 115705 - DNA, 25 bp, Homo sapien
tccatcctgtggtactcaccgtagc

SEQ ID NO: 115706 - DNA, 25 bp, Homo sapien
tccatcctgtggaactcaccgtagc

SEQ ID NO: 115707 - DNA, 25 bp, Homo sapien
cattcttctgggaaacttccgtccg

SEQ ID NO: 115708 - DNA, 25 bp, Homo sapien
cattcttctgggtaacttccgtccg

SEQ ID NO: 115709 - DNA, 25 bp, Homo sapien
ctctattatgactggcttcgtggac

SEQ ID NO: 115710 - DNA, 25 bp, Homo sapien
ctctattatgacaggcttcgtggac

SEQ ID NO: 115711 - DNA, 25 bp, Homo sapien
cctacagtatccagtgcatcgggtg

SEQ ID NO: 115712 - DNA, 25 bp, Homo sapien
cctacagtatcctgtgcatcgggtg

SEQ ID NO: 115713 - DNA, 25 bp, Homo sapien
ggtactccttcttgtgaaacactgg

SEQ ID NO: 115714 - DNA, 25 bp, Homo sapien
ggtactccttctagtgaaacactgg

SEQ ID NO: 115715 - DNA, 25 bp, Homo sapien
tttctttgacctacactgtctccgg

SEQ ID NO: 115716 - DNA, 25 bp, Homo sapien
tttctttgaccttcactgtctccgg

SEQ ID NO: 115717 - DNA, 25 bp, Homo sapien
ctgtgtttgatccatttacacccag

SEQ ID NO: 115718 - DNA, 25 bp, Homo sapien
ctgtgtttgatcgatttacacccag

SEQ ID NO: 115719 - DNA, 25 bp, Homo sapien
gaagtctttccacagtgttccccac

SEQ ID NO: 115720 - DNA, 25 bp, Homo sapien
gaagtctttccagagtgttccccac

SEQ ID NO: 115721 - DNA, 25 bp, Homo sapien
atgtcttacaacgaccagacccgca

SEQ ID NO: 115722 - DNA, 25 bp, Homo sapien
atgtcttacaaccaccagacccgca

SEQ ID NO: 115723 - DNA, 25 bp, Homo sapien
tcgtccggcgtcccgtggctccgcc

SEQ ID NO: 115724 - DNA, 25 bp, Homo sapien
tcgtccggcgtcgcgtggctccgcc

SEQ ID NO: 115725 - DNA, 25 bp, Homo sapien
tgcgtcgggactctggagtctcccg

SEQ ID NO: 115726 - DNA, 25 bp, Homo sapien
tgcgtcgggactgtggagtctcccg

SEQ ID NO: 115727 - DNA, 25 bp, Homo sapien
ttcgaggggattgtcggtcttctcc

SEQ ID NO: 115728 - DNA, 25 bp, Homo sapien
ttcgaggggattctcggtcttctcc

SEQ ID NO: 115729 - DNA, 25 bp, Homo sapien
tggaggtggtttctgtgacgttttc

SEQ ID NO: 115730 - DNA, 25 bp, Homo sapien
tggaggtggtttgtgtgacgttttc

SEQ ID NO: 115731 - DNA, 25 bp, Homo sapien
gacgcaaggttttgtcgatttatac

SEQ ID NO: 115732 - DNA, 25 bp, Homo sapien
gacgcaaggtttagtcgatttatac

SEQ ID NO: 115733 - DNA, 25 bp, Homo sapien
ggtcctgactatttagacaggttca

SEQ ID NO: 115734 - DNA, 25 bp, Homo sapien
ggtcctgactatatagacaggttca

SEQ ID NO: 115735 - DNA, 25 bp, Homo sapien
ctcctagtattaaagacactgttga

SEQ ID NO: 115736 - DNA, 25 bp, Homo sapien
ctcctagtattatagacactgttga

SEQ ID NO: 115737 - DNA, 25 bp, Homo sapien
cgacgcttgccgaagtccctggtgg

SEQ ID NO: 115738 - DNA, 25 bp, Homo sapien
cgacgcttgccgtagtccctggtgg

SEQ ID NO: 115739 - DNA, 25 bp, Homo sapien
tctctcttgcggacgtccaaagccg

SEQ ID NO: 115740 - DNA, 25 bp, Homo sapien
tctctcttgcggtcgtccaaagccg

SEQ ID NO: 115741 - DNA, 25 bp, Homo sapien
tcgatatcgaacttccactaaggtt

SEQ ID NO: 115742 - DNA, 25 bp, Homo sapien
tcgatatcgaacatccactaaggtt

SEQ ID NO: 115743 - DNA, 25 bp, Homo sapien
gactgaataaccatagcctgcttct

SEQ ID NO: 115744 - DNA, 25 bp, Homo sapien
gactgaataaccttagcctgcttct

SEQ ID NO: 115745 - DNA, 25 bp, Homo sapien
gtaccgtttagactaaatcatgttt

SEQ ID NO: 115746 - DNA, 25 bp, Homo sapien
gtaccgtttagagtaaatcatgttt

SEQ ID NO: 115747 - DNA, 25 bp, Homo sapien
acactgttcagcgtttcgtggtccg

SEQ ID NO: 115748 - DNA, 25 bp, Homo sapien
acactgttcagcctttcgtggtccg

SEQ ID NO: 115749 - DNA, 25 bp, Homo sapien
tttcactttcgacaagtcttgatga

SEQ ID NO: 115750 - DNA, 25 bp, Homo sapien
tttcactttcgagaagtcttgatga

SEQ ID NO: 115751 - DNA, 25 bp, Homo sapien
tttcccaccgagacttcccaggagt

SEQ ID NO: 115752 - DNA, 25 bp, Homo sapien
tttcccaccgagtcttcccaggagt

SEQ ID NO: 115753 - DNA, 25 bp, Homo sapien
ttgagttcgaagtagtcccgaagta

SEQ ID NO: 115754 - DNA, 25 bp, Homo sapien
ttgagttcgaagaagtcccgaagta

SEQ ID NO: 115755 - DNA, 25 bp, Homo sapien
tgaatcgaagtcgtacgcacatgta

SEQ ID NO: 115756 - DNA, 25 bp, Homo sapien
tgaatcgaagtcctacgcacatgta

SEQ ID NO: 115757 - DNA, 25 bp, Homo sapien
cgccccttctctttgtgcacggttg

SEQ ID NO: 115758 - DNA, 25 bp, Homo sapien
cgccccttctctatgtgcacggttg

SEQ ID NO: 115759 - DNA, 25 bp, Homo sapien
ccccgactcctgttgcgaagcggag

SEQ ID NO: 115760 - DNA, 25 bp, Homo sapien
ccccgactcctgatgcgaagcggag

SEQ ID NO: 115761 - DNA, 25 bp, Homo sapien
accctgtataccagagggccggtgg

SEQ ID NO: 115762 - DNA, 25 bp, Homo sapien
accctgtatacctgagggccggtgg

SEQ ID NO: 115763 - DNA, 25 bp, Homo sapien
ccttctggactggaggcagacgttg

SEQ ID NO: 115764 - DNA, 25 bp, Homo sapien
ccttctggactgcaggcagacgttg

SEQ ID NO: 115765 - DNA, 25 bp, Homo sapien
cctcgtgacctctgctccggtagtg

SEQ ID NO: 115766 - DNA, 25 bp, Homo sapien
cctcgtgacctcagctccggtagtg

SEQ ID NO: 115767 - DNA, 25 bp, Homo sapien
ctcgtaccacgtgagcgtgagagtc

SEQ ID NO: 115768 - DNA, 25 bp, Homo sapien
ctcgtaccacgtcagcgtgagagtc

SEQ ID NO: 115769 - DNA, 25 bp, Homo sapien
cggtactactactggcggacactag

SEQ ID NO: 115770 - DNA, 25 bp, Homo sapien
cggtactactacaggcggacactag

SEQ ID NO: 115771 - DNA, 25 bp, Homo sapien
cctcgagctcttcaaaggcgaccgt

SEQ ID NO: 115772 - DNA, 25 bp, Homo sapien
cctcgagctcttgaaaggcgaccgt

SEQ ID NO: 115773 - DNA, 25 bp, Homo sapien
tagtacctccgtcacctagtggatc

SEQ ID NO: 115774 - DNA, 25 bp, Homo sapien
tagtacctccgtgacctagtggatc

SEQ ID NO: 115775 - DNA, 25 bp, Homo sapien
cggggtaataaacctactatgagat

SEQ ID NO: 115776 - DNA, 25 bp, Homo sapien
cggggtaataaagctactatgagat

SEQ ID NO: 115777 - DNA, 25 bp, Homo sapien
gttcgggtaagaaacaactatcgga

SEQ ID NO: 115778 - DNA, 25 bp, Homo sapien
gttcgggtaagatacaactatcgga

SEQ ID NO: 115779 - DNA, 25 bp, Homo sapien
ttcgtcgtctcaattctgcagaggg

SEQ ID NO: 115780 - DNA, 25 bp, Homo sapien
ttcgtcgtctcatttctgcagaggg

SEQ ID NO: 115781 - DNA, 25 bp, Homo sapien
gacggtctcaccattggacgatgag

SEQ ID NO: 115782 - DNA, 25 bp, Homo sapien
gacggtctcacctttggacgatgag

SEQ ID NO: 115783 - DNA, 25 bp, Homo sapien
agggtctacccctgtctcacgatga

SEQ ID NO: 115784 - DNA, 25 bp, Homo sapien
agggtctaccccagtctcacgatga

SEQ ID NO: 115785 - DNA, 25 bp, Homo sapien
gtgtcaccttacagttctcaccgtc

SEQ ID NO: 115786 - DNA, 25 bp, Homo sapien
gtgtcaccttactgttctcaccgtc

SEQ ID NO: 115787 - DNA, 25 bp, Homo sapien
ctaccccttttttcgtggtccagtc

SEQ ID NO: 115788 - DNA, 25 bp, Homo sapien
ctacccctttttacgtggtccagtc

SEQ ID NO: 115789 - DNA, 25 bp, Homo sapien
accgtattgttttgtcggtacaaat

SEQ ID NO: 115790 - DNA, 25 bp, Homo sapien
accgtattgtttagtcggtacaaat

SEQ ID NO: 115791 - DNA, 25 bp, Homo sapien
aataaagtcctgtacggtacagttt

SEQ ID NO: 115792 - DNA, 25 bp, Homo sapien
aataaagtcctgaacggtacagttt

SEQ ID NO: 115793 - DNA, 25 bp, Homo sapien
gagtataagaaactgccaaacattt

SEQ ID NO: 115794 - DNA, 25 bp, Homo sapien
gagtataagaaagtgccaaacattt

SEQ ID NO: 115795 - DNA, 25 bp, Homo sapien
gtagggaaagggtccacacacgacc

SEQ ID NO: 115796 - DNA, 25 bp, Homo sapien
gtagggaaagggaccacacacgacc

SEQ ID NO: 115797 - DNA, 25 bp, Homo sapien
gaggtaagacctaagccgccaaggc

SEQ ID NO: 115798 - DNA, 25 bp, Homo sapien
gaggtaagaccttagccgccaaggc

SEQ ID NO: 115799 - DNA, 25 bp, Homo sapien
gagtaagaccttggtcaggaatgtc

SEQ ID NO: 115800 - DNA, 25 bp, Homo sapien
gagtaagaccttcgtcaggaatgtc

SEQ ID NO: 115801 - DNA, 25 bp, Homo sapien
ggtcgaactttttgtgacataaatc

SEQ ID NO: 115802 - DNA, 25 bp, Homo sapien
ggtcgaacttttagtgacataaatc

SEQ ID NO: 115803 - DNA, 25 bp, Homo sapien
cacttattggaaggacagatctctc

SEQ ID NO: 115804 - DNA, 25 bp, Homo sapien
cacttattggaacgacagatctctc

SEQ ID NO: 115805 - DNA, 25 bp, Homo sapien
aacatatggagtattacagattccg

SEQ ID NO: 115806 - DNA, 25 bp, Homo sapien
aacatatggagttttacagattccg

SEQ ID NO: 115807 - DNA, 25 bp, Homo sapien
caaaatgaagtctttcataggtcag

SEQ ID NO: 115808 - DNA, 25 bp, Homo sapien
caaaatgaagtcattcataggtcag

SEQ ID NO: 115809 - DNA, 25 bp, Homo sapien
acttggtcaaatctgttttgacgac

SEQ ID NO: 115810 - DNA, 25 bp, Homo sapien
acttggtcaaatgtgttttgacgac

SEQ ID NO: 115811 - DNA, 25 bp, Homo sapien
gtacgtactacacaaagtcttgaat

SEQ ID NO: 115812 - DNA, 25 bp, Homo sapien
gtacgtactacagaaagtcttgaat

SEQ ID NO: 115813 - DNA, 25 bp, Homo sapien
gagaactctatatagacgtccaaca

SEQ ID NO: 115814 - DNA, 25 bp, Homo sapien
gagaactctataaagacgtccaaca

SEQ ID NO: 115815 - DNA, 25 bp, Homo sapien
ggaattctacacagagacacacaca

SEQ ID NO: 115816 - DNA, 25 bp, Homo sapien
ggaattctacactgagacacacaca

SEQ ID NO: 115817 - DNA, 25 bp, Homo sapien
cagggaatgtctactttctcccgca

SEQ ID NO: 115818 - DNA, 25 bp, Homo sapien
cagggaatgtcttctttctcccgca

SEQ ID NO: 115819 - DNA, 25 bp, Homo sapien
ggaagatacactactttgtccatcc

SEQ ID NO: 115820 - DNA, 25 bp, Homo sapien
ggaagatacacttctttgtccatcc

SEQ ID NO: 115821 - DNA, 25 bp, Homo sapien
gttttaagtttgtcctcgtctctac

SEQ ID NO: 115822 - DNA, 25 bp, Homo sapien
gttttaagtttgacctcgtctctac

SEQ ID NO: 115823 - DNA, 25 bp, Homo sapien
aggttgaatctcttggactttttac

SEQ ID NO: 115824 - DNA, 25 bp, Homo sapien
aggttgaatctcatggactttttac

SEQ ID NO: 115825 - DNA, 25 bp, Homo sapien
aagtacattgtctctgatttttctc

SEQ ID NO: 115826 - DNA, 25 bp, Homo sapien
aagtacattgtcactgatttttctc

SEQ ID NO: 115827 - DNA, 25 bp, Homo sapien
ggaagtcttgaccaaataatcatcc

SEQ ID NO: 115828 - DNA, 25 bp, Homo sapien
ggaagtcttgacgaaataatcatcc

SEQ ID NO: 115829 - DNA, 25 bp, Homo sapien
gattttacagtcactcttcttgacg

SEQ ID NO: 115830 - DNA, 25 bp, Homo sapien
gattttacagtctctcttcttgacg

SEQ ID NO: 115831 - DNA, 25 bp, Homo sapien
caaaggaagtacgtactgtgtacga

SEQ ID NO: 115832 - DNA, 25 bp, Homo sapien
caaaggaagtacctactgtgtacga

SEQ ID NO: 115833 - DNA, 25 bp, Homo sapien
ctttagaacgaaagtccgttcccga

SEQ ID NO: 115834 - DNA, 25 bp, Homo sapien
ctttagaacgaatgtccgttcccga

SEQ ID NO: 115835 - DNA, 25 bp, Homo sapien
ttacgagttaagtccaccgtactaa

SEQ ID NO: 115836 - DNA, 25 bp, Homo sapien
ttacgagttaagaccaccgtactaa

SEQ ID NO: 115837 - DNA, 25 bp, Homo sapien
actttactcttctcggggcaagaag

SEQ ID NO: 115838 - DNA, 25 bp, Homo sapien
actttactcttcacggggcaagaag

SEQ ID NO: 115839 - DNA, 25 bp, Homo sapien
ccgtctcttctggtaccctcaaggg

SEQ ID NO: 115840 - DNA, 25 bp, Homo sapien
ccgtctcttctgctaccctcaaggg

SEQ ID NO: 115841 - DNA, 25 bp, Homo sapien
gtgactcaactggagacatcggaaa

SEQ ID NO: 115842 - DNA, 25 bp, Homo sapien
gtgactcaactgcagacatcggaaa

SEQ ID NO: 115843 - DNA, 25 bp, Homo sapien
ccctcaactcgcagcccgagagagg

SEQ ID NO: 115844 - DNA, 25 bp, Homo sapien
ccctcaactcgctgcccgagagagg

SEQ ID NO: 115845 - DNA, 25 bp, Homo sapien
ttctgattacagaacccctgaaatg

SEQ ID NO: 115846 - DNA, 25 bp, Homo sapien
ttctgattacagtacccctgaaatg

SEQ ID NO: 115847 - DNA, 25 bp, Homo sapien
gtggagttgttacgtactagtcatt

SEQ ID NO: 115848 - DNA, 25 bp, Homo sapien
gtggagttgttaggtactagtcatt

SEQ ID NO: 115849 - DNA, 25 bp, Homo sapien
ggcatgttagtaattctcgtaacct

SEQ ID NO: 115850 - DNA, 25 bp, Homo sapien
ggcatgttagtatttctcgtaacct

SEQ ID NO: 115851 - DNA, 25 bp, Homo sapien
tattatttcgattcgacgacatcag

SEQ ID NO: 115852 - DNA, 25 bp, Homo sapien
tattatttcgatacgacgacatcag

SEQ ID NO: 115853 - DNA, 25 bp, Homo sapien
ttaatgagtgaaaccgactctctag

SEQ ID NO: 115854 - DNA, 25 bp, Homo sapien
ttaatgagtgaatccgactctctag

SEQ ID NO: 115855 - DNA, 25 bp, Homo sapien
tctttggaagagaaaaccttgacgt

SEQ ID NO: 115856 - DNA, 25 bp, Homo sapien
tctttggaagagtaaaccttgacgt

SEQ ID NO: 115857 - DNA, 25 bp, Homo sapien
gttttcgtgacaattttacctctga

SEQ ID NO: 115858 - DNA, 25 bp, Homo sapien
gttttcgtgacatttttacctctga

SEQ ID NO: 115859 - DNA, 25 bp, Homo sapien
ggaccgtcacccttgtaaagtagag

SEQ ID NO: 115860 - DNA, 25 bp, Homo sapien
ggaccgtcacccatgtaaagtagag

SEQ ID NO: 115861 - DNA, 25 bp, Homo sapien
attttgtccgtacctatagacacat

SEQ ID NO: 115862 - DNA, 25 bp, Homo sapien
attttgtccgtagctatagacacat

SEQ ID NO: 115863 - DNA, 25 bp, Homo sapien
aaaagacgagcaggaagttccccgt

SEQ ID NO: 115864 - DNA, 25 bp, Homo sapien
aaaagacgagcacgaagttccccgt

SEQ ID NO: 115865 - DNA, 25 bp, Homo sapien
aaagagtcccgacgaagttcaccct

SEQ ID NO: 115866 - DNA, 25 bp, Homo sapien
aaagagtcccgaggaagttcaccct

SEQ ID NO: 115867 - DNA, 25 bp, Homo sapien
cgacttgacctagtgcgagacggcg

SEQ ID NO: 115868 - DNA, 25 bp, Homo sapien
cgacttgacctactgcgagacggcg

SEQ ID NO: 115869 - DNA, 25 bp, Homo sapien
cacctgcgtcctggtgggacgaagt

SEQ ID NO: 115870 - DNA, 25 bp, Homo sapien
cacctgcgtcctcgtgggacgaagt

SEQ ID NO: 115871 - DNA, 25 bp, Homo sapien
accacttcgcctggaacgtctacaa

SEQ ID NO: 115872 - DNA, 25 bp, Homo sapien
accacttcgcctcgaacgtctacaa

SEQ ID NO: 115873 - DNA, 25 bp, Homo sapien
tcgtctttccctaatacctacttag

SEQ ID NO: 115874 - DNA, 25 bp, Homo sapien
tcgtctttcccttatacctacttag

SEQ ID NO: 115875 - DNA, 25 bp, Homo sapien
gttgtcacaaataactcgtcgactc

SEQ ID NO: 115876 - DNA, 25 bp, Homo sapien
gttgtcacaaattactcgtcgactc

SEQ ID NO: 115877 - DNA, 25 bp, Homo sapien
caaagtactacttacgtctgacacg

SEQ ID NO: 115878 - DNA, 25 bp, Homo sapien
caaagtactactaacgtctgacacg

SEQ ID NO: 115879 - DNA, 25 bp, Homo sapien
acatcagaagtctttagttgacact

SEQ ID NO: 115880 - DNA, 25 bp, Homo sapien
acatcagaagtcattagttgacact

SEQ ID NO: 115881 - DNA, 25 bp, Homo sapien
ttcaagaagatgacagtgtttcgct

SEQ ID NO: 115882 - DNA, 25 bp, Homo sapien
ttcaagaagatgtcagtgtttcgct

SEQ ID NO: 115883 - DNA, 25 bp, Homo sapien
cgtgtcccgtcgttcattgagtcgg

SEQ ID NO: 115884 - DNA, 25 bp, Homo sapien
cgtgtcccgtcgatcattgagtcgg

SEQ ID NO: 115885 - DNA, 25 bp, Homo sapien
ttccttttccacttgtagagacgat

SEQ ID NO: 115886 - DNA, 25 bp, Homo sapien
ttccttttccacatgtagagacgat

SEQ ID NO: 115887 - DNA, 25 bp, Homo sapien
ttttggtcacttccaacggaagagg

SEQ ID NO: 115888 - DNA, 25 bp, Homo sapien
ttttggtcacttgcaacggaagagg

SEQ ID NO: 115889 - DNA, 25 bp, Homo sapien
gggtctccttccaatcagagtacgg

SEQ ID NO: 115890 - DNA, 25 bp, Homo sapien
gggtctccttcctatcagagtacgg

SEQ ID NO: 115891 - DNA, 25 bp, Homo sapien
gtcgtcgctcttctcgcagtgtaag

SEQ ID NO: 115892 - DNA, 25 bp, Homo sapien
gtcgtcgctcttgtcgcagtgtaag

SEQ ID NO: 115893 - DNA, 25 bp, Homo sapien
tacgtacgactcttttgtcattatg

SEQ ID NO: 115894 - DNA, 25 bp, Homo sapien
tacgtacgactcatttgtcattatg

SEQ ID NO: 115895 - DNA, 25 bp, Homo sapien
agtactaacagattgtcccttgtac

SEQ ID NO: 115896 - DNA, 25 bp, Homo sapien
agtactaacagaatgtcccttgtac

SEQ ID NO: 115897 - DNA, 25 bp, Homo sapien
acagcgaagagatggtcctctaaga

SEQ ID NO: 115898 - DNA, 25 bp, Homo sapien
acagcgaagagaaggtcctctaaga

SEQ ID NO: 115899 - DNA, 25 bp, Homo sapien
gcactacgagacaggtggacagcac

SEQ ID NO: 115900 - DNA, 25 bp, Homo sapien
gcactacgagactggtggacagcac

SEQ ID NO: 115901 - DNA, 25 bp, Homo sapien
acgggaccgagacgaggttcaccga

SEQ ID NO: 115902 - DNA, 25 bp, Homo sapien
acgggaccgagaggaggttcaccga

SEQ ID NO: 115903 - DNA, 25 bp, Homo sapien
gtacgatctttgtctatgtctcaaa

SEQ ID NO: 115904 - DNA, 25 bp, Homo sapien
gtacgatctttgactatgtctcaaa

SEQ ID NO: 115905 - DNA, 25 bp, Homo sapien
ggtgagacttgaaatacttccccaa

SEQ ID NO: 115906 - DNA, 25 bp, Homo sapien
ggtgagacttgatatacttccccaa

SEQ ID NO: 115907 - DNA, 25 bp, Homo sapien
tagtctttattagagtggtccagtc

SEQ ID NO: 115908 - DNA, 25 bp, Homo sapien
tagtctttattacagtggtccagtc

SEQ ID NO: 115909 - DNA, 25 bp, Homo sapien
gtaaatctattaagtgtgtcacaac

SEQ ID NO: 115910 - DNA, 25 bp, Homo sapien
gtaaatctattatgtgtgtcacaac

SEQ ID NO: 115911 - DNA, 25 bp, Homo sapien
caaactcagtgtgtcgtactcccac

SEQ ID NO: 115912 - DNA, 25 bp, Homo sapien
caaactcagtgtctcgtactcccac

SEQ ID NO: 115913 - DNA, 25 bp, Homo sapien
tttgatacagtcctcctatgtccag

SEQ ID NO: 115914 - DNA, 25 bp, Homo sapien
tttgatacagtcgtcctatgtccag

SEQ ID NO: 115915 - DNA, 25 bp, Homo sapien
atgtgtcgacgtcgtctctttcgaa

SEQ ID NO: 115916 - DNA, 25 bp, Homo sapien
atgtgtcgacgtggtctctttcgaa

SEQ ID NO: 115917 - DNA, 25 bp, Homo sapien
ataatattcgtgagacctttgtcag

SEQ ID NO: 115918 - DNA, 25 bp, Homo sapien
ataatattcgtgtgacctttgtcag

SEQ ID NO: 115919 - DNA, 25 bp, Homo sapien
acacgtgtctggtcaccgagggtgc

SEQ ID NO: 115920 - DNA, 25 bp, Homo sapien
acacgtgtctggacaccgagggtgc

SEQ ID NO: 115921 - DNA, 25 bp, Homo sapien
gtcccaggaagacactgtggacgac

SEQ ID NO: 115922 - DNA, 25 bp, Homo sapien
gtcccaggaagagactgtggacgac

SEQ ID NO: 115923 - DNA, 25 bp, Homo sapien
agtcgagaggaaagaacgggtcctt

SEQ ID NO: 115924 - DNA, 25 bp, Homo sapien
agtcgagaggaatgaacgggtcctt

SEQ ID NO: 115925 - DNA, 25 bp, Homo sapien
gagaagtatatcctcatgtctctat

SEQ ID NO: 115926 - DNA, 25 bp, Homo sapien
gagaagtatatcgtcatgtctctat

SEQ ID NO: 115927 - DNA, 25 bp, Homo sapien
gtttctccatttgtcgttacgttaa

SEQ ID NO: 115928 - DNA, 25 bp, Homo sapien
gtttctccatttctcgttacgttaa

SEQ ID NO: 115929 - DNA, 25 bp, Homo sapien
gtactcccctttgtgtgtatacgaa

SEQ ID NO: 115930 - DNA, 25 bp, Homo sapien
gtactcccctttctgtgtatacgaa

SEQ ID NO: 115931 - DNA, 25 bp, Homo sapien
acgtctctccttagggtgacctcgg

SEQ ID NO: 115932 - DNA, 25 bp, Homo sapien
acgtctctcctttgggtgacctcgg

SEQ ID NO: 115933 - DNA, 25 bp, Homo sapien
atgtagttcctgtttgggtcgacgg

SEQ ID NO: 115934 - DNA, 25 bp, Homo sapien
atgtagttcctgattgggtcgacgg

SEQ ID NO: 115935 - DNA, 25 bp, Homo sapien
atgggccggtttgacgtagtgctac

SEQ ID NO: 115936 - DNA, 25 bp, Homo sapien
atgggccggtttcacgtagtgctac

SEQ ID NO: 115937 - DNA, 25 bp, Homo sapien
gacgacgcacgatcacgacctggca

SEQ ID NO: 115938 - DNA, 25 bp, Homo sapien
gacgacgcacgaacacgacctggca

SEQ ID NO: 115939 - DNA, 25 bp, Homo sapien
cgacgtggaaacgacctgagacgtg

SEQ ID NO: 115940 - DNA, 25 bp, Homo sapien
cgacgtggaaaccacctgagacgtg

SEQ ID NO: 115941 - DNA, 25 bp, Homo sapien
actcgtggcagtaatctgtcaagta

SEQ ID NO: 115942 - DNA, 25 bp, Homo sapien
actcgtggcagttatctgtcaagta

SEQ ID NO: 115943 - DNA, 25 bp, Homo sapien
acggtgtcttctatagacgaatata

SEQ ID NO: 115944 - DNA, 25 bp, Homo sapien
acggtgtcttctttagacgaatata

SEQ ID NO: 115945 - DNA, 25 bp, Homo sapien
taagaggtctcaaactcgagaattg

SEQ ID NO: 115946 - DNA, 25 bp, Homo sapien
taagaggtctcatactcgagaattg

SEQ ID NO: 115947 - DNA, 25 bp, Homo sapien
aaagtgtctcacctctgaatctgtc

SEQ ID NO: 115948 - DNA, 25 bp, Homo sapien
aaagtgtctcacgtctgaatctgtc

SEQ ID NO: 115949 - DNA, 25 bp, Homo sapien
tgatagatctgatcgcctatcactc

SEQ ID NO: 115950 - DNA, 25 bp, Homo sapien
tgatagatctgaacgcctatcactc

SEQ ID NO: 115951 - DNA, 25 bp, Homo sapien
cctgtgtagaagacgacggcccctc

SEQ ID NO: 115952 - DNA, 25 bp, Homo sapien
cctgtgtagaagtcgacggcccctc

SEQ ID NO: 115953 - DNA, 25 bp, Homo sapien
accgaattcacagtggaggaacctc

SEQ ID NO: 115954 - DNA, 25 bp, Homo sapien
accgaattcacactggaggaacctc

SEQ ID NO: 115955 - DNA, 25 bp, Homo sapien
aatagaacaataacagtgaccccgt

SEQ ID NO: 115956 - DNA, 25 bp, Homo sapien
aatagaacaatatcagtgaccccgt

SEQ ID NO: 115957 - DNA, 25 bp, Homo sapien
gtagaaaaccttttggagtactgac

SEQ ID NO: 115958 - DNA, 25 bp, Homo sapien
gtagaaaaccttatggagtactgac

SEQ ID NO: 115959 - DNA, 25 bp, Homo sapien
taaacatcgtcttgagctaattccg

SEQ ID NO: 115960 - DNA, 25 bp, Homo sapien
taaacatcgtctagagctaattccg

SEQ ID NO: 115961 - DNA, 25 bp, Homo sapien
tctagtggaagttcccacatttaat

SEQ ID NO: 115962 - DNA, 25 bp, Homo sapien
tctagtggaagtacccacatttaat

SEQ ID NO: 115963 - DNA, 25 bp, Homo sapien
gtgtcgaagaactgtccatattaat

SEQ ID NO: 115964 - DNA, 25 bp, Homo sapien
gtgtcgaagaacagtccatattaat

SEQ ID NO: 115965 - DNA, 25 bp, Homo sapien
ctacgacggtccagtccgctgaggc

SEQ ID NO: 115966 - DNA, 25 bp, Homo sapien
ctacgacggtcctgtccgctgaggc

SEQ ID NO: 115967 - DNA, 25 bp, Homo sapien
ggtgacggcggcgacgaccgaggac

SEQ ID NO: 115968 - DNA, 25 bp, Homo sapien
ggtgacggcggccacgaccgaggac

SEQ ID NO: 115969 - DNA, 25 bp, Homo sapien
cactcggggaccttctcggcgggat

SEQ ID NO: 115970 - DNA, 25 bp, Homo sapien
cactcggggaccatctcggcgggat

SEQ ID NO: 115971 - DNA, 25 bp, Homo sapien
taggaccaccctagtccgtcgtcga

SEQ ID NO: 115972 - DNA, 25 bp, Homo sapien
taggaccacccttgtccgtcgtcga

SEQ ID NO: 115973 - DNA, 25 bp, Homo sapien
cggtgagactgaatccctctacaca

SEQ ID NO: 115974 - DNA, 25 bp, Homo sapien
cggtgagactgattccctctacaca

SEQ ID NO: 115975 - DNA, 25 bp, Homo sapien
taggccggtgtgtcaacccaacact

SEQ ID NO: 115976 - DNA, 25 bp, Homo sapien
taggccggtgtgacaacccaacact

SEQ ID NO: 115977 - DNA, 25 bp, Homo sapien
gaccgacgagggacgtcctcaaccg

SEQ ID NO: 115978 - DNA, 25 bp, Homo sapien
gaccgacgagggtcgtcctcaaccg

SEQ ID NO: 115979 - DNA, 25 bp, Homo sapien
tgacagtcggggtgcacgtccccgt

SEQ ID NO: 115980 - DNA, 25 bp, Homo sapien
tgacagtcggggagcacgtccccgt

SEQ ID NO: 115981 - DNA, 25 bp, Homo sapien
gcagaggaagagacactaccgacgc

SEQ ID NO: 115982 - DNA, 25 bp, Homo sapien
gcagaggaagagtcactaccgacgc

SEQ ID NO: 115983 - DNA, 25 bp, Homo sapien
tgacgcggtgcgaccggttccccag

SEQ ID NO: 115984 - DNA, 25 bp, Homo sapien
tgacgcggtgcgtccggttccccag

SEQ ID NO: 115985 - DNA, 25 bp, Homo sapien
agttaggacctcgtgcaccgcacta

SEQ ID NO: 115986 - DNA, 25 bp, Homo sapien
agttaggacctcctgcaccgcacta

SEQ ID NO: 115987 - DNA, 25 bp, Homo sapien
cacttctagacgtcctccatcggaa

SEQ ID NO: 115988 - DNA, 25 bp, Homo sapien
cacttctagacgacctccatcggaa

SEQ ID NO: 115989 - DNA, 25 bp, Homo sapien
ttcctagacccctcttcagtagtag

SEQ ID NO: 115990 - DNA, 25 bp, Homo sapien
ttcctagaccccacttcagtagtag

SEQ ID NO: 115991 - DNA, 25 bp, Homo sapien
tctctgtctcttgaattgtgtacta

SEQ ID NO: 115992 - DNA, 25 bp, Homo sapien
tctctgtctcttcaattgtgtacta

SEQ ID NO: 115993 - DNA, 25 bp, Homo sapien
accctgttacgatctcggtgttaaa

SEQ ID NO: 115994 - DNA, 25 bp, Homo sapien
accctgttacgaactcggtgttaaa

SEQ ID NO: 115995 - DNA, 25 bp, Homo sapien
tacactggttcctccgtcttaaacg

SEQ ID NO: 115996 - DNA, 25 bp, Homo sapien
tacactggttccaccgtcttaaacg

SEQ ID NO: 115997 - DNA, 25 bp, Homo sapien
tctcctaatttcctcactgctggga

SEQ ID NO: 115998 - DNA, 25 bp, Homo sapien
tctcctaatttcgtcactgctggga

SEQ ID NO: 115999 - DNA, 25 bp, Homo sapien
ctccacttcccgatttttgtgtcag

SEQ ID NO: 116000 - DNA, 25 bp, Homo sapien
ctccacttcccgttttttgtgtcag

SEQ ID NO: 116001 - DNA, 25 bp, Homo sapien
caggcacccgttactcttctgtaca

SEQ ID NO: 116002 - DNA, 25 bp, Homo sapien
caggcacccgtttctcttctgtaca

SEQ ID NO: 116003 - DNA, 25 bp, Homo sapien
cctgtgcggcccttcgttgttgaga

SEQ ID NO: 116004 - DNA, 25 bp, Homo sapien
cctgtgcggcccatcgttgttgaga

SEQ ID NO: 116005 - DNA, 25 bp, Homo sapien
acatggagacccacggtcgaaggta

SEQ ID NO: 116006 - DNA, 25 bp, Homo sapien
acatggagaccctcggtcgaaggta

SEQ ID NO: 116007 - DNA, 25 bp, Homo sapien
ccatgtactgttccacgccgaggga

SEQ ID NO: 116008 - DNA, 25 bp, Homo sapien
ccatgtactgttgcacgccgaggga

SEQ ID NO: 116009 - DNA, 25 bp, Homo sapien
atgtcttctcgtacccgacgcgatg

SEQ ID NO: 116010 - DNA, 25 bp, Homo sapien
atgtcttctcgttcccgacgcgatg

SEQ ID NO: 116011 - DNA, 25 bp, Homo sapien
gtctcactttagtcacggactgggt

SEQ ID NO: 116012 - DNA, 25 bp, Homo sapien
gtctcactttagacacggactgggt

SEQ ID NO: 116013 - DNA, 25 bp, Homo sapien
gttttcatcttagtccggactaatt

SEQ ID NO: 116014 - DNA, 25 bp, Homo sapien
gttttcatcttactccggactaatt

SEQ ID NO: 116015 - DNA, 25 bp, Homo sapien
cttgttagtccatacagtgtaaatt

SEQ ID NO: 116016 - DNA, 25 bp, Homo sapien
cttgttagtccaaacagtgtaaatt

SEQ ID NO: 116017 - DNA, 25 bp, Homo sapien
ttttctctcccatcaccgagggtgt

SEQ ID NO: 116018 - DNA, 25 bp, Homo sapien
ttttctctcccaacaccgagggtgt

SEQ ID NO: 116019 - DNA, 25 bp, Homo sapien
tctggtcccgacctcttcagtgtta

SEQ ID NO: 116020 - DNA, 25 bp, Homo sapien
tctggtcccgacgtcttcagtgtta

SEQ ID NO: 116021 - DNA, 25 bp, Homo sapien
tcttaggtcaggatttttgtagtta

SEQ ID NO: 116022 - DNA, 25 bp, Homo sapien
tcttaggtcaggttttttgtagtta

SEQ ID NO: 116023 - DNA, 25 bp, Homo sapien
atataatctcaactggttcagaaag

SEQ ID NO: 116024 - DNA, 25 bp, Homo sapien
atataatctcaagtggttcagaaag

SEQ ID NO: 116025 - DNA, 25 bp, Homo sapien
attctagaagtagttcagcagacgt

SEQ ID NO: 116026 - DNA, 25 bp, Homo sapien
attctagaagtacttcagcagacgt

SEQ ID NO: 116027 - DNA, 25 bp, Homo sapien
tgtatgaacgtaattcgagaactcg

SEQ ID NO: 116028 - DNA, 25 bp, Homo sapien
tgtatgaacgtatttcgagaactcg

SEQ ID NO: 116029 - DNA, 25 bp, Homo sapien
actgtcctcaggttttacttatgtt

SEQ ID NO: 116030 - DNA, 25 bp, Homo sapien
actgtcctcaggatttacttatgtt

SEQ ID NO: 116031 - DNA, 25 bp, Homo sapien
ggagaccacaggttactcccactgg

SEQ ID NO: 116032 - DNA, 25 bp, Homo sapien
ggagaccacaggatactcccactgg

SEQ ID NO: 116033 - DNA, 25 bp, Homo sapien
gtgtccccgtaggactctcagtggg

SEQ ID NO: 116034 - DNA, 25 bp, Homo sapien
gtgtccccgtagcactctcagtggg

SEQ ID NO: 116035 - DNA, 25 bp, Homo sapien
ttcttcgaggacaccgactgtaagt

SEQ ID NO: 116036 - DNA, 25 bp, Homo sapien
ttcttcgaggactccgactgtaagt

SEQ ID NO: 116037 - DNA, 25 bp, Homo sapien
ctgtccaggacgtctacgaagaagt

SEQ ID NO: 116038 - DNA, 25 bp, Homo sapien
ctgtccaggacgactacgaagaagt

SEQ ID NO: 116039 - DNA, 25 bp, Homo sapien
accgcttagcgacactactacagaa

SEQ ID NO: 116040 - DNA, 25 bp, Homo sapien
accgcttagcgagactactacagaa

SEQ ID NO: 116041 - DNA, 25 bp, Homo sapien
aggagtgtcctcgacgagtcgagaa

SEQ ID NO: 116042 - DNA, 25 bp, Homo sapien
aggagtgtcctccacgagtcgagaa

SEQ ID NO: 116043 - DNA, 25 bp, Homo sapien
cgtagtgtccccagacgagtcgaag

SEQ ID NO: 116044 - DNA, 25 bp, Homo sapien
cgtagtgtcccctgacgagtcgaag

SEQ ID NO: 116045 - DNA, 25 bp, Homo sapien
tcaggataggacacagacacgaggg

SEQ ID NO: 116046 - DNA, 25 bp, Homo sapien
tcaggataggactcagacacgaggg

SEQ ID NO: 116047 - DNA, 25 bp, Homo sapien
acagacaggacgaccgtcacaggta

SEQ ID NO: 116048 - DNA, 25 bp, Homo sapien
acagacaggacgtccgtcacaggta

SEQ ID NO: 116049 - DNA, 25 bp, Homo sapien
acggcagcgagtagacctagaagta

SEQ ID NO: 116050 - DNA, 25 bp, Homo sapien
acggcagcgagttgacctagaagta

SEQ ID NO: 116051 - DNA, 25 bp, Homo sapien
cgaaatacgtattggtctacgagga

SEQ ID NO: 116052 - DNA, 25 bp, Homo sapien
cgaaatacgtataggtctacgagga

SEQ ID NO: 116053 - DNA, 25 bp, Homo sapien
agcgagatcttcatgagagctcaaa

SEQ ID NO: 116054 - DNA, 25 bp, Homo sapien
agcgagatcttcttgagagctcaaa

SEQ ID NO: 116055 - DNA, 25 bp, Homo sapien
ggtacttatgtcatgagggtccaag

SEQ ID NO: 116056 - DNA, 25 bp, Homo sapien
ggtacttatgtcttgagggtccaag

SEQ ID NO: 116057 - DNA, 25 bp, Homo sapien
cgaaaacttttacgaaggtgacccc

SEQ ID NO: 116058 - DNA, 25 bp, Homo sapien
cgaaaacttttaggaaggtgacccc

SEQ ID NO: 116059 - DNA, 25 bp, Homo sapien
atgtcttttattagtgtaacatctt

SEQ ID NO: 116060 - DNA, 25 bp, Homo sapien
atgtcttttatttgtgtaacatctt

SEQ ID NO: 116061 - DNA, 25 bp, Homo sapien
tttttgttatatcggtactaaagtt

SEQ ID NO: 116062 - DNA, 25 bp, Homo sapien
tttttgttatatgggtactaaagtt

SEQ ID NO: 116063 - DNA, 25 bp, Homo sapien
tacgtttcgtcaagggtcttcagtc

SEQ ID NO: 116064 - DNA, 25 bp, Homo sapien
tacgtttcgtcatgggtcttcagtc

SEQ ID NO: 116065 - DNA, 25 bp, Homo sapien
atgttcggtcgatgaacgtcttttc

SEQ ID NO: 116066 - DNA, 25 bp, Homo sapien
atgttcggtcgaagaacgtcttttc

SEQ ID NO: 116067 - DNA, 25 bp, Homo sapien
cgtatatacgttatttgaccttcag

SEQ ID NO: 116068 - DNA, 25 bp, Homo sapien
cgtatatacgttttttgaccttcag

SEQ ID NO: 116069 - DNA, 25 bp, Homo sapien
ttgtctctccgttcgtttcttccga

SEQ ID NO: 116070 - DNA, 25 bp, Homo sapien
ttgtctctccgtacgtttcttccga

SEQ ID NO: 116071 - DNA, 25 bp, Homo sapien
cgagtctaggacgtccatgttcgac

SEQ ID NO: 116072 - DNA, 25 bp, Homo sapien
cgagtctaggacctccatgttcgac

SEQ ID NO: 116073 - DNA, 25 bp, Homo sapien
acgagtcggagtctctatcttgtga

SEQ ID NO: 116074 - DNA, 25 bp, Homo sapien
acgagtcggagtgtctatcttgtga

SEQ ID NO: 116075 - DNA, 25 bp, Homo sapien
ccaaccgtagtagacgagctccaga

SEQ ID NO: 116076 - DNA, 25 bp, Homo sapien
ccaaccgtagtacacgagctccaga

SEQ ID NO: 116077 - DNA, 25 bp, Homo sapien
acagcaacgcttacgacaggccacc

SEQ ID NO: 116078 - DNA, 25 bp, Homo sapien
acagcaacgctttcgacaggccacc

SEQ ID NO: 116079 - DNA, 25 bp, Homo sapien
actacaagacctctcggggcgccgg

SEQ ID NO: 116080 - DNA, 25 bp, Homo sapien
actacaagacctgtcggggcgccgg

SEQ ID NO: 116081 - DNA, 25 bp, Homo sapien
cgtaataccctttcggtttagaggg

SEQ ID NO: 116082 - DNA, 25 bp, Homo sapien
cgtaatacccttacggtttagaggg

SEQ ID NO: 116083 - DNA, 25 bp, Homo sapien
aacgatcccttaaggtgttaccctc

SEQ ID NO: 116084 - DNA, 25 bp, Homo sapien
aacgatcccttatggtgttaccctc

SEQ ID NO: 116085 - DNA, 25 bp, Homo sapien
aaagaaccataaagggctatcccgt

SEQ ID NO: 116086 - DNA, 25 bp, Homo sapien
aaagaaccataatgggctatcccgt

SEQ ID NO: 116087 - DNA, 25 bp, Homo sapien
ggaggaaccacaaacaatgtccaac

SEQ ID NO: 116088 - DNA, 25 bp, Homo sapien
ggaggaaccacatacaatgtccaac

SEQ ID NO: 116089 - DNA, 25 bp, Homo sapien
agagtctctcggtaaaatcctaaac

SEQ ID NO: 116090 - DNA, 25 bp, Homo sapien
agagtctctcggaaaaatcctaaac

SEQ ID NO: 116091 - DNA, 25 bp, Homo sapien
agtggtctctttgagtcccaccaaa

SEQ ID NO: 116092 - DNA, 25 bp, Homo sapien
agtggtctctttcagtcccaccaaa

SEQ ID NO: 116093 - DNA, 25 bp, Homo sapien
tactaaatcgtttcacattacgaag

SEQ ID NO: 116094 - DNA, 25 bp, Homo sapien
tactaaatcgttacacattacgaag

SEQ ID NO: 116095 - DNA, 25 bp, Homo sapien
accgtcccatctctaactctggatg

SEQ ID NO: 116096 - DNA, 25 bp, Homo sapien
accgtcccatctgtaactctggatg

SEQ ID NO: 116097 - DNA, 25 bp, Homo sapien
gtaccctacctggtccgtgggaacg

SEQ ID NO: 116098 - DNA, 25 bp, Homo sapien
gtaccctacctgctccgtgggaacg

SEQ ID NO: 116099 - DNA, 25 bp, Homo sapien
tacctccttgttgacttcggggaag

SEQ ID NO: 116100 - DNA, 25 bp, Homo sapien
tacctccttgttcacttcggggaag

SEQ ID NO: 116101 - DNA, 25 bp, Homo sapien
ttgtgtcttttgtcccggtgaggaa

SEQ ID NO: 116102 - DNA, 25 bp, Homo sapien
ttgtgtcttttgacccggtgaggaa

SEQ ID NO: 116103 - DNA, 25 bp, Homo sapien
gccttccgagggaccgtgggtctac

SEQ ID NO: 116104 - DNA, 25 bp, Homo sapien
gccttccgagggtccgtgggtctac

SEQ ID NO: 116105 - DNA, 25 bp, Homo sapien
aggtccgtagggatctgttcacaca

SEQ ID NO: 116106 - DNA, 25 bp, Homo sapien
aggtccgtagggttctgttcacaca

SEQ ID NO: 116107 - DNA, 25 bp, Homo sapien
taccgtatccagtgtttaccctctg

SEQ ID NO: 116108 - DNA, 25 bp, Homo sapien
taccgtatccagagtttaccctctg

SEQ ID NO: 116109 - DNA, 25 bp, Homo sapien
gttatcaattatgactacctgtgtt

SEQ ID NO: 116110 - DNA, 25 bp, Homo sapien
gttatcaattatcactacctgtgtt

SEQ ID NO: 116111 - DNA, 25 bp, Homo sapien
taaggactagtaatcctcaatggtt

SEQ ID NO: 116112 - DNA, 25 bp, Homo sapien
taaggactagtattcctcaatggtt

SEQ ID NO: 116113 - DNA, 25 bp, Homo sapien
ggaaggaagttttccctaaagagtc

SEQ ID NO: 116114 - DNA, 25 bp, Homo sapien
ggaaggaagtttaccctaaagagtc

SEQ ID NO: 116115 - DNA, 25 bp, Homo sapien
atatgatttgaaacctcaaaacggt

SEQ ID NO: 116116 - DNA, 25 bp, Homo sapien
atatgatttgaatcctcaaaacggt

SEQ ID NO: 116117 - DNA, 25 bp, Homo sapien
ctccaggtgtagagcctattaaagg

SEQ ID NO: 116118 - DNA, 25 bp, Homo sapien
ctccaggtgtagtgcctattaaagg

SEQ ID NO: 116119 - DNA, 25 bp, Homo sapien
aggtgtaaaagaacacactcgagac

SEQ ID NO: 116120 - DNA, 25 bp, Homo sapien
aggtgtaaaagatcacactcgagac

SEQ ID NO: 116121 - DNA, 25 bp, Homo sapien
tatagacgaaaaccatctacccata

SEQ ID NO: 116122 - DNA, 25 bp, Homo sapien
tatagacgaaaagcatctacccata

SEQ ID NO: 116123 - DNA, 25 bp, Homo sapien
atataagaagtaacggatccaccaa

SEQ ID NO: 116124 - DNA, 25 bp, Homo sapien
atataagaagtatcggatccaccaa

SEQ ID NO: 116125 - DNA, 25 bp, Homo sapien
gtcgatgtaaaatgatttaccacct

SEQ ID NO: 116126 - DNA, 25 bp, Homo sapien
gtcgatgtaaaaagatttaccacct

SEQ ID NO: 116127 - DNA, 25 bp, Homo sapien
tgggaaagacagttcgtatagaacc

SEQ ID NO: 116128 - DNA, 25 bp, Homo sapien
tgggaaagacagatcgtatagaacc

SEQ ID NO: 116129 - DNA, 25 bp, Homo sapien
agaaacggtgtttactaccgcccgt

SEQ ID NO: 116130 - DNA, 25 bp, Homo sapien
agaaacggtgttaactaccgcccgt

SEQ ID NO: 116131 - DNA, 25 bp, Homo sapien
tgtttagaaaagtgaaacccttctg

SEQ ID NO: 116132 - DNA, 25 bp, Homo sapien
tgtttagaaaagagaaacccttctg

SEQ ID NO: 116133 - DNA, 25 bp, Homo sapien
cttaagaaggtacaaccaactttgt

SEQ ID NO: 116134 - DNA, 25 bp, Homo sapien
cttaagaaggtagaaccaactttgt

SEQ ID NO: 116135 - DNA, 25 bp, Homo sapien
gacggacacaggagaccccactttt

SEQ ID NO: 116136 - DNA, 25 bp, Homo sapien
gacggacacaggtgaccccactttt

SEQ ID NO: 116137 - DNA, 25 bp, Homo sapien
gacgaagagtgatttcaccgaaatt

SEQ ID NO: 116138 - DNA, 25 bp, Homo sapien
gacgaagagtgaattcaccgaaatt

SEQ ID NO: 116139 - DNA, 25 bp, Homo sapien
acgggagttctctttgaggtcaggt

SEQ ID NO: 116140 - DNA, 25 bp, Homo sapien
acgggagttctcattgaggtcaggt

SEQ ID NO: 116141 - DNA, 25 bp, Homo sapien
aagtaccgttatccttgacttcatg

SEQ ID NO: 116142 - DNA, 25 bp, Homo sapien
aagtaccgttatgcttgacttcatg

SEQ ID NO: 116143 - DNA, 25 bp, Homo sapien
gaatccagtttaccttcgttacttg

SEQ ID NO: 116144 - DNA, 25 bp, Homo sapien
gaatccagtttagcttcgttacttg

SEQ ID NO: 116145 - DNA, 25 bp, Homo sapien
ggaagttcgagttttcccgtgtttt

SEQ ID NO: 116146 - DNA, 25 bp, Homo sapien
ggaagttcgagtattcccgtgtttt

SEQ ID NO: 116147 - DNA, 25 bp, Homo sapien
acgtttcgagttttcatgtattaac

SEQ ID NO: 116148 - DNA, 25 bp, Homo sapien
acgtttcgagttatcatgtattaac

SEQ ID NO: 116149 - DNA, 25 bp, Homo sapien
tgactggttgattaatcattttctc

SEQ ID NO: 116150 - DNA, 25 bp, Homo sapien
tgactggttgataaatcattttctc

SEQ ID NO: 116151 - DNA, 25 bp, Homo sapien
cagggacgtgaccagggacctttcc

SEQ ID NO: 116152 - DNA, 25 bp, Homo sapien
cagggacgtgacgagggacctttcc

SEQ ID NO: 116153 - DNA, 25 bp, Homo sapien
gaatgggtcgaagaagtccgttgac

SEQ ID NO: 116154 - DNA, 25 bp, Homo sapien
gaatgggtcgaacaagtccgttgac

SEQ ID NO: 116155 - DNA, 25 bp, Homo sapien
aggagaacgcgactcggaccaccgg

SEQ ID NO: 116156 - DNA, 25 bp, Homo sapien
aggagaacgcgagtcggaccaccgg

SEQ ID NO: 116157 - DNA, 25 bp, Homo sapien
tagaaagtccaatcatcaaagagag

SEQ ID NO: 116158 - DNA, 25 bp, Homo sapien
tagaaagtccaaacatcaaagagag

SEQ ID NO: 116159 - DNA, 25 bp, Homo sapien
ctgtatacttataccctcaggggaa

SEQ ID NO: 116160 - DNA, 25 bp, Homo sapien
ctgtatacttattccctcaggggaa

SEQ ID NO: 116161 - DNA, 25 bp, Homo sapien
tgtatccattgctcagtctcgaaac

SEQ ID NO: 116162 - DNA, 25 bp, Homo sapien
tgtatccattgcacagtctcgaaac

SEQ ID NO: 116163 - DNA, 25 bp, Homo sapien
tcgtatgttcctcgaaatttgtaag

SEQ ID NO: 116164 - DNA, 25 bp, Homo sapien
tcgtatgttcctggaaatttgtaag

SEQ ID NO: 116165 - DNA, 25 bp, Homo sapien
agtgccaggattaggtacgttcggt

SEQ ID NO: 116166 - DNA, 25 bp, Homo sapien
agtgccaggatttggtacgttcggt

SEQ ID NO: 116167 - DNA, 25 bp, Homo sapien
gtgttccgaagagaaggctcactcg

SEQ ID NO: 116168 - DNA, 25 bp, Homo sapien
gtgttccgaagacaaggctcactcg

SEQ ID NO: 116169 - DNA, 25 bp, Homo sapien
cagaaaccgggacatggtattatac

SEQ ID NO: 116170 - DNA, 25 bp, Homo sapien
cagaaaccgggagatggtattatac

SEQ ID NO: 116171 - DNA, 25 bp, Homo sapien
aaagaggaactttcttgtcttacta

SEQ ID NO: 116172 - DNA, 25 bp, Homo sapien
aaagaggaacttacttgtcttacta

SEQ ID NO: 116173 - DNA, 25 bp, Homo sapien
cggagttaaattggacttctttacc

SEQ ID NO: 116174 - DNA, 25 bp, Homo sapien
cggagttaaattcgacttctttacc

SEQ ID NO: 116175 - DNA, 25 bp, Homo sapien
gacgtaagaagataagtcccttttt

SEQ ID NO: 116176 - DNA, 25 bp, Homo sapien
gacgtaagaagaaaagtcccttttt

SEQ ID NO: 116177 - DNA, 25 bp, Homo sapien
tctttacgaagaaaggacccttttc

SEQ ID NO: 116178 - DNA, 25 bp, Homo sapien
tctttacgaagataggacccttttc

SEQ ID NO: 116179 - DNA, 25 bp, Homo sapien
cttaaaagtcacgattcgtttttcg

SEQ ID NO: 116180 - DNA, 25 bp, Homo sapien
cttaaaagtcaccattcgtttttcg

SEQ ID NO: 116181 - DNA, 25 bp, Homo sapien
acgacgacccaaactgtcgggaaca

SEQ ID NO: 116182 - DNA, 25 bp, Homo sapien
acgacgacccaatctgtcgggaaca

SEQ ID NO: 116183 - DNA, 25 bp, Homo sapien
ttacggtccccttggggtccgagtc

SEQ ID NO: 116184 - DNA, 25 bp, Homo sapien
ttacggtcccctaggggtccgagtc

SEQ ID NO: 116185 - DNA, 25 bp, Homo sapien
gaacgtttcccttcagggacgtggg

SEQ ID NO: 116186 - DNA, 25 bp, Homo sapien
gaacgtttccctacagggacgtggg

SEQ ID NO: 116187 - DNA, 25 bp, Homo sapien
aactttcctcgctcgaagagtggta

SEQ ID NO: 116188 - DNA, 25 bp, Homo sapien
aactttcctcgcacgaagagtggta

SEQ ID NO: 116189 - DNA, 25 bp, Homo sapien
tcaggccacaacaactacgagtgga

SEQ ID NO: 116190 - DNA, 25 bp, Homo sapien
tcaggccacaactactacgagtgga

SEQ ID NO: 116191 - DNA, 25 bp, Homo sapien
gcagagacgttcgaaccagcgggac

SEQ ID NO: 116192 - DNA, 25 bp, Homo sapien
gcagagacgttccaaccagcgggac

SEQ ID NO: 116193 - DNA, 25 bp, Homo sapien
gatggtgtagtcgtcctgccgtgac

SEQ ID NO: 116194 - DNA, 25 bp, Homo sapien
gatggtgtagtcctcctgccgtgac

SEQ ID NO: 116195 - DNA, 25 bp, Homo sapien
gactcaagagagacttcatcctagg

SEQ ID NO: 116196 - DNA, 25 bp, Homo sapien
gactcaagagagtcttcatcctagg

SEQ ID NO: 116197 - DNA, 25 bp, Homo sapien
aagtaatgaacgttgttcccgttga

SEQ ID NO: 116198 - DNA, 25 bp, Homo sapien
aagtaatgaacgatgttcccgttga

SEQ ID NO: 116199 - DNA, 25 bp, Homo sapien
aaaagtgacgagatgtgtccctgga

SEQ ID NO: 116200 - DNA, 25 bp, Homo sapien
aaaagtgacgagttgtgtccctgga

SEQ ID NO: 116201 - DNA, 25 bp, Homo sapien
gagagcgtatttttacacatgtcac

SEQ ID NO: 116202 - DNA, 25 bp, Homo sapien
gagagcgtatttatacacatgtcac

SEQ ID NO: 116203 - DNA, 25 bp, Homo sapien
acgggtcctgtcttccgaccgtcga

SEQ ID NO: 116204 - DNA, 25 bp, Homo sapien
acgggtcctgtcatccgaccgtcga

SEQ ID NO: 116205 - DNA, 25 bp, Homo sapien
ccgtccgtgtttaccggaggtccgt

SEQ ID NO: 116206 - DNA, 25 bp, Homo sapien
ccgtccgtgttttccggaggtccgt

SEQ ID NO: 116207 - DNA, 25 bp, Homo sapien
tctgtgacgacatgtttcagggcgc

SEQ ID NO: 116208 - DNA, 25 bp, Homo sapien
tctgtgacgacaagtttcagggcgc

SEQ ID NO: 116209 - DNA, 25 bp, Homo sapien
gtccagacgcacagtggctgggctt

SEQ ID NO: 116210 - DNA, 25 bp, Homo sapien
gtccagacgcactgtggctgggctt

SEQ ID NO: 116211 - DNA, 25 bp, Homo sapien
cccgtacggcgtggtagagacgcta

SEQ ID NO: 116212 - DNA, 25 bp, Homo sapien
cccgtacggcgtcgtagagacgcta

SEQ ID NO: 116213 - DNA, 25 bp, Homo sapien
ggttccccaagtcattgacacccgt

SEQ ID NO: 116214 - DNA, 25 bp, Homo sapien
ggttccccaagtgattgacacccgt

SEQ ID NO: 116215 - DNA, 25 bp, Homo sapien
gagcctcggaacagggtccgacccg

SEQ ID NO: 116216 - DNA, 25 bp, Homo sapien
gagcctcggaactgggtccgacccg

SEQ ID NO: 116217 - DNA, 25 bp, Homo sapien
cgacgactaccgactcgtcgactgg

SEQ ID NO: 116218 - DNA, 25 bp, Homo sapien
cgacgactaccgtctcgtcgactgg

SEQ ID NO: 116219 - DNA, 25 bp, Homo sapien
ctaagtaaagcgacctactacagtg

SEQ ID NO: 116220 - DNA, 25 bp, Homo sapien
ctaagtaaagcgtcctactacagtg

SEQ ID NO: 116221 - DNA, 25 bp, Homo sapien
cctggaggtgtctcgctcagtaccg

SEQ ID NO: 116222 - DNA, 25 bp, Homo sapien
cctggaggtgtcacgctcagtaccg

SEQ ID NO: 116223 - DNA, 25 bp, Homo sapien
agtcactttatggtttcctcagttc

SEQ ID NO: 116224 - DNA, 25 bp, Homo sapien
agtcactttatgctttcctcagttc

SEQ ID NO: 116225 - DNA, 25 bp, Homo sapien
tccgtgacacgacttcctctcgttt

SEQ ID NO: 116226 - DNA, 25 bp, Homo sapien
tccgtgacacgagttcctctcgttt

SEQ ID NO: 116227 - DNA, 25 bp, Homo sapien
ccatcttgacaccaagttctccttt

SEQ ID NO: 116228 - DNA, 25 bp, Homo sapien
ccatcttgacacgaagttctccttt

SEQ ID NO: 116229 - DNA, 25 bp, Homo sapien
cttgctgagctcgagattcctaccc

SEQ ID NO: 116230 - DNA, 25 bp, Homo sapien
cttgctgagctccagattcctaccc

SEQ ID NO: 116231 - DNA, 25 bp, Homo sapien
gttattccgttgaaggtactaacgc

SEQ ID NO: 116232 - DNA, 25 bp, Homo sapien
gttattccgttgtaggtactaacgc

SEQ ID NO: 116233 - DNA, 25 bp, Homo sapien
cttgtgtcttttctatgtaacaacg

SEQ ID NO: 116234 - DNA, 25 bp, Homo sapien
cttgtgtcttttgtatgtaacaacg

SEQ ID NO: 116235 - DNA, 25 bp, Homo sapien
gtttcacatggttaatgtctacacc

SEQ ID NO: 116236 - DNA, 25 bp, Homo sapien
gtttcacatggtaaatgtctacacc

SEQ ID NO: 116237 - DNA, 25 bp, Homo sapien
ttttttgaggtgaccactacctact

SEQ ID NO: 116238 - DNA, 25 bp, Homo sapien
ttttttgaggtgtccactacctact

SEQ ID NO: 116239 - DNA, 25 bp, Homo sapien
gttgcggtgactgttctttcgtgat

SEQ ID NO: 116240 - DNA, 25 bp, Homo sapien
gttgcggtgactcttctttcgtgat

SEQ ID NO: 116241 - DNA, 25 bp, Homo sapien
catgagcaggttcttcttctagaag

SEQ ID NO: 116242 - DNA, 25 bp, Homo sapien
catgagcaggttgttcttctagaag

SEQ ID NO: 116243 - DNA, 25 bp, Homo sapien
cacgagtaatgtcttagtttgacta

SEQ ID NO: 116244 - DNA, 25 bp, Homo sapien
cacgagtaatgtgttagtttgacta

SEQ ID NO: 116245 - DNA, 25 bp, Homo sapien
cctgccgtccttgtcttactggctg

SEQ ID NO: 116246 - DNA, 25 bp, Homo sapien
cctgccgtccttctcttactggctg

SEQ ID NO: 116247 - DNA, 25 bp, Homo sapien
ctctgaccatttttaggtccctctt

SEQ ID NO: 116248 - DNA, 25 bp, Homo sapien
ctctgaccatttataggtccctctt

SEQ ID NO: 116249 - DNA, 25 bp, Homo sapien
tttcctccgggcataagtccttgtt

SEQ ID NO: 116250 - DNA, 25 bp, Homo sapien
tttcctccgggcttaagtccttgtt

SEQ ID NO: 116251 - DNA, 25 bp, Homo sapien
tcgtaccccttgtgagacccgggac

SEQ ID NO: 116252 - DNA, 25 bp, Homo sapien
tcgtaccccttgagagacccgggac

SEQ ID NO: 116253 - DNA, 25 bp, Homo sapien
ttcccgtctctcataggtaattgaa

SEQ ID NO: 116254 - DNA, 25 bp, Homo sapien
ttcccgtctctcttaggtaattgaa

SEQ ID NO: 116255 - DNA, 25 bp, Homo sapien
tcatgacgttagtgtatttacttgt

SEQ ID NO: 116256 - DNA, 25 bp, Homo sapien
tcatgacgttagagtatttacttgt

SEQ ID NO: 116257 - DNA, 25 bp, Homo sapien
tcataacgtgaatcttttgctagga

SEQ ID NO: 116258 - DNA, 25 bp, Homo sapien
tcataacgtgaaacttttgctagga

SEQ ID NO: 116259 - DNA, 25 bp, Homo sapien
aagataagtccctttttgacaagac

SEQ ID NO: 116260 - DNA, 25 bp, Homo sapien
aagataagtcccattttgacaagac

SEQ ID NO: 116261 - DNA, 25 bp, Homo sapien
cttatacgtgtcgtgtacgtcacga

SEQ ID NO: 116262 - DNA, 25 bp, Homo sapien
cttatacgtgtcctgtacgtcacga

SEQ ID NO: 116263 - DNA, 25 bp, Homo sapien
ccctggaggtgccgtagtcgacgtc

SEQ ID NO: 116264 - DNA, 25 bp, Homo sapien
ccctggaggtgcggtagtcgacgtc

SEQ ID NO: 116265 - DNA, 25 bp, Homo sapien
tggacccctgggtctcgtgtcgatg

SEQ ID NO: 116266 - DNA, 25 bp, Homo sapien
tggacccctgggactcgtgtcgatg

SEQ ID NO: 116267 - DNA, 25 bp, Homo sapien
gtgccggtggtccagtcggtcactc

SEQ ID NO: 116268 - DNA, 25 bp, Homo sapien
gtgccggtggtcgagtcggtcactc

SEQ ID NO: 116269 - DNA, 25 bp, Homo sapien
tgtatccgtccgtcatatgaatatc

SEQ ID NO: 116270 - DNA, 25 bp, Homo sapien
tgtatccgtccgacatatgaatatc

SEQ ID NO: 116271 - DNA, 25 bp, Homo sapien
tacacgacgttggtaaatgactttc

SEQ ID NO: 116272 - DNA, 25 bp, Homo sapien
tacacgacgttgctaaatgactttc

SEQ ID NO: 116273 - DNA, 25 bp, Homo sapien
tcgacgtcttgcataaccaggtcga

SEQ ID NO: 116274 - DNA, 25 bp, Homo sapien
tcgacgtcttgcttaaccaggtcga

SEQ ID NO: 116275 - DNA, 25 bp, Homo sapien
tggtacatgggaccgtaacggctgt

SEQ ID NO: 116276 - DNA, 25 bp, Homo sapien
tggtacatgggagcgtaacggctgt

SEQ ID NO: 116277 - DNA, 25 bp, Homo sapien
agtaatatcgatgtctaccgtgttt

SEQ ID NO: 116278 - DNA, 25 bp, Homo sapien
agtaatatcgatctctaccgtgttt

SEQ ID NO: 116279 - DNA, 25 bp, Homo sapien
aaacgaaaccgtaagccgcctgttt

SEQ ID NO: 116280 - DNA, 25 bp, Homo sapien
aaacgaaaccgttagccgcctgttt

SEQ ID NO: 116281 - DNA, 25 bp, Homo sapien
ctagcagaagggtagttctcaattt

SEQ ID NO: 116282 - DNA, 25 bp, Homo sapien
ctagcagaagggaagttctcaattt

SEQ ID NO: 116283 - DNA, 25 bp, Homo sapien
tacaaaaggtggtgctatcaattct

SEQ ID NO: 116284 - DNA, 25 bp, Homo sapien
tacaaaaggtggagctatcaattct

SEQ ID NO: 116285 - DNA, 25 bp, Homo sapien
aaaatgtaagtgtctccatactatg

SEQ ID NO: 116286 - DNA, 25 bp, Homo sapien
aaaatgtaagtgactccatactatg

SEQ ID NO: 116287 - DNA, 25 bp, Homo sapien
aaaatgagaaagtggtccctaccta

SEQ ID NO: 116288 - DNA, 25 bp, Homo sapien
aaaatgagaaagaggtccctaccta

SEQ ID NO: 116289 - DNA, 25 bp, Homo sapien
gaactaagatgaagtcctccgtgta

SEQ ID NO: 116290 - DNA, 25 bp, Homo sapien
gaactaagatgatgtcctccgtgta

SEQ ID NO: 116291 - DNA, 25 bp, Homo sapien
agaaacgccgacgaccgtcctgact

SEQ ID NO: 116292 - DNA, 25 bp, Homo sapien
agaaacgccgaccaccgtcctgact

SEQ ID NO: 116293 - DNA, 25 bp, Homo sapien
tacagacggtacaccgtcagcgtct

SEQ ID NO: 116294 - DNA, 25 bp, Homo sapien
tacagacggtactccgtcagcgtct

SEQ ID NO: 116295 - DNA, 25 bp, Homo sapien
aggggctccatgttttagacagcct

SEQ ID NO: 116296 - DNA, 25 bp, Homo sapien
aggggctccatgatttagacagcct

SEQ ID NO: 116297 - DNA, 25 bp, Homo sapien
gagggatattaggagtccaagaacc

SEQ ID NO: 116298 - DNA, 25 bp, Homo sapien
gagggatattagcagtccaagaacc

SEQ ID NO: 116299 - DNA, 25 bp, Homo sapien
cagggagacctgagatgcatcactc

SEQ ID NO: 116300 - DNA, 25 bp, Homo sapien
cagggagacctgtgatgcatcactc

SEQ ID NO: 116301 - DNA, 25 bp, Homo sapien
tggggactctctaacatggaagatc

SEQ ID NO: 116302 - DNA, 25 bp, Homo sapien
tggggactctcttacatggaagatc

SEQ ID NO: 116303 - DNA, 25 bp, Homo sapien
gaaaacgtatccatttgtgtaaatc

SEQ ID NO: 116304 - DNA, 25 bp, Homo sapien
gaaaacgtatccttttgtgtaaatc

SEQ ID NO: 116305 - DNA, 25 bp, Homo sapien
caaaaacatcttattagttactaaa

SEQ ID NO: 116306 - DNA, 25 bp, Homo sapien
caaaaacatctttttagttactaaa

SEQ ID NO: 116307 - DNA, 25 bp, Homo sapien
tacaaattacggtgaattcagtcaa

SEQ ID NO: 116308 - DNA, 25 bp, Homo sapien
tacaaattacggagaattcagtcaa

SEQ ID NO: 116309 - DNA, 25 bp, Homo sapien
tgaactctgggatgattcttcgata

SEQ ID NO: 116310 - DNA, 25 bp, Homo sapien
tgaactctgggaagattcttcgata

SEQ ID NO: 116311 - DNA, 25 bp, Homo sapien
cacttcagtctgaggttttgttata

SEQ ID NO: 116312 - DNA, 25 bp, Homo sapien
cacttcagtctgtggttttgttata

SEQ ID NO: 116313 - DNA, 25 bp, Homo sapien
cattcagtatggagttttttcgact

SEQ ID NO: 116314 - DNA, 25 bp, Homo sapien
cattcagtatggtgttttttcgact

SEQ ID NO: 116315 - DNA, 25 bp, Homo sapien
catttatatgtgtttccgttgatcc

SEQ ID NO: 116316 - DNA, 25 bp, Homo sapien
catttatatgtgattccgttgatcc

SEQ ID NO: 116317 - DNA, 25 bp, Homo sapien
gttacagtgttgttagtcggagtcc

SEQ ID NO: 116318 - DNA, 25 bp, Homo sapien
gttacagtgttgatagtcggagtcc

SEQ ID NO: 116319 - DNA, 25 bp, Homo sapien
tcgttaagttgtttgttcggacgag

SEQ ID NO: 116320 - DNA, 25 bp, Homo sapien
tcgttaagttgtatgttcggacgag

SEQ ID NO: 116321 - DNA, 25 bp, Homo sapien
gtaaagttgtaagactaccgaacgt

SEQ ID NO: 116322 - DNA, 25 bp, Homo sapien
gtaaagttgtaacactaccgaacgt

SEQ ID NO: 116323 - DNA, 25 bp, Homo sapien
ataaagtccgtcctgtacccgtctg

SEQ ID NO: 116324 - DNA, 25 bp, Homo sapien
ataaagtccgtcgtgtacccgtctg

SEQ ID NO: 116325 - DNA, 25 bp, Homo sapien
atacatgtctcttataacgggttct

SEQ ID NO: 116326 - DNA, 25 bp, Homo sapien
atacatgtctctaataacgggttct

SEQ ID NO: 116327 - DNA, 25 bp, Homo sapien
agacactattcctttagagtgtatt

SEQ ID NO: 116328 - DNA, 25 bp, Homo sapien
agacactattccattagagtgtatt

SEQ ID NO: 116329 - DNA, 25 bp, Homo sapien
taagtctcaagtacgaagttttttc

SEQ ID NO: 116330 - DNA, 25 bp, Homo sapien
taagtctcaagttcgaagttttttc

SEQ ID NO: 116331 - DNA, 25 bp, Homo sapien
accgttcgactgatttattcttccg

SEQ ID NO: 116332 - DNA, 25 bp, Homo sapien
accgttcgactgttttattcttccg

SEQ ID NO: 116333 - DNA, 25 bp, Homo sapien
gaatttcatgtagcttatactgttc

SEQ ID NO: 116334 - DNA, 25 bp, Homo sapien
gaatttcatgtaccttatactgttc

SEQ ID NO: 116335 - DNA, 25 bp, Homo sapien
aaacagttgtttaaattattttcgt

SEQ ID NO: 116336 - DNA, 25 bp, Homo sapien
aaacagttgttttaattattttcgt

SEQ ID NO: 116337 - DNA, 25 bp, Homo sapien
caaccactgactctttacttttggt

SEQ ID NO: 116338 - DNA, 25 bp, Homo sapien
caaccactgactgtttacttttggt

SEQ ID NO: 116339 - DNA, 25 bp, Homo sapien
accagactgaggtcgttcgtgtccg

SEQ ID NO: 116340 - DNA, 25 bp, Homo sapien
accagactgaggacgttcgtgtccg

SEQ ID NO: 116341 - DNA, 25 bp, Homo sapien
ccatcctgtggtactcaccgtagct

SEQ ID NO: 116342 - DNA, 25 bp, Homo sapien
ccatcctgtggttctcaccgtagct

SEQ ID NO: 116343 - DNA, 25 bp, Homo sapien
agtccctcggggtgcttacactccg

SEQ ID NO: 116344 - DNA, 25 bp, Homo sapien
agtccctcggggagcttacactccg

SEQ ID NO: 116345 - DNA, 25 bp, Homo sapien
tccttcttgacagttgtcagcgacg

SEQ ID NO: 116346 - DNA, 25 bp, Homo sapien
tccttcttgacacttgtcagcgacg

SEQ ID NO: 116347 - DNA, 25 bp, Homo sapien
cctaagtagtctagggtccaggtcg

SEQ ID NO: 116348 - DNA, 25 bp, Homo sapien
cctaagtagtcttgggtccaggtcg

SEQ ID NO: 116349 - DNA, 25 bp, Homo sapien
ggtctcttatgttgggagtacctgg

SEQ ID NO: 116350 - DNA, 25 bp, Homo sapien
ggtctcttatgtagggagtacctgg

SEQ ID NO: 116351 - DNA, 25 bp, Homo sapien
tttcttgtcactagactgtcaccag

SEQ ID NO: 116352 - DNA, 25 bp, Homo sapien
tttcttgtcacttgactgtcaccag

SEQ ID NO: 116353 - DNA, 25 bp, Homo sapien
tgtgtttgatccatttacacccagt

SEQ ID NO: 116354 - DNA, 25 bp, Homo sapien
tgtgtttgatccttttacacccagt

SEQ ID NO: 116355 - DNA, 25 bp, Homo sapien
aatctcttccaatgtttccgccggt

SEQ ID NO: 116356 - DNA, 25 bp, Homo sapien
aatctcttccaaagtttccgccggt

SEQ ID NO: 116357 - DNA, 25 bp, Homo sapien
caattcttaccagaggagccgcagc

SEQ ID NO: 116358 - DNA, 25 bp, Homo sapien
caattcttaccacaggagccgcagc

SEQ ID NO: 116359 - DNA, 25 bp, Homo sapien
tgttctcgacgttctcgggttcccc

SEQ ID NO: 116360 - DNA, 25 bp, Homo sapien
tgttctcgacgtactcgggttcccc

SEQ ID NO: 116361 - DNA, 25 bp, Homo sapien
gtgctccgagacaacagggctccac

SEQ ID NO: 116362 - DNA, 25 bp, Homo sapien
gtgctccgagactacagggctccac

SEQ ID NO: 116363 - DNA, 25 bp, Homo sapien
cgggtagaaatagtggtcttactcc

SEQ ID NO: 116364 - DNA, 25 bp, Homo sapien
cgggtagaaatactggtcttactcc

SEQ ID NO: 116365 - DNA, 25 bp, Homo sapien
gtgggttggggtcgagtcgattttc

SEQ ID NO: 116366 - DNA, 25 bp, Homo sapien
gtgggttggggtggagtcgattttc

SEQ ID NO: 116367 - DNA, 25 bp, Homo sapien
aacagaggtcctggtcatttatact

SEQ ID NO: 116368 - DNA, 25 bp, Homo sapien
aacagaggtcctcgtcatttatact

SEQ ID NO: 116369 - DNA, 25 bp, Homo sapien
gtgtcctgacccttgacgggtttat

SEQ ID NO: 116370 - DNA, 25 bp, Homo sapien
gtgtcctgacccatgacgggtttat

SEQ ID NO: 116371 - DNA, 25 bp, Homo sapien
gtcgcctaatttaagaactcgttcc

SEQ ID NO: 116372 - DNA, 25 bp, Homo sapien
gtcgcctaattttagaactcgttcc

SEQ ID NO: 116373 - DNA, 25 bp, Homo sapien
ccgctgtgaccaaagccgtggtagg

SEQ ID NO: 116374 - DNA, 25 bp, Homo sapien
ccgctgtgaccatagccgtggtagg

SEQ ID NO: 116375 - DNA, 25 bp, Homo sapien
tctacttgacggacacccaagaccg

SEQ ID NO: 116376 - DNA, 25 bp, Homo sapien
tctacttgacggtcacccaagaccg

SEQ ID NO: 116377 - DNA, 25 bp, Homo sapien
ttttcatggagattaccctaagatt

SEQ ID NO: 116378 - DNA, 25 bp, Homo sapien
ttttcatggagaataccctaagatt

SEQ ID NO: 116379 - DNA, 25 bp, Homo sapien
agaccgaagaacgacatcctggttc

SEQ ID NO: 116380 - DNA, 25 bp, Homo sapien
agaccgaagaaccacatcctggttc

SEQ ID NO: 116381 - DNA, 25 bp, Homo sapien
gtacctcgaagactaaattaccttg

SEQ ID NO: 116382 - DNA, 25 bp, Homo sapien
gtacctcgaagagtaaattaccttg

SEQ ID NO: 116383 - DNA, 25 bp, Homo sapien
gaacctttacagggattgtcgatcc

SEQ ID NO: 116384 - DNA, 25 bp, Homo sapien
gaacctttacagcgattgtcgatcc

SEQ ID NO: 116385 - DNA, 25 bp, Homo sapien
ttatcctttcggaggtttgtacgga

SEQ ID NO: 116386 - DNA, 25 bp, Homo sapien
ttatcctttcggtggtttgtacgga

SEQ ID NO: 116387 - DNA, 25 bp, Homo sapien
gttgtccctacctcctttccagggt

SEQ ID NO: 116388 - DNA, 25 bp, Homo sapien
gttgtccctaccacctttccagggt

SEQ ID NO: 116389 - DNA, 25 bp, Homo sapien
gtttcatccaagtctctccacggtg

SEQ ID NO: 116390 - DNA, 25 bp, Homo sapien
gtttcatccaagactctccacggtg

SEQ ID NO: 116391 - DNA, 25 bp, Homo sapien
gtcatccatgtctaccgacatagtg

SEQ ID NO: 116392 - DNA, 25 bp, Homo sapien
gtcatccatgtcaaccgacatagtg

SEQ ID NO: 116393 - DNA, 25 bp, Homo sapien
caccccttcttctggttcaagtgtt

SEQ ID NO: 116394 - DNA, 25 bp, Homo sapien
caccccttcttcaggttcaagtgtt

SEQ ID NO: 116395 - DNA, 25 bp, Homo sapien
aaccccgttccctaggacagcgtgg

SEQ ID NO: 116396 - DNA, 25 bp, Homo sapien
aaccccgttcccaaggacagcgtgg

SEQ ID NO: 116397 - DNA, 25 bp, Homo sapien
acccttttcagtcgagcacgggtag

SEQ ID NO: 116398 - DNA, 25 bp, Homo sapien
acccttttcagtggagcacgggtag

SEQ ID NO: 116399 - DNA, 25 bp, Homo sapien
cctacctgcactagggcagcttcgt

SEQ ID NO: 116400 - DNA, 25 bp, Homo sapien
cctacctgcacttgggcagcttcgt

SEQ ID NO: 116401 - DNA, 25 bp, Homo sapien
cgcactggacctgagctcggggtcg

SEQ ID NO: 116402 - DNA, 25 bp, Homo sapien
cgcactggacctcagctcggggtcg

SEQ ID NO: 116403 - DNA, 25 bp, Homo sapien
gtctctcctacgggtgtgcgagtct

SEQ ID NO: 116404 - DNA, 25 bp, Homo sapien
gtctctcctacgcgtgtgcgagtct

SEQ ID NO: 116405 - DNA, 25 bp, Homo sapien
cggcacgtacgtgtcgtcgtacatg

SEQ ID NO: 116406 - DNA, 25 bp, Homo sapien
cggcacgtacgtctcgtcgtacatg

SEQ ID NO: 116407 - DNA, 25 bp, Homo sapien
tagacgtccttcatagggacgaccg

SEQ ID NO: 116408 - DNA, 25 bp, Homo sapien
tagacgtccttcttagggacgaccg

SEQ ID NO: 116409 - DNA, 25 bp, Homo sapien
ctttagacccctcagatatgaaacg

SEQ ID NO: 116410 - DNA, 25 bp, Homo sapien
ctttagacccctgagatatgaaacg

SEQ ID NO: 116411 - DNA, 25 bp, Homo sapien
ccggggtaataaacctactatgaga

SEQ ID NO: 116412 - DNA, 25 bp, Homo sapien
ccggggtaataatcctactatgaga

SEQ ID NO: 116413 - DNA, 25 bp, Homo sapien
ctcaagtaagactacgagacttgga

SEQ ID NO: 116414 - DNA, 25 bp, Homo sapien
ctcaagtaagacaacgagacttgga

SEQ ID NO: 116415 - DNA, 25 bp, Homo sapien
tcgtcggtcagaagttccagggtag

SEQ ID NO: 116416 - DNA, 25 bp, Homo sapien
tcgtcggtcagatgttccagggtag

SEQ ID NO: 116417 - DNA, 25 bp, Homo sapien
gacggtacgccagttgcgacaacgg

SEQ ID NO: 116418 - DNA, 25 bp, Homo sapien
gacggtacgccacttgcgacaacgg

SEQ ID NO: 116419 - DNA, 25 bp, Homo sapien
tctactcacgactgtgacagatcga

SEQ ID NO: 116420 - DNA, 25 bp, Homo sapien
tctactcacgacagtgacagatcga

SEQ ID NO: 116421 - DNA, 25 bp, Homo sapien
gttcttctactaagttccgacggtg

SEQ ID NO: 116422 - DNA, 25 bp, Homo sapien
gttcttctactatgttccgacggtg

SEQ ID NO: 116423 - DNA, 25 bp, Homo sapien
ctccagttttttactttcgcgcgtc

SEQ ID NO: 116424 - DNA, 25 bp, Homo sapien
ctccagtttttttctttcgcgcgtc

SEQ ID NO: 116425 - DNA, 25 bp, Homo sapien
gtacctttgttcttatgttcaagta

SEQ ID NO: 116426 - DNA, 25 bp, Homo sapien
gtacctttgttcatatgttcaagta

SEQ ID NO: 116427 - DNA, 25 bp, Homo sapien
gtagacagacttatcgacctctaca

SEQ ID NO: 116428 - DNA, 25 bp, Homo sapien
gtagacagacttttcgacctctaca

SEQ ID NO: 116429 - DNA, 25 bp, Homo sapien
gttgtagaaaagtccaaacacattt

SEQ ID NO: 116430 - DNA, 25 bp, Homo sapien
gttgtagaaaagaccaaacacattt

SEQ ID NO: 116431 - DNA, 25 bp, Homo sapien
ttgggacaagggttctaacatgatc

SEQ ID NO: 116432 - DNA, 25 bp, Homo sapien
ttgggacaagggatctaacatgatc

SEQ ID NO: 116433 - DNA, 25 bp, Homo sapien
ggaggtaagaagtgccctcgaagga

SEQ ID NO: 116434 - DNA, 25 bp, Homo sapien
ggaggtaagaagagccctcgaagga

SEQ ID NO: 116435 - DNA, 25 bp, Homo sapien
agtaagaccttggtcaggaatgtcg

SEQ ID NO: 116436 - DNA, 25 bp, Homo sapien
agtaagaccttgctcaggaatgtcg

SEQ ID NO: 116437 - DNA, 25 bp, Homo sapien
ggttaacaattattgcgatacaatc

SEQ ID NO: 116438 - DNA, 25 bp, Homo sapien
ggttaacaattaatgcgatacaatc

SEQ ID NO: 116439 - DNA, 25 bp, Homo sapien
gatatagactatcaaggaaatcttc

SEQ ID NO: 116440 - DNA, 25 bp, Homo sapien
gatatagactatgaaggaaatcttc

SEQ ID NO: 116441 - DNA, 25 bp, Homo sapien
acaaaagtgggtagtgacaattctc

SEQ ID NO: 116442 - DNA, 25 bp, Homo sapien
acaaaagtgggttgtgacaattctc

SEQ ID NO: 116443 - DNA, 25 bp, Homo sapien
acaaaaggtggtgctatcaattcta

SEQ ID NO: 116444 - DNA, 25 bp, Homo sapien
acaaaaggtggtcctatcaattcta

SEQ ID NO: 116445 - DNA, 25 bp, Homo sapien
gagtagaaagtccttctgctgtcac

SEQ ID NO: 116446 - DNA, 25 bp, Homo sapien
gagtagaaagtcgttctgctgtcac

SEQ ID NO: 116447 - DNA, 25 bp, Homo sapien
gtacgagtaactcgattcttgtcac

SEQ ID NO: 116448 - DNA, 25 bp, Homo sapien
gtacgagtaactggattcttgtcac

SEQ ID NO: 116449 - DNA, 25 bp, Homo sapien
aactacatcgaaacgtctcagtcac

SEQ ID NO: 116450 - DNA, 25 bp, Homo sapien
aactacatcgaatcgtctcagtcac

SEQ ID NO: 116451 - DNA, 25 bp, Homo sapien
ggaacttgtcgcagaacggacacta

SEQ ID NO: 116452 - DNA, 25 bp, Homo sapien
ggaacttgtcgctgaacggacacta

SEQ ID NO: 116453 - DNA, 25 bp, Homo sapien
agggataatcgtctttacacaaccc

SEQ ID NO: 116454 - DNA, 25 bp, Homo sapien
agggataatcgtgtttacacaaccc

SEQ ID NO: 116455 - DNA, 25 bp, Homo sapien
ggaaagtcgtctactttcaccatcc

SEQ ID NO: 116456 - DNA, 25 bp, Homo sapien
ggaaagtcgtcttctttcaccatcc

SEQ ID NO: 116457 - DNA, 25 bp, Homo sapien
ggtagtgatttgtcgtactcctctc

SEQ ID NO: 116458 - DNA, 25 bp, Homo sapien
ggtagtgatttgacgtactcctctc

SEQ ID NO: 116459 - DNA, 25 bp, Homo sapien
tggacatccgttggacgtttattac

SEQ ID NO: 116460 - DNA, 25 bp, Homo sapien
tggacatccgttcgacgtttattac

SEQ ID NO: 116461 - DNA, 25 bp, Homo sapien
gaatcgtttgaccttgaattttctc

SEQ ID NO: 116462 - DNA, 25 bp, Homo sapien
gaatcgtttgacgttgaattttctc

SEQ ID NO: 116463 - DNA, 25 bp, Homo sapien
ggggtcttgcctagaaatcctcgac

SEQ ID NO: 116464 - DNA, 25 bp, Homo sapien
ggggtcttgccttgaaatcctcgac

SEQ ID NO: 116465 - DNA, 25 bp, Homo sapien
attatgacatcactactctcatgag

SEQ ID NO: 116466 - DNA, 25 bp, Homo sapien
attatgacatcagtactctcatgag

SEQ ID NO: 116467 - DNA, 25 bp, Homo sapien
atcttaaggagatttaccggtcgat

SEQ ID NO: 116468 - DNA, 25 bp, Homo sapien
atcttaaggagaattaccggtcgat

SEQ ID NO: 116469 - DNA, 25 bp, Homo sapien
tctagaacgacaaagagtacccaga

SEQ ID NO: 116470 - DNA, 25 bp, Homo sapien
tctagaacgacatagagtacccaga

SEQ ID NO: 116471 - DNA, 25 bp, Homo sapien
ctaaagtacagagatacctactaca

SEQ ID NO: 116472 - DNA, 25 bp, Homo sapien
ctaaagtacagacatacctactaca

SEQ ID NO: 116473 - DNA, 25 bp, Homo sapien
ctactttttcactgaggaaccaaag

SEQ ID NO: 116474 - DNA, 25 bp, Homo sapien
ctactttttcacagaggaaccaaag

SEQ ID NO: 116475 - DNA, 25 bp, Homo sapien
cgttacttgtacgactcccacaggg

SEQ ID NO: 116476 - DNA, 25 bp, Homo sapien
cgttacttgtaccactcccacaggg

SEQ ID NO: 116477 - DNA, 25 bp, Homo sapien
gatacgtccgtcgagaccccgagaa

SEQ ID NO: 116478 - DNA, 25 bp, Homo sapien
gatacgtccgtccagaccccgagaa

SEQ ID NO: 116479 - DNA, 25 bp, Homo sapien
cgtcacgagtcaagaccacggagaa

SEQ ID NO: 116480 - DNA, 25 bp, Homo sapien
cgtcacgagtcatgaccacggagaa

SEQ ID NO: 116481 - DNA, 25 bp, Homo sapien
ctttcagtccagacccctgaacgaa

SEQ ID NO: 116482 - DNA, 25 bp, Homo sapien
ctttcagtccagtcccctgaacgaa

SEQ ID NO: 116483 - DNA, 25 bp, Homo sapien
ttcaggggctttgtacgtatacatg

SEQ ID NO: 116484 - DNA, 25 bp, Homo sapien
ttcaggggctttctacgtatacatg

SEQ ID NO: 116485 - DNA, 25 bp, Homo sapien
gagcacttgtataatatctgacacc

SEQ ID NO: 116486 - DNA, 25 bp, Homo sapien
gagcacttgtattatatctgacacc

SEQ ID NO: 116487 - DNA, 25 bp, Homo sapien
gtataaccttcatcgccgacttcag

SEQ ID NO: 116488 - DNA, 25 bp, Homo sapien
gtataaccttcaacgccgacttcag

SEQ ID NO: 116489 - DNA, 25 bp, Homo sapien
tttacacaagtgacccacgtctctg

SEQ ID NO: 116490 - DNA, 25 bp, Homo sapien
tttacacaagtgtcccacgtctctg

SEQ ID NO: 116491 - DNA, 25 bp, Homo sapien
ctattagggaacaaaaccgtctgag

SEQ ID NO: 116492 - DNA, 25 bp, Homo sapien
ctattagggaactaaaccgtctgag

SEQ ID NO: 116493 - DNA, 25 bp, Homo sapien
gttgttggatattgtcaacccgtga

SEQ ID NO: 116494 - DNA, 25 bp, Homo sapien
gttgttggatatagtcaacccgtga

SEQ ID NO: 116495 - DNA, 25 bp, Homo sapien
ccgaccactccgttgtacatagaga

SEQ ID NO: 116496 - DNA, 25 bp, Homo sapien
ccgaccactccgatgtacatagaga

SEQ ID NO: 116497 - DNA, 25 bp, Homo sapien
aaagacattttgtccgtacctatag

SEQ ID NO: 116498 - DNA, 25 bp, Homo sapien
aaagacattttgaccgtacctatag

SEQ ID NO: 116499 - DNA, 25 bp, Homo sapien
ttaaaagacgagcaggaagttcccc

SEQ ID NO: 116500 - DNA, 25 bp, Homo sapien
ttaaaagacgaggaggaagttcccc

SEQ ID NO: 116501 - DNA, 25 bp, Homo sapien
caaagagtcccgacgaagttcaccc

SEQ ID NO: 116502 - DNA, 25 bp, Homo sapien
caaagagtcccgtcgaagttcaccc

SEQ ID NO: 116503 - DNA, 25 bp, Homo sapien
agtttcgacctaagagcggtaccgg

SEQ ID NO: 116504 - DNA, 25 bp, Homo sapien
agtttcgacctatgagcggtaccgg

SEQ ID NO: 116505 - DNA, 25 bp, Homo sapien
gacggtgcctctcgtcgggtcaagt

SEQ ID NO: 116506 - DNA, 25 bp, Homo sapien
gacggtgcctctggtcgggtcaagt

SEQ ID NO: 116507 - DNA, 25 bp, Homo sapien
cgcggtgtcgtccagggcgctacaa

SEQ ID NO: 116508 - DNA, 25 bp, Homo sapien
cgcggtgtcgtcgagggcgctacaa

SEQ ID NO: 116509 - DNA, 25 bp, Homo sapien
tagtttctcaaataccgtacgttag

SEQ ID NO: 116510 - DNA, 25 bp, Homo sapien
tagtttctcaaaaaccgtacgttag

SEQ ID NO: 116511 - DNA, 25 bp, Homo sapien
tagtttgtccaaaaaccgtagatag

SEQ ID NO: 116512 - DNA, 25 bp, Homo sapien
tagtttgtccaataaccgtagatag

SEQ ID NO: 116513 - DNA, 25 bp, Homo sapien
tgttaacagactcatactcggacac

SEQ ID NO: 116514 - DNA, 25 bp, Homo sapien
tgttaacagactgatactcggacac

SEQ ID NO: 116515 - DNA, 25 bp, Homo sapien
cttcagagagtttactgagtgaact

SEQ ID NO: 116516 - DNA, 25 bp, Homo sapien
cttcagagagttaactgagtgaact

SEQ ID NO: 116517 - DNA, 25 bp, Homo sapien
aagaagtgtagtacacggttcggac

SEQ ID NO: 116518 - DNA, 25 bp, Homo sapien
aagaagtgtagttcacggttcggac

SEQ ID NO: 116519 - DNA, 25 bp, Homo sapien
gtgtcccgtcgttcattgagtcggt

SEQ ID NO: 116520 - DNA, 25 bp, Homo sapien
gtgtcccgtcgtacattgagtcggt

SEQ ID NO: 116521 - DNA, 25 bp, Homo sapien
ttgcctgtttccatttagtgtcgat

SEQ ID NO: 116522 - DNA, 25 bp, Homo sapien
ttgcctgtttccttttagtgtcgat

SEQ ID NO: 116523 - DNA, 25 bp, Homo sapien
catgggccttccaacgaaagacgag

SEQ ID NO: 116524 - DNA, 25 bp, Homo sapien
catgggccttcctacgaaagacgag

SEQ ID NO: 116525 - DNA, 25 bp, Homo sapien
ggtactctctattcaaacaggacag

SEQ ID NO: 116526 - DNA, 25 bp, Homo sapien
ggtactctctatacaaacaggacag

SEQ ID NO: 116527 - DNA, 25 bp, Homo sapien
gtcgtgcctcttacgccagttatag

SEQ ID NO: 116528 - DNA, 25 bp, Homo sapien
gtcgtgcctctttcgccagttatag

SEQ ID NO: 116529 - DNA, 25 bp, Homo sapien
ttcgtcgtcacatttactgcatttg

SEQ ID NO: 116530 - DNA, 25 bp, Homo sapien
ttcgtcgtcacaattactgcatttg

SEQ ID NO: 116531 - DNA, 25 bp, Homo sapien
tatgtacttcaggtttccctttagt

SEQ ID NO: 116532 - DNA, 25 bp, Homo sapien
tatgtacttcagctttccctttagt

SEQ ID NO: 116533 - DNA, 25 bp, Homo sapien
tcacagtggaaggtttcctctaaga

SEQ ID NO: 116534 - DNA, 25 bp, Homo sapien
tcacagtggaagctttcctctaaga

SEQ ID NO: 116535 - DNA, 25 bp, Homo sapien
aagacctacgaaatctctgaagcac

SEQ ID NO: 116536 - DNA, 25 bp, Homo sapien
aagacctacgaattctctgaagcac

SEQ ID NO: 116537 - DNA, 25 bp, Homo sapien
agggacacggaggacgtcagtccca

SEQ ID NO: 116538 - DNA, 25 bp, Homo sapien
agggacacggagcacgtcagtccca

SEQ ID NO: 116539 - DNA, 25 bp, Homo sapien
ggcatacctatgtcagtgtatcaaa

SEQ ID NO: 116540 - DNA, 25 bp, Homo sapien
ggcatacctatgacagtgtatcaaa

SEQ ID NO: 116541 - DNA, 25 bp, Homo sapien
gtgagattactagttacccttcaaa

SEQ ID NO: 116542 - DNA, 25 bp, Homo sapien
gtgagattactacttacccttcaaa

SEQ ID NO: 116543 - DNA, 25 bp, Homo sapien
taggttcttattgctggtcacagtc

SEQ ID NO: 116544 - DNA, 25 bp, Homo sapien
taggttcttattcctggtcacagtc

SEQ ID NO: 116545 - DNA, 25 bp, Homo sapien
tataagtctagttggttgtcaactc

SEQ ID NO: 116546 - DNA, 25 bp, Homo sapien
tataagtctagtaggttgtcaactc

SEQ ID NO: 116547 - DNA, 25 bp, Homo sapien
ccaaactcagtgtgtcgtactccca

SEQ ID NO: 116548 - DNA, 25 bp, Homo sapien
ccaaactcagtgagtcgtactccca

SEQ ID NO: 116549 - DNA, 25 bp, Homo sapien
gtttgaacagtcgtcactgtttcag

SEQ ID NO: 116550 - DNA, 25 bp, Homo sapien
gtttgaacagtcctcactgtttcag

SEQ ID NO: 116551 - DNA, 25 bp, Homo sapien
ttatgtgtcagtaccgtctttaaga

SEQ ID NO: 116552 - DNA, 25 bp, Homo sapien
ttatgtgtcagttccgtctttaaga

SEQ ID NO: 116553 - DNA, 25 bp, Homo sapien
atgttattggttcaactcttgcgag

SEQ ID NO: 116554 - DNA, 25 bp, Homo sapien
atgttattggttgaactcttgcgag

SEQ ID NO: 116555 - DNA, 25 bp, Homo sapien
ctactgtctcgtctaaccagggtga

SEQ ID NO: 116556 - DNA, 25 bp, Homo sapien
ctactgtctcgtgtaaccagggtga

SEQ ID NO: 116557 - DNA, 25 bp, Homo sapien
gtcccacggatgttcctacgggtga

SEQ ID NO: 116558 - DNA, 25 bp, Homo sapien
gtcccacggatgatcctacgggtga

SEQ ID NO: 116559 - DNA, 25 bp, Homo sapien
atcgcagggagaagaacgggttctt

SEQ ID NO: 116560 - DNA, 25 bp, Homo sapien
atcgcagggagatgaacgggttctt

SEQ ID NO: 116561 - DNA, 25 bp, Homo sapien
atcaacaagaatgagacatgtcttt

SEQ ID NO: 116562 - DNA, 25 bp, Homo sapien
atcaacaagaatcagacatgtcttt

SEQ ID NO: 116563 - DNA, 25 bp, Homo sapien
ttcccaaagagtggtcatacgttaa

SEQ ID NO: 116564 - DNA, 25 bp, Homo sapien
ttcccaaagagtcgtcatacgttaa

SEQ ID NO: 116565 - DNA, 25 bp, Homo sapien
gtgtctcccctttaacgtgaattaa

SEQ ID NO: 116566 - DNA, 25 bp, Homo sapien
gtgtctccccttaaacgtgaattaa

SEQ ID NO: 116567 - DNA, 25 bp, Homo sapien
ctcgtcgtccttagggtgctcgaga

SEQ ID NO: 116568 - DNA, 25 bp, Homo sapien
ctcgtcgtcctttgggtgctcgaga

SEQ ID NO: 116569 - DNA, 25 bp, Homo sapien
actgtcttcttgtttaggtttacga

SEQ ID NO: 116570 - DNA, 25 bp, Homo sapien
actgtcttcttgattaggtttacga

SEQ ID NO: 116571 - DNA, 25 bp, Homo sapien
atgcagcccgtatttgtagtatcag

SEQ ID NO: 116572 - DNA, 25 bp, Homo sapien
atgcagcccgtaattgtagtatcag

SEQ ID NO: 116573 - DNA, 25 bp, Homo sapien
gagacgtccgactacgacttaagga

SEQ ID NO: 116574 - DNA, 25 bp, Homo sapien
gagacgtccgacaacgacttaagga

SEQ ID NO: 116575 - DNA, 25 bp, Homo sapien
attgacagggaaaacctgagacgtc

SEQ ID NO: 116576 - DNA, 25 bp, Homo sapien
attgacagggaatacctgagacgtc

SEQ ID NO: 116577 - DNA, 25 bp, Homo sapien
tcaactggagtaaagtcatcaagta

SEQ ID NO: 116578 - DNA, 25 bp, Homo sapien
tcaactggagtatagtcatcaagta

SEQ ID NO: 116579 - DNA, 25 bp, Homo sapien
cggtaggttacaataactgactata

SEQ ID NO: 116580 - DNA, 25 bp, Homo sapien
cggtaggttacattaactgactata

SEQ ID NO: 116581 - DNA, 25 bp, Homo sapien
cagaggtcgaaatctacggagattc

SEQ ID NO: 116582 - DNA, 25 bp, Homo sapien
cagaggtcgaaaactacggagattc

SEQ ID NO: 116583 - DNA, 25 bp, Homo sapien
ctaaaggtccacttctgaaagagtc

SEQ ID NO: 116584 - DNA, 25 bp, Homo sapien
ctaaaggtccacatctgaaagagtc

SEQ ID NO: 116585 - DNA, 25 bp, Homo sapien
gtagatatctgatcacgaatacacc

SEQ ID NO: 116586 - DNA, 25 bp, Homo sapien
gtagatatctgaacacgaatacacc

SEQ ID NO: 116587 - DNA, 25 bp, Homo sapien
cccgttaaactaagacgtgaacccc

SEQ ID NO: 116588 - DNA, 25 bp, Homo sapien
cccgttaaactatgacgtgaacccc

SEQ ID NO: 116589 - DNA, 25 bp, Homo sapien
ccgaagtgaaacctggggtccctac

SEQ ID NO: 116590 - DNA, 25 bp, Homo sapien
ccgaagtgaaacgtggggtccctac

SEQ ID NO: 116591 - DNA, 25 bp, Homo sapien
aaatagaacaataacagtgaccccg

SEQ ID NO: 116592 - DNA, 25 bp, Homo sapien
aaatagaacaattacagtgaccccg

SEQ ID NO: 116593 - DNA, 25 bp, Homo sapien
agacataaaattgatggtatctcct

SEQ ID NO: 116594 - DNA, 25 bp, Homo sapien
agacataaaattcatggtatctcct

SEQ ID NO: 116595 - DNA, 25 bp, Homo sapien
aaacatcgtcttgagctaattccgt

SEQ ID NO: 116596 - DNA, 25 bp, Homo sapien
aaacatcgtcttcagctaattccgt

SEQ ID NO: 116597 - DNA, 25 bp, Homo sapien
ctctagtggaagttcccacatttaa

SEQ ID NO: 116598 - DNA, 25 bp, Homo sapien
ctctagtggaagatcccacatttaa

SEQ ID NO: 116599 - DNA, 25 bp, Homo sapien
tttgtcaagacttgtcaattgtaac

SEQ ID NO: 116600 - DNA, 25 bp, Homo sapien
tttgtcaagactagtcaattgtaac

SEQ ID NO: 116601 - DNA, 25 bp, Homo sapien
atttcgtaagtcgtgtcaatgggac

SEQ ID NO: 116602 - DNA, 25 bp, Homo sapien
atttcgtaagtcctgtcaatgggac

SEQ ID NO: 116603 - DNA, 25 bp, Homo sapien
ggtgacgtgtcgacctacctcggga

SEQ ID NO: 116604 - DNA, 25 bp, Homo sapien
ggtgacgtgtcgtcctacctcggga

SEQ ID NO: 116605 - DNA, 25 bp, Homo sapien
ccatggggtactctcccgtcgagga

SEQ ID NO: 116606 - DNA, 25 bp, Homo sapien
ccatggggtactgtcccgtcgagga

SEQ ID NO: 116607 - DNA, 25 bp, Homo sapien
atggcgccccgtctcgtggtcgacg

SEQ ID NO: 116608 - DNA, 25 bp, Homo sapien
atggcgccccgtgtcgtggtcgacg

SEQ ID NO: 116609 - DNA, 25 bp, Homo sapien
tccggaggctagacgtccctgacca

SEQ ID NO: 116610 - DNA, 25 bp, Homo sapien
tccggaggctagtcgtccctgacca

SEQ ID NO: 116611 - DNA, 25 bp, Homo sapien
aggccggagtgttcgggctcatcct

SEQ ID NO: 116612 - DNA, 25 bp, Homo sapien
aggccggagtgtacgggctcatcct

SEQ ID NO: 116613 - DNA, 25 bp, Homo sapien
cgtcgagtcggtacgtcccatctcg

SEQ ID NO: 116614 - DNA, 25 bp, Homo sapien
cgtcgagtcggttcgtcccatctcg

SEQ ID NO: 116615 - DNA, 25 bp, Homo sapien
gttcagtggggtagtccgtcagtcc

SEQ ID NO: 116616 - DNA, 25 bp, Homo sapien
gttcagtggggttgtccgtcagtcc

SEQ ID NO: 116617 - DNA, 25 bp, Homo sapien
tagcaggtgaagatgtcacaagagc

SEQ ID NO: 116618 - DNA, 25 bp, Homo sapien
tagcaggtgaagttgtcacaagagc

SEQ ID NO: 116619 - DNA, 25 bp, Homo sapien
agagggtgacgaactgcgtcccaaa

SEQ ID NO: 116620 - DNA, 25 bp, Homo sapien
agagggtgacgatctgcgtcccaaa

SEQ ID NO: 116621 - DNA, 25 bp, Homo sapien
agacgtggcctctgagacgccccta

SEQ ID NO: 116622 - DNA, 25 bp, Homo sapien
agacgtggcctcagagacgccccta

SEQ ID NO: 116623 - DNA, 25 bp, Homo sapien
tagagtcacgccactaccatcggaa

SEQ ID NO: 116624 - DNA, 25 bp, Homo sapien
tagagtcacgcctctaccatcggaa

SEQ ID NO: 116625 - DNA, 25 bp, Homo sapien
tgtctgaacccctactgttagtgta

SEQ ID NO: 116626 - DNA, 25 bp, Homo sapien
tgtctgaaccccaactgttagtgta

SEQ ID NO: 116627 - DNA, 25 bp, Homo sapien
ttcctgtacctcgaacagtgttaca

SEQ ID NO: 116628 - DNA, 25 bp, Homo sapien
ttcctgtacctccaacagtgttaca

SEQ ID NO: 116629 - DNA, 25 bp, Homo sapien
ttccctttacgatcggtgtggtaaa

SEQ ID NO: 116630 - DNA, 25 bp, Homo sapien
ttccctttacgaacggtgtggtaaa

SEQ ID NO: 116631 - DNA, 25 bp, Homo sapien
ttatcggttctctccctgtaatacg

SEQ ID NO: 116632 - DNA, 25 bp, Homo sapien
ttatcggttctcaccctgtaatacg

SEQ ID NO: 116633 - DNA, 25 bp, Homo sapien
ccatagggtctctcacgtgctggga

SEQ ID NO: 116634 - DNA, 25 bp, Homo sapien
ccatagggtctcacacgtgctggga

SEQ ID NO: 116635 - DNA, 25 bp, Homo sapien
ccacctgcgacctctgttcttggag

SEQ ID NO: 116636 - DNA, 25 bp, Homo sapien
ccacctgcgaccactgttcttggag

SEQ ID NO: 116637 - DNA, 25 bp, Homo sapien
acacggcgacccactgttgtttcag

SEQ ID NO: 116638 - DNA, 25 bp, Homo sapien
acacggcgaccctctgttgtttcag

SEQ ID NO: 116639 - DNA, 25 bp, Homo sapien
cctggaaccccttcttgtgtgtgag

SEQ ID NO: 116640 - DNA, 25 bp, Homo sapien
cctggaacccctacttgtgtgtgag

SEQ ID NO: 116641 - DNA, 25 bp, Homo sapien
ccgatcaaaaccacggtcgagaaga

SEQ ID NO: 116642 - DNA, 25 bp, Homo sapien
ccgatcaaaacctcggtcgagaaga

SEQ ID NO: 116643 - DNA, 25 bp, Homo sapien
cgaccttatttcctcctcagggtag

SEQ ID NO: 116644 - DNA, 25 bp, Homo sapien
cgaccttatttcgtcctcagggtag

SEQ ID NO: 116645 - DNA, 25 bp, Homo sapien
atcatttcctcgtcccgacgggtag

SEQ ID NO: 116646 - DNA, 25 bp, Homo sapien
atcatttcctcgacccgacgggtag

SEQ ID NO: 116647 - DNA, 25 bp, Homo sapien
tcgttcctgcaggaccggaccggag

SEQ ID NO: 116648 - DNA, 25 bp, Homo sapien
tcgttcctgcagcaccggaccggag

SEQ ID NO: 116649 - DNA, 25 bp, Homo sapien
gttttgattcacctccgagacagaa

SEQ ID NO: 116650 - DNA, 25 bp, Homo sapien
gttttgattcacgtccgagacagaa

SEQ ID NO: 116651 - DNA, 25 bp, Homo sapien
cgttttaaacattctacggagaatt

SEQ ID NO: 116652 - DNA, 25 bp, Homo sapien
cgttttaaacatactacggagaatt

SEQ ID NO: 116653 - DNA, 25 bp, Homo sapien
gttcttcttacctaaaccgggatct

SEQ ID NO: 116654 - DNA, 25 bp, Homo sapien
gttcttcttaccaaaaccgggatct

SEQ ID NO: 116655 - DNA, 25 bp, Homo sapien
agtctttccccaatgacagtgacta

SEQ ID NO: 116656 - DNA, 25 bp, Homo sapien
agtctttccccattgacagtgacta

SEQ ID NO: 116657 - DNA, 25 bp, Homo sapien
ttaggtcaggatttttgtagttact

SEQ ID NO: 116658 - DNA, 25 bp, Homo sapien
ttaggtcaggatatttgtagttact

SEQ ID NO: 116659 - DNA, 25 bp, Homo sapien
caaaagtctcatagtgactttgaaa

SEQ ID NO: 116660 - DNA, 25 bp, Homo sapien
caaaagtctcattgtgactttgaaa

SEQ ID NO: 116661 - DNA, 25 bp, Homo sapien
cacctctaaggtgttaccgaacacg

SEQ ID NO: 116662 - DNA, 25 bp, Homo sapien
cacctctaaggtcttaccgaacacg

SEQ ID NO: 116663 - DNA, 25 bp, Homo sapien
caatcttaggtaagttcgacaaccg

SEQ ID NO: 116664 - DNA, 25 bp, Homo sapien
caatcttaggtatgttcgacaaccg

SEQ ID NO: 116665 - DNA, 25 bp, Homo sapien
cttacccgtagaggtttctcatgct

SEQ ID NO: 116666 - DNA, 25 bp, Homo sapien
cttacccgtagacgtttctcatgct

SEQ ID NO: 116667 - DNA, 25 bp, Homo sapien
ggtcaaccaaaggttcccactaggt

SEQ ID NO: 116668 - DNA, 25 bp, Homo sapien
ggtcaaccaaagcttcccactaggt

SEQ ID NO: 116669 - DNA, 25 bp, Homo sapien
gtagtaccaaaggtaccgcacaagg

SEQ ID NO: 116670 - DNA, 25 bp, Homo sapien
gtagtaccaaagctaccgcacaagg

SEQ ID NO: 116671 - DNA, 25 bp, Homo sapien
gtatcccgggacctcggactgacgg

SEQ ID NO: 116672 - DNA, 25 bp, Homo sapien
gtatcccgggacgtcggactgacgg

SEQ ID NO: 116673 - DNA, 25 bp, Homo sapien
tttgtaccggggtcgtcgaagtcag

SEQ ID NO: 116674 - DNA, 25 bp, Homo sapien
tttgtaccggggacgtcgaagtcag

SEQ ID NO: 116675 - DNA, 25 bp, Homo sapien
cccgacgtgggaaacctatagacga

SEQ ID NO: 116676 - DNA, 25 bp, Homo sapien
cccgacgtgggatacctatagacga

SEQ ID NO: 116677 - DNA, 25 bp, Homo sapien
acgtgtaccgtgcacatagagacga

SEQ ID NO: 116678 - DNA, 25 bp, Homo sapien
acgtgtaccgtggacatagagacga

SEQ ID NO: 116679 - DNA, 25 bp, Homo sapien
tcgtaggtccgtgaagtcgagcaga

SEQ ID NO: 116680 - DNA, 25 bp, Homo sapien
tcgtaggtccgtcaagtcgagcaga

SEQ ID NO: 116681 - DNA, 25 bp, Homo sapien
acgtgtaaggacaacagaccgaata

SEQ ID NO: 116682 - DNA, 25 bp, Homo sapien
acgtgtaaggactacagaccgaata

SEQ ID NO: 116683 - DNA, 25 bp, Homo sapien
aacgagacccggaccgacataggta

SEQ ID NO: 116684 - DNA, 25 bp, Homo sapien
aacgagacccggtccgacataggta

SEQ ID NO: 116685 - DNA, 25 bp, Homo sapien
acggagccgagcagtcatgtaagta

SEQ ID NO: 116686 - DNA, 25 bp, Homo sapien
acggagccgagctgtcatgtaagta

SEQ ID NO: 116687 - DNA, 25 bp, Homo sapien
ttcaaaacgtcttgtggtcgacgga

SEQ ID NO: 116688 - DNA, 25 bp, Homo sapien
ttcaaaacgtctagtggtcgacgga

SEQ ID NO: 116689 - DNA, 25 bp, Homo sapien
cgagacgtcttttgggcgtcaacac

SEQ ID NO: 116690 - DNA, 25 bp, Homo sapien
cgagacgtctttagggcgtcaacac

SEQ ID NO: 116691 - DNA, 25 bp, Homo sapien
cggacactttcttggtgtgccaccg

SEQ ID NO: 116692 - DNA, 25 bp, Homo sapien
cggacactttctaggtgtgccaccg

SEQ ID NO: 116693 - DNA, 25 bp, Homo sapien
catacctgtcatagaggtgaccccg

SEQ ID NO: 116694 - DNA, 25 bp, Homo sapien
catacctgtcattgaggtgaccccg

SEQ ID NO: 116695 - DNA, 25 bp, Homo sapien
tgtcctgtttcttgtgtaaacgttg

SEQ ID NO: 116696 - DNA, 25 bp, Homo sapien
tgtcctgtttctagtgtaaacgttg

SEQ ID NO: 116697 - DNA, 25 bp, Homo sapien
tttcttctagtacaggtacaattgt

SEQ ID NO: 116698 - DNA, 25 bp, Homo sapien
tttcttctagtagaggtacaattgt

SEQ ID NO: 116699 - DNA, 25 bp, Homo sapien
tctttcgtatatggatctatacatg

SEQ ID NO: 116700 - DNA, 25 bp, Homo sapien
tctttcgtatatcgatctatacatg

SEQ ID NO: 116701 - DNA, 25 bp, Homo sapien
tagttacagtgactaacgttttatc

SEQ ID NO: 116702 - DNA, 25 bp, Homo sapien
tagttacagtgagtaacgttttatc

SEQ ID NO: 116703 - DNA, 25 bp, Homo sapien
gtttatatagttcgtttgaccttcc

SEQ ID NO: 116704 - DNA, 25 bp, Homo sapien
gtttatatagttggtttgaccttcc

SEQ ID NO: 116705 - DNA, 25 bp, Homo sapien
tcgttagttcgttctttaccccacg

SEQ ID NO: 116706 - DNA, 25 bp, Homo sapien
tcgttagttcgtactttaccccacg

SEQ ID NO: 116707 - DNA, 25 bp, Homo sapien
cgagtgtatgtcgtccttcgtgtgg

SEQ ID NO: 116708 - DNA, 25 bp, Homo sapien
cgagtgtatgtcctccttcgtgtgg

SEQ ID NO: 116709 - DNA, 25 bp, Homo sapien
cacgtctagtgtctcctcttcggtg

SEQ ID NO: 116710 - DNA, 25 bp, Homo sapien
cacgtctagtgtgtcctcttcggtg

SEQ ID NO: 116711 - DNA, 25 bp, Homo sapien
ccacactgagtagacatcttctgtc

SEQ ID NO: 116712 - DNA, 25 bp, Homo sapien
ccacactgagtacacatcttctgtc

SEQ ID NO: 116713 - DNA, 25 bp, Homo sapien
cagcaacgcttacgacaggccaccg

SEQ ID NO: 116714 - DNA, 25 bp, Homo sapien
cagcaacgcttaggacaggccaccg

SEQ ID NO: 116715 - DNA, 25 bp, Homo sapien
gaagaaaccgtcacggggcgccgtc

SEQ ID NO: 116716 - DNA, 25 bp, Homo sapien
gaagaaaccgtctcggggcgccgtc

SEQ ID NO: 116717 - DNA, 25 bp, Homo sapien
cacacacctcgctcgggttagagga

SEQ ID NO: 116718 - DNA, 25 bp, Homo sapien
cacacacctcgcacgggttagagga

SEQ ID NO: 116719 - DNA, 25 bp, Homo sapien
cgtaccctataaaggtgttcctctc

SEQ ID NO: 116720 - DNA, 25 bp, Homo sapien
cgtaccctataatggtgttcctctc

SEQ ID NO: 116721 - DNA, 25 bp, Homo sapien
acacacgcaaatcgtgctccgtctt

SEQ ID NO: 116722 - DNA, 25 bp, Homo sapien
acacacgcaaatggtgctccgtctt

SEQ ID NO: 116723 - DNA, 25 bp, Homo sapien
ggacgaacaaacaacagagctccaa

SEQ ID NO: 116724 - DNA, 25 bp, Homo sapien
ggacgaacaaactacagagctccaa

SEQ ID NO: 116725 - DNA, 25 bp, Homo sapien
gaagtcccagacttaaagaccacaa

SEQ ID NO: 116726 - DNA, 25 bp, Homo sapien
gaagtcccagacataaagaccacaa

SEQ ID NO: 116727 - DNA, 25 bp, Homo sapien
gtgagttctttcatccgacttccaa

SEQ ID NO: 116728 - DNA, 25 bp, Homo sapien
gtgagttctttcttccgacttccaa

SEQ ID NO: 116729 - DNA, 25 bp, Homo sapien
gtttcaatactttgtacattgacag

SEQ ID NO: 116730 - DNA, 25 bp, Homo sapien
gtttcaatacttagtacattgacag

SEQ ID NO: 116731 - DNA, 25 bp, Homo sapien
gcgctccacctccaactctgtcgca

SEQ ID NO: 116732 - DNA, 25 bp, Homo sapien
gcgctccacctcgaactctgtcgca

SEQ ID NO: 116733 - DNA, 25 bp, Homo sapien
cgacccacctttactcggtagtaga

SEQ ID NO: 116734 - DNA, 25 bp, Homo sapien
cgacccaccttttctcggtagtaga

SEQ ID NO: 116735 - DNA, 25 bp, Homo sapien
taacccttagttcttagtcgggaca

SEQ ID NO: 116736 - DNA, 25 bp, Homo sapien
taacccttagttgttagtcgggaca

SEQ ID NO: 116737 - DNA, 25 bp, Homo sapien
ttttatcggtggacccggtgggaca

SEQ ID NO: 116738 - DNA, 25 bp, Homo sapien
ttttatcggtggtcccggtgggaca

SEQ ID NO: 116739 - DNA, 25 bp, Homo sapien
atgttgttccggtgcccgggcctac

SEQ ID NO: 116740 - DNA, 25 bp, Homo sapien
atgttgttccggagcccgggcctac

SEQ ID NO: 116741 - DNA, 25 bp, Homo sapien
gaggaccgggtgtccttcgaccgta

SEQ ID NO: 116742 - DNA, 25 bp, Homo sapien
gaggaccgggtgaccttcgaccgta

SEQ ID NO: 116743 - DNA, 25 bp, Homo sapien
aaccgacccagtggagttccctaca

SEQ ID NO: 116744 - DNA, 25 bp, Homo sapien
aaccgacccagtcgagttccctaca

SEQ ID NO: 116745 - DNA, 25 bp, Homo sapien
gtctactcaattggttatctagttt

SEQ ID NO: 116746 - DNA, 25 bp, Homo sapien
gtctactcaattcgttatctagttt

SEQ ID NO: 116747 - DNA, 25 bp, Homo sapien
atttgcagtatttcgttcactggtt

SEQ ID NO: 116748 - DNA, 25 bp, Homo sapien
atttgcagtattacgttcactggtt

SEQ ID NO: 116749 - DNA, 25 bp, Homo sapien
gtaaggaaattttcaccaataagtc

SEQ ID NO: 116750 - DNA, 25 bp, Homo sapien
gtaaggaaatttacaccaataagtc

SEQ ID NO: 116751 - DNA, 25 bp, Homo sapien
gaatccttggaaacccgaaaacgtg

SEQ ID NO: 116752 - DNA, 25 bp, Homo sapien
gaatccttggaatcccgaaaacgtg

SEQ ID NO: 116753 - DNA, 25 bp, Homo sapien
ctccggtttgaacctcttcaacagg

SEQ ID NO: 116754 - DNA, 25 bp, Homo sapien
ctccggtttgaagctcttcaacagg

SEQ ID NO: 116755 - DNA, 25 bp, Homo sapien
cgggtgttaaagatatcaactctga

SEQ ID NO: 116756 - DNA, 25 bp, Homo sapien
cgggtgttaaagttatcaactctga

SEQ ID NO: 116757 - DNA, 25 bp, Homo sapien
gtaacgttaaatctctacaccggta

SEQ ID NO: 116758 - DNA, 25 bp, Homo sapien
gtaacgttaaatgtctacaccggta

SEQ ID NO: 116759 - DNA, 25 bp, Homo sapien
aaaagattacagtgtctcaccgaat

SEQ ID NO: 116760 - DNA, 25 bp, Homo sapien
aaaagattacagagtctcaccgaat

SEQ ID NO: 116761 - DNA, 25 bp, Homo sapien
gtcatgttggagtactttaccaact

SEQ ID NO: 116762 - DNA, 25 bp, Homo sapien
gtcatgttggagaactttaccaact

SEQ ID NO: 116763 - DNA, 25 bp, Homo sapien
gggaaagacagttcgtatagaaccg

SEQ ID NO: 116764 - DNA, 25 bp, Homo sapien
gggaaagacagtacgtatagaaccg

SEQ ID NO: 116765 - DNA, 25 bp, Homo sapien
ggacacgagtacaatctaaccgccg

SEQ ID NO: 116766 - DNA, 25 bp, Homo sapien
ggacacgagtactatctaaccgccg

SEQ ID NO: 116767 - DNA, 25 bp, Homo sapien
gtttcgaaacagagaaaccatcggg

SEQ ID NO: 116768 - DNA, 25 bp, Homo sapien
gtttcgaaacagtgaaaccatcggg

SEQ ID NO: 116769 - DNA, 25 bp, Homo sapien
tatttcaacggacgaaacaatcttg

SEQ ID NO: 116770 - DNA, 25 bp, Homo sapien
tatttcaacggaggaaacaatcttg

SEQ ID NO: 116771 - DNA, 25 bp, Homo sapien
attgaacagggtaacccaatttagt

SEQ ID NO: 116772 - DNA, 25 bp, Homo sapien
attgaacagggttacccaatttagt

SEQ ID NO: 116773 - DNA, 25 bp, Homo sapien
gagacacagtgtcatatccaaaatt

SEQ ID NO: 116774 - DNA, 25 bp, Homo sapien
gagacacagtgtgatatccaaaatt

SEQ ID NO: 116775 - DNA, 25 bp, Homo sapien
acggtctagtttttatggtctcagg

SEQ ID NO: 116776 - DNA, 25 bp, Homo sapien
acggtctagtttatatggtctcagg

SEQ ID NO: 116777 - DNA, 25 bp, Homo sapien
gtcctttcctgtgacgtcgtctagg

SEQ ID NO: 116778 - DNA, 25 bp, Homo sapien
gtcctttcctgtcacgtcgtctagg

SEQ ID NO: 116779 - DNA, 25 bp, Homo sapien
agaatcacagtttgtgttctccttg

SEQ ID NO: 116780 - DNA, 25 bp, Homo sapien
agaatcacagttagtgttctccttg

SEQ ID NO: 116781 - DNA, 25 bp, Homo sapien
ggattctcatagttttcacgtttta

SEQ ID NO: 116782 - DNA, 25 bp, Homo sapien
ggattctcatagatttcacgtttta

SEQ ID NO: 116783 - DNA, 25 bp, Homo sapien
cgtttcgagttttcatgtattaact

SEQ ID NO: 116784 - DNA, 25 bp, Homo sapien
cgtttcgagtttacatgtattaact

SEQ ID NO: 116785 - DNA, 25 bp, Homo sapien
ttgatggttgactatagtttttttc

SEQ ID NO: 116786 - DNA, 25 bp, Homo sapien
ttgatggttgacaatagtttttttc

SEQ ID NO: 116787 - DNA, 25 bp, Homo sapien
agcgggtcgccgtagcacctttctc

SEQ ID NO: 116788 - DNA, 25 bp, Homo sapien
agcgggtcgccgaagcacctttctc

SEQ ID NO: 116789 - DNA, 25 bp, Homo sapien
aaaggtcgtcactacaatctttgtc

SEQ ID NO: 116790 - DNA, 25 bp, Homo sapien
aaaggtcgtcacaacaatctttgtc

SEQ ID NO: 116791 - DNA, 25 bp, Homo sapien
acgaggagcccactatgactcccgg

SEQ ID NO: 116792 - DNA, 25 bp, Homo sapien
acgaggagcccagtatgactcccgg

SEQ ID NO: 116793 - DNA, 25 bp, Homo sapien
cgtaaactcccacatctacaacggg

SEQ ID NO: 116794 - DNA, 25 bp, Homo sapien
cgtaaactcccagatctacaacggg

SEQ ID NO: 116795 - DNA, 25 bp, Homo sapien
gtacagtatactaccccaacaggga

SEQ ID NO: 116796 - DNA, 25 bp, Homo sapien
gtacagtatacttccccaacaggga

SEQ ID NO: 116797 - DNA, 25 bp, Homo sapien
tttccctgtccgtctagcttaagac

SEQ ID NO: 116798 - DNA, 25 bp, Homo sapien
tttccctgtccgactagcttaagac

SEQ ID NO: 116799 - DNA, 25 bp, Homo sapien
atttttccgggacgtagtctttaag

SEQ ID NO: 116800 - DNA, 25 bp, Homo sapien
atttttccgggaggtagtctttaag

SEQ ID NO: 116801 - DNA, 25 bp, Homo sapien
gtcgtaccacggacagggtcttcgg

SEQ ID NO: 116802 - DNA, 25 bp, Homo sapien
gtcgtaccacggtcagggtcttcgg

SEQ ID NO: 116803 - DNA, 25 bp, Homo sapien
gttccggaaattaagcgtctcacgg

SEQ ID NO: 116804 - DNA, 25 bp, Homo sapien
gttccggaaatttagcgtctcacgg

SEQ ID NO: 116805 - DNA, 25 bp, Homo sapien
caaaagggaaaaagtgatctacgtc

SEQ ID NO: 116806 - DNA, 25 bp, Homo sapien
caaaagggaaaatgtgatctacgtc

SEQ ID NO: 116807 - DNA, 25 bp, Homo sapien
ccaagaagagatctttagattacta

SEQ ID NO: 116808 - DNA, 25 bp, Homo sapien
ccaagaagagatgtttagattacta

SEQ ID NO: 116809 - DNA, 25 bp, Homo sapien
gaattaacagatggatctcttcacc

SEQ ID NO: 116810 - DNA, 25 bp, Homo sapien
gaattaacagatcgatctcttcacc

SEQ ID NO: 116811 - DNA, 25 bp, Homo sapien
gactaaaataacttttcctttgtat

SEQ ID NO: 116812 - DNA, 25 bp, Homo sapien
gactaaaataacatttcctttgtat

SEQ ID NO: 116813 - DNA, 25 bp, Homo sapien
ctgtagtaaaacaagggccttttcg

SEQ ID NO: 116814 - DNA, 25 bp, Homo sapien
ctgtagtaaaactagggccttttcg

SEQ ID NO: 116815 - DNA, 25 bp, Homo sapien
ctgatatcagttggatcctttttcg

SEQ ID NO: 116816 - DNA, 25 bp, Homo sapien
ctgatatcagttcgatcctttttcg

SEQ ID NO: 116817 - DNA, 25 bp, Homo sapien
tagacgaccttgaattcgtggtaaa

SEQ ID NO: 116818 - DNA, 25 bp, Homo sapien
tagacgaccttgtattcgtggtaaa

SEQ ID NO: 116819 - DNA, 25 bp, Homo sapien
ctcggctctgcttcggggttcggtc

SEQ ID NO: 116820 - DNA, 25 bp, Homo sapien
ctcggctctgctacggggttcggtc

SEQ ID NO: 116821 - DNA, 25 bp, Homo sapien
accttctctggatccgggacgtggg

SEQ ID NO: 116822 - DNA, 25 bp, Homo sapien
accttctctggaaccgggacgtggg

SEQ ID NO: 116823 - DNA, 25 bp, Homo sapien
acaggtctccggtcgacagagtgga

SEQ ID NO: 116824 - DNA, 25 bp, Homo sapien
acaggtctccggacgacagagtgga

SEQ ID NO: 116825 - DNA, 25 bp, Homo sapien
tctaagccccactgactaagtaggg

SEQ ID NO: 116826 - DNA, 25 bp, Homo sapien
tctaagccccacagactaagtaggg

SEQ ID NO: 116827 - DNA, 25 bp, Homo sapien
ctaagaccctcgtccgtgacgggac

SEQ ID NO: 116828 - DNA, 25 bp, Homo sapien
ctaagaccctcgaccgtgacgggac

SEQ ID NO: 116829 - DNA, 25 bp, Homo sapien
agtatgggtgtcgactccacaggac

SEQ ID NO: 116830 - DNA, 25 bp, Homo sapien
agtatgggtgtccactccacaggac

SEQ ID NO: 116831 - DNA, 25 bp, Homo sapien
gagtcatggagtacatccaccttag

SEQ ID NO: 116832 - DNA, 25 bp, Homo sapien
gagtcatggagttcatccaccttag

SEQ ID NO: 116833 - DNA, 25 bp, Homo sapien
aggtaatcggagtttctgtccttca

SEQ ID NO: 116834 - DNA, 25 bp, Homo sapien
aggtaatcggagattctgtccttca

SEQ ID NO: 116835 - DNA, 25 bp, Homo sapien
aatatatagtggtcgtgtccccgga

SEQ ID NO: 116836 - DNA, 25 bp, Homo sapien
aatatatagtggacgtgtccccgga

SEQ ID NO: 116837 - DNA, 25 bp, Homo sapien
tgaatcgtagtgagatcacctccga

SEQ ID NO: 116838 - DNA, 25 bp, Homo sapien
tgaatcgtagtgtgatcacctccga

SEQ ID NO: 116839 - DNA, 25 bp, Homo sapien
atgtccgtcgtctcaccgtcgtcga

SEQ ID NO: 116840 - DNA, 25 bp, Homo sapien
atgtccgtcgtcacaccgtcgtcga

SEQ ID NO: 116841 - DNA, 25 bp, Homo sapien
gttgtggtcgtaacccgaggtcgtc

SEQ ID NO: 116842 - DNA, 25 bp, Homo sapien
gttgtggtcgtatcccgaggtcgtc

SEQ ID NO: 116843 - DNA, 25 bp, Homo sapien
tctgggctaggtttcgaaggtcgac

SEQ ID NO: 116844 - DNA, 25 bp, Homo sapien
tctgggctaggtatcgaaggtcgac

SEQ ID NO: 116845 - DNA, 25 bp, Homo sapien
tccagcgacctgagcgcgaggttgt

SEQ ID NO: 116846 - DNA, 25 bp, Homo sapien
tccagcgacctgtgcgcgaggttgt

SEQ ID NO: 116847 - DNA, 25 bp, Homo sapien
acccctcgtggtcgagacgtagtta

SEQ ID NO: 116848 - DNA, 25 bp, Homo sapien
acccctcgtggtggagacgtagtta

SEQ ID NO: 116849 - DNA, 25 bp, Homo sapien
ttccccaatgacagtgactacaacg

SEQ ID NO: 116850 - DNA, 25 bp, Homo sapien
ttccccaatgactgtgactacaacg

SEQ ID NO: 116851 - DNA, 25 bp, Homo sapien
tgtcccagactcagggtagaacccg

SEQ ID NO: 116852 - DNA, 25 bp, Homo sapien
tgtcccagactctgggtagaacccg

SEQ ID NO: 116853 - DNA, 25 bp, Homo sapien
cctccagaaccgagtcgagactctg

SEQ ID NO: 116854 - DNA, 25 bp, Homo sapien
cctccagaaccgtgtcgagactctg

SEQ ID NO: 116855 - DNA, 25 bp, Homo sapien
actgaagaaccgacacgagacgtgg

SEQ ID NO: 116856 - DNA, 25 bp, Homo sapien
actgaagaaccgtcacgagacgtgg

SEQ ID NO: 116857 - DNA, 25 bp, Homo sapien
aaccggaggctctacgacaataccg

SEQ ID NO: 116858 - DNA, 25 bp, Homo sapien
aaccggaggctcaacgacaataccg

SEQ ID NO: 116859 - DNA, 25 bp, Homo sapien
acacttgatgtcatgacctaatccg

SEQ ID NO: 116860 - DNA, 25 bp, Homo sapien
acacttgatgtcttgacctaatccg

SEQ ID NO: 116861 - DNA, 25 bp, Homo sapien
gtcctagacggagttcctcacctgt

SEQ ID NO: 116862 - DNA, 25 bp, Homo sapien
gtcctagacggacttcctcacctgt

SEQ ID NO: 116863 - DNA, 25 bp, Homo sapien
acgtcttgcaccacgttccatctgt

SEQ ID NO: 116864 - DNA, 25 bp, Homo sapien
acgtcttgcacctcgttccatctgt

SEQ ID NO: 116865 - DNA, 25 bp, Homo sapien
gctcacgtctatgagtttccagtcc

SEQ ID NO: 116866 - DNA, 25 bp, Homo sapien
gctcacgtctatcagtttccagtcc

SEQ ID NO: 116867 - DNA, 25 bp, Homo sapien
tggagctccttgaggtacagacgtc

SEQ ID NO: 116868 - DNA, 25 bp, Homo sapien
tggagctccttgtggtacagacgtc

SEQ ID NO: 116869 - DNA, 25 bp, Homo sapien
ctgcgtgtttttcgagtgtaacatt

SEQ ID NO: 116870 - DNA, 25 bp, Homo sapien
ctgcgtgtttttggagtgtaacatt

SEQ ID NO: 116871 - DNA, 25 bp, Homo sapien
ggttgacatcttttatgtctcatct

SEQ ID NO: 116872 - DNA, 25 bp, Homo sapien
ggttgacatcttatatgtctcatct

SEQ ID NO: 116873 - DNA, 25 bp, Homo sapien
gttttttggtggacgagactcactt

SEQ ID NO: 116874 - DNA, 25 bp, Homo sapien
gttttttggtggtcgagactcactt

SEQ ID NO: 116875 - DNA, 25 bp, Homo sapien
cgtgtgacgtctgtcttctcgtgtt

SEQ ID NO: 116876 - DNA, 25 bp, Homo sapien
cgtgtgacgtctctcttctcgtgtt

SEQ ID NO: 116877 - DNA, 25 bp, Homo sapien
caagagaaggtcacctctttacaag

SEQ ID NO: 116878 - DNA, 25 bp, Homo sapien
caagagaaggtctcctctttacaag

SEQ ID NO: 116879 - DNA, 25 bp, Homo sapien
tccccaggatgtcttctttgactag

SEQ ID NO: 116880 - DNA, 25 bp, Homo sapien
tccccaggatgtgttctttgactag

SEQ ID NO: 116881 - DNA, 25 bp, Homo sapien
tctactcggttagtctttggacgtg

SEQ ID NO: 116882 - DNA, 25 bp, Homo sapien
tctactcggttactctttggacgtg

SEQ ID NO: 116883 - DNA, 25 bp, Homo sapien
gtcccacagtttaatggttcatctt

SEQ ID NO: 116884 - DNA, 25 bp, Homo sapien
gtcccacagttttatggttcatctt

SEQ ID NO: 116885 - DNA, 25 bp, Homo sapien
ttctcttaagggagagatctttctt

SEQ ID NO: 116886 - DNA, 25 bp, Homo sapien
ttctcttaagggtgagatctttctt

SEQ ID NO: 116887 - DNA, 25 bp, Homo sapien
tctccagacttgtggacctgtctca

SEQ ID NO: 116888 - DNA, 25 bp, Homo sapien
tctccagacttgaggacctgtctca

SEQ ID NO: 116889 - DNA, 25 bp, Homo sapien
tcctccgtctcgacgggactatcaa

SEQ ID NO: 116890 - DNA, 25 bp, Homo sapien
tcctccgtctcgtcgggactatcaa

SEQ ID NO: 116891 - DNA, 25 bp, Homo sapien
tcatagacgttgtgacttcctatag

SEQ ID NO: 116892 - DNA, 25 bp, Homo sapien
tcatagacgttgagacttcctatag

SEQ ID NO: 116893 - DNA, 25 bp, Homo sapien
caacacagtagatctgtttgcctga

SEQ ID NO: 116894 - DNA, 25 bp, Homo sapien
caacacagtagaactgtttgcctga

SEQ ID NO: 116895 - DNA, 25 bp, Homo sapien
aactacggacaccttttgcagtgac

SEQ ID NO: 116896 - DNA, 25 bp, Homo sapien
aactacggacacgttttgcagtgac

SEQ ID NO: 116897 - DNA, 25 bp, Homo sapien
ttcctaactcgtttgacgtccgacg

SEQ ID NO: 116898 - DNA, 25 bp, Homo sapien
ttcctaactcgtatgacgtccgacg

SEQ ID NO: 116899 - DNA, 25 bp, Homo sapien
ccttcacgtcggtcgagcgacgcgt

SEQ ID NO: 116900 - DNA, 25 bp, Homo sapien
ccttcacgtcggacgagcgacgcgt

SEQ ID NO: 116901 - DNA, 25 bp, Homo sapien
acccctggacggaggtacgtactgt

SEQ ID NO: 116902 - DNA, 25 bp, Homo sapien
acccctggacggtggtacgtactgt

SEQ ID NO: 116903 - DNA, 25 bp, Homo sapien
agtcccgggtaccagtcgtgtcgcc

SEQ ID NO: 116904 - DNA, 25 bp, Homo sapien
agtcccgggtacgagtcgtgtcgcc

SEQ ID NO: 116905 - DNA, 25 bp, Homo sapien
ggtcctccggacagtctcggacttc

SEQ ID NO: 116906 - DNA, 25 bp, Homo sapien
ggtcctccggactgtctcggacttc

SEQ ID NO: 116907 - DNA, 25 bp, Homo sapien
gatacgtactggtaagacaactttc

SEQ ID NO: 116908 - DNA, 25 bp, Homo sapien
gatacgtactggaaagacaactttc

SEQ ID NO: 116909 - DNA, 25 bp, Homo sapien
tcgatcttgtaatcaccagtcgtcc

SEQ ID NO: 116910 - DNA, 25 bp, Homo sapien
tcgatcttgtaaacaccagtcgtcc

SEQ ID NO: 116911 - DNA, 25 bp, Homo sapien
tggtacaacgccacgaacgcgtcct

SEQ ID NO: 116912 - DNA, 25 bp, Homo sapien
tggtacaacgcctcgaacgcgtcct

SEQ ID NO: 116913 - DNA, 25 bp, Homo sapien
gataatactagaaggtcccgtgttt

SEQ ID NO: 116914 - DNA, 25 bp, Homo sapien
gataatactagatggtcccgtgttt

SEQ ID NO: 116915 - DNA, 25 bp, Homo sapien
gaatgataattgaaggcacctgttt

SEQ ID NO: 116916 - DNA, 25 bp, Homo sapien
gaatgataattgtaggcacctgttt

SEQ ID NO: 116917 - DNA, 25 bp, Homo sapien
caggacttagggtagttgcaattct

SEQ ID NO: 116918 - DNA, 25 bp, Homo sapien
caggacttagggaagttgcaattct

SEQ ID NO: 116919 - DNA, 25 bp, Homo sapien
acacggaagatggaattccgaattt

SEQ ID NO: 116920 - DNA, 25 bp, Homo sapien
acacggaagatgcaattccgaattt

SEQ ID NO: 116921 - DNA, 25 bp, Homo sapien
agaaattaagtgtcttgacgacttt

SEQ ID NO: 116922 - DNA, 25 bp, Homo sapien
agaaattaagtgacttgacgacttt

SEQ ID NO: 116923 - DNA, 25 bp, Homo sapien
aaatgagaaggagatcccgtaacat

SEQ ID NO: 116924 - DNA, 25 bp, Homo sapien
aaatgagaaggacatcccgtaacat

SEQ ID NO: 116925 - DNA, 25 bp, Homo sapien
aaaagaagacgactgtcctcttgat

SEQ ID NO: 116926 - DNA, 25 bp, Homo sapien
aaaagaagacgagtgtcctcttgat

SEQ ID NO: 116927 - DNA, 25 bp, Homo sapien
gtaaagtccactgctctactactga

SEQ ID NO: 116928 - DNA, 25 bp, Homo sapien
gtaaagtccactcctctactactga

SEQ ID NO: 116929 - DNA, 25 bp, Homo sapien
aaagtacggtacacacttacgtcag

SEQ ID NO: 116930 - DNA, 25 bp, Homo sapien
aaagtacggtactcacttacgtcag

SEQ ID NO: 116931 - DNA, 25 bp, Homo sapien
ggggcacattgaccttagacaggct

SEQ ID NO: 116932 - DNA, 25 bp, Homo sapien
ggggcacattgagcttagacaggct

SEQ ID NO: 116933 - DNA, 25 bp, Homo sapien
gagtgggaatctgaccaaaagacct

SEQ ID NO: 116934 - DNA, 25 bp, Homo sapien
gagtgggaatctcaccaaaagacct

SEQ ID NO: 116935 - DNA, 25 bp, Homo sapien
cagggtgaccacgaatagcacccct

SEQ ID NO: 116936 - DNA, 25 bp, Homo sapien
cagggtgaccaccaatagcacccct

SEQ ID NO: 116937 - DNA, 25 bp, Homo sapien
ggtcggacccaaataacgaagctct

SEQ ID NO: 116938 - DNA, 25 bp, Homo sapien
ggtcggacccaattaacgaagctct

SEQ ID NO: 116939 - DNA, 25 bp, Homo sapien
agagccggtctcatttatcgaaatc

SEQ ID NO: 116940 - DNA, 25 bp, Homo sapien
agagccggtctcttttatcgaaatc

SEQ ID NO: 116941 - DNA, 25 bp, Homo sapien
gaaaatcgagttttttgtctaaaca

SEQ ID NO: 116942 - DNA, 25 bp, Homo sapien
gaaaatcgagttatttgtctaaaca

SEQ ID NO: 116943 - DNA, 25 bp, Homo sapien
cgaattgtagagtgaattctattaa

SEQ ID NO: 116944 - DNA, 25 bp, Homo sapien
cgaattgtagagagaattctattaa

SEQ ID NO: 116945 - DNA, 25 bp, Homo sapien
ggaatcttaggtcaggatttttgta

SEQ ID NO: 116946 - DNA, 25 bp, Homo sapien
ggaatcttaggtgaggatttttgta

SEQ ID NO: 116947 - DNA, 25 bp, Homo sapien
acttcatttgagctgtttttagtac

SEQ ID NO: 116948 - DNA, 25 bp, Homo sapien
acttcatttgaggtgtttttagtac

SEQ ID NO: 116949 - DNA, 25 bp, Homo sapien
gatatcagttggatcctttttcgtt

SEQ ID NO: 116950 - DNA, 25 bp, Homo sapien
gatatcagttggttcctttttcgtt

SEQ ID NO: 116951 - DNA, 25 bp, Homo sapien
gatttattgtttccttactgaacga

SEQ ID NO: 116952 - DNA, 25 bp, Homo sapien
gatttattgtttgcttactgaacga

SEQ ID NO: 116953 - DNA, 25 bp, Homo sapien
tccttaaggtttactcgtgacgtcc

SEQ ID NO: 116954 - DNA, 25 bp, Homo sapien
tccttaaggttttctcgtgacgtcc

SEQ ID NO: 116955 - DNA, 25 bp, Homo sapien
cttagagtactttgtttccgtagag

SEQ ID NO: 116956 - DNA, 25 bp, Homo sapien
cttagagtacttagtttccgtagag

SEQ ID NO: 116957 - DNA, 25 bp, Homo sapien
taagagtctgtcacgtcaccatagt

SEQ ID NO: 116958 - DNA, 25 bp, Homo sapien
taagagtctgtctcgtcaccatagt

SEQ ID NO: 116959 - DNA, 25 bp, Homo sapien
aataggtccgtttgtaccctacagt

SEQ ID NO: 116960 - DNA, 25 bp, Homo sapien
aataggtccgttagtaccctacagt

SEQ ID NO: 116961 - DNA, 25 bp, Homo sapien
agtaacgtgtctttaaaccacgatt

SEQ ID NO: 116962 - DNA, 25 bp, Homo sapien
agtaacgtgtctataaaccacgatt

SEQ ID NO: 116963 - DNA, 25 bp, Homo sapien
gagtacctattccagactaaagttt

SEQ ID NO: 116964 - DNA, 25 bp, Homo sapien
gagtacctattcgagactaaagttt

SEQ ID NO: 116965 - DNA, 25 bp, Homo sapien
gtggacccgtatcgaagctttcttc

SEQ ID NO: 116966 - DNA, 25 bp, Homo sapien
gtggacccgtatggaagctttcttc

SEQ ID NO: 116967 - DNA, 25 bp, Homo sapien
acactccgatgaagtctttttaccg

SEQ ID NO: 116968 - DNA, 25 bp, Homo sapien
acactccgatgatgtctttttaccg

SEQ ID NO: 116969 - DNA, 25 bp, Homo sapien
tgtagacttgaaggtgctttttctc

SEQ ID NO: 116970 - DNA, 25 bp, Homo sapien
tgtagacttgaacgtgctttttctc

SEQ ID NO: 116971 - DNA, 25 bp, Homo sapien
gaggtaagctagattttttttttct

SEQ ID NO: 116972 - DNA, 25 bp, Homo sapien
gaggtaagctagtttttttttttct

SEQ ID NO: 116973 - DNA, 25 bp, Homo sapien
gatccacggtcttttctatcttttg

SEQ ID NO: 116974 - DNA, 25 bp, Homo sapien
gatccacggtctattctatcttttg

SEQ ID NO: 116975 - DNA, 25 bp, Homo sapien
agcccaagtaagtctacttctgttg

SEQ ID NO: 116976 - DNA, 25 bp, Homo sapien
agcccaagtaagactacttctgttg

SEQ ID NO: 116977 - DNA, 25 bp, Homo sapien
cactcacttcggtttcatgtagtcg

SEQ ID NO: 116978 - DNA, 25 bp, Homo sapien
cactcacttcggattcatgtagtcg

SEQ ID NO: 116979 - DNA, 25 bp, Homo sapien
gtcccctcggggttctctacctaga

SEQ ID NO: 116980 - DNA, 25 bp, Homo sapien
gtcccctcggggatctctacctaga

SEQ ID NO: 116981 - DNA, 25 bp, Homo sapien
tcccatcgaatagttgtccgacgac

SEQ ID NO: 116982 - DNA, 25 bp, Homo sapien
tcccatcgaatacttgtccgacgac

SEQ ID NO: 116983 - DNA, 25 bp, Homo sapien
gtcctccgacttacgggtccaggtc

SEQ ID NO: 116984 - DNA, 25 bp, Homo sapien
gtcctccgactttcgggtccaggtc

SEQ ID NO: 116985 - DNA, 25 bp, Homo sapien
gagtctccacttctgacgatccggg

SEQ ID NO: 116986 - DNA, 25 bp, Homo sapien
gagtctccacttgtgacgatccggg

SEQ ID NO: 116987 - DNA, 25 bp, Homo sapien
gttcgtcctcttacacggtcaccag

SEQ ID NO: 116988 - DNA, 25 bp, Homo sapien
gttcgtcctctttcacggtcaccag

SEQ ID NO: 116989 - DNA, 25 bp, Homo sapien
gggtttgtgccgatttatacccagt

SEQ ID NO: 116990 - DNA, 25 bp, Homo sapien
gggtttgtgccgttttatacccagt

SEQ ID NO: 116991 - DNA, 25 bp, Homo sapien
gtctttccgcgacttgacacaccgg

SEQ ID NO: 116992 - DNA, 25 bp, Homo sapien
gtctttccgcgagttgacacaccgg

SEQ ID NO: 116993 - DNA, 25 bp, Homo sapien
agttcttaccacgatcaacacatgg

SEQ ID NO: 116994 - DNA, 25 bp, Homo sapien
agttcttaccaccatcaacacatgg

SEQ ID NO: 116995 - DNA, 25 bp, Homo sapien
gtcggtctgacgtcctggaccccac

SEQ ID NO: 116996 - DNA, 25 bp, Homo sapien
gtcggtctgacgacctggaccccac

SEQ ID NO: 116997 - DNA, 25 bp, Homo sapien
gtggtcgtccagtaccagggaccca

SEQ ID NO: 116998 - DNA, 25 bp, Homo sapien
gtggtcgtccagaaccagggaccca

SEQ ID NO: 116999 - DNA, 25 bp, Homo sapien
gagggtaagagatccagggacctcc

SEQ ID NO: 117000 - DNA, 25 bp, Homo sapien
gagggtaagagaaccagggacctcc

SEQ ID NO: 117001 - DNA, 25 bp, Homo sapien
gggtttgtggtacgtcacgattttc

SEQ ID NO: 117002 - DNA, 25 bp, Homo sapien
gggtttgtggtaggtcacgattttc

SEQ ID NO: 117003 - DNA, 25 bp, Homo sapien
tagtaaaggtccaagtcctttatct

SEQ ID NO: 117004 - DNA, 25 bp, Homo sapien
tagtaaaggtcctagtcctttatct

SEQ ID NO: 117005 - DNA, 25 bp, Homo sapien
gagtgttgacccttgacagtttctg

SEQ ID NO: 117006 - DNA, 25 bp, Homo sapien
gagtgttgacccatgacagtttctg

SEQ ID NO: 117007 - DNA, 25 bp, Homo sapien
gcgagtcttttgtgaactcgttctc

SEQ ID NO: 117008 - DNA, 25 bp, Homo sapien
gcgagtcttttgagaactcgttctc

SEQ ID NO: 117009 - DNA, 25 bp, Homo sapien
cggtgagtccagagccggttactag

SEQ ID NO: 117010 - DNA, 25 bp, Homo sapien
cggtgagtccagtgccggttactag

SEQ ID NO: 117011 - DNA, 25 bp, Homo sapien
tctctgggccgaagccgaagtaccg

SEQ ID NO: 117012 - DNA, 25 bp, Homo sapien
tctctgggccgatgccgaagtaccg

SEQ ID NO: 117013 - DNA, 25 bp, Homo sapien
atttacatggggaacccgaagacta

SEQ ID NO: 117014 - DNA, 25 bp, Homo sapien
atttacatggggtacccgaagacta

SEQ ID NO: 117015 - DNA, 25 bp, Homo sapien
atagtcctaaaagacaaccaagttg

SEQ ID NO: 117016 - DNA, 25 bp, Homo sapien
atagtcctaaaacacaaccaagttg

SEQ ID NO: 117017 - DNA, 25 bp, Homo sapien
gtcccgtactaactaatttcgattg

SEQ ID NO: 117018 - DNA, 25 bp, Homo sapien
gtcccgtactaagtaatttcgattg

SEQ ID NO: 117019 - DNA, 25 bp, Homo sapien
gtgtattctaaagtgatttctatcc

SEQ ID NO: 117020 - DNA, 25 bp, Homo sapien
gtgtattctaaactgatttctatcc

SEQ ID NO: 117021 - DNA, 25 bp, Homo sapien
ttttttcacgagatgatcttgaccc

SEQ ID NO: 117022 - DNA, 25 bp, Homo sapien
ttttttcacgagttgatcttgaccc

SEQ ID NO: 117023 - DNA, 25 bp, Homo sapien
tcgtccttcccgttatttccaggtt

SEQ ID NO: 117024 - DNA, 25 bp, Homo sapien
tcgtccttcccgatatttccaggtt

SEQ ID NO: 117025 - DNA, 25 bp, Homo sapien
gacttcttcctttttctccgaggtt

SEQ ID NO: 117026 - DNA, 25 bp, Homo sapien
gacttcttccttattctccgaggtt

SEQ ID NO: 117027 - DNA, 25 bp, Homo sapien
tgcaacgcatgctccgcgaccgtgt

SEQ ID NO: 117028 - DNA, 25 bp, Homo sapien
tgcaacgcatgcaccgcgaccgtgt

SEQ ID NO: 117029 - DNA, 25 bp, Homo sapien
ccactgtgattgctccgacgatgtt

SEQ ID NO: 117030 - DNA, 25 bp, Homo sapien
ccactgtgattggtccgacgatgtt

SEQ ID NO: 117031 - DNA, 25 bp, Homo sapien
aacaccattttctaggacccgtagg

SEQ ID NO: 117032 - DNA, 25 bp, Homo sapien
aacaccattttcaaggacccgtagg

SEQ ID NO: 117033 - DNA, 25 bp, Homo sapien
accctttctcgtaggagaccgtcca

SEQ ID NO: 117034 - DNA, 25 bp, Homo sapien
accctttctcgttggagaccgtcca

SEQ ID NO: 117035 - DNA, 25 bp, Homo sapien
accattgcactcaggagtcacttca

SEQ ID NO: 117036 - DNA, 25 bp, Homo sapien
accattgcactctggagtcacttca

SEQ ID NO: 117037 - DNA, 25 bp, Homo sapien
agcctggacaccggagtcgggtctg

SEQ ID NO: 117038 - DNA, 25 bp, Homo sapien
agcctggacacccgagtcgggtctg

SEQ ID NO: 117039 - DNA, 25 bp, Homo sapien
agtctctcctctgagttgagtgtgt

SEQ ID NO: 117040 - DNA, 25 bp, Homo sapien
agtctctcctctcagttgagtgtgt

SEQ ID NO: 117041 - DNA, 25 bp, Homo sapien
tagggccctcgtgtgtcgtaacgtg

SEQ ID NO: 117042 - DNA, 25 bp, Homo sapien
tagggccctcgtctgtcgtaacgtg

SEQ ID NO: 117043 - DNA, 25 bp, Homo sapien
actaagtccaccattcggagactcg

SEQ ID NO: 117044 - DNA, 25 bp, Homo sapien
actaagtccacctttcggagactcg

SEQ ID NO: 117045 - DNA, 25 bp, Homo sapien
acctttgtccccagtgatatgaaac

SEQ ID NO: 117046 - DNA, 25 bp, Homo sapien
acctttgtcccctgtgatatgaaac

SEQ ID NO: 117047 - DNA, 25 bp, Homo sapien
ccttgaggaaaaggtactcatgaga

SEQ ID NO: 117048 - DNA, 25 bp, Homo sapien
ccttgaggaaaacgtactcatgaga

SEQ ID NO: 117049 - DNA, 25 bp, Homo sapien
ttacaggtaaaccagacggtgtgga

SEQ ID NO: 117050 - DNA, 25 bp, Homo sapien
ttacaggtaaacgagacggtgtgga

SEQ ID NO: 117051 - DNA, 25 bp, Homo sapien
tcgtcgtggacaagcgtcctgtggg

SEQ ID NO: 117052 - DNA, 25 bp, Homo sapien
tcgtcgtggacatgcgtcctgtggg

SEQ ID NO: 117053 - DNA, 25 bp, Homo sapien
tgagcgtcccgatggtccgaaaggt

SEQ ID NO: 117054 - DNA, 25 bp, Homo sapien
tgagcgtcccgaaggtccgaaaggt

SEQ ID NO: 117055 - DNA, 25 bp, Homo sapien
gacctcactcgacctgtccaagtaa

SEQ ID NO: 117056 - DNA, 25 bp, Homo sapien
gacctcactcgagctgtccaagtaa

SEQ ID NO: 117057 - DNA, 25 bp, Homo sapien
cattacttgtacttttacacaggtg

SEQ ID NO: 117058 - DNA, 25 bp, Homo sapien
cattacttgtacatttacacaggtg

SEQ ID NO: 117059 - DNA, 25 bp, Homo sapien
ctcctagtgtttcttcttgtgggtc

SEQ ID NO: 117060 - DNA, 25 bp, Homo sapien
ctcctagtgtttgttcttgtgggtc

SEQ ID NO: 117061 - DNA, 25 bp, Homo sapien
tgacatgtgtctgttcttgcaagta

SEQ ID NO: 117062 - DNA, 25 bp, Homo sapien
tgacatgtgtctcttcttgcaagta

SEQ ID NO: 117063 - DNA, 25 bp, Homo sapien
ttcaaatactttctagtatcaagtt

SEQ ID NO: 117064 - DNA, 25 bp, Homo sapien
ttcaaatactttgtagtatcaagtt

SEQ ID NO: 117065 - DNA, 25 bp, Homo sapien
gtcgtgaaaatgtcctttaacattt

SEQ ID NO: 117066 - DNA, 25 bp, Homo sapien
gtcgtgaaaatgacctttaacattt

SEQ ID NO: 117067 - DNA, 25 bp, Homo sapien
ttgggaaccccgttcaacaaagtct

SEQ ID NO: 117068 - DNA, 25 bp, Homo sapien
ttgggaaccccgatcaacaaagtct

SEQ ID NO: 117069 - DNA, 25 bp, Homo sapien
gtaagaaagaatttccctcagagga

SEQ ID NO: 117070 - DNA, 25 bp, Homo sapien
gtaagaaagaatatccctcagagga

SEQ ID NO: 117071 - DNA, 25 bp, Homo sapien
gtcgaagaccttcctccggaagaac

SEQ ID NO: 117072 - DNA, 25 bp, Homo sapien
gtcgaagaccttgctccggaagaac

SEQ ID NO: 117073 - DNA, 25 bp, Homo sapien
ggtccgacaatttttcgacgaaatg

SEQ ID NO: 117074 - DNA, 25 bp, Homo sapien
ggtccgacaattattcgacgaaatg

SEQ ID NO: 117075 - DNA, 25 bp, Homo sapien
ggttacgaacattttggaagtcttc

SEQ ID NO: 117076 - DNA, 25 bp, Homo sapien
ggttacgaacatattggaagtcttc

SEQ ID NO: 117077 - DNA, 25 bp, Homo sapien
taaaagacttgtattgcaagttctc

SEQ ID NO: 117078 - DNA, 25 bp, Homo sapien
taaaagacttgttttgcaagttctc

SEQ ID NO: 117079 - DNA, 25 bp, Homo sapien
gaataaagggctttatcatttactc

SEQ ID NO: 117080 - DNA, 25 bp, Homo sapien
gaataaagggctatatcatttactc

SEQ ID NO: 117081 - DNA, 25 bp, Homo sapien
aaggtaaagtccactgctctactac

SEQ ID NO: 117082 - DNA, 25 bp, Homo sapien
aaggtaaagtcctctgctctactac

SEQ ID NO: 117083 - DNA, 25 bp, Homo sapien
atgtgtaaagtccatctttcgtaac

SEQ ID NO: 117084 - DNA, 25 bp, Homo sapien
atgtgtaaagtcgatctttcgtaac

SEQ ID NO: 117085 - DNA, 25 bp, Homo sapien
gccacaagtcagaacttccgtacac

SEQ ID NO: 117086 - DNA, 25 bp, Homo sapien
gccacaagtcagtacttccgtacac

SEQ ID NO: 117087 - DNA, 25 bp, Homo sapien
ggtctacaagtccgtgaaccgccac

SEQ ID NO: 117088 - DNA, 25 bp, Homo sapien
ggtctacaagtcggtgaaccgccac

SEQ ID NO: 117089 - DNA, 25 bp, Homo sapien
ggtgggtacatttgtctcaaaaccc

SEQ ID NO: 117090 - DNA, 25 bp, Homo sapien
ggtgggtacattagtctcaaaaccc

SEQ ID NO: 117091 - DNA, 25 bp, Homo sapien
ggaaaactgttctttacaccagcac

SEQ ID NO: 117092 - DNA, 25 bp, Homo sapien
ggaaaactgttcattacaccagcac

SEQ ID NO: 117093 - DNA, 25 bp, Homo sapien
gaagggattctgtcgtccacgtctc

SEQ ID NO: 117094 - DNA, 25 bp, Homo sapien
gaagggattctgacgtccacgtctc

SEQ ID NO: 117095 - DNA, 25 bp, Homo sapien
aacgacattttaggactatcatgta

SEQ ID NO: 117096 - DNA, 25 bp, Homo sapien
aacgacattttacgactatcatgta

SEQ ID NO: 117097 - DNA, 25 bp, Homo sapien
tgaggtttatgacttgaccttttcc

SEQ ID NO: 117098 - DNA, 25 bp, Homo sapien
tgaggtttatgagttgaccttttcc

SEQ ID NO: 117099 - DNA, 25 bp, Homo sapien
gtggttggacctgagaagatttcac

SEQ ID NO: 117100 - DNA, 25 bp, Homo sapien
gtggttggacctcagaagatttcac

SEQ ID NO: 117101 - DNA, 25 bp, Homo sapien
gtatgactatcacgacgttctattc

SEQ ID NO: 117102 - DNA, 25 bp, Homo sapien
gtatgactatcaggacgttctattc

SEQ ID NO: 117103 - DNA, 25 bp, Homo sapien
tctttatgacagttaatcggtcgtt

SEQ ID NO: 117104 - DNA, 25 bp, Homo sapien
tctttatgacagataatcggtcgtt

SEQ ID NO: 117105 - DNA, 25 bp, Homo sapien
tcgttatacgaacctaatctccagg

SEQ ID NO: 117106 - DNA, 25 bp, Homo sapien
tcgttatacgaagctaatctccagg

SEQ ID NO: 117107 - DNA, 25 bp, Homo sapien
ctcaagtaagataatcgtctacggg

SEQ ID NO: 117108 - DNA, 25 bp, Homo sapien
ctcaagtaagattatcgtctacggg

SEQ ID NO: 117109 - DNA, 25 bp, Homo sapien
ctctttccaccaaggaacctgatag

SEQ ID NO: 117110 - DNA, 25 bp, Homo sapien
ctctttccaccatggaacctgatag

SEQ ID NO: 117111 - DNA, 25 bp, Homo sapien
ttacttctactatctcccgcgaaag

SEQ ID NO: 117112 - DNA, 25 bp, Homo sapien
ttacttctactaactcccgcgaaag

SEQ ID NO: 117113 - DNA, 25 bp, Homo sapien
taggtactccgagagatcccggaga

SEQ ID NO: 117114 - DNA, 25 bp, Homo sapien
taggtactccgacagatcccggaga

SEQ ID NO: 117115 - DNA, 25 bp, Homo sapien
ctccgtccgaactagaccctgaaag

SEQ ID NO: 117116 - DNA, 25 bp, Homo sapien
ctccgtccgaacaagaccctgaaag

SEQ ID NO: 117117 - DNA, 25 bp, Homo sapien
tcttaagtactcaggccccttgaaa

SEQ ID NO: 117118 - DNA, 25 bp, Homo sapien
tcttaagtactctggccccttgaaa

SEQ ID NO: 117119 - DNA, 25 bp, Homo sapien
ggttcaagggatctccttaagatgt

SEQ ID NO: 117120 - DNA, 25 bp, Homo sapien
ggttcaagggatgtccttaagatgt

SEQ ID NO: 117121 - DNA, 25 bp, Homo sapien
tcggcacatgttcaatgtaactacc

SEQ ID NO: 117122 - DNA, 25 bp, Homo sapien
tcggcacatgttgaatgtaactacc

SEQ ID NO: 117123 - DNA, 25 bp, Homo sapien
agtcacctctcatgtctcatgtcga

SEQ ID NO: 117124 - DNA, 25 bp, Homo sapien
agtcacctctcaagtctcatgtcga

SEQ ID NO: 117125 - DNA, 25 bp, Homo sapien
tttaacatagttgaactcccgtctg

SEQ ID NO: 117126 - DNA, 25 bp, Homo sapien
tttaacatagttcaactcccgtctg

SEQ ID NO: 117127 - DNA, 25 bp, Homo sapien
atattaggaattaaaaccctagtcg

SEQ ID NO: 117128 - DNA, 25 bp, Homo sapien
atattaggaatttaaaccctagtcg

SEQ ID NO: 117129 - DNA, 25 bp, Homo sapien
gttgtataggaatttacaaacccac

SEQ ID NO: 117130 - DNA, 25 bp, Homo sapien
gttgtataggaaattacaaacccac

SEQ ID NO: 117131 - DNA, 25 bp, Homo sapien
tatgactcactcctgtagaaaagac

SEQ ID NO: 117132 - DNA, 25 bp, Homo sapien
tatgactcactcgtgtagaaaagac

SEQ ID NO: 117133 - DNA, 25 bp, Homo sapien
ctgaggcacgagattacgttaaaaa

SEQ ID NO: 117134 - DNA, 25 bp, Homo sapien
ctgaggcacgagtttacgttaaaaa

SEQ ID NO: 117135 - DNA, 25 bp, Homo sapien
acatacagagagaggaggttcctcc

SEQ ID NO: 117136 - DNA, 25 bp, Homo sapien
acatacagagagtggaggttcctcc

SEQ ID NO: 117137 - DNA, 25 bp, Homo sapien
caaagagtcccgacgaagttcgccc

SEQ ID NO: 117138 - DNA, 25 bp, Homo sapien
caaagagtcccgtcgaagttcgccc

SEQ ID NO: 117139 - DNA, 25 bp, Homo sapien
agagtctctcacgatgagtggccgc

SEQ ID NO: 117140 - DNA, 25 bp, Homo sapien
agagtctctcaccatgagtggccgc

SEQ ID NO: 117141 - DNA, 25 bp, Homo sapien
cgacggtgcctctcgtcgggtcaag

SEQ ID NO: 117142 - DNA, 25 bp, Homo sapien
cgacggtgcctcacgtcgggtcaag

SEQ ID NO: 117143 - DNA, 25 bp, Homo sapien
ccgggtcgtccatcgggcgcgacaa

SEQ ID NO: 117144 - DNA, 25 bp, Homo sapien
ccgggtcgtccaacgggcgcgacaa

SEQ ID NO: 117145 - DNA, 25 bp, Homo sapien
agtttctcaaataccgtacgttagt

SEQ ID NO: 117146 - DNA, 25 bp, Homo sapien
agtttctcaaattccgtacgttagt

SEQ ID NO: 117147 - DNA, 25 bp, Homo sapien
tagttactccaactagaccgagaag

SEQ ID NO: 117148 - DNA, 25 bp, Homo sapien
tagttactccaagtagaccgagaag

SEQ ID NO: 117149 - DNA, 25 bp, Homo sapien
tgtgctaaggctcaactcgagactc

SEQ ID NO: 117150 - DNA, 25 bp, Homo sapien
tgtgctaaggctgaactcgagactc

SEQ ID NO: 117151 - DNA, 25 bp, Homo sapien
cccagtaggtcgtactcagtgacta

SEQ ID NO: 117152 - DNA, 25 bp, Homo sapien
cccagtaggtcgaactcagtgacta

SEQ ID NO: 117153 - DNA, 25 bp, Homo sapien
aagacagtagagacgactttctaga

SEQ ID NO: 117154 - DNA, 25 bp, Homo sapien
aagacagtagagtcgactttctaga

SEQ ID NO: 117155 - DNA, 25 bp, Homo sapien
tgtccgagtcgttgacgttggtaac

SEQ ID NO: 117156 - DNA, 25 bp, Homo sapien
tgtccgagtcgtagacgttggtaac

SEQ ID NO: 117157 - DNA, 25 bp, Homo sapien
tcgagtgagtcgagtttgtcggact

SEQ ID NO: 117158 - DNA, 25 bp, Homo sapien
tcgagtgagtcgtgtttgtcggact

SEQ ID NO: 117159 - DNA, 25 bp, Homo sapien
atggtgcttcccacataagagtacg

SEQ ID NO: 117160 - DNA, 25 bp, Homo sapien
atggtgcttccctcataagagtacg

SEQ ID NO: 117161 - DNA, 25 bp, Homo sapien
gaaaactctcttccaaaaggacgta

SEQ ID NO: 117162 - DNA, 25 bp, Homo sapien
gaaaactctcttgcaaaaggacgta

SEQ ID NO: 117163 - DNA, 25 bp, Homo sapien
tggacctctgtcagtaacagttgta

SEQ ID NO: 117164 - DNA, 25 bp, Homo sapien
tggacctctgtctgtaacagttgta

SEQ ID NO: 117165 - DNA, 25 bp, Homo sapien
ctcggttcacttttgtacacttatg

SEQ ID NO: 117166 - DNA, 25 bp, Homo sapien
ctcggttcacttatgtacacttatg

SEQ ID NO: 117167 - DNA, 25 bp, Homo sapien
ttagtcgttccttttccacttgtag

SEQ ID NO: 117168 - DNA, 25 bp, Homo sapien
ttagtcgttcctattccacttgtag

SEQ ID NO: 117169 - DNA, 25 bp, Homo sapien
cttagtgtcaatgaatcctctagaa

SEQ ID NO: 117170 - DNA, 25 bp, Homo sapien
cttagtgtcaatcaatcctctagaa

SEQ ID NO: 117171 - DNA, 25 bp, Homo sapien
gaagacctacgaaatctctgaagca

SEQ ID NO: 117172 - DNA, 25 bp, Homo sapien
gaagacctacgatatctctgaagca

SEQ ID NO: 117173 - DNA, 25 bp, Homo sapien
gggagacacgggtctctcgttccga

SEQ ID NO: 117174 - DNA, 25 bp, Homo sapien
gggagacacgggactctcgttccga

SEQ ID NO: 117175 - DNA, 25 bp, Homo sapien
gaccaaccactgtttagtgttcaaa

SEQ ID NO: 117176 - DNA, 25 bp, Homo sapien
gaccaaccactgattagtgttcaaa

SEQ ID NO: 117177 - DNA, 25 bp, Homo sapien
ggatagatacgagttcttcatcaaa

SEQ ID NO: 117178 - DNA, 25 bp, Homo sapien
ggatagatacgacttcttcatcaaa

SEQ ID NO: 117179 - DNA, 25 bp, Homo sapien
agggtcatacttaccggtcaagtcg

SEQ ID NO: 117180 - DNA, 25 bp, Homo sapien
agggtcatactttccggtcaagtcg

SEQ ID NO: 117181 - DNA, 25 bp, Homo sapien
aagaagctagttcgactgtaatacc

SEQ ID NO: 117182 - DNA, 25 bp, Homo sapien
aagaagctagttggactgtaatacc

SEQ ID NO: 117183 - DNA, 25 bp, Homo sapien
aaataacagtgtcgtcgactgccga

SEQ ID NO: 117184 - DNA, 25 bp, Homo sapien
aaataacagtgtggtcgactgccga

SEQ ID NO: 117185 - DNA, 25 bp, Homo sapien
gtgtatgccatcttctactttttag

SEQ ID NO: 117186 - DNA, 25 bp, Homo sapien
gtgtatgccatcatctactttttag

SEQ ID NO: 117187 - DNA, 25 bp, Homo sapien
gttttgacagcatcgacttataaga

SEQ ID NO: 117188 - DNA, 25 bp, Homo sapien
gttttgacagcaacgacttataaga

SEQ ID NO: 117189 - DNA, 25 bp, Homo sapien
atatttgggtcgacactcttacgga

SEQ ID NO: 117190 - DNA, 25 bp, Homo sapien
atatttgggtcgtcactcttacgga

SEQ ID NO: 117191 - DNA, 25 bp, Homo sapien
tcctgtcgggcatcccgtggtcgag

SEQ ID NO: 117192 - DNA, 25 bp, Homo sapien
tcctgtcgggcaacccgtggtcgag

SEQ ID NO: 117193 - DNA, 25 bp, Homo sapien
acggagtacgtaacaccgaggtcga

SEQ ID NO: 117194 - DNA, 25 bp, Homo sapien
acggagtacgtatcaccgaggtcga

SEQ ID NO: 117195 - DNA, 25 bp, Homo sapien
tagcgagtggtaaaaaccggatctt

SEQ ID NO: 117196 - DNA, 25 bp, Homo sapien
tagcgagtggtataaaccggatctt

SEQ ID NO: 117197 - DNA, 25 bp, Homo sapien
atctaaaaaggtcacgaccggtttt

SEQ ID NO: 117198 - DNA, 25 bp, Homo sapien
atctaaaaaggtgacgaccggtttt

SEQ ID NO: 117199 - DNA, 25 bp, Homo sapien
gttccagaaaatactccgtagttta

SEQ ID NO: 117200 - DNA, 25 bp, Homo sapien
gttccagaaaattctccgtagttta

SEQ ID NO: 117201 - DNA, 25 bp, Homo sapien
gttgtcccatcttatgtgttattaa

SEQ ID NO: 117202 - DNA, 25 bp, Homo sapien
gttgtcccatctaatgtgttattaa

SEQ ID NO: 117203 - DNA, 25 bp, Homo sapien
actcctccttaatggtcgactaaag

SEQ ID NO: 117204 - DNA, 25 bp, Homo sapien
actcctccttaaaggtcgactaaag

SEQ ID NO: 117205 - DNA, 25 bp, Homo sapien
actctcttatgttagttcggtttaa

SEQ ID NO: 117206 - DNA, 25 bp, Homo sapien
actctcttatgtaagttcggtttaa

SEQ ID NO: 117207 - DNA, 25 bp, Homo sapien
atttgtacatcatctgtgttaacag

SEQ ID NO: 117208 - DNA, 25 bp, Homo sapien
atttgtacatcaactgtgttaacag

SEQ ID NO: 117209 - DNA, 25 bp, Homo sapien
tgtagatccgactccgtgtacaaag

SEQ ID NO: 117210 - DNA, 25 bp, Homo sapien
tgtagatccgacaccgtgtacaaag

SEQ ID NO: 117211 - DNA, 25 bp, Homo sapien
tgtaatccgaataccgacgagacta

SEQ ID NO: 117212 - DNA, 25 bp, Homo sapien
tgtaatccgaattccgacgagacta

SEQ ID NO: 117213 - DNA, 25 bp, Homo sapien
caactggagtaaagtcatcaagtat

SEQ ID NO: 117214 - DNA, 25 bp, Homo sapien
caactggagtaatgtcatcaagtat

SEQ ID NO: 117215 - DNA, 25 bp, Homo sapien
actggatacgattcctcgagtagtt

SEQ ID NO: 117216 - DNA, 25 bp, Homo sapien
actggatacgatacctcgagtagtt

SEQ ID NO: 117217 - DNA, 25 bp, Homo sapien
cgagtagggaaactagagtcggttc

SEQ ID NO: 117218 - DNA, 25 bp, Homo sapien
cgagtagggaaagtagagtcggttc

SEQ ID NO: 117219 - DNA, 25 bp, Homo sapien
ttaaaagtccatctggaagtacgtc

SEQ ID NO: 117220 - DNA, 25 bp, Homo sapien
ttaaaagtccatgtggaagtacgtc

SEQ ID NO: 117221 - DNA, 25 bp, Homo sapien
gtagacactcgtcaaccgaacaacc

SEQ ID NO: 117222 - DNA, 25 bp, Homo sapien
gtagacactcgtgaaccgaacaacc

SEQ ID NO: 117223 - DNA, 25 bp, Homo sapien
gtgtaaacgagtacgtgtacccacc

SEQ ID NO: 117224 - DNA, 25 bp, Homo sapien
gtgtaaacgagttcgtgtacccacc

SEQ ID NO: 117225 - DNA, 25 bp, Homo sapien
gactgtgacaacgagtggctcccac

SEQ ID NO: 117226 - DNA, 25 bp, Homo sapien
gactgtgacaaccagtggctcccac

SEQ ID NO: 117227 - DNA, 25 bp, Homo sapien
aaataggaacacccaagtgcccacg

SEQ ID NO: 117228 - DNA, 25 bp, Homo sapien
aaataggaacacgcaagtgcccacg

SEQ ID NO: 117229 - DNA, 25 bp, Homo sapien
ataaaggaaagtcgaatgtaactcc

SEQ ID NO: 117230 - DNA, 25 bp, Homo sapien
ataaaggaaagtggaatgtaactcc

SEQ ID NO: 117231 - DNA, 25 bp, Homo sapien
acaaagtcggttgagagtcacctcc

SEQ ID NO: 117232 - DNA, 25 bp, Homo sapien
acaaagtcggttcagagtcacctcc

SEQ ID NO: 117233 - DNA, 25 bp, Homo sapien
tctctagtggaagttcccacattta

SEQ ID NO: 117234 - DNA, 25 bp, Homo sapien
tctctagtggaacttcccacattta

SEQ ID NO: 117235 - DNA, 25 bp, Homo sapien
tttaggcaaaggttcatactttaac

SEQ ID NO: 117236 - DNA, 25 bp, Homo sapien
tttaggcaaaggatcatactttaac

SEQ ID NO: 117237 - DNA, 25 bp, Homo sapien
ttgttaagacctcacaattgagact

SEQ ID NO: 117238 - DNA, 25 bp, Homo sapien
ttgttaagacctgacaattgagact

SEQ ID NO: 117239 - DNA, 25 bp, Homo sapien
tgagtgtcggtcgtccaattgagag

SEQ ID NO: 117240 - DNA, 25 bp, Homo sapien
tgagtgtcggtcctccaattgagag

SEQ ID NO: 117241 - DNA, 25 bp, Homo sapien
ccatggcggtctcttagacgtgaaa

SEQ ID NO: 117242 - DNA, 25 bp, Homo sapien
ccatggcggtctgttagacgtgaaa

SEQ ID NO: 117243 - DNA, 25 bp, Homo sapien
tggacgcctggtcctcgttcgacac

SEQ ID NO: 117244 - DNA, 25 bp, Homo sapien
tggacgcctggtgctcgttcgacac

SEQ ID NO: 117245 - DNA, 25 bp, Homo sapien
ccggaggctagacgtccctgaccat

SEQ ID NO: 117246 - DNA, 25 bp, Homo sapien
ccggaggctagaggtccctgaccat

SEQ ID NO: 117247 - DNA, 25 bp, Homo sapien
gacggccgggtgagccagtcctcct

SEQ ID NO: 117248 - DNA, 25 bp, Homo sapien
gacggccgggtgtgccagtcctcct

SEQ ID NO: 117249 - DNA, 25 bp, Homo sapien
gaaccgggtggtctcgacctgtccg

SEQ ID NO: 117250 - DNA, 25 bp, Homo sapien
gaaccgggtggtgtcgacctgtccg

SEQ ID NO: 117251 - DNA, 25 bp, Homo sapien
ttccgaggtggcagtcctctcgcct

SEQ ID NO: 117252 - DNA, 25 bp, Homo sapien
ttccgaggtggctgtcctctcgcct

SEQ ID NO: 117253 - DNA, 25 bp, Homo sapien
tagccagtgacaatgtcactttaac

SEQ ID NO: 117254 - DNA, 25 bp, Homo sapien
tagccagtgacattgtcactttaac

SEQ ID NO: 117255 - DNA, 25 bp, Homo sapien
gacaaggaggaaacttctcccaaac

SEQ ID NO: 117256 - DNA, 25 bp, Homo sapien
gacaaggaggaatcttctcccaaac

SEQ ID NO: 117257 - DNA, 25 bp, Homo sapien
agacgtaggacaacagagccccttg

SEQ ID NO: 117258 - DNA, 25 bp, Homo sapien
agacgtaggacatcagagccccttg

SEQ ID NO: 117259 - DNA, 25 bp, Homo sapien
aggtctagccgtatcacctcggtca

SEQ ID NO: 117260 - DNA, 25 bp, Homo sapien
aggtctagccgtttcacctcggtca

SEQ ID NO: 117261 - DNA, 25 bp, Homo sapien
atggtgacgacctcccttgtatcga

SEQ ID NO: 117262 - DNA, 25 bp, Homo sapien
atggtgacgaccacccttgtatcga

SEQ ID NO: 117263 - DNA, 25 bp, Homo sapien
tcgtcggacctccacgacatgaaca

SEQ ID NO: 117264 - DNA, 25 bp, Homo sapien
tcgtcggacctcgacgacatgaaca

SEQ ID NO: 117265 - DNA, 25 bp, Homo sapien
tattccgccatgaacggtgggtaaa

SEQ ID NO: 117266 - DNA, 25 bp, Homo sapien
tattccgccatgtacggtgggtaaa

SEQ ID NO: 117267 - DNA, 25 bp, Homo sapien
gttatcggttctctccctgtaatac

SEQ ID NO: 117268 - DNA, 25 bp, Homo sapien
gttatcggttctgtccctgtaatac

SEQ ID NO: 117269 - DNA, 25 bp, Homo sapien
cgtttggtagtcactgtgactggaa

SEQ ID NO: 117270 - DNA, 25 bp, Homo sapien
cgtttggtagtctctgtgactggaa

SEQ ID NO: 117271 - DNA, 25 bp, Homo sapien
acccgttcgacctctttcgttgaag

SEQ ID NO: 117272 - DNA, 25 bp, Homo sapien
acccgttcgaccactttcgttgaag

SEQ ID NO: 117273 - DNA, 25 bp, Homo sapien
taccggtgccacgaggttgtttcgg

SEQ ID NO: 117274 - DNA, 25 bp, Homo sapien
taccggtgccaccaggttgtttcgg

SEQ ID NO: 117275 - DNA, 25 bp, Homo sapien
atccggacccccagagttgtgtgga

SEQ ID NO: 117276 - DNA, 25 bp, Homo sapien
atccggaccccctgagttgtgtgga

SEQ ID NO: 117277 - DNA, 25 bp, Homo sapien
accgaaaaacccataggtccgagga

SEQ ID NO: 117278 - DNA, 25 bp, Homo sapien
accgaaaaacccttaggtccgagga

SEQ ID NO: 117279 - DNA, 25 bp, Homo sapien
cgactttatttcctcctcagggtag

SEQ ID NO: 117280 - DNA, 25 bp, Homo sapien
cgactttatttcgtcctcagggtag

SEQ ID NO: 117281 - DNA, 25 bp, Homo sapien
agtttttccgtcgacaccgggagtg

SEQ ID NO: 117282 - DNA, 25 bp, Homo sapien
agtttttccgtccacaccgggagtg

SEQ ID NO: 117283 - DNA, 25 bp, Homo sapien
ctcgttcctgcaggaccggaccgga

SEQ ID NO: 117284 - DNA, 25 bp, Homo sapien
ctcgttcctgcacgaccggaccgga

SEQ ID NO: 117285 - DNA, 25 bp, Homo sapien
gttgtctaatttctccgaacagtca

SEQ ID NO: 117286 - DNA, 25 bp, Homo sapien
gttgtctaatttgtccgaacagtca

SEQ ID NO: 117287 - DNA, 25 bp, Homo sapien
gtctttaacctgtccgagtaagaat

SEQ ID NO: 117288 - DNA, 25 bp, Homo sapien
gtctttaacctgaccgagtaagaat

SEQ ID NO: 117289 - DNA, 25 bp, Homo sapien
gtctttaacccaggacggtggaact

SEQ ID NO: 117290 - DNA, 25 bp, Homo sapien
gtctttaacccacgacggtggaact

SEQ ID NO: 117291 - DNA, 25 bp, Homo sapien
gtctttccccaatgacagtgactac

SEQ ID NO: 117292 - DNA, 25 bp, Homo sapien
gtctttccccaaagacagtgactac

SEQ ID NO: 117293 - DNA, 25 bp, Homo sapien
gttggtcacggaccattggtggact

SEQ ID NO: 117294 - DNA, 25 bp, Homo sapien
gttggtcacggagcattggtggact

SEQ ID NO: 117295 - DNA, 25 bp, Homo sapien
taagtctcaaatcacttgtgtgttt

SEQ ID NO: 117296 - DNA, 25 bp, Homo sapien
taagtctcaaatgacttgtgtgttt

SEQ ID NO: 117297 - DNA, 25 bp, Homo sapien
acatctttaagtcttaccgagtccg

SEQ ID NO: 117298 - DNA, 25 bp, Homo sapien
acatctttaagtgttaccgagtccg

SEQ ID NO: 117299 - DNA, 25 bp, Homo sapien
acaatcttaggtaagttcgacaacc

SEQ ID NO: 117300 - DNA, 25 bp, Homo sapien
acaatcttaggttagttcgacaacc

SEQ ID NO: 117301 - DNA, 25 bp, Homo sapien
aatgaccacggaggtttccgaccgc

SEQ ID NO: 117302 - DNA, 25 bp, Homo sapien
aatgaccacggacgtttccgaccgc

SEQ ID NO: 117303 - DNA, 25 bp, Homo sapien
cggtccacgaacgtgtcccgcaggt

SEQ ID NO: 117304 - DNA, 25 bp, Homo sapien
cggtccacgaacctgtcccgcaggt

SEQ ID NO: 117305 - DNA, 25 bp, Homo sapien
ggtatactcaaattaacctcaacgg

SEQ ID NO: 117306 - DNA, 25 bp, Homo sapien
ggtatactcaaaataacctcaacgg

SEQ ID NO: 117307 - DNA, 25 bp, Homo sapien
gtattctcggtgagtaccgaccagg

SEQ ID NO: 117308 - DNA, 25 bp, Homo sapien
gtattctcggtgtgtaccgaccagg

SEQ ID NO: 117309 - DNA, 25 bp, Homo sapien
tttaccgcgggtgaccagagtatgt

SEQ ID NO: 117310 - DNA, 25 bp, Homo sapien
tttaccgcgggtcaccagagtatgt

SEQ ID NO: 117311 - DNA, 25 bp, Homo sapien
ccctccgaggtaaacctatgtaagt

SEQ ID NO: 117312 - DNA, 25 bp, Homo sapien
ccctccgaggtatacctatgtaagt

SEQ ID NO: 117313 - DNA, 25 bp, Homo sapien
cagctactcgtgctacgttaagaag

SEQ ID NO: 117314 - DNA, 25 bp, Homo sapien
cagctactcgtggtacgttaagaag

SEQ ID NO: 117315 - DNA, 25 bp, Homo sapien
aggtaccggtcgttcgtagacgaag

SEQ ID NO: 117316 - DNA, 25 bp, Homo sapien
aggtaccggtcgatcgtagacgaag

SEQ ID NO: 117317 - DNA, 25 bp, Homo sapien
cgacttgagcacacagtagagacaa

SEQ ID NO: 117318 - DNA, 25 bp, Homo sapien
cgacttgagcactcagtagagacaa

SEQ ID NO: 117319 - DNA, 25 bp, Homo sapien
acacggacccggtcagggtacggac

SEQ ID NO: 117320 - DNA, 25 bp, Homo sapien
acacggacccggacagggtacggac

SEQ ID NO: 117321 - DNA, 25 bp, Homo sapien
caggagtccgtgactaagtgtaatg

SEQ ID NO: 117322 - DNA, 25 bp, Homo sapien
caggagtccgtgtctaagtgtaatg

SEQ ID NO: 117323 - DNA, 25 bp, Homo sapien
tccaagaagtctagtaggtgacatt

SEQ ID NO: 117324 - DNA, 25 bp, Homo sapien
tccaagaagtcttgtaggtgacatt

SEQ ID NO: 117325 - DNA, 25 bp, Homo sapien
tatcgagacgtcgtttggggtccca

SEQ ID NO: 117326 - DNA, 25 bp, Homo sapien
tatcgagacgtcctttggggtccca

SEQ ID NO: 117327 - DNA, 25 bp, Homo sapien
ctggaactgtttagtgtgttccaag

SEQ ID NO: 117328 - DNA, 25 bp, Homo sapien
ctggaactgttttgtgtgttccaag

SEQ ID NO: 117329 - DNA, 25 bp, Homo sapien
tcgacacctgctttcggggtccagg

SEQ ID NO: 117330 - DNA, 25 bp, Homo sapien
tcgacacctgctatcggggtccagg

SEQ ID NO: 117331 - DNA, 25 bp, Homo sapien
tcggctgctttcgtgtagttacttg

SEQ ID NO: 117332 - DNA, 25 bp, Homo sapien
tcggctgctttcctgtagttacttg

SEQ ID NO: 117333 - DNA, 25 bp, Homo sapien
tttctgactctatgaccgtaaattg

SEQ ID NO: 117334 - DNA, 25 bp, Homo sapien
tttctgactctaagaccgtaaattg

SEQ ID NO: 117335 - DNA, 25 bp, Homo sapien
tcgttttcctaaggtcgttaatatg

SEQ ID NO: 117336 - DNA, 25 bp, Homo sapien
tcgttttcctaacgtcgttaatatg

SEQ ID NO: 117337 - DNA, 25 bp, Homo sapien
gtgttacgtgttacacctttatatc

SEQ ID NO: 117338 - DNA, 25 bp, Homo sapien
gtgttacgtgtttcacctttatatc

SEQ ID NO: 117339 - DNA, 25 bp, Homo sapien
ggttatatatttccccgacctttcg

SEQ ID NO: 117340 - DNA, 25 bp, Homo sapien
ggttatatatttgcccgacctttcg

SEQ ID NO: 117341 - DNA, 25 bp, Homo sapien
tacttgatcgtgtactcgacccctc

SEQ ID NO: 117342 - DNA, 25 bp, Homo sapien
tacttgatcgtgaactcgacccctc

SEQ ID NO: 117343 - DNA, 25 bp, Homo sapien
gtgtatgtcgttcactgtactgtgg

SEQ ID NO: 117344 - DNA, 25 bp, Homo sapien
gtgtatgtcgttgactgtactgtgg

SEQ ID NO: 117345 - DNA, 25 bp, Homo sapien
tacagttcgtgtctgaccttggtgt

SEQ ID NO: 117346 - DNA, 25 bp, Homo sapien
tacagttcgtgtgtgaccttggtgt

SEQ ID NO: 117347 - DNA, 25 bp, Homo sapien
ggcacaatcatagtaatctcttgtg

SEQ ID NO: 117348 - DNA, 25 bp, Homo sapien
ggcacaatcatactaatctcttgtg

SEQ ID NO: 117349 - DNA, 25 bp, Homo sapien
gacgaaaacctacgaagagcctccg

SEQ ID NO: 117350 - DNA, 25 bp, Homo sapien
gacgaaaacctaggaagagcctccg

SEQ ID NO: 117351 - DNA, 25 bp, Homo sapien
caaataactctcaggggaacccgtc

SEQ ID NO: 117352 - DNA, 25 bp, Homo sapien
caaataactctctggggaacccgtc

SEQ ID NO: 117353 - DNA, 25 bp, Homo sapien
aacagaagctccacgggaacgggac

SEQ ID NO: 117354 - DNA, 25 bp, Homo sapien
aacagaagctcctcgggaacgggac

SEQ ID NO: 117355 - DNA, 25 bp, Homo sapien
cgtacgagcataaaggtgggctcgc

SEQ ID NO: 117356 - DNA, 25 bp, Homo sapien
cgtacgagcatataggtgggctcgc

SEQ ID NO: 117357 - DNA, 25 bp, Homo sapien
acgacagcaaataacgcgccttacc

SEQ ID NO: 117358 - DNA, 25 bp, Homo sapien
acgacagcaaattacgcgccttacc

SEQ ID NO: 117359 - DNA, 25 bp, Homo sapien
gggcgccacagaaagacgaccccaa

SEQ ID NO: 117360 - DNA, 25 bp, Homo sapien
gggcgccacagatagacgaccccaa

SEQ ID NO: 117361 - DNA, 25 bp, Homo sapien
agagctcctcatagacacaccacaa

SEQ ID NO: 117362 - DNA, 25 bp, Homo sapien
agagctcctcattgacacaccacaa

SEQ ID NO: 117363 - DNA, 25 bp, Homo sapien
tgagttctttcatccgacttccaag

SEQ ID NO: 117364 - DNA, 25 bp, Homo sapien
tgagttctttcaaccgacttccaag

SEQ ID NO: 117365 - DNA, 25 bp, Homo sapien
aagattctaatcataagtctttaaa

SEQ ID NO: 117366 - DNA, 25 bp, Homo sapien
aagattctaatcttaagtctttaaa

SEQ ID NO: 117367 - DNA, 25 bp, Homo sapien
aggttcagacatcgaactctttcag

SEQ ID NO: 117368 - DNA, 25 bp, Homo sapien
aggttcagacatggaactctttcag

SEQ ID NO: 117369 - DNA, 25 bp, Homo sapien
cgaacaccctcgactccggtgtgag

SEQ ID NO: 117370 - DNA, 25 bp, Homo sapien
cgaacaccctcgtctccggtgtgag

SEQ ID NO: 117371 - DNA, 25 bp, Homo sapien
gtaacctcctttccttatcgggaca

SEQ ID NO: 117372 - DNA, 25 bp, Homo sapien
gtaacctcctttgcttatcgggaca

SEQ ID NO: 117373 - DNA, 25 bp, Homo sapien
tgtctgtcgtccacccggtcgggaa

SEQ ID NO: 117374 - DNA, 25 bp, Homo sapien
tgtctgtcgtcctcccggtcgggaa

SEQ ID NO: 117375 - DNA, 25 bp, Homo sapien
gtctgtgtcctgtcccgggacccac

SEQ ID NO: 117376 - DNA, 25 bp, Homo sapien
gtctgtgtcctgacccgggacccac

SEQ ID NO: 117377 - DNA, 25 bp, Homo sapien
tggtaccgggcgtgcttcagcgtac

SEQ ID NO: 117378 - DNA, 25 bp, Homo sapien
tggtaccgggcgagcttcagcgtac

SEQ ID NO: 117379 - DNA, 25 bp, Homo sapien
agagacaccggtccagttctcccga

SEQ ID NO: 117380 - DNA, 25 bp, Homo sapien
agagacaccggtgcagttctcccga

SEQ ID NO: 117381 - DNA, 25 bp, Homo sapien
ataactcaatgttgtttactcgttg

SEQ ID NO: 117382 - DNA, 25 bp, Homo sapien
ataactcaatgtagtttactcgttg

SEQ ID NO: 117383 - DNA, 25 bp, Homo sapien
atcctgtatagtggttcactcgatt

SEQ ID NO: 117384 - DNA, 25 bp, Homo sapien
atcctgtatagtcgttcactcgatt

SEQ ID NO: 117385 - DNA, 25 bp, Homo sapien
taaggattttttcacttctatggtc

SEQ ID NO: 117386 - DNA, 25 bp, Homo sapien
taaggattttttgacttctatggtc

SEQ ID NO: 117387 - DNA, 25 bp, Homo sapien
gtaaaccttccgtgacccaaaacgc

SEQ ID NO: 117388 - DNA, 25 bp, Homo sapien
gtaaaccttccgagacccaaaacgc

SEQ ID NO: 117389 - DNA, 25 bp, Homo sapien
catcggtctctgtgtcccgcaaagg

SEQ ID NO: 117390 - DNA, 25 bp, Homo sapien
catcggtctctgagtcccgcaaagg

SEQ ID NO: 117391 - DNA, 25 bp, Homo sapien
ctggttgtagaacataacgacttga

SEQ ID NO: 117392 - DNA, 25 bp, Homo sapien
ctggttgtagaagataacgacttga

SEQ ID NO: 117393 - DNA, 25 bp, Homo sapien
ttacgttaaaggtgtacgtaccaga

SEQ ID NO: 117394 - DNA, 25 bp, Homo sapien
ttacgttaaaggagtacgtaccaga

SEQ ID NO: 117395 - DNA, 25 bp, Homo sapien
aaaacgtactaaagggtctcaagga

SEQ ID NO: 117396 - DNA, 25 bp, Homo sapien
aaaacgtactaatgggtctcaagga

SEQ ID NO: 117397 - DNA, 25 bp, Homo sapien
cgagatttgtggtctctgtaaaact

SEQ ID NO: 117398 - DNA, 25 bp, Homo sapien
cgagatttgtggactctgtaaaact

SEQ ID NO: 117399 - DNA, 25 bp, Homo sapien
gtcgagggaaggtgtctcgaaaacc

SEQ ID NO: 117400 - DNA, 25 bp, Homo sapien
gtcgagggaaggagtctcgaaaacc

SEQ ID NO: 117401 - DNA, 25 bp, Homo sapien
ggaagacgtcgaccgtgaacgcccg

SEQ ID NO: 117402 - DNA, 25 bp, Homo sapien
ggaagacgtcgagcgtgaacgcccg

SEQ ID NO: 117403 - DNA, 25 bp, Homo sapien
tggagacaaggaagaaccatcggcg

SEQ ID NO: 117404 - DNA, 25 bp, Homo sapien
tggagacaaggatgaaccatcggcg

SEQ ID NO: 117405 - DNA, 25 bp, Homo sapien
tgttcagggcctaaactaatcgttg

SEQ ID NO: 117406 - DNA, 25 bp, Homo sapien
tgttcagggccttaactaatcgttg

SEQ ID NO: 117407 - DNA, 25 bp, Homo sapien
tggacacagagaccacccaattcat

SEQ ID NO: 117408 - DNA, 25 bp, Homo sapien
tggacacagagagcacccaattcat

SEQ ID NO: 117409 - DNA, 25 bp, Homo sapien
tggagaaggagtcactctcaaaatt

SEQ ID NO: 117410 - DNA, 25 bp, Homo sapien
tggagaaggagtgactctcaaaatt

SEQ ID NO: 117411 - DNA, 25 bp, Homo sapien
gtggtgtagttttcttggtcctaca

SEQ ID NO: 117412 - DNA, 25 bp, Homo sapien
gtggtgtagtttacttggtcctaca

SEQ ID NO: 117413 - DNA, 25 bp, Homo sapien
gtcctcttaactaccgtcgtatatg

SEQ ID NO: 117414 - DNA, 25 bp, Homo sapien
gtcctcttaacttccgtcgtatatg

SEQ ID NO: 117415 - DNA, 25 bp, Homo sapien
agtagacgagttctttctgactatg

SEQ ID NO: 117416 - DNA, 25 bp, Homo sapien
agtagacgagttgtttctgactatg

SEQ ID NO: 117417 - DNA, 25 bp, Homo sapien
gacattcttaagttgttccttcttg

SEQ ID NO: 117418 - DNA, 25 bp, Homo sapien
gacattcttaagatgttccttcttg

SEQ ID NO: 117419 - DNA, 25 bp, Homo sapien
ctttcgtagtacgtttaccgattaa

SEQ ID NO: 117420 - DNA, 25 bp, Homo sapien
ctttcgtagtacctttaccgattaa

SEQ ID NO: 117421 - DNA, 25 bp, Homo sapien
actggttcgtaacattgtcttttac

SEQ ID NO: 117422 - DNA, 25 bp, Homo sapien
actggttcgtaagattgtcttttac

SEQ ID NO: 117423 - DNA, 25 bp, Homo sapien
aaagcggggccacgaacctttctac

SEQ ID NO: 117424 - DNA, 25 bp, Homo sapien
aaagcggggccaggaacctttctac

SEQ ID NO: 117425 - DNA, 25 bp, Homo sapien
gacaggtctccatcaaacacttgtc

SEQ ID NO: 117426 - DNA, 25 bp, Homo sapien
gacaggtctccaacaaacacttgtc

SEQ ID NO: 117427 - DNA, 25 bp, Homo sapien
tcgagggcctcctgagaactcccgg

SEQ ID NO: 117428 - DNA, 25 bp, Homo sapien
tcgagggcctccagagaactcccgg

SEQ ID NO: 117429 - DNA, 25 bp, Homo sapien
gtaggccccagtcaaacgaccggcg

SEQ ID NO: 117430 - DNA, 25 bp, Homo sapien
gtaggccccagtgaaacgaccggcg

SEQ ID NO: 117431 - DNA, 25 bp, Homo sapien
cgtcagtctctggtcaccaaaggga

SEQ ID NO: 117432 - DNA, 25 bp, Homo sapien
cgtcagtctctgctcaccaaaggga

SEQ ID NO: 117433 - DNA, 25 bp, Homo sapien
ttacccttccgtcgagctctatagc

SEQ ID NO: 117434 - DNA, 25 bp, Homo sapien
ttacccttccgtggagctctatagc

SEQ ID NO: 117435 - DNA, 25 bp, Homo sapien
tatttttccgggacgtagtctttaa

SEQ ID NO: 117436 - DNA, 25 bp, Homo sapien
tatttttccgggtcgtagtctttaa

SEQ ID NO: 117437 - DNA, 25 bp, Homo sapien
cttgttacccggaaagtcgatttgg

SEQ ID NO: 117438 - DNA, 25 bp, Homo sapien
cttgttacccggtaagtcgatttgg

SEQ ID NO: 117439 - DNA, 25 bp, Homo sapien
tttccgaactagtaaaacgttccgg

SEQ ID NO: 117440 - DNA, 25 bp, Homo sapien
tttccgaactagaaaaacgttccgg

SEQ ID NO: 117441 - DNA, 25 bp, Homo sapien
acggagtcagaaagtgctacacgtc

SEQ ID NO: 117442 - DNA, 25 bp, Homo sapien
acggagtcagaatgtgctacacgtc

SEQ ID NO: 117443 - DNA, 25 bp, Homo sapien
taaagtgatatccttgtgatcctat

SEQ ID NO: 117444 - DNA, 25 bp, Homo sapien
taaagtgatatcgttgtgatcctat

SEQ ID NO: 117445 - DNA, 25 bp, Homo sapien
tacaatttaagatggattttcctcg

SEQ ID NO: 117446 - DNA, 25 bp, Homo sapien
tacaatttaagaaggattttcctcg

SEQ ID NO: 117447 - DNA, 25 bp, Homo sapien
ggacaaagaaattgttcctcttgat

SEQ ID NO: 117448 - DNA, 25 bp, Homo sapien
ggacaaagaaatagttcctcttgat

SEQ ID NO: 117449 - DNA, 25 bp, Homo sapien
atgtgtaaaagacaggaccctttct

SEQ ID NO: 117450 - DNA, 25 bp, Homo sapien
atgtgtaaaagagaggaccctttct

SEQ ID NO: 117451 - DNA, 25 bp, Homo sapien
tgatatcagttggatcctttttcgt

SEQ ID NO: 117452 - DNA, 25 bp, Homo sapien
tgatatcagttgcatcctttttcgt

SEQ ID NO: 117453 - DNA, 25 bp, Homo sapien
agagaacattgaattctcgtttaca

SEQ ID NO: 117454 - DNA, 25 bp, Homo sapien
agagaacattgatttctcgtttaca

SEQ ID NO: 117455 - DNA, 25 bp, Homo sapien
ccggacatctgttcggctcttgctc

SEQ ID NO: 117456 - DNA, 25 bp, Homo sapien
ccggacatctgtacggctcttgctc

SEQ ID NO: 117457 - DNA, 25 bp, Homo sapien
tacttgttctggtcccgtgagtggg

SEQ ID NO: 117458 - DNA, 25 bp, Homo sapien
tacttgttctggacccgtgagtggg

SEQ ID NO: 117459 - DNA, 25 bp, Homo sapien
cacggtccacggtccacggtaggtt

SEQ ID NO: 117460 - DNA, 25 bp, Homo sapien
cacggtccacggaccacggtaggtt

SEQ ID NO: 117461 - DNA, 25 bp, Homo sapien
cactgtccgtccaagactaataggg

SEQ ID NO: 117462 - DNA, 25 bp, Homo sapien
cactgtccgtcctagactaataggg

SEQ ID NO: 117463 - DNA, 25 bp, Homo sapien
caagcctaccttccagacggtgtac

SEQ ID NO: 117464 - DNA, 25 bp, Homo sapien
caagcctaccttgcagacggtgtac

SEQ ID NO: 117465 - DNA, 25 bp, Homo sapien
ctcagatgaggtgttacccaaggac

SEQ ID NO: 117466 - DNA, 25 bp, Homo sapien
ctcagatgaggtcttacccaaggac

SEQ ID NO: 117467 - DNA, 25 bp, Homo sapien
gatcagtgtcggaactatccccttg

SEQ ID NO: 117468 - DNA, 25 bp, Homo sapien
gatcagtgtcggtactatccccttg

SEQ ID NO: 117469 - DNA, 25 bp, Homo sapien
ggtaatcggagtttctgtccttcag

SEQ ID NO: 117470 - DNA, 25 bp, Homo sapien
ggtaatcggagtatctgtccttcag

SEQ ID NO: 117471 - DNA, 25 bp, Homo sapien
tatatgtctacgttcgttccccgca

SEQ ID NO: 117472 - DNA, 25 bp, Homo sapien
tatatgtctacgatcgttccccgca

SEQ ID NO: 117473 - DNA, 25 bp, Homo sapien
gaatcgtagtgagatcacctccgag

SEQ ID NO: 117474 - DNA, 25 bp, Homo sapien
gaatcgtagtgacatcacctccgag

SEQ ID NO: 117475 - DNA, 25 bp, Homo sapien
aagtgtccgtcctgcatcgtctcgg

SEQ ID NO: 117476 - DNA, 25 bp, Homo sapien
aagtgtccgtccagcatcgtctcgg

SEQ ID NO: 117477 - DNA, 25 bp, Homo sapien
cttgggtcgtacgtccgtagagtga

SEQ ID NO: 117478 - DNA, 25 bp, Homo sapien
cttgggtcgtacctccgtagagtga

SEQ ID NO: 117479 - DNA, 25 bp, Homo sapien
ctggtacagtgtctcaggtagtgac

SEQ ID NO: 117480 - DNA, 25 bp, Homo sapien
ctggtacagtgtgtcaggtagtgac

SEQ ID NO: 117481 - DNA, 25 bp, Homo sapien
tccagaagactgacgagtcgggttg

SEQ ID NO: 117482 - DNA, 25 bp, Homo sapien
tccagaagactgtcgagtcgggttg

SEQ ID NO: 117483 - DNA, 25 bp, Homo sapien
ggaccgctcactggttgaggtgtta

SEQ ID NO: 117484 - DNA, 25 bp, Homo sapien
ggaccgctcactcgttgaggtgtta

SEQ ID NO: 117485 - DNA, 25 bp, Homo sapien
ccccgattcgtcagtgtagtaatac

SEQ ID NO: 117486 - DNA, 25 bp, Homo sapien
ccccgattcgtctgtgtagtaatac

SEQ ID NO: 117487 - DNA, 25 bp, Homo sapien
atgtccgtccctagggtagacacca

SEQ ID NO: 117488 - DNA, 25 bp, Homo sapien
atgtccgtcccttgggtagacacca

SEQ ID NO: 117489 - DNA, 25 bp, Homo sapien
ctttctcataccaagtcggactcag

SEQ ID NO: 117490 - DNA, 25 bp, Homo sapien
ctttctcatacctagtcggactcag

SEQ ID NO: 117491 - DNA, 25 bp, Homo sapien
gtaagtactacctaacgacgagtgg

SEQ ID NO: 117492 - DNA, 25 bp, Homo sapien
gtaagtactaccaaacgacgagtgg

SEQ ID NO: 117493 - DNA, 25 bp, Homo sapien
ccctctagaccctacactagatagg

SEQ ID NO: 117494 - DNA, 25 bp, Homo sapien
ccctctagacccaacactagatagg

SEQ ID NO: 117495 - DNA, 25 bp, Homo sapien
ccctcgttgtcctgactctcatgag

SEQ ID NO: 117496 - DNA, 25 bp, Homo sapien
ccctcgttgtccagactctcatgag

SEQ ID NO: 117497 - DNA, 25 bp, Homo sapien
ggcctagacggtactccctcgcttg

SEQ ID NO: 117498 - DNA, 25 bp, Homo sapien
ggcctagacggttctccctcgcttg

SEQ ID NO: 117499 - DNA, 25 bp, Homo sapien
aagtcttgacaattctgttttctgt

SEQ ID NO: 117500 - DNA, 25 bp, Homo sapien
aagtcttgacaaatctgttttctgt

SEQ ID NO: 117501 - DNA, 25 bp, Homo sapien
tgtctccgtcgacattgttcgatca

SEQ ID NO: 117502 - DNA, 25 bp, Homo sapien
tgtctccgtcgagattgttcgatca

SEQ ID NO: 117503 - DNA, 25 bp, Homo sapien
gcaactacactgcaaggtacagaca

SEQ ID NO: 117504 - DNA, 25 bp, Homo sapien
gcaactacactggaaggtacagaca

SEQ ID NO: 117505 - DNA, 25 bp, Homo sapien
ccgcggtcgttttgggtgttcatct

SEQ ID NO: 117506 - DNA, 25 bp, Homo sapien
ccgcggtcgtttagggtgttcatct

SEQ ID NO: 117507 - DNA, 25 bp, Homo sapien
gatcggtacttttatatgttcactt

SEQ ID NO: 117508 - DNA, 25 bp, Homo sapien
gatcggtactttaatatgttcactt

SEQ ID NO: 117509 - DNA, 25 bp, Homo sapien
gtattgtcgtgtcgattaggcactt

SEQ ID NO: 117510 - DNA, 25 bp, Homo sapien
gtattgtcgtgtggattaggcactt

SEQ ID NO: 117511 - DNA, 25 bp, Homo sapien
cttgtgacgtaacgtctatccagtt

SEQ ID NO: 117512 - DNA, 25 bp, Homo sapien
cttgtgacgtaaggtctatccagtt

SEQ ID NO: 117513 - DNA, 25 bp, Homo sapien
gcaaggagggtcaccgtttcaaggt

SEQ ID NO: 117514 - DNA, 25 bp, Homo sapien
gcaaggagggtctccgtttcaaggt

SEQ ID NO: 117515 - DNA, 25 bp, Homo sapien
caaccaggatgattgtttctgtaga

SEQ ID NO: 117516 - DNA, 25 bp, Homo sapien
caaccaggatgaatgtttctgtaga

SEQ ID NO: 117517 - DNA, 25 bp, Homo sapien
gatcagtgagttctcgtttgggtcg

SEQ ID NO: 117518 - DNA, 25 bp, Homo sapien
gatcagtgagttgtcgtttgggtcg

SEQ ID NO: 117519 - DNA, 25 bp, Homo sapien
cccacgtatttcatgttattgtgtt

SEQ ID NO: 117520 - DNA, 25 bp, Homo sapien
cccacgtatttcttgttattgtgtt

SEQ ID NO: 117521 - DNA, 25 bp, Homo sapien
tctctttaattgtctagatttattt

SEQ ID NO: 117522 - DNA, 25 bp, Homo sapien
tctctttaattgactagatttattt

SEQ ID NO: 117523 - DNA, 25 bp, Homo sapien
ttttatactctgaggctcttctcag

SEQ ID NO: 117524 - DNA, 25 bp, Homo sapien
ttttatactctgtggctcttctcag

SEQ ID NO: 117525 - DNA, 25 bp, Homo sapien
tcatctatgtcgacgggagttctaa

SEQ ID NO: 117526 - DNA, 25 bp, Homo sapien
tcatctatgtcgtcgggagttctaa

SEQ ID NO: 117527 - DNA, 25 bp, Homo sapien
ctcgaaggtgtgtgactcttcacag

SEQ ID NO: 117528 - DNA, 25 bp, Homo sapien
ctcgaaggtgtgagactcttcacag

SEQ ID NO: 117529 - DNA, 25 bp, Homo sapien
cacaggtgtactaacgttcctctaa

SEQ ID NO: 117530 - DNA, 25 bp, Homo sapien
cacaggtgtacttacgttcctctaa

SEQ ID NO: 117531 - DNA, 25 bp, Homo sapien
gctacggtccgcttcttcctgtgcg

SEQ ID NO: 117532 - DNA, 25 bp, Homo sapien
gctacggtccgcatcttcctgtgcg

SEQ ID NO: 117533 - DNA, 25 bp, Homo sapien
gtcacatacctttggacgtccgacg

SEQ ID NO: 117534 - DNA, 25 bp, Homo sapien
gtcacataccttaggacgtccgacg

SEQ ID NO: 117535 - DNA, 25 bp, Homo sapien
ccaactactgtgtcacgtcgtacct

SEQ ID NO: 117536 - DNA, 25 bp, Homo sapien
ccaactactgtgacacgtcgtacct

SEQ ID NO: 117537 - DNA, 25 bp, Homo sapien
gcctccgttcggagagtcgtagtct

SEQ ID NO: 117538 - DNA, 25 bp, Homo sapien
gcctccgttcggtgagtcgtagtct

SEQ ID NO: 117539 - DNA, 25 bp, Homo sapien
ggtcctccggctcgtctgtcgttcg

SEQ ID NO: 117540 - DNA, 25 bp, Homo sapien
ggtcctccggctggtctgtcgttcg

SEQ ID NO: 117541 - DNA, 25 bp, Homo sapien
aatccgtccggcagtccagacttcg

SEQ ID NO: 117542 - DNA, 25 bp, Homo sapien
aatccgtccggctgtccagacttcg

SEQ ID NO: 117543 - DNA, 25 bp, Homo sapien
cttagactggaatgtaacatacttc

SEQ ID NO: 117544 - DNA, 25 bp, Homo sapien
cttagactggaaagtaacatacttc

SEQ ID NO: 117545 - DNA, 25 bp, Homo sapien
tcgtgcttcgagaatcgcagtcctc

SEQ ID NO: 117546 - DNA, 25 bp, Homo sapien
tcgtgcttcgagtatcgcagtcctc

SEQ ID NO: 117547 - DNA, 25 bp, Homo sapien
tggcgacgtcctagtcgaagtccct

SEQ ID NO: 117548 - DNA, 25 bp, Homo sapien
tggcgacgtccttgtcgaagtccct

SEQ ID NO: 117549 - DNA, 25 bp, Homo sapien
gatatctacgagtcggcccggtcct

SEQ ID NO: 117550 - DNA, 25 bp, Homo sapien
gatatctacgagacggcccggtcct

SEQ ID NO: 117551 - DNA, 25 bp, Homo sapien
cctacgacgtcccgccaaacgaaga

SEQ ID NO: 117552 - DNA, 25 bp, Homo sapien
cctacgacgtccggccaaacgaaga

SEQ ID NO: 117553 - DNA, 25 bp, Homo sapien
ccggagccggagtaggtgccacttc

SEQ ID NO: 117554 - DNA, 25 bp, Homo sapien
ccggagccggagaaggtgccacttc

SEQ ID NO: 117555 - DNA, 25 bp, Homo sapien
accggaagaaagaattccgacatta

SEQ ID NO: 117556 - DNA, 25 bp, Homo sapien
accggaagaaagtattccgacatta

SEQ ID NO: 117557 - DNA, 25 bp, Homo sapien
agagaagaaaggtctctaccgattg

SEQ ID NO: 117558 - DNA, 25 bp, Homo sapien
agagaagaaaggactctaccgattg

SEQ ID NO: 117559 - DNA, 25 bp, Homo sapien
aatgaccagtgacaccccgtatcta

SEQ ID NO: 117560 - DNA, 25 bp, Homo sapien
aatgaccagtgagaccccgtatcta

SEQ ID NO: 117561 - DNA, 25 bp, Homo sapien
actaagaagaatcacgtccctgtga

SEQ ID NO: 117562 - DNA, 25 bp, Homo sapien
actaagaagaatgacgtccctgtga

SEQ ID NO: 117563 - DNA, 25 bp, Homo sapien
aaagaaagcatcagccgtactgtta

SEQ ID NO: 117564 - DNA, 25 bp, Homo sapien
aaagaaagcatctgccgtactgtta

SEQ ID NO: 117565 - DNA, 25 bp, Homo sapien
aaacagaggtctacactagctacag

SEQ ID NO: 117566 - DNA, 25 bp, Homo sapien
aaacagaggtcttcactagctacag

SEQ ID NO: 117567 - DNA, 25 bp, Homo sapien
gaaacagaggaggttagacaacgtc

SEQ ID NO: 117568 - DNA, 25 bp, Homo sapien
gaaacagaggagcttagacaacgtc

SEQ ID NO: 117569 - DNA, 25 bp, Homo sapien
agaagggcatcgaccaagaagagtc

SEQ ID NO: 117570 - DNA, 25 bp, Homo sapien
agaagggcatcgtccaagaagagtc

SEQ ID NO: 117571 - DNA, 25 bp, Homo sapien
acgagggtgcccacataggaccaga

SEQ ID NO: 117572 - DNA, 25 bp, Homo sapien
acgagggtgccctcataggaccaga

SEQ ID NO: 117573 - DNA, 25 bp, Homo sapien
ccgggcgtgccctcaagaacagaca

SEQ ID NO: 117574 - DNA, 25 bp, Homo sapien
ccgggcgtgcccacaagaacagaca

SEQ ID NO: 117575 - DNA, 25 bp, Homo sapien
gagtcgcagtccatgctgcaagaac

SEQ ID NO: 117576 - DNA, 25 bp, Homo sapien
gagtcgcagtccttgctgcaagaac

SEQ ID NO: 117577 - DNA, 25 bp, Homo sapien
gacaaagtacagattttggctaaaa

SEQ ID NO: 117578 - DNA, 25 bp, Homo sapien
gacaaagtacagtttttggctaaaa

SEQ ID NO: 117579 - DNA, 25 bp, Homo sapien
ggaatttaggtttaattctaaacct

SEQ ID NO: 117580 - DNA, 25 bp, Homo sapien
ggaatttaggttaaattctaaacct

SEQ ID NO: 117581 - DNA, 25 bp, Homo sapien
gaatttgtgtgtcaagttgttttag

SEQ ID NO: 117582 - DNA, 25 bp, Homo sapien
gaatttgtgtgtgaagttgttttag

SEQ ID NO: 117583 - DNA, 25 bp, Homo sapien
tttgtcgtggtaatttcttacgtac

SEQ ID NO: 117584 - DNA, 25 bp, Homo sapien
tttgtcgtggtattttcttacgtac

SEQ ID NO: 117585 - DNA, 25 bp, Homo sapien
taacagtgaggttcactttttactt

SEQ ID NO: 117586 - DNA, 25 bp, Homo sapien
taacagtgaggtacactttttactt

SEQ ID NO: 117587 - DNA, 25 bp, Homo sapien
catgttatgtttaccttatctataa

SEQ ID NO: 117588 - DNA, 25 bp, Homo sapien
catgttatgttttccttatctataa

SEQ ID NO: 117589 - DNA, 25 bp, Homo sapien
tgtcttacatgtactttgtgatctc

SEQ ID NO: 117590 - DNA, 25 bp, Homo sapien
tgtcttacatgttctttgtgatctc

SEQ ID NO: 117591 - DNA, 25 bp, Homo sapien
cctataaactttaagttcgacgtga

SEQ ID NO: 117592 - DNA, 25 bp, Homo sapien
cctataaacttttagttcgacgtga

SEQ ID NO: 117593 - DNA, 25 bp, Homo sapien
gtacaaacttctacgacgacacgaa

SEQ ID NO: 117594 - DNA, 25 bp, Homo sapien
gtacaaacttcttcgacgacacgaa

SEQ ID NO: 117595 - DNA, 25 bp, Homo sapien
ataggtactcctcagacctactaag

SEQ ID NO: 117596 - DNA, 25 bp, Homo sapien
ataggtactcctgagacctactaag

SEQ ID NO: 117597 - DNA, 25 bp, Homo sapien
gtaacgcgttcaagaccacacacag

SEQ ID NO: 117598 - DNA, 25 bp, Homo sapien
gtaacgcgttcatgaccacacacag

SEQ ID NO: 117599 - DNA, 25 bp, Homo sapien
tcagagtccattctgaccaagtcag

SEQ ID NO: 117600 - DNA, 25 bp, Homo sapien
tcagagtccattgtgaccaagtcag

SEQ ID NO: 117601 - DNA, 25 bp, Homo sapien
gtgtgatacctatagaaaccatttc

SEQ ID NO: 117602 - DNA, 25 bp, Homo sapien
gtgtgatacctaaagaaaccatttc

SEQ ID NO: 117603 - DNA, 25 bp, Homo sapien
atacacccgaataattctctttctc

SEQ ID NO: 117604 - DNA, 25 bp, Homo sapien
atacacccgaattattctctttctc

SEQ ID NO: 117605 - DNA, 25 bp, Homo sapien
tagagaccgaattgttattgttctc

SEQ ID NO: 117606 - DNA, 25 bp, Homo sapien
tagagaccgaatagttattgttctc

SEQ ID NO: 117607 - DNA, 25 bp, Homo sapien
tcgaggtaagctagatttttttttt

SEQ ID NO: 117608 - DNA, 25 bp, Homo sapien
tcgaggtaagcttgatttttttttt

SEQ ID NO: 117609 - DNA, 25 bp, Homo sapien
agaggcgaggtcggtttttcatttg

SEQ ID NO: 117610 - DNA, 25 bp, Homo sapien
agaggcgaggtccgtttttcatttg

SEQ ID NO: 117611 - DNA, 25 bp, Homo sapien
ctcagatgtacattcttcctgtctg

SEQ ID NO: 117612 - DNA, 25 bp, Homo sapien
ctcagatgtacaatcttcctgtctg

SEQ ID NO: 117613 - DNA, 25 bp, Homo sapien
tcaataaacgagttatcctgtcgtg

SEQ ID NO: 117614 - DNA, 25 bp, Homo sapien
tcaataaacgagatatcctgtcgtg

SEQ ID NO: 117615 - DNA, 25 bp, Homo sapien
cgaaagtcggggttatcaccgtgta

SEQ ID NO: 117616 - DNA, 25 bp, Homo sapien
cgaaagtcggggatatcaccgtgta

SEQ ID NO: 117617 - DNA, 25 bp, Homo sapien
gtcccatcgaatagttgtccgacga

SEQ ID NO: 117618 - DNA, 25 bp, Homo sapien
gtcccatcgaattgttgtccgacga

SEQ ID NO: 117619 - DNA, 25 bp, Homo sapien
gtcactgaccttgtggttccgtgtt

SEQ ID NO: 117620 - DNA, 25 bp, Homo sapien
gtcactgaccttctggttccgtgtt

SEQ ID NO: 117621 - DNA, 25 bp, Homo sapien
gtgcctccatctctcgaggccggtg

SEQ ID NO: 117622 - DNA, 25 bp, Homo sapien
gtgcctccatctgtcgaggccggtg

SEQ ID NO: 117623 - DNA, 25 bp, Homo sapien
ttctccattctggaggtcgaccgag

SEQ ID NO: 117624 - DNA, 25 bp, Homo sapien
ttctccattctgcaggtcgaccgag

SEQ ID NO: 117625 - DNA, 25 bp, Homo sapien
cagtttcggcctaactttacacctg

SEQ ID NO: 117626 - DNA, 25 bp, Homo sapien
cagtttcggccttactttacacctg

SEQ ID NO: 117627 - DNA, 25 bp, Homo sapien
ctctttcccagcttcaagaccgtgt

SEQ ID NO: 117628 - DNA, 25 bp, Homo sapien
ctctttcccagcatcaagaccgtgt

SEQ ID NO: 117629 - DNA, 25 bp, Homo sapien
tttttacccgaaacagacacatgag

SEQ ID NO: 117630 - DNA, 25 bp, Homo sapien
tttttacccgaatcagacacatgag

SEQ ID NO: 117631 - DNA, 25 bp, Homo sapien
tgtgattcaccttaccggaccccga

SEQ ID NO: 117632 - DNA, 25 bp, Homo sapien
tgtgattcacctaaccggaccccga

SEQ ID NO: 117633 - DNA, 25 bp, Homo sapien
tcggtgccagaacaggtgtagccga

SEQ ID NO: 117634 - DNA, 25 bp, Homo sapien
tcggtgccagaagaggtgtagccga

SEQ ID NO: 117635 - DNA, 25 bp, Homo sapien
tcggggaaagaagaggtatacccta

SEQ ID NO: 117636 - DNA, 25 bp, Homo sapien
tcggggaaagaacaggtatacccta

SEQ ID NO: 117637 - DNA, 25 bp, Homo sapien
tgcgttttaggagaacgagtctttc

SEQ ID NO: 117638 - DNA, 25 bp, Homo sapien
tgcgttttaggacaacgagtctttc

SEQ ID NO: 117639 - DNA, 25 bp, Homo sapien
cgtaacagagtcaaatcctatttgt

SEQ ID NO: 117640 - DNA, 25 bp, Homo sapien
cgtaacagagtctaatcctatttgt

SEQ ID NO: 117641 - DNA, 25 bp, Homo sapien
gtcttatgacgcaatacccgttttg

SEQ ID NO: 117642 - DNA, 25 bp, Homo sapien
gtcttatgacgctatacccgttttg

SEQ ID NO: 117643 - DNA, 25 bp, Homo sapien
tgcgtgactgtgtgttaaccttttc

SEQ ID NO: 117644 - DNA, 25 bp, Homo sapien
tgcgtgactgtgagttaaccttttc

SEQ ID NO: 117645 - DNA, 25 bp, Homo sapien
ccagggtccaggacgacggttctcg

SEQ ID NO: 117646 - DNA, 25 bp, Homo sapien
ccagggtccaggtcgacggttctcg

SEQ ID NO: 117647 - DNA, 25 bp, Homo sapien
gtccggggccgtctcgtcgtttccg

SEQ ID NO: 117648 - DNA, 25 bp, Homo sapien
gtccggggccgtgtcgtcgtttccg

SEQ ID NO: 117649 - DNA, 25 bp, Homo sapien
attccatgagggaatcacggtccac

SEQ ID NO: 117650 - DNA, 25 bp, Homo sapien
attccatgagggtatcacggtccac

SEQ ID NO: 117651 - DNA, 25 bp, Homo sapien
acattccaaagagaggccatactta

SEQ ID NO: 117652 - DNA, 25 bp, Homo sapien
acattccaaagacaggccatactta

SEQ ID NO: 117653 - DNA, 25 bp, Homo sapien
tagttcccctgaccaatttgatctg

SEQ ID NO: 117654 - DNA, 25 bp, Homo sapien
tagttcccctgagcaatttgatctg

SEQ ID NO: 117655 - DNA, 25 bp, Homo sapien
attattctaaagttcatttctatgg

SEQ ID NO: 117656 - DNA, 25 bp, Homo sapien
attattctaaagatcatttctatgg

SEQ ID NO: 117657 - DNA, 25 bp, Homo sapien
ttattttcaggtcgatattccttcg

SEQ ID NO: 117658 - DNA, 25 bp, Homo sapien
ttattttcaggtggatattccttcg

SEQ ID NO: 117659 - DNA, 25 bp, Homo sapien
tgtcttccaccgtaatattcaggtc

SEQ ID NO: 117660 - DNA, 25 bp, Homo sapien
tgtcttccaccgaaatattcaggtc

SEQ ID NO: 117661 - DNA, 25 bp, Homo sapien
gtagtaatccccattttccgaggtt

SEQ ID NO: 117662 - DNA, 25 bp, Homo sapien
gtagtaatcccctttttccgaggtt

SEQ ID NO: 117663 - DNA, 25 bp, Homo sapien
gactacccatagtgtccgtcgggtt

SEQ ID NO: 117664 - DNA, 25 bp, Homo sapien
gactacccatagagtccgtcgggtt

SEQ ID NO: 117665 - DNA, 25 bp, Homo sapien
ccctagatctagaacagacgatgtt

SEQ ID NO: 117666 - DNA, 25 bp, Homo sapien
ccctagatctagtacagacgatgtt

SEQ ID NO: 117667 - DNA, 25 bp, Homo sapien
acaccattttctaggacccgtaggt

SEQ ID NO: 117668 - DNA, 25 bp, Homo sapien
acaccattttcttggacccgtaggt

SEQ ID NO: 117669 - DNA, 25 bp, Homo sapien
accctagtccctaggaaccgttgac

SEQ ID NO: 117670 - DNA, 25 bp, Homo sapien
accctagtcccttggaaccgttgac

SEQ ID NO: 117671 - DNA, 25 bp, Homo sapien
gacctggtacacttgggacacttca

SEQ ID NO: 117672 - DNA, 25 bp, Homo sapien
gacctggtacacatgggacacttca

SEQ ID NO: 117673 - DNA, 25 bp, Homo sapien
taacctggactggaggtgaggtcta

SEQ ID NO: 117674 - DNA, 25 bp, Homo sapien
taacctggactgcaggtgaggtcta

SEQ ID NO: 117675 - DNA, 25 bp, Homo sapien
acgggtctccacgaggtcgagttgt

SEQ ID NO: 117676 - DNA, 25 bp, Homo sapien
acgggtctccaccaggtcgagttgt

SEQ ID NO: 117677 - DNA, 25 bp, Homo sapien
ggcgcctgtacttgtgtgtatcgtg

SEQ ID NO: 117678 - DNA, 25 bp, Homo sapien
ggcgcctgtactagtgtgtatcgtg

SEQ ID NO: 117679 - DNA, 25 bp, Homo sapien
tacatgtccaccatatgtgatatcg

SEQ ID NO: 117680 - DNA, 25 bp, Homo sapien
tacatgtccaccttatgtgatatcg

SEQ ID NO: 117681 - DNA, 25 bp, Homo sapien
cctttgtccccagtgatatgaaacg

SEQ ID NO: 117682 - DNA, 25 bp, Homo sapien
cctttgtccccactgatatgaaacg

SEQ ID NO: 117683 - DNA, 25 bp, Homo sapien
actgtgacgacataatttacatgaa

SEQ ID NO: 117684 - DNA, 25 bp, Homo sapien
actgtgacgacaaaatttacatgaa

SEQ ID NO: 117685 - DNA, 25 bp, Homo sapien
ctgtcagaagaacagaccggtccga

SEQ ID NO: 117686 - DNA, 25 bp, Homo sapien
ctgtcagaagaagagaccggtccga

SEQ ID NO: 117687 - DNA, 25 bp, Homo sapien
cgtactctagggatgcgcctgtggc

SEQ ID NO: 117688 - DNA, 25 bp, Homo sapien
cgtactctagggttgcgcctgtggc

SEQ ID NO: 117689 - DNA, 25 bp, Homo sapien
tgaccgtaccggaaggcacaggggt

SEQ ID NO: 117690 - DNA, 25 bp, Homo sapien
tgaccgtaccggtaggcacaggggt

SEQ ID NO: 117691 - DNA, 25 bp, Homo sapien
gactctacacggtcagtccaatctt

SEQ ID NO: 117692 - DNA, 25 bp, Homo sapien
gactctacacggacagtccaatctt

SEQ ID NO: 117693 - DNA, 25 bp, Homo sapien
gattaatgtatactctccgtaggtt

SEQ ID NO: 117694 - DNA, 25 bp, Homo sapien
gattaatgtatagtctccgtaggtt

SEQ ID NO: 117695 - DNA, 25 bp, Homo sapien
ctgtggtgtttggttctcttgggtc

SEQ ID NO: 117696 - DNA, 25 bp, Homo sapien
ctgtggtgtttgcttctcttgggtc

SEQ ID NO: 117697 - DNA, 25 bp, Homo sapien
ctgtaattgtctattccgttgaata

SEQ ID NO: 117698 - DNA, 25 bp, Homo sapien
ctgtaattgtcttttccgttgaata

SEQ ID NO: 117699 - DNA, 25 bp, Homo sapien
gtcatttacattctattactaagtt

SEQ ID NO: 117700 - DNA, 25 bp, Homo sapien
gtcatttacattgtattactaagtt

SEQ ID NO: 117701 - DNA, 25 bp, Homo sapien
ggaactaactagtgcttattcattt

SEQ ID NO: 117702 - DNA, 25 bp, Homo sapien
ggaactaactagagcttattcattt

SEQ ID NO: 117703 - DNA, 25 bp, Homo sapien
ggaccaacccaggttactccaagtt

SEQ ID NO: 117704 - DNA, 25 bp, Homo sapien
ggaccaacccagcttactccaagtt

SEQ ID NO: 117705 - DNA, 25 bp, Homo sapien
taagaaagaatttccctcagaggat

SEQ ID NO: 117706 - DNA, 25 bp, Homo sapien
taagaaagaattaccctcagaggat

SEQ ID NO: 117707 - DNA, 25 bp, Homo sapien
gtcgaacaacttactccgaaggacc

SEQ ID NO: 117708 - DNA, 25 bp, Homo sapien
gtcgaacaactttctccgaaggacc

SEQ ID NO: 117709 - DNA, 25 bp, Homo sapien
cgtccgtaaactttttcagaagatc

SEQ ID NO: 117710 - DNA, 25 bp, Homo sapien
cgtccgtaaactatttcagaagatc

SEQ ID NO: 117711 - DNA, 25 bp, Homo sapien
ggaccgtaccatttctaggaatttt

SEQ ID NO: 117712 - DNA, 25 bp, Homo sapien
ggaccgtaccatatctaggaatttt

SEQ ID NO: 117713 - DNA, 25 bp, Homo sapien
ctggaagactttatggcaattcggt

SEQ ID NO: 117714 - DNA, 25 bp, Homo sapien
ctggaagactttttggcaattcggt

SEQ ID NO: 117715 - DNA, 25 bp, Homo sapien
aaaaggtaacctttgtacatttctg

SEQ ID NO: 117716 - DNA, 25 bp, Homo sapien
aaaaggtaacctatgtacatttctg

SEQ ID NO: 117717 - DNA, 25 bp, Homo sapien
acaggtaaatcccaactcctactat

SEQ ID NO: 117718 - DNA, 25 bp, Homo sapien
acaggtaaatccgaactcctactat

SEQ ID NO: 117719 - DNA, 25 bp, Homo sapien
ttgtaaagtcggttctgaccgtata

SEQ ID NO: 117720 - DNA, 25 bp, Homo sapien
ttgtaaagtcggatctgaccgtata

SEQ ID NO: 117721 - DNA, 25 bp, Homo sapien
cgttcacaagactgacgattcctaa

SEQ ID NO: 117722 - DNA, 25 bp, Homo sapien
cgttcacaagacagacgattcctaa

SEQ ID NO: 117723 - DNA, 25 bp, Homo sapien
aggactcacagacgtcgaagtgccc

SEQ ID NO: 117724 - DNA, 25 bp, Homo sapien
aggactcacagaggtcgaagtgccc

SEQ ID NO: 117725 - DNA, 25 bp, Homo sapien
tccagaatacaatcttgtaaatttt

SEQ ID NO: 117726 - DNA, 25 bp, Homo sapien
tccagaatacaaacttgtaaatttt

SEQ ID NO: 117727 - DNA, 25 bp, Homo sapien
cgagaaatgtgtccttaactcagcc

SEQ ID NO: 117728 - DNA, 25 bp, Homo sapien
cgagaaatgtgtgcttaactcagcc

SEQ ID NO: 117729 - DNA, 25 bp, Homo sapien
cgtaaggagtttgttatccgagatc

SEQ ID NO: 117730 - DNA, 25 bp, Homo sapien
cgtaaggagtttcttatccgagatc

SEQ ID NO: 117731 - DNA, 25 bp, Homo sapien
taacaattttagtcgacgtgatcta

SEQ ID NO: 117732 - DNA, 25 bp, Homo sapien
taacaattttagacgacgtgatcta

SEQ ID NO: 117733 - DNA, 25 bp, Homo sapien
gtatgttgatgtcttccccttttac

SEQ ID NO: 117734 - DNA, 25 bp, Homo sapien
gtatgttgatgtgttccccttttac

SEQ ID NO: 117735 - DNA, 25 bp, Homo sapien
gggtaagtgtccacgaagattctcc

SEQ ID NO: 117736 - DNA, 25 bp, Homo sapien
gggtaagtgtcctcgaagattctcc

SEQ ID NO: 117737 - DNA, 25 bp, Homo sapien
tgttttgacttcgacgacatctttc

SEQ ID NO: 117738 - DNA, 25 bp, Homo sapien
tgttttgacttccacgacatctttc

SEQ ID NO: 117739 - DNA, 25 bp, Homo sapien
tttgtacatgaacgtacatcctgtt

SEQ ID NO: 117740 - DNA, 25 bp, Homo sapien
tttgtacatgaaggtacatcctgtt

SEQ ID NO: 117741 - DNA, 25 bp, Homo sapien
tcgtgtaacgtagacaattcacagg

SEQ ID NO: 117742 - DNA, 25 bp, Homo sapien
tcgtgtaacgtacacaattcacagg

SEQ ID NO: 117743 - DNA, 25 bp, Homo sapien
cgttcagttacgaatagtcgccagg

SEQ ID NO: 117744 - DNA, 25 bp, Homo sapien
cgttcagttacgtatagtcgccagg

SEQ ID NO: 117745 - DNA, 25 bp, Homo sapien
ttttctcaccattggtcctagatag

SEQ ID NO: 117746 - DNA, 25 bp, Homo sapien
ttttctcaccataggtcctagatag

SEQ ID NO: 117747 - DNA, 25 bp, Homo sapien
ttctttcgttctaattccccaggag

SEQ ID NO: 117748 - DNA, 25 bp, Homo sapien
ttctttcgttcttattccccaggag

SEQ ID NO: 117749 - DNA, 25 bp, Homo sapien
tttgttacccttacaccccggtaga

SEQ ID NO: 117750 - DNA, 25 bp, Homo sapien
tttgttaccctttcaccccggtaga

SEQ ID NO: 117751 - DNA, 25 bp, Homo sapien
ctactgtccgacgaaaccctcgaaa

SEQ ID NO: 117752 - DNA, 25 bp, Homo sapien
ctactgtccgaccaaaccctcgaaa

SEQ ID NO: 117753 - DNA, 25 bp, Homo sapien
ttttttcgtagaccccctgtgaaga

SEQ ID NO: 117754 - DNA, 25 bp, Homo sapien
ttttttcgtagagcccctgtgaaga

SEQ ID NO: 117755 - DNA, 25 bp, Homo sapien
tgtttaagtgaagacccttaaatag

SEQ ID NO: 117756 - DNA, 25 bp, Homo sapien
tgtttaagtgaacacccttaaatag

SEQ ID NO: 117757 - DNA, 25 bp, Homo sapien
ttgtcgggacaattcaagttaattc

SEQ ID NO: 117758 - DNA, 25 bp, Homo sapien
ttgtcgggacaaatcaagttaattc

SEQ ID NO: 117759 - DNA, 25 bp, Homo sapien
gtcacccgtcaggtcgcaccgtgag

SEQ ID NO: 117760 - DNA, 25 bp, Homo sapien
gtcacccgtcagctcgcaccgtgag

SEQ ID NO: 117761 - DNA, 25 bp, Homo sapien
ttaactctggtctctcactcgtcag

SEQ ID NO: 117762 - DNA, 25 bp, Homo sapien
ttaactctggtcactcactcgtcag

SEQ ID NO: 117763 - DNA, 25 bp, Homo sapien
ctttaagagtttcaaacccgtacag

SEQ ID NO: 117764 - DNA, 25 bp, Homo sapien
ctttaagagtttgaaacccgtacag

SEQ ID NO: 117765 - DNA, 25 bp, Homo sapien
agttgtataggaatttacaaaccca

SEQ ID NO: 117766 - DNA, 25 bp, Homo sapien
agttgtataggattttacaaaccca

SEQ ID NO: 117767 - DNA, 25 bp, Homo sapien
attatggtcactgatgaaactaagc

SEQ ID NO: 117768 - DNA, 25 bp, Homo sapien
attatggtcactcatgaaactaagc

SEQ ID NO: 117769 - DNA, 25 bp, Homo sapien
accgcgctactaccgaggctaggga

SEQ ID NO: 117770 - DNA, 25 bp, Homo sapien
accgcgctactagcgaggctaggga

SEQ ID NO: 117771 - DNA, 25 bp, Homo sapien
gaacagaagaaggagggtttccccg

SEQ ID NO: 117772 - DNA, 25 bp, Homo sapien
gaacagaagaagcagggtttccccg

SEQ ID NO: 117773 - DNA, 25 bp, Homo sapien
accaaagaccagaaaagtatccccg

SEQ ID NO: 117774 - DNA, 25 bp, Homo sapien
accaaagaccagtaaagtatccccg

SEQ ID NO: 117775 - DNA, 25 bp, Homo sapien
gcaagtctcaactaagaggcgccct

SEQ ID NO: 117776 - DNA, 25 bp, Homo sapien
gcaagtctcaacaaagaggcgccct

SEQ ID NO: 117777 - DNA, 25 bp, Homo sapien
gcgacggtgcctctcgtcgggtcaa

SEQ ID NO: 117778 - DNA, 25 bp, Homo sapien
gcgacggtgcctgtcgtcgggtcaa

SEQ ID NO: 117779 - DNA, 25 bp, Homo sapien
acccgtgtcggctcagcgggtacaa

SEQ ID NO: 117780 - DNA, 25 bp, Homo sapien
acccgtgtcggcacagcgggtacaa

SEQ ID NO: 117781 - DNA, 25 bp, Homo sapien
tagtgtgttccaagttaccgtaatt

SEQ ID NO: 117782 - DNA, 25 bp, Homo sapien
tagtgtgttccatgttaccgtaatt

SEQ ID NO: 117783 - DNA, 25 bp, Homo sapien
ttgtacttacacttttaccgaaggt

SEQ ID NO: 117784 - DNA, 25 bp, Homo sapien
ttgtacttacacatttaccgaaggt

SEQ ID NO: 117785 - DNA, 25 bp, Homo sapien
ttgtctgacgtcgttctaccagatc

SEQ ID NO: 117786 - DNA, 25 bp, Homo sapien
ttgtctgacgtccttctaccagatc

SEQ ID NO: 117787 - DNA, 25 bp, Homo sapien
tgaagacgtgtctactccgtgacta

SEQ ID NO: 117788 - DNA, 25 bp, Homo sapien
tgaagacgtgtcaactccgtgacta

SEQ ID NO: 117789 - DNA, 25 bp, Homo sapien
cagagacaacagacactttcgagat

SEQ ID NO: 117790 - DNA, 25 bp, Homo sapien
cagagacaacagtcactttcgagat

SEQ ID NO: 117791 - DNA, 25 bp, Homo sapien
tgcacggacgtccacgtatcgggac

SEQ ID NO: 117792 - DNA, 25 bp, Homo sapien
tgcacggacgtcgacgtatcgggac

SEQ ID NO: 117793 - DNA, 25 bp, Homo sapien
tccggcgacgcgaactatgcgagac

SEQ ID NO: 117794 - DNA, 25 bp, Homo sapien
tccggcgacgcgtactatgcgagac

SEQ ID NO: 117795 - DNA, 25 bp, Homo sapien
aggtgcttccgctacagtacggcgg

SEQ ID NO: 117796 - DNA, 25 bp, Homo sapien
aggtgcttccgcaacagtacggcgg

SEQ ID NO: 117797 - DNA, 25 bp, Homo sapien
ggacctctcgtccaaagcgagacgg

SEQ ID NO: 117798 - DNA, 25 bp, Homo sapien
ggacctctcgtcgaaagcgagacgg

SEQ ID NO: 117799 - DNA, 25 bp, Homo sapien
gggacctctccgagaccgtctagta

SEQ ID NO: 117800 - DNA, 25 bp, Homo sapien
gggacctctccgtgaccgtctagta

SEQ ID NO: 117801 - DNA, 25 bp, Homo sapien
cgggtgtccttcctcgacctctagg

SEQ ID NO: 117802 - DNA, 25 bp, Homo sapien
cgggtgtccttcgtcgacctctagg

SEQ ID NO: 117803 - DNA, 25 bp, Homo sapien
actccgttccagtttccacttgacg

SEQ ID NO: 117804 - DNA, 25 bp, Homo sapien
actccgttccagattccacttgacg

SEQ ID NO: 117805 - DNA, 25 bp, Homo sapien
cgtctgtagacagaatcgcctagaa

SEQ ID NO: 117806 - DNA, 25 bp, Homo sapien
cgtctgtagacacaatcgcctagaa

SEQ ID NO: 117807 - DNA, 25 bp, Homo sapien
agacctacgaaatctctgaagcacg

SEQ ID NO: 117808 - DNA, 25 bp, Homo sapien
agacctacgaaaactctgaagcacg

SEQ ID NO: 117809 - DNA, 25 bp, Homo sapien
cgggactccgggacctcgtctccgg

SEQ ID NO: 117810 - DNA, 25 bp, Homo sapien
cgggactccgggtcctcgtctccgg

SEQ ID NO: 117811 - DNA, 25 bp, Homo sapien
ccaacccgaggttcttctctatgac

SEQ ID NO: 117812 - DNA, 25 bp, Homo sapien
ccaacccgaggtacttctctatgac

SEQ ID NO: 117813 - DNA, 25 bp, Homo sapien
gcgaaatcaagttttcggtgtaaac

SEQ ID NO: 117814 - DNA, 25 bp, Homo sapien
gcgaaatcaagtattcggtgtaaac

SEQ ID NO: 117815 - DNA, 25 bp, Homo sapien
acggtagtcgaggttttcgggaatc

SEQ ID NO: 117816 - DNA, 25 bp, Homo sapien
acggtagtcgagcttttcgggaatc

SEQ ID NO: 117817 - DNA, 25 bp, Homo sapien
aaggaggagttaagtactggacacc

SEQ ID NO: 117818 - DNA, 25 bp, Homo sapien
aaggaggagttatgtactggacacc

SEQ ID NO: 117819 - DNA, 25 bp, Homo sapien
gaaatagaggtgatgtgtctgctcc

SEQ ID NO: 117820 - DNA, 25 bp, Homo sapien
gaaatagaggtgttgtgtctgctcc

SEQ ID NO: 117821 - DNA, 25 bp, Homo sapien
ggtatgatcattctactttcttcgt

SEQ ID NO: 117822 - DNA, 25 bp, Homo sapien
ggtatgatcattgtactttcttcgt

SEQ ID NO: 117823 - DNA, 25 bp, Homo sapien
gtttgttcattcgacttactgacac

SEQ ID NO: 117824 - DNA, 25 bp, Homo sapien
gtttgttcattccacttactgacac

SEQ ID NO: 117825 - DNA, 25 bp, Homo sapien
tattttatggtctacgatcatagca

SEQ ID NO: 117826 - DNA, 25 bp, Homo sapien
tattttatggtcaacgatcatagca

SEQ ID NO: 117827 - DNA, 25 bp, Homo sapien
ttcctgtcgggcatcccgtggtcga

SEQ ID NO: 117828 - DNA, 25 bp, Homo sapien
ttcctgtcgggcttcccgtggtcga

SEQ ID NO: 117829 - DNA, 25 bp, Homo sapien
aaacgagatctaagaccgtcggtca

SEQ ID NO: 117830 - DNA, 25 bp, Homo sapien
aaacgagatctatgaccgtcggtca

SEQ ID NO: 117831 - DNA, 25 bp, Homo sapien
tgtcagtcggtaagaaaaccgatta

SEQ ID NO: 117832 - DNA, 25 bp, Homo sapien
tgtcagtcggtatgaaaaccgatta

SEQ ID NO: 117833 - DNA, 25 bp, Homo sapien
tctaaaaactgtaaatcagtttcgt

SEQ ID NO: 117834 - DNA, 25 bp, Homo sapien
tctaaaaactgttaatcagtttcgt

SEQ ID NO: 117835 - DNA, 25 bp, Homo sapien
tgtctagtaaaaatttacctgttta

SEQ ID NO: 117836 - DNA, 25 bp, Homo sapien
tgtctagtaaaattttacctgttta

SEQ ID NO: 117837 - DNA, 25 bp, Homo sapien
tgttctaccaatgatgttttcgtaa

SEQ ID NO: 117838 - DNA, 25 bp, Homo sapien
tgttctaccaatcatgttttcgtaa

SEQ ID NO: 117839 - DNA, 25 bp, Homo sapien
ttctcgatcttatggtcgttagaat

SEQ ID NO: 117840 - DNA, 25 bp, Homo sapien
ttctcgatcttaaggtcgttagaat

SEQ ID NO: 117841 - DNA, 25 bp, Homo sapien
cttcgtttcgttgtcggtatgtata

SEQ ID NO: 117842 - DNA, 25 bp, Homo sapien
cttcgtttcgttctcggtatgtata

SEQ ID NO: 117843 - DNA, 25 bp, Homo sapien
actttcaccgtctactggagtagaa

SEQ ID NO: 117844 - DNA, 25 bp, Homo sapien
actttcaccgtcaactggagtagaa

SEQ ID NO: 117845 - DNA, 25 bp, Homo sapien
cttggtcccagaggtcgtacagaag

SEQ ID NO: 117846 - DNA, 25 bp, Homo sapien
cttggtcccagacgtcgtacagaag

SEQ ID NO: 117847 - DNA, 25 bp, Homo sapien
ttgacccaacgtcctcacagacagt

SEQ ID NO: 117848 - DNA, 25 bp, Homo sapien
ttgacccaacgtgctcacagacagt

SEQ ID NO: 117849 - DNA, 25 bp, Homo sapien
ataacgagtgtaaagtcttcatgat

SEQ ID NO: 117850 - DNA, 25 bp, Homo sapien
ataacgagtgtatagtcttcatgat

SEQ ID NO: 117851 - DNA, 25 bp, Homo sapien
gaaaggagtagactcctcagtctat

SEQ ID NO: 117852 - DNA, 25 bp, Homo sapien
gaaaggagtagagtcctcagtctat

SEQ ID NO: 117853 - DNA, 25 bp, Homo sapien
ccgagtgggacactgtgtcggtctc

SEQ ID NO: 117854 - DNA, 25 bp, Homo sapien
ccgagtgggacagtgtgtcggtctc

SEQ ID NO: 117855 - DNA, 25 bp, Homo sapien
tagaagtggatactaggtccgtgtc

SEQ ID NO: 117856 - DNA, 25 bp, Homo sapien
tagaagtggatagtaggtccgtgtc

SEQ ID NO: 117857 - DNA, 25 bp, Homo sapien
agaacctctcgaactgaacgaacac

SEQ ID NO: 117858 - DNA, 25 bp, Homo sapien
agaacctctcgatctgaacgaacac

SEQ ID NO: 117859 - DNA, 25 bp, Homo sapien
tgtaatcgtacgagtgtcacaactc

SEQ ID NO: 117860 - DNA, 25 bp, Homo sapien
tgtaatcgtacgtgtgtcacaactc

SEQ ID NO: 117861 - DNA, 25 bp, Homo sapien
gacttaagatctaatggtctcacca

SEQ ID NO: 117862 - DNA, 25 bp, Homo sapien
gacttaagatcttatggtctcacca

SEQ ID NO: 117863 - DNA, 25 bp, Homo sapien
aggctccgaaacacaagtgctccac

SEQ ID NO: 117864 - DNA, 25 bp, Homo sapien
aggctccgaaactcaagtgctccac

SEQ ID NO: 117865 - DNA, 25 bp, Homo sapien
gaaataggaaagcaattgtgactcc

SEQ ID NO: 117866 - DNA, 25 bp, Homo sapien
gaaataggaaaggaattgtgactcc

SEQ ID NO: 117867 - DNA, 25 bp, Homo sapien
ctaagagtggttaaagtgacctcat

SEQ ID NO: 117868 - DNA, 25 bp, Homo sapien
ctaagagtggtttaagtgacctcat

SEQ ID NO: 117869 - DNA, 25 bp, Homo sapien
cttgtgaggagagttcccttattta

SEQ ID NO: 117870 - DNA, 25 bp, Homo sapien
cttgtgaggagacttcccttattta

SEQ ID NO: 117871 - DNA, 25 bp, Homo sapien
cttagaggagaactttcagtttcaa

SEQ ID NO: 117872 - DNA, 25 bp, Homo sapien
cttagaggagaagtttcagtttcaa

SEQ ID NO: 117873 - DNA, 25 bp, Homo sapien
aattgttaagacctcacaattgaga

SEQ ID NO: 117874 - DNA, 25 bp, Homo sapien
aattgttaagacgtcacaattgaga

SEQ ID NO: 117875 - DNA, 25 bp, Homo sapien
ctgagtgtcggtcgtccaattgaga

SEQ ID NO: 117876 - DNA, 25 bp, Homo sapien
ctgagtgtcggtggtccaattgaga

SEQ ID NO: 117877 - DNA, 25 bp, Homo sapien
cctggaccgactcttaggtgtgaga

SEQ ID NO: 117878 - DNA, 25 bp, Homo sapien
cctggaccgactgttaggtgtgaga

SEQ ID NO: 117879 - DNA, 25 bp, Homo sapien
cctggtccactggtctccttcgagg

SEQ ID NO: 117880 - DNA, 25 bp, Homo sapien
cctggtccactgctctccttcgagg

SEQ ID NO: 117881 - DNA, 25 bp, Homo sapien
ctcgggtccttagtccctataggat

SEQ ID NO: 117882 - DNA, 25 bp, Homo sapien
ctcgggtccttactccctataggat

SEQ ID NO: 117883 - DNA, 25 bp, Homo sapien
gcgtgtttggagacccatcctccgt

SEQ ID NO: 117884 - DNA, 25 bp, Homo sapien
gcgtgtttggagtcccatcctccgt

SEQ ID NO: 117885 - DNA, 25 bp, Homo sapien
gaaccggtgtagtgcctacattccg

SEQ ID NO: 117886 - DNA, 25 bp, Homo sapien
gaaccggtgtagagcctacattccg

SEQ ID NO: 117887 - DNA, 25 bp, Homo sapien
gttctcaggtgtattccctctacct

SEQ ID NO: 117888 - DNA, 25 bp, Homo sapien
gttctcaggtgttttccctctacct

SEQ ID NO: 117889 - DNA, 25 bp, Homo sapien
agaccaggaatttcatacgtctagc

SEQ ID NO: 117890 - DNA, 25 bp, Homo sapien
agaccaggaattacatacgtctagc

SEQ ID NO: 117891 - DNA, 25 bp, Homo sapien
gacgtagaggaaactgcccgcaaac

SEQ ID NO: 117892 - DNA, 25 bp, Homo sapien
gacgtagaggaatctgcccgcaaac

SEQ ID NO: 117893 - DNA, 25 bp, Homo sapien
gagagaggaaactggacctctgtca

SEQ ID NO: 117894 - DNA, 25 bp, Homo sapien
gagagaggaaacaggacctctgtca

SEQ ID NO: 117895 - DNA, 25 bp, Homo sapien
ggtctgctcggagcaccttcgtcac

SEQ ID NO: 117896 - DNA, 25 bp, Homo sapien
ggtctgctcggaccaccttcgtcac

SEQ ID NO: 117897 - DNA, 25 bp, Homo sapien
tgagtgacgtcatactccttgttta

SEQ ID NO: 117898 - DNA, 25 bp, Homo sapien
tgagtgacgtcaaactccttgttta

SEQ ID NO: 117899 - DNA, 25 bp, Homo sapien
cttcgtcggtcgaacacaaatgaaa

SEQ ID NO: 117900 - DNA, 25 bp, Homo sapien
cttcgtcggtcgtacacaaatgaaa

SEQ ID NO: 117901 - DNA, 25 bp, Homo sapien
ttttcgctttagacggtggtcaaca

SEQ ID NO: 117902 - DNA, 25 bp, Homo sapien
ttttcgctttagtcggtggtcaaca

SEQ ID NO: 117903 - DNA, 25 bp, Homo sapien
tcttttcgttttgttccggaactac

SEQ ID NO: 117904 - DNA, 25 bp, Homo sapien
tcttttcgttttcttccggaactac

SEQ ID NO: 117905 - DNA, 25 bp, Homo sapien
tttgtttcccttgacacgtagatat

SEQ ID NO: 117906 - DNA, 25 bp, Homo sapien
tttgtttcccttcacacgtagatat

SEQ ID NO: 117907 - DNA, 25 bp, Homo sapien
gttttcccacactttactagtgaag

SEQ ID NO: 117908 - DNA, 25 bp, Homo sapien
gttttcccacacattactagtgaag

SEQ ID NO: 117909 - DNA, 25 bp, Homo sapien
ttgtgtcccccaggttctcggtcgg

SEQ ID NO: 117910 - DNA, 25 bp, Homo sapien
ttgtgtcccccacgttctcggtcgg

SEQ ID NO: 117911 - DNA, 25 bp, Homo sapien
tctgtgtcccgcaaaggtctcgggg

SEQ ID NO: 117912 - DNA, 25 bp, Homo sapien
tctgtgtcccgctaaggtctcgggg

SEQ ID NO: 117913 - DNA, 25 bp, Homo sapien
acccaattacccatggtacgtggga

SEQ ID NO: 117914 - DNA, 25 bp, Homo sapien
acccaattacccttggtacgtggga

SEQ ID NO: 117915 - DNA, 25 bp, Homo sapien
ccattactcttcctaatctgggtcg

SEQ ID NO: 117916 - DNA, 25 bp, Homo sapien
ccattactcttcgtaatctgggtcg

SEQ ID NO: 117917 - DNA, 25 bp, Homo sapien
cattttaagtgtgtacaccggggtg

SEQ ID NO: 117918 - DNA, 25 bp, Homo sapien
cattttaagtgtctacaccggggtg

SEQ ID NO: 117919 - DNA, 25 bp, Homo sapien
ttgttaaaggtagaccggaccgaga

SEQ ID NO: 117920 - DNA, 25 bp, Homo sapien
ttgttaaaggtacaccggaccgaga

SEQ ID NO: 117921 - DNA, 25 bp, Homo sapien
tttgctgatgttgacccgaaccgca

SEQ ID NO: 117922 - DNA, 25 bp, Homo sapien
tttgctgatgttcacccgaaccgca

SEQ ID NO: 117923 - DNA, 25 bp, Homo sapien
gttagttaacctcaaccaagacaga

SEQ ID NO: 117924 - DNA, 25 bp, Homo sapien
gttagttaacctgaaccaagacaga

SEQ ID NO: 117925 - DNA, 25 bp, Homo sapien
tagttttacccagacgtgtacggaa

SEQ ID NO: 117926 - DNA, 25 bp, Homo sapien
tagttttacccacacgtgtacggaa

SEQ ID NO: 117927 - DNA, 25 bp, Homo sapien
tactttcccccgtagtcgtagggtc

SEQ ID NO: 117928 - DNA, 25 bp, Homo sapien
tactttcccccgaagtcgtagggtc

SEQ ID NO: 117929 - DNA, 25 bp, Homo sapien
ttggtcacgacaccagttttatgtc

SEQ ID NO: 117930 - DNA, 25 bp, Homo sapien
ttggtcacgacagcagttttatgtc

SEQ ID NO: 117931 - DNA, 25 bp, Homo sapien
caagacgtcaaactatgtcttgttt

SEQ ID NO: 117932 - DNA, 25 bp, Homo sapien
caagacgtcaaagtatgtcttgttt

SEQ ID NO: 117933 - DNA, 25 bp, Homo sapien
cctcgttctatagtttccgagttcg

SEQ ID NO: 117934 - DNA, 25 bp, Homo sapien
cctcgttctatactttccgagttcg

SEQ ID NO: 117935 - DNA, 25 bp, Homo sapien
gggacaatcttatatttgactaatc

SEQ ID NO: 117936 - DNA, 25 bp, Homo sapien
gggacaatcttaaatttgactaatc

SEQ ID NO: 117937 - DNA, 25 bp, Homo sapien
tacacgacccaaagtttggtaactc

SEQ ID NO: 117938 - DNA, 25 bp, Homo sapien
tacacgacccaatgtttggtaactc

SEQ ID NO: 117939 - DNA, 25 bp, Homo sapien
acggtccactgagtgttccgacttt

SEQ ID NO: 117940 - DNA, 25 bp, Homo sapien
acggtccactgactgttccgacttt

SEQ ID NO: 117941 - DNA, 25 bp, Homo sapien
tagttctcaactgatatacccaagg

SEQ ID NO: 117942 - DNA, 25 bp, Homo sapien
tagttctcaactcatatacccaagg

SEQ ID NO: 117943 - DNA, 25 bp, Homo sapien
gtttccgacgtggaaacgacctgag

SEQ ID NO: 117944 - DNA, 25 bp, Homo sapien
gtttccgacgtgcaaacgacctgag

SEQ ID NO: 117945 - DNA, 25 bp, Homo sapien
atctccgccggtgactaaagtgtgt

SEQ ID NO: 117946 - DNA, 25 bp, Homo sapien
atctccgccggtcactaaagtgtgt

SEQ ID NO: 117947 - DNA, 25 bp, Homo sapien
cacctccgacagtcaccagtttagt

SEQ ID NO: 117948 - DNA, 25 bp, Homo sapien
cacctccgacagacaccagtttagt

SEQ ID NO: 117949 - DNA, 25 bp, Homo sapien
ccagcgactacctacggtagaaacg

SEQ ID NO: 117950 - DNA, 25 bp, Homo sapien
ccagcgactaccaacggtagaaacg

SEQ ID NO: 117951 - DNA, 25 bp, Homo sapien
ccagtgacacccttgtagacggagt

SEQ ID NO: 117952 - DNA, 25 bp, Homo sapien
ccagtgacacccatgtagacggagt

SEQ ID NO: 117953 - DNA, 25 bp, Homo sapien
cacttgtcgttccaatgagactaag

SEQ ID NO: 117954 - DNA, 25 bp, Homo sapien
cacttgtcgttcgaatgagactaag

SEQ ID NO: 117955 - DNA, 25 bp, Homo sapien
cacggtcccgtcactagaggaagac

SEQ ID NO: 117956 - DNA, 25 bp, Homo sapien
cacggtcccgtctctagaggaagac

SEQ ID NO: 117957 - DNA, 25 bp, Homo sapien
tcaggtacccgtcattacatgaaga

SEQ ID NO: 117958 - DNA, 25 bp, Homo sapien
tcaggtacccgtgattacatgaaga

SEQ ID NO: 117959 - DNA, 25 bp, Homo sapien
atcacgaacagaggtcttaatgaaa

SEQ ID NO: 117960 - DNA, 25 bp, Homo sapien
atcacgaacagacgtcttaatgaaa

SEQ ID NO: 117961 - DNA, 25 bp, Homo sapien
tatcggaccaccctggaggtctcca

SEQ ID NO: 117962 - DNA, 25 bp, Homo sapien
tatcggaccaccgtggaggtctcca

SEQ ID NO: 117963 - DNA, 25 bp, Homo sapien
tggggaatgtttatcggttccacag

SEQ ID NO: 117964 - DNA, 25 bp, Homo sapien
tggggaatgtttttcggttccacag

SEQ ID NO: 117965 - DNA, 25 bp, Homo sapien
tgacacatggactcggggtccaccg

SEQ ID NO: 117966 - DNA, 25 bp, Homo sapien
tgacacatggacacggggtccaccg

SEQ ID NO: 117967 - DNA, 25 bp, Homo sapien
caccgggtttcgttgtgtctcctcg

SEQ ID NO: 117968 - DNA, 25 bp, Homo sapien
caccgggtttcgatgtgtctcctcg

SEQ ID NO: 117969 - DNA, 25 bp, Homo sapien
gttatctgattatgactcgaatttc

SEQ ID NO: 117970 - DNA, 25 bp, Homo sapien
gttatctgattaagactcgaatttc

SEQ ID NO: 117971 - DNA, 25 bp, Homo sapien
ttctttacctactggtgaagttatc

SEQ ID NO: 117972 - DNA, 25 bp, Homo sapien
ttctttacctacaggtgaagttatc

SEQ ID NO: 117973 - DNA, 25 bp, Homo sapien
gtcgttctgttacgactcttgtaaa

SEQ ID NO: 117974 - DNA, 25 bp, Homo sapien
gtcgttctgttaggactcttgtaaa

SEQ ID NO: 117975 - DNA, 25 bp, Homo sapien
attagttttgtggaacgaccttatc

SEQ ID NO: 117976 - DNA, 25 bp, Homo sapien
attagttttgtgcaacgaccttatc

SEQ ID NO: 117977 - DNA, 25 bp, Homo sapien
tatagttgacttgaaccaccgaccc

SEQ ID NO: 117978 - DNA, 25 bp, Homo sapien
tatagttgacttcaaccaccgaccc

SEQ ID NO: 117979 - DNA, 25 bp, Homo sapien
ctgtatgtcgtttcgtactagttgg

SEQ ID NO: 117980 - DNA, 25 bp, Homo sapien
ctgtatgtcgttacgtactagttgg

SEQ ID NO: 117981 - DNA, 25 bp, Homo sapien
cgattctgtctcctacctatcgggt

SEQ ID NO: 117982 - DNA, 25 bp, Homo sapien
cgattctgtctcgtacctatcgggt

SEQ ID NO: 117983 - DNA, 25 bp, Homo sapien
agtccaaccttacctagacttttgg

SEQ ID NO: 117984 - DNA, 25 bp, Homo sapien
agtccaaccttagctagacttttgg

SEQ ID NO: 117985 - DNA, 25 bp, Homo sapien
cgaaaaactcagaaagtatcttcgg

SEQ ID NO: 117986 - DNA, 25 bp, Homo sapien
cgaaaaactcagtaagtatcttcgg

SEQ ID NO: 117987 - DNA, 25 bp, Homo sapien
acgaaagattcaggtgggacccgac

SEQ ID NO: 117988 - DNA, 25 bp, Homo sapien
acgaaagattcacgtgggacccgac

SEQ ID NO: 117989 - DNA, 25 bp, Homo sapien
aaagaaaggtcctcggggtacagga

SEQ ID NO: 117990 - DNA, 25 bp, Homo sapien
aaagaaaggtccacggggtacagga

SEQ ID NO: 117991 - DNA, 25 bp, Homo sapien
tctagagtccaaaggagggttcgac

SEQ ID NO: 117992 - DNA, 25 bp, Homo sapien
tctagagtccaatggagggttcgac

SEQ ID NO: 117993 - DNA, 25 bp, Homo sapien
tcaggacgaatagacgtccttaccg

SEQ ID NO: 117994 - DNA, 25 bp, Homo sapien
tcaggacgaatacacgtccttaccg

SEQ ID NO: 117995 - DNA, 25 bp, Homo sapien
gagaccaaacataagacgagcccca

SEQ ID NO: 117996 - DNA, 25 bp, Homo sapien
gagaccaaacattagacgagcccca

SEQ ID NO: 117997 - DNA, 25 bp, Homo sapien
gatctaacctaaagacaacgcaaag

SEQ ID NO: 117998 - DNA, 25 bp, Homo sapien
gatctaacctaatgacaacgcaaag

SEQ ID NO: 117999 - DNA, 25 bp, Homo sapien
ttggtatttgtttcgtcgccccaag

SEQ ID NO: 118000 - DNA, 25 bp, Homo sapien
ttggtatttgttacgtcgccccaag

SEQ ID NO: 118001 - DNA, 25 bp, Homo sapien
taaggttaattaaaagtctctccaa

SEQ ID NO: 118002 - DNA, 25 bp, Homo sapien
taaggttaattataagtctctccaa

SEQ ID NO: 118003 - DNA, 25 bp, Homo sapien
aatgtaaaaatgcaacctccgtcag

SEQ ID NO: 118004 - DNA, 25 bp, Homo sapien
aatgtaaaaatggaacctccgtcag

SEQ ID NO: 118005 - DNA, 25 bp, Homo sapien
gagtaagacatgaatccggtctgag

SEQ ID NO: 118006 - DNA, 25 bp, Homo sapien
gagtaagacatgtatccggtctgag

SEQ ID NO: 118007 - DNA, 25 bp, Homo sapien
atctccactactcttatcgaggaga

SEQ ID NO: 118008 - DNA, 25 bp, Homo sapien
atctccactactgttatcgaggaga

SEQ ID NO: 118009 - DNA, 25 bp, Homo sapien
atatgtcgtcactgggcctcgggga

SEQ ID NO: 118010 - DNA, 25 bp, Homo sapien
atatgtcgtcacagggcctcgggga

SEQ ID NO: 118011 - DNA, 25 bp, Homo sapien
tttcgtgtcctgtgacgagggccca

SEQ ID NO: 118012 - DNA, 25 bp, Homo sapien
tttcgtgtcctgagacgagggccca

SEQ ID NO: 118013 - DNA, 25 bp, Homo sapien
tcggtctctgggagcccgacacgtc

SEQ ID NO: 118014 - DNA, 25 bp, Homo sapien
tcggtctctgggtgcccgacacgtc

SEQ ID NO: 118015 - DNA, 25 bp, Homo sapien
gagactactggtccaggacgtcccc

SEQ ID NO: 118016 - DNA, 25 bp, Homo sapien
gagactactggtgcaggacgtcccc

SEQ ID NO: 118017 - DNA, 25 bp, Homo sapien
aaactcaagagttgtacaacctgtg

SEQ ID NO: 118018 - DNA, 25 bp, Homo sapien
aaactcaagagtagtacaacctgtg

SEQ ID NO: 118019 - DNA, 25 bp, Homo sapien
ctcagtcttgtgatacactcgagtt

SEQ ID NO: 118020 - DNA, 25 bp, Homo sapien
ctcagtcttgtgttacactcgagtt

SEQ ID NO: 118021 - DNA, 25 bp, Homo sapien
cgtgaattttgttcttacactgatc

SEQ ID NO: 118022 - DNA, 25 bp, Homo sapien
cgtgaattttgtacttacactgatc

SEQ ID NO: 118023 - DNA, 25 bp, Homo sapien
agacctttcgtggacctaaagaacc

SEQ ID NO: 118024 - DNA, 25 bp, Homo sapien
agacctttcgtgcacctaaagaacc

SEQ ID NO: 118025 - DNA, 25 bp, Homo sapien
cgcgtacttgcgacctcgaataagg

SEQ ID NO: 118026 - DNA, 25 bp, Homo sapien
cgcgtacttgcgtcctcgaataagg

SEQ ID NO: 118027 - DNA, 25 bp, Homo sapien
tcgagtttagacacacaacacctgg

SEQ ID NO: 118028 - DNA, 25 bp, Homo sapien
tcgagtttagactcacaacacctgg

SEQ ID NO: 118029 - DNA, 25 bp, Homo sapien
acgttaaaggtgtacgtaccagagt

SEQ ID NO: 118030 - DNA, 25 bp, Homo sapien
acgttaaaggtgaacgtaccagagt

SEQ ID NO: 118031 - DNA, 25 bp, Homo sapien
acactaagtcaaaggtcctcaagga

SEQ ID NO: 118032 - DNA, 25 bp, Homo sapien
acactaagtcaatggtcctcaagga

SEQ ID NO: 118033 - DNA, 25 bp, Homo sapien
caattggttacgactctgtaaacat

SEQ ID NO: 118034 - DNA, 25 bp, Homo sapien
caattggttacgtctctgtaaacat

SEQ ID NO: 118035 - DNA, 25 bp, Homo sapien
caacgcgaaggagtctcttaaaact

SEQ ID NO: 118036 - DNA, 25 bp, Homo sapien
caacgcgaaggactctcttaaaact

SEQ ID NO: 118037 - DNA, 25 bp, Homo sapien
tcaagcgaagggtcttaacgacacc

SEQ ID NO: 118038 - DNA, 25 bp, Homo sapien
tcaagcgaagggacttaacgacacc

SEQ ID NO: 118039 - DNA, 25 bp, Homo sapien
tggaacacgggagtaatcaccggac

SEQ ID NO: 118040 - DNA, 25 bp, Homo sapien
tggaacacgggactaatcaccggac

SEQ ID NO: 118041 - DNA, 25 bp, Homo sapien
ttgttcagggcctaaactaatcgtt

SEQ ID NO: 118042 - DNA, 25 bp, Homo sapien
ttgttcagggccaaaactaatcgtt

SEQ ID NO: 118043 - DNA, 25 bp, Homo sapien
gtggaacacacacaccaaattcact

SEQ ID NO: 118044 - DNA, 25 bp, Homo sapien
gtggaacacacagaccaaattcact

SEQ ID NO: 118045 - DNA, 25 bp, Homo sapien
gtgggaatagagacccgtaattctt

SEQ ID NO: 118046 - DNA, 25 bp, Homo sapien
gtgggaatagagtcccgtaattctt

SEQ ID NO: 118047 - DNA, 25 bp, Homo sapien
ggtgacgtatcttctctggtttctt

SEQ ID NO: 118048 - DNA, 25 bp, Homo sapien
ggtgacgtatctactctggtttctt

SEQ ID NO: 118049 - DNA, 25 bp, Homo sapien
ggtacactttagcttaccgtctaaa

SEQ ID NO: 118050 - DNA, 25 bp, Homo sapien
ggtacactttaggttaccgtctaaa

SEQ ID NO: 118051 - DNA, 25 bp, Homo sapien
gggtgacggtgactcttgtgactaa

SEQ ID NO: 118052 - DNA, 25 bp, Homo sapien
gggtgacggtgagtcttgtgactaa

SEQ ID NO: 118053 - DNA, 25 bp, Homo sapien
gatgtttgaagactttctctacttg

SEQ ID NO: 118054 - DNA, 25 bp, Homo sapien
gatgtttgaagagtttctctacttg

SEQ ID NO: 118055 - DNA, 25 bp, Homo sapien
tatctcgagaatttctcgactattg

SEQ ID NO: 118056 - DNA, 25 bp, Homo sapien
tatctcgagaatatctcgactattg

SEQ ID NO: 118057 - DNA, 25 bp, Homo sapien
agtgttgtcgaagtcttctcttttc

SEQ ID NO: 118058 - DNA, 25 bp, Homo sapien
agtgttgtcgaactcttctcttttc

SEQ ID NO: 118059 - DNA, 25 bp, Homo sapien
atagtcgggtgagaaaagtctttcc

SEQ ID NO: 118060 - DNA, 25 bp, Homo sapien
atagtcgggtgacaaaagtctttcc

SEQ ID NO: 118061 - DNA, 25 bp, Homo sapien
agtcaggttcctacaatccttcgtt

SEQ ID NO: 118062 - DNA, 25 bp, Homo sapien
agtcaggttccttcaatccttcgtt

SEQ ID NO: 118063 - DNA, 25 bp, Homo sapien
tcgaggcctcactcggagctgccgg

SEQ ID NO: 118064 - DNA, 25 bp, Homo sapien
tcgaggcctcacacggagctgccgg

SEQ ID NO: 118065 - DNA, 25 bp, Homo sapien
actagagtcccctggcaacgaaggg

SEQ ID NO: 118066 - DNA, 25 bp, Homo sapien
actagagtccccaggcaacgaaggg

SEQ ID NO: 118067 - DNA, 25 bp, Homo sapien
cggatcctacacgaccgaaagggtt

SEQ ID NO: 118068 - DNA, 25 bp, Homo sapien
cggatcctacaccaccgaaagggtt

SEQ ID NO: 118069 - DNA, 25 bp, Homo sapien
ttatcctatccgaggactctgtgct

SEQ ID NO: 118070 - DNA, 25 bp, Homo sapien
ttatcctatccgtggactctgtgct

SEQ ID NO: 118071 - DNA, 25 bp, Homo sapien
tttttccgggacgtagtctttaagt

SEQ ID NO: 118072 - DNA, 25 bp, Homo sapien
tttttccgggacctagtctttaagt

SEQ ID NO: 118073 - DNA, 25 bp, Homo sapien
ttttgacccgtgacatgtatttcag

SEQ ID NO: 118074 - DNA, 25 bp, Homo sapien
ttttgacccgtgtcatgtatttcag

SEQ ID NO: 118075 - DNA, 25 bp, Homo sapien
tttctgccatagtataatctttcgg

SEQ ID NO: 118076 - DNA, 25 bp, Homo sapien
tttctgccatagaataatctttcgg

SEQ ID NO: 118077 - DNA, 25 bp, Homo sapien
acgtaagttaggaagtgttcacgac

SEQ ID NO: 118078 - DNA, 25 bp, Homo sapien
acgtaagttaggtagtgttcacgac

SEQ ID NO: 118079 - DNA, 25 bp, Homo sapien
ataaccgtaaatgttgtttaccgat

SEQ ID NO: 118080 - DNA, 25 bp, Homo sapien
ataaccgtaaatcttgtttaccgat

SEQ ID NO: 118081 - DNA, 25 bp, Homo sapien
gtacaatttaagatggattttcctc

SEQ ID NO: 118082 - DNA, 25 bp, Homo sapien
gtacaatttaagttggattttcctc

SEQ ID NO: 118083 - DNA, 25 bp, Homo sapien
tgaaaaacattcgatcctttcgtag

SEQ ID NO: 118084 - DNA, 25 bp, Homo sapien
tgaaaaacattccatcctttcgtag

SEQ ID NO: 118085 - DNA, 25 bp, Homo sapien
tgggaaaagattccacctctttagt

SEQ ID NO: 118086 - DNA, 25 bp, Homo sapien
tgggaaaagattgcacctctttagt

SEQ ID NO: 118087 - DNA, 25 bp, Homo sapien
actgatatcagttggatcctttttc

SEQ ID NO: 118088 - DNA, 25 bp, Homo sapien
actgatatcagtaggatcctttttc

SEQ ID NO: 118089 - DNA, 25 bp, Homo sapien
gaagacagtgtgtcttactttctaa

SEQ ID NO: 118090 - DNA, 25 bp, Homo sapien
gaagacagtgtgacttactttctaa

SEQ ID NO: 118091 - DNA, 25 bp, Homo sapien
ccgaagtctttctgactctatgacc

SEQ ID NO: 118092 - DNA, 25 bp, Homo sapien
ccgaagtctttcagactctatgacc

SEQ ID NO: 118093 - DNA, 25 bp, Homo sapien
tgcccgtttcggtcccggatcgggt

SEQ ID NO: 118094 - DNA, 25 bp, Homo sapien
tgcccgtttcggacccggatcgggt

SEQ ID NO: 118095 - DNA, 25 bp, Homo sapien
gcacggttccagtccgagttgaggt

SEQ ID NO: 118096 - DNA, 25 bp, Homo sapien
gcacggttccagaccgagttgaggt

SEQ ID NO: 118097 - DNA, 25 bp, Homo sapien
tcctcgtcccagaagacgacaaagg

SEQ ID NO: 118098 - DNA, 25 bp, Homo sapien
tcctcgtcccagtagacgacaaagg

SEQ ID NO: 118099 - DNA, 25 bp, Homo sapien
ccatcccacttcgagacgtgtgtag

SEQ ID NO: 118100 - DNA, 25 bp, Homo sapien
ccatcccacttccagacgtgtgtag

SEQ ID NO: 118101 - DNA, 25 bp, Homo sapien
ctcaaagaggtcagttccagggtga

SEQ ID NO: 118102 - DNA, 25 bp, Homo sapien
ctcaaagaggtctgttccagggtga

SEQ ID NO: 118103 - DNA, 25 bp, Homo sapien
gatcaagtgtcattatccacgtttc

SEQ ID NO: 118104 - DNA, 25 bp, Homo sapien
gatcaagtgtcaatatccacgtttc

SEQ ID NO: 118105 - DNA, 25 bp, Homo sapien
gtgaaaccgtcattctctccttcag

SEQ ID NO: 118106 - DNA, 25 bp, Homo sapien
gtgaaaccgtcaatctctccttcag

SEQ ID NO: 118107 - DNA, 25 bp, Homo sapien
ttaagtgtcgtcgtattcaccccag

SEQ ID NO: 118108 - DNA, 25 bp, Homo sapien
ttaagtgtcgtcctattcaccccag

SEQ ID NO: 118109 - DNA, 25 bp, Homo sapien
tgacgatgttccgacgttccccgag

SEQ ID NO: 118110 - DNA, 25 bp, Homo sapien
tgacgatgttcccacgttccccgag

SEQ ID NO: 118111 - DNA, 25 bp, Homo sapien
ttaagagtcccgatgcccgtctcgg

SEQ ID NO: 118112 - DNA, 25 bp, Homo sapien
ttaagagtcccgttgcccgtctcgg

SEQ ID NO: 118113 - DNA, 25 bp, Homo sapien
cttccggtactcgtcctacggcgag

SEQ ID NO: 118114 - DNA, 25 bp, Homo sapien
cttccggtactcctcctacggcgag

SEQ ID NO: 118115 - DNA, 25 bp, Homo sapien
tccctacagtgtctcgtcgacggga

SEQ ID NO: 118116 - DNA, 25 bp, Homo sapien
tccctacagtgtgtcgtcgacggga

SEQ ID NO: 118117 - DNA, 25 bp, Homo sapien
cccccagactcgacgttcgaggtta

SEQ ID NO: 118118 - DNA, 25 bp, Homo sapien
cccccagactcgtcgttcgaggtta

SEQ ID NO: 118119 - DNA, 25 bp, Homo sapien
accgactctctagttgcaggtgtag

SEQ ID NO: 118120 - DNA, 25 bp, Homo sapien
accgactctctacttgcaggtgtag

SEQ ID NO: 118121 - DNA, 25 bp, Homo sapien
accatgattcgcaggtagtagttat

SEQ ID NO: 118122 - DNA, 25 bp, Homo sapien
accatgattcgctggtagtagttat

SEQ ID NO: 118123 - DNA, 25 bp, Homo sapien
ttacctaagctcaggggtaaccgta

SEQ ID NO: 118124 - DNA, 25 bp, Homo sapien
ttacctaagctctggggtaaccgta

SEQ ID NO: 118125 - DNA, 25 bp, Homo sapien
cttttattgtcgaagtcgataccag

SEQ ID NO: 118126 - DNA, 25 bp, Homo sapien
cttttattgtcgtagtcgataccag

SEQ ID NO: 118127 - DNA, 25 bp, Homo sapien
gtcgagttcccttcgacagtagtag

SEQ ID NO: 118128 - DNA, 25 bp, Homo sapien
gtcgagttccctacgacagtagtag

SEQ ID NO: 118129 - DNA, 25 bp, Homo sapien
ccctccgacctcttgaagacgagtg

SEQ ID NO: 118130 - DNA, 25 bp, Homo sapien
ccctccgacctcatgaagacgagtg

SEQ ID NO: 118131 - DNA, 25 bp, Homo sapien
ccccgttatcgttatctctaatgtg

SEQ ID NO: 118132 - DNA, 25 bp, Homo sapien
ccccgttatcgtaatctctaatgtg

SEQ ID NO: 118133 - DNA, 25 bp, Homo sapien
gtgccacgagtgtcttcggtccttg

SEQ ID NO: 118134 - DNA, 25 bp, Homo sapien
gtgccacgagtgacttcggtccttg

SEQ ID NO: 118135 - DNA, 25 bp, Homo sapien
tccttacgtacagttgttttactgt

SEQ ID NO: 118136 - DNA, 25 bp, Homo sapien
tccttacgtacacttgttttactgt

SEQ ID NO: 118137 - DNA, 25 bp, Homo sapien
gattctcctcgatccttgatgttta

SEQ ID NO: 118138 - DNA, 25 bp, Homo sapien
gattctcctcgaaccttgatgttta

SEQ ID NO: 118139 - DNA, 25 bp, Homo sapien
ttcaactacctaccaagtaaggtaa

SEQ ID NO: 118140 - DNA, 25 bp, Homo sapien
ttcaactacctagcaagtaaggtaa

SEQ ID NO: 118141 - DNA, 25 bp, Homo sapien
ctgcggcgtttatggtttgacggtt

SEQ ID NO: 118142 - DNA, 25 bp, Homo sapien
ctgcggcgtttaaggtttgacggtt

SEQ ID NO: 118143 - DNA, 25 bp, Homo sapien
ctctttggtttttatattgtacatt

SEQ ID NO: 118144 - DNA, 25 bp, Homo sapien
ctctttggttttaatattgtacatt

SEQ ID NO: 118145 - DNA, 25 bp, Homo sapien
cttgtgtcttttaatagtgtctatt

SEQ ID NO: 118146 - DNA, 25 bp, Homo sapien
cttgtgtctttttatagtgtctatt

SEQ ID NO: 118147 - DNA, 25 bp, Homo sapien
cccctcgttctatagtttccgagtt

SEQ ID NO: 118148 - DNA, 25 bp, Homo sapien
cccctcgttctaaagtttccgagtt

SEQ ID NO: 118149 - DNA, 25 bp, Homo sapien
gctccaggggtcatccgtttcaggg

SEQ ID NO: 118150 - DNA, 25 bp, Homo sapien
gctccaggggtcttccgtttcaggg

SEQ ID NO: 118151 - DNA, 25 bp, Homo sapien
ccccggtggttttcgtttacagaga

SEQ ID NO: 118152 - DNA, 25 bp, Homo sapien
ccccggtggtttacgtttacagaga

SEQ ID NO: 118153 - DNA, 25 bp, Homo sapien
ctcccgtggtttctttcgtcggtgt

SEQ ID NO: 118154 - DNA, 25 bp, Homo sapien
ctcccgtggtttgtttcgtcggtgt

SEQ ID NO: 118155 - DNA, 25 bp, Homo sapien
acccgtttatcgtgttactccgttt

SEQ ID NO: 118156 - DNA, 25 bp, Homo sapien
acccgtttatcgagttactccgttt

SEQ ID NO: 118157 - DNA, 25 bp, Homo sapien
tctcactttttgtatgtttgttctt

SEQ ID NO: 118158 - DNA, 25 bp, Homo sapien
tctcactttttgaatgtttgttctt

SEQ ID NO: 118159 - DNA, 25 bp, Homo sapien
ttttaactattgagggtcttctgtc

SEQ ID NO: 118160 - DNA, 25 bp, Homo sapien
ttttaactattgtgggtcttctgtc

SEQ ID NO: 118161 - DNA, 25 bp, Homo sapien
cttactcatagtcctggggttcttc

SEQ ID NO: 118162 - DNA, 25 bp, Homo sapien
cttactcatagtgctggggttcttc

SEQ ID NO: 118163 - DNA, 25 bp, Homo sapien
ttgtcgattttgtgactcttctaca

SEQ ID NO: 118164 - DNA, 25 bp, Homo sapien
ttgtcgattttgagactcttctaca

SEQ ID NO: 118165 - DNA, 25 bp, Homo sapien
caagtcgtgtataattcgaactata

SEQ ID NO: 118166 - DNA, 25 bp, Homo sapien
caagtcgtgtattattcgaactata

SEQ ID NO: 118167 - DNA, 25 bp, Homo sapien
aattacggtcccttacttaccaggg

SEQ ID NO: 118168 - DNA, 25 bp, Homo sapien
aattacggtcccatacttaccaggg

SEQ ID NO: 118169 - DNA, 25 bp, Homo sapien
tatgacactaccatggtgcccgacg

SEQ ID NO: 118170 - DNA, 25 bp, Homo sapien
tatgacactaccttggtgcccgacg

SEQ ID NO: 118171 - DNA, 25 bp, Homo sapien
cacgatcatgtacgtcccgacacgt

SEQ ID NO: 118172 - DNA, 25 bp, Homo sapien
cacgatcatgtaggtcccgacacgt

SEQ ID NO: 118173 - DNA, 25 bp, Homo sapien
cctgtacttcaggttgtcgtagact

SEQ ID NO: 118174 - DNA, 25 bp, Homo sapien
cctgtacttcagcttgtcgtagact

SEQ ID NO: 118175 - DNA, 25 bp, Homo sapien
ggtcccgcggctctctacggtagcg

SEQ ID NO: 118176 - DNA, 25 bp, Homo sapien
ggtcccgcggctgtctacggtagcg

SEQ ID NO: 118177 - DNA, 25 bp, Homo sapien
gagcctcgacggtacgccagttgcg

SEQ ID NO: 118178 - DNA, 25 bp, Homo sapien
gagcctcgacggaacgccagttgcg

SEQ ID NO: 118179 - DNA, 25 bp, Homo sapien
gcaacatcggaagagacatacatcg

SEQ ID NO: 118180 - DNA, 25 bp, Homo sapien
gcaacatcggaacagacatacatcg

SEQ ID NO: 118181 - DNA, 25 bp, Homo sapien
tggtctctcaaaacacacgtcttcg

SEQ ID NO: 118182 - DNA, 25 bp, Homo sapien
tggtctctcaaatcacacgtcttcg

SEQ ID NO: 118183 - DNA, 25 bp, Homo sapien
ttggcgacgtcctagtcgaagtccc

SEQ ID NO: 118184 - DNA, 25 bp, Homo sapien
ttggcgacgtccaagtcgaagtccc

SEQ ID NO: 118185 - DNA, 25 bp, Homo sapien
ggaatctacttctgagcgggtgcct

SEQ ID NO: 118186 - DNA, 25 bp, Homo sapien
ggaatctacttcagagcgggtgcct

SEQ ID NO: 118187 - DNA, 25 bp, Homo sapien
agtggaaagatgaggcctctctccg

SEQ ID NO: 118188 - DNA, 25 bp, Homo sapien
agtggaaagatgtggcctctctccg

SEQ ID NO: 118189 - DNA, 25 bp, Homo sapien
tcggaccaggagacgggtacccttc

SEQ ID NO: 118190 - DNA, 25 bp, Homo sapien
tcggaccaggagtcgggtacccttc

SEQ ID NO: 118191 - DNA, 25 bp, Homo sapien
tccgagaagaaatttgtgccaatac

SEQ ID NO: 118192 - DNA, 25 bp, Homo sapien
tccgagaagaaaattgtgccaatac

SEQ ID NO: 118193 - DNA, 25 bp, Homo sapien
caagaagaaactattgaccgagtaa

SEQ ID NO: 118194 - DNA, 25 bp, Homo sapien
caagaagaaacttttgaccgagtaa

SEQ ID NO: 118195 - DNA, 25 bp, Homo sapien
aaaaaccgagagagactcccatcac

SEQ ID NO: 118196 - DNA, 25 bp, Homo sapien
aaaaaccgagagtgactcccatcac

SEQ ID NO: 118197 - DNA, 25 bp, Homo sapien
ggtaagaataatactcctacttgac

SEQ ID NO: 118198 - DNA, 25 bp, Homo sapien
ggtaagaataattctcctacttgac

SEQ ID NO: 118199 - DNA, 25 bp, Homo sapien
aaatatacaggatcccctacttaag

SEQ ID NO: 118200 - DNA, 25 bp, Homo sapien
aaatatacaggaacccctacttaag

SEQ ID NO: 118201 - DNA, 25 bp, Homo sapien
aaagaaggtgctataagtctacacg

SEQ ID NO: 118202 - DNA, 25 bp, Homo sapien
aaagaaggtgctttaagtctacacg

SEQ ID NO: 118203 - DNA, 25 bp, Homo sapien
aacagaggagaggttaggaactcgt

SEQ ID NO: 118204 - DNA, 25 bp, Homo sapien
aacagaggagagcttaggaactcgt

SEQ ID NO: 118205 - DNA, 25 bp, Homo sapien
aggaggaccaagactcatgaatgtc

SEQ ID NO: 118206 - DNA, 25 bp, Homo sapien
aggaggaccaagtctcatgaatgtc

SEQ ID NO: 118207 - DNA, 25 bp, Homo sapien
aagggggcactgtcacttgaaccga

SEQ ID NO: 118208 - DNA, 25 bp, Homo sapien
aagggggcactgacacttgaaccga

SEQ ID NO: 118209 - DNA, 25 bp, Homo sapien
ggggcgttcacctcaaagtacagga

SEQ ID NO: 118210 - DNA, 25 bp, Homo sapien
ggggcgttcaccacaaagtacagga

SEQ ID NO: 118211 - DNA, 25 bp, Homo sapien
ggccacgacctaagaccgcaacgga

SEQ ID NO: 118212 - DNA, 25 bp, Homo sapien
ggccacgacctatgaccgcaacgga

SEQ ID NO: 118213 - DNA, 25 bp, Homo sapien
gcgtaaaacagtatttctgcttaaa

SEQ ID NO: 118214 - DNA, 25 bp, Homo sapien
gcgtaaaacagtttttctgcttaaa

SEQ ID NO: 118215 - DNA, 25 bp, Homo sapien
acagtccgggtttagcttctaaacc

SEQ ID NO: 118216 - DNA, 25 bp, Homo sapien
acagtccgggttaagcttctaaacc

SEQ ID NO: 118217 - DNA, 25 bp, Homo sapien
aatttgtgtgtcaagttgttttagt

SEQ ID NO: 118218 - DNA, 25 bp, Homo sapien
aatttgtgtgtctagttgttttagt

SEQ ID NO: 118219 - DNA, 25 bp, Homo sapien
agttttcggtgtaaggttcttctac

SEQ ID NO: 118220 - DNA, 25 bp, Homo sapien
agttttcggtgttaggttcttctac

SEQ ID NO: 118221 - DNA, 25 bp, Homo sapien
aagagaggtgtttcatgttttatat

SEQ ID NO: 118222 - DNA, 25 bp, Homo sapien
aagagaggtgttacatgttttatat

SEQ ID NO: 118223 - DNA, 25 bp, Homo sapien
catgagttcttttcctgtgtctgaa

SEQ ID NO: 118224 - DNA, 25 bp, Homo sapien
catgagttctttacctgtgtctgaa

SEQ ID NO: 118225 - DNA, 25 bp, Homo sapien
tgatatcactgtgactttgacttcc

SEQ ID NO: 118226 - DNA, 25 bp, Homo sapien
tgatatcactgtcactttgacttcc

SEQ ID NO: 118227 - DNA, 25 bp, Homo sapien
accttagaacctctattcgactcga

SEQ ID NO: 118228 - DNA, 25 bp, Homo sapien
accttagaacctgtattcgactcga

SEQ ID NO: 118229 - DNA, 25 bp, Homo sapien
gtctagaacttccaacgacagtata

SEQ ID NO: 118230 - DNA, 25 bp, Homo sapien
gtctagaacttcgaacgacagtata

SEQ ID NO: 118231 - DNA, 25 bp, Homo sapien
aagtacgagtcttcagaacctaata

SEQ ID NO: 118232 - DNA, 25 bp, Homo sapien
aagtacgagtctacagaacctaata

SEQ ID NO: 118233 - DNA, 25 bp, Homo sapien
gtaagacgttcaagacgtcacctca

SEQ ID NO: 118234 - DNA, 25 bp, Homo sapien
gtaagacgttcatgacgtcacctca

SEQ ID NO: 118235 - DNA, 25 bp, Homo sapien
aatagtgatgtcctcgaccatgtca

SEQ ID NO: 118236 - DNA, 25 bp, Homo sapien
aatagtgatgtcgtcgaccatgtca

SEQ ID NO: 118237 - DNA, 25 bp, Homo sapien
aggttagattcatatttccatgttc

SEQ ID NO: 118238 - DNA, 25 bp, Homo sapien
aggttagattcaaatttccatgttc

SEQ ID NO: 118239 - DNA, 25 bp, Homo sapien
gaaccgtccataaatgttctttctg

SEQ ID NO: 118240 - DNA, 25 bp, Homo sapien
gaaccgtccatatatgttctttctg

SEQ ID NO: 118241 - DNA, 25 bp, Homo sapien
gtataccgaaagttttctgttactc

SEQ ID NO: 118242 - DNA, 25 bp, Homo sapien
gtataccgaaagatttctgttactc

SEQ ID NO: 118243 - DNA, 25 bp, Homo sapien
tggggaattcgactcttctcttttt

SEQ ID NO: 118244 - DNA, 25 bp, Homo sapien
tggggaattcgagtcttctcttttt

SEQ ID NO: 118245 - DNA, 25 bp, Homo sapien
tggggtcgagtcgattttcatttgt

SEQ ID NO: 118246 - DNA, 25 bp, Homo sapien
tggggtcgagtccattttcatttgt

SEQ ID NO: 118247 - DNA, 25 bp, Homo sapien
gttgacgattacttttcgtcatttg

SEQ ID NO: 118248 - DNA, 25 bp, Homo sapien
gttgacgattacatttcgtcatttg

SEQ ID NO: 118249 - DNA, 25 bp, Homo sapien
tctaattatagattgtcaactcgtg

SEQ ID NO: 118250 - DNA, 25 bp, Homo sapien
tctaattatagaatgtcaactcgtg

SEQ ID NO: 118251 - DNA, 25 bp, Homo sapien
cgaaattgaggaagactctgtcgta

SEQ ID NO: 118252 - DNA, 25 bp, Homo sapien
cgaaattgaggatgactctgtcgta

SEQ ID NO: 118253 - DNA, 25 bp, Homo sapien
gcagtcgacactgagggtccgtcga

SEQ ID NO: 118254 - DNA, 25 bp, Homo sapien
gcagtcgacactcagggtccgtcga

SEQ ID NO: 118255 - DNA, 25 bp, Homo sapien
tcctgaccagtagaggttacctcga

SEQ ID NO: 118256 - DNA, 25 bp, Homo sapien
tcctgaccagtacaggttacctcga

SEQ ID NO: 118257 - DNA, 25 bp, Homo sapien
ggtcccacctaactcaggtcggcgg

SEQ ID NO: 118258 - DNA, 25 bp, Homo sapien
ggtcccacctaagtcaggtcggcgg

SEQ ID NO: 118259 - DNA, 25 bp, Homo sapien
cgtcccaacttctgtcagggctcgg

SEQ ID NO: 118260 - DNA, 25 bp, Homo sapien
cgtcccaacttcagtcagggctcgg

SEQ ID NO: 118261 - DNA, 25 bp, Homo sapien
ggtctttcccctaactgtttcctgt

SEQ ID NO: 118262 - DNA, 25 bp, Homo sapien
ggtctttccccttactgtttcctgt

SEQ ID NO: 118263 - DNA, 25 bp, Homo sapien
tctcttccccgtgtaaggaccgtat

SEQ ID NO: 118264 - DNA, 25 bp, Homo sapien
tctcttccccgtctaaggaccgtat

SEQ ID NO: 118265 - DNA, 25 bp, Homo sapien
ctttttacccgaaacagacacatga

SEQ ID NO: 118266 - DNA, 25 bp, Homo sapien
ctttttacccgatacagacacatga

SEQ ID NO: 118267 - DNA, 25 bp, Homo sapien
atgtaattctacgaaatgaccccat

SEQ ID NO: 118268 - DNA, 25 bp, Homo sapien
atgtaattctaccaaatgaccccat

SEQ ID NO: 118269 - DNA, 25 bp, Homo sapien
gctgtccccgaacaggactgccgag

SEQ ID NO: 118270 - DNA, 25 bp, Homo sapien
gctgtccccgaagaggactgccgag

SEQ ID NO: 118271 - DNA, 25 bp, Homo sapien
ggtgttaatgaacgagagtatcccc

SEQ ID NO: 118272 - DNA, 25 bp, Homo sapien
ggtgttaatgaaggagagtatcccc

SEQ ID NO: 118273 - DNA, 25 bp, Homo sapien
ttacgttttgaagtgacatcgattc

SEQ ID NO: 118274 - DNA, 25 bp, Homo sapien
ttacgttttgaactgacatcgattc

SEQ ID NO: 118275 - DNA, 25 bp, Homo sapien
actacagaggacaaagaccttttgt

SEQ ID NO: 118276 - DNA, 25 bp, Homo sapien
actacagaggactaagaccttttgt

SEQ ID NO: 118277 - DNA, 25 bp, Homo sapien
gtcttatgaacaaaccttgtcttag

SEQ ID NO: 118278 - DNA, 25 bp, Homo sapien
gtcttatgaacataccttgtcttag

SEQ ID NO: 118279 - DNA, 25 bp, Homo sapien
ttctgtagtcggagaaaccttttcg

SEQ ID NO: 118280 - DNA, 25 bp, Homo sapien
ttctgtagtcggtgaaaccttttcg

SEQ ID NO: 118281 - DNA, 25 bp, Homo sapien
cccagagcgtccgggctcccgttcc

SEQ ID NO: 118282 - DNA, 25 bp, Homo sapien
cccagagcgtcccggctcccgttcc

SEQ ID NO: 118283 - DNA, 25 bp, Homo sapien
gcctggggtcgtctcgcgcatctcg

SEQ ID NO: 118284 - DNA, 25 bp, Homo sapien
gcctggggtcgtgtcgcgcatctcg

SEQ ID NO: 118285 - DNA, 25 bp, Homo sapien
ccagtaggagagaagccggtaccag

SEQ ID NO: 118286 - DNA, 25 bp, Homo sapien
ccagtaggagagtagccggtaccag

SEQ ID NO: 118287 - DNA, 25 bp, Homo sapien
gaatgtccaaaagtggtccaaccat

SEQ ID NO: 118288 - DNA, 25 bp, Homo sapien
gaatgtccaaaactggtccaaccat

SEQ ID NO: 118289 - DNA, 25 bp, Homo sapien
tattccttcagactttcatgatcgg

SEQ ID NO: 118290 - DNA, 25 bp, Homo sapien
tattccttcagagtttcatgatcgg

SEQ ID NO: 118291 - DNA, 25 bp, Homo sapien
attttctacaggtcaggttctatga

SEQ ID NO: 118292 - DNA, 25 bp, Homo sapien
attttctacaggacaggttctatga

SEQ ID NO: 118293 - DNA, 25 bp, Homo sapien
tttttgtacaaacgaggttccgtgg

SEQ ID NO: 118294 - DNA, 25 bp, Homo sapien
tttttgtacaaaggaggttccgtgg

SEQ ID NO: 118295 - DNA, 25 bp, Homo sapien
tccttgaccccagtttcacgtgtcg

SEQ ID NO: 118296 - DNA, 25 bp, Homo sapien
tccttgaccccactttcacgtgtcg

SEQ ID NO: 118297 - DNA, 25 bp, Homo sapien
gaagttacccctactgtttgaggtt

SEQ ID NO: 118298 - DNA, 25 bp, Homo sapien
gaagttaccccttctgtttgaggtt

SEQ ID NO: 118299 - DNA, 25 bp, Homo sapien
gaggcacccccatgtcctcgggtct

SEQ ID NO: 118300 - DNA, 25 bp, Homo sapien
gaggcacccccaagtcctcgggtct

SEQ ID NO: 118301 - DNA, 25 bp, Homo sapien
caccagtgtctaaccgacgcagttt

SEQ ID NO: 118302 - DNA, 25 bp, Homo sapien
caccagtgtctatccgacgcagttt

SEQ ID NO: 118303 - DNA, 25 bp, Homo sapien
ccccatctttctaccgacgaggatt

SEQ ID NO: 118304 - DNA, 25 bp, Homo sapien
ccccatctttcttccgacgaggatt

SEQ ID NO: 118305 - DNA, 25 bp, Homo sapien
actcttgcccttcgaacagtagtta

SEQ ID NO: 118306 - DNA, 25 bp, Homo sapien
actcttgcccttggaacagtagtta

SEQ ID NO: 118307 - DNA, 25 bp, Homo sapien
ctctgactccctcgaacacgttaga

SEQ ID NO: 118308 - DNA, 25 bp, Homo sapien
ctctgactccctggaacacgttaga

SEQ ID NO: 118309 - DNA, 25 bp, Homo sapien
accgtggactaggacagaaggtcga

SEQ ID NO: 118310 - DNA, 25 bp, Homo sapien
accgtggactagcacagaaggtcga

SEQ ID NO: 118311 - DNA, 25 bp, Homo sapien
cggtgtcacaactgcgacgagtggt

SEQ ID NO: 118312 - DNA, 25 bp, Homo sapien
cggtgtcacaacagcgacgagtggt

SEQ ID NO: 118313 - DNA, 25 bp, Homo sapien
gtctcctgtacttgtcagttacgtg

SEQ ID NO: 118314 - DNA, 25 bp, Homo sapien
gtctcctgtactagtcagttacgtg

SEQ ID NO: 118315 - DNA, 25 bp, Homo sapien
gacattcactactaatgacgttatg

SEQ ID NO: 118316 - DNA, 25 bp, Homo sapien
gacattcactacaaatgacgttatg

SEQ ID NO: 118317 - DNA, 25 bp, Homo sapien
ttctgaccacaaaggatctcgaaag

SEQ ID NO: 118318 - DNA, 25 bp, Homo sapien
ttctgaccacaatggatctcgaaag

SEQ ID NO: 118319 - DNA, 25 bp, Homo sapien
actgtgaccaaaggattctatgtta

SEQ ID NO: 118320 - DNA, 25 bp, Homo sapien
actgtgaccaaacgattctatgtta

SEQ ID NO: 118321 - DNA, 25 bp, Homo sapien
actgtggaagtaagggactcatcaa

SEQ ID NO: 118322 - DNA, 25 bp, Homo sapien
actgtggaagtatgggactcatcaa

SEQ ID NO: 118323 - DNA, 25 bp, Homo sapien
gtaacagaggtaggtcgcccgttgc

SEQ ID NO: 118324 - DNA, 25 bp, Homo sapien
gtaacagaggtacgtcgcccgttgc

SEQ ID NO: 118325 - DNA, 25 bp, Homo sapien
tgtccgacccgaaggcaaggtcgag

SEQ ID NO: 118326 - DNA, 25 bp, Homo sapien
tgtccgacccgatggcaaggtcgag

SEQ ID NO: 118327 - DNA, 25 bp, Homo sapien
agacactccggacatcacgaatcat

SEQ ID NO: 118328 - DNA, 25 bp, Homo sapien
agacactccggagatcacgaatcat

SEQ ID NO: 118329 - DNA, 25 bp, Homo sapien
gacttcatggtgctcaagagtgtct

SEQ ID NO: 118330 - DNA, 25 bp, Homo sapien
gacttcatggtggtcaagagtgtct

SEQ ID NO: 118331 - DNA, 25 bp, Homo sapien
ttggttaatgggttcttcggcgtcg

SEQ ID NO: 118332 - DNA, 25 bp, Homo sapien
ttggttaatgggatcttcggcgtcg

SEQ ID NO: 118333 - DNA, 25 bp, Homo sapien
ttaatttgtgagactcttaaagtgt

SEQ ID NO: 118334 - DNA, 25 bp, Homo sapien
ttaatttgtgagtctcttaaagtgt

SEQ ID NO: 118335 - DNA, 25 bp, Homo sapien
gatattacagttctttacgattcgt

SEQ ID NO: 118336 - DNA, 25 bp, Homo sapien
gatattacagttgtttacgattcgt

SEQ ID NO: 118337 - DNA, 25 bp, Homo sapien
tgatgatcacagtgtattttcattc

SEQ ID NO: 118338 - DNA, 25 bp, Homo sapien
tgatgatcacagagtattttcattc

SEQ ID NO: 118339 - DNA, 25 bp, Homo sapien
gaggaccaaaccagtatttcctttt

SEQ ID NO: 118340 - DNA, 25 bp, Homo sapien
gaggaccaaacctgtatttcctttt

SEQ ID NO: 118341 - DNA, 25 bp, Homo sapien
aagaaacaattgtactctcagggta

SEQ ID NO: 118342 - DNA, 25 bp, Homo sapien
aagaaacaattgaactctcagggta

SEQ ID NO: 118343 - DNA, 25 bp, Homo sapien
aagcgaaaactttctacaaaggtgc

SEQ ID NO: 118344 - DNA, 25 bp, Homo sapien
aagcgaaaacttactacaaaggtgc

SEQ ID NO: 118345 - DNA, 25 bp, Homo sapien
gtcagaacattcagaccaaggtatc

SEQ ID NO: 118346 - DNA, 25 bp, Homo sapien
gtcagaacattctgaccaaggtatc

SEQ ID NO: 118347 - DNA, 25 bp, Homo sapien
ggaccaacaatcgagactacatttt

SEQ ID NO: 118348 - DNA, 25 bp, Homo sapien
ggaccaacaatccagactacatttt

SEQ ID NO: 118349 - DNA, 25 bp, Homo sapien
gggaaactcctattgggaagttcga

SEQ ID NO: 118350 - DNA, 25 bp, Homo sapien
gggaaactcctaatgggaagttcga

SEQ ID NO: 118351 - DNA, 25 bp, Homo sapien
atcaaggtcactattgacaagatca

SEQ ID NO: 118352 - DNA, 25 bp, Homo sapien
atcaaggtcacttttgacaagatca

SEQ ID NO: 118353 - DNA, 25 bp, Homo sapien
aagagttaatcataacgtcacctat

SEQ ID NO: 118354 - DNA, 25 bp, Homo sapien
aagagttaatcaaaacgtcacctat

SEQ ID NO: 118355 - DNA, 25 bp, Homo sapien
gtgacaagtcgacgtcacaccgtta

SEQ ID NO: 118356 - DNA, 25 bp, Homo sapien
gtgacaagtcgaggtcacaccgtta

SEQ ID NO: 118357 - DNA, 25 bp, Homo sapien
acttccagtagttgagaggacctta

SEQ ID NO: 118358 - DNA, 25 bp, Homo sapien
acttccagtagtagagaggacctta

SEQ ID NO: 118359 - DNA, 25 bp, Homo sapien
taggacaccagtcgtgggtgacctc

SEQ ID NO: 118360 - DNA, 25 bp, Homo sapien
taggacaccagtggtgggtgacctc

SEQ ID NO: 118361 - DNA, 25 bp, Homo sapien
cacggaaaagacctacgaggaaccc

SEQ ID NO: 118362 - DNA, 25 bp, Homo sapien
cacggaaaagacgtacgaggaaccc

SEQ ID NO: 118363 - DNA, 25 bp, Homo sapien
taggaattagtagtgtcgacaagcc

SEQ ID NO: 118364 - DNA, 25 bp, Homo sapien
taggaattagtactgtcgacaagcc

SEQ ID NO: 118365 - DNA, 25 bp, Homo sapien
gtaggtaatgttttctaaccaggtc

SEQ ID NO: 118366 - DNA, 25 bp, Homo sapien
gtaggtaatgttatctaaccaggtc

SEQ ID NO: 118367 - DNA, 25 bp, Homo sapien
gtattgattttaaacaccgatcgtc

SEQ ID NO: 118368 - DNA, 25 bp, Homo sapien
gtattgattttatacaccgatcgtc

SEQ ID NO: 118369 - DNA, 25 bp, Homo sapien
gtatttataggtattccccttttac

SEQ ID NO: 118370 - DNA, 25 bp, Homo sapien
gtatttataggttttccccttttac

SEQ ID NO: 118371 - DNA, 25 bp, Homo sapien
gtggaaaggtttcgatgattcgtcc

SEQ ID NO: 118372 - DNA, 25 bp, Homo sapien
gtggaaaggtttggatgattcgtcc

SEQ ID NO: 118373 - DNA, 25 bp, Homo sapien
cgtcgtttcattagagacatctttc

SEQ ID NO: 118374 - DNA, 25 bp, Homo sapien
cgtcgtttcatttgagacatctttc

SEQ ID NO: 118375 - DNA, 25 bp, Homo sapien
taatgacatgggaacatcactgtgt

SEQ ID NO: 118376 - DNA, 25 bp, Homo sapien
taatgacatgggtacatcactgtgt

SEQ ID NO: 118377 - DNA, 25 bp, Homo sapien
ttgtaagtggtaatactgtcaaagt

SEQ ID NO: 118378 - DNA, 25 bp, Homo sapien
ttgtaagtggtattactgtcaaagt

SEQ ID NO: 118379 - DNA, 25 bp, Homo sapien
agtctgtgttacttttcgtccaggt

SEQ ID NO: 118380 - DNA, 25 bp, Homo sapien
agtctgtgttacatttcgtccaggt

SEQ ID NO: 118381 - DNA, 25 bp, Homo sapien
ttttctatcctttcggaccgtgatg

SEQ ID NO: 118382 - DNA, 25 bp, Homo sapien
ttttctatccttacggaccgtgatg

SEQ ID NO: 118383 - DNA, 25 bp, Homo sapien
tctttgcttttcttacccacgggtg

SEQ ID NO: 118384 - DNA, 25 bp, Homo sapien
tctttgcttttcatacccacgggtg

SEQ ID NO: 118385 - DNA, 25 bp, Homo sapien
ttcttgtcccttgtgccccgtgtat

SEQ ID NO: 118386 - DNA, 25 bp, Homo sapien
ttcttgtcccttctgccccgtgtat

SEQ ID NO: 118387 - DNA, 25 bp, Homo sapien
ctatgtcccgggtcacctgaacagt

SEQ ID NO: 118388 - DNA, 25 bp, Homo sapien
ctatgtcccgggacacctgaacagt

SEQ ID NO: 118389 - DNA, 25 bp, Homo sapien
catgtcttcggagacccttgaagag

SEQ ID NO: 118390 - DNA, 25 bp, Homo sapien
catgtcttcggacacccttgaagag

SEQ ID NO: 118391 - DNA, 25 bp, Homo sapien
cgttgaggtgaattaccctaaaagg

SEQ ID NO: 118392 - DNA, 25 bp, Homo sapien
cgttgaggtgaaataccctaaaagg

SEQ ID NO: 118393 - DNA, 25 bp, Homo sapien
ctgtggagaaagtcactgtaaaatc

SEQ ID NO: 118394 - DNA, 25 bp, Homo sapien
ctgtggagaaagacactgtaaaatc

SEQ ID NO: 118395 - DNA, 25 bp, Homo sapien
gtacacactcaaggtcgtcaagtga

SEQ ID NO: 118396 - DNA, 25 bp, Homo sapien
gtacacactcaacgtcgtcaagtga

SEQ ID NO: 118397 - DNA, 25 bp, Homo sapien
tacactagtttctctcagtctcgag

SEQ ID NO: 118398 - DNA, 25 bp, Homo sapien
tacactagtttcactcagtctcgag

SEQ ID NO: 118399 - DNA, 25 bp, Homo sapien
ctttaaagtgtttaataactctcgg

SEQ ID NO: 118400 - DNA, 25 bp, Homo sapien
ctttaaagtgttaaataactctcgg

SEQ ID NO: 118401 - DNA, 25 bp, Homo sapien
ggtctttatgcgatttaaaactcaa

SEQ ID NO: 118402 - DNA, 25 bp, Homo sapien
ggtctttatgcgttttaaaactcaa

SEQ ID NO: 118403 - DNA, 25 bp, Homo sapien
atgttgtgctatttcgaaacactaa

SEQ ID NO: 118404 - DNA, 25 bp, Homo sapien
atgttgtgctatatcgaaacactaa

SEQ ID NO: 118405 - DNA, 25 bp, Homo sapien
cgttttaaaccgcgctactaccgag

SEQ ID NO: 118406 - DNA, 25 bp, Homo sapien
cgttttaaaccgggctactaccgag

SEQ ID NO: 118407 - DNA, 25 bp, Homo sapien
aacagaagaaggagggtttccccgt

SEQ ID NO: 118408 - DNA, 25 bp, Homo sapien
aacagaagaaggtgggtttccccgt

SEQ ID NO: 118409 - DNA, 25 bp, Homo sapien
aaaggagatcggaaaagtttccacg

SEQ ID NO: 118410 - DNA, 25 bp, Homo sapien
aaaggagatcggtaaagtttccacg

SEQ ID NO: 118411 - DNA, 25 bp, Homo sapien
cgaagtgtagggtaagaggtccctt

SEQ ID NO: 118412 - DNA, 25 bp, Homo sapien
cgaagtgtagggaaagaggtccctt

SEQ ID NO: 118413 - DNA, 25 bp, Homo sapien
acgcacgggctcgagtcagggtcaa

SEQ ID NO: 118414 - DNA, 25 bp, Homo sapien
acgcacgggctccagtcagggtcaa

SEQ ID NO: 118415 - DNA, 25 bp, Homo sapien
acccgtttgtcacagacgggtgaat

SEQ ID NO: 118416 - DNA, 25 bp, Homo sapien
acccgtttgtcagagacgggtgaat

SEQ ID NO: 118417 - DNA, 25 bp, Homo sapien
aaatgagtgtccaagttccgtcaat

SEQ ID NO: 118418 - DNA, 25 bp, Homo sapien
aaatgagtgtcctagttccgtcaat

SEQ ID NO: 118419 - DNA, 25 bp, Homo sapien
attgacttacactcgactccgaggg

SEQ ID NO: 118420 - DNA, 25 bp, Homo sapien
attgacttacacacgactccgaggg

SEQ ID NO: 118421 - DNA, 25 bp, Homo sapien
ttacgattacgcaatcgtccagatt

SEQ ID NO: 118422 - DNA, 25 bp, Homo sapien
ttacgattacgctatcgtccagatt

SEQ ID NO: 118423 - DNA, 25 bp, Homo sapien
gaagacgtgtctactccgtgactat

SEQ ID NO: 118424 - DNA, 25 bp, Homo sapien
gaagacgtgtcttctccgtgactat

SEQ ID NO: 118425 - DNA, 25 bp, Homo sapien
cgacgagaagaagtaccttgtggat

SEQ ID NO: 118426 - DNA, 25 bp, Homo sapien
cgacgagaagaactaccttgtggat

SEQ ID NO: 118427 - DNA, 25 bp, Homo sapien
taaggacggatccagtagtggtcac

SEQ ID NO: 118428 - DNA, 25 bp, Homo sapien
taaggacggatcgagtagtggtcac

SEQ ID NO: 118429 - DNA, 25 bp, Homo sapien
agggtagacgtgactatgacgtaac

SEQ ID NO: 118430 - DNA, 25 bp, Homo sapien
agggtagacgtgtctatgacgtaac

SEQ ID NO: 118431 - DNA, 25 bp, Homo sapien
agctctactcggtttatacggtcgg

SEQ ID NO: 118432 - DNA, 25 bp, Homo sapien
agctctactcggattatacggtcgg

SEQ ID NO: 118433 - DNA, 25 bp, Homo sapien
ggacctcgtctccggggtcgtccgg

SEQ ID NO: 118434 - DNA, 25 bp, Homo sapien
ggacctcgtctcgggggtcgtccgg

SEQ ID NO: 118435 - DNA, 25 bp, Homo sapien
gtgcctcctgtcagactctcactag

SEQ ID NO: 118436 - DNA, 25 bp, Homo sapien
gtgcctcctgtctgactctcactag

SEQ ID NO: 118437 - DNA, 25 bp, Homo sapien
ggggcgtccctcgtcacctcgaggt

SEQ ID NO: 118438 - DNA, 25 bp, Homo sapien
ggggcgtccctcctcacctcgaggt

SEQ ID NO: 118439 - DNA, 25 bp, Homo sapien
gaccctctaccaaggtccctggagt

SEQ ID NO: 118440 - DNA, 25 bp, Homo sapien
gaccctctaccatggtccctggagt

SEQ ID NO: 118441 - DNA, 25 bp, Homo sapien
cttacgtgaccaaatccacagtaag

SEQ ID NO: 118442 - DNA, 25 bp, Homo sapien
cttacgtgaccatatccacagtaag

SEQ ID NO: 118443 - DNA, 25 bp, Homo sapien
ttcaactgcccattctgaagtcacg

SEQ ID NO: 118444 - DNA, 25 bp, Homo sapien
ttcaactgcccaatctgaagtcacg

SEQ ID NO: 118445 - DNA, 25 bp, Homo sapien
tggaacttcccgaacctcgtgttgg

SEQ ID NO: 118446 - DNA, 25 bp, Homo sapien
tggaacttcccgtacctcgtgttgg

SEQ ID NO: 118447 - DNA, 25 bp, Homo sapien
aacctcgagagtctctcacgatgag

SEQ ID NO: 118448 - DNA, 25 bp, Homo sapien
aacctcgagagtgtctcacgatgag

SEQ ID NO: 118449 - DNA, 25 bp, Homo sapien
acaactccagtttttacgtgtaaga

SEQ ID NO: 118450 - DNA, 25 bp, Homo sapien
acaactccagttattacgtgtaaga

SEQ ID NO: 118451 - DNA, 25 bp, Homo sapien
taaaagtggacgttttcgaggaacc

SEQ ID NO: 118452 - DNA, 25 bp, Homo sapien
taaaagtggacgatttcgaggaacc

SEQ ID NO: 118453 - DNA, 25 bp, Homo sapien
aacgagagagtttaagggacactac

SEQ ID NO: 118454 - DNA, 25 bp, Homo sapien
aacgagagagttaaagggacactac

SEQ ID NO: 118455 - DNA, 25 bp, Homo sapien
agaagtagagggagacgtcgccctc

SEQ ID NO: 118456 - DNA, 25 bp, Homo sapien
agaagtagagggtgacgtcgccctc

SEQ ID NO: 118457 - DNA, 25 bp, Homo sapien
actcgttcatcgattactttcttcg

SEQ ID NO: 118458 - DNA, 25 bp, Homo sapien
actcgttcatcgtttactttcttcg

SEQ ID NO: 118459 - DNA, 25 bp, Homo sapien
cgtttgtagtcaattcatttgacat

SEQ ID NO: 118460 - DNA, 25 bp, Homo sapien
cgtttgtagtcatttcatttgacat

SEQ ID NO: 118461 - DNA, 25 bp, Homo sapien
cctttttgtgtctagactaatgcag

SEQ ID NO: 118462 - DNA, 25 bp, Homo sapien
cctttttgtgtcaagactaatgcag

SEQ ID NO: 118463 - DNA, 25 bp, Homo sapien
tctctctttggtgtccacgtttcta

SEQ ID NO: 118464 - DNA, 25 bp, Homo sapien
tctctctttggtctccacgtttcta

SEQ ID NO: 118465 - DNA, 25 bp, Homo sapien
acaaacgagtctaacccgtcggata

SEQ ID NO: 118466 - DNA, 25 bp, Homo sapien
acaaacgagtcttacccgtcggata

SEQ ID NO: 118467 - DNA, 25 bp, Homo sapien
gacatccgttcgttaaaccagtatc

SEQ ID NO: 118468 - DNA, 25 bp, Homo sapien
gacatccgttcgataaaccagtatc

SEQ ID NO: 118469 - DNA, 25 bp, Homo sapien
tacagaagaccgtcatcatattcgt

SEQ ID NO: 118470 - DNA, 25 bp, Homo sapien
tacagaagaccgacatcatattcgt

SEQ ID NO: 118471 - DNA, 25 bp, Homo sapien
tgcacgtgaagaaataaccttttct

SEQ ID NO: 118472 - DNA, 25 bp, Homo sapien
tgcacgtgaagatataaccttttct

SEQ ID NO: 118473 - DNA, 25 bp, Homo sapien
gtttctctaaatatcgtctttgtga

SEQ ID NO: 118474 - DNA, 25 bp, Homo sapien
gtttctctaaatttcgtctttgtga

SEQ ID NO: 118475 - DNA, 25 bp, Homo sapien
ctcgatagtctatgtgtcgttaaat

SEQ ID NO: 118476 - DNA, 25 bp, Homo sapien
ctcgatagtctaagtgtcgttaaat

SEQ ID NO: 118477 - DNA, 25 bp, Homo sapien
ttcgtttcgtcaatggtcgtgtaag

SEQ ID NO: 118478 - DNA, 25 bp, Homo sapien
ttcgtttcgtcattggtcgtgtaag

SEQ ID NO: 118479 - DNA, 25 bp, Homo sapien
acgtttacccgtggtgtcgggtgaa

SEQ ID NO: 118480 - DNA, 25 bp, Homo sapien
acgtttacccgtcgtgtcgggtgaa

SEQ ID NO: 118481 - DNA, 25 bp, Homo sapien
cactggtcccacagacggtcgtgaa

SEQ ID NO: 118482 - DNA, 25 bp, Homo sapien
cactggtcccactgacggtcgtgaa

SEQ ID NO: 118483 - DNA, 25 bp, Homo sapien
tgcgtctaaactactacgacaacag

SEQ ID NO: 118484 - DNA, 25 bp, Homo sapien
tgcgtctaaacttctacgacaacag

SEQ ID NO: 118485 - DNA, 25 bp, Homo sapien
tcacgtcgttaaatctctcacagag

SEQ ID NO: 118486 - DNA, 25 bp, Homo sapien
tcacgtcgttaattctctcacagag

SEQ ID NO: 118487 - DNA, 25 bp, Homo sapien
ggaaaggagtagactcctcagtcta

SEQ ID NO: 118488 - DNA, 25 bp, Homo sapien
ggaaaggagtagtctcctcagtcta

SEQ ID NO: 118489 - DNA, 25 bp, Homo sapien
gggactgggacactgacgtcctaca

SEQ ID NO: 118490 - DNA, 25 bp, Homo sapien
gggactgggacagtgacgtcctaca

SEQ ID NO: 118491 - DNA, 25 bp, Homo sapien
cgacagtgaaagctagagtctctcc

SEQ ID NO: 118492 - DNA, 25 bp, Homo sapien
cgacagtgaaaggtagagtctctcc

SEQ ID NO: 118493 - DNA, 25 bp, Homo sapien
ggaaccactcgaacgtaaacacacc

SEQ ID NO: 118494 - DNA, 25 bp, Homo sapien
ggaaccactcgatcgtaaacacacc

SEQ ID NO: 118495 - DNA, 25 bp, Homo sapien
cataatcgtagactgcgacgacacc

SEQ ID NO: 118496 - DNA, 25 bp, Homo sapien
cataatcgtagagtgcgacgacacc

SEQ ID NO: 118497 - DNA, 25 bp, Homo sapien
attaagacttacatgagtagcacaa

SEQ ID NO: 118498 - DNA, 25 bp, Homo sapien
attaagacttacttgagtagcacaa

SEQ ID NO: 118499 - DNA, 25 bp, Homo sapien
tcaagacctacctgagtcgtctcca

SEQ ID NO: 118500 - DNA, 25 bp, Homo sapien
tcaagacctaccagagtcgtctcca

SEQ ID NO: 118501 - DNA, 25 bp, Homo sapien
cacaagggtacacaattgtgactca

SEQ ID NO: 118502 - DNA, 25 bp, Homo sapien
cacaagggtacagaattgtgactca

SEQ ID NO: 118503 - DNA, 25 bp, Homo sapien
atgtaatgtgatacatgtgacctca

SEQ ID NO: 118504 - DNA, 25 bp, Homo sapien
atgtaatgtgattcatgtgacctca

SEQ ID NO: 118505 - DNA, 25 bp, Homo sapien
gtcttgaccggatttccctttttat

SEQ ID NO: 118506 - DNA, 25 bp, Homo sapien
gtcttgaccggaattccctttttat

SEQ ID NO: 118507 - DNA, 25 bp, Homo sapien
tcgtggtcaaaagtttcagtttcaa

SEQ ID NO: 118508 - DNA, 25 bp, Homo sapien
tcgtggtcaaaactttcagtttcaa

SEQ ID NO: 118509 - DNA, 25 bp, Homo sapien
tattatgagaacctcgcaattatga

SEQ ID NO: 118510 - DNA, 25 bp, Homo sapien
tattatgagaacgtcgcaattatga

SEQ ID NO: 118511 - DNA, 25 bp, Homo sapien
ttttgtgtaccgtctccaatttaga

SEQ ID NO: 118512 - DNA, 25 bp, Homo sapien
ttttgtgtaccgactccaatttaga

SEQ ID NO: 118513 - DNA, 25 bp, Homo sapien
cctggaccgtcttatacaattggta

SEQ ID NO: 118514 - DNA, 25 bp, Homo sapien
cctggaccgtctaatacaattggta

SEQ ID NO: 118515 - DNA, 25 bp, Homo sapien
cgtgtagccactaccgtccttcggg

SEQ ID NO: 118516 - DNA, 25 bp, Homo sapien
cgtgtagccacttccgtccttcggg

SEQ ID NO: 118517 - DNA, 25 bp, Homo sapien
ttcgggtccttactctccggacggg

SEQ ID NO: 118518 - DNA, 25 bp, Homo sapien
ttcgggtccttagtctccggacggg

SEQ ID NO: 118519 - DNA, 25 bp, Homo sapien
gctcgtggtgggccgctcaccgccc

SEQ ID NO: 118520 - DNA, 25 bp, Homo sapien
gctcgtggtggggcgctcaccgccc

SEQ ID NO: 118521 - DNA, 25 bp, Homo sapien
acacgagtgttgtgcctaccctcct

SEQ ID NO: 118522 - DNA, 25 bp, Homo sapien
acacgagtgttgagcctaccctcct

SEQ ID NO: 118523 - DNA, 25 bp, Homo sapien
gtatcaaggttaagattcctctcac

SEQ ID NO: 118524 - DNA, 25 bp, Homo sapien
gtatcaaggttatgattcctctcac

SEQ ID NO: 118525 - DNA, 25 bp, Homo sapien
agtgtcagggatgaaaacgtctacc

SEQ ID NO: 118526 - DNA, 25 bp, Homo sapien
agtgtcagggatcaaaacgtctacc

SEQ ID NO: 118527 - DNA, 25 bp, Homo sapien
acgttaggtgaaacacccgcacacc

SEQ ID NO: 118528 - DNA, 25 bp, Homo sapien
acgttaggtgaatcacccgcacacc

SEQ ID NO: 118529 - DNA, 25 bp, Homo sapien
cagaagataagacagaccctaacac

SEQ ID NO: 118530 - DNA, 25 bp, Homo sapien
cagaagataagagagaccctaacac

SEQ ID NO: 118531 - DNA, 25 bp, Homo sapien
ggttgacgcggatcaccatgtcact

SEQ ID NO: 118532 - DNA, 25 bp, Homo sapien
ggttgacgcggaacaccatgtcact

SEQ ID NO: 118533 - DNA, 25 bp, Homo sapien
aggtgtcgtcactaacattctgtca

SEQ ID NO: 118534 - DNA, 25 bp, Homo sapien
aggtgtcgtcacaaacattctgtca

SEQ ID NO: 118535 - DNA, 25 bp, Homo sapien
agtctcgtgtctagtaacaattaaa

SEQ ID NO: 118536 - DNA, 25 bp, Homo sapien
agtctcgtgtcttgtaacaattaaa

SEQ ID NO: 118537 - DNA, 25 bp, Homo sapien
tttcggactttgacactgtgtcaaa

SEQ ID NO: 118538 - DNA, 25 bp, Homo sapien
tttcggactttgtcactgtgtcaaa

SEQ ID NO: 118539 - DNA, 25 bp, Homo sapien
ctttgtcttggtgttcggtcagacc

SEQ ID NO: 118540 - DNA, 25 bp, Homo sapien
ctttgtcttggtcttcggtcagacc

SEQ ID NO: 118541 - DNA, 25 bp, Homo sapien
ttgtgttaccccatttacgagacta

SEQ ID NO: 118542 - DNA, 25 bp, Homo sapien
ttgtgttaccccttttacgagacta

SEQ ID NO: 118543 - DNA, 25 bp, Homo sapien
ggtcattcccactattgtagagaca

SEQ ID NO: 118544 - DNA, 25 bp, Homo sapien
ggtcattcccacaattgtagagaca

SEQ ID NO: 118545 - DNA, 25 bp, Homo sapien
ttgttccccgactcttgtaggtcag

SEQ ID NO: 118546 - DNA, 25 bp, Homo sapien
ttgttccccgacacttgtaggtcag

SEQ ID NO: 118547 - DNA, 25 bp, Homo sapien
ttttcccacactactttcgacggag

SEQ ID NO: 118548 - DNA, 25 bp, Homo sapien
ttttcccacacttctttcgacggag

SEQ ID NO: 118549 - DNA, 25 bp, Homo sapien
cccctttcaccagtgtgtcggcgga

SEQ ID NO: 118550 - DNA, 25 bp, Homo sapien
cccctttcaccactgtgtcggcgga

SEQ ID NO: 118551 - DNA, 25 bp, Homo sapien
acccttctctctcgtcgaactgggg

SEQ ID NO: 118552 - DNA, 25 bp, Homo sapien
acccttctctctggtcgaactgggg

SEQ ID NO: 118553 - DNA, 25 bp, Homo sapien
agattttaattggtcccgtgtgtgg

SEQ ID NO: 118554 - DNA, 25 bp, Homo sapien
agattttaattgctcccgtgtgtgg

SEQ ID NO: 118555 - DNA, 25 bp, Homo sapien
tttaagcgagtagatccgactcgga

SEQ ID NO: 118556 - DNA, 25 bp, Homo sapien
tttaagcgagtacatccgactcgga

SEQ ID NO: 118557 - DNA, 25 bp, Homo sapien
ttgtcggttgtaaccatgaaccgga

SEQ ID NO: 118558 - DNA, 25 bp, Homo sapien
ttgtcggttgtatccatgaaccgga

SEQ ID NO: 118559 - DNA, 25 bp, Homo sapien
tctttaagatgttaccaacgacaga

SEQ ID NO: 118560 - DNA, 25 bp, Homo sapien
tctttaagatgtaaccaacgacaga

SEQ ID NO: 118561 - DNA, 25 bp, Homo sapien
atttgtcgaacgtaccgtgacggaa

SEQ ID NO: 118562 - DNA, 25 bp, Homo sapien
atttgtcgaacgaaccgtgacggaa

SEQ ID NO: 118563 - DNA, 25 bp, Homo sapien
actatgtccgaaggacctcggggta

SEQ ID NO: 118564 - DNA, 25 bp, Homo sapien
actatgtccgaacgacctcggggta

SEQ ID NO: 118565 - DNA, 25 bp, Homo sapien
tattgtcccaccagtacttttcgtg

SEQ ID NO: 118566 - DNA, 25 bp, Homo sapien
tattgtcccacctgtacttttcgtg

SEQ ID NO: 118567 - DNA, 25 bp, Homo sapien
cagatcgtcaaaggtgtatttttct

SEQ ID NO: 118568 - DNA, 25 bp, Homo sapien
cagatcgtcaaacgtgtatttttct

SEQ ID NO: 118569 - DNA, 25 bp, Homo sapien
ccctcgttctatagtttccgagttc

SEQ ID NO: 118570 - DNA, 25 bp, Homo sapien
ccctcgttctattgtttccgagttc

SEQ ID NO: 118571 - DNA, 25 bp, Homo sapien
ggacaatgtgtcttatttacaaatc

SEQ ID NO: 118572 - DNA, 25 bp, Homo sapien
ggacaatgtgtcatatttacaaatc

SEQ ID NO: 118573 - DNA, 25 bp, Homo sapien
gaagacaacgacatgtttattaacc

SEQ ID NO: 118574 - DNA, 25 bp, Homo sapien
gaagacaacgacttgtttattaacc

SEQ ID NO: 118575 - DNA, 25 bp, Homo sapien
gaagtctcaccagtgttacttttat

SEQ ID NO: 118576 - DNA, 25 bp, Homo sapien
gaagtctcaccactgttacttttat

SEQ ID NO: 118577 - DNA, 25 bp, Homo sapien
tagtttcacactgatatatccccgg

SEQ ID NO: 118578 - DNA, 25 bp, Homo sapien
tagtttcacactcatatatccccgg

SEQ ID NO: 118579 - DNA, 25 bp, Homo sapien
gtagtttaccacaagaaagcctgac

SEQ ID NO: 118580 - DNA, 25 bp, Homo sapien
gtagtttaccactagaaagcctgac

SEQ ID NO: 118581 - DNA, 25 bp, Homo sapien
tgtctccaccgaaaccacagtgtat

SEQ ID NO: 118582 - DNA, 25 bp, Homo sapien
tgtctccaccgataccacagtgtat

SEQ ID NO: 118583 - DNA, 25 bp, Homo sapien
acgtctcctacaggatgcatattgt

SEQ ID NO: 118584 - DNA, 25 bp, Homo sapien
acgtctcctacacgatgcatattgt

SEQ ID NO: 118585 - DNA, 25 bp, Homo sapien
ccggagcgactagaacgggaactcg

SEQ ID NO: 118586 - DNA, 25 bp, Homo sapien
ccggagcgactacaacgggaactcg

SEQ ID NO: 118587 - DNA, 25 bp, Homo sapien
ccctgtgacttcaacggagacggcg

SEQ ID NO: 118588 - DNA, 25 bp, Homo sapien
ccctgtgacttctacggagacggcg

SEQ ID NO: 118589 - DNA, 25 bp, Homo sapien
cacctgtcgctctgatggagcaact

SEQ ID NO: 118590 - DNA, 25 bp, Homo sapien
cacctgtcgctcagatggagcaact

SEQ ID NO: 118591 - DNA, 25 bp, Homo sapien
caccgtcacagtgtccgagagaaga

SEQ ID NO: 118592 - DNA, 25 bp, Homo sapien
caccgtcacagtctccgagagaaga

SEQ ID NO: 118593 - DNA, 25 bp, Homo sapien
tcaagtacccgactatacagtggaa

SEQ ID NO: 118594 - DNA, 25 bp, Homo sapien
tcaagtacccgagtatacagtggaa

SEQ ID NO: 118595 - DNA, 25 bp, Homo sapien
gttcaacactcgagtcttaatgaaa

SEQ ID NO: 118596 - DNA, 25 bp, Homo sapien
gttcaacactcgtgtcttaatgaaa

SEQ ID NO: 118597 - DNA, 25 bp, Homo sapien
ttcgtcaaccaggtcggaggtccaa

SEQ ID NO: 118598 - DNA, 25 bp, Homo sapien
ttcgtcaaccagctcggaggtccaa

SEQ ID NO: 118599 - DNA, 25 bp, Homo sapien
cgaactgtcttcacggtctcgtcaa

SEQ ID NO: 118600 - DNA, 25 bp, Homo sapien
cgaactgtcttctcggtctcgtcaa

SEQ ID NO: 118601 - DNA, 25 bp, Homo sapien
aaataggcccggttcgtctcgaccg

SEQ ID NO: 118602 - DNA, 25 bp, Homo sapien
aaataggcccggatcgtctcgaccg

SEQ ID NO: 118603 - DNA, 25 bp, Homo sapien
acagggacttcgagcgtcacgtccg

SEQ ID NO: 118604 - DNA, 25 bp, Homo sapien
acagggacttcgtgcgtcacgtccg

SEQ ID NO: 118605 - DNA, 25 bp, Homo sapien
gtatatcgggtctcggtaatatttc

SEQ ID NO: 118606 - DNA, 25 bp, Homo sapien
gtatatcgggtcacggtaatatttc

SEQ ID NO: 118607 - DNA, 25 bp, Homo sapien
tttttgtatcacaggacaattgtac

SEQ ID NO: 118608 - DNA, 25 bp, Homo sapien
tttttgtatcactggacaattgtac

SEQ ID NO: 118609 - DNA, 25 bp, Homo sapien
ttatgtcgtttacgatctttagatc

SEQ ID NO: 118610 - DNA, 25 bp, Homo sapien
ttatgtcgtttaggatctttagatc

SEQ ID NO: 118611 - DNA, 25 bp, Homo sapien
atctgtcttttaggatggtctattc

SEQ ID NO: 118612 - DNA, 25 bp, Homo sapien
atctgtcttttacgatggtctattc

SEQ ID NO: 118613 - DNA, 25 bp, Homo sapien
tagtctctcttgaccctcgagtctc

SEQ ID NO: 118614 - DNA, 25 bp, Homo sapien
tagtctctcttgtccctcgagtctc

SEQ ID NO: 118615 - DNA, 25 bp, Homo sapien
ctgagttgtcgttccgacgtatgtg

SEQ ID NO: 118616 - DNA, 25 bp, Homo sapien
ctgagttgtcgtaccgacgtatgtg

SEQ ID NO: 118617 - DNA, 25 bp, Homo sapien
ccgattctgtctcctacctatcggg

SEQ ID NO: 118618 - DNA, 25 bp, Homo sapien
ccgattctgtctgctacctatcggg

SEQ ID NO: 118619 - DNA, 25 bp, Homo sapien
accacaactcttggaaccttctgag

SEQ ID NO: 118620 - DNA, 25 bp, Homo sapien
accacaactcttcgaaccttctgag

SEQ ID NO: 118621 - DNA, 25 bp, Homo sapien
acaaaaagtcataaaatctcgtgtg

SEQ ID NO: 118622 - DNA, 25 bp, Homo sapien
acaaaaagtcattaaatctcgtgtg

SEQ ID NO: 118623 - DNA, 25 bp, Homo sapien
gacgaaagattcaggtgggacccga

SEQ ID NO: 118624 - DNA, 25 bp, Homo sapien
gacgaaagattctggtgggacccga

SEQ ID NO: 118625 - DNA, 25 bp, Homo sapien
aagaaaggcccctgaggtagtagaa

SEQ ID NO: 118626 - DNA, 25 bp, Homo sapien
aagaaaggccccagaggtagtagaa

SEQ ID NO: 118627 - DNA, 25 bp, Homo sapien
tctaaggccaggaaggtgtacgaga

SEQ ID NO: 118628 - DNA, 25 bp, Homo sapien
tctaaggccaggtaggtgtacgaga

SEQ ID NO: 118629 - DNA, 25 bp, Homo sapien
tccggacacagaggagtcctgagtc

SEQ ID NO: 118630 - DNA, 25 bp, Homo sapien
tccggacacagacgagtcctgagtc

SEQ ID NO: 118631 - DNA, 25 bp, Homo sapien
gaaccaggtcgaagagggcccacta

SEQ ID NO: 118632 - DNA, 25 bp, Homo sapien
gaaccaggtcgatgagggcccacta

SEQ ID NO: 118633 - DNA, 25 bp, Homo sapien
aatctagaccaatgaaaccgtaaga

SEQ ID NO: 118634 - DNA, 25 bp, Homo sapien
aatctagaccaaagaaaccgtaaga

SEQ ID NO: 118635 - DNA, 25 bp, Homo sapien
tggttgaggtctcagtccccacaag

SEQ ID NO: 118636 - DNA, 25 bp, Homo sapien
tggttgaggtctgagtccccacaag

SEQ ID NO: 118637 - DNA, 25 bp, Homo sapien
ttcggtttttatgaggttctccaat

SEQ ID NO: 118638 - DNA, 25 bp, Homo sapien
ttcggtttttatcaggttctccaat

SEQ ID NO: 118639 - DNA, 25 bp, Homo sapien
cgtgtgcattataggacctccggag

SEQ ID NO: 118640 - DNA, 25 bp, Homo sapien
cgtgtgcattattggacctccggag

SEQ ID NO: 118641 - DNA, 25 bp, Homo sapien
cgagtaatccttgtccggtcgtcag

SEQ ID NO: 118642 - DNA, 25 bp, Homo sapien
cgagtaatccttctccggtcgtcag

SEQ ID NO: 118643 - DNA, 25 bp, Homo sapien
agtctcctctgtctcttcaggagta

SEQ ID NO: 118644 - DNA, 25 bp, Homo sapien
agtctcctctgtgtcttcaggagta

SEQ ID NO: 118645 - DNA, 25 bp, Homo sapien
catatacatacagttctcactctct

SEQ ID NO: 118646 - DNA, 25 bp, Homo sapien
catatacatacacttctcactctct

SEQ ID NO: 118647 - DNA, 25 bp, Homo sapien
ttatgtgccggcacaggcgccgtca

SEQ ID NO: 118648 - DNA, 25 bp, Homo sapien
ttatgtgccggctcaggcgccgtca

SEQ ID NO: 118649 - DNA, 25 bp, Homo sapien
ctggaccgggagagtcctgcacgtc

SEQ ID NO: 118650 - DNA, 25 bp, Homo sapien
ctggaccgggagtgtcctgcacgtc

SEQ ID NO: 118651 - DNA, 25 bp, Homo sapien
gacgtccggtccagggtcgcactct

SEQ ID NO: 118652 - DNA, 25 bp, Homo sapien
gacgtccggtcctgggtcgcactct

SEQ ID NO: 118653 - DNA, 25 bp, Homo sapien
tagagaccaagactggagacccgtg

SEQ ID NO: 118654 - DNA, 25 bp, Homo sapien
tagagaccaagagtggagacccgtg

SEQ ID NO: 118655 - DNA, 25 bp, Homo sapien
tctctttctctgatagactcgagtg

SEQ ID NO: 118656 - DNA, 25 bp, Homo sapien
tctctttctctgttagactcgagtg

SEQ ID NO: 118657 - DNA, 25 bp, Homo sapien
gaaatatcttgtccttcctgagtac

SEQ ID NO: 118658 - DNA, 25 bp, Homo sapien
gaaatatcttgtgcttcctgagtac

SEQ ID NO: 118659 - DNA, 25 bp, Homo sapien
gacgaagattgtgtcctaaaacacc

SEQ ID NO: 118660 - DNA, 25 bp, Homo sapien
gacgaagattgtctcctaaaacacc

SEQ ID NO: 118661 - DNA, 25 bp, Homo sapien
cctctgtgacgtactcagaaaacgg

SEQ ID NO: 118662 - DNA, 25 bp, Homo sapien
cctctgtgacgttctcagaaaacgg

SEQ ID NO: 118663 - DNA, 25 bp, Homo sapien
ttcgatttgactaatcatcaaacgg

SEQ ID NO: 118664 - DNA, 25 bp, Homo sapien
ttcgatttgacttatcatcaaacgg

SEQ ID NO: 118665 - DNA, 25 bp, Homo sapien
aaataatagaggttacgaccacgta

SEQ ID NO: 118666 - DNA, 25 bp, Homo sapien
aaataatagaggatacgaccacgta

SEQ ID NO: 118667 - DNA, 25 bp, Homo sapien
caataccaaggtcctcgaagagacg

SEQ ID NO: 118668 - DNA, 25 bp, Homo sapien
caataccaaggtgctcgaagagacg

SEQ ID NO: 118669 - DNA, 25 bp, Homo sapien
ccattgctgacgtatctgatatcga

SEQ ID NO: 118670 - DNA, 25 bp, Homo sapien
ccattgctgacgaatctgatatcga

SEQ ID NO: 118671 - DNA, 25 bp, Homo sapien
ccagactgagtgattctttaaacat

SEQ ID NO: 118672 - DNA, 25 bp, Homo sapien
ccagactgagtgtttctttaaacat

SEQ ID NO: 118673 - DNA, 25 bp, Homo sapien
cctcccgaagggtctgtaaactaac

SEQ ID NO: 118674 - DNA, 25 bp, Homo sapien
cctcccgaagggactgtaaactaac

SEQ ID NO: 118675 - DNA, 25 bp, Homo sapien
gagccaccggtggtacaacccgtgc

SEQ ID NO: 118676 - DNA, 25 bp, Homo sapien
gagccaccggtgctacaacccgtgc

SEQ ID NO: 118677 - DNA, 25 bp, Homo sapien
ggtccagagcgtgaacaactccttc

SEQ ID NO: 118678 - DNA, 25 bp, Homo sapien
ggtccagagcgtcaacaactccttc

SEQ ID NO: 118679 - DNA, 25 bp, Homo sapien
gaacacgaaccaccaagaccgtctt

SEQ ID NO: 118680 - DNA, 25 bp, Homo sapien
gaacacgaaccagcaagaccgtctt

SEQ ID NO: 118681 - DNA, 25 bp, Homo sapien
gacgaagagtgtaccgacaattctt

SEQ ID NO: 118682 - DNA, 25 bp, Homo sapien
gacgaagagtgttccgacaattctt

SEQ ID NO: 118683 - DNA, 25 bp, Homo sapien
ggacgactgtgttccggctattgtt

SEQ ID NO: 118684 - DNA, 25 bp, Homo sapien
ggacgactgtgtaccggctattgtt

SEQ ID NO: 118685 - DNA, 25 bp, Homo sapien
gggagacctgtacttccttaacgac

SEQ ID NO: 118686 - DNA, 25 bp, Homo sapien
gggagacctgtagttccttaacgac

SEQ ID NO: 118687 - DNA, 25 bp, Homo sapien
gagagtcgaccgaggtttttacaga

SEQ ID NO: 118688 - DNA, 25 bp, Homo sapien
gagagtcgaccgtggtttttacaga

SEQ ID NO: 118689 - DNA, 25 bp, Homo sapien
ttcgtttgaagacttcctctatgtt

SEQ ID NO: 118690 - DNA, 25 bp, Homo sapien
ttcgtttgaagagttcctctatgtt

SEQ ID NO: 118691 - DNA, 25 bp, Homo sapien
ctattgagagatttctcggtaacag

SEQ ID NO: 118692 - DNA, 25 bp, Homo sapien
ctattgagagatatctcggtaacag

SEQ ID NO: 118693 - DNA, 25 bp, Homo sapien
cggtgttgtgaaatccctcttaaac

SEQ ID NO: 118694 - DNA, 25 bp, Homo sapien
cggtgttgtgaattccctcttaaac

SEQ ID NO: 118695 - DNA, 25 bp, Homo sapien
actggggtgaagaacaccggtttcc

SEQ ID NO: 118696 - DNA, 25 bp, Homo sapien
actggggtgaagtacaccggtttcc

SEQ ID NO: 118697 - DNA, 25 bp, Homo sapien
gtggtgcgacgcacaagtccttctc

SEQ ID NO: 118698 - DNA, 25 bp, Homo sapien
gtggtgcgacgctcaagtccttctc

SEQ ID NO: 118699 - DNA, 25 bp, Homo sapien
tgggtcgtccccccgatctgttcgg

SEQ ID NO: 118700 - DNA, 25 bp, Homo sapien
tgggtcgtccccgcgatctgttcgg

SEQ ID NO: 118701 - DNA, 25 bp, Homo sapien
aactgtgttccctttcactcaaggg

SEQ ID NO: 118702 - DNA, 25 bp, Homo sapien
aactgtgttcccattcactcaaggg

SEQ ID NO: 118703 - DNA, 25 bp, Homo sapien
agtgttttaccttacctaaagggtt

SEQ ID NO: 118704 - DNA, 25 bp, Homo sapien
agtgttttacctaacctaaagggtt

SEQ ID NO: 118705 - DNA, 25 bp, Homo sapien
ttatcttcgtccagggaacgggtct

SEQ ID NO: 118706 - DNA, 25 bp, Homo sapien
ttatcttcgtcctgggaacgggtct

SEQ ID NO: 118707 - DNA, 25 bp, Homo sapien
tttgttccggacgtaggtattatct

SEQ ID NO: 118708 - DNA, 25 bp, Homo sapien
tttgttccggacctaggtattatct

SEQ ID NO: 118709 - DNA, 25 bp, Homo sapien
ttttttcccgacgaatgtgtgttcc

SEQ ID NO: 118710 - DNA, 25 bp, Homo sapien
ttttttcccgaccaatgtgtgttcc

SEQ ID NO: 118711 - DNA, 25 bp, Homo sapien
ttttgaccagtgtgaatatcttcga

SEQ ID NO: 118712 - DNA, 25 bp, Homo sapien
ttttgaccagtgagaatatcttcga

SEQ ID NO: 118713 - DNA, 25 bp, Homo sapien
gtaacaggttaaaatgttctacacg

SEQ ID NO: 118714 - DNA, 25 bp, Homo sapien
gtaacaggttaatatgttctacacg

SEQ ID NO: 118715 - DNA, 25 bp, Homo sapien
catacgaagaatacgttatgttcca

SEQ ID NO: 118716 - DNA, 25 bp, Homo sapien
catacgaagaattcgttatgttcca

SEQ ID NO: 118717 - DNA, 25 bp, Homo sapien
aaattgtaacatgttatattcgccg

SEQ ID NO: 118718 - DNA, 25 bp, Homo sapien
aaattgtaacatcttatattcgccg

SEQ ID NO: 118719 - DNA, 25 bp, Homo sapien
ggaaaaactaatcctttattgtctg

SEQ ID NO: 118720 - DNA, 25 bp, Homo sapien
ggaaaaactaatgctttattgtctg

SEQ ID NO: 118721 - DNA, 25 bp, Homo sapien
acaaaatgtgtcagactctcgttgt

SEQ ID NO: 118722 - DNA, 25 bp, Homo sapien
acaaaatgtgtctgactctcgttgt

SEQ ID NO: 118723 - DNA, 25 bp, Homo sapien
caccaaaagttacgatatttctttc

SEQ ID NO: 118724 - DNA, 25 bp, Homo sapien
caccaaaagttaggatatttctttc

SEQ ID NO: 118725 - DNA, 25 bp, Homo sapien
acgtacagttgttttactgtttctc

SEQ ID NO: 118726 - DNA, 25 bp, Homo sapien
acgtacagttgtattactgtttctc

SEQ ID NO: 118727 - DNA, 25 bp, Homo sapien
cgggtctgtgactgtagtttgactc

SEQ ID NO: 118728 - DNA, 25 bp, Homo sapien
cgggtctgtgacagtagtttgactc

SEQ ID NO: 118729 - DNA, 25 bp, Homo sapien
tccacctttgtgaccggtggtcggg

SEQ ID NO: 118730 - DNA, 25 bp, Homo sapien
tccacctttgtgtccggtggtcggg

SEQ ID NO: 118731 - DNA, 25 bp, Homo sapien
acgggttcaagtcccgacggtgggt

SEQ ID NO: 118732 - DNA, 25 bp, Homo sapien
acgggttcaagtgccgacggtgggt

SEQ ID NO: 118733 - DNA, 25 bp, Homo sapien
cacccgttccggtccgacagaaggt

SEQ ID NO: 118734 - DNA, 25 bp, Homo sapien
cacccgttccggaccgacagaaggt

SEQ ID NO: 118735 - DNA, 25 bp, Homo sapien
ccttatcccgctaccggagtaggtg

SEQ ID NO: 118736 - DNA, 25 bp, Homo sapien
ccttatcccgcttccggagtaggtg

SEQ ID NO: 118737 - DNA, 25 bp, Homo sapien
cgcctaagaccccttcacagggagg

SEQ ID NO: 118738 - DNA, 25 bp, Homo sapien
cgcctaagacccgttcacagggagg

SEQ ID NO: 118739 - DNA, 25 bp, Homo sapien
tcagatgtctttactacagtaatcg

SEQ ID NO: 118740 - DNA, 25 bp, Homo sapien
tcagatgtcttttctacagtaatcg

SEQ ID NO: 118741 - DNA, 25 bp, Homo sapien
tgcgaacaccgttttatctccattg

SEQ ID NO: 118742 - DNA, 25 bp, Homo sapien
tgcgaacaccgtattatctccattg

SEQ ID NO: 118743 - DNA, 25 bp, Homo sapien
ttaagtgtgtttcctctaccctatg

SEQ ID NO: 118744 - DNA, 25 bp, Homo sapien
ttaagtgtgtttgctctaccctatg

SEQ ID NO: 118745 - DNA, 25 bp, Homo sapien
tgacatgttcttacggtccgggtag

SEQ ID NO: 118746 - DNA, 25 bp, Homo sapien
tgacatgttctttcggtccgggtag

SEQ ID NO: 118747 - DNA, 25 bp, Homo sapien
gtagggtcctacatcgaccctccgg

SEQ ID NO: 118748 - DNA, 25 bp, Homo sapien
gtagggtcctacttcgaccctccgg

SEQ ID NO: 118749 - DNA, 25 bp, Homo sapien
cgggcggacgtcggtccacggtaag

SEQ ID NO: 118750 - DNA, 25 bp, Homo sapien
cgggcggacgtccgtccacggtaag

SEQ ID NO: 118751 - DNA, 25 bp, Homo sapien
tccgacactggtcgtccgaggatag

SEQ ID NO: 118752 - DNA, 25 bp, Homo sapien
tccgacactggtggtccgaggatag

SEQ ID NO: 118753 - DNA, 25 bp, Homo sapien
ctccctcagccatgtgtctaggtta

SEQ ID NO: 118754 - DNA, 25 bp, Homo sapien
ctccctcagccaagtgtctaggtta

SEQ ID NO: 118755 - DNA, 25 bp, Homo sapien
accctctcgtaagtgcgagcgcgtg

SEQ ID NO: 118756 - DNA, 25 bp, Homo sapien
accctctcgtaactgcgagcgcgtg

SEQ ID NO: 118757 - DNA, 25 bp, Homo sapien
acccaagttcgcagtgagtagacat

SEQ ID NO: 118758 - DNA, 25 bp, Homo sapien
acccaagttcgctgtgagtagacat

SEQ ID NO: 118759 - DNA, 25 bp, Homo sapien
tcctactaggtcaggtggtcgaaca

SEQ ID NO: 118760 - DNA, 25 bp, Homo sapien
tcctactaggtctggtggtcgaaca

SEQ ID NO: 118761 - DNA, 25 bp, Homo sapien
cttttattgacgaagtgcgactgac

SEQ ID NO: 118762 - DNA, 25 bp, Homo sapien
cttttattgacgtagtgcgactgac

SEQ ID NO: 118763 - DNA, 25 bp, Homo sapien
ggtcgagttcccttcgacagtagta

SEQ ID NO: 118764 - DNA, 25 bp, Homo sapien
ggtcgagttcccatcgacagtagta

SEQ ID NO: 118765 - DNA, 25 bp, Homo sapien
cgatccgtacctctgaagtcgagtg

SEQ ID NO: 118766 - DNA, 25 bp, Homo sapien
cgatccgtacctgtgaagtcgagtg

SEQ ID NO: 118767 - DNA, 25 bp, Homo sapien
ccaaagttcgtcttctctaggtgtg

SEQ ID NO: 118768 - DNA, 25 bp, Homo sapien
ccaaagttcgtcatctctaggtgtg

SEQ ID NO: 118769 - DNA, 25 bp, Homo sapien
atcgcaacagtttttcggacctatt

SEQ ID NO: 118770 - DNA, 25 bp, Homo sapien
atcgcaacagttattcggacctatt

SEQ ID NO: 118771 - DNA, 25 bp, Homo sapien
tgtcaactccgtgttcgttattatt

SEQ ID NO: 118772 - DNA, 25 bp, Homo sapien
tgtcaactccgtcttcgttattatt

SEQ ID NO: 118773 - DNA, 25 bp, Homo sapien
ttcctctcgcccttcgataggtctt

SEQ ID NO: 118774 - DNA, 25 bp, Homo sapien
ttcctctcgcccatcgataggtctt

SEQ ID NO: 118775 - DNA, 25 bp, Homo sapien
ctacaacgtcttccaagtaaggaca

SEQ ID NO: 118776 - DNA, 25 bp, Homo sapien
ctacaacgtcttgcaagtaaggaca

SEQ ID NO: 118777 - DNA, 25 bp, Homo sapien
gacgggtttatgacatgtacgtctt

SEQ ID NO: 118778 - DNA, 25 bp, Homo sapien
gacgggtttatgtcatgtacgtctt

SEQ ID NO: 118779 - DNA, 25 bp, Homo sapien
cctggggttttacctcatgacactt

SEQ ID NO: 118780 - DNA, 25 bp, Homo sapien
cctggggttttagctcatgacactt

SEQ ID NO: 118781 - DNA, 25 bp, Homo sapien
ctgggagtctttacgatattctatt

SEQ ID NO: 118782 - DNA, 25 bp, Homo sapien
ctgggagtcttttcgatattctatt

SEQ ID NO: 118783 - DNA, 25 bp, Homo sapien
ccccctgtcacttgtatattgagtt

SEQ ID NO: 118784 - DNA, 25 bp, Homo sapien
ccccctgtcactagtatattgagtt

SEQ ID NO: 118785 - DNA, 25 bp, Homo sapien
cccagggtgtttgagttattacagg

SEQ ID NO: 118786 - DNA, 25 bp, Homo sapien
cccagggtgtttcagttattacagg

SEQ ID NO: 118787 - DNA, 25 bp, Homo sapien
tccctaggggtttctaggatggaga

SEQ ID NO: 118788 - DNA, 25 bp, Homo sapien
tccctaggggttactaggatggaga

SEQ ID NO: 118789 - DNA, 25 bp, Homo sapien
tcccgtggtcttctcgtgtatcgga

SEQ ID NO: 118790 - DNA, 25 bp, Homo sapien
tcccgtggtcttgtcgtgtatcgga

SEQ ID NO: 118791 - DNA, 25 bp, Homo sapien
cccgtcttacagtagttctcctgta

SEQ ID NO: 118792 - DNA, 25 bp, Homo sapien
cccgtcttacagaagttctcctgta

SEQ ID NO: 118793 - DNA, 25 bp, Homo sapien
ttccattttaaaggttctgtcttcg

SEQ ID NO: 118794 - DNA, 25 bp, Homo sapien
ttccattttaaacgttctgtcttcg

SEQ ID NO: 118795 - DNA, 25 bp, Homo sapien
tattttcacttagagggttcttgtc

SEQ ID NO: 118796 - DNA, 25 bp, Homo sapien
tattttcacttacagggttcttgtc

SEQ ID NO: 118797 - DNA, 25 bp, Homo sapien
ttatcacgactcctgggtgtccttg

SEQ ID NO: 118798 - DNA, 25 bp, Homo sapien
ttatcacgactcgtgggtgtccttg

SEQ ID NO: 118799 - DNA, 25 bp, Homo sapien
ttatcaacttttggatctctctgag

SEQ ID NO: 118800 - DNA, 25 bp, Homo sapien
ttatcaacttttcgatctctctgag

SEQ ID NO: 118801 - DNA, 25 bp, Homo sapien
gtcaagtgtattcaatctcacgtaa

SEQ ID NO: 118802 - DNA, 25 bp, Homo sapien
gtcaagtgtattgaatctcacgtaa

SEQ ID NO: 118803 - DNA, 25 bp, Homo sapien
tagttaagtcccaaataccagtcga

SEQ ID NO: 118804 - DNA, 25 bp, Homo sapien
tagttaagtccctaataccagtcga

SEQ ID NO: 118805 - DNA, 25 bp, Homo sapien
gtatgacactaccatggtgcccgac

SEQ ID NO: 118806 - DNA, 25 bp, Homo sapien
gtatgacactacgatggtgcccgac

SEQ ID NO: 118807 - DNA, 25 bp, Homo sapien
tcaatgttacgacgtccacgacacg

SEQ ID NO: 118808 - DNA, 25 bp, Homo sapien
tcaatgttacgaggtccacgacacg

SEQ ID NO: 118809 - DNA, 25 bp, Homo sapien
attccttcttcagctgccgacacgt

SEQ ID NO: 118810 - DNA, 25 bp, Homo sapien
attccttcttcacctgccgacacgt

SEQ ID NO: 118811 - DNA, 25 bp, Homo sapien
aggtcgacggcgtccctcaggaact

SEQ ID NO: 118812 - DNA, 25 bp, Homo sapien
aggtcgacggcgaccctcaggaact

SEQ ID NO: 118813 - DNA, 25 bp, Homo sapien
aaagcccgaggaggtccaggtacgc

SEQ ID NO: 118814 - DNA, 25 bp, Homo sapien
aaagcccgaggacgtccaggtacgc

SEQ ID NO: 118815 - DNA, 25 bp, Homo sapien
gaacaatggtaagacgacatgactg

SEQ ID NO: 118816 - DNA, 25 bp, Homo sapien
gaacaatggtaacacgacatgactg

SEQ ID NO: 118817 - DNA, 25 bp, Homo sapien
tatgtcgtcagacctcacactttcg

SEQ ID NO: 118818 - DNA, 25 bp, Homo sapien
tatgtcgtcagagctcacactttcg

SEQ ID NO: 118819 - DNA, 25 bp, Homo sapien
aagtgtgcggtcgaatgacagtttc

SEQ ID NO: 118820 - DNA, 25 bp, Homo sapien
aagtgtgcggtccaatgacagtttc

SEQ ID NO: 118821 - DNA, 25 bp, Homo sapien
gtatatgacttctagtgtgggttcg

SEQ ID NO: 118822 - DNA, 25 bp, Homo sapien
gtatatgacttcaagtgtgggttcg

SEQ ID NO: 118823 - DNA, 25 bp, Homo sapien
tccgaatcggtgaggtcctttccgt

SEQ ID NO: 118824 - DNA, 25 bp, Homo sapien
tccgaatcggtgtggtcctttccgt

SEQ ID NO: 118825 - DNA, 25 bp, Homo sapien
atcgcaccctggacgggtcttgtcc

SEQ ID NO: 118826 - DNA, 25 bp, Homo sapien
atcgcaccctggtcgggtcttgtcc

SEQ ID NO: 118827 - DNA, 25 bp, Homo sapien
tcggaagacaagaatgtgcccgacc

SEQ ID NO: 118828 - DNA, 25 bp, Homo sapien
tcggaagacaagtatgtgcccgacc

SEQ ID NO: 118829 - DNA, 25 bp, Homo sapien
agaatataacacgtattgccgataa

SEQ ID NO: 118830 - DNA, 25 bp, Homo sapien
agaatataacacctattgccgataa

SEQ ID NO: 118831 - DNA, 25 bp, Homo sapien
aaaaatcagagtagacccacgttcc

SEQ ID NO: 118832 - DNA, 25 bp, Homo sapien
aaaaatcagagttgacccacgttcc

SEQ ID NO: 118833 - DNA, 25 bp, Homo sapien
aagaatacatttcactccatgtgcg

SEQ ID NO: 118834 - DNA, 25 bp, Homo sapien
aagaatacatttgactccatgtgcg

SEQ ID NO: 118835 - DNA, 25 bp, Homo sapien
actgaaaagatatccccagtataag

SEQ ID NO: 118836 - DNA, 25 bp, Homo sapien
actgaaaagataaccccagtataag

SEQ ID NO: 118837 - DNA, 25 bp, Homo sapien
aaaaaagcttctccaagactagagt

SEQ ID NO: 118838 - DNA, 25 bp, Homo sapien
aaaaaagcttctgcaagactagagt

SEQ ID NO: 118839 - DNA, 25 bp, Homo sapien
aagtacgcggagactggtaatacgt

SEQ ID NO: 118840 - DNA, 25 bp, Homo sapien
aagtacgcggagtctggtaatacgt

SEQ ID NO: 118841 - DNA, 25 bp, Homo sapien
ggcactacaagaaccactgaaaacg

SEQ ID NO: 118842 - DNA, 25 bp, Homo sapien
ggcactacaagatccactgaaaacg

SEQ ID NO: 118843 - DNA, 25 bp, Homo sapien
ggagggcctctggtccttgaaccag

SEQ ID NO: 118844 - DNA, 25 bp, Homo sapien
ggagggcctctgctccttgaaccag

SEQ ID NO: 118845 - DNA, 25 bp, Homo sapien
gggcgttcacctcaaagtacaggag

SEQ ID NO: 118846 - DNA, 25 bp, Homo sapien
gggcgttcacctgaaagtacaggag

SEQ ID NO: 118847 - DNA, 25 bp, Homo sapien
ggaaagaccctgatcgagtaacgga

SEQ ID NO: 118848 - DNA, 25 bp, Homo sapien
ggaaagaccctgttcgagtaacgga

SEQ ID NO: 118849 - DNA, 25 bp, Homo sapien
taaaagacgtctcttctgatgtcaa

SEQ ID NO: 118850 - DNA, 25 bp, Homo sapien
taaaagacgtctgttctgatgtcaa

SEQ ID NO: 118851 - DNA, 25 bp, Homo sapien
aaggacggtgtttgtcgtcaaaagc

SEQ ID NO: 118852 - DNA, 25 bp, Homo sapien
aaggacggtgttagtcgtcaaaagc

SEQ ID NO: 118853 - DNA, 25 bp, Homo sapien
gaaagggggttcaacgttctttaac

SEQ ID NO: 118854 - DNA, 25 bp, Homo sapien
gaaagggggttctacgttctttaac

SEQ ID NO: 118855 - DNA, 25 bp, Homo sapien
actcttctcggtccaggatcttcac

SEQ ID NO: 118856 - DNA, 25 bp, Homo sapien
actcttctcggtgcaggatcttcac

SEQ ID NO: 118857 - DNA, 25 bp, Homo sapien
aatgacgagttcgttcatgatttca

SEQ ID NO: 118858 - DNA, 25 bp, Homo sapien
aatgacgagttccttcatgatttca

SEQ ID NO: 118859 - DNA, 25 bp, Homo sapien
acagagatcctctcatggtcttcga

SEQ ID NO: 118860 - DNA, 25 bp, Homo sapien
acagagatcctcacatggtcttcga

SEQ ID NO: 118861 - DNA, 25 bp, Homo sapien
gagtaaccttgactgtactacttcc

SEQ ID NO: 118862 - DNA, 25 bp, Homo sapien
gagtaaccttgagtgtactacttcc

SEQ ID NO: 118863 - DNA, 25 bp, Homo sapien
gaccaaagacctctgtctacatcta

SEQ ID NO: 118864 - DNA, 25 bp, Homo sapien
gaccaaagacctgtgtctacatcta

SEQ ID NO: 118865 - DNA, 25 bp, Homo sapien
ctgtcagaacctccacgacgaatga

SEQ ID NO: 118866 - DNA, 25 bp, Homo sapien
ctgtcagaacctgcacgacgaatga

SEQ ID NO: 118867 - DNA, 25 bp, Homo sapien
gtagtaacgtcttcgcaactttata

SEQ ID NO: 118868 - DNA, 25 bp, Homo sapien
gtagtaacgtctacgcaactttata

SEQ ID NO: 118869 - DNA, 25 bp, Homo sapien
aagactctgagtcagtcgactccta

SEQ ID NO: 118870 - DNA, 25 bp, Homo sapien
aagactctgagtgagtcgactccta

SEQ ID NO: 118871 - DNA, 25 bp, Homo sapien
aatatgtgtcgtcatagacaattca

SEQ ID NO: 118872 - DNA, 25 bp, Homo sapien
aatatgtgtcgtgatagacaattca

SEQ ID NO: 118873 - DNA, 25 bp, Homo sapien
ggtacgacatcagttttcaatttac
